United States Patent Application Publication US 2007/0042381 A1 - sequence listing, part 70

SEQ ID NO: 3188996 - RNA, 19 nt, Human
uuuuuguagagccaggguc

SEQ ID NO: 3188997 - RNA, 12 nt, Human
uuuuuaugugug

SEQ ID NO: 3188998 - RNA, 15 nt, Human
uuuuuauuaaucacu

SEQ ID NO: 3188999 - RNA, 19 nt, Human
uuuuuauuaaucacugugu

SEQ ID NO: 3189000 - RNA, 21 nt, Human
uuuuuauuaaucacuguguau

SEQ ID NO: 3189001 - RNA, 12 nt, Human
auuaccagggac

SEQ ID NO: 3189002 - RNA, 14 nt, Human
auuaccauuuguua

SEQ ID NO: 3189003 - RNA, 19 nt, Human
auuaccauuuguuaauauc

SEQ ID NO: 3189004 - RNA, 21 nt, Human
auuaauacucuauuuuuacau

SEQ ID NO: 3189005 - RNA, 15 nt, Human
auuacauaauuuagu

SEQ ID NO: 3189006 - RNA, 22 nt, Human
auuacauaauuuaguuguuucu

SEQ ID NO: 3189007 - RNA, 23 nt, Human
auuacauaauuuaguuguuucua

SEQ ID NO: 3189008 - RNA, 14 nt, Human
auuaaguacuaugu

SEQ ID NO: 3189009 - RNA, 12 nt, Human
auuaauaaaaag

SEQ ID NO: 3189010 - RNA, 13 nt, Human
auuaauaaaaaga

SEQ ID NO: 3189011 - RNA, 22 nt, Human
auguggaagugugggucugugu

SEQ ID NO: 3189012 - RNA, 23 nt, Human
auguggaagugugggucugugug

SEQ ID NO: 3189013 - RNA, 15 nt, Human
auguggaaguguggg

SEQ ID NO: 3189014 - RNA, 16 nt, Human
auguggaagugugggu

SEQ ID NO: 3189015 - RNA, 13 nt, Human
auguggaagugug

SEQ ID NO: 3189016 - RNA, 20 nt, Human
auguggaguucaucuugaau

SEQ ID NO: 3189017 - RNA, 19 nt, Human
auguggagucagccucgca

SEQ ID NO: 3189018 - RNA, 16 nt, Human
auguggacuuaggaag

SEQ ID NO: 3189019 - RNA, 17 nt, Human
auguggacuuaggaagg

SEQ ID NO: 3189020 - RNA, 24 nt, Human
auguggaguucaucuugaauugua

SEQ ID NO: 3189021 - RNA, 10 nt, Human
augugugugu

SEQ ID NO: 3189022 - RNA, 12 nt, Human
augugugugugc

SEQ ID NO: 3189023 - RNA, 19 nt, Human
augugugugaugugacauu

SEQ ID NO: 3189024 - RNA, 18 nt, Human
augugugugaugugacau

SEQ ID NO: 3189025 - RNA, 20 nt, Human
augugugugaugugacauuu

SEQ ID NO: 3189026 - RNA, 16 nt, Human
uuuuaaguuugcacuc

SEQ ID NO: 3189027 - RNA, 15 nt, Human
uuuuaaguuugcacu

SEQ ID NO: 3189028 - RNA, 13 nt, Human
uuuuaaguuugca

SEQ ID NO: 3189029 - RNA, 20 nt, Human
auggggcccugccuccuuug

SEQ ID NO: 3189030 - RNA, 19 nt, Human
auggggcugacagcacuaa

SEQ ID NO: 3189031 - RNA, 18 nt, Human
augugccuaaauaaguua

SEQ ID NO: 3189032 - RNA, 14 nt, Human
augugccuaaauaa

SEQ ID NO: 3189033 - RNA, 17 nt, Human
augugccuuauguugaa

SEQ ID NO: 3189034 - RNA, 21 nt, Human
augugccuuauguugaaaaaa

SEQ ID NO: 3189035 - RNA, 23 nt, Human
augugccugcuucagccucccac

SEQ ID NO: 3189036 - RNA, 15 nt, Human
augugccugcuucag

SEQ ID NO: 3189037 - RNA, 22 nt, Human
augugccagguuuuuggucuga

SEQ ID NO: 3189038 - RNA, 21 nt, Human
augugccagguuuuuggucug

SEQ ID NO: 3189039 - RNA, 13 nt, Human
auguguucuuauu

SEQ ID NO: 3189040 - RNA, 13 nt, Human
auguguugccacu

SEQ ID NO: 3189041 - RNA, 19 nt, Human
auguguugccacuuuccaa

SEQ ID NO: 3189042 - RNA, 13 nt, Human
auguguuaaucuu

SEQ ID NO: 3189043 - RNA, 14 nt, Human
auguguuaaucuua

SEQ ID NO: 3189044 - RNA, 17 nt, Human
auguguuaaucuuaaug

SEQ ID NO: 3189045 - RNA, 20 nt, Human
auguguuaaucuuaauguau

SEQ ID NO: 3189046 - RNA, 22 nt, Human
auguguuaaucuuaauguauau

SEQ ID NO: 3189047 - RNA, 11 nt, Human
auguguuuaga

SEQ ID NO: 3189048 - RNA, 14 nt, Human
auguuaaaauaaau

SEQ ID NO: 3189049 - RNA, 18 nt, Human
auguuaaaauaaaugguu

SEQ ID NO: 3189050 - RNA, 19 nt, Human
auguuaauugauagaauaa

SEQ ID NO: 3189051 - RNA, 20 nt, Human
auguugcccaggcaggucuu

SEQ ID NO: 3189052 - RNA, 13 nt, Human
uuuuacuuggaaa

SEQ ID NO: 3189053 - RNA, 18 nt, Human
uuuuagaaacaauaugga

SEQ ID NO: 3189054 - RNA, 22 nt, Human
uuuuacuuuuuuuuuauuuuau

SEQ ID NO: 3189055 - RNA, 12 nt, Human
uuuuacuuuuuu

SEQ ID NO: 3189056 - RNA, 16 nt, Human
uuuuacuuuuuuuagu

SEQ ID NO: 3189057 - RNA, 17 nt, Human
uuuuacuuuuuuuagua

SEQ ID NO: 3189058 - RNA, 17 nt, Human
uuuuagaaauauucaca

SEQ ID NO: 3189059 - RNA, 16 nt, Human
auguugccaaaauggu

SEQ ID NO: 3189060 - RNA, 12 nt, Human
auguugcccagg

SEQ ID NO: 3189061 - RNA, 17 nt, Human
auguugcccaggcaggu

SEQ ID NO: 3189062 - RNA, 16 nt, Human
auguugcccaggcagg

SEQ ID NO: 3189063 - RNA, 22 nt, Human
auguugccaaaaugguggccug

SEQ ID NO: 3189064 - RNA, 18 nt, Human
auguucaucaaugaauga

SEQ ID NO: 3189065 - RNA, 13 nt, Human
uuuuccaaaacaa

SEQ ID NO: 3189066 - RNA, 19 nt, Human
uuuuccaaaacaaaaagau

SEQ ID NO: 3189067 - RNA, 14 nt, Human
uuuucauugcugug

SEQ ID NO: 3189068 - RNA, 17 nt, Human
uuuucaugcuuuaucaa

SEQ ID NO: 3189069 - RNA, 13 nt, Human
uuuucauuuuaca

SEQ ID NO: 3189070 - RNA, 20 nt, Human
uuuucauuuaggugaggaag

SEQ ID NO: 3189071 - RNA, 16 nt, Human
uuuucaugcuuuauca

SEQ ID NO: 3189072 - RNA, 22 nt, Human
uuuucauauuuuaauuucaagc

SEQ ID NO: 3189073 - RNA, 19 nt, Human
uuuucauauuuuaauuuca

SEQ ID NO: 3189074 - RNA, 16 nt, Human
uuuucauauuuuaauu

SEQ ID NO: 3189075 - RNA, 15 nt, Human
uuuucauauuuuaau

SEQ ID NO: 3189076 - RNA, 17 nt, Human
uuuucugaaucuucuga

SEQ ID NO: 3189077 - RNA, 16 nt, Human
uuuucugaaucuucug

SEQ ID NO: 3189078 - RNA, 15 nt, Human
uuuucugaaucuucu

SEQ ID NO: 3189079 - RNA, 14 nt, Human
uuuucugaaguugu

SEQ ID NO: 3189080 - RNA, 18 nt, Human
uuuucugagaaagacuau

SEQ ID NO: 3189081 - RNA, 15 nt, Human
uuuucugagaaagac

SEQ ID NO: 3189082 - RNA, 18 nt, Human
uuuucugauauguuugua

SEQ ID NO: 3189083 - RNA, 15 nt, Human
uuuuaggcaaguuuu

SEQ ID NO: 3189084 - RNA, 16 nt, Human
uuuuauuuauauguau

SEQ ID NO: 3189085 - RNA, 14 nt, Human
uuuuauuuauaugu

SEQ ID NO: 3189086 - RNA, 14 nt, Human
uuuuauuucaaugu

SEQ ID NO: 3189087 - RNA, 18 nt, Human
uuuuauuucuccuuuugu

SEQ ID NO: 3189088 - RNA, 16 nt, Human
uuuuauuucuccuuuu

SEQ ID NO: 3189089 - RNA, 14 nt, Human
uuuuauuucuccuu

SEQ ID NO: 3189090 - RNA, 14 nt, Human
uuuucaguguacau

SEQ ID NO: 3189091 - RNA, 15 nt, Human
uuuucaguucaaagu

SEQ ID NO: 3189092 - RNA, 24 nt, Human
uuuucaguucaaagucaugauguu

SEQ ID NO: 3189093 - RNA, 23 nt, Human
uuuucaguucaaagucaugaugu

SEQ ID NO: 3189094 - RNA, 13 nt, Human
uuuucauaucauu

SEQ ID NO: 3189095 - RNA, 16 nt, Human
uuuucauaucauuucu

SEQ ID NO: 3189096 - RNA, 16 nt, Human
uuuucauaggaagaca

SEQ ID NO: 3189097 - RNA, 22 nt, Human
uuuucaguuuauuugaaccaau

SEQ ID NO: 3189098 - RNA, 19 nt, Human
uuuucauaagauauuuuau

SEQ ID NO: 3189099 - RNA, 17 nt, Human
uuuucauaagauauuuu

SEQ ID NO: 3189100 - RNA, 16 nt, Human
uuuucauaagauauuu

SEQ ID NO: 3189101 - RNA, 12 nt, Human
auguuuaaaaca

SEQ ID NO: 3189102 - RNA, 14 nt, Human
auguuuaaaacacc

SEQ ID NO: 3189103 - RNA, 16 nt, Human
auguuuaaaacaccuu

SEQ ID NO: 3189104 - RNA, 21 nt, Human
auguuuaaaacaccuucuaua

SEQ ID NO: 3189105 - RNA, 21 nt, Human
auguuguuuuguacagaugug

SEQ ID NO: 3189106 - RNA, 19 nt, Human
auguuguuuuguacagaug

SEQ ID NO: 3189107 - RNA, 18 nt, Human
auguuguuuuguacagau

SEQ ID NO: 3189108 - RNA, 17 nt, Human
auguuguuuuguacaga

SEQ ID NO: 3189109 - RNA, 15 nt, Human
auguuguuuuguaca

SEQ ID NO: 3189110 - RNA, 11 nt, Human
uuuucugugug

SEQ ID NO: 3189111 - RNA, 12 nt, Human
uuuucugugugu

SEQ ID NO: 3189112 - RNA, 10 nt, Human
uuuucugugu

SEQ ID NO: 3189113 - RNA, 15 nt, Human
uuuucuguguguucc

SEQ ID NO: 3189114 - RNA, 16 nt, Human
uuuucuguguguuccu

SEQ ID NO: 3189115 - RNA, 17 nt, Human
uuuucuguguguuccug

SEQ ID NO: 3189116 - RNA, 13 nt, Human
auguuuauguaaa

SEQ ID NO: 3189117 - RNA, 12 nt, Human
auguuuauguaa

SEQ ID NO: 3189118 - RNA, 22 nt, Human
auguuuaaaacaccuucuauag

SEQ ID NO: 3189119 - RNA, 21 nt, Human
auguuuauguaaacaaaucuu

SEQ ID NO: 3189120 - RNA, 23 nt, Human
auguuuauguaaacaaaucuuuc

SEQ ID NO: 3189121 - RNA, 13 nt, Human
auguuuauuaaau

SEQ ID NO: 3189122 - RNA, 17 nt, Human
auguuuauuaaaugcuu

SEQ ID NO: 3189123 - RNA, 19 nt, Human
auguuuauuaaaugcuuca

SEQ ID NO: 3189124 - RNA, 17 nt, Human
auguuuugguccacuuu

SEQ ID NO: 3189125 - RNA, 23 nt, Human
auguuuugguccacuuuuccagu

SEQ ID NO: 3189126 - RNA, 22 nt, Human
auguuuugguccacuuuuccag

SEQ ID NO: 3189127 - RNA, 23 nt, Human
auguuuugcauguaaaagccuag

SEQ ID NO: 3189128 - RNA, 23 nt, Human
auuaaaacacaacaucuuuuucu

SEQ ID NO: 3189129 - RNA, 12 nt, Human
auguuuuuaaaa

SEQ ID NO: 3189130 - RNA, 16 nt, Human
auguuuuguaaacuuu

SEQ ID NO: 3189131 - RNA, 15 nt, Human
auguuuuguaaacuu

SEQ ID NO: 3189132 - RNA, 21 nt, Human
auguuuuguaaacuuugaaau

SEQ ID NO: 3189133 - RNA, 20 nt, Human
auguuuuguaaacuuugaaa

SEQ ID NO: 3189134 - RNA, 18 nt, Human
auguuuuguaaacuuuga

SEQ ID NO: 3189135 - RNA, 17 nt, Human
auguuuuguaaacuuug

SEQ ID NO: 3189136 - RNA, 23 nt, Human
auuaaaagaaaauaaaaaaaaga

SEQ ID NO: 3189137 - RNA, 21 nt, Human
auuaaaaccugggauuauaua

SEQ ID NO: 3189138 - RNA, 13 nt, Human
auuaaacuguuaa

SEQ ID NO: 3189139 - RNA, 17 nt, Human
auuaaacuguuaacuua

SEQ ID NO: 3189140 - RNA, 17 nt, Human
auuaaacuuccaaagaa

SEQ ID NO: 3189141 - RNA, 21 nt, Human
auuaaacuuccaaagaaaguu

SEQ ID NO: 3189142 - RNA, 17 nt, Human
ugagagcugugcaucag

SEQ ID NO: 3189143 - RNA, 10 nt, Human
ugagaggaaa

SEQ ID NO: 3189144 - RNA, 14 nt, Human
ugagagcugggugu

SEQ ID NO: 3189145 - RNA, 15 nt, Human
ugagagcgcagcccg

SEQ ID NO: 3189146 - RNA, 16 nt, Human
ugagagcgcagcccgc

SEQ ID NO: 3189147 - RNA, 11 nt, Human
ugagaggaaau

SEQ ID NO: 3189148 - RNA, 12 nt, Human
ugagaggaaauc

SEQ ID NO: 3189149 - RNA, 13 nt, Human
ugagaggaaauca

SEQ ID NO: 3189150 - RNA, 14 nt, Human
ugagaggaaaucac

SEQ ID NO: 3189151 - RNA, 16 nt, Human
ugagagagauguguaa

SEQ ID NO: 3189152 - RNA, 14 nt, Human
ugagagagaugugu

SEQ ID NO: 3189153 - RNA, 21 nt, Human
ugagagaggcuaaaauguuuu

SEQ ID NO: 3189154 - RNA, 20 nt, Human
ugagagaggcuaaaauguuu

SEQ ID NO: 3189155 - RNA, 19 nt, Human
ugagagaggcuaaaauguu

SEQ ID NO: 3189156 - RNA, 18 nt, Human
ugagagaggcuaaaaugu

SEQ ID NO: 3189157 - RNA, 22 nt, Human
ugagagagauguguaauuuuuc

SEQ ID NO: 3189158 - RNA, 16 nt, Human
ugagagagcagccagg

SEQ ID NO: 3189159 - RNA, 17 nt, Human
ugagagagcagccagga

SEQ ID NO: 3189160 - RNA, 14 nt, Human
ugagagaugcugua

SEQ ID NO: 3189161 - RNA, 23 nt, Human
ugagagaugcuguagacaucugu

SEQ ID NO: 3189162 - RNA, 18 nt, Human
ugagagagagucuuacuc

SEQ ID NO: 3189163 - RNA, 13 nt, Human
ugagaugugaaca

SEQ ID NO: 3189164 - RNA, 20 nt, Human
ugagaugcuagaacucccuu

SEQ ID NO: 3189165 - RNA, 16 nt, Human
ugagaggacacucccg

SEQ ID NO: 3189166 - RNA, 17 nt, Human
ugagaggaaaucaccga

SEQ ID NO: 3189167 - RNA, 23 nt, Human
ugagaggacuuuucuuuguggcu

SEQ ID NO: 3189168 - RNA, 24 nt, Human
ugagaugugaacacaucagcuugc

SEQ ID NO: 3189169 - RNA, 22 nt, Human
ugagaugguaugcacaauucca

SEQ ID NO: 3189170 - RNA, 20 nt, Human
ugagaugguaugcacaauuc

SEQ ID NO: 3189171 - RNA, 15 nt, Human
ugagauguguaucag

SEQ ID NO: 3189172 - RNA, 17 nt, Human
ugagauguguaucagug

SEQ ID NO: 3189173 - RNA, 18 nt, Human
ugagauguguaucagugu

SEQ ID NO: 3189174 - RNA, 19 nt, Human
ugagauguguaucaguguu

SEQ ID NO: 3189175 - RNA, 20 nt, Human
ugagauguguaucaguguuu

SEQ ID NO: 3189176 - RNA, 19 nt, Human
ugagaugugaacacaucag

SEQ ID NO: 3189177 - RNA, 18 nt, Human
ugagaugugaacacauca

SEQ ID NO: 3189178 - RNA, 20 nt, Human
ugagaagcagaggaaggaga

SEQ ID NO: 3189179 - RNA, 13 nt, Human
ugagacagcccgg

SEQ ID NO: 3189180 - RNA, 21 nt, Human
ugagacagaguuuucacucuu

SEQ ID NO: 3189181 - RNA, 11 nt, Human
ugagacagagu

SEQ ID NO: 3189182 - RNA, 20 nt, Human
ugagacagaaucucgcucug

SEQ ID NO: 3189183 - RNA, 17 nt, Human
ugagaaugaacaaagac

SEQ ID NO: 3189184 - RNA, 15 nt, Human
ugagaaugaacaaag

SEQ ID NO: 3189185 - RNA, 14 nt, Human
ugagaaugaacaaa

SEQ ID NO: 3189186 - RNA, 13 nt, Human
ugagaaugaacaa

SEQ ID NO: 3189187 - RNA, 15 nt, Human
ugagacagcagucuu

SEQ ID NO: 3189188 - RNA, 20 nt, Human
ugagacucugucucagucca

SEQ ID NO: 3189189 - RNA, 20 nt, Human
ugagacucugucucaaaaaa

SEQ ID NO: 3189190 - RNA, 22 nt, Human
ugagacagcccgggcucugccu

SEQ ID NO: 3189191 - RNA, 17 nt, Human
ugagacagcccgggcuc

SEQ ID NO: 3189192 - RNA, 18 nt, Human
ugagacagcccgggcucu

SEQ ID NO: 3189193 - RNA, 19 nt, Human
ugagacagcccgggcucug

SEQ ID NO: 3189194 - RNA, 20 nt, Human
ugagacagcccgggcucugc

SEQ ID NO: 3189195 - RNA, 19 nt, Human
agcaaggucuugcucuccu

SEQ ID NO: 3189196 - RNA, 20 nt, Human
agcaaggucuugcucuccua

SEQ ID NO: 3189197 - RNA, 22 nt, Human
agcaagggugaugggaaagcau

SEQ ID NO: 3189198 - RNA, 20 nt, Human
agcaagggugaugggaaagc

SEQ ID NO: 3189199 - RNA, 16 nt, Human
agcaagugagagcugg

SEQ ID NO: 3189200 - RNA, 15 nt, Human
agcaagugagagcug

SEQ ID NO: 3189201 - RNA, 16 nt, Human
agcaagggugauggga

SEQ ID NO: 3189202 - RNA, 20 nt, Human
agcaaggcgcuaacuugcuu

SEQ ID NO: 3189203 - RNA, 17 nt, Human
agcaaggcgcuaacuug

SEQ ID NO: 3189204 - RNA, 12 nt, Human
agcaaggccacc

SEQ ID NO: 3189205 - RNA, 15 nt, Human
agcaaggccaccucu

SEQ ID NO: 3189206 - RNA, 14 nt, Human
agcaaggccaccuc

SEQ ID NO: 3189207 - RNA, 21 nt, Human
agcaaggccaccucuuccugg

SEQ ID NO: 3189208 - RNA, 19 nt, Human
agcaaggccaccucuuccu

SEQ ID NO: 3189209 - RNA, 22 nt, Human
agcaaggccaccucuuccuggc

SEQ ID NO: 3189210 - RNA, 16 nt, Human
agcaaggaagguaaaa

SEQ ID NO: 3189211 - RNA, 22 nt, Human
agcaaggaagguaaaaaguuaa

SEQ ID NO: 3189212 - RNA, 21 nt, Human
agcaaggaagguaaaaaguua

SEQ ID NO: 3189213 - RNA, 23 nt, Human
agcaagcuuuuacaacagugcug

SEQ ID NO: 3189214 - RNA, 22 nt, Human
agcaagcuuuuacaacagugcu

SEQ ID NO: 3189215 - RNA, 13 nt, Human
ugagccacugcac

SEQ ID NO: 3189216 - RNA, 12 nt, Human
ugagccacugca

SEQ ID NO: 3189217 - RNA, 14 nt, Human
ugagcauuagauuu

SEQ ID NO: 3189218 - RNA, 16 nt, Human
ugagcauuagauuucu

SEQ ID NO: 3189219 - RNA, 16 nt, Human
ugagcauuacaggcaa

SEQ ID NO: 3189220 - RNA, 18 nt, Human
ugagccagauuucacucu

SEQ ID NO: 3189221 - RNA, 19 nt, Human
ugagccagauuucacucuc

SEQ ID NO: 3189222 - RNA, 14 nt, Human
ugagccacugcacc

SEQ ID NO: 3189223 - RNA, 21 nt, Human
ugagccaccgugccuggccac

SEQ ID NO: 3189224 - RNA, 20 nt, Human
ugagccagauuucacucucc

SEQ ID NO: 3189225 - RNA, 16 nt, Human
agcaccuccugccucg

SEQ ID NO: 3189226 - RNA, 14 nt, Human
agcaccuccugccu

SEQ ID NO: 3189227 - RNA, 13 nt, Human
agcaccuccugcc

SEQ ID NO: 3189228 - RNA, 17 nt, Human
agcaccuagccucgcuc

SEQ ID NO: 3189229 - RNA, 16 nt, Human
agcaccaucucuccuc

SEQ ID NO: 3189230 - RNA, 16 nt, Human
agcaccauccccuccg

SEQ ID NO: 3189231 - RNA, 23 nt, Human
agcacccauccaccguccccucc

SEQ ID NO: 3189232 - RNA, 14 nt, Human
agcacccauuucaa

SEQ ID NO: 3189233 - RNA, 21 nt, Human
agcacccauuucaauguguau

SEQ ID NO: 3189234 - RNA, 23 nt, Human
agcacaugccucucucaggccaa

SEQ ID NO: 3189235 - RNA, 15 nt, Human
agcaccauccccucc

SEQ ID NO: 3189236 - RNA, 14 nt, Human
agcaccauccccuc

SEQ ID NO: 3189237 - RNA, 12 nt, Human
agcacccugagg

SEQ ID NO: 3189238 - RNA, 13 nt, Human
agcacccugaggg

SEQ ID NO: 3189239 - RNA, 14 nt, Human
agcacccugagggc

SEQ ID NO: 3189240 - RNA, 15 nt, Human
agcacccugagggcg

SEQ ID NO: 3189241 - RNA, 16 nt, Human
agcaccgaauauugag

SEQ ID NO: 3189242 - RNA, 18 nt, Human
agcaccgaauauugagca

SEQ ID NO: 3189243 - RNA, 18 nt, Human
agcaccgccucuucccgc

SEQ ID NO: 3189244 - RNA, 16 nt, Human
agcaccgccucuuccc

SEQ ID NO: 3189245 - RNA, 19 nt, Human
agcacaugccucucucagg

SEQ ID NO: 3189246 - RNA, 20 nt, Human
agcacaugccucucucaggc

SEQ ID NO: 3189247 - RNA, 21 nt, Human
agcacaugccucucucaggcc

SEQ ID NO: 3189248 - RNA, 22 nt, Human
agcacaugccucucucaggcca

SEQ ID NO: 3189249 - RNA, 18 nt, Human
agcacaugccucucucag

SEQ ID NO: 3189250 - RNA, 16 nt, Human
agcacaugccucucuc

SEQ ID NO: 3189251 - RNA, 23 nt, Human
agcacaggcugagugcaggccca

SEQ ID NO: 3189252 - RNA, 22 nt, Human
agcacaggcugagugcaggccc

SEQ ID NO: 3189253 - RNA, 21 nt, Human
agcacaggcugagugcaggcc

SEQ ID NO: 3189254 - RNA, 20 nt, Human
agcacaggcugagugcaggc

SEQ ID NO: 3189255 - RNA, 19 nt, Human
agcacaggcugagugcagg

SEQ ID NO: 3189256 - RNA, 12 nt, Human
agcacaggcuga

SEQ ID NO: 3189257 - RNA, 18 nt, Human
agcacaggcugagugcag

SEQ ID NO: 3189258 - RNA, 21 nt, Human
agcacagcuucauuuccugug

SEQ ID NO: 3189259 - RNA, 16 nt, Human
agcacagcuucauuuc

SEQ ID NO: 3189260 - RNA, 12 nt, Human
agcaauauguca

SEQ ID NO: 3189261 - RNA, 12 nt, Human
agcaauauucuu

SEQ ID NO: 3189262 - RNA, 13 nt, Human
agcaauaucugcu

SEQ ID NO: 3189263 - RNA, 21 nt, Human
agcaauauucuuggagauuga

SEQ ID NO: 3189264 - RNA, 13 nt, Human
agcaauauuguau

SEQ ID NO: 3189265 - RNA, 19 nt, Human
agcaauauuguauauuuuu

SEQ ID NO: 3189266 - RNA, 21 nt, Human
agcaauauuguauauuuuuau

SEQ ID NO: 3189267 - RNA, 17 nt, Human
agcaagugagagcuggg

SEQ ID NO: 3189268 - RNA, 16 nt, Human
agcaauaauuucugua

SEQ ID NO: 3189269 - RNA, 12 nt, Human
agcaauaauuuc

SEQ ID NO: 3189270 - RNA, 15 nt, Human
ugacagguuugggac

SEQ ID NO: 3189271 - RNA, 22 nt, Human
ugacagggcacaccgggcacuc

SEQ ID NO: 3189272 - RNA, 21 nt, Human
ugacagggcacaccgggcacu

SEQ ID NO: 3189273 - RNA, 19 nt, Human
ugacaggcaaugcuggcug

SEQ ID NO: 3189274 - RNA, 17 nt, Human
ugacaggcaaugcuggc

SEQ ID NO: 3189275 - RNA, 19 nt, Human
ugacagccccucccuccuc

SEQ ID NO: 3189276 - RNA, 11 nt, Human
ugacagccccu

SEQ ID NO: 3189277 - RNA, 14 nt, Human
ugacagccagaacu

SEQ ID NO: 3189278 - RNA, 13 nt, Human
ugacauguuuuau

SEQ ID NO: 3189279 - RNA, 13 nt, Human
ugacauuugucau

SEQ ID NO: 3189280 - RNA, 15 nt, Human
ugacauuugucauuu

SEQ ID NO: 3189281 - RNA, 14 nt, Human
ugacauuugucauu

SEQ ID NO: 3189282 - RNA, 19 nt, Human
ugacauuugucauuuucau

SEQ ID NO: 3189283 - RNA, 18 nt, Human
ugacauuugucauuuuca

SEQ ID NO: 3189284 - RNA, 17 nt, Human
ugacauuugucauuuuc

SEQ ID NO: 3189285 - RNA, 16 nt, Human
ugacauuugucauuuu

SEQ ID NO: 3189286 - RNA, 15 nt, Human
ugacacuuaaaaaug

SEQ ID NO: 3189287 - RNA, 22 nt, Human
ugacagagugagacucugucuc

SEQ ID NO: 3189288 - RNA, 22 nt, Human
ugacagcacuaaacuuggugcu

SEQ ID NO: 3189289 - RNA, 19 nt, Human
ugacacgaauauugcugau

SEQ ID NO: 3189290 - RNA, 16 nt, Human
ugacacgaauauugcu

SEQ ID NO: 3189291 - RNA, 21 nt, Human
agaugcuagaacucccuuuca

SEQ ID NO: 3189292 - RNA, 15 nt, Human
agaugcuagaacucc

SEQ ID NO: 3189293 - RNA, 14 nt, Human
agaugcauuuggaa

SEQ ID NO: 3189294 - RNA, 19 nt, Human
agaugcuagaacucccuuu

SEQ ID NO: 3189295 - RNA, 21 nt, Human
agaucucccacaugccagggg

SEQ ID NO: 3189296 - RNA, 13 nt, Human
agaucucaggucc

SEQ ID NO: 3189297 - RNA, 13 nt, Human
agaucuaaaaaua

SEQ ID NO: 3189298 - RNA, 20 nt, Human
agaucuaaaaauaacuguaa

SEQ ID NO: 3189299 - RNA, 22 nt, Human
ugacauuuguuugguuauagug

SEQ ID NO: 3189300 - RNA, 15 nt, Human
ugacauuuguuuggu

SEQ ID NO: 3189301 - RNA, 20 nt, Human
ugacauuugucauuuucauu

SEQ ID NO: 3189302 - RNA, 14 nt, Human
ugaccaaguauaaa

SEQ ID NO: 3189303 - RNA, 18 nt, Human
ugaccaaguauaaacuuu

SEQ ID NO: 3189304 - RNA, 14 nt, Human
agauccuaagaugu

SEQ ID NO: 3189305 - RNA, 16 nt, Human
agauccuaagaugugu

SEQ ID NO: 3189306 - RNA, 18 nt, Human
agauccccaagccuggca

SEQ ID NO: 3189307 - RNA, 12 nt, Human
ugaccuuucaau

SEQ ID NO: 3189308 - RNA, 15 nt, Human
ugaccuuuagguauu

SEQ ID NO: 3189309 - RNA, 16 nt, Human
ugaccuuuagguauua

SEQ ID NO: 3189310 - RNA, 21 nt, Human
ugaccuuguaauguaacugcu

SEQ ID NO: 3189311 - RNA, 18 nt, Human
ugaccuuguaauguaacu

SEQ ID NO: 3189312 - RNA, 16 nt, Human
ugacuauaaugccucu

SEQ ID NO: 3189313 - RNA, 21 nt, Human
ugacuguuuucucuugagagg

SEQ ID NO: 3189314 - RNA, 19 nt, Human
ugacuuaacauagccaaaa

SEQ ID NO: 3189315 - RNA, 20 nt, Human
ugacuuaacauagccaaaau

SEQ ID NO: 3189316 - RNA, 22 nt, Human
ugacuuaacauagccaaaaugu

SEQ ID NO: 3189317 - RNA, 19 nt, Human
ugacucuaguacugugaau

SEQ ID NO: 3189318 - RNA, 23 nt, Human
ugacucuaguacugugaauccag

SEQ ID NO: 3189319 - RNA, 15 nt, Human
ugacucuauaagcaa

SEQ ID NO: 3189320 - RNA, 16 nt, Human
ugacucuauaagcaaa

SEQ ID NO: 3189321 - RNA, 21 nt, Human
ugacucuauaagcaaauugcu

SEQ ID NO: 3189322 - RNA, 21 nt, Human
ugacucguauaugucucaggu

SEQ ID NO: 3189323 - RNA, 17 nt, Human
agaugugaacacaucag

SEQ ID NO: 3189324 - RNA, 22 nt, Human
agaugugaacacaucagcuugc

SEQ ID NO: 3189325 - RNA, 15 nt, Human
ugaccuuuaagagaa

SEQ ID NO: 3189326 - RNA, 16 nt, Human
ugaccuuguaauguaa

SEQ ID NO: 3189327 - RNA, 14 nt, Human
ugaccuuguaaugu

SEQ ID NO: 3189328 - RNA, 13 nt, Human
ugaccuuguaaug

SEQ ID NO: 3189329 - RNA, 12 nt, Human
ugaccuuguaau

SEQ ID NO: 3189330 - RNA, 20 nt, Human
ugaccuggaaggcccagcac

SEQ ID NO: 3189331 - RNA, 13 nt, Human
ugaccuggucagg

SEQ ID NO: 3189332 - RNA, 21 nt, Human
agauugugccccugcacucca

SEQ ID NO: 3189333 - RNA, 19 nt, Human
agauuccagagaguggcuc

SEQ ID NO: 3189334 - RNA, 22 nt, Human
agauuccagagaguggcuccuc

SEQ ID NO: 3189335 - RNA, 21 nt, Human
agauuccagagaguggcuccu

SEQ ID NO: 3189336 - RNA, 22 nt, Human
agauuguuuaucuagauguaaa

SEQ ID NO: 3189337 - RNA, 21 nt, Human
agauuguuuaucuagauguaa

SEQ ID NO: 3189338 - RNA, 20 nt, Human
agauuuaaacucugaauuua

SEQ ID NO: 3189339 - RNA, 19 nt, Human
agauuuaaacucugaauuu

SEQ ID NO: 3189340 - RNA, 19 nt, Human
agauuguuuaucuagaugu

SEQ ID NO: 3189341 - RNA, 18 nt, Human
agauuguuuaucuagaug

SEQ ID NO: 3189342 - RNA, 16 nt, Human
agauuguuuaucuaga

SEQ ID NO: 3189343 - RNA, 14 nt, Human
agauuguuuaucua

SEQ ID NO: 3189344 - RNA, 15 nt, Human
agauuguuauuaaau

SEQ ID NO: 3189345 - RNA, 16 nt, Human
agauuguuauuaaaug

SEQ ID NO: 3189346 - RNA, 17 nt, Human
agauuguuauuaaaugu

SEQ ID NO: 3189347 - RNA, 19 nt, Human
agauuucacucuccuuggu

SEQ ID NO: 3189348 - RNA, 17 nt, Human
agauuucacucuccuug

SEQ ID NO: 3189349 - RNA, 21 nt, Human
agauuuaaacucugaauuuau

SEQ ID NO: 3189350 - RNA, 15 nt, Human
agauuucauccagaa

SEQ ID NO: 3189351 - RNA, 22 nt, Human
agauuucauccagaagucaaca

SEQ ID NO: 3189352 - RNA, 20 nt, Human
agauuuuaaaacuucaucug

SEQ ID NO: 3189353 - RNA, 17 nt, Human
agauuaauacucuauuu

SEQ ID NO: 3189354 - RNA, 20 nt, Human
agauuaauacucuauuuuua

SEQ ID NO: 3189355 - RNA, 15 nt, Human
agauuaagaaauaga

SEQ ID NO: 3189356 - RNA, 14 nt, Human
agauuaagaaauag

SEQ ID NO: 3189357 - RNA, 13 nt, Human
ugacuuagaaucc

SEQ ID NO: 3189358 - RNA, 19 nt, Human
ugacuuagaaucccugugu

SEQ ID NO: 3189359 - RNA, 20 nt, Human
ugacuuagaaucccuguguu

SEQ ID NO: 3189360 - RNA, 21 nt, Human
ugacuuagaaucccuguguua

SEQ ID NO: 3189361 - RNA, 22 nt, Human
ugacuuagaaucccuguguuaa

SEQ ID NO: 3189362 - RNA, 23 nt, Human
ugacuuagaaucccuguguuaau

SEQ ID NO: 3189363 - RNA, 18 nt, Human
agauuauaauuguugcau

SEQ ID NO: 3189364 - RNA, 13 nt, Human
agauuauaauugu

SEQ ID NO: 3189365 - RNA, 16 nt, Human
agauucauauuuacuu

SEQ ID NO: 3189366 - RNA, 13 nt, Human
agauucauauuua

SEQ ID NO: 3189367 - RNA, 23 nt, Human
agauucacuuugacacuuuucau

SEQ ID NO: 3189368 - RNA, 14 nt, Human
agauucaggcauuu

SEQ ID NO: 3189369 - RNA, 22 nt, Human
ugaaacugagaugugaacacau

SEQ ID NO: 3189370 - RNA, 14 nt, Human
ugaaaauguguguu

SEQ ID NO: 3189371 - RNA, 18 nt, Human
ugaaaauaguuuauuuua

SEQ ID NO: 3189372 - RNA, 22 nt, Human
ugaaaauauuuguaucacaaau

SEQ ID NO: 3189373 - RNA, 21 nt, Human
ugaaaauauuuguaucacaaa

SEQ ID NO: 3189374 - RNA, 17 nt, Human
ugaaaauauuuguauca

SEQ ID NO: 3189375 - RNA, 12 nt, Human
ugaaaauaauug

SEQ ID NO: 3189376 - RNA, 17 nt, Human
ugaaaauaaugcuguuc

SEQ ID NO: 3189377 - RNA, 20 nt, Human
ugaaaauaagccaugagaau

SEQ ID NO: 3189378 - RNA, 19 nt, Human
ugaaaauaagccaugagaa

SEQ ID NO: 3189379 - RNA, 18 nt, Human
ugaaaauaagccaugaga

SEQ ID NO: 3189380 - RNA, 14 nt, Human
ugaaaauaagccau

SEQ ID NO: 3189381 - RNA, 16 nt, Human
ugaaaauaacugaauu

SEQ ID NO: 3189382 - RNA, 18 nt, Human
ugaaaauaacugaauuug

SEQ ID NO: 3189383 - RNA, 21 nt, Human
ugaaaauaacugaauuuggag

SEQ ID NO: 3189384 - RNA, 16 nt, Human
ucuuuuuuugugaugu

SEQ ID NO: 3189385 - RNA, 14 nt, Human
ucuuuuuuugugau

SEQ ID NO: 3189386 - RNA, 18 nt, Human
ugaaaaaaaaaaugcuga

SEQ ID NO: 3189387 - RNA, 23 nt, Human
ucuuuuuuuuuuaagugaaauuu

SEQ ID NO: 3189388 - RNA, 19 nt, Human
ucuuuuuuuuuuaagugaa

SEQ ID NO: 3189389 - RNA, 21 nt, Human
ugaaaaaaaaaaugcugaaca

SEQ ID NO: 3189390 - RNA, 20 nt, Human
ugaaaaaaaaaaugcugaac

SEQ ID NO: 3189391 - RNA, 18 nt, Human
agagaccaucccugaagg

SEQ ID NO: 3189392 - RNA, 19 nt, Human
agagaccaucccugaaggc

SEQ ID NO: 3189393 - RNA, 21 nt, Human
agagaccaucccugaaggccc

SEQ ID NO: 3189394 - RNA, 22 nt, Human
agagaccaucccugaaggcccc

SEQ ID NO: 3189395 - RNA, 23 nt, Human
agagaccaucccugaaggccccg

SEQ ID NO: 3189396 - RNA, 17 nt, Human
ugaaagaggaaugaagu

SEQ ID NO: 3189397 - RNA, 22 nt, Human
ugaaagacuguacaaaguagaa

SEQ ID NO: 3189398 - RNA, 19 nt, Human
ugaaagacuguacaaagua

SEQ ID NO: 3189399 - RNA, 18 nt, Human
ugaaagacuguacaaagu

SEQ ID NO: 3189400 - RNA, 15 nt, Human
ugaaagaaaacuuuu

SEQ ID NO: 3189401 - RNA, 15 nt, Human
ugaaacugcauuugu

SEQ ID NO: 3189402 - RNA, 16 nt, Human
ugaaacugcauuugug

SEQ ID NO: 3189403 - RNA, 16 nt, Human
ugaaagacuguacaaa

SEQ ID NO: 3189404 - RNA, 18 nt, Human
ugaaagaaaacuuuuaug

SEQ ID NO: 3189405 - RNA, 20 nt, Human
agagauaggaaggucauuuc

SEQ ID NO: 3189406 - RNA, 14 nt, Human
agagauacucuggg

SEQ ID NO: 3189407 - RNA, 17 nt, Human
agagaguggcuccuccc

SEQ ID NO: 3189408 - RNA, 14 nt, Human
agagaugagcuuuc

SEQ ID NO: 3189409 - RNA, 15 nt, Human
agagaugagcuuucu

SEQ ID NO: 3189410 - RNA, 23 nt, Human
agagauaggaaggucauuuccau

SEQ ID NO: 3189411 - RNA, 22 nt, Human
agagauaggaaggucauuucca

SEQ ID NO: 3189412 - RNA, 13 nt, Human
agagacuccugca

SEQ ID NO: 3189413 - RNA, 14 nt, Human
agagacuccugcag

SEQ ID NO: 3189414 - RNA, 12 nt, Human
agagacuccugc

SEQ ID NO: 3189415 - RNA, 11 nt, Human
agagacuccug

SEQ ID NO: 3189416 - RNA, 15 nt, Human
agacuuuuccaaccc

SEQ ID NO: 3189417 - RNA, 19 nt, Human
agacuuuggaaagaguagg

SEQ ID NO: 3189418 - RNA, 16 nt, Human
agagacacaagccuuc

SEQ ID NO: 3189419 - RNA, 19 nt, Human
agagacacaagccuucggc

SEQ ID NO: 3189420 - RNA, 15 nt, Human
agagacacaagccuu

SEQ ID NO: 3189421 - RNA, 19 nt, Human
agacuuuuccaauauguga

SEQ ID NO: 3189422 - RNA, 17 nt, Human
agacuuuggaaagacuu

SEQ ID NO: 3189423 - RNA, 15 nt, Human
agacuuuggaaagag

SEQ ID NO: 3189424 - RNA, 15 nt, Human
agacuuuggaaagac

SEQ ID NO: 3189425 - RNA, 16 nt, Human
ucuuuuuuucucuaga

SEQ ID NO: 3189426 - RNA, 14 nt, Human
ucuuuguaccaaaa

SEQ ID NO: 3189427 - RNA, 17 nt, Human
ucuuuguaccaaaauuu

SEQ ID NO: 3189428 - RNA, 19 nt, Human
ucuuuguaccaaaauuuua

SEQ ID NO: 3189429 - RNA, 21 nt, Human
ucuuuguaccaaaauuuuaaa

SEQ ID NO: 3189430 - RNA, 23 nt, Human
ucuuuguaccaaaauuuuaaaaa

SEQ ID NO: 3189431 - RNA, 14 nt, Human
ucuuuguacagaca

SEQ ID NO: 3189432 - RNA, 15 nt, Human
ucuuuguacagacaa

SEQ ID NO: 3189433 - RNA, 20 nt, Human
ucuuuguacagacaacaaac

SEQ ID NO: 3189434 - RNA, 14 nt, Human
agagacagaaagca

SEQ ID NO: 3189435 - RNA, 21 nt, Human
agacuuuuccaauaugugauu

SEQ ID NO: 3189436 - RNA, 16 nt, Human
agacuccaccaagccu

SEQ ID NO: 3189437 - RNA, 12 nt, Human
agacuccaccaa

SEQ ID NO: 3189438 - RNA, 22 nt, Human
agacuccaaagaaauguaaggg

SEQ ID NO: 3189439 - RNA, 17 nt, Human
ucuuucccuuccuccau

SEQ ID NO: 3189440 - RNA, 16 nt, Human
ucuuucccuuccucca

SEQ ID NO: 3189441 - RNA, 19 nt, Human
ucuuucuaaugugugaauc

SEQ ID NO: 3189442 - RNA, 22 nt, Human
agacaggaccccugcaguuccc

SEQ ID NO: 3189443 - RNA, 15 nt, Human
agacaggaccccugc

SEQ ID NO: 3189444 - RNA, 14 nt, Human
agacaggaccccug

SEQ ID NO: 3189445 - RNA, 19 nt, Human
agacagagcgacagagcag

SEQ ID NO: 3189446 - RNA, 20 nt, Human
agacaggcaagcaccuccug

SEQ ID NO: 3189447 - RNA, 15 nt, Human
ucuuuaaugucacag

SEQ ID NO: 3189448 - RNA, 21 nt, Human
agacaggagaagaaagaacua

SEQ ID NO: 3189449 - RNA, 18 nt, Human
agacaggagaagaaagaa

SEQ ID NO: 3189450 - RNA, 18 nt, Human
ucuuuaaugucacaggca

SEQ ID NO: 3189451 - RNA, 23 nt, Human
ucuuucccucccuuccucuuucc

SEQ ID NO: 3189452 - RNA, 15 nt, Human
ucuuucccuuccagu

SEQ ID NO: 3189453 - RNA, 15 nt, Human
ucuuucccuuccucc

SEQ ID NO: 3189454 - RNA, 14 nt, Human
ucuuucccuuccuc

SEQ ID NO: 3189455 - RNA, 16 nt, Human
ucuuucccuuccaguu

SEQ ID NO: 3189456 - RNA, 23 nt, Human
agacuggcacaguuuucugagaa

SEQ ID NO: 3189457 - RNA, 20 nt, Human
agacuggccugaaccacagg

SEQ ID NO: 3189458 - RNA, 18 nt, Human
agacuggcacaguuuucu

SEQ ID NO: 3189459 - RNA, 13 nt, Human
agacucucucugg

SEQ ID NO: 3189460 - RNA, 15 nt, Human
agacucuaguauuua

SEQ ID NO: 3189461 - RNA, 17 nt, Human
agacucuaguauuuaug

SEQ ID NO: 3189462 - RNA, 21 nt, Human
agacuggcacaguuuucugag

SEQ ID NO: 3189463 - RNA, 20 nt, Human
agacuggcacaguuuucuga

SEQ ID NO: 3189464 - RNA, 13 nt, Human
agacuccugcagg

SEQ ID NO: 3189465 - RNA, 16 nt, Human
agacucccaagcugga

SEQ ID NO: 3189466 - RNA, 21 nt, Human
agacuccagcuggguuggaaa

SEQ ID NO: 3189467 - RNA, 22 nt, Human
agacuccagaaaugucccuuuc

SEQ ID NO: 3189468 - RNA, 13 nt, Human
ugaauaauuacag

SEQ ID NO: 3189469 - RNA, 18 nt, Human
ugaauaauuacagugccu

SEQ ID NO: 3189470 - RNA, 17 nt, Human
ugaauaauuacagugcc

SEQ ID NO: 3189471 - RNA, 13 nt, Human
ugaauaauacagu

SEQ ID NO: 3189472 - RNA, 13 nt, Human
ugaauaaugauuu

SEQ ID NO: 3189473 - RNA, 17 nt, Human
ugaauaaugccuuugua

SEQ ID NO: 3189474 - RNA, 21 nt, Human
ugaauaaugccuuuguaacca

SEQ ID NO: 3189475 - RNA, 14 nt, Human
ugaauaauggaaaa

SEQ ID NO: 3189476 - RNA, 16 nt, Human
ugaauaauggaaaaug

SEQ ID NO: 3189477 - RNA, 19 nt, Human
ugaauaauggaaaaugcca

SEQ ID NO: 3189478 - RNA, 22 nt, Human
ugaauaagccauucugacucau

SEQ ID NO: 3189479 - RNA, 17 nt, Human
ugaauaagccauucuga

SEQ ID NO: 3189480 - RNA, 17 nt, Human
ugaaguacucauacaug

SEQ ID NO: 3189481 - RNA, 15 nt, Human
ugaaguaagcaaaga

SEQ ID NO: 3189482 - RNA, 12 nt, Human
ugaauaauacag

SEQ ID NO: 3189483 - RNA, 15 nt, Human
ugaauaagcacuuuu

SEQ ID NO: 3189484 - RNA, 13 nt, Human
ugaauaagcacuu

SEQ ID NO: 3189485 - RNA, 12 nt, Human
ugaauaagcacu

SEQ ID NO: 3189486 - RNA, 23 nt, Human
ugaauaacugauuaguaagucuu

SEQ ID NO: 3189487 - RNA, 13 nt, Human
ugaagucacacag

SEQ ID NO: 3189488 - RNA, 24 nt, Human
ugaagauuguuuaucuagauguaa

SEQ ID NO: 3189489 - RNA, 22 nt, Human
ugaagauuguuuaucuagaugu

SEQ ID NO: 3189490 - RNA, 19 nt, Human
ugaagguuuuugauagcau

SEQ ID NO: 3189491 - RNA, 13 nt, Human
ugaagguuuuugu

SEQ ID NO: 3189492 - RNA, 16 nt, Human
ugaagguuuuuguaaa

SEQ ID NO: 3189493 - RNA, 15 nt, Human
ugaagguuuuuguaa

SEQ ID NO: 3189494 - RNA, 14 nt, Human
ugaagguuuuugau

SEQ ID NO: 3189495 - RNA, 18 nt, Human
ugaagguuuuugauagca

SEQ ID NO: 3189496 - RNA, 13 nt, Human
ugaagguuuuuga

SEQ ID NO: 3189497 - RNA, 14 nt, Human
ugaaguaagcaaag

SEQ ID NO: 3189498 - RNA, 13 nt, Human
ugaaguaagcaaa

SEQ ID NO: 3189499 - RNA, 21 nt, Human
ugaagguuuuuguaaagauuu

SEQ ID NO: 3189500 - RNA, 19 nt, Human
ugaagguuuuuguaaagau

SEQ ID NO: 3189501 - RNA, 18 nt, Human
ugaagguuuuuguaaaga

SEQ ID NO: 3189502 - RNA, 17 nt, Human
ugaagguuuuuguaaag

SEQ ID NO: 3189503 - RNA, 16 nt, Human
agaggcugcagccagg

SEQ ID NO: 3189504 - RNA, 22 nt, Human
agaggcugccucucccaucacu

SEQ ID NO: 3189505 - RNA, 20 nt, Human
agagggagugacagaggcag

SEQ ID NO: 3189506 - RNA, 15 nt, Human
agagggagugacaga

SEQ ID NO: 3189507 - RNA, 15 nt, Human
agagggagguaagga

SEQ ID NO: 3189508 - RNA, 16 nt, Human
ugaagauuguuuaucu

SEQ ID NO: 3189509 - RNA, 13 nt, Human
ugaagauuguuua

SEQ ID NO: 3189510 - RNA, 18 nt, Human
agagcuguucacagccag

SEQ ID NO: 3189511 - RNA, 22 nt, Human
agagcugugggcaaaagagugu

SEQ ID NO: 3189512 - RNA, 13 nt, Human
agagcuguacauu

SEQ ID NO: 3189513 - RNA, 23 nt, Human
agaggcagccccauucugccugc

SEQ ID NO: 3189514 - RNA, 21 nt, Human
agaggcagggucucacucugu

SEQ ID NO: 3189515 - RNA, 22 nt, Human
agaggcagccccauucugccug

SEQ ID NO: 3189516 - RNA, 21 nt, Human
agaggcagccccauucugccu

SEQ ID NO: 3189517 - RNA, 18 nt, Human
agaggccacauuacuaga

SEQ ID NO: 3189518 - RNA, 19 nt, Human
agaggccaaacaggcccuc

SEQ ID NO: 3189519 - RNA, 16 nt, Human
agaggccaaacaggcc

SEQ ID NO: 3189520 - RNA, 21 nt, Human
agaggcaugggcuugcugugg

SEQ ID NO: 3189521 - RNA, 22 nt, Human
agaggcaguugcccagccucuu

SEQ ID NO: 3189522 - RNA, 18 nt, Human
agaggcaguugcccagcc

SEQ ID NO: 3189523 - RNA, 23 nt, Human
agaggccuccuguggccugccag

SEQ ID NO: 3189524 - RNA, 19 nt, Human
agaggccugaaauccuggu

SEQ ID NO: 3189525 - RNA, 20 nt, Human
agaggccugaaauccugguu

SEQ ID NO: 3189526 - RNA, 23 nt, Human
agaggccugaaauccugguuccu

SEQ ID NO: 3189527 - RNA, 18 nt, Human
agaggccgagagcuaugg

SEQ ID NO: 3189528 - RNA, 15 nt, Human
ugaacuccugaccuc

SEQ ID NO: 3189529 - RNA, 13 nt, Human
ugaagaauuuaaa

SEQ ID NO: 3189530 - RNA, 15 nt, Human
ugaagaauuuaaaga

SEQ ID NO: 3189531 - RNA, 11 nt, Human
ugaagaauuua

SEQ ID NO: 3189532 - RNA, 20 nt, Human
ugaagaaucuacuuaacccu

SEQ ID NO: 3189533 - RNA, 22 nt, Human
ugaacccauauuuguacaccaa

SEQ ID NO: 3189534 - RNA, 18 nt, Human
ugaacccgggaggcagag

SEQ ID NO: 3189535 - RNA, 17 nt, Human
ugaacguuugguucaaa

SEQ ID NO: 3189536 - RNA, 20 nt, Human
ugaacguuugguucaaaugu

SEQ ID NO: 3189537 - RNA, 19 nt, Human
ugaacguuugguucaaaug

SEQ ID NO: 3189538 - RNA, 21 nt, Human
ugaacguuugguucaaaugug

SEQ ID NO: 3189539 - RNA, 13 nt, Human
ugaacaaauuuac

SEQ ID NO: 3189540 - RNA, 21 nt, Human
ugaaccaccacacccagccca

SEQ ID NO: 3189541 - RNA, 22 nt, Human
ugaaccaccacacccagcccac

SEQ ID NO: 3189542 - RNA, 18 nt, Human
ugaaccauaaaaugucca

SEQ ID NO: 3189543 - RNA, 19 nt, Human
ugaaccauaguuacuguaa

SEQ ID NO: 3189544 - RNA, 18 nt, Human
ugaaccauaguuacugua

SEQ ID NO: 3189545 - RNA, 16 nt, Human
ugaaccacuuguagau

SEQ ID NO: 3189546 - RNA, 20 nt, Human
ugaaccacuuguagauuuga

SEQ ID NO: 3189547 - RNA, 21 nt, Human
ugaaccacuuguagauuugau

SEQ ID NO: 3189548 - RNA, 23 nt, Human
ugaaccacuuguagauuugauuu

SEQ ID NO: 3189549 - RNA, 13 nt, Human
ugaaccauaaaau

SEQ ID NO: 3189550 - RNA, 18 nt, Human
ugaaccagaaccagucuu

SEQ ID NO: 3189551 - RNA, 15 nt, Human
ugaaccauaaaaugu

SEQ ID NO: 3189552 - RNA, 16 nt, Human
ugaaccauaaaauguc

SEQ ID NO: 3189553 - RNA, 14 nt, Human
ugaaccacuuguag

SEQ ID NO: 3189554 - RNA, 15 nt, Human
ugaaccacuuguaga

SEQ ID NO: 3189555 - RNA, 13 nt, Human
ugaaccacuugua

SEQ ID NO: 3189556 - RNA, 17 nt, Human
agagauuggaucaagua

SEQ ID NO: 3189557 - RNA, 20 nt, Human
agagauuggaucaaguauua

SEQ ID NO: 3189558 - RNA, 21 nt, Human
agagauuggaucaaguauuac

SEQ ID NO: 3189559 - RNA, 14 nt, Human
ugaaauaaaagcua

SEQ ID NO: 3189560 - RNA, 16 nt, Human
ugaaauaccauuauua

SEQ ID NO: 3189561 - RNA, 18 nt, Human
ugaaauaaccguaaaggu

SEQ ID NO: 3189562 - RNA, 23 nt, Human
ugaaauaaccguaaagguuuauu

SEQ ID NO: 3189563 - RNA, 17 nt, Human
ugaaauaacacagcagu

SEQ ID NO: 3189564 - RNA, 22 nt, Human
ugaaauacauaugauaaauuug

SEQ ID NO: 3189565 - RNA, 18 nt, Human
ugaaauugaaaaguuauu

SEQ ID NO: 3189566 - RNA, 16 nt, Human
ugaaauugaaaaguua

SEQ ID NO: 3189567 - RNA, 23 nt, Human
ugaaauagacccacaagaggcag

SEQ ID NO: 3189568 - RNA, 21 nt, Human
ugaaauaggagggaaaccuuu

SEQ ID NO: 3189569 - RNA, 22 nt, Human
ugaaauaggagggaaaccuuug

SEQ ID NO: 3189570 - RNA, 23 nt, Human
ugaaauuuauugaggaaaaauau

SEQ ID NO: 3189571 - RNA, 22 nt, Human
ugaaauuuauugaggaaaaaua

SEQ ID NO: 3189572 - RNA, 17 nt, Human
ugaaauuuauugaggaa

SEQ ID NO: 3189573 - RNA, 15 nt, Human
ugaaauuuauugagg

SEQ ID NO: 3189574 - RNA, 13 nt, Human
ugaaauuuauuga

SEQ ID NO: 3189575 - RNA, 20 nt, Human
ugaaauuuuuauuaaauuau

SEQ ID NO: 3189576 - RNA, 14 nt, Human
ugaaauuuuucaua

SEQ ID NO: 3189577 - RNA, 13 nt, Human
ugaaauuuuucau

SEQ ID NO: 3189578 - RNA, 12 nt, Human
ugaaauuuuuca

SEQ ID NO: 3189579 - RNA, 19 nt, Human
ugaaauuuuuauuaaauua

SEQ ID NO: 3189580 - RNA, 13 nt, Human
ugaacaaaauuau

SEQ ID NO: 3189581 - RNA, 15 nt, Human
ugaacaaaauuauuu

SEQ ID NO: 3189582 - RNA, 15 nt, Human
ugaacaaagaccaau

SEQ ID NO: 3189583 - RNA, 19 nt, Human
ugaacaaagaccaauuuuu

SEQ ID NO: 3189584 - RNA, 21 nt, Human
ugaaauuuuucauauuuuaau

SEQ ID NO: 3189585 - RNA, 20 nt, Human
ugaaauuuuucauauuuuaa

SEQ ID NO: 3189586 - RNA, 18 nt, Human
ugaaauuuuucauauuuu

SEQ ID NO: 3189587 - RNA, 17 nt, Human
ugaaauuuuucauauuu

SEQ ID NO: 3189588 - RNA, 16 nt, Human
ugaaauuuuucauauu

SEQ ID NO: 3189589 - RNA, 18 nt, Human
ugaacaaaauaaauugga

SEQ ID NO: 3189590 - RNA, 16 nt, Human
ugaacaaaauaaauug

SEQ ID NO: 3189591 - RNA, 14 nt, Human
ugaacaaaauaaau

SEQ ID NO: 3189592 - RNA, 23 nt, Human
ugaaauuuuuuuucaugcuuuau

SEQ ID NO: 3189593 - RNA, 14 nt, Human
agaagaaguguguc

SEQ ID NO: 3189594 - RNA, 12 nt, Human
agaagaaagaug

SEQ ID NO: 3189595 - RNA, 13 nt, Human
agaagaaagaugu

SEQ ID NO: 3189596 - RNA, 15 nt, Human
agaagaaagauguuu

SEQ ID NO: 3189597 - RNA, 14 nt, Human
agaagaaauaaaua

SEQ ID NO: 3189598 - RNA, 18 nt, Human
agaagaaauaguucugug

SEQ ID NO: 3189599 - RNA, 15 nt, Human
agaagaaugcaugcu

SEQ ID NO: 3189600 - RNA, 15 nt, Human
agaagaauuugaaga

SEQ ID NO: 3189601 - RNA, 22 nt, Human
agaagaauuugaagacuucaaa

SEQ ID NO: 3189602 - RNA, 22 nt, Human
agaagaaugcaugcuuuccaua

SEQ ID NO: 3189603 - RNA, 14 nt, Human
agaagaauauugua

SEQ ID NO: 3189604 - RNA, 16 nt, Human
agaagaauauuguauu

SEQ ID NO: 3189605 - RNA, 22 nt, Human
agaagaauauuguauuguuaga

SEQ ID NO: 3189606 - RNA, 22 nt, Human
agaacuuagccuuuaccuguga

SEQ ID NO: 3189607 - RNA, 23 nt, Human
agaacugcuuucuuucguuuguu

SEQ ID NO: 3189608 - RNA, 20 nt, Human
agaaauugcauuuccugaca

SEQ ID NO: 3189609 - RNA, 17 nt, Human
agaaauugcauuuccug

SEQ ID NO: 3189610 - RNA, 21 nt, Human
agaaauucuguuuuuaaaaau

SEQ ID NO: 3189611 - RNA, 12 nt, Human
agaaauucuugu

SEQ ID NO: 3189612 - RNA, 18 nt, Human
agaaauucuuguuauggu

SEQ ID NO: 3189613 - RNA, 19 nt, Human
agaaauucuguuuuuaaaa

SEQ ID NO: 3189614 - RNA, 16 nt, Human
agaaauucuguuuuua

SEQ ID NO: 3189615 - RNA, 11 nt, Human
agaagcccaga

SEQ ID NO: 3189616 - RNA, 13 nt, Human
agaagcccagaau

SEQ ID NO: 3189617 - RNA, 12 nt, Human
agaagcccagaa

SEQ ID NO: 3189618 - RNA, 18 nt, Human
agaagauuuugaaauuuu

SEQ ID NO: 3189619 - RNA, 12 nt, Human
agaagcccagga

SEQ ID NO: 3189620 - RNA, 16 nt, Human
agaagcccaggaaagg

SEQ ID NO: 3189621 - RNA, 18 nt, Human
agaagcccaggaaaggcu

SEQ ID NO: 3189622 - RNA, 20 nt, Human
agaagcccaggaaaggcucc

SEQ ID NO: 3189623 - RNA, 21 nt, Human
agaagcccaggaaaggcucca

SEQ ID NO: 3189624 - RNA, 22 nt, Human
agaagcccaggaaaggcuccag

SEQ ID NO: 3189625 - RNA, 16 nt, Human
ucugcccacucccugc

SEQ ID NO: 3189626 - RNA, 17 nt, Human
ucugcccacucccugca

SEQ ID NO: 3189627 - RNA, 20 nt, Human
ucugcuccagcucuggcaug

SEQ ID NO: 3189628 - RNA, 15 nt, Human
ucugcuccagcucug

SEQ ID NO: 3189629 - RNA, 14 nt, Human
ucugcuccagcucu

SEQ ID NO: 3189630 - RNA, 15 nt, Human
ucugcuucagccucc

SEQ ID NO: 3189631 - RNA, 14 nt, Human
ucugcuucagccuc

SEQ ID NO: 3189632 - RNA, 13 nt, Human
ucugcuucagccu

SEQ ID NO: 3189633 - RNA, 20 nt, Human
ucugcucacauaucugucau

SEQ ID NO: 3189634 - RNA, 19 nt, Human
ucugcucacauaucuguca

SEQ ID NO: 3189635 - RNA, 17 nt, Human
ucugcucacauaucugu

SEQ ID NO: 3189636 - RNA, 21 nt, Human
ucugcuaaauugauguugaug

SEQ ID NO: 3189637 - RNA, 20 nt, Human
ucugcuaaauugauguugau

SEQ ID NO: 3189638 - RNA, 19 nt, Human
ucugcuaaauugauguuga

SEQ ID NO: 3189639 - RNA, 17 nt, Human
ucugcuaaauugauguu

SEQ ID NO: 3189640 - RNA, 15 nt, Human
ucugcuaaauugaug

SEQ ID NO: 3189641 - RNA, 17 nt, Human
ucugcuaaauuucaaau

SEQ ID NO: 3189642 - RNA, 15 nt, Human
ucugcuaaauuucaa

SEQ ID NO: 3189643 - RNA, 23 nt, Human
ucugcccuugguuaggcauugug

SEQ ID NO: 3189644 - RNA, 22 nt, Human
ucugccgcagcccugcagaggg

SEQ ID NO: 3189645 - RNA, 22 nt, Human
ucugccugcccaggccccugcc

SEQ ID NO: 3189646 - RNA, 21 nt, Human
ucugccugcccaggccccugc

SEQ ID NO: 3189647 - RNA, 12 nt, Human
ucugccugcccu

SEQ ID NO: 3189648 - RNA, 18 nt, Human
ucugcccacucccugcaa

SEQ ID NO: 3189649 - RNA, 21 nt, Human
ucugcccacucccugcaaccu

SEQ ID NO: 3189650 - RNA, 18 nt, Human
ucugcccuccaagaccuu

SEQ ID NO: 3189651 - RNA, 19 nt, Human
ucugcccuccaagaccuuc

SEQ ID NO: 3189652 - RNA, 14 nt, Human
ucugccgcagcccu

SEQ ID NO: 3189653 - RNA, 15 nt, Human
ucugccgcagcccug

SEQ ID NO: 3189654 - RNA, 11 nt, Human
ucugcccugcg

SEQ ID NO: 3189655 - RNA, 12 nt, Human
ucugcccugcgg

SEQ ID NO: 3189656 - RNA, 10 nt, Human
ucugcccugc

SEQ ID NO: 3189657 - RNA, 18 nt, Human
ucugcagauaaacaguag

SEQ ID NO: 3189658 - RNA, 15 nt, Human
ucugcagauaaacag

SEQ ID NO: 3189659 - RNA, 13 nt, Human
ucugcacuccccu

SEQ ID NO: 3189660 - RNA, 14 nt, Human
ucugcacuccccug

SEQ ID NO: 3189661 - RNA, 15 nt, Human
ucugcacuccccugc

SEQ ID NO: 3189662 - RNA, 16 nt, Human
ucugcacuccccugcu

SEQ ID NO: 3189663 - RNA, 21 nt, Human
ucugaugcaagcaagaaacac

SEQ ID NO: 3189664 - RNA, 16 nt, Human
ucugaugcaagcaaga

SEQ ID NO: 3189665 - RNA, 13 nt, Human
ucugaugaaaugu

SEQ ID NO: 3189666 - RNA, 15 nt, Human
ucugaugaaauguua

SEQ ID NO: 3189667 - RNA, 18 nt, Human
ucugaugaaauguuaaca

SEQ ID NO: 3189668 - RNA, 20 nt, Human
ucugaugaaauguuaacaau

SEQ ID NO: 3189669 - RNA, 22 nt, Human
ucugaucacugaaauaaaagcu

SEQ ID NO: 3189670 - RNA, 21 nt, Human
ucugaucauccacugugccau

SEQ ID NO: 3189671 - RNA, 17 nt, Human
ucugaucauccacugug

SEQ ID NO: 3189672 - RNA, 21 nt, Human
ucugagacucgcgacaaugca

SEQ ID NO: 3189673 - RNA, 13 nt, Human
ucugacugacaug

SEQ ID NO: 3189674 - RNA, 16 nt, Human
ucugacucuuccccag

SEQ ID NO: 3189675 - RNA, 12 nt, Human
ucugagaaugaa

SEQ ID NO: 3189676 - RNA, 16 nt, Human
ucugagaaugaacaaa

SEQ ID NO: 3189677 - RNA, 14 nt, Human
ucugagaaugaaca

SEQ ID NO: 3189678 - RNA, 21 nt, Human
ucugaaggacauugcggacag

SEQ ID NO: 3189679 - RNA, 12 nt, Human
ucugacacacag

SEQ ID NO: 3189680 - RNA, 21 nt, Human
ucugaauuaauuaauuuggag

SEQ ID NO: 3189681 - RNA, 14 nt, Human
ucugacacacagcu

SEQ ID NO: 3189682 - RNA, 13 nt, Human
ucugacacacagc

SEQ ID NO: 3189683 - RNA, 15 nt, Human
ucugacacacagcuc

SEQ ID NO: 3189684 - RNA, 19 nt, Human
ucugacucauauccccuau

SEQ ID NO: 3189685 - RNA, 14 nt, Human
agaaaugaaagcag

SEQ ID NO: 3189686 - RNA, 21 nt, Human
agaaauauuuuaauuuuuaaa

SEQ ID NO: 3189687 - RNA, 14 nt, Human
agaaauauuuuaau

SEQ ID NO: 3189688 - RNA, 14 nt, Human
agaaauaucuguga

SEQ ID NO: 3189689 - RNA, 15 nt, Human
agaaauaucugugaa

SEQ ID NO: 3189690 - RNA, 17 nt, Human
agaaauaucugugaaau

SEQ ID NO: 3189691 - RNA, 19 nt, Human
agaaauaucugugaaauau

SEQ ID NO: 3189692 - RNA, 23 nt, Human
agaaauaucugugaaauaucauc

SEQ ID NO: 3189693 - RNA, 17 nt, Human
agaaauauguauucugu

SEQ ID NO: 3189694 - RNA, 15 nt, Human
ucuccuuuguauucu

SEQ ID NO: 3189695 - RNA, 22 nt, Human
ucuccuuuguauucugucuuca

SEQ ID NO: 3189696 - RNA, 17 nt, Human
ucuccuuuguauucugu

SEQ ID NO: 3189697 - RNA, 16 nt, Human
ucuccuuucacaaccu

SEQ ID NO: 3189698 - RNA, 20 nt, Human
ucuccuuuagggacagcuua

SEQ ID NO: 3189699 - RNA, 14 nt, Human
ucuguuuacagugu

SEQ ID NO: 3189700 - RNA, 16 nt, Human
ucuguuguauucauug

SEQ ID NO: 3189701 - RNA, 17 nt, Human
ucuguuggccaguguga

SEQ ID NO: 3189702 - RNA, 12 nt, Human
ucuguuggccag

SEQ ID NO: 3189703 - RNA, 15 nt, Human
ucuguugcugccuca

SEQ ID NO: 3189704 - RNA, 13 nt, Human
ucuguugcccagg

SEQ ID NO: 3189705 - RNA, 15 nt, Human
ucugugaaauaucau

SEQ ID NO: 3189706 - RNA, 16 nt, Human
ucugugaaauaucauc

SEQ ID NO: 3189707 - RNA, 22 nt, Human
ucugugaaaggaaagagggagg

SEQ ID NO: 3189708 - RNA, 18 nt, Human
ucugucacaguaaaaaua

SEQ ID NO: 3189709 - RNA, 19 nt, Human
ucugucacaguaaaaauaa

SEQ ID NO: 3189710 - RNA, 20 nt, Human
ucugucacaguaaaaauaaa

SEQ ID NO: 3189711 - RNA, 22 nt, Human
ucugucacaguaaaaauaaaau

SEQ ID NO: 3189712 - RNA, 15 nt, Human
ucugucaaagucaga

SEQ ID NO: 3189713 - RNA, 18 nt, Human
ucuguauuugaaagugcc

SEQ ID NO: 3189714 - RNA, 22 nt, Human
ucuguauuugaaagugccuuug

SEQ ID NO: 3189715 - RNA, 13 nt, Human
ucuguauuugaaa

SEQ ID NO: 3189716 - RNA, 14 nt, Human
ucuguauuugaaag

SEQ ID NO: 3189717 - RNA, 15 nt, Human
ucuguauuugaaagu

SEQ ID NO: 3189718 - RNA, 14 nt, Human
ucugggccagaauu

SEQ ID NO: 3189719 - RNA, 15 nt, Human
ucugggccagaauuu

SEQ ID NO: 3189720 - RNA, 23 nt, Human
ucugugagaugcuagaacucccu

SEQ ID NO: 3189721 - RNA, 17 nt, Human
ucugugagaugcuagaa

SEQ ID NO: 3189722 - RNA, 22 nt, Human
ucugugagaugcuagaacuccc

SEQ ID NO: 3189723 - RNA, 14 nt, Human
ucugugagaugcua

SEQ ID NO: 3189724 - RNA, 19 nt, Human
ucugugacuuaguggacag

SEQ ID NO: 3189725 - RNA, 13 nt, Human
agacacaggcccg

SEQ ID NO: 3189726 - RNA, 12 nt, Human
agacacaggccc

SEQ ID NO: 3189727 - RNA, 16 nt, Human
agaauuugucacagga

SEQ ID NO: 3189728 - RNA, 20 nt, Human
agaauugcaaucuauaauau

SEQ ID NO: 3189729 - RNA, 17 nt, Human
agaauugcaaucuauaa

SEQ ID NO: 3189730 - RNA, 15 nt, Human
agaauugcaaucuau

SEQ ID NO: 3189731 - RNA, 22 nt, Human
agaauuuuaagccuuuguugaa

SEQ ID NO: 3189732 - RNA, 16 nt, Human
agaauuuuaagccuuu

SEQ ID NO: 3189733 - RNA, 14 nt, Human
agaauuuuaagccu

SEQ ID NO: 3189734 - RNA, 21 nt, Human
agaauugaagguuuuugauag

SEQ ID NO: 3189735 - RNA, 18 nt, Human
agaauugaagguuuuuga

SEQ ID NO: 3189736 - RNA, 20 nt, Human
agaauugaagguuuuugaua

SEQ ID NO: 3189737 - RNA, 13 nt, Human
agaauugaagguu

SEQ ID NO: 3189738 - RNA, 14 nt, Human
agaauugaagguuu

SEQ ID NO: 3189739 - RNA, 15 nt, Human
agaauugaagguuuu

SEQ ID NO: 3189740 - RNA, 16 nt, Human
agaauugaagguuuuu

SEQ ID NO: 3189741 - RNA, 12 nt, Human
agaauugaaggu

SEQ ID NO: 3189742 - RNA, 20 nt, Human
agacagagcaaccccuggac

SEQ ID NO: 3189743 - RNA, 16 nt, Human
agacaggaccagggau

SEQ ID NO: 3189744 - RNA, 20 nt, Human
agacacuuccgucacauccc

SEQ ID NO: 3189745 - RNA, 13 nt, Human
agacacuuccguc

SEQ ID NO: 3189746 - RNA, 16 nt, Human
agacacauguccaaga

SEQ ID NO: 3189747 - RNA, 13 nt, Human
agacacaggggac

SEQ ID NO: 3189748 - RNA, 18 nt, Human
agacaccuugacagggca

SEQ ID NO: 3189749 - RNA, 17 nt, Human
agacaccuugacagggc

SEQ ID NO: 3189750 - RNA, 16 nt, Human
ucugcuuuagacuuga

SEQ ID NO: 3189751 - RNA, 17 nt, Human
ucugcuuuagacuugaa

SEQ ID NO: 3189752 - RNA, 12 nt, Human
ucugcuuuagac

SEQ ID NO: 3189753 - RNA, 18 nt, Human
ucugcuuuagacuugaaa

SEQ ID NO: 3189754 - RNA, 19 nt, Human
ucugcuuuagacuugaaaa

SEQ ID NO: 3189755 - RNA, 12 nt, Human
ucugcuuuccuc

SEQ ID NO: 3189756 - RNA, 13 nt, Human
ucugcuuuccucu

SEQ ID NO: 3189757 - RNA, 18 nt, Human
ucugcuuuccucuuccug

SEQ ID NO: 3189758 - RNA, 17 nt, Human
agaaguggacuggagga

SEQ ID NO: 3189759 - RNA, 21 nt, Human
agaaguuucugccgcagcccu

SEQ ID NO: 3189760 - RNA, 22 nt, Human
agaaguuucugccgcagcccug

SEQ ID NO: 3189761 - RNA, 23 nt, Human
agaaguuucugccgcagcccugc

SEQ ID NO: 3189762 - RNA, 20 nt, Human
agaaguggggacagagcaga

SEQ ID NO: 3189763 - RNA, 21 nt, Human
agaauacugauggaauuuuuu

SEQ ID NO: 3189764 - RNA, 17 nt, Human
agaauacugauggaauu

SEQ ID NO: 3189765 - RNA, 15 nt, Human
agaauacugauggaa

SEQ ID NO: 3189766 - RNA, 20 nt, Human
agaauaugcaucuuaaaaug

SEQ ID NO: 3189767 - RNA, 19 nt, Human
agaauagaacaacauauac

SEQ ID NO: 3189768 - RNA, 21 nt, Human
agaauagaacaacauauacaa

SEQ ID NO: 3189769 - RNA, 15 nt, Human
agaauagcauguugu

SEQ ID NO: 3189770 - RNA, 16 nt, Human
agaauagaugcugacu

SEQ ID NO: 3189771 - RNA, 15 nt, Human
agaauuaacacauga

SEQ ID NO: 3189772 - RNA, 16 nt, Human
agaauguauuugcuga

SEQ ID NO: 3189773 - RNA, 14 nt, Human
agaauguaguuuga

SEQ ID NO: 3189774 - RNA, 18 nt, Human
agaauguaguuugaggaa

SEQ ID NO: 3189775 - RNA, 23 nt, Human
agaauguaagguauaucauucua

SEQ ID NO: 3189776 - RNA, 21 nt, Human
agaauguaagguauaucauuc

SEQ ID NO: 3189777 - RNA, 19 nt, Human
agaauguaagguauaucau

SEQ ID NO: 3189778 - RNA, 18 nt, Human
ucugggcaccacaaaaua

SEQ ID NO: 3189779 - RNA, 20 nt, Human
ucugggcaccacaaaauaua

SEQ ID NO: 3189780 - RNA, 21 nt, Human
ucugggcaccacaaaauauac

SEQ ID NO: 3189781 - RNA, 14 nt, Human
ucugggagcuggag

SEQ ID NO: 3189782 - RNA, 13 nt, Human
agaauucauucau

SEQ ID NO: 3189783 - RNA, 18 nt, Human
agaauucauucauacuua

SEQ ID NO: 3189784 - RNA, 21 nt, Human
agaauucauucauacuuaaaa

SEQ ID NO: 3189785 - RNA, 23 nt, Human
agaauggugauuuuaaaugugug

SEQ ID NO: 3189786 - RNA, 21 nt, Human
agaauggugauuuuaaaugug

SEQ ID NO: 3189787 - RNA, 20 nt, Human
agaauggugauuuuaaaugu

SEQ ID NO: 3189788 - RNA, 19 nt, Human
agaauggugauuuuaaaug

SEQ ID NO: 3189789 - RNA, 18 nt, Human
agaauggugauuuuaaau

SEQ ID NO: 3189790 - RNA, 16 nt, Human
agaauggugauuuuaa

SEQ ID NO: 3189791 - RNA, 14 nt, Human
agaauggugauuuu

SEQ ID NO: 3189792 - RNA, 17 nt, Human
agaauggggcugggccc

SEQ ID NO: 3189793 - RNA, 12 nt, Human
agaauguaaagc

SEQ ID NO: 3189794 - RNA, 15 nt, Human
agaauguaaagcaac

SEQ ID NO: 3189795 - RNA, 15 nt, Human
agaaucccuguguua

SEQ ID NO: 3189796 - RNA, 17 nt, Human
agaaucccuguguuaau

SEQ ID NO: 3189797 - RNA, 18 nt, Human
agaaucccuguguuaauu

SEQ ID NO: 3189798 - RNA, 19 nt, Human
agaaucccuguguuaauuu

SEQ ID NO: 3189799 - RNA, 21 nt, Human
agaaucccuguguuaauuuaa

SEQ ID NO: 3189800 - RNA, 13 nt, Human
agaauauuguauu

SEQ ID NO: 3189801 - RNA, 15 nt, Human
agaauauuguauugu

SEQ ID NO: 3189802 - RNA, 16 nt, Human
agaauauuguauuguu

SEQ ID NO: 3189803 - RNA, 18 nt, Human
agaauauuguauuguuag

SEQ ID NO: 3189804 - RNA, 21 nt, Human
agaaucauguuucuuugauca

SEQ ID NO: 3189805 - RNA, 19 nt, Human
agaaucauguuucuuugau

SEQ ID NO: 3189806 - RNA, 18 nt, Human
agaaucauguuucuuuga

SEQ ID NO: 3189807 - RNA, 21 nt, Human
agaaucaugugcgucagucca

SEQ ID NO: 3189808 - RNA, 16 nt, Human
agaaucauguuucuuu

SEQ ID NO: 3189809 - RNA, 15 nt, Human
agaaucauguuucuu

SEQ ID NO: 3189810 - RNA, 14 nt, Human
agaaucauguuucu

SEQ ID NO: 3189811 - RNA, 13 nt, Human
agaaucauguuuc

SEQ ID NO: 3189812 - RNA, 18 nt, Human
ucuagcauggcugccaau

SEQ ID NO: 3189813 - RNA, 21 nt, Human
ucuagagaaguggacuggagg

SEQ ID NO: 3189814 - RNA, 22 nt, Human
ucuagaguagagguauaauugu

SEQ ID NO: 3189815 - RNA, 9 nt, Human
ucuagaggc

SEQ ID NO: 3189816 - RNA, 19 nt, Human
ucuagaggccugaaauccu

SEQ ID NO: 3189817 - RNA, 21 nt, Human
ucuagaggccugaaauccugg

SEQ ID NO: 3189818 - RNA, 23 nt, Human
ucuagaggccugaaauccugguu

SEQ ID NO: 3189819 - RNA, 21 nt, Human
acuucccuggguuagacugcc

SEQ ID NO: 3189820 - RNA, 19 nt, Human
ucuagaauuuuaagccuuu

SEQ ID NO: 3189821 - RNA, 17 nt, Human
ucuagaauuuuaagccu

SEQ ID NO: 3189822 - RNA, 23 nt, Human
acuucccuggguuagacugccag

SEQ ID NO: 3189823 - RNA, 22 nt, Human
acuucccuggguuagacugcca

SEQ ID NO: 3189824 - RNA, 16 nt, Human
ucuagaauuuuaagcc

SEQ ID NO: 3189825 - RNA, 23 nt, Human
ucuagacacuuuuucuuuacaaa

SEQ ID NO: 3189826 - RNA, 16 nt, Human
ucuagacuauaaaugu

SEQ ID NO: 3189827 - RNA, 16 nt, Human
ucuagacacuuuuucu

SEQ ID NO: 3189828 - RNA, 15 nt, Human
ucuagacacuuuuuc

SEQ ID NO: 3189829 - RNA, 13 nt, Human
acuuccccuuccu

SEQ ID NO: 3189830 - RNA, 19 nt, Human
acuuccccuuccuaauucc

SEQ ID NO: 3189831 - RNA, 22 nt, Human
ucuaguuguuugauucagacag

SEQ ID NO: 3189832 - RNA, 19 nt, Human
ucuagcauuagguauaucu

SEQ ID NO: 3189833 - RNA, 23 nt, Human
ucuaguuguuugauucagacagc

SEQ ID NO: 3189834 - RNA, 21 nt, Human
ucuauaagcaaauugcuuuuu

SEQ ID NO: 3189835 - RNA, 16 nt, Human
ucucacuauguugccc

SEQ ID NO: 3189836 - RNA, 19 nt, Human
ucucacuauguugcccagg

SEQ ID NO: 3189837 - RNA, 17 nt, Human
ucucacuauguugccca

SEQ ID NO: 3189838 - RNA, 13 nt, Human
ucuauuuuuacau

SEQ ID NO: 3189839 - RNA, 16 nt, Human
ucuauuuuuacauuua

SEQ ID NO: 3189840 - RNA, 17 nt, Human
ucuauuuuuacauuuaa

SEQ ID NO: 3189841 - RNA, 20 nt, Human
ucucaccauuuccccagggc

SEQ ID NO: 3189842 - RNA, 21 nt, Human
ucucaccauuuccccagggca

SEQ ID NO: 3189843 - RNA, 20 nt, Human
ucuauuuucucugauacuuu

SEQ ID NO: 3189844 - RNA, 18 nt, Human
ucuauuugaauuauuucu

SEQ ID NO: 3189845 - RNA, 13 nt, Human
ucuauuuuacaac

SEQ ID NO: 3189846 - RNA, 11 nt, Human
ucuauuuuaca

SEQ ID NO: 3189847 - RNA, 19 nt, Human
ucuauuuucucugauacuu

SEQ ID NO: 3189848 - RNA, 14 nt, Human
ucuauuuauaauac

SEQ ID NO: 3189849 - RNA, 13 nt, Human
ucuauuuaauuuu

SEQ ID NO: 3189850 - RNA, 23 nt, Human
ucuauuuaauuuugacacugaaa

SEQ ID NO: 3189851 - RNA, 23 nt, Human
ucuaugggacucaaugcacugac

SEQ ID NO: 3189852 - RNA, 24 nt, Human
ucuauagaaaguguucuguuacaa

SEQ ID NO: 3189853 - RNA, 15 nt, Human
ucuauagcaucacuu

SEQ ID NO: 3189854 - RNA, 23 nt, Human
ucuauagaaaguguucuguuaca

SEQ ID NO: 3189855 - RNA, 22 nt, Human
ucuauagaaaguguucuguuac

SEQ ID NO: 3189856 - RNA, 21 nt, Human
ucuauagaaaguguucuguua

SEQ ID NO: 3189857 - RNA, 19 nt, Human
ucuauagaaaguguucugu

SEQ ID NO: 3189858 - RNA, 12 nt, Human
ucuauagaaagu

SEQ ID NO: 3189859 - RNA, 16 nt, Human
ucuauagaaaguguuc

SEQ ID NO: 3189860 - RNA, 15 nt, Human
ucuauagaaaguguu

SEQ ID NO: 3189861 - RNA, 14 nt, Human
ucuauagaaagugu

SEQ ID NO: 3189862 - RNA, 13 nt, Human
ucuauagaaagug

SEQ ID NO: 3189863 - RNA, 20 nt, Human
ucuauuagcuuacugauuaa

SEQ ID NO: 3189864 - RNA, 18 nt, Human
ucuauuagcuuacugauu

SEQ ID NO: 3189865 - RNA, 23 nt, Human
acuuaacccugacaaauuuuaau

SEQ ID NO: 3189866 - RNA, 21 nt, Human
acuuaacuguccguaagcagu

SEQ ID NO: 3189867 - RNA, 13 nt, Human
acuuaaauuuuag

SEQ ID NO: 3189868 - RNA, 15 nt, Human
acuuaaauuccucaa

SEQ ID NO: 3189869 - RNA, 22 nt, Human
acuuaaauguuauguauauggu

SEQ ID NO: 3189870 - RNA, 16 nt, Human
acuuaaauguuaugua

SEQ ID NO: 3189871 - RNA, 15 nt, Human
acuuaacaugcugug

SEQ ID NO: 3189872 - RNA, 18 nt, Human
acuuaacaugcuguguaa

SEQ ID NO: 3189873 - RNA, 20 nt, Human
acuuaacauagccaaaaugu

SEQ ID NO: 3189874 - RNA, 14 nt, Human
acuuaaauguuaug

SEQ ID NO: 3189875 - RNA, 13 nt, Human
acuuaauucuguu

SEQ ID NO: 3189876 - RNA, 14 nt, Human
acuuaauucuguuc

SEQ ID NO: 3189877 - RNA, 16 nt, Human
acuuacacuuuaugca

SEQ ID NO: 3189878 - RNA, 13 nt, Human
acuuaagcacacu

SEQ ID NO: 3189879 - RNA, 17 nt, Human
acuuacacuuuaugcac

SEQ ID NO: 3189880 - RNA, 19 nt, Human
acuuacauauuuauuuuua

SEQ ID NO: 3189881 - RNA, 14 nt, Human
acuuagcugggaga

SEQ ID NO: 3189882 - RNA, 19 nt, Human
acuuagcuggagaugucuc

SEQ ID NO: 3189883 - RNA, 23 nt, Human
acuuaggaagguggccuuccugc

SEQ ID NO: 3189884 - RNA, 21 nt, Human
acuuagcuggagaugucucua

SEQ ID NO: 3189885 - RNA, 15 nt, Human
acuuagguguggggg

SEQ ID NO: 3189886 - RNA, 15 nt, Human
acuucaguuaucuug

SEQ ID NO: 3189887 - RNA, 13 nt, Human
acuuauucaaaga

SEQ ID NO: 3189888 - RNA, 15 nt, Human
acuuauucaaagaga

SEQ ID NO: 3189889 - RNA, 17 nt, Human
acuuauucaaagagaaa

SEQ ID NO: 3189890 - RNA, 19 nt, Human
ucuaaguaaaaccacagca

SEQ ID NO: 3189891 - RNA, 23 nt, Human
uccugggcacacgcugcucugcc

SEQ ID NO: 3189892 - RNA, 15 nt, Human
ucuaaguaaaaccac

SEQ ID NO: 3189893 - RNA, 14 nt, Human
ucuaaguaaaacca

SEQ ID NO: 3189894 - RNA, 21 nt, Human
uccugggcacacgcugcucug

SEQ ID NO: 3189895 - RNA, 19 nt, Human
uccugggcacacgcugcuc

SEQ ID NO: 3189896 - RNA, 18 nt, Human
uccugggcacacgcugcu

SEQ ID NO: 3189897 - RNA, 15 nt, Human
uccugggcacacgcu

SEQ ID NO: 3189898 - RNA, 18 nt, Human
uccugggagugagcuggu

SEQ ID NO: 3189899 - RNA, 16 nt, Human
ucuacagaggccaugg

SEQ ID NO: 3189900 - RNA, 20 nt, Human
ucuacagcuaaucagcauuc

SEQ ID NO: 3189901 - RNA, 19 nt, Human
ucuacccagcgagcccugg

SEQ ID NO: 3189902 - RNA, 23 nt, Human
ucuacagcuaaucagcauucuca

SEQ ID NO: 3189903 - RNA, 20 nt, Human
ucuacagcucccccagcucc

SEQ ID NO: 3189904 - RNA, 16 nt, Human
ucuacagcucccccag

SEQ ID NO: 3189905 - RNA, 15 nt, Human
ucuacagcuccccca

SEQ ID NO: 3189906 - RNA, 12 nt, Human
ucuacagcuccc

SEQ ID NO: 3189907 - RNA, 21 nt, Human
ucuacagaggccaugggccuc

SEQ ID NO: 3189908 - RNA, 23 nt, Human
ucuaaguuuuaggguacaugugc

SEQ ID NO: 3189909 - RNA, 22 nt, Human
ucuaaguuuuaggguacaugug

SEQ ID NO: 3189910 - RNA, 18 nt, Human
ucuaauaagcuaguugaa

SEQ ID NO: 3189911 - RNA, 14 nt, Human
ucuacccuggcacu

SEQ ID NO: 3189912 - RNA, 19 nt, Human
ucuacccuggcacuauaau

SEQ ID NO: 3189913 - RNA, 20 nt, Human
ucuacccagcgagcccuggu

SEQ ID NO: 3189914 - RNA, 21 nt, Human
ucuacccuggcacuauaaugu

SEQ ID NO: 3189915 - RNA, 18 nt, Human
ucuaccggagagagaaug

SEQ ID NO: 3189916 - RNA, 16 nt, Human
acuguucucugcccuc

SEQ ID NO: 3189917 - RNA, 17 nt, Human
acuguucucugcccucc

SEQ ID NO: 3189918 - RNA, 17 nt, Human
acuguuauuuucagcau

SEQ ID NO: 3189919 - RNA, 19 nt, Human
acuguuauuuucagcauga

SEQ ID NO: 3189920 - RNA, 17 nt, Human
acuguucagcuuuuauu

SEQ ID NO: 3189921 - RNA, 18 nt, Human
acuguucucugcccucca

SEQ ID NO: 3189922 - RNA, 15 nt, Human
acuguucucugcccu

SEQ ID NO: 3189923 - RNA, 16 nt, Human
acuugcacucuucuac

SEQ ID NO: 3189924 - RNA, 23 nt, Human
acuugcagacucuacagaggcca

SEQ ID NO: 3189925 - RNA, 22 nt, Human
acuugcagacucuacagaggcc

SEQ ID NO: 3189926 - RNA, 19 nt, Human
acuugcagacucuacagag

SEQ ID NO: 3189927 - RNA, 23 nt, Human
ucucacuauguugcccaggcagg

SEQ ID NO: 3189928 - RNA, 22 nt, Human
ucucacuauguugcccaggcag

SEQ ID NO: 3189929 - RNA, 21 nt, Human
ucucacuauguugcccaggca

SEQ ID NO: 3189930 - RNA, 20 nt, Human
ucucacuauguugcccaggc

SEQ ID NO: 3189931 - RNA, 15 nt, Human
acuugcacucuucua

SEQ ID NO: 3189932 - RNA, 17 nt, Human
acuugauuugagauuuu

SEQ ID NO: 3189933 - RNA, 17 nt, Human
acuugcuuaaaugugaa

SEQ ID NO: 3189934 - RNA, 16 nt, Human
acuugcuuaaauguga

SEQ ID NO: 3189935 - RNA, 18 nt, Human
acuugcuuaaaugugaau

SEQ ID NO: 3189936 - RNA, 12 nt, Human
acuugcugccuc

SEQ ID NO: 3189937 - RNA, 11 nt, Human
acuugcugccu

SEQ ID NO: 3189938 - RNA, 13 nt, Human
acuugcugccucg

SEQ ID NO: 3189939 - RNA, 14 nt, Human
acuugcugugacuu

SEQ ID NO: 3189940 - RNA, 15 nt, Human
acuugcuuaaaugug

SEQ ID NO: 3189941 - RNA, 14 nt, Human
acuugcuuaaaugu

SEQ ID NO: 3189942 - RNA, 23 nt, Human
acuugcuuuggucacuuuuagau

SEQ ID NO: 3189943 - RNA, 19 nt, Human
acuugcuuuggucacuuuu

SEQ ID NO: 3189944 - RNA, 18 nt, Human
acuuguggacacagcucu

SEQ ID NO: 3189945 - RNA, 22 nt, Human
acuuguggacacagcucuucuc

SEQ ID NO: 3189946 - RNA, 19 nt, Human
acuuguggacacagcucuu

SEQ ID NO: 3189947 - RNA, 20 nt, Human
acuugucuuuggacccugag

SEQ ID NO: 3189948 - RNA, 18 nt, Human
acuugucuuuggacccug

SEQ ID NO: 3189949 - RNA, 21 nt, Human
acuugucuuuggacccugagg

SEQ ID NO: 3189950 - RNA, 21 nt, Human
ucucaugccucagccuccuga

SEQ ID NO: 3189951 - RNA, 15 nt, Human
ucucaugcuccuuaa

SEQ ID NO: 3189952 - RNA, 16 nt, Human
ucucaugcuccuuaau

SEQ ID NO: 3189953 - RNA, 13 nt, Human
ucucaugcugccc

SEQ ID NO: 3189954 - RNA, 19 nt, Human
ucucaugcugccccugccu

SEQ ID NO: 3189955 - RNA, 19 nt, Human
ucucauuguucaauuccca

SEQ ID NO: 3189956 - RNA, 17 nt, Human
ucucaggccagcugcuu

SEQ ID NO: 3189957 - RNA, 18 nt, Human
ucucaggccagcugcuug

SEQ ID NO: 3189958 - RNA, 21 nt, Human
ucucaggccagcugcuugggc

SEQ ID NO: 3189959 - RNA, 20 nt, Human
ucucaugccucagccuccug

SEQ ID NO: 3189960 - RNA, 14 nt, Human
ucucauuugucaca

SEQ ID NO: 3189961 - RNA, 19 nt, Human
ucucauuugccaauaauaa

SEQ ID NO: 3189962 - RNA, 15 nt, Human
ucuccaagcaggaca

SEQ ID NO: 3189963 - RNA, 16 nt, Human
ucuccaagcaggacau

SEQ ID NO: 3189964 - RNA, 16 nt, Human
ucucauuugucacaca

SEQ ID NO: 3189965 - RNA, 21 nt, Human
ucuccaaaaaaaaaaaaaaua

SEQ ID NO: 3189966 - RNA, 23 nt, Human
ucuccaaaaaaaaaaaaaauaca

SEQ ID NO: 3189967 - RNA, 23 nt, Human
ucucaggaaaucaaauaugcaaa

SEQ ID NO: 3189968 - RNA, 21 nt, Human
ucucaggaaaucaaauaugca

SEQ ID NO: 3189969 - RNA, 14 nt, Human
ucucaggaaaucaa

SEQ ID NO: 3189970 - RNA, 21 nt, Human
ucucagcauuaccucuuugga

SEQ ID NO: 3189971 - RNA, 12 nt, Human
ucucaggaaauc

SEQ ID NO: 3189972 - RNA, 12 nt, Human
ucucaggccagc

SEQ ID NO: 3189973 - RNA, 13 nt, Human
ucucaggccagcu

SEQ ID NO: 3189974 - RNA, 12 nt, Human
ucucaggccaaa

SEQ ID NO: 3189975 - RNA, 10 nt, Human
ucucaggcca

SEQ ID NO: 3189976 - RNA, 21 nt, Human
acuuugacagcgcacagcugc

SEQ ID NO: 3189977 - RNA, 16 nt, Human
acuuuggaucaggaaa

SEQ ID NO: 3189978 - RNA, 22 nt, Human
acuuugguagcugggaaagcau

SEQ ID NO: 3189979 - RNA, 23 nt, Human
acuuugguagcugggaaagcaua

SEQ ID NO: 3189980 - RNA, 21 nt, Human
acuuuguuaguuucuccaagc

SEQ ID NO: 3189981 - RNA, 14 nt, Human
acuuuguucuggcu

SEQ ID NO: 3189982 - RNA, 20 nt, Human
acuuuguuaguuucuccaag

SEQ ID NO: 3189983 - RNA, 18 nt, Human
acuuuguguucaccuugu

SEQ ID NO: 3189984 - RNA, 18 nt, Human
acuuuguuaggccaaaga

SEQ ID NO: 3189985 - RNA, 14 nt, Human
acuuuguuaggcca

SEQ ID NO: 3189986 - RNA, 14 nt, Human
acuuugguuucuga

SEQ ID NO: 3189987 - RNA, 14 nt, Human
acuuuguaaauucu

SEQ ID NO: 3189988 - RNA, 16 nt, Human
acuuuguaaauucuga

SEQ ID NO: 3189989 - RNA, 17 nt, Human
acuuuguaaauucugau

SEQ ID NO: 3189990 - RNA, 18 nt, Human
acuuuguaaauucugauu

SEQ ID NO: 3189991 - RNA, 19 nt, Human
acuuuguaaauucugauuu

SEQ ID NO: 3189992 - RNA, 21 nt, Human
acuuuguaaauucugauuucu

SEQ ID NO: 3189993 - RNA, 23 nt, Human
acuuuguaaauucugauuucuuu

SEQ ID NO: 3189994 - RNA, 16 nt, Human
ucuccuucaccuuugu

SEQ ID NO: 3189995 - RNA, 14 nt, Human
ucuccuucaccuuu

SEQ ID NO: 3189996 - RNA, 15 nt, Human
ucuccuucaccuuug

SEQ ID NO: 3189997 - RNA, 17 nt, Human
agaaaaaauauuuuccc

SEQ ID NO: 3189998 - RNA, 22 nt, Human
agaaaaaagguucuuuguguau

SEQ ID NO: 3189999 - RNA, 22 nt, Human
acuuuguuaggccaaagacaaa

SEQ ID NO: 3190000 - RNA, 18 nt, Human
acuuuuuaaaaaacuuuc

SEQ ID NO: 3190001 - RNA, 10 nt, Human
agaaaaaaga

SEQ ID NO: 3190002 - RNA, 14 nt, Human
agaaaaaaguugua

SEQ ID NO: 3190003 - RNA, 12 nt, Human
agaaaaaaguug

SEQ ID NO: 3190004 - RNA, 10 nt, Human
agaaaaaagu

SEQ ID NO: 3190005 - RNA, 18 nt, Human
agaaaaaagagaaaagaa

SEQ ID NO: 3190006 - RNA, 17 nt, Human
agaaaaaagagaaaaga

SEQ ID NO: 3190007 - RNA, 23 nt, Human
ucuccgaaaugcugucuuucuug

SEQ ID NO: 3190008 - RNA, 20 nt, Human
ucuccgaaaugcugucuuuc

SEQ ID NO: 3190009 - RNA, 14 nt, Human
ucuccucaggacca

SEQ ID NO: 3190010 - RNA, 10 nt, Human
ucuccucagg

SEQ ID NO: 3190011 - RNA, 17 nt, Human
ucuccgaccagacaccu

SEQ ID NO: 3190012 - RNA, 21 nt, Human
ucucccuuggauuguccccga

SEQ ID NO: 3190013 - RNA, 17 nt, Human
ucuccgaaaugcugucu

SEQ ID NO: 3190014 - RNA, 15 nt, Human
ucucccuuuuccaug

SEQ ID NO: 3190015 - RNA, 23 nt, Human
ucuccccagcaagugagagcugg

SEQ ID NO: 3190016 - RNA, 18 nt, Human
ucuccaagcaggacaugg

SEQ ID NO: 3190017 - RNA, 19 nt, Human
ucuccaagcaggacaugga

SEQ ID NO: 3190018 - RNA, 15 nt, Human
acuuuaccucucugu

SEQ ID NO: 3190019 - RNA, 22 nt, Human
acuuuaccucucugucaugugc

SEQ ID NO: 3190020 - RNA, 14 nt, Human
acuuucuucaaaau

SEQ ID NO: 3190021 - RNA, 19 nt, Human
acuuugacagcgcacagcu

SEQ ID NO: 3190022 - RNA, 17 nt, Human
acuuucuucaaaauaua

SEQ ID NO: 3190023 - RNA, 14 nt, Human
acuuucuucaggua

SEQ ID NO: 3190024 - RNA, 23 nt, Human
acuuugaauuuuagcacauugca

SEQ ID NO: 3190025 - RNA, 17 nt, Human
acuuugacacuuuucau

SEQ ID NO: 3190026 - RNA, 18 nt, Human
acuuugacacuuuucaua

SEQ ID NO: 3190027 - RNA, 22 nt, Human
acuuugacacuuuucauaucau

SEQ ID NO: 3190028 - RNA, 23 nt, Human
acuuugacacuuuucauaucauu

SEQ ID NO: 3190029 - RNA, 12 nt, Human
acuuucuguuaa

SEQ ID NO: 3190030 - RNA, 16 nt, Human
acuuucuguuaaaaug

SEQ ID NO: 3190031 - RNA, 13 nt, Human
acuuucuguuaaa

SEQ ID NO: 3190032 - RNA, 23 nt, Human
acuuucuguuaaaaugcaugauu

SEQ ID NO: 3190033 - RNA, 22 nt, Human
acuuucuguuaaaaugcaugau

SEQ ID NO: 3190034 - RNA, 19 nt, Human
acuuucuguuaaaaugcau

SEQ ID NO: 3190035 - RNA, 17 nt, Human
acuuucuguuaaaaugc

SEQ ID NO: 3190036 - RNA, 19 nt, Human
acuuucugaaauucacaaa

SEQ ID NO: 3190037 - RNA, 23 nt, Human
acuuucuggggccuaauaaaacu

SEQ ID NO: 3190038 - RNA, 17 nt, Human
ucuccucugcugcuggc

SEQ ID NO: 3190039 - RNA, 18 nt, Human
ucuccucugcugcuggcu

SEQ ID NO: 3190040 - RNA, 15 nt, Human
ucuccucugcugcug

SEQ ID NO: 3190041 - RNA, 16 nt, Human
ucuccucugcugcugg

SEQ ID NO: 3190042 - RNA, 15 nt, Human
ucuccuccagaguca

SEQ ID NO: 3190043 - RNA, 17 nt, Human
ucagauuugccuuauug

SEQ ID NO: 3190044 - RNA, 20 nt, Human
ucagauuugcacaaaaagau

SEQ ID NO: 3190045 - RNA, 19 nt, Human
ucagauuugcacaaaaaga

SEQ ID NO: 3190046 - RNA, 16 nt, Human
ucagauuugcacaaaa

SEQ ID NO: 3190047 - RNA, 15 nt, Human
ucagauuugcacaaa

SEQ ID NO: 3190048 - RNA, 15 nt, Human
ucagcaaaagaugcu

SEQ ID NO: 3190049 - RNA, 15 nt, Human
ucagccacugaggga

SEQ ID NO: 3190050 - RNA, 21 nt, Human
ucagccagaagccacccaaag

SEQ ID NO: 3190051 - RNA, 21 nt, Human
ucagauuugaacucuucaauc

SEQ ID NO: 3190052 - RNA, 14 nt, Human
ucagauuugcacaa

SEQ ID NO: 3190053 - RNA, 12 nt, Human
ucagauuugaac

SEQ ID NO: 3190054 - RNA, 22 nt, Human
accauaauguacugauuucagu

SEQ ID NO: 3190055 - RNA, 16 nt, Human
ucagcccucccugccc

SEQ ID NO: 3190056 - RNA, 15 nt, Human
ucagcccucccugcc

SEQ ID NO: 3190057 - RNA, 14 nt, Human
ucagcccucccugc

SEQ ID NO: 3190058 - RNA, 13 nt, Human
ucagcccucccug

SEQ ID NO: 3190059 - RNA, 23 nt, Human
acccaggagccccgaggccuucu

SEQ ID NO: 3190060 - RNA, 19 nt, Human
acccaggagccccgaggcc

SEQ ID NO: 3190061 - RNA, 13 nt, Human
accccagccccaa

SEQ ID NO: 3190062 - RNA, 22 nt, Human
accccagccccaaaacucuccu

SEQ ID NO: 3190063 - RNA, 12 nt, Human
accccagccuca

SEQ ID NO: 3190064 - RNA, 17 nt, Human
accccacacacgccaga

SEQ ID NO: 3190065 - RNA, 14 nt, Human
accccuggacccca

SEQ ID NO: 3190066 - RNA, 12 nt, Human
accccuggaccc

SEQ ID NO: 3190067 - RNA, 15 nt, Human
accccugagcuugca

SEQ ID NO: 3190068 - RNA, 22 nt, Human
accccugcaguuccccuggaag

SEQ ID NO: 3190069 - RNA, 11 nt, Human
accccugcccc

SEQ ID NO: 3190070 - RNA, 16 nt, Human
accccugcccagauca

SEQ ID NO: 3190071 - RNA, 14 nt, Human
accccucgcccagu

SEQ ID NO: 3190072 - RNA, 19 nt, Human
accccucgcccagucccag

SEQ ID NO: 3190073 - RNA, 18 nt, Human
accccucgcccaguccca

SEQ ID NO: 3190074 - RNA, 23 nt, Human
accccucgcccagucccagcagc

SEQ ID NO: 3190075 - RNA, 22 nt, Human
accccucgcccagucccagcag

SEQ ID NO: 3190076 - RNA, 24 nt, Human
accccucgcccagucccagcagcc

SEQ ID NO: 3190077 - RNA, 18 nt, Human
accccaucucuacaaaaa

SEQ ID NO: 3190078 - RNA, 18 nt, Human
accccaucccuccuuaag

SEQ ID NO: 3190079 - RNA, 21 nt, Human
accccagccucaaauccagga

SEQ ID NO: 3190080 - RNA, 20 nt, Human
accccagccucaaauccagg

SEQ ID NO: 3190081 - RNA, 18 nt, Human
accccauccuccagggcu

SEQ ID NO: 3190082 - RNA, 12 nt, Human
ucagcuccagcu

SEQ ID NO: 3190083 - RNA, 14 nt, Human
ucagcguuuugcaa

SEQ ID NO: 3190084 - RNA, 23 nt, Human
ucagcggggacagcuccuucugu

SEQ ID NO: 3190085 - RNA, 21 nt, Human
ucagcggggacagcuccuucu

SEQ ID NO: 3190086 - RNA, 20 nt, Human
ucagcggggacagcuccuuc

SEQ ID NO: 3190087 - RNA, 19 nt, Human
ucagcggggacagcuccuu

SEQ ID NO: 3190088 - RNA, 16 nt, Human
accccuggugguucac

SEQ ID NO: 3190089 - RNA, 17 nt, Human
accccuggcuuuucacu

SEQ ID NO: 3190090 - RNA, 15 nt, Human
accccuggaccccag

SEQ ID NO: 3190091 - RNA, 21 nt, Human
accccuggcuuuucacugcug

SEQ ID NO: 3190092 - RNA, 20 nt, Human
accccuggcuuuucacugcu

SEQ ID NO: 3190093 - RNA, 19 nt, Human
accccuggcuuuucacugc

SEQ ID NO: 3190094 - RNA, 18 nt, Human
accccuggcuuuucacug

SEQ ID NO: 3190095 - RNA, 18 nt, Human
ucagcggggacagcuccu

SEQ ID NO: 3190096 - RNA, 15 nt, Human
acccgggaggcagag

SEQ ID NO: 3190097 - RNA, 17 nt, Human
acccgggaggcagaggu

SEQ ID NO: 3190098 - RNA, 12 nt, Human
acccgggaaggg

SEQ ID NO: 3190099 - RNA, 13 nt, Human
acccgggaagggg

SEQ ID NO: 3190100 - RNA, 20 nt, Human
acccggccccugcugguuca

SEQ ID NO: 3190101 - RNA, 17 nt, Human
acccggccccugcuggu

SEQ ID NO: 3190102 - RNA, 22 nt, Human
acccggccccugcugguucagg

SEQ ID NO: 3190103 - RNA, 16 nt, Human
acccggccccugcugg

SEQ ID NO: 3190104 - RNA, 15 nt, Human
acccggccccugcug

SEQ ID NO: 3190105 - RNA, 14 nt, Human
acccggccccugcu

SEQ ID NO: 3190106 - RNA, 21 nt, Human
acccggaggggccuggcagcc

SEQ ID NO: 3190107 - RNA, 18 nt, Human
acccggaggggccuggca

SEQ ID NO: 3190108 - RNA, 22 nt, Human
ucagguaacaggcagauacagg

SEQ ID NO: 3190109 - RNA, 21 nt, Human
ucagguaacaggcagauacag

SEQ ID NO: 3190110 - RNA, 23 nt, Human
ucagguaacaggcagauacagga

SEQ ID NO: 3190111 - RNA, 15 nt, Human
acccggaggggccug

SEQ ID NO: 3190112 - RNA, 19 nt, Human
ucagggucccugguggcag

SEQ ID NO: 3190113 - RNA, 16 nt, Human
ucaggguuggccccug

SEQ ID NO: 3190114 - RNA, 16 nt, Human
ucagggugucccagac

SEQ ID NO: 3190115 - RNA, 23 nt, Human
ucaggccaggcccucugcccacu

SEQ ID NO: 3190116 - RNA, 22 nt, Human
ucagcuuguaaauagcucaggu

SEQ ID NO: 3190117 - RNA, 21 nt, Human
ucagcuuguaaauagcucagg

SEQ ID NO: 3190118 - RNA, 14 nt, Human
ucagcuccagcuca

SEQ ID NO: 3190119 - RNA, 20 nt, Human
ucagcuuguaaauagcucag

SEQ ID NO: 3190120 - RNA, 21 nt, Human
ucaggccaggcccucugccca

SEQ ID NO: 3190121 - RNA, 22 nt, Human
ucaggccaggcccucugcccac

SEQ ID NO: 3190122 - RNA, 20 nt, Human
ucaggccaggcccucugccc

SEQ ID NO: 3190123 - RNA, 13 nt, Human
acccugaggccca

SEQ ID NO: 3190124 - RNA, 14 nt, Human
acccugaggcccag

SEQ ID NO: 3190125 - RNA, 12 nt, Human
acccugaaaugu

SEQ ID NO: 3190126 - RNA, 11 nt, Human
acccugaaaug

SEQ ID NO: 3190127 - RNA, 23 nt, Human
acccugaacaacgagccuuuuca

SEQ ID NO: 3190128 - RNA, 15 nt, Human
acccugaaaugugug

SEQ ID NO: 3190129 - RNA, 14 nt, Human
acccugaaaugugu

SEQ ID NO: 3190130 - RNA, 13 nt, Human
acccugaaaugug

SEQ ID NO: 3190131 - RNA, 16 nt, Human
acccugaaagcccuga

SEQ ID NO: 3190132 - RNA, 18 nt, Human
acccugaaagcccugagc

SEQ ID NO: 3190133 - RNA, 14 nt, Human
acccgguccccacu

SEQ ID NO: 3190134 - RNA, 22 nt, Human
acccgguucaguguuucugggg

SEQ ID NO: 3190135 - RNA, 14 nt, Human
acccgguucagugu

SEQ ID NO: 3190136 - RNA, 20 nt, Human
acccuuguggucccacccca

SEQ ID NO: 3190137 - RNA, 23 nt, Human
acccuuguggucccaccccacac

SEQ ID NO: 3190138 - RNA, 17 nt, Human
acccuugccgucuaccu

SEQ ID NO: 3190139 - RNA, 15 nt, Human
accgaaaacguggcu

SEQ ID NO: 3190140 - RNA, 19 nt, Human
acccuuucuacuuccaaga

SEQ ID NO: 3190141 - RNA, 21 nt, Human
acccuuuccagguucugaaag

SEQ ID NO: 3190142 - RNA, 13 nt, Human
acccuuguuccag

SEQ ID NO: 3190143 - RNA, 18 nt, Human
acccuuucuacuuccaag

SEQ ID NO: 3190144 - RNA, 15 nt, Human
acccugaggcccaga

SEQ ID NO: 3190145 - RNA, 16 nt, Human
acccugaggcccagag

SEQ ID NO: 3190146 - RNA, 15 nt, Human
acccugcccuguggg

SEQ ID NO: 3190147 - RNA, 14 nt, Human
acccugcccugugg

SEQ ID NO: 3190148 - RNA, 17 nt, Human
acccugcccugugggcc

SEQ ID NO: 3190149 - RNA, 22 nt, Human
acccugcccugugggcccccaa

SEQ ID NO: 3190150 - RNA, 14 nt, Human
acccuucuucaugu

SEQ ID NO: 3190151 - RNA, 17 nt, Human
acccuucuucauguuca

SEQ ID NO: 3190152 - RNA, 22 nt, Human
acccuucuucauguucaauuau

SEQ ID NO: 3190153 - RNA, 16 nt, Human
ucauaaauuuaugguu

SEQ ID NO: 3190154 - RNA, 14 nt, Human
ucauaaccuagccu

SEQ ID NO: 3190155 - RNA, 13 nt, Human
ucauaaauucaaa

SEQ ID NO: 3190156 - RNA, 19 nt, Human
ucauaguaugguggcuggg

SEQ ID NO: 3190157 - RNA, 18 nt, Human
ucauaguaugguggcugg

SEQ ID NO: 3190158 - RNA, 15 nt, Human
ucauaguaugguggc

SEQ ID NO: 3190159 - RNA, 20 nt, Human
ucauaguagaacuuuauaaa

SEQ ID NO: 3190160 - RNA, 24 nt, Human
ucauaaauucaaaccuaaguugcu

SEQ ID NO: 3190161 - RNA, 21 nt, Human
ucauaguaugguggcuggguu

SEQ ID NO: 3190162 - RNA, 17 nt, Human
ucauaguuuuauuuaua

SEQ ID NO: 3190163 - RNA, 15 nt, Human
ucauaguuuuauuua

SEQ ID NO: 3190164 - RNA, 16 nt, Human
ucauaguuuuauuuau

SEQ ID NO: 3190165 - RNA, 18 nt, Human
ucauauaagauucauauu

SEQ ID NO: 3190166 - RNA, 17 nt, Human
ucauauauaauaaauua

SEQ ID NO: 3190167 - RNA, 21 nt, Human
ucauauuuuaauuucaagcuu

SEQ ID NO: 3190168 - RNA, 17 nt, Human
ucauauuuuaauuucaa

SEQ ID NO: 3190169 - RNA, 16 nt, Human
ucauauuuuaauuuca

SEQ ID NO: 3190170 - RNA, 22 nt, Human
ucauauuuguacuuucuguuaa

SEQ ID NO: 3190171 - RNA, 20 nt, Human
ucauauuugaggaguguuaa

SEQ ID NO: 3190172 - RNA, 19 nt, Human
ucauauuuguacuuucugu

SEQ ID NO: 3190173 - RNA, 14 nt, Human
ucauauuuguacuu

SEQ ID NO: 3190174 - RNA, 20 nt, Human
ucauauuuuaaacagaggau

SEQ ID NO: 3190175 - RNA, 16 nt, Human
accgagucucuucucc

SEQ ID NO: 3190176 - RNA, 17 nt, Human
accgagucucuucucca

SEQ ID NO: 3190177 - RNA, 23 nt, Human
ucauauuuacuucuuauacauuu

SEQ ID NO: 3190178 - RNA, 15 nt, Human
ucauauuuacuucuu

SEQ ID NO: 3190179 - RNA, 22 nt, Human
ucauauugguauauccuuuucu

SEQ ID NO: 3190180 - RNA, 21 nt, Human
ucauauugguauauccuuuuc

SEQ ID NO: 3190181 - RNA, 13 nt, Human
ucauauuuaauau

SEQ ID NO: 3190182 - RNA, 22 nt, Human
ucauauauuuuaugaaucagaa

SEQ ID NO: 3190183 - RNA, 16 nt, Human
ucauauauuuuaugaa

SEQ ID NO: 3190184 - RNA, 18 nt, Human
ucauauccccuauuuaac

SEQ ID NO: 3190185 - RNA, 12 nt, Human
ucauaucauuuc

SEQ ID NO: 3190186 - RNA, 13 nt, Human
ucauaucauuucu

SEQ ID NO: 3190187 - RNA, 14 nt, Human
ucauaucauuucuu

SEQ ID NO: 3190188 - RNA, 14 nt, Human
ucaguauguggaag

SEQ ID NO: 3190189 - RNA, 12 nt, Human
ucaguaugugga

SEQ ID NO: 3190190 - RNA, 16 nt, Human
ucagugccaaaaacaa

SEQ ID NO: 3190191 - RNA, 12 nt, Human
ucagugccacua

SEQ ID NO: 3190192 - RNA, 17 nt, Human
accgaaaacguggcugc

SEQ ID NO: 3190193 - RNA, 19 nt, Human
accgaaaacguggcugcuu

SEQ ID NO: 3190194 - RNA, 22 nt, Human
ucaguaguuugcauuucagaaa

SEQ ID NO: 3190195 - RNA, 21 nt, Human
ucaguaguuugcauuucagaa

SEQ ID NO: 3190196 - RNA, 20 nt, Human
ucaguaguuugcauuucaga

SEQ ID NO: 3190197 - RNA, 19 nt, Human
ucaguaguuugcauuucag

SEQ ID NO: 3190198 - RNA, 11 nt, Human
ucagugccuua

SEQ ID NO: 3190199 - RNA, 12 nt, Human
ucagugccuuau

SEQ ID NO: 3190200 - RNA, 14 nt, Human
ucagugccuuaugg

SEQ ID NO: 3190201 - RNA, 15 nt, Human
ucagugccuuaugga

SEQ ID NO: 3190202 - RNA, 9 nt, Human
ucagugccu

SEQ ID NO: 3190203 - RNA, 10 nt, Human
ucagugccuu

SEQ ID NO: 3190204 - RNA, 20 nt, Human
ucagugcccuccaggauaga

SEQ ID NO: 3190205 - RNA, 23 nt, Human
ucagugccccgucuacagcuccc

SEQ ID NO: 3190206 - RNA, 15 nt, Human
ucaguuuuucuuaau

SEQ ID NO: 3190207 - RNA, 16 nt, Human
ucagugccuuauggaa

SEQ ID NO: 3190208 - RNA, 15 nt, Human
ucagugcuucgcaga

SEQ ID NO: 3190209 - RNA, 11 nt, Human
ucaguggcagc

SEQ ID NO: 3190210 - RNA, 12 nt, Human
ucaguggcagcu

SEQ ID NO: 3190211 - RNA, 16 nt, Human
ucaguggcagcugcuu

SEQ ID NO: 3190212 - RNA, 16 nt, Human
ucaguggggaggggcu

SEQ ID NO: 3190213 - RNA, 12 nt, Human
accuagaaaaca

SEQ ID NO: 3190214 - RNA, 13 nt, Human
accuacuuucuuc

SEQ ID NO: 3190215 - RNA, 12 nt, Human
accgcagacagg

SEQ ID NO: 3190216 - RNA, 16 nt, Human
accgcagacaggacca

SEQ ID NO: 3190217 - RNA, 20 nt, Human
accuauuuuugacauggaaa

SEQ ID NO: 3190218 - RNA, 21 nt, Human
accucacgugcaaagccacca

SEQ ID NO: 3190219 - RNA, 14 nt, Human
accuccucuccuga

SEQ ID NO: 3190220 - RNA, 13 nt, Human
accuccucuccug

SEQ ID NO: 3190221 - RNA, 19 nt, Human
accuccccuugccagcugc

SEQ ID NO: 3190222 - RNA, 17 nt, Human
accuccccuugccagcu

SEQ ID NO: 3190223 - RNA, 16 nt, Human
accuccccuugccagc

SEQ ID NO: 3190224 - RNA, 15 nt, Human
accuccccuugccag

SEQ ID NO: 3190225 - RNA, 20 nt, Human
accucccacaaaggagagcu

SEQ ID NO: 3190226 - RNA, 22 nt, Human
accuccauguggacuuaggaag

SEQ ID NO: 3190227 - RNA, 15 nt, Human
accucacucugcuac

SEQ ID NO: 3190228 - RNA, 16 nt, Human
accucacucugcuacc

SEQ ID NO: 3190229 - RNA, 23 nt, Human
accucacucugcuaccuugcccc

SEQ ID NO: 3190230 - RNA, 24 nt, Human
accucacucugcuaccuugcccca

SEQ ID NO: 3190231 - RNA, 22 nt, Human
accucacucagcaccacucaag

SEQ ID NO: 3190232 - RNA, 20 nt, Human
accucacucagcaccacuca

SEQ ID NO: 3190233 - RNA, 19 nt, Human
accucacucagcaccacuc

SEQ ID NO: 3190234 - RNA, 17 nt, Human
accucacucagcaccac

SEQ ID NO: 3190235 - RNA, 16 nt, Human
accucacucagcacca

SEQ ID NO: 3190236 - RNA, 15 nt, Human
accucacucagcacc

SEQ ID NO: 3190237 - RNA, 14 nt, Human
accucacucagcac

SEQ ID NO: 3190238 - RNA, 21 nt, Human
accucacucagaaguccagag

SEQ ID NO: 3190239 - RNA, 23 nt, Human
ucauccuuucacuucuuucccuu

SEQ ID NO: 3190240 - RNA, 13 nt, Human
ucauccauccagg

SEQ ID NO: 3190241 - RNA, 11 nt, Human
ucaugauuuuu

SEQ ID NO: 3190242 - RNA, 15 nt, Human
ucaugaaauuacccu

SEQ ID NO: 3190243 - RNA, 21 nt, Human
ucaugaaaugcuaugucauuu

SEQ ID NO: 3190244 - RNA, 20 nt, Human
ucaugaaaugcuaugucauu

SEQ ID NO: 3190245 - RNA, 18 nt, Human
ucaugaaaugcuauguca

SEQ ID NO: 3190246 - RNA, 17 nt, Human
ucauguuuacagaggac

SEQ ID NO: 3190247 - RNA, 11 nt, Human
ucauguuucuu

SEQ ID NO: 3190248 - RNA, 14 nt, Human
ucauguuucuuuga

SEQ ID NO: 3190249 - RNA, 12 nt, Human
ucauguuucuuu

SEQ ID NO: 3190250 - RNA, 21 nt, Human
ucauguuucuuugaucaugaa

SEQ ID NO: 3190251 - RNA, 15 nt, Human
ucauguuucuuugau

SEQ ID NO: 3190252 - RNA, 22 nt, Human
ucaugugggccacacaagugca

SEQ ID NO: 3190253 - RNA, 16 nt, Human
ucaugcacacaauuag

SEQ ID NO: 3190254 - RNA, 21 nt, Human
ucaugcacacaauuagauuuc

SEQ ID NO: 3190255 - RNA, 16 nt, Human
ucaugcagguuagaaa

SEQ ID NO: 3190256 - RNA, 21 nt, Human
ucaugcagaguauuucuaaag

SEQ ID NO: 3190257 - RNA, 17 nt, Human
ucaugcagaguauuucu

SEQ ID NO: 3190258 - RNA, 19 nt, Human
accaccaacuacuaccugu

SEQ ID NO: 3190259 - RNA, 16 nt, Human
accacaucuugcucug

SEQ ID NO: 3190260 - RNA, 18 nt, Human
accacaugugcacaugca

SEQ ID NO: 3190261 - RNA, 20 nt, Human
accaccacacccagcccacu

SEQ ID NO: 3190262 - RNA, 15 nt, Human
accaccacacccagc

SEQ ID NO: 3190263 - RNA, 19 nt, Human
accacaucuugcucugcug

SEQ ID NO: 3190264 - RNA, 18 nt, Human
accacaucuugcucugcu

SEQ ID NO: 3190265 - RNA, 17 nt, Human
accacaucuugcucugc

SEQ ID NO: 3190266 - RNA, 15 nt, Human
accacaggugcccgc

SEQ ID NO: 3190267 - RNA, 21 nt, Human
accacagcuccuuuuccagag

SEQ ID NO: 3190268 - RNA, 17 nt, Human
accacagcuccuuuucc

SEQ ID NO: 3190269 - RNA, 15 nt, Human
accacagcuccuuuu

SEQ ID NO: 3190270 - RNA, 12 nt, Human
accacagcuccu

SEQ ID NO: 3190271 - RNA, 16 nt, Human
ucaccaugaucacuua

SEQ ID NO: 3190272 - RNA, 20 nt, Human
ucaccauuuccccagggcac

SEQ ID NO: 3190273 - RNA, 19 nt, Human
ucaccauuuccccagggca

SEQ ID NO: 3190274 - RNA, 17 nt, Human
ucaccauuuccccaggg

SEQ ID NO: 3190275 - RNA, 16 nt, Human
ucaccauuuccccagg

SEQ ID NO: 3190276 - RNA, 19 nt, Human
ucaccauguuggccaggcu

SEQ ID NO: 3190277 - RNA, 22 nt, Human
ucaccauguuggccaggcuggu

SEQ ID NO: 3190278 - RNA, 21 nt, Human
ucaccauucguacauaauacu

SEQ ID NO: 3190279 - RNA, 16 nt, Human
ucacccaccagacuuu

SEQ ID NO: 3190280 - RNA, 23 nt, Human
ucacagcaagucacuggccagug

SEQ ID NO: 3190281 - RNA, 23 nt, Human
ucacagaugugugauucacagug

SEQ ID NO: 3190282 - RNA, 21 nt, Human
ucacagaugugugauucacag

SEQ ID NO: 3190283 - RNA, 16 nt, Human
ucacaguucucuccuu

SEQ ID NO: 3190284 - RNA, 20 nt, Human
ucacaguucucuccuucuuc

SEQ ID NO: 3190285 - RNA, 13 nt, Human
ucacagccucuga

SEQ ID NO: 3190286 - RNA, 20 nt, Human
ucacagaugggugcuuggag

SEQ ID NO: 3190287 - RNA, 14 nt, Human
ucacaaccuucugu

SEQ ID NO: 3190288 - RNA, 16 nt, Human
accaaagcgaauuuua

SEQ ID NO: 3190289 - RNA, 21 nt, Human
ucacaacagauuauuaccuua

SEQ ID NO: 3190290 - RNA, 17 nt, Human
ucacaaaggaugcccaa

SEQ ID NO: 3190291 - RNA, 19 nt, Human
ucaauuucaauuuugucug

SEQ ID NO: 3190292 - RNA, 16 nt, Human
ucacuaggcuucuggu

SEQ ID NO: 3190293 - RNA, 18 nt, Human
ucacuacagguuaaaaga

SEQ ID NO: 3190294 - RNA, 13 nt, Human
ucacuaaacucug

SEQ ID NO: 3190295 - RNA, 19 nt, Human
ucacuaaaaggaagacagu

SEQ ID NO: 3190296 - RNA, 22 nt, Human
ucacuaagaacaaaagaagcag

SEQ ID NO: 3190297 - RNA, 16 nt, Human
ucacgucauaggaagu

SEQ ID NO: 3190298 - RNA, 14 nt, Human
ucacgucauaggaa

SEQ ID NO: 3190299 - RNA, 17 nt, Human
ucacgucauaggaaguu

SEQ ID NO: 3190300 - RNA, 14 nt, Human
ucacgugcaaagcc

SEQ ID NO: 3190301 - RNA, 22 nt, Human
accagcgugugacuacuccccc

SEQ ID NO: 3190302 - RNA, 13 nt, Human
accagcugugucc

SEQ ID NO: 3190303 - RNA, 18 nt, Human
accagcuguguccggccc

SEQ ID NO: 3190304 - RNA, 15 nt, Human
accagcuuugacccg

SEQ ID NO: 3190305 - RNA, 20 nt, Human
accagcuuggcucaggcuga

SEQ ID NO: 3190306 - RNA, 19 nt, Human
accagcuuggcucaggcug

SEQ ID NO: 3190307 - RNA, 18 nt, Human
accaguacauucucaguu

SEQ ID NO: 3190308 - RNA, 20 nt, Human
accagucuuucaacucauug

SEQ ID NO: 3190309 - RNA, 23 nt, Human
ucacuugaacccgggaggcagag

SEQ ID NO: 3190310 - RNA, 21 nt, Human
ucacuguuuagauuugccaua

SEQ ID NO: 3190311 - RNA, 14 nt, Human
ucacuguuucaucu

SEQ ID NO: 3190312 - RNA, 23 nt, Human
ucacuguuucaucuaagugccuc

SEQ ID NO: 3190313 - RNA, 15 nt, Human
ucacuguuuagauuu

SEQ ID NO: 3190314 - RNA, 16 nt, Human
ucacuguuuagauuug

SEQ ID NO: 3190315 - RNA, 17 nt, Human
ucacuguuuagauuugc

SEQ ID NO: 3190316 - RNA, 13 nt, Human
ucacuguuuagau

SEQ ID NO: 3190317 - RNA, 12 nt, Human
ucacuguuuaga

SEQ ID NO: 3190318 - RNA, 10 nt, Human
ucacuugagu

SEQ ID NO: 3190319 - RNA, 16 nt, Human
accaguauaaaauuac

SEQ ID NO: 3190320 - RNA, 17 nt, Human
accaguacauucucagu

SEQ ID NO: 3190321 - RNA, 17 nt, Human
ucacugagacagcccgg

SEQ ID NO: 3190322 - RNA, 21 nt, Human
ucacugagacagcccgggcuc

SEQ ID NO: 3190323 - RNA, 22 nt, Human
ucacugagacagcccgggcucu

SEQ ID NO: 3190324 - RNA, 14 nt, Human
ucacugcagccuca

SEQ ID NO: 3190325 - RNA, 16 nt, Human
ucacugagacagcccg

SEQ ID NO: 3190326 - RNA, 20 nt, Human
ucacuaucccggcugcccuu

SEQ ID NO: 3190327 - RNA, 19 nt, Human
ucacuaucccggcugcccu

SEQ ID NO: 3190328 - RNA, 19 nt, Human
ucacuauaaugugaaaugu

SEQ ID NO: 3190329 - RNA, 13 nt, Human
ucacugcagccuc

SEQ ID NO: 3190330 - RNA, 14 nt, Human
ucacugcagccucc

SEQ ID NO: 3190331 - RNA, 23 nt, Human
ucacugcagccuccgcuucccug

SEQ ID NO: 3190332 - RNA, 22 nt, Human
ucacugcagccuccgcuucccu

SEQ ID NO: 3190333 - RNA, 15 nt, Human
ucacugcagccucaa

SEQ ID NO: 3190334 - RNA, 19 nt, Human
ucacuguugcccaggcugg

SEQ ID NO: 3190335 - RNA, 23 nt, Human
ucacuguugcccaggcuggcgug

SEQ ID NO: 3190336 - RNA, 16 nt, Human
ucacuguggugucugu

SEQ ID NO: 3190337 - RNA, 12 nt, Human
ucacuguguaua

SEQ ID NO: 3190338 - RNA, 14 nt, Human
ucacuguguauauu

SEQ ID NO: 3190339 - RNA, 15 nt, Human
ucacuguguauauuu

SEQ ID NO: 3190340 - RNA, 17 nt, Human
ucacuguguauauuuga

SEQ ID NO: 3190341 - RNA, 18 nt, Human
ucacuguguauauuugau

SEQ ID NO: 3190342 - RNA, 19 nt, Human
ucacuguguauauuugauu

SEQ ID NO: 3190343 - RNA, 21 nt, Human
ucacuguguauauuugauuua

SEQ ID NO: 3190344 - RNA, 23 nt, Human
acauuguccccaaugaauauacu

SEQ ID NO: 3190345 - RNA, 24 nt, Human
acauuguccccaaugaauauacuc

SEQ ID NO: 3190346 - RNA, 19 nt, Human
acauugccguggcaucuua

SEQ ID NO: 3190347 - RNA, 19 nt, Human
acauugcauauaacuuaua

SEQ ID NO: 3190348 - RNA, 16 nt, Human
acauugauuugauuuu

SEQ ID NO: 3190349 - RNA, 17 nt, Human
acauuuucuuaauccag

SEQ ID NO: 3190350 - RNA, 18 nt, Human
acauuuucucuuagaaaa

SEQ ID NO: 3190351 - RNA, 17 nt, Human
acauuuucucuuagaaa

SEQ ID NO: 3190352 - RNA, 16 nt, Human
acauuuucucuuagaa

SEQ ID NO: 3190353 - RNA, 13 nt, Human
acauuuucucuua

SEQ ID NO: 3190354 - RNA, 22 nt, Human
accaaaaguuauuaaaauuguu

SEQ ID NO: 3190355 - RNA, 18 nt, Human
accaaaauaagaaaagau

SEQ ID NO: 3190356 - RNA, 15 nt, Human
accaaaauaauaaaa

SEQ ID NO: 3190357 - RNA, 17 nt, Human
accaaaauaagaaaaga

SEQ ID NO: 3190358 - RNA, 16 nt, Human
accaaaauaagaaaag

SEQ ID NO: 3190359 - RNA, 15 nt, Human
accaaaauaagaaaa

SEQ ID NO: 3190360 - RNA, 13 nt, Human
accaaaauaagaa

SEQ ID NO: 3190361 - RNA, 19 nt, Human
accaaaaguuauuaaaauu

SEQ ID NO: 3190362 - RNA, 18 nt, Human
accaaaaguuauuaaaau

SEQ ID NO: 3190363 - RNA, 16 nt, Human
accaaaaguuauuaaa

SEQ ID NO: 3190364 - RNA, 19 nt, Human
accaaacccacccuuucua

SEQ ID NO: 3190365 - RNA, 22 nt, Human
accaaacccacccuuucuacuu

SEQ ID NO: 3190366 - RNA, 20 nt, Human
accaaacccacccuuucuac

SEQ ID NO: 3190367 - RNA, 21 nt, Human
accaaaauuugggguauuuau

SEQ ID NO: 3190368 - RNA, 14 nt, Human
accaaaauuuuaaa

SEQ ID NO: 3190369 - RNA, 18 nt, Human
accaaaauuuuaaaaaag

SEQ ID NO: 3190370 - RNA, 18 nt, Human
accaaacuggaucacugg

SEQ ID NO: 3190371 - RNA, 15 nt, Human
accaaacucccauca

SEQ ID NO: 3190372 - RNA, 14 nt, Human
accaaaccuucuga

SEQ ID NO: 3190373 - RNA, 17 nt, Human
accaaacuacugaauga

SEQ ID NO: 3190374 - RNA, 18 nt, Human
acauucuuuuugcucuaa

SEQ ID NO: 3190375 - RNA, 14 nt, Human
acauucuuuuugcu

SEQ ID NO: 3190376 - RNA, 23 nt, Human
acauucuuuuugcucuaaaauau

SEQ ID NO: 3190377 - RNA, 19 nt, Human
acauucuuuuugcucuaaa

SEQ ID NO: 3190378 - RNA, 23 nt, Human
ucaaugaaugaaugaauggcuaa

SEQ ID NO: 3190379 - RNA, 17 nt, Human
ucaaugaacaagcauuc

SEQ ID NO: 3190380 - RNA, 16 nt, Human
ucaaucucguauagaa

SEQ ID NO: 3190381 - RNA, 24 nt, Human
ucaaucucguauagaagucuucau

SEQ ID NO: 3190382 - RNA, 22 nt, Human
ucaaucucguauagaagucuuc

SEQ ID NO: 3190383 - RNA, 21 nt, Human
ucaaucucguauagaagucuu

SEQ ID NO: 3190384 - RNA, 20 nt, Human
ucaaucucguauagaagucu

SEQ ID NO: 3190385 - RNA, 18 nt, Human
ucaaucucguauagaagu

SEQ ID NO: 3190386 - RNA, 17 nt, Human
ucaaucucguauagaag

SEQ ID NO: 3190387 - RNA, 22 nt, Human
ucaaguccucuuuucugagagg

SEQ ID NO: 3190388 - RNA, 14 nt, Human
ucaacuucaggaaa

SEQ ID NO: 3190389 - RNA, 15 nt, Human
ucaauauauuuguau

SEQ ID NO: 3190390 - RNA, 12 nt, Human
ucaauaguugaa

SEQ ID NO: 3190391 - RNA, 13 nt, Human
ucaauaguugaau

SEQ ID NO: 3190392 - RNA, 15 nt, Human
ucaauaguugaauua

SEQ ID NO: 3190393 - RNA, 16 nt, Human
ucaauaguugaauuag

SEQ ID NO: 3190394 - RNA, 13 nt, Human
ucaauaguaauau

SEQ ID NO: 3190395 - RNA, 14 nt, Human
ucaauaguaauaua

SEQ ID NO: 3190396 - RNA, 22 nt, Human
ucaauaucuuuuuuuuaauaaa

SEQ ID NO: 3190397 - RNA, 16 nt, Human
acagucagguugaaga

SEQ ID NO: 3190398 - RNA, 15 nt, Human
acagucagguugaag

SEQ ID NO: 3190399 - RNA, 16 nt, Human
acaugagguacugaga

SEQ ID NO: 3190400 - RNA, 20 nt, Human
acaugagguacugagaguga

SEQ ID NO: 3190401 - RNA, 23 nt, Human
acaugagguacugagagugaaca

SEQ ID NO: 3190402 - RNA, 19 nt, Human
acaugcuguguaagcugug

SEQ ID NO: 3190403 - RNA, 20 nt, Human
acaugcuguguaagcugugu

SEQ ID NO: 3190404 - RNA, 21 nt, Human
acaugcuguguaagcuguguc

SEQ ID NO: 3190405 - RNA, 20 nt, Human
acaugcuuguguuucuuagu

SEQ ID NO: 3190406 - RNA, 12 nt, Human
acauggaacagu

SEQ ID NO: 3190407 - RNA, 13 nt, Human
acaugcuuuguga

SEQ ID NO: 3190408 - RNA, 22 nt, Human
acaugcuuguugacagagagag

SEQ ID NO: 3190409 - RNA, 17 nt, Human
acaugggacuaugcuuu

SEQ ID NO: 3190410 - RNA, 20 nt, Human
acaugggacuaugcuuuucu

SEQ ID NO: 3190411 - RNA, 18 nt, Human
acaugggacuaugcuuuu

SEQ ID NO: 3190412 - RNA, 22 nt, Human
acauguaauuaaguacuaugua

SEQ ID NO: 3190413 - RNA, 21 nt, Human
acauguaauuaaguacuaugu

SEQ ID NO: 3190414 - RNA, 19 nt, Human
acauguaauuaaguacuau

SEQ ID NO: 3190415 - RNA, 17 nt, Human
acauguaauuaaguacu

SEQ ID NO: 3190416 - RNA, 15 nt, Human
acauguaauuaagua

SEQ ID NO: 3190417 - RNA, 16 nt, Human
acaugggucgcccaug

SEQ ID NO: 3190418 - RNA, 11 nt, Human
acauggugaug

SEQ ID NO: 3190419 - RNA, 19 nt, Human
acauucucaguuuuucuua

SEQ ID NO: 3190420 - RNA, 17 nt, Human
acauucucaguuuuucu

SEQ ID NO: 3190421 - RNA, 15 nt, Human
acauucucaguuuuu

SEQ ID NO: 3190422 - RNA, 14 nt, Human
acauucucaguuuu

SEQ ID NO: 3190423 - RNA, 18 nt, Human
ucaaauuuauuuccaaug

SEQ ID NO: 3190424 - RNA, 14 nt, Human
acauuccugaugcu

SEQ ID NO: 3190425 - RNA, 14 nt, Human
acauucuaucuacu

SEQ ID NO: 3190426 - RNA, 18 nt, Human
acauucuaucuacugauu

SEQ ID NO: 3190427 - RNA, 13 nt, Human
acauucucaguuu

SEQ ID NO: 3190428 - RNA, 18 nt, Human
acauucuauuucaacuuc

SEQ ID NO: 3190429 - RNA, 23 nt, Human
acauguaauuaaguacuauguau

SEQ ID NO: 3190430 - RNA, 15 nt, Human
acauguaauuugugu

SEQ ID NO: 3190431 - RNA, 15 nt, Human
acauguccaagaagc

SEQ ID NO: 3190432 - RNA, 14 nt, Human
ucaaccagcagaug

SEQ ID NO: 3190433 - RNA, 12 nt, Human
ucaaccacaaaa

SEQ ID NO: 3190434 - RNA, 14 nt, Human
ucaaccacaaaacu

SEQ ID NO: 3190435 - RNA, 18 nt, Human
ucaaccauuccccauggg

SEQ ID NO: 3190436 - RNA, 22 nt, Human
ucaaccagguccagaugugcua

SEQ ID NO: 3190437 - RNA, 15 nt, Human
ucaaccauuccccau

SEQ ID NO: 3190438 - RNA, 20 nt, Human
ucaacugcaucaagauguga

SEQ ID NO: 3190439 - RNA, 24 nt, Human
ucaacugaccagccuccaugcugc

SEQ ID NO: 3190440 - RNA, 13 nt, Human
ucaaccaaauggu

SEQ ID NO: 3190441 - RNA, 20 nt, Human
ucaaccaaaugguacaaaac

SEQ ID NO: 3190442 - RNA, 18 nt, Human
ucaaccaaaugguacaaa

SEQ ID NO: 3190443 - RNA, 17 nt, Human
ucaaccaaaugguacaa

SEQ ID NO: 3190444 - RNA, 16 nt, Human
ucaaccaaaugguaca

SEQ ID NO: 3190445 - RNA, 14 nt, Human
ucaaccaaauggua

SEQ ID NO: 3190446 - RNA, 21 nt, Human
ucaacaacauuccucaaaaug

SEQ ID NO: 3190447 - RNA, 20 nt, Human
ucaacaaggcuugcugcaga

SEQ ID NO: 3190448 - RNA, 16 nt, Human
ucaacaaggcuugcug

SEQ ID NO: 3190449 - RNA, 21 nt, Human
ucaacaaggcaaaaacaaaga

SEQ ID NO: 3190450 - RNA, 15 nt, Human
ucaacaagaagaauu

SEQ ID NO: 3190451 - RNA, 16 nt, Human
ucaacaagaagaauuu

SEQ ID NO: 3190452 - RNA, 17 nt, Human
ucaacaagaagaauuug

SEQ ID NO: 3190453 - RNA, 22 nt, Human
uccugcacacgcuccuuccucu

SEQ ID NO: 3190454 - RNA, 14 nt, Human
uccugcacacgcuc

SEQ ID NO: 3190455 - RNA, 21 nt, Human
uccugcacacgcuccuuccuc

SEQ ID NO: 3190456 - RNA, 20 nt, Human
uccugaugcuucuucagaga

SEQ ID NO: 3190457 - RNA, 21 nt, Human
uccugaugcuucuucagagac

SEQ ID NO: 3190458 - RNA, 19 nt, Human
uccugaugcuucuucagag

SEQ ID NO: 3190459 - RNA, 19 nt, Human
acugcacuccagccugggu

SEQ ID NO: 3190460 - RNA, 20 nt, Human
acugcacuccagccugggug

SEQ ID NO: 3190461 - RNA, 18 nt, Human
acugcacuccagccuggg

SEQ ID NO: 3190462 - RNA, 17 nt, Human
acugcacuccagccugg

SEQ ID NO: 3190463 - RNA, 14 nt, Human
acugcacguuuuca

SEQ ID NO: 3190464 - RNA, 14 nt, Human
acugcacuccagcc

SEQ ID NO: 3190465 - RNA, 21 nt, Human
acugcacuauagccuagguga

SEQ ID NO: 3190466 - RNA, 20 nt, Human
acugcacuauagccuaggug

SEQ ID NO: 3190467 - RNA, 16 nt, Human
acugcaccgggccaca

SEQ ID NO: 3190468 - RNA, 14 nt, Human
acugcaccgggcca

SEQ ID NO: 3190469 - RNA, 15 nt, Human
acugcacaugauuuc

SEQ ID NO: 3190470 - RNA, 23 nt, Human
acugcacagugcaucucagccca

SEQ ID NO: 3190471 - RNA, 23 nt, Human
acugcacaugauuucacaaauau

SEQ ID NO: 3190472 - RNA, 22 nt, Human
acugcacaugauuucacaaaua

SEQ ID NO: 3190473 - RNA, 21 nt, Human
acugcacaugauuucacaaau

SEQ ID NO: 3190474 - RNA, 20 nt, Human
acugcacaugauuucacaaa

SEQ ID NO: 3190475 - RNA, 19 nt, Human
acugcacaugauuucacaa

SEQ ID NO: 3190476 - RNA, 18 nt, Human
acugcacaugauuucaca

SEQ ID NO: 3190477 - RNA, 17 nt, Human
acugcacaugauuucac

SEQ ID NO: 3190478 - RNA, 16 nt, Human
acugcacaugauuuca

SEQ ID NO: 3190479 - RNA, 22 nt, Human
acugcacagugcaucucagccc

SEQ ID NO: 3190480 - RNA, 16 nt, Human
acugagcagugauauu

SEQ ID NO: 3190481 - RNA, 19 nt, Human
acugauauauuuaaaaaca

SEQ ID NO: 3190482 - RNA, 23 nt, Human
acugcaaccuucgccaccugggu

SEQ ID NO: 3190483 - RNA, 14 nt, Human
acugcaaccuuguu

SEQ ID NO: 3190484 - RNA, 17 nt, Human
acugcaaccuuguuuau

SEQ ID NO: 3190485 - RNA, 20 nt, Human
acugcaaccuuguuuauuaa

SEQ ID NO: 3190486 - RNA, 20 nt, Human
acugcaacuuguaaaugugg

SEQ ID NO: 3190487 - RNA, 15 nt, Human
uccuggaaauauuaa

SEQ ID NO: 3190488 - RNA, 17 nt, Human
uccugggagugagcugg

SEQ ID NO: 3190489 - RNA, 14 nt, Human
uccugggagugagc

SEQ ID NO: 3190490 - RNA, 12 nt, Human
uccugggaguga

SEQ ID NO: 3190491 - RNA, 21 nt, Human
uccugcugcaguugccaguca

SEQ ID NO: 3190492 - RNA, 13 nt, Human
uccugcugccagu

SEQ ID NO: 3190493 - RNA, 21 nt, Human
uccugcugccaguaccagccc

SEQ ID NO: 3190494 - RNA, 14 nt, Human
uccugcuguuacau

SEQ ID NO: 3190495 - RNA, 13 nt, Human
uccugcuuccuca

SEQ ID NO: 3190496 - RNA, 14 nt, Human
uccugcgaggcuau

SEQ ID NO: 3190497 - RNA, 17 nt, Human
uccugcgaggcuaugag

SEQ ID NO: 3190498 - RNA, 12 nt, Human
uccugcaggcag

SEQ ID NO: 3190499 - RNA, 13 nt, Human
uccugcaggcagc

SEQ ID NO: 3190500 - RNA, 14 nt, Human
uccugcaggcagcc

SEQ ID NO: 3190501 - RNA, 21 nt, Human
uccugccucgaacuggcugca

SEQ ID NO: 3190502 - RNA, 15 nt, Human
acucuuuaacuugua

SEQ ID NO: 3190503 - RNA, 20 nt, Human
uccugacaccccacuuagcc

SEQ ID NO: 3190504 - RNA, 19 nt, Human
acucuuuaacuuguaauaa

SEQ ID NO: 3190505 - RNA, 15 nt, Human
acucuuuauugucug

SEQ ID NO: 3190506 - RNA, 16 nt, Human
acucuuuauugucugu

SEQ ID NO: 3190507 - RNA, 19 nt, Human
acucuuuauugucuguaaa

SEQ ID NO: 3190508 - RNA, 20 nt, Human
acucuuuauugucuguaaau

SEQ ID NO: 3190509 - RNA, 21 nt, Human
acucuuuuccaaacacaggca

SEQ ID NO: 3190510 - RNA, 20 nt, Human
acugaacucugacaacagac

SEQ ID NO: 3190511 - RNA, 16 nt, Human
acugaaccacuuguag

SEQ ID NO: 3190512 - RNA, 18 nt, Human
acugaaccacuuguagau

SEQ ID NO: 3190513 - RNA, 19 nt, Human
acugaaccacuuguagauu

SEQ ID NO: 3190514 - RNA, 20 nt, Human
acugaaccacuuguagauuu

SEQ ID NO: 3190515 - RNA, 21 nt, Human
acugaaccacuuguagauuug

SEQ ID NO: 3190516 - RNA, 22 nt, Human
acugaaccugggaaagagauuu

SEQ ID NO: 3190517 - RNA, 19 nt, Human
acugaacgauccuucaaag

SEQ ID NO: 3190518 - RNA, 20 nt, Human
acugaacgauccuucaaagu

SEQ ID NO: 3190519 - RNA, 22 nt, Human
uccucuuuggucuacacugugc

SEQ ID NO: 3190520 - RNA, 21 nt, Human
uccugaauuuuauuuuuuggg

SEQ ID NO: 3190521 - RNA, 17 nt, Human
uccugacacaccugcag

SEQ ID NO: 3190522 - RNA, 21 nt, Human
uccugacacaccugcagccuc

SEQ ID NO: 3190523 - RNA, 22 nt, Human
uccugacacaccugcagccucc

SEQ ID NO: 3190524 - RNA, 15 nt, Human
uccugacaccccacu

SEQ ID NO: 3190525 - RNA, 19 nt, Human
uccugacaccccacuuagc

SEQ ID NO: 3190526 - RNA, 16 nt, Human
uccugacaccccacuu

SEQ ID NO: 3190527 - RNA, 12 nt, Human
uccucuuuccau

SEQ ID NO: 3190528 - RNA, 11 nt, Human
uccucuuucca

SEQ ID NO: 3190529 - RNA, 14 nt, Human
uccucccucccucu

SEQ ID NO: 3190530 - RNA, 11 nt, Human
uccucccuccc

SEQ ID NO: 3190531 - RNA, 19 nt, Human
uccucuuuggucuacacug

SEQ ID NO: 3190532 - RNA, 21 nt, Human
uccucuuuggucuacacugug

SEQ ID NO: 3190533 - RNA, 19 nt, Human
uccucuuuccaucuacccu

SEQ ID NO: 3190534 - RNA, 13 nt, Human
uccucccucccag

SEQ ID NO: 3190535 - RNA, 15 nt, Human
uccucccucccagcu

SEQ ID NO: 3190536 - RNA, 21 nt, Human
acugacugaggcaguuugagg

SEQ ID NO: 3190537 - RNA, 15 nt, Human
acugagacagcccgg

SEQ ID NO: 3190538 - RNA, 18 nt, Human
acugagacagcccgggcu

SEQ ID NO: 3190539 - RNA, 21 nt, Human
acugagacagcccgggcucug

SEQ ID NO: 3190540 - RNA, 22 nt, Human
acugagaugugaacacaucagc

SEQ ID NO: 3190541 - RNA, 17 nt, Human
acugagaugugaacaca

SEQ ID NO: 3190542 - RNA, 18 nt, Human
acugagagccuuuuugaa

SEQ ID NO: 3190543 - RNA, 18 nt, Human
acugagagugaacaaauu

SEQ ID NO: 3190544 - RNA, 16 nt, Human
acugagagagcgcagc

SEQ ID NO: 3190545 - RNA, 15 nt, Human
acugagagccuuuuu

SEQ ID NO: 3190546 - RNA, 22 nt, Human
acugagacagcccgggcucugc

SEQ ID NO: 3190547 - RNA, 23 nt, Human
acugagacagcccgggcucugcc

SEQ ID NO: 3190548 - RNA, 22 nt, Human
acugacuucuaaguaaaaccac

SEQ ID NO: 3190549 - RNA, 16 nt, Human
acugacuucuaaguaa

SEQ ID NO: 3190550 - RNA, 15 nt, Human
acugacuucuaagua

SEQ ID NO: 3190551 - RNA, 13 nt, Human
acugacuucuaag

SEQ ID NO: 3190552 - RNA, 12 nt, Human
acugacugaggc

SEQ ID NO: 3190553 - RNA, 15 nt, Human
acugacugaggcagu

SEQ ID NO: 3190554 - RNA, 21 nt, Human
acugacucuggaaaaggcaua

SEQ ID NO: 3190555 - RNA, 12 nt, Human
acugacucugga

SEQ ID NO: 3190556 - RNA, 14 nt, Human
acucuuggagccug

SEQ ID NO: 3190557 - RNA, 16 nt, Human
acucuuggagccugca

SEQ ID NO: 3190558 - RNA, 15 nt, Human
acucuuggagccugc

SEQ ID NO: 3190559 - RNA, 23 nt, Human
acucuuggagccugcagagcugc

SEQ ID NO: 3190560 - RNA, 22 nt, Human
acucuuggagccugcagagcug

SEQ ID NO: 3190561 - RNA, 16 nt, Human
acucuugaccucaggu

SEQ ID NO: 3190562 - RNA, 15 nt, Human
acucuugaccucagg

SEQ ID NO: 3190563 - RNA, 15 nt, Human
acucuugacucuugc

SEQ ID NO: 3190564 - RNA, 12 nt, Human
acucuugacagc

SEQ ID NO: 3190565 - RNA, 22 nt, Human
acucuugaguuguuuuuguaua

SEQ ID NO: 3190566 - RNA, 15 nt, Human
acucuugaguuguuu

SEQ ID NO: 3190567 - RNA, 16 nt, Human
acucuugaguuguuuu

SEQ ID NO: 3190568 - RNA, 20 nt, Human
acucuugaguuguuuuugua

SEQ ID NO: 3190569 - RNA, 21 nt, Human
acucuugaguuguuuuuguau

SEQ ID NO: 3190570 - RNA, 14 nt, Human
acucuugaccucag

SEQ ID NO: 3190571 - RNA, 22 nt, Human
acucuggcagcaccgccucuuc

SEQ ID NO: 3190572 - RNA, 21 nt, Human
uccucccaggcgccccuuccc

SEQ ID NO: 3190573 - RNA, 19 nt, Human
uccucccaggcgccccuuc

SEQ ID NO: 3190574 - RNA, 22 nt, Human
uccucauacccacccccaccca

SEQ ID NO: 3190575 - RNA, 22 nt, Human
uccucauaguaugguggcuggg

SEQ ID NO: 3190576 - RNA, 13 nt, Human
uccucccaggcgc

SEQ ID NO: 3190577 - RNA, 23 nt, Human
uccucauacccacccccacccaa

SEQ ID NO: 3190578 - RNA, 12 nt, Human
uccucaggacca

SEQ ID NO: 3190579 - RNA, 23 nt, Human
acuccuugaaaacacuguucucu

SEQ ID NO: 3190580 - RNA, 24 nt, Human
acuccuugaaaacacuguucucug

SEQ ID NO: 3190581 - RNA, 14 nt, Human
acucuccuccagag

SEQ ID NO: 3190582 - RNA, 17 nt, Human
acucuccuccagaguca

SEQ ID NO: 3190583 - RNA, 18 nt, Human
acucuccuggaaauauua

SEQ ID NO: 3190584 - RNA, 15 nt, Human
acucuccuugguguc

SEQ ID NO: 3190585 - RNA, 21 nt, Human
acucuccucugcugcuggcug

SEQ ID NO: 3190586 - RNA, 13 nt, Human
acucuccucugcu

SEQ ID NO: 3190587 - RNA, 14 nt, Human
acucuccucugcug

SEQ ID NO: 3190588 - RNA, 12 nt, Human
acucuccucugc

SEQ ID NO: 3190589 - RNA, 13 nt, Human
acucuggcagcuc

SEQ ID NO: 3190590 - RNA, 15 nt, Human
acucuggcagcucag

SEQ ID NO: 3190591 - RNA, 20 nt, Human
acucuggcagcaccgccucu

SEQ ID NO: 3190592 - RNA, 15 nt, Human
acucuggcagcaccg

SEQ ID NO: 3190593 - RNA, 21 nt, Human
acucuggagguuuguuuagaa

SEQ ID NO: 3190594 - RNA, 12 nt, Human
acucugccuccu

SEQ ID NO: 3190595 - RNA, 16 nt, Human
acucuccuuggugucg

SEQ ID NO: 3190596 - RNA, 23 nt, Human
acucuccuuggugucgggcauga

SEQ ID NO: 3190597 - RNA, 11 nt, Human
acucugagacu

SEQ ID NO: 3190598 - RNA, 22 nt, Human
acucugagacucgcgacaaugc

SEQ ID NO: 3190599 - RNA, 19 nt, Human
acucucucuuguucuuacu

SEQ ID NO: 3190600 - RNA, 18 nt, Human
uccgguguuuaagacauu

SEQ ID NO: 3190601 - RNA, 14 nt, Human
uccuacucuguguc

SEQ ID NO: 3190602 - RNA, 13 nt, Human
uccuacucugugu

SEQ ID NO: 3190603 - RNA, 12 nt, Human
uccuacucugug

SEQ ID NO: 3190604 - RNA, 16 nt, Human
uccgguuuacuuuaac

SEQ ID NO: 3190605 - RNA, 15 nt, Human
uccgguuuacuuuaa

SEQ ID NO: 3190606 - RNA, 15 nt, Human
uccuacucuguguca

SEQ ID NO: 3190607 - RNA, 13 nt, Human
uccuacucuucuc

SEQ ID NO: 3190608 - RNA, 24 nt, Human
uccuagcuggagaggagcccugcc

SEQ ID NO: 3190609 - RNA, 23 nt, Human
uccuagcuggagaggagcccugc

SEQ ID NO: 3190610 - RNA, 22 nt, Human
uccuagcuggagaggagcccug

SEQ ID NO: 3190611 - RNA, 21 nt, Human
uccuagcuggagaggagcccu

SEQ ID NO: 3190612 - RNA, 14 nt, Human
acuccuggccucaa

SEQ ID NO: 3190613 - RNA, 13 nt, Human
acuccuggccuca

SEQ ID NO: 3190614 - RNA, 13 nt, Human
uccuaggcauuug

SEQ ID NO: 3190615 - RNA, 12 nt, Human
acuccuggccuc

SEQ ID NO: 3190616 - RNA, 23 nt, Human
ucccuuuuuuggcugcugaaggc

SEQ ID NO: 3190617 - RNA, 20 nt, Human
ucccuuuuuuggcugcugaa

SEQ ID NO: 3190618 - RNA, 22 nt, Human
ucccuuuuuuggcugcugaagg

SEQ ID NO: 3190619 - RNA, 19 nt, Human
ucccuuugacgccauccca

SEQ ID NO: 3190620 - RNA, 17 nt, Human
ucccuuuuuuggcugcu

SEQ ID NO: 3190621 - RNA, 19 nt, Human
ucccuuuuuuggcugcuga

SEQ ID NO: 3190622 - RNA, 22 nt, Human
ucccugguggcagcucaccucu

SEQ ID NO: 3190623 - RNA, 19 nt, Human
ucccuuggauuguccccga

SEQ ID NO: 3190624 - RNA, 20 nt, Human
ucccuuggauuguccccgac

SEQ ID NO: 3190625 - RNA, 16 nt, Human
ucccuuugacgccauc

SEQ ID NO: 3190626 - RNA, 18 nt, Human
ucccuuugacgccauccc

SEQ ID NO: 3190627 - RNA, 19 nt, Human
acuccagugagacagcucu

SEQ ID NO: 3190628 - RNA, 19 nt, Human
acuccagaccccuggcuuu

SEQ ID NO: 3190629 - RNA, 18 nt, Human
acuccagaccccuggcuu

SEQ ID NO: 3190630 - RNA, 21 nt, Human
acuccagaccccuggcuuuuc

SEQ ID NO: 3190631 - RNA, 14 nt, Human
acuccuaugcuuua

SEQ ID NO: 3190632 - RNA, 22 nt, Human
acuccuaguagggguaccacug

SEQ ID NO: 3190633 - RNA, 14 nt, Human
acucaccccagccc

SEQ ID NO: 3190634 - RNA, 15 nt, Human
acucaccccagcccc

SEQ ID NO: 3190635 - RNA, 16 nt, Human
acucaccccagcccca

SEQ ID NO: 3190636 - RNA, 15 nt, Human
acuccagaccccugg

SEQ ID NO: 3190637 - RNA, 13 nt, Human
acuccagaccccu

SEQ ID NO: 3190638 - RNA, 13 nt, Human
acucaccccagcc

SEQ ID NO: 3190639 - RNA, 22 nt, Human
acucacagccagcgaacugaca

SEQ ID NO: 3190640 - RNA, 18 nt, Human
acucacagccagcgaacu

SEQ ID NO: 3190641 - RNA, 13 nt, Human
acucacagccagc

SEQ ID NO: 3190642 - RNA, 18 nt, Human
ucccugguggcagcucac

SEQ ID NO: 3190643 - RNA, 19 nt, Human
ucccugguggcagcucacc

SEQ ID NO: 3190644 - RNA, 20 nt, Human
ucccugguggcagcucaccu

SEQ ID NO: 3190645 - RNA, 21 nt, Human
ucccugguggcagcucaccuc

SEQ ID NO: 3190646 - RNA, 16 nt, Human
ucccugguggcagcuc

SEQ ID NO: 3190647 - RNA, 17 nt, Human
ucccugguggcagcuca

SEQ ID NO: 3190648 - RNA, 11 nt, Human
acuccuggccu

SEQ ID NO: 3190649 - RNA, 16 nt, Human
acuccugcucugcucg

SEQ ID NO: 3190650 - RNA, 15 nt, Human
acuccugcucugcuc

SEQ ID NO: 3190651 - RNA, 13 nt, Human
acuccugcucugc

SEQ ID NO: 3190652 - RNA, 10 nt, Human
acuccugcuc

SEQ ID NO: 3190653 - RNA, 15 nt, Human
acuccugcaggcagc

SEQ ID NO: 3190654 - RNA, 16 nt, Human
acuccugcaggcagcc

SEQ ID NO: 3190655 - RNA, 22 nt, Human
acuccugcaggcagccaggcca

SEQ ID NO: 3190656 - RNA, 12 nt, Human
acuccugcaggc

SEQ ID NO: 3190657 - RNA, 14 nt, Human
acuccugcaggcag

SEQ ID NO: 3190658 - RNA, 12 nt, Human
acuccucccagg

SEQ ID NO: 3190659 - RNA, 18 nt, Human
acguaaugaaacuuggau

SEQ ID NO: 3190660 - RNA, 15 nt, Human
acguacaaguaguuc

SEQ ID NO: 3190661 - RNA, 16 nt, Human
acguacaaguaguucu

SEQ ID NO: 3190662 - RNA, 17 nt, Human
acguacaaguaguucug

SEQ ID NO: 3190663 - RNA, 22 nt, Human
acguacaaguaguucuguauuu

SEQ ID NO: 3190664 - RNA, 24 nt, Human
acguacaaguaguucuguauuuga

SEQ ID NO: 3190665 - RNA, 18 nt, Human
acguacaaguaguucugu

SEQ ID NO: 3190666 - RNA, 19 nt, Human
acguacaaguaguucugua

SEQ ID NO: 3190667 - RNA, 20 nt, Human
acguacaaguaguucuguau

SEQ ID NO: 3190668 - RNA, 21 nt, Human
acguacaaguaguucuguauu

SEQ ID NO: 3190669 - RNA, 17 nt, Human
acgguuuuacugcagcu

SEQ ID NO: 3190670 - RNA, 11 nt, Human
uccauccugag

SEQ ID NO: 3190671 - RNA, 12 nt, Human
uccauccugagg

SEQ ID NO: 3190672 - RNA, 15 nt, Human
uccauccugaggcuc

SEQ ID NO: 3190673 - RNA, 15 nt, Human
acguuaccaggcagg

SEQ ID NO: 3190674 - RNA, 17 nt, Human
acguggcugcuucaagg

SEQ ID NO: 3190675 - RNA, 18 nt, Human
acguggcugcuucaagga

SEQ ID NO: 3190676 - RNA, 20 nt, Human
acgucagauguuuaaaacac

SEQ ID NO: 3190677 - RNA, 22 nt, Human
acgucauaggaaguuagccuuu

SEQ ID NO: 3190678 - RNA, 15 nt, Human
acgucagauguuuaa

SEQ ID NO: 3190679 - RNA, 17 nt, Human
acgucagauguuuaaaa

SEQ ID NO: 3190680 - RNA, 18 nt, Human
acgucagauguuuaaaac

SEQ ID NO: 3190681 - RNA, 19 nt, Human
acguggcugcuucaaggau

SEQ ID NO: 3190682 - RNA, 21 nt, Human
acguggcugcuucaaggaucc

SEQ ID NO: 3190683 - RNA, 13 nt, Human
acguuaaaguagg

SEQ ID NO: 3190684 - RNA, 13 nt, Human
acuaaauuuuaaa

SEQ ID NO: 3190685 - RNA, 15 nt, Human
acuaaauuuuaaagc

SEQ ID NO: 3190686 - RNA, 20 nt, Human
acuaacaaaguuuucaugug

SEQ ID NO: 3190687 - RNA, 19 nt, Human
acuaaauguuaaagaugua

SEQ ID NO: 3190688 - RNA, 18 nt, Human
acuaaauguuaaagaugu

SEQ ID NO: 3190689 - RNA, 23 nt, Human
acuaauuuugcaugcguauuuau

SEQ ID NO: 3190690 - RNA, 11 nt, Human
acuaaauguua

SEQ ID NO: 3190691 - RNA, 15 nt, Human
acuaaauguuaaaga

SEQ ID NO: 3190692 - RNA, 14 nt, Human
acuaaauguuaaag

SEQ ID NO: 3190693 - RNA, 13 nt, Human
acuaaauguuaaa

SEQ ID NO: 3190694 - RNA, 12 nt, Human
acuaaauguuaa

SEQ ID NO: 3190695 - RNA, 19 nt, Human
acguuugguucaaaugugu

SEQ ID NO: 3190696 - RNA, 12 nt, Human
acguuuuaagga

SEQ ID NO: 3190697 - RNA, 14 nt, Human
acguuuuaaggacu

SEQ ID NO: 3190698 - RNA, 18 nt, Human
acuaaacuuggugcuuau

SEQ ID NO: 3190699 - RNA, 19 nt, Human
acuaaacuuggugcuuauu

SEQ ID NO: 3190700 - RNA, 22 nt, Human
acuaaacuuggugcuuauugau

SEQ ID NO: 3190701 - RNA, 23 nt, Human
acuaaacuuggugcuuauugaua

SEQ ID NO: 3190702 - RNA, 16 nt, Human
acguugggacagggag

SEQ ID NO: 3190703 - RNA, 20 nt, Human
ucccagagcucccucugccc

SEQ ID NO: 3190704 - RNA, 16 nt, Human
ucccagauacuugggg

SEQ ID NO: 3190705 - RNA, 12 nt, Human
ucccagccccaa

SEQ ID NO: 3190706 - RNA, 18 nt, Human
ucccagauacuugggggg

SEQ ID NO: 3190707 - RNA, 23 nt, Human
acuacacgguucaaaccugugaa

SEQ ID NO: 3190708 - RNA, 17 nt, Human
ucccagaccccgacacc

SEQ ID NO: 3190709 - RNA, 16 nt, Human
ucccacuuuugccaga

SEQ ID NO: 3190710 - RNA, 18 nt, Human
acuauagccuaggugaca

SEQ ID NO: 3190711 - RNA, 22 nt, Human
acuauagccuaggugacagagu

SEQ ID NO: 3190712 - RNA, 20 nt, Human
acuauagccuaggugacaga

SEQ ID NO: 3190713 - RNA, 21 nt, Human
acuaucuaaauguugaaagau

SEQ ID NO: 3190714 - RNA, 16 nt, Human
acuaucuaaauguuga

SEQ ID NO: 3190715 - RNA, 19 nt, Human
acucaaugugugccgagcc

SEQ ID NO: 3190716 - RNA, 16 nt, Human
acucaaugcacugaca

SEQ ID NO: 3190717 - RNA, 21 nt, Human
acucaaggauaccuucuuauu

SEQ ID NO: 3190718 - RNA, 16 nt, Human
acuauguugcccaggc

SEQ ID NO: 3190719 - RNA, 15 nt, Human
acuauguugcccagg

SEQ ID NO: 3190720 - RNA, 14 nt, Human
acuauguugcccag

SEQ ID NO: 3190721 - RNA, 23 nt, Human
uccccacccugaaagcccugagc

SEQ ID NO: 3190722 - RNA, 15 nt, Human
uccccaccgcagaca

SEQ ID NO: 3190723 - RNA, 16 nt, Human
uccccaccgcagacag

SEQ ID NO: 3190724 - RNA, 18 nt, Human
uccccaggaggccagccu

SEQ ID NO: 3190725 - RNA, 12 nt, Human
uccccacccuga

SEQ ID NO: 3190726 - RNA, 21 nt, Human
ucccauuuagaauggugauuu

SEQ ID NO: 3190727 - RNA, 15 nt, Human
ucccauuuagaaugg

SEQ ID NO: 3190728 - RNA, 23 nt, Human
ucccauuuagaauggugauuuua

SEQ ID NO: 3190729 - RNA, 15 nt, Human
ucccagcuccacccc

SEQ ID NO: 3190730 - RNA, 14 nt, Human
ucccagcuccaccc

SEQ ID NO: 3190731 - RNA, 17 nt, Human
uccccaggaggccagcc

SEQ ID NO: 3190732 - RNA, 21 nt, Human
uccccagggcacgugguugag

SEQ ID NO: 3190733 - RNA, 13 nt, Human
uccccagggcacg

SEQ ID NO: 3190734 - RNA, 12 nt, Human
uccccagggcac

SEQ ID NO: 3190735 - RNA, 20 nt, Human
uccccaggaggccagccuug

SEQ ID NO: 3190736 - RNA, 21 nt, Human
uccccaggaggccagccuuga

SEQ ID NO: 3190737 - RNA, 11 nt, Human
ucccccagccc

SEQ ID NO: 3190738 - RNA, 13 nt, Human
ucccccagcccca

SEQ ID NO: 3190739 - RNA, 15 nt, Human
ucccccagccccauc

SEQ ID NO: 3190740 - RNA, 16 nt, Human
ucccccagccccaucc

SEQ ID NO: 3190741 - RNA, 18 nt, Human
acuacugggacucuucag

SEQ ID NO: 3190742 - RNA, 19 nt, Human
acuacugaccagacaagcu

SEQ ID NO: 3190743 - RNA, 20 nt, Human
acuacuguucagcuuuuauu

SEQ ID NO: 3190744 - RNA, 16 nt, Human
acuagagauauuuugu

SEQ ID NO: 3190745 - RNA, 17 nt, Human
acuagagauauuuugua

SEQ ID NO: 3190746 - RNA, 18 nt, Human
acuagagauauuuuguaa

SEQ ID NO: 3190747 - RNA, 19 nt, Human
acuagagauauuuuguaaa

SEQ ID NO: 3190748 - RNA, 21 nt, Human
acuagagauauuuuguaaaau

SEQ ID NO: 3190749 - RNA, 19 nt, Human
acuagacucccaagcugga

SEQ ID NO: 3190750 - RNA, 22 nt, Human
uccagcccugaguuccuagcca

SEQ ID NO: 3190751 - RNA, 20 nt, Human
uccagcccugaguuccuagc

SEQ ID NO: 3190752 - RNA, 14 nt, Human
uccagaauuuccca

SEQ ID NO: 3190753 - RNA, 15 nt, Human
uccagaauuucccaa

SEQ ID NO: 3190754 - RNA, 13 nt, Human
uccagacacaugu

SEQ ID NO: 3190755 - RNA, 13 nt, Human
uccagccugccac

SEQ ID NO: 3190756 - RNA, 11 nt, Human
uccagccugcc

SEQ ID NO: 3190757 - RNA, 22 nt, Human
uccaggagcagccacauuccug

SEQ ID NO: 3190758 - RNA, 22 nt, Human
uccagccuggaaaccugucuga

SEQ ID NO: 3190759 - RNA, 20 nt, Human
uccaggcugggagagccuuc

SEQ ID NO: 3190760 - RNA, 21 nt, Human
uccaggcugggagagccuucc

SEQ ID NO: 3190761 - RNA, 12 nt, Human
uccaggcuccuu

SEQ ID NO: 3190762 - RNA, 10 nt, Human
uccaggcucc

SEQ ID NO: 3190763 - RNA, 23 nt, Human
uccaggcugggagagccuuccag

SEQ ID NO: 3190764 - RNA, 15 nt, Human
acgaauauugcugau

SEQ ID NO: 3190765 - RNA, 18 nt, Human
acgaauauugcugauggu

SEQ ID NO: 3190766 - RNA, 17 nt, Human
accuuuguccccaccgc

SEQ ID NO: 3190767 - RNA, 18 nt, Human
accuuuguccccaccgca

SEQ ID NO: 3190768 - RNA, 19 nt, Human
accuugaaaacuuuaugcu

SEQ ID NO: 3190769 - RNA, 20 nt, Human
accuugaacuggguacuugu

SEQ ID NO: 3190770 - RNA, 15 nt, Human
accuugaacugaagg

SEQ ID NO: 3190771 - RNA, 20 nt, Human
accuuucuauaauuuuacaa

SEQ ID NO: 3190772 - RNA, 19 nt, Human
ucauucccucgucuuuccc

SEQ ID NO: 3190773 - RNA, 20 nt, Human
ucauucccucgucuuuccca

SEQ ID NO: 3190774 - RNA, 21 nt, Human
uccacuccuccuagccaccca

SEQ ID NO: 3190775 - RNA, 16 nt, Human
accuuuuuauuucaaa

SEQ ID NO: 3190776 - RNA, 17 nt, Human
accuuuucuuguaucug

SEQ ID NO: 3190777 - RNA, 11 nt, Human
accuuuucagg

SEQ ID NO: 3190778 - RNA, 13 nt, Human
accuuuucaggaa

SEQ ID NO: 3190779 - RNA, 16 nt, Human
accuuuucaggaaaau

SEQ ID NO: 3190780 - RNA, 22 nt, Human
accuuuucaggaaaauaacuua

SEQ ID NO: 3190781 - RNA, 13 nt, Human
accuuuuauuaua

SEQ ID NO: 3190782 - RNA, 22 nt, Human
uccacugguucuucuuggucuc

SEQ ID NO: 3190783 - RNA, 18 nt, Human
uccacugggguggccuga

SEQ ID NO: 3190784 - RNA, 17 nt, Human
uccacugggguggccug

SEQ ID NO: 3190785 - RNA, 18 nt, Human
uccagaauggucuuucua

SEQ ID NO: 3190786 - RNA, 22 nt, Human
uccagaauguauagacaggaaa

SEQ ID NO: 3190787 - RNA, 21 nt, Human
acgaauauugcugauggugca

SEQ ID NO: 3190788 - RNA, 14 nt, Human
acgaauauugcuga

SEQ ID NO: 3190789 - RNA, 21 nt, Human
acgaaugaaaauaacugaauu

SEQ ID NO: 3190790 - RNA, 17 nt, Human
acgccuagccucacgcu

SEQ ID NO: 3190791 - RNA, 21 nt, Human
acgcuacccgggaagggggcu

SEQ ID NO: 3190792 - RNA, 18 nt, Human
acgcuacccgggaagggg

SEQ ID NO: 3190793 - RNA, 12 nt, Human
acgccugccuuu

SEQ ID NO: 3190794 - RNA, 11 nt, Human
acgcucucugg

SEQ ID NO: 3190795 - RNA, 13 nt, Human
acgcuggaccuug

SEQ ID NO: 3190796 - RNA, 22 nt, Human
acgcucuaaggcaggauguggc

SEQ ID NO: 3190797 - RNA, 15 nt, Human
acgcuccuuccucug

SEQ ID NO: 3190798 - RNA, 20 nt, Human
acgcuccuuucugaucuuca

SEQ ID NO: 3190799 - RNA, 14 nt, Human
acgcuccuuucuga

SEQ ID NO: 3190800 - RNA, 14 nt, Human
acgcuccuuccucu

SEQ ID NO: 3190801 - RNA, 16 nt, Human
acgcuggagugcagug

SEQ ID NO: 3190802 - RNA, 15 nt, Human
acgcuggagugcagu

SEQ ID NO: 3190803 - RNA, 23 nt, Human
acgcuggaccuugaacuggguac

SEQ ID NO: 3190804 - RNA, 20 nt, Human
acgcuggaccuugaacuggg

SEQ ID NO: 3190805 - RNA, 17 nt, Human
acgcuggagugcaguga

SEQ ID NO: 3190806 - RNA, 21 nt, Human
acggagucccaccuuggcugc

SEQ ID NO: 3190807 - RNA, 23 nt, Human
acggagucccaccuuggcugcag

SEQ ID NO: 3190808 - RNA, 18 nt, Human
uccagugagacagcucug

SEQ ID NO: 3190809 - RNA, 15 nt, Human
uccagugaggcucug

SEQ ID NO: 3190810 - RNA, 16 nt, Human
uccagugaggcucugc

SEQ ID NO: 3190811 - RNA, 14 nt, Human
uccagugagacagc

SEQ ID NO: 3190812 - RNA, 22 nt, Human
uccagugaggcucugcccuugg

SEQ ID NO: 3190813 - RNA, 23 nt, Human
uccagugaggcucugcccuuggu

SEQ ID NO: 3190814 - RNA, 16 nt, Human
uccaguaucuugaaga

SEQ ID NO: 3190815 - RNA, 18 nt, Human
uccaguaucuugaagacu

SEQ ID NO: 3190816 - RNA, 14 nt, Human
uccaguauuuuagu

SEQ ID NO: 3190817 - RNA, 12 nt, Human
uccagucaggcu

SEQ ID NO: 3190818 - RNA, 22 nt, Human
uccaguaagaucacuguuuaga

SEQ ID NO: 3190819 - RNA, 12 nt, Human
uccaguccccag

SEQ ID NO: 3190820 - RNA, 15 nt, Human
uccaguccccagaac

SEQ ID NO: 3190821 - RNA, 14 nt, Human
uccaguccccagaa

SEQ ID NO: 3190822 - RNA, 20 nt, Human
uccagucaggcucucugggc

SEQ ID NO: 3190823 - RNA, 13 nt, Human
uccagucaggcuc

SEQ ID NO: 3190824 - RNA, 21 nt, Human
uccaguccccagaacucugcc

SEQ ID NO: 3190825 - RNA, 16 nt, Human
uccaguccccagaacu

SEQ ID NO: 3190826 - RNA, 22 nt, Human
uccaguccccagaacucugccu

SEQ ID NO: 3190827 - RNA, 16 nt, Human
uccagucuaucauugu

SEQ ID NO: 3190828 - RNA, 22 nt, Human
acggauccugcacugacucugg

SEQ ID NO: 3190829 - RNA, 23 nt, Human
acggauccugcacugacucugga

SEQ ID NO: 3190830 - RNA, 12 nt, Human
acggccaggcca

SEQ ID NO: 3190831 - RNA, 18 nt, Human
acggcucacugcagccuc

SEQ ID NO: 3190832 - RNA, 17 nt, Human
acggcucacugcagccu

SEQ ID NO: 3190833 - RNA, 15 nt, Human
acggcucacugcagc

SEQ ID NO: 3190834 - RNA, 16 nt, Human
acggcucacugcagcc

SEQ ID NO: 3190835 - RNA, 18 nt, Human
acggcuuuuacuuaaacc

SEQ ID NO: 3190836 - RNA, 14 nt, Human
uccaguaucuugaa

SEQ ID NO: 3190837 - RNA, 15 nt, Human
uccaguaucuugaag

SEQ ID NO: 3190838 - RNA, 23 nt, Human
uccaguaagaucacuguuuagau

SEQ ID NO: 3190839 - RNA, 18 nt, Human
uccaguaaggaaugauau

SEQ ID NO: 3190840 - RNA, 21 nt, Human
uccaguaagaucacuguuuag

SEQ ID NO: 3190841 - RNA, 22 nt, Human
uaacuuaaaagaacauguauau

SEQ ID NO: 3190842 - RNA, 13 nt, Human
uaacuuaauaauc

SEQ ID NO: 3190843 - RNA, 14 nt, Human
uaacuuaauaauca

SEQ ID NO: 3190844 - RNA, 16 nt, Human
uaacuuaauaaucaag

SEQ ID NO: 3190845 - RNA, 17 nt, Human
uaacuuaauaaucaaga

SEQ ID NO: 3190846 - RNA, 17 nt, Human
uaacuuccaauuuacau

SEQ ID NO: 3190847 - RNA, 21 nt, Human
uaacuuaauaaucaagagccu

SEQ ID NO: 3190848 - RNA, 18 nt, Human
uaacaugguuuaaaagaa

SEQ ID NO: 3190849 - RNA, 17 nt, Human
uaaccuuaucauaaauu

SEQ ID NO: 3190850 - RNA, 14 nt, Human
uaagaauauuugaa

SEQ ID NO: 3190851 - RNA, 14 nt, Human
uaagacacuuccgu

SEQ ID NO: 3190852 - RNA, 14 nt, Human
uaagacagcaugug

SEQ ID NO: 3190853 - RNA, 17 nt, Human
uaagacagcauguguua

SEQ ID NO: 3190854 - RNA, 13 nt, Human
uaagaauauuuga

SEQ ID NO: 3190855 - RNA, 19 nt, Human
uaagaauagaacaacauau

SEQ ID NO: 3190856 - RNA, 13 nt, Human
uaagaauaauaaa

SEQ ID NO: 3190857 - RNA, 14 nt, Human
uaagaauaauaaaa

SEQ ID NO: 3190858 - RNA, 17 nt, Human
uaagaauaauaaaauca

SEQ ID NO: 3190859 - RNA, 18 nt, Human
uaagaagugaaaaucuac

SEQ ID NO: 3190860 - RNA, 16 nt, Human
uaacuucauaagcaaa

SEQ ID NO: 3190861 - RNA, 13 nt, Human
uaacuugcuuaaa

SEQ ID NO: 3190862 - RNA, 17 nt, Human
uaacuugcuuaaaugug

SEQ ID NO: 3190863 - RNA, 16 nt, Human
uaacuugcuuaaaugu

SEQ ID NO: 3190864 - RNA, 15 nt, Human
uaacuugcuuaaaug

SEQ ID NO: 3190865 - RNA, 14 nt, Human
uaacuugcuuaaau

SEQ ID NO: 3190866 - RNA, 21 nt, Human
uaacuuuagaaauaaaccuua

SEQ ID NO: 3190867 - RNA, 23 nt, Human
uaacuuggaugaguuuugggaag

SEQ ID NO: 3190868 - RNA, 17 nt, Human
uaacuuggaugaguuuu

SEQ ID NO: 3190869 - RNA, 20 nt, Human
uaacuugcuuaaaugugaau

SEQ ID NO: 3190870 - RNA, 19 nt, Human
uaacuugcuuaaaugugaa

SEQ ID NO: 3190871 - RNA, 18 nt, Human
uaacuugcuuaaauguga

SEQ ID NO: 3190872 - RNA, 14 nt, Human
aauaguuguugauu

SEQ ID NO: 3190873 - RNA, 17 nt, Human
aauaguuuauuuuaaaa

SEQ ID NO: 3190874 - RNA, 13 nt, Human
aauaguuggcuag

SEQ ID NO: 3190875 - RNA, 12 nt, Human
aauaguugaauu

SEQ ID NO: 3190876 - RNA, 15 nt, Human
aauaguugaauuagu

SEQ ID NO: 3190877 - RNA, 21 nt, Human
aauaguucagguaacaggcag

SEQ ID NO: 3190878 - RNA, 11 nt, Human
aauaguucugu

SEQ ID NO: 3190879 - RNA, 22 nt, Human
aauaguguggaaauuaagaaga

SEQ ID NO: 3190880 - RNA, 20 nt, Human
aauaguguggaaauuaagaa

SEQ ID NO: 3190881 - RNA, 19 nt, Human
aauaguguggaaauuaaga

SEQ ID NO: 3190882 - RNA, 12 nt, Human
aauaguguggaa

SEQ ID NO: 3190883 - RNA, 15 nt, Human
aauagugugaaauau

SEQ ID NO: 3190884 - RNA, 16 nt, Human
aauagugugaaauaua

SEQ ID NO: 3190885 - RNA, 17 nt, Human
aauagugugaaauauau

SEQ ID NO: 3190886 - RNA, 21 nt, Human
uaaaauuuccccuaaucuuuu

SEQ ID NO: 3190887 - RNA, 21 nt, Human
uaaaauuugaaacauugcuuu

SEQ ID NO: 3190888 - RNA, 17 nt, Human
uaaaauuugaaacauug

SEQ ID NO: 3190889 - RNA, 16 nt, Human
uaaaauuugaaacauu

SEQ ID NO: 3190890 - RNA, 15 nt, Human
uaaaauuugaaacau

SEQ ID NO: 3190891 - RNA, 14 nt, Human
uaaaauuugaaaca

SEQ ID NO: 3190892 - RNA, 12 nt, Human
uaaaauuugaaa

SEQ ID NO: 3190893 - RNA, 17 nt, Human
uaacaguggacaaaguu

SEQ ID NO: 3190894 - RNA, 19 nt, Human
uaacauagccaaaauguga

SEQ ID NO: 3190895 - RNA, 23 nt, Human
uaacauagaauugcaaucuauaa

SEQ ID NO: 3190896 - RNA, 17 nt, Human
uaacaucuuuauugaaa

SEQ ID NO: 3190897 - RNA, 20 nt, Human
uaacaucuuuauugaaauuc

SEQ ID NO: 3190898 - RNA, 21 nt, Human
uaacaucuuuauugaaauucu

SEQ ID NO: 3190899 - RNA, 22 nt, Human
uaacaucuuuauugaaauucua

SEQ ID NO: 3190900 - RNA, 23 nt, Human
uaacauggacaugaucuucuuua

SEQ ID NO: 3190901 - RNA, 18 nt, Human
uaacauggacaugaucuu

SEQ ID NO: 3190902 - RNA, 16 nt, Human
uaacauggaaguacua

SEQ ID NO: 3190903 - RNA, 14 nt, Human
aauauuguauauuu

SEQ ID NO: 3190904 - RNA, 20 nt, Human
aauauuguauauuuuuaucu

SEQ ID NO: 3190905 - RNA, 15 nt, Human
aauauuguauuguua

SEQ ID NO: 3190906 - RNA, 22 nt, Human
aauauuguauuguuagauguuu

SEQ ID NO: 3190907 - RNA, 20 nt, Human
aauauugaaaggcaaacauu

SEQ ID NO: 3190908 - RNA, 22 nt, Human
aauauugaauuuuuauuuuuga

SEQ ID NO: 3190909 - RNA, 13 nt, Human
aauauugaaaauu

SEQ ID NO: 3190910 - RNA, 14 nt, Human
aauauugaaaauug

SEQ ID NO: 3190911 - RNA, 15 nt, Human
aauauugaaaauuga

SEQ ID NO: 3190912 - RNA, 16 nt, Human
aauauugaaaauugaa

SEQ ID NO: 3190913 - RNA, 20 nt, Human
aauauugaaaauugaaaagu

SEQ ID NO: 3190914 - RNA, 21 nt, Human
aauauugaaaauugaaaagua

SEQ ID NO: 3190915 - RNA, 14 nt, Human
aauauugagcaaua

SEQ ID NO: 3190916 - RNA, 18 nt, Human
aauauugagcaauauguc

SEQ ID NO: 3190917 - RNA, 19 nt, Human
aauauugagcagaauucau

SEQ ID NO: 3190918 - RNA, 14 nt, Human
aauauuuaauguug

SEQ ID NO: 3190919 - RNA, 13 nt, Human
aauauuuaauguu

SEQ ID NO: 3190920 - RNA, 15 nt, Human
aauauuuaauguuga

SEQ ID NO: 3190921 - RNA, 15 nt, Human
aauauuuacaaugua

SEQ ID NO: 3190922 - RNA, 16 nt, Human
aauauuuacaauguau

SEQ ID NO: 3190923 - RNA, 17 nt, Human
aauauuuacaauguauu

SEQ ID NO: 3190924 - RNA, 19 nt, Human
aauauuuacaauguauuaa

SEQ ID NO: 3190925 - RNA, 14 nt, Human
aauauuugaaugua

SEQ ID NO: 3190926 - RNA, 23 nt, Human
aauauuugaauguaugcuucaua

SEQ ID NO: 3190927 - RNA, 21 nt, Human
aauauuugaauguaugcuuca

SEQ ID NO: 3190928 - RNA, 22 nt, Human
aauaugcacuaagucucuuuuu

SEQ ID NO: 3190929 - RNA, 20 nt, Human
aauaugcacuaagucucuuu

SEQ ID NO: 3190930 - RNA, 19 nt, Human
aauauucauaguagaacuu

SEQ ID NO: 3190931 - RNA, 15 nt, Human
aauauuccugcauuu

SEQ ID NO: 3190932 - RNA, 14 nt, Human
aauauucucuauuu

SEQ ID NO: 3190933 - RNA, 18 nt, Human
aauauucucuauuugaau

SEQ ID NO: 3190934 - RNA, 15 nt, Human
aauauucucuguaca

SEQ ID NO: 3190935 - RNA, 14 nt, Human
aauauucucuguac

SEQ ID NO: 3190936 - RNA, 21 nt, Human
aauauucucuguacauauuag

SEQ ID NO: 3190937 - RNA, 18 nt, Human
aauauucucuguacauau

SEQ ID NO: 3190938 - RNA, 17 nt, Human
aauauucucuguacaua

SEQ ID NO: 3190939 - RNA, 15 nt, Human
uaagagaaaugagcu

SEQ ID NO: 3190940 - RNA, 15 nt, Human
uaagagaaaagagag

SEQ ID NO: 3190941 - RNA, 18 nt, Human
uaagagaaaagagagaaa

SEQ ID NO: 3190942 - RNA, 20 nt, Human
uaagagaaaagagagaaaca

SEQ ID NO: 3190943 - RNA, 18 nt, Human
aauaugcacuaagucucu

SEQ ID NO: 3190944 - RNA, 17 nt, Human
aauaugcacuaagucuc

SEQ ID NO: 3190945 - RNA, 21 nt, Human
aauauuugugugcuaaacgug

SEQ ID NO: 3190946 - RNA, 17 nt, Human
aauauuugugugcuaaa

SEQ ID NO: 3190947 - RNA, 19 nt, Human
uaagaugaucaucuaauuu

SEQ ID NO: 3190948 - RNA, 19 nt, Human
uaagauggcaggugauguc

SEQ ID NO: 3190949 - RNA, 21 nt, Human
uaagauuccagagaguggcuc

SEQ ID NO: 3190950 - RNA, 14 nt, Human
uaagauuccagaga

SEQ ID NO: 3190951 - RNA, 21 nt, Human
uaagcaaaaugugauauguac

SEQ ID NO: 3190952 - RNA, 18 nt, Human
uaagcacacuugacauca

SEQ ID NO: 3190953 - RNA, 21 nt, Human
uaagcaaagcacccauuucaa

SEQ ID NO: 3190954 - RNA, 13 nt, Human
uaagcaacaauuu

SEQ ID NO: 3190955 - RNA, 18 nt, Human
uaagcaacaauuuucaga

SEQ ID NO: 3190956 - RNA, 16 nt, Human
uaagcaacaauuuuca

SEQ ID NO: 3190957 - RNA, 13 nt, Human
uaagauucuuggu

SEQ ID NO: 3190958 - RNA, 14 nt, Human
uaagauucuuggua

SEQ ID NO: 3190959 - RNA, 20 nt, Human
uaagauucuugguauuugga

SEQ ID NO: 3190960 - RNA, 14 nt, Human
uaagauucuuuuaa

SEQ ID NO: 3190961 - RNA, 15 nt, Human
uaagauucuuuuaaa

SEQ ID NO: 3190962 - RNA, 23 nt, Human
uaagauucuuuuaaauuagaaaa

SEQ ID NO: 3190963 - RNA, 18 nt, Human
uaagauuguuauuaaaug

SEQ ID NO: 3190964 - RNA, 19 nt, Human
uaagauuguuauuaaaugu

SEQ ID NO: 3190965 - RNA, 20 nt, Human
uaagauuguuauuaaaugua

SEQ ID NO: 3190966 - RNA, 22 nt, Human
uaagcuguuacugucuucagua

SEQ ID NO: 3190967 - RNA, 17 nt, Human
uaagcuguguccuaguu

SEQ ID NO: 3190968 - RNA, 13 nt, Human
uaagcugugucug

SEQ ID NO: 3190969 - RNA, 22 nt, Human
uaagcugugucugcccaaugaa

SEQ ID NO: 3190970 - RNA, 21 nt, Human
uaagcagaauuggaaaagacu

SEQ ID NO: 3190971 - RNA, 17 nt, Human
uaagcagaauuggaaaa

SEQ ID NO: 3190972 - RNA, 13 nt, Human
uaagcacuuuuua

SEQ ID NO: 3190973 - RNA, 16 nt, Human
uaagcacuuuuuaaaa

SEQ ID NO: 3190974 - RNA, 15 nt, Human
uaagcacuuuuuaaa

SEQ ID NO: 3190975 - RNA, 21 nt, Human
uaagcacuuuuuaaaaaacuu

SEQ ID NO: 3190976 - RNA, 13 nt, Human
aaucuuacuuugu

SEQ ID NO: 3190977 - RNA, 14 nt, Human
aaucuuacuuugua

SEQ ID NO: 3190978 - RNA, 22 nt, Human
aaucuuaauacuguuauucuuu

SEQ ID NO: 3190979 - RNA, 15 nt, Human
aaucuuacuuuguaa

SEQ ID NO: 3190980 - RNA, 16 nt, Human
aaucuuacuuuguaaa

SEQ ID NO: 3190981 - RNA, 17 nt, Human
aaucuuacuuuguaaau

SEQ ID NO: 3190982 - RNA, 18 nt, Human
aaucuuacuuuguaaauu

SEQ ID NO: 3190983 - RNA, 19 nt, Human
aaucuuacuuuguaaauuc

SEQ ID NO: 3190984 - RNA, 20 nt, Human
aaucuuacuuuguaaauucu

SEQ ID NO: 3190985 - RNA, 21 nt, Human
aaucuguuuuauaccuugcuu

SEQ ID NO: 3190986 - RNA, 19 nt, Human
aaucuguuuuuacguaugu

SEQ ID NO: 3190987 - RNA, 14 nt, Human
aaucuuaagaaaua

SEQ ID NO: 3190988 - RNA, 13 nt, Human
aaucuuaagaaau

SEQ ID NO: 3190989 - RNA, 15 nt, Human
aaucuuaagaaauaa

SEQ ID NO: 3190990 - RNA, 21 nt, Human
aaucuuaauacuguuauucuu

SEQ ID NO: 3190991 - RNA, 18 nt, Human
aaucuuaauacuguuauu

SEQ ID NO: 3190992 - RNA, 17 nt, Human
aaucuuaauacuguuau

SEQ ID NO: 3190993 - RNA, 16 nt, Human
aaucuuaauacuguua

SEQ ID NO: 3190994 - RNA, 15 nt, Human
aaucuuaauacuguu

SEQ ID NO: 3190995 - RNA, 14 nt, Human
aaucuuaauacugu

SEQ ID NO: 3190996 - RNA, 12 nt, Human
aaucuuaauacu

SEQ ID NO: 3190997 - RNA, 19 nt, Human
aaucuacacuccagugaga

SEQ ID NO: 3190998 - RNA, 19 nt, Human
aaucuggaugccucauuau

SEQ ID NO: 3190999 - RNA, 21 nt, Human
aaucuggaugccucauuaugu

SEQ ID NO: 3191000 - RNA, 16 nt, Human
aaucugggccagaauu

SEQ ID NO: 3191001 - RNA, 17 nt, Human
aaucugggccagaauuu

SEQ ID NO: 3191002 - RNA, 16 nt, Human
aaucauguuucuuuga

SEQ ID NO: 3191003 - RNA, 19 nt, Human
aaucauguuucuuugauca

SEQ ID NO: 3191004 - RNA, 18 nt, Human
aaucauguuucuuugauc

SEQ ID NO: 3191005 - RNA, 17 nt, Human
aaucauguuucuuugau

SEQ ID NO: 3191006 - RNA, 21 nt, Human
aaucgagugccgcaucucaca

SEQ ID NO: 3191007 - RNA, 15 nt, Human
aaucgaccugccucg

SEQ ID NO: 3191008 - RNA, 12 nt, Human
aauccugguucc

SEQ ID NO: 3191009 - RNA, 19 nt, Human
uaaguauucuuauuuaaug

SEQ ID NO: 3191010 - RNA, 20 nt, Human
uaaguauucuuauuuaauga

SEQ ID NO: 3191011 - RNA, 16 nt, Human
uaaguacuauguauca

SEQ ID NO: 3191012 - RNA, 13 nt, Human
uaaguacuaugua

SEQ ID NO: 3191013 - RNA, 17 nt, Human
uaaguacuauguaucaa

SEQ ID NO: 3191014 - RNA, 18 nt, Human
uaaguaaaucucuucugu

SEQ ID NO: 3191015 - RNA, 16 nt, Human
uaaguaaaucucuucu

SEQ ID NO: 3191016 - RNA, 19 nt, Human
uaaguaaaaccacagcagu

SEQ ID NO: 3191017 - RNA, 22 nt, Human
uaaguaaaucucuucuguguuu

SEQ ID NO: 3191018 - RNA, 15 nt, Human
uaagcuuaugcuuaa

SEQ ID NO: 3191019 - RNA, 22 nt, Human
uaagcuguuugguuuuaaaaua

SEQ ID NO: 3191020 - RNA, 21 nt, Human
uaagcuguuugguuuuaaaau

SEQ ID NO: 3191021 - RNA, 18 nt, Human
uaagcuguuugguuuuaa

SEQ ID NO: 3191022 - RNA, 13 nt, Human
uaagcuuuuugga

SEQ ID NO: 3191023 - RNA, 15 nt, Human
uaagcuuuuuggaau

SEQ ID NO: 3191024 - RNA, 23 nt, Human
uaaguuggaaacacuaaauguua

SEQ ID NO: 3191025 - RNA, 22 nt, Human
uaaguuggaaacacuaaauguu

SEQ ID NO: 3191026 - RNA, 21 nt, Human
uaaguuggaaacacuaaaugu

SEQ ID NO: 3191027 - RNA, 18 nt, Human
uaaguuggaaacacuaaa

SEQ ID NO: 3191028 - RNA, 17 nt, Human
uaaguuggaaacacuaa

SEQ ID NO: 3191029 - RNA, 16 nt, Human
uaaguuggaaacacua

SEQ ID NO: 3191030 - RNA, 15 nt, Human
uaaguuggaaacacu

SEQ ID NO: 3191031 - RNA, 12 nt, Human
uaaguugaguau

SEQ ID NO: 3191032 - RNA, 13 nt, Human
uaaguuggaaaca

SEQ ID NO: 3191033 - RNA, 12 nt, Human
uaaguuggaaac

SEQ ID NO: 3191034 - RNA, 17 nt, Human
aaucauauuagacuucu

SEQ ID NO: 3191035 - RNA, 12 nt, Human
aaucauaaguau

SEQ ID NO: 3191036 - RNA, 19 nt, Human
aaucauacuccuaugcuuu

SEQ ID NO: 3191037 - RNA, 16 nt, Human
aaucauaaguauuugg

SEQ ID NO: 3191038 - RNA, 15 nt, Human
aaucauaaguauuug

SEQ ID NO: 3191039 - RNA, 14 nt, Human
aaucauaaguauuu

SEQ ID NO: 3191040 - RNA, 20 nt, Human
aaucauacuccuaugcuuua

SEQ ID NO: 3191041 - RNA, 13 nt, Human
aaucauauauaau

SEQ ID NO: 3191042 - RNA, 17 nt, Human
aaucauauauaauaaau

SEQ ID NO: 3191043 - RNA, 14 nt, Human
aaugaaacuuggau

SEQ ID NO: 3191044 - RNA, 17 nt, Human
aaugaaaccugugucuc

SEQ ID NO: 3191045 - RNA, 17 nt, Human
aaugaaagacuguacaa

SEQ ID NO: 3191046 - RNA, 16 nt, Human
aaugaaagacuguaca

SEQ ID NO: 3191047 - RNA, 17 nt, Human
aaugaaacauuuuguca

SEQ ID NO: 3191048 - RNA, 17 nt, Human
aaucuuuccauauccau

SEQ ID NO: 3191049 - RNA, 22 nt, Human
aaugaauggcuaagcaaaaugu

SEQ ID NO: 3191050 - RNA, 17 nt, Human
aaugaaugcauaaaaug

SEQ ID NO: 3191051 - RNA, 13 nt, Human
aaugaaugucagu

SEQ ID NO: 3191052 - RNA, 22 nt, Human
aaugaaugucagugugacugau

SEQ ID NO: 3191053 - RNA, 15 nt, Human
aaugaccuuucaaua

SEQ ID NO: 3191054 - RNA, 13 nt, Human
aaucuuuaauuaa

SEQ ID NO: 3191055 - RNA, 17 nt, Human
aaucuuuagaaaaggca

SEQ ID NO: 3191056 - RNA, 14 nt, Human
aaucuuuaauuaaa

SEQ ID NO: 3191057 - RNA, 19 nt, Human
uaaugugucaucuagcauu

SEQ ID NO: 3191058 - RNA, 15 nt, Human
uaaugaaugcauaaa

SEQ ID NO: 3191059 - RNA, 18 nt, Human
uaauguacugauuucagu

SEQ ID NO: 3191060 - RNA, 19 nt, Human
uaauguacugauuucagua

SEQ ID NO: 3191061 - RNA, 19 nt, Human
uaauguaucaaauacauuu

SEQ ID NO: 3191062 - RNA, 13 nt, Human
uaauguauauaaa

SEQ ID NO: 3191063 - RNA, 14 nt, Human
uaauguauauaaaa

SEQ ID NO: 3191064 - RNA, 15 nt, Human
uaauguauauaaaaa

SEQ ID NO: 3191065 - RNA, 16 nt, Human
uaauguauauaaaaau

SEQ ID NO: 3191066 - RNA, 22 nt, Human
uaauguauaugaacuuaacaug

SEQ ID NO: 3191067 - RNA, 13 nt, Human
uaauguacugcau

SEQ ID NO: 3191068 - RNA, 14 nt, Human
uaauguauucauau

SEQ ID NO: 3191069 - RNA, 18 nt, Human
uaauguauucauauuugu

SEQ ID NO: 3191070 - RNA, 17 nt, Human
uaauguauucauauuug

SEQ ID NO: 3191071 - RNA, 16 nt, Human
uaauguauucauauuu

SEQ ID NO: 3191072 - RNA, 15 nt, Human
uaauguauucauauu

SEQ ID NO: 3191073 - RNA, 18 nt, Human
uaaugucacaggcagguc

SEQ ID NO: 3191074 - RNA, 16 nt, Human
uaaugucauaaaguga

SEQ ID NO: 3191075 - RNA, 17 nt, Human
uaaugucauaaagugag

SEQ ID NO: 3191076 - RNA, 20 nt, Human
uaaugucauaaagugagaaa

SEQ ID NO: 3191077 - RNA, 20 nt, Human
uaauguauucauauuuguac

SEQ ID NO: 3191078 - RNA, 19 nt, Human
uaauguauucauauuugua

SEQ ID NO: 3191079 - RNA, 18 nt, Human
aaucuuauuaaaguuuca

SEQ ID NO: 3191080 - RNA, 17 nt, Human
aaucuuauuaaaguuuc

SEQ ID NO: 3191081 - RNA, 18 nt, Human
uaauagauugugaauaau

SEQ ID NO: 3191082 - RNA, 18 nt, Human
uaauauuucuucaaauau

SEQ ID NO: 3191083 - RNA, 13 nt, Human
uaauauuuauuaa

SEQ ID NO: 3191084 - RNA, 16 nt, Human
uaauauuuauuaaauu

SEQ ID NO: 3191085 - RNA, 17 nt, Human
uaauauuuauuaaauuu

SEQ ID NO: 3191086 - RNA, 13 nt, Human
uaauauuuacaau

SEQ ID NO: 3191087 - RNA, 15 nt, Human
uaauauuuacaaugu

SEQ ID NO: 3191088 - RNA, 16 nt, Human
uaauauuuacaaugua

SEQ ID NO: 3191089 - RNA, 19 nt, Human
uaauauuuacaauguauua

SEQ ID NO: 3191090 - RNA, 20 nt, Human
uaauauuuacaauguauuaa

SEQ ID NO: 3191091 - RNA, 16 nt, Human
aaucuuauuaaaguuu

SEQ ID NO: 3191092 - RNA, 15 nt, Human
aaucuuauuaaaguu

SEQ ID NO: 3191093 - RNA, 14 nt, Human
aaucuuauuaaagu

SEQ ID NO: 3191094 - RNA, 13 nt, Human
aaucuuauuaaag

SEQ ID NO: 3191095 - RNA, 14 nt, Human
uaaucuuuucugaa

SEQ ID NO: 3191096 - RNA, 17 nt, Human
uaaugaaugaaacauuu

SEQ ID NO: 3191097 - RNA, 12 nt, Human
uaaugaaugacu

SEQ ID NO: 3191098 - RNA, 15 nt, Human
uaaucuuuucugaau

SEQ ID NO: 3191099 - RNA, 17 nt, Human
uaauauuuuuacaugca

SEQ ID NO: 3191100 - RNA, 22 nt, Human
uaaucacuguguauauuugauu

SEQ ID NO: 3191101 - RNA, 20 nt, Human
uaaucacuguguauauuuga

SEQ ID NO: 3191102 - RNA, 21 nt, Human
uaaucacuguguauauuugau

SEQ ID NO: 3191103 - RNA, 10 nt, Human
uaaucacugu

SEQ ID NO: 3191104 - RNA, 12 nt, Human
uaaucacugugu

SEQ ID NO: 3191105 - RNA, 16 nt, Human
uaaucacucagagcag

SEQ ID NO: 3191106 - RNA, 13 nt, Human
uaaucacugugua

SEQ ID NO: 3191107 - RNA, 14 nt, Human
uaaucacuguguau

SEQ ID NO: 3191108 - RNA, 15 nt, Human
uaaucacuguguaua

SEQ ID NO: 3191109 - RNA, 16 nt, Human
uaaucacuguguauau

SEQ ID NO: 3191110 - RNA, 22 nt, Human
uaaucagaauggaagagagaaa

SEQ ID NO: 3191111 - RNA, 12 nt, Human
uaauccaguaaa

SEQ ID NO: 3191112 - RNA, 14 nt, Human
uacuggauaaauug

SEQ ID NO: 3191113 - RNA, 16 nt, Human
uacuggauaaauuguu

SEQ ID NO: 3191114 - RNA, 17 nt, Human
uacuggauaaauuguuu

SEQ ID NO: 3191115 - RNA, 15 nt, Human
uacuggaucucuuaa

SEQ ID NO: 3191116 - RNA, 13 nt, Human
uacuggauucuua

SEQ ID NO: 3191117 - RNA, 16 nt, Human
uacuggagaaaaugga

SEQ ID NO: 3191118 - RNA, 12 nt, Human
uacucuguguca

SEQ ID NO: 3191119 - RNA, 11 nt, Human
uacucugggaa

SEQ ID NO: 3191120 - RNA, 13 nt, Human
uacucugggaacu

SEQ ID NO: 3191121 - RNA, 12 nt, Human
uacucugggaac

SEQ ID NO: 3191122 - RNA, 12 nt, Human
aauugcauuucc

SEQ ID NO: 3191123 - RNA, 14 nt, Human
aauugccuuucugu

SEQ ID NO: 3191124 - RNA, 16 nt, Human
aauugcauuugcuuuu

SEQ ID NO: 3191125 - RNA, 22 nt, Human
aauugacccacaagaaaugaaa

SEQ ID NO: 3191126 - RNA, 23 nt, Human
aauugaccgacagcuuuccagua

SEQ ID NO: 3191127 - RNA, 21 nt, Human
aauugacccacaagaaaugaa

SEQ ID NO: 3191128 - RNA, 15 nt, Human
uacuguacaugggac

SEQ ID NO: 3191129 - RNA, 14 nt, Human
aauucccuaaagcc

SEQ ID NO: 3191130 - RNA, 22 nt, Human
uacgccaggggaaaaucagccu

SEQ ID NO: 3191131 - RNA, 20 nt, Human
uacgagcaagcuuuuacaac

SEQ ID NO: 3191132 - RNA, 20 nt, Human
uacgaguaauugcauuugcu

SEQ ID NO: 3191133 - RNA, 22 nt, Human
uacguaaaaaucucucauuugu

SEQ ID NO: 3191134 - RNA, 18 nt, Human
uacgggaggguaaggcug

SEQ ID NO: 3191135 - RNA, 23 nt, Human
uacucuccuggaaauauuaagaa

SEQ ID NO: 3191136 - RNA, 22 nt, Human
uacucuccuggaaauauuaaga

SEQ ID NO: 3191137 - RNA, 22 nt, Human
uacuaucuuaucucagauauuu

SEQ ID NO: 3191138 - RNA, 13 nt, Human
uacuauguaucaa

SEQ ID NO: 3191139 - RNA, 12 nt, Human
uacuauguauca

SEQ ID NO: 3191140 - RNA, 21 nt, Human
uacuaucuuaucucagauauu

SEQ ID NO: 3191141 - RNA, 17 nt, Human
uacuaucuuaucucaga

SEQ ID NO: 3191142 - RNA, 17 nt, Human
uacuacuccuguaggaa

SEQ ID NO: 3191143 - RNA, 13 nt, Human
uacuacuccugua

SEQ ID NO: 3191144 - RNA, 20 nt, Human
uacuaucaugucaaacguga

SEQ ID NO: 3191145 - RNA, 16 nt, Human
uacuacugaccagaca

SEQ ID NO: 3191146 - RNA, 20 nt, Human
uacuacugaccagacaagcu

SEQ ID NO: 3191147 - RNA, 21 nt, Human
uaccaccaucccgugcuuuua

SEQ ID NO: 3191148 - RNA, 22 nt, Human
uacauucuuuuugcucuaaaau

SEQ ID NO: 3191149 - RNA, 23 nt, Human
uaccaccucacuuuuucauuucc

SEQ ID NO: 3191150 - RNA, 18 nt, Human
uaccacccgguccccacu

SEQ ID NO: 3191151 - RNA, 19 nt, Human
uaccacggccuccuuuccg

SEQ ID NO: 3191152 - RNA, 18 nt, Human
uaccacggccuccuuucc

SEQ ID NO: 3191153 - RNA, 16 nt, Human
uaccacgaaauacuua

SEQ ID NO: 3191154 - RNA, 18 nt, Human
uaccugccaggaagccag

SEQ ID NO: 3191155 - RNA, 20 nt, Human
uaccugccaggaagccagca

SEQ ID NO: 3191156 - RNA, 23 nt, Human
uaccugccaggaagccagcaggc

SEQ ID NO: 3191157 - RNA, 16 nt, Human
uaccugccaggaagcc

SEQ ID NO: 3191158 - RNA, 13 nt, Human
uaccugucccccu

SEQ ID NO: 3191159 - RNA, 14 nt, Human
uaccugucccccug

SEQ ID NO: 3191160 - RNA, 16 nt, Human
uaccugucccccugac

SEQ ID NO: 3191161 - RNA, 17 nt, Human
uaccugucccccugaca

SEQ ID NO: 3191162 - RNA, 10 nt, Human
uaccuguccc

SEQ ID NO: 3191163 - RNA, 20 nt, Human
uaccugcgcuuguuuuaaag

SEQ ID NO: 3191164 - RNA, 16 nt, Human
uaccugcgcuuguuuu

SEQ ID NO: 3191165 - RNA, 15 nt, Human
uaccuggaaucaaau

SEQ ID NO: 3191166 - RNA, 21 nt, Human
uaccuggaaucaaauaaaaau

SEQ ID NO: 3191167 - RNA, 20 nt, Human
uaccuggguccccagcccuu

SEQ ID NO: 3191168 - RNA, 19 nt, Human
uaccuggguccccagcccu

SEQ ID NO: 3191169 - RNA, 17 nt, Human
uaccuggguccccagcc

SEQ ID NO: 3191170 - RNA, 15 nt, Human
uaccuggauguucuu

SEQ ID NO: 3191171 - RNA, 19 nt, Human
uaccuggauguucuuuuua

SEQ ID NO: 3191172 - RNA, 22 nt, Human
aauuagccuaagauauacuugu

SEQ ID NO: 3191173 - RNA, 20 nt, Human
aauuagccuaagauauacuu

SEQ ID NO: 3191174 - RNA, 19 nt, Human
aauuagccuaagauauacu

SEQ ID NO: 3191175 - RNA, 15 nt, Human
aauuagccaagugug

SEQ ID NO: 3191176 - RNA, 20 nt, Human
aauuagauccauuaauuuaa

SEQ ID NO: 3191177 - RNA, 21 nt, Human
aauuagauccauuaauuuaaa

SEQ ID NO: 3191178 - RNA, 23 nt, Human
aauuagauccauuaauuuaaaug

SEQ ID NO: 3191179 - RNA, 13 nt, Human
aauuagauuucuc

SEQ ID NO: 3191180 - RNA, 21 nt, Human
aauuagauuuuaaaacuucau

SEQ ID NO: 3191181 - RNA, 13 nt, Human
aauuagauuuuaa

SEQ ID NO: 3191182 - RNA, 15 nt, Human
aauuagccuaagaua

SEQ ID NO: 3191183 - RNA, 11 nt, Human
aauuacaggaa

SEQ ID NO: 3191184 - RNA, 16 nt, Human
aauuacaauauuucug

SEQ ID NO: 3191185 - RNA, 16 nt, Human
aauuacaacuaaguga

SEQ ID NO: 3191186 - RNA, 14 nt, Human
aauuacaacuaagu

SEQ ID NO: 3191187 - RNA, 13 nt, Human
aauuaauuucagu

SEQ ID NO: 3191188 - RNA, 13 nt, Human
aauuaauuuggag

SEQ ID NO: 3191189 - RNA, 12 nt, Human
aauuaauuucag

SEQ ID NO: 3191190 - RNA, 20 nt, Human
uaccuguauacguuucaaaa

SEQ ID NO: 3191191 - RNA, 22 nt, Human
aauuaauugugugaacuuggaa

SEQ ID NO: 3191192 - RNA, 20 nt, Human
aauuacacucuuccuccauu

SEQ ID NO: 3191193 - RNA, 17 nt, Human
aauuacccuuuugcagg

SEQ ID NO: 3191194 - RNA, 16 nt, Human
aauuaccauuuguuaa

SEQ ID NO: 3191195 - RNA, 18 nt, Human
aauuaccauuuguuaaua

SEQ ID NO: 3191196 - RNA, 23 nt, Human
aauuaccauuuguuaauaucacu

SEQ ID NO: 3191197 - RNA, 18 nt, Human
aauuaccuggauguucuu

SEQ ID NO: 3191198 - RNA, 17 nt, Human
aauuacuauagcaaagu

SEQ ID NO: 3191199 - RNA, 23 nt, Human
aauuacuaacuucuaaaacugua

SEQ ID NO: 3191200 - RNA, 21 nt, Human
aauuacuaacuucuaaaacug

SEQ ID NO: 3191201 - RNA, 20 nt, Human
aauuacuaacuucuaaaacu

SEQ ID NO: 3191202 - RNA, 18 nt, Human
aauuacuaacuucuaaaa

SEQ ID NO: 3191203 - RNA, 13 nt, Human
aauuacuaacuuc

SEQ ID NO: 3191204 - RNA, 17 nt, Human
aauuacuaacuucuaaa

SEQ ID NO: 3191205 - RNA, 16 nt, Human
aauuacuaacuucuaa

SEQ ID NO: 3191206 - RNA, 15 nt, Human
aauuacuaacuucua

SEQ ID NO: 3191207 - RNA, 14 nt, Human
aauuacuaacuucu

SEQ ID NO: 3191208 - RNA, 16 nt, Human
aauuauugaugaaaau

SEQ ID NO: 3191209 - RNA, 15 nt, Human
aauuauugaugaaaa

SEQ ID NO: 3191210 - RNA, 15 nt, Human
aauuauuuuuaagug

SEQ ID NO: 3191211 - RNA, 16 nt, Human
aauucaaaccuaaguu

SEQ ID NO: 3191212 - RNA, 13 nt, Human
aauucaaaccuaa

SEQ ID NO: 3191213 - RNA, 14 nt, Human
aauucaaagaauca

SEQ ID NO: 3191214 - RNA, 13 nt, Human
aauucaaagcaug

SEQ ID NO: 3191215 - RNA, 19 nt, Human
aauucaaagcauggacauu

SEQ ID NO: 3191216 - RNA, 17 nt, Human
aauuauuccaaaccaaa

SEQ ID NO: 3191217 - RNA, 18 nt, Human
aauuagggcucuaauuuc

SEQ ID NO: 3191218 - RNA, 20 nt, Human
aauuagggcucuaauuuccu

SEQ ID NO: 3191219 - RNA, 19 nt, Human
aauuagggcucuaauuucc

SEQ ID NO: 3191220 - RNA, 16 nt, Human
aauucauuuucucuuu

SEQ ID NO: 3191221 - RNA, 15 nt, Human
aauucacaaaguuaa

SEQ ID NO: 3191222 - RNA, 18 nt, Human
aauucaccacagacuuua

SEQ ID NO: 3191223 - RNA, 17 nt, Human
aauucaccacagacuuu

SEQ ID NO: 3191224 - RNA, 22 nt, Human
aauuccacuuauaggaauugac

SEQ ID NO: 3191225 - RNA, 14 nt, Human
aauuccagaaugaa

SEQ ID NO: 3191226 - RNA, 17 nt, Human
aauuccaaacaugguuu

SEQ ID NO: 3191227 - RNA, 14 nt, Human
aauuccaaacaugg

SEQ ID NO: 3191228 - RNA, 14 nt, Human
aauuccccacccug

SEQ ID NO: 3191229 - RNA, 12 nt, Human
aauuccccagau

SEQ ID NO: 3191230 - RNA, 24 nt, Human
aauuccaucaagccaagccuccug

SEQ ID NO: 3191231 - RNA, 16 nt, Human
aauuccaugaauguuc

SEQ ID NO: 3191232 - RNA, 14 nt, Human
aauuccaugaaugu

SEQ ID NO: 3191233 - RNA, 20 nt, Human
aauggaaaugggcagagcag

SEQ ID NO: 3191234 - RNA, 21 nt, Human
aauggaaaugggcagagcaga

SEQ ID NO: 3191235 - RNA, 23 nt, Human
aauggacguguuaugacuccaga

SEQ ID NO: 3191236 - RNA, 20 nt, Human
aauggacuaacuugucuuug

SEQ ID NO: 3191237 - RNA, 21 nt, Human
aauggacguguuaugacucca

SEQ ID NO: 3191238 - RNA, 22 nt, Human
aaugcuguauuagucacagaga

SEQ ID NO: 3191239 - RNA, 11 nt, Human
aaugcccagcc

SEQ ID NO: 3191240 - RNA, 12 nt, Human
aaugcccagccc

SEQ ID NO: 3191241 - RNA, 15 nt, Human
aaugccaucaaauga

SEQ ID NO: 3191242 - RNA, 13 nt, Human
aaugccaugaauu

SEQ ID NO: 3191243 - RNA, 22 nt, Human
aaugcacuuuguucuggcucuu

SEQ ID NO: 3191244 - RNA, 12 nt, Human
aaugcagaacuc

SEQ ID NO: 3191245 - RNA, 13 nt, Human
uacaaugugacuu

SEQ ID NO: 3191246 - RNA, 20 nt, Human
aaugcacuuuguucuggcuc

SEQ ID NO: 3191247 - RNA, 18 nt, Human
aaugaccuuucaauagga

SEQ ID NO: 3191248 - RNA, 16 nt, Human
aaugaccuuucaauag

SEQ ID NO: 3191249 - RNA, 17 nt, Human
aaugaccuuucaauagg

SEQ ID NO: 3191250 - RNA, 21 nt, Human
aaugcacuuuguucuggcucu

SEQ ID NO: 3191251 - RNA, 13 nt, Human
uacaauguauuaa

SEQ ID NO: 3191252 - RNA, 15 nt, Human
uacacuaaaagguga

SEQ ID NO: 3191253 - RNA, 23 nt, Human
aauguaacuguuaccauuggaaa

SEQ ID NO: 3191254 - RNA, 22 nt, Human
uacagacaacaaaccuguuucu

SEQ ID NO: 3191255 - RNA, 19 nt, Human
uacagacaaagcguggugg

SEQ ID NO: 3191256 - RNA, 23 nt, Human
uacagaccgaacuguuguauaaa

SEQ ID NO: 3191257 - RNA, 21 nt, Human
uacagaccgaacuguuguaua

SEQ ID NO: 3191258 - RNA, 20 nt, Human
uacagaccgaacuguuguau

SEQ ID NO: 3191259 - RNA, 19 nt, Human
uacagaccgaacuguugua

SEQ ID NO: 3191260 - RNA, 18 nt, Human
uacagaggccaugggccu

SEQ ID NO: 3191261 - RNA, 21 nt, Human
uacagauaaaugauucaaaaa

SEQ ID NO: 3191262 - RNA, 20 nt, Human
uacagauccccaagccuggc

SEQ ID NO: 3191263 - RNA, 20 nt, Human
uacagauaaaugauucaaaa

SEQ ID NO: 3191264 - RNA, 16 nt, Human
uacagauaaaugauuc

SEQ ID NO: 3191265 - RNA, 15 nt, Human
uacagauaaaugauu

SEQ ID NO: 3191266 - RNA, 13 nt, Human
uacagauaaauga

SEQ ID NO: 3191267 - RNA, 16 nt, Human
aauggcagccuuggca

SEQ ID NO: 3191268 - RNA, 12 nt, Human
aauggcagccuu

SEQ ID NO: 3191269 - RNA, 20 nt, Human
aauggcaauguuuugcuuuu

SEQ ID NO: 3191270 - RNA, 23 nt, Human
aauggcacaaucucggcucacug

SEQ ID NO: 3191271 - RNA, 17 nt, Human
aauggcaaguuuuccau

SEQ ID NO: 3191272 - RNA, 14 nt, Human
aauggcaaguuuuc

SEQ ID NO: 3191273 - RNA, 21 nt, Human
aauggcaacaaacugcacaug

SEQ ID NO: 3191274 - RNA, 20 nt, Human
aauggcaacaaacugcacau

SEQ ID NO: 3191275 - RNA, 17 nt, Human
aauggcaacaaacugca

SEQ ID NO: 3191276 - RNA, 14 nt, Human
aauggcaacaaacu

SEQ ID NO: 3191277 - RNA, 16 nt, Human
aauggacuauccauua

SEQ ID NO: 3191278 - RNA, 22 nt, Human
aauguaacuguuaccauuggaa

SEQ ID NO: 3191279 - RNA, 20 nt, Human
aauguaacuguuaccauugg

SEQ ID NO: 3191280 - RNA, 13 nt, Human
aauguaacuguua

SEQ ID NO: 3191281 - RNA, 12 nt, Human
aauguaacuguu

SEQ ID NO: 3191282 - RNA, 16 nt, Human
aauguaacugcucuug

SEQ ID NO: 3191283 - RNA, 20 nt, Human
aauguaacuguccguaguau

SEQ ID NO: 3191284 - RNA, 15 nt, Human
aauguaacugcucuu

SEQ ID NO: 3191285 - RNA, 11 nt, Human
aauguaacugc

SEQ ID NO: 3191286 - RNA, 14 nt, Human
aauggcugaagcca

SEQ ID NO: 3191287 - RNA, 14 nt, Human
aauggcuauuaaca

SEQ ID NO: 3191288 - RNA, 15 nt, Human
aauggcauuugcaau

SEQ ID NO: 3191289 - RNA, 22 nt, Human
aauguuaagcaucuaaggacaa

SEQ ID NO: 3191290 - RNA, 15 nt, Human
aauguguuuuggucc

SEQ ID NO: 3191291 - RNA, 21 nt, Human
aauguuaaagauguagcaaac

SEQ ID NO: 3191292 - RNA, 20 nt, Human
aauguuaaagauguagcaaa

SEQ ID NO: 3191293 - RNA, 19 nt, Human
aauguuaaagauguagcaa

SEQ ID NO: 3191294 - RNA, 16 nt, Human
aauguuaaagauguag

SEQ ID NO: 3191295 - RNA, 15 nt, Human
aauguuaaagaugua

SEQ ID NO: 3191296 - RNA, 14 nt, Human
aauguuaaagaugu

SEQ ID NO: 3191297 - RNA, 13 nt, Human
aauguuaaagaug

SEQ ID NO: 3191298 - RNA, 20 nt, Human
aauuaaccaagguagaauga

SEQ ID NO: 3191299 - RNA, 20 nt, Human
aauuaaccccauaauuagau

SEQ ID NO: 3191300 - RNA, 15 nt, Human
aauguugaacaaaau

SEQ ID NO: 3191301 - RNA, 21 nt, Human
aauguucucucuucuccaccu

SEQ ID NO: 3191302 - RNA, 14 nt, Human
aauguucuuccagu

SEQ ID NO: 3191303 - RNA, 12 nt, Human
aauguucuucca

SEQ ID NO: 3191304 - RNA, 19 nt, Human
aauguucugcuaaauuuca

SEQ ID NO: 3191305 - RNA, 12 nt, Human
aauuaagaagaa

SEQ ID NO: 3191306 - RNA, 16 nt, Human
aauuaagaagaaacua

SEQ ID NO: 3191307 - RNA, 13 nt, Human
aauuaauugugug

SEQ ID NO: 3191308 - RNA, 13 nt, Human
aauuaauaucuuu

SEQ ID NO: 3191309 - RNA, 17 nt, Human
aauuaauaucuuucugc

SEQ ID NO: 3191310 - RNA, 22 nt, Human
aauuaaucugggccagaauuuc

SEQ ID NO: 3191311 - RNA, 17 nt, Human
aauuaauauauuaaaau

SEQ ID NO: 3191312 - RNA, 19 nt, Human
aauuaauauauuaaaauuc

SEQ ID NO: 3191313 - RNA, 22 nt, Human
uacauugccguggcaucuuaaa

SEQ ID NO: 3191314 - RNA, 21 nt, Human
uacauucuuuuugcucuaaaa

SEQ ID NO: 3191315 - RNA, 18 nt, Human
uacauucuuuuugcucua

SEQ ID NO: 3191316 - RNA, 15 nt, Human
uacauucuuuuugcu

SEQ ID NO: 3191317 - RNA, 16 nt, Human
uacauucuuuuugcuc

SEQ ID NO: 3191318 - RNA, 20 nt, Human
uacaugugcacauugugcag

SEQ ID NO: 3191319 - RNA, 16 nt, Human
uacaugugcacauugu

SEQ ID NO: 3191320 - RNA, 15 nt, Human
aauuaauugugugaa

SEQ ID NO: 3191321 - RNA, 15 nt, Human
uacauaugauaaauu

SEQ ID NO: 3191322 - RNA, 15 nt, Human
aauguaguuugagga

SEQ ID NO: 3191323 - RNA, 18 nt, Human
aauguaguuugaggaaau

SEQ ID NO: 3191324 - RNA, 23 nt, Human
aauguaguuugaggaaauuugca

SEQ ID NO: 3191325 - RNA, 20 nt, Human
aauguaguuugaggaaauuu

SEQ ID NO: 3191326 - RNA, 20 nt, Human
uacagguacuuugucuaaga

SEQ ID NO: 3191327 - RNA, 15 nt, Human
uacagguacuuuguc

SEQ ID NO: 3191328 - RNA, 14 nt, Human
uacagguacuuugu

SEQ ID NO: 3191329 - RNA, 16 nt, Human
uacaggugugagucac

SEQ ID NO: 3191330 - RNA, 16 nt, Human
uacagaugugggccac

SEQ ID NO: 3191331 - RNA, 16 nt, Human
uacagguaccaguucu

SEQ ID NO: 3191332 - RNA, 18 nt, Human
aauguaucaaauacauuu

SEQ ID NO: 3191333 - RNA, 20 nt, Human
aauguauguguaaguauucu

SEQ ID NO: 3191334 - RNA, 23 nt, Human
aauguauuaagcccacaguauau

SEQ ID NO: 3191335 - RNA, 17 nt, Human
aaugugaaaagaaaaau

SEQ ID NO: 3191336 - RNA, 22 nt, Human
aauguauuauguccugugagau

SEQ ID NO: 3191337 - RNA, 19 nt, Human
aauguauguguaaguauuc

SEQ ID NO: 3191338 - RNA, 20 nt, Human
aauguauaugaacuuaacau

SEQ ID NO: 3191339 - RNA, 14 nt, Human
aauguauaguauuu

SEQ ID NO: 3191340 - RNA, 22 nt, Human
aauguauaguauuugaaaacag

SEQ ID NO: 3191341 - RNA, 12 nt, Human
aauguauauaaa

SEQ ID NO: 3191342 - RNA, 13 nt, Human
aauguauauaaaa

SEQ ID NO: 3191343 - RNA, 14 nt, Human
aauguauauaaaaa

SEQ ID NO: 3191344 - RNA, 15 nt, Human
aauguauauaaaaau

SEQ ID NO: 3191345 - RNA, 17 nt, Human
aauguauauaaaaaugg

SEQ ID NO: 3191346 - RNA, 21 nt, Human
aauguauaguauuugaaaaca

SEQ ID NO: 3191347 - RNA, 19 nt, Human
aauguauaguauuugaaaa

SEQ ID NO: 3191348 - RNA, 18 nt, Human
aauguauaguauuugaaa

SEQ ID NO: 3191349 - RNA, 17 nt, Human
aauguauaguauuugaa

SEQ ID NO: 3191350 - RNA, 16 nt, Human
aauguauaguauuuga

SEQ ID NO: 3191351 - RNA, 15 nt, Human
aauguauaguauuug

SEQ ID NO: 3191352 - RNA, 19 nt, Human
aaugugaaaagaaaaauga

SEQ ID NO: 3191353 - RNA, 11 nt, Human
aaugugugugu

SEQ ID NO: 3191354 - RNA, 16 nt, Human
acaccugacagccccu

SEQ ID NO: 3191355 - RNA, 19 nt, Human
acaccucugcacaagcugc

SEQ ID NO: 3191356 - RNA, 21 nt, Human
acaccucugcacaagcugcac

SEQ ID NO: 3191357 - RNA, 19 nt, Human
acacccugugauggggccc

SEQ ID NO: 3191358 - RNA, 14 nt, Human
acacccuuggagcu

SEQ ID NO: 3191359 - RNA, 16 nt, Human
acaccgggcacucaga

SEQ ID NO: 3191360 - RNA, 18 nt, Human
acacccuuggagcucuga

SEQ ID NO: 3191361 - RNA, 14 nt, Human
acaccgggccugga

SEQ ID NO: 3191362 - RNA, 20 nt, Human
acacuaaccacgcuggaccu

SEQ ID NO: 3191363 - RNA, 12 nt, Human
acaccuucuaua

SEQ ID NO: 3191364 - RNA, 21 nt, Human
acaccuuagccugcccuccuu

SEQ ID NO: 3191365 - RNA, 16 nt, Human
uauaagaaaaauguga

SEQ ID NO: 3191366 - RNA, 13 nt, Human
uauaacuuuagaa

SEQ ID NO: 3191367 - RNA, 16 nt, Human
uauaacuuuagaaaua

SEQ ID NO: 3191368 - RNA, 24 nt, Human
uauaacuuauauuguaagaaauac

SEQ ID NO: 3191369 - RNA, 22 nt, Human
uauaacuuauauuguaagaaau

SEQ ID NO: 3191370 - RNA, 21 nt, Human
uauaacuuauauuguaagaaa

SEQ ID NO: 3191371 - RNA, 19 nt, Human
uauaacuuauauuguaaga

SEQ ID NO: 3191372 - RNA, 18 nt, Human
acacucaaaucaagaaac

SEQ ID NO: 3191373 - RNA, 20 nt, Human
acacucacauuuauucugcu

SEQ ID NO: 3191374 - RNA, 17 nt, Human
uauaacuuauauuguaa

SEQ ID NO: 3191375 - RNA, 19 nt, Human
acacucaaaucaagaaacu

SEQ ID NO: 3191376 - RNA, 15 nt, Human
acacucaaaagcugg

SEQ ID NO: 3191377 - RNA, 23 nt, Human
acacauauaaauugucuuaaugg

SEQ ID NO: 3191378 - RNA, 18 nt, Human
uaguucagguaacaggca

SEQ ID NO: 3191379 - RNA, 20 nt, Human
uaguucaucccuucucuucc

SEQ ID NO: 3191380 - RNA, 20 nt, Human
uaguuccaccaucaagccac

SEQ ID NO: 3191381 - RNA, 15 nt, Human
uaguuccacugagac

SEQ ID NO: 3191382 - RNA, 14 nt, Human
uaguuccacugaga

SEQ ID NO: 3191383 - RNA, 22 nt, Human
uauaaaaaaucaugccaguauu

SEQ ID NO: 3191384 - RNA, 21 nt, Human
uaguuccccaaauacaaaguu

SEQ ID NO: 3191385 - RNA, 14 nt, Human
uauaaaaagauaau

SEQ ID NO: 3191386 - RNA, 15 nt, Human
acacaucagcuugcc

SEQ ID NO: 3191387 - RNA, 18 nt, Human
acacaugauccugcaauu

SEQ ID NO: 3191388 - RNA, 21 nt, Human
acacaugagcaucaggccagg

SEQ ID NO: 3191389 - RNA, 15 nt, Human
acaccauuaccaaaa

SEQ ID NO: 3191390 - RNA, 16 nt, Human
acaccauuaccaaaau

SEQ ID NO: 3191391 - RNA, 20 nt, Human
acaccauuaccaaaauaaua

SEQ ID NO: 3191392 - RNA, 21 nt, Human
acaccauuaccaaaauaauaa

SEQ ID NO: 3191393 - RNA, 20 nt, Human
acacaucagccaucaacuaa

SEQ ID NO: 3191394 - RNA, 19 nt, Human
acaccaucacagcuuguuu

SEQ ID NO: 3191395 - RNA, 21 nt, Human
acaccaucacagcuuguuuug

SEQ ID NO: 3191396 - RNA, 15 nt, Human
acaccaucuuuuauu

SEQ ID NO: 3191397 - RNA, 18 nt, Human
acaccaucuuuuauucuu

SEQ ID NO: 3191398 - RNA, 21 nt, Human
acaccaucuuuuauucuuuuu

SEQ ID NO: 3191399 - RNA, 14 nt, Human
acacacacauacac

SEQ ID NO: 3191400 - RNA, 13 nt, Human
acacacaaagcag

SEQ ID NO: 3191401 - RNA, 15 nt, Human
acacaauuagauuuc

SEQ ID NO: 3191402 - RNA, 17 nt, Human
acacaauuggaagucua

SEQ ID NO: 3191403 - RNA, 19 nt, Human
acaaugugaaaagaaaaau

SEQ ID NO: 3191404 - RNA, 17 nt, Human
acaaugugaaaagaaaa

SEQ ID NO: 3191405 - RNA, 15 nt, Human
acacacucaaaucaa

SEQ ID NO: 3191406 - RNA, 13 nt, Human
acacacgcugccu

SEQ ID NO: 3191407 - RNA, 14 nt, Human
acacacgcugccuu

SEQ ID NO: 3191408 - RNA, 21 nt, Human
acacacgcgugcacacaccag

SEQ ID NO: 3191409 - RNA, 20 nt, Human
acacaccagagcccaccuug

SEQ ID NO: 3191410 - RNA, 15 nt, Human
acacaccagagccca

SEQ ID NO: 3191411 - RNA, 14 nt, Human
acacaccagagccc

SEQ ID NO: 3191412 - RNA, 14 nt, Human
acacacagcucugu

SEQ ID NO: 3191413 - RNA, 13 nt, Human
acacacagcucug

SEQ ID NO: 3191414 - RNA, 17 nt, Human
acacacagcucuguccu

SEQ ID NO: 3191415 - RNA, 17 nt, Human
uagugaagacuccagaa

SEQ ID NO: 3191416 - RNA, 18 nt, Human
uagugaagacuccagaaa

SEQ ID NO: 3191417 - RNA, 22 nt, Human
uaguacuagagauauuuuguaa

SEQ ID NO: 3191418 - RNA, 23 nt, Human
uaguacuagagauauuuuguaaa

SEQ ID NO: 3191419 - RNA, 14 nt, Human
uaguuaaucuauaa

SEQ ID NO: 3191420 - RNA, 13 nt, Human
uaguuaaagaaag

SEQ ID NO: 3191421 - RNA, 17 nt, Human
uaguuaaagaaaggaaa

SEQ ID NO: 3191422 - RNA, 18 nt, Human
uaguuaaagaaaggaaaa

SEQ ID NO: 3191423 - RNA, 21 nt, Human
uaguuaaagaaaggaaaagaa

SEQ ID NO: 3191424 - RNA, 16 nt, Human
acacaguauuacuucu

SEQ ID NO: 3191425 - RNA, 18 nt, Human
acacaguauuacuucugc

SEQ ID NO: 3191426 - RNA, 19 nt, Human
acacaguauuacuucugcu

SEQ ID NO: 3191427 - RNA, 13 nt, Human
acacagugagucg

SEQ ID NO: 3191428 - RNA, 12 nt, Human
acacauaaauau

SEQ ID NO: 3191429 - RNA, 15 nt, Human
acacauaauuaacac

SEQ ID NO: 3191430 - RNA, 16 nt, Human
uaguaaauguaguuca

SEQ ID NO: 3191431 - RNA, 17 nt, Human
uaggcaagauggcacag

SEQ ID NO: 3191432 - RNA, 16 nt, Human
uaggagggaaaccuuu

SEQ ID NO: 3191433 - RNA, 17 nt, Human
uaggcaaguuuucccug

SEQ ID NO: 3191434 - RNA, 19 nt, Human
uaggcaagauggcacaggg

SEQ ID NO: 3191435 - RNA, 16 nt, Human
uaggcauuugcugaau

SEQ ID NO: 3191436 - RNA, 20 nt, Human
uaggcauuugcugaauacag

SEQ ID NO: 3191437 - RNA, 14 nt, Human
uaggcauuguggga

SEQ ID NO: 3191438 - RNA, 15 nt, Human
uagggagagaagaua

SEQ ID NO: 3191439 - RNA, 14 nt, Human
uagggagagaagau

SEQ ID NO: 3191440 - RNA, 15 nt, Human
uagggaccagaacca

SEQ ID NO: 3191441 - RNA, 16 nt, Human
uaggcagccugagagu

SEQ ID NO: 3191442 - RNA, 12 nt, Human
uaggcauuugua

SEQ ID NO: 3191443 - RNA, 13 nt, Human
uaggcauuuguaa

SEQ ID NO: 3191444 - RNA, 14 nt, Human
uaggcauuuguaaa

SEQ ID NO: 3191445 - RNA, 21 nt, Human
uaggcauuuguaaauauuaaa

SEQ ID NO: 3191446 - RNA, 14 nt, Human
uagggaccagaacc

SEQ ID NO: 3191447 - RNA, 16 nt, Human
uaggaaauccagggug

SEQ ID NO: 3191448 - RNA, 12 nt, Human
uagcuuaagaaa

SEQ ID NO: 3191449 - RNA, 15 nt, Human
uagcuuaagaaaaaa

SEQ ID NO: 3191450 - RNA, 14 nt, Human
uagcuuaagaaaaa

SEQ ID NO: 3191451 - RNA, 11 nt, Human
uagcuguguua

SEQ ID NO: 3191452 - RNA, 13 nt, Human
uaggagacuugua

SEQ ID NO: 3191453 - RNA, 17 nt, Human
uaggacuuguuuuuguu

SEQ ID NO: 3191454 - RNA, 19 nt, Human
uagcuaauaacaugugaaa

SEQ ID NO: 3191455 - RNA, 13 nt, Human
acaaucauguaca

SEQ ID NO: 3191456 - RNA, 18 nt, Human
acaaucagcugcuuuguu

SEQ ID NO: 3191457 - RNA, 19 nt, Human
acaaucagcugcuuuguua

SEQ ID NO: 3191458 - RNA, 17 nt, Human
acaaucaguuauacagu

SEQ ID NO: 3191459 - RNA, 22 nt, Human
acaaggacagccccuccuccau

SEQ ID NO: 3191460 - RNA, 21 nt, Human
acaaggacagccccuccucca

SEQ ID NO: 3191461 - RNA, 18 nt, Human
acaaggacuaggguccug

SEQ ID NO: 3191462 - RNA, 19 nt, Human
acaaggacuaggguccugg

SEQ ID NO: 3191463 - RNA, 19 nt, Human
aauugccuuucuguguuua

SEQ ID NO: 3191464 - RNA, 16 nt, Human
aauuguuacuccauau

SEQ ID NO: 3191465 - RNA, 22 nt, Human
acaaaggaugcccaaagaugca

SEQ ID NO: 3191466 - RNA, 20 nt, Human
acaaaggcuguauucagcaa

SEQ ID NO: 3191467 - RNA, 19 nt, Human
acaaaggcuguauucagca

SEQ ID NO: 3191468 - RNA, 16 nt, Human
acaaaggcuguauuca

SEQ ID NO: 3191469 - RNA, 21 nt, Human
acaaaagcugaacacauuucu

SEQ ID NO: 3191470 - RNA, 21 nt, Human
acaaaagcauucggagggagg

SEQ ID NO: 3191471 - RNA, 22 nt, Human
acaaaagcugaacacauuucuu

SEQ ID NO: 3191472 - RNA, 19 nt, Human
uagaggagaaacuggaacu

SEQ ID NO: 3191473 - RNA, 16 nt, Human
uagagauauuuuguaa

SEQ ID NO: 3191474 - RNA, 21 nt, Human
uagagauauuuuguaaaaugu

SEQ ID NO: 3191475 - RNA, 22 nt, Human
uagagauauuuuguaaaaugua

SEQ ID NO: 3191476 - RNA, 13 nt, Human
uagagaugagcuu

SEQ ID NO: 3191477 - RNA, 16 nt, Human
uagagaugagcuuucu

SEQ ID NO: 3191478 - RNA, 21 nt, Human
uagagaugagcuuucuuuuua

SEQ ID NO: 3191479 - RNA, 22 nt, Human
uagaggagaaacuggaacucuc

SEQ ID NO: 3191480 - RNA, 23 nt, Human
uagaggcaguucgaccagccagg

SEQ ID NO: 3191481 - RNA, 15 nt, Human
uagauauaugcucug

SEQ ID NO: 3191482 - RNA, 20 nt, Human
uagaggcaugggcuugcugu

SEQ ID NO: 3191483 - RNA, 19 nt, Human
uagauauagagucauugua

SEQ ID NO: 3191484 - RNA, 16 nt, Human
uagauauagagucauu

SEQ ID NO: 3191485 - RNA, 19 nt, Human
uagauauaugcucugcaug

SEQ ID NO: 3191486 - RNA, 19 nt, Human
uagcauggcugccaauggg

SEQ ID NO: 3191487 - RNA, 18 nt, Human
uagaugauuuuuugaaag

SEQ ID NO: 3191488 - RNA, 19 nt, Human
uagaugauuuuuugaaagu

SEQ ID NO: 3191489 - RNA, 22 nt, Human
uagaugauuuuuugaaaguuaa

SEQ ID NO: 3191490 - RNA, 14 nt, Human
uagaugcugacugu

SEQ ID NO: 3191491 - RNA, 23 nt, Human
uagaugcugacuguacuccuccc

SEQ ID NO: 3191492 - RNA, 21 nt, Human
uagccaaggccaaaggaagca

SEQ ID NO: 3191493 - RNA, 22 nt, Human
uagcauuuugcuaaaugugaau

SEQ ID NO: 3191494 - RNA, 14 nt, Human
uagccaaggccaaa

SEQ ID NO: 3191495 - RNA, 15 nt, Human
uagcauuuuggcgcu

SEQ ID NO: 3191496 - RNA, 16 nt, Human
uagcauuuugcuaaau

SEQ ID NO: 3191497 - RNA, 20 nt, Human
acaagacccaaaaggcagaa

SEQ ID NO: 3191498 - RNA, 19 nt, Human
acaagacccuugugguccc

SEQ ID NO: 3191499 - RNA, 23 nt, Human
acaacagauuggauuuuauguug

SEQ ID NO: 3191500 - RNA, 22 nt, Human
acaacagauuggauuuuauguu

SEQ ID NO: 3191501 - RNA, 20 nt, Human
acaacagauuggauuuuaug

SEQ ID NO: 3191502 - RNA, 18 nt, Human
acaacagauuggauuuua

SEQ ID NO: 3191503 - RNA, 13 nt, Human
acaacagauugga

SEQ ID NO: 3191504 - RNA, 22 nt, Human
acaacagagacugaaauguguu

SEQ ID NO: 3191505 - RNA, 23 nt, Human
acaacacucauugaccugaggcc

SEQ ID NO: 3191506 - RNA, 21 nt, Human
acaacacucauugaccugagg

SEQ ID NO: 3191507 - RNA, 15 nt, Human
acaacacuuuaaugg

SEQ ID NO: 3191508 - RNA, 16 nt, Human
acaaauuuuucugugg

SEQ ID NO: 3191509 - RNA, 14 nt, Human
acaaauuuuucugu

SEQ ID NO: 3191510 - RNA, 18 nt, Human
acaaauuuacagagacag

SEQ ID NO: 3191511 - RNA, 19 nt, Human
acaaauuuacagagacaga

SEQ ID NO: 3191512 - RNA, 20 nt, Human
acaaauuucucuguuccaua

SEQ ID NO: 3191513 - RNA, 11 nt, Human
uagccagagga

SEQ ID NO: 3191514 - RNA, 15 nt, Human
uagccagaggagaga

SEQ ID NO: 3191515 - RNA, 22 nt, Human
acaggcauguucucugaggaca

SEQ ID NO: 3191516 - RNA, 21 nt, Human
acaggccacccugugcagaag

SEQ ID NO: 3191517 - RNA, 19 nt, Human
acaggccacccugugcaga

SEQ ID NO: 3191518 - RNA, 16 nt, Human
acaggccacccugugc

SEQ ID NO: 3191519 - RNA, 20 nt, Human
acaggcauguucucugagga

SEQ ID NO: 3191520 - RNA, 19 nt, Human
acaggcauguucucugagg

SEQ ID NO: 3191521 - RNA, 18 nt, Human
acaggcauguucucugag

SEQ ID NO: 3191522 - RNA, 15 nt, Human
acaggcauguucucu

SEQ ID NO: 3191523 - RNA, 14 nt, Human
uaugugaaaggaua

SEQ ID NO: 3191524 - RNA, 22 nt, Human
uaugugaaaggauaugaaucug

SEQ ID NO: 3191525 - RNA, 18 nt, Human
uaugugaguauucucauu

SEQ ID NO: 3191526 - RNA, 17 nt, Human
uaugugaguauucucau

SEQ ID NO: 3191527 - RNA, 14 nt, Human
uaugugaguauucu

SEQ ID NO: 3191528 - RNA, 12 nt, Human
uauguggaagug

SEQ ID NO: 3191529 - RNA, 16 nt, Human
uauguggaaguguggg

SEQ ID NO: 3191530 - RNA, 20 nt, Human
uauguggaguucaucuugaa

SEQ ID NO: 3191531 - RNA, 12 nt, Human
uauguguaugug

SEQ ID NO: 3191532 - RNA, 16 nt, Human
uauguguccauuuccu

SEQ ID NO: 3191533 - RNA, 22 nt, Human
uauguguccauuuccuuaugcu

SEQ ID NO: 3191534 - RNA, 11 nt, Human
uauguuuuuca

SEQ ID NO: 3191535 - RNA, 16 nt, Human
uauguuuuucaguuca

SEQ ID NO: 3191536 - RNA, 15 nt, Human
uauguuuuucaguuc

SEQ ID NO: 3191537 - RNA, 14 nt, Human
uauguuuuucaguu

SEQ ID NO: 3191538 - RNA, 13 nt, Human
uauguuuuucagu

SEQ ID NO: 3191539 - RNA, 12 nt, Human
uauguuuugguc

SEQ ID NO: 3191540 - RNA, 16 nt, Human
uauuaaaacucauuuu

SEQ ID NO: 3191541 - RNA, 17 nt, Human
uauuaaaagaaaggguu

SEQ ID NO: 3191542 - RNA, 22 nt, Human
uauuaaaaagucuuuuaaaaag

SEQ ID NO: 3191543 - RNA, 15 nt, Human
uauuaaaaaagucua

SEQ ID NO: 3191544 - RNA, 13 nt, Human
uauuaaaaagucu

SEQ ID NO: 3191545 - RNA, 12 nt, Human
uauuaaaaaguc

SEQ ID NO: 3191546 - RNA, 19 nt, Human
uauuaaaaagucuuuuaaa

SEQ ID NO: 3191547 - RNA, 17 nt, Human
uauuaaaaagucuuuua

SEQ ID NO: 3191548 - RNA, 15 nt, Human
uauuaaaaagucuuu

SEQ ID NO: 3191549 - RNA, 14 nt, Human
uauuaaaaagucuu

SEQ ID NO: 3191550 - RNA, 20 nt, Human
uauguuuuucaguucaaagu

SEQ ID NO: 3191551 - RNA, 19 nt, Human
uauguuuuucaguucaaag

SEQ ID NO: 3191552 - RNA, 18 nt, Human
uauguuuuucaguucaaa

SEQ ID NO: 3191553 - RNA, 16 nt, Human
uauguuuuugaaggca

SEQ ID NO: 3191554 - RNA, 14 nt, Human
uauguuuuugaagg

SEQ ID NO: 3191555 - RNA, 15 nt, Human
uauuaaaaaacuuca

SEQ ID NO: 3191556 - RNA, 18 nt, Human
uauuaaaaaacuucaugu

SEQ ID NO: 3191557 - RNA, 23 nt, Human
uaugugcuauuaauauuuguuua

SEQ ID NO: 3191558 - RNA, 21 nt, Human
acagcggcuggacuuggaggu

SEQ ID NO: 3191559 - RNA, 11 nt, Human
acagccuggca

SEQ ID NO: 3191560 - RNA, 22 nt, Human
acagcggcuggacuuggaggua

SEQ ID NO: 3191561 - RNA, 13 nt, Human
acagcuaacaugg

SEQ ID NO: 3191562 - RNA, 16 nt, Human
acagcguuaugugucu

SEQ ID NO: 3191563 - RNA, 16 nt, Human
acagcuuguuuuggac

SEQ ID NO: 3191564 - RNA, 19 nt, Human
acagcuuguuuuggacuuu

SEQ ID NO: 3191565 - RNA, 22 nt, Human
acagcuuguuuuggacuuuguu

SEQ ID NO: 3191566 - RNA, 23 nt, Human
acagcuuguuuuggacuuuguua

SEQ ID NO: 3191567 - RNA, 17 nt, Human
acaggaaguagaggagg

SEQ ID NO: 3191568 - RNA, 13 nt, Human
acaggaaguacug

SEQ ID NO: 3191569 - RNA, 21 nt, Human
acaggaaaagcaugucuuauu

SEQ ID NO: 3191570 - RNA, 19 nt, Human
acaggaaaagcaugucuua

SEQ ID NO: 3191571 - RNA, 17 nt, Human
acaggaaaagcugcuga

SEQ ID NO: 3191572 - RNA, 16 nt, Human
acaggaaaagcugcug

SEQ ID NO: 3191573 - RNA, 15 nt, Human
acaggaaaagcugcu

SEQ ID NO: 3191574 - RNA, 20 nt, Human
acaggaccccugcaguuccc

SEQ ID NO: 3191575 - RNA, 16 nt, Human
acaggaccccugcagu

SEQ ID NO: 3191576 - RNA, 15 nt, Human
acaggaccccugcag

SEQ ID NO: 3191577 - RNA, 14 nt, Human
acaggacucugccu

SEQ ID NO: 3191578 - RNA, 23 nt, Human
acaggaccagggauuuccaugau

SEQ ID NO: 3191579 - RNA, 18 nt, Human
acaggacagggguuccuu

SEQ ID NO: 3191580 - RNA, 13 nt, Human
acaggcaggucca

SEQ ID NO: 3191581 - RNA, 14 nt, Human
acaggaucagucug

SEQ ID NO: 3191582 - RNA, 16 nt, Human
acaggagugagcacua

SEQ ID NO: 3191583 - RNA, 17 nt, Human
acaggagguuggaggga

SEQ ID NO: 3191584 - RNA, 15 nt, Human
acaggagguuggagg

SEQ ID NO: 3191585 - RNA, 16 nt, Human
acaggcagguccaggg

SEQ ID NO: 3191586 - RNA, 14 nt, Human
acaggcagguccag

SEQ ID NO: 3191587 - RNA, 14 nt, Human
acaggcauguucuc

SEQ ID NO: 3191588 - RNA, 21 nt, Human
uauucagcuugcacauuuggu

SEQ ID NO: 3191589 - RNA, 17 nt, Human
uauucaauuaaagaaau

SEQ ID NO: 3191590 - RNA, 15 nt, Human
uauucaccuucaguu

SEQ ID NO: 3191591 - RNA, 14 nt, Human
uauucaggaagcuc

SEQ ID NO: 3191592 - RNA, 20 nt, Human
uauucaguaauaacucuacc

SEQ ID NO: 3191593 - RNA, 12 nt, Human
acaggcuccugc

SEQ ID NO: 3191594 - RNA, 22 nt, Human
acaggcgugagccaccgugccu

SEQ ID NO: 3191595 - RNA, 23 nt, Human
uauucaaacagucucaggaaauc

SEQ ID NO: 3191596 - RNA, 14 nt, Human
uauucaaacugaaa

SEQ ID NO: 3191597 - RNA, 16 nt, Human
uauucaaagagaaaac

SEQ ID NO: 3191598 - RNA, 15 nt, Human
uauucaaacagucuc

SEQ ID NO: 3191599 - RNA, 19 nt, Human
uauuagugaccucagcuuu

SEQ ID NO: 3191600 - RNA, 19 nt, Human
uauuagaaaacuuuguuag

SEQ ID NO: 3191601 - RNA, 18 nt, Human
uauuagaaaacuuuguua

SEQ ID NO: 3191602 - RNA, 17 nt, Human
uauuagaaaacuuuguu

SEQ ID NO: 3191603 - RNA, 14 nt, Human
uauuacuuuaacau

SEQ ID NO: 3191604 - RNA, 15 nt, Human
uauuacuuuaacaug

SEQ ID NO: 3191605 - RNA, 17 nt, Human
uauuacuuuaacaugcc

SEQ ID NO: 3191606 - RNA, 16 nt, Human
uauuagaaaacuuugu

SEQ ID NO: 3191607 - RNA, 14 nt, Human
uauuagaaaacuuu

SEQ ID NO: 3191608 - RNA, 14 nt, Human
uauuacuaaauuga

SEQ ID NO: 3191609 - RNA, 17 nt, Human
uauuacuaaauugaccu

SEQ ID NO: 3191610 - RNA, 16 nt, Human
uauuaaaauuguuguc

SEQ ID NO: 3191611 - RNA, 15 nt, Human
uauuaaaauuguugu

SEQ ID NO: 3191612 - RNA, 10 nt, Human
uauuaaaauu

SEQ ID NO: 3191613 - RNA, 14 nt, Human
uauuaaaauuccaa

SEQ ID NO: 3191614 - RNA, 15 nt, Human
uauuaaaauuccaaa

SEQ ID NO: 3191615 - RNA, 19 nt, Human
uauuaaaauuccaaauuca

SEQ ID NO: 3191616 - RNA, 11 nt, Human
uauuaaaauug

SEQ ID NO: 3191617 - RNA, 14 nt, Human
uauuacuucugcua

SEQ ID NO: 3191618 - RNA, 13 nt, Human
uauuacuucugcu

SEQ ID NO: 3191619 - RNA, 22 nt, Human
uauuacuagacugccacaagga

SEQ ID NO: 3191620 - RNA, 13 nt, Human
acagucacaaauu

SEQ ID NO: 3191621 - RNA, 12 nt, Human
acagggcacacc

SEQ ID NO: 3191622 - RNA, 16 nt, Human
acagggauugauuuua

SEQ ID NO: 3191623 - RNA, 22 nt, Human
acagggauugauuuuaaaaugu

SEQ ID NO: 3191624 - RNA, 13 nt, Human
acaguaaucaguu

SEQ ID NO: 3191625 - RNA, 16 nt, Human
acaguaaugucauaaa

SEQ ID NO: 3191626 - RNA, 20 nt, Human
acaguacccugguugugugu

SEQ ID NO: 3191627 - RNA, 14 nt, Human
acaguacuuugaau

SEQ ID NO: 3191628 - RNA, 19 nt, Human
acaguacccugguugugug

SEQ ID NO: 3191629 - RNA, 22 nt, Human
acaguaccccucuagcuuuguu

SEQ ID NO: 3191630 - RNA, 20 nt, Human
acagggaggacgcucucugg

SEQ ID NO: 3191631 - RNA, 21 nt, Human
acagggaggacgcucucuggc

SEQ ID NO: 3191632 - RNA, 22 nt, Human
acaggcugagugcaggcccacc

SEQ ID NO: 3191633 - RNA, 21 nt, Human
acaggcugagugcaggcccac

SEQ ID NO: 3191634 - RNA, 20 nt, Human
acaggcugagugcaggccca

SEQ ID NO: 3191635 - RNA, 19 nt, Human
acaggcugagugcaggccc

SEQ ID NO: 3191636 - RNA, 18 nt, Human
acaggcugagugcaggcc

SEQ ID NO: 3191637 - RNA, 17 nt, Human
acaggcugagugcaggc

SEQ ID NO: 3191638 - RNA, 16 nt, Human
acaggcugagugcagg

SEQ ID NO: 3191639 - RNA, 15 nt, Human
acaggcugagugcag

SEQ ID NO: 3191640 - RNA, 13 nt, Human
acaggcuccugcc

SEQ ID NO: 3191641 - RNA, 15 nt, Human
acaggcuccugccac

SEQ ID NO: 3191642 - RNA, 21 nt, Human
acaggcuccugccaccacgcc

SEQ ID NO: 3191643 - RNA, 22 nt, Human
acaggcuccugccaccacgccc

SEQ ID NO: 3191644 - RNA, 22 nt, Human
acaggcugggcuucaguggcag

SEQ ID NO: 3191645 - RNA, 21 nt, Human
acaggcugggcuucaguggca

SEQ ID NO: 3191646 - RNA, 23 nt, Human
acaggcugggcuucaguggcagc

SEQ ID NO: 3191647 - RNA, 23 nt, Human
acaggcugagugcaggcccaccc

SEQ ID NO: 3191648 - RNA, 20 nt, Human
uauggggauagaugugugga

SEQ ID NO: 3191649 - RNA, 14 nt, Human
uaugguaaucauau

SEQ ID NO: 3191650 - RNA, 19 nt, Human
acagcggcuggacuuggag

SEQ ID NO: 3191651 - RNA, 14 nt, Human
uaugguagaaaaau

SEQ ID NO: 3191652 - RNA, 16 nt, Human
uaugguaaucauauua

SEQ ID NO: 3191653 - RNA, 18 nt, Human
uaugguaaucauauuaga

SEQ ID NO: 3191654 - RNA, 16 nt, Human
uaugcuguaaaagcaa

SEQ ID NO: 3191655 - RNA, 22 nt, Human
uaugcuggaagucucaaauaau

SEQ ID NO: 3191656 - RNA, 15 nt, Human
uaugcuuauacacuu

SEQ ID NO: 3191657 - RNA, 14 nt, Human
uaugcuguaucugu

SEQ ID NO: 3191658 - RNA, 15 nt, Human
uaugcuguaucugug

SEQ ID NO: 3191659 - RNA, 17 nt, Human
uaugaacauacaaaugc

SEQ ID NO: 3191660 - RNA, 14 nt, Human
uaugaacuuaacau

SEQ ID NO: 3191661 - RNA, 15 nt, Human
uaugaacuuaacaug

SEQ ID NO: 3191662 - RNA, 17 nt, Human
uaugaacuuaacaugcu

SEQ ID NO: 3191663 - RNA, 19 nt, Human
uaugaacuuaacaugcugu

SEQ ID NO: 3191664 - RNA, 23 nt, Human
uaugaacuuaacaugcuguguaa

SEQ ID NO: 3191665 - RNA, 23 nt, Human
uaugauuaaaaauaucaaauuaa

SEQ ID NO: 3191666 - RNA, 17 nt, Human
uaugcauuauuaaauug

SEQ ID NO: 3191667 - RNA, 12 nt, Human
uaugcauucaca

SEQ ID NO: 3191668 - RNA, 19 nt, Human
uaugcauucacauuuagaa

SEQ ID NO: 3191669 - RNA, 22 nt, Human
uaugcauucacauuuagaaaag

SEQ ID NO: 3191670 - RNA, 23 nt, Human
uaugcauucacauuuagaaaagu

SEQ ID NO: 3191671 - RNA, 18 nt, Human
uaugaacucaucauuuuu

SEQ ID NO: 3191672 - RNA, 14 nt, Human
uaugccuuguauaa

SEQ ID NO: 3191673 - RNA, 16 nt, Human
uaugcuaagaauuuuu

SEQ ID NO: 3191674 - RNA, 14 nt, Human
uaugcuaagaauuu

SEQ ID NO: 3191675 - RNA, 17 nt, Human
uaugccugggcagaagg

SEQ ID NO: 3191676 - RNA, 16 nt, Human
uaugccugcucuuugg

SEQ ID NO: 3191677 - RNA, 14 nt, Human
uaugccugcucuuu

SEQ ID NO: 3191678 - RNA, 23 nt, Human
acagauuggauuuuauguugaca

SEQ ID NO: 3191679 - RNA, 22 nt, Human
acagauuggauuuuauguugac

SEQ ID NO: 3191680 - RNA, 21 nt, Human
acagauuggauuuuauguuga

SEQ ID NO: 3191681 - RNA, 13 nt, Human
acagauuggauuu

SEQ ID NO: 3191682 - RNA, 17 nt, Human
acagauuggauuuuaug

SEQ ID NO: 3191683 - RNA, 15 nt, Human
acagauuggauuuua

SEQ ID NO: 3191684 - RNA, 14 nt, Human
acagauuugagcuc

SEQ ID NO: 3191685 - RNA, 18 nt, Human
acagaugaccccugccca

SEQ ID NO: 3191686 - RNA, 18 nt, Human
acagagcccacgccccca

SEQ ID NO: 3191687 - RNA, 19 nt, Human
acagagcccacgcccccac

SEQ ID NO: 3191688 - RNA, 15 nt, Human
acagagcccacgccc

SEQ ID NO: 3191689 - RNA, 14 nt, Human
acagagcccacgcc

SEQ ID NO: 3191690 - RNA, 18 nt, Human
acagagacaaguaauuuc

SEQ ID NO: 3191691 - RNA, 17 nt, Human
acagauccccaagccug

SEQ ID NO: 3191692 - RNA, 22 nt, Human
acagaucucugcuuuggaaauc

SEQ ID NO: 3191693 - RNA, 18 nt, Human
acagauccccaagccugg

SEQ ID NO: 3191694 - RNA, 20 nt, Human
uaugaaauuuuuuuucaugc

SEQ ID NO: 3191695 - RNA, 14 nt, Human
uaugaacagacuuu

SEQ ID NO: 3191696 - RNA, 18 nt, Human
acagccguuuguucccca

SEQ ID NO: 3191697 - RNA, 15 nt, Human
acagccgcuccagag

SEQ ID NO: 3191698 - RNA, 14 nt, Human
acagccgcuccaga

SEQ ID NO: 3191699 - RNA, 13 nt, Human
acagccgcuccag

SEQ ID NO: 3191700 - RNA, 18 nt, Human
acagcccgggcucugccu

SEQ ID NO: 3191701 - RNA, 19 nt, Human
acagcccgggcucugccuc

SEQ ID NO: 3191702 - RNA, 17 nt, Human
acagcccgggcucugcc

SEQ ID NO: 3191703 - RNA, 16 nt, Human
acagcccgggcucugc

SEQ ID NO: 3191704 - RNA, 14 nt, Human
uauauuuaaaaaca

SEQ ID NO: 3191705 - RNA, 15 nt, Human
uauauuguugaagag

SEQ ID NO: 3191706 - RNA, 22 nt, Human
uauauuguaagaaauacuguac

SEQ ID NO: 3191707 - RNA, 20 nt, Human
uauauuguaagaaauacugu

SEQ ID NO: 3191708 - RNA, 23 nt, Human
uauauugguuuuaugaugacgua

SEQ ID NO: 3191709 - RNA, 12 nt, Human
uauauuguaaga

SEQ ID NO: 3191710 - RNA, 19 nt, Human
uauauuguaagaaauacug

SEQ ID NO: 3191711 - RNA, 15 nt, Human
uauauuguaagaaau

SEQ ID NO: 3191712 - RNA, 13 nt, Human
acagacccugccc

SEQ ID NO: 3191713 - RNA, 14 nt, Human
acagacccugcccu

SEQ ID NO: 3191714 - RNA, 15 nt, Human
acagacccugcccug

SEQ ID NO: 3191715 - RNA, 21 nt, Human
uauauuaaaauuccaaauuca

SEQ ID NO: 3191716 - RNA, 22 nt, Human
uauauuaaaauuccaaauucau

SEQ ID NO: 3191717 - RNA, 13 nt, Human
uauauuaaacaaa

SEQ ID NO: 3191718 - RNA, 22 nt, Human
uauauuaaacaaaguuucagag

SEQ ID NO: 3191719 - RNA, 21 nt, Human
acagaaauugguaccuugcac

SEQ ID NO: 3191720 - RNA, 19 nt, Human
uauauugguuuuaugauga

SEQ ID NO: 3191721 - RNA, 22 nt, Human
uauauuagaucaaauaguugca

SEQ ID NO: 3191722 - RNA, 13 nt, Human
uauauuauaauag

SEQ ID NO: 3191723 - RNA, 23 nt, Human
uauacaacaccaaaaaauaucua

SEQ ID NO: 3191724 - RNA, 21 nt, Human
uauacaacaccaaaaaauauc

SEQ ID NO: 3191725 - RNA, 18 nt, Human
uauacaacaccaaaaaau

SEQ ID NO: 3191726 - RNA, 13 nt, Human
uauacaacaccaa

SEQ ID NO: 3191727 - RNA, 13 nt, Human
uauacaaaacuuu

SEQ ID NO: 3191728 - RNA, 15 nt, Human
uauacaaaacuuuau

SEQ ID NO: 3191729 - RNA, 17 nt, Human
uauacaaaacuuuauca

SEQ ID NO: 3191730 - RNA, 20 nt, Human
acagaaaauggaagacagcu

SEQ ID NO: 3191731 - RNA, 17 nt, Human
acagaaaauucuucucc

SEQ ID NO: 3191732 - RNA, 20 nt, Human
acagaaauugguaccuugca

SEQ ID NO: 3191733 - RNA, 12 nt, Human
acagaaauuggu

SEQ ID NO: 3191734 - RNA, 15 nt, Human
acagaaaauauguau

SEQ ID NO: 3191735 - RNA, 14 nt, Human
acagaaaauaugua

SEQ ID NO: 3191736 - RNA, 13 nt, Human
acagaaaauaugu

SEQ ID NO: 3191737 - RNA, 12 nt, Human
acagaaaauaug

SEQ ID NO: 3191738 - RNA, 18 nt, Human
uaucauuuuuuccuguuu

SEQ ID NO: 3191739 - RNA, 16 nt, Human
uaucauuuuuuccugu

SEQ ID NO: 3191740 - RNA, 15 nt, Human
uaucauuuuuuccug

SEQ ID NO: 3191741 - RNA, 15 nt, Human
uaucauuucuuaacc

SEQ ID NO: 3191742 - RNA, 17 nt, Human
uaucauuucuuaaccca

SEQ ID NO: 3191743 - RNA, 22 nt, Human
uaucaagccuagauguuuuaua

SEQ ID NO: 3191744 - RNA, 20 nt, Human
uaucaaauuaauugugugaa

SEQ ID NO: 3191745 - RNA, 21 nt, Human
uaucaaauuaauugugugaac

SEQ ID NO: 3191746 - RNA, 19 nt, Human
uaucaaauuaauuguguga

SEQ ID NO: 3191747 - RNA, 22 nt, Human
uauccauagugacuuuucaagu

SEQ ID NO: 3191748 - RNA, 19 nt, Human
uauccauagugacuuuuca

SEQ ID NO: 3191749 - RNA, 18 nt, Human
uauccacgagagcgcagc

SEQ ID NO: 3191750 - RNA, 17 nt, Human
uauccacgagagcgcag

SEQ ID NO: 3191751 - RNA, 13 nt, Human
uauccacuugucc

SEQ ID NO: 3191752 - RNA, 21 nt, Human
uauccagaauggaauuuugcu

SEQ ID NO: 3191753 - RNA, 15 nt, Human
uauccagaauggaau

SEQ ID NO: 3191754 - RNA, 14 nt, Human
uaucucccccagcc

SEQ ID NO: 3191755 - RNA, 13 nt, Human
uaucucccccagc

SEQ ID NO: 3191756 - RNA, 22 nt, Human
uaucuccaugaugauaguugaa

SEQ ID NO: 3191757 - RNA, 15 nt, Human
uaucucagggccugg

SEQ ID NO: 3191758 - RNA, 18 nt, Human
acagagaaaguacuucuc

SEQ ID NO: 3191759 - RNA, 11 nt, Human
acagagaaagu

SEQ ID NO: 3191760 - RNA, 14 nt, Human
acagagaaagaaau

SEQ ID NO: 3191761 - RNA, 12 nt, Human
aagcaaaaggca

SEQ ID NO: 3191762 - RNA, 13 nt, Human
guguauguggggg

SEQ ID NO: 3191763 - RNA, 21 nt, Human
guguaugugggggucugugug

SEQ ID NO: 3191764 - RNA, 17 nt, Human
aagcaacccaaauguuc

SEQ ID NO: 3191765 - RNA, 12 nt, Human
aagcaacaauuu

SEQ ID NO: 3191766 - RNA, 17 nt, Human
aagcaaauugcuuuuuu

SEQ ID NO: 3191767 - RNA, 20 nt, Human
aagcaacaauuuucagauuu

SEQ ID NO: 3191768 - RNA, 18 nt, Human
aagcaacaauuuucagau

SEQ ID NO: 3191769 - RNA, 17 nt, Human
aagcaacaauuuucaga

SEQ ID NO: 3191770 - RNA, 13 nt, Human
aagcaacaauuuu

SEQ ID NO: 3191771 - RNA, 14 nt, Human
aagcaacaucagcu

SEQ ID NO: 3191772 - RNA, 22 nt, Human
aagcaacaauuuucagauuugc

SEQ ID NO: 3191773 - RNA, 15 nt, Human
aagcaaccaaaaaga

SEQ ID NO: 3191774 - RNA, 16 nt, Human
aagauggcugugccuc

SEQ ID NO: 3191775 - RNA, 20 nt, Human
aagaucaaaagguuaauaaa

SEQ ID NO: 3191776 - RNA, 23 nt, Human
aagaucaaaagguuaauaaagua

SEQ ID NO: 3191777 - RNA, 21 nt, Human
aagaucaaaaaggcuuauaaa

SEQ ID NO: 3191778 - RNA, 23 nt, Human
aagaucaaaaaggcuuauaaaac

SEQ ID NO: 3191779 - RNA, 22 nt, Human
gugucuuaauuaaaagaauauu

SEQ ID NO: 3191780 - RNA, 19 nt, Human
gugucagguggggcagcuu

SEQ ID NO: 3191781 - RNA, 23 nt, Human
gugugaaccaccacacccagccc

SEQ ID NO: 3191782 - RNA, 13 nt, Human
gugugaaauauau

SEQ ID NO: 3191783 - RNA, 15 nt, Human
gugugaacuuggaag

SEQ ID NO: 3191784 - RNA, 17 nt, Human
gugugaacuuggaagca

SEQ ID NO: 3191785 - RNA, 14 nt, Human
gugucaccugaaga

SEQ ID NO: 3191786 - RNA, 17 nt, Human
gugucaaguggcaaagc

SEQ ID NO: 3191787 - RNA, 19 nt, Human
aagcaaccauauagaaagc

SEQ ID NO: 3191788 - RNA, 13 nt, Human
guguauguuuuuc

SEQ ID NO: 3191789 - RNA, 21 nt, Human
guguauguuuuucaguucaaa

SEQ ID NO: 3191790 - RNA, 16 nt, Human
guguauguuuuucagu

SEQ ID NO: 3191791 - RNA, 15 nt, Human
guguauguuuuucag

SEQ ID NO: 3191792 - RNA, 18 nt, Human
gugucagguggggcagcu

SEQ ID NO: 3191793 - RNA, 14 nt, Human
gugucagguggggc

SEQ ID NO: 3191794 - RNA, 22 nt, Human
gugucaccugaagacucauucu

SEQ ID NO: 3191795 - RNA, 16 nt, Human
gugguuuuucuuuucu

SEQ ID NO: 3191796 - RNA, 21 nt, Human
gugguucacucuuggagccug

SEQ ID NO: 3191797 - RNA, 23 nt, Human
gugguucacucuuggagccugca

SEQ ID NO: 3191798 - RNA, 22 nt, Human
gugguucacucuuggagccugc

SEQ ID NO: 3191799 - RNA, 16 nt, Human
gugguugaauaugauu

SEQ ID NO: 3191800 - RNA, 18 nt, Human
gugguugaauaugauuaa

SEQ ID NO: 3191801 - RNA, 15 nt, Human
gugcugcuaauucuu

SEQ ID NO: 3191802 - RNA, 19 nt, Human
gugcugcuaauucuuugca

SEQ ID NO: 3191803 - RNA, 18 nt, Human
gugcugcuaauucuuugc

SEQ ID NO: 3191804 - RNA, 17 nt, Human
gugcugcuaauucuuug

SEQ ID NO: 3191805 - RNA, 23 nt, Human
gugcugcccugcccaccuggccu

SEQ ID NO: 3191806 - RNA, 18 nt, Human
aagaggugugcaagagag

SEQ ID NO: 3191807 - RNA, 16 nt, Human
aagaggugugcaagag

SEQ ID NO: 3191808 - RNA, 22 nt, Human
aagagggucugaggaauccaga

SEQ ID NO: 3191809 - RNA, 14 nt, Human
aagauagcagggca

SEQ ID NO: 3191810 - RNA, 15 nt, Human
aagauagcagggcau

SEQ ID NO: 3191811 - RNA, 16 nt, Human
aagauagucuuggaag

SEQ ID NO: 3191812 - RNA, 20 nt, Human
aagauagucuuggaagcugu

SEQ ID NO: 3191813 - RNA, 18 nt, Human
guguaagaaauacagacu

SEQ ID NO: 3191814 - RNA, 11 nt, Human
aagaggcaggg

SEQ ID NO: 3191815 - RNA, 14 nt, Human
aagaggcagggucu

SEQ ID NO: 3191816 - RNA, 19 nt, Human
aagaggcaguugcccagcc

SEQ ID NO: 3191817 - RNA, 22 nt, Human
aagaggcaguugcccagccucu

SEQ ID NO: 3191818 - RNA, 21 nt, Human
aagagggagggagggcuccag

SEQ ID NO: 3191819 - RNA, 22 nt, Human
aagagggagggagggcuccaga

SEQ ID NO: 3191820 - RNA, 12 nt, Human
aagcaugaacag

SEQ ID NO: 3191821 - RNA, 20 nt, Human
aagcaugacagaaaauaugu

SEQ ID NO: 3191822 - RNA, 19 nt, Human
aagcaugacagaaaauaug

SEQ ID NO: 3191823 - RNA, 18 nt, Human
aagcaugacagaaaauau

SEQ ID NO: 3191824 - RNA, 20 nt, Human
aagcaugaacagugcaccug

SEQ ID NO: 3191825 - RNA, 15 nt, Human
aagcaugaagauaaa

SEQ ID NO: 3191826 - RNA, 19 nt, Human
aagcaugccaauuucucuu

SEQ ID NO: 3191827 - RNA, 16 nt, Human
aagcaugccaauuucu

SEQ ID NO: 3191828 - RNA, 22 nt, Human
aagcaugacagaaaauauguau

SEQ ID NO: 3191829 - RNA, 14 nt, Human
aagcauggacauuu

SEQ ID NO: 3191830 - RNA, 19 nt, Human
aagcauggacauuuagaag

SEQ ID NO: 3191831 - RNA, 18 nt, Human
aagcauuguaaaugugcu

SEQ ID NO: 3191832 - RNA, 20 nt, Human
aagcacugacuucuaaguaa

SEQ ID NO: 3191833 - RNA, 19 nt, Human
aagcacugacuucuaagua

SEQ ID NO: 3191834 - RNA, 17 nt, Human
aagcauauaaaauggca

SEQ ID NO: 3191835 - RNA, 16 nt, Human
aagcauauaaaauggc

SEQ ID NO: 3191836 - RNA, 15 nt, Human
aagcauauaaaaugg

SEQ ID NO: 3191837 - RNA, 14 nt, Human
aagcauauaaaaug

SEQ ID NO: 3191838 - RNA, 22 nt, Human
aagcauauaaaauggcaacaaa

SEQ ID NO: 3191839 - RNA, 13 nt, Human
aagcauauugacu

SEQ ID NO: 3191840 - RNA, 19 nt, Human
aagcauuguaaaugugcuu

SEQ ID NO: 3191841 - RNA, 14 nt, Human
aagcauguuuugca

SEQ ID NO: 3191842 - RNA, 13 nt, Human
aagcauguuuugc

SEQ ID NO: 3191843 - RNA, 17 nt, Human
aagcauguuuugcaugu

SEQ ID NO: 3191844 - RNA, 15 nt, Human
aagcauguuuugcau

SEQ ID NO: 3191845 - RNA, 20 nt, Human
aagcauuugguuuuucacau

SEQ ID NO: 3191846 - RNA, 13 nt, Human
aagcauuuuguaa

SEQ ID NO: 3191847 - RNA, 12 nt, Human
aagcauuuugua

SEQ ID NO: 3191848 - RNA, 18 nt, Human
aagccaaagcuaggccug

SEQ ID NO: 3191849 - RNA, 17 nt, Human
aagccaaagcuaggccu

SEQ ID NO: 3191850 - RNA, 17 nt, Human
aagcaccuccugccucg

SEQ ID NO: 3191851 - RNA, 17 nt, Human
aagcacugacuucuaag

SEQ ID NO: 3191852 - RNA, 16 nt, Human
aagcacugacuucuaa

SEQ ID NO: 3191853 - RNA, 16 nt, Human
aagcaccuccugccuc

SEQ ID NO: 3191854 - RNA, 15 nt, Human
aagcaccuccugccu

SEQ ID NO: 3191855 - RNA, 14 nt, Human
aagcaccuccugcc

SEQ ID NO: 3191856 - RNA, 13 nt, Human
aagcaccuccugc

SEQ ID NO: 3191857 - RNA, 21 nt, Human
aagcacaugccucucucaggc

SEQ ID NO: 3191858 - RNA, 22 nt, Human
aagcaccaaaauaagaaaagau

SEQ ID NO: 3191859 - RNA, 16 nt, Human
aagcaccauccccucc

SEQ ID NO: 3191860 - RNA, 15 nt, Human
aagcacccauuucaa

SEQ ID NO: 3191861 - RNA, 15 nt, Human
aagcaccauccccuc

SEQ ID NO: 3191862 - RNA, 21 nt, Human
aagcaccaaaauaagaaaaga

SEQ ID NO: 3191863 - RNA, 19 nt, Human
aagcaccaaaauaagaaaa

SEQ ID NO: 3191864 - RNA, 17 nt, Human
aagcaccaaaauaagaa

SEQ ID NO: 3191865 - RNA, 16 nt, Human
aagcaccaaaauaaga

SEQ ID NO: 3191866 - RNA, 23 nt, Human
aagcacaccaaucuuacuuugua

SEQ ID NO: 3191867 - RNA, 13 nt, Human
aagcacagucagg

SEQ ID NO: 3191868 - RNA, 14 nt, Human
aagcacaugccucu

SEQ ID NO: 3191869 - RNA, 15 nt, Human
aagcacaugccucuc

SEQ ID NO: 3191870 - RNA, 16 nt, Human
aagcacaugccucucu

SEQ ID NO: 3191871 - RNA, 19 nt, Human
aagcacaugccucucucag

SEQ ID NO: 3191872 - RNA, 20 nt, Human
aagcacaugccucucucagg

SEQ ID NO: 3191873 - RNA, 16 nt, Human
aagcacacuugacauc

SEQ ID NO: 3191874 - RNA, 18 nt, Human
aagcacaccaaucuuacu

SEQ ID NO: 3191875 - RNA, 19 nt, Human
aagcacaccaaucuuacuu

SEQ ID NO: 3191876 - RNA, 22 nt, Human
aagcacaccaaucuuacuuugu

SEQ ID NO: 3191877 - RNA, 19 nt, Human
guguuugcuccccuucccc

SEQ ID NO: 3191878 - RNA, 13 nt, Human
aagcacaaaggaa

SEQ ID NO: 3191879 - RNA, 12 nt, Human
guguuucugggg

SEQ ID NO: 3191880 - RNA, 13 nt, Human
guguuucuguccu

SEQ ID NO: 3191881 - RNA, 20 nt, Human
guguuucuguccuguaacug

SEQ ID NO: 3191882 - RNA, 21 nt, Human
guguuucuguccuguaacugu

SEQ ID NO: 3191883 - RNA, 15 nt, Human
aagccuguuguuuaa

SEQ ID NO: 3191884 - RNA, 18 nt, Human
aagccuguuguuuaagug

SEQ ID NO: 3191885 - RNA, 18 nt, Human
aagccuggucagcccaaa

SEQ ID NO: 3191886 - RNA, 17 nt, Human
aagccuggucagcccaa

SEQ ID NO: 3191887 - RNA, 15 nt, Human
aagccuccuccagcc

SEQ ID NO: 3191888 - RNA, 16 nt, Human
aagccucccacgacug

SEQ ID NO: 3191889 - RNA, 22 nt, Human
aagcuaggccuggccagaugca

SEQ ID NO: 3191890 - RNA, 15 nt, Human
aagcuagucaacagu

SEQ ID NO: 3191891 - RNA, 17 nt, Human
aagcuagucaacaguac

SEQ ID NO: 3191892 - RNA, 13 nt, Human
aagcuaguugaau

SEQ ID NO: 3191893 - RNA, 15 nt, Human
aagcuaguugaauac

SEQ ID NO: 3191894 - RNA, 17 nt, Human
aagcuaguugaauacuu

SEQ ID NO: 3191895 - RNA, 19 nt, Human
aagcuaguugaauacuuga

SEQ ID NO: 3191896 - RNA, 20 nt, Human
aagcuaguugaauacuugaa

SEQ ID NO: 3191897 - RNA, 21 nt, Human
aagcuaguugaauacuugaac

SEQ ID NO: 3191898 - RNA, 17 nt, Human
aagccuuaagcugcagg

SEQ ID NO: 3191899 - RNA, 12 nt, Human
guucagcuuggg

SEQ ID NO: 3191900 - RNA, 23 nt, Human
guucagcuuguaaauagcucagg

SEQ ID NO: 3191901 - RNA, 18 nt, Human
guucagcuccagcucacc

SEQ ID NO: 3191902 - RNA, 18 nt, Human
guuauuuugauguaaaga

SEQ ID NO: 3191903 - RNA, 22 nt, Human
guucaggguuggccccugcccg

SEQ ID NO: 3191904 - RNA, 21 nt, Human
guucaggguuggccccugccc

SEQ ID NO: 3191905 - RNA, 20 nt, Human
guucaggguuggccccugcc

SEQ ID NO: 3191906 - RNA, 23 nt, Human
guucagggaagauaaguuggaaa

SEQ ID NO: 3191907 - RNA, 19 nt, Human
guucagggaagauaaguug

SEQ ID NO: 3191908 - RNA, 18 nt, Human
guucagguaacaggcaga

SEQ ID NO: 3191909 - RNA, 17 nt, Human
guucagguaacaggcag

SEQ ID NO: 3191910 - RNA, 21 nt, Human
aagccgugauuuucauugcug

SEQ ID NO: 3191911 - RNA, 14 nt, Human
aagccguggcuucc

SEQ ID NO: 3191912 - RNA, 13 nt, Human
aagccguggcuuc

SEQ ID NO: 3191913 - RNA, 15 nt, Human
aagccguggcuuccc

SEQ ID NO: 3191914 - RNA, 17 nt, Human
guuagacugccagcucu

SEQ ID NO: 3191915 - RNA, 19 nt, Human
guuagagguucccuuugac

SEQ ID NO: 3191916 - RNA, 17 nt, Human
guuacuguaaaaugcaa

SEQ ID NO: 3191917 - RNA, 14 nt, Human
guuacuguaaaaug

SEQ ID NO: 3191918 - RNA, 19 nt, Human
guuacuguaaaaugcaaaa

SEQ ID NO: 3191919 - RNA, 12 nt, Human
guuagacugcca

SEQ ID NO: 3191920 - RNA, 22 nt, Human
guuagacugccagcucuuccua

SEQ ID NO: 3191921 - RNA, 20 nt, Human
guuagagaacuaaacuaguu

SEQ ID NO: 3191922 - RNA, 23 nt, Human
guuagagaacuaaacuaguuuuu

SEQ ID NO: 3191923 - RNA, 15 nt, Human
guuagacugccagcu

SEQ ID NO: 3191924 - RNA, 14 nt, Human
guuagacugccagc

SEQ ID NO: 3191925 - RNA, 22 nt, Human
guuauugguguaagguacuuuc

SEQ ID NO: 3191926 - RNA, 17 nt, Human
guuauugcaauaaagua

SEQ ID NO: 3191927 - RNA, 18 nt, Human
guuauugcaauaaaguau

SEQ ID NO: 3191928 - RNA, 15 nt, Human
guuauuuucagcaug

SEQ ID NO: 3191929 - RNA, 23 nt, Human
guuaauuuaaguuuugacaagcu

SEQ ID NO: 3191930 - RNA, 13 nt, Human
guuaauuuaaguu

SEQ ID NO: 3191931 - RNA, 19 nt, Human
guuaauuuaaguuuugaca

SEQ ID NO: 3191932 - RNA, 12 nt, Human
guuaauuuaagu

SEQ ID NO: 3191933 - RNA, 17 nt, Human
guuaauugauagaauaa

SEQ ID NO: 3191934 - RNA, 19 nt, Human
guuaauauuuauaggucac

SEQ ID NO: 3191935 - RNA, 22 nt, Human
guuaauuuggaccauuuuccug

SEQ ID NO: 3191936 - RNA, 18 nt, Human
guuaauuuguguguuuuu

SEQ ID NO: 3191937 - RNA, 20 nt, Human
guuaauuuggaccauuuucc

SEQ ID NO: 3191938 - RNA, 17 nt, Human
guuaauuuggaccauuu

SEQ ID NO: 3191939 - RNA, 12 nt, Human
guuaauuuggac

SEQ ID NO: 3191940 - RNA, 23 nt, Human
guuacucuucaguuaagccuuug

SEQ ID NO: 3191941 - RNA, 18 nt, Human
guuacuggauaaauuguu

SEQ ID NO: 3191942 - RNA, 19 nt, Human
guuacuggauaaauuguuu

SEQ ID NO: 3191943 - RNA, 15 nt, Human
guuacucuugggaca

SEQ ID NO: 3191944 - RNA, 12 nt, Human
aagcccaaccuc

SEQ ID NO: 3191945 - RNA, 13 nt, Human
aagcccagcuuga

SEQ ID NO: 3191946 - RNA, 18 nt, Human
guuaauaucacucauuaa

SEQ ID NO: 3191947 - RNA, 14 nt, Human
guuaauauggcuga

SEQ ID NO: 3191948 - RNA, 14 nt, Human
aagcuuuuccuaau

SEQ ID NO: 3191949 - RNA, 13 nt, Human
aagcuuuuugaaa

SEQ ID NO: 3191950 - RNA, 12 nt, Human
aagcuuuuugga

SEQ ID NO: 3191951 - RNA, 15 nt, Human
guuccccaagacauu

SEQ ID NO: 3191952 - RNA, 18 nt, Human
guucccccuguuucagag

SEQ ID NO: 3191953 - RNA, 21 nt, Human
guucccuuuuuuggcugcuga

SEQ ID NO: 3191954 - RNA, 22 nt, Human
guucccuuuuuuggcugcugaa

SEQ ID NO: 3191955 - RNA, 22 nt, Human
guucccuuugacgccaucccag

SEQ ID NO: 3191956 - RNA, 17 nt, Human
aagcucugcuccucucc

SEQ ID NO: 3191957 - RNA, 11 nt, Human
aagcugaaauu

SEQ ID NO: 3191958 - RNA, 12 nt, Human
aagcugaaauuu

SEQ ID NO: 3191959 - RNA, 13 nt, Human
aagcugaaauuuu

SEQ ID NO: 3191960 - RNA, 17 nt, Human
aagcuguuugguuuuaa

SEQ ID NO: 3191961 - RNA, 16 nt, Human
aagcucacuugcuuua

SEQ ID NO: 3191962 - RNA, 14 nt, Human
aagcuauaaauuau

SEQ ID NO: 3191963 - RNA, 18 nt, Human
aagcuuaugcuuaaauuc

SEQ ID NO: 3191964 - RNA, 17 nt, Human
aagcuucccucccugcu

SEQ ID NO: 3191965 - RNA, 19 nt, Human
aagcuguuugguuuuaaaa

SEQ ID NO: 3191966 - RNA, 21 nt, Human
aagcuguuugguuuuaaaaua

SEQ ID NO: 3191967 - RNA, 20 nt, Human
aagcuguuugguuuuaaaau

SEQ ID NO: 3191968 - RNA, 14 nt, Human
guugauagcacaga

SEQ ID NO: 3191969 - RNA, 19 nt, Human
guugauagcacagacccug

SEQ ID NO: 3191970 - RNA, 18 nt, Human
guugacuuuauaaauuuc

SEQ ID NO: 3191971 - RNA, 22 nt, Human
guugacucuaguacugugaauc

SEQ ID NO: 3191972 - RNA, 20 nt, Human
guucuuggcaauaaauuuug

SEQ ID NO: 3191973 - RNA, 15 nt, Human
guucuuccuguaauc

SEQ ID NO: 3191974 - RNA, 21 nt, Human
guugacucuaguacugugaau

SEQ ID NO: 3191975 - RNA, 19 nt, Human
guugacucuaguacuguga

SEQ ID NO: 3191976 - RNA, 21 nt, Human
guucuuggcaauaaauuuuga

SEQ ID NO: 3191977 - RNA, 22 nt, Human
guucuuggcaauaaauuuugaa

SEQ ID NO: 3191978 - RNA, 23 nt, Human
guucuuggcaauaaauuuugaaa

SEQ ID NO: 3191979 - RNA, 12 nt, Human
guugacauuugu

SEQ ID NO: 3191980 - RNA, 19 nt, Human
guucuagcauggcugccaa

SEQ ID NO: 3191981 - RNA, 13 nt, Human
guucucuccuucu

SEQ ID NO: 3191982 - RNA, 21 nt, Human
guucucucuacugguccucuu

SEQ ID NO: 3191983 - RNA, 13 nt, Human
guucucugcccuc

SEQ ID NO: 3191984 - RNA, 15 nt, Human
guucucugcccucca

SEQ ID NO: 3191985 - RNA, 15 nt, Human
guucucucuucucca

SEQ ID NO: 3191986 - RNA, 12 nt, Human
guucucugagga

SEQ ID NO: 3191987 - RNA, 17 nt, Human
guucucugcccuccaag

SEQ ID NO: 3191988 - RNA, 18 nt, Human
guucucugcccuccaaga

SEQ ID NO: 3191989 - RNA, 11 nt, Human
guucuucauga

SEQ ID NO: 3191990 - RNA, 15 nt, Human
guucuuccaaagcag

SEQ ID NO: 3191991 - RNA, 14 nt, Human
guucuuccaaagca

SEQ ID NO: 3191992 - RNA, 19 nt, Human
guucuuccaguuacuuucc

SEQ ID NO: 3191993 - RNA, 11 nt, Human
aaguuaagaau

SEQ ID NO: 3191994 - RNA, 22 nt, Human
aaguuagagaacuaaacuaguu

SEQ ID NO: 3191995 - RNA, 17 nt, Human
aaguuagccuuuaucua

SEQ ID NO: 3191996 - RNA, 16 nt, Human
aaguuagccuuuaucu

SEQ ID NO: 3191997 - RNA, 17 nt, Human
aaguuaauguauauaaa

SEQ ID NO: 3191998 - RNA, 19 nt, Human
aaguuaauguauauaaaaa

SEQ ID NO: 3191999 - RNA, 22 nt, Human
aaguuaauguauauaaaaaugg

SEQ ID NO: 3192000 - RNA, 23 nt, Human
aaguuaagaauguucuuauguug

SEQ ID NO: 3192001 - RNA, 16 nt, Human
aaguuaagauucuugg

SEQ ID NO: 3192002 - RNA, 17 nt, Human
aaguuauuaaaauuguu

SEQ ID NO: 3192003 - RNA, 16 nt, Human
aaguuauuaaaauugu

SEQ ID NO: 3192004 - RNA, 14 nt, Human
aaguuauuaaaauu

SEQ ID NO: 3192005 - RNA, 16 nt, Human
aaguuauguguaugug

SEQ ID NO: 3192006 - RNA, 22 nt, Human
aaguuauauuuccuauaccauu

SEQ ID NO: 3192007 - RNA, 14 nt, Human
aaguuauauuuccu

SEQ ID NO: 3192008 - RNA, 23 nt, Human
aaguuauauuuccuauaccauuu

SEQ ID NO: 3192009 - RNA, 15 nt, Human
aaguuauguguaugu

SEQ ID NO: 3192010 - RNA, 14 nt, Human
aaguuauguguaug

SEQ ID NO: 3192011 - RNA, 16 nt, Human
aaguuaguaggauaug

SEQ ID NO: 3192012 - RNA, 19 nt, Human
aaguuaguaggauaugccu

SEQ ID NO: 3192013 - RNA, 21 nt, Human
aaguuagccuuuaucuaccaa

SEQ ID NO: 3192014 - RNA, 15 nt, Human
aaguuaguaggauau

SEQ ID NO: 3192015 - RNA, 13 nt, Human
aaguuauaguacu

SEQ ID NO: 3192016 - RNA, 16 nt, Human
aaguuaguggaaaucu

SEQ ID NO: 3192017 - RNA, 19 nt, Human
aaguuaguggaaaucugaa

SEQ ID NO: 3192018 - RNA, 22 nt, Human
aaguuaguggaaaucugaacau

SEQ ID NO: 3192019 - RNA, 23 nt, Human
aaguuaguggaaaucugaacauu

SEQ ID NO: 3192020 - RNA, 18 nt, Human
aaguuaguuccacugaga

SEQ ID NO: 3192021 - RNA, 14 nt, Human
aaguuaguuucagu

SEQ ID NO: 3192022 - RNA, 19 nt, Human
aaguuaguuccacugagac

SEQ ID NO: 3192023 - RNA, 18 nt, Human
aagugugugauugaaggu

SEQ ID NO: 3192024 - RNA, 20 nt, Human
aagugugggucugugugugu

SEQ ID NO: 3192025 - RNA, 13 nt, Human
aagugugguagag

SEQ ID NO: 3192026 - RNA, 10 nt, Human
aagugugggu

SEQ ID NO: 3192027 - RNA, 17 nt, Human
aagugugggucugugug

SEQ ID NO: 3192028 - RNA, 18 nt, Human
aagugugggucugugugu

SEQ ID NO: 3192029 - RNA, 20 nt, Human
aagugugaauacugcuugaa

SEQ ID NO: 3192030 - RNA, 14 nt, Human
aagugugaauacug

SEQ ID NO: 3192031 - RNA, 15 nt, Human
aagugugaauacugc

SEQ ID NO: 3192032 - RNA, 16 nt, Human
aagugugaauacugcu

SEQ ID NO: 3192033 - RNA, 18 nt, Human
aagugugaauacugcuug

SEQ ID NO: 3192034 - RNA, 23 nt, Human
uaaaauugaguucuuccuguaau

SEQ ID NO: 3192035 - RNA, 15 nt, Human
uaaaauucucuucca

SEQ ID NO: 3192036 - RNA, 14 nt, Human
uaaaauucaguuuu

SEQ ID NO: 3192037 - RNA, 22 nt, Human
uaaaauucaguuuuuuuccagu

SEQ ID NO: 3192038 - RNA, 17 nt, Human
uaaaauuccaaauucau

SEQ ID NO: 3192039 - RNA, 15 nt, Human
uaaaauugugaugug

SEQ ID NO: 3192040 - RNA, 19 nt, Human
uaaaauuguacaugaacau

SEQ ID NO: 3192041 - RNA, 16 nt, Human
uaaaauugugaugugu

SEQ ID NO: 3192042 - RNA, 15 nt, Human
uaaaaugucuuucca

SEQ ID NO: 3192043 - RNA, 16 nt, Human
uaaaaugucuuuccaa

SEQ ID NO: 3192044 - RNA, 20 nt, Human
uaaaaugucuuuccaaauua

SEQ ID NO: 3192045 - RNA, 22 nt, Human
uaaaaugucuuuccaaauuauu

SEQ ID NO: 3192046 - RNA, 21 nt, Human
uaaaauguccaguaagaucac

SEQ ID NO: 3192047 - RNA, 22 nt, Human
uaaaauguccaguaagaucacu

SEQ ID NO: 3192048 - RNA, 19 nt, Human
uaaaauguccaguaagauc

SEQ ID NO: 3192049 - RNA, 20 nt, Human
uaaaauguccaguaagauca

SEQ ID NO: 3192050 - RNA, 12 nt, Human
uaaaauguauua

SEQ ID NO: 3192051 - RNA, 20 nt, Human
uaaaauguauuauguccugu

SEQ ID NO: 3192052 - RNA, 14 nt, Human
uaaaauguacaugu

SEQ ID NO: 3192053 - RNA, 17 nt, Human
uaaaauguaucuaagaa

SEQ ID NO: 3192054 - RNA, 22 nt, Human
uaaaauguaucuaagaauaaua

SEQ ID NO: 3192055 - RNA, 22 nt, Human
uaaaauguacauguauuaaauu

SEQ ID NO: 3192056 - RNA, 18 nt, Human
uaaaauguacauguauua

SEQ ID NO: 3192057 - RNA, 17 nt, Human
uaaaauguacauguauu

SEQ ID NO: 3192058 - RNA, 15 nt, Human
uaaaauguacaugua

SEQ ID NO: 3192059 - RNA, 23 nt, Human
aaguuugaucuuccucugcuaaa

SEQ ID NO: 3192060 - RNA, 13 nt, Human
uaaaauguaaaaa

SEQ ID NO: 3192061 - RNA, 9 nt, Human
uaaaauggu

SEQ ID NO: 3192062 - RNA, 20 nt, Human
aaguuugagaucagccuggg

SEQ ID NO: 3192063 - RNA, 12 nt, Human
aaguuugauaaa

SEQ ID NO: 3192064 - RNA, 20 nt, Human
aaguuugauaaauaguguua

SEQ ID NO: 3192065 - RNA, 17 nt, Human
aaguuugauaaauagug

SEQ ID NO: 3192066 - RNA, 18 nt, Human
aaguuugaucuuccucug

SEQ ID NO: 3192067 - RNA, 15 nt, Human
aaguuugaucuuccu

SEQ ID NO: 3192068 - RNA, 12 nt, Human
aaguuugaucuu

SEQ ID NO: 3192069 - RNA, 21 nt, Human
aaguuugauaaauaguguuau

SEQ ID NO: 3192070 - RNA, 19 nt, Human
aaguuucugccgcagcccu

SEQ ID NO: 3192071 - RNA, 21 nt, Human
aaguuucugccgcagcccugc

SEQ ID NO: 3192072 - RNA, 13 nt, Human
aaguuucucuucu

SEQ ID NO: 3192073 - RNA, 18 nt, Human
aaguuugaaaagcaauau

SEQ ID NO: 3192074 - RNA, 20 nt, Human
aaguuugaaaagcaauauug

SEQ ID NO: 3192075 - RNA, 15 nt, Human
aaguuauuucccuuu

SEQ ID NO: 3192076 - RNA, 20 nt, Human
aaguucccuacuuccuguga

SEQ ID NO: 3192077 - RNA, 17 nt, Human
aaguucccuacuuccug

SEQ ID NO: 3192078 - RNA, 14 nt, Human
aaguucccuacuuc

SEQ ID NO: 3192079 - RNA, 22 nt, Human
uaaaaagcuccaaaugcagcuu

SEQ ID NO: 3192080 - RNA, 21 nt, Human
uaaaaaaaaaccugagcccca

SEQ ID NO: 3192081 - RNA, 13 nt, Human
aagucagauguuu

SEQ ID NO: 3192082 - RNA, 14 nt, Human
aagucagauguuug

SEQ ID NO: 3192083 - RNA, 18 nt, Human
aagucagauguuugagca

SEQ ID NO: 3192084 - RNA, 15 nt, Human
uaaaaaaaaaaguca

SEQ ID NO: 3192085 - RNA, 16 nt, Human
uaaaaaaaaaagucac

SEQ ID NO: 3192086 - RNA, 21 nt, Human
uaaaaauauacauguuuaugu

SEQ ID NO: 3192087 - RNA, 17 nt, Human
uaaaaauauacauguuu

SEQ ID NO: 3192088 - RNA, 16 nt, Human
uaaaaauauacauguu

SEQ ID NO: 3192089 - RNA, 15 nt, Human
uaaaaauauacaugu

SEQ ID NO: 3192090 - RNA, 13 nt, Human
uaaaaauauacau

SEQ ID NO: 3192091 - RNA, 16 nt, Human
uaaaaagucuuuuaaa

SEQ ID NO: 3192092 - RNA, 21 nt, Human
uaaaaaguauugccaaacauu

SEQ ID NO: 3192093 - RNA, 19 nt, Human
uaaaaagucagauguuuga

SEQ ID NO: 3192094 - RNA, 22 nt, Human
uaaaaaguccauaccuuauaua

SEQ ID NO: 3192095 - RNA, 14 nt, Human
uaaaaagucuuuua

SEQ ID NO: 3192096 - RNA, 23 nt, Human
uaaaaagguccucacaggugucu

SEQ ID NO: 3192097 - RNA, 20 nt, Human
uaaaaaguauugccaaacau

SEQ ID NO: 3192098 - RNA, 13 nt, Human
uaaaaaguauugc

SEQ ID NO: 3192099 - RNA, 18 nt, Human
uaaaaaggaauaugaaag

SEQ ID NO: 3192100 - RNA, 15 nt, Human
uaaaaaugagguacu

SEQ ID NO: 3192101 - RNA, 16 nt, Human
uaaaaaucucucauuu

SEQ ID NO: 3192102 - RNA, 23 nt, Human
uaaaaauaucaaauuaauugugu

SEQ ID NO: 3192103 - RNA, 13 nt, Human
uaaaaccacagca

SEQ ID NO: 3192104 - RNA, 15 nt, Human
uaaaaccacagcagu

SEQ ID NO: 3192105 - RNA, 14 nt, Human
uaaaaccacagcag

SEQ ID NO: 3192106 - RNA, 22 nt, Human
uaaaacuguacuuugauucaca

SEQ ID NO: 3192107 - RNA, 20 nt, Human
uaaaacuguacuuugauuca

SEQ ID NO: 3192108 - RNA, 19 nt, Human
uaaaacuguacuuugauuc

SEQ ID NO: 3192109 - RNA, 17 nt, Human
uaaaacuguacuuugau

SEQ ID NO: 3192110 - RNA, 16 nt, Human
uaaaacuguacuuuga

SEQ ID NO: 3192111 - RNA, 15 nt, Human
uaaaacuguacuuug

SEQ ID NO: 3192112 - RNA, 23 nt, Human
uaaaacuguacuuugauucacau

SEQ ID NO: 3192113 - RNA, 16 nt, Human
uaaaacugucacuguu

SEQ ID NO: 3192114 - RNA, 13 nt, Human
uaaaacccaagug

SEQ ID NO: 3192115 - RNA, 17 nt, Human
uaaaacuacuuagcacu

SEQ ID NO: 3192116 - RNA, 19 nt, Human
uaaaacuaggcauuuguaa

SEQ ID NO: 3192117 - RNA, 21 nt, Human
uaaaacuaggcauuuguaaau

SEQ ID NO: 3192118 - RNA, 17 nt, Human
uaaaaccaggcuuucua

SEQ ID NO: 3192119 - RNA, 11 nt, Human
uaaaacuaaga

SEQ ID NO: 3192120 - RNA, 13 nt, Human
uaaaacuguacuu

SEQ ID NO: 3192121 - RNA, 14 nt, Human
uaaaacuguacuuu

SEQ ID NO: 3192122 - RNA, 14 nt, Human
uaaaacugauguga

SEQ ID NO: 3192123 - RNA, 16 nt, Human
uaaaacugaugugaaa

SEQ ID NO: 3192124 - RNA, 18 nt, Human
uaaaacugaugugaaacu

SEQ ID NO: 3192125 - RNA, 22 nt, Human
uaaaauaagaauagaacaacau

SEQ ID NO: 3192126 - RNA, 21 nt, Human
uaaaauacacacucaaaucaa

SEQ ID NO: 3192127 - RNA, 16 nt, Human
uaaaauaacuaaaaug

SEQ ID NO: 3192128 - RNA, 17 nt, Human
uaaaauaacuaaaaugu

SEQ ID NO: 3192129 - RNA, 18 nt, Human
uaaaauaacuaaaaugua

SEQ ID NO: 3192130 - RNA, 19 nt, Human
uaaaauaacuaaaauguau

SEQ ID NO: 3192131 - RNA, 21 nt, Human
uaaaauaacuaaaauguaucu

SEQ ID NO: 3192132 - RNA, 12 nt, Human
uaaaauaaaugg

SEQ ID NO: 3192133 - RNA, 13 nt, Human
uaaaauaaauggu

SEQ ID NO: 3192134 - RNA, 16 nt, Human
uaaaauaaacuuucuu

SEQ ID NO: 3192135 - RNA, 15 nt, Human
uaaaauaaacuuucu

SEQ ID NO: 3192136 - RNA, 14 nt, Human
uaaaauaaacuuuc

SEQ ID NO: 3192137 - RNA, 13 nt, Human
uaaaauaaacuuu

SEQ ID NO: 3192138 - RNA, 13 nt, Human
uaaaagaauauuu

SEQ ID NO: 3192139 - RNA, 19 nt, Human
uaaaaggugaccaaugaug

SEQ ID NO: 3192140 - RNA, 13 nt, Human
uaaaagucuugug

SEQ ID NO: 3192141 - RNA, 22 nt, Human
uaaaagaagaaauaguucugug

SEQ ID NO: 3192142 - RNA, 14 nt, Human
uaaaaguaaaaugu

SEQ ID NO: 3192143 - RNA, 16 nt, Human
uaaaaguaaaaugucu

SEQ ID NO: 3192144 - RNA, 18 nt, Human
uaaaaguaaaaugucuuu

SEQ ID NO: 3192145 - RNA, 21 nt, Human
uaaaagaagaaauaguucugu

SEQ ID NO: 3192146 - RNA, 15 nt, Human
uaaaagaaaggguuc

SEQ ID NO: 3192147 - RNA, 20 nt, Human
uaaaagaaaggguucuguaa

SEQ ID NO: 3192148 - RNA, 23 nt, Human
uaaaagaaaggguucuguaaaau

SEQ ID NO: 3192149 - RNA, 15 nt, Human
uaaaagaaaaaauga

SEQ ID NO: 3192150 - RNA, 17 nt, Human
uaaaagaaaaaaugaca

SEQ ID NO: 3192151 - RNA, 14 nt, Human
uaaaagaaaauaaa

SEQ ID NO: 3192152 - RNA, 22 nt, Human
uaaaagaaaauaaaaaaaagaa

SEQ ID NO: 3192153 - RNA, 17 nt, Human
uaaaagaaaauaaaaaa

SEQ ID NO: 3192154 - RNA, 20 nt, Human
aagugauccucccaccucag

SEQ ID NO: 3192155 - RNA, 19 nt, Human
aagugauccucccaccuca

SEQ ID NO: 3192156 - RNA, 13 nt, Human
aagugauccuccc

SEQ ID NO: 3192157 - RNA, 12 nt, Human
uaaaauaauaaa

SEQ ID NO: 3192158 - RNA, 20 nt, Human
aagugauucuccugccucag

SEQ ID NO: 3192159 - RNA, 13 nt, Human
aagugauucucau

SEQ ID NO: 3192160 - RNA, 16 nt, Human
aagugauucucaugcc

SEQ ID NO: 3192161 - RNA, 23 nt, Human
aagugauccucccaccucagccu

SEQ ID NO: 3192162 - RNA, 19 nt, Human
aagugcagaacugcaguca

SEQ ID NO: 3192163 - RNA, 17 nt, Human
aagugauucucaugccu

SEQ ID NO: 3192164 - RNA, 20 nt, Human
guuuuaaaguucauugcaau

SEQ ID NO: 3192165 - RNA, 13 nt, Human
guuuggagacaga

SEQ ID NO: 3192166 - RNA, 15 nt, Human
guuuggaauauuaaa

SEQ ID NO: 3192167 - RNA, 16 nt, Human
guuuggaauauuaaaa

SEQ ID NO: 3192168 - RNA, 20 nt, Human
guuugcuuuguaugcacuuu

SEQ ID NO: 3192169 - RNA, 22 nt, Human
guuugcuccccuuccccuuccu

SEQ ID NO: 3192170 - RNA, 20 nt, Human
guuugcugaacauuggagaa

SEQ ID NO: 3192171 - RNA, 23 nt, Human
guuugcuccccuuccccuuccuu

SEQ ID NO: 3192172 - RNA, 14 nt, Human
guuugcuguugcug

SEQ ID NO: 3192173 - RNA, 17 nt, Human
guuuuaacaagaagcaa

SEQ ID NO: 3192174 - RNA, 21 nt, Human
guuuuaucguccagugacuuu

SEQ ID NO: 3192175 - RNA, 12 nt, Human
guuuuauuuaua

SEQ ID NO: 3192176 - RNA, 14 nt, Human
guuuuauuuauauu

SEQ ID NO: 3192177 - RNA, 17 nt, Human
guuuuauuuauauuuau

SEQ ID NO: 3192178 - RNA, 18 nt, Human
guuuuauuuauauuuauu

SEQ ID NO: 3192179 - RNA, 22 nt, Human
guuuuauuuauauuuauugacu

SEQ ID NO: 3192180 - RNA, 20 nt, Human
guuuuauuuucuaaaguacu

SEQ ID NO: 3192181 - RNA, 12 nt, Human
guuuugagcccu

SEQ ID NO: 3192182 - RNA, 21 nt, Human
guuuugagcuacuggauucuu

SEQ ID NO: 3192183 - RNA, 21 nt, Human
aagucacuggccaguggcugg

SEQ ID NO: 3192184 - RNA, 22 nt, Human
aagucacugcacagugcaucuc

SEQ ID NO: 3192185 - RNA, 16 nt, Human
aagucaaacacuugug

SEQ ID NO: 3192186 - RNA, 20 nt, Human
aagucaaacacuugugacuu

SEQ ID NO: 3192187 - RNA, 19 nt, Human
aagucaaacacuugugacu

SEQ ID NO: 3192188 - RNA, 14 nt, Human
aagucacugcacag

SEQ ID NO: 3192189 - RNA, 20 nt, Human
aagucagaaacuaaaacaaa

SEQ ID NO: 3192190 - RNA, 12 nt, Human
aagucagaaguu

SEQ ID NO: 3192191 - RNA, 13 nt, Human
aagucagaaguuu

SEQ ID NO: 3192192 - RNA, 16 nt, Human
aagucagaaucagaag

SEQ ID NO: 3192193 - RNA, 18 nt, Human
aagucagaaucagaagau

SEQ ID NO: 3192194 - RNA, 23 nt, Human
aagucagaaucagaagauagucu

SEQ ID NO: 3192195 - RNA, 19 nt, Human
aaguauucuuauuuaauga

SEQ ID NO: 3192196 - RNA, 21 nt, Human
aaguauucuuauuuaaugaaa

SEQ ID NO: 3192197 - RNA, 23 nt, Human
aaguauucuuauuuaaugaaaga

SEQ ID NO: 3192198 - RNA, 17 nt, Human
aaguauugccaaacauu

SEQ ID NO: 3192199 - RNA, 13 nt, Human
aaguauugccaaa

SEQ ID NO: 3192200 - RNA, 14 nt, Human
aaguauucuuuuuc

SEQ ID NO: 3192201 - RNA, 13 nt, Human
aaguauuuaagcc

SEQ ID NO: 3192202 - RNA, 17 nt, Human
aaguauuguacaaauaa

SEQ ID NO: 3192203 - RNA, 18 nt, Human
aaguauugccaaacauua

SEQ ID NO: 3192204 - RNA, 15 nt, Human
aaguauuuuccuguu

SEQ ID NO: 3192205 - RNA, 19 nt, Human
aaguacuucuccacccugc

SEQ ID NO: 3192206 - RNA, 18 nt, Human
aaguacuucuccacccug

SEQ ID NO: 3192207 - RNA, 20 nt, Human
aaguauuauaaacaagaaug

SEQ ID NO: 3192208 - RNA, 15 nt, Human
aaguaauuguuccag

SEQ ID NO: 3192209 - RNA, 13 nt, Human
aaguaauuucagu

SEQ ID NO: 3192210 - RNA, 14 nt, Human
aaguaauuucagug

SEQ ID NO: 3192211 - RNA, 23 nt, Human
aaguaauuucaguguaaagugug

SEQ ID NO: 3192212 - RNA, 13 nt, Human
aaguacuauguau

SEQ ID NO: 3192213 - RNA, 17 nt, Human
aaguacuauaauuuacc

SEQ ID NO: 3192214 - RNA, 14 nt, Human
aaguacuauaauuu

SEQ ID NO: 3192215 - RNA, 18 nt, Human
aaguaacuggugauauau

SEQ ID NO: 3192216 - RNA, 22 nt, Human
aagguauuaagauuauaauugu

SEQ ID NO: 3192217 - RNA, 21 nt, Human
aagguauuaagauuauaauug

SEQ ID NO: 3192218 - RNA, 23 nt, Human
aagguuucagaaagaagugggga

SEQ ID NO: 3192219 - RNA, 17 nt, Human
aagguuuauuuuucugu

SEQ ID NO: 3192220 - RNA, 16 nt, Human
aagguauaucauucua

SEQ ID NO: 3192221 - RNA, 23 nt, Human
aagguauaucauucuaaagauag

SEQ ID NO: 3192222 - RNA, 22 nt, Human
aagguauaucauucuaaagaua

SEQ ID NO: 3192223 - RNA, 12 nt, Human
aagggggcuggg

SEQ ID NO: 3192224 - RNA, 23 nt, Human
aagggggcugggacaugggaaag

SEQ ID NO: 3192225 - RNA, 13 nt, Human
aaggggagaguaa

SEQ ID NO: 3192226 - RNA, 22 nt, Human
aagguagaaugaccuuguaaug

SEQ ID NO: 3192227 - RNA, 14 nt, Human
aagguagacuuuua

SEQ ID NO: 3192228 - RNA, 18 nt, Human
aagguagcauucuuugga

SEQ ID NO: 3192229 - RNA, 20 nt, Human
aagguagcauucuuuggagu

SEQ ID NO: 3192230 - RNA, 15 nt, Human
aagguaguucaagaa

SEQ ID NO: 3192231 - RNA, 22 nt, Human
aagguaggguaggcagccugag

SEQ ID NO: 3192232 - RNA, 22 nt, Human
aagguaguucaagaaaugaaga

SEQ ID NO: 3192233 - RNA, 15 nt, Human
aaggggguagggaaa

SEQ ID NO: 3192234 - RNA, 20 nt, Human
aagguagaaugaccuuguaa

SEQ ID NO: 3192235 - RNA, 19 nt, Human
aagguagaaugaccuugua

SEQ ID NO: 3192236 - RNA, 14 nt, Human
aaggcuuauaaaac

SEQ ID NO: 3192237 - RNA, 20 nt, Human
aaggggacaaguagccaccu

SEQ ID NO: 3192238 - RNA, 19 nt, Human
aaggggacugccaccuccc

SEQ ID NO: 3192239 - RNA, 17 nt, Human
aaggggacugccaccuc

SEQ ID NO: 3192240 - RNA, 16 nt, Human
aaggcugggggaagaa

SEQ ID NO: 3192241 - RNA, 14 nt, Human
aaggcugggggaag

SEQ ID NO: 3192242 - RNA, 19 nt, Human
aaggcugggggaagaagcu

SEQ ID NO: 3192243 - RNA, 22 nt, Human
aaggcugggggaagaagcucuc

SEQ ID NO: 3192244 - RNA, 20 nt, Human
aaggcugucaauuacaggaa

SEQ ID NO: 3192245 - RNA, 18 nt, Human
aaggcugucucagauaaa

SEQ ID NO: 3192246 - RNA, 17 nt, Human
aaggcuguauucagcaa

SEQ ID NO: 3192247 - RNA, 16 nt, Human
aaggcuguauucagca

SEQ ID NO: 3192248 - RNA, 12 nt, Human
aaggcuguauuc

SEQ ID NO: 3192249 - RNA, 19 nt, Human
guuuauucaaacugaaaag

SEQ ID NO: 3192250 - RNA, 14 nt, Human
guuuauucaaacug

SEQ ID NO: 3192251 - RNA, 15 nt, Human
guuuauuccagagcu

SEQ ID NO: 3192252 - RNA, 20 nt, Human
guuuauuccagagcugccag

SEQ ID NO: 3192253 - RNA, 18 nt, Human
guuuauucuugaugaaaa

SEQ ID NO: 3192254 - RNA, 17 nt, Human
guuuauucuugaugaaa

SEQ ID NO: 3192255 - RNA, 16 nt, Human
guuuauucuugaugaa

SEQ ID NO: 3192256 - RNA, 22 nt, Human
guuucaccauguuggccaggcu

SEQ ID NO: 3192257 - RNA, 17 nt, Human
guuucaaguuuuaaagu

SEQ ID NO: 3192258 - RNA, 12 nt, Human
guuucaauaaag

SEQ ID NO: 3192259 - RNA, 18 nt, Human
guuucaauaaaguuugau

SEQ ID NO: 3192260 - RNA, 17 nt, Human
guuucaauaaaguuuga

SEQ ID NO: 3192261 - RNA, 16 nt, Human
guuucaauaaaguuug

SEQ ID NO: 3192262 - RNA, 14 nt, Human
guuucaauaaaguu

SEQ ID NO: 3192263 - RNA, 14 nt, Human
guuuaugauuccac

SEQ ID NO: 3192264 - RNA, 20 nt, Human
guuuauguaaacaaaucuuu

SEQ ID NO: 3192265 - RNA, 19 nt, Human
guuuauguaaacaaaucuu

SEQ ID NO: 3192266 - RNA, 15 nt, Human
guuuaugcagugcug

SEQ ID NO: 3192267 - RNA, 17 nt, Human
guuuaugcagugcugcu

SEQ ID NO: 3192268 - RNA, 18 nt, Human
guuuaugcagugcugcuu

SEQ ID NO: 3192269 - RNA, 17 nt, Human
guuguuuguauguauaa

SEQ ID NO: 3192270 - RNA, 14 nt, Human
guuguuuuuguaua

SEQ ID NO: 3192271 - RNA, 21 nt, Human
guuguuuuuguauauugguuu

SEQ ID NO: 3192272 - RNA, 17 nt, Human
guuguuuuguacagaug

SEQ ID NO: 3192273 - RNA, 15 nt, Human
guuguuuuguacaga

SEQ ID NO: 3192274 - RNA, 12 nt, Human
guuuaaaaaugg

SEQ ID NO: 3192275 - RNA, 21 nt, Human
guuuaagugacugauggcuaa

SEQ ID NO: 3192276 - RNA, 15 nt, Human
guuuaaguagauuuc

SEQ ID NO: 3192277 - RNA, 18 nt, Human
guuuaaguagauuucaug

SEQ ID NO: 3192278 - RNA, 22 nt, Human
guuuaauaaagcgaaaaacuca

SEQ ID NO: 3192279 - RNA, 20 nt, Human
aaggaaaagaaaacaaaaaa

SEQ ID NO: 3192280 - RNA, 17 nt, Human
aaggaaacccagcucug

SEQ ID NO: 3192281 - RNA, 22 nt, Human
aaggaaacccagcucuggucca

SEQ ID NO: 3192282 - RNA, 23 nt, Human
guuguuugauucagacagcugcc

SEQ ID NO: 3192283 - RNA, 20 nt, Human
guuguuugauucagacagcu

SEQ ID NO: 3192284 - RNA, 13 nt, Human
guuguuuguaugu

SEQ ID NO: 3192285 - RNA, 16 nt, Human
aaggaaacccagcucu

SEQ ID NO: 3192286 - RNA, 12 nt, Human
aaggaaaccuuu

SEQ ID NO: 3192287 - RNA, 18 nt, Human
aaggaaaccuuuucuugu

SEQ ID NO: 3192288 - RNA, 19 nt, Human
aaggaaaccuuuucuugua

SEQ ID NO: 3192289 - RNA, 13 nt, Human
aaggaaaaauuca

SEQ ID NO: 3192290 - RNA, 15 nt, Human
gugcucaucagaaac

SEQ ID NO: 3192291 - RNA, 22 nt, Human
gugcucaucagaaacaauuucu

SEQ ID NO: 3192292 - RNA, 15 nt, Human
gugcucuccaagccc

SEQ ID NO: 3192293 - RNA, 16 nt, Human
gugcucugaucaucca

SEQ ID NO: 3192294 - RNA, 14 nt, Human
gugcucuggacagg

SEQ ID NO: 3192295 - RNA, 13 nt, Human
gugcucuggacag

SEQ ID NO: 3192296 - RNA, 12 nt, Human
gugcugcccugc

SEQ ID NO: 3192297 - RNA, 13 nt, Human
gugcugcccugcc

SEQ ID NO: 3192298 - RNA, 14 nt, Human
gugcugcccugccc

SEQ ID NO: 3192299 - RNA, 15 nt, Human
gugcugcccugccca

SEQ ID NO: 3192300 - RNA, 19 nt, Human
aagaagugugucacccuua

SEQ ID NO: 3192301 - RNA, 17 nt, Human
aagaaguuuaaggaaua

SEQ ID NO: 3192302 - RNA, 14 nt, Human
aagaaguuuaagga

SEQ ID NO: 3192303 - RNA, 20 nt, Human
aagaaguucuuugauucugu

SEQ ID NO: 3192304 - RNA, 14 nt, Human
aagaaguucuuuga

SEQ ID NO: 3192305 - RNA, 16 nt, Human
aagaauaaaggcagcu

SEQ ID NO: 3192306 - RNA, 12 nt, Human
aagaauaauaaa

SEQ ID NO: 3192307 - RNA, 13 nt, Human
aagaauaauaaaa

SEQ ID NO: 3192308 - RNA, 14 nt, Human
aagaauaauaaaau

SEQ ID NO: 3192309 - RNA, 15 nt, Human
aagaauaauaaaauc

SEQ ID NO: 3192310 - RNA, 16 nt, Human
aagaauaauaaaauca

SEQ ID NO: 3192311 - RNA, 22 nt, Human
gugcuacaaaaacacagcaagg

SEQ ID NO: 3192312 - RNA, 21 nt, Human
gugcuacaaaaacacagcaag

SEQ ID NO: 3192313 - RNA, 11 nt, Human
gugcuacagaa

SEQ ID NO: 3192314 - RNA, 11 nt, Human
aagaauaauuu

SEQ ID NO: 3192315 - RNA, 22 nt, Human
gugcuauaaucuguuuuuacgu

SEQ ID NO: 3192316 - RNA, 23 nt, Human
gugcuauaaucuguuuuuacgua

SEQ ID NO: 3192317 - RNA, 21 nt, Human
gugcuagaggauuaguaagau

SEQ ID NO: 3192318 - RNA, 15 nt, Human
gugcuaucuccccca

SEQ ID NO: 3192319 - RNA, 18 nt, Human
gugcuaucucccccagcc

SEQ ID NO: 3192320 - RNA, 22 nt, Human
aagaaaacaaaaccaaaaguua

SEQ ID NO: 3192321 - RNA, 12 nt, Human
aagaaaaaugug

SEQ ID NO: 3192322 - RNA, 18 nt, Human
aagaaaaaugagccuggc

SEQ ID NO: 3192323 - RNA, 17 nt, Human
aagaaaaaugagccugg

SEQ ID NO: 3192324 - RNA, 14 nt, Human
aagaaaaacuguuu

SEQ ID NO: 3192325 - RNA, 13 nt, Human
aagaaaaagaaaa

SEQ ID NO: 3192326 - RNA, 19 nt, Human
aagaaaaaauauuuucccu

SEQ ID NO: 3192327 - RNA, 15 nt, Human
aacuuuagaaauaaa

SEQ ID NO: 3192328 - RNA, 20 nt, Human
aacuuuagaaauaaaccuua

SEQ ID NO: 3192329 - RNA, 17 nt, Human
aagaaagaggaaaagaa

SEQ ID NO: 3192330 - RNA, 12 nt, Human
aagaaagaggaa

SEQ ID NO: 3192331 - RNA, 14 nt, Human
aagaaagauguuug

SEQ ID NO: 3192332 - RNA, 16 nt, Human
aagaaaggaaaagaaa

SEQ ID NO: 3192333 - RNA, 16 nt, Human
aagaaaggaaaccuuu

SEQ ID NO: 3192334 - RNA, 16 nt, Human
aagaaagaaaaucagg

SEQ ID NO: 3192335 - RNA, 12 nt, Human
aagaaagaaaua

SEQ ID NO: 3192336 - RNA, 12 nt, Human
aagaaagaaaga

SEQ ID NO: 3192337 - RNA, 14 nt, Human
aagaaagaaaauca

SEQ ID NO: 3192338 - RNA, 13 nt, Human
aagaaagaaaauc

SEQ ID NO: 3192339 - RNA, 11 nt, Human
aagaaacauug

SEQ ID NO: 3192340 - RNA, 19 nt, Human
aagaaacagcuaugagagg

SEQ ID NO: 3192341 - RNA, 17 nt, Human
aagaaacauuggaagca

SEQ ID NO: 3192342 - RNA, 14 nt, Human
aagaaacauuggaa

SEQ ID NO: 3192343 - RNA, 16 nt, Human
aagaaaauacuuaaau

SEQ ID NO: 3192344 - RNA, 13 nt, Human
aagaaaauacuua

SEQ ID NO: 3192345 - RNA, 20 nt, Human
aagaaaauacuuaaauguua

SEQ ID NO: 3192346 - RNA, 22 nt, Human
aagaaaauagagaugagcuuuc

SEQ ID NO: 3192347 - RNA, 15 nt, Human
aagaaaacacuguua

SEQ ID NO: 3192348 - RNA, 13 nt, Human
aagaaaacacugu

SEQ ID NO: 3192349 - RNA, 10 nt, Human
gugauguguc

SEQ ID NO: 3192350 - RNA, 22 nt, Human
gugaugguuccccuguucacuc

SEQ ID NO: 3192351 - RNA, 15 nt, Human
gugauguccuguaaa

SEQ ID NO: 3192352 - RNA, 19 nt, Human
gugauguccuguaaacacu

SEQ ID NO: 3192353 - RNA, 21 nt, Human
gugauguccuguaaacacuca

SEQ ID NO: 3192354 - RNA, 18 nt, Human
gugaugugacauuuguca

SEQ ID NO: 3192355 - RNA, 16 nt, Human
gugaugugacauuugu

SEQ ID NO: 3192356 - RNA, 13 nt, Human
gugaugugacauu

SEQ ID NO: 3192357 - RNA, 23 nt, Human
gugauccucccaccucagccucc

SEQ ID NO: 3192358 - RNA, 23 nt, Human
gugaucucauuguucaauuccca

SEQ ID NO: 3192359 - RNA, 23 nt, Human
gugaugguuccccuguucacucu

SEQ ID NO: 3192360 - RNA, 19 nt, Human
gugaucugcugcagagcag

SEQ ID NO: 3192361 - RNA, 20 nt, Human
gugaucugcugcagagcagu

SEQ ID NO: 3192362 - RNA, 17 nt, Human
gugauuaccagggacug

SEQ ID NO: 3192363 - RNA, 11 nt, Human
gugauuaccag

SEQ ID NO: 3192364 - RNA, 16 nt, Human
gugauuaccagggacu

SEQ ID NO: 3192365 - RNA, 13 nt, Human
gugcaauauauuu

SEQ ID NO: 3192366 - RNA, 15 nt, Human
gugcaauauauuuug

SEQ ID NO: 3192367 - RNA, 14 nt, Human
gugcaauauauuuu

SEQ ID NO: 3192368 - RNA, 22 nt, Human
gugcauuguauagauauaauga

SEQ ID NO: 3192369 - RNA, 18 nt, Human
gugcauuggauaacacca

SEQ ID NO: 3192370 - RNA, 23 nt, Human
gugccaaaaacaacaacaaaaug

SEQ ID NO: 3192371 - RNA, 18 nt, Human
gugcaaugaccuuucaau

SEQ ID NO: 3192372 - RNA, 13 nt, Human
gugcacaagcucc

SEQ ID NO: 3192373 - RNA, 16 nt, Human
gugcacaagcuccaag

SEQ ID NO: 3192374 - RNA, 21 nt, Human
gugcacaagcuccaagcuccc

SEQ ID NO: 3192375 - RNA, 21 nt, Human
gugcacaugcacgugugugca

SEQ ID NO: 3192376 - RNA, 23 nt, Human
gugcaauauauuuuguaugcaag

SEQ ID NO: 3192377 - RNA, 20 nt, Human
gugcaauauauuuuguaugc

SEQ ID NO: 3192378 - RNA, 16 nt, Human
gugcaauauauuuugu

SEQ ID NO: 3192379 - RNA, 23 nt, Human
gugcaccugggacagggagcagc

SEQ ID NO: 3192380 - RNA, 12 nt, Human
gugcaccugggc

SEQ ID NO: 3192381 - RNA, 22 nt, Human
gugcaccugggacagggagcag

SEQ ID NO: 3192382 - RNA, 15 nt, Human
aacugugugauuaaa

SEQ ID NO: 3192383 - RNA, 18 nt, Human
aacugcccccucugcccu

SEQ ID NO: 3192384 - RNA, 19 nt, Human
aacugcccccucugcccug

SEQ ID NO: 3192385 - RNA, 20 nt, Human
aacugcccccucugcccugc

SEQ ID NO: 3192386 - RNA, 21 nt, Human
aacugcccccucugcccugcg

SEQ ID NO: 3192387 - RNA, 16 nt, Human
aacugcccccucugcc

SEQ ID NO: 3192388 - RNA, 17 nt, Human
aacugcccccucugccc

SEQ ID NO: 3192389 - RNA, 19 nt, Human
aacugccaguuuuguuucc

SEQ ID NO: 3192390 - RNA, 14 nt, Human
aacugccaguuuug

SEQ ID NO: 3192391 - RNA, 18 nt, Human
aacuguccguaagcagua

SEQ ID NO: 3192392 - RNA, 19 nt, Human
aacuguccguaagcaguau

SEQ ID NO: 3192393 - RNA, 21 nt, Human
aacuguccguaagcaguauau

SEQ ID NO: 3192394 - RNA, 15 nt, Human
aacugucauuacaga

SEQ ID NO: 3192395 - RNA, 16 nt, Human
aacugcccaguuucca

SEQ ID NO: 3192396 - RNA, 15 nt, Human
aacugucgugucaua

SEQ ID NO: 3192397 - RNA, 20 nt, Human
aacugucgugucauacucga

SEQ ID NO: 3192398 - RNA, 19 nt, Human
aacugucuagcacuuccuu

SEQ ID NO: 3192399 - RNA, 13 nt, Human
aacuucagacaua

SEQ ID NO: 3192400 - RNA, 22 nt, Human
aacuuccuuggacucauuuuaa

SEQ ID NO: 3192401 - RNA, 23 nt, Human
aacuucuaaaacuguacuuugau

SEQ ID NO: 3192402 - RNA, 16 nt, Human
aacuucuaaaacugua

SEQ ID NO: 3192403 - RNA, 15 nt, Human
aacuucuaaaacugu

SEQ ID NO: 3192404 - RNA, 13 nt, Human
aacuucuaaaacu

SEQ ID NO: 3192405 - RNA, 23 nt, Human
aacuuccuuggacucauuuuaaa

SEQ ID NO: 3192406 - RNA, 18 nt, Human
aacuugaagccugcuccu

SEQ ID NO: 3192407 - RNA, 23 nt, Human
gugaauaauacaguaucucaggg

SEQ ID NO: 3192408 - RNA, 12 nt, Human
aacuccugaccu

SEQ ID NO: 3192409 - RNA, 14 nt, Human
aacuccugaccuca

SEQ ID NO: 3192410 - RNA, 19 nt, Human
aacuccaacauccacucuc

SEQ ID NO: 3192411 - RNA, 22 nt, Human
gugacagagugagacucugucu

SEQ ID NO: 3192412 - RNA, 20 nt, Human
gugacagagugagacucugu

SEQ ID NO: 3192413 - RNA, 23 nt, Human
gugacagaggcagccccauucug

SEQ ID NO: 3192414 - RNA, 14 nt, Human
gugaauaaugauuu

SEQ ID NO: 3192415 - RNA, 14 nt, Human
gugacaugucuuuu

SEQ ID NO: 3192416 - RNA, 12 nt, Human
gugacaguguug

SEQ ID NO: 3192417 - RNA, 12 nt, Human
gugacuuugaaa

SEQ ID NO: 3192418 - RNA, 16 nt, Human
gugacuucagcucugu

SEQ ID NO: 3192419 - RNA, 19 nt, Human
gugacaugucuuuucuugc

SEQ ID NO: 3192420 - RNA, 22 nt, Human
gugacauguguuggcagccucu

SEQ ID NO: 3192421 - RNA, 19 nt, Human
gugacauuugucauuuuca

SEQ ID NO: 3192422 - RNA, 17 nt, Human
gugacauuugucauuuu

SEQ ID NO: 3192423 - RNA, 16 nt, Human
gugagacucugucuca

SEQ ID NO: 3192424 - RNA, 14 nt, Human
gugagacucugucu

SEQ ID NO: 3192425 - RNA, 16 nt, Human
gugagaccugccccuc

SEQ ID NO: 3192426 - RNA, 23 nt, Human
gugagaccugccccuccucucug

SEQ ID NO: 3192427 - RNA, 22 nt, Human
gugagacccugucucaaaaaaa

SEQ ID NO: 3192428 - RNA, 14 nt, Human
gugagaccugcccc

SEQ ID NO: 3192429 - RNA, 15 nt, Human
gugagaccugccccu

SEQ ID NO: 3192430 - RNA, 13 nt, Human
gugagaccugccc

SEQ ID NO: 3192431 - RNA, 14 nt, Human
gugaggcucugccc

SEQ ID NO: 3192432 - RNA, 15 nt, Human
gugaggcucugcccu

SEQ ID NO: 3192433 - RNA, 16 nt, Human
gugaggcucugcccuu

SEQ ID NO: 3192434 - RNA, 17 nt, Human
gugaggcucugcccuug

SEQ ID NO: 3192435 - RNA, 12 nt, Human
gugaggcucugc

SEQ ID NO: 3192436 - RNA, 13 nt, Human
gugaggcucugcc

SEQ ID NO: 3192437 - RNA, 18 nt, Human
gugagacucugucucaaa

SEQ ID NO: 3192438 - RNA, 19 nt, Human
aacucuccucugcugcugg

SEQ ID NO: 3192439 - RNA, 21 nt, Human
aacucuccucugcugcuggcu

SEQ ID NO: 3192440 - RNA, 21 nt, Human
gugaguacuacaguccuccca

SEQ ID NO: 3192441 - RNA, 17 nt, Human
aacucuccucugcugcu

SEQ ID NO: 3192442 - RNA, 23 nt, Human
gugaguacuacaguccucccauc

SEQ ID NO: 3192443 - RNA, 17 nt, Human
gugagucaccaagccca

SEQ ID NO: 3192444 - RNA, 18 nt, Human
gugaggcucugcccuugg

SEQ ID NO: 3192445 - RNA, 22 nt, Human
aacucuccucugcugcuggcug

SEQ ID NO: 3192446 - RNA, 23 nt, Human
aacucuccucugcugcuggcugg

SEQ ID NO: 3192447 - RNA, 23 nt, Human
aacucugaauuuaucuuugauaa

SEQ ID NO: 3192448 - RNA, 22 nt, Human
aacucugaauuuaucuuugaua

SEQ ID NO: 3192449 - RNA, 21 nt, Human
aacucugaauuuaucuuugau

SEQ ID NO: 3192450 - RNA, 19 nt, Human
aacucugaauuuaucuuug

SEQ ID NO: 3192451 - RNA, 16 nt, Human
aacucugaauuuaucu

SEQ ID NO: 3192452 - RNA, 18 nt, Human
aacucugaauaagcacuu

SEQ ID NO: 3192453 - RNA, 15 nt, Human
aacucugaauaagca

SEQ ID NO: 3192454 - RNA, 12 nt, Human
aacucugaauaa

SEQ ID NO: 3192455 - RNA, 21 nt, Human
aacucuugacagcuauaauua

SEQ ID NO: 3192456 - RNA, 13 nt, Human
aacucuuuaacuu

SEQ ID NO: 3192457 - RNA, 11 nt, Human
aacucuuuaac

SEQ ID NO: 3192458 - RNA, 16 nt, Human
aacucuucucauuacu

SEQ ID NO: 3192459 - RNA, 17 nt, Human
aacucuucucauuacuu

SEQ ID NO: 3192460 - RNA, 13 nt, Human
aacucuucucauu

SEQ ID NO: 3192461 - RNA, 12 nt, Human
aacucuuccucc

SEQ ID NO: 3192462 - RNA, 11 nt, Human
aacucuuccuc

SEQ ID NO: 3192463 - RNA, 20 nt, Human
aacugauuuuuuuuuccuuc

SEQ ID NO: 3192464 - RNA, 21 nt, Human
aacugauuuuuuuuuccuuca

SEQ ID NO: 3192465 - RNA, 23 nt, Human
aacucuuuuaucuccugaaaaaa

SEQ ID NO: 3192466 - RNA, 22 nt, Human
aacugauuuuuuuuuccuucag

SEQ ID NO: 3192467 - RNA, 23 nt, Human
aacugauuuuuuuuuccuucagu

SEQ ID NO: 3192468 - RNA, 16 nt, Human
aacugcauuggcuuug

SEQ ID NO: 3192469 - RNA, 22 nt, Human
gucuuuccacuccuccuagcca

SEQ ID NO: 3192470 - RNA, 21 nt, Human
gucuuuccaaauuauuucuua

SEQ ID NO: 3192471 - RNA, 22 nt, Human
gucuuuccaaauuauuucuuaa

SEQ ID NO: 3192472 - RNA, 22 nt, Human
gucuuguuuuuuuuuuccacuu

SEQ ID NO: 3192473 - RNA, 19 nt, Human
gucuuuaaaaacuguuuua

SEQ ID NO: 3192474 - RNA, 21 nt, Human
gucuuauauuuacaacacuuu

SEQ ID NO: 3192475 - RNA, 17 nt, Human
gucuuaauggaugaaau

SEQ ID NO: 3192476 - RNA, 23 nt, Human
gucuuauuaaaacacuucauuga

SEQ ID NO: 3192477 - RNA, 21 nt, Human
gucuuaugcuuccagaaacac

SEQ ID NO: 3192478 - RNA, 15 nt, Human
gucuuaugcuuccag

SEQ ID NO: 3192479 - RNA, 14 nt, Human
gucuuaugcuucca

SEQ ID NO: 3192480 - RNA, 14 nt, Human
gucuuaauuaaaag

SEQ ID NO: 3192481 - RNA, 16 nt, Human
gucuggaaugcagugg

SEQ ID NO: 3192482 - RNA, 15 nt, Human
gucuggaaugcagug

SEQ ID NO: 3192483 - RNA, 21 nt, Human
gucuuaaaaaguggaaaaaua

SEQ ID NO: 3192484 - RNA, 14 nt, Human
gucugacaggcaau

SEQ ID NO: 3192485 - RNA, 13 nt, Human
gucugacaggcaa

SEQ ID NO: 3192486 - RNA, 12 nt, Human
gucugacaggca

SEQ ID NO: 3192487 - RNA, 18 nt, Human
gucugacaggcaaugcug

SEQ ID NO: 3192488 - RNA, 15 nt, Human
gucugacaggcaaug

SEQ ID NO: 3192489 - RNA, 20 nt, Human
gucugacaggcaaugcuggc

SEQ ID NO: 3192490 - RNA, 23 nt, Human
gucugacaagguggucaacaaca

SEQ ID NO: 3192491 - RNA, 23 nt, Human
gucucuuuaaugucacaggcagg

SEQ ID NO: 3192492 - RNA, 17 nt, Human
gucucaaaaaaagaaaa

SEQ ID NO: 3192493 - RNA, 14 nt, Human
gucucaaaaaaaca

SEQ ID NO: 3192494 - RNA, 22 nt, Human
gucuauuucaucagaacagcug

SEQ ID NO: 3192495 - RNA, 20 nt, Human
gucuauuucaucagaacagc

SEQ ID NO: 3192496 - RNA, 15 nt, Human
gucugaaacauuuca

SEQ ID NO: 3192497 - RNA, 16 nt, Human
gucugaaacauuucau

SEQ ID NO: 3192498 - RNA, 17 nt, Human
gucugaaacauuucaua

SEQ ID NO: 3192499 - RNA, 18 nt, Human
gucucuuuuuuacaaagg

SEQ ID NO: 3192500 - RNA, 16 nt, Human
gucucuuuuuuacaaa

SEQ ID NO: 3192501 - RNA, 20 nt, Human
gucucuuuuuuacaaaggcu

SEQ ID NO: 3192502 - RNA, 15 nt, Human
gucucuuuuuuacaa

SEQ ID NO: 3192503 - RNA, 20 nt, Human
gucuauuuggauuauucuuu

SEQ ID NO: 3192504 - RNA, 17 nt, Human
aacuagggaagauaaua

SEQ ID NO: 3192505 - RNA, 17 nt, Human
aacuaaaauaauuuugu

SEQ ID NO: 3192506 - RNA, 19 nt, Human
aacuaaaauaauuuuguaa

SEQ ID NO: 3192507 - RNA, 12 nt, Human
aacuaaaaugua

SEQ ID NO: 3192508 - RNA, 13 nt, Human
aacuaaaauguau

SEQ ID NO: 3192509 - RNA, 15 nt, Human
aacuaaaauaauuuu

SEQ ID NO: 3192510 - RNA, 12 nt, Human
aacguggcugcu

SEQ ID NO: 3192511 - RNA, 13 nt, Human
aacguggcugcuu

SEQ ID NO: 3192512 - RNA, 20 nt, Human
aacguuugguucaaaugugu

SEQ ID NO: 3192513 - RNA, 19 nt, Human
aacuauguguuuuucucau

SEQ ID NO: 3192514 - RNA, 20 nt, Human
aacuauguguuuuucucaua

SEQ ID NO: 3192515 - RNA, 22 nt, Human
aacuauguguuuuucucauauu

SEQ ID NO: 3192516 - RNA, 23 nt, Human
aacuaguuuuuccuaucauguua

SEQ ID NO: 3192517 - RNA, 22 nt, Human
aacuaggucugauauucaaaug

SEQ ID NO: 3192518 - RNA, 16 nt, Human
aacuaaacuaguuuuu

SEQ ID NO: 3192519 - RNA, 19 nt, Human
aacuaaacuaguuuuuccu

SEQ ID NO: 3192520 - RNA, 15 nt, Human
aacuaggcuccuuca

SEQ ID NO: 3192521 - RNA, 16 nt, Human
aacuccaacauccacu

SEQ ID NO: 3192522 - RNA, 24 nt, Human
aacucauuuuuguuuucauuaucu

SEQ ID NO: 3192523 - RNA, 21 nt, Human
aacucauuuuuguuuucauua

SEQ ID NO: 3192524 - RNA, 18 nt, Human
aacuauguuuaaaguaau

SEQ ID NO: 3192525 - RNA, 17 nt, Human
aacuauguuuaaaguaa

SEQ ID NO: 3192526 - RNA, 15 nt, Human
aacuauguugauaaa

SEQ ID NO: 3192527 - RNA, 13 nt, Human
aacgucugugcca

SEQ ID NO: 3192528 - RNA, 21 nt, Human
aaccuucgccaccuggguucc

SEQ ID NO: 3192529 - RNA, 12 nt, Human
aacgugaaaaug

SEQ ID NO: 3192530 - RNA, 23 nt, Human
aacgugaugugcucaucagaaac

SEQ ID NO: 3192531 - RNA, 20 nt, Human
aacguggagaaucacaggcu

SEQ ID NO: 3192532 - RNA, 21 nt, Human
aaccugggaaagagauuuaaa

SEQ ID NO: 3192533 - RNA, 16 nt, Human
aaccugggaaagagau

SEQ ID NO: 3192534 - RNA, 16 nt, Human
gucuuucuugcucccu

SEQ ID NO: 3192535 - RNA, 15 nt, Human
gucuuucuucuucaa

SEQ ID NO: 3192536 - RNA, 19 nt, Human
gucuuucugggguuuuucu

SEQ ID NO: 3192537 - RNA, 12 nt, Human
gucuuucugggg

SEQ ID NO: 3192538 - RNA, 19 nt, Human
gucuuucuaagaaaucaag

SEQ ID NO: 3192539 - RNA, 10 nt, Human
gucuuuccca

SEQ ID NO: 3192540 - RNA, 22 nt, Human
guccccuguuuguuucugaaag

SEQ ID NO: 3192541 - RNA, 18 nt, Human
guccccuguuuguuucug

SEQ ID NO: 3192542 - RNA, 22 nt, Human
guccccagcccuuccucugcuc

SEQ ID NO: 3192543 - RNA, 23 nt, Human
guccccagaacucugccugcccu

SEQ ID NO: 3192544 - RNA, 19 nt, Human
gucccugguggcagcucac

SEQ ID NO: 3192545 - RNA, 18 nt, Human
gucccugguggcagcuca

SEQ ID NO: 3192546 - RNA, 18 nt, Human
gucccuuacgugaguccu

SEQ ID NO: 3192547 - RNA, 19 nt, Human
gucccuuacgugaguccug

SEQ ID NO: 3192548 - RNA, 22 nt, Human
guccccagacuccaccaagccu

SEQ ID NO: 3192549 - RNA, 22 nt, Human
guccccaccgcagacaggacca

SEQ ID NO: 3192550 - RNA, 18 nt, Human
guccccaccgcagacagg

SEQ ID NO: 3192551 - RNA, 17 nt, Human
guccccaccgcagacag

SEQ ID NO: 3192552 - RNA, 18 nt, Human
gucccaagguucugggug

SEQ ID NO: 3192553 - RNA, 17 nt, Human
gucccaagguucugggu

SEQ ID NO: 3192554 - RNA, 15 nt, Human
gucccaccccacaca

SEQ ID NO: 3192555 - RNA, 22 nt, Human
guccaugaagauguagaggaga

SEQ ID NO: 3192556 - RNA, 12 nt, Human
gucauuucugau

SEQ ID NO: 3192557 - RNA, 21 nt, Human
aacacucacauuuauucugcu

SEQ ID NO: 3192558 - RNA, 12 nt, Human
aacacucagcug

SEQ ID NO: 3192559 - RNA, 13 nt, Human
aacacucagcugu

SEQ ID NO: 3192560 - RNA, 14 nt, Human
aacacucagcuguu

SEQ ID NO: 3192561 - RNA, 19 nt, Human
aacacuguucucugcccuc

SEQ ID NO: 3192562 - RNA, 17 nt, Human
gucauuugagcagggcu

SEQ ID NO: 3192563 - RNA, 11 nt, Human
gucauuuccau

SEQ ID NO: 3192564 - RNA, 13 nt, Human
gucauuucauguc

SEQ ID NO: 3192565 - RNA, 22 nt, Human
gucauuuccauguaugcauaau

SEQ ID NO: 3192566 - RNA, 21 nt, Human
gucauuuccauguaugcauaa

SEQ ID NO: 3192567 - RNA, 18 nt, Human
gucauuuccauguaugca

SEQ ID NO: 3192568 - RNA, 12 nt, Human
gucauuuccaug

SEQ ID NO: 3192569 - RNA, 17 nt, Human
aacacuguucucugccc

SEQ ID NO: 3192570 - RNA, 18 nt, Human
aacacuguucucugcccu

SEQ ID NO: 3192571 - RNA, 16 nt, Human
aacacuguucucugcc

SEQ ID NO: 3192572 - RNA, 20 nt, Human
aacacagcaagggugauggg

SEQ ID NO: 3192573 - RNA, 18 nt, Human
aacacagcaagggugaug

SEQ ID NO: 3192574 - RNA, 22 nt, Human
aacacacagaaggggacugcca

SEQ ID NO: 3192575 - RNA, 19 nt, Human
aacacaaacgggcucagca

SEQ ID NO: 3192576 - RNA, 23 nt, Human
aaauuugaaacauugcuuuuaaa

SEQ ID NO: 3192577 - RNA, 20 nt, Human
aaauuugaaacauugcuuuu

SEQ ID NO: 3192578 - RNA, 16 nt, Human
aaauuugaaacauugc

SEQ ID NO: 3192579 - RNA, 15 nt, Human
aaauuugaaacauug

SEQ ID NO: 3192580 - RNA, 14 nt, Human
aaauuugaaacauu

SEQ ID NO: 3192581 - RNA, 13 nt, Human
aaauuugaaacau

SEQ ID NO: 3192582 - RNA, 12 nt, Human
aaauuucucugu

SEQ ID NO: 3192583 - RNA, 12 nt, Human
gucgccucugca

SEQ ID NO: 3192584 - RNA, 21 nt, Human
gucgccuuucagcaggcagcc

SEQ ID NO: 3192585 - RNA, 20 nt, Human
gucgccuuucagcaggcagc

SEQ ID NO: 3192586 - RNA, 14 nt, Human
gucuaccugagggg

SEQ ID NO: 3192587 - RNA, 13 nt, Human
gucuaccugaggg

SEQ ID NO: 3192588 - RNA, 15 nt, Human
gucuaccugaggggc

SEQ ID NO: 3192589 - RNA, 16 nt, Human
gucuaccugaggggcc

SEQ ID NO: 3192590 - RNA, 22 nt, Human
gucuaugggacucaaugcacug

SEQ ID NO: 3192591 - RNA, 15 nt, Human
gucuaugggacucaa

SEQ ID NO: 3192592 - RNA, 11 nt, Human
gucuauugucu

SEQ ID NO: 3192593 - RNA, 20 nt, Human
gucuagauuaauacucuauu

SEQ ID NO: 3192594 - RNA, 21 nt, Human
gucuagcguagugcagcaggg

SEQ ID NO: 3192595 - RNA, 22 nt, Human
gucuagcuaugcuguaucugug

SEQ ID NO: 3192596 - RNA, 16 nt, Human
gucgaggacagggagg

SEQ ID NO: 3192597 - RNA, 12 nt, Human
gucgaggcagga

SEQ ID NO: 3192598 - RNA, 19 nt, Human
guccugcugcaguugccag

SEQ ID NO: 3192599 - RNA, 17 nt, Human
guccugcugcaguugcc

SEQ ID NO: 3192600 - RNA, 16 nt, Human
guccuggcaugggaau

SEQ ID NO: 3192601 - RNA, 14 nt, Human
guccucuuuucuga

SEQ ID NO: 3192602 - RNA, 23 nt, Human
aacauguaauuaaguacuaugua

SEQ ID NO: 3192603 - RNA, 17 nt, Human
aacaugugaaaagaaua

SEQ ID NO: 3192604 - RNA, 16 nt, Human
aacauuccucaaaaug

SEQ ID NO: 3192605 - RNA, 18 nt, Human
aacauucaugcucauugc

SEQ ID NO: 3192606 - RNA, 17 nt, Human
aacauuauuacuuuucc

SEQ ID NO: 3192607 - RNA, 20 nt, Human
aacauuauuacuuuuccucu

SEQ ID NO: 3192608 - RNA, 24 nt, Human
aacauuggaagcagguuaaauguu

SEQ ID NO: 3192609 - RNA, 22 nt, Human
aacauugcauauaacuuauauu

SEQ ID NO: 3192610 - RNA, 19 nt, Human
aacauucuaucuacugauu

SEQ ID NO: 3192611 - RNA, 23 nt, Human
aacauuggaagcagguuaaaugu

SEQ ID NO: 3192612 - RNA, 22 nt, Human
aacauuggaagcagguuaaaug

SEQ ID NO: 3192613 - RNA, 16 nt, Human
aacauuggaagcaggu

SEQ ID NO: 3192614 - RNA, 12 nt, Human
aacauuggaagc

SEQ ID NO: 3192615 - RNA, 19 nt, Human
aacauugcuuuuaaaacua

SEQ ID NO: 3192616 - RNA, 17 nt, Human
aacauugcuuuuaaaac

SEQ ID NO: 3192617 - RNA, 15 nt, Human
aacauugcuuuuaaa

SEQ ID NO: 3192618 - RNA, 14 nt, Human
aacauugcuuuuaa

SEQ ID NO: 3192619 - RNA, 17 nt, Human
guccuccugcugccagu

SEQ ID NO: 3192620 - RNA, 16 nt, Human
guccuccugcugccag

SEQ ID NO: 3192621 - RNA, 15 nt, Human
guccuccugcugcca

SEQ ID NO: 3192622 - RNA, 14 nt, Human
guccuccugcugcc

SEQ ID NO: 3192623 - RNA, 17 nt, Human
aacauagccaaaaugug

SEQ ID NO: 3192624 - RNA, 21 nt, Human
aacauagcagaucuguuuugu

SEQ ID NO: 3192625 - RNA, 14 nt, Human
aacauaaaauacaa

SEQ ID NO: 3192626 - RNA, 13 nt, Human
aacagucucagga

SEQ ID NO: 3192627 - RNA, 17 nt, Human
guccgguuuacuuuaac

SEQ ID NO: 3192628 - RNA, 22 nt, Human
guccguaguaucagagaugucc

SEQ ID NO: 3192629 - RNA, 15 nt, Human
guccgguuuacuuua

SEQ ID NO: 3192630 - RNA, 20 nt, Human
gucccuugaacuacugggug

SEQ ID NO: 3192631 - RNA, 21 nt, Human
guccggucccugucccagugc

SEQ ID NO: 3192632 - RNA, 18 nt, Human
aaaucaugccaguauuuu

SEQ ID NO: 3192633 - RNA, 19 nt, Human
aaaucauauuuggaauaaa

SEQ ID NO: 3192634 - RNA, 19 nt, Human
guauucuaauaagcuaguu

SEQ ID NO: 3192635 - RNA, 22 nt, Human
guauucuaauaagcuaguugaa

SEQ ID NO: 3192636 - RNA, 14 nt, Human
guauucucauucuu

SEQ ID NO: 3192637 - RNA, 17 nt, Human
guauuguaggugguguu

SEQ ID NO: 3192638 - RNA, 10 nt, Human
guauuguaca

SEQ ID NO: 3192639 - RNA, 13 nt, Human
guauuguccuauu

SEQ ID NO: 3192640 - RNA, 21 nt, Human
guauuguccuauuaguguuau

SEQ ID NO: 3192641 - RNA, 11 nt, Human
guauucuuuuu

SEQ ID NO: 3192642 - RNA, 21 nt, Human
guauuuauaagaaaaauguga

SEQ ID NO: 3192643 - RNA, 22 nt, Human
guauuuauggguggauuuaucc

SEQ ID NO: 3192644 - RNA, 13 nt, Human
aaauguaguucau

SEQ ID NO: 3192645 - RNA, 16 nt, Human
guauuguuagauguuu

SEQ ID NO: 3192646 - RNA, 17 nt, Human
guauuguuagauguuug

SEQ ID NO: 3192647 - RNA, 21 nt, Human
aaaugucucuuuaaugucaca

SEQ ID NO: 3192648 - RNA, 14 nt, Human
aaaugucuuccugg

SEQ ID NO: 3192649 - RNA, 24 nt, Human
aaaugucuaguuguaacaccauga

SEQ ID NO: 3192650 - RNA, 15 nt, Human
aaauguaucuaagaa

SEQ ID NO: 3192651 - RNA, 20 nt, Human
aaauguaucuaagaauaaua

SEQ ID NO: 3192652 - RNA, 16 nt, Human
aaauucacaaaguuaa

SEQ ID NO: 3192653 - RNA, 19 nt, Human
aaauucccaaccugcucau

SEQ ID NO: 3192654 - RNA, 13 nt, Human
aaauuccagaaug

SEQ ID NO: 3192655 - RNA, 14 nt, Human
aaauucuagauuac

SEQ ID NO: 3192656 - RNA, 18 nt, Human
aaauuuaaaaagcccaac

SEQ ID NO: 3192657 - RNA, 17 nt, Human
aaauuuaaaaguaaaau

SEQ ID NO: 3192658 - RNA, 18 nt, Human
aaauuuaaaaguaaaaug

SEQ ID NO: 3192659 - RNA, 19 nt, Human
aaauuuaaaaguaaaaugu

SEQ ID NO: 3192660 - RNA, 22 nt, Human
aaauuuaaaaguaaaaugucuu

SEQ ID NO: 3192661 - RNA, 18 nt, Human
aaauugucagaugcugug

SEQ ID NO: 3192662 - RNA, 19 nt, Human
aaauugucaccugcuucuc

SEQ ID NO: 3192663 - RNA, 18 nt, Human
aaauuguaucucauuacu

SEQ ID NO: 3192664 - RNA, 21 nt, Human
aaauuaugugaccauaaugua

SEQ ID NO: 3192665 - RNA, 14 nt, Human
aaauucaaagcaug

SEQ ID NO: 3192666 - RNA, 21 nt, Human
aaauucaaagcauggacauuu

SEQ ID NO: 3192667 - RNA, 17 nt, Human
aaauucaauaguaauau

SEQ ID NO: 3192668 - RNA, 14 nt, Human
aaauucaauaguaa

SEQ ID NO: 3192669 - RNA, 14 nt, Human
aaauuaugguaaaa

SEQ ID NO: 3192670 - RNA, 21 nt, Human
aaauuaugcuaagaauuuuuu

SEQ ID NO: 3192671 - RNA, 17 nt, Human
aaauuaugcuaagaauu

SEQ ID NO: 3192672 - RNA, 19 nt, Human
aaauuaggauuucaugauu

SEQ ID NO: 3192673 - RNA, 18 nt, Human
aaauuaggauuucaugau

SEQ ID NO: 3192674 - RNA, 15 nt, Human
aaaugugcuuuuaaa

SEQ ID NO: 3192675 - RNA, 18 nt, Human
aaaugugccuucauuuuu

SEQ ID NO: 3192676 - RNA, 14 nt, Human
aaauuaaucugggc

SEQ ID NO: 3192677 - RNA, 15 nt, Human
aaauguggcuccugg

SEQ ID NO: 3192678 - RNA, 14 nt, Human
aaauuaauaucuuu

SEQ ID NO: 3192679 - RNA, 17 nt, Human
aaauuaauaucuuucug

SEQ ID NO: 3192680 - RNA, 13 nt, Human
aaauuaauugugu

SEQ ID NO: 3192681 - RNA, 22 nt, Human
aaauuagccuaagauauacuug

SEQ ID NO: 3192682 - RNA, 21 nt, Human
aaauuagccuaagauauacuu

SEQ ID NO: 3192683 - RNA, 20 nt, Human
aaauuagccuaagauauacu

SEQ ID NO: 3192684 - RNA, 19 nt, Human
aaauuagccuaagauauac

SEQ ID NO: 3192685 - RNA, 18 nt, Human
aaauuacauuuguaauuu

SEQ ID NO: 3192686 - RNA, 16 nt, Human
aaauuacauuuguaau

SEQ ID NO: 3192687 - RNA, 15 nt, Human
aaauuacauuuguaa

SEQ ID NO: 3192688 - RNA, 13 nt, Human
aaauuacauuugu

SEQ ID NO: 3192689 - RNA, 23 nt, Human
aaauuacauuuguaauuuaaggu

SEQ ID NO: 3192690 - RNA, 20 nt, Human
aaauuacauuuguaauuuaa

SEQ ID NO: 3192691 - RNA, 14 nt, Human
aaauuacauauacu

SEQ ID NO: 3192692 - RNA, 12 nt, Human
aaauuacauuug

SEQ ID NO: 3192693 - RNA, 13 nt, Human
aaauuacauuucg

SEQ ID NO: 3192694 - RNA, 18 nt, Human
aaauuaauugugugaacu

SEQ ID NO: 3192695 - RNA, 15 nt, Human
aaauuaauuguguga

SEQ ID NO: 3192696 - RNA, 16 nt, Human
aaauuaauugugugaa

SEQ ID NO: 3192697 - RNA, 13 nt, Human
aaauuacaacuaa

SEQ ID NO: 3192698 - RNA, 12 nt, Human
aaauuacaacua

SEQ ID NO: 3192699 - RNA, 20 nt, Human
gucacaggaaguagaggagg

SEQ ID NO: 3192700 - RNA, 18 nt, Human
gucacaggacucugccuc

SEQ ID NO: 3192701 - RNA, 17 nt, Human
gucacaggacucugccu

SEQ ID NO: 3192702 - RNA, 16 nt, Human
gucacaggagggaggg

SEQ ID NO: 3192703 - RNA, 19 nt, Human
gucacaggacucugccucc

SEQ ID NO: 3192704 - RNA, 22 nt, Human
gucaccaaaucagcugcuacua

SEQ ID NO: 3192705 - RNA, 22 nt, Human
gucacaucccaccccauccucc

SEQ ID NO: 3192706 - RNA, 16 nt, Human
gucacaguaaaaauaa

SEQ ID NO: 3192707 - RNA, 20 nt, Human
gucacaguaaaaauaaaaua

SEQ ID NO: 3192708 - RNA, 22 nt, Human
gucacaguaaaaauaaaauacu

SEQ ID NO: 3192709 - RNA, 21 nt, Human
gucaauuuuguuauguauauu

SEQ ID NO: 3192710 - RNA, 13 nt, Human
gucacaggaagua

SEQ ID NO: 3192711 - RNA, 15 nt, Human
gucacaggaaguaga

SEQ ID NO: 3192712 - RNA, 22 nt, Human
gucaauuacaggaaguacugga

SEQ ID NO: 3192713 - RNA, 16 nt, Human
gucaauuacaggaagu

SEQ ID NO: 3192714 - RNA, 23 nt, Human
gucacugcacagugcaucucagc

SEQ ID NO: 3192715 - RNA, 20 nt, Human
gucacugcacagugcaucuc

SEQ ID NO: 3192716 - RNA, 17 nt, Human
gucacugagacagcccg

SEQ ID NO: 3192717 - RNA, 18 nt, Human
gucacugagacagcccgg

SEQ ID NO: 3192718 - RNA, 21 nt, Human
gucacugagacagcccgggcu

SEQ ID NO: 3192719 - RNA, 23 nt, Human
gucacugagacagcccgggcucu

SEQ ID NO: 3192720 - RNA, 22 nt, Human
gucacucuggcagcucagagag

SEQ ID NO: 3192721 - RNA, 14 nt, Human
gucacugagacagc

SEQ ID NO: 3192722 - RNA, 15 nt, Human
gucacugagacagcc

SEQ ID NO: 3192723 - RNA, 16 nt, Human
gucacugagacagccc

SEQ ID NO: 3192724 - RNA, 23 nt, Human
gucacucuggcagcucagagagg

SEQ ID NO: 3192725 - RNA, 22 nt, Human
gucaccaaauagugugaaauau

SEQ ID NO: 3192726 - RNA, 15 nt, Human
gucaccaagcccagu

SEQ ID NO: 3192727 - RNA, 12 nt, Human
gucaccaagccc

SEQ ID NO: 3192728 - RNA, 11 nt, Human
gucacuuuuag

SEQ ID NO: 3192729 - RNA, 15 nt, Human
gucagaaacuaaaac

SEQ ID NO: 3192730 - RNA, 17 nt, Human
gucacuuuguuuuacug

SEQ ID NO: 3192731 - RNA, 19 nt, Human
gucacuucuucuguccaag

SEQ ID NO: 3192732 - RNA, 13 nt, Human
gucacuucuucug

SEQ ID NO: 3192733 - RNA, 17 nt, Human
gucacuucuucugucca

SEQ ID NO: 3192734 - RNA, 14 nt, Human
gucacuucuucugu

SEQ ID NO: 3192735 - RNA, 21 nt, Human
gucagaaguuucugccgcagc

SEQ ID NO: 3192736 - RNA, 22 nt, Human
gucagaagagagggugaguccu

SEQ ID NO: 3192737 - RNA, 22 nt, Human
gucacugcugcuucauguuugc

SEQ ID NO: 3192738 - RNA, 22 nt, Human
gucacuggggcccaagagucug

SEQ ID NO: 3192739 - RNA, 17 nt, Human
gucacuggggcccaaga

SEQ ID NO: 3192740 - RNA, 16 nt, Human
gucaguguagaucaac

SEQ ID NO: 3192741 - RNA, 23 nt, Human
gucagucgccuuucagcaggcag

SEQ ID NO: 3192742 - RNA, 14 nt, Human
gucagucgccuuuc

SEQ ID NO: 3192743 - RNA, 21 nt, Human
gucaguccaagggguccccuc

SEQ ID NO: 3192744 - RNA, 15 nt, Human
gucagggugagccca

SEQ ID NO: 3192745 - RNA, 18 nt, Human
gucagguugacaggaggu

SEQ ID NO: 3192746 - RNA, 13 nt, Human
gucagguugacag

SEQ ID NO: 3192747 - RNA, 22 nt, Human
gucagguggggcagcuugaggg

SEQ ID NO: 3192748 - RNA, 18 nt, Human
gucagguggggcagcuug

SEQ ID NO: 3192749 - RNA, 17 nt, Human
gucagguggggcagcuu

SEQ ID NO: 3192750 - RNA, 16 nt, Human
gucagguggggcagcu

SEQ ID NO: 3192751 - RNA, 17 nt, Human
gucaggaggcagaagga

SEQ ID NO: 3192752 - RNA, 15 nt, Human
gucaggaggcagaag

SEQ ID NO: 3192753 - RNA, 21 nt, Human
caaccgggaugggagccgggc

SEQ ID NO: 3192754 - RNA, 14 nt, Human
caaccuccugggcu

SEQ ID NO: 3192755 - RNA, 15 nt, Human
caaccuccugggcua

SEQ ID NO: 3192756 - RNA, 13 nt, Human
caaccucgcucca

SEQ ID NO: 3192757 - RNA, 17 nt, Human
caaccucgcuccaacuc

SEQ ID NO: 3192758 - RNA, 16 nt, Human
caaccucgcuccaacu

SEQ ID NO: 3192759 - RNA, 20 nt, Human
caaccucuaccuccuggguu

SEQ ID NO: 3192760 - RNA, 21 nt, Human
caaccucgcuccaacuccaac

SEQ ID NO: 3192761 - RNA, 20 nt, Human
caaccucgcuccaacuccaa

SEQ ID NO: 3192762 - RNA, 19 nt, Human
caaccucuagaauuuuaag

SEQ ID NO: 3192763 - RNA, 13 nt, Human
caacgucugugcc

SEQ ID NO: 3192764 - RNA, 14 nt, Human
caacgucugugcca

SEQ ID NO: 3192765 - RNA, 17 nt, Human
caacugaccagccucca

SEQ ID NO: 3192766 - RNA, 15 nt, Human
caacugaccagccuc

SEQ ID NO: 3192767 - RNA, 20 nt, Human
caaccuguucugcuuuccuc

SEQ ID NO: 3192768 - RNA, 19 nt, Human
caaccuucgccaccugggu

SEQ ID NO: 3192769 - RNA, 14 nt, Human
caaccuucaagcug

SEQ ID NO: 3192770 - RNA, 13 nt, Human
caaccuucauuua

SEQ ID NO: 3192771 - RNA, 14 nt, Human
caacggcagugaag

SEQ ID NO: 3192772 - RNA, 22 nt, Human
caaccccuucgcuccugugucu

SEQ ID NO: 3192773 - RNA, 20 nt, Human
caacacucauugaccugagg

SEQ ID NO: 3192774 - RNA, 22 nt, Human
caacacucauugaccugaggcc

SEQ ID NO: 3192775 - RNA, 18 nt, Human
caacacucauugaccuga

SEQ ID NO: 3192776 - RNA, 22 nt, Human
caacacucacauuuauucugcu

SEQ ID NO: 3192777 - RNA, 13 nt, Human
caacccucagagc

SEQ ID NO: 3192778 - RNA, 17 nt, Human
caacccuggcacccagg

SEQ ID NO: 3192779 - RNA, 16 nt, Human
caagaggcugcagcca

SEQ ID NO: 3192780 - RNA, 14 nt, Human
caagaggcugcagc

SEQ ID NO: 3192781 - RNA, 16 nt, Human
caagagcccaggccuc

SEQ ID NO: 3192782 - RNA, 13 nt, Human
caagagggcacug

SEQ ID NO: 3192783 - RNA, 17 nt, Human
caagcaccuccugccuc

SEQ ID NO: 3192784 - RNA, 16 nt, Human
caagcaccuccugccu

SEQ ID NO: 3192785 - RNA, 15 nt, Human
caagcaccuccugcc

SEQ ID NO: 3192786 - RNA, 15 nt, Human
caagagggcacuggu

SEQ ID NO: 3192787 - RNA, 14 nt, Human
caagagggcacugg

SEQ ID NO: 3192788 - RNA, 18 nt, Human
caagacucuuuggacacu

SEQ ID NO: 3192789 - RNA, 13 nt, Human
caagagcccaggc

SEQ ID NO: 3192790 - RNA, 14 nt, Human
caagagcccaggcc

SEQ ID NO: 3192791 - RNA, 15 nt, Human
caagagcccaggccu

SEQ ID NO: 3192792 - RNA, 23 nt, Human
caagacgcugugcugcccugccc

SEQ ID NO: 3192793 - RNA, 15 nt, Human
caagacgcugugcug

SEQ ID NO: 3192794 - RNA, 18 nt, Human
caagacgcugugcugccc

SEQ ID NO: 3192795 - RNA, 17 nt, Human
caagaagaauuugaaga

SEQ ID NO: 3192796 - RNA, 16 nt, Human
caacuuuuuuuuuccc

SEQ ID NO: 3192797 - RNA, 17 nt, Human
caacuuuuuuuucuuuu

SEQ ID NO: 3192798 - RNA, 20 nt, Human
caagaacacagcccugcuuc

SEQ ID NO: 3192799 - RNA, 19 nt, Human
caacugaccagccuccaug

SEQ ID NO: 3192800 - RNA, 15 nt, Human
caacuuuuuuuucuu

SEQ ID NO: 3192801 - RNA, 17 nt, Human
caagaccuucuccuuca

SEQ ID NO: 3192802 - RNA, 18 nt, Human
caagaccuucuccuucac

SEQ ID NO: 3192803 - RNA, 16 nt, Human
caagacgcugugcugc

SEQ ID NO: 3192804 - RNA, 17 nt, Human
caagacgcugugcugcc

SEQ ID NO: 3192805 - RNA, 14 nt, Human
caagaccuucuccu

SEQ ID NO: 3192806 - RNA, 16 nt, Human
caagaccuucuccuuc

SEQ ID NO: 3192807 - RNA, 20 nt, Human
caagaacuuuccaggaaggc

SEQ ID NO: 3192808 - RNA, 13 nt, Human
caagaacuuguuu

SEQ ID NO: 3192809 - RNA, 17 nt, Human
caagaacuuguuuaaua

SEQ ID NO: 3192810 - RNA, 15 nt, Human
caagaacuuguuuaa

SEQ ID NO: 3192811 - RNA, 14 nt, Human
caagaacuuguuua

SEQ ID NO: 3192812 - RNA, 17 nt, Human
caagccguggcuucccg

SEQ ID NO: 3192813 - RNA, 22 nt, Human
caagccaccaacauacucccau

SEQ ID NO: 3192814 - RNA, 21 nt, Human
caagccaccagaugugacagu

SEQ ID NO: 3192815 - RNA, 14 nt, Human
caagcaccuccugc

SEQ ID NO: 3192816 - RNA, 14 nt, Human
caagcaggacaugg

SEQ ID NO: 3192817 - RNA, 18 nt, Human
caagcaggacauggacaa

SEQ ID NO: 3192818 - RNA, 12 nt, Human
caagcaggaggc

SEQ ID NO: 3192819 - RNA, 13 nt, Human
caagcaggaggcu

SEQ ID NO: 3192820 - RNA, 19 nt, Human
caagcgauucuucugcuuc

SEQ ID NO: 3192821 - RNA, 18 nt, Human
caagccguggcuucccgc

SEQ ID NO: 3192822 - RNA, 12 nt, Human
caagccagcaag

SEQ ID NO: 3192823 - RNA, 22 nt, Human
caagcgauucuucugcuucagc

SEQ ID NO: 3192824 - RNA, 20 nt, Human
caagcgauucuucugcuuca

SEQ ID NO: 3192825 - RNA, 14 nt, Human
caagcgcccuggcc

SEQ ID NO: 3192826 - RNA, 15 nt, Human
caagccuggaaaaaa

SEQ ID NO: 3192827 - RNA, 14 nt, Human
caagccuggcaagg

SEQ ID NO: 3192828 - RNA, 17 nt, Human
caagcuggcuuacacug

SEQ ID NO: 3192829 - RNA, 16 nt, Human
caagcgcccuggcccc

SEQ ID NO: 3192830 - RNA, 15 nt, Human
caagcgcccuggccc

SEQ ID NO: 3192831 - RNA, 17 nt, Human
caaggcugauuaaacca

SEQ ID NO: 3192832 - RNA, 22 nt, Human
caaggacugcagggacugccag

SEQ ID NO: 3192833 - RNA, 21 nt, Human
caaggacagaaggcuccugcc

SEQ ID NO: 3192834 - RNA, 14 nt, Human
caaggagccaaaca

SEQ ID NO: 3192835 - RNA, 18 nt, Human
caaggacagaaggcuccu

SEQ ID NO: 3192836 - RNA, 15 nt, Human
caaggacugcaggga

SEQ ID NO: 3192837 - RNA, 17 nt, Human
caaggaagggauguauu

SEQ ID NO: 3192838 - RNA, 18 nt, Human
caaggaagggauguauuu

SEQ ID NO: 3192839 - RNA, 20 nt, Human
caaggaagggauguauuugu

SEQ ID NO: 3192840 - RNA, 19 nt, Human
caagcuggucccacucagu

SEQ ID NO: 3192841 - RNA, 17 nt, Human
caagcuggucccacuca

SEQ ID NO: 3192842 - RNA, 18 nt, Human
caaggggcccaaauucuu

SEQ ID NO: 3192843 - RNA, 17 nt, Human
caaggggcccaaauucu

SEQ ID NO: 3192844 - RNA, 12 nt, Human
caaggcugcagu

SEQ ID NO: 3192845 - RNA, 23 nt, Human
caaggcugucaauuacaggaagu

SEQ ID NO: 3192846 - RNA, 21 nt, Human
caaggcugucaauuacaggaa

SEQ ID NO: 3192847 - RNA, 22 nt, Human
caaggcugagacagugaauuug

SEQ ID NO: 3192848 - RNA, 14 nt, Human
caaguccucuuuuc

SEQ ID NO: 3192849 - RNA, 20 nt, Human
caagucccuguaauuguugu

SEQ ID NO: 3192850 - RNA, 11 nt, Human
caagucccugu

SEQ ID NO: 3192851 - RNA, 18 nt, Human
caaggguagggugggccu

SEQ ID NO: 3192852 - RNA, 20 nt, Human
caagggguccccuccaggag

SEQ ID NO: 3192853 - RNA, 18 nt, Human
caaguggcauaaagcaua

SEQ ID NO: 3192854 - RNA, 17 nt, Human
caaguggcauaaagcau

SEQ ID NO: 3192855 - RNA, 19 nt, Human
caaguggcucccacacccu

SEQ ID NO: 3192856 - RNA, 23 nt, Human
caaguggcaaagcuguucuuccu

SEQ ID NO: 3192857 - RNA, 20 nt, Human
caaguggcaaagcuguucuu

SEQ ID NO: 3192858 - RNA, 21 nt, Human
caaguggagccugacagccag

SEQ ID NO: 3192859 - RNA, 18 nt, Human
caaguggagccugacagc

SEQ ID NO: 3192860 - RNA, 14 nt, Human
caaguuaaauaaau

SEQ ID NO: 3192861 - RNA, 14 nt, Human
caagugugaauacu

SEQ ID NO: 3192862 - RNA, 15 nt, Human
caagugugaauacug

SEQ ID NO: 3192863 - RNA, 16 nt, Human
caagugugaauacugc

SEQ ID NO: 3192864 - RNA, 17 nt, Human
caagugagagcugggug

SEQ ID NO: 3192865 - RNA, 15 nt, Human
caagugagagcuggg

SEQ ID NO: 3192866 - RNA, 14 nt, Human
caagugagagcugg

SEQ ID NO: 3192867 - RNA, 21 nt, Human
caaguccucuuuucugagagg

SEQ ID NO: 3192868 - RNA, 19 nt, Human
caagugagacccugucuca

SEQ ID NO: 3192869 - RNA, 18 nt, Human
caagugagagcugggugu

SEQ ID NO: 3192870 - RNA, 17 nt, Human
caagugauucucaugcc

SEQ ID NO: 3192871 - RNA, 18 nt, Human
caagugauucucaugccu

SEQ ID NO: 3192872 - RNA, 20 nt, Human
caagugauucucaugccuca

SEQ ID NO: 3192873 - RNA, 19 nt, Human
caauguagaggggaaaaga

SEQ ID NO: 3192874 - RNA, 22 nt, Human
caaugugacuuaaugccacuaa

SEQ ID NO: 3192875 - RNA, 18 nt, Human
caaugucaaugaacaagc

SEQ ID NO: 3192876 - RNA, 23 nt, Human
caauggugaacugucauuacaga

SEQ ID NO: 3192877 - RNA, 14 nt, Human
caaugguaguuucu

SEQ ID NO: 3192878 - RNA, 16 nt, Human
caaugguaguuucugu

SEQ ID NO: 3192879 - RNA, 17 nt, Human
caaugguaguuucugug

SEQ ID NO: 3192880 - RNA, 20 nt, Human
caaugguaguuucugugguu

SEQ ID NO: 3192881 - RNA, 16 nt, Human
caaugguaauuauaaa

SEQ ID NO: 3192882 - RNA, 15 nt, Human
caaugguaauuauaa

SEQ ID NO: 3192883 - RNA, 20 nt, Human
caaugcacuuuguucuggcu

SEQ ID NO: 3192884 - RNA, 21 nt, Human
caaugcacuuuguucuggcuc

SEQ ID NO: 3192885 - RNA, 15 nt, Human
caaugggagcucaug

SEQ ID NO: 3192886 - RNA, 17 nt, Human
caaugcacuuuguucug

SEQ ID NO: 3192887 - RNA, 15 nt, Human
caaugugauaaaacc

SEQ ID NO: 3192888 - RNA, 17 nt, Human
caaugugauaaaacccc

SEQ ID NO: 3192889 - RNA, 22 nt, Human
caaugugauauaaacagcuucu

SEQ ID NO: 3192890 - RNA, 20 nt, Human
caaugugauauaaacagcuu

SEQ ID NO: 3192891 - RNA, 18 nt, Human
caaugugauauaaacagc

SEQ ID NO: 3192892 - RNA, 16 nt, Human
caaugugacuuugaaa

SEQ ID NO: 3192893 - RNA, 14 nt, Human
caauuaauugucuu

SEQ ID NO: 3192894 - RNA, 18 nt, Human
caauuaauugucuugcac

SEQ ID NO: 3192895 - RNA, 16 nt, Human
caauuacaggaaguac

SEQ ID NO: 3192896 - RNA, 23 nt, Human
caauucucauuugucacacacuu

SEQ ID NO: 3192897 - RNA, 13 nt, Human
caauucuccugcc

SEQ ID NO: 3192898 - RNA, 19 nt, Human
caauucucccgggacucug

SEQ ID NO: 3192899 - RNA, 20 nt, Human
caauucucccgggacucugc

SEQ ID NO: 3192900 - RNA, 14 nt, Human
caauucuccugccu

SEQ ID NO: 3192901 - RNA, 15 nt, Human
caauucuccugccuc

SEQ ID NO: 3192902 - RNA, 13 nt, Human
caauacagugcuc

SEQ ID NO: 3192903 - RNA, 12 nt, Human
caauaggaaaaa

SEQ ID NO: 3192904 - RNA, 16 nt, Human
caauagcguguguaga

SEQ ID NO: 3192905 - RNA, 18 nt, Human
caauagcguguguagaua

SEQ ID NO: 3192906 - RNA, 21 nt, Human
caauagcccaggauauauuuu

SEQ ID NO: 3192907 - RNA, 13 nt, Human
caauaggaaaaac

SEQ ID NO: 3192908 - RNA, 18 nt, Human
caauaauaauaccucccu

SEQ ID NO: 3192909 - RNA, 16 nt, Human
caagugugcuaaaaau

SEQ ID NO: 3192910 - RNA, 19 nt, Human
caagugugcuaaaaaugag

SEQ ID NO: 3192911 - RNA, 13 nt, Human
caaguuaagauuc

SEQ ID NO: 3192912 - RNA, 15 nt, Human
caaguuaagauucuu

SEQ ID NO: 3192913 - RNA, 20 nt, Human
caauaauuuguggugauuug

SEQ ID NO: 3192914 - RNA, 18 nt, Human
caauaauuuguggugauu

SEQ ID NO: 3192915 - RNA, 21 nt, Human
caauaauuauuugucucagau

SEQ ID NO: 3192916 - RNA, 17 nt, Human
caauauucgcuguguca

SEQ ID NO: 3192917 - RNA, 13 nt, Human
caauauauuuugu

SEQ ID NO: 3192918 - RNA, 15 nt, Human
caauauauuuuguau

SEQ ID NO: 3192919 - RNA, 14 nt, Human
caauauauuuugua

SEQ ID NO: 3192920 - RNA, 14 nt, Human
caauauaagagcuu

SEQ ID NO: 3192921 - RNA, 22 nt, Human
caauauauuuuguaugcaagca

SEQ ID NO: 3192922 - RNA, 16 nt, Human
caauauauuuuguaug

SEQ ID NO: 3192923 - RNA, 17 nt, Human
caauauucucuguacau

SEQ ID NO: 3192924 - RNA, 16 nt, Human
caauauucucuguaca

SEQ ID NO: 3192925 - RNA, 15 nt, Human
caauauucucuguac

SEQ ID NO: 3192926 - RNA, 12 nt, Human
caauauucucug

SEQ ID NO: 3192927 - RNA, 22 nt, Human
caauauucucuguacauauuag

SEQ ID NO: 3192928 - RNA, 19 nt, Human
caauauucucuguacauau

SEQ ID NO: 3192929 - RNA, 18 nt, Human
caauauucucuguacaua

SEQ ID NO: 3192930 - RNA, 22 nt, Human
caaucucguauagaagucuuca

SEQ ID NO: 3192931 - RNA, 21 nt, Human
caaugaccuuucaauaggaaa

SEQ ID NO: 3192932 - RNA, 15 nt, Human
caaucuuacuuugua

SEQ ID NO: 3192933 - RNA, 14 nt, Human
caaucuuacuuugu

SEQ ID NO: 3192934 - RNA, 23 nt, Human
caaugaccuuucaauaggaaaaa

SEQ ID NO: 3192935 - RNA, 19 nt, Human
caaucuggggaaauaauaa

SEQ ID NO: 3192936 - RNA, 20 nt, Human
caaucuggaugccucauuau

SEQ ID NO: 3192937 - RNA, 18 nt, Human
caaucuguaaaacuaaga

SEQ ID NO: 3192938 - RNA, 16 nt, Human
caaaaauucucaguuc

SEQ ID NO: 3192939 - RNA, 11 nt, Human
caaaacaaaaa

SEQ ID NO: 3192940 - RNA, 16 nt, Human
caaaacaaaaagaugu

SEQ ID NO: 3192941 - RNA, 18 nt, Human
caaaacaaaaagaugucu

SEQ ID NO: 3192942 - RNA, 16 nt, Human
caaaacaaaggccuaa

SEQ ID NO: 3192943 - RNA, 15 nt, Human
caaaacaaaggccua

SEQ ID NO: 3192944 - RNA, 12 nt, Human
caaaacaaaggc

SEQ ID NO: 3192945 - RNA, 20 nt, Human
caaaaauccaaauauuguua

SEQ ID NO: 3192946 - RNA, 15 nt, Human
caaaaauccaaauau

SEQ ID NO: 3192947 - RNA, 20 nt, Human
caaaaaucugaagauuguuu

SEQ ID NO: 3192948 - RNA, 18 nt, Human
caaaaaucugaagauugu

SEQ ID NO: 3192949 - RNA, 17 nt, Human
caaaaaucugaagauug

SEQ ID NO: 3192950 - RNA, 15 nt, Human
caaaaaucugaagau

SEQ ID NO: 3192951 - RNA, 19 nt, Human
caaaaauguuaagcaucua

SEQ ID NO: 3192952 - RNA, 21 nt, Human
caaaaaucugaagauuguuua

SEQ ID NO: 3192953 - RNA, 16 nt, Human
caaaaauaaucaugaa

SEQ ID NO: 3192954 - RNA, 14 nt, Human
caaaaaguauauua

SEQ ID NO: 3192955 - RNA, 13 nt, Human
caaaaaggcuuau

SEQ ID NO: 3192956 - RNA, 15 nt, Human
caaaaagcuucugug

SEQ ID NO: 3192957 - RNA, 14 nt, Human
caaaaagcuucugu

SEQ ID NO: 3192958 - RNA, 23 nt, Human
caaaacuucagacauagaauuaa

SEQ ID NO: 3192959 - RNA, 17 nt, Human
caaaacuuuaaaccugu

SEQ ID NO: 3192960 - RNA, 23 nt, Human
caaaacuuuaucagggaaacuaa

SEQ ID NO: 3192961 - RNA, 17 nt, Human
caaaauaaaaaugaggu

SEQ ID NO: 3192962 - RNA, 12 nt, Human
caaaagaaaaac

SEQ ID NO: 3192963 - RNA, 20 nt, Human
caaaacucuccucugcugcu

SEQ ID NO: 3192964 - RNA, 21 nt, Human
caaaacucuccucugcugcug

SEQ ID NO: 3192965 - RNA, 22 nt, Human
caaaacucuccucugcugcugg

SEQ ID NO: 3192966 - RNA, 19 nt, Human
caaaacucuccucugcugc

SEQ ID NO: 3192967 - RNA, 21 nt, Human
caaaacccagcugcaccccuu

SEQ ID NO: 3192968 - RNA, 18 nt, Human
caaaacccagcugcaccc

SEQ ID NO: 3192969 - RNA, 15 nt, Human
caaaacccagcugca

SEQ ID NO: 3192970 - RNA, 14 nt, Human
caaaacccagcugc

SEQ ID NO: 3192971 - RNA, 13 nt, Human
caaaacccagcug

SEQ ID NO: 3192972 - RNA, 22 nt, Human
caaaacaaaggccuaauucuau

SEQ ID NO: 3192973 - RNA, 20 nt, Human
caaaacaccugacagccccu

SEQ ID NO: 3192974 - RNA, 23 nt, Human
caaaaccaaaaguuauuaaaauu

SEQ ID NO: 3192975 - RNA, 18 nt, Human
caaaaccaaaaguuauua

SEQ ID NO: 3192976 - RNA, 17 nt, Human
caaaaccaaaaguuauu

SEQ ID NO: 3192977 - RNA, 13 nt, Human
auuuuccuuuaau

SEQ ID NO: 3192978 - RNA, 23 nt, Human
auuuuccuuuaauaugaaauuuu

SEQ ID NO: 3192979 - RNA, 15 nt, Human
auuuucuaaaguacu

SEQ ID NO: 3192980 - RNA, 15 nt, Human
auuuucuaaaagcuu

SEQ ID NO: 3192981 - RNA, 19 nt, Human
auuuucuaaaagcuuucau

SEQ ID NO: 3192982 - RNA, 21 nt, Human
auuuucuaaaagcuuucaugu

SEQ ID NO: 3192983 - RNA, 20 nt, Human
auuuucuaaaguacugagca

SEQ ID NO: 3192984 - RNA, 16 nt, Human
auuuucuaaaguacug

SEQ ID NO: 3192985 - RNA, 21 nt, Human
auuuugggguacccacugcuc

SEQ ID NO: 3192986 - RNA, 21 nt, Human
auuuuggccaugaaagcaugg

SEQ ID NO: 3192987 - RNA, 21 nt, Human
auuuuggcgaaucucaaaauu

SEQ ID NO: 3192988 - RNA, 22 nt, Human
auuuuggcgaaucucaaaauua

SEQ ID NO: 3192989 - RNA, 17 nt, Human
auuuuggagagauagga

SEQ ID NO: 3192990 - RNA, 19 nt, Human
auuuuggagagauaggaag

SEQ ID NO: 3192991 - RNA, 18 nt, Human
auuuuggagagauaggaa

SEQ ID NO: 3192992 - RNA, 16 nt, Human
caaaaaaugcuugcuu

SEQ ID NO: 3192993 - RNA, 17 nt, Human
auuuuggugucuuucuc

SEQ ID NO: 3192994 - RNA, 10 nt, Human
auuuuggucu

SEQ ID NO: 3192995 - RNA, 23 nt, Human
auuuugggguacccacugcucug

SEQ ID NO: 3192996 - RNA, 22 nt, Human
auuuugggguacccacugcucu

SEQ ID NO: 3192997 - RNA, 20 nt, Human
auuuuggagagauaggaagg

SEQ ID NO: 3192998 - RNA, 14 nt, Human
caaaaacacagcaa

SEQ ID NO: 3192999 - RNA, 13 nt, Human
caaaaacacagca

SEQ ID NO: 3193000 - RNA, 12 nt, Human
auuuuguaaaau

SEQ ID NO: 3193001 - RNA, 14 nt, Human
auuuuguaaaaugu

SEQ ID NO: 3193002 - RNA, 17 nt, Human
auuuuguaaaauguauu

SEQ ID NO: 3193003 - RNA, 18 nt, Human
auuuuguaaaauguauua

SEQ ID NO: 3193004 - RNA, 19 nt, Human
auuuuguaaaauguauuau

SEQ ID NO: 3193005 - RNA, 21 nt, Human
auuuuguaaaauguauuaugu

SEQ ID NO: 3193006 - RNA, 17 nt, Human
caaaaacacagcaaggg

SEQ ID NO: 3193007 - RNA, 15 nt, Human
caaaaacacagcaag

SEQ ID NO: 3193008 - RNA, 13 nt, Human
caaaaaggcagga

SEQ ID NO: 3193009 - RNA, 23 nt, Human
caaaaagauaccuuaaaauuuga

SEQ ID NO: 3193010 - RNA, 22 nt, Human
caaaaagauaccuuaaaauuug

SEQ ID NO: 3193011 - RNA, 20 nt, Human
caaaaagauaccuuaaaauu

SEQ ID NO: 3193012 - RNA, 19 nt, Human
caaaaagauaccuuaaaau

SEQ ID NO: 3193013 - RNA, 18 nt, Human
caaaaagauaccuuaaaa

SEQ ID NO: 3193014 - RNA, 22 nt, Human
caaaaagaaaaaaaaaaagaaa

SEQ ID NO: 3193015 - RNA, 19 nt, Human
caaagcgaauuuuaaaaga

SEQ ID NO: 3193016 - RNA, 14 nt, Human
caaagcgaauuuua

SEQ ID NO: 3193017 - RNA, 17 nt, Human
caaagccuccuccagcc

SEQ ID NO: 3193018 - RNA, 18 nt, Human
caaagccuccuccagccg

SEQ ID NO: 3193019 - RNA, 22 nt, Human
caaagccaaagcuaggccuggc

SEQ ID NO: 3193020 - RNA, 21 nt, Human
caaagccaccaacagccacuc

SEQ ID NO: 3193021 - RNA, 18 nt, Human
caaagcccuuccaugucg

SEQ ID NO: 3193022 - RNA, 17 nt, Human
caaacucaccugccccu

SEQ ID NO: 3193023 - RNA, 16 nt, Human
caaacuacugaaugaa

SEQ ID NO: 3193024 - RNA, 21 nt, Human
caaacuacugaaugaagcagu

SEQ ID NO: 3193025 - RNA, 22 nt, Human
caaacuacugaaugaagcagua

SEQ ID NO: 3193026 - RNA, 23 nt, Human
caaacuacugaaugaagcaguau

SEQ ID NO: 3193027 - RNA, 17 nt, Human
caaacugguuauuuaaa

SEQ ID NO: 3193028 - RNA, 16 nt, Human
caaacugguuauuuaa

SEQ ID NO: 3193029 - RNA, 20 nt, Human
caaagcgaauuuuaaaagau

SEQ ID NO: 3193030 - RNA, 18 nt, Human
caaagcuaggccuggcca

SEQ ID NO: 3193031 - RNA, 19 nt, Human
caaagcuaggccuggccag

SEQ ID NO: 3193032 - RNA, 14 nt, Human
caaagcuaggccug

SEQ ID NO: 3193033 - RNA, 13 nt, Human
caaagcuaggccu

SEQ ID NO: 3193034 - RNA, 12 nt, Human
caaaggaagcac

SEQ ID NO: 3193035 - RNA, 13 nt, Human
caaaggaagcaca

SEQ ID NO: 3193036 - RNA, 18 nt, Human
caaaggguaucaggugcu

SEQ ID NO: 3193037 - RNA, 16 nt, Human
caaaggguaucaggug

SEQ ID NO: 3193038 - RNA, 23 nt, Human
caaaggccuaauucuaugccugu

SEQ ID NO: 3193039 - RNA, 14 nt, Human
caaaggaagcacau

SEQ ID NO: 3193040 - RNA, 23 nt, Human
caaaggcacauggaauauauuuu

SEQ ID NO: 3193041 - RNA, 16 nt, Human
caaaauuaagguguuu

SEQ ID NO: 3193042 - RNA, 19 nt, Human
caaaauuaagguguuugaa

SEQ ID NO: 3193043 - RNA, 20 nt, Human
caaaauuaagguguuugaaa

SEQ ID NO: 3193044 - RNA, 21 nt, Human
caaaauuagauccuaagaugu

SEQ ID NO: 3193045 - RNA, 23 nt, Human
caaaauuagauccuaagaugugu

SEQ ID NO: 3193046 - RNA, 13 nt, Human
caaaauuauuugu

SEQ ID NO: 3193047 - RNA, 15 nt, Human
caaaauucaaagcau

SEQ ID NO: 3193048 - RNA, 17 nt, Human
caaaauucaaagcaugg

SEQ ID NO: 3193049 - RNA, 21 nt, Human
caaaauuauaggagacuugua

SEQ ID NO: 3193050 - RNA, 22 nt, Human
caaaauuauaggagacuuguag

SEQ ID NO: 3193051 - RNA, 15 nt, Human
caaaauguaggguua

SEQ ID NO: 3193052 - RNA, 20 nt, Human
caaaaugggagaucuucuca

SEQ ID NO: 3193053 - RNA, 14 nt, Human
caaaauguaacugu

SEQ ID NO: 3193054 - RNA, 13 nt, Human
caaaauguaacug

SEQ ID NO: 3193055 - RNA, 12 nt, Human
caaaauguaacu

SEQ ID NO: 3193056 - RNA, 11 nt, Human
caaaauguaac

SEQ ID NO: 3193057 - RNA, 21 nt, Human
caaaaugugagugguugaaua

SEQ ID NO: 3193058 - RNA, 12 nt, Human
caaaaugugagu

SEQ ID NO: 3193059 - RNA, 19 nt, Human
caaaaugugagugguugaa

SEQ ID NO: 3193060 - RNA, 19 nt, Human
caaaauguaacuguuacca

SEQ ID NO: 3193061 - RNA, 18 nt, Human
caaaauguaacuguuacc

SEQ ID NO: 3193062 - RNA, 16 nt, Human
caaaauguaacuguua

SEQ ID NO: 3193063 - RNA, 15 nt, Human
caaaauguaacuguu

SEQ ID NO: 3193064 - RNA, 15 nt, Human
caaacacauacagga

SEQ ID NO: 3193065 - RNA, 12 nt, Human
caaacacaggca

SEQ ID NO: 3193066 - RNA, 15 nt, Human
caaacacacagaagg

SEQ ID NO: 3193067 - RNA, 14 nt, Human
caaacccuucagug

SEQ ID NO: 3193068 - RNA, 20 nt, Human
caaacccuucagugccaaaa

SEQ ID NO: 3193069 - RNA, 15 nt, Human
caaaccuaauugcac

SEQ ID NO: 3193070 - RNA, 13 nt, Human
caaaccuaaguug

SEQ ID NO: 3193071 - RNA, 19 nt, Human
caaauuaugcuaagaauuu

SEQ ID NO: 3193072 - RNA, 21 nt, Human
caaauuaugcuaagaauuuuu

SEQ ID NO: 3193073 - RNA, 20 nt, Human
caaauuaugcuaagaauuuu

SEQ ID NO: 3193074 - RNA, 20 nt, Human
caaauuauaauguauucaua

SEQ ID NO: 3193075 - RNA, 18 nt, Human
caaauuauaauguauuca

SEQ ID NO: 3193076 - RNA, 17 nt, Human
caaauuauaauguauuc

SEQ ID NO: 3193077 - RNA, 15 nt, Human
caaauuauaauguau

SEQ ID NO: 3193078 - RNA, 14 nt, Human
caaauuauaaugua

SEQ ID NO: 3193079 - RNA, 13 nt, Human
caaauuauaaugu

SEQ ID NO: 3193080 - RNA, 12 nt, Human
caaauguaaagu

SEQ ID NO: 3193081 - RNA, 22 nt, Human
caaauguaauguggcuucugga

SEQ ID NO: 3193082 - RNA, 19 nt, Human
caaauguaacuauguuuua

SEQ ID NO: 3193083 - RNA, 12 nt, Human
caaauguaacua

SEQ ID NO: 3193084 - RNA, 21 nt, Human
caaauuguaauuaauaauaga

SEQ ID NO: 3193085 - RNA, 20 nt, Human
caaauuguaauuaauaauag

SEQ ID NO: 3193086 - RNA, 18 nt, Human
caaauuguaauuaauaau

SEQ ID NO: 3193087 - RNA, 16 nt, Human
caaauuguaauuaaua

SEQ ID NO: 3193088 - RNA, 15 nt, Human
caaauuguaauuaau

SEQ ID NO: 3193089 - RNA, 19 nt, Human
caaauugucaccugcuucu

SEQ ID NO: 3193090 - RNA, 21 nt, Human
caaauugucaccugcuucucu

SEQ ID NO: 3193091 - RNA, 20 nt, Human
caaauugucaccugcuucuc

SEQ ID NO: 3193092 - RNA, 14 nt, Human
caaauuuauuucca

SEQ ID NO: 3193093 - RNA, 15 nt, Human
caaauuuauuuccaa

SEQ ID NO: 3193094 - RNA, 21 nt, Human
caaauaugcaaagcacugacu

SEQ ID NO: 3193095 - RNA, 19 nt, Human
caaauaugcaaagcacuga

SEQ ID NO: 3193096 - RNA, 23 nt, Human
caaauauuaaaaagucuuuuaaa

SEQ ID NO: 3193097 - RNA, 22 nt, Human
caaauauuaaaaagucuuuuaa

SEQ ID NO: 3193098 - RNA, 19 nt, Human
caaauauuaaaaagucuuu

SEQ ID NO: 3193099 - RNA, 13 nt, Human
caaauauuaaaaa

SEQ ID NO: 3193100 - RNA, 13 nt, Human
caaaugguacaaa

SEQ ID NO: 3193101 - RNA, 24 nt, Human
caaaugguacaaaaccacagugua

SEQ ID NO: 3193102 - RNA, 15 nt, Human
caaaugguacaaaac

SEQ ID NO: 3193103 - RNA, 12 nt, Human
caaauauuauuu

SEQ ID NO: 3193104 - RNA, 19 nt, Human
caaaggguaucaggugcug

SEQ ID NO: 3193105 - RNA, 19 nt, Human
caaagugcugggauuacag

SEQ ID NO: 3193106 - RNA, 23 nt, Human
caaagugcugggauuacaggugu

SEQ ID NO: 3193107 - RNA, 22 nt, Human
caaagggggaggagaagaaaau

SEQ ID NO: 3193108 - RNA, 18 nt, Human
caaauacugaaauauuag

SEQ ID NO: 3193109 - RNA, 15 nt, Human
cacaguuuucugaga

SEQ ID NO: 3193110 - RNA, 19 nt, Human
cacaguuuucugagaaaga

SEQ ID NO: 3193111 - RNA, 17 nt, Human
cacaguuuucugagaaa

SEQ ID NO: 3193112 - RNA, 16 nt, Human
cacaguuuucugagaa

SEQ ID NO: 3193113 - RNA, 14 nt, Human
cacauaucugucau

SEQ ID NO: 3193114 - RNA, 16 nt, Human
cacauagacugugcgc

SEQ ID NO: 3193115 - RNA, 21 nt, Human
cacauaccaacucaacuuuuu

SEQ ID NO: 3193116 - RNA, 15 nt, Human
cacauagacugugcg

SEQ ID NO: 3193117 - RNA, 21 nt, Human
cacauagaaaguaaauaaaag

SEQ ID NO: 3193118 - RNA, 22 nt, Human
cacagcuucauuuccugugucu

SEQ ID NO: 3193119 - RNA, 21 nt, Human
cacagcuucauuuccuguguc

SEQ ID NO: 3193120 - RNA, 22 nt, Human
cacagcugggguggggaccuca

SEQ ID NO: 3193121 - RNA, 23 nt, Human
cacagcugggguggggaccucag

SEQ ID NO: 3193122 - RNA, 15 nt, Human
cacaggcagguccag

SEQ ID NO: 3193123 - RNA, 14 nt, Human
cacaggcaggucca

SEQ ID NO: 3193124 - RNA, 11 nt, Human
cacaggcaggu

SEQ ID NO: 3193125 - RNA, 19 nt, Human
cacaggagaggauggccca

SEQ ID NO: 3193126 - RNA, 19 nt, Human
cacaggagggagggggaag

SEQ ID NO: 3193127 - RNA, 21 nt, Human
cacaggagggagggggaaggc

SEQ ID NO: 3193128 - RNA, 14 nt, Human
cacaggagggaggg

SEQ ID NO: 3193129 - RNA, 13 nt, Human
cacaguccuuacc

SEQ ID NO: 3193130 - RNA, 15 nt, Human
cacaguccuuaccag

SEQ ID NO: 3193131 - RNA, 21 nt, Human
cacaguccuuaccagcagagc

SEQ ID NO: 3193132 - RNA, 21 nt, Human
cacagugagucgaggacaggg

SEQ ID NO: 3193133 - RNA, 22 nt, Human
cacagugagucgaggacaggga

SEQ ID NO: 3193134 - RNA, 14 nt, Human
cacagugcaucuca

SEQ ID NO: 3193135 - RNA, 22 nt, Human
cacaggcagggcaggaccagcc

SEQ ID NO: 3193136 - RNA, 19 nt, Human
cacaggcagggcaggacca

SEQ ID NO: 3193137 - RNA, 15 nt, Human
cacaguucucuccuu

SEQ ID NO: 3193138 - RNA, 14 nt, Human
cacaguucucuccu

SEQ ID NO: 3193139 - RNA, 14 nt, Human
cacagugugauuuu

SEQ ID NO: 3193140 - RNA, 15 nt, Human
cacaguguaccauua

SEQ ID NO: 3193141 - RNA, 22 nt, Human
cacaguguaccauuaaaauaug

SEQ ID NO: 3193142 - RNA, 21 nt, Human
cacaguguaccauuaaaauau

SEQ ID NO: 3193143 - RNA, 19 nt, Human
cacaguguaccauuaaaau

SEQ ID NO: 3193144 - RNA, 18 nt, Human
cacaguguaccauuaaaa

SEQ ID NO: 3193145 - RNA, 17 nt, Human
cacaguguaccauuaaa

SEQ ID NO: 3193146 - RNA, 13 nt, Human
uauucuaauaagc

SEQ ID NO: 3193147 - RNA, 15 nt, Human
uauucuaauaagcua

SEQ ID NO: 3193148 - RNA, 19 nt, Human
uauucuaagaaauaucugu

SEQ ID NO: 3193149 - RNA, 17 nt, Human
uauucuauuuuacaacu

SEQ ID NO: 3193150 - RNA, 15 nt, Human
uauucuauuuuacaa

SEQ ID NO: 3193151 - RNA, 14 nt, Human
uauucuauuuuaca

SEQ ID NO: 3193152 - RNA, 12 nt, Human
uauucuauuuua

SEQ ID NO: 3193153 - RNA, 17 nt, Human
uauucuaauaagcuagu

SEQ ID NO: 3193154 - RNA, 20 nt, Human
uauucuaauaagcuaguuga

SEQ ID NO: 3193155 - RNA, 19 nt, Human
uauuccugcccugcuguuu

SEQ ID NO: 3193156 - RNA, 20 nt, Human
uauuccucuugcauuucacu

SEQ ID NO: 3193157 - RNA, 21 nt, Human
uauuccugcauuugugaaaug

SEQ ID NO: 3193158 - RNA, 20 nt, Human
uauuccugcauuugugaaau

SEQ ID NO: 3193159 - RNA, 19 nt, Human
uauuccugcauuugugaaa

SEQ ID NO: 3193160 - RNA, 17 nt, Human
uauuccugcauuuguga

SEQ ID NO: 3193161 - RNA, 12 nt, Human
uauucccaugag

SEQ ID NO: 3193162 - RNA, 22 nt, Human
uauuccccacccuccccuuccc

SEQ ID NO: 3193163 - RNA, 19 nt, Human
uauuccccacccuccccuu

SEQ ID NO: 3193164 - RNA, 23 nt, Human
uauuccauauuagaaaacuuugu

SEQ ID NO: 3193165 - RNA, 14 nt, Human
uauuccauauuaga

SEQ ID NO: 3193166 - RNA, 20 nt, Human
uauuccauauuagaaaacuu

SEQ ID NO: 3193167 - RNA, 19 nt, Human
uauuccauauuagaaaacu

SEQ ID NO: 3193168 - RNA, 12 nt, Human
uauuccagagcu

SEQ ID NO: 3193169 - RNA, 17 nt, Human
uauuccagagcugccag

SEQ ID NO: 3193170 - RNA, 16 nt, Human
uauuauucccauucua

SEQ ID NO: 3193171 - RNA, 15 nt, Human
uauuauuaaugcuuu

SEQ ID NO: 3193172 - RNA, 14 nt, Human
uauuauuaaugcuu

SEQ ID NO: 3193173 - RNA, 11 nt, Human
uauuauuaaug

SEQ ID NO: 3193174 - RNA, 16 nt, Human
uauuauuaaugcuuug

SEQ ID NO: 3193175 - RNA, 12 nt, Human
uauuacaauauu

SEQ ID NO: 3193176 - RNA, 14 nt, Human
uauuacaauauuug

SEQ ID NO: 3193177 - RNA, 13 nt, Human
uauuacaauauuu

SEQ ID NO: 3193178 - RNA, 19 nt, Human
uauuacaauauuugugugc

SEQ ID NO: 3193179 - RNA, 15 nt, Human
uauuacaauauuugu

SEQ ID NO: 3193180 - RNA, 22 nt, Human
uauuggccauaagcaacaauuu

SEQ ID NO: 3193181 - RNA, 20 nt, Human
uauuggccauaagcaacaau

SEQ ID NO: 3193182 - RNA, 17 nt, Human
uauugcugauggugcaa

SEQ ID NO: 3193183 - RNA, 15 nt, Human
uauugcugaagaauc

SEQ ID NO: 3193184 - RNA, 20 nt, Human
uauugcugaagaaucuacuu

SEQ ID NO: 3193185 - RNA, 22 nt, Human
uauuggaaauuuguuauaauga

SEQ ID NO: 3193186 - RNA, 21 nt, Human
uauugauaugcuuauacacuu

SEQ ID NO: 3193187 - RNA, 22 nt, Human
uauucuccuucugucaaaguca

SEQ ID NO: 3193188 - RNA, 15 nt, Human
uauucucuauuugaa

SEQ ID NO: 3193189 - RNA, 13 nt, Human
uauucucauucuu

SEQ ID NO: 3193190 - RNA, 11 nt, Human
uauugauauuc

SEQ ID NO: 3193191 - RNA, 12 nt, Human
uauugaugaaaa

SEQ ID NO: 3193192 - RNA, 13 nt, Human
uauugaugaaaau

SEQ ID NO: 3193193 - RNA, 14 nt, Human
uauugauugcuuuu

SEQ ID NO: 3193194 - RNA, 21 nt, Human
uauugcccaugauauaacuuu

SEQ ID NO: 3193195 - RNA, 19 nt, Human
uauuuaaagaaauauguau

SEQ ID NO: 3193196 - RNA, 13 nt, Human
uauuuaaagaaau

SEQ ID NO: 3193197 - RNA, 13 nt, Human
uauuuaaaaugua

SEQ ID NO: 3193198 - RNA, 15 nt, Human
uauuuaaaauguaaa

SEQ ID NO: 3193199 - RNA, 13 nt, Human
uauuuaaaaacaa

SEQ ID NO: 3193200 - RNA, 19 nt, Human
uauuuaaaaacaaaaggca

SEQ ID NO: 3193201 - RNA, 22 nt, Human
uauuguuuucaguguacaugga

SEQ ID NO: 3193202 - RNA, 20 nt, Human
uauuguuuucaguguacaug

SEQ ID NO: 3193203 - RNA, 18 nt, Human
uauuguuuucaguguaca

SEQ ID NO: 3193204 - RNA, 12 nt, Human
uauuguuuucag

SEQ ID NO: 3193205 - RNA, 14 nt, Human
uauuguuagauguu

SEQ ID NO: 3193206 - RNA, 16 nt, Human
uauguugacauuuguu

SEQ ID NO: 3193207 - RNA, 15 nt, Human
uauguugacauuugu

SEQ ID NO: 3193208 - RNA, 14 nt, Human
uauguugauaaaag

SEQ ID NO: 3193209 - RNA, 14 nt, Human
uauguugacauuug

SEQ ID NO: 3193210 - RNA, 13 nt, Human
uauguugacauuu

SEQ ID NO: 3193211 - RNA, 16 nt, Human
uaugucauuucauguc

SEQ ID NO: 3193212 - RNA, 16 nt, Human
uaugucagucacuaaa

SEQ ID NO: 3193213 - RNA, 12 nt, Human
uaugucauuuca

SEQ ID NO: 3193214 - RNA, 15 nt, Human
uaugucauuucaugu

SEQ ID NO: 3193215 - RNA, 13 nt, Human
uaugucauuucau

SEQ ID NO: 3193216 - RNA, 14 nt, Human
uauguauuaacacu

SEQ ID NO: 3193217 - RNA, 22 nt, Human
uauguauuaacacuacucaaag

SEQ ID NO: 3193218 - RNA, 16 nt, Human
uauguauucuguaaaa

SEQ ID NO: 3193219 - RNA, 13 nt, Human
uauguauucugua

SEQ ID NO: 3193220 - RNA, 13 nt, Human
uauguugcccagg

SEQ ID NO: 3193221 - RNA, 19 nt, Human
uauguugcccaggcagguc

SEQ ID NO: 3193222 - RNA, 16 nt, Human
uauguugcccaggcag

SEQ ID NO: 3193223 - RNA, 20 nt, Human
uauguugcccaggcaggucu

SEQ ID NO: 3193224 - RNA, 22 nt, Human
uauguuuaaaguaauuguucca

SEQ ID NO: 3193225 - RNA, 16 nt, Human
uauguuguuuuguaca

SEQ ID NO: 3193226 - RNA, 23 nt, Human
uauguuuaaaguaauuguuccag

SEQ ID NO: 3193227 - RNA, 15 nt, Human
uauuaaucacugugu

SEQ ID NO: 3193228 - RNA, 16 nt, Human
uauuaaucacugugua

SEQ ID NO: 3193229 - RNA, 17 nt, Human
uauuaaucacuguguau

SEQ ID NO: 3193230 - RNA, 19 nt, Human
uauuaaucacuguguauau

SEQ ID NO: 3193231 - RNA, 13 nt, Human
uauuaaucacugu

SEQ ID NO: 3193232 - RNA, 14 nt, Human
uauuaaucacugug

SEQ ID NO: 3193233 - RNA, 12 nt, Human
uauuaaucacug

SEQ ID NO: 3193234 - RNA, 17 nt, Human
uauuaagauuauaauug

SEQ ID NO: 3193235 - RNA, 20 nt, Human
uauuaaucacuguguauauu

SEQ ID NO: 3193236 - RNA, 22 nt, Human
uauuaaucacuguguauauuug

SEQ ID NO: 3193237 - RNA, 23 nt, Human
uauuaaucacuguguauauuuga

SEQ ID NO: 3193238 - RNA, 17 nt, Human
uauuaaucagaagaaaa

SEQ ID NO: 3193239 - RNA, 12 nt, Human
uauuaaauuaug

SEQ ID NO: 3193240 - RNA, 22 nt, Human
uauuaaauuacauuuguaauuu

SEQ ID NO: 3193241 - RNA, 20 nt, Human
uauuaaauuacauuuguaau

SEQ ID NO: 3193242 - RNA, 14 nt, Human
uauuaaauuacauu

SEQ ID NO: 3193243 - RNA, 12 nt, Human
uauuaaauuaca

SEQ ID NO: 3193244 - RNA, 19 nt, Human
uauguuuguacaagauugu

SEQ ID NO: 3193245 - RNA, 22 nt, Human
uauguuugccacuuugcaaagg

SEQ ID NO: 3193246 - RNA, 24 nt, Human
uauuaagaaagacuaucuaaaugu

SEQ ID NO: 3193247 - RNA, 23 nt, Human
uauuaaauuuuuuuguaugaaaa

SEQ ID NO: 3193248 - RNA, 21 nt, Human
uauuaaauuuuuuuguaugaa

SEQ ID NO: 3193249 - RNA, 22 nt, Human
uauuaaauuuuuuuguaugaaa

SEQ ID NO: 3193250 - RNA, 17 nt, Human
uauuaaauuuuuuugua

SEQ ID NO: 3193251 - RNA, 18 nt, Human
uauuaaauuuuuuuguau

SEQ ID NO: 3193252 - RNA, 20 nt, Human
uauuaaauuuuuuuguauga

SEQ ID NO: 3193253 - RNA, 18 nt, Human
uauuaagacaauagcacu

SEQ ID NO: 3193254 - RNA, 21 nt, Human
uauuaagacaauagcacuuaa

SEQ ID NO: 3193255 - RNA, 21 nt, Human
uauguacauuucuaagucaaa

SEQ ID NO: 3193256 - RNA, 17 nt, Human
uauguacauuucuaagu

SEQ ID NO: 3193257 - RNA, 16 nt, Human
uauguacauuucuaag

SEQ ID NO: 3193258 - RNA, 15 nt, Human
uauguacauuucuaa

SEQ ID NO: 3193259 - RNA, 14 nt, Human
uauguacauuucua

SEQ ID NO: 3193260 - RNA, 13 nt, Human
uauguacauuucu

SEQ ID NO: 3193261 - RNA, 15 nt, Human
uauguagacaauaua

SEQ ID NO: 3193262 - RNA, 14 nt, Human
uauguacuacauga

SEQ ID NO: 3193263 - RNA, 13 nt, Human
uauguauacaugu

SEQ ID NO: 3193264 - RNA, 21 nt, Human
uauguauacaugugccaugcu

SEQ ID NO: 3193265 - RNA, 14 nt, Human
uauguauacaugug

SEQ ID NO: 3193266 - RNA, 15 nt, Human
uauguauaauucaaa

SEQ ID NO: 3193267 - RNA, 13 nt, Human
uauguauguguuu

SEQ ID NO: 3193268 - RNA, 15 nt, Human
uauguauguguuuag

SEQ ID NO: 3193269 - RNA, 16 nt, Human
uauguauguguuuaga

SEQ ID NO: 3193270 - RNA, 17 nt, Human
uauguauguguuuagaa

SEQ ID NO: 3193271 - RNA, 20 nt, Human
uauguauguguuuagaauug

SEQ ID NO: 3193272 - RNA, 21 nt, Human
uauguauguguuuagaauuga

SEQ ID NO: 3193273 - RNA, 22 nt, Human
uauguauguguuuagaauugaa

SEQ ID NO: 3193274 - RNA, 16 nt, Human
uauguaugguuugaaa

SEQ ID NO: 3193275 - RNA, 17 nt, Human
uauguaugguuugaaaa

SEQ ID NO: 3193276 - RNA, 15 nt, Human
uauguaaauaauucu

SEQ ID NO: 3193277 - RNA, 20 nt, Human
uauguaaaugguaugucauu

SEQ ID NO: 3193278 - RNA, 21 nt, Human
uauguaaaugguaugucauuc

SEQ ID NO: 3193279 - RNA, 13 nt, Human
uauguaaauaauu

SEQ ID NO: 3193280 - RNA, 14 nt, Human
uauguaaauaauuc

SEQ ID NO: 3193281 - RNA, 17 nt, Human
uauguaaauaauucuuu

SEQ ID NO: 3193282 - RNA, 20 nt, Human
uauguaaauagguuucuaaa

SEQ ID NO: 3193283 - RNA, 17 nt, Human
uauguaaacaaaucuuu

SEQ ID NO: 3193284 - RNA, 16 nt, Human
uauguaaacaaaucuu

SEQ ID NO: 3193285 - RNA, 23 nt, Human
uauguaaacaaaucuuuccauau

SEQ ID NO: 3193286 - RNA, 21 nt, Human
uauguaaacaaaucuuuccau

SEQ ID NO: 3193287 - RNA, 13 nt, Human
gggaguggccaca

SEQ ID NO: 3193288 - RNA, 15 nt, Human
gggaguggccacaga

SEQ ID NO: 3193289 - RNA, 18 nt, Human
uauggauaugaaaaauga

SEQ ID NO: 3193290 - RNA, 16 nt, Human
uauuuauaagaaaaau

SEQ ID NO: 3193291 - RNA, 16 nt, Human
uauuuauaauacagaa

SEQ ID NO: 3193292 - RNA, 18 nt, Human
uauuuauaauacagaauc

SEQ ID NO: 3193293 - RNA, 20 nt, Human
uauuuauaauacagaaucuu

SEQ ID NO: 3193294 - RNA, 20 nt, Human
uauuuauaagaaaaauguga

SEQ ID NO: 3193295 - RNA, 13 nt, Human
uauuuuauuaaua

SEQ ID NO: 3193296 - RNA, 20 nt, Human
uauuuuauuuuuagaauuuu

SEQ ID NO: 3193297 - RNA, 15 nt, Human
uauuuuauuucaaug

SEQ ID NO: 3193298 - RNA, 16 nt, Human
uauuuuauuucaaugu

SEQ ID NO: 3193299 - RNA, 13 nt, Human
uauuuuuuugaac

SEQ ID NO: 3193300 - RNA, 14 nt, Human
ucaaaaaaagaaaa

SEQ ID NO: 3193301 - RNA, 15 nt, Human
ucaaaaaaagaaaaa

SEQ ID NO: 3193302 - RNA, 16 nt, Human
uauuuuuuuuaauugu

SEQ ID NO: 3193303 - RNA, 18 nt, Human
uauuuuuuuuaauuguau

SEQ ID NO: 3193304 - RNA, 19 nt, Human
uauuuuuuuuaauuguauu

SEQ ID NO: 3193305 - RNA, 15 nt, Human
uauuuuuuuaacuuu

SEQ ID NO: 3193306 - RNA, 17 nt, Human
uauuuuuuuaacuuuac

SEQ ID NO: 3193307 - RNA, 20 nt, Human
uauuuuuuuaacuuuaccau

SEQ ID NO: 3193308 - RNA, 21 nt, Human
uauuuuuuuaacuuuaccaug

SEQ ID NO: 3193309 - RNA, 11 nt, Human
uauuuucugug

SEQ ID NO: 3193310 - RNA, 12 nt, Human
uauuuucugugu

SEQ ID NO: 3193311 - RNA, 13 nt, Human
uauuuucugugug

SEQ ID NO: 3193312 - RNA, 14 nt, Human
uauuuucugugugu

SEQ ID NO: 3193313 - RNA, 15 nt, Human
uauuuucuguguguu

SEQ ID NO: 3193314 - RNA, 16 nt, Human
uauuuucuguguguuc

SEQ ID NO: 3193315 - RNA, 17 nt, Human
uauuuucuguguguucc

SEQ ID NO: 3193316 - RNA, 18 nt, Human
uauuuucuguguguuccu

SEQ ID NO: 3193317 - RNA, 19 nt, Human
uauuuucuguguguuccug

SEQ ID NO: 3193318 - RNA, 20 nt, Human
uauuuucuguguguuccugg

SEQ ID NO: 3193319 - RNA, 21 nt, Human
uauuuucucugauacuuuuuu

SEQ ID NO: 3193320 - RNA, 22 nt, Human
uauuuucccuauuagagaagag

SEQ ID NO: 3193321 - RNA, 18 nt, Human
uauuuuccugauagcaua

SEQ ID NO: 3193322 - RNA, 14 nt, Human
uauuuuccugauag

SEQ ID NO: 3193323 - RNA, 14 nt, Human
uauuuucuaaagua

SEQ ID NO: 3193324 - RNA, 19 nt, Human
uauuuuccugauagcauau

SEQ ID NO: 3193325 - RNA, 13 nt, Human
ucaaauuguaauu

SEQ ID NO: 3193326 - RNA, 23 nt, Human
ucaaccccuucgcuccugugucu

SEQ ID NO: 3193327 - RNA, 16 nt, Human
ucaaauuguaauuaau

SEQ ID NO: 3193328 - RNA, 20 nt, Human
ucaaccccuucgcuccugug

SEQ ID NO: 3193329 - RNA, 10 nt, Human
ucaaauuaau

SEQ ID NO: 3193330 - RNA, 15 nt, Human
ucaaauuaauugugu

SEQ ID NO: 3193331 - RNA, 16 nt, Human
ucaaauuaauugugug

SEQ ID NO: 3193332 - RNA, 13 nt, Human
ucaaauuaauugu

SEQ ID NO: 3193333 - RNA, 17 nt, Human
ucaaauuaauuguguga

SEQ ID NO: 3193334 - RNA, 18 nt, Human
ucaaauuaauugugugaa

SEQ ID NO: 3193335 - RNA, 22 nt, Human
ucaaauccaggacccugccagg

SEQ ID NO: 3193336 - RNA, 21 nt, Human
ucaaauccaggacccugccag

SEQ ID NO: 3193337 - RNA, 19 nt, Human
ucaaauccaggacccugcc

SEQ ID NO: 3193338 - RNA, 16 nt, Human
ucaaauccaggacccu

SEQ ID NO: 3193339 - RNA, 15 nt, Human
ucaaauccaggaccc

SEQ ID NO: 3193340 - RNA, 22 nt, Human
ucaaaugaugugccugcuucag

SEQ ID NO: 3193341 - RNA, 18 nt, Human
ucaaaugcuagaaaaauu

SEQ ID NO: 3193342 - RNA, 17 nt, Human
ucaaaugcuagaaaaau

SEQ ID NO: 3193343 - RNA, 19 nt, Human
ucaaaugaugugccugcuu

SEQ ID NO: 3193344 - RNA, 18 nt, Human
ucaaaugaugugccugcu

SEQ ID NO: 3193345 - RNA, 15 nt, Human
ucaaaaaacuuguaa

SEQ ID NO: 3193346 - RNA, 14 nt, Human
ucaaaaaacuugua

SEQ ID NO: 3193347 - RNA, 11 nt, Human
ucaaaaaucug

SEQ ID NO: 3193348 - RNA, 18 nt, Human
ucaaaaaucaauaugcag

SEQ ID NO: 3193349 - RNA, 22 nt, Human
ucaaaacaaacagaugcucuga

SEQ ID NO: 3193350 - RNA, 20 nt, Human
ucaaaaaucugaagauuguu

SEQ ID NO: 3193351 - RNA, 16 nt, Human
ucaaaaaucugaagau

SEQ ID NO: 3193352 - RNA, 15 nt, Human
ucaaaaaucugaaga

SEQ ID NO: 3193353 - RNA, 14 nt, Human
ucaaaaaucugaag

SEQ ID NO: 3193354 - RNA, 13 nt, Human
ucaaaaaucugaa

SEQ ID NO: 3193355 - RNA, 18 nt, Human
ucaaaaaucugaagauug

SEQ ID NO: 3193356 - RNA, 17 nt, Human
ucaaaaaucugaagauu

SEQ ID NO: 3193357 - RNA, 16 nt, Human
ucaaaacaaaggccua

SEQ ID NO: 3193358 - RNA, 23 nt, Human
ucaaagaccuggggcugcuguga

SEQ ID NO: 3193359 - RNA, 23 nt, Human
ucaaagaaucaccuaauuaauuu

SEQ ID NO: 3193360 - RNA, 21 nt, Human
ucaaagaccuggggcugcugu

SEQ ID NO: 3193361 - RNA, 20 nt, Human
ucaaaucaagaaacuuaagg

SEQ ID NO: 3193362 - RNA, 14 nt, Human
ucaaauaugcaaag

SEQ ID NO: 3193363 - RNA, 14 nt, Human
ucaaauccaggacc

SEQ ID NO: 3193364 - RNA, 18 nt, Human
ucaaauaucucuauuuaa

SEQ ID NO: 3193365 - RNA, 20 nt, Human
ucaaaucaaucuguaaaacu

SEQ ID NO: 3193366 - RNA, 15 nt, Human
ucaauaaacagcagg

SEQ ID NO: 3193367 - RNA, 19 nt, Human
ucaauaaacagcaggugau

SEQ ID NO: 3193368 - RNA, 15 nt, Human
ucaaguuuuaaaguu

SEQ ID NO: 3193369 - RNA, 17 nt, Human
ucaaguuuuaaaguuca

SEQ ID NO: 3193370 - RNA, 16 nt, Human
ucaaguucacaccugc

SEQ ID NO: 3193371 - RNA, 13 nt, Human
ucaaguucacacc

SEQ ID NO: 3193372 - RNA, 20 nt, Human
ucaagugauucuccugccuc

SEQ ID NO: 3193373 - RNA, 18 nt, Human
ucaagugauucuccugcc

SEQ ID NO: 3193374 - RNA, 15 nt, Human
ucaacgcagcccugc

SEQ ID NO: 3193375 - RNA, 14 nt, Human
ucaacgcagcccug

SEQ ID NO: 3193376 - RNA, 18 nt, Human
ucaacgcagcccugcuuu

SEQ ID NO: 3193377 - RNA, 13 nt, Human
ucaaugcagcccc

SEQ ID NO: 3193378 - RNA, 23 nt, Human
ucaauaauuuguggugauuugga

SEQ ID NO: 3193379 - RNA, 16 nt, Human
ucaauaacagccgcuc

SEQ ID NO: 3193380 - RNA, 14 nt, Human
ucaauaacagccgc

SEQ ID NO: 3193381 - RNA, 24 nt, Human
ucaauaacagccgcuccagaguca

SEQ ID NO: 3193382 - RNA, 21 nt, Human
ucaauaacagccgcuccagag

SEQ ID NO: 3193383 - RNA, 20 nt, Human
ucaauaacagccgcuccaga

SEQ ID NO: 3193384 - RNA, 18 nt, Human
ucaauaacagccgcucca

SEQ ID NO: 3193385 - RNA, 19 nt, Human
ucaauaaaguuugaucuuc

SEQ ID NO: 3193386 - RNA, 18 nt, Human
ucaauaaaguuugaucuu

SEQ ID NO: 3193387 - RNA, 17 nt, Human
ucaauaaaguuugaucu

SEQ ID NO: 3193388 - RNA, 15 nt, Human
ucaauaaaguuugau

SEQ ID NO: 3193389 - RNA, 12 nt, Human
ucaauaaaguuu

SEQ ID NO: 3193390 - RNA, 14 nt, Human
ucaauaaaguuuga

SEQ ID NO: 3193391 - RNA, 13 nt, Human
ucaauaaaguuug

SEQ ID NO: 3193392 - RNA, 21 nt, Human
ucaauuacaggaaguacugga

SEQ ID NO: 3193393 - RNA, 23 nt, Human
ucaauuacaggaaguacuggaga

SEQ ID NO: 3193394 - RNA, 14 nt, Human
ucaauguguauaaa

SEQ ID NO: 3193395 - RNA, 16 nt, Human
ucaauguguauaaauu

SEQ ID NO: 3193396 - RNA, 17 nt, Human
ucaauguguauaaauug

SEQ ID NO: 3193397 - RNA, 22 nt, Human
ucaauguguauaaauugucuuu

SEQ ID NO: 3193398 - RNA, 16 nt, Human
ucaaugugucuuucua

SEQ ID NO: 3193399 - RNA, 17 nt, Human
ucaaugugucuuucuaa

SEQ ID NO: 3193400 - RNA, 20 nt, Human
ucaaugugucuuucuaagaa

SEQ ID NO: 3193401 - RNA, 12 nt, Human
ucaaugugugca

SEQ ID NO: 3193402 - RNA, 21 nt, Human
ucaaugugauauaaacagcuu

SEQ ID NO: 3193403 - RNA, 17 nt, Human
ucacauuuauucugcuc

SEQ ID NO: 3193404 - RNA, 19 nt, Human
ucacauuuauucugcucac

SEQ ID NO: 3193405 - RNA, 18 nt, Human
ucacauuuauucugcuca

SEQ ID NO: 3193406 - RNA, 17 nt, Human
ucacagugugauuuuga

SEQ ID NO: 3193407 - RNA, 16 nt, Human
ucacagugugauuuug

SEQ ID NO: 3193408 - RNA, 14 nt, Human
ucaccaaggcugau

SEQ ID NO: 3193409 - RNA, 14 nt, Human
ucacauuuuuuucu

SEQ ID NO: 3193410 - RNA, 15 nt, Human
ucacauuuuuuucua

SEQ ID NO: 3193411 - RNA, 17 nt, Human
ucacauuuuuuucuacc

SEQ ID NO: 3193412 - RNA, 20 nt, Human
ucacauuuuuauaccuguuu

SEQ ID NO: 3193413 - RNA, 17 nt, Human
ucaccaaauagugugaa

SEQ ID NO: 3193414 - RNA, 20 nt, Human
ucaccaaaucagcugcuacu

SEQ ID NO: 3193415 - RNA, 19 nt, Human
ucaccaaaucagcugcuac

SEQ ID NO: 3193416 - RNA, 22 nt, Human
ucacauuuuuauaccuguuuaa

SEQ ID NO: 3193417 - RNA, 14 nt, Human
ucaccacagacuuu

SEQ ID NO: 3193418 - RNA, 16 nt, Human
ucacagucacauucca

SEQ ID NO: 3193419 - RNA, 19 nt, Human
ucacaguccuuaccagcag

SEQ ID NO: 3193420 - RNA, 22 nt, Human
ucacaguccuuaccagcagagc

SEQ ID NO: 3193421 - RNA, 23 nt, Human
ucacaguccuuaccagcagagca

SEQ ID NO: 3193422 - RNA, 18 nt, Human
ucacaggcagguccaggg

SEQ ID NO: 3193423 - RNA, 17 nt, Human
ucacaggcagguccagg

SEQ ID NO: 3193424 - RNA, 16 nt, Human
ucacaggcagguccag

SEQ ID NO: 3193425 - RNA, 17 nt, Human
ucacaagacccaaaagg

SEQ ID NO: 3193426 - RNA, 13 nt, Human
ucacaagacccaa

SEQ ID NO: 3193427 - RNA, 20 nt, Human
ucaauuacaggaaguacugg

SEQ ID NO: 3193428 - RNA, 14 nt, Human
ucaauuacauguuu

SEQ ID NO: 3193429 - RNA, 12 nt, Human
ucacaccccacc

SEQ ID NO: 3193430 - RNA, 16 nt, Human
ucacaccccaccugcg

SEQ ID NO: 3193431 - RNA, 15 nt, Human
ucacaccccaccugc

SEQ ID NO: 3193432 - RNA, 14 nt, Human
ucacaccccaccug

SEQ ID NO: 3193433 - RNA, 13 nt, Human
ucacaccccaccu

SEQ ID NO: 3193434 - RNA, 20 nt, Human
ucacaccccaccugcgcuuc

SEQ ID NO: 3193435 - RNA, 18 nt, Human
ucacaccccaccugcgcu

SEQ ID NO: 3193436 - RNA, 17 nt, Human
ucacaccccaccugcgc

SEQ ID NO: 3193437 - RNA, 14 nt, Human
ucauuccagaggaa

SEQ ID NO: 3193438 - RNA, 23 nt, Human
ucauuccaccuucccaugcccug

SEQ ID NO: 3193439 - RNA, 17 nt, Human
ucauucaccaguacauu

SEQ ID NO: 3193440 - RNA, 22 nt, Human
ucauucaccaguacauucucag

SEQ ID NO: 3193441 - RNA, 21 nt, Human
ucauucaacccaccugcgucu

SEQ ID NO: 3193442 - RNA, 20 nt, Human
ucauuaucucaaaacugcac

SEQ ID NO: 3193443 - RNA, 19 nt, Human
ucauuaucucaaaacugca

SEQ ID NO: 3193444 - RNA, 12 nt, Human
ucauuauuauua

SEQ ID NO: 3193445 - RNA, 13 nt, Human
ucauuaugucaac

SEQ ID NO: 3193446 - RNA, 18 nt, Human
ucauuaugucaaccaggu

SEQ ID NO: 3193447 - RNA, 13 nt, Human
ucauuaucucaaa

SEQ ID NO: 3193448 - RNA, 18 nt, Human
ucaugcugccccugccuu

SEQ ID NO: 3193449 - RNA, 17 nt, Human
ucaugcugccccugccu

SEQ ID NO: 3193450 - RNA, 13 nt, Human
ucaugcugccccu

SEQ ID NO: 3193451 - RNA, 15 nt, Human
ucauuguuaaaguaa

SEQ ID NO: 3193452 - RNA, 18 nt, Human
ucauuucaccugcugcuu

SEQ ID NO: 3193453 - RNA, 12 nt, Human
ucauuucaccug

SEQ ID NO: 3193454 - RNA, 17 nt, Human
ucauuguucaauuccca

SEQ ID NO: 3193455 - RNA, 21 nt, Human
ucauuuccauguaugcauaau

SEQ ID NO: 3193456 - RNA, 17 nt, Human
ucauuuccauguaugca

SEQ ID NO: 3193457 - RNA, 16 nt, Human
ucauuuccauguaugc

SEQ ID NO: 3193458 - RNA, 12 nt, Human
ucauuuccaugu

SEQ ID NO: 3193459 - RNA, 23 nt, Human
ucauuucauguccugugucaguu

SEQ ID NO: 3193460 - RNA, 20 nt, Human
ucauuucauguccuguguca

SEQ ID NO: 3193461 - RNA, 15 nt, Human
ucauuucauguccug

SEQ ID NO: 3193462 - RNA, 18 nt, Human
ucauuucauccuuucacu

SEQ ID NO: 3193463 - RNA, 16 nt, Human
ucauuuccugugucuu

SEQ ID NO: 3193464 - RNA, 13 nt, Human
ucauuuccugugu

SEQ ID NO: 3193465 - RNA, 14 nt, Human
ucaucugagaauga

SEQ ID NO: 3193466 - RNA, 13 nt, Human
ucaucugagaaug

SEQ ID NO: 3193467 - RNA, 11 nt, Human
ucaucugagag

SEQ ID NO: 3193468 - RNA, 19 nt, Human
ucaucugagaaugaacaaa

SEQ ID NO: 3193469 - RNA, 16 nt, Human
ucaucugagaaugaac

SEQ ID NO: 3193470 - RNA, 15 nt, Human
ucaucugagaaugaa

SEQ ID NO: 3193471 - RNA, 23 nt, Human
ucaucugagagaggcuaaaaugu

SEQ ID NO: 3193472 - RNA, 22 nt, Human
ucaucagaugcuugcggcaaaa

SEQ ID NO: 3193473 - RNA, 18 nt, Human
ucaucagaacagcuguug

SEQ ID NO: 3193474 - RNA, 16 nt, Human
ucaucagaacagcugu

SEQ ID NO: 3193475 - RNA, 15 nt, Human
ucaucagaacagcug

SEQ ID NO: 3193476 - RNA, 21 nt, Human
ucaucagaacagcuguugacu

SEQ ID NO: 3193477 - RNA, 13 nt, Human
ucaucagaacagc

SEQ ID NO: 3193478 - RNA, 16 nt, Human
ucauaggaaguuagcc

SEQ ID NO: 3193479 - RNA, 19 nt, Human
ucaugcuccccugugccag

SEQ ID NO: 3193480 - RNA, 23 nt, Human
ucaugcuccccugugccagccca

SEQ ID NO: 3193481 - RNA, 24 nt, Human
ucaugcuccccugugccagcccag

SEQ ID NO: 3193482 - RNA, 14 nt, Human
ucaugcuccuuaau

SEQ ID NO: 3193483 - RNA, 23 nt, Human
ucaucuuagguuggcaaaaaggc

SEQ ID NO: 3193484 - RNA, 18 nt, Human
ucauaccuaucaucuuaa

SEQ ID NO: 3193485 - RNA, 21 nt, Human
ucauacccacccccacccaag

SEQ ID NO: 3193486 - RNA, 21 nt, Human
ucaggugagaagcagaggaag

SEQ ID NO: 3193487 - RNA, 23 nt, Human
ucaggugccucaagagaaggcaa

SEQ ID NO: 3193488 - RNA, 14 nt, Human
ucaggugcugccau

SEQ ID NO: 3193489 - RNA, 13 nt, Human
ucaggugcugcca

SEQ ID NO: 3193490 - RNA, 19 nt, Human
ucaucaccaacgucugugc

SEQ ID NO: 3193491 - RNA, 15 nt, Human
ucauaggaaguuagc

SEQ ID NO: 3193492 - RNA, 20 nt, Human
ucaucaccaacgucugugcc

SEQ ID NO: 3193493 - RNA, 21 nt, Human
ucaucaccaacgucugugcca

SEQ ID NO: 3193494 - RNA, 12 nt, Human
ucauagcagcuu

SEQ ID NO: 3193495 - RNA, 21 nt, Human
ucauagcccucacccuggggc

SEQ ID NO: 3193496 - RNA, 16 nt, Human
ucauagcauugucuau

SEQ ID NO: 3193497 - RNA, 22 nt, Human
ucauagcauugucuauuuuucu

SEQ ID NO: 3193498 - RNA, 20 nt, Human
ucauagcauugucuauuuuu

SEQ ID NO: 3193499 - RNA, 18 nt, Human
uccaauuuacauacucug

SEQ ID NO: 3193500 - RNA, 17 nt, Human
uccaauuuacauacucu

SEQ ID NO: 3193501 - RNA, 15 nt, Human
uccaauuuuccuuca

SEQ ID NO: 3193502 - RNA, 13 nt, Human
uccaauuuuccuu

SEQ ID NO: 3193503 - RNA, 13 nt, Human
uccaauucuccuu

SEQ ID NO: 3193504 - RNA, 15 nt, Human
uccaauucuccuuua

SEQ ID NO: 3193505 - RNA, 16 nt, Human
uccacaagagcccagg

SEQ ID NO: 3193506 - RNA, 17 nt, Human
uccacaagagcccaggc

SEQ ID NO: 3193507 - RNA, 18 nt, Human
uccacaagagcccaggcc

SEQ ID NO: 3193508 - RNA, 15 nt, Human
uccacaagagcccag

SEQ ID NO: 3193509 - RNA, 18 nt, Human
uccacaaguuaaauaaau

SEQ ID NO: 3193510 - RNA, 17 nt, Human
uccacaaguuaaauaaa

SEQ ID NO: 3193511 - RNA, 14 nt, Human
uccacacacacaaa

SEQ ID NO: 3193512 - RNA, 13 nt, Human
uccacacacacaa

SEQ ID NO: 3193513 - RNA, 21 nt, Human
uccacacacacaaaaaaagac

SEQ ID NO: 3193514 - RNA, 18 nt, Human
uccacacacacaaaaaaa

SEQ ID NO: 3193515 - RNA, 17 nt, Human
uccaccugccagggaca

SEQ ID NO: 3193516 - RNA, 15 nt, Human
uccaccugccaggga

SEQ ID NO: 3193517 - RNA, 18 nt, Human
uccaccugccagggacag

SEQ ID NO: 3193518 - RNA, 21 nt, Human
uccaccugccagggacagagg

SEQ ID NO: 3193519 - RNA, 18 nt, Human
uccaccugcucugcugau

SEQ ID NO: 3193520 - RNA, 17 nt, Human
uccaccugcucugcuga

SEQ ID NO: 3193521 - RNA, 16 nt, Human
uccaccugcucugcug

SEQ ID NO: 3193522 - RNA, 15 nt, Human
uccaccugcucugcu

SEQ ID NO: 3193523 - RNA, 14 nt, Human
uccaccugcucugc

SEQ ID NO: 3193524 - RNA, 15 nt, Human
uccacagaggacaca

SEQ ID NO: 3193525 - RNA, 19 nt, Human
uccacagaggacacagaga

SEQ ID NO: 3193526 - RNA, 17 nt, Human
uccacagaggacacaga

SEQ ID NO: 3193527 - RNA, 12 nt, Human
uccacccugcuc

SEQ ID NO: 3193528 - RNA, 14 nt, Human
uccagguggcauca

SEQ ID NO: 3193529 - RNA, 11 nt, Human
uccaggguggu

SEQ ID NO: 3193530 - RNA, 16 nt, Human
uccagguucagcuugu

SEQ ID NO: 3193531 - RNA, 15 nt, Human
uccagguucagcuug

SEQ ID NO: 3193532 - RNA, 18 nt, Human
uccaggugcacaagcucc

SEQ ID NO: 3193533 - RNA, 20 nt, Human
uccaggugcacaagcuccaa

SEQ ID NO: 3193534 - RNA, 21 nt, Human
uccaggugcacaagcuccaag

SEQ ID NO: 3193535 - RNA, 22 nt, Human
uccaggugcacaagcuccaagc

SEQ ID NO: 3193536 - RNA, 23 nt, Human
uccaggggugggacacccuguga

SEQ ID NO: 3193537 - RNA, 14 nt, Human
uccagggguuuaca

SEQ ID NO: 3193538 - RNA, 17 nt, Human
uccagggguuuacagug

SEQ ID NO: 3193539 - RNA, 15 nt, Human
uccaggugcacaagc

SEQ ID NO: 3193540 - RNA, 17 nt, Human
uccaggagcagccacau

SEQ ID NO: 3193541 - RNA, 18 nt, Human
uccaggagcagccacauu

SEQ ID NO: 3193542 - RNA, 22 nt, Human
uccaggggugggacacccugug

SEQ ID NO: 3193543 - RNA, 14 nt, Human
uccacuuggucugu

SEQ ID NO: 3193544 - RNA, 15 nt, Human
uccacuuggucugug

SEQ ID NO: 3193545 - RNA, 16 nt, Human
uccacuuggucuguga

SEQ ID NO: 3193546 - RNA, 23 nt, Human
uccagccaaagccuccuccagcc

SEQ ID NO: 3193547 - RNA, 17 nt, Human
uccagcucaccagcccc

SEQ ID NO: 3193548 - RNA, 16 nt, Human
uccagcucaccagccc

SEQ ID NO: 3193549 - RNA, 18 nt, Human
uccagcucaccagcccca

SEQ ID NO: 3193550 - RNA, 19 nt, Human
uccagcuggguuggaaaac

SEQ ID NO: 3193551 - RNA, 15 nt, Human
uccagcucaccagcc

SEQ ID NO: 3193552 - RNA, 17 nt, Human
uccagcuguucagcugg

SEQ ID NO: 3193553 - RNA, 16 nt, Human
uccaggagcagccaca

SEQ ID NO: 3193554 - RNA, 21 nt, Human
ucagaggggaauaaacuguug

SEQ ID NO: 3193555 - RNA, 16 nt, Human
ucagagaaaugucugu

SEQ ID NO: 3193556 - RNA, 17 nt, Human
ucagagaaaugucuguc

SEQ ID NO: 3193557 - RNA, 16 nt, Human
ucagacugcuuugaga

SEQ ID NO: 3193558 - RNA, 12 nt, Human
ucagacuguaua

SEQ ID NO: 3193559 - RNA, 13 nt, Human
ucagacagcugcc

SEQ ID NO: 3193560 - RNA, 14 nt, Human
ucagaccgucuucc

SEQ ID NO: 3193561 - RNA, 16 nt, Human
ucagaccgucuuccuc

SEQ ID NO: 3193562 - RNA, 18 nt, Human
ucagaccgucuuccucca

SEQ ID NO: 3193563 - RNA, 17 nt, Human
ucagacgacagccccug

SEQ ID NO: 3193564 - RNA, 16 nt, Human
ucagaaacaauuucug

SEQ ID NO: 3193565 - RNA, 16 nt, Human
ucagaaacuaaaacaa

SEQ ID NO: 3193566 - RNA, 20 nt, Human
ucagaaacccucauuguguu

SEQ ID NO: 3193567 - RNA, 21 nt, Human
ucagaaacccucauuguguuu

SEQ ID NO: 3193568 - RNA, 22 nt, Human
ucagaaacaaagcauuugacuu

SEQ ID NO: 3193569 - RNA, 24 nt, Human
ucagaaacaaagcauuugacuuuc

SEQ ID NO: 3193570 - RNA, 15 nt, Human
ucacuuuauuucauu

SEQ ID NO: 3193571 - RNA, 14 nt, Human
ucacuuuauuucau

SEQ ID NO: 3193572 - RNA, 19 nt, Human
ucacugcuaagaauauuug

SEQ ID NO: 3193573 - RNA, 13 nt, Human
ucacugccucccc

SEQ ID NO: 3193574 - RNA, 18 nt, Human
ucacugccaugccagcuu

SEQ ID NO: 3193575 - RNA, 20 nt, Human
ucacucuuauugcccacgcu

SEQ ID NO: 3193576 - RNA, 18 nt, Human
ucacugcauccuccgccu

SEQ ID NO: 3193577 - RNA, 13 nt, Human
ucacugcauccuc

SEQ ID NO: 3193578 - RNA, 19 nt, Human
ucacugcauccuccgccuc

SEQ ID NO: 3193579 - RNA, 22 nt, Human
ucaccccggccaccugcggugc

SEQ ID NO: 3193580 - RNA, 13 nt, Human
ucaccagccccag

SEQ ID NO: 3193581 - RNA, 22 nt, Human
ucacucugucgcccagucugga

SEQ ID NO: 3193582 - RNA, 17 nt, Human
ucacucuuauugcccac

SEQ ID NO: 3193583 - RNA, 11 nt, Human
ucacugcuuca

SEQ ID NO: 3193584 - RNA, 22 nt, Human
ucacugcuggcugccuuagaac

SEQ ID NO: 3193585 - RNA, 18 nt, Human
ucacugcuggcugccuua

SEQ ID NO: 3193586 - RNA, 17 nt, Human
ucacugcuggcugccuu

SEQ ID NO: 3193587 - RNA, 12 nt, Human
ucacugcuggcu

SEQ ID NO: 3193588 - RNA, 16 nt, Human
ucacugcuggcugccu

SEQ ID NO: 3193589 - RNA, 15 nt, Human
ucacugcuggcugcc

SEQ ID NO: 3193590 - RNA, 14 nt, Human
ucacugcuggcugc

SEQ ID NO: 3193591 - RNA, 13 nt, Human
ucacugcuggcug

SEQ ID NO: 3193592 - RNA, 18 nt, Human
ucaggagcuccauacaca

SEQ ID NO: 3193593 - RNA, 21 nt, Human
ucagcugagccuucugagcug

SEQ ID NO: 3193594 - RNA, 18 nt, Human
ucagcugagccuucugag

SEQ ID NO: 3193595 - RNA, 14 nt, Human
ucagcugagccuuc

SEQ ID NO: 3193596 - RNA, 12 nt, Human
ucagcugagccu

SEQ ID NO: 3193597 - RNA, 18 nt, Human
ucaggauuuccucuugaa

SEQ ID NO: 3193598 - RNA, 17 nt, Human
ucaggauuuccucuuga

SEQ ID NO: 3193599 - RNA, 15 nt, Human
ucaggcucucugggc

SEQ ID NO: 3193600 - RNA, 17 nt, Human
ucaggcucucugggcug

SEQ ID NO: 3193601 - RNA, 12 nt, Human
ucaggcucccag

SEQ ID NO: 3193602 - RNA, 13 nt, Human
ucaggcucccagg

SEQ ID NO: 3193603 - RNA, 15 nt, Human
ucaggugagaagcag

SEQ ID NO: 3193604 - RNA, 16 nt, Human
ucaggugagaagcaga

SEQ ID NO: 3193605 - RNA, 14 nt, Human
ucagggccuggcuc

SEQ ID NO: 3193606 - RNA, 16 nt, Human
ucagggccuggcucag

SEQ ID NO: 3193607 - RNA, 23 nt, Human
ucaggcugucaguguuuggugca

SEQ ID NO: 3193608 - RNA, 19 nt, Human
ucagggaaacuaagauucu

SEQ ID NO: 3193609 - RNA, 21 nt, Human
ucagggaaacuaagauucuuu

SEQ ID NO: 3193610 - RNA, 18 nt, Human
ucagggcagauuuuaguu

SEQ ID NO: 3193611 - RNA, 14 nt, Human
ucagggcagauuuu

SEQ ID NO: 3193612 - RNA, 17 nt, Human
ucagcuccccucggaga

SEQ ID NO: 3193613 - RNA, 23 nt, Human
ucagccucgcaggccucccugcc

SEQ ID NO: 3193614 - RNA, 13 nt, Human
ucagccucgcagg

SEQ ID NO: 3193615 - RNA, 18 nt, Human
ucagcuccccucggagaa

SEQ ID NO: 3193616 - RNA, 15 nt, Human
ucagcugaaccuggg

SEQ ID NO: 3193617 - RNA, 16 nt, Human
ucagcugaaccugggu

SEQ ID NO: 3193618 - RNA, 22 nt, Human
ucagccucccgaguagcuggga

SEQ ID NO: 3193619 - RNA, 21 nt, Human
ucagccucccgaguagcuggg

SEQ ID NO: 3193620 - RNA, 20 nt, Human
ucagccucccgaauagcugg

SEQ ID NO: 3193621 - RNA, 23 nt, Human
ucagcauuagugggaaaaagugg

SEQ ID NO: 3193622 - RNA, 17 nt, Human
ucagcauuagugggaaa

SEQ ID NO: 3193623 - RNA, 20 nt, Human
ucagccuccugaguagcugg

SEQ ID NO: 3193624 - RNA, 18 nt, Human
ucagccugcuccagcugu

SEQ ID NO: 3193625 - RNA, 19 nt, Human
ucagccugcuccagcuguu

SEQ ID NO: 3193626 - RNA, 22 nt, Human
ucagccuccugaguagcuggga

SEQ ID NO: 3193627 - RNA, 21 nt, Human
ucagccucccaaagugcuggg

SEQ ID NO: 3193628 - RNA, 19 nt, Human
ucagccucccaaagugcug

SEQ ID NO: 3193629 - RNA, 14 nt, Human
ucagccucccaaag

SEQ ID NO: 3193630 - RNA, 13 nt, Human
ucagccucccaaa

SEQ ID NO: 3193631 - RNA, 22 nt, Human
ucagccucccgaauagcuggga

SEQ ID NO: 3193632 - RNA, 21 nt, Human
ucagccucccgaauagcuggg

SEQ ID NO: 3193633 - RNA, 18 nt, Human
ucagccucccgaguagcu

SEQ ID NO: 3193634 - RNA, 20 nt, Human
ucagccucccgaguagcugg

SEQ ID NO: 3193635 - RNA, 20 nt, Human
ucagcauucucacuccuacc

SEQ ID NO: 3193636 - RNA, 17 nt, Human
ucagcauucucacuccu

SEQ ID NO: 3193637 - RNA, 20 nt, Human
ucagcauuaccucuuuggaa

SEQ ID NO: 3193638 - RNA, 19 nt, Human
ucagcauuaccucuuugga

SEQ ID NO: 3193639 - RNA, 22 nt, Human
ucagaguauauuguugaagaga

SEQ ID NO: 3193640 - RNA, 14 nt, Human
ucagagguaucuua

SEQ ID NO: 3193641 - RNA, 22 nt, Human
ucugccagauguccuaauggug

SEQ ID NO: 3193642 - RNA, 23 nt, Human
ucugccagauguccuaaugguga

SEQ ID NO: 3193643 - RNA, 13 nt, Human
ucugccugcccag

SEQ ID NO: 3193644 - RNA, 14 nt, Human
ucugccugcccagg

SEQ ID NO: 3193645 - RNA, 17 nt, Human
ucugcugacagacacag

SEQ ID NO: 3193646 - RNA, 18 nt, Human
ucugcugacagacacagg

SEQ ID NO: 3193647 - RNA, 18 nt, Human
ucugcuccucuccccagc

SEQ ID NO: 3193648 - RNA, 15 nt, Human
ucugccugcccaggc

SEQ ID NO: 3193649 - RNA, 20 nt, Human
ucugcucccccuuuucccuc

SEQ ID NO: 3193650 - RNA, 16 nt, Human
ucugcucccccuuuuc

SEQ ID NO: 3193651 - RNA, 22 nt, Human
ucugcuccccuaaagccucaaa

SEQ ID NO: 3193652 - RNA, 22 nt, Human
ucugcugacagacacaggcccg

SEQ ID NO: 3193653 - RNA, 21 nt, Human
ucugcugacagacacaggccc

SEQ ID NO: 3193654 - RNA, 20 nt, Human
ucugcugacagacacaggcc

SEQ ID NO: 3193655 - RNA, 19 nt, Human
ucugcugacagacacaggc

SEQ ID NO: 3193656 - RNA, 12 nt, Human
ucugcugagggu

SEQ ID NO: 3193657 - RNA, 16 nt, Human
ucugcugaggguccag

SEQ ID NO: 3193658 - RNA, 19 nt, Human
ucuggaauaaggagaauga

SEQ ID NO: 3193659 - RNA, 15 nt, Human
ucuggaaugcagugg

SEQ ID NO: 3193660 - RNA, 21 nt, Human
ucugcuggucacuucuucugu

SEQ ID NO: 3193661 - RNA, 20 nt, Human
ucugcuggucacuucuucug

SEQ ID NO: 3193662 - RNA, 14 nt, Human
ucuggacaggcaug

SEQ ID NO: 3193663 - RNA, 21 nt, Human
ucuggacaggcauguucucug

SEQ ID NO: 3193664 - RNA, 23 nt, Human
ucuggaaucauuguccagagcug

SEQ ID NO: 3193665 - RNA, 14 nt, Human
ucugucgcccaguc

SEQ ID NO: 3193666 - RNA, 19 nt, Human
ucuguccuacucuguguca

SEQ ID NO: 3193667 - RNA, 15 nt, Human
ucuguccuacucugu

SEQ ID NO: 3193668 - RNA, 21 nt, Human
ucuguccugggagugagcugg

SEQ ID NO: 3193669 - RNA, 14 nt, Human
ucuguccuacucug

SEQ ID NO: 3193670 - RNA, 20 nt, Human
ucugguuccuccccuccucc

SEQ ID NO: 3193671 - RNA, 21 nt, Human
ucugguuccuccccuccuccu

SEQ ID NO: 3193672 - RNA, 13 nt, Human
ucugguuccuccc

SEQ ID NO: 3193673 - RNA, 18 nt, Human
ucuggcucuuccaggcug

SEQ ID NO: 3193674 - RNA, 23 nt, Human
ucuggcucuuccaggcugggaga

SEQ ID NO: 3193675 - RNA, 23 nt, Human
ucuggugacuuuccucuuugguc

SEQ ID NO: 3193676 - RNA, 13 nt, Human
ucugggacacagu

SEQ ID NO: 3193677 - RNA, 14 nt, Human
ucugggacacaguu

SEQ ID NO: 3193678 - RNA, 20 nt, Human
ucuggaccccaucugugaau

SEQ ID NO: 3193679 - RNA, 10 nt, Human
ucuggccuuc

SEQ ID NO: 3193680 - RNA, 15 nt, Human
ucuggcuccagcugg

SEQ ID NO: 3193681 - RNA, 17 nt, Human
ucuggccuucggccucc

SEQ ID NO: 3193682 - RNA, 19 nt, Human
ucuggaccccaucugugaa

SEQ ID NO: 3193683 - RNA, 18 nt, Human
ucuggaccccaucuguga

SEQ ID NO: 3193684 - RNA, 17 nt, Human
ucuggaccccaucugug

SEQ ID NO: 3193685 - RNA, 14 nt, Human
ucuggaccccaucu

SEQ ID NO: 3193686 - RNA, 18 nt, Human
ucuggccuucggccucca

SEQ ID NO: 3193687 - RNA, 22 nt, Human
ucuuaaauauguggaguucauc

SEQ ID NO: 3193688 - RNA, 16 nt, Human
ucuuaagaaauaaauc

SEQ ID NO: 3193689 - RNA, 14 nt, Human
ucuuaagaaauaaa

SEQ ID NO: 3193690 - RNA, 13 nt, Human
ucuuaagaaauaa

SEQ ID NO: 3193691 - RNA, 16 nt, Human
ucuuaagacagcaugu

SEQ ID NO: 3193692 - RNA, 21 nt, Human
ucuuaagacagcauguguuaa

SEQ ID NO: 3193693 - RNA, 24 nt, Human
ucuuaagacagcauguguuaaucu

SEQ ID NO: 3193694 - RNA, 15 nt, Human
ucugucuucacaaca

SEQ ID NO: 3193695 - RNA, 12 nt, Human
ucugucuuccuu

SEQ ID NO: 3193696 - RNA, 14 nt, Human
ucugucuuccuuug

SEQ ID NO: 3193697 - RNA, 12 nt, Human
ucugucugcugg

SEQ ID NO: 3193698 - RNA, 9 nt, Human
ucugucugc

SEQ ID NO: 3193699 - RNA, 22 nt, Human
ucugucugcuggucacuucuuc

SEQ ID NO: 3193700 - RNA, 13 nt, Human
ucugucugcuggu

SEQ ID NO: 3193701 - RNA, 13 nt, Human
ucugucuggucca

SEQ ID NO: 3193702 - RNA, 15 nt, Human
ucuguuuuuaaaaau

SEQ ID NO: 3193703 - RNA, 13 nt, Human
ucuuaaaaaguaa

SEQ ID NO: 3193704 - RNA, 12 nt, Human
ucuuaaaaagua

SEQ ID NO: 3193705 - RNA, 19 nt, Human
ucuguuuugugguuuggaa

SEQ ID NO: 3193706 - RNA, 20 nt, Human
ucuguuuugugguuuggaau

SEQ ID NO: 3193707 - RNA, 14 nt, Human
ucuguuuuuaaaaa

SEQ ID NO: 3193708 - RNA, 12 nt, Human
ucuugaacuccu

SEQ ID NO: 3193709 - RNA, 17 nt, Human
ucuugaacuccugaccu

SEQ ID NO: 3193710 - RNA, 19 nt, Human
ucuugaacuccugaccuca

SEQ ID NO: 3193711 - RNA, 13 nt, Human
ucuucuccuuuca

SEQ ID NO: 3193712 - RNA, 21 nt, Human
ucuucuccccuuccauuucug

SEQ ID NO: 3193713 - RNA, 16 nt, Human
ucuucuccccuuccau

SEQ ID NO: 3193714 - RNA, 14 nt, Human
ucuucuccuuucac

SEQ ID NO: 3193715 - RNA, 18 nt, Human
ucuucuuuuuuugugaug

SEQ ID NO: 3193716 - RNA, 17 nt, Human
ucuucuuuuuuugugau

SEQ ID NO: 3193717 - RNA, 16 nt, Human
ucuucuuuuuuuguga

SEQ ID NO: 3193718 - RNA, 15 nt, Human
ucuucuccaggcugu

SEQ ID NO: 3193719 - RNA, 12 nt, Human
ucuucuccccca

SEQ ID NO: 3193720 - RNA, 16 nt, Human
ucuucucccccauccu

SEQ ID NO: 3193721 - RNA, 13 nt, Human
ucuucucccccau

SEQ ID NO: 3193722 - RNA, 12 nt, Human
ucuucuccacug

SEQ ID NO: 3193723 - RNA, 15 nt, Human
ucuucucauuacuug

SEQ ID NO: 3193724 - RNA, 17 nt, Human
ucuucucauuacuuguu

SEQ ID NO: 3193725 - RNA, 13 nt, Human
ucuucaugaaaug

SEQ ID NO: 3193726 - RNA, 16 nt, Human
ucuucaugaaaugcua

SEQ ID NO: 3193727 - RNA, 20 nt, Human
ucuucaugaguagugggcua

SEQ ID NO: 3193728 - RNA, 14 nt, Human
ucuucaugaaaugc

SEQ ID NO: 3193729 - RNA, 13 nt, Human
ucuuccuggacag

SEQ ID NO: 3193730 - RNA, 12 nt, Human
ucuuccuggccg

SEQ ID NO: 3193731 - RNA, 19 nt, Human
ucuuccuggacaggccagg

SEQ ID NO: 3193732 - RNA, 17 nt, Human
ucuuccuggauuauuca

SEQ ID NO: 3193733 - RNA, 21 nt, Human
ucuuccuggucgaaaguuagu

SEQ ID NO: 3193734 - RNA, 20 nt, Human
ucuuccuggucgaaaguuag

SEQ ID NO: 3193735 - RNA, 16 nt, Human
ucuuccuggugacccu

SEQ ID NO: 3193736 - RNA, 13 nt, Human
ucuuccuguaauc

SEQ ID NO: 3193737 - RNA, 14 nt, Human
ucuuccuguaaucu

SEQ ID NO: 3193738 - RNA, 15 nt, Human
ucuuccuguaaucuu

SEQ ID NO: 3193739 - RNA, 17 nt, Human
ucuucagcacaaaagga

SEQ ID NO: 3193740 - RNA, 17 nt, Human
ucuuaggccaggcgugg

SEQ ID NO: 3193741 - RNA, 13 nt, Human
ucugacauaaucc

SEQ ID NO: 3193742 - RNA, 23 nt, Human
ucugacauaauccaguaaaauaa

SEQ ID NO: 3193743 - RNA, 19 nt, Human
ucugacauaauccaguaaa

SEQ ID NO: 3193744 - RNA, 13 nt, Human
ucugacccacugc

SEQ ID NO: 3193745 - RNA, 22 nt, Human
ucugacaggcaaugcuggcugu

SEQ ID NO: 3193746 - RNA, 21 nt, Human
ucugacaggcaaugcuggcug

SEQ ID NO: 3193747 - RNA, 12 nt, Human
ucugacaggcaa

SEQ ID NO: 3193748 - RNA, 19 nt, Human
ucugacacacagcucuguc

SEQ ID NO: 3193749 - RNA, 18 nt, Human
ucugacacacagcucugu

SEQ ID NO: 3193750 - RNA, 17 nt, Human
ucugacacacagcucug

SEQ ID NO: 3193751 - RNA, 16 nt, Human
ucugacacacagcucu

SEQ ID NO: 3193752 - RNA, 22 nt, Human
ucugaaagagucuuucuucuuc

SEQ ID NO: 3193753 - RNA, 18 nt, Human
ucugaaagagucuuucuu

SEQ ID NO: 3193754 - RNA, 16 nt, Human
ucugaaaccaaaugua

SEQ ID NO: 3193755 - RNA, 20 nt, Human
ucugaaacauuucauaauuu

SEQ ID NO: 3193756 - RNA, 13 nt, Human
ucugaaaauguau

SEQ ID NO: 3193757 - RNA, 16 nt, Human
ucucuuuuuuacaaag

SEQ ID NO: 3193758 - RNA, 15 nt, Human
ucucuuuuuuacaaa

SEQ ID NO: 3193759 - RNA, 17 nt, Human
ucucuuuuuuacaaagg

SEQ ID NO: 3193760 - RNA, 13 nt, Human
ucucuuaucugug

SEQ ID NO: 3193761 - RNA, 14 nt, Human
ucucuuuuuuaagu

SEQ ID NO: 3193762 - RNA, 16 nt, Human
ucucuuagaaaaggug

SEQ ID NO: 3193763 - RNA, 12 nt, Human
ucucuuagaaaa

SEQ ID NO: 3193764 - RNA, 22 nt, Human
ucucuuaagacagcauguguua

SEQ ID NO: 3193765 - RNA, 14 nt, Human
ucucuguuccauag

SEQ ID NO: 3193766 - RNA, 14 nt, Human
ucugcaucagcugc

SEQ ID NO: 3193767 - RNA, 20 nt, Human
ucugcacauaaacucuuuua

SEQ ID NO: 3193768 - RNA, 21 nt, Human
ucugcaucagcugcugaaaca

SEQ ID NO: 3193769 - RNA, 19 nt, Human
ucugcaucagcugcugaaa

SEQ ID NO: 3193770 - RNA, 17 nt, Human
ucugcauucaggaucaa

SEQ ID NO: 3193771 - RNA, 20 nt, Human
ucugccacagggacuugccu

SEQ ID NO: 3193772 - RNA, 17 nt, Human
ucugccacccugcugag

SEQ ID NO: 3193773 - RNA, 21 nt, Human
ucugaggaauggacauuucua

SEQ ID NO: 3193774 - RNA, 23 nt, Human
ucugaggaauccagacccggcug

SEQ ID NO: 3193775 - RNA, 14 nt, Human
ucugacccacugcu

SEQ ID NO: 3193776 - RNA, 20 nt, Human
ucugcaagaauugaagcagg

SEQ ID NO: 3193777 - RNA, 14 nt, Human
ucugcacacagcac

SEQ ID NO: 3193778 - RNA, 23 nt, Human
ucugcacaccuugaaucugccug

SEQ ID NO: 3193779 - RNA, 19 nt, Human
ucugcacauaaacucuuuu

SEQ ID NO: 3193780 - RNA, 17 nt, Human
ucugaggccguugcuga

SEQ ID NO: 3193781 - RNA, 21 nt, Human
ucugaggccguugcugacuua

SEQ ID NO: 3193782 - RNA, 22 nt, Human
ucugaggccguugcugacuuag

SEQ ID NO: 3193783 - RNA, 11 nt, Human
ucugaggcuga

SEQ ID NO: 3193784 - RNA, 23 nt, Human
ucugaggcugaaauucagaauau

SEQ ID NO: 3193785 - RNA, 21 nt, Human
ucuccuggaaauauuaagaaa

SEQ ID NO: 3193786 - RNA, 15 nt, Human
ucuccugccucagcc

SEQ ID NO: 3193787 - RNA, 17 nt, Human
ucuccugccucagccuc

SEQ ID NO: 3193788 - RNA, 20 nt, Human
ucucaaauaggcuauuaaaa

SEQ ID NO: 3193789 - RNA, 22 nt, Human
ucucaaauaggcuauuaaaaaa

SEQ ID NO: 3193790 - RNA, 23 nt, Human
ucucaaauuguaauuaauaauag

SEQ ID NO: 3193791 - RNA, 18 nt, Human
ucucaagagggcacuggu

SEQ ID NO: 3193792 - RNA, 17 nt, Human
ucucaagagggcacugg

SEQ ID NO: 3193793 - RNA, 19 nt, Human
ucucaagagggcacuggug

SEQ ID NO: 3193794 - RNA, 18 nt, Human
ucucaaguuuaugucuca

SEQ ID NO: 3193795 - RNA, 12 nt, Human
ucuccugccuca

SEQ ID NO: 3193796 - RNA, 13 nt, Human
ucucaaugaaaua

SEQ ID NO: 3193797 - RNA, 14 nt, Human
ucucaaugaaauag

SEQ ID NO: 3193798 - RNA, 23 nt, Human
ucucuaauauccacuuguccaug

SEQ ID NO: 3193799 - RNA, 20 nt, Human
ucucuaacaguggacaaagu

SEQ ID NO: 3193800 - RNA, 14 nt, Human
ucucuaacagugga

SEQ ID NO: 3193801 - RNA, 24 nt, Human
ucucguauagaagucuucaugaaa

SEQ ID NO: 3193802 - RNA, 23 nt, Human
ucucguguuauuuuaaucucaga

SEQ ID NO: 3193803 - RNA, 14 nt, Human
ucucgugauugaua

SEQ ID NO: 3193804 - RNA, 22 nt, Human
ucucgugauugauaagaaccuu

SEQ ID NO: 3193805 - RNA, 14 nt, Human
ucucguauagaagu

SEQ ID NO: 3193806 - RNA, 17 nt, Human
ucucugaggacacuaac

SEQ ID NO: 3193807 - RNA, 14 nt, Human
ucucugaggacacu

SEQ ID NO: 3193808 - RNA, 15 nt, Human
ucucugaaggaggcc

SEQ ID NO: 3193809 - RNA, 18 nt, Human
ucucugaaggaggccacc

SEQ ID NO: 3193810 - RNA, 21 nt, Human
ucucugaaggaggccaccucc

SEQ ID NO: 3193811 - RNA, 20 nt, Human
ucucugaaggaggccaccuc

SEQ ID NO: 3193812 - RNA, 23 nt, Human
ucucugaaggaggccaccuccua

SEQ ID NO: 3193813 - RNA, 14 nt, Human
ucucuagugcugug

SEQ ID NO: 3193814 - RNA, 19 nt, Human
ucucuagugcugugaaaaa

SEQ ID NO: 3193815 - RNA, 12 nt, Human
ucucucuccaag

SEQ ID NO: 3193816 - RNA, 17 nt, Human
ucucuagugcugugaaa

SEQ ID NO: 3193817 - RNA, 16 nt, Human
ucucuagugcugugaa

SEQ ID NO: 3193818 - RNA, 16 nt, Human
ucucucucucucaaaa

SEQ ID NO: 3193819 - RNA, 23 nt, Human
ucucuggccuucggccuccaucc

SEQ ID NO: 3193820 - RNA, 23 nt, Human
ucucugauacuuuuuugaaauca

SEQ ID NO: 3193821 - RNA, 22 nt, Human
ucucugaguucuguguauuuuc

SEQ ID NO: 3193822 - RNA, 14 nt, Human
ucucuguacauauu

SEQ ID NO: 3193823 - RNA, 17 nt, Human
ucuaaaucauauauaau

SEQ ID NO: 3193824 - RNA, 18 nt, Human
ucguuaggauacugccuc

SEQ ID NO: 3193825 - RNA, 18 nt, Human
ucguuaguaaucuguaua

SEQ ID NO: 3193826 - RNA, 17 nt, Human
ucuaaccacagcuccuu

SEQ ID NO: 3193827 - RNA, 16 nt, Human
ucuaaccacagcuccu

SEQ ID NO: 3193828 - RNA, 22 nt, Human
ucuaaccacagcuccuuuucca

SEQ ID NO: 3193829 - RNA, 20 nt, Human
ucuaaccacagcuccuuuuc

SEQ ID NO: 3193830 - RNA, 19 nt, Human
ucuaaccacagcuccuuuu

SEQ ID NO: 3193831 - RNA, 16 nt, Human
ucuaauauauccacac

SEQ ID NO: 3193832 - RNA, 21 nt, Human
ucgugaugcuaugauguuagu

SEQ ID NO: 3193833 - RNA, 18 nt, Human
ucggccuccauccugagg

SEQ ID NO: 3193834 - RNA, 17 nt, Human
ucggccuccauccugag

SEQ ID NO: 3193835 - RNA, 16 nt, Human
ucgugauugauaagaa

SEQ ID NO: 3193836 - RNA, 22 nt, Human
ucggccucccaaagugcuggga

SEQ ID NO: 3193837 - RNA, 22 nt, Human
ucuaugauuccagguggcauca

SEQ ID NO: 3193838 - RNA, 13 nt, Human
ucuaugccugucu

SEQ ID NO: 3193839 - RNA, 17 nt, Human
ucucaaauaacuaaaag

SEQ ID NO: 3193840 - RNA, 21 nt, Human
ucucaaagccccauuaacugc

SEQ ID NO: 3193841 - RNA, 17 nt, Human
ucucaaagaccuggggc

SEQ ID NO: 3193842 - RNA, 19 nt, Human
ucucaaagccccauuaacu

SEQ ID NO: 3193843 - RNA, 20 nt, Human
ucuagugcagcugaaauuga

SEQ ID NO: 3193844 - RNA, 19 nt, Human
ucuagugcagcugaaauug

SEQ ID NO: 3193845 - RNA, 14 nt, Human
ucuaaugugugaau

SEQ ID NO: 3193846 - RNA, 12 nt, Human
ucuaauguuuaa

SEQ ID NO: 3193847 - RNA, 11 nt, Human
ucuaauguuua

SEQ ID NO: 3193848 - RNA, 18 nt, Human
ucuaauguuuaagcagaa

SEQ ID NO: 3193849 - RNA, 16 nt, Human
ucuaauuccuguuugu

SEQ ID NO: 3193850 - RNA, 13 nt, Human
ucuaauuccuguu

SEQ ID NO: 3193851 - RNA, 13 nt, Human
ucuagaaagaaua

SEQ ID NO: 3193852 - RNA, 11 nt, Human
ucuagaaagaa

SEQ ID NO: 3193853 - RNA, 17 nt, Human
ucuagugcagcugaaau

SEQ ID NO: 3193854 - RNA, 21 nt, Human
ucuaggaagacuuuggaaaga

SEQ ID NO: 3193855 - RNA, 15 nt, Human
ucuaggaccuguguc

SEQ ID NO: 3193856 - RNA, 16 nt, Human
uccuuggacucauuuu

SEQ ID NO: 3193857 - RNA, 20 nt, Human
uccuuggaaaucaaauguaa

SEQ ID NO: 3193858 - RNA, 23 nt, Human
uccuuggaaaucaaauguaaagu

SEQ ID NO: 3193859 - RNA, 22 nt, Human
uccuuggaaaucaaauguaaag

SEQ ID NO: 3193860 - RNA, 23 nt, Human
uccuuuucacaguucucuccuuc

SEQ ID NO: 3193861 - RNA, 19 nt, Human
uccuuuuaaaacacuucca

SEQ ID NO: 3193862 - RNA, 15 nt, Human
ucgaacuccugaccu

SEQ ID NO: 3193863 - RNA, 20 nt, Human
ucgaaaguuaguaggauaug

SEQ ID NO: 3193864 - RNA, 23 nt, Human
uccuuuuccagagcauuccaguc

SEQ ID NO: 3193865 - RNA, 15 nt, Human
uccuuuuccagagca

SEQ ID NO: 3193866 - RNA, 14 nt, Human
uccuuuuccagagc

SEQ ID NO: 3193867 - RNA, 13 nt, Human
uccuuuuccagag

SEQ ID NO: 3193868 - RNA, 21 nt, Human
uccuucaccuuuguccccacc

SEQ ID NO: 3193869 - RNA, 22 nt, Human
uccuucaccuuuguccccaccg

SEQ ID NO: 3193870 - RNA, 12 nt, Human
uccuucacuguu

SEQ ID NO: 3193871 - RNA, 13 nt, Human
uccuucacuguuu

SEQ ID NO: 3193872 - RNA, 15 nt, Human
uccuucacuguuuca

SEQ ID NO: 3193873 - RNA, 22 nt, Human
uccuugaggggagccaggaggg

SEQ ID NO: 3193874 - RNA, 19 nt, Human
uccuugaggggagccagga

SEQ ID NO: 3193875 - RNA, 17 nt, Human
uccuugauaauauauug

SEQ ID NO: 3193876 - RNA, 19 nt, Human
uccuugauauuuguauuua

SEQ ID NO: 3193877 - RNA, 17 nt, Human
uccuugauauuuguauu

SEQ ID NO: 3193878 - RNA, 13 nt, Human
uccuugauauuug

SEQ ID NO: 3193879 - RNA, 16 nt, Human
uccuuaccagcagagc

SEQ ID NO: 3193880 - RNA, 17 nt, Human
uccuuaccagcagagca

SEQ ID NO: 3193881 - RNA, 18 nt, Human
uccuuaccagcagagcac

SEQ ID NO: 3193882 - RNA, 18 nt, Human
uccuucacagaugggugc

SEQ ID NO: 3193883 - RNA, 18 nt, Human
uccuucaccuuugucccc

SEQ ID NO: 3193884 - RNA, 20 nt, Human
uccuucaccuuuguccccac

SEQ ID NO: 3193885 - RNA, 19 nt, Human
uccuucacagaugggugcu

SEQ ID NO: 3193886 - RNA, 14 nt, Human
uccuggcacccggc

SEQ ID NO: 3193887 - RNA, 19 nt, Human
uccuggcacccggccccug

SEQ ID NO: 3193888 - RNA, 16 nt, Human
uccuggcacccggccc

SEQ ID NO: 3193889 - RNA, 15 nt, Human
uccugccucagccuc

SEQ ID NO: 3193890 - RNA, 13 nt, Human
uccugccucagcc

SEQ ID NO: 3193891 - RNA, 16 nt, Human
uccugccucagccucc

SEQ ID NO: 3193892 - RNA, 20 nt, Human
uccugccuaagugcagcccc

SEQ ID NO: 3193893 - RNA, 14 nt, Human
uccugccucagccu

SEQ ID NO: 3193894 - RNA, 13 nt, Human
uccugagccagau

SEQ ID NO: 3193895 - RNA, 18 nt, Human
uccuggcacugcuuccag

SEQ ID NO: 3193896 - RNA, 22 nt, Human
uccuggcacugcuuccagugag

SEQ ID NO: 3193897 - RNA, 17 nt, Human
uccuggcacugcuucca

SEQ ID NO: 3193898 - RNA, 21 nt, Human
uccuggcacccggccccugcu

SEQ ID NO: 3193899 - RNA, 20 nt, Human
uccuggcacccggccccugc

SEQ ID NO: 3193900 - RNA, 14 nt, Human
uccuuaccagcaga

SEQ ID NO: 3193901 - RNA, 13 nt, Human
uccuguaacuguu

SEQ ID NO: 3193902 - RNA, 18 nt, Human
uccuguaacuguuacagu

SEQ ID NO: 3193903 - RNA, 19 nt, Human
uccuguaacuguuacagua

SEQ ID NO: 3193904 - RNA, 21 nt, Human
uccuguaacuguuacaguaau

SEQ ID NO: 3193905 - RNA, 19 nt, Human
ucccuuccaguuuauucca

SEQ ID NO: 3193906 - RNA, 13 nt, Human
ucccuucccaccu

SEQ ID NO: 3193907 - RNA, 15 nt, Human
ucccuuccaccugcu

SEQ ID NO: 3193908 - RNA, 14 nt, Human
ucccuuccaccugc

SEQ ID NO: 3193909 - RNA, 21 nt, Human
ucccuuccaccugcucugcug

SEQ ID NO: 3193910 - RNA, 20 nt, Human
ucccuuccaccugcucugcu

SEQ ID NO: 3193911 - RNA, 19 nt, Human
ucccuuccaccugcucugc

SEQ ID NO: 3193912 - RNA, 17 nt, Human
ucccuuccaccugcucu

SEQ ID NO: 3193913 - RNA, 23 nt, Human
ucccuuccaguuuauuccagagc

SEQ ID NO: 3193914 - RNA, 22 nt, Human
ucccuuccaguuuauuccagag

SEQ ID NO: 3193915 - RNA, 23 nt, Human
ucccugccugguccucacacuca

SEQ ID NO: 3193916 - RNA, 20 nt, Human
ucccugccccucccuucaac

SEQ ID NO: 3193917 - RNA, 22 nt, Human
ucccugcugucauugcuucuuc

SEQ ID NO: 3193918 - RNA, 15 nt, Human
ucccugcucacugca

SEQ ID NO: 3193919 - RNA, 23 nt, Human
ucccugcugucauugcuucuucu

SEQ ID NO: 3193920 - RNA, 13 nt, Human
ucccugcacuugc

SEQ ID NO: 3193921 - RNA, 14 nt, Human
ucccugcacuugca

SEQ ID NO: 3193922 - RNA, 19 nt, Human
ucccugccccucccuucaa

SEQ ID NO: 3193923 - RNA, 15 nt, Human
ucccucuacugggag

SEQ ID NO: 3193924 - RNA, 17 nt, Human
ucccucuacugggagcc

SEQ ID NO: 3193925 - RNA, 16 nt, Human
ucccucgucuuuccca

SEQ ID NO: 3193926 - RNA, 20 nt, Human
ucccucggaguucuucuuga

SEQ ID NO: 3193927 - RNA, 14 nt, Human
ucccgggacucugc

SEQ ID NO: 3193928 - RNA, 21 nt, Human
uccccuguuuguuucugaaag

SEQ ID NO: 3193929 - RNA, 17 nt, Human
uccagguuuaagcuguu

SEQ ID NO: 3193930 - RNA, 18 nt, Human
uccccuguuuguuucuga

SEQ ID NO: 3193931 - RNA, 20 nt, Human
uccccuguuuguuucugaaa

SEQ ID NO: 3193932 - RNA, 20 nt, Human
uccuaauaaucauuggauuc

SEQ ID NO: 3193933 - RNA, 16 nt, Human
uccuaaucuucugaac

SEQ ID NO: 3193934 - RNA, 13 nt, Human
uccgaccagacac

SEQ ID NO: 3193935 - RNA, 18 nt, Human
uccuacccacccuccuuu

SEQ ID NO: 3193936 - RNA, 21 nt, Human
uccuaccacccgguccccacu

SEQ ID NO: 3193937 - RNA, 15 nt, Human
uccuacaagacacag

SEQ ID NO: 3193938 - RNA, 18 nt, Human
uccuaaucacucagagca

SEQ ID NO: 3193939 - RNA, 16 nt, Human
uccuaaucacucagag

SEQ ID NO: 3193940 - RNA, 15 nt, Human
uccuaaucacucaga

SEQ ID NO: 3193941 - RNA, 22 nt, Human
uccuaaugaaugcauaaaaugu

SEQ ID NO: 3193942 - RNA, 15 nt, Human
uccuaauuccacagc

SEQ ID NO: 3193943 - RNA, 14 nt, Human
uccuaauggugaug

SEQ ID NO: 3193944 - RNA, 17 nt, Human
uccuaauggugaugcag

SEQ ID NO: 3193945 - RNA, 16 nt, Human
uccuaauuccacagcu

SEQ ID NO: 3193946 - RNA, 17 nt, Human
uccuaauuccacagcug

SEQ ID NO: 3193947 - RNA, 18 nt, Human
uccuaauuccacagcugc

SEQ ID NO: 3193948 - RNA, 20 nt, Human
uccuaauggugaugcagucu

SEQ ID NO: 3193949 - RNA, 24 nt, Human
uccuaauggugaugcagucuuaga

SEQ ID NO: 3193950 - RNA, 18 nt, Human
uccuauauuguuuucagu

SEQ ID NO: 3193951 - RNA, 20 nt, Human
uccuauaccauuuccguaau

SEQ ID NO: 3193952 - RNA, 13 nt, Human
uccuauaccauuu

SEQ ID NO: 3193953 - RNA, 23 nt, Human
uccuauaauuuugauagugggac

SEQ ID NO: 3193954 - RNA, 22 nt, Human
uccuaguuccaccaucaagcca

SEQ ID NO: 3193955 - RNA, 13 nt, Human
uccuauuaguguu

SEQ ID NO: 3193956 - RNA, 14 nt, Human
uccuauuaguguua

SEQ ID NO: 3193957 - RNA, 17 nt, Human
uccuauuaguguuauau

SEQ ID NO: 3193958 - RNA, 19 nt, Human
uccuauuaguguuauauga

SEQ ID NO: 3193959 - RNA, 12 nt, Human
uccuauuagugu

SEQ ID NO: 3193960 - RNA, 12 nt, Human
uccucugcugcu

SEQ ID NO: 3193961 - RNA, 14 nt, Human
uccucugcugcugg

SEQ ID NO: 3193962 - RNA, 15 nt, Human
uccucugcugcuggc

SEQ ID NO: 3193963 - RNA, 16 nt, Human
uccucugcugcuggcu

SEQ ID NO: 3193964 - RNA, 16 nt, Human
uccucuguacagagcc

SEQ ID NO: 3193965 - RNA, 17 nt, Human
uccucuguacagagccc

SEQ ID NO: 3193966 - RNA, 18 nt, Human
uccucuguacagagccca

SEQ ID NO: 3193967 - RNA, 15 nt, Human
uccucuguacagagc

SEQ ID NO: 3193968 - RNA, 21 nt, Human
uccucuuccugaauuuuauuu

SEQ ID NO: 3193969 - RNA, 14 nt, Human
uccucuaggagguc

SEQ ID NO: 3193970 - RNA, 19 nt, Human
uccuccuuuucacaguucu

SEQ ID NO: 3193971 - RNA, 20 nt, Human
uccucggcuggcuguccacc

SEQ ID NO: 3193972 - RNA, 15 nt, Human
uccucgcuucuuuca

SEQ ID NO: 3193973 - RNA, 15 nt, Human
uccuccuucacuguu

SEQ ID NO: 3193974 - RNA, 16 nt, Human
uccuccuucacuguuu

SEQ ID NO: 3193975 - RNA, 21 nt, Human
uccuccagaacucuuccucca

SEQ ID NO: 3193976 - RNA, 18 nt, Human
uccuccagaacucuuccu

SEQ ID NO: 3193977 - RNA, 10 nt, Human
uccuccagaa

SEQ ID NO: 3193978 - RNA, 16 nt, Human
uccuccagaacucuuc

SEQ ID NO: 3193979 - RNA, 13 nt, Human
uccuccagaacuc

SEQ ID NO: 3193980 - RNA, 12 nt, Human
uccuccagaacu

SEQ ID NO: 3193981 - RNA, 11 nt, Human
uccuccagaac

SEQ ID NO: 3193982 - RNA, 18 nt, Human
ugcaacuuguaaaugugg

SEQ ID NO: 3193983 - RNA, 16 nt, Human
ugcaacuuguaaaugu

SEQ ID NO: 3193984 - RNA, 22 nt, Human
ugcaaccugauugugucucuug

SEQ ID NO: 3193985 - RNA, 18 nt, Human
ugcaaccuucgccaccug

SEQ ID NO: 3193986 - RNA, 21 nt, Human
ugcaaccuucgccaccugggu

SEQ ID NO: 3193987 - RNA, 19 nt, Human
ugcaaccuuguuuauuaaa

SEQ ID NO: 3193988 - RNA, 21 nt, Human
ugcaaccuccgccucuugggu

SEQ ID NO: 3193989 - RNA, 20 nt, Human
ugcaaccuccgccucuuggg

SEQ ID NO: 3193990 - RNA, 18 nt, Human
ugcaaccuccgccucuug

SEQ ID NO: 3193991 - RNA, 19 nt, Human
ugcaaccugauugugucuc

SEQ ID NO: 3193992 - RNA, 20 nt, Human
ugcaaccugauugugucucu

SEQ ID NO: 3193993 - RNA, 21 nt, Human
ugcaaccucuaccuccugggu

SEQ ID NO: 3193994 - RNA, 14 nt, Human
ugcaaccuccgccu

SEQ ID NO: 3193995 - RNA, 13 nt, Human
ugcaaccuccgcc

SEQ ID NO: 3193996 - RNA, 16 nt, Human
ugcaaccauuugaaac

SEQ ID NO: 3193997 - RNA, 20 nt, Human
ugcaacaggcugggcuucag

SEQ ID NO: 3193998 - RNA, 19 nt, Human
ugcaacaggcugggcuuca

SEQ ID NO: 3193999 - RNA, 13 nt, Human
ugcaaacauugga

SEQ ID NO: 3194000 - RNA, 20 nt, Human
ugcaaccaaacucccaucag

SEQ ID NO: 3194001 - RNA, 15 nt, Human
ugcaaccacugcaau

SEQ ID NO: 3194002 - RNA, 17 nt, Human
ugcaacaggcugggcuu

SEQ ID NO: 3194003 - RNA, 16 nt, Human
ugcaacaggcugggcu

SEQ ID NO: 3194004 - RNA, 15 nt, Human
ugcaacaggcugggc

SEQ ID NO: 3194005 - RNA, 14 nt, Human
ugcaacaggcuggg

SEQ ID NO: 3194006 - RNA, 13 nt, Human
ugcaacaggcugg

SEQ ID NO: 3194007 - RNA, 14 nt, Human
ugcaaaauuccuga

SEQ ID NO: 3194008 - RNA, 23 nt, Human
ugcaaaauacaugaugauuucag

SEQ ID NO: 3194009 - RNA, 21 nt, Human
ugauuuuugagcccuuguuuc

SEQ ID NO: 3194010 - RNA, 23 nt, Human
ugauuuuugagcccuuguuucag

SEQ ID NO: 3194011 - RNA, 14 nt, Human
ugauuuuuugaaag

SEQ ID NO: 3194012 - RNA, 18 nt, Human
ugauuuuuugaaaguuaa

SEQ ID NO: 3194013 - RNA, 23 nt, Human
ugauuuuuuuucccauuuagaau

SEQ ID NO: 3194014 - RNA, 22 nt, Human
ugauuuuuuuucccauuuagaa

SEQ ID NO: 3194015 - RNA, 16 nt, Human
ugauuuuuuuuuccuu

SEQ ID NO: 3194016 - RNA, 17 nt, Human
ugauuuuuuuuuccuuc

SEQ ID NO: 3194017 - RNA, 19 nt, Human
ugauuuuuuuuuccuucag

SEQ ID NO: 3194018 - RNA, 20 nt, Human
ugauuuuuuuuuccuucagu

SEQ ID NO: 3194019 - RNA, 22 nt, Human
ugauuuuuuuuuccuucagugc

SEQ ID NO: 3194020 - RNA, 23 nt, Human
ugauuuuuuuuuccuucagugcc

SEQ ID NO: 3194021 - RNA, 20 nt, Human
ugauuuuuuuuuuuaaucua

SEQ ID NO: 3194022 - RNA, 16 nt, Human
ugauuuuuuuuuuuca

SEQ ID NO: 3194023 - RNA, 22 nt, Human
ugcaaaaauccaaauauuguua

SEQ ID NO: 3194024 - RNA, 21 nt, Human
ugcaaaaauccaaauauuguu

SEQ ID NO: 3194025 - RNA, 18 nt, Human
ugcaaaaauccaaauauu

SEQ ID NO: 3194026 - RNA, 17 nt, Human
ugcaaaaauccaaauau

SEQ ID NO: 3194027 - RNA, 21 nt, Human
ugcaaaaaaucuuaauacugu

SEQ ID NO: 3194028 - RNA, 14 nt, Human
ugcaaaaaaucuua

SEQ ID NO: 3194029 - RNA, 19 nt, Human
ugcaaaaaaucuuaauacu

SEQ ID NO: 3194030 - RNA, 16 nt, Human
ugcaaaaaaucuuaau

SEQ ID NO: 3194031 - RNA, 21 nt, Human
ugcaaaaagcuagucaacagu

SEQ ID NO: 3194032 - RNA, 16 nt, Human
ugcaaaaagcuucugu

SEQ ID NO: 3194033 - RNA, 18 nt, Human
ugcaaaaagcuucugugg

SEQ ID NO: 3194034 - RNA, 14 nt, Human
ugcaaaaauaauca

SEQ ID NO: 3194035 - RNA, 17 nt, Human
ugcaaaaauaaucauga

SEQ ID NO: 3194036 - RNA, 13 nt, Human
ugauuuucauugc

SEQ ID NO: 3194037 - RNA, 15 nt, Human
ugauuuuauucuuga

SEQ ID NO: 3194038 - RNA, 14 nt, Human
ugauuuuauucuug

SEQ ID NO: 3194039 - RNA, 13 nt, Human
ugauuuuauucuu

SEQ ID NO: 3194040 - RNA, 12 nt, Human
ugauuuuauucu

SEQ ID NO: 3194041 - RNA, 15 nt, Human
ugauuuucauugcug

SEQ ID NO: 3194042 - RNA, 22 nt, Human
ugauuuuccaucuaaaaauaua

SEQ ID NO: 3194043 - RNA, 19 nt, Human
ugauuuuccaucuaaaaau

SEQ ID NO: 3194044 - RNA, 17 nt, Human
ugauuuuccaucuaaaa

SEQ ID NO: 3194045 - RNA, 16 nt, Human
ugauuuuauucuugau

SEQ ID NO: 3194046 - RNA, 17 nt, Human
ugauuuuaaauguguga

SEQ ID NO: 3194047 - RNA, 15 nt, Human
ugauuuuaaaugugu

SEQ ID NO: 3194048 - RNA, 13 nt, Human
ugauuuuaaaugu

SEQ ID NO: 3194049 - RNA, 13 nt, Human
ugaugugacauuu

SEQ ID NO: 3194050 - RNA, 12 nt, Human
ugaugugacauu

SEQ ID NO: 3194051 - RNA, 12 nt, Human
ugaugugaaacu

SEQ ID NO: 3194052 - RNA, 15 nt, Human
ugauguccuguaaac

SEQ ID NO: 3194053 - RNA, 19 nt, Human
ugauguccuguaaacacuc

SEQ ID NO: 3194054 - RNA, 21 nt, Human
ugauguccuguaaacacucag

SEQ ID NO: 3194055 - RNA, 18 nt, Human
ugaugugcucaucagaaa

SEQ ID NO: 3194056 - RNA, 19 nt, Human
ugaugugcucaucagaaac

SEQ ID NO: 3194057 - RNA, 16 nt, Human
ugaugugccugcuuca

SEQ ID NO: 3194058 - RNA, 20 nt, Human
ugaugugccuaaauaaguua

SEQ ID NO: 3194059 - RNA, 18 nt, Human
ugaugugacauuugucau

SEQ ID NO: 3194060 - RNA, 16 nt, Human
ugaugugacauuuguc

SEQ ID NO: 3194061 - RNA, 15 nt, Human
ugaugugacauuugu

SEQ ID NO: 3194062 - RNA, 14 nt, Human
ugaugugacauuug

SEQ ID NO: 3194063 - RNA, 22 nt, Human
ugcaauguagaggggaaaagag

SEQ ID NO: 3194064 - RNA, 15 nt, Human
ugcaaugugaaaaau

SEQ ID NO: 3194065 - RNA, 17 nt, Human
ugcaaugugaaaaaucu

SEQ ID NO: 3194066 - RNA, 19 nt, Human
ugcaauuaaacuuccaaag

SEQ ID NO: 3194067 - RNA, 20 nt, Human
ugcaauuaaacuuccaaaga

SEQ ID NO: 3194068 - RNA, 22 nt, Human
ugcaauuaaacuuccaaagaaa

SEQ ID NO: 3194069 - RNA, 23 nt, Human
ugcaauuaaacuuccaaagaaag

SEQ ID NO: 3194070 - RNA, 24 nt, Human
ugcaauuaaacuuccaaagaaagu

SEQ ID NO: 3194071 - RNA, 16 nt, Human
ugcaauggcagccuug

SEQ ID NO: 3194072 - RNA, 15 nt, Human
ugcaauggcagccuu

SEQ ID NO: 3194073 - RNA, 14 nt, Human
ugcaauggcagccu

SEQ ID NO: 3194074 - RNA, 13 nt, Human
ugcaauggcagcc

SEQ ID NO: 3194075 - RNA, 17 nt, Human
ugcaaugaccuuucaau

SEQ ID NO: 3194076 - RNA, 19 nt, Human
ugcaaugaccuuucaauag

SEQ ID NO: 3194077 - RNA, 22 nt, Human
ugcaaugaccuuucaauaggaa

SEQ ID NO: 3194078 - RNA, 23 nt, Human
ugcaaugaccuuucaauaggaaa

SEQ ID NO: 3194079 - RNA, 13 nt, Human
ugcaaugaccuuu

SEQ ID NO: 3194080 - RNA, 16 nt, Human
ugcaaugaccuuucaa

SEQ ID NO: 3194081 - RNA, 15 nt, Human
ugcacaaacagaggc

SEQ ID NO: 3194082 - RNA, 16 nt, Human
ugcacaaacagaggcc

SEQ ID NO: 3194083 - RNA, 17 nt, Human
ugcacaaacagaggccg

SEQ ID NO: 3194084 - RNA, 19 nt, Human
ugcacaaacagaggccgcc

SEQ ID NO: 3194085 - RNA, 20 nt, Human
ugcacaaacagaggccgcca

SEQ ID NO: 3194086 - RNA, 22 nt, Human
ugcaauuuuucuuucuuuuguu

SEQ ID NO: 3194087 - RNA, 22 nt, Human
ugcaauuuuauaaggacuuccu

SEQ ID NO: 3194088 - RNA, 17 nt, Human
ugcacaaagcccuucca

SEQ ID NO: 3194089 - RNA, 15 nt, Human
ugcacaaagcccuuc

SEQ ID NO: 3194090 - RNA, 13 nt, Human
ugcaccugggaca

SEQ ID NO: 3194091 - RNA, 21 nt, Human
ugcaccggcuggccuggcccc

SEQ ID NO: 3194092 - RNA, 19 nt, Human
ugcaccggcuggccuggcc

SEQ ID NO: 3194093 - RNA, 20 nt, Human
ugcaccggcuggccuggccc

SEQ ID NO: 3194094 - RNA, 18 nt, Human
ugcaccggcuggccuggc

SEQ ID NO: 3194095 - RNA, 17 nt, Human
ugcacagugcaucucag

SEQ ID NO: 3194096 - RNA, 16 nt, Human
ugcacagugcaucuca

SEQ ID NO: 3194097 - RNA, 15 nt, Human
ugcacagugcaucuc

SEQ ID NO: 3194098 - RNA, 21 nt, Human
ugcacaaauacggauccugca

SEQ ID NO: 3194099 - RNA, 16 nt, Human
ugcacugucaagauga

SEQ ID NO: 3194100 - RNA, 19 nt, Human
ugcacugaaguuugauaaa

SEQ ID NO: 3194101 - RNA, 16 nt, Human
ugcacugaaguuugau

SEQ ID NO: 3194102 - RNA, 24 nt, Human
ugcacugaaguuugauaaauagug

SEQ ID NO: 3194103 - RNA, 21 nt, Human
ugcacugacauuguuggccaa

SEQ ID NO: 3194104 - RNA, 18 nt, Human
ugcacugacauuguuggc

SEQ ID NO: 3194105 - RNA, 16 nt, Human
ugcacucucuuggcug

SEQ ID NO: 3194106 - RNA, 12 nt, Human
ugcacucuucua

SEQ ID NO: 3194107 - RNA, 23 nt, Human
ugcacucuuguuucucccgugcu

SEQ ID NO: 3194108 - RNA, 13 nt, Human
ugcacugaaguuu

SEQ ID NO: 3194109 - RNA, 10 nt, Human
ugcacugaag

SEQ ID NO: 3194110 - RNA, 15 nt, Human
ugcacuuaauuuguu

SEQ ID NO: 3194111 - RNA, 19 nt, Human
ugcagagguccacaacaca

SEQ ID NO: 3194112 - RNA, 22 nt, Human
ugccaucauguuuacagaggac

SEQ ID NO: 3194113 - RNA, 12 nt, Human
ugccauccaggu

SEQ ID NO: 3194114 - RNA, 15 nt, Human
ugccauccagguuca

SEQ ID NO: 3194115 - RNA, 17 nt, Human
ugccagguuuuuggucu

SEQ ID NO: 3194116 - RNA, 22 nt, Human
ugccaggugaaggaggcuccag

SEQ ID NO: 3194117 - RNA, 22 nt, Human
ugccaggucccuuucauuugcu

SEQ ID NO: 3194118 - RNA, 18 nt, Human
ugccaggucccuuucauu

SEQ ID NO: 3194119 - RNA, 12 nt, Human
ugccaggaagcc

SEQ ID NO: 3194120 - RNA, 16 nt, Human
ugccaggaagccagca

SEQ ID NO: 3194121 - RNA, 18 nt, Human
ugccaggaagccagcagg

SEQ ID NO: 3194122 - RNA, 19 nt, Human
ugccaggaagccagcaggc

SEQ ID NO: 3194123 - RNA, 20 nt, Human
ugccaugaggaacaaggcaa

SEQ ID NO: 3194124 - RNA, 23 nt, Human
ugccaugaggaacaaggcaaggc

SEQ ID NO: 3194125 - RNA, 14 nt, Human
ugccaugugccagg

SEQ ID NO: 3194126 - RNA, 18 nt, Human
ugccaugucagcgcucug

SEQ ID NO: 3194127 - RNA, 20 nt, Human
ugccaugucagcgcucuggu

SEQ ID NO: 3194128 - RNA, 15 nt, Human
ugccaugugccaggu

SEQ ID NO: 3194129 - RNA, 20 nt, Human
ugccaugugcuucugccacc

SEQ ID NO: 3194130 - RNA, 21 nt, Human
ugcccacucccugcaaccuga

SEQ ID NO: 3194131 - RNA, 20 nt, Human
ugcccacuccugcucugcuc

SEQ ID NO: 3194132 - RNA, 19 nt, Human
ugcccacuccugcucugcu

SEQ ID NO: 3194133 - RNA, 18 nt, Human
ugcccacuccugcucugc

SEQ ID NO: 3194134 - RNA, 14 nt, Human
ugcccacuccugcu

SEQ ID NO: 3194135 - RNA, 19 nt, Human
ugcccaccuggccucugca

SEQ ID NO: 3194136 - RNA, 18 nt, Human
ugcccacgcuggagugca

SEQ ID NO: 3194137 - RNA, 20 nt, Human
ugcccaccuggccucugcac

SEQ ID NO: 3194138 - RNA, 12 nt, Human
ugccauguuggc

SEQ ID NO: 3194139 - RNA, 15 nt, Human
ugccauguuggccag

SEQ ID NO: 3194140 - RNA, 21 nt, Human
ugcauuauauuuguaaauuua

SEQ ID NO: 3194141 - RNA, 14 nt, Human
ugcauuaaaagaaa

SEQ ID NO: 3194142 - RNA, 16 nt, Human
ugcauuaaaagaaaau

SEQ ID NO: 3194143 - RNA, 15 nt, Human
ugcauuaaaagaaaa

SEQ ID NO: 3194144 - RNA, 17 nt, Human
ugcauuaaaagaaaaua

SEQ ID NO: 3194145 - RNA, 15 nt, Human
ugccaccacgcccgg

SEQ ID NO: 3194146 - RNA, 16 nt, Human
ugccacauuuucuuaa

SEQ ID NO: 3194147 - RNA, 14 nt, Human
ugcauuuuaccauc

SEQ ID NO: 3194148 - RNA, 22 nt, Human
ugcauuugugcguaugcagugu

SEQ ID NO: 3194149 - RNA, 17 nt, Human
ugcaugguuuagaaagc

SEQ ID NO: 3194150 - RNA, 12 nt, Human
ugcauguaauca

SEQ ID NO: 3194151 - RNA, 16 nt, Human
ugcauguacuaucuua

SEQ ID NO: 3194152 - RNA, 15 nt, Human
ugcauguacuaucuu

SEQ ID NO: 3194153 - RNA, 21 nt, Human
ugcauguaaucaacauggcua

SEQ ID NO: 3194154 - RNA, 13 nt, Human
ugcauguaaucaa

SEQ ID NO: 3194155 - RNA, 19 nt, Human
ugcauguuacauaagauaa

SEQ ID NO: 3194156 - RNA, 19 nt, Human
ugcagauaaacaguaguga

SEQ ID NO: 3194157 - RNA, 14 nt, Human
ugcagaguauuucu

SEQ ID NO: 3194158 - RNA, 17 nt, Human
ugcagauaaacaguagu

SEQ ID NO: 3194159 - RNA, 23 nt, Human
ugcagauacuacugaccagacaa

SEQ ID NO: 3194160 - RNA, 19 nt, Human
ugcagauacuacugaccag

SEQ ID NO: 3194161 - RNA, 19 nt, Human
ugcagaguauuucuaaagu

SEQ ID NO: 3194162 - RNA, 14 nt, Human
ugcagaugccuggg

SEQ ID NO: 3194163 - RNA, 14 nt, Human
ugcauccuccgccu

SEQ ID NO: 3194164 - RNA, 16 nt, Human
ugccugguggcagcug

SEQ ID NO: 3194165 - RNA, 19 nt, Human
ugccugguggcagcugcgg

SEQ ID NO: 3194166 - RNA, 18 nt, Human
ugccugguggcagcugcg

SEQ ID NO: 3194167 - RNA, 17 nt, Human
ugccugguggcagcugc

SEQ ID NO: 3194168 - RNA, 21 nt, Human
ugccucuucucuacucuaggg

SEQ ID NO: 3194169 - RNA, 21 nt, Human
ugccucuggcucuacacauau

SEQ ID NO: 3194170 - RNA, 13 nt, Human
ugccucuuccucc

SEQ ID NO: 3194171 - RNA, 21 nt, Human
ugccuccuuugugaggaagcc

SEQ ID NO: 3194172 - RNA, 20 nt, Human
ugccuccuuugugaggaagc

SEQ ID NO: 3194173 - RNA, 22 nt, Human
ugccuccuuugugaggaagccg

SEQ ID NO: 3194174 - RNA, 13 nt, Human
ugccucugggacu

SEQ ID NO: 3194175 - RNA, 20 nt, Human
ugccucuggcucuacacaua

SEQ ID NO: 3194176 - RNA, 14 nt, Human
ugccucugccuguc

SEQ ID NO: 3194177 - RNA, 13 nt, Human
ugccucugccugu

SEQ ID NO: 3194178 - RNA, 18 nt, Human
ugccucugccugucuccc

SEQ ID NO: 3194179 - RNA, 12 nt, Human
ugccucugccug

SEQ ID NO: 3194180 - RNA, 18 nt, Human
ugcccagaaugaggcugc

SEQ ID NO: 3194181 - RNA, 17 nt, Human
ugcccagaaugaggcug

SEQ ID NO: 3194182 - RNA, 14 nt, Human
ugcccagaauacug

SEQ ID NO: 3194183 - RNA, 19 nt, Human
ugcccagaauacugaugga

SEQ ID NO: 3194184 - RNA, 16 nt, Human
ugcccagaauacugau

SEQ ID NO: 3194185 - RNA, 18 nt, Human
ugcccagaauacugaugg

SEQ ID NO: 3194186 - RNA, 22 nt, Human
ugcccugcccaccuggccucug

SEQ ID NO: 3194187 - RNA, 23 nt, Human
ugcccugcccaccuggccucugc

SEQ ID NO: 3194188 - RNA, 21 nt, Human
ugcccugcccaccuggccucu

SEQ ID NO: 3194189 - RNA, 19 nt, Human
ugcccugcgggucacagga

SEQ ID NO: 3194190 - RNA, 18 nt, Human
ugcccugcugagucccag

SEQ ID NO: 3194191 - RNA, 22 nt, Human
ugcccugcugagucccaggcug

SEQ ID NO: 3194192 - RNA, 23 nt, Human
ugcccugcugagucccaggcuga

SEQ ID NO: 3194193 - RNA, 13 nt, Human
ugcccugcuguuu

SEQ ID NO: 3194194 - RNA, 18 nt, Human
ugcccuggauccaucagg

SEQ ID NO: 3194195 - RNA, 14 nt, Human
ugcccugcuguuua

SEQ ID NO: 3194196 - RNA, 21 nt, Human
ugcccuggugcugccacacuu

SEQ ID NO: 3194197 - RNA, 18 nt, Human
ugcccuggugcugccaca

SEQ ID NO: 3194198 - RNA, 20 nt, Human
ugcccuggugcugccacacu

SEQ ID NO: 3194199 - RNA, 15 nt, Human
ugccgucuaccugag

SEQ ID NO: 3194200 - RNA, 16 nt, Human
ugccgucuaccugagg

SEQ ID NO: 3194201 - RNA, 17 nt, Human
ugccgucuaccugaggg

SEQ ID NO: 3194202 - RNA, 19 nt, Human
ugccgucuaccugaggggc

SEQ ID NO: 3194203 - RNA, 21 nt, Human
ugccggucuugacagcucagu

SEQ ID NO: 3194204 - RNA, 23 nt, Human
ugaggcugcuuuccaaagccaau

SEQ ID NO: 3194205 - RNA, 20 nt, Human
ugaggcugcuuuccaaagcc

SEQ ID NO: 3194206 - RNA, 16 nt, Human
ugaggcugcuuuccaa

SEQ ID NO: 3194207 - RNA, 11 nt, Human
ugaggcugggc

SEQ ID NO: 3194208 - RNA, 19 nt, Human
ugaggacauggcuucugaa

SEQ ID NO: 3194209 - RNA, 23 nt, Human
ugaggacuuaaaauauuccugca

SEQ ID NO: 3194210 - RNA, 19 nt, Human
ugagguggaagagggcugc

SEQ ID NO: 3194211 - RNA, 15 nt, Human
ugaggugcuauguuc

SEQ ID NO: 3194212 - RNA, 16 nt, Human
ugaggugcuauguucu

SEQ ID NO: 3194213 - RNA, 19 nt, Human
ugagguuucaaaccucccu

SEQ ID NO: 3194214 - RNA, 21 nt, Human
ugaguccccuguuuguuucug

SEQ ID NO: 3194215 - RNA, 19 nt, Human
ugaguccuggcaugggaau

SEQ ID NO: 3194216 - RNA, 22 nt, Human
ugaguccuggcaugggaaugaa

SEQ ID NO: 3194217 - RNA, 14 nt, Human
ugagucgaggacag

SEQ ID NO: 3194218 - RNA, 23 nt, Human
ugaguccuccagaacucuuccuc

SEQ ID NO: 3194219 - RNA, 11 nt, Human
ugaguccuggc

SEQ ID NO: 3194220 - RNA, 18 nt, Human
ugaguccuggcaugggaa

SEQ ID NO: 3194221 - RNA, 20 nt, Human
ugaguccccuguuuguuucu

SEQ ID NO: 3194222 - RNA, 12 nt, Human
ugaguccuccag

SEQ ID NO: 3194223 - RNA, 17 nt, Human
ugaguccuccagaacuc

SEQ ID NO: 3194224 - RNA, 16 nt, Human
ugaguccuccagaacu

SEQ ID NO: 3194225 - RNA, 15 nt, Human
ugaguccuccagaac

SEQ ID NO: 3194226 - RNA, 14 nt, Human
ugaguccuccagaa

SEQ ID NO: 3194227 - RNA, 14 nt, Human
ugaguuggcuggga

SEQ ID NO: 3194228 - RNA, 16 nt, Human
ugaguuggcugggaau

SEQ ID NO: 3194229 - RNA, 16 nt, Human
ugaguugauucagcuc

SEQ ID NO: 3194230 - RNA, 19 nt, Human
ugaguugauucagcucugc

SEQ ID NO: 3194231 - RNA, 21 nt, Human
ugaguugauagcacagacccu

SEQ ID NO: 3194232 - RNA, 23 nt, Human
ugaguugauagcacagacccugc

SEQ ID NO: 3194233 - RNA, 16 nt, Human
ugagucgaggacaggg

SEQ ID NO: 3194234 - RNA, 15 nt, Human
ugagucgaggacagg

SEQ ID NO: 3194235 - RNA, 17 nt, Human
ugaguuggcugggaaua

SEQ ID NO: 3194236 - RNA, 22 nt, Human
ugaguuguuaccccaagcgccc

SEQ ID NO: 3194237 - RNA, 15 nt, Human
ugaguuguuuuugua

SEQ ID NO: 3194238 - RNA, 16 nt, Human
ugaguuguuuuuguau

SEQ ID NO: 3194239 - RNA, 14 nt, Human
ugaguuguuuuugu

SEQ ID NO: 3194240 - RNA, 17 nt, Human
ugaguuguuuuuguaua

SEQ ID NO: 3194241 - RNA, 18 nt, Human
ugaguuguuuuuguauau

SEQ ID NO: 3194242 - RNA, 13 nt, Human
ugauaaaaucaua

SEQ ID NO: 3194243 - RNA, 12 nt, Human
ugauaaaaucau

SEQ ID NO: 3194244 - RNA, 20 nt, Human
ugaguuguuuuuguauauug

SEQ ID NO: 3194245 - RNA, 13 nt, Human
ugauaaaaauacu

SEQ ID NO: 3194246 - RNA, 17 nt, Human
ugauagcacagacccug

SEQ ID NO: 3194247 - RNA, 18 nt, Human
ugauagcacagacccugc

SEQ ID NO: 3194248 - RNA, 20 nt, Human
ugauagcacagacccugccc

SEQ ID NO: 3194249 - RNA, 21 nt, Human
ugauagcacagacccugcccu

SEQ ID NO: 3194250 - RNA, 14 nt, Human
ugauagcacagacc

SEQ ID NO: 3194251 - RNA, 14 nt, Human
ugauaaauaguguu

SEQ ID NO: 3194252 - RNA, 19 nt, Human
ugauaaauaguguuauuga

SEQ ID NO: 3194253 - RNA, 17 nt, Human
ugauaaauaguguuauu

SEQ ID NO: 3194254 - RNA, 21 nt, Human
ugauaaauauucacacuugaa

SEQ ID NO: 3194255 - RNA, 15 nt, Human
ugauagcacagaccc

SEQ ID NO: 3194256 - RNA, 16 nt, Human
ugauagcacagacccu

SEQ ID NO: 3194257 - RNA, 22 nt, Human
ugauagcacagacccugcccug

SEQ ID NO: 3194258 - RNA, 23 nt, Human
ugauagcacagacccugcccugu

SEQ ID NO: 3194259 - RNA, 21 nt, Human
ugauagccccucuccccgcag

SEQ ID NO: 3194260 - RNA, 14 nt, Human
ugauagcauuguaa

SEQ ID NO: 3194261 - RNA, 16 nt, Human
ugauagcauuguaagc

SEQ ID NO: 3194262 - RNA, 17 nt, Human
ugauaaauuugacuguu

SEQ ID NO: 3194263 - RNA, 23 nt, Human
ugauagcauaugacaaauguuuc

SEQ ID NO: 3194264 - RNA, 15 nt, Human
ugauagcauaugaca

SEQ ID NO: 3194265 - RNA, 14 nt, Human
ugauaguugaaugu

SEQ ID NO: 3194266 - RNA, 17 nt, Human
ugauaguugaauguugc

SEQ ID NO: 3194267 - RNA, 22 nt, Human
ugauagguuauuuugauguaaa

SEQ ID NO: 3194268 - RNA, 18 nt, Human
ugauagguauaaguggug

SEQ ID NO: 3194269 - RNA, 14 nt, Human
ugaugaaaauauuu

SEQ ID NO: 3194270 - RNA, 22 nt, Human
ugaugaucuuugcagacaggca

SEQ ID NO: 3194271 - RNA, 20 nt, Human
ugaugaugaaaugaggucag

SEQ ID NO: 3194272 - RNA, 23 nt, Human
ugaugaucuuugcagacaggcaa

SEQ ID NO: 3194273 - RNA, 14 nt, Human
ugaugccaugagga

SEQ ID NO: 3194274 - RNA, 20 nt, Human
ugaucuuugcagacaggcaa

SEQ ID NO: 3194275 - RNA, 19 nt, Human
ugaucuuugcagacaggca

SEQ ID NO: 3194276 - RNA, 21 nt, Human
ugaucugaugcaagcaagaaa

SEQ ID NO: 3194277 - RNA, 23 nt, Human
ugaucuuugcagacaggcaagca

SEQ ID NO: 3194278 - RNA, 21 nt, Human
ugaucuuugcagacaggcaag

SEQ ID NO: 3194279 - RNA, 18 nt, Human
ugaucuuugcagacaggc

SEQ ID NO: 3194280 - RNA, 16 nt, Human
ugaugaaaagcuuugu

SEQ ID NO: 3194281 - RNA, 14 nt, Human
ugaugaaaagcuuu

SEQ ID NO: 3194282 - RNA, 23 nt, Human
ugaugaaaagcuuuguuuguucu

SEQ ID NO: 3194283 - RNA, 22 nt, Human
ugaugaaaagcuuuguuuguuc

SEQ ID NO: 3194284 - RNA, 19 nt, Human
ugaugcuaucaguuuuaua

SEQ ID NO: 3194285 - RNA, 22 nt, Human
ugaugcucuuucccacccagcc

SEQ ID NO: 3194286 - RNA, 19 nt, Human
ugaugcucuuucccaccca

SEQ ID NO: 3194287 - RNA, 15 nt, Human
ugaugcucuuuccca

SEQ ID NO: 3194288 - RNA, 18 nt, Human
ugaugcuucuucagagac

SEQ ID NO: 3194289 - RNA, 22 nt, Human
ugaugcuggaacucuugacagc

SEQ ID NO: 3194290 - RNA, 18 nt, Human
ugaugcuggaacucuuga

SEQ ID NO: 3194291 - RNA, 19 nt, Human
ugaugcuucuucagagacu

SEQ ID NO: 3194292 - RNA, 21 nt, Human
ugaugcuucuucagagacucc

SEQ ID NO: 3194293 - RNA, 22 nt, Human
ugaugcuucuucagagacuccu

SEQ ID NO: 3194294 - RNA, 18 nt, Human
ugaugguuuccaauuuca

SEQ ID NO: 3194295 - RNA, 12 nt, Human
ugauguacugua

SEQ ID NO: 3194296 - RNA, 19 nt, Human
ugaugucccaacuuguaaa

SEQ ID NO: 3194297 - RNA, 24 nt, Human
ugauaguuguaccgcaaugugacu

SEQ ID NO: 3194298 - RNA, 14 nt, Human
ugauaguugugugu

SEQ ID NO: 3194299 - RNA, 15 nt, Human
ugauauaaacagcuu

SEQ ID NO: 3194300 - RNA, 13 nt, Human
ugauauaaacagc

SEQ ID NO: 3194301 - RNA, 17 nt, Human
ugauauauuuaaaaaca

SEQ ID NO: 3194302 - RNA, 21 nt, Human
ugauauaucucaaauuguaau

SEQ ID NO: 3194303 - RNA, 16 nt, Human
ugauauaucucaaauu

SEQ ID NO: 3194304 - RNA, 15 nt, Human
ugauauaucucaaau

SEQ ID NO: 3194305 - RNA, 16 nt, Human
ugauauaacuuuagaa

SEQ ID NO: 3194306 - RNA, 17 nt, Human
ugauauaacuuuagaaa

SEQ ID NO: 3194307 - RNA, 15 nt, Human
ugauauaccaaauua

SEQ ID NO: 3194308 - RNA, 16 nt, Human
ugauauaccaaauuaa

SEQ ID NO: 3194309 - RNA, 20 nt, Human
ugauauaccaaauuaaaaaa

SEQ ID NO: 3194310 - RNA, 22 nt, Human
ugaucacggcucacugcagccu

SEQ ID NO: 3194311 - RNA, 16 nt, Human
ugaucacugaaauaaa

SEQ ID NO: 3194312 - RNA, 14 nt, Human
ugaucacugaaaua

SEQ ID NO: 3194313 - RNA, 21 nt, Human
ugaucacggcucacugcagcc

SEQ ID NO: 3194314 - RNA, 16 nt, Human
ugaucacuuaucaguu

SEQ ID NO: 3194315 - RNA, 21 nt, Human
ugaucagaccaaacagugcug

SEQ ID NO: 3194316 - RNA, 24 nt, Human
ugaucacuuucugaaauucacaaa

SEQ ID NO: 3194317 - RNA, 19 nt, Human
ugauccacccaccucagcc

SEQ ID NO: 3194318 - RNA, 20 nt, Human
ugauccacccaccucagccu

SEQ ID NO: 3194319 - RNA, 15 nt, Human
ugauccacccaccuc

SEQ ID NO: 3194320 - RNA, 21 nt, Human
ugauccaagcuggucccacuc

SEQ ID NO: 3194321 - RNA, 17 nt, Human
ugauccaagcugguccc

SEQ ID NO: 3194322 - RNA, 24 nt, Human
ugaucauccacugugccaugugcc

SEQ ID NO: 3194323 - RNA, 13 nt, Human
ugaucauccacug

SEQ ID NO: 3194324 - RNA, 23 nt, Human
ugaucaguaguuugcauuucaga

SEQ ID NO: 3194325 - RNA, 22 nt, Human
ugaucaguaguuugcauuucag

SEQ ID NO: 3194326 - RNA, 21 nt, Human
ugaucaguaguuugcauuuca

SEQ ID NO: 3194327 - RNA, 15 nt, Human
ugaucuaggaagacu

SEQ ID NO: 3194328 - RNA, 17 nt, Human
ugaucucucgugauuga

SEQ ID NO: 3194329 - RNA, 20 nt, Human
ugaucugaugcaagcaagaa

SEQ ID NO: 3194330 - RNA, 19 nt, Human
ugaucuaggaagacuuugg

SEQ ID NO: 3194331 - RNA, 21 nt, Human
ugaucuaggaagacuuuggaa

SEQ ID NO: 3194332 - RNA, 22 nt, Human
ugauccacccaccucagccucc

SEQ ID NO: 3194333 - RNA, 21 nt, Human
ugauccacccaccucagccuc

SEQ ID NO: 3194334 - RNA, 23 nt, Human
ucuugaauggcaauguuuugcuu

SEQ ID NO: 3194335 - RNA, 22 nt, Human
ucuugaauggcaauguuuugcu

SEQ ID NO: 3194336 - RNA, 14 nt, Human
ucuugaauauaaaa

SEQ ID NO: 3194337 - RNA, 15 nt, Human
ucuugaauauaaaaa

SEQ ID NO: 3194338 - RNA, 16 nt, Human
ucuugaaccagaacca

SEQ ID NO: 3194339 - RNA, 15 nt, Human
ucuugaacuccuggc

SEQ ID NO: 3194340 - RNA, 20 nt, Human
ugaccauucuccaccugcca

SEQ ID NO: 3194341 - RNA, 21 nt, Human
ugaccauucuccaccugccag

SEQ ID NO: 3194342 - RNA, 22 nt, Human
ugaccauucuccaccugccagg

SEQ ID NO: 3194343 - RNA, 19 nt, Human
ugaccauucuccaccugcc

SEQ ID NO: 3194344 - RNA, 22 nt, Human
ucuugaauguugaagaacucau

SEQ ID NO: 3194345 - RNA, 23 nt, Human
ugaccucaauuucaauuuugucu

SEQ ID NO: 3194346 - RNA, 17 nt, Human
ugaccucaauuucaauu

SEQ ID NO: 3194347 - RNA, 21 nt, Human
ugaccucaaaugaugugccug

SEQ ID NO: 3194348 - RNA, 12 nt, Human
ugaccucugccu

SEQ ID NO: 3194349 - RNA, 15 nt, Human
ugaccuuucaauagg

SEQ ID NO: 3194350 - RNA, 16 nt, Human
ugaccuuucaauagga

SEQ ID NO: 3194351 - RNA, 14 nt, Human
ugaccuuucaauag

SEQ ID NO: 3194352 - RNA, 13 nt, Human
ugaccuuucaaua

SEQ ID NO: 3194353 - RNA, 20 nt, Human
ugaccucuagcccugcccgg

SEQ ID NO: 3194354 - RNA, 19 nt, Human
ugaccucuagcccugcccg

SEQ ID NO: 3194355 - RNA, 22 nt, Human
ugaccucaggugauccacccac

SEQ ID NO: 3194356 - RNA, 18 nt, Human
ugaccucaccuaggaagu

SEQ ID NO: 3194357 - RNA, 16 nt, Human
ugaccucacucagaag

SEQ ID NO: 3194358 - RNA, 14 nt, Human
ugaccucacgugca

SEQ ID NO: 3194359 - RNA, 15 nt, Human
ugaccuccggccagg

SEQ ID NO: 3194360 - RNA, 19 nt, Human
ugaccuccggccaggugcc

SEQ ID NO: 3194361 - RNA, 24 nt, Human
ugaccuccggccaggugccuccug

SEQ ID NO: 3194362 - RNA, 16 nt, Human
ugacucugcucuugca

SEQ ID NO: 3194363 - RNA, 12 nt, Human
ugacucugcucu

SEQ ID NO: 3194364 - RNA, 18 nt, Human
ugacguacaaguaguucu

SEQ ID NO: 3194365 - RNA, 23 nt, Human
ugacgguuccuacacaggacagg

SEQ ID NO: 3194366 - RNA, 19 nt, Human
ugacguacaaguaguucug

SEQ ID NO: 3194367 - RNA, 21 nt, Human
ugacguacaaguaguucugua

SEQ ID NO: 3194368 - RNA, 12 nt, Human
ugacgguuccua

SEQ ID NO: 3194369 - RNA, 20 nt, Human
ugacgguuccuacacaggac

SEQ ID NO: 3194370 - RNA, 18 nt, Human
ugacgguuccuacacagg

SEQ ID NO: 3194371 - RNA, 22 nt, Human
ugacguacaaguaguucuguau

SEQ ID NO: 3194372 - RNA, 23 nt, Human
ugacguacaaguaguucuguauu

SEQ ID NO: 3194373 - RNA, 19 nt, Human
ugacgucuagcuaugcugu

SEQ ID NO: 3194374 - RNA, 19 nt, Human
ugacugaggcaguuugagg

SEQ ID NO: 3194375 - RNA, 13 nt, Human
ugacugaggcagu

SEQ ID NO: 3194376 - RNA, 18 nt, Human
ugacugaggcaguuugag

SEQ ID NO: 3194377 - RNA, 13 nt, Human
ugacgccauccca

SEQ ID NO: 3194378 - RNA, 14 nt, Human
ugacgccaucccag

SEQ ID NO: 3194379 - RNA, 15 nt, Human
ugacgccaucccagc

SEQ ID NO: 3194380 - RNA, 16 nt, Human
ugacgccaucccagcc

SEQ ID NO: 3194381 - RNA, 18 nt, Human
ugaccuuucaauaggaaa

SEQ ID NO: 3194382 - RNA, 22 nt, Human
ugaccuuucaauaggaaaaacu

SEQ ID NO: 3194383 - RNA, 17 nt, Human
ugacgccaucccagccc

SEQ ID NO: 3194384 - RNA, 18 nt, Human
ugacgccaucccagcccc

SEQ ID NO: 3194385 - RNA, 19 nt, Human
ugacgccaucccagcccca

SEQ ID NO: 3194386 - RNA, 20 nt, Human
ugacgccaucccagccccaa

SEQ ID NO: 3194387 - RNA, 15 nt, Human
ugagaaagacuauuc

SEQ ID NO: 3194388 - RNA, 18 nt, Human
ugagaaagacuauucaaa

SEQ ID NO: 3194389 - RNA, 17 nt, Human
ugagaaagacuauucaa

SEQ ID NO: 3194390 - RNA, 16 nt, Human
ugagaaagacuauuca

SEQ ID NO: 3194391 - RNA, 22 nt, Human
ugacuguacuccucccaggcgc

SEQ ID NO: 3194392 - RNA, 18 nt, Human
ugacuguacuccucccag

SEQ ID NO: 3194393 - RNA, 17 nt, Human
ugacuguacuccuccca

SEQ ID NO: 3194394 - RNA, 16 nt, Human
ugacuguacuccuccc

SEQ ID NO: 3194395 - RNA, 14 nt, Human
ugagacagcucugc

SEQ ID NO: 3194396 - RNA, 16 nt, Human
ugagacagcucugcau

SEQ ID NO: 3194397 - RNA, 12 nt, Human
ugagacagcucu

SEQ ID NO: 3194398 - RNA, 14 nt, Human
ugagacagugaauu

SEQ ID NO: 3194399 - RNA, 15 nt, Human
ugagacagugaauuu

SEQ ID NO: 3194400 - RNA, 16 nt, Human
ugagacagugaauuug

SEQ ID NO: 3194401 - RNA, 17 nt, Human
ugagacagugaauuugg

SEQ ID NO: 3194402 - RNA, 12 nt, Human
ugagacccuguc

SEQ ID NO: 3194403 - RNA, 20 nt, Human
ugagaccgugaagauacuuu

SEQ ID NO: 3194404 - RNA, 23 nt, Human
ugagaccgugaagauacuuugua

SEQ ID NO: 3194405 - RNA, 12 nt, Human
ugagacucuguc

SEQ ID NO: 3194406 - RNA, 14 nt, Human
ugagacucugucuc

SEQ ID NO: 3194407 - RNA, 13 nt, Human
ugagacucugucu

SEQ ID NO: 3194408 - RNA, 23 nt, Human
ugagaggcauccaguaucuugaa

SEQ ID NO: 3194409 - RNA, 22 nt, Human
ugagaggcauccaguaucuuga

SEQ ID NO: 3194410 - RNA, 17 nt, Human
ugagaguagagucacug

SEQ ID NO: 3194411 - RNA, 17 nt, Human
ugagaggggaggccaag

SEQ ID NO: 3194412 - RNA, 21 nt, Human
ugagaggggagagcugaacag

SEQ ID NO: 3194413 - RNA, 19 nt, Human
ugagaggggagagcugaac

SEQ ID NO: 3194414 - RNA, 14 nt, Human
ugagaggggagagc

SEQ ID NO: 3194415 - RNA, 19 nt, Human
ugagaggggaacagacugg

SEQ ID NO: 3194416 - RNA, 13 nt, Human
ugagaggggagag

SEQ ID NO: 3194417 - RNA, 15 nt, Human
ugagaucagccuggg

SEQ ID NO: 3194418 - RNA, 17 nt, Human
ugagaugagaggggaga

SEQ ID NO: 3194419 - RNA, 12 nt, Human
ugagaucuaaaa

SEQ ID NO: 3194420 - RNA, 23 nt, Human
ugagaucuaaaaauaacuguaau

SEQ ID NO: 3194421 - RNA, 22 nt, Human
ugagaucuaaaaauaacuguaa

SEQ ID NO: 3194422 - RNA, 16 nt, Human
ugagaucuaaaaauaa

SEQ ID NO: 3194423 - RNA, 15 nt, Human
ugagaucuaaaaaua

SEQ ID NO: 3194424 - RNA, 14 nt, Human
ugagaugcuagaac

SEQ ID NO: 3194425 - RNA, 16 nt, Human
ugagaugauuuccaag

SEQ ID NO: 3194426 - RNA, 21 nt, Human
ugagaugauuuccaagccucu

SEQ ID NO: 3194427 - RNA, 16 nt, Human
ugagaugcuagaacuc

SEQ ID NO: 3194428 - RNA, 13 nt, Human
ugagcaucaggcc

SEQ ID NO: 3194429 - RNA, 14 nt, Human
ugagcaucaggcca

SEQ ID NO: 3194430 - RNA, 15 nt, Human
ugagcaucaggccag

SEQ ID NO: 3194431 - RNA, 22 nt, Human
ugagcccauguggagucagccu

SEQ ID NO: 3194432 - RNA, 21 nt, Human
ugagcccauguggagucagcc

SEQ ID NO: 3194433 - RNA, 19 nt, Human
ugagcccacugugcguggg

SEQ ID NO: 3194434 - RNA, 12 nt, Human
ugagcccacugu

SEQ ID NO: 3194435 - RNA, 20 nt, Human
ugagccuaaaaauaaagcac

SEQ ID NO: 3194436 - RNA, 18 nt, Human
ugagccuaaaaauaaagc

SEQ ID NO: 3194437 - RNA, 16 nt, Human
ugagccuaaaaauaaa

SEQ ID NO: 3194438 - RNA, 14 nt, Human
ugagccuaaaaaua

SEQ ID NO: 3194439 - RNA, 13 nt, Human
ugagccuaaaaau

SEQ ID NO: 3194440 - RNA, 13 nt, Human
ugagccucagcau

SEQ ID NO: 3194441 - RNA, 19 nt, Human
ugagcucccacuucugcca

SEQ ID NO: 3194442 - RNA, 20 nt, Human
ugagcucccacuucugccag

SEQ ID NO: 3194443 - RNA, 21 nt, Human
ugagcucccacuucugccaga

SEQ ID NO: 3194444 - RNA, 13 nt, Human
ugucaucucagcu

SEQ ID NO: 3194445 - RNA, 17 nt, Human
uguccccgcacugggcu

SEQ ID NO: 3194446 - RNA, 19 nt, Human
uguccccgcacugggcuug

SEQ ID NO: 3194447 - RNA, 13 nt, Human
uguccccuauccu

SEQ ID NO: 3194448 - RNA, 13 nt, Human
ugucaucugagaa

SEQ ID NO: 3194449 - RNA, 17 nt, Human
uguccccgacccuugcc

SEQ ID NO: 3194450 - RNA, 16 nt, Human
uguccuauuaguguua

SEQ ID NO: 3194451 - RNA, 17 nt, Human
uguccuauuaguguuau

SEQ ID NO: 3194452 - RNA, 22 nt, Human
uguccugccuaaggcugaacuu

SEQ ID NO: 3194453 - RNA, 20 nt, Human
uguccugggagugagcuggu

SEQ ID NO: 3194454 - RNA, 19 nt, Human
uguccugggagugagcugg

SEQ ID NO: 3194455 - RNA, 12 nt, Human
uguccugggagu

SEQ ID NO: 3194456 - RNA, 14 nt, Human
ugucuaaugaaacc

SEQ ID NO: 3194457 - RNA, 21 nt, Human
ugucucaaaaaaagaaaaaga

SEQ ID NO: 3194458 - RNA, 18 nt, Human
ugucucaagagggcacug

SEQ ID NO: 3194459 - RNA, 17 nt, Human
ugucucaagagggcacu

SEQ ID NO: 3194460 - RNA, 12 nt, Human
ugucuauugucc

SEQ ID NO: 3194461 - RNA, 18 nt, Human
ugucuauuguccaaaguu

SEQ ID NO: 3194462 - RNA, 21 nt, Human
ugucuagcacuuccuugccag

SEQ ID NO: 3194463 - RNA, 18 nt, Human
ugucuagcacuuccuugc

SEQ ID NO: 3194464 - RNA, 16 nt, Human
ugucuagcacuuccuu

SEQ ID NO: 3194465 - RNA, 15 nt, Human
ugucuagcacuuccu

SEQ ID NO: 3194466 - RNA, 15 nt, Human
ugucuaguuguuuga

SEQ ID NO: 3194467 - RNA, 23 nt, Human
ugucuaguuguuugauucagaca

SEQ ID NO: 3194468 - RNA, 16 nt, Human
ugucuaugggacucaa

SEQ ID NO: 3194469 - RNA, 15 nt, Human
ugucuaugggacuca

SEQ ID NO: 3194470 - RNA, 14 nt, Human
ugucuaugggacuc

SEQ ID NO: 3194471 - RNA, 23 nt, Human
ugucuuuggacccugaggcccag

SEQ ID NO: 3194472 - RNA, 18 nt, Human
ugucuuaauggaugaaau

SEQ ID NO: 3194473 - RNA, 16 nt, Human
ugucuuaauggaugaa

SEQ ID NO: 3194474 - RNA, 16 nt, Human
ugucuuuucuugcaug

SEQ ID NO: 3194475 - RNA, 16 nt, Human
ugucuguuguauucau

SEQ ID NO: 3194476 - RNA, 20 nt, Human
ugucugaagucacugcacag

SEQ ID NO: 3194477 - RNA, 15 nt, Human
ugucugaguuuggua

SEQ ID NO: 3194478 - RNA, 16 nt, Human
ugucugucugguccau

SEQ ID NO: 3194479 - RNA, 12 nt, Human
ugucugucuucc

SEQ ID NO: 3194480 - RNA, 14 nt, Human
ugucugucuuccuu

SEQ ID NO: 3194481 - RNA, 21 nt, Human
ugucugcacaccuugaaucug

SEQ ID NO: 3194482 - RNA, 19 nt, Human
uguaugcuucauacaggga

SEQ ID NO: 3194483 - RNA, 16 nt, Human
uguaugcuucauacag

SEQ ID NO: 3194484 - RNA, 14 nt, Human
uguaugcuucauac

SEQ ID NO: 3194485 - RNA, 13 nt, Human
uguaugcuucaua

SEQ ID NO: 3194486 - RNA, 13 nt, Human
uguaugcgugugu

SEQ ID NO: 3194487 - RNA, 22 nt, Human
uguaugguccauagcacuguau

SEQ ID NO: 3194488 - RNA, 15 nt, Human
uguauguaaauaggu

SEQ ID NO: 3194489 - RNA, 15 nt, Human
uguauggccaggaag

SEQ ID NO: 3194490 - RNA, 19 nt, Human
ugucaauuacaggaaguac

SEQ ID NO: 3194491 - RNA, 14 nt, Human
ugucacaggcaggu

SEQ ID NO: 3194492 - RNA, 21 nt, Human
ugucaauuacaggaaguacug

SEQ ID NO: 3194493 - RNA, 16 nt, Human
ugucagugugacugau

SEQ ID NO: 3194494 - RNA, 19 nt, Human
ugucagugugacugaucuc

SEQ ID NO: 3194495 - RNA, 15 nt, Human
ugucagugugacuga

SEQ ID NO: 3194496 - RNA, 14 nt, Human
ugucagugugacug

SEQ ID NO: 3194497 - RNA, 21 nt, Human
ugucacaggcagguccagggu

SEQ ID NO: 3194498 - RNA, 17 nt, Human
ugucacaggcaggucca

SEQ ID NO: 3194499 - RNA, 16 nt, Human
ugucacaggcaggucc

SEQ ID NO: 3194500 - RNA, 15 nt, Human
ugucacaggcagguc

SEQ ID NO: 3194501 - RNA, 13 nt, Human
ugucacaggcagg

SEQ ID NO: 3194502 - RNA, 18 nt, Human
ugucacaggguguucuuu

SEQ ID NO: 3194503 - RNA, 16 nt, Human
ugucacaguaaaaaua

SEQ ID NO: 3194504 - RNA, 17 nt, Human
ugucacaguaaaaauaa

SEQ ID NO: 3194505 - RNA, 18 nt, Human
ugucacaguaaaaauaaa

SEQ ID NO: 3194506 - RNA, 23 nt, Human
ugucacaguaaaaauaaaauacu

SEQ ID NO: 3194507 - RNA, 16 nt, Human
uguagcuucagucauu

SEQ ID NO: 3194508 - RNA, 18 nt, Human
uguagcuucagucauuaa

SEQ ID NO: 3194509 - RNA, 19 nt, Human
uguagcuucagucauuaaa

SEQ ID NO: 3194510 - RNA, 21 nt, Human
uguacagagcccacgccccca

SEQ ID NO: 3194511 - RNA, 12 nt, Human
uguacagagccc

SEQ ID NO: 3194512 - RNA, 22 nt, Human
uguacagagccguaaaaacuga

SEQ ID NO: 3194513 - RNA, 21 nt, Human
uguacagagccguaaaaacug

SEQ ID NO: 3194514 - RNA, 14 nt, Human
uguauaaggacagu

SEQ ID NO: 3194515 - RNA, 18 nt, Human
uguauagcucuuuuccua

SEQ ID NO: 3194516 - RNA, 23 nt, Human
uguauagccaaaugacugaaagc

SEQ ID NO: 3194517 - RNA, 15 nt, Human
uguauaaauugucuu

SEQ ID NO: 3194518 - RNA, 14 nt, Human
uguauaaauuuauu

SEQ ID NO: 3194519 - RNA, 19 nt, Human
uguauaaaggugugcugug

SEQ ID NO: 3194520 - RNA, 13 nt, Human
uguaucugagcag

SEQ ID NO: 3194521 - RNA, 15 nt, Human
uguaucugaaaguca

SEQ ID NO: 3194522 - RNA, 14 nt, Human
uguaucugugcuuu

SEQ ID NO: 3194523 - RNA, 22 nt, Human
uguaugaaagauggcugugccu

SEQ ID NO: 3194524 - RNA, 14 nt, Human
uguaugaaauauau

SEQ ID NO: 3194525 - RNA, 16 nt, Human
uguaugaaauauaugu

SEQ ID NO: 3194526 - RNA, 18 nt, Human
uguaugaaauauauguga

SEQ ID NO: 3194527 - RNA, 19 nt, Human
uguaugaaaacauggaaca

SEQ ID NO: 3194528 - RNA, 13 nt, Human
uguaugaaaacau

SEQ ID NO: 3194529 - RNA, 17 nt, Human
uguaacauucuauuuca

SEQ ID NO: 3194530 - RNA, 17 nt, Human
uguaaccacaacuuuca

SEQ ID NO: 3194531 - RNA, 18 nt, Human
uguaaccacaacuuucac

SEQ ID NO: 3194532 - RNA, 17 nt, Human
uguaaauuuaugugaug

SEQ ID NO: 3194533 - RNA, 14 nt, Human
uguaacaagccacc

SEQ ID NO: 3194534 - RNA, 17 nt, Human
uguaacaagccacccca

SEQ ID NO: 3194535 - RNA, 13 nt, Human
uguaacaagaaaa

SEQ ID NO: 3194536 - RNA, 14 nt, Human
uguaacaagaaaau

SEQ ID NO: 3194537 - RNA, 19 nt, Human
uguaauaauaaagaauagc

SEQ ID NO: 3194538 - RNA, 12 nt, Human
uguaauaaugga

SEQ ID NO: 3194539 - RNA, 14 nt, Human
uguacagacaacaa

SEQ ID NO: 3194540 - RNA, 11 nt, Human
uguacagagcc

SEQ ID NO: 3194541 - RNA, 14 nt, Human
ugguuguaucugug

SEQ ID NO: 3194542 - RNA, 13 nt, Human
ugguugcauccua

SEQ ID NO: 3194543 - RNA, 23 nt, Human
ugguugggacccaguggcagggc

SEQ ID NO: 3194544 - RNA, 21 nt, Human
ugguugggacccaguggcagg

SEQ ID NO: 3194545 - RNA, 14 nt, Human
ugguugggacccag

SEQ ID NO: 3194546 - RNA, 18 nt, Human
ugguuggcugggaaaucg

SEQ ID NO: 3194547 - RNA, 23 nt, Human
ugguuuuuaaaaaacugcugacu

SEQ ID NO: 3194548 - RNA, 17 nt, Human
ugguuuuuauuucuccu

SEQ ID NO: 3194549 - RNA, 19 nt, Human
ugguuuuuauuucuccuuu

SEQ ID NO: 3194550 - RNA, 16 nt, Human
ugguuuuucuuuucuu

SEQ ID NO: 3194551 - RNA, 19 nt, Human
ugguuuuucuuuucuugga

SEQ ID NO: 3194552 - RNA, 21 nt, Human
ugguuuuuaaaaaacugcuga

SEQ ID NO: 3194553 - RNA, 13 nt, Human
ugguuuucuguuu

SEQ ID NO: 3194554 - RNA, 19 nt, Human
ugguuuucuuguguguuua

SEQ ID NO: 3194555 - RNA, 22 nt, Human
ugguuuucuugggggaaaauac

SEQ ID NO: 3194556 - RNA, 20 nt, Human
ugguuguguguccccuugca

SEQ ID NO: 3194557 - RNA, 12 nt, Human
uguaaaauggug

SEQ ID NO: 3194558 - RNA, 13 nt, Human
uguaaaauguauu

SEQ ID NO: 3194559 - RNA, 14 nt, Human
uguaaaauguauua

SEQ ID NO: 3194560 - RNA, 15 nt, Human
uguaaaauguauuau

SEQ ID NO: 3194561 - RNA, 19 nt, Human
uguaaaauguauuaugucc

SEQ ID NO: 3194562 - RNA, 21 nt, Human
uguaaaaugcaaaaaaucuua

SEQ ID NO: 3194563 - RNA, 22 nt, Human
uguaaaauggaaaacuuaguuu

SEQ ID NO: 3194564 - RNA, 18 nt, Human
uguaaaaugcaaaaaauc

SEQ ID NO: 3194565 - RNA, 13 nt, Human
uguaaaaugcaaa

SEQ ID NO: 3194566 - RNA, 11 nt, Human
uguaaaauggu

SEQ ID NO: 3194567 - RNA, 20 nt, Human
uguaaaaaggaauaugaaag

SEQ ID NO: 3194568 - RNA, 12 nt, Human
uguaaaagcaag

SEQ ID NO: 3194569 - RNA, 19 nt, Human
uguaaaagcauuuuguaau

SEQ ID NO: 3194570 - RNA, 18 nt, Human
uguaaaagcaacaucagc

SEQ ID NO: 3194571 - RNA, 19 nt, Human
uguaaaagcaacaucagcu

SEQ ID NO: 3194572 - RNA, 22 nt, Human
uguaaaagcaacaucagcuuga

SEQ ID NO: 3194573 - RNA, 18 nt, Human
uguaaaagcauuuuguaa

SEQ ID NO: 3194574 - RNA, 17 nt, Human
uguaaaagcauuuugua

SEQ ID NO: 3194575 - RNA, 16 nt, Human
ugguuccagccugcca

SEQ ID NO: 3194576 - RNA, 15 nt, Human
ugguuccagccugcc

SEQ ID NO: 3194577 - RNA, 17 nt, Human
ugguucauuuucagauu

SEQ ID NO: 3194578 - RNA, 23 nt, Human
ugguucaggguuggccccugccc

SEQ ID NO: 3194579 - RNA, 18 nt, Human
uggugucgggcaugacac

SEQ ID NO: 3194580 - RNA, 20 nt, Human
ugguuccccuguucacucua

SEQ ID NO: 3194581 - RNA, 19 nt, Human
ugguuccccuguucacucu

SEQ ID NO: 3194582 - RNA, 18 nt, Human
ugguuccccuguucacuc

SEQ ID NO: 3194583 - RNA, 11 nt, Human
ugguuccccug

SEQ ID NO: 3194584 - RNA, 20 nt, Human
ugguuccaagucuuugcuau

SEQ ID NO: 3194585 - RNA, 15 nt, Human
uggugucgggcauga

SEQ ID NO: 3194586 - RNA, 17 nt, Human
uggugucauagaauagc

SEQ ID NO: 3194587 - RNA, 20 nt, Human
uggugucauagaauagcaug

SEQ ID NO: 3194588 - RNA, 16 nt, Human
uggugucaccugaaga

SEQ ID NO: 3194589 - RNA, 23 nt, Human
ugguuccccuguucacucuacuu

SEQ ID NO: 3194590 - RNA, 21 nt, Human
ugguuccuaggggaaugaggg

SEQ ID NO: 3194591 - RNA, 12 nt, Human
ugguuccucccc

SEQ ID NO: 3194592 - RNA, 18 nt, Human
ugguuccuccccuccucc

SEQ ID NO: 3194593 - RNA, 23 nt, Human
ugguuccuccccuccuccuggac

SEQ ID NO: 3194594 - RNA, 18 nt, Human
ugguuccuggggcaucca

SEQ ID NO: 3194595 - RNA, 14 nt, Human
ugguuccuggggca

SEQ ID NO: 3194596 - RNA, 18 nt, Human
ugguugaugaucuuugca

SEQ ID NO: 3194597 - RNA, 16 nt, Human
ugguugagugggggga

SEQ ID NO: 3194598 - RNA, 12 nt, Human
ugguugaauaug

SEQ ID NO: 3194599 - RNA, 18 nt, Human
ugguugaauaaacuagau

SEQ ID NO: 3194600 - RNA, 12 nt, Human
ugguugaauaaa

SEQ ID NO: 3194601 - RNA, 23 nt, Human
uggguacuuguggacacagcucu

SEQ ID NO: 3194602 - RNA, 20 nt, Human
uggguacuuguggacacagc

SEQ ID NO: 3194603 - RNA, 12 nt, Human
uggugauuuuaa

SEQ ID NO: 3194604 - RNA, 14 nt, Human
uggugagaggcauc

SEQ ID NO: 3194605 - RNA, 18 nt, Human
ugguggcagugggagcug

SEQ ID NO: 3194606 - RNA, 13 nt, Human
ugguggcaguggg

SEQ ID NO: 3194607 - RNA, 20 nt, Human
ugguggcagugggagcugcc

SEQ ID NO: 3194608 - RNA, 19 nt, Human
ugguggcccgacagccugg

SEQ ID NO: 3194609 - RNA, 14 nt, Human
uggugcaaugaccu

SEQ ID NO: 3194610 - RNA, 19 nt, Human
uggugauuuuaaaugugug

SEQ ID NO: 3194611 - RNA, 18 nt, Human
uggugauuuuaaaugugu

SEQ ID NO: 3194612 - RNA, 16 nt, Human
uggugauuuuaaaugu

SEQ ID NO: 3194613 - RNA, 15 nt, Human
uggugauuuuaaaug

SEQ ID NO: 3194614 - RNA, 19 nt, Human
uggugcaaugaccuuucaa

SEQ ID NO: 3194615 - RNA, 12 nt, Human
ugguggcagugg

SEQ ID NO: 3194616 - RNA, 17 nt, Human
ugguggggucuccucag

SEQ ID NO: 3194617 - RNA, 23 nt, Human
ugguggggucuccucaggaccag

SEQ ID NO: 3194618 - RNA, 18 nt, Human
ugguguaagguacuuuca

SEQ ID NO: 3194619 - RNA, 23 nt, Human
uggugguugggacccaguggcag

SEQ ID NO: 3194620 - RNA, 20 nt, Human
uggugguugggacccagugg

SEQ ID NO: 3194621 - RNA, 13 nt, Human
ugguggcuggguu

SEQ ID NO: 3194622 - RNA, 21 nt, Human
ugguggcccgacagccuggca

SEQ ID NO: 3194623 - RNA, 16 nt, Human
uggugggggccucggu

SEQ ID NO: 3194624 - RNA, 18 nt, Human
uggugggggccucggugu

SEQ ID NO: 3194625 - RNA, 23 nt, Human
uggugggcuugucauagccagug

SEQ ID NO: 3194626 - RNA, 17 nt, Human
uggugggcauucucucu

SEQ ID NO: 3194627 - RNA, 18 nt, Human
uggccuacaaaucaguaa

SEQ ID NO: 3194628 - RNA, 19 nt, Human
uggccuacaaaucaguaau

SEQ ID NO: 3194629 - RNA, 14 nt, Human
uggccccugagauc

SEQ ID NO: 3194630 - RNA, 21 nt, Human
uggccccucagggucccuggu

SEQ ID NO: 3194631 - RNA, 22 nt, Human
uggccccucagggucccuggug

SEQ ID NO: 3194632 - RNA, 13 nt, Human
uggccccucaggg

SEQ ID NO: 3194633 - RNA, 20 nt, Human
uggccccucagggucccugg

SEQ ID NO: 3194634 - RNA, 17 nt, Human
uggcagcugcgguccac

SEQ ID NO: 3194635 - RNA, 23 nt, Human
uggccucaagugauucuccugcc

SEQ ID NO: 3194636 - RNA, 18 nt, Human
uggccucaagugauucuc

SEQ ID NO: 3194637 - RNA, 11 nt, Human
uggccucccaa

SEQ ID NO: 3194638 - RNA, 14 nt, Human
uggccucccaacuc

SEQ ID NO: 3194639 - RNA, 19 nt, Human
uggccucccaacucacccc

SEQ ID NO: 3194640 - RNA, 20 nt, Human
uggccucccaacucacccca

SEQ ID NO: 3194641 - RNA, 21 nt, Human
uggccucccaacucaccccag

SEQ ID NO: 3194642 - RNA, 22 nt, Human
uggccucccaacucaccccagc

SEQ ID NO: 3194643 - RNA, 20 nt, Human
uggccucucacugccucccc

SEQ ID NO: 3194644 - RNA, 16 nt, Human
uggccucccugcucua

SEQ ID NO: 3194645 - RNA, 15 nt, Human
uggcuccaggccagg

SEQ ID NO: 3194646 - RNA, 15 nt, Human
uggcuccagccugga

SEQ ID NO: 3194647 - RNA, 13 nt, Human
uggcuccagccug

SEQ ID NO: 3194648 - RNA, 23 nt, Human
uggcuccacacacacaaaaaaag

SEQ ID NO: 3194649 - RNA, 18 nt, Human
uggcuccacacacacaaa

SEQ ID NO: 3194650 - RNA, 17 nt, Human
uggcuccagcuggccgg

SEQ ID NO: 3194651 - RNA, 22 nt, Human
uggccuucggccuccauccuga

SEQ ID NO: 3194652 - RNA, 20 nt, Human
uggccuucggccuccauccu

SEQ ID NO: 3194653 - RNA, 23 nt, Human
uggccuucggccuccauccugag

SEQ ID NO: 3194654 - RNA, 17 nt, Human
uggcuccacacacacaa

SEQ ID NO: 3194655 - RNA, 18 nt, Human
uggccucugcaaaggaaa

SEQ ID NO: 3194656 - RNA, 11 nt, Human
uggcugcugaa

SEQ ID NO: 3194657 - RNA, 13 nt, Human
uggcugcugaagg

SEQ ID NO: 3194658 - RNA, 14 nt, Human
uggcugcugaaggc

SEQ ID NO: 3194659 - RNA, 16 nt, Human
uggcugcugaaggcuc

SEQ ID NO: 3194660 - RNA, 12 nt, Human
uggcuccccugc

SEQ ID NO: 3194661 - RNA, 13 nt, Human
uggcuccccugca

SEQ ID NO: 3194662 - RNA, 14 nt, Human
uggcuccccugcag

SEQ ID NO: 3194663 - RNA, 15 nt, Human
uggcuccccugcagc

SEQ ID NO: 3194664 - RNA, 17 nt, Human
uggcuccccugcagccc

SEQ ID NO: 3194665 - RNA, 18 nt, Human
uggcuccccugcagcccu

SEQ ID NO: 3194666 - RNA, 19 nt, Human
uggcuccccugcagcccug

SEQ ID NO: 3194667 - RNA, 22 nt, Human
uggcuccccugcagcccuggcc

SEQ ID NO: 3194668 - RNA, 24 nt, Human
uggcuccccugcagcccuggccca

SEQ ID NO: 3194669 - RNA, 12 nt, Human
uggcuccccugg

SEQ ID NO: 3194670 - RNA, 13 nt, Human
uggcuccccuggg

SEQ ID NO: 3194671 - RNA, 14 nt, Human
uggcuccccugggg

SEQ ID NO: 3194672 - RNA, 15 nt, Human
uggcuccccuggggu

SEQ ID NO: 3194673 - RNA, 16 nt, Human
uggcuccccuggggug

SEQ ID NO: 3194674 - RNA, 21 nt, Human
uggcuccccuggggugcaggc

SEQ ID NO: 3194675 - RNA, 16 nt, Human
uggcucccuuacuuua

SEQ ID NO: 3194676 - RNA, 16 nt, Human
uggcucccucacucuc

SEQ ID NO: 3194677 - RNA, 14 nt, Human
uggcucccucacuc

SEQ ID NO: 3194678 - RNA, 20 nt, Human
uggcucccucacucucagga

SEQ ID NO: 3194679 - RNA, 19 nt, Human
uggcucccucacucucagg

SEQ ID NO: 3194680 - RNA, 18 nt, Human
uggcucccucacucucag

SEQ ID NO: 3194681 - RNA, 17 nt, Human
uggcucccucacucuca

SEQ ID NO: 3194682 - RNA, 15 nt, Human
uggcuuuucacugcu

SEQ ID NO: 3194683 - RNA, 22 nt, Human
uggcuuuucacugcuggcugcc

SEQ ID NO: 3194684 - RNA, 21 nt, Human
uggcuuuucacugcuggcugc

SEQ ID NO: 3194685 - RNA, 19 nt, Human
uggcuuuucacugcuggcu

SEQ ID NO: 3194686 - RNA, 18 nt, Human
uggcuuuucacugcuggc

SEQ ID NO: 3194687 - RNA, 19 nt, Human
uggcuuggcccuggcagcc

SEQ ID NO: 3194688 - RNA, 16 nt, Human
uggcuuggcccuggca

SEQ ID NO: 3194689 - RNA, 13 nt, Human
uggcuuggcccug

SEQ ID NO: 3194690 - RNA, 16 nt, Human
uggcuuuucacugcug

SEQ ID NO: 3194691 - RNA, 22 nt, Human
uggcuucccgcucagcccuccc

SEQ ID NO: 3194692 - RNA, 23 nt, Human
uggcuuggauuaauauucauagu

SEQ ID NO: 3194693 - RNA, 20 nt, Human
uggcuugccauuuuucaaaa

SEQ ID NO: 3194694 - RNA, 21 nt, Human
uggcuucccgcucagcccucc

SEQ ID NO: 3194695 - RNA, 20 nt, Human
uggcuucccgcucagcccuc

SEQ ID NO: 3194696 - RNA, 19 nt, Human
uggcuucccgcucagcccu

SEQ ID NO: 3194697 - RNA, 18 nt, Human
uggcuucccgcucagccc

SEQ ID NO: 3194698 - RNA, 18 nt, Human
uggcugggacugggaaca

SEQ ID NO: 3194699 - RNA, 17 nt, Human
uggcugggacugggaac

SEQ ID NO: 3194700 - RNA, 23 nt, Human
uggcuggccuugugguccaaaua

SEQ ID NO: 3194701 - RNA, 16 nt, Human
ugggggccucagugcc

SEQ ID NO: 3194702 - RNA, 23 nt, Human
ugggggccccgucucaggucuga

SEQ ID NO: 3194703 - RNA, 22 nt, Human
ugggggccccgucucaggucug

SEQ ID NO: 3194704 - RNA, 19 nt, Human
ugggggccccgucucaggu

SEQ ID NO: 3194705 - RNA, 18 nt, Human
ugggggccccgucucagg

SEQ ID NO: 3194706 - RNA, 17 nt, Human
uggggggcuucauacac

SEQ ID NO: 3194707 - RNA, 21 nt, Human
uggggggaacgcccacuuccc

SEQ ID NO: 3194708 - RNA, 19 nt, Human
uggggggcugaggugggag

SEQ ID NO: 3194709 - RNA, 19 nt, Human
ugggggcugggcagaggaa

SEQ ID NO: 3194710 - RNA, 16 nt, Human
uggggggagcacccug

SEQ ID NO: 3194711 - RNA, 20 nt, Human
uggggggagcacccugaggg

SEQ ID NO: 3194712 - RNA, 21 nt, Human
uggggggagcacccugagggc

SEQ ID NO: 3194713 - RNA, 11 nt, Human
uggggggaggc

SEQ ID NO: 3194714 - RNA, 13 nt, Human
uggggggaggcug

SEQ ID NO: 3194715 - RNA, 20 nt, Human
uggggggaugguaagagaaa

SEQ ID NO: 3194716 - RNA, 13 nt, Human
uggggggaacgcc

SEQ ID NO: 3194717 - RNA, 20 nt, Human
uggggggaacgcccacuucc

SEQ ID NO: 3194718 - RNA, 19 nt, Human
uggggggaacgcccacuuc

SEQ ID NO: 3194719 - RNA, 13 nt, Human
ugggggggcagag

SEQ ID NO: 3194720 - RNA, 17 nt, Human
ugggcuugucuguagau

SEQ ID NO: 3194721 - RNA, 23 nt, Human
ugggcuuggggaccagagcugcc

SEQ ID NO: 3194722 - RNA, 21 nt, Human
ugggcuugucuguagauuuua

SEQ ID NO: 3194723 - RNA, 22 nt, Human
ugggcuuggggaccagagcugc

SEQ ID NO: 3194724 - RNA, 19 nt, Human
uggggcagaaaucugagga

SEQ ID NO: 3194725 - RNA, 17 nt, Human
uggggcagaggagaacu

SEQ ID NO: 3194726 - RNA, 16 nt, Human
uggggcagaggagaac

SEQ ID NO: 3194727 - RNA, 18 nt, Human
uggggcagaaaucugagg

SEQ ID NO: 3194728 - RNA, 18 nt, Human
uggggcacagggagaggc

SEQ ID NO: 3194729 - RNA, 15 nt, Human
ugggcuucauccucc

SEQ ID NO: 3194730 - RNA, 21 nt, Human
ugggcuucaguggcagcugcu

SEQ ID NO: 3194731 - RNA, 22 nt, Human
ugggcuucaguggcagcugcuu

SEQ ID NO: 3194732 - RNA, 22 nt, Human
ugggccuccugugugugcgccu

SEQ ID NO: 3194733 - RNA, 13 nt, Human
ugggccugaguga

SEQ ID NO: 3194734 - RNA, 13 nt, Human
ugggaguguguaa

SEQ ID NO: 3194735 - RNA, 16 nt, Human
ugggauaggggcagag

SEQ ID NO: 3194736 - RNA, 18 nt, Human
ugggaugauuggaggggg

SEQ ID NO: 3194737 - RNA, 14 nt, Human
ugggaugauugaag

SEQ ID NO: 3194738 - RNA, 17 nt, Human
ugggaugauugaagaaa

SEQ ID NO: 3194739 - RNA, 16 nt, Human
ugggaugauugaagaa

SEQ ID NO: 3194740 - RNA, 23 nt, Human
ugggaugauugaagaaacagcua

SEQ ID NO: 3194741 - RNA, 18 nt, Human
ugggaugauugaagaaac

SEQ ID NO: 3194742 - RNA, 16 nt, Human
ugggaggaucucuuga

SEQ ID NO: 3194743 - RNA, 14 nt, Human
ugggacagggagga

SEQ ID NO: 3194744 - RNA, 19 nt, Human
ugggacagggagcagcccc

SEQ ID NO: 3194745 - RNA, 16 nt, Human
ugggaaugaaugucag

SEQ ID NO: 3194746 - RNA, 13 nt, Human
ugggacacccugu

SEQ ID NO: 3194747 - RNA, 14 nt, Human
ugggacacccugug

SEQ ID NO: 3194748 - RNA, 15 nt, Human
ugggacacccuguga

SEQ ID NO: 3194749 - RNA, 18 nt, Human
ugggccguagcuugucug

SEQ ID NO: 3194750 - RNA, 13 nt, Human
ugggcagagcaga

SEQ ID NO: 3194751 - RNA, 15 nt, Human
ugggcagagcagaga

SEQ ID NO: 3194752 - RNA, 17 nt, Human
ugggcagagcagagacc

SEQ ID NO: 3194753 - RNA, 14 nt, Human
ugggcagagcagag

SEQ ID NO: 3194754 - RNA, 18 nt, Human
uggauauauguuuuugaa

SEQ ID NO: 3194755 - RNA, 13 nt, Human
uggauaucuguua

SEQ ID NO: 3194756 - RNA, 14 nt, Human
uggauaucuguuag

SEQ ID NO: 3194757 - RNA, 16 nt, Human
uggauaucuguuagau

SEQ ID NO: 3194758 - RNA, 18 nt, Human
uggauaucuguuagaugc

SEQ ID NO: 3194759 - RNA, 13 nt, Human
uggaugcagccuc

SEQ ID NO: 3194760 - RNA, 21 nt, Human
uggaugcagccucacaguccu

SEQ ID NO: 3194761 - RNA, 22 nt, Human
uggaugcagccucacaguccuu

SEQ ID NO: 3194762 - RNA, 21 nt, Human
uggauuguccccgacccuugc

SEQ ID NO: 3194763 - RNA, 23 nt, Human
uggaggggggaggugggauccuc

SEQ ID NO: 3194764 - RNA, 18 nt, Human
uggcagcucagagagggu

SEQ ID NO: 3194765 - RNA, 22 nt, Human
uggcacugcuuccagugaggcu

SEQ ID NO: 3194766 - RNA, 19 nt, Human
uggcacugcuuccagugag

SEQ ID NO: 3194767 - RNA, 14 nt, Human
uggaucaaguauua

SEQ ID NO: 3194768 - RNA, 22 nt, Human
uggcacuauaauguaagcucua

SEQ ID NO: 3194769 - RNA, 21 nt, Human
uggcacuauaauguaagcucu

SEQ ID NO: 3194770 - RNA, 23 nt, Human
uggcaaggacgcuucacaggaca

SEQ ID NO: 3194771 - RNA, 18 nt, Human
uggagaggagcccugccu

SEQ ID NO: 3194772 - RNA, 17 nt, Human
uggagaggagcccugcc

SEQ ID NO: 3194773 - RNA, 16 nt, Human
uggagaggagcccugc

SEQ ID NO: 3194774 - RNA, 15 nt, Human
uggagaggagcccug

SEQ ID NO: 3194775 - RNA, 17 nt, Human
uggacaggcauguucuc

SEQ ID NO: 3194776 - RNA, 18 nt, Human
uggacauuucuaauuccu

SEQ ID NO: 3194777 - RNA, 17 nt, Human
uggacauuuagaagaaa

SEQ ID NO: 3194778 - RNA, 19 nt, Human
uggacauuuagaagaaaga

SEQ ID NO: 3194779 - RNA, 22 nt, Human
uggacaggcauguucucugagg

SEQ ID NO: 3194780 - RNA, 18 nt, Human
uggacaggcauguucucu

SEQ ID NO: 3194781 - RNA, 19 nt, Human
uggacuaacuugucuuugg

SEQ ID NO: 3194782 - RNA, 19 nt, Human
uggacguguuaugacucca

SEQ ID NO: 3194783 - RNA, 23 nt, Human
uggacguguuaugacuccagaau

SEQ ID NO: 3194784 - RNA, 21 nt, Human
uggacauuuggguugguucca

SEQ ID NO: 3194785 - RNA, 19 nt, Human
uggaaaagccaagaggcug

SEQ ID NO: 3194786 - RNA, 16 nt, Human
uggaaaagccaagagg

SEQ ID NO: 3194787 - RNA, 12 nt, Human
uggaaaagacag

SEQ ID NO: 3194788 - RNA, 16 nt, Human
uggaaaacuuaguuug

SEQ ID NO: 3194789 - RNA, 20 nt, Human
uggaaaacuuaguuugugaa

SEQ ID NO: 3194790 - RNA, 17 nt, Human
ugcuuugcccacaugcc

SEQ ID NO: 3194791 - RNA, 13 nt, Human
ugcuuugauauau

SEQ ID NO: 3194792 - RNA, 12 nt, Human
ugcuuugauaua

SEQ ID NO: 3194793 - RNA, 22 nt, Human
ugcuuugaggcucaccagaauu

SEQ ID NO: 3194794 - RNA, 14 nt, Human
ugcuuguuaacuga

SEQ ID NO: 3194795 - RNA, 18 nt, Human
ugcuugugaaaggaaaga

SEQ ID NO: 3194796 - RNA, 13 nt, Human
ugcuucuucagag

SEQ ID NO: 3194797 - RNA, 13 nt, Human
uggaagaaaguaa

SEQ ID NO: 3194798 - RNA, 14 nt, Human
uggaagaaaguaag

SEQ ID NO: 3194799 - RNA, 14 nt, Human
uggaacacucugag

SEQ ID NO: 3194800 - RNA, 12 nt, Human
uggaacagugcu

SEQ ID NO: 3194801 - RNA, 19 nt, Human
uggaacagugcuacugaaa

SEQ ID NO: 3194802 - RNA, 15 nt, Human
uggaacacucugaga

SEQ ID NO: 3194803 - RNA, 17 nt, Human
uggaacacucugagacu

SEQ ID NO: 3194804 - RNA, 19 nt, Human
uggaaaccugucugagguu

SEQ ID NO: 3194805 - RNA, 13 nt, Human
uggaaacuaauaa

SEQ ID NO: 3194806 - RNA, 14 nt, Human
uggaaacuaauaaa

SEQ ID NO: 3194807 - RNA, 15 nt, Human
uggaaacuaauaaaa

SEQ ID NO: 3194808 - RNA, 16 nt, Human
uggaaacuaauaaaau

SEQ ID NO: 3194809 - RNA, 17 nt, Human
uggaaacuaauaaaaua

SEQ ID NO: 3194810 - RNA, 19 nt, Human
uggaaacuaauaaaauauu

SEQ ID NO: 3194811 - RNA, 21 nt, Human
uggaaacuaauaaaauauuuu

SEQ ID NO: 3194812 - RNA, 22 nt, Human
uggaaacuaauaaaauauuuuc

SEQ ID NO: 3194813 - RNA, 23 nt, Human
uggaaacuaauaaaauauuuucu

SEQ ID NO: 3194814 - RNA, 18 nt, Human
uggaaacuauguguuuuu

SEQ ID NO: 3194815 - RNA, 21 nt, Human
uggaaacuauguguuuuucuc

SEQ ID NO: 3194816 - RNA, 14 nt, Human
uggaaaaggcauau

SEQ ID NO: 3194817 - RNA, 12 nt, Human
ugcuucucacug

SEQ ID NO: 3194818 - RNA, 13 nt, Human
ugcuuccuuucuu

SEQ ID NO: 3194819 - RNA, 20 nt, Human
ugcuucccuuuuuuccuuuc

SEQ ID NO: 3194820 - RNA, 23 nt, Human
ugcuucccuuuuuuccuuuccac

SEQ ID NO: 3194821 - RNA, 19 nt, Human
ugcuuccuauaauuuugau

SEQ ID NO: 3194822 - RNA, 18 nt, Human
ugcuuccuauaauuuuga

SEQ ID NO: 3194823 - RNA, 22 nt, Human
ugcuuccagugaggcucugccc

SEQ ID NO: 3194824 - RNA, 17 nt, Human
ugcuuaccuacuuucuu

SEQ ID NO: 3194825 - RNA, 19 nt, Human
ugcuuaccuacuuucuuca

SEQ ID NO: 3194826 - RNA, 23 nt, Human
ugcuuccagugaggcucugcccu

SEQ ID NO: 3194827 - RNA, 21 nt, Human
ugcuuccagugaggcucugcc

SEQ ID NO: 3194828 - RNA, 16 nt, Human
ugcuguuuugccagcc

SEQ ID NO: 3194829 - RNA, 22 nt, Human
ugcuguuuugccagcccauuug

SEQ ID NO: 3194830 - RNA, 13 nt, Human
ugcuuaaauguga

SEQ ID NO: 3194831 - RNA, 12 nt, Human
ugcuuaaaugug

SEQ ID NO: 3194832 - RNA, 22 nt, Human
ugcuuaaaguugguauuaauaa

SEQ ID NO: 3194833 - RNA, 13 nt, Human
ugcuuaaauuuua

SEQ ID NO: 3194834 - RNA, 16 nt, Human
ugcuuaaauuuuaacu

SEQ ID NO: 3194835 - RNA, 23 nt, Human
ugcuuaaaugugaauuacuaacu

SEQ ID NO: 3194836 - RNA, 20 nt, Human
ugcuuaaaugugaauuacua

SEQ ID NO: 3194837 - RNA, 17 nt, Human
ugcuuaaaugugaauua

SEQ ID NO: 3194838 - RNA, 16 nt, Human
ugcuuaaaugugaauu

SEQ ID NO: 3194839 - RNA, 15 nt, Human
ugcuuaaaugugaau

SEQ ID NO: 3194840 - RNA, 14 nt, Human
ugcuuaaaugugaa

SEQ ID NO: 3194841 - RNA, 20 nt, Human
ugcuuaauuacaauauuucu

SEQ ID NO: 3194842 - RNA, 20 nt, Human
ugcuuaaccuuuuuauuuca

SEQ ID NO: 3194843 - RNA, 20 nt, Human
ugcuuaauucaaauaauaau

SEQ ID NO: 3194844 - RNA, 18 nt, Human
ugcuuaauucaaauaaua

SEQ ID NO: 3194845 - RNA, 17 nt, Human
ugcuuaauucaaauaau

SEQ ID NO: 3194846 - RNA, 16 nt, Human
ugcuuaauucaaauaa

SEQ ID NO: 3194847 - RNA, 19 nt, Human
uuuccaagccucucuggca

SEQ ID NO: 3194848 - RNA, 18 nt, Human
uuucauuuaggugaggaa

SEQ ID NO: 3194849 - RNA, 14 nt, Human
uuucauuuagguga

SEQ ID NO: 3194850 - RNA, 14 nt, Human
uuucaguguacaug

SEQ ID NO: 3194851 - RNA, 13 nt, Human
uuucaguguacau

SEQ ID NO: 3194852 - RNA, 11 nt, Human
uuucagugagg

SEQ ID NO: 3194853 - RNA, 17 nt, Human
uuucaguucaaagucau

SEQ ID NO: 3194854 - RNA, 14 nt, Human
uuucaguucaaagu

SEQ ID NO: 3194855 - RNA, 13 nt, Human
uuucaguucaaag

SEQ ID NO: 3194856 - RNA, 20 nt, Human
uuucaguuauugucccuggc

SEQ ID NO: 3194857 - RNA, 15 nt, Human
uuucagauuugcaca

SEQ ID NO: 3194858 - RNA, 22 nt, Human
uuucagauuugcacaaaaagau

SEQ ID NO: 3194859 - RNA, 19 nt, Human
uuucagauuugcacaaaaa

SEQ ID NO: 3194860 - RNA, 17 nt, Human
uuucagauuugcacaaa

SEQ ID NO: 3194861 - RNA, 16 nt, Human
uuucagauuugcacaa

SEQ ID NO: 3194862 - RNA, 22 nt, Human
uuucacaaccuucuguggcuca

SEQ ID NO: 3194863 - RNA, 22 nt, Human
uuucacaaauauuaaaaagucu

SEQ ID NO: 3194864 - RNA, 16 nt, Human
uuucacaaccuucugu

SEQ ID NO: 3194865 - RNA, 20 nt, Human
uuucaauagcguguguagau

SEQ ID NO: 3194866 - RNA, 13 nt, Human
uuucacaaauauu

SEQ ID NO: 3194867 - RNA, 12 nt, Human
uuucacaaauau

SEQ ID NO: 3194868 - RNA, 20 nt, Human
uuucacaaauauuaaaaagu

SEQ ID NO: 3194869 - RNA, 18 nt, Human
uuucacaaauauuaaaaa

SEQ ID NO: 3194870 - RNA, 17 nt, Human
uuucacaaauauuaaaa

SEQ ID NO: 3194871 - RNA, 16 nt, Human
uuucacaaauauuaaa

SEQ ID NO: 3194872 - RNA, 17 nt, Human
uuucaauaggaaaaacu

SEQ ID NO: 3194873 - RNA, 12 nt, Human
uuucaauaggaa

SEQ ID NO: 3194874 - RNA, 14 nt, Human
uuucaauaggaaaa

SEQ ID NO: 3194875 - RNA, 18 nt, Human
uuucaaguacacugaauu

SEQ ID NO: 3194876 - RNA, 19 nt, Human
uuucaagggcuuuccugug

SEQ ID NO: 3194877 - RNA, 23 nt, Human
uuucaaguauuuaagccuaaaga

SEQ ID NO: 3194878 - RNA, 17 nt, Human
uuucaaguauuuaagcc

SEQ ID NO: 3194879 - RNA, 16 nt, Human
uuucaaguauuuaagc

SEQ ID NO: 3194880 - RNA, 15 nt, Human
uuucaaguauuuaag

SEQ ID NO: 3194881 - RNA, 21 nt, Human
uuucaauaaaguuugaucuuc

SEQ ID NO: 3194882 - RNA, 18 nt, Human
uuucaauaaaguuugauc

SEQ ID NO: 3194883 - RNA, 15 nt, Human
uuucaauaaaguuug

SEQ ID NO: 3194884 - RNA, 14 nt, Human
uuucaauaaaguuu

SEQ ID NO: 3194885 - RNA, 17 nt, Human
uuucaaguuuuaaaguu

SEQ ID NO: 3194886 - RNA, 18 nt, Human
uuucaaguuuuaaaguuc

SEQ ID NO: 3194887 - RNA, 13 nt, Human
uuucaauaaaguu

SEQ ID NO: 3194888 - RNA, 22 nt, Human
uuuauuguuuaaaaucauuucu

SEQ ID NO: 3194889 - RNA, 20 nt, Human
uuuauugaggaaaaauaugu

SEQ ID NO: 3194890 - RNA, 18 nt, Human
uuuauugaggaaaaauau

SEQ ID NO: 3194891 - RNA, 16 nt, Human
uuuauuuacugcuagu

SEQ ID NO: 3194892 - RNA, 12 nt, Human
uuuauucuugau

SEQ ID NO: 3194893 - RNA, 16 nt, Human
uuuauugacucuugag

SEQ ID NO: 3194894 - RNA, 18 nt, Human
uuucaacucauugcauca

SEQ ID NO: 3194895 - RNA, 21 nt, Human
uuucaacgcagcccugcuuug

SEQ ID NO: 3194896 - RNA, 16 nt, Human
uuucaacucauugcau

SEQ ID NO: 3194897 - RNA, 13 nt, Human
uuucaacucauug

SEQ ID NO: 3194898 - RNA, 20 nt, Human
uuucaacgcagcccugcuuu

SEQ ID NO: 3194899 - RNA, 16 nt, Human
uuucaacgcagcccug

SEQ ID NO: 3194900 - RNA, 15 nt, Human
uuucaacgcagcccu

SEQ ID NO: 3194901 - RNA, 22 nt, Human
uuucaaccucuagaauuuuaag

SEQ ID NO: 3194902 - RNA, 15 nt, Human
uuucaaccucuagaa

SEQ ID NO: 3194903 - RNA, 18 nt, Human
uuucaagcuuauuuugga

SEQ ID NO: 3194904 - RNA, 14 nt, Human
uuucaagcuuauuu

SEQ ID NO: 3194905 - RNA, 20 nt, Human
uuucaagcgucacuuuauuu

SEQ ID NO: 3194906 - RNA, 16 nt, Human
uuucaagaacuuguuu

SEQ ID NO: 3194907 - RNA, 13 nt, Human
uuucaagaacuug

SEQ ID NO: 3194908 - RNA, 22 nt, Human
uuucaagaucuaaaucauauau

SEQ ID NO: 3194909 - RNA, 18 nt, Human
uuucaagacugaauucca

SEQ ID NO: 3194910 - RNA, 17 nt, Human
uuuauaaggacuuccug

SEQ ID NO: 3194911 - RNA, 13 nt, Human
uuuauaaggucug

SEQ ID NO: 3194912 - RNA, 21 nt, Human
uuuauaauacagaaucuuguu

SEQ ID NO: 3194913 - RNA, 14 nt, Human
uuuaacuaaauuuu

SEQ ID NO: 3194914 - RNA, 17 nt, Human
uuuaacuaaauuuuaaa

SEQ ID NO: 3194915 - RNA, 11 nt, Human
uuuaacaugcc

SEQ ID NO: 3194916 - RNA, 23 nt, Human
uuuaacaacuaugauuuggaaaa

SEQ ID NO: 3194917 - RNA, 18 nt, Human
uuguuuggagacagaguc

SEQ ID NO: 3194918 - RNA, 14 nt, Human
uuuaaauuuaagua

SEQ ID NO: 3194919 - RNA, 23 nt, Human
uuuaacagggucucuagugcugu

SEQ ID NO: 3194920 - RNA, 14 nt, Human
uuuaacagggucuc

SEQ ID NO: 3194921 - RNA, 16 nt, Human
uuuaauaaaauaauaa

SEQ ID NO: 3194922 - RNA, 21 nt, Human
uuuaauaaagcgaaaaacuca

SEQ ID NO: 3194923 - RNA, 19 nt, Human
uuuaauaaagcgaaaaacu

SEQ ID NO: 3194924 - RNA, 17 nt, Human
uuuaaguguuggaaaaa

SEQ ID NO: 3194925 - RNA, 18 nt, Human
uuuaaguguacuggauuu

SEQ ID NO: 3194926 - RNA, 12 nt, Human
uuuaaguuugca

SEQ ID NO: 3194927 - RNA, 18 nt, Human
uuuaaguuugcacucaaa

SEQ ID NO: 3194928 - RNA, 14 nt, Human
uuuaaguuugcacu

SEQ ID NO: 3194929 - RNA, 13 nt, Human
uuuaaguuuugac

SEQ ID NO: 3194930 - RNA, 18 nt, Human
uuuaaguuuugacaagcu

SEQ ID NO: 3194931 - RNA, 23 nt, Human
uuuaaguuugcacucaaaucuua

SEQ ID NO: 3194932 - RNA, 19 nt, Human
uuuaaguuugcacucaaau

SEQ ID NO: 3194933 - RNA, 15 nt, Human
uuuaacuuguaauaa

SEQ ID NO: 3194934 - RNA, 14 nt, Human
uuuaacuuuaccau

SEQ ID NO: 3194935 - RNA, 23 nt, Human
uuuaacuuuaccaugcucaauga

SEQ ID NO: 3194936 - RNA, 20 nt, Human
uuuaacuuaguuuugcauag

SEQ ID NO: 3194937 - RNA, 17 nt, Human
uuuaacuuaguuuugca

SEQ ID NO: 3194938 - RNA, 12 nt, Human
uuuaagaaagaa

SEQ ID NO: 3194939 - RNA, 19 nt, Human
uuuaagacauuuuuggaag

SEQ ID NO: 3194940 - RNA, 17 nt, Human
uuuaagacacuuccguc

SEQ ID NO: 3194941 - RNA, 19 nt, Human
uuuaguuuuauuuucuaaa

SEQ ID NO: 3194942 - RNA, 17 nt, Human
uuuaguuuuauuuucua

SEQ ID NO: 3194943 - RNA, 13 nt, Human
uuuaguuuuauuu

SEQ ID NO: 3194944 - RNA, 14 nt, Human
uuuaguuuugcuuu

SEQ ID NO: 3194945 - RNA, 14 nt, Human
uuuauaaaaagaua

SEQ ID NO: 3194946 - RNA, 12 nt, Human
uuuaguuuuucu

SEQ ID NO: 3194947 - RNA, 12 nt, Human
uuuagacagagu

SEQ ID NO: 3194948 - RNA, 18 nt, Human
uuuagaauugaagguuuu

SEQ ID NO: 3194949 - RNA, 21 nt, Human
uuuagaauugaagguuuuuga

SEQ ID NO: 3194950 - RNA, 11 nt, Human
uuuagaauuga

SEQ ID NO: 3194951 - RNA, 13 nt, Human
uuuagaauugaag

SEQ ID NO: 3194952 - RNA, 15 nt, Human
uuuagaauugaaggu

SEQ ID NO: 3194953 - RNA, 17 nt, Human
uuuagaauugaagguuu

SEQ ID NO: 3194954 - RNA, 21 nt, Human
uuuagaauggugauuuuaaau

SEQ ID NO: 3194955 - RNA, 20 nt, Human
uuuagaauggugauuuuaaa

SEQ ID NO: 3194956 - RNA, 18 nt, Human
uuuagaauggugauuuua

SEQ ID NO: 3194957 - RNA, 14 nt, Human
uuuagaaauauaau

SEQ ID NO: 3194958 - RNA, 17 nt, Human
uuuagaaauaaaccuua

SEQ ID NO: 3194959 - RNA, 20 nt, Human
uuuagaaauaaaccuuaaua

SEQ ID NO: 3194960 - RNA, 11 nt, Human
uuuagaaauau

SEQ ID NO: 3194961 - RNA, 18 nt, Human
uuuacuugaauaguauug

SEQ ID NO: 3194962 - RNA, 22 nt, Human
uuuacuucuuauacauuugaua

SEQ ID NO: 3194963 - RNA, 19 nt, Human
uuuacuucuuauacauuug

SEQ ID NO: 3194964 - RNA, 15 nt, Human
uuuacuucuuauaca

SEQ ID NO: 3194965 - RNA, 16 nt, Human
uuuaccacuugcugca

SEQ ID NO: 3194966 - RNA, 14 nt, Human
uuuacuuggaaaua

SEQ ID NO: 3194967 - RNA, 17 nt, Human
uuuacagugaagaaagc

SEQ ID NO: 3194968 - RNA, 19 nt, Human
uuuacagugaagaaagccu

SEQ ID NO: 3194969 - RNA, 20 nt, Human
uuuacagugaagaaagccug

SEQ ID NO: 3194970 - RNA, 15 nt, Human
uuuacagcugccugc

SEQ ID NO: 3194971 - RNA, 16 nt, Human
uuuacagcugccugca

SEQ ID NO: 3194972 - RNA, 22 nt, Human
uuuacacggagcggauugcaaa

SEQ ID NO: 3194973 - RNA, 18 nt, Human
uuguacgacgucagaugu

SEQ ID NO: 3194974 - RNA, 21 nt, Human
uuguacgacgucagauguuua

SEQ ID NO: 3194975 - RNA, 13 nt, Human
uuguacaugaaca

SEQ ID NO: 3194976 - RNA, 16 nt, Human
uuguaugucaaagcuu

SEQ ID NO: 3194977 - RNA, 16 nt, Human
uugucuaagaaacauu

SEQ ID NO: 3194978 - RNA, 23 nt, Human
uugucuaagaaacauuggaagca

SEQ ID NO: 3194979 - RNA, 20 nt, Human
uugucuaagaaacauuggaa

SEQ ID NO: 3194980 - RNA, 18 nt, Human
uugucuaagaaacauugg

SEQ ID NO: 3194981 - RNA, 17 nt, Human
uugucuaagaaacauug

SEQ ID NO: 3194982 - RNA, 11 nt, Human
uugucucagau

SEQ ID NO: 3194983 - RNA, 20 nt, Human
uugucugaagucacugcaca

SEQ ID NO: 3194984 - RNA, 15 nt, Human
uugucuuaaaaagug

SEQ ID NO: 3194985 - RNA, 17 nt, Human
uugucugccccaaguuu

SEQ ID NO: 3194986 - RNA, 20 nt, Human
uugucugccccaaguuuugu

SEQ ID NO: 3194987 - RNA, 18 nt, Human
uugucugccccaaguuuu

SEQ ID NO: 3194988 - RNA, 21 nt, Human
uugucugaagucacugcacag

SEQ ID NO: 3194989 - RNA, 14 nt, Human
uugugaaaugaugg

SEQ ID NO: 3194990 - RNA, 20 nt, Human
uugugaaaggaaagaggcuc

SEQ ID NO: 3194991 - RNA, 16 nt, Human
uugugaaaauaauuga

SEQ ID NO: 3194992 - RNA, 19 nt, Human
uugugaaagaggucccaag

SEQ ID NO: 3194993 - RNA, 19 nt, Human
uugugaaacagacuuguau

SEQ ID NO: 3194994 - RNA, 21 nt, Human
uugucugccccaaguuuugug

SEQ ID NO: 3194995 - RNA, 13 nt, Human
uugucuguaaauc

SEQ ID NO: 3194996 - RNA, 17 nt, Human
uuguaaauagcucaggu

SEQ ID NO: 3194997 - RNA, 21 nt, Human
uuguaaaugugguaaagaguu

SEQ ID NO: 3194998 - RNA, 16 nt, Human
uuguaaaugugguaaa

SEQ ID NO: 3194999 - RNA, 14 nt, Human
uuguaaauauuaaa

SEQ ID NO: 3195000 - RNA, 23 nt, Human
uuguaaauauuaaaccauaagau

SEQ ID NO: 3195001 - RNA, 17 nt, Human
uuguaaaagcaacauca

SEQ ID NO: 3195002 - RNA, 20 nt, Human
uuguaaaagcaacaucagcu

SEQ ID NO: 3195003 - RNA, 23 nt, Human
uuguaaaagcaacaucagcuuga

SEQ ID NO: 3195004 - RNA, 17 nt, Human
uuguaaaagcauuuugu

SEQ ID NO: 3195005 - RNA, 20 nt, Human
uuguaaaagcauuuuguaau

SEQ ID NO: 3195006 - RNA, 19 nt, Human
uuguaaaagcauuuuguaa

SEQ ID NO: 3195007 - RNA, 18 nt, Human
uuguaaaagcauuuugua

SEQ ID NO: 3195008 - RNA, 15 nt, Human
uuguaaauucugauu

SEQ ID NO: 3195009 - RNA, 12 nt, Human
uuguaaauucug

SEQ ID NO: 3195010 - RNA, 13 nt, Human
uuguaaauucuga

SEQ ID NO: 3195011 - RNA, 14 nt, Human
uuguaaauucugau

SEQ ID NO: 3195012 - RNA, 15 nt, Human
uuggucugugagaug

SEQ ID NO: 3195013 - RNA, 13 nt, Human
uugguauccuuau

SEQ ID NO: 3195014 - RNA, 17 nt, Human
uugguccacuuuuccag

SEQ ID NO: 3195015 - RNA, 14 nt, Human
uugguccacuuuuc

SEQ ID NO: 3195016 - RNA, 20 nt, Human
uugguauuuggauaucuguu

SEQ ID NO: 3195017 - RNA, 13 nt, Human
uugguacuguaau

SEQ ID NO: 3195018 - RNA, 17 nt, Human
uugguauauccuuuucu

SEQ ID NO: 3195019 - RNA, 16 nt, Human
uugguauuaauaaaaa

SEQ ID NO: 3195020 - RNA, 18 nt, Human
uugguauuaauaaaaaga

SEQ ID NO: 3195021 - RNA, 16 nt, Human
uuggucugugagaugc

SEQ ID NO: 3195022 - RNA, 13 nt, Human
uuggucuguguga

SEQ ID NO: 3195023 - RNA, 22 nt, Human
uuguaaaaauuaaaaguuaugg

SEQ ID NO: 3195024 - RNA, 22 nt, Human
uuggguucaagcgauucuucug

SEQ ID NO: 3195025 - RNA, 17 nt, Human
uugguaccuugcacaca

SEQ ID NO: 3195026 - RNA, 16 nt, Human
uugguaccuugcacac

SEQ ID NO: 3195027 - RNA, 14 nt, Human
uugguaccuugcac

SEQ ID NO: 3195028 - RNA, 13 nt, Human
uugguaccuugca

SEQ ID NO: 3195029 - RNA, 16 nt, Human
uugcacucaaaucuua

SEQ ID NO: 3195030 - RNA, 21 nt, Human
uugcacuauugagucuucaug

SEQ ID NO: 3195031 - RNA, 21 nt, Human
uugcacucaaaucuuaagaaa

SEQ ID NO: 3195032 - RNA, 20 nt, Human
uugcacucaaaucuuaagaa

SEQ ID NO: 3195033 - RNA, 18 nt, Human
uugcacucaaaucuuaag

SEQ ID NO: 3195034 - RNA, 17 nt, Human
uugcacucaaaucuuaa

SEQ ID NO: 3195035 - RNA, 22 nt, Human
uuguguugacuuuauaaauuuc

SEQ ID NO: 3195036 - RNA, 12 nt, Human
uuguguugaaga

SEQ ID NO: 3195037 - RNA, 18 nt, Human
uuguguugaagagcagcu

SEQ ID NO: 3195038 - RNA, 13 nt, Human
uuguguugaagag

SEQ ID NO: 3195039 - RNA, 21 nt, Human
uuguguuuauauauaagccaa

SEQ ID NO: 3195040 - RNA, 14 nt, Human
uuguguuuauucuu

SEQ ID NO: 3195041 - RNA, 13 nt, Human
uuguguucaccuu

SEQ ID NO: 3195042 - RNA, 16 nt, Human
uuguggacacagcucu

SEQ ID NO: 3195043 - RNA, 21 nt, Human
uuguggaaaaugaaaauuagg

SEQ ID NO: 3195044 - RNA, 17 nt, Human
uuguggacacagcucuu

SEQ ID NO: 3195045 - RNA, 12 nt, Human
uugugccccugc

SEQ ID NO: 3195046 - RNA, 16 nt, Human
uugugccagaaugcuu

SEQ ID NO: 3195047 - RNA, 21 nt, Human
uugugccagaaugcuuuagga

SEQ ID NO: 3195048 - RNA, 18 nt, Human
uugugccaaacaaaauga

SEQ ID NO: 3195049 - RNA, 17 nt, Human
uugugccuuaaagacaa

SEQ ID NO: 3195050 - RNA, 13 nt, Human
uugugcugcuucu

SEQ ID NO: 3195051 - RNA, 20 nt, Human
uugugcaguaacuugggagu

SEQ ID NO: 3195052 - RNA, 17 nt, Human
uugugcaguaacuuggg

SEQ ID NO: 3195053 - RNA, 23 nt, Human
uugugcauuggauaacaccacca

SEQ ID NO: 3195054 - RNA, 15 nt, Human
uugugcacaggcaga

SEQ ID NO: 3195055 - RNA, 18 nt, Human
uuguguuuauucuugaug

SEQ ID NO: 3195056 - RNA, 16 nt, Human
uuguguuuauucuuga

SEQ ID NO: 3195057 - RNA, 21 nt, Human
uuguguuuauucuugaugaaa

SEQ ID NO: 3195058 - RNA, 17 nt, Human
uuguuaaguccuuggcu

SEQ ID NO: 3195059 - RNA, 18 nt, Human
uuguuaauaucacucauu

SEQ ID NO: 3195060 - RNA, 20 nt, Human
uuguuaauaucacucauuaa

SEQ ID NO: 3195061 - RNA, 22 nt, Human
uuguuaauaucacucauuaauu

SEQ ID NO: 3195062 - RNA, 12 nt, Human
uuguuagauguu

SEQ ID NO: 3195063 - RNA, 15 nt, Human
uuguuacucuuggga

SEQ ID NO: 3195064 - RNA, 16 nt, Human
uuguuagaaaaaugga

SEQ ID NO: 3195065 - RNA, 13 nt, Human
uuguuaauuugga

SEQ ID NO: 3195066 - RNA, 24 nt, Human
uuguuaccuuaaaacuaggcauuu

SEQ ID NO: 3195067 - RNA, 20 nt, Human
uuguuucagggcuguggccu

SEQ ID NO: 3195068 - RNA, 15 nt, Human
uuguuuccuuucacu

SEQ ID NO: 3195069 - RNA, 14 nt, Human
uuguuuaaaaucau

SEQ ID NO: 3195070 - RNA, 20 nt, Human
uuguuucuuucucugaggac

SEQ ID NO: 3195071 - RNA, 20 nt, Human
uuguuucuuugaauuuucau

SEQ ID NO: 3195072 - RNA, 14 nt, Human
uuguuucuuugaau

SEQ ID NO: 3195073 - RNA, 22 nt, Human
uuguuucuagacuauaaauguu

SEQ ID NO: 3195074 - RNA, 23 nt, Human
uuguuugaugcauuaaaagaaaa

SEQ ID NO: 3195075 - RNA, 15 nt, Human
uuguuguuuguaugu

SEQ ID NO: 3195076 - RNA, 21 nt, Human
uuguuguuucuuaauuuggaa

SEQ ID NO: 3195077 - RNA, 14 nt, Human
uuguugugugccuc

SEQ ID NO: 3195078 - RNA, 20 nt, Human
uuguuagugugucuuagugu

SEQ ID NO: 3195079 - RNA, 22 nt, Human
uuguuagcauuuucaaugugau

SEQ ID NO: 3195080 - RNA, 21 nt, Human
uuguuaggccaaagacaaaua

SEQ ID NO: 3195081 - RNA, 20 nt, Human
uuguuaggccaaagacaaau

SEQ ID NO: 3195082 - RNA, 22 nt, Human
uuguuaggccaaagacaaauag

SEQ ID NO: 3195083 - RNA, 21 nt, Human
uuccugaggaagagggacugu

SEQ ID NO: 3195084 - RNA, 20 nt, Human
uuccugaguuaggcuuucuc

SEQ ID NO: 3195085 - RNA, 20 nt, Human
uuccugaggcugggcucccu

SEQ ID NO: 3195086 - RNA, 15 nt, Human
uuccugaggcugggc

SEQ ID NO: 3195087 - RNA, 19 nt, Human
uuccugacgagauaagcag

SEQ ID NO: 3195088 - RNA, 23 nt, Human
uuccugaugcuucuucagagacu

SEQ ID NO: 3195089 - RNA, 20 nt, Human
uuccugauagcauaugacaa

SEQ ID NO: 3195090 - RNA, 22 nt, Human
uuccugaguuaggcuuucucuu

SEQ ID NO: 3195091 - RNA, 22 nt, Human
uuccugauagcauaugacaaau

SEQ ID NO: 3195092 - RNA, 19 nt, Human
uuccugauugguuucucuu

SEQ ID NO: 3195093 - RNA, 16 nt, Human
uuccugauugguuucu

SEQ ID NO: 3195094 - RNA, 20 nt, Human
uuccugauugguuucucuuc

SEQ ID NO: 3195095 - RNA, 18 nt, Human
uuccugaagaauugaaaa

SEQ ID NO: 3195096 - RNA, 14 nt, Human
uuccauguaugcau

SEQ ID NO: 3195097 - RNA, 15 nt, Human
uucgguacccaccac

SEQ ID NO: 3195098 - RNA, 20 nt, Human
uuccuugaguugauucagcu

SEQ ID NO: 3195099 - RNA, 21 nt, Human
uuccuugaguugauucagcuc

SEQ ID NO: 3195100 - RNA, 13 nt, Human
uuccuugcauaca

SEQ ID NO: 3195101 - RNA, 15 nt, Human
uuccuugccagucuu

SEQ ID NO: 3195102 - RNA, 14 nt, Human
uuccuugccagucu

SEQ ID NO: 3195103 - RNA, 17 nt, Human
uuccuugcauacaaaca

SEQ ID NO: 3195104 - RNA, 18 nt, Human
uuccugcuuccucagagg

SEQ ID NO: 3195105 - RNA, 17 nt, Human
uuccugcuuccucagag

SEQ ID NO: 3195106 - RNA, 16 nt, Human
uuccugcuuccucaga

SEQ ID NO: 3195107 - RNA, 16 nt, Human
uucuauaauuuuacaa

SEQ ID NO: 3195108 - RNA, 19 nt, Human
uucuauagcaucacuuaaa

SEQ ID NO: 3195109 - RNA, 20 nt, Human
uucuauagcaucacuuaaaa

SEQ ID NO: 3195110 - RNA, 22 nt, Human
uucuauagcaucacuuaaaaca

SEQ ID NO: 3195111 - RNA, 22 nt, Human
uucuacucgaguuacagacaaa

SEQ ID NO: 3195112 - RNA, 16 nt, Human
uucuacuuccaagacu

SEQ ID NO: 3195113 - RNA, 14 nt, Human
uucuacccaggugc

SEQ ID NO: 3195114 - RNA, 21 nt, Human
uucuacccagcgagcccuggu

SEQ ID NO: 3195115 - RNA, 20 nt, Human
uucuacccagcgagcccugg

SEQ ID NO: 3195116 - RNA, 13 nt, Human
uucuacgccaggg

SEQ ID NO: 3195117 - RNA, 20 nt, Human
uucuaccggcuuugccaugu

SEQ ID NO: 3195118 - RNA, 23 nt, Human
uucuaccuauaacacucuaggau

SEQ ID NO: 3195119 - RNA, 18 nt, Human
uucuaccggagagagaau

SEQ ID NO: 3195120 - RNA, 23 nt, Human
uucuaccggagagagaauguauu

SEQ ID NO: 3195121 - RNA, 13 nt, Human
uucuacuauuuau

SEQ ID NO: 3195122 - RNA, 19 nt, Human
uucuacccagcgagcccug

SEQ ID NO: 3195123 - RNA, 12 nt, Human
uucuacccagcg

SEQ ID NO: 3195124 - RNA, 15 nt, Human
uucuacauacuaugg

SEQ ID NO: 3195125 - RNA, 17 nt, Human
uucuacagaaaaacaau

SEQ ID NO: 3195126 - RNA, 15 nt, Human
uucuaauuugcugcu

SEQ ID NO: 3195127 - RNA, 16 nt, Human
uucuaauuugcugcug

SEQ ID NO: 3195128 - RNA, 17 nt, Human
uucuaauuugcugcuga

SEQ ID NO: 3195129 - RNA, 22 nt, Human
uucuaauuugcugcugauaaug

SEQ ID NO: 3195130 - RNA, 20 nt, Human
uucuaauuggcuuuacuauu

SEQ ID NO: 3195131 - RNA, 18 nt, Human
uucgugacaauguuuaca

SEQ ID NO: 3195132 - RNA, 18 nt, Human
uucguacauaauacugaa

SEQ ID NO: 3195133 - RNA, 23 nt, Human
uucuaaugugugaaucagagcac

SEQ ID NO: 3195134 - RNA, 20 nt, Human
uucguuaguaaucuguauaa

SEQ ID NO: 3195135 - RNA, 19 nt, Human
uucgugacaauguuuacaa

SEQ ID NO: 3195136 - RNA, 17 nt, Human
uucuaauuccuguuugu

SEQ ID NO: 3195137 - RNA, 16 nt, Human
uucuaauuagauuaac

SEQ ID NO: 3195138 - RNA, 18 nt, Human
uucuaauuggcuuuacua

SEQ ID NO: 3195139 - RNA, 19 nt, Human
uucugagagcugugcauca

SEQ ID NO: 3195140 - RNA, 13 nt, Human
uucugagagcugu

SEQ ID NO: 3195141 - RNA, 21 nt, Human
uucucugcccagcuuuucauu

SEQ ID NO: 3195142 - RNA, 21 nt, Human
uucugaggccugaauccaaaa

SEQ ID NO: 3195143 - RNA, 18 nt, Human
uucugauaaccauagcau

SEQ ID NO: 3195144 - RNA, 21 nt, Human
uucugagaaagacuauucaaa

SEQ ID NO: 3195145 - RNA, 16 nt, Human
uucugagaaagacuau

SEQ ID NO: 3195146 - RNA, 18 nt, Human
uucugacccugcuucaaa

SEQ ID NO: 3195147 - RNA, 15 nt, Human
uucugagaaagacua

SEQ ID NO: 3195148 - RNA, 16 nt, Human
uucucugcccuccaag

SEQ ID NO: 3195149 - RNA, 23 nt, Human
uucugacccaugcugcccuguga

SEQ ID NO: 3195150 - RNA, 22 nt, Human
uucugacccaugcugcccugug

SEQ ID NO: 3195151 - RNA, 16 nt, Human
uucugcuaaauuucaa

SEQ ID NO: 3195152 - RNA, 19 nt, Human
uucugcucacauaucuguc

SEQ ID NO: 3195153 - RNA, 19 nt, Human
uucugauccuaguuccacc

SEQ ID NO: 3195154 - RNA, 13 nt, Human
uucugauauuaau

SEQ ID NO: 3195155 - RNA, 14 nt, Human
uucugauauuaauu

SEQ ID NO: 3195156 - RNA, 15 nt, Human
uucugaucacugaaa

SEQ ID NO: 3195157 - RNA, 14 nt, Human
uucugaucuucacu

SEQ ID NO: 3195158 - RNA, 14 nt, Human
uucugaugaaaugu

SEQ ID NO: 3195159 - RNA, 18 nt, Human
uucugaugaaauguuaac

SEQ ID NO: 3195160 - RNA, 20 nt, Human
uucugaucacugaaauaaaa

SEQ ID NO: 3195161 - RNA, 19 nt, Human
uucugaucacugaaauaaa

SEQ ID NO: 3195162 - RNA, 15 nt, Human
uucugauucuucaaa

SEQ ID NO: 3195163 - RNA, 20 nt, Human
uucugauuucuuuucaccau

SEQ ID NO: 3195164 - RNA, 13 nt, Human
uucugauuucuuu

SEQ ID NO: 3195165 - RNA, 13 nt, Human
uucucugaggaca

SEQ ID NO: 3195166 - RNA, 20 nt, Human
uucucugaggacaagagaaa

SEQ ID NO: 3195167 - RNA, 16 nt, Human
uucucugaggacaaga

SEQ ID NO: 3195168 - RNA, 11 nt, Human
uucucugcccu

SEQ ID NO: 3195169 - RNA, 12 nt, Human
uucucugcccuc

SEQ ID NO: 3195170 - RNA, 14 nt, Human
uucucugaggacac

SEQ ID NO: 3195171 - RNA, 15 nt, Human
uucucuccagccccu

SEQ ID NO: 3195172 - RNA, 13 nt, Human
uucucuccagccc

SEQ ID NO: 3195173 - RNA, 14 nt, Human
uucucuccagcccc

SEQ ID NO: 3195174 - RNA, 15 nt, Human
uucuaucuacugauu

SEQ ID NO: 3195175 - RNA, 17 nt, Human
uucuaucuacugauuug

SEQ ID NO: 3195176 - RNA, 21 nt, Human
uucucaugccucagccuccug

SEQ ID NO: 3195177 - RNA, 16 nt, Human
uucuccacccugcucu

SEQ ID NO: 3195178 - RNA, 20 nt, Human
uucucauuugccaauaauaa

SEQ ID NO: 3195179 - RNA, 21 nt, Human
uucucauuacuuguugccuau

SEQ ID NO: 3195180 - RNA, 15 nt, Human
uucucauuacuuguu

SEQ ID NO: 3195181 - RNA, 21 nt, Human
uucuccaccucccacaaagga

SEQ ID NO: 3195182 - RNA, 12 nt, Human
uucuccaccugc

SEQ ID NO: 3195183 - RNA, 14 nt, Human
uucuccaccugcca

SEQ ID NO: 3195184 - RNA, 15 nt, Human
uucuccaccugccag

SEQ ID NO: 3195185 - RNA, 16 nt, Human
uucuccaccugccagg

SEQ ID NO: 3195186 - RNA, 18 nt, Human
uucuccaccugccaggga

SEQ ID NO: 3195187 - RNA, 20 nt, Human
uucuccaccugccagggaca

SEQ ID NO: 3195188 - RNA, 12 nt, Human
uucuccacugga

SEQ ID NO: 3195189 - RNA, 20 nt, Human
uugacaaagucaagccacau

SEQ ID NO: 3195190 - RNA, 19 nt, Human
uugacaaagucaagccaca

SEQ ID NO: 3195191 - RNA, 23 nt, Human
uugaauuuucauuuuacaguuac

SEQ ID NO: 3195192 - RNA, 17 nt, Human
uugaauuuucauuuuac

SEQ ID NO: 3195193 - RNA, 24 nt, Human
uugaauuuauuuuuaagaaagaaa

SEQ ID NO: 3195194 - RNA, 12 nt, Human
uugaauuuucau

SEQ ID NO: 3195195 - RNA, 11 nt, Human
uugaauuuuca

SEQ ID NO: 3195196 - RNA, 16 nt, Human
uugaauuuucauuuua

SEQ ID NO: 3195197 - RNA, 15 nt, Human
uugaauuuucauuuu

SEQ ID NO: 3195198 - RNA, 14 nt, Human
uugaauuuucauuu

SEQ ID NO: 3195199 - RNA, 13 nt, Human
uugaauuuucauu

SEQ ID NO: 3195200 - RNA, 23 nt, Human
uugaauuuauuuuuaagaaagaa

SEQ ID NO: 3195201 - RNA, 14 nt, Human
uugaauuguaagga

SEQ ID NO: 3195202 - RNA, 18 nt, Human
uugaacuguuagaaugua

SEQ ID NO: 3195203 - RNA, 17 nt, Human
uugaacuguuagaaugu

SEQ ID NO: 3195204 - RNA, 18 nt, Human
uugaacuggguacuugug

SEQ ID NO: 3195205 - RNA, 15 nt, Human
uugaacucugagaga

SEQ ID NO: 3195206 - RNA, 17 nt, Human
uugaacuccugaccuca

SEQ ID NO: 3195207 - RNA, 15 nt, Human
uugaacuguuagaau

SEQ ID NO: 3195208 - RNA, 14 nt, Human
uugaacuguuagaa

SEQ ID NO: 3195209 - RNA, 14 nt, Human
uugacccacaagaa

SEQ ID NO: 3195210 - RNA, 14 nt, Human
uugacaagcuggcu

SEQ ID NO: 3195211 - RNA, 17 nt, Human
uugacccacaagaaaug

SEQ ID NO: 3195212 - RNA, 17 nt, Human
uugaccgugaggccaga

SEQ ID NO: 3195213 - RNA, 21 nt, Human
uugaccucaggugauccaccc

SEQ ID NO: 3195214 - RNA, 15 nt, Human
uugacaagcuggcuu

SEQ ID NO: 3195215 - RNA, 15 nt, Human
uugaccgacagcuuu

SEQ ID NO: 3195216 - RNA, 17 nt, Human
uugacgccaucccagcc

SEQ ID NO: 3195217 - RNA, 18 nt, Human
uugacgccaucccagccc

SEQ ID NO: 3195218 - RNA, 19 nt, Human
uugacgccaucccagcccc

SEQ ID NO: 3195219 - RNA, 15 nt, Human
uugacgccaucccag

SEQ ID NO: 3195220 - RNA, 21 nt, Human
uugacucuaguacugugaauc

SEQ ID NO: 3195221 - RNA, 23 nt, Human
uugauauccucuuugagugaagc

SEQ ID NO: 3195222 - RNA, 13 nt, Human
uugauauaccaaa

SEQ ID NO: 3195223 - RNA, 19 nt, Human
uugauauaccaaauuaaaa

SEQ ID NO: 3195224 - RNA, 23 nt, Human
uugauagcacagacccugcccug

SEQ ID NO: 3195225 - RNA, 12 nt, Human
uugauaguggga

SEQ ID NO: 3195226 - RNA, 11 nt, Human
uugagccuggg

SEQ ID NO: 3195227 - RNA, 18 nt, Human
uugagcccuuguuucagg

SEQ ID NO: 3195228 - RNA, 20 nt, Human
uugacuguuauuuguugaga

SEQ ID NO: 3195229 - RNA, 16 nt, Human
uugaggguugggcugg

SEQ ID NO: 3195230 - RNA, 13 nt, Human
uugaggguugggc

SEQ ID NO: 3195231 - RNA, 14 nt, Human
uugagccuaaaaau

SEQ ID NO: 3195232 - RNA, 21 nt, Human
uugagccuaaaaauaaagcac

SEQ ID NO: 3195233 - RNA, 17 nt, Human
uugagccuaaaaauaaa

SEQ ID NO: 3195234 - RNA, 22 nt, Human
uugcaaaggagcucacuguggu

SEQ ID NO: 3195235 - RNA, 22 nt, Human
uugauuuuaaaauguacaugua

SEQ ID NO: 3195236 - RNA, 19 nt, Human
uugauuuuaaaauguacau

SEQ ID NO: 3195237 - RNA, 18 nt, Human
uugauuuuaaaauguaca

SEQ ID NO: 3195238 - RNA, 15 nt, Human
uugauuuuaaaaugu

SEQ ID NO: 3195239 - RNA, 18 nt, Human
uugauuuuccaucuaaaa

SEQ ID NO: 3195240 - RNA, 12 nt, Human
uugcaaagcaaa

SEQ ID NO: 3195241 - RNA, 11 nt, Human
uugcaaagcaa

SEQ ID NO: 3195242 - RNA, 19 nt, Human
uugauuugucacugcuuca

SEQ ID NO: 3195243 - RNA, 13 nt, Human
uugauuugauuuu

SEQ ID NO: 3195244 - RNA, 13 nt, Human
uugauuugagauu

SEQ ID NO: 3195245 - RNA, 16 nt, Human
uugaugaucuuugcag

SEQ ID NO: 3195246 - RNA, 17 nt, Human
uugaugacccccaacca

SEQ ID NO: 3195247 - RNA, 13 nt, Human
uugauucucucca

SEQ ID NO: 3195248 - RNA, 19 nt, Human
uugaugcauuaaaagaaaa

SEQ ID NO: 3195249 - RNA, 22 nt, Human
uugaugcaauccuuacaaauga

SEQ ID NO: 3195250 - RNA, 20 nt, Human
uugaugcaauccuuacaaau

SEQ ID NO: 3195251 - RNA, 16 nt, Human
uugaugcaugcuauuc

SEQ ID NO: 3195252 - RNA, 19 nt, Human
uugaugcaauccuuacaaa

SEQ ID NO: 3195253 - RNA, 17 nt, Human
uugaugcaauccuuaca

SEQ ID NO: 3195254 - RNA, 13 nt, Human
uugauugcuuuuu

SEQ ID NO: 3195255 - RNA, 12 nt, Human
uugauugcuuuu

SEQ ID NO: 3195256 - RNA, 14 nt, Human
uugauucucuccau

SEQ ID NO: 3195257 - RNA, 21 nt, Human
uugaaaagaggugugcaagag

SEQ ID NO: 3195258 - RNA, 14 nt, Human
uugaaaagaggugu

SEQ ID NO: 3195259 - RNA, 13 nt, Human
uugaaaagagaca

SEQ ID NO: 3195260 - RNA, 13 nt, Human
uugaaaagaggug

SEQ ID NO: 3195261 - RNA, 15 nt, Human
uugaaaacagaaauu

SEQ ID NO: 3195262 - RNA, 16 nt, Human
uugaacuccuggccuc

SEQ ID NO: 3195263 - RNA, 15 nt, Human
uugaacuccuggccu

SEQ ID NO: 3195264 - RNA, 22 nt, Human
uugaaaauaaccuaauuaauau

SEQ ID NO: 3195265 - RNA, 17 nt, Human
uugaaaaguaauauuua

SEQ ID NO: 3195266 - RNA, 22 nt, Human
uugaaaaguaauauuuauuaaa

SEQ ID NO: 3195267 - RNA, 22 nt, Human
uugaaaacacuguucucugccc

SEQ ID NO: 3195268 - RNA, 19 nt, Human
uugaaaaaauuuaaaagua

SEQ ID NO: 3195269 - RNA, 21 nt, Human
uugaaaaaauuuaaaaguaaa

SEQ ID NO: 3195270 - RNA, 23 nt, Human
uugaaaacacuguucucugcccu

SEQ ID NO: 3195271 - RNA, 24 nt, Human
uugaaaaccaacaccaucacagcu

SEQ ID NO: 3195272 - RNA, 20 nt, Human
uugaaaaaccauuuugcugu

SEQ ID NO: 3195273 - RNA, 17 nt, Human
uucuuauacagauaaaa

SEQ ID NO: 3195274 - RNA, 20 nt, Human
uucuuauacagauaaaacau

SEQ ID NO: 3195275 - RNA, 21 nt, Human
uucuuauacagauaaaacaug

SEQ ID NO: 3195276 - RNA, 21 nt, Human
uucuuauacauuugauaaagu

SEQ ID NO: 3195277 - RNA, 21 nt, Human
uucuuccacaagagcccaggc

SEQ ID NO: 3195278 - RNA, 14 nt, Human
uucuuccaaagcag

SEQ ID NO: 3195279 - RNA, 21 nt, Human
uucuucccacccccuugcccu

SEQ ID NO: 3195280 - RNA, 21 nt, Human
uucuucccaacuugccuuuga

SEQ ID NO: 3195281 - RNA, 19 nt, Human
uucuucccaacuugccuuu

SEQ ID NO: 3195282 - RNA, 22 nt, Human
uucuuccaguuacuuuccaauu

SEQ ID NO: 3195283 - RNA, 12 nt, Human
uucuuccaguua

SEQ ID NO: 3195284 - RNA, 11 nt, Human
uucuuccaguu

SEQ ID NO: 3195285 - RNA, 14 nt, Human
uucuuguguguuua

SEQ ID NO: 3195286 - RNA, 15 nt, Human
uucuuccucauuccc

SEQ ID NO: 3195287 - RNA, 13 nt, Human
uucuuccucccuc

SEQ ID NO: 3195288 - RNA, 21 nt, Human
uucuuguguguuuauugucaa

SEQ ID NO: 3195289 - RNA, 13 nt, Human
uucuuuaaacugu

SEQ ID NO: 3195290 - RNA, 15 nt, Human
uucuuuaaaauuaca

SEQ ID NO: 3195291 - RNA, 12 nt, Human
uucuuucagcca

SEQ ID NO: 3195292 - RNA, 16 nt, Human
uucuuguuuugcuucc

SEQ ID NO: 3195293 - RNA, 13 nt, Human
uucuuguuuugcu

SEQ ID NO: 3195294 - RNA, 19 nt, Human
uucugcuucagccucccga

SEQ ID NO: 3195295 - RNA, 16 nt, Human
uucugcuucagccucc

SEQ ID NO: 3195296 - RNA, 15 nt, Human
uucugcuucagccuc

SEQ ID NO: 3195297 - RNA, 14 nt, Human
uucugcuucagccu

SEQ ID NO: 3195298 - RNA, 17 nt, Human
uucuggacuauagcugu

SEQ ID NO: 3195299 - RNA, 20 nt, Human
uucuggacuauagcuguucu

SEQ ID NO: 3195300 - RNA, 22 nt, Human
uucuggaaucauuguccagagc

SEQ ID NO: 3195301 - RNA, 17 nt, Human
uucugcuuuagacuuga

SEQ ID NO: 3195302 - RNA, 13 nt, Human
uucugcuuuagac

SEQ ID NO: 3195303 - RNA, 18 nt, Human
uucugcuuuccucuuccu

SEQ ID NO: 3195304 - RNA, 19 nt, Human
uucugcuuuagacuugaaa

SEQ ID NO: 3195305 - RNA, 11 nt, Human
uucugcuuugu

SEQ ID NO: 3195306 - RNA, 19 nt, Human
uucugcuuuguugugugcc

SEQ ID NO: 3195307 - RNA, 12 nt, Human
uucugcuuuguu

SEQ ID NO: 3195308 - RNA, 23 nt, Human
uucugcuuuguugugugccucua

SEQ ID NO: 3195309 - RNA, 22 nt, Human
uucugcuuuguugugugccucu

SEQ ID NO: 3195310 - RNA, 20 nt, Human
uucugcuuuguugugugccu

SEQ ID NO: 3195311 - RNA, 21 nt, Human
uucugucuucauccccucaga

SEQ ID NO: 3195312 - RNA, 22 nt, Human
uucugucuucauccccucagaa

SEQ ID NO: 3195313 - RNA, 17 nt, Human
uucugucuucacaacag

SEQ ID NO: 3195314 - RNA, 12 nt, Human
uucuguguauuu

SEQ ID NO: 3195315 - RNA, 13 nt, Human
uucuguguguucc

SEQ ID NO: 3195316 - RNA, 14 nt, Human
uucuguguguuccu

SEQ ID NO: 3195317 - RNA, 15 nt, Human
uucuguguguuccug

SEQ ID NO: 3195318 - RNA, 16 nt, Human
uucuguguguuccugg

SEQ ID NO: 3195319 - RNA, 17 nt, Human
uucuguguguuccuggc

SEQ ID NO: 3195320 - RNA, 10 nt, Human
uucugugugu

SEQ ID NO: 3195321 - RNA, 17 nt, Human
uucuguguuuacagaga

SEQ ID NO: 3195322 - RNA, 14 nt, Human
uucuguguuuacag

SEQ ID NO: 3195323 - RNA, 18 nt, Human
uucuguauuuuguuuuug

SEQ ID NO: 3195324 - RNA, 16 nt, Human
uucuguauuugaaagu

SEQ ID NO: 3195325 - RNA, 17 nt, Human
uucuguauuugaaagug

SEQ ID NO: 3195326 - RNA, 19 nt, Human
uucuguauuugaaagugcc

SEQ ID NO: 3195327 - RNA, 23 nt, Human
uucugucaaagucagaacaaauu

SEQ ID NO: 3195328 - RNA, 22 nt, Human
uucugucaaagucagaacaaau

SEQ ID NO: 3195329 - RNA, 14 nt, Human
uucuggaugggaca

SEQ ID NO: 3195330 - RNA, 15 nt, Human
uucuguauuugaaag

SEQ ID NO: 3195331 - RNA, 14 nt, Human
uucuguauuugaaa

SEQ ID NO: 3195332 - RNA, 19 nt, Human
uucuguccuacucuguguc

SEQ ID NO: 3195333 - RNA, 19 nt, Human
uucugucacaguaaaaaua

SEQ ID NO: 3195334 - RNA, 14 nt, Human
uucugucucucccu

SEQ ID NO: 3195335 - RNA, 15 nt, Human
uucuguccuguaacu

SEQ ID NO: 3195336 - RNA, 18 nt, Human
uuauguuguuuuguacag

SEQ ID NO: 3195337 - RNA, 14 nt, Human
uuauggcugcauag

SEQ ID NO: 3195338 - RNA, 17 nt, Human
uuauggauaugaaaaau

SEQ ID NO: 3195339 - RNA, 18 nt, Human
uuauggcuauaggugcua

SEQ ID NO: 3195340 - RNA, 18 nt, Human
uuauggaacacucugaga

SEQ ID NO: 3195341 - RNA, 20 nt, Human
uuauggaacacucugagacu

SEQ ID NO: 3195342 - RNA, 21 nt, Human
uuauggacaaugacccagugg

SEQ ID NO: 3195343 - RNA, 16 nt, Human
uuauggaacacucuga

SEQ ID NO: 3195344 - RNA, 17 nt, Human
uuauggaacacucugag

SEQ ID NO: 3195345 - RNA, 18 nt, Human
uuaucuugaaggaaaaau

SEQ ID NO: 3195346 - RNA, 22 nt, Human
uuauuaaauuuuuuuguaugaa

SEQ ID NO: 3195347 - RNA, 19 nt, Human
uuauuaacuuaauaaucaa

SEQ ID NO: 3195348 - RNA, 14 nt, Human
uuauuaacuuaaua

SEQ ID NO: 3195349 - RNA, 17 nt, Human
uuauuaacuuaauaauc

SEQ ID NO: 3195350 - RNA, 20 nt, Human
uuauuaaauuuuuuuguaug

SEQ ID NO: 3195351 - RNA, 21 nt, Human
uuauuaaauuuuuuuguauga

SEQ ID NO: 3195352 - RNA, 12 nt, Human
uuauuaaaugua

SEQ ID NO: 3195353 - RNA, 15 nt, Human
uuauuaaauguagcu

SEQ ID NO: 3195354 - RNA, 18 nt, Human
uuauuaaauguagcuuca

SEQ ID NO: 3195355 - RNA, 24 nt, Human
uuauuaaauguagcuucagucauu

SEQ ID NO: 3195356 - RNA, 13 nt, Human
uuauuaaauugca

SEQ ID NO: 3195357 - RNA, 17 nt, Human
uuauuaaauuguaaaac

SEQ ID NO: 3195358 - RNA, 17 nt, Human
uuauguuuuuguacucu

SEQ ID NO: 3195359 - RNA, 18 nt, Human
uuauguuuuuguacucug

SEQ ID NO: 3195360 - RNA, 15 nt, Human
uuauuaaaugcuuca

SEQ ID NO: 3195361 - RNA, 17 nt, Human
uuauuaaaugcuucauu

SEQ ID NO: 3195362 - RNA, 19 nt, Human
uuauuaaaugcccagcccc

SEQ ID NO: 3195363 - RNA, 21 nt, Human
uuauuaaaugcccagccccuu

SEQ ID NO: 3195364 - RNA, 20 nt, Human
uuauguuugccacuuugcaa

SEQ ID NO: 3195365 - RNA, 11 nt, Human
uuauguuugcc

SEQ ID NO: 3195366 - RNA, 23 nt, Human
uuauguuuugguccacuuuucca

SEQ ID NO: 3195367 - RNA, 20 nt, Human
uuauguuuugguccacuuuu

SEQ ID NO: 3195368 - RNA, 18 nt, Human
uuauguuuugguccacuu

SEQ ID NO: 3195369 - RNA, 13 nt, Human
uuauuaaucacug

SEQ ID NO: 3195370 - RNA, 12 nt, Human
uuauuaaucacu

SEQ ID NO: 3195371 - RNA, 18 nt, Human
uuauuaagguuacagauu

SEQ ID NO: 3195372 - RNA, 15 nt, Human
uuauuaagcuuuuug

SEQ ID NO: 3195373 - RNA, 19 nt, Human
uuauuaagcuuuuuggaau

SEQ ID NO: 3195374 - RNA, 21 nt, Human
uuaucuucugcucuuucuucu

SEQ ID NO: 3195375 - RNA, 22 nt, Human
uuaucuucuggacuauagcugu

SEQ ID NO: 3195376 - RNA, 17 nt, Human
uuaucuugaaggaaaaa

SEQ ID NO: 3195377 - RNA, 11 nt, Human
uuaucucaaaa

SEQ ID NO: 3195378 - RNA, 18 nt, Human
uuaucucagauauuugca

SEQ ID NO: 3195379 - RNA, 19 nt, Human
uuaucucagauauuugcac

SEQ ID NO: 3195380 - RNA, 16 nt, Human
uuaucucagauguuaa

SEQ ID NO: 3195381 - RNA, 17 nt, Human
uuaucucagauguuaaa

SEQ ID NO: 3195382 - RNA, 22 nt, Human
uuaucucagauguuaaaauaaa

SEQ ID NO: 3195383 - RNA, 13 nt, Human
uuaucuauauaaa

SEQ ID NO: 3195384 - RNA, 15 nt, Human
uuaucuauauaaaau

SEQ ID NO: 3195385 - RNA, 16 nt, Human
uuaucuauauaaaaua

SEQ ID NO: 3195386 - RNA, 20 nt, Human
uuaucuaccaacuuucaaga

SEQ ID NO: 3195387 - RNA, 18 nt, Human
uuaucuaccaacuuucaa

SEQ ID NO: 3195388 - RNA, 17 nt, Human
uuaucuaccaacuuuca

SEQ ID NO: 3195389 - RNA, 14 nt, Human
uuaucuaccaacuu

SEQ ID NO: 3195390 - RNA, 19 nt, Human
uuaucgcccuggcaggcag

SEQ ID NO: 3195391 - RNA, 20 nt, Human
uuaucgcccuggcaggcagg

SEQ ID NO: 3195392 - RNA, 18 nt, Human
uuaucguccagugacuuu

SEQ ID NO: 3195393 - RNA, 17 nt, Human
uuaucguccagugacuu

SEQ ID NO: 3195394 - RNA, 14 nt, Human
uuauauuguaagaa

SEQ ID NO: 3195395 - RNA, 22 nt, Human
uuauauuguaagaaauacugua

SEQ ID NO: 3195396 - RNA, 16 nt, Human
uuauauuguaagaaau

SEQ ID NO: 3195397 - RNA, 24 nt, Human
uuauauuguaagaaauacuguaca

SEQ ID NO: 3195398 - RNA, 20 nt, Human
uuauauuuauugacucuuga

SEQ ID NO: 3195399 - RNA, 10 nt, Human
uuauauuuca

SEQ ID NO: 3195400 - RNA, 18 nt, Human
uuauauuucaaguacacu

SEQ ID NO: 3195401 - RNA, 11 nt, Human
uuauauuucaa

SEQ ID NO: 3195402 - RNA, 15 nt, Human
uuauauuuauugacu

SEQ ID NO: 3195403 - RNA, 14 nt, Human
uuaucccuuaagaa

SEQ ID NO: 3195404 - RNA, 16 nt, Human
uuaucccuuaagaaug

SEQ ID NO: 3195405 - RNA, 15 nt, Human
uuaucccuuaagaau

SEQ ID NO: 3195406 - RNA, 19 nt, Human
uuauauuucaaguacacug

SEQ ID NO: 3195407 - RNA, 15 nt, Human
uuauauggaagaaag

SEQ ID NO: 3195408 - RNA, 18 nt, Human
uuauauggaagaaaguaa

SEQ ID NO: 3195409 - RNA, 19 nt, Human
uuauauguauguguuuaga

SEQ ID NO: 3195410 - RNA, 20 nt, Human
uuauauguauguguuuagaa

SEQ ID NO: 3195411 - RNA, 21 nt, Human
uuauauguauguguuuagaau

SEQ ID NO: 3195412 - RNA, 12 nt, Human
uuauauguaugu

SEQ ID NO: 3195413 - RNA, 14 nt, Human
uuauauguaugugu

SEQ ID NO: 3195414 - RNA, 15 nt, Human
uuauauguauguguu

SEQ ID NO: 3195415 - RNA, 16 nt, Human
uuauauguauguguuu

SEQ ID NO: 3195416 - RNA, 17 nt, Human
uuauauguauguguuua

SEQ ID NO: 3195417 - RNA, 15 nt, Human
uuauaugaacauaca

SEQ ID NO: 3195418 - RNA, 17 nt, Human
uuauaugaacauacaaa

SEQ ID NO: 3195419 - RNA, 13 nt, Human
uuauaugaacaua

SEQ ID NO: 3195420 - RNA, 21 nt, Human
uuauaugaacauacaaaugca

SEQ ID NO: 3195421 - RNA, 23 nt, Human
uuauaucuccuuuguauucuguc

SEQ ID NO: 3195422 - RNA, 17 nt, Human
uuauacaguuauaaaau

SEQ ID NO: 3195423 - RNA, 21 nt, Human
uuauacaguuauaaaauuaaa

SEQ ID NO: 3195424 - RNA, 17 nt, Human
uuauauccauuuuuauc

SEQ ID NO: 3195425 - RNA, 18 nt, Human
uuauauccaguaacacau

SEQ ID NO: 3195426 - RNA, 22 nt, Human
uuauaucagacugcuuugagaa

SEQ ID NO: 3195427 - RNA, 17 nt, Human
uuauaucagacugcuuu

SEQ ID NO: 3195428 - RNA, 22 nt, Human
uuauacagaccgaacuguugua

SEQ ID NO: 3195429 - RNA, 16 nt, Human
uuauacaaccuucauu

SEQ ID NO: 3195430 - RNA, 19 nt, Human
uuauacaaccuucauuuaa

SEQ ID NO: 3195431 - RNA, 15 nt, Human
uuauaauuguugcau

SEQ ID NO: 3195432 - RNA, 14 nt, Human
uuauaauuguugca

SEQ ID NO: 3195433 - RNA, 15 nt, Human
uuauaaugaaugaaa

SEQ ID NO: 3195434 - RNA, 22 nt, Human
uuauaauguauucauauuugua

SEQ ID NO: 3195435 - RNA, 19 nt, Human
uuauaauguauucauauuu

SEQ ID NO: 3195436 - RNA, 13 nt, Human
uuauaauguauuc

SEQ ID NO: 3195437 - RNA, 12 nt, Human
uuauaauguauu

SEQ ID NO: 3195438 - RNA, 14 nt, Human
uuauaaugaaugac

SEQ ID NO: 3195439 - RNA, 16 nt, Human
uuauaaucagaaugga

SEQ ID NO: 3195440 - RNA, 23 nt, Human
uuauaaucagaauggaagagaga

SEQ ID NO: 3195441 - RNA, 15 nt, Human
uuauaauaauguuaa

SEQ ID NO: 3195442 - RNA, 18 nt, Human
uuauaauaauguuaacau

SEQ ID NO: 3195443 - RNA, 14 nt, Human
uuauaaucaccagg

SEQ ID NO: 3195444 - RNA, 21 nt, Human
uuaguggacccugaaaugugu

SEQ ID NO: 3195445 - RNA, 19 nt, Human
uuaguggacccugaaaugu

SEQ ID NO: 3195446 - RNA, 16 nt, Human
uuaguggacccugaaa

SEQ ID NO: 3195447 - RNA, 20 nt, Human
uuauaagaaaaaugugaauu

SEQ ID NO: 3195448 - RNA, 13 nt, Human
uuauaagaaaaau

SEQ ID NO: 3195449 - RNA, 16 nt, Human
uuagugagacauauuu

SEQ ID NO: 3195450 - RNA, 14 nt, Human
uuagucuuuauacu

SEQ ID NO: 3195451 - RNA, 19 nt, Human
uuagugaccucagcuuuga

SEQ ID NO: 3195452 - RNA, 13 nt, Human
ugugaaaagaaaa

SEQ ID NO: 3195453 - RNA, 15 nt, Human
ugugaaaagaaaaau

SEQ ID NO: 3195454 - RNA, 17 nt, Human
ugugaaaagaaaaauga

SEQ ID NO: 3195455 - RNA, 19 nt, Human
ugucuuaauggaugaaauc

SEQ ID NO: 3195456 - RNA, 13 nt, Human
uuauuuuaaaaga

SEQ ID NO: 3195457 - RNA, 19 nt, Human
uuauuugugauguacugua

SEQ ID NO: 3195458 - RNA, 15 nt, Human
uuauuugucagugua

SEQ ID NO: 3195459 - RNA, 15 nt, Human
uuauuucuuuuacuu

SEQ ID NO: 3195460 - RNA, 14 nt, Human
uuauuugaaugacu

SEQ ID NO: 3195461 - RNA, 21 nt, Human
uuauuagcagcugacuuucaa

SEQ ID NO: 3195462 - RNA, 18 nt, Human
uuauuagcccugcauuuu

SEQ ID NO: 3195463 - RNA, 23 nt, Human
uuauuagcccugcauuuucauag

SEQ ID NO: 3195464 - RNA, 23 nt, Human
uuauuagcagcugacuuucaaag

SEQ ID NO: 3195465 - RNA, 21 nt, Human
uucaauaaaguuugaucuucc

SEQ ID NO: 3195466 - RNA, 19 nt, Human
uucaauaaaguuugaucuu

SEQ ID NO: 3195467 - RNA, 18 nt, Human
uucaauaaaguuugaucu

SEQ ID NO: 3195468 - RNA, 16 nt, Human
uucaauaaaguuugau

SEQ ID NO: 3195469 - RNA, 15 nt, Human
uucaauaaaguuuga

SEQ ID NO: 3195470 - RNA, 21 nt, Human
uucaacagguuuuccugaaga

SEQ ID NO: 3195471 - RNA, 18 nt, Human
uucaaauguguuuugguc

SEQ ID NO: 3195472 - RNA, 21 nt, Human
uucaaauguguuuugguccug

SEQ ID NO: 3195473 - RNA, 17 nt, Human
uucaacaguuucaaaau

SEQ ID NO: 3195474 - RNA, 17 nt, Human
uucaaauggaguuggag

SEQ ID NO: 3195475 - RNA, 16 nt, Human
uuauuuuaaaauuuca

SEQ ID NO: 3195476 - RNA, 22 nt, Human
uuauuuuggaaaauaaauuauu

SEQ ID NO: 3195477 - RNA, 21 nt, Human
uuauuuuggagagauaggaag

SEQ ID NO: 3195478 - RNA, 13 nt, Human
uucacggaagagc

SEQ ID NO: 3195479 - RNA, 22 nt, Human
uucaccuuuguccccaccgcag

SEQ ID NO: 3195480 - RNA, 15 nt, Human
uucacgauucauuuu

SEQ ID NO: 3195481 - RNA, 17 nt, Human
uucacggaagagccuug

SEQ ID NO: 3195482 - RNA, 14 nt, Human
uucagacagcugcc

SEQ ID NO: 3195483 - RNA, 15 nt, Human
uucagacagcugccu

SEQ ID NO: 3195484 - RNA, 16 nt, Human
uucagacagcugccug

SEQ ID NO: 3195485 - RNA, 17 nt, Human
uucagacagcugccugg

SEQ ID NO: 3195486 - RNA, 14 nt, Human
uucagcucacugca

SEQ ID NO: 3195487 - RNA, 20 nt, Human
uucaauaggaaaaacugauu

SEQ ID NO: 3195488 - RNA, 18 nt, Human
uucaauaguaauauaaua

SEQ ID NO: 3195489 - RNA, 22 nt, Human
uucaauaggaaaaacugauuuu

SEQ ID NO: 3195490 - RNA, 21 nt, Human
uucaauaggaaaaacugauuu

SEQ ID NO: 3195491 - RNA, 16 nt, Human
uucaauauauuuguau

SEQ ID NO: 3195492 - RNA, 20 nt, Human
uucacaaauauuaaaaaguc

SEQ ID NO: 3195493 - RNA, 19 nt, Human
uucacaaauauuaaaaagu

SEQ ID NO: 3195494 - RNA, 15 nt, Human
uucacaaauauuaaa

SEQ ID NO: 3195495 - RNA, 14 nt, Human
uucacaaauauuaa

SEQ ID NO: 3195496 - RNA, 12 nt, Human
uucacaaauauu

SEQ ID NO: 3195497 - RNA, 11 nt, Human
uucacaaauau

SEQ ID NO: 3195498 - RNA, 19 nt, Human
uucaccuuuguccccaccg

SEQ ID NO: 3195499 - RNA, 20 nt, Human
uucaccuuuguccccaccgc

SEQ ID NO: 3195500 - RNA, 14 nt, Human
uucaccuuuguccc

SEQ ID NO: 3195501 - RNA, 13 nt, Human
uucacccuuuucu

SEQ ID NO: 3195502 - RNA, 21 nt, Human
uucacaaccuucuguggcuca

SEQ ID NO: 3195503 - RNA, 22 nt, Human
uucacaaauauuaaaaagucuu

SEQ ID NO: 3195504 - RNA, 18 nt, Human
uucauuuuuuuuaauuga

SEQ ID NO: 3195505 - RNA, 14 nt, Human
uuccaaaacaaaaa

SEQ ID NO: 3195506 - RNA, 20 nt, Human
uuccaaagcagagagcauua

SEQ ID NO: 3195507 - RNA, 17 nt, Human
uuccaaccauuuaucuu

SEQ ID NO: 3195508 - RNA, 19 nt, Human
uuccaaccauuuaucuuga

SEQ ID NO: 3195509 - RNA, 18 nt, Human
uuccaaccauuuaucuug

SEQ ID NO: 3195510 - RNA, 22 nt, Human
uucauuuuugaaacugcauuug

SEQ ID NO: 3195511 - RNA, 13 nt, Human
uucaucuggaagu

SEQ ID NO: 3195512 - RNA, 14 nt, Human
uucaucuggaaguu

SEQ ID NO: 3195513 - RNA, 15 nt, Human
uuccagagcugccag

SEQ ID NO: 3195514 - RNA, 21 nt, Human
uuccagagcauuccagucagg

SEQ ID NO: 3195515 - RNA, 13 nt, Human
uuccagagcauuc

SEQ ID NO: 3195516 - RNA, 11 nt, Human
uuccagagcau

SEQ ID NO: 3195517 - RNA, 19 nt, Human
uuccaacccucaucaccaa

SEQ ID NO: 3195518 - RNA, 21 nt, Human
uuccaaccauuuaucuugaag

SEQ ID NO: 3195519 - RNA, 20 nt, Human
uuccaaccauuuaucuugaa

SEQ ID NO: 3195520 - RNA, 14 nt, Human
uuccagaaucugua

SEQ ID NO: 3195521 - RNA, 14 nt, Human
uuccauggacuuug

SEQ ID NO: 3195522 - RNA, 15 nt, Human
uuccauggacuuugu

SEQ ID NO: 3195523 - RNA, 23 nt, Human
uuccauauuuuuuuccuuacaua

SEQ ID NO: 3195524 - RNA, 18 nt, Human
uuccauauuuuuuuccuu

SEQ ID NO: 3195525 - RNA, 21 nt, Human
uuccauauuagaaaacuuugu

SEQ ID NO: 3195526 - RNA, 18 nt, Human
uuccauauuagaaaacuu

SEQ ID NO: 3195527 - RNA, 17 nt, Human
uuccauauuagaaaacu

SEQ ID NO: 3195528 - RNA, 16 nt, Human
uuccauauuagaaaac

SEQ ID NO: 3195529 - RNA, 13 nt, Human
uucagcuugggga

SEQ ID NO: 3195530 - RNA, 13 nt, Human
uucaguggcagcu

SEQ ID NO: 3195531 - RNA, 14 nt, Human
uucaguggcagcug

SEQ ID NO: 3195532 - RNA, 22 nt, Human
uucagcuuguaaauagcucagg

SEQ ID NO: 3195533 - RNA, 15 nt, Human
uucagcuccagcuca

SEQ ID NO: 3195534 - RNA, 12 nt, Human
uucagcuccagc

SEQ ID NO: 3195535 - RNA, 21 nt, Human
uucagcugguugagguuucaa

SEQ ID NO: 3195536 - RNA, 16 nt, Human
uucaguggcagcugcu

SEQ ID NO: 3195537 - RNA, 15 nt, Human
uucaguggcagcugc

SEQ ID NO: 3195538 - RNA, 17 nt, Human
uucaguggcagcugcuu

SEQ ID NO: 3195539 - RNA, 12 nt, Human
uucaguguacau

SEQ ID NO: 3195540 - RNA, 16 nt, Human
uucaguguaaagugug

SEQ ID NO: 3195541 - RNA, 13 nt, Human
uucaguguacaug

SEQ ID NO: 3195542 - RNA, 20 nt, Human
uucaucugagagaggcuaaa

SEQ ID NO: 3195543 - RNA, 20 nt, Human
uucauccuuucacuucuuuc

SEQ ID NO: 3195544 - RNA, 16 nt, Human
uucaucccuucucuuc

SEQ ID NO: 3195545 - RNA, 15 nt, Human
uucauccuuucacuu

SEQ ID NO: 3195546 - RNA, 12 nt, Human
uucauccuuuca

SEQ ID NO: 3195547 - RNA, 18 nt, Human
uucaucccuucucuucca

SEQ ID NO: 3195548 - RNA, 17 nt, Human
uucauccuucccacucu

SEQ ID NO: 3195549 - RNA, 12 nt, Human
uucauccuuccc

SEQ ID NO: 3195550 - RNA, 15 nt, Human
uucauccuccucaga

SEQ ID NO: 3195551 - RNA, 19 nt, Human
uucauccuccucagaucuu

SEQ ID NO: 3195552 - RNA, 15 nt, Human
uucauaaccuagccu

SEQ ID NO: 3195553 - RNA, 16 nt, Human
uucaguuuuuguguuu

SEQ ID NO: 3195554 - RNA, 22 nt, Human
uucaguucaaagucaugauguu

SEQ ID NO: 3195555 - RNA, 17 nt, Human
uucaguucaaagucaug

SEQ ID NO: 3195556 - RNA, 16 nt, Human
uucaguucaaagucau

SEQ ID NO: 3195557 - RNA, 13 nt, Human
uucaguucaaagu

SEQ ID NO: 3195558 - RNA, 21 nt, Human
uucaguguuucuggggagcug

SEQ ID NO: 3195559 - RNA, 13 nt, Human
uucaguguuucug

SEQ ID NO: 3195560 - RNA, 10 nt, Human
uucaguguuu

SEQ ID NO: 3195561 - RNA, 21 nt, Human
uuuuauuuuucucaugaugag

SEQ ID NO: 3195562 - RNA, 18 nt, Human
uuuuauuuuuagacagag

SEQ ID NO: 3195563 - RNA, 17 nt, Human
uuuucaaaauaaaaaug

SEQ ID NO: 3195564 - RNA, 17 nt, Human
uuuuauuuuuagaauuu

SEQ ID NO: 3195565 - RNA, 13 nt, Human
uuuuaucucagau

SEQ ID NO: 3195566 - RNA, 18 nt, Human
uuuuauauuucaaguaca

SEQ ID NO: 3195567 - RNA, 16 nt, Human
uuuuauuuucuaaagu

SEQ ID NO: 3195568 - RNA, 14 nt, Human
uuuuaugaagaaaa

SEQ ID NO: 3195569 - RNA, 19 nt, Human
uuuuauagaaaaacaaauc

SEQ ID NO: 3195570 - RNA, 15 nt, Human
uuuuauauuucaagu

SEQ ID NO: 3195571 - RNA, 11 nt, Human
uuuuauauuuc

SEQ ID NO: 3195572 - RNA, 15 nt, Human
uuuuauaccuguuua

SEQ ID NO: 3195573 - RNA, 17 nt, Human
uuuuauaccuguuuaaa

SEQ ID NO: 3195574 - RNA, 16 nt, Human
uuuuauaccuguuuaa

SEQ ID NO: 3195575 - RNA, 13 nt, Human
uuuuauagugugu

SEQ ID NO: 3195576 - RNA, 19 nt, Human
uuuuacccuauaucuauaa

SEQ ID NO: 3195577 - RNA, 13 nt, Human
uuuuaaaggcauu

SEQ ID NO: 3195578 - RNA, 19 nt, Human
uuuuaaaggcauuagaguc

SEQ ID NO: 3195579 - RNA, 17 nt, Human
uuuuacaauaaaaucuu

SEQ ID NO: 3195580 - RNA, 23 nt, Human
uuuuacaaaggcuguauucagca

SEQ ID NO: 3195581 - RNA, 18 nt, Human
uuuuacaaaggcuguauu

SEQ ID NO: 3195582 - RNA, 19 nt, Human
uuuuacaaaaaagaaaaga

SEQ ID NO: 3195583 - RNA, 21 nt, Human
uuuuaaauaaaaauuacugug

SEQ ID NO: 3195584 - RNA, 12 nt, Human
uuuuaaaguuca

SEQ ID NO: 3195585 - RNA, 18 nt, Human
uuuuaaaguucauugcaa

SEQ ID NO: 3195586 - RNA, 20 nt, Human
uuuucagaagaaauaaauau

SEQ ID NO: 3195587 - RNA, 18 nt, Human
uuuucccuauuagagaag

SEQ ID NO: 3195588 - RNA, 22 nt, Human
uuuucccuauuagagaagagau

SEQ ID NO: 3195589 - RNA, 15 nt, Human
uuuucccaggaaaga

SEQ ID NO: 3195590 - RNA, 18 nt, Human
uuuucacauccuugacuu

SEQ ID NO: 3195591 - RNA, 15 nt, Human
uuuucacauccuuga

SEQ ID NO: 3195592 - RNA, 18 nt, Human
uuuucaaauggaguugga

SEQ ID NO: 3195593 - RNA, 17 nt, Human
uuuucacccuucuacuc

SEQ ID NO: 3195594 - RNA, 20 nt, Human
uuuucaccuuuucaggaaaa

SEQ ID NO: 3195595 - RNA, 23 nt, Human
uuuucaccauucguacauaauac

SEQ ID NO: 3195596 - RNA, 13 nt, Human
uuuucuuauuuca

SEQ ID NO: 3195597 - RNA, 20 nt, Human
uuuucuacucgaguuacaga

SEQ ID NO: 3195598 - RNA, 22 nt, Human
uuuucuacucgaguuacagaca

SEQ ID NO: 3195599 - RNA, 13 nt, Human
uuuucuacucgag

SEQ ID NO: 3195600 - RNA, 22 nt, Human
uuuucccugaaguuauguguau

SEQ ID NO: 3195601 - RNA, 18 nt, Human
uuuuccgcauucuuugua

SEQ ID NO: 3195602 - RNA, 21 nt, Human
uuuucccugaaguuaugugua

SEQ ID NO: 3195603 - RNA, 15 nt, Human
uuuucccugaaguua

SEQ ID NO: 3195604 - RNA, 16 nt, Human
uuuucccucagaaaau

SEQ ID NO: 3195605 - RNA, 22 nt, Human
uuuucuuguguguuuauuguca

SEQ ID NO: 3195606 - RNA, 13 nt, Human
uuuucuucaucaa

SEQ ID NO: 3195607 - RNA, 11 nt, Human
uuuucuuguau

SEQ ID NO: 3195608 - RNA, 19 nt, Human
uuuucuuguaucuggauuc

SEQ ID NO: 3195609 - RNA, 13 nt, Human
uuuucuucucccu

SEQ ID NO: 3195610 - RNA, 17 nt, Human
uuuucuucacucaaauu

SEQ ID NO: 3195611 - RNA, 16 nt, Human
uuuucuuucagccaag

SEQ ID NO: 3195612 - RNA, 22 nt, Human
uuuucuuuacaaacaaaagcau

SEQ ID NO: 3195613 - RNA, 12 nt, Human
uuuuaaaaucuu

SEQ ID NO: 3195614 - RNA, 20 nt, Human
uuuuaaacccuauugguaaa

SEQ ID NO: 3195615 - RNA, 19 nt, Human
uuuuaaaauacuguagaua

SEQ ID NO: 3195616 - RNA, 12 nt, Human
uuuuaaaauacu

SEQ ID NO: 3195617 - RNA, 21 nt, Human
uuuguuacucucuuccacaug

SEQ ID NO: 3195618 - RNA, 16 nt, Human
uuuguuacucuuggga

SEQ ID NO: 3195619 - RNA, 17 nt, Human
uuuguuaccuuaaaacu

SEQ ID NO: 3195620 - RNA, 18 nt, Human
uuuguuaccuuaaaacua

SEQ ID NO: 3195621 - RNA, 20 nt, Human
uuuguuaauuuggaccauuu

SEQ ID NO: 3195622 - RNA, 23 nt, Human
uuuguguguucacuaaacucuga

SEQ ID NO: 3195623 - RNA, 19 nt, Human
uuuguguguucacuaaacu

SEQ ID NO: 3195624 - RNA, 15 nt, Human
uuuguugucagcuga

SEQ ID NO: 3195625 - RNA, 19 nt, Human
uuuguugccagauuucaga

SEQ ID NO: 3195626 - RNA, 23 nt, Human
uuuguugcacugaaguuugauaa

SEQ ID NO: 3195627 - RNA, 20 nt, Human
uuuguugccagauuucagaa

SEQ ID NO: 3195628 - RNA, 10 nt, Human
uuuguugcac

SEQ ID NO: 3195629 - RNA, 16 nt, Human
uuuguugauucucucc

SEQ ID NO: 3195630 - RNA, 23 nt, Human
uuuguugagcugguaacaucguu

SEQ ID NO: 3195631 - RNA, 22 nt, Human
uuuguugcacugaaguuugaua

SEQ ID NO: 3195632 - RNA, 21 nt, Human
uuuguugcacugaaguuugau

SEQ ID NO: 3195633 - RNA, 18 nt, Human
uuuguugcacugaaguuu

SEQ ID NO: 3195634 - RNA, 17 nt, Human
uuuguugcacugaaguu

SEQ ID NO: 3195635 - RNA, 20 nt, Human
uuuggucaguuggguuuuua

SEQ ID NO: 3195636 - RNA, 19 nt, Human
uuugguccacuuuuccagu

SEQ ID NO: 3195637 - RNA, 18 nt, Human
uuugguccacuuuuccag

SEQ ID NO: 3195638 - RNA, 17 nt, Human
uuuggaccauuuuccug

SEQ ID NO: 3195639 - RNA, 12 nt, Human
uuuguauucugu

SEQ ID NO: 3195640 - RNA, 13 nt, Human
uuuguauuguccu

SEQ ID NO: 3195641 - RNA, 17 nt, Human
uuuguauucugucuuca

SEQ ID NO: 3195642 - RNA, 15 nt, Human
uuuguauuguccuau

SEQ ID NO: 3195643 - RNA, 22 nt, Human
uuuguauuguccuauuaguguu

SEQ ID NO: 3195644 - RNA, 16 nt, Human
uuuguauuuauucuuu

SEQ ID NO: 3195645 - RNA, 13 nt, Human
uuuguauuuauuc

SEQ ID NO: 3195646 - RNA, 18 nt, Human
uuugugugcuaaacgugu

SEQ ID NO: 3195647 - RNA, 20 nt, Human
uuuguguggagucauuucug

SEQ ID NO: 3195648 - RNA, 18 nt, Human
uuuguguguuacaaugua

SEQ ID NO: 3195649 - RNA, 14 nt, Human
uuuguauuuuuagu

SEQ ID NO: 3195650 - RNA, 13 nt, Human
uuugcauugucug

SEQ ID NO: 3195651 - RNA, 14 nt, Human
uuugcauugucugu

SEQ ID NO: 3195652 - RNA, 21 nt, Human
uuugguagcugggaaagcaua

SEQ ID NO: 3195653 - RNA, 20 nt, Human
uuuggacacauuuaaggugu

SEQ ID NO: 3195654 - RNA, 15 nt, Human
uuuggaaaucucuuu

SEQ ID NO: 3195655 - RNA, 12 nt, Human
uuuggaaaauaa

SEQ ID NO: 3195656 - RNA, 13 nt, Human
uuugcauuuaaga

SEQ ID NO: 3195657 - RNA, 21 nt, Human
uuugcauuuaagaauugccag

SEQ ID NO: 3195658 - RNA, 13 nt, Human
uuugcauuucaga

SEQ ID NO: 3195659 - RNA, 13 nt, Human
uuuggaaacuaau

SEQ ID NO: 3195660 - RNA, 15 nt, Human
uuuggaaacuaauaa

SEQ ID NO: 3195661 - RNA, 16 nt, Human
uuuggaaacuaauaaa

SEQ ID NO: 3195662 - RNA, 17 nt, Human
uuuggaaacuaauaaaa

SEQ ID NO: 3195663 - RNA, 18 nt, Human
uuuggaaacuaauaaaau

SEQ ID NO: 3195664 - RNA, 19 nt, Human
uuuggaaacuaauaaaaua

SEQ ID NO: 3195665 - RNA, 20 nt, Human
uuuggaaacuaauaaaauau

SEQ ID NO: 3195666 - RNA, 21 nt, Human
uuuggaaacuaauaaaauauu

SEQ ID NO: 3195667 - RNA, 16 nt, Human
uuuggaaaguagaaaa

SEQ ID NO: 3195668 - RNA, 16 nt, Human
uuuggaaagacuggac

SEQ ID NO: 3195669 - RNA, 15 nt, Human
uuuccaauaugugau

SEQ ID NO: 3195670 - RNA, 14 nt, Human
uuuccaauauguga

SEQ ID NO: 3195671 - RNA, 17 nt, Human
uuuccaauucuccuuua

SEQ ID NO: 3195672 - RNA, 15 nt, Human
uuuccaauucuccuu

SEQ ID NO: 3195673 - RNA, 14 nt, Human
uuuccaauucuccu

SEQ ID NO: 3195674 - RNA, 17 nt, Human
uuuccaauaugugauuu

SEQ ID NO: 3195675 - RNA, 13 nt, Human
uuucccuuugcca

SEQ ID NO: 3195676 - RNA, 17 nt, Human
uuuccgccacaucccuc

SEQ ID NO: 3195677 - RNA, 21 nt, Human
uuucccuuuagcuguguuauu

SEQ ID NO: 3195678 - RNA, 19 nt, Human
uuucccuuuagcuguguua

SEQ ID NO: 3195679 - RNA, 18 nt, Human
uuucccuuuagcuguguu

SEQ ID NO: 3195680 - RNA, 13 nt, Human
uuugagugccuua

SEQ ID NO: 3195681 - RNA, 21 nt, Human
uuugagugccuuacacaaugg

SEQ ID NO: 3195682 - RNA, 23 nt, Human
uuuccguuugauuugucacugcu

SEQ ID NO: 3195683 - RNA, 16 nt, Human
uuugcacucaaaucuu

SEQ ID NO: 3195684 - RNA, 21 nt, Human
uuugcacucaaaucuuaagaa

SEQ ID NO: 3195685 - RNA, 19 nt, Human
uuugcacucaaaucuuaag

SEQ ID NO: 3195686 - RNA, 23 nt, Human
uuugcacucuuguuucucccgug

SEQ ID NO: 3195687 - RNA, 15 nt, Human
uuugcacucuuguuu

SEQ ID NO: 3195688 - RNA, 17 nt, Human
uuuugaacucuucucau

SEQ ID NO: 3195689 - RNA, 19 nt, Human
uuuugaagugagaaaauga

SEQ ID NO: 3195690 - RNA, 18 nt, Human
uuuugaagugagaaaaug

SEQ ID NO: 3195691 - RNA, 15 nt, Human
uuuugacauggaaau

SEQ ID NO: 3195692 - RNA, 15 nt, Human
uuuugaccuuugaua

SEQ ID NO: 3195693 - RNA, 17 nt, Human
uuuuuaacuuuaccaug

SEQ ID NO: 3195694 - RNA, 21 nt, Human
uuuuuaacuuuaccaugcuca

SEQ ID NO: 3195695 - RNA, 17 nt, Human
uuuuuaaucaugaauau

SEQ ID NO: 3195696 - RNA, 16 nt, Human
uuuuuaagugaaauuu

SEQ ID NO: 3195697 - RNA, 17 nt, Human
uuuuuaaccucuguuca

SEQ ID NO: 3195698 - RNA, 21 nt, Human
uuuuuaaugcuaaucuuguga

SEQ ID NO: 3195699 - RNA, 22 nt, Human
uuuuuaaucuacugcauuuagg

SEQ ID NO: 3195700 - RNA, 20 nt, Human
uuuuuaaugcuaaucuugug

SEQ ID NO: 3195701 - RNA, 13 nt, Human
uuuuuaaugauau

SEQ ID NO: 3195702 - RNA, 18 nt, Human
uuuuucauuuuaaaaagu

SEQ ID NO: 3195703 - RNA, 12 nt, Human
uuuuucauauuu

SEQ ID NO: 3195704 - RNA, 16 nt, Human
uuuuucaguucaaagu

SEQ ID NO: 3195705 - RNA, 14 nt, Human
uuuuucaguucaaa

SEQ ID NO: 3195706 - RNA, 13 nt, Human
uuuuucaguucaa

SEQ ID NO: 3195707 - RNA, 23 nt, Human
uuuuucccaggcaaauaaaauuc

SEQ ID NO: 3195708 - RNA, 16 nt, Human
uuuuucccauuuagaa

SEQ ID NO: 3195709 - RNA, 15 nt, Human
uuuuucccauuuaga

SEQ ID NO: 3195710 - RNA, 18 nt, Human
uuuuuuaaucuacugcau

SEQ ID NO: 3195711 - RNA, 12 nt, Human
uuuuuuaaucua

SEQ ID NO: 3195712 - RNA, 13 nt, Human
uuuuuuacaaagg

SEQ ID NO: 3195713 - RNA, 14 nt, Human
uuuuuuuguacgac

SEQ ID NO: 3195714 - RNA, 11 nt, Human
uuuuuuuccuu

SEQ ID NO: 3195715 - RNA, 14 nt, Human
uuuuuuugaaacuu

SEQ ID NO: 3195716 - RNA, 12 nt, Human
uuuuuuuccuua

SEQ ID NO: 3195717 - RNA, 12 nt, Human
uuuuuuucuacc

SEQ ID NO: 3195718 - RNA, 12 nt, Human
uuuuuuuaagug

SEQ ID NO: 3195719 - RNA, 20 nt, Human
uuuuuuccuuacauaaacau

SEQ ID NO: 3195720 - RNA, 14 nt, Human
uuuuuuccuuacau

SEQ ID NO: 3195721 - RNA, 13 nt, Human
uuuuuuccacuua

SEQ ID NO: 3195722 - RNA, 12 nt, Human
uuuuuuccuguu

SEQ ID NO: 3195723 - RNA, 13 nt, Human
uuuuuuguuuguu

SEQ ID NO: 3195724 - RNA, 13 nt, Human
uuuuuuuucccau

SEQ ID NO: 3195725 - RNA, 14 nt, Human
cauuccagaggaag

SEQ ID NO: 3195726 - RNA, 16 nt, Human
cauuccagucaggcuc

SEQ ID NO: 3195727 - RNA, 17 nt, Human
cauuccaggcccgaagc

SEQ ID NO: 3195728 - RNA, 12 nt, Human
cauuccaggccc

SEQ ID NO: 3195729 - RNA, 15 nt, Human
cauuccccaggaggc

SEQ ID NO: 3195730 - RNA, 17 nt, Human
cauuccccaggaggcca

SEQ ID NO: 3195731 - RNA, 13 nt, Human
cauuccccaggag

SEQ ID NO: 3195732 - RNA, 17 nt, Human
cauuccccgucucuggu

SEQ ID NO: 3195733 - RNA, 18 nt, Human
cauucccucgucuuuccc

SEQ ID NO: 3195734 - RNA, 19 nt, Human
cauucccucgucuuuccca

SEQ ID NO: 3195735 - RNA, 18 nt, Human
cauuccccaggaggccag

SEQ ID NO: 3195736 - RNA, 19 nt, Human
cauuccccaggaggccagc

SEQ ID NO: 3195737 - RNA, 20 nt, Human
cauuccccaggaggccagcc

SEQ ID NO: 3195738 - RNA, 13 nt, Human
cauuccccauggg

SEQ ID NO: 3195739 - RNA, 19 nt, Human
cauucauauuacaauauuu

SEQ ID NO: 3195740 - RNA, 13 nt, Human
cauuccagaggaa

SEQ ID NO: 3195741 - RNA, 22 nt, Human
cauuccaccuucccaugcccug

SEQ ID NO: 3195742 - RNA, 17 nt, Human
cauuccaccuucccaug

SEQ ID NO: 3195743 - RNA, 18 nt, Human
cauucauauuacaauauu

SEQ ID NO: 3195744 - RNA, 17 nt, Human
cauucauauuacaauau

SEQ ID NO: 3195745 - RNA, 15 nt, Human
cauucauacuuaaaa

SEQ ID NO: 3195746 - RNA, 18 nt, Human
cauucauacuuaaaaauu

SEQ ID NO: 3195747 - RNA, 22 nt, Human
cauucauacuuaaaaauuuauu

SEQ ID NO: 3195748 - RNA, 11 nt, Human
cauuaccaaaa

SEQ ID NO: 3195749 - RNA, 20 nt, Human
cauuaccaaaauaauaaaaa

SEQ ID NO: 3195750 - RNA, 23 nt, Human
cauuaccaaaauaauaaaaauca

SEQ ID NO: 3195751 - RNA, 21 nt, Human
cauuacaagccuggaaaaaaa

SEQ ID NO: 3195752 - RNA, 20 nt, Human
cauuacaagccuggaaaaaa

SEQ ID NO: 3195753 - RNA, 12 nt, Human
cauuaauuuaaa

SEQ ID NO: 3195754 - RNA, 14 nt, Human
cauuaauuuaaaug

SEQ ID NO: 3195755 - RNA, 18 nt, Human
cauuaauuuaaaugauuu

SEQ ID NO: 3195756 - RNA, 22 nt, Human
cauuacaacugaccaaguuucu

SEQ ID NO: 3195757 - RNA, 18 nt, Human
cauuaaaauaugcacuaa

SEQ ID NO: 3195758 - RNA, 16 nt, Human
cauuaaaauaugcacu

SEQ ID NO: 3195759 - RNA, 13 nt, Human
cauuaacugcuuc

SEQ ID NO: 3195760 - RNA, 15 nt, Human
cauuaacugcuuccu

SEQ ID NO: 3195761 - RNA, 17 nt, Human
cauuaaggccacaucca

SEQ ID NO: 3195762 - RNA, 20 nt, Human
cauuacuguuuaagacacuu

SEQ ID NO: 3195763 - RNA, 18 nt, Human
cauuagaauuaccauuug

SEQ ID NO: 3195764 - RNA, 17 nt, Human
cauuacuuguugccuau

SEQ ID NO: 3195765 - RNA, 18 nt, Human
cauuacuuguugccuaua

SEQ ID NO: 3195766 - RNA, 13 nt, Human
cauucaaaaauuu

SEQ ID NO: 3195767 - RNA, 14 nt, Human
cauucaaaaauuuc

SEQ ID NO: 3195768 - RNA, 15 nt, Human
cauucacauuuagaa

SEQ ID NO: 3195769 - RNA, 23 nt, Human
cauucuucuguacgucugacagg

SEQ ID NO: 3195770 - RNA, 22 nt, Human
cauucuucugaucacugaaaua

SEQ ID NO: 3195771 - RNA, 19 nt, Human
cauucuucugaucacugaa

SEQ ID NO: 3195772 - RNA, 13 nt, Human
cauucuucugauc

SEQ ID NO: 3195773 - RNA, 20 nt, Human
cauucuggggaaacaacauu

SEQ ID NO: 3195774 - RNA, 11 nt, Human
cauucuguccu

SEQ ID NO: 3195775 - RNA, 21 nt, Human
cauucuucccaacuugccuuu

SEQ ID NO: 3195776 - RNA, 20 nt, Human
cauucugccugcccaggccc

SEQ ID NO: 3195777 - RNA, 19 nt, Human
cauucugccugcccaggcc

SEQ ID NO: 3195778 - RNA, 18 nt, Human
cauucugccugcccaggc

SEQ ID NO: 3195779 - RNA, 17 nt, Human
cauucugccugcccagg

SEQ ID NO: 3195780 - RNA, 16 nt, Human
cauucugccugcccag

SEQ ID NO: 3195781 - RNA, 15 nt, Human
cauucugccugccca

SEQ ID NO: 3195782 - RNA, 13 nt, Human
cauucugccugcc

SEQ ID NO: 3195783 - RNA, 12 nt, Human
cauucugccugc

SEQ ID NO: 3195784 - RNA, 14 nt, Human
cauuccugaugcuu

SEQ ID NO: 3195785 - RNA, 16 nt, Human
cauuccugaugcuucu

SEQ ID NO: 3195786 - RNA, 19 nt, Human
cauuccugaugcuucuuca

SEQ ID NO: 3195787 - RNA, 22 nt, Human
cauuccugaugcuucuucagag

SEQ ID NO: 3195788 - RNA, 23 nt, Human
cauuccugaugcuucuucagaga

SEQ ID NO: 3195789 - RNA, 15 nt, Human
cauucugacucauau

SEQ ID NO: 3195790 - RNA, 12 nt, Human
cauucugaauua

SEQ ID NO: 3195791 - RNA, 15 nt, Human
cauucugaauuaauu

SEQ ID NO: 3195792 - RNA, 20 nt, Human
cauucugaauuaauuaauuu

SEQ ID NO: 3195793 - RNA, 21 nt, Human
cauucugaauuaauuaauuug

SEQ ID NO: 3195794 - RNA, 23 nt, Human
cauucugaauuaauuaauuugga

SEQ ID NO: 3195795 - RNA, 17 nt, Human
ccaaaccaccagaagcc

SEQ ID NO: 3195796 - RNA, 22 nt, Human
ccaaacauuaauguugauuucu

SEQ ID NO: 3195797 - RNA, 21 nt, Human
ccaaacauuaauguugauuuc

SEQ ID NO: 3195798 - RNA, 18 nt, Human
ccaaacauuaauguugau

SEQ ID NO: 3195799 - RNA, 14 nt, Human
ccaaacacaggcaa

SEQ ID NO: 3195800 - RNA, 13 nt, Human
ccaaacacaggca

SEQ ID NO: 3195801 - RNA, 18 nt, Human
ccaaacacacagaagggg

SEQ ID NO: 3195802 - RNA, 15 nt, Human
ccaaacauuaauguu

SEQ ID NO: 3195803 - RNA, 15 nt, Human
ccaaaauuuuaaaaa

SEQ ID NO: 3195804 - RNA, 13 nt, Human
ccaaacacacaga

SEQ ID NO: 3195805 - RNA, 17 nt, Human
ccaaacacacagaaggg

SEQ ID NO: 3195806 - RNA, 15 nt, Human
ccaaacacacagaag

SEQ ID NO: 3195807 - RNA, 14 nt, Human
ccaaaauuaaggug

SEQ ID NO: 3195808 - RNA, 15 nt, Human
ccaaaauuaaggugu

SEQ ID NO: 3195809 - RNA, 17 nt, Human
cauuuuuaguagagaca

SEQ ID NO: 3195810 - RNA, 20 nt, Human
ccaaaaugugagugguugaa

SEQ ID NO: 3195811 - RNA, 16 nt, Human
cauuuuuagccugugu

SEQ ID NO: 3195812 - RNA, 14 nt, Human
cauuuuuacaaguu

SEQ ID NO: 3195813 - RNA, 12 nt, Human
cauuuucucuuu

SEQ ID NO: 3195814 - RNA, 16 nt, Human
cauuuucucuuagaaa

SEQ ID NO: 3195815 - RNA, 15 nt, Human
cauuuucucuuagaa

SEQ ID NO: 3195816 - RNA, 14 nt, Human
cauuuucucuuaga

SEQ ID NO: 3195817 - RNA, 12 nt, Human
cauuuucucuua

SEQ ID NO: 3195818 - RNA, 15 nt, Human
cauuuucauuagcaa

SEQ ID NO: 3195819 - RNA, 21 nt, Human
cauuuucagauucaggcauuu

SEQ ID NO: 3195820 - RNA, 19 nt, Human
cauuuucagauucaggcau

SEQ ID NO: 3195821 - RNA, 17 nt, Human
cauuuucauuagcaaaa

SEQ ID NO: 3195822 - RNA, 19 nt, Human
cauuuuacaguuacuuuuc

SEQ ID NO: 3195823 - RNA, 20 nt, Human
cauuuuacagagaaagaaau

SEQ ID NO: 3195824 - RNA, 22 nt, Human
cauuuuacaguuacuuuuccuu

SEQ ID NO: 3195825 - RNA, 22 nt, Human
cauuuuaccaucacacauguuc

SEQ ID NO: 3195826 - RNA, 13 nt, Human
cauuugcugaaua

SEQ ID NO: 3195827 - RNA, 15 nt, Human
cauuugcuuuggaag

SEQ ID NO: 3195828 - RNA, 14 nt, Human
cauuugcuuuggaa

SEQ ID NO: 3195829 - RNA, 13 nt, Human
cauuugauuugua

SEQ ID NO: 3195830 - RNA, 18 nt, Human
cauuucuuuuuaaaaaaa

SEQ ID NO: 3195831 - RNA, 13 nt, Human
cauugugggaagg

SEQ ID NO: 3195832 - RNA, 15 nt, Human
cauugugggaagggg

SEQ ID NO: 3195833 - RNA, 21 nt, Human
cauuguaaaugugcuuuuaaa

SEQ ID NO: 3195834 - RNA, 21 nt, Human
cauuguaagcguauggcuuua

SEQ ID NO: 3195835 - RNA, 13 nt, Human
cauuguaauguug

SEQ ID NO: 3195836 - RNA, 23 nt, Human
cauuguaauguugugaauaauua

SEQ ID NO: 3195837 - RNA, 19 nt, Human
cauuguaauguugugaaua

SEQ ID NO: 3195838 - RNA, 14 nt, Human
cauuguaauguugu

SEQ ID NO: 3195839 - RNA, 15 nt, Human
cauuuaaaaaaaauc

SEQ ID NO: 3195840 - RNA, 17 nt, Human
cauuguuuuucugauau

SEQ ID NO: 3195841 - RNA, 17 nt, Human
cauuuaaauuuuuuggc

SEQ ID NO: 3195842 - RNA, 18 nt, Human
cauuuaaauuuuuuggca

SEQ ID NO: 3195843 - RNA, 12 nt, Human
cauuuaaauuuu

SEQ ID NO: 3195844 - RNA, 22 nt, Human
cauuuaaaaagguuuaaaacua

SEQ ID NO: 3195845 - RNA, 12 nt, Human
cauuuaaaacau

SEQ ID NO: 3195846 - RNA, 19 nt, Human
cauuuaaaacauuaaaaua

SEQ ID NO: 3195847 - RNA, 18 nt, Human
cauuuaagaauugccagu

SEQ ID NO: 3195848 - RNA, 15 nt, Human
cauugaccugaggcc

SEQ ID NO: 3195849 - RNA, 17 nt, Human
cauugaccugaggcccu

SEQ ID NO: 3195850 - RNA, 14 nt, Human
cauugaccugaggc

SEQ ID NO: 3195851 - RNA, 18 nt, Human
cauugaccugaggcccuu

SEQ ID NO: 3195852 - RNA, 20 nt, Human
cauugauacaaucauagcau

SEQ ID NO: 3195853 - RNA, 17 nt, Human
cauugaaaaauguccac

SEQ ID NO: 3195854 - RNA, 17 nt, Human
cauucuuuuugcucuaa

SEQ ID NO: 3195855 - RNA, 23 nt, Human
cauucuuuuugcucuaaaauauu

SEQ ID NO: 3195856 - RNA, 19 nt, Human
cauucuuuuugcucuaaaa

SEQ ID NO: 3195857 - RNA, 15 nt, Human
cauugaacucugaga

SEQ ID NO: 3195858 - RNA, 22 nt, Human
cauuuacugcauucuucugauc

SEQ ID NO: 3195859 - RNA, 20 nt, Human
cauuuacugcauucuucuga

SEQ ID NO: 3195860 - RNA, 22 nt, Human
cauuuaauggggaggacaaaau

SEQ ID NO: 3195861 - RNA, 18 nt, Human
cauguuuuucuucucccu

SEQ ID NO: 3195862 - RNA, 20 nt, Human
cauguuuuucuucucccuca

SEQ ID NO: 3195863 - RNA, 19 nt, Human
cauguuuuucuucucccuc

SEQ ID NO: 3195864 - RNA, 23 nt, Human
cauguuugauguaucugagcagg

SEQ ID NO: 3195865 - RNA, 20 nt, Human
cauguuucuuugaucaugaa

SEQ ID NO: 3195866 - RNA, 11 nt, Human
cauguuucuuu

SEQ ID NO: 3195867 - RNA, 22 nt, Human
cauguuucuuugaucaugaaua

SEQ ID NO: 3195868 - RNA, 17 nt, Human
cauuaaaagaaaauaaa

SEQ ID NO: 3195869 - RNA, 14 nt, Human
cauuaaaagaaaau

SEQ ID NO: 3195870 - RNA, 13 nt, Human
cauuaaaagaaaa

SEQ ID NO: 3195871 - RNA, 12 nt, Human
cauuaaaagaaa

SEQ ID NO: 3195872 - RNA, 20 nt, Human
cauuaaaagaaaauaaaaaa

SEQ ID NO: 3195873 - RNA, 14 nt, Human
cauuaaaauauaau

SEQ ID NO: 3195874 - RNA, 11 nt, Human
cauuaaaauau

SEQ ID NO: 3195875 - RNA, 15 nt, Human
caugucuuauuuaaa

SEQ ID NO: 3195876 - RNA, 14 nt, Human
caugucuuauuuaa

SEQ ID NO: 3195877 - RNA, 12 nt, Human
caugucuggcua

SEQ ID NO: 3195878 - RNA, 14 nt, Human
caugucucgacuca

SEQ ID NO: 3195879 - RNA, 21 nt, Human
caugugaugagaggaaaucac

SEQ ID NO: 3195880 - RNA, 17 nt, Human
caugugaucucauuguu

SEQ ID NO: 3195881 - RNA, 18 nt, Human
caugugaugagaggaaau

SEQ ID NO: 3195882 - RNA, 20 nt, Human
caugugaugagaggaaauca

SEQ ID NO: 3195883 - RNA, 16 nt, Human
caugugaugagaggaa

SEQ ID NO: 3195884 - RNA, 17 nt, Human
caugugaugagaggaaa

SEQ ID NO: 3195885 - RNA, 15 nt, Human
caugugaugagagga

SEQ ID NO: 3195886 - RNA, 20 nt, Human
caugugagcugcugccauga

SEQ ID NO: 3195887 - RNA, 18 nt, Human
caugugagcugcugccau

SEQ ID NO: 3195888 - RNA, 14 nt, Human
caugugcacaugca

SEQ ID NO: 3195889 - RNA, 22 nt, Human
caugugccagguuuuuggucug

SEQ ID NO: 3195890 - RNA, 21 nt, Human
caugugcaaacccacucagag

SEQ ID NO: 3195891 - RNA, 18 nt, Human
caugugaucucauuguuc

SEQ ID NO: 3195892 - RNA, 18 nt, Human
cauguguuggcagccucu

SEQ ID NO: 3195893 - RNA, 15 nt, Human
cauguguuaaucuua

SEQ ID NO: 3195894 - RNA, 16 nt, Human
caugguuugacucugg

SEQ ID NO: 3195895 - RNA, 22 nt, Human
caugguuuaaaagaaaaaauga

SEQ ID NO: 3195896 - RNA, 22 nt, Human
cauggugguugggacccagugg

SEQ ID NO: 3195897 - RNA, 19 nt, Human
cauggugguugggacccag

SEQ ID NO: 3195898 - RNA, 23 nt, Human
caugguggggucuccucaggacc

SEQ ID NO: 3195899 - RNA, 21 nt, Human
caugguggggucuccucagga

SEQ ID NO: 3195900 - RNA, 15 nt, Human
caugguggggucucc

SEQ ID NO: 3195901 - RNA, 20 nt, Human
caugguggggucuccucagg

SEQ ID NO: 3195902 - RNA, 18 nt, Human
caugguggggucuccuca

SEQ ID NO: 3195903 - RNA, 14 nt, Human
cauguaaaagccua

SEQ ID NO: 3195904 - RNA, 20 nt, Human
caugucuccuacugaggaua

SEQ ID NO: 3195905 - RNA, 18 nt, Human
caugucuccuacugagga

SEQ ID NO: 3195906 - RNA, 16 nt, Human
caugucuccuacugag

SEQ ID NO: 3195907 - RNA, 13 nt, Human
caugucuauuguc

SEQ ID NO: 3195908 - RNA, 14 nt, Human
caugucuauugucc

SEQ ID NO: 3195909 - RNA, 14 nt, Human
cauguacuaucuua

SEQ ID NO: 3195910 - RNA, 21 nt, Human
cauguacuaucuuaucucaga

SEQ ID NO: 3195911 - RNA, 15 nt, Human
cauguacuaucuuau

SEQ ID NO: 3195912 - RNA, 15 nt, Human
cauggcagcccucgg

SEQ ID NO: 3195913 - RNA, 23 nt, Human
caugggacagggaggacgcucuc

SEQ ID NO: 3195914 - RNA, 12 nt, Human
caugggagggag

SEQ ID NO: 3195915 - RNA, 14 nt, Human
caugggagggagcu

SEQ ID NO: 3195916 - RNA, 20 nt, Human
caugggagggagcugagaag

SEQ ID NO: 3195917 - RNA, 18 nt, Human
caugggccuccugugugu

SEQ ID NO: 3195918 - RNA, 14 nt, Human
caugggccaccacg

SEQ ID NO: 3195919 - RNA, 14 nt, Human
caugggcaggagac

SEQ ID NO: 3195920 - RNA, 15 nt, Human
caugggucgcccaug

SEQ ID NO: 3195921 - RNA, 17 nt, Human
caugggucgcccaugag

SEQ ID NO: 3195922 - RNA, 19 nt, Human
caugggucgcccaugagag

SEQ ID NO: 3195923 - RNA, 21 nt, Human
caugggucgcccaugagagcg

SEQ ID NO: 3195924 - RNA, 18 nt, Human
cauggaaaugaagcaggg

SEQ ID NO: 3195925 - RNA, 14 nt, Human
caugagguaucuaa

SEQ ID NO: 3195926 - RNA, 15 nt, Human
cauggaaaaaugcca

SEQ ID NO: 3195927 - RNA, 16 nt, Human
cauggaaaaaugccau

SEQ ID NO: 3195928 - RNA, 21 nt, Human
cauggaaaaaugccaucaaau

SEQ ID NO: 3195929 - RNA, 22 nt, Human
cauggaaaaaugccaucaaaug

SEQ ID NO: 3195930 - RNA, 17 nt, Human
caugcuuugugaacaag

SEQ ID NO: 3195931 - RNA, 17 nt, Human
caugcuuuccauauuuu

SEQ ID NO: 3195932 - RNA, 16 nt, Human
caugcuuuccauauuu

SEQ ID NO: 3195933 - RNA, 19 nt, Human
caugcuuguguuucuuagu

SEQ ID NO: 3195934 - RNA, 18 nt, Human
caugcuuguguuucuuag

SEQ ID NO: 3195935 - RNA, 15 nt, Human
cauggacuuccacug

SEQ ID NO: 3195936 - RNA, 15 nt, Human
cauggacauuuagaa

SEQ ID NO: 3195937 - RNA, 18 nt, Human
cauggacauuuagaagaa

SEQ ID NO: 3195938 - RNA, 20 nt, Human
cauggacauuuagaagaaag

SEQ ID NO: 3195939 - RNA, 20 nt, Human
cauggaccaugcugucuggc

SEQ ID NO: 3195940 - RNA, 14 nt, Human
cauggaccaugcug

SEQ ID NO: 3195941 - RNA, 13 nt, Human
cauggaccaugcu

SEQ ID NO: 3195942 - RNA, 13 nt, Human
caugcugucccuu

SEQ ID NO: 3195943 - RNA, 15 nt, Human
caugcugucccuuac

SEQ ID NO: 3195944 - RNA, 12 nt, Human
caugcuguguaa

SEQ ID NO: 3195945 - RNA, 13 nt, Human
caugcuguguaag

SEQ ID NO: 3195946 - RNA, 18 nt, Human
caugcuguguaagcugug

SEQ ID NO: 3195947 - RNA, 19 nt, Human
caugcuguguaagcugugu

SEQ ID NO: 3195948 - RNA, 19 nt, Human
caugcagccacuuaggaca

SEQ ID NO: 3195949 - RNA, 14 nt, Human
caugcagcaucuaa

SEQ ID NO: 3195950 - RNA, 17 nt, Human
caugcagaguauuucua

SEQ ID NO: 3195951 - RNA, 19 nt, Human
caucauguuuacagaggac

SEQ ID NO: 3195952 - RNA, 21 nt, Human
caucauguuuacagaggacag

SEQ ID NO: 3195953 - RNA, 13 nt, Human
caucauguuuaca

SEQ ID NO: 3195954 - RNA, 14 nt, Human
caucaugucuauug

SEQ ID NO: 3195955 - RNA, 15 nt, Human
caucaugucuauugu

SEQ ID NO: 3195956 - RNA, 15 nt, Human
caucaugucuggcua

SEQ ID NO: 3195957 - RNA, 14 nt, Human
caucaugucuggcu

SEQ ID NO: 3195958 - RNA, 13 nt, Human
caucaugucuggc

SEQ ID NO: 3195959 - RNA, 21 nt, Human
caucauggggggagcacccug

SEQ ID NO: 3195960 - RNA, 16 nt, Human
caucauccuaagcuau

SEQ ID NO: 3195961 - RNA, 19 nt, Human
caucaucuguaagcuguuu

SEQ ID NO: 3195962 - RNA, 13 nt, Human
caucaucuguaag

SEQ ID NO: 3195963 - RNA, 13 nt, Human
caucauagaaacu

SEQ ID NO: 3195964 - RNA, 16 nt, Human
caucauauuauacaga

SEQ ID NO: 3195965 - RNA, 14 nt, Human
caucauauuauaca

SEQ ID NO: 3195966 - RNA, 15 nt, Human
caucaguacuuguuu

SEQ ID NO: 3195967 - RNA, 23 nt, Human
caucagguuaggcaguauaaaga

SEQ ID NO: 3195968 - RNA, 15 nt, Human
caucaggugaggugu

SEQ ID NO: 3195969 - RNA, 12 nt, Human
caucagugccaa

SEQ ID NO: 3195970 - RNA, 20 nt, Human
caucaccaacgucugugcca

SEQ ID NO: 3195971 - RNA, 12 nt, Human
caucacccgcua

SEQ ID NO: 3195972 - RNA, 17 nt, Human
cauccagguucagcuug

SEQ ID NO: 3195973 - RNA, 22 nt, Human
caucauuccuuuuuauuuauau

SEQ ID NO: 3195974 - RNA, 12 nt, Human
cauccauccagg

SEQ ID NO: 3195975 - RNA, 12 nt, Human
caucauuauuau

SEQ ID NO: 3195976 - RNA, 15 nt, Human
caucauuccaggccc

SEQ ID NO: 3195977 - RNA, 19 nt, Human
caucauuccuuuuuauuua

SEQ ID NO: 3195978 - RNA, 20 nt, Human
caucauuccuuuuuauuuau

SEQ ID NO: 3195979 - RNA, 15 nt, Human
caucauuccuuuuua

SEQ ID NO: 3195980 - RNA, 23 nt, Human
cauccacugugccaugugccagg

SEQ ID NO: 3195981 - RNA, 17 nt, Human
cauccacugugccaugu

SEQ ID NO: 3195982 - RNA, 14 nt, Human
cauccacugugcca

SEQ ID NO: 3195983 - RNA, 22 nt, Human
caucccugaaggccccgcccag

SEQ ID NO: 3195984 - RNA, 14 nt, Human
caucccuccuuaag

SEQ ID NO: 3195985 - RNA, 16 nt, Human
caucccuccuuaagag

SEQ ID NO: 3195986 - RNA, 20 nt, Human
cauccgaccagguugucacu

SEQ ID NO: 3195987 - RNA, 16 nt, Human
cauccgaccagguugu

SEQ ID NO: 3195988 - RNA, 16 nt, Human
caucccuucucuucca

SEQ ID NO: 3195989 - RNA, 15 nt, Human
caucccuucucuucc

SEQ ID NO: 3195990 - RNA, 23 nt, Human
caucccuucucuuccaggcagcc

SEQ ID NO: 3195991 - RNA, 22 nt, Human
caucccuucucuuccaggcagc

SEQ ID NO: 3195992 - RNA, 18 nt, Human
caucccuucucuuccagg

SEQ ID NO: 3195993 - RNA, 23 nt, Human
cauauuuggaauaaaaauuccag

SEQ ID NO: 3195994 - RNA, 23 nt, Human
cauauuuguacuuucuguuaaaa

SEQ ID NO: 3195995 - RNA, 21 nt, Human
cauauuuguacuuucuguuaa

SEQ ID NO: 3195996 - RNA, 20 nt, Human
cauauuuguacuuucuguua

SEQ ID NO: 3195997 - RNA, 18 nt, Human
cauauuuguacuuucugu

SEQ ID NO: 3195998 - RNA, 14 nt, Human
cauauuuguacuuu

SEQ ID NO: 3195999 - RNA, 18 nt, Human
cauauucuguuggccagu

SEQ ID NO: 3196000 - RNA, 12 nt, Human
cauauugacuuu

SEQ ID NO: 3196001 - RNA, 13 nt, Human
cauauugacuuuu

SEQ ID NO: 3196002 - RNA, 22 nt, Human
cauauucuguuggccaguguga

SEQ ID NO: 3196003 - RNA, 19 nt, Human
cauaugacaaauguuucua

SEQ ID NO: 3196004 - RNA, 17 nt, Human
cauaugacaaauguuuc

SEQ ID NO: 3196005 - RNA, 14 nt, Human
cauaugaacuuuca

SEQ ID NO: 3196006 - RNA, 14 nt, Human
cauaugacaaaugu

SEQ ID NO: 3196007 - RNA, 20 nt, Human
cauauugguauauccuuuuc

SEQ ID NO: 3196008 - RNA, 16 nt, Human
cagugcugaucuaaaa

SEQ ID NO: 3196009 - RNA, 18 nt, Human
cagugcugggauuacagg

SEQ ID NO: 3196010 - RNA, 14 nt, Human
cagugcuuagcaaa

SEQ ID NO: 3196011 - RNA, 16 nt, Human
cagugcuuagcaaaaa

SEQ ID NO: 3196012 - RNA, 24 nt, Human
cagugcuuagcaaaaaauaaugac

SEQ ID NO: 3196013 - RNA, 15 nt, Human
cauaguaugguggcu

SEQ ID NO: 3196014 - RNA, 20 nt, Human
cauaguaaauguaguucaua

SEQ ID NO: 3196015 - RNA, 19 nt, Human
cauaguaaauguaguucau

SEQ ID NO: 3196016 - RNA, 15 nt, Human
cauaguaaauguagu

SEQ ID NO: 3196017 - RNA, 16 nt, Human
cauaguaugguggcug

SEQ ID NO: 3196018 - RNA, 20 nt, Human
cauaguagaacuuuauaaaa

SEQ ID NO: 3196019 - RNA, 23 nt, Human
cauauaagauucauauuuacuuc

SEQ ID NO: 3196020 - RNA, 17 nt, Human
cauauaagcccuugauu

SEQ ID NO: 3196021 - RNA, 20 nt, Human
cauagucugaagugaaguac

SEQ ID NO: 3196022 - RNA, 20 nt, Human
cauagugacuuuucaaguau

SEQ ID NO: 3196023 - RNA, 19 nt, Human
cauagugaugguuccccug

SEQ ID NO: 3196024 - RNA, 18 nt, Human
cauagugaugguuccccu

SEQ ID NO: 3196025 - RNA, 21 nt, Human
cauauaaauugucuuaaugga

SEQ ID NO: 3196026 - RNA, 23 nt, Human
cauauaacuuauauuguaagaaa

SEQ ID NO: 3196027 - RNA, 22 nt, Human
cauauaacuuauauuguaagaa

SEQ ID NO: 3196028 - RNA, 20 nt, Human
cauauaacuuauauuguaag

SEQ ID NO: 3196029 - RNA, 17 nt, Human
cauauaaauugucuuaa

SEQ ID NO: 3196030 - RNA, 21 nt, Human
cauauccuuuuagucugcaua

SEQ ID NO: 3196031 - RNA, 23 nt, Human
cauauauauguuuuaagaggcag

SEQ ID NO: 3196032 - RNA, 21 nt, Human
cauauauguguccauuuccuu

SEQ ID NO: 3196033 - RNA, 15 nt, Human
cauauagaaagcuuu

SEQ ID NO: 3196034 - RNA, 16 nt, Human
cauauagacacauaca

SEQ ID NO: 3196035 - RNA, 14 nt, Human
caucaacaucuugg

SEQ ID NO: 3196036 - RNA, 23 nt, Human
caucaacuaaaguuguacuuuaa

SEQ ID NO: 3196037 - RNA, 22 nt, Human
caucaacuaaaguuguacuuua

SEQ ID NO: 3196038 - RNA, 19 nt, Human
caucaacuaaaguuguacu

SEQ ID NO: 3196039 - RNA, 16 nt, Human
caucaacuaaaguugu

SEQ ID NO: 3196040 - RNA, 17 nt, Human
cauauuuuaaacagagg

SEQ ID NO: 3196041 - RNA, 16 nt, Human
cauauuuuaaacagag

SEQ ID NO: 3196042 - RNA, 17 nt, Human
caucugaccucuaccuu

SEQ ID NO: 3196043 - RNA, 15 nt, Human
caucucuccuccuuu

SEQ ID NO: 3196044 - RNA, 13 nt, Human
caucucugcucca

SEQ ID NO: 3196045 - RNA, 12 nt, Human
caucucugcucc

SEQ ID NO: 3196046 - RNA, 13 nt, Human
caucucugacuuu

SEQ ID NO: 3196047 - RNA, 14 nt, Human
caucucugacuuuc

SEQ ID NO: 3196048 - RNA, 17 nt, Human
caucucccuuuuccaug

SEQ ID NO: 3196049 - RNA, 16 nt, Human
caucucuacaaaaagc

SEQ ID NO: 3196050 - RNA, 16 nt, Human
caucuccuuagaaaag

SEQ ID NO: 3196051 - RNA, 17 nt, Human
cauccuacaagacacag

SEQ ID NO: 3196052 - RNA, 19 nt, Human
cauccuacaagacacagug

SEQ ID NO: 3196053 - RNA, 18 nt, Human
cauccuacaagacacagu

SEQ ID NO: 3196054 - RNA, 17 nt, Human
caucuugcucugcugac

SEQ ID NO: 3196055 - RNA, 16 nt, Human
caucuugcucugcuga

SEQ ID NO: 3196056 - RNA, 15 nt, Human
caucuugcucugcug

SEQ ID NO: 3196057 - RNA, 16 nt, Human
caucuugaauuguaag

SEQ ID NO: 3196058 - RNA, 21 nt, Human
caucuugaauuguaaggaaug

SEQ ID NO: 3196059 - RNA, 23 nt, Human
caugaggaacaaggcaaggcugu

SEQ ID NO: 3196060 - RNA, 16 nt, Human
caugagguacugagag

SEQ ID NO: 3196061 - RNA, 19 nt, Human
caugagggaagaauaaaga

SEQ ID NO: 3196062 - RNA, 15 nt, Human
caugagggaagaaua

SEQ ID NO: 3196063 - RNA, 16 nt, Human
caugaggaacaaggca

SEQ ID NO: 3196064 - RNA, 17 nt, Human
caugaggaacaaggcaa

SEQ ID NO: 3196065 - RNA, 20 nt, Human
caugaggaacaaggcaaggc

SEQ ID NO: 3196066 - RNA, 21 nt, Human
caugaggaacaaggcaaggcu

SEQ ID NO: 3196067 - RNA, 23 nt, Human
caugagccucagcauccuggcac

SEQ ID NO: 3196068 - RNA, 22 nt, Human
caugagccucagcauccuggca

SEQ ID NO: 3196069 - RNA, 19 nt, Human
caugaguuggcugggaaua

SEQ ID NO: 3196070 - RNA, 16 nt, Human
caugaguuaucaugaa

SEQ ID NO: 3196071 - RNA, 18 nt, Human
caugaguuaucaugaauu

SEQ ID NO: 3196072 - RNA, 19 nt, Human
caugaguuaucaugaauuu

SEQ ID NO: 3196073 - RNA, 23 nt, Human
caugaguuaucaugaauuuuaaa

SEQ ID NO: 3196074 - RNA, 14 nt, Human
caugauauaacuuu

SEQ ID NO: 3196075 - RNA, 15 nt, Human
caugauauaacuuua

SEQ ID NO: 3196076 - RNA, 18 nt, Human
caugauauaacuuuagaa

SEQ ID NO: 3196077 - RNA, 19 nt, Human
caugauauaacuuuagaaa

SEQ ID NO: 3196078 - RNA, 17 nt, Human
caugaucacuuaucagu

SEQ ID NO: 3196079 - RNA, 14 nt, Human
caugaugauaguug

SEQ ID NO: 3196080 - RNA, 19 nt, Human
caugaugauaguugaaugu

SEQ ID NO: 3196081 - RNA, 16 nt, Human
caugaugauuucagaa

SEQ ID NO: 3196082 - RNA, 19 nt, Human
caugagguacugagaguga

SEQ ID NO: 3196083 - RNA, 23 nt, Human
caugaguagugggcuaugcagga

SEQ ID NO: 3196084 - RNA, 15 nt, Human
caugagguucucucu

SEQ ID NO: 3196085 - RNA, 13 nt, Human
caugaguccccug

SEQ ID NO: 3196086 - RNA, 14 nt, Human
caugaguccccugu

SEQ ID NO: 3196087 - RNA, 15 nt, Human
caugaguccccuguu

SEQ ID NO: 3196088 - RNA, 23 nt, Human
caugaguccccuguuuguuucug

SEQ ID NO: 3196089 - RNA, 18 nt, Human
caugagauaauaugcaga

SEQ ID NO: 3196090 - RNA, 18 nt, Human
caugagagcgcagcccgc

SEQ ID NO: 3196091 - RNA, 13 nt, Human
caugagcaucagg

SEQ ID NO: 3196092 - RNA, 22 nt, Human
caugagaauguuuuagcacagc

SEQ ID NO: 3196093 - RNA, 18 nt, Human
caugaagauguagaggag

SEQ ID NO: 3196094 - RNA, 19 nt, Human
caugaagauguagaggaga

SEQ ID NO: 3196095 - RNA, 20 nt, Human
caugaagauaaacacagcug

SEQ ID NO: 3196096 - RNA, 23 nt, Human
caugacucguauaugucucaggu

SEQ ID NO: 3196097 - RNA, 18 nt, Human
caugacucuugacucuug

SEQ ID NO: 3196098 - RNA, 17 nt, Human
caugacucuuuauuguc

SEQ ID NO: 3196099 - RNA, 18 nt, Human
caugacucuuuauugucu

SEQ ID NO: 3196100 - RNA, 19 nt, Human
caugacucuuuauugucug

SEQ ID NO: 3196101 - RNA, 20 nt, Human
caugacucguauaugucuca

SEQ ID NO: 3196102 - RNA, 15 nt, Human
caugagcaucaggcc

SEQ ID NO: 3196103 - RNA, 16 nt, Human
caugagcaucaggcca

SEQ ID NO: 3196104 - RNA, 17 nt, Human
caugagcaucaggccag

SEQ ID NO: 3196105 - RNA, 18 nt, Human
caugagcaucaggccagg

SEQ ID NO: 3196106 - RNA, 20 nt, Human
caugagcaucaggccaggcc

SEQ ID NO: 3196107 - RNA, 21 nt, Human
caugagcaucaggccaggccc

SEQ ID NO: 3196108 - RNA, 22 nt, Human
caugagcaucaggccaggcccu

SEQ ID NO: 3196109 - RNA, 23 nt, Human
caugagcaucaggccaggcccuc

SEQ ID NO: 3196110 - RNA, 21 nt, Human
caugagccucagcauccuggc

SEQ ID NO: 3196111 - RNA, 20 nt, Human
caugagccucagcauccugg

SEQ ID NO: 3196112 - RNA, 19 nt, Human
caugagccucagcauccug

SEQ ID NO: 3196113 - RNA, 18 nt, Human
caugagccucagcauccu

SEQ ID NO: 3196114 - RNA, 17 nt, Human
caugagccucagcaucc

SEQ ID NO: 3196115 - RNA, 15 nt, Human
caugagccucagcau

SEQ ID NO: 3196116 - RNA, 12 nt, Human
caugagccucag

SEQ ID NO: 3196117 - RNA, 13 nt, Human
caugaaaugaaca

SEQ ID NO: 3196118 - RNA, 20 nt, Human
caugaaaugaacacaaauua

SEQ ID NO: 3196119 - RNA, 19 nt, Human
caugaaaugaacacaaauu

SEQ ID NO: 3196120 - RNA, 15 nt, Human
caugaaaugaacaca

SEQ ID NO: 3196121 - RNA, 21 nt, Human
caugaaaugcuaugucauuuc

SEQ ID NO: 3196122 - RNA, 19 nt, Human
caugaaaugcuaugucauu

SEQ ID NO: 3196123 - RNA, 15 nt, Human
caugaaaauagcaau

SEQ ID NO: 3196124 - RNA, 12 nt, Human
caugaaagaaaa

SEQ ID NO: 3196125 - RNA, 15 nt, Human
caugaaaaugugugu

SEQ ID NO: 3196126 - RNA, 16 nt, Human
caugaaaauguguguu

SEQ ID NO: 3196127 - RNA, 17 nt, Human
caugaaaauguguguuu

SEQ ID NO: 3196128 - RNA, 23 nt, Human
caucuuuuguuacucuugggaca

SEQ ID NO: 3196129 - RNA, 21 nt, Human
caucuuuuguuacucuuggga

SEQ ID NO: 3196130 - RNA, 12 nt, Human
caucuuuuauuc

SEQ ID NO: 3196131 - RNA, 15 nt, Human
caucuuuuauucuuu

SEQ ID NO: 3196132 - RNA, 17 nt, Human
caucuuuuauucuuuuu

SEQ ID NO: 3196133 - RNA, 17 nt, Human
caucuuuauugaaauuc

SEQ ID NO: 3196134 - RNA, 21 nt, Human
caucuuuauugaaauucuauu

SEQ ID NO: 3196135 - RNA, 12 nt, Human
caucuuugaugu

SEQ ID NO: 3196136 - RNA, 13 nt, Human
caucuuugaugug

SEQ ID NO: 3196137 - RNA, 14 nt, Human
caucuuugaugugu

SEQ ID NO: 3196138 - RNA, 18 nt, Human
caucuuugauguguuguu

SEQ ID NO: 3196139 - RNA, 15 nt, Human
caucuuugauguguu

SEQ ID NO: 3196140 - RNA, 16 nt, Human
caucuuugauguguug

SEQ ID NO: 3196141 - RNA, 19 nt, Human
ccaggagccccgaggccuu

SEQ ID NO: 3196142 - RNA, 16 nt, Human
ccaggagccccgaggc

SEQ ID NO: 3196143 - RNA, 20 nt, Human
ccaggagccccgaggccuuc

SEQ ID NO: 3196144 - RNA, 16 nt, Human
ccaggagagcuuaggg

SEQ ID NO: 3196145 - RNA, 21 nt, Human
ccaggagagcuuagggucuca

SEQ ID NO: 3196146 - RNA, 22 nt, Human
ccaggagagcuuagggucucag

SEQ ID NO: 3196147 - RNA, 23 nt, Human
ccaggagagcuuagggucucagg

SEQ ID NO: 3196148 - RNA, 19 nt, Human
ccaggagccuccugcccuu

SEQ ID NO: 3196149 - RNA, 16 nt, Human
ccaggagccugcccag

SEQ ID NO: 3196150 - RNA, 17 nt, Human
ccaggagccugcccagc

SEQ ID NO: 3196151 - RNA, 17 nt, Human
ccaggcauuccccagga

SEQ ID NO: 3196152 - RNA, 18 nt, Human
ccaggcauuccccaggag

SEQ ID NO: 3196153 - RNA, 19 nt, Human
ccaggcauuccccaggagg

SEQ ID NO: 3196154 - RNA, 21 nt, Human
ccaggcauuccccaggaggcc

SEQ ID NO: 3196155 - RNA, 19 nt, Human
ccaggccagggggccaguc

SEQ ID NO: 3196156 - RNA, 20 nt, Human
ccaggcccucugcccacucc

SEQ ID NO: 3196157 - RNA, 21 nt, Human
ccaggcccucugcccacuccc

SEQ ID NO: 3196158 - RNA, 22 nt, Human
ccaggcccucugcccacucccu

SEQ ID NO: 3196159 - RNA, 23 nt, Human
ccaggcccucugcccacucccug

SEQ ID NO: 3196160 - RNA, 19 nt, Human
ccaggcgccccuucccccu

SEQ ID NO: 3196161 - RNA, 16 nt, Human
ccaggccuacuccugu

SEQ ID NO: 3196162 - RNA, 18 nt, Human
ccaggcgccccuuccccc

SEQ ID NO: 3196163 - RNA, 17 nt, Human
ccaggcuuagucacuga

SEQ ID NO: 3196164 - RNA, 24 nt, Human
ccaggcuguaucccaugagccuca

SEQ ID NO: 3196165 - RNA, 23 nt, Human
ccaggcgcuagcacagcucccuu

SEQ ID NO: 3196166 - RNA, 16 nt, Human
ccaggcgcuagcacag

SEQ ID NO: 3196167 - RNA, 16 nt, Human
ccagccuccaugcugc

SEQ ID NO: 3196168 - RNA, 15 nt, Human
ccagccuccaugcug

SEQ ID NO: 3196169 - RNA, 22 nt, Human
ccagggacagaggggguggccu

SEQ ID NO: 3196170 - RNA, 20 nt, Human
ccaggcuuagucacugagac

SEQ ID NO: 3196171 - RNA, 14 nt, Human
ccagggacagaggg

SEQ ID NO: 3196172 - RNA, 15 nt, Human
ccagggacagagggg

SEQ ID NO: 3196173 - RNA, 21 nt, Human
ccagggacagaggggguggcc

SEQ ID NO: 3196174 - RNA, 19 nt, Human
ccaggugcacaagcuccaa

SEQ ID NO: 3196175 - RNA, 20 nt, Human
ccaggugcacaagcuccaag

SEQ ID NO: 3196176 - RNA, 18 nt, Human
ccaggugcacaagcucca

SEQ ID NO: 3196177 - RNA, 21 nt, Human
ccaggguuggcaccuuccccc

SEQ ID NO: 3196178 - RNA, 19 nt, Human
ccaggguuggcaccuuccc

SEQ ID NO: 3196179 - RNA, 21 nt, Human
ccagggcuggaaugauuucag

SEQ ID NO: 3196180 - RNA, 13 nt, Human
ccagggccagaag

SEQ ID NO: 3196181 - RNA, 18 nt, Human
ccagucuggaaugcagug

SEQ ID NO: 3196182 - RNA, 20 nt, Human
ccagucgucaucagaugcuu

SEQ ID NO: 3196183 - RNA, 13 nt, Human
ccagugaggcucu

SEQ ID NO: 3196184 - RNA, 20 nt, Human
ccagucuggaaugcaguggu

SEQ ID NO: 3196185 - RNA, 19 nt, Human
ccagucuggaaugcagugg

SEQ ID NO: 3196186 - RNA, 17 nt, Human
ccagguuuuuggucuga

SEQ ID NO: 3196187 - RNA, 24 nt, Human
ccaggugcacaagcuccaagcucc

SEQ ID NO: 3196188 - RNA, 15 nt, Human
ccagguucagcuugu

SEQ ID NO: 3196189 - RNA, 18 nt, Human
ccagguuccacagaggac

SEQ ID NO: 3196190 - RNA, 15 nt, Human
ccagguuccacagag

SEQ ID NO: 3196191 - RNA, 18 nt, Human
ccaguguccauggacuca

SEQ ID NO: 3196192 - RNA, 23 nt, Human
ccaguuacuuuccaauucuccuu

SEQ ID NO: 3196193 - RNA, 14 nt, Human
ccaguuauggcuau

SEQ ID NO: 3196194 - RNA, 15 nt, Human
ccauagcuguggugu

SEQ ID NO: 3196195 - RNA, 23 nt, Human
ccauauucuguuggccaguguga

SEQ ID NO: 3196196 - RNA, 21 nt, Human
ccauaguaugggacuggccuc

SEQ ID NO: 3196197 - RNA, 12 nt, Human
ccauaggucacc

SEQ ID NO: 3196198 - RNA, 12 nt, Human
ccauaggcccuu

SEQ ID NO: 3196199 - RNA, 14 nt, Human
ccauaggcccuuuc

SEQ ID NO: 3196200 - RNA, 20 nt, Human
ccagugccgagaaggaagcc

SEQ ID NO: 3196201 - RNA, 22 nt, Human
ccagugguuccuaauccucuag

SEQ ID NO: 3196202 - RNA, 14 nt, Human
ccagugaggcucug

SEQ ID NO: 3196203 - RNA, 15 nt, Human
ccagugaggcucugc

SEQ ID NO: 3196204 - RNA, 16 nt, Human
ccagugaggcucugcc

SEQ ID NO: 3196205 - RNA, 23 nt, Human
ccagugcccacaggaucagucug

SEQ ID NO: 3196206 - RNA, 19 nt, Human
cccaaaacaccggguucca

SEQ ID NO: 3196207 - RNA, 15 nt, Human
ccauuuguuaauauc

SEQ ID NO: 3196208 - RNA, 17 nt, Human
ccauuuguuaauaucac

SEQ ID NO: 3196209 - RNA, 14 nt, Human
ccauuuguguuuau

SEQ ID NO: 3196210 - RNA, 17 nt, Human
ccauuugggcagagagg

SEQ ID NO: 3196211 - RNA, 19 nt, Human
ccauucuccaccugccagg

SEQ ID NO: 3196212 - RNA, 20 nt, Human
ccauucuccaccugccaggg

SEQ ID NO: 3196213 - RNA, 22 nt, Human
ccauucuccagggguuuacagu

SEQ ID NO: 3196214 - RNA, 21 nt, Human
ccauuuggagggccugggccu

SEQ ID NO: 3196215 - RNA, 21 nt, Human
cccaaaacaccggguuccagc

SEQ ID NO: 3196216 - RNA, 16 nt, Human
cccaaaacucuccucu

SEQ ID NO: 3196217 - RNA, 18 nt, Human
cccaaaacucuccucugc

SEQ ID NO: 3196218 - RNA, 15 nt, Human
cccaaagugcuggga

SEQ ID NO: 3196219 - RNA, 13 nt, Human
cccaaagugcugg

SEQ ID NO: 3196220 - RNA, 16 nt, Human
cccaaagugcugggau

SEQ ID NO: 3196221 - RNA, 18 nt, Human
cccaaauggaaaugggca

SEQ ID NO: 3196222 - RNA, 22 nt, Human
cccaaauggaaaugggcagagc

SEQ ID NO: 3196223 - RNA, 14 nt, Human
cccaaaugcuggcu

SEQ ID NO: 3196224 - RNA, 22 nt, Human
cccaaggcccccugccugcccu

SEQ ID NO: 3196225 - RNA, 19 nt, Human
cccaaggcccccugccugc

SEQ ID NO: 3196226 - RNA, 17 nt, Human
cccaaggcucugagcaa

SEQ ID NO: 3196227 - RNA, 12 nt, Human
cccaaucccuga

SEQ ID NO: 3196228 - RNA, 12 nt, Human
cccaaugaauua

SEQ ID NO: 3196229 - RNA, 23 nt, Human
cccaaccucuuccuccugacacc

SEQ ID NO: 3196230 - RNA, 21 nt, Human
cccaaccucuuccuccugaca

SEQ ID NO: 3196231 - RNA, 14 nt, Human
cccaaccucuuccu

SEQ ID NO: 3196232 - RNA, 19 nt, Human
cccaaccucuuccuccuga

SEQ ID NO: 3196233 - RNA, 18 nt, Human
cccaaccucuuccuccug

SEQ ID NO: 3196234 - RNA, 15 nt, Human
cccaacccuggcacc

SEQ ID NO: 3196235 - RNA, 13 nt, Human
cccaacccuucuu

SEQ ID NO: 3196236 - RNA, 15 nt, Human
cccaacccuucuuca

SEQ ID NO: 3196237 - RNA, 20 nt, Human
cccaacccuucuucauguuc

SEQ ID NO: 3196238 - RNA, 19 nt, Human
ccauauucuguuggccagu

SEQ ID NO: 3196239 - RNA, 14 nt, Human
ccaucuaaacugcc

SEQ ID NO: 3196240 - RNA, 21 nt, Human
ccauggccggcuuucaggagc

SEQ ID NO: 3196241 - RNA, 18 nt, Human
ccauggccggcuuucagg

SEQ ID NO: 3196242 - RNA, 22 nt, Human
ccauggccggcuuucaggagcu

SEQ ID NO: 3196243 - RNA, 21 nt, Human
ccaugggaaaugucaacaagu

SEQ ID NO: 3196244 - RNA, 15 nt, Human
ccaucuaaacugccc

SEQ ID NO: 3196245 - RNA, 16 nt, Human
ccaucuaaacugcccc

SEQ ID NO: 3196246 - RNA, 15 nt, Human
ccaucuaaaaauaua

SEQ ID NO: 3196247 - RNA, 16 nt, Human
ccaugggacagggagg

SEQ ID NO: 3196248 - RNA, 19 nt, Human
ccaugggacagggaggacg

SEQ ID NO: 3196249 - RNA, 17 nt, Human
ccaugggaggcuggagu

SEQ ID NO: 3196250 - RNA, 11 nt, Human
ccaugggaggg

SEQ ID NO: 3196251 - RNA, 13 nt, Human
ccaugggagggag

SEQ ID NO: 3196252 - RNA, 14 nt, Human
ccaugggagggagc

SEQ ID NO: 3196253 - RNA, 17 nt, Human
ccaugggagggagcuga

SEQ ID NO: 3196254 - RNA, 16 nt, Human
ccauguuggccaggcu

SEQ ID NO: 3196255 - RNA, 17 nt, Human
ccauguuggccaggcug

SEQ ID NO: 3196256 - RNA, 18 nt, Human
ccauguuggccaggcugc

SEQ ID NO: 3196257 - RNA, 20 nt, Human
ccauguuggccaggcugcuc

SEQ ID NO: 3196258 - RNA, 21 nt, Human
ccauguuggccaggcugcucu

SEQ ID NO: 3196259 - RNA, 23 nt, Human
ccauguuggccaggcugcucuca

SEQ ID NO: 3196260 - RNA, 12 nt, Human
ccauguuucugu

SEQ ID NO: 3196261 - RNA, 18 nt, Human
ccauucuccaccugccag

SEQ ID NO: 3196262 - RNA, 21 nt, Human
ccaccaagccuggucagccca

SEQ ID NO: 3196263 - RNA, 22 nt, Human
ccaccaagccuggucagcccaa

SEQ ID NO: 3196264 - RNA, 20 nt, Human
ccaccaacauacucccaucu

SEQ ID NO: 3196265 - RNA, 16 nt, Human
ccaccacacccagccc

SEQ ID NO: 3196266 - RNA, 14 nt, Human
ccaccacacccagc

SEQ ID NO: 3196267 - RNA, 17 nt, Human
ccacccaagggccuggc

SEQ ID NO: 3196268 - RNA, 19 nt, Human
ccacccaagggccuggccu

SEQ ID NO: 3196269 - RNA, 16 nt, Human
ccacccaagggccugg

SEQ ID NO: 3196270 - RNA, 20 nt, Human
ccacccaagggccuggccug

SEQ ID NO: 3196271 - RNA, 21 nt, Human
ccacccaagggccuggccuga

SEQ ID NO: 3196272 - RNA, 22 nt, Human
ccacccaagggccuggccugag

SEQ ID NO: 3196273 - RNA, 13 nt, Human
ccacccaccucag

SEQ ID NO: 3196274 - RNA, 15 nt, Human
ccacccaccucagcc

SEQ ID NO: 3196275 - RNA, 14 nt, Human
ccacccaccucagc

SEQ ID NO: 3196276 - RNA, 16 nt, Human
ccacccaccucagccu

SEQ ID NO: 3196277 - RNA, 19 nt, Human
ccacacugauccagcccug

SEQ ID NO: 3196278 - RNA, 22 nt, Human
ccacacugauccagcccugagu

SEQ ID NO: 3196279 - RNA, 22 nt, Human
ccacauagugaugguuccccug

SEQ ID NO: 3196280 - RNA, 21 nt, Human
ccacauagugaugguuccccu

SEQ ID NO: 3196281 - RNA, 19 nt, Human
ccacauagugaugguuccc

SEQ ID NO: 3196282 - RNA, 14 nt, Human
ccacaucuugcucu

SEQ ID NO: 3196283 - RNA, 23 nt, Human
ccacauagugaugguuccccugu

SEQ ID NO: 3196284 - RNA, 23 nt, Human
ccacaucuugcucugcugacaga

SEQ ID NO: 3196285 - RNA, 22 nt, Human
ccacaucuugcucugcugacag

SEQ ID NO: 3196286 - RNA, 20 nt, Human
ccacaucuugcucugcugac

SEQ ID NO: 3196287 - RNA, 16 nt, Human
ccacaucuugcucugc

SEQ ID NO: 3196288 - RNA, 14 nt, Human
ccaccaacauacuc

SEQ ID NO: 3196289 - RNA, 18 nt, Human
ccaccaacauacucccau

SEQ ID NO: 3196290 - RNA, 20 nt, Human
ccaaaccaccagaagcccag

SEQ ID NO: 3196291 - RNA, 16 nt, Human
ccaaacccacccuuuc

SEQ ID NO: 3196292 - RNA, 19 nt, Human
ccaaacccccauucugucc

SEQ ID NO: 3196293 - RNA, 16 nt, Human
ccaaacccccauucug

SEQ ID NO: 3196294 - RNA, 20 nt, Human
ccaaacccacccuuucuacu

SEQ ID NO: 3196295 - RNA, 12 nt, Human
ccacacccagcc

SEQ ID NO: 3196296 - RNA, 13 nt, Human
ccacaccuccugg

SEQ ID NO: 3196297 - RNA, 14 nt, Human
ccacaccuccuggg

SEQ ID NO: 3196298 - RNA, 15 nt, Human
ccacaccuccugggg

SEQ ID NO: 3196299 - RNA, 13 nt, Human
ccacacuccagcu

SEQ ID NO: 3196300 - RNA, 14 nt, Human
ccacacuccagcug

SEQ ID NO: 3196301 - RNA, 17 nt, Human
ccacacuccagcuggga

SEQ ID NO: 3196302 - RNA, 14 nt, Human
ccacacccagccca

SEQ ID NO: 3196303 - RNA, 13 nt, Human
ccacacccagccc

SEQ ID NO: 3196304 - RNA, 13 nt, Human
ccacguuuugaaa

SEQ ID NO: 3196305 - RNA, 17 nt, Human
ccacgugcguguuuucu

SEQ ID NO: 3196306 - RNA, 18 nt, Human
ccacucaguccauagcag

SEQ ID NO: 3196307 - RNA, 14 nt, Human
ccacuccaagccag

SEQ ID NO: 3196308 - RNA, 12 nt, Human
ccacucccugca

SEQ ID NO: 3196309 - RNA, 13 nt, Human
ccacucccugcaa

SEQ ID NO: 3196310 - RNA, 19 nt, Human
ccacuccagaccccuggcu

SEQ ID NO: 3196311 - RNA, 17 nt, Human
ccacuccagaccccugg

SEQ ID NO: 3196312 - RNA, 16 nt, Human
ccacuccaagccagca

SEQ ID NO: 3196313 - RNA, 22 nt, Human
ccacuccccagccagccuggcu

SEQ ID NO: 3196314 - RNA, 19 nt, Human
ccacuccccagccagccug

SEQ ID NO: 3196315 - RNA, 22 nt, Human
ccacuacggaauaguuggcuag

SEQ ID NO: 3196316 - RNA, 23 nt, Human
ccacuacggaauaguuggcuagg

SEQ ID NO: 3196317 - RNA, 16 nt, Human
ccacuaccccuugauu

SEQ ID NO: 3196318 - RNA, 20 nt, Human
ccacucaagaccaaauggaa

SEQ ID NO: 3196319 - RNA, 17 nt, Human
ccacucaagaccaaaug

SEQ ID NO: 3196320 - RNA, 15 nt, Human
ccacucaagaccaaa

SEQ ID NO: 3196321 - RNA, 13 nt, Human
ccacucaagacca

SEQ ID NO: 3196322 - RNA, 23 nt, Human
ccacucaagaccaaauggaaaca

SEQ ID NO: 3196323 - RNA, 11 nt, Human
ccacugccucu

SEQ ID NO: 3196324 - RNA, 16 nt, Human
ccacugcgaccacaag

SEQ ID NO: 3196325 - RNA, 20 nt, Human
ccacugcacuccagccuggg

SEQ ID NO: 3196326 - RNA, 19 nt, Human
ccacugcacuccagccugg

SEQ ID NO: 3196327 - RNA, 15 nt, Human
ccacucccugcaacc

SEQ ID NO: 3196328 - RNA, 18 nt, Human
ccacugcacuccagccug

SEQ ID NO: 3196329 - RNA, 15 nt, Human
ccacugcccacuggc

SEQ ID NO: 3196330 - RNA, 17 nt, Human
ccacugcccacuggccg

SEQ ID NO: 3196331 - RNA, 16 nt, Human
ccacugcccacuggcc

SEQ ID NO: 3196332 - RNA, 15 nt, Human
ccacccuccacucuc

SEQ ID NO: 3196333 - RNA, 19 nt, Human
ccacccgugguggcucaag

SEQ ID NO: 3196334 - RNA, 20 nt, Human
ccacccgguucaguguuucu

SEQ ID NO: 3196335 - RNA, 17 nt, Human
ccacccgguucaguguu

SEQ ID NO: 3196336 - RNA, 16 nt, Human
ccacccgccccugccc

SEQ ID NO: 3196337 - RNA, 15 nt, Human
ccaccucagccuccc

SEQ ID NO: 3196338 - RNA, 14 nt, Human
ccaccucagccucc

SEQ ID NO: 3196339 - RNA, 13 nt, Human
ccaccucagccuc

SEQ ID NO: 3196340 - RNA, 16 nt, Human
ccacccugaaagcccu

SEQ ID NO: 3196341 - RNA, 17 nt, Human
ccacccugaaagcccug

SEQ ID NO: 3196342 - RNA, 12 nt, Human
ccaccucagccu

SEQ ID NO: 3196343 - RNA, 14 nt, Human
ccacccaggagccc

SEQ ID NO: 3196344 - RNA, 12 nt, Human
ccacccaggagc

SEQ ID NO: 3196345 - RNA, 20 nt, Human
ccaccuccccuugccagcug

SEQ ID NO: 3196346 - RNA, 19 nt, Human
ccaccuccccuugccagcu

SEQ ID NO: 3196347 - RNA, 18 nt, Human
ccaccuccccuugccagc

SEQ ID NO: 3196348 - RNA, 17 nt, Human
ccaccuccccuugccag

SEQ ID NO: 3196349 - RNA, 17 nt, Human
ccaccucccacaaagga

SEQ ID NO: 3196350 - RNA, 18 nt, Human
ccaccucccccacuccca

SEQ ID NO: 3196351 - RNA, 15 nt, Human
ccaccuccccuugcc

SEQ ID NO: 3196352 - RNA, 14 nt, Human
ccaccuccccuugc

SEQ ID NO: 3196353 - RNA, 17 nt, Human
ccaccugccuguugggc

SEQ ID NO: 3196354 - RNA, 20 nt, Human
ccaccugccuguugggccag

SEQ ID NO: 3196355 - RNA, 16 nt, Human
ccaccugccagggaca

SEQ ID NO: 3196356 - RNA, 15 nt, Human
ccaccugaguuccug

SEQ ID NO: 3196357 - RNA, 14 nt, Human
ccaccugaguuccu

SEQ ID NO: 3196358 - RNA, 14 nt, Human
ccaccugcccaacc

SEQ ID NO: 3196359 - RNA, 17 nt, Human
ccaccugcagcucccuc

SEQ ID NO: 3196360 - RNA, 15 nt, Human
ccaccugcagcuccc

SEQ ID NO: 3196361 - RNA, 12 nt, Human
ccaccugcagcu

SEQ ID NO: 3196362 - RNA, 16 nt, Human
ccaccugaguuccuga

SEQ ID NO: 3196363 - RNA, 15 nt, Human
ccacggccaggccag

SEQ ID NO: 3196364 - RNA, 23 nt, Human
ccacgucuauuucaucagaacag

SEQ ID NO: 3196365 - RNA, 14 nt, Human
ccacggccaggcca

SEQ ID NO: 3196366 - RNA, 13 nt, Human
ccacggccaggcc

SEQ ID NO: 3196367 - RNA, 12 nt, Human
ccacggccaggc

SEQ ID NO: 3196368 - RNA, 17 nt, Human
ccaccuggccucugcac

SEQ ID NO: 3196369 - RNA, 14 nt, Human
ccaccuggccucug

SEQ ID NO: 3196370 - RNA, 19 nt, Human
ccacgcuggagugcaguga

SEQ ID NO: 3196371 - RNA, 22 nt, Human
ccaccugcggugcuaucucccc

SEQ ID NO: 3196372 - RNA, 14 nt, Human
ccaccugcucugcu

SEQ ID NO: 3196373 - RNA, 15 nt, Human
ccaccuggccucugc

SEQ ID NO: 3196374 - RNA, 16 nt, Human
ccaccuggccucugca

SEQ ID NO: 3196375 - RNA, 15 nt, Human
ccagccaaagccucc

SEQ ID NO: 3196376 - RNA, 21 nt, Human
ccagccaaacacacagaaggg

SEQ ID NO: 3196377 - RNA, 20 nt, Human
ccagccaaacacacagaagg

SEQ ID NO: 3196378 - RNA, 18 nt, Human
ccagccaaacacacagaa

SEQ ID NO: 3196379 - RNA, 16 nt, Human
ccagccaaacacacag

SEQ ID NO: 3196380 - RNA, 18 nt, Human
ccagccaaagccuccucc

SEQ ID NO: 3196381 - RNA, 19 nt, Human
ccagccaaagccuccucca

SEQ ID NO: 3196382 - RNA, 22 nt, Human
ccagccacuccccagccagccu

SEQ ID NO: 3196383 - RNA, 16 nt, Human
ccagccacuccccagc

SEQ ID NO: 3196384 - RNA, 16 nt, Human
ccagccagccuggcug

SEQ ID NO: 3196385 - RNA, 14 nt, Human
ccagccagccuggc

SEQ ID NO: 3196386 - RNA, 17 nt, Human
ccagcagucugccugga

SEQ ID NO: 3196387 - RNA, 18 nt, Human
ccagcaucgcacucuggc

SEQ ID NO: 3196388 - RNA, 18 nt, Human
ccagccgccaugcuccug

SEQ ID NO: 3196389 - RNA, 14 nt, Human
ccagccgccaugcu

SEQ ID NO: 3196390 - RNA, 23 nt, Human
ccagccgagauagccaaggccaa

SEQ ID NO: 3196391 - RNA, 18 nt, Human
ccagcccuuccucugcuc

SEQ ID NO: 3196392 - RNA, 21 nt, Human
ccagccuccaagcuccaucuc

SEQ ID NO: 3196393 - RNA, 20 nt, Human
ccagccucaaauccaggacc

SEQ ID NO: 3196394 - RNA, 19 nt, Human
ccagccucaaauccaggac

SEQ ID NO: 3196395 - RNA, 18 nt, Human
ccagccucaaauccagga

SEQ ID NO: 3196396 - RNA, 17 nt, Human
ccagccucaaauccagg

SEQ ID NO: 3196397 - RNA, 23 nt, Human
ccagccucaaauccaggacccug

SEQ ID NO: 3196398 - RNA, 17 nt, Human
ccagcccuuagcaggga

SEQ ID NO: 3196399 - RNA, 13 nt, Human
ccagcccuuccuc

SEQ ID NO: 3196400 - RNA, 17 nt, Human
ccagcccuuccucugcu

SEQ ID NO: 3196401 - RNA, 15 nt, Human
ccagcccuuccucug

SEQ ID NO: 3196402 - RNA, 16 nt, Human
ccagcccuuagcaggg

SEQ ID NO: 3196403 - RNA, 21 nt, Human
ccagcccuccuuaucaaagga

SEQ ID NO: 3196404 - RNA, 16 nt, Human
ccagccccagugccca

SEQ ID NO: 3196405 - RNA, 23 nt, Human
ccagccccaaaacucuccucugc

SEQ ID NO: 3196406 - RNA, 19 nt, Human
ccagccccaaaacucuccu

SEQ ID NO: 3196407 - RNA, 15 nt, Human
ccagccccagugccc

SEQ ID NO: 3196408 - RNA, 13 nt, Human
ccagccccagugc

SEQ ID NO: 3196409 - RNA, 19 nt, Human
ccagccccacccuguuuug

SEQ ID NO: 3196410 - RNA, 19 nt, Human
ccagcaauucuccugccuc

SEQ ID NO: 3196411 - RNA, 20 nt, Human
ccagcaauucuccugccuca

SEQ ID NO: 3196412 - RNA, 16 nt, Human
ccagcaauucuccugc

SEQ ID NO: 3196413 - RNA, 18 nt, Human
ccagcaauucuccugccu

SEQ ID NO: 3196414 - RNA, 22 nt, Human
ccagcaagugagagcugggugu

SEQ ID NO: 3196415 - RNA, 21 nt, Human
ccagcaagugagagcugggug

SEQ ID NO: 3196416 - RNA, 20 nt, Human
ccagcaagugagagcugggu

SEQ ID NO: 3196417 - RNA, 14 nt, Human
ccagauuucacucu

SEQ ID NO: 3196418 - RNA, 15 nt, Human
ccagcaagugagagc

SEQ ID NO: 3196419 - RNA, 12 nt, Human
ccagauuucacu

SEQ ID NO: 3196420 - RNA, 21 nt, Human
ccagauugcaacaggcugggc

SEQ ID NO: 3196421 - RNA, 18 nt, Human
ccagauugcaacaggcug

SEQ ID NO: 3196422 - RNA, 23 nt, Human
ccagauucuuuccugaggcuggg

SEQ ID NO: 3196423 - RNA, 20 nt, Human
ccagauugcaacaggcuggg

SEQ ID NO: 3196424 - RNA, 19 nt, Human
ccagauugcaacaggcugg

SEQ ID NO: 3196425 - RNA, 15 nt, Human
ccagagggccugcaa

SEQ ID NO: 3196426 - RNA, 16 nt, Human
ccagagggccugcaag

SEQ ID NO: 3196427 - RNA, 23 nt, Human
ccagaugcaccagcccuuagcag

SEQ ID NO: 3196428 - RNA, 23 nt, Human
ccagagggagugacagaggcagc

SEQ ID NO: 3196429 - RNA, 22 nt, Human
ccagagggagugacagaggcag

SEQ ID NO: 3196430 - RNA, 13 nt, Human
ccagagggccugc

SEQ ID NO: 3196431 - RNA, 19 nt, Human
ccagauucuuuccugaggc

SEQ ID NO: 3196432 - RNA, 20 nt, Human
ccagauucuuuccugaggcu

SEQ ID NO: 3196433 - RNA, 21 nt, Human
ccagauucuuuccugaggcug

SEQ ID NO: 3196434 - RNA, 22 nt, Human
ccagauucuuuccugaggcugg

SEQ ID NO: 3196435 - RNA, 18 nt, Human
ccagauucuuuccugagg

SEQ ID NO: 3196436 - RNA, 18 nt, Human
ccagaugugacaguguug

SEQ ID NO: 3196437 - RNA, 16 nt, Human
ccagacccccuggaga

SEQ ID NO: 3196438 - RNA, 12 nt, Human
ccagacccccug

SEQ ID NO: 3196439 - RNA, 18 nt, Human
ccagacccccuggagacu

SEQ ID NO: 3196440 - RNA, 13 nt, Human
ccagagagggugg

SEQ ID NO: 3196441 - RNA, 14 nt, Human
ccagagaggguggu

SEQ ID NO: 3196442 - RNA, 23 nt, Human
ccagagaggguggugaccucugc

SEQ ID NO: 3196443 - RNA, 21 nt, Human
ccagagaggguggugaccucu

SEQ ID NO: 3196444 - RNA, 19 nt, Human
ccagacaccuugacagggc

SEQ ID NO: 3196445 - RNA, 17 nt, Human
ccagacaccuugacagg

SEQ ID NO: 3196446 - RNA, 22 nt, Human
ccagaggagagaggacccccug

SEQ ID NO: 3196447 - RNA, 21 nt, Human
ccagaggagagaggacccccu

SEQ ID NO: 3196448 - RNA, 21 nt, Human
ccagagggagugacagaggca

SEQ ID NO: 3196449 - RNA, 20 nt, Human
ccagagggagugacagaggc

SEQ ID NO: 3196450 - RNA, 19 nt, Human
ccagagggagugacagagg

SEQ ID NO: 3196451 - RNA, 18 nt, Human
ccagagggagugacagag

SEQ ID NO: 3196452 - RNA, 17 nt, Human
ccagagggagugacaga

SEQ ID NO: 3196453 - RNA, 16 nt, Human
ccagagggagugacag

SEQ ID NO: 3196454 - RNA, 14 nt, Human
ccagagcugccacc

SEQ ID NO: 3196455 - RNA, 15 nt, Human
ccagagcugccaccu

SEQ ID NO: 3196456 - RNA, 16 nt, Human
ccagagcugccaccug

SEQ ID NO: 3196457 - RNA, 19 nt, Human
ccagagcugccaccugccu

SEQ ID NO: 3196458 - RNA, 23 nt, Human
ccagagcugcuuccccgucaccu

SEQ ID NO: 3196459 - RNA, 14 nt, Human
ccagagcugccagu

SEQ ID NO: 3196460 - RNA, 13 nt, Human
ccagagcugccag

SEQ ID NO: 3196461 - RNA, 12 nt, Human
ccagagcugcca

SEQ ID NO: 3196462 - RNA, 13 nt, Human
ccagagcugccac

SEQ ID NO: 3196463 - RNA, 11 nt, Human
ccagagcugcc

SEQ ID NO: 3196464 - RNA, 16 nt, Human
ccagaccccgacaccg

SEQ ID NO: 3196465 - RNA, 19 nt, Human
ccugaggaagagggacugu

SEQ ID NO: 3196466 - RNA, 16 nt, Human
ccugagcuuucugcua

SEQ ID NO: 3196467 - RNA, 21 nt, Human
ccugaggcccagagggccugc

SEQ ID NO: 3196468 - RNA, 18 nt, Human
ccugaggcccagagggcc

SEQ ID NO: 3196469 - RNA, 20 nt, Human
ccugaggacauggcuucuga

SEQ ID NO: 3196470 - RNA, 18 nt, Human
ccugaggacauggcuucu

SEQ ID NO: 3196471 - RNA, 11 nt, Human
ccugagcccca

SEQ ID NO: 3196472 - RNA, 16 nt, Human
ccugagcccacugugc

SEQ ID NO: 3196473 - RNA, 15 nt, Human
ccugagcccacugug

SEQ ID NO: 3196474 - RNA, 13 nt, Human
ccugagcccacug

SEQ ID NO: 3196475 - RNA, 12 nt, Human
ccugagcccacu

SEQ ID NO: 3196476 - RNA, 14 nt, Human
ccugagcuuucugc

SEQ ID NO: 3196477 - RNA, 20 nt, Human
ccugagccagauuucacucu

SEQ ID NO: 3196478 - RNA, 11 nt, Human
ccugagcccac

SEQ ID NO: 3196479 - RNA, 18 nt, Human
ccugacacaccugcagcc

SEQ ID NO: 3196480 - RNA, 18 nt, Human
ccugacaccccacuuagc

SEQ ID NO: 3196481 - RNA, 14 nt, Human
ccugacaccccacu

SEQ ID NO: 3196482 - RNA, 16 nt, Human
ccugacagaaggacuc

SEQ ID NO: 3196483 - RNA, 23 nt, Human
ccugacagagggauggaggaaga

SEQ ID NO: 3196484 - RNA, 13 nt, Human
ccugacagccaga

SEQ ID NO: 3196485 - RNA, 20 nt, Human
ccugacagccagaacucugu

SEQ ID NO: 3196486 - RNA, 14 nt, Human
ccugacagccagaa

SEQ ID NO: 3196487 - RNA, 20 nt, Human
ccugacagccccucccuccu

SEQ ID NO: 3196488 - RNA, 23 nt, Human
ccugacaacacucauugaccuga

SEQ ID NO: 3196489 - RNA, 14 nt, Human
ccugccacucaggc

SEQ ID NO: 3196490 - RNA, 14 nt, Human
ccugccagaccccc

SEQ ID NO: 3196491 - RNA, 23 nt, Human
ccugccacucaggcccaaagccu

SEQ ID NO: 3196492 - RNA, 22 nt, Human
ccugccacucaggcccaaagcc

SEQ ID NO: 3196493 - RNA, 22 nt, Human
ccugcaguuccccuggaagcag

SEQ ID NO: 3196494 - RNA, 14 nt, Human
ccugcaucaucuug

SEQ ID NO: 3196495 - RNA, 13 nt, Human
ccugcaguucccc

SEQ ID NO: 3196496 - RNA, 13 nt, Human
ccugccaggaagc

SEQ ID NO: 3196497 - RNA, 14 nt, Human
ccugccaggaagcc

SEQ ID NO: 3196498 - RNA, 15 nt, Human
ccugccaggaagcca

SEQ ID NO: 3196499 - RNA, 17 nt, Human
ccugccaggaagccagc

SEQ ID NO: 3196500 - RNA, 15 nt, Human
ccugccaggcauggu

SEQ ID NO: 3196501 - RNA, 23 nt, Human
ccugccaggaagccagcaggcuc

SEQ ID NO: 3196502 - RNA, 16 nt, Human
ccugccaggcauggug

SEQ ID NO: 3196503 - RNA, 11 nt, Human
ccugccaggga

SEQ ID NO: 3196504 - RNA, 18 nt, Human
ccugccaggaagccagca

SEQ ID NO: 3196505 - RNA, 19 nt, Human
ccugccaggaagccagcag

SEQ ID NO: 3196506 - RNA, 21 nt, Human
ccugccaggaagccagcaggc

SEQ ID NO: 3196507 - RNA, 22 nt, Human
ccugccaggaagccagcaggcu

SEQ ID NO: 3196508 - RNA, 12 nt, Human
ccugccagggac

SEQ ID NO: 3196509 - RNA, 13 nt, Human
ccugccagggaca

SEQ ID NO: 3196510 - RNA, 14 nt, Human
ccugccagggacag

SEQ ID NO: 3196511 - RNA, 15 nt, Human
ccugccagggacaga

SEQ ID NO: 3196512 - RNA, 16 nt, Human
ccugccagggacagag

SEQ ID NO: 3196513 - RNA, 14 nt, Human
ccugcaagaacaag

SEQ ID NO: 3196514 - RNA, 23 nt, Human
ccugcaggcagccaggccacaag

SEQ ID NO: 3196515 - RNA, 20 nt, Human
ccugcaguacuuuaccuccu

SEQ ID NO: 3196516 - RNA, 18 nt, Human
ccugcaguacuuuaccuc

SEQ ID NO: 3196517 - RNA, 15 nt, Human
ccugcagggccaagc

SEQ ID NO: 3196518 - RNA, 22 nt, Human
ccugcaaccugauugugucucu

SEQ ID NO: 3196519 - RNA, 21 nt, Human
ccugcaaccugauugugucuc

SEQ ID NO: 3196520 - RNA, 17 nt, Human
ccugauugugucucuug

SEQ ID NO: 3196521 - RNA, 20 nt, Human
ccugauugguuucucuucuc

SEQ ID NO: 3196522 - RNA, 18 nt, Human
ccugauugguuucucuuc

SEQ ID NO: 3196523 - RNA, 11 nt, Human
ccugaggcccu

SEQ ID NO: 3196524 - RNA, 12 nt, Human
ccugaggcccuu

SEQ ID NO: 3196525 - RNA, 19 nt, Human
ccugaugcuucuucagaga

SEQ ID NO: 3196526 - RNA, 20 nt, Human
ccugaugcuucuucagagac

SEQ ID NO: 3196527 - RNA, 21 nt, Human
ccugaugcuucuucagagacu

SEQ ID NO: 3196528 - RNA, 15 nt, Human
ccugauugugucucu

SEQ ID NO: 3196529 - RNA, 17 nt, Human
ccuggcuccaggccagg

SEQ ID NO: 3196530 - RNA, 16 nt, Human
ccuggcuccaggccag

SEQ ID NO: 3196531 - RNA, 15 nt, Human
ccuggcuccaggcca

SEQ ID NO: 3196532 - RNA, 17 nt, Human
ccuggcucccacaggcc

SEQ ID NO: 3196533 - RNA, 23 nt, Human
ccuggcucccacaggcccuuccu

SEQ ID NO: 3196534 - RNA, 22 nt, Human
ccuggcugcggggcgggcacac

SEQ ID NO: 3196535 - RNA, 15 nt, Human
ccuggccagaugcac

SEQ ID NO: 3196536 - RNA, 22 nt, Human
ccuggcagccgugccuucagcu

SEQ ID NO: 3196537 - RNA, 21 nt, Human
ccuggcagccgugccuucagc

SEQ ID NO: 3196538 - RNA, 19 nt, Human
ccuggagacuaaccccacc

SEQ ID NO: 3196539 - RNA, 17 nt, Human
ccuggaaggcccagcac

SEQ ID NO: 3196540 - RNA, 18 nt, Human
ccuggaaggcccagcacc

SEQ ID NO: 3196541 - RNA, 12 nt, Human
ccuggcagcccc

SEQ ID NO: 3196542 - RNA, 13 nt, Human
ccuggcagccccu

SEQ ID NO: 3196543 - RNA, 23 nt, Human
ccuggcacccggccccugcuggu

SEQ ID NO: 3196544 - RNA, 21 nt, Human
ccuggcacccggccccugcug

SEQ ID NO: 3196545 - RNA, 22 nt, Human
ccuggcacccggccccugcugg

SEQ ID NO: 3196546 - RNA, 12 nt, Human
ccuggucagccc

SEQ ID NO: 3196547 - RNA, 14 nt, Human
ccuggucagcccaa

SEQ ID NO: 3196548 - RNA, 20 nt, Human
ccuggucagggugagcccau

SEQ ID NO: 3196549 - RNA, 21 nt, Human
ccuggucacaggacucugccu

SEQ ID NO: 3196550 - RNA, 23 nt, Human
ccuggucacaggacucugccucc

SEQ ID NO: 3196551 - RNA, 22 nt, Human
ccuggucacaggacucugccuc

SEQ ID NO: 3196552 - RNA, 19 nt, Human
ccugguaagaaaaagcaaa

SEQ ID NO: 3196553 - RNA, 15 nt, Human
ccugguaagaaaaag

SEQ ID NO: 3196554 - RNA, 14 nt, Human
ccugguaagaaaaa

SEQ ID NO: 3196555 - RNA, 18 nt, Human
ccuggggguucuuucuuc

SEQ ID NO: 3196556 - RNA, 15 nt, Human
ccuggguccccagcc

SEQ ID NO: 3196557 - RNA, 23 nt, Human
ccuggggguucuuucuuccucug

SEQ ID NO: 3196558 - RNA, 22 nt, Human
ccuggggguucuuucuuccucu

SEQ ID NO: 3196559 - RNA, 21 nt, Human
ccuggggguucuuucuuccuc

SEQ ID NO: 3196560 - RNA, 24 nt, Human
ccuggcuuuucacugcuggcugcc

SEQ ID NO: 3196561 - RNA, 23 nt, Human
ccuggcuuuucacugcuggcugc

SEQ ID NO: 3196562 - RNA, 22 nt, Human
ccuggcuuuucacugcuggcug

SEQ ID NO: 3196563 - RNA, 21 nt, Human
ccuggcuuuucacugcuggcu

SEQ ID NO: 3196564 - RNA, 18 nt, Human
ccuggcuuuucacugcug

SEQ ID NO: 3196565 - RNA, 20 nt, Human
ccuggcuuuucacugcuggc

SEQ ID NO: 3196566 - RNA, 15 nt, Human
ccuggcuuccuuacu

SEQ ID NO: 3196567 - RNA, 13 nt, Human
ccuggcuuccuua

SEQ ID NO: 3196568 - RNA, 18 nt, Human
ccuggcugggacugggaa

SEQ ID NO: 3196569 - RNA, 21 nt, Human
ccuggcugggacugggaacag

SEQ ID NO: 3196570 - RNA, 18 nt, Human
ccugccugguccucacac

SEQ ID NO: 3196571 - RNA, 23 nt, Human
ccugccuguugggccaggagccu

SEQ ID NO: 3196572 - RNA, 14 nt, Human
ccugccuuaaguga

SEQ ID NO: 3196573 - RNA, 22 nt, Human
ccugccccucaacucuccucca

SEQ ID NO: 3196574 - RNA, 16 nt, Human
ccugcggugcuaucuc

SEQ ID NO: 3196575 - RNA, 17 nt, Human
ccugcggugcuaucucc

SEQ ID NO: 3196576 - RNA, 18 nt, Human
ccugcgggucacaggagg

SEQ ID NO: 3196577 - RNA, 22 nt, Human
ccugcgggucacaggagggagg

SEQ ID NO: 3196578 - RNA, 21 nt, Human
ccugcgcgggaccaucuggaa

SEQ ID NO: 3196579 - RNA, 21 nt, Human
ccugccuugcccacuccugcu

SEQ ID NO: 3196580 - RNA, 17 nt, Human
ccugcgaggcuaugagu

SEQ ID NO: 3196581 - RNA, 23 nt, Human
ccuggaagcagugcccagguggc

SEQ ID NO: 3196582 - RNA, 20 nt, Human
ccuggaagcagugcccaggu

SEQ ID NO: 3196583 - RNA, 15 nt, Human
ccuggaagcagugcc

SEQ ID NO: 3196584 - RNA, 19 nt, Human
ccuggaagcagugcccagg

SEQ ID NO: 3196585 - RNA, 18 nt, Human
ccuggaagcagugcccag

SEQ ID NO: 3196586 - RNA, 17 nt, Human
ccuggaagcagugccca

SEQ ID NO: 3196587 - RNA, 16 nt, Human
ccuggaagcagugccc

SEQ ID NO: 3196588 - RNA, 14 nt, Human
ccugcuucaaauau

SEQ ID NO: 3196589 - RNA, 20 nt, Human
ccugcuucagccucccacag

SEQ ID NO: 3196590 - RNA, 17 nt, Human
ccugcuucagccuccca

SEQ ID NO: 3196591 - RNA, 21 nt, Human
ccugcuguuuaucccuuaaga

SEQ ID NO: 3196592 - RNA, 19 nt, Human
ccugcuuugggcugcccug

SEQ ID NO: 3196593 - RNA, 20 nt, Human
ccugcuuugggcugcccugg

SEQ ID NO: 3196594 - RNA, 23 nt, Human
ccugcuucagccucccacagugc

SEQ ID NO: 3196595 - RNA, 22 nt, Human
ccugcuuugggcugcccuggug

SEQ ID NO: 3196596 - RNA, 21 nt, Human
ccugcuuugggcugcccuggu

SEQ ID NO: 3196597 - RNA, 23 nt, Human
ccugcuuugggcugcccuggugc

SEQ ID NO: 3196598 - RNA, 22 nt, Human
ccugcuuugucuccucuauccu

SEQ ID NO: 3196599 - RNA, 22 nt, Human
ccugcucuccgaccagacaccu

SEQ ID NO: 3196600 - RNA, 21 nt, Human
ccugcucuccucuugccacug

SEQ ID NO: 3196601 - RNA, 19 nt, Human
ccugcucuccucuugccac

SEQ ID NO: 3196602 - RNA, 18 nt, Human
ccugcucuccucuugcca

SEQ ID NO: 3196603 - RNA, 16 nt, Human
ccugcucuccucuugc

SEQ ID NO: 3196604 - RNA, 22 nt, Human
ccugcucuccucuugccacugc

SEQ ID NO: 3196605 - RNA, 12 nt, Human
ccugcucugcug

SEQ ID NO: 3196606 - RNA, 12 nt, Human
ccugcucugcuc

SEQ ID NO: 3196607 - RNA, 15 nt, Human
ccugcucuuuggccu

SEQ ID NO: 3196608 - RNA, 13 nt, Human
ccugcucugcuga

SEQ ID NO: 3196609 - RNA, 22 nt, Human
ccugcggugcuaucucccccag

SEQ ID NO: 3196610 - RNA, 22 nt, Human
ccugcucagcagugagagcaga

SEQ ID NO: 3196611 - RNA, 21 nt, Human
ccugcucagcagugagagcag

SEQ ID NO: 3196612 - RNA, 21 nt, Human
ccugcucuccgaccagacacc

SEQ ID NO: 3196613 - RNA, 13 nt, Human
ccugcuccuuccc

SEQ ID NO: 3196614 - RNA, 21 nt, Human
ccugcucgaugcucacagggc

SEQ ID NO: 3196615 - RNA, 18 nt, Human
ccugcuccuucccuugcu

SEQ ID NO: 3196616 - RNA, 16 nt, Human
ccugcuccuucccuug

SEQ ID NO: 3196617 - RNA, 16 nt, Human
cgaaguucaagaucaa

SEQ ID NO: 3196618 - RNA, 17 nt, Human
cgaaguucaagaucaaa

SEQ ID NO: 3196619 - RNA, 18 nt, Human
cgaaguucaagaucaaaa

SEQ ID NO: 3196620 - RNA, 21 nt, Human
cgaacugggcauauuucuaau

SEQ ID NO: 3196621 - RNA, 16 nt, Human
cgaacuguuguauaaa

SEQ ID NO: 3196622 - RNA, 14 nt, Human
cgaacuggcugcaa

SEQ ID NO: 3196623 - RNA, 12 nt, Human
cgaacuggcugc

SEQ ID NO: 3196624 - RNA, 14 nt, Human
cgaacuccugaccu

SEQ ID NO: 3196625 - RNA, 18 nt, Human
cgaaagaaaacucuauuu

SEQ ID NO: 3196626 - RNA, 23 nt, Human
cgaaagaggcacccuuccaucug

SEQ ID NO: 3196627 - RNA, 12 nt, Human
cgaaagaggcac

SEQ ID NO: 3196628 - RNA, 20 nt, Human
cgaaagaggcacccuuccau

SEQ ID NO: 3196629 - RNA, 19 nt, Human
cgaaagaggcacccuucca

SEQ ID NO: 3196630 - RNA, 22 nt, Human
cgaaagggacuuggaagcuccg

SEQ ID NO: 3196631 - RNA, 20 nt, Human
cgaaaggaugaaagugacca

SEQ ID NO: 3196632 - RNA, 19 nt, Human
cgaaagggacuuggaagcu

SEQ ID NO: 3196633 - RNA, 16 nt, Human
ccuuuucacccuucua

SEQ ID NO: 3196634 - RNA, 20 nt, Human
ccuuuucacccuucuacucu

SEQ ID NO: 3196635 - RNA, 23 nt, Human
ccuuuuauuauaagucuuacaua

SEQ ID NO: 3196636 - RNA, 14 nt, Human
ccuuuucaggaaaa

SEQ ID NO: 3196637 - RNA, 20 nt, Human
ccuuugacgccaucccagcc

SEQ ID NO: 3196638 - RNA, 21 nt, Human
ccuuugacgccaucccagccc

SEQ ID NO: 3196639 - RNA, 22 nt, Human
ccuuugacgccaucccagcccc

SEQ ID NO: 3196640 - RNA, 18 nt, Human
cgaaaacguggcugcuuc

SEQ ID NO: 3196641 - RNA, 19 nt, Human
cgaaaacguggcugcuuca

SEQ ID NO: 3196642 - RNA, 15 nt, Human
cgaaaacguggcugc

SEQ ID NO: 3196643 - RNA, 12 nt, Human
ccuuuuuuuuga

SEQ ID NO: 3196644 - RNA, 19 nt, Human
cgaaaaaauaauuauuuau

SEQ ID NO: 3196645 - RNA, 20 nt, Human
cgaaaacguggcugcuucaa

SEQ ID NO: 3196646 - RNA, 12 nt, Human
cgaaaacauugu

SEQ ID NO: 3196647 - RNA, 12 nt, Human
cgaaaaucauug

SEQ ID NO: 3196648 - RNA, 22 nt, Human
cgaaacucuaaguguuugcugc

SEQ ID NO: 3196649 - RNA, 20 nt, Human
cgagaucacgccacugcacu

SEQ ID NO: 3196650 - RNA, 18 nt, Human
cgagaucacgccacugca

SEQ ID NO: 3196651 - RNA, 20 nt, Human
cgagauugcaccacugcacu

SEQ ID NO: 3196652 - RNA, 21 nt, Human
cgagcagacacccuuggagcu

SEQ ID NO: 3196653 - RNA, 18 nt, Human
cgagcaggcuacugucag

SEQ ID NO: 3196654 - RNA, 20 nt, Human
cgagcaggcuucuucccccc

SEQ ID NO: 3196655 - RNA, 14 nt, Human
cgagcaugccugga

SEQ ID NO: 3196656 - RNA, 13 nt, Human
cgagcaugccugg

SEQ ID NO: 3196657 - RNA, 16 nt, Human
cgagcaugccuggaug

SEQ ID NO: 3196658 - RNA, 17 nt, Human
cgagcaugccuggaugg

SEQ ID NO: 3196659 - RNA, 18 nt, Human
cgagauagccaaggccaa

SEQ ID NO: 3196660 - RNA, 17 nt, Human
cgagaucacgccacugc

SEQ ID NO: 3196661 - RNA, 14 nt, Human
cgaauagcugggac

SEQ ID NO: 3196662 - RNA, 13 nt, Human
cgaauagcuggga

SEQ ID NO: 3196663 - RNA, 16 nt, Human
cgacuugcauuuuugc

SEQ ID NO: 3196664 - RNA, 19 nt, Human
cgacuugugcacaggcaga

SEQ ID NO: 3196665 - RNA, 18 nt, Human
cgacuugugcacaggcag

SEQ ID NO: 3196666 - RNA, 17 nt, Human
cgccaugcuccuggccc

SEQ ID NO: 3196667 - RNA, 17 nt, Human
cgccagauucuuuccug

SEQ ID NO: 3196668 - RNA, 19 nt, Human
cgccagauucuuuccugag

SEQ ID NO: 3196669 - RNA, 20 nt, Human
cgccagauucuuuccugagg

SEQ ID NO: 3196670 - RNA, 21 nt, Human
cgccagauucuuuccugaggc

SEQ ID NO: 3196671 - RNA, 22 nt, Human
cgccaggggaaaaucagccugc

SEQ ID NO: 3196672 - RNA, 17 nt, Human
cgccagggaccccagaa

SEQ ID NO: 3196673 - RNA, 16 nt, Human
cgccagggaccccaga

SEQ ID NO: 3196674 - RNA, 15 nt, Human
cgcagacaggaccag

SEQ ID NO: 3196675 - RNA, 16 nt, Human
cgcagacaggaccagg

SEQ ID NO: 3196676 - RNA, 21 nt, Human
cgcagagaagugacgguuccu

SEQ ID NO: 3196677 - RNA, 14 nt, Human
cgcagcccugcaga

SEQ ID NO: 3196678 - RNA, 10 nt, Human
cgcagcccug

SEQ ID NO: 3196679 - RNA, 22 nt, Human
cgcagagaagugacgguuccua

SEQ ID NO: 3196680 - RNA, 17 nt, Human
cgcaaccaagugugcua

SEQ ID NO: 3196681 - RNA, 21 nt, Human
cgcaagcaccauccccuccgg

SEQ ID NO: 3196682 - RNA, 19 nt, Human
cgcaagcaccauccccucc

SEQ ID NO: 3196683 - RNA, 13 nt, Human
cgcacagcugcuc

SEQ ID NO: 3196684 - RNA, 17 nt, Human
cgcaccagcccagaagu

SEQ ID NO: 3196685 - RNA, 18 nt, Human
cgagcaugccuggauggg

SEQ ID NO: 3196686 - RNA, 16 nt, Human
cgagcccugguggcag

SEQ ID NO: 3196687 - RNA, 15 nt, Human
cgagcccugguggca

SEQ ID NO: 3196688 - RNA, 14 nt, Human
ccuuaagcugcagg

SEQ ID NO: 3196689 - RNA, 15 nt, Human
ccuuaagcugcagga

SEQ ID NO: 3196690 - RNA, 15 nt, Human
ccuuaagaaugccaa

SEQ ID NO: 3196691 - RNA, 20 nt, Human
ccuuaagaaugaguuucuua

SEQ ID NO: 3196692 - RNA, 12 nt, Human
ccuuaagaauga

SEQ ID NO: 3196693 - RNA, 14 nt, Human
ccuuacacaauggu

SEQ ID NO: 3196694 - RNA, 20 nt, Human
ccuuacacaaugguuuucuu

SEQ ID NO: 3196695 - RNA, 19 nt, Human
ccuuaagugaggaaaucaa

SEQ ID NO: 3196696 - RNA, 22 nt, Human
ccuuaagugaggaaaucaaagu

SEQ ID NO: 3196697 - RNA, 11 nt, Human
ccuuaauauuu

SEQ ID NO: 3196698 - RNA, 12 nt, Human
ccuuaauauuuc

SEQ ID NO: 3196699 - RNA, 15 nt, Human
ccuuaauauuucuuc

SEQ ID NO: 3196700 - RNA, 19 nt, Human
ccuuaauauuucuucaaau

SEQ ID NO: 3196701 - RNA, 20 nt, Human
ccuuaagugaggaaaucaaa

SEQ ID NO: 3196702 - RNA, 13 nt, Human
ccuuaaaacuagg

SEQ ID NO: 3196703 - RNA, 23 nt, Human
ccuuaaaacuaggcauuuguaaa

SEQ ID NO: 3196704 - RNA, 16 nt, Human
ccuuaaaauuugaaac

SEQ ID NO: 3196705 - RNA, 15 nt, Human
ccuuaaaauuugaaa

SEQ ID NO: 3196706 - RNA, 18 nt, Human
ccuuaaaauuugaaacau

SEQ ID NO: 3196707 - RNA, 17 nt, Human
ccuuaaaauuugaaaca

SEQ ID NO: 3196708 - RNA, 16 nt, Human
ccuguuuugagcccug

SEQ ID NO: 3196709 - RNA, 20 nt, Human
ccuuaaaacaucauuccuuu

SEQ ID NO: 3196710 - RNA, 13 nt, Human
ccuuaccagcaga

SEQ ID NO: 3196711 - RNA, 17 nt, Human
ccuuaccacugcucuga

SEQ ID NO: 3196712 - RNA, 23 nt, Human
ccuuacaaaugauugcuuuuaaa

SEQ ID NO: 3196713 - RNA, 21 nt, Human
ccuuacaaaugauugcuuuua

SEQ ID NO: 3196714 - RNA, 17 nt, Human
ccuuacaaaugauugcu

SEQ ID NO: 3196715 - RNA, 17 nt, Human
ccuuaccagcagagcac

SEQ ID NO: 3196716 - RNA, 20 nt, Human
ccuuaccacugcucugauga

SEQ ID NO: 3196717 - RNA, 20 nt, Human
ccuuaccagcagagcaccuu

SEQ ID NO: 3196718 - RNA, 14 nt, Human
ccuuaccugccagg

SEQ ID NO: 3196719 - RNA, 19 nt, Human
ccuuaccugccaggaagcc

SEQ ID NO: 3196720 - RNA, 18 nt, Human
ccuuagaagucacacagu

SEQ ID NO: 3196721 - RNA, 17 nt, Human
ccuuagaagucacacag

SEQ ID NO: 3196722 - RNA, 23 nt, Human
ccuuacugaccucaccuaggaag

SEQ ID NO: 3196723 - RNA, 23 nt, Human
ccuguugggccaggagccuccug

SEQ ID NO: 3196724 - RNA, 21 nt, Human
ccuguuaaaagaugaaaauau

SEQ ID NO: 3196725 - RNA, 20 nt, Human
ccuguuaaaagaugaaaaua

SEQ ID NO: 3196726 - RNA, 13 nt, Human
ccuguguuaauuu

SEQ ID NO: 3196727 - RNA, 14 nt, Human
ccuguguuaauuua

SEQ ID NO: 3196728 - RNA, 17 nt, Human
ccuguguuaauuuaagu

SEQ ID NO: 3196729 - RNA, 23 nt, Human
ccuguguuaauuuaaguuuugac

SEQ ID NO: 3196730 - RNA, 14 nt, Human
ccuguuuguuucug

SEQ ID NO: 3196731 - RNA, 22 nt, Human
ccuguuugggaagagcuuagaa

SEQ ID NO: 3196732 - RNA, 18 nt, Human
ccuguuuguuucugaaag

SEQ ID NO: 3196733 - RNA, 23 nt, Human
ccuguuugggaagagcuuagaaa

SEQ ID NO: 3196734 - RNA, 16 nt, Human
ccuguuucugcagcca

SEQ ID NO: 3196735 - RNA, 23 nt, Human
ccuguuucaaguucacaccugca

SEQ ID NO: 3196736 - RNA, 18 nt, Human
ccuguuucagaggcucag

SEQ ID NO: 3196737 - RNA, 21 nt, Human
ccugugugugcgccuacagga

SEQ ID NO: 3196738 - RNA, 20 nt, Human
ccugugugugcgccuacagg

SEQ ID NO: 3196739 - RNA, 22 nt, Human
ccugugucuugcaauggcagcc

SEQ ID NO: 3196740 - RNA, 21 nt, Human
ccugugucuugcaauggcagc

SEQ ID NO: 3196741 - RNA, 19 nt, Human
ccugugucuugcaauggca

SEQ ID NO: 3196742 - RNA, 17 nt, Human
ccugugucuugcaaugg

SEQ ID NO: 3196743 - RNA, 21 nt, Human
ccuguguccaugugaucucau

SEQ ID NO: 3196744 - RNA, 22 nt, Human
ccugugucaguuuauguuuugg

SEQ ID NO: 3196745 - RNA, 17 nt, Human
ccugugucaguuuaugu

SEQ ID NO: 3196746 - RNA, 17 nt, Human
ccuugucauuuuggucu

SEQ ID NO: 3196747 - RNA, 13 nt, Human
ccuuguuccaguu

SEQ ID NO: 3196748 - RNA, 16 nt, Human
ccuuugacgccauccc

SEQ ID NO: 3196749 - RNA, 17 nt, Human
ccuuugacgccauccca

SEQ ID NO: 3196750 - RNA, 18 nt, Human
ccuuugacgccaucccag

SEQ ID NO: 3196751 - RNA, 16 nt, Human
ccuuucuacuuccaag

SEQ ID NO: 3196752 - RNA, 11 nt, Human
ccuuguuucag

SEQ ID NO: 3196753 - RNA, 16 nt, Human
ccuuucuauaauuuua

SEQ ID NO: 3196754 - RNA, 17 nt, Human
ccuuucuauaauuuuac

SEQ ID NO: 3196755 - RNA, 22 nt, Human
ccuugauuggaagggcuuuuca

SEQ ID NO: 3196756 - RNA, 13 nt, Human
ccuugauuggaag

SEQ ID NO: 3196757 - RNA, 19 nt, Human
ccuugauucccuuguuauu

SEQ ID NO: 3196758 - RNA, 12 nt, Human
ccuugggacccc

SEQ ID NO: 3196759 - RNA, 21 nt, Human
ccuuggcuuggcccuggcagc

SEQ ID NO: 3196760 - RNA, 20 nt, Human
ccuuggcuuggcccuggcag

SEQ ID NO: 3196761 - RNA, 19 nt, Human
ccuuggcuuggcccuggca

SEQ ID NO: 3196762 - RNA, 14 nt, Human
ccuugggauccagg

SEQ ID NO: 3196763 - RNA, 22 nt, Human
ccuuggcuuggcccuggcagcc

SEQ ID NO: 3196764 - RNA, 22 nt, Human
ccuuggggucagguugacagga

SEQ ID NO: 3196765 - RNA, 21 nt, Human
ccuugguuaggcauuguggga

SEQ ID NO: 3196766 - RNA, 22 nt, Human
ccuugguuaggcauugugggaa

SEQ ID NO: 3196767 - RNA, 22 nt, Human
ccuuggugucgggcaugacacg

SEQ ID NO: 3196768 - RNA, 21 nt, Human
ccuuggugucgggcaugacac

SEQ ID NO: 3196769 - RNA, 14 nt, Human
ccuucuguggcuca

SEQ ID NO: 3196770 - RNA, 21 nt, Human
ccuucuguggcucacagaacc

SEQ ID NO: 3196771 - RNA, 17 nt, Human
ccuucuguugaugcugu

SEQ ID NO: 3196772 - RNA, 14 nt, Human
ccuucuucauguuc

SEQ ID NO: 3196773 - RNA, 15 nt, Human
ccuucuucauguuca

SEQ ID NO: 3196774 - RNA, 20 nt, Human
ccuucuucauguucaauuau

SEQ ID NO: 3196775 - RNA, 15 nt, Human
ccuucuccuucaccu

SEQ ID NO: 3196776 - RNA, 19 nt, Human
ccuucuccuucaccuuugu

SEQ ID NO: 3196777 - RNA, 19 nt, Human
ccuucuauagcaucacuua

SEQ ID NO: 3196778 - RNA, 21 nt, Human
ccuucuauagcaucacuuaaa

SEQ ID NO: 3196779 - RNA, 15 nt, Human
ccuucggcgccuuaa

SEQ ID NO: 3196780 - RNA, 20 nt, Human
ccuugaaaacuuuaugcuaa

SEQ ID NO: 3196781 - RNA, 13 nt, Human
ccuugacucuuuc

SEQ ID NO: 3196782 - RNA, 22 nt, Human
ccuugaccauucuccaccugcc

SEQ ID NO: 3196783 - RNA, 23 nt, Human
ccuugaccauucuccaccugcca

SEQ ID NO: 3196784 - RNA, 13 nt, Human
ccuugacuuuuua

SEQ ID NO: 3196785 - RNA, 22 nt, Human
ccuugaggggagccaggagggg

SEQ ID NO: 3196786 - RNA, 21 nt, Human
ccuugaggggagccaggaggg

SEQ ID NO: 3196787 - RNA, 18 nt, Human
ccuugaggggagccagga

SEQ ID NO: 3196788 - RNA, 16 nt, Human
ccuugaggggagccag

SEQ ID NO: 3196789 - RNA, 15 nt, Human
ccuuccaagagccug

SEQ ID NO: 3196790 - RNA, 17 nt, Human
ccuuccaagagccugag

SEQ ID NO: 3196791 - RNA, 16 nt, Human
ccuuccaagagccuga

SEQ ID NO: 3196792 - RNA, 22 nt, Human
ccuucauuuggcauuccccacu

SEQ ID NO: 3196793 - RNA, 15 nt, Human
ccuuccucugagccu

SEQ ID NO: 3196794 - RNA, 16 nt, Human
ccuuccucugagccuu

SEQ ID NO: 3196795 - RNA, 21 nt, Human
ccuuccucuccacugccuucg

SEQ ID NO: 3196796 - RNA, 20 nt, Human
ccuuccucugagccuuggga

SEQ ID NO: 3196797 - RNA, 13 nt, Human
ccuuccucugagg

SEQ ID NO: 3196798 - RNA, 14 nt, Human
ccuucggccuccau

SEQ ID NO: 3196799 - RNA, 19 nt, Human
ccuucggccuccauccuga

SEQ ID NO: 3196800 - RNA, 20 nt, Human
ccuucggccuccauccugag

SEQ ID NO: 3196801 - RNA, 19 nt, Human
ccuucauuuggcauucccc

SEQ ID NO: 3196802 - RNA, 14 nt, Human
ccuucagugccaaa

SEQ ID NO: 3196803 - RNA, 11 nt, Human
ccuucagugcc

SEQ ID NO: 3196804 - RNA, 10 nt, Human
ccuucagugc

SEQ ID NO: 3196805 - RNA, 21 nt, Human
ccuucaccuuuguccccaccg

SEQ ID NO: 3196806 - RNA, 14 nt, Human
ccuucacuuaggaa

SEQ ID NO: 3196807 - RNA, 19 nt, Human
ccuucaccuuuguccccac

SEQ ID NO: 3196808 - RNA, 20 nt, Human
ccuucaccuuuguccccacc

SEQ ID NO: 3196809 - RNA, 17 nt, Human
ccuucacagaugggugc

SEQ ID NO: 3196810 - RNA, 18 nt, Human
ccucucauuccagaggaa

SEQ ID NO: 3196811 - RNA, 16 nt, Human
ccucuaggaggucucu

SEQ ID NO: 3196812 - RNA, 12 nt, Human
ccucuagcugaa

SEQ ID NO: 3196813 - RNA, 11 nt, Human
ccucuagcuga

SEQ ID NO: 3196814 - RNA, 23 nt, Human
ccucuagcugaauugagccuaaa

SEQ ID NO: 3196815 - RNA, 16 nt, Human
ccucggugccuuccuc

SEQ ID NO: 3196816 - RNA, 14 nt, Human
ccucgguguggaga

SEQ ID NO: 3196817 - RNA, 12 nt, Human
ccuccuucccac

SEQ ID NO: 3196818 - RNA, 17 nt, Human
ccuccuguggccugcca

SEQ ID NO: 3196819 - RNA, 14 nt, Human
ccuccuguggccug

SEQ ID NO: 3196820 - RNA, 10 nt, Human
ccucuagcug

SEQ ID NO: 3196821 - RNA, 18 nt, Human
ccucuagcccugcccgga

SEQ ID NO: 3196822 - RNA, 17 nt, Human
ccucuagcccugcccgg

SEQ ID NO: 3196823 - RNA, 13 nt, Human
ccucuagcccugc

SEQ ID NO: 3196824 - RNA, 19 nt, Human
ccucuagaauuuuaagccu

SEQ ID NO: 3196825 - RNA, 21 nt, Human
ccucccugccccucccuucaa

SEQ ID NO: 3196826 - RNA, 18 nt, Human
ccucccugccccucccuu

SEQ ID NO: 3196827 - RNA, 10 nt, Human
ccucccuccc

SEQ ID NO: 3196828 - RNA, 14 nt, Human
ccuccucagaucuu

SEQ ID NO: 3196829 - RNA, 24 nt, Human
ccucccugccccucccuucaacca

SEQ ID NO: 3196830 - RNA, 22 nt, Human
ccucccugccccucccuucaac

SEQ ID NO: 3196831 - RNA, 13 nt, Human
ccucccugccccu

SEQ ID NO: 3196832 - RNA, 14 nt, Human
ccucccugcuguca

SEQ ID NO: 3196833 - RNA, 21 nt, Human
ccucccgaguagcugggacua

SEQ ID NO: 3196834 - RNA, 20 nt, Human
ccucccgaguagcugggacu

SEQ ID NO: 3196835 - RNA, 19 nt, Human
ccucccgaguagcugggac

SEQ ID NO: 3196836 - RNA, 14 nt, Human
ccucccggcccugc

SEQ ID NO: 3196837 - RNA, 14 nt, Human
ccuccccuucccag

SEQ ID NO: 3196838 - RNA, 14 nt, Human
ccuccccuugccag

SEQ ID NO: 3196839 - RNA, 22 nt, Human
ccuccccuugccagcugcugag

SEQ ID NO: 3196840 - RNA, 18 nt, Human
ccucccccagccacuccc

SEQ ID NO: 3196841 - RNA, 19 nt, Human
ccuccugacacaccugcag

SEQ ID NO: 3196842 - RNA, 20 nt, Human
ccuccugacacaccugcagc

SEQ ID NO: 3196843 - RNA, 15 nt, Human
ccuccugacacccca

SEQ ID NO: 3196844 - RNA, 19 nt, Human
ccuccugcugccaguacca

SEQ ID NO: 3196845 - RNA, 21 nt, Human
ccuccuggggcgcgugaggcc

SEQ ID NO: 3196846 - RNA, 22 nt, Human
ccuccuggggcgcgugaggccc

SEQ ID NO: 3196847 - RNA, 14 nt, Human
ccuccugggcuaag

SEQ ID NO: 3196848 - RNA, 16 nt, Human
ccuccugcugccagua

SEQ ID NO: 3196849 - RNA, 14 nt, Human
ccuccugcugccag

SEQ ID NO: 3196850 - RNA, 23 nt, Human
ccuccugccucgaacuggcugca

SEQ ID NO: 3196851 - RNA, 17 nt, Human
ccuccugacaccccacu

SEQ ID NO: 3196852 - RNA, 13 nt, Human
ccuccugccucga

SEQ ID NO: 3196853 - RNA, 17 nt, Human
ccucccgaauagcuggg

SEQ ID NO: 3196854 - RNA, 13 nt, Human
ccucauccucaua

SEQ ID NO: 3196855 - RNA, 20 nt, Human
ccucauccucauacccaccc

SEQ ID NO: 3196856 - RNA, 19 nt, Human
ccuccacacccgcgccccg

SEQ ID NO: 3196857 - RNA, 22 nt, Human
ccuccaaucccaccaacccuca

SEQ ID NO: 3196858 - RNA, 23 nt, Human
ccuccaaucccaccaacccucag

SEQ ID NO: 3196859 - RNA, 13 nt, Human
ccucaucaccaac

SEQ ID NO: 3196860 - RNA, 14 nt, Human
ccucaucaccaacg

SEQ ID NO: 3196861 - RNA, 22 nt, Human
ccucauaguaugguggcugggu

SEQ ID NO: 3196862 - RNA, 21 nt, Human
ccucauaguaugguggcuggg

SEQ ID NO: 3196863 - RNA, 13 nt, Human
ccucauacccacc

SEQ ID NO: 3196864 - RNA, 17 nt, Human
ccucauagcccucaccc

SEQ ID NO: 3196865 - RNA, 18 nt, Human
ccucauagcccucacccu

SEQ ID NO: 3196866 - RNA, 20 nt, Human
ccucauaguaugguggcugg

SEQ ID NO: 3196867 - RNA, 21 nt, Human
ccucauagcccucacccuggg

SEQ ID NO: 3196868 - RNA, 22 nt, Human
ccucauagcccucacccugggg

SEQ ID NO: 3196869 - RNA, 20 nt, Human
ccucagucuggcccuuccuu

SEQ ID NO: 3196870 - RNA, 12 nt, Human
ccucauacccac

SEQ ID NO: 3196871 - RNA, 11 nt, Human
ccucagugcca

SEQ ID NO: 3196872 - RNA, 19 nt, Human
ccucagucuggcccuuccu

SEQ ID NO: 3196873 - RNA, 19 nt, Human
ccuaugcagagguccacaa

SEQ ID NO: 3196874 - RNA, 22 nt, Human
ccuccagagcugcggugucucc

SEQ ID NO: 3196875 - RNA, 14 nt, Human
ccuccauccugagg

SEQ ID NO: 3196876 - RNA, 18 nt, Human
ccuccaucuaaacugccc

SEQ ID NO: 3196877 - RNA, 22 nt, Human
ccuccaggugcacaagcuccaa

SEQ ID NO: 3196878 - RNA, 22 nt, Human
ccuccagggcucaacacuguga

SEQ ID NO: 3196879 - RNA, 19 nt, Human
ccuccaggugcacaagcuc

SEQ ID NO: 3196880 - RNA, 21 nt, Human
ccuccaggugcacaagcucca

SEQ ID NO: 3196881 - RNA, 15 nt, Human
ccucccaaagugcug

SEQ ID NO: 3196882 - RNA, 15 nt, Human
ccuccaugcugccuc

SEQ ID NO: 3196883 - RNA, 23 nt, Human
ccuccaugugggcuaguugggcu

SEQ ID NO: 3196884 - RNA, 14 nt, Human
ccuccaugcugccu

SEQ ID NO: 3196885 - RNA, 18 nt, Human
cccugguuuccugcccug

SEQ ID NO: 3196886 - RNA, 19 nt, Human
cccugguuuccugcccugg

SEQ ID NO: 3196887 - RNA, 14 nt, Human
ccgaggccuucucu

SEQ ID NO: 3196888 - RNA, 16 nt, Human
cccugguuuccugccc

SEQ ID NO: 3196889 - RNA, 17 nt, Human
cccugguuuccugcccu

SEQ ID NO: 3196890 - RNA, 17 nt, Human
ccgaguagcugggacua

SEQ ID NO: 3196891 - RNA, 16 nt, Human
ccgaguagcugggacu

SEQ ID NO: 3196892 - RNA, 20 nt, Human
ccgaguagcugggacuacag

SEQ ID NO: 3196893 - RNA, 12 nt, Human
ccgauuuuucca

SEQ ID NO: 3196894 - RNA, 14 nt, Human
ccgcaagcaccauc

SEQ ID NO: 3196895 - RNA, 11 nt, Human
ccgcucagccc

SEQ ID NO: 3196896 - RNA, 13 nt, Human
ccgcucagcccuc

SEQ ID NO: 3196897 - RNA, 12 nt, Human
ccgcucagcccu

SEQ ID NO: 3196898 - RNA, 23 nt, Human
ccgcuaagagggagggagggcuc

SEQ ID NO: 3196899 - RNA, 21 nt, Human
ccgcuaagagggagggagggc

SEQ ID NO: 3196900 - RNA, 15 nt, Human
ccgcggcgggcccug

SEQ ID NO: 3196901 - RNA, 19 nt, Human
ccgcggcgggcccugccca

SEQ ID NO: 3196902 - RNA, 16 nt, Human
ccgcgggcacugccgc

SEQ ID NO: 3196903 - RNA, 14 nt, Human
ccgcacugggcuug

SEQ ID NO: 3196904 - RNA, 17 nt, Human
ccgcgcgcgccccgaaa

SEQ ID NO: 3196905 - RNA, 15 nt, Human
ccggcuuucaggagc

SEQ ID NO: 3196906 - RNA, 20 nt, Human
ccgggaagggggcugggaca

SEQ ID NO: 3196907 - RNA, 17 nt, Human
ccggcuggccuggcccc

SEQ ID NO: 3196908 - RNA, 18 nt, Human
ccggcuggccuggccccu

SEQ ID NO: 3196909 - RNA, 15 nt, Human
ccggcuggccuggcc

SEQ ID NO: 3196910 - RNA, 19 nt, Human
ccgcuuucuacccagcgag

SEQ ID NO: 3196911 - RNA, 12 nt, Human
ccgcuuucuacc

SEQ ID NO: 3196912 - RNA, 15 nt, Human
ccgcuccagagucag

SEQ ID NO: 3196913 - RNA, 12 nt, Human
ccgcuccagagu

SEQ ID NO: 3196914 - RNA, 11 nt, Human
ccgcuccagag

SEQ ID NO: 3196915 - RNA, 21 nt, Human
ccgcucuuggggacauggguc

SEQ ID NO: 3196916 - RNA, 22 nt, Human
ccgcucagcccucccugccccu

SEQ ID NO: 3196917 - RNA, 21 nt, Human
ccgcucagcccucccugcccc

SEQ ID NO: 3196918 - RNA, 19 nt, Human
ccgcucagcccucccugcc

SEQ ID NO: 3196919 - RNA, 15 nt, Human
ccgcucagcccuccc

SEQ ID NO: 3196920 - RNA, 15 nt, Human
ccggguuccagcacc

SEQ ID NO: 3196921 - RNA, 12 nt, Human
ccggguuccagc

SEQ ID NO: 3196922 - RNA, 22 nt, Human
ccgggucaucuguaccucugcc

SEQ ID NO: 3196923 - RNA, 21 nt, Human
ccgggucuuccuacucuucuc

SEQ ID NO: 3196924 - RNA, 13 nt, Human
ccgggucuuccua

SEQ ID NO: 3196925 - RNA, 16 nt, Human
ccgggcguggugguga

SEQ ID NO: 3196926 - RNA, 19 nt, Human
ccgggacguggcaccuccu

SEQ ID NO: 3196927 - RNA, 20 nt, Human
ccgggcuacccgugagcccu

SEQ ID NO: 3196928 - RNA, 20 nt, Human
ccgggcgcgguggcucacgc

SEQ ID NO: 3196929 - RNA, 22 nt, Human
ccgggcucugccucccaucacc

SEQ ID NO: 3196930 - RNA, 19 nt, Human
ccgggcugggagcucugca

SEQ ID NO: 3196931 - RNA, 18 nt, Human
ccgggcugggagcucugc

SEQ ID NO: 3196932 - RNA, 13 nt, Human
ccgggcugggagc

SEQ ID NO: 3196933 - RNA, 15 nt, Human
ccuacaagacacagu

SEQ ID NO: 3196934 - RNA, 14 nt, Human
ccuacaaaucagua

SEQ ID NO: 3196935 - RNA, 15 nt, Human
ccuacaaaucaguaa

SEQ ID NO: 3196936 - RNA, 11 nt, Human
ccuacacagga

SEQ ID NO: 3196937 - RNA, 23 nt, Human
ccuacacaggacagggguuccuu

SEQ ID NO: 3196938 - RNA, 17 nt, Human
ccuacacaggacagggg

SEQ ID NO: 3196939 - RNA, 15 nt, Human
ccuacacaggacagg

SEQ ID NO: 3196940 - RNA, 15 nt, Human
ccuaaaauaagaaua

SEQ ID NO: 3196941 - RNA, 13 nt, Human
ccuaaaaggccca

SEQ ID NO: 3196942 - RNA, 17 nt, Human
ccuaaaaggcccagaga

SEQ ID NO: 3196943 - RNA, 15 nt, Human
ccuaaaaggcccaga

SEQ ID NO: 3196944 - RNA, 14 nt, Human
ccuaaaaggcccag

SEQ ID NO: 3196945 - RNA, 18 nt, Human
ccguguaggaaccugcac

SEQ ID NO: 3196946 - RNA, 20 nt, Human
ccguggggccggggcuucug

SEQ ID NO: 3196947 - RNA, 14 nt, Human
ccuaggcuggaagg

SEQ ID NO: 3196948 - RNA, 16 nt, Human
ccuaggcuggaaggag

SEQ ID NO: 3196949 - RNA, 19 nt, Human
ccuaggcuggaaggaggaa

SEQ ID NO: 3196950 - RNA, 22 nt, Human
ccuaggcuggaaggaggaagaa

SEQ ID NO: 3196951 - RNA, 13 nt, Human
ccuaggggaauga

SEQ ID NO: 3196952 - RNA, 16 nt, Human
ccuaggggaaugaggg

SEQ ID NO: 3196953 - RNA, 22 nt, Human
ccuaggggaaugagggggcuca

SEQ ID NO: 3196954 - RNA, 23 nt, Human
ccuaggggaaugagggggcucag

SEQ ID NO: 3196955 - RNA, 13 nt, Human
ccuacuuucuuca

SEQ ID NO: 3196956 - RNA, 15 nt, Human
ccuacuuccugugac

SEQ ID NO: 3196957 - RNA, 21 nt, Human
ccuaaauccacucugcaggaa

SEQ ID NO: 3196958 - RNA, 19 nt, Human
ccuaccuaacccagaaaau

SEQ ID NO: 3196959 - RNA, 21 nt, Human
ccuacuuccccuuccuaauuc

SEQ ID NO: 3196960 - RNA, 13 nt, Human
ccuacuuccugug

SEQ ID NO: 3196961 - RNA, 20 nt, Human
ccuaccacccgguccccacu

SEQ ID NO: 3196962 - RNA, 21 nt, Human
ccuaccgagucucuucuccac

SEQ ID NO: 3196963 - RNA, 23 nt, Human
ccuaccgagucucuucuccacug

SEQ ID NO: 3196964 - RNA, 22 nt, Human
ccuaccgagucucuucuccacu

SEQ ID NO: 3196965 - RNA, 13 nt, Human
ccuaguuccacca

SEQ ID NO: 3196966 - RNA, 15 nt, Human
ccuaguuaaagaaag

SEQ ID NO: 3196967 - RNA, 19 nt, Human
ccuaguuaaagaaaggaaa

SEQ ID NO: 3196968 - RNA, 20 nt, Human
ccuaguuaaagaaaggaaaa

SEQ ID NO: 3196969 - RNA, 18 nt, Human
ccuaguucaucccuucuc

SEQ ID NO: 3196970 - RNA, 21 nt, Human
ccuaguuccaccaucaagcca

SEQ ID NO: 3196971 - RNA, 23 nt, Human
ccuaguuccaccaucaagccacc

SEQ ID NO: 3196972 - RNA, 22 nt, Human
ccuaguucaucccuucucuucc

SEQ ID NO: 3196973 - RNA, 21 nt, Human
ccuaguucaucccuucucuuc

SEQ ID NO: 3196974 - RNA, 18 nt, Human
ccuauauuguuuucagug

SEQ ID NO: 3196975 - RNA, 22 nt, Human
ccuauauuguuuucaguguaca

SEQ ID NO: 3196976 - RNA, 23 nt, Human
ccuauaccauuuccguaauucuu

SEQ ID NO: 3196977 - RNA, 12 nt, Human
ccuauaccauuu

SEQ ID NO: 3196978 - RNA, 18 nt, Human
ccuauaacacugugaaga

SEQ ID NO: 3196979 - RNA, 20 nt, Human
ccuauaacacugugaagagc

SEQ ID NO: 3196980 - RNA, 18 nt, Human
ccuauaauccuugauaau

SEQ ID NO: 3196981 - RNA, 23 nt, Human
cccuccacucuccucuuccaggc

SEQ ID NO: 3196982 - RNA, 13 nt, Human
cccuccaccugcu

SEQ ID NO: 3196983 - RNA, 15 nt, Human
cccucccccagccac

SEQ ID NO: 3196984 - RNA, 13 nt, Human
cccucccagggag

SEQ ID NO: 3196985 - RNA, 14 nt, Human
cccucccagggagc

SEQ ID NO: 3196986 - RNA, 19 nt, Human
cccuauaucuauaaacacu

SEQ ID NO: 3196987 - RNA, 23 nt, Human
cccucucugaaggaggccaccuc

SEQ ID NO: 3196988 - RNA, 18 nt, Human
cccucucugaaggaggcc

SEQ ID NO: 3196989 - RNA, 12 nt, Human
cccucuggggcu

SEQ ID NO: 3196990 - RNA, 16 nt, Human
cccucuggggcuguuc

SEQ ID NO: 3196991 - RNA, 13 nt, Human
cccugaggcccag

SEQ ID NO: 3196992 - RNA, 15 nt, Human
cccugaaagcccuga

SEQ ID NO: 3196993 - RNA, 14 nt, Human
cccugaggcccaga

SEQ ID NO: 3196994 - RNA, 15 nt, Human
cccugaggcccagag

SEQ ID NO: 3196995 - RNA, 16 nt, Human
cccugaggcccagagg

SEQ ID NO: 3196996 - RNA, 17 nt, Human
cccugaggcccagaggg

SEQ ID NO: 3196997 - RNA, 18 nt, Human
cccugaggcccagagggc

SEQ ID NO: 3196998 - RNA, 19 nt, Human
cccugaggcccagagggcc

SEQ ID NO: 3196999 - RNA, 20 nt, Human
cccugaggcccagagggccu

SEQ ID NO: 3197000 - RNA, 23 nt, Human
cccugaggcccagagggccugca

SEQ ID NO: 3197001 - RNA, 19 nt, Human
cccugcacuugcagacucu

SEQ ID NO: 3197002 - RNA, 12 nt, Human
cccugcacuugc

SEQ ID NO: 3197003 - RNA, 23 nt, Human
cccugcacaaagcccuuccaugu

SEQ ID NO: 3197004 - RNA, 16 nt, Human
cccugcaaagcccagc

SEQ ID NO: 3197005 - RNA, 17 nt, Human
cccugcaaagcccagcu

SEQ ID NO: 3197006 - RNA, 19 nt, Human
cccugcaaagcccagcuug

SEQ ID NO: 3197007 - RNA, 20 nt, Human
cccugcaaagcccagcuuga

SEQ ID NO: 3197008 - RNA, 23 nt, Human
cccugagggcggggugucugucu

SEQ ID NO: 3197009 - RNA, 15 nt, Human
cccugcaaagcccag

SEQ ID NO: 3197010 - RNA, 21 nt, Human
cccugccagacccccuggaga

SEQ ID NO: 3197011 - RNA, 13 nt, Human
cccugccagaccc

SEQ ID NO: 3197012 - RNA, 13 nt, Human
cccugcccaccug

SEQ ID NO: 3197013 - RNA, 14 nt, Human
cccugcccaccugg

SEQ ID NO: 3197014 - RNA, 17 nt, Human
cccugcccaccuggccu

SEQ ID NO: 3197015 - RNA, 18 nt, Human
cccugcccaccuggccuc

SEQ ID NO: 3197016 - RNA, 16 nt, Human
cccugcuggguguggc

SEQ ID NO: 3197017 - RNA, 21 nt, Human
cccugcuggguguggcgcagc

SEQ ID NO: 3197018 - RNA, 17 nt, Human
cccugcuuugggcugcc

SEQ ID NO: 3197019 - RNA, 19 nt, Human
cccugcuuugggcugcccu

SEQ ID NO: 3197020 - RNA, 18 nt, Human
cccugcuuugggcugccc

SEQ ID NO: 3197021 - RNA, 16 nt, Human
cccugcuggccggaca

SEQ ID NO: 3197022 - RNA, 14 nt, Human
cccuggaccccagc

SEQ ID NO: 3197023 - RNA, 18 nt, Human
cccuggaccccagccuca

SEQ ID NO: 3197024 - RNA, 17 nt, Human
cccuggaccccagccuc

SEQ ID NO: 3197025 - RNA, 16 nt, Human
cccuggaccccagccu

SEQ ID NO: 3197026 - RNA, 15 nt, Human
cccuggaccccagcc

SEQ ID NO: 3197027 - RNA, 20 nt, Human
cccugcuuugggcugcccug

SEQ ID NO: 3197028 - RNA, 17 nt, Human
cccuggcuuuucacugc

SEQ ID NO: 3197029 - RNA, 18 nt, Human
cccuggcuuuucacugcu

SEQ ID NO: 3197030 - RNA, 18 nt, Human
cccugggaggcagugaug

SEQ ID NO: 3197031 - RNA, 19 nt, Human
cccuggaccccagccucaa

SEQ ID NO: 3197032 - RNA, 22 nt, Human
cccuggcuuuucacugcuggcu

SEQ ID NO: 3197033 - RNA, 19 nt, Human
cccuggcuuuucacugcug

SEQ ID NO: 3197034 - RNA, 15 nt, Human
cccugguaagaaaaa

SEQ ID NO: 3197035 - RNA, 23 nt, Human
cccuggguuagacugccagcucu

SEQ ID NO: 3197036 - RNA, 22 nt, Human
cccuggguuagacugccagcuc

SEQ ID NO: 3197037 - RNA, 20 nt, Human
cccugguaagaaaaagcaaa

SEQ ID NO: 3197038 - RNA, 16 nt, Human
cccugguggcagcuca

SEQ ID NO: 3197039 - RNA, 17 nt, Human
cccugguggcagcucac

SEQ ID NO: 3197040 - RNA, 15 nt, Human
cccugguggcagcuc

SEQ ID NO: 3197041 - RNA, 23 nt, Human
cccuaaugcgcaggcuggcccug

SEQ ID NO: 3197042 - RNA, 20 nt, Human
cccuacaguugaaaaacagc

SEQ ID NO: 3197043 - RNA, 20 nt, Human
cccguguaggaaccugcaca

SEQ ID NO: 3197044 - RNA, 17 nt, Human
cccuaaugcgcaggcug

SEQ ID NO: 3197045 - RNA, 21 nt, Human
cccuaaugcgcaggcuggccc

SEQ ID NO: 3197046 - RNA, 22 nt, Human
cccuaaugcgcaggcuggcccu

SEQ ID NO: 3197047 - RNA, 18 nt, Human
cccuaccgagucucuucu

SEQ ID NO: 3197048 - RNA, 21 nt, Human
cccuaccgagucucuucucca

SEQ ID NO: 3197049 - RNA, 22 nt, Human
cccgucucugguuccuccccuc

SEQ ID NO: 3197050 - RNA, 15 nt, Human
cccgugggguuccuc

SEQ ID NO: 3197051 - RNA, 14 nt, Human
cccguggggccggg

SEQ ID NO: 3197052 - RNA, 21 nt, Human
cccguggggccggggcuucug

SEQ ID NO: 3197053 - RNA, 12 nt, Human
cccgucucaggu

SEQ ID NO: 3197054 - RNA, 16 nt, Human
cccgggcucugccucc

SEQ ID NO: 3197055 - RNA, 18 nt, Human
cccggugcccaagaauag

SEQ ID NO: 3197056 - RNA, 14 nt, Human
cccgggcucugccu

SEQ ID NO: 3197057 - RNA, 15 nt, Human
cccgggcucugccuc

SEQ ID NO: 3197058 - RNA, 12 nt, Human
cccgggcucugc

SEQ ID NO: 3197059 - RNA, 17 nt, Human
cccgccgcccagcccac

SEQ ID NO: 3197060 - RNA, 22 nt, Human
cccgaguagcugggacuacagg

SEQ ID NO: 3197061 - RNA, 22 nt, Human
cccgcccaggcuuagucacuga

SEQ ID NO: 3197062 - RNA, 19 nt, Human
cccgcugucagccauuccu

SEQ ID NO: 3197063 - RNA, 20 nt, Human
cccgcugucagccauuccug

SEQ ID NO: 3197064 - RNA, 19 nt, Human
cccgccuccaaccccucgc

SEQ ID NO: 3197065 - RNA, 14 nt, Human
cccgccuccaaccc

SEQ ID NO: 3197066 - RNA, 21 nt, Human
cccgaguagcugggacuacag

SEQ ID NO: 3197067 - RNA, 18 nt, Human
cccgaguagcugggacua

SEQ ID NO: 3197068 - RNA, 17 nt, Human
cccgaguagcugggacu

SEQ ID NO: 3197069 - RNA, 16 nt, Human
cccgaguagcugggac

SEQ ID NO: 3197070 - RNA, 15 nt, Human
cccgaguagcuggga

SEQ ID NO: 3197071 - RNA, 14 nt, Human
cccgaguagcuggg

SEQ ID NO: 3197072 - RNA, 13 nt, Human
cccgaguagcugg

SEQ ID NO: 3197073 - RNA, 15 nt, Human
cccagagggccugca

SEQ ID NO: 3197074 - RNA, 21 nt, Human
cccgaggccuucucugaagga

SEQ ID NO: 3197075 - RNA, 14 nt, Human
cccagagggccugc

SEQ ID NO: 3197076 - RNA, 21 nt, Human
cccagaacucugccugcccuu

SEQ ID NO: 3197077 - RNA, 17 nt, Human
cccagaacucugccugc

SEQ ID NO: 3197078 - RNA, 14 nt, Human
cccagaacucugcc

SEQ ID NO: 3197079 - RNA, 16 nt, Human
cccagaggcuggguga

SEQ ID NO: 3197080 - RNA, 17 nt, Human
cccaccacacccucccu

SEQ ID NO: 3197081 - RNA, 19 nt, Human
cccaccgcagacaggacca

SEQ ID NO: 3197082 - RNA, 20 nt, Human
cccaccgcagacaggaccag

SEQ ID NO: 3197083 - RNA, 16 nt, Human
cccaccugcagcuccc

SEQ ID NO: 3197084 - RNA, 19 nt, Human
cccaccucucucacuccuu

SEQ ID NO: 3197085 - RNA, 22 nt, Human
cccaccucucucacuccuugaa

SEQ ID NO: 3197086 - RNA, 19 nt, Human
cccaccucccccacuccca

SEQ ID NO: 3197087 - RNA, 17 nt, Human
cccaccucagccucccg

SEQ ID NO: 3197088 - RNA, 23 nt, Human
cccaccgggcugggagcucugca

SEQ ID NO: 3197089 - RNA, 20 nt, Human
cccacgcuggagugcaguga

SEQ ID NO: 3197090 - RNA, 19 nt, Human
cccacgcuggagugcagug

SEQ ID NO: 3197091 - RNA, 14 nt, Human
cccacgcuggagug

SEQ ID NO: 3197092 - RNA, 23 nt, Human
cccacuugagaauuacccuuuug

SEQ ID NO: 3197093 - RNA, 12 nt, Human
cccacuucugcc

SEQ ID NO: 3197094 - RNA, 14 nt, Human
cccacuucugccag

SEQ ID NO: 3197095 - RNA, 17 nt, Human
cccacuugguuagauga

SEQ ID NO: 3197096 - RNA, 20 nt, Human
cccacgacugcccggcaggg

SEQ ID NO: 3197097 - RNA, 21 nt, Human
cccacgacugcccggcagggu

SEQ ID NO: 3197098 - RNA, 20 nt, Human
cccaccuuggcugcagggag

SEQ ID NO: 3197099 - RNA, 16 nt, Human
cccaccuggccucugc

SEQ ID NO: 3197100 - RNA, 19 nt, Human
cccaccuggccucugcacu

SEQ ID NO: 3197101 - RNA, 21 nt, Human
cccaccuggccucugcacucc

SEQ ID NO: 3197102 - RNA, 17 nt, Human
cccaccuggccucugca

SEQ ID NO: 3197103 - RNA, 16 nt, Human
cccacaggaggugguc

SEQ ID NO: 3197104 - RNA, 21 nt, Human
cccacaggagguggucuggga

SEQ ID NO: 3197105 - RNA, 14 nt, Human
cccaccacacaaca

SEQ ID NO: 3197106 - RNA, 13 nt, Human
cccaccacacaac

SEQ ID NO: 3197107 - RNA, 20 nt, Human
cccacaagaaaugaaagcag

SEQ ID NO: 3197108 - RNA, 13 nt, Human
cccacaagaaaug

SEQ ID NO: 3197109 - RNA, 21 nt, Human
cccacaaaggagagcuagcag

SEQ ID NO: 3197110 - RNA, 16 nt, Human
cccaaugcacuuuguu

SEQ ID NO: 3197111 - RNA, 20 nt, Human
cccaaugcacuuuguucugg

SEQ ID NO: 3197112 - RNA, 23 nt, Human
cuguggagacugcuccugagccc

SEQ ID NO: 3197113 - RNA, 18 nt, Human
cuguggaaggcagagaaa

SEQ ID NO: 3197114 - RNA, 19 nt, Human
cuguggaaggcagagaaau

SEQ ID NO: 3197115 - RNA, 14 nt, Human
cuguggagacugcu

SEQ ID NO: 3197116 - RNA, 22 nt, Human
cuguggagacugcuccugagcc

SEQ ID NO: 3197117 - RNA, 21 nt, Human
cuguggagacugcuccugagc

SEQ ID NO: 3197118 - RNA, 19 nt, Human
cuguggagacugcuccuga

SEQ ID NO: 3197119 - RNA, 17 nt, Human
cuguggagacugcuccu

SEQ ID NO: 3197120 - RNA, 16 nt, Human
cugugccucugccugu

SEQ ID NO: 3197121 - RNA, 11 nt, Human
cugugccucug

SEQ ID NO: 3197122 - RNA, 15 nt, Human
cugugccucugccug

SEQ ID NO: 3197123 - RNA, 14 nt, Human
cugugccucugccu

SEQ ID NO: 3197124 - RNA, 13 nt, Human
cugugccucugcc

SEQ ID NO: 3197125 - RNA, 12 nt, Human
cugugccucugc

SEQ ID NO: 3197126 - RNA, 16 nt, Human
cuguggccugccaguc

SEQ ID NO: 3197127 - RNA, 14 nt, Human
cuguggccugccag

SEQ ID NO: 3197128 - RNA, 19 nt, Human
cuguggccucccugcucua

SEQ ID NO: 3197129 - RNA, 21 nt, Human
cuguggguuucuaaagcugcc

SEQ ID NO: 3197130 - RNA, 21 nt, Human
cugugggcacaggucaggcua

SEQ ID NO: 3197131 - RNA, 18 nt, Human
cugugggcaaaagagugu

SEQ ID NO: 3197132 - RNA, 17 nt, Human
cugugggcacaggucag

SEQ ID NO: 3197133 - RNA, 19 nt, Human
cuguggucggugccagagg

SEQ ID NO: 3197134 - RNA, 22 nt, Human
cuguggguuucuaaagcugcca

SEQ ID NO: 3197135 - RNA, 22 nt, Human
cuguggguuuguggggggaggc

SEQ ID NO: 3197136 - RNA, 18 nt, Human
cuguguguguguaugugg

SEQ ID NO: 3197137 - RNA, 20 nt, Human
cuguguguguguaugugggg

SEQ ID NO: 3197138 - RNA, 18 nt, Human
cuguguguuuaugugugu

SEQ ID NO: 3197139 - RNA, 20 nt, Human
cuguguguuuaugugugugu

SEQ ID NO: 3197140 - RNA, 15 nt, Human
cuguguguguguaug

SEQ ID NO: 3197141 - RNA, 16 nt, Human
cuguguguguguaugu

SEQ ID NO: 3197142 - RNA, 14 nt, Human
cuguguguguguau

SEQ ID NO: 3197143 - RNA, 15 nt, Human
cuguguuaauuuaag

SEQ ID NO: 3197144 - RNA, 16 nt, Human
cuguguuaauuuaagu

SEQ ID NO: 3197145 - RNA, 21 nt, Human
cuguguuaauuuaaguuuuga

SEQ ID NO: 3197146 - RNA, 21 nt, Human
cuguguuauuauagagcagaa

SEQ ID NO: 3197147 - RNA, 22 nt, Human
cuguguuauuauagagcagaaa

SEQ ID NO: 3197148 - RNA, 23 nt, Human
cuguguuauuauagagcagaaau

SEQ ID NO: 3197149 - RNA, 19 nt, Human
cuguuaaaagaugaaaaua

SEQ ID NO: 3197150 - RNA, 16 nt, Human
cuguuaaaagaugaaa

SEQ ID NO: 3197151 - RNA, 15 nt, Human
cuguuaaaagaugaa

SEQ ID NO: 3197152 - RNA, 14 nt, Human
cugugugauuaaaa

SEQ ID NO: 3197153 - RNA, 16 nt, Human
cugugugugaguguga

SEQ ID NO: 3197154 - RNA, 18 nt, Human
cugugugugagugugaau

SEQ ID NO: 3197155 - RNA, 17 nt, Human
cugugguuggcugggaa

SEQ ID NO: 3197156 - RNA, 18 nt, Human
cugugguuggcugggaaa

SEQ ID NO: 3197157 - RNA, 19 nt, Human
cugugguuggcugggaaau

SEQ ID NO: 3197158 - RNA, 20 nt, Human
cugugguuugggggagaaga

SEQ ID NO: 3197159 - RNA, 20 nt, Human
cugugucuuuuuucacuaca

SEQ ID NO: 3197160 - RNA, 23 nt, Human
cugugucuugcaauggcagccuu

SEQ ID NO: 3197161 - RNA, 23 nt, Human
cugugcccacccuccacucuccu

SEQ ID NO: 3197162 - RNA, 17 nt, Human
cugugcccacccuccac

SEQ ID NO: 3197163 - RNA, 19 nt, Human
cugugcccagaauacugau

SEQ ID NO: 3197164 - RNA, 22 nt, Human
cugugccauuuuguauuuuacu

SEQ ID NO: 3197165 - RNA, 15 nt, Human
cugugccaugugcca

SEQ ID NO: 3197166 - RNA, 22 nt, Human
cugugccccuggccuugggauc

SEQ ID NO: 3197167 - RNA, 18 nt, Human
cugugccccuggccuugg

SEQ ID NO: 3197168 - RNA, 15 nt, Human
cugugccccuggccu

SEQ ID NO: 3197169 - RNA, 14 nt, Human
cugugccaugugcc

SEQ ID NO: 3197170 - RNA, 14 nt, Human
cugugccaggugaa

SEQ ID NO: 3197171 - RNA, 16 nt, Human
cugugccagcccagag

SEQ ID NO: 3197172 - RNA, 14 nt, Human
cugugccagcccag

SEQ ID NO: 3197173 - RNA, 23 nt, Human
cugugcagaagggagcuggcucc

SEQ ID NO: 3197174 - RNA, 19 nt, Human
cugugaaaaaaaaaaugcu

SEQ ID NO: 3197175 - RNA, 21 nt, Human
cugucuuuucuuugccaucuc

SEQ ID NO: 3197176 - RNA, 17 nt, Human
cugucuuuucuuugcca

SEQ ID NO: 3197177 - RNA, 14 nt, Human
cugugaaauaucau

SEQ ID NO: 3197178 - RNA, 15 nt, Human
cugugaaauaucauc

SEQ ID NO: 3197179 - RNA, 23 nt, Human
cugugaaauaucaucacguaugu

SEQ ID NO: 3197180 - RNA, 16 nt, Human
cugugaaaggaaagag

SEQ ID NO: 3197181 - RNA, 22 nt, Human
cugugaaaggaaagagggaggu

SEQ ID NO: 3197182 - RNA, 13 nt, Human
cugugagcugcac

SEQ ID NO: 3197183 - RNA, 15 nt, Human
cugugauggggcccu

SEQ ID NO: 3197184 - RNA, 16 nt, Human
cugugauggggcccug

SEQ ID NO: 3197185 - RNA, 21 nt, Human
cugugauggggcccugccucc

SEQ ID NO: 3197186 - RNA, 23 nt, Human
cugugauggggcccugccuccuu

SEQ ID NO: 3197187 - RNA, 20 nt, Human
cugugauggggcccugccuc

SEQ ID NO: 3197188 - RNA, 15 nt, Human
cugugaaaggaaaga

SEQ ID NO: 3197189 - RNA, 23 nt, Human
cugucuuucuugcucccugacug

SEQ ID NO: 3197190 - RNA, 22 nt, Human
cugucuuucuugcucccugacu

SEQ ID NO: 3197191 - RNA, 14 nt, Human
cugucuuucuugcu

SEQ ID NO: 3197192 - RNA, 20 nt, Human
cugucuuucuugcucccuga

SEQ ID NO: 3197193 - RNA, 18 nt, Human
cugucuuucuugcucccu

SEQ ID NO: 3197194 - RNA, 17 nt, Human
cugucuuucuugcuccc

SEQ ID NO: 3197195 - RNA, 15 nt, Human
cugucuuucuugcuc

SEQ ID NO: 3197196 - RNA, 18 nt, Human
cugucuucugcuuuguug

SEQ ID NO: 3197197 - RNA, 16 nt, Human
cugucuucugcuuugu

SEQ ID NO: 3197198 - RNA, 23 nt, Human
cugucuucugcuuuguugugugc

SEQ ID NO: 3197199 - RNA, 18 nt, Human
cugucuucacaacagauu

SEQ ID NO: 3197200 - RNA, 19 nt, Human
cugucuguuguauucauug

SEQ ID NO: 3197201 - RNA, 18 nt, Human
cugucuguuguauucauu

SEQ ID NO: 3197202 - RNA, 18 nt, Human
cugucuucaguaagccgu

SEQ ID NO: 3197203 - RNA, 14 nt, Human
cugucuuaauuuuc

SEQ ID NO: 3197204 - RNA, 20 nt, Human
cugucuucauccccucagaa

SEQ ID NO: 3197205 - RNA, 11 nt, Human
cugucuuccuu

SEQ ID NO: 3197206 - RNA, 12 nt, Human
cugucuuccuuu

SEQ ID NO: 3197207 - RNA, 13 nt, Human
cugucuuccuuug

SEQ ID NO: 3197208 - RNA, 16 nt, Human
cugucuuccuuugcuu

SEQ ID NO: 3197209 - RNA, 19 nt, Human
cugucuuccuuugcuuccc

SEQ ID NO: 3197210 - RNA, 15 nt, Human
cugucuucugcuuug

SEQ ID NO: 3197211 - RNA, 14 nt, Human
cugucuucugcuuu

SEQ ID NO: 3197212 - RNA, 13 nt, Human
cugucuucugcuu

SEQ ID NO: 3197213 - RNA, 18 nt, Human
cugucugagguugggaga

SEQ ID NO: 3197214 - RNA, 18 nt, Human
cugucaauuacaggaagu

SEQ ID NO: 3197215 - RNA, 20 nt, Human
cugucauuugagcagggcuc

SEQ ID NO: 3197216 - RNA, 22 nt, Human
cugucauuugagcagggcucag

SEQ ID NO: 3197217 - RNA, 21 nt, Human
cugucauuugagcagggcuca

SEQ ID NO: 3197218 - RNA, 17 nt, Human
cugucugugaagagcaa

SEQ ID NO: 3197219 - RNA, 16 nt, Human
cugucugucuggucca

SEQ ID NO: 3197220 - RNA, 19 nt, Human
cugucugucccaguuaacu

SEQ ID NO: 3197221 - RNA, 14 nt, Human
cugucugcuccagc

SEQ ID NO: 3197222 - RNA, 12 nt, Human
cugucugcucca

SEQ ID NO: 3197223 - RNA, 19 nt, Human
cugucugcuccagcucugg

SEQ ID NO: 3197224 - RNA, 17 nt, Human
cugucugcuccagcucu

SEQ ID NO: 3197225 - RNA, 19 nt, Human
cugucugcuggucacuucu

SEQ ID NO: 3197226 - RNA, 15 nt, Human
cugucuggcacagcc

SEQ ID NO: 3197227 - RNA, 13 nt, Human
cugucuggcacag

SEQ ID NO: 3197228 - RNA, 18 nt, Human
cugucuggcacagccugc

SEQ ID NO: 3197229 - RNA, 23 nt, Human
cuggugguucacucuuggagccu

SEQ ID NO: 3197230 - RNA, 21 nt, Human
cuggugguucacucuuggagc

SEQ ID NO: 3197231 - RNA, 20 nt, Human
cuggugguucacucuuggag

SEQ ID NO: 3197232 - RNA, 12 nt, Human
cuggugguucac

SEQ ID NO: 3197233 - RNA, 14 nt, Human
cugguggcagcugc

SEQ ID NO: 3197234 - RNA, 18 nt, Human
cugguggcagugggagcu

SEQ ID NO: 3197235 - RNA, 14 nt, Human
cugguggcaguggg

SEQ ID NO: 3197236 - RNA, 20 nt, Human
cugguggcagcucaccucuc

SEQ ID NO: 3197237 - RNA, 15 nt, Human
cugguggcagcugcg

SEQ ID NO: 3197238 - RNA, 17 nt, Human
cugguggcagcucaccu

SEQ ID NO: 3197239 - RNA, 18 nt, Human
cugguggcagcucaccuc

SEQ ID NO: 3197240 - RNA, 16 nt, Human
cugguggcagcucacc

SEQ ID NO: 3197241 - RNA, 11 nt, Human
cugguauuaaa

SEQ ID NO: 3197242 - RNA, 12 nt, Human
cugguauuaaau

SEQ ID NO: 3197243 - RNA, 13 nt, Human
cugguauuaaaug

SEQ ID NO: 3197244 - RNA, 15 nt, Human
cugguauuaaaugcc

SEQ ID NO: 3197245 - RNA, 16 nt, Human
cugguauuaaaugcca

SEQ ID NO: 3197246 - RNA, 19 nt, Human
cugguauuaaaugccaagg

SEQ ID NO: 3197247 - RNA, 21 nt, Human
cugguuagagguucccuuuga

SEQ ID NO: 3197248 - RNA, 23 nt, Human
cugguuaauauuuauaggucacu

SEQ ID NO: 3197249 - RNA, 22 nt, Human
cugguuagagguucccuuugac

SEQ ID NO: 3197250 - RNA, 15 nt, Human
cuguaauuauuugaa

SEQ ID NO: 3197251 - RNA, 14 nt, Human
cuguacagagccca

SEQ ID NO: 3197252 - RNA, 15 nt, Human
cuguacagagcccac

SEQ ID NO: 3197253 - RNA, 18 nt, Human
cuguacagagcccacgcc

SEQ ID NO: 3197254 - RNA, 22 nt, Human
cuguacagagcccacgccccca

SEQ ID NO: 3197255 - RNA, 17 nt, Human
cuguaauuauuugaaug

SEQ ID NO: 3197256 - RNA, 16 nt, Human
cuguaauuauuugaau

SEQ ID NO: 3197257 - RNA, 18 nt, Human
cuguacgucugacaggca

SEQ ID NO: 3197258 - RNA, 16 nt, Human
cuguacgucugacagg

SEQ ID NO: 3197259 - RNA, 15 nt, Human
cuguacgucugacag

SEQ ID NO: 3197260 - RNA, 14 nt, Human
cuguacgucugaca

SEQ ID NO: 3197261 - RNA, 20 nt, Human
cuguacgucugacaggcaau

SEQ ID NO: 3197262 - RNA, 19 nt, Human
cuguacgucugacaggcaa

SEQ ID NO: 3197263 - RNA, 14 nt, Human
cuguacuccuccca

SEQ ID NO: 3197264 - RNA, 21 nt, Human
cuguacuccucccaggcgccc

SEQ ID NO: 3197265 - RNA, 19 nt, Human
cuguacuccucccaggcgc

SEQ ID NO: 3197266 - RNA, 16 nt, Human
cuguacuccucccagg

SEQ ID NO: 3197267 - RNA, 15 nt, Human
cuguacuccucccag

SEQ ID NO: 3197268 - RNA, 19 nt, Human
cuguaucccaugagccuca

SEQ ID NO: 3197269 - RNA, 20 nt, Human
cuguaucccaugagccucag

SEQ ID NO: 3197270 - RNA, 21 nt, Human
cuguauaaaggugugcugugu

SEQ ID NO: 3197271 - RNA, 20 nt, Human
cuguauaaaggugugcugug

SEQ ID NO: 3197272 - RNA, 19 nt, Human
cuguauaaaggugugcugu

SEQ ID NO: 3197273 - RNA, 21 nt, Human
cuguaucccaugagccucagc

SEQ ID NO: 3197274 - RNA, 19 nt, Human
cuguauuagucacagagau

SEQ ID NO: 3197275 - RNA, 17 nt, Human
cuguauuagucacagag

SEQ ID NO: 3197276 - RNA, 12 nt, Human
cuguauucagca

SEQ ID NO: 3197277 - RNA, 18 nt, Human
cuguauucccauaucaaa

SEQ ID NO: 3197278 - RNA, 15 nt, Human
cugucaauuacagga

SEQ ID NO: 3197279 - RNA, 16 nt, Human
cugucaauuacaggaa

SEQ ID NO: 3197280 - RNA, 13 nt, Human
cugucaauuacag

SEQ ID NO: 3197281 - RNA, 20 nt, Human
cuguauuuuguuuuugucuu

SEQ ID NO: 3197282 - RNA, 14 nt, Human
cuguauuguaacua

SEQ ID NO: 3197283 - RNA, 21 nt, Human
cugggauuacaagcgugagcc

SEQ ID NO: 3197284 - RNA, 18 nt, Human
cugggauuacaggcguga

SEQ ID NO: 3197285 - RNA, 23 nt, Human
cugcuccaaccgggaugggagcc

SEQ ID NO: 3197286 - RNA, 17 nt, Human
cugggcccgauuuggua

SEQ ID NO: 3197287 - RNA, 12 nt, Human
cugggccuggcu

SEQ ID NO: 3197288 - RNA, 23 nt, Human
cugggccuggcucccucacucuc

SEQ ID NO: 3197289 - RNA, 22 nt, Human
cugggccuggcucccucacucu

SEQ ID NO: 3197290 - RNA, 20 nt, Human
cugggccuggcucccucacu

SEQ ID NO: 3197291 - RNA, 14 nt, Human
cugggccuggcucc

SEQ ID NO: 3197292 - RNA, 19 nt, Human
cugggcucucgcggccucu

SEQ ID NO: 3197293 - RNA, 20 nt, Human
cugggcucucgcggccucuu

SEQ ID NO: 3197294 - RNA, 20 nt, Human
cugggcugacugggccaggg

SEQ ID NO: 3197295 - RNA, 18 nt, Human
cugggggccucagugcca

SEQ ID NO: 3197296 - RNA, 20 nt, Human
cuggggaaacaacauuuaua

SEQ ID NO: 3197297 - RNA, 21 nt, Human
cugggcuuuuguuuugcuuuu

SEQ ID NO: 3197298 - RNA, 20 nt, Human
cugggcuuuuguuuugcuuu

SEQ ID NO: 3197299 - RNA, 14 nt, Human
cugggggcugggca

SEQ ID NO: 3197300 - RNA, 18 nt, Human
cugggcuugucuguagau

SEQ ID NO: 3197301 - RNA, 22 nt, Human
cugggcuuggggaccagagcug

SEQ ID NO: 3197302 - RNA, 15 nt, Human
cugggcuucaguggc

SEQ ID NO: 3197303 - RNA, 12 nt, Human
cugggcugggca

SEQ ID NO: 3197304 - RNA, 22 nt, Human
cugggcugggcacugcucucac

SEQ ID NO: 3197305 - RNA, 13 nt, Human
cugggcugggcac

SEQ ID NO: 3197306 - RNA, 14 nt, Human
cugguaagaaaaag

SEQ ID NO: 3197307 - RNA, 16 nt, Human
cugguaaaaugaagaa

SEQ ID NO: 3197308 - RNA, 17 nt, Human
cugguaaaaugaagaau

SEQ ID NO: 3197309 - RNA, 19 nt, Human
cugguaaaaugaagaauuu

SEQ ID NO: 3197310 - RNA, 22 nt, Human
cugguaaaaugaagaauuuaaa

SEQ ID NO: 3197311 - RNA, 13 nt, Human
cugguaaaaugaa

SEQ ID NO: 3197312 - RNA, 15 nt, Human
cugguaaaaugaaga

SEQ ID NO: 3197313 - RNA, 23 nt, Human
cugguaagaaaaagcaaaaggca

SEQ ID NO: 3197314 - RNA, 15 nt, Human
cugguaagauuguua

SEQ ID NO: 3197315 - RNA, 17 nt, Human
cugguaagauuguuauu

SEQ ID NO: 3197316 - RNA, 20 nt, Human
cugguaagauuguuauuaaa

SEQ ID NO: 3197317 - RNA, 22 nt, Human
cugguaagauuguuauuaaaug

SEQ ID NO: 3197318 - RNA, 23 nt, Human
cugguaagauuguuauuaaaugu

SEQ ID NO: 3197319 - RNA, 18 nt, Human
cugguaagaaaaagcaaa

SEQ ID NO: 3197320 - RNA, 17 nt, Human
cugguaagaaaaagcaa

SEQ ID NO: 3197321 - RNA, 16 nt, Human
cuggguccccagcccu

SEQ ID NO: 3197322 - RNA, 23 nt, Human
cuggggguucuuucuuccucugc

SEQ ID NO: 3197323 - RNA, 20 nt, Human
cuggggguucuuucuuccuc

SEQ ID NO: 3197324 - RNA, 22 nt, Human
cuuaagcugcaggauucucacc

SEQ ID NO: 3197325 - RNA, 15 nt, Human
cuuaagcugcaggau

SEQ ID NO: 3197326 - RNA, 14 nt, Human
cuuaagcugcagga

SEQ ID NO: 3197327 - RNA, 13 nt, Human
cuuaagcugcagg

SEQ ID NO: 3197328 - RNA, 12 nt, Human
cuuaagcugcag

SEQ ID NO: 3197329 - RNA, 21 nt, Human
cuuaauacuguuauucuuugc

SEQ ID NO: 3197330 - RNA, 19 nt, Human
cuuaauacuguuauucuuu

SEQ ID NO: 3197331 - RNA, 17 nt, Human
cuuaauacuguuauucu

SEQ ID NO: 3197332 - RNA, 21 nt, Human
cuuaauaaucaagagccuuaa

SEQ ID NO: 3197333 - RNA, 13 nt, Human
cuuaauaaucaag

SEQ ID NO: 3197334 - RNA, 14 nt, Human
cuuaauaaucaaga

SEQ ID NO: 3197335 - RNA, 15 nt, Human
cuuaauaaucaagag

SEQ ID NO: 3197336 - RNA, 20 nt, Human
cuuaauaaucaagagccuua

SEQ ID NO: 3197337 - RNA, 18 nt, Human
cuuaagaauuuugagcag

SEQ ID NO: 3197338 - RNA, 15 nt, Human
cuuaagacagcaugu

SEQ ID NO: 3197339 - RNA, 18 nt, Human
cuuaagacagcauguguu

SEQ ID NO: 3197340 - RNA, 19 nt, Human
cuuaagacagcauguguua

SEQ ID NO: 3197341 - RNA, 22 nt, Human
cuuaagaaugaguuucuuagac

SEQ ID NO: 3197342 - RNA, 19 nt, Human
cuuaagaaugaguuucuua

SEQ ID NO: 3197343 - RNA, 14 nt, Human
cuuaaaaaguaacu

SEQ ID NO: 3197344 - RNA, 11 nt, Human
cuuaaaaagua

SEQ ID NO: 3197345 - RNA, 20 nt, Human
cuuaacacuaccaauuuccc

SEQ ID NO: 3197346 - RNA, 15 nt, Human
cuuaacauagccaaa

SEQ ID NO: 3197347 - RNA, 19 nt, Human
cuuaacauagccaaaaugu

SEQ ID NO: 3197348 - RNA, 11 nt, Human
cuuaacaugcu

SEQ ID NO: 3197349 - RNA, 13 nt, Human
cuuaacaugcugu

SEQ ID NO: 3197350 - RNA, 15 nt, Human
cuuaacaugcugugu

SEQ ID NO: 3197351 - RNA, 17 nt, Human
cuuaacaugcuguguaa

SEQ ID NO: 3197352 - RNA, 21 nt, Human
cuuaacaugcuguguaagcug

SEQ ID NO: 3197353 - RNA, 22 nt, Human
cuuaacaugcuguguaagcugu

SEQ ID NO: 3197354 - RNA, 20 nt, Human
cuuaacauagccaaaaugug

SEQ ID NO: 3197355 - RNA, 20 nt, Human
cuuaauuaaaagaauauuuu

SEQ ID NO: 3197356 - RNA, 19 nt, Human
cuuaauuaaaagaauauuu

SEQ ID NO: 3197357 - RNA, 14 nt, Human
cuuaauuauuauaa

SEQ ID NO: 3197358 - RNA, 17 nt, Human
cuuaauuauuauaaaaa

SEQ ID NO: 3197359 - RNA, 19 nt, Human
cuuaauuauuauaaaaaua

SEQ ID NO: 3197360 - RNA, 20 nt, Human
cuuaauuauuauaaaaauau

SEQ ID NO: 3197361 - RNA, 21 nt, Human
cuuaauuauuauaaaaauauu

SEQ ID NO: 3197362 - RNA, 13 nt, Human
cuuaauucaaaua

SEQ ID NO: 3197363 - RNA, 12 nt, Human
cuuaauuuggaa

SEQ ID NO: 3197364 - RNA, 13 nt, Human
cuuaauuuggaaa

SEQ ID NO: 3197365 - RNA, 15 nt, Human
cuuaauuuggaaacu

SEQ ID NO: 3197366 - RNA, 16 nt, Human
cuuaauuuggaaacua

SEQ ID NO: 3197367 - RNA, 18 nt, Human
cuuaauuuggaaacuaau

SEQ ID NO: 3197368 - RNA, 19 nt, Human
cuuaauuuggaaacuaaua

SEQ ID NO: 3197369 - RNA, 20 nt, Human
cuuaauuuggaaacuaauaa

SEQ ID NO: 3197370 - RNA, 21 nt, Human
cuuaauuuggaaacuaauaaa

SEQ ID NO: 3197371 - RNA, 22 nt, Human
cuuaauuuggaaacuaauaaaa

SEQ ID NO: 3197372 - RNA, 23 nt, Human
cuuaauuuggaaacuaauaaaau

SEQ ID NO: 3197373 - RNA, 12 nt, Human
cuuaauucuguu

SEQ ID NO: 3197374 - RNA, 13 nt, Human
cuuaauucuguuc

SEQ ID NO: 3197375 - RNA, 22 nt, Human
cuuaauucuguucugauauuaa

SEQ ID NO: 3197376 - RNA, 23 nt, Human
cuuaauucuguucugauauuaau

SEQ ID NO: 3197377 - RNA, 17 nt, Human
cuuaauuaaaagaauau

SEQ ID NO: 3197378 - RNA, 16 nt, Human
cuuaauuaaaagaaua

SEQ ID NO: 3197379 - RNA, 19 nt, Human
cuuaauauauagcauuuau

SEQ ID NO: 3197380 - RNA, 20 nt, Human
cuuaauauauagcauuuaug

SEQ ID NO: 3197381 - RNA, 18 nt, Human
cuuagacucuaguauuua

SEQ ID NO: 3197382 - RNA, 21 nt, Human
cuuagacucuaguauuuaugg

SEQ ID NO: 3197383 - RNA, 22 nt, Human
cuuagacuuuuccaauauguga

SEQ ID NO: 3197384 - RNA, 21 nt, Human
cuuagacuuuuccaauaugug

SEQ ID NO: 3197385 - RNA, 23 nt, Human
cuuagguuggcaaaaaggcagga

SEQ ID NO: 3197386 - RNA, 21 nt, Human
cuuagguuggcaaaaaggcag

SEQ ID NO: 3197387 - RNA, 21 nt, Human
cuuagaggcaugggcuugcug

SEQ ID NO: 3197388 - RNA, 14 nt, Human
cuuagagcuuuuuu

SEQ ID NO: 3197389 - RNA, 23 nt, Human
cuuaguaagcggcucaagcccag

SEQ ID NO: 3197390 - RNA, 19 nt, Human
cuuagaaucccuguguuaa

SEQ ID NO: 3197391 - RNA, 20 nt, Human
cuuagaaucccuguguuaau

SEQ ID NO: 3197392 - RNA, 18 nt, Human
cuuagaauuauuugcacu

SEQ ID NO: 3197393 - RNA, 16 nt, Human
cuuagaauuauuugca

SEQ ID NO: 3197394 - RNA, 18 nt, Human
cuuagaaguuuguuguga

SEQ ID NO: 3197395 - RNA, 15 nt, Human
cuuagaaucccugug

SEQ ID NO: 3197396 - RNA, 18 nt, Human
cuuagaaucccuguguua

SEQ ID NO: 3197397 - RNA, 20 nt, Human
cuuagaagucacacaguauu

SEQ ID NO: 3197398 - RNA, 17 nt, Human
cuuagaagucacacagu

SEQ ID NO: 3197399 - RNA, 20 nt, Human
cuuagaaaaaccaccaccau

SEQ ID NO: 3197400 - RNA, 23 nt, Human
cuuagaaaaggugauaaaaucau

SEQ ID NO: 3197401 - RNA, 22 nt, Human
cuuagaaaaggugauaaaauca

SEQ ID NO: 3197402 - RNA, 21 nt, Human
cuuagaaaaggugauaaaauc

SEQ ID NO: 3197403 - RNA, 13 nt, Human
cuuaccugccagg

SEQ ID NO: 3197404 - RNA, 20 nt, Human
cuuaccugccaggaagccag

SEQ ID NO: 3197405 - RNA, 18 nt, Human
cuuaccuugguuggaagg

SEQ ID NO: 3197406 - RNA, 19 nt, Human
cuuaccuugaacugaaggc

SEQ ID NO: 3197407 - RNA, 15 nt, Human
cuuacugauuaacuc

SEQ ID NO: 3197408 - RNA, 22 nt, Human
cuguuuuacaaaaaagaaaaga

SEQ ID NO: 3197409 - RNA, 21 nt, Human
cuguuugguuuuaaaauacug

SEQ ID NO: 3197410 - RNA, 17 nt, Human
cuguuugguuuuaaaau

SEQ ID NO: 3197411 - RNA, 22 nt, Human
cuguuugggaagagcuuagaaa

SEQ ID NO: 3197412 - RNA, 20 nt, Human
cuguuugggaagagcuuaga

SEQ ID NO: 3197413 - RNA, 21 nt, Human
cuguuugggaagagcuuagaa

SEQ ID NO: 3197414 - RNA, 21 nt, Human
cuguuuuauuuuaauucaguu

SEQ ID NO: 3197415 - RNA, 16 nt, Human
cuuaaaaaguggaaaa

SEQ ID NO: 3197416 - RNA, 17 nt, Human
cuuaaaaaguggaaaaa

SEQ ID NO: 3197417 - RNA, 16 nt, Human
cuguuuuuaaaaauua

SEQ ID NO: 3197418 - RNA, 14 nt, Human
cuguuuuuaaaaau

SEQ ID NO: 3197419 - RNA, 17 nt, Human
cuguuugcuaagugagg

SEQ ID NO: 3197420 - RNA, 19 nt, Human
cuguuugcuaagugaggau

SEQ ID NO: 3197421 - RNA, 11 nt, Human
cuguuuggaaa

SEQ ID NO: 3197422 - RNA, 17 nt, Human
cuguuuggaaaagacag

SEQ ID NO: 3197423 - RNA, 22 nt, Human
cuguuugcuguugcugauuuua

SEQ ID NO: 3197424 - RNA, 18 nt, Human
cuguuugauauaccaaau

SEQ ID NO: 3197425 - RNA, 21 nt, Human
cuguuugauauaccaaauuaa

SEQ ID NO: 3197426 - RNA, 23 nt, Human
cuguuugauauaccaaauuaaaa

SEQ ID NO: 3197427 - RNA, 15 nt, Human
cuguuugcuguugcu

SEQ ID NO: 3197428 - RNA, 16 nt, Human
cuguuucagaggcuca

SEQ ID NO: 3197429 - RNA, 21 nt, Human
cuguuucaaguucacaccugc

SEQ ID NO: 3197430 - RNA, 21 nt, Human
cuguuuagauuugccauagag

SEQ ID NO: 3197431 - RNA, 22 nt, Human
cuguuuagauuugccauagagu

SEQ ID NO: 3197432 - RNA, 19 nt, Human
cuguuuagauuugccauag

SEQ ID NO: 3197433 - RNA, 17 nt, Human
cuguugcccaggcuggc

SEQ ID NO: 3197434 - RNA, 13 nt, Human
cuguucuuccugg

SEQ ID NO: 3197435 - RNA, 12 nt, Human
cuguucuuccug

SEQ ID NO: 3197436 - RNA, 14 nt, Human
cuguugaccaggca

SEQ ID NO: 3197437 - RNA, 11 nt, Human
cuguugacucu

SEQ ID NO: 3197438 - RNA, 17 nt, Human
cuguugaccaggcaccu

SEQ ID NO: 3197439 - RNA, 15 nt, Human
cuguugaccaggcac

SEQ ID NO: 3197440 - RNA, 22 nt, Human
cuguugacucuaguacugugaa

SEQ ID NO: 3197441 - RNA, 19 nt, Human
cuguugacucuaguacugu

SEQ ID NO: 3197442 - RNA, 23 nt, Human
cuguugaugggaugauugaagaa

SEQ ID NO: 3197443 - RNA, 13 nt, Human
cuguugauuaauu

SEQ ID NO: 3197444 - RNA, 19 nt, Human
cuguugauuaauuucugcc

SEQ ID NO: 3197445 - RNA, 21 nt, Human
cuguugauuaauuucugccau

SEQ ID NO: 3197446 - RNA, 16 nt, Human
cuguugcccaggcugg

SEQ ID NO: 3197447 - RNA, 15 nt, Human
cuguugcccaggcug

SEQ ID NO: 3197448 - RNA, 14 nt, Human
cuguugcccaggcu

SEQ ID NO: 3197449 - RNA, 13 nt, Human
cuguugcccaggc

SEQ ID NO: 3197450 - RNA, 12 nt, Human
cuguugcccagg

SEQ ID NO: 3197451 - RNA, 16 nt, Human
cuguuaauaguucagg

SEQ ID NO: 3197452 - RNA, 15 nt, Human
cuguuacaaaaugua

SEQ ID NO: 3197453 - RNA, 13 nt, Human
cuguuacaaaaug

SEQ ID NO: 3197454 - RNA, 11 nt, Human
cuguuacaaaa

SEQ ID NO: 3197455 - RNA, 21 nt, Human
cuguuaaggcauccacuucac

SEQ ID NO: 3197456 - RNA, 15 nt, Human
cuguuaacuuauuca

SEQ ID NO: 3197457 - RNA, 19 nt, Human
cuguuaacuuauucaaaga

SEQ ID NO: 3197458 - RNA, 19 nt, Human
cuucauuuuuuuuaauuga

SEQ ID NO: 3197459 - RNA, 11 nt, Human
cuucauuugua

SEQ ID NO: 3197460 - RNA, 14 nt, Human
cuuccacaagagcc

SEQ ID NO: 3197461 - RNA, 15 nt, Human
cuuccacaagagccc

SEQ ID NO: 3197462 - RNA, 13 nt, Human
cuuccacaagagc

SEQ ID NO: 3197463 - RNA, 12 nt, Human
cuuccaaagaaa

SEQ ID NO: 3197464 - RNA, 12 nt, Human
cuuccaaagcag

SEQ ID NO: 3197465 - RNA, 14 nt, Human
cuucagugccaaaa

SEQ ID NO: 3197466 - RNA, 13 nt, Human
cuucagucauuaa

SEQ ID NO: 3197467 - RNA, 15 nt, Human
cuucagucauuaaau

SEQ ID NO: 3197468 - RNA, 16 nt, Human
cuucagucauuaaauu

SEQ ID NO: 3197469 - RNA, 12 nt, Human
cuucauguaaau

SEQ ID NO: 3197470 - RNA, 13 nt, Human
cuucauguaaauu

SEQ ID NO: 3197471 - RNA, 22 nt, Human
cuucauguaaauugacuguacu

SEQ ID NO: 3197472 - RNA, 16 nt, Human
cuucauguaauuuuau

SEQ ID NO: 3197473 - RNA, 21 nt, Human
cuucauguaauuuuauuuuaa

SEQ ID NO: 3197474 - RNA, 20 nt, Human
cuucauguucccacuucaaa

SEQ ID NO: 3197475 - RNA, 15 nt, Human
cuucauguucccacu

SEQ ID NO: 3197476 - RNA, 22 nt, Human
cuucauguucaauuauuucccc

SEQ ID NO: 3197477 - RNA, 15 nt, Human
cuucagccugaaaga

SEQ ID NO: 3197478 - RNA, 17 nt, Human
cuucagccucccacagu

SEQ ID NO: 3197479 - RNA, 15 nt, Human
cuucagccucccaca

SEQ ID NO: 3197480 - RNA, 20 nt, Human
cuucagccucccgaguagcu

SEQ ID NO: 3197481 - RNA, 16 nt, Human
cuucagccucccgagu

SEQ ID NO: 3197482 - RNA, 14 nt, Human
cuucagccucccga

SEQ ID NO: 3197483 - RNA, 14 nt, Human
cuucagccucccac

SEQ ID NO: 3197484 - RNA, 13 nt, Human
cuucagccuccca

SEQ ID NO: 3197485 - RNA, 14 nt, Human
cuucaguaagccgu

SEQ ID NO: 3197486 - RNA, 21 nt, Human
cuucaggaaagcagcaguuuu

SEQ ID NO: 3197487 - RNA, 15 nt, Human
cuucagcugacuuuu

SEQ ID NO: 3197488 - RNA, 19 nt, Human
cuucagcugacuuuucugu

SEQ ID NO: 3197489 - RNA, 15 nt, Human
cuucaaauauuuccc

SEQ ID NO: 3197490 - RNA, 12 nt, Human
cuucaacaaggc

SEQ ID NO: 3197491 - RNA, 21 nt, Human
cuucaacaaggcuugcugcag

SEQ ID NO: 3197492 - RNA, 19 nt, Human
cuucaacaaggcuugcugc

SEQ ID NO: 3197493 - RNA, 21 nt, Human
cuuagucacugagacagcccg

SEQ ID NO: 3197494 - RNA, 20 nt, Human
cuuagucacugagacagccc

SEQ ID NO: 3197495 - RNA, 22 nt, Human
cuuagucacugagacagcccgg

SEQ ID NO: 3197496 - RNA, 17 nt, Human
cuuagucaaauguaaug

SEQ ID NO: 3197497 - RNA, 17 nt, Human
cuucaaggauccugagc

SEQ ID NO: 3197498 - RNA, 18 nt, Human
cuucaaggauccugagcc

SEQ ID NO: 3197499 - RNA, 19 nt, Human
cuucaaggauccugagcca

SEQ ID NO: 3197500 - RNA, 20 nt, Human
cuucaaggauccugagccag

SEQ ID NO: 3197501 - RNA, 16 nt, Human
cuucaaggauccugag

SEQ ID NO: 3197502 - RNA, 22 nt, Human
cuucaacaaggcuugcugcaga

SEQ ID NO: 3197503 - RNA, 16 nt, Human
cuucaacucccugccc

SEQ ID NO: 3197504 - RNA, 17 nt, Human
cuucaacugaccagccu

SEQ ID NO: 3197505 - RNA, 23 nt, Human
cuucaacugaccagccuccaugc

SEQ ID NO: 3197506 - RNA, 20 nt, Human
cuucaacugaccagccucca

SEQ ID NO: 3197507 - RNA, 14 nt, Human
cuucacaacagauu

SEQ ID NO: 3197508 - RNA, 12 nt, Human
cuucacaacaga

SEQ ID NO: 3197509 - RNA, 21 nt, Human
cuucaaggauccugagccaga

SEQ ID NO: 3197510 - RNA, 22 nt, Human
cuucaaggauccugagccagau

SEQ ID NO: 3197511 - RNA, 23 nt, Human
cuucaaggauccugagccagauu

SEQ ID NO: 3197512 - RNA, 24 nt, Human
cuucagagacuccugcaggcagcc

SEQ ID NO: 3197513 - RNA, 19 nt, Human
cuucggccuccauccugag

SEQ ID NO: 3197514 - RNA, 14 nt, Human
cuucggacaaaaua

SEQ ID NO: 3197515 - RNA, 15 nt, Human
cuucggacaaaauau

SEQ ID NO: 3197516 - RNA, 22 nt, Human
cuucggagaugaggaguaaaau

SEQ ID NO: 3197517 - RNA, 20 nt, Human
cuucggccuccauccugagg

SEQ ID NO: 3197518 - RNA, 19 nt, Human
cuucgggaggucgaggcag

SEQ ID NO: 3197519 - RNA, 17 nt, Human
cuucggaggaccagggc

SEQ ID NO: 3197520 - RNA, 16 nt, Human
cuucggaggaccaggg

SEQ ID NO: 3197521 - RNA, 19 nt, Human
cuucgguacccaccacaca

SEQ ID NO: 3197522 - RNA, 16 nt, Human
cuucgguacccaccac

SEQ ID NO: 3197523 - RNA, 19 nt, Human
cuucgugacaauguuuaca

SEQ ID NO: 3197524 - RNA, 21 nt, Human
cuucucacugccaugccagcu

SEQ ID NO: 3197525 - RNA, 16 nt, Human
cuucucacugccaugc

SEQ ID NO: 3197526 - RNA, 21 nt, Human
cuucguuaguaaucuguauaa

SEQ ID NO: 3197527 - RNA, 14 nt, Human
cuucucauuacuug

SEQ ID NO: 3197528 - RNA, 22 nt, Human
cuucucauuacuuguugccuau

SEQ ID NO: 3197529 - RNA, 17 nt, Human
cuucucaucuugacaga

SEQ ID NO: 3197530 - RNA, 23 nt, Human
cuucucaucuugacagagccugc

SEQ ID NO: 3197531 - RNA, 20 nt, Human
cuucucaucuugacagagcc

SEQ ID NO: 3197532 - RNA, 20 nt, Human
cuuccuuggacucauuuuaa

SEQ ID NO: 3197533 - RNA, 17 nt, Human
cuucgcuccugugucuu

SEQ ID NO: 3197534 - RNA, 15 nt, Human
cuucgccaccugggu

SEQ ID NO: 3197535 - RNA, 22 nt, Human
cuucgccaagguuguagcaugg

SEQ ID NO: 3197536 - RNA, 16 nt, Human
cuucgcuccugugucu

SEQ ID NO: 3197537 - RNA, 15 nt, Human
cuuccuuugcuuccc

SEQ ID NO: 3197538 - RNA, 13 nt, Human
cuuccuuucuuga

SEQ ID NO: 3197539 - RNA, 16 nt, Human
cuucgauacaccgggc

SEQ ID NO: 3197540 - RNA, 21 nt, Human
cuucgauacaccgggccugga

SEQ ID NO: 3197541 - RNA, 14 nt, Human
cuucgccaccuggg

SEQ ID NO: 3197542 - RNA, 23 nt, Human
cuucccugaacuuccugcuuccu

SEQ ID NO: 3197543 - RNA, 22 nt, Human
cuucccuggguuagacugccag

SEQ ID NO: 3197544 - RNA, 18 nt, Human
cuucccugguaagaaaaa

SEQ ID NO: 3197545 - RNA, 23 nt, Human
cuucccuggguuagacugccagc

SEQ ID NO: 3197546 - RNA, 24 nt, Human
cuuccuaguucaucccuucucuuc

SEQ ID NO: 3197547 - RNA, 17 nt, Human
cuuccuaguucaucccu

SEQ ID NO: 3197548 - RNA, 13 nt, Human
cuucccugguuca

SEQ ID NO: 3197549 - RNA, 12 nt, Human
cuucccugguuc

SEQ ID NO: 3197550 - RNA, 20 nt, Human
cuuccuauaauuuugauagu

SEQ ID NO: 3197551 - RNA, 18 nt, Human
cuuccuauaauuuugaua

SEQ ID NO: 3197552 - RNA, 21 nt, Human
cuuccuauaauuuugauagug

SEQ ID NO: 3197553 - RNA, 14 nt, Human
cuuccuauuucaga

SEQ ID NO: 3197554 - RNA, 16 nt, Human
cuuccuauuucagaag

SEQ ID NO: 3197555 - RNA, 13 nt, Human
cuuccugugacuu

SEQ ID NO: 3197556 - RNA, 16 nt, Human
cuuccugugacuucag

SEQ ID NO: 3197557 - RNA, 14 nt, Human
cuuccucagagggc

SEQ ID NO: 3197558 - RNA, 18 nt, Human
cuuccugcuuccucagag

SEQ ID NO: 3197559 - RNA, 19 nt, Human
cuuccugcuuccucagagg

SEQ ID NO: 3197560 - RNA, 17 nt, Human
cuucccuacaguugaaa

SEQ ID NO: 3197561 - RNA, 15 nt, Human
cuucccccuccaauc

SEQ ID NO: 3197562 - RNA, 12 nt, Human
cuucccccucca

SEQ ID NO: 3197563 - RNA, 16 nt, Human
cuucccauuccauggc

SEQ ID NO: 3197564 - RNA, 12 nt, Human
cuucccauucca

SEQ ID NO: 3197565 - RNA, 14 nt, Human
gaaugccuccugca

SEQ ID NO: 3197566 - RNA, 19 nt, Human
gaaugaaagggcccagaga

SEQ ID NO: 3197567 - RNA, 14 nt, Human
gaaugaaagggccc

SEQ ID NO: 3197568 - RNA, 16 nt, Human
gaaucucaaauaacua

SEQ ID NO: 3197569 - RNA, 21 nt, Human
gaaucucaacaugucuccuac

SEQ ID NO: 3197570 - RNA, 17 nt, Human
gaaucucaacaugucuc

SEQ ID NO: 3197571 - RNA, 16 nt, Human
gaaucuguaugauucu

SEQ ID NO: 3197572 - RNA, 18 nt, Human
gaaucuguaugauucuau

SEQ ID NO: 3197573 - RNA, 17 nt, Human
gaaucuguaugauucua

SEQ ID NO: 3197574 - RNA, 15 nt, Human
gaaucucaaaauuag

SEQ ID NO: 3197575 - RNA, 14 nt, Human
gaauagcugggacu

SEQ ID NO: 3197576 - RNA, 15 nt, Human
gaauagaugcugacu

SEQ ID NO: 3197577 - RNA, 18 nt, Human
gaauagcauguuguagau

SEQ ID NO: 3197578 - RNA, 18 nt, Human
gaauagaagcuaagguuu

SEQ ID NO: 3197579 - RNA, 15 nt, Human
gaauagcugggacua

SEQ ID NO: 3197580 - RNA, 14 nt, Human
gaauagcugaugug

SEQ ID NO: 3197581 - RNA, 12 nt, Human
gaaucacaggcu

SEQ ID NO: 3197582 - RNA, 11 nt, Human
gaaucacaggc

SEQ ID NO: 3197583 - RNA, 23 nt, Human
gaaucaccuaauuaauuucagua

SEQ ID NO: 3197584 - RNA, 20 nt, Human
gaaucaccuaauuaauuuca

SEQ ID NO: 3197585 - RNA, 19 nt, Human
gaaucaccuaauuaauuuc

SEQ ID NO: 3197586 - RNA, 18 nt, Human
gaaucaccuaauuaauuu

SEQ ID NO: 3197587 - RNA, 22 nt, Human
gaaucacaggcugggcugggca

SEQ ID NO: 3197588 - RNA, 18 nt, Human
gaaucacaggcugggcug

SEQ ID NO: 3197589 - RNA, 17 nt, Human
gaaucacaggcugggcu

SEQ ID NO: 3197590 - RNA, 15 nt, Human
gaaucacaggcuggg

SEQ ID NO: 3197591 - RNA, 14 nt, Human
gaaucacaggcugg

SEQ ID NO: 3197592 - RNA, 19 nt, Human
gaaucauuguccagagcug

SEQ ID NO: 3197593 - RNA, 22 nt, Human
gaaucagaagauagucuuggaa

SEQ ID NO: 3197594 - RNA, 12 nt, Human
gaauccaagauu

SEQ ID NO: 3197595 - RNA, 15 nt, Human
gaauccaagauuggu

SEQ ID NO: 3197596 - RNA, 17 nt, Human
gaauccaaaagaaaaac

SEQ ID NO: 3197597 - RNA, 16 nt, Human
gaauccaaaagaaaaa

SEQ ID NO: 3197598 - RNA, 23 nt, Human
gaaucauuuguucaaagcuguug

SEQ ID NO: 3197599 - RNA, 14 nt, Human
gaaucauuuguuca

SEQ ID NO: 3197600 - RNA, 21 nt, Human
gaaucauuguccagagcugcu

SEQ ID NO: 3197601 - RNA, 17 nt, Human
gaaucccuguguuaauu

SEQ ID NO: 3197602 - RNA, 20 nt, Human
gaauaagugccaggauggaa

SEQ ID NO: 3197603 - RNA, 14 nt, Human
gaauaauaaaauca

SEQ ID NO: 3197604 - RNA, 22 nt, Human
gaauaagccauucugacucaua

SEQ ID NO: 3197605 - RNA, 21 nt, Human
gaauaagccauucugacucau

SEQ ID NO: 3197606 - RNA, 20 nt, Human
gaauaagccauucugacuca

SEQ ID NO: 3197607 - RNA, 15 nt, Human
gaauaaauugcuccu

SEQ ID NO: 3197608 - RNA, 16 nt, Human
gaauaaugccuuugua

SEQ ID NO: 3197609 - RNA, 17 nt, Human
gaauaaugccuuuguaa

SEQ ID NO: 3197610 - RNA, 14 nt, Human
gaauaauuacagug

SEQ ID NO: 3197611 - RNA, 24 nt, Human
gaauacuuugcagcacagcugaga

SEQ ID NO: 3197612 - RNA, 17 nt, Human
gaauagaagcuaagguu

SEQ ID NO: 3197613 - RNA, 16 nt, Human
gaauacugauggaauu

SEQ ID NO: 3197614 - RNA, 15 nt, Human
gaauacugauggaau

SEQ ID NO: 3197615 - RNA, 13 nt, Human
gaauacugcuuga

SEQ ID NO: 3197616 - RNA, 14 nt, Human
gaauacugcuugaa

SEQ ID NO: 3197617 - RNA, 17 nt, Human
gaauacugcuugaauaa

SEQ ID NO: 3197618 - RNA, 15 nt, Human
gaauacuugaaccau

SEQ ID NO: 3197619 - RNA, 22 nt, Human
gaauacuugaaccauaaaaugu

SEQ ID NO: 3197620 - RNA, 12 nt, Human
gaauacuugaac

SEQ ID NO: 3197621 - RNA, 14 nt, Human
gaauacuugaacca

SEQ ID NO: 3197622 - RNA, 12 nt, Human
gaaguuucugcc

SEQ ID NO: 3197623 - RNA, 15 nt, Human
gaaguuucaaguuuu

SEQ ID NO: 3197624 - RNA, 21 nt, Human
gaaguuucaaguuuuaaaguu

SEQ ID NO: 3197625 - RNA, 22 nt, Human
gaaguuucaaguuuuaaaguuc

SEQ ID NO: 3197626 - RNA, 14 nt, Human
gaagguuuuugaua

SEQ ID NO: 3197627 - RNA, 19 nt, Human
gaagguuuuuguaaagauu

SEQ ID NO: 3197628 - RNA, 14 nt, Human
gaauaaagacaccu

SEQ ID NO: 3197629 - RNA, 19 nt, Human
gaauaaacuagauuacauu

SEQ ID NO: 3197630 - RNA, 16 nt, Human
gaauaaacuagauuac

SEQ ID NO: 3197631 - RNA, 14 nt, Human
gaauaaacaccacu

SEQ ID NO: 3197632 - RNA, 12 nt, Human
gaauaaacuaga

SEQ ID NO: 3197633 - RNA, 18 nt, Human
gaauaaaggcagcuguug

SEQ ID NO: 3197634 - RNA, 14 nt, Human
gaauaaaggcagcu

SEQ ID NO: 3197635 - RNA, 23 nt, Human
gaaggacccggaggggccuggca

SEQ ID NO: 3197636 - RNA, 18 nt, Human
gaaggaaacccagcucug

SEQ ID NO: 3197637 - RNA, 14 nt, Human
gaaggaaacccagc

SEQ ID NO: 3197638 - RNA, 17 nt, Human
gaaggaaacccagcucu

SEQ ID NO: 3197639 - RNA, 24 nt, Human
gaaggaccuucacucuaagauguu

SEQ ID NO: 3197640 - RNA, 16 nt, Human
gaaggaccuucacucu

SEQ ID NO: 3197641 - RNA, 14 nt, Human
gaaggccccgccca

SEQ ID NO: 3197642 - RNA, 15 nt, Human
gaaggccccgcccag

SEQ ID NO: 3197643 - RNA, 16 nt, Human
gaaggccccgcccagg

SEQ ID NO: 3197644 - RNA, 14 nt, Human
gaagggguuuucuu

SEQ ID NO: 3197645 - RNA, 13 nt, Human
gaagguaaaaagu

SEQ ID NO: 3197646 - RNA, 14 nt, Human
gaaggcagggaggg

SEQ ID NO: 3197647 - RNA, 14 nt, Human
gaaggcccagcacc

SEQ ID NO: 3197648 - RNA, 23 nt, Human
gaaggcccagcaccacccuccuu

SEQ ID NO: 3197649 - RNA, 22 nt, Human
gaaggcccagcaccacccuccu

SEQ ID NO: 3197650 - RNA, 13 nt, Human
gaaggcagggagg

SEQ ID NO: 3197651 - RNA, 13 nt, Human
gaaggcagagaaa

SEQ ID NO: 3197652 - RNA, 14 nt, Human
gaaggcagagaaau

SEQ ID NO: 3197653 - RNA, 18 nt, Human
gaaggcagagaaaucuaa

SEQ ID NO: 3197654 - RNA, 18 nt, Human
gaaggcagaaagcaaaau

SEQ ID NO: 3197655 - RNA, 15 nt, Human
gaaggcagaaagcaa

SEQ ID NO: 3197656 - RNA, 15 nt, Human
gaagccagcaggcuc

SEQ ID NO: 3197657 - RNA, 16 nt, Human
gaagccagcaggcucu

SEQ ID NO: 3197658 - RNA, 21 nt, Human
gaagacucauucuucuguacg

SEQ ID NO: 3197659 - RNA, 19 nt, Human
gaagacucauucuucugua

SEQ ID NO: 3197660 - RNA, 15 nt, Human
gaagacuccagaaau

SEQ ID NO: 3197661 - RNA, 14 nt, Human
gaagacuccagaaa

SEQ ID NO: 3197662 - RNA, 12 nt, Human
gaagcccagaau

SEQ ID NO: 3197663 - RNA, 10 nt, Human
gaagcccaga

SEQ ID NO: 3197664 - RNA, 14 nt, Human
gaagccagggcccg

SEQ ID NO: 3197665 - RNA, 23 nt, Human
gaagccagcaggcucucaggcca

SEQ ID NO: 3197666 - RNA, 23 nt, Human
gaagccagcugccuaggauucac

SEQ ID NO: 3197667 - RNA, 18 nt, Human
gaagccagcugccuagga

SEQ ID NO: 3197668 - RNA, 11 nt, Human
gaaggaaaaau

SEQ ID NO: 3197669 - RNA, 15 nt, Human
gaaggaaaaauucaa

SEQ ID NO: 3197670 - RNA, 13 nt, Human
gaaggaaaaauuc

SEQ ID NO: 3197671 - RNA, 22 nt, Human
gaagcuucuggugaccuuccaa

SEQ ID NO: 3197672 - RNA, 10 nt, Human
gaagccuuug

SEQ ID NO: 3197673 - RNA, 11 nt, Human
gaagccuuugu

SEQ ID NO: 3197674 - RNA, 20 nt, Human
gaagcccaggaaaggcucca

SEQ ID NO: 3197675 - RNA, 19 nt, Human
gaagcccaggaaaggcucc

SEQ ID NO: 3197676 - RNA, 21 nt, Human
gaagcccaggaaaggcuccag

SEQ ID NO: 3197677 - RNA, 22 nt, Human
gaagcccaggaaaggcuccagg

SEQ ID NO: 3197678 - RNA, 21 nt, Human
gaagccgcuggggccaguugg

SEQ ID NO: 3197679 - RNA, 13 nt, Human
gaacuauuagagc

SEQ ID NO: 3197680 - RNA, 16 nt, Human
gaacuaucuucaucug

SEQ ID NO: 3197681 - RNA, 14 nt, Human
gaacuaucuucauc

SEQ ID NO: 3197682 - RNA, 20 nt, Human
gaacuaggaaggcacuucug

SEQ ID NO: 3197683 - RNA, 13 nt, Human
gaacuaucuucau

SEQ ID NO: 3197684 - RNA, 12 nt, Human
gaacuaucuuca

SEQ ID NO: 3197685 - RNA, 13 nt, Human
gaacguucucuuu

SEQ ID NO: 3197686 - RNA, 23 nt, Human
gaacguagucggcacagccuggu

SEQ ID NO: 3197687 - RNA, 17 nt, Human
gaaccugugagcugcac

SEQ ID NO: 3197688 - RNA, 19 nt, Human
gaaccugugagcugcacca

SEQ ID NO: 3197689 - RNA, 23 nt, Human
gaaccugggaaagagauuuaaac

SEQ ID NO: 3197690 - RNA, 22 nt, Human
gaaccugggaaagagauuuaaa

SEQ ID NO: 3197691 - RNA, 17 nt, Human
gaaccugcacacgagca

SEQ ID NO: 3197692 - RNA, 22 nt, Human
gaacagaacucgguguccccac

SEQ ID NO: 3197693 - RNA, 21 nt, Human
gaaccacaucuugcucugcug

SEQ ID NO: 3197694 - RNA, 20 nt, Human
gaaccacaucuugcucugcu

SEQ ID NO: 3197695 - RNA, 16 nt, Human
gaacagacuggaagca

SEQ ID NO: 3197696 - RNA, 15 nt, Human
gaacagacuggaagc

SEQ ID NO: 3197697 - RNA, 17 nt, Human
gaaccaccacacccagc

SEQ ID NO: 3197698 - RNA, 16 nt, Human
gaaccaccacacccag

SEQ ID NO: 3197699 - RNA, 12 nt, Human
gaaccugacccc

SEQ ID NO: 3197700 - RNA, 11 nt, Human
gaaccugaccc

SEQ ID NO: 3197701 - RNA, 23 nt, Human
gaacuugguucccauuugcuccu

SEQ ID NO: 3197702 - RNA, 12 nt, Human
gaacuugguucc

SEQ ID NO: 3197703 - RNA, 15 nt, Human
gaacuuggcgcugcc

SEQ ID NO: 3197704 - RNA, 16 nt, Human
gaacuuggcgcugccc

SEQ ID NO: 3197705 - RNA, 13 nt, Human
gaacuuggcgcug

SEQ ID NO: 3197706 - RNA, 14 nt, Human
gaacuugcugccuc

SEQ ID NO: 3197707 - RNA, 13 nt, Human
gaacuugcugccu

SEQ ID NO: 3197708 - RNA, 12 nt, Human
gaacuugcugcc

SEQ ID NO: 3197709 - RNA, 20 nt, Human
gaagaaacagcuaugagagg

SEQ ID NO: 3197710 - RNA, 16 nt, Human
gaagaaacagcuauga

SEQ ID NO: 3197711 - RNA, 12 nt, Human
gaagaaaauacu

SEQ ID NO: 3197712 - RNA, 17 nt, Human
gaagaaaauacuuaaau

SEQ ID NO: 3197713 - RNA, 13 nt, Human
gaagaaaauacuu

SEQ ID NO: 3197714 - RNA, 20 nt, Human
gaagaaaauacuuaaauguu

SEQ ID NO: 3197715 - RNA, 19 nt, Human
gaagaaaauacuuaaaugu

SEQ ID NO: 3197716 - RNA, 21 nt, Human
gaagaaaauguucuuccaguu

SEQ ID NO: 3197717 - RNA, 19 nt, Human
gaagaaaacacuguuauca

SEQ ID NO: 3197718 - RNA, 18 nt, Human
gaagaaaacacuguuauc

SEQ ID NO: 3197719 - RNA, 17 nt, Human
gaagaaaacacuguuau

SEQ ID NO: 3197720 - RNA, 13 nt, Human
gaacuuggaagca

SEQ ID NO: 3197721 - RNA, 15 nt, Human
gaacuuggaagcaca

SEQ ID NO: 3197722 - RNA, 14 nt, Human
gaacucccuuucaa

SEQ ID NO: 3197723 - RNA, 16 nt, Human
gaacucaugugauuua

SEQ ID NO: 3197724 - RNA, 22 nt, Human
gaacuggguacuuguggacaca

SEQ ID NO: 3197725 - RNA, 20 nt, Human
gaacuuaacaugcuguguaa

SEQ ID NO: 3197726 - RNA, 22 nt, Human
gaacuuaacaugcuguguaagc

SEQ ID NO: 3197727 - RNA, 20 nt, Human
gaaauugguaccuugcacac

SEQ ID NO: 3197728 - RNA, 16 nt, Human
gaaauugguaccuugc

SEQ ID NO: 3197729 - RNA, 19 nt, Human
gaaauugcauuuccugaca

SEQ ID NO: 3197730 - RNA, 17 nt, Human
gaaauugagcugcuuuu

SEQ ID NO: 3197731 - RNA, 23 nt, Human
gaaauugagcugcuuuuuuugaa

SEQ ID NO: 3197732 - RNA, 18 nt, Human
gaaauucuguuuuuaaaa

SEQ ID NO: 3197733 - RNA, 18 nt, Human
gaaauucuuguuauggua

SEQ ID NO: 3197734 - RNA, 22 nt, Human
gaaauucuuguuaugguagaaa

SEQ ID NO: 3197735 - RNA, 16 nt, Human
gaaauucuguuuuuaa

SEQ ID NO: 3197736 - RNA, 15 nt, Human
gaaauucuguuuuua

SEQ ID NO: 3197737 - RNA, 14 nt, Human
gaaauucuguuuuu

SEQ ID NO: 3197738 - RNA, 13 nt, Human
gaaauucuguuuu

SEQ ID NO: 3197739 - RNA, 12 nt, Human
gaaauucuguuu

SEQ ID NO: 3197740 - RNA, 17 nt, Human
gaaauugaaaaguuauu

SEQ ID NO: 3197741 - RNA, 15 nt, Human
gaaauugaaaaguua

SEQ ID NO: 3197742 - RNA, 17 nt, Human
gaaauuuguuauaauga

SEQ ID NO: 3197743 - RNA, 14 nt, Human
gaaauuuuagaaau

SEQ ID NO: 3197744 - RNA, 21 nt, Human
gaaauugguaccuugcacaca

SEQ ID NO: 3197745 - RNA, 20 nt, Human
gaaaugggcagagcagagac

SEQ ID NO: 3197746 - RNA, 17 nt, Human
gaaaugguauccagaau

SEQ ID NO: 3197747 - RNA, 14 nt, Human
gaaaugggcagagc

SEQ ID NO: 3197748 - RNA, 23 nt, Human
gaaauuaacuuacccuguauauc

SEQ ID NO: 3197749 - RNA, 13 nt, Human
gaaauuaagaaga

SEQ ID NO: 3197750 - RNA, 16 nt, Human
gaaauuaagaagaaac

SEQ ID NO: 3197751 - RNA, 15 nt, Human
gaaauuaagaagaaa

SEQ ID NO: 3197752 - RNA, 20 nt, Human
gaaauucuauuuauaauaca

SEQ ID NO: 3197753 - RNA, 16 nt, Human
gaaauguuugcugaac

SEQ ID NO: 3197754 - RNA, 18 nt, Human
gaaacauuggaagcaggu

SEQ ID NO: 3197755 - RNA, 20 nt, Human
gaaacaugacucguauaugu

SEQ ID NO: 3197756 - RNA, 21 nt, Human
gaaacauguugccaaaauggu

SEQ ID NO: 3197757 - RNA, 14 nt, Human
gaaacauuggaagc

SEQ ID NO: 3197758 - RNA, 13 nt, Human
gaaacauuggaag

SEQ ID NO: 3197759 - RNA, 21 nt, Human
gaaacauugcuuuuaaaacua

SEQ ID NO: 3197760 - RNA, 18 nt, Human
gaaacauugcuuuuaaaa

SEQ ID NO: 3197761 - RNA, 17 nt, Human
gaaacauugcuuuuaaa

SEQ ID NO: 3197762 - RNA, 16 nt, Human
gaaacauugcuuuuaa

SEQ ID NO: 3197763 - RNA, 13 nt, Human
gaaacauugcuuu

SEQ ID NO: 3197764 - RNA, 23 nt, Human
gaaacauguugccaaaauggugg

SEQ ID NO: 3197765 - RNA, 15 nt, Human
gaaacaucauagaaa

SEQ ID NO: 3197766 - RNA, 17 nt, Human
gaaauaacacagcaguu

SEQ ID NO: 3197767 - RNA, 20 nt, Human
gaaauaauaaaaaauuucag

SEQ ID NO: 3197768 - RNA, 19 nt, Human
gaaauaauaaaaaauuuca

SEQ ID NO: 3197769 - RNA, 15 nt, Human
gaaauaauaaaaaau

SEQ ID NO: 3197770 - RNA, 13 nt, Human
gaaauaauaaaaa

SEQ ID NO: 3197771 - RNA, 18 nt, Human
gaaauaauuuuauuccag

SEQ ID NO: 3197772 - RNA, 21 nt, Human
gaaauaucugaaaauguaugu

SEQ ID NO: 3197773 - RNA, 15 nt, Human
gaaauaucugugaaa

SEQ ID NO: 3197774 - RNA, 16 nt, Human
gaaauaucugugaaau

SEQ ID NO: 3197775 - RNA, 18 nt, Human
gaaauaucugugaaauau

SEQ ID NO: 3197776 - RNA, 20 nt, Human
gaaauaucugugaaauauca

SEQ ID NO: 3197777 - RNA, 21 nt, Human
gaaauaucugugaaauaucau

SEQ ID NO: 3197778 - RNA, 11 nt, Human
gaaauauuaaa

SEQ ID NO: 3197779 - RNA, 15 nt, Human
gaaauauuaaaagaa

SEQ ID NO: 3197780 - RNA, 20 nt, Human
gaaauauguauucuguaaaa

SEQ ID NO: 3197781 - RNA, 16 nt, Human
gaaauauguauucugu

SEQ ID NO: 3197782 - RNA, 13 nt, Human
gaaauauaauuga

SEQ ID NO: 3197783 - RNA, 22 nt, Human
gaaauaguguggaaauuaagaa

SEQ ID NO: 3197784 - RNA, 20 nt, Human
gaaauagucauuugugaauu

SEQ ID NO: 3197785 - RNA, 19 nt, Human
gaaauagucauuugugaau

SEQ ID NO: 3197786 - RNA, 20 nt, Human
gaaauaucugaaaauguaug

SEQ ID NO: 3197787 - RNA, 23 nt, Human
gaaauaguucugugacuaggaaa

SEQ ID NO: 3197788 - RNA, 17 nt, Human
gaaauaguucugugacu

SEQ ID NO: 3197789 - RNA, 13 nt, Human
gaaauaguucugu

SEQ ID NO: 3197790 - RNA, 22 nt, Human
gaaauacagauaaaugauucaa

SEQ ID NO: 3197791 - RNA, 19 nt, Human
gaaauacagauaaaugauu

SEQ ID NO: 3197792 - RNA, 17 nt, Human
gaaauacagacuggaug

SEQ ID NO: 3197793 - RNA, 20 nt, Human
gaaauacuagauuugggaga

SEQ ID NO: 3197794 - RNA, 20 nt, Human
gaaauaggagggaaaccuuu

SEQ ID NO: 3197795 - RNA, 13 nt, Human
gaaauagacaaaa

SEQ ID NO: 3197796 - RNA, 19 nt, Human
gaaauagacaaaaaguaua

SEQ ID NO: 3197797 - RNA, 21 nt, Human
gaaauagacaaaaaguauauu

SEQ ID NO: 3197798 - RNA, 18 nt, Human
gaaauagacagcaugaga

SEQ ID NO: 3197799 - RNA, 13 nt, Human
cuuuccaaauuau

SEQ ID NO: 3197800 - RNA, 15 nt, Human
cuuuccaaauuauuu

SEQ ID NO: 3197801 - RNA, 20 nt, Human
cuuuccaaauuauuucuuaa

SEQ ID NO: 3197802 - RNA, 16 nt, Human
cuuuccaauucuccuu

SEQ ID NO: 3197803 - RNA, 15 nt, Human
cuuuccaauucuccu

SEQ ID NO: 3197804 - RNA, 18 nt, Human
cuuuccaauucuccuuua

SEQ ID NO: 3197805 - RNA, 17 nt, Human
cuuuccaauucuccuuu

SEQ ID NO: 3197806 - RNA, 22 nt, Human
cuuuccaaaugcccagcuuaaa

SEQ ID NO: 3197807 - RNA, 18 nt, Human
cuuuccaaaugcccagcu

SEQ ID NO: 3197808 - RNA, 19 nt, Human
cuuuccaaaugcccagcuu

SEQ ID NO: 3197809 - RNA, 16 nt, Human
cuuuccaaaugcccag

SEQ ID NO: 3197810 - RNA, 21 nt, Human
cuuucauuuugcuuuaauuuu

SEQ ID NO: 3197811 - RNA, 14 nt, Human
cuuucauuuugcuu

SEQ ID NO: 3197812 - RNA, 19 nt, Human
cuuucauuuugcuuuaauu

SEQ ID NO: 3197813 - RNA, 17 nt, Human
cuuucauuuugcuuuaa

SEQ ID NO: 3197814 - RNA, 16 nt, Human
cuuucauuuugcuuua

SEQ ID NO: 3197815 - RNA, 15 nt, Human
cuuucauuuugcuuu

SEQ ID NO: 3197816 - RNA, 18 nt, Human
cuuucauuugcuuuggaa

SEQ ID NO: 3197817 - RNA, 14 nt, Human
cuuucauuugcuuu

SEQ ID NO: 3197818 - RNA, 16 nt, Human
cuuucauauuuuaaac

SEQ ID NO: 3197819 - RNA, 23 nt, Human
cuuucauauuuuaaacagaggau

SEQ ID NO: 3197820 - RNA, 19 nt, Human
cuuucauauuuuaaacaga

SEQ ID NO: 3197821 - RNA, 14 nt, Human
cuuucauuugcuau

SEQ ID NO: 3197822 - RNA, 19 nt, Human
cuuuaguuauaaaggaauc

SEQ ID NO: 3197823 - RNA, 20 nt, Human
cuuuauucuggcagaggagg

SEQ ID NO: 3197824 - RNA, 13 nt, Human
cuuuauuauuuau

SEQ ID NO: 3197825 - RNA, 14 nt, Human
cuuuauuauuuauu

SEQ ID NO: 3197826 - RNA, 12 nt, Human
cuuuauuauuua

SEQ ID NO: 3197827 - RNA, 23 nt, Human
cuuuauuuguguucuuuuuuccc

SEQ ID NO: 3197828 - RNA, 20 nt, Human
cuuuauuuguacuuuuuccu

SEQ ID NO: 3197829 - RNA, 23 nt, Human
cuuuauugccaaaacccagcugc

SEQ ID NO: 3197830 - RNA, 22 nt, Human
cuuuauugccaaaacccagcug

SEQ ID NO: 3197831 - RNA, 21 nt, Human
cuuuauugccaaaacccagcu

SEQ ID NO: 3197832 - RNA, 19 nt, Human
cuuuauugccaaaacccag

SEQ ID NO: 3197833 - RNA, 14 nt, Human
cuuuauugaaauuc

SEQ ID NO: 3197834 - RNA, 17 nt, Human
cuuuauugauaucucca

SEQ ID NO: 3197835 - RNA, 13 nt, Human
cuuuauugucugu

SEQ ID NO: 3197836 - RNA, 14 nt, Human
cuuuauugucugua

SEQ ID NO: 3197837 - RNA, 15 nt, Human
cuuuauugucuguaa

SEQ ID NO: 3197838 - RNA, 18 nt, Human
cuuuauugucuguaaauc

SEQ ID NO: 3197839 - RNA, 21 nt, Human
cuuguguguuuauugucaaag

SEQ ID NO: 3197840 - RNA, 21 nt, Human
cuuguuguuuguaacaagaaa

SEQ ID NO: 3197841 - RNA, 22 nt, Human
cuuguugguucaccauugagac

SEQ ID NO: 3197842 - RNA, 20 nt, Human
cuuguguguuuauugucaaa

SEQ ID NO: 3197843 - RNA, 22 nt, Human
cuuguggcuccacacacacaaa

SEQ ID NO: 3197844 - RNA, 21 nt, Human
cuuguggacacagcucuucuc

SEQ ID NO: 3197845 - RNA, 21 nt, Human
cuugggggcucagcaaggcca

SEQ ID NO: 3197846 - RNA, 20 nt, Human
cuugggggcucagcaaggcc

SEQ ID NO: 3197847 - RNA, 17 nt, Human
cuugggggcucagcaag

SEQ ID NO: 3197848 - RNA, 15 nt, Human
cuugggggcucagca

SEQ ID NO: 3197849 - RNA, 18 nt, Human
cuuuaaagggauggcaag

SEQ ID NO: 3197850 - RNA, 14 nt, Human
cuuuaaacugucgu

SEQ ID NO: 3197851 - RNA, 20 nt, Human
cuuuaaacugucgugucaua

SEQ ID NO: 3197852 - RNA, 18 nt, Human
cuuuacuugucuuucugg

SEQ ID NO: 3197853 - RNA, 16 nt, Human
cuuuacuugucuuucu

SEQ ID NO: 3197854 - RNA, 22 nt, Human
cuuuagaaauaaaccuuaauau

SEQ ID NO: 3197855 - RNA, 23 nt, Human
cuuuagaaauaaaccuuaauauu

SEQ ID NO: 3197856 - RNA, 20 nt, Human
cuuuagaaacacauaauuaa

SEQ ID NO: 3197857 - RNA, 15 nt, Human
cuuuagaaaaggcau

SEQ ID NO: 3197858 - RNA, 18 nt, Human
cuuuagaaacacauaauu

SEQ ID NO: 3197859 - RNA, 14 nt, Human
cuuuagaaaaggca

SEQ ID NO: 3197860 - RNA, 20 nt, Human
cuuuacuugucuuucugggg

SEQ ID NO: 3197861 - RNA, 21 nt, Human
cuuguuuuuuuuuuccacuua

SEQ ID NO: 3197862 - RNA, 23 nt, Human
cuuguuuuuguuuuuguuuuguu

SEQ ID NO: 3197863 - RNA, 20 nt, Human
cuuguuuuuuuuuuccacuu

SEQ ID NO: 3197864 - RNA, 19 nt, Human
cuuguuuuuuuuuuccacu

SEQ ID NO: 3197865 - RNA, 17 nt, Human
cuuguuuuuguuuuugu

SEQ ID NO: 3197866 - RNA, 23 nt, Human
cuuguuuuuguaaagaaaaauau

SEQ ID NO: 3197867 - RNA, 22 nt, Human
cuuguuuuuguaaagaaaaaua

SEQ ID NO: 3197868 - RNA, 21 nt, Human
cuuguuuuuguaaagaaaaau

SEQ ID NO: 3197869 - RNA, 20 nt, Human
cuuguuuuuguaaagaaaaa

SEQ ID NO: 3197870 - RNA, 16 nt, Human
cuuguuuuuguaaaga

SEQ ID NO: 3197871 - RNA, 15 nt, Human
cuuguuuuuguaaag

SEQ ID NO: 3197872 - RNA, 14 nt, Human
cuuguuuuuguaaa

SEQ ID NO: 3197873 - RNA, 20 nt, Human
cuuguuuuuaaguuugcacu

SEQ ID NO: 3197874 - RNA, 16 nt, Human
cuuguuuuuaaguuug

SEQ ID NO: 3197875 - RNA, 14 nt, Human
cuuguuuuuaaguu

SEQ ID NO: 3197876 - RNA, 12 nt, Human
cuuguuuuuaag

SEQ ID NO: 3197877 - RNA, 14 nt, Human
cuuguuuucuggga

SEQ ID NO: 3197878 - RNA, 17 nt, Human
cuuguuuugcuuccccu

SEQ ID NO: 3197879 - RNA, 15 nt, Human
cuuguuuugcuuccc

SEQ ID NO: 3197880 - RNA, 14 nt, Human
cuuguuuugcuucc

SEQ ID NO: 3197881 - RNA, 13 nt, Human
cuuguuuugcuuc

SEQ ID NO: 3197882 - RNA, 23 nt, Human
cuuguuuugcuuccccucccccc

SEQ ID NO: 3197883 - RNA, 14 nt, Human
cuuguuuuggacuu

SEQ ID NO: 3197884 - RNA, 19 nt, Human
cuuguuuuggacuuuguua

SEQ ID NO: 3197885 - RNA, 21 nt, Human
cuuguuuuggacuuuguuaca

SEQ ID NO: 3197886 - RNA, 17 nt, Human
cuuggagguagcuuuga

SEQ ID NO: 3197887 - RNA, 16 nt, Human
cuuggcugcagggagu

SEQ ID NO: 3197888 - RNA, 22 nt, Human
cuuggaggaaggaaacccagcu

SEQ ID NO: 3197889 - RNA, 17 nt, Human
cuuggcugcagggaguc

SEQ ID NO: 3197890 - RNA, 14 nt, Human
cuuggcugcaggga

SEQ ID NO: 3197891 - RNA, 15 nt, Human
cuugggacauccugu

SEQ ID NO: 3197892 - RNA, 13 nt, Human
cuugggaauuuua

SEQ ID NO: 3197893 - RNA, 20 nt, Human
cuuggggacaggggcaggag

SEQ ID NO: 3197894 - RNA, 22 nt, Human
cuugggcuucauccuccucaga

SEQ ID NO: 3197895 - RNA, 20 nt, Human
cuuggggaccagagcugcca

SEQ ID NO: 3197896 - RNA, 21 nt, Human
cuuggggaccagagcugccac

SEQ ID NO: 3197897 - RNA, 14 nt, Human
cuugggccacugug

SEQ ID NO: 3197898 - RNA, 14 nt, Human
cuugggcagaucuc

SEQ ID NO: 3197899 - RNA, 23 nt, Human
cuugggcagaucucccacaugcc

SEQ ID NO: 3197900 - RNA, 19 nt, Human
cuugggcagaucucccaca

SEQ ID NO: 3197901 - RNA, 13 nt, Human
cuugggcuucauc

SEQ ID NO: 3197902 - RNA, 16 nt, Human
cuuggggggcugaggu

SEQ ID NO: 3197903 - RNA, 15 nt, Human
cuuggggggcugagg

SEQ ID NO: 3197904 - RNA, 22 nt, Human
cuuggggaccagagcugccacc

SEQ ID NO: 3197905 - RNA, 22 nt, Human
cuuggggacaaccuuggcuugg

SEQ ID NO: 3197906 - RNA, 15 nt, Human
cuugccacugccucu

SEQ ID NO: 3197907 - RNA, 14 nt, Human
cuugccacugccuc

SEQ ID NO: 3197908 - RNA, 21 nt, Human
cuugccagcugcugagccgca

SEQ ID NO: 3197909 - RNA, 19 nt, Human
cuugccagcugcugagccg

SEQ ID NO: 3197910 - RNA, 18 nt, Human
cuugccagcugcugagcc

SEQ ID NO: 3197911 - RNA, 16 nt, Human
cuugccagcugcugag

SEQ ID NO: 3197912 - RNA, 12 nt, Human
cuugccagcugc

SEQ ID NO: 3197913 - RNA, 21 nt, Human
cuucuccacccugcucuccga

SEQ ID NO: 3197914 - RNA, 16 nt, Human
cuucuccacccugcuc

SEQ ID NO: 3197915 - RNA, 13 nt, Human
cuugccacugccu

SEQ ID NO: 3197916 - RNA, 18 nt, Human
cuucuccacccugcucuc

SEQ ID NO: 3197917 - RNA, 17 nt, Human
cuucuccacccugcucu

SEQ ID NO: 3197918 - RNA, 17 nt, Human
cuugccauuccaaaaua

SEQ ID NO: 3197919 - RNA, 23 nt, Human
cuugcccacuccugcucugcucg

SEQ ID NO: 3197920 - RNA, 15 nt, Human
cuugcccacuccugc

SEQ ID NO: 3197921 - RNA, 22 nt, Human
cuugcccacuccugcucugcuc

SEQ ID NO: 3197922 - RNA, 16 nt, Human
cuugcccacuccugcu

SEQ ID NO: 3197923 - RNA, 17 nt, Human
cuugccccaacccuucu

SEQ ID NO: 3197924 - RNA, 18 nt, Human
cuugccccaacccuucuu

SEQ ID NO: 3197925 - RNA, 14 nt, Human
cuugcucugcugac

SEQ ID NO: 3197926 - RNA, 13 nt, Human
cuugcucugcuga

SEQ ID NO: 3197927 - RNA, 16 nt, Human
cuuggaaaugggagac

SEQ ID NO: 3197928 - RNA, 20 nt, Human
cuuggaaaucaaauguaaag

SEQ ID NO: 3197929 - RNA, 14 nt, Human
cuuggaaauauuaa

SEQ ID NO: 3197930 - RNA, 15 nt, Human
cuuggaaauauuaaa

SEQ ID NO: 3197931 - RNA, 18 nt, Human
cuuggaaauauuaaaaga

SEQ ID NO: 3197932 - RNA, 19 nt, Human
cuuggaaauauuaaaagaa

SEQ ID NO: 3197933 - RNA, 13 nt, Human
cuuggaggaagga

SEQ ID NO: 3197934 - RNA, 13 nt, Human
cuuggaagcuccg

SEQ ID NO: 3197935 - RNA, 21 nt, Human
cuuggaaaucaaauguaaagu

SEQ ID NO: 3197936 - RNA, 16 nt, Human
cuugcucugcugacag

SEQ ID NO: 3197937 - RNA, 15 nt, Human
cuugcugugacuuau

SEQ ID NO: 3197938 - RNA, 13 nt, Human
cuugcuuaaaugu

SEQ ID NO: 3197939 - RNA, 22 nt, Human
cuugcuuaaaugugaauuacua

SEQ ID NO: 3197940 - RNA, 16 nt, Human
cuugcuuaaaugugaa

SEQ ID NO: 3197941 - RNA, 15 nt, Human
cuugcuuaaauguga

SEQ ID NO: 3197942 - RNA, 14 nt, Human
cuugcuuaaaugug

SEQ ID NO: 3197943 - RNA, 15 nt, Human
cuuuuacccuuuuuc

SEQ ID NO: 3197944 - RNA, 11 nt, Human
cuuuuaauuuu

SEQ ID NO: 3197945 - RNA, 21 nt, Human
cuuuguuuguucuuguuuuua

SEQ ID NO: 3197946 - RNA, 18 nt, Human
cuuuguuuguugucagcu

SEQ ID NO: 3197947 - RNA, 13 nt, Human
cuuuguuuguucu

SEQ ID NO: 3197948 - RNA, 15 nt, Human
cuuuguuuguucuug

SEQ ID NO: 3197949 - RNA, 14 nt, Human
cuuuguuuguucuu

SEQ ID NO: 3197950 - RNA, 20 nt, Human
cuuuucauaaccuagccuua

SEQ ID NO: 3197951 - RNA, 20 nt, Human
cuuuucacugcuggcugccu

SEQ ID NO: 3197952 - RNA, 18 nt, Human
cuuuucacugcuggcugc

SEQ ID NO: 3197953 - RNA, 17 nt, Human
cuuuucacugcuggcug

SEQ ID NO: 3197954 - RNA, 16 nt, Human
cuuuucacugcuggcu

SEQ ID NO: 3197955 - RNA, 22 nt, Human
cuuuucauaaccuagccuuaga

SEQ ID NO: 3197956 - RNA, 14 nt, Human
cuuuucaggaaaau

SEQ ID NO: 3197957 - RNA, 14 nt, Human
cuuuucauaucauu

SEQ ID NO: 3197958 - RNA, 15 nt, Human
cuuuucauaucauuu

SEQ ID NO: 3197959 - RNA, 16 nt, Human
cuuuucauaucauuuc

SEQ ID NO: 3197960 - RNA, 22 nt, Human
cuuuucccucggaguucuucuu

SEQ ID NO: 3197961 - RNA, 18 nt, Human
cuuuucuguccgagcuuu

SEQ ID NO: 3197962 - RNA, 18 nt, Human
cuuuucuugcaugaggcu

SEQ ID NO: 3197963 - RNA, 23 nt, Human
cuuuucuugcaugaggcuagugu

SEQ ID NO: 3197964 - RNA, 11 nt, Human
cuuuucuugua

SEQ ID NO: 3197965 - RNA, 16 nt, Human
cuuuucuuguaucugg

SEQ ID NO: 3197966 - RNA, 11 nt, Human
cuuuucuugga

SEQ ID NO: 3197967 - RNA, 13 nt, Human
cuuuucuuggaca

SEQ ID NO: 3197968 - RNA, 14 nt, Human
cuuuucuuggacac

SEQ ID NO: 3197969 - RNA, 20 nt, Human
cuuuucuuggacacuuaauu

SEQ ID NO: 3197970 - RNA, 19 nt, Human
cuuuggacccugaggccca

SEQ ID NO: 3197971 - RNA, 21 nt, Human
cuuuggcuuaauuccaaucau

SEQ ID NO: 3197972 - RNA, 16 nt, Human
cuuuggcuuaauucca

SEQ ID NO: 3197973 - RNA, 17 nt, Human
cuuuggacccugaggcc

SEQ ID NO: 3197974 - RNA, 18 nt, Human
cuuuggacccugaggccc

SEQ ID NO: 3197975 - RNA, 15 nt, Human
cuuuggacccugagg

SEQ ID NO: 3197976 - RNA, 16 nt, Human
cuuuggacccugaggc

SEQ ID NO: 3197977 - RNA, 16 nt, Human
cuuucccaucuuccaa

SEQ ID NO: 3197978 - RNA, 18 nt, Human
cuuucccacccagccugg

SEQ ID NO: 3197979 - RNA, 17 nt, Human
cuuucccacccagccug

SEQ ID NO: 3197980 - RNA, 19 nt, Human
cuuucccacccagccuggg

SEQ ID NO: 3197981 - RNA, 12 nt, Human
cuuugcucuggu

SEQ ID NO: 3197982 - RNA, 21 nt, Human
cuuuguccuccugcugccagu

SEQ ID NO: 3197983 - RNA, 18 nt, Human
cuuugucuaagaaacauu

SEQ ID NO: 3197984 - RNA, 17 nt, Human
cuuugucuaagaaacau

SEQ ID NO: 3197985 - RNA, 19 nt, Human
cuuugucuaagaaacauug

SEQ ID NO: 3197986 - RNA, 14 nt, Human
cuuuguucuggcuc

SEQ ID NO: 3197987 - RNA, 19 nt, Human
cuuuguuuagucuuuauac

SEQ ID NO: 3197988 - RNA, 13 nt, Human
cuuugggaggcca

SEQ ID NO: 3197989 - RNA, 18 nt, Human
cuuuguccccaccgcaga

SEQ ID NO: 3197990 - RNA, 22 nt, Human
cuuuguccccaccgcagacagg

SEQ ID NO: 3197991 - RNA, 18 nt, Human
cuuuguccuccugcugcc

SEQ ID NO: 3197992 - RNA, 17 nt, Human
cuuuguccuccugcugc

SEQ ID NO: 3197993 - RNA, 13 nt, Human
cuuuguccuccug

SEQ ID NO: 3197994 - RNA, 16 nt, Human
cuuuguccuccugcug

SEQ ID NO: 3197995 - RNA, 15 nt, Human
cuuuguccuccugcu

SEQ ID NO: 3197996 - RNA, 19 nt, Human
gaaaauauguauuaacacu

SEQ ID NO: 3197997 - RNA, 18 nt, Human
gaaaauauguauuaacac

SEQ ID NO: 3197998 - RNA, 13 nt, Human
gaaaauauguauu

SEQ ID NO: 3197999 - RNA, 14 nt, Human
gaaaaucagccugc

SEQ ID NO: 3198000 - RNA, 16 nt, Human
gaaaaucagccugcuc

SEQ ID NO: 3198001 - RNA, 17 nt, Human
gaaaagcugcugacagu

SEQ ID NO: 3198002 - RNA, 13 nt, Human
gaaaagcugcuga

SEQ ID NO: 3198003 - RNA, 13 nt, Human
gaaaauaacugaa

SEQ ID NO: 3198004 - RNA, 15 nt, Human
gaaaauaacugaauu

SEQ ID NO: 3198005 - RNA, 17 nt, Human
gaaaauaacugaauuug

SEQ ID NO: 3198006 - RNA, 18 nt, Human
gaaaauaacugaauuugg

SEQ ID NO: 3198007 - RNA, 20 nt, Human
gaaaauaauugacaggcgaa

SEQ ID NO: 3198008 - RNA, 19 nt, Human
gaaaauaagccaugagaau

SEQ ID NO: 3198009 - RNA, 15 nt, Human
gaaaauaauugacag

SEQ ID NO: 3198010 - RNA, 11 nt, Human
gaaaauaauug

SEQ ID NO: 3198011 - RNA, 22 nt, Human
gaaacagacuuguauauucuau

SEQ ID NO: 3198012 - RNA, 21 nt, Human
gaaacagaggaccagcacacu

SEQ ID NO: 3198013 - RNA, 23 nt, Human
gaaacagaggaccagcacacucc

SEQ ID NO: 3198014 - RNA, 18 nt, Human
gaaacagcuaaugggaca

SEQ ID NO: 3198015 - RNA, 15 nt, Human
gaaacagcucgacuu

SEQ ID NO: 3198016 - RNA, 20 nt, Human
gaaacagcucgacuuuaaaa

SEQ ID NO: 3198017 - RNA, 17 nt, Human
gaaaauaugucccagaa

SEQ ID NO: 3198018 - RNA, 15 nt, Human
gaaacacauaauuaa

SEQ ID NO: 3198019 - RNA, 23 nt, Human
gaaacaccaaaaaaauccagaaa

SEQ ID NO: 3198020 - RNA, 16 nt, Human
gaaacaccaaaaaaau

SEQ ID NO: 3198021 - RNA, 20 nt, Human
gaaacacauaauuaacacuu

SEQ ID NO: 3198022 - RNA, 19 nt, Human
gaaacacauaauuaacacu

SEQ ID NO: 3198023 - RNA, 22 nt, Human
gaaacacugggcuucuagaacc

SEQ ID NO: 3198024 - RNA, 16 nt, Human
gaaacacugaaaagaa

SEQ ID NO: 3198025 - RNA, 16 nt, Human
gaaacacuaaauguua

SEQ ID NO: 3198026 - RNA, 15 nt, Human
gaaacacuaaauguu

SEQ ID NO: 3198027 - RNA, 23 nt, Human
gaaacacuaaauguuaaagaugu

SEQ ID NO: 3198028 - RNA, 19 nt, Human
gaaacacuaaauguuaaag

SEQ ID NO: 3198029 - RNA, 18 nt, Human
gaaacacuaaauguuaaa

SEQ ID NO: 3198030 - RNA, 17 nt, Human
gaaacacuaaauguuaa

SEQ ID NO: 3198031 - RNA, 17 nt, Human
gaaacacccacaggcau

SEQ ID NO: 3198032 - RNA, 18 nt, Human
cuuuuuuccuuuccaccu

SEQ ID NO: 3198033 - RNA, 19 nt, Human
cuuuuuuccuuuccaccuu

SEQ ID NO: 3198034 - RNA, 15 nt, Human
cuuuuuucacuacau

SEQ ID NO: 3198035 - RNA, 14 nt, Human
cuuuugauaagaaa

SEQ ID NO: 3198036 - RNA, 16 nt, Human
cuuuugagcauuuaga

SEQ ID NO: 3198037 - RNA, 21 nt, Human
cuuuugagugccuuacacaau

SEQ ID NO: 3198038 - RNA, 14 nt, Human
cuuuuuuggcugcu

SEQ ID NO: 3198039 - RNA, 15 nt, Human
cuuuuuuggcugcug

SEQ ID NO: 3198040 - RNA, 15 nt, Human
cuuuuuugaaaucag

SEQ ID NO: 3198041 - RNA, 14 nt, Human
gaaaacaucuccuu

SEQ ID NO: 3198042 - RNA, 19 nt, Human
gaaaacaucuccuuagaaa

SEQ ID NO: 3198043 - RNA, 15 nt, Human
gaaaacaucuccuua

SEQ ID NO: 3198044 - RNA, 23 nt, Human
gaaaacaucucaucaugucuauu

SEQ ID NO: 3198045 - RNA, 15 nt, Human
gaaaacguggcugcu

SEQ ID NO: 3198046 - RNA, 16 nt, Human
gaaaacguggcugcuu

SEQ ID NO: 3198047 - RNA, 18 nt, Human
gaaaacguggcugcuuca

SEQ ID NO: 3198048 - RNA, 14 nt, Human
gaaaacguggcugc

SEQ ID NO: 3198049 - RNA, 21 nt, Human
gaaaaccaagccguggcuucc

SEQ ID NO: 3198050 - RNA, 13 nt, Human
gaaaaccaaacaa

SEQ ID NO: 3198051 - RNA, 15 nt, Human
gaaaaccaacaccau

SEQ ID NO: 3198052 - RNA, 21 nt, Human
gaaaaccaacaccaucacagc

SEQ ID NO: 3198053 - RNA, 19 nt, Human
gaaaaccaagccguggcuu

SEQ ID NO: 3198054 - RNA, 18 nt, Human
gaaaaccaagccguggcu

SEQ ID NO: 3198055 - RNA, 14 nt, Human
cucaaauuuugagu

SEQ ID NO: 3198056 - RNA, 20 nt, Human
cucaaaugaugugccugcuu

SEQ ID NO: 3198057 - RNA, 20 nt, Human
cucaacaaggcaaaaacaaa

SEQ ID NO: 3198058 - RNA, 21 nt, Human
cucaacaccucugcacaagcu

SEQ ID NO: 3198059 - RNA, 15 nt, Human
cucaaccuccugggc

SEQ ID NO: 3198060 - RNA, 13 nt, Human
cucaaccuccugg

SEQ ID NO: 3198061 - RNA, 21 nt, Human
cuauuucccccuuucuuccuc

SEQ ID NO: 3198062 - RNA, 19 nt, Human
cuauuucccccuuucuucc

SEQ ID NO: 3198063 - RNA, 18 nt, Human
cuauuucccccuuucuuc

SEQ ID NO: 3198064 - RNA, 16 nt, Human
cuauuucccccuuucu

SEQ ID NO: 3198065 - RNA, 23 nt, Human
cuauuucaucagaacagcuguug

SEQ ID NO: 3198066 - RNA, 19 nt, Human
cuauuucagaaguuuaaau

SEQ ID NO: 3198067 - RNA, 12 nt, Human
cuauuucagaag

SEQ ID NO: 3198068 - RNA, 11 nt, Human
cuauuucagaa

SEQ ID NO: 3198069 - RNA, 20 nt, Human
cucaaauaggcuauuaaaaa

SEQ ID NO: 3198070 - RNA, 21 nt, Human
cucaaauaggcuauuaaaaaa

SEQ ID NO: 3198071 - RNA, 14 nt, Human
cucaaauccaggac

SEQ ID NO: 3198072 - RNA, 13 nt, Human
cucaaauccagga

SEQ ID NO: 3198073 - RNA, 23 nt, Human
cucaaauccaggacccugccagg

SEQ ID NO: 3198074 - RNA, 22 nt, Human
cucaaauccaggacccugccag

SEQ ID NO: 3198075 - RNA, 20 nt, Human
cucaaauccaggacccugcc

SEQ ID NO: 3198076 - RNA, 16 nt, Human
cucaaauccaggaccc

SEQ ID NO: 3198077 - RNA, 15 nt, Human
cucaaauccaggacc

SEQ ID NO: 3198078 - RNA, 16 nt, Human
cucaaaucuuaagaaa

SEQ ID NO: 3198079 - RNA, 15 nt, Human
cucaaaucuuaagaa

SEQ ID NO: 3198080 - RNA, 14 nt, Human
cuauuguagagcca

SEQ ID NO: 3198081 - RNA, 12 nt, Human
cuauuguaauau

SEQ ID NO: 3198082 - RNA, 19 nt, Human
cuauuguaauauagaaaaa

SEQ ID NO: 3198083 - RNA, 20 nt, Human
cuauuguaauauagaaaaaa

SEQ ID NO: 3198084 - RNA, 19 nt, Human
cuauugucaccagggcugg

SEQ ID NO: 3198085 - RNA, 21 nt, Human
cuauuuauaauacagaaucuu

SEQ ID NO: 3198086 - RNA, 12 nt, Human
cuauuuaauuuu

SEQ ID NO: 3198087 - RNA, 15 nt, Human
cuauuuagaugcaua

SEQ ID NO: 3198088 - RNA, 15 nt, Human
cuauuuagacaugua

SEQ ID NO: 3198089 - RNA, 23 nt, Human
cuauuccccacccuccccuuccc

SEQ ID NO: 3198090 - RNA, 22 nt, Human
cucacaguccuuaccagcagag

SEQ ID NO: 3198091 - RNA, 17 nt, Human
cucacaguccuuaccag

SEQ ID NO: 3198092 - RNA, 19 nt, Human
cucacaguccuuaccagca

SEQ ID NO: 3198093 - RNA, 22 nt, Human
cucacauuuauucugcucacau

SEQ ID NO: 3198094 - RNA, 14 nt, Human
cucacauuuuuaua

SEQ ID NO: 3198095 - RNA, 15 nt, Human
cucacauuuuuuucu

SEQ ID NO: 3198096 - RNA, 19 nt, Human
cucacauuuauucugcuca

SEQ ID NO: 3198097 - RNA, 15 nt, Human
cucacauuuauucug

SEQ ID NO: 3198098 - RNA, 18 nt, Human
cucaccagccccagugcc

SEQ ID NO: 3198099 - RNA, 17 nt, Human
cucaccagccccagugc

SEQ ID NO: 3198100 - RNA, 13 nt, Human
cucaccagcugug

SEQ ID NO: 3198101 - RNA, 15 nt, Human
cucaccagccccagu

SEQ ID NO: 3198102 - RNA, 14 nt, Human
cucaccagccccag

SEQ ID NO: 3198103 - RNA, 13 nt, Human
cucaccagcccca

SEQ ID NO: 3198104 - RNA, 16 nt, Human
cucaccagaauuauuu

SEQ ID NO: 3198105 - RNA, 22 nt, Human
cucacacaugagcaucaggcca

SEQ ID NO: 3198106 - RNA, 24 nt, Human
cucacacaugagcaucaggccagg

SEQ ID NO: 3198107 - RNA, 21 nt, Human
cucacacaugagcaucaggcc

SEQ ID NO: 3198108 - RNA, 15 nt, Human
cucacaguccuuacc

SEQ ID NO: 3198109 - RNA, 12 nt, Human
cucacagccagc

SEQ ID NO: 3198110 - RNA, 15 nt, Human
cucacagcuaugcaa

SEQ ID NO: 3198111 - RNA, 16 nt, Human
cucacagcuaugcaaa

SEQ ID NO: 3198112 - RNA, 22 nt, Human
cucacagcuaugcaaaaagcua

SEQ ID NO: 3198113 - RNA, 14 nt, Human
cucaaguccucuuu

SEQ ID NO: 3198114 - RNA, 21 nt, Human
cucaaguccucuuuucugaga

SEQ ID NO: 3198115 - RNA, 17 nt, Human
cucaagugauucuccug

SEQ ID NO: 3198116 - RNA, 18 nt, Human
cucaagaccaaauggaaa

SEQ ID NO: 3198117 - RNA, 21 nt, Human
cucaagaccaaauggaaacag

SEQ ID NO: 3198118 - RNA, 22 nt, Human
cucagauuguaauauguaaaug

SEQ ID NO: 3198119 - RNA, 15 nt, Human
cucagauuguaauau

SEQ ID NO: 3198120 - RNA, 15 nt, Human
cucagaucuucugug

SEQ ID NO: 3198121 - RNA, 21 nt, Human
cucagcaaaagaugcuucuca

SEQ ID NO: 3198122 - RNA, 13 nt, Human
cucagcaaggcca

SEQ ID NO: 3198123 - RNA, 16 nt, Human
cucagcaaggccaccu

SEQ ID NO: 3198124 - RNA, 15 nt, Human
cucagcaaggccacc

SEQ ID NO: 3198125 - RNA, 22 nt, Human
cucagcaaggccaccucuuccu

SEQ ID NO: 3198126 - RNA, 21 nt, Human
cucagcaaggccaccucuucc

SEQ ID NO: 3198127 - RNA, 18 nt, Human
cucagcaaggccaccucu

SEQ ID NO: 3198128 - RNA, 17 nt, Human
cucagcaaggccaccuc

SEQ ID NO: 3198129 - RNA, 13 nt, Human
cucagcaccacuc

SEQ ID NO: 3198130 - RNA, 16 nt, Human
cucagcaccacucaag

SEQ ID NO: 3198131 - RNA, 14 nt, Human
cucagcaccacuca

SEQ ID NO: 3198132 - RNA, 17 nt, Human
cucagcauccuggcacc

SEQ ID NO: 3198133 - RNA, 16 nt, Human
cucagcauccuggcac

SEQ ID NO: 3198134 - RNA, 22 nt, Human
cucagcaccacucaagaccaaa

SEQ ID NO: 3198135 - RNA, 21 nt, Human
cucagcaccacucaagaccaa

SEQ ID NO: 3198136 - RNA, 18 nt, Human
cucagcaccacucaagac

SEQ ID NO: 3198137 - RNA, 17 nt, Human
cucagcaccacucaaga

SEQ ID NO: 3198138 - RNA, 14 nt, Human
cucagagagggugg

SEQ ID NO: 3198139 - RNA, 22 nt, Human
cucagaucccacuuuugccaga

SEQ ID NO: 3198140 - RNA, 20 nt, Human
cucagaucccacuuuugcca

SEQ ID NO: 3198141 - RNA, 16 nt, Human
cucagauauuugcacc

SEQ ID NO: 3198142 - RNA, 22 nt, Human
cucacuguugcccaggcuggcg

SEQ ID NO: 3198143 - RNA, 21 nt, Human
cucacuguugcccaggcuggc

SEQ ID NO: 3198144 - RNA, 19 nt, Human
cucacuguugcccaggcug

SEQ ID NO: 3198145 - RNA, 19 nt, Human
cucacugccaugccagcuu

SEQ ID NO: 3198146 - RNA, 22 nt, Human
cucacugccaugccagcuuauc

SEQ ID NO: 3198147 - RNA, 20 nt, Human
cucacuguugcccaggcugg

SEQ ID NO: 3198148 - RNA, 15 nt, Human
cucacuccuaccugg

SEQ ID NO: 3198149 - RNA, 13 nt, Human
cucacuccuaccu

SEQ ID NO: 3198150 - RNA, 16 nt, Human
cucacucagcaccacu

SEQ ID NO: 3198151 - RNA, 15 nt, Human
cucacucagcaccac

SEQ ID NO: 3198152 - RNA, 14 nt, Human
cucacucagcacca

SEQ ID NO: 3198153 - RNA, 13 nt, Human
cucacucagcacc

SEQ ID NO: 3198154 - RNA, 18 nt, Human
cucacucagcaccacuca

SEQ ID NO: 3198155 - RNA, 22 nt, Human
cucacuauguugcccaggcagg

SEQ ID NO: 3198156 - RNA, 21 nt, Human
cucacuauguugcccaggcag

SEQ ID NO: 3198157 - RNA, 23 nt, Human
cucacuauguugcccaggcaggu

SEQ ID NO: 3198158 - RNA, 21 nt, Human
cucacucagaaguccagaguc

SEQ ID NO: 3198159 - RNA, 20 nt, Human
cucacucagaaguccagagu

SEQ ID NO: 3198160 - RNA, 20 nt, Human
cucacuauguugcccaggca

SEQ ID NO: 3198161 - RNA, 19 nt, Human
cucacuauguugcccaggc

SEQ ID NO: 3198162 - RNA, 15 nt, Human
cucaccccagcccca

SEQ ID NO: 3198163 - RNA, 14 nt, Human
cucaccccagcccc

SEQ ID NO: 3198164 - RNA, 21 nt, Human
cucaccauuuccccagggcac

SEQ ID NO: 3198165 - RNA, 20 nt, Human
cucaccauuuccccagggca

SEQ ID NO: 3198166 - RNA, 19 nt, Human
cucaccauuuccccagggc

SEQ ID NO: 3198167 - RNA, 18 nt, Human
cucaccauuuccccaggg

SEQ ID NO: 3198168 - RNA, 16 nt, Human
cucaccauuuccccag

SEQ ID NO: 3198169 - RNA, 21 nt, Human
cucacucugucgcccagucug

SEQ ID NO: 3198170 - RNA, 13 nt, Human
cucacucugucgc

SEQ ID NO: 3198171 - RNA, 22 nt, Human
cucacucugucgcccagucugg

SEQ ID NO: 3198172 - RNA, 12 nt, Human
cucacugcagcc

SEQ ID NO: 3198173 - RNA, 13 nt, Human
cucacugcagccu

SEQ ID NO: 3198174 - RNA, 13 nt, Human
cucacuccuugaa

SEQ ID NO: 3198175 - RNA, 19 nt, Human
cucacuccuaccugguaau

SEQ ID NO: 3198176 - RNA, 17 nt, Human
cucacuccuaccuggua

SEQ ID NO: 3198177 - RNA, 16 nt, Human
cucacuccuaccuggu

SEQ ID NO: 3198178 - RNA, 12 nt, Human
cucacucugucg

SEQ ID NO: 3198179 - RNA, 11 nt, Human
cucacucuguc

SEQ ID NO: 3198180 - RNA, 11 nt, Human
cucacucugcu

SEQ ID NO: 3198181 - RNA, 17 nt, Human
cucacucugcuaccuug

SEQ ID NO: 3198182 - RNA, 19 nt, Human
cucacucugcuaccuugcc

SEQ ID NO: 3198183 - RNA, 21 nt, Human
cucacucugcuaccuugcccc

SEQ ID NO: 3198184 - RNA, 22 nt, Human
cucacucugcuaccuugcccca

SEQ ID NO: 3198185 - RNA, 21 nt, Human
cucacucucaggaaaugcuga

SEQ ID NO: 3198186 - RNA, 12 nt, Human
cucacucucagg

SEQ ID NO: 3198187 - RNA, 14 nt, Human
cucacucucaggaa

SEQ ID NO: 3198188 - RNA, 13 nt, Human
cucacucucagga

SEQ ID NO: 3198189 - RNA, 10 nt, Human
cucacucuca

SEQ ID NO: 3198190 - RNA, 21 nt, Human
cuauaauguaagcucuacuga

SEQ ID NO: 3198191 - RNA, 22 nt, Human
cuauaauuuaccugaagucuuu

SEQ ID NO: 3198192 - RNA, 11 nt, Human
cuauaauguga

SEQ ID NO: 3198193 - RNA, 13 nt, Human
cuauaaugugaaa

SEQ ID NO: 3198194 - RNA, 14 nt, Human
cuauaauuuugaua

SEQ ID NO: 3198195 - RNA, 14 nt, Human
cuauaauuuuacaa

SEQ ID NO: 3198196 - RNA, 23 nt, Human
cuauaauuuugauagugggacca

SEQ ID NO: 3198197 - RNA, 20 nt, Human
cuauaauuuugauaguggga

SEQ ID NO: 3198198 - RNA, 16 nt, Human
cuauaauuuugauagu

SEQ ID NO: 3198199 - RNA, 17 nt, Human
cuauagaaaguguucug

SEQ ID NO: 3198200 - RNA, 16 nt, Human
cuauagaaaguguucu

SEQ ID NO: 3198201 - RNA, 15 nt, Human
cuauagaaaguguuc

SEQ ID NO: 3198202 - RNA, 14 nt, Human
cuauagaaaguguu

SEQ ID NO: 3198203 - RNA, 13 nt, Human
cuauagaaagugu

SEQ ID NO: 3198204 - RNA, 22 nt, Human
cuauagaaaguguucuguuaca

SEQ ID NO: 3198205 - RNA, 20 nt, Human
cuauagaaaguguucuguua

SEQ ID NO: 3198206 - RNA, 19 nt, Human
cuauagaaaguguucuguu

SEQ ID NO: 3198207 - RNA, 20 nt, Human
cuauagcaucacuuaaaaca

SEQ ID NO: 3198208 - RNA, 15 nt, Human
cuauagcaucacuua

SEQ ID NO: 3198209 - RNA, 17 nt, Human
cuauagcaucacuuaaa

SEQ ID NO: 3198210 - RNA, 17 nt, Human
cuauagcaaaguaguac

SEQ ID NO: 3198211 - RNA, 16 nt, Human
cuauaauguaagcucu

SEQ ID NO: 3198212 - RNA, 17 nt, Human
cuauaagccaaaauuaa

SEQ ID NO: 3198213 - RNA, 21 nt, Human
cuauaagcaaauugcuuuuuu

SEQ ID NO: 3198214 - RNA, 14 nt, Human
cuauaaucuguuuu

SEQ ID NO: 3198215 - RNA, 13 nt, Human
cuagugcugugaa

SEQ ID NO: 3198216 - RNA, 17 nt, Human
cuagugcugugaaaaaa

SEQ ID NO: 3198217 - RNA, 14 nt, Human
cuagugcugugaaa

SEQ ID NO: 3198218 - RNA, 22 nt, Human
cuagugcugugaaaaaaaaaau

SEQ ID NO: 3198219 - RNA, 15 nt, Human
cuauaggugcuacaa

SEQ ID NO: 3198220 - RNA, 17 nt, Human
cuauauuagaucaaaua

SEQ ID NO: 3198221 - RNA, 22 nt, Human
cuauauuccagguuuaaguaga

SEQ ID NO: 3198222 - RNA, 22 nt, Human
cuauaggugcuacaaaaacaca

SEQ ID NO: 3198223 - RNA, 21 nt, Human
cuauaggugcuacaaaaacac

SEQ ID NO: 3198224 - RNA, 20 nt, Human
cuauaggugcuacaaaaaca

SEQ ID NO: 3198225 - RNA, 17 nt, Human
cuauagccuaggugaca

SEQ ID NO: 3198226 - RNA, 16 nt, Human
cuaucuggugauuucu

SEQ ID NO: 3198227 - RNA, 17 nt, Human
cuaucuggugauuucua

SEQ ID NO: 3198228 - RNA, 16 nt, Human
cuaucugguauuaaau

SEQ ID NO: 3198229 - RNA, 17 nt, Human
cuaucugguauuaaaug

SEQ ID NO: 3198230 - RNA, 20 nt, Human
cuaucugguauuaaaugcca

SEQ ID NO: 3198231 - RNA, 21 nt, Human
cuaucugguauuaaaugccaa

SEQ ID NO: 3198232 - RNA, 17 nt, Human
cuaugagggccuugagu

SEQ ID NO: 3198233 - RNA, 15 nt, Human
cuaugagggccuuga

SEQ ID NO: 3198234 - RNA, 16 nt, Human
cuaucuguuuacagug

SEQ ID NO: 3198235 - RNA, 13 nt, Human
cuaugagggccuu

SEQ ID NO: 3198236 - RNA, 20 nt, Human
cuaugcagagguccacaaca

SEQ ID NO: 3198237 - RNA, 14 nt, Human
cuauggccugugcg

SEQ ID NO: 3198238 - RNA, 14 nt, Human
cuaugcuguaucug

SEQ ID NO: 3198239 - RNA, 15 nt, Human
cuaugcuguaucugu

SEQ ID NO: 3198240 - RNA, 21 nt, Human
cuauggacagcauugccagua

SEQ ID NO: 3198241 - RNA, 23 nt, Human
cuauucaaacagucucaggaaau

SEQ ID NO: 3198242 - RNA, 16 nt, Human
cuauucacaauuauuc

SEQ ID NO: 3198243 - RNA, 17 nt, Human
cuauucacaauuauucc

SEQ ID NO: 3198244 - RNA, 16 nt, Human
cuauucaaacagucuc

SEQ ID NO: 3198245 - RNA, 18 nt, Human
cuauucaaacagucucag

SEQ ID NO: 3198246 - RNA, 15 nt, Human
cuauuagagaagaga

SEQ ID NO: 3198247 - RNA, 11 nt, Human
cuauuaauauu

SEQ ID NO: 3198248 - RNA, 12 nt, Human
cuauuaauauuu

SEQ ID NO: 3198249 - RNA, 13 nt, Human
cuauuaauauuug

SEQ ID NO: 3198250 - RNA, 22 nt, Human
cuauuaauauuuguuuaguuca

SEQ ID NO: 3198251 - RNA, 18 nt, Human
cuauuacgaaguucaaga

SEQ ID NO: 3198252 - RNA, 22 nt, Human
cuauuacgaaguucaagaucaa

SEQ ID NO: 3198253 - RNA, 23 nt, Human
cuauuacgaaguucaagaucaaa

SEQ ID NO: 3198254 - RNA, 21 nt, Human
cuauuagcuuacugauuaacu

SEQ ID NO: 3198255 - RNA, 14 nt, Human
cuauuaguguuaua

SEQ ID NO: 3198256 - RNA, 15 nt, Human
cuauuaguguuauau

SEQ ID NO: 3198257 - RNA, 16 nt, Human
cuauuaguguuauaug

SEQ ID NO: 3198258 - RNA, 23 nt, Human
cuaugggacucaaugcacugaca

SEQ ID NO: 3198259 - RNA, 22 nt, Human
cuaugggacucaaugcacugac

SEQ ID NO: 3198260 - RNA, 18 nt, Human
cuaugggacucaaugcac

SEQ ID NO: 3198261 - RNA, 19 nt, Human
cuaugggggcacugaggac

SEQ ID NO: 3198262 - RNA, 22 nt, Human
cuaugguguaaucaugaaggag

SEQ ID NO: 3198263 - RNA, 17 nt, Human
cuauggucuuauauuua

SEQ ID NO: 3198264 - RNA, 11 nt, Human
cuauggucuua

SEQ ID NO: 3198265 - RNA, 23 nt, Human
cgcccaguuggguggaugccugg

SEQ ID NO: 3198266 - RNA, 19 nt, Human
cgcccaugagagcgcagcc

SEQ ID NO: 3198267 - RNA, 20 nt, Human
cgcccaugagagcgcagccc

SEQ ID NO: 3198268 - RNA, 21 nt, Human
cgcccaugagagcgcagcccg

SEQ ID NO: 3198269 - RNA, 15 nt, Human
cgccaugcuccuggc

SEQ ID NO: 3198270 - RNA, 20 nt, Human
cgccaucccagccccaauga

SEQ ID NO: 3198271 - RNA, 17 nt, Human
cgccaucccagccccaa

SEQ ID NO: 3198272 - RNA, 19 nt, Human
cgccagggaccccagaauc

SEQ ID NO: 3198273 - RNA, 22 nt, Human
cgcccaguuggguggaugccug

SEQ ID NO: 3198274 - RNA, 18 nt, Human
cuaggugacagagugaga

SEQ ID NO: 3198275 - RNA, 14 nt, Human
cuaggugacagagu

SEQ ID NO: 3198276 - RNA, 17 nt, Human
cuagguagagucugagg

SEQ ID NO: 3198277 - RNA, 19 nt, Human
cuagguagcccccucuucc

SEQ ID NO: 3198278 - RNA, 16 nt, Human
cuagguagagucugag

SEQ ID NO: 3198279 - RNA, 20 nt, Human
cuagguagcccccucuuccc

SEQ ID NO: 3198280 - RNA, 24 nt, Human
cuaggugacagagugagacucugu

SEQ ID NO: 3198281 - RNA, 12 nt, Human
cuaggucugaua

SEQ ID NO: 3198282 - RNA, 20 nt, Human
cuaguaauauauuuaaaggg

SEQ ID NO: 3198283 - RNA, 16 nt, Human
cuaguaauauauuuaa

SEQ ID NO: 3198284 - RNA, 21 nt, Human
cuagucaacaguacccugguu

SEQ ID NO: 3198285 - RNA, 12 nt, Human
cuaguaauauau

SEQ ID NO: 3198286 - RNA, 16 nt, Human
cuaguaauaaagacuc

SEQ ID NO: 3198287 - RNA, 19 nt, Human
cuagugaaagaggcagcuu

SEQ ID NO: 3198288 - RNA, 18 nt, Human
cuagugaaagaggcagcu

SEQ ID NO: 3198289 - RNA, 17 nt, Human
cuccuugguuauauuuu

SEQ ID NO: 3198290 - RNA, 13 nt, Human
cucgagcaugccu

SEQ ID NO: 3198291 - RNA, 15 nt, Human
cucgagcaugccugg

SEQ ID NO: 3198292 - RNA, 16 nt, Human
cucgagcaugccugga

SEQ ID NO: 3198293 - RNA, 19 nt, Human
cucgagcaugccuggaugg

SEQ ID NO: 3198294 - RNA, 23 nt, Human
cuccuuggugucgggcaugacac

SEQ ID NO: 3198295 - RNA, 20 nt, Human
cuccuuccuaguucaucccu

SEQ ID NO: 3198296 - RNA, 17 nt, Human
cuccuucccuugcuacc

SEQ ID NO: 3198297 - RNA, 16 nt, Human
cucgcuccaacuccaa

SEQ ID NO: 3198298 - RNA, 22 nt, Human
cucgcuauugucaccagggcug

SEQ ID NO: 3198299 - RNA, 24 nt, Human
cucgcuccaacuccaacauccacu

SEQ ID NO: 3198300 - RNA, 17 nt, Human
cucgcuccaacuccaac

SEQ ID NO: 3198301 - RNA, 23 nt, Human
cucgcucugucgcccaggcugga

SEQ ID NO: 3198302 - RNA, 16 nt, Human
cucgcucuguugccca

SEQ ID NO: 3198303 - RNA, 20 nt, Human
cucgcucuguugcccaggcu

SEQ ID NO: 3198304 - RNA, 18 nt, Human
cucgcaggccucccugcc

SEQ ID NO: 3198305 - RNA, 15 nt, Human
cucgccuucaucucc

SEQ ID NO: 3198306 - RNA, 18 nt, Human
cucgccucggaucagcug

SEQ ID NO: 3198307 - RNA, 22 nt, Human
cucgagcaugccuggauggggc

SEQ ID NO: 3198308 - RNA, 20 nt, Human
cuccugugugugcgccuaca

SEQ ID NO: 3198309 - RNA, 17 nt, Human
cuccuuaucaaaggaca

SEQ ID NO: 3198310 - RNA, 22 nt, Human
cuccuuaucaaaggacaccauu

SEQ ID NO: 3198311 - RNA, 20 nt, Human
cuccuuaggguuuucucucu

SEQ ID NO: 3198312 - RNA, 18 nt, Human
cuccuuaggguuuucucu

SEQ ID NO: 3198313 - RNA, 14 nt, Human
cuccuucccuugcu

SEQ ID NO: 3198314 - RNA, 20 nt, Human
cuccuucccacucuucucau

SEQ ID NO: 3198315 - RNA, 22 nt, Human
cuccuucaacaaggcuugcugc

SEQ ID NO: 3198316 - RNA, 23 nt, Human
cuccuuauggguagggcucugac

SEQ ID NO: 3198317 - RNA, 10 nt, Human
cuccuuccca

SEQ ID NO: 3198318 - RNA, 15 nt, Human
cuccuucccacucuu

SEQ ID NO: 3198319 - RNA, 19 nt, Human
cuccuucccacucuucuca

SEQ ID NO: 3198320 - RNA, 18 nt, Human
cuccuucccacucuucuc

SEQ ID NO: 3198321 - RNA, 17 nt, Human
cuccuucccacucuucu

SEQ ID NO: 3198322 - RNA, 16 nt, Human
cuccuucccacucuuc

SEQ ID NO: 3198323 - RNA, 24 nt, Human
cuccugugugugcgccuacaggag

SEQ ID NO: 3198324 - RNA, 23 nt, Human
cuccugugugugcgccuacagga

SEQ ID NO: 3198325 - RNA, 21 nt, Human
cuccugugugugcgccuacag

SEQ ID NO: 3198326 - RNA, 11 nt, Human
cuccuggacuc

SEQ ID NO: 3198327 - RNA, 14 nt, Human
cuccuggaaauauu

SEQ ID NO: 3198328 - RNA, 15 nt, Human
cuccucuccccagca

SEQ ID NO: 3198329 - RNA, 13 nt, Human
cuccucuccccag

SEQ ID NO: 3198330 - RNA, 11 nt, Human
cuccugccuca

SEQ ID NO: 3198331 - RNA, 12 nt, Human
cuccugccucag

SEQ ID NO: 3198332 - RNA, 16 nt, Human
cuccugccucagccuc

SEQ ID NO: 3198333 - RNA, 17 nt, Human
cuccugccucagccucc

SEQ ID NO: 3198334 - RNA, 21 nt, Human
cuccugccucgaacuggcugc

SEQ ID NO: 3198335 - RNA, 20 nt, Human
cuccugccucgaacuggcug

SEQ ID NO: 3198336 - RNA, 18 nt, Human
cuccugccucgaacuggc

SEQ ID NO: 3198337 - RNA, 19 nt, Human
cuccugccucagccucccg

SEQ ID NO: 3198338 - RNA, 14 nt, Human
cuccugcucugcuc

SEQ ID NO: 3198339 - RNA, 15 nt, Human
cuccugcucugcucg

SEQ ID NO: 3198340 - RNA, 13 nt, Human
cuccugcugccag

SEQ ID NO: 3198341 - RNA, 14 nt, Human
cuccugcugccagu

SEQ ID NO: 3198342 - RNA, 12 nt, Human
cuccugcugcca

SEQ ID NO: 3198343 - RNA, 12 nt, Human
cuccuccuagcc

SEQ ID NO: 3198344 - RNA, 23 nt, Human
cuccucccaggcgccccuucccc

SEQ ID NO: 3198345 - RNA, 22 nt, Human
cuccucccaggcgccccuuccc

SEQ ID NO: 3198346 - RNA, 18 nt, Human
cuccucccacugcccacu

SEQ ID NO: 3198347 - RNA, 17 nt, Human
cuccucccacugcccac

SEQ ID NO: 3198348 - RNA, 17 nt, Human
cuccucccaggcgcccc

SEQ ID NO: 3198349 - RNA, 15 nt, Human
cuccucccacugccc

SEQ ID NO: 3198350 - RNA, 14 nt, Human
cuccucccacugcc

SEQ ID NO: 3198351 - RNA, 13 nt, Human
cuccucccacugc

SEQ ID NO: 3198352 - RNA, 12 nt, Human
cuccucccacug

SEQ ID NO: 3198353 - RNA, 14 nt, Human
cuccuccuggacuc

SEQ ID NO: 3198354 - RNA, 15 nt, Human
cuccuccuggacucc

SEQ ID NO: 3198355 - RNA, 19 nt, Human
cuccuccuggacuccugca

SEQ ID NO: 3198356 - RNA, 15 nt, Human
cuccuccagccgcca

SEQ ID NO: 3198357 - RNA, 13 nt, Human
cuccuccagaguc

SEQ ID NO: 3198358 - RNA, 15 nt, Human
cuccuccagagucag

SEQ ID NO: 3198359 - RNA, 13 nt, Human
cuccucaggacca

SEQ ID NO: 3198360 - RNA, 12 nt, Human
cuccucaggacc

SEQ ID NO: 3198361 - RNA, 15 nt, Human
cuccgaccagacacc

SEQ ID NO: 3198362 - RNA, 19 nt, Human
cucccuuggggccuaugca

SEQ ID NO: 3198363 - RNA, 20 nt, Human
cucccuuggauuguccccga

SEQ ID NO: 3198364 - RNA, 18 nt, Human
cuccucagaucuucugug

SEQ ID NO: 3198365 - RNA, 18 nt, Human
cuccuaugcuuuagcuua

SEQ ID NO: 3198366 - RNA, 13 nt, Human
cuccuaugcuuua

SEQ ID NO: 3198367 - RNA, 22 nt, Human
cuccuaucagaaguuucucagc

SEQ ID NO: 3198368 - RNA, 22 nt, Human
cuccgacuugugcacaggcaga

SEQ ID NO: 3198369 - RNA, 12 nt, Human
cuccccuccucc

SEQ ID NO: 3198370 - RNA, 20 nt, Human
cuccccuccuccuggacucc

SEQ ID NO: 3198371 - RNA, 21 nt, Human
cuccccagcaagugagagcug

SEQ ID NO: 3198372 - RNA, 13 nt, Human
cuccauccugagg

SEQ ID NO: 3198373 - RNA, 23 nt, Human
cuccccagcaagugagagcuggg

SEQ ID NO: 3198374 - RNA, 22 nt, Human
cuccccagcaagugagagcugg

SEQ ID NO: 3198375 - RNA, 14 nt, Human
cuccccuuccauuu

SEQ ID NO: 3198376 - RNA, 23 nt, Human
cuccccugugccagcccagaggc

SEQ ID NO: 3198377 - RNA, 16 nt, Human
cuccccugugccagcc

SEQ ID NO: 3198378 - RNA, 18 nt, Human
cuccccugugccagccca

SEQ ID NO: 3198379 - RNA, 16 nt, Human
cuccccuuccauuucu

SEQ ID NO: 3198380 - RNA, 18 nt, Human
cuccccuucccagggcaa

SEQ ID NO: 3198381 - RNA, 12 nt, Human
cuccccuuccca

SEQ ID NO: 3198382 - RNA, 23 nt, Human
cuccccuuccccuuccuucuuug

SEQ ID NO: 3198383 - RNA, 19 nt, Human
cuccccuuccccuuccuuc

SEQ ID NO: 3198384 - RNA, 17 nt, Human
cuccccuuccccuuccu

SEQ ID NO: 3198385 - RNA, 12 nt, Human
cuccccuucccc

SEQ ID NO: 3198386 - RNA, 15 nt, Human
cucccggugcccaag

SEQ ID NO: 3198387 - RNA, 21 nt, Human
cucccggugcccaagaauaga

SEQ ID NO: 3198388 - RNA, 23 nt, Human
cucccgcccaaaccuuuccccca

SEQ ID NO: 3198389 - RNA, 21 nt, Human
cucccgcccaaaccuuucccc

SEQ ID NO: 3198390 - RNA, 16 nt, Human
cucccgccuccaaccc

SEQ ID NO: 3198391 - RNA, 20 nt, Human
cucccgaguagcugggacua

SEQ ID NO: 3198392 - RNA, 19 nt, Human
cucccgaguagcugggacu

SEQ ID NO: 3198393 - RNA, 18 nt, Human
cucccgaguagcugggac

SEQ ID NO: 3198394 - RNA, 17 nt, Human
cuccccuugccagcugc

SEQ ID NO: 3198395 - RNA, 16 nt, Human
cuccccuugccagcug

SEQ ID NO: 3198396 - RNA, 15 nt, Human
cuccccuugccagcu

SEQ ID NO: 3198397 - RNA, 14 nt, Human
cuccccuugccagc

SEQ ID NO: 3198398 - RNA, 13 nt, Human
cuccccuugccag

SEQ ID NO: 3198399 - RNA, 17 nt, Human
cucccugccccccagcc

SEQ ID NO: 3198400 - RNA, 23 nt, Human
cucccugccccccagcccuccuu

SEQ ID NO: 3198401 - RNA, 14 nt, Human
cucccugccccucc

SEQ ID NO: 3198402 - RNA, 13 nt, Human
cucccugccccuc

SEQ ID NO: 3198403 - RNA, 21 nt, Human
cucccguguaucuggacacug

SEQ ID NO: 3198404 - RNA, 22 nt, Human
cucccguguaggaaccugcaca

SEQ ID NO: 3198405 - RNA, 12 nt, Human
cucccugccagu

SEQ ID NO: 3198406 - RNA, 21 nt, Human
cucccugccccucccuucaac

SEQ ID NO: 3198407 - RNA, 20 nt, Human
cucccugccccucccuucaa

SEQ ID NO: 3198408 - RNA, 18 nt, Human
cucccugccccucccuuc

SEQ ID NO: 3198409 - RNA, 17 nt, Human
cucccugccccucccuu

SEQ ID NO: 3198410 - RNA, 21 nt, Human
cuccaaugcuguuaucccugc

SEQ ID NO: 3198411 - RNA, 22 nt, Human
cuccaaucccaccaacccucag

SEQ ID NO: 3198412 - RNA, 23 nt, Human
cuccaauuuuuuaagugaaaaua

SEQ ID NO: 3198413 - RNA, 15 nt, Human
cuccaauuuuuuaag

SEQ ID NO: 3198414 - RNA, 21 nt, Human
cuccacacacacaaaaaaaga

SEQ ID NO: 3198415 - RNA, 15 nt, Human
cuccacacacacaaa

SEQ ID NO: 3198416 - RNA, 14 nt, Human
cuccacacacacaa

SEQ ID NO: 3198417 - RNA, 13 nt, Human
cuccacacccgcg

SEQ ID NO: 3198418 - RNA, 19 nt, Human
cuccacacccgcgccccgc

SEQ ID NO: 3198419 - RNA, 23 nt, Human
cuccaccaagccuggucagccca

SEQ ID NO: 3198420 - RNA, 13 nt, Human
cuccacccugcuc

SEQ ID NO: 3198421 - RNA, 15 nt, Human
cuccacccugcucuc

SEQ ID NO: 3198422 - RNA, 19 nt, Human
cucauuacuuguugccuau

SEQ ID NO: 3198423 - RNA, 19 nt, Human
cucauuagaauuaccauuu

SEQ ID NO: 3198424 - RNA, 17 nt, Human
cucauuugucacacacu

SEQ ID NO: 3198425 - RNA, 12 nt, Human
cuccaaagaaau

SEQ ID NO: 3198426 - RNA, 13 nt, Human
cuccaaagaaaug

SEQ ID NO: 3198427 - RNA, 21 nt, Human
cuccaaaaaaaaaaaaaauac

SEQ ID NO: 3198428 - RNA, 23 nt, Human
cuccaaaaaaaaaaaaaauacaa

SEQ ID NO: 3198429 - RNA, 13 nt, Human
cuccaccugcucu

SEQ ID NO: 3198430 - RNA, 15 nt, Human
cuccagccccuggau

SEQ ID NO: 3198431 - RNA, 12 nt, Human
cuccaccugcca

SEQ ID NO: 3198432 - RNA, 13 nt, Human
cuccaccugccag

SEQ ID NO: 3198433 - RNA, 14 nt, Human
cuccaccugccagg

SEQ ID NO: 3198434 - RNA, 20 nt, Human
cuccagccccuggaugcagc

SEQ ID NO: 3198435 - RNA, 16 nt, Human
cuccagccccuggaug

SEQ ID NO: 3198436 - RNA, 17 nt, Human
cuccagccccuggaugc

SEQ ID NO: 3198437 - RNA, 12 nt, Human
cuccagccuggg

SEQ ID NO: 3198438 - RNA, 12 nt, Human
cuccauccugag

SEQ ID NO: 3198439 - RNA, 11 nt, Human
cuccauccuga

SEQ ID NO: 3198440 - RNA, 18 nt, Human
cuccaggagcagccacau

SEQ ID NO: 3198441 - RNA, 23 nt, Human
cuccaggagcagccacauuccug

SEQ ID NO: 3198442 - RNA, 12 nt, Human
cuccaggcagca

SEQ ID NO: 3198443 - RNA, 11 nt, Human
cuccaggcagc

SEQ ID NO: 3198444 - RNA, 14 nt, Human
cuccaggagcagcc

SEQ ID NO: 3198445 - RNA, 15 nt, Human
cuccaggagcagcca

SEQ ID NO: 3198446 - RNA, 16 nt, Human
cuccaggagcagccac

SEQ ID NO: 3198447 - RNA, 17 nt, Human
cuccaggagcagccaca

SEQ ID NO: 3198448 - RNA, 11 nt, Human
cuccaggagca

SEQ ID NO: 3198449 - RNA, 13 nt, Human
cuccaggagcagc

SEQ ID NO: 3198450 - RNA, 20 nt, Human
cucauaguaugguggcuggg

SEQ ID NO: 3198451 - RNA, 23 nt, Human
cucauaguaugguggcuggguug

SEQ ID NO: 3198452 - RNA, 21 nt, Human
cucaucaccaacgucugugcc

SEQ ID NO: 3198453 - RNA, 20 nt, Human
cucauauccccuauuuaaca

SEQ ID NO: 3198454 - RNA, 22 nt, Human
cucaucaccaacgucugugcca

SEQ ID NO: 3198455 - RNA, 20 nt, Human
cucaucagaaacaauuucug

SEQ ID NO: 3198456 - RNA, 17 nt, Human
cucaucaugucuauugu

SEQ ID NO: 3198457 - RNA, 15 nt, Human
cucauccucauaccc

SEQ ID NO: 3198458 - RNA, 16 nt, Human
cucauacccaccccca

SEQ ID NO: 3198459 - RNA, 18 nt, Human
cucauacccacccccacc

SEQ ID NO: 3198460 - RNA, 19 nt, Human
cucauacccacccccaccc

SEQ ID NO: 3198461 - RNA, 21 nt, Human
cucauacccacccccacccaa

SEQ ID NO: 3198462 - RNA, 19 nt, Human
cucaggugauccacccacc

SEQ ID NO: 3198463 - RNA, 18 nt, Human
cucaggugauccacccac

SEQ ID NO: 3198464 - RNA, 14 nt, Human
cucagggucccugg

SEQ ID NO: 3198465 - RNA, 20 nt, Human
cucaggugauccacccaccu

SEQ ID NO: 3198466 - RNA, 22 nt, Human
cucauacucaccucaccccacu

SEQ ID NO: 3198467 - RNA, 14 nt, Human
cucauacucaccuc

SEQ ID NO: 3198468 - RNA, 15 nt, Human
cucauacccaccccc

SEQ ID NO: 3198469 - RNA, 21 nt, Human
cucauaguaugguggcugggu

SEQ ID NO: 3198470 - RNA, 20 nt, Human
cucauagcccucacccuggg

SEQ ID NO: 3198471 - RNA, 21 nt, Human
cucauagcccucacccugggg

SEQ ID NO: 3198472 - RNA, 13 nt, Human
cucauagcccuca

SEQ ID NO: 3198473 - RNA, 17 nt, Human
cucauagcccucacccu

SEQ ID NO: 3198474 - RNA, 16 nt, Human
cucaggugagaagcag

SEQ ID NO: 3198475 - RNA, 14 nt, Human
cucaggugagaagc

SEQ ID NO: 3198476 - RNA, 19 nt, Human
cucaggugagaagcagagg

SEQ ID NO: 3198477 - RNA, 20 nt, Human
cucaggugagaagcagagga

SEQ ID NO: 3198478 - RNA, 15 nt, Human
cucagggucccuggu

SEQ ID NO: 3198479 - RNA, 16 nt, Human
cucagggucccuggug

SEQ ID NO: 3198480 - RNA, 17 nt, Human
cucagggucccuggugg

SEQ ID NO: 3198481 - RNA, 14 nt, Human
cucagggccugguc

SEQ ID NO: 3198482 - RNA, 15 nt, Human
cucagggccuggucg

SEQ ID NO: 3198483 - RNA, 16 nt, Human
cucagggccuggcuca

SEQ ID NO: 3198484 - RNA, 14 nt, Human
cucagggccuggcu

SEQ ID NO: 3198485 - RNA, 15 nt, Human
cucagggccuggcuc

SEQ ID NO: 3198486 - RNA, 13 nt, Human
cucagggccuggc

SEQ ID NO: 3198487 - RNA, 18 nt, Human
cucaggaguuugagacca

SEQ ID NO: 3198488 - RNA, 23 nt, Human
cucaggaguuugagaccaaccug

SEQ ID NO: 3198489 - RNA, 19 nt, Human
cucagcccacauagugaug

SEQ ID NO: 3198490 - RNA, 18 nt, Human
cucagcauccuggcaccc

SEQ ID NO: 3198491 - RNA, 15 nt, Human
cucagcauccuggca

SEQ ID NO: 3198492 - RNA, 20 nt, Human
cugccuucgguacccaccac

SEQ ID NO: 3198493 - RNA, 19 nt, Human
cugccuucgguacccacca

SEQ ID NO: 3198494 - RNA, 18 nt, Human
cugccuucgguacccacc

SEQ ID NO: 3198495 - RNA, 21 nt, Human
cugccucugacacacagcucu

SEQ ID NO: 3198496 - RNA, 18 nt, Human
cugccucugacacacagc

SEQ ID NO: 3198497 - RNA, 15 nt, Human
cugccucugacacac

SEQ ID NO: 3198498 - RNA, 17 nt, Human
cugccucugacacacag

SEQ ID NO: 3198499 - RNA, 22 nt, Human
cugccugcccaggccccugcca

SEQ ID NO: 3198500 - RNA, 21 nt, Human
cugccugcccaggccccugcc

SEQ ID NO: 3198501 - RNA, 11 nt, Human
cugccugcccu

SEQ ID NO: 3198502 - RNA, 18 nt, Human
cugcgguccacccaggag

SEQ ID NO: 3198503 - RNA, 17 nt, Human
cugcgguccacccagga

SEQ ID NO: 3198504 - RNA, 20 nt, Human
cugcgguccacccaggagcc

SEQ ID NO: 3198505 - RNA, 19 nt, Human
cugcgguccacccaggagc

SEQ ID NO: 3198506 - RNA, 21 nt, Human
cugccuuuggcacucugacuu

SEQ ID NO: 3198507 - RNA, 13 nt, Human
cugccuuuuguuc

SEQ ID NO: 3198508 - RNA, 14 nt, Human
cugccuccagaaug

SEQ ID NO: 3198509 - RNA, 22 nt, Human
cugccuccagaauggucuuucu

SEQ ID NO: 3198510 - RNA, 23 nt, Human
cugccuaggauucacaccccacc

SEQ ID NO: 3198511 - RNA, 21 nt, Human
cugccuaggauucacacccca

SEQ ID NO: 3198512 - RNA, 14 nt, Human
cugccucagccucc

SEQ ID NO: 3198513 - RNA, 15 nt, Human
cugccucagccuccc

SEQ ID NO: 3198514 - RNA, 19 nt, Human
cugccucagccucccaaag

SEQ ID NO: 3198515 - RNA, 17 nt, Human
cugccucagccucccga

SEQ ID NO: 3198516 - RNA, 19 nt, Human
cugccgcagcccugcagag

SEQ ID NO: 3198517 - RNA, 20 nt, Human
cugccgcagcccugcagagg

SEQ ID NO: 3198518 - RNA, 21 nt, Human
cugccgcagcccugcagaggg

SEQ ID NO: 3198519 - RNA, 22 nt, Human
cugccgcagcccugcagagggc

SEQ ID NO: 3198520 - RNA, 23 nt, Human
cugccgcagcccugcagagggca

SEQ ID NO: 3198521 - RNA, 20 nt, Human
cugccgccgcuagguagagu

SEQ ID NO: 3198522 - RNA, 12 nt, Human
cugccgcagccc

SEQ ID NO: 3198523 - RNA, 13 nt, Human
cugccgcagcccu

SEQ ID NO: 3198524 - RNA, 22 nt, Human
cugccccugccuuggggucagg

SEQ ID NO: 3198525 - RNA, 12 nt, Human
cugccccugccu

SEQ ID NO: 3198526 - RNA, 18 nt, Human
cugccccugcuacugcca

SEQ ID NO: 3198527 - RNA, 13 nt, Human
cugccccugcccc

SEQ ID NO: 3198528 - RNA, 20 nt, Human
cugccccuccucucugcccu

SEQ ID NO: 3198529 - RNA, 21 nt, Human
cugccccuccucucugcccua

SEQ ID NO: 3198530 - RNA, 23 nt, Human
cugccacucaggcccaaagccuc

SEQ ID NO: 3198531 - RNA, 16 nt, Human
cugccacucaggccca

SEQ ID NO: 3198532 - RNA, 11 nt, Human
cugccaggcau

SEQ ID NO: 3198533 - RNA, 13 nt, Human
cugccaggcaugg

SEQ ID NO: 3198534 - RNA, 14 nt, Human
cugcccaccuggcc

SEQ ID NO: 3198535 - RNA, 15 nt, Human
cugcccaccuggccu

SEQ ID NO: 3198536 - RNA, 13 nt, Human
cugcccaccuggc

SEQ ID NO: 3198537 - RNA, 14 nt, Human
cugccaugccagcu

SEQ ID NO: 3198538 - RNA, 17 nt, Human
cugcccaccuggccucu

SEQ ID NO: 3198539 - RNA, 18 nt, Human
cugcccaccuggccucug

SEQ ID NO: 3198540 - RNA, 19 nt, Human
cugcccaccuggccucugc

SEQ ID NO: 3198541 - RNA, 20 nt, Human
cugcccaccuggccucugca

SEQ ID NO: 3198542 - RNA, 22 nt, Human
cugcccaccuggccucugcacu

SEQ ID NO: 3198543 - RNA, 14 nt, Human
cugcccacucccug

SEQ ID NO: 3198544 - RNA, 15 nt, Human
cugcccacucccugc

SEQ ID NO: 3198545 - RNA, 16 nt, Human
cugcccacucccugca

SEQ ID NO: 3198546 - RNA, 18 nt, Human
cugcccacucccugcaac

SEQ ID NO: 3198547 - RNA, 16 nt, Human
cugcccacuggccggc

SEQ ID NO: 3198548 - RNA, 17 nt, Human
cugcccagccuccaagc

SEQ ID NO: 3198549 - RNA, 18 nt, Human
cugcccagaucagccaga

SEQ ID NO: 3198550 - RNA, 21 nt, Human
cugcccagaucagccagaagc

SEQ ID NO: 3198551 - RNA, 20 nt, Human
cugcccagaucagccagaag

SEQ ID NO: 3198552 - RNA, 17 nt, Human
cugcccagcccccuggu

SEQ ID NO: 3198553 - RNA, 22 nt, Human
cugcccagaucagccagaagcc

SEQ ID NO: 3198554 - RNA, 20 nt, Human
cugcaucagcugcugaaaca

SEQ ID NO: 3198555 - RNA, 17 nt, Human
cugcaguugccagucac

SEQ ID NO: 3198556 - RNA, 12 nt, Human
cugcaucaucuu

SEQ ID NO: 3198557 - RNA, 21 nt, Human
cugcaguugccagucaccccg

SEQ ID NO: 3198558 - RNA, 22 nt, Human
cugcaguugccagucaccccgg

SEQ ID NO: 3198559 - RNA, 19 nt, Human
cugcaguugccagucaccc

SEQ ID NO: 3198560 - RNA, 24 nt, Human
cugcacuugggggcucagcaaggc

SEQ ID NO: 3198561 - RNA, 23 nt, Human
cugcacuugggggcucagcaagg

SEQ ID NO: 3198562 - RNA, 17 nt, Human
cugcagaacagcuucau

SEQ ID NO: 3198563 - RNA, 23 nt, Human
cugcacuugcagacucuacagag

SEQ ID NO: 3198564 - RNA, 17 nt, Human
cugcacuugcagacucu

SEQ ID NO: 3198565 - RNA, 15 nt, Human
cugcacuugggggcu

SEQ ID NO: 3198566 - RNA, 21 nt, Human
cugcacuugggggcucagcaa

SEQ ID NO: 3198567 - RNA, 20 nt, Human
cugcacuugggggcucagca

SEQ ID NO: 3198568 - RNA, 19 nt, Human
cugcacuugggggcucagc

SEQ ID NO: 3198569 - RNA, 16 nt, Human
cugcaucguuucaucu

SEQ ID NO: 3198570 - RNA, 20 nt, Human
cugcauccuccgccucccgg

SEQ ID NO: 3198571 - RNA, 19 nt, Human
cugcauccuccgccucccg

SEQ ID NO: 3198572 - RNA, 22 nt, Human
cugcaucguuucaucuuccaac

SEQ ID NO: 3198573 - RNA, 17 nt, Human
cugccaaugggagcuca

SEQ ID NO: 3198574 - RNA, 18 nt, Human
cugccaaugggagcucau

SEQ ID NO: 3198575 - RNA, 19 nt, Human
cugccaaugggagcucaug

SEQ ID NO: 3198576 - RNA, 19 nt, Human
cugccacaaggaagaaauu

SEQ ID NO: 3198577 - RNA, 18 nt, Human
cugccacaaggaagaaau

SEQ ID NO: 3198578 - RNA, 18 nt, Human
cugcaugcgggcuuccuc

SEQ ID NO: 3198579 - RNA, 22 nt, Human
cugcaugcgggcuuccuccugg

SEQ ID NO: 3198580 - RNA, 18 nt, Human
cugcaucuugguuauuuc

SEQ ID NO: 3198581 - RNA, 13 nt, Human
cugauuguauuua

SEQ ID NO: 3198582 - RNA, 17 nt, Human
cugauugugucucuugg

SEQ ID NO: 3198583 - RNA, 21 nt, Human
cugauugguuucucuucuccc

SEQ ID NO: 3198584 - RNA, 19 nt, Human
cugauugguuucucuucuc

SEQ ID NO: 3198585 - RNA, 18 nt, Human
cugauugguuucucuucu

SEQ ID NO: 3198586 - RNA, 16 nt, Human
cugauugguuucucuu

SEQ ID NO: 3198587 - RNA, 17 nt, Human
cugauggugcaaugacc

SEQ ID NO: 3198588 - RNA, 19 nt, Human
cugauggugcaaugaccuu

SEQ ID NO: 3198589 - RNA, 20 nt, Human
cugauggugcaaugaccuuu

SEQ ID NO: 3198590 - RNA, 21 nt, Human
cugauggugcaaugaccuuuc

SEQ ID NO: 3198591 - RNA, 14 nt, Human
cugauuucuccugc

SEQ ID NO: 3198592 - RNA, 13 nt, Human
cugauuucuuuuc

SEQ ID NO: 3198593 - RNA, 21 nt, Human
cugauugugucucuugguccu

SEQ ID NO: 3198594 - RNA, 14 nt, Human
cugauuuauuuugu

SEQ ID NO: 3198595 - RNA, 17 nt, Human
cugauuuauuuuguaug

SEQ ID NO: 3198596 - RNA, 18 nt, Human
cugauuuauuuuguauga

SEQ ID NO: 3198597 - RNA, 23 nt, Human
cugauuuauuuuguaugaaauau

SEQ ID NO: 3198598 - RNA, 16 nt, Human
cugauuuuuuuuuccu

SEQ ID NO: 3198599 - RNA, 18 nt, Human
cugauuuuuuuuuccuuc

SEQ ID NO: 3198600 - RNA, 19 nt, Human
cugauuuuuuuuuccuuca

SEQ ID NO: 3198601 - RNA, 20 nt, Human
cugauuuuuuuuuccuucag

SEQ ID NO: 3198602 - RNA, 10 nt, Human
cugauuuuau

SEQ ID NO: 3198603 - RNA, 15 nt, Human
cugauuuuauucuug

SEQ ID NO: 3198604 - RNA, 12 nt, Human
cugauuuuauuc

SEQ ID NO: 3198605 - RNA, 17 nt, Human
cugauuuuauucuugau

SEQ ID NO: 3198606 - RNA, 16 nt, Human
cugauuuuauucuuga

SEQ ID NO: 3198607 - RNA, 19 nt, Human
cugauuugggcugaaugua

SEQ ID NO: 3198608 - RNA, 20 nt, Human
cugauuugggcugaauguau

SEQ ID NO: 3198609 - RNA, 23 nt, Human
cugauuugggcugaauguaugua

SEQ ID NO: 3198610 - RNA, 16 nt, Human
cugauuuguuccuucu

SEQ ID NO: 3198611 - RNA, 21 nt, Human
cugauuuuuuuuuccuucagu

SEQ ID NO: 3198612 - RNA, 22 nt, Human
cugauuuuuuuuuccuucagug

SEQ ID NO: 3198613 - RNA, 23 nt, Human
cugauuuuuuuuuccuucagugc

SEQ ID NO: 3198614 - RNA, 18 nt, Human
cugauuuuauucuugauc

SEQ ID NO: 3198615 - RNA, 13 nt, Human
cugcaaagcccag

SEQ ID NO: 3198616 - RNA, 15 nt, Human
cugcaaagcccagcu

SEQ ID NO: 3198617 - RNA, 16 nt, Human
cugcaaaaccagguuu

SEQ ID NO: 3198618 - RNA, 14 nt, Human
cugcaaaaccaggu

SEQ ID NO: 3198619 - RNA, 13 nt, Human
cugcaaagcaugu

SEQ ID NO: 3198620 - RNA, 18 nt, Human
cugcaauaaggggagagu

SEQ ID NO: 3198621 - RNA, 22 nt, Human
cugcacaagcugcacccucagg

SEQ ID NO: 3198622 - RNA, 18 nt, Human
cugcacaagcugcacccu

SEQ ID NO: 3198623 - RNA, 13 nt, Human
cugcacacagcac

SEQ ID NO: 3198624 - RNA, 14 nt, Human
cugcacacaaauau

SEQ ID NO: 3198625 - RNA, 22 nt, Human
cugcacagugcaucucagccca

SEQ ID NO: 3198626 - RNA, 14 nt, Human
cugcacacagcacg

SEQ ID NO: 3198627 - RNA, 20 nt, Human
cugcacacgcuccuuccucu

SEQ ID NO: 3198628 - RNA, 22 nt, Human
cugcacacgcuccuuccucuga

SEQ ID NO: 3198629 - RNA, 21 nt, Human
cugcacaccuugaaucugccu

SEQ ID NO: 3198630 - RNA, 14 nt, Human
cugcaccccuuccu

SEQ ID NO: 3198631 - RNA, 16 nt, Human
cugcaccccuuccugg

SEQ ID NO: 3198632 - RNA, 15 nt, Human
cugcaccccuuccug

SEQ ID NO: 3198633 - RNA, 22 nt, Human
cugcacaugauuucacaaauau

SEQ ID NO: 3198634 - RNA, 21 nt, Human
cugcacaugauuucacaaaua

SEQ ID NO: 3198635 - RNA, 18 nt, Human
cugcacaugauuucacaa

SEQ ID NO: 3198636 - RNA, 17 nt, Human
cugcacaugauuucaca

SEQ ID NO: 3198637 - RNA, 16 nt, Human
cugcacaugauuucac

SEQ ID NO: 3198638 - RNA, 15 nt, Human
cugcacaugauuuca

SEQ ID NO: 3198639 - RNA, 16 nt, Human
cugcacuccccugcug

SEQ ID NO: 3198640 - RNA, 17 nt, Human
cugcacuccccugcugg

SEQ ID NO: 3198641 - RNA, 15 nt, Human
cugcacucucauugu

SEQ ID NO: 3198642 - RNA, 18 nt, Human
cugcacuugcagacucua

SEQ ID NO: 3198643 - RNA, 15 nt, Human
cugcacugacucugg

SEQ ID NO: 3198644 - RNA, 14 nt, Human
cugcacugacucug

SEQ ID NO: 3198645 - RNA, 18 nt, Human
cugcacugacucuggaaa

SEQ ID NO: 3198646 - RNA, 16 nt, Human
cugcacugacucugga

SEQ ID NO: 3198647 - RNA, 13 nt, Human
cugcacccucagg

SEQ ID NO: 3198648 - RNA, 14 nt, Human
cugcacccucaggc

SEQ ID NO: 3198649 - RNA, 20 nt, Human
cugcaccggcuggccuggcc

SEQ ID NO: 3198650 - RNA, 22 nt, Human
cugcaccggcuggccuggcccc

SEQ ID NO: 3198651 - RNA, 14 nt, Human
cugcacuccccugc

SEQ ID NO: 3198652 - RNA, 21 nt, Human
cugcaccccuuccugggcaca

SEQ ID NO: 3198653 - RNA, 20 nt, Human
cugcaccccuuccugggcac

SEQ ID NO: 3198654 - RNA, 19 nt, Human
cugcaccccuuccugggca

SEQ ID NO: 3198655 - RNA, 17 nt, Human
cugcaccccuuccuggg

SEQ ID NO: 3198656 - RNA, 15 nt, Human
cugcacuccccugcu

SEQ ID NO: 3198657 - RNA, 23 nt, Human
cugcaccggcuggccuggccccu

SEQ ID NO: 3198658 - RNA, 12 nt, Human
cugcaccgggcc

SEQ ID NO: 3198659 - RNA, 18 nt, Human
cugaguuccuagccaccg

SEQ ID NO: 3198660 - RNA, 17 nt, Human
cugaguuccuagccacc

SEQ ID NO: 3198661 - RNA, 16 nt, Human
cugaguuccuagccac

SEQ ID NO: 3198662 - RNA, 15 nt, Human
cugaguuccuagcca

SEQ ID NO: 3198663 - RNA, 22 nt, Human
cugagugggggaucacagccuc

SEQ ID NO: 3198664 - RNA, 20 nt, Human
cugagucuguucugguaauc

SEQ ID NO: 3198665 - RNA, 18 nt, Human
cugagucugaaggcuggg

SEQ ID NO: 3198666 - RNA, 19 nt, Human
cugagucugaaggcugggu

SEQ ID NO: 3198667 - RNA, 17 nt, Human
cugagucugaaggcugg

SEQ ID NO: 3198668 - RNA, 22 nt, Human
cugauaaauauucacacuugaa

SEQ ID NO: 3198669 - RNA, 19 nt, Human
cugaguuaggcuuucucuu

SEQ ID NO: 3198670 - RNA, 13 nt, Human
cugaguuccugag

SEQ ID NO: 3198671 - RNA, 19 nt, Human
cugaguuccggcaccagua

SEQ ID NO: 3198672 - RNA, 21 nt, Human
cugaguucuguguauuuucag

SEQ ID NO: 3198673 - RNA, 17 nt, Human
cugaguugaagagggga

SEQ ID NO: 3198674 - RNA, 14 nt, Human
cugaguugaagagg

SEQ ID NO: 3198675 - RNA, 22 nt, Human
cugaguugaagucaugcucccc

SEQ ID NO: 3198676 - RNA, 17 nt, Human
cugaguuguuaccccaa

SEQ ID NO: 3198677 - RNA, 16 nt, Human
cugaguuguuacccca

SEQ ID NO: 3198678 - RNA, 20 nt, Human
cugauccuaguuccaccauc

SEQ ID NO: 3198679 - RNA, 21 nt, Human
cugauccuaguuccaccauca

SEQ ID NO: 3198680 - RNA, 18 nt, Human
cugaucccuuccaccugc

SEQ ID NO: 3198681 - RNA, 14 nt, Human
cugaucccuuccac

SEQ ID NO: 3198682 - RNA, 20 nt, Human
cugaucccugaucccuucca

SEQ ID NO: 3198683 - RNA, 17 nt, Human
cugaucccugaucccuu

SEQ ID NO: 3198684 - RNA, 15 nt, Human
cugauggugcaauga

SEQ ID NO: 3198685 - RNA, 16 nt, Human
cugauggugcaaugac

SEQ ID NO: 3198686 - RNA, 14 nt, Human
cugauggugcaaug

SEQ ID NO: 3198687 - RNA, 21 nt, Human
cugaucccuuccaccugcucu

SEQ ID NO: 3198688 - RNA, 14 nt, Human
cugauauauuuaaa

SEQ ID NO: 3198689 - RNA, 16 nt, Human
cugauauugaaguaaa

SEQ ID NO: 3198690 - RNA, 14 nt, Human
cugauauugaagua

SEQ ID NO: 3198691 - RNA, 20 nt, Human
cugauauucaaauggacaaa

SEQ ID NO: 3198692 - RNA, 13 nt, Human
cugauauguuugu

SEQ ID NO: 3198693 - RNA, 20 nt, Human
cugauauuaauuuaucagau

SEQ ID NO: 3198694 - RNA, 23 nt, Human
cugauauuaauuuaucagauugc

SEQ ID NO: 3198695 - RNA, 15 nt, Human
cugaucaccugcccu

SEQ ID NO: 3198696 - RNA, 15 nt, Human
cugaucacugaaaua

SEQ ID NO: 3198697 - RNA, 15 nt, Human
cugaggcuccacuug

SEQ ID NO: 3198698 - RNA, 21 nt, Human
cugaggcuccacuuggucugu

SEQ ID NO: 3198699 - RNA, 24 nt, Human
cugaggcccuucucuccagccccu

SEQ ID NO: 3198700 - RNA, 20 nt, Human
cugaggccguugcugacuua

SEQ ID NO: 3198701 - RNA, 15 nt, Human
cugagcccccagcuu

SEQ ID NO: 3198702 - RNA, 14 nt, Human
cugagcccccagcu

SEQ ID NO: 3198703 - RNA, 23 nt, Human
cugagcccccagcuuccagcagg

SEQ ID NO: 3198704 - RNA, 22 nt, Human
cugagcccccagcuuccagcag

SEQ ID NO: 3198705 - RNA, 18 nt, Human
cugagcccccagcuucca

SEQ ID NO: 3198706 - RNA, 17 nt, Human
cugagcccccagcuucc

SEQ ID NO: 3198707 - RNA, 15 nt, Human
cugaggcugggcucc

SEQ ID NO: 3198708 - RNA, 16 nt, Human
cugaggcugggcuccc

SEQ ID NO: 3198709 - RNA, 17 nt, Human
cugaggcugggcucccu

SEQ ID NO: 3198710 - RNA, 22 nt, Human
cugaggcugggcucccuuccca

SEQ ID NO: 3198711 - RNA, 13 nt, Human
cugaggcugggcu

SEQ ID NO: 3198712 - RNA, 16 nt, Human
cucugauacuuuuuug

SEQ ID NO: 3198713 - RNA, 14 nt, Human
cucugauacuuuuu

SEQ ID NO: 3198714 - RNA, 14 nt, Human
cucugcacaagcug

SEQ ID NO: 3198715 - RNA, 15 nt, Human
cucugcacaagcugc

SEQ ID NO: 3198716 - RNA, 10 nt, Human
cucugcacaa

SEQ ID NO: 3198717 - RNA, 23 nt, Human
cucugaguuccggcaccaguagc

SEQ ID NO: 3198718 - RNA, 13 nt, Human
cucugcacaagcu

SEQ ID NO: 3198719 - RNA, 21 nt, Human
cucugaguuccggcaccagua

SEQ ID NO: 3198720 - RNA, 20 nt, Human
cucugaguuccggcaccagu

SEQ ID NO: 3198721 - RNA, 19 nt, Human
cucugaguuccggcaccag

SEQ ID NO: 3198722 - RNA, 18 nt, Human
cucugcccacucccugca

SEQ ID NO: 3198723 - RNA, 20 nt, Human
cucugcccacucccugcaac

SEQ ID NO: 3198724 - RNA, 13 nt, Human
cucugcccacucc

SEQ ID NO: 3198725 - RNA, 15 nt, Human
cucugcccacucccu

SEQ ID NO: 3198726 - RNA, 16 nt, Human
cucugcccacucccug

SEQ ID NO: 3198727 - RNA, 17 nt, Human
cucugcccacucccugc

SEQ ID NO: 3198728 - RNA, 20 nt, Human
cucugcccuaaugcgcaggc

SEQ ID NO: 3198729 - RNA, 12 nt, Human
cucugcccuugg

SEQ ID NO: 3198730 - RNA, 13 nt, Human
cucugccucccau

SEQ ID NO: 3198731 - RNA, 14 nt, Human
cucugccucccauc

SEQ ID NO: 3198732 - RNA, 16 nt, Human
cucugccucccaucac

SEQ ID NO: 3198733 - RNA, 17 nt, Human
cucugccucccaucacc

SEQ ID NO: 3198734 - RNA, 14 nt, Human
cucugaggacacua

SEQ ID NO: 3198735 - RNA, 12 nt, Human
cucugaggacac

SEQ ID NO: 3198736 - RNA, 22 nt, Human
cucugaguagggcaauggaaau

SEQ ID NO: 3198737 - RNA, 20 nt, Human
cucugagacucgcgacaaug

SEQ ID NO: 3198738 - RNA, 23 nt, Human
cucugagacucgcgacaaugcaa

SEQ ID NO: 3198739 - RNA, 12 nt, Human
cucugaggacaa

SEQ ID NO: 3198740 - RNA, 21 nt, Human
cucugagacucgcgacaaugc

SEQ ID NO: 3198741 - RNA, 15 nt, Human
cucugaccccugccu

SEQ ID NO: 3198742 - RNA, 13 nt, Human
cucugacaaagcu

SEQ ID NO: 3198743 - RNA, 14 nt, Human
cucugaauuuuaaa

SEQ ID NO: 3198744 - RNA, 23 nt, Human
cucugacagaagaaccccagggu

SEQ ID NO: 3198745 - RNA, 19 nt, Human
cucugacacacagcucugu

SEQ ID NO: 3198746 - RNA, 18 nt, Human
cucugacacacagcucug

SEQ ID NO: 3198747 - RNA, 17 nt, Human
cucugacacacagcucu

SEQ ID NO: 3198748 - RNA, 16 nt, Human
cucugacacacagcuc

SEQ ID NO: 3198749 - RNA, 15 nt, Human
cucugacacacagcu

SEQ ID NO: 3198750 - RNA, 14 nt, Human
cucugacacacagc

SEQ ID NO: 3198751 - RNA, 21 nt, Human
cucugacaacagacuucugaa

SEQ ID NO: 3198752 - RNA, 22 nt, Human
cucugacaacagacuucugaaa

SEQ ID NO: 3198753 - RNA, 22 nt, Human
cucugaaggacauugcggacag

SEQ ID NO: 3198754 - RNA, 21 nt, Human
cucugaaggaggccaccuccu

SEQ ID NO: 3198755 - RNA, 20 nt, Human
cucugaaggaggccaccucc

SEQ ID NO: 3198756 - RNA, 19 nt, Human
cucugaaggaggccaccuc

SEQ ID NO: 3198757 - RNA, 18 nt, Human
cucugaaggaggccaccu

SEQ ID NO: 3198758 - RNA, 17 nt, Human
cucugaaggaggccacc

SEQ ID NO: 3198759 - RNA, 16 nt, Human
cucugaaggaggccac

SEQ ID NO: 3198760 - RNA, 15 nt, Human
cucugaaggaggcca

SEQ ID NO: 3198761 - RNA, 14 nt, Human
cucugaaggaggcc

SEQ ID NO: 3198762 - RNA, 19 nt, Human
cucugaauaagcacuuuuu

SEQ ID NO: 3198763 - RNA, 16 nt, Human
cucugacaacagacuu

SEQ ID NO: 3198764 - RNA, 22 nt, Human
cucugaauuuaucuuugauaac

SEQ ID NO: 3198765 - RNA, 15 nt, Human
cucugaauuuaucuu

SEQ ID NO: 3198766 - RNA, 21 nt, Human
cucugaauaagcacuuuuuaa

SEQ ID NO: 3198767 - RNA, 20 nt, Human
cucugccucugacacacagc

SEQ ID NO: 3198768 - RNA, 19 nt, Human
cucugccucugacacacag

SEQ ID NO: 3198769 - RNA, 21 nt, Human
cucugccucccaucacccgcu

SEQ ID NO: 3198770 - RNA, 16 nt, Human
cucugccucugacaca

SEQ ID NO: 3198771 - RNA, 21 nt, Human
cucuggccuucggccuccauc

SEQ ID NO: 3198772 - RNA, 19 nt, Human
cucuggccuucggccucca

SEQ ID NO: 3198773 - RNA, 22 nt, Human
cucuggccuucggccuccaucc

SEQ ID NO: 3198774 - RNA, 23 nt, Human
cucuggcagcucagagagggugg

SEQ ID NO: 3198775 - RNA, 20 nt, Human
cucuggcagcucagagaggg

SEQ ID NO: 3198776 - RNA, 23 nt, Human
cucuggcagcaccgccucuuccc

SEQ ID NO: 3198777 - RNA, 22 nt, Human
cucuggcagcaccgccucuucc

SEQ ID NO: 3198778 - RNA, 13 nt, Human
cucuggcagcacc

SEQ ID NO: 3198779 - RNA, 16 nt, Human
cucuggcagcaccgcc

SEQ ID NO: 3198780 - RNA, 14 nt, Human
cucuggcagcaccg

SEQ ID NO: 3198781 - RNA, 13 nt, Human
cucugucgcccag

SEQ ID NO: 3198782 - RNA, 15 nt, Human
cucugucgcccaggc

SEQ ID NO: 3198783 - RNA, 17 nt, Human
cucugucgcccagucug

SEQ ID NO: 3198784 - RNA, 18 nt, Human
cucugucgcccaggcugg

SEQ ID NO: 3198785 - RNA, 22 nt, Human
cucugucgcccaggcuggagug

SEQ ID NO: 3198786 - RNA, 19 nt, Human
cucugucgcccagucugga

SEQ ID NO: 3198787 - RNA, 18 nt, Human
cucugucgcccagucugg

SEQ ID NO: 3198788 - RNA, 16 nt, Human
cucugucgagccuggg

SEQ ID NO: 3198789 - RNA, 19 nt, Human
cucugucuugguagguuug

SEQ ID NO: 3198790 - RNA, 22 nt, Human
cucuguccugggagugagcugg

SEQ ID NO: 3198791 - RNA, 15 nt, Human
cucuguccugggagu

SEQ ID NO: 3198792 - RNA, 13 nt, Human
cucuguccuggga

SEQ ID NO: 3198793 - RNA, 14 nt, Human
cucuguccugggag

SEQ ID NO: 3198794 - RNA, 14 nt, Human
cucugggaacuucu

SEQ ID NO: 3198795 - RNA, 22 nt, Human
cucuguugcccaggcuggagug

SEQ ID NO: 3198796 - RNA, 17 nt, Human
cucuguugcccaggcug

SEQ ID NO: 3198797 - RNA, 23 nt, Human
cucugugucagguggggcagcuu

SEQ ID NO: 3198798 - RNA, 22 nt, Human
cucugugucagguggggcagcu

SEQ ID NO: 3198799 - RNA, 21 nt, Human
cucugugucagguggggcagc

SEQ ID NO: 3198800 - RNA, 20 nt, Human
cucugugucagguggggcag

SEQ ID NO: 3198801 - RNA, 19 nt, Human
cucugugucagguggggca

SEQ ID NO: 3198802 - RNA, 13 nt, Human
cucuucuccaggc

SEQ ID NO: 3198803 - RNA, 15 nt, Human
cucuucuccaggcug

SEQ ID NO: 3198804 - RNA, 13 nt, Human
cucuucuccacug

SEQ ID NO: 3198805 - RNA, 12 nt, Human
cucuucuccacu

SEQ ID NO: 3198806 - RNA, 21 nt, Human
cucuucuagaugauuuuuuga

SEQ ID NO: 3198807 - RNA, 19 nt, Human
cucuuccuggacaggccag

SEQ ID NO: 3198808 - RNA, 15 nt, Human
cucuuccuggacagg

SEQ ID NO: 3198809 - RNA, 23 nt, Human
cucuuccuccugacaccccacuu

SEQ ID NO: 3198810 - RNA, 23 nt, Human
cucuucccgccgcccagcccacc

SEQ ID NO: 3198811 - RNA, 21 nt, Human
cucuucccgccgcccagccca

SEQ ID NO: 3198812 - RNA, 12 nt, Human
cugagcaggugu

SEQ ID NO: 3198813 - RNA, 22 nt, Human
cugagcagugauauucuuuguu

SEQ ID NO: 3198814 - RNA, 17 nt, Human
cugagcagugauauucu

SEQ ID NO: 3198815 - RNA, 13 nt, Human
cugagccagauuu

SEQ ID NO: 3198816 - RNA, 14 nt, Human
cugagccagauuuc

SEQ ID NO: 3198817 - RNA, 13 nt, Human
cugagcccacugu

SEQ ID NO: 3198818 - RNA, 12 nt, Human
cugagcccacug

SEQ ID NO: 3198819 - RNA, 11 nt, Human
cugagcccacu

SEQ ID NO: 3198820 - RNA, 10 nt, Human
cugagcccac

SEQ ID NO: 3198821 - RNA, 16 nt, Human
cugagcaggauuuuaa

SEQ ID NO: 3198822 - RNA, 20 nt, Human
cugagcacccagcucugucu

SEQ ID NO: 3198823 - RNA, 21 nt, Human
cugagaugugaacacaucagc

SEQ ID NO: 3198824 - RNA, 23 nt, Human
cugagauuauaggcaccuaccac

SEQ ID NO: 3198825 - RNA, 21 nt, Human
cugagcaaauguggcuccugg

SEQ ID NO: 3198826 - RNA, 20 nt, Human
cugagcaaauguggcuccug

SEQ ID NO: 3198827 - RNA, 17 nt, Human
cugagcaaauguggcuc

SEQ ID NO: 3198828 - RNA, 15 nt, Human
cugagcaaauguggc

SEQ ID NO: 3198829 - RNA, 20 nt, Human
cugagaaagacuauucaaac

SEQ ID NO: 3198830 - RNA, 19 nt, Human
cugagaaagacuauucaaa

SEQ ID NO: 3198831 - RNA, 20 nt, Human
cugagacagcccgggcucug

SEQ ID NO: 3198832 - RNA, 19 nt, Human
cugagacagcccgggcucu

SEQ ID NO: 3198833 - RNA, 20 nt, Human
cugagaugugaacacaucag

SEQ ID NO: 3198834 - RNA, 16 nt, Human
cugagaugugaacaca

SEQ ID NO: 3198835 - RNA, 21 nt, Human
cugagacagcccgggcucugc

SEQ ID NO: 3198836 - RNA, 15 nt, Human
cugacuacagggccg

SEQ ID NO: 3198837 - RNA, 14 nt, Human
cugacuacagggcc

SEQ ID NO: 3198838 - RNA, 11 nt, Human
cugacugaggc

SEQ ID NO: 3198839 - RNA, 13 nt, Human
cugacugacauga

SEQ ID NO: 3198840 - RNA, 14 nt, Human
cugacugaggcagu

SEQ ID NO: 3198841 - RNA, 17 nt, Human
cugacugaggcaguuug

SEQ ID NO: 3198842 - RNA, 14 nt, Human
cugacucuucccca

SEQ ID NO: 3198843 - RNA, 17 nt, Human
cugacucccccaguccc

SEQ ID NO: 3198844 - RNA, 13 nt, Human
cugacuccugguc

SEQ ID NO: 3198845 - RNA, 14 nt, Human
cugacuccuggucc

SEQ ID NO: 3198846 - RNA, 15 nt, Human
cugacuccugguccu

SEQ ID NO: 3198847 - RNA, 18 nt, Human
cugagaaagacuauucaa

SEQ ID NO: 3198848 - RNA, 15 nt, Human
cugagaaagacuauu

SEQ ID NO: 3198849 - RNA, 13 nt, Human
cugagaaagacua

SEQ ID NO: 3198850 - RNA, 12 nt, Human
cugagaaagacu

SEQ ID NO: 3198851 - RNA, 17 nt, Human
cugacuguacuccuccc

SEQ ID NO: 3198852 - RNA, 15 nt, Human
cugacugggggcaga

SEQ ID NO: 3198853 - RNA, 14 nt, Human
cugacugggggcag

SEQ ID NO: 3198854 - RNA, 15 nt, Human
cugacugggccaggg

SEQ ID NO: 3198855 - RNA, 14 nt, Human
cugacugggccagg

SEQ ID NO: 3198856 - RNA, 18 nt, Human
cugacugucacaacuccu

SEQ ID NO: 3198857 - RNA, 17 nt, Human
cugacugggggcagaca

SEQ ID NO: 3198858 - RNA, 23 nt, Human
cugaccagccuccaugcugccuc

SEQ ID NO: 3198859 - RNA, 21 nt, Human
cugaccagccuccaugcugcc

SEQ ID NO: 3198860 - RNA, 18 nt, Human
cugacagacacaggcccg

SEQ ID NO: 3198861 - RNA, 17 nt, Human
cugacagacacaggccc

SEQ ID NO: 3198862 - RNA, 15 nt, Human
cugacagacacaggc

SEQ ID NO: 3198863 - RNA, 17 nt, Human
cugaccagccuccaugc

SEQ ID NO: 3198864 - RNA, 12 nt, Human
cugaauuuggag

SEQ ID NO: 3198865 - RNA, 16 nt, Human
cugacagacacaggcc

SEQ ID NO: 3198866 - RNA, 14 nt, Human
cugaauuaauuaau

SEQ ID NO: 3198867 - RNA, 16 nt, Human
cugaauuaauuaauuu

SEQ ID NO: 3198868 - RNA, 20 nt, Human
cugaaugguuuucaaaauaa

SEQ ID NO: 3198869 - RNA, 19 nt, Human
cugaaugguuuucaaaaua

SEQ ID NO: 3198870 - RNA, 13 nt, Human
cugaauguaugua

SEQ ID NO: 3198871 - RNA, 15 nt, Human
cugaauguauguaaa

SEQ ID NO: 3198872 - RNA, 16 nt, Human
cugaauguauguaaau

SEQ ID NO: 3198873 - RNA, 23 nt, Human
cugaauggcuugcaguuguuccu

SEQ ID NO: 3198874 - RNA, 14 nt, Human
cugaaugaagcagu

SEQ ID NO: 3198875 - RNA, 14 nt, Human
cugaaguuaugugu

SEQ ID NO: 3198876 - RNA, 20 nt, Human
cugaaguuauauuuccuaua

SEQ ID NO: 3198877 - RNA, 17 nt, Human
cugaaguuauauuuccu

SEQ ID NO: 3198878 - RNA, 14 nt, Human
cugaaguuauauuu

SEQ ID NO: 3198879 - RNA, 19 nt, Human
cugaaguucugccucugau

SEQ ID NO: 3198880 - RNA, 23 nt, Human
cugaaguucugccucugauguau

SEQ ID NO: 3198881 - RNA, 20 nt, Human
cugaaguucugccucugaug

SEQ ID NO: 3198882 - RNA, 13 nt, Human
cugaaguuugaua

SEQ ID NO: 3198883 - RNA, 22 nt, Human
cugaaguuugauaaauaguguu

SEQ ID NO: 3198884 - RNA, 21 nt, Human
cugaaguuugauaaauagugu

SEQ ID NO: 3198885 - RNA, 14 nt, Human
cugaagucaguucu

SEQ ID NO: 3198886 - RNA, 14 nt, Human
cugaagucuguauu

SEQ ID NO: 3198887 - RNA, 22 nt, Human
cugaagucccagauacuugggg

SEQ ID NO: 3198888 - RNA, 17 nt, Human
cugaagucuuuguacag

SEQ ID NO: 3198889 - RNA, 20 nt, Human
cugaagucuuuguacagaca

SEQ ID NO: 3198890 - RNA, 17 nt, Human
cugaagucacacaguga

SEQ ID NO: 3198891 - RNA, 19 nt, Human
cugaagucacacagugagu

SEQ ID NO: 3198892 - RNA, 18 nt, Human
cugaagucacacagugag

SEQ ID NO: 3198893 - RNA, 21 nt, Human
cugaagucacacagugagucg

SEQ ID NO: 3198894 - RNA, 16 nt, Human
cugaagucacacagug

SEQ ID NO: 3198895 - RNA, 15 nt, Human
cugaagucacugcac

SEQ ID NO: 3198896 - RNA, 14 nt, Human
cugaagucacugca

SEQ ID NO: 3198897 - RNA, 13 nt, Human
cugaagucacugc

SEQ ID NO: 3198898 - RNA, 22 nt, Human
cugaacacauuucuuuuuaaaa

SEQ ID NO: 3198899 - RNA, 17 nt, Human
cugaacacauuucuuuu

SEQ ID NO: 3198900 - RNA, 14 nt, Human
cugaacacauuucu

SEQ ID NO: 3198901 - RNA, 13 nt, Human
cugaacacauuuc

SEQ ID NO: 3198902 - RNA, 14 nt, Human
cugaacauuggaga

SEQ ID NO: 3198903 - RNA, 14 nt, Human
cugaaccacuugua

SEQ ID NO: 3198904 - RNA, 15 nt, Human
cugaaccacuuguag

SEQ ID NO: 3198905 - RNA, 14 nt, Human
cugaacauugcaua

SEQ ID NO: 3198906 - RNA, 12 nt, Human
cugaacauugga

SEQ ID NO: 3198907 - RNA, 17 nt, Human
cugaaccacuuguagau

SEQ ID NO: 3198908 - RNA, 18 nt, Human
cugaaccacuuguagauu

SEQ ID NO: 3198909 - RNA, 22 nt, Human
cugaaccacuuguagauuugau

SEQ ID NO: 3198910 - RNA, 15 nt, Human
cugaaauaaaagcua

SEQ ID NO: 3198911 - RNA, 13 nt, Human
cugaaauaaaagc

SEQ ID NO: 3198912 - RNA, 11 nt, Human
cugaaaugugu

SEQ ID NO: 3198913 - RNA, 16 nt, Human
cugaaauguguuuccu

SEQ ID NO: 3198914 - RNA, 22 nt, Human
cugaaaugugugugaugugaca

SEQ ID NO: 3198915 - RNA, 20 nt, Human
cugaaaugugugugauguga

SEQ ID NO: 3198916 - RNA, 19 nt, Human
cugaaaugugugugaugug

SEQ ID NO: 3198917 - RNA, 18 nt, Human
cugaaaugugugugaugu

SEQ ID NO: 3198918 - RNA, 17 nt, Human
cugaaaugugugugaug

SEQ ID NO: 3198919 - RNA, 16 nt, Human
cugaaaugugugugau

SEQ ID NO: 3198920 - RNA, 13 nt, Human
cugaaaugugugu

SEQ ID NO: 3198921 - RNA, 17 nt, Human
cucuuuuaucuccugaa

SEQ ID NO: 3198922 - RNA, 16 nt, Human
cucuuuuagauauugu

SEQ ID NO: 3198923 - RNA, 23 nt, Human
cugaaagggacgcuacccgggaa

SEQ ID NO: 3198924 - RNA, 14 nt, Human
cucuuuucaaaaca

SEQ ID NO: 3198925 - RNA, 17 nt, Human
cugaaagguagacuuuu

SEQ ID NO: 3198926 - RNA, 19 nt, Human
cugaaaggcaguagucauu

SEQ ID NO: 3198927 - RNA, 20 nt, Human
cucuuuuccaaacacaggca

SEQ ID NO: 3198928 - RNA, 16 nt, Human
cucuuuuccaaacaca

SEQ ID NO: 3198929 - RNA, 22 nt, Human
cucuuuuaucuccugaaaaaag

SEQ ID NO: 3198930 - RNA, 12 nt, Human
cugaaagugaug

SEQ ID NO: 3198931 - RNA, 22 nt, Human
cucuuuggucuacacugugcug

SEQ ID NO: 3198932 - RNA, 23 nt, Human
cucuuuggucuacacugugcuga

SEQ ID NO: 3198933 - RNA, 21 nt, Human
cucuuuggucuacacugugcu

SEQ ID NO: 3198934 - RNA, 16 nt, Human
cucuucuccaggcugu

SEQ ID NO: 3198935 - RNA, 19 nt, Human
cucuucucucugcucugac

SEQ ID NO: 3198936 - RNA, 18 nt, Human
cucuucucauuacuuguu

SEQ ID NO: 3198937 - RNA, 22 nt, Human
gauuaagaucucagugguuaag

SEQ ID NO: 3198938 - RNA, 18 nt, Human
gauuaacuuggaugaguu

SEQ ID NO: 3198939 - RNA, 12 nt, Human
gauuaacuugga

SEQ ID NO: 3198940 - RNA, 20 nt, Human
gauuaacugaaauaaaaaau

SEQ ID NO: 3198941 - RNA, 19 nt, Human
gauucaacagguuuuccug

SEQ ID NO: 3198942 - RNA, 19 nt, Human
gauuaaccacuucagcuga

SEQ ID NO: 3198943 - RNA, 21 nt, Human
gauuaaccacuucagcugacu

SEQ ID NO: 3198944 - RNA, 18 nt, Human
gauuaaccacuucagcug

SEQ ID NO: 3198945 - RNA, 15 nt, Human
gauguuuuccaugag

SEQ ID NO: 3198946 - RNA, 23 nt, Human
gauguuuuccaugaguccccugu

SEQ ID NO: 3198947 - RNA, 14 nt, Human
gauguuuuccauga

SEQ ID NO: 3198948 - RNA, 17 nt, Human
gauguuaaaauaaaugg

SEQ ID NO: 3198949 - RNA, 20 nt, Human
gauguuaaaauaaaugguuu

SEQ ID NO: 3198950 - RNA, 21 nt, Human
gauguucuuucacccuuuucu

SEQ ID NO: 3198951 - RNA, 23 nt, Human
gauguggaaaagccaagaggcug

SEQ ID NO: 3198952 - RNA, 21 nt, Human
gauguggaaaagccaagaggc

SEQ ID NO: 3198953 - RNA, 20 nt, Human
gaugugcuuguuaacugagu

SEQ ID NO: 3198954 - RNA, 15 nt, Human
gauguguaucagugu

SEQ ID NO: 3198955 - RNA, 20 nt, Human
gauguguaauuuuucuguau

SEQ ID NO: 3198956 - RNA, 19 nt, Human
gauguguaauuuuucugua

SEQ ID NO: 3198957 - RNA, 17 nt, Human
gauguguaauuuuucug

SEQ ID NO: 3198958 - RNA, 13 nt, Human
gauguguaauuuu

SEQ ID NO: 3198959 - RNA, 21 nt, Human
gauguguccugauaagcugag

SEQ ID NO: 3198960 - RNA, 14 nt, Human
gauguguucuuauu

SEQ ID NO: 3198961 - RNA, 16 nt, Human
gauguucugggacaca

SEQ ID NO: 3198962 - RNA, 14 nt, Human
gauguucugggaca

SEQ ID NO: 3198963 - RNA, 23 nt, Human
gauggugcaaugaccuuucaaua

SEQ ID NO: 3198964 - RNA, 19 nt, Human
gaugugcuuguuaacugag

SEQ ID NO: 3198965 - RNA, 19 nt, Human
gaugugcuauaaucuguuu

SEQ ID NO: 3198966 - RNA, 15 nt, Human
gaugugcugcuuuga

SEQ ID NO: 3198967 - RNA, 15 nt, Human
gaugugcugcagugc

SEQ ID NO: 3198968 - RNA, 12 nt, Human
gaugugccuaaa

SEQ ID NO: 3198969 - RNA, 20 nt, Human
gauggugcaaugaccuuuca

SEQ ID NO: 3198970 - RNA, 18 nt, Human
gaugggccugagugagag

SEQ ID NO: 3198971 - RNA, 13 nt, Human
gaugggccugagu

SEQ ID NO: 3198972 - RNA, 12 nt, Human
gaugggccugag

SEQ ID NO: 3198973 - RNA, 10 nt, Human
gaugggccug

SEQ ID NO: 3198974 - RNA, 13 nt, Human
gauugugccccug

SEQ ID NO: 3198975 - RNA, 20 nt, Human
gauuguccccgacccuugcc

SEQ ID NO: 3198976 - RNA, 20 nt, Human
gauugucaaugcuggagaaa

SEQ ID NO: 3198977 - RNA, 21 nt, Human
gauugucaaugcuggagaaaa

SEQ ID NO: 3198978 - RNA, 21 nt, Human
gauugucaccaugaucacuua

SEQ ID NO: 3198979 - RNA, 15 nt, Human
gauuguccccgaccc

SEQ ID NO: 3198980 - RNA, 23 nt, Human
gauuguaauauguaaaugguaug

SEQ ID NO: 3198981 - RNA, 18 nt, Human
gauugcuugagcucagga

SEQ ID NO: 3198982 - RNA, 13 nt, Human
gauugcuuuuaaa

SEQ ID NO: 3198983 - RNA, 16 nt, Human
gauugcuuuuaaaauu

SEQ ID NO: 3198984 - RNA, 14 nt, Human
gauugcuuuuaaaa

SEQ ID NO: 3198985 - RNA, 18 nt, Human
gauugcuuuuaaaauuuu

SEQ ID NO: 3198986 - RNA, 23 nt, Human
gauuggacauaacugacuuaguu

SEQ ID NO: 3198987 - RNA, 13 nt, Human
gauucuaggaccu

SEQ ID NO: 3198988 - RNA, 17 nt, Human
gauugaaaauaaugcug

SEQ ID NO: 3198989 - RNA, 17 nt, Human
gauugaagaaacagcua

SEQ ID NO: 3198990 - RNA, 12 nt, Human
gauucagacagc

SEQ ID NO: 3198991 - RNA, 22 nt, Human
gauucccaagcucugcuccucu

SEQ ID NO: 3198992 - RNA, 21 nt, Human
gauucccaagcucugcuccuc

SEQ ID NO: 3198993 - RNA, 10 nt, Human
gauucaaauu

SEQ ID NO: 3198994 - RNA, 14 nt, Human
gauucaaauuuauu

SEQ ID NO: 3198995 - RNA, 19 nt, Human
gauucacaccccaccugcg

SEQ ID NO: 3198996 - RNA, 22 nt, Human
gauucacauguuuucaaaugga

SEQ ID NO: 3198997 - RNA, 20 nt, Human
gauucacauguuuucaaaug

SEQ ID NO: 3198998 - RNA, 19 nt, Human
gauucacauguuuucaaau

SEQ ID NO: 3198999 - RNA, 18 nt, Human
gauucacauguuuucaaa

SEQ ID NO: 3199000 - RNA, 17 nt, Human
gauucacauguuuucaa

SEQ ID NO: 3199001 - RNA, 16 nt, Human
gauucacauguuuuca

SEQ ID NO: 3199002 - RNA, 13 nt, Human
gauucacauguuu

SEQ ID NO: 3199003 - RNA, 13 nt, Human
gauucccuuguua

SEQ ID NO: 3199004 - RNA, 16 nt, Human
gauuccuguuucaagu

SEQ ID NO: 3199005 - RNA, 22 nt, Human
gauuccuaaucacucagagcag

SEQ ID NO: 3199006 - RNA, 16 nt, Human
gauucccuuguuauuc

SEQ ID NO: 3199007 - RNA, 19 nt, Human
gauucccuuguuauucaac

SEQ ID NO: 3199008 - RNA, 15 nt, Human
gauccuuuuggaguc

SEQ ID NO: 3199009 - RNA, 17 nt, Human
gauccuuuuggagucag

SEQ ID NO: 3199010 - RNA, 18 nt, Human
gauccucccaccucagcc

SEQ ID NO: 3199011 - RNA, 13 nt, Human
gauccuucaaagu

SEQ ID NO: 3199012 - RNA, 16 nt, Human
gauccuucaaagucuc

SEQ ID NO: 3199013 - RNA, 21 nt, Human
gauccuucaaagucucaauga

SEQ ID NO: 3199014 - RNA, 23 nt, Human
gauccuucaaagucucaaugaaa

SEQ ID NO: 3199015 - RNA, 20 nt, Human
gauccuuguguuuaucagaa

SEQ ID NO: 3199016 - RNA, 22 nt, Human
gaucuguuuugugguuuggaau

SEQ ID NO: 3199017 - RNA, 13 nt, Human
gaucuuuaaaaua

SEQ ID NO: 3199018 - RNA, 14 nt, Human
gaucuuuaaaauac

SEQ ID NO: 3199019 - RNA, 16 nt, Human
gaucuuugcagacagg

SEQ ID NO: 3199020 - RNA, 18 nt, Human
gaucuucauuaccaauag

SEQ ID NO: 3199021 - RNA, 15 nt, Human
gaugaaaaaauaaca

SEQ ID NO: 3199022 - RNA, 17 nt, Human
gaugaaaagcuuuguuu

SEQ ID NO: 3199023 - RNA, 13 nt, Human
gauccugagccag

SEQ ID NO: 3199024 - RNA, 14 nt, Human
gauccugagccaga

SEQ ID NO: 3199025 - RNA, 15 nt, Human
gauccugagccagau

SEQ ID NO: 3199026 - RNA, 19 nt, Human
gauccugagccagauuuca

SEQ ID NO: 3199027 - RNA, 20 nt, Human
gauccucccaccucagccuc

SEQ ID NO: 3199028 - RNA, 19 nt, Human
gauccucccaccucagccu

SEQ ID NO: 3199029 - RNA, 11 nt, Human
gauccuccagg

SEQ ID NO: 3199030 - RNA, 18 nt, Human
gauccuaggcauuugcug

SEQ ID NO: 3199031 - RNA, 18 nt, Human
gauccuaguuccaccauc

SEQ ID NO: 3199032 - RNA, 15 nt, Human
gaucacgccacugca

SEQ ID NO: 3199033 - RNA, 14 nt, Human
gaucacgccacugc

SEQ ID NO: 3199034 - RNA, 13 nt, Human
gaucacgccacug

SEQ ID NO: 3199035 - RNA, 23 nt, Human
gaucaaccccuucgcuccugugu

SEQ ID NO: 3199036 - RNA, 20 nt, Human
gaugaccuugaaugaugcca

SEQ ID NO: 3199037 - RNA, 21 nt, Human
gaugacguacaaguaguucug

SEQ ID NO: 3199038 - RNA, 11 nt, Human
gaugagaaagg

SEQ ID NO: 3199039 - RNA, 22 nt, Human
gaugagaaagguugaagcacca

SEQ ID NO: 3199040 - RNA, 18 nt, Human
gaugauuuuuugaaaguu

SEQ ID NO: 3199041 - RNA, 17 nt, Human
gaugcaauguagagggg

SEQ ID NO: 3199042 - RNA, 20 nt, Human
gaugcaauccuuacaaauga

SEQ ID NO: 3199043 - RNA, 19 nt, Human
gaugcaauccuuacaaaug

SEQ ID NO: 3199044 - RNA, 18 nt, Human
gaugcaauccuuacaaau

SEQ ID NO: 3199045 - RNA, 20 nt, Human
gaugcauggagauagcccca

SEQ ID NO: 3199046 - RNA, 15 nt, Human
gaugcauuaaaagaa

SEQ ID NO: 3199047 - RNA, 17 nt, Human
gaugcauuaaaagaaaa

SEQ ID NO: 3199048 - RNA, 16 nt, Human
gaugcauuaaaagaaa

SEQ ID NO: 3199049 - RNA, 13 nt, Human
gaugcauggagau

SEQ ID NO: 3199050 - RNA, 22 nt, Human
gaugcuagaacucccuuucaac

SEQ ID NO: 3199051 - RNA, 21 nt, Human
gaugccccgucccccucuggc

SEQ ID NO: 3199052 - RNA, 18 nt, Human
gaugcauuaaaagaaaau

SEQ ID NO: 3199053 - RNA, 20 nt, Human
gauggcaaagaaggagagca

SEQ ID NO: 3199054 - RNA, 14 nt, Human
gaugcucacagggc

SEQ ID NO: 3199055 - RNA, 16 nt, Human
gaugggaaagcauugu

SEQ ID NO: 3199056 - RNA, 22 nt, Human
gauggcacagggcaugaaauga

SEQ ID NO: 3199057 - RNA, 22 nt, Human
gaugggcaacccccagccugcu

SEQ ID NO: 3199058 - RNA, 13 nt, Human
gaguauuuuugua

SEQ ID NO: 3199059 - RNA, 21 nt, Human
gagucccaccuuggcugcagg

SEQ ID NO: 3199060 - RNA, 14 nt, Human
gaguagcugggacu

SEQ ID NO: 3199061 - RNA, 12 nt, Human
gaguagcuggga

SEQ ID NO: 3199062 - RNA, 14 nt, Human
gagucccugccauc

SEQ ID NO: 3199063 - RNA, 14 nt, Human
gaguccccuguuug

SEQ ID NO: 3199064 - RNA, 23 nt, Human
gaguccccuguuuguuucugaaa

SEQ ID NO: 3199065 - RNA, 12 nt, Human
gaguccccuguu

SEQ ID NO: 3199066 - RNA, 22 nt, Human
gaguccccccacucccagcauc

SEQ ID NO: 3199067 - RNA, 18 nt, Human
gagucccaggcugagccu

SEQ ID NO: 3199068 - RNA, 19 nt, Human
gagucccaggcugagccuc

SEQ ID NO: 3199069 - RNA, 17 nt, Human
gagucgaggacagggag

SEQ ID NO: 3199070 - RNA, 16 nt, Human
gagucgaggacaggga

SEQ ID NO: 3199071 - RNA, 21 nt, Human
gagucucacuguugcccaggc

SEQ ID NO: 3199072 - RNA, 20 nt, Human
gagucucacuguugcccagg

SEQ ID NO: 3199073 - RNA, 19 nt, Human
gagucucacuguugcccag

SEQ ID NO: 3199074 - RNA, 23 nt, Human
gagucucacuguugcccaggcug

SEQ ID NO: 3199075 - RNA, 22 nt, Human
gagucucacuguugcccaggcu

SEQ ID NO: 3199076 - RNA, 23 nt, Human
gagucucgcuauugucaccaggg

SEQ ID NO: 3199077 - RNA, 12 nt, Human
gagucucuucuc

SEQ ID NO: 3199078 - RNA, 21 nt, Human
gagucucgcucuguugcccag

SEQ ID NO: 3199079 - RNA, 21 nt, Human
gagucugaaggcuggguucug

SEQ ID NO: 3199080 - RNA, 18 nt, Human
gagucucuucuccacugg

SEQ ID NO: 3199081 - RNA, 17 nt, Human
gagucucuucuccacug

SEQ ID NO: 3199082 - RNA, 16 nt, Human
gagucucuucuccacu

SEQ ID NO: 3199083 - RNA, 15 nt, Human
gagucucuucuccac

SEQ ID NO: 3199084 - RNA, 14 nt, Human
gagucucuucucca

SEQ ID NO: 3199085 - RNA, 22 nt, Human
gagguuuguuuagaagaagugu

SEQ ID NO: 3199086 - RNA, 14 nt, Human
gagguucccuuuga

SEQ ID NO: 3199087 - RNA, 21 nt, Human
gagguuacagguaccaguucu

SEQ ID NO: 3199088 - RNA, 16 nt, Human
gaguaaaaagaaaaca

SEQ ID NO: 3199089 - RNA, 19 nt, Human
gagguuuuaaaaaaauccc

SEQ ID NO: 3199090 - RNA, 16 nt, Human
gagguuuucuccccca

SEQ ID NO: 3199091 - RNA, 15 nt, Human
gagguuuucuccccc

SEQ ID NO: 3199092 - RNA, 15 nt, Human
gaguacuacaguccu

SEQ ID NO: 3199093 - RNA, 18 nt, Human
gaguacuacaguccuccc

SEQ ID NO: 3199094 - RNA, 19 nt, Human
gaguacuacaguccuccca

SEQ ID NO: 3199095 - RNA, 21 nt, Human
gaggugggauccuccaggugc

SEQ ID NO: 3199096 - RNA, 22 nt, Human
gaggugggauccuccaggugca

SEQ ID NO: 3199097 - RNA, 18 nt, Human
gaggugggauccuccagg

SEQ ID NO: 3199098 - RNA, 20 nt, Human
gaggucccaagguucugggu

SEQ ID NO: 3199099 - RNA, 15 nt, Human
gaggggggagguggg

SEQ ID NO: 3199100 - RNA, 22 nt, Human
gaggggggaggugggauccucc

SEQ ID NO: 3199101 - RNA, 21 nt, Human
gagggggugaccuccggccag

SEQ ID NO: 3199102 - RNA, 18 nt, Human
gagguccacaacacacag

SEQ ID NO: 3199103 - RNA, 16 nt, Human
gauaaucucagugcuu

SEQ ID NO: 3199104 - RNA, 19 nt, Human
gauaaucucagugcuuucc

SEQ ID NO: 3199105 - RNA, 20 nt, Human
gauaaucucagugcuuuccu

SEQ ID NO: 3199106 - RNA, 14 nt, Human
gauaauuaaccaag

SEQ ID NO: 3199107 - RNA, 14 nt, Human
gauacaaucagcug

SEQ ID NO: 3199108 - RNA, 15 nt, Human
gauacaaucagcugc

SEQ ID NO: 3199109 - RNA, 16 nt, Human
gauacaaucagcugcu

SEQ ID NO: 3199110 - RNA, 17 nt, Human
gauacaaucagcugcuu

SEQ ID NO: 3199111 - RNA, 16 nt, Human
gauaaaaaaacagcuu

SEQ ID NO: 3199112 - RNA, 21 nt, Human
gaguuuugggaaguuaaaggg

SEQ ID NO: 3199113 - RNA, 20 nt, Human
gauagaguaaaaagaaaaca

SEQ ID NO: 3199114 - RNA, 15 nt, Human
gauagaguaaaaaga

SEQ ID NO: 3199115 - RNA, 17 nt, Human
gauagcacagacccugc

SEQ ID NO: 3199116 - RNA, 18 nt, Human
gauagcacagacccugcc

SEQ ID NO: 3199117 - RNA, 14 nt, Human
gauauaaugaacaa

SEQ ID NO: 3199118 - RNA, 18 nt, Human
gauauaaugaacaaaauu

SEQ ID NO: 3199119 - RNA, 13 nt, Human
gauagccaaggcc

SEQ ID NO: 3199120 - RNA, 15 nt, Human
gauagcauuguaagc

SEQ ID NO: 3199121 - RNA, 13 nt, Human
gauagcagggcau

SEQ ID NO: 3199122 - RNA, 19 nt, Human
gauagcacagacccugccc

SEQ ID NO: 3199123 - RNA, 16 nt, Human
gauagcacagacccug

SEQ ID NO: 3199124 - RNA, 16 nt, Human
gauagcauaugacaaa

SEQ ID NO: 3199125 - RNA, 21 nt, Human
gauagaguaaaaagaaaacaa

SEQ ID NO: 3199126 - RNA, 12 nt, Human
gauagccaaggc

SEQ ID NO: 3199127 - RNA, 22 nt, Human
gaucaaccccuucgcuccugug

SEQ ID NO: 3199128 - RNA, 21 nt, Human
gaucaaccccuucgcuccugu

SEQ ID NO: 3199129 - RNA, 20 nt, Human
gauauauuuuauuuuuagaa

SEQ ID NO: 3199130 - RNA, 23 nt, Human
gauauauuuaaaaacaaaaggca

SEQ ID NO: 3199131 - RNA, 23 nt, Human
gauauaugcucugcauguuacau

SEQ ID NO: 3199132 - RNA, 19 nt, Human
gauauauguuuuugaaggc

SEQ ID NO: 3199133 - RNA, 14 nt, Human
gauauagagucauu

SEQ ID NO: 3199134 - RNA, 22 nt, Human
gauauacuuguuuuuguaaaga

SEQ ID NO: 3199135 - RNA, 17 nt, Human
gauauacuuguuuuugu

SEQ ID NO: 3199136 - RNA, 15 nt, Human
gauauacuuguuuuu

SEQ ID NO: 3199137 - RNA, 13 nt, Human
gauauacuuguuu

SEQ ID NO: 3199138 - RNA, 13 nt, Human
gauauaccaaauu

SEQ ID NO: 3199139 - RNA, 16 nt, Human
gauauaccaaauuaaa

SEQ ID NO: 3199140 - RNA, 13 nt, Human
gaguuccuagcca

SEQ ID NO: 3199141 - RNA, 17 nt, Human
gaguuccuaccauggag

SEQ ID NO: 3199142 - RNA, 15 nt, Human
gaguucccaagaaag

SEQ ID NO: 3199143 - RNA, 15 nt, Human
gaguuccaguugaag

SEQ ID NO: 3199144 - RNA, 18 nt, Human
gaguucauucauauuaca

SEQ ID NO: 3199145 - RNA, 16 nt, Human
gaguucauucauauua

SEQ ID NO: 3199146 - RNA, 13 nt, Human
gaguucugguucc

SEQ ID NO: 3199147 - RNA, 15 nt, Human
gaguucuuccuguaa

SEQ ID NO: 3199148 - RNA, 21 nt, Human
gaguucuuccuguaaucuugu

SEQ ID NO: 3199149 - RNA, 21 nt, Human
gaguucuguguauuuucaguc

SEQ ID NO: 3199150 - RNA, 12 nt, Human
gaguuuguuucu

SEQ ID NO: 3199151 - RNA, 18 nt, Human
gaguuuguuucuuugaau

SEQ ID NO: 3199152 - RNA, 14 nt, Human
gaguuuguuucuuu

SEQ ID NO: 3199153 - RNA, 18 nt, Human
gagugugaauauaaaugu

SEQ ID NO: 3199154 - RNA, 20 nt, Human
gagugugaauauaaaugugu

SEQ ID NO: 3199155 - RNA, 22 nt, Human
gagugugaauauaaaugugugu

SEQ ID NO: 3199156 - RNA, 23 nt, Human
gaguucaucuugaauuguaagga

SEQ ID NO: 3199157 - RNA, 20 nt, Human
gaguucaucuugaauuguaa

SEQ ID NO: 3199158 - RNA, 15 nt, Human
gaguucauucauauu

SEQ ID NO: 3199159 - RNA, 11 nt, Human
gaguuaggaac

SEQ ID NO: 3199160 - RNA, 17 nt, Human
gaguuaucaugaauuuu

SEQ ID NO: 3199161 - RNA, 18 nt, Human
gaguuaucaugaauuuua

SEQ ID NO: 3199162 - RNA, 19 nt, Human
gaguuaucaugaauuuuaa

SEQ ID NO: 3199163 - RNA, 20 nt, Human
gaguuaucaugaauuuuaaa

SEQ ID NO: 3199164 - RNA, 23 nt, Human
gaguuaucaugaauuuuaaagua

SEQ ID NO: 3199165 - RNA, 19 nt, Human
gagugucuuaauuaaaaga

SEQ ID NO: 3199166 - RNA, 12 nt, Human
gagugggcccaa

SEQ ID NO: 3199167 - RNA, 13 nt, Human
gaguggcuccucc

SEQ ID NO: 3199168 - RNA, 15 nt, Human
gaguggcuccucccg

SEQ ID NO: 3199169 - RNA, 21 nt, Human
gaguggccccaccuggcccuc

SEQ ID NO: 3199170 - RNA, 22 nt, Human
gagugaacaaauuuacagagac

SEQ ID NO: 3199171 - RNA, 20 nt, Human
gaguggccccaccuggcccu

SEQ ID NO: 3199172 - RNA, 19 nt, Human
gaguggccccaccuggccc

SEQ ID NO: 3199173 - RNA, 17 nt, Human
gaguggccccaccuggc

SEQ ID NO: 3199174 - RNA, 13 nt, Human
gaguggccccacc

SEQ ID NO: 3199175 - RNA, 19 nt, Human
gagugaacaaauuuacaga

SEQ ID NO: 3199176 - RNA, 15 nt, Human
gagucugaaggcugg

SEQ ID NO: 3199177 - RNA, 12 nt, Human
gagucugaggcc

SEQ ID NO: 3199178 - RNA, 19 nt, Human
gagucugaggccguugcug

SEQ ID NO: 3199179 - RNA, 23 nt, Human
gagucugaggccguugcugacuu

SEQ ID NO: 3199180 - RNA, 20 nt, Human
gagucugagggcuuguaguu

SEQ ID NO: 3199181 - RNA, 23 nt, Human
gagcuacacaggggaaaagagga

SEQ ID NO: 3199182 - RNA, 17 nt, Human
gagcguucaccagugac

SEQ ID NO: 3199183 - RNA, 17 nt, Human
gagcuccccccaggucu

SEQ ID NO: 3199184 - RNA, 21 nt, Human
gagcugccaguggggccugag

SEQ ID NO: 3199185 - RNA, 11 nt, Human
gagcugccagu

SEQ ID NO: 3199186 - RNA, 15 nt, Human
gagcugccaccugcc

SEQ ID NO: 3199187 - RNA, 16 nt, Human
gagcugccaccugccu

SEQ ID NO: 3199188 - RNA, 13 nt, Human
gagcugccaccug

SEQ ID NO: 3199189 - RNA, 16 nt, Human
gagcugcaccagguag

SEQ ID NO: 3199190 - RNA, 16 nt, Human
gagcucugcagagcag

SEQ ID NO: 3199191 - RNA, 15 nt, Human
gagcuuaacagugug

SEQ ID NO: 3199192 - RNA, 18 nt, Human
gagcuucuguugcugccu

SEQ ID NO: 3199193 - RNA, 14 nt, Human
gagcuucuggcacu

SEQ ID NO: 3199194 - RNA, 13 nt, Human
gagcuuagggucu

SEQ ID NO: 3199195 - RNA, 17 nt, Human
gagcuuagggucucagg

SEQ ID NO: 3199196 - RNA, 12 nt, Human
gagcuuagaaac

SEQ ID NO: 3199197 - RNA, 15 nt, Human
gagccugcagagcug

SEQ ID NO: 3199198 - RNA, 12 nt, Human
gagccugcagag

SEQ ID NO: 3199199 - RNA, 20 nt, Human
gagccuccugcccuuaccug

SEQ ID NO: 3199200 - RNA, 22 nt, Human
gagccuccugcccuuaccugcc

SEQ ID NO: 3199201 - RNA, 17 nt, Human
gagcccugguggcagug

SEQ ID NO: 3199202 - RNA, 19 nt, Human
gagccucagcauccuggca

SEQ ID NO: 3199203 - RNA, 16 nt, Human
gagcccugguggcagu

SEQ ID NO: 3199204 - RNA, 15 nt, Human
gagcccugguggcag

SEQ ID NO: 3199205 - RNA, 14 nt, Human
gagccuccugcccu

SEQ ID NO: 3199206 - RNA, 21 nt, Human
gagccucagcauccuggcacc

SEQ ID NO: 3199207 - RNA, 20 nt, Human
gagccucagcauccuggcac

SEQ ID NO: 3199208 - RNA, 13 nt, Human
gagccugggaggu

SEQ ID NO: 3199209 - RNA, 21 nt, Human
gagccugggaggucaaggcug

SEQ ID NO: 3199210 - RNA, 10 nt, Human
gagccuggca

SEQ ID NO: 3199211 - RNA, 15 nt, Human
gagccuggcaagaau

SEQ ID NO: 3199212 - RNA, 21 nt, Human
gagcaggcuacugucagcucc

SEQ ID NO: 3199213 - RNA, 14 nt, Human
gagccaccgugccu

SEQ ID NO: 3199214 - RNA, 20 nt, Human
gagccacugcaccgggccac

SEQ ID NO: 3199215 - RNA, 20 nt, Human
gagccaccgugccuggccac

SEQ ID NO: 3199216 - RNA, 18 nt, Human
gagcagccacauuccuga

SEQ ID NO: 3199217 - RNA, 22 nt, Human
gagcagaugaggugaaaaggcc

SEQ ID NO: 3199218 - RNA, 17 nt, Human
gagcagcacccauccac

SEQ ID NO: 3199219 - RNA, 21 nt, Human
gagcagcaaggucuugcucuc

SEQ ID NO: 3199220 - RNA, 17 nt, Human
gagcagaaauucuguuu

SEQ ID NO: 3199221 - RNA, 14 nt, Human
gagcagaaauucug

SEQ ID NO: 3199222 - RNA, 20 nt, Human
gagcagacacccuuggagcu

SEQ ID NO: 3199223 - RNA, 12 nt, Human
gagcccacgccc

SEQ ID NO: 3199224 - RNA, 15 nt, Human
gagcccacgccccca

SEQ ID NO: 3199225 - RNA, 16 nt, Human
gagcccacgcccccac

SEQ ID NO: 3199226 - RNA, 12 nt, Human
gagcccaggccu

SEQ ID NO: 3199227 - RNA, 13 nt, Human
gagcccaggccuc

SEQ ID NO: 3199228 - RNA, 14 nt, Human
gagcccaggccucc

SEQ ID NO: 3199229 - RNA, 11 nt, Human
gagcccacgcc

SEQ ID NO: 3199230 - RNA, 22 nt, Human
gagccacugcaccgggccacag

SEQ ID NO: 3199231 - RNA, 17 nt, Human
gagcaccuuagacaguc

SEQ ID NO: 3199232 - RNA, 13 nt, Human
gagcacccugagg

SEQ ID NO: 3199233 - RNA, 14 nt, Human
gagcacccugaggg

SEQ ID NO: 3199234 - RNA, 15 nt, Human
gagcacccugagggc

SEQ ID NO: 3199235 - RNA, 17 nt, Human
gagcaccgaauauugag

SEQ ID NO: 3199236 - RNA, 20 nt, Human
gagcaaaaugcauguaauca

SEQ ID NO: 3199237 - RNA, 19 nt, Human
gagcaaaaucgaugcagug

SEQ ID NO: 3199238 - RNA, 18 nt, Human
gagcaaaaugcauguaau

SEQ ID NO: 3199239 - RNA, 21 nt, Human
gagcaagacgcugugcugccc

SEQ ID NO: 3199240 - RNA, 18 nt, Human
gagcaagacgcugugcug

SEQ ID NO: 3199241 - RNA, 22 nt, Human
gagcaagacgcugugcugcccu

SEQ ID NO: 3199242 - RNA, 20 nt, Human
gagaucaaccccuucgcucc

SEQ ID NO: 3199243 - RNA, 14 nt, Human
gagauauuuuguaa

SEQ ID NO: 3199244 - RNA, 17 nt, Human
gagauauuuuguaaaau

SEQ ID NO: 3199245 - RNA, 20 nt, Human
gagauauuuuguaaaaugua

SEQ ID NO: 3199246 - RNA, 22 nt, Human
gagauauuuuguaaaauguauu

SEQ ID NO: 3199247 - RNA, 14 nt, Human
gagaucagccuggg

SEQ ID NO: 3199248 - RNA, 16 nt, Human
gagaucagccugggca

SEQ ID NO: 3199249 - RNA, 13 nt, Human
gagaucagccugg

SEQ ID NO: 3199250 - RNA, 18 nt, Human
gagauccuuguguuuauc

SEQ ID NO: 3199251 - RNA, 15 nt, Human
gagaucuaaaaauaa

SEQ ID NO: 3199252 - RNA, 15 nt, Human
gaggaugucugggcc

SEQ ID NO: 3199253 - RNA, 12 nt, Human
gaggauguucug

SEQ ID NO: 3199254 - RNA, 14 nt, Human
gaggauggcccagg

SEQ ID NO: 3199255 - RNA, 14 nt, Human
gaggauuaguuuag

SEQ ID NO: 3199256 - RNA, 20 nt, Human
gaggauguucugggacacag

SEQ ID NO: 3199257 - RNA, 17 nt, Human
gaggauguucugggaca

SEQ ID NO: 3199258 - RNA, 14 nt, Human
gaggaguaaaauuc

SEQ ID NO: 3199259 - RNA, 21 nt, Human
gaggaguaaaauucaguuuuu

SEQ ID NO: 3199260 - RNA, 21 nt, Human
gaggagggucuagaggccuga

SEQ ID NO: 3199261 - RNA, 23 nt, Human
gaggaguuugggguaugggagag

SEQ ID NO: 3199262 - RNA, 17 nt, Human
gaggagugguuuuucuu

SEQ ID NO: 3199263 - RNA, 16 nt, Human
gaggcacagagccaaa

SEQ ID NO: 3199264 - RNA, 19 nt, Human
gaggcagagguugcaguga

SEQ ID NO: 3199265 - RNA, 13 nt, Human
gaggcagccccau

SEQ ID NO: 3199266 - RNA, 22 nt, Human
gaggcagccccauucugccugc

SEQ ID NO: 3199267 - RNA, 21 nt, Human
gaggcagccccauucugccug

SEQ ID NO: 3199268 - RNA, 23 nt, Human
gaggcagccccauucugccugcc

SEQ ID NO: 3199269 - RNA, 13 nt, Human
gaggccagccuug

SEQ ID NO: 3199270 - RNA, 12 nt, Human
gaggccagccuu

SEQ ID NO: 3199271 - RNA, 22 nt, Human
gaggaggccuugggcucugcug

SEQ ID NO: 3199272 - RNA, 21 nt, Human
gaggaggccuugggcucugcu

SEQ ID NO: 3199273 - RNA, 18 nt, Human
gaggagcccugccucucc

SEQ ID NO: 3199274 - RNA, 15 nt, Human
gaggagcccugccuc

SEQ ID NO: 3199275 - RNA, 13 nt, Human
gaggagcccugcc

SEQ ID NO: 3199276 - RNA, 22 nt, Human
gaggacagggaggugaccccag

SEQ ID NO: 3199277 - RNA, 13 nt, Human
gaggacagggagg

SEQ ID NO: 3199278 - RNA, 13 nt, Human
gaggacacucccg

SEQ ID NO: 3199279 - RNA, 18 nt, Human
gaggacaagagaaaaaag

SEQ ID NO: 3199280 - RNA, 13 nt, Human
gaggacacagaga

SEQ ID NO: 3199281 - RNA, 18 nt, Human
gaggaauggacauuucua

SEQ ID NO: 3199282 - RNA, 15 nt, Human
gaggaauccagaccc

SEQ ID NO: 3199283 - RNA, 22 nt, Human
gaggaaggaaacccagcucugg

SEQ ID NO: 3199284 - RNA, 21 nt, Human
gagcuucuguugcugccucau

SEQ ID NO: 3199285 - RNA, 16 nt, Human
gaggaaggaugcaaag

SEQ ID NO: 3199286 - RNA, 17 nt, Human
gaggaaggaugcaaagu

SEQ ID NO: 3199287 - RNA, 20 nt, Human
gagcuuccaauuuuccuuca

SEQ ID NO: 3199288 - RNA, 21 nt, Human
gaggaaggaaacccagcucug

SEQ ID NO: 3199289 - RNA, 14 nt, Human
gaggaauccagacc

SEQ ID NO: 3199290 - RNA, 23 nt, Human
gagggacagucucaccauuuccc

SEQ ID NO: 3199291 - RNA, 16 nt, Human
gagggacagucucacc

SEQ ID NO: 3199292 - RNA, 12 nt, Human
gagggaaaccuu

SEQ ID NO: 3199293 - RNA, 13 nt, Human
gagggaaaccuuu

SEQ ID NO: 3199294 - RNA, 22 nt, Human
gagggaaagccuuaagcugcag

SEQ ID NO: 3199295 - RNA, 15 nt, Human
gagggagggagggcu

SEQ ID NO: 3199296 - RNA, 15 nt, Human
gagggagggcuccag

SEQ ID NO: 3199297 - RNA, 14 nt, Human
gagggagggagggc

SEQ ID NO: 3199298 - RNA, 14 nt, Human
gagggagugacaga

SEQ ID NO: 3199299 - RNA, 14 nt, Human
gagggagguaagga

SEQ ID NO: 3199300 - RNA, 13 nt, Human
gagggagugacag

SEQ ID NO: 3199301 - RNA, 14 nt, Human
gagggcacagaaaa

SEQ ID NO: 3199302 - RNA, 22 nt, Human
gagggcacagaaaauggaagac

SEQ ID NO: 3199303 - RNA, 23 nt, Human
gagggcacagaaaauggaagaca

SEQ ID NO: 3199304 - RNA, 12 nt, Human
gagggcacuggu

SEQ ID NO: 3199305 - RNA, 22 nt, Human
gaggggccucuuaugggcuggg

SEQ ID NO: 3199306 - RNA, 20 nt, Human
gaggggccuggcagccgugc

SEQ ID NO: 3199307 - RNA, 18 nt, Human
gaggggccuggcagccgu

SEQ ID NO: 3199308 - RNA, 14 nt, Human
gaggggccuggcag

SEQ ID NO: 3199309 - RNA, 13 nt, Human
gaggggccuggca

SEQ ID NO: 3199310 - RNA, 12 nt, Human
gaggggccucuu

SEQ ID NO: 3199311 - RNA, 18 nt, Human
gagggcacugguggcccg

SEQ ID NO: 3199312 - RNA, 16 nt, Human
gagggcacugguggcc

SEQ ID NO: 3199313 - RNA, 20 nt, Human
gaggcugggacgcucugcug

SEQ ID NO: 3199314 - RNA, 19 nt, Human
gaggcugggacgcucugcu

SEQ ID NO: 3199315 - RNA, 18 nt, Human
gaggcugggacgcucugc

SEQ ID NO: 3199316 - RNA, 18 nt, Human
gaggcuaaaauguuuuca

SEQ ID NO: 3199317 - RNA, 16 nt, Human
gaggcuaaaauguuuu

SEQ ID NO: 3199318 - RNA, 14 nt, Human
gaggcuaaaauguu

SEQ ID NO: 3199319 - RNA, 13 nt, Human
gaggcuaaaaugu

SEQ ID NO: 3199320 - RNA, 13 nt, Human
gaggcugggcucc

SEQ ID NO: 3199321 - RNA, 14 nt, Human
gaggcugggcuccc

SEQ ID NO: 3199322 - RNA, 15 nt, Human
gaggcugggcucccu

SEQ ID NO: 3199323 - RNA, 17 nt, Human
gaggcuuauauuugugu

SEQ ID NO: 3199324 - RNA, 21 nt, Human
gaggcugggacgcucugcugu

SEQ ID NO: 3199325 - RNA, 21 nt, Human
gaggcggagagugcugacugu

SEQ ID NO: 3199326 - RNA, 23 nt, Human
gaggcccuucucuccagccccug

SEQ ID NO: 3199327 - RNA, 24 nt, Human
gaggcccuucucuccagccccugg

SEQ ID NO: 3199328 - RNA, 22 nt, Human
gaggcccuucucuccagccccu

SEQ ID NO: 3199329 - RNA, 13 nt, Human
gaggcccggccuc

SEQ ID NO: 3199330 - RNA, 20 nt, Human
gaggcccguggggccggggc

SEQ ID NO: 3199331 - RNA, 15 nt, Human
gccacgauugcagga

SEQ ID NO: 3199332 - RNA, 11 nt, Human
gccaccugggu

SEQ ID NO: 3199333 - RNA, 14 nt, Human
gccaccugcggugc

SEQ ID NO: 3199334 - RNA, 20 nt, Human
gccaccugcggugcuaucuc

SEQ ID NO: 3199335 - RNA, 22 nt, Human
gccaccugcggugcuaucuccc

SEQ ID NO: 3199336 - RNA, 19 nt, Human
gccacggccaggccagagg

SEQ ID NO: 3199337 - RNA, 17 nt, Human
gccacggccaggccaga

SEQ ID NO: 3199338 - RNA, 18 nt, Human
gccacggccaggccagag

SEQ ID NO: 3199339 - RNA, 20 nt, Human
gccacgcccaacuaauuuuu

SEQ ID NO: 3199340 - RNA, 19 nt, Human
gccaccgccuccuacagcc

SEQ ID NO: 3199341 - RNA, 13 nt, Human
gccacaucccucu

SEQ ID NO: 3199342 - RNA, 12 nt, Human
gccacaguuguu

SEQ ID NO: 3199343 - RNA, 14 nt, Human
gccacaucccccaa

SEQ ID NO: 3199344 - RNA, 23 nt, Human
gccacauccacagucucccccac

SEQ ID NO: 3199345 - RNA, 17 nt, Human
gccaccgugccuggcca

SEQ ID NO: 3199346 - RNA, 22 nt, Human
gccaccgugccuggccacgccc

SEQ ID NO: 3199347 - RNA, 14 nt, Human
gccaccucuuccug

SEQ ID NO: 3199348 - RNA, 18 nt, Human
gccaccucuuccuggccg

SEQ ID NO: 3199349 - RNA, 15 nt, Human
gccaccucuuccugg

SEQ ID NO: 3199350 - RNA, 16 nt, Human
gccaccugaguuccug

SEQ ID NO: 3199351 - RNA, 17 nt, Human
gccaccugccuguuggg

SEQ ID NO: 3199352 - RNA, 21 nt, Human
gccaccugaguuccugaggug

SEQ ID NO: 3199353 - RNA, 17 nt, Human
gccaccugaguuccuga

SEQ ID NO: 3199354 - RNA, 20 nt, Human
gccaccuccuaaaaggccca

SEQ ID NO: 3199355 - RNA, 24 nt, Human
gccaccuccccuugccagcugcug

SEQ ID NO: 3199356 - RNA, 22 nt, Human
gccaccuccccuugccagcugc

SEQ ID NO: 3199357 - RNA, 18 nt, Human
gccaccuccccuugccag

SEQ ID NO: 3199358 - RNA, 21 nt, Human
gccaccuccccuugccagcug

SEQ ID NO: 3199359 - RNA, 20 nt, Human
gccaccuccccuugccagcu

SEQ ID NO: 3199360 - RNA, 22 nt, Human
gccaccuccuaaaaggcccaga

SEQ ID NO: 3199361 - RNA, 21 nt, Human
gccaccuccuaaaaggcccag

SEQ ID NO: 3199362 - RNA, 23 nt, Human
gccaccuccuaaaaggcccagag

SEQ ID NO: 3199363 - RNA, 10 nt, Human
gccagaggag

SEQ ID NO: 3199364 - RNA, 19 nt, Human
gccagacuggcacaguuuu

SEQ ID NO: 3199365 - RNA, 16 nt, Human
gccagagacacaagcc

SEQ ID NO: 3199366 - RNA, 17 nt, Human
gccagagacacaagccu

SEQ ID NO: 3199367 - RNA, 19 nt, Human
gccagagacacaagccuuc

SEQ ID NO: 3199368 - RNA, 18 nt, Human
gccagacuggcacaguuu

SEQ ID NO: 3199369 - RNA, 15 nt, Human
gccagacuggcacag

SEQ ID NO: 3199370 - RNA, 11 nt, Human
gccacugaaga

SEQ ID NO: 3199371 - RNA, 13 nt, Human
gccacugaagagg

SEQ ID NO: 3199372 - RNA, 18 nt, Human
gccacugaagaggaggag

SEQ ID NO: 3199373 - RNA, 18 nt, Human
gccagaugcaccagcccu

SEQ ID NO: 3199374 - RNA, 17 nt, Human
gccagaugcaccagccc

SEQ ID NO: 3199375 - RNA, 16 nt, Human
gccagaugcaccagcc

SEQ ID NO: 3199376 - RNA, 23 nt, Human
gccagagggagugacagaggcag

SEQ ID NO: 3199377 - RNA, 12 nt, Human
gccagaggagag

SEQ ID NO: 3199378 - RNA, 13 nt, Human
gccagaggagaga

SEQ ID NO: 3199379 - RNA, 15 nt, Human
gccagaggagagagg

SEQ ID NO: 3199380 - RNA, 17 nt, Human
gccagaggagagaggac

SEQ ID NO: 3199381 - RNA, 19 nt, Human
gccagaggagagaggaccc

SEQ ID NO: 3199382 - RNA, 22 nt, Human
gccagaggagagaggacccccu

SEQ ID NO: 3199383 - RNA, 22 nt, Human
gccagagggagugacagaggca

SEQ ID NO: 3199384 - RNA, 21 nt, Human
gccagagggagugacagaggc

SEQ ID NO: 3199385 - RNA, 20 nt, Human
gccaaugugaacagcggcug

SEQ ID NO: 3199386 - RNA, 20 nt, Human
gccaauuucucuuaaguacu

SEQ ID NO: 3199387 - RNA, 16 nt, Human
gccacaagacccuugu

SEQ ID NO: 3199388 - RNA, 22 nt, Human
gccacaagacccuugugguccc

SEQ ID NO: 3199389 - RNA, 15 nt, Human
gccacaaggaagaaa

SEQ ID NO: 3199390 - RNA, 22 nt, Human
gccacaaggaagaaauuaacuu

SEQ ID NO: 3199391 - RNA, 17 nt, Human
gccacaaggaagaaauu

SEQ ID NO: 3199392 - RNA, 23 nt, Human
gccacaaggaagaaauuaacuua

SEQ ID NO: 3199393 - RNA, 20 nt, Human
gccacagagaaaguacuucu

SEQ ID NO: 3199394 - RNA, 14 nt, Human
gccacagagaaagu

SEQ ID NO: 3199395 - RNA, 13 nt, Human
gccacagagaaag

SEQ ID NO: 3199396 - RNA, 23 nt, Human
gccacacuucaggcucuucuccu

SEQ ID NO: 3199397 - RNA, 22 nt, Human
gccacacuucaggcucuucucc

SEQ ID NO: 3199398 - RNA, 20 nt, Human
gccacacuucaggcucuucu

SEQ ID NO: 3199399 - RNA, 23 nt, Human
gccacagagaaaguacuucucca

SEQ ID NO: 3199400 - RNA, 20 nt, Human
gccaauaauaauaccucccu

SEQ ID NO: 3199401 - RNA, 15 nt, Human
gccaaucagaagcua

SEQ ID NO: 3199402 - RNA, 21 nt, Human
gccaauggagacugucucaag

SEQ ID NO: 3199403 - RNA, 19 nt, Human
gccaauggagacugucuca

SEQ ID NO: 3199404 - RNA, 16 nt, Human
gccaauggagacuguc

SEQ ID NO: 3199405 - RNA, 21 nt, Human
gccaaggcugggggaagaagc

SEQ ID NO: 3199406 - RNA, 13 nt, Human
gcauuuguaaaua

SEQ ID NO: 3199407 - RNA, 17 nt, Human
gcauuuguaaauauuaa

SEQ ID NO: 3199408 - RNA, 18 nt, Human
gcauuuguaaauauuaaa

SEQ ID NO: 3199409 - RNA, 20 nt, Human
gcauuuguaaauauuaaacc

SEQ ID NO: 3199410 - RNA, 21 nt, Human
gcauuuguaaauauuaaacca

SEQ ID NO: 3199411 - RNA, 23 nt, Human
gccaaggugggaggauugcuuga

SEQ ID NO: 3199412 - RNA, 14 nt, Human
gccaaggugggagg

SEQ ID NO: 3199413 - RNA, 15 nt, Human
gccaaggugggagga

SEQ ID NO: 3199414 - RNA, 22 nt, Human
gccaggcugcucuugaacuccu

SEQ ID NO: 3199415 - RNA, 13 nt, Human
gccaggcugcucu

SEQ ID NO: 3199416 - RNA, 14 nt, Human
gccaggcugcucuu

SEQ ID NO: 3199417 - RNA, 15 nt, Human
gccagaugcaccagc

SEQ ID NO: 3199418 - RNA, 16 nt, Human
gccagauuucacucuc

SEQ ID NO: 3199419 - RNA, 18 nt, Human
gccagauuucacucuccu

SEQ ID NO: 3199420 - RNA, 21 nt, Human
gccagauuucacucuccuugg

SEQ ID NO: 3199421 - RNA, 23 nt, Human
gccagggacagaggggguggccu

SEQ ID NO: 3199422 - RNA, 15 nt, Human
gccaggcuggucuca

SEQ ID NO: 3199423 - RNA, 19 nt, Human
gccagggaaagacuggcaa

SEQ ID NO: 3199424 - RNA, 20 nt, Human
gccagggaaagacuggcaag

SEQ ID NO: 3199425 - RNA, 22 nt, Human
gccagggaccccagaaucaugu

SEQ ID NO: 3199426 - RNA, 16 nt, Human
gccagggaccccagaa

SEQ ID NO: 3199427 - RNA, 16 nt, Human
gccagggacagagggg

SEQ ID NO: 3199428 - RNA, 18 nt, Human
gccagggacagagggggu

SEQ ID NO: 3199429 - RNA, 13 nt, Human
gccagggacagag

SEQ ID NO: 3199430 - RNA, 22 nt, Human
gccaggcuggucucgaacuccu

SEQ ID NO: 3199431 - RNA, 17 nt, Human
gccagucaccccggcca

SEQ ID NO: 3199432 - RNA, 18 nt, Human
gccagucaccccggccac

SEQ ID NO: 3199433 - RNA, 20 nt, Human
gccagucaccccggccaccu

SEQ ID NO: 3199434 - RNA, 17 nt, Human
gccagguuuuuggucug

SEQ ID NO: 3199435 - RNA, 18 nt, Human
gccagguugcuaagaaac

SEQ ID NO: 3199436 - RNA, 14 nt, Human
gccagguugcuaag

SEQ ID NO: 3199437 - RNA, 18 nt, Human
gccagguggccacuccag

SEQ ID NO: 3199438 - RNA, 22 nt, Human
gccaggggagguuacagguacc

SEQ ID NO: 3199439 - RNA, 17 nt, Human
gccaggggaccuccugg

SEQ ID NO: 3199440 - RNA, 23 nt, Human
gcccaaaccaccagaagcccaga

SEQ ID NO: 3199441 - RNA, 19 nt, Human
gcccaaaccuuucccccau

SEQ ID NO: 3199442 - RNA, 16 nt, Human
gcccaaaccuuucccc

SEQ ID NO: 3199443 - RNA, 22 nt, Human
gcccaaaccaccagaagcccag

SEQ ID NO: 3199444 - RNA, 21 nt, Human
gcccaaaccaccagaagccca

SEQ ID NO: 3199445 - RNA, 23 nt, Human
gcccaaccucuuccuccugacac

SEQ ID NO: 3199446 - RNA, 21 nt, Human
gcccaaccucuuccuccugac

SEQ ID NO: 3199447 - RNA, 15 nt, Human
gcccaaccucuuccu

SEQ ID NO: 3199448 - RNA, 10 nt, Human
gcccaaccuc

SEQ ID NO: 3199449 - RNA, 13 nt, Human
gcccaaccacacu

SEQ ID NO: 3199450 - RNA, 22 nt, Human
gcccaacaggggcuccaugcca

SEQ ID NO: 3199451 - RNA, 21 nt, Human
gcccaacaggggcuccaugcc

SEQ ID NO: 3199452 - RNA, 13 nt, Human
gcccaacaggggc

SEQ ID NO: 3199453 - RNA, 22 nt, Human
gccaugggacagggaggacgcu

SEQ ID NO: 3199454 - RNA, 23 nt, Human
gccaugggacagggaggacgcuc

SEQ ID NO: 3199455 - RNA, 16 nt, Human
gccauuuguguuuaua

SEQ ID NO: 3199456 - RNA, 18 nt, Human
gccaugaggaacaaggca

SEQ ID NO: 3199457 - RNA, 22 nt, Human
gccaugagaauguuuuagcaca

SEQ ID NO: 3199458 - RNA, 20 nt, Human
gccaugagaauguuuuagca

SEQ ID NO: 3199459 - RNA, 13 nt, Human
gccaugccagcuu

SEQ ID NO: 3199460 - RNA, 18 nt, Human
gccaugccagcuuaucuc

SEQ ID NO: 3199461 - RNA, 19 nt, Human
gccaugccagcuuaucuca

SEQ ID NO: 3199462 - RNA, 24 nt, Human
gccaugcuccuggcccacugcauc

SEQ ID NO: 3199463 - RNA, 17 nt, Human
gccaguauuuuuaaagg

SEQ ID NO: 3199464 - RNA, 15 nt, Human
gccaucucugcucca

SEQ ID NO: 3199465 - RNA, 14 nt, Human
gccaucucugcucc

SEQ ID NO: 3199466 - RNA, 13 nt, Human
gccaucucugcuc

SEQ ID NO: 3199467 - RNA, 12 nt, Human
gccaucucugcu

SEQ ID NO: 3199468 - RNA, 20 nt, Human
gcccagagggccugcaaggg

SEQ ID NO: 3199469 - RNA, 21 nt, Human
gcccagagggccugcaaggga

SEQ ID NO: 3199470 - RNA, 22 nt, Human
gcccagagggccugcaagggag

SEQ ID NO: 3199471 - RNA, 16 nt, Human
gcccagagucccccca

SEQ ID NO: 3199472 - RNA, 23 nt, Human
gcccagaguccccccacucccag

SEQ ID NO: 3199473 - RNA, 18 nt, Human
gcccagaguccccccacu

SEQ ID NO: 3199474 - RNA, 18 nt, Human
gcccagaucagccagaag

SEQ ID NO: 3199475 - RNA, 16 nt, Human
gcccagaucagccaga

SEQ ID NO: 3199476 - RNA, 21 nt, Human
gcccagcaccacccuccuucc

SEQ ID NO: 3199477 - RNA, 11 nt, Human
gcccagccccu

SEQ ID NO: 3199478 - RNA, 16 nt, Human
gcccagcccaccccau

SEQ ID NO: 3199479 - RNA, 12 nt, Human
gcccagccccuu

SEQ ID NO: 3199480 - RNA, 9 nt, Human
gcccagccc

SEQ ID NO: 3199481 - RNA, 14 nt, Human
gcccagagggccug

SEQ ID NO: 3199482 - RNA, 15 nt, Human
gcccagagggccugc

SEQ ID NO: 3199483 - RNA, 18 nt, Human
gcccagagggccugcaag

SEQ ID NO: 3199484 - RNA, 19 nt, Human
gcccagagggccugcaagg

SEQ ID NO: 3199485 - RNA, 12 nt, Human
gcccagagggcc

SEQ ID NO: 3199486 - RNA, 23 nt, Human
gcccagagagaagagccccacuc

SEQ ID NO: 3199487 - RNA, 21 nt, Human
gcccaaugcacuuuguucugg

SEQ ID NO: 3199488 - RNA, 18 nt, Human
gcccagacccuggaggaa

SEQ ID NO: 3199489 - RNA, 17 nt, Human
gcccagacccuggagga

SEQ ID NO: 3199490 - RNA, 14 nt, Human
gcccagacccugga

SEQ ID NO: 3199491 - RNA, 14 nt, Human
gcccaaugaauaau

SEQ ID NO: 3199492 - RNA, 14 nt, Human
gcccaaugaauuau

SEQ ID NO: 3199493 - RNA, 20 nt, Human
gcccagagagaagagcccca

SEQ ID NO: 3199494 - RNA, 19 nt, Human
gcccagagagaagagcccc

SEQ ID NO: 3199495 - RNA, 17 nt, Human
gcccagagagaagagcc

SEQ ID NO: 3199496 - RNA, 22 nt, Human
gcccagagagaagagccccacu

SEQ ID NO: 3199497 - RNA, 21 nt, Human
gcccagagagaagagccccac

SEQ ID NO: 3199498 - RNA, 18 nt, Human
gcccaggaaaggcuccag

SEQ ID NO: 3199499 - RNA, 19 nt, Human
gcccaggaaaggcuccagg

SEQ ID NO: 3199500 - RNA, 20 nt, Human
gcccaggaaaggcuccagga

SEQ ID NO: 3199501 - RNA, 20 nt, Human
gcccaggcuggcgugcagug

SEQ ID NO: 3199502 - RNA, 19 nt, Human
gcccaggcuggcgugcagu

SEQ ID NO: 3199503 - RNA, 22 nt, Human
gcccaggcuggcgugcaguggu

SEQ ID NO: 3199504 - RNA, 19 nt, Human
gcccaggcuuagucacuga

SEQ ID NO: 3199505 - RNA, 21 nt, Human
gcccaggcuuagucacugaga

SEQ ID NO: 3199506 - RNA, 23 nt, Human
gcccaggcuuagucacugagaca

SEQ ID NO: 3199507 - RNA, 19 nt, Human
gcccagucuggaaugcagu

SEQ ID NO: 3199508 - RNA, 15 nt, Human
gcccaguugggugga

SEQ ID NO: 3199509 - RNA, 13 nt, Human
gcccagccccuuc

SEQ ID NO: 3199510 - RNA, 14 nt, Human
gcccagccccuucu

SEQ ID NO: 3199511 - RNA, 16 nt, Human
gcccagccccuucuga

SEQ ID NO: 3199512 - RNA, 17 nt, Human
gcccagccccuucugac

SEQ ID NO: 3199513 - RNA, 20 nt, Human
gcccagccccuucugaccca

SEQ ID NO: 3199514 - RNA, 24 nt, Human
gcccagccccuucugacccaugcu

SEQ ID NO: 3199515 - RNA, 17 nt, Human
gcccagcgcggacaucc

SEQ ID NO: 3199516 - RNA, 19 nt, Human
gcccagcgcggacaucccc

SEQ ID NO: 3199517 - RNA, 21 nt, Human
gcccagccucuuucccuucca

SEQ ID NO: 3199518 - RNA, 15 nt, Human
gcccagccucuuucc

SEQ ID NO: 3199519 - RNA, 21 nt, Human
gcccagcuugaaaccuucacu

SEQ ID NO: 3199520 - RNA, 13 nt, Human
gcaggcagccuug

SEQ ID NO: 3199521 - RNA, 12 nt, Human
gcaggcaggcug

SEQ ID NO: 3199522 - RNA, 18 nt, Human
gcaggcagccaggccaca

SEQ ID NO: 3199523 - RNA, 17 nt, Human
gcaggcagccaggccac

SEQ ID NO: 3199524 - RNA, 11 nt, Human
gcaggcagggg

SEQ ID NO: 3199525 - RNA, 23 nt, Human
gcaggcauugccucggcuggcuc

SEQ ID NO: 3199526 - RNA, 22 nt, Human
gcaggcccaugggaggcuggag

SEQ ID NO: 3199527 - RNA, 17 nt, Human
gcaggcccaugggaggc

SEQ ID NO: 3199528 - RNA, 14 nt, Human
gcaggcccauggga

SEQ ID NO: 3199529 - RNA, 20 nt, Human
gcaggcccacccugcuuggc

SEQ ID NO: 3199530 - RNA, 16 nt, Human
gcaggcccacccugcu

SEQ ID NO: 3199531 - RNA, 15 nt, Human
gcaggcccacccugc

SEQ ID NO: 3199532 - RNA, 14 nt, Human
gcaggcccacccug

SEQ ID NO: 3199533 - RNA, 11 nt, Human
gcaggcccacc

SEQ ID NO: 3199534 - RNA, 19 nt, Human
gcaggguccuagaaauucc

SEQ ID NO: 3199535 - RNA, 16 nt, Human
gcagggucucacucug

SEQ ID NO: 3199536 - RNA, 21 nt, Human
gcaggggaggccaucuggaga

SEQ ID NO: 3199537 - RNA, 14 nt, Human
gcagggcuuuaaaa

SEQ ID NO: 3199538 - RNA, 17 nt, Human
gcagggcuuuaaaauuc

SEQ ID NO: 3199539 - RNA, 17 nt, Human
gcaggggaggccaucug

SEQ ID NO: 3199540 - RNA, 15 nt, Human
gcaggggaggccauc

SEQ ID NO: 3199541 - RNA, 19 nt, Human
gcaggggaggccaucugga

SEQ ID NO: 3199542 - RNA, 18 nt, Human
gcaggggaggccaucugg

SEQ ID NO: 3199543 - RNA, 22 nt, Human
gcagggcucagcggggacagcu

SEQ ID NO: 3199544 - RNA, 19 nt, Human
gcagggcaggaccagccca

SEQ ID NO: 3199545 - RNA, 18 nt, Human
gcagggcaggaccagccc

SEQ ID NO: 3199546 - RNA, 17 nt, Human
gcagggcaggaccagcc

SEQ ID NO: 3199547 - RNA, 22 nt, Human
gcagggcacagggccuggccca

SEQ ID NO: 3199548 - RNA, 19 nt, Human
gcagggcacagggccuggc

SEQ ID NO: 3199549 - RNA, 16 nt, Human
gcagggcacagggccu

SEQ ID NO: 3199550 - RNA, 16 nt, Human
gcagggcaggaccagc

SEQ ID NO: 3199551 - RNA, 15 nt, Human
gcagggcaggaccag

SEQ ID NO: 3199552 - RNA, 14 nt, Human
gcagggcaggacca

SEQ ID NO: 3199553 - RNA, 12 nt, Human
gcagggcacagg

SEQ ID NO: 3199554 - RNA, 14 nt, Human
gcagggcacagggc

SEQ ID NO: 3199555 - RNA, 13 nt, Human
gcagggcacaggg

SEQ ID NO: 3199556 - RNA, 22 nt, Human
gcaggcgcaagggaggcccagc

SEQ ID NO: 3199557 - RNA, 18 nt, Human
gcaggccucccugccagu

SEQ ID NO: 3199558 - RNA, 17 nt, Human
gcaggccucccugccag

SEQ ID NO: 3199559 - RNA, 13 nt, Human
gcaggccucccug

SEQ ID NO: 3199560 - RNA, 17 nt, Human
gcagugggccuggccag

SEQ ID NO: 3199561 - RNA, 19 nt, Human
gcaguggugcgaucugggu

SEQ ID NO: 3199562 - RNA, 18 nt, Human
gcaguggugcgaucuggg

SEQ ID NO: 3199563 - RNA, 15 nt, Human
gcagugggccuggcc

SEQ ID NO: 3199564 - RNA, 16 nt, Human
gcagugggccuggcca

SEQ ID NO: 3199565 - RNA, 11 nt, Human
gcagugggagc

SEQ ID NO: 3199566 - RNA, 21 nt, Human
gcagugggacagggcauggcc

SEQ ID NO: 3199567 - RNA, 15 nt, Human
gcaguugaaaagacu

SEQ ID NO: 3199568 - RNA, 19 nt, Human
gcaguugaaaagacuccaa

SEQ ID NO: 3199569 - RNA, 16 nt, Human
gcaguugaaaagacuc

SEQ ID NO: 3199570 - RNA, 21 nt, Human
gcaguugaaaagacuccaaag

SEQ ID NO: 3199571 - RNA, 21 nt, Human
gcaguggugcgaucuggguuc

SEQ ID NO: 3199572 - RNA, 20 nt, Human
gcaguggugcgaucuggguu

SEQ ID NO: 3199573 - RNA, 22 nt, Human
gcaguggugcgaucuggguuca

SEQ ID NO: 3199574 - RNA, 18 nt, Human
gcaucuaucuggugauuu

SEQ ID NO: 3199575 - RNA, 20 nt, Human
gcaucuaucuggugauuucu

SEQ ID NO: 3199576 - RNA, 14 nt, Human
gcaucucagcccac

SEQ ID NO: 3199577 - RNA, 13 nt, Human
gcaucucagccca

SEQ ID NO: 3199578 - RNA, 12 nt, Human
gcaucucagccc

SEQ ID NO: 3199579 - RNA, 17 nt, Human
gcaucauuccaggcccg

SEQ ID NO: 3199580 - RNA, 15 nt, Human
gcaucauuccaggcc

SEQ ID NO: 3199581 - RNA, 16 nt, Human
gcaucauucucuaaua

SEQ ID NO: 3199582 - RNA, 23 nt, Human
gcaucagugcccuccaggauaga

SEQ ID NO: 3199583 - RNA, 19 nt, Human
gcaucaucuugaacauuaa

SEQ ID NO: 3199584 - RNA, 21 nt, Human
gcaucaucuugaacauuaauc

SEQ ID NO: 3199585 - RNA, 23 nt, Human
gcaucaucaauaaaacaguuggc

SEQ ID NO: 3199586 - RNA, 22 nt, Human
gcaucagcugcugaaacaacaa

SEQ ID NO: 3199587 - RNA, 23 nt, Human
gcaucagcugcugaaacaacaaa

SEQ ID NO: 3199588 - RNA, 12 nt, Human
gcaucaggccag

SEQ ID NO: 3199589 - RNA, 12 nt, Human
gcaucagcugcu

SEQ ID NO: 3199590 - RNA, 19 nt, Human
gcaucagcugcucagaucc

SEQ ID NO: 3199591 - RNA, 18 nt, Human
gcaucaggccaggcccuc

SEQ ID NO: 3199592 - RNA, 23 nt, Human
gcaucaggccaggcccucugccc

SEQ ID NO: 3199593 - RNA, 15 nt, Human
gcaucagugcccucc

SEQ ID NO: 3199594 - RNA, 23 nt, Human
gcaucuggaagagcuaggcaggg

SEQ ID NO: 3199595 - RNA, 15 nt, Human
gcaucucagcccaca

SEQ ID NO: 3199596 - RNA, 21 nt, Human
gcaucucacagcuaugcaaaa

SEQ ID NO: 3199597 - RNA, 20 nt, Human
gcaugacacgaauauugcug

SEQ ID NO: 3199598 - RNA, 21 nt, Human
gcaugacacgaauauugcuga

SEQ ID NO: 3199599 - RNA, 15 nt, Human
gcaugacagaaaaua

SEQ ID NO: 3199600 - RNA, 22 nt, Human
gcaugacacgaauauugcugau

SEQ ID NO: 3199601 - RNA, 17 nt, Human
gcaucuggguagcugua

SEQ ID NO: 3199602 - RNA, 13 nt, Human
gcauguuacauaa

SEQ ID NO: 3199603 - RNA, 15 nt, Human
gcauuaaaagaaaau

SEQ ID NO: 3199604 - RNA, 22 nt, Human
gcauguguuaaucuuaauguau

SEQ ID NO: 3199605 - RNA, 14 nt, Human
gcaugccuggaugg

SEQ ID NO: 3199606 - RNA, 21 nt, Human
gcaugacagaaaauauguauu

SEQ ID NO: 3199607 - RNA, 19 nt, Human
gcaugacagaaaauaugua

SEQ ID NO: 3199608 - RNA, 18 nt, Human
gcaugacagaaaauaugu

SEQ ID NO: 3199609 - RNA, 17 nt, Human
gcaugacagaaaauaug

SEQ ID NO: 3199610 - RNA, 18 nt, Human
gcauuaccucuuuggaaa

SEQ ID NO: 3199611 - RNA, 16 nt, Human
gcauuaccucuuugga

SEQ ID NO: 3199612 - RNA, 12 nt, Human
gcauuccccagg

SEQ ID NO: 3199613 - RNA, 13 nt, Human
gcauuacaggcaa

SEQ ID NO: 3199614 - RNA, 14 nt, Human
gcauuccccaggag

SEQ ID NO: 3199615 - RNA, 15 nt, Human
gcauuccccaggagg

SEQ ID NO: 3199616 - RNA, 16 nt, Human
gcauuccccaggaggc

SEQ ID NO: 3199617 - RNA, 17 nt, Human
gcauuccccaggaggcc

SEQ ID NO: 3199618 - RNA, 18 nt, Human
gcauuccccaggaggcca

SEQ ID NO: 3199619 - RNA, 19 nt, Human
gcauuccccaggaggccag

SEQ ID NO: 3199620 - RNA, 20 nt, Human
gcauuccccaggaggccagc

SEQ ID NO: 3199621 - RNA, 21 nt, Human
gcauuccccaggaggccagcc

SEQ ID NO: 3199622 - RNA, 22 nt, Human
gcauuccccaggaggccagccu

SEQ ID NO: 3199623 - RNA, 18 nt, Human
gcaggaaauggcugugga

SEQ ID NO: 3199624 - RNA, 20 nt, Human
gcagcucagaaccacagcaa

SEQ ID NO: 3199625 - RNA, 18 nt, Human
gcagcucagagagggugg

SEQ ID NO: 3199626 - RNA, 19 nt, Human
gcagcucagagaggguggg

SEQ ID NO: 3199627 - RNA, 13 nt, Human
gcaggacgacugu

SEQ ID NO: 3199628 - RNA, 17 nt, Human
gcagcucaccucucccu

SEQ ID NO: 3199629 - RNA, 20 nt, Human
gcagcucaccucucccuugg

SEQ ID NO: 3199630 - RNA, 21 nt, Human
gcagcucaccucucccuugga

SEQ ID NO: 3199631 - RNA, 14 nt, Human
gcagcucagagagg

SEQ ID NO: 3199632 - RNA, 16 nt, Human
gcagcucaccucuccc

SEQ ID NO: 3199633 - RNA, 13 nt, Human
gcagccucugggc

SEQ ID NO: 3199634 - RNA, 19 nt, Human
gcagccuccgcuucccugg

SEQ ID NO: 3199635 - RNA, 17 nt, Human
gcagccuccgcuucccu

SEQ ID NO: 3199636 - RNA, 18 nt, Human
gcagcagggagggcuucu

SEQ ID NO: 3199637 - RNA, 19 nt, Human
gcagcagggagggcuucug

SEQ ID NO: 3199638 - RNA, 24 nt, Human
gcagcccugcuuugggcugcccug

SEQ ID NO: 3199639 - RNA, 14 nt, Human
gcagcccugcuuug

SEQ ID NO: 3199640 - RNA, 19 nt, Human
gcagccucacaguccuuac

SEQ ID NO: 3199641 - RNA, 14 nt, Human
gcagccucccuccg

SEQ ID NO: 3199642 - RNA, 15 nt, Human
gcagccucacagucc

SEQ ID NO: 3199643 - RNA, 17 nt, Human
gcagccucacaguccuu

SEQ ID NO: 3199644 - RNA, 19 nt, Human
gcagccgccuucacagcag

SEQ ID NO: 3199645 - RNA, 18 nt, Human
gcagccgccuucacagca

SEQ ID NO: 3199646 - RNA, 14 nt, Human
gcagccgccuucac

SEQ ID NO: 3199647 - RNA, 14 nt, Human
gcagcccuggccca

SEQ ID NO: 3199648 - RNA, 17 nt, Human
gcagcccuggcccauca

SEQ ID NO: 3199649 - RNA, 18 nt, Human
gcagcccuggcccaucau

SEQ ID NO: 3199650 - RNA, 18 nt, Human
gcagauggagaccccuug

SEQ ID NO: 3199651 - RNA, 23 nt, Human
gcagaugaggugaaaaggccaag

SEQ ID NO: 3199652 - RNA, 18 nt, Human
gcagauguccuugaugcu

SEQ ID NO: 3199653 - RNA, 23 nt, Human
gcagagguugcagugagccgaga

SEQ ID NO: 3199654 - RNA, 22 nt, Human
gcagaucucccacaugccaggg

SEQ ID NO: 3199655 - RNA, 18 nt, Human
gcagagguugcagugagc

SEQ ID NO: 3199656 - RNA, 21 nt, Human
gcagagguccacaacacacag

SEQ ID NO: 3199657 - RNA, 22 nt, Human
gcagagaccaucccugaaggcc

SEQ ID NO: 3199658 - RNA, 20 nt, Human
gcagagaccaucccugaagg

SEQ ID NO: 3199659 - RNA, 21 nt, Human
gcagagaccaucccugaaggc

SEQ ID NO: 3199660 - RNA, 19 nt, Human
gcagagaccaucccugaag

SEQ ID NO: 3199661 - RNA, 20 nt, Human
gcagagaagugacgguuccu

SEQ ID NO: 3199662 - RNA, 20 nt, Human
gcagacuuuuaaagacuugc

SEQ ID NO: 3199663 - RNA, 19 nt, Human
gcagacuuuuaaagacuug

SEQ ID NO: 3199664 - RNA, 17 nt, Human
gcagacuuuuaaagacu

SEQ ID NO: 3199665 - RNA, 22 nt, Human
gcagacucuacagaggccaugg

SEQ ID NO: 3199666 - RNA, 19 nt, Human
gcagacucuacagaggcca

SEQ ID NO: 3199667 - RNA, 18 nt, Human
gcagacucuacagaggcc

SEQ ID NO: 3199668 - RNA, 17 nt, Human
gcagacucuacagaggc

SEQ ID NO: 3199669 - RNA, 14 nt, Human
gcacuugcagacuc

SEQ ID NO: 3199670 - RNA, 22 nt, Human
gcacuucgggaggucgaggcag

SEQ ID NO: 3199671 - RNA, 14 nt, Human
gcacuucugccuga

SEQ ID NO: 3199672 - RNA, 21 nt, Human
gcacuucugccugaggggcag

SEQ ID NO: 3199673 - RNA, 17 nt, Human
gcaccacacucagcccu

SEQ ID NO: 3199674 - RNA, 14 nt, Human
gcaccacaaaauau

SEQ ID NO: 3199675 - RNA, 15 nt, Human
gcaccacaaaauaua

SEQ ID NO: 3199676 - RNA, 15 nt, Human
gcaccacacucagcc

SEQ ID NO: 3199677 - RNA, 18 nt, Human
gcaccaaaauaagaaaag

SEQ ID NO: 3199678 - RNA, 13 nt, Human
gcacaggucaggc

SEQ ID NO: 3199679 - RNA, 19 nt, Human
gcacagggccuggcccaug

SEQ ID NO: 3199680 - RNA, 18 nt, Human
gcacagggccuggcccau

SEQ ID NO: 3199681 - RNA, 17 nt, Human
gcacagggccuggccca

SEQ ID NO: 3199682 - RNA, 16 nt, Human
gcacagggccuggccc

SEQ ID NO: 3199683 - RNA, 14 nt, Human
gcacagggccuggc

SEQ ID NO: 3199684 - RNA, 20 nt, Human
gcaccaaaauaagaaaagau

SEQ ID NO: 3199685 - RNA, 19 nt, Human
gcaccaaaauaagaaaaga

SEQ ID NO: 3199686 - RNA, 17 nt, Human
gcaccaucucuccuccu

SEQ ID NO: 3199687 - RNA, 14 nt, Human
gcaccaucucuccu

SEQ ID NO: 3199688 - RNA, 15 nt, Human
gcaccaucucuccuc

SEQ ID NO: 3199689 - RNA, 13 nt, Human
gcaccagcagccu

SEQ ID NO: 3199690 - RNA, 23 nt, Human
gcacagcuucauuuccugugucu

SEQ ID NO: 3199691 - RNA, 21 nt, Human
gcacagcuucauuuccugugu

SEQ ID NO: 3199692 - RNA, 16 nt, Human
gcacagggcaguggga

SEQ ID NO: 3199693 - RNA, 16 nt, Human
gcacagggcaugaaau

SEQ ID NO: 3199694 - RNA, 11 nt, Human
gcacagggccu

SEQ ID NO: 3199695 - RNA, 23 nt, Human
gcacagggcaugaaaugaacaca

SEQ ID NO: 3199696 - RNA, 22 nt, Human
gcacagggcaugaaaugaacac

SEQ ID NO: 3199697 - RNA, 18 nt, Human
gcacagggcaugaaauga

SEQ ID NO: 3199698 - RNA, 22 nt, Human
gcacaggcugagugcaggccca

SEQ ID NO: 3199699 - RNA, 23 nt, Human
gcacaggcugagugcaggcccac

SEQ ID NO: 3199700 - RNA, 16 nt, Human
gcacagggagaggccg

SEQ ID NO: 3199701 - RNA, 20 nt, Human
gauugugucucuugguccug

SEQ ID NO: 3199702 - RNA, 21 nt, Human
gauugugugguguuuuggauu

SEQ ID NO: 3199703 - RNA, 19 nt, Human
gcacuguuuuauuuuaauu

SEQ ID NO: 3199704 - RNA, 12 nt, Human
gcacugggcuug

SEQ ID NO: 3199705 - RNA, 16 nt, Human
gcacuggccuucugau

SEQ ID NO: 3199706 - RNA, 17 nt, Human
gcacuggccuucugaug

SEQ ID NO: 3199707 - RNA, 21 nt, Human
gcacuggccuucugaugaaau

SEQ ID NO: 3199708 - RNA, 12 nt, Human
gcacugcuucca

SEQ ID NO: 3199709 - RNA, 13 nt, Human
gcacugcuuccag

SEQ ID NO: 3199710 - RNA, 14 nt, Human
gcacugcuuccagu

SEQ ID NO: 3199711 - RNA, 15 nt, Human
gcacuauaauguaag

SEQ ID NO: 3199712 - RNA, 14 nt, Human
gcacuauaauguaa

SEQ ID NO: 3199713 - RNA, 20 nt, Human
gcacuauaauguaagcucua

SEQ ID NO: 3199714 - RNA, 16 nt, Human
gcacccucaggcaggu

SEQ ID NO: 3199715 - RNA, 19 nt, Human
gcacccucaggcagguggg

SEQ ID NO: 3199716 - RNA, 23 nt, Human
gcaccccuuccugggcacacgcu

SEQ ID NO: 3199717 - RNA, 15 nt, Human
gcaccccuuccuggg

SEQ ID NO: 3199718 - RNA, 14 nt, Human
gcaccccuuccugg

SEQ ID NO: 3199719 - RNA, 14 nt, Human
gcacgugugugcac

SEQ ID NO: 3199720 - RNA, 20 nt, Human
gcacuaaggugugcucugau

SEQ ID NO: 3199721 - RNA, 19 nt, Human
gcacuaaggugugcucuga

SEQ ID NO: 3199722 - RNA, 22 nt, Human
gcacuaagucucuuuuuuacaa

SEQ ID NO: 3199723 - RNA, 20 nt, Human
gcacuaagucucuuuuuuac

SEQ ID NO: 3199724 - RNA, 19 nt, Human
gcacuaagucucuuuuuua

SEQ ID NO: 3199725 - RNA, 15 nt, Human
gcacuaagucucuuu

SEQ ID NO: 3199726 - RNA, 23 nt, Human
gcacuaagucucuuuuuuacaaa

SEQ ID NO: 3199727 - RNA, 14 nt, Human
gcuguguguggcuu

SEQ ID NO: 3199728 - RNA, 16 nt, Human
gcuguguuugcucccc

SEQ ID NO: 3199729 - RNA, 14 nt, Human
gcuguguuugcucc

SEQ ID NO: 3199730 - RNA, 17 nt, Human
gcuguguuugcuccccu

SEQ ID NO: 3199731 - RNA, 22 nt, Human
gcuguguuuauauggaagaaag

SEQ ID NO: 3199732 - RNA, 23 nt, Human
gcuguuagggguuauugguguaa

SEQ ID NO: 3199733 - RNA, 19 nt, Human
gcuguuacaguuuucuuca

SEQ ID NO: 3199734 - RNA, 17 nt, Human
gcuguuacaguuuucuu

SEQ ID NO: 3199735 - RNA, 16 nt, Human
gcugugugcucuccaa

SEQ ID NO: 3199736 - RNA, 21 nt, Human
gcugugucugcccaaugaaua

SEQ ID NO: 3199737 - RNA, 15 nt, Human
gcugugucucccuuc

SEQ ID NO: 3199738 - RNA, 15 nt, Human
gcugucauugcuucu

SEQ ID NO: 3199739 - RNA, 14 nt, Human
gcuguccacccgcc

SEQ ID NO: 3199740 - RNA, 20 nt, Human
gcugucauugcuucuucuga

SEQ ID NO: 3199741 - RNA, 18 nt, Human
gcugucauugcuucuucu

SEQ ID NO: 3199742 - RNA, 16 nt, Human
gcugucauugcuucuu

SEQ ID NO: 3199743 - RNA, 23 nt, Human
gcugucccuuacgugaguccugg

SEQ ID NO: 3199744 - RNA, 22 nt, Human
gcugucccuuacgugaguccug

SEQ ID NO: 3199745 - RNA, 16 nt, Human
gcugucccuuuuccuu

SEQ ID NO: 3199746 - RNA, 15 nt, Human
gcuggugucaccuga

SEQ ID NO: 3199747 - RNA, 14 nt, Human
gcuggugucaccug

SEQ ID NO: 3199748 - RNA, 17 nt, Human
gcugucagccauuccug

SEQ ID NO: 3199749 - RNA, 16 nt, Human
gcugucacugcugcuu

SEQ ID NO: 3199750 - RNA, 13 nt, Human
gcugucaucucag

SEQ ID NO: 3199751 - RNA, 15 nt, Human
gcugucaguguuugg

SEQ ID NO: 3199752 - RNA, 22 nt, Human
gcugggcuuggcagcccggguc

SEQ ID NO: 3199753 - RNA, 14 nt, Human
gcugggcugggcac

SEQ ID NO: 3199754 - RNA, 13 nt, Human
gcugggcugggca

SEQ ID NO: 3199755 - RNA, 19 nt, Human
gcugggcuucaguggcagc

SEQ ID NO: 3199756 - RNA, 13 nt, Human
gcuggggaagaau

SEQ ID NO: 3199757 - RNA, 23 nt, Human
gcuggggaagaauuuacuuugga

SEQ ID NO: 3199758 - RNA, 22 nt, Human
gcugggcuucaguggcagcugc

SEQ ID NO: 3199759 - RNA, 21 nt, Human
gcugggcuucaguggcagcug

SEQ ID NO: 3199760 - RNA, 20 nt, Human
gcugggcuucaguggcagcu

SEQ ID NO: 3199761 - RNA, 15 nt, Human
gcuggccggacaccc

SEQ ID NO: 3199762 - RNA, 19 nt, Human
gcugggaugauuggagggg

SEQ ID NO: 3199763 - RNA, 21 nt, Human
gcugggcucccuucccaccuc

SEQ ID NO: 3199764 - RNA, 13 nt, Human
gcuggccuggccc

SEQ ID NO: 3199765 - RNA, 12 nt, Human
gcuggccuggcc

SEQ ID NO: 3199766 - RNA, 14 nt, Human
gcuggccuggcccc

SEQ ID NO: 3199767 - RNA, 15 nt, Human
gcuggccuggccccu

SEQ ID NO: 3199768 - RNA, 14 nt, Human
gcuggggaugucuc

SEQ ID NO: 3199769 - RNA, 15 nt, Human
gcugggggccucagu

SEQ ID NO: 3199770 - RNA, 14 nt, Human
gcugggggccucag

SEQ ID NO: 3199771 - RNA, 13 nt, Human
gcugggggccuca

SEQ ID NO: 3199772 - RNA, 18 nt, Human
gcugggggccucagugcc

SEQ ID NO: 3199773 - RNA, 22 nt, Human
gcuggucacuucuucuguccaa

SEQ ID NO: 3199774 - RNA, 21 nt, Human
gcuggucacuucuucugucca

SEQ ID NO: 3199775 - RNA, 20 nt, Human
gcuggucacuucuucugucc

SEQ ID NO: 3199776 - RNA, 14 nt, Human
gcuggucacuucuu

SEQ ID NO: 3199777 - RNA, 22 nt, Human
gcuggucguaaacaucucagag

SEQ ID NO: 3199778 - RNA, 19 nt, Human
gcuggucucgaacuccuga

SEQ ID NO: 3199779 - RNA, 22 nt, Human
gcuggucucgaacuccugaccu

SEQ ID NO: 3199780 - RNA, 23 nt, Human
gcuggucucgaacuccugaccuu

SEQ ID NO: 3199781 - RNA, 23 nt, Human
gcuggucguaaacaucucagaga

SEQ ID NO: 3199782 - RNA, 14 nt, Human
gcuuuccaaagcca

SEQ ID NO: 3199783 - RNA, 20 nt, Human
gcuuuaaaauucucuuccaa

SEQ ID NO: 3199784 - RNA, 14 nt, Human
gcuuuaaaauucuc

SEQ ID NO: 3199785 - RNA, 16 nt, Human
gcuuguuuuggacuuu

SEQ ID NO: 3199786 - RNA, 20 nt, Human
gcuuuuaguuuuucuguccc

SEQ ID NO: 3199787 - RNA, 19 nt, Human
gcuuuuaguuuuucugucc

SEQ ID NO: 3199788 - RNA, 15 nt, Human
gcuuuuaguuuuucu

SEQ ID NO: 3199789 - RNA, 17 nt, Human
gcuuuggucacuuuuag

SEQ ID NO: 3199790 - RNA, 19 nt, Human
gcuuugggcugcccuggug

SEQ ID NO: 3199791 - RNA, 18 nt, Human
gcuuugggcugcccuggu

SEQ ID NO: 3199792 - RNA, 14 nt, Human
gcuuuccauauuuu

SEQ ID NO: 3199793 - RNA, 21 nt, Human
gcuuuccauauuuuuuuccuu

SEQ ID NO: 3199794 - RNA, 13 nt, Human
gcuuguugacaga

SEQ ID NO: 3199795 - RNA, 22 nt, Human
gcuuguggcuccacacacacaa

SEQ ID NO: 3199796 - RNA, 19 nt, Human
gcuuguggcuccacacaca

SEQ ID NO: 3199797 - RNA, 13 nt, Human
gcuuguggcucca

SEQ ID NO: 3199798 - RNA, 18 nt, Human
gcuugcccuguuaaaaga

SEQ ID NO: 3199799 - RNA, 18 nt, Human
gcuugcggcaaaaggaaa

SEQ ID NO: 3199800 - RNA, 10 nt, Human
gcuucauaca

SEQ ID NO: 3199801 - RNA, 21 nt, Human
gcuucauccuccucagaucuu

SEQ ID NO: 3199802 - RNA, 22 nt, Human
gcuucauguucccaaaaucacc

SEQ ID NO: 3199803 - RNA, 20 nt, Human
gcuucaguggcagcugcuuu

SEQ ID NO: 3199804 - RNA, 19 nt, Human
gcuucaguggcagcugcuu

SEQ ID NO: 3199805 - RNA, 15 nt, Human
gcuuagaaacuggaa

SEQ ID NO: 3199806 - RNA, 14 nt, Human
gcuuacguaguucu

SEQ ID NO: 3199807 - RNA, 15 nt, Human
gcuuacguaguucua

SEQ ID NO: 3199808 - RNA, 22 nt, Human
gcuuacguaguucuaccggcuu

SEQ ID NO: 3199809 - RNA, 20 nt, Human
gcuuauacacuuacacuuua

SEQ ID NO: 3199810 - RNA, 15 nt, Human
gcuuauauuugugua

SEQ ID NO: 3199811 - RNA, 19 nt, Human
gcuucuguugcugccucau

SEQ ID NO: 3199812 - RNA, 16 nt, Human
gcuucuggaugggaca

SEQ ID NO: 3199813 - RNA, 17 nt, Human
gcuucuguugcugccuc

SEQ ID NO: 3199814 - RNA, 18 nt, Human
gcuucuguugcugccuca

SEQ ID NO: 3199815 - RNA, 16 nt, Human
gcuucucagcucgcug

SEQ ID NO: 3199816 - RNA, 18 nt, Human
gcuucauuuccugugucu

SEQ ID NO: 3199817 - RNA, 16 nt, Human
gcuuccaauuuuccuu

SEQ ID NO: 3199818 - RNA, 22 nt, Human
gcuucucacugccaugccagcu

SEQ ID NO: 3199819 - RNA, 17 nt, Human
gcuucucacugccaugc

SEQ ID NO: 3199820 - RNA, 14 nt, Human
gcugauuguauuua

SEQ ID NO: 3199821 - RNA, 21 nt, Human
gcugaugacccccccagcuuc

SEQ ID NO: 3199822 - RNA, 14 nt, Human
gcugaucuaaaaau

SEQ ID NO: 3199823 - RNA, 21 nt, Human
gcugauuaaaccaaggcuaga

SEQ ID NO: 3199824 - RNA, 22 nt, Human
gcugcaaaggguaucaggugcu

SEQ ID NO: 3199825 - RNA, 12 nt, Human
gcugauuuuauu

SEQ ID NO: 3199826 - RNA, 17 nt, Human
gcugauuuuauucuuga

SEQ ID NO: 3199827 - RNA, 16 nt, Human
gcugauuuuauucuug

SEQ ID NO: 3199828 - RNA, 22 nt, Human
gcugauaauguauaugaacuua

SEQ ID NO: 3199829 - RNA, 12 nt, Human
gcugagaagacu

SEQ ID NO: 3199830 - RNA, 12 nt, Human
gcugccaccugc

SEQ ID NO: 3199831 - RNA, 20 nt, Human
gcugccaaugggagcucaug

SEQ ID NO: 3199832 - RNA, 17 nt, Human
gcugccacacuucaggc

SEQ ID NO: 3199833 - RNA, 15 nt, Human
gcugccacacuucag

SEQ ID NO: 3199834 - RNA, 23 nt, Human
gcugccacacuucaggcucuucu

SEQ ID NO: 3199835 - RNA, 22 nt, Human
gcugccacacuucaggcucuuc

SEQ ID NO: 3199836 - RNA, 21 nt, Human
gcugccacacuucaggcucuu

SEQ ID NO: 3199837 - RNA, 18 nt, Human
gcugccacacuucaggcu

SEQ ID NO: 3199838 - RNA, 13 nt, Human
gcugcaguugcca

SEQ ID NO: 3199839 - RNA, 14 nt, Human
gcugcaguugccag

SEQ ID NO: 3199840 - RNA, 20 nt, Human
gcugauuuuauucuugauca

SEQ ID NO: 3199841 - RNA, 18 nt, Human
gcugauuuuauucuugau

SEQ ID NO: 3199842 - RNA, 22 nt, Human
gcucuugcauaguaaauguagu

SEQ ID NO: 3199843 - RNA, 19 nt, Human
gcucuuggcagguacucag

SEQ ID NO: 3199844 - RNA, 23 nt, Human
gcucuugggcaauauucucugua

SEQ ID NO: 3199845 - RNA, 10 nt, Human
gcucuuucuu

SEQ ID NO: 3199846 - RNA, 21 nt, Human
gcucuuucuucuuccacacau

SEQ ID NO: 3199847 - RNA, 24 nt, Human
gcucuuuggccugaugaccaauuu

SEQ ID NO: 3199848 - RNA, 15 nt, Human
gcucuccaagcccag

SEQ ID NO: 3199849 - RNA, 14 nt, Human
gcucuugaacuccu

SEQ ID NO: 3199850 - RNA, 16 nt, Human
gcucuugaacuccuga

SEQ ID NO: 3199851 - RNA, 19 nt, Human
gcucuugaacuccugaccu

SEQ ID NO: 3199852 - RNA, 21 nt, Human
gcucuugaacuccugaccuca

SEQ ID NO: 3199853 - RNA, 20 nt, Human
gcucucaggccagcugcuug

SEQ ID NO: 3199854 - RNA, 16 nt, Human
gcucgccacagugggc

SEQ ID NO: 3199855 - RNA, 16 nt, Human
gcucgaugcagacagg

SEQ ID NO: 3199856 - RNA, 19 nt, Human
gcuccuuucugaucuucac

SEQ ID NO: 3199857 - RNA, 17 nt, Human
gcucgaugcagacaggg

SEQ ID NO: 3199858 - RNA, 21 nt, Human
gcucucaggccagcugcuugg

SEQ ID NO: 3199859 - RNA, 17 nt, Human
gcucucaugcugccccu

SEQ ID NO: 3199860 - RNA, 13 nt, Human
gcugacuuagaau

SEQ ID NO: 3199861 - RNA, 22 nt, Human
gcugacuguuuucucuugagag

SEQ ID NO: 3199862 - RNA, 19 nt, Human
gcugacagacacaggcccg

SEQ ID NO: 3199863 - RNA, 18 nt, Human
gcugacagacacaggccc

SEQ ID NO: 3199864 - RNA, 17 nt, Human
gcugacagacacaggcc

SEQ ID NO: 3199865 - RNA, 12 nt, Human
gcugcccugccc

SEQ ID NO: 3199866 - RNA, 13 nt, Human
gcugcccugccca

SEQ ID NO: 3199867 - RNA, 14 nt, Human
gcugcccugcccac

SEQ ID NO: 3199868 - RNA, 16 nt, Human
gcugcccugcccaccu

SEQ ID NO: 3199869 - RNA, 18 nt, Human
gcugcccugcccaccugg

SEQ ID NO: 3199870 - RNA, 20 nt, Human
gcugcccugcccaccuggcc

SEQ ID NO: 3199871 - RNA, 21 nt, Human
gcugcccugcccaccuggccu

SEQ ID NO: 3199872 - RNA, 22 nt, Human
gcugcccugcccaccuggccuc

SEQ ID NO: 3199873 - RNA, 23 nt, Human
gcugcccugcccaccuggccucu

SEQ ID NO: 3199874 - RNA, 24 nt, Human
gcugcccugcccaccuggccucug

SEQ ID NO: 3199875 - RNA, 22 nt, Human
gcugcgguccacccaggagccc

SEQ ID NO: 3199876 - RNA, 21 nt, Human
gcugcgguccacccaggagcc

SEQ ID NO: 3199877 - RNA, 19 nt, Human
gcugcgguccacccaggag

SEQ ID NO: 3199878 - RNA, 15 nt, Human
gcugcgguccaccca

SEQ ID NO: 3199879 - RNA, 14 nt, Human
gcugcgguccaccc

SEQ ID NO: 3199880 - RNA, 20 nt, Human
gcugccuucgguacccacca

SEQ ID NO: 3199881 - RNA, 21 nt, Human
gcugccuucgguacccaccac

SEQ ID NO: 3199882 - RNA, 19 nt, Human
gcugccuguucagcuccag

SEQ ID NO: 3199883 - RNA, 18 nt, Human
gcugccuguucagcucca

SEQ ID NO: 3199884 - RNA, 15 nt, Human
gcugcccuggugcug

SEQ ID NO: 3199885 - RNA, 14 nt, Human
gcugcccuggugcu

SEQ ID NO: 3199886 - RNA, 13 nt, Human
gcugcccuggugc

SEQ ID NO: 3199887 - RNA, 12 nt, Human
gcugcccuggug

SEQ ID NO: 3199888 - RNA, 22 nt, Human
gcugccuguucagcuccagcuc

SEQ ID NO: 3199889 - RNA, 20 nt, Human
gcugccuguucagcuccagc

SEQ ID NO: 3199890 - RNA, 15 nt, Human
gcugccuuagaaccu

SEQ ID NO: 3199891 - RNA, 17 nt, Human
gcugcccuggugcugcc

SEQ ID NO: 3199892 - RNA, 20 nt, Human
gcugccuuagaaccuuucuu

SEQ ID NO: 3199893 - RNA, 22 nt, Human
gcugcuuuuuuugaaacuuuga

SEQ ID NO: 3199894 - RNA, 14 nt, Human
gcugcuuuuuuuga

SEQ ID NO: 3199895 - RNA, 23 nt, Human
gcuggaaugauuucagcucacug

SEQ ID NO: 3199896 - RNA, 12 nt, Human
gcuggaaggagg

SEQ ID NO: 3199897 - RNA, 16 nt, Human
gcuggaaggaggaaga

SEQ ID NO: 3199898 - RNA, 18 nt, Human
gcuggaaggaggaagaau

SEQ ID NO: 3199899 - RNA, 14 nt, Human
gcuggaacucuuga

SEQ ID NO: 3199900 - RNA, 21 nt, Human
gcuggaacucuugacagcuau

SEQ ID NO: 3199901 - RNA, 22 nt, Human
gcugcuugggcuucauccuccu

SEQ ID NO: 3199902 - RNA, 22 nt, Human
gcugcuuuugucuaugggacuc

SEQ ID NO: 3199903 - RNA, 15 nt, Human
gcugcuuugauauau

SEQ ID NO: 3199904 - RNA, 12 nt, Human
gcugcuuuguua

SEQ ID NO: 3199905 - RNA, 19 nt, Human
gcugcuuuguuaccuuaaa

SEQ ID NO: 3199906 - RNA, 20 nt, Human
gcugcuuuguuaccuuaaaa

SEQ ID NO: 3199907 - RNA, 22 nt, Human
gcugcuuuguuaccuuaaaacu

SEQ ID NO: 3199908 - RNA, 23 nt, Human
gcugcuuuguuaccuuaaaacua

SEQ ID NO: 3199909 - RNA, 13 nt, Human
gcugcuuucuucu

SEQ ID NO: 3199910 - RNA, 17 nt, Human
gcugcuaauucuuugca

SEQ ID NO: 3199911 - RNA, 16 nt, Human
gcugcuaauucuuugc

SEQ ID NO: 3199912 - RNA, 15 nt, Human
gcuggaccuugaacu

SEQ ID NO: 3199913 - RNA, 13 nt, Human
gcuggcccugccc

SEQ ID NO: 3199914 - RNA, 14 nt, Human
gcuggcccugcccu

SEQ ID NO: 3199915 - RNA, 15 nt, Human
gcuggcccugcccug

SEQ ID NO: 3199916 - RNA, 16 nt, Human
gcuggcccugcccugg

SEQ ID NO: 3199917 - RNA, 14 nt, Human
gcuggccggacacc

SEQ ID NO: 3199918 - RNA, 19 nt, Human
gcuggcccuggcucccaca

SEQ ID NO: 3199919 - RNA, 14 nt, Human
gcgaauuuuaaaag

SEQ ID NO: 3199920 - RNA, 14 nt, Human
gcgaaucauuuguu

SEQ ID NO: 3199921 - RNA, 16 nt, Human
gcgaauuuuaaaagau

SEQ ID NO: 3199922 - RNA, 15 nt, Human
gcgaauuuuaaaaga

SEQ ID NO: 3199923 - RNA, 15 nt, Human
gccuuucuguguuua

SEQ ID NO: 3199924 - RNA, 22 nt, Human
gccuuucauuuugcuuuaauuu

SEQ ID NO: 3199925 - RNA, 18 nt, Human
gccuuucauuuugcuuua

SEQ ID NO: 3199926 - RNA, 15 nt, Human
gccuuucauuuugcu

SEQ ID NO: 3199927 - RNA, 12 nt, Human
gcgacaaugcaa

SEQ ID NO: 3199928 - RNA, 13 nt, Human
gcgacaaugcaaa

SEQ ID NO: 3199929 - RNA, 20 nt, Human
gcgacaaugcaaaccaucau

SEQ ID NO: 3199930 - RNA, 21 nt, Human
gcgacaaugcaaaccaucauu

SEQ ID NO: 3199931 - RNA, 18 nt, Human
gcgcaggcuggcccugcc

SEQ ID NO: 3199932 - RNA, 19 nt, Human
gcgcaggcuggcccugccc

SEQ ID NO: 3199933 - RNA, 17 nt, Human
gcgcaggcuggcccugc

SEQ ID NO: 3199934 - RNA, 13 nt, Human
gcgacaacagauu

SEQ ID NO: 3199935 - RNA, 20 nt, Human
gcgcaggcuggcccugcccu

SEQ ID NO: 3199936 - RNA, 21 nt, Human
gcgcaggcuggcccugcccug

SEQ ID NO: 3199937 - RNA, 22 nt, Human
gcgcaggcuggcccugcccugg

SEQ ID NO: 3199938 - RNA, 14 nt, Human
gccuugugguccaa

SEQ ID NO: 3199939 - RNA, 17 nt, Human
gccuugugguccaaaua

SEQ ID NO: 3199940 - RNA, 17 nt, Human
gccuuggggucagguug

SEQ ID NO: 3199941 - RNA, 19 nt, Human
gccuuguauaauauugaaa

SEQ ID NO: 3199942 - RNA, 21 nt, Human
gccuuguauaauauugaaaau

SEQ ID NO: 3199943 - RNA, 22 nt, Human
gccuuguauaauauugaaaauu

SEQ ID NO: 3199944 - RNA, 22 nt, Human
gccuuaagugaggaaaucaaag

SEQ ID NO: 3199945 - RNA, 15 nt, Human
gccuuacacaauggu

SEQ ID NO: 3199946 - RNA, 22 nt, Human
gccuuaaagacaagacagcauu

SEQ ID NO: 3199947 - RNA, 13 nt, Human
gccuuaaagacaa

SEQ ID NO: 3199948 - RNA, 14 nt, Human
gccuuaagcugcag

SEQ ID NO: 3199949 - RNA, 20 nt, Human
gccuuaagugaggaaaucaa

SEQ ID NO: 3199950 - RNA, 21 nt, Human
gccuuaagugaggaaaucaaa

SEQ ID NO: 3199951 - RNA, 17 nt, Human
gccugucuuaauuuucu

SEQ ID NO: 3199952 - RNA, 19 nt, Human
gccugucugugaagagcaa

SEQ ID NO: 3199953 - RNA, 16 nt, Human
gccugucuuaauuuuc

SEQ ID NO: 3199954 - RNA, 23 nt, Human
gcgcccaguuggguggaugccug

SEQ ID NO: 3199955 - RNA, 13 nt, Human
gcgccccuucccc

SEQ ID NO: 3199956 - RNA, 22 nt, Human
gcgccccgaaaggucaccucac

SEQ ID NO: 3199957 - RNA, 23 nt, Human
gcgcauaggccugcuuugucucc

SEQ ID NO: 3199958 - RNA, 16 nt, Human
gcgcaguugcugucag

SEQ ID NO: 3199959 - RNA, 21 nt, Human
gcgccuuaaggauguucuagc

SEQ ID NO: 3199960 - RNA, 16 nt, Human
gcgcccuggcccccac

SEQ ID NO: 3199961 - RNA, 15 nt, Human
gcgcccuggccccca

SEQ ID NO: 3199962 - RNA, 14 nt, Human
gcgcccuggccccc

SEQ ID NO: 3199963 - RNA, 13 nt, Human
gcgcccuggcccc

SEQ ID NO: 3199964 - RNA, 12 nt, Human
gcgcccuggccc

SEQ ID NO: 3199965 - RNA, 14 nt, Human
gcggggacagcucc

SEQ ID NO: 3199966 - RNA, 19 nt, Human
gcggagacggagucccacc

SEQ ID NO: 3199967 - RNA, 16 nt, Human
gcggagaaaggaaggg

SEQ ID NO: 3199968 - RNA, 22 nt, Human
gcggacauccccugcuggccgg

SEQ ID NO: 3199969 - RNA, 20 nt, Human
gcggacauccccugcuggcc

SEQ ID NO: 3199970 - RNA, 17 nt, Human
gcgcugccccuggcagc

SEQ ID NO: 3199971 - RNA, 18 nt, Human
gcgcugccccuggcagcc

SEQ ID NO: 3199972 - RNA, 21 nt, Human
gcgcugccccuggcagccccu

SEQ ID NO: 3199973 - RNA, 14 nt, Human
gcgguccacccagg

SEQ ID NO: 3199974 - RNA, 13 nt, Human
gcgguccacccag

SEQ ID NO: 3199975 - RNA, 19 nt, Human
gcggugagaggggaacaga

SEQ ID NO: 3199976 - RNA, 18 nt, Human
gcggugcccaaccacacu

SEQ ID NO: 3199977 - RNA, 17 nt, Human
gcggggacagcuccuuc

SEQ ID NO: 3199978 - RNA, 15 nt, Human
gcggggacagcuccu

SEQ ID NO: 3199979 - RNA, 19 nt, Human
gcggguuauaaugaaugac

SEQ ID NO: 3199980 - RNA, 13 nt, Human
gccuggucagccc

SEQ ID NO: 3199981 - RNA, 15 nt, Human
gccuggucagcccaa

SEQ ID NO: 3199982 - RNA, 14 nt, Human
gccuggucagccca

SEQ ID NO: 3199983 - RNA, 17 nt, Human
gccugggccuggcuccc

SEQ ID NO: 3199984 - RNA, 16 nt, Human
gccugggccuggcucc

SEQ ID NO: 3199985 - RNA, 15 nt, Human
gccugggccuggcuc

SEQ ID NO: 3199986 - RNA, 14 nt, Human
gccugggccuggcu

SEQ ID NO: 3199987 - RNA, 13 nt, Human
gccugggccuggc

SEQ ID NO: 3199988 - RNA, 11 nt, Human
gccugggccug

SEQ ID NO: 3199989 - RNA, 21 nt, Human
gccugggccguagcuugucug

SEQ ID NO: 3199990 - RNA, 15 nt, Human
gccuguaauccuagc

SEQ ID NO: 3199991 - RNA, 20 nt, Human
gccuguaauccuagcacuuu

SEQ ID NO: 3199992 - RNA, 20 nt, Human
gccugucucggaaccuguga

SEQ ID NO: 3199993 - RNA, 18 nt, Human
gccugggcagaaggaaga

SEQ ID NO: 3199994 - RNA, 13 nt, Human
gccuggccccuca

SEQ ID NO: 3199995 - RNA, 14 nt, Human
gccuggccccucag

SEQ ID NO: 3199996 - RNA, 22 nt, Human
gccuggcccauguauggccagg

SEQ ID NO: 3199997 - RNA, 12 nt, Human
gccuggcccaug

SEQ ID NO: 3199998 - RNA, 21 nt, Human
gccuggccagaugcaccagcc

SEQ ID NO: 3199999 - RNA, 16 nt, Human
gccuggccagaugcac

SEQ ID NO: 3200000 - RNA, 20 nt, Human
gccuggccagaugcaccagc

SEQ ID NO: 3200001 - RNA, 21 nt, Human
gccuggcagccgugccuucag

SEQ ID NO: 3200002 - RNA, 20 nt, Human
gccuggcagccgugccuuca

SEQ ID NO: 3200003 - RNA, 12 nt, Human
gccuggcagccg

SEQ ID NO: 3200004 - RNA, 19 nt, Human
gccuggcacagggcagugg

SEQ ID NO: 3200005 - RNA, 18 nt, Human
gccuggcacagggcagug

SEQ ID NO: 3200006 - RNA, 16 nt, Human
gccuggauggggcugc

SEQ ID NO: 3200007 - RNA, 18 nt, Human
gccuggauggggcugcac

SEQ ID NO: 3200008 - RNA, 20 nt, Human
gccuggauggggcugcaccg

SEQ ID NO: 3200009 - RNA, 20 nt, Human
gccuggcaauagaccgagac

SEQ ID NO: 3200010 - RNA, 14 nt, Human
gccuggcacagggc

SEQ ID NO: 3200011 - RNA, 13 nt, Human
gccuggcacaggg

SEQ ID NO: 3200012 - RNA, 20 nt, Human
gccugcuccuucccuugcua

SEQ ID NO: 3200013 - RNA, 18 nt, Human
gccugcucuuuggccuga

SEQ ID NO: 3200014 - RNA, 15 nt, Human
gccugcuccuucccu

SEQ ID NO: 3200015 - RNA, 14 nt, Human
gccugcuccuuccc

SEQ ID NO: 3200016 - RNA, 13 nt, Human
gccugcuccuucc

SEQ ID NO: 3200017 - RNA, 12 nt, Human
gccugcuccuuc

SEQ ID NO: 3200018 - RNA, 18 nt, Human
gccuggaaaccugucuga

SEQ ID NO: 3200019 - RNA, 17 nt, Human
gccuggaaaccugucug

SEQ ID NO: 3200020 - RNA, 16 nt, Human
gccugcuuuuuggaaa

SEQ ID NO: 3200021 - RNA, 21 nt, Human
gccugcuuuuuggaaagucag

SEQ ID NO: 3200022 - RNA, 17 nt, Human
gccugagcgacagugag

SEQ ID NO: 3200023 - RNA, 20 nt, Human
gccugagcgacagugagacu

SEQ ID NO: 3200024 - RNA, 18 nt, Human
gccugaagucacacagug

SEQ ID NO: 3200025 - RNA, 17 nt, Human
gccugaagucacacagu

SEQ ID NO: 3200026 - RNA, 16 nt, Human
gccugaagucacacag

SEQ ID NO: 3200027 - RNA, 15 nt, Human
gccugaagucacaca

SEQ ID NO: 3200028 - RNA, 21 nt, Human
gcccaguuggguggaugccug

SEQ ID NO: 3200029 - RNA, 19 nt, Human
gcccaguuggguggaugcc

SEQ ID NO: 3200030 - RNA, 12 nt, Human
gccugagcuggg

SEQ ID NO: 3200031 - RNA, 13 nt, Human
gccugaggcuccu

SEQ ID NO: 3200032 - RNA, 13 nt, Human
gcuccugugucuu

SEQ ID NO: 3200033 - RNA, 12 nt, Human
gcuccugugucu

SEQ ID NO: 3200034 - RNA, 18 nt, Human
gcuccuuccucugaggcu

SEQ ID NO: 3200035 - RNA, 19 nt, Human
gcuccuucccuugcuacca

SEQ ID NO: 3200036 - RNA, 15 nt, Human
gcuccuucccuugcu

SEQ ID NO: 3200037 - RNA, 22 nt, Human
gcuccuucaacaaggcuugcug

SEQ ID NO: 3200038 - RNA, 21 nt, Human
gcuccuucaacaaggcuugcu

SEQ ID NO: 3200039 - RNA, 22 nt, Human
gcuccuuaggguuuucucucua

SEQ ID NO: 3200040 - RNA, 21 nt, Human
gcuccuuaggguuuucucucu

SEQ ID NO: 3200041 - RNA, 19 nt, Human
gcuccuuaggguuuucucu

SEQ ID NO: 3200042 - RNA, 20 nt, Human
gcuccuuccucugaggcuga

SEQ ID NO: 3200043 - RNA, 22 nt, Human
gcuccuuccucugaggcugaaa

SEQ ID NO: 3200044 - RNA, 19 nt, Human
gcucgagcaugccuggaug

SEQ ID NO: 3200045 - RNA, 21 nt, Human
gcucgagcaugccuggauggg

SEQ ID NO: 3200046 - RNA, 17 nt, Human
gcucgagcaugccugga

SEQ ID NO: 3200047 - RNA, 12 nt, Human
gcuccuuucuga

SEQ ID NO: 3200048 - RNA, 17 nt, Human
gcuccuuuagcgcccag

SEQ ID NO: 3200049 - RNA, 13 nt, Human
gcuccuucugucc

SEQ ID NO: 3200050 - RNA, 14 nt, Human
gcuccucccggugc

SEQ ID NO: 3200051 - RNA, 23 nt, Human
gcuccuggggguucuuucuuccu

SEQ ID NO: 3200052 - RNA, 12 nt, Human
gcuccgucugac

SEQ ID NO: 3200053 - RNA, 15 nt, Human
gcuccgggcuccgac

SEQ ID NO: 3200054 - RNA, 22 nt, Human
gcuccgggacguggcaccuccu

SEQ ID NO: 3200055 - RNA, 21 nt, Human
gcuccgggacguggcaccucc

SEQ ID NO: 3200056 - RNA, 23 nt, Human
gcuccggcguguguucaguguua

SEQ ID NO: 3200057 - RNA, 24 nt, Human
gcuccgcuuucuacccagcgagcc

SEQ ID NO: 3200058 - RNA, 22 nt, Human
gcuccggcguguguucaguguu

SEQ ID NO: 3200059 - RNA, 17 nt, Human
gcuccaggccagggggc

SEQ ID NO: 3200060 - RNA, 12 nt, Human
gcuccaggcagc

SEQ ID NO: 3200061 - RNA, 20 nt, Human
gcuccaggcagcacccaggu

SEQ ID NO: 3200062 - RNA, 15 nt, Human
gcuccaggcagcacc

SEQ ID NO: 3200063 - RNA, 18 nt, Human
gcuccaggccagggggcc

SEQ ID NO: 3200064 - RNA, 22 nt, Human
gcuccaggcagcacccagguuu

SEQ ID NO: 3200065 - RNA, 24 nt, Human
gcuccaggcuccuuuagcgcccag

SEQ ID NO: 3200066 - RNA, 12 nt, Human
gcuccaggcucc

SEQ ID NO: 3200067 - RNA, 15 nt, Human
gcuccaggagcagcc

SEQ ID NO: 3200068 - RNA, 16 nt, Human
gcuccaggagcagcca

SEQ ID NO: 3200069 - RNA, 17 nt, Human
gcuccaggagcagccac

SEQ ID NO: 3200070 - RNA, 18 nt, Human
gcuccaggagcagccaca

SEQ ID NO: 3200071 - RNA, 12 nt, Human
gcuccaggagca

SEQ ID NO: 3200072 - RNA, 14 nt, Human
gcuccaggagcagc

SEQ ID NO: 3200073 - RNA, 11 nt, Human
gcuccaggagc

SEQ ID NO: 3200074 - RNA, 21 nt, Human
gcuccagcuguucagcugguu

SEQ ID NO: 3200075 - RNA, 20 nt, Human
gcuccagcuguucagcuggu

SEQ ID NO: 3200076 - RNA, 22 nt, Human
gcucauucagcaucugaccucu

SEQ ID NO: 3200077 - RNA, 18 nt, Human
gcucauucagcaucugac

SEQ ID NO: 3200078 - RNA, 16 nt, Human
gcucauucagcaucug

SEQ ID NO: 3200079 - RNA, 18 nt, Human
gcuccaguccccagaacu

SEQ ID NO: 3200080 - RNA, 19 nt, Human
gcucccuucccaccucucu

SEQ ID NO: 3200081 - RNA, 23 nt, Human
gcuccgcuuucuacccagcgagc

SEQ ID NO: 3200082 - RNA, 22 nt, Human
gcuccgcuuucuacccagcgag

SEQ ID NO: 3200083 - RNA, 21 nt, Human
gcuccgcuuucuacccagcga

SEQ ID NO: 3200084 - RNA, 18 nt, Human
gcuccgcuuucuacccag

SEQ ID NO: 3200085 - RNA, 20 nt, Human
gcucccuucccaccucucuc

SEQ ID NO: 3200086 - RNA, 23 nt, Human
gcuccgacuugugcacaggcaga

SEQ ID NO: 3200087 - RNA, 22 nt, Human
gcuccgacuugugcacaggcag

SEQ ID NO: 3200088 - RNA, 18 nt, Human
gcucccuugaccugcuga

SEQ ID NO: 3200089 - RNA, 22 nt, Human
gcucaucagaaacaauuucugu

SEQ ID NO: 3200090 - RNA, 15 nt, Human
gcucaucagaaacaa

SEQ ID NO: 3200091 - RNA, 19 nt, Human
gcucagcugucaaggcuca

SEQ ID NO: 3200092 - RNA, 23 nt, Human
gcucagcggggacagcuccuucu

SEQ ID NO: 3200093 - RNA, 18 nt, Human
gcucagcggggacagcuc

SEQ ID NO: 3200094 - RNA, 17 nt, Human
gcucagcggggacagcu

SEQ ID NO: 3200095 - RNA, 16 nt, Human
gcucagcggggacagc

SEQ ID NO: 3200096 - RNA, 21 nt, Human
gcucagcccucccugccccuc

SEQ ID NO: 3200097 - RNA, 19 nt, Human
gcucagcccucccugcccc

SEQ ID NO: 3200098 - RNA, 18 nt, Human
gcucagcccucccugccc

SEQ ID NO: 3200099 - RNA, 17 nt, Human
gcucagcccucccugcc

SEQ ID NO: 3200100 - RNA, 15 nt, Human
gcucaccagccccag

SEQ ID NO: 3200101 - RNA, 14 nt, Human
gcucaccagcccca

SEQ ID NO: 3200102 - RNA, 13 nt, Human
gcucaccagcccc

SEQ ID NO: 3200103 - RNA, 12 nt, Human
gcucaccagccc

SEQ ID NO: 3200104 - RNA, 16 nt, Human
gcucacauaucuguca

SEQ ID NO: 3200105 - RNA, 22 nt, Human
gcucacagaacccuuggagcca

SEQ ID NO: 3200106 - RNA, 14 nt, Human
gcucaccucucccu

SEQ ID NO: 3200107 - RNA, 16 nt, Human
gcucaccucucccuug

SEQ ID NO: 3200108 - RNA, 17 nt, Human
gcucaccucucccuugg

SEQ ID NO: 3200109 - RNA, 18 nt, Human
gcucaccucucccuugga

SEQ ID NO: 3200110 - RNA, 12 nt, Human
gcucagcccucc

SEQ ID NO: 3200111 - RNA, 16 nt, Human
gcucagcccucccugc

SEQ ID NO: 3200112 - RNA, 15 nt, Human
gcucagcccucccug

SEQ ID NO: 3200113 - RNA, 13 nt, Human
gcuaucuccccca

SEQ ID NO: 3200114 - RNA, 18 nt, Human
gcucaaguccucuuuucu

SEQ ID NO: 3200115 - RNA, 17 nt, Human
gcucaagcccaggaggg

SEQ ID NO: 3200116 - RNA, 16 nt, Human
gcucaagcccaggagg

SEQ ID NO: 3200117 - RNA, 14 nt, Human
gcuaucucccccag

SEQ ID NO: 3200118 - RNA, 22 nt, Human
gcucaaguccucuuuucugaga

SEQ ID NO: 3200119 - RNA, 19 nt, Human
gcucaaguccucuuuucug

SEQ ID NO: 3200120 - RNA, 21 nt, Human
gcuaguugggcuuccucauag

SEQ ID NO: 3200121 - RNA, 17 nt, Human
gcuauaaauuauauucc

SEQ ID NO: 3200122 - RNA, 19 nt, Human
gcggugcuaucucccccag

SEQ ID NO: 3200123 - RNA, 22 nt, Human
gcggugcuaucucccccagccc

SEQ ID NO: 3200124 - RNA, 19 nt, Human
gcuauaggugcuacaaaaa

SEQ ID NO: 3200125 - RNA, 21 nt, Human
gcuauaggugcuacaaaaaca

SEQ ID NO: 3200126 - RNA, 20 nt, Human
gcuauaacuauguugauaaa

SEQ ID NO: 3200127 - RNA, 23 nt, Human
gcuauaguuacuguccuguugau

SEQ ID NO: 3200128 - RNA, 16 nt, Human
ggccugacucucagca

SEQ ID NO: 3200129 - RNA, 22 nt, Human
ggccucugcacuccccugcugg

SEQ ID NO: 3200130 - RNA, 18 nt, Human
ggccucugcacuccccug

SEQ ID NO: 3200131 - RNA, 19 nt, Human
ggccucugcacuccccugc

SEQ ID NO: 3200132 - RNA, 13 nt, Human
ggccuggccccuc

SEQ ID NO: 3200133 - RNA, 12 nt, Human
ggccuggcccau

SEQ ID NO: 3200134 - RNA, 14 nt, Human
ggccuggccccuca

SEQ ID NO: 3200135 - RNA, 15 nt, Human
ggccuggccccucag

SEQ ID NO: 3200136 - RNA, 17 nt, Human
ggccuggccccucaggg

SEQ ID NO: 3200137 - RNA, 18 nt, Human
ggccuggccccucagggu

SEQ ID NO: 3200138 - RNA, 23 nt, Human
ggccuggccccucagggucccug

SEQ ID NO: 3200139 - RNA, 10 nt, Human
ggccuggccu

SEQ ID NO: 3200140 - RNA, 13 nt, Human
ggccuggccugag

SEQ ID NO: 3200141 - RNA, 14 nt, Human
ggccuggccugagc

SEQ ID NO: 3200142 - RNA, 15 nt, Human
ggccuggcccaugua

SEQ ID NO: 3200143 - RNA, 15 nt, Human
ggccuggccugagcu

SEQ ID NO: 3200144 - RNA, 16 nt, Human
ggccuggccugagcug

SEQ ID NO: 3200145 - RNA, 11 nt, Human
ggccugggccc

SEQ ID NO: 3200146 - RNA, 12 nt, Human
ggccugggccug

SEQ ID NO: 3200147 - RNA, 23 nt, Human
ggccugggggcugggcagaggaa

SEQ ID NO: 3200148 - RNA, 18 nt, Human
ggccugggccuggcuccc

SEQ ID NO: 3200149 - RNA, 17 nt, Human
ggccugggccuggcucc

SEQ ID NO: 3200150 - RNA, 15 nt, Human
ggccugggccuggcu

SEQ ID NO: 3200151 - RNA, 22 nt, Human
ggccugggggcugggcagagga

SEQ ID NO: 3200152 - RNA, 23 nt, Human
ggcgcagcauauucaggaagcuc

SEQ ID NO: 3200153 - RNA, 24 nt, Human
ggcgcagcauauucaggaagcuca

SEQ ID NO: 3200154 - RNA, 18 nt, Human
ggcgcaagggaggcccag

SEQ ID NO: 3200155 - RNA, 20 nt, Human
ggcgcaagggaggcccagcg

SEQ ID NO: 3200156 - RNA, 14 nt, Human
ggccuacuccuguc

SEQ ID NO: 3200157 - RNA, 12 nt, Human
ggccuacuccug

SEQ ID NO: 3200158 - RNA, 16 nt, Human
ggccguugcugacuua

SEQ ID NO: 3200159 - RNA, 18 nt, Human
ggccggcggccucagagu

SEQ ID NO: 3200160 - RNA, 12 nt, Human
ggccgggcagag

SEQ ID NO: 3200161 - RNA, 15 nt, Human
ggccgggagccugau

SEQ ID NO: 3200162 - RNA, 19 nt, Human
ggccggcuuucaggagcuc

SEQ ID NO: 3200163 - RNA, 18 nt, Human
ggccggcuuucaggagcu

SEQ ID NO: 3200164 - RNA, 14 nt, Human
ggcccagagggccu

SEQ ID NO: 3200165 - RNA, 17 nt, Human
ggcccagagggccugca

SEQ ID NO: 3200166 - RNA, 19 nt, Human
ggcccagagggccugcaag

SEQ ID NO: 3200167 - RNA, 20 nt, Human
ggcccagagggccugcaagg

SEQ ID NO: 3200168 - RNA, 20 nt, Human
ggccucucauuccagaggaa

SEQ ID NO: 3200169 - RNA, 16 nt, Human
ggccucugcacucccc

SEQ ID NO: 3200170 - RNA, 14 nt, Human
ggccuccugugugu

SEQ ID NO: 3200171 - RNA, 20 nt, Human
ggccucgguguggagaagcg

SEQ ID NO: 3200172 - RNA, 22 nt, Human
ggccucaagugauucuccugcc

SEQ ID NO: 3200173 - RNA, 14 nt, Human
ggccucaagugauu

SEQ ID NO: 3200174 - RNA, 23 nt, Human
ggccuacuccugucuucugcuuu

SEQ ID NO: 3200175 - RNA, 18 nt, Human
ggccuacuggggaucaga

SEQ ID NO: 3200176 - RNA, 20 nt, Human
ggccuacuccugucuucugc

SEQ ID NO: 3200177 - RNA, 17 nt, Human
ggccuacuccugucuuc

SEQ ID NO: 3200178 - RNA, 15 nt, Human
ggccuacuccugucu

SEQ ID NO: 3200179 - RNA, 16 nt, Human
ggcucugccucccauc

SEQ ID NO: 3200180 - RNA, 14 nt, Human
ggcucugcccuugg

SEQ ID NO: 3200181 - RNA, 15 nt, Human
ggcucugcccuuggu

SEQ ID NO: 3200182 - RNA, 13 nt, Human
ggcucugccuccc

SEQ ID NO: 3200183 - RNA, 15 nt, Human
ggcucugccucccau

SEQ ID NO: 3200184 - RNA, 12 nt, Human
ggcucugcccuu

SEQ ID NO: 3200185 - RNA, 16 nt, Human
ggcucucugggcugac

SEQ ID NO: 3200186 - RNA, 20 nt, Human
ggcucugacaaagcuucccg

SEQ ID NO: 3200187 - RNA, 19 nt, Human
ggcucugacaaagcuuccc

SEQ ID NO: 3200188 - RNA, 14 nt, Human
ggcucucaggccag

SEQ ID NO: 3200189 - RNA, 21 nt, Human
ggcucucgcggccucuucucu

SEQ ID NO: 3200190 - RNA, 17 nt, Human
ggcucucaggccagcug

SEQ ID NO: 3200191 - RNA, 18 nt, Human
ggcucucaggccagcugc

SEQ ID NO: 3200192 - RNA, 19 nt, Human
ggcucucaggccagcugcu

SEQ ID NO: 3200193 - RNA, 20 nt, Human
ggcucucaggccagcugcuu

SEQ ID NO: 3200194 - RNA, 15 nt, Human
ggcucucaggccagc

SEQ ID NO: 3200195 - RNA, 16 nt, Human
ggcucucaggccagcu

SEQ ID NO: 3200196 - RNA, 15 nt, Human
ggcuccccugcagcc

SEQ ID NO: 3200197 - RNA, 16 nt, Human
ggcuccccugcagccc

SEQ ID NO: 3200198 - RNA, 18 nt, Human
ggcuccccugcagcccug

SEQ ID NO: 3200199 - RNA, 23 nt, Human
ggcuccccugcagcccuggccca

SEQ ID NO: 3200200 - RNA, 11 nt, Human
ggcuccccugg

SEQ ID NO: 3200201 - RNA, 12 nt, Human
ggcuccccuggg

SEQ ID NO: 3200202 - RNA, 14 nt, Human
ggcuccaggcuccu

SEQ ID NO: 3200203 - RNA, 20 nt, Human
ggcucccaggagccugccca

SEQ ID NO: 3200204 - RNA, 21 nt, Human
ggcucccaggagccugcccag

SEQ ID NO: 3200205 - RNA, 22 nt, Human
ggcucccaggagccugcccagc

SEQ ID NO: 3200206 - RNA, 16 nt, Human
ggcuccacuuggucug

SEQ ID NO: 3200207 - RNA, 9 nt, Human
ggcuccaga

SEQ ID NO: 3200208 - RNA, 13 nt, Human
ggcucaccagaau

SEQ ID NO: 3200209 - RNA, 21 nt, Human
ggcucacacuuggcucugagg

SEQ ID NO: 3200210 - RNA, 10 nt, Human
ggcuccagac

SEQ ID NO: 3200211 - RNA, 14 nt, Human
ggcuccaggagcag

SEQ ID NO: 3200212 - RNA, 16 nt, Human
ggcuccaggagcagcc

SEQ ID NO: 3200213 - RNA, 17 nt, Human
ggcuccaggagcagcca

SEQ ID NO: 3200214 - RNA, 13 nt, Human
ggcuccaggagca

SEQ ID NO: 3200215 - RNA, 13 nt, Human
ggcuccaggcucc

SEQ ID NO: 3200216 - RNA, 12 nt, Human
ggcuccaggcuc

SEQ ID NO: 3200217 - RNA, 23 nt, Human
ggcuauaggugcuacaaaaacac

SEQ ID NO: 3200218 - RNA, 20 nt, Human
ggcuaguaucaaaagaaaga

SEQ ID NO: 3200219 - RNA, 20 nt, Human
ggcgggcacaccuccuccca

SEQ ID NO: 3200220 - RNA, 15 nt, Human
ggcgcgguggcucac

SEQ ID NO: 3200221 - RNA, 14 nt, Human
ggcgcgugaggccc

SEQ ID NO: 3200222 - RNA, 18 nt, Human
ggcgcgugaggcccgugg

SEQ ID NO: 3200223 - RNA, 11 nt, Human
ggcgcugcccc

SEQ ID NO: 3200224 - RNA, 23 nt, Human
ggcgcucgaaguugaucucccca

SEQ ID NO: 3200225 - RNA, 22 nt, Human
ggcgcuagcacagcucccuucu

SEQ ID NO: 3200226 - RNA, 19 nt, Human
ggcgcuagcacagcucccu

SEQ ID NO: 3200227 - RNA, 12 nt, Human
ggcgcuaacuug

SEQ ID NO: 3200228 - RNA, 21 nt, Human
ggcgcuagaggccauggaggc

SEQ ID NO: 3200229 - RNA, 23 nt, Human
ggcgcuaacuugcuuaaauguga

SEQ ID NO: 3200230 - RNA, 17 nt, Human
ggcgcugccccuggcag

SEQ ID NO: 3200231 - RNA, 21 nt, Human
gggagccugaucaccugcccu

SEQ ID NO: 3200232 - RNA, 20 nt, Human
gggagccgggcaaacuggcc

SEQ ID NO: 3200233 - RNA, 12 nt, Human
gggagcucugca

SEQ ID NO: 3200234 - RNA, 22 nt, Human
gggagcugccuguucagcucca

SEQ ID NO: 3200235 - RNA, 21 nt, Human
gggagcugccuguucagcucc

SEQ ID NO: 3200236 - RNA, 13 nt, Human
gggagcugccugu

SEQ ID NO: 3200237 - RNA, 14 nt, Human
gggagcugagaaga

SEQ ID NO: 3200238 - RNA, 22 nt, Human
gggagcuggcuccagccuggaa

SEQ ID NO: 3200239 - RNA, 11 nt, Human
gggagcuggag

SEQ ID NO: 3200240 - RNA, 23 nt, Human
gggaggaucucuugagccuggga

SEQ ID NO: 3200241 - RNA, 21 nt, Human
gggaggauugcuugagcucag

SEQ ID NO: 3200242 - RNA, 22 nt, Human
gggaggauguucugggacacag

SEQ ID NO: 3200243 - RNA, 23 nt, Human
gggaggagaagaaaauguucuuc

SEQ ID NO: 3200244 - RNA, 12 nt, Human
gggaggagaaga

SEQ ID NO: 3200245 - RNA, 17 nt, Human
gggaggacgcucucugg

SEQ ID NO: 3200246 - RNA, 20 nt, Human
gggaggacgcucucuggccu

SEQ ID NO: 3200247 - RNA, 21 nt, Human
gggagugaguugauagcacag

SEQ ID NO: 3200248 - RNA, 17 nt, Human
gggaguagacuugcuuu

SEQ ID NO: 3200249 - RNA, 19 nt, Human
gggagguuuucucccccag

SEQ ID NO: 3200250 - RNA, 23 nt, Human
gggaggauugcuugagcucagga

SEQ ID NO: 3200251 - RNA, 20 nt, Human
gggaggugggauccuccagg

SEQ ID NO: 3200252 - RNA, 20 nt, Human
gggacaccaagccuuggcuc

SEQ ID NO: 3200253 - RNA, 19 nt, Human
gggacacacuuagcuggag

SEQ ID NO: 3200254 - RNA, 14 nt, Human
gggacacccuguga

SEQ ID NO: 3200255 - RNA, 14 nt, Human
gggacacccagaaa

SEQ ID NO: 3200256 - RNA, 21 nt, Human
gggaauguuugccucugccuc

SEQ ID NO: 3200257 - RNA, 19 nt, Human
gggaauguuugccucugcc

SEQ ID NO: 3200258 - RNA, 18 nt, Human
ggcuuugccauuaaaaug

SEQ ID NO: 3200259 - RNA, 22 nt, Human
gggaaguuaaagggaagaaaac

SEQ ID NO: 3200260 - RNA, 17 nt, Human
gggaaguuaaagggaag

SEQ ID NO: 3200261 - RNA, 14 nt, Human
gggaaguuaaaggg

SEQ ID NO: 3200262 - RNA, 23 nt, Human
gggacucaaugcacugacauugu

SEQ ID NO: 3200263 - RNA, 21 nt, Human
gggacugaggggaggggagca

SEQ ID NO: 3200264 - RNA, 16 nt, Human
gggacucaaugcacug

SEQ ID NO: 3200265 - RNA, 22 nt, Human
gggacugccaccuccccuugcc

SEQ ID NO: 3200266 - RNA, 18 nt, Human
gggacugccaccuccccu

SEQ ID NO: 3200267 - RNA, 16 nt, Human
gggacugccaccuccc

SEQ ID NO: 3200268 - RNA, 14 nt, Human
gggacugccaccuc

SEQ ID NO: 3200269 - RNA, 19 nt, Human
gggacucaaugcacugaca

SEQ ID NO: 3200270 - RNA, 17 nt, Human
gggacucaaugcacuga

SEQ ID NO: 3200271 - RNA, 20 nt, Human
gggacgcggccggcggccuc

SEQ ID NO: 3200272 - RNA, 20 nt, Human
gggacccaguggcagggcac

SEQ ID NO: 3200273 - RNA, 17 nt, Human
gggacccaguggcaggg

SEQ ID NO: 3200274 - RNA, 15 nt, Human
gggacccaguggcag

SEQ ID NO: 3200275 - RNA, 18 nt, Human
ggcuggacuuggagguag

SEQ ID NO: 3200276 - RNA, 17 nt, Human
ggcuggaguaaucagau

SEQ ID NO: 3200277 - RNA, 13 nt, Human
ggcuggacuugga

SEQ ID NO: 3200278 - RNA, 20 nt, Human
ggcugcuucaaggauccuga

SEQ ID NO: 3200279 - RNA, 15 nt, Human
ggcugcuucaaggau

SEQ ID NO: 3200280 - RNA, 19 nt, Human
ggcugcuucaaggauccug

SEQ ID NO: 3200281 - RNA, 15 nt, Human
ggcugggagcucugc

SEQ ID NO: 3200282 - RNA, 20 nt, Human
ggcugggcucccuucccacc

SEQ ID NO: 3200283 - RNA, 21 nt, Human
ggcugggcucccuucccaccu

SEQ ID NO: 3200284 - RNA, 18 nt, Human
ggcugggcucccuuccca

SEQ ID NO: 3200285 - RNA, 14 nt, Human
ggcugggcacugcu

SEQ ID NO: 3200286 - RNA, 20 nt, Human
ggcugggcacugcucucacc

SEQ ID NO: 3200287 - RNA, 19 nt, Human
ggcugggcacugcucucac

SEQ ID NO: 3200288 - RNA, 16 nt, Human
ggcuggaguuggggca

SEQ ID NO: 3200289 - RNA, 18 nt, Human
ggcugggcuucaguggca

SEQ ID NO: 3200290 - RNA, 18 nt, Human
ggcugggcugggcacugc

SEQ ID NO: 3200291 - RNA, 15 nt, Human
ggcugggcugggcac

SEQ ID NO: 3200292 - RNA, 14 nt, Human
ggcugggcugggca

SEQ ID NO: 3200293 - RNA, 22 nt, Human
ggcugggcuucaguggcagcug

SEQ ID NO: 3200294 - RNA, 21 nt, Human
ggcugggcuucaguggcagcu

SEQ ID NO: 3200295 - RNA, 11 nt, Human
ggcugggcuuc

SEQ ID NO: 3200296 - RNA, 14 nt, Human
ggcugggggccuca

SEQ ID NO: 3200297 - RNA, 19 nt, Human
ggcugggggaugggccuga

SEQ ID NO: 3200298 - RNA, 18 nt, Human
ggcugggggaugggccug

SEQ ID NO: 3200299 - RNA, 16 nt, Human
ggcugggggaagaagc

SEQ ID NO: 3200300 - RNA, 12 nt, Human
ggcuggggcagc

SEQ ID NO: 3200301 - RNA, 23 nt, Human
ggcuggggcagccucugggccca

SEQ ID NO: 3200302 - RNA, 20 nt, Human
ggcuggggcagccucugggc

SEQ ID NO: 3200303 - RNA, 14 nt, Human
ggcuggggcagccu

SEQ ID NO: 3200304 - RNA, 21 nt, Human
ggcuguggccucccugcucua

SEQ ID NO: 3200305 - RNA, 17 nt, Human
ggcugucuguuguauuc

SEQ ID NO: 3200306 - RNA, 16 nt, Human
ggcugugccucugccu

SEQ ID NO: 3200307 - RNA, 13 nt, Human
ggcugugccucug

SEQ ID NO: 3200308 - RNA, 20 nt, Human
ggcuguuggcugggggccuc

SEQ ID NO: 3200309 - RNA, 16 nt, Human
ggcuguuggcuggggg

SEQ ID NO: 3200310 - RNA, 15 nt, Human
ggcuguuggcugggg

SEQ ID NO: 3200311 - RNA, 14 nt, Human
ggcuguuggcuggg

SEQ ID NO: 3200312 - RNA, 14 nt, Human
ggcuuagucacuga

SEQ ID NO: 3200313 - RNA, 20 nt, Human
ggcuucacggaagagccuug

SEQ ID NO: 3200314 - RNA, 14 nt, Human
ggcuuaaaaaaaac

SEQ ID NO: 3200315 - RNA, 21 nt, Human
ggcuucacggaagagccuugc

SEQ ID NO: 3200316 - RNA, 12 nt, Human
ggcuucacagau

SEQ ID NO: 3200317 - RNA, 15 nt, Human
ggcuugcacucucuu

SEQ ID NO: 3200318 - RNA, 17 nt, Human
ggcuuggggaccagagc

SEQ ID NO: 3200319 - RNA, 18 nt, Human
ggcuuggggaccagagcu

SEQ ID NO: 3200320 - RNA, 11 nt, Human
ggcuugcugcc

SEQ ID NO: 3200321 - RNA, 16 nt, Human
ggcuuggcccuggcag

SEQ ID NO: 3200322 - RNA, 15 nt, Human
ggcuuggcccuggca

SEQ ID NO: 3200323 - RNA, 13 nt, Human
ggcuugcugcaga

SEQ ID NO: 3200324 - RNA, 13 nt, Human
ggcuuggcccugg

SEQ ID NO: 3200325 - RNA, 12 nt, Human
ggcuuggcccug

SEQ ID NO: 3200326 - RNA, 12 nt, Human
ggagggagggcu

SEQ ID NO: 3200327 - RNA, 17 nt, Human
ggagggagggcuccaga

SEQ ID NO: 3200328 - RNA, 13 nt, Human
ggagggagggcuc

SEQ ID NO: 3200329 - RNA, 16 nt, Human
ggagggagggcuccag

SEQ ID NO: 3200330 - RNA, 16 nt, Human
ggaggacgcucucugg

SEQ ID NO: 3200331 - RNA, 15 nt, Human
ggaggauguucuggg

SEQ ID NO: 3200332 - RNA, 14 nt, Human
ggaggaccugcccg

SEQ ID NO: 3200333 - RNA, 21 nt, Human
ggaggauguucugggacacag

SEQ ID NO: 3200334 - RNA, 18 nt, Human
ggaggauguucugggaca

SEQ ID NO: 3200335 - RNA, 19 nt, Human
ggaggggagcaugggaagu

SEQ ID NO: 3200336 - RNA, 13 nt, Human
ggagggccugggc

SEQ ID NO: 3200337 - RNA, 16 nt, Human
ggagggccugggccug

SEQ ID NO: 3200338 - RNA, 23 nt, Human
ggagggccugggccuggcucccu

SEQ ID NO: 3200339 - RNA, 22 nt, Human
ggagggccugggccuggcuccc

SEQ ID NO: 3200340 - RNA, 13 nt, Human
ggaggggccuggc

SEQ ID NO: 3200341 - RNA, 22 nt, Human
ggagucccaccuuggcugcagg

SEQ ID NO: 3200342 - RNA, 21 nt, Human
ggagucccaccuuggcugcag

SEQ ID NO: 3200343 - RNA, 20 nt, Human
ggaguagugaagacuccaga

SEQ ID NO: 3200344 - RNA, 21 nt, Human
ggaggggccuggcagccgugc

SEQ ID NO: 3200345 - RNA, 18 nt, Human
ggaggggccuggcagccg

SEQ ID NO: 3200346 - RNA, 14 nt, Human
ggaggggccuggca

SEQ ID NO: 3200347 - RNA, 17 nt, Human
ggagguuggagggaaag

SEQ ID NO: 3200348 - RNA, 17 nt, Human
ggagccugcagagcugc

SEQ ID NO: 3200349 - RNA, 15 nt, Human
ggagccuccugcccu

SEQ ID NO: 3200350 - RNA, 17 nt, Human
ggagccugacagccaga

SEQ ID NO: 3200351 - RNA, 16 nt, Human
ggagccugacagccag

SEQ ID NO: 3200352 - RNA, 13 nt, Human
ggagccugacagc

SEQ ID NO: 3200353 - RNA, 23 nt, Human
ggagcucacuguggugucugugu

SEQ ID NO: 3200354 - RNA, 20 nt, Human
ggagcucacuguggugucug

SEQ ID NO: 3200355 - RNA, 12 nt, Human
ggagcuauuuua

SEQ ID NO: 3200356 - RNA, 19 nt, Human
ggagcggauugcaaagcaa

SEQ ID NO: 3200357 - RNA, 13 nt, Human
ggagcacccugag

SEQ ID NO: 3200358 - RNA, 14 nt, Human
ggagcacccugagg

SEQ ID NO: 3200359 - RNA, 16 nt, Human
ggagcacccugagggc

SEQ ID NO: 3200360 - RNA, 16 nt, Human
ggagccuacccacccc

SEQ ID NO: 3200361 - RNA, 14 nt, Human
ggagccuccugccc

SEQ ID NO: 3200362 - RNA, 22 nt, Human
gcuuuuaucucagauguuaaaa

SEQ ID NO: 3200363 - RNA, 22 nt, Human
ggacacucaaaagcugggcagg

SEQ ID NO: 3200364 - RNA, 21 nt, Human
ggacacuguaacgugugcugu

SEQ ID NO: 3200365 - RNA, 19 nt, Human
ggacacuuaauucuguucu

SEQ ID NO: 3200366 - RNA, 19 nt, Human
ggacacuuauccacgagag

SEQ ID NO: 3200367 - RNA, 16 nt, Human
ggacagaggggguggc

SEQ ID NO: 3200368 - RNA, 20 nt, Human
ggacagaaggcuccugcccc

SEQ ID NO: 3200369 - RNA, 18 nt, Human
ggacagaaggcuccugcc

SEQ ID NO: 3200370 - RNA, 22 nt, Human
ggacacuuauccacgagagcgc

SEQ ID NO: 3200371 - RNA, 15 nt, Human
ggaccagcccacgcu

SEQ ID NO: 3200372 - RNA, 13 nt, Human
ggaccagcccacg

SEQ ID NO: 3200373 - RNA, 12 nt, Human
ggaccagcccac

SEQ ID NO: 3200374 - RNA, 16 nt, Human
ggaccagcccacgcug

SEQ ID NO: 3200375 - RNA, 19 nt, Human
ggaccagagcugccaccug

SEQ ID NO: 3200376 - RNA, 15 nt, Human
ggaccagcacacucc

SEQ ID NO: 3200377 - RNA, 14 nt, Human
ggaccagagcugcc

SEQ ID NO: 3200378 - RNA, 16 nt, Human
ggacagcuccuucugu

SEQ ID NO: 3200379 - RNA, 15 nt, Human
ggacagcuccuucug

SEQ ID NO: 3200380 - RNA, 11 nt, Human
ggacagcuccu

SEQ ID NO: 3200381 - RNA, 22 nt, Human
ggacagccacggccaggccaga

SEQ ID NO: 3200382 - RNA, 15 nt, Human
ggacagccccuccuc

SEQ ID NO: 3200383 - RNA, 16 nt, Human
ggacagccccuccucc

SEQ ID NO: 3200384 - RNA, 19 nt, Human
ggagaaucacaggcugggc

SEQ ID NO: 3200385 - RNA, 18 nt, Human
ggagaaucacaggcuggg

SEQ ID NO: 3200386 - RNA, 17 nt, Human
ggagaaucacaggcugg

SEQ ID NO: 3200387 - RNA, 16 nt, Human
ggagaaucacaggcug

SEQ ID NO: 3200388 - RNA, 15 nt, Human
ggagaaucacaggcu

SEQ ID NO: 3200389 - RNA, 13 nt, Human
ggagaaucacagg

SEQ ID NO: 3200390 - RNA, 23 nt, Human
ggagaagagcuguucacagccag

SEQ ID NO: 3200391 - RNA, 11 nt, Human
ggacugacuga

SEQ ID NO: 3200392 - RNA, 15 nt, Human
ggacugacugaggca

SEQ ID NO: 3200393 - RNA, 16 nt, Human
ggacugacugaggcag

SEQ ID NO: 3200394 - RNA, 17 nt, Human
ggacugacugaggcagu

SEQ ID NO: 3200395 - RNA, 13 nt, Human
ggagaacuagaga

SEQ ID NO: 3200396 - RNA, 12 nt, Human
ggagaagaaaau

SEQ ID NO: 3200397 - RNA, 18 nt, Human
ggagaacuugcugccucg

SEQ ID NO: 3200398 - RNA, 19 nt, Human
ggagaagaaagaacuaucu

SEQ ID NO: 3200399 - RNA, 15 nt, Human
ggagaagagcuguuc

SEQ ID NO: 3200400 - RNA, 15 nt, Human
ggacgcucucuggcc

SEQ ID NO: 3200401 - RNA, 16 nt, Human
ggacgcucucuggccu

SEQ ID NO: 3200402 - RNA, 19 nt, Human
ggacgcucucuggccuucg

SEQ ID NO: 3200403 - RNA, 13 nt, Human
ggacgcucugcug

SEQ ID NO: 3200404 - RNA, 18 nt, Human
ggaccuugaacuggguac

SEQ ID NO: 3200405 - RNA, 23 nt, Human
ggaccaugcugucuggcacagcc

SEQ ID NO: 3200406 - RNA, 16 nt, Human
ggaccauuuuccugca

SEQ ID NO: 3200407 - RNA, 14 nt, Human
ggaccauuuuccug

SEQ ID NO: 3200408 - RNA, 16 nt, Human
ggaccaugcugucugg

SEQ ID NO: 3200409 - RNA, 22 nt, Human
ggaccaugcugucuggcacagc

SEQ ID NO: 3200410 - RNA, 21 nt, Human
ggaccaugcugucuggcacag

SEQ ID NO: 3200411 - RNA, 20 nt, Human
ggaccaugcugucuggcaca

SEQ ID NO: 3200412 - RNA, 19 nt, Human
ggaccaugcugucuggcac

SEQ ID NO: 3200413 - RNA, 17 nt, Human
ggaccaggguuggcacc

SEQ ID NO: 3200414 - RNA, 18 nt, Human
ggaugcccaaagaugcag

SEQ ID NO: 3200415 - RNA, 17 nt, Human
ggaugccugguggcagc

SEQ ID NO: 3200416 - RNA, 13 nt, Human
ggaugccuggugg

SEQ ID NO: 3200417 - RNA, 19 nt, Human
ggaugcccaaagaugcagc

SEQ ID NO: 3200418 - RNA, 17 nt, Human
ggaugccccgucccccu

SEQ ID NO: 3200419 - RNA, 14 nt, Human
ggaugauugaagaa

SEQ ID NO: 3200420 - RNA, 23 nt, Human
ggagucccaccuuggcugcaggg

SEQ ID NO: 3200421 - RNA, 20 nt, Human
ggagucccacuccaagccag

SEQ ID NO: 3200422 - RNA, 18 nt, Human
ggaugaucuaggaagacu

SEQ ID NO: 3200423 - RNA, 22 nt, Human
ggaugaucuaggaagacuuugg

SEQ ID NO: 3200424 - RNA, 16 nt, Human
ggaugaucuaggaaga

SEQ ID NO: 3200425 - RNA, 16 nt, Human
ggauucugagagcugu

SEQ ID NO: 3200426 - RNA, 16 nt, Human
ggauucucaccagcug

SEQ ID NO: 3200427 - RNA, 23 nt, Human
ggauuccuaaucacucagagcag

SEQ ID NO: 3200428 - RNA, 11 nt, Human
ggauucaaauu

SEQ ID NO: 3200429 - RNA, 19 nt, Human
ggauucacaccccaccugc

SEQ ID NO: 3200430 - RNA, 17 nt, Human
ggauucacaccccaccu

SEQ ID NO: 3200431 - RNA, 20 nt, Human
ggauucacaccccaccugcg

SEQ ID NO: 3200432 - RNA, 20 nt, Human
ggauucaguuucuaaaauug

SEQ ID NO: 3200433 - RNA, 17 nt, Human
ggauuagggagagaaga

SEQ ID NO: 3200434 - RNA, 19 nt, Human
ggauuagucccuggccucu

SEQ ID NO: 3200435 - RNA, 14 nt, Human
ggauuaguuuagaa

SEQ ID NO: 3200436 - RNA, 17 nt, Human
ggauuaguuuagaacag

SEQ ID NO: 3200437 - RNA, 18 nt, Human
ggauuaguuuagaacagg

SEQ ID NO: 3200438 - RNA, 15 nt, Human
ggauuauaaucagaa

SEQ ID NO: 3200439 - RNA, 21 nt, Human
ggaugccugguggcagcugcg

SEQ ID NO: 3200440 - RNA, 20 nt, Human
ggaugccugguggcagcugc

SEQ ID NO: 3200441 - RNA, 19 nt, Human
ggaugccugguggcagcug

SEQ ID NO: 3200442 - RNA, 18 nt, Human
ggaugccugguggcagcu

SEQ ID NO: 3200443 - RNA, 21 nt, Human
ggcagagguugcagugagccg

SEQ ID NO: 3200444 - RNA, 22 nt, Human
ggcagagcagagaccaucccug

SEQ ID NO: 3200445 - RNA, 14 nt, Human
ggcagagcccugcu

SEQ ID NO: 3200446 - RNA, 20 nt, Human
ggcagagcccugcucccucc

SEQ ID NO: 3200447 - RNA, 19 nt, Human
ggcacucagaagacacuga

SEQ ID NO: 3200448 - RNA, 18 nt, Human
ggcacucagaagacacug

SEQ ID NO: 3200449 - RNA, 17 nt, Human
ggcacccggccccugcu

SEQ ID NO: 3200450 - RNA, 20 nt, Human
ggcacccggccccugcuggu

SEQ ID NO: 3200451 - RNA, 19 nt, Human
ggcacccggccccugcugg

SEQ ID NO: 3200452 - RNA, 18 nt, Human
ggcacccggccccugcug

SEQ ID NO: 3200453 - RNA, 19 nt, Human
ggcaagaaaagaguuaagg

SEQ ID NO: 3200454 - RNA, 17 nt, Human
ggcaagcaccuccugcc

SEQ ID NO: 3200455 - RNA, 16 nt, Human
ggauucuuccucccuc

SEQ ID NO: 3200456 - RNA, 21 nt, Human
ggauucuuccucccucccucu

SEQ ID NO: 3200457 - RNA, 19 nt, Human
ggauucuuguuuugcuucc

SEQ ID NO: 3200458 - RNA, 18 nt, Human
ggauucuuguuuugcuuc

SEQ ID NO: 3200459 - RNA, 17 nt, Human
ggcaccagcagccugga

SEQ ID NO: 3200460 - RNA, 24 nt, Human
ggcaaggacgcuucacaggacagg

SEQ ID NO: 3200461 - RNA, 19 nt, Human
ggcaccaguagcaggcccg

SEQ ID NO: 3200462 - RNA, 19 nt, Human
ggcaagcaccuccugccuc

SEQ ID NO: 3200463 - RNA, 18 nt, Human
ggcaagcaccuccugccu

SEQ ID NO: 3200464 - RNA, 23 nt, Human
ggcaaggacgcuucacaggacag

SEQ ID NO: 3200465 - RNA, 22 nt, Human
ggcaugacacgaauauugcuga

SEQ ID NO: 3200466 - RNA, 18 nt, Human
ggcaugugaugagaggaa

SEQ ID NO: 3200467 - RNA, 23 nt, Human
ggcaugugaugagaggaaaucac

SEQ ID NO: 3200468 - RNA, 17 nt, Human
ggcagguuggugggggc

SEQ ID NO: 3200469 - RNA, 17 nt, Human
ggcagggucucacucug

SEQ ID NO: 3200470 - RNA, 12 nt, Human
ggcaggguccua

SEQ ID NO: 3200471 - RNA, 24 nt, Human
ggcagcugcgguccacccaggagc

SEQ ID NO: 3200472 - RNA, 23 nt, Human
ggcagcugcgguccacccaggag

SEQ ID NO: 3200473 - RNA, 14 nt, Human
ggcagaguuacuug

SEQ ID NO: 3200474 - RNA, 21 nt, Human
ggcagcugcgguccacccagg

SEQ ID NO: 3200475 - RNA, 13 nt, Human
ggcagaguuacuu

SEQ ID NO: 3200476 - RNA, 17 nt, Human
ggcagaguugaagacag

SEQ ID NO: 3200477 - RNA, 19 nt, Human
ggcagaguugaagacagag

SEQ ID NO: 3200478 - RNA, 20 nt, Human
ggcccacccaagcaggaggc

SEQ ID NO: 3200479 - RNA, 18 nt, Human
ggcccaccaggccccccu

SEQ ID NO: 3200480 - RNA, 12 nt, Human
ggcccagagagg

SEQ ID NO: 3200481 - RNA, 23 nt, Human
ggcccacccugcuuggcccaggg

SEQ ID NO: 3200482 - RNA, 22 nt, Human
ggcccacccugcuuggcccagg

SEQ ID NO: 3200483 - RNA, 21 nt, Human
ggcccacccugcuuggcccag

SEQ ID NO: 3200484 - RNA, 12 nt, Human
ggcccacccugc

SEQ ID NO: 3200485 - RNA, 21 nt, Human
ggcccacccgguucaguguuu

SEQ ID NO: 3200486 - RNA, 11 nt, Human
ggccaggagcc

SEQ ID NO: 3200487 - RNA, 13 nt, Human
ggccaggagccuc

SEQ ID NO: 3200488 - RNA, 14 nt, Human
ggccaggcccucug

SEQ ID NO: 3200489 - RNA, 15 nt, Human
ggccaggcccucugc

SEQ ID NO: 3200490 - RNA, 16 nt, Human
ggccaggcccucugcc

SEQ ID NO: 3200491 - RNA, 17 nt, Human
ggccaggcccucugccc

SEQ ID NO: 3200492 - RNA, 20 nt, Human
ggccacugugaagagaacca

SEQ ID NO: 3200493 - RNA, 16 nt, Human
ggccaccucuuccugg

SEQ ID NO: 3200494 - RNA, 15 nt, Human
ggccaccucuuccug

SEQ ID NO: 3200495 - RNA, 22 nt, Human
ggccaccucuuccuggccggug

SEQ ID NO: 3200496 - RNA, 20 nt, Human
ggccaccucuuccuggccgg

SEQ ID NO: 3200497 - RNA, 19 nt, Human
ggccaccucuuccuggccg

SEQ ID NO: 3200498 - RNA, 17 nt, Human
ggccagaaguagcuuug

SEQ ID NO: 3200499 - RNA, 15 nt, Human
ggccagaaguagcuu

SEQ ID NO: 3200500 - RNA, 23 nt, Human
ggccaggaaguagcacaggcuga

SEQ ID NO: 3200501 - RNA, 22 nt, Human
ggccaggaaguagcacaggcug

SEQ ID NO: 3200502 - RNA, 21 nt, Human
ggccaggaaguagcacaggcu

SEQ ID NO: 3200503 - RNA, 20 nt, Human
ggccaggaaguagcacaggc

SEQ ID NO: 3200504 - RNA, 19 nt, Human
ggccagaaguagcuuugca

SEQ ID NO: 3200505 - RNA, 19 nt, Human
ggccaggaaguagcacagg

SEQ ID NO: 3200506 - RNA, 22 nt, Human
ggccacagaaaauucuucucca

SEQ ID NO: 3200507 - RNA, 20 nt, Human
ggcauguucucugaggacac

SEQ ID NO: 3200508 - RNA, 21 nt, Human
ggccaccuccuaaaaggccca

SEQ ID NO: 3200509 - RNA, 11 nt, Human
ggccaccuccu

SEQ ID NO: 3200510 - RNA, 23 nt, Human
ggccaccuccuaaaaggcccaga

SEQ ID NO: 3200511 - RNA, 22 nt, Human
ggccaccuccuaaaaggcccag

SEQ ID NO: 3200512 - RNA, 14 nt, Human
ggccacaguuguuu

SEQ ID NO: 3200513 - RNA, 16 nt, Human
ggccacaguuguuuga

SEQ ID NO: 3200514 - RNA, 21 nt, Human
cacgcugcucugccccagcuu

SEQ ID NO: 3200515 - RNA, 17 nt, Human
cacgcugcucugcccca

SEQ ID NO: 3200516 - RNA, 15 nt, Human
cacgggggccaagga

SEQ ID NO: 3200517 - RNA, 21 nt, Human
cacggguaaaucuaguaccau

SEQ ID NO: 3200518 - RNA, 20 nt, Human
cacggcucacugcagccuca

SEQ ID NO: 3200519 - RNA, 19 nt, Human
cacggcucacugcagccuc

SEQ ID NO: 3200520 - RNA, 17 nt, Human
cacggcucacugcagcc

SEQ ID NO: 3200521 - RNA, 16 nt, Human
cacggcucacugcagc

SEQ ID NO: 3200522 - RNA, 17 nt, Human
cacgcuggaccuugaac

SEQ ID NO: 3200523 - RNA, 14 nt, Human
cacgcuccuuccuc

SEQ ID NO: 3200524 - RNA, 15 nt, Human
cacgcuccuuucuga

SEQ ID NO: 3200525 - RNA, 12 nt, Human
cacgcuccuuuc

SEQ ID NO: 3200526 - RNA, 22 nt, Human
cacgcuccuuucugaucuucac

SEQ ID NO: 3200527 - RNA, 20 nt, Human
cacgcuggaccuugaacugg

SEQ ID NO: 3200528 - RNA, 15 nt, Human
cacggcucacugcag

SEQ ID NO: 3200529 - RNA, 16 nt, Human
cacgcugcucugcccc

SEQ ID NO: 3200530 - RNA, 22 nt, Human
cacgcugccuucgguacccacc

SEQ ID NO: 3200531 - RNA, 19 nt, Human
cacgcugacuacagggccg

SEQ ID NO: 3200532 - RNA, 23 nt, Human
cacgcgugcacacaccagagccc

SEQ ID NO: 3200533 - RNA, 21 nt, Human
cacgcgugcacacaccagagc

SEQ ID NO: 3200534 - RNA, 16 nt, Human
cacgcgugcacacacc

SEQ ID NO: 3200535 - RNA, 15 nt, Human
cacgcgugcacacac

SEQ ID NO: 3200536 - RNA, 19 nt, Human
cacgccuguaauccuagca

SEQ ID NO: 3200537 - RNA, 20 nt, Human
cacgccuguaauccuagcac

SEQ ID NO: 3200538 - RNA, 18 nt, Human
cacgccuagccucacgcu

SEQ ID NO: 3200539 - RNA, 15 nt, Human
cacgccuagccucac

SEQ ID NO: 3200540 - RNA, 17 nt, Human
cacgccuagccucacgc

SEQ ID NO: 3200541 - RNA, 16 nt, Human
cacgccuagccucacg

SEQ ID NO: 3200542 - RNA, 19 nt, Human
cacguaaugaaacuuggau

SEQ ID NO: 3200543 - RNA, 16 nt, Human
cacguaaugaaacuug

SEQ ID NO: 3200544 - RNA, 14 nt, Human
cacguacacacaca

SEQ ID NO: 3200545 - RNA, 19 nt, Human
cacguacacacacauacac

SEQ ID NO: 3200546 - RNA, 18 nt, Human
cacguacacacacauaca

SEQ ID NO: 3200547 - RNA, 16 nt, Human
cacguccucgcucccg

SEQ ID NO: 3200548 - RNA, 23 nt, Human
cacgucuauuucaucagaacagc

SEQ ID NO: 3200549 - RNA, 19 nt, Human
cacgucuauuucaucagaa

SEQ ID NO: 3200550 - RNA, 13 nt, Human
cacgugacagccg

SEQ ID NO: 3200551 - RNA, 19 nt, Human
cacguguggccuguucuuc

SEQ ID NO: 3200552 - RNA, 16 nt, Human
cacgugguccuaaucu

SEQ ID NO: 3200553 - RNA, 19 nt, Human
cacgugguccuaaucuucu

SEQ ID NO: 3200554 - RNA, 22 nt, Human
cacguucuuacuaguuucccuu

SEQ ID NO: 3200555 - RNA, 12 nt, Human
cacuaaacucug

SEQ ID NO: 3200556 - RNA, 22 nt, Human
cacuaaacucugaauaagcacu

SEQ ID NO: 3200557 - RNA, 21 nt, Human
cacuaaacuuggugcuuauug

SEQ ID NO: 3200558 - RNA, 16 nt, Human
cacuaaacucugaaua

SEQ ID NO: 3200559 - RNA, 22 nt, Human
cacguuuuaaggacugacugag

SEQ ID NO: 3200560 - RNA, 18 nt, Human
cacguuuucaucucuagg

SEQ ID NO: 3200561 - RNA, 14 nt, Human
cacguuuugaaaua

SEQ ID NO: 3200562 - RNA, 13 nt, Human
cacguuuuaagga

SEQ ID NO: 3200563 - RNA, 14 nt, Human
cacguuuuaaggac

SEQ ID NO: 3200564 - RNA, 15 nt, Human
cacguuuuaaggacu

SEQ ID NO: 3200565 - RNA, 16 nt, Human
cacguuuuaaggacug

SEQ ID NO: 3200566 - RNA, 22 nt, Human
cacgagcaggcuacugucagcu

SEQ ID NO: 3200567 - RNA, 18 nt, Human
cacgagucagucgccuuu

SEQ ID NO: 3200568 - RNA, 15 nt, Human
cacgauucauuuuug

SEQ ID NO: 3200569 - RNA, 17 nt, Human
cacgagcaggcuacugu

SEQ ID NO: 3200570 - RNA, 17 nt, Human
cacgacuucuguuucac

SEQ ID NO: 3200571 - RNA, 23 nt, Human
cacgagcagacacccuuggagcu

SEQ ID NO: 3200572 - RNA, 18 nt, Human
cacgagagcgcagcaucc

SEQ ID NO: 3200573 - RNA, 15 nt, Human
cacgagagcgcagca

SEQ ID NO: 3200574 - RNA, 20 nt, Human
cacgagcaggcuacugucag

SEQ ID NO: 3200575 - RNA, 19 nt, Human
cacgagcaggcuacuguca

SEQ ID NO: 3200576 - RNA, 17 nt, Human
cacgcacuucgggaggu

SEQ ID NO: 3200577 - RNA, 20 nt, Human
cacgccagauucuuuccuga

SEQ ID NO: 3200578 - RNA, 22 nt, Human
cacgccagauucuuuccugagg

SEQ ID NO: 3200579 - RNA, 19 nt, Human
cacgccagauucuuuccug

SEQ ID NO: 3200580 - RNA, 15 nt, Human
cacgccacugcacua

SEQ ID NO: 3200581 - RNA, 13 nt, Human
cacgccacugcac

SEQ ID NO: 3200582 - RNA, 13 nt, Human
cacgcccccacug

SEQ ID NO: 3200583 - RNA, 15 nt, Human
cacgcccccacuggu

SEQ ID NO: 3200584 - RNA, 23 nt, Human
cacgccagauucuuuccugaggc

SEQ ID NO: 3200585 - RNA, 17 nt, Human
cacgcccccacugguga

SEQ ID NO: 3200586 - RNA, 18 nt, Human
cacgcccccacuggugac

SEQ ID NO: 3200587 - RNA, 14 nt, Human
caccuuagacaguc

SEQ ID NO: 3200588 - RNA, 16 nt, Human
caccuuagacaguccc

SEQ ID NO: 3200589 - RNA, 18 nt, Human
caccuuagacagucccug

SEQ ID NO: 3200590 - RNA, 19 nt, Human
caccuuagacagucccugc

SEQ ID NO: 3200591 - RNA, 21 nt, Human
caccuuagacagucccugcca

SEQ ID NO: 3200592 - RNA, 23 nt, Human
caccuuagacagucccugccaau

SEQ ID NO: 3200593 - RNA, 22 nt, Human
caccuuagccugcccuccuuuc

SEQ ID NO: 3200594 - RNA, 19 nt, Human
caccuucaguuuuuguguu

SEQ ID NO: 3200595 - RNA, 16 nt, Human
cacgaauauugcugau

SEQ ID NO: 3200596 - RNA, 19 nt, Human
cacgaauauugcugauggu

SEQ ID NO: 3200597 - RNA, 22 nt, Human
cacgaauauugcugauggugca

SEQ ID NO: 3200598 - RNA, 16 nt, Human
cacgacugcccggcag

SEQ ID NO: 3200599 - RNA, 17 nt, Human
cacgacugcccggcagg

SEQ ID NO: 3200600 - RNA, 13 nt, Human
caccuugacaggg

SEQ ID NO: 3200601 - RNA, 19 nt, Human
caccuucccccucccccag

SEQ ID NO: 3200602 - RNA, 14 nt, Human
caccuucccaugcc

SEQ ID NO: 3200603 - RNA, 13 nt, Human
caccuucccaugc

SEQ ID NO: 3200604 - RNA, 16 nt, Human
caccuugacagggcac

SEQ ID NO: 3200605 - RNA, 15 nt, Human
caccuugacagggca

SEQ ID NO: 3200606 - RNA, 21 nt, Human
caccuucuauagcaucacuua

SEQ ID NO: 3200607 - RNA, 14 nt, Human
caccuucucacaug

SEQ ID NO: 3200608 - RNA, 17 nt, Human
caccuugaaucugccug

SEQ ID NO: 3200609 - RNA, 13 nt, Human
cacuccuccuagc

SEQ ID NO: 3200610 - RNA, 18 nt, Human
cacuccuccuagccaccc

SEQ ID NO: 3200611 - RNA, 14 nt, Human
cacuccuucacaga

SEQ ID NO: 3200612 - RNA, 21 nt, Human
cacuccuucacagaugggugc

SEQ ID NO: 3200613 - RNA, 11 nt, Human
cacuccugcuc

SEQ ID NO: 3200614 - RNA, 16 nt, Human
cacuccugcucugcuc

SEQ ID NO: 3200615 - RNA, 15 nt, Human
cacuccugcucugcu

SEQ ID NO: 3200616 - RNA, 14 nt, Human
cacuccugcucugc

SEQ ID NO: 3200617 - RNA, 12 nt, Human
cacuccugcucu

SEQ ID NO: 3200618 - RNA, 17 nt, Human
cacucccugcaaccuga

SEQ ID NO: 3200619 - RNA, 16 nt, Human
cacucccguuuucggu

SEQ ID NO: 3200620 - RNA, 14 nt, Human
cacuccuaccuggu

SEQ ID NO: 3200621 - RNA, 13 nt, Human
cacuccuaccugg

SEQ ID NO: 3200622 - RNA, 18 nt, Human
cacucauucugaauuaau

SEQ ID NO: 3200623 - RNA, 15 nt, Human
cacucauugaccuga

SEQ ID NO: 3200624 - RNA, 16 nt, Human
cacucaguccauagca

SEQ ID NO: 3200625 - RNA, 11 nt, Human
cacucagcugu

SEQ ID NO: 3200626 - RNA, 12 nt, Human
cacucagcuguu

SEQ ID NO: 3200627 - RNA, 13 nt, Human
cacucagcuguuc

SEQ ID NO: 3200628 - RNA, 21 nt, Human
cacucagcuguucagauugga

SEQ ID NO: 3200629 - RNA, 18 nt, Human
cacucauugaccugaggc

SEQ ID NO: 3200630 - RNA, 19 nt, Human
cacucauugaccugaggcc

SEQ ID NO: 3200631 - RNA, 20 nt, Human
cacucauugaccugaggccc

SEQ ID NO: 3200632 - RNA, 22 nt, Human
cacucauugaccugaggcccuu

SEQ ID NO: 3200633 - RNA, 13 nt, Human
cacucccugcaac

SEQ ID NO: 3200634 - RNA, 16 nt, Human
cacucccugcaaccug

SEQ ID NO: 3200635 - RNA, 12 nt, Human
cacucccugcaa

SEQ ID NO: 3200636 - RNA, 15 nt, Human
cacuccccugcuggg

SEQ ID NO: 3200637 - RNA, 19 nt, Human
cacucccgagacggcacug

SEQ ID NO: 3200638 - RNA, 22 nt, Human
cacucccgagacggcacugaga

SEQ ID NO: 3200639 - RNA, 22 nt, Human
cacucucaggaaaugcugaccc

SEQ ID NO: 3200640 - RNA, 17 nt, Human
cacucucagaggcccca

SEQ ID NO: 3200641 - RNA, 16 nt, Human
cacucucagaggcccc

SEQ ID NO: 3200642 - RNA, 15 nt, Human
cacucucagaggccc

SEQ ID NO: 3200643 - RNA, 14 nt, Human
cacucucagaggcc

SEQ ID NO: 3200644 - RNA, 13 nt, Human
cacucucagaggc

SEQ ID NO: 3200645 - RNA, 14 nt, Human
cacucuacuuagca

SEQ ID NO: 3200646 - RNA, 23 nt, Human
cacuccuuuagauagcagccugg

SEQ ID NO: 3200647 - RNA, 21 nt, Human
cacucuaagauguuauauuuu

SEQ ID NO: 3200648 - RNA, 19 nt, Human
cacucuaagauguuauauu

SEQ ID NO: 3200649 - RNA, 13 nt, Human
cacucuaagaugu

SEQ ID NO: 3200650 - RNA, 18 nt, Human
cacucuaagauguuauau

SEQ ID NO: 3200651 - RNA, 16 nt, Human
cacucuaagauguuau

SEQ ID NO: 3200652 - RNA, 16 nt, Human
cacucuaacuguauau

SEQ ID NO: 3200653 - RNA, 18 nt, Human
cacucuaacuguauauuu

SEQ ID NO: 3200654 - RNA, 12 nt, Human
cacucugagacu

SEQ ID NO: 3200655 - RNA, 23 nt, Human
cacucugagacucgcgacaaugc

SEQ ID NO: 3200656 - RNA, 12 nt, Human
cacucuccuugg

SEQ ID NO: 3200657 - RNA, 15 nt, Human
cacucugcaggaaau

SEQ ID NO: 3200658 - RNA, 14 nt, Human
cacucucucuuguu

SEQ ID NO: 3200659 - RNA, 17 nt, Human
cacucugcuaccuugcc

SEQ ID NO: 3200660 - RNA, 12 nt, Human
cacucuggcagc

SEQ ID NO: 3200661 - RNA, 22 nt, Human
cacucuggcagcaccgccucuu

SEQ ID NO: 3200662 - RNA, 16 nt, Human
cacucuggcagcaccg

SEQ ID NO: 3200663 - RNA, 14 nt, Human
cacucuggcagcac

SEQ ID NO: 3200664 - RNA, 13 nt, Human
cacucuggcagca

SEQ ID NO: 3200665 - RNA, 13 nt, Human
cacucuggcagcu

SEQ ID NO: 3200666 - RNA, 14 nt, Human
cacucuggcagcuc

SEQ ID NO: 3200667 - RNA, 21 nt, Human
cacuaaauugacacuuaaaaa

SEQ ID NO: 3200668 - RNA, 14 nt, Human
cacuaaauguuaaa

SEQ ID NO: 3200669 - RNA, 13 nt, Human
cacuaaauguuaa

SEQ ID NO: 3200670 - RNA, 12 nt, Human
cacuaaauguua

SEQ ID NO: 3200671 - RNA, 11 nt, Human
cacuaaauguu

SEQ ID NO: 3200672 - RNA, 16 nt, Human
cacuaaccacgcugga

SEQ ID NO: 3200673 - RNA, 15 nt, Human
cacuaaccacgcugg

SEQ ID NO: 3200674 - RNA, 14 nt, Human
cacuaaccacgcug

SEQ ID NO: 3200675 - RNA, 23 nt, Human
cacuaaauguuaaagauguagca

SEQ ID NO: 3200676 - RNA, 20 nt, Human
cacuaaauguuaaagaugua

SEQ ID NO: 3200677 - RNA, 19 nt, Human
cacuaaauguuaaagaugu

SEQ ID NO: 3200678 - RNA, 16 nt, Human
cacuaaauguuaaaga

SEQ ID NO: 3200679 - RNA, 20 nt, Human
cacuaagaacaaaagaagca

SEQ ID NO: 3200680 - RNA, 13 nt, Human
cacuaagaacaaa

SEQ ID NO: 3200681 - RNA, 18 nt, Human
cacuaaccacgcuggacc

SEQ ID NO: 3200682 - RNA, 18 nt, Human
cacuaaggugugcucuga

SEQ ID NO: 3200683 - RNA, 22 nt, Human
cacuaagucucuuuuuuacaaa

SEQ ID NO: 3200684 - RNA, 21 nt, Human
cacuaagucucuuuuuuacaa

SEQ ID NO: 3200685 - RNA, 20 nt, Human
cacuaagucucuuuuuuaca

SEQ ID NO: 3200686 - RNA, 16 nt, Human
cacuaagucucuuuuu

SEQ ID NO: 3200687 - RNA, 17 nt, Human
cacuaaggugugcucug

SEQ ID NO: 3200688 - RNA, 18 nt, Human
cacuaucccggcugcccu

SEQ ID NO: 3200689 - RNA, 19 nt, Human
cacuaucccggcugcccuu

SEQ ID NO: 3200690 - RNA, 15 nt, Human
cacuauguugcccag

SEQ ID NO: 3200691 - RNA, 19 nt, Human
cacuauguugcccaggcag

SEQ ID NO: 3200692 - RNA, 18 nt, Human
cacuauguugcccaggca

SEQ ID NO: 3200693 - RNA, 17 nt, Human
cacuauguugcccaggc

SEQ ID NO: 3200694 - RNA, 16 nt, Human
cacuauguugcccagg

SEQ ID NO: 3200695 - RNA, 14 nt, Human
cacuauaauguaag

SEQ ID NO: 3200696 - RNA, 21 nt, Human
cacuauagccuaggugacaga

SEQ ID NO: 3200697 - RNA, 16 nt, Human
cacuauaaugugaaau

SEQ ID NO: 3200698 - RNA, 17 nt, Human
cacuauaaugugaaaug

SEQ ID NO: 3200699 - RNA, 18 nt, Human
cacuauaauguaagcucu

SEQ ID NO: 3200700 - RNA, 14 nt, Human
cacuauagccuagg

SEQ ID NO: 3200701 - RNA, 16 nt, Human
cacucaaaucaagaaa

SEQ ID NO: 3200702 - RNA, 20 nt, Human
cacucaaaagcugggcaggu

SEQ ID NO: 3200703 - RNA, 18 nt, Human
cacucaaaucuuaagaaa

SEQ ID NO: 3200704 - RNA, 17 nt, Human
cacucaaaucuuaagaa

SEQ ID NO: 3200705 - RNA, 16 nt, Human
cacucaaaucuuaaga

SEQ ID NO: 3200706 - RNA, 14 nt, Human
cacucaagaccaaa

SEQ ID NO: 3200707 - RNA, 22 nt, Human
cacucaagaccaaauggaaaca

SEQ ID NO: 3200708 - RNA, 15 nt, Human
cacucaaaagcuggg

SEQ ID NO: 3200709 - RNA, 17 nt, Human
cacucaaaagcugggca

SEQ ID NO: 3200710 - RNA, 18 nt, Human
cacucaaaagcugggcag

SEQ ID NO: 3200711 - RNA, 19 nt, Human
cacucaaaagcugggcagg

SEQ ID NO: 3200712 - RNA, 21 nt, Human
cacuauguugcccaggcaggu

SEQ ID NO: 3200713 - RNA, 20 nt, Human
cacuauguugcccaggcagg

SEQ ID NO: 3200714 - RNA, 19 nt, Human
cacucagaagacacugaug

SEQ ID NO: 3200715 - RNA, 18 nt, Human
cacucagaagacacugau

SEQ ID NO: 3200716 - RNA, 22 nt, Human
cacucagaagacacugaugggc

SEQ ID NO: 3200717 - RNA, 21 nt, Human
cacucagaaaagacgcaccag

SEQ ID NO: 3200718 - RNA, 24 nt, Human
cacucagaaaagacgcaccagccc

SEQ ID NO: 3200719 - RNA, 21 nt, Human
cacucagagcagucugugacu

SEQ ID NO: 3200720 - RNA, 17 nt, Human
cacucagagcagucugu

SEQ ID NO: 3200721 - RNA, 12 nt, Human
cacucagagcag

SEQ ID NO: 3200722 - RNA, 13 nt, Human
cacucagcaccac

SEQ ID NO: 3200723 - RNA, 18 nt, Human
cacucagcaccacucaag

SEQ ID NO: 3200724 - RNA, 16 nt, Human
cacucagcaccacuca

SEQ ID NO: 3200725 - RNA, 15 nt, Human
cacucagcaccacuc

SEQ ID NO: 3200726 - RNA, 14 nt, Human
cacucagcaccacu

SEQ ID NO: 3200727 - RNA, 20 nt, Human
cacucacauuuauucugcuc

SEQ ID NO: 3200728 - RNA, 19 nt, Human
cacucacauuuauucugcu

SEQ ID NO: 3200729 - RNA, 17 nt, Human
cacucagaagacacuga

SEQ ID NO: 3200730 - RNA, 16 nt, Human
cacucagaagacacug

SEQ ID NO: 3200731 - RNA, 12 nt, Human
cacucagaagac

SEQ ID NO: 3200732 - RNA, 13 nt, Human
cacuucaaaacaa

SEQ ID NO: 3200733 - RNA, 22 nt, Human
cacuucagggcagauuuuaguu

SEQ ID NO: 3200734 - RNA, 21 nt, Human
cacuucagggcagauuuuagu

SEQ ID NO: 3200735 - RNA, 23 nt, Human
cacuucagggcagauuuuaguuu

SEQ ID NO: 3200736 - RNA, 23 nt, Human
cacuucaggcucuucuccuuuca

SEQ ID NO: 3200737 - RNA, 17 nt, Human
cacuucagggcagauuu

SEQ ID NO: 3200738 - RNA, 19 nt, Human
cacuucagggcagauuuua

SEQ ID NO: 3200739 - RNA, 18 nt, Human
cacuucagggcagauuuu

SEQ ID NO: 3200740 - RNA, 13 nt, Human
cacuucauugaaa

SEQ ID NO: 3200741 - RNA, 12 nt, Human
cacuucagcuga

SEQ ID NO: 3200742 - RNA, 21 nt, Human
cacuucagcugacuuuucugu

SEQ ID NO: 3200743 - RNA, 20 nt, Human
cacuucaggcucuucuccuu

SEQ ID NO: 3200744 - RNA, 16 nt, Human
cacuucaggcucuucu

SEQ ID NO: 3200745 - RNA, 15 nt, Human
cacuucaggcucuuc

SEQ ID NO: 3200746 - RNA, 14 nt, Human
cacuucaggcucuu

SEQ ID NO: 3200747 - RNA, 17 nt, Human
cacuuccgucacauccc

SEQ ID NO: 3200748 - RNA, 16 nt, Human
cacuucccuacaugga

SEQ ID NO: 3200749 - RNA, 20 nt, Human
cacuuccauaaucuggacuc

SEQ ID NO: 3200750 - RNA, 22 nt, Human
cacuucugccauauucuguugg

SEQ ID NO: 3200751 - RNA, 13 nt, Human
cacuucugccaga

SEQ ID NO: 3200752 - RNA, 17 nt, Human
cacuucugccagauguc

SEQ ID NO: 3200753 - RNA, 17 nt, Human
cacuucugacucuuccc

SEQ ID NO: 3200754 - RNA, 21 nt, Human
cacuucgggaggucgaggcag

SEQ ID NO: 3200755 - RNA, 23 nt, Human
cacuucgggaggucgaggcagga

SEQ ID NO: 3200756 - RNA, 23 nt, Human
cacuucuaaguugaguauauuau

SEQ ID NO: 3200757 - RNA, 21 nt, Human
cacuucuaaguugaguauauu

SEQ ID NO: 3200758 - RNA, 20 nt, Human
cacuucuaaguugaguauau

SEQ ID NO: 3200759 - RNA, 12 nt, Human
cacuuccuugcc

SEQ ID NO: 3200760 - RNA, 16 nt, Human
cacuucuucuguccaa

SEQ ID NO: 3200761 - RNA, 15 nt, Human
cacuucuucugucca

SEQ ID NO: 3200762 - RNA, 14 nt, Human
cacuucuucugucc

SEQ ID NO: 3200763 - RNA, 12 nt, Human
cacuucuucugu

SEQ ID NO: 3200764 - RNA, 13 nt, Human
cacuucuuucccu

SEQ ID NO: 3200765 - RNA, 20 nt, Human
cacuucuucuguccaagcag

SEQ ID NO: 3200766 - RNA, 21 nt, Human
cacuucuuucccuuccuccau

SEQ ID NO: 3200767 - RNA, 19 nt, Human
cacuucuuucccuuccucc

SEQ ID NO: 3200768 - RNA, 17 nt, Human
cacuucuuucccuuccu

SEQ ID NO: 3200769 - RNA, 15 nt, Human
cacuucuuucccuuc

SEQ ID NO: 3200770 - RNA, 20 nt, Human
cacuugaacccgggaggcag

SEQ ID NO: 3200771 - RNA, 21 nt, Human
cacuugaacccgggaggcaga

SEQ ID NO: 3200772 - RNA, 23 nt, Human
cacuugaacccgggaggcagagg

SEQ ID NO: 3200773 - RNA, 16 nt, Human
cacuugacaucaacug

SEQ ID NO: 3200774 - RNA, 13 nt, Human
cacuugcagacuc

SEQ ID NO: 3200775 - RNA, 23 nt, Human
cacuugaguggagguuuauaguu

SEQ ID NO: 3200776 - RNA, 13 nt, Human
cacuugaguccag

SEQ ID NO: 3200777 - RNA, 19 nt, Human
cacuugaugacccccaacc

SEQ ID NO: 3200778 - RNA, 17 nt, Human
cacuugagaauuacccu

SEQ ID NO: 3200779 - RNA, 19 nt, Human
cacuugacaucaacugcau

SEQ ID NO: 3200780 - RNA, 20 nt, Human
cacuugagaauuacccuuuu

SEQ ID NO: 3200781 - RNA, 21 nt, Human
cacuugaaccauaguuacugu

SEQ ID NO: 3200782 - RNA, 15 nt, Human
cacuugagaugauuu

SEQ ID NO: 3200783 - RNA, 21 nt, Human
cacuugggggcucagcaaggc

SEQ ID NO: 3200784 - RNA, 20 nt, Human
cacuugggggcucagcaagg

SEQ ID NO: 3200785 - RNA, 19 nt, Human
cacuuggguccaggccuac

SEQ ID NO: 3200786 - RNA, 19 nt, Human
cacuugggggcucagcaag

SEQ ID NO: 3200787 - RNA, 18 nt, Human
cacuugggggcucagcaa

SEQ ID NO: 3200788 - RNA, 17 nt, Human
cacuugggggcucagca

SEQ ID NO: 3200789 - RNA, 15 nt, Human
cacuuggucugugag

SEQ ID NO: 3200790 - RNA, 18 nt, Human
cacuuucuagccagagga

SEQ ID NO: 3200791 - RNA, 19 nt, Human
cacuuucuagccagaggag

SEQ ID NO: 3200792 - RNA, 20 nt, Human
cacuuucuagccagaggaga

SEQ ID NO: 3200793 - RNA, 24 nt, Human
cacuugcagacucuacagaggcca

SEQ ID NO: 3200794 - RNA, 20 nt, Human
cacuugccauuccaaaauau

SEQ ID NO: 3200795 - RNA, 20 nt, Human
cacuugcugcacucuugcac

SEQ ID NO: 3200796 - RNA, 22 nt, Human
cacuugcagacucuacagaggc

SEQ ID NO: 3200797 - RNA, 19 nt, Human
cacuugcagacucuacaga

SEQ ID NO: 3200798 - RNA, 18 nt, Human
cacuugcagacucuacag

SEQ ID NO: 3200799 - RNA, 14 nt, Human
cacuugcagacucu

SEQ ID NO: 3200800 - RNA, 17 nt, Human
cacuggccccugagauc

SEQ ID NO: 3200801 - RNA, 20 nt, Human
cacuggccuucugaugaaau

SEQ ID NO: 3200802 - RNA, 21 nt, Human
cacuggccuucugaugaaaug

SEQ ID NO: 3200803 - RNA, 23 nt, Human
cacuggccuucugaugaaauguu

SEQ ID NO: 3200804 - RNA, 20 nt, Human
cacuguacccagucucaaag

SEQ ID NO: 3200805 - RNA, 14 nt, Human
cacugucaagauga

SEQ ID NO: 3200806 - RNA, 14 nt, Human
cacugugccaugug

SEQ ID NO: 3200807 - RNA, 13 nt, Human
cacugugaagaga

SEQ ID NO: 3200808 - RNA, 13 nt, Human
cacugugaagagc

SEQ ID NO: 3200809 - RNA, 10 nt, Human
cacugucugu

SEQ ID NO: 3200810 - RNA, 18 nt, Human
cacugucugucuggucca

SEQ ID NO: 3200811 - RNA, 13 nt, Human
cacugucugucug

SEQ ID NO: 3200812 - RNA, 14 nt, Human
cacuguggugucug

SEQ ID NO: 3200813 - RNA, 14 nt, Human
cacuguguauauuu

SEQ ID NO: 3200814 - RNA, 15 nt, Human
cacuguguauauuug

SEQ ID NO: 3200815 - RNA, 16 nt, Human
cacuguguauauuuga

SEQ ID NO: 3200816 - RNA, 17 nt, Human
cacuguguauauuugau

SEQ ID NO: 3200817 - RNA, 13 nt, Human
cacuguguauauu

SEQ ID NO: 3200818 - RNA, 15 nt, Human
cacuguggugucugu

SEQ ID NO: 3200819 - RNA, 18 nt, Human
cacuguguauauuugauu

SEQ ID NO: 3200820 - RNA, 20 nt, Human
cacuguguauauuugauuua

SEQ ID NO: 3200821 - RNA, 21 nt, Human
cacuguguauauuugauuuau

SEQ ID NO: 3200822 - RNA, 14 nt, Human
cacuguguauuguu

SEQ ID NO: 3200823 - RNA, 21 nt, Human
cacuguuaucauuuuuuccug

SEQ ID NO: 3200824 - RNA, 14 nt, Human
cacuguuauuuuca

SEQ ID NO: 3200825 - RNA, 19 nt, Human
cacuguuauuuucagcaug

SEQ ID NO: 3200826 - RNA, 13 nt, Human
cacuguucucugc

SEQ ID NO: 3200827 - RNA, 14 nt, Human
cacuguucucugcc

SEQ ID NO: 3200828 - RNA, 15 nt, Human
cacuguucucugccc

SEQ ID NO: 3200829 - RNA, 16 nt, Human
cacuguucucugcccu

SEQ ID NO: 3200830 - RNA, 17 nt, Human
cacuguucucugcccuc

SEQ ID NO: 3200831 - RNA, 19 nt, Human
cacuguucucugcccucca

SEQ ID NO: 3200832 - RNA, 21 nt, Human
cacuguucucugcccuccaag

SEQ ID NO: 3200833 - RNA, 22 nt, Human
cacuguucucugcccuccaaga

SEQ ID NO: 3200834 - RNA, 21 nt, Human
cacuguggaacugcuauuuuc

SEQ ID NO: 3200835 - RNA, 17 nt, Human
cacugugcugagucuga

SEQ ID NO: 3200836 - RNA, 20 nt, Human
cacugugcugagucugaagg

SEQ ID NO: 3200837 - RNA, 21 nt, Human
cacugugcugagucugaaggc

SEQ ID NO: 3200838 - RNA, 22 nt, Human
cacugugcugagucugaaggcu

SEQ ID NO: 3200839 - RNA, 16 nt, Human
cacugugccaugugcc

SEQ ID NO: 3200840 - RNA, 15 nt, Human
cacugugccaugugc

SEQ ID NO: 3200841 - RNA, 18 nt, Human
cacugugccaugugccag

SEQ ID NO: 3200842 - RNA, 13 nt, Human
cacugugcugagu

SEQ ID NO: 3200843 - RNA, 15 nt, Human
cacugugcugagucu

SEQ ID NO: 3200844 - RNA, 22 nt, Human
cacugugcguggggcucccgcc

SEQ ID NO: 3200845 - RNA, 18 nt, Human
cacugcuaagaauauuug

SEQ ID NO: 3200846 - RNA, 22 nt, Human
cacugccuucgauacaccgggc

SEQ ID NO: 3200847 - RNA, 20 nt, Human
cacugccuucgauacaccgg

SEQ ID NO: 3200848 - RNA, 16 nt, Human
cacugccugccuuaag

SEQ ID NO: 3200849 - RNA, 20 nt, Human
cacugccugccuuaagugag

SEQ ID NO: 3200850 - RNA, 14 nt, Human
cacugccugccuua

SEQ ID NO: 3200851 - RNA, 15 nt, Human
cacugccugccuuaa

SEQ ID NO: 3200852 - RNA, 14 nt, Human
cacugcucucaccu

SEQ ID NO: 3200853 - RNA, 13 nt, Human
cacugcucucacc

SEQ ID NO: 3200854 - RNA, 12 nt, Human
cacugcucuggu

SEQ ID NO: 3200855 - RNA, 20 nt, Human
cacugcucugaugaagagga

SEQ ID NO: 3200856 - RNA, 23 nt, Human
cacugcucucaccuugguuccug

SEQ ID NO: 3200857 - RNA, 15 nt, Human
cacugcucucaccuu

SEQ ID NO: 3200858 - RNA, 17 nt, Human
cacugcugcccagccuc

SEQ ID NO: 3200859 - RNA, 15 nt, Human
cacugcugcccagcc

SEQ ID NO: 3200860 - RNA, 16 nt, Human
cacugccucuuccucc

SEQ ID NO: 3200861 - RNA, 23 nt, Human
cacugccuccccaaggcccccug

SEQ ID NO: 3200862 - RNA, 18 nt, Human
cacugcacguuuucaucu

SEQ ID NO: 3200863 - RNA, 17 nt, Human
cacugcacguuuucauc

SEQ ID NO: 3200864 - RNA, 13 nt, Human
cacugcccacugg

SEQ ID NO: 3200865 - RNA, 18 nt, Human
cacugcacuauagccuag

SEQ ID NO: 3200866 - RNA, 19 nt, Human
cacugcaccgggccacaga

SEQ ID NO: 3200867 - RNA, 18 nt, Human
cacugcaccgggccacag

SEQ ID NO: 3200868 - RNA, 16 nt, Human
cacugcaccgggccac

SEQ ID NO: 3200869 - RNA, 15 nt, Human
cacugcaccgggcca

SEQ ID NO: 3200870 - RNA, 14 nt, Human
cacugcaccgggcc

SEQ ID NO: 3200871 - RNA, 23 nt, Human
cacugcacagugcaucucagccc

SEQ ID NO: 3200872 - RNA, 18 nt, Human
cacugcuuccagugaggc

SEQ ID NO: 3200873 - RNA, 19 nt, Human
cacugcuuccagugaggcu

SEQ ID NO: 3200874 - RNA, 20 nt, Human
cacugcuuccagugaggcuc

SEQ ID NO: 3200875 - RNA, 21 nt, Human
cacugcuuccagugaggcucu

SEQ ID NO: 3200876 - RNA, 22 nt, Human
cacugcuuccagugaggcucug

SEQ ID NO: 3200877 - RNA, 20 nt, Human
cacugcuuuuggucugugug

SEQ ID NO: 3200878 - RNA, 14 nt, Human
cacugcuuccagug

SEQ ID NO: 3200879 - RNA, 15 nt, Human
cacugcuuccaguga

SEQ ID NO: 3200880 - RNA, 16 nt, Human
cacugcuuccagugag

SEQ ID NO: 3200881 - RNA, 21 nt, Human
cacugcuggcugccuuagaac

SEQ ID NO: 3200882 - RNA, 16 nt, Human
cacugcuggcugccuu

SEQ ID NO: 3200883 - RNA, 15 nt, Human
cacugcuggcugccu

SEQ ID NO: 3200884 - RNA, 14 nt, Human
cacugcuggcugcc

SEQ ID NO: 3200885 - RNA, 13 nt, Human
cacugcuggcugc

SEQ ID NO: 3200886 - RNA, 12 nt, Human
cacugcuggcug

SEQ ID NO: 3200887 - RNA, 17 nt, Human
cacuggaacacuaauga

SEQ ID NO: 3200888 - RNA, 21 nt, Human
cacugcuuuuggucuguguga

SEQ ID NO: 3200889 - RNA, 18 nt, Human
cacuggacucaccucccc

SEQ ID NO: 3200890 - RNA, 15 nt, Human
cacuggacucaccuc

SEQ ID NO: 3200891 - RNA, 18 nt, Human
cacuggcaaugguaguuu

SEQ ID NO: 3200892 - RNA, 17 nt, Human
cacuggccacaguuguu

SEQ ID NO: 3200893 - RNA, 16 nt, Human
cacugauccagcccug

SEQ ID NO: 3200894 - RNA, 15 nt, Human
cacugauccagcccu

SEQ ID NO: 3200895 - RNA, 14 nt, Human
cacugauccagccc

SEQ ID NO: 3200896 - RNA, 16 nt, Human
cacugauauauuuaaa

SEQ ID NO: 3200897 - RNA, 24 nt, Human
cacugaugggcaacccccagccug

SEQ ID NO: 3200898 - RNA, 18 nt, Human
cacugaugggcaaccccc

SEQ ID NO: 3200899 - RNA, 14 nt, Human
cacugaugggcaac

SEQ ID NO: 3200900 - RNA, 23 nt, Human
cacugagacagcccgggcucugc

SEQ ID NO: 3200901 - RNA, 21 nt, Human
cacugagagccuuuuugaaag

SEQ ID NO: 3200902 - RNA, 17 nt, Human
cacugagagccuuuuug

SEQ ID NO: 3200903 - RNA, 18 nt, Human
cacugagagagcgcagcc

SEQ ID NO: 3200904 - RNA, 23 nt, Human
cacugagaccccaggcuguuagg

SEQ ID NO: 3200905 - RNA, 22 nt, Human
cacugauuauaguacugacaga

SEQ ID NO: 3200906 - RNA, 13 nt, Human
cacugcaaccucc

SEQ ID NO: 3200907 - RNA, 22 nt, Human
cacugcaaaaccagguuuuguu

SEQ ID NO: 3200908 - RNA, 23 nt, Human
cacugcaaccuccgccucuuggg

SEQ ID NO: 3200909 - RNA, 16 nt, Human
cacugcaaccuccgcc

SEQ ID NO: 3200910 - RNA, 14 nt, Human
cacugcaaccuccg

SEQ ID NO: 3200911 - RNA, 22 nt, Human
cacugcacagugcaucucagcc

SEQ ID NO: 3200912 - RNA, 21 nt, Human
cacugcacagugcaucucagc

SEQ ID NO: 3200913 - RNA, 19 nt, Human
cacugcacagugcaucuca

SEQ ID NO: 3200914 - RNA, 18 nt, Human
cacugcacagugcaucuc

SEQ ID NO: 3200915 - RNA, 15 nt, Human
cacugcaauaucuuc

SEQ ID NO: 3200916 - RNA, 14 nt, Human
cacugcaaccuucg

SEQ ID NO: 3200917 - RNA, 22 nt, Human
cacugcaaccuucgccaccugg

SEQ ID NO: 3200918 - RNA, 23 nt, Human
cacugcaaccuucgccaccuggg

SEQ ID NO: 3200919 - RNA, 23 nt, Human
cacugacauuguuggccaaagcc

SEQ ID NO: 3200920 - RNA, 18 nt, Human
cacucugucgagccuggg

SEQ ID NO: 3200921 - RNA, 19 nt, Human
cacucugucgcccagucug

SEQ ID NO: 3200922 - RNA, 16 nt, Human
cacucugucgcccagu

SEQ ID NO: 3200923 - RNA, 15 nt, Human
cacucugucgcccag

SEQ ID NO: 3200924 - RNA, 15 nt, Human
cacucuggcagcuca

SEQ ID NO: 3200925 - RNA, 16 nt, Human
cacucuggcagcucag

SEQ ID NO: 3200926 - RNA, 17 nt, Human
cacucuggcagcucaga

SEQ ID NO: 3200927 - RNA, 19 nt, Human
cacucuggcagcucagaga

SEQ ID NO: 3200928 - RNA, 20 nt, Human
cacucuggcagcucagagag

SEQ ID NO: 3200929 - RNA, 21 nt, Human
cacucuggcagcucagagagg

SEQ ID NO: 3200930 - RNA, 23 nt, Human
cacucuggcagcucagagagggu

SEQ ID NO: 3200931 - RNA, 20 nt, Human
cacugacuucuaaguaaaac

SEQ ID NO: 3200932 - RNA, 16 nt, Human
cacugacuucuaagua

SEQ ID NO: 3200933 - RNA, 15 nt, Human
cacugacuucuaagu

SEQ ID NO: 3200934 - RNA, 14 nt, Human
cacugacuucuaag

SEQ ID NO: 3200935 - RNA, 12 nt, Human
cacugacucugg

SEQ ID NO: 3200936 - RNA, 14 nt, Human
cacugacucuggaa

SEQ ID NO: 3200937 - RNA, 13 nt, Human
cacugacucugga

SEQ ID NO: 3200938 - RNA, 21 nt, Human
cacugacuucuaaguaaaacc

SEQ ID NO: 3200939 - RNA, 20 nt, Human
cacugacugaacuguaaugu

SEQ ID NO: 3200940 - RNA, 12 nt, Human
cacugagacagc

SEQ ID NO: 3200941 - RNA, 13 nt, Human
cacugagacagcc

SEQ ID NO: 3200942 - RNA, 14 nt, Human
cacugagacagccc

SEQ ID NO: 3200943 - RNA, 17 nt, Human
cacugagacagcccggg

SEQ ID NO: 3200944 - RNA, 19 nt, Human
cacugagacagcccgggcu

SEQ ID NO: 3200945 - RNA, 22 nt, Human
cacugagacagcccgggcucug

SEQ ID NO: 3200946 - RNA, 17 nt, Human
caccgccuccuacagcc

SEQ ID NO: 3200947 - RNA, 15 nt, Human
caccgccucuucccg

SEQ ID NO: 3200948 - RNA, 13 nt, Human
caccgccucuucc

SEQ ID NO: 3200949 - RNA, 17 nt, Human
caccgccucuucccgcc

SEQ ID NO: 3200950 - RNA, 16 nt, Human
caccgccucuucccgc

SEQ ID NO: 3200951 - RNA, 21 nt, Human
caccgcagacaggaccaggga

SEQ ID NO: 3200952 - RNA, 15 nt, Human
caccggcuggccugg

SEQ ID NO: 3200953 - RNA, 16 nt, Human
caccggcuggccuggc

SEQ ID NO: 3200954 - RNA, 14 nt, Human
caccggcuggccug

SEQ ID NO: 3200955 - RNA, 17 nt, Human
caccggcuggccuggcc

SEQ ID NO: 3200956 - RNA, 18 nt, Human
caccggcuggccuggccc

SEQ ID NO: 3200957 - RNA, 20 nt, Human
caccggcuggccuggccccu

SEQ ID NO: 3200958 - RNA, 14 nt, Human
caccgggcacucag

SEQ ID NO: 3200959 - RNA, 13 nt, Human
caccgggccugga

SEQ ID NO: 3200960 - RNA, 15 nt, Human
caccggggccucgga

SEQ ID NO: 3200961 - RNA, 18 nt, Human
caccgggccacagagaaa

SEQ ID NO: 3200962 - RNA, 15 nt, Human
caccgggccacagag

SEQ ID NO: 3200963 - RNA, 22 nt, Human
caccgggcacucagaagacacu

SEQ ID NO: 3200964 - RNA, 15 nt, Human
caccgggcacucaga

SEQ ID NO: 3200965 - RNA, 15 nt, Human
caccgugccuggcca

SEQ ID NO: 3200966 - RNA, 16 nt, Human
caccguccccucccag

SEQ ID NO: 3200967 - RNA, 13 nt, Human
caccguccccucc

SEQ ID NO: 3200968 - RNA, 20 nt, Human
caccgugccuggccacgccc

SEQ ID NO: 3200969 - RNA, 15 nt, Human
caccuccccuugcca

SEQ ID NO: 3200970 - RNA, 14 nt, Human
caccuccccuugcc

SEQ ID NO: 3200971 - RNA, 19 nt, Human
caccuccccuugccagcug

SEQ ID NO: 3200972 - RNA, 18 nt, Human
caccuccccuugccagcu

SEQ ID NO: 3200973 - RNA, 17 nt, Human
caccuccccuugccagc

SEQ ID NO: 3200974 - RNA, 16 nt, Human
caccuccccuugccag

SEQ ID NO: 3200975 - RNA, 22 nt, Human
caccuccccuugccagcugcug

SEQ ID NO: 3200976 - RNA, 20 nt, Human
caccuccccuugccagcugc

SEQ ID NO: 3200977 - RNA, 11 nt, Human
caccuccccca

SEQ ID NO: 3200978 - RNA, 14 nt, Human
caccucccccaucu

SEQ ID NO: 3200979 - RNA, 21 nt, Human
caccucccccaucucuucugg

SEQ ID NO: 3200980 - RNA, 21 nt, Human
caccucccccacucccaacca

SEQ ID NO: 3200981 - RNA, 17 nt, Human
caccucccccacuccca

SEQ ID NO: 3200982 - RNA, 18 nt, Human
caccuccuaaaaggccca

SEQ ID NO: 3200983 - RNA, 17 nt, Human
caccuccuaaaaggccc

SEQ ID NO: 3200984 - RNA, 16 nt, Human
caccuccucccacugc

SEQ ID NO: 3200985 - RNA, 20 nt, Human
caccuccuaaaaggcccaga

SEQ ID NO: 3200986 - RNA, 19 nt, Human
caccuccuaaaaggcccag

SEQ ID NO: 3200987 - RNA, 22 nt, Human
caccuccuaaaaggcccagaga

SEQ ID NO: 3200988 - RNA, 22 nt, Human
caccuccucggcuggcugucca

SEQ ID NO: 3200989 - RNA, 14 nt, Human
caccuccugccucg

SEQ ID NO: 3200990 - RNA, 11 nt, Human
caccuccugcc

SEQ ID NO: 3200991 - RNA, 13 nt, Human
caccuccugccuc

SEQ ID NO: 3200992 - RNA, 13 nt, Human
caccucucccuug

SEQ ID NO: 3200993 - RNA, 14 nt, Human
caccucucccuugg

SEQ ID NO: 3200994 - RNA, 17 nt, Human
caccucucccuuggauu

SEQ ID NO: 3200995 - RNA, 18 nt, Human
caccugacagccccuccc

SEQ ID NO: 3200996 - RNA, 11 nt, Human
caccugacagc

SEQ ID NO: 3200997 - RNA, 19 nt, Human
caccugacagccccucccu

SEQ ID NO: 3200998 - RNA, 15 nt, Human
caccugaguuccuga

SEQ ID NO: 3200999 - RNA, 11 nt, Human
caccugcagcu

SEQ ID NO: 3201000 - RNA, 14 nt, Human
caccugcagcuccc

SEQ ID NO: 3201001 - RNA, 12 nt, Human
caccugcagcuc

SEQ ID NO: 3201002 - RNA, 23 nt, Human
caccugcagauucuaggaccugu

SEQ ID NO: 3201003 - RNA, 16 nt, Human
caccugcagccucccu

SEQ ID NO: 3201004 - RNA, 19 nt, Human
caccugcagccucccuccg

SEQ ID NO: 3201005 - RNA, 18 nt, Human
caccugcuucucugccca

SEQ ID NO: 3201006 - RNA, 16 nt, Human
caccugcuucucugcc

SEQ ID NO: 3201007 - RNA, 19 nt, Human
caccugcuucucugcccag

SEQ ID NO: 3201008 - RNA, 12 nt, Human
caccugcugcuu

SEQ ID NO: 3201009 - RNA, 23 nt, Human
caccugcggugcuaucuccccca

SEQ ID NO: 3201010 - RNA, 12 nt, Human
caccugcucugc

SEQ ID NO: 3201011 - RNA, 14 nt, Human
caccugcucugcug

SEQ ID NO: 3201012 - RNA, 13 nt, Human
caccugcucugcu

SEQ ID NO: 3201013 - RNA, 20 nt, Human
caccugcggugcuaucuccc

SEQ ID NO: 3201014 - RNA, 16 nt, Human
caccugcagcucccuc

SEQ ID NO: 3201015 - RNA, 15 nt, Human
caccugcagcucccu

SEQ ID NO: 3201016 - RNA, 23 nt, Human
caccugaagacucauucuucugu

SEQ ID NO: 3201017 - RNA, 15 nt, Human
caccugaagacucau

SEQ ID NO: 3201018 - RNA, 14 nt, Human
caccugaagacuca

SEQ ID NO: 3201019 - RNA, 15 nt, Human
caccucuuccuggcc

SEQ ID NO: 3201020 - RNA, 17 nt, Human
caccucuuccuggccgg

SEQ ID NO: 3201021 - RNA, 16 nt, Human
caccucuuccuggccg

SEQ ID NO: 3201022 - RNA, 15 nt, Human
caccucucucacucc

SEQ ID NO: 3201023 - RNA, 17 nt, Human
caccucucucacuccuu

SEQ ID NO: 3201024 - RNA, 18 nt, Human
caccucucucacuccuug

SEQ ID NO: 3201025 - RNA, 19 nt, Human
caccucucucacuccuuga

SEQ ID NO: 3201026 - RNA, 18 nt, Human
caccucugcacaagcugc

SEQ ID NO: 3201027 - RNA, 19 nt, Human
caccucugcacaagcugca

SEQ ID NO: 3201028 - RNA, 12 nt, Human
caccuggccucu

SEQ ID NO: 3201029 - RNA, 13 nt, Human
caccuggccucug

SEQ ID NO: 3201030 - RNA, 14 nt, Human
caccuggccucugc

SEQ ID NO: 3201031 - RNA, 15 nt, Human
caccuggccucugca

SEQ ID NO: 3201032 - RNA, 17 nt, Human
caccuggcccucucuga

SEQ ID NO: 3201033 - RNA, 16 nt, Human
caccuggcccucucug

SEQ ID NO: 3201034 - RNA, 19 nt, Human
caccuggcccucucugaag

SEQ ID NO: 3201035 - RNA, 17 nt, Human
caccuggccucugcacu

SEQ ID NO: 3201036 - RNA, 18 nt, Human
caccuggccucugcacuc

SEQ ID NO: 3201037 - RNA, 19 nt, Human
caccuggccucugcacucc

SEQ ID NO: 3201038 - RNA, 20 nt, Human
caccuggccucugcacuccc

SEQ ID NO: 3201039 - RNA, 23 nt, Human
caccuggccucugcacuccccug

SEQ ID NO: 3201040 - RNA, 21 nt, Human
caccugggacagggagcagcc

SEQ ID NO: 3201041 - RNA, 20 nt, Human
caccuguaauuccagcacuu

SEQ ID NO: 3201042 - RNA, 16 nt, Human
caccugggggccuggc

SEQ ID NO: 3201043 - RNA, 18 nt, Human
caccugggcgucaucugg

SEQ ID NO: 3201044 - RNA, 14 nt, Human
caccugucugcucc

SEQ ID NO: 3201045 - RNA, 11 nt, Human
caccugucugc

SEQ ID NO: 3201046 - RNA, 23 nt, Human
caccugucugcuccagcucuggc

SEQ ID NO: 3201047 - RNA, 21 nt, Human
caccugucugcuccagcucug

SEQ ID NO: 3201048 - RNA, 20 nt, Human
caccugucugcuccagcucu

SEQ ID NO: 3201049 - RNA, 15 nt, Human
caccugucugcucca

SEQ ID NO: 3201050 - RNA, 17 nt, Human
cacccgugguggcucaa

SEQ ID NO: 3201051 - RNA, 16 nt, Human
cacccguguuuguaaa

SEQ ID NO: 3201052 - RNA, 22 nt, Human
cacccggugaccucuagcccug

SEQ ID NO: 3201053 - RNA, 19 nt, Human
cacccggugaccucuagcc

SEQ ID NO: 3201054 - RNA, 23 nt, Human
cacccgguccccacuuuauugcc

SEQ ID NO: 3201055 - RNA, 21 nt, Human
cacccggccccugcugguuca

SEQ ID NO: 3201056 - RNA, 18 nt, Human
cacccggccccugcuggu

SEQ ID NO: 3201057 - RNA, 17 nt, Human
cacccggccccugcugg

SEQ ID NO: 3201058 - RNA, 16 nt, Human
cacccggccccugcug

SEQ ID NO: 3201059 - RNA, 14 nt, Human
cacccggccccugc

SEQ ID NO: 3201060 - RNA, 13 nt, Human
cacccggccccug

SEQ ID NO: 3201061 - RNA, 19 nt, Human
cacccgcuaagagggaggg

SEQ ID NO: 3201062 - RNA, 12 nt, Human
cacccggccccu

SEQ ID NO: 3201063 - RNA, 15 nt, Human
caccccuaaagagau

SEQ ID NO: 3201064 - RNA, 20 nt, Human
caccccucaacaccucugca

SEQ ID NO: 3201065 - RNA, 19 nt, Human
caccccuuccugggcacac

SEQ ID NO: 3201066 - RNA, 16 nt, Human
caccccuuccugggca

SEQ ID NO: 3201067 - RNA, 15 nt, Human
caccccuuccugggc

SEQ ID NO: 3201068 - RNA, 16 nt, Human
cacccgacuccagucc

SEQ ID NO: 3201069 - RNA, 14 nt, Human
cacccgacuccagu

SEQ ID NO: 3201070 - RNA, 11 nt, Human
cacccugugau

SEQ ID NO: 3201071 - RNA, 12 nt, Human
cacccugugaug

SEQ ID NO: 3201072 - RNA, 15 nt, Human
cacccugugaugggg

SEQ ID NO: 3201073 - RNA, 18 nt, Human
cacccugugauggggccc

SEQ ID NO: 3201074 - RNA, 20 nt, Human
cacccugugauggggcccug

SEQ ID NO: 3201075 - RNA, 21 nt, Human
cacccugugauggggcccugc

SEQ ID NO: 3201076 - RNA, 22 nt, Human
cacccugugauggggcccugcc

SEQ ID NO: 3201077 - RNA, 23 nt, Human
cacccugugauggggcccugccu

SEQ ID NO: 3201078 - RNA, 15 nt, Human
cacccuuggagcucu

SEQ ID NO: 3201079 - RNA, 20 nt, Human
cacccuuggagcucugaguu

SEQ ID NO: 3201080 - RNA, 16 nt, Human
cacccuuggagcucug

SEQ ID NO: 3201081 - RNA, 15 nt, Human
cacccugugcagaag

SEQ ID NO: 3201082 - RNA, 19 nt, Human
cacccuuccaucugauucc

SEQ ID NO: 3201083 - RNA, 15 nt, Human
caccgaaaacguggc

SEQ ID NO: 3201084 - RNA, 18 nt, Human
caccgaaaacguggcugc

SEQ ID NO: 3201085 - RNA, 22 nt, Human
cacccuuucuacuuccaagacu

SEQ ID NO: 3201086 - RNA, 13 nt, Human
cacccuuguucca

SEQ ID NO: 3201087 - RNA, 19 nt, Human
caccgaaaacguggcugcu

SEQ ID NO: 3201088 - RNA, 21 nt, Human
caccgaaaacguggcugcuuc

SEQ ID NO: 3201089 - RNA, 22 nt, Human
caccgaaaacguggcugcuuca

SEQ ID NO: 3201090 - RNA, 14 nt, Human
caccgcagacagga

SEQ ID NO: 3201091 - RNA, 15 nt, Human
caccgcagacaggac

SEQ ID NO: 3201092 - RNA, 17 nt, Human
caccgcagacaggacca

SEQ ID NO: 3201093 - RNA, 18 nt, Human
caccgcagacaggaccag

SEQ ID NO: 3201094 - RNA, 12 nt, Human
caccgcagacag

SEQ ID NO: 3201095 - RNA, 13 nt, Human
caccgcagacagg

SEQ ID NO: 3201096 - RNA, 20 nt, Human
caccgacuagacacacaaag

SEQ ID NO: 3201097 - RNA, 16 nt, Human
cacgccagauucuuuc

SEQ ID NO: 3201098 - RNA, 15 nt, Human
cagacccccuggaga

SEQ ID NO: 3201099 - RNA, 19 nt, Human
cagaccccgacaccggcca

SEQ ID NO: 3201100 - RNA, 13 nt, Human
cagaccccuggcu

SEQ ID NO: 3201101 - RNA, 18 nt, Human
cagaccccuggcuuuuca

SEQ ID NO: 3201102 - RNA, 16 nt, Human
cagaccccuggcuuuu

SEQ ID NO: 3201103 - RNA, 15 nt, Human
cagaccccuggcuuu

SEQ ID NO: 3201104 - RNA, 14 nt, Human
cagaccccuggcuu

SEQ ID NO: 3201105 - RNA, 14 nt, Human
cagaccacaaaacu

SEQ ID NO: 3201106 - RNA, 20 nt, Human
cagaccacaaaacuuuucua

SEQ ID NO: 3201107 - RNA, 22 nt, Human
cagacccugcccugugggcccc

SEQ ID NO: 3201108 - RNA, 14 nt, Human
cagacccuggagga

SEQ ID NO: 3201109 - RNA, 20 nt, Human
cagaccgcgggcacugccgc

SEQ ID NO: 3201110 - RNA, 15 nt, Human
cagaccgucuuccuc

SEQ ID NO: 3201111 - RNA, 19 nt, Human
cagaccgucuuccuccaac

SEQ ID NO: 3201112 - RNA, 20 nt, Human
cagaccgucuuccuccaacc

SEQ ID NO: 3201113 - RNA, 21 nt, Human
cagaccgaacuguuguauaaa

SEQ ID NO: 3201114 - RNA, 15 nt, Human
cagacccugcccugu

SEQ ID NO: 3201115 - RNA, 16 nt, Human
cagacccugcccugug

SEQ ID NO: 3201116 - RNA, 17 nt, Human
cagacccugcccugugg

SEQ ID NO: 3201117 - RNA, 21 nt, Human
cagacccugcccugugggccc

SEQ ID NO: 3201118 - RNA, 14 nt, Human
cagacccggcugcg

SEQ ID NO: 3201119 - RNA, 12 nt, Human
cagacccggcug

SEQ ID NO: 3201120 - RNA, 22 nt, Human
cagaccccuggcuuuucacugc

SEQ ID NO: 3201121 - RNA, 21 nt, Human
cagaccccuggcuuuucacug

SEQ ID NO: 3201122 - RNA, 23 nt, Human
cagaccccuggcuuuucacugcu

SEQ ID NO: 3201123 - RNA, 13 nt, Human
cagacccugcccu

SEQ ID NO: 3201124 - RNA, 14 nt, Human
cagacccugcccug

SEQ ID NO: 3201125 - RNA, 12 nt, Human
cagacccugccc

SEQ ID NO: 3201126 - RNA, 16 nt, Human
cagacccggcugcgug

SEQ ID NO: 3201127 - RNA, 20 nt, Human
cagacuuuuuuuaaauagua

SEQ ID NO: 3201128 - RNA, 19 nt, Human
cagacuuuuaaagacuugc

SEQ ID NO: 3201129 - RNA, 21 nt, Human
cagacuuuuuuaaacaucaaa

SEQ ID NO: 3201130 - RNA, 23 nt, Human
cagagaaaguacuucuccacccu

SEQ ID NO: 3201131 - RNA, 19 nt, Human
cagagaaaguacuucucca

SEQ ID NO: 3201132 - RNA, 17 nt, Human
cagacuuuuaaagacuu

SEQ ID NO: 3201133 - RNA, 16 nt, Human
cagacuuguauauucu

SEQ ID NO: 3201134 - RNA, 15 nt, Human
cagacuuguauauuc

SEQ ID NO: 3201135 - RNA, 23 nt, Human
cagacuuguauauucuauuuuac

SEQ ID NO: 3201136 - RNA, 17 nt, Human
cagacuuguauauucua

SEQ ID NO: 3201137 - RNA, 22 nt, Human
cagacgcucauucagcaucuga

SEQ ID NO: 3201138 - RNA, 21 nt, Human
cagacgcucauucagcaucug

SEQ ID NO: 3201139 - RNA, 20 nt, Human
cagacgcucauucagcaucu

SEQ ID NO: 3201140 - RNA, 19 nt, Human
cagacgcucauucagcauc

SEQ ID NO: 3201141 - RNA, 15 nt, Human
cagaaugaggcugcu

SEQ ID NO: 3201142 - RNA, 14 nt, Human
cagaaugaggcugc

SEQ ID NO: 3201143 - RNA, 18 nt, Human
cagaaucuguaugauucu

SEQ ID NO: 3201144 - RNA, 13 nt, Human
cagaaucuuguuu

SEQ ID NO: 3201145 - RNA, 17 nt, Human
cagaaucuuguuuugaa

SEQ ID NO: 3201146 - RNA, 19 nt, Human
cagaaucuuguuuugaaaa

SEQ ID NO: 3201147 - RNA, 20 nt, Human
cagaaucuuguuuugaaaau

SEQ ID NO: 3201148 - RNA, 16 nt, Human
cagaaucuguaugauu

SEQ ID NO: 3201149 - RNA, 12 nt, Human
cagaaucuguau

SEQ ID NO: 3201150 - RNA, 15 nt, Human
cagaaucucgcucug

SEQ ID NO: 3201151 - RNA, 16 nt, Human
cagaaucucugaauuu

SEQ ID NO: 3201152 - RNA, 13 nt, Human
cagaauggcauuu

SEQ ID NO: 3201153 - RNA, 15 nt, Human
cagaauggaagagag

SEQ ID NO: 3201154 - RNA, 19 nt, Human
cagaauggaagagagaaag

SEQ ID NO: 3201155 - RNA, 14 nt, Human
cagaauuucccaaa

SEQ ID NO: 3201156 - RNA, 14 nt, Human
cagaauuggaaaag

SEQ ID NO: 3201157 - RNA, 13 nt, Human
cagaauuggaaaa

SEQ ID NO: 3201158 - RNA, 17 nt, Human
cagaauuggaaaagacu

SEQ ID NO: 3201159 - RNA, 11 nt, Human
cagaauucuca

SEQ ID NO: 3201160 - RNA, 14 nt, Human
cagaauucauucau

SEQ ID NO: 3201161 - RNA, 22 nt, Human
cagaauucauucauacuuaaaa

SEQ ID NO: 3201162 - RNA, 17 nt, Human
cagaauuucccaaagca

SEQ ID NO: 3201163 - RNA, 18 nt, Human
cagaauuucccaaagcag

SEQ ID NO: 3201164 - RNA, 19 nt, Human
cagaauuucccaaagcagu

SEQ ID NO: 3201165 - RNA, 20 nt, Human
cagaauuucccaaagcagug

SEQ ID NO: 3201166 - RNA, 24 nt, Human
cagaauuucccaaagcagugcaug

SEQ ID NO: 3201167 - RNA, 13 nt, Human
cagaauuugaauu

SEQ ID NO: 3201168 - RNA, 15 nt, Human
cagaauuugaauuau

SEQ ID NO: 3201169 - RNA, 12 nt, Human
cagacaaagcgu

SEQ ID NO: 3201170 - RNA, 20 nt, Human
cagacaacaaaccuguuucu

SEQ ID NO: 3201171 - RNA, 16 nt, Human
cagacaacaaaccugu

SEQ ID NO: 3201172 - RNA, 22 nt, Human
cagacaaagcgugguggacaug

SEQ ID NO: 3201173 - RNA, 15 nt, Human
cagacaaucuucugu

SEQ ID NO: 3201174 - RNA, 14 nt, Human
cagacaaucuucug

SEQ ID NO: 3201175 - RNA, 19 nt, Human
cagacaagcuguugaccag

SEQ ID NO: 3201176 - RNA, 15 nt, Human
cagacaagcuguuga

SEQ ID NO: 3201177 - RNA, 23 nt, Human
cagacaugguggggucuccucag

SEQ ID NO: 3201178 - RNA, 22 nt, Human
cagacaugguggggucuccuca

SEQ ID NO: 3201179 - RNA, 17 nt, Human
cagacaugguggggucu

SEQ ID NO: 3201180 - RNA, 17 nt, Human
cagacauagaauuaaca

SEQ ID NO: 3201181 - RNA, 19 nt, Human
cagacauagaauuaacaca

SEQ ID NO: 3201182 - RNA, 22 nt, Human
cagacaccuugacagggcacac

SEQ ID NO: 3201183 - RNA, 20 nt, Human
cagacaccuugacagggcac

SEQ ID NO: 3201184 - RNA, 19 nt, Human
cagacaccuugacagggca

SEQ ID NO: 3201185 - RNA, 15 nt, Human
cagacacccuuggag

SEQ ID NO: 3201186 - RNA, 20 nt, Human
cagacaguuaagagaaauga

SEQ ID NO: 3201187 - RNA, 14 nt, Human
cagacacaugucca

SEQ ID NO: 3201188 - RNA, 17 nt, Human
cagacacauguccaaga

SEQ ID NO: 3201189 - RNA, 21 nt, Human
cagacacauguccaagaagcc

SEQ ID NO: 3201190 - RNA, 22 nt, Human
cagacacauguccaagaagccc

SEQ ID NO: 3201191 - RNA, 23 nt, Human
cagacacauguccaagaagccca

SEQ ID NO: 3201192 - RNA, 23 nt, Human
cagacacaggcccggcuccaggc

SEQ ID NO: 3201193 - RNA, 22 nt, Human
cagacacaggcccggcuccagg

SEQ ID NO: 3201194 - RNA, 21 nt, Human
cagacacaggcccggcuccag

SEQ ID NO: 3201195 - RNA, 18 nt, Human
cagacacaggcccggcuc

SEQ ID NO: 3201196 - RNA, 17 nt, Human
cagacacaggcccggcu

SEQ ID NO: 3201197 - RNA, 15 nt, Human
cagacacaggcccgg

SEQ ID NO: 3201198 - RNA, 14 nt, Human
cagacacaggcccg

SEQ ID NO: 3201199 - RNA, 13 nt, Human
cagacacaggccc

SEQ ID NO: 3201200 - RNA, 16 nt, Human
cagaaggcuccugccc

SEQ ID NO: 3201201 - RNA, 15 nt, Human
cagaaggcuccugcc

SEQ ID NO: 3201202 - RNA, 14 nt, Human
cagaaggcuccugc

SEQ ID NO: 3201203 - RNA, 12 nt, Human
cagaaggcuccu

SEQ ID NO: 3201204 - RNA, 19 nt, Human
cagaaggaagacuucaucc

SEQ ID NO: 3201205 - RNA, 16 nt, Human
cagaaggaagacuuca

SEQ ID NO: 3201206 - RNA, 17 nt, Human
cagaaggaagacuucau

SEQ ID NO: 3201207 - RNA, 18 nt, Human
cagaaggaagacuucauc

SEQ ID NO: 3201208 - RNA, 23 nt, Human
cagaaguaggggaagaauaauuu

SEQ ID NO: 3201209 - RNA, 22 nt, Human
cagaaguaggggaagaauaauu

SEQ ID NO: 3201210 - RNA, 18 nt, Human
cagaaguaggggaagaau

SEQ ID NO: 3201211 - RNA, 13 nt, Human
cagaaguagggga

SEQ ID NO: 3201212 - RNA, 16 nt, Human
cagaaguagcuuugca

SEQ ID NO: 3201213 - RNA, 18 nt, Human
cagaaucucaaauaacua

SEQ ID NO: 3201214 - RNA, 17 nt, Human
cagaaucucaaauaacu

SEQ ID NO: 3201215 - RNA, 19 nt, Human
cagaaggcuccugccccca

SEQ ID NO: 3201216 - RNA, 17 nt, Human
cagaaggcuccugcccc

SEQ ID NO: 3201217 - RNA, 21 nt, Human
cagaagggagcuggcuccagc

SEQ ID NO: 3201218 - RNA, 20 nt, Human
cagaagggagcuggcuccag

SEQ ID NO: 3201219 - RNA, 19 nt, Human
cagaagggagcuggcucca

SEQ ID NO: 3201220 - RNA, 17 nt, Human
cagaaggggacugccac

SEQ ID NO: 3201221 - RNA, 16 nt, Human
cagaaggggacugcca

SEQ ID NO: 3201222 - RNA, 15 nt, Human
cagaaggggacugcc

SEQ ID NO: 3201223 - RNA, 15 nt, Human
cagaaggucuguuuu

SEQ ID NO: 3201224 - RNA, 23 nt, Human
cagaaggggacugccaccucccc

SEQ ID NO: 3201225 - RNA, 22 nt, Human
cagaaggggacugccaccuccc

SEQ ID NO: 3201226 - RNA, 21 nt, Human
cagaaggggacugccaccucc

SEQ ID NO: 3201227 - RNA, 20 nt, Human
cagaaggggacugccaccuc

SEQ ID NO: 3201228 - RNA, 19 nt, Human
cagaaggggacugccaccu

SEQ ID NO: 3201229 - RNA, 23 nt, Human
cagaaccccuggcuccaggccag

SEQ ID NO: 3201230 - RNA, 22 nt, Human
cagaacccuuggagccaaugga

SEQ ID NO: 3201231 - RNA, 16 nt, Human
cagaaccagucuuuca

SEQ ID NO: 3201232 - RNA, 17 nt, Human
cagaaccagucuuucaa

SEQ ID NO: 3201233 - RNA, 22 nt, Human
cagaacucuuccuccaaggaca

SEQ ID NO: 3201234 - RNA, 19 nt, Human
cagaacuugaagccugcuc

SEQ ID NO: 3201235 - RNA, 18 nt, Human
cagaacuugaagccugcu

SEQ ID NO: 3201236 - RNA, 22 nt, Human
cagaacuugaagccugcuccuu

SEQ ID NO: 3201237 - RNA, 21 nt, Human
cagaacuugaagccugcuccu

SEQ ID NO: 3201238 - RNA, 20 nt, Human
cagaacuugaagccugcucc

SEQ ID NO: 3201239 - RNA, 19 nt, Human
cagaacugcagucacugca

SEQ ID NO: 3201240 - RNA, 18 nt, Human
cagaacuuagcaauuucc

SEQ ID NO: 3201241 - RNA, 14 nt, Human
cagaacucuguguc

SEQ ID NO: 3201242 - RNA, 13 nt, Human
cagaacucugugu

SEQ ID NO: 3201243 - RNA, 22 nt, Human
cagaacucugccugcccuuugu

SEQ ID NO: 3201244 - RNA, 18 nt, Human
cagaacucugccugcccu

SEQ ID NO: 3201245 - RNA, 17 nt, Human
cagaacucugccugccc

SEQ ID NO: 3201246 - RNA, 16 nt, Human
cagaacucugccugcc

SEQ ID NO: 3201247 - RNA, 15 nt, Human
cagaacucugccugc

SEQ ID NO: 3201248 - RNA, 16 nt, Human
cagaacucuuccucca

SEQ ID NO: 3201249 - RNA, 15 nt, Human
cagaacucuuccucc

SEQ ID NO: 3201250 - RNA, 14 nt, Human
cagaacucuuccuc

SEQ ID NO: 3201251 - RNA, 13 nt, Human
cagaacucuuccu

SEQ ID NO: 3201252 - RNA, 22 nt, Human
cagaacucgguguccccaccau

SEQ ID NO: 3201253 - RNA, 21 nt, Human
cagaacucgguguccccacca

SEQ ID NO: 3201254 - RNA, 19 nt, Human
cagaacucgguguccccac

SEQ ID NO: 3201255 - RNA, 18 nt, Human
cagaacucggugucccca

SEQ ID NO: 3201256 - RNA, 11 nt, Human
cagaagcccag

SEQ ID NO: 3201257 - RNA, 19 nt, Human
cagaagccacccaaagcag

SEQ ID NO: 3201258 - RNA, 18 nt, Human
cagaagccacccaaagca

SEQ ID NO: 3201259 - RNA, 14 nt, Human
cagaagcccagaau

SEQ ID NO: 3201260 - RNA, 12 nt, Human
cagaagcccaga

SEQ ID NO: 3201261 - RNA, 19 nt, Human
cagaagcaacccaaauguu

SEQ ID NO: 3201262 - RNA, 20 nt, Human
cagaagcaacccaaauguuc

SEQ ID NO: 3201263 - RNA, 21 nt, Human
cagaagacacugaugggcaac

SEQ ID NO: 3201264 - RNA, 15 nt, Human
cagaagaaauaaaua

SEQ ID NO: 3201265 - RNA, 17 nt, Human
cagaagaaauaaauaua

SEQ ID NO: 3201266 - RNA, 22 nt, Human
cacuuucuagccagaggagaga

SEQ ID NO: 3201267 - RNA, 22 nt, Human
cacuuggguccaggccuacucc

SEQ ID NO: 3201268 - RNA, 13 nt, Human
cacuuugacacuu

SEQ ID NO: 3201269 - RNA, 13 nt, Human
cacuuuguucugg

SEQ ID NO: 3201270 - RNA, 14 nt, Human
cacuuuguucuggc

SEQ ID NO: 3201271 - RNA, 16 nt, Human
cacuuuguucuggcuc

SEQ ID NO: 3201272 - RNA, 23 nt, Human
cacuuuguucuggcucuuccagg

SEQ ID NO: 3201273 - RNA, 12 nt, Human
cacuuugggagg

SEQ ID NO: 3201274 - RNA, 13 nt, Human
cacuuugggaggc

SEQ ID NO: 3201275 - RNA, 16 nt, Human
cacuuugggaggccaa

SEQ ID NO: 3201276 - RNA, 20 nt, Human
cacuuuuuaaaaaacuuucu

SEQ ID NO: 3201277 - RNA, 17 nt, Human
cacuuuuuaaaaaacuu

SEQ ID NO: 3201278 - RNA, 12 nt, Human
cacuuuugccag

SEQ ID NO: 3201279 - RNA, 18 nt, Human
cacuuuuauuuagcacca

SEQ ID NO: 3201280 - RNA, 11 nt, Human
cacuuuuccag

SEQ ID NO: 3201281 - RNA, 15 nt, Human
cacuuuucauaucau

SEQ ID NO: 3201282 - RNA, 17 nt, Human
cacuuuucauaucauuu

SEQ ID NO: 3201283 - RNA, 18 nt, Human
cacuuuucauaucauuuc

SEQ ID NO: 3201284 - RNA, 16 nt, Human
cacuuuuccaguauuu

SEQ ID NO: 3201285 - RNA, 15 nt, Human
cacuuuuccaguauu

SEQ ID NO: 3201286 - RNA, 17 nt, Human
cacuuuuccaguauuuu

SEQ ID NO: 3201287 - RNA, 22 nt, Human
cagaaaaacaaugguaacauuu

SEQ ID NO: 3201288 - RNA, 11 nt, Human
cagaaaaaagg

SEQ ID NO: 3201289 - RNA, 22 nt, Human
cagaaaaaagguucuuugugua

SEQ ID NO: 3201290 - RNA, 12 nt, Human
cagaaaaaaggu

SEQ ID NO: 3201291 - RNA, 21 nt, Human
cacuuuuucuuuacaaacaaa

SEQ ID NO: 3201292 - RNA, 20 nt, Human
cacuuuuucuuuacaaacaa

SEQ ID NO: 3201293 - RNA, 11 nt, Human
cagaaaaugag

SEQ ID NO: 3201294 - RNA, 23 nt, Human
cagaaaauggaagacagcucuua

SEQ ID NO: 3201295 - RNA, 15 nt, Human
cagaaacacccacag

SEQ ID NO: 3201296 - RNA, 16 nt, Human
cagaaaauggaagaca

SEQ ID NO: 3201297 - RNA, 20 nt, Human
cagaaaauggaagacagcuc

SEQ ID NO: 3201298 - RNA, 21 nt, Human
cagaaaauggaagacagcucu

SEQ ID NO: 3201299 - RNA, 22 nt, Human
cagaaaauggaagacagcucuu

SEQ ID NO: 3201300 - RNA, 22 nt, Human
cagaaaauauguauuaacacua

SEQ ID NO: 3201301 - RNA, 21 nt, Human
cagaaaauauguauuaacacu

SEQ ID NO: 3201302 - RNA, 20 nt, Human
cagaaaauauguauuaacac

SEQ ID NO: 3201303 - RNA, 16 nt, Human
cagaaaauauguauua

SEQ ID NO: 3201304 - RNA, 15 nt, Human
cagaaaauauguauu

SEQ ID NO: 3201305 - RNA, 14 nt, Human
cagaaaauauguau

SEQ ID NO: 3201306 - RNA, 18 nt, Human
cagaaagcagaacaguga

SEQ ID NO: 3201307 - RNA, 24 nt, Human
cagaaagaaguggggacagagcag

SEQ ID NO: 3201308 - RNA, 18 nt, Human
cagaaacuuguucuucca

SEQ ID NO: 3201309 - RNA, 22 nt, Human
cagaaacccucauuguguuucu

SEQ ID NO: 3201310 - RNA, 16 nt, Human
cagaaacuuguucuuc

SEQ ID NO: 3201311 - RNA, 17 nt, Human
cagaaacgccacauccc

SEQ ID NO: 3201312 - RNA, 19 nt, Human
cagaaacacccacaggcau

SEQ ID NO: 3201313 - RNA, 18 nt, Human
cagaaacacccacaggca

SEQ ID NO: 3201314 - RNA, 17 nt, Human
cagaaacacccacaggc

SEQ ID NO: 3201315 - RNA, 19 nt, Human
cagaaagcagaacagugau

SEQ ID NO: 3201316 - RNA, 18 nt, Human
cagaacagugauuaccag

SEQ ID NO: 3201317 - RNA, 23 nt, Human
cagaacagugauuaccagggacu

SEQ ID NO: 3201318 - RNA, 22 nt, Human
cagagcagugggccuggccagc

SEQ ID NO: 3201319 - RNA, 19 nt, Human
cagagcaguugagaggaca

SEQ ID NO: 3201320 - RNA, 12 nt, Human
cagagcagucug

SEQ ID NO: 3201321 - RNA, 17 nt, Human
cagagcauuccagucag

SEQ ID NO: 3201322 - RNA, 19 nt, Human
cagagcauuccagucaggc

SEQ ID NO: 3201323 - RNA, 18 nt, Human
cagagcauuccagucagg

SEQ ID NO: 3201324 - RNA, 22 nt, Human
cagagcauuccagucaggcucu

SEQ ID NO: 3201325 - RNA, 18 nt, Human
cagagccaaauugguaga

SEQ ID NO: 3201326 - RNA, 21 nt, Human
cagagcauuccagucaggcuc

SEQ ID NO: 3201327 - RNA, 20 nt, Human
cagagcauuccagucaggcu

SEQ ID NO: 3201328 - RNA, 22 nt, Human
cagagccaccccuaaagagaua

SEQ ID NO: 3201329 - RNA, 21 nt, Human
cagagcagugggccuggccag

SEQ ID NO: 3201330 - RNA, 20 nt, Human
cagagcagugggccuggcca

SEQ ID NO: 3201331 - RNA, 17 nt, Human
cagagcagugggccugg

SEQ ID NO: 3201332 - RNA, 15 nt, Human
cagagcagugggccu

SEQ ID NO: 3201333 - RNA, 16 nt, Human
cagagcccacgccccc

SEQ ID NO: 3201334 - RNA, 20 nt, Human
cagagcccaccuuggcucaa

SEQ ID NO: 3201335 - RNA, 19 nt, Human
cagagcccaccuuggcuca

SEQ ID NO: 3201336 - RNA, 17 nt, Human
cagagcccaccuuggcu

SEQ ID NO: 3201337 - RNA, 15 nt, Human
cagagcccaccuugg

SEQ ID NO: 3201338 - RNA, 13 nt, Human
cagagcagagacc

SEQ ID NO: 3201339 - RNA, 14 nt, Human
cagagcagagacca

SEQ ID NO: 3201340 - RNA, 15 nt, Human
cagagcagagaccau

SEQ ID NO: 3201341 - RNA, 17 nt, Human
cagagcagagaccaucc

SEQ ID NO: 3201342 - RNA, 18 nt, Human
cagagcagagaccauccc

SEQ ID NO: 3201343 - RNA, 19 nt, Human
cagagcagagaccaucccu

SEQ ID NO: 3201344 - RNA, 21 nt, Human
cagagcagagaccaucccuga

SEQ ID NO: 3201345 - RNA, 18 nt, Human
cagagcaccuuagacagu

SEQ ID NO: 3201346 - RNA, 19 nt, Human
cagagcaccuuagacaguc

SEQ ID NO: 3201347 - RNA, 21 nt, Human
cagagcaccuuagacaguccc

SEQ ID NO: 3201348 - RNA, 22 nt, Human
cagagcaccuuagacagucccu

SEQ ID NO: 3201349 - RNA, 11 nt, Human
cagagcagaga

SEQ ID NO: 3201350 - RNA, 12 nt, Human
cagagcagagac

SEQ ID NO: 3201351 - RNA, 23 nt, Human
cagagcaccuuagacagucccug

SEQ ID NO: 3201352 - RNA, 22 nt, Human
cagaggacaguauuugugggga

SEQ ID NO: 3201353 - RNA, 13 nt, Human
cagaggaccagca

SEQ ID NO: 3201354 - RNA, 17 nt, Human
cagaggacacagagaag

SEQ ID NO: 3201355 - RNA, 15 nt, Human
cagaggacacagaga

SEQ ID NO: 3201356 - RNA, 15 nt, Human
cagaggagagaggac

SEQ ID NO: 3201357 - RNA, 19 nt, Human
cagaggagagaggaccccc

SEQ ID NO: 3201358 - RNA, 13 nt, Human
cagaggagagagg

SEQ ID NO: 3201359 - RNA, 20 nt, Human
cagaggaccagcacacuccc

SEQ ID NO: 3201360 - RNA, 16 nt, Human
cagaggaccagcacac

SEQ ID NO: 3201361 - RNA, 20 nt, Human
cagaggagagaggacccccu

SEQ ID NO: 3201362 - RNA, 21 nt, Human
cagaggagaacuugcugccuc

SEQ ID NO: 3201363 - RNA, 20 nt, Human
cagaggagaacuugcugccu

SEQ ID NO: 3201364 - RNA, 11 nt, Human
cagaggcagcc

SEQ ID NO: 3201365 - RNA, 18 nt, Human
cagaggaggcgaggaggc

SEQ ID NO: 3201366 - RNA, 20 nt, Human
cagagccguaaaaacugaag

SEQ ID NO: 3201367 - RNA, 17 nt, Human
cagagcccugcucccuc

SEQ ID NO: 3201368 - RNA, 15 nt, Human
cagagcccugcuccc

SEQ ID NO: 3201369 - RNA, 14 nt, Human
cagagcccugcucc

SEQ ID NO: 3201370 - RNA, 10 nt, Human
cagagcccug

SEQ ID NO: 3201371 - RNA, 12 nt, Human
cagagccugcag

SEQ ID NO: 3201372 - RNA, 21 nt, Human
cagagccguaaaaacugaagu

SEQ ID NO: 3201373 - RNA, 20 nt, Human
cagaggaaagcaaaggagau

SEQ ID NO: 3201374 - RNA, 23 nt, Human
cagagccguaaaaacugaaguuc

SEQ ID NO: 3201375 - RNA, 13 nt, Human
cagagccugcagu

SEQ ID NO: 3201376 - RNA, 13 nt, Human
cagaggaaggaga

SEQ ID NO: 3201377 - RNA, 23 nt, Human
cagagcccacgcccccacuggug

SEQ ID NO: 3201378 - RNA, 14 nt, Human
cagagcccagaccc

SEQ ID NO: 3201379 - RNA, 20 nt, Human
cagagcccagacccuggagg

SEQ ID NO: 3201380 - RNA, 17 nt, Human
cagagcccacgccccca

SEQ ID NO: 3201381 - RNA, 19 nt, Human
cagagcccacgcccccacu

SEQ ID NO: 3201382 - RNA, 20 nt, Human
cagagcccacgcccccacug

SEQ ID NO: 3201383 - RNA, 21 nt, Human
cagagcccacgcccccacugg

SEQ ID NO: 3201384 - RNA, 21 nt, Human
cagagaccaucccugaaggcc

SEQ ID NO: 3201385 - RNA, 17 nt, Human
cagagaccaucccugaa

SEQ ID NO: 3201386 - RNA, 18 nt, Human
cagagaccaucccugaag

SEQ ID NO: 3201387 - RNA, 19 nt, Human
cagagaccaucccugaagg

SEQ ID NO: 3201388 - RNA, 20 nt, Human
cagagaccaucccugaaggc

SEQ ID NO: 3201389 - RNA, 13 nt, Human
cagagacuccugc

SEQ ID NO: 3201390 - RNA, 14 nt, Human
cagagacuccugca

SEQ ID NO: 3201391 - RNA, 15 nt, Human
cagagacuccugcag

SEQ ID NO: 3201392 - RNA, 16 nt, Human
cagagacuccugcagg

SEQ ID NO: 3201393 - RNA, 17 nt, Human
cagagacuccugcaggc

SEQ ID NO: 3201394 - RNA, 18 nt, Human
cagagacuccugcaggca

SEQ ID NO: 3201395 - RNA, 14 nt, Human
cagagcaagugaga

SEQ ID NO: 3201396 - RNA, 20 nt, Human
cagagcaagugagacccugu

SEQ ID NO: 3201397 - RNA, 16 nt, Human
cagagcaccuuagaca

SEQ ID NO: 3201398 - RNA, 18 nt, Human
cagagcacagcagccccu

SEQ ID NO: 3201399 - RNA, 23 nt, Human
cagagcaaccccuggaccccagc

SEQ ID NO: 3201400 - RNA, 22 nt, Human
cagagcaaccccuggaccccag

SEQ ID NO: 3201401 - RNA, 21 nt, Human
cagagcaaccccuggacccca

SEQ ID NO: 3201402 - RNA, 18 nt, Human
cagagcaaccccuggacc

SEQ ID NO: 3201403 - RNA, 15 nt, Human
cagagcaaccccugg

SEQ ID NO: 3201404 - RNA, 14 nt, Human
cagagaguggcucc

SEQ ID NO: 3201405 - RNA, 13 nt, Human
cagagaguggcuc

SEQ ID NO: 3201406 - RNA, 18 nt, Human
cagagaguggcuccuccc

SEQ ID NO: 3201407 - RNA, 15 nt, Human
cagagaguggcuccu

SEQ ID NO: 3201408 - RNA, 22 nt, Human
cagagauguccauuuuuacaag

SEQ ID NO: 3201409 - RNA, 20 nt, Human
cagagauggucauauuuaaa

SEQ ID NO: 3201410 - RNA, 16 nt, Human
cagagacacaagccuu

SEQ ID NO: 3201411 - RNA, 17 nt, Human
cagagacacaagccuuc

SEQ ID NO: 3201412 - RNA, 15 nt, Human
cagagacaaguaauu

SEQ ID NO: 3201413 - RNA, 14 nt, Human
cagagacacaagcc

SEQ ID NO: 3201414 - RNA, 15 nt, Human
cagagacacaagccu

SEQ ID NO: 3201415 - RNA, 22 nt, Human
cagagacaaauauuucuagaca

SEQ ID NO: 3201416 - RNA, 14 nt, Human
cagagaccaucccu

SEQ ID NO: 3201417 - RNA, 16 nt, Human
cagagaccaucccuga

SEQ ID NO: 3201418 - RNA, 13 nt, Human
cagagaccauccc

SEQ ID NO: 3201419 - RNA, 21 nt, Human
cagagaaugaaagggcccaga

SEQ ID NO: 3201420 - RNA, 20 nt, Human
cagagaaugaaagggcccag

SEQ ID NO: 3201421 - RNA, 15 nt, Human
cagagaauucucuua

SEQ ID NO: 3201422 - RNA, 20 nt, Human
cagagaagugacgguuccua

SEQ ID NO: 3201423 - RNA, 19 nt, Human
cagagaaugaaagggccca

SEQ ID NO: 3201424 - RNA, 16 nt, Human
cagagaaaugucuguc

SEQ ID NO: 3201425 - RNA, 20 nt, Human
cagagaaaucuaagcugugu

SEQ ID NO: 3201426 - RNA, 21 nt, Human
cagaggccuccuguggccugc

SEQ ID NO: 3201427 - RNA, 16 nt, Human
cagaggccuccugugg

SEQ ID NO: 3201428 - RNA, 13 nt, Human
cagaggcugccuc

SEQ ID NO: 3201429 - RNA, 21 nt, Human
cagaggcucagauuguaauau

SEQ ID NO: 3201430 - RNA, 23 nt, Human
cagaggccccaauaccccaugga

SEQ ID NO: 3201431 - RNA, 13 nt, Human
cagaggccuccug

SEQ ID NO: 3201432 - RNA, 12 nt, Human
cagaggccuccu

SEQ ID NO: 3201433 - RNA, 23 nt, Human
cagaggcugccucucccaucacu

SEQ ID NO: 3201434 - RNA, 19 nt, Human
cagagggagugacagaggc

SEQ ID NO: 3201435 - RNA, 18 nt, Human
cagagggagugacagagg

SEQ ID NO: 3201436 - RNA, 16 nt, Human
cagagggagugacaga

SEQ ID NO: 3201437 - RNA, 14 nt, Human
cagagggagugaca

SEQ ID NO: 3201438 - RNA, 22 nt, Human
cagaggcagccccauucugccu

SEQ ID NO: 3201439 - RNA, 20 nt, Human
cagaggcagccccauucugc

SEQ ID NO: 3201440 - RNA, 19 nt, Human
cagaggcagccccauucug

SEQ ID NO: 3201441 - RNA, 18 nt, Human
cagaggcagccccauucu

SEQ ID NO: 3201442 - RNA, 15 nt, Human
cagaggcagccccau

SEQ ID NO: 3201443 - RNA, 14 nt, Human
cagaggcagcccca

SEQ ID NO: 3201444 - RNA, 13 nt, Human
cagaggcagcccc

SEQ ID NO: 3201445 - RNA, 12 nt, Human
cagaggcagccc

SEQ ID NO: 3201446 - RNA, 16 nt, Human
cagaggccaugggccu

SEQ ID NO: 3201447 - RNA, 19 nt, Human
cagaggccaugggccuccu

SEQ ID NO: 3201448 - RNA, 23 nt, Human
cagaggcagccccauucugccug

SEQ ID NO: 3201449 - RNA, 21 nt, Human
cagaggccaugggccuccugu

SEQ ID NO: 3201450 - RNA, 20 nt, Human
cagaggccaugggccuccug

SEQ ID NO: 3201451 - RNA, 22 nt, Human
cagaggccccaauaccccaugg

SEQ ID NO: 3201452 - RNA, 11 nt, Human
cagaggcccca

SEQ ID NO: 3201453 - RNA, 13 nt, Human
cagagucucacug

SEQ ID NO: 3201454 - RNA, 22 nt, Human
cagaguccccccacucccagca

SEQ ID NO: 3201455 - RNA, 15 nt, Human
cagaguccccccacu

SEQ ID NO: 3201456 - RNA, 14 nt, Human
cagaguccccccac

SEQ ID NO: 3201457 - RNA, 13 nt, Human
cagagucccccca

SEQ ID NO: 3201458 - RNA, 23 nt, Human
cagagggccauugaacucugaga

SEQ ID NO: 3201459 - RNA, 21 nt, Human
cagagucucacuguugcccag

SEQ ID NO: 3201460 - RNA, 20 nt, Human
cagagucucacuguugccca

SEQ ID NO: 3201461 - RNA, 19 nt, Human
cagagucucacuguugccc

SEQ ID NO: 3201462 - RNA, 17 nt, Human
cagagucucacuguugc

SEQ ID NO: 3201463 - RNA, 23 nt, Human
cagagggagugacagaggcagcc

SEQ ID NO: 3201464 - RNA, 22 nt, Human
cagagggagugacagaggcagc

SEQ ID NO: 3201465 - RNA, 21 nt, Human
cagagggagugacagaggcag

SEQ ID NO: 3201466 - RNA, 20 nt, Human
cagagggagugacagaggca

SEQ ID NO: 3201467 - RNA, 15 nt, Human
cagagggccugcaag

SEQ ID NO: 3201468 - RNA, 19 nt, Human
cagagggccugcaagggag

SEQ ID NO: 3201469 - RNA, 18 nt, Human
cagagugagacucugucu

SEQ ID NO: 3201470 - RNA, 17 nt, Human
cagagugagacucuguc

SEQ ID NO: 3201471 - RNA, 16 nt, Human
cagagugagacucugu

SEQ ID NO: 3201472 - RNA, 23 nt, Human
cagagucucacuguugcccaggc

SEQ ID NO: 3201473 - RNA, 22 nt, Human
cagagucucacuguugcccagg

SEQ ID NO: 3201474 - RNA, 20 nt, Human
cagagucuagcguagugcag

SEQ ID NO: 3201475 - RNA, 20 nt, Human
cagagugagacucugucuca

SEQ ID NO: 3201476 - RNA, 19 nt, Human
cagagugagacucugucuc

SEQ ID NO: 3201477 - RNA, 21 nt, Human
cagauaaaugauucaaaaagu

SEQ ID NO: 3201478 - RNA, 17 nt, Human
cagauaaagauugugug

SEQ ID NO: 3201479 - RNA, 23 nt, Human
cagauaaaugauucaaaaaguca

SEQ ID NO: 3201480 - RNA, 23 nt, Human
cagauaaauaguuuaugauucca

SEQ ID NO: 3201481 - RNA, 14 nt, Human
cagauaaacaguag

SEQ ID NO: 3201482 - RNA, 21 nt, Human
cagauaaaccuagauaaagag

SEQ ID NO: 3201483 - RNA, 16 nt, Human
cagauaaagauugugu

SEQ ID NO: 3201484 - RNA, 12 nt, Human
cagauaaagauu

SEQ ID NO: 3201485 - RNA, 12 nt, Human
cagaguuacuug

SEQ ID NO: 3201486 - RNA, 17 nt, Human
cagaguuaaaucucaaa

SEQ ID NO: 3201487 - RNA, 15 nt, Human
cagaguugaagacag

SEQ ID NO: 3201488 - RNA, 16 nt, Human
cagaguugaagacaga

SEQ ID NO: 3201489 - RNA, 14 nt, Human
cagaguugaagaca

SEQ ID NO: 3201490 - RNA, 17 nt, Human
cagaguugaagacagag

SEQ ID NO: 3201491 - RNA, 18 nt, Human
cagaguugaagacagagc

SEQ ID NO: 3201492 - RNA, 19 nt, Human
cagaguugaagacagagcu

SEQ ID NO: 3201493 - RNA, 20 nt, Human
cagaguugaagacagagcua

SEQ ID NO: 3201494 - RNA, 22 nt, Human
cagaguugaagacagagcuaca

SEQ ID NO: 3201495 - RNA, 13 nt, Human
cagaugcaccagc

SEQ ID NO: 3201496 - RNA, 16 nt, Human
cagaugcaccagcccu

SEQ ID NO: 3201497 - RNA, 14 nt, Human
cagaugcaccagcc

SEQ ID NO: 3201498 - RNA, 22 nt, Human
cagaugcaccagcccuuagcag

SEQ ID NO: 3201499 - RNA, 17 nt, Human
cagaugcaccagcccuu

SEQ ID NO: 3201500 - RNA, 12 nt, Human
cagaugcagcuc

SEQ ID NO: 3201501 - RNA, 15 nt, Human
cagaugcagcucuuc

SEQ ID NO: 3201502 - RNA, 14 nt, Human
cagaugcagcucuu

SEQ ID NO: 3201503 - RNA, 13 nt, Human
cagaugcagcucu

SEQ ID NO: 3201504 - RNA, 23 nt, Human
cagaugcagcucuuccuggacag

SEQ ID NO: 3201505 - RNA, 19 nt, Human
cagaugcagcucuuccugg

SEQ ID NO: 3201506 - RNA, 18 nt, Human
cagaugcagcucuuccug

SEQ ID NO: 3201507 - RNA, 17 nt, Human
cagaugcagcucuuccu

SEQ ID NO: 3201508 - RNA, 19 nt, Human
cagaugaccccugcccaga

SEQ ID NO: 3201509 - RNA, 18 nt, Human
cagaugaccccugcccag

SEQ ID NO: 3201510 - RNA, 17 nt, Human
cagaugaccccugccca

SEQ ID NO: 3201511 - RNA, 16 nt, Human
cagaugaccccugccc

SEQ ID NO: 3201512 - RNA, 19 nt, Human
cagaugaggugaaaaggcc

SEQ ID NO: 3201513 - RNA, 23 nt, Human
cagaugaccccugcccagaucag

SEQ ID NO: 3201514 - RNA, 12 nt, Human
cagaucuguuuu

SEQ ID NO: 3201515 - RNA, 13 nt, Human
cagaucuguuuug

SEQ ID NO: 3201516 - RNA, 23 nt, Human
cagaucuguuuugugguuuggaa

SEQ ID NO: 3201517 - RNA, 22 nt, Human
cagauacaggaaaagcugcuga

SEQ ID NO: 3201518 - RNA, 21 nt, Human
cagauacaggaaaagcugcug

SEQ ID NO: 3201519 - RNA, 20 nt, Human
cagauacaggaaaagcugcu

SEQ ID NO: 3201520 - RNA, 23 nt, Human
cagaucucccacaugccaggggc

SEQ ID NO: 3201521 - RNA, 13 nt, Human
cagaucucccaca

SEQ ID NO: 3201522 - RNA, 19 nt, Human
cagcccaaaccaccagaag

SEQ ID NO: 3201523 - RNA, 16 nt, Human
cagcccaaaccaccag

SEQ ID NO: 3201524 - RNA, 23 nt, Human
cagcccaaaccaccagaagccca

SEQ ID NO: 3201525 - RNA, 21 nt, Human
cagcccaaaccaccagaagcc

SEQ ID NO: 3201526 - RNA, 20 nt, Human
cagcccaaaccaccagaagc

SEQ ID NO: 3201527 - RNA, 14 nt, Human
cagccaucaacuaa

SEQ ID NO: 3201528 - RNA, 16 nt, Human
cagcccaccuggcuuu

SEQ ID NO: 3201529 - RNA, 15 nt, Human
cagcccacuucugcc

SEQ ID NO: 3201530 - RNA, 22 nt, Human
cagcccacgcugacuacagggc

SEQ ID NO: 3201531 - RNA, 15 nt, Human
cagcccacgcugacu

SEQ ID NO: 3201532 - RNA, 13 nt, Human
cagcccacgcuga

SEQ ID NO: 3201533 - RNA, 15 nt, Human
cagcccaccccucaa

SEQ ID NO: 3201534 - RNA, 17 nt, Human
cagcccaccccauggcc

SEQ ID NO: 3201535 - RNA, 19 nt, Human
cagcccacauagugauggu

SEQ ID NO: 3201536 - RNA, 11 nt, Human
cagcccacccc

SEQ ID NO: 3201537 - RNA, 17 nt, Human
cagcccaaucccugauc

SEQ ID NO: 3201538 - RNA, 16 nt, Human
cagcccaaucccugau

SEQ ID NO: 3201539 - RNA, 20 nt, Human
cagccccaaaacucuccucu

SEQ ID NO: 3201540 - RNA, 21 nt, Human
cagccccaaaacucuccucug

SEQ ID NO: 3201541 - RNA, 22 nt, Human
cagccccaaaacucuccucugc

SEQ ID NO: 3201542 - RNA, 22 nt, Human
cagcccauuugggcagagaggc

SEQ ID NO: 3201543 - RNA, 17 nt, Human
cagcccauuugggcaga

SEQ ID NO: 3201544 - RNA, 22 nt, Human
cagccccaaauugucaccugcu

SEQ ID NO: 3201545 - RNA, 18 nt, Human
cagcccacuucugccaua

SEQ ID NO: 3201546 - RNA, 17 nt, Human
cagcccagaagugcaga

SEQ ID NO: 3201547 - RNA, 22 nt, Human
cagcccagaggccgagagcuau

SEQ ID NO: 3201548 - RNA, 20 nt, Human
cagcccagaagugcagaacu

SEQ ID NO: 3201549 - RNA, 14 nt, Human
cagccacauuccug

SEQ ID NO: 3201550 - RNA, 15 nt, Human
cagccaauauuuaaa

SEQ ID NO: 3201551 - RNA, 15 nt, Human
cagccacauuccuga

SEQ ID NO: 3201552 - RNA, 17 nt, Human
cagccacauuccugaug

SEQ ID NO: 3201553 - RNA, 19 nt, Human
cagccacauuccugaugcu

SEQ ID NO: 3201554 - RNA, 22 nt, Human
cagccacggccaggccagaggg

SEQ ID NO: 3201555 - RNA, 21 nt, Human
cagccacggccaggccagagg

SEQ ID NO: 3201556 - RNA, 19 nt, Human
cagccacggccaggccaga

SEQ ID NO: 3201557 - RNA, 18 nt, Human
cagccacggccaggccag

SEQ ID NO: 3201558 - RNA, 17 nt, Human
cagccacggccaggcca

SEQ ID NO: 3201559 - RNA, 16 nt, Human
cagccacggccaggcc

SEQ ID NO: 3201560 - RNA, 15 nt, Human
cagccacggccaggc

SEQ ID NO: 3201561 - RNA, 14 nt, Human
cagccacggccagg

SEQ ID NO: 3201562 - RNA, 21 nt, Human
cagccauaggcccuuucagug

SEQ ID NO: 3201563 - RNA, 20 nt, Human
cagccauaggcccuuucagu

SEQ ID NO: 3201564 - RNA, 18 nt, Human
cagccauaggcccuuuca

SEQ ID NO: 3201565 - RNA, 23 nt, Human
cagccacggccaggccagaggga

SEQ ID NO: 3201566 - RNA, 20 nt, Human
cagccacuccccagccagcc

SEQ ID NO: 3201567 - RNA, 17 nt, Human
cagccacuccccagcca

SEQ ID NO: 3201568 - RNA, 16 nt, Human
cagccacuccccagcc

SEQ ID NO: 3201569 - RNA, 14 nt, Human
cagccacuccccag

SEQ ID NO: 3201570 - RNA, 14 nt, Human
cagccacucagaaa

SEQ ID NO: 3201571 - RNA, 12 nt, Human
cagccagaacuc

SEQ ID NO: 3201572 - RNA, 18 nt, Human
cagccagaacucuguguc

SEQ ID NO: 3201573 - RNA, 16 nt, Human
cagccagaacucugug

SEQ ID NO: 3201574 - RNA, 16 nt, Human
cagccacuuaggacaa

SEQ ID NO: 3201575 - RNA, 22 nt, Human
cagcauuuguguguuacaaugu

SEQ ID NO: 3201576 - RNA, 16 nt, Human
cagcauuuguguguua

SEQ ID NO: 3201577 - RNA, 12 nt, Human
cagcauuucaag

SEQ ID NO: 3201578 - RNA, 15 nt, Human
cagccaaagccuccu

SEQ ID NO: 3201579 - RNA, 16 nt, Human
cagccaaagccuccuc

SEQ ID NO: 3201580 - RNA, 16 nt, Human
cagccaaacacacaga

SEQ ID NO: 3201581 - RNA, 19 nt, Human
cagccaaacacacagaagg

SEQ ID NO: 3201582 - RNA, 18 nt, Human
cagccaaacacacagaag

SEQ ID NO: 3201583 - RNA, 18 nt, Human
cagccaaagccuccucca

SEQ ID NO: 3201584 - RNA, 21 nt, Human
cagccaaagccuccuccagcc

SEQ ID NO: 3201585 - RNA, 23 nt, Human
cagccaaacacacagaaggggac

SEQ ID NO: 3201586 - RNA, 20 nt, Human
cagcauccuggcacccggcc

SEQ ID NO: 3201587 - RNA, 19 nt, Human
cagcauccuggcacccggc

SEQ ID NO: 3201588 - RNA, 21 nt, Human
cagcauccuggcacccggccc

SEQ ID NO: 3201589 - RNA, 12 nt, Human
cagcaugaaaau

SEQ ID NO: 3201590 - RNA, 16 nt, Human
cagcaugaaaaugugu

SEQ ID NO: 3201591 - RNA, 24 nt, Human
cagcaucuggaagagcuaggcagg

SEQ ID NO: 3201592 - RNA, 14 nt, Human
cagcaucuggaaga

SEQ ID NO: 3201593 - RNA, 21 nt, Human
cagcaucgcacucuggcagca

SEQ ID NO: 3201594 - RNA, 19 nt, Human
cagcaucgcacucuggcag

SEQ ID NO: 3201595 - RNA, 18 nt, Human
cagcaucgcacucuggca

SEQ ID NO: 3201596 - RNA, 20 nt, Human
cagcauguguuaaucuuaau

SEQ ID NO: 3201597 - RNA, 23 nt, Human
cagcauguguuaaucuuaaugua

SEQ ID NO: 3201598 - RNA, 18 nt, Human
cagcauuaccucuuugga

SEQ ID NO: 3201599 - RNA, 16 nt, Human
cagcauuagugggaaa

SEQ ID NO: 3201600 - RNA, 19 nt, Human
cagcauuaccucuuuggaa

SEQ ID NO: 3201601 - RNA, 15 nt, Human
cagcauucucacucc

SEQ ID NO: 3201602 - RNA, 14 nt, Human
cagcauucucacuc

SEQ ID NO: 3201603 - RNA, 23 nt, Human
cagcaggagggacagucucacca

SEQ ID NO: 3201604 - RNA, 22 nt, Human
cagcaggagggacagucucacc

SEQ ID NO: 3201605 - RNA, 19 nt, Human
cagcaggagggacagucuc

SEQ ID NO: 3201606 - RNA, 15 nt, Human
cagcaggagggacag

SEQ ID NO: 3201607 - RNA, 12 nt, Human
cagcaggaggga

SEQ ID NO: 3201608 - RNA, 11 nt, Human
cagcaggaggg

SEQ ID NO: 3201609 - RNA, 14 nt, Human
cagcaggcucucag

SEQ ID NO: 3201610 - RNA, 15 nt, Human
cagcaggcucucagg

SEQ ID NO: 3201611 - RNA, 12 nt, Human
cagcaggcucuc

SEQ ID NO: 3201612 - RNA, 19 nt, Human
cagcaggcagccuuggcgg

SEQ ID NO: 3201613 - RNA, 11 nt, Human
cagcaggccca

SEQ ID NO: 3201614 - RNA, 15 nt, Human
cagcaggcagccuug

SEQ ID NO: 3201615 - RNA, 13 nt, Human
cagcaggcagccu

SEQ ID NO: 3201616 - RNA, 12 nt, Human
cagcaggcagcc

SEQ ID NO: 3201617 - RNA, 11 nt, Human
cagcaggcagc

SEQ ID NO: 3201618 - RNA, 19 nt, Human
cagcagccuggacccugug

SEQ ID NO: 3201619 - RNA, 22 nt, Human
cagcagccuggacccuguggau

SEQ ID NO: 3201620 - RNA, 12 nt, Human
cagcagccugga

SEQ ID NO: 3201621 - RNA, 14 nt, Human
cagcagccuggacc

SEQ ID NO: 3201622 - RNA, 15 nt, Human
cagcagccuggaccc

SEQ ID NO: 3201623 - RNA, 18 nt, Human
cagcagccuggacccugu

SEQ ID NO: 3201624 - RNA, 18 nt, Human
cagcagggagggcuucug

SEQ ID NO: 3201625 - RNA, 14 nt, Human
cagcaggcccaugg

SEQ ID NO: 3201626 - RNA, 20 nt, Human
cagcaggcucucaggccagc

SEQ ID NO: 3201627 - RNA, 22 nt, Human
cagcaggcucucaggccagcug

SEQ ID NO: 3201628 - RNA, 16 nt, Human
cagcaggcucucaggc

SEQ ID NO: 3201629 - RNA, 17 nt, Human
cagcaggcucucaggcc

SEQ ID NO: 3201630 - RNA, 18 nt, Human
cagcaggcucucaggcca

SEQ ID NO: 3201631 - RNA, 19 nt, Human
cagcaggcucucaggccag

SEQ ID NO: 3201632 - RNA, 20 nt, Human
cagcagggagggcuucugcc

SEQ ID NO: 3201633 - RNA, 15 nt, Human
cagcagggcaguagc

SEQ ID NO: 3201634 - RNA, 11 nt, Human
cagcagggcag

SEQ ID NO: 3201635 - RNA, 17 nt, Human
cagcauccuggcacccg

SEQ ID NO: 3201636 - RNA, 16 nt, Human
cagcauccuggcaccc

SEQ ID NO: 3201637 - RNA, 15 nt, Human
cagcauccuggcacc

SEQ ID NO: 3201638 - RNA, 14 nt, Human
cagcauccuggcac

SEQ ID NO: 3201639 - RNA, 18 nt, Human
cagaugggugcuuggagg

SEQ ID NO: 3201640 - RNA, 12 nt, Human
cagaugccuggg

SEQ ID NO: 3201641 - RNA, 15 nt, Human
cagaugcugugcaaa

SEQ ID NO: 3201642 - RNA, 22 nt, Human
cagaugcuugcggcaaaaggaa

SEQ ID NO: 3201643 - RNA, 23 nt, Human
cagaugcuugcggcaaaaggaaa

SEQ ID NO: 3201644 - RNA, 12 nt, Human
cagaugcucuga

SEQ ID NO: 3201645 - RNA, 14 nt, Human
cagaugcucugaga

SEQ ID NO: 3201646 - RNA, 13 nt, Human
cagaugcucugag

SEQ ID NO: 3201647 - RNA, 15 nt, Human
cagauucaggcauuu

SEQ ID NO: 3201648 - RNA, 14 nt, Human
cagauucaggcauu

SEQ ID NO: 3201649 - RNA, 13 nt, Human
cagauucaggcau

SEQ ID NO: 3201650 - RNA, 20 nt, Human
cagauucuaggaccuguguc

SEQ ID NO: 3201651 - RNA, 21 nt, Human
cagauucguggucuuuuccuc

SEQ ID NO: 3201652 - RNA, 19 nt, Human
cagauucguggucuuuucc

SEQ ID NO: 3201653 - RNA, 21 nt, Human
cagauuacugcuuuaaucaga

SEQ ID NO: 3201654 - RNA, 17 nt, Human
cagauguuuaaaacacc

SEQ ID NO: 3201655 - RNA, 23 nt, Human
cagaugggugcuuggaggaagga

SEQ ID NO: 3201656 - RNA, 19 nt, Human
cagauguccuaauggugau

SEQ ID NO: 3201657 - RNA, 22 nt, Human
cagauguccuaauggugaugca

SEQ ID NO: 3201658 - RNA, 14 nt, Human
cagauguuuaaaac

SEQ ID NO: 3201659 - RNA, 23 nt, Human
cagaugugggccaccauugcaac

SEQ ID NO: 3201660 - RNA, 22 nt, Human
cagaugugggccaccauugcaa

SEQ ID NO: 3201661 - RNA, 15 nt, Human
cagauguuuaaaaca

SEQ ID NO: 3201662 - RNA, 16 nt, Human
cagauguuuaaaacac

SEQ ID NO: 3201663 - RNA, 18 nt, Human
cagaugugcuauaaucug

SEQ ID NO: 3201664 - RNA, 20 nt, Human
cagaugugcuauaaucuguu

SEQ ID NO: 3201665 - RNA, 22 nt, Human
cagaugugcuauaaucuguuuu

SEQ ID NO: 3201666 - RNA, 15 nt, Human
cagauguuaaaauaa

SEQ ID NO: 3201667 - RNA, 16 nt, Human
cagauguuaaaauaaa

SEQ ID NO: 3201668 - RNA, 17 nt, Human
cagauguuaaaauaaau

SEQ ID NO: 3201669 - RNA, 18 nt, Human
cagauguuaaaauaaaug

SEQ ID NO: 3201670 - RNA, 20 nt, Human
cagauguuaaaauaaauggu

SEQ ID NO: 3201671 - RNA, 21 nt, Human
cagauguuaaaauaaaugguu

SEQ ID NO: 3201672 - RNA, 23 nt, Human
cagcaacgcaggcccccaggugc

SEQ ID NO: 3201673 - RNA, 16 nt, Human
cagcaacgaucacaaa

SEQ ID NO: 3201674 - RNA, 18 nt, Human
cagcaacgaucacaaaug

SEQ ID NO: 3201675 - RNA, 19 nt, Human
cagcaacgaucacaaauga

SEQ ID NO: 3201676 - RNA, 20 nt, Human
cagcaacgaucacaaaugac

SEQ ID NO: 3201677 - RNA, 21 nt, Human
cagcaacgaucacaaaugacu

SEQ ID NO: 3201678 - RNA, 22 nt, Human
cagcaacgaucacaaaugacuu

SEQ ID NO: 3201679 - RNA, 23 nt, Human
cagcaacgaucacaaaugacuuu

SEQ ID NO: 3201680 - RNA, 18 nt, Human
cagcaaaagaugcuucuc

SEQ ID NO: 3201681 - RNA, 15 nt, Human
cagcaaagaaaaaaa

SEQ ID NO: 3201682 - RNA, 21 nt, Human
cagcaaaccuaauugcacaac

SEQ ID NO: 3201683 - RNA, 17 nt, Human
cagauuuuggccaugaa

SEQ ID NO: 3201684 - RNA, 19 nt, Human
cagauuuuuuacagcugcc

SEQ ID NO: 3201685 - RNA, 22 nt, Human
cagauuuuuuacagcugccugc

SEQ ID NO: 3201686 - RNA, 14 nt, Human
cagauucuuuccug

SEQ ID NO: 3201687 - RNA, 12 nt, Human
cagauuuuaguu

SEQ ID NO: 3201688 - RNA, 22 nt, Human
cagauuuuaguuuuauuuucua

SEQ ID NO: 3201689 - RNA, 17 nt, Human
cagauuuuaguuuuauu

SEQ ID NO: 3201690 - RNA, 15 nt, Human
cagauuuuaguuuua

SEQ ID NO: 3201691 - RNA, 13 nt, Human
cagauuuuaguuu

SEQ ID NO: 3201692 - RNA, 19 nt, Human
cagcaagggugaugggaaa

SEQ ID NO: 3201693 - RNA, 18 nt, Human
cagcaaggcgcuaacuug

SEQ ID NO: 3201694 - RNA, 20 nt, Human
cagcaaggcgcuaacuugcu

SEQ ID NO: 3201695 - RNA, 19 nt, Human
cagcaaggcgcuaacuugc

SEQ ID NO: 3201696 - RNA, 13 nt, Human
cagcaaggccacc

SEQ ID NO: 3201697 - RNA, 15 nt, Human
cagcaaggccaccuc

SEQ ID NO: 3201698 - RNA, 14 nt, Human
cagcaaggccaccu

SEQ ID NO: 3201699 - RNA, 20 nt, Human
cagcaaggccaccucuuccu

SEQ ID NO: 3201700 - RNA, 19 nt, Human
cagcaaggccaccucuucc

SEQ ID NO: 3201701 - RNA, 17 nt, Human
cagcaaggccaccucuu

SEQ ID NO: 3201702 - RNA, 16 nt, Human
cagcaaggccaccucu

SEQ ID NO: 3201703 - RNA, 23 nt, Human
cagcaaggccaccucuuccuggc

SEQ ID NO: 3201704 - RNA, 21 nt, Human
cagcaaggccaccucuuccug

SEQ ID NO: 3201705 - RNA, 20 nt, Human
cagcaagccgaauagcugau

SEQ ID NO: 3201706 - RNA, 23 nt, Human
cagcaagggugaugggaaagcau

SEQ ID NO: 3201707 - RNA, 22 nt, Human
cagcaagggugaugggaaagca

SEQ ID NO: 3201708 - RNA, 12 nt, Human
cagcaagugaga

SEQ ID NO: 3201709 - RNA, 18 nt, Human
cagcaaggucuugcucuc

SEQ ID NO: 3201710 - RNA, 16 nt, Human
cagcaaggucuugcuc

SEQ ID NO: 3201711 - RNA, 15 nt, Human
cagcaaggucuugcu

SEQ ID NO: 3201712 - RNA, 17 nt, Human
cagcaagugagagcugg

SEQ ID NO: 3201713 - RNA, 16 nt, Human
cagcaagugagagcug

SEQ ID NO: 3201714 - RNA, 15 nt, Human
cagcaagugagagcu

SEQ ID NO: 3201715 - RNA, 14 nt, Human
cagcaagugagagc

SEQ ID NO: 3201716 - RNA, 21 nt, Human
cagcaagugagagcugggugu

SEQ ID NO: 3201717 - RNA, 19 nt, Human
cagcaagugagagcugggu

SEQ ID NO: 3201718 - RNA, 20 nt, Human
cagcaaguuagagaaucugg

SEQ ID NO: 3201719 - RNA, 17 nt, Human
cagcaaguucacaugga

SEQ ID NO: 3201720 - RNA, 15 nt, Human
cagcaagugugaaua

SEQ ID NO: 3201721 - RNA, 21 nt, Human
cagcacaaccuucaagcugcu

SEQ ID NO: 3201722 - RNA, 18 nt, Human
cagcacaaccuucaagcu

SEQ ID NO: 3201723 - RNA, 15 nt, Human
cagcaauucuccugc

SEQ ID NO: 3201724 - RNA, 16 nt, Human
cagcaauucuccugcc

SEQ ID NO: 3201725 - RNA, 17 nt, Human
cagcaauucuccugccu

SEQ ID NO: 3201726 - RNA, 18 nt, Human
cagcaauucuccugccuc

SEQ ID NO: 3201727 - RNA, 19 nt, Human
cagcaauucuccugccuca

SEQ ID NO: 3201728 - RNA, 20 nt, Human
cagcaauucuccugccucag

SEQ ID NO: 3201729 - RNA, 23 nt, Human
cagcagccccugcacaaagcccu

SEQ ID NO: 3201730 - RNA, 16 nt, Human
cagcagccccugcaca

SEQ ID NO: 3201731 - RNA, 13 nt, Human
cagcagccccugc

SEQ ID NO: 3201732 - RNA, 14 nt, Human
cagcagccagccaa

SEQ ID NO: 3201733 - RNA, 13 nt, Human
cagcagccagcca

SEQ ID NO: 3201734 - RNA, 12 nt, Human
cagcagccagcc

SEQ ID NO: 3201735 - RNA, 23 nt, Human
cagcagccagccaaacacacaga

SEQ ID NO: 3201736 - RNA, 16 nt, Human
cagcagccagccaaac

SEQ ID NO: 3201737 - RNA, 11 nt, Human
cagcagagcac

SEQ ID NO: 3201738 - RNA, 13 nt, Human
cagcagagcaccu

SEQ ID NO: 3201739 - RNA, 23 nt, Human
cagcagaauugaccgacagcuuu

SEQ ID NO: 3201740 - RNA, 19 nt, Human
cagcacuuucuucuuccca

SEQ ID NO: 3201741 - RNA, 23 nt, Human
caggaaccauaguugacaguucc

SEQ ID NO: 3201742 - RNA, 14 nt, Human
caggaagcagcuuu

SEQ ID NO: 3201743 - RNA, 14 nt, Human
caggaagccagcag

SEQ ID NO: 3201744 - RNA, 16 nt, Human
caggaagccagcaggc

SEQ ID NO: 3201745 - RNA, 17 nt, Human
caggaagccagcaggcu

SEQ ID NO: 3201746 - RNA, 18 nt, Human
caggaagccagcaggcuc

SEQ ID NO: 3201747 - RNA, 19 nt, Human
caggaagccagcaggcucu

SEQ ID NO: 3201748 - RNA, 21 nt, Human
caggaagccagcaggcucuca

SEQ ID NO: 3201749 - RNA, 22 nt, Human
caggaagccagcaggcucucag

SEQ ID NO: 3201750 - RNA, 20 nt, Human
caggaagcucagggccuggc

SEQ ID NO: 3201751 - RNA, 21 nt, Human
caggaagcucagggccuggcu

SEQ ID NO: 3201752 - RNA, 22 nt, Human
caggaagcucagggccuggcuc

SEQ ID NO: 3201753 - RNA, 23 nt, Human
caggaagcucagggccuggcuca

SEQ ID NO: 3201754 - RNA, 16 nt, Human
caggaagcucagggcc

SEQ ID NO: 3201755 - RNA, 17 nt, Human
caggaagcucagggccu

SEQ ID NO: 3201756 - RNA, 18 nt, Human
caggaagcucagggccug

SEQ ID NO: 3201757 - RNA, 19 nt, Human
caggaagcucagggccugg

SEQ ID NO: 3201758 - RNA, 14 nt, Human
caggaagcucaggg

SEQ ID NO: 3201759 - RNA, 15 nt, Human
caggaagcucagggc

SEQ ID NO: 3201760 - RNA, 13 nt, Human
caggaagcucagg

SEQ ID NO: 3201761 - RNA, 16 nt, Human
caggaaguagaggagg

SEQ ID NO: 3201762 - RNA, 18 nt, Human
caggaaguagcacaggcu

SEQ ID NO: 3201763 - RNA, 17 nt, Human
caggaaguagcacaggc

SEQ ID NO: 3201764 - RNA, 16 nt, Human
caggaaguagcacagg

SEQ ID NO: 3201765 - RNA, 15 nt, Human
caggaaguagcacag

SEQ ID NO: 3201766 - RNA, 21 nt, Human
caggaaguccuuaucuagcug

SEQ ID NO: 3201767 - RNA, 22 nt, Human
caggaaguagcacaggcugagu

SEQ ID NO: 3201768 - RNA, 21 nt, Human
caggaaguagcacaggcugag

SEQ ID NO: 3201769 - RNA, 20 nt, Human
caggaaguagcacaggcuga

SEQ ID NO: 3201770 - RNA, 15 nt, Human
caggaaguagaggag

SEQ ID NO: 3201771 - RNA, 20 nt, Human
caggaaguacuggagaaaau

SEQ ID NO: 3201772 - RNA, 17 nt, Human
caggaaguacuggagaa

SEQ ID NO: 3201773 - RNA, 18 nt, Human
caggaaguacuggagaaa

SEQ ID NO: 3201774 - RNA, 15 nt, Human
caggaaggcuaaagg

SEQ ID NO: 3201775 - RNA, 19 nt, Human
caggaaggcugagaggaga

SEQ ID NO: 3201776 - RNA, 14 nt, Human
caggaaguacugga

SEQ ID NO: 3201777 - RNA, 16 nt, Human
caggaaguacuggaga

SEQ ID NO: 3201778 - RNA, 12 nt, Human
caggaaguacug

SEQ ID NO: 3201779 - RNA, 23 nt, Human
caggacgacuguuuucccaacac

SEQ ID NO: 3201780 - RNA, 19 nt, Human
caggaaaacacccagggaa

SEQ ID NO: 3201781 - RNA, 16 nt, Human
caggaaaacacccagg

SEQ ID NO: 3201782 - RNA, 23 nt, Human
cagcuuuucauugcugugacagu

SEQ ID NO: 3201783 - RNA, 20 nt, Human
cagcuuuucauugcugugac

SEQ ID NO: 3201784 - RNA, 15 nt, Human
cagcuuuucauugcu

SEQ ID NO: 3201785 - RNA, 17 nt, Human
cagcuuuuccugggaca

SEQ ID NO: 3201786 - RNA, 12 nt, Human
cagcuuuguuug

SEQ ID NO: 3201787 - RNA, 21 nt, Human
cagcuuuguuuguugucagcu

SEQ ID NO: 3201788 - RNA, 22 nt, Human
cagcuuuguuuguugucagcug

SEQ ID NO: 3201789 - RNA, 23 nt, Human
cagcuuuguuuguugucagcuga

SEQ ID NO: 3201790 - RNA, 14 nt, Human
cagcuuugauauuu

SEQ ID NO: 3201791 - RNA, 13 nt, Human
cagcuuugacccg

SEQ ID NO: 3201792 - RNA, 13 nt, Human
cagcuuuccagua

SEQ ID NO: 3201793 - RNA, 23 nt, Human
cagcuuuccucaaaacuucagac

SEQ ID NO: 3201794 - RNA, 23 nt, Human
cagcuuuccccaugucucgacuc

SEQ ID NO: 3201795 - RNA, 22 nt, Human
cagcuuuaaaaaauuaaucugg

SEQ ID NO: 3201796 - RNA, 16 nt, Human
cagcuuguuuuggacu

SEQ ID NO: 3201797 - RNA, 21 nt, Human
cagcuuguuuuggacuuuguu

SEQ ID NO: 3201798 - RNA, 22 nt, Human
cagcuuguuuuggacuuuguua

SEQ ID NO: 3201799 - RNA, 23 nt, Human
cagcuuguuuuggacuuuguuac

SEQ ID NO: 3201800 - RNA, 22 nt, Human
cagcuuguaaauagcucaggug

SEQ ID NO: 3201801 - RNA, 21 nt, Human
cagcuuguaaauagcucaggu

SEQ ID NO: 3201802 - RNA, 20 nt, Human
cagcuuguaaauagcucagg

SEQ ID NO: 3201803 - RNA, 19 nt, Human
cagcuuguaaauagcucag

SEQ ID NO: 3201804 - RNA, 18 nt, Human
cagcuuguaaauagcuca

SEQ ID NO: 3201805 - RNA, 18 nt, Human
cagcuugaaacugagaug

SEQ ID NO: 3201806 - RNA, 21 nt, Human
cagcuucauuuccugugucuu

SEQ ID NO: 3201807 - RNA, 20 nt, Human
cagcuucauuuccugugucu

SEQ ID NO: 3201808 - RNA, 19 nt, Human
cagcuucauuuccuguguc

SEQ ID NO: 3201809 - RNA, 11 nt, Human
cagcuuccagc

SEQ ID NO: 3201810 - RNA, 13 nt, Human
cagcuuccagcag

SEQ ID NO: 3201811 - RNA, 12 nt, Human
cagcuuccagca

SEQ ID NO: 3201812 - RNA, 18 nt, Human
cagcuuccccaguagcug

SEQ ID NO: 3201813 - RNA, 17 nt, Human
cagcuuccccaguagcu

SEQ ID NO: 3201814 - RNA, 17 nt, Human
cagcuuccagcaggagg

SEQ ID NO: 3201815 - RNA, 16 nt, Human
cagcuuccagcaggag

SEQ ID NO: 3201816 - RNA, 15 nt, Human
cagcuuccagcagga

SEQ ID NO: 3201817 - RNA, 14 nt, Human
cagcuuccagcagg

SEQ ID NO: 3201818 - RNA, 18 nt, Human
cagcuuccugucaagcaa

SEQ ID NO: 3201819 - RNA, 21 nt, Human
cagcuugaggguugggcuggu

SEQ ID NO: 3201820 - RNA, 20 nt, Human
cagcuugaggguugggcugg

SEQ ID NO: 3201821 - RNA, 19 nt, Human
cagcuugaggguugggcug

SEQ ID NO: 3201822 - RNA, 18 nt, Human
cagcuugaggguugggcu

SEQ ID NO: 3201823 - RNA, 13 nt, Human
cagcuugggcaga

SEQ ID NO: 3201824 - RNA, 20 nt, Human
cagcuugggcagaucuccca

SEQ ID NO: 3201825 - RNA, 17 nt, Human
cagcuugggcagaucuc

SEQ ID NO: 3201826 - RNA, 13 nt, Human
cagcuuggcucag

SEQ ID NO: 3201827 - RNA, 18 nt, Human
cagcuugcacauuuggua

SEQ ID NO: 3201828 - RNA, 16 nt, Human
cagcuugcacauuugg

SEQ ID NO: 3201829 - RNA, 18 nt, Human
cagcuugaccgugaggcc

SEQ ID NO: 3201830 - RNA, 19 nt, Human
cagcuugaccgugaggcca

SEQ ID NO: 3201831 - RNA, 20 nt, Human
cagcuugaccgugaggccag

SEQ ID NO: 3201832 - RNA, 21 nt, Human
cagcuugaccgugaggccaga

SEQ ID NO: 3201833 - RNA, 15 nt, Human
cagcuugaggguugg

SEQ ID NO: 3201834 - RNA, 14 nt, Human
cagcuugaggguug

SEQ ID NO: 3201835 - RNA, 23 nt, Human
cagcugggaucacauguggacuu

SEQ ID NO: 3201836 - RNA, 22 nt, Human
cagcugcuuuugucuaugggac

SEQ ID NO: 3201837 - RNA, 23 nt, Human
cagcugcuuuugucuaugggacu

SEQ ID NO: 3201838 - RNA, 15 nt, Human
cagcugcuuucuucu

SEQ ID NO: 3201839 - RNA, 14 nt, Human
cagcugcuuuguua

SEQ ID NO: 3201840 - RNA, 15 nt, Human
cagcugcuuuguuac

SEQ ID NO: 3201841 - RNA, 16 nt, Human
cagcugcuuuguuacc

SEQ ID NO: 3201842 - RNA, 22 nt, Human
cagcugcuuuguuaccuuaaaa

SEQ ID NO: 3201843 - RNA, 19 nt, Human
cagcuggccgggagccuga

SEQ ID NO: 3201844 - RNA, 21 nt, Human
cagcugggguggggaccucag

SEQ ID NO: 3201845 - RNA, 22 nt, Human
cagcugggguggggaccucagg

SEQ ID NO: 3201846 - RNA, 23 nt, Human
cagcugggguggggaccucaggc

SEQ ID NO: 3201847 - RNA, 18 nt, Human
cagcugguugagguuuca

SEQ ID NO: 3201848 - RNA, 17 nt, Human
cagcuggguuggaaaac

SEQ ID NO: 3201849 - RNA, 16 nt, Human
cagcuggguuggaaaa

SEQ ID NO: 3201850 - RNA, 18 nt, Human
cagcugccugggaucccu

SEQ ID NO: 3201851 - RNA, 23 nt, Human
cagcugccugggaucccucaucc

SEQ ID NO: 3201852 - RNA, 20 nt, Human
cagcugaaauugaaaaguua

SEQ ID NO: 3201853 - RNA, 17 nt, Human
cagcugaaauugaaaag

SEQ ID NO: 3201854 - RNA, 16 nt, Human
cagcugaaauugaaaa

SEQ ID NO: 3201855 - RNA, 13 nt, Human
cagcugaaauuga

SEQ ID NO: 3201856 - RNA, 24 nt, Human
cagcugcgguccacccaggagccc

SEQ ID NO: 3201857 - RNA, 23 nt, Human
cagcugcgguccacccaggagcc

SEQ ID NO: 3201858 - RNA, 22 nt, Human
cagcugcgguccacccaggagc

SEQ ID NO: 3201859 - RNA, 21 nt, Human
cagcugcgguccacccaggag

SEQ ID NO: 3201860 - RNA, 20 nt, Human
cagcugcgguccacccagga

SEQ ID NO: 3201861 - RNA, 19 nt, Human
cagcugcgguccacccagg

SEQ ID NO: 3201862 - RNA, 15 nt, Human
cagcugccugggauc

SEQ ID NO: 3201863 - RNA, 18 nt, Human
cagcugcgguccacccag

SEQ ID NO: 3201864 - RNA, 21 nt, Human
cagcugcugaaacaacaaaua

SEQ ID NO: 3201865 - RNA, 20 nt, Human
cagcugcugaaacaacaaau

SEQ ID NO: 3201866 - RNA, 13 nt, Human
cagcugcugagcc

SEQ ID NO: 3201867 - RNA, 20 nt, Human
cagcugcugagccgcagaga

SEQ ID NO: 3201868 - RNA, 19 nt, Human
cagcugcugagccgcagag

SEQ ID NO: 3201869 - RNA, 18 nt, Human
cagcugcugagccgcaga

SEQ ID NO: 3201870 - RNA, 17 nt, Human
cagcugcugagccgcag

SEQ ID NO: 3201871 - RNA, 16 nt, Human
cagcugcugagccgca

SEQ ID NO: 3201872 - RNA, 14 nt, Human
cagcugcugagccg

SEQ ID NO: 3201873 - RNA, 17 nt, Human
cagcugcuacuacuccu

SEQ ID NO: 3201874 - RNA, 21 nt, Human
cagcugcucaauaaaguacaa

SEQ ID NO: 3201875 - RNA, 16 nt, Human
cagcugacuuucaaag

SEQ ID NO: 3201876 - RNA, 15 nt, Human
cagcugcucagaucc

SEQ ID NO: 3201877 - RNA, 13 nt, Human
cagcugcuugggc

SEQ ID NO: 3201878 - RNA, 14 nt, Human
cagcugcuugggcu

SEQ ID NO: 3201879 - RNA, 15 nt, Human
cagcugcuugggcuu

SEQ ID NO: 3201880 - RNA, 16 nt, Human
cagcugcuugggcuuc

SEQ ID NO: 3201881 - RNA, 18 nt, Human
cagcugcuugggcuucau

SEQ ID NO: 3201882 - RNA, 19 nt, Human
cagcugcuugggcuucauc

SEQ ID NO: 3201883 - RNA, 21 nt, Human
cagcugcuugggcuucauccu

SEQ ID NO: 3201884 - RNA, 22 nt, Human
cagcugcuugggcuucauccuc

SEQ ID NO: 3201885 - RNA, 15 nt, Human
cagcucucaugcugc

SEQ ID NO: 3201886 - RNA, 23 nt, Human
cagcucucaugcugccccugccu

SEQ ID NO: 3201887 - RNA, 19 nt, Human
cagcucucaugcugccccu

SEQ ID NO: 3201888 - RNA, 22 nt, Human
cagcucgcuggauggcggaagc

SEQ ID NO: 3201889 - RNA, 21 nt, Human
cagcuccuuuuccagagcauu

SEQ ID NO: 3201890 - RNA, 20 nt, Human
cagcuccuuuuccagagcau

SEQ ID NO: 3201891 - RNA, 16 nt, Human
cagcuccuuuuccaga

SEQ ID NO: 3201892 - RNA, 13 nt, Human
cagcuccuuuucc

SEQ ID NO: 3201893 - RNA, 20 nt, Human
cagcucugcauacucauuag

SEQ ID NO: 3201894 - RNA, 21 nt, Human
cagcucugcaagaauugaagc

SEQ ID NO: 3201895 - RNA, 15 nt, Human
cagcucugcaagaau

SEQ ID NO: 3201896 - RNA, 16 nt, Human
cagcucugcaagaauu

SEQ ID NO: 3201897 - RNA, 13 nt, Human
cagcucagagagg

SEQ ID NO: 3201898 - RNA, 17 nt, Human
cagcucagagagggugg

SEQ ID NO: 3201899 - RNA, 19 nt, Human
cagcucagagaggguggga

SEQ ID NO: 3201900 - RNA, 20 nt, Human
cagcucagagagggugggag

SEQ ID NO: 3201901 - RNA, 12 nt, Human
cagcucagugag

SEQ ID NO: 3201902 - RNA, 20 nt, Human
cagcuccuuccuagccuugc

SEQ ID NO: 3201903 - RNA, 15 nt, Human
cagcuccuuccuagc

SEQ ID NO: 3201904 - RNA, 23 nt, Human
cagcuccuucuguccuacucugu

SEQ ID NO: 3201905 - RNA, 21 nt, Human
cagcuccuucuguccuacucu

SEQ ID NO: 3201906 - RNA, 17 nt, Human
cagcuccuucuguccua

SEQ ID NO: 3201907 - RNA, 16 nt, Human
cagcuccuucuguccu

SEQ ID NO: 3201908 - RNA, 23 nt, Human
cagcucuucuccaggcuguaucc

SEQ ID NO: 3201909 - RNA, 23 nt, Human
cagcucuuccuggacaggccagg

SEQ ID NO: 3201910 - RNA, 13 nt, Human
cagcucuuccugg

SEQ ID NO: 3201911 - RNA, 12 nt, Human
cagcucuuccug

SEQ ID NO: 3201912 - RNA, 22 nt, Human
cagcucuuccuagcuggagagg

SEQ ID NO: 3201913 - RNA, 20 nt, Human
cagcucuuccuagcuggaga

SEQ ID NO: 3201914 - RNA, 19 nt, Human
cagcucuuccuagcuggag

SEQ ID NO: 3201915 - RNA, 13 nt, Human
cagcucuuccuag

SEQ ID NO: 3201916 - RNA, 19 nt, Human
cagcucuucuccaggcugu

SEQ ID NO: 3201917 - RNA, 18 nt, Human
cagcucuucuccaggcug

SEQ ID NO: 3201918 - RNA, 17 nt, Human
cagcucuucuccaggcu

SEQ ID NO: 3201919 - RNA, 16 nt, Human
cagcucuucuccaggc

SEQ ID NO: 3201920 - RNA, 15 nt, Human
cagcucuucuccagg

SEQ ID NO: 3201921 - RNA, 14 nt, Human
cagcucuucuccag

SEQ ID NO: 3201922 - RNA, 13 nt, Human
cagcucuucucca

SEQ ID NO: 3201923 - RNA, 10 nt, Human
cagcucuuau

SEQ ID NO: 3201924 - RNA, 21 nt, Human
cagcucuuauauugccauuuc

SEQ ID NO: 3201925 - RNA, 23 nt, Human
cagcucuguccugggagugagcu

SEQ ID NO: 3201926 - RNA, 18 nt, Human
cagcucuguccugggagu

SEQ ID NO: 3201927 - RNA, 17 nt, Human
cagcucuguccugggag

SEQ ID NO: 3201928 - RNA, 16 nt, Human
cagcucuguccuggga

SEQ ID NO: 3201929 - RNA, 14 nt, Human
cagcucuguccugg

SEQ ID NO: 3201930 - RNA, 22 nt, Human
cagcucugguccauagagagca

SEQ ID NO: 3201931 - RNA, 23 nt, Human
cagcucugguccauagagagcaa

SEQ ID NO: 3201932 - RNA, 13 nt, Human
cagcucuguccug

SEQ ID NO: 3201933 - RNA, 12 nt, Human
cagcucuguccu

SEQ ID NO: 3201934 - RNA, 16 nt, Human
cagcucugguccauag

SEQ ID NO: 3201935 - RNA, 17 nt, Human
cagcucugguccauaga

SEQ ID NO: 3201936 - RNA, 18 nt, Human
cagcucugguccauagag

SEQ ID NO: 3201937 - RNA, 21 nt, Human
cagcucugguccauagagagc

SEQ ID NO: 3201938 - RNA, 10 nt, Human
cagcucuggu

SEQ ID NO: 3201939 - RNA, 13 nt, Human
cagcucuggucca

SEQ ID NO: 3201940 - RNA, 18 nt, Human
cagcucuggcauggcuag

SEQ ID NO: 3201941 - RNA, 14 nt, Human
cagcucuggcaugg

SEQ ID NO: 3201942 - RNA, 20 nt, Human
cagccuggaaaccugucuga

SEQ ID NO: 3201943 - RNA, 19 nt, Human
cagccuggaaaccugucug

SEQ ID NO: 3201944 - RNA, 15 nt, Human
cagccuggacccugu

SEQ ID NO: 3201945 - RNA, 19 nt, Human
cagccuggacccuguggau

SEQ ID NO: 3201946 - RNA, 21 nt, Human
cagccuggcacagggcagugg

SEQ ID NO: 3201947 - RNA, 20 nt, Human
cagccuggcacagggcagug

SEQ ID NO: 3201948 - RNA, 13 nt, Human
cagccuggcacag

SEQ ID NO: 3201949 - RNA, 10 nt, Human
cagccuggca

SEQ ID NO: 3201950 - RNA, 14 nt, Human
cagccuggcuggga

SEQ ID NO: 3201951 - RNA, 13 nt, Human
cagccuggcuccc

SEQ ID NO: 3201952 - RNA, 15 nt, Human
cagccuggcuccccu

SEQ ID NO: 3201953 - RNA, 17 nt, Human
cagccuggcuccccugg

SEQ ID NO: 3201954 - RNA, 18 nt, Human
cagccuggcuccccuggg

SEQ ID NO: 3201955 - RNA, 19 nt, Human
cagccuggcuccccugggg

SEQ ID NO: 3201956 - RNA, 23 nt, Human
cagccucccgaguagcugggacu

SEQ ID NO: 3201957 - RNA, 22 nt, Human
cagccucccgaguagcugggac

SEQ ID NO: 3201958 - RNA, 16 nt, Human
cagccucccacagugc

SEQ ID NO: 3201959 - RNA, 21 nt, Human
cagccucccgaguagcuggga

SEQ ID NO: 3201960 - RNA, 20 nt, Human
cagccucccgaguagcuggg

SEQ ID NO: 3201961 - RNA, 19 nt, Human
cagccucccgaguagcugg

SEQ ID NO: 3201962 - RNA, 23 nt, Human
cagccucccgaauagcugggacu

SEQ ID NO: 3201963 - RNA, 20 nt, Human
cagccugcuccagcuguuca

SEQ ID NO: 3201964 - RNA, 19 nt, Human
cagccucgcaggccucccu

SEQ ID NO: 3201965 - RNA, 22 nt, Human
cagccucgcaggccucccugcc

SEQ ID NO: 3201966 - RNA, 21 nt, Human
cagccucgcaggccucccugc

SEQ ID NO: 3201967 - RNA, 15 nt, Human
cagccuccugaguag

SEQ ID NO: 3201968 - RNA, 21 nt, Human
cagccuccgcuucccugguuc

SEQ ID NO: 3201969 - RNA, 20 nt, Human
cagccuccgcuucccugguu

SEQ ID NO: 3201970 - RNA, 18 nt, Human
cagccuccgcuucccugg

SEQ ID NO: 3201971 - RNA, 16 nt, Human
cagccuccgcuucccu

SEQ ID NO: 3201972 - RNA, 14 nt, Human
cagccuuaauauuu

SEQ ID NO: 3201973 - RNA, 20 nt, Human
cagccuugaccauucuccac

SEQ ID NO: 3201974 - RNA, 21 nt, Human
cagccuugaccauucuccacc

SEQ ID NO: 3201975 - RNA, 17 nt, Human
cagccuugaccauucuc

SEQ ID NO: 3201976 - RNA, 22 nt, Human
cagccuugaccauucuccaccu

SEQ ID NO: 3201977 - RNA, 23 nt, Human
cagccuugaccauucuccaccug

SEQ ID NO: 3201978 - RNA, 24 nt, Human
cagccuugaccauucuccaccugc

SEQ ID NO: 3201979 - RNA, 14 nt, Human
cagccuggucgccu

SEQ ID NO: 3201980 - RNA, 23 nt, Human
cagccuggucgccuuccaccucu

SEQ ID NO: 3201981 - RNA, 19 nt, Human
cagccuggucgccuuccac

SEQ ID NO: 3201982 - RNA, 16 nt, Human
cagccugggcaaugug

SEQ ID NO: 3201983 - RNA, 19 nt, Human
cagccugggcaaugugaua

SEQ ID NO: 3201984 - RNA, 21 nt, Human
cagccugggauaggggcagag

SEQ ID NO: 3201985 - RNA, 20 nt, Human
cagccugggauaggggcaga

SEQ ID NO: 3201986 - RNA, 20 nt, Human
cagccuggcugggacuggga

SEQ ID NO: 3201987 - RNA, 19 nt, Human
cagcuacuugggaggcuga

SEQ ID NO: 3201988 - RNA, 16 nt, Human
cagcuaaugggacacu

SEQ ID NO: 3201989 - RNA, 15 nt, Human
cagcuaaugggacac

SEQ ID NO: 3201990 - RNA, 19 nt, Human
cagcuaaucagcauucuca

SEQ ID NO: 3201991 - RNA, 20 nt, Human
cagcuaacauggaaguacua

SEQ ID NO: 3201992 - RNA, 20 nt, Human
cagcgagcccugguggcagu

SEQ ID NO: 3201993 - RNA, 19 nt, Human
cagcgagcccugguggcag

SEQ ID NO: 3201994 - RNA, 17 nt, Human
cagcgagcccugguggc

SEQ ID NO: 3201995 - RNA, 16 nt, Human
cagcgagcccuggugg

SEQ ID NO: 3201996 - RNA, 13 nt, Human
cagcgagcccugg

SEQ ID NO: 3201997 - RNA, 19 nt, Human
cagcuaacauggaaguacu

SEQ ID NO: 3201998 - RNA, 18 nt, Human
cagcuaacauggaaguac

SEQ ID NO: 3201999 - RNA, 15 nt, Human
cagcgcacagcugcu

SEQ ID NO: 3202000 - RNA, 14 nt, Human
cagcgcacagcugc

SEQ ID NO: 3202001 - RNA, 13 nt, Human
cagcgcacagcug

SEQ ID NO: 3202002 - RNA, 21 nt, Human
cagcgagcccugguggcagug

SEQ ID NO: 3202003 - RNA, 12 nt, Human
cagcgagggccc

SEQ ID NO: 3202004 - RNA, 19 nt, Human
cagcucaccagccccagug

SEQ ID NO: 3202005 - RNA, 17 nt, Human
cagcucaccagccccag

SEQ ID NO: 3202006 - RNA, 16 nt, Human
cagcucaccagcccca

SEQ ID NO: 3202007 - RNA, 15 nt, Human
cagcucaccagcccc

SEQ ID NO: 3202008 - RNA, 13 nt, Human
cagcucaccagcc

SEQ ID NO: 3202009 - RNA, 17 nt, Human
cagcuaggaacaaaucu

SEQ ID NO: 3202010 - RNA, 21 nt, Human
cagcuaggaacaaaucuuccu

SEQ ID NO: 3202011 - RNA, 20 nt, Human
cagcuaggaacaaaucuucc

SEQ ID NO: 3202012 - RNA, 19 nt, Human
cagcuaggaacaaaucuuc

SEQ ID NO: 3202013 - RNA, 18 nt, Human
cagcuaggaacaaaucuu

SEQ ID NO: 3202014 - RNA, 13 nt, Human
cagcuaugcaaaa

SEQ ID NO: 3202015 - RNA, 14 nt, Human
cagcuaugagagga

SEQ ID NO: 3202016 - RNA, 13 nt, Human
cagcucaccucuc

SEQ ID NO: 3202017 - RNA, 15 nt, Human
cagcucaccucuccc

SEQ ID NO: 3202018 - RNA, 16 nt, Human
cagcucaccucucccu

SEQ ID NO: 3202019 - RNA, 17 nt, Human
cagcucaccucucccuu

SEQ ID NO: 3202020 - RNA, 21 nt, Human
cagcucaccagccccagugcc

SEQ ID NO: 3202021 - RNA, 20 nt, Human
cagcucaccagccccagugc

SEQ ID NO: 3202022 - RNA, 14 nt, Human
cagcucaccagccc

SEQ ID NO: 3202023 - RNA, 22 nt, Human
cagcucaccagccccagugccc

SEQ ID NO: 3202024 - RNA, 19 nt, Human
cagcucaccucucccuugg

SEQ ID NO: 3202025 - RNA, 20 nt, Human
cagcucaccucucccuugga

SEQ ID NO: 3202026 - RNA, 12 nt, Human
cagcucacugca

SEQ ID NO: 3202027 - RNA, 14 nt, Human
cagcucacugcaac

SEQ ID NO: 3202028 - RNA, 12 nt, Human
cagcucagagag

SEQ ID NO: 3202029 - RNA, 15 nt, Human
cagcucacugcaacc

SEQ ID NO: 3202030 - RNA, 21 nt, Human
cagcucacugcaaccuucgcc

SEQ ID NO: 3202031 - RNA, 13 nt, Human
cagcucagaacca

SEQ ID NO: 3202032 - RNA, 15 nt, Human
cagcucagaaccaca

SEQ ID NO: 3202033 - RNA, 17 nt, Human
cagcucagaaccacagc

SEQ ID NO: 3202034 - RNA, 14 nt, Human
cagccuccaugcug

SEQ ID NO: 3202035 - RNA, 18 nt, Human
cagccuccaugcugccuc

SEQ ID NO: 3202036 - RNA, 20 nt, Human
cagccuccaugcugccucca

SEQ ID NO: 3202037 - RNA, 17 nt, Human
cagccuccaugcugccu

SEQ ID NO: 3202038 - RNA, 15 nt, Human
cagccuccaugcugc

SEQ ID NO: 3202039 - RNA, 23 nt, Human
cagccucccaaagugcugggauu

SEQ ID NO: 3202040 - RNA, 21 nt, Human
cagccucccaaagugcuggga

SEQ ID NO: 3202041 - RNA, 20 nt, Human
cagccucccaaagugcuggg

SEQ ID NO: 3202042 - RNA, 19 nt, Human
cagccucccaaagugcugg

SEQ ID NO: 3202043 - RNA, 22 nt, Human
cagccucccgaauagcugggac

SEQ ID NO: 3202044 - RNA, 21 nt, Human
cagccucccgaauagcuggga

SEQ ID NO: 3202045 - RNA, 20 nt, Human
cagccucccgaauagcuggg

SEQ ID NO: 3202046 - RNA, 15 nt, Human
cagccucccacagug

SEQ ID NO: 3202047 - RNA, 13 nt, Human
cagccucccacag

SEQ ID NO: 3202048 - RNA, 17 nt, Human
cagccucaaauccagga

SEQ ID NO: 3202049 - RNA, 18 nt, Human
cagccucaaccuccuggg

SEQ ID NO: 3202050 - RNA, 17 nt, Human
cagccucaaccuccugg

SEQ ID NO: 3202051 - RNA, 21 nt, Human
cagccucaaccuccugggcua

SEQ ID NO: 3202052 - RNA, 21 nt, Human
cagccucaaauccaggacccu

SEQ ID NO: 3202053 - RNA, 20 nt, Human
cagccucaaauccaggaccc

SEQ ID NO: 3202054 - RNA, 19 nt, Human
cagccucaaauccaggacc

SEQ ID NO: 3202055 - RNA, 18 nt, Human
cagccucaaauccaggac

SEQ ID NO: 3202056 - RNA, 20 nt, Human
cagccucaaccuccugggcu

SEQ ID NO: 3202057 - RNA, 19 nt, Human
cagccucaaccuccugggc

SEQ ID NO: 3202058 - RNA, 14 nt, Human
cagccucacagucc

SEQ ID NO: 3202059 - RNA, 15 nt, Human
cagccucacaguccu

SEQ ID NO: 3202060 - RNA, 20 nt, Human
cagccucacaguccuuacca

SEQ ID NO: 3202061 - RNA, 20 nt, Human
cagccuccaagcuccaucuc

SEQ ID NO: 3202062 - RNA, 14 nt, Human
cagccuccaagcuc

SEQ ID NO: 3202063 - RNA, 21 nt, Human
cagcccugaguuccuagccac

SEQ ID NO: 3202064 - RNA, 19 nt, Human
cagcccugaguuccuagcc

SEQ ID NO: 3202065 - RNA, 18 nt, Human
cagcccugaguuccuagc

SEQ ID NO: 3202066 - RNA, 18 nt, Human
cagcccucggcgcuccgg

SEQ ID NO: 3202067 - RNA, 21 nt, Human
cagcccucggcgcuccgggac

SEQ ID NO: 3202068 - RNA, 22 nt, Human
cagcccucccugccccucccuu

SEQ ID NO: 3202069 - RNA, 18 nt, Human
cagcccucccugccccuc

SEQ ID NO: 3202070 - RNA, 17 nt, Human
cagcccucccugccccu

SEQ ID NO: 3202071 - RNA, 16 nt, Human
cagcccucccugcccc

SEQ ID NO: 3202072 - RNA, 18 nt, Human
cagcccugcagagggcac

SEQ ID NO: 3202073 - RNA, 20 nt, Human
cagcccugcagagggcacag

SEQ ID NO: 3202074 - RNA, 13 nt, Human
cagcccugcagag

SEQ ID NO: 3202075 - RNA, 14 nt, Human
cagcccugcagagg

SEQ ID NO: 3202076 - RNA, 15 nt, Human
cagcccugcagaggg

SEQ ID NO: 3202077 - RNA, 16 nt, Human
cagcccugcagagggc

SEQ ID NO: 3202078 - RNA, 21 nt, Human
cagccguguaaccauggaccc

SEQ ID NO: 3202079 - RNA, 14 nt, Human
cagccuaagagacu

SEQ ID NO: 3202080 - RNA, 20 nt, Human
cagccgugccuucagcucua

SEQ ID NO: 3202081 - RNA, 18 nt, Human
cagccgugccuucagcuc

SEQ ID NO: 3202082 - RNA, 16 nt, Human
cagccgugccuucagc

SEQ ID NO: 3202083 - RNA, 14 nt, Human
cagccgugccuuca

SEQ ID NO: 3202084 - RNA, 9 nt, Human
cagccgugc

SEQ ID NO: 3202085 - RNA, 12 nt, Human
cagcccuggccc

SEQ ID NO: 3202086 - RNA, 18 nt, Human
cagcccuggcccaucaug

SEQ ID NO: 3202087 - RNA, 20 nt, Human
cagcccugcuuugggcugcc

SEQ ID NO: 3202088 - RNA, 19 nt, Human
cagcccugcuuugggcugc

SEQ ID NO: 3202089 - RNA, 13 nt, Human
cagcccugcuuug

SEQ ID NO: 3202090 - RNA, 11 nt, Human
cagcccugcuu

SEQ ID NO: 3202091 - RNA, 22 nt, Human
cagcccugcuuugggcugcccu

SEQ ID NO: 3202092 - RNA, 21 nt, Human
cagcccugcuuugggcugccc

SEQ ID NO: 3202093 - RNA, 23 nt, Human
cagcccugcuuugggcugcccug

SEQ ID NO: 3202094 - RNA, 18 nt, Human
cagcccucauuggcucuu

SEQ ID NO: 3202095 - RNA, 22 nt, Human
cagcccuccaucuaaacugccc

SEQ ID NO: 3202096 - RNA, 15 nt, Human
cagcccucccugccc

SEQ ID NO: 3202097 - RNA, 13 nt, Human
cagcccucccugc

SEQ ID NO: 3202098 - RNA, 23 nt, Human
cagcccuccaucuaaacugcccc

SEQ ID NO: 3202099 - RNA, 17 nt, Human
cagcccgggcucugccu

SEQ ID NO: 3202100 - RNA, 18 nt, Human
cagcccgggcucugccuc

SEQ ID NO: 3202101 - RNA, 19 nt, Human
cagcccgggcucugccucc

SEQ ID NO: 3202102 - RNA, 20 nt, Human
cagcccgggcucugccuccc

SEQ ID NO: 3202103 - RNA, 21 nt, Human
cagcccgggcucugccuccca

SEQ ID NO: 3202104 - RNA, 22 nt, Human
cagcccgggcucugccucccau

SEQ ID NO: 3202105 - RNA, 22 nt, Human
cagcccgcaucagcugcucaga

SEQ ID NO: 3202106 - RNA, 21 nt, Human
cagcccgcaucagcugcucag

SEQ ID NO: 3202107 - RNA, 14 nt, Human
cagcccgcaucagc

SEQ ID NO: 3202108 - RNA, 24 nt, Human
cagcccgauccuccccuggacucc

SEQ ID NO: 3202109 - RNA, 23 nt, Human
cagcccgauccuccccuggacuc

SEQ ID NO: 3202110 - RNA, 22 nt, Human
cagcccgauccuccccuggacu

SEQ ID NO: 3202111 - RNA, 20 nt, Human
cagcccgauccuccccugga

SEQ ID NO: 3202112 - RNA, 19 nt, Human
cagcccgauccuccccugg

SEQ ID NO: 3202113 - RNA, 17 nt, Human
cagcccgauccuccccu

SEQ ID NO: 3202114 - RNA, 13 nt, Human
cagcccgggcucu

SEQ ID NO: 3202115 - RNA, 14 nt, Human
cagcccgggcucug

SEQ ID NO: 3202116 - RNA, 15 nt, Human
cagcccgggcucugc

SEQ ID NO: 3202117 - RNA, 16 nt, Human
cagcccgggcucugcc

SEQ ID NO: 3202118 - RNA, 16 nt, Human
cagccccuucugaccc

SEQ ID NO: 3202119 - RNA, 17 nt, Human
cagccccuucugaccca

SEQ ID NO: 3202120 - RNA, 19 nt, Human
cagccccuucugacccaug

SEQ ID NO: 3202121 - RNA, 21 nt, Human
cagccccuucugacccaugcu

SEQ ID NO: 3202122 - RNA, 22 nt, Human
cagccccuucugacccaugcug

SEQ ID NO: 3202123 - RNA, 23 nt, Human
cagccccuucugacccaugcugc

SEQ ID NO: 3202124 - RNA, 24 nt, Human
cagccccuucugacccaugcugcc

SEQ ID NO: 3202125 - RNA, 22 nt, Human
cagccccaucccaaacccuuca

SEQ ID NO: 3202126 - RNA, 12 nt, Human
cagccccauccu

SEQ ID NO: 3202127 - RNA, 13 nt, Human
cagccccauccuc

SEQ ID NO: 3202128 - RNA, 14 nt, Human
cagccccauccucu

SEQ ID NO: 3202129 - RNA, 16 nt, Human
cagccccauccucugu

SEQ ID NO: 3202130 - RNA, 22 nt, Human
cagccccauccucuguacagag

SEQ ID NO: 3202131 - RNA, 14 nt, Human
cagccccauucugc

SEQ ID NO: 3202132 - RNA, 13 nt, Human
cagccccauucug

SEQ ID NO: 3202133 - RNA, 23 nt, Human
cagccccuggaugcagccucaca

SEQ ID NO: 3202134 - RNA, 18 nt, Human
cagccccauucugccugc

SEQ ID NO: 3202135 - RNA, 17 nt, Human
cagccccauucugccug

SEQ ID NO: 3202136 - RNA, 16 nt, Human
cagccccauucugccu

SEQ ID NO: 3202137 - RNA, 20 nt, Human
cagccccuguucuggcagag

SEQ ID NO: 3202138 - RNA, 22 nt, Human
cagccccuggaugcagccucac

SEQ ID NO: 3202139 - RNA, 21 nt, Human
cagccccuguucuggcagagu

SEQ ID NO: 3202140 - RNA, 11 nt, Human
cagccccaucc

SEQ ID NO: 3202141 - RNA, 21 nt, Human
cagccccaucccaaacccuuc

SEQ ID NO: 3202142 - RNA, 18 nt, Human
cagccccagugcccacag

SEQ ID NO: 3202143 - RNA, 17 nt, Human
cagccccagugcccaca

SEQ ID NO: 3202144 - RNA, 16 nt, Human
cagccccagugcccac

SEQ ID NO: 3202145 - RNA, 15 nt, Human
cagccccagugccca

SEQ ID NO: 3202146 - RNA, 14 nt, Human
cagccccagugccc

SEQ ID NO: 3202147 - RNA, 13 nt, Human
cagccccagugcc

SEQ ID NO: 3202148 - RNA, 17 nt, Human
cagccccacccuguuuu

SEQ ID NO: 3202149 - RNA, 14 nt, Human
cagccccacccugu

SEQ ID NO: 3202150 - RNA, 17 nt, Human
caggcaugguggcccac

SEQ ID NO: 3202151 - RNA, 22 nt, Human
caggcaugucccaugugagcug

SEQ ID NO: 3202152 - RNA, 16 nt, Human
caggcaugggccacca

SEQ ID NO: 3202153 - RNA, 15 nt, Human
caggcaugggccacc

SEQ ID NO: 3202154 - RNA, 12 nt, Human
caggcaggucuu

SEQ ID NO: 3202155 - RNA, 19 nt, Human
caggcagguccaggguuug

SEQ ID NO: 3202156 - RNA, 15 nt, Human
caggcagguccaggg

SEQ ID NO: 3202157 - RNA, 14 nt, Human
caggcagguccagg

SEQ ID NO: 3202158 - RNA, 22 nt, Human
caggcaggucuugaacuccugg

SEQ ID NO: 3202159 - RNA, 13 nt, Human
caggcaggucuug

SEQ ID NO: 3202160 - RNA, 15 nt, Human
caggcaggugggaug

SEQ ID NO: 3202161 - RNA, 23 nt, Human
caggcaggucuugaacuccuggc

SEQ ID NO: 3202162 - RNA, 13 nt, Human
caggcauucccca

SEQ ID NO: 3202163 - RNA, 15 nt, Human
caggcauuccccagg

SEQ ID NO: 3202164 - RNA, 16 nt, Human
caggcauuccccagga

SEQ ID NO: 3202165 - RNA, 17 nt, Human
caggcauuccccaggag

SEQ ID NO: 3202166 - RNA, 20 nt, Human
caggcauguucucugaggac

SEQ ID NO: 3202167 - RNA, 19 nt, Human
caggcauguucucugagga

SEQ ID NO: 3202168 - RNA, 18 nt, Human
caggcauguucucugagg

SEQ ID NO: 3202169 - RNA, 15 nt, Human
caggcauguucucug

SEQ ID NO: 3202170 - RNA, 18 nt, Human
caggcauuccccaggagg

SEQ ID NO: 3202171 - RNA, 19 nt, Human
caggcauuccccaggaggc

SEQ ID NO: 3202172 - RNA, 20 nt, Human
caggcauuccccaggaggcc

SEQ ID NO: 3202173 - RNA, 21 nt, Human
caggcauuccccaggaggcca

SEQ ID NO: 3202174 - RNA, 22 nt, Human
caggcauuccccaggaggccag

SEQ ID NO: 3202175 - RNA, 23 nt, Human
caggcauuccccaggaggccagc

SEQ ID NO: 3202176 - RNA, 24 nt, Human
caggcauuccccaggaggccagcc

SEQ ID NO: 3202177 - RNA, 21 nt, Human
caggcauugccucggcuggcu

SEQ ID NO: 3202178 - RNA, 22 nt, Human
caggcauugccucggcuggcuc

SEQ ID NO: 3202179 - RNA, 21 nt, Human
caggcaaggggaaucuggagg

SEQ ID NO: 3202180 - RNA, 14 nt, Human
caggcagccaggcc

SEQ ID NO: 3202181 - RNA, 15 nt, Human
caggcagccaggcca

SEQ ID NO: 3202182 - RNA, 21 nt, Human
caggcaagcaccuccugccuc

SEQ ID NO: 3202183 - RNA, 16 nt, Human
caggcaagcaccuccu

SEQ ID NO: 3202184 - RNA, 15 nt, Human
caggcaagcaccucc

SEQ ID NO: 3202185 - RNA, 14 nt, Human
caggcaagcaccuc

SEQ ID NO: 3202186 - RNA, 16 nt, Human
caggcaaauaaaauuc

SEQ ID NO: 3202187 - RNA, 16 nt, Human
caggauuuuaaucuuu

SEQ ID NO: 3202188 - RNA, 23 nt, Human
caggcaaacauuuucucuuagaa

SEQ ID NO: 3202189 - RNA, 21 nt, Human
caggcaaacauuuucucuuag

SEQ ID NO: 3202190 - RNA, 20 nt, Human
caggauucuuccucccuccc

SEQ ID NO: 3202191 - RNA, 13 nt, Human
caggcagguccag

SEQ ID NO: 3202192 - RNA, 17 nt, Human
caggcaggggcccugca

SEQ ID NO: 3202193 - RNA, 16 nt, Human
caggcaggggcccugc

SEQ ID NO: 3202194 - RNA, 22 nt, Human
caggcaggggcccugcagcucu

SEQ ID NO: 3202195 - RNA, 21 nt, Human
caggcaggggcccugcagcuc

SEQ ID NO: 3202196 - RNA, 20 nt, Human
caggcaggggcccugcagcu

SEQ ID NO: 3202197 - RNA, 18 nt, Human
caggcaggggcccugcag

SEQ ID NO: 3202198 - RNA, 23 nt, Human
caggcaggggcccugcagcucuc

SEQ ID NO: 3202199 - RNA, 14 nt, Human
caggcagggcagga

SEQ ID NO: 3202200 - RNA, 12 nt, Human
caggcagggcag

SEQ ID NO: 3202201 - RNA, 22 nt, Human
caggcagggcaggaccagccca

SEQ ID NO: 3202202 - RNA, 18 nt, Human
caggcagggcaggaccag

SEQ ID NO: 3202203 - RNA, 17 nt, Human
caggcagggcaggacca

SEQ ID NO: 3202204 - RNA, 16 nt, Human
caggcagggcaggacc

SEQ ID NO: 3202205 - RNA, 16 nt, Human
caggcagccaggccac

SEQ ID NO: 3202206 - RNA, 17 nt, Human
caggcagccaggccaca

SEQ ID NO: 3202207 - RNA, 20 nt, Human
caggcaggaaggcugagagg

SEQ ID NO: 3202208 - RNA, 22 nt, Human
caggcagcugucacugcugcuu

SEQ ID NO: 3202209 - RNA, 23 nt, Human
caggauggccgggcgcgguggcu

SEQ ID NO: 3202210 - RNA, 18 nt, Human
caggauucuuccucccuc

SEQ ID NO: 3202211 - RNA, 17 nt, Human
caggauucuuccucccu

SEQ ID NO: 3202212 - RNA, 22 nt, Human
caggauucucaccagcuguguc

SEQ ID NO: 3202213 - RNA, 19 nt, Human
caggauucucaccagcugu

SEQ ID NO: 3202214 - RNA, 19 nt, Human
caggauguacaaggacagc

SEQ ID NO: 3202215 - RNA, 21 nt, Human
caggauguggcuuaugagaua

SEQ ID NO: 3202216 - RNA, 13 nt, Human
caggaucagucug

SEQ ID NO: 3202217 - RNA, 17 nt, Human
caggauauauuuuauuu

SEQ ID NO: 3202218 - RNA, 16 nt, Human
caggauauauuuuauu

SEQ ID NO: 3202219 - RNA, 14 nt, Human
caggaucagucuga

SEQ ID NO: 3202220 - RNA, 21 nt, Human
caggccagggggccagucccu

SEQ ID NO: 3202221 - RNA, 20 nt, Human
caggccaggcccucugccca

SEQ ID NO: 3202222 - RNA, 18 nt, Human
caggccauuccccgucuc

SEQ ID NO: 3202223 - RNA, 21 nt, Human
caggccaggcccucugcccac

SEQ ID NO: 3202224 - RNA, 22 nt, Human
caggccaggcccucugcccacu

SEQ ID NO: 3202225 - RNA, 20 nt, Human
caggccacaagacccuugug

SEQ ID NO: 3202226 - RNA, 17 nt, Human
caggccacaagacccuu

SEQ ID NO: 3202227 - RNA, 18 nt, Human
caggccacaagacccuug

SEQ ID NO: 3202228 - RNA, 13 nt, Human
caggccacaagac

SEQ ID NO: 3202229 - RNA, 18 nt, Human
caggccaaacucaccugc

SEQ ID NO: 3202230 - RNA, 16 nt, Human
caggcauuuucccccu

SEQ ID NO: 3202231 - RNA, 23 nt, Human
caggccaaacucaccugccccuc

SEQ ID NO: 3202232 - RNA, 21 nt, Human
caggcccccagaaccccuggc

SEQ ID NO: 3202233 - RNA, 19 nt, Human
caggcccccaggugccagu

SEQ ID NO: 3202234 - RNA, 14 nt, Human
caggcccccaggug

SEQ ID NO: 3202235 - RNA, 20 nt, Human
caggcccccaggugccaguu

SEQ ID NO: 3202236 - RNA, 14 nt, Human
caggccccccuguc

SEQ ID NO: 3202237 - RNA, 13 nt, Human
caggccccugcca

SEQ ID NO: 3202238 - RNA, 24 nt, Human
caggcccacccugcuuggcccagg

SEQ ID NO: 3202239 - RNA, 23 nt, Human
caggcccacccugcuuggcccag

SEQ ID NO: 3202240 - RNA, 15 nt, Human
caggcccacccugcu

SEQ ID NO: 3202241 - RNA, 14 nt, Human
caggcccacccugc

SEQ ID NO: 3202242 - RNA, 21 nt, Human
caggccauuccccgucucugg

SEQ ID NO: 3202243 - RNA, 15 nt, Human
caggccauuuuuggu

SEQ ID NO: 3202244 - RNA, 13 nt, Human
caggcccacccug

SEQ ID NO: 3202245 - RNA, 22 nt, Human
caggcccaugggaggcuggagu

SEQ ID NO: 3202246 - RNA, 21 nt, Human
caggcccaugggaggcuggag

SEQ ID NO: 3202247 - RNA, 20 nt, Human
caggccccugccacccuggg

SEQ ID NO: 3202248 - RNA, 19 nt, Human
caggccccugccacccugg

SEQ ID NO: 3202249 - RNA, 17 nt, Human
caggccccugccacccu

SEQ ID NO: 3202250 - RNA, 15 nt, Human
caggccccugccacc

SEQ ID NO: 3202251 - RNA, 15 nt, Human
caggcccggcuccag

SEQ ID NO: 3202252 - RNA, 14 nt, Human
caggcccggcucca

SEQ ID NO: 3202253 - RNA, 13 nt, Human
caggcccggcucc

SEQ ID NO: 3202254 - RNA, 17 nt, Human
caggccccucccucucc

SEQ ID NO: 3202255 - RNA, 14 nt, Human
caggccccucccuc

SEQ ID NO: 3202256 - RNA, 23 nt, Human
caggagccccgaggccuucucug

SEQ ID NO: 3202257 - RNA, 22 nt, Human
caggagccccgaggccuucucu

SEQ ID NO: 3202258 - RNA, 20 nt, Human
caggagccccgaggccuucu

SEQ ID NO: 3202259 - RNA, 12 nt, Human
caggagcagcca

SEQ ID NO: 3202260 - RNA, 13 nt, Human
caggagcagccac

SEQ ID NO: 3202261 - RNA, 14 nt, Human
caggagcagccaca

SEQ ID NO: 3202262 - RNA, 19 nt, Human
caggagcagccacauuccu

SEQ ID NO: 3202263 - RNA, 18 nt, Human
caggagccccgaggccuu

SEQ ID NO: 3202264 - RNA, 16 nt, Human
caggagccccgaggcc

SEQ ID NO: 3202265 - RNA, 15 nt, Human
caggagccccgaggc

SEQ ID NO: 3202266 - RNA, 20 nt, Human
caggagcaguaucaugaagc

SEQ ID NO: 3202267 - RNA, 16 nt, Human
caggagcaguaucaug

SEQ ID NO: 3202268 - RNA, 11 nt, Human
caggagcccau

SEQ ID NO: 3202269 - RNA, 23 nt, Human
caggagcccauuuggagggccug

SEQ ID NO: 3202270 - RNA, 12 nt, Human
caggagcccauu

SEQ ID NO: 3202271 - RNA, 14 nt, Human
caggagccuccugc

SEQ ID NO: 3202272 - RNA, 17 nt, Human
caggagccuccugcccu

SEQ ID NO: 3202273 - RNA, 20 nt, Human
caggagccuccugcccuuac

SEQ ID NO: 3202274 - RNA, 16 nt, Human
caggagccugcccagc

SEQ ID NO: 3202275 - RNA, 22 nt, Human
caggagcgcucccuugaccugc

SEQ ID NO: 3202276 - RNA, 16 nt, Human
caggagcgcucccuug

SEQ ID NO: 3202277 - RNA, 15 nt, Human
caggagucccugcca

SEQ ID NO: 3202278 - RNA, 21 nt, Human
caggagucccugccaucaugu

SEQ ID NO: 3202279 - RNA, 14 nt, Human
caggagucccugcc

SEQ ID NO: 3202280 - RNA, 12 nt, Human
caggagugagca

SEQ ID NO: 3202281 - RNA, 23 nt, Human
caggaguagugaagacuccagaa

SEQ ID NO: 3202282 - RNA, 22 nt, Human
caggaguagugaagacuccaga

SEQ ID NO: 3202283 - RNA, 15 nt, Human
caggaguagugaaga

SEQ ID NO: 3202284 - RNA, 20 nt, Human
caggaguaaaagagucaagu

SEQ ID NO: 3202285 - RNA, 19 nt, Human
caggagcuccauacacacg

SEQ ID NO: 3202286 - RNA, 21 nt, Human
caggagacuguggagacugcu

SEQ ID NO: 3202287 - RNA, 20 nt, Human
caggagagauuauuuacaag

SEQ ID NO: 3202288 - RNA, 12 nt, Human
caggagaagaaa

SEQ ID NO: 3202289 - RNA, 19 nt, Human
caggagaagaaagaacuau

SEQ ID NO: 3202290 - RNA, 16 nt, Human
caggagaagaaagaac

SEQ ID NO: 3202291 - RNA, 18 nt, Human
caggagaggauggcccag

SEQ ID NO: 3202292 - RNA, 15 nt, Human
caggagagcuuaggg

SEQ ID NO: 3202293 - RNA, 16 nt, Human
caggagagcuuagggu

SEQ ID NO: 3202294 - RNA, 18 nt, Human
caggagagcuuagggucu

SEQ ID NO: 3202295 - RNA, 22 nt, Human
caggagagcuuagggucucagg

SEQ ID NO: 3202296 - RNA, 17 nt, Human
caggagaugcugugccc

SEQ ID NO: 3202297 - RNA, 16 nt, Human
caggagaugcugugcc

SEQ ID NO: 3202298 - RNA, 23 nt, Human
caggagaugcugugccccuggcc

SEQ ID NO: 3202299 - RNA, 19 nt, Human
caggagaugcugugccccu

SEQ ID NO: 3202300 - RNA, 16 nt, Human
caggacucugccuccu

SEQ ID NO: 3202301 - RNA, 15 nt, Human
caggacucugccucc

SEQ ID NO: 3202302 - RNA, 13 nt, Human
caggacucugccu

SEQ ID NO: 3202303 - RNA, 12 nt, Human
caggacucugcc

SEQ ID NO: 3202304 - RNA, 21 nt, Human
caggaguuugagaccaaccug

SEQ ID NO: 3202305 - RNA, 16 nt, Human
caggaguuggaagugu

SEQ ID NO: 3202306 - RNA, 13 nt, Human
caggauagacuuu

SEQ ID NO: 3202307 - RNA, 22 nt, Human
caggaguuugagaccaaccugg

SEQ ID NO: 3202308 - RNA, 23 nt, Human
caggaguuugagaccaaccuggg

SEQ ID NO: 3202309 - RNA, 15 nt, Human
cagggaaggggacaa

SEQ ID NO: 3202310 - RNA, 17 nt, Human
cagggaaggggacaagg

SEQ ID NO: 3202311 - RNA, 14 nt, Human
cagggacagagggg

SEQ ID NO: 3202312 - RNA, 20 nt, Human
cagggacagaggggguggcc

SEQ ID NO: 3202313 - RNA, 13 nt, Human
cagggacagaggg

SEQ ID NO: 3202314 - RNA, 19 nt, Human
cagggaagauaaguuggaa

SEQ ID NO: 3202315 - RNA, 16 nt, Human
cagggaagccuugugg

SEQ ID NO: 3202316 - RNA, 13 nt, Human
cagggaaagacug

SEQ ID NO: 3202317 - RNA, 19 nt, Human
cagggaacuaggaaggcac

SEQ ID NO: 3202318 - RNA, 22 nt, Human
cagggaaacagcuaaugggaca

SEQ ID NO: 3202319 - RNA, 16 nt, Human
cagggaaacagcuaau

SEQ ID NO: 3202320 - RNA, 22 nt, Human
cagggggccagucccugaggca

SEQ ID NO: 3202321 - RNA, 13 nt, Human
cagggggcuuccu

SEQ ID NO: 3202322 - RNA, 12 nt, Human
cagggggcuucc

SEQ ID NO: 3202323 - RNA, 22 nt, Human
cagggggcuuccugaggggaga

SEQ ID NO: 3202324 - RNA, 15 nt, Human
cagggggcuuccuga

SEQ ID NO: 3202325 - RNA, 14 nt, Human
caggggcaggagga

SEQ ID NO: 3202326 - RNA, 19 nt, Human
caggggaggguagagcgga

SEQ ID NO: 3202327 - RNA, 21 nt, Human
caggggaggccaucuggagag

SEQ ID NO: 3202328 - RNA, 17 nt, Human
caggggaggccaucugg

SEQ ID NO: 3202329 - RNA, 16 nt, Human
caggggaggccaucug

SEQ ID NO: 3202330 - RNA, 17 nt, Human
caggggagggggcaaag

SEQ ID NO: 3202331 - RNA, 15 nt, Human
caggggcccugcagc

SEQ ID NO: 3202332 - RNA, 19 nt, Human
caggggcccugcagcucuc

SEQ ID NO: 3202333 - RNA, 18 nt, Human
caggggcccugcagcucu

SEQ ID NO: 3202334 - RNA, 17 nt, Human
caggggcccugcagcuc

SEQ ID NO: 3202335 - RNA, 16 nt, Human
caggggcccugcagcu

SEQ ID NO: 3202336 - RNA, 17 nt, Human
caggggcuccaugccag

SEQ ID NO: 3202337 - RNA, 18 nt, Human
caggggcuccaugccagc

SEQ ID NO: 3202338 - RNA, 22 nt, Human
caggggccuuugggugcuguuu

SEQ ID NO: 3202339 - RNA, 18 nt, Human
caggggacacccagaaac

SEQ ID NO: 3202340 - RNA, 16 nt, Human
caggggaccuccuggg

SEQ ID NO: 3202341 - RNA, 16 nt, Human
caggggagauccuugu

SEQ ID NO: 3202342 - RNA, 14 nt, Human
caggggaggccauc

SEQ ID NO: 3202343 - RNA, 14 nt, Human
cagggccuggcuca

SEQ ID NO: 3202344 - RNA, 15 nt, Human
cagggccuggcucag

SEQ ID NO: 3202345 - RNA, 13 nt, Human
cagggccuggcuc

SEQ ID NO: 3202346 - RNA, 14 nt, Human
cagggccuggccca

SEQ ID NO: 3202347 - RNA, 13 nt, Human
cagggccuggccc

SEQ ID NO: 3202348 - RNA, 12 nt, Human
cagggccuggcc

SEQ ID NO: 3202349 - RNA, 11 nt, Human
cagggccuggc

SEQ ID NO: 3202350 - RNA, 16 nt, Human
cagggccuggcucagg

SEQ ID NO: 3202351 - RNA, 19 nt, Human
cagggccuggcucaggugg

SEQ ID NO: 3202352 - RNA, 18 nt, Human
cagggccuggcccaugua

SEQ ID NO: 3202353 - RNA, 17 nt, Human
cagggccuggcccaugu

SEQ ID NO: 3202354 - RNA, 16 nt, Human
cagggccuggcccaug

SEQ ID NO: 3202355 - RNA, 15 nt, Human
cagggccuggcccau

SEQ ID NO: 3202356 - RNA, 21 nt, Human
cagggcccccagcgagagucc

SEQ ID NO: 3202357 - RNA, 19 nt, Human
cagggcccgggaagcaaau

SEQ ID NO: 3202358 - RNA, 20 nt, Human
cagggcccgggaagcaaaug

SEQ ID NO: 3202359 - RNA, 19 nt, Human
cagggccgauggggcaguc

SEQ ID NO: 3202360 - RNA, 21 nt, Human
cagggccggucgggggggacc

SEQ ID NO: 3202361 - RNA, 17 nt, Human
cagggcauggcugggaa

SEQ ID NO: 3202362 - RNA, 20 nt, Human
cagggcauggccagguggcc

SEQ ID NO: 3202363 - RNA, 14 nt, Human
cagggcaugaaaug

SEQ ID NO: 3202364 - RNA, 24 nt, Human
cagggcaugaaaugaacacaaauu

SEQ ID NO: 3202365 - RNA, 23 nt, Human
cagggcaugaaaugaacacaaau

SEQ ID NO: 3202366 - RNA, 15 nt, Human
cagggcaugaaauga

SEQ ID NO: 3202367 - RNA, 22 nt, Human
cagggcaggaccagcccacgcu

SEQ ID NO: 3202368 - RNA, 16 nt, Human
cagggcaggaccagcc

SEQ ID NO: 3202369 - RNA, 13 nt, Human
cagggcaggacca

SEQ ID NO: 3202370 - RNA, 20 nt, Human
cagggcaggaccagcccacg

SEQ ID NO: 3202371 - RNA, 19 nt, Human
cagggcaggaccagcccac

SEQ ID NO: 3202372 - RNA, 18 nt, Human
cagggcaggaccagccca

SEQ ID NO: 3202373 - RNA, 17 nt, Human
cagggcaggaccagccc

SEQ ID NO: 3202374 - RNA, 19 nt, Human
cagggccagaaguagcuuu

SEQ ID NO: 3202375 - RNA, 19 nt, Human
cagggccaaaagcuucccu

SEQ ID NO: 3202376 - RNA, 15 nt, Human
cagggaccccagaau

SEQ ID NO: 3202377 - RNA, 14 nt, Human
cagggaccccagaa

SEQ ID NO: 3202378 - RNA, 18 nt, Human
cagggacaggauaagagg

SEQ ID NO: 3202379 - RNA, 23 nt, Human
cagggacagaggggguggccucc

SEQ ID NO: 3202380 - RNA, 14 nt, Human
cagggcacaccggg

SEQ ID NO: 3202381 - RNA, 22 nt, Human
cagggcaauaaaaugaccaugg

SEQ ID NO: 3202382 - RNA, 22 nt, Human
cagggauugauuuuaaaaugua

SEQ ID NO: 3202383 - RNA, 21 nt, Human
cagggauugauuuuaaaaugu

SEQ ID NO: 3202384 - RNA, 20 nt, Human
cagggauugauuuuaaaaug

SEQ ID NO: 3202385 - RNA, 18 nt, Human
cagggauugauuuuaaaa

SEQ ID NO: 3202386 - RNA, 16 nt, Human
cagggauugauuuuaa

SEQ ID NO: 3202387 - RNA, 21 nt, Human
cagggcacaccgggcacucag

SEQ ID NO: 3202388 - RNA, 19 nt, Human
cagggcacaccgggcacuc

SEQ ID NO: 3202389 - RNA, 17 nt, Human
cagggcacaccgggcac

SEQ ID NO: 3202390 - RNA, 15 nt, Human
cagggcacaccgggc

SEQ ID NO: 3202391 - RNA, 23 nt, Human
cagggcacaccgggcacucagaa

SEQ ID NO: 3202392 - RNA, 22 nt, Human
cagggcacaccgggcacucaga

SEQ ID NO: 3202393 - RNA, 16 nt, Human
cagggcacagggccug

SEQ ID NO: 3202394 - RNA, 15 nt, Human
cagggcacagggccu

SEQ ID NO: 3202395 - RNA, 14 nt, Human
cagggcacagggcc

SEQ ID NO: 3202396 - RNA, 12 nt, Human
cagggcacaggg

SEQ ID NO: 3202397 - RNA, 22 nt, Human
cagggcagauuuuaguuuuauu

SEQ ID NO: 3202398 - RNA, 22 nt, Human
cagggcacagggccuggcccau

SEQ ID NO: 3202399 - RNA, 21 nt, Human
cagggcacagggccuggccca

SEQ ID NO: 3202400 - RNA, 20 nt, Human
cagggcacagggccuggccc

SEQ ID NO: 3202401 - RNA, 19 nt, Human
cagggcacagggccuggcc

SEQ ID NO: 3202402 - RNA, 18 nt, Human
cagggcacagggccuggc

SEQ ID NO: 3202403 - RNA, 17 nt, Human
cagggcacagggccugg

SEQ ID NO: 3202404 - RNA, 12 nt, Human
cagggcacgugg

SEQ ID NO: 3202405 - RNA, 18 nt, Human
caggcuuucuagaaagaa

SEQ ID NO: 3202406 - RNA, 13 nt, Human
caggcuuucuaga

SEQ ID NO: 3202407 - RNA, 22 nt, Human
caggcuuagucacugagacagc

SEQ ID NO: 3202408 - RNA, 23 nt, Human
caggcuuagucacugagacagcc

SEQ ID NO: 3202409 - RNA, 16 nt, Human
caggcuuagucacuga

SEQ ID NO: 3202410 - RNA, 17 nt, Human
caggcuuagucacugag

SEQ ID NO: 3202411 - RNA, 20 nt, Human
caggcuuagucacugagaca

SEQ ID NO: 3202412 - RNA, 21 nt, Human
caggcuuagucacugagacag

SEQ ID NO: 3202413 - RNA, 23 nt, Human
caggcuguaucccaugagccuca

SEQ ID NO: 3202414 - RNA, 22 nt, Human
caggcuguaucccaugagccuc

SEQ ID NO: 3202415 - RNA, 14 nt, Human
caggcugugaguuu

SEQ ID NO: 3202416 - RNA, 21 nt, Human
caggcuguaucccaugagccu

SEQ ID NO: 3202417 - RNA, 20 nt, Human
caggcuguaucccaugagcc

SEQ ID NO: 3202418 - RNA, 14 nt, Human
caggcuguauccca

SEQ ID NO: 3202419 - RNA, 23 nt, Human
caggcuggucucgaacuccugac

SEQ ID NO: 3202420 - RNA, 19 nt, Human
caggcuggucucaaacucu

SEQ ID NO: 3202421 - RNA, 20 nt, Human
caggcuggucucgaacuccu

SEQ ID NO: 3202422 - RNA, 22 nt, Human
caggcuggucucgaacuccuga

SEQ ID NO: 3202423 - RNA, 12 nt, Human
caggcuggucuc

SEQ ID NO: 3202424 - RNA, 23 nt, Human
caggcugggcuucaguggcagcu

SEQ ID NO: 3202425 - RNA, 12 nt, Human
caggcuggcccu

SEQ ID NO: 3202426 - RNA, 14 nt, Human
caggcuggcccugc

SEQ ID NO: 3202427 - RNA, 15 nt, Human
caggcuggcccugcc

SEQ ID NO: 3202428 - RNA, 16 nt, Human
caggcuggcccugccc

SEQ ID NO: 3202429 - RNA, 12 nt, Human
caggcugcucuu

SEQ ID NO: 3202430 - RNA, 20 nt, Human
caggcugcucuugaacuccu

SEQ ID NO: 3202431 - RNA, 22 nt, Human
caggcugcucucaaaccccuga

SEQ ID NO: 3202432 - RNA, 15 nt, Human
caggcugcucucaaa

SEQ ID NO: 3202433 - RNA, 23 nt, Human
caggcugcucuugaacuccugac

SEQ ID NO: 3202434 - RNA, 12 nt, Human
caggcugagccu

SEQ ID NO: 3202435 - RNA, 22 nt, Human
caggcucuucuccuuucacaac

SEQ ID NO: 3202436 - RNA, 18 nt, Human
caggcucuucuccuuuca

SEQ ID NO: 3202437 - RNA, 12 nt, Human
caggcucuucuc

SEQ ID NO: 3202438 - RNA, 15 nt, Human
caggcucuucuccuu

SEQ ID NO: 3202439 - RNA, 14 nt, Human
caggcucuucuccu

SEQ ID NO: 3202440 - RNA, 23 nt, Human
caggcugagugcaggcccacccu

SEQ ID NO: 3202441 - RNA, 22 nt, Human
caggcugagugcaggcccaccc

SEQ ID NO: 3202442 - RNA, 21 nt, Human
caggcugagugcaggcccacc

SEQ ID NO: 3202443 - RNA, 20 nt, Human
caggcugagugcaggcccac

SEQ ID NO: 3202444 - RNA, 19 nt, Human
caggcugagugcaggccca

SEQ ID NO: 3202445 - RNA, 18 nt, Human
caggcugagugcaggccc

SEQ ID NO: 3202446 - RNA, 13 nt, Human
caggcugagccuc

SEQ ID NO: 3202447 - RNA, 14 nt, Human
caggcugagccuca

SEQ ID NO: 3202448 - RNA, 15 nt, Human
caggcugagccucag

SEQ ID NO: 3202449 - RNA, 16 nt, Human
caggcugagccucagu

SEQ ID NO: 3202450 - RNA, 17 nt, Human
caggcugagccucaguc

SEQ ID NO: 3202451 - RNA, 21 nt, Human
caggcugagccucagucuccc

SEQ ID NO: 3202452 - RNA, 15 nt, Human
caggcugagugcagg

SEQ ID NO: 3202453 - RNA, 17 nt, Human
caggcugagugcaggcc

SEQ ID NO: 3202454 - RNA, 16 nt, Human
caggcugagugcaggc

SEQ ID NO: 3202455 - RNA, 13 nt, Human
caggcugagcuga

SEQ ID NO: 3202456 - RNA, 14 nt, Human
caggcugagugcag

SEQ ID NO: 3202457 - RNA, 14 nt, Human
caggcuacugucag

SEQ ID NO: 3202458 - RNA, 20 nt, Human
caggcuccuuuagcgcccag

SEQ ID NO: 3202459 - RNA, 19 nt, Human
caggcuccuuuagcgccca

SEQ ID NO: 3202460 - RNA, 14 nt, Human
caggcuccuuuagc

SEQ ID NO: 3202461 - RNA, 18 nt, Human
caggcuccugccaccacg

SEQ ID NO: 3202462 - RNA, 13 nt, Human
caggcuccugcca

SEQ ID NO: 3202463 - RNA, 14 nt, Human
caggcuccugccac

SEQ ID NO: 3202464 - RNA, 15 nt, Human
caggcuccugccacc

SEQ ID NO: 3202465 - RNA, 16 nt, Human
caggcuccugccacca

SEQ ID NO: 3202466 - RNA, 23 nt, Human
caggcucccaggagccugcccag

SEQ ID NO: 3202467 - RNA, 24 nt, Human
caggcucccaggagccugcccagc

SEQ ID NO: 3202468 - RNA, 15 nt, Human
caggcucccaggagc

SEQ ID NO: 3202469 - RNA, 22 nt, Human
caggcucccaggagccugccca

SEQ ID NO: 3202470 - RNA, 13 nt, Human
caggcucucaggc

SEQ ID NO: 3202471 - RNA, 14 nt, Human
caggcucucaggcc

SEQ ID NO: 3202472 - RNA, 15 nt, Human
caggcucucaggcca

SEQ ID NO: 3202473 - RNA, 16 nt, Human
caggcucucaggccag

SEQ ID NO: 3202474 - RNA, 20 nt, Human
caggcucgggcuccccagcc

SEQ ID NO: 3202475 - RNA, 12 nt, Human
caggcucucagg

SEQ ID NO: 3202476 - RNA, 21 nt, Human
caggcuccuuuagcgcccagu

SEQ ID NO: 3202477 - RNA, 17 nt, Human
caggcucucaggccagc

SEQ ID NO: 3202478 - RNA, 18 nt, Human
caggcucucaggccagcu

SEQ ID NO: 3202479 - RNA, 19 nt, Human
caggcucucaggccagcug

SEQ ID NO: 3202480 - RNA, 20 nt, Human
caggcucucaggccagcugc

SEQ ID NO: 3202481 - RNA, 21 nt, Human
caggcucucaggccagcugcu

SEQ ID NO: 3202482 - RNA, 23 nt, Human
caggcucucaggccagcugcuug

SEQ ID NO: 3202483 - RNA, 15 nt, Human
caggcucucugggcu

SEQ ID NO: 3202484 - RNA, 16 nt, Human
caggcucucugggcug

SEQ ID NO: 3202485 - RNA, 19 nt, Human
caggcccggcuccaggcuc

SEQ ID NO: 3202486 - RNA, 18 nt, Human
caggcccggcuccaggcu

SEQ ID NO: 3202487 - RNA, 16 nt, Human
caggcccggcuccagg

SEQ ID NO: 3202488 - RNA, 17 nt, Human
caggcccggcuccaggc

SEQ ID NO: 3202489 - RNA, 13 nt, Human
caggcccucugcc

SEQ ID NO: 3202490 - RNA, 11 nt, Human
caggcccuccu

SEQ ID NO: 3202491 - RNA, 14 nt, Human
caggcccucugccc

SEQ ID NO: 3202492 - RNA, 15 nt, Human
caggcccucugccca

SEQ ID NO: 3202493 - RNA, 21 nt, Human
caggcccggcuccaggcuccu

SEQ ID NO: 3202494 - RNA, 20 nt, Human
caggcccggcuccaggcucc

SEQ ID NO: 3202495 - RNA, 22 nt, Human
caggcccggcuccaggcuccuu

SEQ ID NO: 3202496 - RNA, 18 nt, Human
caggcccgaaagaggcac

SEQ ID NO: 3202497 - RNA, 23 nt, Human
caggccccucccucuccagcagg

SEQ ID NO: 3202498 - RNA, 16 nt, Human
caggcccucugcccac

SEQ ID NO: 3202499 - RNA, 17 nt, Human
caggcccucugcccacu

SEQ ID NO: 3202500 - RNA, 19 nt, Human
caggcccucugcccacucc

SEQ ID NO: 3202501 - RNA, 20 nt, Human
caggcccucugcccacuccc

SEQ ID NO: 3202502 - RNA, 21 nt, Human
caggcccucugcccacucccu

SEQ ID NO: 3202503 - RNA, 22 nt, Human
caggcccucugcccacucccug

SEQ ID NO: 3202504 - RNA, 23 nt, Human
caggcccuccucccucccagcuc

SEQ ID NO: 3202505 - RNA, 20 nt, Human
caggcccuccucccucccag

SEQ ID NO: 3202506 - RNA, 18 nt, Human
caggcccuccucccuccc

SEQ ID NO: 3202507 - RNA, 23 nt, Human
caggcccuuccucuccacugccu

SEQ ID NO: 3202508 - RNA, 21 nt, Human
caggcccuuccucuccacugc

SEQ ID NO: 3202509 - RNA, 20 nt, Human
caggcccuuccucuccacug

SEQ ID NO: 3202510 - RNA, 19 nt, Human
caggcccuuccucuccacu

SEQ ID NO: 3202511 - RNA, 17 nt, Human
caggcccuuccucucca

SEQ ID NO: 3202512 - RNA, 16 nt, Human
caggcccuuccucucc

SEQ ID NO: 3202513 - RNA, 15 nt, Human
caggcccuuccucuc

SEQ ID NO: 3202514 - RNA, 22 nt, Human
cagucuuuaaucugagaggcca

SEQ ID NO: 3202515 - RNA, 20 nt, Human
cagucuuucaacucauugca

SEQ ID NO: 3202516 - RNA, 12 nt, Human
cagucuuuuguc

SEQ ID NO: 3202517 - RNA, 14 nt, Human
cagucuuuuguccu

SEQ ID NO: 3202518 - RNA, 19 nt, Human
cagucuggaaugcaguggu

SEQ ID NO: 3202519 - RNA, 22 nt, Human
cagucuuagaucauaguuuuau

SEQ ID NO: 3202520 - RNA, 17 nt, Human
cagucuuaugcuuccag

SEQ ID NO: 3202521 - RNA, 16 nt, Human
cagucuuaugcuucca

SEQ ID NO: 3202522 - RNA, 20 nt, Human
cagucuuaugcuuccagaaa

SEQ ID NO: 3202523 - RNA, 19 nt, Human
cagucuuaugcuuccagaa

SEQ ID NO: 3202524 - RNA, 18 nt, Human
cagucuuaugcuuccaga

SEQ ID NO: 3202525 - RNA, 15 nt, Human
caguccuuaccagca

SEQ ID NO: 3202526 - RNA, 18 nt, Human
caguccuuaccagcagag

SEQ ID NO: 3202527 - RNA, 19 nt, Human
caguccuuaccagcagagc

SEQ ID NO: 3202528 - RNA, 20 nt, Human
caguccuuaccagcagagca

SEQ ID NO: 3202529 - RNA, 21 nt, Human
caguccuuaccagcagagcac

SEQ ID NO: 3202530 - RNA, 18 nt, Human
cagucuggaaugcagugg

SEQ ID NO: 3202531 - RNA, 16 nt, Human
caguccucccaucuca

SEQ ID NO: 3202532 - RNA, 17 nt, Human
caguccucccaucucac

SEQ ID NO: 3202533 - RNA, 14 nt, Human
cagugaagaaagcc

SEQ ID NO: 3202534 - RNA, 22 nt, Human
cagugaaaauaagccaugagaa

SEQ ID NO: 3202535 - RNA, 23 nt, Human
cagugaaaauaagccaugagaau

SEQ ID NO: 3202536 - RNA, 15 nt, Human
cagugagacagcucu

SEQ ID NO: 3202537 - RNA, 15 nt, Human
cagugagagcagaug

SEQ ID NO: 3202538 - RNA, 13 nt, Human
cagugagagcaga

SEQ ID NO: 3202539 - RNA, 23 nt, Human
cagugaccuggaaggcccagcac

SEQ ID NO: 3202540 - RNA, 20 nt, Human
cagugaccuggaaggcccag

SEQ ID NO: 3202541 - RNA, 24 nt, Human
cagugagccgagauugcaccacug

SEQ ID NO: 3202542 - RNA, 12 nt, Human
cagugaggcucu

SEQ ID NO: 3202543 - RNA, 23 nt, Human
cagugagcuggagauacuugguc

SEQ ID NO: 3202544 - RNA, 14 nt, Human
cagugagcuggaga

SEQ ID NO: 3202545 - RNA, 13 nt, Human
cagugaggcucug

SEQ ID NO: 3202546 - RNA, 14 nt, Human
cagugaggcucugc

SEQ ID NO: 3202547 - RNA, 15 nt, Human
cagugaggcucugcc

SEQ ID NO: 3202548 - RNA, 16 nt, Human
cagugaggcucugccc

SEQ ID NO: 3202549 - RNA, 17 nt, Human
cagugaggcucugcccu

SEQ ID NO: 3202550 - RNA, 18 nt, Human
cagugaggcucugcccuu

SEQ ID NO: 3202551 - RNA, 19 nt, Human
cagugaggcucugcccuug

SEQ ID NO: 3202552 - RNA, 20 nt, Human
cagugaggcucugcccuugg

SEQ ID NO: 3202553 - RNA, 18 nt, Human
cagugagucgaggacagg

SEQ ID NO: 3202554 - RNA, 17 nt, Human
cagugagucgaggacag

SEQ ID NO: 3202555 - RNA, 21 nt, Human
cagugaggcucugcccuuggu

SEQ ID NO: 3202556 - RNA, 23 nt, Human
cagugaggguaaguauuuuccug

SEQ ID NO: 3202557 - RNA, 18 nt, Human
cagugauuaccagggacu

SEQ ID NO: 3202558 - RNA, 22 nt, Human
cagugaugugccuaaauaaguu

SEQ ID NO: 3202559 - RNA, 17 nt, Human
cagugauuaccagggac

SEQ ID NO: 3202560 - RNA, 22 nt, Human
cagugauauucuuuguuaauuu

SEQ ID NO: 3202561 - RNA, 15 nt, Human
cagugcccuccagga

SEQ ID NO: 3202562 - RNA, 22 nt, Human
cagugccccgucuacagcuccc

SEQ ID NO: 3202563 - RNA, 23 nt, Human
cagugagucgaggacagggaggu

SEQ ID NO: 3202564 - RNA, 22 nt, Human
cagugagucgaggacagggagg

SEQ ID NO: 3202565 - RNA, 20 nt, Human
cagugagucgaggacaggga

SEQ ID NO: 3202566 - RNA, 19 nt, Human
cagugagucgaggacaggg

SEQ ID NO: 3202567 - RNA, 18 nt, Human
cagugauauucuuuguua

SEQ ID NO: 3202568 - RNA, 15 nt, Human
cagugauauucuuug

SEQ ID NO: 3202569 - RNA, 14 nt, Human
cagugauauucuuu

SEQ ID NO: 3202570 - RNA, 12 nt, Human
cagugauauucu

SEQ ID NO: 3202571 - RNA, 15 nt, Human
cagugccuuauggaa

SEQ ID NO: 3202572 - RNA, 16 nt, Human
cagugccuuauggaac

SEQ ID NO: 3202573 - RNA, 17 nt, Human
cagugccuuauggaaca

SEQ ID NO: 3202574 - RNA, 18 nt, Human
cagugccuuauggaacac

SEQ ID NO: 3202575 - RNA, 19 nt, Human
cagugccuuauggaacacu

SEQ ID NO: 3202576 - RNA, 20 nt, Human
cagugccuuauggaacacuc

SEQ ID NO: 3202577 - RNA, 21 nt, Human
cagugccuuauggaacacucu

SEQ ID NO: 3202578 - RNA, 22 nt, Human
cagugccuuauggaacacucug

SEQ ID NO: 3202579 - RNA, 15 nt, Human
cagugccgagaagga

SEQ ID NO: 3202580 - RNA, 18 nt, Human
cagugccgagaaggaagc

SEQ ID NO: 3202581 - RNA, 19 nt, Human
cagugccuaaaauaagaau

SEQ ID NO: 3202582 - RNA, 15 nt, Human
cagugccuaaaauaa

SEQ ID NO: 3202583 - RNA, 11 nt, Human
cagugccuuau

SEQ ID NO: 3202584 - RNA, 13 nt, Human
cagugccuuaugg

SEQ ID NO: 3202585 - RNA, 23 nt, Human
cagugccuuauggaacacucuga

SEQ ID NO: 3202586 - RNA, 16 nt, Human
cagugcgggugcagac

SEQ ID NO: 3202587 - RNA, 15 nt, Human
cagugcuacugaaag

SEQ ID NO: 3202588 - RNA, 13 nt, Human
cagugcuacugaa

SEQ ID NO: 3202589 - RNA, 14 nt, Human
cagucccugaggca

SEQ ID NO: 3202590 - RNA, 22 nt, Human
caguccccuucccgugaccugg

SEQ ID NO: 3202591 - RNA, 14 nt, Human
caguccccuucccg

SEQ ID NO: 3202592 - RNA, 23 nt, Human
cagucccugaggcagguccccag

SEQ ID NO: 3202593 - RNA, 20 nt, Human
cagucccugaggcagguccc

SEQ ID NO: 3202594 - RNA, 12 nt, Human
cagucccugcca

SEQ ID NO: 3202595 - RNA, 13 nt, Human
cagucccugccaa

SEQ ID NO: 3202596 - RNA, 14 nt, Human
cagucccugccaau

SEQ ID NO: 3202597 - RNA, 15 nt, Human
cagucccugccaaug

SEQ ID NO: 3202598 - RNA, 16 nt, Human
cagucccugccaaugg

SEQ ID NO: 3202599 - RNA, 12 nt, Human
caguccucccau

SEQ ID NO: 3202600 - RNA, 13 nt, Human
caguccucccauc

SEQ ID NO: 3202601 - RNA, 14 nt, Human
caguccucccaucu

SEQ ID NO: 3202602 - RNA, 15 nt, Human
caguccucccaucuc

SEQ ID NO: 3202603 - RNA, 17 nt, Human
cagucccugccaaugga

SEQ ID NO: 3202604 - RNA, 16 nt, Human
cagucccuuuaaagaa

SEQ ID NO: 3202605 - RNA, 17 nt, Human
caguccuagaauguuuc

SEQ ID NO: 3202606 - RNA, 18 nt, Human
caguccuagaauguuuca

SEQ ID NO: 3202607 - RNA, 17 nt, Human
cagucccccugccccag

SEQ ID NO: 3202608 - RNA, 16 nt, Human
cagucccccugcccca

SEQ ID NO: 3202609 - RNA, 23 nt, Human
caguccccgugaaggagagcccu

SEQ ID NO: 3202610 - RNA, 13 nt, Human
caguccccagaac

SEQ ID NO: 3202611 - RNA, 21 nt, Human
caguccccagaacucugccug

SEQ ID NO: 3202612 - RNA, 20 nt, Human
caguccccagaacucugccu

SEQ ID NO: 3202613 - RNA, 19 nt, Human
caguccccagaacucugcc

SEQ ID NO: 3202614 - RNA, 15 nt, Human
caguccccagaacuc

SEQ ID NO: 3202615 - RNA, 12 nt, Human
caguauguggaa

SEQ ID NO: 3202616 - RNA, 16 nt, Human
caguauuacuucugcu

SEQ ID NO: 3202617 - RNA, 18 nt, Human
caguauuacuucugcuac

SEQ ID NO: 3202618 - RNA, 18 nt, Human
cagucaggcucucugggc

SEQ ID NO: 3202619 - RNA, 16 nt, Human
cagucaggcucucugg

SEQ ID NO: 3202620 - RNA, 22 nt, Human
cagucaggcucucugggcugac

SEQ ID NO: 3202621 - RNA, 19 nt, Human
cagucaggcucucugggcu

SEQ ID NO: 3202622 - RNA, 22 nt, Human
cagucaucgaguggcccaacag

SEQ ID NO: 3202623 - RNA, 15 nt, Human
cagucagguugaaga

SEQ ID NO: 3202624 - RNA, 13 nt, Human
caguccaugaaga

SEQ ID NO: 3202625 - RNA, 16 nt, Human
caguccauagcagaga

SEQ ID NO: 3202626 - RNA, 13 nt, Human
cagucccagcagc

SEQ ID NO: 3202627 - RNA, 12 nt, Human
cagucccagcag

SEQ ID NO: 3202628 - RNA, 18 nt, Human
cagucccagcagccagcc

SEQ ID NO: 3202629 - RNA, 17 nt, Human
cagucccagcagccagc

SEQ ID NO: 3202630 - RNA, 15 nt, Human
cagucccagcagcca

SEQ ID NO: 3202631 - RNA, 14 nt, Human
cagucccagcagcc

SEQ ID NO: 3202632 - RNA, 19 nt, Human
cagucccagcagccagcca

SEQ ID NO: 3202633 - RNA, 19 nt, Human
cagucauuaaauuacuaua

SEQ ID NO: 3202634 - RNA, 22 nt, Human
cagucauggagaaccaccuacc

SEQ ID NO: 3202635 - RNA, 22 nt, Human
caguccaagggguccccuccag

SEQ ID NO: 3202636 - RNA, 12 nt, Human
caguagugauag

SEQ ID NO: 3202637 - RNA, 21 nt, Human
caguauaaagaauaggacuug

SEQ ID NO: 3202638 - RNA, 18 nt, Human
caguauaaagaauaggac

SEQ ID NO: 3202639 - RNA, 17 nt, Human
caguauaaagaauagga

SEQ ID NO: 3202640 - RNA, 15 nt, Human
caguauaaagaauag

SEQ ID NO: 3202641 - RNA, 14 nt, Human
caguauaaagaaua

SEQ ID NO: 3202642 - RNA, 20 nt, Human
caguaguuugcauuucagaa

SEQ ID NO: 3202643 - RNA, 13 nt, Human
caguauaaagaau

SEQ ID NO: 3202644 - RNA, 21 nt, Human
caguaguuugcauuucagaaa

SEQ ID NO: 3202645 - RNA, 13 nt, Human
caguauaaaauua

SEQ ID NO: 3202646 - RNA, 18 nt, Human
caguauaaaauuacagug

SEQ ID NO: 3202647 - RNA, 22 nt, Human
caguauaaaauuacaguggauu

SEQ ID NO: 3202648 - RNA, 19 nt, Human
caguaguuugcauuucaga

SEQ ID NO: 3202649 - RNA, 15 nt, Human
caguaguuugcauuu

SEQ ID NO: 3202650 - RNA, 13 nt, Human
caguagaaaauau

SEQ ID NO: 3202651 - RNA, 14 nt, Human
caguagcaggcccg

SEQ ID NO: 3202652 - RNA, 20 nt, Human
caguagcugggaccacaggu

SEQ ID NO: 3202653 - RNA, 19 nt, Human
caguagcugggaccacagg

SEQ ID NO: 3202654 - RNA, 14 nt, Human
caguagcugggacc

SEQ ID NO: 3202655 - RNA, 24 nt, Human
caguaggacaaggugcaggcaggc

SEQ ID NO: 3202656 - RNA, 23 nt, Human
caguaggacaaggugcaggcagg

SEQ ID NO: 3202657 - RNA, 22 nt, Human
caguaggacaaggugcaggcag

SEQ ID NO: 3202658 - RNA, 18 nt, Human
caguagcuuaagaaaaaa

SEQ ID NO: 3202659 - RNA, 12 nt, Human
caguauggcagc

SEQ ID NO: 3202660 - RNA, 21 nt, Human
caguaucuugaagacuuuucu

SEQ ID NO: 3202661 - RNA, 15 nt, Human
caguaucucagggcc

SEQ ID NO: 3202662 - RNA, 12 nt, Human
caguaucuugaa

SEQ ID NO: 3202663 - RNA, 18 nt, Human
caguaucuugaagacuuu

SEQ ID NO: 3202664 - RNA, 13 nt, Human
caguaucucaggg

SEQ ID NO: 3202665 - RNA, 23 nt, Human
caguauauguuaauuuguguguu

SEQ ID NO: 3202666 - RNA, 14 nt, Human
caguauauuaguau

SEQ ID NO: 3202667 - RNA, 16 nt, Human
caguauauuaguauua

SEQ ID NO: 3202668 - RNA, 14 nt, Human
caguauauuuuauu

SEQ ID NO: 3202669 - RNA, 16 nt, Human
caguauauuuuauuuc

SEQ ID NO: 3202670 - RNA, 17 nt, Human
caguauauuuuauuuca

SEQ ID NO: 3202671 - RNA, 18 nt, Human
caguauauuuuauuucaa

SEQ ID NO: 3202672 - RNA, 19 nt, Human
caguauauuuuauuucaau

SEQ ID NO: 3202673 - RNA, 20 nt, Human
caguauauuuuauuucaaug

SEQ ID NO: 3202674 - RNA, 22 nt, Human
caguauauuuuauuucaaugua

SEQ ID NO: 3202675 - RNA, 15 nt, Human
caguaucaugaagcc

SEQ ID NO: 3202676 - RNA, 14 nt, Human
caguaucaugaagc

SEQ ID NO: 3202677 - RNA, 12 nt, Human
cagguguucuuc

SEQ ID NO: 3202678 - RNA, 20 nt, Human
cagguguuuauaucuccuuu

SEQ ID NO: 3202679 - RNA, 20 nt, Human
cagguuaaauguuuuguaaa

SEQ ID NO: 3202680 - RNA, 16 nt, Human
cagguuaaauguuuug

SEQ ID NO: 3202681 - RNA, 13 nt, Human
cagguuaaauguu

SEQ ID NO: 3202682 - RNA, 15 nt, Human
cagguuaaauguuuu

SEQ ID NO: 3202683 - RNA, 14 nt, Human
cagguuaaauguuu

SEQ ID NO: 3202684 - RNA, 23 nt, Human
caggugugagucaccaagcccag

SEQ ID NO: 3202685 - RNA, 22 nt, Human
caggugugagucaccaagccca

SEQ ID NO: 3202686 - RNA, 21 nt, Human
caggugugagccaccacgccc

SEQ ID NO: 3202687 - RNA, 20 nt, Human
caggugugagggcagugcaa

SEQ ID NO: 3202688 - RNA, 16 nt, Human
caggugugagggcagu

SEQ ID NO: 3202689 - RNA, 16 nt, Human
caggugugagucacca

SEQ ID NO: 3202690 - RNA, 18 nt, Human
caggugugagccaccacg

SEQ ID NO: 3202691 - RNA, 21 nt, Human
caggugugagucaccaagccc

SEQ ID NO: 3202692 - RNA, 20 nt, Human
caggugugagucaccaagcc

SEQ ID NO: 3202693 - RNA, 23 nt, Human
caggugugaaccaccacacccag

SEQ ID NO: 3202694 - RNA, 22 nt, Human
caggugugaaccaccacaccca

SEQ ID NO: 3202695 - RNA, 19 nt, Human
caggugugaaccaccacac

SEQ ID NO: 3202696 - RNA, 16 nt, Human
caggugugaaccacca

SEQ ID NO: 3202697 - RNA, 12 nt, Human
caggugugaacc

SEQ ID NO: 3202698 - RNA, 19 nt, Human
caggugucccugcacuugc

SEQ ID NO: 3202699 - RNA, 18 nt, Human
caggugucccugcacuug

SEQ ID NO: 3202700 - RNA, 16 nt, Human
caggugucccugcacu

SEQ ID NO: 3202701 - RNA, 15 nt, Human
caggugucccugcac

SEQ ID NO: 3202702 - RNA, 13 nt, Human
cagguucagcuug

SEQ ID NO: 3202703 - RNA, 15 nt, Human
cagguuccacagagg

SEQ ID NO: 3202704 - RNA, 19 nt, Human
cagguuccacagaggacac

SEQ ID NO: 3202705 - RNA, 12 nt, Human
cagguucagcuu

SEQ ID NO: 3202706 - RNA, 23 nt, Human
cagguuaggcaguauaaagaaua

SEQ ID NO: 3202707 - RNA, 22 nt, Human
cagguuaggcaguauaaagaau

SEQ ID NO: 3202708 - RNA, 21 nt, Human
cagguuauugcaauaaaguau

SEQ ID NO: 3202709 - RNA, 22 nt, Human
cagguuauugcaauaaaguaua

SEQ ID NO: 3202710 - RNA, 13 nt, Human
caguaacacaggc

SEQ ID NO: 3202711 - RNA, 15 nt, Human
caguaagaucacugu

SEQ ID NO: 3202712 - RNA, 16 nt, Human
caguaagaucacuguu

SEQ ID NO: 3202713 - RNA, 17 nt, Human
caguaagaucacuguuu

SEQ ID NO: 3202714 - RNA, 22 nt, Human
caguaacacauagacugugcgc

SEQ ID NO: 3202715 - RNA, 19 nt, Human
caguacccauggggcuagg

SEQ ID NO: 3202716 - RNA, 23 nt, Human
caguaccauuuaauggggaggac

SEQ ID NO: 3202717 - RNA, 21 nt, Human
caguacauucucaguuuuucu

SEQ ID NO: 3202718 - RNA, 19 nt, Human
caguacauucucaguuuuu

SEQ ID NO: 3202719 - RNA, 15 nt, Human
caguacauuuaaauu

SEQ ID NO: 3202720 - RNA, 16 nt, Human
caguacauuuaaauuu

SEQ ID NO: 3202721 - RNA, 17 nt, Human
caguacauuuaaauuuu

SEQ ID NO: 3202722 - RNA, 20 nt, Human
caguacauuuaaauuuuuug

SEQ ID NO: 3202723 - RNA, 22 nt, Human
caguacauuuaaauuuuuuggc

SEQ ID NO: 3202724 - RNA, 22 nt, Human
caguaccuggguccccagcccu

SEQ ID NO: 3202725 - RNA, 23 nt, Human
caguaccuggguccccagcccuu

SEQ ID NO: 3202726 - RNA, 16 nt, Human
caguacccugguugug

SEQ ID NO: 3202727 - RNA, 17 nt, Human
caguacccugguugugu

SEQ ID NO: 3202728 - RNA, 22 nt, Human
caguaagucucauagguuaaaa

SEQ ID NO: 3202729 - RNA, 19 nt, Human
caguaagaucacuguuuag

SEQ ID NO: 3202730 - RNA, 20 nt, Human
caguaagaucacuguuuaga

SEQ ID NO: 3202731 - RNA, 21 nt, Human
caguaagaucacuguuuagau

SEQ ID NO: 3202732 - RNA, 13 nt, Human
caguaauaacucu

SEQ ID NO: 3202733 - RNA, 12 nt, Human
caguaauaacuc

SEQ ID NO: 3202734 - RNA, 18 nt, Human
caguaaugucauaaagug

SEQ ID NO: 3202735 - RNA, 15 nt, Human
caguaauuuucggau

SEQ ID NO: 3202736 - RNA, 21 nt, Human
caguacaaugugacuuugaaa

SEQ ID NO: 3202737 - RNA, 20 nt, Human
caggugguuauggagagggu

SEQ ID NO: 3202738 - RNA, 14 nt, Human
caggugucccugca

SEQ ID NO: 3202739 - RNA, 11 nt, Human
caggugucccu

SEQ ID NO: 3202740 - RNA, 18 nt, Human
cagguggggucacucugg

SEQ ID NO: 3202741 - RNA, 17 nt, Human
cagguggggcagcuuga

SEQ ID NO: 3202742 - RNA, 16 nt, Human
cagguggggcagcuug

SEQ ID NO: 3202743 - RNA, 15 nt, Human
cagguggggcagcuu

SEQ ID NO: 3202744 - RNA, 14 nt, Human
cagguggggcagcu

SEQ ID NO: 3202745 - RNA, 13 nt, Human
cagguggggcagc

SEQ ID NO: 3202746 - RNA, 19 nt, Human
cagguggggucacucuggc

SEQ ID NO: 3202747 - RNA, 20 nt, Human
cagguggggucacucuggca

SEQ ID NO: 3202748 - RNA, 21 nt, Human
cagguggggucacucuggcag

SEQ ID NO: 3202749 - RNA, 22 nt, Human
cagguggggucacucuggcagc

SEQ ID NO: 3202750 - RNA, 23 nt, Human
cagguggggucacucuggcagcu

SEQ ID NO: 3202751 - RNA, 18 nt, Human
caggugguuauggagagg

SEQ ID NO: 3202752 - RNA, 16 nt, Human
caggugggugucugcg

SEQ ID NO: 3202753 - RNA, 14 nt, Human
cagguccucccugc

SEQ ID NO: 3202754 - RNA, 21 nt, Human
caggucuaccccucccggccc

SEQ ID NO: 3202755 - RNA, 12 nt, Human
cagguccugcuc

SEQ ID NO: 3202756 - RNA, 15 nt, Human
cagguccugcucagc

SEQ ID NO: 3202757 - RNA, 13 nt, Human
cagguccugcuca

SEQ ID NO: 3202758 - RNA, 17 nt, Human
cagguccugcucagcag

SEQ ID NO: 3202759 - RNA, 23 nt, Human
caggucuugaacuccuggccuca

SEQ ID NO: 3202760 - RNA, 22 nt, Human
caggucuugaacuccuggccuc

SEQ ID NO: 3202761 - RNA, 21 nt, Human
caggucuugaacuccuggccu

SEQ ID NO: 3202762 - RNA, 20 nt, Human
caggucuugaacuccuggcc

SEQ ID NO: 3202763 - RNA, 19 nt, Human
caggucuugaacuccuggc

SEQ ID NO: 3202764 - RNA, 18 nt, Human
caggucuugaacuccugg

SEQ ID NO: 3202765 - RNA, 13 nt, Human
caggugagaagca

SEQ ID NO: 3202766 - RNA, 20 nt, Human
caggugagaagcagaggaag

SEQ ID NO: 3202767 - RNA, 21 nt, Human
caggugagaagcagaggaagg

SEQ ID NO: 3202768 - RNA, 23 nt, Human
caggugaaggaggcuccaggcag

SEQ ID NO: 3202769 - RNA, 19 nt, Human
caggugaaggaggcuccag

SEQ ID NO: 3202770 - RNA, 18 nt, Human
caggugaaggaggcucca

SEQ ID NO: 3202771 - RNA, 14 nt, Human
caggugaaggaggc

SEQ ID NO: 3202772 - RNA, 21 nt, Human
cagguggccacuccagacccc

SEQ ID NO: 3202773 - RNA, 19 nt, Human
cagguggccacuccagacc

SEQ ID NO: 3202774 - RNA, 16 nt, Human
cagguggccacuccag

SEQ ID NO: 3202775 - RNA, 15 nt, Human
cagguggccacucca

SEQ ID NO: 3202776 - RNA, 20 nt, Human
cagguggagguggcaucccc

SEQ ID NO: 3202777 - RNA, 17 nt, Human
cagguggagguggcauc

SEQ ID NO: 3202778 - RNA, 12 nt, Human
cagguccccaga

SEQ ID NO: 3202779 - RNA, 15 nt, Human
cagguccagaugugc

SEQ ID NO: 3202780 - RNA, 18 nt, Human
cagguccccagcuuuggc

SEQ ID NO: 3202781 - RNA, 13 nt, Human
cagguccccagac

SEQ ID NO: 3202782 - RNA, 21 nt, Human
cagguaacaggcagauacagg

SEQ ID NO: 3202783 - RNA, 20 nt, Human
cagguaacaggcagauacag

SEQ ID NO: 3202784 - RNA, 17 nt, Human
cagguaaucgaccugcc

SEQ ID NO: 3202785 - RNA, 18 nt, Human
cagguaaucgaccugccu

SEQ ID NO: 3202786 - RNA, 19 nt, Human
cagguaaucgaccugccuc

SEQ ID NO: 3202787 - RNA, 20 nt, Human
cagguaaucgaccugccucg

SEQ ID NO: 3202788 - RNA, 23 nt, Human
cagguacuuugucuaagaaacau

SEQ ID NO: 3202789 - RNA, 13 nt, Human
cagguacuuuguc

SEQ ID NO: 3202790 - RNA, 12 nt, Human
cagguacuuugu

SEQ ID NO: 3202791 - RNA, 14 nt, Human
cagguaccaguucu

SEQ ID NO: 3202792 - RNA, 15 nt, Human
cagguaccaguucuu

SEQ ID NO: 3202793 - RNA, 13 nt, Human
cagguaggaauau

SEQ ID NO: 3202794 - RNA, 20 nt, Human
cagguaggaauauuauauuu

SEQ ID NO: 3202795 - RNA, 15 nt, Human
cagguaggaauauua

SEQ ID NO: 3202796 - RNA, 21 nt, Human
cagguagcauagcucuguaca

SEQ ID NO: 3202797 - RNA, 21 nt, Human
cagguagaacgccagggaccc

SEQ ID NO: 3202798 - RNA, 19 nt, Human
cagguagaacgccagggac

SEQ ID NO: 3202799 - RNA, 17 nt, Human
cagguagaacgccaggg

SEQ ID NO: 3202800 - RNA, 18 nt, Human
cagguagaggugcaugcc

SEQ ID NO: 3202801 - RNA, 23 nt, Human
cagguaggaauauuauauuugga

SEQ ID NO: 3202802 - RNA, 14 nt, Human
cagggucccuggug

SEQ ID NO: 3202803 - RNA, 12 nt, Human
cagggucccugg

SEQ ID NO: 3202804 - RNA, 15 nt, Human
cagggucccuggugg

SEQ ID NO: 3202805 - RNA, 18 nt, Human
cagggucccugguggcag

SEQ ID NO: 3202806 - RNA, 19 nt, Human
cagggucccugguggcagc

SEQ ID NO: 3202807 - RNA, 22 nt, Human
cagggucccugguggcagcuca

SEQ ID NO: 3202808 - RNA, 20 nt, Human
caggguauuccagagugggg

SEQ ID NO: 3202809 - RNA, 21 nt, Human
caggguauuccagagugggga

SEQ ID NO: 3202810 - RNA, 15 nt, Human
caggguacaaaaaau

SEQ ID NO: 3202811 - RNA, 12 nt, Human
cagggguuccuu

SEQ ID NO: 3202812 - RNA, 20 nt, Human
cagggguuccuucugggcau

SEQ ID NO: 3202813 - RNA, 19 nt, Human
cagggguuccuucugggca

SEQ ID NO: 3202814 - RNA, 21 nt, Human
cagggguuccuucugggcauu

SEQ ID NO: 3202815 - RNA, 16 nt, Human
cagggucucacucugu

SEQ ID NO: 3202816 - RNA, 16 nt, Human
caggguuuugccaugu

SEQ ID NO: 3202817 - RNA, 19 nt, Human
cagguaaagggcaaauaau

SEQ ID NO: 3202818 - RNA, 22 nt, Human
cagguaaagggcaaauaaugau

SEQ ID NO: 3202819 - RNA, 17 nt, Human
cagguaacaggcagaua

SEQ ID NO: 3202820 - RNA, 16 nt, Human
cagguaacaggcagau

SEQ ID NO: 3202821 - RNA, 15 nt, Human
cagguaacaggcaga

SEQ ID NO: 3202822 - RNA, 14 nt, Human
cagguaacaggcag

SEQ ID NO: 3202823 - RNA, 18 nt, Human
caggguccuguagcccua

SEQ ID NO: 3202824 - RNA, 23 nt, Human
cagggucccugguggcagcucac

SEQ ID NO: 3202825 - RNA, 15 nt, Human
cagggucucacucug

SEQ ID NO: 3202826 - RNA, 23 nt, Human
cagggucucacuauguugcccag

SEQ ID NO: 3202827 - RNA, 22 nt, Human
cagggucucacuauguugccca

SEQ ID NO: 3202828 - RNA, 21 nt, Human
cagggucucacuauguugccc

SEQ ID NO: 3202829 - RNA, 14 nt, Human
caggggugggacac

SEQ ID NO: 3202830 - RNA, 15 nt, Human
caggggugggacacc

SEQ ID NO: 3202831 - RNA, 20 nt, Human
caggggugggacacccugug

SEQ ID NO: 3202832 - RNA, 21 nt, Human
caggggugggacacccuguga

SEQ ID NO: 3202833 - RNA, 14 nt, Human
accaucucuuuacc

SEQ ID NO: 3202834 - RNA, 12 nt, Human
accauccccucc

SEQ ID NO: 3202835 - RNA, 17 nt, Human
accaucuuuuauucuuu

SEQ ID NO: 3202836 - RNA, 19 nt, Human
accaucuuuuauucuuuuu

SEQ ID NO: 3202837 - RNA, 20 nt, Human
accaucuuuuauucuuuuuu

SEQ ID NO: 3202838 - RNA, 13 nt, Human
accaucugcuguc

SEQ ID NO: 3202839 - RNA, 23 nt, Human
accaucauugaaaucuuuuugcu

SEQ ID NO: 3202840 - RNA, 15 nt, Human
accaucauugaaauc

SEQ ID NO: 3202841 - RNA, 12 nt, Human
accaucauugaa

SEQ ID NO: 3202842 - RNA, 15 nt, Human
accaucaagccacca

SEQ ID NO: 3202843 - RNA, 15 nt, Human
accaucacagcuugu

SEQ ID NO: 3202844 - RNA, 16 nt, Human
accaucacagcuuguu

SEQ ID NO: 3202845 - RNA, 14 nt, Human
accauaguugacag

SEQ ID NO: 3202846 - RNA, 14 nt, Human
accaucaagccacc

SEQ ID NO: 3202847 - RNA, 22 nt, Human
accauaguuacuguaaaaugca

SEQ ID NO: 3202848 - RNA, 18 nt, Human
accauaguuacuguaaaa

SEQ ID NO: 3202849 - RNA, 15 nt, Human
accauaguuacugua

SEQ ID NO: 3202850 - RNA, 19 nt, Human
accauaguguucauugaua

SEQ ID NO: 3202851 - RNA, 21 nt, Human
accauacuaauuauacccccu

SEQ ID NO: 3202852 - RNA, 17 nt, Human
accauaggucaccuuua

SEQ ID NO: 3202853 - RNA, 13 nt, Human
accauacuaauua

SEQ ID NO: 3202854 - RNA, 16 nt, Human
accauacuaauuauac

SEQ ID NO: 3202855 - RNA, 15 nt, Human
acccacccccaccca

SEQ ID NO: 3202856 - RNA, 12 nt, Human
acccaccacaca

SEQ ID NO: 3202857 - RNA, 17 nt, Human
acccacccccacccaag

SEQ ID NO: 3202858 - RNA, 17 nt, Human
accaugaagaacauaaa

SEQ ID NO: 3202859 - RNA, 15 nt, Human
accaucugcugucuu

SEQ ID NO: 3202860 - RNA, 14 nt, Human
accaucugcugucu

SEQ ID NO: 3202861 - RNA, 15 nt, Human
acccacccuccuuuc

SEQ ID NO: 3202862 - RNA, 21 nt, Human
acccacccuuucuacuuccaa

SEQ ID NO: 3202863 - RNA, 13 nt, Human
acccaugcugccc

SEQ ID NO: 3202864 - RNA, 20 nt, Human
acccauccaccguccccucc

SEQ ID NO: 3202865 - RNA, 13 nt, Human
acauuuagaaaag

SEQ ID NO: 3202866 - RNA, 16 nt, Human
acauuuagaaaaguga

SEQ ID NO: 3202867 - RNA, 17 nt, Human
acauuuagaaaagugaa

SEQ ID NO: 3202868 - RNA, 20 nt, Human
acauuuagaaaagugaauug

SEQ ID NO: 3202869 - RNA, 22 nt, Human
acauuuagaaaagugaauugaa

SEQ ID NO: 3202870 - RNA, 15 nt, Human
acauuuagaagaaag

SEQ ID NO: 3202871 - RNA, 16 nt, Human
acauuuagaagaaaga

SEQ ID NO: 3202872 - RNA, 18 nt, Human
acauuuagaagaaagaug

SEQ ID NO: 3202873 - RNA, 23 nt, Human
acaugucuuuucuugcaugaggc

SEQ ID NO: 3202874 - RNA, 18 nt, Human
acaugugaaaagaauaga

SEQ ID NO: 3202875 - RNA, 17 nt, Human
acaugugaaaagaauag

SEQ ID NO: 3202876 - RNA, 14 nt, Human
acaugugaaaagaa

SEQ ID NO: 3202877 - RNA, 19 nt, Human
acaugccucucucaggcca

SEQ ID NO: 3202878 - RNA, 21 nt, Human
accaaggcugagacagugaau

SEQ ID NO: 3202879 - RNA, 23 nt, Human
accaaggcugagacagugaauuu

SEQ ID NO: 3202880 - RNA, 16 nt, Human
accacccgguccccac

SEQ ID NO: 3202881 - RNA, 17 nt, Human
accacccgguccccacu

SEQ ID NO: 3202882 - RNA, 12 nt, Human
accaccugccca

SEQ ID NO: 3202883 - RNA, 14 nt, Human
accacccuccuucc

SEQ ID NO: 3202884 - RNA, 12 nt, Human
accacccuccuu

SEQ ID NO: 3202885 - RNA, 19 nt, Human
accaaggcugauuaaacca

SEQ ID NO: 3202886 - RNA, 23 nt, Human
acauuucuaagucaaacacuugu

SEQ ID NO: 3202887 - RNA, 19 nt, Human
acauuuccgccacaucccu

SEQ ID NO: 3202888 - RNA, 18 nt, Human
accaagaaaggaaccugu

SEQ ID NO: 3202889 - RNA, 12 nt, Human
accagcagagca

SEQ ID NO: 3202890 - RNA, 13 nt, Human
accagcagagcac

SEQ ID NO: 3202891 - RNA, 17 nt, Human
accagccccagugccca

SEQ ID NO: 3202892 - RNA, 16 nt, Human
accagccccagugccc

SEQ ID NO: 3202893 - RNA, 16 nt, Human
accagccccacccugu

SEQ ID NO: 3202894 - RNA, 19 nt, Human
accagccccagugcccaca

SEQ ID NO: 3202895 - RNA, 18 nt, Human
accagccccagugcccac

SEQ ID NO: 3202896 - RNA, 20 nt, Human
accagccccagugcccacag

SEQ ID NO: 3202897 - RNA, 21 nt, Human
acauaauuaacacuuaagguu

SEQ ID NO: 3202898 - RNA, 15 nt, Human
acauaagauaaaugu

SEQ ID NO: 3202899 - RNA, 12 nt, Human
acaucagcuuga

SEQ ID NO: 3202900 - RNA, 21 nt, Human
acaucagcuugaccaguauaa

SEQ ID NO: 3202901 - RNA, 20 nt, Human
acaucagguuaggcaguaua

SEQ ID NO: 3202902 - RNA, 20 nt, Human
acauaauucaggaagcagcu

SEQ ID NO: 3202903 - RNA, 13 nt, Human
acauaauucuuau

SEQ ID NO: 3202904 - RNA, 18 nt, Human
acauaauuuaguuguuuc

SEQ ID NO: 3202905 - RNA, 19 nt, Human
acauaauuuaguuguuucu

SEQ ID NO: 3202906 - RNA, 11 nt, Human
acauacaaaug

SEQ ID NO: 3202907 - RNA, 21 nt, Human
acauacaaaugcaucuuugau

SEQ ID NO: 3202908 - RNA, 16 nt, Human
acauaagauaaaugug

SEQ ID NO: 3202909 - RNA, 20 nt, Human
acaucaucuguaagcuguuu

SEQ ID NO: 3202910 - RNA, 19 nt, Human
acaucaucuguaagcuguu

SEQ ID NO: 3202911 - RNA, 13 nt, Human
acaucaucuguaa

SEQ ID NO: 3202912 - RNA, 18 nt, Human
acaucaucuguaagcugu

SEQ ID NO: 3202913 - RNA, 14 nt, Human
acaucaucuguaag

SEQ ID NO: 3202914 - RNA, 15 nt, Human
acauccuacaagaca

SEQ ID NO: 3202915 - RNA, 19 nt, Human
acauccggggccagcuccg

SEQ ID NO: 3202916 - RNA, 18 nt, Human
acauccggggccagcucc

SEQ ID NO: 3202917 - RNA, 15 nt, Human
acaugccaggggccu

SEQ ID NO: 3202918 - RNA, 15 nt, Human
acaugccucucucag

SEQ ID NO: 3202919 - RNA, 16 nt, Human
acaugccucucucagg

SEQ ID NO: 3202920 - RNA, 17 nt, Human
acaugccucucucaggc

SEQ ID NO: 3202921 - RNA, 18 nt, Human
acaugccucucucaggcc

SEQ ID NO: 3202922 - RNA, 21 nt, Human
acagugcaccugggacaggga

SEQ ID NO: 3202923 - RNA, 21 nt, Human
acagugauuaccagggacuga

SEQ ID NO: 3202924 - RNA, 20 nt, Human
acagugauuaccagggacug

SEQ ID NO: 3202925 - RNA, 23 nt, Human
acagugagucgaggacagggagg

SEQ ID NO: 3202926 - RNA, 18 nt, Human
acaguguaccauuaaaau

SEQ ID NO: 3202927 - RNA, 23 nt, Human
acaguguaccauuaaaauaugca

SEQ ID NO: 3202928 - RNA, 20 nt, Human
acaguguaccauuaaaauau

SEQ ID NO: 3202929 - RNA, 19 nt, Human
acaguguaccauuaaaaua

SEQ ID NO: 3202930 - RNA, 13 nt, Human
acagcucuguccu

SEQ ID NO: 3202931 - RNA, 23 nt, Human
acagcugagcacccagcucuguc

SEQ ID NO: 3202932 - RNA, 16 nt, Human
acagcucuguccuggg

SEQ ID NO: 3202933 - RNA, 23 nt, Human
acaggcaagcaccuccugccucg

SEQ ID NO: 3202934 - RNA, 20 nt, Human
acaggcaagcaccuccugcc

SEQ ID NO: 3202935 - RNA, 16 nt, Human
acagcugccugcagua

SEQ ID NO: 3202936 - RNA, 12 nt, Human
acagcugccugc

SEQ ID NO: 3202937 - RNA, 14 nt, Human
acagcucuguccug

SEQ ID NO: 3202938 - RNA, 18 nt, Human
acagcuccuucuguccua

SEQ ID NO: 3202939 - RNA, 16 nt, Human
acagcuccuucugucc

SEQ ID NO: 3202940 - RNA, 17 nt, Human
acagaggggguggccuc

SEQ ID NO: 3202941 - RNA, 18 nt, Human
acagaggggguggccucc

SEQ ID NO: 3202942 - RNA, 19 nt, Human
acagaggggguggccuccc

SEQ ID NO: 3202943 - RNA, 15 nt, Human
acagcuccuucuguc

SEQ ID NO: 3202944 - RNA, 19 nt, Human
acaggcaagcaccuccugc

SEQ ID NO: 3202945 - RNA, 13 nt, Human
acagggccuggcc

SEQ ID NO: 3202946 - RNA, 12 nt, Human
acagggccuggc

SEQ ID NO: 3202947 - RNA, 17 nt, Human
acagggccuggcccaug

SEQ ID NO: 3202948 - RNA, 16 nt, Human
acagggccuggcccau

SEQ ID NO: 3202949 - RNA, 15 nt, Human
acagggccuggccca

SEQ ID NO: 3202950 - RNA, 14 nt, Human
acagggccuggccc

SEQ ID NO: 3202951 - RNA, 19 nt, Human
acagggccuggcccaugua

SEQ ID NO: 3202952 - RNA, 13 nt, Human
acaggugcccgcc

SEQ ID NO: 3202953 - RNA, 18 nt, Human
acaggugauuaacuugga

SEQ ID NO: 3202954 - RNA, 23 nt, Human
acaggugugagucaccaagccca

SEQ ID NO: 3202955 - RNA, 22 nt, Human
acaggugugagucaccaagccc

SEQ ID NO: 3202956 - RNA, 19 nt, Human
acaggugugaaccaccaca

SEQ ID NO: 3202957 - RNA, 22 nt, Human
acagugagucgaggacagggag

SEQ ID NO: 3202958 - RNA, 18 nt, Human
acagguguuuauaucucc

SEQ ID NO: 3202959 - RNA, 20 nt, Human
acacguaaugaaacuuggau

SEQ ID NO: 3202960 - RNA, 15 nt, Human
acacgaauauugcug

SEQ ID NO: 3202961 - RNA, 21 nt, Human
acacgaauauugcugauggug

SEQ ID NO: 3202962 - RNA, 12 nt, Human
acacgaauauug

SEQ ID NO: 3202963 - RNA, 14 nt, Human
acacgaauauugcu

SEQ ID NO: 3202964 - RNA, 21 nt, Human
acacagcucuucuccaggcug

SEQ ID NO: 3202965 - RNA, 20 nt, Human
acacagcucuucuccaggcu

SEQ ID NO: 3202966 - RNA, 19 nt, Human
acacaaaaguuucucuuuu

SEQ ID NO: 3202967 - RNA, 19 nt, Human
acacagcucuucuccaggc

SEQ ID NO: 3202968 - RNA, 12 nt, Human
acacaaaaucaa

SEQ ID NO: 3202969 - RNA, 17 nt, Human
acacaaaacaaauccug

SEQ ID NO: 3202970 - RNA, 19 nt, Human
acaauuuuuauuucuuuua

SEQ ID NO: 3202971 - RNA, 21 nt, Human
acaauuuuuauuucuuuuacu

SEQ ID NO: 3202972 - RNA, 19 nt, Human
acaauucaaagaaucaccu

SEQ ID NO: 3202973 - RNA, 14 nt, Human
acaauucagcauua

SEQ ID NO: 3202974 - RNA, 13 nt, Human
acaauuccaugac

SEQ ID NO: 3202975 - RNA, 20 nt, Human
acaauuauuccaaaccaaau

SEQ ID NO: 3202976 - RNA, 21 nt, Human
acaauuauuccaaaccaaauu

SEQ ID NO: 3202977 - RNA, 22 nt, Human
acaauuauuccaaaccaaauuu

SEQ ID NO: 3202978 - RNA, 23 nt, Human
acaauuauaaacucauuuugcuu

SEQ ID NO: 3202979 - RNA, 12 nt, Human
acaauuauaaac

SEQ ID NO: 3202980 - RNA, 13 nt, Human
acaauuagauuuc

SEQ ID NO: 3202981 - RNA, 14 nt, Human
acaauuagauuucu

SEQ ID NO: 3202982 - RNA, 20 nt, Human
acaaggaugaucuaggaaga

SEQ ID NO: 3202983 - RNA, 16 nt, Human
acaaggauugcuacug

SEQ ID NO: 3202984 - RNA, 23 nt, Human
acagaggacaguauuugugggga

SEQ ID NO: 3202985 - RNA, 16 nt, Human
acagaggacacagaga

SEQ ID NO: 3202986 - RNA, 13 nt, Human
acagaggcagccc

SEQ ID NO: 3202987 - RNA, 21 nt, Human
acagaggaccagcacacuccc

SEQ ID NO: 3202988 - RNA, 20 nt, Human
acagaggaccagcacacucc

SEQ ID NO: 3202989 - RNA, 15 nt, Human
acagaggaccagcac

SEQ ID NO: 3202990 - RNA, 14 nt, Human
acagaggaccagca

SEQ ID NO: 3202991 - RNA, 12 nt, Human
acagaggaccag

SEQ ID NO: 3202992 - RNA, 21 nt, Human
acagaggccaugggccuccug

SEQ ID NO: 3202993 - RNA, 14 nt, Human
acagaggggguggc

SEQ ID NO: 3202994 - RNA, 17 nt, Human
acagaggccaugggccu

SEQ ID NO: 3202995 - RNA, 23 nt, Human
acagaggcagccccauucugccu

SEQ ID NO: 3202996 - RNA, 18 nt, Human
acagaaggcuccugcccc

SEQ ID NO: 3202997 - RNA, 16 nt, Human
acagaaggcuccugcc

SEQ ID NO: 3202998 - RNA, 19 nt, Human
acagaaggcuccugccccc

SEQ ID NO: 3202999 - RNA, 14 nt, Human
acagacaaagcgug

SEQ ID NO: 3203000 - RNA, 23 nt, Human
acagaaggggacugccaccuccc

SEQ ID NO: 3203001 - RNA, 22 nt, Human
acagaaggggacugccaccucc

SEQ ID NO: 3203002 - RNA, 17 nt, Human
acagaaggggacugcca

SEQ ID NO: 3203003 - RNA, 13 nt, Human
acagacaaagcgu

SEQ ID NO: 3203004 - RNA, 17 nt, Human
acacugugcugagucug

SEQ ID NO: 3203005 - RNA, 22 nt, Human
acacugugcugagucugaaggc

SEQ ID NO: 3203006 - RNA, 18 nt, Human
acacugugguagguguuu

SEQ ID NO: 3203007 - RNA, 20 nt, Human
acacugugguagguguuuga

SEQ ID NO: 3203008 - RNA, 20 nt, Human
acagaacucgguguccccac

SEQ ID NO: 3203009 - RNA, 19 nt, Human
acagaacucggugucccca

SEQ ID NO: 3203010 - RNA, 22 nt, Human
acagaacucgguguccccacca

SEQ ID NO: 3203011 - RNA, 23 nt, Human
aauuggguggggggcuucauaca

SEQ ID NO: 3203012 - RNA, 20 nt, Human
aauugguuaucaugggaaag

SEQ ID NO: 3203013 - RNA, 15 nt, Human
aauugguaccuugca

SEQ ID NO: 3203014 - RNA, 19 nt, Human
aauugguguaauggggcag

SEQ ID NO: 3203015 - RNA, 22 nt, Human
aauuggguggggggcuucauac

SEQ ID NO: 3203016 - RNA, 21 nt, Human
aauuggguggggggcuucaua

SEQ ID NO: 3203017 - RNA, 19 nt, Human
aaugucacaggcaggucca

SEQ ID NO: 3203018 - RNA, 16 nt, Human
aaugucacaggcaggu

SEQ ID NO: 3203019 - RNA, 12 nt, Human
aauuguaaggaa

SEQ ID NO: 3203020 - RNA, 11 nt, Human
aauuguaaaag

SEQ ID NO: 3203021 - RNA, 11 nt, Human
aauuguauuuu

SEQ ID NO: 3203022 - RNA, 12 nt, Human
aauuguauuuuu

SEQ ID NO: 3203023 - RNA, 14 nt, Human
aauuguauuuuugu

SEQ ID NO: 3203024 - RNA, 19 nt, Human
aauuguauuuuuguuguug

SEQ ID NO: 3203025 - RNA, 14 nt, Human
aauugugauguguc

SEQ ID NO: 3203026 - RNA, 15 nt, Human
aauugugaugugucc

SEQ ID NO: 3203027 - RNA, 11 nt, Human
aauugugaugu

SEQ ID NO: 3203028 - RNA, 15 nt, Human
aauugucuuuaaaaa

SEQ ID NO: 3203029 - RNA, 19 nt, Human
aauugucuuaauggaugaa

SEQ ID NO: 3203030 - RNA, 23 nt, Human
aauuuauugaggaaaaauaugug

SEQ ID NO: 3203031 - RNA, 22 nt, Human
aauuuauugaggaaaaauaugu

SEQ ID NO: 3203032 - RNA, 21 nt, Human
aauuuauugaggaaaaauaug

SEQ ID NO: 3203033 - RNA, 19 nt, Human
aauuuauugaggaaaaaua

SEQ ID NO: 3203034 - RNA, 20 nt, Human
aauuuauuuaugggauccug

SEQ ID NO: 3203035 - RNA, 12 nt, Human
aauuuauuucca

SEQ ID NO: 3203036 - RNA, 23 nt, Human
aauuuauuuccaauguuucaagc

SEQ ID NO: 3203037 - RNA, 20 nt, Human
aauuucagagagaaucaaga

SEQ ID NO: 3203038 - RNA, 21 nt, Human
aauuucacgucauaggaaguu

SEQ ID NO: 3203039 - RNA, 22 nt, Human
aauuucacgucauaggaaguua

SEQ ID NO: 3203040 - RNA, 18 nt, Human
aauuucacgauucauuuu

SEQ ID NO: 3203041 - RNA, 13 nt, Human
aauuucaagcuua

SEQ ID NO: 3203042 - RNA, 23 nt, Human
aauuucaacgccugccuuuggca

SEQ ID NO: 3203043 - RNA, 22 nt, Human
aauuucaagcuuauuuuggaga

SEQ ID NO: 3203044 - RNA, 20 nt, Human
aauuucaagcuuauuuugga

SEQ ID NO: 3203045 - RNA, 17 nt, Human
aauuucaagcuuauuuu

SEQ ID NO: 3203046 - RNA, 15 nt, Human
aauuucaagcuuauu

SEQ ID NO: 3203047 - RNA, 20 nt, Human
aauuuauuuuuaagaaagaa

SEQ ID NO: 3203048 - RNA, 19 nt, Human
aauuuauuuuuaagaaaga

SEQ ID NO: 3203049 - RNA, 19 nt, Human
aauuucgcuucuuagaaca

SEQ ID NO: 3203050 - RNA, 13 nt, Human
aauuucaguguaa

SEQ ID NO: 3203051 - RNA, 19 nt, Human
aauuucaguguaaagugug

SEQ ID NO: 3203052 - RNA, 16 nt, Human
aauuucaguaagauca

SEQ ID NO: 3203053 - RNA, 20 nt, Human
aauuuucagauuugcacaaa

SEQ ID NO: 3203054 - RNA, 18 nt, Human
aauuuucagauuugcaca

SEQ ID NO: 3203055 - RNA, 17 nt, Human
aauuuucagauuugcac

SEQ ID NO: 3203056 - RNA, 14 nt, Human
aauuuucagauuug

SEQ ID NO: 3203057 - RNA, 13 nt, Human
aauuuucagauuu

SEQ ID NO: 3203058 - RNA, 19 nt, Human
aauuuuauuuuaaaauuuc

SEQ ID NO: 3203059 - RNA, 22 nt, Human
aauuuuauuuuaaaauuucaua

SEQ ID NO: 3203060 - RNA, 10 nt, Human
aauuuucauu

SEQ ID NO: 3203061 - RNA, 13 nt, Human
aauuuucauuuua

SEQ ID NO: 3203062 - RNA, 12 nt, Human
aauuuucauuuu

SEQ ID NO: 3203063 - RNA, 19 nt, Human
aauuuucauuuuacaguua

SEQ ID NO: 3203064 - RNA, 16 nt, Human
aauuuucauuuuacag

SEQ ID NO: 3203065 - RNA, 15 nt, Human
aauuuucauuuuaca

SEQ ID NO: 3203066 - RNA, 13 nt, Human
acaaaaugaaacg

SEQ ID NO: 3203067 - RNA, 22 nt, Human
acaaaaugaaacgcaaccacca

SEQ ID NO: 3203068 - RNA, 23 nt, Human
acaaccuucauuuaaaaagguuu

SEQ ID NO: 3203069 - RNA, 15 nt, Human
acaagaaaugaaagc

SEQ ID NO: 3203070 - RNA, 16 nt, Human
acaagaaaugaaagca

SEQ ID NO: 3203071 - RNA, 13 nt, Human
acaagaaaugaaa

SEQ ID NO: 3203072 - RNA, 16 nt, Human
acaacccccagcuccc

SEQ ID NO: 3203073 - RNA, 20 nt, Human
acaaagaaccuaacauuuau

SEQ ID NO: 3203074 - RNA, 14 nt, Human
acaacccccagcuc

SEQ ID NO: 3203075 - RNA, 19 nt, Human
accgggccacagagaaagu

SEQ ID NO: 3203076 - RNA, 15 nt, Human
accgggccacagaga

SEQ ID NO: 3203077 - RNA, 14 nt, Human
accgugaggccaga

SEQ ID NO: 3203078 - RNA, 14 nt, Human
accgugaagauacu

SEQ ID NO: 3203079 - RNA, 15 nt, Human
accgucuacauuuca

SEQ ID NO: 3203080 - RNA, 16 nt, Human
accgucuacauuucac

SEQ ID NO: 3203081 - RNA, 15 nt, Human
accguccccucccag

SEQ ID NO: 3203082 - RNA, 18 nt, Human
accguccccucccaggga

SEQ ID NO: 3203083 - RNA, 16 nt, Human
accguccccucccagg

SEQ ID NO: 3203084 - RNA, 16 nt, Human
accguaaagguuuauu

SEQ ID NO: 3203085 - RNA, 22 nt, Human
accguaaagguuuauuuuucug

SEQ ID NO: 3203086 - RNA, 23 nt, Human
accguaaagguuuauuuuucugu

SEQ ID NO: 3203087 - RNA, 14 nt, Human
accggcuggccugg

SEQ ID NO: 3203088 - RNA, 15 nt, Human
accggcuggccuggc

SEQ ID NO: 3203089 - RNA, 17 nt, Human
accggcuggccuggccc

SEQ ID NO: 3203090 - RNA, 18 nt, Human
accggcuggccuggcccc

SEQ ID NO: 3203091 - RNA, 20 nt, Human
accgggcacucagaagacac

SEQ ID NO: 3203092 - RNA, 17 nt, Human
acccuguuaccauuuug

SEQ ID NO: 3203093 - RNA, 17 nt, Human
acccuguuuugagcccu

SEQ ID NO: 3203094 - RNA, 18 nt, Human
acccuguuuugagcccug

SEQ ID NO: 3203095 - RNA, 22 nt, Human
acccugugauggggcccugccu

SEQ ID NO: 3203096 - RNA, 23 nt, Human
accccaagcgcccuggcccccac

SEQ ID NO: 3203097 - RNA, 20 nt, Human
acccugugcagaagggagcu

SEQ ID NO: 3203098 - RNA, 16 nt, Human
accccacacacgccag

SEQ ID NO: 3203099 - RNA, 21 nt, Human
accccaagcgcccuggccccc

SEQ ID NO: 3203100 - RNA, 19 nt, Human
accccaagcgcccuggccc

SEQ ID NO: 3203101 - RNA, 16 nt, Human
accccaagcgcccugg

SEQ ID NO: 3203102 - RNA, 15 nt, Human
accccaagcgcccug

SEQ ID NO: 3203103 - RNA, 14 nt, Human
acccaugcugcccu

SEQ ID NO: 3203104 - RNA, 15 nt, Human
acccaugcugcccug

SEQ ID NO: 3203105 - RNA, 16 nt, Human
accgugaggccagaga

SEQ ID NO: 3203106 - RNA, 17 nt, Human
accgugaggccagagac

SEQ ID NO: 3203107 - RNA, 12 nt, Human
accucaggccug

SEQ ID NO: 3203108 - RNA, 13 nt, Human
accucaggccugg

SEQ ID NO: 3203109 - RNA, 14 nt, Human
accucaggccuggg

SEQ ID NO: 3203110 - RNA, 22 nt, Human
accucaggccugggggcugggc

SEQ ID NO: 3203111 - RNA, 22 nt, Human
accucagguaaucgaccugccu

SEQ ID NO: 3203112 - RNA, 18 nt, Human
accgugaagauacuuugu

SEQ ID NO: 3203113 - RNA, 19 nt, Human
accgugaagauacuuugua

SEQ ID NO: 3203114 - RNA, 20 nt, Human
accgugaagauacuuuguau

SEQ ID NO: 3203115 - RNA, 21 nt, Human
accgugaagauacuuuguauu

SEQ ID NO: 3203116 - RNA, 18 nt, Human
accucaggugagaagcag

SEQ ID NO: 3203117 - RNA, 23 nt, Human
accucagguaaucgaccugccuc

SEQ ID NO: 3203118 - RNA, 17 nt, Human
accugucuuuugggagu

SEQ ID NO: 3203119 - RNA, 15 nt, Human
accugucuuuuggga

SEQ ID NO: 3203120 - RNA, 22 nt, Human
accugccccuccucucugcccu

SEQ ID NO: 3203121 - RNA, 23 nt, Human
accugccccuccucucugcccua

SEQ ID NO: 3203122 - RNA, 11 nt, Human
accugccaggg

SEQ ID NO: 3203123 - RNA, 12 nt, Human
accugccaggga

SEQ ID NO: 3203124 - RNA, 13 nt, Human
accugccagggac

SEQ ID NO: 3203125 - RNA, 15 nt, Human
accugccagggacag

SEQ ID NO: 3203126 - RNA, 16 nt, Human
accugccagggacaga

SEQ ID NO: 3203127 - RNA, 18 nt, Human
accugccagggacagagg

SEQ ID NO: 3203128 - RNA, 22 nt, Human
acuaggugcccagaaugaggcu

SEQ ID NO: 3203129 - RNA, 14 nt, Human
acuauugagucuuc

SEQ ID NO: 3203130 - RNA, 16 nt, Human
acuauuguuagucucu

SEQ ID NO: 3203131 - RNA, 17 nt, Human
acuagggaagauaauau

SEQ ID NO: 3203132 - RNA, 16 nt, Human
acuaacuucuaaaacu

SEQ ID NO: 3203133 - RNA, 13 nt, Human
acuaacuucuaaa

SEQ ID NO: 3203134 - RNA, 23 nt, Human
acgucugacaggcaaugcuggcu

SEQ ID NO: 3203135 - RNA, 15 nt, Human
acgucugacaggcaa

SEQ ID NO: 3203136 - RNA, 16 nt, Human
acguggcaccuccucg

SEQ ID NO: 3203137 - RNA, 15 nt, Human
acguggcaccuccuc

SEQ ID NO: 3203138 - RNA, 14 nt, Human
acguggcaccuccu

SEQ ID NO: 3203139 - RNA, 13 nt, Human
acguggcaccucc

SEQ ID NO: 3203140 - RNA, 19 nt, Human
acggacgaaccuugaaaac

SEQ ID NO: 3203141 - RNA, 19 nt, Human
acggacacucaaaagcugg

SEQ ID NO: 3203142 - RNA, 15 nt, Human
acggaagagccuugc

SEQ ID NO: 3203143 - RNA, 16 nt, Human
acggaagagccuugcg

SEQ ID NO: 3203144 - RNA, 18 nt, Human
acgcuggagugcagugag

SEQ ID NO: 3203145 - RNA, 19 nt, Human
acgcuggagugcagugagc

SEQ ID NO: 3203146 - RNA, 11 nt, Human
accugugucuc

SEQ ID NO: 3203147 - RNA, 22 nt, Human
acugauuaguaagucuugccua

SEQ ID NO: 3203148 - RNA, 23 nt, Human
acugauuuuuuuuuccuucagug

SEQ ID NO: 3203149 - RNA, 14 nt, Human
acugauuucaguaa

SEQ ID NO: 3203150 - RNA, 21 nt, Human
acugauuuuuuuuuccuucag

SEQ ID NO: 3203151 - RNA, 22 nt, Human
acugauuuuuuuuuccuucagu

SEQ ID NO: 3203152 - RNA, 23 nt, Human
acugacauuguuggccaaagcca

SEQ ID NO: 3203153 - RNA, 22 nt, Human
acugacauuguuggccaaagcc

SEQ ID NO: 3203154 - RNA, 15 nt, Human
acugaaucuguacag

SEQ ID NO: 3203155 - RNA, 14 nt, Human
acugaaucuguaca

SEQ ID NO: 3203156 - RNA, 13 nt, Human
acugaaucuguac

SEQ ID NO: 3203157 - RNA, 20 nt, Human
acugaccagccuccaugcug

SEQ ID NO: 3203158 - RNA, 15 nt, Human
acugaccagccucca

SEQ ID NO: 3203159 - RNA, 13 nt, Human
acugaccagccuc

SEQ ID NO: 3203160 - RNA, 14 nt, Human
acugaccagacaag

SEQ ID NO: 3203161 - RNA, 13 nt, Human
acugaucucucgu

SEQ ID NO: 3203162 - RNA, 23 nt, Human
acugaccagccuccaugcugccu

SEQ ID NO: 3203163 - RNA, 22 nt, Human
acugauggcuaauguacugcau

SEQ ID NO: 3203164 - RNA, 12 nt, Human
acugauggaauu

SEQ ID NO: 3203165 - RNA, 21 nt, Human
acugauggaauuuuuuuguac

SEQ ID NO: 3203166 - RNA, 22 nt, Human
acugauggaauuuuuuuguacg

SEQ ID NO: 3203167 - RNA, 23 nt, Human
acugauggaauuuuuuuguacga

SEQ ID NO: 3203168 - RNA, 22 nt, Human
acugaugggcaacccccagccu

SEQ ID NO: 3203169 - RNA, 12 nt, Human
acugaugggcaa

SEQ ID NO: 3203170 - RNA, 21 nt, Human
acugaaguucugccucugaug

SEQ ID NO: 3203171 - RNA, 12 nt, Human
acugaaguuuga

SEQ ID NO: 3203172 - RNA, 18 nt, Human
acugaaguuugauaaaua

SEQ ID NO: 3203173 - RNA, 15 nt, Human
acugaaguuugauaa

SEQ ID NO: 3203174 - RNA, 23 nt, Human
acugaaguuugauaaauaguguu

SEQ ID NO: 3203175 - RNA, 22 nt, Human
acugaaguuugauaaauagugu

SEQ ID NO: 3203176 - RNA, 21 nt, Human
acugaaguuugauaaauagug

SEQ ID NO: 3203177 - RNA, 19 nt, Human
acugaaguuugauaaauag

SEQ ID NO: 3203178 - RNA, 15 nt, Human
acucugucucagucc

SEQ ID NO: 3203179 - RNA, 19 nt, Human
acucugugucagguggggc

SEQ ID NO: 3203180 - RNA, 21 nt, Human
acucugugucagguggggcag

SEQ ID NO: 3203181 - RNA, 19 nt, Human
acucugucucaaaaaaaca

SEQ ID NO: 3203182 - RNA, 21 nt, Human
acucuacuuagcaugucccua

SEQ ID NO: 3203183 - RNA, 20 nt, Human
acucuacuuagcaugucccu

SEQ ID NO: 3203184 - RNA, 23 nt, Human
acucuaaguuuuaggguacaugu

SEQ ID NO: 3203185 - RNA, 23 nt, Human
acucuaaguguuugcugcaauuu

SEQ ID NO: 3203186 - RNA, 14 nt, Human
acucuaagauguua

SEQ ID NO: 3203187 - RNA, 13 nt, Human
acucuaagauguu

SEQ ID NO: 3203188 - RNA, 16 nt, Human
acucuaaguguuugcu

SEQ ID NO: 3203189 - RNA, 19 nt, Human
acucuaagauguuauauuu

SEQ ID NO: 3203190 - RNA, 14 nt, Human
acucuaacuguaua

SEQ ID NO: 3203191 - RNA, 15 nt, Human
acucuaacuguauau

SEQ ID NO: 3203192 - RNA, 18 nt, Human
acucuaacuguauauuug

SEQ ID NO: 3203193 - RNA, 21 nt, Human
acucuaacuguauauuuguau

SEQ ID NO: 3203194 - RNA, 14 nt, Human
acucuaaagucugu

SEQ ID NO: 3203195 - RNA, 21 nt, Human
acuauuuuuauuuuuaaauua

SEQ ID NO: 3203196 - RNA, 16 nt, Human
acuauuuuuauuuuua

SEQ ID NO: 3203197 - RNA, 15 nt, Human
acugcccggcagggu

SEQ ID NO: 3203198 - RNA, 18 nt, Human
acugccagucccccugcc

SEQ ID NO: 3203199 - RNA, 19 nt, Human
acugccagucccccugccc

SEQ ID NO: 3203200 - RNA, 16 nt, Human
acugcuuuuggucugu

SEQ ID NO: 3203201 - RNA, 15 nt, Human
acugcuuuuggucug

SEQ ID NO: 3203202 - RNA, 14 nt, Human
acugcuuuuggucu

SEQ ID NO: 3203203 - RNA, 22 nt, Human
acugcccggcaggguccuagaa

SEQ ID NO: 3203204 - RNA, 12 nt, Human
acuuuaugcuaa

SEQ ID NO: 3203205 - RNA, 17 nt, Human
acuuuaugcuaagugaa

SEQ ID NO: 3203206 - RNA, 22 nt, Human
acuuucaggccacauggcuaaa

SEQ ID NO: 3203207 - RNA, 16 nt, Human
acuuucacuauaaugu

SEQ ID NO: 3203208 - RNA, 20 nt, Human
acuuucacuauaaugugaaa

SEQ ID NO: 3203209 - RNA, 21 nt, Human
acuuucacuauaaugugaaau

SEQ ID NO: 3203210 - RNA, 23 nt, Human
acuuucacuauaaugugaaaugu

SEQ ID NO: 3203211 - RNA, 21 nt, Human
acuuucaaaguggaugcaauu

SEQ ID NO: 3203212 - RNA, 16 nt, Human
acuuucaagaacuugu

SEQ ID NO: 3203213 - RNA, 19 nt, Human
acuuucaagaacuuguuua

SEQ ID NO: 3203214 - RNA, 22 nt, Human
acuugggaggcugagaugggag

SEQ ID NO: 3203215 - RNA, 20 nt, Human
acuucugccauauucuguug

SEQ ID NO: 3203216 - RNA, 19 nt, Human
acuucugccauauucuguu

SEQ ID NO: 3203217 - RNA, 17 nt, Human
acuucuuauacauuuga

SEQ ID NO: 3203218 - RNA, 14 nt, Human
acuuggcucugagg

SEQ ID NO: 3203219 - RNA, 15 nt, Human
acuucuguuuagucu

SEQ ID NO: 3203220 - RNA, 12 nt, Human
acuucuguuuca

SEQ ID NO: 3203221 - RNA, 15 nt, Human
acuucuguuuucaau

SEQ ID NO: 3203222 - RNA, 14 nt, Human
acuucuguuuucaa

SEQ ID NO: 3203223 - RNA, 23 nt, Human
acuucuguuuucaaucucguaua

SEQ ID NO: 3203224 - RNA, 22 nt, Human
acuucuguuuucaaucucguau

SEQ ID NO: 3203225 - RNA, 17 nt, Human
acuucuguuuucaaucu

SEQ ID NO: 3203226 - RNA, 16 nt, Human
acuucuguuuucaauc

SEQ ID NO: 3203227 - RNA, 23 nt, Human
acuucugccugaggggcagccug

SEQ ID NO: 3203228 - RNA, 13 nt, Human
acuuaaaaauggu

SEQ ID NO: 3203229 - RNA, 14 nt, Human
acuuaaaaaugguu

SEQ ID NO: 3203230 - RNA, 20 nt, Human
acuuaaaauauuccugcauu

SEQ ID NO: 3203231 - RNA, 19 nt, Human
acuuaaagggcccaaugaa

SEQ ID NO: 3203232 - RNA, 21 nt, Human
acuuaaagggcccaaugaauu

SEQ ID NO: 3203233 - RNA, 22 nt, Human
acuuaaaauauuccugcauuug

SEQ ID NO: 3203234 - RNA, 18 nt, Human
aagagaagggcagggcug

SEQ ID NO: 3203235 - RNA, 16 nt, Human
aagacuuuggaaagac

SEQ ID NO: 3203236 - RNA, 20 nt, Human
aagagagaaagcauauugac

SEQ ID NO: 3203237 - RNA, 18 nt, Human
aagagacagagacaagua

SEQ ID NO: 3203238 - RNA, 22 nt, Human
aagagacagagacaaguaauuu

SEQ ID NO: 3203239 - RNA, 14 nt, Human
aagagacaggcagg

SEQ ID NO: 3203240 - RNA, 17 nt, Human
aagagacaauuucugca

SEQ ID NO: 3203241 - RNA, 16 nt, Human
aagacuuuggaaagag

SEQ ID NO: 3203242 - RNA, 19 nt, Human
aagacaggagagauuauuu

SEQ ID NO: 3203243 - RNA, 22 nt, Human
aagacaggagagauuauuuaca

SEQ ID NO: 3203244 - RNA, 19 nt, Human
aacuguuguauaaauuuau

SEQ ID NO: 3203245 - RNA, 22 nt, Human
aacuuacaggugauuaacuugg

SEQ ID NO: 3203246 - RNA, 20 nt, Human
aacuuacauauuuauuuuua

SEQ ID NO: 3203247 - RNA, 13 nt, Human
aacuguuguauaa

SEQ ID NO: 3203248 - RNA, 15 nt, Human
aacuguuguauaaau

SEQ ID NO: 3203249 - RNA, 14 nt, Human
aacuguuguauaaa

SEQ ID NO: 3203250 - RNA, 23 nt, Human
aacuuacccuguauaucagggua

SEQ ID NO: 3203251 - RNA, 21 nt, Human
aagacagcccgauccuccccu

SEQ ID NO: 3203252 - RNA, 16 nt, Human
aagacagcauuugugu

SEQ ID NO: 3203253 - RNA, 20 nt, Human
aacuuagacucuaguauuua

SEQ ID NO: 3203254 - RNA, 15 nt, Human
aacuuagagcuuuuu

SEQ ID NO: 3203255 - RNA, 19 nt, Human
aagauuuugaaauuuuuau

SEQ ID NO: 3203256 - RNA, 23 nt, Human
aagauuuugaucucacauuuuua

SEQ ID NO: 3203257 - RNA, 21 nt, Human
aagauuuugaucucacauuuu

SEQ ID NO: 3203258 - RNA, 20 nt, Human
aagauuuugaucucacauuu

SEQ ID NO: 3203259 - RNA, 13 nt, Human
aagauuuugaucu

SEQ ID NO: 3203260 - RNA, 15 nt, Human
aagcagggacuugaa

SEQ ID NO: 3203261 - RNA, 21 nt, Human
aagcagaggaaggagaggaga

SEQ ID NO: 3203262 - RNA, 15 nt, Human
aagcagaauuggaaa

SEQ ID NO: 3203263 - RNA, 14 nt, Human
aagcagaauuggaa

SEQ ID NO: 3203264 - RNA, 19 nt, Human
aagccaccaacauacuccc

SEQ ID NO: 3203265 - RNA, 18 nt, Human
aagcagguuaaauguuuu

SEQ ID NO: 3203266 - RNA, 17 nt, Human
aagcagguuaaauguuu

SEQ ID NO: 3203267 - RNA, 16 nt, Human
aagcagguuaaauguu

SEQ ID NO: 3203268 - RNA, 15 nt, Human
aagcagguuaaaugu

SEQ ID NO: 3203269 - RNA, 14 nt, Human
aagcagguuaaaug

SEQ ID NO: 3203270 - RNA, 20 nt, Human
aagauucauauuuacuucuu

SEQ ID NO: 3203271 - RNA, 17 nt, Human
aagauucuugguauuug

SEQ ID NO: 3203272 - RNA, 14 nt, Human
aagauucuuuuaaa

SEQ ID NO: 3203273 - RNA, 16 nt, Human
aagauucuuuuaaauu

SEQ ID NO: 3203274 - RNA, 17 nt, Human
aagauucuuuuaaauua

SEQ ID NO: 3203275 - RNA, 20 nt, Human
aagauucuuuuaaauuagaa

SEQ ID NO: 3203276 - RNA, 17 nt, Human
aagauugauguuuccuu

SEQ ID NO: 3203277 - RNA, 12 nt, Human
aagauacuuugu

SEQ ID NO: 3203278 - RNA, 13 nt, Human
aagauacuuugua

SEQ ID NO: 3203279 - RNA, 12 nt, Human
aagauacuguuu

SEQ ID NO: 3203280 - RNA, 17 nt, Human
aagauucaaucccagga

SEQ ID NO: 3203281 - RNA, 20 nt, Human
aagauuauaauuguugcaua

SEQ ID NO: 3203282 - RNA, 19 nt, Human
aagauuauaauuguugcau

SEQ ID NO: 3203283 - RNA, 14 nt, Human
aagauuauaauugu

SEQ ID NO: 3203284 - RNA, 14 nt, Human
aagauacuuuguau

SEQ ID NO: 3203285 - RNA, 16 nt, Human
aagauacuuuguauug

SEQ ID NO: 3203286 - RNA, 19 nt, Human
aagauagaguaaaaagaaa

SEQ ID NO: 3203287 - RNA, 17 nt, Human
aagauagaguaaaaaga

SEQ ID NO: 3203288 - RNA, 18 nt, Human
aagggacgcuacccggga

SEQ ID NO: 3203289 - RNA, 17 nt, Human
aagggacugauguuugu

SEQ ID NO: 3203290 - RNA, 20 nt, Human
aagggacuuggaagcuccgc

SEQ ID NO: 3203291 - RNA, 15 nt, Human
aagggaguuuaaaaa

SEQ ID NO: 3203292 - RNA, 18 nt, Human
aagggaguuuaaaaaugg

SEQ ID NO: 3203293 - RNA, 15 nt, Human
aagggaguuuuugau

SEQ ID NO: 3203294 - RNA, 17 nt, Human
aagggaugaauuguaaa

SEQ ID NO: 3203295 - RNA, 16 nt, Human
aagggauguauuugua

SEQ ID NO: 3203296 - RNA, 17 nt, Human
aagggauggcaagaugu

SEQ ID NO: 3203297 - RNA, 14 nt, Human
aagggauggcaaga

SEQ ID NO: 3203298 - RNA, 15 nt, Human
aagggcaaauaauga

SEQ ID NO: 3203299 - RNA, 16 nt, Human
aagggcacauagaaag

SEQ ID NO: 3203300 - RNA, 13 nt, Human
aagggcagaguua

SEQ ID NO: 3203301 - RNA, 18 nt, Human
aagggcagaaguagggga

SEQ ID NO: 3203302 - RNA, 19 nt, Human
aagggcagaguuacuugau

SEQ ID NO: 3203303 - RNA, 14 nt, Human
aagggcagggacag

SEQ ID NO: 3203304 - RNA, 12 nt, Human
aaguagaggagg

SEQ ID NO: 3203305 - RNA, 19 nt, Human
aaguagacuacuguucagc

SEQ ID NO: 3203306 - RNA, 14 nt, Human
aaguagcacaggcu

SEQ ID NO: 3203307 - RNA, 21 nt, Human
aaguagcaaaugagacagcag

SEQ ID NO: 3203308 - RNA, 13 nt, Human
aaguagauuucau

SEQ ID NO: 3203309 - RNA, 14 nt, Human
aaguagauuucaug

SEQ ID NO: 3203310 - RNA, 22 nt, Human
aaguagccaccugaguuccuga

SEQ ID NO: 3203311 - RNA, 16 nt, Human
aaguagcacaggcuga

SEQ ID NO: 3203312 - RNA, 15 nt, Human
aaguagcacaggcug

SEQ ID NO: 3203313 - RNA, 12 nt, Human
aagguguuugaa

SEQ ID NO: 3203314 - RNA, 17 nt, Human
aaggucuguuugcuguu

SEQ ID NO: 3203315 - RNA, 14 nt, Human
aaggucuguuuuga

SEQ ID NO: 3203316 - RNA, 18 nt, Human
aaggucuguuugcuguug

SEQ ID NO: 3203317 - RNA, 22 nt, Human
aaggucuugcauuuaaaagaca

SEQ ID NO: 3203318 - RNA, 16 nt, Human
aaggucuguuuugagu

SEQ ID NO: 3203319 - RNA, 19 nt, Human
aaggaauuuugcuaaguaa

SEQ ID NO: 3203320 - RNA, 22 nt, Human
aaggacccggaggggccuggca

SEQ ID NO: 3203321 - RNA, 13 nt, Human
aaggacuaggguc

SEQ ID NO: 3203322 - RNA, 24 nt, Human
aaggaccuucacucuaagauguua

SEQ ID NO: 3203323 - RNA, 15 nt, Human
aaggaccuaaaaauu

SEQ ID NO: 3203324 - RNA, 21 nt, Human
aaggacccggaggggccuggc

SEQ ID NO: 3203325 - RNA, 23 nt, Human
aaggaccuucacucuaagauguu

SEQ ID NO: 3203326 - RNA, 22 nt, Human
aaggaccuucacucuaagaugu

SEQ ID NO: 3203327 - RNA, 21 nt, Human
aaggaccuucacucuaagaug

SEQ ID NO: 3203328 - RNA, 20 nt, Human
aaggaccuucacucuaagau

SEQ ID NO: 3203329 - RNA, 22 nt, Human
aaggcaaaccuuucuauaauuu

SEQ ID NO: 3203330 - RNA, 15 nt, Human
aaggcaaacauuuga

SEQ ID NO: 3203331 - RNA, 13 nt, Human
aaggcagagaaau

SEQ ID NO: 3203332 - RNA, 15 nt, Human
aaggcagagaaaucu

SEQ ID NO: 3203333 - RNA, 22 nt, Human
aaggcagagaaaucuaagcugu

SEQ ID NO: 3203334 - RNA, 19 nt, Human
aaggcagaaagcaaaauua

SEQ ID NO: 3203335 - RNA, 17 nt, Human
aaggcagaaagcaaaau

SEQ ID NO: 3203336 - RNA, 16 nt, Human
aaggcagaaagcaaaa

SEQ ID NO: 3203337 - RNA, 15 nt, Human
aaggcagaaagcaaa

SEQ ID NO: 3203338 - RNA, 23 nt, Human
aaggaaucuagccagugaacaua

SEQ ID NO: 3203339 - RNA, 18 nt, Human
aaggaaucuagccaguga

SEQ ID NO: 3203340 - RNA, 23 nt, Human
aaggaaugauuaauuaaaacaca

SEQ ID NO: 3203341 - RNA, 21 nt, Human
aaggaauaugggagaaauagu

SEQ ID NO: 3203342 - RNA, 16 nt, Human
aagcugcugacagugu

SEQ ID NO: 3203343 - RNA, 13 nt, Human
aagcugcugugau

SEQ ID NO: 3203344 - RNA, 11 nt, Human
aagcugccagc

SEQ ID NO: 3203345 - RNA, 12 nt, Human
aagcugccagcc

SEQ ID NO: 3203346 - RNA, 22 nt, Human
aagcugccagccgagauagcca

SEQ ID NO: 3203347 - RNA, 14 nt, Human
aagcugcugacagu

SEQ ID NO: 3203348 - RNA, 20 nt, Human
aagcgugagccacugcaccg

SEQ ID NO: 3203349 - RNA, 17 nt, Human
aagcgugagccacugca

SEQ ID NO: 3203350 - RNA, 16 nt, Human
aagccacccaaagcag

SEQ ID NO: 3203351 - RNA, 21 nt, Human
aagccaccaacauacucccau

SEQ ID NO: 3203352 - RNA, 14 nt, Human
aagccaccagaugu

SEQ ID NO: 3203353 - RNA, 14 nt, Human
aagccaccaacagc

SEQ ID NO: 3203354 - RNA, 21 nt, Human
aagcagguuaaauguuuugua

SEQ ID NO: 3203355 - RNA, 20 nt, Human
aagcagguuaaauguuuugu

SEQ ID NO: 3203356 - RNA, 15 nt, Human
aagccagcaggcucu

SEQ ID NO: 3203357 - RNA, 18 nt, Human
aagccagcaggcucucag

SEQ ID NO: 3203358 - RNA, 16 nt, Human
aagcgauucuucugcu

SEQ ID NO: 3203359 - RNA, 16 nt, Human
aagcgugagccacugc

SEQ ID NO: 3203360 - RNA, 14 nt, Human
aagcgauucuucug

SEQ ID NO: 3203361 - RNA, 15 nt, Human
aagcgauucuucugc

SEQ ID NO: 3203362 - RNA, 18 nt, Human
aauccaaccauuuucauu

SEQ ID NO: 3203363 - RNA, 16 nt, Human
aauccaaauauuguua

SEQ ID NO: 3203364 - RNA, 14 nt, Human
aauccaaauauugu

SEQ ID NO: 3203365 - RNA, 16 nt, Human
aauccaaaagaaaaac

SEQ ID NO: 3203366 - RNA, 15 nt, Human
aauccaaaagaaaaa

SEQ ID NO: 3203367 - RNA, 18 nt, Human
aauccacauguuucagag

SEQ ID NO: 3203368 - RNA, 21 nt, Human
aauccaaauauuguuaaggga

SEQ ID NO: 3203369 - RNA, 20 nt, Human
aauccagaaacuuguucuuc

SEQ ID NO: 3203370 - RNA, 19 nt, Human
aauccagaaacuuguucuu

SEQ ID NO: 3203371 - RNA, 19 nt, Human
aauccaucagugccaaacu

SEQ ID NO: 3203372 - RNA, 23 nt, Human
aaucucgcucugucgcccaggcu

SEQ ID NO: 3203373 - RNA, 18 nt, Human
aaucucggcucacugcau

SEQ ID NO: 3203374 - RNA, 20 nt, Human
aaucucguauagaagucuuc

SEQ ID NO: 3203375 - RNA, 19 nt, Human
aaucucguauagaagucuu

SEQ ID NO: 3203376 - RNA, 16 nt, Human
aaucuggacuccucug

SEQ ID NO: 3203377 - RNA, 15 nt, Human
aaucuggacuccucu

SEQ ID NO: 3203378 - RNA, 24 nt, Human
aaucuggaccccaucugugaauaa

SEQ ID NO: 3203379 - RNA, 23 nt, Human
aaucuggaccccaucugugaaua

SEQ ID NO: 3203380 - RNA, 18 nt, Human
aaucuggacuccucuguc

SEQ ID NO: 3203381 - RNA, 17 nt, Human
aaucuggacuccucugu

SEQ ID NO: 3203382 - RNA, 20 nt, Human
aaucuggacuccucugucca

SEQ ID NO: 3203383 - RNA, 14 nt, Human
aaugaaauguaugc

SEQ ID NO: 3203384 - RNA, 20 nt, Human
aaugaacacaaauuaugcua

SEQ ID NO: 3203385 - RNA, 17 nt, Human
aaugaacacaaauuaug

SEQ ID NO: 3203386 - RNA, 14 nt, Human
aaugaacacaaauu

SEQ ID NO: 3203387 - RNA, 21 nt, Human
aaugaacaagcauucucucca

SEQ ID NO: 3203388 - RNA, 15 nt, Human
aaugaacaagcauuc

SEQ ID NO: 3203389 - RNA, 14 nt, Human
aaugaacaaaauua

SEQ ID NO: 3203390 - RNA, 16 nt, Human
aaugaacaaaauuauu

SEQ ID NO: 3203391 - RNA, 17 nt, Human
aaugaacaaaauuauuu

SEQ ID NO: 3203392 - RNA, 16 nt, Human
aaugaacaaagaccaa

SEQ ID NO: 3203393 - RNA, 12 nt, Human
aaugauuaauua

SEQ ID NO: 3203394 - RNA, 13 nt, Human
aaugauuaauuaa

SEQ ID NO: 3203395 - RNA, 19 nt, Human
aaugaugugccugcuucag

SEQ ID NO: 3203396 - RNA, 15 nt, Human
aaugauagcuacugu

SEQ ID NO: 3203397 - RNA, 23 nt, Human
aaugauauacugaucuucauuac

SEQ ID NO: 3203398 - RNA, 17 nt, Human
aaugauaugcuuguaac

SEQ ID NO: 3203399 - RNA, 15 nt, Human
aaugauaugcuugua

SEQ ID NO: 3203400 - RNA, 20 nt, Human
aaugauguauguugaagccu

SEQ ID NO: 3203401 - RNA, 18 nt, Human
aaugauaugcuuguaacu

SEQ ID NO: 3203402 - RNA, 19 nt, Human
aaugauaugcuuguaacua

SEQ ID NO: 3203403 - RNA, 14 nt, Human
aaugauauugcuga

SEQ ID NO: 3203404 - RNA, 16 nt, Human
aaugauauugcugaag

SEQ ID NO: 3203405 - RNA, 22 nt, Human
aaugauauugcugaagaaucua

SEQ ID NO: 3203406 - RNA, 23 nt, Human
aaugauguauguugaagccuuug

SEQ ID NO: 3203407 - RNA, 22 nt, Human
aaucauuucugcaucagcugcu

SEQ ID NO: 3203408 - RNA, 11 nt, Human
aaucauuuguu

SEQ ID NO: 3203409 - RNA, 19 nt, Human
aaucauuuuuuauauauau

SEQ ID NO: 3203410 - RNA, 18 nt, Human
aaucauuuuuuauauaua

SEQ ID NO: 3203411 - RNA, 24 nt, Human
aaucauuuuuuauauauaugcaua

SEQ ID NO: 3203412 - RNA, 23 nt, Human
aaucauuuuuuauauauaugcau

SEQ ID NO: 3203413 - RNA, 22 nt, Human
aaucauuuuuuauauauaugca

SEQ ID NO: 3203414 - RNA, 21 nt, Human
aaucauuuuuuauauauaugc

SEQ ID NO: 3203415 - RNA, 18 nt, Human
aaucauuuguucaaagcu

SEQ ID NO: 3203416 - RNA, 22 nt, Human
aaucaaauaugcaaagcacuga

SEQ ID NO: 3203417 - RNA, 13 nt, Human
aaucaaauaauac

SEQ ID NO: 3203418 - RNA, 21 nt, Human
aaucaaauaauaccuuagaag

SEQ ID NO: 3203419 - RNA, 16 nt, Human
aaucaaauaauaccuu

SEQ ID NO: 3203420 - RNA, 13 nt, Human
aaucaaauguaaa

SEQ ID NO: 3203421 - RNA, 16 nt, Human
aaucaaauaugcaaag

SEQ ID NO: 3203422 - RNA, 15 nt, Human
aaucaaauaugcaaa

SEQ ID NO: 3203423 - RNA, 15 nt, Human
aaucaaauguaaagu

SEQ ID NO: 3203424 - RNA, 14 nt, Human
aaucaaauguaaag

SEQ ID NO: 3203425 - RNA, 15 nt, Human
aaugucacaggcagg

SEQ ID NO: 3203426 - RNA, 16 nt, Human
aaugguaucaaaauua

SEQ ID NO: 3203427 - RNA, 18 nt, Human
aaugguaucaaaauuaca

SEQ ID NO: 3203428 - RNA, 23 nt, Human
aaugcucuuuacuucauggacuu

SEQ ID NO: 3203429 - RNA, 14 nt, Human
aaugggagcucaug

SEQ ID NO: 3203430 - RNA, 13 nt, Human
aaugggacacuaa

SEQ ID NO: 3203431 - RNA, 21 nt, Human
aaugggaggggaaaugggaau

SEQ ID NO: 3203432 - RNA, 15 nt, Human
aaugcuagaaaaauu

SEQ ID NO: 3203433 - RNA, 17 nt, Human
aaugcgcaggcuggccc

SEQ ID NO: 3203434 - RNA, 18 nt, Human
aaugcgcaggcuggcccu

SEQ ID NO: 3203435 - RNA, 19 nt, Human
aaugcgcaggcuggcccug

SEQ ID NO: 3203436 - RNA, 20 nt, Human
aaugcgcaggcuggcccugc

SEQ ID NO: 3203437 - RNA, 15 nt, Human
aaugcgcaggcuggc

SEQ ID NO: 3203438 - RNA, 14 nt, Human
aaugcgcaggcugg

SEQ ID NO: 3203439 - RNA, 23 nt, Human
aaugccucuggcucuacacauau

SEQ ID NO: 3203440 - RNA, 13 nt, Human
aaugccugcuuuu

SEQ ID NO: 3203441 - RNA, 17 nt, Human
aaugccugcuuuuugga

SEQ ID NO: 3203442 - RNA, 19 nt, Human
aaugccugcuuuuuggaaa

SEQ ID NO: 3203443 - RNA, 16 nt, Human
aaugccucuugucuuc

SEQ ID NO: 3203444 - RNA, 15 nt, Human
aaugccuauuguaau

SEQ ID NO: 3203445 - RNA, 17 nt, Human
aaugccuauuguaauau

SEQ ID NO: 3203446 - RNA, 20 nt, Human
aaugccucuccuuaaaugcu

SEQ ID NO: 3203447 - RNA, 22 nt, Human
aaugccucuccuuaaaugcuuc

SEQ ID NO: 3203448 - RNA, 21 nt, Human
aaugccgcccucccagcucug

SEQ ID NO: 3203449 - RNA, 21 nt, Human
aauaaagccuugugaucacuu

SEQ ID NO: 3203450 - RNA, 10 nt, Human
aauaaaccau

SEQ ID NO: 3203451 - RNA, 18 nt, Human
aaguugauggugaugaaa

SEQ ID NO: 3203452 - RNA, 15 nt, Human
aaguugaucucccca

SEQ ID NO: 3203453 - RNA, 17 nt, Human
aaguugaucuccccagc

SEQ ID NO: 3203454 - RNA, 15 nt, Human
aaguucuuugauucu

SEQ ID NO: 3203455 - RNA, 14 nt, Human
aaguucuuugauuc

SEQ ID NO: 3203456 - RNA, 22 nt, Human
aaguucugccucugauguauuu

SEQ ID NO: 3203457 - RNA, 17 nt, Human
aaguucugccucugaug

SEQ ID NO: 3203458 - RNA, 16 nt, Human
aaguucugccucugau

SEQ ID NO: 3203459 - RNA, 15 nt, Human
aaguucugccucuga

SEQ ID NO: 3203460 - RNA, 17 nt, Human
aaguucugcagauaaac

SEQ ID NO: 3203461 - RNA, 15 nt, Human
aaguggggacagagc

SEQ ID NO: 3203462 - RNA, 13 nt, Human
aagugcuauuacg

SEQ ID NO: 3203463 - RNA, 18 nt, Human
aagugcuauuacgaaguu

SEQ ID NO: 3203464 - RNA, 15 nt, Human
aaguauaaacuuuua

SEQ ID NO: 3203465 - RNA, 15 nt, Human
aaguauaaauuugug

SEQ ID NO: 3203466 - RNA, 16 nt, Human
aaguauaaauuugugu

SEQ ID NO: 3203467 - RNA, 18 nt, Human
aaguauaaauuuguguaa

SEQ ID NO: 3203468 - RNA, 20 nt, Human
aaguauaaauuuguguaaua

SEQ ID NO: 3203469 - RNA, 21 nt, Human
aaguauaaauuuguguaauau

SEQ ID NO: 3203470 - RNA, 13 nt, Human
aaguauaauguuu

SEQ ID NO: 3203471 - RNA, 20 nt, Human
aaguauaauguuuauuaaau

SEQ ID NO: 3203472 - RNA, 22 nt, Human
aaguauaauguuuauuaaaugc

SEQ ID NO: 3203473 - RNA, 23 nt, Human
aaguagugucuggaucaguaaaa

SEQ ID NO: 3203474 - RNA, 14 nt, Human
aaguaguucuguau

SEQ ID NO: 3203475 - RNA, 23 nt, Human
aaguaguucuguauuugaaagug

SEQ ID NO: 3203476 - RNA, 21 nt, Human
aaguaguucuguauuugaaag

SEQ ID NO: 3203477 - RNA, 22 nt, Human
aaguaguucuguauuugaaagu

SEQ ID NO: 3203478 - RNA, 16 nt, Human
aaguaguucuguauuu

SEQ ID NO: 3203479 - RNA, 19 nt, Human
aaguaguucuguauuugaa

SEQ ID NO: 3203480 - RNA, 20 nt, Human
aaguaguucuguauuugaaa

SEQ ID NO: 3203481 - RNA, 19 nt, Human
aauaauguuaacauggaca

SEQ ID NO: 3203482 - RNA, 20 nt, Human
aauaauauguuuccuucccu

SEQ ID NO: 3203483 - RNA, 17 nt, Human
aauaaagcgaaaaacuc

SEQ ID NO: 3203484 - RNA, 15 nt, Human
aauaauaccuuagaa

SEQ ID NO: 3203485 - RNA, 18 nt, Human
aauaauagauugugaaua

SEQ ID NO: 3203486 - RNA, 16 nt, Human
aauaauaccuuagaag

SEQ ID NO: 3203487 - RNA, 17 nt, Human
aauaugcuuauaaccua

SEQ ID NO: 3203488 - RNA, 12 nt, Human
aauauaaaugug

SEQ ID NO: 3203489 - RNA, 13 nt, Human
aauauaaaugugu

SEQ ID NO: 3203490 - RNA, 16 nt, Human
aauauaaaugugugua

SEQ ID NO: 3203491 - RNA, 20 nt, Human
aauauaaauguguguaugug

SEQ ID NO: 3203492 - RNA, 19 nt, Human
aauauagauuaaaucauac

SEQ ID NO: 3203493 - RNA, 17 nt, Human
aauauagauuaaaucau

SEQ ID NO: 3203494 - RNA, 15 nt, Human
aauauagauuaaauc

SEQ ID NO: 3203495 - RNA, 13 nt, Human
aauauagaaaaaa

SEQ ID NO: 3203496 - RNA, 21 nt, Human
aauauagaaaaaaacauucua

SEQ ID NO: 3203497 - RNA, 22 nt, Human
aauauagaaaaaaacauucuau

SEQ ID NO: 3203498 - RNA, 21 nt, Human
aauaccugucccccugacaac

SEQ ID NO: 3203499 - RNA, 13 nt, Human
aauaccuuagaag

SEQ ID NO: 3203500 - RNA, 16 nt, Human
aauacuguuauucuuu

SEQ ID NO: 3203501 - RNA, 20 nt, Human
aauacuuaaauguuauguau

SEQ ID NO: 3203502 - RNA, 18 nt, Human
aauacuuaaauguuaugu

SEQ ID NO: 3203503 - RNA, 15 nt, Human
aauacuuaaauguua

SEQ ID NO: 3203504 - RNA, 14 nt, Human
aauacuuaaauguu

SEQ ID NO: 3203505 - RNA, 22 nt, Human
aauacuguuauucuuugcacuu

SEQ ID NO: 3203506 - RNA, 21 nt, Human
aauacuguuauucuuugcacu

SEQ ID NO: 3203507 - RNA, 19 nt, Human
aauacuguuauucuuugca

SEQ ID NO: 3203508 - RNA, 18 nt, Human
aauacuguuauucuuugc

SEQ ID NO: 3203509 - RNA, 17 nt, Human
aauacuguuauucuuug

SEQ ID NO: 3203510 - RNA, 14 nt, Human
aauacuugaaccau

SEQ ID NO: 3203511 - RNA, 17 nt, Human
aauacuugaaccauaaa

SEQ ID NO: 3203512 - RNA, 19 nt, Human
aauacuugaaccauaaaau

SEQ ID NO: 3203513 - RNA, 22 nt, Human
aauacuugaaccauaaaauguc

SEQ ID NO: 3203514 - RNA, 14 nt, Human
aauacuucuuuuua

SEQ ID NO: 3203515 - RNA, 19 nt, Human
aauagaacaacauauacaa

SEQ ID NO: 3203516 - RNA, 20 nt, Human
aauaguuuauuuuaaaacaa

SEQ ID NO: 3203517 - RNA, 22 nt, Human
aauaguuuauuuuaaaacaaua

SEQ ID NO: 3203518 - RNA, 22 nt, Human
aauagaagcuaagguuuagaua

SEQ ID NO: 3203519 - RNA, 19 nt, Human
aauaguuuauuuuaaaaca

SEQ ID NO: 3203520 - RNA, 12 nt, Human
aauauaaaaaau

SEQ ID NO: 3203521 - RNA, 16 nt, Human
aauauaaaaaaucaug

SEQ ID NO: 3203522 - RNA, 20 nt, Human
aauauaaaaaaucaugccag

SEQ ID NO: 3203523 - RNA, 15 nt, Human
aacauccuacaagac

SEQ ID NO: 3203524 - RNA, 22 nt, Human
aacauccuacaagacacaguga

SEQ ID NO: 3203525 - RNA, 16 nt, Human
aacagcuaugagagga

SEQ ID NO: 3203526 - RNA, 20 nt, Human
aacagcggcuggacuuggag

SEQ ID NO: 3203527 - RNA, 16 nt, Human
aacagcuaaugggaca

SEQ ID NO: 3203528 - RNA, 15 nt, Human
aacagauuuggaaag

SEQ ID NO: 3203529 - RNA, 14 nt, Human
aacagauuuggaaa

SEQ ID NO: 3203530 - RNA, 13 nt, Human
aacagauuuggaa

SEQ ID NO: 3203531 - RNA, 24 nt, Human
aacagauuggauuuuauguugaca

SEQ ID NO: 3203532 - RNA, 13 nt, Human
aacccuucagugc

SEQ ID NO: 3203533 - RNA, 18 nt, Human
aaccauaaaauguccagu

SEQ ID NO: 3203534 - RNA, 12 nt, Human
aaccauaguuac

SEQ ID NO: 3203535 - RNA, 15 nt, Human
aacauggaaguacua

SEQ ID NO: 3203536 - RNA, 17 nt, Human
aaccaggcuuucuagaa

SEQ ID NO: 3203537 - RNA, 14 nt, Human
aaccaggcuuucua

SEQ ID NO: 3203538 - RNA, 21 nt, Human
aaccaggcuuucuagaaagaa

SEQ ID NO: 3203539 - RNA, 18 nt, Human
aaccagguccagaugugc

SEQ ID NO: 3203540 - RNA, 18 nt, Human
aacaucucaucaugucua

SEQ ID NO: 3203541 - RNA, 14 nt, Human
aacaugcuguguaa

SEQ ID NO: 3203542 - RNA, 17 nt, Human
aacaugcuguguaagcu

SEQ ID NO: 3203543 - RNA, 19 nt, Human
aacaugcuguguaagcugu

SEQ ID NO: 3203544 - RNA, 21 nt, Human
aacaugcuguguaagcugugu

SEQ ID NO: 3203545 - RNA, 21 nt, Human
aacguagucggcacagccugg

SEQ ID NO: 3203546 - RNA, 15 nt, Human
aacucaccccagccc

SEQ ID NO: 3203547 - RNA, 18 nt, Human
aacucaccccagccccaa

SEQ ID NO: 3203548 - RNA, 16 nt, Human
aacucaccccagcccc

SEQ ID NO: 3203549 - RNA, 17 nt, Human
aacucaccccagcccca

SEQ ID NO: 3203550 - RNA, 17 nt, Human
aacucaaacucuuaaaa

SEQ ID NO: 3203551 - RNA, 22 nt, Human
aacucaaggauaccuucuuauu

SEQ ID NO: 3203552 - RNA, 23 nt, Human
aacucaaccaaaugguacaaaac

SEQ ID NO: 3203553 - RNA, 19 nt, Human
aacucaaccaaaugguaca

SEQ ID NO: 3203554 - RNA, 17 nt, Human
aacucaaccaaauggua

SEQ ID NO: 3203555 - RNA, 21 nt, Human
aacugagcuuggaagcuucug

SEQ ID NO: 3203556 - RNA, 17 nt, Human
aacugagcuuggaagcu

SEQ ID NO: 3203557 - RNA, 13 nt, Human
aacugagcuugga

SEQ ID NO: 3203558 - RNA, 23 nt, Human
aacugagaugugaacacaucagc

SEQ ID NO: 3203559 - RNA, 14 nt, Human
aacuguuagaaugu

SEQ ID NO: 3203560 - RNA, 23 nt, Human
aacuguuaccauuggaaauuuca

SEQ ID NO: 3203561 - RNA, 19 nt, Human
aacuguuaccauuggaaau

SEQ ID NO: 3203562 - RNA, 16 nt, Human
aacuguuagaauguaa

SEQ ID NO: 3203563 - RNA, 14 nt, Human
aacuguuacaguaa

SEQ ID NO: 3203564 - RNA, 15 nt, Human
aacuguuacaguaau

SEQ ID NO: 3203565 - RNA, 14 nt, Human
aacuguuaccauug

SEQ ID NO: 3203566 - RNA, 18 nt, Human
aacuguuaccauuggaaa

SEQ ID NO: 3203567 - RNA, 17 nt, Human
aacuguuaccauuggaa

SEQ ID NO: 3203568 - RNA, 15 nt, Human
aacuguuaacuuauu

SEQ ID NO: 3203569 - RNA, 20 nt, Human
aacugaauagcaaguggcau

SEQ ID NO: 3203570 - RNA, 13 nt, Human
aacugaauuugga

SEQ ID NO: 3203571 - RNA, 14 nt, Human
aacugaauuuggag

SEQ ID NO: 3203572 - RNA, 13 nt, Human
aacugaaguucug

SEQ ID NO: 3203573 - RNA, 14 nt, Human
aacgaaaaucauug

SEQ ID NO: 3203574 - RNA, 17 nt, Human
aacgaucacaaaugacu

SEQ ID NO: 3203575 - RNA, 21 nt, Human
aacgagccuuuucacccuucu

SEQ ID NO: 3203576 - RNA, 17 nt, Human
aacgacaaaucugucug

SEQ ID NO: 3203577 - RNA, 18 nt, Human
aacgacaaaucugucugc

SEQ ID NO: 3203578 - RNA, 17 nt, Human
aacacauaauuaacacu

SEQ ID NO: 3203579 - RNA, 18 nt, Human
aacacauaauuaacacuu

SEQ ID NO: 3203580 - RNA, 21 nt, Human
aacacauacaggaagguagaa

SEQ ID NO: 3203581 - RNA, 16 nt, Human
aacacaggccacccug

SEQ ID NO: 3203582 - RNA, 14 nt, Human
aacaaaucuuccug

SEQ ID NO: 3203583 - RNA, 13 nt, Human
aacaaaucuuccu

SEQ ID NO: 3203584 - RNA, 22 nt, Human
aacaaaccuguuucugcagcca

SEQ ID NO: 3203585 - RNA, 14 nt, Human
aacaaacugcacau

SEQ ID NO: 3203586 - RNA, 22 nt, Human
aacaaaggccuaauucuaugcc

SEQ ID NO: 3203587 - RNA, 18 nt, Human
aacaaauccugcauuuag

SEQ ID NO: 3203588 - RNA, 15 nt, Human
aaauugggguuuauu

SEQ ID NO: 3203589 - RNA, 20 nt, Human
aaauugguaccuugcacaca

SEQ ID NO: 3203590 - RNA, 18 nt, Human
aaauugguaccuugcaca

SEQ ID NO: 3203591 - RNA, 16 nt, Human
aaauugguaccuugca

SEQ ID NO: 3203592 - RNA, 17 nt, Human
aacaaacagaugcucug

SEQ ID NO: 3203593 - RNA, 14 nt, Human
aacaaacagaugcu

SEQ ID NO: 3203594 - RNA, 12 nt, Human
aaauuaaaaaaa

SEQ ID NO: 3203595 - RNA, 15 nt, Human
aaauuaaaaaaaaau

SEQ ID NO: 3203596 - RNA, 17 nt, Human
aaauuaaaaaaaaauug

SEQ ID NO: 3203597 - RNA, 22 nt, Human
aaauuaaaaaaaaauuguaucu

SEQ ID NO: 3203598 - RNA, 21 nt, Human
aaauuaaaaguuugaaaagca

SEQ ID NO: 3203599 - RNA, 22 nt, Human
aaauugacacuuaaaaaugguu

SEQ ID NO: 3203600 - RNA, 13 nt, Human
aaauugacuguac

SEQ ID NO: 3203601 - RNA, 14 nt, Human
aaauugacuguacu

SEQ ID NO: 3203602 - RNA, 23 nt, Human
aaauugagcugcuuuuuuugaaa

SEQ ID NO: 3203603 - RNA, 16 nt, Human
aaauugagcugcuuuu

SEQ ID NO: 3203604 - RNA, 13 nt, Human
aaauguucuucca

SEQ ID NO: 3203605 - RNA, 15 nt, Human
aaauguucuuccagu

SEQ ID NO: 3203606 - RNA, 17 nt, Human
aaauguucaucaaugaa

SEQ ID NO: 3203607 - RNA, 20 nt, Human
aaauguucaucaaugaauga

SEQ ID NO: 3203608 - RNA, 15 nt, Human
aaaucugaagauugu

SEQ ID NO: 3203609 - RNA, 17 nt, Human
aaaucugaagauuguuu

SEQ ID NO: 3203610 - RNA, 16 nt, Human
aaaucugaagauuguu

SEQ ID NO: 3203611 - RNA, 21 nt, Human
aaaucugaagauuguuuaucu

SEQ ID NO: 3203612 - RNA, 20 nt, Human
aaaucugaagauuguuuauc

SEQ ID NO: 3203613 - RNA, 19 nt, Human
aaaucugaagauuguuuau

SEQ ID NO: 3203614 - RNA, 18 nt, Human
aaaucugaagauuguuua

SEQ ID NO: 3203615 - RNA, 22 nt, Human
aaaucucuacaaauuuuucugu

SEQ ID NO: 3203616 - RNA, 12 nt, Human
aaaucucuucug

SEQ ID NO: 3203617 - RNA, 13 nt, Human
aaaucucuucugu

SEQ ID NO: 3203618 - RNA, 13 nt, Human
aaaucugaacauu

SEQ ID NO: 3203619 - RNA, 16 nt, Human
aaaucugaacauucuc

SEQ ID NO: 3203620 - RNA, 14 nt, Human
aaaucuuaagaaau

SEQ ID NO: 3203621 - RNA, 13 nt, Human
aaaucuuaagaaa

SEQ ID NO: 3203622 - RNA, 15 nt, Human
aaaugcuagaaaaau

SEQ ID NO: 3203623 - RNA, 19 nt, Human
aaaugcuaugucauuucau

SEQ ID NO: 3203624 - RNA, 17 nt, Human
aaaugcuaugucauuuc

SEQ ID NO: 3203625 - RNA, 16 nt, Human
aaaugcuaugucauuu

SEQ ID NO: 3203626 - RNA, 14 nt, Human
aaaucuuaacuuga

SEQ ID NO: 3203627 - RNA, 12 nt, Human
aaaucuuaagaa

SEQ ID NO: 3203628 - RNA, 15 nt, Human
aaaucugcuguuaac

SEQ ID NO: 3203629 - RNA, 23 nt, Human
aaaucugcaaagcauguuuugca

SEQ ID NO: 3203630 - RNA, 17 nt, Human
aaaucugcaaagcaugu

SEQ ID NO: 3203631 - RNA, 15 nt, Human
aaaucugcaaagcau

SEQ ID NO: 3203632 - RNA, 23 nt, Human
aaaucugaagauuguuuaucuag

SEQ ID NO: 3203633 - RNA, 15 nt, Human
aaauggacguguuau

SEQ ID NO: 3203634 - RNA, 17 nt, Human
aaauggacguguuauga

SEQ ID NO: 3203635 - RNA, 14 nt, Human
aaauggacguguua

SEQ ID NO: 3203636 - RNA, 21 nt, Human
aaaugcugauuuaaacuucuu

SEQ ID NO: 3203637 - RNA, 21 nt, Human
aaaugcuaugucauuucaugu

SEQ ID NO: 3203638 - RNA, 20 nt, Human
aaaugcuaugucauuucaug

SEQ ID NO: 3203639 - RNA, 22 nt, Human
aaaugcuaugucauuucauguc

SEQ ID NO: 3203640 - RNA, 16 nt, Human
aaaugcugaaaauugc

SEQ ID NO: 3203641 - RNA, 15 nt, Human
aaaugcugaacauug

SEQ ID NO: 3203642 - RNA, 12 nt, Human
aaaugcugaaca

SEQ ID NO: 3203643 - RNA, 14 nt, Human
aaaugcugauuuaa

SEQ ID NO: 3203644 - RNA, 16 nt, Human
aaaugcugacccaugg

SEQ ID NO: 3203645 - RNA, 12 nt, Human
aaaugcugaccc

SEQ ID NO: 3203646 - RNA, 17 nt, Human
aaaugcugaaaauugcc

SEQ ID NO: 3203647 - RNA, 14 nt, Human
aaaauccaaauauu

SEQ ID NO: 3203648 - RNA, 19 nt, Human
aaaauccaaauauuguuaa

SEQ ID NO: 3203649 - RNA, 16 nt, Human
aaaauccaaauauugu

SEQ ID NO: 3203650 - RNA, 15 nt, Human
aaaaucacuuucaua

SEQ ID NO: 3203651 - RNA, 17 nt, Human
aaaaucacuuucauaau

SEQ ID NO: 3203652 - RNA, 20 nt, Human
aaaaucacuuucauaaucuu

SEQ ID NO: 3203653 - RNA, 18 nt, Human
aaaaucaauaugcagaau

SEQ ID NO: 3203654 - RNA, 21 nt, Human
aaaaucauuucugcaucagcu

SEQ ID NO: 3203655 - RNA, 14 nt, Human
aaaaucacguuaaa

SEQ ID NO: 3203656 - RNA, 16 nt, Human
aaaaucaaguauuaua

SEQ ID NO: 3203657 - RNA, 15 nt, Human
aaaaucaaguauuau

SEQ ID NO: 3203658 - RNA, 14 nt, Human
aaaaucaaauaaua

SEQ ID NO: 3203659 - RNA, 17 nt, Human
aaaauauuuuuuuuucu

SEQ ID NO: 3203660 - RNA, 21 nt, Human
aaaauaaaaaaaagaaaaaag

SEQ ID NO: 3203661 - RNA, 17 nt, Human
aaaaguuugaaaagcaa

SEQ ID NO: 3203662 - RNA, 18 nt, Human
aaaaguuugaaaagcaau

SEQ ID NO: 3203663 - RNA, 23 nt, Human
aaaaguuugaaaagcaauauugu

SEQ ID NO: 3203664 - RNA, 18 nt, Human
aaaauaaaaaaaagaaaa

SEQ ID NO: 3203665 - RNA, 17 nt, Human
aaaauaaaaaaaagaaa

SEQ ID NO: 3203666 - RNA, 16 nt, Human
aaaauaaaaaaaagaa

SEQ ID NO: 3203667 - RNA, 15 nt, Human
aaaauaaaaaaaaga

SEQ ID NO: 3203668 - RNA, 23 nt, Human
aaaauuaaucugggccagaauuu

SEQ ID NO: 3203669 - RNA, 17 nt, Human
aaaauuaagguguuuga

SEQ ID NO: 3203670 - RNA, 18 nt, Human
aaaauuaagguguuugaa

SEQ ID NO: 3203671 - RNA, 22 nt, Human
aaaauccagaaacuuguucuuc

SEQ ID NO: 3203672 - RNA, 21 nt, Human
aaaauccagaaacuuguucuu

SEQ ID NO: 3203673 - RNA, 12 nt, Human
aaaauccagaaa

SEQ ID NO: 3203674 - RNA, 22 nt, Human
aaaauccaaauauuguuaaggg

SEQ ID NO: 3203675 - RNA, 15 nt, Human
aaaauuagccaagug

SEQ ID NO: 3203676 - RNA, 20 nt, Human
aaaauuaagguguuugaaaa

SEQ ID NO: 3203677 - RNA, 14 nt, Human
aaaauuacaacuaa

SEQ ID NO: 3203678 - RNA, 13 nt, Human
aaaauuauacugu

SEQ ID NO: 3203679 - RNA, 15 nt, Human
aaaauuauacugugu

SEQ ID NO: 3203680 - RNA, 18 nt, Human
aaaauuauacugugugug

SEQ ID NO: 3203681 - RNA, 19 nt, Human
aaaauuaggauuucaugau

SEQ ID NO: 3203682 - RNA, 17 nt, Human
aaaauuagccuaagaua

SEQ ID NO: 3203683 - RNA, 19 nt, Human
aaaauuauugauugcuuuu

SEQ ID NO: 3203684 - RNA, 23 nt, Human
aaaauuauguuugccacuuugca

SEQ ID NO: 3203685 - RNA, 13 nt, Human
aaaauuauuugua

SEQ ID NO: 3203686 - RNA, 17 nt, Human
aaaauuccaaauucaug

SEQ ID NO: 3203687 - RNA, 17 nt, Human
aaaauuccagaaugaag

SEQ ID NO: 3203688 - RNA, 15 nt, Human
aaaauucccuaaagc

SEQ ID NO: 3203689 - RNA, 16 nt, Human
aaaauucccuaaagcc

SEQ ID NO: 3203690 - RNA, 17 nt, Human
aaacagcuaaugggaca

SEQ ID NO: 3203691 - RNA, 13 nt, Human
aaagaggugugca

SEQ ID NO: 3203692 - RNA, 18 nt, Human
aaagaggucgcuugggaa

SEQ ID NO: 3203693 - RNA, 13 nt, Human
aaagauaaauauu

SEQ ID NO: 3203694 - RNA, 15 nt, Human
aaagauaaauauuau

SEQ ID NO: 3203695 - RNA, 14 nt, Human
aaagauaaauauua

SEQ ID NO: 3203696 - RNA, 16 nt, Human
aaagauaaauauuaua

SEQ ID NO: 3203697 - RNA, 19 nt, Human
aaagauaaucucagugcuu

SEQ ID NO: 3203698 - RNA, 23 nt, Human
aaagauaaucucagugcuuuccu

SEQ ID NO: 3203699 - RNA, 21 nt, Human
aaaccguguuugucucuucug

SEQ ID NO: 3203700 - RNA, 17 nt, Human
aaacucuugaccucagg

SEQ ID NO: 3203701 - RNA, 20 nt, Human
aaacucuuuaacuuguaaua

SEQ ID NO: 3203702 - RNA, 12 nt, Human
aaacucuuuaac

SEQ ID NO: 3203703 - RNA, 14 nt, Human
aaacccuucagugc

SEQ ID NO: 3203704 - RNA, 20 nt, Human
aaaccguguuugucucuucu

SEQ ID NO: 3203705 - RNA, 13 nt, Human
aaaccguguuugu

SEQ ID NO: 3203706 - RNA, 18 nt, Human
aaacccugucaaacauua

SEQ ID NO: 3203707 - RNA, 17 nt, Human
aaacccugucaaacauu

SEQ ID NO: 3203708 - RNA, 21 nt, Human
aaacccugucucuacuaaaaa

SEQ ID NO: 3203709 - RNA, 16 nt, Human
aaacccugucaaacau

SEQ ID NO: 3203710 - RNA, 17 nt, Human
aaaccccaucucuacaa

SEQ ID NO: 3203711 - RNA, 23 nt, Human
aaacccagcugcaccccuuccug

SEQ ID NO: 3203712 - RNA, 22 nt, Human
aaacccagcugcaccccuuccu

SEQ ID NO: 3203713 - RNA, 18 nt, Human
aaacccagcucuggucca

SEQ ID NO: 3203714 - RNA, 12 nt, Human
aaagaaacaugg

SEQ ID NO: 3203715 - RNA, 18 nt, Human
aaagaaccuaacauuuau

SEQ ID NO: 3203716 - RNA, 18 nt, Human
aaagaacgcugauuuaaa

SEQ ID NO: 3203717 - RNA, 15 nt, Human
aaagaacgcugauuu

SEQ ID NO: 3203718 - RNA, 16 nt, Human
aaagaacuaucuucau

SEQ ID NO: 3203719 - RNA, 20 nt, Human
aaagaacgcugauuuaaaga

SEQ ID NO: 3203720 - RNA, 19 nt, Human
aaagaagaaauaguucugu

SEQ ID NO: 3203721 - RNA, 22 nt, Human
aaagaacuaucuucaucugaga

SEQ ID NO: 3203722 - RNA, 20 nt, Human
aaagaacuaucuucaucuga

SEQ ID NO: 3203723 - RNA, 18 nt, Human
aaagaacuaucuucaucu

SEQ ID NO: 3203724 - RNA, 20 nt, Human
aaacugauuuuuuuuuccuu

SEQ ID NO: 3203725 - RNA, 12 nt, Human
aaacugauguga

SEQ ID NO: 3203726 - RNA, 14 nt, Human
aaacugaugugaaa

SEQ ID NO: 3203727 - RNA, 15 nt, Human
aaacugaugugaaac

SEQ ID NO: 3203728 - RNA, 13 nt, Human
aaacugauuuuuu

SEQ ID NO: 3203729 - RNA, 19 nt, Human
aaacugauuuuuuuuuccu

SEQ ID NO: 3203730 - RNA, 23 nt, Human
aaacucuuuaacuuguaauaaac

SEQ ID NO: 3203731 - RNA, 14 nt, Human
aaagugccuuugca

SEQ ID NO: 3203732 - RNA, 12 nt, Human
aaagugccuuug

SEQ ID NO: 3203733 - RNA, 13 nt, Human
aaauaaaaauucu

SEQ ID NO: 3203734 - RNA, 21 nt, Human
aaagucaugauguuuuuaaaa

SEQ ID NO: 3203735 - RNA, 18 nt, Human
aaagucaugauguuuuua

SEQ ID NO: 3203736 - RNA, 17 nt, Human
aaagucaugauguuuuu

SEQ ID NO: 3203737 - RNA, 16 nt, Human
aaagucaugauguuuu

SEQ ID NO: 3203738 - RNA, 15 nt, Human
aaagucaugauguuu

SEQ ID NO: 3203739 - RNA, 15 nt, Human
aaagugaugaacugg

SEQ ID NO: 3203740 - RNA, 22 nt, Human
aaagucaugauguuuuuaaaau

SEQ ID NO: 3203741 - RNA, 20 nt, Human
aaaggcuguauucagcaagg

SEQ ID NO: 3203742 - RNA, 18 nt, Human
aaaggcuguauucagcaa

SEQ ID NO: 3203743 - RNA, 14 nt, Human
aaaggcuguauuca

SEQ ID NO: 3203744 - RNA, 13 nt, Human
aaagucacaguua

SEQ ID NO: 3203745 - RNA, 17 nt, Human
aaagucaccaaauagug

SEQ ID NO: 3203746 - RNA, 14 nt, Human
aaagucagauguuu

SEQ ID NO: 3203747 - RNA, 16 nt, Human
aaagucagaacaaauu

SEQ ID NO: 3203748 - RNA, 13 nt, Human
aaagucagaaguu

SEQ ID NO: 3203749 - RNA, 15 nt, Human
aaagucagaaguuuu

SEQ ID NO: 3203750 - RNA, 14 nt, Human
aaagucagaaucag

SEQ ID NO: 3203751 - RNA, 23 nt, Human
aaagucaguugcucaaaaagaaa

SEQ ID NO: 3203752 - RNA, 11 nt, Human
aaauaaauuau

SEQ ID NO: 3203753 - RNA, 14 nt, Human
aaauaaaccuuaau

SEQ ID NO: 3203754 - RNA, 15 nt, Human
aaagccaagaggcug

SEQ ID NO: 3203755 - RNA, 22 nt, Human
aaagcccaaccucuuccuccug

SEQ ID NO: 3203756 - RNA, 20 nt, Human
aaagcccaaccucuuccucc

SEQ ID NO: 3203757 - RNA, 15 nt, Human
aaagcccaaccucuu

SEQ ID NO: 3203758 - RNA, 15 nt, Human
aaagcccaggagccc

SEQ ID NO: 3203759 - RNA, 12 nt, Human
aaagcccaggag

SEQ ID NO: 3203760 - RNA, 14 nt, Human
aaagcccaggagcc

SEQ ID NO: 3203761 - RNA, 13 nt, Human
aaagcccaggagc

SEQ ID NO: 3203762 - RNA, 22 nt, Human
aaaggcagcuguugucucuucu

SEQ ID NO: 3203763 - RNA, 15 nt, Human
aaaggcauuagaguc

SEQ ID NO: 3203764 - RNA, 19 nt, Human
aaaggcagaagcaacccaa

SEQ ID NO: 3203765 - RNA, 12 nt, Human
aaaggcagcugu

SEQ ID NO: 3203766 - RNA, 17 nt, Human
aaaggcagcuguugucu

SEQ ID NO: 3203767 - RNA, 14 nt, Human
aaaggcagcuguug

SEQ ID NO: 3203768 - RNA, 16 nt, Human
aaagccccauuaacug

SEQ ID NO: 3203769 - RNA, 22 nt, Human
aaaggcuccaggagcagccaca

SEQ ID NO: 3203770 - RNA, 13 nt, Human
aaaggcuguauuc

SEQ ID NO: 3203771 - RNA, 21 nt, Human
aaaggcuccaggagcagccac

SEQ ID NO: 3203772 - RNA, 14 nt, Human
aaaggcuccaggag

SEQ ID NO: 3203773 - RNA, 20 nt, Human
aaagcauuguaaaugugcuu

SEQ ID NO: 3203774 - RNA, 19 nt, Human
aaagcauuguaaaugugcu

SEQ ID NO: 3203775 - RNA, 15 nt, Human
aaagccaaagcuagg

SEQ ID NO: 3203776 - RNA, 21 nt, Human
aaagcauuuuguaauaauaaa

SEQ ID NO: 3203777 - RNA, 13 nt, Human
aaagcauuuugua

SEQ ID NO: 3203778 - RNA, 15 nt, Human
aaagcauuuuguaau

SEQ ID NO: 3203779 - RNA, 14 nt, Human
aaagcauuuuguaa

SEQ ID NO: 3203780 - RNA, 22 nt, Human
agaggagugcguggcccaccag

SEQ ID NO: 3203781 - RNA, 13 nt, Human
agagggccugcaa

SEQ ID NO: 3203782 - RNA, 16 nt, Human
agagggccugcaaggg

SEQ ID NO: 3203783 - RNA, 17 nt, Human
agaggggguggccuccc

SEQ ID NO: 3203784 - RNA, 19 nt, Human
agaggggguggccucccaa

SEQ ID NO: 3203785 - RNA, 22 nt, Human
agaggacuuuucuuuguggcuu

SEQ ID NO: 3203786 - RNA, 21 nt, Human
agaggacuuuucuuuguggcu

SEQ ID NO: 3203787 - RNA, 14 nt, Human
agaggacuuuucuu

SEQ ID NO: 3203788 - RNA, 14 nt, Human
agaggaggaggagg

SEQ ID NO: 3203789 - RNA, 23 nt, Human
agaggagggagcaucagugcccu

SEQ ID NO: 3203790 - RNA, 13 nt, Human
agaggaaugaagu

SEQ ID NO: 3203791 - RNA, 15 nt, Human
agagccugagaguga

SEQ ID NO: 3203792 - RNA, 19 nt, Human
agagccguaaaaacugaag

SEQ ID NO: 3203793 - RNA, 17 nt, Human
agagccguaaaaacuga

SEQ ID NO: 3203794 - RNA, 14 nt, Human
agagccguaaaaac

SEQ ID NO: 3203795 - RNA, 15 nt, Human
agagcccuucauuug

SEQ ID NO: 3203796 - RNA, 17 nt, Human
agagaggcuaaaauguu

SEQ ID NO: 3203797 - RNA, 19 nt, Human
agagaggcuaaaauguuuu

SEQ ID NO: 3203798 - RNA, 18 nt, Human
agagaggcuaaaauguuu

SEQ ID NO: 3203799 - RNA, 13 nt, Human
agagccagggucu

SEQ ID NO: 3203800 - RNA, 22 nt, Human
agagagggugaguccuccagaa

SEQ ID NO: 3203801 - RNA, 16 nt, Human
agagagaagagcccca

SEQ ID NO: 3203802 - RNA, 14 nt, Human
agagagaagagccc

SEQ ID NO: 3203803 - RNA, 16 nt, Human
agagagaccacuuuuc

SEQ ID NO: 3203804 - RNA, 16 nt, Human
agacugcuuugagaaa

SEQ ID NO: 3203805 - RNA, 18 nt, Human
agacucugucucagucca

SEQ ID NO: 3203806 - RNA, 13 nt, Human
agacucugucuca

SEQ ID NO: 3203807 - RNA, 18 nt, Human
agacucugucucaaaaaa

SEQ ID NO: 3203808 - RNA, 16 nt, Human
agacgcugugcugccc

SEQ ID NO: 3203809 - RNA, 19 nt, Human
agacgcucauucagcaucu

SEQ ID NO: 3203810 - RNA, 16 nt, Human
agacagcauguguuaa

SEQ ID NO: 3203811 - RNA, 20 nt, Human
agacagcauuuguguguuac

SEQ ID NO: 3203812 - RNA, 15 nt, Human
agacagcauuugugu

SEQ ID NO: 3203813 - RNA, 12 nt, Human
agaccagaaauu

SEQ ID NO: 3203814 - RNA, 14 nt, Human
agaccagaaauucc

SEQ ID NO: 3203815 - RNA, 21 nt, Human
agacagagucucacuguugcc

SEQ ID NO: 3203816 - RNA, 17 nt, Human
agacccaaaaggcagaa

SEQ ID NO: 3203817 - RNA, 19 nt, Human
agacccaaaaggcagaagc

SEQ ID NO: 3203818 - RNA, 15 nt, Human
agacagagcuacaca

SEQ ID NO: 3203819 - RNA, 20 nt, Human
agacagagucucacuguugc

SEQ ID NO: 3203820 - RNA, 19 nt, Human
agacagagucucacuguug

SEQ ID NO: 3203821 - RNA, 13 nt, Human
agacagagcuaca

SEQ ID NO: 3203822 - RNA, 11 nt, Human
agacagagucu

SEQ ID NO: 3203823 - RNA, 17 nt, Human
agacaaauaguaggcaa

SEQ ID NO: 3203824 - RNA, 12 nt, Human
agacaaauagua

SEQ ID NO: 3203825 - RNA, 16 nt, Human
agaaugaaagggccca

SEQ ID NO: 3203826 - RNA, 18 nt, Human
agaaugaaagggcccaga

SEQ ID NO: 3203827 - RNA, 21 nt, Human
agaagugaaaaucuacacucc

SEQ ID NO: 3203828 - RNA, 12 nt, Human
agaaugaacaaa

SEQ ID NO: 3203829 - RNA, 22 nt, Human
agaaugaacaaagaccaauuuu

SEQ ID NO: 3203830 - RNA, 13 nt, Human
agaaugaacaaag

SEQ ID NO: 3203831 - RNA, 18 nt, Human
agaaugaagguuuuugua

SEQ ID NO: 3203832 - RNA, 20 nt, Human
agaaugaagguuuuuguaaa

SEQ ID NO: 3203833 - RNA, 19 nt, Human
agaaugaagguuuuuguaa

SEQ ID NO: 3203834 - RNA, 20 nt, Human
agaaugaccuuguaauguaa

SEQ ID NO: 3203835 - RNA, 17 nt, Human
agaaugaccuuguaaug

SEQ ID NO: 3203836 - RNA, 16 nt, Human
agaaugaccuuguaau

SEQ ID NO: 3203837 - RNA, 15 nt, Human
agaaugaccuuguaa

SEQ ID NO: 3203838 - RNA, 14 nt, Human
agaaugaccuugua

SEQ ID NO: 3203839 - RNA, 13 nt, Human
agaaugaccuugu

SEQ ID NO: 3203840 - RNA, 12 nt, Human
agaaugaccuug

SEQ ID NO: 3203841 - RNA, 22 nt, Human
agaaugaagguuuuuguaaaga

SEQ ID NO: 3203842 - RNA, 23 nt, Human
agaaugaccuuguaauguaacug

SEQ ID NO: 3203843 - RNA, 22 nt, Human
agaaugaccuuguaauguaacu

SEQ ID NO: 3203844 - RNA, 21 nt, Human
agaaugaccuuguaauguaac

SEQ ID NO: 3203845 - RNA, 19 nt, Human
agaaugcacaaacagaggc

SEQ ID NO: 3203846 - RNA, 18 nt, Human
agaauggcauuugcaaua

SEQ ID NO: 3203847 - RNA, 14 nt, Human
agaauggcauuugc

SEQ ID NO: 3203848 - RNA, 18 nt, Human
agaauggaagagagaaag

SEQ ID NO: 3203849 - RNA, 21 nt, Human
agaauggcauuugcaauaaaa

SEQ ID NO: 3203850 - RNA, 21 nt, Human
agaagagcuguucacagccag

SEQ ID NO: 3203851 - RNA, 22 nt, Human
agaagagcuguucacagccaga

SEQ ID NO: 3203852 - RNA, 23 nt, Human
agaagagaaugcacaaacagagg

SEQ ID NO: 3203853 - RNA, 15 nt, Human
agaagacauuugcca

SEQ ID NO: 3203854 - RNA, 21 nt, Human
agaagacacugaugggcaacc

SEQ ID NO: 3203855 - RNA, 13 nt, Human
agaagacacugau

SEQ ID NO: 3203856 - RNA, 21 nt, Human
acuuuccucuuuggucuacac

SEQ ID NO: 3203857 - RNA, 21 nt, Human
acuuuccucuuagucgagcca

SEQ ID NO: 3203858 - RNA, 14 nt, Human
agaaguaacuuacu

SEQ ID NO: 3203859 - RNA, 22 nt, Human
agaaguaacuggugauauaucu

SEQ ID NO: 3203860 - RNA, 18 nt, Human
agaagguuucagaaagaa

SEQ ID NO: 3203861 - RNA, 21 nt, Human
agaagguuuacuuuuuggugu

SEQ ID NO: 3203862 - RNA, 20 nt, Human
agaaguauacguuuuucagu

SEQ ID NO: 3203863 - RNA, 18 nt, Human
agaaguaggggaagaaua

SEQ ID NO: 3203864 - RNA, 19 nt, Human
agaaguagggguggcccga

SEQ ID NO: 3203865 - RNA, 23 nt, Human
agaaguagugucuggaucaguaa

SEQ ID NO: 3203866 - RNA, 15 nt, Human
agaagagucuauugu

SEQ ID NO: 3203867 - RNA, 13 nt, Human
agaagaguggcag

SEQ ID NO: 3203868 - RNA, 23 nt, Human
agaagagagggugaguccuccag

SEQ ID NO: 3203869 - RNA, 23 nt, Human
agaagguauuaagauuauaauug

SEQ ID NO: 3203870 - RNA, 13 nt, Human
agaaggucuguuu

SEQ ID NO: 3203871 - RNA, 18 nt, Human
agaugaugaaaauauuua

SEQ ID NO: 3203872 - RNA, 18 nt, Human
agaugaggucaguugugu

SEQ ID NO: 3203873 - RNA, 21 nt, Human
agaugaggucaguuguguuuu

SEQ ID NO: 3203874 - RNA, 23 nt, Human
agaugaugaaaauauuuaaaggc

SEQ ID NO: 3203875 - RNA, 19 nt, Human
agauggucauauuuaaaca

SEQ ID NO: 3203876 - RNA, 15 nt, Human
agaugguuaaacauu

SEQ ID NO: 3203877 - RNA, 17 nt, Human
agaugguuaaacauuuu

SEQ ID NO: 3203878 - RNA, 18 nt, Human
agaugguuaaacauuuuc

SEQ ID NO: 3203879 - RNA, 22 nt, Human
agauggucauauuuaaacagaa

SEQ ID NO: 3203880 - RNA, 19 nt, Human
agauguagaggagaaacug

SEQ ID NO: 3203881 - RNA, 15 nt, Human
agauguagauuuauu

SEQ ID NO: 3203882 - RNA, 21 nt, Human
agauguagcaaacccugucaa

SEQ ID NO: 3203883 - RNA, 18 nt, Human
agauguagauuuauuuca

SEQ ID NO: 3203884 - RNA, 16 nt, Human
agauguagaggagaaa

SEQ ID NO: 3203885 - RNA, 23 nt, Human
agauguagcaaacccugucaaac

SEQ ID NO: 3203886 - RNA, 22 nt, Human
agauguagcaaacccugucaaa

SEQ ID NO: 3203887 - RNA, 14 nt, Human
agaguggccccacc

SEQ ID NO: 3203888 - RNA, 20 nt, Human
agagugccaacuucuuucau

SEQ ID NO: 3203889 - RNA, 19 nt, Human
agaguggccccaccuggcc

SEQ ID NO: 3203890 - RNA, 15 nt, Human
agaguggccccaccu

SEQ ID NO: 3203891 - RNA, 21 nt, Human
agaguggccccaccuggcccu

SEQ ID NO: 3203892 - RNA, 20 nt, Human
agcaaagcggguuauaauga

SEQ ID NO: 3203893 - RNA, 20 nt, Human
agcaaaggagauuggaagga

SEQ ID NO: 3203894 - RNA, 22 nt, Human
agcaaagcggguuauaaugaau

SEQ ID NO: 3203895 - RNA, 20 nt, Human
agcaaauggccucaugucaa

SEQ ID NO: 3203896 - RNA, 15 nt, Human
agcaaauggccucau

SEQ ID NO: 3203897 - RNA, 17 nt, Human
agcaaaugucuuccugg

SEQ ID NO: 3203898 - RNA, 20 nt, Human
agcaaaugucuuccuggauu

SEQ ID NO: 3203899 - RNA, 16 nt, Human
agcaaauguggcuccu

SEQ ID NO: 3203900 - RNA, 15 nt, Human
agcaaaaucaagaga

SEQ ID NO: 3203901 - RNA, 16 nt, Human
agcaaacccugucaaa

SEQ ID NO: 3203902 - RNA, 20 nt, Human
agcaaaccuaauugcacaac

SEQ ID NO: 3203903 - RNA, 19 nt, Human
agcaaaccuaauugcacaa

SEQ ID NO: 3203904 - RNA, 21 nt, Human
agcaaacccugucaaacauua

SEQ ID NO: 3203905 - RNA, 20 nt, Human
agcaaacccugucaaacauu

SEQ ID NO: 3203906 - RNA, 17 nt, Human
agcaaacccugucaaac

SEQ ID NO: 3203907 - RNA, 12 nt, Human
agcaaaaggcau

SEQ ID NO: 3203908 - RNA, 13 nt, Human
agcaaaaucaaga

SEQ ID NO: 3203909 - RNA, 18 nt, Human
agcaaaagaugcuucuca

SEQ ID NO: 3203910 - RNA, 11 nt, Human
agcaaaaggca

SEQ ID NO: 3203911 - RNA, 21 nt, Human
agauugcaacaggcugggcuu

SEQ ID NO: 3203912 - RNA, 20 nt, Human
agauugcaacaggcugggcu

SEQ ID NO: 3203913 - RNA, 23 nt, Human
agauugcaacaggcugggcuuca

SEQ ID NO: 3203914 - RNA, 19 nt, Human
agauugcaacaggcugggc

SEQ ID NO: 3203915 - RNA, 19 nt, Human
agauucuuuccugaggcug

SEQ ID NO: 3203916 - RNA, 21 nt, Human
agauucuuuccugaggcuggg

SEQ ID NO: 3203917 - RNA, 18 nt, Human
agauucuuuccugaggcu

SEQ ID NO: 3203918 - RNA, 11 nt, Human
agauucuuuua

SEQ ID NO: 3203919 - RNA, 12 nt, Human
agauucuuuuaa

SEQ ID NO: 3203920 - RNA, 20 nt, Human
agauucuuuuaaauuagaaa

SEQ ID NO: 3203921 - RNA, 21 nt, Human
agauucuuuuaaauuagaaaa

SEQ ID NO: 3203922 - RNA, 22 nt, Human
agauucuuuuaaauuagaaaau

SEQ ID NO: 3203923 - RNA, 20 nt, Human
agauugaaccugaauauugc

SEQ ID NO: 3203924 - RNA, 16 nt, Human
agcacagacccugccc

SEQ ID NO: 3203925 - RNA, 18 nt, Human
agcacuuaaauuccucaa

SEQ ID NO: 3203926 - RNA, 18 nt, Human
agcacuuccuugccaguc

SEQ ID NO: 3203927 - RNA, 16 nt, Human
agcacuuccuugccag

SEQ ID NO: 3203928 - RNA, 20 nt, Human
agcacuucuaaguugaguau

SEQ ID NO: 3203929 - RNA, 17 nt, Human
agcacuucuaaguugag

SEQ ID NO: 3203930 - RNA, 20 nt, Human
agcacuuccuugccagucuu

SEQ ID NO: 3203931 - RNA, 19 nt, Human
agcacuuccuugccagucu

SEQ ID NO: 3203932 - RNA, 19 nt, Human
agcacuucagggcagauuu

SEQ ID NO: 3203933 - RNA, 15 nt, Human
agcacuucaggaggc

SEQ ID NO: 3203934 - RNA, 14 nt, Human
agcacagacccugc

SEQ ID NO: 3203935 - RNA, 15 nt, Human
agcacagacccugcc

SEQ ID NO: 3203936 - RNA, 12 nt, Human
agcacagacccu

SEQ ID NO: 3203937 - RNA, 14 nt, Human
agcacaacccccag

SEQ ID NO: 3203938 - RNA, 22 nt, Human
agcacaaccuucaagcugcuuu

SEQ ID NO: 3203939 - RNA, 20 nt, Human
agcacaaccuucaagcugcu

SEQ ID NO: 3203940 - RNA, 18 nt, Human
agcacaaccuucaagcug

SEQ ID NO: 3203941 - RNA, 22 nt, Human
agcacaacccccagcucccgcu

SEQ ID NO: 3203942 - RNA, 19 nt, Human
agcacaacccccagcuccc

SEQ ID NO: 3203943 - RNA, 18 nt, Human
agcacaacccccagcucc

SEQ ID NO: 3203944 - RNA, 15 nt, Human
agccaagaggcugca

SEQ ID NO: 3203945 - RNA, 16 nt, Human
agccaaagcuaggccu

SEQ ID NO: 3203946 - RNA, 17 nt, Human
agcauccuggcacccgg

SEQ ID NO: 3203947 - RNA, 14 nt, Human
agcauccuggcacc

SEQ ID NO: 3203948 - RNA, 14 nt, Human
agccagcaggcucu

SEQ ID NO: 3203949 - RNA, 17 nt, Human
agccagaggagagagga

SEQ ID NO: 3203950 - RNA, 13 nt, Human
agccagaggagag

SEQ ID NO: 3203951 - RNA, 15 nt, Human
agccagaggagagag

SEQ ID NO: 3203952 - RNA, 15 nt, Human
agccaagcuuuaaau

SEQ ID NO: 3203953 - RNA, 16 nt, Human
agccaagcuuuaaauu

SEQ ID NO: 3203954 - RNA, 19 nt, Human
agccaagcuuuaaauuaug

SEQ ID NO: 3203955 - RNA, 20 nt, Human
agccaagcuuuaaauuaugu

SEQ ID NO: 3203956 - RNA, 22 nt, Human
agccaagcuuuaaauuauguga

SEQ ID NO: 3203957 - RNA, 16 nt, Human
agccagcaggcucuca

SEQ ID NO: 3203958 - RNA, 15 nt, Human
agcccaccccucaac

SEQ ID NO: 3203959 - RNA, 16 nt, Human
agcccacaguauauuu

SEQ ID NO: 3203960 - RNA, 19 nt, Human
agcccacaguauauuuuau

SEQ ID NO: 3203961 - RNA, 20 nt, Human
agcccacaguauauuuuauu

SEQ ID NO: 3203962 - RNA, 14 nt, Human
agcccaccuuggcu

SEQ ID NO: 3203963 - RNA, 16 nt, Human
agcccaccuuggcuca

SEQ ID NO: 3203964 - RNA, 14 nt, Human
agcccacgccccca

SEQ ID NO: 3203965 - RNA, 20 nt, Human
agcccacgcccccacuggug

SEQ ID NO: 3203966 - RNA, 23 nt, Human
agcccacgcccccacuggugaca

SEQ ID NO: 3203967 - RNA, 22 nt, Human
agcccacgcugacuacagggcc

SEQ ID NO: 3203968 - RNA, 21 nt, Human
agcccacgcugacuacagggc

SEQ ID NO: 3203969 - RNA, 20 nt, Human
agcccacgcugacuacaggg

SEQ ID NO: 3203970 - RNA, 23 nt, Human
agcccacgcugacuacagggccg

SEQ ID NO: 3203971 - RNA, 13 nt, Human
agcauccuggcac

SEQ ID NO: 3203972 - RNA, 17 nt, Human
agcagcuuuagcaaaga

SEQ ID NO: 3203973 - RNA, 19 nt, Human
agccccauucugccugccc

SEQ ID NO: 3203974 - RNA, 18 nt, Human
agccccauucugccugcc

SEQ ID NO: 3203975 - RNA, 17 nt, Human
agccccauucugccugc

SEQ ID NO: 3203976 - RNA, 11 nt, Human
agccccauccu

SEQ ID NO: 3203977 - RNA, 17 nt, Human
agccccauccucuguac

SEQ ID NO: 3203978 - RNA, 23 nt, Human
agccccauccucuguacagagcc

SEQ ID NO: 3203979 - RNA, 15 nt, Human
agccccauccucugu

SEQ ID NO: 3203980 - RNA, 17 nt, Human
agcccgggcucugccuc

SEQ ID NO: 3203981 - RNA, 18 nt, Human
agcccgggcucugccucc

SEQ ID NO: 3203982 - RNA, 20 nt, Human
agcccgggcucugccuccca

SEQ ID NO: 3203983 - RNA, 13 nt, Human
agcccucccugcc

SEQ ID NO: 3203984 - RNA, 12 nt, Human
agcccucccugc

SEQ ID NO: 3203985 - RNA, 21 nt, Human
agcccuccaucuaaacugccc

SEQ ID NO: 3203986 - RNA, 23 nt, Human
agcccuccaucuaaacugccccc

SEQ ID NO: 3203987 - RNA, 24 nt, Human
agccccaaaacucuccucugcugc

SEQ ID NO: 3203988 - RNA, 21 nt, Human
agccccaaauugucaccugcu

SEQ ID NO: 3203989 - RNA, 16 nt, Human
agcugaacacauuucu

SEQ ID NO: 3203990 - RNA, 14 nt, Human
agcugaacacauuu

SEQ ID NO: 3203991 - RNA, 20 nt, Human
agcuccccucggagaagagc

SEQ ID NO: 3203992 - RNA, 19 nt, Human
agcuccccucggagaagag

SEQ ID NO: 3203993 - RNA, 17 nt, Human
agcuccccucggagaag

SEQ ID NO: 3203994 - RNA, 15 nt, Human
agcugaaccugggua

SEQ ID NO: 3203995 - RNA, 15 nt, Human
agcugaagagcuggg

SEQ ID NO: 3203996 - RNA, 13 nt, Human
agcugaagagcug

SEQ ID NO: 3203997 - RNA, 22 nt, Human
agcugaacagaugaccccugcc

SEQ ID NO: 3203998 - RNA, 19 nt, Human
agcugaacacauuucuuuu

SEQ ID NO: 3203999 - RNA, 17 nt, Human
agcugaacacauuucuu

SEQ ID NO: 3204000 - RNA, 15 nt, Human
agcugagccuucuga

SEQ ID NO: 3204001 - RNA, 15 nt, Human
agcugcgggcugggu

SEQ ID NO: 3204002 - RNA, 20 nt, Human
agcugcugaaacaacaaaua

SEQ ID NO: 3204003 - RNA, 12 nt, Human
agcugcugacag

SEQ ID NO: 3204004 - RNA, 20 nt, Human
agcugcgguccacccaggag

SEQ ID NO: 3204005 - RNA, 19 nt, Human
agcugcgguccacccagga

SEQ ID NO: 3204006 - RNA, 18 nt, Human
agcugcgguccacccagg

SEQ ID NO: 3204007 - RNA, 17 nt, Human
agcugcgguccacccag

SEQ ID NO: 3204008 - RNA, 16 nt, Human
agcugcgguccaccca

SEQ ID NO: 3204009 - RNA, 13 nt, Human
agcugcgguccac

SEQ ID NO: 3204010 - RNA, 17 nt, Human
agcuggucccacucagu

SEQ ID NO: 3204011 - RNA, 16 nt, Human
agcuggucccacucag

SEQ ID NO: 3204012 - RNA, 14 nt, Human
agcugcugacagug

SEQ ID NO: 3204013 - RNA, 13 nt, Human
agcugcugacagu

SEQ ID NO: 3204014 - RNA, 18 nt, Human
agcuggucccacucaguc

SEQ ID NO: 3204015 - RNA, 16 nt, Human
agcugguugagguuuc

SEQ ID NO: 3204016 - RNA, 22 nt, Human
agcugguuuuuagcggagacgg

SEQ ID NO: 3204017 - RNA, 19 nt, Human
agcuaauucuuugaccugu

SEQ ID NO: 3204018 - RNA, 16 nt, Human
agcucaccagccccag

SEQ ID NO: 3204019 - RNA, 12 nt, Human
agcucaaaugaa

SEQ ID NO: 3204020 - RNA, 16 nt, Human
agcucaaaugaaaugu

SEQ ID NO: 3204021 - RNA, 17 nt, Human
agcucaaaugaaaugua

SEQ ID NO: 3204022 - RNA, 23 nt, Human
agcucaaaugaaauguaugcauu

SEQ ID NO: 3204023 - RNA, 16 nt, Human
agcuaaucagcauucu

SEQ ID NO: 3204024 - RNA, 21 nt, Human
agcuaaucagcauucucacuc

SEQ ID NO: 3204025 - RNA, 18 nt, Human
agcuaauaacaugugaaa

SEQ ID NO: 3204026 - RNA, 22 nt, Human
agcguuuugcaagguaaaauuu

SEQ ID NO: 3204027 - RNA, 14 nt, Human
agcguuuugcaagg

SEQ ID NO: 3204028 - RNA, 13 nt, Human
agcguuuugcaag

SEQ ID NO: 3204029 - RNA, 15 nt, Human
agcucaccucucccu

SEQ ID NO: 3204030 - RNA, 18 nt, Human
agcucaccucucccuugg

SEQ ID NO: 3204031 - RNA, 19 nt, Human
agcucaccucucccuugga

SEQ ID NO: 3204032 - RNA, 12 nt, Human
agcucaccucuc

SEQ ID NO: 3204033 - RNA, 15 nt, Human
agcucaccagcccca

SEQ ID NO: 3204034 - RNA, 19 nt, Human
agcucaccagccccagugc

SEQ ID NO: 3204035 - RNA, 18 nt, Human
agcucagagaggguggga

SEQ ID NO: 3204036 - RNA, 14 nt, Human
agcucagagagggu

SEQ ID NO: 3204037 - RNA, 12 nt, Human
agcucagagagg

SEQ ID NO: 3204038 - RNA, 15 nt, Human
agcucagaaccacag

SEQ ID NO: 3204039 - RNA, 12 nt, Human
agccuggcuccc

SEQ ID NO: 3204040 - RNA, 15 nt, Human
agccuggcuccccug

SEQ ID NO: 3204041 - RNA, 16 nt, Human
agccuggcuccccugg

SEQ ID NO: 3204042 - RNA, 17 nt, Human
agccuggcuccccuggg

SEQ ID NO: 3204043 - RNA, 16 nt, Human
agccccaucuagggga

SEQ ID NO: 3204044 - RNA, 23 nt, Human
agcccucccugccccucccuuca

SEQ ID NO: 3204045 - RNA, 22 nt, Human
agcccucccugccccucccuuc

SEQ ID NO: 3204046 - RNA, 19 nt, Human
agcccucccugccccuccc

SEQ ID NO: 3204047 - RNA, 17 nt, Human
agcccucccugccccuc

SEQ ID NO: 3204048 - RNA, 16 nt, Human
agcccucccugccccu

SEQ ID NO: 3204049 - RNA, 15 nt, Human
agcccucccugcccc

SEQ ID NO: 3204050 - RNA, 12 nt, Human
agccugggaggu

SEQ ID NO: 3204051 - RNA, 17 nt, Human
agcgacagugagacucu

SEQ ID NO: 3204052 - RNA, 17 nt, Human
agcgacaucucugacuu

SEQ ID NO: 3204053 - RNA, 20 nt, Human
agcgacaucucugacuuucu

SEQ ID NO: 3204054 - RNA, 15 nt, Human
agccuuuggaaacag

SEQ ID NO: 3204055 - RNA, 17 nt, Human
agccuuuucacccuucu

SEQ ID NO: 3204056 - RNA, 23 nt, Human
agccuuuguugaacuguuagaau

SEQ ID NO: 3204057 - RNA, 21 nt, Human
agccuuuguugaacuguuaga

SEQ ID NO: 3204058 - RNA, 19 nt, Human
agccuuuguugaacuguua

SEQ ID NO: 3204059 - RNA, 15 nt, Human
agccuuuguugaacu

SEQ ID NO: 3204060 - RNA, 13 nt, Human
agcgagcccuggu

SEQ ID NO: 3204061 - RNA, 19 nt, Human
agcgagcccugguggcagu

SEQ ID NO: 3204062 - RNA, 22 nt, Human
agcgagggccccagcgugaagc

SEQ ID NO: 3204063 - RNA, 16 nt, Human
agcuuuuacucccuga

SEQ ID NO: 3204064 - RNA, 12 nt, Human
aggaacaaggca

SEQ ID NO: 3204065 - RNA, 13 nt, Human
aggaacaaaucuu

SEQ ID NO: 3204066 - RNA, 14 nt, Human
aggaaauuugcagc

SEQ ID NO: 3204067 - RNA, 13 nt, Human
aggaacaaggcaa

SEQ ID NO: 3204068 - RNA, 16 nt, Human
aggaacaaggcaaggc

SEQ ID NO: 3204069 - RNA, 17 nt, Human
aggaacaaggcaaggcu

SEQ ID NO: 3204070 - RNA, 19 nt, Human
aggaacaaggcaaggcugu

SEQ ID NO: 3204071 - RNA, 16 nt, Human
aggaaccauaaucaau

SEQ ID NO: 3204072 - RNA, 15 nt, Human
aggaaccaaagcgaa

SEQ ID NO: 3204073 - RNA, 13 nt, Human
aggaaccaaagcg

SEQ ID NO: 3204074 - RNA, 20 nt, Human
aggaacaaggcaaggcuguc

SEQ ID NO: 3204075 - RNA, 17 nt, Human
aggaacaaaucuuccug

SEQ ID NO: 3204076 - RNA, 16 nt, Human
aggaacaaaucuuccu

SEQ ID NO: 3204077 - RNA, 15 nt, Human
aggaacaaaucuucc

SEQ ID NO: 3204078 - RNA, 14 nt, Human
aggaacaaaucuuc

SEQ ID NO: 3204079 - RNA, 22 nt, Human
aggaacugcugggcuuggcagc

SEQ ID NO: 3204080 - RNA, 23 nt, Human
aggaaccauaguugacaguucca

SEQ ID NO: 3204081 - RNA, 16 nt, Human
aggaacugcugggcuu

SEQ ID NO: 3204082 - RNA, 14 nt, Human
aggaaccucugauu

SEQ ID NO: 3204083 - RNA, 17 nt, Human
aggaaccucugauuuau

SEQ ID NO: 3204084 - RNA, 18 nt, Human
aggaaccucugauuuauu

SEQ ID NO: 3204085 - RNA, 21 nt, Human
aggaaccucugauuuauuuug

SEQ ID NO: 3204086 - RNA, 22 nt, Human
aggaaccucugauuuauuuugu

SEQ ID NO: 3204087 - RNA, 13 nt, Human
aggaaguagagga

SEQ ID NO: 3204088 - RNA, 15 nt, Human
aggaaguagcacagg

SEQ ID NO: 3204089 - RNA, 23 nt, Human
aggaaguccuuaucuagcugcau

SEQ ID NO: 3204090 - RNA, 19 nt, Human
aggaaguagcacaggcuga

SEQ ID NO: 3204091 - RNA, 18 nt, Human
aggaaguagcacaggcug

SEQ ID NO: 3204092 - RNA, 16 nt, Human
aggaaguagcacaggc

SEQ ID NO: 3204093 - RNA, 15 nt, Human
aggaaggcugucuca

SEQ ID NO: 3204094 - RNA, 20 nt, Human
aggaaggcugucucagauaa

SEQ ID NO: 3204095 - RNA, 15 nt, Human
aggaaggcuuugaaa

SEQ ID NO: 3204096 - RNA, 19 nt, Human
aggaagggauguauuugua

SEQ ID NO: 3204097 - RNA, 15 nt, Human
aggaaggcugagagg

SEQ ID NO: 3204098 - RNA, 22 nt, Human
aggaaggcugagaggagagaga

SEQ ID NO: 3204099 - RNA, 23 nt, Human
aggaagugauuuuugagcccuug

SEQ ID NO: 3204100 - RNA, 20 nt, Human
aggaauaaauugcuccuuga

SEQ ID NO: 3204101 - RNA, 19 nt, Human
aggaauaaauugcuccuug

SEQ ID NO: 3204102 - RNA, 15 nt, Human
aggaauaccuguccc

SEQ ID NO: 3204103 - RNA, 18 nt, Human
aggaauaccugucccccu

SEQ ID NO: 3204104 - RNA, 22 nt, Human
aggaauaccugucccccugaca

SEQ ID NO: 3204105 - RNA, 22 nt, Human
agcuuauuuuuacaguuauaga

SEQ ID NO: 3204106 - RNA, 14 nt, Human
agcuuauuuuuaca

SEQ ID NO: 3204107 - RNA, 20 nt, Human
agcuuauuuuggagagauag

SEQ ID NO: 3204108 - RNA, 18 nt, Human
agcuucauuuccuguguc

SEQ ID NO: 3204109 - RNA, 19 nt, Human
agcuucauuuccugugucu

SEQ ID NO: 3204110 - RNA, 22 nt, Human
agcuuuguuuguugucagcuga

SEQ ID NO: 3204111 - RNA, 23 nt, Human
agcuuuguuuguugucagcugaa

SEQ ID NO: 3204112 - RNA, 16 nt, Human
agcuuuuaaacccuau

SEQ ID NO: 3204113 - RNA, 17 nt, Human
agcuguaacaguucuuu

SEQ ID NO: 3204114 - RNA, 16 nt, Human
agcuguaacaguucuu

SEQ ID NO: 3204115 - RNA, 15 nt, Human
agcuguaacaguucu

SEQ ID NO: 3204116 - RNA, 15 nt, Human
aggagaggagagggg

SEQ ID NO: 3204117 - RNA, 12 nt, Human
aggaccugcccg

SEQ ID NO: 3204118 - RNA, 13 nt, Human
aggaccugcaaac

SEQ ID NO: 3204119 - RNA, 14 nt, Human
aggagacuuguagu

SEQ ID NO: 3204120 - RNA, 21 nt, Human
aggagacuguggagacugcuc

SEQ ID NO: 3204121 - RNA, 20 nt, Human
aggagacuguggagacugcu

SEQ ID NO: 3204122 - RNA, 22 nt, Human
aggacccggaggggccuggcag

SEQ ID NO: 3204123 - RNA, 21 nt, Human
aggacccggaggggccuggca

SEQ ID NO: 3204124 - RNA, 16 nt, Human
aggacccugccaggca

SEQ ID NO: 3204125 - RNA, 15 nt, Human
aggacccugccaggc

SEQ ID NO: 3204126 - RNA, 14 nt, Human
aggacccugccagg

SEQ ID NO: 3204127 - RNA, 13 nt, Human
aggacccugccag

SEQ ID NO: 3204128 - RNA, 20 nt, Human
aggacccggaggggccuggc

SEQ ID NO: 3204129 - RNA, 18 nt, Human
aggacccggaggggccug

SEQ ID NO: 3204130 - RNA, 22 nt, Human
aggaccaggguuggcaccuucc

SEQ ID NO: 3204131 - RNA, 12 nt, Human
aggaccagggcu

SEQ ID NO: 3204132 - RNA, 22 nt, Human
aggaauauuauauuuggaugca

SEQ ID NO: 3204133 - RNA, 19 nt, Human
aggaauauagauuaaauca

SEQ ID NO: 3204134 - RNA, 18 nt, Human
aggaauaugggagaaaua

SEQ ID NO: 3204135 - RNA, 20 nt, Human
aggaauauuauauuuggaug

SEQ ID NO: 3204136 - RNA, 19 nt, Human
aggaauauuauauuuggau

SEQ ID NO: 3204137 - RNA, 17 nt, Human
aggaauauuauauuugg

SEQ ID NO: 3204138 - RNA, 14 nt, Human
aggaauauuauauu

SEQ ID NO: 3204139 - RNA, 15 nt, Human
agggacccuccacca

SEQ ID NO: 3204140 - RNA, 15 nt, Human
agggacugaggggag

SEQ ID NO: 3204141 - RNA, 23 nt, Human
agggacugccagucccccugccc

SEQ ID NO: 3204142 - RNA, 18 nt, Human
aggcuuagucacugagac

SEQ ID NO: 3204143 - RNA, 17 nt, Human
aggcuuagucacugaga

SEQ ID NO: 3204144 - RNA, 22 nt, Human
aggcuguaucccaugagccuca

SEQ ID NO: 3204145 - RNA, 21 nt, Human
aggcuguaucccaugagccuc

SEQ ID NO: 3204146 - RNA, 20 nt, Human
aggcuguaucccaugagccu

SEQ ID NO: 3204147 - RNA, 23 nt, Human
aggcuggucucgaacuccugacc

SEQ ID NO: 3204148 - RNA, 15 nt, Human
aggcugacuccuggu

SEQ ID NO: 3204149 - RNA, 16 nt, Human
aggcugacuccugguc

SEQ ID NO: 3204150 - RNA, 18 nt, Human
aggcugagacagugaauu

SEQ ID NO: 3204151 - RNA, 18 nt, Human
aggcuggguucugauccu

SEQ ID NO: 3204152 - RNA, 22 nt, Human
aggcuaauguuggcagaugcag

SEQ ID NO: 3204153 - RNA, 19 nt, Human
aggcuaauguuggcagaug

SEQ ID NO: 3204154 - RNA, 23 nt, Human
aggcuaauguuggcagaugcagc

SEQ ID NO: 3204155 - RNA, 21 nt, Human
aggcccucugcccacucccug

SEQ ID NO: 3204156 - RNA, 22 nt, Human
aggcccucugcccacucccugc

SEQ ID NO: 3204157 - RNA, 23 nt, Human
aggcccucugcccacucccugca

SEQ ID NO: 3204158 - RNA, 15 nt, Human
aggcccuucucucca

SEQ ID NO: 3204159 - RNA, 19 nt, Human
aggcccuucucuccagccc

SEQ ID NO: 3204160 - RNA, 12 nt, Human
aggcccuucucu

SEQ ID NO: 3204161 - RNA, 22 nt, Human
aggcccuuccucuccacugccu

SEQ ID NO: 3204162 - RNA, 19 nt, Human
aggcccuuccucuccacug

SEQ ID NO: 3204163 - RNA, 19 nt, Human
aggcauuccccaggaggcc

SEQ ID NO: 3204164 - RNA, 20 nt, Human
aggcauuccccaggaggcca

SEQ ID NO: 3204165 - RNA, 23 nt, Human
aggccagcugcuugggcuucauc

SEQ ID NO: 3204166 - RNA, 13 nt, Human
aggccaggcccuc

SEQ ID NO: 3204167 - RNA, 14 nt, Human
aggccaggcccucu

SEQ ID NO: 3204168 - RNA, 15 nt, Human
aggccaggcccucug

SEQ ID NO: 3204169 - RNA, 11 nt, Human
aggccaucugg

SEQ ID NO: 3204170 - RNA, 10 nt, Human
aggccaucug

SEQ ID NO: 3204171 - RNA, 20 nt, Human
aggccauggaggcaguagga

SEQ ID NO: 3204172 - RNA, 16 nt, Human
aggccauggaggcagu

SEQ ID NO: 3204173 - RNA, 21 nt, Human
aggccaucuggagagcccaga

SEQ ID NO: 3204174 - RNA, 20 nt, Human
aggccaucuggagagcccag

SEQ ID NO: 3204175 - RNA, 16 nt, Human
aggccaucuggagagc

SEQ ID NO: 3204176 - RNA, 15 nt, Human
aggccaucuggagag

SEQ ID NO: 3204177 - RNA, 14 nt, Human
aggccaucuggaga

SEQ ID NO: 3204178 - RNA, 18 nt, Human
aggcauuccccaggaggc

SEQ ID NO: 3204179 - RNA, 17 nt, Human
aggcauuccccaggagg

SEQ ID NO: 3204180 - RNA, 12 nt, Human
aggcauguucuc

SEQ ID NO: 3204181 - RNA, 19 nt, Human
aggcauguucucugaggac

SEQ ID NO: 3204182 - RNA, 18 nt, Human
aggcauguucucugagga

SEQ ID NO: 3204183 - RNA, 19 nt, Human
aggcaugugaugagaggaa

SEQ ID NO: 3204184 - RNA, 20 nt, Human
aggcaugugaugagaggaaa

SEQ ID NO: 3204185 - RNA, 21 nt, Human
aggcaugugaugagaggaaau

SEQ ID NO: 3204186 - RNA, 17 nt, Human
aggcauguucucugagg

SEQ ID NO: 3204187 - RNA, 17 nt, Human
aggcaugugaugagagg

SEQ ID NO: 3204188 - RNA, 16 nt, Human
aggcaugggcuugcug

SEQ ID NO: 3204189 - RNA, 22 nt, Human
aggcaugucccaugugagcugc

SEQ ID NO: 3204190 - RNA, 15 nt, Human
aggcaugguggccca

SEQ ID NO: 3204191 - RNA, 17 nt, Human
aggcaugggccaccacg

SEQ ID NO: 3204192 - RNA, 15 nt, Human
aggcaugggccacca

SEQ ID NO: 3204193 - RNA, 19 nt, Human
aggcauggaugaauaaaug

SEQ ID NO: 3204194 - RNA, 18 nt, Human
aggcagcacgugcacaaa

SEQ ID NO: 3204195 - RNA, 16 nt, Human
aggagaggauggccca

SEQ ID NO: 3204196 - RNA, 14 nt, Human
aggcagagcccaga

SEQ ID NO: 3204197 - RNA, 13 nt, Human
aggcagagaaauc

SEQ ID NO: 3204198 - RNA, 14 nt, Human
aggcagagaaaucu

SEQ ID NO: 3204199 - RNA, 19 nt, Human
aggucccuuucauuugcua

SEQ ID NO: 3204200 - RNA, 14 nt, Human
agguacucuccugg

SEQ ID NO: 3204201 - RNA, 13 nt, Human
agguacucuccug

SEQ ID NO: 3204202 - RNA, 14 nt, Human
agguaacaggcaga

SEQ ID NO: 3204203 - RNA, 13 nt, Human
agguaacaggcag

SEQ ID NO: 3204204 - RNA, 16 nt, Human
agguaacaggcagaua

SEQ ID NO: 3204205 - RNA, 22 nt, Human
agguacgaaaagaggggaagag

SEQ ID NO: 3204206 - RNA, 22 nt, Human
aggucuauuuggauuauucuuu

SEQ ID NO: 3204207 - RNA, 14 nt, Human
aggucuauuuggau

SEQ ID NO: 3204208 - RNA, 21 nt, Human
aggucguuuuaaaaacaaaaa

SEQ ID NO: 3204209 - RNA, 22 nt, Human
aggguuuugccauguuggccag

SEQ ID NO: 3204210 - RNA, 16 nt, Human
agggaugguguucaaa

SEQ ID NO: 3204211 - RNA, 12 nt, Human
agggauguauuu

SEQ ID NO: 3204212 - RNA, 14 nt, Human
agggauguauuugu

SEQ ID NO: 3204213 - RNA, 14 nt, Human
agggaugguguuca

SEQ ID NO: 3204214 - RNA, 15 nt, Human
agggauuagggagag

SEQ ID NO: 3204215 - RNA, 12 nt, Human
agggccuggccu

SEQ ID NO: 3204216 - RNA, 13 nt, Human
agggccuggccug

SEQ ID NO: 3204217 - RNA, 15 nt, Human
agggccugcaaggga

SEQ ID NO: 3204218 - RNA, 14 nt, Human
agggccugcaaggg

SEQ ID NO: 3204219 - RNA, 16 nt, Human
agggauacccauccca

SEQ ID NO: 3204220 - RNA, 22 nt, Human
agggauacgagcggaguccccu

SEQ ID NO: 3204221 - RNA, 18 nt, Human
aggggcaggaggaagggg

SEQ ID NO: 3204222 - RNA, 13 nt, Human
aggggcaggagga

SEQ ID NO: 3204223 - RNA, 12 nt, Human
aggggcaggagg

SEQ ID NO: 3204224 - RNA, 16 nt, Human
agggccuggcccaugu

SEQ ID NO: 3204225 - RNA, 14 nt, Human
agggccuggcccau

SEQ ID NO: 3204226 - RNA, 13 nt, Human
agggccuggccca

SEQ ID NO: 3204227 - RNA, 22 nt, Human
aggggcccaaauucuuucagug

SEQ ID NO: 3204228 - RNA, 16 nt, Human
agggucccugguggca

SEQ ID NO: 3204229 - RNA, 17 nt, Human
agggucccugguggcag

SEQ ID NO: 3204230 - RNA, 20 nt, Human
agggucccugguggcagcuc

SEQ ID NO: 3204231 - RNA, 22 nt, Human
agggucccugguggcagcucac

SEQ ID NO: 3204232 - RNA, 12 nt, Human
agggucccuggu

SEQ ID NO: 3204233 - RNA, 14 nt, Human
agggucccuggugg

SEQ ID NO: 3204234 - RNA, 19 nt, Human
agggucacuggggcccaag

SEQ ID NO: 3204235 - RNA, 13 nt, Human
aggguauuccaga

SEQ ID NO: 3204236 - RNA, 21 nt, Human
aggguaucuggugacuuuccu

SEQ ID NO: 3204237 - RNA, 15 nt, Human
aggguaucuggugac

SEQ ID NO: 3204238 - RNA, 13 nt, Human
aggggccuggcag

SEQ ID NO: 3204239 - RNA, 12 nt, Human
aggggccuggca

SEQ ID NO: 3204240 - RNA, 16 nt, Human
agucuguucugguaau

SEQ ID NO: 3204241 - RNA, 16 nt, Human
agucuguugauuaaag

SEQ ID NO: 3204242 - RNA, 19 nt, Human
agugaauuugggcugcugu

SEQ ID NO: 3204243 - RNA, 17 nt, Human
agugaccucagcuuuga

SEQ ID NO: 3204244 - RNA, 17 nt, Human
agucugaaggcuggguu

SEQ ID NO: 3204245 - RNA, 19 nt, Human
aguccuuaccagcagagca

SEQ ID NO: 3204246 - RNA, 16 nt, Human
aguccuuaucuagcug

SEQ ID NO: 3204247 - RNA, 18 nt, Human
aguccuuaucuagcugca

SEQ ID NO: 3204248 - RNA, 18 nt, Human
agucugaggccguugcug

SEQ ID NO: 3204249 - RNA, 17 nt, Human
agucugagggcuuguag

SEQ ID NO: 3204250 - RNA, 18 nt, Human
agucugagggcuuguagu

SEQ ID NO: 3204251 - RNA, 21 nt, Human
agucugagggcuuguaguucu

SEQ ID NO: 3204252 - RNA, 19 nt, Human
agugacgaaaacauugucc

SEQ ID NO: 3204253 - RNA, 14 nt, Human
agugacgguuccua

SEQ ID NO: 3204254 - RNA, 23 nt, Human
agugacgguuccuacacaggaca

SEQ ID NO: 3204255 - RNA, 20 nt, Human
agugacgguuccuacacagg

SEQ ID NO: 3204256 - RNA, 22 nt, Human
agugaccuggaaggcccagcac

SEQ ID NO: 3204257 - RNA, 18 nt, Human
agugaccucagcuuugau

SEQ ID NO: 3204258 - RNA, 12 nt, Human
agugaauugaag

SEQ ID NO: 3204259 - RNA, 19 nt, Human
aguccucuuuucugagagg

SEQ ID NO: 3204260 - RNA, 20 nt, Human
aguccuuaccagcagagcac

SEQ ID NO: 3204261 - RNA, 17 nt, Human
aguccugcaaccaaacu

SEQ ID NO: 3204262 - RNA, 22 nt, Human
aguccucuuuucugagaggacu

SEQ ID NO: 3204263 - RNA, 23 nt, Human
agucaugauguuuuuaaaaucuu

SEQ ID NO: 3204264 - RNA, 22 nt, Human
agucaugauguuuuuaaaaucu

SEQ ID NO: 3204265 - RNA, 19 nt, Human
agucaugcguuuaaucaca

SEQ ID NO: 3204266 - RNA, 15 nt, Human
agucaugaugaauca

SEQ ID NO: 3204267 - RNA, 13 nt, Human
agucaugauguuu

SEQ ID NO: 3204268 - RNA, 17 nt, Human
agucaugauguuuuuaa

SEQ ID NO: 3204269 - RNA, 14 nt, Human
agucaugauguuuu

SEQ ID NO: 3204270 - RNA, 21 nt, Human
agucaugauguuuuuaaaauc

SEQ ID NO: 3204271 - RNA, 20 nt, Human
agucaugauguuuuuaaaau

SEQ ID NO: 3204272 - RNA, 19 nt, Human
agucaugauguuuuuaaaa

SEQ ID NO: 3204273 - RNA, 18 nt, Human
agucaugauguuuuuaaa

SEQ ID NO: 3204274 - RNA, 14 nt, Human
agucaugugggcca

SEQ ID NO: 3204275 - RNA, 21 nt, Human
agucauuuuguguugaagagc

SEQ ID NO: 3204276 - RNA, 14 nt, Human
agucaugcuccccu

SEQ ID NO: 3204277 - RNA, 13 nt, Human
agucaugcucccc

SEQ ID NO: 3204278 - RNA, 23 nt, Human
agucaugcuccccugugccagcc

SEQ ID NO: 3204279 - RNA, 12 nt, Human
agucauggagaa

SEQ ID NO: 3204280 - RNA, 18 nt, Human
agucauggagaaccaccu

SEQ ID NO: 3204281 - RNA, 19 nt, Human
agucauggagaaccaccua

SEQ ID NO: 3204282 - RNA, 19 nt, Human
agucaugcuccccugugcc

SEQ ID NO: 3204283 - RNA, 18 nt, Human
agucaugcuccccugugc

SEQ ID NO: 3204284 - RNA, 21 nt, Human
agucaugcuccccugugccag

SEQ ID NO: 3204285 - RNA, 14 nt, Human
aguauuuuuaaagg

SEQ ID NO: 3204286 - RNA, 16 nt, Human
aguauuuuuguauuca

SEQ ID NO: 3204287 - RNA, 20 nt, Human
aguauccugagagcccagaa

SEQ ID NO: 3204288 - RNA, 17 nt, Human
aguacuuuauagaagaa

SEQ ID NO: 3204289 - RNA, 16 nt, Human
aguacuuuauagaaga

SEQ ID NO: 3204290 - RNA, 13 nt, Human
aguacuuuauaga

SEQ ID NO: 3204291 - RNA, 14 nt, Human
aguacuucuucugu

SEQ ID NO: 3204292 - RNA, 16 nt, Human
aguacuucuucuguaa

SEQ ID NO: 3204293 - RNA, 17 nt, Human
aguacuucuucuguaau

SEQ ID NO: 3204294 - RNA, 18 nt, Human
aguacuucuucuguaaua

SEQ ID NO: 3204295 - RNA, 19 nt, Human
aguacuucuucuguaauau

SEQ ID NO: 3204296 - RNA, 23 nt, Human
aguacuucuucuguaauauuuac

SEQ ID NO: 3204297 - RNA, 19 nt, Human
aguacuuuauagaagaaug

SEQ ID NO: 3204298 - RNA, 18 nt, Human
aguacuuuauagaagaau

SEQ ID NO: 3204299 - RNA, 13 nt, Human
agucaaaacuuua

SEQ ID NO: 3204300 - RNA, 15 nt, Human
agucaauuacauguu

SEQ ID NO: 3204301 - RNA, 22 nt, Human
agucacacaguauuacuucugc

SEQ ID NO: 3204302 - RNA, 19 nt, Human
aguaaauguaguucauacu

SEQ ID NO: 3204303 - RNA, 18 nt, Human
aguaaaucucuucugugu

SEQ ID NO: 3204304 - RNA, 16 nt, Human
aguaaaucucuucugu

SEQ ID NO: 3204305 - RNA, 15 nt, Human
aguaaaucucuucug

SEQ ID NO: 3204306 - RNA, 14 nt, Human
aguaaaucucuucu

SEQ ID NO: 3204307 - RNA, 14 nt, Human
aguaagaucacugu

SEQ ID NO: 3204308 - RNA, 15 nt, Human
aguaagaucacuguu

SEQ ID NO: 3204309 - RNA, 20 nt, Human
aguaagaucacuguuuagau

SEQ ID NO: 3204310 - RNA, 21 nt, Human
aguaagaucacuguuuagauu

SEQ ID NO: 3204311 - RNA, 18 nt, Human
aguaagaucucuuucuaa

SEQ ID NO: 3204312 - RNA, 14 nt, Human
aguaacacaggcca

SEQ ID NO: 3204313 - RNA, 19 nt, Human
aguacugguaagauuguua

SEQ ID NO: 3204314 - RNA, 20 nt, Human
aguacugguaagauuguuau

SEQ ID NO: 3204315 - RNA, 21 nt, Human
aguacugguaagauuguuauu

SEQ ID NO: 3204316 - RNA, 23 nt, Human
aguacugguaagauuguuauuaa

SEQ ID NO: 3204317 - RNA, 14 nt, Human
aguacuauguauca

SEQ ID NO: 3204318 - RNA, 12 nt, Human
aguacuauguau

SEQ ID NO: 3204319 - RNA, 22 nt, Human
aguacuucuccacccugcucuc

SEQ ID NO: 3204320 - RNA, 12 nt, Human
aguacuucuuuu

SEQ ID NO: 3204321 - RNA, 17 nt, Human
aguacuucuccacccug

SEQ ID NO: 3204322 - RNA, 17 nt, Human
aguacugugaauccagu

SEQ ID NO: 3204323 - RNA, 13 nt, Human
aguacugugaauc

SEQ ID NO: 3204324 - RNA, 19 nt, Human
aguacuacaguccucccau

SEQ ID NO: 3204325 - RNA, 22 nt, Human
aguacuacaguccucccaucuc

SEQ ID NO: 3204326 - RNA, 14 nt, Human
aguacuauaauuua

SEQ ID NO: 3204327 - RNA, 19 nt, Human
aguacuagagauauuuugu

SEQ ID NO: 3204328 - RNA, 21 nt, Human
aguacuagagauauuuuguaa

SEQ ID NO: 3204329 - RNA, 15 nt, Human
aguaagcauuucaaa

SEQ ID NO: 3204330 - RNA, 14 nt, Human
aguucagcuugggg

SEQ ID NO: 3204331 - RNA, 22 nt, Human
aguucagggaagauaaguugga

SEQ ID NO: 3204332 - RNA, 19 nt, Human
aguucagggaagauaaguu

SEQ ID NO: 3204333 - RNA, 13 nt, Human
aguucagcuuggg

SEQ ID NO: 3204334 - RNA, 15 nt, Human
aguucagcaaaacug

SEQ ID NO: 3204335 - RNA, 15 nt, Human
aguucaucuugaauu

SEQ ID NO: 3204336 - RNA, 19 nt, Human
aguucaucuugaauuguaa

SEQ ID NO: 3204337 - RNA, 13 nt, Human
aguucaucuugaa

SEQ ID NO: 3204338 - RNA, 18 nt, Human
aguugaaaagacuccaaa

SEQ ID NO: 3204339 - RNA, 14 nt, Human
aguugaaaagacuc

SEQ ID NO: 3204340 - RNA, 20 nt, Human
aguugaaaagacuccaaaga

SEQ ID NO: 3204341 - RNA, 19 nt, Human
aguugaaaagacuccaaag

SEQ ID NO: 3204342 - RNA, 17 nt, Human
aguugacucugcucuug

SEQ ID NO: 3204343 - RNA, 18 nt, Human
aguugacuagaaucgaca

SEQ ID NO: 3204344 - RNA, 22 nt, Human
aguucaucccuucucuuccagg

SEQ ID NO: 3204345 - RNA, 20 nt, Human
aguucaucccuucucuucca

SEQ ID NO: 3204346 - RNA, 23 nt, Human
aguugaguauauuauaauagauu

SEQ ID NO: 3204347 - RNA, 18 nt, Human
aguugagcuaugacuuaa

SEQ ID NO: 3204348 - RNA, 19 nt, Human
aguugaguauauuauaaua

SEQ ID NO: 3204349 - RNA, 15 nt, Human
aguugagcuaugacu

SEQ ID NO: 3204350 - RNA, 17 nt, Human
aguugagcuaugacuua

SEQ ID NO: 3204351 - RNA, 13 nt, Human
aguugagcuauga

SEQ ID NO: 3204352 - RNA, 16 nt, Human
agugccuuauggaaca

SEQ ID NO: 3204353 - RNA, 10 nt, Human
agugccuuau

SEQ ID NO: 3204354 - RNA, 13 nt, Human
agugccuuaugga

SEQ ID NO: 3204355 - RNA, 14 nt, Human
agugccuuauggaa

SEQ ID NO: 3204356 - RNA, 15 nt, Human
agugccuuauggaac

SEQ ID NO: 3204357 - RNA, 21 nt, Human
aguggccuccgucacuaccug

SEQ ID NO: 3204358 - RNA, 21 nt, Human
aguggccucgaacuccuggca

SEQ ID NO: 3204359 - RNA, 22 nt, Human
aguggccuccgucacuaccugg

SEQ ID NO: 3204360 - RNA, 24 nt, Human
agugauccucccaccucagccucc

SEQ ID NO: 3204361 - RNA, 23 nt, Human
agugauccucccaccucagccuc

SEQ ID NO: 3204362 - RNA, 18 nt, Human
agugauccucccaccuca

SEQ ID NO: 3204363 - RNA, 15 nt, Human
agugauccucccacc

SEQ ID NO: 3204364 - RNA, 14 nt, Human
agugauccucccac

SEQ ID NO: 3204365 - RNA, 17 nt, Human
agugccuuacacaaugg

SEQ ID NO: 3204366 - RNA, 15 nt, Human
agugauucuccugcc

SEQ ID NO: 3204367 - RNA, 18 nt, Human
agugccuuacacaauggu

SEQ ID NO: 3204368 - RNA, 14 nt, Human
agugauucuccugc

SEQ ID NO: 3204369 - RNA, 21 nt, Human
agugauucucaugccucagcc

SEQ ID NO: 3204370 - RNA, 13 nt, Human
agugauccuccca

SEQ ID NO: 3204371 - RNA, 14 nt, Human
agugucuggcugca

SEQ ID NO: 3204372 - RNA, 13 nt, Human
agugucuggcugc

SEQ ID NO: 3204373 - RNA, 12 nt, Human
agugucuggcug

SEQ ID NO: 3204374 - RNA, 18 nt, Human
agugucuggaucaguaaa

SEQ ID NO: 3204375 - RNA, 20 nt, Human
agugucuggaucaguaaaau

SEQ ID NO: 3204376 - RNA, 21 nt, Human
agugucuggaucaguaaaauu

SEQ ID NO: 3204377 - RNA, 23 nt, Human
agugucuggaucaguaaaauuau

SEQ ID NO: 3204378 - RNA, 19 nt, Human
agugucaaugcagccccca

SEQ ID NO: 3204379 - RNA, 14 nt, Human
agugggcagucaca

SEQ ID NO: 3204380 - RNA, 16 nt, Human
agugggagcugccugu

SEQ ID NO: 3204381 - RNA, 21 nt, Human
agugggacagggcauggccag

SEQ ID NO: 3204382 - RNA, 19 nt, Human
agugggacagggcauggcc

SEQ ID NO: 3204383 - RNA, 18 nt, Human
auaucaucacguauguua

SEQ ID NO: 3204384 - RNA, 20 nt, Human
auaucaucacguauguuaua

SEQ ID NO: 3204385 - RNA, 17 nt, Human
auaugcagauuuugccc

SEQ ID NO: 3204386 - RNA, 18 nt, Human
auaugcagaaauagacaa

SEQ ID NO: 3204387 - RNA, 19 nt, Human
auaugcacuaagucucuuu

SEQ ID NO: 3204388 - RNA, 17 nt, Human
auaugcucugcauguua

SEQ ID NO: 3204389 - RNA, 16 nt, Human
auaugcucugcauguu

SEQ ID NO: 3204390 - RNA, 20 nt, Human
auaugcucugcauguuacau

SEQ ID NO: 3204391 - RNA, 23 nt, Human
auaugcacuaagucucuuuuuua

SEQ ID NO: 3204392 - RNA, 19 nt, Human
auauucaggaagcucaggg

SEQ ID NO: 3204393 - RNA, 17 nt, Human
auauucaggaagcucag

SEQ ID NO: 3204394 - RNA, 16 nt, Human
auauucacacuugaac

SEQ ID NO: 3204395 - RNA, 13 nt, Human
auauucacaucuu

SEQ ID NO: 3204396 - RNA, 15 nt, Human
auauucacacuugaa

SEQ ID NO: 3204397 - RNA, 19 nt, Human
auauuucccugaaggaacc

SEQ ID NO: 3204398 - RNA, 14 nt, Human
auauuuaugaagaa

SEQ ID NO: 3204399 - RNA, 13 nt, Human
auauuuaugaaga

SEQ ID NO: 3204400 - RNA, 21 nt, Human
auauuuaugaagaaaauacuu

SEQ ID NO: 3204401 - RNA, 19 nt, Human
auauuuaugaagaaaauac

SEQ ID NO: 3204402 - RNA, 17 nt, Human
auauuuaugaagaaaau

SEQ ID NO: 3204403 - RNA, 15 nt, Human
auauuuaugaagaaa

SEQ ID NO: 3204404 - RNA, 19 nt, Human
auauucauaguagaacuuu

SEQ ID NO: 3204405 - RNA, 15 nt, Human
auagcagcuuauuca

SEQ ID NO: 3204406 - RNA, 15 nt, Human
auagcagccuggcuc

SEQ ID NO: 3204407 - RNA, 21 nt, Human
auagcagccuggcuccccugg

SEQ ID NO: 3204408 - RNA, 15 nt, Human
auagcauugucuauu

SEQ ID NO: 3204409 - RNA, 15 nt, Human
auagcauuguaaaag

SEQ ID NO: 3204410 - RNA, 16 nt, Human
auagcauuuaugguaa

SEQ ID NO: 3204411 - RNA, 17 nt, Human
auagcauugucuauuuu

SEQ ID NO: 3204412 - RNA, 17 nt, Human
auagcauuuaugguaau

SEQ ID NO: 3204413 - RNA, 19 nt, Human
auagccccucuccccgcag

SEQ ID NO: 3204414 - RNA, 17 nt, Human
auagcacagacccugcc

SEQ ID NO: 3204415 - RNA, 18 nt, Human
auagcacagacccugccc

SEQ ID NO: 3204416 - RNA, 19 nt, Human
auagcagaucuguuuugug

SEQ ID NO: 3204417 - RNA, 15 nt, Human
auagcacagacccug

SEQ ID NO: 3204418 - RNA, 23 nt, Human
auagaaacugucuagcacuuccu

SEQ ID NO: 3204419 - RNA, 15 nt, Human
auagaaagcuuuguu

SEQ ID NO: 3204420 - RNA, 15 nt, Human
auagaaaguguucug

SEQ ID NO: 3204421 - RNA, 18 nt, Human
auagaaaguguucuguua

SEQ ID NO: 3204422 - RNA, 17 nt, Human
auagaaaguguucuguu

SEQ ID NO: 3204423 - RNA, 23 nt, Human
auagaaaguguucuguuacaaaa

SEQ ID NO: 3204424 - RNA, 22 nt, Human
auagaaaguguucuguuacaaa

SEQ ID NO: 3204425 - RNA, 20 nt, Human
auagaaaguguucuguuaca

SEQ ID NO: 3204426 - RNA, 19 nt, Human
auagaaaguguucuguuac

SEQ ID NO: 3204427 - RNA, 18 nt, Human
auacuuuaguagacauuu

SEQ ID NO: 3204428 - RNA, 20 nt, Human
auacuuuaguagacauuuau

SEQ ID NO: 3204429 - RNA, 15 nt, Human
auacuuuaucaaugu

SEQ ID NO: 3204430 - RNA, 21 nt, Human
auacuuuaucaaugugucuuu

SEQ ID NO: 3204431 - RNA, 20 nt, Human
auacuuguuuuuguaaagaa

SEQ ID NO: 3204432 - RNA, 15 nt, Human
auacuuguuuuugua

SEQ ID NO: 3204433 - RNA, 19 nt, Human
auacuuguuuuuguaaaga

SEQ ID NO: 3204434 - RNA, 16 nt, Human
auacuuguuuuuguaa

SEQ ID NO: 3204435 - RNA, 16 nt, Human
auacuuugaguuuuga

SEQ ID NO: 3204436 - RNA, 18 nt, Human
auacuuuguauuguccua

SEQ ID NO: 3204437 - RNA, 10 nt, Human
auacuuugua

SEQ ID NO: 3204438 - RNA, 13 nt, Human
auacuuuguauug

SEQ ID NO: 3204439 - RNA, 14 nt, Human
auacuuuguauugu

SEQ ID NO: 3204440 - RNA, 22 nt, Human
auacuuugcagcacagcugaga

SEQ ID NO: 3204441 - RNA, 16 nt, Human
auacuuugcauugucu

SEQ ID NO: 3204442 - RNA, 18 nt, Human
auacuuugcauugucugu

SEQ ID NO: 3204443 - RNA, 17 nt, Human
auagccuaggugacaga

SEQ ID NO: 3204444 - RNA, 15 nt, Human
auagccuaggugaca

SEQ ID NO: 3204445 - RNA, 14 nt, Human
auaguaaaaauaaa

SEQ ID NO: 3204446 - RNA, 13 nt, Human
auaguaaaaauaa

SEQ ID NO: 3204447 - RNA, 14 nt, Human
auaguaaauguagu

SEQ ID NO: 3204448 - RNA, 16 nt, Human
auaguaaauguaguuc

SEQ ID NO: 3204449 - RNA, 23 nt, Human
auaguaauauaauacacaaaauc

SEQ ID NO: 3204450 - RNA, 13 nt, Human
auaguaauauaau

SEQ ID NO: 3204451 - RNA, 21 nt, Human
auauacaacaccaaaaaauau

SEQ ID NO: 3204452 - RNA, 15 nt, Human
auauacaaaacuuua

SEQ ID NO: 3204453 - RNA, 16 nt, Human
auauacaaaacuuuau

SEQ ID NO: 3204454 - RNA, 18 nt, Human
auauaauauugucucuuu

SEQ ID NO: 3204455 - RNA, 11 nt, Human
auauaaugaac

SEQ ID NO: 3204456 - RNA, 21 nt, Human
auauaauacacaaaaucaaau

SEQ ID NO: 3204457 - RNA, 19 nt, Human
auauaauacacaaaaucaa

SEQ ID NO: 3204458 - RNA, 18 nt, Human
auauaauacacaaaauca

SEQ ID NO: 3204459 - RNA, 17 nt, Human
auauaauacacaaaauc

SEQ ID NO: 3204460 - RNA, 16 nt, Human
auauaauacacaaaau

SEQ ID NO: 3204461 - RNA, 22 nt, Human
auaguacuagagauauuuugua

SEQ ID NO: 3204462 - RNA, 23 nt, Human
auaguacuagagauauuuuguaa

SEQ ID NO: 3204463 - RNA, 16 nt, Human
aguuuggcaaacucuc

SEQ ID NO: 3204464 - RNA, 18 nt, Human
aguuuggcaaacucucca

SEQ ID NO: 3204465 - RNA, 10 nt, Human
aguuugcacu

SEQ ID NO: 3204466 - RNA, 23 nt, Human
aguuugcacucaaaucuuaagaa

SEQ ID NO: 3204467 - RNA, 22 nt, Human
aguuugcacucaaaucuuaaga

SEQ ID NO: 3204468 - RNA, 20 nt, Human
aguuugcacucaaaucuuaa

SEQ ID NO: 3204469 - RNA, 18 nt, Human
aguuugcacucaaaucuu

SEQ ID NO: 3204470 - RNA, 13 nt, Human
auaaaacugaugu

SEQ ID NO: 3204471 - RNA, 15 nt, Human
auaaaacugauguga

SEQ ID NO: 3204472 - RNA, 16 nt, Human
auaaaacugaugugaa

SEQ ID NO: 3204473 - RNA, 17 nt, Human
auaaaacugaugugaaa

SEQ ID NO: 3204474 - RNA, 18 nt, Human
auaaaacugaugugaaac

SEQ ID NO: 3204475 - RNA, 19 nt, Human
auaaaacugaugugaaacu

SEQ ID NO: 3204476 - RNA, 20 nt, Human
aguuugagaucagccugggc

SEQ ID NO: 3204477 - RNA, 18 nt, Human
aguuugagaucagccugg

SEQ ID NO: 3204478 - RNA, 19 nt, Human
aguuugagaucagccuggg

SEQ ID NO: 3204479 - RNA, 24 nt, Human
aguuguuaccccaagcgcccuggc

SEQ ID NO: 3204480 - RNA, 22 nt, Human
aguuguuaccccaagcgcccug

SEQ ID NO: 3204481 - RNA, 17 nt, Human
aguuugaaaagcaauau

SEQ ID NO: 3204482 - RNA, 21 nt, Human
aguuugaaaagcaauauugua

SEQ ID NO: 3204483 - RNA, 14 nt, Human
aguuucuuuacauu

SEQ ID NO: 3204484 - RNA, 14 nt, Human
auaaagcaauaaga

SEQ ID NO: 3204485 - RNA, 19 nt, Human
auaaagcaauaagaacaaa

SEQ ID NO: 3204486 - RNA, 14 nt, Human
auaaauuuauuuac

SEQ ID NO: 3204487 - RNA, 19 nt, Human
auaaauuuauuuacugcua

SEQ ID NO: 3204488 - RNA, 17 nt, Human
auaaauuucgcuucuua

SEQ ID NO: 3204489 - RNA, 15 nt, Human
auaaauuuauuuacu

SEQ ID NO: 3204490 - RNA, 15 nt, Human
auaaauugucuuaau

SEQ ID NO: 3204491 - RNA, 18 nt, Human
auaaauugucuuaaugga

SEQ ID NO: 3204492 - RNA, 13 nt, Human
auaaauugucuuu

SEQ ID NO: 3204493 - RNA, 17 nt, Human
auaaauugucuuuaaaa

SEQ ID NO: 3204494 - RNA, 21 nt, Human
auaaauugucuuuaaaaacug

SEQ ID NO: 3204495 - RNA, 22 nt, Human
auaaauugucuuuaaaaacugu

SEQ ID NO: 3204496 - RNA, 14 nt, Human
auaaauuguuuagu

SEQ ID NO: 3204497 - RNA, 22 nt, Human
auaaauuguuuaguggaaaaua

SEQ ID NO: 3204498 - RNA, 13 nt, Human
auaaauuuugaaa

SEQ ID NO: 3204499 - RNA, 14 nt, Human
auaaauuuugaaaa

SEQ ID NO: 3204500 - RNA, 15 nt, Human
auaaauuuugaaaag

SEQ ID NO: 3204501 - RNA, 16 nt, Human
auaaauuuugaaaagu

SEQ ID NO: 3204502 - RNA, 21 nt, Human
auaaauuuugaaaaguaauau

SEQ ID NO: 3204503 - RNA, 15 nt, Human
auaaauuuguguaau

SEQ ID NO: 3204504 - RNA, 20 nt, Human
auaaauuuguguaauauuac

SEQ ID NO: 3204505 - RNA, 18 nt, Human
auaacauguaauuaagua

SEQ ID NO: 3204506 - RNA, 13 nt, Human
auaacauguaauu

SEQ ID NO: 3204507 - RNA, 12 nt, Human
auaacauguaau

SEQ ID NO: 3204508 - RNA, 17 nt, Human
auacccacccccaccca

SEQ ID NO: 3204509 - RNA, 17 nt, Human
auacccccugcaaagcc

SEQ ID NO: 3204510 - RNA, 19 nt, Human
auacccccugcaaagccca

SEQ ID NO: 3204511 - RNA, 14 nt, Human
auacccacccccac

SEQ ID NO: 3204512 - RNA, 16 nt, Human
auacccacccccaccc

SEQ ID NO: 3204513 - RNA, 13 nt, Human
auacccaccccca

SEQ ID NO: 3204514 - RNA, 18 nt, Human
auacaaucauagcauugu

SEQ ID NO: 3204515 - RNA, 15 nt, Human
auacaauacauagga

SEQ ID NO: 3204516 - RNA, 12 nt, Human
auacaaucagcu

SEQ ID NO: 3204517 - RNA, 13 nt, Human
auacaaucagcug

SEQ ID NO: 3204518 - RNA, 14 nt, Human
auacaaucagcugc

SEQ ID NO: 3204519 - RNA, 15 nt, Human
auacaaucagcugcu

SEQ ID NO: 3204520 - RNA, 16 nt, Human
auacaaucagcugcuu

SEQ ID NO: 3204521 - RNA, 21 nt, Human
auacaaucagcugcuuuguua

SEQ ID NO: 3204522 - RNA, 16 nt, Human
auaauguuuauuaaau

SEQ ID NO: 3204523 - RNA, 17 nt, Human
auaauguuuauuaaaug

SEQ ID NO: 3204524 - RNA, 19 nt, Human
auaauguuuauuaaaugcu

SEQ ID NO: 3204525 - RNA, 22 nt, Human
auacacuuacacuuuaugcaca

SEQ ID NO: 3204526 - RNA, 13 nt, Human
auacacuuacacu

SEQ ID NO: 3204527 - RNA, 13 nt, Human
auaccuguccccc

SEQ ID NO: 3204528 - RNA, 14 nt, Human
auaccugucccccu

SEQ ID NO: 3204529 - RNA, 15 nt, Human
auaccugucccccug

SEQ ID NO: 3204530 - RNA, 16 nt, Human
auaccugucccccuga

SEQ ID NO: 3204531 - RNA, 20 nt, Human
auacccccugcaaagcccag

SEQ ID NO: 3204532 - RNA, 18 nt, Human
auaaggguaucuggugac

SEQ ID NO: 3204533 - RNA, 15 nt, Human
auaauguaaauaaag

SEQ ID NO: 3204534 - RNA, 21 nt, Human
auaagccagacaucaacagau

SEQ ID NO: 3204535 - RNA, 22 nt, Human
auaagccagacaucaacagaua

SEQ ID NO: 3204536 - RNA, 18 nt, Human
auaagccaugagaauguu

SEQ ID NO: 3204537 - RNA, 16 nt, Human
auaagccaugagaaug

SEQ ID NO: 3204538 - RNA, 16 nt, Human
auaagggaaaaaucaa

SEQ ID NO: 3204539 - RNA, 13 nt, Human
auaagggaaaaga

SEQ ID NO: 3204540 - RNA, 15 nt, Human
auaagggaaaagaua

SEQ ID NO: 3204541 - RNA, 16 nt, Human
auaagggaaaagauaa

SEQ ID NO: 3204542 - RNA, 15 nt, Human
auaagggaaaaauca

SEQ ID NO: 3204543 - RNA, 13 nt, Human
auaagggaaaaau

SEQ ID NO: 3204544 - RNA, 23 nt, Human
auaagggacugauguuugugcag

SEQ ID NO: 3204545 - RNA, 14 nt, Human
auaagccagacauc

SEQ ID NO: 3204546 - RNA, 19 nt, Human
aucccaugagccucagcau

SEQ ID NO: 3204547 - RNA, 16 nt, Human
auccccaagccuggca

SEQ ID NO: 3204548 - RNA, 18 nt, Human
auccccaagccuggcaag

SEQ ID NO: 3204549 - RNA, 14 nt, Human
aucccgugcuuuua

SEQ ID NO: 3204550 - RNA, 15 nt, Human
aucccggcugcccuu

SEQ ID NO: 3204551 - RNA, 19 nt, Human
auccagacccggcugcgug

SEQ ID NO: 3204552 - RNA, 15 nt, Human
auccagacccggcug

SEQ ID NO: 3204553 - RNA, 13 nt, Human
auccacucgccuu

SEQ ID NO: 3204554 - RNA, 19 nt, Human
auccaccguccccucccag

SEQ ID NO: 3204555 - RNA, 16 nt, Human
auccaccguccccucc

SEQ ID NO: 3204556 - RNA, 18 nt, Human
aucgcccuggcaggcagg

SEQ ID NO: 3204557 - RNA, 14 nt, Human
aucgccagcaaaac

SEQ ID NO: 3204558 - RNA, 19 nt, Human
auccuuguguuuaucagaa

SEQ ID NO: 3204559 - RNA, 18 nt, Human
auccuuucacuucuuucc

SEQ ID NO: 3204560 - RNA, 19 nt, Human
auccuuucacuucuuuccc

SEQ ID NO: 3204561 - RNA, 22 nt, Human
auccuuucacuucuuucccuuc

SEQ ID NO: 3204562 - RNA, 20 nt, Human
auccuuucacuucuuucccu

SEQ ID NO: 3204563 - RNA, 23 nt, Human
auccuucaaagucucaaugaaau

SEQ ID NO: 3204564 - RNA, 15 nt, Human
auccuugacuuuuua

SEQ ID NO: 3204565 - RNA, 14 nt, Human
auccuugacuuuuu

SEQ ID NO: 3204566 - RNA, 15 nt, Human
auccuugucaguugu

SEQ ID NO: 3204567 - RNA, 12 nt, Human
auccuucccacu

SEQ ID NO: 3204568 - RNA, 14 nt, Human
auccuugauaauau

SEQ ID NO: 3204569 - RNA, 14 nt, Human
auccuuacaaauga

SEQ ID NO: 3204570 - RNA, 21 nt, Human
auccuuacaaaugauugcuuu

SEQ ID NO: 3204571 - RNA, 18 nt, Human
auccuuacaaaugauugc

SEQ ID NO: 3204572 - RNA, 17 nt, Human
auccuuacaaaugauug

SEQ ID NO: 3204573 - RNA, 16 nt, Human
auccuuacaaaugauu

SEQ ID NO: 3204574 - RNA, 21 nt, Human
auccuuaucuaguguuugauu

SEQ ID NO: 3204575 - RNA, 14 nt, Human
aucaugucuggcua

SEQ ID NO: 3204576 - RNA, 14 nt, Human
aucaugucuauugu

SEQ ID NO: 3204577 - RNA, 16 nt, Human
aucaugucuauugucc

SEQ ID NO: 3204578 - RNA, 17 nt, Human
aucaugucuauugucca

SEQ ID NO: 3204579 - RNA, 21 nt, Human
aucaugucuauuguccaaagu

SEQ ID NO: 3204580 - RNA, 22 nt, Human
aucagcuugcccuguuaaaaga

SEQ ID NO: 3204581 - RNA, 20 nt, Human
aucaccuaauuaauuucagu

SEQ ID NO: 3204582 - RNA, 16 nt, Human
aucaugaaugcuuuua

SEQ ID NO: 3204583 - RNA, 18 nt, Human
aucaugaaugcuuuuagu

SEQ ID NO: 3204584 - RNA, 23 nt, Human
aucaugaauaacugauuaguaag

SEQ ID NO: 3204585 - RNA, 15 nt, Human
aucaugaauaacuga

SEQ ID NO: 3204586 - RNA, 20 nt, Human
aucaaagagguuuuaaaaaa

SEQ ID NO: 3204587 - RNA, 23 nt, Human
aucaaagagguuuuaaaaaaauc

SEQ ID NO: 3204588 - RNA, 12 nt, Human
aucaaaauuaca

SEQ ID NO: 3204589 - RNA, 14 nt, Human
aucaaaauuacaua

SEQ ID NO: 3204590 - RNA, 21 nt, Human
auauuucccugaaggaaccaa

SEQ ID NO: 3204591 - RNA, 18 nt, Human
auauuuccuauaccauuu

SEQ ID NO: 3204592 - RNA, 22 nt, Human
auauuuccuauaccauuuccgu

SEQ ID NO: 3204593 - RNA, 21 nt, Human
auauuuccuauaccauuuccg

SEQ ID NO: 3204594 - RNA, 23 nt, Human
auauuuccuauaccauuuccgua

SEQ ID NO: 3204595 - RNA, 24 nt, Human
aucaaaagguuaauaaaguaauua

SEQ ID NO: 3204596 - RNA, 14 nt, Human
aucaaauaugcaaa

SEQ ID NO: 3204597 - RNA, 21 nt, Human
aucacacccagcccauguggc

SEQ ID NO: 3204598 - RNA, 16 nt, Human
aucacacauguucaga

SEQ ID NO: 3204599 - RNA, 13 nt, Human
aucaccagacagg

SEQ ID NO: 3204600 - RNA, 20 nt, Human
aucaccaacgucugugccau

SEQ ID NO: 3204601 - RNA, 17 nt, Human
aucaccuaauuaauuuc

SEQ ID NO: 3204602 - RNA, 19 nt, Human
aucaccgaugcaaacauug

SEQ ID NO: 3204603 - RNA, 13 nt, Human
aucaccagggcca

SEQ ID NO: 3204604 - RNA, 21 nt, Human
aucaccgaaaacguggcugcu

SEQ ID NO: 3204605 - RNA, 22 nt, Human
aucucugcaggaaauggcugug

SEQ ID NO: 3204606 - RNA, 16 nt, Human
aucucugcuuuggaaa

SEQ ID NO: 3204607 - RNA, 22 nt, Human
aucuggacuccucuguccaggc

SEQ ID NO: 3204608 - RNA, 23 nt, Human
aucucugacuuucuuuagucuuu

SEQ ID NO: 3204609 - RNA, 20 nt, Human
aucucugaguucuguguauu

SEQ ID NO: 3204610 - RNA, 20 nt, Human
aucuggaugccucauuaugu

SEQ ID NO: 3204611 - RNA, 15 nt, Human
aucuggauucaaauu

SEQ ID NO: 3204612 - RNA, 18 nt, Human
aucuggaguucucaaaga

SEQ ID NO: 3204613 - RNA, 18 nt, Human
aucuggagucuuugauaa

SEQ ID NO: 3204614 - RNA, 19 nt, Human
aucuggagagcccagaguc

SEQ ID NO: 3204615 - RNA, 14 nt, Human
aucuuauuaaaguu

SEQ ID NO: 3204616 - RNA, 18 nt, Human
aucuggguagcuguaagg

SEQ ID NO: 3204617 - RNA, 17 nt, Human
aucuggguagcuguaag

SEQ ID NO: 3204618 - RNA, 15 nt, Human
aucuggguagcugua

SEQ ID NO: 3204619 - RNA, 14 nt, Human
aucuggguagcugu

SEQ ID NO: 3204620 - RNA, 15 nt, Human
aucuuauuaaaguuu

SEQ ID NO: 3204621 - RNA, 18 nt, Human
aucuuauuaaaguuucaa

SEQ ID NO: 3204622 - RNA, 16 nt, Human
aucuuauuaaaguuuc

SEQ ID NO: 3204623 - RNA, 23 nt, Human
aucuuauuaaaguuucaaaaauc

SEQ ID NO: 3204624 - RNA, 22 nt, Human
aucuuauuaaaguuucaaaaau

SEQ ID NO: 3204625 - RNA, 20 nt, Human
aucuuauuaaaguuucaaaa

SEQ ID NO: 3204626 - RNA, 19 nt, Human
aucuuauuaaaguuucaaa

SEQ ID NO: 3204627 - RNA, 15 nt, Human
aucuucguuaguaau

SEQ ID NO: 3204628 - RNA, 19 nt, Human
aucuucguuaguaaucugu

SEQ ID NO: 3204629 - RNA, 21 nt, Human
aucuucguuaguaaucuguau

SEQ ID NO: 3204630 - RNA, 22 nt, Human
aucuucguuaguaaucuguaua

SEQ ID NO: 3204631 - RNA, 23 nt, Human
aucuuccuggucgaaaguuagua

SEQ ID NO: 3204632 - RNA, 22 nt, Human
aucuuccuggucgaaaguuagu

SEQ ID NO: 3204633 - RNA, 20 nt, Human
aucuuccuggucgaaaguua

SEQ ID NO: 3204634 - RNA, 19 nt, Human
aucuuccuggucgaaaguu

SEQ ID NO: 3204635 - RNA, 18 nt, Human
aucuuccuggucgaaagu

SEQ ID NO: 3204636 - RNA, 20 nt, Human
aucuuccucugcuaaauuga

SEQ ID NO: 3204637 - RNA, 19 nt, Human
aucuuccucugcuaaauug

SEQ ID NO: 3204638 - RNA, 18 nt, Human
aucuuccucugcuaaauu

SEQ ID NO: 3204639 - RNA, 16 nt, Human
aucuuccucugcuaaa

SEQ ID NO: 3204640 - RNA, 15 nt, Human
aucuuccucugcuaa

SEQ ID NO: 3204641 - RNA, 14 nt, Human
aucuuccucugcua

SEQ ID NO: 3204642 - RNA, 22 nt, Human
aucuaguaauauauuuaaaggg

SEQ ID NO: 3204643 - RNA, 19 nt, Human
aucuaguaauauauuuaaa

SEQ ID NO: 3204644 - RNA, 18 nt, Human
aucuaguaauauauuuaa

SEQ ID NO: 3204645 - RNA, 16 nt, Human
aucuaguaauauauuu

SEQ ID NO: 3204646 - RNA, 14 nt, Human
aucuaguaauauau

SEQ ID NO: 3204647 - RNA, 19 nt, Human
aucuaggggagccuugauu

SEQ ID NO: 3204648 - RNA, 20 nt, Human
aucuaggggagccuugauuc

SEQ ID NO: 3204649 - RNA, 17 nt, Human
aucuaggggagccuuga

SEQ ID NO: 3204650 - RNA, 12 nt, Human
aucuaguguuug

SEQ ID NO: 3204651 - RNA, 19 nt, Human
aucuauaacuacauauuga

SEQ ID NO: 3204652 - RNA, 17 nt, Human
aucuauaacuacauauu

SEQ ID NO: 3204653 - RNA, 11 nt, Human
aucuauaauau

SEQ ID NO: 3204654 - RNA, 15 nt, Human
aucuauaaacacugu

SEQ ID NO: 3204655 - RNA, 14 nt, Human
aucuauaaacacug

SEQ ID NO: 3204656 - RNA, 13 nt, Human
aucuauaaacacu

SEQ ID NO: 3204657 - RNA, 21 nt, Human
aucucccuuuuccaugacugu

SEQ ID NO: 3204658 - RNA, 11 nt, Human
aucuauauaaa

SEQ ID NO: 3204659 - RNA, 12 nt, Human
aucuauauaaaa

SEQ ID NO: 3204660 - RNA, 13 nt, Human
aucuauauaaaau

SEQ ID NO: 3204661 - RNA, 14 nt, Human
aucuauauaaaaua

SEQ ID NO: 3204662 - RNA, 16 nt, Human
aucuauauaaaauaac

SEQ ID NO: 3204663 - RNA, 17 nt, Human
aucuauauaaaauaacu

SEQ ID NO: 3204664 - RNA, 21 nt, Human
aucuauaggaagauugaaccu

SEQ ID NO: 3204665 - RNA, 14 nt, Human
aucuauagaaagug

SEQ ID NO: 3204666 - RNA, 13 nt, Human
aucuauagaaagu

SEQ ID NO: 3204667 - RNA, 22 nt, Human
aucuauagaaaguguucuguua

SEQ ID NO: 3204668 - RNA, 17 nt, Human
aucuauagaaaguguuc

SEQ ID NO: 3204669 - RNA, 16 nt, Human
aucuauagaaaguguu

SEQ ID NO: 3204670 - RNA, 15 nt, Human
aucuauagaaagugu

SEQ ID NO: 3204671 - RNA, 12 nt, Human
aucuauauuaga

SEQ ID NO: 3204672 - RNA, 23 nt, Human
aucuauagaaaguguucuguuac

SEQ ID NO: 3204673 - RNA, 16 nt, Human
augaaaauauuuaaag

SEQ ID NO: 3204674 - RNA, 14 nt, Human
augaaaauauuuaa

SEQ ID NO: 3204675 - RNA, 13 nt, Human
augaaaauauuua

SEQ ID NO: 3204676 - RNA, 12 nt, Human
augaaaauauuu

SEQ ID NO: 3204677 - RNA, 13 nt, Human
augagggucuugg

SEQ ID NO: 3204678 - RNA, 14 nt, Human
augagggggcucag

SEQ ID NO: 3204679 - RNA, 15 nt, Human
augagggggcucagu

SEQ ID NO: 3204680 - RNA, 15 nt, Human
augacucuuuauugu

SEQ ID NO: 3204681 - RNA, 18 nt, Human
augacucuuuauugucug

SEQ ID NO: 3204682 - RNA, 16 nt, Human
augacugaaagcacug

SEQ ID NO: 3204683 - RNA, 13 nt, Human
augaaguacucau

SEQ ID NO: 3204684 - RNA, 21 nt, Human
augaaguacucauacauguua

SEQ ID NO: 3204685 - RNA, 17 nt, Human
augaaaacauggaacag

SEQ ID NO: 3204686 - RNA, 20 nt, Human
augaaaacauggaacagugu

SEQ ID NO: 3204687 - RNA, 18 nt, Human
augaccacacuccagcug

SEQ ID NO: 3204688 - RNA, 15 nt, Human
augaccacacuccag

SEQ ID NO: 3204689 - RNA, 20 nt, Human
augaccauaaaauuagacau

SEQ ID NO: 3204690 - RNA, 20 nt, Human
augacguacaaguaguucug

SEQ ID NO: 3204691 - RNA, 23 nt, Human
augacguacaaguaguucuguau

SEQ ID NO: 3204692 - RNA, 19 nt, Human
augacguacaaguaguucu

SEQ ID NO: 3204693 - RNA, 24 nt, Human
augacguacaaguaguucuguauu

SEQ ID NO: 3204694 - RNA, 17 nt, Human
auggcugugccucugcc

SEQ ID NO: 3204695 - RNA, 16 nt, Human
auggcugugccucugc

SEQ ID NO: 3204696 - RNA, 15 nt, Human
auggcugugccucug

SEQ ID NO: 3204697 - RNA, 18 nt, Human
augcuuuaggauguacag

SEQ ID NO: 3204698 - RNA, 15 nt, Human
augcuuguguuucuu

SEQ ID NO: 3204699 - RNA, 15 nt, Human
augcuuuagcuuauu

SEQ ID NO: 3204700 - RNA, 14 nt, Human
augcuuuagcuuau

SEQ ID NO: 3204701 - RNA, 19 nt, Human
augcugacccaugggcagg

SEQ ID NO: 3204702 - RNA, 17 nt, Human
augcugacccaugggca

SEQ ID NO: 3204703 - RNA, 21 nt, Human
augcugacuguacuccuccca

SEQ ID NO: 3204704 - RNA, 20 nt, Human
augcugacuguacuccuccc

SEQ ID NO: 3204705 - RNA, 19 nt, Human
augcugacuguacuccucc

SEQ ID NO: 3204706 - RNA, 16 nt, Human
augcugacccaugggc

SEQ ID NO: 3204707 - RNA, 13 nt, Human
augcugacccaug

SEQ ID NO: 3204708 - RNA, 13 nt, Human
augcugcccugug

SEQ ID NO: 3204709 - RNA, 12 nt, Human
augcugcccugu

SEQ ID NO: 3204710 - RNA, 14 nt, Human
augcugcccuguga

SEQ ID NO: 3204711 - RNA, 15 nt, Human
augcugcccugugag

SEQ ID NO: 3204712 - RNA, 16 nt, Human
augcugcccugugagu

SEQ ID NO: 3204713 - RNA, 15 nt, Human
augcugccuccagaa

SEQ ID NO: 3204714 - RNA, 12 nt, Human
augcugccucca

SEQ ID NO: 3204715 - RNA, 14 nt, Human
augcacaauuccau

SEQ ID NO: 3204716 - RNA, 16 nt, Human
augaugggucaguugu

SEQ ID NO: 3204717 - RNA, 18 nt, Human
augcacaaacagaggccg

SEQ ID NO: 3204718 - RNA, 20 nt, Human
augaugguuuccaauuucau

SEQ ID NO: 3204719 - RNA, 19 nt, Human
augaugaaaauauuuaaag

SEQ ID NO: 3204720 - RNA, 18 nt, Human
augaugaaaugaggucag

SEQ ID NO: 3204721 - RNA, 23 nt, Human
augaugaaaugaggucagagccu

SEQ ID NO: 3204722 - RNA, 21 nt, Human
augaugaucuuuaaaauacac

SEQ ID NO: 3204723 - RNA, 14 nt, Human
augaugauuucaga

SEQ ID NO: 3204724 - RNA, 18 nt, Human
augaugaucuuuaaaaua

SEQ ID NO: 3204725 - RNA, 15 nt, Human
augaugauccuaggc

SEQ ID NO: 3204726 - RNA, 15 nt, Human
augaugaaaauauuu

SEQ ID NO: 3204727 - RNA, 13 nt, Human
augaugaaaauau

SEQ ID NO: 3204728 - RNA, 21 nt, Human
augaucuuugcagacaggcaa

SEQ ID NO: 3204729 - RNA, 19 nt, Human
augaucuuugcagacaggc

SEQ ID NO: 3204730 - RNA, 18 nt, Human
augaucuuugcagacagg

SEQ ID NO: 3204731 - RNA, 16 nt, Human
augaucuuuaaaauac

SEQ ID NO: 3204732 - RNA, 17 nt, Human
augaucuuugcagacag

SEQ ID NO: 3204733 - RNA, 18 nt, Human
augaucuucuuuauaauu

SEQ ID NO: 3204734 - RNA, 19 nt, Human
augccuggauggggcugca

SEQ ID NO: 3204735 - RNA, 12 nt, Human
augccugcucuu

SEQ ID NO: 3204736 - RNA, 20 nt, Human
augccuggauggggcugcac

SEQ ID NO: 3204737 - RNA, 19 nt, Human
augccugcucuuuggccug

SEQ ID NO: 3204738 - RNA, 18 nt, Human
augccugcuuuuuggaaa

SEQ ID NO: 3204739 - RNA, 19 nt, Human
augccugcuuuuuggaaag

SEQ ID NO: 3204740 - RNA, 23 nt, Human
augccugcuuuuuggaaagucag

SEQ ID NO: 3204741 - RNA, 13 nt, Human
augcauuauuaaa

SEQ ID NO: 3204742 - RNA, 16 nt, Human
augcauuauuaaauug

SEQ ID NO: 3204743 - RNA, 19 nt, Human
augcauucacauuuagaaa

SEQ ID NO: 3204744 - RNA, 22 nt, Human
augcauucacauuuagaaaagu

SEQ ID NO: 3204745 - RNA, 23 nt, Human
augcauucacauuuagaaaagug

SEQ ID NO: 3204746 - RNA, 20 nt, Human
augcauuaaaagaaaauaaa

SEQ ID NO: 3204747 - RNA, 17 nt, Human
augcauuaaaagaaaau

SEQ ID NO: 3204748 - RNA, 16 nt, Human
augcauuaaaagaaaa

SEQ ID NO: 3204749 - RNA, 15 nt, Human
augcauuaaaagaaa

SEQ ID NO: 3204750 - RNA, 19 nt, Human
augccugucuuaauuuucu

SEQ ID NO: 3204751 - RNA, 21 nt, Human
augccuuguauaauauugaaa

SEQ ID NO: 3204752 - RNA, 13 nt, Human
augugaaaaaucu

SEQ ID NO: 3204753 - RNA, 14 nt, Human
augugaaaaaucug

SEQ ID NO: 3204754 - RNA, 19 nt, Human
augugaaaaaucugcuguu

SEQ ID NO: 3204755 - RNA, 19 nt, Human
augucacaggcagguccag

SEQ ID NO: 3204756 - RNA, 17 nt, Human
augucacaggcaggucc

SEQ ID NO: 3204757 - RNA, 18 nt, Human
augucaaugaacaagcau

SEQ ID NO: 3204758 - RNA, 16 nt, Human
augugaacagcggcug

SEQ ID NO: 3204759 - RNA, 17 nt, Human
augugaaauguaacugu

SEQ ID NO: 3204760 - RNA, 15 nt, Human
augugaacacaucag

SEQ ID NO: 3204761 - RNA, 15 nt, Human
auguauuugcugaca

SEQ ID NO: 3204762 - RNA, 13 nt, Human
auguauuuguagu

SEQ ID NO: 3204763 - RNA, 15 nt, Human
auguauuuguagugu

SEQ ID NO: 3204764 - RNA, 19 nt, Human
auguauuuguaguguuauu

SEQ ID NO: 3204765 - RNA, 21 nt, Human
auguauuuguaguguuauugc

SEQ ID NO: 3204766 - RNA, 13 nt, Human
augucacaggcag

SEQ ID NO: 3204767 - RNA, 23 nt, Human
auguaauuuuguguaagaaauac

SEQ ID NO: 3204768 - RNA, 22 nt, Human
auguaauuuuguguaagaaaua

SEQ ID NO: 3204769 - RNA, 17 nt, Human
auguaauuuuguguaag

SEQ ID NO: 3204770 - RNA, 16 nt, Human
auguaauuuuguguaa

SEQ ID NO: 3204771 - RNA, 15 nt, Human
auguaauuuugugua

SEQ ID NO: 3204772 - RNA, 14 nt, Human
auguaacugcucuu

SEQ ID NO: 3204773 - RNA, 23 nt, Human
auguaauuaaguacuauguauca

SEQ ID NO: 3204774 - RNA, 23 nt, Human
auguaacuguuaccauuggaaau

SEQ ID NO: 3204775 - RNA, 22 nt, Human
auguaacuguuaccauuggaaa

SEQ ID NO: 3204776 - RNA, 21 nt, Human
auguaacuguuaccauuggaa

SEQ ID NO: 3204777 - RNA, 18 nt, Human
auguaacuguuaccauug

SEQ ID NO: 3204778 - RNA, 22 nt, Human
auguaacuguccguaguaucag

SEQ ID NO: 3204779 - RNA, 13 nt, Human
auguaacuguuac

SEQ ID NO: 3204780 - RNA, 17 nt, Human
auguaacuguuaccauu

SEQ ID NO: 3204781 - RNA, 14 nt, Human
auguaacuguuacc

SEQ ID NO: 3204782 - RNA, 20 nt, Human
auguaacugcucuugggcaa

SEQ ID NO: 3204783 - RNA, 15 nt, Human
auguaacugcucuug

SEQ ID NO: 3204784 - RNA, 13 nt, Human
auguaauuugugu

SEQ ID NO: 3204785 - RNA, 20 nt, Human
auguaauuuuauuuuaaaau

SEQ ID NO: 3204786 - RNA, 23 nt, Human
auguaauuuuauuuuaaaauuuc

SEQ ID NO: 3204787 - RNA, 12 nt, Human
auguaauuuugu

SEQ ID NO: 3204788 - RNA, 20 nt, Human
auguaacuuugguuaaaauc

SEQ ID NO: 3204789 - RNA, 20 nt, Human
augggugcuuggaggaagga

SEQ ID NO: 3204790 - RNA, 21 nt, Human
augggugcuuggaggaaggaa

SEQ ID NO: 3204791 - RNA, 23 nt, Human
augggugcuuggaggaaggaaac

SEQ ID NO: 3204792 - RNA, 15 nt, Human
augguaaucauauua

SEQ ID NO: 3204793 - RNA, 13 nt, Human
augguaagagaaa

SEQ ID NO: 3204794 - RNA, 15 nt, Human
augguaagagaaaag

SEQ ID NO: 3204795 - RNA, 16 nt, Human
augguaagagaaaaga

SEQ ID NO: 3204796 - RNA, 15 nt, Human
augguaaaauuuugu

SEQ ID NO: 3204797 - RNA, 22 nt, Human
augguaguuucugugguuggcu

SEQ ID NO: 3204798 - RNA, 23 nt, Human
augguaguuucugugguuggcug

SEQ ID NO: 3204799 - RNA, 15 nt, Human
augguccauagcacu

SEQ ID NO: 3204800 - RNA, 12 nt, Human
augguaguuucu

SEQ ID NO: 3204801 - RNA, 13 nt, Human
augguaguuucug

SEQ ID NO: 3204802 - RNA, 15 nt, Human
augguaguuucugug

SEQ ID NO: 3204803 - RNA, 18 nt, Human
augguaguuucugugguu

SEQ ID NO: 3204804 - RNA, 19 nt, Human
augguaguuucugugguug

SEQ ID NO: 3204805 - RNA, 13 nt, Human
augguagaaaaau

SEQ ID NO: 3204806 - RNA, 18 nt, Human
augguagaaaaauuucac

SEQ ID NO: 3204807 - RNA, 16 nt, Human
auguuccuagugaaag

SEQ ID NO: 3204808 - RNA, 15 nt, Human
auguuccuagugaaa

SEQ ID NO: 3204809 - RNA, 13 nt, Human
auguguauaaauu

SEQ ID NO: 3204810 - RNA, 14 nt, Human
auguguauaaauug

SEQ ID NO: 3204811 - RNA, 19 nt, Human
auguguauaaauugucuuu

SEQ ID NO: 3204812 - RNA, 13 nt, Human
auguucccuccgg

SEQ ID NO: 3204813 - RNA, 15 nt, Human
auguucccacuucaa

SEQ ID NO: 3204814 - RNA, 13 nt, Human
auguguaaguauu

SEQ ID NO: 3204815 - RNA, 16 nt, Human
auguguaucaguguuu

SEQ ID NO: 3204816 - RNA, 21 nt, Human
auguguaucaguguuuaugug

SEQ ID NO: 3204817 - RNA, 21 nt, Human
auguguagcugcaaaaauaau

SEQ ID NO: 3204818 - RNA, 17 nt, Human
auguuccuagugaaaga

SEQ ID NO: 3204819 - RNA, 16 nt, Human
auguucucucuucucc

SEQ ID NO: 3204820 - RNA, 17 nt, Human
auguucucucuucucca

SEQ ID NO: 3204821 - RNA, 13 nt, Human
auguucucugagg

SEQ ID NO: 3204822 - RNA, 14 nt, Human
auguucugggacac

SEQ ID NO: 3204823 - RNA, 13 nt, Human
auguucugggaca

SEQ ID NO: 3204824 - RNA, 15 nt, Human
auguucugggacaca

SEQ ID NO: 3204825 - RNA, 17 nt, Human
auguuugccucugccuc

SEQ ID NO: 3204826 - RNA, 15 nt, Human
auguuugccucugcc

SEQ ID NO: 3204827 - RNA, 14 nt, Human
auguuugccucugc

SEQ ID NO: 3204828 - RNA, 15 nt, Human
auguuuccuucccuc

SEQ ID NO: 3204829 - RNA, 14 nt, Human
auguuuccuucccu

SEQ ID NO: 3204830 - RNA, 13 nt, Human
auguuucuaaggu

SEQ ID NO: 3204831 - RNA, 15 nt, Human
auguuuccauaguuu

SEQ ID NO: 3204832 - RNA, 23 nt, Human
cuuucaauaggaaaaacugauuu

SEQ ID NO: 3204833 - RNA, 14 nt, Human
cuuucacaaccuuc

SEQ ID NO: 3204834 - RNA, 23 nt, Human
cuuucagccaagaauucuuaaau

SEQ ID NO: 3204835 - RNA, 20 nt, Human
cuuucagccaagaauucuua

SEQ ID NO: 3204836 - RNA, 19 nt, Human
cuuucaggagcuccauaca

SEQ ID NO: 3204837 - RNA, 22 nt, Human
cuuuccugaggcugggcucccu

SEQ ID NO: 3204838 - RNA, 21 nt, Human
cuuuccugaggcugggcuccc

SEQ ID NO: 3204839 - RNA, 17 nt, Human
cuuuccuguuucucagu

SEQ ID NO: 3204840 - RNA, 15 nt, Human
cuuuccugugccagg

SEQ ID NO: 3204841 - RNA, 14 nt, Human
cuuuccugugccag

SEQ ID NO: 3204842 - RNA, 13 nt, Human
cuuuccugugcca

SEQ ID NO: 3204843 - RNA, 13 nt, Human
cuuuuaucucaga

SEQ ID NO: 3204844 - RNA, 19 nt, Human
cuuuguauaguuauguaaa

SEQ ID NO: 3204845 - RNA, 21 nt, Human
cuuuguauaguuauguaaaua

SEQ ID NO: 3204846 - RNA, 16 nt, Human
cuuuguauacaaguac

SEQ ID NO: 3204847 - RNA, 17 nt, Human
cuuuguauacaaguacu

SEQ ID NO: 3204848 - RNA, 12 nt, Human
cuuuguauaguu

SEQ ID NO: 3204849 - RNA, 15 nt, Human
cuuuguauaguuaug

SEQ ID NO: 3204850 - RNA, 18 nt, Human
cuuuguauaguuauguaa

SEQ ID NO: 3204851 - RNA, 20 nt, Human
cuuuguagcauuuggugcuu

SEQ ID NO: 3204852 - RNA, 16 nt, Human
cuuuguagcauuuggu

SEQ ID NO: 3204853 - RNA, 20 nt, Human
cuuuuaguuuuucugucccu

SEQ ID NO: 3204854 - RNA, 18 nt, Human
cuuuuaguuuuucugucc

SEQ ID NO: 3204855 - RNA, 14 nt, Human
cuuuuaguuuuucu

SEQ ID NO: 3204856 - RNA, 16 nt, Human
cuuucuagccagagga

SEQ ID NO: 3204857 - RNA, 22 nt, Human
cuuugauauauaggacauugau

SEQ ID NO: 3204858 - RNA, 22 nt, Human
cuuugauauuuucaacgcagcc

SEQ ID NO: 3204859 - RNA, 11 nt, Human
cuuugauguca

SEQ ID NO: 3204860 - RNA, 20 nt, Human
cuuugaucaugaauaacuga

SEQ ID NO: 3204861 - RNA, 14 nt, Human
cuuugaucaugaau

SEQ ID NO: 3204862 - RNA, 15 nt, Human
cuuucuagccagagg

SEQ ID NO: 3204863 - RNA, 16 nt, Human
cuuucuacucauuuua

SEQ ID NO: 3204864 - RNA, 18 nt, Human
cuuucuagaaagaauaaa

SEQ ID NO: 3204865 - RNA, 14 nt, Human
cuuucuagaaagaa

SEQ ID NO: 3204866 - RNA, 16 nt, Human
cuuucuacuuccaaga

SEQ ID NO: 3204867 - RNA, 15 nt, Human
cuuucuacuuccaag

SEQ ID NO: 3204868 - RNA, 17 nt, Human
cuuucuacccagcgagc

SEQ ID NO: 3204869 - RNA, 17 nt, Human
cuuugggccuggcuccc

SEQ ID NO: 3204870 - RNA, 14 nt, Human
cuuugggcugcccu

SEQ ID NO: 3204871 - RNA, 22 nt, Human
cuuugaugucagcaguugcugg

SEQ ID NO: 3204872 - RNA, 12 nt, Human
cuuugauguguu

SEQ ID NO: 3204873 - RNA, 13 nt, Human
cuuugauguguug

SEQ ID NO: 3204874 - RNA, 15 nt, Human
cuuugauguguuguu

SEQ ID NO: 3204875 - RNA, 16 nt, Human
cuuugauguguuguuc

SEQ ID NO: 3204876 - RNA, 18 nt, Human
cuuugauguguuguucuu

SEQ ID NO: 3204877 - RNA, 21 nt, Human
cuuugggcugcccuggugcug

SEQ ID NO: 3204878 - RNA, 20 nt, Human
cuuugggcugcccuggugcu

SEQ ID NO: 3204879 - RNA, 19 nt, Human
cuuugggcugcccuggugc

SEQ ID NO: 3204880 - RNA, 15 nt, Human
cuuugggcugcccug

SEQ ID NO: 3204881 - RNA, 13 nt, Human
cuuuguaccaaaa

SEQ ID NO: 3204882 - RNA, 15 nt, Human
cuuuguaccaaaauu

SEQ ID NO: 3204883 - RNA, 15 nt, Human
cuuuguaaauuguca

SEQ ID NO: 3204884 - RNA, 18 nt, Human
cuuuguaaccacaacuuu

SEQ ID NO: 3204885 - RNA, 17 nt, Human
cuuuguaaauucugauu

SEQ ID NO: 3204886 - RNA, 15 nt, Human
cuuuguaaauucuga

SEQ ID NO: 3204887 - RNA, 16 nt, Human
cuuuguaaauucugau

SEQ ID NO: 3204888 - RNA, 20 nt, Human
cuuugauguguuguucuugg

SEQ ID NO: 3204889 - RNA, 12 nt, Human
cuuuguaaauuc

SEQ ID NO: 3204890 - RNA, 15 nt, Human
gaaagacuauucaaa

SEQ ID NO: 3204891 - RNA, 14 nt, Human
gaaagacuauucaa

SEQ ID NO: 3204892 - RNA, 20 nt, Human
gaaagacuaucuaaauguug

SEQ ID NO: 3204893 - RNA, 21 nt, Human
gaaaggcuccaggagcagcca

SEQ ID NO: 3204894 - RNA, 20 nt, Human
gaaaggcuccaggagcagcc

SEQ ID NO: 3204895 - RNA, 22 nt, Human
gaaaggcuccaggagcagccac

SEQ ID NO: 3204896 - RNA, 19 nt, Human
gaaacuuugagaucuaaaa

SEQ ID NO: 3204897 - RNA, 22 nt, Human
gaaacuuugagaucuaaaaaua

SEQ ID NO: 3204898 - RNA, 17 nt, Human
gaaaucaaauaugcaaa

SEQ ID NO: 3204899 - RNA, 18 nt, Human
gaaaucaaauaugcaaag

SEQ ID NO: 3204900 - RNA, 20 nt, Human
gaaaucaaauaugcaaagca

SEQ ID NO: 3204901 - RNA, 19 nt, Human
gaaaucaaauaugcaaagc

SEQ ID NO: 3204902 - RNA, 19 nt, Human
gaaaucaccgaaaacgugg

SEQ ID NO: 3204903 - RNA, 19 nt, Human
gaaaucaguaaacacugug

SEQ ID NO: 3204904 - RNA, 16 nt, Human
gaaaucauauuuggaa

SEQ ID NO: 3204905 - RNA, 16 nt, Human
gaaaucaguaaacacu

SEQ ID NO: 3204906 - RNA, 20 nt, Human
gaaaggucaccucacucagc

SEQ ID NO: 3204907 - RNA, 18 nt, Human
gaaaggucaccucacuca

SEQ ID NO: 3204908 - RNA, 16 nt, Human
gaaaggucaccucacu

SEQ ID NO: 3204909 - RNA, 14 nt, Human
gaaaggucaccuca

SEQ ID NO: 3204910 - RNA, 17 nt, Human
gaaaggguucuguaaaa

SEQ ID NO: 3204911 - RNA, 12 nt, Human
gaaagggucucc

SEQ ID NO: 3204912 - RNA, 22 nt, Human
gaaagggacuuggaagcuccgc

SEQ ID NO: 3204913 - RNA, 20 nt, Human
gaaagggacgcuacccggga

SEQ ID NO: 3204914 - RNA, 19 nt, Human
gaaagggacuuggaagcuc

SEQ ID NO: 3204915 - RNA, 15 nt, Human
cuuuugggaaaugcu

SEQ ID NO: 3204916 - RNA, 19 nt, Human
cuuuugguucauuuucaga

SEQ ID NO: 3204917 - RNA, 21 nt, Human
cuuuugguuaugaauacuuug

SEQ ID NO: 3204918 - RNA, 18 nt, Human
cuuuugucuaugggacuc

SEQ ID NO: 3204919 - RNA, 13 nt, Human
cuuuugccauuga

SEQ ID NO: 3204920 - RNA, 23 nt, Human
cuuuugcccacacuugggagcaa

SEQ ID NO: 3204921 - RNA, 13 nt, Human
cuuuuggagucag

SEQ ID NO: 3204922 - RNA, 17 nt, Human
cuuuuuuucucuagagu

SEQ ID NO: 3204923 - RNA, 18 nt, Human
cuuuuuuucuauauuauu

SEQ ID NO: 3204924 - RNA, 19 nt, Human
cuuuuuuucuauauuauug

SEQ ID NO: 3204925 - RNA, 20 nt, Human
cuuuuuuuuuuuugagacag

SEQ ID NO: 3204926 - RNA, 22 nt, Human
cuuuuuuuuuuaagugaaauuu

SEQ ID NO: 3204927 - RNA, 21 nt, Human
cuuuuuuuuuuaagugaaauu

SEQ ID NO: 3204928 - RNA, 15 nt, Human
cuuuuuuuuuuaagu

SEQ ID NO: 3204929 - RNA, 23 nt, Human
cuuuuuuggcugcugaaggcucg

SEQ ID NO: 3204930 - RNA, 20 nt, Human
gaaaaacucaaccaaauggu

SEQ ID NO: 3204931 - RNA, 21 nt, Human
cuuuuuuuuuuuugagacaga

SEQ ID NO: 3204932 - RNA, 11 nt, Human
gaaaaaaaaga

SEQ ID NO: 3204933 - RNA, 16 nt, Human
gaaaaaaaagaaaaaa

SEQ ID NO: 3204934 - RNA, 21 nt, Human
gaaaauugccuuucuguguuu

SEQ ID NO: 3204935 - RNA, 20 nt, Human
gaaaauugccuuucuguguu

SEQ ID NO: 3204936 - RNA, 19 nt, Human
gaaaauugccuuucugugu

SEQ ID NO: 3204937 - RNA, 21 nt, Human
gaaaacuuuaugcuaagugaa

SEQ ID NO: 3204938 - RNA, 11 nt, Human
gaaaacuuugu

SEQ ID NO: 3204939 - RNA, 14 nt, Human
gaaaaacugauuuu

SEQ ID NO: 3204940 - RNA, 18 nt, Human
gaaaacuuuguuaggcca

SEQ ID NO: 3204941 - RNA, 16 nt, Human
gaaaacuuuguuaggc

SEQ ID NO: 3204942 - RNA, 13 nt, Human
gaaaacuuuguua

SEQ ID NO: 3204943 - RNA, 9 nt, Human
gaaaagaaa

SEQ ID NO: 3204944 - RNA, 11 nt, Human
gaaaagaaaaa

SEQ ID NO: 3204945 - RNA, 10 nt, Human
gaaaagaaaa

SEQ ID NO: 3204946 - RNA, 12 nt, Human
gaaaagaaaaaa

SEQ ID NO: 3204947 - RNA, 17 nt, Human
gaaaagaaaaaaaaaga

SEQ ID NO: 3204948 - RNA, 21 nt, Human
gaaaauggaagacagcucuua

SEQ ID NO: 3204949 - RNA, 23 nt, Human
gaaaaugcuguauuagucacaga

SEQ ID NO: 3204950 - RNA, 18 nt, Human
gaaaagaaaaaugagccu

SEQ ID NO: 3204951 - RNA, 20 nt, Human
gaaaagaaaaaaaaagaaaa

SEQ ID NO: 3204952 - RNA, 19 nt, Human
gaaaagaaaaaaaaagaaa

SEQ ID NO: 3204953 - RNA, 18 nt, Human
gaaaauugccuuucugug

SEQ ID NO: 3204954 - RNA, 17 nt, Human
gaaaauugccuuucugu

SEQ ID NO: 3204955 - RNA, 19 nt, Human
gaaaauugcauugaagccc

SEQ ID NO: 3204956 - RNA, 15 nt, Human
gaaaauguaugugua

SEQ ID NO: 3204957 - RNA, 19 nt, Human
gaaaauggacguguuauga

SEQ ID NO: 3204958 - RNA, 23 nt, Human
gaaaauggacguguuaugacucc

SEQ ID NO: 3204959 - RNA, 14 nt, Human
cuuggcgcugcccc

SEQ ID NO: 3204960 - RNA, 17 nt, Human
cuuggcgcugccccugg

SEQ ID NO: 3204961 - RNA, 12 nt, Human
cuuggcgcugcc

SEQ ID NO: 3204962 - RNA, 23 nt, Human
cuuggcagguaggaauauuauau

SEQ ID NO: 3204963 - RNA, 22 nt, Human
cuugaugaaauaacacagcagu

SEQ ID NO: 3204964 - RNA, 21 nt, Human
cuugaugaaauaacacagcag

SEQ ID NO: 3204965 - RNA, 14 nt, Human
cuugccuuugaaga

SEQ ID NO: 3204966 - RNA, 17 nt, Human
cuugcggcaaaaggaaa

SEQ ID NO: 3204967 - RNA, 22 nt, Human
cuuggcaauaaauuuugaaaag

SEQ ID NO: 3204968 - RNA, 23 nt, Human
cuuggcaauaaauuuugaaaagu

SEQ ID NO: 3204969 - RNA, 19 nt, Human
cuugacaaagucaagccac

SEQ ID NO: 3204970 - RNA, 16 nt, Human
cuugacaaagucaagc

SEQ ID NO: 3204971 - RNA, 13 nt, Human
cuugacagggcac

SEQ ID NO: 3204972 - RNA, 15 nt, Human
cuugacagggcacac

SEQ ID NO: 3204973 - RNA, 14 nt, Human
cuugacagggcaca

SEQ ID NO: 3204974 - RNA, 19 nt, Human
cuugaauuguaaggaauga

SEQ ID NO: 3204975 - RNA, 18 nt, Human
cuugaaggaaaaauucaa

SEQ ID NO: 3204976 - RNA, 18 nt, Human
cuugaauuguaaggaaug

SEQ ID NO: 3204977 - RNA, 13 nt, Human
cuugaaggaaaaa

SEQ ID NO: 3204978 - RNA, 15 nt, Human
cuugaaggaaaaauu

SEQ ID NO: 3204979 - RNA, 14 nt, Human
cuugaaggaaaaau

SEQ ID NO: 3204980 - RNA, 15 nt, Human
cuugaagccugcucc

SEQ ID NO: 3204981 - RNA, 20 nt, Human
cuugaagccugcuccuuccc

SEQ ID NO: 3204982 - RNA, 16 nt, Human
cuugaagccugcuccu

SEQ ID NO: 3204983 - RNA, 23 nt, Human
cuugauagccucauuaaagcauu

SEQ ID NO: 3204984 - RNA, 22 nt, Human
cuugauaauuuuccuuuaauau

SEQ ID NO: 3204985 - RNA, 16 nt, Human
cuugauaauuuuccuu

SEQ ID NO: 3204986 - RNA, 16 nt, Human
cuugaagacuuuucuu

SEQ ID NO: 3204987 - RNA, 18 nt, Human
cuuccucccucccucuuu

SEQ ID NO: 3204988 - RNA, 23 nt, Human
cuucuaaguaaaaccacagcagu

SEQ ID NO: 3204989 - RNA, 22 nt, Human
cuucuaaguaaaaccacagcag

SEQ ID NO: 3204990 - RNA, 23 nt, Human
cuuccugauugguuucucuucuc

SEQ ID NO: 3204991 - RNA, 22 nt, Human
cuuccugauugguuucucuucu

SEQ ID NO: 3204992 - RNA, 17 nt, Human
cuuccugcaacaccuug

SEQ ID NO: 3204993 - RNA, 23 nt, Human
cuuccugaggggagacagagcaa

SEQ ID NO: 3204994 - RNA, 20 nt, Human
cuuccugauugguuucucuu

SEQ ID NO: 3204995 - RNA, 19 nt, Human
cuuccugauugguuucucu

SEQ ID NO: 3204996 - RNA, 15 nt, Human
cuuccuccugacacc

SEQ ID NO: 3204997 - RNA, 14 nt, Human
cuuccuccugacac

SEQ ID NO: 3204998 - RNA, 19 nt, Human
cuuccuccugacaccccac

SEQ ID NO: 3204999 - RNA, 18 nt, Human
cuuccuccugacacccca

SEQ ID NO: 3205000 - RNA, 17 nt, Human
cuucuagaaccaggcaa

SEQ ID NO: 3205001 - RNA, 21 nt, Human
cuucuaaguugaguauauuau

SEQ ID NO: 3205002 - RNA, 13 nt, Human
cuucuagaaccag

SEQ ID NO: 3205003 - RNA, 21 nt, Human
cuucuucccacaaagaauaua

SEQ ID NO: 3205004 - RNA, 23 nt, Human
cuucuucagagacuccugcaggc

SEQ ID NO: 3205005 - RNA, 21 nt, Human
cuucuguugcugccucaugcu

SEQ ID NO: 3205006 - RNA, 15 nt, Human
cuucuguugcugccu

SEQ ID NO: 3205007 - RNA, 13 nt, Human
cuucuucauguuc

SEQ ID NO: 3205008 - RNA, 16 nt, Human
cuucuguuuagucucc

SEQ ID NO: 3205009 - RNA, 17 nt, Human
cuucuguugcugccuca

SEQ ID NO: 3205010 - RNA, 18 nt, Human
cuucuguugcugccucau

SEQ ID NO: 3205011 - RNA, 19 nt, Human
cuucuguugcugccucaug

SEQ ID NO: 3205012 - RNA, 20 nt, Human
cuucuguugcugccucaugc

SEQ ID NO: 3205013 - RNA, 21 nt, Human
cuucugacccaugcugcccug

SEQ ID NO: 3205014 - RNA, 22 nt, Human
cuucugacccaugcugcccugu

SEQ ID NO: 3205015 - RNA, 20 nt, Human
cuucugacccaugcugcccu

SEQ ID NO: 3205016 - RNA, 22 nt, Human
cuucugcacauaaacucuuuua

SEQ ID NO: 3205017 - RNA, 20 nt, Human
cuucugaucacugaaauaaa

SEQ ID NO: 3205018 - RNA, 20 nt, Human
cuucugaugaaauguuaaca

SEQ ID NO: 3205019 - RNA, 17 nt, Human
cuucugagcuggccucu

SEQ ID NO: 3205020 - RNA, 11 nt, Human
cuucccaccuc

SEQ ID NO: 3205021 - RNA, 21 nt, Human
cuuccauaaucuggacuccuc

SEQ ID NO: 3205022 - RNA, 11 nt, Human
cuuccauaauc

SEQ ID NO: 3205023 - RNA, 21 nt, Human
cuucccaccucucucacuccu

SEQ ID NO: 3205024 - RNA, 23 nt, Human
cuucccaccucucucacuccuug

SEQ ID NO: 3205025 - RNA, 21 nt, Human
cuuccagugaggcucugcccu

SEQ ID NO: 3205026 - RNA, 12 nt, Human
cuucaugaaaug

SEQ ID NO: 3205027 - RNA, 23 nt, Human
cuucaugaaaugcuaugucauuu

SEQ ID NO: 3205028 - RNA, 17 nt, Human
cuucaugaaaugcuaug

SEQ ID NO: 3205029 - RNA, 14 nt, Human
cuucaugaaaugcu

SEQ ID NO: 3205030 - RNA, 13 nt, Human
cuucaugaaaugc

SEQ ID NO: 3205031 - RNA, 22 nt, Human
cuuccagugaggcucugcccuu

SEQ ID NO: 3205032 - RNA, 23 nt, Human
cuuccagugaggcucugcccuug

SEQ ID NO: 3205033 - RNA, 19 nt, Human
cuuccaguuacuuuccaau

SEQ ID NO: 3205034 - RNA, 16 nt, Human
cuuccaguuacuuucc

SEQ ID NO: 3205035 - RNA, 23 nt, Human
cuuccaguuuauuccagagcugc

SEQ ID NO: 3205036 - RNA, 21 nt, Human
cuuccaguuuauuccagagcu

SEQ ID NO: 3205037 - RNA, 20 nt, Human
cuuccaguuuauuccagagc

SEQ ID NO: 3205038 - RNA, 19 nt, Human
cuuccaguuuauuccagag

SEQ ID NO: 3205039 - RNA, 22 nt, Human
cuucauacagggaugguguuca

SEQ ID NO: 3205040 - RNA, 13 nt, Human
cuucauacaggga

SEQ ID NO: 3205041 - RNA, 12 nt, Human
cuucauacaggg

SEQ ID NO: 3205042 - RNA, 14 nt, Human
cuucauauucagcu

SEQ ID NO: 3205043 - RNA, 14 nt, Human
cuucaucuggaagu

SEQ ID NO: 3205044 - RNA, 10 nt, Human
cuucauacac

SEQ ID NO: 3205045 - RNA, 9 nt, Human
cuucauaca

SEQ ID NO: 3205046 - RNA, 16 nt, Human
cuucaguuuuuguguu

SEQ ID NO: 3205047 - RNA, 18 nt, Human
cuucagagacuccugcag

SEQ ID NO: 3205048 - RNA, 19 nt, Human
cuucagagacuccugcagg

SEQ ID NO: 3205049 - RNA, 20 nt, Human
cuucagagacuccugcaggc

SEQ ID NO: 3205050 - RNA, 17 nt, Human
cuucagagacuccugca

SEQ ID NO: 3205051 - RNA, 17 nt, Human
cuucacucaaauuuugg

SEQ ID NO: 3205052 - RNA, 23 nt, Human
cuucacuaagaacaaaagaagca

SEQ ID NO: 3205053 - RNA, 17 nt, Human
cuucacucuaagauguu

SEQ ID NO: 3205054 - RNA, 18 nt, Human
cuuauuggcagcucuacu

SEQ ID NO: 3205055 - RNA, 21 nt, Human
cuucaccuuuguccccaccgc

SEQ ID NO: 3205056 - RNA, 20 nt, Human
cuucaccuuuguccccaccg

SEQ ID NO: 3205057 - RNA, 15 nt, Human
cuucacggaagagcc

SEQ ID NO: 3205058 - RNA, 19 nt, Human
cuucacggaagagccuugc

SEQ ID NO: 3205059 - RNA, 22 nt, Human
cuucaccuuuguccccaccgca

SEQ ID NO: 3205060 - RNA, 17 nt, Human
cuuauggaacacucuga

SEQ ID NO: 3205061 - RNA, 19 nt, Human
cuuauggaacacucugaga

SEQ ID NO: 3205062 - RNA, 20 nt, Human
cuuauggaacacucugagac

SEQ ID NO: 3205063 - RNA, 16 nt, Human
cuuaugcuuccagaaa

SEQ ID NO: 3205064 - RNA, 15 nt, Human
cuuaugcuuccagaa

SEQ ID NO: 3205065 - RNA, 14 nt, Human
cuuaugcuuccaga

SEQ ID NO: 3205066 - RNA, 13 nt, Human
cuuaugcuuccag

SEQ ID NO: 3205067 - RNA, 19 nt, Human
cuuauugauauucuaagaa

SEQ ID NO: 3205068 - RNA, 23 nt, Human
cuuauugauauucuaagaaauau

SEQ ID NO: 3205069 - RNA, 22 nt, Human
cuuauuccauauuagaaaacuu

SEQ ID NO: 3205070 - RNA, 16 nt, Human
cuuauuccauauuaga

SEQ ID NO: 3205071 - RNA, 16 nt, Human
cuuauucaaagagaaa

SEQ ID NO: 3205072 - RNA, 17 nt, Human
cuuauucaaagagaaaa

SEQ ID NO: 3205073 - RNA, 12 nt, Human
cuuaugcuucca

SEQ ID NO: 3205074 - RNA, 14 nt, Human
cuuaugcuuaaauu

SEQ ID NO: 3205075 - RNA, 13 nt, Human
cuuauggaacacu

SEQ ID NO: 3205076 - RNA, 16 nt, Human
cuuauggaacacucug

SEQ ID NO: 3205077 - RNA, 14 nt, Human
cugugcugagucug

SEQ ID NO: 3205078 - RNA, 12 nt, Human
cugugcugaguc

SEQ ID NO: 3205079 - RNA, 17 nt, Human
cugagacucgcgacaau

SEQ ID NO: 3205080 - RNA, 19 nt, Human
cugagacucgcgacaaugc

SEQ ID NO: 3205081 - RNA, 13 nt, Human
cugcauguuacau

SEQ ID NO: 3205082 - RNA, 16 nt, Human
cugcauucuucugauc

SEQ ID NO: 3205083 - RNA, 22 nt, Human
cugcauucuucugaucacugaa

SEQ ID NO: 3205084 - RNA, 20 nt, Human
cugcauucaggaucaaaccc

SEQ ID NO: 3205085 - RNA, 13 nt, Human
cugcauuugugaa

SEQ ID NO: 3205086 - RNA, 13 nt, Human
cugcauuuaggga

SEQ ID NO: 3205087 - RNA, 22 nt, Human
cugcauuuagggaguauucuaa

SEQ ID NO: 3205088 - RNA, 23 nt, Human
cugcauuuagggaguauucuaau

SEQ ID NO: 3205089 - RNA, 15 nt, Human
cugccaaugggagcu

SEQ ID NO: 3205090 - RNA, 22 nt, Human
cugcauuugugaaaugauggug

SEQ ID NO: 3205091 - RNA, 17 nt, Human
cugcauuugugaaauga

SEQ ID NO: 3205092 - RNA, 15 nt, Human
cugcauuugugaaau

SEQ ID NO: 3205093 - RNA, 14 nt, Human
cugcauuugugaaa

SEQ ID NO: 3205094 - RNA, 17 nt, Human
cugcauuugucuggccu

SEQ ID NO: 3205095 - RNA, 19 nt, Human
cugccaacugaucuguuau

SEQ ID NO: 3205096 - RNA, 23 nt, Human
cugccaaccucgcuccaacucca

SEQ ID NO: 3205097 - RNA, 21 nt, Human
cugccaaccucgcuccaacuc

SEQ ID NO: 3205098 - RNA, 17 nt, Human
cugccaaccucgcucca

SEQ ID NO: 3205099 - RNA, 14 nt, Human
cugccaaccucgcu

SEQ ID NO: 3205100 - RNA, 23 nt, Human
cugccaucauguuuacagaggac

SEQ ID NO: 3205101 - RNA, 19 nt, Human
cugccccagcuugggcaga

SEQ ID NO: 3205102 - RNA, 17 nt, Human
cugccaucauguuuaca

SEQ ID NO: 3205103 - RNA, 22 nt, Human
cugccaucauguuuacagagga

SEQ ID NO: 3205104 - RNA, 19 nt, Human
cugccccagggcucccggc

SEQ ID NO: 3205105 - RNA, 14 nt, Human
cugcccccucugcc

SEQ ID NO: 3205106 - RNA, 15 nt, Human
cugcccccucugccc

SEQ ID NO: 3205107 - RNA, 13 nt, Human
cugcccccuccug

SEQ ID NO: 3205108 - RNA, 23 nt, Human
cugccauauucuguuggccagug

SEQ ID NO: 3205109 - RNA, 22 nt, Human
cugccauauucuguuggccagu

SEQ ID NO: 3205110 - RNA, 21 nt, Human
cugccauauucuguuggccag

SEQ ID NO: 3205111 - RNA, 20 nt, Human
cugccauauucuguuggcca

SEQ ID NO: 3205112 - RNA, 12 nt, Human
cugccagggaca

SEQ ID NO: 3205113 - RNA, 15 nt, Human
cugccagggacagag

SEQ ID NO: 3205114 - RNA, 11 nt, Human
cugccagggac

SEQ ID NO: 3205115 - RNA, 14 nt, Human
cugccccucaacuc

SEQ ID NO: 3205116 - RNA, 22 nt, Human
cugccccucaacucuccuccag

SEQ ID NO: 3205117 - RNA, 16 nt, Human
cugcccccucugcccu

SEQ ID NO: 3205118 - RNA, 17 nt, Human
cugcccccucugcccug

SEQ ID NO: 3205119 - RNA, 18 nt, Human
cugcccccucugcccugc

SEQ ID NO: 3205120 - RNA, 15 nt, Human
cugcccccuccugag

SEQ ID NO: 3205121 - RNA, 14 nt, Human
cugcccccuccuga

SEQ ID NO: 3205122 - RNA, 19 nt, Human
cugcccuggugcugccaca

SEQ ID NO: 3205123 - RNA, 18 nt, Human
cugcccuggugcugccac

SEQ ID NO: 3205124 - RNA, 16 nt, Human
cugcccuggugcugcc

SEQ ID NO: 3205125 - RNA, 17 nt, Human
cugcccuggugcugcca

SEQ ID NO: 3205126 - RNA, 15 nt, Human
cugcccugugggccc

SEQ ID NO: 3205127 - RNA, 16 nt, Human
cugcccugugggcccc

SEQ ID NO: 3205128 - RNA, 18 nt, Human
cugcccugugggccccca

SEQ ID NO: 3205129 - RNA, 12 nt, Human
cugcccugugag

SEQ ID NO: 3205130 - RNA, 20 nt, Human
cugcccugucaggaggcaga

SEQ ID NO: 3205131 - RNA, 17 nt, Human
cugcccugucaggaggc

SEQ ID NO: 3205132 - RNA, 21 nt, Human
cugcccugguuuccugcccug

SEQ ID NO: 3205133 - RNA, 22 nt, Human
cugcccugguuuccugcccugg

SEQ ID NO: 3205134 - RNA, 23 nt, Human
cugcccugguuuccugcccuggg

SEQ ID NO: 3205135 - RNA, 21 nt, Human
cugcccuggugcugccacacu

SEQ ID NO: 3205136 - RNA, 20 nt, Human
cugcccuggugcugccacac

SEQ ID NO: 3205137 - RNA, 14 nt, Human
cugcccugugggcc

SEQ ID NO: 3205138 - RNA, 23 nt, Human
cugccugggaucccucauccuca

SEQ ID NO: 3205139 - RNA, 14 nt, Human
cugccuguucagcu

SEQ ID NO: 3205140 - RNA, 22 nt, Human
cugccugggaucccucauccuc

SEQ ID NO: 3205141 - RNA, 18 nt, Human
cugccucgaacuggcugc

SEQ ID NO: 3205142 - RNA, 17 nt, Human
cugccucgaacuggcug

SEQ ID NO: 3205143 - RNA, 15 nt, Human
cugccucgaacuggc

SEQ ID NO: 3205144 - RNA, 12 nt, Human
cugcucacugca

SEQ ID NO: 3205145 - RNA, 15 nt, Human
cugcuacagagcaga

SEQ ID NO: 3205146 - RNA, 12 nt, Human
cugcucagaucc

SEQ ID NO: 3205147 - RNA, 23 nt, Human
cugcucagaucccacuuuugcca

SEQ ID NO: 3205148 - RNA, 23 nt, Human
cugcucagcagugagagcagaug

SEQ ID NO: 3205149 - RNA, 21 nt, Human
cugcucagcagugagagcaga

SEQ ID NO: 3205150 - RNA, 16 nt, Human
cugccuguugggccag

SEQ ID NO: 3205151 - RNA, 14 nt, Human
cugccuguugggcc

SEQ ID NO: 3205152 - RNA, 18 nt, Human
cugccuguugggccagga

SEQ ID NO: 3205153 - RNA, 19 nt, Human
cugccuguugggccaggag

SEQ ID NO: 3205154 - RNA, 16 nt, Human
cugcuaauuccccaga

SEQ ID NO: 3205155 - RNA, 23 nt, Human
cugcuaauucuuugcaaaaaucc

SEQ ID NO: 3205156 - RNA, 22 nt, Human
cugcuaauucuuugcaaaaauc

SEQ ID NO: 3205157 - RNA, 15 nt, Human
cugcuaauucuuugc

SEQ ID NO: 3205158 - RNA, 23 nt, Human
cugcugacagacacaggcccggc

SEQ ID NO: 3205159 - RNA, 21 nt, Human
cugcugacagacacaggcccg

SEQ ID NO: 3205160 - RNA, 20 nt, Human
cugcugacagacacaggccc

SEQ ID NO: 3205161 - RNA, 19 nt, Human
cugcugacagacacaggcc

SEQ ID NO: 3205162 - RNA, 18 nt, Human
cugcugacagacacaggc

SEQ ID NO: 3205163 - RNA, 15 nt, Human
cugcugacagacaca

SEQ ID NO: 3205164 - RNA, 17 nt, Human
cuggaacucuugacagc

SEQ ID NO: 3205165 - RNA, 19 nt, Human
cugcuuuuuaaagaaugcu

SEQ ID NO: 3205166 - RNA, 14 nt, Human
cugcuuuuuggaaa

SEQ ID NO: 3205167 - RNA, 16 nt, Human
cugcuuuuuggaaagu

SEQ ID NO: 3205168 - RNA, 18 nt, Human
cugcuuuuuggaaaguca

SEQ ID NO: 3205169 - RNA, 20 nt, Human
cugcuuuuuggaaagucaga

SEQ ID NO: 3205170 - RNA, 16 nt, Human
cuggaaauauuaagaa

SEQ ID NO: 3205171 - RNA, 17 nt, Human
cuggaacacuaaugagg

SEQ ID NO: 3205172 - RNA, 23 nt, Human
cuggaaauacuagauuugggaga

SEQ ID NO: 3205173 - RNA, 16 nt, Human
cugcuucagccuccca

SEQ ID NO: 3205174 - RNA, 22 nt, Human
cugcuuuuuaaagaaugcucuu

SEQ ID NO: 3205175 - RNA, 16 nt, Human
cugcuucagccucccg

SEQ ID NO: 3205176 - RNA, 14 nt, Human
cugcuucagccucc

SEQ ID NO: 3205177 - RNA, 22 nt, Human
cugcuuaaaagaaaauguucac

SEQ ID NO: 3205178 - RNA, 22 nt, Human
cugcuuaaaguugguauuaaua

SEQ ID NO: 3205179 - RNA, 13 nt, Human
cugcuucagccuc

SEQ ID NO: 3205180 - RNA, 21 nt, Human
cuggugaugcgcaguugcugu

SEQ ID NO: 3205181 - RNA, 20 nt, Human
cuggugaugcgcaguugcug

SEQ ID NO: 3205182 - RNA, 13 nt, Human
cuggugagcauua

SEQ ID NO: 3205183 - RNA, 15 nt, Human
cuggugauauaucuc

SEQ ID NO: 3205184 - RNA, 19 nt, Human
cuggugaugcgcaguugcu

SEQ ID NO: 3205185 - RNA, 23 nt, Human
cuggugacuuuccucuuuggucu

SEQ ID NO: 3205186 - RNA, 23 nt, Human
cuggguggcaccagcagccugga

SEQ ID NO: 3205187 - RNA, 22 nt, Human
cuggguggcaccagcagccugg

SEQ ID NO: 3205188 - RNA, 17 nt, Human
cuggguguggcgcagca

SEQ ID NO: 3205189 - RNA, 18 nt, Human
cuggguuagacugccagc

SEQ ID NO: 3205190 - RNA, 16 nt, Human
cuggguuagacugcca

SEQ ID NO: 3205191 - RNA, 23 nt, Human
cuggguuagacugccagcucuuc

SEQ ID NO: 3205192 - RNA, 21 nt, Human
cuggguuagacugccagcucu

SEQ ID NO: 3205193 - RNA, 20 nt, Human
cuggguuagacugccagcuc

SEQ ID NO: 3205194 - RNA, 19 nt, Human
cuggguuagacugccagcu

SEQ ID NO: 3205195 - RNA, 16 nt, Human
cuggguguggcgcagc

SEQ ID NO: 3205196 - RNA, 23 nt, Human
cuggguuccuuccucugagccuu

SEQ ID NO: 3205197 - RNA, 15 nt, Human
cuggugacuuuccuc

SEQ ID NO: 3205198 - RNA, 20 nt, Human
cuggugacuuuccucuuugg

SEQ ID NO: 3205199 - RNA, 21 nt, Human
cuggugacuuuccucuuuggu

SEQ ID NO: 3205200 - RNA, 14 nt, Human
cuggguucacugca

SEQ ID NO: 3205201 - RNA, 22 nt, Human
cuggguuccagcaauucuccug

SEQ ID NO: 3205202 - RNA, 18 nt, Human
cuggguuccuuccucuga

SEQ ID NO: 3205203 - RNA, 22 nt, Human
cuggguuccuuccucugagccu

SEQ ID NO: 3205204 - RNA, 17 nt, Human
cugggcagaaggaagac

SEQ ID NO: 3205205 - RNA, 18 nt, Human
cuggggccuaauaaaacu

SEQ ID NO: 3205206 - RNA, 16 nt, Human
cuggggauugggcccc

SEQ ID NO: 3205207 - RNA, 22 nt, Human
cuggggauugggccccugccag

SEQ ID NO: 3205208 - RNA, 18 nt, Human
cuggggauugggccccug

SEQ ID NO: 3205209 - RNA, 17 nt, Human
cuggggaugucucucau

SEQ ID NO: 3205210 - RNA, 22 nt, Human
cuggggaugucucucaugacca

SEQ ID NO: 3205211 - RNA, 18 nt, Human
cuggggaacguucucuuu

SEQ ID NO: 3205212 - RNA, 16 nt, Human
cuggggaaccugaccc

SEQ ID NO: 3205213 - RNA, 17 nt, Human
cuggggaaccugacccc

SEQ ID NO: 3205214 - RNA, 15 nt, Human
cuggggaaccugacc

SEQ ID NO: 3205215 - RNA, 16 nt, Human
cugggcagaaggaaga

SEQ ID NO: 3205216 - RNA, 18 nt, Human
cugggcagaaggaagacu

SEQ ID NO: 3205217 - RNA, 22 nt, Human
cugggacaccauuaccaaaaua

SEQ ID NO: 3205218 - RNA, 17 nt, Human
cugggacgcucugcugu

SEQ ID NO: 3205219 - RNA, 16 nt, Human
cugggacgcucugcug

SEQ ID NO: 3205220 - RNA, 15 nt, Human
cugggacgcucugcu

SEQ ID NO: 3205221 - RNA, 14 nt, Human
cugggacgcucugc

SEQ ID NO: 3205222 - RNA, 17 nt, Human
cuggagacuaaccccac

SEQ ID NO: 3205223 - RNA, 12 nt, Human
cuggcagcucag

SEQ ID NO: 3205224 - RNA, 13 nt, Human
cuggcagcucaga

SEQ ID NO: 3205225 - RNA, 14 nt, Human
cuggcagcucagag

SEQ ID NO: 3205226 - RNA, 13 nt, Human
cuggccccucagg

SEQ ID NO: 3205227 - RNA, 21 nt, Human
cuggcaggcaggggcccugca

SEQ ID NO: 3205228 - RNA, 23 nt, Human
cuggcaggcaggggcccugcagc

SEQ ID NO: 3205229 - RNA, 12 nt, Human
cuggcaggcagg

SEQ ID NO: 3205230 - RNA, 11 nt, Human
cuggcaggcag

SEQ ID NO: 3205231 - RNA, 13 nt, Human
cuggcaggcaggg

SEQ ID NO: 3205232 - RNA, 16 nt, Human
cuggcuccaggccagg

SEQ ID NO: 3205233 - RNA, 16 nt, Human
cuggcuccagccugga

SEQ ID NO: 3205234 - RNA, 15 nt, Human
cuggcuccagccugg

SEQ ID NO: 3205235 - RNA, 14 nt, Human
cuggcuccagccug

SEQ ID NO: 3205236 - RNA, 15 nt, Human
cuggcucccacaggc

SEQ ID NO: 3205237 - RNA, 13 nt, Human
cuggcuccagcug

SEQ ID NO: 3205238 - RNA, 14 nt, Human
cuggcuccagcugg

SEQ ID NO: 3205239 - RNA, 18 nt, Human
cuggcuccagcuggccgg

SEQ ID NO: 3205240 - RNA, 20 nt, Human
cuggcuccagcuggccggga

SEQ ID NO: 3205241 - RNA, 11 nt, Human
cugggacacag

SEQ ID NO: 3205242 - RNA, 13 nt, Human
cugggacacaguu

SEQ ID NO: 3205243 - RNA, 12 nt, Human
cugggacacagu

SEQ ID NO: 3205244 - RNA, 17 nt, Human
cuggccccucagggucc

SEQ ID NO: 3205245 - RNA, 18 nt, Human
cuggccccucaggguccc

SEQ ID NO: 3205246 - RNA, 20 nt, Human
cuggccccucagggucccug

SEQ ID NO: 3205247 - RNA, 21 nt, Human
cuggccccucagggucccugg

SEQ ID NO: 3205248 - RNA, 13 nt, Human
cuggcuccagccu

SEQ ID NO: 3205249 - RNA, 11 nt, Human
cuggcuccagc

SEQ ID NO: 3205250 - RNA, 16 nt, Human
cugugagaugcuagaa

SEQ ID NO: 3205251 - RNA, 19 nt, Human
cugugcucuggacaggcau

SEQ ID NO: 3205252 - RNA, 14 nt, Human
cugugcucuggaca

SEQ ID NO: 3205253 - RNA, 15 nt, Human
cugugaagagaacca

SEQ ID NO: 3205254 - RNA, 13 nt, Human
cugugaaguguua

SEQ ID NO: 3205255 - RNA, 13 nt, Human
cugucgcccaguc

SEQ ID NO: 3205256 - RNA, 16 nt, Human
cugucgcccaggcugg

SEQ ID NO: 3205257 - RNA, 23 nt, Human
cugucgagccugggggcuggagc

SEQ ID NO: 3205258 - RNA, 14 nt, Human
cugucgagccuggg

SEQ ID NO: 3205259 - RNA, 18 nt, Human
cugguuuccugcccuggg

SEQ ID NO: 3205260 - RNA, 21 nt, Human
cugguuuccugcccugggagg

SEQ ID NO: 3205261 - RNA, 16 nt, Human
cugguuuccugcccug

SEQ ID NO: 3205262 - RNA, 22 nt, Human
cugguuuccugcccugggaggc

SEQ ID NO: 3205263 - RNA, 12 nt, Human
cuguacuuugau

SEQ ID NO: 3205264 - RNA, 24 nt, Human
cuguacuuugauucacauguuuuc

SEQ ID NO: 3205265 - RNA, 21 nt, Human
cuguacuuugauucacauguu

SEQ ID NO: 3205266 - RNA, 19 nt, Human
cuguacuuugauucacaug

SEQ ID NO: 3205267 - RNA, 15 nt, Human
cuguacuuugauuca

SEQ ID NO: 3205268 - RNA, 13 nt, Human
cuguaaaacuaag

SEQ ID NO: 3205269 - RNA, 14 nt, Human
cuguaaaagaaaaa

SEQ ID NO: 3205270 - RNA, 20 nt, Human
cuguaaaagcaaguccugca

SEQ ID NO: 3205271 - RNA, 19 nt, Human
cuguaaaagcaaguccugc

SEQ ID NO: 3205272 - RNA, 14 nt, Human
cuguaaaaugcaaa

SEQ ID NO: 3205273 - RNA, 20 nt, Human
cuguaaaaugcaaaaaaucu

SEQ ID NO: 3205274 - RNA, 18 nt, Human
cuguaaaaugcaaaaaau

SEQ ID NO: 3205275 - RNA, 15 nt, Human
cuguaaacacucagc

SEQ ID NO: 3205276 - RNA, 17 nt, Human
cuguaaacacucagcug

SEQ ID NO: 3205277 - RNA, 18 nt, Human
cuguaaacacucagcugu

SEQ ID NO: 3205278 - RNA, 19 nt, Human
cuguaaacacucagcuguu

SEQ ID NO: 3205279 - RNA, 21 nt, Human
cuguaggaagguuaauguuca

SEQ ID NO: 3205280 - RNA, 18 nt, Human
cuguaggaagguuaaugu

SEQ ID NO: 3205281 - RNA, 12 nt, Human
cuguaggccuca

SEQ ID NO: 3205282 - RNA, 18 nt, Human
cuguaggaguucuauuuu

SEQ ID NO: 3205283 - RNA, 22 nt, Human
cuguaggccucaggugaaacuc

SEQ ID NO: 3205284 - RNA, 13 nt, Human
cuguaggccucag

SEQ ID NO: 3205285 - RNA, 19 nt, Human
cugucacaguaaaaauaaa

SEQ ID NO: 3205286 - RNA, 21 nt, Human
cugucacaguaaaaauaaaau

SEQ ID NO: 3205287 - RNA, 22 nt, Human
cugucacaguaaaaauaaaaua

SEQ ID NO: 3205288 - RNA, 19 nt, Human
cugucacccgaucgccagc

SEQ ID NO: 3205289 - RNA, 21 nt, Human
cugucagcuccccucggagaa

SEQ ID NO: 3205290 - RNA, 18 nt, Human
cugucagccauuccuguu

SEQ ID NO: 3205291 - RNA, 11 nt, Human
cugucacuguu

SEQ ID NO: 3205292 - RNA, 21 nt, Human
cugucacuguuggacgucagc

SEQ ID NO: 3205293 - RNA, 15 nt, Human
cugucacugcugcuu

SEQ ID NO: 3205294 - RNA, 23 nt, Human
cugucagcuccccucggagaaga

SEQ ID NO: 3205295 - RNA, 16 nt, Human
cugucauuugagcagg

SEQ ID NO: 3205296 - RNA, 18 nt, Human
cugucauuugagcagggc

SEQ ID NO: 3205297 - RNA, 17 nt, Human
cugucauuugagcaggg

SEQ ID NO: 3205298 - RNA, 12 nt, Human
cuguccugccua

SEQ ID NO: 3205299 - RNA, 16 nt, Human
gaugagaggaaaucac

SEQ ID NO: 3205300 - RNA, 14 nt, Human
gaugaucuuugcag

SEQ ID NO: 3205301 - RNA, 21 nt, Human
gaugaucuuugcagacaggca

SEQ ID NO: 3205302 - RNA, 20 nt, Human
gaugaucuuugcagacaggc

SEQ ID NO: 3205303 - RNA, 23 nt, Human
gaucucagugguuaagauuccua

SEQ ID NO: 3205304 - RNA, 16 nt, Human
gauccauuuuuuauau

SEQ ID NO: 3205305 - RNA, 21 nt, Human
gaucucauuguucaauuccca

SEQ ID NO: 3205306 - RNA, 18 nt, Human
gauccauuuuuuauauuu

SEQ ID NO: 3205307 - RNA, 17 nt, Human
gaucucccuuuccuaua

SEQ ID NO: 3205308 - RNA, 19 nt, Human
gauccauuaauuuaaauga

SEQ ID NO: 3205309 - RNA, 13 nt, Human
gauauuuuuaaua

SEQ ID NO: 3205310 - RNA, 21 nt, Human
gauauucuuuguuaauuugga

SEQ ID NO: 3205311 - RNA, 17 nt, Human
gauauuuuguaaaaugu

SEQ ID NO: 3205312 - RNA, 18 nt, Human
gauauuuuguaaaaugua

SEQ ID NO: 3205313 - RNA, 20 nt, Human
gauauuuuguaaaauguauu

SEQ ID NO: 3205314 - RNA, 21 nt, Human
gauccaggccccucccucucc

SEQ ID NO: 3205315 - RNA, 12 nt, Human
gaucucuugagc

SEQ ID NO: 3205316 - RNA, 16 nt, Human
gaucucuugagccugg

SEQ ID NO: 3205317 - RNA, 17 nt, Human
gaucucuugagccuggg

SEQ ID NO: 3205318 - RNA, 14 nt, Human
gauuaccagggacu

SEQ ID NO: 3205319 - RNA, 15 nt, Human
gauuacauucaguug

SEQ ID NO: 3205320 - RNA, 16 nt, Human
gaugugaacacaucag

SEQ ID NO: 3205321 - RNA, 14 nt, Human
gaugugaacacauc

SEQ ID NO: 3205322 - RNA, 20 nt, Human
gauuacaggugugaaccacc

SEQ ID NO: 3205323 - RNA, 20 nt, Human
gauuacaggugugagccacc

SEQ ID NO: 3205324 - RNA, 17 nt, Human
gaugugacauuugucau

SEQ ID NO: 3205325 - RNA, 14 nt, Human
gaugugacauuugu

SEQ ID NO: 3205326 - RNA, 13 nt, Human
gauuaguuuagaa

SEQ ID NO: 3205327 - RNA, 14 nt, Human
gauuaguaagucuu

SEQ ID NO: 3205328 - RNA, 15 nt, Human
gauuaguaagaucuc

SEQ ID NO: 3205329 - RNA, 14 nt, Human
gauuaguuuagaac

SEQ ID NO: 3205330 - RNA, 15 nt, Human
gauuaguuuagaaca

SEQ ID NO: 3205331 - RNA, 14 nt, Human
gauuauaaucagaa

SEQ ID NO: 3205332 - RNA, 13 nt, Human
gauuauaauuguu

SEQ ID NO: 3205333 - RNA, 17 nt, Human
gauuagggagagaagau

SEQ ID NO: 3205334 - RNA, 13 nt, Human
gauuauuuacaag

SEQ ID NO: 3205335 - RNA, 18 nt, Human
gauuauuuacaagaagaa

SEQ ID NO: 3205336 - RNA, 21 nt, Human
gauuauuuacaagaagaacuc

SEQ ID NO: 3205337 - RNA, 23 nt, Human
gauucucuugccucagcuucccc

SEQ ID NO: 3205338 - RNA, 22 nt, Human
gauucucuccauuuuggugucu

SEQ ID NO: 3205339 - RNA, 11 nt, Human
gauucucucca

SEQ ID NO: 3205340 - RNA, 21 nt, Human
gauaccuuaaaauuugaaaca

SEQ ID NO: 3205341 - RNA, 18 nt, Human
gauaccuucuuauuuaau

SEQ ID NO: 3205342 - RNA, 20 nt, Human
gauaccuucuuauuuaaucu

SEQ ID NO: 3205343 - RNA, 17 nt, Human
gauaccuuaaaauuuga

SEQ ID NO: 3205344 - RNA, 14 nt, Human
gauaccuuaaaauu

SEQ ID NO: 3205345 - RNA, 13 nt, Human
gauacccauccca

SEQ ID NO: 3205346 - RNA, 14 nt, Human
gauacccaucccau

SEQ ID NO: 3205347 - RNA, 19 nt, Human
gauaccuuaaaauuugaaa

SEQ ID NO: 3205348 - RNA, 15 nt, Human
gauacgugucaaugu

SEQ ID NO: 3205349 - RNA, 16 nt, Human
gauacuacugaccaga

SEQ ID NO: 3205350 - RNA, 13 nt, Human
gauacucugggaa

SEQ ID NO: 3205351 - RNA, 11 nt, Human
gauacucuggg

SEQ ID NO: 3205352 - RNA, 14 nt, Human
gauacucugggaac

SEQ ID NO: 3205353 - RNA, 16 nt, Human
gauaugccugcucuuu

SEQ ID NO: 3205354 - RNA, 18 nt, Human
gauaugccugcucuuugg

SEQ ID NO: 3205355 - RNA, 22 nt, Human
gauaugcuuguaacuaaaauaa

SEQ ID NO: 3205356 - RNA, 12 nt, Human
gauaugcuugua

SEQ ID NO: 3205357 - RNA, 20 nt, Human
gauauguaccuaacgaagua

SEQ ID NO: 3205358 - RNA, 13 nt, Human
gauauuaauguau

SEQ ID NO: 3205359 - RNA, 22 nt, Human
gauauuaauuuaucagauugcu

SEQ ID NO: 3205360 - RNA, 21 nt, Human
gauauucuaagaaauaucugu

SEQ ID NO: 3205361 - RNA, 23 nt, Human
gauauucuaagaaauaucuguga

SEQ ID NO: 3205362 - RNA, 17 nt, Human
gauauugcugaagaauc

SEQ ID NO: 3205363 - RNA, 24 nt, Human
gauauugcugaagaaucuacuuaa

SEQ ID NO: 3205364 - RNA, 18 nt, Human
gauauucuuuguuaauuu

SEQ ID NO: 3205365 - RNA, 15 nt, Human
gauauucuuuguuaa

SEQ ID NO: 3205366 - RNA, 18 nt, Human
gagugaggaugucugggc

SEQ ID NO: 3205367 - RNA, 19 nt, Human
gagugaggaauggcaguga

SEQ ID NO: 3205368 - RNA, 18 nt, Human
gagugcaggcccacccug

SEQ ID NO: 3205369 - RNA, 16 nt, Human
gagugcaggcccaccc

SEQ ID NO: 3205370 - RNA, 12 nt, Human
gagugcagugag

SEQ ID NO: 3205371 - RNA, 11 nt, Human
gagugcaguga

SEQ ID NO: 3205372 - RNA, 12 nt, Human
gagugagcuggu

SEQ ID NO: 3205373 - RNA, 13 nt, Human
gagucccaccuug

SEQ ID NO: 3205374 - RNA, 24 nt, Human
gagugagcacuaaggugugcucug

SEQ ID NO: 3205375 - RNA, 20 nt, Human
gagucccaccuuggcugcag

SEQ ID NO: 3205376 - RNA, 16 nt, Human
gagucccaccuuggcu

SEQ ID NO: 3205377 - RNA, 14 nt, Human
gagucaccaagccc

SEQ ID NO: 3205378 - RNA, 13 nt, Human
gagucaccaagcc

SEQ ID NO: 3205379 - RNA, 12 nt, Human
gaggugggaucc

SEQ ID NO: 3205380 - RNA, 11 nt, Human
gaggugggagg

SEQ ID NO: 3205381 - RNA, 16 nt, Human
gaggugcaugccuaau

SEQ ID NO: 3205382 - RNA, 18 nt, Human
gaguuucacagugugauu

SEQ ID NO: 3205383 - RNA, 23 nt, Human
gaguuugccccguucuguuugua

SEQ ID NO: 3205384 - RNA, 13 nt, Human
gaguuggcuggga

SEQ ID NO: 3205385 - RNA, 18 nt, Human
gagugccuuacacaaugg

SEQ ID NO: 3205386 - RNA, 20 nt, Human
gaguuugggguaugggagag

SEQ ID NO: 3205387 - RNA, 12 nt, Human
gcagccaggcca

SEQ ID NO: 3205388 - RNA, 14 nt, Human
gcagccacuauugu

SEQ ID NO: 3205389 - RNA, 18 nt, Human
gcagccacuuaggacaaa

SEQ ID NO: 3205390 - RNA, 15 nt, Human
gcagccacauuccug

SEQ ID NO: 3205391 - RNA, 16 nt, Human
gcagccacauuccuga

SEQ ID NO: 3205392 - RNA, 11 nt, Human
gcagagcccug

SEQ ID NO: 3205393 - RNA, 15 nt, Human
gcagagcccugcucc

SEQ ID NO: 3205394 - RNA, 13 nt, Human
gcagagcccugcu

SEQ ID NO: 3205395 - RNA, 16 nt, Human
gcagagcccugcuccc

SEQ ID NO: 3205396 - RNA, 13 nt, Human
gcagccaggccac

SEQ ID NO: 3205397 - RNA, 14 nt, Human
gcagccaggccaca

SEQ ID NO: 3205398 - RNA, 18 nt, Human
gcagcccaccccucaaca

SEQ ID NO: 3205399 - RNA, 12 nt, Human
gcagccaggaga

SEQ ID NO: 3205400 - RNA, 21 nt, Human
gcagccaggagagcuuagggu

SEQ ID NO: 3205401 - RNA, 22 nt, Human
gcagccccaaauugucaccugc

SEQ ID NO: 3205402 - RNA, 17 nt, Human
gcauaauaauccugcaa

SEQ ID NO: 3205403 - RNA, 23 nt, Human
gcauaauucugaaguuauauuuc

SEQ ID NO: 3205404 - RNA, 19 nt, Human
gcaguuugaggauuaguuu

SEQ ID NO: 3205405 - RNA, 20 nt, Human
gcaguuucaauaaaguuuga

SEQ ID NO: 3205406 - RNA, 17 nt, Human
gcaguuucaauaaaguu

SEQ ID NO: 3205407 - RNA, 12 nt, Human
gcaguuucaaua

SEQ ID NO: 3205408 - RNA, 21 nt, Human
gcagucauggagaaccaccua

SEQ ID NO: 3205409 - RNA, 12 nt, Human
gcagucauuuug

SEQ ID NO: 3205410 - RNA, 20 nt, Human
gcaggcucucaggccagcug

SEQ ID NO: 3205411 - RNA, 22 nt, Human
gcaggcucucaggccagcugcu

SEQ ID NO: 3205412 - RNA, 17 nt, Human
gcagcugcgguccaccc

SEQ ID NO: 3205413 - RNA, 23 nt, Human
gcaggcucucaggccagcugcuu

SEQ ID NO: 3205414 - RNA, 18 nt, Human
gcaggcucucaggccagc

SEQ ID NO: 3205415 - RNA, 14 nt, Human
gcaggcuggcccug

SEQ ID NO: 3205416 - RNA, 15 nt, Human
gcaggcuggcccugc

SEQ ID NO: 3205417 - RNA, 16 nt, Human
gcaggcuggcccugcc

SEQ ID NO: 3205418 - RNA, 17 nt, Human
gcaggcuggcccugccc

SEQ ID NO: 3205419 - RNA, 18 nt, Human
gcaggcuggcccugcccu

SEQ ID NO: 3205420 - RNA, 21 nt, Human
gcaggcuggcccugcccuggu

SEQ ID NO: 3205421 - RNA, 19 nt, Human
gcaggcuggcccugcccug

SEQ ID NO: 3205422 - RNA, 20 nt, Human
gcaggcuggcccugcccugg

SEQ ID NO: 3205423 - RNA, 19 nt, Human
gcagggacuugaacccaua

SEQ ID NO: 3205424 - RNA, 10 nt, Human
gcagggaggg

SEQ ID NO: 3205425 - RNA, 13 nt, Human
gcagggagggccu

SEQ ID NO: 3205426 - RNA, 16 nt, Human
gcaguaacuugggagu

SEQ ID NO: 3205427 - RNA, 13 nt, Human
gcaguaacuuggg

SEQ ID NO: 3205428 - RNA, 20 nt, Human
gcaguauaaagaauaggacu

SEQ ID NO: 3205429 - RNA, 15 nt, Human
gcaguaucaugaagc

SEQ ID NO: 3205430 - RNA, 12 nt, Human
gcaguaucauga

SEQ ID NO: 3205431 - RNA, 14 nt, Human
gcacugaaguuuga

SEQ ID NO: 3205432 - RNA, 12 nt, Human
gcacugacauug

SEQ ID NO: 3205433 - RNA, 13 nt, Human
gcacugacucugg

SEQ ID NO: 3205434 - RNA, 18 nt, Human
gcacugacucuggaaaag

SEQ ID NO: 3205435 - RNA, 17 nt, Human
gcacugacucuggaaaa

SEQ ID NO: 3205436 - RNA, 16 nt, Human
gcacugacucuggaaa

SEQ ID NO: 3205437 - RNA, 14 nt, Human
gcacugacucugga

SEQ ID NO: 3205438 - RNA, 16 nt, Human
gcagaaauagacaaaa

SEQ ID NO: 3205439 - RNA, 21 nt, Human
gcagagcagugggccuggcca

SEQ ID NO: 3205440 - RNA, 19 nt, Human
gcagagcagagaccauccc

SEQ ID NO: 3205441 - RNA, 20 nt, Human
gcagagcagagaccaucccu

SEQ ID NO: 3205442 - RNA, 24 nt, Human
gcagagcaccuuagacagucccug

SEQ ID NO: 3205443 - RNA, 12 nt, Human
gcagagcagaga

SEQ ID NO: 3205444 - RNA, 14 nt, Human
gcagagcagagacc

SEQ ID NO: 3205445 - RNA, 15 nt, Human
gcagagcagagacca

SEQ ID NO: 3205446 - RNA, 15 nt, Human
gcagaaauucuguuu

SEQ ID NO: 3205447 - RNA, 14 nt, Human
gcagaaauucuguu

SEQ ID NO: 3205448 - RNA, 12 nt, Human
gcagaaauucug

SEQ ID NO: 3205449 - RNA, 16 nt, Human
gcagaaaucugaggaa

SEQ ID NO: 3205450 - RNA, 17 nt, Human
gcagaaauucuguuuuu

SEQ ID NO: 3205451 - RNA, 16 nt, Human
gcagaaauucuguuuu

SEQ ID NO: 3205452 - RNA, 21 nt, Human
gcagaaauucuguuuuuaaaa

SEQ ID NO: 3205453 - RNA, 13 nt, Human
gcagagaggcugu

SEQ ID NO: 3205454 - RNA, 22 nt, Human
gcagagcaccuuagacaguccc

SEQ ID NO: 3205455 - RNA, 23 nt, Human
gcagagcaccuuagacagucccu

SEQ ID NO: 3205456 - RNA, 19 nt, Human
gcagagcaccuuagacagu

SEQ ID NO: 3205457 - RNA, 14 nt, Human
gcagagaggcugug

SEQ ID NO: 3205458 - RNA, 18 nt, Human
gcaccggcuggccuggcc

SEQ ID NO: 3205459 - RNA, 21 nt, Human
gcaccggcuggccuggccccu

SEQ ID NO: 3205460 - RNA, 23 nt, Human
gcaccggcuggccuggccccuca

SEQ ID NO: 3205461 - RNA, 19 nt, Human
gcaccgacuagacacacaa

SEQ ID NO: 3205462 - RNA, 20 nt, Human
gcaccgacuagacacacaaa

SEQ ID NO: 3205463 - RNA, 17 nt, Human
gcaccgccucuucccgc

SEQ ID NO: 3205464 - RNA, 14 nt, Human
gcaccgccucuucc

SEQ ID NO: 3205465 - RNA, 19 nt, Human
gcaccggcuggccuggccc

SEQ ID NO: 3205466 - RNA, 15 nt, Human
gcaccgaauauugag

SEQ ID NO: 3205467 - RNA, 20 nt, Human
gcacccuuccaucugauucc

SEQ ID NO: 3205468 - RNA, 14 nt, Human
gcacaugccucucu

SEQ ID NO: 3205469 - RNA, 17 nt, Human
gcacaugccucucucag

SEQ ID NO: 3205470 - RNA, 18 nt, Human
gcacaugccucucucagg

SEQ ID NO: 3205471 - RNA, 19 nt, Human
gcacaugccucucucaggc

SEQ ID NO: 3205472 - RNA, 20 nt, Human
gcacaugccucucucaggcc

SEQ ID NO: 3205473 - RNA, 21 nt, Human
gcacaugccucucucaggcca

SEQ ID NO: 3205474 - RNA, 22 nt, Human
gcacaugauuucacaaauauua

SEQ ID NO: 3205475 - RNA, 20 nt, Human
gcacaugauuucacaaauau

SEQ ID NO: 3205476 - RNA, 11 nt, Human
gcacccugagg

SEQ ID NO: 3205477 - RNA, 12 nt, Human
gcacccugaggg

SEQ ID NO: 3205478 - RNA, 13 nt, Human
gcacccugagggc

SEQ ID NO: 3205479 - RNA, 15 nt, Human
gcacccugagggcgg

SEQ ID NO: 3205480 - RNA, 13 nt, Human
gcacaugccucuc

SEQ ID NO: 3205481 - RNA, 13 nt, Human
gcacaugauuuca

SEQ ID NO: 3205482 - RNA, 12 nt, Human
gcacaugauuuc

SEQ ID NO: 3205483 - RNA, 19 nt, Human
gcacaugauuucacaaaua

SEQ ID NO: 3205484 - RNA, 17 nt, Human
gcacaugauuucacaaa

SEQ ID NO: 3205485 - RNA, 15 nt, Human
gcacaugauuucaca

SEQ ID NO: 3205486 - RNA, 14 nt, Human
gcacaugauuucac

SEQ ID NO: 3205487 - RNA, 18 nt, Human
gcacaguuuucugagaaa

SEQ ID NO: 3205488 - RNA, 17 nt, Human
gcacaguuuucugagaa

SEQ ID NO: 3205489 - RNA, 14 nt, Human
gcacaguuuucuga

SEQ ID NO: 3205490 - RNA, 18 nt, Human
gcacacaauuagauuucu

SEQ ID NO: 3205491 - RNA, 14 nt, Human
gcacacaaauauua

SEQ ID NO: 3205492 - RNA, 21 nt, Human
gcacaaucucggcucacugca

SEQ ID NO: 3205493 - RNA, 14 nt, Human
gcaauaagaacaaa

SEQ ID NO: 3205494 - RNA, 22 nt, Human
gcaauaacaguaguguuacaug

SEQ ID NO: 3205495 - RNA, 22 nt, Human
gcacaaucucggcucacugcau

SEQ ID NO: 3205496 - RNA, 12 nt, Human
gcacaauuauaa

SEQ ID NO: 3205497 - RNA, 15 nt, Human
gcaauaaauuuugaa

SEQ ID NO: 3205498 - RNA, 16 nt, Human
gcaauaaauuuugaaa

SEQ ID NO: 3205499 - RNA, 13 nt, Human
gcaauaaaguaua

SEQ ID NO: 3205500 - RNA, 18 nt, Human
gcaauaaauuuugaaaag

SEQ ID NO: 3205501 - RNA, 13 nt, Human
gcaauaaauuuug

SEQ ID NO: 3205502 - RNA, 14 nt, Human
gcaauaaauuuuga

SEQ ID NO: 3205503 - RNA, 14 nt, Human
gcacaagcugcacc

SEQ ID NO: 3205504 - RNA, 23 nt, Human
gcacaagcuccaagcucccaggc

SEQ ID NO: 3205505 - RNA, 21 nt, Human
gcacaagcuccaagcucccag

SEQ ID NO: 3205506 - RNA, 22 nt, Human
gcacaagcuccaagcucccagg

SEQ ID NO: 3205507 - RNA, 13 nt, Human
gcaagugagagcu

SEQ ID NO: 3205508 - RNA, 16 nt, Human
gcaaguccugcaacca

SEQ ID NO: 3205509 - RNA, 13 nt, Human
gauucugagagcu

SEQ ID NO: 3205510 - RNA, 21 nt, Human
gauucugaccuuaaaugcaac

SEQ ID NO: 3205511 - RNA, 20 nt, Human
gauucugaccuuaaaugcaa

SEQ ID NO: 3205512 - RNA, 23 nt, Human
gauucugaccuuaaaugcaacca

SEQ ID NO: 3205513 - RNA, 14 nt, Human
gagcagggcucagc

SEQ ID NO: 3205514 - RNA, 13 nt, Human
gagccccacucuc

SEQ ID NO: 3205515 - RNA, 12 nt, Human
gagccccacucu

SEQ ID NO: 3205516 - RNA, 18 nt, Human
gagccccacucucagagg

SEQ ID NO: 3205517 - RNA, 17 nt, Human
gagccccacucucagag

SEQ ID NO: 3205518 - RNA, 16 nt, Human
gagccccacucucaga

SEQ ID NO: 3205519 - RNA, 14 nt, Human
gagccccacucuca

SEQ ID NO: 3205520 - RNA, 23 nt, Human
gagccccacucucagaggcccca

SEQ ID NO: 3205521 - RNA, 22 nt, Human
gagccccacucucagaggcccc

SEQ ID NO: 3205522 - RNA, 21 nt, Human
gagccccacucucagaggccc

SEQ ID NO: 3205523 - RNA, 20 nt, Human
gagccccacucucagaggcc

SEQ ID NO: 3205524 - RNA, 19 nt, Human
gagccccacucucagaggc

SEQ ID NO: 3205525 - RNA, 22 nt, Human
gagcccccagcuuccagcagga

SEQ ID NO: 3205526 - RNA, 21 nt, Human
gagcccccagcuuccagcagg

SEQ ID NO: 3205527 - RNA, 20 nt, Human
gagcccccagcuuccagcag

SEQ ID NO: 3205528 - RNA, 17 nt, Human
gagcccccagcuuccag

SEQ ID NO: 3205529 - RNA, 22 nt, Human
gagcaugccuggauggggcugc

SEQ ID NO: 3205530 - RNA, 21 nt, Human
gagcaugccuggauggggcug

SEQ ID NO: 3205531 - RNA, 12 nt, Human
gagcaucaggcc

SEQ ID NO: 3205532 - RNA, 19 nt, Human
gagcuggggaugucucuca

SEQ ID NO: 3205533 - RNA, 20 nt, Human
gagcuggggagaauggggcu

SEQ ID NO: 3205534 - RNA, 18 nt, Human
gagcugggugucaagagg

SEQ ID NO: 3205535 - RNA, 21 nt, Human
gagcuggggaccagcagucug

SEQ ID NO: 3205536 - RNA, 14 nt, Human
gagccuuccagggg

SEQ ID NO: 3205537 - RNA, 15 nt, Human
gagccuuccaggggu

SEQ ID NO: 3205538 - RNA, 16 nt, Human
gagccuuccaggggug

SEQ ID NO: 3205539 - RNA, 17 nt, Human
gagccuuccaggggugg

SEQ ID NO: 3205540 - RNA, 15 nt, Human
gagcgacagagcagu

SEQ ID NO: 3205541 - RNA, 14 nt, Human
gagcgacagagcag

SEQ ID NO: 3205542 - RNA, 22 nt, Human
gagcugccuguucagcuccagc

SEQ ID NO: 3205543 - RNA, 21 nt, Human
gagcugccuguucagcuccag

SEQ ID NO: 3205544 - RNA, 20 nt, Human
gagcugccuguucagcucca

SEQ ID NO: 3205545 - RNA, 18 nt, Human
gagcggagaaaggaaggg

SEQ ID NO: 3205546 - RNA, 21 nt, Human
gagcggagaaaggaagggcug

SEQ ID NO: 3205547 - RNA, 17 nt, Human
gagcggagaaaggaagg

SEQ ID NO: 3205548 - RNA, 20 nt, Human
gagcggagacgggaggccug

SEQ ID NO: 3205549 - RNA, 18 nt, Human
gagcggauugcaaagcaa

SEQ ID NO: 3205550 - RNA, 16 nt, Human
gagcggauugcaaagc

SEQ ID NO: 3205551 - RNA, 19 nt, Human
gagaugaugaaaauauuua

SEQ ID NO: 3205552 - RNA, 20 nt, Human
gagaugaugaaaauauuuaa

SEQ ID NO: 3205553 - RNA, 22 nt, Human
gagaggcauccaguaucuugaa

SEQ ID NO: 3205554 - RNA, 21 nt, Human
gagaugaugccaugggcccuc

SEQ ID NO: 3205555 - RNA, 12 nt, Human
gagaugauuucc

SEQ ID NO: 3205556 - RNA, 14 nt, Human
gagaugcugugccc

SEQ ID NO: 3205557 - RNA, 17 nt, Human
gagaugcugugccccug

SEQ ID NO: 3205558 - RNA, 15 nt, Human
gagaugcugugcccc

SEQ ID NO: 3205559 - RNA, 14 nt, Human
gagacuccugcagg

SEQ ID NO: 3205560 - RNA, 15 nt, Human
gagacuccugcaggc

SEQ ID NO: 3205561 - RNA, 16 nt, Human
gagacuccugcaggca

SEQ ID NO: 3205562 - RNA, 17 nt, Human
gagacuccugcaggcag

SEQ ID NO: 3205563 - RNA, 14 nt, Human
gagaggcauccagu

SEQ ID NO: 3205564 - RNA, 21 nt, Human
gagaugguaugcacaauucca

SEQ ID NO: 3205565 - RNA, 18 nt, Human
gagauugcaccacugcac

SEQ ID NO: 3205566 - RNA, 12 nt, Human
gagaugucucuu

SEQ ID NO: 3205567 - RNA, 20 nt, Human
gagauuuggggcuaaagacu

SEQ ID NO: 3205568 - RNA, 22 nt, Human
gacuauucaaacagucucagga

SEQ ID NO: 3205569 - RNA, 22 nt, Human
gacuaucuaaauguugaaagau

SEQ ID NO: 3205570 - RNA, 15 nt, Human
gacuaggguccuggg

SEQ ID NO: 3205571 - RNA, 16 nt, Human
gacuaggguccugggg

SEQ ID NO: 3205572 - RNA, 21 nt, Human
gacucuuuauugucuguaaau

SEQ ID NO: 3205573 - RNA, 22 nt, Human
gacucuuuauugucuguaaauc

SEQ ID NO: 3205574 - RNA, 23 nt, Human
gacucuuuauugucuguaaaucu

SEQ ID NO: 3205575 - RNA, 22 nt, Human
gacucuuuuccaaacacaggca

SEQ ID NO: 3205576 - RNA, 12 nt, Human
gacucugucuca

SEQ ID NO: 3205577 - RNA, 16 nt, Human
gacucugccuccucuu

SEQ ID NO: 3205578 - RNA, 16 nt, Human
gacucugcucuugcau

SEQ ID NO: 3205579 - RNA, 18 nt, Human
gacuuuugaaaagaggug

SEQ ID NO: 3205580 - RNA, 23 nt, Human
gacuuuucuguccgagcuuugaa

SEQ ID NO: 3205581 - RNA, 17 nt, Human
gacuuuugcuuuaauuc

SEQ ID NO: 3205582 - RNA, 15 nt, Human
gacuuuugcuuuaau

SEQ ID NO: 3205583 - RNA, 14 nt, Human
gacuuuugcuuuaa

SEQ ID NO: 3205584 - RNA, 13 nt, Human
gacuuuugcuuua

SEQ ID NO: 3205585 - RNA, 23 nt, Human
gacuuuucuuucagccaagaauu

SEQ ID NO: 3205586 - RNA, 21 nt, Human
gacuuuucuuuguggcuuccu

SEQ ID NO: 3205587 - RNA, 11 nt, Human
gacuuuccucu

SEQ ID NO: 3205588 - RNA, 23 nt, Human
gagacuaaccccaccacacccuc

SEQ ID NO: 3205589 - RNA, 11 nt, Human
gagaccugccc

SEQ ID NO: 3205590 - RNA, 12 nt, Human
gagaccugcccc

SEQ ID NO: 3205591 - RNA, 14 nt, Human
gagaaucacuugaa

SEQ ID NO: 3205592 - RNA, 18 nt, Human
gagaagugacgguuccua

SEQ ID NO: 3205593 - RNA, 15 nt, Human
gagaaucacuugaac

SEQ ID NO: 3205594 - RNA, 16 nt, Human
gagaaucacaggcugg

SEQ ID NO: 3205595 - RNA, 15 nt, Human
gagaaucauguuucu

SEQ ID NO: 3205596 - RNA, 20 nt, Human
gagaaucauguuucuuugau

SEQ ID NO: 3205597 - RNA, 19 nt, Human
gagaaucauguuucuuuga

SEQ ID NO: 3205598 - RNA, 17 nt, Human
gagaaucauguuucuuu

SEQ ID NO: 3205599 - RNA, 16 nt, Human
gagaaucauguuucuu

SEQ ID NO: 3205600 - RNA, 12 nt, Human
gagaaggaagcc

SEQ ID NO: 3205601 - RNA, 20 nt, Human
gagaaggacccggaggggcc

SEQ ID NO: 3205602 - RNA, 22 nt, Human
gagaaggacccggaggggccug

SEQ ID NO: 3205603 - RNA, 13 nt, Human
gagaagcggcugg

SEQ ID NO: 3205604 - RNA, 15 nt, Human
gagaagcggcuggca

SEQ ID NO: 3205605 - RNA, 19 nt, Human
gaagugugggucugugugu

SEQ ID NO: 3205606 - RNA, 17 nt, Human
gaagugugggucugugu

SEQ ID NO: 3205607 - RNA, 18 nt, Human
gaagugugggucugugug

SEQ ID NO: 3205608 - RNA, 11 nt, Human
gaaugaauguc

SEQ ID NO: 3205609 - RNA, 14 nt, Human
gaaugaaugucagu

SEQ ID NO: 3205610 - RNA, 18 nt, Human
gaaugaaugucaguguga

SEQ ID NO: 3205611 - RNA, 22 nt, Human
gaaugaaugucagugugacuga

SEQ ID NO: 3205612 - RNA, 16 nt, Human
gaaugagacuggcuug

SEQ ID NO: 3205613 - RNA, 21 nt, Human
gaaugaccuuguaauguaacu

SEQ ID NO: 3205614 - RNA, 19 nt, Human
gaaugaccuuguaauguaa

SEQ ID NO: 3205615 - RNA, 18 nt, Human
gaaugaccuuguaaugua

SEQ ID NO: 3205616 - RNA, 22 nt, Human
gaaugacuaagaggaaaguaca

SEQ ID NO: 3205617 - RNA, 20 nt, Human
gaaugacuuccccaauaucu

SEQ ID NO: 3205618 - RNA, 13 nt, Human
gaaugacucguuu

SEQ ID NO: 3205619 - RNA, 20 nt, Human
gaaugaauggcuaagcaaaa

SEQ ID NO: 3205620 - RNA, 16 nt, Human
gaaugaccuuguaaug

SEQ ID NO: 3205621 - RNA, 15 nt, Human
gaaugaccuuguaau

SEQ ID NO: 3205622 - RNA, 12 nt, Human
gaaugaauuuca

SEQ ID NO: 3205623 - RNA, 15 nt, Human
gaaggcuauggggau

SEQ ID NO: 3205624 - RNA, 16 nt, Human
gaaggcucgagcaugc

SEQ ID NO: 3205625 - RNA, 17 nt, Human
gaaggcucgagcaugcc

SEQ ID NO: 3205626 - RNA, 19 nt, Human
gaagggcagggcugaggcc

SEQ ID NO: 3205627 - RNA, 18 nt, Human
gaagucuuuguacagaca

SEQ ID NO: 3205628 - RNA, 19 nt, Human
gaagucuuuguacagacaa

SEQ ID NO: 3205629 - RNA, 20 nt, Human
gaagucuuuguacagacaac

SEQ ID NO: 3205630 - RNA, 15 nt, Human
gaaguggggacagag

SEQ ID NO: 3205631 - RNA, 16 nt, Human
gaagugagaaaaugaa

SEQ ID NO: 3205632 - RNA, 22 nt, Human
gaagugacgguuccuacacagg

SEQ ID NO: 3205633 - RNA, 16 nt, Human
gaagugacgguuccua

SEQ ID NO: 3205634 - RNA, 17 nt, Human
gaagugcagaacugcag

SEQ ID NO: 3205635 - RNA, 20 nt, Human
gaagugcagaacugcaguca

SEQ ID NO: 3205636 - RNA, 18 nt, Human
gaagugcagaacugcagu

SEQ ID NO: 3205637 - RNA, 19 nt, Human
gaaaucccugcucacugca

SEQ ID NO: 3205638 - RNA, 18 nt, Human
gaaaucccugcucacugc

SEQ ID NO: 3205639 - RNA, 15 nt, Human
gaaaucccugcucac

SEQ ID NO: 3205640 - RNA, 22 nt, Human
gaaaucauauuuggaauaaaaa

SEQ ID NO: 3205641 - RNA, 13 nt, Human
gaaauccagggug

SEQ ID NO: 3205642 - RNA, 18 nt, Human
gaaauccagggugguggu

SEQ ID NO: 3205643 - RNA, 14 nt, Human
gaagcucagggccu

SEQ ID NO: 3205644 - RNA, 15 nt, Human
gaagcucagggccug

SEQ ID NO: 3205645 - RNA, 16 nt, Human
gaagcucagggccugg

SEQ ID NO: 3205646 - RNA, 17 nt, Human
gaagcucagggccuggc

SEQ ID NO: 3205647 - RNA, 18 nt, Human
gaagcucagggccuggcu

SEQ ID NO: 3205648 - RNA, 19 nt, Human
gaagcucagggccuggcuc

SEQ ID NO: 3205649 - RNA, 20 nt, Human
gaagcucagggccuggcuca

SEQ ID NO: 3205650 - RNA, 21 nt, Human
gaagcucagggccuggcucag

SEQ ID NO: 3205651 - RNA, 23 nt, Human
gaagcucagggccuggcucaggu

SEQ ID NO: 3205652 - RNA, 23 nt, Human
gaauuuuaaaagaugcaauguag

SEQ ID NO: 3205653 - RNA, 21 nt, Human
gaauuuuaaaagaugcaaugu

SEQ ID NO: 3205654 - RNA, 15 nt, Human
gaauuuuaaaagaug

SEQ ID NO: 3205655 - RNA, 12 nt, Human
gaauuuuaaaag

SEQ ID NO: 3205656 - RNA, 12 nt, Human
gaauuuuaaagu

SEQ ID NO: 3205657 - RNA, 13 nt, Human
gaauuuuaaagua

SEQ ID NO: 3205658 - RNA, 15 nt, Human
gaauuuuaaaguaug

SEQ ID NO: 3205659 - RNA, 20 nt, Human
gaauuuuaagccuuuguuga

SEQ ID NO: 3205660 - RNA, 13 nt, Human
gaauuuuaagccu

SEQ ID NO: 3205661 - RNA, 19 nt, Human
gaauuuuggcugugucucc

SEQ ID NO: 3205662 - RNA, 15 nt, Human
gaauuuucuaaaagc

SEQ ID NO: 3205663 - RNA, 16 nt, Human
gaauuuucuaaaagcu

SEQ ID NO: 3205664 - RNA, 22 nt, Human
gaauuuucauuuuacaguuacu

SEQ ID NO: 3205665 - RNA, 21 nt, Human
gaauuuuauuuuuugggaaaa

SEQ ID NO: 3205666 - RNA, 18 nt, Human
gaauuuuauugacacagu

SEQ ID NO: 3205667 - RNA, 12 nt, Human
gaauuuucauuu

SEQ ID NO: 3205668 - RNA, 11 nt, Human
gaauuuucauu

SEQ ID NO: 3205669 - RNA, 20 nt, Human
gaauuuucauuuuacaguua

SEQ ID NO: 3205670 - RNA, 16 nt, Human
gaauuuucauuuuaca

SEQ ID NO: 3205671 - RNA, 14 nt, Human
gaauuuucauuuua

SEQ ID NO: 3205672 - RNA, 13 nt, Human
gaauuuucauuuu

SEQ ID NO: 3205673 - RNA, 15 nt, Human
gaauuaucagcaaag

SEQ ID NO: 3205674 - RNA, 16 nt, Human
gaauuaucagcaaaga

SEQ ID NO: 3205675 - RNA, 17 nt, Human
gaauuaucagcaaagaa

SEQ ID NO: 3205676 - RNA, 18 nt, Human
gaauuaucagcaaagaaa

SEQ ID NO: 3205677 - RNA, 20 nt, Human
gaauuaucagcaaagaaaaa

SEQ ID NO: 3205678 - RNA, 12 nt, Human
gaaugagggggc

SEQ ID NO: 3205679 - RNA, 15 nt, Human
gaaugagggggcuca

SEQ ID NO: 3205680 - RNA, 16 nt, Human
gaaugagggggcucag

SEQ ID NO: 3205681 - RNA, 17 nt, Human
gaaugagggggcucagu

SEQ ID NO: 3205682 - RNA, 15 nt, Human
gaaugaggguuugag

SEQ ID NO: 3205683 - RNA, 19 nt, Human
gaaugaggguuugagagag

SEQ ID NO: 3205684 - RNA, 16 nt, Human
gacaaaaaguauauua

SEQ ID NO: 3205685 - RNA, 18 nt, Human
gacaaaaaguauauuaaa

SEQ ID NO: 3205686 - RNA, 22 nt, Human
gacaaaaaguauauuaaacaaa

SEQ ID NO: 3205687 - RNA, 18 nt, Human
gaauuuuuaugugugauu

SEQ ID NO: 3205688 - RNA, 15 nt, Human
gaauuuuuaugugug

SEQ ID NO: 3205689 - RNA, 21 nt, Human
gaauuuugugcccccauguaa

SEQ ID NO: 3205690 - RNA, 20 nt, Human
gaauuuugugcccccaugua

SEQ ID NO: 3205691 - RNA, 23 nt, Human
gaauuuuggcugugucucccuuc

SEQ ID NO: 3205692 - RNA, 19 nt, Human
gacacacagcucuguccug

SEQ ID NO: 3205693 - RNA, 18 nt, Human
gacacacagcucuguccu

SEQ ID NO: 3205694 - RNA, 17 nt, Human
gacacacagcucugucc

SEQ ID NO: 3205695 - RNA, 15 nt, Human
gacacacagcucugu

SEQ ID NO: 3205696 - RNA, 13 nt, Human
gacacacagcucu

SEQ ID NO: 3205697 - RNA, 14 nt, Human
gacacacagcucug

SEQ ID NO: 3205698 - RNA, 21 nt, Human
gacacacagcucuguccuggg

SEQ ID NO: 3205699 - RNA, 22 nt, Human
gacaggguuuugccauguuggc

SEQ ID NO: 3205700 - RNA, 20 nt, Human
gacaggguuuugccauguug

SEQ ID NO: 3205701 - RNA, 18 nt, Human
gacagcgcacagcugcuc

SEQ ID NO: 3205702 - RNA, 15 nt, Human
gacagcgcacagcug

SEQ ID NO: 3205703 - RNA, 19 nt, Human
gacagccuggcacagggca

SEQ ID NO: 3205704 - RNA, 13 nt, Human
gacagccuggcac

SEQ ID NO: 3205705 - RNA, 15 nt, Human
gacaguauuuguggg

SEQ ID NO: 3205706 - RNA, 20 nt, Human
gacaguauggcagcuuuccu

SEQ ID NO: 3205707 - RNA, 23 nt, Human
gacagucucaccauuuccccagg

SEQ ID NO: 3205708 - RNA, 14 nt, Human
gacagucucaccau

SEQ ID NO: 3205709 - RNA, 13 nt, Human
gacagucucacca

SEQ ID NO: 3205710 - RNA, 20 nt, Human
gacagaaggcuccugccccc

SEQ ID NO: 3205711 - RNA, 19 nt, Human
gacagaaggcuccugcccc

SEQ ID NO: 3205712 - RNA, 14 nt, Human
gacagaaggcuccu

SEQ ID NO: 3205713 - RNA, 23 nt, Human
gacacuuauccacgagagcgcag

SEQ ID NO: 3205714 - RNA, 17 nt, Human
gacacuuaauucuguuc

SEQ ID NO: 3205715 - RNA, 19 nt, Human
gacacuuaauucuguucug

SEQ ID NO: 3205716 - RNA, 20 nt, Human
gacagcccgggcucugccuc

SEQ ID NO: 3205717 - RNA, 21 nt, Human
gacagcccgggcucugccucc

SEQ ID NO: 3205718 - RNA, 22 nt, Human
gacagcccgggcucugccuccc

SEQ ID NO: 3205719 - RNA, 23 nt, Human
gacagcccgggcucugccuccca

SEQ ID NO: 3205720 - RNA, 16 nt, Human
gacacuuaaaaauggu

SEQ ID NO: 3205721 - RNA, 15 nt, Human
gacacugaugggcaa

SEQ ID NO: 3205722 - RNA, 13 nt, Human
gacacugaugggc

SEQ ID NO: 3205723 - RNA, 13 nt, Human
gacacugaaauaa

SEQ ID NO: 3205724 - RNA, 17 nt, Human
ggcccugugccuuggug

SEQ ID NO: 3205725 - RNA, 16 nt, Human
ggcccuucucuccagc

SEQ ID NO: 3205726 - RNA, 17 nt, Human
ggcccuucucuccagcc

SEQ ID NO: 3205727 - RNA, 14 nt, Human
ggcccuuccuuuuc

SEQ ID NO: 3205728 - RNA, 15 nt, Human
ggcccuuccucucca

SEQ ID NO: 3205729 - RNA, 13 nt, Human
ggcccuuccucuc

SEQ ID NO: 3205730 - RNA, 17 nt, Human
ggcccuuccucuccacu

SEQ ID NO: 3205731 - RNA, 18 nt, Human
ggcccuucucuccagccc

SEQ ID NO: 3205732 - RNA, 16 nt, Human
ggccgauggggcaguc

SEQ ID NO: 3205733 - RNA, 22 nt, Human
ggcccagggggcuuccugaggg

SEQ ID NO: 3205734 - RNA, 19 nt, Human
ggcccagggggcuuccuga

SEQ ID NO: 3205735 - RNA, 22 nt, Human
ggccccaccuggcccucucuga

SEQ ID NO: 3205736 - RNA, 15 nt, Human
ggccccaccuggccc

SEQ ID NO: 3205737 - RNA, 13 nt, Human
ggccccaccuggc

SEQ ID NO: 3205738 - RNA, 19 nt, Human
ggccccaccugcagcuccc

SEQ ID NO: 3205739 - RNA, 16 nt, Human
ggccccaccugcagcu

SEQ ID NO: 3205740 - RNA, 13 nt, Human
ggccccaccugca

SEQ ID NO: 3205741 - RNA, 17 nt, Human
ggcagugggagcugccu

SEQ ID NO: 3205742 - RNA, 24 nt, Human
ggcacugcuuccagugaggcucug

SEQ ID NO: 3205743 - RNA, 15 nt, Human
ggcaccagcagccug

SEQ ID NO: 3205744 - RNA, 16 nt, Human
ggcaccagcagccugg

SEQ ID NO: 3205745 - RNA, 22 nt, Human
ggcacugcuuccagugaggcuc

SEQ ID NO: 3205746 - RNA, 22 nt, Human
ggcauuuucccccuuggcucuc

SEQ ID NO: 3205747 - RNA, 22 nt, Human
ggcauccauggggucucucaca

SEQ ID NO: 3205748 - RNA, 13 nt, Human
ggcauccaugggg

SEQ ID NO: 3205749 - RNA, 23 nt, Human
ggcauauauguacuaguggcaug

SEQ ID NO: 3205750 - RNA, 18 nt, Human
ggcauccaguaucuugaa

SEQ ID NO: 3205751 - RNA, 19 nt, Human
ggcagugggagcugccugu

SEQ ID NO: 3205752 - RNA, 18 nt, Human
ggcagugggagcugccug

SEQ ID NO: 3205753 - RNA, 19 nt, Human
ggccaguggcuggaucugu

SEQ ID NO: 3205754 - RNA, 16 nt, Human
ggccagugugacaagg

SEQ ID NO: 3205755 - RNA, 14 nt, Human
ggccaguggcggaa

SEQ ID NO: 3205756 - RNA, 20 nt, Human
ggccaucuggagagcccaga

SEQ ID NO: 3205757 - RNA, 16 nt, Human
ggccaucuggagagcc

SEQ ID NO: 3205758 - RNA, 14 nt, Human
ggccaucuggagag

SEQ ID NO: 3205759 - RNA, 14 nt, Human
ggccaggcuggucu

SEQ ID NO: 3205760 - RNA, 12 nt, Human
ggccaggcuggu

SEQ ID NO: 3205761 - RNA, 18 nt, Human
ggccaggcuggucucaaa

SEQ ID NO: 3205762 - RNA, 16 nt, Human
ggccaggcuggucuca

SEQ ID NO: 3205763 - RNA, 17 nt, Human
ggccaaacucaccugcc

SEQ ID NO: 3205764 - RNA, 23 nt, Human
ggccaaacaacagucuucauuuu

SEQ ID NO: 3205765 - RNA, 15 nt, Human
ggccaaaagcuuccc

SEQ ID NO: 3205766 - RNA, 15 nt, Human
ggccaaacaggcccu

SEQ ID NO: 3205767 - RNA, 23 nt, Human
ggccaaaagcuucccucccugcu

SEQ ID NO: 3205768 - RNA, 23 nt, Human
ggcucagcggggacagcuccuuc

SEQ ID NO: 3205769 - RNA, 22 nt, Human
ggcucagcggggacagcuccuu

SEQ ID NO: 3205770 - RNA, 21 nt, Human
ggcucagcggggacagcuccu

SEQ ID NO: 3205771 - RNA, 20 nt, Human
ggcucagcggggacagcucc

SEQ ID NO: 3205772 - RNA, 22 nt, Human
ggcucagcaaggccaccucuuc

SEQ ID NO: 3205773 - RNA, 21 nt, Human
ggcucagcaaggccaccucuu

SEQ ID NO: 3205774 - RNA, 20 nt, Human
ggcucagcaaggccaccucu

SEQ ID NO: 3205775 - RNA, 19 nt, Human
ggcucagcaaggccaccuc

SEQ ID NO: 3205776 - RNA, 18 nt, Human
ggcucagcaaggccaccu

SEQ ID NO: 3205777 - RNA, 17 nt, Human
ggcucagcaaggccacc

SEQ ID NO: 3205778 - RNA, 15 nt, Human
ggcucagcaaggcca

SEQ ID NO: 3205779 - RNA, 14 nt, Human
ggcucagcaaggcc

SEQ ID NO: 3205780 - RNA, 23 nt, Human
ggcucagcaaaagaugcuucuca

SEQ ID NO: 3205781 - RNA, 19 nt, Human
ggcucagcaaaagaugcuu

SEQ ID NO: 3205782 - RNA, 13 nt, Human
ggcucagcaaggc

SEQ ID NO: 3205783 - RNA, 17 nt, Human
ggcucacugcagccuca

SEQ ID NO: 3205784 - RNA, 16 nt, Human
ggcucacugcauccuc

SEQ ID NO: 3205785 - RNA, 19 nt, Human
ggcucacugcauccuccgc

SEQ ID NO: 3205786 - RNA, 16 nt, Human
ggcucacugcagccuc

SEQ ID NO: 3205787 - RNA, 14 nt, Human
ggcgugcaguggug

SEQ ID NO: 3205788 - RNA, 19 nt, Human
ggcgugcaguggugcgauc

SEQ ID NO: 3205789 - RNA, 15 nt, Human
ggccugagcugggau

SEQ ID NO: 3205790 - RNA, 12 nt, Human
ggccugagcugg

SEQ ID NO: 3205791 - RNA, 16 nt, Human
ggccuugaguccccca

SEQ ID NO: 3205792 - RNA, 16 nt, Human
ggccuucucugaagga

SEQ ID NO: 3205793 - RNA, 15 nt, Human
ggccuucucugaagg

SEQ ID NO: 3205794 - RNA, 13 nt, Human
ggccuuuggcuuc

SEQ ID NO: 3205795 - RNA, 13 nt, Human
ggccuuucccacu

SEQ ID NO: 3205796 - RNA, 14 nt, Human
ggccuuguggucca

SEQ ID NO: 3205797 - RNA, 15 nt, Human
ggccuugugguccaa

SEQ ID NO: 3205798 - RNA, 18 nt, Human
ggccuugugguccaaaua

SEQ ID NO: 3205799 - RNA, 15 nt, Human
ggcgaaucauuuguu

SEQ ID NO: 3205800 - RNA, 13 nt, Human
ggcgaaucucaaa

SEQ ID NO: 3205801 - RNA, 17 nt, Human
ggcgaaucucaaaauua

SEQ ID NO: 3205802 - RNA, 22 nt, Human
ggcgaaaucccugcucacugca

SEQ ID NO: 3205803 - RNA, 18 nt, Human
ggcgaaaucccugcucac

SEQ ID NO: 3205804 - RNA, 14 nt, Human
ggccuuuggcuuca

SEQ ID NO: 3205805 - RNA, 22 nt, Human
ggcgagaccugauuucuccugc

SEQ ID NO: 3205806 - RNA, 21 nt, Human
ggccugugucuaguuguuuga

SEQ ID NO: 3205807 - RNA, 22 nt, Human
ggccuucggccuccauccugag

SEQ ID NO: 3205808 - RNA, 23 nt, Human
ggccuucggccuccauccugagg

SEQ ID NO: 3205809 - RNA, 12 nt, Human
ggccuucucuga

SEQ ID NO: 3205810 - RNA, 21 nt, Human
ggccuggccagaugcaccagc

SEQ ID NO: 3205811 - RNA, 16 nt, Human
ggccuggccagaugca

SEQ ID NO: 3205812 - RNA, 22 nt, Human
ggccugagugagaggggaggcc

SEQ ID NO: 3205813 - RNA, 20 nt, Human
ggccugagugagaggggagg

SEQ ID NO: 3205814 - RNA, 16 nt, Human
ggagcaucagugcccu

SEQ ID NO: 3205815 - RNA, 22 nt, Human
ggagcauuggggauguuuuucu

SEQ ID NO: 3205816 - RNA, 21 nt, Human
ggagguagcuuugagguggaa

SEQ ID NO: 3205817 - RNA, 16 nt, Human
ggaggggggagguggg

SEQ ID NO: 3205818 - RNA, 20 nt, Human
ggaggccuugggcucugcug

SEQ ID NO: 3205819 - RNA, 20 nt, Human
ggaggucaaggcugcaguga

SEQ ID NO: 3205820 - RNA, 14 nt, Human
ggaggugaccccag

SEQ ID NO: 3205821 - RNA, 13 nt, Human
ggagccaggaggg

SEQ ID NO: 3205822 - RNA, 18 nt, Human
ggagcccaggagucccac

SEQ ID NO: 3205823 - RNA, 13 nt, Human
ggagcccaggagu

SEQ ID NO: 3205824 - RNA, 12 nt, Human
ggagcccaggag

SEQ ID NO: 3205825 - RNA, 16 nt, Human
ggagccaauggagacu

SEQ ID NO: 3205826 - RNA, 22 nt, Human
ggagccccgaggccuucucuga

SEQ ID NO: 3205827 - RNA, 16 nt, Human
ggagccccgaggccuu

SEQ ID NO: 3205828 - RNA, 12 nt, Human
ggagcugccugu

SEQ ID NO: 3205829 - RNA, 16 nt, Human
ggagcugaguggggga

SEQ ID NO: 3205830 - RNA, 21 nt, Human
ggagcugccuguucagcucca

SEQ ID NO: 3205831 - RNA, 19 nt, Human
ggaggaaggaaacccagcu

SEQ ID NO: 3205832 - RNA, 18 nt, Human
ggagcuggcuccagccug

SEQ ID NO: 3205833 - RNA, 20 nt, Human
ggagcuggcuccagccugga

SEQ ID NO: 3205834 - RNA, 20 nt, Human
ggaggaaggaaacccagcuc

SEQ ID NO: 3205835 - RNA, 23 nt, Human
ggaggaaggaaacccagcucugg

SEQ ID NO: 3205836 - RNA, 11 nt, Human
ggaggccagcc

SEQ ID NO: 3205837 - RNA, 14 nt, Human
ggaggccaccuccu

SEQ ID NO: 3205838 - RNA, 13 nt, Human
ggaggccaccucc

SEQ ID NO: 3205839 - RNA, 18 nt, Human
ggaggccaccuccuaaaa

SEQ ID NO: 3205840 - RNA, 20 nt, Human
ggaggccaaggugggaggau

SEQ ID NO: 3205841 - RNA, 22 nt, Human
ggaggaccagggcuggggcagc

SEQ ID NO: 3205842 - RNA, 12 nt, Human
ggaggaccaggg

SEQ ID NO: 3205843 - RNA, 13 nt, Human
ggaggaccagggc

SEQ ID NO: 3205844 - RNA, 15 nt, Human
ggagugcagugagcc

SEQ ID NO: 3205845 - RNA, 12 nt, Human
ggagugcagugg

SEQ ID NO: 3205846 - RNA, 22 nt, Human
ggagugcaguggcgaaaucccu

SEQ ID NO: 3205847 - RNA, 14 nt, Human
ggaguggccacaga

SEQ ID NO: 3205848 - RNA, 15 nt, Human
ggaguucugguuccu

SEQ ID NO: 3205849 - RNA, 12 nt, Human
ggaguucuucuu

SEQ ID NO: 3205850 - RNA, 18 nt, Human
ggaguuggaguagaaugu

SEQ ID NO: 3205851 - RNA, 21 nt, Human
ggaguuggaagugugugaucu

SEQ ID NO: 3205852 - RNA, 12 nt, Human
ggauaacaccac

SEQ ID NO: 3205853 - RNA, 18 nt, Human
ggauaaaucauaaaguca

SEQ ID NO: 3205854 - RNA, 12 nt, Human
ggauggcaagau

SEQ ID NO: 3205855 - RNA, 18 nt, Human
ggauggauuuccagccaa

SEQ ID NO: 3205856 - RNA, 18 nt, Human
ggauggaggaagaacuga

SEQ ID NO: 3205857 - RNA, 16 nt, Human
ggauggggcugcaccg

SEQ ID NO: 3205858 - RNA, 21 nt, Human
ggauguacaaggacagccccu

SEQ ID NO: 3205859 - RNA, 22 nt, Human
ggaugggcagucauuuugcaga

SEQ ID NO: 3205860 - RNA, 15 nt, Human
ggauggcccagggug

SEQ ID NO: 3205861 - RNA, 18 nt, Human
ggaucucuugagccuggg

SEQ ID NO: 3205862 - RNA, 15 nt, Human
ggauccuccaggugc

SEQ ID NO: 3205863 - RNA, 14 nt, Human
ggauccuccaggug

SEQ ID NO: 3205864 - RNA, 13 nt, Human
ggauccugagcca

SEQ ID NO: 3205865 - RNA, 14 nt, Human
ggauccugagccag

SEQ ID NO: 3205866 - RNA, 12 nt, Human
ggcacagccugg

SEQ ID NO: 3205867 - RNA, 13 nt, Human
ggcacagccugca

SEQ ID NO: 3205868 - RNA, 12 nt, Human
ggcacagccugc

SEQ ID NO: 3205869 - RNA, 15 nt, Human
ggcacagccugcacu

SEQ ID NO: 3205870 - RNA, 14 nt, Human
ggcacagccugcac

SEQ ID NO: 3205871 - RNA, 16 nt, Human
ggcacagggcaguggg

SEQ ID NO: 3205872 - RNA, 13 nt, Human
ggcacagggccug

SEQ ID NO: 3205873 - RNA, 12 nt, Human
ggcacagggccu

SEQ ID NO: 3205874 - RNA, 19 nt, Human
ggcacagggcaugaaauga

SEQ ID NO: 3205875 - RNA, 16 nt, Human
ggcacagggcaugaaa

SEQ ID NO: 3205876 - RNA, 18 nt, Human
ggcacagggccuggccca

SEQ ID NO: 3205877 - RNA, 17 nt, Human
ggcacagggccuggccc

SEQ ID NO: 3205878 - RNA, 15 nt, Human
ggcacagggccuggc

SEQ ID NO: 3205879 - RNA, 14 nt, Human
ggcacagggccugg

SEQ ID NO: 3205880 - RNA, 21 nt, Human
ggcacaggcagggcaggacca

SEQ ID NO: 3205881 - RNA, 13 nt, Human
ggcacagggagag

SEQ ID NO: 3205882 - RNA, 16 nt, Human
ggcacaggcagggcag

SEQ ID NO: 3205883 - RNA, 15 nt, Human
ggcacaggcagggca

SEQ ID NO: 3205884 - RNA, 14 nt, Human
ggcacaggcagggc

SEQ ID NO: 3205885 - RNA, 13 nt, Human
ggcacaggcaggg

SEQ ID NO: 3205886 - RNA, 12 nt, Human
ggcacaggcagg

SEQ ID NO: 3205887 - RNA, 16 nt, Human
ggcaauguuuugcuuu

SEQ ID NO: 3205888 - RNA, 22 nt, Human
ggcacaaucucggcucacugca

SEQ ID NO: 3205889 - RNA, 24 nt, Human
ggcacagaaaauggaagacagcuc

SEQ ID NO: 3205890 - RNA, 23 nt, Human
ggcacagaaaauggaagacagcu

SEQ ID NO: 3205891 - RNA, 15 nt, Human
ggauguucugggaca

SEQ ID NO: 3205892 - RNA, 16 nt, Human
ggauguucugggacac

SEQ ID NO: 3205893 - RNA, 13 nt, Human
ggauguucuggga

SEQ ID NO: 3205894 - RNA, 14 nt, Human
gggagggcuccaga

SEQ ID NO: 3205895 - RNA, 15 nt, Human
gggagggcuccagac

SEQ ID NO: 3205896 - RNA, 17 nt, Human
gggagggcuccagacac

SEQ ID NO: 3205897 - RNA, 17 nt, Human
gggaggucgaggcagga

SEQ ID NO: 3205898 - RNA, 18 nt, Human
gggaggucgaggcaggag

SEQ ID NO: 3205899 - RNA, 19 nt, Human
gggaggucgaggcaggagg

SEQ ID NO: 3205900 - RNA, 16 nt, Human
gggaugguguucaaaa

SEQ ID NO: 3205901 - RNA, 19 nt, Human
gggaugguaagagaaaaga

SEQ ID NO: 3205902 - RNA, 14 nt, Human
gggaugucucucau

SEQ ID NO: 3205903 - RNA, 22 nt, Human
gggaugugugugugcagagcug

SEQ ID NO: 3205904 - RNA, 13 nt, Human
gggauguuuuucu

SEQ ID NO: 3205905 - RNA, 15 nt, Human
gggaggucgaggcag

SEQ ID NO: 3205906 - RNA, 16 nt, Human
gggaugggagccgggc

SEQ ID NO: 3205907 - RNA, 15 nt, Human
gggaugggagccggg

SEQ ID NO: 3205908 - RNA, 14 nt, Human
gggauggggcuggg

SEQ ID NO: 3205909 - RNA, 14 nt, Human
gggaugggccugag

SEQ ID NO: 3205910 - RNA, 15 nt, Human
aaaagaugcaaugua

SEQ ID NO: 3205911 - RNA, 13 nt, Human
aaaagauguagau

SEQ ID NO: 3205912 - RNA, 15 nt, Human
aaaagcaauauugua

SEQ ID NO: 3205913 - RNA, 14 nt, Human
aaaagauguagauu

SEQ ID NO: 3205914 - RNA, 17 nt, Human
aaaagcaacaucagcuu

SEQ ID NO: 3205915 - RNA, 22 nt, Human
gggagaaugucaguauguggaa

SEQ ID NO: 3205916 - RNA, 19 nt, Human
gggagaaugucaguaugug

SEQ ID NO: 3205917 - RNA, 14 nt, Human
aaaagcagcauaaa

SEQ ID NO: 3205918 - RNA, 19 nt, Human
gggaggccaaggugggagg

SEQ ID NO: 3205919 - RNA, 12 nt, Human
gggagcagcccc

SEQ ID NO: 3205920 - RNA, 19 nt, Human
gggaggccaucuggagagc

SEQ ID NO: 3205921 - RNA, 15 nt, Human
gggagcacccugagg

SEQ ID NO: 3205922 - RNA, 13 nt, Human
gggagacagagca

SEQ ID NO: 3205923 - RNA, 19 nt, Human
aaaagggaguuuaaaaaug

SEQ ID NO: 3205924 - RNA, 14 nt, Human
aaaagggaguuuuu

SEQ ID NO: 3205925 - RNA, 16 nt, Human
gggcagaucucccaca

SEQ ID NO: 3205926 - RNA, 21 nt, Human
gggcagaggagaacuugcugc

SEQ ID NO: 3205927 - RNA, 15 nt, Human
gggcagaggagaacu

SEQ ID NO: 3205928 - RNA, 23 nt, Human
gggcagaggagaacuugcugccu

SEQ ID NO: 3205929 - RNA, 14 nt, Human
gggcagccugccuu

SEQ ID NO: 3205930 - RNA, 15 nt, Human
gggauugggccccug

SEQ ID NO: 3205931 - RNA, 18 nt, Human
gggauugauuuuaaaaug

SEQ ID NO: 3205932 - RNA, 16 nt, Human
gggauuguaaaauggu

SEQ ID NO: 3205933 - RNA, 17 nt, Human
gggauuguaaaauggug

SEQ ID NO: 3205934 - RNA, 13 nt, Human
gggcaaauaauga

SEQ ID NO: 3205935 - RNA, 15 nt, Human
gggauuacaggugug

SEQ ID NO: 3205936 - RNA, 12 nt, Human
gggauuacaggu

SEQ ID NO: 3205937 - RNA, 14 nt, Human
gggauuacaggcgu

SEQ ID NO: 3205938 - RNA, 13 nt, Human
gggauuacaggcu

SEQ ID NO: 3205939 - RNA, 16 nt, Human
gggauuacaggcuccu

SEQ ID NO: 3205940 - RNA, 21 nt, Human
gggauuacaggcuccugccac

SEQ ID NO: 3205941 - RNA, 14 nt, Human
gggcagaggaaagc

SEQ ID NO: 3205942 - RNA, 17 nt, Human
gggcagagcagagacca

SEQ ID NO: 3205943 - RNA, 22 nt, Human
gggcagagcagagaccaucccu

SEQ ID NO: 3205944 - RNA, 16 nt, Human
gggcagagcagagacc

SEQ ID NO: 3205945 - RNA, 12 nt, Human
gggcagagcaga

SEQ ID NO: 3205946 - RNA, 18 nt, Human
gggcaacccccagccugc

SEQ ID NO: 3205947 - RNA, 16 nt, Human
gggcaacccccagccu

SEQ ID NO: 3205948 - RNA, 14 nt, Human
aaaaauaucaaauu

SEQ ID NO: 3205949 - RNA, 15 nt, Human
aaaaauaucaaauua

SEQ ID NO: 3205950 - RNA, 16 nt, Human
aaaaauaucaaauuaa

SEQ ID NO: 3205951 - RNA, 15 nt, Human
aaaaauaucuguaag

SEQ ID NO: 3205952 - RNA, 21 nt, Human
aaaaauaugaccacacuccag

SEQ ID NO: 3205953 - RNA, 23 nt, Human
aaaaauaugaccacacuccagcu

SEQ ID NO: 3205954 - RNA, 18 nt, Human
aaaaauauacauguuuau

SEQ ID NO: 3205955 - RNA, 17 nt, Human
aaaaauauacauguuua

SEQ ID NO: 3205956 - RNA, 16 nt, Human
aaaaauauacauguuu

SEQ ID NO: 3205957 - RNA, 14 nt, Human
aaaaauauacaugu

SEQ ID NO: 3205958 - RNA, 12 nt, Human
aaaaauauacau

SEQ ID NO: 3205959 - RNA, 13 nt, Human
aaaaauauuuaau

SEQ ID NO: 3205960 - RNA, 16 nt, Human
aaaaauauuuaauguu

SEQ ID NO: 3205961 - RNA, 15 nt, Human
aaaaauauuuaaugu

SEQ ID NO: 3205962 - RNA, 13 nt, Human
aaaaauaugugaa

SEQ ID NO: 3205963 - RNA, 23 nt, Human
aaaaauaugugaaggaccuucac

SEQ ID NO: 3205964 - RNA, 10 nt, Human
aaaaauauua

SEQ ID NO: 3205965 - RNA, 16 nt, Human
aaaaauaugugaagga

SEQ ID NO: 3205966 - RNA, 14 nt, Human
aaaaauccagaaac

SEQ ID NO: 3205967 - RNA, 21 nt, Human
aaaaauccaaauauuguuaag

SEQ ID NO: 3205968 - RNA, 18 nt, Human
aaaaauccaaauauuguu

SEQ ID NO: 3205969 - RNA, 20 nt, Human
aaaaaucaugccaguauuuu

SEQ ID NO: 3205970 - RNA, 21 nt, Human
aaaaaucaugccaguauuuuu

SEQ ID NO: 3205971 - RNA, 18 nt, Human
aaaaauauuuuuuuuucu

SEQ ID NO: 3205972 - RNA, 12 nt, Human
aaaaaucaagua

SEQ ID NO: 3205973 - RNA, 23 nt, Human
gggacagggaggugugaggcagg

SEQ ID NO: 3205974 - RNA, 21 nt, Human
gggacagcuccuucuguccua

SEQ ID NO: 3205975 - RNA, 13 nt, Human
gggacagaggggg

SEQ ID NO: 3205976 - RNA, 22 nt, Human
gggacagaggggguggccuccc

SEQ ID NO: 3205977 - RNA, 23 nt, Human
gggacagaggggguggccuccca

SEQ ID NO: 3205978 - RNA, 16 nt, Human
gggacagcuccuucug

SEQ ID NO: 3205979 - RNA, 16 nt, Human
gggaagagcuuagaaa

SEQ ID NO: 3205980 - RNA, 13 nt, Human
gggaagagacuug

SEQ ID NO: 3205981 - RNA, 22 nt, Human
aaaacauuguccccaaugaaua

SEQ ID NO: 3205982 - RNA, 22 nt, Human
aaaacccagcugcaccccuucc

SEQ ID NO: 3205983 - RNA, 19 nt, Human
aaaacccagcugcaccccu

SEQ ID NO: 3205984 - RNA, 14 nt, Human
aaaacccagcugca

SEQ ID NO: 3205985 - RNA, 12 nt, Human
aaaacccagcug

SEQ ID NO: 3205986 - RNA, 13 nt, Human
aaaaccacagcag

SEQ ID NO: 3205987 - RNA, 18 nt, Human
aaaacuaggcauuuguaa

SEQ ID NO: 3205988 - RNA, 21 nt, Human
aaaacuaggcauuuguaaaua

SEQ ID NO: 3205989 - RNA, 19 nt, Human
aaaacucaaccaaauggua

SEQ ID NO: 3205990 - RNA, 23 nt, Human
aaaacucaaccaaaugguacaaa

SEQ ID NO: 3205991 - RNA, 23 nt, Human
aaaaccguguuugucucuucugg

SEQ ID NO: 3205992 - RNA, 21 nt, Human
aaaaccguguuugucucuucu

SEQ ID NO: 3205993 - RNA, 19 nt, Human
aaaaccguguuugucucuu

SEQ ID NO: 3205994 - RNA, 13 nt, Human
aaaacucauuuuu

SEQ ID NO: 3205995 - RNA, 20 nt, Human
aaaacugcugacuguuuucu

SEQ ID NO: 3205996 - RNA, 22 nt, Human
aaaacugcugacuguuuucucu

SEQ ID NO: 3205997 - RNA, 17 nt, Human
aaaagaugaaaauauuu

SEQ ID NO: 3205998 - RNA, 13 nt, Human
aaaagaugcuucu

SEQ ID NO: 3205999 - RNA, 23 nt, Human
aaaacugcugacuguuuucucuu

SEQ ID NO: 3206000 - RNA, 21 nt, Human
aaaacuguacuuugauucaca

SEQ ID NO: 3206001 - RNA, 20 nt, Human
aaaacuguacuuugauucac

SEQ ID NO: 3206002 - RNA, 19 nt, Human
aaaacuguacuuugauuca

SEQ ID NO: 3206003 - RNA, 15 nt, Human
aaaacuguacuuuga

SEQ ID NO: 3206004 - RNA, 22 nt, Human
aaaaauggaacauaaaauacaa

SEQ ID NO: 3206005 - RNA, 19 nt, Human
aaaaaugcugaacauugca

SEQ ID NO: 3206006 - RNA, 16 nt, Human
aaaaaugcugaacauu

SEQ ID NO: 3206007 - RNA, 15 nt, Human
aaaaaugcugaacau

SEQ ID NO: 3206008 - RNA, 18 nt, Human
aaaacaguaguguauuaa

SEQ ID NO: 3206009 - RNA, 14 nt, Human
aaaaaugcugaaca

SEQ ID NO: 3206010 - RNA, 12 nt, Human
aaaaccacagca

SEQ ID NO: 3206011 - RNA, 21 nt, Human
aaaaccaauguucucucuucu

SEQ ID NO: 3206012 - RNA, 12 nt, Human
aaaacauucuau

SEQ ID NO: 3206013 - RNA, 16 nt, Human
aaaacauucuaucuac

SEQ ID NO: 3206014 - RNA, 19 nt, Human
aaaacauucuaucuacuga

SEQ ID NO: 3206015 - RNA, 19 nt, Human
aaaacaucauuccuuuuua

SEQ ID NO: 3206016 - RNA, 14 nt, Human
aaaacaucauuccu

SEQ ID NO: 3206017 - RNA, 20 nt, Human
aaaacaguuggcaugcaucc

SEQ ID NO: 3206018 - RNA, 21 nt, Human
aaaacaguuggcaugcauccc

SEQ ID NO: 3206019 - RNA, 18 nt, Human
gggcucagagugggguag

SEQ ID NO: 3206020 - RNA, 18 nt, Human
gggcugcaugcgggcuuc

SEQ ID NO: 3206021 - RNA, 21 nt, Human
gggcugcaugcgggcuuccuc

SEQ ID NO: 3206022 - RNA, 22 nt, Human
gggcugcaccggcuggccuggc

SEQ ID NO: 3206023 - RNA, 10 nt, Human
gggcucagca

SEQ ID NO: 3206024 - RNA, 20 nt, Human
gggcuggguucuacccaggu

SEQ ID NO: 3206025 - RNA, 20 nt, Human
gggcugggcacugcucucac

SEQ ID NO: 3206026 - RNA, 17 nt, Human
gggcugggcacugcucu

SEQ ID NO: 3206027 - RNA, 16 nt, Human
gggcugggcacugcuc

SEQ ID NO: 3206028 - RNA, 18 nt, Human
gggcugggagcucugcag

SEQ ID NO: 3206029 - RNA, 16 nt, Human
gggcugggagcucugc

SEQ ID NO: 3206030 - RNA, 15 nt, Human
gggcugcccuggugc

SEQ ID NO: 3206031 - RNA, 14 nt, Human
gggcugcccuggug

SEQ ID NO: 3206032 - RNA, 13 nt, Human
gggcugcccuggu

SEQ ID NO: 3206033 - RNA, 15 nt, Human
aaaaugugauaugua

SEQ ID NO: 3206034 - RNA, 20 nt, Human
aaaaugugagugguugaaua

SEQ ID NO: 3206035 - RNA, 18 nt, Human
aaaaugugagugguugaa

SEQ ID NO: 3206036 - RNA, 22 nt, Human
gggcuggguucuacccaggugc

SEQ ID NO: 3206037 - RNA, 22 nt, Human
gggcugggcacugcucucaccu

SEQ ID NO: 3206038 - RNA, 21 nt, Human
aaaaugucuuuccaaauuauu

SEQ ID NO: 3206039 - RNA, 13 nt, Human
aaaauuuguuuaa

SEQ ID NO: 3206040 - RNA, 20 nt, Human
aaaauuugaaacauugcuuu

SEQ ID NO: 3206041 - RNA, 19 nt, Human
aaaauuugaaacauugcuu

SEQ ID NO: 3206042 - RNA, 21 nt, Human
aaaauuugaaacauugcuuuu

SEQ ID NO: 3206043 - RNA, 22 nt, Human
aaaauuugucugaaacauuuca

SEQ ID NO: 3206044 - RNA, 14 nt, Human
aaaauguuaggaca

SEQ ID NO: 3206045 - RNA, 13 nt, Human
aaaauuugaaaca

SEQ ID NO: 3206046 - RNA, 12 nt, Human
aaaauuugaaac

SEQ ID NO: 3206047 - RNA, 17 nt, Human
aaaauuugaaacauugc

SEQ ID NO: 3206048 - RNA, 16 nt, Human
aaaauuugaaacauug

SEQ ID NO: 3206049 - RNA, 15 nt, Human
aaaauuugaaacauu

SEQ ID NO: 3206050 - RNA, 14 nt, Human
aaaauuugaaacau

SEQ ID NO: 3206051 - RNA, 12 nt, Human
aaaaugugugug

SEQ ID NO: 3206052 - RNA, 14 nt, Human
aaaauguguguuuu

SEQ ID NO: 3206053 - RNA, 14 nt, Human
aaaauguuaagcau

SEQ ID NO: 3206054 - RNA, 16 nt, Human
aaacaaaaagaugucu

SEQ ID NO: 3206055 - RNA, 17 nt, Human
aaacaccggguuccagc

SEQ ID NO: 3206056 - RNA, 20 nt, Human
aaacagucucaggaaaucaa

SEQ ID NO: 3206057 - RNA, 23 nt, Human
aaacaccugacagccccucccuc

SEQ ID NO: 3206058 - RNA, 18 nt, Human
aaacaccugacagccccu

SEQ ID NO: 3206059 - RNA, 14 nt, Human
aaacagugcuguuu

SEQ ID NO: 3206060 - RNA, 15 nt, Human
ggggccucagugcca

SEQ ID NO: 3206061 - RNA, 16 nt, Human
ggggccugaggcuccu

SEQ ID NO: 3206062 - RNA, 23 nt, Human
aaacaugagguucucucuacugg

SEQ ID NO: 3206063 - RNA, 20 nt, Human
ggggacagcuccuucugucc

SEQ ID NO: 3206064 - RNA, 14 nt, Human
ggggacagcuccuu

SEQ ID NO: 3206065 - RNA, 12 nt, Human
ggggacagcucc

SEQ ID NO: 3206066 - RNA, 19 nt, Human
aaacaugacucuuuauugu

SEQ ID NO: 3206067 - RNA, 20 nt, Human
aaacaugacucuuuauuguc

SEQ ID NO: 3206068 - RNA, 16 nt, Human
aaacaucauuccuuuu

SEQ ID NO: 3206069 - RNA, 19 nt, Human
aaacaucauuccuuuuuau

SEQ ID NO: 3206070 - RNA, 20 nt, Human
aaacaucauuccuuuuuauu

SEQ ID NO: 3206071 - RNA, 18 nt, Human
aaacaucauuccuuuuua

SEQ ID NO: 3206072 - RNA, 18 nt, Human
aaacauccuacaagacac

SEQ ID NO: 3206073 - RNA, 21 nt, Human
aaacaucauuccuuuuuauuu

SEQ ID NO: 3206074 - RNA, 22 nt, Human
aaacaucauuccuuuuuauuua

SEQ ID NO: 3206075 - RNA, 22 nt, Human
aaacauccuacaagacacagug

SEQ ID NO: 3206076 - RNA, 13 nt, Human
aaacaucuccuua

SEQ ID NO: 3206077 - RNA, 13 nt, Human
aaacaucucagag

SEQ ID NO: 3206078 - RNA, 15 nt, Human
aaacaucucaucaug

SEQ ID NO: 3206079 - RNA, 18 nt, Human
aaacaucucaucaugucu

SEQ ID NO: 3206080 - RNA, 23 nt, Human
aaacaucucaucaugucuauugu

SEQ ID NO: 3206081 - RNA, 15 nt, Human
gggccgagccugccu

SEQ ID NO: 3206082 - RNA, 16 nt, Human
gggccuaauaaaacug

SEQ ID NO: 3206083 - RNA, 14 nt, Human
gggccaguuggucc

SEQ ID NO: 3206084 - RNA, 18 nt, Human
gggccaguuggucccccu

SEQ ID NO: 3206085 - RNA, 22 nt, Human
gggccaguuggucccccuucca

SEQ ID NO: 3206086 - RNA, 23 nt, Human
gggccaguuggucccccuuccau

SEQ ID NO: 3206087 - RNA, 15 nt, Human
gggccucagugccac

SEQ ID NO: 3206088 - RNA, 13 nt, Human
gggccuccugugu

SEQ ID NO: 3206089 - RNA, 15 nt, Human
gggccuccugugugu

SEQ ID NO: 3206090 - RNA, 20 nt, Human
gggccucuuaugggcugggu

SEQ ID NO: 3206091 - RNA, 19 nt, Human
gggccucuuaugggcuggg

SEQ ID NO: 3206092 - RNA, 18 nt, Human
gggccugaggcuccuuag

SEQ ID NO: 3206093 - RNA, 17 nt, Human
gggccugaggcuccuua

SEQ ID NO: 3206094 - RNA, 15 nt, Human
gggcgugguggugag

SEQ ID NO: 3206095 - RNA, 23 nt, Human
gggcuacaccuuagccugcccuc

SEQ ID NO: 3206096 - RNA, 18 nt, Human
gggcuaguugggcuuccu

SEQ ID NO: 3206097 - RNA, 20 nt, Human
gggcuacccgugagcccuuc

SEQ ID NO: 3206098 - RNA, 15 nt, Human
gggcgggaggauguu

SEQ ID NO: 3206099 - RNA, 18 nt, Human
gggccagucccugaggca

SEQ ID NO: 3206100 - RNA, 21 nt, Human
gggccagucccugaggcaggu

SEQ ID NO: 3206101 - RNA, 11 nt, Human
gggccaggagc

SEQ ID NO: 3206102 - RNA, 11 nt, Human
gggccagcucc

SEQ ID NO: 3206103 - RNA, 15 nt, Human
aaaaugcugaacauu

SEQ ID NO: 3206104 - RNA, 18 nt, Human
aaaaugcugaacauugca

SEQ ID NO: 3206105 - RNA, 16 nt, Human
aaaaugcugaacauug

SEQ ID NO: 3206106 - RNA, 20 nt, Human
aaaaugcugaacauugcaua

SEQ ID NO: 3206107 - RNA, 17 nt, Human
aaaaguagaacuuugua

SEQ ID NO: 3206108 - RNA, 18 nt, Human
aaaaguagaacuuuguau

SEQ ID NO: 3206109 - RNA, 20 nt, Human
aaaaguagaacuuuguauag

SEQ ID NO: 3206110 - RNA, 17 nt, Human
aaaaguauauuaaacaa

SEQ ID NO: 3206111 - RNA, 22 nt, Human
aaaaguauauuaaacaaaguuu

SEQ ID NO: 3206112 - RNA, 14 nt, Human
aaaaguauugccaa

SEQ ID NO: 3206113 - RNA, 23 nt, Human
aaaaucuuauuaaaguuucaaaa

SEQ ID NO: 3206114 - RNA, 22 nt, Human
aaaaucuuauuaaaguuucaaa

SEQ ID NO: 3206115 - RNA, 21 nt, Human
aaaaucuuauuaaaguuucaa

SEQ ID NO: 3206116 - RNA, 18 nt, Human
aaaaucuuauuaaaguuu

SEQ ID NO: 3206117 - RNA, 16 nt, Human
aaaaucuuauuaaagu

SEQ ID NO: 3206118 - RNA, 12 nt, Human
aaaaucuuauua

SEQ ID NO: 3206119 - RNA, 16 nt, Human
aaaaucuuaauacugu

SEQ ID NO: 3206120 - RNA, 16 nt, Human
aaaaguauugccaaac

SEQ ID NO: 3206121 - RNA, 22 nt, Human
aaaaucuuaauacuguuauucu

SEQ ID NO: 3206122 - RNA, 20 nt, Human
aaaaucuuaauacuguuauu

SEQ ID NO: 3206123 - RNA, 18 nt, Human
aaaaucuuaauacuguua

SEQ ID NO: 3206124 - RNA, 17 nt, Human
aaaaucuuaauacuguu

SEQ ID NO: 3206125 - RNA, 14 nt, Human
aaaaugagccuggc

SEQ ID NO: 3206126 - RNA, 21 nt, Human
aaaaugagccuggcaagaaug

SEQ ID NO: 3206127 - RNA, 16 nt, Human
aaaaugagcuugauua

SEQ ID NO: 3206128 - RNA, 15 nt, Human
aaaaugaagaauuua

SEQ ID NO: 3206129 - RNA, 16 nt, Human
aaaaugaagaauuuaa

SEQ ID NO: 3206130 - RNA, 11 nt, Human
aaaaugaagaa

SEQ ID NO: 3206131 - RNA, 14 nt, Human
aaaaugaagaauuu

SEQ ID NO: 3206132 - RNA, 18 nt, Human
gggugucugucuuccuuu

SEQ ID NO: 3206133 - RNA, 17 nt, Human
ggguguggcgcagcaua

SEQ ID NO: 3206134 - RNA, 20 nt, Human
ggguggggaccucaggccug

SEQ ID NO: 3206135 - RNA, 19 nt, Human
gggugggacacccugugau

SEQ ID NO: 3206136 - RNA, 13 nt, Human
ggguggaugccug

SEQ ID NO: 3206137 - RNA, 12 nt, Human
ggggccuggcag

SEQ ID NO: 3206138 - RNA, 11 nt, Human
ggggccuggca

SEQ ID NO: 3206139 - RNA, 15 nt, Human
ggguggcaccagcag

SEQ ID NO: 3206140 - RNA, 17 nt, Human
ggguggaugccuggugg

SEQ ID NO: 3206141 - RNA, 14 nt, Human
gguaauaagggaaa

SEQ ID NO: 3206142 - RNA, 13 nt, Human
gguaacaggcaga

SEQ ID NO: 3206143 - RNA, 20 nt, Human
gguaacaggcagauacagga

SEQ ID NO: 3206144 - RNA, 14 nt, Human
gguaacaggcagau

SEQ ID NO: 3206145 - RNA, 17 nt, Human
ggguuucuaaagcugcc

SEQ ID NO: 3206146 - RNA, 21 nt, Human
ggguuugagagagcagccagg

SEQ ID NO: 3206147 - RNA, 19 nt, Human
gguagcccccucuucccug

SEQ ID NO: 3206148 - RNA, 20 nt, Human
gguaccacugaaucuguaca

SEQ ID NO: 3206149 - RNA, 13 nt, Human
gguaccacugaau

SEQ ID NO: 3206150 - RNA, 23 nt, Human
gguacaaccuguucugcuuuccu

SEQ ID NO: 3206151 - RNA, 24 nt, Human
gguacaaccuguucugcuuuccuc

SEQ ID NO: 3206152 - RNA, 16 nt, Human
gguacaauuucuuuug

SEQ ID NO: 3206153 - RNA, 14 nt, Human
gguaaucgaccugc

SEQ ID NO: 3206154 - RNA, 17 nt, Human
gguaaucgaccugccuc

SEQ ID NO: 3206155 - RNA, 18 nt, Human
gguaaucgaccugccucg

SEQ ID NO: 3206156 - RNA, 15 nt, Human
gguaaucauauuaga

SEQ ID NO: 3206157 - RNA, 17 nt, Human
gguagcuuugaggugga

SEQ ID NO: 3206158 - RNA, 21 nt, Human
gguagcuguaaggcaugaagg

SEQ ID NO: 3206159 - RNA, 18 nt, Human
gguagcugggaaagcaua

SEQ ID NO: 3206160 - RNA, 12 nt, Human
gguagcuguaag

SEQ ID NO: 3206161 - RNA, 14 nt, Human
gguagcuuuucccu

SEQ ID NO: 3206162 - RNA, 14 nt, Human
gguaugcaaucaaa

SEQ ID NO: 3206163 - RNA, 22 nt, Human
gguaugaucacggcucacugca

SEQ ID NO: 3206164 - RNA, 16 nt, Human
gguccacaacacacag

SEQ ID NO: 3206165 - RNA, 16 nt, Human
gguccacccaggagcc

SEQ ID NO: 3206166 - RNA, 15 nt, Human
gguccacccaggagc

SEQ ID NO: 3206167 - RNA, 13 nt, Human
gguccacccagga

SEQ ID NO: 3206168 - RNA, 12 nt, Human
gguccacccagg

SEQ ID NO: 3206169 - RNA, 17 nt, Human
gguccacccaggagccc

SEQ ID NO: 3206170 - RNA, 14 nt, Human
aaagacuauucaaa

SEQ ID NO: 3206171 - RNA, 17 nt, Human
aaagacuaucuaaaugu

SEQ ID NO: 3206172 - RNA, 19 nt, Human
aaagacaccuacugagugg

SEQ ID NO: 3206173 - RNA, 13 nt, Human
aaagacaccuacu

SEQ ID NO: 3206174 - RNA, 18 nt, Human
aaagacaaauaguaggca

SEQ ID NO: 3206175 - RNA, 22 nt, Human
aaagaaucaccuaauuaauuuc

SEQ ID NO: 3206176 - RNA, 19 nt, Human
aaagaauaggacuuguuuu

SEQ ID NO: 3206177 - RNA, 14 nt, Human
aaagaauaggacuu

SEQ ID NO: 3206178 - RNA, 16 nt, Human
aaagaauagaagcuaa

SEQ ID NO: 3206179 - RNA, 15 nt, Human
gguccauagagagca

SEQ ID NO: 3206180 - RNA, 15 nt, Human
gguccauagcugugg

SEQ ID NO: 3206181 - RNA, 18 nt, Human
aaagaaguggggacagag

SEQ ID NO: 3206182 - RNA, 11 nt, Human
ggucugugugu

SEQ ID NO: 3206183 - RNA, 17 nt, Human
ggucuguguguguguau

SEQ ID NO: 3206184 - RNA, 24 nt, Human
ggucugugagaugcuagaacuccc

SEQ ID NO: 3206185 - RNA, 21 nt, Human
ggucuagaggccugaaauccu

SEQ ID NO: 3206186 - RNA, 17 nt, Human
ggucuacacugugcuga

SEQ ID NO: 3206187 - RNA, 13 nt, Human
ggucuaauguuua

SEQ ID NO: 3206188 - RNA, 18 nt, Human
ggucgcuugggaauuuua

SEQ ID NO: 3206189 - RNA, 21 nt, Human
ggucguuuuaaaaacaaaaau

SEQ ID NO: 3206190 - RNA, 14 nt, Human
ggucgggggggacc

SEQ ID NO: 3206191 - RNA, 14 nt, Human
gguccugcugcagu

SEQ ID NO: 3206192 - RNA, 18 nt, Human
gguccuggaggcucaaau

SEQ ID NO: 3206193 - RNA, 13 nt, Human
aaagcaaaaggca

SEQ ID NO: 3206194 - RNA, 14 nt, Human
aaagauuucuguuc

SEQ ID NO: 3206195 - RNA, 13 nt, Human
aaagauuucuguu

SEQ ID NO: 3206196 - RNA, 13 nt, Human
aaagcaaaggaga

SEQ ID NO: 3206197 - RNA, 14 nt, Human
aaagcaaaagugcu

SEQ ID NO: 3206198 - RNA, 15 nt, Human
aaagacuauucaaac

SEQ ID NO: 3206199 - RNA, 13 nt, Human
aaagacuaagauc

SEQ ID NO: 3206200 - RNA, 18 nt, Human
aaagauugacaccagguu

SEQ ID NO: 3206201 - RNA, 22 nt, Human
aaagauucugaccuuaaaugca

SEQ ID NO: 3206202 - RNA, 16 nt, Human
aaagauuguguggugu

SEQ ID NO: 3206203 - RNA, 21 nt, Human
gguccugcugcaguugccagu

SEQ ID NO: 3206204 - RNA, 23 nt, Human
gguccugcugcaguugccaguca

SEQ ID NO: 3206205 - RNA, 23 nt, Human
gguccuagaaauuccccacccug

SEQ ID NO: 3206206 - RNA, 13 nt, Human
aaagcaaaugucu

SEQ ID NO: 3206207 - RNA, 13 nt, Human
aaagcaacaucag

SEQ ID NO: 3206208 - RNA, 18 nt, Human
aaagcaacaucagcuuga

SEQ ID NO: 3206209 - RNA, 14 nt, Human
gguccuaggcugga

SEQ ID NO: 3206210 - RNA, 16 nt, Human
gguccuaggcuggaag

SEQ ID NO: 3206211 - RNA, 17 nt, Human
gguccuaggcuggaagg

SEQ ID NO: 3206212 - RNA, 20 nt, Human
gguccuaggcuggaaggagg

SEQ ID NO: 3206213 - RNA, 16 nt, Human
ggugcaaugaccuuuc

SEQ ID NO: 3206214 - RNA, 21 nt, Human
ggucuuccuacucuucucucu

SEQ ID NO: 3206215 - RNA, 20 nt, Human
ggucuguguguguguaugug

SEQ ID NO: 3206216 - RNA, 21 nt, Human
ggucuguguguguguaugugg

SEQ ID NO: 3206217 - RNA, 13 nt, Human
ggucuuauauuua

SEQ ID NO: 3206218 - RNA, 19 nt, Human
ggugcaaugaccuuucaau

SEQ ID NO: 3206219 - RNA, 20 nt, Human
ggugcaaugaccuuucaaua

SEQ ID NO: 3206220 - RNA, 18 nt, Human
ggugcaaugaccuuucaa

SEQ ID NO: 3206221 - RNA, 19 nt, Human
ggucuuccuacucuucucu

SEQ ID NO: 3206222 - RNA, 18 nt, Human
ggucuuccuacucuucuc

SEQ ID NO: 3206223 - RNA, 17 nt, Human
ggucuuccuacucuucu

SEQ ID NO: 3206224 - RNA, 10 nt, Human
ggucuuccua

SEQ ID NO: 3206225 - RNA, 18 nt, Human
ggugcuguuuugccagcc

SEQ ID NO: 3206226 - RNA, 14 nt, Human
gguggaugccuggu

SEQ ID NO: 3206227 - RNA, 21 nt, Human
gguggaugccugguggcagcu

SEQ ID NO: 3206228 - RNA, 17 nt, Human
aaagcagggacuugaac

SEQ ID NO: 3206229 - RNA, 13 nt, Human
aaagcauaaagcu

SEQ ID NO: 3206230 - RNA, 21 nt, Human
aaagcauaaagcucaaaugaa

SEQ ID NO: 3206231 - RNA, 22 nt, Human
aaagcauaaagcucaaaugaaa

SEQ ID NO: 3206232 - RNA, 22 nt, Human
aaagcaggcuugcccaguacau

SEQ ID NO: 3206233 - RNA, 24 nt, Human
aaagcaggcuugcccaguacauuu

SEQ ID NO: 3206234 - RNA, 17 nt, Human
aaagcauauugacuuuu

SEQ ID NO: 3206235 - RNA, 16 nt, Human
aaagccuguuguuuaa

SEQ ID NO: 3206236 - RNA, 21 nt, Human
aaagccuguuguuuaagugac

SEQ ID NO: 3206237 - RNA, 17 nt, Human
aaagcaugccaauuucu

SEQ ID NO: 3206238 - RNA, 15 nt, Human
aaagcauggacauuu

SEQ ID NO: 3206239 - RNA, 18 nt, Human
aaagcauggacauuuaga

SEQ ID NO: 3206240 - RNA, 14 nt, Human
ggugggauccucca

SEQ ID NO: 3206241 - RNA, 15 nt, Human
ggugggauccuccag

SEQ ID NO: 3206242 - RNA, 20 nt, Human
ggugggaggauugcuugagc

SEQ ID NO: 3206243 - RNA, 20 nt, Human
ggugggaggaucucuugagc

SEQ ID NO: 3206244 - RNA, 18 nt, Human
aaagccuuucauuuugcu

SEQ ID NO: 3206245 - RNA, 13 nt, Human
aaagccuuucauu

SEQ ID NO: 3206246 - RNA, 13 nt, Human
gguggggcagcuu

SEQ ID NO: 3206247 - RNA, 17 nt, Human
gguggggcagcuugagg

SEQ ID NO: 3206248 - RNA, 19 nt, Human
ggugggauccuccaggugc

SEQ ID NO: 3206249 - RNA, 22 nt, Human
aaagccuuucauuuugcuuuaa

SEQ ID NO: 3206250 - RNA, 15 nt, Human
gguggggucacucug

SEQ ID NO: 3206251 - RNA, 23 nt, Human
gguggggucacucuggcagcuca

SEQ ID NO: 3206252 - RNA, 13 nt, Human
ggugucgggcaug

SEQ ID NO: 3206253 - RNA, 16 nt, Human
ggugucgggcaugaca

SEQ ID NO: 3206254 - RNA, 16 nt, Human
ggugugaccacugcag

SEQ ID NO: 3206255 - RNA, 23 nt, Human
ggugucuguguuccaaccacuga

SEQ ID NO: 3206256 - RNA, 14 nt, Human
ggugucuuucucuu

SEQ ID NO: 3206257 - RNA, 13 nt, Human
ggugugagcagca

SEQ ID NO: 3206258 - RNA, 15 nt, Human
ggugucuuucucuuu

SEQ ID NO: 3206259 - RNA, 18 nt, Human
ggugugagucaccaagcc

SEQ ID NO: 3206260 - RNA, 16 nt, Human
ggugugaggcaggaga

SEQ ID NO: 3206261 - RNA, 19 nt, Human
ggugugaggacauaaaucu

SEQ ID NO: 3206262 - RNA, 22 nt, Human
ggugugagggcagugcaaggag

SEQ ID NO: 3206263 - RNA, 16 nt, Human
gguuuagaaagcuugc

SEQ ID NO: 3206264 - RNA, 17 nt, Human
gguuuauuuuucuguua

SEQ ID NO: 3206265 - RNA, 19 nt, Human
gguuccuuccucugagccu

SEQ ID NO: 3206266 - RNA, 22 nt, Human
gguuccuggggcauccaugggg

SEQ ID NO: 3206267 - RNA, 13 nt, Human
gguuucucuucuc

SEQ ID NO: 3206268 - RNA, 22 nt, Human
gguuucucuucuccccuuccau

SEQ ID NO: 3206269 - RNA, 15 nt, Human
gguuucucuucuccc

SEQ ID NO: 3206270 - RNA, 14 nt, Human
gguuucugauucuu

SEQ ID NO: 3206271 - RNA, 23 nt, Human
gguuuaucgcccuggcaggcagg

SEQ ID NO: 3206272 - RNA, 19 nt, Human
gguuucaccauguuggcca

SEQ ID NO: 3206273 - RNA, 21 nt, Human
ggugugcggccuuuggcuuca

SEQ ID NO: 3206274 - RNA, 13 nt, Human
ggugugcucugau

SEQ ID NO: 3206275 - RNA, 12 nt, Human
gguguggaagag

SEQ ID NO: 3206276 - RNA, 12 nt, Human
gguucagcuugu

SEQ ID NO: 3206277 - RNA, 21 nt, Human
gguucaggguuggccccugcc

SEQ ID NO: 3206278 - RNA, 18 nt, Human
gguucaggguuggccccu

SEQ ID NO: 3206279 - RNA, 22 nt, Human
gguucaggguuggccccugccc

SEQ ID NO: 3206280 - RNA, 15 nt, Human
gguucaguguuucug

SEQ ID NO: 3206281 - RNA, 14 nt, Human
ggugugcuauagcu

SEQ ID NO: 3206282 - RNA, 21 nt, Human
gguucccuuugacgccauccc

SEQ ID NO: 3206283 - RNA, 15 nt, Human
gguuccuacacagga

SEQ ID NO: 3206284 - RNA, 16 nt, Human
gguuccuccccuccuc

SEQ ID NO: 3206285 - RNA, 17 nt, Human
gguuccuacacaggaca

SEQ ID NO: 3206286 - RNA, 18 nt, Human
gguuccuacacaggacag

SEQ ID NO: 3206287 - RNA, 17 nt, Human
gguuccuaggggaauga

SEQ ID NO: 3206288 - RNA, 19 nt, Human
gguuccuaggggaaugagg

SEQ ID NO: 3206289 - RNA, 22 nt, Human
gguuccuaggggaaugaggggg

SEQ ID NO: 3206290 - RNA, 23 nt, Human
gguuccagcaauucuccugccuc

SEQ ID NO: 3206291 - RNA, 23 nt, Human
gguucauuuucagauucaggcau

SEQ ID NO: 3206292 - RNA, 21 nt, Human
gguucauuuucagauucaggc

SEQ ID NO: 3206293 - RNA, 24 nt, Human
gguuccagcaauucuccugccuca

SEQ ID NO: 3206294 - RNA, 15 nt, Human
gguuccccuguucac

SEQ ID NO: 3206295 - RNA, 15 nt, Human
guaaaaugucuuucc

SEQ ID NO: 3206296 - RNA, 17 nt, Human
guaaaaugucuuuccaa

SEQ ID NO: 3206297 - RNA, 14 nt, Human
guaaaauguauuau

SEQ ID NO: 3206298 - RNA, 19 nt, Human
guaaaauguauuauguccu

SEQ ID NO: 3206299 - RNA, 17 nt, Human
guaaaaugaagaauuua

SEQ ID NO: 3206300 - RNA, 13 nt, Human
guaaaauggaaaa

SEQ ID NO: 3206301 - RNA, 20 nt, Human
guaaaauggaaaacuuaguu

SEQ ID NO: 3206302 - RNA, 14 nt, Human
guaaaaugaagaau

SEQ ID NO: 3206303 - RNA, 16 nt, Human
guaaaaugaagaauuu

SEQ ID NO: 3206304 - RNA, 20 nt, Human
guaaagcaaccaaaaagaaa

SEQ ID NO: 3206305 - RNA, 19 nt, Human
guaaagcaaccaaaaagaa

SEQ ID NO: 3206306 - RNA, 16 nt, Human
guaaagauuucuguuc

SEQ ID NO: 3206307 - RNA, 14 nt, Human
guaaagauuucugu

SEQ ID NO: 3206308 - RNA, 16 nt, Human
guaaauuuaugugaug

SEQ ID NO: 3206309 - RNA, 17 nt, Human
guaaauuuaugugaugg

SEQ ID NO: 3206310 - RNA, 12 nt, Human
guaaauucugau

SEQ ID NO: 3206311 - RNA, 13 nt, Human
guaaauucugauu

SEQ ID NO: 3206312 - RNA, 14 nt, Human
guaaauucugauuu

SEQ ID NO: 3206313 - RNA, 15 nt, Human
guaaauucugauuuc

SEQ ID NO: 3206314 - RNA, 18 nt, Human
guaaauucugauuucuuu

SEQ ID NO: 3206315 - RNA, 13 nt, Human
aaauaaugcuguu

SEQ ID NO: 3206316 - RNA, 18 nt, Human
aaauaaaaaaagaaaaaa

SEQ ID NO: 3206317 - RNA, 13 nt, Human
aaauaaaaaaaag

SEQ ID NO: 3206318 - RNA, 13 nt, Human
aaaguuuugccua

SEQ ID NO: 3206319 - RNA, 22 nt, Human
aaauaaaaaaaagaaaaaagag

SEQ ID NO: 3206320 - RNA, 20 nt, Human
aaauaaaaaaaagaaaaaag

SEQ ID NO: 3206321 - RNA, 17 nt, Human
aaauaaaaaaaagaaaa

SEQ ID NO: 3206322 - RNA, 15 nt, Human
aaauaaaaaaaagaa

SEQ ID NO: 3206323 - RNA, 13 nt, Human
aaaguuugaucuu

SEQ ID NO: 3206324 - RNA, 22 nt, Human
aaaguuugaucuuccucugcua

SEQ ID NO: 3206325 - RNA, 14 nt, Human
aaaguuugaucuuc

SEQ ID NO: 3206326 - RNA, 24 nt, Human
aaaguuugaucuuccucugcuaaa

SEQ ID NO: 3206327 - RNA, 14 nt, Human
aaaguuuguuugcu

SEQ ID NO: 3206328 - RNA, 23 nt, Human
aaaguuucucuuuucaaaacauu

SEQ ID NO: 3206329 - RNA, 21 nt, Human
aaaguuucucuuuucaaaaca

SEQ ID NO: 3206330 - RNA, 18 nt, Human
aaaguuucaaaaaucuga

SEQ ID NO: 3206331 - RNA, 12 nt, Human
aaaguuucaaaa

SEQ ID NO: 3206332 - RNA, 11 nt, Human
aaaguuucaug

SEQ ID NO: 3206333 - RNA, 21 nt, Human
aaaguuucaaaaaucugaaga

SEQ ID NO: 3206334 - RNA, 20 nt, Human
aaaguuucaaaaaucugaag

SEQ ID NO: 3206335 - RNA, 19 nt, Human
aaaguuucaaaaaucugaa

SEQ ID NO: 3206336 - RNA, 23 nt, Human
aaaguucccuacuuccugugacu

SEQ ID NO: 3206337 - RNA, 16 nt, Human
aaaguguucuguuaca

SEQ ID NO: 3206338 - RNA, 18 nt, Human
aaaguguucuguuacaaa

SEQ ID NO: 3206339 - RNA, 17 nt, Human
aaaguguucuguuacaa

SEQ ID NO: 3206340 - RNA, 21 nt, Human
aaaguucccuacuuccuguga

SEQ ID NO: 3206341 - RNA, 20 nt, Human
aaaguuauuucccuuuagcu

SEQ ID NO: 3206342 - RNA, 19 nt, Human
aaaguguucuguuacaaaa

SEQ ID NO: 3206343 - RNA, 12 nt, Human
aaaguggugaga

SEQ ID NO: 3206344 - RNA, 17 nt, Human
gguuuggcuccugccca

SEQ ID NO: 3206345 - RNA, 14 nt, Human
gguuuggcuccugc

SEQ ID NO: 3206346 - RNA, 16 nt, Human
gguuuggaauauuaaa

SEQ ID NO: 3206347 - RNA, 22 nt, Human
gguuucuuuuugaaucuuuaau

SEQ ID NO: 3206348 - RNA, 20 nt, Human
gguuugagagagcagccagg

SEQ ID NO: 3206349 - RNA, 15 nt, Human
gcugaggugggagga

SEQ ID NO: 3206350 - RNA, 18 nt, Human
gcugaguagcucugccuu

SEQ ID NO: 3206351 - RNA, 15 nt, Human
gcugaguagcucugc

SEQ ID NO: 3206352 - RNA, 20 nt, Human
gcugcagagcagugggccug

SEQ ID NO: 3206353 - RNA, 21 nt, Human
gcugcagagcagugggccugg

SEQ ID NO: 3206354 - RNA, 13 nt, Human
gcugcagagcagu

SEQ ID NO: 3206355 - RNA, 21 nt, Human
gcugcaccccuuccugggcac

SEQ ID NO: 3206356 - RNA, 20 nt, Human
gcugcaccccuuccugggca

SEQ ID NO: 3206357 - RNA, 19 nt, Human
gcugcaccccuuccugggc

SEQ ID NO: 3206358 - RNA, 13 nt, Human
gcugcacccucag

SEQ ID NO: 3206359 - RNA, 15 nt, Human
gcugcacccucaggc

SEQ ID NO: 3206360 - RNA, 16 nt, Human
gcugcaccccuuccug

SEQ ID NO: 3206361 - RNA, 15 nt, Human
gcugcaccccuuccu

SEQ ID NO: 3206362 - RNA, 14 nt, Human
gcugcaccccuucc

SEQ ID NO: 3206363 - RNA, 15 nt, Human
gcugcaccagguaga

SEQ ID NO: 3206364 - RNA, 13 nt, Human
gcugccauccagg

SEQ ID NO: 3206365 - RNA, 12 nt, Human
gcugccauccag

SEQ ID NO: 3206366 - RNA, 22 nt, Human
gcugccaguggggccugaggcu

SEQ ID NO: 3206367 - RNA, 17 nt, Human
gcugccaguaccagccc

SEQ ID NO: 3206368 - RNA, 15 nt, Human
gcugccaguaccagc

SEQ ID NO: 3206369 - RNA, 19 nt, Human
gcugcagggcuuuaaaauu

SEQ ID NO: 3206370 - RNA, 17 nt, Human
gcugcagggcuuuaaaa

SEQ ID NO: 3206371 - RNA, 12 nt, Human
gcugcugugaag

SEQ ID NO: 3206372 - RNA, 13 nt, Human
gcugccccugccu

SEQ ID NO: 3206373 - RNA, 14 nt, Human
gcugccccugccuu

SEQ ID NO: 3206374 - RNA, 15 nt, Human
gcugccccuggcagc

SEQ ID NO: 3206375 - RNA, 16 nt, Human
gcugccccuggcagcc

SEQ ID NO: 3206376 - RNA, 13 nt, Human
gcugccccuggca

SEQ ID NO: 3206377 - RNA, 17 nt, Human
gcugccauccagguuca

SEQ ID NO: 3206378 - RNA, 12 nt, Human
gcugcugacagu

SEQ ID NO: 3206379 - RNA, 18 nt, Human
gcugcugaaggcucgagc

SEQ ID NO: 3206380 - RNA, 14 nt, Human
gcugcugagccgca

SEQ ID NO: 3206381 - RNA, 12 nt, Human
gcugcugagccg

SEQ ID NO: 3206382 - RNA, 16 nt, Human
gcugcugagccgcaga

SEQ ID NO: 3206383 - RNA, 15 nt, Human
gcugcugagccgcag

SEQ ID NO: 3206384 - RNA, 18 nt, Human
gcugcugagccgcagaga

SEQ ID NO: 3206385 - RNA, 22 nt, Human
gcuggagauacuuggucacagc

SEQ ID NO: 3206386 - RNA, 22 nt, Human
gcuggagaggagcccugccucu

SEQ ID NO: 3206387 - RNA, 21 nt, Human
gcuggagaggagcccugccuc

SEQ ID NO: 3206388 - RNA, 18 nt, Human
gcuggagaggagcccugc

SEQ ID NO: 3206389 - RNA, 20 nt, Human
gcucugaucauccacugugc

SEQ ID NO: 3206390 - RNA, 14 nt, Human
gcucugacaaagcu

SEQ ID NO: 3206391 - RNA, 17 nt, Human
gcucucuuuuauucugu

SEQ ID NO: 3206392 - RNA, 21 nt, Human
gcucugcccauccugccccug

SEQ ID NO: 3206393 - RNA, 15 nt, Human
gcucugcccauccug

SEQ ID NO: 3206394 - RNA, 19 nt, Human
gcucugacaaagcuucccg

SEQ ID NO: 3206395 - RNA, 22 nt, Human
gcucugaucauccacugugcca

SEQ ID NO: 3206396 - RNA, 21 nt, Human
gcucugaucauccacugugcc

SEQ ID NO: 3206397 - RNA, 14 nt, Human
gcugaggccucuca

SEQ ID NO: 3206398 - RNA, 16 nt, Human
gcugagccuucugagc

SEQ ID NO: 3206399 - RNA, 16 nt, Human
gcugagccucagucuc

SEQ ID NO: 3206400 - RNA, 12 nt, Human
gcugagccucag

SEQ ID NO: 3206401 - RNA, 23 nt, Human
gcugaaggcucgagcaugccugg

SEQ ID NO: 3206402 - RNA, 20 nt, Human
gcugaacuuguuuucuggga

SEQ ID NO: 3206403 - RNA, 17 nt, Human
gcugaauacagaggcaa

SEQ ID NO: 3206404 - RNA, 22 nt, Human
gcugaauugagccuaaaaauaa

SEQ ID NO: 3206405 - RNA, 19 nt, Human
gcugacaaccauuaaaguc

SEQ ID NO: 3206406 - RNA, 20 nt, Human
gcugacaaccauuaaaguca

SEQ ID NO: 3206407 - RNA, 22 nt, Human
gcugacaaccauuaaagucaga

SEQ ID NO: 3206408 - RNA, 17 nt, Human
gcucugugcccacccuc

SEQ ID NO: 3206409 - RNA, 19 nt, Human
gcucugucuugguagguuu

SEQ ID NO: 3206410 - RNA, 23 nt, Human
gcucugucgcccaggcuggagug

SEQ ID NO: 3206411 - RNA, 23 nt, Human
gcucugguccauagagagcaaga

SEQ ID NO: 3206412 - RNA, 17 nt, Human
gcugaacauugcauaua

SEQ ID NO: 3206413 - RNA, 15 nt, Human
gcugaacauugcaua

SEQ ID NO: 3206414 - RNA, 23 nt, Human
gcugaacagaugaccccugccca

SEQ ID NO: 3206415 - RNA, 16 nt, Human
gcugaaacaacaaaua

SEQ ID NO: 3206416 - RNA, 22 nt, Human
gcugaaaauugccuuucugugu

SEQ ID NO: 3206417 - RNA, 15 nt, Human
gcucuuuucacagcu

SEQ ID NO: 3206418 - RNA, 12 nt, Human
gcucuuuuccua

SEQ ID NO: 3206419 - RNA, 15 nt, Human
gcuccucuccccagc

SEQ ID NO: 3206420 - RNA, 16 nt, Human
gcuccucccggugccc

SEQ ID NO: 3206421 - RNA, 19 nt, Human
gcuccucccggugcccaag

SEQ ID NO: 3206422 - RNA, 23 nt, Human
gcucccaggcauuccccaggagg

SEQ ID NO: 3206423 - RNA, 14 nt, Human
gcuccagcucacca

SEQ ID NO: 3206424 - RNA, 13 nt, Human
gcuccagcucacc

SEQ ID NO: 3206425 - RNA, 11 nt, Human
gcuccagccug

SEQ ID NO: 3206426 - RNA, 20 nt, Human
gcuccacuuggucugugaga

SEQ ID NO: 3206427 - RNA, 9 nt, Human
gcuccagac

SEQ ID NO: 3206428 - RNA, 19 nt, Human
gcuccacuuggucugugag

SEQ ID NO: 3206429 - RNA, 23 nt, Human
gcuccagacacauguccaagaag

SEQ ID NO: 3206430 - RNA, 18 nt, Human
gcuccagacacaugucca

SEQ ID NO: 3206431 - RNA, 21 nt, Human
gcuccagacacauguccaaga

SEQ ID NO: 3206432 - RNA, 21 nt, Human
gcucucaccuugguuccuggg

SEQ ID NO: 3206433 - RNA, 16 nt, Human
gcucucaggccagcug

SEQ ID NO: 3206434 - RNA, 18 nt, Human
gcucucaaguuaucaggg

SEQ ID NO: 3206435 - RNA, 19 nt, Human
gcucucaccuugguuccug

SEQ ID NO: 3206436 - RNA, 19 nt, Human
gcuccucuccccagcaagu

SEQ ID NO: 3206437 - RNA, 16 nt, Human
gcuccucuccccagca

SEQ ID NO: 3206438 - RNA, 19 nt, Human
gcucuacugaggugcuaug

SEQ ID NO: 3206439 - RNA, 17 nt, Human
gcucucaggccagcugc

SEQ ID NO: 3206440 - RNA, 18 nt, Human
gcucucaggccagcugcu

SEQ ID NO: 3206441 - RNA, 19 nt, Human
gcucucaggccagcugcuu

SEQ ID NO: 3206442 - RNA, 13 nt, Human
gcuggaucuguga

SEQ ID NO: 3206443 - RNA, 20 nt, Human
gcuggaguuggggcagagga

SEQ ID NO: 3206444 - RNA, 17 nt, Human
gcuggaguuggggcaga

SEQ ID NO: 3206445 - RNA, 19 nt, Human
gcuggagugcaguggcgaa

SEQ ID NO: 3206446 - RNA, 15 nt, Human
gcuggagugcagugg

SEQ ID NO: 3206447 - RNA, 20 nt, Human
gcuguagacauuugcuauga

SEQ ID NO: 3206448 - RNA, 18 nt, Human
gcuguagacaucuguccu

SEQ ID NO: 3206449 - RNA, 17 nt, Human
gcuguacuucuugaaua

SEQ ID NO: 3206450 - RNA, 18 nt, Human
gcuguacuucuugaauau

SEQ ID NO: 3206451 - RNA, 20 nt, Human
gcuguacuucuugaauauaa

SEQ ID NO: 3206452 - RNA, 19 nt, Human
gcuguauuagucacagaga

SEQ ID NO: 3206453 - RNA, 23 nt, Human
gcugguucaggguuggccccugc

SEQ ID NO: 3206454 - RNA, 14 nt, Human
gcuucaaggauccu

SEQ ID NO: 3206455 - RNA, 14 nt, Human
gcuucaguggcagc

SEQ ID NO: 3206456 - RNA, 14 nt, Human
gcuuaauucaaaua

SEQ ID NO: 3206457 - RNA, 13 nt, Human
gcuuaauuccaau

SEQ ID NO: 3206458 - RNA, 15 nt, Human
gcuuaauucaaauaa

SEQ ID NO: 3206459 - RNA, 17 nt, Human
gcuuaaaaaaaacucuu

SEQ ID NO: 3206460 - RNA, 13 nt, Human
gcuguuggcuggg

SEQ ID NO: 3206461 - RNA, 21 nt, Human
gcuguugcugauuuuauucuu

SEQ ID NO: 3206462 - RNA, 16 nt, Human
gcuguuugguuuuaaa

SEQ ID NO: 3206463 - RNA, 23 nt, Human
gcuguuggccucugcaaaggaaa

SEQ ID NO: 3206464 - RNA, 19 nt, Human
gcuguuugguuuuaaaaua

SEQ ID NO: 3206465 - RNA, 12 nt, Human
gcugugccucug

SEQ ID NO: 3206466 - RNA, 22 nt, Human
gcuuugagguggaagagggcug

SEQ ID NO: 3206467 - RNA, 12 nt, Human
gcuuugauauau

SEQ ID NO: 3206468 - RNA, 19 nt, Human
gcuuugagguggaagaggg

SEQ ID NO: 3206469 - RNA, 19 nt, Human
gcuuuccucaucaggccau

SEQ ID NO: 3206470 - RNA, 17 nt, Human
gcuuuccuacuugcacu

SEQ ID NO: 3206471 - RNA, 15 nt, Human
gcuuucucuucauau

SEQ ID NO: 3206472 - RNA, 14 nt, Human
gcuuucucuucaua

SEQ ID NO: 3206473 - RNA, 13 nt, Human
gcuuucucuucau

SEQ ID NO: 3206474 - RNA, 23 nt, Human
gcuuucuacccagcgagcccugg

SEQ ID NO: 3206475 - RNA, 15 nt, Human
gcuuuccuaaaacag

SEQ ID NO: 3206476 - RNA, 23 nt, Human
gcuugaccgugaggccagagaca

SEQ ID NO: 3206477 - RNA, 18 nt, Human
gcuugaccuuuaagagaa

SEQ ID NO: 3206478 - RNA, 17 nt, Human
gcuuguaaauagcucag

SEQ ID NO: 3206479 - RNA, 19 nt, Human
gcuuguaaauagcucaggu

SEQ ID NO: 3206480 - RNA, 18 nt, Human
gcuuguaaauagcucagg

SEQ ID NO: 3206481 - RNA, 21 nt, Human
gcuuuccccaugucucgacuc

SEQ ID NO: 3206482 - RNA, 22 nt, Human
gcuuuccccaugucucgacuca

SEQ ID NO: 3206483 - RNA, 15 nt, Human
gcuucuucagagacu

SEQ ID NO: 3206484 - RNA, 12 nt, Human
gcuucuucagag

SEQ ID NO: 3206485 - RNA, 20 nt, Human
gcuugaccgugaggccagag

SEQ ID NO: 3206486 - RNA, 19 nt, Human
gcuugaccaguauaaaauu

SEQ ID NO: 3206487 - RNA, 18 nt, Human
gcuugaagcaaacaguug

SEQ ID NO: 3206488 - RNA, 23 nt, Human
gcuuccagugaggcucugcccuu

SEQ ID NO: 3206489 - RNA, 23 nt, Human
gcuuccugaggggagacagagca

SEQ ID NO: 3206490 - RNA, 15 nt, Human
gcuuccugaggggag

SEQ ID NO: 3206491 - RNA, 22 nt, Human
gcuuccagugaggcucugcccu

SEQ ID NO: 3206492 - RNA, 12 nt, Human
gcuuuuuggaaa

SEQ ID NO: 3206493 - RNA, 12 nt, Human
gcuuuuuggaau

SEQ ID NO: 3206494 - RNA, 13 nt, Human
gcuuuuuggaauc

SEQ ID NO: 3206495 - RNA, 14 nt, Human
gcuuuuugaaaacc

SEQ ID NO: 3206496 - RNA, 13 nt, Human
gcuuuuuaauuaa

SEQ ID NO: 3206497 - RNA, 12 nt, Human
gcuuuuuauaaa

SEQ ID NO: 3206498 - RNA, 13 nt, Human
gcuuuuuauaaaa

SEQ ID NO: 3206499 - RNA, 17 nt, Human
gcuuuuuuccaaaacaa

SEQ ID NO: 3206500 - RNA, 20 nt, Human
gcuuuuuuccaaaacaaaaa

SEQ ID NO: 3206501 - RNA, 15 nt, Human
ggaaacaacauuuau

SEQ ID NO: 3206502 - RNA, 18 nt, Human
ggaaaauuuuaaaaauac

SEQ ID NO: 3206503 - RNA, 16 nt, Human
ggaaacccagcucugg

SEQ ID NO: 3206504 - RNA, 23 nt, Human
ggaaacacuaaauguuaaagaug

SEQ ID NO: 3206505 - RNA, 21 nt, Human
ggaaacacuaaauguuaaaga

SEQ ID NO: 3206506 - RNA, 19 nt, Human
ggaaacacuaaauguuaaa

SEQ ID NO: 3206507 - RNA, 17 nt, Human
ggaaacacuaaauguua

SEQ ID NO: 3206508 - RNA, 16 nt, Human
ggaaacacuaaauguu

SEQ ID NO: 3206509 - RNA, 16 nt, Human
ggaaacagaggaccag

SEQ ID NO: 3206510 - RNA, 15 nt, Human
ggaaacagaggacca

SEQ ID NO: 3206511 - RNA, 18 nt, Human
gcuuuugucuaugggacu

SEQ ID NO: 3206512 - RNA, 15 nt, Human
gcuuuuggucugugu

SEQ ID NO: 3206513 - RNA, 14 nt, Human
gcuuugaucccuuc

SEQ ID NO: 3206514 - RNA, 17 nt, Human
gcuuugaucccuucuua

SEQ ID NO: 3206515 - RNA, 14 nt, Human
ggaacugcugggcu

SEQ ID NO: 3206516 - RNA, 15 nt, Human
ggaacugcugggcuu

SEQ ID NO: 3206517 - RNA, 15 nt, Human
ggaagaaaacacugu

SEQ ID NO: 3206518 - RNA, 14 nt, Human
ggaagacaauguga

SEQ ID NO: 3206519 - RNA, 16 nt, Human
ggaagacaaugugaaa

SEQ ID NO: 3206520 - RNA, 17 nt, Human
ggaacaccauaggucac

SEQ ID NO: 3206521 - RNA, 23 nt, Human
ggaacaaggcaaggcugucaauu

SEQ ID NO: 3206522 - RNA, 13 nt, Human
ggaacaaguugag

SEQ ID NO: 3206523 - RNA, 23 nt, Human
ggaacaaguugagcuaugacuua

SEQ ID NO: 3206524 - RNA, 15 nt, Human
ggaacacuccuucac

SEQ ID NO: 3206525 - RNA, 14 nt, Human
ggaaaccugucuga

SEQ ID NO: 3206526 - RNA, 16 nt, Human
ggaaacuaagauucuu

SEQ ID NO: 3206527 - RNA, 17 nt, Human
ggaaacuaagauucuuu

SEQ ID NO: 3206528 - RNA, 19 nt, Human
ggaaacuaagauucuuuua

SEQ ID NO: 3206529 - RNA, 13 nt, Human
ggaaacuaauaaa

SEQ ID NO: 3206530 - RNA, 17 nt, Human
ggaaacuaauaaaauau

SEQ ID NO: 3206531 - RNA, 18 nt, Human
ggaaacuaauaaaauauu

SEQ ID NO: 3206532 - RNA, 21 nt, Human
ggaaacuaauaaaauauuuuc

SEQ ID NO: 3206533 - RNA, 22 nt, Human
ggaaacuaauaaaauauuuucu

SEQ ID NO: 3206534 - RNA, 14 nt, Human
ggaaaugggcagag

SEQ ID NO: 3206535 - RNA, 15 nt, Human
ggaaaugaagcaggg

SEQ ID NO: 3206536 - RNA, 14 nt, Human
ggaaaugcugauuu

SEQ ID NO: 3206537 - RNA, 16 nt, Human
ggaaaugggcagagca

SEQ ID NO: 3206538 - RNA, 17 nt, Human
ggaaaugggcagagcag

SEQ ID NO: 3206539 - RNA, 18 nt, Human
ggaaaugggcagagcaga

SEQ ID NO: 3206540 - RNA, 22 nt, Human
ggaaaugggcagagcagagacc

SEQ ID NO: 3206541 - RNA, 17 nt, Human
ggaacaaggcaaggcug

SEQ ID NO: 3206542 - RNA, 21 nt, Human
ggaacaaggcaaggcugucaa

SEQ ID NO: 3206543 - RNA, 15 nt, Human
ggaacaaggcaaggc

SEQ ID NO: 3206544 - RNA, 15 nt, Human
ggaacaaaucuuccu

SEQ ID NO: 3206545 - RNA, 13 nt, Human
ggaacaaaucuuc

SEQ ID NO: 3206546 - RNA, 12 nt, Human
ggaaauuucacg

SEQ ID NO: 3206547 - RNA, 17 nt, Human
ggaaaugucaacaagua

SEQ ID NO: 3206548 - RNA, 18 nt, Human
ggaaaugguauccagaau

SEQ ID NO: 3206549 - RNA, 14 nt, Human
ggaaauuaagaaga

SEQ ID NO: 3206550 - RNA, 19 nt, Human
ggaaauuaagaagaaacua

SEQ ID NO: 3206551 - RNA, 17 nt, Human
ggaagacuucaucccuc

SEQ ID NO: 3206552 - RNA, 20 nt, Human
ggaagacuucaucccucugg

SEQ ID NO: 3206553 - RNA, 19 nt, Human
ggaagaauuuacuuuggaa

SEQ ID NO: 3206554 - RNA, 23 nt, Human
ggaagaauagggcccaugggagg

SEQ ID NO: 3206555 - RNA, 17 nt, Human
gcccaggccccugccac

SEQ ID NO: 3206556 - RNA, 13 nt, Human
gcccaggagggag

SEQ ID NO: 3206557 - RNA, 12 nt, Human
gcccaggcaggu

SEQ ID NO: 3206558 - RNA, 13 nt, Human
gcccaggcagguc

SEQ ID NO: 3206559 - RNA, 13 nt, Human
gcccaggccccug

SEQ ID NO: 3206560 - RNA, 15 nt, Human
gcccaggccccugcc

SEQ ID NO: 3206561 - RNA, 14 nt, Human
gcccaggcaggucu

SEQ ID NO: 3206562 - RNA, 14 nt, Human
gccaugugccaggu

SEQ ID NO: 3206563 - RNA, 21 nt, Human
gccaucaacuaaaguuguacu

SEQ ID NO: 3206564 - RNA, 15 nt, Human
gccaucaacuaaagu

SEQ ID NO: 3206565 - RNA, 11 nt, Human
gcccaggagcc

SEQ ID NO: 3206566 - RNA, 14 nt, Human
gcccaggagcccau

SEQ ID NO: 3206567 - RNA, 13 nt, Human
gcccaggagccca

SEQ ID NO: 3206568 - RNA, 15 nt, Human
gcccaggagcccauu

SEQ ID NO: 3206569 - RNA, 16 nt, Human
gccaugugcuucugcc

SEQ ID NO: 3206570 - RNA, 11 nt, Human
gcccuaucugu

SEQ ID NO: 3206571 - RNA, 16 nt, Human
gcccucacccuggggc

SEQ ID NO: 3206572 - RNA, 17 nt, Human
gcccuauuucuugauaa

SEQ ID NO: 3206573 - RNA, 17 nt, Human
gcccucacccuggggcu

SEQ ID NO: 3206574 - RNA, 15 nt, Human
gcccucacccugggg

SEQ ID NO: 3206575 - RNA, 22 nt, Human
gccccugcugguucaggguugg

SEQ ID NO: 3206576 - RNA, 21 nt, Human
gccccugcugguucaggguug

SEQ ID NO: 3206577 - RNA, 15 nt, Human
gccccugcccggcug

SEQ ID NO: 3206578 - RNA, 21 nt, Human
gccccaaguuuugugaaauuu

SEQ ID NO: 3206579 - RNA, 15 nt, Human
gccccacaccagccc

SEQ ID NO: 3206580 - RNA, 19 nt, Human
gccccaagguuuacauagu

SEQ ID NO: 3206581 - RNA, 14 nt, Human
gccaguggcuggau

SEQ ID NO: 3206582 - RNA, 23 nt, Human
gccaguggcuggaucugugaggg

SEQ ID NO: 3206583 - RNA, 13 nt, Human
gccagugugacaa

SEQ ID NO: 3206584 - RNA, 22 nt, Human
gccaguuauggcuauaggugcu

SEQ ID NO: 3206585 - RNA, 13 nt, Human
gccaguugguccc

SEQ ID NO: 3206586 - RNA, 18 nt, Human
gccagugcgggugcagac

SEQ ID NO: 3206587 - RNA, 16 nt, Human
gccaguuggucccccu

SEQ ID NO: 3206588 - RNA, 18 nt, Human
gccaguuggucccccuuc

SEQ ID NO: 3206589 - RNA, 20 nt, Human
gccaguuggucccccuucca

SEQ ID NO: 3206590 - RNA, 21 nt, Human
gccaguuggucccccuuccau

SEQ ID NO: 3206591 - RNA, 22 nt, Human
gccaguuggucccccuuccaug

SEQ ID NO: 3206592 - RNA, 23 nt, Human
gccaguuggucccccuuccaugg

SEQ ID NO: 3206593 - RNA, 20 nt, Human
gccaguuuuguuuccuuuca

SEQ ID NO: 3206594 - RNA, 20 nt, Human
gccauaagcaacaauuuuca

SEQ ID NO: 3206595 - RNA, 23 nt, Human
gccauaagcaacaauuuucagau

SEQ ID NO: 3206596 - RNA, 21 nt, Human
gccauaagcaacaauuuucag

SEQ ID NO: 3206597 - RNA, 22 nt, Human
gccauagaguacacugccugcc

SEQ ID NO: 3206598 - RNA, 16 nt, Human
gccauaggcccuuuca

SEQ ID NO: 3206599 - RNA, 15 nt, Human
gccauaggcccuuuc

SEQ ID NO: 3206600 - RNA, 17 nt, Human
gccauagaguacacugc

SEQ ID NO: 3206601 - RNA, 18 nt, Human
gccauagaguacacugcc

SEQ ID NO: 3206602 - RNA, 19 nt, Human
gccauagaguacacugccu

SEQ ID NO: 3206603 - RNA, 14 nt, Human
gccaggauggaaug

SEQ ID NO: 3206604 - RNA, 20 nt, Human
gccaggcacaggcagggcag

SEQ ID NO: 3206605 - RNA, 19 nt, Human
gccaggcacaggcagggca

SEQ ID NO: 3206606 - RNA, 17 nt, Human
gccaggcacaggcaggg

SEQ ID NO: 3206607 - RNA, 16 nt, Human
gccaggcacaggcagg

SEQ ID NO: 3206608 - RNA, 15 nt, Human
gccaggcacaggcag

SEQ ID NO: 3206609 - RNA, 12 nt, Human
gccaggcacagg

SEQ ID NO: 3206610 - RNA, 14 nt, Human
gccaggcacaggca

SEQ ID NO: 3206611 - RNA, 13 nt, Human
gccaggcacaggc

SEQ ID NO: 3206612 - RNA, 22 nt, Human
gccagcccauuugggcagagag

SEQ ID NO: 3206613 - RNA, 19 nt, Human
gccagcccauuugggcaga

SEQ ID NO: 3206614 - RNA, 18 nt, Human
gccagcccauuugggcag

SEQ ID NO: 3206615 - RNA, 16 nt, Human
gccagcccagaggccg

SEQ ID NO: 3206616 - RNA, 17 nt, Human
gccagcccauuugggca

SEQ ID NO: 3206617 - RNA, 23 nt, Human
gccagcaggcucucaggccagcu

SEQ ID NO: 3206618 - RNA, 13 nt, Human
gccaggcccucug

SEQ ID NO: 3206619 - RNA, 14 nt, Human
gccaggcccucugc

SEQ ID NO: 3206620 - RNA, 21 nt, Human
gccaggccacaagacccuugu

SEQ ID NO: 3206621 - RNA, 15 nt, Human
gccaggccagaggga

SEQ ID NO: 3206622 - RNA, 22 nt, Human
gccaggccagagggagugacag

SEQ ID NO: 3206623 - RNA, 13 nt, Human
gccaggccacaag

SEQ ID NO: 3206624 - RNA, 18 nt, Human
gccaggccacaagacccu

SEQ ID NO: 3206625 - RNA, 17 nt, Human
gccuccaagcuccaucu

SEQ ID NO: 3206626 - RNA, 21 nt, Human
gccuccaaccccucgcccagu

SEQ ID NO: 3206627 - RNA, 20 nt, Human
gccuccaaccccucgcccag

SEQ ID NO: 3206628 - RNA, 17 nt, Human
gccuccaaccccucgcc

SEQ ID NO: 3206629 - RNA, 22 nt, Human
gccuccaaccccucgcccaguc

SEQ ID NO: 3206630 - RNA, 22 nt, Human
gccuccaauuuuuuaagugaaa

SEQ ID NO: 3206631 - RNA, 15 nt, Human
gccuccauccugagg

SEQ ID NO: 3206632 - RNA, 16 nt, Human
gccuccauccugaggc

SEQ ID NO: 3206633 - RNA, 20 nt, Human
gccuccauccugaggcucca

SEQ ID NO: 3206634 - RNA, 20 nt, Human
gccuccuuugugaggaagcc

SEQ ID NO: 3206635 - RNA, 21 nt, Human
gccuccuuugugaggaagccg

SEQ ID NO: 3206636 - RNA, 19 nt, Human
gccuccuuugugaggaagc

SEQ ID NO: 3206637 - RNA, 13 nt, Human
gccugcuccagcu

SEQ ID NO: 3206638 - RNA, 23 nt, Human
gccugcuaauuccccagauugca

SEQ ID NO: 3206639 - RNA, 17 nt, Human
gccugcuaauuccccag

SEQ ID NO: 3206640 - RNA, 22 nt, Human
gccugcccuuuguccuccugcu

SEQ ID NO: 3206641 - RNA, 20 nt, Human
gccugcccuuuguccuccug

SEQ ID NO: 3206642 - RNA, 19 nt, Human
gccugcccuuuguccuccu

SEQ ID NO: 3206643 - RNA, 16 nt, Human
gccugcccuuuguccu

SEQ ID NO: 3206644 - RNA, 19 nt, Human
gccugcccugucaggaggc

SEQ ID NO: 3206645 - RNA, 13 nt, Human
gccugcccuguca

SEQ ID NO: 3206646 - RNA, 13 nt, Human
gccucggacuuag

SEQ ID NO: 3206647 - RNA, 17 nt, Human
gccucgacacagagugg

SEQ ID NO: 3206648 - RNA, 20 nt, Human
gccuccuugauauuuguauu

SEQ ID NO: 3206649 - RNA, 21 nt, Human
gccucgcaggccucccugcca

SEQ ID NO: 3206650 - RNA, 19 nt, Human
gccucgcaggccucccugc

SEQ ID NO: 3206651 - RNA, 18 nt, Human
gccucgcaggccucccug

SEQ ID NO: 3206652 - RNA, 13 nt, Human
gcgauucuucugc

SEQ ID NO: 3206653 - RNA, 15 nt, Human
gcgagagucccugca

SEQ ID NO: 3206654 - RNA, 14 nt, Human
gcgauucuucugcu

SEQ ID NO: 3206655 - RNA, 21 nt, Human
gcgauucucuugccucagcuu

SEQ ID NO: 3206656 - RNA, 13 nt, Human
gcggccucagagu

SEQ ID NO: 3206657 - RNA, 15 nt, Human
gcggccucuucucuc

SEQ ID NO: 3206658 - RNA, 18 nt, Human
gcggccucuucucucaga

SEQ ID NO: 3206659 - RNA, 19 nt, Human
gcggccucuucucucagac

SEQ ID NO: 3206660 - RNA, 20 nt, Human
gcgugguggacaugcacagc

SEQ ID NO: 3206661 - RNA, 18 nt, Human
gcguggggcucccgccuc

SEQ ID NO: 3206662 - RNA, 13 nt, Human
gcguggggcuccc

SEQ ID NO: 3206663 - RNA, 17 nt, Human
gcguggcccaccaggcc

SEQ ID NO: 3206664 - RNA, 22 nt, Human
gcguggcccaccaggccccccu

SEQ ID NO: 3206665 - RNA, 18 nt, Human
gcgugcacacaccagagc

SEQ ID NO: 3206666 - RNA, 14 nt, Human
gcgugcacacacca

SEQ ID NO: 3206667 - RNA, 16 nt, Human
gcuaauuuuucauuuu

SEQ ID NO: 3206668 - RNA, 12 nt, Human
gcuaauuguacc

SEQ ID NO: 3206669 - RNA, 17 nt, Human
gcuaauucuuugcaaaa

SEQ ID NO: 3206670 - RNA, 13 nt, Human
gcuaauucuuugc

SEQ ID NO: 3206671 - RNA, 15 nt, Human
gcuaauucuuugcaa

SEQ ID NO: 3206672 - RNA, 14 nt, Human
gcuaauucuuugca

SEQ ID NO: 3206673 - RNA, 17 nt, Human
gcuacaaaaacacagca

SEQ ID NO: 3206674 - RNA, 19 nt, Human
gcuacaaaaacacagcaag

SEQ ID NO: 3206675 - RNA, 18 nt, Human
gcuacaaaaacacagcaa

SEQ ID NO: 3206676 - RNA, 15 nt, Human
gcuacuggauucuua

SEQ ID NO: 3206677 - RNA, 15 nt, Human
gcuacugucagcucc

SEQ ID NO: 3206678 - RNA, 20 nt, Human
gcuacuguccuacccacccu

SEQ ID NO: 3206679 - RNA, 19 nt, Human
gcuacuguccuacccaccc

SEQ ID NO: 3206680 - RNA, 17 nt, Human
gcuacuugggaggcuga

SEQ ID NO: 3206681 - RNA, 16 nt, Human
gcuacuugguggguuu

SEQ ID NO: 3206682 - RNA, 19 nt, Human
gcuagaaaaauuguuaagg

SEQ ID NO: 3206683 - RNA, 20 nt, Human
cucccuccgggucuuccuac

SEQ ID NO: 3206684 - RNA, 22 nt, Human
cucccugacugggggcagacau

SEQ ID NO: 3206685 - RNA, 24 nt, Human
cucccugacugggggcagacaugg

SEQ ID NO: 3206686 - RNA, 12 nt, Human
cucccaccucag

SEQ ID NO: 3206687 - RNA, 23 nt, Human
cuccaguccccagaacucugccu

SEQ ID NO: 3206688 - RNA, 17 nt, Human
cuccaguccccagaacu

SEQ ID NO: 3206689 - RNA, 19 nt, Human
cucccuccgggucuuccua

SEQ ID NO: 3206690 - RNA, 18 nt, Human
cucccuccgggucuuccu

SEQ ID NO: 3206691 - RNA, 23 nt, Human
cuccccgccguacaguucuccag

SEQ ID NO: 3206692 - RNA, 15 nt, Human
cucccccuuuucccu

SEQ ID NO: 3206693 - RNA, 14 nt, Human
cucccccuuuuccc

SEQ ID NO: 3206694 - RNA, 20 nt, Human
cuccccgcaguguuugugug

SEQ ID NO: 3206695 - RNA, 19 nt, Human
cuccgcuuucuacccagcg

SEQ ID NO: 3206696 - RNA, 16 nt, Human
cuccgcggcgggcccu

SEQ ID NO: 3206697 - RNA, 23 nt, Human
cuccgcggcgggcccugcccaca

SEQ ID NO: 3206698 - RNA, 15 nt, Human
cuccgccucccgggu

SEQ ID NO: 3206699 - RNA, 16 nt, Human
cuccagacacaugucc

SEQ ID NO: 3206700 - RNA, 17 nt, Human
cuccagacacaugucca

SEQ ID NO: 3206701 - RNA, 19 nt, Human
cuccagacacauguccaag

SEQ ID NO: 3206702 - RNA, 15 nt, Human
cuccagaauuuccca

SEQ ID NO: 3206703 - RNA, 18 nt, Human
cuccagaauuucccaaag

SEQ ID NO: 3206704 - RNA, 17 nt, Human
cuccaagaccuucuccu

SEQ ID NO: 3206705 - RNA, 18 nt, Human
cuccaagaccuucuccuu

SEQ ID NO: 3206706 - RNA, 16 nt, Human
cuccaagaccuucucc

SEQ ID NO: 3206707 - RNA, 15 nt, Human
cuccaagaccuucuc

SEQ ID NO: 3206708 - RNA, 19 nt, Human
cuccaaccgggaugggagc

SEQ ID NO: 3206709 - RNA, 23 nt, Human
cuccaaccccucgcccaguccca

SEQ ID NO: 3206710 - RNA, 22 nt, Human
cuccacuuucuagccagaggag

SEQ ID NO: 3206711 - RNA, 20 nt, Human
cuccacuuucuagccagagg

SEQ ID NO: 3206712 - RNA, 20 nt, Human
cuccagaaaugucccuuucu

SEQ ID NO: 3206713 - RNA, 19 nt, Human
cuccagaaaugucccuuuc

SEQ ID NO: 3206714 - RNA, 22 nt, Human
cuccaaccgggaugggagccgg

SEQ ID NO: 3206715 - RNA, 16 nt, Human
cuccagaacucuuccu

SEQ ID NO: 3206716 - RNA, 19 nt, Human
cuccagaacucuuccucca

SEQ ID NO: 3206717 - RNA, 17 nt, Human
cuccagaacucuuccuc

SEQ ID NO: 3206718 - RNA, 11 nt, Human
cuccaggugca

SEQ ID NO: 3206719 - RNA, 14 nt, Human
cuccaguccccaga

SEQ ID NO: 3206720 - RNA, 16 nt, Human
cuccaguccccagaac

SEQ ID NO: 3206721 - RNA, 15 nt, Human
cuccaguccccagaa

SEQ ID NO: 3206722 - RNA, 17 nt, Human
cuccagggguuuacagu

SEQ ID NO: 3206723 - RNA, 22 nt, Human
cucaucuugacagagccugccc

SEQ ID NO: 3206724 - RNA, 21 nt, Human
cucaucuugacagagccugcc

SEQ ID NO: 3206725 - RNA, 13 nt, Human
cucagugccacua

SEQ ID NO: 3206726 - RNA, 15 nt, Human
cucagugcuuuccuc

SEQ ID NO: 3206727 - RNA, 18 nt, Human
cucagucuggcccuuccu

SEQ ID NO: 3206728 - RNA, 17 nt, Human
cucagucuggcccuucc

SEQ ID NO: 3206729 - RNA, 22 nt, Human
cuccaaaguauuguacaaauaa

SEQ ID NO: 3206730 - RNA, 14 nt, Human
cuccaacauccacu

SEQ ID NO: 3206731 - RNA, 20 nt, Human
cuccaaccccucgcccaguc

SEQ ID NO: 3206732 - RNA, 19 nt, Human
cuccaaccccucgcccagu

SEQ ID NO: 3206733 - RNA, 18 nt, Human
cuccaaccccucgcccag

SEQ ID NO: 3206734 - RNA, 15 nt, Human
cuccaaccccucgcc

SEQ ID NO: 3206735 - RNA, 12 nt, Human
cucaugcugccc

SEQ ID NO: 3206736 - RNA, 20 nt, Human
cucaugcugccccugccuug

SEQ ID NO: 3206737 - RNA, 19 nt, Human
cucaugcugccccugccuu

SEQ ID NO: 3206738 - RNA, 18 nt, Human
cucaugcugccccugccu

SEQ ID NO: 3206739 - RNA, 14 nt, Human
cucaugcugccccu

SEQ ID NO: 3206740 - RNA, 16 nt, Human
cucaugccucagccuc

SEQ ID NO: 3206741 - RNA, 18 nt, Human
cucaugccucagccuccu

SEQ ID NO: 3206742 - RNA, 20 nt, Human
cucaugccucagccuccuga

SEQ ID NO: 3206743 - RNA, 16 nt, Human
cucaggcccaaagccu

SEQ ID NO: 3206744 - RNA, 13 nt, Human
cucaggccugggg

SEQ ID NO: 3206745 - RNA, 14 nt, Human
cucaggccuggggg

SEQ ID NO: 3206746 - RNA, 20 nt, Human
cucaggccugggggcugggc

SEQ ID NO: 3206747 - RNA, 21 nt, Human
cucaggccugggggcugggca

SEQ ID NO: 3206748 - RNA, 12 nt, Human
cucagccuccug

SEQ ID NO: 3206749 - RNA, 13 nt, Human
cucagccuccuga

SEQ ID NO: 3206750 - RNA, 14 nt, Human
cucaggccagcugc

SEQ ID NO: 3206751 - RNA, 20 nt, Human
cucaggccagcugcuugggc

SEQ ID NO: 3206752 - RNA, 21 nt, Human
cucaggccagcugcuugggcu

SEQ ID NO: 3206753 - RNA, 22 nt, Human
cucaggccagcugcuugggcuu

SEQ ID NO: 3206754 - RNA, 13 nt, Human
cucaggccagcug

SEQ ID NO: 3206755 - RNA, 14 nt, Human
cucagcgaaugaau

SEQ ID NO: 3206756 - RNA, 13 nt, Human
cucagccucccaa

SEQ ID NO: 3206757 - RNA, 15 nt, Human
cuaucccggcugccc

SEQ ID NO: 3206758 - RNA, 16 nt, Human
cuaucccggcugcccu

SEQ ID NO: 3206759 - RNA, 16 nt, Human
cucagccucccaaagu

SEQ ID NO: 3206760 - RNA, 14 nt, Human
cucagccucccaaa

SEQ ID NO: 3206761 - RNA, 21 nt, Human
cucagccucccaaagugcugg

SEQ ID NO: 3206762 - RNA, 17 nt, Human
cuaucccggcugcccuu

SEQ ID NO: 3206763 - RNA, 13 nt, Human
cucagccucccga

SEQ ID NO: 3206764 - RNA, 22 nt, Human
cucagccucccaaagugcuggg

SEQ ID NO: 3206765 - RNA, 23 nt, Human
cucagccucccgaauagcuggga

SEQ ID NO: 3206766 - RNA, 14 nt, Human
cucuuggagccugc

SEQ ID NO: 3206767 - RNA, 22 nt, Human
cucuugccucagcuuccccagu

SEQ ID NO: 3206768 - RNA, 12 nt, Human
cugaaaagaagg

SEQ ID NO: 3206769 - RNA, 16 nt, Human
cugaaaagaaggaaag

SEQ ID NO: 3206770 - RNA, 18 nt, Human
cugaaaagaaggaaagau

SEQ ID NO: 3206771 - RNA, 16 nt, Human
cucuugccacugccuc

SEQ ID NO: 3206772 - RNA, 20 nt, Human
cucuugccacugccucuucc

SEQ ID NO: 3206773 - RNA, 19 nt, Human
cucuugccacugccucuuc

SEQ ID NO: 3206774 - RNA, 18 nt, Human
cucuugccacugccucuu

SEQ ID NO: 3206775 - RNA, 17 nt, Human
cucuugccacugccucu

SEQ ID NO: 3206776 - RNA, 13 nt, Human
cugaaggccccgc

SEQ ID NO: 3206777 - RNA, 14 nt, Human
cugaaggccccgcc

SEQ ID NO: 3206778 - RNA, 17 nt, Human
cugaaggcuggguucug

SEQ ID NO: 3206779 - RNA, 17 nt, Human
cugaaggccccgcccag

SEQ ID NO: 3206780 - RNA, 20 nt, Human
cugaaggacauugcggacag

SEQ ID NO: 3206781 - RNA, 19 nt, Human
cugaaggacauugcggaca

SEQ ID NO: 3206782 - RNA, 15 nt, Human
cugaaggaggccacc

SEQ ID NO: 3206783 - RNA, 19 nt, Human
cugaaggaggccaccuccu

SEQ ID NO: 3206784 - RNA, 18 nt, Human
cugaaggaggccaccucc

SEQ ID NO: 3206785 - RNA, 17 nt, Human
cugaaggaggccaccuc

SEQ ID NO: 3206786 - RNA, 16 nt, Human
cugaaggaggccaccu

SEQ ID NO: 3206787 - RNA, 16 nt, Human
cugaaaauguaugugu

SEQ ID NO: 3206788 - RNA, 14 nt, Human
cugaaaauguaugu

SEQ ID NO: 3206789 - RNA, 22 nt, Human
cugaaggaauaaauugcuccuu

SEQ ID NO: 3206790 - RNA, 14 nt, Human
cugacagacacagg

SEQ ID NO: 3206791 - RNA, 12 nt, Human
cugacagacaca

SEQ ID NO: 3206792 - RNA, 18 nt, Human
cugacagaaucucugaau

SEQ ID NO: 3206793 - RNA, 20 nt, Human
cugaagggguuuucuugaua

SEQ ID NO: 3206794 - RNA, 19 nt, Human
cugaagggguuuucuugau

SEQ ID NO: 3206795 - RNA, 14 nt, Human
cugacagaaggacu

SEQ ID NO: 3206796 - RNA, 18 nt, Human
cugaagggguuuucuuga

SEQ ID NO: 3206797 - RNA, 16 nt, Human
cugaagggguuuucuu

SEQ ID NO: 3206798 - RNA, 18 nt, Human
cugacccaugcugcccug

SEQ ID NO: 3206799 - RNA, 17 nt, Human
cugacccaugcugcccu

SEQ ID NO: 3206800 - RNA, 19 nt, Human
cugacccaugcugcccugu

SEQ ID NO: 3206801 - RNA, 23 nt, Human
cugacccugcuucaaauauuucc

SEQ ID NO: 3206802 - RNA, 19 nt, Human
cugaccuuaaaugcaacca

SEQ ID NO: 3206803 - RNA, 15 nt, Human
cugaccuuaaaugca

SEQ ID NO: 3206804 - RNA, 12 nt, Human
cugaccucaaau

SEQ ID NO: 3206805 - RNA, 22 nt, Human
cucugcuccaaccgggauggga

SEQ ID NO: 3206806 - RNA, 20 nt, Human
cucugcuaaauugauguuga

SEQ ID NO: 3206807 - RNA, 17 nt, Human
cucugcuaccuugcccc

SEQ ID NO: 3206808 - RNA, 17 nt, Human
cucugcuaaauugaugu

SEQ ID NO: 3206809 - RNA, 13 nt, Human
cucugcuaaauug

SEQ ID NO: 3206810 - RNA, 18 nt, Human
cucuuagaagaauauugu

SEQ ID NO: 3206811 - RNA, 22 nt, Human
cucuuagaagaauauuguauug

SEQ ID NO: 3206812 - RNA, 22 nt, Human
cucuuagaaaaggugauaaaau

SEQ ID NO: 3206813 - RNA, 18 nt, Human
cucuguacauauuagcga

SEQ ID NO: 3206814 - RNA, 16 nt, Human
cucuguacauauuagc

SEQ ID NO: 3206815 - RNA, 17 nt, Human
cucuguacagagcccac

SEQ ID NO: 3206816 - RNA, 21 nt, Human
cucuguacagagcccacgccc

SEQ ID NO: 3206817 - RNA, 15 nt, Human
cucugguccauagag

SEQ ID NO: 3206818 - RNA, 19 nt, Human
cucugcugacagacacagg

SEQ ID NO: 3206819 - RNA, 18 nt, Human
cucugcugacagacacag

SEQ ID NO: 3206820 - RNA, 17 nt, Human
cucugcugacagacaca

SEQ ID NO: 3206821 - RNA, 16 nt, Human
cucugguccauagaga

SEQ ID NO: 3206822 - RNA, 18 nt, Human
cucugguccauagagagc

SEQ ID NO: 3206823 - RNA, 19 nt, Human
cucugguccauagagagca

SEQ ID NO: 3206824 - RNA, 15 nt, Human
cucugguuaucuaau

SEQ ID NO: 3206825 - RNA, 14 nt, Human
cucugguuccuccc

SEQ ID NO: 3206826 - RNA, 11 nt, Human
cucucuggccu

SEQ ID NO: 3206827 - RNA, 12 nt, Human
cucucuggccuu

SEQ ID NO: 3206828 - RNA, 15 nt, Human
cucugaaggacauug

SEQ ID NO: 3206829 - RNA, 15 nt, Human
cucucagaggcccca

SEQ ID NO: 3206830 - RNA, 24 nt, Human
cucuccccagcaagugagagcugg

SEQ ID NO: 3206831 - RNA, 21 nt, Human
cucuccgaccagacaccuuga

SEQ ID NO: 3206832 - RNA, 17 nt, Human
cucuccgccccugagcc

SEQ ID NO: 3206833 - RNA, 20 nt, Human
cucuccgccccugagcccac

SEQ ID NO: 3206834 - RNA, 18 nt, Human
cucuccgccccugagccc

SEQ ID NO: 3206835 - RNA, 12 nt, Human
cucucacuccuu

SEQ ID NO: 3206836 - RNA, 14 nt, Human
cucucacuccuuga

SEQ ID NO: 3206837 - RNA, 19 nt, Human
cucucagauuguaccauug

SEQ ID NO: 3206838 - RNA, 18 nt, Human
cucucagaccgucuuccu

SEQ ID NO: 3206839 - RNA, 19 nt, Human
cucucagaccgucuuccuc

SEQ ID NO: 3206840 - RNA, 21 nt, Human
cucucagaccgucuuccucca

SEQ ID NO: 3206841 - RNA, 15 nt, Human
cucucacuccuugaa

SEQ ID NO: 3206842 - RNA, 14 nt, Human
cucucacugccucc

SEQ ID NO: 3206843 - RNA, 17 nt, Human
cucuauuugaauuauuu

SEQ ID NO: 3206844 - RNA, 23 nt, Human
cucuauuucccccuuucuuccuc

SEQ ID NO: 3206845 - RNA, 22 nt, Human
cucuauuucccccuuucuuccu

SEQ ID NO: 3206846 - RNA, 23 nt, Human
cucuauuuagaugcauauuacug

SEQ ID NO: 3206847 - RNA, 14 nt, Human
cucuauuucccccu

SEQ ID NO: 3206848 - RNA, 18 nt, Human
cucuauuucccccuuucu

SEQ ID NO: 3206849 - RNA, 17 nt, Human
cucuauuucccccuuuc

SEQ ID NO: 3206850 - RNA, 20 nt, Human
cucuauuccccacccucccc

SEQ ID NO: 3206851 - RNA, 19 nt, Human
cucuauguucuaagaagug

SEQ ID NO: 3206852 - RNA, 14 nt, Human
cuccgcuucccugg

SEQ ID NO: 3206853 - RNA, 20 nt, Human
cucgggauuaguacacacuu

SEQ ID NO: 3206854 - RNA, 14 nt, Human
cguggucuuuuccu

SEQ ID NO: 3206855 - RNA, 22 nt, Human
cuaaacugcccccucugcccug

SEQ ID NO: 3206856 - RNA, 20 nt, Human
cuaaacuuggugcuuauuga

SEQ ID NO: 3206857 - RNA, 23 nt, Human
cuaaacugcccccucugcccugc

SEQ ID NO: 3206858 - RNA, 14 nt, Human
cgugagaccugccc

SEQ ID NO: 3206859 - RNA, 16 nt, Human
cgugagaccugccccu

SEQ ID NO: 3206860 - RNA, 23 nt, Human
cgugagccaccgugccuggccac

SEQ ID NO: 3206861 - RNA, 13 nt, Human
cgugagaccugcc

SEQ ID NO: 3206862 - RNA, 16 nt, Human
cgugaccuggucaggg

SEQ ID NO: 3206863 - RNA, 12 nt, Human
cgugaccugguc

SEQ ID NO: 3206864 - RNA, 18 nt, Human
cuaaagauagaguaaaaa

SEQ ID NO: 3206865 - RNA, 14 nt, Human
cuaacuggacuggu

SEQ ID NO: 3206866 - RNA, 12 nt, Human
cuaacuguauau

SEQ ID NO: 3206867 - RNA, 15 nt, Human
cuaacuguauauuug

SEQ ID NO: 3206868 - RNA, 16 nt, Human
cuaacuguauauuugu

SEQ ID NO: 3206869 - RNA, 19 nt, Human
cuaacuguauauuuguaug

SEQ ID NO: 3206870 - RNA, 16 nt, Human
cuaacuuuccuucauu

SEQ ID NO: 3206871 - RNA, 16 nt, Human
cuaacuugcuuaaaug

SEQ ID NO: 3206872 - RNA, 14 nt, Human
cuaacuugcuuaaa

SEQ ID NO: 3206873 - RNA, 18 nt, Human
cuaacuucuaaaacugua

SEQ ID NO: 3206874 - RNA, 17 nt, Human
cuaacuucuaaaacugu

SEQ ID NO: 3206875 - RNA, 19 nt, Human
cuaacuugcuuaaauguga

SEQ ID NO: 3206876 - RNA, 18 nt, Human
cuaacuugcuuaaaugug

SEQ ID NO: 3206877 - RNA, 17 nt, Human
cuaacuugcuuaaaugu

SEQ ID NO: 3206878 - RNA, 16 nt, Human
cuaacuucuaaaacug

SEQ ID NO: 3206879 - RNA, 13 nt, Human
cuaacuucuaaaa

SEQ ID NO: 3206880 - RNA, 16 nt, Human
cuaagaaacuuaaauu

SEQ ID NO: 3206881 - RNA, 22 nt, Human
cuaagaaacauuggaagcaggu

SEQ ID NO: 3206882 - RNA, 12 nt, Human
cuaagaaaauag

SEQ ID NO: 3206883 - RNA, 13 nt, Human
cuaagaaaauaga

SEQ ID NO: 3206884 - RNA, 12 nt, Human
cuaagaaacauu

SEQ ID NO: 3206885 - RNA, 19 nt, Human
cuaagaaacauuggaagca

SEQ ID NO: 3206886 - RNA, 18 nt, Human
cuaagaaacauuggaagc

SEQ ID NO: 3206887 - RNA, 14 nt, Human
cuaagaaacauugg

SEQ ID NO: 3206888 - RNA, 13 nt, Human
cuaagaaacauug

SEQ ID NO: 3206889 - RNA, 21 nt, Human
cuacauaaaauaaaucuacug

SEQ ID NO: 3206890 - RNA, 15 nt, Human
cuacaugagguacug

SEQ ID NO: 3206891 - RNA, 16 nt, Human
cuaccuccucuccuga

SEQ ID NO: 3206892 - RNA, 15 nt, Human
cuaccuccucuccug

SEQ ID NO: 3206893 - RNA, 15 nt, Human
cuacaguccucccau

SEQ ID NO: 3206894 - RNA, 16 nt, Human
cuacaguccucccauc

SEQ ID NO: 3206895 - RNA, 17 nt, Human
cuacaguccucccaucu

SEQ ID NO: 3206896 - RNA, 13 nt, Human
cuacaguugaaaa

SEQ ID NO: 3206897 - RNA, 22 nt, Human
cuaagugauccucccaccucag

SEQ ID NO: 3206898 - RNA, 20 nt, Human
cuaagugauccucccaccuc

SEQ ID NO: 3206899 - RNA, 18 nt, Human
cuaagugaggaugaaaaa

SEQ ID NO: 3206900 - RNA, 20 nt, Human
cuaagucucuuuuuuacaaa

SEQ ID NO: 3206901 - RNA, 14 nt, Human
cuacaaaucaguaa

SEQ ID NO: 3206902 - RNA, 15 nt, Human
cuacaaaucaguaau

SEQ ID NO: 3206903 - RNA, 20 nt, Human
cuaagugaaauaagccagac

SEQ ID NO: 3206904 - RNA, 23 nt, Human
cuaagugaaauaagccagacauc

SEQ ID NO: 3206905 - RNA, 18 nt, Human
cuagccaccgccuccuac

SEQ ID NO: 3206906 - RNA, 19 nt, Human
cuagcauuucccaacacaa

SEQ ID NO: 3206907 - RNA, 17 nt, Human
cuagcauggcugccaau

SEQ ID NO: 3206908 - RNA, 23 nt, Human
cuagcagcagggagggcuucugc

SEQ ID NO: 3206909 - RNA, 16 nt, Human
cuagaacucccuuuca

SEQ ID NO: 3206910 - RNA, 17 nt, Human
cuagaacucccuuucaa

SEQ ID NO: 3206911 - RNA, 18 nt, Human
cuagaacucccuuucaac

SEQ ID NO: 3206912 - RNA, 19 nt, Human
cuagaacucccuuucaaca

SEQ ID NO: 3206913 - RNA, 13 nt, Human
cuagaacucccuu

SEQ ID NO: 3206914 - RNA, 22 nt, Human
cuagcagcagggagggcuucug

SEQ ID NO: 3206915 - RNA, 12 nt, Human
cuagcagcaggg

SEQ ID NO: 3206916 - RNA, 16 nt, Human
cuagaagagucuauug

SEQ ID NO: 3206917 - RNA, 17 nt, Human
cuagaagagucuauugu

SEQ ID NO: 3206918 - RNA, 19 nt, Human
cuagaagagucuauugucu

SEQ ID NO: 3206919 - RNA, 20 nt, Human
cuagaagagucuauugucuc

SEQ ID NO: 3206920 - RNA, 19 nt, Human
cuagaaauuccccacccug

SEQ ID NO: 3206921 - RNA, 11 nt, Human
cuaccugaggg

SEQ ID NO: 3206922 - RNA, 14 nt, Human
cuaccugaggggcc

SEQ ID NO: 3206923 - RNA, 13 nt, Human
cuaguugaauacu

SEQ ID NO: 3206924 - RNA, 15 nt, Human
cuaguugaauacuug

SEQ ID NO: 3206925 - RNA, 17 nt, Human
cuaguugaauacuugaa

SEQ ID NO: 3206926 - RNA, 18 nt, Human
cuaguugaauacuugaac

SEQ ID NO: 3206927 - RNA, 12 nt, Human
cuaguugaauac

SEQ ID NO: 3206928 - RNA, 22 nt, Human
cuaguuccaccaucaagccacc

SEQ ID NO: 3206929 - RNA, 19 nt, Human
cuauaacacugugaagagc

SEQ ID NO: 3206930 - RNA, 17 nt, Human
cuauaacacugugaaga

SEQ ID NO: 3206931 - RNA, 13 nt, Human
cuauaacacugug

SEQ ID NO: 3206932 - RNA, 20 nt, Human
cuaguugaauacuugaacca

SEQ ID NO: 3206933 - RNA, 21 nt, Human
cuaguugaauacuugaaccau

SEQ ID NO: 3206934 - RNA, 23 nt, Human
cuaguugaauacuugaaccauaa

SEQ ID NO: 3206935 - RNA, 14 nt, Human
cuauaaauguugcu

SEQ ID NO: 3206936 - RNA, 13 nt, Human
cuauaaauuauau

SEQ ID NO: 3206937 - RNA, 20 nt, Human
cuauaacuacauauugaaua

SEQ ID NO: 3206938 - RNA, 19 nt, Human
cuauaacauagaauugcaa

SEQ ID NO: 3206939 - RNA, 19 nt, Human
cuagggaaaaaccagcgug

SEQ ID NO: 3206940 - RNA, 23 nt, Human
cuagccucacgcuccuuucugau

SEQ ID NO: 3206941 - RNA, 22 nt, Human
cuagccucacgcuccuuucuga

SEQ ID NO: 3206942 - RNA, 13 nt, Human
cuagccucacgcu

SEQ ID NO: 3206943 - RNA, 13 nt, Human
cuagcccugcccg

SEQ ID NO: 3206944 - RNA, 21 nt, Human
cuagggaaaaaccagcgugug

SEQ ID NO: 3206945 - RNA, 18 nt, Human
cuaguuccaccaucaagc

SEQ ID NO: 3206946 - RNA, 20 nt, Human
cuaguuccaccaucaagcca

SEQ ID NO: 3206947 - RNA, 14 nt, Human
cuaguuccaccauc

SEQ ID NO: 3206948 - RNA, 13 nt, Human
cuaggggaaugag

SEQ ID NO: 3206949 - RNA, 14 nt, Human
cuaggggaaugagg

SEQ ID NO: 3206950 - RNA, 18 nt, Human
cuaggggaaugagggggc

SEQ ID NO: 3206951 - RNA, 19 nt, Human
cuaggggaaugagggggcu

SEQ ID NO: 3206952 - RNA, 22 nt, Human
cuaggggaaugagggggcucag

SEQ ID NO: 3206953 - RNA, 18 nt, Human
cggcucacugcagccuca

SEQ ID NO: 3206954 - RNA, 15 nt, Human
cggcggccucagagu

SEQ ID NO: 3206955 - RNA, 19 nt, Human
cggcucacugcagccucaa

SEQ ID NO: 3206956 - RNA, 17 nt, Human
cggcucacugcagccuc

SEQ ID NO: 3206957 - RNA, 17 nt, Human
cggcucacugcauccuc

SEQ ID NO: 3206958 - RNA, 20 nt, Human
cggagcggauugcaaagcaa

SEQ ID NO: 3206959 - RNA, 18 nt, Human
cggaggggccuggcagcc

SEQ ID NO: 3206960 - RNA, 16 nt, Human
cggaggggccuggcag

SEQ ID NO: 3206961 - RNA, 23 nt, Human
cggagucauuuuguguugaagag

SEQ ID NO: 3206962 - RNA, 15 nt, Human
cggccuuuggcuuca

SEQ ID NO: 3206963 - RNA, 17 nt, Human
cgccucggaucagcuga

SEQ ID NO: 3206964 - RNA, 12 nt, Human
cgaccagccagg

SEQ ID NO: 3206965 - RNA, 17 nt, Human
cgaccuggccugucugu

SEQ ID NO: 3206966 - RNA, 16 nt, Human
cgaccugccucggccu

SEQ ID NO: 3206967 - RNA, 23 nt, Human
cgaccugaggacauggcuucuga

SEQ ID NO: 3206968 - RNA, 17 nt, Human
cgaguguguuucauccu

SEQ ID NO: 3206969 - RNA, 17 nt, Human
cgaguuacagacaaagc

SEQ ID NO: 3206970 - RNA, 18 nt, Human
cgaguuacagacaaagcg

SEQ ID NO: 3206971 - RNA, 15 nt, Human
cgaguagcugggacu

SEQ ID NO: 3206972 - RNA, 14 nt, Human
cgaguagcugggac

SEQ ID NO: 3206973 - RNA, 13 nt, Human
cgaguagcuggga

SEQ ID NO: 3206974 - RNA, 15 nt, Human
cgccgcccagcccac

SEQ ID NO: 3206975 - RNA, 20 nt, Human
cgccggcaauaaaagcccag

SEQ ID NO: 3206976 - RNA, 22 nt, Human
cgccggcaauaaaagcccagga

SEQ ID NO: 3206977 - RNA, 21 nt, Human
cgccggcaauaaaagcccagg

SEQ ID NO: 3206978 - RNA, 13 nt, Human
cgccaaggcuggg

SEQ ID NO: 3206979 - RNA, 16 nt, Human
cgccaaggcuggggga

SEQ ID NO: 3206980 - RNA, 21 nt, Human
cgaguguguuucauccuuccc

SEQ ID NO: 3206981 - RNA, 12 nt, Human
cgccaaggcugg

SEQ ID NO: 3206982 - RNA, 19 nt, Human
cgcaggcuggcccugcccu

SEQ ID NO: 3206983 - RNA, 20 nt, Human
cgcaggcuggcccugcccug

SEQ ID NO: 3206984 - RNA, 14 nt, Human
cgcaggcuggcccu

SEQ ID NO: 3206985 - RNA, 15 nt, Human
cgcaggcuggcccug

SEQ ID NO: 3206986 - RNA, 17 nt, Human
cgcaggcuggcccugcc

SEQ ID NO: 3206987 - RNA, 18 nt, Human
cgcaggcuggcccugccc

SEQ ID NO: 3206988 - RNA, 23 nt, Human
ccuugcccacuccugcucugcuc

SEQ ID NO: 3206989 - RNA, 22 nt, Human
ccuugcccacuccugcucugcu

SEQ ID NO: 3206990 - RNA, 21 nt, Human
ccuugcccacuccugcucugc

SEQ ID NO: 3206991 - RNA, 20 nt, Human
ccuugcccacuccugcucug

SEQ ID NO: 3206992 - RNA, 17 nt, Human
ccuugccgucuaccuga

SEQ ID NO: 3206993 - RNA, 20 nt, Human
ccuugccgucuaccugaggg

SEQ ID NO: 3206994 - RNA, 17 nt, Human
ccuugcccacuccugcu

SEQ ID NO: 3206995 - RNA, 19 nt, Human
ccuugcccacuccugcucu

SEQ ID NO: 3206996 - RNA, 18 nt, Human
ccuugcccacuccugcuc

SEQ ID NO: 3206997 - RNA, 12 nt, Human
ccuugccagucu

SEQ ID NO: 3206998 - RNA, 15 nt, Human
cgacagugagacucu

SEQ ID NO: 3206999 - RNA, 16 nt, Human
cgacagugagacucug

SEQ ID NO: 3207000 - RNA, 23 nt, Human
cgaccagacaccuugacagggca

SEQ ID NO: 3207001 - RNA, 14 nt, Human
cgaccaccugccca

SEQ ID NO: 3207002 - RNA, 12 nt, Human
cgaccaccugcc

SEQ ID NO: 3207003 - RNA, 19 nt, Human
ccuuuuguucauuucaucc

SEQ ID NO: 3207004 - RNA, 11 nt, Human
ccuuuuguguu

SEQ ID NO: 3207005 - RNA, 15 nt, Human
ccuuuugcaggcucc

SEQ ID NO: 3207006 - RNA, 20 nt, Human
ccuuuucgcaggauucuucc

SEQ ID NO: 3207007 - RNA, 11 nt, Human
ccuuucccacu

SEQ ID NO: 3207008 - RNA, 16 nt, Human
ccuuuucuuguaucug

SEQ ID NO: 3207009 - RNA, 14 nt, Human
ccuuuucuguguuu

SEQ ID NO: 3207010 - RNA, 13 nt, Human
ccuuuucuguguu

SEQ ID NO: 3207011 - RNA, 20 nt, Human
ccuuuagcgcccaguugggu

SEQ ID NO: 3207012 - RNA, 14 nt, Human
ccuuuagcgcccag

SEQ ID NO: 3207013 - RNA, 13 nt, Human
ccuuuccaccuuc

SEQ ID NO: 3207014 - RNA, 16 nt, Human
ccuuuccaccuucuca

SEQ ID NO: 3207015 - RNA, 17 nt, Human
ccuuuccaccuucucac

SEQ ID NO: 3207016 - RNA, 18 nt, Human
ccuuuccaccuucucaca

SEQ ID NO: 3207017 - RNA, 14 nt, Human
ccuuuagcuguguu

SEQ ID NO: 3207018 - RNA, 18 nt, Human
ccuuuagauagcagccug

SEQ ID NO: 3207019 - RNA, 19 nt, Human
ccuuuagauagcagccugg

SEQ ID NO: 3207020 - RNA, 21 nt, Human
ccuuuagauagcagccuggcu

SEQ ID NO: 3207021 - RNA, 22 nt, Human
ccuuuagauagcagccuggcuc

SEQ ID NO: 3207022 - RNA, 22 nt, Human
ccuuggaaaucaaauguaaagu

SEQ ID NO: 3207023 - RNA, 20 nt, Human
ccuuggaaaucaaauguaaa

SEQ ID NO: 3207024 - RNA, 21 nt, Human
ccuucugacccaugcugcccu

SEQ ID NO: 3207025 - RNA, 22 nt, Human
ccuucugacccaugcugcccug

SEQ ID NO: 3207026 - RNA, 23 nt, Human
ccuucugacccaugcugcccugu

SEQ ID NO: 3207027 - RNA, 19 nt, Human
ccuucucuuccaggcagcc

SEQ ID NO: 3207028 - RNA, 18 nt, Human
ccuucucuuccaggcagc

SEQ ID NO: 3207029 - RNA, 22 nt, Human
ccuucuggaauaaggagaauga

SEQ ID NO: 3207030 - RNA, 23 nt, Human
ccuucugcacauaaacucuuuua

SEQ ID NO: 3207031 - RNA, 15 nt, Human
ccuucugaugaaaug

SEQ ID NO: 3207032 - RNA, 21 nt, Human
ccuucugaugaaauguuaaca

SEQ ID NO: 3207033 - RNA, 20 nt, Human
ccuucugagcuggccucuca

SEQ ID NO: 3207034 - RNA, 19 nt, Human
ccuucugagcuggccucuc

SEQ ID NO: 3207035 - RNA, 12 nt, Human
ccuucugaccca

SEQ ID NO: 3207036 - RNA, 16 nt, Human
ccuucugacccaugcu

SEQ ID NO: 3207037 - RNA, 17 nt, Human
ccuucugacccaugcug

SEQ ID NO: 3207038 - RNA, 20 nt, Human
ccuucugacccaugcugccc

SEQ ID NO: 3207039 - RNA, 14 nt, Human
ccuggccugagcug

SEQ ID NO: 3207040 - RNA, 15 nt, Human
ccuggccugagcugg

SEQ ID NO: 3207041 - RNA, 17 nt, Human
ccuucucuuccaggcag

SEQ ID NO: 3207042 - RNA, 14 nt, Human
ccuucucuuccagg

SEQ ID NO: 3207043 - RNA, 13 nt, Human
ccuucucuuccag

SEQ ID NO: 3207044 - RNA, 12 nt, Human
ccuucugggcau

SEQ ID NO: 3207045 - RNA, 20 nt, Human
ccccagacuccaccaagccu

SEQ ID NO: 3207046 - RNA, 21 nt, Human
ccccagacuccaccaagccug

SEQ ID NO: 3207047 - RNA, 21 nt, Human
ccccaaaacucuccucugcug

SEQ ID NO: 3207048 - RNA, 23 nt, Human
ccccaaaacucuccucugcugcu

SEQ ID NO: 3207049 - RNA, 22 nt, Human
cccauuguggucacaggaagua

SEQ ID NO: 3207050 - RNA, 23 nt, Human
cccauuguggucacaggaaguag

SEQ ID NO: 3207051 - RNA, 22 nt, Human
ccccaaaacucuccucugcugc

SEQ ID NO: 3207052 - RNA, 22 nt, Human
ccccagcaagugagagcugggu

SEQ ID NO: 3207053 - RNA, 21 nt, Human
ccccagcaagugagagcuggg

SEQ ID NO: 3207054 - RNA, 22 nt, Human
cccccaaauggaaaugggcaga

SEQ ID NO: 3207055 - RNA, 23 nt, Human
ccccgacccuugccgucuaccug

SEQ ID NO: 3207056 - RNA, 13 nt, Human
cccgggacucugc

SEQ ID NO: 3207057 - RNA, 22 nt, Human
cccgggaagggggcugggacau

SEQ ID NO: 3207058 - RNA, 23 nt, Human
cccgggaggcagagguugcagug

SEQ ID NO: 3207059 - RNA, 18 nt, Human
cccuauuagagaagagau

SEQ ID NO: 3207060 - RNA, 17 nt, Human
cccuauugguaaagaau

SEQ ID NO: 3207061 - RNA, 16 nt, Human
cccggcuccaggcucc

SEQ ID NO: 3207062 - RNA, 15 nt, Human
cccggcuccaggcuc

SEQ ID NO: 3207063 - RNA, 14 nt, Human
cccggcuccaggcu

SEQ ID NO: 3207064 - RNA, 13 nt, Human
cccggcuccaggc

SEQ ID NO: 3207065 - RNA, 13 nt, Human
cccggccaccugc

SEQ ID NO: 3207066 - RNA, 14 nt, Human
cccggccaccugcg

SEQ ID NO: 3207067 - RNA, 12 nt, Human
cccggcuccagg

SEQ ID NO: 3207068 - RNA, 11 nt, Human
cccggcuccag

SEQ ID NO: 3207069 - RNA, 15 nt, Human
ccccuuucuuccuca

SEQ ID NO: 3207070 - RNA, 14 nt, Human
cccgaauagcuggg

SEQ ID NO: 3207071 - RNA, 22 nt, Human
cccgaaagaggcacccuuccau

SEQ ID NO: 3207072 - RNA, 21 nt, Human
cccgaaagaggcacccuucca

SEQ ID NO: 3207073 - RNA, 20 nt, Human
cccgaaaggucaccucacuc

SEQ ID NO: 3207074 - RNA, 19 nt, Human
cccgaaaggucaccucacu

SEQ ID NO: 3207075 - RNA, 17 nt, Human
cccgaaaggucaccuca

SEQ ID NO: 3207076 - RNA, 24 nt, Human
cccgaaagaggcacccuuccaucu

SEQ ID NO: 3207077 - RNA, 21 nt, Human
cccgaaaggucaccucacuca

SEQ ID NO: 3207078 - RNA, 19 nt, Human
ccccuugccagcugcugag

SEQ ID NO: 3207079 - RNA, 16 nt, Human
ccccuugccagcugcu

SEQ ID NO: 3207080 - RNA, 21 nt, Human
ccccuugccagcugcugagcc

SEQ ID NO: 3207081 - RNA, 12 nt, Human
ccccucuucccu

SEQ ID NO: 3207082 - RNA, 14 nt, Human
ccccucuucccugg

SEQ ID NO: 3207083 - RNA, 14 nt, Human
ccccuuucuuccuc

SEQ ID NO: 3207084 - RNA, 13 nt, Human
ccccuuucuuccu

SEQ ID NO: 3207085 - RNA, 19 nt, Human
ccccucuggcuccagcugg

SEQ ID NO: 3207086 - RNA, 18 nt, Human
ccccucuggcuccagcug

SEQ ID NO: 3207087 - RNA, 16 nt, Human
cccagccacuccccag

SEQ ID NO: 3207088 - RNA, 15 nt, Human
cccagccacucccca

SEQ ID NO: 3207089 - RNA, 14 nt, Human
cccagccacucccc

SEQ ID NO: 3207090 - RNA, 23 nt, Human
cccagcucugguccauagagagc

SEQ ID NO: 3207091 - RNA, 22 nt, Human
cccagcuuaaaggggcuagagu

SEQ ID NO: 3207092 - RNA, 13 nt, Human
cccagcugcaccc

SEQ ID NO: 3207093 - RNA, 20 nt, Human
cccagcugcaccccuuccug

SEQ ID NO: 3207094 - RNA, 18 nt, Human
cccagcugcaccccuucc

SEQ ID NO: 3207095 - RNA, 12 nt, Human
cccagcugcacc

SEQ ID NO: 3207096 - RNA, 13 nt, Human
cccauccucugua

SEQ ID NO: 3207097 - RNA, 13 nt, Human
cccauccuccagg

SEQ ID NO: 3207098 - RNA, 17 nt, Human
cccaggcuggcgugcag

SEQ ID NO: 3207099 - RNA, 13 nt, Human
cccaggcuggcgu

SEQ ID NO: 3207100 - RNA, 19 nt, Human
cccaggcuggagugcagug

SEQ ID NO: 3207101 - RNA, 18 nt, Human
cccaggcuggagugcagu

SEQ ID NO: 3207102 - RNA, 15 nt, Human
cccagcuugaaaccu

SEQ ID NO: 3207103 - RNA, 14 nt, Human
cccagcuugggcag

SEQ ID NO: 3207104 - RNA, 16 nt, Human
cccagcuucucagcuc

SEQ ID NO: 3207105 - RNA, 19 nt, Human
cccagcuuccagcaggagg

SEQ ID NO: 3207106 - RNA, 18 nt, Human
cccagcuuccagcaggag

SEQ ID NO: 3207107 - RNA, 22 nt, Human
cccagcuucacuucugacucuu

SEQ ID NO: 3207108 - RNA, 17 nt, Human
cccagcuucacuucuga

SEQ ID NO: 3207109 - RNA, 17 nt, Human
cccagcuuccagcagga

SEQ ID NO: 3207110 - RNA, 16 nt, Human
cccagcuuccagcagg

SEQ ID NO: 3207111 - RNA, 15 nt, Human
cccagcuuccagcag

SEQ ID NO: 3207112 - RNA, 13 nt, Human
cccagcuuccagc

SEQ ID NO: 3207113 - RNA, 22 nt, Human
cccagcuugggcagaucuccca

SEQ ID NO: 3207114 - RNA, 11 nt, Human
cccauaucaug

SEQ ID NO: 3207115 - RNA, 13 nt, Human
cccacugcucugg

SEQ ID NO: 3207116 - RNA, 12 nt, Human
cccacugcucug

SEQ ID NO: 3207117 - RNA, 19 nt, Human
cccacugcuuuuggucugu

SEQ ID NO: 3207118 - RNA, 20 nt, Human
cccacugugcguggggcucc

SEQ ID NO: 3207119 - RNA, 18 nt, Human
cccacuagacccacugga

SEQ ID NO: 3207120 - RNA, 20 nt, Human
cccacccugcuuggcccagg

SEQ ID NO: 3207121 - RNA, 21 nt, Human
cccacccugcuuggcccaggg

SEQ ID NO: 3207122 - RNA, 18 nt, Human
cccacuccaagccagcaa

SEQ ID NO: 3207123 - RNA, 20 nt, Human
cccacccaagggccuggccu

SEQ ID NO: 3207124 - RNA, 21 nt, Human
cccacccaagggccuggccug

SEQ ID NO: 3207125 - RNA, 22 nt, Human
cccacccaagggccuggccuga

SEQ ID NO: 3207126 - RNA, 18 nt, Human
cccacccugaaagcccug

SEQ ID NO: 3207127 - RNA, 11 nt, Human
cccacccugcu

SEQ ID NO: 3207128 - RNA, 18 nt, Human
cccacccaagggccuggc

SEQ ID NO: 3207129 - RNA, 12 nt, Human
cccacccccacc

SEQ ID NO: 3207130 - RNA, 15 nt, Human
cccacccccacccaa

SEQ ID NO: 3207131 - RNA, 17 nt, Human
cccacccccacccaagg

SEQ ID NO: 3207132 - RNA, 13 nt, Human
cccacugcugacu

SEQ ID NO: 3207133 - RNA, 22 nt, Human
ccagaguccccccacucccagc

SEQ ID NO: 3207134 - RNA, 21 nt, Human
ccagaguccccccacucccag

SEQ ID NO: 3207135 - RNA, 18 nt, Human
ccagagggccugcaaggg

SEQ ID NO: 3207136 - RNA, 19 nt, Human
ccagagggccugcaaggga

SEQ ID NO: 3207137 - RNA, 17 nt, Human
ccagagggccugcaagg

SEQ ID NO: 3207138 - RNA, 16 nt, Human
ccaccuuggcucaagu

SEQ ID NO: 3207139 - RNA, 16 nt, Human
ccagaucagccagaag

SEQ ID NO: 3207140 - RNA, 23 nt, Human
ccagagucuagcguagugcagca

SEQ ID NO: 3207141 - RNA, 23 nt, Human
ccagaguccccccacucccagca

SEQ ID NO: 3207142 - RNA, 22 nt, Human
ccagagucuagcguagugcagc

SEQ ID NO: 3207143 - RNA, 15 nt, Human
ccagaugcaccagcc

SEQ ID NO: 3207144 - RNA, 17 nt, Human
ccagaugcaccagcccu

SEQ ID NO: 3207145 - RNA, 18 nt, Human
ccagaugcaccagcccuu

SEQ ID NO: 3207146 - RNA, 15 nt, Human
ccagcagccagccaa

SEQ ID NO: 3207147 - RNA, 14 nt, Human
ccagcagccagcca

SEQ ID NO: 3207148 - RNA, 13 nt, Human
ccagcagccagcc

SEQ ID NO: 3207149 - RNA, 12 nt, Human
ccagcagccagc

SEQ ID NO: 3207150 - RNA, 13 nt, Human
ccagcaggcucuc

SEQ ID NO: 3207151 - RNA, 15 nt, Human
ccagcaggcucucag

SEQ ID NO: 3207152 - RNA, 20 nt, Human
ccagcagccuggacccugug

SEQ ID NO: 3207153 - RNA, 16 nt, Human
ccagcagccagccaaa

SEQ ID NO: 3207154 - RNA, 20 nt, Human
ccagcaggagggacagucuc

SEQ ID NO: 3207155 - RNA, 16 nt, Human
ccagcaggagggacag

SEQ ID NO: 3207156 - RNA, 13 nt, Human
ccagcaggaggga

SEQ ID NO: 3207157 - RNA, 12 nt, Human
ccagcaggaggg

SEQ ID NO: 3207158 - RNA, 11 nt, Human
ccagccccugg

SEQ ID NO: 3207159 - RNA, 17 nt, Human
ccagcaggcccauggga

SEQ ID NO: 3207160 - RNA, 12 nt, Human
ccagcaggccca

SEQ ID NO: 3207161 - RNA, 16 nt, Human
ccagcucaccagcccc

SEQ ID NO: 3207162 - RNA, 15 nt, Human
ccagcucaccagccc

SEQ ID NO: 3207163 - RNA, 16 nt, Human
ccagcuguucagcugg

SEQ ID NO: 3207164 - RNA, 22 nt, Human
ccagcucaccagccccagugcc

SEQ ID NO: 3207165 - RNA, 17 nt, Human
ccagcuguucagcuggu

SEQ ID NO: 3207166 - RNA, 19 nt, Human
ccagcuuaaaggggcuaga

SEQ ID NO: 3207167 - RNA, 13 nt, Human
ccaggaagccagc

SEQ ID NO: 3207168 - RNA, 12 nt, Human
ccaggaagccag

SEQ ID NO: 3207169 - RNA, 14 nt, Human
ccaggaaaggcucc

SEQ ID NO: 3207170 - RNA, 15 nt, Human
ccaggaaaggcucca

SEQ ID NO: 3207171 - RNA, 16 nt, Human
ccaggaaaggcuccag

SEQ ID NO: 3207172 - RNA, 15 nt, Human
ccaguucagcuuggg

SEQ ID NO: 3207173 - RNA, 21 nt, Human
ccaguuauggcuauaggugcu

SEQ ID NO: 3207174 - RNA, 20 nt, Human
ccaguuggguggaugccugg

SEQ ID NO: 3207175 - RNA, 19 nt, Human
ccaguuggguggaugccug

SEQ ID NO: 3207176 - RNA, 17 nt, Human
ccaguuggguggaugcc

SEQ ID NO: 3207177 - RNA, 15 nt, Human
ccaguuccucuuuug

SEQ ID NO: 3207178 - RNA, 16 nt, Human
ccaguuccucuuuugu

SEQ ID NO: 3207179 - RNA, 15 nt, Human
ccauguaugcauaau

SEQ ID NO: 3207180 - RNA, 11 nt, Human
ccauguaugca

SEQ ID NO: 3207181 - RNA, 21 nt, Human
ccauguauggccaggaaguag

SEQ ID NO: 3207182 - RNA, 18 nt, Human
ccauguauggccaggaag

SEQ ID NO: 3207183 - RNA, 15 nt, Human
ccauguauggccagg

SEQ ID NO: 3207184 - RNA, 14 nt, Human
ccauguauggccag

SEQ ID NO: 3207185 - RNA, 23 nt, Human
ccaugagccucagcauccuggca

SEQ ID NO: 3207186 - RNA, 21 nt, Human
ccaugagccucagcauccugg

SEQ ID NO: 3207187 - RNA, 14 nt, Human
ccaucccagcccca

SEQ ID NO: 3207188 - RNA, 13 nt, Human
ccaucccagcccc

SEQ ID NO: 3207189 - RNA, 15 nt, Human
ccaucccagccccaa

SEQ ID NO: 3207190 - RNA, 23 nt, Human
ccaguuggucccccuuccaugga

SEQ ID NO: 3207191 - RNA, 21 nt, Human
ccaguuguuagauuaagaaau

SEQ ID NO: 3207192 - RNA, 18 nt, Human
ccaguuuauuccagagcu

SEQ ID NO: 3207193 - RNA, 14 nt, Human
ccaucccugaaggc

SEQ ID NO: 3207194 - RNA, 15 nt, Human
ccaucccugaaggcc

SEQ ID NO: 3207195 - RNA, 17 nt, Human
ccaucccugaaggcccc

SEQ ID NO: 3207196 - RNA, 15 nt, Human
ccaugaauguuccug

SEQ ID NO: 3207197 - RNA, 18 nt, Human
ccagggcuggggcagccu

SEQ ID NO: 3207198 - RNA, 18 nt, Human
ccaggcuggcgugcagug

SEQ ID NO: 3207199 - RNA, 17 nt, Human
ccaggcuggcgugcagu

SEQ ID NO: 3207200 - RNA, 21 nt, Human
ccaggcuccuuuagcgcccag

SEQ ID NO: 3207201 - RNA, 20 nt, Human
ccaggcuccuuuagcgccca

SEQ ID NO: 3207202 - RNA, 16 nt, Human
ccaggcuggcgugcag

SEQ ID NO: 3207203 - RNA, 23 nt, Human
ccaggggugggacacccugugau

SEQ ID NO: 3207204 - RNA, 14 nt, Human
ccaggggugggaca

SEQ ID NO: 3207205 - RNA, 17 nt, Human
ccaggggugggacaccc

SEQ ID NO: 3207206 - RNA, 20 nt, Human
ccaggggaaaaucagccugc

SEQ ID NO: 3207207 - RNA, 13 nt, Human
ccaggggugggac

SEQ ID NO: 3207208 - RNA, 19 nt, Human
ccaggggaaaaucagccug

SEQ ID NO: 3207209 - RNA, 22 nt, Human
ccagggcuggggcagccucugg

SEQ ID NO: 3207210 - RNA, 21 nt, Human
ccagggcuggggcagccucug

SEQ ID NO: 3207211 - RNA, 13 nt, Human
ccaggcacaggca

SEQ ID NO: 3207212 - RNA, 12 nt, Human
ccaggcacaggc

SEQ ID NO: 3207213 - RNA, 17 nt, Human
ccaggcacaggcagggc

SEQ ID NO: 3207214 - RNA, 16 nt, Human
ccaggcacaggcaggg

SEQ ID NO: 3207215 - RNA, 15 nt, Human
ccaggcacaggcagg

SEQ ID NO: 3207216 - RNA, 14 nt, Human
ccaggcacaggcag

SEQ ID NO: 3207217 - RNA, 19 nt, Human
ccaggcacaggcagggcag

SEQ ID NO: 3207218 - RNA, 18 nt, Human
ccaggcacaggcagggca

SEQ ID NO: 3207219 - RNA, 20 nt, Human
ccaggcacaggcagggcagg

SEQ ID NO: 3207220 - RNA, 13 nt, Human
ccaggcaccuccc

SEQ ID NO: 3207221 - RNA, 18 nt, Human
ccaggcacugcugcccag

SEQ ID NO: 3207222 - RNA, 16 nt, Human
ccaggcacugcugccc

SEQ ID NO: 3207223 - RNA, 22 nt, Human
ccugaguaaaaaagcugugugc

SEQ ID NO: 3207224 - RNA, 22 nt, Human
ccugcacuugcagacucuacag

SEQ ID NO: 3207225 - RNA, 22 nt, Human
ccugcacuugggggcucagcaa

SEQ ID NO: 3207226 - RNA, 21 nt, Human
ccugcacuugggggcucagca

SEQ ID NO: 3207227 - RNA, 20 nt, Human
ccugcacuugggggcucagc

SEQ ID NO: 3207228 - RNA, 18 nt, Human
ccugcacuugggggcuca

SEQ ID NO: 3207229 - RNA, 16 nt, Human
ccugcacuugggggcu

SEQ ID NO: 3207230 - RNA, 15 nt, Human
ccugcacuugggggc

SEQ ID NO: 3207231 - RNA, 19 nt, Human
ccugcacuugcagacucua

SEQ ID NO: 3207232 - RNA, 15 nt, Human
ccugcagcucucaug

SEQ ID NO: 3207233 - RNA, 12 nt, Human
ccugcagcucuc

SEQ ID NO: 3207234 - RNA, 12 nt, Human
ccugcagcuccc

SEQ ID NO: 3207235 - RNA, 10 nt, Human
ccugcagcuc

SEQ ID NO: 3207236 - RNA, 22 nt, Human
ccucuugucuuccuauuucaga

SEQ ID NO: 3207237 - RNA, 22 nt, Human
ccugaccucaaaugaugugccu

SEQ ID NO: 3207238 - RNA, 19 nt, Human
ccucuugucuuccuauuuc

SEQ ID NO: 3207239 - RNA, 14 nt, Human
ccucuugcauuuca

SEQ ID NO: 3207240 - RNA, 13 nt, Human
ccucuuggguuca

SEQ ID NO: 3207241 - RNA, 14 nt, Human
ccugacucucagca

SEQ ID NO: 3207242 - RNA, 15 nt, Human
ccugacuucuguuua

SEQ ID NO: 3207243 - RNA, 16 nt, Human
ccugacugggggcaga

SEQ ID NO: 3207244 - RNA, 19 nt, Human
ccugacugggggcagacau

SEQ ID NO: 3207245 - RNA, 17 nt, Human
ccugacugggggcagac

SEQ ID NO: 3207246 - RNA, 23 nt, Human
ccucucugaaggaggccaccucc

SEQ ID NO: 3207247 - RNA, 22 nt, Human
ccucucugaaggaggccaccuc

SEQ ID NO: 3207248 - RNA, 20 nt, Human
ccucucugaaggaggccacc

SEQ ID NO: 3207249 - RNA, 18 nt, Human
ccucucugaaggaggcca

SEQ ID NO: 3207250 - RNA, 14 nt, Human
ccucucucaggcca

SEQ ID NO: 3207251 - RNA, 12 nt, Human
ccucucucacuc

SEQ ID NO: 3207252 - RNA, 13 nt, Human
ccucucucacucc

SEQ ID NO: 3207253 - RNA, 14 nt, Human
ccucucucacuccu

SEQ ID NO: 3207254 - RNA, 15 nt, Human
ccucucucacuccuu

SEQ ID NO: 3207255 - RNA, 17 nt, Human
ccucucucacuccuuga

SEQ ID NO: 3207256 - RNA, 12 nt, Human
ccucucucaggc

SEQ ID NO: 3207257 - RNA, 21 nt, Human
ccucugccugaagucacacag

SEQ ID NO: 3207258 - RNA, 12 nt, Human
ccucucugcccu

SEQ ID NO: 3207259 - RNA, 22 nt, Human
ccucugccugaagucacacagu

SEQ ID NO: 3207260 - RNA, 19 nt, Human
ccucugcucccccuuuucc

SEQ ID NO: 3207261 - RNA, 12 nt, Human
ccucugccuguc

SEQ ID NO: 3207262 - RNA, 15 nt, Human
ccucugcugcuggcu

SEQ ID NO: 3207263 - RNA, 16 nt, Human
ccucugcugcuggcug

SEQ ID NO: 3207264 - RNA, 17 nt, Human
ccucugcugcuggcugg

SEQ ID NO: 3207265 - RNA, 18 nt, Human
ccucugcugcuggcuggu

SEQ ID NO: 3207266 - RNA, 13 nt, Human
ccucugcugcugg

SEQ ID NO: 3207267 - RNA, 14 nt, Human
ccucugcugcuggc

SEQ ID NO: 3207268 - RNA, 15 nt, Human
ccucugcugauccuc

SEQ ID NO: 3207269 - RNA, 18 nt, Human
ccucugcugauccuccca

SEQ ID NO: 3207270 - RNA, 19 nt, Human
ccuggaggcucaaauuuug

SEQ ID NO: 3207271 - RNA, 20 nt, Human
ccuggaggcucaaauuuuga

SEQ ID NO: 3207272 - RNA, 16 nt, Human
ccuggaguucugguuc

SEQ ID NO: 3207273 - RNA, 17 nt, Human
ccuggaguucugguucc

SEQ ID NO: 3207274 - RNA, 15 nt, Human
ccuggaguucugguu

SEQ ID NO: 3207275 - RNA, 13 nt, Human
ccuggaugcagcc

SEQ ID NO: 3207276 - RNA, 21 nt, Human
ccuggauccaucaggccacuu

SEQ ID NO: 3207277 - RNA, 14 nt, Human
ccuggaugcagccu

SEQ ID NO: 3207278 - RNA, 17 nt, Human
ccuggaugcagccucac

SEQ ID NO: 3207279 - RNA, 19 nt, Human
ccuggaugcagccucacag

SEQ ID NO: 3207280 - RNA, 18 nt, Human
ccuggcacagggcagugg

SEQ ID NO: 3207281 - RNA, 17 nt, Human
ccuggcacagggcagug

SEQ ID NO: 3207282 - RNA, 16 nt, Human
ccuggcacagggcagu

SEQ ID NO: 3207283 - RNA, 14 nt, Human
ccugcugggugugg

SEQ ID NO: 3207284 - RNA, 20 nt, Human
ccugcuggguguggcgcagc

SEQ ID NO: 3207285 - RNA, 12 nt, Human
ccugcugggugu

SEQ ID NO: 3207286 - RNA, 21 nt, Human
ccugcuggccggacacccgac

SEQ ID NO: 3207287 - RNA, 16 nt, Human
ccugcccaggccccug

SEQ ID NO: 3207288 - RNA, 22 nt, Human
ccugcccaggccccugccaccc

SEQ ID NO: 3207289 - RNA, 15 nt, Human
ccugcccaggccccu

SEQ ID NO: 3207290 - RNA, 14 nt, Human
ccugcccaggcccc

SEQ ID NO: 3207291 - RNA, 14 nt, Human
ccuggccucugcac

SEQ ID NO: 3207292 - RNA, 15 nt, Human
ccuggccucugcacu

SEQ ID NO: 3207293 - RNA, 13 nt, Human
ccuggccugagcu

SEQ ID NO: 3207294 - RNA, 12 nt, Human
ccuggccucugc

SEQ ID NO: 3207295 - RNA, 16 nt, Human
cccuggcuccaggcca

SEQ ID NO: 3207296 - RNA, 13 nt, Human
cccuggcuccagg

SEQ ID NO: 3207297 - RNA, 17 nt, Human
cccuggcucccacaggc

SEQ ID NO: 3207298 - RNA, 13 nt, Human
cccuggcuuuuca

SEQ ID NO: 3207299 - RNA, 14 nt, Human
cccuggcuuccuua

SEQ ID NO: 3207300 - RNA, 17 nt, Human
cccuggcccccacaugg

SEQ ID NO: 3207301 - RNA, 12 nt, Human
cccuggccccca

SEQ ID NO: 3207302 - RNA, 14 nt, Human
cccuggcagccccu

SEQ ID NO: 3207303 - RNA, 16 nt, Human
cccuggcagccccugu

SEQ ID NO: 3207304 - RNA, 15 nt, Human
cccuggcaggcaggg

SEQ ID NO: 3207305 - RNA, 14 nt, Human
cccuggcaggcagg

SEQ ID NO: 3207306 - RNA, 15 nt, Human
cccuggcagcccgca

SEQ ID NO: 3207307 - RNA, 12 nt, Human
cccuggcagccc

SEQ ID NO: 3207308 - RNA, 13 nt, Human
cccuggcagcccc

SEQ ID NO: 3207309 - RNA, 16 nt, Human
cccugcccugugggcc

SEQ ID NO: 3207310 - RNA, 20 nt, Human
cccugcccugugggccccca

SEQ ID NO: 3207311 - RNA, 15 nt, Human
cccugcccugugggc

SEQ ID NO: 3207312 - RNA, 14 nt, Human
cccugcccuguggg

SEQ ID NO: 3207313 - RNA, 11 nt, Human
cccugcccugu

SEQ ID NO: 3207314 - RNA, 12 nt, Human
cccugcccugug

SEQ ID NO: 3207315 - RNA, 13 nt, Human
cccugcccugugg

SEQ ID NO: 3207316 - RNA, 23 nt, Human
cccuauuuaacagggucucuagu

SEQ ID NO: 3207317 - RNA, 21 nt, Human
cccuauuuaacagggucucua

SEQ ID NO: 3207318 - RNA, 24 nt, Human
cccugugccuuggugugcuguauc

SEQ ID NO: 3207319 - RNA, 13 nt, Human
cccugugccagcc

SEQ ID NO: 3207320 - RNA, 13 nt, Human
cccuucucuucca

SEQ ID NO: 3207321 - RNA, 12 nt, Human
cccuucucuucc

SEQ ID NO: 3207322 - RNA, 21 nt, Human
cccuucugacccaugcugccc

SEQ ID NO: 3207323 - RNA, 22 nt, Human
cccuucugacccaugcugcccu

SEQ ID NO: 3207324 - RNA, 23 nt, Human
cccuucugacccaugcugcccug

SEQ ID NO: 3207325 - RNA, 16 nt, Human
cccuucuaccuuccug

SEQ ID NO: 3207326 - RNA, 18 nt, Human
cccuucgcuccugugucu

SEQ ID NO: 3207327 - RNA, 16 nt, Human
cccuucgcuccugugu

SEQ ID NO: 3207328 - RNA, 16 nt, Human
ccgacccuugccgucu

SEQ ID NO: 3207329 - RNA, 17 nt, Human
ccgccaaggcuggggga

SEQ ID NO: 3207330 - RNA, 22 nt, Human
ccgaauauugagcaauauguca

SEQ ID NO: 3207331 - RNA, 14 nt, Human
ccgccacaucccuc

SEQ ID NO: 3207332 - RNA, 12 nt, Human
cccuucuucaug

SEQ ID NO: 3207333 - RNA, 18 nt, Human
ccgaccagacaccuugac

SEQ ID NO: 3207334 - RNA, 13 nt, Human
ccgacaagcacag

SEQ ID NO: 3207335 - RNA, 17 nt, Human
ccgaauagcugggacua

SEQ ID NO: 3207336 - RNA, 20 nt, Human
ccgaauagcugggacuacag

SEQ ID NO: 3207337 - RNA, 19 nt, Human
cccuucucuuccaggcagc

SEQ ID NO: 3207338 - RNA, 17 nt, Human
cccuucucuuccaggca

SEQ ID NO: 3207339 - RNA, 15 nt, Human
cccuucucuuccagg

SEQ ID NO: 3207340 - RNA, 14 nt, Human
cccuucucuuccag

SEQ ID NO: 3207341 - RNA, 20 nt, Human
ccgcccaggcuuagucacug

SEQ ID NO: 3207342 - RNA, 12 nt, Human
ccgcccaggcuu

SEQ ID NO: 3207343 - RNA, 16 nt, Human
ccgccaugcuccuggc

SEQ ID NO: 3207344 - RNA, 19 nt, Human
ccggcuaauuuuuguauuu

SEQ ID NO: 3207345 - RNA, 17 nt, Human
ccggcuaugggggcacu

SEQ ID NO: 3207346 - RNA, 23 nt, Human
ccggcuaugggggcacugaggac

SEQ ID NO: 3207347 - RNA, 22 nt, Human
ccggcuaugggggcacugagga

SEQ ID NO: 3207348 - RNA, 16 nt, Human
ccggcuaagcaggcgc

SEQ ID NO: 3207349 - RNA, 21 nt, Human
ccggcuaagcaggcgcaaggg

SEQ ID NO: 3207350 - RNA, 22 nt, Human
ccguaguaucagagauguccau

SEQ ID NO: 3207351 - RNA, 13 nt, Human
ccgucacauccca

SEQ ID NO: 3207352 - RNA, 11 nt, Human
ccgucucaggu

SEQ ID NO: 3207353 - RNA, 17 nt, Human
ccgucacuaccuggcug

SEQ ID NO: 3207354 - RNA, 18 nt, Human
ccuaaucacucagagcag

SEQ ID NO: 3207355 - RNA, 18 nt, Human
ccgucucugguuccuccc

SEQ ID NO: 3207356 - RNA, 19 nt, Human
ccuaagauguguucuuauu

SEQ ID NO: 3207357 - RNA, 21 nt, Human
ccuaagauauacuuguuuuug

SEQ ID NO: 3207358 - RNA, 19 nt, Human
ccuaggauucacaccccac

SEQ ID NO: 3207359 - RNA, 18 nt, Human
ccuaggauucacacccca

SEQ ID NO: 3207360 - RNA, 23 nt, Human
ccuaggauucacaccccaccugc

SEQ ID NO: 3207361 - RNA, 22 nt, Human
ccuaggauucacaccccaccug

SEQ ID NO: 3207362 - RNA, 20 nt, Human
ccuaggauucacaccccacc

SEQ ID NO: 3207363 - RNA, 12 nt, Human
ccuauuucagaa

SEQ ID NO: 3207364 - RNA, 11 nt, Human
ccuauuucaga

SEQ ID NO: 3207365 - RNA, 16 nt, Human
ccucaaccuccugggc

SEQ ID NO: 3207366 - RNA, 15 nt, Human
ccuauuucuugauaa

SEQ ID NO: 3207367 - RNA, 20 nt, Human
ccuauuuuugacauggaaau

SEQ ID NO: 3207368 - RNA, 15 nt, Human
ccucaacucuccucc

SEQ ID NO: 3207369 - RNA, 15 nt, Human
ccucaagagaaggca

SEQ ID NO: 3207370 - RNA, 22 nt, Human
ccucagccucccaaagugcugg

SEQ ID NO: 3207371 - RNA, 11 nt, Human
ccucagccucc

SEQ ID NO: 3207372 - RNA, 15 nt, Human
ccucccacagugcug

SEQ ID NO: 3207373 - RNA, 14 nt, Human
ccuccaaggccagg

SEQ ID NO: 3207374 - RNA, 20 nt, Human
ccucccaggcgccccuuccc

SEQ ID NO: 3207375 - RNA, 14 nt, Human
ccucccaggcgccc

SEQ ID NO: 3207376 - RNA, 12 nt, Human
ccucccagcucc

SEQ ID NO: 3207377 - RNA, 20 nt, Human
ccucauguccacugguucuu

SEQ ID NO: 3207378 - RNA, 15 nt, Human
ccucauguccacugg

SEQ ID NO: 3207379 - RNA, 13 nt, Human
ccucagccuccug

SEQ ID NO: 3207380 - RNA, 22 nt, Human
ccucagccucccgaauagcugg

SEQ ID NO: 3207381 - RNA, 23 nt, Human
ccucagccucccaaagugcuggg

SEQ ID NO: 3207382 - RNA, 22 nt, Human
ccucccaaggggcccaaauucu

SEQ ID NO: 3207383 - RNA, 23 nt, Human
ccucccaacucaccccagcccca

SEQ ID NO: 3207384 - RNA, 13 nt, Human
ccuccaaggccag

SEQ ID NO: 3207385 - RNA, 20 nt, Human
ccuccaagaccuucuccuuc

SEQ ID NO: 3207386 - RNA, 22 nt, Human
ccuccaagcuccaucuccacuc

SEQ ID NO: 3207387 - RNA, 21 nt, Human
ccuccaagcuccaucuccacu

SEQ ID NO: 3207388 - RNA, 18 nt, Human
cacugcauccuccgccuc

SEQ ID NO: 3207389 - RNA, 14 nt, Human
cacugcauccuccg

SEQ ID NO: 3207390 - RNA, 16 nt, Human
cacugcauccuccgcc

SEQ ID NO: 3207391 - RNA, 13 nt, Human
cacugcagccuca

SEQ ID NO: 3207392 - RNA, 21 nt, Human
cacugcagaacagcuucaugu

SEQ ID NO: 3207393 - RNA, 21 nt, Human
cacugcagaagacaguauggc

SEQ ID NO: 3207394 - RNA, 12 nt, Human
cacugcagccuc

SEQ ID NO: 3207395 - RNA, 20 nt, Human
cacugcacuccagccugggu

SEQ ID NO: 3207396 - RNA, 19 nt, Human
cacugcacuccagccuggg

SEQ ID NO: 3207397 - RNA, 18 nt, Human
cacugcacuccagccugg

SEQ ID NO: 3207398 - RNA, 15 nt, Human
cacugcacuccagcc

SEQ ID NO: 3207399 - RNA, 16 nt, Human
cacugcacuccagccu

SEQ ID NO: 3207400 - RNA, 19 nt, Human
cacugcacuauagccuagg

SEQ ID NO: 3207401 - RNA, 16 nt, Human
cacuuguagauuugau

SEQ ID NO: 3207402 - RNA, 17 nt, Human
cacuuguagauuugauu

SEQ ID NO: 3207403 - RNA, 21 nt, Human
cacuuagcuggagaugucucu

SEQ ID NO: 3207404 - RNA, 20 nt, Human
cacuuagccuuucuuuucuu

SEQ ID NO: 3207405 - RNA, 23 nt, Human
cacuuaggaacguaaucgugucc

SEQ ID NO: 3207406 - RNA, 24 nt, Human
cacuuagaaauugcauuuccugac

SEQ ID NO: 3207407 - RNA, 14 nt, Human
cacuuguagauuug

SEQ ID NO: 3207408 - RNA, 15 nt, Human
cacuuguagauuuga

SEQ ID NO: 3207409 - RNA, 23 nt, Human
cacugguggcccgacagccuggc

SEQ ID NO: 3207410 - RNA, 22 nt, Human
cacugguucuucuuggucucag

SEQ ID NO: 3207411 - RNA, 18 nt, Human
cacuuacacuuuaugcac

SEQ ID NO: 3207412 - RNA, 16 nt, Human
cacuuacacuuuaugc

SEQ ID NO: 3207413 - RNA, 21 nt, Human
cacuuaccugaguugaagagg

SEQ ID NO: 3207414 - RNA, 23 nt, Human
cacucuuggagccugcagagcug

SEQ ID NO: 3207415 - RNA, 14 nt, Human
cacucuuguuucuc

SEQ ID NO: 3207416 - RNA, 21 nt, Human
cacucuuguuucucccgugcu

SEQ ID NO: 3207417 - RNA, 15 nt, Human
cacucuuuaccuuua

SEQ ID NO: 3207418 - RNA, 19 nt, Human
cacucuuuaccuuuauuga

SEQ ID NO: 3207419 - RNA, 22 nt, Human
cacucuuggagccugcagagcu

SEQ ID NO: 3207420 - RNA, 21 nt, Human
cacucuuggagccugcagagc

SEQ ID NO: 3207421 - RNA, 14 nt, Human
cacuccccugcugg

SEQ ID NO: 3207422 - RNA, 12 nt, Human
cacuccccugcu

SEQ ID NO: 3207423 - RNA, 13 nt, Human
cacuccccugcug

SEQ ID NO: 3207424 - RNA, 22 nt, Human
cacugaauuuuuaugugugauu

SEQ ID NO: 3207425 - RNA, 20 nt, Human
cacugaaucuguacagagcc

SEQ ID NO: 3207426 - RNA, 17 nt, Human
cacugaaucuguacaga

SEQ ID NO: 3207427 - RNA, 16 nt, Human
cacugaaucuguacag

SEQ ID NO: 3207428 - RNA, 15 nt, Human
cacugaaucuguaca

SEQ ID NO: 3207429 - RNA, 14 nt, Human
cacugaaucuguac

SEQ ID NO: 3207430 - RNA, 13 nt, Human
cacugaaucugua

SEQ ID NO: 3207431 - RNA, 21 nt, Human
cacugaaguuugauaaauagu

SEQ ID NO: 3207432 - RNA, 15 nt, Human
cacugaaguuugaua

SEQ ID NO: 3207433 - RNA, 22 nt, Human
cacugaaguuugauaaauagug

SEQ ID NO: 3207434 - RNA, 15 nt, Human
cacugaaucccugua

SEQ ID NO: 3207435 - RNA, 21 nt, Human
cacuagggcagggacaggaua

SEQ ID NO: 3207436 - RNA, 20 nt, Human
cacuagggcagggacaggau

SEQ ID NO: 3207437 - RNA, 14 nt, Human
cacuaggcuucugg

SEQ ID NO: 3207438 - RNA, 16 nt, Human
cacuccagccugggug

SEQ ID NO: 3207439 - RNA, 11 nt, Human
cacuccagcug

SEQ ID NO: 3207440 - RNA, 12 nt, Human
cacuccagcugg

SEQ ID NO: 3207441 - RNA, 15 nt, Human
cacuccagcugggau

SEQ ID NO: 3207442 - RNA, 15 nt, Human
cacuccaagccagca

SEQ ID NO: 3207443 - RNA, 11 nt, Human
caccccagccc

SEQ ID NO: 3207444 - RNA, 16 nt, Human
caccccaccugcgcuu

SEQ ID NO: 3207445 - RNA, 13 nt, Human
caccccaccugcg

SEQ ID NO: 3207446 - RNA, 12 nt, Human
caccccaccugc

SEQ ID NO: 3207447 - RNA, 14 nt, Human
cacccucaggcagg

SEQ ID NO: 3207448 - RNA, 20 nt, Human
cacccuccccuucccagggc

SEQ ID NO: 3207449 - RNA, 16 nt, Human
cacccuccccuuccca

SEQ ID NO: 3207450 - RNA, 16 nt, Human
cacccuggggagaaag

SEQ ID NO: 3207451 - RNA, 15 nt, Human
cacccuggggagaaa

SEQ ID NO: 3207452 - RNA, 17 nt, Human
cacccugaaagcccuga

SEQ ID NO: 3207453 - RNA, 21 nt, Human
cacccugaacaacgagccuuu

SEQ ID NO: 3207454 - RNA, 15 nt, Human
caccugccccucaac

SEQ ID NO: 3207455 - RNA, 14 nt, Human
caccugccccucaa

SEQ ID NO: 3207456 - RNA, 13 nt, Human
caccucagccucc

SEQ ID NO: 3207457 - RNA, 12 nt, Human
caccucagccuc

SEQ ID NO: 3207458 - RNA, 14 nt, Human
caccucagccuccc

SEQ ID NO: 3207459 - RNA, 15 nt, Human
caccuaauuaauuuc

SEQ ID NO: 3207460 - RNA, 13 nt, Human
caccuuggcugca

SEQ ID NO: 3207461 - RNA, 15 nt, Human
caccuuggcucaagu

SEQ ID NO: 3207462 - RNA, 14 nt, Human
caccuuggcucaag

SEQ ID NO: 3207463 - RNA, 19 nt, Human
caccugccuguugggccag

SEQ ID NO: 3207464 - RNA, 17 nt, Human
caccugccuguugggcc

SEQ ID NO: 3207465 - RNA, 12 nt, Human
caauggcagccu

SEQ ID NO: 3207466 - RNA, 11 nt, Human
caauggcagcc

SEQ ID NO: 3207467 - RNA, 23 nt, Human
caauuuaaguguuggaaaaaauu

SEQ ID NO: 3207468 - RNA, 20 nt, Human
caauggagacugucucaaga

SEQ ID NO: 3207469 - RNA, 14 nt, Human
cacaagagcccagg

SEQ ID NO: 3207470 - RNA, 16 nt, Human
cacaagagcccaggcc

SEQ ID NO: 3207471 - RNA, 13 nt, Human
cacaagcuccaag

SEQ ID NO: 3207472 - RNA, 14 nt, Human
cacaagcuccaagc

SEQ ID NO: 3207473 - RNA, 15 nt, Human
cacaagcuccaagcu

SEQ ID NO: 3207474 - RNA, 17 nt, Human
cacaagcugcacccuca

SEQ ID NO: 3207475 - RNA, 23 nt, Human
cacaagcugcacccucaggcagg

SEQ ID NO: 3207476 - RNA, 17 nt, Human
cacaagcuccaagcucc

SEQ ID NO: 3207477 - RNA, 23 nt, Human
cacaagcuccaagcucccaggca

SEQ ID NO: 3207478 - RNA, 21 nt, Human
cacaagcuccaagcucccagg

SEQ ID NO: 3207479 - RNA, 20 nt, Human
cacacagcucuguccuggga

SEQ ID NO: 3207480 - RNA, 17 nt, Human
cacacagcucuguccug

SEQ ID NO: 3207481 - RNA, 14 nt, Human
cacagccugcacuu

SEQ ID NO: 3207482 - RNA, 13 nt, Human
cacagccugcacu

SEQ ID NO: 3207483 - RNA, 23 nt, Human
cacagccugcacuugggggcuca

SEQ ID NO: 3207484 - RNA, 22 nt, Human
cacagccugcacuugggggcuc

SEQ ID NO: 3207485 - RNA, 22 nt, Human
cacaggcccuuccucuccacug

SEQ ID NO: 3207486 - RNA, 23 nt, Human
cacaggcccuuccucuccacugc

SEQ ID NO: 3207487 - RNA, 17 nt, Human
cacaggggaaaagagga

SEQ ID NO: 3207488 - RNA, 18 nt, Human
cacaggggaaaagaggag

SEQ ID NO: 3207489 - RNA, 19 nt, Human
cacaggggaaaagaggagu

SEQ ID NO: 3207490 - RNA, 17 nt, Human
cacaggggacacccaga

SEQ ID NO: 3207491 - RNA, 15 nt, Human
cacaggugcccgcca

SEQ ID NO: 3207492 - RNA, 19 nt, Human
cacaguauuacuucugcua

SEQ ID NO: 3207493 - RNA, 17 nt, Human
cacagucagguugaaga

SEQ ID NO: 3207494 - RNA, 14 nt, Human
cacagucagguuga

SEQ ID NO: 3207495 - RNA, 21 nt, Human
cacaguauuacuucugcuaca

SEQ ID NO: 3207496 - RNA, 20 nt, Human
cacaguauuacuucugcuac

SEQ ID NO: 3207497 - RNA, 14 nt, Human
cacaguaaaaauaa

SEQ ID NO: 3207498 - RNA, 15 nt, Human
cacaguaaaaauaaa

SEQ ID NO: 3207499 - RNA, 16 nt, Human
cacaguaaaaauaaaa

SEQ ID NO: 3207500 - RNA, 17 nt, Human
cacaguaaaaauaaaau

SEQ ID NO: 3207501 - RNA, 18 nt, Human
cacaggugcccgccacca

SEQ ID NO: 3207502 - RNA, 22 nt, Human
cacacaucaucuguaagcuguu

SEQ ID NO: 3207503 - RNA, 21 nt, Human
cacacaucaucuguaagcugu

SEQ ID NO: 3207504 - RNA, 15 nt, Human
cacacaucaucugua

SEQ ID NO: 3207505 - RNA, 14 nt, Human
cacacaucaucugu

SEQ ID NO: 3207506 - RNA, 20 nt, Human
cacacaugagcaucaggcca

SEQ ID NO: 3207507 - RNA, 23 nt, Human
cacacagugagucgaggacaggg

SEQ ID NO: 3207508 - RNA, 21 nt, Human
cacacagugagucgaggacag

SEQ ID NO: 3207509 - RNA, 15 nt, Human
cacacauacacacac

SEQ ID NO: 3207510 - RNA, 16 nt, Human
cacacagcucuguccu

SEQ ID NO: 3207511 - RNA, 23 nt, Human
cacacaguauuacuucugcuaca

SEQ ID NO: 3207512 - RNA, 20 nt, Human
cacacaguauuacuucugcu

SEQ ID NO: 3207513 - RNA, 18 nt, Human
cacacagugagucgagga

SEQ ID NO: 3207514 - RNA, 23 nt, Human
cacagaaaauggaagacagcucu

SEQ ID NO: 3207515 - RNA, 19 nt, Human
cacagaaaauucuucucca

SEQ ID NO: 3207516 - RNA, 13 nt, Human
cacagacccugcc

SEQ ID NO: 3207517 - RNA, 11 nt, Human
cacagccucug

SEQ ID NO: 3207518 - RNA, 21 nt, Human
cacacaugagcaucaggccag

SEQ ID NO: 3207519 - RNA, 22 nt, Human
cacacaugagcaucaggccagg

SEQ ID NO: 3207520 - RNA, 15 nt, Human
cacacaugcaaggga

SEQ ID NO: 3207521 - RNA, 18 nt, Human
cacagaaaauggaagaca

SEQ ID NO: 3207522 - RNA, 19 nt, Human
cacagaaaauggaagacag

SEQ ID NO: 3207523 - RNA, 20 nt, Human
cacagaaaauggaagacagc

SEQ ID NO: 3207524 - RNA, 22 nt, Human
cacagaaaauggaagacagcuc

SEQ ID NO: 3207525 - RNA, 14 nt, Human
caaguccaagcaua

SEQ ID NO: 3207526 - RNA, 13 nt, Human
caagucaagugaa

SEQ ID NO: 3207527 - RNA, 17 nt, Human
caagucaagugaaaaag

SEQ ID NO: 3207528 - RNA, 21 nt, Human
caaguaugaauaaagacaccu

SEQ ID NO: 3207529 - RNA, 19 nt, Human
caaguaugaauaaagacac

SEQ ID NO: 3207530 - RNA, 15 nt, Human
caaggccaaaggaag

SEQ ID NO: 3207531 - RNA, 16 nt, Human
caaggccaaaggaagc

SEQ ID NO: 3207532 - RNA, 17 nt, Human
caaggccaaaggaagca

SEQ ID NO: 3207533 - RNA, 18 nt, Human
caaggccaaaggaagcac

SEQ ID NO: 3207534 - RNA, 16 nt, Human
caaguaugaauaaaga

SEQ ID NO: 3207535 - RNA, 17 nt, Human
caaguaguucuguauuu

SEQ ID NO: 3207536 - RNA, 13 nt, Human
caaguaguucugu

SEQ ID NO: 3207537 - RNA, 18 nt, Human
caaguaguucuguauuug

SEQ ID NO: 3207538 - RNA, 19 nt, Human
caaguaguucuguauuuga

SEQ ID NO: 3207539 - RNA, 20 nt, Human
caaguaguucuguauuugaa

SEQ ID NO: 3207540 - RNA, 21 nt, Human
caaguaguucuguauuugaaa

SEQ ID NO: 3207541 - RNA, 23 nt, Human
caaguaguucuguauuugaaagu

SEQ ID NO: 3207542 - RNA, 14 nt, Human
caaguauaaacuuu

SEQ ID NO: 3207543 - RNA, 14 nt, Human
caagcugcacccuc

SEQ ID NO: 3207544 - RNA, 18 nt, Human
caagcugcacccucaggc

SEQ ID NO: 3207545 - RNA, 13 nt, Human
caagcugcacccu

SEQ ID NO: 3207546 - RNA, 14 nt, Human
caagcucugcuccu

SEQ ID NO: 3207547 - RNA, 12 nt, Human
caagcuccaagc

SEQ ID NO: 3207548 - RNA, 13 nt, Human
caagcucugcucc

SEQ ID NO: 3207549 - RNA, 19 nt, Human
caagcucuaucaccaagga

SEQ ID NO: 3207550 - RNA, 18 nt, Human
caagcucacuugcuuuag

SEQ ID NO: 3207551 - RNA, 14 nt, Human
caagcucacuugcu

SEQ ID NO: 3207552 - RNA, 17 nt, Human
caauaaagcaauaagaa

SEQ ID NO: 3207553 - RNA, 11 nt, Human
caauaaagcaa

SEQ ID NO: 3207554 - RNA, 20 nt, Human
caaguccccgucugccuggc

SEQ ID NO: 3207555 - RNA, 16 nt, Human
caauaaaguauaaugu

SEQ ID NO: 3207556 - RNA, 18 nt, Human
caauaaaguauaauguuu

SEQ ID NO: 3207557 - RNA, 20 nt, Human
caauaaaguauaauguuuau

SEQ ID NO: 3207558 - RNA, 18 nt, Human
caagcgugagccacugca

SEQ ID NO: 3207559 - RNA, 17 nt, Human
auugauaaccauagcau

SEQ ID NO: 3207560 - RNA, 21 nt, Human
auugauaagaaccuuuugagu

SEQ ID NO: 3207561 - RNA, 22 nt, Human
auugagucauuuuauauaugaa

SEQ ID NO: 3207562 - RNA, 17 nt, Human
auugaguuccaguugaa

SEQ ID NO: 3207563 - RNA, 17 nt, Human
auugaguucuuccugua

SEQ ID NO: 3207564 - RNA, 19 nt, Human
auugaguucuuccuguaau

SEQ ID NO: 3207565 - RNA, 20 nt, Human
auugaguucuuccuguaauc

SEQ ID NO: 3207566 - RNA, 22 nt, Human
auugaguucuuccuguaaucuu

SEQ ID NO: 3207567 - RNA, 22 nt, Human
auugcuacuguccuacccaccc

SEQ ID NO: 3207568 - RNA, 20 nt, Human
auugcuacuguccuacccac

SEQ ID NO: 3207569 - RNA, 17 nt, Human
auugauaugcuuauaca

SEQ ID NO: 3207570 - RNA, 20 nt, Human
auugauaucuccaugaugau

SEQ ID NO: 3207571 - RNA, 15 nt, Human
auugcuacuguccua

SEQ ID NO: 3207572 - RNA, 14 nt, Human
auugcuacuguccu

SEQ ID NO: 3207573 - RNA, 13 nt, Human
auugauagaauaa

SEQ ID NO: 3207574 - RNA, 15 nt, Human
auucuucugaucacu

SEQ ID NO: 3207575 - RNA, 12 nt, Human
auucuucugauc

SEQ ID NO: 3207576 - RNA, 11 nt, Human
auucuuuccug

SEQ ID NO: 3207577 - RNA, 22 nt, Human
auucuugaugaaaagcuuuguu

SEQ ID NO: 3207578 - RNA, 21 nt, Human
auucuugaugaaaagcuuugu

SEQ ID NO: 3207579 - RNA, 17 nt, Human
auucuugaucaguaguu

SEQ ID NO: 3207580 - RNA, 21 nt, Human
auucuugaucaguaguuugca

SEQ ID NO: 3207581 - RNA, 19 nt, Human
auucuugaucaguaguuug

SEQ ID NO: 3207582 - RNA, 18 nt, Human
auucuugaugaaaagcuu

SEQ ID NO: 3207583 - RNA, 14 nt, Human
auucuugaugaaaa

SEQ ID NO: 3207584 - RNA, 10 nt, Human
auucuugaug

SEQ ID NO: 3207585 - RNA, 22 nt, Human
auucuugaucaguaguuugcau

SEQ ID NO: 3207586 - RNA, 12 nt, Human
auucuucugcuu

SEQ ID NO: 3207587 - RNA, 11 nt, Human
auucuucugcu

SEQ ID NO: 3207588 - RNA, 23 nt, Human
auucugaauuaauuaauuuggag

SEQ ID NO: 3207589 - RNA, 12 nt, Human
auucucuuuuca

SEQ ID NO: 3207590 - RNA, 14 nt, Human
auucugaaguuaua

SEQ ID NO: 3207591 - RNA, 12 nt, Human
auucugaaguua

SEQ ID NO: 3207592 - RNA, 22 nt, Human
auucugaaguuauauuuccuau

SEQ ID NO: 3207593 - RNA, 20 nt, Human
auucugaaguuauauuuccu

SEQ ID NO: 3207594 - RNA, 18 nt, Human
auucugaaguuauauuuc

SEQ ID NO: 3207595 - RNA, 15 nt, Human
auucugaaguuauau

SEQ ID NO: 3207596 - RNA, 13 nt, Human
auucauacuuaaa

SEQ ID NO: 3207597 - RNA, 14 nt, Human
auucauacuuaaaa

SEQ ID NO: 3207598 - RNA, 20 nt, Human
auucauacuuaaaaauuuau

SEQ ID NO: 3207599 - RNA, 21 nt, Human
auucauacuuaaaaauuuauu

SEQ ID NO: 3207600 - RNA, 20 nt, Human
auuguaauguugugaauaau

SEQ ID NO: 3207601 - RNA, 17 nt, Human
auuguaauguugugaau

SEQ ID NO: 3207602 - RNA, 14 nt, Human
auuguaauguugug

SEQ ID NO: 3207603 - RNA, 12 nt, Human
auuguaauguug

SEQ ID NO: 3207604 - RNA, 15 nt, Human
auuguaauauagaaa

SEQ ID NO: 3207605 - RNA, 22 nt, Human
auuguaauauagaaaaaaacau

SEQ ID NO: 3207606 - RNA, 13 nt, Human
auuguaaaauggu

SEQ ID NO: 3207607 - RNA, 14 nt, Human
auuguaaaauggug

SEQ ID NO: 3207608 - RNA, 18 nt, Human
auuguaauuaauaauaga

SEQ ID NO: 3207609 - RNA, 23 nt, Human
auuguaauguugugaauaauuac

SEQ ID NO: 3207610 - RNA, 22 nt, Human
auuguaauguugugaauaauua

SEQ ID NO: 3207611 - RNA, 14 nt, Human
auugugugaacuug

SEQ ID NO: 3207612 - RNA, 20 nt, Human
auugugugauauuucagaaa

SEQ ID NO: 3207613 - RNA, 18 nt, Human
auugugugauauuucaga

SEQ ID NO: 3207614 - RNA, 21 nt, Human
auugugucucuugguccugcu

SEQ ID NO: 3207615 - RNA, 23 nt, Human
auugugucucuugguccugcugc

SEQ ID NO: 3207616 - RNA, 16 nt, Human
auuguuagucucuuga

SEQ ID NO: 3207617 - RNA, 15 nt, Human
auuguucaauuccca

SEQ ID NO: 3207618 - RNA, 15 nt, Human
auuguuagauguuug

SEQ ID NO: 3207619 - RNA, 16 nt, Human
auuguuagauguuugu

SEQ ID NO: 3207620 - RNA, 15 nt, Human
auuguuacuccauau

SEQ ID NO: 3207621 - RNA, 13 nt, Human
auuguuauuaaau

SEQ ID NO: 3207622 - RNA, 14 nt, Human
auuguuauuaaaug

SEQ ID NO: 3207623 - RNA, 15 nt, Human
auugcugauggugca

SEQ ID NO: 3207624 - RNA, 16 nt, Human
auugcugauggugcaa

SEQ ID NO: 3207625 - RNA, 18 nt, Human
auugcugauggugcaaug

SEQ ID NO: 3207626 - RNA, 19 nt, Human
auugcugauggugcaauga

SEQ ID NO: 3207627 - RNA, 20 nt, Human
auugcuccugcucagaucuu

SEQ ID NO: 3207628 - RNA, 22 nt, Human
auugcucaucucaguccucaaa

SEQ ID NO: 3207629 - RNA, 13 nt, Human
auugcucacaguu

SEQ ID NO: 3207630 - RNA, 21 nt, Human
auugcucacaguuauuacaua

SEQ ID NO: 3207631 - RNA, 17 nt, Human
auugcucacaguuauua

SEQ ID NO: 3207632 - RNA, 12 nt, Human
auugcuccuuga

SEQ ID NO: 3207633 - RNA, 21 nt, Human
auugcugaauggaguuaaacu

SEQ ID NO: 3207634 - RNA, 14 nt, Human
auugcuugagcuca

SEQ ID NO: 3207635 - RNA, 14 nt, Human
auugcuucuucuga

SEQ ID NO: 3207636 - RNA, 13 nt, Human
auugcuucuucug

SEQ ID NO: 3207637 - RNA, 10 nt, Human
auugcuucuu

SEQ ID NO: 3207638 - RNA, 23 nt, Human
auugcugauggugcaaugaccuu

SEQ ID NO: 3207639 - RNA, 12 nt, Human
auugcugcuuga

SEQ ID NO: 3207640 - RNA, 22 nt, Human
auuguuguccgguuuacuuuaa

SEQ ID NO: 3207641 - RNA, 20 nt, Human
auuguugcauagguuagaua

SEQ ID NO: 3207642 - RNA, 19 nt, Human
auucauaaugacuuaagca

SEQ ID NO: 3207643 - RNA, 19 nt, Human
auucauagcagcuuauuca

SEQ ID NO: 3207644 - RNA, 22 nt, Human
auucauagcagcuuauucacaa

SEQ ID NO: 3207645 - RNA, 14 nt, Human
auucauaaugacuu

SEQ ID NO: 3207646 - RNA, 15 nt, Human
auucauaaugacuua

SEQ ID NO: 3207647 - RNA, 16 nt, Human
auuagggagagaagau

SEQ ID NO: 3207648 - RNA, 17 nt, Human
auuagggcucuaauuuc

SEQ ID NO: 3207649 - RNA, 15 nt, Human
auuagguauaucucc

SEQ ID NO: 3207650 - RNA, 19 nt, Human
auucacaagacccaaaagg

SEQ ID NO: 3207651 - RNA, 19 nt, Human
auucacaaguuaagauucu

SEQ ID NO: 3207652 - RNA, 21 nt, Human
auucacaaguuaagauucuug

SEQ ID NO: 3207653 - RNA, 23 nt, Human
auucacaaguuaagauucuuggu

SEQ ID NO: 3207654 - RNA, 16 nt, Human
auucacacuugaacca

SEQ ID NO: 3207655 - RNA, 18 nt, Human
auucacaccccaccugcg

SEQ ID NO: 3207656 - RNA, 17 nt, Human
auucacaccccaccugc

SEQ ID NO: 3207657 - RNA, 16 nt, Human
auucacaccccaccug

SEQ ID NO: 3207658 - RNA, 15 nt, Human
auucacaccccaccu

SEQ ID NO: 3207659 - RNA, 14 nt, Human
auucacaccccacc

SEQ ID NO: 3207660 - RNA, 14 nt, Human
auucacaauuauuc

SEQ ID NO: 3207661 - RNA, 17 nt, Human
auucaauuaaagaaaua

SEQ ID NO: 3207662 - RNA, 12 nt, Human
auucaauuaaag

SEQ ID NO: 3207663 - RNA, 22 nt, Human
auucaauuaaagaaauaauuuu

SEQ ID NO: 3207664 - RNA, 21 nt, Human
auucaauuaaagaaauaauuu

SEQ ID NO: 3207665 - RNA, 19 nt, Human
auucaauuaaagaaauaau

SEQ ID NO: 3207666 - RNA, 18 nt, Human
auucaauuaaagaaauaa

SEQ ID NO: 3207667 - RNA, 18 nt, Human
auuacaacugaccaaguu

SEQ ID NO: 3207668 - RNA, 20 nt, Human
auuacaagccuggaaaaaaa

SEQ ID NO: 3207669 - RNA, 16 nt, Human
auuaauuaucgugucu

SEQ ID NO: 3207670 - RNA, 17 nt, Human
auuaauguugauuucua

SEQ ID NO: 3207671 - RNA, 16 nt, Human
auuaauguugauuucu

SEQ ID NO: 3207672 - RNA, 15 nt, Human
auuaauuaauuugga

SEQ ID NO: 3207673 - RNA, 16 nt, Human
auuaauuaauuuggag

SEQ ID NO: 3207674 - RNA, 14 nt, Human
auuaauucucuuuc

SEQ ID NO: 3207675 - RNA, 12 nt, Human
auuaauguugau

SEQ ID NO: 3207676 - RNA, 15 nt, Human
auuaauguugauuuc

SEQ ID NO: 3207677 - RNA, 14 nt, Human
auuaauguugauuu

SEQ ID NO: 3207678 - RNA, 15 nt, Human
auuacagugccuaaa

SEQ ID NO: 3207679 - RNA, 23 nt, Human
auuacagucucacucagaacugu

SEQ ID NO: 3207680 - RNA, 19 nt, Human
auuacagugccuaaaauaa

SEQ ID NO: 3207681 - RNA, 18 nt, Human
auuacagugccuaaaaua

SEQ ID NO: 3207682 - RNA, 16 nt, Human
auuacaggugugaacc

SEQ ID NO: 3207683 - RNA, 17 nt, Human
auuacaggaaguacugg

SEQ ID NO: 3207684 - RNA, 17 nt, Human
auuagcaguuugcuuug

SEQ ID NO: 3207685 - RNA, 20 nt, Human
auuagauuuuaaaacuucau

SEQ ID NO: 3207686 - RNA, 23 nt, Human
auuagauuucucauuugccaaua

SEQ ID NO: 3207687 - RNA, 22 nt, Human
auuagcaaaaaaaguuguauga

SEQ ID NO: 3207688 - RNA, 21 nt, Human
auuagcaaaaaaaguuguaug

SEQ ID NO: 3207689 - RNA, 20 nt, Human
auuagcaaaaaaaguuguau

SEQ ID NO: 3207690 - RNA, 19 nt, Human
auuagcaaaaaaaguugua

SEQ ID NO: 3207691 - RNA, 18 nt, Human
auuagcaaaaaaaguugu

SEQ ID NO: 3207692 - RNA, 17 nt, Human
auuagcaaaaaaaguug

SEQ ID NO: 3207693 - RNA, 16 nt, Human
auuagcaaaaaaaguu

SEQ ID NO: 3207694 - RNA, 14 nt, Human
auuagcaaaaaaag

SEQ ID NO: 3207695 - RNA, 20 nt, Human
auuagcgacaacagauugga

SEQ ID NO: 3207696 - RNA, 15 nt, Human
auuagcccugcauuu

SEQ ID NO: 3207697 - RNA, 17 nt, Human
auuagcccugcauuuuc

SEQ ID NO: 3207698 - RNA, 22 nt, Human
auguuugugcaguaacuuggga

SEQ ID NO: 3207699 - RNA, 23 nt, Human
auguuugggagacugcugaguca

SEQ ID NO: 3207700 - RNA, 19 nt, Human
auguuugugcaguaacuug

SEQ ID NO: 3207701 - RNA, 17 nt, Human
auguuugugcaguaacu

SEQ ID NO: 3207702 - RNA, 18 nt, Human
auguuuguacaagauugu

SEQ ID NO: 3207703 - RNA, 14 nt, Human
auguuuguacaaga

SEQ ID NO: 3207704 - RNA, 17 nt, Human
auguuugguaccaagaa

SEQ ID NO: 3207705 - RNA, 16 nt, Human
auuugcuaugagcugg

SEQ ID NO: 3207706 - RNA, 20 nt, Human
auuugcuaugagcuggggau

SEQ ID NO: 3207707 - RNA, 21 nt, Human
auuugccauagaguacacugc

SEQ ID NO: 3207708 - RNA, 16 nt, Human
auuugccaauaauaau

SEQ ID NO: 3207709 - RNA, 13 nt, Human
auuugccauagag

SEQ ID NO: 3207710 - RNA, 15 nt, Human
auuugccauagagua

SEQ ID NO: 3207711 - RNA, 15 nt, Human
auuugccaauaauaa

SEQ ID NO: 3207712 - RNA, 19 nt, Human
auuugauuuuuauuauuaa

SEQ ID NO: 3207713 - RNA, 16 nt, Human
auuugauuuguacaga

SEQ ID NO: 3207714 - RNA, 22 nt, Human
auuugauuuauuaacuuaauaa

SEQ ID NO: 3207715 - RNA, 17 nt, Human
auuugauuuauuaacuu

SEQ ID NO: 3207716 - RNA, 18 nt, Human
auuugauuuauuaacuua

SEQ ID NO: 3207717 - RNA, 14 nt, Human
auuugauuuauuaa

SEQ ID NO: 3207718 - RNA, 15 nt, Human
auuugauuuauuaac

SEQ ID NO: 3207719 - RNA, 16 nt, Human
auuugcagcuuccaau

SEQ ID NO: 3207720 - RNA, 9 nt, Human
auuugcagu

SEQ ID NO: 3207721 - RNA, 10 nt, Human
auuugcaguc

SEQ ID NO: 3207722 - RNA, 22 nt, Human
auuuguggggagggauuugggg

SEQ ID NO: 3207723 - RNA, 15 nt, Human
auuuguggugauuug

SEQ ID NO: 3207724 - RNA, 15 nt, Human
auuugugugcuaaac

SEQ ID NO: 3207725 - RNA, 14 nt, Human
auuugugugcuaaa

SEQ ID NO: 3207726 - RNA, 16 nt, Human
auuuguugauucucuc

SEQ ID NO: 3207727 - RNA, 20 nt, Human
auuuguuggggcuuuacaua

SEQ ID NO: 3207728 - RNA, 18 nt, Human
auuuguugauucucucca

SEQ ID NO: 3207729 - RNA, 14 nt, Human
auuuguuuaaagua

SEQ ID NO: 3207730 - RNA, 18 nt, Human
auuuuauaguguguugug

SEQ ID NO: 3207731 - RNA, 16 nt, Human
auuuguuuccagcaug

SEQ ID NO: 3207732 - RNA, 23 nt, Human
auuuguuugguuauagugcaaua

SEQ ID NO: 3207733 - RNA, 21 nt, Human
auuuguuugguuauagugcaa

SEQ ID NO: 3207734 - RNA, 13 nt, Human
auuugcuccuuuc

SEQ ID NO: 3207735 - RNA, 15 nt, Human
auuugcuaucucuau

SEQ ID NO: 3207736 - RNA, 21 nt, Human
auuugcugacaaccauuaaag

SEQ ID NO: 3207737 - RNA, 22 nt, Human
auuugcugacaaccauuaaagu

SEQ ID NO: 3207738 - RNA, 23 nt, Human
auuugcugacaaccauuaaaguc

SEQ ID NO: 3207739 - RNA, 11 nt, Human
auuugcugcug

SEQ ID NO: 3207740 - RNA, 12 nt, Human
auuugcugcuga

SEQ ID NO: 3207741 - RNA, 22 nt, Human
auuugcuuaaauauccauauua

SEQ ID NO: 3207742 - RNA, 12 nt, Human
auuuggaaaaua

SEQ ID NO: 3207743 - RNA, 13 nt, Human
auuuggaaaauaa

SEQ ID NO: 3207744 - RNA, 15 nt, Human
auuuggaaacuaaua

SEQ ID NO: 3207745 - RNA, 16 nt, Human
auuuggaaacuaauaa

SEQ ID NO: 3207746 - RNA, 17 nt, Human
auuuggaaacuaauaaa

SEQ ID NO: 3207747 - RNA, 18 nt, Human
auuuggaaacuaauaaaa

SEQ ID NO: 3207748 - RNA, 19 nt, Human
auuuggaaacuaauaaaau

SEQ ID NO: 3207749 - RNA, 20 nt, Human
auuuggaaacuaauaaaaua

SEQ ID NO: 3207750 - RNA, 21 nt, Human
auuuggaaacuaauaaaauau

SEQ ID NO: 3207751 - RNA, 22 nt, Human
auuuggaaacuaauaaaauauu

SEQ ID NO: 3207752 - RNA, 23 nt, Human
auuuggaaacuaauaaaauauuu

SEQ ID NO: 3207753 - RNA, 13 nt, Human
auuugcuuuggaa

SEQ ID NO: 3207754 - RNA, 15 nt, Human
auuugcucauaugaa

SEQ ID NO: 3207755 - RNA, 15 nt, Human
auuugcuuuggaagu

SEQ ID NO: 3207756 - RNA, 14 nt, Human
auuugcuuuggaag

SEQ ID NO: 3207757 - RNA, 17 nt, Human
auuugugauguacugua

SEQ ID NO: 3207758 - RNA, 14 nt, Human
auuugugccagaau

SEQ ID NO: 3207759 - RNA, 15 nt, Human
caaacagaggccgcc

SEQ ID NO: 3207760 - RNA, 18 nt, Human
caaacagauucuuuuaug

SEQ ID NO: 3207761 - RNA, 16 nt, Human
caaacagaugcucuga

SEQ ID NO: 3207762 - RNA, 19 nt, Human
caaaaggcuugcagaacuu

SEQ ID NO: 3207763 - RNA, 15 nt, Human
caaaaggcuugcaga

SEQ ID NO: 3207764 - RNA, 17 nt, Human
caaacccacccuuucua

SEQ ID NO: 3207765 - RNA, 21 nt, Human
caaaccaucauugaaaucuuu

SEQ ID NO: 3207766 - RNA, 19 nt, Human
caaaccaucauugaaaucu

SEQ ID NO: 3207767 - RNA, 15 nt, Human
caaaaggcagaagca

SEQ ID NO: 3207768 - RNA, 21 nt, Human
caaaaggcauuucccacccug

SEQ ID NO: 3207769 - RNA, 17 nt, Human
caaaaggcauuucccac

SEQ ID NO: 3207770 - RNA, 18 nt, Human
caaaagaugcuucucacu

SEQ ID NO: 3207771 - RNA, 20 nt, Human
caaaaaaaaaaaaaaauuag

SEQ ID NO: 3207772 - RNA, 18 nt, Human
auuuuuuuuuuuaaucua

SEQ ID NO: 3207773 - RNA, 21 nt, Human
auuuuuuuuuuuaaucuacug

SEQ ID NO: 3207774 - RNA, 16 nt, Human
caaaagaugcuucuca

SEQ ID NO: 3207775 - RNA, 20 nt, Human
caaaagaguguaaaauauuu

SEQ ID NO: 3207776 - RNA, 19 nt, Human
caaaagaguguaaaauauu

SEQ ID NO: 3207777 - RNA, 18 nt, Human
caaaagaguguaaaauau

SEQ ID NO: 3207778 - RNA, 16 nt, Human
caaaagaguguaaaau

SEQ ID NO: 3207779 - RNA, 15 nt, Human
caaaagaguguaaaa

SEQ ID NO: 3207780 - RNA, 23 nt, Human
auuuuuuuuuccuucagugccuu

SEQ ID NO: 3207781 - RNA, 16 nt, Human
auuuuuuuuucuuuca

SEQ ID NO: 3207782 - RNA, 17 nt, Human
caacaaucccaaggccc

SEQ ID NO: 3207783 - RNA, 14 nt, Human
caacaauucagcau

SEQ ID NO: 3207784 - RNA, 23 nt, Human
caacacgagcaggcuacugucag

SEQ ID NO: 3207785 - RNA, 15 nt, Human
caacacgagcaggcu

SEQ ID NO: 3207786 - RNA, 18 nt, Human
caacaccaucacagcuug

SEQ ID NO: 3207787 - RNA, 22 nt, Human
caacaccaucacagcuuguuuu

SEQ ID NO: 3207788 - RNA, 21 nt, Human
caaauggaaaugggcagagca

SEQ ID NO: 3207789 - RNA, 19 nt, Human
caacaagaauaaaggcagc

SEQ ID NO: 3207790 - RNA, 16 nt, Human
caacaaggcaaaaaca

SEQ ID NO: 3207791 - RNA, 19 nt, Human
caacaaggcuugcugcaga

SEQ ID NO: 3207792 - RNA, 20 nt, Human
caaauggaaaugggcagagc

SEQ ID NO: 3207793 - RNA, 21 nt, Human
caaauggaaacagaggaccag

SEQ ID NO: 3207794 - RNA, 20 nt, Human
caaauggaaacagaggacca

SEQ ID NO: 3207795 - RNA, 14 nt, Human
caaauggaaacaga

SEQ ID NO: 3207796 - RNA, 18 nt, Human
caaauccugcauuuagau

SEQ ID NO: 3207797 - RNA, 15 nt, Human
caaagcagugcaugc

SEQ ID NO: 3207798 - RNA, 17 nt, Human
caaagcagugcaugcug

SEQ ID NO: 3207799 - RNA, 15 nt, Human
caaaguacagaauuu

SEQ ID NO: 3207800 - RNA, 16 nt, Human
caaaguacagaauuug

SEQ ID NO: 3207801 - RNA, 21 nt, Human
caaaguacagguacuuugucu

SEQ ID NO: 3207802 - RNA, 20 nt, Human
caaaguacagguacuuuguc

SEQ ID NO: 3207803 - RNA, 19 nt, Human
caaaguacagguacuuugu

SEQ ID NO: 3207804 - RNA, 17 nt, Human
caaaguacagguacuuu

SEQ ID NO: 3207805 - RNA, 19 nt, Human
caaagucucaaugaaauag

SEQ ID NO: 3207806 - RNA, 21 nt, Human
caaaguagaagucuuagaugu

SEQ ID NO: 3207807 - RNA, 14 nt, Human
caaaguagaagucu

SEQ ID NO: 3207808 - RNA, 22 nt, Human
caaauccaggacccugccaggc

SEQ ID NO: 3207809 - RNA, 21 nt, Human
caaauccaggacccugccagg

SEQ ID NO: 3207810 - RNA, 15 nt, Human
caaauccgaaaucag

SEQ ID NO: 3207811 - RNA, 22 nt, Human
caaagugcuauuacgaaguuca

SEQ ID NO: 3207812 - RNA, 22 nt, Human
caaagcacugacuucuaaguaa

SEQ ID NO: 3207813 - RNA, 20 nt, Human
caaagcacugacuucuaagu

SEQ ID NO: 3207814 - RNA, 18 nt, Human
caaagcaccaaaauaaga

SEQ ID NO: 3207815 - RNA, 17 nt, Human
caaagcaccaaaauaag

SEQ ID NO: 3207816 - RNA, 24 nt, Human
caaagcaccaaaauaagaaaagau

SEQ ID NO: 3207817 - RNA, 22 nt, Human
caaagcaccaaaauaagaaaag

SEQ ID NO: 3207818 - RNA, 21 nt, Human
caaagcaccaaaauaagaaaa

SEQ ID NO: 3207819 - RNA, 19 nt, Human
caaagcaccaaaauaagaa

SEQ ID NO: 3207820 - RNA, 21 nt, Human
caaagcacccauuucaaugug

SEQ ID NO: 3207821 - RNA, 18 nt, Human
caaagcagcaacacacau

SEQ ID NO: 3207822 - RNA, 15 nt, Human
caaagcagagagcau

SEQ ID NO: 3207823 - RNA, 14 nt, Human
caaagaugcagccg

SEQ ID NO: 3207824 - RNA, 17 nt, Human
caaagcaaaccaacaag

SEQ ID NO: 3207825 - RNA, 19 nt, Human
cagccccgugggguuccuc

SEQ ID NO: 3207826 - RNA, 13 nt, Human
cagcccccugguc

SEQ ID NO: 3207827 - RNA, 13 nt, Human
cagccccugcaca

SEQ ID NO: 3207828 - RNA, 21 nt, Human
cagccccucccuccucugaga

SEQ ID NO: 3207829 - RNA, 18 nt, Human
cagccccucccuccucug

SEQ ID NO: 3207830 - RNA, 22 nt, Human
cagccccauucugccugcccag

SEQ ID NO: 3207831 - RNA, 20 nt, Human
cagccccauucugccugccc

SEQ ID NO: 3207832 - RNA, 19 nt, Human
cagccccauucugccugcc

SEQ ID NO: 3207833 - RNA, 24 nt, Human
cagccccauucugccugcccaggc

SEQ ID NO: 3207834 - RNA, 23 nt, Human
cagccccauucugccugcccagg

SEQ ID NO: 3207835 - RNA, 18 nt, Human
cagcggcuggacuuggag

SEQ ID NO: 3207836 - RNA, 16 nt, Human
cagcggcuggacuugg

SEQ ID NO: 3207837 - RNA, 17 nt, Human
cagcggcuggaauuggg

SEQ ID NO: 3207838 - RNA, 17 nt, Human
cagccugccacucaggc

SEQ ID NO: 3207839 - RNA, 16 nt, Human
cagccugccacucagg

SEQ ID NO: 3207840 - RNA, 12 nt, Human
cagccugccacu

SEQ ID NO: 3207841 - RNA, 11 nt, Human
cagccugccac

SEQ ID NO: 3207842 - RNA, 23 nt, Human
cagccugcacuugggggcucagc

SEQ ID NO: 3207843 - RNA, 18 nt, Human
cagccugccuugcccacu

SEQ ID NO: 3207844 - RNA, 21 nt, Human
cagccugccuugcccacuccu

SEQ ID NO: 3207845 - RNA, 20 nt, Human
cagccgccuucacagcaguc

SEQ ID NO: 3207846 - RNA, 18 nt, Human
cagccgccuucacagcag

SEQ ID NO: 3207847 - RNA, 18 nt, Human
cagccgcuccagagucag

SEQ ID NO: 3207848 - RNA, 14 nt, Human
cagccgcuccagag

SEQ ID NO: 3207849 - RNA, 13 nt, Human
cagccgcuccaga

SEQ ID NO: 3207850 - RNA, 13 nt, Human
cagccgccuucac

SEQ ID NO: 3207851 - RNA, 13 nt, Human
cagcccuuagcag

SEQ ID NO: 3207852 - RNA, 23 nt, Human
cagccgccaugcuccuggcccac

SEQ ID NO: 3207853 - RNA, 22 nt, Human
cagccugagcgacagugagacu

SEQ ID NO: 3207854 - RNA, 23 nt, Human
cagccugagcgacagugagacuc

SEQ ID NO: 3207855 - RNA, 24 nt, Human
cagcacauaggguucccacgaagc

SEQ ID NO: 3207856 - RNA, 20 nt, Human
cagccagacuggcacaguuu

SEQ ID NO: 3207857 - RNA, 18 nt, Human
cagcauauucaggaagcu

SEQ ID NO: 3207858 - RNA, 16 nt, Human
cagcauauucaggaag

SEQ ID NO: 3207859 - RNA, 17 nt, Human
cagcauauucaggaagc

SEQ ID NO: 3207860 - RNA, 17 nt, Human
cagcauagaaguaacuu

SEQ ID NO: 3207861 - RNA, 15 nt, Human
cagauuucacucucc

SEQ ID NO: 3207862 - RNA, 16 nt, Human
cagauuucacucuccu

SEQ ID NO: 3207863 - RNA, 19 nt, Human
cagauuugaacucuucaau

SEQ ID NO: 3207864 - RNA, 18 nt, Human
cagauuucacucuccuug

SEQ ID NO: 3207865 - RNA, 13 nt, Human
cagauuucacucu

SEQ ID NO: 3207866 - RNA, 13 nt, Human
cagauuugagcuc

SEQ ID NO: 3207867 - RNA, 14 nt, Human
cagauuugagcuca

SEQ ID NO: 3207868 - RNA, 16 nt, Human
cagauuugagcucagc

SEQ ID NO: 3207869 - RNA, 20 nt, Human
cagauuugcacaaaaagaua

SEQ ID NO: 3207870 - RNA, 17 nt, Human
cagauuugcacaaaaag

SEQ ID NO: 3207871 - RNA, 14 nt, Human
cagauuugcacaaa

SEQ ID NO: 3207872 - RNA, 13 nt, Human
cagauuugcacaa

SEQ ID NO: 3207873 - RNA, 13 nt, Human
cagauuuggaaag

SEQ ID NO: 3207874 - RNA, 21 nt, Human
cagauugcaacaggcugggcu

SEQ ID NO: 3207875 - RNA, 19 nt, Human
cagauugcugaauggaguu

SEQ ID NO: 3207876 - RNA, 12 nt, Human
cagauugcuuuu

SEQ ID NO: 3207877 - RNA, 17 nt, Human
cagauugcuuuugugca

SEQ ID NO: 3207878 - RNA, 15 nt, Human
cagauuggauuuuau

SEQ ID NO: 3207879 - RNA, 12 nt, Human
cagauuggauuu

SEQ ID NO: 3207880 - RNA, 23 nt, Human
cagauuggauuuuauguugacau

SEQ ID NO: 3207881 - RNA, 21 nt, Human
cagauuggauuuuauguugac

SEQ ID NO: 3207882 - RNA, 22 nt, Human
cagauacuacugaccagacaag

SEQ ID NO: 3207883 - RNA, 15 nt, Human
cagauaccaagcaug

SEQ ID NO: 3207884 - RNA, 18 nt, Human
cagauacuacugaccaga

SEQ ID NO: 3207885 - RNA, 23 nt, Human
cagaucauuaucagccugugcca

SEQ ID NO: 3207886 - RNA, 23 nt, Human
cagauacaggaaaagcugcugac

SEQ ID NO: 3207887 - RNA, 17 nt, Human
cagaggucuagauuaau

SEQ ID NO: 3207888 - RNA, 21 nt, Human
cagagcuggcaucuaucuggu

SEQ ID NO: 3207889 - RNA, 16 nt, Human
cagagcugcgggcugg

SEQ ID NO: 3207890 - RNA, 22 nt, Human
cagagcugcggugucucccugc

SEQ ID NO: 3207891 - RNA, 16 nt, Human
cagagcugcuuccccg

SEQ ID NO: 3207892 - RNA, 17 nt, Human
cagagcuacacagggga

SEQ ID NO: 3207893 - RNA, 22 nt, Human
cagagcuacacaggggaaaaga

SEQ ID NO: 3207894 - RNA, 16 nt, Human
cagagcgacagagcag

SEQ ID NO: 3207895 - RNA, 16 nt, Human
cagagagggugggagu

SEQ ID NO: 3207896 - RNA, 13 nt, Human
cagagaggguggg

SEQ ID NO: 3207897 - RNA, 20 nt, Human
cagagagggugggagugggc

SEQ ID NO: 3207898 - RNA, 22 nt, Human
cagagagggugggagugggccc

SEQ ID NO: 3207899 - RNA, 14 nt, Human
cagagccugcaguu

SEQ ID NO: 3207900 - RNA, 17 nt, Human
cagagccugccccagcg

SEQ ID NO: 3207901 - RNA, 15 nt, Human
cagagccugccccag

SEQ ID NO: 3207902 - RNA, 19 nt, Human
cagagccugccccagcgcu

SEQ ID NO: 3207903 - RNA, 14 nt, Human
cagagccugcccca

SEQ ID NO: 3207904 - RNA, 13 nt, Human
cagagccugcccc

SEQ ID NO: 3207905 - RNA, 19 nt, Human
cagagacuccugcaggcag

SEQ ID NO: 3207906 - RNA, 19 nt, Human
cagagagagauacucuggg

SEQ ID NO: 3207907 - RNA, 21 nt, Human
cagagacuccugcaggcagcc

SEQ ID NO: 3207908 - RNA, 22 nt, Human
cagagacuccugcaggcagcca

SEQ ID NO: 3207909 - RNA, 12 nt, Human
cagagagcauua

SEQ ID NO: 3207910 - RNA, 20 nt, Human
cagagacuccugcaggcagc

SEQ ID NO: 3207911 - RNA, 15 nt, Human
caguauuugugggga

SEQ ID NO: 3207912 - RNA, 16 nt, Human
cagucaccccggccac

SEQ ID NO: 3207913 - RNA, 17 nt, Human
cagucaccccggccacc

SEQ ID NO: 3207914 - RNA, 14 nt, Human
cagucaccccggcc

SEQ ID NO: 3207915 - RNA, 23 nt, Human
caguauuuuaguggacccugaaa

SEQ ID NO: 3207916 - RNA, 15 nt, Human
caguauuuuagugga

SEQ ID NO: 3207917 - RNA, 13 nt, Human
caguauuuuagug

SEQ ID NO: 3207918 - RNA, 19 nt, Human
caguauuacuucugcuaca

SEQ ID NO: 3207919 - RNA, 17 nt, Human
caguaaaauuauacugu

SEQ ID NO: 3207920 - RNA, 11 nt, Human
cagguugacag

SEQ ID NO: 3207921 - RNA, 16 nt, Human
cagguugacaggaggu

SEQ ID NO: 3207922 - RNA, 23 nt, Human
cagguuuuuggucugacccacug

SEQ ID NO: 3207923 - RNA, 23 nt, Human
cagguugaagaccuaaccagggc

SEQ ID NO: 3207924 - RNA, 22 nt, Human
cagguugaagaccuaaccaggg

SEQ ID NO: 3207925 - RNA, 15 nt, Human
cagguugaagaccua

SEQ ID NO: 3207926 - RNA, 14 nt, Human
cagguucugaaaga

SEQ ID NO: 3207927 - RNA, 23 nt, Human
cagguucugaaagagucuuucuu

SEQ ID NO: 3207928 - RNA, 18 nt, Human
cagguucugaaagagucu

SEQ ID NO: 3207929 - RNA, 21 nt, Human
caggguuggccccugcccggc

SEQ ID NO: 3207930 - RNA, 17 nt, Human
caggguuggccccugcc

SEQ ID NO: 3207931 - RNA, 14 nt, Human
caggguuggccccu

SEQ ID NO: 3207932 - RNA, 14 nt, Human
caggugcugccauc

SEQ ID NO: 3207933 - RNA, 13 nt, Human
caggugcugccau

SEQ ID NO: 3207934 - RNA, 17 nt, Human
caggugcucaaaaugca

SEQ ID NO: 3207935 - RNA, 20 nt, Human
caggguuucaccauguuggc

SEQ ID NO: 3207936 - RNA, 23 nt, Human
cagggucucacucugucgcccag

SEQ ID NO: 3207937 - RNA, 22 nt, Human
cagggucucacucugucgccca

SEQ ID NO: 3207938 - RNA, 21 nt, Human
cagggucucuaccauccccug

SEQ ID NO: 3207939 - RNA, 21 nt, Human
cagggucucuagugcugugaa

SEQ ID NO: 3207940 - RNA, 20 nt, Human
cagggucucuagugcuguga

SEQ ID NO: 3207941 - RNA, 19 nt, Human
cagggucucuagugcugug

SEQ ID NO: 3207942 - RNA, 22 nt, Human
cagggucucuagugcugugaaa

SEQ ID NO: 3207943 - RNA, 16 nt, Human
caggguuggccccugc

SEQ ID NO: 3207944 - RNA, 15 nt, Human
caggguuggccccug

SEQ ID NO: 3207945 - RNA, 18 nt, Human
cagggugagcccaugugg

SEQ ID NO: 3207946 - RNA, 15 nt, Human
cagggcucagcgggg

SEQ ID NO: 3207947 - RNA, 12 nt, Human
cagggcucagcg

SEQ ID NO: 3207948 - RNA, 16 nt, Human
cagggagggcuucugc

SEQ ID NO: 3207949 - RNA, 17 nt, Human
cagggagggccugggcc

SEQ ID NO: 3207950 - RNA, 18 nt, Human
cagggagggccugggccc

SEQ ID NO: 3207951 - RNA, 22 nt, Human
cagggaggacgcucucuggccu

SEQ ID NO: 3207952 - RNA, 19 nt, Human
cagggaggacgcucucugg

SEQ ID NO: 3207953 - RNA, 21 nt, Human
caggcugggcugggcacugcu

SEQ ID NO: 3207954 - RNA, 14 nt, Human
caggcugggcuuca

SEQ ID NO: 3207955 - RNA, 13 nt, Human
caggcugggcugg

SEQ ID NO: 3207956 - RNA, 12 nt, Human
caggcugggcug

SEQ ID NO: 3207957 - RNA, 19 nt, Human
caggcugggcugggcacug

SEQ ID NO: 3207958 - RNA, 17 nt, Human
caggcugggcugggcac

SEQ ID NO: 3207959 - RNA, 16 nt, Human
caggcugggcugggca

SEQ ID NO: 3207960 - RNA, 14 nt, Human
caggcugggcuggg

SEQ ID NO: 3207961 - RNA, 15 nt, Human
caggcugggagagcc

SEQ ID NO: 3207962 - RNA, 20 nt, Human
caggccugggggcugggcag

SEQ ID NO: 3207963 - RNA, 22 nt, Human
caggccugggggcugggcagag

SEQ ID NO: 3207964 - RNA, 19 nt, Human
caggcuggcgugcaguggu

SEQ ID NO: 3207965 - RNA, 18 nt, Human
caggcuggcgugcagugg

SEQ ID NO: 3207966 - RNA, 23 nt, Human
caggccugggggcugggcagagg

SEQ ID NO: 3207967 - RNA, 17 nt, Human
caggcuggcgugcagug

SEQ ID NO: 3207968 - RNA, 16 nt, Human
caggcugggagagccu

SEQ ID NO: 3207969 - RNA, 18 nt, Human
caggcugggagagccuuc

SEQ ID NO: 3207970 - RNA, 19 nt, Human
caggcugggagagccuucc

SEQ ID NO: 3207971 - RNA, 15 nt, Human
caggcuggcgugcag

SEQ ID NO: 3207972 - RNA, 20 nt, Human
cagggcuggggcagccucug

SEQ ID NO: 3207973 - RNA, 19 nt, Human
cagggcuggggcagccucu

SEQ ID NO: 3207974 - RNA, 15 nt, Human
cagggcuggggcagc

SEQ ID NO: 3207975 - RNA, 21 nt, Human
caggacagggguuccuucugg

SEQ ID NO: 3207976 - RNA, 17 nt, Human
caggacagggguuccuu

SEQ ID NO: 3207977 - RNA, 16 nt, Human
caggacagggguuccu

SEQ ID NO: 3207978 - RNA, 15 nt, Human
caggacagggguucc

SEQ ID NO: 3207979 - RNA, 17 nt, Human
caggacaggagaugcug

SEQ ID NO: 3207980 - RNA, 21 nt, Human
caggacaggagaugcugugcc

SEQ ID NO: 3207981 - RNA, 13 nt, Human
caggaccagggau

SEQ ID NO: 3207982 - RNA, 15 nt, Human
caggacccugccagg

SEQ ID NO: 3207983 - RNA, 14 nt, Human
caggacccugccag

SEQ ID NO: 3207984 - RNA, 13 nt, Human
caggacccugcca

SEQ ID NO: 3207985 - RNA, 12 nt, Human
caggacccugcc

SEQ ID NO: 3207986 - RNA, 19 nt, Human
caggacccugccaggcaca

SEQ ID NO: 3207987 - RNA, 18 nt, Human
caggacccugccaggcac

SEQ ID NO: 3207988 - RNA, 17 nt, Human
caggacccugccaggca

SEQ ID NO: 3207989 - RNA, 16 nt, Human
caggacccugccaggc

SEQ ID NO: 3207990 - RNA, 21 nt, Human
caggacccugccaggcacagg

SEQ ID NO: 3207991 - RNA, 20 nt, Human
caggacccugccaggcacag

SEQ ID NO: 3207992 - RNA, 22 nt, Human
caggacccugccaggcacaggc

SEQ ID NO: 3207993 - RNA, 23 nt, Human
caggccagagggagugacagagg

SEQ ID NO: 3207994 - RNA, 13 nt, Human
caggccagcugcu

SEQ ID NO: 3207995 - RNA, 15 nt, Human
caggccagcugcuug

SEQ ID NO: 3207996 - RNA, 23 nt, Human
caggcacugcugcccagccucca

SEQ ID NO: 3207997 - RNA, 16 nt, Human
caggccacccugugca

SEQ ID NO: 3207998 - RNA, 15 nt, Human
caggccacccugugc

SEQ ID NO: 3207999 - RNA, 17 nt, Human
caggccacccugugcag

SEQ ID NO: 3208000 - RNA, 12 nt, Human
caggaggccagc

SEQ ID NO: 3208001 - RNA, 13 nt, Human
caggaggccagcc

SEQ ID NO: 3208002 - RNA, 20 nt, Human
caggcaaugcuggcuguugg

SEQ ID NO: 3208003 - RNA, 19 nt, Human
caggcaaugcuggcuguug

SEQ ID NO: 3208004 - RNA, 21 nt, Human
caggcaaugcuggcuguuggc

SEQ ID NO: 3208005 - RNA, 17 nt, Human
caggcaaugcuggcugu

SEQ ID NO: 3208006 - RNA, 14 nt, Human
caggaggcagaagg

SEQ ID NO: 3208007 - RNA, 17 nt, Human
caggaggccaagguggg

SEQ ID NO: 3208008 - RNA, 17 nt, Human
caggcacugcugcccag

SEQ ID NO: 3208009 - RNA, 16 nt, Human
caggcacugcugccca

SEQ ID NO: 3208010 - RNA, 13 nt, Human
caggccaggcccu

SEQ ID NO: 3208011 - RNA, 14 nt, Human
caggccaggcccuc

SEQ ID NO: 3208012 - RNA, 15 nt, Human
caggccaggcccucu

SEQ ID NO: 3208013 - RNA, 16 nt, Human
caggccaggcccucug

SEQ ID NO: 3208014 - RNA, 19 nt, Human
caggaaaucaaauaugcaa

SEQ ID NO: 3208015 - RNA, 22 nt, Human
caggaaaguggcaccugucugc

SEQ ID NO: 3208016 - RNA, 21 nt, Human
caggaaaguggcaccugucug

SEQ ID NO: 3208017 - RNA, 21 nt, Human
caggaaaucaaauaugcaaag

SEQ ID NO: 3208018 - RNA, 15 nt, Human
cagcuguucagcugg

SEQ ID NO: 3208019 - RNA, 16 nt, Human
cagcuguucagcuggu

SEQ ID NO: 3208020 - RNA, 19 nt, Human
cagcuguucagauuggaca

SEQ ID NO: 3208021 - RNA, 20 nt, Human
cagcuguucagauuggacau

SEQ ID NO: 3208022 - RNA, 16 nt, Human
cagcuuauucacaaga

SEQ ID NO: 3208023 - RNA, 23 nt, Human
cagcuguguccggcccaguuuug

SEQ ID NO: 3208024 - RNA, 20 nt, Human
caggaaaggcuccaggagca

SEQ ID NO: 3208025 - RNA, 20 nt, Human
caggaaaagcugcugacagu

SEQ ID NO: 3208026 - RNA, 19 nt, Human
caggaaaagcugcugacag

SEQ ID NO: 3208027 - RNA, 21 nt, Human
caggaaaggcuccaggagcag

SEQ ID NO: 3208028 - RNA, 22 nt, Human
caggaaaggcuccaggagcagc

SEQ ID NO: 3208029 - RNA, 23 nt, Human
caggaaaggcuccaggagcagcc

SEQ ID NO: 3208030 - RNA, 21 nt, Human
caugaauuaccuggauguucu

SEQ ID NO: 3208031 - RNA, 22 nt, Human
caugaauuaccuggauguucuu

SEQ ID NO: 3208032 - RNA, 14 nt, Human
caugacacgaauau

SEQ ID NO: 3208033 - RNA, 17 nt, Human
caugacacgaauauugc

SEQ ID NO: 3208034 - RNA, 18 nt, Human
caugacacgaauauugcu

SEQ ID NO: 3208035 - RNA, 24 nt, Human
caugauuaaccacuucagcugacu

SEQ ID NO: 3208036 - RNA, 16 nt, Human
caugcugcccugugag

SEQ ID NO: 3208037 - RNA, 18 nt, Human
caugcugcccugugagua

SEQ ID NO: 3208038 - RNA, 15 nt, Human
caugcugcccuguga

SEQ ID NO: 3208039 - RNA, 12 nt, Human
caugcugccucc

SEQ ID NO: 3208040 - RNA, 14 nt, Human
caugcugccuccag

SEQ ID NO: 3208041 - RNA, 16 nt, Human
caugcaaguauucuca

SEQ ID NO: 3208042 - RNA, 22 nt, Human
caugauugcagaauuguuuaga

SEQ ID NO: 3208043 - RNA, 20 nt, Human
caugauugcagaauuguuua

SEQ ID NO: 3208044 - RNA, 13 nt, Human
caucagcugcuga

SEQ ID NO: 3208045 - RNA, 15 nt, Human
caucagcugcugaaa

SEQ ID NO: 3208046 - RNA, 18 nt, Human
caucagcugcugaaacaa

SEQ ID NO: 3208047 - RNA, 17 nt, Human
caucagcugcugaaaca

SEQ ID NO: 3208048 - RNA, 20 nt, Human
caucagcuugcccuguuaaa

SEQ ID NO: 3208049 - RNA, 13 nt, Human
caucaggccaggc

SEQ ID NO: 3208050 - RNA, 20 nt, Human
caucaggccaggcccucugc

SEQ ID NO: 3208051 - RNA, 21 nt, Human
caucaggccaggcccucugcc

SEQ ID NO: 3208052 - RNA, 22 nt, Human
caucaggccaggcccucugccc

SEQ ID NO: 3208053 - RNA, 23 nt, Human
caucaggccaggcccucugccca

SEQ ID NO: 3208054 - RNA, 12 nt, Human
caucccagcccc

SEQ ID NO: 3208055 - RNA, 16 nt, Human
caucccagccccaaug

SEQ ID NO: 3208056 - RNA, 14 nt, Human
caucccagccccaa

SEQ ID NO: 3208057 - RNA, 13 nt, Human
caucccagcccca

SEQ ID NO: 3208058 - RNA, 23 nt, Human
cauccuggcacccggccccugcu

SEQ ID NO: 3208059 - RNA, 19 nt, Human
cauccugucaucugagaau

SEQ ID NO: 3208060 - RNA, 16 nt, Human
cauccugucaucugag

SEQ ID NO: 3208061 - RNA, 22 nt, Human
cauccccacguggacaagaaag

SEQ ID NO: 3208062 - RNA, 18 nt, Human
caucugugaaaggaaaga

SEQ ID NO: 3208063 - RNA, 19 nt, Human
caucugugaaaggaaagag

SEQ ID NO: 3208064 - RNA, 17 nt, Human
cauccuuucacuucuuu

SEQ ID NO: 3208065 - RNA, 21 nt, Human
cauccuuucacuucuuucccu

SEQ ID NO: 3208066 - RNA, 20 nt, Human
cauccuuucacuucuuuccc

SEQ ID NO: 3208067 - RNA, 19 nt, Human
cauccuuucacuucuuucc

SEQ ID NO: 3208068 - RNA, 21 nt, Human
caucuuagguuggcaaaaagg

SEQ ID NO: 3208069 - RNA, 13 nt, Human
caucuuaaaagcu

SEQ ID NO: 3208070 - RNA, 20 nt, Human
caucuuaaaagcuaucuuca

SEQ ID NO: 3208071 - RNA, 11 nt, Human
caucugugaau

SEQ ID NO: 3208072 - RNA, 22 nt, Human
caucuuagguuggcaaaaaggc

SEQ ID NO: 3208073 - RNA, 17 nt, Human
caguuuggcaaacucuc

SEQ ID NO: 3208074 - RNA, 21 nt, Human
caguuugcuuuguaugcacuu

SEQ ID NO: 3208075 - RNA, 14 nt, Human
caguuugcuuugua

SEQ ID NO: 3208076 - RNA, 12 nt, Human
caguuugcuuug

SEQ ID NO: 3208077 - RNA, 23 nt, Human
caguuugaggauuaguuuagaac

SEQ ID NO: 3208078 - RNA, 14 nt, Human
caguuuauauggaa

SEQ ID NO: 3208079 - RNA, 15 nt, Human
caguuuacugguuua

SEQ ID NO: 3208080 - RNA, 23 nt, Human
cauaaucuggacuccucugucca

SEQ ID NO: 3208081 - RNA, 20 nt, Human
cauaaucuggacuccucugu

SEQ ID NO: 3208082 - RNA, 22 nt, Human
cauaaucuggacuccucugucc

SEQ ID NO: 3208083 - RNA, 21 nt, Human
cauaaucuggacuccucuguc

SEQ ID NO: 3208084 - RNA, 19 nt, Human
cauaaucuggacuccucug

SEQ ID NO: 3208085 - RNA, 13 nt, Human
caguuguuugaug

SEQ ID NO: 3208086 - RNA, 20 nt, Human
cauagcagcuuauucacaag

SEQ ID NO: 3208087 - RNA, 14 nt, Human
cauagcaguauaug

SEQ ID NO: 3208088 - RNA, 14 nt, Human
cauagcauaggaca

SEQ ID NO: 3208089 - RNA, 14 nt, Human
cauagccaaaaugu

SEQ ID NO: 3208090 - RNA, 16 nt, Human
cauagccaaaauguga

SEQ ID NO: 3208091 - RNA, 15 nt, Human
cauagcccucacccu

SEQ ID NO: 3208092 - RNA, 19 nt, Human
cauagcccucacccugggg

SEQ ID NO: 3208093 - RNA, 12 nt, Human
cauagcccucac

SEQ ID NO: 3208094 - RNA, 18 nt, Human
cauagauucccugagcag

SEQ ID NO: 3208095 - RNA, 17 nt, Human
cauagauucccugagca

SEQ ID NO: 3208096 - RNA, 22 nt, Human
cauacacaagcgugucaggcug

SEQ ID NO: 3208097 - RNA, 15 nt, Human
cauacaauuccaaac

SEQ ID NO: 3208098 - RNA, 22 nt, Human
cauacaaaugcaucuuugaugu

SEQ ID NO: 3208099 - RNA, 21 nt, Human
cauacaaacaagcauauaaaa

SEQ ID NO: 3208100 - RNA, 19 nt, Human
cauacaaaugcaucuuuga

SEQ ID NO: 3208101 - RNA, 20 nt, Human
cauacaaaugcaucuuugau

SEQ ID NO: 3208102 - RNA, 18 nt, Human
cauaauuuguuuccagca

SEQ ID NO: 3208103 - RNA, 17 nt, Human
cauacaaacaagcauau

SEQ ID NO: 3208104 - RNA, 19 nt, Human
cauaggaaguuaaaagcac

SEQ ID NO: 3208105 - RNA, 20 nt, Human
cauaggaaguuagccuuuau

SEQ ID NO: 3208106 - RNA, 17 nt, Human
cauaggaaguuagccuu

SEQ ID NO: 3208107 - RNA, 16 nt, Human
cauaggccugcuuugu

SEQ ID NO: 3208108 - RNA, 18 nt, Human
cagucaccccggccaccu

SEQ ID NO: 3208109 - RNA, 18 nt, Human
ccaccagaagcccagaau

SEQ ID NO: 3208110 - RNA, 16 nt, Human
ccaccagaagcccaga

SEQ ID NO: 3208111 - RNA, 15 nt, Human
ccaccagaagcccag

SEQ ID NO: 3208112 - RNA, 14 nt, Human
ccaccagaagccca

SEQ ID NO: 3208113 - RNA, 16 nt, Human
ccaccaucaagccacc

SEQ ID NO: 3208114 - RNA, 17 nt, Human
ccaccaucaagccacca

SEQ ID NO: 3208115 - RNA, 13 nt, Human
ccaccagaagccc

SEQ ID NO: 3208116 - RNA, 12 nt, Human
ccaccagaagcc

SEQ ID NO: 3208117 - RNA, 11 nt, Human
ccaccagaagc

SEQ ID NO: 3208118 - RNA, 22 nt, Human
ccacacuucaggcucuucuccu

SEQ ID NO: 3208119 - RNA, 14 nt, Human
ccaccgcagacagg

SEQ ID NO: 3208120 - RNA, 17 nt, Human
ccaccgcagacaggacc

SEQ ID NO: 3208121 - RNA, 20 nt, Human
ccacccugcuuggcccaggg

SEQ ID NO: 3208122 - RNA, 20 nt, Human
ccaccaucaagccaccaaca

SEQ ID NO: 3208123 - RNA, 15 nt, Human
ccaccaucaagccac

SEQ ID NO: 3208124 - RNA, 13 nt, Human
ccacccugcucuc

SEQ ID NO: 3208125 - RNA, 17 nt, Human
ccacccugcuuggccca

SEQ ID NO: 3208126 - RNA, 19 nt, Human
ccacccugcuuggcccagg

SEQ ID NO: 3208127 - RNA, 18 nt, Human
ccacccugcuuggcccag

SEQ ID NO: 3208128 - RNA, 18 nt, Human
ccaccgcagacaggacca

SEQ ID NO: 3208129 - RNA, 13 nt, Human
ccaccgcagacag

SEQ ID NO: 3208130 - RNA, 22 nt, Human
ccaccgggcugggagcucugca

SEQ ID NO: 3208131 - RNA, 23 nt, Human
ccaccgggcugggagcucugcag

SEQ ID NO: 3208132 - RNA, 13 nt, Human
ccaccguccccuc

SEQ ID NO: 3208133 - RNA, 14 nt, Human
ccaccguccccucc

SEQ ID NO: 3208134 - RNA, 15 nt, Human
ccaccuuggcucaag

SEQ ID NO: 3208135 - RNA, 14 nt, Human
ccaccuuggcucaa

SEQ ID NO: 3208136 - RNA, 13 nt, Human
ccaccuuggcuca

SEQ ID NO: 3208137 - RNA, 19 nt, Human
ccaaugugaacagcggcug

SEQ ID NO: 3208138 - RNA, 20 nt, Human
ccaauguucucucuucucca

SEQ ID NO: 3208139 - RNA, 20 nt, Human
ccaagcuggucccacucagu

SEQ ID NO: 3208140 - RNA, 22 nt, Human
ccaacuuucaagaacuuguuua

SEQ ID NO: 3208141 - RNA, 22 nt, Human
ccaagcuuaggguauuuuuccu

SEQ ID NO: 3208142 - RNA, 20 nt, Human
ccaaugcacuuuguucuggc

SEQ ID NO: 3208143 - RNA, 22 nt, Human
ccaaugcacuuuguucuggcuc

SEQ ID NO: 3208144 - RNA, 23 nt, Human
ccaaugcacuuuguucuggcucu

SEQ ID NO: 3208145 - RNA, 15 nt, Human
ccaagcuuuaaauua

SEQ ID NO: 3208146 - RNA, 18 nt, Human
ccaagcuuuaaauuaugu

SEQ ID NO: 3208147 - RNA, 14 nt, Human
ccaaugcagaacuc

SEQ ID NO: 3208148 - RNA, 22 nt, Human
ccaaaugagggucuugguucca

SEQ ID NO: 3208149 - RNA, 18 nt, Human
ccaaauguucaucaauga

SEQ ID NO: 3208150 - RNA, 19 nt, Human
ccaaauuauuucuuaauua

SEQ ID NO: 3208151 - RNA, 12 nt, Human
ccaaauuaaaaa

SEQ ID NO: 3208152 - RNA, 16 nt, Human
ccaaaucauaguggcu

SEQ ID NO: 3208153 - RNA, 22 nt, Human
ccaaagugcugggauuacaggu

SEQ ID NO: 3208154 - RNA, 11 nt, Human
ccaacuuguaa

SEQ ID NO: 3208155 - RNA, 13 nt, Human
ccaacuugccuuu

SEQ ID NO: 3208156 - RNA, 19 nt, Human
ccaacuuucaagaacuugu

SEQ ID NO: 3208157 - RNA, 16 nt, Human
ccaacuuucaagaacu

SEQ ID NO: 3208158 - RNA, 16 nt, Human
ccaacgucugugccau

SEQ ID NO: 3208159 - RNA, 14 nt, Human
ccaaagugcuggga

SEQ ID NO: 3208160 - RNA, 19 nt, Human
ccaaagugcugggauuaca

SEQ ID NO: 3208161 - RNA, 22 nt, Human
ccaaagugcugggauuacaggc

SEQ ID NO: 3208162 - RNA, 20 nt, Human
cauuggauucugagagcugu

SEQ ID NO: 3208163 - RNA, 17 nt, Human
cauugcuuaccuugguu

SEQ ID NO: 3208164 - RNA, 14 nt, Human
cauugcuuaccuug

SEQ ID NO: 3208165 - RNA, 22 nt, Human
cauuggcucuugaacugagcuu

SEQ ID NO: 3208166 - RNA, 15 nt, Human
cauuuauucugcuca

SEQ ID NO: 3208167 - RNA, 16 nt, Human
cauuuauucugcucac

SEQ ID NO: 3208168 - RNA, 14 nt, Human
cauuucaaugugua

SEQ ID NO: 3208169 - RNA, 18 nt, Human
cauuucaauguguauaaa

SEQ ID NO: 3208170 - RNA, 20 nt, Human
cauuucaauguguauaaauu

SEQ ID NO: 3208171 - RNA, 16 nt, Human
cauuucacauuauucu

SEQ ID NO: 3208172 - RNA, 17 nt, Human
cauugggccauguuuaa

SEQ ID NO: 3208173 - RNA, 15 nt, Human
cauuucacugucugu

SEQ ID NO: 3208174 - RNA, 18 nt, Human
cauuucauuugugccaga

SEQ ID NO: 3208175 - RNA, 17 nt, Human
cauuucagaaagccuuu

SEQ ID NO: 3208176 - RNA, 11 nt, Human
cauuucagaaa

SEQ ID NO: 3208177 - RNA, 17 nt, Human
ccaaaaaaugcuugcuu

SEQ ID NO: 3208178 - RNA, 17 nt, Human
ccaaaacucuccucugc

SEQ ID NO: 3208179 - RNA, 19 nt, Human
cauuuuugaaacugcauuu

SEQ ID NO: 3208180 - RNA, 14 nt, Human
cauuuguaaauauu

SEQ ID NO: 3208181 - RNA, 15 nt, Human
cauuuguaaauauua

SEQ ID NO: 3208182 - RNA, 16 nt, Human
cauuuguaaauauuaa

SEQ ID NO: 3208183 - RNA, 20 nt, Human
cauuuuugaauacaggcaua

SEQ ID NO: 3208184 - RNA, 18 nt, Human
cauuuuugaauacaggca

SEQ ID NO: 3208185 - RNA, 21 nt, Human
cauugcggacagccacggcca

SEQ ID NO: 3208186 - RNA, 17 nt, Human
cauugcggacagccacg

SEQ ID NO: 3208187 - RNA, 15 nt, Human
cauugcggacagcca

SEQ ID NO: 3208188 - RNA, 14 nt, Human
cauugcggacagcc

SEQ ID NO: 3208189 - RNA, 18 nt, Human
cauugcugggcuugucug

SEQ ID NO: 3208190 - RNA, 23 nt, Human
cauugccugauuuguuccuucug

SEQ ID NO: 3208191 - RNA, 21 nt, Human
cauugccugauuuguuccuuc

SEQ ID NO: 3208192 - RNA, 18 nt, Human
cauugccucggcuggcuc

SEQ ID NO: 3208193 - RNA, 20 nt, Human
cauugccucggcuggcuccc

SEQ ID NO: 3208194 - RNA, 15 nt, Human
cauuaggauggcuag

SEQ ID NO: 3208195 - RNA, 15 nt, Human
cauguucucugagga

SEQ ID NO: 3208196 - RNA, 18 nt, Human
cauuagcaguuugcuuug

SEQ ID NO: 3208197 - RNA, 17 nt, Human
cauggcugccaauggga

SEQ ID NO: 3208198 - RNA, 22 nt, Human
cauggcugccaaugggagcuca

SEQ ID NO: 3208199 - RNA, 19 nt, Human
cauggcgaaaacaucuccu

SEQ ID NO: 3208200 - RNA, 13 nt, Human
cauguucaauuau

SEQ ID NO: 3208201 - RNA, 20 nt, Human
cauguucaauuauuuccccc

SEQ ID NO: 3208202 - RNA, 21 nt, Human
cauguucccacuucaaaacaa

SEQ ID NO: 3208203 - RNA, 21 nt, Human
cauggcgaaaacaucuccuua

SEQ ID NO: 3208204 - RNA, 21 nt, Human
cauucuccaccugccagggac

SEQ ID NO: 3208205 - RNA, 20 nt, Human
cauucuccuuagcuucuggc

SEQ ID NO: 3208206 - RNA, 22 nt, Human
cauucuccagggguuuacagug

SEQ ID NO: 3208207 - RNA, 13 nt, Human
cauuaugaugugu

SEQ ID NO: 3208208 - RNA, 16 nt, Human
cauucucacuccuacc

SEQ ID NO: 3208209 - RNA, 14 nt, Human
cauucucacuccua

SEQ ID NO: 3208210 - RNA, 17 nt, Human
cauucucacuccuaccu

SEQ ID NO: 3208211 - RNA, 13 nt, Human
cauucucaguuuu

SEQ ID NO: 3208212 - RNA, 20 nt, Human
cauucucaguuuuucuuaau

SEQ ID NO: 3208213 - RNA, 19 nt, Human
cauucucaguuuuucuuaa

SEQ ID NO: 3208214 - RNA, 18 nt, Human
cauucucaguuuuucuua

SEQ ID NO: 3208215 - RNA, 15 nt, Human
cauucucaguuuuuc

SEQ ID NO: 3208216 - RNA, 23 nt, Human
auugcaggagucccugccaucau

SEQ ID NO: 3208217 - RNA, 20 nt, Human
auugcagaauuguuuagauu

SEQ ID NO: 3208218 - RNA, 19 nt, Human
auugcagaauuguuuagau

SEQ ID NO: 3208219 - RNA, 16 nt, Human
auugcagaauuguuua

SEQ ID NO: 3208220 - RNA, 13 nt, Human
auugcagaauugu

SEQ ID NO: 3208221 - RNA, 21 nt, Human
auugcaacaggcugggcuuca

SEQ ID NO: 3208222 - RNA, 17 nt, Human
auugcaacaaaauacau

SEQ ID NO: 3208223 - RNA, 16 nt, Human
auugcaacaaaauaca

SEQ ID NO: 3208224 - RNA, 14 nt, Human
auugcaacaaaaua

SEQ ID NO: 3208225 - RNA, 13 nt, Human
auugcaacaaaau

SEQ ID NO: 3208226 - RNA, 19 nt, Human
auugcaaucuauaauauuu

SEQ ID NO: 3208227 - RNA, 13 nt, Human
auugcaauuaaac

SEQ ID NO: 3208228 - RNA, 22 nt, Human
auugcaacaaaauacauucuuu

SEQ ID NO: 3208229 - RNA, 21 nt, Human
auugcaacaaaauacauucuu

SEQ ID NO: 3208230 - RNA, 23 nt, Human
auugcaagaagcuuuauuucuag

SEQ ID NO: 3208231 - RNA, 14 nt, Human
auugcaauaaagua

SEQ ID NO: 3208232 - RNA, 15 nt, Human
auugcaauaaaguau

SEQ ID NO: 3208233 - RNA, 16 nt, Human
auugcaauaaaguaua

SEQ ID NO: 3208234 - RNA, 17 nt, Human
auugcaauaaaguauaa

SEQ ID NO: 3208235 - RNA, 21 nt, Human
auugacccacaagaaaugaaa

SEQ ID NO: 3208236 - RNA, 21 nt, Human
auugaccgacagcuuuccagu

SEQ ID NO: 3208237 - RNA, 15 nt, Human
auugcaacaggcugg

SEQ ID NO: 3208238 - RNA, 13 nt, Human
auugaccugaggc

SEQ ID NO: 3208239 - RNA, 13 nt, Human
auugcaaagcaaa

SEQ ID NO: 3208240 - RNA, 19 nt, Human
auugcggacagccacggcc

SEQ ID NO: 3208241 - RNA, 18 nt, Human
auugcggacagccacggc

SEQ ID NO: 3208242 - RNA, 16 nt, Human
auugcggacagccacg

SEQ ID NO: 3208243 - RNA, 19 nt, Human
auugccucggcuggcuccc

SEQ ID NO: 3208244 - RNA, 23 nt, Human
auugccucggcuggcuccccugc

SEQ ID NO: 3208245 - RNA, 21 nt, Human
auugcccacgcuggagugcag

SEQ ID NO: 3208246 - RNA, 17 nt, Human
auugcccacgcuggagu

SEQ ID NO: 3208247 - RNA, 16 nt, Human
auugcccaugauauaa

SEQ ID NO: 3208248 - RNA, 19 nt, Human
auugcccaugauauaacuu

SEQ ID NO: 3208249 - RNA, 23 nt, Human
auugccauuucuuccacaagagc

SEQ ID NO: 3208250 - RNA, 22 nt, Human
auugccaaacauuaauguugau

SEQ ID NO: 3208251 - RNA, 21 nt, Human
auugccaaacauuaauguuga

SEQ ID NO: 3208252 - RNA, 16 nt, Human
auugccaaaacccagc

SEQ ID NO: 3208253 - RNA, 16 nt, Human
auugcauuugcuuuug

SEQ ID NO: 3208254 - RNA, 19 nt, Human
auugccaaacauuaauguu

SEQ ID NO: 3208255 - RNA, 14 nt, Human
auugccaaacauua

SEQ ID NO: 3208256 - RNA, 13 nt, Human
auugccaaacauu

SEQ ID NO: 3208257 - RNA, 22 nt, Human
auugccaaaacccagcugcacc

SEQ ID NO: 3208258 - RNA, 20 nt, Human
auugccaaaacccagcugca

SEQ ID NO: 3208259 - RNA, 19 nt, Human
auugccaaaacccagcugc

SEQ ID NO: 3208260 - RNA, 18 nt, Human
auugccaaaacccagcug

SEQ ID NO: 3208261 - RNA, 17 nt, Human
auugccaaaacccagcu

SEQ ID NO: 3208262 - RNA, 17 nt, Human
auugcauuuccugacag

SEQ ID NO: 3208263 - RNA, 16 nt, Human
auugcauuuccugaca

SEQ ID NO: 3208264 - RNA, 20 nt, Human
auugacacuuaaaaaugguu

SEQ ID NO: 3208265 - RNA, 16 nt, Human
auucuccaccugccag

SEQ ID NO: 3208266 - RNA, 17 nt, Human
auucuccaccugccagg

SEQ ID NO: 3208267 - RNA, 20 nt, Human
auucucagaaucucaaauaa

SEQ ID NO: 3208268 - RNA, 18 nt, Human
auucucagaaucucaaau

SEQ ID NO: 3208269 - RNA, 13 nt, Human
auucuccaccugc

SEQ ID NO: 3208270 - RNA, 16 nt, Human
auucuacuuugagugc

SEQ ID NO: 3208271 - RNA, 13 nt, Human
auucuacuuugag

SEQ ID NO: 3208272 - RNA, 14 nt, Human
auucucagaaucuc

SEQ ID NO: 3208273 - RNA, 18 nt, Human
auucucaccagcuguguc

SEQ ID NO: 3208274 - RNA, 15 nt, Human
auucucaccagcugu

SEQ ID NO: 3208275 - RNA, 16 nt, Human
auucuagauuaccaug

SEQ ID NO: 3208276 - RNA, 21 nt, Human
auuuaaaggcccuaucuguuu

SEQ ID NO: 3208277 - RNA, 17 nt, Human
auuuaaagggaaauuga

SEQ ID NO: 3208278 - RNA, 20 nt, Human
auuuaaaggcccuaucuguu

SEQ ID NO: 3208279 - RNA, 18 nt, Human
auuuaaaggcccuaucug

SEQ ID NO: 3208280 - RNA, 19 nt, Human
auuuaaaauugugaugugu

SEQ ID NO: 3208281 - RNA, 17 nt, Human
auuuaaaagacagcuuu

SEQ ID NO: 3208282 - RNA, 14 nt, Human
auuuaaaagacagc

SEQ ID NO: 3208283 - RNA, 20 nt, Human
auuuaaaauugugauguguc

SEQ ID NO: 3208284 - RNA, 19 nt, Human
auuuaaaacauuaaaauau

SEQ ID NO: 3208285 - RNA, 17 nt, Human
auuuaaaacuguaauuu

SEQ ID NO: 3208286 - RNA, 21 nt, Human
auuuaaaacauuaaaauauaa

SEQ ID NO: 3208287 - RNA, 20 nt, Human
auuuaaaacauuaaaauaua

SEQ ID NO: 3208288 - RNA, 19 nt, Human
auuuaaagcuuauuaaaac

SEQ ID NO: 3208289 - RNA, 20 nt, Human
auuuaauuuugacacugaaa

SEQ ID NO: 3208290 - RNA, 22 nt, Human
auuuaauuuugacacugaaaua

SEQ ID NO: 3208291 - RNA, 20 nt, Human
auuuacaacacuuuaauggg

SEQ ID NO: 3208292 - RNA, 23 nt, Human
auuuaauuuuuuugagacagagu

SEQ ID NO: 3208293 - RNA, 19 nt, Human
auuuaauuuuuuugagaca

SEQ ID NO: 3208294 - RNA, 22 nt, Human
auuuaacagggucucuagugcu

SEQ ID NO: 3208295 - RNA, 21 nt, Human
auuggcucuugaacugagcuu

SEQ ID NO: 3208296 - RNA, 23 nt, Human
auuggcuuuggguugcaggaccu

SEQ ID NO: 3208297 - RNA, 18 nt, Human
auuguauagauauaauga

SEQ ID NO: 3208298 - RNA, 18 nt, Human
auuguaucucauuacuua

SEQ ID NO: 3208299 - RNA, 18 nt, Human
auuguauauuuuuaucua

SEQ ID NO: 3208300 - RNA, 19 nt, Human
auuguauauuuuuaucuau

SEQ ID NO: 3208301 - RNA, 13 nt, Human
auugugccccugc

SEQ ID NO: 3208302 - RNA, 19 nt, Human
auugucuuuaaaaacuguu

SEQ ID NO: 3208303 - RNA, 20 nt, Human
auugucuuuaaaaacuguuu

SEQ ID NO: 3208304 - RNA, 23 nt, Human
auugucuuaauggaugaaaucau

SEQ ID NO: 3208305 - RNA, 21 nt, Human
auugucuuaauggaugaaauc

SEQ ID NO: 3208306 - RNA, 19 nt, Human
auugucuuaauggaugaaa

SEQ ID NO: 3208307 - RNA, 17 nt, Human
auugucuuaauggauga

SEQ ID NO: 3208308 - RNA, 14 nt, Human
auugucuuaaugga

SEQ ID NO: 3208309 - RNA, 15 nt, Human
auugucuuaauggau

SEQ ID NO: 3208310 - RNA, 12 nt, Human
auugucuguaaa

SEQ ID NO: 3208311 - RNA, 13 nt, Human
auugucuguaaau

SEQ ID NO: 3208312 - RNA, 14 nt, Human
auugucuguaaauc

SEQ ID NO: 3208313 - RNA, 22 nt, Human
auuuuauuaagcuuuuuggaau

SEQ ID NO: 3208314 - RNA, 15 nt, Human
auuuuauucuugauc

SEQ ID NO: 3208315 - RNA, 16 nt, Human
auuuuauucuugauca

SEQ ID NO: 3208316 - RNA, 18 nt, Human
auuuuauucuugaucagu

SEQ ID NO: 3208317 - RNA, 19 nt, Human
auuuuauuuuaaaauuuca

SEQ ID NO: 3208318 - RNA, 14 nt, Human
auuuuauuucaaug

SEQ ID NO: 3208319 - RNA, 16 nt, Human
auuuuauuucaaugua

SEQ ID NO: 3208320 - RNA, 17 nt, Human
auuuuauuucaauguaa

SEQ ID NO: 3208321 - RNA, 18 nt, Human
auuuuauuucaauguaau

SEQ ID NO: 3208322 - RNA, 19 nt, Human
auuuuauuucaauguaauu

SEQ ID NO: 3208323 - RNA, 21 nt, Human
auuuuauuucaauguaauuaa

SEQ ID NO: 3208324 - RNA, 16 nt, Human
auuuuacuuggaaaua

SEQ ID NO: 3208325 - RNA, 23 nt, Human
auuuuacuuggaaauauuaaaag

SEQ ID NO: 3208326 - RNA, 19 nt, Human
auuuuaauuuuuaaaugca

SEQ ID NO: 3208327 - RNA, 19 nt, Human
auuuuaauuuuugcuuuua

SEQ ID NO: 3208328 - RNA, 18 nt, Human
auuuuaauuuuuaaaugc

SEQ ID NO: 3208329 - RNA, 17 nt, Human
auuuuaauuuuuaaaug

SEQ ID NO: 3208330 - RNA, 14 nt, Human
auuuguaugauauu

SEQ ID NO: 3208331 - RNA, 15 nt, Human
auuuguaugauauuu

SEQ ID NO: 3208332 - RNA, 18 nt, Human
auuuguaugucaaagcuu

SEQ ID NO: 3208333 - RNA, 19 nt, Human
auuuuaauuucaagcuuau

SEQ ID NO: 3208334 - RNA, 18 nt, Human
auuuuaauuucaagcuua

SEQ ID NO: 3208335 - RNA, 13 nt, Human
auuuuaauuucaa

SEQ ID NO: 3208336 - RNA, 15 nt, Human
auuuguaucacaaau

SEQ ID NO: 3208337 - RNA, 24 nt, Human
auuuguacuuucuguuaaaaugca

SEQ ID NO: 3208338 - RNA, 18 nt, Human
auuugaauguaugcuuca

SEQ ID NO: 3208339 - RNA, 17 nt, Human
auuugaauguaugcuuc

SEQ ID NO: 3208340 - RNA, 21 nt, Human
auuugaauguaugcuucauac

SEQ ID NO: 3208341 - RNA, 20 nt, Human
auuugaauguaugcuucaua

SEQ ID NO: 3208342 - RNA, 22 nt, Human
auuugaauguaugcuucauaca

SEQ ID NO: 3208343 - RNA, 16 nt, Human
auuugagcagggcuca

SEQ ID NO: 3208344 - RNA, 20 nt, Human
auuucuuuucaccauucgua

SEQ ID NO: 3208345 - RNA, 17 nt, Human
auuugagcagggcucag

SEQ ID NO: 3208346 - RNA, 16 nt, Human
auuugaggaguguuaa

SEQ ID NO: 3208347 - RNA, 20 nt, Human
auuugaggaguguuaagauu

SEQ ID NO: 3208348 - RNA, 23 nt, Human
auuugaggaguguuaagauugca

SEQ ID NO: 3208349 - RNA, 14 nt, Human
auuuggaauuagaa

SEQ ID NO: 3208350 - RNA, 22 nt, Human
auuuggaauaaaaauuccagaa

SEQ ID NO: 3208351 - RNA, 21 nt, Human
auuuggaauaaaaauuccaga

SEQ ID NO: 3208352 - RNA, 22 nt, Human
auuuggggauucagauuucucu

SEQ ID NO: 3208353 - RNA, 18 nt, Human
auuuggaccauuuuccug

SEQ ID NO: 3208354 - RNA, 17 nt, Human
auuuggaccauuuuccu

SEQ ID NO: 3208355 - RNA, 14 nt, Human
auuuggaccauuuu

SEQ ID NO: 3208356 - RNA, 15 nt, Human
auuugggguauuuau

SEQ ID NO: 3208357 - RNA, 15 nt, Human
auuugguauccuuau

SEQ ID NO: 3208358 - RNA, 18 nt, Human
auuugguaauguuuuuaa

SEQ ID NO: 3208359 - RNA, 22 nt, Human
auuuguacuuucuguuaaaaug

SEQ ID NO: 3208360 - RNA, 20 nt, Human
auuuguacuuucuguuaaaa

SEQ ID NO: 3208361 - RNA, 19 nt, Human
auuuguacuuucuguuaaa

SEQ ID NO: 3208362 - RNA, 18 nt, Human
auuuguacuuucuguuaa

SEQ ID NO: 3208363 - RNA, 15 nt, Human
auuuguacuuucugu

SEQ ID NO: 3208364 - RNA, 20 nt, Human
auuuauuaaaugcccagccc

SEQ ID NO: 3208365 - RNA, 19 nt, Human
auuuauuagcccugcauuu

SEQ ID NO: 3208366 - RNA, 22 nt, Human
auuuauuagcccugcauuuuca

SEQ ID NO: 3208367 - RNA, 24 nt, Human
auuuagggaguauucuaauaagcu

SEQ ID NO: 3208368 - RNA, 16 nt, Human
auuuagggaguauucu

SEQ ID NO: 3208369 - RNA, 18 nt, Human
auuuagggaguauucuaa

SEQ ID NO: 3208370 - RNA, 19 nt, Human
auuuagggaguauucuaau

SEQ ID NO: 3208371 - RNA, 20 nt, Human
auuuagggaguauucuaaua

SEQ ID NO: 3208372 - RNA, 14 nt, Human
auuuccugugucuu

SEQ ID NO: 3208373 - RNA, 21 nt, Human
auuucuaagucaaacacuugu

SEQ ID NO: 3208374 - RNA, 19 nt, Human
auguugugaauaauuacag

SEQ ID NO: 3208375 - RNA, 17 nt, Human
auguugugaauaauuac

SEQ ID NO: 3208376 - RNA, 15 nt, Human
auguugugaauaauu

SEQ ID NO: 3208377 - RNA, 12 nt, Human
auguugugaaua

SEQ ID NO: 3208378 - RNA, 15 nt, Human
auguuguagauacaa

SEQ ID NO: 3208379 - RNA, 21 nt, Human
auguuguagauacaaucagcu

SEQ ID NO: 3208380 - RNA, 22 nt, Human
auguuguagauacaaucagcug

SEQ ID NO: 3208381 - RNA, 15 nt, Human
auguuuacagaggac

SEQ ID NO: 3208382 - RNA, 17 nt, Human
auguuuacagaggacag

SEQ ID NO: 3208383 - RNA, 19 nt, Human
auguuuacagaggacagua

SEQ ID NO: 3208384 - RNA, 14 nt, Human
auguuuuccaugag

SEQ ID NO: 3208385 - RNA, 19 nt, Human
auguuuuugaaggcagaaa

SEQ ID NO: 3208386 - RNA, 15 nt, Human
auguuuuugaaggca

SEQ ID NO: 3208387 - RNA, 21 nt, Human
auguuuuugaaggcagaaagc

SEQ ID NO: 3208388 - RNA, 18 nt, Human
auguuuuuguacucugca

SEQ ID NO: 3208389 - RNA, 18 nt, Human
auguuuuucuucucccuc

SEQ ID NO: 3208390 - RNA, 14 nt, Human
auguuuuugaaggc

SEQ ID NO: 3208391 - RNA, 12 nt, Human
auguuuuugaag

SEQ ID NO: 3208392 - RNA, 17 nt, Human
auguuuuucuucucccu

SEQ ID NO: 3208393 - RNA, 16 nt, Human
auuaaaagaauauuuu

SEQ ID NO: 3208394 - RNA, 15 nt, Human
auuaaaaguuugaaa

SEQ ID NO: 3208395 - RNA, 13 nt, Human
auuaaaauauaau

SEQ ID NO: 3208396 - RNA, 12 nt, Human
auuaaaauaugc

SEQ ID NO: 3208397 - RNA, 18 nt, Human
auuaaaauauaaucucua

SEQ ID NO: 3208398 - RNA, 20 nt, Human
auuaaaauaugcacuaaguc

SEQ ID NO: 3208399 - RNA, 18 nt, Human
auuaaaauaugcacuaag

SEQ ID NO: 3208400 - RNA, 14 nt, Human
auuaaaauaugcac

SEQ ID NO: 3208401 - RNA, 13 nt, Human
auuaaaauaugca

SEQ ID NO: 3208402 - RNA, 15 nt, Human
auuaaaagaauauuu

SEQ ID NO: 3208403 - RNA, 17 nt, Human
auuaaaaauaucaaauu

SEQ ID NO: 3208404 - RNA, 23 nt, Human
auuaaaaagucuuuuaaaaagua

SEQ ID NO: 3208405 - RNA, 18 nt, Human
auuaaaaagucuuuuaaa

SEQ ID NO: 3208406 - RNA, 15 nt, Human
auuaaaaagucuuuu

SEQ ID NO: 3208407 - RNA, 14 nt, Human
auuaaaaagucuuu

SEQ ID NO: 3208408 - RNA, 12 nt, Human
auuaaaaagucu

SEQ ID NO: 3208409 - RNA, 13 nt, Human
auuaaaaagucuu

SEQ ID NO: 3208410 - RNA, 13 nt, Human
auuaaaaaagucu

SEQ ID NO: 3208411 - RNA, 11 nt, Human
auuaaagucag

SEQ ID NO: 3208412 - RNA, 13 nt, Human
auuaaagucagaa

SEQ ID NO: 3208413 - RNA, 16 nt, Human
auuaaagucagaaguu

SEQ ID NO: 3208414 - RNA, 19 nt, Human
auuaaagucagaaguuuua

SEQ ID NO: 3208415 - RNA, 17 nt, Human
auuaaccacuucagcug

SEQ ID NO: 3208416 - RNA, 18 nt, Human
auuaaccacuucagcuga

SEQ ID NO: 3208417 - RNA, 20 nt, Human
auuaaccacuucagcugacu

SEQ ID NO: 3208418 - RNA, 18 nt, Human
auuaaccccauaauuaga

SEQ ID NO: 3208419 - RNA, 15 nt, Human
auuaaccaagguaga

SEQ ID NO: 3208420 - RNA, 17 nt, Human
auuaacugcuuccuaua

SEQ ID NO: 3208421 - RNA, 16 nt, Human
auuaacuuaauaauca

SEQ ID NO: 3208422 - RNA, 14 nt, Human
auuaacuuaauaau

SEQ ID NO: 3208423 - RNA, 19 nt, Human
auuaacuuaauaaucaaga

SEQ ID NO: 3208424 - RNA, 19 nt, Human
auuaacuuacccuguauau

SEQ ID NO: 3208425 - RNA, 20 nt, Human
auuaacuuggaugaguuuug

SEQ ID NO: 3208426 - RNA, 14 nt, Human
auuaagaaagacua

SEQ ID NO: 3208427 - RNA, 13 nt, Human
auuaagaaagacu

SEQ ID NO: 3208428 - RNA, 14 nt, Human
auuaagaagaaacu

SEQ ID NO: 3208429 - RNA, 12 nt, Human
auuaagaaauag

SEQ ID NO: 3208430 - RNA, 11 nt, Human
auuaagaaaua

SEQ ID NO: 3208431 - RNA, 13 nt, Human
uuuuauguugaca

SEQ ID NO: 3208432 - RNA, 12 nt, Human
uuuuauguugac

SEQ ID NO: 3208433 - RNA, 18 nt, Human
uuuuauguugacauuugu

SEQ ID NO: 3208434 - RNA, 15 nt, Human
uuuuauguugacauu

SEQ ID NO: 3208435 - RNA, 23 nt, Human
uuuuauggaggcuuugcauagau

SEQ ID NO: 3208436 - RNA, 15 nt, Human
uuuuauaagaaaacc

SEQ ID NO: 3208437 - RNA, 20 nt, Human
uuuuauaaggacuuccugau

SEQ ID NO: 3208438 - RNA, 19 nt, Human
uuuuauaaggacuuccuga

SEQ ID NO: 3208439 - RNA, 21 nt, Human
uuuuauaacaucuuuauugaa

SEQ ID NO: 3208440 - RNA, 14 nt, Human
uuuuauaaaaagau

SEQ ID NO: 3208441 - RNA, 19 nt, Human
uuuuauuauuaaugcuuug

SEQ ID NO: 3208442 - RNA, 23 nt, Human
uuuuauguugacauuuguuuggu

SEQ ID NO: 3208443 - RNA, 14 nt, Human
uuuucagauucagg

SEQ ID NO: 3208444 - RNA, 18 nt, Human
uuuucagauuugcacaaa

SEQ ID NO: 3208445 - RNA, 17 nt, Human
uuuucagauuugcacaa

SEQ ID NO: 3208446 - RNA, 15 nt, Human
uuuucagauuugcac

SEQ ID NO: 3208447 - RNA, 14 nt, Human
uuuucagauuugca

SEQ ID NO: 3208448 - RNA, 13 nt, Human
uuuucagauuugc

SEQ ID NO: 3208449 - RNA, 18 nt, Human
uuuucagauucaggcauu

SEQ ID NO: 3208450 - RNA, 16 nt, Human
uuuuccaucuaaaaau

SEQ ID NO: 3208451 - RNA, 18 nt, Human
uuuuccauauuuuuacaa

SEQ ID NO: 3208452 - RNA, 15 nt, Human
uuuuccaucuaaaaa

SEQ ID NO: 3208453 - RNA, 14 nt, Human
uuuuccaucuaaaa

SEQ ID NO: 3208454 - RNA, 19 nt, Human
uuuuccagguuuaagcugu

SEQ ID NO: 3208455 - RNA, 14 nt, Human
uuuuccaguauuuu

SEQ ID NO: 3208456 - RNA, 17 nt, Human
uuuuccaguauuuuagu

SEQ ID NO: 3208457 - RNA, 20 nt, Human
uuuucauuagcaaaaaaagu

SEQ ID NO: 3208458 - RNA, 23 nt, Human
uuuucauuagcaaaaaaaguugu

SEQ ID NO: 3208459 - RNA, 22 nt, Human
uuuucauuagcaaaaaaaguug

SEQ ID NO: 3208460 - RNA, 21 nt, Human
uuuucauuagcaaaaaaaguu

SEQ ID NO: 3208461 - RNA, 16 nt, Human
uuuuaguuuuucuguc

SEQ ID NO: 3208462 - RNA, 13 nt, Human
uuuuaguuuugcu

SEQ ID NO: 3208463 - RNA, 15 nt, Human
auguuggccaggcug

SEQ ID NO: 3208464 - RNA, 21 nt, Human
auguuggccaggcugcucuca

SEQ ID NO: 3208465 - RNA, 19 nt, Human
uuuuagaugugcugcuuug

SEQ ID NO: 3208466 - RNA, 20 nt, Human
uuuuagauugagaaaugugu

SEQ ID NO: 3208467 - RNA, 23 nt, Human
uuuuagcacagcguuaugugucu

SEQ ID NO: 3208468 - RNA, 23 nt, Human
uuuuagcaaagcggguuauaaug

SEQ ID NO: 3208469 - RNA, 14 nt, Human
auguuggccaggcu

SEQ ID NO: 3208470 - RNA, 13 nt, Human
auguuggccaggc

SEQ ID NO: 3208471 - RNA, 16 nt, Human
auguuggccaggcugc

SEQ ID NO: 3208472 - RNA, 21 nt, Human
auguugacaucacuggcaugg

SEQ ID NO: 3208473 - RNA, 19 nt, Human
auguugacaucacuggcau

SEQ ID NO: 3208474 - RNA, 16 nt, Human
auguugacauuuguuu

SEQ ID NO: 3208475 - RNA, 14 nt, Human
auguugacauuugu

SEQ ID NO: 3208476 - RNA, 13 nt, Human
auguugacauuug

SEQ ID NO: 3208477 - RNA, 12 nt, Human
auguugacauuu

SEQ ID NO: 3208478 - RNA, 21 nt, Human
auguugaugcaauccuuacaa

SEQ ID NO: 3208479 - RNA, 14 nt, Human
auguugaugcaauc

SEQ ID NO: 3208480 - RNA, 12 nt, Human
auguugauuucu

SEQ ID NO: 3208481 - RNA, 15 nt, Human
auguugauuucuagu

SEQ ID NO: 3208482 - RNA, 13 nt, Human
auguugauuucua

SEQ ID NO: 3208483 - RNA, 22 nt, Human
auguugaugcaauccuuacaaa

SEQ ID NO: 3208484 - RNA, 15 nt, Human
auguugcaaugugaa

SEQ ID NO: 3208485 - RNA, 19 nt, Human
auguugcaaugugaaaaau

SEQ ID NO: 3208486 - RNA, 22 nt, Human
auguugcaaugugaaaaaucug

SEQ ID NO: 3208487 - RNA, 15 nt, Human
auguuaguuuuccuu

SEQ ID NO: 3208488 - RNA, 22 nt, Human
auguuauacaaccuucauuuaa

SEQ ID NO: 3208489 - RNA, 18 nt, Human
auguuaguuaguguagau

SEQ ID NO: 3208490 - RNA, 14 nt, Human
auguuauagcugca

SEQ ID NO: 3208491 - RNA, 16 nt, Human
uuuuaagugaaauuua

SEQ ID NO: 3208492 - RNA, 15 nt, Human
uuuuaagugaaauuu

SEQ ID NO: 3208493 - RNA, 14 nt, Human
uuuuaagugaaauu

SEQ ID NO: 3208494 - RNA, 16 nt, Human
auguugaagccuuugu

SEQ ID NO: 3208495 - RNA, 15 nt, Human
auguugaagccuuug

SEQ ID NO: 3208496 - RNA, 19 nt, Human
auguucaucaaugaaugaa

SEQ ID NO: 3208497 - RNA, 21 nt, Human
auguucaucauccuaagcuau

SEQ ID NO: 3208498 - RNA, 14 nt, Human
auguuauauuuuuc

SEQ ID NO: 3208499 - RNA, 23 nt, Human
auguuauauuuuucuuaaaaagu

SEQ ID NO: 3208500 - RNA, 20 nt, Human
auguuauauuuuucuuaaaa

SEQ ID NO: 3208501 - RNA, 20 nt, Human
auguaugcuucauacaggga

SEQ ID NO: 3208502 - RNA, 22 nt, Human
auguauguaaauagguuucuaa

SEQ ID NO: 3208503 - RNA, 16 nt, Human
auguaugcuucauaca

SEQ ID NO: 3208504 - RNA, 16 nt, Human
auguaucugaaaguca

SEQ ID NO: 3208505 - RNA, 17 nt, Human
auguaugcuucauacag

SEQ ID NO: 3208506 - RNA, 15 nt, Human
auguaucugagcagg

SEQ ID NO: 3208507 - RNA, 13 nt, Human
augucaguaugug

SEQ ID NO: 3208508 - RNA, 12 nt, Human
auguauguguaa

SEQ ID NO: 3208509 - RNA, 20 nt, Human
augucagcaguugcugguaa

SEQ ID NO: 3208510 - RNA, 21 nt, Human
augucagcaguugcugguaaa

SEQ ID NO: 3208511 - RNA, 22 nt, Human
augucagcaguugcugguaaaa

SEQ ID NO: 3208512 - RNA, 18 nt, Human
auguagugccgcucuugg

SEQ ID NO: 3208513 - RNA, 14 nt, Human
auguaguucauacu

SEQ ID NO: 3208514 - RNA, 15 nt, Human
auguaguuugaggaa

SEQ ID NO: 3208515 - RNA, 14 nt, Human
auguaguuugagga

SEQ ID NO: 3208516 - RNA, 24 nt, Human
auguaguuugaggaaauuugcagc

SEQ ID NO: 3208517 - RNA, 23 nt, Human
auguaguuugaggaaauuugcag

SEQ ID NO: 3208518 - RNA, 20 nt, Human
auguaguuugaggaaauuug

SEQ ID NO: 3208519 - RNA, 19 nt, Human
auguaguuugaggaaauuu

SEQ ID NO: 3208520 - RNA, 22 nt, Human
uuugggggaaaauuuagaaaua

SEQ ID NO: 3208521 - RNA, 15 nt, Human
auguaucaaugagua

SEQ ID NO: 3208522 - RNA, 14 nt, Human
auguaucuaagaau

SEQ ID NO: 3208523 - RNA, 16 nt, Human
auguaucuaagaauaa

SEQ ID NO: 3208524 - RNA, 14 nt, Human
augucaguaugugg

SEQ ID NO: 3208525 - RNA, 21 nt, Human
augucagugugacugaucucu

SEQ ID NO: 3208526 - RNA, 15 nt, Human
augucagugugacug

SEQ ID NO: 3208527 - RNA, 16 nt, Human
augucagugugacuga

SEQ ID NO: 3208528 - RNA, 19 nt, Human
auguccaagaagcccagga

SEQ ID NO: 3208529 - RNA, 18 nt, Human
auguccaagaagcccagg

SEQ ID NO: 3208530 - RNA, 23 nt, Human
auguccaagaagcccaggaaagg

SEQ ID NO: 3208531 - RNA, 14 nt, Human
augucccagaaaug

SEQ ID NO: 3208532 - RNA, 24 nt, Human
augucccuaccgagucucuucucc

SEQ ID NO: 3208533 - RNA, 20 nt, Human
augucccaacuuguaaaaau

SEQ ID NO: 3208534 - RNA, 21 nt, Human
auguccaguaagaucacuguu

SEQ ID NO: 3208535 - RNA, 16 nt, Human
auguccauaaaagaga

SEQ ID NO: 3208536 - RNA, 18 nt, Human
auguccauaaaagagacc

SEQ ID NO: 3208537 - RNA, 23 nt, Human
augucucuuuaaugucacaggca

SEQ ID NO: 3208538 - RNA, 13 nt, Human
augucuauugucc

SEQ ID NO: 3208539 - RNA, 14 nt, Human
augucuauugucca

SEQ ID NO: 3208540 - RNA, 23 nt, Human
uuugcucagugucuggcugcaga

SEQ ID NO: 3208541 - RNA, 19 nt, Human
uuugcuaugagcuggggau

SEQ ID NO: 3208542 - RNA, 23 nt, Human
uuugcuaaguaaaucucuucugu

SEQ ID NO: 3208543 - RNA, 21 nt, Human
uuugcuaaguaaaucucuucu

SEQ ID NO: 3208544 - RNA, 23 nt, Human
uuugcccuuuacuugucuuucug

SEQ ID NO: 3208545 - RNA, 13 nt, Human
uuugcccuuuacu

SEQ ID NO: 3208546 - RNA, 23 nt, Human
uuugcccccaaacccccauucug

SEQ ID NO: 3208547 - RNA, 22 nt, Human
uuugcccccaaacccccauucu

SEQ ID NO: 3208548 - RNA, 22 nt, Human
uuugccauguuggccaggcugg

SEQ ID NO: 3208549 - RNA, 17 nt, Human
uuugcacaaaaagauac

SEQ ID NO: 3208550 - RNA, 12 nt, Human
uuugcacaaaaa

SEQ ID NO: 3208551 - RNA, 19 nt, Human
uuuggggauucagauuucu

SEQ ID NO: 3208552 - RNA, 22 nt, Human
uuugggaggccaaggugggagg

SEQ ID NO: 3208553 - RNA, 13 nt, Human
uuuggggaagaac

SEQ ID NO: 3208554 - RNA, 21 nt, Human
uuugggaaguuaaagggaaga

SEQ ID NO: 3208555 - RNA, 17 nt, Human
uuugggaaguuaaaggg

SEQ ID NO: 3208556 - RNA, 22 nt, Human
uuuggccugaugaccaauuuua

SEQ ID NO: 3208557 - RNA, 18 nt, Human
uuuguacuuucuguuaaa

SEQ ID NO: 3208558 - RNA, 17 nt, Human
uuuguacuuucuguuaa

SEQ ID NO: 3208559 - RNA, 18 nt, Human
uuuguccugcaucaucuu

SEQ ID NO: 3208560 - RNA, 13 nt, Human
uuugucuaagaaa

SEQ ID NO: 3208561 - RNA, 20 nt, Human
uuugucuaagaaacauugga

SEQ ID NO: 3208562 - RNA, 16 nt, Human
uuugucuaagaaacau

SEQ ID NO: 3208563 - RNA, 12 nt, Human
uuugucucagau

SEQ ID NO: 3208564 - RNA, 16 nt, Human
uuugugagcaggcugu

SEQ ID NO: 3208565 - RNA, 19 nt, Human
uuugucugccccaaguuuu

SEQ ID NO: 3208566 - RNA, 21 nt, Human
uuugucugccccaaguuuugu

SEQ ID NO: 3208567 - RNA, 14 nt, Human
uuugucucuucugg

SEQ ID NO: 3208568 - RNA, 12 nt, Human
uuugucuccucu

SEQ ID NO: 3208569 - RNA, 12 nt, Human
uuugucucuucu

SEQ ID NO: 3208570 - RNA, 16 nt, Human
uuugugaguuuguuuc

SEQ ID NO: 3208571 - RNA, 15 nt, Human
uuugugaguuuguuu

SEQ ID NO: 3208572 - RNA, 18 nt, Human
uuugugaggaagccgcug

SEQ ID NO: 3208573 - RNA, 19 nt, Human
uuugugaggaagccgcugg

SEQ ID NO: 3208574 - RNA, 22 nt, Human
uuuguuucuuugaauuuucauu

SEQ ID NO: 3208575 - RNA, 17 nt, Human
uuuguuucuuucucuga

SEQ ID NO: 3208576 - RNA, 17 nt, Human
uuuguaaauuuauguga

SEQ ID NO: 3208577 - RNA, 19 nt, Human
uuuguaaauucugauuucu

SEQ ID NO: 3208578 - RNA, 20 nt, Human
uuuguaaauucugauuucuu

SEQ ID NO: 3208579 - RNA, 13 nt, Human
uuuguaaauuguc

SEQ ID NO: 3208580 - RNA, 12 nt, Human
uuuguaaauucu

SEQ ID NO: 3208581 - RNA, 15 nt, Human
uuuguaaauucugau

SEQ ID NO: 3208582 - RNA, 16 nt, Human
uuuguaaauucugauu

SEQ ID NO: 3208583 - RNA, 20 nt, Human
uuuguaaccacaacuuucac

SEQ ID NO: 3208584 - RNA, 13 nt, Human
uuuguagagccag

SEQ ID NO: 3208585 - RNA, 20 nt, Human
uuuguacuuuaucaugaaug

SEQ ID NO: 3208586 - RNA, 12 nt, Human
uuuguacuuucu

SEQ ID NO: 3208587 - RNA, 16 nt, Human
uuuguacuuucuguua

SEQ ID NO: 3208588 - RNA, 15 nt, Human
uuuguacuuucuguu

SEQ ID NO: 3208589 - RNA, 20 nt, Human
uuuguacaugccauugaaaa

SEQ ID NO: 3208590 - RNA, 14 nt, Human
uuuguaccauuuca

SEQ ID NO: 3208591 - RNA, 20 nt, Human
uuuguacgacgucagauguu

SEQ ID NO: 3208592 - RNA, 23 nt, Human
uuuuaaggguuuguggaaaauga

SEQ ID NO: 3208593 - RNA, 15 nt, Human
uuuuaaggacugacu

SEQ ID NO: 3208594 - RNA, 21 nt, Human
uuuuaagcuaggaaaagaaau

SEQ ID NO: 3208595 - RNA, 20 nt, Human
uuuuaaggguuuguggaaaa

SEQ ID NO: 3208596 - RNA, 16 nt, Human
uuuuaaggacugacug

SEQ ID NO: 3208597 - RNA, 19 nt, Human
uuuuaaggacugacugagg

SEQ ID NO: 3208598 - RNA, 22 nt, Human
uuuuaaggacugacugaggcag

SEQ ID NO: 3208599 - RNA, 23 nt, Human
uuuuaaggauaaaucauaaaguc

SEQ ID NO: 3208600 - RNA, 20 nt, Human
uuuuaagccuuuguugaacu

SEQ ID NO: 3208601 - RNA, 19 nt, Human
uuuuaagccuuuguugaac

SEQ ID NO: 3208602 - RNA, 22 nt, Human
uuuuaagaaagaaauacuguau

SEQ ID NO: 3208603 - RNA, 18 nt, Human
uuuuaagaaagaaauacu

SEQ ID NO: 3208604 - RNA, 15 nt, Human
uuuuaagaggcaggg

SEQ ID NO: 3208605 - RNA, 16 nt, Human
uuuuaagaggcagggu

SEQ ID NO: 3208606 - RNA, 18 nt, Human
uuuuaacuuagagcuuuu

SEQ ID NO: 3208607 - RNA, 17 nt, Human
uuuuaacuuagagcuuu

SEQ ID NO: 3208608 - RNA, 14 nt, Human
uuuuaagaaagaaa

SEQ ID NO: 3208609 - RNA, 20 nt, Human
uuuuaacuaaauuuuaaagc

SEQ ID NO: 3208610 - RNA, 24 nt, Human
uuuuaacuaaauuuuaaagccauu

SEQ ID NO: 3208611 - RNA, 18 nt, Human
uuuuaaaacuacuuagca

SEQ ID NO: 3208612 - RNA, 15 nt, Human
uuuuaaaacuacuua

SEQ ID NO: 3208613 - RNA, 20 nt, Human
uuuuaaaacuacuuagcacu

SEQ ID NO: 3208614 - RNA, 16 nt, Human
uuuuaaaacacuucca

SEQ ID NO: 3208615 - RNA, 22 nt, Human
uuuuaaaacacuuccauaaucu

SEQ ID NO: 3208616 - RNA, 14 nt, Human
uuuuaaaacuacuu

SEQ ID NO: 3208617 - RNA, 22 nt, Human
uuuguuugguuauagugcaaua

SEQ ID NO: 3208618 - RNA, 21 nt, Human
uuuuaaaaaacugcugacugu

SEQ ID NO: 3208619 - RNA, 14 nt, Human
uuuuaaaaaacuuu

SEQ ID NO: 3208620 - RNA, 13 nt, Human
uuuguuuguucuu

SEQ ID NO: 3208621 - RNA, 21 nt, Human
uuuuaaaaaagggaguuuuug

SEQ ID NO: 3208622 - RNA, 21 nt, Human
uuuuaaaaaguauugccaaac

SEQ ID NO: 3208623 - RNA, 20 nt, Human
uuuuaaaaaguauugccaaa

SEQ ID NO: 3208624 - RNA, 18 nt, Human
uuuuaaaaaguauugcca

SEQ ID NO: 3208625 - RNA, 14 nt, Human
uuuuaaaaaguauu

SEQ ID NO: 3208626 - RNA, 11 nt, Human
uuuuaaaaagu

SEQ ID NO: 3208627 - RNA, 11 nt, Human
uuuuaaaaaca

SEQ ID NO: 3208628 - RNA, 15 nt, Human
auucaaacagucuca

SEQ ID NO: 3208629 - RNA, 14 nt, Human
auucaaacagucuc

SEQ ID NO: 3208630 - RNA, 16 nt, Human
auucaaaaugauguau

SEQ ID NO: 3208631 - RNA, 14 nt, Human
auucagcucugcaa

SEQ ID NO: 3208632 - RNA, 18 nt, Human
auucagcucugcaagaau

SEQ ID NO: 3208633 - RNA, 21 nt, Human
auucaggaagcucagggccug

SEQ ID NO: 3208634 - RNA, 22 nt, Human
auucaggaagcucagggccugg

SEQ ID NO: 3208635 - RNA, 23 nt, Human
auucaggaagcucagggccuggc

SEQ ID NO: 3208636 - RNA, 16 nt, Human
auucaguuguuagugu

SEQ ID NO: 3208637 - RNA, 21 nt, Human
auucaguuguuagugugucuu

SEQ ID NO: 3208638 - RNA, 20 nt, Human
auucaggaagcucagggccu

SEQ ID NO: 3208639 - RNA, 20 nt, Human
auuccacuuauaggaauuga

SEQ ID NO: 3208640 - RNA, 13 nt, Human
auucaguuucuaa

SEQ ID NO: 3208641 - RNA, 18 nt, Human
auucaguuucuaaaauug

SEQ ID NO: 3208642 - RNA, 20 nt, Human
auucaguuucuaaaauugag

SEQ ID NO: 3208643 - RNA, 13 nt, Human
auucaguuuuuuu

SEQ ID NO: 3208644 - RNA, 19 nt, Human
auucaguuuuuuuccaguu

SEQ ID NO: 3208645 - RNA, 13 nt, Human
auuccacagcugc

SEQ ID NO: 3208646 - RNA, 15 nt, Human
auuccaugaauguuc

SEQ ID NO: 3208647 - RNA, 18 nt, Human
auucccuucaaugcaaaa

SEQ ID NO: 3208648 - RNA, 19 nt, Human
auucccuuguuauucaaca

SEQ ID NO: 3208649 - RNA, 23 nt, Human
auucccuuuucaccuuuucagga

SEQ ID NO: 3208650 - RNA, 16 nt, Human
auucccuuguuauuca

SEQ ID NO: 3208651 - RNA, 16 nt, Human
auuccccaggaggcca

SEQ ID NO: 3208652 - RNA, 20 nt, Human
auuccauuuacugcauucuu

SEQ ID NO: 3208653 - RNA, 22 nt, Human
auuccccacccugaaagcccug

SEQ ID NO: 3208654 - RNA, 20 nt, Human
auuccccagauugcaacagg

SEQ ID NO: 3208655 - RNA, 23 nt, Human
auuauagagcagaaauucuguuu

SEQ ID NO: 3208656 - RNA, 14 nt, Human
auuauagagcagaa

SEQ ID NO: 3208657 - RNA, 21 nt, Human
auuauagagcagaaauucugu

SEQ ID NO: 3208658 - RNA, 19 nt, Human
auuauagagcagaaauucu

SEQ ID NO: 3208659 - RNA, 17 nt, Human
auuauagagcagaaauu

SEQ ID NO: 3208660 - RNA, 16 nt, Human
auuauagagcagaaau

SEQ ID NO: 3208661 - RNA, 13 nt, Human
auuauaauguauu

SEQ ID NO: 3208662 - RNA, 14 nt, Human
auuauaauguauuc

SEQ ID NO: 3208663 - RNA, 21 nt, Human
auuauaauguauucauauuug

SEQ ID NO: 3208664 - RNA, 19 nt, Human
auuauaauguauucauauu

SEQ ID NO: 3208665 - RNA, 22 nt, Human
auuauaauguauucauauuugu

SEQ ID NO: 3208666 - RNA, 18 nt, Human
auuauaauuguugcauag

SEQ ID NO: 3208667 - RNA, 16 nt, Human
auuauaauuguugcau

SEQ ID NO: 3208668 - RNA, 15 nt, Human
auuauaauuguugca

SEQ ID NO: 3208669 - RNA, 13 nt, Human
auuauaauuguug

SEQ ID NO: 3208670 - RNA, 18 nt, Human
auuacugcuuuaaucaga

SEQ ID NO: 3208671 - RNA, 20 nt, Human
auuacugcuuuaaucagaaa

SEQ ID NO: 3208672 - RNA, 21 nt, Human
auuacugcuuuaaucagaaac

SEQ ID NO: 3208673 - RNA, 17 nt, Human
auuacuggaucucuuaa

SEQ ID NO: 3208674 - RNA, 19 nt, Human
auuacuggaucucuuaaga

SEQ ID NO: 3208675 - RNA, 18 nt, Human
auuacuuguugccuauaa

SEQ ID NO: 3208676 - RNA, 15 nt, Human
auuacuuuaacaugc

SEQ ID NO: 3208677 - RNA, 16 nt, Human
auuacuuuaacaugcc

SEQ ID NO: 3208678 - RNA, 12 nt, Human
auuagaaaacuu

SEQ ID NO: 3208679 - RNA, 17 nt, Human
auuagaaaacuuuguua

SEQ ID NO: 3208680 - RNA, 16 nt, Human
auuagaaaacuuuguu

SEQ ID NO: 3208681 - RNA, 17 nt, Human
auuacuuguugccuaua

SEQ ID NO: 3208682 - RNA, 19 nt, Human
auuaccuggauguucuuuu

SEQ ID NO: 3208683 - RNA, 14 nt, Human
auuagaacccuugc

SEQ ID NO: 3208684 - RNA, 18 nt, Human
auuagaaaacuuuguuag

SEQ ID NO: 3208685 - RNA, 13 nt, Human
auuagaaaauauu

SEQ ID NO: 3208686 - RNA, 15 nt, Human
auuagaaaauauucu

SEQ ID NO: 3208687 - RNA, 17 nt, Human
auuagaaaauauucucu

SEQ ID NO: 3208688 - RNA, 21 nt, Human
auuagaaaauauucucuauuu

SEQ ID NO: 3208689 - RNA, 15 nt, Human
auuauaagucuuaca

SEQ ID NO: 3208690 - RNA, 17 nt, Human
auuauaagucuuacaua

SEQ ID NO: 3208691 - RNA, 19 nt, Human
auuauaagucuuacauaaa

SEQ ID NO: 3208692 - RNA, 18 nt, Human
auuauaaucaccagggcc

SEQ ID NO: 3208693 - RNA, 13 nt, Human
auuagagaagaga

SEQ ID NO: 3208694 - RNA, 15 nt, Human
auuagaauuaccauu

SEQ ID NO: 3208695 - RNA, 17 nt, Human
auuagaauuaccauuug

SEQ ID NO: 3208696 - RNA, 19 nt, Human
auuagaauuaccauuuguu

SEQ ID NO: 3208697 - RNA, 21 nt, Human
auuagaauuaccauuuguuaa

SEQ ID NO: 3208698 - RNA, 13 nt, Human
auuauuuuaaaag

SEQ ID NO: 3208699 - RNA, 13 nt, Human
auuauuuauuaca

SEQ ID NO: 3208700 - RNA, 23 nt, Human
auuauuuauuaaaugcccagccc

SEQ ID NO: 3208701 - RNA, 14 nt, Human
auuauuuuaaaaga

SEQ ID NO: 3208702 - RNA, 15 nt, Human
auuauuaaugcuuug

SEQ ID NO: 3208703 - RNA, 14 nt, Human
auuauuaaugcuuu

SEQ ID NO: 3208704 - RNA, 16 nt, Human
auuauuaaugcuuugg

SEQ ID NO: 3208705 - RNA, 20 nt, Human
auuauucuuucuccuuuuuu

SEQ ID NO: 3208706 - RNA, 14 nt, Human
auuauuuacaagaa

SEQ ID NO: 3208707 - RNA, 16 nt, Human
auuauucuuucuccuu

SEQ ID NO: 3208708 - RNA, 13 nt, Human
auuauucuuucuc

SEQ ID NO: 3208709 - RNA, 19 nt, Human
auuauugagagcccuagaa

SEQ ID NO: 3208710 - RNA, 20 nt, Human
auuauugaguuccaguugaa

SEQ ID NO: 3208711 - RNA, 21 nt, Human
auuauugaguuccaguugaag

SEQ ID NO: 3208712 - RNA, 21 nt, Human
auuaucaaguagacuacuguu

SEQ ID NO: 3208713 - RNA, 13 nt, Human
auuaucagcaaag

SEQ ID NO: 3208714 - RNA, 15 nt, Human
auuaucagcaaagaa

SEQ ID NO: 3208715 - RNA, 16 nt, Human
auuaucagcaaagaaa

SEQ ID NO: 3208716 - RNA, 23 nt, Human
auuaucucaaaacugcacuguca

SEQ ID NO: 3208717 - RNA, 18 nt, Human
auuaucucaaaacugcac

SEQ ID NO: 3208718 - RNA, 18 nt, Human
auuaucuuguucaggaaa

SEQ ID NO: 3208719 - RNA, 14 nt, Human
auuauguuuuacug

SEQ ID NO: 3208720 - RNA, 23 nt, Human
auuauuaaauuguaaaacuccaa

SEQ ID NO: 3208721 - RNA, 16 nt, Human
auuaagaucucagugg

SEQ ID NO: 3208722 - RNA, 22 nt, Human
uuuuuguuccacaaguuaaaua

SEQ ID NO: 3208723 - RNA, 21 nt, Human
auuaagacaauagcacuuaaa

SEQ ID NO: 3208724 - RNA, 19 nt, Human
auuaaguaagucucaaggu

SEQ ID NO: 3208725 - RNA, 15 nt, Human
auuaagguguuugaa

SEQ ID NO: 3208726 - RNA, 17 nt, Human
auuaagguguuugaaaa

SEQ ID NO: 3208727 - RNA, 18 nt, Human
auuaagguguuugaaaau

SEQ ID NO: 3208728 - RNA, 20 nt, Human
auuaagguguuugaaaauag

SEQ ID NO: 3208729 - RNA, 18 nt, Human
uuuuuguuuuguugcacu

SEQ ID NO: 3208730 - RNA, 14 nt, Human
uuuuuguuuuucug

SEQ ID NO: 3208731 - RNA, 16 nt, Human
uuuuuguuuuucugcu

SEQ ID NO: 3208732 - RNA, 12 nt, Human
auuaauauucau

SEQ ID NO: 3208733 - RNA, 12 nt, Human
auuaauauauua

SEQ ID NO: 3208734 - RNA, 13 nt, Human
auuaauauauuaa

SEQ ID NO: 3208735 - RNA, 14 nt, Human
auuaauauauuaaa

SEQ ID NO: 3208736 - RNA, 14 nt, Human
auuaauaucuuucu

SEQ ID NO: 3208737 - RNA, 17 nt, Human
auuaauaucuuucugca

SEQ ID NO: 3208738 - RNA, 19 nt, Human
auuaauaucuuucugcaca

SEQ ID NO: 3208739 - RNA, 17 nt, Human
auuaauccacauguuuc

SEQ ID NO: 3208740 - RNA, 18 nt, Human
auuaauccacauguuuca

SEQ ID NO: 3208741 - RNA, 18 nt, Human
auuacauuuguaauuuaa

SEQ ID NO: 3208742 - RNA, 15 nt, Human
auuacauuuguaauu

SEQ ID NO: 3208743 - RNA, 14 nt, Human
auuacauuuguaau

SEQ ID NO: 3208744 - RNA, 13 nt, Human
auuacauuuguaa

SEQ ID NO: 3208745 - RNA, 23 nt, Human
auuacauuuuauuaagcuuuuug

SEQ ID NO: 3208746 - RNA, 19 nt, Human
auuacauuuguaauuuaag

SEQ ID NO: 3208747 - RNA, 12 nt, Human
auuaccaaaaua

SEQ ID NO: 3208748 - RNA, 19 nt, Human
auuaccaauaggcaaauua

SEQ ID NO: 3208749 - RNA, 20 nt, Human
auuaccaauaggcaaauuaa

SEQ ID NO: 3208750 - RNA, 22 nt, Human
auuaccaauaggcaaauuaauc

SEQ ID NO: 3208751 - RNA, 22 nt, Human
auuaccugaauuuuggcugugu

SEQ ID NO: 3208752 - RNA, 22 nt, Human
auuaccaccaucccgugcuuuu

SEQ ID NO: 3208753 - RNA, 15 nt, Human
auuaccaccaucccg

SEQ ID NO: 3208754 - RNA, 20 nt, Human
auuaccucuuuggaaaagga

SEQ ID NO: 3208755 - RNA, 16 nt, Human
aucuguaccucugccu

SEQ ID NO: 3208756 - RNA, 23 nt, Human
aucugugaaaggaaagagggagg

SEQ ID NO: 3208757 - RNA, 11 nt, Human
aucugugaaau

SEQ ID NO: 3208758 - RNA, 12 nt, Human
aucugugaaaua

SEQ ID NO: 3208759 - RNA, 16 nt, Human
aucugugaaauaucau

SEQ ID NO: 3208760 - RNA, 17 nt, Human
aucugugaaauaucauc

SEQ ID NO: 3208761 - RNA, 15 nt, Human
aucugguauuaaaug

SEQ ID NO: 3208762 - RNA, 16 nt, Human
aucugguauuaaaugc

SEQ ID NO: 3208763 - RNA, 18 nt, Human
aucugguauuaaaugcca

SEQ ID NO: 3208764 - RNA, 17 nt, Human
aucuguaagcuguuugg

SEQ ID NO: 3208765 - RNA, 15 nt, Human
aucuguaagcuguuu

SEQ ID NO: 3208766 - RNA, 14 nt, Human
aucuguaagcuguu

SEQ ID NO: 3208767 - RNA, 12 nt, Human
aucuguaagcug

SEQ ID NO: 3208768 - RNA, 17 nt, Human
aucuguaagaguguuua

SEQ ID NO: 3208769 - RNA, 17 nt, Human
aucuggguucacugcaa

SEQ ID NO: 3208770 - RNA, 19 nt, Human
aucuggguucacugcaacc

SEQ ID NO: 3208771 - RNA, 19 nt, Human
aucuugcucugcugacaga

SEQ ID NO: 3208772 - RNA, 17 nt, Human
aucuugcucugcugaca

SEQ ID NO: 3208773 - RNA, 17 nt, Human
aucuugaauuguaagga

SEQ ID NO: 3208774 - RNA, 18 nt, Human
aucuugaauuguaaggaa

SEQ ID NO: 3208775 - RNA, 14 nt, Human
aucuugacagagcc

SEQ ID NO: 3208776 - RNA, 17 nt, Human
aucuguuagaugcuacu

SEQ ID NO: 3208777 - RNA, 18 nt, Human
aucuguuagaugcuacua

SEQ ID NO: 3208778 - RNA, 19 nt, Human
aucuguuagaugcuacuaa

SEQ ID NO: 3208779 - RNA, 23 nt, Human
aucuguuagaugcuacuaagaaa

SEQ ID NO: 3208780 - RNA, 23 nt, Human
aucuguuauagguccuuuagaaa

SEQ ID NO: 3208781 - RNA, 11 nt, Human
aucugugaaua

SEQ ID NO: 3208782 - RNA, 13 nt, Human
aucugugaauaag

SEQ ID NO: 3208783 - RNA, 12 nt, Human
aucugugaauaa

SEQ ID NO: 3208784 - RNA, 12 nt, Human
aucuuacuuugu

SEQ ID NO: 3208785 - RNA, 13 nt, Human
aucuuacuuugua

SEQ ID NO: 3208786 - RNA, 14 nt, Human
aucuuacuuuguaa

SEQ ID NO: 3208787 - RNA, 21 nt, Human
aucuuacuuuguaaauucuga

SEQ ID NO: 3208788 - RNA, 22 nt, Human
aucuuacuuuguaaauucugau

SEQ ID NO: 3208789 - RNA, 16 nt, Human
aucuuacuuuguaaau

SEQ ID NO: 3208790 - RNA, 17 nt, Human
aucuuacuuuguaaauu

SEQ ID NO: 3208791 - RNA, 19 nt, Human
aucuuacuuuguaaauucu

SEQ ID NO: 3208792 - RNA, 20 nt, Human
aucuuacuuuguaaauucug

SEQ ID NO: 3208793 - RNA, 20 nt, Human
aucugagaggccacagugca

SEQ ID NO: 3208794 - RNA, 18 nt, Human
uugccuauauuuuccuga

SEQ ID NO: 3208795 - RNA, 17 nt, Human
uugccuauauuuuccug

SEQ ID NO: 3208796 - RNA, 20 nt, Human
uugccuauaagccaaaauua

SEQ ID NO: 3208797 - RNA, 18 nt, Human
uugccucagcuuccccag

SEQ ID NO: 3208798 - RNA, 19 nt, Human
uugccucagcuuccccagu

SEQ ID NO: 3208799 - RNA, 18 nt, Human
aucugaugcaagcaagaa

SEQ ID NO: 3208800 - RNA, 14 nt, Human
aucugauuccagca

SEQ ID NO: 3208801 - RNA, 21 nt, Human
aucugcaaagcauguuuugca

SEQ ID NO: 3208802 - RNA, 16 nt, Human
aucugcaaagcauguu

SEQ ID NO: 3208803 - RNA, 22 nt, Human
aucugcaaagcauguuuugcau

SEQ ID NO: 3208804 - RNA, 13 nt, Human
uugcccuguuaaa

SEQ ID NO: 3208805 - RNA, 13 nt, Human
uugccgucuaccu

SEQ ID NO: 3208806 - RNA, 22 nt, Human
uugcccuuuacuugucuuucug

SEQ ID NO: 3208807 - RNA, 18 nt, Human
uugccguggcaucuuaaa

SEQ ID NO: 3208808 - RNA, 19 nt, Human
uugccgucuaccugagggg

SEQ ID NO: 3208809 - RNA, 15 nt, Human
uugccgucuaccuga

SEQ ID NO: 3208810 - RNA, 18 nt, Human
uugccgucuaccugaggg

SEQ ID NO: 3208811 - RNA, 21 nt, Human
uugcaucuggguagcuguaag

SEQ ID NO: 3208812 - RNA, 18 nt, Human
uugcaucuggguagcugu

SEQ ID NO: 3208813 - RNA, 20 nt, Human
uugcaucuggguagcuguaa

SEQ ID NO: 3208814 - RNA, 19 nt, Human
uugcaucuggguagcugua

SEQ ID NO: 3208815 - RNA, 15 nt, Human
uugauucagacagcu

SEQ ID NO: 3208816 - RNA, 16 nt, Human
uugauucagacagcug

SEQ ID NO: 3208817 - RNA, 19 nt, Human
uugcaauuaaacuuccaaa

SEQ ID NO: 3208818 - RNA, 22 nt, Human
uugcacaaaaagauaccuuaaa

SEQ ID NO: 3208819 - RNA, 15 nt, Human
uugcacaaaaagaua

SEQ ID NO: 3208820 - RNA, 15 nt, Human
uugcacaauuauaaa

SEQ ID NO: 3208821 - RNA, 17 nt, Human
uugcacacaucaucugu

SEQ ID NO: 3208822 - RNA, 15 nt, Human
uugcacacaucaucu

SEQ ID NO: 3208823 - RNA, 23 nt, Human
uugcacaaaaagauaccuuaaaa

SEQ ID NO: 3208824 - RNA, 19 nt, Human
uugcacacaucaucuguaa

SEQ ID NO: 3208825 - RNA, 18 nt, Human
uugcacacaucaucugua

SEQ ID NO: 3208826 - RNA, 20 nt, Human
uugcacacaucaucuguaag

SEQ ID NO: 3208827 - RNA, 14 nt, Human
uugcacauggauuc

SEQ ID NO: 3208828 - RNA, 19 nt, Human
uugcacauggauucaguuu

SEQ ID NO: 3208829 - RNA, 16 nt, Human
uugauucacauguuuu

SEQ ID NO: 3208830 - RNA, 14 nt, Human
uugauucacauguu

SEQ ID NO: 3208831 - RNA, 12 nt, Human
uugauguguugu

SEQ ID NO: 3208832 - RNA, 13 nt, Human
uugauguguuguu

SEQ ID NO: 3208833 - RNA, 14 nt, Human
uugauguguuguuc

SEQ ID NO: 3208834 - RNA, 14 nt, Human
uugauucagacagc

SEQ ID NO: 3208835 - RNA, 23 nt, Human
uugauucacauguuuucaaaugg

SEQ ID NO: 3208836 - RNA, 20 nt, Human
uugauucacauguuuucaaa

SEQ ID NO: 3208837 - RNA, 19 nt, Human
uugauucacauguuuucaa

SEQ ID NO: 3208838 - RNA, 18 nt, Human
uugauucacauguuuuca

SEQ ID NO: 3208839 - RNA, 23 nt, Human
uugauggugaugaaauguaaaua

SEQ ID NO: 3208840 - RNA, 12 nt, Human
uugaugucagca

SEQ ID NO: 3208841 - RNA, 18 nt, Human
uugaugucagcaguugcu

SEQ ID NO: 3208842 - RNA, 23 nt, Human
uugauguaaagauguucuggaua

SEQ ID NO: 3208843 - RNA, 14 nt, Human
uugauguaaagaug

SEQ ID NO: 3208844 - RNA, 23 nt, Human
uugaugcauuaaaagaaaauaaa

SEQ ID NO: 3208845 - RNA, 19 nt, Human
aucucuucuggguuccuuc

SEQ ID NO: 3208846 - RNA, 20 nt, Human
uugaugcauuaaaagaaaau

SEQ ID NO: 3208847 - RNA, 22 nt, Human
uugaugggaugauugaagaaac

SEQ ID NO: 3208848 - RNA, 21 nt, Human
uugaugggaugauugaagaaa

SEQ ID NO: 3208849 - RNA, 21 nt, Human
aucucccacaugccaggggcc

SEQ ID NO: 3208850 - RNA, 13 nt, Human
aucucccacaugc

SEQ ID NO: 3208851 - RNA, 12 nt, Human
aucucccccagc

SEQ ID NO: 3208852 - RNA, 13 nt, Human
aucucccccagcc

SEQ ID NO: 3208853 - RNA, 21 nt, Human
aucucuuaagacagcaugugu

SEQ ID NO: 3208854 - RNA, 22 nt, Human
aucucuuaagacagcauguguu

SEQ ID NO: 3208855 - RNA, 23 nt, Human
aucucuuaagacagcauguguua

SEQ ID NO: 3208856 - RNA, 23 nt, Human
aucucagugguuaagauuccuaa

SEQ ID NO: 3208857 - RNA, 14 nt, Human
aucucagugcuuuc

SEQ ID NO: 3208858 - RNA, 15 nt, Human
aucucagugcuuucc

SEQ ID NO: 3208859 - RNA, 13 nt, Human
aucucaucauguc

SEQ ID NO: 3208860 - RNA, 16 nt, Human
aucucaucaugucuau

SEQ ID NO: 3208861 - RNA, 19 nt, Human
aucucaucaugucuauugu

SEQ ID NO: 3208862 - RNA, 15 nt, Human
aucuccacuccagau

SEQ ID NO: 3208863 - RNA, 15 nt, Human
aucucacacaugagc

SEQ ID NO: 3208864 - RNA, 15 nt, Human
auccuaguuccacca

SEQ ID NO: 3208865 - RNA, 19 nt, Human
auccuaguuccaccaucaa

SEQ ID NO: 3208866 - RNA, 18 nt, Human
aucucagauguuaaaaua

SEQ ID NO: 3208867 - RNA, 19 nt, Human
aucucagauguuaaaauaa

SEQ ID NO: 3208868 - RNA, 20 nt, Human
aucucagauguuaaaauaaa

SEQ ID NO: 3208869 - RNA, 21 nt, Human
aucucagauguuaaaauaaau

SEQ ID NO: 3208870 - RNA, 23 nt, Human
aucucagauguuaaaauaaaugg

SEQ ID NO: 3208871 - RNA, 11 nt, Human
aucucagccca

SEQ ID NO: 3208872 - RNA, 17 nt, Human
aucucagauauuugcac

SEQ ID NO: 3208873 - RNA, 16 nt, Human
aucucagauauuugca

SEQ ID NO: 3208874 - RNA, 15 nt, Human
aucucagauauuugc

SEQ ID NO: 3208875 - RNA, 14 nt, Human
aucucagauauuug

SEQ ID NO: 3208876 - RNA, 17 nt, Human
aucucagcccugcaacu

SEQ ID NO: 3208877 - RNA, 14 nt, Human
aucucaguccucaa

SEQ ID NO: 3208878 - RNA, 19 nt, Human
augagaacagauaaagauu

SEQ ID NO: 3208879 - RNA, 18 nt, Human
augagaacagauaaagau

SEQ ID NO: 3208880 - RNA, 17 nt, Human
augagaacagauaaaga

SEQ ID NO: 3208881 - RNA, 22 nt, Human
augagaaagguugaagcaccaa

SEQ ID NO: 3208882 - RNA, 21 nt, Human
augagaaagguugaagcacca

SEQ ID NO: 3208883 - RNA, 22 nt, Human
augagaacagauaaagauugug

SEQ ID NO: 3208884 - RNA, 11 nt, Human
augagaauguu

SEQ ID NO: 3208885 - RNA, 22 nt, Human
augacuuaagcacacuugacau

SEQ ID NO: 3208886 - RNA, 23 nt, Human
augaccaaauaucaccaggacug

SEQ ID NO: 3208887 - RNA, 13 nt, Human
augaccaauuuua

SEQ ID NO: 3208888 - RNA, 20 nt, Human
augaccaauuuuaacuuaga

SEQ ID NO: 3208889 - RNA, 17 nt, Human
augaccaauuuuaacuu

SEQ ID NO: 3208890 - RNA, 18 nt, Human
augacacgaauauugcug

SEQ ID NO: 3208891 - RNA, 15 nt, Human
augacaccaucuuuu

SEQ ID NO: 3208892 - RNA, 16 nt, Human
augacaccaucuuuua

SEQ ID NO: 3208893 - RNA, 20 nt, Human
augacaccaucuuuuauucu

SEQ ID NO: 3208894 - RNA, 22 nt, Human
augacaccaucuuuuauucuuu

SEQ ID NO: 3208895 - RNA, 23 nt, Human
augacaccaucuuuuauucuuuu

SEQ ID NO: 3208896 - RNA, 19 nt, Human
augacuuccccaauaucuu

SEQ ID NO: 3208897 - RNA, 22 nt, Human
augacuuccccaauaucuugcu

SEQ ID NO: 3208898 - RNA, 18 nt, Human
augacuuuuugaaaguaa

SEQ ID NO: 3208899 - RNA, 14 nt, Human
augacuuuuugaaa

SEQ ID NO: 3208900 - RNA, 17 nt, Human
augacuuuauuauuuau

SEQ ID NO: 3208901 - RNA, 16 nt, Human
augacuuuauugcauc

SEQ ID NO: 3208902 - RNA, 13 nt, Human
augacuuuauugc

SEQ ID NO: 3208903 - RNA, 18 nt, Human
augacuuuauuauuuauu

SEQ ID NO: 3208904 - RNA, 21 nt, Human
augacuuuauugcaucugggu

SEQ ID NO: 3208905 - RNA, 13 nt, Human
uuguauacaagua

SEQ ID NO: 3208906 - RNA, 16 nt, Human
uuguauacaaguacug

SEQ ID NO: 3208907 - RNA, 17 nt, Human
uuguauacaaguacugg

SEQ ID NO: 3208908 - RNA, 19 nt, Human
uuguaguguucagaaaaaa

SEQ ID NO: 3208909 - RNA, 19 nt, Human
uuguauauugguuuuauga

SEQ ID NO: 3208910 - RNA, 22 nt, Human
uuguauauugguuuuaugauga

SEQ ID NO: 3208911 - RNA, 19 nt, Human
uuguauaguuauguaaaua

SEQ ID NO: 3208912 - RNA, 20 nt, Human
uuguauaguuauguaaauaa

SEQ ID NO: 3208913 - RNA, 14 nt, Human
uuguauauucuauu

SEQ ID NO: 3208914 - RNA, 13 nt, Human
uuguauauugguu

SEQ ID NO: 3208915 - RNA, 22 nt, Human
uuguauauucuauuuuacaacu

SEQ ID NO: 3208916 - RNA, 14 nt, Human
uuguauauugguuu

SEQ ID NO: 3208917 - RNA, 16 nt, Human
uuguauauugguuuua

SEQ ID NO: 3208918 - RNA, 14 nt, Human
uuguauaguuaugu

SEQ ID NO: 3208919 - RNA, 16 nt, Human
uuguauaguuauguaa

SEQ ID NO: 3208920 - RNA, 17 nt, Human
uuguauaguuauguaaa

SEQ ID NO: 3208921 - RNA, 18 nt, Human
uuguauaguuauguaaau

SEQ ID NO: 3208922 - RNA, 16 nt, Human
uuguaucacaaaucuu

SEQ ID NO: 3208923 - RNA, 12 nt, Human
augaauuguaaa

SEQ ID NO: 3208924 - RNA, 14 nt, Human
augaauuuuaaagu

SEQ ID NO: 3208925 - RNA, 15 nt, Human
augaauuuuaaagua

SEQ ID NO: 3208926 - RNA, 16 nt, Human
augaauuuuaaaguau

SEQ ID NO: 3208927 - RNA, 17 nt, Human
augaauuuuaaaguaug

SEQ ID NO: 3208928 - RNA, 22 nt, Human
augaauuuuaaaguaugcauua

SEQ ID NO: 3208929 - RNA, 20 nt, Human
augaauuuuuuuauuucugu

SEQ ID NO: 3208930 - RNA, 20 nt, Human
uuguaggcgaaucauuuguu

SEQ ID NO: 3208931 - RNA, 12 nt, Human
uugguuggaagg

SEQ ID NO: 3208932 - RNA, 16 nt, Human
uugguugaauaaacua

SEQ ID NO: 3208933 - RNA, 13 nt, Human
uugguugaauaaa

SEQ ID NO: 3208934 - RNA, 18 nt, Human
aucuuuaauuaaaaccug

SEQ ID NO: 3208935 - RNA, 18 nt, Human
aucuuugcagacaggcaa

SEQ ID NO: 3208936 - RNA, 16 nt, Human
aucuuuagaaaaggca

SEQ ID NO: 3208937 - RNA, 13 nt, Human
aucuuuuucuaac

SEQ ID NO: 3208938 - RNA, 15 nt, Human
aucuuuguaccaaaa

SEQ ID NO: 3208939 - RNA, 17 nt, Human
aucuuuguaccaaaauu

SEQ ID NO: 3208940 - RNA, 19 nt, Human
aucuuuguaccaaaauuuu

SEQ ID NO: 3208941 - RNA, 20 nt, Human
aucuuuguaccaaaauuuua

SEQ ID NO: 3208942 - RNA, 21 nt, Human
aucuuuguaccaaaauuuuaa

SEQ ID NO: 3208943 - RNA, 19 nt, Human
aucuuuuuaaccucuguuc

SEQ ID NO: 3208944 - RNA, 22 nt, Human
aucuuuuguuacucuugggaca

SEQ ID NO: 3208945 - RNA, 15 nt, Human
augaaagcagggacu

SEQ ID NO: 3208946 - RNA, 21 nt, Human
aucuuuuuaaccucuguucag

SEQ ID NO: 3208947 - RNA, 19 nt, Human
augaaagcauggcuaauag

SEQ ID NO: 3208948 - RNA, 22 nt, Human
uuggaguucauucauauuacaa

SEQ ID NO: 3208949 - RNA, 21 nt, Human
uuggaguucauucauauuaca

SEQ ID NO: 3208950 - RNA, 19 nt, Human
uuggaguucauucauauua

SEQ ID NO: 3208951 - RNA, 18 nt, Human
uuggaguucauucauauu

SEQ ID NO: 3208952 - RNA, 12 nt, Human
aucuugcuugaa

SEQ ID NO: 3208953 - RNA, 13 nt, Human
uuggaguuaaaau

SEQ ID NO: 3208954 - RNA, 16 nt, Human
uuggaguucauucaua

SEQ ID NO: 3208955 - RNA, 14 nt, Human
uuggaguucauuca

SEQ ID NO: 3208956 - RNA, 18 nt, Human
uuggaugaguuuugggaa

SEQ ID NO: 3208957 - RNA, 12 nt, Human
uuggaugaguuu

SEQ ID NO: 3208958 - RNA, 22 nt, Human
uuggauaacaccaccauucaca

SEQ ID NO: 3208959 - RNA, 17 nt, Human
uuggaguuggaguagaa

SEQ ID NO: 3208960 - RNA, 15 nt, Human
uuggaucaaguauua

SEQ ID NO: 3208961 - RNA, 15 nt, Human
uuggauuaaauuagu

SEQ ID NO: 3208962 - RNA, 22 nt, Human
uuggcgcugccccuggcagccc

SEQ ID NO: 3208963 - RNA, 21 nt, Human
uuggauuauucuuucuccuuu

SEQ ID NO: 3208964 - RNA, 17 nt, Human
uuggauuauucuuucuc

SEQ ID NO: 3208965 - RNA, 23 nt, Human
uuggcgcugccccuggcagcccc

SEQ ID NO: 3208966 - RNA, 19 nt, Human
uuggcguagcagaguuaaa

SEQ ID NO: 3208967 - RNA, 22 nt, Human
uuggcguagcagaguuaaaucu

SEQ ID NO: 3208968 - RNA, 12 nt, Human
uuggcucugagg

SEQ ID NO: 3208969 - RNA, 13 nt, Human
augaacuuaacau

SEQ ID NO: 3208970 - RNA, 16 nt, Human
augaacuuaacaugcu

SEQ ID NO: 3208971 - RNA, 20 nt, Human
augaacuuaacaugcugugu

SEQ ID NO: 3208972 - RNA, 12 nt, Human
augaacugaaag

SEQ ID NO: 3208973 - RNA, 18 nt, Human
augaagauguagaggaga

SEQ ID NO: 3208974 - RNA, 13 nt, Human
augaaugaauggc

SEQ ID NO: 3208975 - RNA, 15 nt, Human
augaacuuauuaaua

SEQ ID NO: 3208976 - RNA, 20 nt, Human
augaaugucagugugacuga

SEQ ID NO: 3208977 - RNA, 23 nt, Human
augaaugacuuccccaauaucuu

SEQ ID NO: 3208978 - RNA, 22 nt, Human
augaaugacuuccccaauaucu

SEQ ID NO: 3208979 - RNA, 16 nt, Human
uuggggauguuuuucu

SEQ ID NO: 3208980 - RNA, 21 nt, Human
uuggggcuuuacauacuuuau

SEQ ID NO: 3208981 - RNA, 22 nt, Human
uugggggaggggagacuuugau

SEQ ID NO: 3208982 - RNA, 23 nt, Human
uugggggaggggagacuuugaug

SEQ ID NO: 3208983 - RNA, 15 nt, Human
uugggggcucagcaa

SEQ ID NO: 3208984 - RNA, 13 nt, Human
uugguuccugggg

SEQ ID NO: 3208985 - RNA, 22 nt, Human
uuggggggcugaggugggagga

SEQ ID NO: 3208986 - RNA, 18 nt, Human
uugggccccagaggcugg

SEQ ID NO: 3208987 - RNA, 23 nt, Human
augaauguuccugccuccuugau

SEQ ID NO: 3208988 - RNA, 13 nt, Human
augaauguuccug

SEQ ID NO: 3208989 - RNA, 22 nt, Human
uuucagaaguuuaaauauuaag

SEQ ID NO: 3208990 - RNA, 13 nt, Human
uuucagaagaaau

SEQ ID NO: 3208991 - RNA, 16 nt, Human
uuucagaagaaauaaa

SEQ ID NO: 3208992 - RNA, 21 nt, Human
uuucagaagaaauaaauauac

SEQ ID NO: 3208993 - RNA, 21 nt, Human
uuucagaaguuuaaauauuaa

SEQ ID NO: 3208994 - RNA, 17 nt, Human
uuucaucauauuauaca

SEQ ID NO: 3208995 - RNA, 16 nt, Human
uuucaucauauuauac

SEQ ID NO: 3208996 - RNA, 24 nt, Human
uuucaucagaacagcuguugacuc

SEQ ID NO: 3208997 - RNA, 17 nt, Human
uuucaucagaacagcug

SEQ ID NO: 3208998 - RNA, 17 nt, Human
uuucauauuuuaaacag

SEQ ID NO: 3208999 - RNA, 22 nt, Human
uuucauauuuuaauuucaagcu

SEQ ID NO: 3209000 - RNA, 18 nt, Human
uuucauauuuuaauuuca

SEQ ID NO: 3209001 - RNA, 18 nt, Human
uuucauauuuuucaaaau

SEQ ID NO: 3209002 - RNA, 17 nt, Human
uuucauauuuuucaaaa

SEQ ID NO: 3209003 - RNA, 21 nt, Human
auggaaugaugggucaguugu

SEQ ID NO: 3209004 - RNA, 13 nt, Human
auggaaugagggu

SEQ ID NO: 3209005 - RNA, 14 nt, Human
auggaaugaggguu

SEQ ID NO: 3209006 - RNA, 16 nt, Human
auggaagacagcucuu

SEQ ID NO: 3209007 - RNA, 22 nt, Human
uuucacugcuggcugccuuaga

SEQ ID NO: 3209008 - RNA, 20 nt, Human
uuucacugcuggcugccuua

SEQ ID NO: 3209009 - RNA, 18 nt, Human
uuucacugcuggcugccu

SEQ ID NO: 3209010 - RNA, 17 nt, Human
uuucacugcuggcugcc

SEQ ID NO: 3209011 - RNA, 14 nt, Human
uuucacugcuggcu

SEQ ID NO: 3209012 - RNA, 12 nt, Human
uuucaugugcuc

SEQ ID NO: 3209013 - RNA, 22 nt, Human
uuucauguccugugucaguuua

SEQ ID NO: 3209014 - RNA, 21 nt, Human
uuucauguccugugucaguuu

SEQ ID NO: 3209015 - RNA, 17 nt, Human
uuucauguccuguguca

SEQ ID NO: 3209016 - RNA, 15 nt, Human
uuucauguccauaaa

SEQ ID NO: 3209017 - RNA, 18 nt, Human
uuucaugucccagaacuu

SEQ ID NO: 3209018 - RNA, 14 nt, Human
auggacaugaucuu

SEQ ID NO: 3209019 - RNA, 18 nt, Human
auggacagcauugccagu

SEQ ID NO: 3209020 - RNA, 14 nt, Human
uuucccauuuagaa

SEQ ID NO: 3209021 - RNA, 14 nt, Human
uuuccccagggcac

SEQ ID NO: 3209022 - RNA, 16 nt, Human
auggccugggggaugu

SEQ ID NO: 3209023 - RNA, 20 nt, Human
auggcuaguaucaaaagaaa

SEQ ID NO: 3209024 - RNA, 17 nt, Human
auggcuacuugcuuuga

SEQ ID NO: 3209025 - RNA, 18 nt, Human
auggcuaauguacugcau

SEQ ID NO: 3209026 - RNA, 21 nt, Human
auggccgggcgcgguggcuca

SEQ ID NO: 3209027 - RNA, 16 nt, Human
auggccagguggccac

SEQ ID NO: 3209028 - RNA, 21 nt, Human
auggccaggaaguagcacagg

SEQ ID NO: 3209029 - RNA, 23 nt, Human
auggccaggaaguagcacaggcu

SEQ ID NO: 3209030 - RNA, 22 nt, Human
auggccaggaaguagcacaggc

SEQ ID NO: 3209031 - RNA, 22 nt, Human
auggccagguggccacuccaga

SEQ ID NO: 3209032 - RNA, 18 nt, Human
auggauuuccagccaaag

SEQ ID NO: 3209033 - RNA, 23 nt, Human
auggacguguuaugacuccagaa

SEQ ID NO: 3209034 - RNA, 19 nt, Human
auggacguguuaugacucc

SEQ ID NO: 3209035 - RNA, 20 nt, Human
auggacguguuaugacucca

SEQ ID NO: 3209036 - RNA, 14 nt, Human
auggcaacaaacug

SEQ ID NO: 3209037 - RNA, 22 nt, Human
auggcaacaaacugcacaugau

SEQ ID NO: 3209038 - RNA, 20 nt, Human
auggcaacaaacugcacaug

SEQ ID NO: 3209039 - RNA, 19 nt, Human
auggcaacaaacugcacau

SEQ ID NO: 3209040 - RNA, 17 nt, Human
auggcaacaaacugcac

SEQ ID NO: 3209041 - RNA, 21 nt, Human
auggcacagggcaugaaauga

SEQ ID NO: 3209042 - RNA, 20 nt, Human
auggcacagggcaugaaaug

SEQ ID NO: 3209043 - RNA, 19 nt, Human
auggcacagggcaugaaau

SEQ ID NO: 3209044 - RNA, 20 nt, Human
auggcaauguuuugcuuuug

SEQ ID NO: 3209045 - RNA, 23 nt, Human
auggcaaguuuuccauauuuuua

SEQ ID NO: 3209046 - RNA, 16 nt, Human
auggcaauguuuugcu

SEQ ID NO: 3209047 - RNA, 22 nt, Human
auggcacaaucucggcucacug

SEQ ID NO: 3209048 - RNA, 15 nt, Human
auggcacagggcaug

SEQ ID NO: 3209049 - RNA, 19 nt, Human
auggcaaggacugcaggga

SEQ ID NO: 3209050 - RNA, 11 nt, Human
uuuaugugugu

SEQ ID NO: 3209051 - RNA, 13 nt, Human
uuuaugugugugu

SEQ ID NO: 3209052 - RNA, 12 nt, Human
uuuaugugaugg

SEQ ID NO: 3209053 - RNA, 16 nt, Human
uuuaugugcuauuaau

SEQ ID NO: 3209054 - RNA, 16 nt, Human
uuuaugugugauucaa

SEQ ID NO: 3209055 - RNA, 13 nt, Human
uuuauguugacau

SEQ ID NO: 3209056 - RNA, 11 nt, Human
uuuauguugac

SEQ ID NO: 3209057 - RNA, 18 nt, Human
uuuauguugacauuuguu

SEQ ID NO: 3209058 - RNA, 17 nt, Human
uuuauguugacauuugu

SEQ ID NO: 3209059 - RNA, 15 nt, Human
uuuauguugacauuu

SEQ ID NO: 3209060 - RNA, 14 nt, Human
uuuauguugacauu

SEQ ID NO: 3209061 - RNA, 20 nt, Human
uuuauguuuugguccacuuu

SEQ ID NO: 3209062 - RNA, 14 nt, Human
uuuauguuuugguc

SEQ ID NO: 3209063 - RNA, 13 nt, Human
uuuauguuuuggu

SEQ ID NO: 3209064 - RNA, 22 nt, Human
uuuauguugacauuuguuuggu

SEQ ID NO: 3209065 - RNA, 14 nt, Human
uuuauaguuaaucu

SEQ ID NO: 3209066 - RNA, 17 nt, Human
uuuauaguuaaucuaua

SEQ ID NO: 3209067 - RNA, 16 nt, Human
uuuauaguuaaucuau

SEQ ID NO: 3209068 - RNA, 17 nt, Human
uuuauaguguguugugc

SEQ ID NO: 3209069 - RNA, 14 nt, Human
uuuauagcuuuauu

SEQ ID NO: 3209070 - RNA, 17 nt, Human
uuuauauaaaguauucu

SEQ ID NO: 3209071 - RNA, 18 nt, Human
uuuauaguuaaucuauaa

SEQ ID NO: 3209072 - RNA, 18 nt, Human
uuuaugguaaucauauua

SEQ ID NO: 3209073 - RNA, 22 nt, Human
uuuauauaaugguaugcuugca

SEQ ID NO: 3209074 - RNA, 17 nt, Human
uuuagcuguguuauuau

SEQ ID NO: 3209075 - RNA, 16 nt, Human
uuuagcuguguuauua

SEQ ID NO: 3209076 - RNA, 15 nt, Human
uuuaguagagacagg

SEQ ID NO: 3209077 - RNA, 17 nt, Human
uuuaggacaugaaaaua

SEQ ID NO: 3209078 - RNA, 15 nt, Human
uuuaggacaugaaaa

SEQ ID NO: 3209079 - RNA, 23 nt, Human
uuuagcaaagcggguuauaauga

SEQ ID NO: 3209080 - RNA, 22 nt, Human
uuuagauuuuguguuuauucuu

SEQ ID NO: 3209081 - RNA, 17 nt, Human
uuuagauguaauuuugu

SEQ ID NO: 3209082 - RNA, 18 nt, Human
uuuagauugagaaaugug

SEQ ID NO: 3209083 - RNA, 19 nt, Human
uuuagaugugcugcuuuga

SEQ ID NO: 3209084 - RNA, 23 nt, Human
augcuucauacagggaugguguu

SEQ ID NO: 3209085 - RNA, 11 nt, Human
auggaacacuc

SEQ ID NO: 3209086 - RNA, 14 nt, Human
auggaacacucuga

SEQ ID NO: 3209087 - RNA, 15 nt, Human
auggaacacucugag

SEQ ID NO: 3209088 - RNA, 16 nt, Human
augcuguaaaagcaag

SEQ ID NO: 3209089 - RNA, 16 nt, Human
auggaacacucugaga

SEQ ID NO: 3209090 - RNA, 15 nt, Human
auggaagacagcucu

SEQ ID NO: 3209091 - RNA, 12 nt, Human
auggaagaaagu

SEQ ID NO: 3209092 - RNA, 13 nt, Human
auggaagaaagua

SEQ ID NO: 3209093 - RNA, 14 nt, Human
auggaagaaaguaa

SEQ ID NO: 3209094 - RNA, 10 nt, Human
augcuucaua

SEQ ID NO: 3209095 - RNA, 12 nt, Human
augcuucauaca

SEQ ID NO: 3209096 - RNA, 11 nt, Human
augcuucauac

SEQ ID NO: 3209097 - RNA, 19 nt, Human
augcuucauacagggaugg

SEQ ID NO: 3209098 - RNA, 16 nt, Human
augcuucauacaggga

SEQ ID NO: 3209099 - RNA, 15 nt, Human
augcuucauacaggg

SEQ ID NO: 3209100 - RNA, 13 nt, Human
augcuucauacag

SEQ ID NO: 3209101 - RNA, 23 nt, Human
augcugucccuuacgugaguccu

SEQ ID NO: 3209102 - RNA, 19 nt, Human
augcugucccuuacgugag

SEQ ID NO: 3209103 - RNA, 16 nt, Human
augcuagaacucccuu

SEQ ID NO: 3209104 - RNA, 19 nt, Human
augcuccuggcccacugca

SEQ ID NO: 3209105 - RNA, 15 nt, Human
augcuagaacucccu

SEQ ID NO: 3209106 - RNA, 14 nt, Human
uuuauuacauaauu

SEQ ID NO: 3209107 - RNA, 20 nt, Human
augcuggccgaagauuucau

SEQ ID NO: 3209108 - RNA, 16 nt, Human
augauuccagguggca

SEQ ID NO: 3209109 - RNA, 15 nt, Human
augauuccagguggc

SEQ ID NO: 3209110 - RNA, 22 nt, Human
augauuucacaaauauuaaaaa

SEQ ID NO: 3209111 - RNA, 18 nt, Human
augauuucacaaauauua

SEQ ID NO: 3209112 - RNA, 15 nt, Human
augauuucacaaaua

SEQ ID NO: 3209113 - RNA, 17 nt, Human
augauuucacaaauauu

SEQ ID NO: 3209114 - RNA, 16 nt, Human
augauuucacaaauau

SEQ ID NO: 3209115 - RNA, 23 nt, Human
augauuucacaaauauuaaaaag

SEQ ID NO: 3209116 - RNA, 14 nt, Human
augauuucagaaac

SEQ ID NO: 3209117 - RNA, 13 nt, Human
augauuucagaaa

SEQ ID NO: 3209118 - RNA, 17 nt, Human
augauuucagcucacug

SEQ ID NO: 3209119 - RNA, 21 nt, Human
augauucaacagguuuuccug

SEQ ID NO: 3209120 - RNA, 13 nt, Human
augauucaaaaag

SEQ ID NO: 3209121 - RNA, 20 nt, Human
augauuaaccacuucagcug

SEQ ID NO: 3209122 - RNA, 21 nt, Human
augauuaaccacuucagcuga

SEQ ID NO: 3209123 - RNA, 19 nt, Human
augauuaaccacuucagcu

SEQ ID NO: 3209124 - RNA, 16 nt, Human
uuguuggggcuuuaca

SEQ ID NO: 3209125 - RNA, 15 nt, Human
augcaaagcacugac

SEQ ID NO: 3209126 - RNA, 20 nt, Human
augauuuggggauucagauu

SEQ ID NO: 3209127 - RNA, 13 nt, Human
augcaaaguauaa

SEQ ID NO: 3209128 - RNA, 20 nt, Human
augcaaaguauaaauuugug

SEQ ID NO: 3209129 - RNA, 19 nt, Human
augauuucagcucacugca

SEQ ID NO: 3209130 - RNA, 16 nt, Human
augauuucagaaacaa

SEQ ID NO: 3209131 - RNA, 15 nt, Human
augauuucagaaaca

SEQ ID NO: 3209132 - RNA, 13 nt, Human
augcaccagcccu

SEQ ID NO: 3209133 - RNA, 12 nt, Human
augcacuuuguu

SEQ ID NO: 3209134 - RNA, 21 nt, Human
uugugaggaagccgcuggggc

SEQ ID NO: 3209135 - RNA, 17 nt, Human
uugugacuuuugcuuua

SEQ ID NO: 3209136 - RNA, 18 nt, Human
uugugacuuuugcuuuaa

SEQ ID NO: 3209137 - RNA, 14 nt, Human
uugugaguuuguuu

SEQ ID NO: 3209138 - RNA, 22 nt, Human
uugugaguuuguuucuuugaau

SEQ ID NO: 3209139 - RNA, 21 nt, Human
uugugaguuuguuucuuugaa

SEQ ID NO: 3209140 - RNA, 19 nt, Human
uugugaguuuguuucuuug

SEQ ID NO: 3209141 - RNA, 16 nt, Human
uugugaguuuguuucu

SEQ ID NO: 3209142 - RNA, 18 nt, Human
uuguggcuccacacacac

SEQ ID NO: 3209143 - RNA, 20 nt, Human
uuguucuggcucuuccaggc

SEQ ID NO: 3209144 - RNA, 22 nt, Human
uuguucuggcucuuccaggcug

SEQ ID NO: 3209145 - RNA, 22 nt, Human
uuguguguucacuaaacucuga

SEQ ID NO: 3209146 - RNA, 17 nt, Human
uuguguguuuauuguca

SEQ ID NO: 3209147 - RNA, 19 nt, Human
uuguucuggcucuuccagg

SEQ ID NO: 3209148 - RNA, 20 nt, Human
uugugugccucuagcugaau

SEQ ID NO: 3209149 - RNA, 17 nt, Human
uugugugccucuagcug

SEQ ID NO: 3209150 - RNA, 21 nt, Human
uugugugcggagucauuuugu

SEQ ID NO: 3209151 - RNA, 23 nt, Human
uugugugccucuagcugaauuga

SEQ ID NO: 3209152 - RNA, 21 nt, Human
uugugugcuaaacguguaugu

SEQ ID NO: 3209153 - RNA, 16 nt, Human
uugugugaacuuggaa

SEQ ID NO: 3209154 - RNA, 17 nt, Human
uugugugauauuucaga

SEQ ID NO: 3209155 - RNA, 21 nt, Human
uugugugauauuucagaaaua

SEQ ID NO: 3209156 - RNA, 20 nt, Human
uugugugauauuucagaaau

SEQ ID NO: 3209157 - RNA, 19 nt, Human
uugugugauauuucagaaa

SEQ ID NO: 3209158 - RNA, 18 nt, Human
uugugugauauuucagaa

SEQ ID NO: 3209159 - RNA, 13 nt, Human
uugugugaacuug

SEQ ID NO: 3209160 - RNA, 18 nt, Human
uuguguaagaaauacaga

SEQ ID NO: 3209161 - RNA, 14 nt, Human
uuguguaagaaaua

SEQ ID NO: 3209162 - RNA, 13 nt, Human
uugugguuaaucu

SEQ ID NO: 3209163 - RNA, 11 nt, Human
uugugguccaa

SEQ ID NO: 3209164 - RNA, 14 nt, Human
uugugguccaaaua

SEQ ID NO: 3209165 - RNA, 15 nt, Human
uugugguccaaauag

SEQ ID NO: 3209166 - RNA, 14 nt, Human
uugugguuuggaau

SEQ ID NO: 3209167 - RNA, 17 nt, Human
uuuaauuguauuuuugu

SEQ ID NO: 3209168 - RNA, 13 nt, Human
uuuaauuguauuu

SEQ ID NO: 3209169 - RNA, 14 nt, Human
uuuaauuguauuuu

SEQ ID NO: 3209170 - RNA, 17 nt, Human
uuuaauuccaugaaugu

SEQ ID NO: 3209171 - RNA, 17 nt, Human
uuuaauugaaagaaugu

SEQ ID NO: 3209172 - RNA, 21 nt, Human
uuuaauugaaagaauguaaag

SEQ ID NO: 3209173 - RNA, 20 nt, Human
uuuaauugaaagaauguaaa

SEQ ID NO: 3209174 - RNA, 12 nt, Human
uuuaauucaguu

SEQ ID NO: 3209175 - RNA, 19 nt, Human
uuuaaugcuaaucuuguga

SEQ ID NO: 3209176 - RNA, 21 nt, Human
uuuaagccuaaagauuuugau

SEQ ID NO: 3209177 - RNA, 16 nt, Human
uuuaagccuaaagauu

SEQ ID NO: 3209178 - RNA, 23 nt, Human
uuuaagccuuuguugaacuguua

SEQ ID NO: 3209179 - RNA, 21 nt, Human
uuuaagccuuuguugaacugu

SEQ ID NO: 3209180 - RNA, 18 nt, Human
uuuaagccuuuguugaac

SEQ ID NO: 3209181 - RNA, 12 nt, Human
uuuaagccuuug

SEQ ID NO: 3209182 - RNA, 22 nt, Human
uuuaagcuaggaaaagaaaucu

SEQ ID NO: 3209183 - RNA, 20 nt, Human
uuuaagcuaggaaaagaaau

SEQ ID NO: 3209184 - RNA, 23 nt, Human
uuuaagcuaggaaaagaaaucua

SEQ ID NO: 3209185 - RNA, 14 nt, Human
uuuaagcucaaaau

SEQ ID NO: 3209186 - RNA, 23 nt, Human
uuuaaugaaagacuguacaaagu

SEQ ID NO: 3209187 - RNA, 16 nt, Human
uuuaaugauuguuuaa

SEQ ID NO: 3209188 - RNA, 13 nt, Human
uuuaaaugucaaa

SEQ ID NO: 3209189 - RNA, 14 nt, Human
uuguuuucauuauc

SEQ ID NO: 3209190 - RNA, 15 nt, Human
uuguuuuacugucuu

SEQ ID NO: 3209191 - RNA, 16 nt, Human
uuguuuucaguguaca

SEQ ID NO: 3209192 - RNA, 13 nt, Human
uuguuuucagugu

SEQ ID NO: 3209193 - RNA, 15 nt, Human
augcacuuuguucug

SEQ ID NO: 3209194 - RNA, 14 nt, Human
uuuaagaggcaggg

SEQ ID NO: 3209195 - RNA, 16 nt, Human
uuuaaauuaauaucuu

SEQ ID NO: 3209196 - RNA, 20 nt, Human
uuuaaauuaauaucuuucug

SEQ ID NO: 3209197 - RNA, 23 nt, Human
uuuaaauugcucacaguuauuac

SEQ ID NO: 3209198 - RNA, 14 nt, Human
uuuaaauuagaaaa

SEQ ID NO: 3209199 - RNA, 15 nt, Human
uuuaaauuagaaaau

SEQ ID NO: 3209200 - RNA, 22 nt, Human
uuuaaauuagaaaauauucucu

SEQ ID NO: 3209201 - RNA, 19 nt, Human
uuuaaauuauguuuuacug

SEQ ID NO: 3209202 - RNA, 14 nt, Human
uuuaagcagaauug

SEQ ID NO: 3209203 - RNA, 19 nt, Human
uuuaagcagaauuggaaaa

SEQ ID NO: 3209204 - RNA, 18 nt, Human
uuuaagcagaauuggaaa

SEQ ID NO: 3209205 - RNA, 17 nt, Human
uuuaagcagaauuggaa

SEQ ID NO: 3209206 - RNA, 15 nt, Human
uuuaagcagaauugg

SEQ ID NO: 3209207 - RNA, 16 nt, Human
augccaagcacuucag

SEQ ID NO: 3209208 - RNA, 22 nt, Human
augccaaggaccuuuugcugcc

SEQ ID NO: 3209209 - RNA, 23 nt, Human
augccaagaaguuuaaggaauau

SEQ ID NO: 3209210 - RNA, 15 nt, Human
augccacuaaauuga

SEQ ID NO: 3209211 - RNA, 17 nt, Human
augccacuaaauugaca

SEQ ID NO: 3209212 - RNA, 14 nt, Human
augcagugcugcuu

SEQ ID NO: 3209213 - RNA, 16 nt, Human
augcagugcugcuuug

SEQ ID NO: 3209214 - RNA, 22 nt, Human
augcagguuagaaauaauguca

SEQ ID NO: 3209215 - RNA, 13 nt, Human
augcagucuuaga

SEQ ID NO: 3209216 - RNA, 21 nt, Human
augcagucuuagaucauaguu

SEQ ID NO: 3209217 - RNA, 22 nt, Human
augcagucuuagaucauaguuu

SEQ ID NO: 3209218 - RNA, 15 nt, Human
uuuaauuuugacacu

SEQ ID NO: 3209219 - RNA, 13 nt, Human
augcagccucaca

SEQ ID NO: 3209220 - RNA, 17 nt, Human
uuuaauuuuuaaaugca

SEQ ID NO: 3209221 - RNA, 22 nt, Human
uuuaauuuuugcuuuuagaaaa

SEQ ID NO: 3209222 - RNA, 14 nt, Human
uuuaauuuuuaaau

SEQ ID NO: 3209223 - RNA, 14 nt, Human
augcagccucacag

SEQ ID NO: 3209224 - RNA, 15 nt, Human
augcagccucacagu

SEQ ID NO: 3209225 - RNA, 20 nt, Human
aucagacaguggaugagaca

SEQ ID NO: 3209226 - RNA, 13 nt, Human
aucaggccaggcc

SEQ ID NO: 3209227 - RNA, 19 nt, Human
aucaggauuuccucuugaa

SEQ ID NO: 3209228 - RNA, 13 nt, Human
uucucagcuccca

SEQ ID NO: 3209229 - RNA, 21 nt, Human
uucucacugccaugccagcuu

SEQ ID NO: 3209230 - RNA, 14 nt, Human
uucuagacuauaaa

SEQ ID NO: 3209231 - RNA, 20 nt, Human
uucuaguaauaaagacucua

SEQ ID NO: 3209232 - RNA, 17 nt, Human
uucuaguuauuuauucu

SEQ ID NO: 3209233 - RNA, 18 nt, Human
uucuagugcagcugaaau

SEQ ID NO: 3209234 - RNA, 17 nt, Human
uucuaaaguacugagca

SEQ ID NO: 3209235 - RNA, 13 nt, Human
uucuaaaguacug

SEQ ID NO: 3209236 - RNA, 17 nt, Human
uucuaaguaaaaccaca

SEQ ID NO: 3209237 - RNA, 20 nt, Human
uucuaaguaaaaccacagca

SEQ ID NO: 3209238 - RNA, 19 nt, Human
uucuaaguaaaaccacagc

SEQ ID NO: 3209239 - RNA, 14 nt, Human
uucuaacuucauaa

SEQ ID NO: 3209240 - RNA, 18 nt, Human
uucuaagaaauaucugug

SEQ ID NO: 3209241 - RNA, 19 nt, Human
uucuaagaaauaucuguga

SEQ ID NO: 3209242 - RNA, 18 nt, Human
uucuaagaaaucaaguaa

SEQ ID NO: 3209243 - RNA, 18 nt, Human
aucaauaacagccgcucc

SEQ ID NO: 3209244 - RNA, 22 nt, Human
aucaauaacagccgcuccagag

SEQ ID NO: 3209245 - RNA, 14 nt, Human
uucgaccagccagg

SEQ ID NO: 3209246 - RNA, 17 nt, Human
uucgacuugcauuuuug

SEQ ID NO: 3209247 - RNA, 21 nt, Human
uucgcaggauucuuccucccu

SEQ ID NO: 3209248 - RNA, 20 nt, Human
uucgauacaccgggccugga

SEQ ID NO: 3209249 - RNA, 15 nt, Human
auauuuuaauuucaa

SEQ ID NO: 3209250 - RNA, 14 nt, Human
auauuuuaauuuca

SEQ ID NO: 3209251 - RNA, 15 nt, Human
auauuuuaauuuuua

SEQ ID NO: 3209252 - RNA, 13 nt, Human
auauuuuaauuuu

SEQ ID NO: 3209253 - RNA, 17 nt, Human
auauuuuaauuucaagc

SEQ ID NO: 3209254 - RNA, 16 nt, Human
auauuuuaauuucaag

SEQ ID NO: 3209255 - RNA, 14 nt, Human
uucccacucuucuc

SEQ ID NO: 3209256 - RNA, 20 nt, Human
uucccacucugucgagccug

SEQ ID NO: 3209257 - RNA, 23 nt, Human
uucccacugguccaucugguuuu

SEQ ID NO: 3209258 - RNA, 12 nt, Human
auauuuuacuug

SEQ ID NO: 3209259 - RNA, 19 nt, Human
uucccccuccaaucccacc

SEQ ID NO: 3209260 - RNA, 22 nt, Human
uucccccuguuucagaggcuca

SEQ ID NO: 3209261 - RNA, 14 nt, Human
uucccccuccccca

SEQ ID NO: 3209262 - RNA, 14 nt, Human
uucccccuuucuuc

SEQ ID NO: 3209263 - RNA, 16 nt, Human
uucccccuuucuuccu

SEQ ID NO: 3209264 - RNA, 15 nt, Human
uucccccuuucuucc

SEQ ID NO: 3209265 - RNA, 20 nt, Human
uuccccuaaucuuuucugaa

SEQ ID NO: 3209266 - RNA, 13 nt, Human
uucccuacuuccu

SEQ ID NO: 3209267 - RNA, 15 nt, Human
uuccccuuccuucuu

SEQ ID NO: 3209268 - RNA, 16 nt, Human
uucccuacuuccugug

SEQ ID NO: 3209269 - RNA, 14 nt, Human
uucccuacuuccug

SEQ ID NO: 3209270 - RNA, 17 nt, Human
uucccuacuuccuguga

SEQ ID NO: 3209271 - RNA, 22 nt, Human
uuccccuuccuaauuccacagc

SEQ ID NO: 3209272 - RNA, 14 nt, Human
uuccccuuccuucu

SEQ ID NO: 3209273 - RNA, 13 nt, Human
uuccccuuccuuc

SEQ ID NO: 3209274 - RNA, 14 nt, Human
uuccccuguucacu

SEQ ID NO: 3209275 - RNA, 17 nt, Human
uuccccuguucacucua

SEQ ID NO: 3209276 - RNA, 19 nt, Human
uucccuuuuuuggcugcug

SEQ ID NO: 3209277 - RNA, 18 nt, Human
uucccuuuuuuggcugcu

SEQ ID NO: 3209278 - RNA, 21 nt, Human
uuccuaccacccgguccccac

SEQ ID NO: 3209279 - RNA, 17 nt, Human
uuccuacacaggacagg

SEQ ID NO: 3209280 - RNA, 12 nt, Human
uuccuacucuuc

SEQ ID NO: 3209281 - RNA, 19 nt, Human
uuccuacucuucucucugc

SEQ ID NO: 3209282 - RNA, 18 nt, Human
uuccuacucuucucucug

SEQ ID NO: 3209283 - RNA, 17 nt, Human
uuccuacucuucucucu

SEQ ID NO: 3209284 - RNA, 15 nt, Human
uuccuacucuucucu

SEQ ID NO: 3209285 - RNA, 20 nt, Human
aucaaauaugcaaagcacug

SEQ ID NO: 3209286 - RNA, 14 nt, Human
aucaaauguaaagu

SEQ ID NO: 3209287 - RNA, 13 nt, Human
aucaaauguaaag

SEQ ID NO: 3209288 - RNA, 22 nt, Human
auauuuuguaugcaagcaguuu

SEQ ID NO: 3209289 - RNA, 22 nt, Human
aucaaccccuucgcuccugugu

SEQ ID NO: 3209290 - RNA, 23 nt, Human
aucaaccaccuauuuuugacaug

SEQ ID NO: 3209291 - RNA, 20 nt, Human
aucaaccccuucgcuccugu

SEQ ID NO: 3209292 - RNA, 19 nt, Human
aucaaccccuucgcuccug

SEQ ID NO: 3209293 - RNA, 23 nt, Human
aucaaguuggcuucuaaucaaag

SEQ ID NO: 3209294 - RNA, 22 nt, Human
aucaaguuggcuucuaaucaaa

SEQ ID NO: 3209295 - RNA, 20 nt, Human
uuccuucaaagcaaaugucu

SEQ ID NO: 3209296 - RNA, 15 nt, Human
uuccuucagauauuu

SEQ ID NO: 3209297 - RNA, 21 nt, Human
auauuuuccuaguagaucuau

SEQ ID NO: 3209298 - RNA, 24 nt, Human
auauuuuccuaguagaucuauauu

SEQ ID NO: 3209299 - RNA, 11 nt, Human
auauuuuccug

SEQ ID NO: 3209300 - RNA, 19 nt, Human
auauuuuccugauagcaua

SEQ ID NO: 3209301 - RNA, 12 nt, Human
auauuuucugug

SEQ ID NO: 3209302 - RNA, 13 nt, Human
auauuuucugugu

SEQ ID NO: 3209303 - RNA, 14 nt, Human
auauuuucugugug

SEQ ID NO: 3209304 - RNA, 15 nt, Human
auauuuucugugugu

SEQ ID NO: 3209305 - RNA, 16 nt, Human
auauuuucuguguguu

SEQ ID NO: 3209306 - RNA, 17 nt, Human
auauuuucuguguguuc

SEQ ID NO: 3209307 - RNA, 19 nt, Human
auauuuucuguguguuccu

SEQ ID NO: 3209308 - RNA, 20 nt, Human
auauuuucuguguguuccug

SEQ ID NO: 3209309 - RNA, 21 nt, Human
auauuuucuguguguuccugg

SEQ ID NO: 3209310 - RNA, 22 nt, Human
auauuuucuguguguuccuggc

SEQ ID NO: 3209311 - RNA, 17 nt, Human
auauuuuguaugcaagc

SEQ ID NO: 3209312 - RNA, 22 nt, Human
uuccuacucuucucucugcucu

SEQ ID NO: 3209313 - RNA, 21 nt, Human
uuccuacucuucucucugcuc

SEQ ID NO: 3209314 - RNA, 20 nt, Human
uuccuacucuucucucugcu

SEQ ID NO: 3209315 - RNA, 12 nt, Human
uuccucuccacu

SEQ ID NO: 3209316 - RNA, 15 nt, Human
uuccucuccacugcc

SEQ ID NO: 3209317 - RNA, 14 nt, Human
uuccucuccacugc

SEQ ID NO: 3209318 - RNA, 13 nt, Human
uuccucuccacug

SEQ ID NO: 3209319 - RNA, 17 nt, Human
uuccugucacccugagg

SEQ ID NO: 3209320 - RNA, 22 nt, Human
aucauuggauucugagagcugu

SEQ ID NO: 3209321 - RNA, 21 nt, Human
aucauuggauucugagagcug

SEQ ID NO: 3209322 - RNA, 21 nt, Human
aucauugaaaucuuuuugcuu

SEQ ID NO: 3209323 - RNA, 21 nt, Human
aucaggccaggcccucugccc

SEQ ID NO: 3209324 - RNA, 22 nt, Human
aucaggccaggcccucugccca

SEQ ID NO: 3209325 - RNA, 23 nt, Human
aucaggccaggcccucugcccac

SEQ ID NO: 3209326 - RNA, 20 nt, Human
aucauugaaaucuuuuugcu

SEQ ID NO: 3209327 - RNA, 20 nt, Human
aucaggccaggcccucugcc

SEQ ID NO: 3209328 - RNA, 22 nt, Human
aucauuucaccugcugcuugcc

SEQ ID NO: 3209329 - RNA, 14 nt, Human
aucauuuacaagac

SEQ ID NO: 3209330 - RNA, 19 nt, Human
aucauuuacaagacaacau

SEQ ID NO: 3209331 - RNA, 12 nt, Human
uucuccugccuc

SEQ ID NO: 3209332 - RNA, 13 nt, Human
uucuccugccuca

SEQ ID NO: 3209333 - RNA, 14 nt, Human
uucuccugccucag

SEQ ID NO: 3209334 - RNA, 17 nt, Human
uucucuacucuagggaa

SEQ ID NO: 3209335 - RNA, 16 nt, Human
uucucuuuucaaaaca

SEQ ID NO: 3209336 - RNA, 21 nt, Human
uucucuuuucaagaaguucuu

SEQ ID NO: 3209337 - RNA, 12 nt, Human
uucucuuugaaa

SEQ ID NO: 3209338 - RNA, 14 nt, Human
uucugacccaugcu

SEQ ID NO: 3209339 - RNA, 22 nt, Human
uucugacacgacuucuguuuca

SEQ ID NO: 3209340 - RNA, 15 nt, Human
uucugcacacagcac

SEQ ID NO: 3209341 - RNA, 13 nt, Human
uucugccgcagcc

SEQ ID NO: 3209342 - RNA, 10 nt, Human
uucuguaaaa

SEQ ID NO: 3209343 - RNA, 11 nt, Human
uucuguaaaau

SEQ ID NO: 3209344 - RNA, 16 nt, Human
uucuguaaaauggaaa

SEQ ID NO: 3209345 - RNA, 19 nt, Human
uucuguaaaauggaaaacu

SEQ ID NO: 3209346 - RNA, 19 nt, Human
uucugguuguuuuuaaaca

SEQ ID NO: 3209347 - RNA, 22 nt, Human
uucugguugaugccugugaacu

SEQ ID NO: 3209348 - RNA, 17 nt, Human
aucauuuuuuauauaua

SEQ ID NO: 3209349 - RNA, 21 nt, Human
aucauuuuuuauauauaugca

SEQ ID NO: 3209350 - RNA, 18 nt, Human
aucauuuuuuauauauau

SEQ ID NO: 3209351 - RNA, 23 nt, Human
aucauuuuuuccuguuugggaag

SEQ ID NO: 3209352 - RNA, 21 nt, Human
aucauuuuuuccuguuuggga

SEQ ID NO: 3209353 - RNA, 15 nt, Human
aucauuuuuuccugu

SEQ ID NO: 3209354 - RNA, 14 nt, Human
aucauuuuuuccug

SEQ ID NO: 3209355 - RNA, 16 nt, Human
aucauuuuuuauauau

SEQ ID NO: 3209356 - RNA, 14 nt, Human
uucugccgcagccc

SEQ ID NO: 3209357 - RNA, 15 nt, Human
uucugccgcagcccu

SEQ ID NO: 3209358 - RNA, 15 nt, Human
aucccaccaacccuc

SEQ ID NO: 3209359 - RNA, 14 nt, Human
auccaguuuuucau

SEQ ID NO: 3209360 - RNA, 21 nt, Human
auccaagcuggucccacucag

SEQ ID NO: 3209361 - RNA, 21 nt, Human
auccaaggaagggauguauuu

SEQ ID NO: 3209362 - RNA, 15 nt, Human
auccaaaagaaaaac

SEQ ID NO: 3209363 - RNA, 13 nt, Human
auccaaguggccu

SEQ ID NO: 3209364 - RNA, 12 nt, Human
auccaaguggcc

SEQ ID NO: 3209365 - RNA, 14 nt, Human
auccaaaagaaaaa

SEQ ID NO: 3209366 - RNA, 12 nt, Human
auccaaaagaaa

SEQ ID NO: 3209367 - RNA, 13 nt, Human
auccuaguuccac

SEQ ID NO: 3209368 - RNA, 21 nt, Human
auccuaggcauuugcugaaua

SEQ ID NO: 3209369 - RNA, 13 nt, Human
auccuaaugaaug

SEQ ID NO: 3209370 - RNA, 12 nt, Human
auccuaaugaau

SEQ ID NO: 3209371 - RNA, 19 nt, Human
auccuaaugaaugcauaaa

SEQ ID NO: 3209372 - RNA, 22 nt, Human
uugaacauuaauccacauguuu

SEQ ID NO: 3209373 - RNA, 16 nt, Human
uugaaccauaaaaugu

SEQ ID NO: 3209374 - RNA, 17 nt, Human
uugaaccauaaaauguc

SEQ ID NO: 3209375 - RNA, 21 nt, Human
uugaaccauaaaauguccagu

SEQ ID NO: 3209376 - RNA, 14 nt, Human
uugaaccauaguua

SEQ ID NO: 3209377 - RNA, 14 nt, Human
uugaaccauaaaau

SEQ ID NO: 3209378 - RNA, 12 nt, Human
uugaaccaauaa

SEQ ID NO: 3209379 - RNA, 21 nt, Human
auccuaagcuauucaguaaua

SEQ ID NO: 3209380 - RNA, 12 nt, Human
uugaacaaaaua

SEQ ID NO: 3209381 - RNA, 16 nt, Human
uugaacaaaauaaauu

SEQ ID NO: 3209382 - RNA, 14 nt, Human
uugaacaaaauaaa

SEQ ID NO: 3209383 - RNA, 21 nt, Human
uugaaauuuuuauuaaauuau

SEQ ID NO: 3209384 - RNA, 11 nt, Human
uugaaaucuuu

SEQ ID NO: 3209385 - RNA, 22 nt, Human
uugaaauauauggucuaauguu

SEQ ID NO: 3209386 - RNA, 20 nt, Human
uugaaauauauggucuaaug

SEQ ID NO: 3209387 - RNA, 23 nt, Human
uugaaauauauggucuaauguuu

SEQ ID NO: 3209388 - RNA, 23 nt, Human
uugaaaucaguaaacacugugua

SEQ ID NO: 3209389 - RNA, 21 nt, Human
uugaaaucaguaaacacugug

SEQ ID NO: 3209390 - RNA, 21 nt, Human
uugaaauauggucuuuugguu

SEQ ID NO: 3209391 - RNA, 16 nt, Human
uugaaaguuuacagga

SEQ ID NO: 3209392 - RNA, 17 nt, Human
uugaaagugccuuugca

SEQ ID NO: 3209393 - RNA, 17 nt, Human
uugaaauaaaaagagua

SEQ ID NO: 3209394 - RNA, 16 nt, Human
uugaaauaaaaagagu

SEQ ID NO: 3209395 - RNA, 13 nt, Human
uucuuuuaauuuu

SEQ ID NO: 3209396 - RNA, 20 nt, Human
uucuuuuuaaagcuuuugau

SEQ ID NO: 3209397 - RNA, 22 nt, Human
uucuuuuguuuuuugaaguguu

SEQ ID NO: 3209398 - RNA, 19 nt, Human
uucuuuuguuuuuugaagu

SEQ ID NO: 3209399 - RNA, 15 nt, Human
uucuuuguagcauuu

SEQ ID NO: 3209400 - RNA, 22 nt, Human
uucuuuguacacccaugaaaga

SEQ ID NO: 3209401 - RNA, 18 nt, Human
uucuuuuaaauuagaaaa

SEQ ID NO: 3209402 - RNA, 11 nt, Human
uucuuugugua

SEQ ID NO: 3209403 - RNA, 23 nt, Human
uucuuuguuaauuuggaccauuu

SEQ ID NO: 3209404 - RNA, 21 nt, Human
uucuugguauuuggauaucug

SEQ ID NO: 3209405 - RNA, 22 nt, Human
uucuugguauuuggauaucugu

SEQ ID NO: 3209406 - RNA, 15 nt, Human
uucuuucuuccucug

SEQ ID NO: 3209407 - RNA, 13 nt, Human
uucuuucuuccuc

SEQ ID NO: 3209408 - RNA, 17 nt, Human
uucuuggacacuuaauu

SEQ ID NO: 3209409 - RNA, 19 nt, Human
uucuuggacacuuaauucu

SEQ ID NO: 3209410 - RNA, 21 nt, Human
uucuuggacacuuaauucugu

SEQ ID NO: 3209411 - RNA, 22 nt, Human
uucuuggacacuuaauucuguu

SEQ ID NO: 3209412 - RNA, 23 nt, Human
uucuuggacacuuaauucuguuc

SEQ ID NO: 3209413 - RNA, 22 nt, Human
uucuuggcaauaaauuuugaaa

SEQ ID NO: 3209414 - RNA, 21 nt, Human
uucuuggcaauaaauuuugaa

SEQ ID NO: 3209415 - RNA, 18 nt, Human
uucuugauuaaagugauu

SEQ ID NO: 3209416 - RNA, 22 nt, Human
uucuugaucaguaguuugcauu

SEQ ID NO: 3209417 - RNA, 23 nt, Human
uucuugaauggcaauguuuugcu

SEQ ID NO: 3209418 - RNA, 20 nt, Human
uucuugaucaguaguuugca

SEQ ID NO: 3209419 - RNA, 20 nt, Human
uucuugauaauuuuccuuua

SEQ ID NO: 3209420 - RNA, 23 nt, Human
uucuuccucccucccucuuuccc

SEQ ID NO: 3209421 - RNA, 11 nt, Human
uucuuccuggu

SEQ ID NO: 3209422 - RNA, 13 nt, Human
uucuuccucugcu

SEQ ID NO: 3209423 - RNA, 12 nt, Human
uucuuccucugc

SEQ ID NO: 3209424 - RNA, 11 nt, Human
uucuuccucug

SEQ ID NO: 3209425 - RNA, 14 nt, Human
uucuuaauuuggaa

SEQ ID NO: 3209426 - RNA, 17 nt, Human
uucuuaauuuggaaacu

SEQ ID NO: 3209427 - RNA, 20 nt, Human
uucuuaauuuggaaacuaau

SEQ ID NO: 3209428 - RNA, 22 nt, Human
uucuuaauuuggaaacuaauaa

SEQ ID NO: 3209429 - RNA, 23 nt, Human
uucuuaauuuggaaacuaauaaa

SEQ ID NO: 3209430 - RNA, 18 nt, Human
uucuuaauuauuauaaaa

SEQ ID NO: 3209431 - RNA, 19 nt, Human
uucuuaauuauuauaaaaa

SEQ ID NO: 3209432 - RNA, 20 nt, Human
uucuuaauuauuauaaaaau

SEQ ID NO: 3209433 - RNA, 21 nt, Human
uucuuaauuauuauaaaaaua

SEQ ID NO: 3209434 - RNA, 22 nt, Human
uucuuaauuauuauaaaaauau

SEQ ID NO: 3209435 - RNA, 15 nt, Human
uucuguugcugccuc

SEQ ID NO: 3209436 - RNA, 16 nt, Human
uucuguugcugccuca

SEQ ID NO: 3209437 - RNA, 20 nt, Human
aucccaccccauccuccagg

SEQ ID NO: 3209438 - RNA, 18 nt, Human
aucccaccccauccucca

SEQ ID NO: 3209439 - RNA, 20 nt, Human
uucuguuuuucuaggccugg

SEQ ID NO: 3209440 - RNA, 14 nt, Human
uucuuaaaaaguaa

SEQ ID NO: 3209441 - RNA, 13 nt, Human
uucuuaaaaagua

SEQ ID NO: 3209442 - RNA, 22 nt, Human
uucuguuuuuaaaaauuagccu

SEQ ID NO: 3209443 - RNA, 17 nt, Human
uucuguugcugccucau

SEQ ID NO: 3209444 - RNA, 18 nt, Human
auaggcuauuaaaaaagu

SEQ ID NO: 3209445 - RNA, 21 nt, Human
auagugacuuuucaaguauuu

SEQ ID NO: 3209446 - RNA, 18 nt, Human
auagugacuuuucaagua

SEQ ID NO: 3209447 - RNA, 17 nt, Human
auagugacuuuucaagu

SEQ ID NO: 3209448 - RNA, 12 nt, Human
auagugacuuuu

SEQ ID NO: 3209449 - RNA, 22 nt, Human
auagucuuggaagcuguuugga

SEQ ID NO: 3209450 - RNA, 20 nt, Human
auagugcaauauauuuugua

SEQ ID NO: 3209451 - RNA, 18 nt, Human
auagugcaauauauuuug

SEQ ID NO: 3209452 - RNA, 15 nt, Human
auagugcaauauauu

SEQ ID NO: 3209453 - RNA, 13 nt, Human
auagugcaauaua

SEQ ID NO: 3209454 - RNA, 12 nt, Human
auagugcaauau

SEQ ID NO: 3209455 - RNA, 21 nt, Human
auagugaggcaucgcaaugua

SEQ ID NO: 3209456 - RNA, 23 nt, Human
auagugacuuuucaaguauuuaa

SEQ ID NO: 3209457 - RNA, 17 nt, Human
auaguggcuuaaaacaa

SEQ ID NO: 3209458 - RNA, 16 nt, Human
auagugggaccacaua

SEQ ID NO: 3209459 - RNA, 21 nt, Human
auagugggguuccaugaguua

SEQ ID NO: 3209460 - RNA, 14 nt, Human
auagugugaaauau

SEQ ID NO: 3209461 - RNA, 15 nt, Human
auagugugaaauaua

SEQ ID NO: 3209462 - RNA, 22 nt, Human
auagugugaaauauauuacuua

SEQ ID NO: 3209463 - RNA, 23 nt, Human
auaguguggaaauuaagaagaaa

SEQ ID NO: 3209464 - RNA, 17 nt, Human
auaguguuauugagaga

SEQ ID NO: 3209465 - RNA, 21 nt, Human
auaguguguugugcuuucaag

SEQ ID NO: 3209466 - RNA, 22 nt, Human
auaguguguugugcuuucaaga

SEQ ID NO: 3209467 - RNA, 20 nt, Human
auaguuguaccgcaauguga

SEQ ID NO: 3209468 - RNA, 18 nt, Human
auaguuguagacaaagua

SEQ ID NO: 3209469 - RNA, 19 nt, Human
auaguuguagacaaaguac

SEQ ID NO: 3209470 - RNA, 22 nt, Human
auaguuggcuaggaccccucca

SEQ ID NO: 3209471 - RNA, 18 nt, Human
auaguugcauagcaguau

SEQ ID NO: 3209472 - RNA, 20 nt, Human
auaguugcauagcaguauau

SEQ ID NO: 3209473 - RNA, 21 nt, Human
auaguugcauagcaguauaug

SEQ ID NO: 3209474 - RNA, 15 nt, Human
auauaaaaauggcuu

SEQ ID NO: 3209475 - RNA, 16 nt, Human
auauaaaaaaucaugc

SEQ ID NO: 3209476 - RNA, 16 nt, Human
auaguuuuauuuauau

SEQ ID NO: 3209477 - RNA, 18 nt, Human
auaguuuuauuuauauuu

SEQ ID NO: 3209478 - RNA, 24 nt, Human
auaguuuuauuuauauuuauugac

SEQ ID NO: 3209479 - RNA, 21 nt, Human
auaguuacuguaaaaugcaaa

SEQ ID NO: 3209480 - RNA, 22 nt, Human
auaguuaagcgugcauaaguua

SEQ ID NO: 3209481 - RNA, 18 nt, Human
auaguuacuguaaaaugc

SEQ ID NO: 3209482 - RNA, 17 nt, Human
auaguuacuguaaaaug

SEQ ID NO: 3209483 - RNA, 15 nt, Human
auaguuacuguaaaa

SEQ ID NO: 3209484 - RNA, 13 nt, Human
auaguuacuguaa

SEQ ID NO: 3209485 - RNA, 18 nt, Human
auaguucuagugcagcug

SEQ ID NO: 3209486 - RNA, 12 nt, Human
auaguugaauua

SEQ ID NO: 3209487 - RNA, 21 nt, Human
auaguugaauuagugaguaua

SEQ ID NO: 3209488 - RNA, 14 nt, Human
auaguuauguaaau

SEQ ID NO: 3209489 - RNA, 15 nt, Human
auaguuauguaaaua

SEQ ID NO: 3209490 - RNA, 16 nt, Human
auaguuauguaaauaa

SEQ ID NO: 3209491 - RNA, 17 nt, Human
auaguuauguaaauaau

SEQ ID NO: 3209492 - RNA, 18 nt, Human
auaguuauguaaauaauu

SEQ ID NO: 3209493 - RNA, 19 nt, Human
auaguuauguaaauaauuc

SEQ ID NO: 3209494 - RNA, 15 nt, Human
auauauauauauauu

SEQ ID NO: 3209495 - RNA, 16 nt, Human
auauauauaucuguau

SEQ ID NO: 3209496 - RNA, 22 nt, Human
auauauaugcauauauauaugu

SEQ ID NO: 3209497 - RNA, 16 nt, Human
auauauaugugugugu

SEQ ID NO: 3209498 - RNA, 18 nt, Human
auauauccacacauuugu

SEQ ID NO: 3209499 - RNA, 17 nt, Human
auauaucccugauaaau

SEQ ID NO: 3209500 - RNA, 16 nt, Human
auauaucccugauaaa

SEQ ID NO: 3209501 - RNA, 22 nt, Human
auauaucccugauaaauauuca

SEQ ID NO: 3209502 - RNA, 20 nt, Human
auauaucccugauaaauauu

SEQ ID NO: 3209503 - RNA, 19 nt, Human
auauaugaaaacuaaguuc

SEQ ID NO: 3209504 - RNA, 14 nt, Human
auauaucucaaauu

SEQ ID NO: 3209505 - RNA, 19 nt, Human
auauaucucaaauuguaau

SEQ ID NO: 3209506 - RNA, 16 nt, Human
auauaucucaaauugu

SEQ ID NO: 3209507 - RNA, 20 nt, Human
auauaugcacuuaauuuguu

SEQ ID NO: 3209508 - RNA, 16 nt, Human
uucacugucugucugg

SEQ ID NO: 3209509 - RNA, 15 nt, Human
uucacugucugucug

SEQ ID NO: 3209510 - RNA, 19 nt, Human
uucacuguuucaucuaagu

SEQ ID NO: 3209511 - RNA, 23 nt, Human
uucacuguuucaucuaagugccu

SEQ ID NO: 3209512 - RNA, 22 nt, Human
uucacuuaaguuaguuccacug

SEQ ID NO: 3209513 - RNA, 15 nt, Human
uucacuuacagcacc

SEQ ID NO: 3209514 - RNA, 16 nt, Human
auauaacuuauauugu

SEQ ID NO: 3209515 - RNA, 21 nt, Human
auauaacuuauauuguaagaa

SEQ ID NO: 3209516 - RNA, 20 nt, Human
auauaacuuauauuguaaga

SEQ ID NO: 3209517 - RNA, 15 nt, Human
auauaaaguauucuu

SEQ ID NO: 3209518 - RNA, 17 nt, Human
auauaaaguauucuuuu

SEQ ID NO: 3209519 - RNA, 20 nt, Human
auauaaaguauucuuuuucu

SEQ ID NO: 3209520 - RNA, 22 nt, Human
auauaacuuauauuguaagaaa

SEQ ID NO: 3209521 - RNA, 14 nt, Human
auauaacuuuagaa

SEQ ID NO: 3209522 - RNA, 15 nt, Human
auauaacuuuagaaa

SEQ ID NO: 3209523 - RNA, 16 nt, Human
uucaaaacaaacagau

SEQ ID NO: 3209524 - RNA, 23 nt, Human
uucaaaacaaacagaugcucuga

SEQ ID NO: 3209525 - RNA, 14 nt, Human
uuauuuuucuguua

SEQ ID NO: 3209526 - RNA, 15 nt, Human
uuauuuuucuguuac

SEQ ID NO: 3209527 - RNA, 12 nt, Human
uuauuuuugcuu

SEQ ID NO: 3209528 - RNA, 22 nt, Human
uuauuuuuagaauuuugugaaa

SEQ ID NO: 3209529 - RNA, 16 nt, Human
uuauuuuuaagaaaga

SEQ ID NO: 3209530 - RNA, 17 nt, Human
uuauuuuuagacagagu

SEQ ID NO: 3209531 - RNA, 18 nt, Human
uuauuuuuagacagaguc

SEQ ID NO: 3209532 - RNA, 20 nt, Human
uuauuuuuagaauuuuguga

SEQ ID NO: 3209533 - RNA, 14 nt, Human
uuauuuuuagaauu

SEQ ID NO: 3209534 - RNA, 15 nt, Human
uuaguuuuucugucc

SEQ ID NO: 3209535 - RNA, 18 nt, Human
uuaguuuugcuuuuaguu

SEQ ID NO: 3209536 - RNA, 14 nt, Human
uuaguuuugcuuuu

SEQ ID NO: 3209537 - RNA, 22 nt, Human
uuaguuuugcuuuuaguuuuuc

SEQ ID NO: 3209538 - RNA, 17 nt, Human
uuaguuuuauuuucuaa

SEQ ID NO: 3209539 - RNA, 13 nt, Human
uuaguuuugcuuu

SEQ ID NO: 3209540 - RNA, 13 nt, Human
uuaguuuugcaua

SEQ ID NO: 3209541 - RNA, 20 nt, Human
uucaaaaguuuguuugcuua

SEQ ID NO: 3209542 - RNA, 14 nt, Human
uucaagaacuuguu

SEQ ID NO: 3209543 - RNA, 19 nt, Human
uucaagaaaugaagagcug

SEQ ID NO: 3209544 - RNA, 23 nt, Human
uucaagaaguucuuugauucugu

SEQ ID NO: 3209545 - RNA, 15 nt, Human
uucaagaacuuguuu

SEQ ID NO: 3209546 - RNA, 18 nt, Human
uucaaacagucucaggaa

SEQ ID NO: 3209547 - RNA, 17 nt, Human
uucaagaaaugaagagc

SEQ ID NO: 3209548 - RNA, 21 nt, Human
uucaagcgauucuucugcuuc

SEQ ID NO: 3209549 - RNA, 23 nt, Human
uucaagcgauucucuugccucag

SEQ ID NO: 3209550 - RNA, 16 nt, Human
uucaagcgauucucuu

SEQ ID NO: 3209551 - RNA, 14 nt, Human
uucaagcugcuuuu

SEQ ID NO: 3209552 - RNA, 20 nt, Human
uucaagcuuauuuuggagag

SEQ ID NO: 3209553 - RNA, 19 nt, Human
uucaagcuuauuuuggaga

SEQ ID NO: 3209554 - RNA, 14 nt, Human
uucaagcuuauuuu

SEQ ID NO: 3209555 - RNA, 17 nt, Human
uucaagcugcuuuuugu

SEQ ID NO: 3209556 - RNA, 13 nt, Human
uucaagaucaaaa

SEQ ID NO: 3209557 - RNA, 21 nt, Human
uucaagaucuaaaucauauau

SEQ ID NO: 3209558 - RNA, 23 nt, Human
uucaagaucuaaaucauauauaa

SEQ ID NO: 3209559 - RNA, 18 nt, Human
uucaagacugaauuccaa

SEQ ID NO: 3209560 - RNA, 20 nt, Human
uucacauguuuucaaaugga

SEQ ID NO: 3209561 - RNA, 19 nt, Human
uucacauguuuucaaaugg

SEQ ID NO: 3209562 - RNA, 18 nt, Human
uucacauguuuucaaaug

SEQ ID NO: 3209563 - RNA, 17 nt, Human
uucacauguuuucaaau

SEQ ID NO: 3209564 - RNA, 16 nt, Human
uucacauguuuucaaa

SEQ ID NO: 3209565 - RNA, 14 nt, Human
uucacauuauucug

SEQ ID NO: 3209566 - RNA, 12 nt, Human
auaggaaaaacu

SEQ ID NO: 3209567 - RNA, 14 nt, Human
auaggaaaaacuga

SEQ ID NO: 3209568 - RNA, 16 nt, Human
auaggaaaaacugauu

SEQ ID NO: 3209569 - RNA, 17 nt, Human
auaggaaaaacugauuu

SEQ ID NO: 3209570 - RNA, 22 nt, Human
auaggccugcuuugucuccucu

SEQ ID NO: 3209571 - RNA, 16 nt, Human
auaggacuuguuuuug

SEQ ID NO: 3209572 - RNA, 15 nt, Human
auaggagacuuguag

SEQ ID NO: 3209573 - RNA, 15 nt, Human
auaggacuuguuuuu

SEQ ID NO: 3209574 - RNA, 13 nt, Human
auaggacuuguuu

SEQ ID NO: 3209575 - RNA, 22 nt, Human
auaggaauugacccacaagaaa

SEQ ID NO: 3209576 - RNA, 21 nt, Human
auaggaaaugguauccagaau

SEQ ID NO: 3209577 - RNA, 15 nt, Human
uucacaccccaccug

SEQ ID NO: 3209578 - RNA, 14 nt, Human
uucacaccccaccu

SEQ ID NO: 3209579 - RNA, 16 nt, Human
uucacaauuauuccaa

SEQ ID NO: 3209580 - RNA, 16 nt, Human
uucaaguauuuaagcc

SEQ ID NO: 3209581 - RNA, 15 nt, Human
uucacaaguuaagau

SEQ ID NO: 3209582 - RNA, 17 nt, Human
uucacaccccaccugcg

SEQ ID NO: 3209583 - RNA, 16 nt, Human
uucacaccccaccugc

SEQ ID NO: 3209584 - RNA, 19 nt, Human
uucacaccccaccugcgcu

SEQ ID NO: 3209585 - RNA, 14 nt, Human
uucacaccugcaga

SEQ ID NO: 3209586 - RNA, 22 nt, Human
uucacaagacccaaaaggcaga

SEQ ID NO: 3209587 - RNA, 17 nt, Human
uucaagugauucucaug

SEQ ID NO: 3209588 - RNA, 23 nt, Human
uucacaagacccaaaaggcagaa

SEQ ID NO: 3209589 - RNA, 15 nt, Human
uucaaguacacugaa

SEQ ID NO: 3209590 - RNA, 17 nt, Human
uucaaguacacugaauu

SEQ ID NO: 3209591 - RNA, 15 nt, Human
uucaaguauuuaagc

SEQ ID NO: 3209592 - RNA, 14 nt, Human
uucaaguauuuaag

SEQ ID NO: 3209593 - RNA, 20 nt, Human
uucacagaugggugcuugga

SEQ ID NO: 3209594 - RNA, 12 nt, Human
uucacacuugaa

SEQ ID NO: 3209595 - RNA, 15 nt, Human
uucacaguucucucc

SEQ ID NO: 3209596 - RNA, 20 nt, Human
uucacaguucucuccuucuu

SEQ ID NO: 3209597 - RNA, 13 nt, Human
uucacaguucucu

SEQ ID NO: 3209598 - RNA, 15 nt, Human
uucacauguuuucaa

SEQ ID NO: 3209599 - RNA, 23 nt, Human
auaucuccuuuguauucugucuu

SEQ ID NO: 3209600 - RNA, 22 nt, Human
auaucucuauuuaauuuugaca

SEQ ID NO: 3209601 - RNA, 17 nt, Human
auaucuccuuuguauuc

SEQ ID NO: 3209602 - RNA, 12 nt, Human
auaucuuucugc

SEQ ID NO: 3209603 - RNA, 22 nt, Human
auaucuuggcagguaggaauau

SEQ ID NO: 3209604 - RNA, 16 nt, Human
auaugaaaacuaaguu

SEQ ID NO: 3209605 - RNA, 16 nt, Human
auaugaaaaaugagau

SEQ ID NO: 3209606 - RNA, 15 nt, Human
auaugaaaaaugaga

SEQ ID NO: 3209607 - RNA, 20 nt, Human
auaucugaaaauguaugugu

SEQ ID NO: 3209608 - RNA, 17 nt, Human
auaucugaaaauguaug

SEQ ID NO: 3209609 - RNA, 16 nt, Human
auaucugaaaauguau

SEQ ID NO: 3209610 - RNA, 14 nt, Human
auaucuccuuugua

SEQ ID NO: 3209611 - RNA, 22 nt, Human
auaucuaguaauauauuuaaag

SEQ ID NO: 3209612 - RNA, 17 nt, Human
auaucuauaaacacugu

SEQ ID NO: 3209613 - RNA, 16 nt, Human
auauguaacaagccac

SEQ ID NO: 3209614 - RNA, 21 nt, Human
auauggugguaauaagggaaa

SEQ ID NO: 3209615 - RNA, 17 nt, Human
auauggucuaauguuua

SEQ ID NO: 3209616 - RNA, 16 nt, Human
auauggucuaauguuu

SEQ ID NO: 3209617 - RNA, 13 nt, Human
auauggucuaaug

SEQ ID NO: 3209618 - RNA, 15 nt, Human
auauggucuaauguu

SEQ ID NO: 3209619 - RNA, 14 nt, Human
auauggucuaaugu

SEQ ID NO: 3209620 - RNA, 17 nt, Human
auauguaacaagccacc

SEQ ID NO: 3209621 - RNA, 22 nt, Human
auauguaaaugguaugucauuc

SEQ ID NO: 3209622 - RNA, 13 nt, Human
auauguacauuuc

SEQ ID NO: 3209623 - RNA, 12 nt, Human
auauguacauuu

SEQ ID NO: 3209624 - RNA, 15 nt, Human
auauguacauuucua

SEQ ID NO: 3209625 - RNA, 22 nt, Human
auaugugaaggaccuucacucu

SEQ ID NO: 3209626 - RNA, 18 nt, Human
auaugugaacgcccagag

SEQ ID NO: 3209627 - RNA, 21 nt, Human
auaugauuaaaaauaucaaau

SEQ ID NO: 3209628 - RNA, 22 nt, Human
auaugauuaaaaauaucaaauu

SEQ ID NO: 3209629 - RNA, 17 nt, Human
auaugauuaaaaauauc

SEQ ID NO: 3209630 - RNA, 11 nt, Human
auaugauuaaa

SEQ ID NO: 3209631 - RNA, 21 nt, Human
auauauuuaaagggaaauuga

SEQ ID NO: 3209632 - RNA, 20 nt, Human
auauauuuaaagggaaauug

SEQ ID NO: 3209633 - RNA, 14 nt, Human
auauauuuaaaggg

SEQ ID NO: 3209634 - RNA, 15 nt, Human
auauaugugugugug

SEQ ID NO: 3209635 - RNA, 16 nt, Human
auauauuguguugacu

SEQ ID NO: 3209636 - RNA, 23 nt, Human
auauauuguguugacuuuauaaa

SEQ ID NO: 3209637 - RNA, 21 nt, Human
uucaucccucuggggcuguuc

SEQ ID NO: 3209638 - RNA, 15 nt, Human
uucauccccucagaa

SEQ ID NO: 3209639 - RNA, 20 nt, Human
auauauggucuaauguuuaa

SEQ ID NO: 3209640 - RNA, 19 nt, Human
auauauggucuaauguuua

SEQ ID NO: 3209641 - RNA, 13 nt, Human
auauaugugaaag

SEQ ID NO: 3209642 - RNA, 17 nt, Human
uucaucccucuggggcu

SEQ ID NO: 3209643 - RNA, 14 nt, Human
uucauccccucaga

SEQ ID NO: 3209644 - RNA, 19 nt, Human
uucauauuuaauauaugug

SEQ ID NO: 3209645 - RNA, 21 nt, Human
uucauacagggaugguguuca

SEQ ID NO: 3209646 - RNA, 13 nt, Human
uucauaauuuguu

SEQ ID NO: 3209647 - RNA, 18 nt, Human
uucauauucaugcaagua

SEQ ID NO: 3209648 - RNA, 14 nt, Human
uucauauucagcuu

SEQ ID NO: 3209649 - RNA, 16 nt, Human
uucauauuacaauauu

SEQ ID NO: 3209650 - RNA, 15 nt, Human
uucauauuacaauau

SEQ ID NO: 3209651 - RNA, 13 nt, Human
uucauauuacaau

SEQ ID NO: 3209652 - RNA, 19 nt, Human
uucagaaauacagauaaau

SEQ ID NO: 3209653 - RNA, 19 nt, Human
uucagaaagccuuucauuu

SEQ ID NO: 3209654 - RNA, 21 nt, Human
uucagaaagccuuucauuuug

SEQ ID NO: 3209655 - RNA, 20 nt, Human
uucagaaagccuuucauuuu

SEQ ID NO: 3209656 - RNA, 16 nt, Human
uucagugccaaaaaca

SEQ ID NO: 3209657 - RNA, 12 nt, Human
uucagugccuua

SEQ ID NO: 3209658 - RNA, 13 nt, Human
uucagugccuuau

SEQ ID NO: 3209659 - RNA, 13 nt, Human
uuccaagagccug

SEQ ID NO: 3209660 - RNA, 22 nt, Human
uuccaagagccugagagugagg

SEQ ID NO: 3209661 - RNA, 14 nt, Human
uuccaagagccuga

SEQ ID NO: 3209662 - RNA, 20 nt, Human
uuccaagacuuauuuucaca

SEQ ID NO: 3209663 - RNA, 17 nt, Human
uuccaaggguacuaagg

SEQ ID NO: 3209664 - RNA, 15 nt, Human
uuccaaggguacuaa

SEQ ID NO: 3209665 - RNA, 15 nt, Human
auauguggaguucau

SEQ ID NO: 3209666 - RNA, 12 nt, Human
auaugugauuuu

SEQ ID NO: 3209667 - RNA, 16 nt, Human
auaugugccacauuuu

SEQ ID NO: 3209668 - RNA, 16 nt, Human
auauguggaguucauc

SEQ ID NO: 3209669 - RNA, 12 nt, Human
uucauucauauu

SEQ ID NO: 3209670 - RNA, 16 nt, Human
uucauucauacuuaaa

SEQ ID NO: 3209671 - RNA, 17 nt, Human
uucauucauacuuaaaa

SEQ ID NO: 3209672 - RNA, 18 nt, Human
auaugugccacauuuucu

SEQ ID NO: 3209673 - RNA, 23 nt, Human
uucauucauauuacaauauuugu

SEQ ID NO: 3209674 - RNA, 18 nt, Human
uucauucauauuacaaua

SEQ ID NO: 3209675 - RNA, 14 nt, Human
uucauucauauuac

SEQ ID NO: 3209676 - RNA, 13 nt, Human
uucauucauauua

SEQ ID NO: 3209677 - RNA, 19 nt, Human
uuccaccaucaagccacca

SEQ ID NO: 3209678 - RNA, 19 nt, Human
uuccaaugccucuugucuu

SEQ ID NO: 3209679 - RNA, 13 nt, Human
uuccacacaugca

SEQ ID NO: 3209680 - RNA, 22 nt, Human
uuccacaagagcccaggccucc

SEQ ID NO: 3209681 - RNA, 14 nt, Human
uuccaauaugugau

SEQ ID NO: 3209682 - RNA, 13 nt, Human
uuccaauauguga

SEQ ID NO: 3209683 - RNA, 16 nt, Human
uuccaagucuuugcua

SEQ ID NO: 3209684 - RNA, 18 nt, Human
uuccaccaucaagccacc

SEQ ID NO: 3209685 - RNA, 17 nt, Human
uuccaggggugggacac

SEQ ID NO: 3209686 - RNA, 17 nt, Human
uuccaggcccgaagcau

SEQ ID NO: 3209687 - RNA, 11 nt, Human
uuccaggcagc

SEQ ID NO: 3209688 - RNA, 12 nt, Human
uucccaaauuuc

SEQ ID NO: 3209689 - RNA, 23 nt, Human
uucccaacuugccuuugaagagu

SEQ ID NO: 3209690 - RNA, 21 nt, Human
uucccaagaaaggaaaccuuu

SEQ ID NO: 3209691 - RNA, 15 nt, Human
uucccaacuugccuu

SEQ ID NO: 3209692 - RNA, 20 nt, Human
uucccaacuugccuuugaag

SEQ ID NO: 3209693 - RNA, 19 nt, Human
uucccaacuugccuuugaa

SEQ ID NO: 3209694 - RNA, 16 nt, Human
uucccaaccugcucau

SEQ ID NO: 3209695 - RNA, 15 nt, Human
uucccaacacaaaga

SEQ ID NO: 3209696 - RNA, 13 nt, Human
uucccaacacaaa

SEQ ID NO: 3209697 - RNA, 16 nt, Human
uucccaagcucugcuc

SEQ ID NO: 3209698 - RNA, 15 nt, Human
uucccaagcucugcu

SEQ ID NO: 3209699 - RNA, 14 nt, Human
uucccaagcucugc

SEQ ID NO: 3209700 - RNA, 13 nt, Human
uucccaagcucug

SEQ ID NO: 3209701 - RNA, 12 nt, Human
uucccaccucuc

SEQ ID NO: 3209702 - RNA, 16 nt, Human
uucccacccagccugg

SEQ ID NO: 3209703 - RNA, 15 nt, Human
uucccacccagccug

SEQ ID NO: 3209704 - RNA, 14 nt, Human
uucccacccagccu

SEQ ID NO: 3209705 - RNA, 22 nt, Human
uucccaccucucucacuccuug

SEQ ID NO: 3209706 - RNA, 18 nt, Human
uucccaagcucugcuccu

SEQ ID NO: 3209707 - RNA, 21 nt, Human
uuccaggggugggacacccug

SEQ ID NO: 3209708 - RNA, 17 nt, Human
uuccagugaggcucugc

SEQ ID NO: 3209709 - RNA, 19 nt, Human
uuccagugaggcucugccc

SEQ ID NO: 3209710 - RNA, 20 nt, Human
uuccagugaggcucugcccu

SEQ ID NO: 3209711 - RNA, 21 nt, Human
uuccagugaggcucugcccuu

SEQ ID NO: 3209712 - RNA, 22 nt, Human
uuccagugaggcucugcccuug

SEQ ID NO: 3209713 - RNA, 23 nt, Human
uucccaaagcagugcaugcuguc

SEQ ID NO: 3209714 - RNA, 22 nt, Human
uucccaaaugugugcccagcuu

SEQ ID NO: 3209715 - RNA, 20 nt, Human
uucccaaaugugugcccagc

SEQ ID NO: 3209716 - RNA, 17 nt, Human
uuccauaguuaaagaag

SEQ ID NO: 3209717 - RNA, 22 nt, Human
uuccauaguuuagguacucaaa

SEQ ID NO: 3209718 - RNA, 16 nt, Human
uuccauaguuaaagaa

SEQ ID NO: 3209719 - RNA, 23 nt, Human
uuccauaaucuggacuccucugu

SEQ ID NO: 3209720 - RNA, 22 nt, Human
uuccauaaucuggacuccucug

SEQ ID NO: 3209721 - RNA, 19 nt, Human
uuccauaaucuggacuccu

SEQ ID NO: 3209722 - RNA, 17 nt, Human
uuccaguuacuuuccaa

SEQ ID NO: 3209723 - RNA, 20 nt, Human
uuccaguuuauuccagagcu

SEQ ID NO: 3209724 - RNA, 16 nt, Human
ugauaagggaaaagau

SEQ ID NO: 3209725 - RNA, 18 nt, Human
ugauaagggaaaagauaa

SEQ ID NO: 3209726 - RNA, 19 nt, Human
ugauaagggaaaagauaaa

SEQ ID NO: 3209727 - RNA, 20 nt, Human
ugauaagggaaaagauaaag

SEQ ID NO: 3209728 - RNA, 19 nt, Human
ugauaagggacugauguuu

SEQ ID NO: 3209729 - RNA, 24 nt, Human
ugauaagcagucauccucagauca

SEQ ID NO: 3209730 - RNA, 20 nt, Human
ugauaagaaccuuuugagug

SEQ ID NO: 3209731 - RNA, 17 nt, Human
ugaguucauacccuguu

SEQ ID NO: 3209732 - RNA, 24 nt, Human
ugaguuacuugcugcccugugcuc

SEQ ID NO: 3209733 - RNA, 18 nt, Human
ugaguucauaaauuuaug

SEQ ID NO: 3209734 - RNA, 17 nt, Human
ugaguuaggcuuucucu

SEQ ID NO: 3209735 - RNA, 13 nt, Human
ugaguuaggaaca

SEQ ID NO: 3209736 - RNA, 12 nt, Human
ugaguuaggaac

SEQ ID NO: 3209737 - RNA, 21 nt, Human
ugaguggggggaacgcccacu

SEQ ID NO: 3209738 - RNA, 12 nt, Human
ugaguuaucaug

SEQ ID NO: 3209739 - RNA, 16 nt, Human
ugaguuaucaugaauu

SEQ ID NO: 3209740 - RNA, 20 nt, Human
ugaguuaucaugaauuuuaa

SEQ ID NO: 3209741 - RNA, 21 nt, Human
ugaguuaucaugaauuuuaaa

SEQ ID NO: 3209742 - RNA, 23 nt, Human
ugaguuaucaugaauuuuaaagu

SEQ ID NO: 3209743 - RNA, 23 nt, Human
ugagugggggaucacagccucug

SEQ ID NO: 3209744 - RNA, 21 nt, Human
ugagugggugaauaauacagu

SEQ ID NO: 3209745 - RNA, 16 nt, Human
ugagugccuuacacaa

SEQ ID NO: 3209746 - RNA, 17 nt, Human
ugagugccuuacacaau

SEQ ID NO: 3209747 - RNA, 20 nt, Human
ugagugccuuacacaauggu

SEQ ID NO: 3209748 - RNA, 17 nt, Human
ugagucaccaagcccag

SEQ ID NO: 3209749 - RNA, 16 nt, Human
ugagucaccaagccca

SEQ ID NO: 3209750 - RNA, 14 nt, Human
ugagucaccaagcc

SEQ ID NO: 3209751 - RNA, 16 nt, Human
ugaguauauuauaaua

SEQ ID NO: 3209752 - RNA, 15 nt, Human
ugaguauauuauaau

SEQ ID NO: 3209753 - RNA, 14 nt, Human
ugaguagcucugcc

SEQ ID NO: 3209754 - RNA, 14 nt, Human
ugaguauauuauaa

SEQ ID NO: 3209755 - RNA, 22 nt, Human
ugaguagcucugccuuugcucu

SEQ ID NO: 3209756 - RNA, 11 nt, Human
agcauaaagaa

SEQ ID NO: 3209757 - RNA, 12 nt, Human
ugagaauuaccc

SEQ ID NO: 3209758 - RNA, 14 nt, Human
agcauaaagaauuu

SEQ ID NO: 3209759 - RNA, 13 nt, Human
agcauaaagcuca

SEQ ID NO: 3209760 - RNA, 18 nt, Human
agcauaaagcucaaauga

SEQ ID NO: 3209761 - RNA, 23 nt, Human
agcauaaagcucaaaugaaaugu

SEQ ID NO: 3209762 - RNA, 23 nt, Human
ugagacacacaacggcagugaag

SEQ ID NO: 3209763 - RNA, 15 nt, Human
ugaguacuacagucc

SEQ ID NO: 3209764 - RNA, 14 nt, Human
agcauauucaggaa

SEQ ID NO: 3209765 - RNA, 21 nt, Human
agcauaugacaaauguuucua

SEQ ID NO: 3209766 - RNA, 20 nt, Human
agcauaugacaaauguuucu

SEQ ID NO: 3209767 - RNA, 19 nt, Human
agcauaugacaaauguuuc

SEQ ID NO: 3209768 - RNA, 16 nt, Human
agcauaugacaaaugu

SEQ ID NO: 3209769 - RNA, 18 nt, Human
agcauaugacaaauguuu

SEQ ID NO: 3209770 - RNA, 17 nt, Human
agcauaugacaaauguu

SEQ ID NO: 3209771 - RNA, 17 nt, Human
ugaguacuacaguccuc

SEQ ID NO: 3209772 - RNA, 21 nt, Human
ugaguacuacaguccucccau

SEQ ID NO: 3209773 - RNA, 22 nt, Human
ugaguacuacaguccucccauc

SEQ ID NO: 3209774 - RNA, 23 nt, Human
ugaguacuacaguccucccaucu

SEQ ID NO: 3209775 - RNA, 14 nt, Human
ugaguacuacaguc

SEQ ID NO: 3209776 - RNA, 13 nt, Human
ugaguagcuggga

SEQ ID NO: 3209777 - RNA, 21 nt, Human
ugauagaaggcuauggggaua

SEQ ID NO: 3209778 - RNA, 16 nt, Human
ugauacuuuuuugaaa

SEQ ID NO: 3209779 - RNA, 20 nt, Human
ugauacuuuuuugaaaucag

SEQ ID NO: 3209780 - RNA, 17 nt, Human
ugauacuuuuuugaaau

SEQ ID NO: 3209781 - RNA, 23 nt, Human
ugauauuuucaacgcagcccugc

SEQ ID NO: 3209782 - RNA, 22 nt, Human
ugauauuuucaacgcagcccug

SEQ ID NO: 3209783 - RNA, 21 nt, Human
ugauauuuucaacgcagcccu

SEQ ID NO: 3209784 - RNA, 19 nt, Human
ugauauuuucaacgcagcc

SEQ ID NO: 3209785 - RNA, 16 nt, Human
ugauauuucagaaaua

SEQ ID NO: 3209786 - RNA, 15 nt, Human
ugauauuucagaaau

SEQ ID NO: 3209787 - RNA, 15 nt, Human
ugauauuuguauuua

SEQ ID NO: 3209788 - RNA, 19 nt, Human
ugauauuuguauuuauucu

SEQ ID NO: 3209789 - RNA, 18 nt, Human
ugauauuuguauuuauuc

SEQ ID NO: 3209790 - RNA, 13 nt, Human
ugauauuuuaaaa

SEQ ID NO: 3209791 - RNA, 21 nt, Human
ugauauuuguauuuauucuuu

SEQ ID NO: 3209792 - RNA, 20 nt, Human
ugauauucaaauggacaaac

SEQ ID NO: 3209793 - RNA, 22 nt, Human
ugauauuaauuuaucagauugc

SEQ ID NO: 3209794 - RNA, 18 nt, Human
ugauauucuuuguuaauu

SEQ ID NO: 3209795 - RNA, 16 nt, Human
ugauauugcugaagaa

SEQ ID NO: 3209796 - RNA, 14 nt, Human
ugauauuucagaaa

SEQ ID NO: 3209797 - RNA, 13 nt, Human
ugauauuucagaa

SEQ ID NO: 3209798 - RNA, 12 nt, Human
ugauauuucaga

SEQ ID NO: 3209799 - RNA, 17 nt, Human
ugauauucuuuguuaau

SEQ ID NO: 3209800 - RNA, 15 nt, Human
ugauauucuuuguua

SEQ ID NO: 3209801 - RNA, 22 nt, Human
ugauauucuaagaaauaucugu

SEQ ID NO: 3209802 - RNA, 19 nt, Human
ugaucacggcucacugcag

SEQ ID NO: 3209803 - RNA, 18 nt, Human
ugaucacggcucacugca

SEQ ID NO: 3209804 - RNA, 13 nt, Human
agcaucaggccag

SEQ ID NO: 3209805 - RNA, 12 nt, Human
agcaucaggcca

SEQ ID NO: 3209806 - RNA, 20 nt, Human
ugaucacggcucacugcagc

SEQ ID NO: 3209807 - RNA, 22 nt, Human
agcauauucaggaagcucaggg

SEQ ID NO: 3209808 - RNA, 22 nt, Human
agcauuguaagcguauggcuuu

SEQ ID NO: 3209809 - RNA, 22 nt, Human
agcauugucuauuuuucucuuc

SEQ ID NO: 3209810 - RNA, 15 nt, Human
agcauugucuauuuu

SEQ ID NO: 3209811 - RNA, 18 nt, Human
agcauuguaaaugugcuu

SEQ ID NO: 3209812 - RNA, 17 nt, Human
agcauuguaaaugugcu

SEQ ID NO: 3209813 - RNA, 20 nt, Human
agcauuggggauguuuuucu

SEQ ID NO: 3209814 - RNA, 17 nt, Human
agcauuguaaaagcauu

SEQ ID NO: 3209815 - RNA, 16 nt, Human
agcaugucuuauuuaa

SEQ ID NO: 3209816 - RNA, 16 nt, Human
agcauguguuaaucuu

SEQ ID NO: 3209817 - RNA, 17 nt, Human
agcauguguuaaucuua

SEQ ID NO: 3209818 - RNA, 22 nt, Human
agcauguguuaaucuuaaugua

SEQ ID NO: 3209819 - RNA, 17 nt, Human
agcaugucuuauuuaaa

SEQ ID NO: 3209820 - RNA, 15 nt, Human
agcauguuguagaua

SEQ ID NO: 3209821 - RNA, 23 nt, Human
agcauguuguagauacaaucagc

SEQ ID NO: 3209822 - RNA, 14 nt, Human
agcauguuuugcau

SEQ ID NO: 3209823 - RNA, 16 nt, Human
agcauguuuugcaugu

SEQ ID NO: 3209824 - RNA, 19 nt, Human
agcaucaggccaggcccuc

SEQ ID NO: 3209825 - RNA, 20 nt, Human
agcaucaggccaggcccucu

SEQ ID NO: 3209826 - RNA, 14 nt, Human
agcaucaggccagg

SEQ ID NO: 3209827 - RNA, 16 nt, Human
agcaucaggccaggcc

SEQ ID NO: 3209828 - RNA, 17 nt, Human
agcaucaggccaggccc

SEQ ID NO: 3209829 - RNA, 18 nt, Human
agcaucaggccaggcccu

SEQ ID NO: 3209830 - RNA, 12 nt, Human
agcauggcugcc

SEQ ID NO: 3209831 - RNA, 15 nt, Human
agccaggccacuggc

SEQ ID NO: 3209832 - RNA, 21 nt, Human
agccaggccacaagacccuug

SEQ ID NO: 3209833 - RNA, 22 nt, Human
agccaggccacaagacccuugu

SEQ ID NO: 3209834 - RNA, 19 nt, Human
agccaggcgcuagcacagc

SEQ ID NO: 3209835 - RNA, 23 nt, Human
agccaggcgcuagcacagcuccc

SEQ ID NO: 3209836 - RNA, 12 nt, Human
agccagggucuc

SEQ ID NO: 3209837 - RNA, 23 nt, Human
agccagugaacauaauucuuauu

SEQ ID NO: 3209838 - RNA, 14 nt, Human
agccagugaacaua

SEQ ID NO: 3209839 - RNA, 14 nt, Human
agccauaggcccuu

SEQ ID NO: 3209840 - RNA, 12 nt, Human
agccagcugccu

SEQ ID NO: 3209841 - RNA, 14 nt, Human
agccagacuggcac

SEQ ID NO: 3209842 - RNA, 13 nt, Human
agccagacucugc

SEQ ID NO: 3209843 - RNA, 22 nt, Human
agccagaagccacccaaagcag

SEQ ID NO: 3209844 - RNA, 18 nt, Human
agccagaacucugugucc

SEQ ID NO: 3209845 - RNA, 16 nt, Human
agccagaacucugugu

SEQ ID NO: 3209846 - RNA, 12 nt, Human
agccaggccaca

SEQ ID NO: 3209847 - RNA, 14 nt, Human
agccaggccacaag

SEQ ID NO: 3209848 - RNA, 11 nt, Human
agccaggaggg

SEQ ID NO: 3209849 - RNA, 23 nt, Human
agccaggagagcuuagggucuca

SEQ ID NO: 3209850 - RNA, 16 nt, Human
agcccagaagugcaga

SEQ ID NO: 3209851 - RNA, 22 nt, Human
agcccacuucugccauauucug

SEQ ID NO: 3209852 - RNA, 19 nt, Human
agcccaggaaaggcuccag

SEQ ID NO: 3209853 - RNA, 20 nt, Human
agcccaggaaaggcuccagg

SEQ ID NO: 3209854 - RNA, 21 nt, Human
agcccaggaaaggcuccagga

SEQ ID NO: 3209855 - RNA, 21 nt, Human
ugauucccaagcucugcuccu

SEQ ID NO: 3209856 - RNA, 19 nt, Human
ugauucccaagcucugcuc

SEQ ID NO: 3209857 - RNA, 18 nt, Human
ugauucccaagcucugcu

SEQ ID NO: 3209858 - RNA, 16 nt, Human
ugauucccaagcucug

SEQ ID NO: 3209859 - RNA, 15 nt, Human
ugauucccaagcucu

SEQ ID NO: 3209860 - RNA, 22 nt, Human
agcccaggaaaggcuccaggag

SEQ ID NO: 3209861 - RNA, 23 nt, Human
agcccaggaaaggcuccaggagc

SEQ ID NO: 3209862 - RNA, 24 nt, Human
agcccaggaaaggcuccaggagca

SEQ ID NO: 3209863 - RNA, 18 nt, Human
agcccaggaaaggcucca

SEQ ID NO: 3209864 - RNA, 13 nt, Human
ugauucagcucug

SEQ ID NO: 3209865 - RNA, 14 nt, Human
ugauucagcucugc

SEQ ID NO: 3209866 - RNA, 18 nt, Human
ugauccagcccugaguuc

SEQ ID NO: 3209867 - RNA, 17 nt, Human
ugauccagcccugaguu

SEQ ID NO: 3209868 - RNA, 15 nt, Human
ugauccagcccugag

SEQ ID NO: 3209869 - RNA, 15 nt, Human
agccacggccaggcc

SEQ ID NO: 3209870 - RNA, 18 nt, Human
ugauccuuuuggagucag

SEQ ID NO: 3209871 - RNA, 15 nt, Human
ugaucgaaaaaauaa

SEQ ID NO: 3209872 - RNA, 16 nt, Human
ugaucgaaaaaauaau

SEQ ID NO: 3209873 - RNA, 17 nt, Human
ugaucgaaaaaauaauu

SEQ ID NO: 3209874 - RNA, 14 nt, Human
ugaugaagaggagu

SEQ ID NO: 3209875 - RNA, 13 nt, Human
ugaugaagaggag

SEQ ID NO: 3209876 - RNA, 22 nt, Human
ugaugaaucaguccuagaaugu

SEQ ID NO: 3209877 - RNA, 14 nt, Human
agccacauuccuga

SEQ ID NO: 3209878 - RNA, 18 nt, Human
agccacauuccugaugcu

SEQ ID NO: 3209879 - RNA, 20 nt, Human
agccaccaacauacucccau

SEQ ID NO: 3209880 - RNA, 23 nt, Human
agccaccaacauacucccaucug

SEQ ID NO: 3209881 - RNA, 19 nt, Human
agccaccaacauacuccca

SEQ ID NO: 3209882 - RNA, 14 nt, Human
agccacggccaggc

SEQ ID NO: 3209883 - RNA, 16 nt, Human
agccaccugaguuccu

SEQ ID NO: 3209884 - RNA, 14 nt, Human
agccaccugaguuc

SEQ ID NO: 3209885 - RNA, 19 nt, Human
agccaccugaguuccugag

SEQ ID NO: 3209886 - RNA, 18 nt, Human
agccaccgugccuggcca

SEQ ID NO: 3209887 - RNA, 20 nt, Human
ugauguuugugcaguaacuu

SEQ ID NO: 3209888 - RNA, 14 nt, Human
ugauguuugugcag

SEQ ID NO: 3209889 - RNA, 23 nt, Human
ugauguuuuccaugaguccccug

SEQ ID NO: 3209890 - RNA, 15 nt, Human
ugauguuuuuaaaau

SEQ ID NO: 3209891 - RNA, 17 nt, Human
ugauguuuuuaaaaucu

SEQ ID NO: 3209892 - RNA, 16 nt, Human
ugauguuuuuaaaauc

SEQ ID NO: 3209893 - RNA, 22 nt, Human
ugauuaaaaauaucaaauuaau

SEQ ID NO: 3209894 - RNA, 19 nt, Human
ugauuaaaaauaucaaauu

SEQ ID NO: 3209895 - RNA, 20 nt, Human
ugauuaaaaauaucaaauua

SEQ ID NO: 3209896 - RNA, 15 nt, Human
ugauuaaaaauauca

SEQ ID NO: 3209897 - RNA, 21 nt, Human
ugauguuuuuaaaaucuuauu

SEQ ID NO: 3209898 - RNA, 19 nt, Human
ugauguuuuuaaaaucuua

SEQ ID NO: 3209899 - RNA, 18 nt, Human
ugauguuuuuaaaaucuu

SEQ ID NO: 3209900 - RNA, 14 nt, Human
ugaugaucuuuaaa

SEQ ID NO: 3209901 - RNA, 20 nt, Human
ugaugauccuaggcauuugc

SEQ ID NO: 3209902 - RNA, 14 nt, Human
ugaugauccuaggc

SEQ ID NO: 3209903 - RNA, 17 nt, Human
ugauggugcaaugaccu

SEQ ID NO: 3209904 - RNA, 23 nt, Human
ugauggugcaaugaccuuucaau

SEQ ID NO: 3209905 - RNA, 15 nt, Human
ugauggugcaaugac

SEQ ID NO: 3209906 - RNA, 16 nt, Human
ugauggugcaaugacc

SEQ ID NO: 3209907 - RNA, 14 nt, Human
ugauuaccagggac

SEQ ID NO: 3209908 - RNA, 12 nt, Human
ugauuaaaccaa

SEQ ID NO: 3209909 - RNA, 15 nt, Human
ugauuaauuaaaaca

SEQ ID NO: 3209910 - RNA, 21 nt, Human
ugauuaauuucugccauuuca

SEQ ID NO: 3209911 - RNA, 22 nt, Human
ugauuaauuucugccauuucau

SEQ ID NO: 3209912 - RNA, 22 nt, Human
ugauuaaagaugagcuuugucu

SEQ ID NO: 3209913 - RNA, 15 nt, Human
ugauuaaagaugagc

SEQ ID NO: 3209914 - RNA, 14 nt, Human
agccacuuaggaca

SEQ ID NO: 3209915 - RNA, 22 nt, Human
agccacugcaccgggccacaga

SEQ ID NO: 3209916 - RNA, 21 nt, Human
agccacugcaccgggccacag

SEQ ID NO: 3209917 - RNA, 13 nt, Human
agccacugcaccg

SEQ ID NO: 3209918 - RNA, 20 nt, Human
agccacugcaccgggccaca

SEQ ID NO: 3209919 - RNA, 17 nt, Human
ugcaguaacuugggagu

SEQ ID NO: 3209920 - RNA, 15 nt, Human
ugcaguaacuuggga

SEQ ID NO: 3209921 - RNA, 18 nt, Human
ugcaguacuuuaccuccu

SEQ ID NO: 3209922 - RNA, 14 nt, Human
ugcauaaguuaacu

SEQ ID NO: 3209923 - RNA, 22 nt, Human
ugcagucauggagaaccaccua

SEQ ID NO: 3209924 - RNA, 16 nt, Human
ugcagccucacagucc

SEQ ID NO: 3209925 - RNA, 23 nt, Human
ugcagccuccgcuucccugguuc

SEQ ID NO: 3209926 - RNA, 20 nt, Human
ugcagccuccgcuucccugg

SEQ ID NO: 3209927 - RNA, 19 nt, Human
ugcagccuccgcuucccug

SEQ ID NO: 3209928 - RNA, 13 nt, Human
ugcagccucacag

SEQ ID NO: 3209929 - RNA, 15 nt, Human
ugcagccucacaguc

SEQ ID NO: 3209930 - RNA, 19 nt, Human
agccugacagccagaacuc

SEQ ID NO: 3209931 - RNA, 18 nt, Human
agccugacagccagaacu

SEQ ID NO: 3209932 - RNA, 15 nt, Human
agccugacagccaga

SEQ ID NO: 3209933 - RNA, 14 nt, Human
agccugacagccag

SEQ ID NO: 3209934 - RNA, 22 nt, Human
agccugaaagaggaaugaagua

SEQ ID NO: 3209935 - RNA, 23 nt, Human
ugcagccucaaccuccugggcua

SEQ ID NO: 3209936 - RNA, 16 nt, Human
agccucagcauccugg

SEQ ID NO: 3209937 - RNA, 15 nt, Human
agccuagauguuuua

SEQ ID NO: 3209938 - RNA, 21 nt, Human
agccucagcauccuggcaccc

SEQ ID NO: 3209939 - RNA, 20 nt, Human
agccucagcauccuggcacc

SEQ ID NO: 3209940 - RNA, 19 nt, Human
agccucagcauccuggcac

SEQ ID NO: 3209941 - RNA, 17 nt, Human
agccucagcauccuggc

SEQ ID NO: 3209942 - RNA, 20 nt, Human
agccuccaugcugccuccag

SEQ ID NO: 3209943 - RNA, 18 nt, Human
agccuccaugcugccucc

SEQ ID NO: 3209944 - RNA, 16 nt, Human
agccucccaaagugcu

SEQ ID NO: 3209945 - RNA, 16 nt, Human
agccuagauguuuuau

SEQ ID NO: 3209946 - RNA, 15 nt, Human
agccucauguccacu

SEQ ID NO: 3209947 - RNA, 23 nt, Human
agccucagcauccuggcacccgg

SEQ ID NO: 3209948 - RNA, 22 nt, Human
agccucagcauccuggcacccg

SEQ ID NO: 3209949 - RNA, 16 nt, Human
agccgaauagcugaug

SEQ ID NO: 3209950 - RNA, 19 nt, Human
agccgaccugaggacaugg

SEQ ID NO: 3209951 - RNA, 23 nt, Human
agccguggcuucccgcucagccc

SEQ ID NO: 3209952 - RNA, 22 nt, Human
agccguggcuucccgcucagcc

SEQ ID NO: 3209953 - RNA, 13 nt, Human
agccguggcuucc

SEQ ID NO: 3209954 - RNA, 21 nt, Human
agccguggcuucccgcucagc

SEQ ID NO: 3209955 - RNA, 14 nt, Human
agccguggcuuccc

SEQ ID NO: 3209956 - RNA, 23 nt, Human
agcccuucuaccuuccugcaaca

SEQ ID NO: 3209957 - RNA, 22 nt, Human
agcccuucggaggaccagggcu

SEQ ID NO: 3209958 - RNA, 21 nt, Human
agcccuuccucugcucccccu

SEQ ID NO: 3209959 - RNA, 22 nt, Human
ugcacucaaaucuuaagaaaua

SEQ ID NO: 3209960 - RNA, 20 nt, Human
ugcacucaaaucuuaagaaa

SEQ ID NO: 3209961 - RNA, 19 nt, Human
ugcacucaaaucuuaagaa

SEQ ID NO: 3209962 - RNA, 16 nt, Human
ugcacucaaaucuuaa

SEQ ID NO: 3209963 - RNA, 15 nt, Human
ugcacucaaaucuua

SEQ ID NO: 3209964 - RNA, 14 nt, Human
ugcacucaaaucuu

SEQ ID NO: 3209965 - RNA, 20 nt, Human
agcccuuccucugcuccccc

SEQ ID NO: 3209966 - RNA, 19 nt, Human
agcccuuccucugcucccc

SEQ ID NO: 3209967 - RNA, 18 nt, Human
agcccuuccucugcuccc

SEQ ID NO: 3209968 - RNA, 17 nt, Human
agcccuuccucugcucc

SEQ ID NO: 3209969 - RNA, 16 nt, Human
agcccuuccucugcuc

SEQ ID NO: 3209970 - RNA, 15 nt, Human
agcccuuccucugcu

SEQ ID NO: 3209971 - RNA, 15 nt, Human
ugcacucagacugua

SEQ ID NO: 3209972 - RNA, 12 nt, Human
agcccuuccucu

SEQ ID NO: 3209973 - RNA, 14 nt, Human
ugcacucagacugu

SEQ ID NO: 3209974 - RNA, 23 nt, Human
ugcacuauagccuaggugacaga

SEQ ID NO: 3209975 - RNA, 22 nt, Human
ugcacuauagccuaggugacag

SEQ ID NO: 3209976 - RNA, 14 nt, Human
ugcacuauauacau

SEQ ID NO: 3209977 - RNA, 18 nt, Human
agcccaguucagcuuggg

SEQ ID NO: 3209978 - RNA, 13 nt, Human
ugauucuccugcc

SEQ ID NO: 3209979 - RNA, 15 nt, Human
ugauucuccugccuc

SEQ ID NO: 3209980 - RNA, 19 nt, Human
ugauucuccugccucagcc

SEQ ID NO: 3209981 - RNA, 18 nt, Human
ugauucguagauuuaaua

SEQ ID NO: 3209982 - RNA, 20 nt, Human
agccccaaaacucuccucug

SEQ ID NO: 3209983 - RNA, 21 nt, Human
agccccaaaacucuccucugc

SEQ ID NO: 3209984 - RNA, 22 nt, Human
agccccaaaacucuccucugcu

SEQ ID NO: 3209985 - RNA, 18 nt, Human
agccccgugggguuccuc

SEQ ID NO: 3209986 - RNA, 16 nt, Human
agcccccagcuuccag

SEQ ID NO: 3209987 - RNA, 20 nt, Human
agcccccagcuuccagcagg

SEQ ID NO: 3209988 - RNA, 19 nt, Human
agccccuggaugcagccuc

SEQ ID NO: 3209989 - RNA, 19 nt, Human
agccccuucugacccaugc

SEQ ID NO: 3209990 - RNA, 17 nt, Human
agccccuggaugcagcc

SEQ ID NO: 3209991 - RNA, 18 nt, Human
agccccuggaugcagccu

SEQ ID NO: 3209992 - RNA, 23 nt, Human
agccccauucugccugcccaggc

SEQ ID NO: 3209993 - RNA, 16 nt, Human
agccccgaggccuucu

SEQ ID NO: 3209994 - RNA, 22 nt, Human
agccccgaggccuucucugaag

SEQ ID NO: 3209995 - RNA, 17 nt, Human
agccccgaggccuucuc

SEQ ID NO: 3209996 - RNA, 21 nt, Human
agcccugguggcagugggagc

SEQ ID NO: 3209997 - RNA, 20 nt, Human
agcccugcuuugggcugccc

SEQ ID NO: 3209998 - RNA, 23 nt, Human
agcccugcuuugggcugcccugg

SEQ ID NO: 3209999 - RNA, 22 nt, Human
agcccugcuuugggcugcccug

SEQ ID NO: 3210000 - RNA, 20 nt, Human
agccccuucugacccaugcu

SEQ ID NO: 3210001 - RNA, 24 nt, Human
agccccuucugacccaugcugccc

SEQ ID NO: 3210002 - RNA, 21 nt, Human
agcccugcuuugggcugcccu

SEQ ID NO: 3210003 - RNA, 18 nt, Human
ugcacaagcugcacccuc

SEQ ID NO: 3210004 - RNA, 21 nt, Human
ugcacaagcugcacccucagg

SEQ ID NO: 3210005 - RNA, 22 nt, Human
ugcacacaccagagcccaccuu

SEQ ID NO: 3210006 - RNA, 22 nt, Human
agcccuguaucguauucaccuu

SEQ ID NO: 3210007 - RNA, 12 nt, Human
ugcacacagcac

SEQ ID NO: 3210008 - RNA, 24 nt, Human
ugcacacagcacgggggccaagga

SEQ ID NO: 3210009 - RNA, 14 nt, Human
ugcacaagcugcac

SEQ ID NO: 3210010 - RNA, 15 nt, Human
ugcacaagcugcacc

SEQ ID NO: 3210011 - RNA, 23 nt, Human
agcccugguggcagugggagcug

SEQ ID NO: 3210012 - RNA, 22 nt, Human
agcccugguggcagugggagcu

SEQ ID NO: 3210013 - RNA, 15 nt, Human
ugcacgugugugcac

SEQ ID NO: 3210014 - RNA, 14 nt, Human
ugcacgugugugca

SEQ ID NO: 3210015 - RNA, 16 nt, Human
ugcacccucaggcagg

SEQ ID NO: 3210016 - RNA, 17 nt, Human
ugcacccucaggcaggu

SEQ ID NO: 3210017 - RNA, 20 nt, Human
ugcacccacuaaugugucau

SEQ ID NO: 3210018 - RNA, 17 nt, Human
ugcacacaucaucugua

SEQ ID NO: 3210019 - RNA, 16 nt, Human
ugcacacaucaucugu

SEQ ID NO: 3210020 - RNA, 21 nt, Human
ugcacacaucaucuguaagcu

SEQ ID NO: 3210021 - RNA, 23 nt, Human
ugcacacgagcagacacccuugg

SEQ ID NO: 3210022 - RNA, 23 nt, Human
agcuaggaacaaaucuuccuggu

SEQ ID NO: 3210023 - RNA, 21 nt, Human
agcuaggaacaaaucuuccug

SEQ ID NO: 3210024 - RNA, 16 nt, Human
agcuaggaacaaaucu

SEQ ID NO: 3210025 - RNA, 15 nt, Human
agcuaggaacaaauc

SEQ ID NO: 3210026 - RNA, 12 nt, Human
agcuaggccugg

SEQ ID NO: 3210027 - RNA, 15 nt, Human
agcuaggccuggcca

SEQ ID NO: 3210028 - RNA, 14 nt, Human
agcuaggccuggcc

SEQ ID NO: 3210029 - RNA, 13 nt, Human
agcuaggcagggu

SEQ ID NO: 3210030 - RNA, 12 nt, Human
agcuaggcaggg

SEQ ID NO: 3210031 - RNA, 17 nt, Human
agcucaggugucccugc

SEQ ID NO: 3210032 - RNA, 18 nt, Human
agcucaggugucccugca

SEQ ID NO: 3210033 - RNA, 21 nt, Human
agcucaggugucccugcacuu

SEQ ID NO: 3210034 - RNA, 20 nt, Human
agcucaggugucccugcacu

SEQ ID NO: 3210035 - RNA, 22 nt, Human
agcucaggugucccugcacuug

SEQ ID NO: 3210036 - RNA, 21 nt, Human
ugcccagccccuucugaccca

SEQ ID NO: 3210037 - RNA, 20 nt, Human
ugcccagccccuucugaccc

SEQ ID NO: 3210038 - RNA, 23 nt, Human
ugcccagccucuuucccuuccag

SEQ ID NO: 3210039 - RNA, 18 nt, Human
ugcccagccucuuucccu

SEQ ID NO: 3210040 - RNA, 17 nt, Human
ugcccagccucuuuccc

SEQ ID NO: 3210041 - RNA, 16 nt, Human
ugcccagccucuuucc

SEQ ID NO: 3210042 - RNA, 16 nt, Human
ugcccacaggaucagu

SEQ ID NO: 3210043 - RNA, 19 nt, Human
ugcccacaggaucagucug

SEQ ID NO: 3210044 - RNA, 20 nt, Human
ugcccacaggaucagucuga

SEQ ID NO: 3210045 - RNA, 15 nt, Human
agcucaguuuucaac

SEQ ID NO: 3210046 - RNA, 21 nt, Human
ugcccaagaauagaugcugac

SEQ ID NO: 3210047 - RNA, 23 nt, Human
ugcccaagaauagaugcugacug

SEQ ID NO: 3210048 - RNA, 22 nt, Human
ugcccaagaauagaugcugacu

SEQ ID NO: 3210049 - RNA, 17 nt, Human
ugccagacccccuggag

SEQ ID NO: 3210050 - RNA, 23 nt, Human
ugccacaaggaagaaauuaacuu

SEQ ID NO: 3210051 - RNA, 19 nt, Human
ugccacuuugcaaaggagc

SEQ ID NO: 3210052 - RNA, 13 nt, Human
ugccacuuuccaa

SEQ ID NO: 3210053 - RNA, 22 nt, Human
ugccacacuucaggcucuucuc

SEQ ID NO: 3210054 - RNA, 21 nt, Human
agcgguaccaaugcagaacuc

SEQ ID NO: 3210055 - RNA, 19 nt, Human
agcgguaccaaugcagaac

SEQ ID NO: 3210056 - RNA, 22 nt, Human
ugccagacgcucauucagcauc

SEQ ID NO: 3210057 - RNA, 23 nt, Human
ugccagacgcucauucagcaucu

SEQ ID NO: 3210058 - RNA, 22 nt, Human
agcgugagccacugcaccgggc

SEQ ID NO: 3210059 - RNA, 19 nt, Human
agcgugagccacugcaccg

SEQ ID NO: 3210060 - RNA, 15 nt, Human
agcguagugcagcag

SEQ ID NO: 3210061 - RNA, 17 nt, Human
agcgugagccacugcac

SEQ ID NO: 3210062 - RNA, 15 nt, Human
agcuacguuuacuca

SEQ ID NO: 3210063 - RNA, 17 nt, Human
agcuacuugggaggcug

SEQ ID NO: 3210064 - RNA, 18 nt, Human
agcuacuugggaggcuga

SEQ ID NO: 3210065 - RNA, 15 nt, Human
agcuagagaaauucu

SEQ ID NO: 3210066 - RNA, 18 nt, Human
agcuagacgagcaggcuu

SEQ ID NO: 3210067 - RNA, 20 nt, Human
agcuaggaaaagaaaucuau

SEQ ID NO: 3210068 - RNA, 17 nt, Human
agcuaggaaaagaaauc

SEQ ID NO: 3210069 - RNA, 16 nt, Human
agccuggucagcccaa

SEQ ID NO: 3210070 - RNA, 15 nt, Human
agccuggucagccca

SEQ ID NO: 3210071 - RNA, 22 nt, Human
agccugggugacagagcaagug

SEQ ID NO: 3210072 - RNA, 19 nt, Human
agccugcuccagcuguuca

SEQ ID NO: 3210073 - RNA, 22 nt, Human
agccugcuccagcuguucagcu

SEQ ID NO: 3210074 - RNA, 11 nt, Human
agccugcuccu

SEQ ID NO: 3210075 - RNA, 15 nt, Human
agccugcuccuuccc

SEQ ID NO: 3210076 - RNA, 14 nt, Human
agccugcuccuucc

SEQ ID NO: 3210077 - RNA, 16 nt, Human
agccugcuccuucccu

SEQ ID NO: 3210078 - RNA, 14 nt, Human
agccugcuccagcu

SEQ ID NO: 3210079 - RNA, 15 nt, Human
agccugcuccagcug

SEQ ID NO: 3210080 - RNA, 16 nt, Human
agccugcuccagcugu

SEQ ID NO: 3210081 - RNA, 17 nt, Human
agccugcuccagcuguu

SEQ ID NO: 3210082 - RNA, 22 nt, Human
agccuuagaagucacacaguau

SEQ ID NO: 3210083 - RNA, 11 nt, Human
agccuguguca

SEQ ID NO: 3210084 - RNA, 16 nt, Human
agccuguuguuuaagu

SEQ ID NO: 3210085 - RNA, 20 nt, Human
agccuggucagcccaaacca

SEQ ID NO: 3210086 - RNA, 21 nt, Human
agccugugccucugggacugg

SEQ ID NO: 3210087 - RNA, 19 nt, Human
agccugugccucugggacu

SEQ ID NO: 3210088 - RNA, 21 nt, Human
agccuugugggugugagcagc

SEQ ID NO: 3210089 - RNA, 23 nt, Human
agccuugugaucacuuucugaaa

SEQ ID NO: 3210090 - RNA, 11 nt, Human
agccuuccagg

SEQ ID NO: 3210091 - RNA, 14 nt, Human
agccuuccaggggu

SEQ ID NO: 3210092 - RNA, 16 nt, Human
agccuuccaggggugg

SEQ ID NO: 3210093 - RNA, 17 nt, Human
agccuuccagggguggg

SEQ ID NO: 3210094 - RNA, 16 nt, Human
agcggagaaaggaagg

SEQ ID NO: 3210095 - RNA, 20 nt, Human
agcggagaaaggaagggcug

SEQ ID NO: 3210096 - RNA, 18 nt, Human
agcggagacggaguccca

SEQ ID NO: 3210097 - RNA, 14 nt, Human
ugcauuauuaaauu

SEQ ID NO: 3210098 - RNA, 18 nt, Human
ugccaaugggagcucaug

SEQ ID NO: 3210099 - RNA, 21 nt, Human
ugccaauaauaauaccucccu

SEQ ID NO: 3210100 - RNA, 22 nt, Human
ugccaauaauaauaccucccuu

SEQ ID NO: 3210101 - RNA, 17 nt, Human
ugccacaaggaagaaau

SEQ ID NO: 3210102 - RNA, 22 nt, Human
ugccacaaggaagaaauuaacu

SEQ ID NO: 3210103 - RNA, 18 nt, Human
ugccacaaggaagaaauu

SEQ ID NO: 3210104 - RNA, 16 nt, Human
ugccacacuucaggcu

SEQ ID NO: 3210105 - RNA, 15 nt, Human
ugccacacuucaggc

SEQ ID NO: 3210106 - RNA, 14 nt, Human
ugccacacuucagg

SEQ ID NO: 3210107 - RNA, 13 nt, Human
ugccacacuucag

SEQ ID NO: 3210108 - RNA, 21 nt, Human
uggccuguucuucuauggguu

SEQ ID NO: 3210109 - RNA, 18 nt, Human
uggccuggccccucaggg

SEQ ID NO: 3210110 - RNA, 21 nt, Human
uggccuggccccucagggucc

SEQ ID NO: 3210111 - RNA, 12 nt, Human
uggccuggcccc

SEQ ID NO: 3210112 - RNA, 19 nt, Human
uggccugaaccacaggaga

SEQ ID NO: 3210113 - RNA, 17 nt, Human
uggccugacucccccag

SEQ ID NO: 3210114 - RNA, 14 nt, Human
uggccugacucccc

SEQ ID NO: 3210115 - RNA, 20 nt, Human
uggccugaaccacaggagag

SEQ ID NO: 3210116 - RNA, 14 nt, Human
uggccucuucuaga

SEQ ID NO: 3210117 - RNA, 12 nt, Human
aggccuggggac

SEQ ID NO: 3210118 - RNA, 18 nt, Human
aggccugggggcugggca

SEQ ID NO: 3210119 - RNA, 20 nt, Human
aggccugggggcugggcaga

SEQ ID NO: 3210120 - RNA, 23 nt, Human
uggccgggcgcgguggcucacgc

SEQ ID NO: 3210121 - RNA, 13 nt, Human
uggcccugcccug

SEQ ID NO: 3210122 - RNA, 14 nt, Human
uggcccuggcagcc

SEQ ID NO: 3210123 - RNA, 14 nt, Human
uggcccugcccugg

SEQ ID NO: 3210124 - RNA, 19 nt, Human
uggcccaccaggccccccu

SEQ ID NO: 3210125 - RNA, 14 nt, Human
uggcccaccaggcc

SEQ ID NO: 3210126 - RNA, 20 nt, Human
uggcccaacaggggcuccau

SEQ ID NO: 3210127 - RNA, 23 nt, Human
uggccaguggcuggaucugugag

SEQ ID NO: 3210128 - RNA, 23 nt, Human
uggccagugugacaaggauugcu

SEQ ID NO: 3210129 - RNA, 17 nt, Human
uggccagguggccacuc

SEQ ID NO: 3210130 - RNA, 16 nt, Human
uggccagguggccacu

SEQ ID NO: 3210131 - RNA, 19 nt, Human
uggccagguggccacucca

SEQ ID NO: 3210132 - RNA, 14 nt, Human
uggccaucauuucu

SEQ ID NO: 3210133 - RNA, 22 nt, Human
uggccauaagcaacaauuuuca

SEQ ID NO: 3210134 - RNA, 23 nt, Human
uggccaaagccaaagcuaggccu

SEQ ID NO: 3210135 - RNA, 21 nt, Human
uggccaaagccaaagcuaggc

SEQ ID NO: 3210136 - RNA, 15 nt, Human
uggccaaacaacagu

SEQ ID NO: 3210137 - RNA, 17 nt, Human
uggcauuugcaauaaaa

SEQ ID NO: 3210138 - RNA, 15 nt, Human
uggcauuugcaauaa

SEQ ID NO: 3210139 - RNA, 17 nt, Human
uggccaauuaaggcauc

SEQ ID NO: 3210140 - RNA, 15 nt, Human
uggccagguggccac

SEQ ID NO: 3210141 - RNA, 11 nt, Human
uggccaggugg

SEQ ID NO: 3210142 - RNA, 18 nt, Human
uggcaucuuaaaagcuau

SEQ ID NO: 3210143 - RNA, 17 nt, Human
aggccccgcccaggcuu

SEQ ID NO: 3210144 - RNA, 20 nt, Human
aggccccucccucuccagca

SEQ ID NO: 3210145 - RNA, 16 nt, Human
uggauuauaaucagaa

SEQ ID NO: 3210146 - RNA, 17 nt, Human
uggauuauaaucagaau

SEQ ID NO: 3210147 - RNA, 14 nt, Human
uggauuaaauuagu

SEQ ID NO: 3210148 - RNA, 21 nt, Human
uggauuaaauuaguuugugaa

SEQ ID NO: 3210149 - RNA, 22 nt, Human
uggauuauucuuucuccuuuuu

SEQ ID NO: 3210150 - RNA, 16 nt, Human
uggauuauucuuucuc

SEQ ID NO: 3210151 - RNA, 16 nt, Human
uggauuauucaggcuu

SEQ ID NO: 3210152 - RNA, 13 nt, Human
uggauuguccccg

SEQ ID NO: 3210153 - RNA, 13 nt, Human
uggauggaagggg

SEQ ID NO: 3210154 - RNA, 13 nt, Human
uggaguagaaugu

SEQ ID NO: 3210155 - RNA, 16 nt, Human
uggaugggcagucauu

SEQ ID NO: 3210156 - RNA, 15 nt, Human
uggauggaaggggcu

SEQ ID NO: 3210157 - RNA, 16 nt, Human
aggccaaaggaagcac

SEQ ID NO: 3210158 - RNA, 18 nt, Human
aggccaaaggaagcacau

SEQ ID NO: 3210159 - RNA, 19 nt, Human
aggccaaaggaagcacaug

SEQ ID NO: 3210160 - RNA, 15 nt, Human
aggccaaaggaagca

SEQ ID NO: 3210161 - RNA, 17 nt, Human
aggcagccccauucugc

SEQ ID NO: 3210162 - RNA, 16 nt, Human
aggcagccccauucug

SEQ ID NO: 3210163 - RNA, 18 nt, Human
aggcagccaggccacaag

SEQ ID NO: 3210164 - RNA, 16 nt, Human
aggccaaggugggagg

SEQ ID NO: 3210165 - RNA, 23 nt, Human
aggccaagaguggccccaccugg

SEQ ID NO: 3210166 - RNA, 22 nt, Human
aggccaagaguggccccaccug

SEQ ID NO: 3210167 - RNA, 21 nt, Human
aggccaagaguggccccaccu

SEQ ID NO: 3210168 - RNA, 20 nt, Human
aggccaagaguggccccacc

SEQ ID NO: 3210169 - RNA, 19 nt, Human
aggccaagaguggccccac

SEQ ID NO: 3210170 - RNA, 14 nt, Human
aggccaagagguuu

SEQ ID NO: 3210171 - RNA, 13 nt, Human
aggccaagagguu

SEQ ID NO: 3210172 - RNA, 18 nt, Human
aggccaagaguggcccca

SEQ ID NO: 3210173 - RNA, 16 nt, Human
aggccaagaguggccc

SEQ ID NO: 3210174 - RNA, 15 nt, Human
aggccaagaguggcc

SEQ ID NO: 3210175 - RNA, 21 nt, Human
aggccaagagguuuggcuccu

SEQ ID NO: 3210176 - RNA, 18 nt, Human
uggcacaguuuucugaga

SEQ ID NO: 3210177 - RNA, 16 nt, Human
uggcacagggcaugaa

SEQ ID NO: 3210178 - RNA, 20 nt, Human
uggcacagggcaugaaauga

SEQ ID NO: 3210179 - RNA, 19 nt, Human
uggcacagggcaugaaaug

SEQ ID NO: 3210180 - RNA, 19 nt, Human
uggcacaguuuucugagaa

SEQ ID NO: 3210181 - RNA, 13 nt, Human
uggcagccuuggc

SEQ ID NO: 3210182 - RNA, 16 nt, Human
uggcacagggcagugg

SEQ ID NO: 3210183 - RNA, 18 nt, Human
uggcacagggcaguggga

SEQ ID NO: 3210184 - RNA, 21 nt, Human
uggcaaugguaguuucugugg

SEQ ID NO: 3210185 - RNA, 18 nt, Human
uggcaauguuuugcuuuu

SEQ ID NO: 3210186 - RNA, 16 nt, Human
uggcaaugguaguuuc

SEQ ID NO: 3210187 - RNA, 17 nt, Human
uggcaaugguaguuucu

SEQ ID NO: 3210188 - RNA, 18 nt, Human
uggcaaugguaguuucug

SEQ ID NO: 3210189 - RNA, 19 nt, Human
uggcaaugguaguuucugu

SEQ ID NO: 3210190 - RNA, 20 nt, Human
uggcaauggaugaacugaaa

SEQ ID NO: 3210191 - RNA, 17 nt, Human
aggccacaagacccuug

SEQ ID NO: 3210192 - RNA, 18 nt, Human
aggccacaagacccuugu

SEQ ID NO: 3210193 - RNA, 19 nt, Human
aggccacaagacccuugug

SEQ ID NO: 3210194 - RNA, 14 nt, Human
aggccagagggagu

SEQ ID NO: 3210195 - RNA, 16 nt, Human
aggccacaagacccuu

SEQ ID NO: 3210196 - RNA, 19 nt, Human
uggcagcucaccucucccu

SEQ ID NO: 3210197 - RNA, 15 nt, Human
uggcagcucaccucu

SEQ ID NO: 3210198 - RNA, 17 nt, Human
uggcagccuuggcaaac

SEQ ID NO: 3210199 - RNA, 20 nt, Human
aggccagagggagugacaga

SEQ ID NO: 3210200 - RNA, 21 nt, Human
aggcccagagggccugcaagg

SEQ ID NO: 3210201 - RNA, 16 nt, Human
aggccccgcccaggcu

SEQ ID NO: 3210202 - RNA, 19 nt, Human
aggccccaauaccccaugg

SEQ ID NO: 3210203 - RNA, 16 nt, Human
aggccccaauacccca

SEQ ID NO: 3210204 - RNA, 23 nt, Human
aggcccagcgcggacauccccug

SEQ ID NO: 3210205 - RNA, 12 nt, Human
aggcccagcacc

SEQ ID NO: 3210206 - RNA, 16 nt, Human
aggcccaugggaggcu

SEQ ID NO: 3210207 - RNA, 21 nt, Human
aggcccaugggaggcuggagu

SEQ ID NO: 3210208 - RNA, 18 nt, Human
aggcccaugggaggcugg

SEQ ID NO: 3210209 - RNA, 20 nt, Human
uggaagcuucuggugaccuu

SEQ ID NO: 3210210 - RNA, 23 nt, Human
uggaagcacaccaaucuuacuuu

SEQ ID NO: 3210211 - RNA, 21 nt, Human
uggaaggcccagcaccacccu

SEQ ID NO: 3210212 - RNA, 15 nt, Human
uggaaggcccagcac

SEQ ID NO: 3210213 - RNA, 13 nt, Human
uggaaggcccagc

SEQ ID NO: 3210214 - RNA, 14 nt, Human
uggaaggcagagaa

SEQ ID NO: 3210215 - RNA, 15 nt, Human
uggaaggcagagaaa

SEQ ID NO: 3210216 - RNA, 16 nt, Human
uggaaggcagagaaau

SEQ ID NO: 3210217 - RNA, 17 nt, Human
uggaaggcagagaaauc

SEQ ID NO: 3210218 - RNA, 18 nt, Human
uggaaggcagagaaaucu

SEQ ID NO: 3210219 - RNA, 20 nt, Human
uggaaggcagagaaaucuaa

SEQ ID NO: 3210220 - RNA, 23 nt, Human
uggaaggggacacgugacagccg

SEQ ID NO: 3210221 - RNA, 18 nt, Human
uggaaaucaaauguaaag

SEQ ID NO: 3210222 - RNA, 17 nt, Human
uggaaaucaaauguaaa

SEQ ID NO: 3210223 - RNA, 17 nt, Human
uggaaaugggcagagca

SEQ ID NO: 3210224 - RNA, 19 nt, Human
uggaaaucaaauguaaagu

SEQ ID NO: 3210225 - RNA, 18 nt, Human
uggaagcuguuuggaaaa

SEQ ID NO: 3210226 - RNA, 19 nt, Human
uggaagcuguuuggaaaag

SEQ ID NO: 3210227 - RNA, 20 nt, Human
uggaagcuguuuggaaaaga

SEQ ID NO: 3210228 - RNA, 23 nt, Human
uggaagcuguuuggaaaagacag

SEQ ID NO: 3210229 - RNA, 21 nt, Human
uggaagcacaccaaucuuacu

SEQ ID NO: 3210230 - RNA, 22 nt, Human
uggaagcacaccaaucuuacuu

SEQ ID NO: 3210231 - RNA, 18 nt, Human
uggaagauuauugagagc

SEQ ID NO: 3210232 - RNA, 18 nt, Human
uggaagauauuccugagu

SEQ ID NO: 3210233 - RNA, 13 nt, Human
aggauccugagcc

SEQ ID NO: 3210234 - RNA, 14 nt, Human
aggauccugagcca

SEQ ID NO: 3210235 - RNA, 15 nt, Human
aggauacaggcugga

SEQ ID NO: 3210236 - RNA, 16 nt, Human
aggauaccuucuuauu

SEQ ID NO: 3210237 - RNA, 18 nt, Human
aggauacugccuccccca

SEQ ID NO: 3210238 - RNA, 15 nt, Human
aggauacugccuccc

SEQ ID NO: 3210239 - RNA, 23 nt, Human
aggagcucacuguggugucugug

SEQ ID NO: 3210240 - RNA, 22 nt, Human
aggagcuccauacacacgcugc

SEQ ID NO: 3210241 - RNA, 13 nt, Human
aggagcugggccc

SEQ ID NO: 3210242 - RNA, 12 nt, Human
aggacaguauuu

SEQ ID NO: 3210243 - RNA, 19 nt, Human
aggacaguauuugugggga

SEQ ID NO: 3210244 - RNA, 15 nt, Human
aggacagggguuccu

SEQ ID NO: 3210245 - RNA, 21 nt, Human
ugcuugaggcaacucaucuua

SEQ ID NO: 3210246 - RNA, 16 nt, Human
aggacagggguuccuu

SEQ ID NO: 3210247 - RNA, 15 nt, Human
ugcuuguaacuaaaa

SEQ ID NO: 3210248 - RNA, 15 nt, Human
ugcuuggaggaagga

SEQ ID NO: 3210249 - RNA, 14 nt, Human
ugcuuggaggaagg

SEQ ID NO: 3210250 - RNA, 14 nt, Human
ugcuugccaaagua

SEQ ID NO: 3210251 - RNA, 15 nt, Human
ugcuugccaaaguac

SEQ ID NO: 3210252 - RNA, 18 nt, Human
ugcuugccaaaguacaga

SEQ ID NO: 3210253 - RNA, 14 nt, Human
ugcuuugugaacaa

SEQ ID NO: 3210254 - RNA, 14 nt, Human
ugcuuuuggucugu

SEQ ID NO: 3210255 - RNA, 19 nt, Human
ugcuuguauuuuuuaaugc

SEQ ID NO: 3210256 - RNA, 14 nt, Human
ugcuuugucuccuc

SEQ ID NO: 3210257 - RNA, 17 nt, Human
ugcuuugucuccucuau

SEQ ID NO: 3210258 - RNA, 16 nt, Human
ugcuuugucuccucua

SEQ ID NO: 3210259 - RNA, 15 nt, Human
ugcuuugucuccucu

SEQ ID NO: 3210260 - RNA, 19 nt, Human
uggaauuauuuuaaaagau

SEQ ID NO: 3210261 - RNA, 20 nt, Human
uggaauuauuuuaaaagaua

SEQ ID NO: 3210262 - RNA, 18 nt, Human
aggcaaacauuuucucuu

SEQ ID NO: 3210263 - RNA, 22 nt, Human
aggcaaacauuuucucuuagaa

SEQ ID NO: 3210264 - RNA, 19 nt, Human
aggcaaacauuuucucuua

SEQ ID NO: 3210265 - RNA, 22 nt, Human
aggcaaaccuuucuauaauuuu

SEQ ID NO: 3210266 - RNA, 23 nt, Human
aggcaaacauuuucucuuagaaa

SEQ ID NO: 3210267 - RNA, 18 nt, Human
aggcaaauccgaaaucag

SEQ ID NO: 3210268 - RNA, 15 nt, Human
aggcaaauaaaauuc

SEQ ID NO: 3210269 - RNA, 17 nt, Human
aggaucucuugagccug

SEQ ID NO: 3210270 - RNA, 18 nt, Human
aggaucucuugagccugg

SEQ ID NO: 3210271 - RNA, 19 nt, Human
aggaucucuugagccuggg

SEQ ID NO: 3210272 - RNA, 12 nt, Human
aggaucucuuga

SEQ ID NO: 3210273 - RNA, 14 nt, Human
uggacacagcucuu

SEQ ID NO: 3210274 - RNA, 13 nt, Human
uggacacagcucu

SEQ ID NO: 3210275 - RNA, 22 nt, Human
uggacacagcucuucuccaggc

SEQ ID NO: 3210276 - RNA, 21 nt, Human
uggacacagcucuucuccagg

SEQ ID NO: 3210277 - RNA, 23 nt, Human
uggacacagcucuucuccaggcu

SEQ ID NO: 3210278 - RNA, 16 nt, Human
uggacccugaggccca

SEQ ID NO: 3210279 - RNA, 18 nt, Human
uggacccugaggcccaga

SEQ ID NO: 3210280 - RNA, 23 nt, Human
uggacccuguggaugauaaaaca

SEQ ID NO: 3210281 - RNA, 21 nt, Human
uggacccugaggcccagaggg

SEQ ID NO: 3210282 - RNA, 19 nt, Human
uggacccugaggcccagag

SEQ ID NO: 3210283 - RNA, 20 nt, Human
uggacccugaggcccagagg

SEQ ID NO: 3210284 - RNA, 15 nt, Human
uggacccugaggccc

SEQ ID NO: 3210285 - RNA, 22 nt, Human
aggcaaguuuucccugaaguua

SEQ ID NO: 3210286 - RNA, 17 nt, Human
aggcaaggcugucaauu

SEQ ID NO: 3210287 - RNA, 15 nt, Human
uggagcuauuuuaaa

SEQ ID NO: 3210288 - RNA, 18 nt, Human
uggagcggggcccacccg

SEQ ID NO: 3210289 - RNA, 22 nt, Human
aggcacccaccaucaugucugg

SEQ ID NO: 3210290 - RNA, 21 nt, Human
aggcacccaccaucaugucug

SEQ ID NO: 3210291 - RNA, 20 nt, Human
aggcacccaccaucaugucu

SEQ ID NO: 3210292 - RNA, 14 nt, Human
aggcaaugcuggcu

SEQ ID NO: 3210293 - RNA, 15 nt, Human
aggcacccaccauca

SEQ ID NO: 3210294 - RNA, 13 nt, Human
aggcacccuucca

SEQ ID NO: 3210295 - RNA, 20 nt, Human
aggcaccuaccaccacgccc

SEQ ID NO: 3210296 - RNA, 14 nt, Human
uggagaacuagaga

SEQ ID NO: 3210297 - RNA, 14 nt, Human
uggagaaccaccua

SEQ ID NO: 3210298 - RNA, 13 nt, Human
uggagaagcggcu

SEQ ID NO: 3210299 - RNA, 22 nt, Human
uggagaagcggcuggcagccca

SEQ ID NO: 3210300 - RNA, 15 nt, Human
ugcuguagacauuug

SEQ ID NO: 3210301 - RNA, 17 nt, Human
ugcuguagccuauuuuu

SEQ ID NO: 3210302 - RNA, 23 nt, Human
ugcuguaguguugucuuugauaa

SEQ ID NO: 3210303 - RNA, 17 nt, Human
ugcugggauuacaggug

SEQ ID NO: 3210304 - RNA, 21 nt, Human
ugcugggauuacaagcgugag

SEQ ID NO: 3210305 - RNA, 23 nt, Human
ugcuguauccauccauggggcug

SEQ ID NO: 3210306 - RNA, 21 nt, Human
ugcuggcuguuggcugggggc

SEQ ID NO: 3210307 - RNA, 19 nt, Human
ugcuggcuguuggcugggg

SEQ ID NO: 3210308 - RNA, 19 nt, Human
ugcugggauuacaagcgug

SEQ ID NO: 3210309 - RNA, 18 nt, Human
ugcuggcuguuggcuggg

SEQ ID NO: 3210310 - RNA, 13 nt, Human
ugcuggcugccuu

SEQ ID NO: 3210311 - RNA, 15 nt, Human
ugcuggccggacacc

SEQ ID NO: 3210312 - RNA, 16 nt, Human
ugcuggccggacaccc

SEQ ID NO: 3210313 - RNA, 16 nt, Human
aggaauggacauuucu

SEQ ID NO: 3210314 - RNA, 15 nt, Human
aggaauggacauuuc

SEQ ID NO: 3210315 - RNA, 19 nt, Human
aggaaugcacauggaauau

SEQ ID NO: 3210316 - RNA, 13 nt, Human
ugcugcccugccc

SEQ ID NO: 3210317 - RNA, 16 nt, Human
ugcugcccugcccacc

SEQ ID NO: 3210318 - RNA, 17 nt, Human
ugcugcccugcccaccu

SEQ ID NO: 3210319 - RNA, 18 nt, Human
ugcugcccugcccaccug

SEQ ID NO: 3210320 - RNA, 17 nt, Human
aggaauggacauuucua

SEQ ID NO: 3210321 - RNA, 12 nt, Human
ugcugcccugcc

SEQ ID NO: 3210322 - RNA, 11 nt, Human
ugcugcccugu

SEQ ID NO: 3210323 - RNA, 19 nt, Human
ugcugcccugcccaccugg

SEQ ID NO: 3210324 - RNA, 21 nt, Human
ugcugcccugcccaccuggcc

SEQ ID NO: 3210325 - RNA, 18 nt, Human
ugcuucauguuugccuuc

SEQ ID NO: 3210326 - RNA, 20 nt, Human
ugcuucauuuguaugucaaa

SEQ ID NO: 3210327 - RNA, 14 nt, Human
ugcuuccagaaaca

SEQ ID NO: 3210328 - RNA, 13 nt, Human
ugcuuccagaaac

SEQ ID NO: 3210329 - RNA, 12 nt, Human
ugcuuccagaaa

SEQ ID NO: 3210330 - RNA, 20 nt, Human
ugcuucaaggauccugagcc

SEQ ID NO: 3210331 - RNA, 21 nt, Human
ugcuucaaggauccugagcca

SEQ ID NO: 3210332 - RNA, 23 nt, Human
ugcuucaaggauccugagccaga

SEQ ID NO: 3210333 - RNA, 17 nt, Human
aggacacugcagaacag

SEQ ID NO: 3210334 - RNA, 17 nt, Human
aggacagccccuccucc

SEQ ID NO: 3210335 - RNA, 16 nt, Human
aggacagaaggcuccu

SEQ ID NO: 3210336 - RNA, 22 nt, Human
aggacagaaggcuccugccccc

SEQ ID NO: 3210337 - RNA, 21 nt, Human
aggacagaaggcuccugcccc

SEQ ID NO: 3210338 - RNA, 19 nt, Human
aggacagaaggcuccugcc

SEQ ID NO: 3210339 - RNA, 17 nt, Human
aggacagaaggcuccug

SEQ ID NO: 3210340 - RNA, 18 nt, Human
aggacacuaaccacgcug

SEQ ID NO: 3210341 - RNA, 17 nt, Human
ugcugucccuuuuccuu

SEQ ID NO: 3210342 - RNA, 13 nt, Human
ugcugugcaaaug

SEQ ID NO: 3210343 - RNA, 15 nt, Human
ugcugugccccuggc

SEQ ID NO: 3210344 - RNA, 12 nt, Human
ugcugugccccu

SEQ ID NO: 3210345 - RNA, 16 nt, Human
ugcugugccccuggcc

SEQ ID NO: 3210346 - RNA, 19 nt, Human
ugcugucccuuacgugagu

SEQ ID NO: 3210347 - RNA, 15 nt, Human
ugcugucccuuuucc

SEQ ID NO: 3210348 - RNA, 17 nt, Human
ugcugucccuuacguga

SEQ ID NO: 3210349 - RNA, 15 nt, Human
ugcuguauucccaua

SEQ ID NO: 3210350 - RNA, 20 nt, Human
ugcuuaccuugguuggaagg

SEQ ID NO: 3210351 - RNA, 13 nt, Human
ugcuuagcaaaaa

SEQ ID NO: 3210352 - RNA, 19 nt, Human
ugcuaucucccccagcccc

SEQ ID NO: 3210353 - RNA, 13 nt, Human
agcuuuauuucua

SEQ ID NO: 3210354 - RNA, 14 nt, Human
agcuuuauuucuag

SEQ ID NO: 3210355 - RNA, 21 nt, Human
agcuuuaaugauaugcuugua

SEQ ID NO: 3210356 - RNA, 12 nt, Human
agcuuuaaauua

SEQ ID NO: 3210357 - RNA, 17 nt, Human
agcuuuaaauuauguga

SEQ ID NO: 3210358 - RNA, 19 nt, Human
ugcuaugucauuucauguc

SEQ ID NO: 3210359 - RNA, 18 nt, Human
ugcuaugucauuucaugu

SEQ ID NO: 3210360 - RNA, 17 nt, Human
ugcuaugucauuucaug

SEQ ID NO: 3210361 - RNA, 12 nt, Human
ugcuauuaauau

SEQ ID NO: 3210362 - RNA, 13 nt, Human
ugcuauuaauauu

SEQ ID NO: 3210363 - RNA, 16 nt, Human
ugcuauuaauauuugu

SEQ ID NO: 3210364 - RNA, 21 nt, Human
ugcuauuaauauuuguuuagu

SEQ ID NO: 3210365 - RNA, 18 nt, Human
ugcuauuacgaaguucaa

SEQ ID NO: 3210366 - RNA, 19 nt, Human
ugcuauuacgaaguucaag

SEQ ID NO: 3210367 - RNA, 20 nt, Human
ugcuaucucccccagcccca

SEQ ID NO: 3210368 - RNA, 18 nt, Human
ugcuaucucccccagccc

SEQ ID NO: 3210369 - RNA, 15 nt, Human
ugcuaucucuauuau

SEQ ID NO: 3210370 - RNA, 15 nt, Human
ugcuaugucauuuca

SEQ ID NO: 3210371 - RNA, 16 nt, Human
ugcuaugucauuucau

SEQ ID NO: 3210372 - RNA, 22 nt, Human
ugcucauuuuuuuuuuaucaga

SEQ ID NO: 3210373 - RNA, 15 nt, Human
ugcucccccuuuucc

SEQ ID NO: 3210374 - RNA, 13 nt, Human
ugcucccccuuuu

SEQ ID NO: 3210375 - RNA, 16 nt, Human
ugcuccccuuccccuu

SEQ ID NO: 3210376 - RNA, 18 nt, Human
ugcuccccugugccagcc

SEQ ID NO: 3210377 - RNA, 14 nt, Human
ugcucuggacaggc

SEQ ID NO: 3210378 - RNA, 16 nt, Human
ugcucuggacaggcau

SEQ ID NO: 3210379 - RNA, 15 nt, Human
ugcucuggacaggca

SEQ ID NO: 3210380 - RNA, 19 nt, Human
ugcugacuguacuccuccc

SEQ ID NO: 3210381 - RNA, 16 nt, Human
ugcugacuguacuccu

SEQ ID NO: 3210382 - RNA, 14 nt, Human
ugcugacuguacuc

SEQ ID NO: 3210383 - RNA, 15 nt, Human
aggaaaggcuccagg

SEQ ID NO: 3210384 - RNA, 13 nt, Human
aggaaaggcucca

SEQ ID NO: 3210385 - RNA, 14 nt, Human
aggaaaggcuccag

SEQ ID NO: 3210386 - RNA, 22 nt, Human
ugcugacuguacuccucccagg

SEQ ID NO: 3210387 - RNA, 21 nt, Human
ugcugacuguacuccucccag

SEQ ID NO: 3210388 - RNA, 23 nt, Human
aggaaaucaaauaugcaaagcac

SEQ ID NO: 3210389 - RNA, 15 nt, Human
aggaaaucaccgaaa

SEQ ID NO: 3210390 - RNA, 19 nt, Human
aggaaaucaccgaaaacgu

SEQ ID NO: 3210391 - RNA, 16 nt, Human
aggaagcacaugccuc

SEQ ID NO: 3210392 - RNA, 17 nt, Human
aggaagcacaugccucu

SEQ ID NO: 3210393 - RNA, 11 nt, Human
aggaagcacau

SEQ ID NO: 3210394 - RNA, 14 nt, Human
aggaaauccagggu

SEQ ID NO: 3210395 - RNA, 20 nt, Human
aggaaggaaacccagcucug

SEQ ID NO: 3210396 - RNA, 22 nt, Human
aggaaggaaacccagcucuggu

SEQ ID NO: 3210397 - RNA, 23 nt, Human
aggaaggaaacccagcucugguc

SEQ ID NO: 3210398 - RNA, 18 nt, Human
aggaagccagcaggcucu

SEQ ID NO: 3210399 - RNA, 18 nt, Human
aggaagccgcuggggcca

SEQ ID NO: 3210400 - RNA, 19 nt, Human
aggaagccgcuggggccag

SEQ ID NO: 3210401 - RNA, 20 nt, Human
aggaagccgcuggggccagu

SEQ ID NO: 3210402 - RNA, 22 nt, Human
aggaagccagcaggcucucagg

SEQ ID NO: 3210403 - RNA, 23 nt, Human
aggaagccagcaggcucucaggc

SEQ ID NO: 3210404 - RNA, 21 nt, Human
aggaagccagcaggcucucag

SEQ ID NO: 3210405 - RNA, 18 nt, Human
agcugugugcucuccaag

SEQ ID NO: 3210406 - RNA, 21 nt, Human
agcugugcucuggacaggcau

SEQ ID NO: 3210407 - RNA, 20 nt, Human
agcugugcucuggacaggca

SEQ ID NO: 3210408 - RNA, 19 nt, Human
agcugugcucuggacaggc

SEQ ID NO: 3210409 - RNA, 20 nt, Human
agcuggcuuacacuggcaau

SEQ ID NO: 3210410 - RNA, 14 nt, Human
agcugggaaagcau

SEQ ID NO: 3210411 - RNA, 15 nt, Human
agcugggaaagcaua

SEQ ID NO: 3210412 - RNA, 15 nt, Human
agcugggaccaguac

SEQ ID NO: 3210413 - RNA, 18 nt, Human
agcugggaccacaggugc

SEQ ID NO: 3210414 - RNA, 16 nt, Human
agcugucaaggcucag

SEQ ID NO: 3210415 - RNA, 18 nt, Human
agcuggcuccagccugga

SEQ ID NO: 3210416 - RNA, 20 nt, Human
agcugugugcucuccaagcc

SEQ ID NO: 3210417 - RNA, 11 nt, Human
agcuguguuua

SEQ ID NO: 3210418 - RNA, 14 nt, Human
agcuguguuauuau

SEQ ID NO: 3210419 - RNA, 14 nt, Human
agcuguucacagcc

SEQ ID NO: 3210420 - RNA, 19 nt, Human
agcuguucacagccagacu

SEQ ID NO: 3210421 - RNA, 16 nt, Human
agcuguucacagccag

SEQ ID NO: 3210422 - RNA, 20 nt, Human
ugccuguucagcuccagcuc

SEQ ID NO: 3210423 - RNA, 18 nt, Human
ugccuguucagcuccagc

SEQ ID NO: 3210424 - RNA, 13 nt, Human
agcuguucagcug

SEQ ID NO: 3210425 - RNA, 17 nt, Human
ugccuguucagcuccag

SEQ ID NO: 3210426 - RNA, 15 nt, Human
ugccuuauggaacac

SEQ ID NO: 3210427 - RNA, 16 nt, Human
ugccuuauggaacacu

SEQ ID NO: 3210428 - RNA, 20 nt, Human
ugccuguugggccaggagcc

SEQ ID NO: 3210429 - RNA, 19 nt, Human
ugccuguugggccaggagc

SEQ ID NO: 3210430 - RNA, 10 nt, Human
ugccugcccu

SEQ ID NO: 3210431 - RNA, 13 nt, Human
ugccugcccuuug

SEQ ID NO: 3210432 - RNA, 23 nt, Human
ugccugcccugucaggaggcaga

SEQ ID NO: 3210433 - RNA, 20 nt, Human
ugccugcccugucaggaggc

SEQ ID NO: 3210434 - RNA, 21 nt, Human
ugccugcccuuuguccuccug

SEQ ID NO: 3210435 - RNA, 15 nt, Human
ugccugcccuuuguc

SEQ ID NO: 3210436 - RNA, 16 nt, Human
ugccugcccaggcccc

SEQ ID NO: 3210437 - RNA, 24 nt, Human
ugccugcccaggccccugccaccc

SEQ ID NO: 3210438 - RNA, 12 nt, Human
ugccucugccuc

SEQ ID NO: 3210439 - RNA, 15 nt, Human
ugccugcccaggccc

SEQ ID NO: 3210440 - RNA, 14 nt, Human
ugccugcccaggcc

SEQ ID NO: 3210441 - RNA, 15 nt, Human
ugccucugccucuga

SEQ ID NO: 3210442 - RNA, 13 nt, Human
ugccugcccaggc

SEQ ID NO: 3210443 - RNA, 14 nt, Human
ugccucugccucug

SEQ ID NO: 3210444 - RNA, 13 nt, Human
ugccucugccucu

SEQ ID NO: 3210445 - RNA, 14 nt, Human
ugcccaggcagguc

SEQ ID NO: 3210446 - RNA, 13 nt, Human
ugcccaggcaggu

SEQ ID NO: 3210447 - RNA, 12 nt, Human
ugcccaggcagg

SEQ ID NO: 3210448 - RNA, 14 nt, Human
ugccuggaggccag

SEQ ID NO: 3210449 - RNA, 15 nt, Human
ugccuggauggggcu

SEQ ID NO: 3210450 - RNA, 14 nt, Human
ugccuggauggggc

SEQ ID NO: 3210451 - RNA, 20 nt, Human
agcugccuguucagcuccag

SEQ ID NO: 3210452 - RNA, 20 nt, Human
agcugcuugggcuucauccu

SEQ ID NO: 3210453 - RNA, 21 nt, Human
agcugccuguucagcuccagc

SEQ ID NO: 3210454 - RNA, 21 nt, Human
agcugcuugggcuucauccuc

SEQ ID NO: 3210455 - RNA, 19 nt, Human
agcugccuguucagcucca

SEQ ID NO: 3210456 - RNA, 21 nt, Human
agcugcuuuugucuaugggac

SEQ ID NO: 3210457 - RNA, 14 nt, Human
agcugcuuucuucu

SEQ ID NO: 3210458 - RNA, 13 nt, Human
agcugcuuuguua

SEQ ID NO: 3210459 - RNA, 14 nt, Human
agcugcuuuguuac

SEQ ID NO: 3210460 - RNA, 16 nt, Human
agcugcuuuguuaccu

SEQ ID NO: 3210461 - RNA, 17 nt, Human
agcugcuuuguuaccuu

SEQ ID NO: 3210462 - RNA, 20 nt, Human
agcugcuuuguuaccuuaaa

SEQ ID NO: 3210463 - RNA, 21 nt, Human
agcugcuuuguuaccuuaaaa

SEQ ID NO: 3210464 - RNA, 22 nt, Human
agcugcuuuguuaccuuaaaac

SEQ ID NO: 3210465 - RNA, 22 nt, Human
agcuggaucuccauucucucag

SEQ ID NO: 3210466 - RNA, 23 nt, Human
agcuuggggacaggggcaggagg

SEQ ID NO: 3210467 - RNA, 23 nt, Human
agcuugggcagaucucccacaug

SEQ ID NO: 3210468 - RNA, 21 nt, Human
agcuugggcagaucucccaca

SEQ ID NO: 3210469 - RNA, 19 nt, Human
agcuuguuuuggacuuugu

SEQ ID NO: 3210470 - RNA, 20 nt, Human
agcuuguuuuggacuuuguu

SEQ ID NO: 3210471 - RNA, 21 nt, Human
agcuuguuuuggacuuuguua

SEQ ID NO: 3210472 - RNA, 23 nt, Human
agcuuguuuuggacuuuguuaca

SEQ ID NO: 3210473 - RNA, 14 nt, Human
agcuugaggguugg

SEQ ID NO: 3210474 - RNA, 18 nt, Human
agcuugaggguugggcug

SEQ ID NO: 3210475 - RNA, 17 nt, Human
agcuugggcagaucucc

SEQ ID NO: 3210476 - RNA, 11 nt, Human
agcuugggcag

SEQ ID NO: 3210477 - RNA, 15 nt, Human
agcuuagaaacugga

SEQ ID NO: 3210478 - RNA, 13 nt, Human
agcuuacguaguu

SEQ ID NO: 3210479 - RNA, 15 nt, Human
agcuuacguaguucu

SEQ ID NO: 3210480 - RNA, 17 nt, Human
agcuugaaacugagaug

SEQ ID NO: 3210481 - RNA, 18 nt, Human
agcuuagaauuauuugca

SEQ ID NO: 3210482 - RNA, 20 nt, Human
ugcuacaaaaacacagcaag

SEQ ID NO: 3210483 - RNA, 14 nt, Human
agcuguucagcugg

SEQ ID NO: 3210484 - RNA, 17 nt, Human
agcuguucuaauggauu

SEQ ID NO: 3210485 - RNA, 22 nt, Human
agcuguuggccucugcaaagga

SEQ ID NO: 3210486 - RNA, 23 nt, Human
agcuguugaugggaugauugaag

SEQ ID NO: 3210487 - RNA, 17 nt, Human
agcuguugaugggauga

SEQ ID NO: 3210488 - RNA, 23 nt, Human
agcuguugacucuaguacuguga

SEQ ID NO: 3210489 - RNA, 21 nt, Human
agcuguugacucuaguacugu

SEQ ID NO: 3210490 - RNA, 20 nt, Human
agcuguugacucuaguacug

SEQ ID NO: 3210491 - RNA, 13 nt, Human
agcuguugacucu

SEQ ID NO: 3210492 - RNA, 18 nt, Human
agcuguugaccaggcacc

SEQ ID NO: 3210493 - RNA, 16 nt, Human
agcuguugaccaggca

SEQ ID NO: 3210494 - RNA, 15 nt, Human
agcuguugaccaggc

SEQ ID NO: 3210495 - RNA, 14 nt, Human
agcuguugaccagg

SEQ ID NO: 3210496 - RNA, 14 nt, Human
agcuguucuuccug

SEQ ID NO: 3210497 - RNA, 13 nt, Human
agcuguucuuccu

SEQ ID NO: 3210498 - RNA, 15 nt, Human
agcuguucuuccugg

SEQ ID NO: 3210499 - RNA, 13 nt, Human
agcuguugaccag

SEQ ID NO: 3210500 - RNA, 19 nt, Human
ugcuacaaaaacacagcaa

SEQ ID NO: 3210501 - RNA, 18 nt, Human
ugcuacaaaaacacagca

SEQ ID NO: 3210502 - RNA, 17 nt, Human
ugcuacaaaaacacagc

SEQ ID NO: 3210503 - RNA, 16 nt, Human
ugcuacaaaaacacag

SEQ ID NO: 3210504 - RNA, 15 nt, Human
ugcuacaaaaacaca

SEQ ID NO: 3210505 - RNA, 21 nt, Human
ugcuaaguaaaucucuucugu

SEQ ID NO: 3210506 - RNA, 20 nt, Human
ugcuaaguaaaucucuucug

SEQ ID NO: 3210507 - RNA, 18 nt, Human
ugcuaaguaaaucucuuc

SEQ ID NO: 3210508 - RNA, 15 nt, Human
ugcggcaaaaggaaa

SEQ ID NO: 3210509 - RNA, 23 nt, Human
ugcggagucauuuuguguugaag

SEQ ID NO: 3210510 - RNA, 19 nt, Human
ugcggagucauuuuguguu

SEQ ID NO: 3210511 - RNA, 22 nt, Human
ugcggacagccacggccaggcc

SEQ ID NO: 3210512 - RNA, 21 nt, Human
ugcggacagccacggccaggc

SEQ ID NO: 3210513 - RNA, 23 nt, Human
ugcggacagccacggccaggcca

SEQ ID NO: 3210514 - RNA, 18 nt, Human
ugccuuugaagagugaaa

SEQ ID NO: 3210515 - RNA, 11 nt, Human
ugccuuucugu

SEQ ID NO: 3210516 - RNA, 16 nt, Human
ugccuuugaagaguga

SEQ ID NO: 3210517 - RNA, 13 nt, Human
ugccuuugaagag

SEQ ID NO: 3210518 - RNA, 12 nt, Human
ugccuuugaaga

SEQ ID NO: 3210519 - RNA, 16 nt, Human
ugccuuucuguguuua

SEQ ID NO: 3210520 - RNA, 17 nt, Human
ugccuuugcucuggucu

SEQ ID NO: 3210521 - RNA, 18 nt, Human
ugccuuugcagcucagaa

SEQ ID NO: 3210522 - RNA, 12 nt, Human
ugccuuuguaac

SEQ ID NO: 3210523 - RNA, 19 nt, Human
ugccuuuggcacucugacu

SEQ ID NO: 3210524 - RNA, 17 nt, Human
ugcggugcuaucucccc

SEQ ID NO: 3210525 - RNA, 18 nt, Human
ugcgguccacccaggagc

SEQ ID NO: 3210526 - RNA, 17 nt, Human
ugcgguccacccaggag

SEQ ID NO: 3210527 - RNA, 17 nt, Human
ugcgggucacaggaggg

SEQ ID NO: 3210528 - RNA, 18 nt, Human
ugcggggcgggcacaccu

SEQ ID NO: 3210529 - RNA, 14 nt, Human
ugcggggcgggcac

SEQ ID NO: 3210530 - RNA, 14 nt, Human
ugcgggucacagga

SEQ ID NO: 3210531 - RNA, 16 nt, Human
ugcgggucacaggagg

SEQ ID NO: 3210532 - RNA, 20 nt, Human
ugcgggcuuccuccuggugu

SEQ ID NO: 3210533 - RNA, 17 nt, Human
ugcggccuuuggcuuca

SEQ ID NO: 3210534 - RNA, 19 nt, Human
ugcggccuuuggcuucacg

SEQ ID NO: 3210535 - RNA, 15 nt, Human
ugcggccuuuucaug

SEQ ID NO: 3210536 - RNA, 18 nt, Human
aggggcuagcuaagccaa

SEQ ID NO: 3210537 - RNA, 16 nt, Human
aggggcuccaugccag

SEQ ID NO: 3210538 - RNA, 18 nt, Human
aggggcuccaugccagcc

SEQ ID NO: 3210539 - RNA, 15 nt, Human
agggggaaggcaggg

SEQ ID NO: 3210540 - RNA, 23 nt, Human
aggggagcaaaaucgaugcagug

SEQ ID NO: 3210541 - RNA, 15 nt, Human
aggggccuggcagcc

SEQ ID NO: 3210542 - RNA, 15 nt, Human
aggggagacuuugau

SEQ ID NO: 3210543 - RNA, 23 nt, Human
aggggccuggcagccgugccuuc

SEQ ID NO: 3210544 - RNA, 18 nt, Human
aggggccuggcagccgug

SEQ ID NO: 3210545 - RNA, 19 nt, Human
uggggucacucuggcagcu

SEQ ID NO: 3210546 - RNA, 15 nt, Human
aggggacugccaccu

SEQ ID NO: 3210547 - RNA, 13 nt, Human
aggggacugccac

SEQ ID NO: 3210548 - RNA, 13 nt, Human
aggggagacuuug

SEQ ID NO: 3210549 - RNA, 16 nt, Human
aggggagacagagcaa

SEQ ID NO: 3210550 - RNA, 15 nt, Human
aggggagacagagca

SEQ ID NO: 3210551 - RNA, 14 nt, Human
aggggagacagagc

SEQ ID NO: 3210552 - RNA, 17 nt, Human
aggggacugccaccucc

SEQ ID NO: 3210553 - RNA, 16 nt, Human
aggggacugccaccuc

SEQ ID NO: 3210554 - RNA, 18 nt, Human
aggggugggacacccugu

SEQ ID NO: 3210555 - RNA, 20 nt, Human
aggggugggacacccuguga

SEQ ID NO: 3210556 - RNA, 22 nt, Human
aggggugggacacccugugaug

SEQ ID NO: 3210557 - RNA, 17 nt, Human
aggggguggccucccaa

SEQ ID NO: 3210558 - RNA, 15 nt, Human
aggggguggccuccc

SEQ ID NO: 3210559 - RNA, 23 nt, Human
agggucucacuauguugcccagg

SEQ ID NO: 3210560 - RNA, 22 nt, Human
agggucucacuauguugcccag

SEQ ID NO: 3210561 - RNA, 21 nt, Human
agggucucacuauguugccca

SEQ ID NO: 3210562 - RNA, 20 nt, Human
agggucucacuauguugccc

SEQ ID NO: 3210563 - RNA, 24 nt, Human
agggguucccuuuuuuggcugcug

SEQ ID NO: 3210564 - RNA, 19 nt, Human
agggguuccuucugggcau

SEQ ID NO: 3210565 - RNA, 12 nt, Human
ugggucugugug

SEQ ID NO: 3210566 - RNA, 21 nt, Human
ugggucuggaggaccugcccg

SEQ ID NO: 3210567 - RNA, 13 nt, Human
ugggucuggagga

SEQ ID NO: 3210568 - RNA, 15 nt, Human
ugggugcuuggagga

SEQ ID NO: 3210569 - RNA, 19 nt, Human
ugggugcuuggaggaagga

SEQ ID NO: 3210570 - RNA, 22 nt, Human
ugggugcuuggaggaaggaaac

SEQ ID NO: 3210571 - RNA, 22 nt, Human
uggguggcaccagcagccugga

SEQ ID NO: 3210572 - RNA, 21 nt, Human
agggucucacucugucgccca

SEQ ID NO: 3210573 - RNA, 22 nt, Human
agggucucacucugucgcccag

SEQ ID NO: 3210574 - RNA, 22 nt, Human
agggucucuagugcugugaaaa

SEQ ID NO: 3210575 - RNA, 21 nt, Human
agggucucuagugcugugaaa

SEQ ID NO: 3210576 - RNA, 20 nt, Human
agggucucuagugcugugaa

SEQ ID NO: 3210577 - RNA, 18 nt, Human
agggucucuagugcugug

SEQ ID NO: 3210578 - RNA, 16 nt, Human
agggucucuagugcug

SEQ ID NO: 3210579 - RNA, 16 nt, Human
agggucucaggguguc

SEQ ID NO: 3210580 - RNA, 17 nt, Human
agggucucagggugucc

SEQ ID NO: 3210581 - RNA, 13 nt, Human
ugguaggaacugc

SEQ ID NO: 3210582 - RNA, 21 nt, Human
ugguagcuuuucccuucuuuu

SEQ ID NO: 3210583 - RNA, 20 nt, Human
ugguaggaacugcugggcuu

SEQ ID NO: 3210584 - RNA, 17 nt, Human
ugguagcuuuucccuuc

SEQ ID NO: 3210585 - RNA, 23 nt, Human
uggucacaggacucugccuccuc

SEQ ID NO: 3210586 - RNA, 22 nt, Human
uggucacaggacucugccuccu

SEQ ID NO: 3210587 - RNA, 20 nt, Human
uggucacaggacucugccuc

SEQ ID NO: 3210588 - RNA, 16 nt, Human
ugguacuaacuuuccu

SEQ ID NO: 3210589 - RNA, 20 nt, Human
ugguagcuuuucccuucuuu

SEQ ID NO: 3210590 - RNA, 16 nt, Human
uggguggggggcuuca

SEQ ID NO: 3210591 - RNA, 12 nt, Human
ugguaagauugu

SEQ ID NO: 3210592 - RNA, 14 nt, Human
ugguaagauuguua

SEQ ID NO: 3210593 - RNA, 18 nt, Human
ugguaagauuguuauuaa

SEQ ID NO: 3210594 - RNA, 19 nt, Human
ugguaagauuguuauuaaa

SEQ ID NO: 3210595 - RNA, 20 nt, Human
ugguaagauuguuauuaaau

SEQ ID NO: 3210596 - RNA, 21 nt, Human
ugggugcugcuaauucuuugc

SEQ ID NO: 3210597 - RNA, 20 nt, Human
uggguggcuuaaaaaaaacu

SEQ ID NO: 3210598 - RNA, 16 nt, Human
ugguaaucauauuaga

SEQ ID NO: 3210599 - RNA, 14 nt, Human
ugguaccuugcaca

SEQ ID NO: 3210600 - RNA, 16 nt, Human
ugguaccuugcacaca

SEQ ID NO: 3210601 - RNA, 15 nt, Human
ugguaccuugcacac

SEQ ID NO: 3210602 - RNA, 16 nt, Human
ugguaauaagggaaaa

SEQ ID NO: 3210603 - RNA, 14 nt, Human
ugguaaucauauua

SEQ ID NO: 3210604 - RNA, 21 nt, Human
ugguaauaagggaaaaaucaa

SEQ ID NO: 3210605 - RNA, 14 nt, Human
uggucuccacuggg

SEQ ID NO: 3210606 - RNA, 19 nt, Human
uggucuauaccuuaagaau

SEQ ID NO: 3210607 - RNA, 23 nt, Human
uggucucaaacucuugaccucag

SEQ ID NO: 3210608 - RNA, 17 nt, Human
uggucucaaacucuuga

SEQ ID NO: 3210609 - RNA, 16 nt, Human
uggucccaccccacac

SEQ ID NO: 3210610 - RNA, 19 nt, Human
uggucuacacugugcugag

SEQ ID NO: 3210611 - RNA, 16 nt, Human
uggucucaaacucuug

SEQ ID NO: 3210612 - RNA, 13 nt, Human
uggucccacccca

SEQ ID NO: 3210613 - RNA, 19 nt, Human
uggucuaucuuugagcgcc

SEQ ID NO: 3210614 - RNA, 10 nt, Human
uggucagccc

SEQ ID NO: 3210615 - RNA, 12 nt, Human
uggucagcccaa

SEQ ID NO: 3210616 - RNA, 11 nt, Human
uggucagccca

SEQ ID NO: 3210617 - RNA, 22 nt, Human
uggucagauuugaacucuucaa

SEQ ID NO: 3210618 - RNA, 18 nt, Human
uggucaccaaaucagcug

SEQ ID NO: 3210619 - RNA, 14 nt, Human
uggucccaccccac

SEQ ID NO: 3210620 - RNA, 15 nt, Human
uggucccaccccaca

SEQ ID NO: 3210621 - RNA, 13 nt, Human
aggguuauaauaa

SEQ ID NO: 3210622 - RNA, 22 nt, Human
aggguguccggucccuguccca

SEQ ID NO: 3210623 - RNA, 21 nt, Human
aggguggugaccucugccuga

SEQ ID NO: 3210624 - RNA, 15 nt, Human
agggugucugccccc

SEQ ID NO: 3210625 - RNA, 21 nt, Human
agggugucugcccccuccuga

SEQ ID NO: 3210626 - RNA, 17 nt, Human
uggucugacccacugcu

SEQ ID NO: 3210627 - RNA, 16 nt, Human
uggucugacccacugc

SEQ ID NO: 3210628 - RNA, 23 nt, Human
uggucucccauaugcagaaauag

SEQ ID NO: 3210629 - RNA, 11 nt, Human
uggucuuugag

SEQ ID NO: 3210630 - RNA, 10 nt, Human
uggucuuuga

SEQ ID NO: 3210631 - RNA, 12 nt, Human
aggucagagccu

SEQ ID NO: 3210632 - RNA, 21 nt, Human
aggucauuaaggccacaucca

SEQ ID NO: 3210633 - RNA, 21 nt, Human
aggucauuuccauguaugcau

SEQ ID NO: 3210634 - RNA, 18 nt, Human
aggucauuuccauguaug

SEQ ID NO: 3210635 - RNA, 13 nt, Human
agguauuaagauu

SEQ ID NO: 3210636 - RNA, 18 nt, Human
aggucaccuuuauucugg

SEQ ID NO: 3210637 - RNA, 23 nt, Human
aggucaccucacucagcaccacu

SEQ ID NO: 3210638 - RNA, 21 nt, Human
aggucaccucacucagcacca

SEQ ID NO: 3210639 - RNA, 20 nt, Human
aggucaccucacucagcacc

SEQ ID NO: 3210640 - RNA, 19 nt, Human
aggucaccucacucagcac

SEQ ID NO: 3210641 - RNA, 14 nt, Human
aggucaccucacuc

SEQ ID NO: 3210642 - RNA, 18 nt, Human
aggucaccucacucagca

SEQ ID NO: 3210643 - RNA, 17 nt, Human
aggucaccucacucagc

SEQ ID NO: 3210644 - RNA, 19 nt, Human
aggucaccuuuauucuggc

SEQ ID NO: 3210645 - RNA, 19 nt, Human
agguauaaguggugugugu

SEQ ID NO: 3210646 - RNA, 20 nt, Human
agguauaaguggugugugua

SEQ ID NO: 3210647 - RNA, 17 nt, Human
agguaugcaaucaaauc

SEQ ID NO: 3210648 - RNA, 19 nt, Human
agguauaauugugugauau

SEQ ID NO: 3210649 - RNA, 15 nt, Human
agguauaauugugug

SEQ ID NO: 3210650 - RNA, 12 nt, Human
agguauaauugu

SEQ ID NO: 3210651 - RNA, 23 nt, Human
agguaguucaagaaaugaagagc

SEQ ID NO: 3210652 - RNA, 21 nt, Human
agguaugcaaucaaaucugcu

SEQ ID NO: 3210653 - RNA, 23 nt, Human
agguagaaauaucugaaaaugua

SEQ ID NO: 3210654 - RNA, 15 nt, Human
agguagaacgccagg

SEQ ID NO: 3210655 - RNA, 23 nt, Human
agguacuuugucuaagaaacauu

SEQ ID NO: 3210656 - RNA, 18 nt, Human
agguagaaugaccuugua

SEQ ID NO: 3210657 - RNA, 17 nt, Human
agguagaaugaccuugu

SEQ ID NO: 3210658 - RNA, 18 nt, Human
agguagaacgccagggac

SEQ ID NO: 3210659 - RNA, 17 nt, Human
agguagaacgccaggga

SEQ ID NO: 3210660 - RNA, 21 nt, Human
agguagaaugaccuuguaaug

SEQ ID NO: 3210661 - RNA, 22 nt, Human
agguaguucaagaaaugaagag

SEQ ID NO: 3210662 - RNA, 19 nt, Human
agguaguucaagaaaugaa

SEQ ID NO: 3210663 - RNA, 17 nt, Human
agguaguucaagaaaug

SEQ ID NO: 3210664 - RNA, 16 nt, Human
agguacuuugucuaag

SEQ ID NO: 3210665 - RNA, 23 nt, Human
agguacuuucauauuuuaaacag

SEQ ID NO: 3210666 - RNA, 19 nt, Human
agguagaaauaucugaaaa

SEQ ID NO: 3210667 - RNA, 17 nt, Human
agguagaaauaucugaa

SEQ ID NO: 3210668 - RNA, 17 nt, Human
aggguuggccccugccc

SEQ ID NO: 3210669 - RNA, 19 nt, Human
aggguugggaaaauccaaa

SEQ ID NO: 3210670 - RNA, 23 nt, Human
aggguuggccccugcccggcugc

SEQ ID NO: 3210671 - RNA, 18 nt, Human
aggguuggccccugcccg

SEQ ID NO: 3210672 - RNA, 14 nt, Human
uggggcugauugua

SEQ ID NO: 3210673 - RNA, 18 nt, Human
uggggcugggcccaccca

SEQ ID NO: 3210674 - RNA, 22 nt, Human
uggggcugggggaugggccuga

SEQ ID NO: 3210675 - RNA, 21 nt, Human
uggggcugggggaugggccug

SEQ ID NO: 3210676 - RNA, 18 nt, Human
uggggcugggggaugggc

SEQ ID NO: 3210677 - RNA, 16 nt, Human
uggggcugggggaugg

SEQ ID NO: 3210678 - RNA, 13 nt, Human
uggggcuggggga

SEQ ID NO: 3210679 - RNA, 20 nt, Human
uggggcugcaccggcuggcc

SEQ ID NO: 3210680 - RNA, 14 nt, Human
ugggguacccacug

SEQ ID NO: 3210681 - RNA, 21 nt, Human
ugggguagguugggagaaugu

SEQ ID NO: 3210682 - RNA, 15 nt, Human
ugggguagguuggga

SEQ ID NO: 3210683 - RNA, 17 nt, Human
uggggucacucuggcag

SEQ ID NO: 3210684 - RNA, 18 nt, Human
uggggucacucuggcagc

SEQ ID NO: 3210685 - RNA, 20 nt, Human
ugggguacccacugcucugg

SEQ ID NO: 3210686 - RNA, 22 nt, Human
uggggguucuuucuuccucugc

SEQ ID NO: 3210687 - RNA, 16 nt, Human
ugggguacccacugcu

SEQ ID NO: 3210688 - RNA, 15 nt, Human
ugggguacccacugc

SEQ ID NO: 3210689 - RNA, 14 nt, Human
uggggcccugccuc

SEQ ID NO: 3210690 - RNA, 12 nt, Human
uggggagaaagu

SEQ ID NO: 3210691 - RNA, 15 nt, Human
uggggaggggcugug

SEQ ID NO: 3210692 - RNA, 23 nt, Human
uggggaccucaggccugggggcu

SEQ ID NO: 3210693 - RNA, 18 nt, Human
uggggcggugagagggga

SEQ ID NO: 3210694 - RNA, 15 nt, Human
uggggcgcgugaggc

SEQ ID NO: 3210695 - RNA, 16 nt, Human
uggggcgcgugaggcc

SEQ ID NO: 3210696 - RNA, 17 nt, Human
uggggcgcgugaggccc

SEQ ID NO: 3210697 - RNA, 20 nt, Human
uggggcuaaagacugaucuc

SEQ ID NO: 3210698 - RNA, 23 nt, Human
uggggcuaggaaauccagggugg

SEQ ID NO: 3210699 - RNA, 15 nt, Human
uggggcccugccucc

SEQ ID NO: 3210700 - RNA, 16 nt, Human
uggggcccugccuccu

SEQ ID NO: 3210701 - RNA, 17 nt, Human
uggggccuaauaaaacu

SEQ ID NO: 3210702 - RNA, 20 nt, Human
uggggccuaauaaaacugau

SEQ ID NO: 3210703 - RNA, 21 nt, Human
uggggccuaauaaaacugaug

SEQ ID NO: 3210704 - RNA, 22 nt, Human
uggggccuaauaaaacugaugu

SEQ ID NO: 3210705 - RNA, 23 nt, Human
uggggccuaauaaaacugaugug

SEQ ID NO: 3210706 - RNA, 22 nt, Human
uggggacaggggcaggaggaag

SEQ ID NO: 3210707 - RNA, 20 nt, Human
uggggacaggggcaggagga

SEQ ID NO: 3210708 - RNA, 17 nt, Human
uggggacagagcagaac

SEQ ID NO: 3210709 - RNA, 14 nt, Human
uggggaccagagcu

SEQ ID NO: 3210710 - RNA, 15 nt, Human
uggggaccagagcug

SEQ ID NO: 3210711 - RNA, 17 nt, Human
uggggaccagagcugcc

SEQ ID NO: 3210712 - RNA, 18 nt, Human
uggggaccagagcugcca

SEQ ID NO: 3210713 - RNA, 13 nt, Human
uggggaccucagg

SEQ ID NO: 3210714 - RNA, 23 nt, Human
uggggaccagcagucugccugga

SEQ ID NO: 3210715 - RNA, 17 nt, Human
uggggacaugggucgcc

SEQ ID NO: 3210716 - RNA, 21 nt, Human
uggggaccagcagucugccug

SEQ ID NO: 3210717 - RNA, 14 nt, Human
ugggcugggcacug

SEQ ID NO: 3210718 - RNA, 18 nt, Human
ugggcuggguucuaccca

SEQ ID NO: 3210719 - RNA, 19 nt, Human
ugggcuggguucuacccag

SEQ ID NO: 3210720 - RNA, 12 nt, Human
ugggcugggcac

SEQ ID NO: 3210721 - RNA, 20 nt, Human
ugggcucccuucccaccucu

SEQ ID NO: 3210722 - RNA, 17 nt, Human
agggcuuuaaaauucuc

SEQ ID NO: 3210723 - RNA, 18 nt, Human
ugggcugaauguauguaa

SEQ ID NO: 3210724 - RNA, 21 nt, Human
ugggcugaauguauguaaaua

SEQ ID NO: 3210725 - RNA, 21 nt, Human
ugggcugcccuggugcugcca

SEQ ID NO: 3210726 - RNA, 16 nt, Human
ugggcugcccuggugc

SEQ ID NO: 3210727 - RNA, 20 nt, Human
ugggcugcccuggugcugcc

SEQ ID NO: 3210728 - RNA, 19 nt, Human
ugggcugcccuggugcugc

SEQ ID NO: 3210729 - RNA, 17 nt, Human
ugggcugcccuggugcu

SEQ ID NO: 3210730 - RNA, 18 nt, Human
ugggcucccuucccaccu

SEQ ID NO: 3210731 - RNA, 19 nt, Human
ugggcucccuucccaccuc

SEQ ID NO: 3210732 - RNA, 15 nt, Human
ugggcucccuuccca

SEQ ID NO: 3210733 - RNA, 19 nt, Human
agggcuuguaguucuuuaa

SEQ ID NO: 3210734 - RNA, 14 nt, Human
agggcuuuaaaauu

SEQ ID NO: 3210735 - RNA, 16 nt, Human
agggcuuuaaaauucu

SEQ ID NO: 3210736 - RNA, 15 nt, Human
agggcuuuaaaauuc

SEQ ID NO: 3210737 - RNA, 14 nt, Human
agggcuuguaguuc

SEQ ID NO: 3210738 - RNA, 15 nt, Human
agggcuuguaguucu

SEQ ID NO: 3210739 - RNA, 16 nt, Human
agggcuuguaguucuu

SEQ ID NO: 3210740 - RNA, 17 nt, Human
agggcuuguaguucuuu

SEQ ID NO: 3210741 - RNA, 23 nt, Human
agggcuucugccauuucugagau

SEQ ID NO: 3210742 - RNA, 17 nt, Human
agggcagggacaggaua

SEQ ID NO: 3210743 - RNA, 18 nt, Human
agggcagggacagggccg

SEQ ID NO: 3210744 - RNA, 18 nt, Human
agggcccagagagggugg

SEQ ID NO: 3210745 - RNA, 23 nt, Human
agggcccagagaggguggugacc

SEQ ID NO: 3210746 - RNA, 15 nt, Human
agggagggcuucugc

SEQ ID NO: 3210747 - RNA, 22 nt, Human
ugggcccacccaagcaggaggc

SEQ ID NO: 3210748 - RNA, 19 nt, Human
ugggcccacccaagcagga

SEQ ID NO: 3210749 - RNA, 14 nt, Human
ugggcccacauccg

SEQ ID NO: 3210750 - RNA, 19 nt, Human
agggagugacagaggcagc

SEQ ID NO: 3210751 - RNA, 16 nt, Human
agggcagauuuuaguu

SEQ ID NO: 3210752 - RNA, 15 nt, Human
agggcagaguuacuu

SEQ ID NO: 3210753 - RNA, 18 nt, Human
agggagugacagaggcag

SEQ ID NO: 3210754 - RNA, 17 nt, Human
agggagugacagaggca

SEQ ID NO: 3210755 - RNA, 17 nt, Human
agggaggugaccccagg

SEQ ID NO: 3210756 - RNA, 16 nt, Human
ugggcaacccccagcc

SEQ ID NO: 3210757 - RNA, 18 nt, Human
ugggaggucaaggcugca

SEQ ID NO: 3210758 - RNA, 19 nt, Human
ugggaggucaaggcugcag

SEQ ID NO: 3210759 - RNA, 20 nt, Human
ugggaggucaaggcugcagu

SEQ ID NO: 3210760 - RNA, 23 nt, Human
ugggaggucaaggcugcagugag

SEQ ID NO: 3210761 - RNA, 17 nt, Human
ugggaggucaaggcugc

SEQ ID NO: 3210762 - RNA, 13 nt, Human
ugggccaggagcc

SEQ ID NO: 3210763 - RNA, 18 nt, Human
ugggccagaauuucaaac

SEQ ID NO: 3210764 - RNA, 14 nt, Human
ugggccaggagccu

SEQ ID NO: 3210765 - RNA, 16 nt, Human
ugggccaggagccucc

SEQ ID NO: 3210766 - RNA, 20 nt, Human
ugggcccaaugcacuuuguu

SEQ ID NO: 3210767 - RNA, 20 nt, Human
ugggcaacccccagccugcu

SEQ ID NO: 3210768 - RNA, 17 nt, Human
ugggcaacccccagccu

SEQ ID NO: 3210769 - RNA, 13 nt, Human
ugggcacagguca

SEQ ID NO: 3210770 - RNA, 23 nt, Human
ugggcacacgcugcucugcccca

SEQ ID NO: 3210771 - RNA, 22 nt, Human
ugggcacacgcugcucugcccc

SEQ ID NO: 3210772 - RNA, 21 nt, Human
ugggcacacgcugcucugccc

SEQ ID NO: 3210773 - RNA, 20 nt, Human
ugggcacacgcugcucugcc

SEQ ID NO: 3210774 - RNA, 17 nt, Human
ugggcacacgcugcucu

SEQ ID NO: 3210775 - RNA, 15 nt, Human
ugggcacacgcugcu

SEQ ID NO: 3210776 - RNA, 12 nt, Human
ugggcacacgcu

SEQ ID NO: 3210777 - RNA, 17 nt, Human
ugggccagaauuucaaa

SEQ ID NO: 3210778 - RNA, 16 nt, Human
ugggcaccacaaaaua

SEQ ID NO: 3210779 - RNA, 18 nt, Human
ugggcaccacaaaauaua

SEQ ID NO: 3210780 - RNA, 19 nt, Human
ugucaguauguggaagugu

SEQ ID NO: 3210781 - RNA, 20 nt, Human
ugucaguauguggaagugug

SEQ ID NO: 3210782 - RNA, 18 nt, Human
ugucaguauguggaagug

SEQ ID NO: 3210783 - RNA, 22 nt, Human
ugucaguauguggaaguguggg

SEQ ID NO: 3210784 - RNA, 23 nt, Human
ugucauuugcuggagcucugccc

SEQ ID NO: 3210785 - RNA, 19 nt, Human
ugucagggcaguacaaugu

SEQ ID NO: 3210786 - RNA, 11 nt, Human
ugucaggaggc

SEQ ID NO: 3210787 - RNA, 19 nt, Human
ugucaggaaaacacccagg

SEQ ID NO: 3210788 - RNA, 19 nt, Human
ugucagcugaaccugggua

SEQ ID NO: 3210789 - RNA, 19 nt, Human
agucacugagacagcccgg

SEQ ID NO: 3210790 - RNA, 18 nt, Human
agucacugagacagcccg

SEQ ID NO: 3210791 - RNA, 18 nt, Human
agucacugcaaaaccagg

SEQ ID NO: 3210792 - RNA, 16 nt, Human
ugucagcugaaccugg

SEQ ID NO: 3210793 - RNA, 21 nt, Human
agucacugcacguuuucaucu

SEQ ID NO: 3210794 - RNA, 20 nt, Human
agucacugcacguuuucauc

SEQ ID NO: 3210795 - RNA, 13 nt, Human
agucacugcacag

SEQ ID NO: 3210796 - RNA, 15 nt, Human
aguauguggaagugu

SEQ ID NO: 3210797 - RNA, 17 nt, Human
aguauguggaagugugg

SEQ ID NO: 3210798 - RNA, 17 nt, Human
aguaugguggcuggguu

SEQ ID NO: 3210799 - RNA, 14 nt, Human
aguauaaauuugug

SEQ ID NO: 3210800 - RNA, 17 nt, Human
aguauaaauuuguguaa

SEQ ID NO: 3210801 - RNA, 23 nt, Human
aguauaaauuuguguaauauuac

SEQ ID NO: 3210802 - RNA, 20 nt, Human
aguaguuugcauuucagaaa

SEQ ID NO: 3210803 - RNA, 18 nt, Human
aguaguuugcauuucaga

SEQ ID NO: 3210804 - RNA, 16 nt, Human
aguaguuugcauuuca

SEQ ID NO: 3210805 - RNA, 15 nt, Human
aguaguuugcauuuc

SEQ ID NO: 3210806 - RNA, 14 nt, Human
aguaguuugcauuu

SEQ ID NO: 3210807 - RNA, 14 nt, Human
aguauaaagaauag

SEQ ID NO: 3210808 - RNA, 19 nt, Human
aguauguggaagugugggu

SEQ ID NO: 3210809 - RNA, 21 nt, Human
aguauuugaaaacagaaauug

SEQ ID NO: 3210810 - RNA, 20 nt, Human
aguauuugaaaacagaaauu

SEQ ID NO: 3210811 - RNA, 22 nt, Human
aguauuugaaaacagaaauugg

SEQ ID NO: 3210812 - RNA, 19 nt, Human
aguauuucuaaaguaauug

SEQ ID NO: 3210813 - RNA, 18 nt, Human
aguauuugaaaacagaaa

SEQ ID NO: 3210814 - RNA, 17 nt, Human
aguauuugaaaacagaa

SEQ ID NO: 3210815 - RNA, 13 nt, Human
aguauuugaaaac

SEQ ID NO: 3210816 - RNA, 12 nt, Human
aguauuugaaaa

SEQ ID NO: 3210817 - RNA, 13 nt, Human
agucaccaagccc

SEQ ID NO: 3210818 - RNA, 16 nt, Human
aguauuuggaauuaga

SEQ ID NO: 3210819 - RNA, 20 nt, Human
agucaccaaauagugugaaa

SEQ ID NO: 3210820 - RNA, 21 nt, Human
agucaccaaauagugugaaau

SEQ ID NO: 3210821 - RNA, 14 nt, Human
uguauucaauuaaa

SEQ ID NO: 3210822 - RNA, 17 nt, Human
uguauucaauuaaagaa

SEQ ID NO: 3210823 - RNA, 17 nt, Human
uguauucauauuuguac

SEQ ID NO: 3210824 - RNA, 16 nt, Human
uguauucauauuugua

SEQ ID NO: 3210825 - RNA, 15 nt, Human
uguauucauauuugu

SEQ ID NO: 3210826 - RNA, 22 nt, Human
uguauuuugugaguuuguuucu

SEQ ID NO: 3210827 - RNA, 15 nt, Human
uguauuuugugaguu

SEQ ID NO: 3210828 - RNA, 15 nt, Human
ugucaagccauaauu

SEQ ID NO: 3210829 - RNA, 19 nt, Human
ugucaagagggucugagga

SEQ ID NO: 3210830 - RNA, 21 nt, Human
uguauuuuuccucuuucacuu

SEQ ID NO: 3210831 - RNA, 19 nt, Human
uguauuuuuuaaugcuaau

SEQ ID NO: 3210832 - RNA, 21 nt, Human
ugucaagaauagcauuguaaa

SEQ ID NO: 3210833 - RNA, 17 nt, Human
uguauuuuuuaaugcua

SEQ ID NO: 3210834 - RNA, 19 nt, Human
aguagggguaccacugaau

SEQ ID NO: 3210835 - RNA, 21 nt, Human
aguagucucugugaggccuua

SEQ ID NO: 3210836 - RNA, 19 nt, Human
aguaggggaagaauaauuu

SEQ ID NO: 3210837 - RNA, 22 nt, Human
aguaggauaugccugcucuuug

SEQ ID NO: 3210838 - RNA, 20 nt, Human
aguaggauaugccugcucuu

SEQ ID NO: 3210839 - RNA, 15 nt, Human
aguaggcaagauggc

SEQ ID NO: 3210840 - RNA, 23 nt, Human
aguaggacaaggugcaggcaggc

SEQ ID NO: 3210841 - RNA, 17 nt, Human
aguagcuuaagaaaaaa

SEQ ID NO: 3210842 - RNA, 22 nt, Human
aguaggacaaggugcaggcagg

SEQ ID NO: 3210843 - RNA, 20 nt, Human
aguagcuuugcacuuuucua

SEQ ID NO: 3210844 - RNA, 17 nt, Human
aguaguguuacauguau

SEQ ID NO: 3210845 - RNA, 18 nt, Human
aguagugaagacuccaga

SEQ ID NO: 3210846 - RNA, 14 nt, Human
aguagugucuggau

SEQ ID NO: 3210847 - RNA, 20 nt, Human
aguagugucuggaucaguaa

SEQ ID NO: 3210848 - RNA, 14 nt, Human
aguaguguuacaug

SEQ ID NO: 3210849 - RNA, 19 nt, Human
aguagugaagacuccagaa

SEQ ID NO: 3210850 - RNA, 13 nt, Human
aguaguucuguau

SEQ ID NO: 3210851 - RNA, 13 nt, Human
aguaguuugcauu

SEQ ID NO: 3210852 - RNA, 18 nt, Human
aguaguucuguauuugaa

SEQ ID NO: 3210853 - RNA, 21 nt, Human
aguaguucuguauuugaaagu

SEQ ID NO: 3210854 - RNA, 14 nt, Human
aguaguucuguauu

SEQ ID NO: 3210855 - RNA, 15 nt, Human
aguaguucuguauuu

SEQ ID NO: 3210856 - RNA, 16 nt, Human
aguaguucuguauuug

SEQ ID NO: 3210857 - RNA, 17 nt, Human
aguaguucuguauuuga

SEQ ID NO: 3210858 - RNA, 16 nt, Human
aguaggaagacuuugg

SEQ ID NO: 3210859 - RNA, 16 nt, Human
aguagcuuaagaaaaa

SEQ ID NO: 3210860 - RNA, 17 nt, Human
aguaggaagacuuugga

SEQ ID NO: 3210861 - RNA, 18 nt, Human
aguaggaagacuuuggaa

SEQ ID NO: 3210862 - RNA, 19 nt, Human
aguaggaagacuuuggaaa

SEQ ID NO: 3210863 - RNA, 22 nt, Human
aguaggaagacuuuggaaagac

SEQ ID NO: 3210864 - RNA, 20 nt, Human
agucccugaggcaggucccc

SEQ ID NO: 3210865 - RNA, 19 nt, Human
agucccugaggcagguccc

SEQ ID NO: 3210866 - RNA, 21 nt, Human
agucccucaagccaccagaug

SEQ ID NO: 3210867 - RNA, 23 nt, Human
aguccaggacaggagaugcugug

SEQ ID NO: 3210868 - RNA, 17 nt, Human
agucaggcucucugggc

SEQ ID NO: 3210869 - RNA, 23 nt, Human
agucccugaggcagguccccaga

SEQ ID NO: 3210870 - RNA, 22 nt, Human
agucccugaggcagguccccag

SEQ ID NO: 3210871 - RNA, 18 nt, Human
agucccuguaauuguugu

SEQ ID NO: 3210872 - RNA, 16 nt, Human
agucccuguaauuguu

SEQ ID NO: 3210873 - RNA, 23 nt, Human
agucccuguaauuguuguuugua

SEQ ID NO: 3210874 - RNA, 20 nt, Human
agucccuguaauuguuguuu

SEQ ID NO: 3210875 - RNA, 23 nt, Human
aguccgaaagggacuuggaagcu

SEQ ID NO: 3210876 - RNA, 21 nt, Human
aguccgaccuggccugucugu

SEQ ID NO: 3210877 - RNA, 20 nt, Human
aguccgaccuggccugucug

SEQ ID NO: 3210878 - RNA, 13 nt, Human
agucccuuuaaag

SEQ ID NO: 3210879 - RNA, 17 nt, Human
agucucacuguugccca

SEQ ID NO: 3210880 - RNA, 16 nt, Human
agucucacuguugccc

SEQ ID NO: 3210881 - RNA, 21 nt, Human
agucuagcguagugcagcagg

SEQ ID NO: 3210882 - RNA, 16 nt, Human
agucucaaugaaauag

SEQ ID NO: 3210883 - RNA, 22 nt, Human
agucucaccauuuccccagggc

SEQ ID NO: 3210884 - RNA, 21 nt, Human
agucucaccauuuccccaggg

SEQ ID NO: 3210885 - RNA, 20 nt, Human
agucucaccauuuccccagg

SEQ ID NO: 3210886 - RNA, 23 nt, Human
agucuagcguagugcagcagggc

SEQ ID NO: 3210887 - RNA, 22 nt, Human
agucagaaguuucugccgcagc

SEQ ID NO: 3210888 - RNA, 16 nt, Human
agucagacagaugugg

SEQ ID NO: 3210889 - RNA, 23 nt, Human
ugucggcuccaguccccagaacu

SEQ ID NO: 3210890 - RNA, 12 nt, Human
ugucggcuccag

SEQ ID NO: 3210891 - RNA, 19 nt, Human
ugucggcuccaguccccag

SEQ ID NO: 3210892 - RNA, 17 nt, Human
ugucggcuccagucccc

SEQ ID NO: 3210893 - RNA, 17 nt, Human
ugucguuaaaaacagau

SEQ ID NO: 3210894 - RNA, 22 nt, Human
ugucguaguuacucucaggcau

SEQ ID NO: 3210895 - RNA, 14 nt, Human
ugucgggcaugaca

SEQ ID NO: 3210896 - RNA, 15 nt, Human
ugucgggcaugacac

SEQ ID NO: 3210897 - RNA, 12 nt, Human
ugucgggcauga

SEQ ID NO: 3210898 - RNA, 15 nt, Human
ugucgcccagucugg

SEQ ID NO: 3210899 - RNA, 14 nt, Human
ugucgcccagucug

SEQ ID NO: 3210900 - RNA, 17 nt, Human
ugucccuuuuccuuuuu

SEQ ID NO: 3210901 - RNA, 13 nt, Human
ugucauuuucauu

SEQ ID NO: 3210902 - RNA, 12 nt, Human
ugucauuuucau

SEQ ID NO: 3210903 - RNA, 20 nt, Human
ugucauuuucauuagcaaaa

SEQ ID NO: 3210904 - RNA, 19 nt, Human
ugucauuuucauuagcaaa

SEQ ID NO: 3210905 - RNA, 14 nt, Human
ugucauuuucauua

SEQ ID NO: 3210906 - RNA, 13 nt, Human
uguccgagcuuug

SEQ ID NO: 3210907 - RNA, 14 nt, Human
uguccgagcuuuga

SEQ ID NO: 3210908 - RNA, 16 nt, Human
uguccguaguaucaga

SEQ ID NO: 3210909 - RNA, 15 nt, Human
uguccgauuuuucca

SEQ ID NO: 3210910 - RNA, 14 nt, Human
uguccuacacuuga

SEQ ID NO: 3210911 - RNA, 15 nt, Human
uguccuaauggugau

SEQ ID NO: 3210912 - RNA, 18 nt, Human
uguccuaauggugaugca

SEQ ID NO: 3210913 - RNA, 15 nt, Human
ugucgcccaggcugg

SEQ ID NO: 3210914 - RNA, 16 nt, Human
ugucgcccaggcugga

SEQ ID NO: 3210915 - RNA, 21 nt, Human
uguaauuuaaaauugugaugu

SEQ ID NO: 3210916 - RNA, 22 nt, Human
uguaauuuaaaauugugaugug

SEQ ID NO: 3210917 - RNA, 19 nt, Human
uguaauuuaaggucuguuu

SEQ ID NO: 3210918 - RNA, 13 nt, Human
uguaccaaaauuu

SEQ ID NO: 3210919 - RNA, 15 nt, Human
uguaccaaaauuuua

SEQ ID NO: 3210920 - RNA, 17 nt, Human
uguaccaaaauuuuaaa

SEQ ID NO: 3210921 - RNA, 18 nt, Human
uguagaggagaaacugga

SEQ ID NO: 3210922 - RNA, 16 nt, Human
uguagaggagaaacug

SEQ ID NO: 3210923 - RNA, 13 nt, Human
uguagagugggag

SEQ ID NO: 3210924 - RNA, 21 nt, Human
aguaagcggcucaagcccagg

SEQ ID NO: 3210925 - RNA, 19 nt, Human
aguaagggaagcagaagga

SEQ ID NO: 3210926 - RNA, 19 nt, Human
aguaaggugcuuggaguuu

SEQ ID NO: 3210927 - RNA, 21 nt, Human
aguaagggaacaaguugagcu

SEQ ID NO: 3210928 - RNA, 15 nt, Human
aguaagggaagcaga

SEQ ID NO: 3210929 - RNA, 18 nt, Human
aguaaggaaugauauugc

SEQ ID NO: 3210930 - RNA, 22 nt, Human
aguaagcggcucaagcccagga

SEQ ID NO: 3210931 - RNA, 15 nt, Human
aguaaaaccacagca

SEQ ID NO: 3210932 - RNA, 20 nt, Human
aguaagccgugauuuucauu

SEQ ID NO: 3210933 - RNA, 15 nt, Human
aguaaaaauaaaauu

SEQ ID NO: 3210934 - RNA, 12 nt, Human
aguaaaaauaaa

SEQ ID NO: 3210935 - RNA, 17 nt, Human
aguaaaaauaaaauacu

SEQ ID NO: 3210936 - RNA, 11 nt, Human
agguuuuccug

SEQ ID NO: 3210937 - RNA, 14 nt, Human
agguuuucuccccc

SEQ ID NO: 3210938 - RNA, 21 nt, Human
agguuuugcacucuuguuucu

SEQ ID NO: 3210939 - RNA, 12 nt, Human
aguagagacagg

SEQ ID NO: 3210940 - RNA, 14 nt, Human
aguagaacuuugua

SEQ ID NO: 3210941 - RNA, 15 nt, Human
aguagaacuuuguau

SEQ ID NO: 3210942 - RNA, 16 nt, Human
aguagaacuuuguaua

SEQ ID NO: 3210943 - RNA, 18 nt, Human
aguagaacuuuguauagu

SEQ ID NO: 3210944 - RNA, 19 nt, Human
aguagaacuuuguauaguu

SEQ ID NO: 3210945 - RNA, 21 nt, Human
aguagaacuuuguauaguuau

SEQ ID NO: 3210946 - RNA, 22 nt, Human
aguagagguauaauugugugau

SEQ ID NO: 3210947 - RNA, 20 nt, Human
aguagagguauaauugugug

SEQ ID NO: 3210948 - RNA, 18 nt, Human
aguagagguauaauugug

SEQ ID NO: 3210949 - RNA, 17 nt, Human
aguagagguauaauugu

SEQ ID NO: 3210950 - RNA, 15 nt, Human
aguagaucuauauua

SEQ ID NO: 3210951 - RNA, 23 nt, Human
aguagaucuauauuagaucaaau

SEQ ID NO: 3210952 - RNA, 18 nt, Human
uguaggaagguuaauguu

SEQ ID NO: 3210953 - RNA, 20 nt, Human
uguaggaagguuaauguuca

SEQ ID NO: 3210954 - RNA, 17 nt, Human
aguacacugccugccuu

SEQ ID NO: 3210955 - RNA, 19 nt, Human
aguacacugccugccuuaa

SEQ ID NO: 3210956 - RNA, 12 nt, Human
aguacacugccu

SEQ ID NO: 3210957 - RNA, 13 nt, Human
aguacacugagag

SEQ ID NO: 3210958 - RNA, 21 nt, Human
aguacacugaauuuuuaugug

SEQ ID NO: 3210959 - RNA, 22 nt, Human
aguaauauuuauuaaauuuuuu

SEQ ID NO: 3210960 - RNA, 20 nt, Human
aguaaucagauuacugcuuu

SEQ ID NO: 3210961 - RNA, 22 nt, Human
aguaaucagauuacugcuuuaa

SEQ ID NO: 3210962 - RNA, 15 nt, Human
aguaauauuuauuaa

SEQ ID NO: 3210963 - RNA, 19 nt, Human
aguaauauuuauuaaauuu

SEQ ID NO: 3210964 - RNA, 13 nt, Human
aguaauauuuauu

SEQ ID NO: 3210965 - RNA, 12 nt, Human
aguaauuucagu

SEQ ID NO: 3210966 - RNA, 13 nt, Human
aguaauuucagug

SEQ ID NO: 3210967 - RNA, 14 nt, Human
aguaauuucagugu

SEQ ID NO: 3210968 - RNA, 19 nt, Human
aguaauuucaguguaaagu

SEQ ID NO: 3210969 - RNA, 22 nt, Human
aguaauuucaguguaaagugug

SEQ ID NO: 3210970 - RNA, 19 nt, Human
aguacaaugugacuuugaa

SEQ ID NO: 3210971 - RNA, 18 nt, Human
aguacaaugugacuuuga

SEQ ID NO: 3210972 - RNA, 22 nt, Human
aguacaaugugacuuugaaaau

SEQ ID NO: 3210973 - RNA, 17 nt, Human
agguccccagcuuuggc

SEQ ID NO: 3210974 - RNA, 11 nt, Human
agguccccaga

SEQ ID NO: 3210975 - RNA, 18 nt, Human
agguccccagcuuuggcu

SEQ ID NO: 3210976 - RNA, 22 nt, Human
aggucuugaacuccuggccuca

SEQ ID NO: 3210977 - RNA, 23 nt, Human
aggucuugaacuccuggccucaa

SEQ ID NO: 3210978 - RNA, 13 nt, Human
aggucuuggugcc

SEQ ID NO: 3210979 - RNA, 18 nt, Human
aggucuuggugccucugc

SEQ ID NO: 3210980 - RNA, 23 nt, Human
aggucuugcucuccuagguagcc

SEQ ID NO: 3210981 - RNA, 15 nt, Human
aggucuugcucuccu

SEQ ID NO: 3210982 - RNA, 15 nt, Human
aggugcacaagcucc

SEQ ID NO: 3210983 - RNA, 16 nt, Human
uguaaaucuaacauua

SEQ ID NO: 3210984 - RNA, 19 nt, Human
uguaaaucuaacauuauua

SEQ ID NO: 3210985 - RNA, 16 nt, Human
aggugcacaagcucca

SEQ ID NO: 3210986 - RNA, 17 nt, Human
aggugcacaagcuccaa

SEQ ID NO: 3210987 - RNA, 18 nt, Human
aggugcacaagcuccaag

SEQ ID NO: 3210988 - RNA, 20 nt, Human
aggugcacaagcuccaagcu

SEQ ID NO: 3210989 - RNA, 18 nt, Human
aggugggauccuccaggu

SEQ ID NO: 3210990 - RNA, 20 nt, Human
aggugggauccuccaggugc

SEQ ID NO: 3210991 - RNA, 21 nt, Human
aggugcacaagcuccaagcuc

SEQ ID NO: 3210992 - RNA, 23 nt, Human
aggugcacuuggggcacagggag

SEQ ID NO: 3210993 - RNA, 22 nt, Human
aggugcacuuggggcacaggga

SEQ ID NO: 3210994 - RNA, 20 nt, Human
aggugcacuuggggcacagg

SEQ ID NO: 3210995 - RNA, 14 nt, Human
agguggccacucca

SEQ ID NO: 3210996 - RNA, 17 nt, Human
agguggccacuccagac

SEQ ID NO: 3210997 - RNA, 15 nt, Human
aggugcaggcaggcu

SEQ ID NO: 3210998 - RNA, 13 nt, Human
aggugcaggcagg

SEQ ID NO: 3210999 - RNA, 23 nt, Human
agguugggagaaugucaguaugu

SEQ ID NO: 3211000 - RNA, 17 nt, Human
aggugguuauggagagg

SEQ ID NO: 3211001 - RNA, 21 nt, Human
agguggugggcauucucucuc

SEQ ID NO: 3211002 - RNA, 19 nt, Human
agguggugggcauucucuc

SEQ ID NO: 3211003 - RNA, 18 nt, Human
agguggugggcauucucu

SEQ ID NO: 3211004 - RNA, 15 nt, Human
agguugacaggaggu

SEQ ID NO: 3211005 - RNA, 14 nt, Human
agguuguagcaugg

SEQ ID NO: 3211006 - RNA, 14 nt, Human
agguuggugggggc

SEQ ID NO: 3211007 - RNA, 22 nt, Human
agguugggugcugcuaauucuu

SEQ ID NO: 3211008 - RNA, 18 nt, Human
agguugggugcugcuaau

SEQ ID NO: 3211009 - RNA, 23 nt, Human
uguaagagagaugagcacuucua

SEQ ID NO: 3211010 - RNA, 21 nt, Human
uguaacuuugguuaaaaucuc

SEQ ID NO: 3211011 - RNA, 17 nt, Human
uguaauuuaaaauugug

SEQ ID NO: 3211012 - RNA, 23 nt, Human
uguaauuguuguuuguauguaua

SEQ ID NO: 3211013 - RNA, 20 nt, Human
uguaauuguuguuuguaugu

SEQ ID NO: 3211014 - RNA, 18 nt, Human
uguaauuuaaaauuguga

SEQ ID NO: 3211015 - RNA, 20 nt, Human
uguaauuuaaaauugugaug

SEQ ID NO: 3211016 - RNA, 19 nt, Human
uguaauuguuguuuguaug

SEQ ID NO: 3211017 - RNA, 17 nt, Human
uguaauuguuguuugua

SEQ ID NO: 3211018 - RNA, 16 nt, Human
uguaauuguuguuugu

SEQ ID NO: 3211019 - RNA, 14 nt, Human
uguaauuauuugaa

SEQ ID NO: 3211020 - RNA, 13 nt, Human
uguaauuauuuga

SEQ ID NO: 3211021 - RNA, 23 nt, Human
uguaauuaaguacuauguaucaa

SEQ ID NO: 3211022 - RNA, 21 nt, Human
uguaagcguauggcuuuauuu

SEQ ID NO: 3211023 - RNA, 19 nt, Human
uguaagguauaucauucua

SEQ ID NO: 3211024 - RNA, 17 nt, Human
uguaagcguauggcuuu

SEQ ID NO: 3211025 - RNA, 22 nt, Human
uguaagauauuugcaguuuuuc

SEQ ID NO: 3211026 - RNA, 15 nt, Human
uguaagaguguuuau

SEQ ID NO: 3211027 - RNA, 16 nt, Human
uguguguguguaugug

SEQ ID NO: 3211028 - RNA, 13 nt, Human
uguguguguguau

SEQ ID NO: 3211029 - RNA, 11 nt, Human
uguguguuccu

SEQ ID NO: 3211030 - RNA, 12 nt, Human
uguguguuccug

SEQ ID NO: 3211031 - RNA, 13 nt, Human
uguguguuccugg

SEQ ID NO: 3211032 - RNA, 14 nt, Human
uguguguuccuggc

SEQ ID NO: 3211033 - RNA, 14 nt, Human
uguguguuacaaug

SEQ ID NO: 3211034 - RNA, 14 nt, Human
uguguuauuauaga

SEQ ID NO: 3211035 - RNA, 14 nt, Human
uguguuaugaagca

SEQ ID NO: 3211036 - RNA, 16 nt, Human
uguguuccaaccacug

SEQ ID NO: 3211037 - RNA, 15 nt, Human
uguguuccaaccacu

SEQ ID NO: 3211038 - RNA, 20 nt, Human
uguguuccaaacaugagguu

SEQ ID NO: 3211039 - RNA, 20 nt, Human
uguguucacuaaacucugaa

SEQ ID NO: 3211040 - RNA, 19 nt, Human
uguguucacuaaacucuga

SEQ ID NO: 3211041 - RNA, 19 nt, Human
ugugucagguggggcagcu

SEQ ID NO: 3211042 - RNA, 17 nt, Human
ugugucagguggggcag

SEQ ID NO: 3211043 - RNA, 13 nt, Human
ugugucucuuggu

SEQ ID NO: 3211044 - RNA, 11 nt, Human
ugugugugugc

SEQ ID NO: 3211045 - RNA, 14 nt, Human
uguuaacaaugccu

SEQ ID NO: 3211046 - RNA, 19 nt, Human
uguuaacaaugccuauugu

SEQ ID NO: 3211047 - RNA, 23 nt, Human
uguuaacaaugccuauuguaaua

SEQ ID NO: 3211048 - RNA, 18 nt, Human
uguguugccacuuuccaa

SEQ ID NO: 3211049 - RNA, 17 nt, Human
uguguugcuuauguugu

SEQ ID NO: 3211050 - RNA, 15 nt, Human
uguguugcuuauguu

SEQ ID NO: 3211051 - RNA, 21 nt, Human
uguuaacauggacaugaucuu

SEQ ID NO: 3211052 - RNA, 19 nt, Human
uguuaaccucugcuuuuau

SEQ ID NO: 3211053 - RNA, 19 nt, Human
uguuaaugauagcuacugu

SEQ ID NO: 3211054 - RNA, 17 nt, Human
uguuaaucuuaauguau

SEQ ID NO: 3211055 - RNA, 19 nt, Human
uguuaaucuuaauguauau

SEQ ID NO: 3211056 - RNA, 22 nt, Human
uguuaaucuuaauguauaucgu

SEQ ID NO: 3211057 - RNA, 18 nt, Human
aguggaaaaauagccugc

SEQ ID NO: 3211058 - RNA, 19 nt, Human
aguggaaaaauagccugcc

SEQ ID NO: 3211059 - RNA, 11 nt, Human
aguggaaaaau

SEQ ID NO: 3211060 - RNA, 13 nt, Human
uguggucuccacu

SEQ ID NO: 3211061 - RNA, 20 nt, Human
ugugguguuuccuggcacug

SEQ ID NO: 3211062 - RNA, 19 nt, Human
ugugucagcauagaaguaa

SEQ ID NO: 3211063 - RNA, 16 nt, Human
uguggucccaccccac

SEQ ID NO: 3211064 - RNA, 16 nt, Human
agugcuuccaaggaug

SEQ ID NO: 3211065 - RNA, 21 nt, Human
agugccuguaaucacagcuac

SEQ ID NO: 3211066 - RNA, 15 nt, Human
agugccuuacacaau

SEQ ID NO: 3211067 - RNA, 19 nt, Human
agugccuaaaauaagaaua

SEQ ID NO: 3211068 - RNA, 16 nt, Human
agugccgcucuugggg

SEQ ID NO: 3211069 - RNA, 18 nt, Human
agugccgcucuuggggac

SEQ ID NO: 3211070 - RNA, 14 nt, Human
agugccuaaaauaa

SEQ ID NO: 3211071 - RNA, 16 nt, Human
agugccgcaucucaca

SEQ ID NO: 3211072 - RNA, 18 nt, Human
agugccgcaucucacagc

SEQ ID NO: 3211073 - RNA, 19 nt, Human
agugccgcaucucacagcu

SEQ ID NO: 3211074 - RNA, 23 nt, Human
agugccgcaucucacagcuaugc

SEQ ID NO: 3211075 - RNA, 15 nt, Human
agugcugcuuugcca

SEQ ID NO: 3211076 - RNA, 18 nt, Human
agugcugcuuugccaaau

SEQ ID NO: 3211077 - RNA, 20 nt, Human
agugcugggauuacaagcgu

SEQ ID NO: 3211078 - RNA, 19 nt, Human
agugcugggauuacaggug

SEQ ID NO: 3211079 - RNA, 20 nt, Human
agugcugggauuacaggcgu

SEQ ID NO: 3211080 - RNA, 20 nt, Human
agugcugggauuacaggcau

SEQ ID NO: 3211081 - RNA, 15 nt, Human
agugcuuagcaaaaa

SEQ ID NO: 3211082 - RNA, 23 nt, Human
uguggagacugcuccugagcccc

SEQ ID NO: 3211083 - RNA, 22 nt, Human
uguggagacugcuccugagccc

SEQ ID NO: 3211084 - RNA, 18 nt, Human
ugugcucuggacaggcau

SEQ ID NO: 3211085 - RNA, 16 nt, Human
ugugcucuggacaggc

SEQ ID NO: 3211086 - RNA, 12 nt, Human
ugugcugcccug

SEQ ID NO: 3211087 - RNA, 20 nt, Human
ugugccucuagcugaauuga

SEQ ID NO: 3211088 - RNA, 18 nt, Human
ugugccucuagcugaauu

SEQ ID NO: 3211089 - RNA, 13 nt, Human
ugugcugcccugc

SEQ ID NO: 3211090 - RNA, 14 nt, Human
ugugcugcccugcc

SEQ ID NO: 3211091 - RNA, 21 nt, Human
uguggagaagcggcuggcagc

SEQ ID NO: 3211092 - RNA, 13 nt, Human
uguggagacugcu

SEQ ID NO: 3211093 - RNA, 18 nt, Human
uguggagacugcuccuga

SEQ ID NO: 3211094 - RNA, 15 nt, Human
uguggagacugcucc

SEQ ID NO: 3211095 - RNA, 15 nt, Human
ugugcugcccugccc

SEQ ID NO: 3211096 - RNA, 19 nt, Human
agucucacuguugcccagg

SEQ ID NO: 3211097 - RNA, 18 nt, Human
agucucacuguugcccag

SEQ ID NO: 3211098 - RNA, 20 nt, Human
agucucacuguugcccaggc

SEQ ID NO: 3211099 - RNA, 23 nt, Human
agucucaccauuuccccagggca

SEQ ID NO: 3211100 - RNA, 15 nt, Human
ugugcucuggacagg

SEQ ID NO: 3211101 - RNA, 23 nt, Human
ugugcucugaucauccacugugc

SEQ ID NO: 3211102 - RNA, 12 nt, Human
ugugcucugauc

SEQ ID NO: 3211103 - RNA, 22 nt, Human
ugugcucugaucauccacugug

SEQ ID NO: 3211104 - RNA, 16 nt, Human
ugugccucuagcugaa

SEQ ID NO: 3211105 - RNA, 15 nt, Human
ugugccucuagcuga

SEQ ID NO: 3211106 - RNA, 14 nt, Human
ugugccucuagcug

SEQ ID NO: 3211107 - RNA, 12 nt, Human
ugugccucugcc

SEQ ID NO: 3211108 - RNA, 21 nt, Human
agugcaauauauuuuguaugc

SEQ ID NO: 3211109 - RNA, 16 nt, Human
agugcaauauauuuug

SEQ ID NO: 3211110 - RNA, 15 nt, Human
agugcaauauauuuu

SEQ ID NO: 3211111 - RNA, 14 nt, Human
agugcaauauauuu

SEQ ID NO: 3211112 - RNA, 24 nt, Human
agugauucuccugccucagccucc

SEQ ID NO: 3211113 - RNA, 22 nt, Human
agugauucuccugccucagccu

SEQ ID NO: 3211114 - RNA, 16 nt, Human
agugagucgaggacag

SEQ ID NO: 3211115 - RNA, 16 nt, Human
agugccaaaaacaaca

SEQ ID NO: 3211116 - RNA, 14 nt, Human
agugccaaaaacaa

SEQ ID NO: 3211117 - RNA, 14 nt, Human
agugcccacaggau

SEQ ID NO: 3211118 - RNA, 13 nt, Human
agugcccaggugg

SEQ ID NO: 3211119 - RNA, 14 nt, Human
agugcaucucagcc

SEQ ID NO: 3211120 - RNA, 15 nt, Human
agugcaucucagccc

SEQ ID NO: 3211121 - RNA, 17 nt, Human
agugcaucucagcccac

SEQ ID NO: 3211122 - RNA, 16 nt, Human
agugcaucucagccca

SEQ ID NO: 3211123 - RNA, 19 nt, Human
agugcaggcccacccugcu

SEQ ID NO: 3211124 - RNA, 18 nt, Human
agugcaggcccacccugc

SEQ ID NO: 3211125 - RNA, 17 nt, Human
agugcaggcccacccug

SEQ ID NO: 3211126 - RNA, 15 nt, Human
agugcaggcccaccc

SEQ ID NO: 3211127 - RNA, 13 nt, Human
agugcaggcccac

SEQ ID NO: 3211128 - RNA, 12 nt, Human
agugcaggccca

SEQ ID NO: 3211129 - RNA, 20 nt, Human
agugcaccugggacagggag

SEQ ID NO: 3211130 - RNA, 17 nt, Human
agugcagcugaaauuga

SEQ ID NO: 3211131 - RNA, 16 nt, Human
agugcagcugaaauug

SEQ ID NO: 3211132 - RNA, 22 nt, Human
uguuuagcuacguuuacucaca

SEQ ID NO: 3211133 - RNA, 20 nt, Human
uguuuagauuuuguguuuau

SEQ ID NO: 3211134 - RNA, 20 nt, Human
uguuuaucuagauguaaauu

SEQ ID NO: 3211135 - RNA, 18 nt, Human
uguuuaucuagauguaaa

SEQ ID NO: 3211136 - RNA, 17 nt, Human
uguuuaucuagauguaa

SEQ ID NO: 3211137 - RNA, 16 nt, Human
uguuuaucuagaugua

SEQ ID NO: 3211138 - RNA, 20 nt, Human
uguuuaucccuuaagaauga

SEQ ID NO: 3211139 - RNA, 17 nt, Human
uguuuaucccuuaagaa

SEQ ID NO: 3211140 - RNA, 16 nt, Human
uguuuauucaaacuga

SEQ ID NO: 3211141 - RNA, 13 nt, Human
uguuuauucaaac

SEQ ID NO: 3211142 - RNA, 11 nt, Human
uguuuauguaa

SEQ ID NO: 3211143 - RNA, 20 nt, Human
uguuuauguaaacaaaucuu

SEQ ID NO: 3211144 - RNA, 15 nt, Human
uguuuauguaaacaa

SEQ ID NO: 3211145 - RNA, 22 nt, Human
uguuuaucuagauguaaauuuu

SEQ ID NO: 3211146 - RNA, 14 nt, Human
uguuuauugucaaa

SEQ ID NO: 3211147 - RNA, 21 nt, Human
uguuuauucuugaugaaaagc

SEQ ID NO: 3211148 - RNA, 14 nt, Human
uguuuauucuugau

SEQ ID NO: 3211149 - RNA, 13 nt, Human
uguuuauucuuga

SEQ ID NO: 3211150 - RNA, 21 nt, Human
uguuuauucaaacugaaaagc

SEQ ID NO: 3211151 - RNA, 18 nt, Human
uguuuauucaaacugaaa

SEQ ID NO: 3211152 - RNA, 20 nt, Human
uguugugaauaauuacagug

SEQ ID NO: 3211153 - RNA, 19 nt, Human
uguugugaauaauuacagu

SEQ ID NO: 3211154 - RNA, 17 nt, Human
uguugugaauaauuaca

SEQ ID NO: 3211155 - RNA, 15 nt, Human
uguugugaauaauua

SEQ ID NO: 3211156 - RNA, 16 nt, Human
uguuggggcucuuccu

SEQ ID NO: 3211157 - RNA, 13 nt, Human
uguugucucuucu

SEQ ID NO: 3211158 - RNA, 17 nt, Human
uguugucucuucuccuu

SEQ ID NO: 3211159 - RNA, 15 nt, Human
uguugucucuucucc

SEQ ID NO: 3211160 - RNA, 14 nt, Human
uguuguguguggga

SEQ ID NO: 3211161 - RNA, 15 nt, Human
uguugugugugggag

SEQ ID NO: 3211162 - RNA, 15 nt, Human
uguugugcuuucaag

SEQ ID NO: 3211163 - RNA, 14 nt, Human
uguugugugccucu

SEQ ID NO: 3211164 - RNA, 16 nt, Human
uguugugugugggagu

SEQ ID NO: 3211165 - RNA, 21 nt, Human
uguugugugccucuagcugaa

SEQ ID NO: 3211166 - RNA, 15 nt, Human
uguugugugccucua

SEQ ID NO: 3211167 - RNA, 12 nt, Human
uguuuagauuug

SEQ ID NO: 3211168 - RNA, 17 nt, Human
uguuuagauuugccaua

SEQ ID NO: 3211169 - RNA, 17 nt, Human
uguuuagauuuuguguu

SEQ ID NO: 3211170 - RNA, 15 nt, Human
uguuuagauuuugug

SEQ ID NO: 3211171 - RNA, 17 nt, Human
aguuccuagccaccgcc

SEQ ID NO: 3211172 - RNA, 24 nt, Human
aguuccccuggaagcagugcccag

SEQ ID NO: 3211173 - RNA, 23 nt, Human
aguuccccuggaagcagugccca

SEQ ID NO: 3211174 - RNA, 22 nt, Human
aguuccccuggaagcagugccc

SEQ ID NO: 3211175 - RNA, 23 nt, Human
aguuccucauuagcauuuugcua

SEQ ID NO: 3211176 - RNA, 16 nt, Human
aguucccauucuuuca

SEQ ID NO: 3211177 - RNA, 16 nt, Human
aguuccccaaauacaa

SEQ ID NO: 3211178 - RNA, 20 nt, Human
aguucccaucuccuuucucu

SEQ ID NO: 3211179 - RNA, 14 nt, Human
aguucccaagaaag

SEQ ID NO: 3211180 - RNA, 23 nt, Human
aguucccaagaaaggaaaccuuu

SEQ ID NO: 3211181 - RNA, 16 nt, Human
aguucaauucucauuu

SEQ ID NO: 3211182 - RNA, 14 nt, Human
aguuauauuuccua

SEQ ID NO: 3211183 - RNA, 15 nt, Human
aguuaucaugaauuu

SEQ ID NO: 3211184 - RNA, 16 nt, Human
aguuaucaugaauuuu

SEQ ID NO: 3211185 - RNA, 18 nt, Human
aguuaucaugaauuuuaa

SEQ ID NO: 3211186 - RNA, 20 nt, Human
aguuaucaugaauuuuaaag

SEQ ID NO: 3211187 - RNA, 22 nt, Human
aguuaucaugaauuuuaaagua

SEQ ID NO: 3211188 - RNA, 15 nt, Human
aguucaagaucaaaa

SEQ ID NO: 3211189 - RNA, 20 nt, Human
aguucaagaucaaaaaggcu

SEQ ID NO: 3211190 - RNA, 18 nt, Human
aguucaagaaaugaagag

SEQ ID NO: 3211191 - RNA, 15 nt, Human
aguucaagaaaugaa

SEQ ID NO: 3211192 - RNA, 17 nt, Human
aguucaagaaaugaaga

SEQ ID NO: 3211193 - RNA, 13 nt, Human
aguucuacagaaa

SEQ ID NO: 3211194 - RNA, 14 nt, Human
aguuccucuuuugu

SEQ ID NO: 3211195 - RNA, 22 nt, Human
aguuccucuuuugugcugcuuc

SEQ ID NO: 3211196 - RNA, 20 nt, Human
aguuccuauaacacugugaa

SEQ ID NO: 3211197 - RNA, 23 nt, Human
aguucuagugcagcugaaauuga

SEQ ID NO: 3211198 - RNA, 22 nt, Human
aguucuagugcagcugaaauug

SEQ ID NO: 3211199 - RNA, 18 nt, Human
aguucuagugcagcugaa

SEQ ID NO: 3211200 - RNA, 14 nt, Human
aguucuaccggcuu

SEQ ID NO: 3211201 - RNA, 23 nt, Human
aguucuacuucauguaauccaaa

SEQ ID NO: 3211202 - RNA, 16 nt, Human
agugugggucugugug

SEQ ID NO: 3211203 - RNA, 17 nt, Human
agugugggucugugugu

SEQ ID NO: 3211204 - RNA, 15 nt, Human
agugugggucugugu

SEQ ID NO: 3211205 - RNA, 20 nt, Human
aguggagccugacagccaga

SEQ ID NO: 3211206 - RNA, 17 nt, Human
aguggagguuuauaguu

SEQ ID NO: 3211207 - RNA, 19 nt, Human
aguggagccugacagccag

SEQ ID NO: 3211208 - RNA, 21 nt, Human
aguggacuguucccugaggug

SEQ ID NO: 3211209 - RNA, 21 nt, Human
aguggaaaauaggcuuuuuaa

SEQ ID NO: 3211210 - RNA, 23 nt, Human
aguggaaaauaggcuuuuuaauc

SEQ ID NO: 3211211 - RNA, 20 nt, Human
aguggaaacuauguguuuuu

SEQ ID NO: 3211212 - RNA, 19 nt, Human
agugugggucugugugugu

SEQ ID NO: 3211213 - RNA, 23 nt, Human
agugugggucuguguguguguau

SEQ ID NO: 3211214 - RNA, 13 nt, Human
uguuauaugaaca

SEQ ID NO: 3211215 - RNA, 14 nt, Human
uguuauaugaacau

SEQ ID NO: 3211216 - RNA, 12 nt, Human
uguuauaugaac

SEQ ID NO: 3211217 - RNA, 18 nt, Human
uguuaucauuuuuuccug

SEQ ID NO: 3211218 - RNA, 13 nt, Human
uguuaucauuuuu

SEQ ID NO: 3211219 - RNA, 15 nt, Human
uguuauaugaacaua

SEQ ID NO: 3211220 - RNA, 14 nt, Human
uguuauauuuuucu

SEQ ID NO: 3211221 - RNA, 18 nt, Human
uguuauauuuuucuuaaa

SEQ ID NO: 3211222 - RNA, 16 nt, Human
uguuauauuuuucuua

SEQ ID NO: 3211223 - RNA, 13 nt, Human
uguuauuaaaugu

SEQ ID NO: 3211224 - RNA, 14 nt, Human
uguuauuaaaugua

SEQ ID NO: 3211225 - RNA, 22 nt, Human
uguuauuauagagcagaaauuc

SEQ ID NO: 3211226 - RNA, 21 nt, Human
uguuauuauagagcagaaauu

SEQ ID NO: 3211227 - RNA, 20 nt, Human
uguuauuauagagcagaaau

SEQ ID NO: 3211228 - RNA, 16 nt, Human
uguuauucaacagcaa

SEQ ID NO: 3211229 - RNA, 13 nt, Human
uguuauucuuugc

SEQ ID NO: 3211230 - RNA, 16 nt, Human
uguuauucuuugcacu

SEQ ID NO: 3211231 - RNA, 14 nt, Human
uguuauucuuugca

SEQ ID NO: 3211232 - RNA, 20 nt, Human
uguuauugagagagaugugu

SEQ ID NO: 3211233 - RNA, 18 nt, Human
uguucuagcauggcugcc

SEQ ID NO: 3211234 - RNA, 15 nt, Human
uguucuaauggauua

SEQ ID NO: 3211235 - RNA, 18 nt, Human
uguucuuaguuugcaguu

SEQ ID NO: 3211236 - RNA, 10 nt, Human
uguucuucca

SEQ ID NO: 3211237 - RNA, 16 nt, Human
uguucuuccaaagcag

SEQ ID NO: 3211238 - RNA, 11 nt, Human
uguucuuccaa

SEQ ID NO: 3211239 - RNA, 12 nt, Human
uguucuuccugg

SEQ ID NO: 3211240 - RNA, 13 nt, Human
uguucuuccaguu

SEQ ID NO: 3211241 - RNA, 11 nt, Human
uguucuuccag

SEQ ID NO: 3211242 - RNA, 20 nt, Human
uguucuuccaaagcagagag

SEQ ID NO: 3211243 - RNA, 17 nt, Human
uguucuuccaaagcaga

SEQ ID NO: 3211244 - RNA, 22 nt, Human
uguucuuccaguuacuuuccaa

SEQ ID NO: 3211245 - RNA, 21 nt, Human
uguucuuccaguuacuuucca

SEQ ID NO: 3211246 - RNA, 20 nt, Human
uguugcccaggcuggagugc

SEQ ID NO: 3211247 - RNA, 19 nt, Human
uguugcccaggcuggagug

SEQ ID NO: 3211248 - RNA, 22 nt, Human
aguguuacuacagccuuaauau

SEQ ID NO: 3211249 - RNA, 14 nt, Human
aguguuaugagcca

SEQ ID NO: 3211250 - RNA, 14 nt, Human
aguguuauaugaac

SEQ ID NO: 3211251 - RNA, 15 nt, Human
aguguuauaugaaca

SEQ ID NO: 3211252 - RNA, 16 nt, Human
aguguuauaugaacau

SEQ ID NO: 3211253 - RNA, 20 nt, Human
aguguuauaugaacauacaa

SEQ ID NO: 3211254 - RNA, 13 nt, Human
aguguuauaugaa

SEQ ID NO: 3211255 - RNA, 18 nt, Human
uguucuuguuuuuaaguu

SEQ ID NO: 3211256 - RNA, 14 nt, Human
uguucuuguuuuua

SEQ ID NO: 3211257 - RNA, 13 nt, Human
uguugcccaggcu

SEQ ID NO: 3211258 - RNA, 15 nt, Human
uguugcccaggcugg

SEQ ID NO: 3211259 - RNA, 16 nt, Human
aguuacuguaaaaugc

SEQ ID NO: 3211260 - RNA, 21 nt, Human
aguuacuguccuguugauuaa

SEQ ID NO: 3211261 - RNA, 15 nt, Human
aguuacuguaaaaug

SEQ ID NO: 3211262 - RNA, 23 nt, Human
aguuacuuuuccuugcauacaaa

SEQ ID NO: 3211263 - RNA, 21 nt, Human
aguuacuuuuccuugcauaca

SEQ ID NO: 3211264 - RNA, 21 nt, Human
aguuacuuuccaauucuccuu

SEQ ID NO: 3211265 - RNA, 13 nt, Human
aguuacuugauaa

SEQ ID NO: 3211266 - RNA, 23 nt, Human
aguuacuuuccaauucuccuuua

SEQ ID NO: 3211267 - RNA, 22 nt, Human
aguuacuuuccaauucuccuuu

SEQ ID NO: 3211268 - RNA, 20 nt, Human
aguuacuuuuccuugcauac

SEQ ID NO: 3211269 - RNA, 18 nt, Human
aguuacuuuuccuugcau

SEQ ID NO: 3211270 - RNA, 17 nt, Human
aguuacuuuuccuugca

SEQ ID NO: 3211271 - RNA, 14 nt, Human
aguuacuuuuccuu

SEQ ID NO: 3211272 - RNA, 17 nt, Human
aguguuggaaaaaauuu

SEQ ID NO: 3211273 - RNA, 21 nt, Human
aguuacucuucaguuaagccu

SEQ ID NO: 3211274 - RNA, 15 nt, Human
aguguucagaaaaaa

SEQ ID NO: 3211275 - RNA, 20 nt, Human
aguguuauugagagagaugu

SEQ ID NO: 3211276 - RNA, 16 nt, Human
uuagccuuugucccag

SEQ ID NO: 3211277 - RNA, 15 nt, Human
uuagcgacaacagau

SEQ ID NO: 3211278 - RNA, 18 nt, Human
uuagccaagugugguaga

SEQ ID NO: 3211279 - RNA, 11 nt, Human
uuagcacagcg

SEQ ID NO: 3211280 - RNA, 17 nt, Human
uuagcaucuaauuucaa

SEQ ID NO: 3211281 - RNA, 16 nt, Human
uuagauuuuguguuua

SEQ ID NO: 3211282 - RNA, 21 nt, Human
auaauugugugauauuucaga

SEQ ID NO: 3211283 - RNA, 19 nt, Human
auaauugugugauauuuca

SEQ ID NO: 3211284 - RNA, 18 nt, Human
auaauugugugauauuuc

SEQ ID NO: 3211285 - RNA, 17 nt, Human
auaauugugugauauuu

SEQ ID NO: 3211286 - RNA, 14 nt, Human
auaauuguugcaua

SEQ ID NO: 3211287 - RNA, 23 nt, Human
auaauugugugauauuucagaaa

SEQ ID NO: 3211288 - RNA, 22 nt, Human
auaauugugugauauuucagaa

SEQ ID NO: 3211289 - RNA, 18 nt, Human
uuagauuuuguguuuauu

SEQ ID NO: 3211290 - RNA, 16 nt, Human
uuagcaaaaaaaguug

SEQ ID NO: 3211291 - RNA, 14 nt, Human
uuagcaaaaaaagu

SEQ ID NO: 3211292 - RNA, 23 nt, Human
uuagauuuuguguuuauucuuga

SEQ ID NO: 3211293 - RNA, 22 nt, Human
uuagauuuuguguuuauucuug

SEQ ID NO: 3211294 - RNA, 18 nt, Human
uuagcaaauucuguuuuu

SEQ ID NO: 3211295 - RNA, 16 nt, Human
uuagcaguuugcuuug

SEQ ID NO: 3211296 - RNA, 15 nt, Human
uuaggugaggaagca

SEQ ID NO: 3211297 - RNA, 23 nt, Human
uuagcgacaacagauuggauuuu

SEQ ID NO: 3211298 - RNA, 16 nt, Human
uuagcgacaacagauu

SEQ ID NO: 3211299 - RNA, 16 nt, Human
uuaggugaggaagcaa

SEQ ID NO: 3211300 - RNA, 18 nt, Human
uuagguuggcaaaaaggc

SEQ ID NO: 3211301 - RNA, 22 nt, Human
uuaguuugcaguuacacuaaaa

SEQ ID NO: 3211302 - RNA, 14 nt, Human
uuaguuugcauuua

SEQ ID NO: 3211303 - RNA, 15 nt, Human
uuaguuucuccaagc

SEQ ID NO: 3211304 - RNA, 20 nt, Human
uuaguuuagaacagguuuuu

SEQ ID NO: 3211305 - RNA, 16 nt, Human
uuaguuuagaacaggu

SEQ ID NO: 3211306 - RNA, 14 nt, Human
auaauacuuuguau

SEQ ID NO: 3211307 - RNA, 15 nt, Human
auaauacuuuguaua

SEQ ID NO: 3211308 - RNA, 17 nt, Human
auaauacuuuguauaca

SEQ ID NO: 3211309 - RNA, 18 nt, Human
auaauacuuuguauacaa

SEQ ID NO: 3211310 - RNA, 19 nt, Human
auaauacuuuguauacaag

SEQ ID NO: 3211311 - RNA, 21 nt, Human
auaauacuuuguauacaagua

SEQ ID NO: 3211312 - RNA, 15 nt, Human
auaauaccuuagaag

SEQ ID NO: 3211313 - RNA, 22 nt, Human
auaauacacaaaaucaaauaau

SEQ ID NO: 3211314 - RNA, 17 nt, Human
auaauacacaaaaucaa

SEQ ID NO: 3211315 - RNA, 14 nt, Human
auaauacacaaaau

SEQ ID NO: 3211316 - RNA, 13 nt, Human
auaauacugaacc

SEQ ID NO: 3211317 - RNA, 14 nt, Human
auaauacugaacca

SEQ ID NO: 3211318 - RNA, 20 nt, Human
auaauacugaaccacuugua

SEQ ID NO: 3211319 - RNA, 15 nt, Human
auaauacugaaccac

SEQ ID NO: 3211320 - RNA, 16 nt, Human
auaauacugaaccacu

SEQ ID NO: 3211321 - RNA, 14 nt, Human
auaauaauuaguaa

SEQ ID NO: 3211322 - RNA, 13 nt, Human
uuagaacagguuu

SEQ ID NO: 3211323 - RNA, 14 nt, Human
uuagaacagguuuu

SEQ ID NO: 3211324 - RNA, 20 nt, Human
auaagaauagaacaacauau

SEQ ID NO: 3211325 - RNA, 12 nt, Human
auaauaaaauca

SEQ ID NO: 3211326 - RNA, 13 nt, Human
auaauaaaaucac

SEQ ID NO: 3211327 - RNA, 23 nt, Human
auaauaaagaauagcuuuaauga

SEQ ID NO: 3211328 - RNA, 14 nt, Human
auaauaaagaauag

SEQ ID NO: 3211329 - RNA, 13 nt, Human
auaauaaagaaua

SEQ ID NO: 3211330 - RNA, 18 nt, Human
auaauagauugugaauaa

SEQ ID NO: 3211331 - RNA, 19 nt, Human
auaauagucaccugcuguu

SEQ ID NO: 3211332 - RNA, 18 nt, Human
auaauccuugauaauaua

SEQ ID NO: 3211333 - RNA, 19 nt, Human
auaauccuugauaauauau

SEQ ID NO: 3211334 - RNA, 15 nt, Human
auaauccugcaaagu

SEQ ID NO: 3211335 - RNA, 14 nt, Human
auaauccugcaaag

SEQ ID NO: 3211336 - RNA, 16 nt, Human
auaaucucuucuuaua

SEQ ID NO: 3211337 - RNA, 20 nt, Human
auaaucuggacuccucuguc

SEQ ID NO: 3211338 - RNA, 19 nt, Human
auaaucuggacuccucugu

SEQ ID NO: 3211339 - RNA, 18 nt, Human
auaaucuggacuccucug

SEQ ID NO: 3211340 - RNA, 18 nt, Human
auaauccugcaaaguaca

SEQ ID NO: 3211341 - RNA, 22 nt, Human
auaauugacaggauuauuggaa

SEQ ID NO: 3211342 - RNA, 19 nt, Human
auaauucuuuuuuauuaau

SEQ ID NO: 3211343 - RNA, 21 nt, Human
auaauucuuuuuuauuaauca

SEQ ID NO: 3211344 - RNA, 22 nt, Human
auaauucuuuuuuauuaaucac

SEQ ID NO: 3211345 - RNA, 14 nt, Human
auaauugugugaua

SEQ ID NO: 3211346 - RNA, 14 nt, Human
auaauucuuuuuua

SEQ ID NO: 3211347 - RNA, 17 nt, Human
auaauucuuuuuuauua

SEQ ID NO: 3211348 - RNA, 15 nt, Human
auaaugccuuuguaa

SEQ ID NO: 3211349 - RNA, 16 nt, Human
auaaugccuuuguaac

SEQ ID NO: 3211350 - RNA, 15 nt, Human
auaaugaaugaaaca

SEQ ID NO: 3211351 - RNA, 19 nt, Human
auaaugaucgaaaaaauaa

SEQ ID NO: 3211352 - RNA, 20 nt, Human
auaaugaucgaaaaaauaau

SEQ ID NO: 3211353 - RNA, 12 nt, Human
auaaugaaugac

SEQ ID NO: 3211354 - RNA, 15 nt, Human
auaaauaguuuauga

SEQ ID NO: 3211355 - RNA, 15 nt, Human
auaaauaguguuauu

SEQ ID NO: 3211356 - RNA, 19 nt, Human
auaaaggugugcugugucc

SEQ ID NO: 3211357 - RNA, 15 nt, Human
uuaauugucuugcac

SEQ ID NO: 3211358 - RNA, 16 nt, Human
uuaauugugugaacuu

SEQ ID NO: 3211359 - RNA, 13 nt, Human
uuaauuguauuuu

SEQ ID NO: 3211360 - RNA, 11 nt, Human
auaaauuauuu

SEQ ID NO: 3211361 - RNA, 20 nt, Human
auaaauccacccauguuauc

SEQ ID NO: 3211362 - RNA, 12 nt, Human
auaaaucauaaa

SEQ ID NO: 3211363 - RNA, 15 nt, Human
auaaaucauaaaguc

SEQ ID NO: 3211364 - RNA, 16 nt, Human
auaaaucauaaaguca

SEQ ID NO: 3211365 - RNA, 18 nt, Human
auaaaucauaaagucagu

SEQ ID NO: 3211366 - RNA, 18 nt, Human
auaaauccacccauguua

SEQ ID NO: 3211367 - RNA, 14 nt, Human
auaaccuaauuaau

SEQ ID NO: 3211368 - RNA, 15 nt, Human
auaaccuaguuaaag

SEQ ID NO: 3211369 - RNA, 17 nt, Human
auaaccuaguuaaagaa

SEQ ID NO: 3211370 - RNA, 19 nt, Human
auaaccuaguuaaagaaag

SEQ ID NO: 3211371 - RNA, 20 nt, Human
auaaccuaguuaaagaaagg

SEQ ID NO: 3211372 - RNA, 17 nt, Human
uuacccuauaucuauaa

SEQ ID NO: 3211373 - RNA, 21 nt, Human
uuaccucccuacuuucuuaga

SEQ ID NO: 3211374 - RNA, 17 nt, Human
uuaccucaacaagaaga

SEQ ID NO: 3211375 - RNA, 15 nt, Human
auaacuuauauugua

SEQ ID NO: 3211376 - RNA, 16 nt, Human
uuacaggcuccugcca

SEQ ID NO: 3211377 - RNA, 18 nt, Human
uuacaggcuccugccacc

SEQ ID NO: 3211378 - RNA, 24 nt, Human
uuacaggcgugagccaccgugccu

SEQ ID NO: 3211379 - RNA, 12 nt, Human
uuagaaacugga

SEQ ID NO: 3211380 - RNA, 22 nt, Human
uuagaaacacauaauuaacacu

SEQ ID NO: 3211381 - RNA, 14 nt, Human
uuacucuugggaca

SEQ ID NO: 3211382 - RNA, 23 nt, Human
uuagaaacuggaaauacuagauu

SEQ ID NO: 3211383 - RNA, 19 nt, Human
uuagaaacuggaaauacua

SEQ ID NO: 3211384 - RNA, 13 nt, Human
uuagaaacuggaa

SEQ ID NO: 3211385 - RNA, 23 nt, Human
uuacucuucaguuaagccuuugg

SEQ ID NO: 3211386 - RNA, 12 nt, Human
uuacucuuggga

SEQ ID NO: 3211387 - RNA, 18 nt, Human
uuaccuugaacugaaggc

SEQ ID NO: 3211388 - RNA, 20 nt, Human
uuaccuugucauuuuggucu

SEQ ID NO: 3211389 - RNA, 16 nt, Human
uuaccuugucauuuug

SEQ ID NO: 3211390 - RNA, 13 nt, Human
uuagacagucccu

SEQ ID NO: 3211391 - RNA, 20 nt, Human
uuagacagagucucacuguu

SEQ ID NO: 3211392 - RNA, 13 nt, Human
uuagacagagucu

SEQ ID NO: 3211393 - RNA, 17 nt, Human
uuagaaauugcauuucc

SEQ ID NO: 3211394 - RNA, 18 nt, Human
aguuuaaauauuaagcau

SEQ ID NO: 3211395 - RNA, 20 nt, Human
aguuuaaauauuaagcauga

SEQ ID NO: 3211396 - RNA, 14 nt, Human
aguugguauuaaua

SEQ ID NO: 3211397 - RNA, 19 nt, Human
aguugguauuaauaaaaag

SEQ ID NO: 3211398 - RNA, 17 nt, Human
aguuggucccccuucca

SEQ ID NO: 3211399 - RNA, 11 nt, Human
aguuggucccc

SEQ ID NO: 3211400 - RNA, 13 nt, Human
aguuggucccccu

SEQ ID NO: 3211401 - RNA, 13 nt, Human
uuaaaaaaaaucc

SEQ ID NO: 3211402 - RNA, 19 nt, Human
uuaaaaaaaauuugcucau

SEQ ID NO: 3211403 - RNA, 21 nt, Human
uuaaaaaaaaucaucauuauu

SEQ ID NO: 3211404 - RNA, 23 nt, Human
aguuuaauugaaagaauguaaag

SEQ ID NO: 3211405 - RNA, 21 nt, Human
uuaaaaaaaacucuuuaacuu

SEQ ID NO: 3211406 - RNA, 17 nt, Human
uuaaaaaaaacucuuua

SEQ ID NO: 3211407 - RNA, 23 nt, Human
aguugccagucaccccggccacc

SEQ ID NO: 3211408 - RNA, 20 nt, Human
aguugccagucaccccggcc

SEQ ID NO: 3211409 - RNA, 22 nt, Human
aguugccgcauauuauaucaga

SEQ ID NO: 3211410 - RNA, 19 nt, Human
aguugcccagccucuuucc

SEQ ID NO: 3211411 - RNA, 15 nt, Human
aguugcugguaaaau

SEQ ID NO: 3211412 - RNA, 17 nt, Human
aguugcugguaaaauga

SEQ ID NO: 3211413 - RNA, 18 nt, Human
aguugcugguaaaaugaa

SEQ ID NO: 3211414 - RNA, 21 nt, Human
aguugcugguaaaaugaagaa

SEQ ID NO: 3211415 - RNA, 14 nt, Human
aguugcccagccuc

SEQ ID NO: 3211416 - RNA, 16 nt, Human
aguuggggcagaggag

SEQ ID NO: 3211417 - RNA, 17 nt, Human
aguuggggacagaacuc

SEQ ID NO: 3211418 - RNA, 19 nt, Human
aguugggcuuccucauagu

SEQ ID NO: 3211419 - RNA, 21 nt, Human
aguuggaguucauucauauua

SEQ ID NO: 3211420 - RNA, 20 nt, Human
aguuggaguucauucauauu

SEQ ID NO: 3211421 - RNA, 23 nt, Human
aguuggaguucauucauauuaca

SEQ ID NO: 3211422 - RNA, 13 nt, Human
aguugggcuuccu

SEQ ID NO: 3211423 - RNA, 19 nt, Human
aguuggaguucauucauau

SEQ ID NO: 3211424 - RNA, 17 nt, Human
aguuggaguagaaugua

SEQ ID NO: 3211425 - RNA, 23 nt, Human
aguuggaaacacuaaauguuaaa

SEQ ID NO: 3211426 - RNA, 16 nt, Human
aguuggaguagaaugu

SEQ ID NO: 3211427 - RNA, 22 nt, Human
aguuggaaacacuaaauguuaa

SEQ ID NO: 3211428 - RNA, 21 nt, Human
aguuggaaacacuaaauguua

SEQ ID NO: 3211429 - RNA, 20 nt, Human
aguuggaaacacuaaauguu

SEQ ID NO: 3211430 - RNA, 19 nt, Human
aguuggaaacacuaaaugu

SEQ ID NO: 3211431 - RNA, 13 nt, Human
aguuggaaacacu

SEQ ID NO: 3211432 - RNA, 14 nt, Human
aguugcuguuuacu

SEQ ID NO: 3211433 - RNA, 23 nt, Human
aguugcugucagucuugaccucu

SEQ ID NO: 3211434 - RNA, 21 nt, Human
aguugcugucagucuugaccu

SEQ ID NO: 3211435 - RNA, 15 nt, Human
uuaacacuacucaaa

SEQ ID NO: 3211436 - RNA, 17 nt, Human
uuaacacuacucaaagc

SEQ ID NO: 3211437 - RNA, 12 nt, Human
uuaacaagaagc

SEQ ID NO: 3211438 - RNA, 15 nt, Human
uuaacaaugccuauu

SEQ ID NO: 3211439 - RNA, 19 nt, Human
uuaacaaugccuauuguaa

SEQ ID NO: 3211440 - RNA, 20 nt, Human
uuaacaaugccuauuguaau

SEQ ID NO: 3211441 - RNA, 21 nt, Human
uuaacaaugccuauuguaaua

SEQ ID NO: 3211442 - RNA, 20 nt, Human
uuaaagugaggccacugaag

SEQ ID NO: 3211443 - RNA, 20 nt, Human
uuaaaguaugcauuauuaaa

SEQ ID NO: 3211444 - RNA, 23 nt, Human
uuaaaguaugcauuauuaaauug

SEQ ID NO: 3211445 - RNA, 22 nt, Human
uuaaaguaauuguuccagagac

SEQ ID NO: 3211446 - RNA, 20 nt, Human
uuaaaguaauuguuccagag

SEQ ID NO: 3211447 - RNA, 16 nt, Human
uuaaaguaauuguucc

SEQ ID NO: 3211448 - RNA, 14 nt, Human
uuaaacaaaguuuc

SEQ ID NO: 3211449 - RNA, 17 nt, Human
uuaaacaaaguuucaga

SEQ ID NO: 3211450 - RNA, 16 nt, Human
uuaaacaauaaagcaa

SEQ ID NO: 3211451 - RNA, 13 nt, Human
uuaaacagaggau

SEQ ID NO: 3211452 - RNA, 17 nt, Human
uuaagucuaucugguau

SEQ ID NO: 3211453 - RNA, 9 nt, Human
uuaaggugg

SEQ ID NO: 3211454 - RNA, 19 nt, Human
uuaaggugagcauaaauca

SEQ ID NO: 3211455 - RNA, 20 nt, Human
uuaaggugagcauaaaucaa

SEQ ID NO: 3211456 - RNA, 13 nt, Human
uuaaggucuguuu

SEQ ID NO: 3211457 - RNA, 14 nt, Human
uuaagguguuugaa

SEQ ID NO: 3211458 - RNA, 16 nt, Human
uuaagguguuugaaaa

SEQ ID NO: 3211459 - RNA, 17 nt, Human
uuaagguguuugaaaau

SEQ ID NO: 3211460 - RNA, 22 nt, Human
uuaagguguuugaaaauaguuu

SEQ ID NO: 3211461 - RNA, 22 nt, Human
uuaagaaagacuaucuaaaugu

SEQ ID NO: 3211462 - RNA, 12 nt, Human
uuaagaaauaaa

SEQ ID NO: 3211463 - RNA, 20 nt, Human
uuaagaaagaaauacuguau

SEQ ID NO: 3211464 - RNA, 22 nt, Human
uuaagaaauagacagcaugaga

SEQ ID NO: 3211465 - RNA, 13 nt, Human
uuaagaagaaacu

SEQ ID NO: 3211466 - RNA, 16 nt, Human
uuaaucuuaauguaua

SEQ ID NO: 3211467 - RNA, 17 nt, Human
uuaaucuuaauguauau

SEQ ID NO: 3211468 - RNA, 18 nt, Human
uuaaucucuaacagugga

SEQ ID NO: 3211469 - RNA, 22 nt, Human
uuaaucugguuuauuuuuguuc

SEQ ID NO: 3211470 - RNA, 18 nt, Human
uuaaugaaagacuguaca

SEQ ID NO: 3211471 - RNA, 20 nt, Human
uuaaucuuuucuuauuuuug

SEQ ID NO: 3211472 - RNA, 19 nt, Human
uuaaugaaagacuguacaa

SEQ ID NO: 3211473 - RNA, 13 nt, Human
uuaauugaaaaga

SEQ ID NO: 3211474 - RNA, 21 nt, Human
uuaauugaaaagaaguagugu

SEQ ID NO: 3211475 - RNA, 23 nt, Human
uuaauugaaaagaaguagugucu

SEQ ID NO: 3211476 - RNA, 16 nt, Human
uuaauugaucaguuuu

SEQ ID NO: 3211477 - RNA, 17 nt, Human
uuaauugauagaauaaa

SEQ ID NO: 3211478 - RNA, 12 nt, Human
uuaauugcugag

SEQ ID NO: 3211479 - RNA, 20 nt, Human
uuaauugaaagaauguaaag

SEQ ID NO: 3211480 - RNA, 16 nt, Human
uuaauugaaagaaugu

SEQ ID NO: 3211481 - RNA, 18 nt, Human
uuaaucaugaauaugaug

SEQ ID NO: 3211482 - RNA, 12 nt, Human
uuaauauuucuu

SEQ ID NO: 3211483 - RNA, 14 nt, Human
uuaauauuucuuca

SEQ ID NO: 3211484 - RNA, 17 nt, Human
uuaauauuuuuacaugc

SEQ ID NO: 3211485 - RNA, 22 nt, Human
uuaauauuuauaggucacuuug

SEQ ID NO: 3211486 - RNA, 12 nt, Human
uuaauauuuguu

SEQ ID NO: 3211487 - RNA, 16 nt, Human
uuaauauuuguuuagu

SEQ ID NO: 3211488 - RNA, 21 nt, Human
uuaaucugggccagaauuuca

SEQ ID NO: 3211489 - RNA, 17 nt, Human
uuaaucucuaacagugg

SEQ ID NO: 3211490 - RNA, 21 nt, Human
uuaaucuacugcauuuaggga

SEQ ID NO: 3211491 - RNA, 19 nt, Human
uuaauauuuuuacaugcag

SEQ ID NO: 3211492 - RNA, 15 nt, Human
auaaaagcccaggag

SEQ ID NO: 3211493 - RNA, 13 nt, Human
auaaaagcccagg

SEQ ID NO: 3211494 - RNA, 16 nt, Human
auaaaagcccaggagc

SEQ ID NO: 3211495 - RNA, 13 nt, Human
auaaaauaacuaa

SEQ ID NO: 3211496 - RNA, 17 nt, Human
auaaaauaacuaaaaug

SEQ ID NO: 3211497 - RNA, 18 nt, Human
auaaaauaacuaaaaugu

SEQ ID NO: 3211498 - RNA, 19 nt, Human
auaaaauaacuaaaaugua

SEQ ID NO: 3211499 - RNA, 22 nt, Human
auaaaauaauuuuaucucuuuc

SEQ ID NO: 3211500 - RNA, 14 nt, Human
auaaaauauuuucu

SEQ ID NO: 3211501 - RNA, 15 nt, Human
auaaaauauuuucug

SEQ ID NO: 3211502 - RNA, 16 nt, Human
auaaaauauuuucugu

SEQ ID NO: 3211503 - RNA, 18 nt, Human
auaaaauauuuucugugu

SEQ ID NO: 3211504 - RNA, 20 nt, Human
auaaaauauuuucugugugu

SEQ ID NO: 3211505 - RNA, 21 nt, Human
auaaaauauuuucuguguguu

SEQ ID NO: 3211506 - RNA, 22 nt, Human
auaaaauauuuucuguguguuc

SEQ ID NO: 3211507 - RNA, 23 nt, Human
auaaaauauuuucuguguguucc

SEQ ID NO: 3211508 - RNA, 23 nt, Human
aguuuucugagaaagacuauuca

SEQ ID NO: 3211509 - RNA, 14 nt, Human
aguuuugacaagcu

SEQ ID NO: 3211510 - RNA, 15 nt, Human
aguuuugacaagcug

SEQ ID NO: 3211511 - RNA, 18 nt, Human
aguuuugacaagcuggcu

SEQ ID NO: 3211512 - RNA, 17 nt, Human
aguuuucuuuuaauuuu

SEQ ID NO: 3211513 - RNA, 16 nt, Human
aguuuucuuuuaauuu

SEQ ID NO: 3211514 - RNA, 18 nt, Human
aguuuucugagaaagacu

SEQ ID NO: 3211515 - RNA, 19 nt, Human
aguuuucugagaaagacua

SEQ ID NO: 3211516 - RNA, 12 nt, Human
aguuuugugaaa

SEQ ID NO: 3211517 - RNA, 14 nt, Human
aguuuugugaaauu

SEQ ID NO: 3211518 - RNA, 13 nt, Human
aguuuugugaaau

SEQ ID NO: 3211519 - RNA, 17 nt, Human
aguuuugcauaguucua

SEQ ID NO: 3211520 - RNA, 19 nt, Human
aguuuugacaagcuggcuu

SEQ ID NO: 3211521 - RNA, 21 nt, Human
aguuuugcuuuuaguuuuucu

SEQ ID NO: 3211522 - RNA, 20 nt, Human
aguuuugggaaguuaaaggg

SEQ ID NO: 3211523 - RNA, 19 nt, Human
aguuuugggaaguuaaagg

SEQ ID NO: 3211524 - RNA, 16 nt, Human
aguuuugggaaguuaa

SEQ ID NO: 3211525 - RNA, 23 nt, Human
aguuuugcuuuuaguuuuucugu

SEQ ID NO: 3211526 - RNA, 16 nt, Human
acaucuugcucugcug

SEQ ID NO: 3211527 - RNA, 15 nt, Human
acaucuugcucugcu

SEQ ID NO: 3211528 - RNA, 18 nt, Human
uaugugggggucugugug

SEQ ID NO: 3211529 - RNA, 19 nt, Human
uaugugggggucugugugu

SEQ ID NO: 3211530 - RNA, 20 nt, Human
uaugugggggucuguguguu

SEQ ID NO: 3211531 - RNA, 17 nt, Human
acaucuugcucugcuga

SEQ ID NO: 3211532 - RNA, 22 nt, Human
acaucuugcucugcugacagac

SEQ ID NO: 3211533 - RNA, 19 nt, Human
acaucuuggucagauuuga

SEQ ID NO: 3211534 - RNA, 14 nt, Human
acaucuugcucugc

SEQ ID NO: 3211535 - RNA, 16 nt, Human
acaucuuuauugaaau

SEQ ID NO: 3211536 - RNA, 18 nt, Human
acaucuuuauugaaauuc

SEQ ID NO: 3211537 - RNA, 19 nt, Human
acaucuuuauugaaauucu

SEQ ID NO: 3211538 - RNA, 22 nt, Human
acaucuuuauugaaauucuauu

SEQ ID NO: 3211539 - RNA, 13 nt, Human
uauuuuaaaauuu

SEQ ID NO: 3211540 - RNA, 15 nt, Human
uauuuuaaaauuuca

SEQ ID NO: 3211541 - RNA, 16 nt, Human
uauuuuaaaauaaacu

SEQ ID NO: 3211542 - RNA, 13 nt, Human
uauuuuaaaacaa

SEQ ID NO: 3211543 - RNA, 19 nt, Human
uauuuuaaaaucuccuaaa

SEQ ID NO: 3211544 - RNA, 21 nt, Human
uauuuuaaaagauaaauauua

SEQ ID NO: 3211545 - RNA, 19 nt, Human
uauuuguuuaguucagcaa

SEQ ID NO: 3211546 - RNA, 21 nt, Human
uauuuguuuaguucagcaaaa

SEQ ID NO: 3211547 - RNA, 14 nt, Human
uauuuguaguguua

SEQ ID NO: 3211548 - RNA, 20 nt, Human
uauuuguacuuucuguuaaa

SEQ ID NO: 3211549 - RNA, 15 nt, Human
uauuuguacuuucug

SEQ ID NO: 3211550 - RNA, 17 nt, Human
uauuuguacuuucuguu

SEQ ID NO: 3211551 - RNA, 16 nt, Human
uauuuguacuuucugu

SEQ ID NO: 3211552 - RNA, 12 nt, Human
uauuugugugcu

SEQ ID NO: 3211553 - RNA, 15 nt, Human
uauuugugugcuaaa

SEQ ID NO: 3211554 - RNA, 14 nt, Human
uauuugucucagau

SEQ ID NO: 3211555 - RNA, 20 nt, Human
uauuugucaguguagaucaa

SEQ ID NO: 3211556 - RNA, 14 nt, Human
uauuuguaugauau

SEQ ID NO: 3211557 - RNA, 20 nt, Human
uauuuguaugauauuuuaaa

SEQ ID NO: 3211558 - RNA, 17 nt, Human
uauuuguauuuauucuu

SEQ ID NO: 3211559 - RNA, 22 nt, Human
uauuuguguguucacuaaacuc

SEQ ID NO: 3211560 - RNA, 18 nt, Human
uauuugugugcuaaacgu

SEQ ID NO: 3211561 - RNA, 17 nt, Human
uauuuuuguagagccag

SEQ ID NO: 3211562 - RNA, 15 nt, Human
uauuuuuaaaggcau

SEQ ID NO: 3211563 - RNA, 18 nt, Human
uauuuuuaagaaagaaau

SEQ ID NO: 3211564 - RNA, 13 nt, Human
uauuuuucaaaau

SEQ ID NO: 3211565 - RNA, 23 nt, Human
uauuuugugaguuuguuucuuug

SEQ ID NO: 3211566 - RNA, 14 nt, Human
uauuuuguaaaaug

SEQ ID NO: 3211567 - RNA, 16 nt, Human
uauuuuguaaaaugua

SEQ ID NO: 3211568 - RNA, 17 nt, Human
uauuuuguaaaauguau

SEQ ID NO: 3211569 - RNA, 18 nt, Human
uauuuuguaaaauguauu

SEQ ID NO: 3211570 - RNA, 19 nt, Human
uauuuuguaaaauguauua

SEQ ID NO: 3211571 - RNA, 22 nt, Human
uauuuuguaaaauguauuaugu

SEQ ID NO: 3211572 - RNA, 15 nt, Human
uauuuuguaugaaau

SEQ ID NO: 3211573 - RNA, 22 nt, Human
uauuuuguaugcaagcaguuuc

SEQ ID NO: 3211574 - RNA, 20 nt, Human
uauuuuguaugcaagcaguu

SEQ ID NO: 3211575 - RNA, 16 nt, Human
uauuuuguaugcaagc

SEQ ID NO: 3211576 - RNA, 14 nt, Human
uauuuuguaugcaa

SEQ ID NO: 3211577 - RNA, 13 nt, Human
uauuuuguaugca

SEQ ID NO: 3211578 - RNA, 12 nt, Human
uauuuuguaugc

SEQ ID NO: 3211579 - RNA, 17 nt, Human
uauuuugugaguuuguu

SEQ ID NO: 3211580 - RNA, 14 nt, Human
uauuuugugaguuu

SEQ ID NO: 3211581 - RNA, 16 nt, Human
uauuuuaaucucagaa

SEQ ID NO: 3211582 - RNA, 16 nt, Human
uauuuuaauuucaagc

SEQ ID NO: 3211583 - RNA, 15 nt, Human
uauuuuaauuucaag

SEQ ID NO: 3211584 - RNA, 14 nt, Human
uauuuuaauuucaa

SEQ ID NO: 3211585 - RNA, 13 nt, Human
uauuuuaauuuca

SEQ ID NO: 3211586 - RNA, 21 nt, Human
uauuuuacuuggaaauauuaa

SEQ ID NO: 3211587 - RNA, 17 nt, Human
uauuuugauguaaagau

SEQ ID NO: 3211588 - RNA, 20 nt, Human
ucaaauaggcuauuaaaaaa

SEQ ID NO: 3211589 - RNA, 23 nt, Human
ucaaauaggcuauuaaaaaaguc

SEQ ID NO: 3211590 - RNA, 15 nt, Human
ucaaauaguugcaua

SEQ ID NO: 3211591 - RNA, 21 nt, Human
ucaaagcaccaaaauaagaaa

SEQ ID NO: 3211592 - RNA, 14 nt, Human
ucaaagugcuauua

SEQ ID NO: 3211593 - RNA, 16 nt, Human
ucaaaguggaugcaau

SEQ ID NO: 3211594 - RNA, 18 nt, Human
ucaaagucucaaugaaau

SEQ ID NO: 3211595 - RNA, 20 nt, Human
ucaaagucucaaugaaauag

SEQ ID NO: 3211596 - RNA, 22 nt, Human
ucaaagucaugauguuuuuaaa

SEQ ID NO: 3211597 - RNA, 21 nt, Human
ucaaagucaugauguuuuuaa

SEQ ID NO: 3211598 - RNA, 19 nt, Human
ucaaagucaugauguuuuu

SEQ ID NO: 3211599 - RNA, 17 nt, Human
ucaaagucaugauguuu

SEQ ID NO: 3211600 - RNA, 16 nt, Human
ucaaagucaugauguu

SEQ ID NO: 3211601 - RNA, 15 nt, Human
ucaaagucagaacaa

SEQ ID NO: 3211602 - RNA, 13 nt, Human
acaugagcaucag

SEQ ID NO: 3211603 - RNA, 15 nt, Human
acaugacucuuuauu

SEQ ID NO: 3211604 - RNA, 17 nt, Human
acaugacucuuuauugu

SEQ ID NO: 3211605 - RNA, 19 nt, Human
acaugacucuuuauugucu

SEQ ID NO: 3211606 - RNA, 20 nt, Human
acaugacucuuuauugucug

SEQ ID NO: 3211607 - RNA, 21 nt, Human
acaugacucuuuauugucugu

SEQ ID NO: 3211608 - RNA, 22 nt, Human
acaugacucuuuauugucugua

SEQ ID NO: 3211609 - RNA, 23 nt, Human
acaugacucuuuauugucuguaa

SEQ ID NO: 3211610 - RNA, 16 nt, Human
ucaaaagcugggcagg

SEQ ID NO: 3211611 - RNA, 17 nt, Human
ucaaaaguagaacuuug

SEQ ID NO: 3211612 - RNA, 18 nt, Human
ucaaaaguagaacuuugu

SEQ ID NO: 3211613 - RNA, 23 nt, Human
ucaaaaguagaacuuuguauagu

SEQ ID NO: 3211614 - RNA, 13 nt, Human
ucaaacagucuca

SEQ ID NO: 3211615 - RNA, 18 nt, Human
ucaaacacuugugacuuu

SEQ ID NO: 3211616 - RNA, 21 nt, Human
ucaaacagucucaggaaauca

SEQ ID NO: 3211617 - RNA, 20 nt, Human
ucaaacagucucaggaaauc

SEQ ID NO: 3211618 - RNA, 19 nt, Human
ucaaacacuugugacuuuu

SEQ ID NO: 3211619 - RNA, 15 nt, Human
ucaaagcaaaagugc

SEQ ID NO: 3211620 - RNA, 16 nt, Human
ucaaagcaaaagugcu

SEQ ID NO: 3211621 - RNA, 15 nt, Human
ucaaagcaaaugucu

SEQ ID NO: 3211622 - RNA, 23 nt, Human
ucaaagcaaaugucuuccuggau

SEQ ID NO: 3211623 - RNA, 20 nt, Human
ucaaagcaccaaaauaagaa

SEQ ID NO: 3211624 - RNA, 18 nt, Human
ucaaagcaccaaaauaag

SEQ ID NO: 3211625 - RNA, 14 nt, Human
acauggauucaguu

SEQ ID NO: 3211626 - RNA, 19 nt, Human
acauggauucaguuucuaa

SEQ ID NO: 3211627 - RNA, 19 nt, Human
acauggaguauaugucaag

SEQ ID NO: 3211628 - RNA, 15 nt, Human
acauggaguauaugu

SEQ ID NO: 3211629 - RNA, 18 nt, Human
acauggaauaacauguaa

SEQ ID NO: 3211630 - RNA, 14 nt, Human
acauggaaguacua

SEQ ID NO: 3211631 - RNA, 20 nt, Human
acauggaauaacauguaauu

SEQ ID NO: 3211632 - RNA, 20 nt, Human
acauggaauauauuuuaaua

SEQ ID NO: 3211633 - RNA, 19 nt, Human
acauggaaugaggguuuga

SEQ ID NO: 3211634 - RNA, 20 nt, Human
acaugagcaucaggccaggc

SEQ ID NO: 3211635 - RNA, 23 nt, Human
acaugagcaucaggccaggcccu

SEQ ID NO: 3211636 - RNA, 21 nt, Human
acaugucuuuucuugcaugag

SEQ ID NO: 3211637 - RNA, 19 nt, Human
acauuaauccacauguuuc

SEQ ID NO: 3211638 - RNA, 22 nt, Human
acauuaauccacauguuucaga

SEQ ID NO: 3211639 - RNA, 13 nt, Human
acauuaauguuga

SEQ ID NO: 3211640 - RNA, 18 nt, Human
acauuaauguugauuucu

SEQ ID NO: 3211641 - RNA, 17 nt, Human
acauuaauguugauuuc

SEQ ID NO: 3211642 - RNA, 15 nt, Human
acauuaauguugauu

SEQ ID NO: 3211643 - RNA, 14 nt, Human
acauuaauguugau

SEQ ID NO: 3211644 - RNA, 23 nt, Human
acauuaauguugauuucuaguua

SEQ ID NO: 3211645 - RNA, 22 nt, Human
acauuaauguugauuucuaguu

SEQ ID NO: 3211646 - RNA, 21 nt, Human
acauuaauguugauuucuagu

SEQ ID NO: 3211647 - RNA, 22 nt, Human
acauguauuaaauuacauuugu

SEQ ID NO: 3211648 - RNA, 21 nt, Human
acauguauuaaauuacauuug

SEQ ID NO: 3211649 - RNA, 20 nt, Human
acauguauuaaauuacauuu

SEQ ID NO: 3211650 - RNA, 19 nt, Human
acauguauuaaauuacauu

SEQ ID NO: 3211651 - RNA, 14 nt, Human
acauguauuaaauu

SEQ ID NO: 3211652 - RNA, 15 nt, Human
acaugguuugacucu

SEQ ID NO: 3211653 - RNA, 14 nt, Human
acaugguuuaaaag

SEQ ID NO: 3211654 - RNA, 21 nt, Human
acaugguuuaaaagaaaaaau

SEQ ID NO: 3211655 - RNA, 20 nt, Human
acaugguuaccucugcauaa

SEQ ID NO: 3211656 - RNA, 23 nt, Human
acaugguggggucuccucaggac

SEQ ID NO: 3211657 - RNA, 19 nt, Human
acaugguggggucuccuca

SEQ ID NO: 3211658 - RNA, 14 nt, Human
accaaaaagaaaaa

SEQ ID NO: 3211659 - RNA, 12 nt, Human
accaaaaaauau

SEQ ID NO: 3211660 - RNA, 19 nt, Human
accaaaucagcugcuacua

SEQ ID NO: 3211661 - RNA, 16 nt, Human
accaaaucagcugcua

SEQ ID NO: 3211662 - RNA, 21 nt, Human
accaaauaucaccaggacugu

SEQ ID NO: 3211663 - RNA, 16 nt, Human
accaaauagugugaaa

SEQ ID NO: 3211664 - RNA, 18 nt, Human
accaaauagugugaaaua

SEQ ID NO: 3211665 - RNA, 19 nt, Human
accaacacgagcaggcuac

SEQ ID NO: 3211666 - RNA, 11 nt, Human
accaacaccau

SEQ ID NO: 3211667 - RNA, 16 nt, Human
accaacaccaucacag

SEQ ID NO: 3211668 - RNA, 21 nt, Human
accaacaccaucacagcuugu

SEQ ID NO: 3211669 - RNA, 22 nt, Human
accaacaccaucacagcuuguu

SEQ ID NO: 3211670 - RNA, 22 nt, Human
accaacaagaauaaaggcagcu

SEQ ID NO: 3211671 - RNA, 13 nt, Human
accaaauuuuaau

SEQ ID NO: 3211672 - RNA, 14 nt, Human
accaaauuuuaauu

SEQ ID NO: 3211673 - RNA, 14 nt, Human
accaacacgagcag

SEQ ID NO: 3211674 - RNA, 15 nt, Human
accaaauuaaaaaaa

SEQ ID NO: 3211675 - RNA, 18 nt, Human
accaaauguaacuauguu

SEQ ID NO: 3211676 - RNA, 15 nt, Human
accaaaugguacaaa

SEQ ID NO: 3211677 - RNA, 13 nt, Human
accaaaugguaca

SEQ ID NO: 3211678 - RNA, 14 nt, Human
accaaauggaaaca

SEQ ID NO: 3211679 - RNA, 20 nt, Human
accaaccacugcgaccacaa

SEQ ID NO: 3211680 - RNA, 16 nt, Human
accaacauacucccau

SEQ ID NO: 3211681 - RNA, 15 nt, Human
accaacccucagagc

SEQ ID NO: 3211682 - RNA, 21 nt, Human
accaaucuuacuuuguaaauu

SEQ ID NO: 3211683 - RNA, 23 nt, Human
accaaucuuacuuuguaaauucu

SEQ ID NO: 3211684 - RNA, 17 nt, Human
accaaucuuacuuugua

SEQ ID NO: 3211685 - RNA, 18 nt, Human
accaaucuuacuuuguaa

SEQ ID NO: 3211686 - RNA, 19 nt, Human
accaaucuuacuuuguaaa

SEQ ID NO: 3211687 - RNA, 20 nt, Human
accaaucuuacuuuguaaau

SEQ ID NO: 3211688 - RNA, 15 nt, Human
accaaucuuacuuug

SEQ ID NO: 3211689 - RNA, 16 nt, Human
accaaucuuacuuugu

SEQ ID NO: 3211690 - RNA, 23 nt, Human
accacacccagcccacuucugcc

SEQ ID NO: 3211691 - RNA, 21 nt, Human
accacacccagcccacuucug

SEQ ID NO: 3211692 - RNA, 20 nt, Human
accacacccagcccacuucu

SEQ ID NO: 3211693 - RNA, 16 nt, Human
accacacccagcccac

SEQ ID NO: 3211694 - RNA, 15 nt, Human
accacacccagccca

SEQ ID NO: 3211695 - RNA, 21 nt, Human
accacacauuucacugucugu

SEQ ID NO: 3211696 - RNA, 14 nt, Human
accacacauuucac

SEQ ID NO: 3211697 - RNA, 17 nt, Human
accacacagaggcugcc

SEQ ID NO: 3211698 - RNA, 23 nt, Human
accacacaacauccaaguggccu

SEQ ID NO: 3211699 - RNA, 12 nt, Human
ucaauuuaaaaa

SEQ ID NO: 3211700 - RNA, 13 nt, Human
accacacccaacu

SEQ ID NO: 3211701 - RNA, 13 nt, Human
ucaauuuaaaaaa

SEQ ID NO: 3211702 - RNA, 21 nt, Human
ucacagaacccuuggagccaa

SEQ ID NO: 3211703 - RNA, 14 nt, Human
ucaauuuaaguguu

SEQ ID NO: 3211704 - RNA, 21 nt, Human
ucaauuuaaguguuggaaaaa

SEQ ID NO: 3211705 - RNA, 21 nt, Human
ucacagacaggaccccugcag

SEQ ID NO: 3211706 - RNA, 20 nt, Human
ucacagacaggaccccugca

SEQ ID NO: 3211707 - RNA, 15 nt, Human
ucacagacaggaccc

SEQ ID NO: 3211708 - RNA, 14 nt, Human
ucacagacaggacc

SEQ ID NO: 3211709 - RNA, 11 nt, Human
ucacagacagg

SEQ ID NO: 3211710 - RNA, 23 nt, Human
ucacagccagacuggcacaguuu

SEQ ID NO: 3211711 - RNA, 17 nt, Human
ucacagccagacuggca

SEQ ID NO: 3211712 - RNA, 20 nt, Human
ucacagccagcgaacugaca

SEQ ID NO: 3211713 - RNA, 22 nt, Human
ucacagccaggcgcuagcacag

SEQ ID NO: 3211714 - RNA, 11 nt, Human
ucacagccagg

SEQ ID NO: 3211715 - RNA, 14 nt, Human
ucacagaugggugc

SEQ ID NO: 3211716 - RNA, 15 nt, Human
ucacagaugggugcu

SEQ ID NO: 3211717 - RNA, 20 nt, Human
ucacagcuaugcaaaaagcu

SEQ ID NO: 3211718 - RNA, 17 nt, Human
ucacagcuuguuuugga

SEQ ID NO: 3211719 - RNA, 18 nt, Human
ucacauggaaugaggguu

SEQ ID NO: 3211720 - RNA, 19 nt, Human
ucacauggaaugaggguuu

SEQ ID NO: 3211721 - RNA, 15 nt, Human
ucacaucccacccca

SEQ ID NO: 3211722 - RNA, 16 nt, Human
ucaccagccccagugc

SEQ ID NO: 3211723 - RNA, 17 nt, Human
ucaccagccccagugcc

SEQ ID NO: 3211724 - RNA, 20 nt, Human
ucacauguuuucaaauggag

SEQ ID NO: 3211725 - RNA, 18 nt, Human
ucacauguuuucaaaugg

SEQ ID NO: 3211726 - RNA, 17 nt, Human
ucacauguuuucaaaug

SEQ ID NO: 3211727 - RNA, 15 nt, Human
ucacauguuuucaaa

SEQ ID NO: 3211728 - RNA, 14 nt, Human
ucacauguuuucaa

SEQ ID NO: 3211729 - RNA, 12 nt, Human
ucacauguuuuc

SEQ ID NO: 3211730 - RNA, 23 nt, Human
ucacauguggggagguuaaucua

SEQ ID NO: 3211731 - RNA, 18 nt, Human
acauuuaaaacauuaaaa

SEQ ID NO: 3211732 - RNA, 14 nt, Human
acauuuaaaacauu

SEQ ID NO: 3211733 - RNA, 23 nt, Human
acauuguaagagagaugagcacu

SEQ ID NO: 3211734 - RNA, 22 nt, Human
acauugguucuuucauuugcuu

SEQ ID NO: 3211735 - RNA, 22 nt, Human
acauugcggacagccacggcca

SEQ ID NO: 3211736 - RNA, 21 nt, Human
acauugcggacagccacggcc

SEQ ID NO: 3211737 - RNA, 18 nt, Human
acauugcuuuuaaaacua

SEQ ID NO: 3211738 - RNA, 17 nt, Human
acauugcuuuuaaaacu

SEQ ID NO: 3211739 - RNA, 15 nt, Human
acauugcuuuuaaaa

SEQ ID NO: 3211740 - RNA, 14 nt, Human
acauugcuuuuaaa

SEQ ID NO: 3211741 - RNA, 22 nt, Human
acauuggaagcagguuaaaugu

SEQ ID NO: 3211742 - RNA, 21 nt, Human
acauuggaagcagguuaaaug

SEQ ID NO: 3211743 - RNA, 23 nt, Human
acauuggaagcagguuaaauguu

SEQ ID NO: 3211744 - RNA, 20 nt, Human
acauuggaagcagguuaaau

SEQ ID NO: 3211745 - RNA, 15 nt, Human
acauuggaagcaggu

SEQ ID NO: 3211746 - RNA, 12 nt, Human
acauuggaagca

SEQ ID NO: 3211747 - RNA, 18 nt, Human
acauuuuuagccuguguc

SEQ ID NO: 3211748 - RNA, 20 nt, Human
acauuuuuauaccuguuuaa

SEQ ID NO: 3211749 - RNA, 16 nt, Human
acauuuuuauaccugu

SEQ ID NO: 3211750 - RNA, 21 nt, Human
acauuuuuauaccuguuuaaa

SEQ ID NO: 3211751 - RNA, 14 nt, Human
acauuuuuugaaau

SEQ ID NO: 3211752 - RNA, 13 nt, Human
acauuuuuugaaa

SEQ ID NO: 3211753 - RNA, 15 nt, Human
acauuuuuugaaaug

SEQ ID NO: 3211754 - RNA, 20 nt, Human
acauuuuuugaaaugcugaa

SEQ ID NO: 3211755 - RNA, 13 nt, Human
acauuuuuuucua

SEQ ID NO: 3211756 - RNA, 20 nt, Human
acauuuuuuucuaccuauaa

SEQ ID NO: 3211757 - RNA, 18 nt, Human
accaaaaaaauccagaaa

SEQ ID NO: 3211758 - RNA, 13 nt, Human
acauuuuauuaag

SEQ ID NO: 3211759 - RNA, 14 nt, Human
acauuuaaaccuuu

SEQ ID NO: 3211760 - RNA, 16 nt, Human
acauuuaaaccuuuua

SEQ ID NO: 3211761 - RNA, 22 nt, Human
acauuuaaaacauuaaaauaua

SEQ ID NO: 3211762 - RNA, 22 nt, Human
ucaauaggaaaaacugauuuuu

SEQ ID NO: 3211763 - RNA, 20 nt, Human
ucaagugauucucaugccuc

SEQ ID NO: 3211764 - RNA, 13 nt, Human
ucaaguacacuga

SEQ ID NO: 3211765 - RNA, 18 nt, Human
ucaauaggaaaaacugau

SEQ ID NO: 3211766 - RNA, 19 nt, Human
ucaauaggaaaaacugauu

SEQ ID NO: 3211767 - RNA, 17 nt, Human
ucaauaggaaaaacuga

SEQ ID NO: 3211768 - RNA, 17 nt, Human
ucaagugauucuccugc

SEQ ID NO: 3211769 - RNA, 16 nt, Human
ucaagugauucuccug

SEQ ID NO: 3211770 - RNA, 21 nt, Human
ucaagugauucucaugccuca

SEQ ID NO: 3211771 - RNA, 22 nt, Human
ucaagugauucucaugccucag

SEQ ID NO: 3211772 - RNA, 17 nt, Human
ucaagagggucugagga

SEQ ID NO: 3211773 - RNA, 21 nt, Human
ucaagagggcacugguggccc

SEQ ID NO: 3211774 - RNA, 20 nt, Human
ucaagagggcacugguggcc

SEQ ID NO: 3211775 - RNA, 12 nt, Human
acauuauuacuu

SEQ ID NO: 3211776 - RNA, 12 nt, Human
acauuauucugg

SEQ ID NO: 3211777 - RNA, 14 nt, Human
acauuaucuucugg

SEQ ID NO: 3211778 - RNA, 23 nt, Human
ucaaggauccugagccagauuuc

SEQ ID NO: 3211779 - RNA, 11 nt, Human
ucaaggcucag

SEQ ID NO: 3211780 - RNA, 11 nt, Human
ucauaaaguca

SEQ ID NO: 3211781 - RNA, 13 nt, Human
ucauaaagugaga

SEQ ID NO: 3211782 - RNA, 22 nt, Human
ucauaaagugagaaaacuguga

SEQ ID NO: 3211783 - RNA, 16 nt, Human
ucauaagauauuuuau

SEQ ID NO: 3211784 - RNA, 19 nt, Human
ucaguuguuagugugucuu

SEQ ID NO: 3211785 - RNA, 16 nt, Human
ucaguuucaacaugaa

SEQ ID NO: 3211786 - RNA, 16 nt, Human
ucaguuuauguuuugg

SEQ ID NO: 3211787 - RNA, 15 nt, Human
ucaguuuauguuuug

SEQ ID NO: 3211788 - RNA, 14 nt, Human
ucaguuuauguuuu

SEQ ID NO: 3211789 - RNA, 16 nt, Human
ucaguauguggaagug

SEQ ID NO: 3211790 - RNA, 15 nt, Human
ucaguaguuugcauu

SEQ ID NO: 3211791 - RNA, 14 nt, Human
ucaguaguuugcau

SEQ ID NO: 3211792 - RNA, 19 nt, Human
ucagugccuuauggaacac

SEQ ID NO: 3211793 - RNA, 20 nt, Human
ucagugccuuauggaacacu

SEQ ID NO: 3211794 - RNA, 22 nt, Human
ucagugccuuauggaacacucu

SEQ ID NO: 3211795 - RNA, 23 nt, Human
ucagugccuuauggaacacucug

SEQ ID NO: 3211796 - RNA, 17 nt, Human
ucagugcuagcuuauuu

SEQ ID NO: 3211797 - RNA, 18 nt, Human
ucagugccuuauggaaca

SEQ ID NO: 3211798 - RNA, 13 nt, Human
ucaguggcagcug

SEQ ID NO: 3211799 - RNA, 17 nt, Human
ucaguuguuaguguguc

SEQ ID NO: 3211800 - RNA, 15 nt, Human
ucaguggcagcugcu

SEQ ID NO: 3211801 - RNA, 14 nt, Human
ucaguggcagcugc

SEQ ID NO: 3211802 - RNA, 21 nt, Human
ucagguggggucacucuggca

SEQ ID NO: 3211803 - RNA, 22 nt, Human
ucagguggggucacucuggcag

SEQ ID NO: 3211804 - RNA, 21 nt, Human
accgaaaacguggcugcuuca

SEQ ID NO: 3211805 - RNA, 22 nt, Human
accgaaaacguggcugcuucaa

SEQ ID NO: 3211806 - RNA, 18 nt, Human
ucaggugucccugcacuu

SEQ ID NO: 3211807 - RNA, 17 nt, Human
ucaggugucccugcacu

SEQ ID NO: 3211808 - RNA, 23 nt, Human
ucagguggggucacucuggcagc

SEQ ID NO: 3211809 - RNA, 15 nt, Human
ucaggugucccugca

SEQ ID NO: 3211810 - RNA, 20 nt, Human
accgaaaacguggcugcuuc

SEQ ID NO: 3211811 - RNA, 18 nt, Human
acccuuggagcucugagu

SEQ ID NO: 3211812 - RNA, 14 nt, Human
acccuuggagcucu

SEQ ID NO: 3211813 - RNA, 20 nt, Human
acccuugccgucuaccugag

SEQ ID NO: 3211814 - RNA, 18 nt, Human
acccugcuuggcccaggg

SEQ ID NO: 3211815 - RNA, 17 nt, Human
acccugcuuggcccagg

SEQ ID NO: 3211816 - RNA, 16 nt, Human
acccugcuuggcccag

SEQ ID NO: 3211817 - RNA, 15 nt, Human
acccugcuuggccca

SEQ ID NO: 3211818 - RNA, 14 nt, Human
acccugcugagucu

SEQ ID NO: 3211819 - RNA, 13 nt, Human
ucaguaauaacuc

SEQ ID NO: 3211820 - RNA, 13 nt, Human
ucaguaagccgug

SEQ ID NO: 3211821 - RNA, 15 nt, Human
ucaguacuuguuucu

SEQ ID NO: 3211822 - RNA, 17 nt, Human
ucaguagcuuaagaaaa

SEQ ID NO: 3211823 - RNA, 19 nt, Human
ucaguagcuuaagaaaaaa

SEQ ID NO: 3211824 - RNA, 22 nt, Human
ucaggugucccugcacuugcag

SEQ ID NO: 3211825 - RNA, 19 nt, Human
ucagguuaggcaguauaaa

SEQ ID NO: 3211826 - RNA, 23 nt, Human
ucagguuaggcaguauaaagaau

SEQ ID NO: 3211827 - RNA, 17 nt, Human
ucagguugacaggaggu

SEQ ID NO: 3211828 - RNA, 14 nt, Human
ucagguuuguuuug

SEQ ID NO: 3211829 - RNA, 15 nt, Human
ucagguuuguuuugu

SEQ ID NO: 3211830 - RNA, 22 nt, Human
ucagguugucugaagucacugc

SEQ ID NO: 3211831 - RNA, 18 nt, Human
ucaguaaaauuauacugu

SEQ ID NO: 3211832 - RNA, 20 nt, Human
ucaguaaaauuauacugugu

SEQ ID NO: 3211833 - RNA, 21 nt, Human
ucaguaaaauuauacugugug

SEQ ID NO: 3211834 - RNA, 23 nt, Human
ucaguaaaauuauacugugugug

SEQ ID NO: 3211835 - RNA, 17 nt, Human
ucaguaaaccugucuga

SEQ ID NO: 3211836 - RNA, 16 nt, Human
ucaguaaaccugucug

SEQ ID NO: 3211837 - RNA, 15 nt, Human
ucaguaaacacugug

SEQ ID NO: 3211838 - RNA, 14 nt, Human
ucaguaaacacugu

SEQ ID NO: 3211839 - RNA, 14 nt, Human
acccgccccugccc

SEQ ID NO: 3211840 - RNA, 19 nt, Human
acccgcuaagagggaggga

SEQ ID NO: 3211841 - RNA, 21 nt, Human
ucagguaaucgaccugccucg

SEQ ID NO: 3211842 - RNA, 21 nt, Human
ucagguagaggugcaugccua

SEQ ID NO: 3211843 - RNA, 19 nt, Human
ucaggguuggccccugccc

SEQ ID NO: 3211844 - RNA, 18 nt, Human
ucaggguuggccccugcc

SEQ ID NO: 3211845 - RNA, 19 nt, Human
ucagguaaucgaccugccu

SEQ ID NO: 3211846 - RNA, 20 nt, Human
ucagguaaucgaccugccuc

SEQ ID NO: 3211847 - RNA, 18 nt, Human
ucagguaaucgaccugcc

SEQ ID NO: 3211848 - RNA, 19 nt, Human
ucaggccaggcccucugcc

SEQ ID NO: 3211849 - RNA, 17 nt, Human
ucaggccaggcccucug

SEQ ID NO: 3211850 - RNA, 18 nt, Human
ucaggccaggcccucugc

SEQ ID NO: 3211851 - RNA, 12 nt, Human
ucaggggugugc

SEQ ID NO: 3211852 - RNA, 19 nt, Human
ucaggggugugcggccuuu

SEQ ID NO: 3211853 - RNA, 17 nt, Human
ucaggguuggccccugc

SEQ ID NO: 3211854 - RNA, 13 nt, Human
ucaggccagcugc

SEQ ID NO: 3211855 - RNA, 12 nt, Human
ucaggccaggcc

SEQ ID NO: 3211856 - RNA, 13 nt, Human
ucaggccacuuga

SEQ ID NO: 3211857 - RNA, 13 nt, Human
ucaggccaggccc

SEQ ID NO: 3211858 - RNA, 14 nt, Human
ucaggccaggcccu

SEQ ID NO: 3211859 - RNA, 15 nt, Human
ucaggccaggcccuc

SEQ ID NO: 3211860 - RNA, 16 nt, Human
ucaggccaggcccucu

SEQ ID NO: 3211861 - RNA, 12 nt, Human
acccccagccug

SEQ ID NO: 3211862 - RNA, 13 nt, Human
acccccagccugc

SEQ ID NO: 3211863 - RNA, 18 nt, Human
ucaggcaggugggaugga

SEQ ID NO: 3211864 - RNA, 17 nt, Human
ucaggcaggugggaugg

SEQ ID NO: 3211865 - RNA, 23 nt, Human
acccugaggcccagagggccugc

SEQ ID NO: 3211866 - RNA, 11 nt, Human
acccugagggc

SEQ ID NO: 3211867 - RNA, 22 nt, Human
acccugauuauauccaguaaca

SEQ ID NO: 3211868 - RNA, 14 nt, Human
acccugccaggcac

SEQ ID NO: 3211869 - RNA, 23 nt, Human
acccugccaggcacaggcagggc

SEQ ID NO: 3211870 - RNA, 22 nt, Human
acccugccaggcacaggcaggg

SEQ ID NO: 3211871 - RNA, 21 nt, Human
acccugccaggcacaggcagg

SEQ ID NO: 3211872 - RNA, 19 nt, Human
acccugccaggcacaggca

SEQ ID NO: 3211873 - RNA, 18 nt, Human
acccugccaggcacaggc

SEQ ID NO: 3211874 - RNA, 17 nt, Human
acccugccaggcacagg

SEQ ID NO: 3211875 - RNA, 16 nt, Human
acccugccaggcacag

SEQ ID NO: 3211876 - RNA, 15 nt, Human
acccugccaggcaca

SEQ ID NO: 3211877 - RNA, 11 nt, Human
acccugaggcc

SEQ ID NO: 3211878 - RNA, 17 nt, Human
acccugaggcccagagg

SEQ ID NO: 3211879 - RNA, 19 nt, Human
acccugaggcccagagggc

SEQ ID NO: 3211880 - RNA, 21 nt, Human
acccugaggcccagagggccu

SEQ ID NO: 3211881 - RNA, 21 nt, Human
acccugacaaauuuuaauuau

SEQ ID NO: 3211882 - RNA, 21 nt, Human
acccuccuucccacucuucuc

SEQ ID NO: 3211883 - RNA, 19 nt, Human
acccgggaagggggcuggg

SEQ ID NO: 3211884 - RNA, 20 nt, Human
acccgggaagggggcuggga

SEQ ID NO: 3211885 - RNA, 22 nt, Human
acccgggaagggggcugggaca

SEQ ID NO: 3211886 - RNA, 21 nt, Human
acccuccuuucaccacaugug

SEQ ID NO: 3211887 - RNA, 11 nt, Human
acccuccuucc

SEQ ID NO: 3211888 - RNA, 15 nt, Human
acccuccuucccacu

SEQ ID NO: 3211889 - RNA, 13 nt, Human
acccuccuuccca

SEQ ID NO: 3211890 - RNA, 16 nt, Human
acccucauuguguuuc

SEQ ID NO: 3211891 - RNA, 17 nt, Human
acccucauuguguuucu

SEQ ID NO: 3211892 - RNA, 21 nt, Human
acccuccccuucccagggcaa

SEQ ID NO: 3211893 - RNA, 20 nt, Human
acccuccccuucccagggca

SEQ ID NO: 3211894 - RNA, 19 nt, Human
acccuccccuucccagggc

SEQ ID NO: 3211895 - RNA, 17 nt, Human
acccuccccuucccagg

SEQ ID NO: 3211896 - RNA, 15 nt, Human
acccuccccuuccca

SEQ ID NO: 3211897 - RNA, 13 nt, Human
ucacuuaucaguu

SEQ ID NO: 3211898 - RNA, 15 nt, Human
ucacuguugcccagg

SEQ ID NO: 3211899 - RNA, 13 nt, Human
ucacuuaaaacac

SEQ ID NO: 3211900 - RNA, 15 nt, Human
ucacuuaaaacacgu

SEQ ID NO: 3211901 - RNA, 22 nt, Human
ucacuuaaguuaguuccacuga

SEQ ID NO: 3211902 - RNA, 14 nt, Human
ucacuguugcccag

SEQ ID NO: 3211903 - RNA, 18 nt, Human
ucacugcaaccuccgccu

SEQ ID NO: 3211904 - RNA, 21 nt, Human
ucacugcaaccuucgccaccu

SEQ ID NO: 3211905 - RNA, 18 nt, Human
ucacucuuggagccugca

SEQ ID NO: 3211906 - RNA, 17 nt, Human
ucacucuuggagccugc

SEQ ID NO: 3211907 - RNA, 16 nt, Human
ucacucuuggagccug

SEQ ID NO: 3211908 - RNA, 14 nt, Human
ucacucuuggagcc

SEQ ID NO: 3211909 - RNA, 23 nt, Human
ucacugagacagcccgggcucug

SEQ ID NO: 3211910 - RNA, 23 nt, Human
ucacugaaauaaaagcuauauaa

SEQ ID NO: 3211911 - RNA, 18 nt, Human
ucacugaaauaaaagcua

SEQ ID NO: 3211912 - RNA, 14 nt, Human
ucacugaaauaaaa

SEQ ID NO: 3211913 - RNA, 21 nt, Human
ucacuauguugcccaggcagg

SEQ ID NO: 3211914 - RNA, 20 nt, Human
ucacuauguugcccaggcag

SEQ ID NO: 3211915 - RNA, 22 nt, Human
ucaccagccccagugcccacag

SEQ ID NO: 3211916 - RNA, 17 nt, Human
ucacucagcaccacuca

SEQ ID NO: 3211917 - RNA, 14 nt, Human
ucacucauuaauua

SEQ ID NO: 3211918 - RNA, 14 nt, Human
ucacucagagcagu

SEQ ID NO: 3211919 - RNA, 13 nt, Human
ucacucagagcag

SEQ ID NO: 3211920 - RNA, 19 nt, Human
ucacucagaaguccagagu

SEQ ID NO: 3211921 - RNA, 16 nt, Human
ucacucagcaccacuc

SEQ ID NO: 3211922 - RNA, 15 nt, Human
ucacucagcaccacu

SEQ ID NO: 3211923 - RNA, 14 nt, Human
ucacucagcaccac

SEQ ID NO: 3211924 - RNA, 13 nt, Human
ucacucagcacca

SEQ ID NO: 3211925 - RNA, 18 nt, Human
ucacucagaaguccagag

SEQ ID NO: 3211926 - RNA, 21 nt, Human
acccacuggacucaccucccc

SEQ ID NO: 3211927 - RNA, 20 nt, Human
acccacugcuuuuggucugu

SEQ ID NO: 3211928 - RNA, 14 nt, Human
acccacuggacuca

SEQ ID NO: 3211929 - RNA, 17 nt, Human
acccacuggacucaccu

SEQ ID NO: 3211930 - RNA, 16 nt, Human
acccaaauguucauca

SEQ ID NO: 3211931 - RNA, 13 nt, Human
acccaaagcagug

SEQ ID NO: 3211932 - RNA, 11 nt, Human
acccaaagcag

SEQ ID NO: 3211933 - RNA, 20 nt, Human
accauucuccaccugccagg

SEQ ID NO: 3211934 - RNA, 21 nt, Human
accauucuccaccugccaggg

SEQ ID NO: 3211935 - RNA, 19 nt, Human
accauucuccaccugccag

SEQ ID NO: 3211936 - RNA, 18 nt, Human
accauguuggccaggcug

SEQ ID NO: 3211937 - RNA, 18 nt, Human
accauucuccaccugcca

SEQ ID NO: 3211938 - RNA, 20 nt, Human
accauguuggccaggcugcu

SEQ ID NO: 3211939 - RNA, 22 nt, Human
accauuuugcugucccuuuucc

SEQ ID NO: 3211940 - RNA, 23 nt, Human
accauuuugcugucccuuuuccu

SEQ ID NO: 3211941 - RNA, 21 nt, Human
accauuuugggguacccacug

SEQ ID NO: 3211942 - RNA, 19 nt, Human
accaggguuggcaccuucc

SEQ ID NO: 3211943 - RNA, 21 nt, Human
accaggguuggcaccuucccc

SEQ ID NO: 3211944 - RNA, 14 nt, Human
accaggguuuaguu

SEQ ID NO: 3211945 - RNA, 17 nt, Human
accagguccagaugugc

SEQ ID NO: 3211946 - RNA, 15 nt, Human
ucacuucuucugucc

SEQ ID NO: 3211947 - RNA, 13 nt, Human
ucacuucuucugu

SEQ ID NO: 3211948 - RNA, 19 nt, Human
ucacuucuuucccuuccuc

SEQ ID NO: 3211949 - RNA, 14 nt, Human
ucacuucuuucccu

SEQ ID NO: 3211950 - RNA, 13 nt, Human
ucacuucuuuccc

SEQ ID NO: 3211951 - RNA, 21 nt, Human
ucacuucuucuguccaagcag

SEQ ID NO: 3211952 - RNA, 22 nt, Human
ucacuucuuucccuuccuccau

SEQ ID NO: 3211953 - RNA, 20 nt, Human
ucacuucuuucccuuccucc

SEQ ID NO: 3211954 - RNA, 19 nt, Human
accagguuuuguuccgccc

SEQ ID NO: 3211955 - RNA, 18 nt, Human
accaugcauuuuaccauc

SEQ ID NO: 3211956 - RNA, 22 nt, Human
accaugcucaaugaaaagguga

SEQ ID NO: 3211957 - RNA, 19 nt, Human
accaugucguaguuacucu

SEQ ID NO: 3211958 - RNA, 23 nt, Human
accaugcugucuggcacagccug

SEQ ID NO: 3211959 - RNA, 20 nt, Human
accaugcugucuggcacagc

SEQ ID NO: 3211960 - RNA, 18 nt, Human
accaugcugucuggcaca

SEQ ID NO: 3211961 - RNA, 17 nt, Human
accaugcugucuggcac

SEQ ID NO: 3211962 - RNA, 22 nt, Human
accaugcugucuggcacagccu

SEQ ID NO: 3211963 - RNA, 21 nt, Human
accaugcugucuggcacagcc

SEQ ID NO: 3211964 - RNA, 15 nt, Human
ucagaaucagaagau

SEQ ID NO: 3211965 - RNA, 23 nt, Human
ucagaaguuucugccgcagcccu

SEQ ID NO: 3211966 - RNA, 22 nt, Human
ucagagacuccugcaggcagcc

SEQ ID NO: 3211967 - RNA, 12 nt, Human
ucagaauucuca

SEQ ID NO: 3211968 - RNA, 10 nt, Human
ucagaauucu

SEQ ID NO: 3211969 - RNA, 20 nt, Human
ucagaauucucagaaucuca

SEQ ID NO: 3211970 - RNA, 21 nt, Human
ucagagcccauggcuucccug

SEQ ID NO: 3211971 - RNA, 21 nt, Human
ucagagccaccccuaaagaga

SEQ ID NO: 3211972 - RNA, 20 nt, Human
ucagagaugcauuuggaaca

SEQ ID NO: 3211973 - RNA, 19 nt, Human
ucagagauguccauuuuua

SEQ ID NO: 3211974 - RNA, 23 nt, Human
ucagagauguccauuuuuacaag

SEQ ID NO: 3211975 - RNA, 23 nt, Human
ucagagacuccugcaggcagcca

SEQ ID NO: 3211976 - RNA, 21 nt, Human
ucagaugcugugcaaauguua

SEQ ID NO: 3211977 - RNA, 19 nt, Human
ucagaugcuugcggcaaaa

SEQ ID NO: 3211978 - RNA, 22 nt, Human
ucagaugcuugcggcaaaagga

SEQ ID NO: 3211979 - RNA, 11 nt, Human
acccaggugcu

SEQ ID NO: 3211980 - RNA, 13 nt, Human
accccagguuucu

SEQ ID NO: 3211981 - RNA, 14 nt, Human
ucagauugcuuuug

SEQ ID NO: 3211982 - RNA, 18 nt, Human
ucagauuggacauaacug

SEQ ID NO: 3211983 - RNA, 18 nt, Human
ucagauuucucuuugaaa

SEQ ID NO: 3211984 - RNA, 16 nt, Human
ucagauuucucuuuga

SEQ ID NO: 3211985 - RNA, 15 nt, Human
ucagauuucucuuug

SEQ ID NO: 3211986 - RNA, 19 nt, Human
ucagauuucucuuugaaac

SEQ ID NO: 3211987 - RNA, 15 nt, Human
acccaggagccccga

SEQ ID NO: 3211988 - RNA, 13 nt, Human
acccaggagcccc

SEQ ID NO: 3211989 - RNA, 11 nt, Human
acccagccugg

SEQ ID NO: 3211990 - RNA, 17 nt, Human
acccagcgagcccuggu

SEQ ID NO: 3211991 - RNA, 16 nt, Human
acccagcgagcccugg

SEQ ID NO: 3211992 - RNA, 13 nt, Human
acccagcgagccc

SEQ ID NO: 3211993 - RNA, 16 nt, Human
uccauccuccuccuuc

SEQ ID NO: 3211994 - RNA, 20 nt, Human
uccagugaggcucugcccuu

SEQ ID NO: 3211995 - RNA, 12 nt, Human
uccagugacuuu

SEQ ID NO: 3211996 - RNA, 17 nt, Human
uccagugaggcucugcc

SEQ ID NO: 3211997 - RNA, 18 nt, Human
uccagugaggcucugccc

SEQ ID NO: 3211998 - RNA, 19 nt, Human
uccagugaggcucugcccu

SEQ ID NO: 3211999 - RNA, 14 nt, Human
acggcucacugcag

SEQ ID NO: 3212000 - RNA, 13 nt, Human
acggccuccuuuc

SEQ ID NO: 3212001 - RNA, 20 nt, Human
acggccccagcuucucagcu

SEQ ID NO: 3212002 - RNA, 18 nt, Human
acggccccagcuucucag

SEQ ID NO: 3212003 - RNA, 19 nt, Human
uccagugaaaauaagccau

SEQ ID NO: 3212004 - RNA, 17 nt, Human
uccaucugauuccagca

SEQ ID NO: 3212005 - RNA, 16 nt, Human
uccaucugauuccagc

SEQ ID NO: 3212006 - RNA, 18 nt, Human
uccauccuccuccuuccu

SEQ ID NO: 3212007 - RNA, 17 nt, Human
uccauccuccuccuucc

SEQ ID NO: 3212008 - RNA, 21 nt, Human
uccaucugguuuucucuccag

SEQ ID NO: 3212009 - RNA, 17 nt, Human
uccaucugguuuucucu

SEQ ID NO: 3212010 - RNA, 22 nt, Human
uccaugaagauguagaggagaa

SEQ ID NO: 3212011 - RNA, 23 nt, Human
uccaugacaauaugcccuuucug

SEQ ID NO: 3212012 - RNA, 19 nt, Human
uccaugaauguuccugccu

SEQ ID NO: 3212013 - RNA, 15 nt, Human
uccaugaauguuccu

SEQ ID NO: 3212014 - RNA, 22 nt, Human
uccaugaguuaucaugaauuuu

SEQ ID NO: 3212015 - RNA, 15 nt, Human
uccaugaguccccug

SEQ ID NO: 3212016 - RNA, 16 nt, Human
uccaugaguccccugu

SEQ ID NO: 3212017 - RNA, 17 nt, Human
uccaugaguccccuguu

SEQ ID NO: 3212018 - RNA, 14 nt, Human
ucccacccguggug

SEQ ID NO: 3212019 - RNA, 11 nt, Human
ucccaccccac

SEQ ID NO: 3212020 - RNA, 14 nt, Human
ucccaccccacaca

SEQ ID NO: 3212021 - RNA, 15 nt, Human
ucccacccagccugg

SEQ ID NO: 3212022 - RNA, 19 nt, Human
ucccaccaacccucagagc

SEQ ID NO: 3212023 - RNA, 16 nt, Human
ucccaccacucccugg

SEQ ID NO: 3212024 - RNA, 15 nt, Human
ucccaccacucccug

SEQ ID NO: 3212025 - RNA, 16 nt, Human
ucccaaagugcuggga

SEQ ID NO: 3212026 - RNA, 20 nt, Human
ucccaaagugcugggauuac

SEQ ID NO: 3212027 - RNA, 15 nt, Human
ucccaaagugcuggg

SEQ ID NO: 3212028 - RNA, 15 nt, Human
uccauuuuuacaagu

SEQ ID NO: 3212029 - RNA, 22 nt, Human
uccauuuuuacaaguuauagua

SEQ ID NO: 3212030 - RNA, 24 nt, Human
uccauuuuuacaaguuauaguacu

SEQ ID NO: 3212031 - RNA, 14 nt, Human
ucccaaagugcugg

SEQ ID NO: 3212032 - RNA, 20 nt, Human
uccauuuuggugucuuucuc

SEQ ID NO: 3212033 - RNA, 13 nt, Human
uccauuuuauaaa

SEQ ID NO: 3212034 - RNA, 14 nt, Human
ucccacaaaggaga

SEQ ID NO: 3212035 - RNA, 22 nt, Human
uccauuuuggugucuuucucuu

SEQ ID NO: 3212036 - RNA, 17 nt, Human
ucccacaggcccuuccu

SEQ ID NO: 3212037 - RNA, 15 nt, Human
ucccacaggcccuuc

SEQ ID NO: 3212038 - RNA, 22 nt, Human
ucccacaggcccuuccucucca

SEQ ID NO: 3212039 - RNA, 21 nt, Human
ucccacaggcccuuccucucc

SEQ ID NO: 3212040 - RNA, 21 nt, Human
ucccacagugcugggauuaca

SEQ ID NO: 3212041 - RNA, 14 nt, Human
uccaggcugggaga

SEQ ID NO: 3212042 - RNA, 17 nt, Human
uccaggcugggagagcc

SEQ ID NO: 3212043 - RNA, 18 nt, Human
uccaggcugggagagccu

SEQ ID NO: 3212044 - RNA, 22 nt, Human
uccaggcuccuuuagcgcccag

SEQ ID NO: 3212045 - RNA, 14 nt, Human
acgaucacaaauga

SEQ ID NO: 3212046 - RNA, 18 nt, Human
acgccaggggaaaaucag

SEQ ID NO: 3212047 - RNA, 15 nt, Human
acgacugcccggcag

SEQ ID NO: 3212048 - RNA, 22 nt, Human
acgacaguacuuucaaugaaca

SEQ ID NO: 3212049 - RNA, 21 nt, Human
acgacucuuuuccaaacacag

SEQ ID NO: 3212050 - RNA, 23 nt, Human
acgacucuuuuccaaacacaggc

SEQ ID NO: 3212051 - RNA, 23 nt, Human
acgccaggggaaaaucagccugc

SEQ ID NO: 3212052 - RNA, 11 nt, Human
acgccauccca

SEQ ID NO: 3212053 - RNA, 14 nt, Human
acgccaucccagcc

SEQ ID NO: 3212054 - RNA, 15 nt, Human
acgccaucccagccc

SEQ ID NO: 3212055 - RNA, 16 nt, Human
acgccaucccagcccc

SEQ ID NO: 3212056 - RNA, 17 nt, Human
acgccaucccagcccca

SEQ ID NO: 3212057 - RNA, 18 nt, Human
acgccaucccagccccaa

SEQ ID NO: 3212058 - RNA, 17 nt, Human
acgccagggaccccaga

SEQ ID NO: 3212059 - RNA, 11 nt, Human
acgccagggac

SEQ ID NO: 3212060 - RNA, 15 nt, Human
acgaucacaaaugac

SEQ ID NO: 3212061 - RNA, 16 nt, Human
acgaucacaaaugacu

SEQ ID NO: 3212062 - RNA, 17 nt, Human
acgaucacaaaugacuu

SEQ ID NO: 3212063 - RNA, 18 nt, Human
acgaucacaaaugacuuu

SEQ ID NO: 3212064 - RNA, 17 nt, Human
acgcucucuggccuucg

SEQ ID NO: 3212065 - RNA, 11 nt, Human
acgcucugcug

SEQ ID NO: 3212066 - RNA, 16 nt, Human
acgcugacuacagggc

SEQ ID NO: 3212067 - RNA, 18 nt, Human
acgcugacuacagggccg

SEQ ID NO: 3212068 - RNA, 17 nt, Human
acgcugacuacagggcc

SEQ ID NO: 3212069 - RNA, 19 nt, Human
acggagucccaccuuggcu

SEQ ID NO: 3212070 - RNA, 20 nt, Human
acggagcggauugcaaagca

SEQ ID NO: 3212071 - RNA, 19 nt, Human
acggagcggauugcaaagc

SEQ ID NO: 3212072 - RNA, 21 nt, Human
acggagcggauugcaaagcaa

SEQ ID NO: 3212073 - RNA, 20 nt, Human
acgcugcucugccccagcuu

SEQ ID NO: 3212074 - RNA, 19 nt, Human
acgcugcucugccccagcu

SEQ ID NO: 3212075 - RNA, 17 nt, Human
acgcugcucugccccag

SEQ ID NO: 3212076 - RNA, 16 nt, Human
acgcugcucugcccca

SEQ ID NO: 3212077 - RNA, 15 nt, Human
acgcugcucugcccc

SEQ ID NO: 3212078 - RNA, 14 nt, Human
acgcugcucugccc

SEQ ID NO: 3212079 - RNA, 13 nt, Human
acgcugcucugcc

SEQ ID NO: 3212080 - RNA, 18 nt, Human
acgcugccuucgguaccc

SEQ ID NO: 3212081 - RNA, 16 nt, Human
acggccaggccagagg

SEQ ID NO: 3212082 - RNA, 13 nt, Human
acggccaggccag

SEQ ID NO: 3212083 - RNA, 22 nt, Human
acggcacugagagagcgcagcc

SEQ ID NO: 3212084 - RNA, 13 nt, Human
acggccccagcuu

SEQ ID NO: 3212085 - RNA, 14 nt, Human
acgcucucuggccu

SEQ ID NO: 3212086 - RNA, 15 nt, Human
acgcucucuggccuu

SEQ ID NO: 3212087 - RNA, 16 nt, Human
acgcucucuggccuuc

SEQ ID NO: 3212088 - RNA, 13 nt, Human
acgcuacccggga

SEQ ID NO: 3212089 - RNA, 17 nt, Human
acgcuacccgggaaggg

SEQ ID NO: 3212090 - RNA, 14 nt, Human
acgcccccacuggu

SEQ ID NO: 3212091 - RNA, 18 nt, Human
acgcccacuucccugggu

SEQ ID NO: 3212092 - RNA, 15 nt, Human
acgcccacuucccug

SEQ ID NO: 3212093 - RNA, 13 nt, Human
acgcccacuuccc

SEQ ID NO: 3212094 - RNA, 18 nt, Human
acgccagggaccccagaa

SEQ ID NO: 3212095 - RNA, 23 nt, Human
acgcgugcacacaccagagccca

SEQ ID NO: 3212096 - RNA, 20 nt, Human
acgcgugcacacaccagagc

SEQ ID NO: 3212097 - RNA, 16 nt, Human
accuuccaagagccug

SEQ ID NO: 3212098 - RNA, 20 nt, Human
accuucccccucccccagcc

SEQ ID NO: 3212099 - RNA, 17 nt, Human
accuucccccuccccca

SEQ ID NO: 3212100 - RNA, 17 nt, Human
accuucccaugcccugg

SEQ ID NO: 3212101 - RNA, 15 nt, Human
accuucgccaccugg

SEQ ID NO: 3212102 - RNA, 17 nt, Human
accuucgccaccugggu

SEQ ID NO: 3212103 - RNA, 15 nt, Human
accuuccaagagccu

SEQ ID NO: 3212104 - RNA, 15 nt, Human
accuucauuuaaaaa

SEQ ID NO: 3212105 - RNA, 15 nt, Human
accuucauaagaucu

SEQ ID NO: 3212106 - RNA, 19 nt, Human
accuucaguuuuuguguuu

SEQ ID NO: 3212107 - RNA, 22 nt, Human
accuucacucuaagauguuaua

SEQ ID NO: 3212108 - RNA, 21 nt, Human
accuucacucuaagauguuau

SEQ ID NO: 3212109 - RNA, 20 nt, Human
accuucacucuaagauguua

SEQ ID NO: 3212110 - RNA, 14 nt, Human
accuucacucuaag

SEQ ID NO: 3212111 - RNA, 19 nt, Human
accuucacucuaagauguu

SEQ ID NO: 3212112 - RNA, 18 nt, Human
accuucacucuaagaugu

SEQ ID NO: 3212113 - RNA, 20 nt, Human
accuggggcugcugugaagc

SEQ ID NO: 3212114 - RNA, 21 nt, Human
accugggcucucgcggccucu

SEQ ID NO: 3212115 - RNA, 19 nt, Human
accuggggcugcugugaag

SEQ ID NO: 3212116 - RNA, 17 nt, Human
uccacgagagcgcagca

SEQ ID NO: 3212117 - RNA, 12 nt, Human
accuugccccaa

SEQ ID NO: 3212118 - RNA, 14 nt, Human
accuugccccaacc

SEQ ID NO: 3212119 - RNA, 18 nt, Human
accuugccccaacccuuc

SEQ ID NO: 3212120 - RNA, 20 nt, Human
accuugccccaacccuucuu

SEQ ID NO: 3212121 - RNA, 21 nt, Human
accuugccccaacccuucuuc

SEQ ID NO: 3212122 - RNA, 22 nt, Human
accuugccccaacccuucuuca

SEQ ID NO: 3212123 - RNA, 14 nt, Human
accuuuguccccac

SEQ ID NO: 3212124 - RNA, 15 nt, Human
accuuuguccccacc

SEQ ID NO: 3212125 - RNA, 16 nt, Human
accuuuguccccaccg

SEQ ID NO: 3212126 - RNA, 13 nt, Human
accuuugucccca

SEQ ID NO: 3212127 - RNA, 14 nt, Human
accuugcacacauc

SEQ ID NO: 3212128 - RNA, 21 nt, Human
accuugcauuuuagcuaauuu

SEQ ID NO: 3212129 - RNA, 22 nt, Human
accuugcacacaucaucuguaa

SEQ ID NO: 3212130 - RNA, 16 nt, Human
accuugcacacaucau

SEQ ID NO: 3212131 - RNA, 16 nt, Human
accuugacagggcaca

SEQ ID NO: 3212132 - RNA, 22 nt, Human
accuucuccuucaccuuugucc

SEQ ID NO: 3212133 - RNA, 14 nt, Human
accuucuccuucac

SEQ ID NO: 3212134 - RNA, 13 nt, Human
accuucugacuuu

SEQ ID NO: 3212135 - RNA, 20 nt, Human
accuggcuuuucuuucuacc

SEQ ID NO: 3212136 - RNA, 14 nt, Human
accuggcuuauuua

SEQ ID NO: 3212137 - RNA, 17 nt, Human
accuggcuuauuuaaua

SEQ ID NO: 3212138 - RNA, 15 nt, Human
accugggacagggag

SEQ ID NO: 3212139 - RNA, 22 nt, Human
accugggaaagagauuuaaacu

SEQ ID NO: 3212140 - RNA, 16 nt, Human
accugggacagggagc

SEQ ID NO: 3212141 - RNA, 17 nt, Human
accugggauuauauauc

SEQ ID NO: 3212142 - RNA, 12 nt, Human
accuggccucug

SEQ ID NO: 3212143 - RNA, 13 nt, Human
accuggccucugc

SEQ ID NO: 3212144 - RNA, 23 nt, Human
accuggcccucucugaaggaggc

SEQ ID NO: 3212145 - RNA, 15 nt, Human
accuggcccucucug

SEQ ID NO: 3212146 - RNA, 19 nt, Human
accuggcccucucugaagg

SEQ ID NO: 3212147 - RNA, 18 nt, Human
accuggcccucucugaag

SEQ ID NO: 3212148 - RNA, 17 nt, Human
uccacccaggagccccg

SEQ ID NO: 3212149 - RNA, 13 nt, Human
uccacccaccuca

SEQ ID NO: 3212150 - RNA, 18 nt, Human
uccaccaucaagccacca

SEQ ID NO: 3212151 - RNA, 12 nt, Human
uccacccaccuc

SEQ ID NO: 3212152 - RNA, 20 nt, Human
uccacccaggagccccgagg

SEQ ID NO: 3212153 - RNA, 15 nt, Human
uccaaaugcagcuuu

SEQ ID NO: 3212154 - RNA, 19 nt, Human
uccaaaugcagcuuuaaaa

SEQ ID NO: 3212155 - RNA, 15 nt, Human
uccaaauuauuucuu

SEQ ID NO: 3212156 - RNA, 17 nt, Human
uccaaauuauuucuuaa

SEQ ID NO: 3212157 - RNA, 17 nt, Human
ucauuuuuuuuaauuga

SEQ ID NO: 3212158 - RNA, 23 nt, Human
uccaaauuguuuaaauucacaau

SEQ ID NO: 3212159 - RNA, 21 nt, Human
uccaaggaagggauguauuug

SEQ ID NO: 3212160 - RNA, 23 nt, Human
uccaaggaagggauguauuugua

SEQ ID NO: 3212161 - RNA, 16 nt, Human
uccaaggacagaaggc

SEQ ID NO: 3212162 - RNA, 23 nt, Human
uccaaggacagaaggcuccugcc

SEQ ID NO: 3212163 - RNA, 18 nt, Human
uccaaggccaggccuugg

SEQ ID NO: 3212164 - RNA, 22 nt, Human
uccaaugccucuugucuuccua

SEQ ID NO: 3212165 - RNA, 21 nt, Human
uccaaugccucuugucuuccu

SEQ ID NO: 3212166 - RNA, 17 nt, Human
uccaaugccucuugucu

SEQ ID NO: 3212167 - RNA, 20 nt, Human
uccaagggguccccuccagg

SEQ ID NO: 3212168 - RNA, 14 nt, Human
uccaauguuucaag

SEQ ID NO: 3212169 - RNA, 15 nt, Human
uccaauguuucaagc

SEQ ID NO: 3212170 - RNA, 14 nt, Human
uccacauguuacug

SEQ ID NO: 3212171 - RNA, 18 nt, Human
ucauuuuuuuuuuaucag

SEQ ID NO: 3212172 - RNA, 18 nt, Human
uccaaaaaaaaaaaaaau

SEQ ID NO: 3212173 - RNA, 19 nt, Human
uccaaaaaaaaaaaaaaua

SEQ ID NO: 3212174 - RNA, 21 nt, Human
uccaaaaaaaaaaaaaauaca

SEQ ID NO: 3212175 - RNA, 22 nt, Human
uccaaaaaaaaaaaaaauacaa

SEQ ID NO: 3212176 - RNA, 23 nt, Human
uccaaaaaaaaaaaaaauacaau

SEQ ID NO: 3212177 - RNA, 14 nt, Human
ucauuuuugaauac

SEQ ID NO: 3212178 - RNA, 21 nt, Human
ucauuuuugaaacugcauuug

SEQ ID NO: 3212179 - RNA, 22 nt, Human
ucauuuuugaaacugcauuugu

SEQ ID NO: 3212180 - RNA, 19 nt, Human
ucauuuuuaguagagacag

SEQ ID NO: 3212181 - RNA, 12 nt, Human
ucauuuugcuuu

SEQ ID NO: 3212182 - RNA, 13 nt, Human
ucauuuugcuuua

SEQ ID NO: 3212183 - RNA, 19 nt, Human
ucauuuuguguugaagagc

SEQ ID NO: 3212184 - RNA, 17 nt, Human
ucauuuuguguugaaga

SEQ ID NO: 3212185 - RNA, 14 nt, Human
ucauuugucacaca

SEQ ID NO: 3212186 - RNA, 16 nt, Human
ucauuugcuuuggaag

SEQ ID NO: 3212187 - RNA, 15 nt, Human
ucauuugcuuuggaa

SEQ ID NO: 3212188 - RNA, 16 nt, Human
ucauuugucacacacu

SEQ ID NO: 3212189 - RNA, 16 nt, Human
ucauuuguaugucaaa

SEQ ID NO: 3212190 - RNA, 17 nt, Human
ucauuuguaugucaaag

SEQ ID NO: 3212191 - RNA, 13 nt, Human
ucauuuucucuuu

SEQ ID NO: 3212192 - RNA, 21 nt, Human
accugcuucucugcccagcuu

SEQ ID NO: 3212193 - RNA, 15 nt, Human
accugcuucucugcc

SEQ ID NO: 3212194 - RNA, 14 nt, Human
accugcuucucugc

SEQ ID NO: 3212195 - RNA, 12 nt, Human
accugcucuccu

SEQ ID NO: 3212196 - RNA, 23 nt, Human
accugccuguugggccaggagcc

SEQ ID NO: 3212197 - RNA, 14 nt, Human
accugcgcuucacu

SEQ ID NO: 3212198 - RNA, 13 nt, Human
accugcgcuucac

SEQ ID NO: 3212199 - RNA, 21 nt, Human
accugcgucucauacucaccu

SEQ ID NO: 3212200 - RNA, 16 nt, Human
accugcggugcuaucu

SEQ ID NO: 3212201 - RNA, 12 nt, Human
ucauaaugacuu

SEQ ID NO: 3212202 - RNA, 16 nt, Human
ucauaaguauuuggaa

SEQ ID NO: 3212203 - RNA, 19 nt, Human
accugaauuuuggcugugu

SEQ ID NO: 3212204 - RNA, 18 nt, Human
accugaagacucauucuu

SEQ ID NO: 3212205 - RNA, 17 nt, Human
accugaccccugacccc

SEQ ID NO: 3212206 - RNA, 17 nt, Human
accugacagccccuccc

SEQ ID NO: 3212207 - RNA, 12 nt, Human
accugagcccca

SEQ ID NO: 3212208 - RNA, 17 nt, Human
accugagccccaaaagg

SEQ ID NO: 3212209 - RNA, 23 nt, Human
accugaggcccuucucuccagcc

SEQ ID NO: 3212210 - RNA, 14 nt, Human
accugaggggccuc

SEQ ID NO: 3212211 - RNA, 15 nt, Human
accugccaggaagcc

SEQ ID NO: 3212212 - RNA, 18 nt, Human
accugccaggaagccagc

SEQ ID NO: 3212213 - RNA, 17 nt, Human
accugccucggccuccc

SEQ ID NO: 3212214 - RNA, 16 nt, Human
accugccaggaagcca

SEQ ID NO: 3212215 - RNA, 17 nt, Human
accugccaggaagccag

SEQ ID NO: 3212216 - RNA, 22 nt, Human
accugcaaacgcuucaguuguu

SEQ ID NO: 3212217 - RNA, 17 nt, Human
acugaaaggcuuuucaa

SEQ ID NO: 3212218 - RNA, 19 nt, Human
acugaaagguagacuuuua

SEQ ID NO: 3212219 - RNA, 14 nt, Human
acugaaaagaagga

SEQ ID NO: 3212220 - RNA, 16 nt, Human
acugaaaagaaggaaa

SEQ ID NO: 3212221 - RNA, 17 nt, Human
acugaaaagaaggaaag

SEQ ID NO: 3212222 - RNA, 19 nt, Human
acugaaaagaaggaaagau

SEQ ID NO: 3212223 - RNA, 19 nt, Human
acucuuucuauuguuucuu

SEQ ID NO: 3212224 - RNA, 18 nt, Human
uccugacgagauaagcag

SEQ ID NO: 3212225 - RNA, 15 nt, Human
uccugaagaauugaa

SEQ ID NO: 3212226 - RNA, 14 nt, Human
uccucugaggcuga

SEQ ID NO: 3212227 - RNA, 19 nt, Human
uccucuugccacugccucu

SEQ ID NO: 3212228 - RNA, 17 nt, Human
uccucuugcauuucacu

SEQ ID NO: 3212229 - RNA, 20 nt, Human
uccucugcucccccuuuucc

SEQ ID NO: 3212230 - RNA, 18 nt, Human
uccucugcuaaauugaug

SEQ ID NO: 3212231 - RNA, 15 nt, Human
uccucugcuaaauug

SEQ ID NO: 3212232 - RNA, 19 nt, Human
uccucugcucccccuuuuc

SEQ ID NO: 3212233 - RNA, 12 nt, Human
uccucugcuccc

SEQ ID NO: 3212234 - RNA, 23 nt, Human
uccucugcuaaauugauguugau

SEQ ID NO: 3212235 - RNA, 19 nt, Human
uccucugcuaaauugaugu

SEQ ID NO: 3212236 - RNA, 21 nt, Human
uccucuuuugugcugcuucuc

SEQ ID NO: 3212237 - RNA, 18 nt, Human
uccucuuuuguuguuucu

SEQ ID NO: 3212238 - RNA, 20 nt, Human
uccucuuuuguuguuucuua

SEQ ID NO: 3212239 - RNA, 22 nt, Human
uccucuuuuguuguuucuuaau

SEQ ID NO: 3212240 - RNA, 23 nt, Human
uccucuuuuguuguuucuuaauu

SEQ ID NO: 3212241 - RNA, 23 nt, Human
uccucuuuggucuacacugugcu

SEQ ID NO: 3212242 - RNA, 14 nt, Human
uccucccaccucag

SEQ ID NO: 3212243 - RNA, 13 nt, Human
uccucccaccuca

SEQ ID NO: 3212244 - RNA, 20 nt, Human
uccucccaccucagccuccc

SEQ ID NO: 3212245 - RNA, 18 nt, Human
uccucccaccucagccuc

SEQ ID NO: 3212246 - RNA, 16 nt, Human
uccucccaccucagcc

SEQ ID NO: 3212247 - RNA, 15 nt, Human
uccucccaccucagc

SEQ ID NO: 3212248 - RNA, 16 nt, Human
uccucccacugcccac

SEQ ID NO: 3212249 - RNA, 21 nt, Human
uccucccaccucagccucccg

SEQ ID NO: 3212250 - RNA, 16 nt, Human
uccucuccacugccuu

SEQ ID NO: 3212251 - RNA, 18 nt, Human
uccucuccacugccuucg

SEQ ID NO: 3212252 - RNA, 17 nt, Human
uccucuccacugccuuc

SEQ ID NO: 3212253 - RNA, 12 nt, Human
uccucucugccc

SEQ ID NO: 3212254 - RNA, 13 nt, Human
uccucucugcccu

SEQ ID NO: 3212255 - RNA, 14 nt, Human
uccucucugcccua

SEQ ID NO: 3212256 - RNA, 15 nt, Human
uccucucugcccuaa

SEQ ID NO: 3212257 - RNA, 12 nt, Human
uccucugagccu

SEQ ID NO: 3212258 - RNA, 13 nt, Human
uccucugagccuu

SEQ ID NO: 3212259 - RNA, 17 nt, Human
uccucugagccuuggga

SEQ ID NO: 3212260 - RNA, 21 nt, Human
uccucugaggaugauguacuu

SEQ ID NO: 3212261 - RNA, 17 nt, Human
acucuucucauuacuug

SEQ ID NO: 3212262 - RNA, 18 nt, Human
acucuucucauuacuugu

SEQ ID NO: 3212263 - RNA, 24 nt, Human
acucuucucauuacuuguugccua

SEQ ID NO: 3212264 - RNA, 13 nt, Human
acucuucucucug

SEQ ID NO: 3212265 - RNA, 12 nt, Human
acucuucucauu

SEQ ID NO: 3212266 - RNA, 23 nt, Human
acucuucucaucuugacagagcc

SEQ ID NO: 3212267 - RNA, 19 nt, Human
acucuucucucugcucuga

SEQ ID NO: 3212268 - RNA, 18 nt, Human
acucuucucucugcucug

SEQ ID NO: 3212269 - RNA, 17 nt, Human
acucuucucucugcucu

SEQ ID NO: 3212270 - RNA, 16 nt, Human
acucuucucucugcuc

SEQ ID NO: 3212271 - RNA, 15 nt, Human
acucuucucucugcu

SEQ ID NO: 3212272 - RNA, 14 nt, Human
acucuucucucugc

SEQ ID NO: 3212273 - RNA, 23 nt, Human
acucuucccugaacuuccugcuu

SEQ ID NO: 3212274 - RNA, 20 nt, Human
acucuuccuccaaggacaga

SEQ ID NO: 3212275 - RNA, 17 nt, Human
acucuuccuccaaggac

SEQ ID NO: 3212276 - RNA, 20 nt, Human
acucuucaguuaagccuuug

SEQ ID NO: 3212277 - RNA, 21 nt, Human
acucuucaguuaagccuuugg

SEQ ID NO: 3212278 - RNA, 19 nt, Human
acucuggcagcucagagag

SEQ ID NO: 3212279 - RNA, 19 nt, Human
acucuuauugcccacgcug

SEQ ID NO: 3212280 - RNA, 21 nt, Human
acucuuauugcccacgcugga

SEQ ID NO: 3212281 - RNA, 16 nt, Human
acucuggcagcucaga

SEQ ID NO: 3212282 - RNA, 17 nt, Human
acucuggcagcucagag

SEQ ID NO: 3212283 - RNA, 13 nt, Human
acucugcugaggg

SEQ ID NO: 3212284 - RNA, 14 nt, Human
acucugcugagggu

SEQ ID NO: 3212285 - RNA, 15 nt, Human
acucugcugaggguc

SEQ ID NO: 3212286 - RNA, 20 nt, Human
acucugcugaggguccagaa

SEQ ID NO: 3212287 - RNA, 14 nt, Human
acucugcucuugca

SEQ ID NO: 3212288 - RNA, 14 nt, Human
acucguauaugucu

SEQ ID NO: 3212289 - RNA, 15 nt, Human
acucucagaggcccc

SEQ ID NO: 3212290 - RNA, 14 nt, Human
acucucagaggccc

SEQ ID NO: 3212291 - RNA, 14 nt, Human
acucuauuuuuaca

SEQ ID NO: 3212292 - RNA, 16 nt, Human
acucuauuuuuacauu

SEQ ID NO: 3212293 - RNA, 20 nt, Human
acucuauuuuuacauuuaaa

SEQ ID NO: 3212294 - RNA, 15 nt, Human
acucgugagcgccag

SEQ ID NO: 3212295 - RNA, 15 nt, Human
acucgcgacaaugca

SEQ ID NO: 3212296 - RNA, 16 nt, Human
acucgcgacaaugcaa

SEQ ID NO: 3212297 - RNA, 18 nt, Human
acucugacaacagacuuc

SEQ ID NO: 3212298 - RNA, 20 nt, Human
acucugacaacagacuucug

SEQ ID NO: 3212299 - RNA, 22 nt, Human
acucugacaacagacuucugaa

SEQ ID NO: 3212300 - RNA, 23 nt, Human
acucugacaacagacuucugaaa

SEQ ID NO: 3212301 - RNA, 16 nt, Human
acucugccugcccuuu

SEQ ID NO: 3212302 - RNA, 14 nt, Human
acucugccugcccu

SEQ ID NO: 3212303 - RNA, 16 nt, Human
acucugcuaccuugcc

SEQ ID NO: 3212304 - RNA, 19 nt, Human
acucugcuaccuugcccca

SEQ ID NO: 3212305 - RNA, 16 nt, Human
acucugccuccucuuc

SEQ ID NO: 3212306 - RNA, 17 nt, Human
acucucagaggccccaa

SEQ ID NO: 3212307 - RNA, 16 nt, Human
acucucagaggcccca

SEQ ID NO: 3212308 - RNA, 22 nt, Human
acucucaggaaaugcugaccca

SEQ ID NO: 3212309 - RNA, 21 nt, Human
acucucaggaaaugcugaccc

SEQ ID NO: 3212310 - RNA, 13 nt, Human
acucugacaacag

SEQ ID NO: 3212311 - RNA, 17 nt, Human
acucugacaacagacuu

SEQ ID NO: 3212312 - RNA, 21 nt, Human
uccuagccaccgccuccuaca

SEQ ID NO: 3212313 - RNA, 21 nt, Human
uccuagccugugccucuggga

SEQ ID NO: 3212314 - RNA, 16 nt, Human
acuccugguccuaggc

SEQ ID NO: 3212315 - RNA, 22 nt, Human
acuccugguccuaggcuggaag

SEQ ID NO: 3212316 - RNA, 23 nt, Human
acuccugguccuaggcuggaagg

SEQ ID NO: 3212317 - RNA, 20 nt, Human
uccuagccacccaccacacu

SEQ ID NO: 3212318 - RNA, 20 nt, Human
uccuagcacuuugggaggcc

SEQ ID NO: 3212319 - RNA, 23 nt, Human
uccuacgaguaauugcauuugcu

SEQ ID NO: 3212320 - RNA, 16 nt, Human
acucgaguuacagaca

SEQ ID NO: 3212321 - RNA, 14 nt, Human
acucgagucugagg

SEQ ID NO: 3212322 - RNA, 15 nt, Human
acucgagucugaggc

SEQ ID NO: 3212323 - RNA, 18 nt, Human
acuccugucuucugcuuu

SEQ ID NO: 3212324 - RNA, 17 nt, Human
acuccugucuucugcuu

SEQ ID NO: 3212325 - RNA, 16 nt, Human
acuccugucuucugcu

SEQ ID NO: 3212326 - RNA, 15 nt, Human
acuccugucuucugc

SEQ ID NO: 3212327 - RNA, 20 nt, Human
acuccugucuucugcuuugu

SEQ ID NO: 3212328 - RNA, 19 nt, Human
acuccugucuucugcuuug

SEQ ID NO: 3212329 - RNA, 11 nt, Human
uccggccaggu

SEQ ID NO: 3212330 - RNA, 19 nt, Human
uccggccaggugccuccug

SEQ ID NO: 3212331 - RNA, 20 nt, Human
uccggccaggugccuccuga

SEQ ID NO: 3212332 - RNA, 22 nt, Human
uccggccaggugccuccugaca

SEQ ID NO: 3212333 - RNA, 18 nt, Human
uccggcaccaguagcagg

SEQ ID NO: 3212334 - RNA, 16 nt, Human
uccggcaccaguagca

SEQ ID NO: 3212335 - RNA, 15 nt, Human
uccggcuaagcaggc

SEQ ID NO: 3212336 - RNA, 17 nt, Human
uccggcuaagcaggcgc

SEQ ID NO: 3212337 - RNA, 16 nt, Human
uccggcuaagcaggcg

SEQ ID NO: 3212338 - RNA, 18 nt, Human
uccggcuaagcaggcgca

SEQ ID NO: 3212339 - RNA, 18 nt, Human
acucagaagacacugaug

SEQ ID NO: 3212340 - RNA, 17 nt, Human
acucagaagacacugau

SEQ ID NO: 3212341 - RNA, 16 nt, Human
acucagaagacacuga

SEQ ID NO: 3212342 - RNA, 15 nt, Human
acucagaagacacug

SEQ ID NO: 3212343 - RNA, 14 nt, Human
acucagaagacacu

SEQ ID NO: 3212344 - RNA, 14 nt, Human
acucaccugccccu

SEQ ID NO: 3212345 - RNA, 19 nt, Human
acucaccugccccucaacu

SEQ ID NO: 3212346 - RNA, 21 nt, Human
acucaccugccccucaacucu

SEQ ID NO: 3212347 - RNA, 16 nt, Human
acucagaaguccagag

SEQ ID NO: 3212348 - RNA, 19 nt, Human
acucagagcagucugugac

SEQ ID NO: 3212349 - RNA, 12 nt, Human
acucagagcagu

SEQ ID NO: 3212350 - RNA, 19 nt, Human
acucaucuggaguucucaa

SEQ ID NO: 3212351 - RNA, 22 nt, Human
acucaucuggaguucucaaaga

SEQ ID NO: 3212352 - RNA, 12 nt, Human
acucaucuuagg

SEQ ID NO: 3212353 - RNA, 16 nt, Human
acucauugaccugagg

SEQ ID NO: 3212354 - RNA, 17 nt, Human
acucauugaccugaggc

SEQ ID NO: 3212355 - RNA, 14 nt, Human
acuccaccaagccu

SEQ ID NO: 3212356 - RNA, 20 nt, Human
acucauuuuaaaaaauggaa

SEQ ID NO: 3212357 - RNA, 12 nt, Human
acucauuuugcu

SEQ ID NO: 3212358 - RNA, 14 nt, Human
acucauuuugcuug

SEQ ID NO: 3212359 - RNA, 19 nt, Human
acucauuuuaaugauuguu

SEQ ID NO: 3212360 - RNA, 18 nt, Human
acucauugaccugaggcc

SEQ ID NO: 3212361 - RNA, 13 nt, Human
ucccucccagcuc

SEQ ID NO: 3212362 - RNA, 13 nt, Human
ucccucuuucccu

SEQ ID NO: 3212363 - RNA, 11 nt, Human
ucccucuuucc

SEQ ID NO: 3212364 - RNA, 23 nt, Human
ucccucauuccaccuucccaugc

SEQ ID NO: 3212365 - RNA, 18 nt, Human
ucccucagucuggcccuu

SEQ ID NO: 3212366 - RNA, 15 nt, Human
ucccucagaaaauga

SEQ ID NO: 3212367 - RNA, 17 nt, Human
ucccucacucucaggaa

SEQ ID NO: 3212368 - RNA, 15 nt, Human
ucccucacucucagg

SEQ ID NO: 3212369 - RNA, 14 nt, Human
ucccucacucucag

SEQ ID NO: 3212370 - RNA, 21 nt, Human
ucccucuuucccucccuuccu

SEQ ID NO: 3212371 - RNA, 14 nt, Human
ucccugaacuuccu

SEQ ID NO: 3212372 - RNA, 21 nt, Human
ucccugaaggccccgcccagg

SEQ ID NO: 3212373 - RNA, 22 nt, Human
ucccugaaggccccgcccaggc

SEQ ID NO: 3212374 - RNA, 18 nt, Human
ucccugaaggccccgccc

SEQ ID NO: 3212375 - RNA, 17 nt, Human
ucccugaaggccccgcc

SEQ ID NO: 3212376 - RNA, 17 nt, Human
acucaccccagccccaa

SEQ ID NO: 3212377 - RNA, 19 nt, Human
acucaccucccccaucucu

SEQ ID NO: 3212378 - RNA, 20 nt, Human
acucaccucccccaucucuu

SEQ ID NO: 3212379 - RNA, 23 nt, Human
ucccugaaggccccgcccaggcu

SEQ ID NO: 3212380 - RNA, 16 nt, Human
ucccugaaguuaugug

SEQ ID NO: 3212381 - RNA, 19 nt, Human
acuaugauuuaauuugaaa

SEQ ID NO: 3212382 - RNA, 15 nt, Human
acuaugauuuggaaa

SEQ ID NO: 3212383 - RNA, 16 nt, Human
acuaugauuuggaaaa

SEQ ID NO: 3212384 - RNA, 14 nt, Human
acuauaauguaagc

SEQ ID NO: 3212385 - RNA, 13 nt, Human
acuauaauguaag

SEQ ID NO: 3212386 - RNA, 11 nt, Human
acuauaaugua

SEQ ID NO: 3212387 - RNA, 12 nt, Human
acuauaauguaa

SEQ ID NO: 3212388 - RNA, 16 nt, Human
acuauucaaacagucu

SEQ ID NO: 3212389 - RNA, 14 nt, Human
acuauucaaacagu

SEQ ID NO: 3212390 - RNA, 13 nt, Human
acuauucaaacag

SEQ ID NO: 3212391 - RNA, 12 nt, Human
acuauguaucaa

SEQ ID NO: 3212392 - RNA, 14 nt, Human
acuauguguuuuuc

SEQ ID NO: 3212393 - RNA, 18 nt, Human
acuauguguuuuucucau

SEQ ID NO: 3212394 - RNA, 13 nt, Human
acuauguugauaa

SEQ ID NO: 3212395 - RNA, 22 nt, Human
uccccuaaagccucaaaacaaa

SEQ ID NO: 3212396 - RNA, 15 nt, Human
uccccuaaagccuca

SEQ ID NO: 3212397 - RNA, 14 nt, Human
acucaaugcacuga

SEQ ID NO: 3212398 - RNA, 18 nt, Human
acucaaguugucucuuua

SEQ ID NO: 3212399 - RNA, 20 nt, Human
acucacauuuauucugcuca

SEQ ID NO: 3212400 - RNA, 19 nt, Human
acucacauuuauucugcuc

SEQ ID NO: 3212401 - RNA, 21 nt, Human
acuagacacacaaagcaguug

SEQ ID NO: 3212402 - RNA, 18 nt, Human
acuagacacacaaagcag

SEQ ID NO: 3212403 - RNA, 13 nt, Human
acuagacacacaa

SEQ ID NO: 3212404 - RNA, 14 nt, Human
acuacuuagcacuu

SEQ ID NO: 3212405 - RNA, 19 nt, Human
acuaccuuuggcuuaauuc

SEQ ID NO: 3212406 - RNA, 18 nt, Human
acuacggaauaguuggcu

SEQ ID NO: 3212407 - RNA, 22 nt, Human
acuaccuguaaugacaggccug

SEQ ID NO: 3212408 - RNA, 15 nt, Human
ucccccagccacucc

SEQ ID NO: 3212409 - RNA, 14 nt, Human
ucccccagccacuc

SEQ ID NO: 3212410 - RNA, 13 nt, Human
ucccccagccacu

SEQ ID NO: 3212411 - RNA, 13 nt, Human
acguacacacaca

SEQ ID NO: 3212412 - RNA, 13 nt, Human
ucccccacuccca

SEQ ID NO: 3212413 - RNA, 22 nt, Human
ucccccaacuucaucuggaagu

SEQ ID NO: 3212414 - RNA, 21 nt, Human
acugggcuuggggaccagagc

SEQ ID NO: 3212415 - RNA, 15 nt, Human
acugggggcagacau

SEQ ID NO: 3212416 - RNA, 15 nt, Human
acuggguacuugugg

SEQ ID NO: 3212417 - RNA, 15 nt, Human
acugggccaggggag

SEQ ID NO: 3212418 - RNA, 22 nt, Human
ucgcuggauggcggaagcugcu

SEQ ID NO: 3212419 - RNA, 18 nt, Human
ucgcucuguugcccaggc

SEQ ID NO: 3212420 - RNA, 17 nt, Human
ucgcccuggcaggcagg

SEQ ID NO: 3212421 - RNA, 13 nt, Human
ucgcccuggcagg

SEQ ID NO: 3212422 - RNA, 14 nt, Human
ucgcuccugugucu

SEQ ID NO: 3212423 - RNA, 23 nt, Human
ucgccucggaucagcugagccuu

SEQ ID NO: 3212424 - RNA, 17 nt, Human
ucgccucggaucagcug

SEQ ID NO: 3212425 - RNA, 16 nt, Human
acugaaaggcuuuuca

SEQ ID NO: 3212426 - RNA, 14 nt, Human
acugaagaggagga

SEQ ID NO: 3212427 - RNA, 15 nt, Human
acugaagaggaggag

SEQ ID NO: 3212428 - RNA, 23 nt, Human
acugaagaggaggaggagggucu

SEQ ID NO: 3212429 - RNA, 15 nt, Human
acuguacuccuccca

SEQ ID NO: 3212430 - RNA, 22 nt, Human
acuguacaaugacuuuauugca

SEQ ID NO: 3212431 - RNA, 20 nt, Human
acuguacuccucccaggcgc

SEQ ID NO: 3212432 - RNA, 13 nt, Human
acuguacuuugau

SEQ ID NO: 3212433 - RNA, 13 nt, Human
acuguauauuugu

SEQ ID NO: 3212434 - RNA, 14 nt, Human
acuguauauuugua

SEQ ID NO: 3212435 - RNA, 15 nt, Human
acuguauauuuguau

SEQ ID NO: 3212436 - RNA, 17 nt, Human
acuguauauuuguauga

SEQ ID NO: 3212437 - RNA, 19 nt, Human
acuguauauuuguaugaua

SEQ ID NO: 3212438 - RNA, 23 nt, Human
acuguacuuugauucacauguuu

SEQ ID NO: 3212439 - RNA, 22 nt, Human
acuguacuuugauucacauguu

SEQ ID NO: 3212440 - RNA, 20 nt, Human
acuguacuuugauucacaug

SEQ ID NO: 3212441 - RNA, 16 nt, Human
acuguacuuugauuca

SEQ ID NO: 3212442 - RNA, 22 nt, Human
acuguacaaaguagaagucuua

SEQ ID NO: 3212443 - RNA, 16 nt, Human
acuguacaaaguagaa

SEQ ID NO: 3212444 - RNA, 17 nt, Human
acuggguacuuguggac

SEQ ID NO: 3212445 - RNA, 23 nt, Human
acugucagcuccccucggagaag

SEQ ID NO: 3212446 - RNA, 22 nt, Human
acugucagcuccccucggagaa

SEQ ID NO: 3212447 - RNA, 23 nt, Human
acuguccuacccacccuccuuuc

SEQ ID NO: 3212448 - RNA, 23 nt, Human
acuguauugggaaguuacuguua

SEQ ID NO: 3212449 - RNA, 19 nt, Human
ucggggagaggcugaggac

SEQ ID NO: 3212450 - RNA, 22 nt, Human
ucguauagaagucuucaugaaa

SEQ ID NO: 3212451 - RNA, 20 nt, Human
ucguauagaagucuucauga

SEQ ID NO: 3212452 - RNA, 17 nt, Human
ucguauagaagucuuca

SEQ ID NO: 3212453 - RNA, 16 nt, Human
ucguauagaagucuuc

SEQ ID NO: 3212454 - RNA, 22 nt, Human
ucguacauaauacugaaccacu

SEQ ID NO: 3212455 - RNA, 14 nt, Human
ucguacauaauacu

SEQ ID NO: 3212456 - RNA, 15 nt, Human
ucguacauaauacug

SEQ ID NO: 3212457 - RNA, 15 nt, Human
ucguauucaccuuca

SEQ ID NO: 3212458 - RNA, 22 nt, Human
ucguuuaccuucaaacuuuagg

SEQ ID NO: 3212459 - RNA, 14 nt, Human
ucuaaaauuacaua

SEQ ID NO: 3212460 - RNA, 22 nt, Human
ucuaaaauugaguucuuccugu

SEQ ID NO: 3212461 - RNA, 23 nt, Human
ucuaaaauugaguucuuccugua

SEQ ID NO: 3212462 - RNA, 17 nt, Human
acuguuaauaguucagg

SEQ ID NO: 3212463 - RNA, 16 nt, Human
acuguuaacuuauuca

SEQ ID NO: 3212464 - RNA, 21 nt, Human
acuguuaauaguucagguaac

SEQ ID NO: 3212465 - RNA, 13 nt, Human
acuguuaccauug

SEQ ID NO: 3212466 - RNA, 12 nt, Human
acuguuacagua

SEQ ID NO: 3212467 - RNA, 15 nt, Human
acuguuacaguaaug

SEQ ID NO: 3212468 - RNA, 16 nt, Human
acuguuacaguaaugu

SEQ ID NO: 3212469 - RNA, 20 nt, Human
acuguuacaguaaugucaua

SEQ ID NO: 3212470 - RNA, 12 nt, Human
ucuaagauguua

SEQ ID NO: 3212471 - RNA, 16 nt, Human
ucuaagauguuauauu

SEQ ID NO: 3212472 - RNA, 14 nt, Human
ucuaagauguuaua

SEQ ID NO: 3212473 - RNA, 23 nt, Human
ucuaagauguuauauuuuucuua

SEQ ID NO: 3212474 - RNA, 22 nt, Human
ucuaagauguuauauuuuucuu

SEQ ID NO: 3212475 - RNA, 21 nt, Human
ucuaagauguuauauuuuucu

SEQ ID NO: 3212476 - RNA, 18 nt, Human
ucuaagauguuauauuuu

SEQ ID NO: 3212477 - RNA, 14 nt, Human
ucuaagaaacauug

SEQ ID NO: 3212478 - RNA, 13 nt, Human
ucuaagaaacauu

SEQ ID NO: 3212479 - RNA, 23 nt, Human
ucuaagaaacauuggaagcaggu

SEQ ID NO: 3212480 - RNA, 18 nt, Human
ucuaagaaacauuggaag

SEQ ID NO: 3212481 - RNA, 17 nt, Human
ucuaagaaacauuggaa

SEQ ID NO: 3212482 - RNA, 16 nt, Human
ucuaagaaacauugga

SEQ ID NO: 3212483 - RNA, 14 nt, Human
ucuaagaauaauaa

SEQ ID NO: 3212484 - RNA, 17 nt, Human
ucuaagaauaauaaaau

SEQ ID NO: 3212485 - RNA, 19 nt, Human
ucuaagaauaauaaaauca

SEQ ID NO: 3212486 - RNA, 16 nt, Human
ucuaagaaauaucugu

SEQ ID NO: 3212487 - RNA, 21 nt, Human
ucuaagaaauaucugugaaau

SEQ ID NO: 3212488 - RNA, 22 nt, Human
ucuaagaaauaucugugaaaua

SEQ ID NO: 3212489 - RNA, 23 nt, Human
ucuaagaaauaucugugaaauau

SEQ ID NO: 3212490 - RNA, 13 nt, Human
ucuaagaaaucaa

SEQ ID NO: 3212491 - RNA, 16 nt, Human
ucuaaagcugccagcc

SEQ ID NO: 3212492 - RNA, 17 nt, Human
ucuaaagcugccagccg

SEQ ID NO: 3212493 - RNA, 13 nt, Human
ucuaaacugcccc

SEQ ID NO: 3212494 - RNA, 16 nt, Human
ucuaaacugcccccuc

SEQ ID NO: 3212495 - RNA, 22 nt, Human
ucuaaacugcccccucugcccu

SEQ ID NO: 3212496 - RNA, 23 nt, Human
ucuaaacugcccccucugcccug

SEQ ID NO: 3212497 - RNA, 18 nt, Human
ucuaaacuaggcuccuuc

SEQ ID NO: 3212498 - RNA, 21 nt, Human
ucuaaacuuuauuccaaguca

SEQ ID NO: 3212499 - RNA, 23 nt, Human
ucuaccccucccggcccugccug

SEQ ID NO: 3212500 - RNA, 22 nt, Human
ucuaccccucccggcccugccu

SEQ ID NO: 3212501 - RNA, 21 nt, Human
ucuacccucuuagaaaaacca

SEQ ID NO: 3212502 - RNA, 14 nt, Human
ucuacccaggugcu

SEQ ID NO: 3212503 - RNA, 11 nt, Human
ucuacauuuca

SEQ ID NO: 3212504 - RNA, 12 nt, Human
ucuacauuucac

SEQ ID NO: 3212505 - RNA, 13 nt, Human
ucuacauuucaca

SEQ ID NO: 3212506 - RNA, 16 nt, Human
ucuacauuucacauua

SEQ ID NO: 3212507 - RNA, 22 nt, Human
ucuacauuucacauuauucugg

SEQ ID NO: 3212508 - RNA, 19 nt, Human
ucuaaguugaguauauuau

SEQ ID NO: 3212509 - RNA, 16 nt, Human
ucuacauacuauggaa

SEQ ID NO: 3212510 - RNA, 14 nt, Human
ucuaaguguuugcu

SEQ ID NO: 3212511 - RNA, 22 nt, Human
ucuaagucaaacacuugugacu

SEQ ID NO: 3212512 - RNA, 23 nt, Human
ucuaagucaaacacuugugacuu

SEQ ID NO: 3212513 - RNA, 20 nt, Human
ucuaagucgguuaaaaugga

SEQ ID NO: 3212514 - RNA, 18 nt, Human
ucuaagugccucacauuu

SEQ ID NO: 3212515 - RNA, 15 nt, Human
ucuaccucuuggcug

SEQ ID NO: 3212516 - RNA, 12 nt, Human
ucuaccugaggg

SEQ ID NO: 3212517 - RNA, 19 nt, Human
ucuaccugaggggccucuu

SEQ ID NO: 3212518 - RNA, 20 nt, Human
acuuagagguggggagcaga

SEQ ID NO: 3212519 - RNA, 15 nt, Human
acuuagccuuucuuu

SEQ ID NO: 3212520 - RNA, 19 nt, Human
acuuagcaucuaauuucaa

SEQ ID NO: 3212521 - RNA, 17 nt, Human
acuuagccuuuaccugu

SEQ ID NO: 3212522 - RNA, 20 nt, Human
acuuagccuuuaccugugaa

SEQ ID NO: 3212523 - RNA, 22 nt, Human
acuuagcacuucagggcagauu

SEQ ID NO: 3212524 - RNA, 21 nt, Human
acuuaucaguuugcuaauguu

SEQ ID NO: 3212525 - RNA, 21 nt, Human
acuuauauuguaagaaauacu

SEQ ID NO: 3212526 - RNA, 20 nt, Human
acuuauauuguaagaaauac

SEQ ID NO: 3212527 - RNA, 19 nt, Human
acuuauauuguaagaaaua

SEQ ID NO: 3212528 - RNA, 18 nt, Human
acuuauauuguaagaaau

SEQ ID NO: 3212529 - RNA, 17 nt, Human
acuuauauuguaagaaa

SEQ ID NO: 3212530 - RNA, 15 nt, Human
acuuauauuguaaga

SEQ ID NO: 3212531 - RNA, 16 nt, Human
acuucaggcucuucuc

SEQ ID NO: 3212532 - RNA, 17 nt, Human
acuuccauaaucuggac

SEQ ID NO: 3212533 - RNA, 17 nt, Human
acuuccacugccauccu

SEQ ID NO: 3212534 - RNA, 18 nt, Human
acuuccaauuuacauacu

SEQ ID NO: 3212535 - RNA, 15 nt, Human
acuuccaaagaaagu

SEQ ID NO: 3212536 - RNA, 16 nt, Human
acuuccaaagaaaguu

SEQ ID NO: 3212537 - RNA, 17 nt, Human
acuuccaaagaaaguuc

SEQ ID NO: 3212538 - RNA, 18 nt, Human
acuuccaaagaaaguucu

SEQ ID NO: 3212539 - RNA, 16 nt, Human
acuucaucccucuggg

SEQ ID NO: 3212540 - RNA, 15 nt, Human
acuucaucuggaagu

SEQ ID NO: 3212541 - RNA, 16 nt, Human
acuucaucuggaaguu

SEQ ID NO: 3212542 - RNA, 21 nt, Human
acuucagggcagauuuuaguu

SEQ ID NO: 3212543 - RNA, 20 nt, Human
acuucagggcagauuuuagu

SEQ ID NO: 3212544 - RNA, 19 nt, Human
acuucagggcagauuuuag

SEQ ID NO: 3212545 - RNA, 18 nt, Human
acuucagggcagauuuua

SEQ ID NO: 3212546 - RNA, 17 nt, Human
acuucagggcagauuuu

SEQ ID NO: 3212547 - RNA, 16 nt, Human
acuucagggcagauuu

SEQ ID NO: 3212548 - RNA, 18 nt, Human
acuucaggcucuucuccu

SEQ ID NO: 3212549 - RNA, 17 nt, Human
acuucaggcucuucucc

SEQ ID NO: 3212550 - RNA, 20 nt, Human
acuucaggcucuucuccuuu

SEQ ID NO: 3212551 - RNA, 17 nt, Human
acuucauugaaaauaua

SEQ ID NO: 3212552 - RNA, 14 nt, Human
acuucauugaaaau

SEQ ID NO: 3212553 - RNA, 22 nt, Human
acuucauguaauuuuauuuuaa

SEQ ID NO: 3212554 - RNA, 23 nt, Human
acuucauguaauuuuauuuuaaa

SEQ ID NO: 3212555 - RNA, 13 nt, Human
ucuauaaacacug

SEQ ID NO: 3212556 - RNA, 21 nt, Human
ucuauaauauuuguguguuca

SEQ ID NO: 3212557 - RNA, 17 nt, Human
ucuauaaacacuguuug

SEQ ID NO: 3212558 - RNA, 15 nt, Human
ucuauaaacacuguu

SEQ ID NO: 3212559 - RNA, 14 nt, Human
ucuauaaacacugu

SEQ ID NO: 3212560 - RNA, 20 nt, Human
ucuauagcaucacuuaaaac

SEQ ID NO: 3212561 - RNA, 15 nt, Human
ucuauaauuuuacaa

SEQ ID NO: 3212562 - RNA, 14 nt, Human
ucuauaauuuuaca

SEQ ID NO: 3212563 - RNA, 17 nt, Human
ucuauagcaucacuuaa

SEQ ID NO: 3212564 - RNA, 19 nt, Human
ucuauagcaucacuuaaaa

SEQ ID NO: 3212565 - RNA, 17 nt, Human
ucuaguguuugauuguc

SEQ ID NO: 3212566 - RNA, 16 nt, Human
ucuagcuuuguuuagu

SEQ ID NO: 3212567 - RNA, 22 nt, Human
ucuagcuuuuuaauuaagcaaa

SEQ ID NO: 3212568 - RNA, 22 nt, Human
ucuagcugaauugagccuaaaa

SEQ ID NO: 3212569 - RNA, 14 nt, Human
ucuaguuauuuauu

SEQ ID NO: 3212570 - RNA, 16 nt, Human
ucuaguuauuuauucu

SEQ ID NO: 3212571 - RNA, 21 nt, Human
acuuccccaauaucuugcuug

SEQ ID NO: 3212572 - RNA, 18 nt, Human
acuuccccaauaucuugc

SEQ ID NO: 3212573 - RNA, 14 nt, Human
ucuagaugauuuuu

SEQ ID NO: 3212574 - RNA, 21 nt, Human
ucuagaugauuuuuugaaagu

SEQ ID NO: 3212575 - RNA, 22 nt, Human
ucuagaugauuuuuugaaaguu

SEQ ID NO: 3212576 - RNA, 16 nt, Human
ucuagauguaaauuuu

SEQ ID NO: 3212577 - RNA, 11 nt, Human
ucuagauguaa

SEQ ID NO: 3212578 - RNA, 16 nt, Human
ucuagauuaauacucu

SEQ ID NO: 3212579 - RNA, 20 nt, Human
ucuagauuaauacucuauuu

SEQ ID NO: 3212580 - RNA, 17 nt, Human
ucuagauuaccaugaag

SEQ ID NO: 3212581 - RNA, 19 nt, Human
ucuagaucuuugugccaaa

SEQ ID NO: 3212582 - RNA, 22 nt, Human
acuuccccaauaucuugcuuga

SEQ ID NO: 3212583 - RNA, 13 nt, Human
ucuagccagagga

SEQ ID NO: 3212584 - RNA, 18 nt, Human
ucuagcacuuccuugcca

SEQ ID NO: 3212585 - RNA, 15 nt, Human
ucuagcguagugcag

SEQ ID NO: 3212586 - RNA, 10 nt, Human
ucuagcugaa

SEQ ID NO: 3212587 - RNA, 15 nt, Human
ucuagcuaugcugua

SEQ ID NO: 3212588 - RNA, 19 nt, Human
ucuagcuaugcuguaucug

SEQ ID NO: 3212589 - RNA, 14 nt, Human
ucuagcccugcccg

SEQ ID NO: 3212590 - RNA, 14 nt, Human
ucuagcacuuccuu

SEQ ID NO: 3212591 - RNA, 17 nt, Human
ucuagcacuuccuugcc

SEQ ID NO: 3212592 - RNA, 15 nt, Human
ucuagcacuuccuug

SEQ ID NO: 3212593 - RNA, 16 nt, Human
acuuccgucacauccc

SEQ ID NO: 3212594 - RNA, 17 nt, Human
ucucacuccuaccuggu

SEQ ID NO: 3212595 - RNA, 16 nt, Human
ucucacuccuaccugg

SEQ ID NO: 3212596 - RNA, 17 nt, Human
acuucgggaggucgagg

SEQ ID NO: 3212597 - RNA, 20 nt, Human
acuucgggaggucgaggcag

SEQ ID NO: 3212598 - RNA, 17 nt, Human
acuuccugcuuccucag

SEQ ID NO: 3212599 - RNA, 16 nt, Human
acuuccugcuuccuca

SEQ ID NO: 3212600 - RNA, 23 nt, Human
acuuccugauugguuucucuucu

SEQ ID NO: 3212601 - RNA, 22 nt, Human
acuuccugauugguuucucuuc

SEQ ID NO: 3212602 - RNA, 21 nt, Human
acuuccugauugguuucucuu

SEQ ID NO: 3212603 - RNA, 13 nt, Human
acuucuaaguaaa

SEQ ID NO: 3212604 - RNA, 19 nt, Human
acuucuaaguaaaaccaca

SEQ ID NO: 3212605 - RNA, 18 nt, Human
acuucuaaguaaaaccac

SEQ ID NO: 3212606 - RNA, 18 nt, Human
acuucuccacccugcucu

SEQ ID NO: 3212607 - RNA, 23 nt, Human
acuucgccaagguuguagcaugg

SEQ ID NO: 3212608 - RNA, 17 nt, Human
ucucaaaacugcacugu

SEQ ID NO: 3212609 - RNA, 20 nt, Human
ucucacauggaaugaggguu

SEQ ID NO: 3212610 - RNA, 22 nt, Human
ucucacauggaaugaggguuug

SEQ ID NO: 3212611 - RNA, 13 nt, Human
ucucacuccuacc

SEQ ID NO: 3212612 - RNA, 23 nt, Human
ucucacauuuuuauaccuguuua

SEQ ID NO: 3212613 - RNA, 16 nt, Human
ucucaaaaaaagaaaa

SEQ ID NO: 3212614 - RNA, 16 nt, Human
ucuauuuuucucuuca

SEQ ID NO: 3212615 - RNA, 16 nt, Human
ucuauuguuucuuuca

SEQ ID NO: 3212616 - RNA, 15 nt, Human
ucuauuguccaaagu

SEQ ID NO: 3212617 - RNA, 12 nt, Human
ucuauauaaaau

SEQ ID NO: 3212618 - RNA, 14 nt, Human
ucuauauaaaauaa

SEQ ID NO: 3212619 - RNA, 15 nt, Human
ucuauauaaaauaac

SEQ ID NO: 3212620 - RNA, 23 nt, Human
ucuauauaaaauaacuaaaaugu

SEQ ID NO: 3212621 - RNA, 15 nt, Human
acuugucggcuccag

SEQ ID NO: 3212622 - RNA, 14 nt, Human
acuugucuuuggac

SEQ ID NO: 3212623 - RNA, 14 nt, Human
acuuguaugaaaga

SEQ ID NO: 3212624 - RNA, 23 nt, Human
acuuggaagcacaccaaucuuac

SEQ ID NO: 3212625 - RNA, 15 nt, Human
acuuggaaauauuaa

SEQ ID NO: 3212626 - RNA, 16 nt, Human
acuuggaaauauuaaa

SEQ ID NO: 3212627 - RNA, 19 nt, Human
acuuggaaauauuaaaaga

SEQ ID NO: 3212628 - RNA, 14 nt, Human
acuuggaagcuccg

SEQ ID NO: 3212629 - RNA, 21 nt, Human
acuugccauuccaaaauauua

SEQ ID NO: 3212630 - RNA, 16 nt, Human
acuugcccugaccaug

SEQ ID NO: 3212631 - RNA, 20 nt, Human
acuugcccugaccaugcauu

SEQ ID NO: 3212632 - RNA, 21 nt, Human
acuugcccugaccaugcauuu

SEQ ID NO: 3212633 - RNA, 19 nt, Human
acuugcauuuuugcaggag

SEQ ID NO: 3212634 - RNA, 18 nt, Human
acuugcauuuuugcagga

SEQ ID NO: 3212635 - RNA, 17 nt, Human
acuugcauuuuugcagg

SEQ ID NO: 3212636 - RNA, 14 nt, Human
acuugcauuuuugc

SEQ ID NO: 3212637 - RNA, 23 nt, Human
acuugauaagggacugauguuug

SEQ ID NO: 3212638 - RNA, 21 nt, Human
acuugaacccgggaggcagag

SEQ ID NO: 3212639 - RNA, 23 nt, Human
acuugaacccgggaggcagaggu

SEQ ID NO: 3212640 - RNA, 22 nt, Human
acuugaguggagguuuauaguu

SEQ ID NO: 3212641 - RNA, 21 nt, Human
acuugaguaaaauacucuuuu

SEQ ID NO: 3212642 - RNA, 18 nt, Human
acuugaguaaaauacucu

SEQ ID NO: 3212643 - RNA, 20 nt, Human
acuugaagccugcuccuucc

SEQ ID NO: 3212644 - RNA, 19 nt, Human
acuugaagccugcuccuuc

SEQ ID NO: 3212645 - RNA, 16 nt, Human
acuugaagccugcucc

SEQ ID NO: 3212646 - RNA, 14 nt, Human
acuugaagccugcu

SEQ ID NO: 3212647 - RNA, 16 nt, Human
ucuggcagcucagaga

SEQ ID NO: 3212648 - RNA, 17 nt, Human
ucuggcagcucagagag

SEQ ID NO: 3212649 - RNA, 20 nt, Human
ucuggcagaguugaagacag

SEQ ID NO: 3212650 - RNA, 23 nt, Human
ucuggcagaguugaagacagagc

SEQ ID NO: 3212651 - RNA, 18 nt, Human
ucuggcagcucagagagg

SEQ ID NO: 3212652 - RNA, 21 nt, Human
ucuggcagcucagagagggug

SEQ ID NO: 3212653 - RNA, 17 nt, Human
ucuggcacagccugcac

SEQ ID NO: 3212654 - RNA, 16 nt, Human
ucuggcacagccugca

SEQ ID NO: 3212655 - RNA, 15 nt, Human
ucuggcacagccugc

SEQ ID NO: 3212656 - RNA, 22 nt, Human
ucugcuuugggguuuaucagaa

SEQ ID NO: 3212657 - RNA, 15 nt, Human
ucugcuuuguugugu

SEQ ID NO: 3212658 - RNA, 13 nt, Human
ucugcuuuuaucu

SEQ ID NO: 3212659 - RNA, 22 nt, Human
ucugcuuuuaucucagauguua

SEQ ID NO: 3212660 - RNA, 22 nt, Human
ucugcuuuguugugugccucua

SEQ ID NO: 3212661 - RNA, 18 nt, Human
ucugcuuuguugugugcc

SEQ ID NO: 3212662 - RNA, 14 nt, Human
ucugccugucuccc

SEQ ID NO: 3212663 - RNA, 12 nt, Human
ucugccugucuc

SEQ ID NO: 3212664 - RNA, 14 nt, Human
ucuggcacagccug

SEQ ID NO: 3212665 - RNA, 13 nt, Human
ucuggcacagccu

SEQ ID NO: 3212666 - RNA, 22 nt, Human
ucuggcaauggaugaacugaaa

SEQ ID NO: 3212667 - RNA, 23 nt, Human
agaagugacgguuccuacacagg

SEQ ID NO: 3212668 - RNA, 17 nt, Human
agaagugacgguuccua

SEQ ID NO: 3212669 - RNA, 16 nt, Human
agaagugacgguuccu

SEQ ID NO: 3212670 - RNA, 23 nt, Human
agaagcucccugaaguaagcaaa

SEQ ID NO: 3212671 - RNA, 20 nt, Human
agaaguucuuugauucugua

SEQ ID NO: 3212672 - RNA, 15 nt, Human
agaaguucuuugauu

SEQ ID NO: 3212673 - RNA, 22 nt, Human
agaaguuugagaucagccuggg

SEQ ID NO: 3212674 - RNA, 13 nt, Human
agaaguuucuguc

SEQ ID NO: 3212675 - RNA, 21 nt, Human
agaaguucuuugauucuguaa

SEQ ID NO: 3212676 - RNA, 17 nt, Human
agaaguuuaaggaauau

SEQ ID NO: 3212677 - RNA, 16 nt, Human
agaaguuuaaggaaua

SEQ ID NO: 3212678 - RNA, 15 nt, Human
agaaguuuaaggaau

SEQ ID NO: 3212679 - RNA, 13 nt, Human
agaaguuuaaaua

SEQ ID NO: 3212680 - RNA, 12 nt, Human
agaaguuuaaau

SEQ ID NO: 3212681 - RNA, 13 nt, Human
agaauaaacuggc

SEQ ID NO: 3212682 - RNA, 20 nt, Human
agaauaaacuuacauauuua

SEQ ID NO: 3212683 - RNA, 23 nt, Human
agaauaaagccuugugaucacuu

SEQ ID NO: 3212684 - RNA, 15 nt, Human
agaauaaaggcagcu

SEQ ID NO: 3212685 - RNA, 23 nt, Human
agaauagggcccaugggagggag

SEQ ID NO: 3212686 - RNA, 16 nt, Human
agaaucaauuuaagug

SEQ ID NO: 3212687 - RNA, 21 nt, Human
agaauaggacuuguuuuuguu

SEQ ID NO: 3212688 - RNA, 17 nt, Human
agaauaggacuuguuuu

SEQ ID NO: 3212689 - RNA, 16 nt, Human
agaauaggacuuguuu

SEQ ID NO: 3212690 - RNA, 15 nt, Human
agaauaggacuuguu

SEQ ID NO: 3212691 - RNA, 14 nt, Human
agaauacugaugga

SEQ ID NO: 3212692 - RNA, 11 nt, Human
agaauacugau

SEQ ID NO: 3212693 - RNA, 15 nt, Human
agaauaauuugguau

SEQ ID NO: 3212694 - RNA, 14 nt, Human
ucugaaguuauauu

SEQ ID NO: 3212695 - RNA, 18 nt, Human
ucugaaguuauauuuccu

SEQ ID NO: 3212696 - RNA, 17 nt, Human
ucugaaguuauauuucc

SEQ ID NO: 3212697 - RNA, 19 nt, Human
ucugaauaagcacuuuuua

SEQ ID NO: 3212698 - RNA, 15 nt, Human
ucugaaucuucugaa

SEQ ID NO: 3212699 - RNA, 18 nt, Human
ucugaauaagcacuuuuu

SEQ ID NO: 3212700 - RNA, 15 nt, Human
ucugaauaagcacuu

SEQ ID NO: 3212701 - RNA, 19 nt, Human
ucugaaguuauauuuccua

SEQ ID NO: 3212702 - RNA, 13 nt, Human
agaaauuaacuua

SEQ ID NO: 3212703 - RNA, 17 nt, Human
ucugaaucuucugaaac

SEQ ID NO: 3212704 - RNA, 13 nt, Human
agaaauuagggcu

SEQ ID NO: 3212705 - RNA, 20 nt, Human
agaaauuagggcucuaauuu

SEQ ID NO: 3212706 - RNA, 19 nt, Human
agaaauuagggcucuaauu

SEQ ID NO: 3212707 - RNA, 23 nt, Human
agaaauuagggcucuaauuuccu

SEQ ID NO: 3212708 - RNA, 22 nt, Human
agaaauuagggcucuaauuucc

SEQ ID NO: 3212709 - RNA, 21 nt, Human
agaaauuagggcucuaauuuc

SEQ ID NO: 3212710 - RNA, 17 nt, Human
agaacucccuuucaaca

SEQ ID NO: 3212711 - RNA, 15 nt, Human
agaacucccuuucaa

SEQ ID NO: 3212712 - RNA, 16 nt, Human
agaacucccuuucaac

SEQ ID NO: 3212713 - RNA, 18 nt, Human
agaacugcagucacugca

SEQ ID NO: 3212714 - RNA, 16 nt, Human
agaacugcagucacug

SEQ ID NO: 3212715 - RNA, 19 nt, Human
agaaccuuuugagugccuu

SEQ ID NO: 3212716 - RNA, 23 nt, Human
agaaccuuuugagugccuuacac

SEQ ID NO: 3212717 - RNA, 22 nt, Human
agaacgccagggaccccagaau

SEQ ID NO: 3212718 - RNA, 19 nt, Human
agaacuaucuucaucugag

SEQ ID NO: 3212719 - RNA, 18 nt, Human
agaacuaucuucaucuga

SEQ ID NO: 3212720 - RNA, 13 nt, Human
agaacuaucuuca

SEQ ID NO: 3212721 - RNA, 17 nt, Human
agaacuaucuucaucug

SEQ ID NO: 3212722 - RNA, 14 nt, Human
agaacuaucuucau

SEQ ID NO: 3212723 - RNA, 20 nt, Human
agaacuaccuggauuuguau

SEQ ID NO: 3212724 - RNA, 16 nt, Human
agaacgcugauuuaaa

SEQ ID NO: 3212725 - RNA, 19 nt, Human
agaagcaacccaaauguuc

SEQ ID NO: 3212726 - RNA, 17 nt, Human
agaacuuuguauaguua

SEQ ID NO: 3212727 - RNA, 13 nt, Human
agaacuuuguaua

SEQ ID NO: 3212728 - RNA, 15 nt, Human
agaacuuuguauagu

SEQ ID NO: 3212729 - RNA, 16 nt, Human
agaagcagaggaagga

SEQ ID NO: 3212730 - RNA, 17 nt, Human
agaacuugaagccugcu

SEQ ID NO: 3212731 - RNA, 23 nt, Human
agaacugcagucacugcacguuu

SEQ ID NO: 3212732 - RNA, 22 nt, Human
agaacuugaagccugcuccuuc

SEQ ID NO: 3212733 - RNA, 14 nt, Human
agaacuugcugccu

SEQ ID NO: 3212734 - RNA, 17 nt, Human
agaacuuguuuaauaaa

SEQ ID NO: 3212735 - RNA, 12 nt, Human
agaacuuguuua

SEQ ID NO: 3212736 - RNA, 15 nt, Human
agaacuugcugccuc

SEQ ID NO: 3212737 - RNA, 12 nt, Human
agaacuuuguau

SEQ ID NO: 3212738 - RNA, 18 nt, Human
agaagccacccaaagcag

SEQ ID NO: 3212739 - RNA, 17 nt, Human
agaagccacccaaagca

SEQ ID NO: 3212740 - RNA, 20 nt, Human
ucugcccauccugccccuga

SEQ ID NO: 3212741 - RNA, 18 nt, Human
ucugcccagcuuuucauu

SEQ ID NO: 3212742 - RNA, 17 nt, Human
ucugcccagcuuuucau

SEQ ID NO: 3212743 - RNA, 23 nt, Human
ucugcccacucccugcaaccuga

SEQ ID NO: 3212744 - RNA, 13 nt, Human
ucugcccagcuuu

SEQ ID NO: 3212745 - RNA, 23 nt, Human
agaagcccaggaaaggcuccagg

SEQ ID NO: 3212746 - RNA, 12 nt, Human
ucugcccuuggu

SEQ ID NO: 3212747 - RNA, 22 nt, Human
ucugcccugcgggucacaggag

SEQ ID NO: 3212748 - RNA, 22 nt, Human
ucugccccaaguuuugugaaau

SEQ ID NO: 3212749 - RNA, 16 nt, Human
ucugccccaaguuuug

SEQ ID NO: 3212750 - RNA, 15 nt, Human
ucugccccaaguuuu

SEQ ID NO: 3212751 - RNA, 18 nt, Human
ucugccccagcuugggca

SEQ ID NO: 3212752 - RNA, 14 nt, Human
ucugccccagcuug

SEQ ID NO: 3212753 - RNA, 23 nt, Human
acuuuggaaagaguaggaagacu

SEQ ID NO: 3212754 - RNA, 14 nt, Human
acuuuguauaguua

SEQ ID NO: 3212755 - RNA, 17 nt, Human
acuuuguauaguuaugu

SEQ ID NO: 3212756 - RNA, 18 nt, Human
acuuuguauaguuaugua

SEQ ID NO: 3212757 - RNA, 21 nt, Human
acuuuguauaguuauguaaau

SEQ ID NO: 3212758 - RNA, 12 nt, Human
acuuuguauagu

SEQ ID NO: 3212759 - RNA, 14 nt, Human
acuuuguauacaag

SEQ ID NO: 3212760 - RNA, 16 nt, Human
acuuuguauacaagua

SEQ ID NO: 3212761 - RNA, 19 nt, Human
acuuuggaaaguagaaaag

SEQ ID NO: 3212762 - RNA, 13 nt, Human
acuuuggaaagag

SEQ ID NO: 3212763 - RNA, 14 nt, Human
acuuuggaaagagu

SEQ ID NO: 3212764 - RNA, 23 nt, Human
acuuuggaaagacuuuuccaacc

SEQ ID NO: 3212765 - RNA, 23 nt, Human
acuuugauucacauguuuucaaa

SEQ ID NO: 3212766 - RNA, 19 nt, Human
acuuugauucacauguuuu

SEQ ID NO: 3212767 - RNA, 18 nt, Human
acuuugauucacauguuu

SEQ ID NO: 3212768 - RNA, 17 nt, Human
acuuugauucacauguu

SEQ ID NO: 3212769 - RNA, 13 nt, Human
acuuugauucaca

SEQ ID NO: 3212770 - RNA, 12 nt, Human
acuuugauguca

SEQ ID NO: 3212771 - RNA, 16 nt, Human
acuuugaugucagcag

SEQ ID NO: 3212772 - RNA, 17 nt, Human
acuuugaugucagcagu

SEQ ID NO: 3212773 - RNA, 22 nt, Human
acuuugaugucagcaguugcug

SEQ ID NO: 3212774 - RNA, 10 nt, Human
acuuugaaau

SEQ ID NO: 3212775 - RNA, 17 nt, Human
acuuugaguuaagucua

SEQ ID NO: 3212776 - RNA, 10 nt, Human
acuuugaugu

SEQ ID NO: 3212777 - RNA, 11 nt, Human
acuuugauguc

SEQ ID NO: 3212778 - RNA, 13 nt, Human
acuuugcauuguc

SEQ ID NO: 3212779 - RNA, 16 nt, Human
acuuugcauugucugu

SEQ ID NO: 3212780 - RNA, 22 nt, Human
acuuugcagcacagcugagagg

SEQ ID NO: 3212781 - RNA, 14 nt, Human
acuuuaaaaauuua

SEQ ID NO: 3212782 - RNA, 19 nt, Human
acuuuaaaaauuuacuaca

SEQ ID NO: 3212783 - RNA, 16 nt, Human
acuuuaaaaauuuacu

SEQ ID NO: 3212784 - RNA, 16 nt, Human
acuuucuuuagucuuu

SEQ ID NO: 3212785 - RNA, 16 nt, Human
acuuucuucuucccau

SEQ ID NO: 3212786 - RNA, 16 nt, Human
acuuuaaaaggagcca

SEQ ID NO: 3212787 - RNA, 15 nt, Human
acuuguuuuuguaaa

SEQ ID NO: 3212788 - RNA, 23 nt, Human
acuuguuuuuguuuuuguuuugu

SEQ ID NO: 3212789 - RNA, 21 nt, Human
acuuguuuuuguaaagaaaaa

SEQ ID NO: 3212790 - RNA, 20 nt, Human
acuuguuuuuguaaagaaaa

SEQ ID NO: 3212791 - RNA, 16 nt, Human
acuuguuuuuguaaag

SEQ ID NO: 3212792 - RNA, 16 nt, Human
acuuguuuucugggaa

SEQ ID NO: 3212793 - RNA, 14 nt, Human
acuuguggacacag

SEQ ID NO: 3212794 - RNA, 17 nt, Human
acuugugcacaggcaga

SEQ ID NO: 3212795 - RNA, 23 nt, Human
acuugugacuuuugcuuuaauuc

SEQ ID NO: 3212796 - RNA, 13 nt, Human
acuugucuuucug

SEQ ID NO: 3212797 - RNA, 19 nt, Human
acuugugacuuuugcuuua

SEQ ID NO: 3212798 - RNA, 17 nt, Human
acuugugacuuuugcuu

SEQ ID NO: 3212799 - RNA, 14 nt, Human
acuugugacuuuug

SEQ ID NO: 3212800 - RNA, 23 nt, Human
acuugucuuucugggguuuuucu

SEQ ID NO: 3212801 - RNA, 16 nt, Human
acuugucuuucugggg

SEQ ID NO: 3212802 - RNA, 14 nt, Human
acuugucuuucugg

SEQ ID NO: 3212803 - RNA, 19 nt, Human
ucucuccauuucacuggcu

SEQ ID NO: 3212804 - RNA, 12 nt, Human
ucucucaggcca

SEQ ID NO: 3212805 - RNA, 15 nt, Human
ucucggcucacugca

SEQ ID NO: 3212806 - RNA, 20 nt, Human
ucucggaucaggcucccagg

SEQ ID NO: 3212807 - RNA, 19 nt, Human
ucucgcucuguugcccagg

SEQ ID NO: 3212808 - RNA, 18 nt, Human
ucucgcucuguugcccag

SEQ ID NO: 3212809 - RNA, 21 nt, Human
ucucgcucuguugcccaggcu

SEQ ID NO: 3212810 - RNA, 21 nt, Human
ucucgcggccucuucucucag

SEQ ID NO: 3212811 - RNA, 20 nt, Human
ucucgcuauugucaccaggg

SEQ ID NO: 3212812 - RNA, 17 nt, Human
ucucgaacuccugaccu

SEQ ID NO: 3212813 - RNA, 17 nt, Human
ucuccuugguuauauuu

SEQ ID NO: 3212814 - RNA, 16 nt, Human
acuuuguguucaccuu

SEQ ID NO: 3212815 - RNA, 20 nt, Human
acuuugucuaagaaacauug

SEQ ID NO: 3212816 - RNA, 19 nt, Human
acuuugucuaagaaacauu

SEQ ID NO: 3212817 - RNA, 16 nt, Human
acuuugucuaagaaac

SEQ ID NO: 3212818 - RNA, 23 nt, Human
acuuuguauaguuauguaaauaa

SEQ ID NO: 3212819 - RNA, 15 nt, Human
acuuuguauuguccu

SEQ ID NO: 3212820 - RNA, 24 nt, Human
acuuuguauuguccuauuaguguu

SEQ ID NO: 3212821 - RNA, 18 nt, Human
agaaaaaaacauucuauc

SEQ ID NO: 3212822 - RNA, 22 nt, Human
agaaaaaaacauucuaucuacu

SEQ ID NO: 3212823 - RNA, 14 nt, Human
agaaaaaaaagaaa

SEQ ID NO: 3212824 - RNA, 19 nt, Human
agaaaaaaaaagaaaaaag

SEQ ID NO: 3212825 - RNA, 16 nt, Human
agaaaaaaaaagaaaa

SEQ ID NO: 3212826 - RNA, 18 nt, Human
agaaaaaaaaagaaaaaa

SEQ ID NO: 3212827 - RNA, 17 nt, Human
agaaaaaaaaagaaaaa

SEQ ID NO: 3212828 - RNA, 21 nt, Human
ucuccuuggugucgggcauga

SEQ ID NO: 3212829 - RNA, 23 nt, Human
ucuccuuggugucgggcaugaca

SEQ ID NO: 3212830 - RNA, 17 nt, Human
ucuccuuagcuucuggc

SEQ ID NO: 3212831 - RNA, 20 nt, Human
agaaaaaaaugucaaaagua

SEQ ID NO: 3212832 - RNA, 19 nt, Human
agaaaaaaaugucaaaagu

SEQ ID NO: 3212833 - RNA, 13 nt, Human
agaaaaaaauguc

SEQ ID NO: 3212834 - RNA, 19 nt, Human
ucuccuuaagagacaauuu

SEQ ID NO: 3212835 - RNA, 18 nt, Human
ucuccuuaagagacaauu

SEQ ID NO: 3212836 - RNA, 16 nt, Human
ucucuugguccugcug

SEQ ID NO: 3212837 - RNA, 17 nt, Human
ucucuugguccugcugc

SEQ ID NO: 3212838 - RNA, 18 nt, Human
ucucuugguccugcugca

SEQ ID NO: 3212839 - RNA, 21 nt, Human
agaaaacaaaaaacgaaugaa

SEQ ID NO: 3212840 - RNA, 21 nt, Human
agaaaacaaaaccaaaaguua

SEQ ID NO: 3212841 - RNA, 17 nt, Human
agaaaaaugagccuggc

SEQ ID NO: 3212842 - RNA, 16 nt, Human
agaaaaaugugaauuu

SEQ ID NO: 3212843 - RNA, 16 nt, Human
agaaaaauuucacgau

SEQ ID NO: 3212844 - RNA, 12 nt, Human
agaaaacaaaaa

SEQ ID NO: 3212845 - RNA, 18 nt, Human
agaaaaaugagccuggca

SEQ ID NO: 3212846 - RNA, 19 nt, Human
agaaaaacaaugguaacau

SEQ ID NO: 3212847 - RNA, 22 nt, Human
agaaaaacaaugguaacauuuu

SEQ ID NO: 3212848 - RNA, 13 nt, Human
agaaaaacaaauc

SEQ ID NO: 3212849 - RNA, 19 nt, Human
agaaaaaauauuuucccua

SEQ ID NO: 3212850 - RNA, 17 nt, Human
agaaaaaauauuuuccu

SEQ ID NO: 3212851 - RNA, 23 nt, Human
agaaaaaauauuuuccugccagg

SEQ ID NO: 3212852 - RNA, 20 nt, Human
agaaacacauaauuaacacu

SEQ ID NO: 3212853 - RNA, 18 nt, Human
agaaacacccacaggcau

SEQ ID NO: 3212854 - RNA, 14 nt, Human
agaaacauuggaag

SEQ ID NO: 3212855 - RNA, 13 nt, Human
agaaacauuggaa

SEQ ID NO: 3212856 - RNA, 16 nt, Human
agaaacauuggaagca

SEQ ID NO: 3212857 - RNA, 15 nt, Human
agaaacuggaacucu

SEQ ID NO: 3212858 - RNA, 22 nt, Human
agaaacugucuagcacuuccuu

SEQ ID NO: 3212859 - RNA, 17 nt, Human
agaaacugucuagcacu

SEQ ID NO: 3212860 - RNA, 23 nt, Human
agaaacugucuagcacuuccuug

SEQ ID NO: 3212861 - RNA, 21 nt, Human
agaaacuuaaauuuuaguucu

SEQ ID NO: 3212862 - RNA, 15 nt, Human
agaaacaauuucugu

SEQ ID NO: 3212863 - RNA, 14 nt, Human
agaaacaauuucug

SEQ ID NO: 3212864 - RNA, 13 nt, Human
agaaacaauuucu

SEQ ID NO: 3212865 - RNA, 19 nt, Human
agaaaagauguagauuuau

SEQ ID NO: 3212866 - RNA, 13 nt, Human
agaaaagagagaa

SEQ ID NO: 3212867 - RNA, 16 nt, Human
agaaauaguucuguga

SEQ ID NO: 3212868 - RNA, 15 nt, Human
agaaauaguucugug

SEQ ID NO: 3212869 - RNA, 13 nt, Human
agaaauagacaaa

SEQ ID NO: 3212870 - RNA, 14 nt, Human
agaaauagacaaaa

SEQ ID NO: 3212871 - RNA, 17 nt, Human
agaaauagacaaaaagu

SEQ ID NO: 3212872 - RNA, 18 nt, Human
agaaauagacaaaaagua

SEQ ID NO: 3212873 - RNA, 21 nt, Human
agaaauagacaaaaaguauau

SEQ ID NO: 3212874 - RNA, 22 nt, Human
agaaauagacaaaaaguauauu

SEQ ID NO: 3212875 - RNA, 13 nt, Human
agaaauacuguac

SEQ ID NO: 3212876 - RNA, 16 nt, Human
agaaauacuguacaau

SEQ ID NO: 3212877 - RNA, 14 nt, Human
agaaauacuguaca

SEQ ID NO: 3212878 - RNA, 20 nt, Human
agaaauacagauaaaugauu

SEQ ID NO: 3212879 - RNA, 20 nt, Human
agaaaucuauagaaaguguu

SEQ ID NO: 3212880 - RNA, 19 nt, Human
agaaaucuauagaaagugu

SEQ ID NO: 3212881 - RNA, 21 nt, Human
agaaaucuauagaaaguguuc

SEQ ID NO: 3212882 - RNA, 18 nt, Human
ucugaaggcuggguucug

SEQ ID NO: 3212883 - RNA, 20 nt, Human
ucugaaggaggccaccuccu

SEQ ID NO: 3212884 - RNA, 19 nt, Human
ucugaaggaggccaccucc

SEQ ID NO: 3212885 - RNA, 18 nt, Human
ucugaaggaggccaccuc

SEQ ID NO: 3212886 - RNA, 22 nt, Human
ucugaaggacauugcggacagc

SEQ ID NO: 3212887 - RNA, 17 nt, Human
ucugaaggaggccaccu

SEQ ID NO: 3212888 - RNA, 15 nt, Human
agaaaucuaagcugu

SEQ ID NO: 3212889 - RNA, 17 nt, Human
agaaagcagaacaguga

SEQ ID NO: 3212890 - RNA, 18 nt, Human
agaaagcagaacagugau

SEQ ID NO: 3212891 - RNA, 15 nt, Human
agaaagcaagaugua

SEQ ID NO: 3212892 - RNA, 21 nt, Human
agaaagcaaaauuauguuugc

SEQ ID NO: 3212893 - RNA, 17 nt, Human
agaaagcaaaauuaugu

SEQ ID NO: 3212894 - RNA, 15 nt, Human
agaaagcaaaauuau

SEQ ID NO: 3212895 - RNA, 20 nt, Human
agaaagcagaacagugauua

SEQ ID NO: 3212896 - RNA, 15 nt, Human
agaaagcauauugac

SEQ ID NO: 3212897 - RNA, 16 nt, Human
agaaagcauauugacu

SEQ ID NO: 3212898 - RNA, 17 nt, Human
agaaagcauauugacuu

SEQ ID NO: 3212899 - RNA, 19 nt, Human
agaaauaaugucaaaaaua

SEQ ID NO: 3212900 - RNA, 18 nt, Human
agaaauacagauaaauga

SEQ ID NO: 3212901 - RNA, 16 nt, Human
agaaagacuauucaaa

SEQ ID NO: 3212902 - RNA, 23 nt, Human
agaaagacuauucaaacagucuc

SEQ ID NO: 3212903 - RNA, 22 nt, Human
agaaagacuaucuaaauguuga

SEQ ID NO: 3212904 - RNA, 20 nt, Human
agaaagacuaucuaaauguu

SEQ ID NO: 3212905 - RNA, 16 nt, Human
ucuuuaacuuguaaua

SEQ ID NO: 3212906 - RNA, 12 nt, Human
ucuuuaacuugu

SEQ ID NO: 3212907 - RNA, 15 nt, Human
ucuugguccugcugc

SEQ ID NO: 3212908 - RNA, 17 nt, Human
ucuugguccugcugcag

SEQ ID NO: 3212909 - RNA, 19 nt, Human
ucuugguccugcugcaguu

SEQ ID NO: 3212910 - RNA, 14 nt, Human
ucuugguauuugga

SEQ ID NO: 3212911 - RNA, 22 nt, Human
ucuugguauuuggauaucuguu

SEQ ID NO: 3212912 - RNA, 17 nt, Human
ucuuuccugaggcuggg

SEQ ID NO: 3212913 - RNA, 15 nt, Human
ucuuucucugaggac

SEQ ID NO: 3212914 - RNA, 13 nt, Human
ucuuucucugagg

SEQ ID NO: 3212915 - RNA, 18 nt, Human
ucuuucuaaugugugaau

SEQ ID NO: 3212916 - RNA, 14 nt, Human
ucuuucuaagaaau

SEQ ID NO: 3212917 - RNA, 16 nt, Human
ucuuuccugaggcugg

SEQ ID NO: 3212918 - RNA, 12 nt, Human
ucuuuauugucu

SEQ ID NO: 3212919 - RNA, 13 nt, Human
ucuuuauugucug

SEQ ID NO: 3212920 - RNA, 14 nt, Human
ucuuuauugucugu

SEQ ID NO: 3212921 - RNA, 16 nt, Human
ucuuuauugucuguaa

SEQ ID NO: 3212922 - RNA, 17 nt, Human
ucuuuauugucuguaaa

SEQ ID NO: 3212923 - RNA, 12 nt, Human
ucuuuauugaaa

SEQ ID NO: 3212924 - RNA, 14 nt, Human
ucuuuauugaaauu

SEQ ID NO: 3212925 - RNA, 15 nt, Human
ucuuuauugaaauuc

SEQ ID NO: 3212926 - RNA, 21 nt, Human
ucuugggcaauauucucugua

SEQ ID NO: 3212927 - RNA, 17 nt, Human
ucuugggcaauauucuc

SEQ ID NO: 3212928 - RNA, 24 nt, Human
ucuugggcaauauucucuguacau

SEQ ID NO: 3212929 - RNA, 22 nt, Human
ucuugggcaauauucucuguac

SEQ ID NO: 3212930 - RNA, 16 nt, Human
ucuugggggaaaauac

SEQ ID NO: 3212931 - RNA, 17 nt, Human
ucuuggucagauuugaa

SEQ ID NO: 3212932 - RNA, 14 nt, Human
ucuugguccugcug

SEQ ID NO: 3212933 - RNA, 22 nt, Human
ucuugcaauggcagccuuggca

SEQ ID NO: 3212934 - RNA, 18 nt, Human
ucuugcaauggcagccuu

SEQ ID NO: 3212935 - RNA, 19 nt, Human
ucuugcaauggcagccuug

SEQ ID NO: 3212936 - RNA, 16 nt, Human
ucuuggccuuacugua

SEQ ID NO: 3212937 - RNA, 23 nt, Human
ucuugauucguagauuuaauaac

SEQ ID NO: 3212938 - RNA, 13 nt, Human
ucuugauucauaa

SEQ ID NO: 3212939 - RNA, 20 nt, Human
ucuugaguuguuuuuguaua

SEQ ID NO: 3212940 - RNA, 21 nt, Human
ucuugaguuguuuuuguauau

SEQ ID NO: 3212941 - RNA, 15 nt, Human
ucuugacucuugccu

SEQ ID NO: 3212942 - RNA, 13 nt, Human
ucuugagccuggg

SEQ ID NO: 3212943 - RNA, 16 nt, Human
ucuugagccugggagg

SEQ ID NO: 3212944 - RNA, 15 nt, Human
agacuauucaaacag

SEQ ID NO: 3212945 - RNA, 14 nt, Human
agacuauucaaaca

SEQ ID NO: 3212946 - RNA, 12 nt, Human
agacuauucaaa

SEQ ID NO: 3212947 - RNA, 21 nt, Human
agaccuucuccuucaccuuug

SEQ ID NO: 3212948 - RNA, 23 nt, Human
agaccuucuccuucaccuuuguc

SEQ ID NO: 3212949 - RNA, 15 nt, Human
agaccuucuccuuca

SEQ ID NO: 3212950 - RNA, 18 nt, Human
agaccuucuccuucaccu

SEQ ID NO: 3212951 - RNA, 11 nt, Human
agaccuucucc

SEQ ID NO: 3212952 - RNA, 20 nt, Human
agaccuggggcugcugugaa

SEQ ID NO: 3212953 - RNA, 19 nt, Human
agacccccuggagacuaac

SEQ ID NO: 3212954 - RNA, 15 nt, Human
agacccccuggagac

SEQ ID NO: 3212955 - RNA, 14 nt, Human
agacccccuggaga

SEQ ID NO: 3212956 - RNA, 13 nt, Human
agacccccuggag

SEQ ID NO: 3212957 - RNA, 17 nt, Human
agacaucaacagauaaa

SEQ ID NO: 3212958 - RNA, 18 nt, Human
agacaucaacagauaaau

SEQ ID NO: 3212959 - RNA, 14 nt, Human
agacauauuuacaa

SEQ ID NO: 3212960 - RNA, 14 nt, Human
agacauagaauuaa

SEQ ID NO: 3212961 - RNA, 21 nt, Human
agacauagaauuaacacauga

SEQ ID NO: 3212962 - RNA, 21 nt, Human
ucuucugaacuuggcgcugcc

SEQ ID NO: 3212963 - RNA, 12 nt, Human
ucuucugcuuca

SEQ ID NO: 3212964 - RNA, 16 nt, Human
ucuucugcucuuucuu

SEQ ID NO: 3212965 - RNA, 18 nt, Human
ucuucugcucuuucuucu

SEQ ID NO: 3212966 - RNA, 22 nt, Human
ucuucugcucuuucuucuucca

SEQ ID NO: 3212967 - RNA, 23 nt, Human
ucuucuguacgucugacaggcaa

SEQ ID NO: 3212968 - RNA, 15 nt, Human
ucuucuguacgucug

SEQ ID NO: 3212969 - RNA, 18 nt, Human
ucuucuggguuccuuccu

SEQ ID NO: 3212970 - RNA, 15 nt, Human
ucuucuguaauauuu

SEQ ID NO: 3212971 - RNA, 18 nt, Human
ucuucuguaauauuuaca

SEQ ID NO: 3212972 - RNA, 20 nt, Human
ucuucuguggguuucuaaag

SEQ ID NO: 3212973 - RNA, 12 nt, Human
ucuucuguccaa

SEQ ID NO: 3212974 - RNA, 12 nt, Human
ucuucuguguuu

SEQ ID NO: 3212975 - RNA, 12 nt, Human
ucuucucucaga

SEQ ID NO: 3212976 - RNA, 13 nt, Human
ucuucucucagac

SEQ ID NO: 3212977 - RNA, 21 nt, Human
ucuuccucugcuaaauugaug

SEQ ID NO: 3212978 - RNA, 14 nt, Human
ucuucucucugcuc

SEQ ID NO: 3212979 - RNA, 12 nt, Human
ucuucucucugc

SEQ ID NO: 3212980 - RNA, 17 nt, Human
ucuucucucugcucuga

SEQ ID NO: 3212981 - RNA, 15 nt, Human
ucuuccucccucccu

SEQ ID NO: 3212982 - RNA, 14 nt, Human
ucuuccuccugaca

SEQ ID NO: 3212983 - RNA, 12 nt, Human
ucuuccuccuga

SEQ ID NO: 3212984 - RNA, 20 nt, Human
ucuuccuccaaggacagaag

SEQ ID NO: 3212985 - RNA, 14 nt, Human
ucuuccucugcuga

SEQ ID NO: 3212986 - RNA, 19 nt, Human
ucuuccucugcuaaauuga

SEQ ID NO: 3212987 - RNA, 12 nt, Human
ucuuccucugcu

SEQ ID NO: 3212988 - RNA, 11 nt, Human
ucuuccucugc

SEQ ID NO: 3212989 - RNA, 19 nt, Human
ucuucccuacaguugaaaa

SEQ ID NO: 3212990 - RNA, 14 nt, Human
ucuuccucccuccc

SEQ ID NO: 3212991 - RNA, 16 nt, Human
ucuuccuccaaggaca

SEQ ID NO: 3212992 - RNA, 14 nt, Human
ucuucccauggugc

SEQ ID NO: 3212993 - RNA, 13 nt, Human
ucuuccccaggaa

SEQ ID NO: 3212994 - RNA, 14 nt, Human
agaaucacuugaac

SEQ ID NO: 3212995 - RNA, 16 nt, Human
agaaucagaagauagu

SEQ ID NO: 3212996 - RNA, 17 nt, Human
agaaucagaagauaguc

SEQ ID NO: 3212997 - RNA, 22 nt, Human
agaaucaccuaauuaauuucag

SEQ ID NO: 3212998 - RNA, 19 nt, Human
agaaucaccuaauuaauuu

SEQ ID NO: 3212999 - RNA, 16 nt, Human
agaaucacaggcuggg

SEQ ID NO: 3213000 - RNA, 15 nt, Human
agaaucacaggcugg

SEQ ID NO: 3213001 - RNA, 13 nt, Human
agaaucacaggcu

SEQ ID NO: 3213002 - RNA, 19 nt, Human
ucuucaacugaccagccuc

SEQ ID NO: 3213003 - RNA, 16 nt, Human
ucuucaacugaccagc

SEQ ID NO: 3213004 - RNA, 15 nt, Human
ucuucaacucccugc

SEQ ID NO: 3213005 - RNA, 17 nt, Human
ucuucagagacuccugc

SEQ ID NO: 3213006 - RNA, 18 nt, Human
ucuucagagacuccugca

SEQ ID NO: 3213007 - RNA, 12 nt, Human
ucuucagagacu

SEQ ID NO: 3213008 - RNA, 20 nt, Human
ucuucagagacuccugcagg

SEQ ID NO: 3213009 - RNA, 15 nt, Human
ucuuccaggcuggga

SEQ ID NO: 3213010 - RNA, 17 nt, Human
ucuuccaggcugggaga

SEQ ID NO: 3213011 - RNA, 20 nt, Human
ucuuccaggcugggagagcc

SEQ ID NO: 3213012 - RNA, 21 nt, Human
ucuucccaacuugccuuugaa

SEQ ID NO: 3213013 - RNA, 18 nt, Human
ucuucccaacuugccuuu

SEQ ID NO: 3213014 - RNA, 19 nt, Human
agagauguguaauuuuucu

SEQ ID NO: 3213015 - RNA, 22 nt, Human
agagcaaccccuggaccccagc

SEQ ID NO: 3213016 - RNA, 21 nt, Human
agagcaaccccuggaccccag

SEQ ID NO: 3213017 - RNA, 18 nt, Human
agagcaaccccuggaccc

SEQ ID NO: 3213018 - RNA, 19 nt, Human
agagcaagacgcugugcug

SEQ ID NO: 3213019 - RNA, 23 nt, Human
agagcaagacgcugugcugcccu

SEQ ID NO: 3213020 - RNA, 20 nt, Human
agagauggcuuacaaaaaga

SEQ ID NO: 3213021 - RNA, 23 nt, Human
agagauggcuuacaaaaagaaau

SEQ ID NO: 3213022 - RNA, 23 nt, Human
agagauguccauuuuuacaaguu

SEQ ID NO: 3213023 - RNA, 13 nt, Human
agagauguguaau

SEQ ID NO: 3213024 - RNA, 18 nt, Human
agagauguguaauuuuuc

SEQ ID NO: 3213025 - RNA, 14 nt, Human
agagauguguaauu

SEQ ID NO: 3213026 - RNA, 16 nt, Human
agagaugucucuuaua

SEQ ID NO: 3213027 - RNA, 23 nt, Human
agagacuccugcaggcagccagg

SEQ ID NO: 3213028 - RNA, 15 nt, Human
agagagaaagcauau

SEQ ID NO: 3213029 - RNA, 22 nt, Human
agagaucaaccccuucgcuccu

SEQ ID NO: 3213030 - RNA, 13 nt, Human
agagauauuuugu

SEQ ID NO: 3213031 - RNA, 14 nt, Human
agagauauuuugua

SEQ ID NO: 3213032 - RNA, 15 nt, Human
agagauauuuuguaa

SEQ ID NO: 3213033 - RNA, 16 nt, Human
agagauauuuuguaaa

SEQ ID NO: 3213034 - RNA, 15 nt, Human
ugaaagacuguacaa

SEQ ID NO: 3213035 - RNA, 13 nt, Human
ugaaagacuguac

SEQ ID NO: 3213036 - RNA, 23 nt, Human
ugaaacuuugagaucuaaaaaua

SEQ ID NO: 3213037 - RNA, 22 nt, Human
ugaaacuuugagaucuaaaaau

SEQ ID NO: 3213038 - RNA, 16 nt, Human
ugaaagaauguaaagc

SEQ ID NO: 3213039 - RNA, 15 nt, Human
ugaaagaauguaaag

SEQ ID NO: 3213040 - RNA, 14 nt, Human
ugaaagaauguaaa

SEQ ID NO: 3213041 - RNA, 14 nt, Human
ugaaacuuugagau

SEQ ID NO: 3213042 - RNA, 12 nt, Human
ugaaacuuugag

SEQ ID NO: 3213043 - RNA, 16 nt, Human
agagacuccagcuggg

SEQ ID NO: 3213044 - RNA, 15 nt, Human
agagacuccugcagg

SEQ ID NO: 3213045 - RNA, 17 nt, Human
agagacuccugcaggca

SEQ ID NO: 3213046 - RNA, 18 nt, Human
agagacuccugcaggcag

SEQ ID NO: 3213047 - RNA, 19 nt, Human
agagacuccugcaggcagc

SEQ ID NO: 3213048 - RNA, 20 nt, Human
agagacuccugcaggcagcc

SEQ ID NO: 3213049 - RNA, 21 nt, Human
agagacuccugcaggcagcca

SEQ ID NO: 3213050 - RNA, 22 nt, Human
agagacuccugcaggcagccag

SEQ ID NO: 3213051 - RNA, 19 nt, Human
agagcaguugagaggacac

SEQ ID NO: 3213052 - RNA, 22 nt, Human
agagcaccuuagacagucccug

SEQ ID NO: 3213053 - RNA, 21 nt, Human
agagcaccuuagacagucccu

SEQ ID NO: 3213054 - RNA, 24 nt, Human
agagcaaccccuggaccccagccu

SEQ ID NO: 3213055 - RNA, 23 nt, Human
agagcaaccccuggaccccagcc

SEQ ID NO: 3213056 - RNA, 23 nt, Human
agagcaccuuagacagucccugc

SEQ ID NO: 3213057 - RNA, 19 nt, Human
agagcagcuccuuccuagc

SEQ ID NO: 3213058 - RNA, 13 nt, Human
agagcagccagga

SEQ ID NO: 3213059 - RNA, 19 nt, Human
agagcagcaaggucuugcu

SEQ ID NO: 3213060 - RNA, 12 nt, Human
agagcugaacag

SEQ ID NO: 3213061 - RNA, 23 nt, Human
agagcuauggacagcauugccag

SEQ ID NO: 3213062 - RNA, 19 nt, Human
agagcuauggacagcauug

SEQ ID NO: 3213063 - RNA, 14 nt, Human
agagcuaggcaggg

SEQ ID NO: 3213064 - RNA, 14 nt, Human
agagcuagagaaau

SEQ ID NO: 3213065 - RNA, 13 nt, Human
agagccuuccagg

SEQ ID NO: 3213066 - RNA, 15 nt, Human
agagccuuccagggg

SEQ ID NO: 3213067 - RNA, 17 nt, Human
agagccuuccaggggug

SEQ ID NO: 3213068 - RNA, 20 nt, Human
agagcuagcagcagggaggg

SEQ ID NO: 3213069 - RNA, 12 nt, Human
ugaaacuuggau

SEQ ID NO: 3213070 - RNA, 17 nt, Human
ugaaacugacuugcugu

SEQ ID NO: 3213071 - RNA, 19 nt, Human
ugaaacuccagaugccaca

SEQ ID NO: 3213072 - RNA, 18 nt, Human
ugaaacuccagaugccac

SEQ ID NO: 3213073 - RNA, 17 nt, Human
ugaaacuccagaugcca

SEQ ID NO: 3213074 - RNA, 16 nt, Human
ugaaacgcaaccacca

SEQ ID NO: 3213075 - RNA, 19 nt, Human
ugaaaaucgugacaacacu

SEQ ID NO: 3213076 - RNA, 17 nt, Human
ugaaaauguauguguaa

SEQ ID NO: 3213077 - RNA, 12 nt, Human
ugaaaauauuua

SEQ ID NO: 3213078 - RNA, 11 nt, Human
ugaaaauauuu

SEQ ID NO: 3213079 - RNA, 14 nt, Human
ugaaaauauuuaaa

SEQ ID NO: 3213080 - RNA, 13 nt, Human
ugaaaauauuuaa

SEQ ID NO: 3213081 - RNA, 16 nt, Human
ugaaaaucgugacaac

SEQ ID NO: 3213082 - RNA, 14 nt, Human
ugaaaaggccaaga

SEQ ID NO: 3213083 - RNA, 21 nt, Human
ugaaaagcuuuguuuguucuu

SEQ ID NO: 3213084 - RNA, 17 nt, Human
ugaaaagcuuuguuugu

SEQ ID NO: 3213085 - RNA, 18 nt, Human
ugaaaaguaauauuuauu

SEQ ID NO: 3213086 - RNA, 19 nt, Human
ugaaaaguaauauuuauua

SEQ ID NO: 3213087 - RNA, 20 nt, Human
ugaaaaguaauauuuauuaa

SEQ ID NO: 3213088 - RNA, 21 nt, Human
ugaaaaguaauauuuauuaaa

SEQ ID NO: 3213089 - RNA, 20 nt, Human
ugaaaauaguuuauuuuaaa

SEQ ID NO: 3213090 - RNA, 22 nt, Human
ugaaaauaguuuauuuuaaaac

SEQ ID NO: 3213091 - RNA, 23 nt, Human
ugaaaauaguuuauuuuaaaaca

SEQ ID NO: 3213092 - RNA, 16 nt, Human
ugaaaauaucggggag

SEQ ID NO: 3213093 - RNA, 13 nt, Human
ugaaaauauauac

SEQ ID NO: 3213094 - RNA, 19 nt, Human
ugaaaaaugagauugaaug

SEQ ID NO: 3213095 - RNA, 20 nt, Human
ugaaaaaucugcuguuaacu

SEQ ID NO: 3213096 - RNA, 22 nt, Human
ugaaaaaguucugcagauaaac

SEQ ID NO: 3213097 - RNA, 20 nt, Human
ugaaaaaggaggaagagaaa

SEQ ID NO: 3213098 - RNA, 22 nt, Human
ugaaaaaggaggaagagaaaaa

SEQ ID NO: 3213099 - RNA, 20 nt, Human
ugaaaaaauuuaaaaguaaa

SEQ ID NO: 3213100 - RNA, 17 nt, Human
ugaaaaaagcaguucuu

SEQ ID NO: 3213101 - RNA, 16 nt, Human
ugaaaaaagcaguucu

SEQ ID NO: 3213102 - RNA, 16 nt, Human
ugaaaaaggaggaaga

SEQ ID NO: 3213103 - RNA, 17 nt, Human
ucuuuuaaauuagaaaa

SEQ ID NO: 3213104 - RNA, 19 nt, Human
ucuuuuaaauuagaaaaua

SEQ ID NO: 3213105 - RNA, 20 nt, Human
ucuuuuaaauuagaaaauau

SEQ ID NO: 3213106 - RNA, 21 nt, Human
ucuuuuaaauuagaaaauauu

SEQ ID NO: 3213107 - RNA, 22 nt, Human
ugaaaaaaaaaaugcugaacau

SEQ ID NO: 3213108 - RNA, 17 nt, Human
ucuuuuaaaaaguauug

SEQ ID NO: 3213109 - RNA, 16 nt, Human
ucuuuuaaaaaguauu

SEQ ID NO: 3213110 - RNA, 14 nt, Human
ucuuuuaaaaagua

SEQ ID NO: 3213111 - RNA, 13 nt, Human
ucuuuuaaaaagu

SEQ ID NO: 3213112 - RNA, 14 nt, Human
ucuuuguuaauuug

SEQ ID NO: 3213113 - RNA, 20 nt, Human
ucuuucugcacacaaauauu

SEQ ID NO: 3213114 - RNA, 21 nt, Human
ucuuucugguuguuuuuaaac

SEQ ID NO: 3213115 - RNA, 13 nt, Human
agagacaggcagg

SEQ ID NO: 3213116 - RNA, 22 nt, Human
agagacaggcaggugaucugcu

SEQ ID NO: 3213117 - RNA, 12 nt, Human
agagacaggcag

SEQ ID NO: 3213118 - RNA, 13 nt, Human
ucuuucucuuuua

SEQ ID NO: 3213119 - RNA, 22 nt, Human
ucuuuggucuacacugugcuga

SEQ ID NO: 3213120 - RNA, 20 nt, Human
agagacaggguuucaccaug

SEQ ID NO: 3213121 - RNA, 14 nt, Human
ucuuuguggcuucc

SEQ ID NO: 3213122 - RNA, 19 nt, Human
agagaccacccauaucaug

SEQ ID NO: 3213123 - RNA, 17 nt, Human
agaguauuuuuguauuc

SEQ ID NO: 3213124 - RNA, 21 nt, Human
agagucaacuacacaaagcag

SEQ ID NO: 3213125 - RNA, 22 nt, Human
agagucaacuacacaaagcagg

SEQ ID NO: 3213126 - RNA, 15 nt, Human
agagucacuggaaca

SEQ ID NO: 3213127 - RNA, 23 nt, Human
agaguuuagcuguaacaguucuu

SEQ ID NO: 3213128 - RNA, 22 nt, Human
agaguuuagcuguaacaguucu

SEQ ID NO: 3213129 - RNA, 19 nt, Human
agaguuucguggcuucagg

SEQ ID NO: 3213130 - RNA, 17 nt, Human
agaguuucuuuacauug

SEQ ID NO: 3213131 - RNA, 17 nt, Human
agaguuugccuuauaaa

SEQ ID NO: 3213132 - RNA, 18 nt, Human
agauaauauuaaggaaga

SEQ ID NO: 3213133 - RNA, 22 nt, Human
agauaauauuaaggaagacaau

SEQ ID NO: 3213134 - RNA, 20 nt, Human
agauacaggaaaagcugcug

SEQ ID NO: 3213135 - RNA, 11 nt, Human
agauauuuuau

SEQ ID NO: 3213136 - RNA, 13 nt, Human
agauauuugcacc

SEQ ID NO: 3213137 - RNA, 18 nt, Human
agauauuugcaguuuuuc

SEQ ID NO: 3213138 - RNA, 18 nt, Human
agaucaaaagguuaauaa

SEQ ID NO: 3213139 - RNA, 20 nt, Human
agaucaaaaaggcuuauaaa

SEQ ID NO: 3213140 - RNA, 16 nt, Human
agaucaaaaaggcuua

SEQ ID NO: 3213141 - RNA, 19 nt, Human
agaucaaaaaggcuuauaa

SEQ ID NO: 3213142 - RNA, 14 nt, Human
agaucaaaaaggcu

SEQ ID NO: 3213143 - RNA, 15 nt, Human
agaucaaaaaggcuu

SEQ ID NO: 3213144 - RNA, 11 nt, Human
ugaauuuggag

SEQ ID NO: 3213145 - RNA, 14 nt, Human
agaucaaauaguug

SEQ ID NO: 3213146 - RNA, 19 nt, Human
agaucaaauaguugcauag

SEQ ID NO: 3213147 - RNA, 13 nt, Human
ugaauuuuaaagu

SEQ ID NO: 3213148 - RNA, 14 nt, Human
ugaauuuuaaagua

SEQ ID NO: 3213149 - RNA, 16 nt, Human
ugaauuuuaaaguaug

SEQ ID NO: 3213150 - RNA, 22 nt, Human
ugaauuuuaaaguaugcauuau

SEQ ID NO: 3213151 - RNA, 18 nt, Human
ugaauuuuuaugugugau

SEQ ID NO: 3213152 - RNA, 15 nt, Human
ugaauuuuuaugugu

SEQ ID NO: 3213153 - RNA, 23 nt, Human
ugaauuuuuauauauauaucugu

SEQ ID NO: 3213154 - RNA, 22 nt, Human
ugacacauuacaagccuggaaa

SEQ ID NO: 3213155 - RNA, 21 nt, Human
ugacacgacuucuguuucaca

SEQ ID NO: 3213156 - RNA, 17 nt, Human
ugacaccccacuuagcc

SEQ ID NO: 3213157 - RNA, 17 nt, Human
ugacaccaucuuuuauu

SEQ ID NO: 3213158 - RNA, 21 nt, Human
ugacaccaucuuuuauucuuu

SEQ ID NO: 3213159 - RNA, 18 nt, Human
ugacacacagcucugucc

SEQ ID NO: 3213160 - RNA, 16 nt, Human
ugacacacagcucugu

SEQ ID NO: 3213161 - RNA, 14 nt, Human
ugacaaagcuuccc

SEQ ID NO: 3213162 - RNA, 19 nt, Human
ugacacacagcucuguccu

SEQ ID NO: 3213163 - RNA, 12 nt, Human
ugaagccuuugu

SEQ ID NO: 3213164 - RNA, 23 nt, Human
agaggugugcaagagagggaugc

SEQ ID NO: 3213165 - RNA, 22 nt, Human
agaggugugcaagagagggaug

SEQ ID NO: 3213166 - RNA, 16 nt, Human
agagguggggagcaga

SEQ ID NO: 3213167 - RNA, 15 nt, Human
agagguuaagguggg

SEQ ID NO: 3213168 - RNA, 15 nt, Human
agaguauggauugaa

SEQ ID NO: 3213169 - RNA, 17 nt, Human
ugaaaguauguuuuacu

SEQ ID NO: 3213170 - RNA, 21 nt, Human
ugaaagucaguuuaagaggcu

SEQ ID NO: 3213171 - RNA, 14 nt, Human
ugaaagucaguuua

SEQ ID NO: 3213172 - RNA, 22 nt, Human
agagggacuguucuuuuguccc

SEQ ID NO: 3213173 - RNA, 16 nt, Human
agagggagggagggcu

SEQ ID NO: 3213174 - RNA, 14 nt, Human
agaggcugucuguu

SEQ ID NO: 3213175 - RNA, 23 nt, Human
ugaauguaugcuucauacaggga

SEQ ID NO: 3213176 - RNA, 20 nt, Human
ugaauguaugcuucauacag

SEQ ID NO: 3213177 - RNA, 19 nt, Human
ugaauguaugcuucauaca

SEQ ID NO: 3213178 - RNA, 14 nt, Human
ugaauguaugcuuc

SEQ ID NO: 3213179 - RNA, 13 nt, Human
ugaauguauguaa

SEQ ID NO: 3213180 - RNA, 14 nt, Human
ugaauguauguaaa

SEQ ID NO: 3213181 - RNA, 18 nt, Human
ugaauauugccauuaugc

SEQ ID NO: 3213182 - RNA, 16 nt, Human
ugaauauugccauuau

SEQ ID NO: 3213183 - RNA, 15 nt, Human
ugaauaguauugugu

SEQ ID NO: 3213184 - RNA, 12 nt, Human
ugaauauaaaaa

SEQ ID NO: 3213185 - RNA, 13 nt, Human
ugaauauaaaaaa

SEQ ID NO: 3213186 - RNA, 14 nt, Human
ugaauaugauuaaa

SEQ ID NO: 3213187 - RNA, 15 nt, Human
ugaauaugauuaaaa

SEQ ID NO: 3213188 - RNA, 21 nt, Human
ugaauaugauuaaaaauauca

SEQ ID NO: 3213189 - RNA, 22 nt, Human
ugaauaugauuaaaaauaucaa

SEQ ID NO: 3213190 - RNA, 13 nt, Human
ugaauaugauuaa

SEQ ID NO: 3213191 - RNA, 18 nt, Human
ugaauacugcuugaauaa

SEQ ID NO: 3213192 - RNA, 21 nt, Human
ugaauacugcuugaauaaaca

SEQ ID NO: 3213193 - RNA, 13 nt, Human
ugaauacugcuug

SEQ ID NO: 3213194 - RNA, 15 nt, Human
ugaauacugcuugaa

SEQ ID NO: 3213195 - RNA, 16 nt, Human
ugaauacugcuugaau

SEQ ID NO: 3213196 - RNA, 13 nt, Human
ugaauacuugaac

SEQ ID NO: 3213197 - RNA, 15 nt, Human
ugaauacuugaacca

SEQ ID NO: 3213198 - RNA, 16 nt, Human
ugaauacuugaaccau

SEQ ID NO: 3213199 - RNA, 19 nt, Human
ugaauacuugaaccauaaa

SEQ ID NO: 3213200 - RNA, 14 nt, Human
ugaagucacacagu

SEQ ID NO: 3213201 - RNA, 14 nt, Human
ugaagucacugcac

SEQ ID NO: 3213202 - RNA, 15 nt, Human
ugaagggguuuucuu

SEQ ID NO: 3213203 - RNA, 23 nt, Human
ugaagguagcauucuuuggaguu

SEQ ID NO: 3213204 - RNA, 16 nt, Human
ugaauaaagacaccua

SEQ ID NO: 3213205 - RNA, 15 nt, Human
ugaauaaagacaccu

SEQ ID NO: 3213206 - RNA, 16 nt, Human
ugaagucacugcacag

SEQ ID NO: 3213207 - RNA, 15 nt, Human
ugaagucacugcaca

SEQ ID NO: 3213208 - RNA, 20 nt, Human
ugaccuuccaagagccugag

SEQ ID NO: 3213209 - RNA, 19 nt, Human
ugaccuuccaagagccuga

SEQ ID NO: 3213210 - RNA, 18 nt, Human
ugaccuuccaagagccug

SEQ ID NO: 3213211 - RNA, 16 nt, Human
ugaccuuaaaugcaac

SEQ ID NO: 3213212 - RNA, 14 nt, Human
ugaccuuaaaugca

SEQ ID NO: 3213213 - RNA, 18 nt, Human
ugaccugaggcccuucuc

SEQ ID NO: 3213214 - RNA, 19 nt, Human
ugaccugaggcccuucucu

SEQ ID NO: 3213215 - RNA, 17 nt, Human
ugaccugaggcccuucu

SEQ ID NO: 3213216 - RNA, 20 nt, Human
ugaccccugcccagaucagc

SEQ ID NO: 3213217 - RNA, 23 nt, Human
ugaccccucauagcccucacccu

SEQ ID NO: 3213218 - RNA, 13 nt, Human
ugaccccugccca

SEQ ID NO: 3213219 - RNA, 12 nt, Human
ugacuccugguc

SEQ ID NO: 3213220 - RNA, 14 nt, Human
ugacuccugguccu

SEQ ID NO: 3213221 - RNA, 22 nt, Human
ugacucccccaguccccuuccc

SEQ ID NO: 3213222 - RNA, 19 nt, Human
ugacucccccaguccccuu

SEQ ID NO: 3213223 - RNA, 18 nt, Human
ugacucccccaguccccu

SEQ ID NO: 3213224 - RNA, 14 nt, Human
ugacuaggaaaaaa

SEQ ID NO: 3213225 - RNA, 14 nt, Human
agauguuuaaaaca

SEQ ID NO: 3213226 - RNA, 15 nt, Human
agauguuuaaaacac

SEQ ID NO: 3213227 - RNA, 16 nt, Human
agauguuuaaaacacc

SEQ ID NO: 3213228 - RNA, 14 nt, Human
ugacccaugcugcc

SEQ ID NO: 3213229 - RNA, 15 nt, Human
ugacccaugcugccc

SEQ ID NO: 3213230 - RNA, 12 nt, Human
ugacccaugcug

SEQ ID NO: 3213231 - RNA, 13 nt, Human
agauuaagaaaua

SEQ ID NO: 3213232 - RNA, 16 nt, Human
ugacccaugcugcccu

SEQ ID NO: 3213233 - RNA, 21 nt, Human
ugacccaugcugcccugugag

SEQ ID NO: 3213234 - RNA, 19 nt, Human
ugacccaugggcaggagac

SEQ ID NO: 3213235 - RNA, 18 nt, Human
ugacccaugggcaggaga

SEQ ID NO: 3213236 - RNA, 16 nt, Human
ugacccaugggcagga

SEQ ID NO: 3213237 - RNA, 14 nt, Human
agaugcagcucuuc

SEQ ID NO: 3213238 - RNA, 13 nt, Human
agaugcagcucuu

SEQ ID NO: 3213239 - RNA, 18 nt, Human
agaugcagcucuuccugg

SEQ ID NO: 3213240 - RNA, 17 nt, Human
agaugcagcucuuccug

SEQ ID NO: 3213241 - RNA, 16 nt, Human
agaugcagcucuuccu

SEQ ID NO: 3213242 - RNA, 17 nt, Human
ugacacuuaaaaauggu

SEQ ID NO: 3213243 - RNA, 16 nt, Human
ugacacuuaaaaaugg

SEQ ID NO: 3213244 - RNA, 16 nt, Human
agaugccgcauuugga

SEQ ID NO: 3213245 - RNA, 20 nt, Human
agaugcugacuguacuccuc

SEQ ID NO: 3213246 - RNA, 23 nt, Human
agaugcugacuguacuccuccca

SEQ ID NO: 3213247 - RNA, 15 nt, Human
ugacuucuaaguaaa

SEQ ID NO: 3213248 - RNA, 23 nt, Human
ugacuucuaaguaaaaccacagc

SEQ ID NO: 3213249 - RNA, 22 nt, Human
ugacuucuaaguaaaaccacag

SEQ ID NO: 3213250 - RNA, 18 nt, Human
agauuccagagaguggcu

SEQ ID NO: 3213251 - RNA, 22 nt, Human
agauucauauuuacuucuuaua

SEQ ID NO: 3213252 - RNA, 19 nt, Human
agauucauauuuacuucuu

SEQ ID NO: 3213253 - RNA, 15 nt, Human
agauucccugagcag

SEQ ID NO: 3213254 - RNA, 13 nt, Human
agauuggaaggaa

SEQ ID NO: 3213255 - RNA, 15 nt, Human
agauuggaucaagua

SEQ ID NO: 3213256 - RNA, 17 nt, Human
agauuggaucaaguauu

SEQ ID NO: 3213257 - RNA, 22 nt, Human
agauuggaucaaguauuacuaa

SEQ ID NO: 3213258 - RNA, 22 nt, Human
agauuggauuuuauguugacau

SEQ ID NO: 3213259 - RNA, 17 nt, Human
agauuggauuuuauguu

SEQ ID NO: 3213260 - RNA, 15 nt, Human
agauuggauuuuaug

SEQ ID NO: 3213261 - RNA, 22 nt, Human
agauugcuguguguugccuggg

SEQ ID NO: 3213262 - RNA, 23 nt, Human
agauuggacauaacugacuuagu

SEQ ID NO: 3213263 - RNA, 13 nt, Human
agauuuuaguuuu

SEQ ID NO: 3213264 - RNA, 20 nt, Human
agauuuuaguuuuauuuucu

SEQ ID NO: 3213265 - RNA, 15 nt, Human
agauuuuaguuuuau

SEQ ID NO: 3213266 - RNA, 14 nt, Human
agauuucuguucag

SEQ ID NO: 3213267 - RNA, 15 nt, Human
agauuucucuuugaa

SEQ ID NO: 3213268 - RNA, 12 nt, Human
agauuucuguuc

SEQ ID NO: 3213269 - RNA, 11 nt, Human
agauuucuguu

SEQ ID NO: 3213270 - RNA, 14 nt, Human
agauuucucuuuga

SEQ ID NO: 3213271 - RNA, 23 nt, Human
agauuggauuuuauguugacauu

SEQ ID NO: 3213272 - RNA, 20 nt, Human
agauuucucauuugccaaua

SEQ ID NO: 3213273 - RNA, 23 nt, Human
agauuuuaguuuuauuuucuaaa

SEQ ID NO: 3213274 - RNA, 14 nt, Human
agauuuuauagugu

SEQ ID NO: 3213275 - RNA, 22 nt, Human
agauuuuaguuuuauuuucuaa

SEQ ID NO: 3213276 - RNA, 21 nt, Human
agauuuugaaauuuuuauuaa

SEQ ID NO: 3213277 - RNA, 22 nt, Human
agauuuuguguuuauucuugau

SEQ ID NO: 3213278 - RNA, 20 nt, Human
agauuuuguguuuauucuug

SEQ ID NO: 3213279 - RNA, 19 nt, Human
agauuuuguguuuauucuu

SEQ ID NO: 3213280 - RNA, 18 nt, Human
agauuuuguguuuauucu

SEQ ID NO: 3213281 - RNA, 23 nt, Human
agauuuuguguuuauucuugaug

SEQ ID NO: 3213282 - RNA, 23 nt, Human
agcaacgcaggcccccaggugcc

SEQ ID NO: 3213283 - RNA, 18 nt, Human
agcaaaaaaaguuguaug

SEQ ID NO: 3213284 - RNA, 15 nt, Human
agcaaaaaaaguugu

SEQ ID NO: 3213285 - RNA, 16 nt, Human
agcaaaaaauaaugac

SEQ ID NO: 3213286 - RNA, 20 nt, Human
agcaaaaaaaguuguaugau

SEQ ID NO: 3213287 - RNA, 14 nt, Human
agcaacgcaggccc

SEQ ID NO: 3213288 - RNA, 21 nt, Human
agcaacuaaaaugugucuugc

SEQ ID NO: 3213289 - RNA, 13 nt, Human
agcaagacgcugu

SEQ ID NO: 3213290 - RNA, 16 nt, Human
agcaagacgcugugcu

SEQ ID NO: 3213291 - RNA, 17 nt, Human
agcaagacgcugugcug

SEQ ID NO: 3213292 - RNA, 20 nt, Human
agcaagacgcugugcugccc

SEQ ID NO: 3213293 - RNA, 21 nt, Human
agcaagacgcugugcugcccu

SEQ ID NO: 3213294 - RNA, 22 nt, Human
agcaagacgcugugcugcccug

SEQ ID NO: 3213295 - RNA, 23 nt, Human
agcaagacgcugugcugcccugc

SEQ ID NO: 3213296 - RNA, 18 nt, Human
agcaagagagcagcaagg

SEQ ID NO: 3213297 - RNA, 23 nt, Human
agcaagagagcagcaaggucuug

SEQ ID NO: 3213298 - RNA, 15 nt, Human
agcaagauguacuau

SEQ ID NO: 3213299 - RNA, 22 nt, Human
agcaagaggcaagcugaaauuu

SEQ ID NO: 3213300 - RNA, 19 nt, Human
aaccaccacacccagccca

SEQ ID NO: 3213301 - RNA, 15 nt, Human
aaccaagucaaguga

SEQ ID NO: 3213302 - RNA, 22 nt, Human
aaccaagguagaaugaccuugu

SEQ ID NO: 3213303 - RNA, 20 nt, Human
aaccaagguagaaugaccuu

SEQ ID NO: 3213304 - RNA, 13 nt, Human
gucucgaacuccu

SEQ ID NO: 3213305 - RNA, 18 nt, Human
gucucgaacuccugaccu

SEQ ID NO: 3213306 - RNA, 18 nt, Human
aaccaagccguggcuucc

SEQ ID NO: 3213307 - RNA, 19 nt, Human
gucucgaacuccugaccuu

SEQ ID NO: 3213308 - RNA, 16 nt, Human
aaccaagccguggcuu

SEQ ID NO: 3213309 - RNA, 17 nt, Human
aacaguuggcaugcauc

SEQ ID NO: 3213310 - RNA, 13 nt, Human
aacaguguuuuca

SEQ ID NO: 3213311 - RNA, 18 nt, Human
gucuccgaaaugcugucu

SEQ ID NO: 3213312 - RNA, 16 nt, Human
gucuccgaaaugcugu

SEQ ID NO: 3213313 - RNA, 17 nt, Human
aaccaccagaagcccag

SEQ ID NO: 3213314 - RNA, 14 nt, Human
aaccaccagaagcc

SEQ ID NO: 3213315 - RNA, 21 nt, Human
aaccaccacacccagcccacu

SEQ ID NO: 3213316 - RNA, 12 nt, Human
aaccaucauuga

SEQ ID NO: 3213317 - RNA, 15 nt, Human
aaccauaguuacugu

SEQ ID NO: 3213318 - RNA, 23 nt, Human
aaccaagguagaaugaccuugua

SEQ ID NO: 3213319 - RNA, 20 nt, Human
aaccauaguuacuguaaaau

SEQ ID NO: 3213320 - RNA, 18 nt, Human
aaccauaguuacuguaaa

SEQ ID NO: 3213321 - RNA, 17 nt, Human
aaccauaguuacuguaa

SEQ ID NO: 3213322 - RNA, 16 nt, Human
aaccauaguuacugua

SEQ ID NO: 3213323 - RNA, 17 nt, Human
aaccaucauugaaaucu

SEQ ID NO: 3213324 - RNA, 18 nt, Human
aaccaucauugaaaucuu

SEQ ID NO: 3213325 - RNA, 23 nt, Human
aaccauaguuacuguaaaaugca

SEQ ID NO: 3213326 - RNA, 13 nt, Human
aaccauuaaaguc

SEQ ID NO: 3213327 - RNA, 14 nt, Human
aaccauuaaaguca

SEQ ID NO: 3213328 - RNA, 15 nt, Human
aaccauuaaagucag

SEQ ID NO: 3213329 - RNA, 17 nt, Human
aaccauucaaaaauuuc

SEQ ID NO: 3213330 - RNA, 19 nt, Human
aaccauucaaaaauuucac

SEQ ID NO: 3213331 - RNA, 15 nt, Human
aacccacccuuucua

SEQ ID NO: 3213332 - RNA, 13 nt, Human
aacccaauaguug

SEQ ID NO: 3213333 - RNA, 18 nt, Human
aacccaaguccaagcaua

SEQ ID NO: 3213334 - RNA, 23 nt, Human
aacccaaauguucaucaaugaau

SEQ ID NO: 3213335 - RNA, 14 nt, Human
aaccauuuucauua

SEQ ID NO: 3213336 - RNA, 23 nt, Human
aaccauuguucugacacgacuuc

SEQ ID NO: 3213337 - RNA, 12 nt, Human
aaccauuuaucu

SEQ ID NO: 3213338 - RNA, 15 nt, Human
aaccauuuaucuuga

SEQ ID NO: 3213339 - RNA, 13 nt, Human
aaccauuuaucuu

SEQ ID NO: 3213340 - RNA, 19 nt, Human
aaccauuuaucuugaagga

SEQ ID NO: 3213341 - RNA, 19 nt, Human
aaccauuugaaaccccugu

SEQ ID NO: 3213342 - RNA, 20 nt, Human
aaccccuggcuccaggccag

SEQ ID NO: 3213343 - RNA, 20 nt, Human
aaccccuggaccccagccuc

SEQ ID NO: 3213344 - RNA, 16 nt, Human
aaccccuggaccccag

SEQ ID NO: 3213345 - RNA, 23 nt, Human
aaccccucgcccagucccagcag

SEQ ID NO: 3213346 - RNA, 20 nt, Human
aaccccucgcccagucccag

SEQ ID NO: 3213347 - RNA, 16 nt, Human
aaccccucgcccaguc

SEQ ID NO: 3213348 - RNA, 15 nt, Human
aaccccucgcccagu

SEQ ID NO: 3213349 - RNA, 12 nt, Human
aaccccucgccc

SEQ ID NO: 3213350 - RNA, 17 nt, Human
aaccccccauuucuucc

SEQ ID NO: 3213351 - RNA, 10 nt, Human
aacccagcuc

SEQ ID NO: 3213352 - RNA, 17 nt, Human
aaccccauaccuacauu

SEQ ID NO: 3213353 - RNA, 18 nt, Human
aaccugagccccaaaagg

SEQ ID NO: 3213354 - RNA, 11 nt, Human
aaccugacccc

SEQ ID NO: 3213355 - RNA, 17 nt, Human
aaccucgcuccaacucc

SEQ ID NO: 3213356 - RNA, 12 nt, Human
aaccccuuccca

SEQ ID NO: 3213357 - RNA, 17 nt, Human
aaccccuguaggccuca

SEQ ID NO: 3213358 - RNA, 17 nt, Human
gucuggcacagccugca

SEQ ID NO: 3213359 - RNA, 16 nt, Human
gucuggcacagccugc

SEQ ID NO: 3213360 - RNA, 13 nt, Human
gucuggcacagcc

SEQ ID NO: 3213361 - RNA, 20 nt, Human
aaccugagccccaaaaggua

SEQ ID NO: 3213362 - RNA, 14 nt, Human
gucuggcccuuccu

SEQ ID NO: 3213363 - RNA, 19 nt, Human
gucuguaaaucuaacauua

SEQ ID NO: 3213364 - RNA, 19 nt, Human
gucuuccuuugcuucccuu

SEQ ID NO: 3213365 - RNA, 19 nt, Human
gucugucccaguuaacugu

SEQ ID NO: 3213366 - RNA, 18 nt, Human
gucuuuggacccugaggc

SEQ ID NO: 3213367 - RNA, 13 nt, Human
gucuuuagcuauu

SEQ ID NO: 3213368 - RNA, 16 nt, Human
gucuuuagcuauuacu

SEQ ID NO: 3213369 - RNA, 17 nt, Human
aaccuguagaaucaauu

SEQ ID NO: 3213370 - RNA, 18 nt, Human
aaccuguagaaucaauuu

SEQ ID NO: 3213371 - RNA, 22 nt, Human
aaccuguagaaucaauuuaagu

SEQ ID NO: 3213372 - RNA, 23 nt, Human
aaccuggucacaggacucugccu

SEQ ID NO: 3213373 - RNA, 16 nt, Human
gucuuuugguuaugaa

SEQ ID NO: 3213374 - RNA, 20 nt, Human
aacucaucuggaguucucaa

SEQ ID NO: 3213375 - RNA, 12 nt, Human
aacuccuggccu

SEQ ID NO: 3213376 - RNA, 19 nt, Human
aacucgguguccccaccau

SEQ ID NO: 3213377 - RNA, 18 nt, Human
aacucgguguccccacca

SEQ ID NO: 3213378 - RNA, 17 nt, Human
aacucgguguccccacc

SEQ ID NO: 3213379 - RNA, 16 nt, Human
aacucgguguccccac

SEQ ID NO: 3213380 - RNA, 24 nt, Human
aacucgguguccccaccaucugcu

SEQ ID NO: 3213381 - RNA, 23 nt, Human
aacucgguguccccaccaucugc

SEQ ID NO: 3213382 - RNA, 22 nt, Human
aacucgguguccccaccaucug

SEQ ID NO: 3213383 - RNA, 21 nt, Human
aacucgguguccccaccaucu

SEQ ID NO: 3213384 - RNA, 17 nt, Human
aacucauuuugcuugug

SEQ ID NO: 3213385 - RNA, 20 nt, Human
aacucauugcaucauuuaca

SEQ ID NO: 3213386 - RNA, 15 nt, Human
aacucuccuccagag

SEQ ID NO: 3213387 - RNA, 18 nt, Human
aacucuccuccagaguca

SEQ ID NO: 3213388 - RNA, 16 nt, Human
aacucuccucugcugc

SEQ ID NO: 3213389 - RNA, 14 nt, Human
aacucuauuuagau

SEQ ID NO: 3213390 - RNA, 24 nt, Human
aacucuauggucuuauauuuacaa

SEQ ID NO: 3213391 - RNA, 23 nt, Human
gugaaccaccacacccagcccac

SEQ ID NO: 3213392 - RNA, 22 nt, Human
gugaaccaccacacccagccca

SEQ ID NO: 3213393 - RNA, 19 nt, Human
aacuacugaaugaagcagu

SEQ ID NO: 3213394 - RNA, 21 nt, Human
aacuacugaaugaagcaguau

SEQ ID NO: 3213395 - RNA, 23 nt, Human
aacuacugaaugaagcaguauuu

SEQ ID NO: 3213396 - RNA, 20 nt, Human
aacuacuaccuguaaugaca

SEQ ID NO: 3213397 - RNA, 19 nt, Human
aaccuuggcuuggcccugg

SEQ ID NO: 3213398 - RNA, 18 nt, Human
aaccuugaaaacuuuaug

SEQ ID NO: 3213399 - RNA, 11 nt, Human
aaccugucuga

SEQ ID NO: 3213400 - RNA, 16 nt, Human
aaccugucuuuuggga

SEQ ID NO: 3213401 - RNA, 14 nt, Human
aaccugucuuuugg

SEQ ID NO: 3213402 - RNA, 18 nt, Human
aaccugugagcugcacca

SEQ ID NO: 3213403 - RNA, 21 nt, Human
aacuaugauuuggaaaauaaa

SEQ ID NO: 3213404 - RNA, 16 nt, Human
aacuaugauuuggaaa

SEQ ID NO: 3213405 - RNA, 13 nt, Human
aacuaucuucauc

SEQ ID NO: 3213406 - RNA, 20 nt, Human
aacuagacucccaagcugga

SEQ ID NO: 3213407 - RNA, 23 nt, Human
aacuagacucccaagcuggacua

SEQ ID NO: 3213408 - RNA, 13 nt, Human
aacuuccaauuua

SEQ ID NO: 3213409 - RNA, 14 nt, Human
aacuucauguaauu

SEQ ID NO: 3213410 - RNA, 16 nt, Human
aacuucauguaauuuu

SEQ ID NO: 3213411 - RNA, 13 nt, Human
aacuuccaaagaa

SEQ ID NO: 3213412 - RNA, 14 nt, Human
aacuuccaaagaaa

SEQ ID NO: 3213413 - RNA, 15 nt, Human
aacuuccaaagaaag

SEQ ID NO: 3213414 - RNA, 16 nt, Human
aacuuccaaagaaagu

SEQ ID NO: 3213415 - RNA, 17 nt, Human
aacuuccaaagaaaguu

SEQ ID NO: 3213416 - RNA, 14 nt, Human
aacuguauauuugu

SEQ ID NO: 3213417 - RNA, 16 nt, Human
aacuguauauuuguau

SEQ ID NO: 3213418 - RNA, 12 nt, Human
aacuucaggaaa

SEQ ID NO: 3213419 - RNA, 16 nt, Human
aacuucaucuggaagu

SEQ ID NO: 3213420 - RNA, 16 nt, Human
aacuucaucugucugu

SEQ ID NO: 3213421 - RNA, 22 nt, Human
aacuguacuuugauucacaugu

SEQ ID NO: 3213422 - RNA, 20 nt, Human
aacuguacuuugauucacau

SEQ ID NO: 3213423 - RNA, 19 nt, Human
aacuguacuuugauucaca

SEQ ID NO: 3213424 - RNA, 18 nt, Human
aacuguacuuugauucac

SEQ ID NO: 3213425 - RNA, 17 nt, Human
aacuguacuuugauuca

SEQ ID NO: 3213426 - RNA, 15 nt, Human
aacuguacuuugauu

SEQ ID NO: 3213427 - RNA, 13 nt, Human
aacuguacuuuga

SEQ ID NO: 3213428 - RNA, 14 nt, Human
aacuggugauauau

SEQ ID NO: 3213429 - RNA, 15 nt, Human
aacuguaaaauacuu

SEQ ID NO: 3213430 - RNA, 20 nt, Human
aacugguuauuuaaaaugua

SEQ ID NO: 3213431 - RNA, 20 nt, Human
aacuguaauuauuugaauga

SEQ ID NO: 3213432 - RNA, 18 nt, Human
aacuguaauuauuugaau

SEQ ID NO: 3213433 - RNA, 15 nt, Human
aacuguaauuauuug

SEQ ID NO: 3213434 - RNA, 14 nt, Human
gugaugagaggaaa

SEQ ID NO: 3213435 - RNA, 16 nt, Human
gugaugagaggaaauc

SEQ ID NO: 3213436 - RNA, 17 nt, Human
gugaugggaaagcauug

SEQ ID NO: 3213437 - RNA, 19 nt, Human
gugauggcgaaagagggua

SEQ ID NO: 3213438 - RNA, 22 nt, Human
gugaugcgcaugucacggaggg

SEQ ID NO: 3213439 - RNA, 17 nt, Human
gugaugcgcaguugcug

SEQ ID NO: 3213440 - RNA, 15 nt, Human
gugaugcgcaguugc

SEQ ID NO: 3213441 - RNA, 14 nt, Human
gugauggggcccug

SEQ ID NO: 3213442 - RNA, 16 nt, Human
gugauggggcccugcc

SEQ ID NO: 3213443 - RNA, 17 nt, Human
gugauggggcccugccu

SEQ ID NO: 3213444 - RNA, 18 nt, Human
gugauggggcccugccuc

SEQ ID NO: 3213445 - RNA, 12 nt, Human
gugcaagagagg

SEQ ID NO: 3213446 - RNA, 22 nt, Human
gugcaaugaccuuucaauagga

SEQ ID NO: 3213447 - RNA, 19 nt, Human
gugauggggcccugccucc

SEQ ID NO: 3213448 - RNA, 16 nt, Human
gugaugguuccccugu

SEQ ID NO: 3213449 - RNA, 14 nt, Human
gugaugguuccccu

SEQ ID NO: 3213450 - RNA, 21 nt, Human
gugcacacaccagagcccacc

SEQ ID NO: 3213451 - RNA, 22 nt, Human
gugcaugcugucccuuacguga

SEQ ID NO: 3213452 - RNA, 13 nt, Human
gugcacaggcaga

SEQ ID NO: 3213453 - RNA, 12 nt, Human
gugcacaggcag

SEQ ID NO: 3213454 - RNA, 22 nt, Human
gugccuccugacacaccugcag

SEQ ID NO: 3213455 - RNA, 16 nt, Human
gugccucuagcugaau

SEQ ID NO: 3213456 - RNA, 15 nt, Human
gugccucuagcugaa

SEQ ID NO: 3213457 - RNA, 14 nt, Human
gugccucuagcuga

SEQ ID NO: 3213458 - RNA, 13 nt, Human
gugccucuagcug

SEQ ID NO: 3213459 - RNA, 16 nt, Human
gugccucugcaguacu

SEQ ID NO: 3213460 - RNA, 19 nt, Human
gugcauguguguucaugca

SEQ ID NO: 3213461 - RNA, 15 nt, Human
gugccacauuuucuu

SEQ ID NO: 3213462 - RNA, 19 nt, Human
aacugggcauauuucuaau

SEQ ID NO: 3213463 - RNA, 21 nt, Human
aacuggguacuuguggacaca

SEQ ID NO: 3213464 - RNA, 16 nt, Human
aacuggguacuugugg

SEQ ID NO: 3213465 - RNA, 19 nt, Human
aacuggacugguucaaaug

SEQ ID NO: 3213466 - RNA, 11 nt, Human
aacuggcugca

SEQ ID NO: 3213467 - RNA, 19 nt, Human
aacugcacugucaagauga

SEQ ID NO: 3213468 - RNA, 21 nt, Human
aacugcacaugauuucacaaa

SEQ ID NO: 3213469 - RNA, 20 nt, Human
aacugcacaugauuucacaa

SEQ ID NO: 3213470 - RNA, 23 nt, Human
aacugcacaugauuucacaaaua

SEQ ID NO: 3213471 - RNA, 19 nt, Human
aacugcacaugauuucaca

SEQ ID NO: 3213472 - RNA, 18 nt, Human
aacugcacaugauuucac

SEQ ID NO: 3213473 - RNA, 17 nt, Human
aacugcacaugauuuca

SEQ ID NO: 3213474 - RNA, 16 nt, Human
aacugcacaugauuuc

SEQ ID NO: 3213475 - RNA, 17 nt, Human
aacugcaaccuuguuua

SEQ ID NO: 3213476 - RNA, 18 nt, Human
aacugcaaccuuguuuau

SEQ ID NO: 3213477 - RNA, 15 nt, Human
aacugcugacuguuu

SEQ ID NO: 3213478 - RNA, 23 nt, Human
aacugcucuugggcaauauucuc

SEQ ID NO: 3213479 - RNA, 22 nt, Human
aacugcucuugggcaauauucu

SEQ ID NO: 3213480 - RNA, 20 nt, Human
aacugcucuugggcaauauu

SEQ ID NO: 3213481 - RNA, 19 nt, Human
aacugcucuugggcaauau

SEQ ID NO: 3213482 - RNA, 20 nt, Human
aacugcugacuguuuucucu

SEQ ID NO: 3213483 - RNA, 21 nt, Human
aacugcugacuguuuucucuu

SEQ ID NO: 3213484 - RNA, 23 nt, Human
aacugcugacuguuuucucuuga

SEQ ID NO: 3213485 - RNA, 21 nt, Human
aacugcuuucuuucguuuguu

SEQ ID NO: 3213486 - RNA, 15 nt, Human
aacugcuuucuuucg

SEQ ID NO: 3213487 - RNA, 19 nt, Human
aacugcuuccuuucuugau

SEQ ID NO: 3213488 - RNA, 23 nt, Human
aacugcuuccuauaauuuugaua

SEQ ID NO: 3213489 - RNA, 22 nt, Human
aacugcuuccuauaauuuugau

SEQ ID NO: 3213490 - RNA, 18 nt, Human
aacugcuuccuauaauuu

SEQ ID NO: 3213491 - RNA, 19 nt, Human
aacuggaaauacuagauuu

SEQ ID NO: 3213492 - RNA, 21 nt, Human
aacucuucaaucucuugcacu

SEQ ID NO: 3213493 - RNA, 23 nt, Human
aacucugagagauuuggggcuaa

SEQ ID NO: 3213494 - RNA, 22 nt, Human
aacucuguuacacuuuuuggaa

SEQ ID NO: 3213495 - RNA, 16 nt, Human
aacucuguuacacuuu

SEQ ID NO: 3213496 - RNA, 23 nt, Human
aacucuguuacacuuuuuggaag

SEQ ID NO: 3213497 - RNA, 22 nt, Human
gugagucgaggacagggaggug

SEQ ID NO: 3213498 - RNA, 15 nt, Human
gugagucgaggacag

SEQ ID NO: 3213499 - RNA, 22 nt, Human
aacucugacaacagacuucuga

SEQ ID NO: 3213500 - RNA, 23 nt, Human
aacucugacaacagacuucugaa

SEQ ID NO: 3213501 - RNA, 16 nt, Human
aacucugacaacagac

SEQ ID NO: 3213502 - RNA, 20 nt, Human
aacucugacaacagacuucu

SEQ ID NO: 3213503 - RNA, 21 nt, Human
gugagaugcuagaacucccuu

SEQ ID NO: 3213504 - RNA, 21 nt, Human
gugaacuuggugccuaauguu

SEQ ID NO: 3213505 - RNA, 14 nt, Human
gugaacuuggaagc

SEQ ID NO: 3213506 - RNA, 17 nt, Human
gugaacuugggccacug

SEQ ID NO: 3213507 - RNA, 19 nt, Human
gugaacuugggccacugug

SEQ ID NO: 3213508 - RNA, 17 nt, Human
gugaggccagagacaca

SEQ ID NO: 3213509 - RNA, 22 nt, Human
gugaggccagagacacaagccu

SEQ ID NO: 3213510 - RNA, 13 nt, Human
gugaggccagaga

SEQ ID NO: 3213511 - RNA, 18 nt, Human
gugaggguaaguauuuuc

SEQ ID NO: 3213512 - RNA, 13 nt, Human
gucagaaucagaa

SEQ ID NO: 3213513 - RNA, 23 nt, Human
gucagaaguuucugccgcagccc

SEQ ID NO: 3213514 - RNA, 13 nt, Human
gucacagccaggc

SEQ ID NO: 3213515 - RNA, 21 nt, Human
gucacacaguauuacuucugc

SEQ ID NO: 3213516 - RNA, 22 nt, Human
gucacacaguauuacuucugcu

SEQ ID NO: 3213517 - RNA, 12 nt, Human
gucacagccagg

SEQ ID NO: 3213518 - RNA, 15 nt, Human
gucaggccgggcaga

SEQ ID NO: 3213519 - RNA, 14 nt, Human
gucaggccgggcag

SEQ ID NO: 3213520 - RNA, 22 nt, Human
gucaggccgggcagagcacagc

SEQ ID NO: 3213521 - RNA, 19 nt, Human
gucaggccgggcagagcac

SEQ ID NO: 3213522 - RNA, 17 nt, Human
gucaggccgggcagagc

SEQ ID NO: 3213523 - RNA, 16 nt, Human
gucaggccgggcagag

SEQ ID NO: 3213524 - RNA, 14 nt, Human
gucaggcucucugg

SEQ ID NO: 3213525 - RNA, 20 nt, Human
gucaggcuaauguuggcaga

SEQ ID NO: 3213526 - RNA, 20 nt, Human
gucaggcucucugggcugac

SEQ ID NO: 3213527 - RNA, 19 nt, Human
gucaggcucucugggcuga

SEQ ID NO: 3213528 - RNA, 16 nt, Human
gucaggcucucugggc

SEQ ID NO: 3213529 - RNA, 13 nt, Human
gucaguuguauca

SEQ ID NO: 3213530 - RNA, 19 nt, Human
gucaguuguguuuuuuaag

SEQ ID NO: 3213531 - RNA, 15 nt, Human
gucagugugacugau

SEQ ID NO: 3213532 - RNA, 21 nt, Human
gucauaaagugagaaaacugu

SEQ ID NO: 3213533 - RNA, 22 nt, Human
gucauaaagugagaaaacugug

SEQ ID NO: 3213534 - RNA, 21 nt, Human
gucaguauguggaaguguggg

SEQ ID NO: 3213535 - RNA, 17 nt, Human
gucaguauguggaagug

SEQ ID NO: 3213536 - RNA, 18 nt, Human
aaauuuguuauaaugaau

SEQ ID NO: 3213537 - RNA, 12 nt, Human
aaauuuguguaa

SEQ ID NO: 3213538 - RNA, 15 nt, Human
aaauuuguguaauau

SEQ ID NO: 3213539 - RNA, 10 nt, Human
aaauuuuaaa

SEQ ID NO: 3213540 - RNA, 13 nt, Human
aaauuuuaaaaaa

SEQ ID NO: 3213541 - RNA, 14 nt, Human
aaauuuuaaaaaag

SEQ ID NO: 3213542 - RNA, 12 nt, Human
aaauuuuaaagc

SEQ ID NO: 3213543 - RNA, 22 nt, Human
aaauuuuaaagccauucugauu

SEQ ID NO: 3213544 - RNA, 15 nt, Human
aaauuuuaacuaaau

SEQ ID NO: 3213545 - RNA, 16 nt, Human
aaauuuuaagcuagga

SEQ ID NO: 3213546 - RNA, 19 nt, Human
aaauuuguuuaaaguauac

SEQ ID NO: 3213547 - RNA, 16 nt, Human
aaauuugucugaaaca

SEQ ID NO: 3213548 - RNA, 18 nt, Human
aaauuugucugaaacauu

SEQ ID NO: 3213549 - RNA, 19 nt, Human
aaauuugucugaaacauuu

SEQ ID NO: 3213550 - RNA, 21 nt, Human
aaauuugucugaaacauuuca

SEQ ID NO: 3213551 - RNA, 17 nt, Human
gucaguuuauguuuugg

SEQ ID NO: 3213552 - RNA, 15 nt, Human
aacaaggcaaggcug

SEQ ID NO: 3213553 - RNA, 16 nt, Human
aacaaggcaaggcugu

SEQ ID NO: 3213554 - RNA, 13 nt, Human
aaauuuuuuugua

SEQ ID NO: 3213555 - RNA, 14 nt, Human
aaauuuuuuuguau

SEQ ID NO: 3213556 - RNA, 17 nt, Human
aaauuuuuuuguaugaa

SEQ ID NO: 3213557 - RNA, 18 nt, Human
aaauuuuuuuguaugaaa

SEQ ID NO: 3213558 - RNA, 19 nt, Human
aaauuuuuuuguaugaaaa

SEQ ID NO: 3213559 - RNA, 12 nt, Human
aaauuuuuuugu

SEQ ID NO: 3213560 - RNA, 13 nt, Human
aaauuuuuuggca

SEQ ID NO: 3213561 - RNA, 18 nt, Human
aaauuuuguaagggagca

SEQ ID NO: 3213562 - RNA, 14 nt, Human
aaauuuuagaaaua

SEQ ID NO: 3213563 - RNA, 15 nt, Human
aaauuuuagaaauau

SEQ ID NO: 3213564 - RNA, 22 nt, Human
aaauuuuaggcaaguuuucccu

SEQ ID NO: 3213565 - RNA, 13 nt, Human
aaauuuugaaaag

SEQ ID NO: 3213566 - RNA, 14 nt, Human
aaauuuugaaaagu

SEQ ID NO: 3213567 - RNA, 17 nt, Human
aaauuuugaaaaguaau

SEQ ID NO: 3213568 - RNA, 18 nt, Human
aaauuuugaaaaguaaua

SEQ ID NO: 3213569 - RNA, 21 nt, Human
aaauuuugaaaaguaauauuu

SEQ ID NO: 3213570 - RNA, 18 nt, Human
aacaaggcaaggcuguca

SEQ ID NO: 3213571 - RNA, 21 nt, Human
aacaaggcaaggcugucaauu

SEQ ID NO: 3213572 - RNA, 22 nt, Human
aacaaguugagcuaugacuuaa

SEQ ID NO: 3213573 - RNA, 17 nt, Human
aacaaguugagcuauga

SEQ ID NO: 3213574 - RNA, 21 nt, Human
aacaaguugagcuaugacuua

SEQ ID NO: 3213575 - RNA, 14 nt, Human
aacaaguugagcua

SEQ ID NO: 3213576 - RNA, 16 nt, Human
aacaagucccuguaau

SEQ ID NO: 3213577 - RNA, 16 nt, Human
aacaagcauauaaaau

SEQ ID NO: 3213578 - RNA, 17 nt, Human
aacaagcauauaaaaug

SEQ ID NO: 3213579 - RNA, 22 nt, Human
aacaauucucccgggacucugc

SEQ ID NO: 3213580 - RNA, 23 nt, Human
aacaauucucccgggacucugca

SEQ ID NO: 3213581 - RNA, 15 nt, Human
aacaauuaauugucu

SEQ ID NO: 3213582 - RNA, 20 nt, Human
aacaauucaaagaaucaccu

SEQ ID NO: 3213583 - RNA, 13 nt, Human
aacaaugguaaca

SEQ ID NO: 3213584 - RNA, 20 nt, Human
aacaaugguaacauuuuuca

SEQ ID NO: 3213585 - RNA, 16 nt, Human
aacagauaaauaguuu

SEQ ID NO: 3213586 - RNA, 23 nt, Human
aacagaacucgguguccccacca

SEQ ID NO: 3213587 - RNA, 15 nt, Human
aacagugauuaccag

SEQ ID NO: 3213588 - RNA, 22 nt, Human
aacagugauuaccagggacuga

SEQ ID NO: 3213589 - RNA, 23 nt, Human
aacagugcaccugggacagggag

SEQ ID NO: 3213590 - RNA, 22 nt, Human
aacagggauugauuuuaaaaug

SEQ ID NO: 3213591 - RNA, 21 nt, Human
aacagggauugauuuuaaaau

SEQ ID NO: 3213592 - RNA, 19 nt, Human
aacagggauugauuuuaaa

SEQ ID NO: 3213593 - RNA, 17 nt, Human
aacagggauugauuuua

SEQ ID NO: 3213594 - RNA, 16 nt, Human
aacagggauugauuuu

SEQ ID NO: 3213595 - RNA, 23 nt, Human
aacagggucucuagugcugugaa

SEQ ID NO: 3213596 - RNA, 22 nt, Human
aacagggucucuagugcuguga

SEQ ID NO: 3213597 - RNA, 20 nt, Human
aacagggucucuagugcugu

SEQ ID NO: 3213598 - RNA, 18 nt, Human
aacagggucucuagugcu

SEQ ID NO: 3213599 - RNA, 13 nt, Human
aacagggucucua

SEQ ID NO: 3213600 - RNA, 12 nt, Human
guccuacucugu

SEQ ID NO: 3213601 - RNA, 20 nt, Human
gucccuuucuucucccccau

SEQ ID NO: 3213602 - RNA, 15 nt, Human
gucccuuucuucucc

SEQ ID NO: 3213603 - RNA, 15 nt, Human
guccuacccacccuc

SEQ ID NO: 3213604 - RNA, 16 nt, Human
guccuacccacccucc

SEQ ID NO: 3213605 - RNA, 16 nt, Human
gucccccuuccaugga

SEQ ID NO: 3213606 - RNA, 18 nt, Human
gucccccuuccauggacu

SEQ ID NO: 3213607 - RNA, 14 nt, Human
gucccccuuccaug

SEQ ID NO: 3213608 - RNA, 18 nt, Human
gucccccugacaacacuc

SEQ ID NO: 3213609 - RNA, 23 nt, Human
gucccuuucgacuugcauuuuug

SEQ ID NO: 3213610 - RNA, 15 nt, Human
aacacagcaagggug

SEQ ID NO: 3213611 - RNA, 21 nt, Human
aacacaaauuaugcuaagaau

SEQ ID NO: 3213612 - RNA, 12 nt, Human
gucauuuucauu

SEQ ID NO: 3213613 - RNA, 13 nt, Human
gucauuuucauua

SEQ ID NO: 3213614 - RNA, 19 nt, Human
gucauuuugcagaggcuau

SEQ ID NO: 3213615 - RNA, 20 nt, Human
gucauuuuguguugaagagc

SEQ ID NO: 3213616 - RNA, 17 nt, Human
gucauuuuggucuaagg

SEQ ID NO: 3213617 - RNA, 18 nt, Human
gucauuuuguguugaaga

SEQ ID NO: 3213618 - RNA, 13 nt, Human
guccaagaagccc

SEQ ID NO: 3213619 - RNA, 15 nt, Human
guccaagaagcccag

SEQ ID NO: 3213620 - RNA, 16 nt, Human
guccaagaagcccagg

SEQ ID NO: 3213621 - RNA, 20 nt, Human
guccaagaagcccaggaaag

SEQ ID NO: 3213622 - RNA, 17 nt, Human
guccaagaagcccagga

SEQ ID NO: 3213623 - RNA, 18 nt, Human
guccaagaagcccaggaa

SEQ ID NO: 3213624 - RNA, 16 nt, Human
gucccaccuuggcugc

SEQ ID NO: 3213625 - RNA, 15 nt, Human
gucccaccuuggcug

SEQ ID NO: 3213626 - RNA, 14 nt, Human
gucccaccuuggcu

SEQ ID NO: 3213627 - RNA, 23 nt, Human
gucccccaacuucaucuggaagu

SEQ ID NO: 3213628 - RNA, 20 nt, Human
gucccaccccacacacgcca

SEQ ID NO: 3213629 - RNA, 13 nt, Human
guccauagcugug

SEQ ID NO: 3213630 - RNA, 17 nt, Human
guccauaauguucugcu

SEQ ID NO: 3213631 - RNA, 16 nt, Human
guccauagcuguggug

SEQ ID NO: 3213632 - RNA, 21 nt, Human
gucccaccccacacacgccag

SEQ ID NO: 3213633 - RNA, 13 nt, Human
guccauagagagc

SEQ ID NO: 3213634 - RNA, 14 nt, Human
guccauagagagca

SEQ ID NO: 3213635 - RNA, 12 nt, Human
aaauucugauuu

SEQ ID NO: 3213636 - RNA, 14 nt, Human
aaauucugauuucu

SEQ ID NO: 3213637 - RNA, 16 nt, Human
aaauucugauuucuuu

SEQ ID NO: 3213638 - RNA, 17 nt, Human
aaauucugauuucuuuu

SEQ ID NO: 3213639 - RNA, 20 nt, Human
aaauucugauuucuuuucac

SEQ ID NO: 3213640 - RNA, 16 nt, Human
aaauuauuuguaagau

SEQ ID NO: 3213641 - RNA, 21 nt, Human
aaauuauuuguaagauauuug

SEQ ID NO: 3213642 - RNA, 12 nt, Human
aaauuauuucuu

SEQ ID NO: 3213643 - RNA, 13 nt, Human
aaauuauuucuua

SEQ ID NO: 3213644 - RNA, 14 nt, Human
aaauuauuucuuaa

SEQ ID NO: 3213645 - RNA, 15 nt, Human
aaauuauuucuuaau

SEQ ID NO: 3213646 - RNA, 20 nt, Human
aaauuauuucuuaauuauua

SEQ ID NO: 3213647 - RNA, 22 nt, Human
aaauuauuucuuaauuauuaua

SEQ ID NO: 3213648 - RNA, 22 nt, Human
aaauucugauuucuuuucacca

SEQ ID NO: 3213649 - RNA, 15 nt, Human
aaauugugauguguc

SEQ ID NO: 3213650 - RNA, 12 nt, Human
aaauugugaugu

SEQ ID NO: 3213651 - RNA, 14 nt, Human
aaauugucuuuaaa

SEQ ID NO: 3213652 - RNA, 20 nt, Human
aaauugucuuuaaaaacugu

SEQ ID NO: 3213653 - RNA, 22 nt, Human
aaauugucuuuaaaaacuguuu

SEQ ID NO: 3213654 - RNA, 16 nt, Human
aaauugucuuaaugga

SEQ ID NO: 3213655 - RNA, 12 nt, Human
aaauuuauguga

SEQ ID NO: 3213656 - RNA, 19 nt, Human
aaauuguuuaguggaaaau

SEQ ID NO: 3213657 - RNA, 23 nt, Human
aaauuguuguccgguuuacuuua

SEQ ID NO: 3213658 - RNA, 13 nt, Human
aaauuguuuagug

SEQ ID NO: 3213659 - RNA, 22 nt, Human
aaauuguuguccgguuuacuuu

SEQ ID NO: 3213660 - RNA, 19 nt, Human
aaauuguuacuccauauau

SEQ ID NO: 3213661 - RNA, 15 nt, Human
aaauuuaugugaugg

SEQ ID NO: 3213662 - RNA, 15 nt, Human
aaauuuauugaggaa

SEQ ID NO: 3213663 - RNA, 21 nt, Human
aaauuuauuagcccugcauuu

SEQ ID NO: 3213664 - RNA, 19 nt, Human
aaauuuauuuacugcuagu

SEQ ID NO: 3213665 - RNA, 14 nt, Human
aaauuuauuuacug

SEQ ID NO: 3213666 - RNA, 23 nt, Human
aaauuuauugaggaaaaauaugu

SEQ ID NO: 3213667 - RNA, 20 nt, Human
aaauuuauugaggaaaaaua

SEQ ID NO: 3213668 - RNA, 19 nt, Human
aaauuuauugaggaaaaau

SEQ ID NO: 3213669 - RNA, 16 nt, Human
aaauuuauugaggaaa

SEQ ID NO: 3213670 - RNA, 13 nt, Human
guauuuuuaaagg

SEQ ID NO: 3213671 - RNA, 23 nt, Human
gucaaaaguagaacuuuguauag

SEQ ID NO: 3213672 - RNA, 14 nt, Human
gucaaaacuuuaaa

SEQ ID NO: 3213673 - RNA, 16 nt, Human
gucaaaaguagaacuu

SEQ ID NO: 3213674 - RNA, 17 nt, Human
gucaaaaguagaacuuu

SEQ ID NO: 3213675 - RNA, 22 nt, Human
guauuuuguuuuugucuuaaaa

SEQ ID NO: 3213676 - RNA, 21 nt, Human
aaauuuauuuacugcuagucu

SEQ ID NO: 3213677 - RNA, 22 nt, Human
aaauuuauuucaauauuagcaa

SEQ ID NO: 3213678 - RNA, 15 nt, Human
aaauuuauuuccaau

SEQ ID NO: 3213679 - RNA, 19 nt, Human
aaauuuauuuccaauguuu

SEQ ID NO: 3213680 - RNA, 19 nt, Human
guauuuuuaauuaacuuug

SEQ ID NO: 3213681 - RNA, 17 nt, Human
aaauuucacgauucauu

SEQ ID NO: 3213682 - RNA, 21 nt, Human
aaauuucacgauucauuuuug

SEQ ID NO: 3213683 - RNA, 21 nt, Human
gucaacaaguaugaauaaaga

SEQ ID NO: 3213684 - RNA, 22 nt, Human
gucaaagcuuugacucuauaag

SEQ ID NO: 3213685 - RNA, 17 nt, Human
gucaaacauuaguacuu

SEQ ID NO: 3213686 - RNA, 11 nt, Human
gucaaacauua

SEQ ID NO: 3213687 - RNA, 14 nt, Human
gucaaacgugaaaa

SEQ ID NO: 3213688 - RNA, 19 nt, Human
gucaaacauuaguacuuua

SEQ ID NO: 3213689 - RNA, 17 nt, Human
gucaaacgugaaaaugc

SEQ ID NO: 3213690 - RNA, 15 nt, Human
gucaaacgugaaaau

SEQ ID NO: 3213691 - RNA, 15 nt, Human
aaauguguuuugguc

SEQ ID NO: 3213692 - RNA, 16 nt, Human
aaauguguuuuggucc

SEQ ID NO: 3213693 - RNA, 16 nt, Human
aaauuaagaagaaacu

SEQ ID NO: 3213694 - RNA, 15 nt, Human
aaauuaagaagaaac

SEQ ID NO: 3213695 - RNA, 14 nt, Human
aaauuaagaagaaa

SEQ ID NO: 3213696 - RNA, 13 nt, Human
aaauuaagaagaa

SEQ ID NO: 3213697 - RNA, 12 nt, Human
aaaugugugugu

SEQ ID NO: 3213698 - RNA, 23 nt, Human
aaauguguguuuuuuuaggguuu

SEQ ID NO: 3213699 - RNA, 23 nt, Human
aaaugugugugaugugacauuug

SEQ ID NO: 3213700 - RNA, 22 nt, Human
aaaugugugugaugugacauuu

SEQ ID NO: 3213701 - RNA, 19 nt, Human
aaaugugugagugcaugua

SEQ ID NO: 3213702 - RNA, 14 nt, Human
aaauguguguaugu

SEQ ID NO: 3213703 - RNA, 20 nt, Human
aaaugugugugaugugacau

SEQ ID NO: 3213704 - RNA, 19 nt, Human
aaaugugugugaugugaca

SEQ ID NO: 3213705 - RNA, 18 nt, Human
aaaugugugugaugugac

SEQ ID NO: 3213706 - RNA, 15 nt, Human
aaaugugugugaugu

SEQ ID NO: 3213707 - RNA, 22 nt, Human
aaauuauguuuuacuguucauu

SEQ ID NO: 3213708 - RNA, 18 nt, Human
aaauuauaccuguugcuu

SEQ ID NO: 3213709 - RNA, 23 nt, Human
aaauuauaauguauucauauuug

SEQ ID NO: 3213710 - RNA, 19 nt, Human
aaauuauaauguauucaua

SEQ ID NO: 3213711 - RNA, 17 nt, Human
aaauuauaauguauuca

SEQ ID NO: 3213712 - RNA, 15 nt, Human
aaauuauaauguauu

SEQ ID NO: 3213713 - RNA, 14 nt, Human
aaauuauaauguau

SEQ ID NO: 3213714 - RNA, 12 nt, Human
aaauuauaaugu

SEQ ID NO: 3213715 - RNA, 23 nt, Human
aaauuagggcucuaauuuccuua

SEQ ID NO: 3213716 - RNA, 15 nt, Human
aaauuaguucccauu

SEQ ID NO: 3213717 - RNA, 21 nt, Human
aaauuagggcucuaauuuccu

SEQ ID NO: 3213718 - RNA, 20 nt, Human
aaauuagggcucuaauuucc

SEQ ID NO: 3213719 - RNA, 11 nt, Human
aaauuaauauc

SEQ ID NO: 3213720 - RNA, 12 nt, Human
aaauuaauaucu

SEQ ID NO: 3213721 - RNA, 19 nt, Human
aaauuagggcucuaauuuc

SEQ ID NO: 3213722 - RNA, 18 nt, Human
aaauuagggcucuaauuu

SEQ ID NO: 3213723 - RNA, 17 nt, Human
aaauuaagguguuugaa

SEQ ID NO: 3213724 - RNA, 19 nt, Human
aaauuaagguguuugaaaa

SEQ ID NO: 3213725 - RNA, 21 nt, Human
aaauuaagguguuugaaaaua

SEQ ID NO: 3213726 - RNA, 23 nt, Human
aaauuaagguguuugaaaauagu

SEQ ID NO: 3213727 - RNA, 12 nt, Human
aaauuaaggugu

SEQ ID NO: 3213728 - RNA, 13 nt, Human
guaugucaaagcu

SEQ ID NO: 3213729 - RNA, 15 nt, Human
guauguauaauucaa

SEQ ID NO: 3213730 - RNA, 11 nt, Human
guauguauaau

SEQ ID NO: 3213731 - RNA, 16 nt, Human
guauguaaauagguuu

SEQ ID NO: 3213732 - RNA, 13 nt, Human
aaauguaugcauu

SEQ ID NO: 3213733 - RNA, 20 nt, Human
aaaugucaaaaguagaacuu

SEQ ID NO: 3213734 - RNA, 23 nt, Human
aaaugucaaaaguagaacuuugu

SEQ ID NO: 3213735 - RNA, 15 nt, Human
aaaugucaaauguga

SEQ ID NO: 3213736 - RNA, 11 nt, Human
aaauguauuau

SEQ ID NO: 3213737 - RNA, 13 nt, Human
aaauguauuaugu

SEQ ID NO: 3213738 - RNA, 14 nt, Human
aaauguauuauguc

SEQ ID NO: 3213739 - RNA, 23 nt, Human
aaauguauuauguccugugagau

SEQ ID NO: 3213740 - RNA, 19 nt, Human
aaaugucuaguuguaacac

SEQ ID NO: 3213741 - RNA, 22 nt, Human
aaauguccaguaagaucacugu

SEQ ID NO: 3213742 - RNA, 21 nt, Human
aaauguccaguaagaucacug

SEQ ID NO: 3213743 - RNA, 20 nt, Human
aaaugucaugagauugcugu

SEQ ID NO: 3213744 - RNA, 21 nt, Human
aaaugucuuuccaaauuauuu

SEQ ID NO: 3213745 - RNA, 16 nt, Human
aaaugugaauuacuaa

SEQ ID NO: 3213746 - RNA, 15 nt, Human
aaaugugaauuacua

SEQ ID NO: 3213747 - RNA, 23 nt, Human
aaaugugaauuacuaacuucuaa

SEQ ID NO: 3213748 - RNA, 22 nt, Human
aaaugugaauuacuaacuucua

SEQ ID NO: 3213749 - RNA, 20 nt, Human
aaaugugagugguugaauau

SEQ ID NO: 3213750 - RNA, 21 nt, Human
guaugcuucauacagggaugg

SEQ ID NO: 3213751 - RNA, 13 nt, Human
guaugguggcugg

SEQ ID NO: 3213752 - RNA, 14 nt, Human
guaugguggcuggg

SEQ ID NO: 3213753 - RNA, 16 nt, Human
guaugguggcuggguu

SEQ ID NO: 3213754 - RNA, 15 nt, Human
guaugguggcugggu

SEQ ID NO: 3213755 - RNA, 15 nt, Human
guaugcuucauacag

SEQ ID NO: 3213756 - RNA, 14 nt, Human
guaugcuucauaca

SEQ ID NO: 3213757 - RNA, 13 nt, Human
guaugcuucauac

SEQ ID NO: 3213758 - RNA, 12 nt, Human
guaugcuucaua

SEQ ID NO: 3213759 - RNA, 16 nt, Human
guaugcauuauuaaau

SEQ ID NO: 3213760 - RNA, 17 nt, Human
guaugcauuauuaaauu

SEQ ID NO: 3213761 - RNA, 18 nt, Human
guaugcauuauuaaauug

SEQ ID NO: 3213762 - RNA, 15 nt, Human
guaugcgugugugug

SEQ ID NO: 3213763 - RNA, 15 nt, Human
guauccagaauggaa

SEQ ID NO: 3213764 - RNA, 15 nt, Human
guauccaaugaaaua

SEQ ID NO: 3213765 - RNA, 19 nt, Human
guaucccaugagccucagc

SEQ ID NO: 3213766 - RNA, 22 nt, Human
guaucaggugcugccauccagg

SEQ ID NO: 3213767 - RNA, 14 nt, Human
guaucaguguuuau

SEQ ID NO: 3213768 - RNA, 19 nt, Human
guaucaguguuuaugugcu

SEQ ID NO: 3213769 - RNA, 24 nt, Human
guaucaguguuuaugugcuauuaa

SEQ ID NO: 3213770 - RNA, 14 nt, Human
guaucaugaagccu

SEQ ID NO: 3213771 - RNA, 15 nt, Human
guauaaguggugugu

SEQ ID NO: 3213772 - RNA, 13 nt, Human
guauaauacuuug

SEQ ID NO: 3213773 - RNA, 22 nt, Human
guauaauacuuuguauacaagu

SEQ ID NO: 3213774 - RNA, 13 nt, Human
guauaauauugaa

SEQ ID NO: 3213775 - RNA, 15 nt, Human
guauaauauugaaaa

SEQ ID NO: 3213776 - RNA, 12 nt, Human
guauaauaggcu

SEQ ID NO: 3213777 - RNA, 13 nt, Human
guauaauguuuau

SEQ ID NO: 3213778 - RNA, 15 nt, Human
guauaauguuuauua

SEQ ID NO: 3213779 - RNA, 18 nt, Human
guauaauguuuauuaaau

SEQ ID NO: 3213780 - RNA, 20 nt, Human
guauaauguuuauuaaaugc

SEQ ID NO: 3213781 - RNA, 19 nt, Human
guauauugcacaauuauaa

SEQ ID NO: 3213782 - RNA, 13 nt, Human
guauauugguuuu

SEQ ID NO: 3213783 - RNA, 16 nt, Human
guauauuuuauaucaa

SEQ ID NO: 3213784 - RNA, 19 nt, Human
guauauugguuuuaugaug

SEQ ID NO: 3213785 - RNA, 17 nt, Human
guauauuugauuuauua

SEQ ID NO: 3213786 - RNA, 15 nt, Human
guauauuuguaugau

SEQ ID NO: 3213787 - RNA, 18 nt, Human
guauauuuguaugauauu

SEQ ID NO: 3213788 - RNA, 18 nt, Human
guauauuugauuuauuaa

SEQ ID NO: 3213789 - RNA, 19 nt, Human
guauauuugauuuauuaac

SEQ ID NO: 3213790 - RNA, 20 nt, Human
guauauuugauuuauuaacu

SEQ ID NO: 3213791 - RNA, 23 nt, Human
guauauuugauuuauuaacuuaa

SEQ ID NO: 3213792 - RNA, 18 nt, Human
guaucaggugcugccauc

SEQ ID NO: 3213793 - RNA, 16 nt, Human
guaucaggugcugcca

SEQ ID NO: 3213794 - RNA, 15 nt, Human
guaucaaaauuacau

SEQ ID NO: 3213795 - RNA, 14 nt, Human
guaucaaauacauu

SEQ ID NO: 3213796 - RNA, 13 nt, Human
guaucaaauacau

SEQ ID NO: 3213797 - RNA, 15 nt, Human
guauauuuuauuuca

SEQ ID NO: 3213798 - RNA, 17 nt, Human
guauauuuuauuucaau

SEQ ID NO: 3213799 - RNA, 20 nt, Human
guauauuuuauuucaaugua

SEQ ID NO: 3213800 - RNA, 22 nt, Human
guauauuuuauuucaauguaau

SEQ ID NO: 3213801 - RNA, 22 nt, Human
guauauuuuuaucuauauaaaa

SEQ ID NO: 3213802 - RNA, 20 nt, Human
guaguugaggaaagcacaga

SEQ ID NO: 3213803 - RNA, 19 nt, Human
guaguugaggaaagcacag

SEQ ID NO: 3213804 - RNA, 17 nt, Human
guaguucuuuaaacugu

SEQ ID NO: 3213805 - RNA, 18 nt, Human
aaauguaacuguuaccau

SEQ ID NO: 3213806 - RNA, 18 nt, Human
aaauguaacuauguuuua

SEQ ID NO: 3213807 - RNA, 14 nt, Human
aaauguaacuguua

SEQ ID NO: 3213808 - RNA, 11 nt, Human
aaauguaacug

SEQ ID NO: 3213809 - RNA, 13 nt, Human
aaauguaacuguc

SEQ ID NO: 3213810 - RNA, 21 nt, Human
aaauguaacuguccguaguau

SEQ ID NO: 3213811 - RNA, 20 nt, Human
aaaugguuuggugcuuuuua

SEQ ID NO: 3213812 - RNA, 18 nt, Human
aaaugguauccagaaugg

SEQ ID NO: 3213813 - RNA, 17 nt, Human
aaaugguaucaaaauua

SEQ ID NO: 3213814 - RNA, 21 nt, Human
aaaugguaucaaaauuacaua

SEQ ID NO: 3213815 - RNA, 22 nt, Human
guaacaggaaaauuuuaaaaau

SEQ ID NO: 3213816 - RNA, 12 nt, Human
guaacaggcaga

SEQ ID NO: 3213817 - RNA, 20 nt, Human
guaacaggaaaauuuuaaaa

SEQ ID NO: 3213818 - RNA, 14 nt, Human
guaacacaggccac

SEQ ID NO: 3213819 - RNA, 19 nt, Human
aagaggcaagcugaaauuu

SEQ ID NO: 3213820 - RNA, 23 nt, Human
aagaggaaugaaguacucauaca

SEQ ID NO: 3213821 - RNA, 13 nt, Human
aagaggaggagga

SEQ ID NO: 3213822 - RNA, 16 nt, Human
aagaggaggaggaggg

SEQ ID NO: 3213823 - RNA, 21 nt, Human
guggccucccaacucacccca

SEQ ID NO: 3213824 - RNA, 22 nt, Human
guggccucccaacucaccccag

SEQ ID NO: 3213825 - RNA, 15 nt, Human
guggccucccaacuc

SEQ ID NO: 3213826 - RNA, 23 nt, Human
guggccucgaacuccuggcacua

SEQ ID NO: 3213827 - RNA, 18 nt, Human
guggccugacucccccag

SEQ ID NO: 3213828 - RNA, 13 nt, Human
guggccugccagu

SEQ ID NO: 3213829 - RNA, 16 nt, Human
guggccuggcuugucu

SEQ ID NO: 3213830 - RNA, 13 nt, Human
gugggacacccug

SEQ ID NO: 3213831 - RNA, 19 nt, Human
guggccuacaaaucaguaa

SEQ ID NO: 3213832 - RNA, 15 nt, Human
gugggacacccugug

SEQ ID NO: 3213833 - RNA, 14 nt, Human
gugggagcugccug

SEQ ID NO: 3213834 - RNA, 22 nt, Human
guggcgaaaucccugcucacug

SEQ ID NO: 3213835 - RNA, 20 nt, Human
guggcgaaaucccugcucac

SEQ ID NO: 3213836 - RNA, 17 nt, Human
guggcgaaaucccugcu

SEQ ID NO: 3213837 - RNA, 15 nt, Human
guggggucacucugg

SEQ ID NO: 3213838 - RNA, 15 nt, Human
guggggcucccgccu

SEQ ID NO: 3213839 - RNA, 18 nt, Human
gugggagcugccuguuca

SEQ ID NO: 3213840 - RNA, 15 nt, Human
gugggagcugccugu

SEQ ID NO: 3213841 - RNA, 17 nt, Human
gugggaagggcuacacc

SEQ ID NO: 3213842 - RNA, 22 nt, Human
guggggccggggcuucugugca

SEQ ID NO: 3213843 - RNA, 17 nt, Human
aacuugcuuaaauguga

SEQ ID NO: 3213844 - RNA, 16 nt, Human
aacuugcuuaaaugug

SEQ ID NO: 3213845 - RNA, 15 nt, Human
aacuugcuuaaaugu

SEQ ID NO: 3213846 - RNA, 14 nt, Human
aacuugcuuaaaug

SEQ ID NO: 3213847 - RNA, 12 nt, Human
aacuugcuuaaa

SEQ ID NO: 3213848 - RNA, 13 nt, Human
aagacgcugugcu

SEQ ID NO: 3213849 - RNA, 16 nt, Human
aagacgcaccagccca

SEQ ID NO: 3213850 - RNA, 15 nt, Human
aagacgcugugcugc

SEQ ID NO: 3213851 - RNA, 17 nt, Human
aagacgcugugcugccc

SEQ ID NO: 3213852 - RNA, 18 nt, Human
aagacgcugugcugcccu

SEQ ID NO: 3213853 - RNA, 19 nt, Human
aagacgcugugcugcccug

SEQ ID NO: 3213854 - RNA, 15 nt, Human
aagaccuucuccuuc

SEQ ID NO: 3213855 - RNA, 14 nt, Human
aacuugcugccucg

SEQ ID NO: 3213856 - RNA, 12 nt, Human
aacuugcugccu

SEQ ID NO: 3213857 - RNA, 15 nt, Human
aacuugccuuugaag

SEQ ID NO: 3213858 - RNA, 14 nt, Human
aacuugccuuugaa

SEQ ID NO: 3213859 - RNA, 18 nt, Human
aagaccuucuccuucacc

SEQ ID NO: 3213860 - RNA, 19 nt, Human
aagaccuucuccuucaccu

SEQ ID NO: 3213861 - RNA, 23 nt, Human
aacuugcaagggcggccuuuccc

SEQ ID NO: 3213862 - RNA, 11 nt, Human
aacuugccuuu

SEQ ID NO: 3213863 - RNA, 22 nt, Human
aagagcaucaguacuuguuucu

SEQ ID NO: 3213864 - RNA, 22 nt, Human
aagagcagcuccuuccuagccu

SEQ ID NO: 3213865 - RNA, 12 nt, Human
guguguaugugg

SEQ ID NO: 3213866 - RNA, 16 nt, Human
gugugguagagugugc

SEQ ID NO: 3213867 - RNA, 14 nt, Human
gugugggucugugu

SEQ ID NO: 3213868 - RNA, 21 nt, Human
gugugggggccccgucucagg

SEQ ID NO: 3213869 - RNA, 19 nt, Human
gugugggggccccgucuca

SEQ ID NO: 3213870 - RNA, 14 nt, Human
gugugggggccccg

SEQ ID NO: 3213871 - RNA, 20 nt, Human
gugugucacccuuaggccag

SEQ ID NO: 3213872 - RNA, 20 nt, Human
gugugugaaaaugugugugu

SEQ ID NO: 3213873 - RNA, 13 nt, Human
guguguauguggg

SEQ ID NO: 3213874 - RNA, 15 nt, Human
guguguauguggggg

SEQ ID NO: 3213875 - RNA, 23 nt, Human
guguguauguguguuucuguccu

SEQ ID NO: 3213876 - RNA, 22 nt, Human
gugugacaaggauugcuacugu

SEQ ID NO: 3213877 - RNA, 20 nt, Human
gugucagguggggcagcuug

SEQ ID NO: 3213878 - RNA, 19 nt, Human
gugucauagaauagcaugu

SEQ ID NO: 3213879 - RNA, 19 nt, Human
gugucaguuuauguuuugg

SEQ ID NO: 3213880 - RNA, 17 nt, Human
aagauguacuauaacau

SEQ ID NO: 3213881 - RNA, 17 nt, Human
aagaugguuaaacauuu

SEQ ID NO: 3213882 - RNA, 13 nt, Human
aagauguagagga

SEQ ID NO: 3213883 - RNA, 14 nt, Human
guguauuuucaguc

SEQ ID NO: 3213884 - RNA, 20 nt, Human
gugucaagagggucugagga

SEQ ID NO: 3213885 - RNA, 16 nt, Human
gugucagcauagaagu

SEQ ID NO: 3213886 - RNA, 15 nt, Human
gugucaagcuuccug

SEQ ID NO: 3213887 - RNA, 14 nt, Human
gugucaaguggcaa

SEQ ID NO: 3213888 - RNA, 14 nt, Human
aagaggcugcagcc

SEQ ID NO: 3213889 - RNA, 23 nt, Human
aagagggagggagggcuccagac

SEQ ID NO: 3213890 - RNA, 12 nt, Human
aagaguaggaag

SEQ ID NO: 3213891 - RNA, 19 nt, Human
gugggguagguugggagaa

SEQ ID NO: 3213892 - RNA, 20 nt, Human
guggggucuccucaggacca

SEQ ID NO: 3213893 - RNA, 17 nt, Human
guggggucacucuggca

SEQ ID NO: 3213894 - RNA, 20 nt, Human
guggggucacucuggcagcu

SEQ ID NO: 3213895 - RNA, 21 nt, Human
guggggucacucuggcagcuc

SEQ ID NO: 3213896 - RNA, 22 nt, Human
guggggucacucuggcagcuca

SEQ ID NO: 3213897 - RNA, 18 nt, Human
aagaucucagugguuaag

SEQ ID NO: 3213898 - RNA, 21 nt, Human
aagaucgguuaacaaauaaca

SEQ ID NO: 3213899 - RNA, 20 nt, Human
aagaucgguuaacaaauaac

SEQ ID NO: 3213900 - RNA, 14 nt, Human
aagaucucuuucua

SEQ ID NO: 3213901 - RNA, 15 nt, Human
aagaucucuuucuaa

SEQ ID NO: 3213902 - RNA, 19 nt, Human
aagaucucuuucuaaagac

SEQ ID NO: 3213903 - RNA, 14 nt, Human
aagaugaaaauauu

SEQ ID NO: 3213904 - RNA, 13 nt, Human
aagaugaaaauau

SEQ ID NO: 3213905 - RNA, 13 nt, Human
aagaguaggaaga

SEQ ID NO: 3213906 - RNA, 12 nt, Human
aagaucuaaauc

SEQ ID NO: 3213907 - RNA, 19 nt, Human
aagaucgguuaacaaauaa

SEQ ID NO: 3213908 - RNA, 18 nt, Human
aagaucgguuaacaaaua

SEQ ID NO: 3213909 - RNA, 19 nt, Human
aagaugcuucucacugcca

SEQ ID NO: 3213910 - RNA, 18 nt, Human
aagauggcugugccucug

SEQ ID NO: 3213911 - RNA, 23 nt, Human
aagauggcugugccucugccugu

SEQ ID NO: 3213912 - RNA, 21 nt, Human
aagauggcugugccucugccu

SEQ ID NO: 3213913 - RNA, 20 nt, Human
aagauggcugugccucugcc

SEQ ID NO: 3213914 - RNA, 17 nt, Human
aagaugcuucucacugc

SEQ ID NO: 3213915 - RNA, 16 nt, Human
aagaugcuucucacug

SEQ ID NO: 3213916 - RNA, 19 nt, Human
aagcccaguucagcuuggg

SEQ ID NO: 3213917 - RNA, 18 nt, Human
aagcccaguucagcuugg

SEQ ID NO: 3213918 - RNA, 13 nt, Human
aagcccaggaggg

SEQ ID NO: 3213919 - RNA, 16 nt, Human
aagcccaggagcccau

SEQ ID NO: 3213920 - RNA, 13 nt, Human
aagccaagaggca

SEQ ID NO: 3213921 - RNA, 15 nt, Human
aagcccaggagccca

SEQ ID NO: 3213922 - RNA, 14 nt, Human
aagcccaggagccc

SEQ ID NO: 3213923 - RNA, 19 nt, Human
aagcccaggaaaggcucca

SEQ ID NO: 3213924 - RNA, 22 nt, Human
aagcccaggaaaggcuccagga

SEQ ID NO: 3213925 - RNA, 22 nt, Human
aagccaagaggcugcagccagg

SEQ ID NO: 3213926 - RNA, 18 nt, Human
aagccaagaggcugcagc

SEQ ID NO: 3213927 - RNA, 14 nt, Human
aagcccaggaaagg

SEQ ID NO: 3213928 - RNA, 17 nt, Human
aagcccaggaaaggcuc

SEQ ID NO: 3213929 - RNA, 22 nt, Human
aagccaaagcuaggccuggcca

SEQ ID NO: 3213930 - RNA, 20 nt, Human
aagccaaagcuaggccuggc

SEQ ID NO: 3213931 - RNA, 14 nt, Human
aagccaaaauuaag

SEQ ID NO: 3213932 - RNA, 17 nt, Human
aagccaaaauuaaggug

SEQ ID NO: 3213933 - RNA, 20 nt, Human
aagccaaaauuaagguguuu

SEQ ID NO: 3213934 - RNA, 22 nt, Human
aagccaaaauuaagguguuuga

SEQ ID NO: 3213935 - RNA, 20 nt, Human
aagccgcuggggccaguugg

SEQ ID NO: 3213936 - RNA, 23 nt, Human
aagcccuuccaugucgccucugc

SEQ ID NO: 3213937 - RNA, 20 nt, Human
aagcccuuccaugucgccuc

SEQ ID NO: 3213938 - RNA, 15 nt, Human
aagcccuuccauguc

SEQ ID NO: 3213939 - RNA, 19 nt, Human
aagcccugagcuuucugcu

SEQ ID NO: 3213940 - RNA, 15 nt, Human
aagccccauuaacug

SEQ ID NO: 3213941 - RNA, 18 nt, Human
aagcaguggagcccagga

SEQ ID NO: 3213942 - RNA, 17 nt, Human
aagcaguggauacgugu

SEQ ID NO: 3213943 - RNA, 22 nt, Human
aagcaguuucaauaaaguuuga

SEQ ID NO: 3213944 - RNA, 20 nt, Human
aagcaguuucaauaaaguuu

SEQ ID NO: 3213945 - RNA, 19 nt, Human
aagcaguuucaauaaaguu

SEQ ID NO: 3213946 - RNA, 12 nt, Human
aagcaguuucaa

SEQ ID NO: 3213947 - RNA, 14 nt, Human
aagcaguuucaaua

SEQ ID NO: 3213948 - RNA, 13 nt, Human
aagcaguuucaau

SEQ ID NO: 3213949 - RNA, 13 nt, Human
aagcauauaaaau

SEQ ID NO: 3213950 - RNA, 14 nt, Human
aagcauaaagcuca

SEQ ID NO: 3213951 - RNA, 20 nt, Human
aagcagugcaugcugucccu

SEQ ID NO: 3213952 - RNA, 14 nt, Human
aagcagugcccagg

SEQ ID NO: 3213953 - RNA, 13 nt, Human
aagcagugcccag

SEQ ID NO: 3213954 - RNA, 18 nt, Human
aagcagugcccagguggc

SEQ ID NO: 3213955 - RNA, 16 nt, Human
aagcagugcccaggug

SEQ ID NO: 3213956 - RNA, 15 nt, Human
aagcagugcccaggu

SEQ ID NO: 3213957 - RNA, 14 nt, Human
aagcagugcaugcu

SEQ ID NO: 3213958 - RNA, 15 nt, Human
aagcagugcaugcug

SEQ ID NO: 3213959 - RNA, 21 nt, Human
gugugugcgccuacaggagug

SEQ ID NO: 3213960 - RNA, 14 nt, Human
gugugugcagagcu

SEQ ID NO: 3213961 - RNA, 15 nt, Human
gugugugaugugaca

SEQ ID NO: 3213962 - RNA, 17 nt, Human
gugugugcagagcugaa

SEQ ID NO: 3213963 - RNA, 12 nt, Human
aagcagugcaug

SEQ ID NO: 3213964 - RNA, 20 nt, Human
aagcaguauauuaguauuau

SEQ ID NO: 3213965 - RNA, 12 nt, Human
aagcaguauuuu

SEQ ID NO: 3213966 - RNA, 13 nt, Human
aagcaguauuuug

SEQ ID NO: 3213967 - RNA, 15 nt, Human
aagcaguauuuuggu

SEQ ID NO: 3213968 - RNA, 17 nt, Human
aagcaucuaaggacaag

SEQ ID NO: 3213969 - RNA, 15 nt, Human
aagcaucuaaggaca

SEQ ID NO: 3213970 - RNA, 13 nt, Human
aagcaucuaagga

SEQ ID NO: 3213971 - RNA, 13 nt, Human
aagcauuguaaau

SEQ ID NO: 3213972 - RNA, 16 nt, Human
aagcauuuacuuugug

SEQ ID NO: 3213973 - RNA, 13 nt, Human
aagcauuucaaag

SEQ ID NO: 3213974 - RNA, 17 nt, Human
aagcauuuuguaauaau

SEQ ID NO: 3213975 - RNA, 14 nt, Human
aagcauuuuguaau

SEQ ID NO: 3213976 - RNA, 22 nt, Human
aagcuagacgagcaggcuucuu

SEQ ID NO: 3213977 - RNA, 12 nt, Human
aagcuaggccug

SEQ ID NO: 3213978 - RNA, 22 nt, Human
aagcuauucaguaauaacucua

SEQ ID NO: 3213979 - RNA, 23 nt, Human
aagcuaggaaaagaaaucuauag

SEQ ID NO: 3213980 - RNA, 21 nt, Human
aagcuaggaaaagaaaucuau

SEQ ID NO: 3213981 - RNA, 20 nt, Human
aagcuaggaaaagaaaucua

SEQ ID NO: 3213982 - RNA, 19 nt, Human
aagcuaggaaaagaaaucu

SEQ ID NO: 3213983 - RNA, 16 nt, Human
aagcuagcaaauagua

SEQ ID NO: 3213984 - RNA, 13 nt, Human
guucagcuccagc

SEQ ID NO: 3213985 - RNA, 14 nt, Human
guucaagaucaaaa

SEQ ID NO: 3213986 - RNA, 20 nt, Human
guucaagaucaaaaaggcuu

SEQ ID NO: 3213987 - RNA, 18 nt, Human
aagccucaaaacaaaggc

SEQ ID NO: 3213988 - RNA, 16 nt, Human
aagccucaaaacaaag

SEQ ID NO: 3213989 - RNA, 15 nt, Human
aagccucaaaacaaa

SEQ ID NO: 3213990 - RNA, 18 nt, Human
aagccuagauguuuuaua

SEQ ID NO: 3213991 - RNA, 13 nt, Human
aagccuaaagauu

SEQ ID NO: 3213992 - RNA, 12 nt, Human
aagccuaaagau

SEQ ID NO: 3213993 - RNA, 17 nt, Human
aagcucaaaugaaaugu

SEQ ID NO: 3213994 - RNA, 18 nt, Human
aagcucaaaugaaaugua

SEQ ID NO: 3213995 - RNA, 19 nt, Human
aagcucaaaugaaauguau

SEQ ID NO: 3213996 - RNA, 12 nt, Human
aagcucagggcc

SEQ ID NO: 3213997 - RNA, 13 nt, Human
aagcucagggccu

SEQ ID NO: 3213998 - RNA, 16 nt, Human
aagcucagggccuggc

SEQ ID NO: 3213999 - RNA, 17 nt, Human
aagcucagggccuggcu

SEQ ID NO: 3214000 - RNA, 17 nt, Human
aagcuccaagcucccag

SEQ ID NO: 3214001 - RNA, 18 nt, Human
aagcuccaagcucccagg

SEQ ID NO: 3214002 - RNA, 18 nt, Human
aagcucagggccuggcuc

SEQ ID NO: 3214003 - RNA, 19 nt, Human
aagcucagggccuggcuca

SEQ ID NO: 3214004 - RNA, 20 nt, Human
aagcucagggccuggcucag

SEQ ID NO: 3214005 - RNA, 14 nt, Human
guuaagauuccuaa

SEQ ID NO: 3214006 - RNA, 18 nt, Human
guuaagagaaaugagcuu

SEQ ID NO: 3214007 - RNA, 11 nt, Human
guuaagagaaa

SEQ ID NO: 3214008 - RNA, 12 nt, Human
guuaagagaaau

SEQ ID NO: 3214009 - RNA, 12 nt, Human
guuaagcaucua

SEQ ID NO: 3214010 - RNA, 17 nt, Human
guuacuuuuccuugcau

SEQ ID NO: 3214011 - RNA, 14 nt, Human
guuagaaaaaugga

SEQ ID NO: 3214012 - RNA, 14 nt, Human
guuacuuuuccuug

SEQ ID NO: 3214013 - RNA, 21 nt, Human
guuacuuuccaauucuccuuu

SEQ ID NO: 3214014 - RNA, 20 nt, Human
guuacuuuccaauucuccuu

SEQ ID NO: 3214015 - RNA, 13 nt, Human
guuacuuuuccuu

SEQ ID NO: 3214016 - RNA, 19 nt, Human
guuaggcauugugggaagg

SEQ ID NO: 3214017 - RNA, 20 nt, Human
guuaggcauugugggaaggg

SEQ ID NO: 3214018 - RNA, 14 nt, Human
guuaggcaguauaa

SEQ ID NO: 3214019 - RNA, 22 nt, Human
guuaggccaaagacaaauagua

SEQ ID NO: 3214020 - RNA, 19 nt, Human
guuaggccaaagacaaaua

SEQ ID NO: 3214021 - RNA, 15 nt, Human
guuagaauguaaggu

SEQ ID NO: 3214022 - RNA, 16 nt, Human
guuauucuuugcacuu

SEQ ID NO: 3214023 - RNA, 15 nt, Human
guuauucuuugcacu

SEQ ID NO: 3214024 - RNA, 13 nt, Human
guuauucuuugca

SEQ ID NO: 3214025 - RNA, 12 nt, Human
guuauucuuugc

SEQ ID NO: 3214026 - RNA, 22 nt, Human
guuauucaacagcaagugugaa

SEQ ID NO: 3214027 - RNA, 23 nt, Human
guuauuuuuauuuauuuaaauuu

SEQ ID NO: 3214028 - RNA, 19 nt, Human
guuauuuuuauaagaaaac

SEQ ID NO: 3214029 - RNA, 20 nt, Human
guuauuuugauguaaagaug

SEQ ID NO: 3214030 - RNA, 19 nt, Human
guuauugagagagaugugu

SEQ ID NO: 3214031 - RNA, 21 nt, Human
guuauugagagagauguguaa

SEQ ID NO: 3214032 - RNA, 20 nt, Human
guuauugagagagaugugua

SEQ ID NO: 3214033 - RNA, 22 nt, Human
guuauugagagagauguguaau

SEQ ID NO: 3214034 - RNA, 20 nt, Human
guucaagaaaugaagagcug

SEQ ID NO: 3214035 - RNA, 13 nt, Human
guucaagaaauga

SEQ ID NO: 3214036 - RNA, 12 nt, Human
guucaaaugugu

SEQ ID NO: 3214037 - RNA, 20 nt, Human
guucaaagucaugauguuuu

SEQ ID NO: 3214038 - RNA, 19 nt, Human
guucaaagucaugauguuu

SEQ ID NO: 3214039 - RNA, 18 nt, Human
guucaaagucaugauguu

SEQ ID NO: 3214040 - RNA, 16 nt, Human
guucaaaccugugaag

SEQ ID NO: 3214041 - RNA, 13 nt, Human
guucaaagucaug

SEQ ID NO: 3214042 - RNA, 15 nt, Human
aaggcuccaggagca

SEQ ID NO: 3214043 - RNA, 16 nt, Human
aaggcuccaggagcag

SEQ ID NO: 3214044 - RNA, 18 nt, Human
aaggcuccaggagcagcc

SEQ ID NO: 3214045 - RNA, 15 nt, Human
guuuauuuuaaaaca

SEQ ID NO: 3214046 - RNA, 16 nt, Human
guuuauuuuaaaacaa

SEQ ID NO: 3214047 - RNA, 19 nt, Human
aaggcuccaggagcagcca

SEQ ID NO: 3214048 - RNA, 22 nt, Human
aaggcuccaggagcagccacau

SEQ ID NO: 3214049 - RNA, 16 nt, Human
aaggcucgagcaugcc

SEQ ID NO: 3214050 - RNA, 18 nt, Human
aaggcucgagcaugccug

SEQ ID NO: 3214051 - RNA, 19 nt, Human
aaggcucgagcaugccugg

SEQ ID NO: 3214052 - RNA, 20 nt, Human
aaggcucgagcaugccugga

SEQ ID NO: 3214053 - RNA, 22 nt, Human
aaggcucgagcaugccuggaug

SEQ ID NO: 3214054 - RNA, 15 nt, Human
aaggcuccugccccc

SEQ ID NO: 3214055 - RNA, 15 nt, Human
guuuacaguguuccg

SEQ ID NO: 3214056 - RNA, 13 nt, Human
guuuacaguguuc

SEQ ID NO: 3214057 - RNA, 13 nt, Human
guuuauugucaaa

SEQ ID NO: 3214058 - RNA, 21 nt, Human
guuuauuggugaguuaggaac

SEQ ID NO: 3214059 - RNA, 13 nt, Human
guuuacagugaag

SEQ ID NO: 3214060 - RNA, 17 nt, Human
guuuacagugaagaaag

SEQ ID NO: 3214061 - RNA, 15 nt, Human
guugggccaggagcc

SEQ ID NO: 3214062 - RNA, 17 nt, Human
guugggccaggagccuc

SEQ ID NO: 3214063 - RNA, 13 nt, Human
guugggcuggugu

SEQ ID NO: 3214064 - RNA, 13 nt, Human
aaguaagcaaaga

SEQ ID NO: 3214065 - RNA, 20 nt, Human
aaguaagggaagcagaagga

SEQ ID NO: 3214066 - RNA, 20 nt, Human
aaggucauuuccauguaugc

SEQ ID NO: 3214067 - RNA, 14 nt, Human
aaggucauuuccau

SEQ ID NO: 3214068 - RNA, 22 nt, Human
aaggucaccucacucagcacca

SEQ ID NO: 3214069 - RNA, 19 nt, Human
aaggucaccucacucagca

SEQ ID NO: 3214070 - RNA, 18 nt, Human
aaggucaccucacucagc

SEQ ID NO: 3214071 - RNA, 17 nt, Human
aaggucaccucacucag

SEQ ID NO: 3214072 - RNA, 15 nt, Human
aaggucaccucacuc

SEQ ID NO: 3214073 - RNA, 14 nt, Human
aaggucaccucacu

SEQ ID NO: 3214074 - RNA, 18 nt, Human
guuucugaaagggacgcu

SEQ ID NO: 3214075 - RNA, 21 nt, Human
guuucucuucuccccuuccau

SEQ ID NO: 3214076 - RNA, 13 nt, Human
guuucucuucucc

SEQ ID NO: 3214077 - RNA, 19 nt, Human
guuucuauguguagggcgg

SEQ ID NO: 3214078 - RNA, 20 nt, Human
aaguaaggugcuuggaguuu

SEQ ID NO: 3214079 - RNA, 13 nt, Human
guuucuauuuucu

SEQ ID NO: 3214080 - RNA, 20 nt, Human
guuucucuucuagaugauuu

SEQ ID NO: 3214081 - RNA, 23 nt, Human
guuucuauuuucucugauacuuu

SEQ ID NO: 3214082 - RNA, 23 nt, Human
aaggcucugagcaaauguggcuc

SEQ ID NO: 3214083 - RNA, 22 nt, Human
aaggggcccaaauucuuucagu

SEQ ID NO: 3214084 - RNA, 24 nt, Human
aagggucuccgaaaugcugucuuu

SEQ ID NO: 3214085 - RNA, 23 nt, Human
aagggucuccgaaaugcugucuu

SEQ ID NO: 3214086 - RNA, 18 nt, Human
aagguacuuucauauuuu

SEQ ID NO: 3214087 - RNA, 22 nt, Human
aagguacuuucauauuuuaaac

SEQ ID NO: 3214088 - RNA, 19 nt, Human
aagguacuuucauauuuua

SEQ ID NO: 3214089 - RNA, 20 nt, Human
aagguagaaauaucugaaaa

SEQ ID NO: 3214090 - RNA, 22 nt, Human
guuuacauagucugaagugaag

SEQ ID NO: 3214091 - RNA, 17 nt, Human
aagguagaaugaccuug

SEQ ID NO: 3214092 - RNA, 13 nt, Human
aagguagaaugac

SEQ ID NO: 3214093 - RNA, 22 nt, Human
aaggcccuaucuguuuacagug

SEQ ID NO: 3214094 - RNA, 23 nt, Human
aaggcccuguuagugcacugauu

SEQ ID NO: 3214095 - RNA, 18 nt, Human
aaggccccaagguuuaca

SEQ ID NO: 3214096 - RNA, 21 nt, Human
aaggcccagagagaagagccc

SEQ ID NO: 3214097 - RNA, 15 nt, Human
aaggcauuucccacc

SEQ ID NO: 3214098 - RNA, 17 nt, Human
aaggauaccuucuuauu

SEQ ID NO: 3214099 - RNA, 19 nt, Human
aaggauaccuucuuauuua

SEQ ID NO: 3214100 - RNA, 15 nt, Human
aaggauacaggcugg

SEQ ID NO: 3214101 - RNA, 23 nt, Human
aaggaguuucuuuagcugacaga

SEQ ID NO: 3214102 - RNA, 12 nt, Human
aaggcaugaagg

SEQ ID NO: 3214103 - RNA, 23 nt, Human
guuggaaacacuaaauguuaaag

SEQ ID NO: 3214104 - RNA, 13 nt, Human
guuggaaaaaauu

SEQ ID NO: 3214105 - RNA, 15 nt, Human
guuggaaaaaauuug

SEQ ID NO: 3214106 - RNA, 22 nt, Human
guuggaaacacuaaauguuaaa

SEQ ID NO: 3214107 - RNA, 20 nt, Human
guuggaaacacuaaauguua

SEQ ID NO: 3214108 - RNA, 19 nt, Human
guuggaaacacuaaauguu

SEQ ID NO: 3214109 - RNA, 18 nt, Human
guuggaaacacuaaaugu

SEQ ID NO: 3214110 - RNA, 16 nt, Human
guuggaaacacuaaau

SEQ ID NO: 3214111 - RNA, 15 nt, Human
guuggaaacacuaaa

SEQ ID NO: 3214112 - RNA, 14 nt, Human
guuggaaacacuaa

SEQ ID NO: 3214113 - RNA, 17 nt, Human
guuggaaaauaucuuug

SEQ ID NO: 3214114 - RNA, 19 nt, Human
guugcccaggcaggucuug

SEQ ID NO: 3214115 - RNA, 23 nt, Human
guugccuauaagccaaaauuaag

SEQ ID NO: 3214116 - RNA, 13 nt, Human
guugcccaggcug

SEQ ID NO: 3214117 - RNA, 12 nt, Human
guugcccaggcu

SEQ ID NO: 3214118 - RNA, 23 nt, Human
guugcccaggcaggucuugaacu

SEQ ID NO: 3214119 - RNA, 22 nt, Human
aaggccuaauucuaugccuguc

SEQ ID NO: 3214120 - RNA, 23 nt, Human
aaggaaccaaagcgaauuuuaaa

SEQ ID NO: 3214121 - RNA, 22 nt, Human
aaggaaccaaagcgaauuuuaa

SEQ ID NO: 3214122 - RNA, 22 nt, Human
aaggaaauaccaguucugggca

SEQ ID NO: 3214123 - RNA, 15 nt, Human
aaggaaagagggagg

SEQ ID NO: 3214124 - RNA, 12 nt, Human
aaggaaagcugu

SEQ ID NO: 3214125 - RNA, 18 nt, Human
aaggaaagcuguguuuau

SEQ ID NO: 3214126 - RNA, 14 nt, Human
aagcuccaucucca

SEQ ID NO: 3214127 - RNA, 15 nt, Human
aaggaagacuucauc

SEQ ID NO: 3214128 - RNA, 13 nt, Human
aaggaagcacaug

SEQ ID NO: 3214129 - RNA, 14 nt, Human
aaggaagacuucau

SEQ ID NO: 3214130 - RNA, 17 nt, Human
aaggaagaaauuaacuu

SEQ ID NO: 3214131 - RNA, 16 nt, Human
aaggaagacaguucua

SEQ ID NO: 3214132 - RNA, 11 nt, Human
aaggaagaaau

SEQ ID NO: 3214133 - RNA, 17 nt, Human
aaggaauaccugucccc

SEQ ID NO: 3214134 - RNA, 21 nt, Human
aaggaauaaauugcuccuuga

SEQ ID NO: 3214135 - RNA, 16 nt, Human
aaggaagcacaugccu

SEQ ID NO: 3214136 - RNA, 20 nt, Human
aaggaggggauagagagaga

SEQ ID NO: 3214137 - RNA, 19 nt, Human
aaggaggcuccaggcagca

SEQ ID NO: 3214138 - RNA, 18 nt, Human
aaggaggcuccaggcagc

SEQ ID NO: 3214139 - RNA, 17 nt, Human
aaggaggcuccaggcag

SEQ ID NO: 3214140 - RNA, 14 nt, Human
aaggaggcuccagg

SEQ ID NO: 3214141 - RNA, 19 nt, Human
aaggaggccaccuccuaaa

SEQ ID NO: 3214142 - RNA, 16 nt, Human
aaggaggccaccuccu

SEQ ID NO: 3214143 - RNA, 12 nt, Human
aaggaggccacc

SEQ ID NO: 3214144 - RNA, 15 nt, Human
aaggaggccaccucc

SEQ ID NO: 3214145 - RNA, 14 nt, Human
aaggaggccaccuc

SEQ ID NO: 3214146 - RNA, 22 nt, Human
aaggagcucacuguggugucug

SEQ ID NO: 3214147 - RNA, 11 nt, Human
aaggagagcua

SEQ ID NO: 3214148 - RNA, 18 nt, Human
aaggaauaccuguccccc

SEQ ID NO: 3214149 - RNA, 20 nt, Human
aaggaauagaucuaugauug

SEQ ID NO: 3214150 - RNA, 18 nt, Human
uaaaaguuugaaaagcaa

SEQ ID NO: 3214151 - RNA, 20 nt, Human
uaaaaguuugaaaagcaaua

SEQ ID NO: 3214152 - RNA, 16 nt, Human
uaaaauaauuuuguaa

SEQ ID NO: 3214153 - RNA, 15 nt, Human
uaaaauaauuuugua

SEQ ID NO: 3214154 - RNA, 22 nt, Human
uaaaauaauuuuaucucuuucu

SEQ ID NO: 3214155 - RNA, 14 nt, Human
uaaaauaauuuugu

SEQ ID NO: 3214156 - RNA, 13 nt, Human
uaaaauaauuuug

SEQ ID NO: 3214157 - RNA, 21 nt, Human
uaaaauaauuuuguaauguau

SEQ ID NO: 3214158 - RNA, 22 nt, Human
uaaaauacuucuuuuuacaaug

SEQ ID NO: 3214159 - RNA, 13 nt, Human
uaaaauacuucuu

SEQ ID NO: 3214160 - RNA, 21 nt, Human
uaaaauacuguagauaauuaa

SEQ ID NO: 3214161 - RNA, 20 nt, Human
uaaaauacuguagauaauua

SEQ ID NO: 3214162 - RNA, 17 nt, Human
uaaaauacuguagauaa

SEQ ID NO: 3214163 - RNA, 16 nt, Human
uaaaauacuguagaua

SEQ ID NO: 3214164 - RNA, 14 nt, Human
uaaaauacuguaga

SEQ ID NO: 3214165 - RNA, 12 nt, Human
uaaaauacugua

SEQ ID NO: 3214166 - RNA, 18 nt, Human
aagugauucuccugccuc

SEQ ID NO: 3214167 - RNA, 17 nt, Human
aagugauucuccugccu

SEQ ID NO: 3214168 - RNA, 16 nt, Human
aagugauucuccugcc

SEQ ID NO: 3214169 - RNA, 15 nt, Human
aagugauucuccugc

SEQ ID NO: 3214170 - RNA, 19 nt, Human
aagugauucuccugccuca

SEQ ID NO: 3214171 - RNA, 21 nt, Human
aagugauucucaugccucagc

SEQ ID NO: 3214172 - RNA, 19 nt, Human
aagugauucucaugccuca

SEQ ID NO: 3214173 - RNA, 18 nt, Human
aagugccucacauuuuuu

SEQ ID NO: 3214174 - RNA, 23 nt, Human
aagugccucacauuuuuuucuac

SEQ ID NO: 3214175 - RNA, 16 nt, Human
aagugaggaugaaaaa

SEQ ID NO: 3214176 - RNA, 18 nt, Human
aagugaggaaaucaaagu

SEQ ID NO: 3214177 - RNA, 21 nt, Human
aagugaggaaaucaaagugcu

SEQ ID NO: 3214178 - RNA, 15 nt, Human
aagugaggccacuga

SEQ ID NO: 3214179 - RNA, 16 nt, Human
aagugaggccacugaa

SEQ ID NO: 3214180 - RNA, 18 nt, Human
aagugaggccacugaaga

SEQ ID NO: 3214181 - RNA, 21 nt, Human
aagugaggccacugaagagga

SEQ ID NO: 3214182 - RNA, 20 nt, Human
aagugauucucaugccucag

SEQ ID NO: 3214183 - RNA, 15 nt, Human
aagugagagcugggu

SEQ ID NO: 3214184 - RNA, 20 nt, Human
uaaaauauuuaugaagaaaa

SEQ ID NO: 3214185 - RNA, 18 nt, Human
uaaaauauuuaugaagaa

SEQ ID NO: 3214186 - RNA, 17 nt, Human
uaaaauauuuaugaaga

SEQ ID NO: 3214187 - RNA, 16 nt, Human
uaaaauauuuaugaag

SEQ ID NO: 3214188 - RNA, 15 nt, Human
uaaaauauuuaugaa

SEQ ID NO: 3214189 - RNA, 14 nt, Human
uaaaauauuuauga

SEQ ID NO: 3214190 - RNA, 22 nt, Human
uaaaauauuccugcauuuguga

SEQ ID NO: 3214191 - RNA, 13 nt, Human
uaaaauauuccug

SEQ ID NO: 3214192 - RNA, 13 nt, Human
uaaaauaugcacu

SEQ ID NO: 3214193 - RNA, 23 nt, Human
uaaaauaugcacuaagucucuuu

SEQ ID NO: 3214194 - RNA, 19 nt, Human
uaaaauaugcacuaagucu

SEQ ID NO: 3214195 - RNA, 14 nt, Human
uaaaauaugcacua

SEQ ID NO: 3214196 - RNA, 17 nt, Human
uaaaaaguguuuaaaug

SEQ ID NO: 3214197 - RNA, 19 nt, Human
uaaaaauaaagcacaaacc

SEQ ID NO: 3214198 - RNA, 12 nt, Human
uaaaaauaaagc

SEQ ID NO: 3214199 - RNA, 13 nt, Human
uaaaaauaacugu

SEQ ID NO: 3214200 - RNA, 16 nt, Human
uaaaaauaacuguaau

SEQ ID NO: 3214201 - RNA, 15 nt, Human
uaaaaauaacuguaa

SEQ ID NO: 3214202 - RNA, 17 nt, Human
uaaaaauaacuguaauu

SEQ ID NO: 3214203 - RNA, 14 nt, Human
uaaaaaguguuuaa

SEQ ID NO: 3214204 - RNA, 19 nt, Human
guuuuugauagcauuguaa

SEQ ID NO: 3214205 - RNA, 15 nt, Human
uaaaaaguggaaaaa

SEQ ID NO: 3214206 - RNA, 19 nt, Human
guuuuugaaggcagaaagc

SEQ ID NO: 3214207 - RNA, 20 nt, Human
guuuuugaaggcagaaagca

SEQ ID NO: 3214208 - RNA, 15 nt, Human
guuuuucuucucccu

SEQ ID NO: 3214209 - RNA, 17 nt, Human
guuuuucuuuucuugga

SEQ ID NO: 3214210 - RNA, 20 nt, Human
guuuuucuuuucuuggacac

SEQ ID NO: 3214211 - RNA, 16 nt, Human
guuuuucuuaauauau

SEQ ID NO: 3214212 - RNA, 12 nt, Human
uaaaagaauugu

SEQ ID NO: 3214213 - RNA, 23 nt, Human
uaaaagaauauuuuaacuuccuu

SEQ ID NO: 3214214 - RNA, 16 nt, Human
uaaaagaauauuuuaa

SEQ ID NO: 3214215 - RNA, 22 nt, Human
uaaaacuugauguguuaucucu

SEQ ID NO: 3214216 - RNA, 20 nt, Human
uaaaacuugauguguuaucu

SEQ ID NO: 3214217 - RNA, 12 nt, Human
aagugagagagg

SEQ ID NO: 3214218 - RNA, 14 nt, Human
aagugagagcuggg

SEQ ID NO: 3214219 - RNA, 18 nt, Human
guuuuuccuaucauguua

SEQ ID NO: 3214220 - RNA, 20 nt, Human
guuuuuccuaucauguuaac

SEQ ID NO: 3214221 - RNA, 16 nt, Human
guuuuucauuuuaaaa

SEQ ID NO: 3214222 - RNA, 21 nt, Human
aagugaaaaaggaggaagaga

SEQ ID NO: 3214223 - RNA, 20 nt, Human
aagucuuuuaaaaaguauug

SEQ ID NO: 3214224 - RNA, 12 nt, Human
aagugaaaacuu

SEQ ID NO: 3214225 - RNA, 10 nt, Human
aagugaaauu

SEQ ID NO: 3214226 - RNA, 20 nt, Human
aagugaaauuuauugaggaa

SEQ ID NO: 3214227 - RNA, 15 nt, Human
aagugaaauuuauug

SEQ ID NO: 3214228 - RNA, 12 nt, Human
aagugaaauuua

SEQ ID NO: 3214229 - RNA, 11 nt, Human
aagugaaauuu

SEQ ID NO: 3214230 - RNA, 14 nt, Human
aagugaaaauauag

SEQ ID NO: 3214231 - RNA, 12 nt, Human
aagugaaaauau

SEQ ID NO: 3214232 - RNA, 19 nt, Human
aagucuuuuaaaaaguauu

SEQ ID NO: 3214233 - RNA, 17 nt, Human
aagucuuuuaaaaagua

SEQ ID NO: 3214234 - RNA, 16 nt, Human
aagucuuuuaaaaagu

SEQ ID NO: 3214235 - RNA, 12 nt, Human
aagucuuuuaaa

SEQ ID NO: 3214236 - RNA, 11 nt, Human
aagucuuugcu

SEQ ID NO: 3214237 - RNA, 17 nt, Human
aagucuugccuauauuu

SEQ ID NO: 3214238 - RNA, 14 nt, Human
aagucuucaugaaa

SEQ ID NO: 3214239 - RNA, 13 nt, Human
aagucuucaugaa

SEQ ID NO: 3214240 - RNA, 22 nt, Human
aagucuucaugaaaugcuaugu

SEQ ID NO: 3214241 - RNA, 19 nt, Human
aagucuucaugaaaugcua

SEQ ID NO: 3214242 - RNA, 18 nt, Human
aagucuucaugaaaugcu

SEQ ID NO: 3214243 - RNA, 16 nt, Human
aagucuucaugaaaug

SEQ ID NO: 3214244 - RNA, 21 nt, Human
aagucaugcuccccugugcca

SEQ ID NO: 3214245 - RNA, 19 nt, Human
aagucaugcuccccugugc

SEQ ID NO: 3214246 - RNA, 15 nt, Human
aagucaugcuccccu

SEQ ID NO: 3214247 - RNA, 21 nt, Human
aagucaugcguuuaaucacau

SEQ ID NO: 3214248 - RNA, 23 nt, Human
guuuuggauuuggagagaaauau

SEQ ID NO: 3214249 - RNA, 15 nt, Human
guuuugcuuccccuc

SEQ ID NO: 3214250 - RNA, 22 nt, Human
guuuugcacucuuguuucuccc

SEQ ID NO: 3214251 - RNA, 22 nt, Human
aaguaauauuuauuaaauuuuu

SEQ ID NO: 3214252 - RNA, 14 nt, Human
aaguaauauuuauu

SEQ ID NO: 3214253 - RNA, 22 nt, Human
guuuugccauguuggccaggcu

SEQ ID NO: 3214254 - RNA, 21 nt, Human
guuuugccauguuggccaggc

SEQ ID NO: 3214255 - RNA, 20 nt, Human
guuuugccauguuggccagg

SEQ ID NO: 3214256 - RNA, 16 nt, Human
guuuugccauguuggc

SEQ ID NO: 3214257 - RNA, 15 nt, Human
guuucugccgcagcc

SEQ ID NO: 3214258 - RNA, 13 nt, Human
guuuugcacucuu

SEQ ID NO: 3214259 - RNA, 14 nt, Human
guuucugccgcagc

SEQ ID NO: 3214260 - RNA, 19 nt, Human
aaguauuuaagccuaaaga

SEQ ID NO: 3214261 - RNA, 17 nt, Human
aaguauuaauucucuuu

SEQ ID NO: 3214262 - RNA, 16 nt, Human
aaguauuacuaaauug

SEQ ID NO: 3214263 - RNA, 17 nt, Human
aaguauuacuaaauuga

SEQ ID NO: 3214264 - RNA, 21 nt, Human
aaguauuuaagccuaaagauu

SEQ ID NO: 3214265 - RNA, 20 nt, Human
aaguauuuaagccuaaagau

SEQ ID NO: 3214266 - RNA, 21 nt, Human
aaguacauuuuuugaaaugcu

SEQ ID NO: 3214267 - RNA, 18 nt, Human
aaguacagguacuuuguc

SEQ ID NO: 3214268 - RNA, 17 nt, Human
aaguacauuuuuugaaa

SEQ ID NO: 3214269 - RNA, 16 nt, Human
aaguacauuuuuugaa

SEQ ID NO: 3214270 - RNA, 15 nt, Human
aaguacagguacuuu

SEQ ID NO: 3214271 - RNA, 23 nt, Human
aaguacacugaauuuuuaugugu

SEQ ID NO: 3214272 - RNA, 13 nt, Human
aaguacagaauuu

SEQ ID NO: 3214273 - RNA, 14 nt, Human
aaguacagaauuug

SEQ ID NO: 3214274 - RNA, 16 nt, Human
aaguacagaauuugaa

SEQ ID NO: 3214275 - RNA, 19 nt, Human
aaguacagaauuugaauua

SEQ ID NO: 3214276 - RNA, 12 nt, Human
uaccucuuuugc

SEQ ID NO: 3214277 - RNA, 13 nt, Human
uaccugaagucuu

SEQ ID NO: 3214278 - RNA, 14 nt, Human
uaccugaagucuuu

SEQ ID NO: 3214279 - RNA, 13 nt, Human
uaccugaggggcc

SEQ ID NO: 3214280 - RNA, 15 nt, Human
uaccugaggggccuc

SEQ ID NO: 3214281 - RNA, 16 nt, Human
uaccugaagucuuugu

SEQ ID NO: 3214282 - RNA, 19 nt, Human
uaccugaagggguuuucuu

SEQ ID NO: 3214283 - RNA, 18 nt, Human
uaccugaagggguuuucu

SEQ ID NO: 3214284 - RNA, 21 nt, Human
uaccugaagggguuuucuuga

SEQ ID NO: 3214285 - RNA, 13 nt, Human
uaccucuuggcug

SEQ ID NO: 3214286 - RNA, 15 nt, Human
uaccucuuuggaaaa

SEQ ID NO: 3214287 - RNA, 14 nt, Human
uaccucuuuggaaa

SEQ ID NO: 3214288 - RNA, 23 nt, Human
uacccuauaucuauaaacacugu

SEQ ID NO: 3214289 - RNA, 23 nt, Human
uacccgggaagggggcugggaca

SEQ ID NO: 3214290 - RNA, 16 nt, Human
uacccuauaucuauaa

SEQ ID NO: 3214291 - RNA, 13 nt, Human
uacccuauaucua

SEQ ID NO: 3214292 - RNA, 21 nt, Human
uaccuuaaauuaguacagcac

SEQ ID NO: 3214293 - RNA, 13 nt, Human
aauuacauauacu

SEQ ID NO: 3214294 - RNA, 11 nt, Human
aauuacaguuu

SEQ ID NO: 3214295 - RNA, 23 nt, Human
aauuacagugccuaaaauaagaa

SEQ ID NO: 3214296 - RNA, 19 nt, Human
aauuacaguggauugcuca

SEQ ID NO: 3214297 - RNA, 19 nt, Human
aauuacagugccuaaaaua

SEQ ID NO: 3214298 - RNA, 12 nt, Human
aauuacauuugu

SEQ ID NO: 3214299 - RNA, 19 nt, Human
aauuacauuuguaauuuaa

SEQ ID NO: 3214300 - RNA, 18 nt, Human
aauuacauuuguaauuua

SEQ ID NO: 3214301 - RNA, 17 nt, Human
aauuacauuuguaauuu

SEQ ID NO: 3214302 - RNA, 15 nt, Human
aauuacauuuguaau

SEQ ID NO: 3214303 - RNA, 17 nt, Human
aauuacaggaaguacug

SEQ ID NO: 3214304 - RNA, 22 nt, Human
uaccuuaaaauuugaaacauug

SEQ ID NO: 3214305 - RNA, 21 nt, Human
uaccuuaaaauuugaaacauu

SEQ ID NO: 3214306 - RNA, 20 nt, Human
uaccuuaaaauuugaaacau

SEQ ID NO: 3214307 - RNA, 18 nt, Human
uaccuuaaaauuugaaac

SEQ ID NO: 3214308 - RNA, 17 nt, Human
uaccuuaaaauuugaaa

SEQ ID NO: 3214309 - RNA, 16 nt, Human
uaccuuaaaauuugaa

SEQ ID NO: 3214310 - RNA, 15 nt, Human
uaccuuaaaauuuga

SEQ ID NO: 3214311 - RNA, 12 nt, Human
uaccuuaaaauu

SEQ ID NO: 3214312 - RNA, 19 nt, Human
aauuacaggaaguacugga

SEQ ID NO: 3214313 - RNA, 20 nt, Human
aauuacaggaaguacuggag

SEQ ID NO: 3214314 - RNA, 16 nt, Human
uaccugaggggccucu

SEQ ID NO: 3214315 - RNA, 16 nt, Human
uaccugaguugaagag

SEQ ID NO: 3214316 - RNA, 17 nt, Human
uaccugaguugaagagg

SEQ ID NO: 3214317 - RNA, 15 nt, Human
uaccugugaaguguu

SEQ ID NO: 3214318 - RNA, 14 nt, Human
uaccuguuuaaauu

SEQ ID NO: 3214319 - RNA, 13 nt, Human
uaccuguuuaaau

SEQ ID NO: 3214320 - RNA, 16 nt, Human
aauuagauccauuaau

SEQ ID NO: 3214321 - RNA, 17 nt, Human
aauuagauccauuaauu

SEQ ID NO: 3214322 - RNA, 11 nt, Human
aauuaugugac

SEQ ID NO: 3214323 - RNA, 18 nt, Human
aauuagaacccuugcaca

SEQ ID NO: 3214324 - RNA, 11 nt, Human
aauuagaaaau

SEQ ID NO: 3214325 - RNA, 14 nt, Human
aauuagaaaauauu

SEQ ID NO: 3214326 - RNA, 16 nt, Human
aauuagaaaauauucu

SEQ ID NO: 3214327 - RNA, 18 nt, Human
aauuagaaaauauucucu

SEQ ID NO: 3214328 - RNA, 19 nt, Human
aauuagaaaauauucucua

SEQ ID NO: 3214329 - RNA, 14 nt, Human
aauuacuuugguag

SEQ ID NO: 3214330 - RNA, 15 nt, Human
aauuaccauuuguua

SEQ ID NO: 3214331 - RNA, 17 nt, Human
aauuauugauugcuuuu

SEQ ID NO: 3214332 - RNA, 14 nt, Human
aauuauugauugcu

SEQ ID NO: 3214333 - RNA, 21 nt, Human
aauuauuuauuaaaugcccag

SEQ ID NO: 3214334 - RNA, 22 nt, Human
aauuauguuugccacuuugcaa

SEQ ID NO: 3214335 - RNA, 19 nt, Human
aauuauguugaaaagagua

SEQ ID NO: 3214336 - RNA, 13 nt, Human
aauuauuauaaaa

SEQ ID NO: 3214337 - RNA, 15 nt, Human
aauuauuauaaaaau

SEQ ID NO: 3214338 - RNA, 17 nt, Human
aauuauuauaaaaauau

SEQ ID NO: 3214339 - RNA, 22 nt, Human
aauuauuauaaaaauauuaaga

SEQ ID NO: 3214340 - RNA, 11 nt, Human
aauucaguugu

SEQ ID NO: 3214341 - RNA, 20 nt, Human
aauucaggcauauuuuaacu

SEQ ID NO: 3214342 - RNA, 17 nt, Human
aauucaguuguuagugu

SEQ ID NO: 3214343 - RNA, 22 nt, Human
aauucaguuguuagugugucuu

SEQ ID NO: 3214344 - RNA, 23 nt, Human
aauucagugaugugccuaaauaa

SEQ ID NO: 3214345 - RNA, 14 nt, Human
aauucaguuuuuuu

SEQ ID NO: 3214346 - RNA, 12 nt, Human
aauuauuuuaaa

SEQ ID NO: 3214347 - RNA, 14 nt, Human
aauuauuugaauga

SEQ ID NO: 3214348 - RNA, 12 nt, Human
aauuauuugaau

SEQ ID NO: 3214349 - RNA, 22 nt, Human
aauuauuuauuaaaugcccagc

SEQ ID NO: 3214350 - RNA, 11 nt, Human
aauuauuucug

SEQ ID NO: 3214351 - RNA, 22 nt, Human
aauuauuucugucacaguaaaa

SEQ ID NO: 3214352 - RNA, 17 nt, Human
aauuauuucuuaauuau

SEQ ID NO: 3214353 - RNA, 15 nt, Human
aauuauuuuaaaaga

SEQ ID NO: 3214354 - RNA, 20 nt, Human
aauucaauaguaauauaaua

SEQ ID NO: 3214355 - RNA, 18 nt, Human
aauucaauaguaauauaa

SEQ ID NO: 3214356 - RNA, 16 nt, Human
aauucaauaguaauau

SEQ ID NO: 3214357 - RNA, 15 nt, Human
aauucaauaguaaua

SEQ ID NO: 3214358 - RNA, 18 nt, Human
uacauuucacauuauucu

SEQ ID NO: 3214359 - RNA, 21 nt, Human
uacauucucaguuuuucuuaa

SEQ ID NO: 3214360 - RNA, 20 nt, Human
uacauucucaguuuuucuua

SEQ ID NO: 3214361 - RNA, 17 nt, Human
uacauucucaguuuuuc

SEQ ID NO: 3214362 - RNA, 15 nt, Human
uacauucucaguuuu

SEQ ID NO: 3214363 - RNA, 19 nt, Human
uacauuucuaagucaaaca

SEQ ID NO: 3214364 - RNA, 14 nt, Human
uacauuucgauguu

SEQ ID NO: 3214365 - RNA, 22 nt, Human
uacauuuccgccacaucccucu

SEQ ID NO: 3214366 - RNA, 12 nt, Human
uaccagcagagc

SEQ ID NO: 3214367 - RNA, 22 nt, Human
uaccagcagagcaccuuagaca

SEQ ID NO: 3214368 - RNA, 13 nt, Human
uaccagcagagca

SEQ ID NO: 3214369 - RNA, 14 nt, Human
uaccagcagagcac

SEQ ID NO: 3214370 - RNA, 16 nt, Human
uaccaugccauuuaaa

SEQ ID NO: 3214371 - RNA, 14 nt, Human
uaccauuaaaauau

SEQ ID NO: 3214372 - RNA, 13 nt, Human
uaccauuaaaaua

SEQ ID NO: 3214373 - RNA, 19 nt, Human
uacccccugcaaagcccag

SEQ ID NO: 3214374 - RNA, 23 nt, Human
uacccccugcaaagcccagcuug

SEQ ID NO: 3214375 - RNA, 15 nt, Human
uacccccugcaaagc

SEQ ID NO: 3214376 - RNA, 17 nt, Human
uaccauuaaaauaugca

SEQ ID NO: 3214377 - RNA, 15 nt, Human
uaccauuaaaauaug

SEQ ID NO: 3214378 - RNA, 21 nt, Human
uaccauuaaaauaugcacuaa

SEQ ID NO: 3214379 - RNA, 19 nt, Human
uaccagggacugaggggag

SEQ ID NO: 3214380 - RNA, 17 nt, Human
uacagggaugguguuca

SEQ ID NO: 3214381 - RNA, 15 nt, Human
uacagagaugucucu

SEQ ID NO: 3214382 - RNA, 22 nt, Human
uacagagaugucucuuauaucu

SEQ ID NO: 3214383 - RNA, 16 nt, Human
uacagagaugucucuu

SEQ ID NO: 3214384 - RNA, 21 nt, Human
aaugugcugaaugguuuucaa

SEQ ID NO: 3214385 - RNA, 13 nt, Human
aauguucaucaau

SEQ ID NO: 3214386 - RNA, 14 nt, Human
aauguuauguauau

SEQ ID NO: 3214387 - RNA, 13 nt, Human
aauguuauaaagu

SEQ ID NO: 3214388 - RNA, 17 nt, Human
aauguuaguuaguguag

SEQ ID NO: 3214389 - RNA, 16 nt, Human
aauguucaucaaugaa

SEQ ID NO: 3214390 - RNA, 20 nt, Human
aauguucaucaaugaaugaa

SEQ ID NO: 3214391 - RNA, 19 nt, Human
aauguucauacugaugugu

SEQ ID NO: 3214392 - RNA, 21 nt, Human
aauguuccugccuccuugaua

SEQ ID NO: 3214393 - RNA, 23 nt, Human
aauguuggcagaugcagcucuuc

SEQ ID NO: 3214394 - RNA, 20 nt, Human
aauguuggcagaugcagcuc

SEQ ID NO: 3214395 - RNA, 17 nt, Human
aauuaaguacuauguau

SEQ ID NO: 3214396 - RNA, 16 nt, Human
aauuaaguacuaugua

SEQ ID NO: 3214397 - RNA, 13 nt, Human
aauuaaguacuau

SEQ ID NO: 3214398 - RNA, 21 nt, Human
aauguugugaauaauuacagu

SEQ ID NO: 3214399 - RNA, 20 nt, Human
aauguugugaauaauuacag

SEQ ID NO: 3214400 - RNA, 18 nt, Human
aauguugugaauaauuac

SEQ ID NO: 3214401 - RNA, 17 nt, Human
aauguugugaauaauua

SEQ ID NO: 3214402 - RNA, 13 nt, Human
aauguugugaaua

SEQ ID NO: 3214403 - RNA, 12 nt, Human
aauguugugaau

SEQ ID NO: 3214404 - RNA, 19 nt, Human
uaauuuaaaauugugaugu

SEQ ID NO: 3214405 - RNA, 20 nt, Human
uaauuuaaaauugugaugug

SEQ ID NO: 3214406 - RNA, 18 nt, Human
uaauuuaaaugauuuaaa

SEQ ID NO: 3214407 - RNA, 22 nt, Human
uaauuauuauucagaaaugacu

SEQ ID NO: 3214408 - RNA, 16 nt, Human
uaauuuaguuguuucu

SEQ ID NO: 3214409 - RNA, 17 nt, Human
uaauuuaguuguuucua

SEQ ID NO: 3214410 - RNA, 19 nt, Human
uaauuuaguuguuucuaga

SEQ ID NO: 3214411 - RNA, 20 nt, Human
uaauuuaggaguuuugagaa

SEQ ID NO: 3214412 - RNA, 18 nt, Human
uaauuuaaggucuguuug

SEQ ID NO: 3214413 - RNA, 23 nt, Human
uaauuuaaggucuguuugcuguu

SEQ ID NO: 3214414 - RNA, 22 nt, Human
uaauuuaaggucuguuugcugu

SEQ ID NO: 3214415 - RNA, 21 nt, Human
uaauuuaaggucuguuugcug

SEQ ID NO: 3214416 - RNA, 16 nt, Human
aaugauuucauucaau

SEQ ID NO: 3214417 - RNA, 11 nt, Human
aaugcaaacca

SEQ ID NO: 3214418 - RNA, 12 nt, Human
aaugcaaaccau

SEQ ID NO: 3214419 - RNA, 14 nt, Human
aaugcaaaaaaucu

SEQ ID NO: 3214420 - RNA, 20 nt, Human
aaugcaaaacacaaaacaaa

SEQ ID NO: 3214421 - RNA, 19 nt, Human
aaugcacauauagacacau

SEQ ID NO: 3214422 - RNA, 15 nt, Human
uaauuauuauaaaaa

SEQ ID NO: 3214423 - RNA, 16 nt, Human
uaauuauuauaaaaau

SEQ ID NO: 3214424 - RNA, 18 nt, Human
uaauuauuauaaaaauau

SEQ ID NO: 3214425 - RNA, 19 nt, Human
uaauuauuauaaaaauauu

SEQ ID NO: 3214426 - RNA, 18 nt, Human
aaugcacugggaaaaagu

SEQ ID NO: 3214427 - RNA, 11 nt, Human
aaugagccugg

SEQ ID NO: 3214428 - RNA, 18 nt, Human
aaugagcagcuuuagcaa

SEQ ID NO: 3214429 - RNA, 21 nt, Human
aaugagaucucauuaaaaggu

SEQ ID NO: 3214430 - RNA, 18 nt, Human
aaugagcaauaucugcua

SEQ ID NO: 3214431 - RNA, 19 nt, Human
aaugacuuccccaauaucu

SEQ ID NO: 3214432 - RNA, 11 nt, Human
aaugacuuuau

SEQ ID NO: 3214433 - RNA, 21 nt, Human
aaugacuuccccaauaucuug

SEQ ID NO: 3214434 - RNA, 13 nt, Human
aaugacuuuauua

SEQ ID NO: 3214435 - RNA, 14 nt, Human
aaugacuuuauuau

SEQ ID NO: 3214436 - RNA, 15 nt, Human
aaugacuuuauuauu

SEQ ID NO: 3214437 - RNA, 17 nt, Human
aaugacuuuauuauuua

SEQ ID NO: 3214438 - RNA, 22 nt, Human
aaugacuaagaggaaaguacau

SEQ ID NO: 3214439 - RNA, 21 nt, Human
aaugaccuuucaauaggaaaa

SEQ ID NO: 3214440 - RNA, 20 nt, Human
aaugaccuuucaauaggaaa

SEQ ID NO: 3214441 - RNA, 20 nt, Human
aaucuguauaauacuuugua

SEQ ID NO: 3214442 - RNA, 21 nt, Human
aaucuguauaauacuuuguau

SEQ ID NO: 3214443 - RNA, 22 nt, Human
aaugaguuucuuagacuuuucc

SEQ ID NO: 3214444 - RNA, 17 nt, Human
aaugauucaaaaaguca

SEQ ID NO: 3214445 - RNA, 12 nt, Human
aaugauucaaaa

SEQ ID NO: 3214446 - RNA, 16 nt, Human
aaugagugaauugaau

SEQ ID NO: 3214447 - RNA, 19 nt, Human
aaugaguuucuuagacuuu

SEQ ID NO: 3214448 - RNA, 14 nt, Human
aaugaguuucuuag

SEQ ID NO: 3214449 - RNA, 21 nt, Human
aaugaguuucacagugugauu

SEQ ID NO: 3214450 - RNA, 18 nt, Human
aaugaguccaaacuggaa

SEQ ID NO: 3214451 - RNA, 24 nt, Human
aaugauuucagcucacugcaaccu

SEQ ID NO: 3214452 - RNA, 22 nt, Human
aaugauugcuuuuaaaauuuua

SEQ ID NO: 3214453 - RNA, 18 nt, Human
aaugauuguuuaaagguu

SEQ ID NO: 3214454 - RNA, 14 nt, Human
aaugauuuaaauuu

SEQ ID NO: 3214455 - RNA, 14 nt, Human
aaugauuguuuaaa

SEQ ID NO: 3214456 - RNA, 13 nt, Human
aaugauuguuuaa

SEQ ID NO: 3214457 - RNA, 20 nt, Human
aaugauugcuuuuaaaauuu

SEQ ID NO: 3214458 - RNA, 19 nt, Human
aaugauugcuuuuaaaauu

SEQ ID NO: 3214459 - RNA, 16 nt, Human
aaugauugcuuuuaaa

SEQ ID NO: 3214460 - RNA, 15 nt, Human
aaugauugcuuuuaa

SEQ ID NO: 3214461 - RNA, 12 nt, Human
aaugauugcuuu

SEQ ID NO: 3214462 - RNA, 20 nt, Human
aaugauugaaaauaaugcug

SEQ ID NO: 3214463 - RNA, 13 nt, Human
aaugauugaaaau

SEQ ID NO: 3214464 - RNA, 21 nt, Human
aaugauucaaaaagucacagu

SEQ ID NO: 3214465 - RNA, 18 nt, Human
aaugaggucagagccugc

SEQ ID NO: 3214466 - RNA, 16 nt, Human
aaugaggucagagccu

SEQ ID NO: 3214467 - RNA, 15 nt, Human
aaugagggggcucag

SEQ ID NO: 3214468 - RNA, 16 nt, Human
aaugagggggcucagu

SEQ ID NO: 3214469 - RNA, 12 nt, Human
aaugagccuggc

SEQ ID NO: 3214470 - RNA, 13 nt, Human
aaugagccuggca

SEQ ID NO: 3214471 - RNA, 17 nt, Human
uacagagacagaaagca

SEQ ID NO: 3214472 - RNA, 23 nt, Human
uacagagcagacaguuaagagaa

SEQ ID NO: 3214473 - RNA, 19 nt, Human
uacagagcccacgccccca

SEQ ID NO: 3214474 - RNA, 22 nt, Human
uacagagcccacgcccccacug

SEQ ID NO: 3214475 - RNA, 21 nt, Human
aauguaauugauuguauauag

SEQ ID NO: 3214476 - RNA, 18 nt, Human
aauguaauuaaacuguua

SEQ ID NO: 3214477 - RNA, 19 nt, Human
aauguaauuaaacuguuaa

SEQ ID NO: 3214478 - RNA, 19 nt, Human
uacacccaugaaagaaaac

SEQ ID NO: 3214479 - RNA, 14 nt, Human
uacagacaaagcgu

SEQ ID NO: 3214480 - RNA, 15 nt, Human
uacagacaaagcgug

SEQ ID NO: 3214481 - RNA, 13 nt, Human
uacagacaaagcg

SEQ ID NO: 3214482 - RNA, 17 nt, Human
uacaccgggccuggaga

SEQ ID NO: 3214483 - RNA, 15 nt, Human
uacaccgggccugga

SEQ ID NO: 3214484 - RNA, 20 nt, Human
aauguaagggaaacugccag

SEQ ID NO: 3214485 - RNA, 23 nt, Human
aauguaagguauaucauucuaaa

SEQ ID NO: 3214486 - RNA, 17 nt, Human
aauguaagguauaucau

SEQ ID NO: 3214487 - RNA, 12 nt, Human
aauguaaauaaa

SEQ ID NO: 3214488 - RNA, 19 nt, Human
aauguaaaggucacuuuuc

SEQ ID NO: 3214489 - RNA, 16 nt, Human
aaugguuuucaaaaua

SEQ ID NO: 3214490 - RNA, 22 nt, Human
aauguaaagcaaccaaaaagaa

SEQ ID NO: 3214491 - RNA, 16 nt, Human
aauggaagacagcucu

SEQ ID NO: 3214492 - RNA, 20 nt, Human
aauggaguuaaacuuuagug

SEQ ID NO: 3214493 - RNA, 21 nt, Human
aauggaguuggaguucauuca

SEQ ID NO: 3214494 - RNA, 19 nt, Human
aauggaguuggaguucauu

SEQ ID NO: 3214495 - RNA, 13 nt, Human
aauggaguuggag

SEQ ID NO: 3214496 - RNA, 14 nt, Human
aaugguuuucaaaa

SEQ ID NO: 3214497 - RNA, 17 nt, Human
aaugguuuggugcuuuu

SEQ ID NO: 3214498 - RNA, 21 nt, Human
aaugguuuggugcuuuuuaua

SEQ ID NO: 3214499 - RNA, 23 nt, Human
aaugguuuggugcuuuuuauaaa

SEQ ID NO: 3214500 - RNA, 13 nt, Human
aauggaugaaauc

SEQ ID NO: 3214501 - RNA, 12 nt, Human
aauggaugaaau

SEQ ID NO: 3214502 - RNA, 13 nt, Human
aauggaagacagc

SEQ ID NO: 3214503 - RNA, 22 nt, Human
aaugcuggcuguuggcuggggg

SEQ ID NO: 3214504 - RNA, 20 nt, Human
aaugcaugcuuuccauauuu

SEQ ID NO: 3214505 - RNA, 21 nt, Human
aaugcuggcuguuggcugggg

SEQ ID NO: 3214506 - RNA, 13 nt, Human
aaugcaugcuuuc

SEQ ID NO: 3214507 - RNA, 18 nt, Human
aaugcaugcuuuccauau

SEQ ID NO: 3214508 - RNA, 16 nt, Human
aaugcaugcuuuccau

SEQ ID NO: 3214509 - RNA, 15 nt, Human
aaugcaucuuugaug

SEQ ID NO: 3214510 - RNA, 18 nt, Human
aaugcaucuuugaugugu

SEQ ID NO: 3214511 - RNA, 19 nt, Human
aaugcaucuuugauguguu

SEQ ID NO: 3214512 - RNA, 20 nt, Human
aaugcaucuuugauguguug

SEQ ID NO: 3214513 - RNA, 14 nt, Human
aaugcaucuuugau

SEQ ID NO: 3214514 - RNA, 11 nt, Human
uaauuuuuccu

SEQ ID NO: 3214515 - RNA, 15 nt, Human
uaauuuuucuguaua

SEQ ID NO: 3214516 - RNA, 15 nt, Human
uaauuuuuguauuuu

SEQ ID NO: 3214517 - RNA, 14 nt, Human
uaauuuuucuguau

SEQ ID NO: 3214518 - RNA, 12 nt, Human
uaauuuuucugu

SEQ ID NO: 3214519 - RNA, 14 nt, Human
uaauuuuugcuuuu

SEQ ID NO: 3214520 - RNA, 15 nt, Human
uaauuuuugcuuuua

SEQ ID NO: 3214521 - RNA, 18 nt, Human
uaauuuuugcuuuuagaa

SEQ ID NO: 3214522 - RNA, 20 nt, Human
uaauuuuugcuuuuagaaaa

SEQ ID NO: 3214523 - RNA, 22 nt, Human
uaauuuuuuuuuuccuuuuaaa

SEQ ID NO: 3214524 - RNA, 13 nt, Human
uacaaugacuuua

SEQ ID NO: 3214525 - RNA, 18 nt, Human
uaauuuuuuugagacaga

SEQ ID NO: 3214526 - RNA, 14 nt, Human
uacaaugugacuuu

SEQ ID NO: 3214527 - RNA, 17 nt, Human
uacaaugugacuuugaa

SEQ ID NO: 3214528 - RNA, 16 nt, Human
uacaaugugacuuuga

SEQ ID NO: 3214529 - RNA, 18 nt, Human
uacaaugacuuuauugca

SEQ ID NO: 3214530 - RNA, 14 nt, Human
uacaaugacuuuau

SEQ ID NO: 3214531 - RNA, 20 nt, Human
uacaaugugacuuugaaaau

SEQ ID NO: 3214532 - RNA, 20 nt, Human
uaaggaauaugggagaaaua

SEQ ID NO: 3214533 - RNA, 21 nt, Human
uaaggaaugauauugcugaag

SEQ ID NO: 3214534 - RNA, 14 nt, Human
uaaggaauauggga

SEQ ID NO: 3214535 - RNA, 17 nt, Human
uaaggaauaccuguccc

SEQ ID NO: 3214536 - RNA, 18 nt, Human
uaaggaauaccugucccc

SEQ ID NO: 3214537 - RNA, 18 nt, Human
uaaggacugacugaggca

SEQ ID NO: 3214538 - RNA, 19 nt, Human
uaaggacugacugaggcag

SEQ ID NO: 3214539 - RNA, 14 nt, Human
uaaggacugacuga

SEQ ID NO: 3214540 - RNA, 14 nt, Human
uaaggacuuccuga

SEQ ID NO: 3214541 - RNA, 13 nt, Human
uaaggacuuccug

SEQ ID NO: 3214542 - RNA, 13 nt, Human
uaaggaagacaau

SEQ ID NO: 3214543 - RNA, 9 nt, Human
uaaggaaua

SEQ ID NO: 3214544 - RNA, 21 nt, Human
uaagcauaagcuuaugcuuaa

SEQ ID NO: 3214545 - RNA, 12 nt, Human
uaagcaguauau

SEQ ID NO: 3214546 - RNA, 21 nt, Human
uaagcaguauauuaguauuau

SEQ ID NO: 3214547 - RNA, 18 nt, Human
uaagcaggcgcaagggag

SEQ ID NO: 3214548 - RNA, 16 nt, Human
uaagcaggcgcaaggg

SEQ ID NO: 3214549 - RNA, 14 nt, Human
uaagcuauucagua

SEQ ID NO: 3214550 - RNA, 21 nt, Human
uaagcuauucaguaauaacuc

SEQ ID NO: 3214551 - RNA, 22 nt, Human
uaagauguuauauuuuucuuaa

SEQ ID NO: 3214552 - RNA, 21 nt, Human
uaagauguuauauuuuucuua

SEQ ID NO: 3214553 - RNA, 15 nt, Human
uaagauuauaauugu

SEQ ID NO: 3214554 - RNA, 14 nt, Human
uaagauuauaauug

SEQ ID NO: 3214555 - RNA, 15 nt, Human
uaagauguguucuua

SEQ ID NO: 3214556 - RNA, 17 nt, Human
uaagauguguucuuauu

SEQ ID NO: 3214557 - RNA, 14 nt, Human
uaagauguuauauu

SEQ ID NO: 3214558 - RNA, 19 nt, Human
uaagauguuauauuuuucu

SEQ ID NO: 3214559 - RNA, 15 nt, Human
uaagauguuauauuu

SEQ ID NO: 3214560 - RNA, 15 nt, Human
uaagcaaaaugugau

SEQ ID NO: 3214561 - RNA, 14 nt, Human
uaagcaaaauguga

SEQ ID NO: 3214562 - RNA, 14 nt, Human
uaagauucauauuu

SEQ ID NO: 3214563 - RNA, 11 nt, Human
aaucagccugc

SEQ ID NO: 3214564 - RNA, 18 nt, Human
aaucagcauucucacucc

SEQ ID NO: 3214565 - RNA, 15 nt, Human
aaucacuguguauau

SEQ ID NO: 3214566 - RNA, 16 nt, Human
aaucacuguguauauu

SEQ ID NO: 3214567 - RNA, 17 nt, Human
aaucacuguguauauuu

SEQ ID NO: 3214568 - RNA, 18 nt, Human
aaucacuguguauauuug

SEQ ID NO: 3214569 - RNA, 19 nt, Human
aaucagcauucucacuccu

SEQ ID NO: 3214570 - RNA, 12 nt, Human
aaucagcauucu

SEQ ID NO: 3214571 - RNA, 16 nt, Human
aaucacucagagcagu

SEQ ID NO: 3214572 - RNA, 15 nt, Human
aaucacucagagcag

SEQ ID NO: 3214573 - RNA, 12 nt, Human
aaucacucagag

SEQ ID NO: 3214574 - RNA, 13 nt, Human
aaucacuguguau

SEQ ID NO: 3214575 - RNA, 14 nt, Human
aaucacuguguaua

SEQ ID NO: 3214576 - RNA, 10 nt, Human
aaucacugug

SEQ ID NO: 3214577 - RNA, 13 nt, Human
aaucagccugcuc

SEQ ID NO: 3214578 - RNA, 18 nt, Human
aaucagccugcuccagcu

SEQ ID NO: 3214579 - RNA, 19 nt, Human
aaucagccugcuccagcug

SEQ ID NO: 3214580 - RNA, 19 nt, Human
aaucacuguguauauuuga

SEQ ID NO: 3214581 - RNA, 11 nt, Human
aaucagcugcu

SEQ ID NO: 3214582 - RNA, 12 nt, Human
aaucagcugcuu

SEQ ID NO: 3214583 - RNA, 13 nt, Human
aaucagcugcuuu

SEQ ID NO: 3214584 - RNA, 16 nt, Human
aaucagcugcuuuguu

SEQ ID NO: 3214585 - RNA, 17 nt, Human
aaucagcugcuuuguua

SEQ ID NO: 3214586 - RNA, 18 nt, Human
aaucagcugcuuuguuac

SEQ ID NO: 3214587 - RNA, 19 nt, Human
aaucagcugcuuuguuacc

SEQ ID NO: 3214588 - RNA, 18 nt, Human
aaucagguccugcucagc

SEQ ID NO: 3214589 - RNA, 11 nt, Human
aaucaguaauu

SEQ ID NO: 3214590 - RNA, 16 nt, Human
aaucaguaaacacugu

SEQ ID NO: 3214591 - RNA, 14 nt, Human
aaucaguaaacacu

SEQ ID NO: 3214592 - RNA, 21 nt, Human
aaucaguagcuuaagaaaaaa

SEQ ID NO: 3214593 - RNA, 16 nt, Human
aauauuuauuaaauuu

SEQ ID NO: 3214594 - RNA, 13 nt, Human
aauauuuucugug

SEQ ID NO: 3214595 - RNA, 14 nt, Human
aauauuuucugugu

SEQ ID NO: 3214596 - RNA, 15 nt, Human
aauauuuucugugug

SEQ ID NO: 3214597 - RNA, 16 nt, Human
aauauuuucugugugu

SEQ ID NO: 3214598 - RNA, 17 nt, Human
aauauuuucuguguguu

SEQ ID NO: 3214599 - RNA, 18 nt, Human
aauauuuucuguguguuc

SEQ ID NO: 3214600 - RNA, 19 nt, Human
aauauuuucuguguguucc

SEQ ID NO: 3214601 - RNA, 20 nt, Human
aauauuuucuguguguuccu

SEQ ID NO: 3214602 - RNA, 21 nt, Human
aauauuuucuguguguuccug

SEQ ID NO: 3214603 - RNA, 22 nt, Human
aauauuuucuguguguuccugg

SEQ ID NO: 3214604 - RNA, 23 nt, Human
aauauuuucuguguguuccuggc

SEQ ID NO: 3214605 - RNA, 15 nt, Human
aauauuuauagguca

SEQ ID NO: 3214606 - RNA, 22 nt, Human
aauauuuaugaagaaaauacuu

SEQ ID NO: 3214607 - RNA, 18 nt, Human
aauauuuaugaagaaaau

SEQ ID NO: 3214608 - RNA, 15 nt, Human
aauauuuaugaagaa

SEQ ID NO: 3214609 - RNA, 14 nt, Human
aauauuuaugaaga

SEQ ID NO: 3214610 - RNA, 13 nt, Human
aauauuuaugaag

SEQ ID NO: 3214611 - RNA, 15 nt, Human
aauauuuauuaaauu

SEQ ID NO: 3214612 - RNA, 12 nt, Human
aauauuuauuaa

SEQ ID NO: 3214613 - RNA, 18 nt, Human
uaaguaaaaccacagcag

SEQ ID NO: 3214614 - RNA, 17 nt, Human
uaaguaaaaccacagca

SEQ ID NO: 3214615 - RNA, 16 nt, Human
uaaguaaaaccacagc

SEQ ID NO: 3214616 - RNA, 18 nt, Human
uaagguuaccuuuguucc

SEQ ID NO: 3214617 - RNA, 15 nt, Human
uaaguaaaaccacag

SEQ ID NO: 3214618 - RNA, 13 nt, Human
uaaguaaaaccac

SEQ ID NO: 3214619 - RNA, 22 nt, Human
uaaggagaaucauguuucuuug

SEQ ID NO: 3214620 - RNA, 20 nt, Human
uaaggagaaucauguuucuu

SEQ ID NO: 3214621 - RNA, 17 nt, Human
uaaggagaaucauguuu

SEQ ID NO: 3214622 - RNA, 21 nt, Human
uaaggauacaggcuggaaagu

SEQ ID NO: 3214623 - RNA, 15 nt, Human
uaaggauaaaucaua

SEQ ID NO: 3214624 - RNA, 22 nt, Human
uaaggauaaaucauaaagucag

SEQ ID NO: 3214625 - RNA, 17 nt, Human
uaaggauacaggcugga

SEQ ID NO: 3214626 - RNA, 16 nt, Human
uaaggauacaggcugg

SEQ ID NO: 3214627 - RNA, 16 nt, Human
uaaguuaauguauaua

SEQ ID NO: 3214628 - RNA, 20 nt, Human
uaaguuaauguauauaaaaa

SEQ ID NO: 3214629 - RNA, 21 nt, Human
uaaguuaauguauauaaaaau

SEQ ID NO: 3214630 - RNA, 14 nt, Human
uaaguguuggaaaa

SEQ ID NO: 3214631 - RNA, 17 nt, Human
uaaguguuggaaaaaau

SEQ ID NO: 3214632 - RNA, 19 nt, Human
uaaguuaguuccacugaga

SEQ ID NO: 3214633 - RNA, 17 nt, Human
uaaguuaguuccacuga

SEQ ID NO: 3214634 - RNA, 21 nt, Human
uaaguauucuuauuuaaugaa

SEQ ID NO: 3214635 - RNA, 15 nt, Human
uaauaaaaagacaac

SEQ ID NO: 3214636 - RNA, 20 nt, Human
uaaguuaguuccacugagac

SEQ ID NO: 3214637 - RNA, 18 nt, Human
aaucuaugauuccaggug

SEQ ID NO: 3214638 - RNA, 15 nt, Human
aaucuaugauuccag

SEQ ID NO: 3214639 - RNA, 18 nt, Human
aaucugggccagaauuuc

SEQ ID NO: 3214640 - RNA, 11 nt, Human
aaucuguaaaa

SEQ ID NO: 3214641 - RNA, 12 nt, Human
aaucucaaaauu

SEQ ID NO: 3214642 - RNA, 13 nt, Human
aaucucaaaauua

SEQ ID NO: 3214643 - RNA, 14 nt, Human
aaucucaaaauuag

SEQ ID NO: 3214644 - RNA, 17 nt, Human
aaucuauagaaaguguu

SEQ ID NO: 3214645 - RNA, 16 nt, Human
aaucuauagaaagugu

SEQ ID NO: 3214646 - RNA, 23 nt, Human
aaucuauagaaaguguucuguua

SEQ ID NO: 3214647 - RNA, 18 nt, Human
aaucuauagaaaguguuc

SEQ ID NO: 3214648 - RNA, 19 nt, Human
aaucgggguauaauaggcu

SEQ ID NO: 3214649 - RNA, 15 nt, Human
aaucgggguauaaua

SEQ ID NO: 3214650 - RNA, 21 nt, Human
aaucgcuuuccuaaaacagua

SEQ ID NO: 3214651 - RNA, 20 nt, Human
aaucccuguguuaauuuaag

SEQ ID NO: 3214652 - RNA, 13 nt, Human
aaucauaaaguca

SEQ ID NO: 3214653 - RNA, 14 nt, Human
aaucauaaagucag

SEQ ID NO: 3214654 - RNA, 22 nt, Human
aaucaguuauacaguuauaaaa

SEQ ID NO: 3214655 - RNA, 17 nt, Human
aaucccauuuaaaaaaa

SEQ ID NO: 3214656 - RNA, 12 nt, Human
aaucccaggaug

SEQ ID NO: 3214657 - RNA, 13 nt, Human
aaucccagcgcac

SEQ ID NO: 3214658 - RNA, 18 nt, Human
aaucccuguguuaauuua

SEQ ID NO: 3214659 - RNA, 19 nt, Human
aaucccuguguuaauuuaa

SEQ ID NO: 3214660 - RNA, 18 nt, Human
aaucccugcucacugcag

SEQ ID NO: 3214661 - RNA, 13 nt, Human
aaucccugcucac

SEQ ID NO: 3214662 - RNA, 22 nt, Human
aauauauuuaaagggaaauuga

SEQ ID NO: 3214663 - RNA, 18 nt, Human
aauauauuuuguaugcaa

SEQ ID NO: 3214664 - RNA, 17 nt, Human
aauauauuuuguaugca

SEQ ID NO: 3214665 - RNA, 16 nt, Human
aauauauuuuguaugc

SEQ ID NO: 3214666 - RNA, 14 nt, Human
aauauauuuuguau

SEQ ID NO: 3214667 - RNA, 13 nt, Human
aauauauuuugua

SEQ ID NO: 3214668 - RNA, 12 nt, Human
aauauauuuuag

SEQ ID NO: 3214669 - RNA, 20 nt, Human
aauauauuuuguaugcaagc

SEQ ID NO: 3214670 - RNA, 13 nt, Human
aauaucaaauuaa

SEQ ID NO: 3214671 - RNA, 18 nt, Human
uaacagggauugauuuua

SEQ ID NO: 3214672 - RNA, 17 nt, Human
uaacagggauugauuuu

SEQ ID NO: 3214673 - RNA, 23 nt, Human
uaacagggucucuagugcuguga

SEQ ID NO: 3214674 - RNA, 19 nt, Human
uaacauguaauuaaguacu

SEQ ID NO: 3214675 - RNA, 17 nt, Human
uaacauguaauuaagua

SEQ ID NO: 3214676 - RNA, 19 nt, Human
uaacaugugaaaagaauag

SEQ ID NO: 3214677 - RNA, 14 nt, Human
uaacgcaaccaagu

SEQ ID NO: 3214678 - RNA, 23 nt, Human
uaacgcaccgacuagacacacaa

SEQ ID NO: 3214679 - RNA, 23 nt, Human
aauaguguuauugagagagaugu

SEQ ID NO: 3214680 - RNA, 22 nt, Human
aauaguguuauugagagagaug

SEQ ID NO: 3214681 - RNA, 14 nt, Human
aauauauuuaaagg

SEQ ID NO: 3214682 - RNA, 19 nt, Human
aauauauuuaaagggaaau

SEQ ID NO: 3214683 - RNA, 15 nt, Human
aauauauuuaaaggg

SEQ ID NO: 3214684 - RNA, 16 nt, Human
aauagcuacagugcau

SEQ ID NO: 3214685 - RNA, 21 nt, Human
aauagugccgcaauaaacaua

SEQ ID NO: 3214686 - RNA, 18 nt, Human
aauagucauuugugaauu

SEQ ID NO: 3214687 - RNA, 22 nt, Human
uaacgugugcuguguuugcucc

SEQ ID NO: 3214688 - RNA, 17 nt, Human
uaacgugugcuguguuu

SEQ ID NO: 3214689 - RNA, 15 nt, Human
uaacgugugcugugu

SEQ ID NO: 3214690 - RNA, 17 nt, Human
uaacuuacccuguauau

SEQ ID NO: 3214691 - RNA, 21 nt, Human
uaacuuagacucuaguauuua

SEQ ID NO: 3214692 - RNA, 15 nt, Human
uaacuuauucaaaga

SEQ ID NO: 3214693 - RNA, 17 nt, Human
uaacuuauucaaagaga

SEQ ID NO: 3214694 - RNA, 17 nt, Human
uaacuuagagcuuuuuu

SEQ ID NO: 3214695 - RNA, 16 nt, Human
uaacuuaguuuugcau

SEQ ID NO: 3214696 - RNA, 15 nt, Human
uaacuuaguuuugca

SEQ ID NO: 3214697 - RNA, 17 nt, Human
uaacuuauauuguaaga

SEQ ID NO: 3214698 - RNA, 17 nt, Human
uaacuuaguuuugcaua

SEQ ID NO: 3214699 - RNA, 21 nt, Human
uaacuuauauuguaagaaaua

SEQ ID NO: 3214700 - RNA, 20 nt, Human
uaacuuauauuguaagaaau

SEQ ID NO: 3214701 - RNA, 19 nt, Human
uaacuuauauuguaagaaa

SEQ ID NO: 3214702 - RNA, 18 nt, Human
uaacuuauauuguaagaa

SEQ ID NO: 3214703 - RNA, 13 nt, Human
uaagaagugaaaa

SEQ ID NO: 3214704 - RNA, 23 nt, Human
uaagaauuuuuuauuuuuuggua

SEQ ID NO: 3214705 - RNA, 15 nt, Human
uaagaauuuuuuauu

SEQ ID NO: 3214706 - RNA, 21 nt, Human
uaacuuccuuggacucauuuu

SEQ ID NO: 3214707 - RNA, 14 nt, Human
uaacuucuaaaacu

SEQ ID NO: 3214708 - RNA, 12 nt, Human
uaacuucuaaaa

SEQ ID NO: 3214709 - RNA, 18 nt, Human
uaacuucuaaaacuguac

SEQ ID NO: 3214710 - RNA, 17 nt, Human
uaacuucuaaaacugua

SEQ ID NO: 3214711 - RNA, 16 nt, Human
uaacuucuaaaacugu

SEQ ID NO: 3214712 - RNA, 15 nt, Human
uaacuucuaaaacug

SEQ ID NO: 3214713 - RNA, 19 nt, Human
uaacuugggagugugguuu

SEQ ID NO: 3214714 - RNA, 12 nt, Human
uaacuugggagu

SEQ ID NO: 3214715 - RNA, 23 nt, Human
uaacuucuaaaacuguacuuuga

SEQ ID NO: 3214716 - RNA, 20 nt, Human
uaacuucuaaaacuguacuu

SEQ ID NO: 3214717 - RNA, 16 nt, Human
uaacuugucuuuggac

SEQ ID NO: 3214718 - RNA, 20 nt, Human
uaacuugucuuuggacccug

SEQ ID NO: 3214719 - RNA, 15 nt, Human
uaacuuguaauaaac

SEQ ID NO: 3214720 - RNA, 14 nt, Human
uaacuuguaauaaa

SEQ ID NO: 3214721 - RNA, 15 nt, Human
aauagagaugagcuu

SEQ ID NO: 3214722 - RNA, 18 nt, Human
aauagagaugagcuuucu

SEQ ID NO: 3214723 - RNA, 19 nt, Human
aauagagaugagcuuucuu

SEQ ID NO: 3214724 - RNA, 20 nt, Human
aauagccugccucuucucua

SEQ ID NO: 3214725 - RNA, 15 nt, Human
aauagcaauauucuu

SEQ ID NO: 3214726 - RNA, 16 nt, Human
aauagcacuuaaauuc

SEQ ID NO: 3214727 - RNA, 21 nt, Human
aauagcaaguggcauaaagca

SEQ ID NO: 3214728 - RNA, 15 nt, Human
aauaccugucccccu

SEQ ID NO: 3214729 - RNA, 18 nt, Human
aauaccugucccccugac

SEQ ID NO: 3214730 - RNA, 19 nt, Human
aauaccugucccccugaca

SEQ ID NO: 3214731 - RNA, 18 nt, Human
aauagacccacaagaggc

SEQ ID NO: 3214732 - RNA, 13 nt, Human
aauaccaguucug

SEQ ID NO: 3214733 - RNA, 17 nt, Human
aauacaugaugauuuca

SEQ ID NO: 3214734 - RNA, 18 nt, Human
aauacagauaaaugauuc

SEQ ID NO: 3214735 - RNA, 13 nt, Human
aauacagauaaau

SEQ ID NO: 3214736 - RNA, 15 nt, Human
aauacagacuggaug

SEQ ID NO: 3214737 - RNA, 18 nt, Human
aauaccaugccauuuaaa

SEQ ID NO: 3214738 - RNA, 22 nt, Human
aauacauucuuuuugcucuaaa

SEQ ID NO: 3214739 - RNA, 13 nt, Human
aauacauucuuuu

SEQ ID NO: 3214740 - RNA, 17 nt, Human
aauacauuuaaaacauu

SEQ ID NO: 3214741 - RNA, 14 nt, Human
aauacauuuaaaac

SEQ ID NO: 3214742 - RNA, 23 nt, Human
aauacauuuaaaacauuaaaaua

SEQ ID NO: 3214743 - RNA, 22 nt, Human
aauacauuuaaaacauuaaaau

SEQ ID NO: 3214744 - RNA, 21 nt, Human
aauacauuuaaaacauuaaaa

SEQ ID NO: 3214745 - RNA, 20 nt, Human
aauacauuuaaaacauuaaa

SEQ ID NO: 3214746 - RNA, 17 nt, Human
uaacaaugccuauugua

SEQ ID NO: 3214747 - RNA, 18 nt, Human
uaacaaugccuauuguaa

SEQ ID NO: 3214748 - RNA, 21 nt, Human
uaacaaugccuauuguaauau

SEQ ID NO: 3214749 - RNA, 22 nt, Human
uaacaaagaaccuaacauuuau

SEQ ID NO: 3214750 - RNA, 13 nt, Human
aauacagaggcaa

SEQ ID NO: 3214751 - RNA, 15 nt, Human
aauacagaaucuugu

SEQ ID NO: 3214752 - RNA, 21 nt, Human
uaaauuaugugaccauaaugu

SEQ ID NO: 3214753 - RNA, 22 nt, Human
uaaauuaugugaccauaaugua

SEQ ID NO: 3214754 - RNA, 16 nt, Human
uaaauuauguuuuacu

SEQ ID NO: 3214755 - RNA, 17 nt, Human
uaaauuauugaugaaaa

SEQ ID NO: 3214756 - RNA, 16 nt, Human
aagugccuuugcagcu

SEQ ID NO: 3214757 - RNA, 18 nt, Human
uaaaugaaaaucgugaca

SEQ ID NO: 3214758 - RNA, 16 nt, Human
uaaaugugcuuuuaaa

SEQ ID NO: 3214759 - RNA, 13 nt, Human
uaaauguuaaaga

SEQ ID NO: 3214760 - RNA, 14 nt, Human
uaaauguuaaagau

SEQ ID NO: 3214761 - RNA, 17 nt, Human
uaaauguuaaagaugua

SEQ ID NO: 3214762 - RNA, 16 nt, Human
uaaauguuaaagaugu

SEQ ID NO: 3214763 - RNA, 20 nt, Human
uaaaugugugagugcaugua

SEQ ID NO: 3214764 - RNA, 11 nt, Human
uaaaugugugu

SEQ ID NO: 3214765 - RNA, 13 nt, Human
uaaauguguguau

SEQ ID NO: 3214766 - RNA, 14 nt, Human
uaaauguguguaug

SEQ ID NO: 3214767 - RNA, 15 nt, Human
uaaauguguguaugu

SEQ ID NO: 3214768 - RNA, 16 nt, Human
uaaauguguguaugug

SEQ ID NO: 3214769 - RNA, 13 nt, Human
uaaaugugguaaa

SEQ ID NO: 3214770 - RNA, 18 nt, Human
uaaauguuauagcugcau

SEQ ID NO: 3214771 - RNA, 22 nt, Human
uaaauguuaaagauguagcaaa

SEQ ID NO: 3214772 - RNA, 21 nt, Human
uaaauguuaaagauguagcaa

SEQ ID NO: 3214773 - RNA, 18 nt, Human
uaaauguuaaagauguag

SEQ ID NO: 3214774 - RNA, 14 nt, Human
uaucagcacgugug

SEQ ID NO: 3214775 - RNA, 14 nt, Human
uaucagauugcuuu

SEQ ID NO: 3214776 - RNA, 15 nt, Human
uaucagauugcuuuu

SEQ ID NO: 3214777 - RNA, 17 nt, Human
uaucagauugcuuuugu

SEQ ID NO: 3214778 - RNA, 20 nt, Human
uaucagauugcuuuugugca

SEQ ID NO: 3214779 - RNA, 14 nt, Human
uaucagagaugucc

SEQ ID NO: 3214780 - RNA, 17 nt, Human
uaucagaauucucagaa

SEQ ID NO: 3214781 - RNA, 10 nt, Human
uaucagaauu

SEQ ID NO: 3214782 - RNA, 19 nt, Human
uauccaacaucaacaucuu

SEQ ID NO: 3214783 - RNA, 14 nt, Human
uaucagcaaagaaa

SEQ ID NO: 3214784 - RNA, 14 nt, Human
uauccaaugaaaua

SEQ ID NO: 3214785 - RNA, 16 nt, Human
uaucuauaaacacugu

SEQ ID NO: 3214786 - RNA, 13 nt, Human
uaucuauauaaaa

SEQ ID NO: 3214787 - RNA, 14 nt, Human
uaucuauauaaaau

SEQ ID NO: 3214788 - RNA, 15 nt, Human
uaucuauauaaaaua

SEQ ID NO: 3214789 - RNA, 18 nt, Human
uaucuauauaaaauaacu

SEQ ID NO: 3214790 - RNA, 21 nt, Human
uaucaaaggcacauggaauau

SEQ ID NO: 3214791 - RNA, 23 nt, Human
uaucaaauacauuuaaaacauua

SEQ ID NO: 3214792 - RNA, 19 nt, Human
acagaccgaacuguuguau

SEQ ID NO: 3214793 - RNA, 18 nt, Human
acagaccgaacuguugua

SEQ ID NO: 3214794 - RNA, 20 nt, Human
uaucacaaaucuuaacuuga

SEQ ID NO: 3214795 - RNA, 16 nt, Human
uaucacaaaucuuaac

SEQ ID NO: 3214796 - RNA, 14 nt, Human
uaucacaaaucuua

SEQ ID NO: 3214797 - RNA, 17 nt, Human
uaucaaauuaauugugu

SEQ ID NO: 3214798 - RNA, 18 nt, Human
uaucaaugugucuuucua

SEQ ID NO: 3214799 - RNA, 22 nt, Human
uaucaaugugucuuucuaagaa

SEQ ID NO: 3214800 - RNA, 15 nt, Human
uaucaaauuaauugu

SEQ ID NO: 3214801 - RNA, 16 nt, Human
uaucaaauuaauugug

SEQ ID NO: 3214802 - RNA, 14 nt, Human
uaucaaauuaauug

SEQ ID NO: 3214803 - RNA, 16 nt, Human
acacuugagaugauuu

SEQ ID NO: 3214804 - RNA, 19 nt, Human
acacuugagaugauuucca

SEQ ID NO: 3214805 - RNA, 21 nt, Human
acacuuuuucuuuacaaacaa

SEQ ID NO: 3214806 - RNA, 19 nt, Human
acagaaagcagaacaguga

SEQ ID NO: 3214807 - RNA, 15 nt, Human
acagacagcccucca

SEQ ID NO: 3214808 - RNA, 18 nt, Human
acagacaggaccccugca

SEQ ID NO: 3214809 - RNA, 13 nt, Human
acagacaggaccc

SEQ ID NO: 3214810 - RNA, 14 nt, Human
acacuuccauaauc

SEQ ID NO: 3214811 - RNA, 17 nt, Human
acacuucaguuaucuug

SEQ ID NO: 3214812 - RNA, 22 nt, Human
acacuucaggcucuucuccuuu

SEQ ID NO: 3214813 - RNA, 19 nt, Human
acacuucaggcucuucucc

SEQ ID NO: 3214814 - RNA, 15 nt, Human
acacuucaggcucuu

SEQ ID NO: 3214815 - RNA, 21 nt, Human
acacuuacacuuuaugcacaa

SEQ ID NO: 3214816 - RNA, 18 nt, Human
acacuuacacuuuaugca

SEQ ID NO: 3214817 - RNA, 23 nt, Human
acacuuaagguugggugcugcua

SEQ ID NO: 3214818 - RNA, 15 nt, Human
acacuuagcuggaga

SEQ ID NO: 3214819 - RNA, 17 nt, Human
acacucauugaccugag

SEQ ID NO: 3214820 - RNA, 16 nt, Human
acacuuacacuuuaug

SEQ ID NO: 3214821 - RNA, 14 nt, Human
acacuuaauucugu

SEQ ID NO: 3214822 - RNA, 16 nt, Human
acacuuaauucuguuc

SEQ ID NO: 3214823 - RNA, 11 nt, Human
uauauauuucc

SEQ ID NO: 3214824 - RNA, 16 nt, Human
uauaucguuaucacug

SEQ ID NO: 3214825 - RNA, 17 nt, Human
uauaucguuaucacugu

SEQ ID NO: 3214826 - RNA, 20 nt, Human
uauaucguuaucacugugca

SEQ ID NO: 3214827 - RNA, 15 nt, Human
uauaucuaaaucugu

SEQ ID NO: 3214828 - RNA, 19 nt, Human
uauauccuuuucuguguuu

SEQ ID NO: 3214829 - RNA, 13 nt, Human
uauauccuuuucu

SEQ ID NO: 3214830 - RNA, 16 nt, Human
acacucauugaccuga

SEQ ID NO: 3214831 - RNA, 18 nt, Human
uauaucuauaaacacugu

SEQ ID NO: 3214832 - RNA, 19 nt, Human
uauaucuaaaucuguccaa

SEQ ID NO: 3214833 - RNA, 20 nt, Human
uauaucuauaaacacuguuu

SEQ ID NO: 3214834 - RNA, 15 nt, Human
uauauagcauuuaug

SEQ ID NO: 3214835 - RNA, 17 nt, Human
uauagguccuuuagaaa

SEQ ID NO: 3214836 - RNA, 18 nt, Human
uauauagcauuuauggua

SEQ ID NO: 3214837 - RNA, 21 nt, Human
uauauaugcacuuaauuuguu

SEQ ID NO: 3214838 - RNA, 16 nt, Human
uauaggugcuacaaaa

SEQ ID NO: 3214839 - RNA, 15 nt, Human
uauaggcaccuacca

SEQ ID NO: 3214840 - RNA, 19 nt, Human
uauaggaauugacccacaa

SEQ ID NO: 3214841 - RNA, 13 nt, Human
uauagcuuuauuu

SEQ ID NO: 3214842 - RNA, 16 nt, Human
uauaggagacuuguag

SEQ ID NO: 3214843 - RNA, 17 nt, Human
uauaggagacuuguagu

SEQ ID NO: 3214844 - RNA, 14 nt, Human
uauagcaucacuua

SEQ ID NO: 3214845 - RNA, 15 nt, Human
uauagauuaaaucau

SEQ ID NO: 3214846 - RNA, 15 nt, Human
uauagcaucacuuaa

SEQ ID NO: 3214847 - RNA, 16 nt, Human
uauagcaucacuuaaa

SEQ ID NO: 3214848 - RNA, 17 nt, Human
uauagcaucacuuaaaa

SEQ ID NO: 3214849 - RNA, 18 nt, Human
uauagcaucacuuaaaac

SEQ ID NO: 3214850 - RNA, 19 nt, Human
uauacauguuuauguaaac

SEQ ID NO: 3214851 - RNA, 15 nt, Human
uauacaugaaauuca

SEQ ID NO: 3214852 - RNA, 18 nt, Human
uauacauguuuauguaaa

SEQ ID NO: 3214853 - RNA, 17 nt, Human
uauacauguuuauguaa

SEQ ID NO: 3214854 - RNA, 16 nt, Human
uauacauguuuaugua

SEQ ID NO: 3214855 - RNA, 15 nt, Human
uauacauguuuaugu

SEQ ID NO: 3214856 - RNA, 16 nt, Human
uauacaucacguuaaa

SEQ ID NO: 3214857 - RNA, 18 nt, Human
uauaauuuaccugaaguc

SEQ ID NO: 3214858 - RNA, 22 nt, Human
uauacacuuacacuuuaugcac

SEQ ID NO: 3214859 - RNA, 21 nt, Human
uauacacuuacacuuuaugca

SEQ ID NO: 3214860 - RNA, 14 nt, Human
uauaauuguugcau

SEQ ID NO: 3214861 - RNA, 16 nt, Human
uauaauuguugcauag

SEQ ID NO: 3214862 - RNA, 15 nt, Human
uauaauuguugcaua

SEQ ID NO: 3214863 - RNA, 17 nt, Human
acacucaaaucaagaaa

SEQ ID NO: 3214864 - RNA, 19 nt, Human
uauaacuauguugauaaaa

SEQ ID NO: 3214865 - RNA, 22 nt, Human
uauaacucaaggauaccuucuu

SEQ ID NO: 3214866 - RNA, 17 nt, Human
uagucacugagacagcc

SEQ ID NO: 3214867 - RNA, 13 nt, Human
acacucaaaucaa

SEQ ID NO: 3214868 - RNA, 21 nt, Human
acacucaaaagcugggcaggu

SEQ ID NO: 3214869 - RNA, 15 nt, Human
acacuaaugaggaaa

SEQ ID NO: 3214870 - RNA, 22 nt, Human
acacuaaugaggaaacugcacu

SEQ ID NO: 3214871 - RNA, 24 nt, Human
uaugauagguuauuuugauguaaa

SEQ ID NO: 3214872 - RNA, 19 nt, Human
uaugccccaccaaggcuga

SEQ ID NO: 3214873 - RNA, 18 nt, Human
acagcggcuggacuugga

SEQ ID NO: 3214874 - RNA, 22 nt, Human
acagcuaaucagcauucucacu

SEQ ID NO: 3214875 - RNA, 23 nt, Human
uauggucuaauguuuaagcagaa

SEQ ID NO: 3214876 - RNA, 17 nt, Human
uauggucuaauguuuaa

SEQ ID NO: 3214877 - RNA, 16 nt, Human
uauggucuaauguuua

SEQ ID NO: 3214878 - RNA, 13 nt, Human
uauggucuaaugu

SEQ ID NO: 3214879 - RNA, 21 nt, Human
uaugguaggaacugcugggcu

SEQ ID NO: 3214880 - RNA, 16 nt, Human
uaugguagaaaaauuu

SEQ ID NO: 3214881 - RNA, 18 nt, Human
uaugguagaaaaauuuca

SEQ ID NO: 3214882 - RNA, 19 nt, Human
uaugguagaaaaauuucac

SEQ ID NO: 3214883 - RNA, 22 nt, Human
uaugguagaaaaauuucacgau

SEQ ID NO: 3214884 - RNA, 14 nt, Human
uaugggagaaauag

SEQ ID NO: 3214885 - RNA, 23 nt, Human
uauggccaggaaguagcacaggc

SEQ ID NO: 3214886 - RNA, 23 nt, Human
uaugggacucaaugcacugacau

SEQ ID NO: 3214887 - RNA, 16 nt, Human
uaugggacucaaugca

SEQ ID NO: 3214888 - RNA, 22 nt, Human
uauggccaggaaguagcacagg

SEQ ID NO: 3214889 - RNA, 23 nt, Human
acagcccgauccuccccuggacu

SEQ ID NO: 3214890 - RNA, 21 nt, Human
acagcccgauccuccccugga

SEQ ID NO: 3214891 - RNA, 20 nt, Human
uaugaaaacauggaacagug

SEQ ID NO: 3214892 - RNA, 21 nt, Human
uaugaaaacauggaacagugu

SEQ ID NO: 3214893 - RNA, 13 nt, Human
uaugaaaacaugg

SEQ ID NO: 3214894 - RNA, 18 nt, Human
uaugaaaacauggaacag

SEQ ID NO: 3214895 - RNA, 18 nt, Human
acagcaagggugauggga

SEQ ID NO: 3214896 - RNA, 15 nt, Human
acagcaagugugaau

SEQ ID NO: 3214897 - RNA, 16 nt, Human
acagcaagugugaaua

SEQ ID NO: 3214898 - RNA, 21 nt, Human
acagauuuggaaagacuggac

SEQ ID NO: 3214899 - RNA, 15 nt, Human
acagauuuggaaaga

SEQ ID NO: 3214900 - RNA, 14 nt, Human
acagauuuggaaag

SEQ ID NO: 3214901 - RNA, 15 nt, Human
acagauuugagcuca

SEQ ID NO: 3214902 - RNA, 22 nt, Human
acagauuugagcucagcccugg

SEQ ID NO: 3214903 - RNA, 23 nt, Human
acagcccuccaucuaaacugccc

SEQ ID NO: 3214904 - RNA, 16 nt, Human
acagcccgauccuccc

SEQ ID NO: 3214905 - RNA, 19 nt, Human
acagccccucccuccucug

SEQ ID NO: 3214906 - RNA, 18 nt, Human
acagccccucccuccucu

SEQ ID NO: 3214907 - RNA, 16 nt, Human
acagccccucccuccu

SEQ ID NO: 3214908 - RNA, 15 nt, Human
acagcccgggcucug

SEQ ID NO: 3214909 - RNA, 14 nt, Human
acagccccuccucc

SEQ ID NO: 3214910 - RNA, 16 nt, Human
acagccccuccuccau

SEQ ID NO: 3214911 - RNA, 19 nt, Human
acagcacgggggccaagga

SEQ ID NO: 3214912 - RNA, 15 nt, Human
acagcuguugacucu

SEQ ID NO: 3214913 - RNA, 14 nt, Human
acagcuguugacuc

SEQ ID NO: 3214914 - RNA, 13 nt, Human
acagcuguugacu

SEQ ID NO: 3214915 - RNA, 12 nt, Human
acagcuuagaau

SEQ ID NO: 3214916 - RNA, 19 nt, Human
acagcuaaugggacacuaa

SEQ ID NO: 3214917 - RNA, 17 nt, Human
acagcuaaugggacacu

SEQ ID NO: 3214918 - RNA, 16 nt, Human
acagcuaaugggacac

SEQ ID NO: 3214919 - RNA, 15 nt, Human
acagcuaaugggaca

SEQ ID NO: 3214920 - RNA, 14 nt, Human
acagcuaugcaaaa

SEQ ID NO: 3214921 - RNA, 21 nt, Human
acagcuaugcaaaaagcuagu

SEQ ID NO: 3214922 - RNA, 21 nt, Human
acagcuucauuuccugugucu

SEQ ID NO: 3214923 - RNA, 19 nt, Human
acagcuucauuuccugugu

SEQ ID NO: 3214924 - RNA, 17 nt, Human
acagcuucauuuccugu

SEQ ID NO: 3214925 - RNA, 20 nt, Human
acagcuugaccgugaggcca

SEQ ID NO: 3214926 - RNA, 21 nt, Human
acagcuugaccgugaggccag

SEQ ID NO: 3214927 - RNA, 17 nt, Human
acagcuugaccgugagg

SEQ ID NO: 3214928 - RNA, 21 nt, Human
acaggaaaagcugcugacagu

SEQ ID NO: 3214929 - RNA, 20 nt, Human
acaggaaaagcugcugacag

SEQ ID NO: 3214930 - RNA, 19 nt, Human
acaggaaaagcugcugaca

SEQ ID NO: 3214931 - RNA, 18 nt, Human
acaggaaaagcugcugac

SEQ ID NO: 3214932 - RNA, 22 nt, Human
acagcuugaccgugaggccaga

SEQ ID NO: 3214933 - RNA, 23 nt, Human
acagcuugaccgugaggccagag

SEQ ID NO: 3214934 - RNA, 17 nt, Human
acaggcccggcuccagg

SEQ ID NO: 3214935 - RNA, 16 nt, Human
acaggcccggcuccag

SEQ ID NO: 3214936 - RNA, 13 nt, Human
acaggcagggcag

SEQ ID NO: 3214937 - RNA, 12 nt, Human
acaggcagggca

SEQ ID NO: 3214938 - RNA, 23 nt, Human
acaggcagggcaggaccagccca

SEQ ID NO: 3214939 - RNA, 22 nt, Human
acaggcagggcaggaccagccc

SEQ ID NO: 3214940 - RNA, 21 nt, Human
acaggcagggcaggaccagcc

SEQ ID NO: 3214941 - RNA, 18 nt, Human
acaggcagggcaggacca

SEQ ID NO: 3214942 - RNA, 15 nt, Human
acaggcagauacagg

SEQ ID NO: 3214943 - RNA, 19 nt, Human
acaggagaugcugugcccc

SEQ ID NO: 3214944 - RNA, 18 nt, Human
acaggagaugcugugccc

SEQ ID NO: 3214945 - RNA, 14 nt, Human
acaggagaugcugu

SEQ ID NO: 3214946 - RNA, 15 nt, Human
acaggacucugccuc

SEQ ID NO: 3214947 - RNA, 16 nt, Human
acaggacucugccucc

SEQ ID NO: 3214948 - RNA, 17 nt, Human
acaggagaagaaagaac

SEQ ID NO: 3214949 - RNA, 20 nt, Human
acaggaaaauuuuaaaaaua

SEQ ID NO: 3214950 - RNA, 22 nt, Human
acaggcccggcuccaggcuccu

SEQ ID NO: 3214951 - RNA, 21 nt, Human
acaggcccggcuccaggcucc

SEQ ID NO: 3214952 - RNA, 20 nt, Human
acaggcccggcuccaggcuc

SEQ ID NO: 3214953 - RNA, 18 nt, Human
acaggcccggcuccaggc

SEQ ID NO: 3214954 - RNA, 22 nt, Human
acaggcccuuccucuccacugc

SEQ ID NO: 3214955 - RNA, 15 nt, Human
acaggcccuuccucu

SEQ ID NO: 3214956 - RNA, 13 nt, Human
acaggcccuuccu

SEQ ID NO: 3214957 - RNA, 23 nt, Human
acaggcccuccucccucccagcu

SEQ ID NO: 3214958 - RNA, 22 nt, Human
acaggcccuccucccucccagc

SEQ ID NO: 3214959 - RNA, 22 nt, Human
uaugugauuuuuuuucccauuu

SEQ ID NO: 3214960 - RNA, 21 nt, Human
uaugugauuuuuuuucccauu

SEQ ID NO: 3214961 - RNA, 16 nt, Human
acaggcgaaagaaaac

SEQ ID NO: 3214962 - RNA, 20 nt, Human
uaugucgucgagcucccccc

SEQ ID NO: 3214963 - RNA, 18 nt, Human
uauguccugugagaugug

SEQ ID NO: 3214964 - RNA, 20 nt, Human
uauguccugugagaugugua

SEQ ID NO: 3214965 - RNA, 22 nt, Human
uauguccugugagauguguauc

SEQ ID NO: 3214966 - RNA, 20 nt, Human
aauuugucugaaacauuuca

SEQ ID NO: 3214967 - RNA, 22 nt, Human
aauuugucugaaacauuucaua

SEQ ID NO: 3214968 - RNA, 21 nt, Human
uagacauuugcuaugagcugg

SEQ ID NO: 3214969 - RNA, 22 nt, Human
aauuuggaaacuaauaaaauau

SEQ ID NO: 3214970 - RNA, 23 nt, Human
aauuuggaaacuaauaaaauauu

SEQ ID NO: 3214971 - RNA, 19 nt, Human
aauuuggaccauuuuccug

SEQ ID NO: 3214972 - RNA, 18 nt, Human
aauuuggagcacaaaauu

SEQ ID NO: 3214973 - RNA, 19 nt, Human
aauuuggagcacaaaauuc

SEQ ID NO: 3214974 - RNA, 20 nt, Human
aauuuggagcacaaaauuca

SEQ ID NO: 3214975 - RNA, 21 nt, Human
aauuuggagcacaaaauucaa

SEQ ID NO: 3214976 - RNA, 22 nt, Human
aauuuggaggcuggaguaauca

SEQ ID NO: 3214977 - RNA, 17 nt, Human
uagacagucccugccaa

SEQ ID NO: 3214978 - RNA, 21 nt, Human
uagacagucccugccaaugga

SEQ ID NO: 3214979 - RNA, 14 nt, Human
uagacaucuguccu

SEQ ID NO: 3214980 - RNA, 16 nt, Human
uagacagucccugcca

SEQ ID NO: 3214981 - RNA, 10 nt, Human
uagacagagu

SEQ ID NO: 3214982 - RNA, 16 nt, Human
uagacacacaaagcag

SEQ ID NO: 3214983 - RNA, 15 nt, Human
uagacacacaaagca

SEQ ID NO: 3214984 - RNA, 12 nt, Human
uagacacacaaa

SEQ ID NO: 3214985 - RNA, 23 nt, Human
uagaauuuuaagccuuuguugaa

SEQ ID NO: 3214986 - RNA, 13 nt, Human
uagacaaaaagua

SEQ ID NO: 3214987 - RNA, 14 nt, Human
uagacaaaaaguau

SEQ ID NO: 3214988 - RNA, 15 nt, Human
uagacaaaaaguaua

SEQ ID NO: 3214989 - RNA, 16 nt, Human
uagacaaaaaguauau

SEQ ID NO: 3214990 - RNA, 20 nt, Human
uagacaaaaaguauauuaaa

SEQ ID NO: 3214991 - RNA, 12 nt, Human
uagacaaaguac

SEQ ID NO: 3214992 - RNA, 14 nt, Human
uagacaaaguacau

SEQ ID NO: 3214993 - RNA, 21 nt, Human
uagaaggaaaaccuagaaaac

SEQ ID NO: 3214994 - RNA, 21 nt, Human
uagaaguaacuggugauauau

SEQ ID NO: 3214995 - RNA, 16 nt, Human
aauuccacacccucac

SEQ ID NO: 3214996 - RNA, 16 nt, Human
aauucauucauacuua

SEQ ID NO: 3214997 - RNA, 19 nt, Human
aauucauucauacuuaaaa

SEQ ID NO: 3214998 - RNA, 23 nt, Human
uacuuugauauuuucaacgcagc

SEQ ID NO: 3214999 - RNA, 14 nt, Human
aauuccacagcugc

SEQ ID NO: 3215000 - RNA, 12 nt, Human
aauuccacagcu

SEQ ID NO: 3215001 - RNA, 13 nt, Human
aauuccacagcug

SEQ ID NO: 3215002 - RNA, 14 nt, Human
uacuuuguaaauuc

SEQ ID NO: 3215003 - RNA, 20 nt, Human
uacuuugguagcugggaaag

SEQ ID NO: 3215004 - RNA, 23 nt, Human
uacuuugguagcugggaaagcau

SEQ ID NO: 3215005 - RNA, 18 nt, Human
uacuuugguuucugagca

SEQ ID NO: 3215006 - RNA, 17 nt, Human
uacuuuguaaauucuga

SEQ ID NO: 3215007 - RNA, 18 nt, Human
uacuuuguaaauucugau

SEQ ID NO: 3215008 - RNA, 19 nt, Human
uacuuuguaaauucugauu

SEQ ID NO: 3215009 - RNA, 22 nt, Human
uacuuuguaaauucugauuucu

SEQ ID NO: 3215010 - RNA, 12 nt, Human
uacuuuguauug

SEQ ID NO: 3215011 - RNA, 16 nt, Human
uacuuuguauacaagu

SEQ ID NO: 3215012 - RNA, 22 nt, Human
aauucauggcaugcuuaaauuu

SEQ ID NO: 3215013 - RNA, 12 nt, Human
uacuuugauuca

SEQ ID NO: 3215014 - RNA, 15 nt, Human
uacuuugauucacau

SEQ ID NO: 3215015 - RNA, 14 nt, Human
uacuuugauucaca

SEQ ID NO: 3215016 - RNA, 23 nt, Human
uacuuugauucacauguuuucaa

SEQ ID NO: 3215017 - RNA, 12 nt, Human
uacuuugcauug

SEQ ID NO: 3215018 - RNA, 16 nt, Human
uacuuugcauugucug

SEQ ID NO: 3215019 - RNA, 18 nt, Human
uacuuugcauugucuguc

SEQ ID NO: 3215020 - RNA, 20 nt, Human
uacuuugauucacauguuuu

SEQ ID NO: 3215021 - RNA, 17 nt, Human
uacuuugauucacaugu

SEQ ID NO: 3215022 - RNA, 21 nt, Human
uacuuugauucacauguuuuc

SEQ ID NO: 3215023 - RNA, 12 nt, Human
uagaaaaaugga

SEQ ID NO: 3215024 - RNA, 13 nt, Human
uagaaaaauuuca

SEQ ID NO: 3215025 - RNA, 17 nt, Human
uagaaaaauuucacgau

SEQ ID NO: 3215026 - RNA, 19 nt, Human
uagaaaacauuuggcagaa

SEQ ID NO: 3215027 - RNA, 14 nt, Human
uagaaaaacaaauc

SEQ ID NO: 3215028 - RNA, 14 nt, Human
uacuuuguauuguc

SEQ ID NO: 3215029 - RNA, 16 nt, Human
uacuuuguauuguccu

SEQ ID NO: 3215030 - RNA, 22 nt, Human
uacuuuuccuugcauacaaaca

SEQ ID NO: 3215031 - RNA, 21 nt, Human
uacuuuuccuugcauacaaac

SEQ ID NO: 3215032 - RNA, 11 nt, Human
uacuuuuccuu

SEQ ID NO: 3215033 - RNA, 15 nt, Human
uacuuuuccuugcau

SEQ ID NO: 3215034 - RNA, 14 nt, Human
uagaagaagugugu

SEQ ID NO: 3215035 - RNA, 16 nt, Human
uagaacuuuguauagu

SEQ ID NO: 3215036 - RNA, 16 nt, Human
uagaagaaagauguuu

SEQ ID NO: 3215037 - RNA, 22 nt, Human
uagaagaaugcaugcuuuccau

SEQ ID NO: 3215038 - RNA, 16 nt, Human
uagaagaaugcaugcu

SEQ ID NO: 3215039 - RNA, 16 nt, Human
uagaagaauauuguau

SEQ ID NO: 3215040 - RNA, 17 nt, Human
uagaagaauauuguauu

SEQ ID NO: 3215041 - RNA, 14 nt, Human
uagaagaaugcaug

SEQ ID NO: 3215042 - RNA, 15 nt, Human
uagaacucccuuuca

SEQ ID NO: 3215043 - RNA, 12 nt, Human
uagaacuuugua

SEQ ID NO: 3215044 - RNA, 13 nt, Human
uagaacuuuguau

SEQ ID NO: 3215045 - RNA, 14 nt, Human
uagaacuuuguaua

SEQ ID NO: 3215046 - RNA, 16 nt, Human
uagaacucccuuucaa

SEQ ID NO: 3215047 - RNA, 17 nt, Human
uagaacucccuuucaac

SEQ ID NO: 3215048 - RNA, 17 nt, Human
uagaaacaccaaaaaaa

SEQ ID NO: 3215049 - RNA, 21 nt, Human
uagaaacacauaauuaacacu

SEQ ID NO: 3215050 - RNA, 20 nt, Human
uagaaacacauaauuaacac

SEQ ID NO: 3215051 - RNA, 16 nt, Human
uagaaacacauaauua

SEQ ID NO: 3215052 - RNA, 21 nt, Human
uagaaaaggugauaaaaucau

SEQ ID NO: 3215053 - RNA, 12 nt, Human
uagaaaagguga

SEQ ID NO: 3215054 - RNA, 22 nt, Human
uagaaaaggugauaaaaucaua

SEQ ID NO: 3215055 - RNA, 13 nt, Human
uagaaaauauucu

SEQ ID NO: 3215056 - RNA, 16 nt, Human
uagaaaauauucucua

SEQ ID NO: 3215057 - RNA, 18 nt, Human
uagaaaauauucucuauu

SEQ ID NO: 3215058 - RNA, 14 nt, Human
uagaaaagugaauu

SEQ ID NO: 3215059 - RNA, 17 nt, Human
uagaaaagugaauugaa

SEQ ID NO: 3215060 - RNA, 18 nt, Human
uagaaaagugaauugaag

SEQ ID NO: 3215061 - RNA, 13 nt, Human
uagaaaacuuugu

SEQ ID NO: 3215062 - RNA, 11 nt, Human
uagaaaaggca

SEQ ID NO: 3215063 - RNA, 14 nt, Human
uagaaaacuuuguu

SEQ ID NO: 3215064 - RNA, 13 nt, Human
acaaaaacacagc

SEQ ID NO: 3215065 - RNA, 13 nt, Human
aauuuuagaaaua

SEQ ID NO: 3215066 - RNA, 17 nt, Human
acaaaaaacgaaugaaa

SEQ ID NO: 3215067 - RNA, 15 nt, Human
acaaaaacacagcaa

SEQ ID NO: 3215068 - RNA, 14 nt, Human
acaaaaacacagca

SEQ ID NO: 3215069 - RNA, 16 nt, Human
acaaaaagcauaaaaa

SEQ ID NO: 3215070 - RNA, 19 nt, Human
acaaaaauucucaguucuc

SEQ ID NO: 3215071 - RNA, 10 nt, Human
acaaaaggca

SEQ ID NO: 3215072 - RNA, 22 nt, Human
acaaaaccacaguguaccauua

SEQ ID NO: 3215073 - RNA, 15 nt, Human
acaaaaccacagugu

SEQ ID NO: 3215074 - RNA, 19 nt, Human
acaaaaccaaaaguuauua

SEQ ID NO: 3215075 - RNA, 16 nt, Human
acaaaaccaaaaguua

SEQ ID NO: 3215076 - RNA, 14 nt, Human
acaaaaccaaaagu

SEQ ID NO: 3215077 - RNA, 15 nt, Human
acaaaacaaauccug

SEQ ID NO: 3215078 - RNA, 12 nt, Human
acaaaacaaauc

SEQ ID NO: 3215079 - RNA, 23 nt, Human
acaaauaacaacuuuuuuuucuu

SEQ ID NO: 3215080 - RNA, 19 nt, Human
acaaauacaauacauagga

SEQ ID NO: 3215081 - RNA, 16 nt, Human
acaaaauacauucuuu

SEQ ID NO: 3215082 - RNA, 14 nt, Human
acaaaauacauucu

SEQ ID NO: 3215083 - RNA, 13 nt, Human
acaaaauaaauug

SEQ ID NO: 3215084 - RNA, 12 nt, Human
acaaaauauaca

SEQ ID NO: 3215085 - RNA, 16 nt, Human
acaaaauauugaaagg

SEQ ID NO: 3215086 - RNA, 13 nt, Human
acaaaaucaaaua

SEQ ID NO: 3215087 - RNA, 22 nt, Human
uagagcggagaaaggaagggcu

SEQ ID NO: 3215088 - RNA, 21 nt, Human
uagaggccugaaauccugguu

SEQ ID NO: 3215089 - RNA, 14 nt, Human
uagagccagggucu

SEQ ID NO: 3215090 - RNA, 21 nt, Human
acaaauaguaggcaagauggc

SEQ ID NO: 3215091 - RNA, 19 nt, Human
acaaauaguaggcaagaug

SEQ ID NO: 3215092 - RNA, 17 nt, Human
acaaauaguaggcaaga

SEQ ID NO: 3215093 - RNA, 24 nt, Human
uagaggggaaaagagaugaugaaa

SEQ ID NO: 3215094 - RNA, 14 nt, Human
uagcaaaaaaaguu

SEQ ID NO: 3215095 - RNA, 13 nt, Human
uagcaaaaaaagu

SEQ ID NO: 3215096 - RNA, 23 nt, Human
uagcaaaaaaaguuguaugaucu

SEQ ID NO: 3215097 - RNA, 21 nt, Human
uagcaaaaaaaguuguaugau

SEQ ID NO: 3215098 - RNA, 20 nt, Human
uagcaaaaaaaguuguauga

SEQ ID NO: 3215099 - RNA, 18 nt, Human
uagcaaaaaaaguuguau

SEQ ID NO: 3215100 - RNA, 15 nt, Human
uagcacagacccugc

SEQ ID NO: 3215101 - RNA, 20 nt, Human
uagcacagacccugcccugu

SEQ ID NO: 3215102 - RNA, 21 nt, Human
uagcacagacccugcccugug

SEQ ID NO: 3215103 - RNA, 14 nt, Human
uagcacagacccug

SEQ ID NO: 3215104 - RNA, 22 nt, Human
uagcaaacccugucaaacauua

SEQ ID NO: 3215105 - RNA, 21 nt, Human
uagcaaacccugucaaacauu

SEQ ID NO: 3215106 - RNA, 20 nt, Human
uagcaaacccugucaaacau

SEQ ID NO: 3215107 - RNA, 19 nt, Human
uagcaaacccugucaaaca

SEQ ID NO: 3215108 - RNA, 17 nt, Human
uagcaaacccugucaaa

SEQ ID NO: 3215109 - RNA, 22 nt, Human
uagcacagacccugcccugugg

SEQ ID NO: 3215110 - RNA, 12 nt, Human
uagccaaggcca

SEQ ID NO: 3215111 - RNA, 23 nt, Human
uagccaaaugacugaaagcacug

SEQ ID NO: 3215112 - RNA, 18 nt, Human
uagccaacggccccagcu

SEQ ID NO: 3215113 - RNA, 19 nt, Human
uagcacuuaaauuccucaa

SEQ ID NO: 3215114 - RNA, 15 nt, Human
uagccaaaaugugag

SEQ ID NO: 3215115 - RNA, 21 nt, Human
uagcacuuccuugccagucuu

SEQ ID NO: 3215116 - RNA, 16 nt, Human
uagccaaaaugugagu

SEQ ID NO: 3215117 - RNA, 23 nt, Human
uagccaaaaugugagugguugaa

SEQ ID NO: 3215118 - RNA, 20 nt, Human
uagcacuuccuugccagucu

SEQ ID NO: 3215119 - RNA, 21 nt, Human
uagcacuucagggcagauuuu

SEQ ID NO: 3215120 - RNA, 13 nt, Human
uagccaaaaugug

SEQ ID NO: 3215121 - RNA, 18 nt, Human
uagccaccgccuccuaca

SEQ ID NO: 3215122 - RNA, 18 nt, Human
uagccacccaccacacug

SEQ ID NO: 3215123 - RNA, 21 nt, Human
uagccaacggccccagcuucu

SEQ ID NO: 3215124 - RNA, 13 nt, Human
uagccaaggccaa

SEQ ID NO: 3215125 - RNA, 20 nt, Human
uagccaacggccccagcuuc

SEQ ID NO: 3215126 - RNA, 19 nt, Human
uagccaacggccccagcuu

SEQ ID NO: 3215127 - RNA, 19 nt, Human
uagccaccgccuccuacag

SEQ ID NO: 3215128 - RNA, 17 nt, Human
uagccaccugaguuccu

SEQ ID NO: 3215129 - RNA, 14 nt, Human
uagccaccugaguu

SEQ ID NO: 3215130 - RNA, 12 nt, Human
acaaaucaguaa

SEQ ID NO: 3215131 - RNA, 13 nt, Human
acaaaucaguaau

SEQ ID NO: 3215132 - RNA, 15 nt, Human
acaaaucaguaauuu

SEQ ID NO: 3215133 - RNA, 16 nt, Human
acaaaucaguaauuuu

SEQ ID NO: 3215134 - RNA, 20 nt, Human
acaaauauuucuagacacuu

SEQ ID NO: 3215135 - RNA, 13 nt, Human
uaguaaucuguau

SEQ ID NO: 3215136 - RNA, 14 nt, Human
uaguaaucuguaua

SEQ ID NO: 3215137 - RNA, 14 nt, Human
uaguagagacaggg

SEQ ID NO: 3215138 - RNA, 14 nt, Human
uagucacugagaca

SEQ ID NO: 3215139 - RNA, 13 nt, Human
uaguagagacggg

SEQ ID NO: 3215140 - RNA, 22 nt, Human
uaguagagacaggguuuugcca

SEQ ID NO: 3215141 - RNA, 15 nt, Human
uaguagagacagggu

SEQ ID NO: 3215142 - RNA, 19 nt, Human
acacaguaccauuuaaugg

SEQ ID NO: 3215143 - RNA, 21 nt, Human
acacaggggacacccagaaac

SEQ ID NO: 3215144 - RNA, 16 nt, Human
uaguaaaaauaaaauu

SEQ ID NO: 3215145 - RNA, 13 nt, Human
uaguaaaaauaaa

SEQ ID NO: 3215146 - RNA, 23 nt, Human
uaguaauauauuuaaagggaaau

SEQ ID NO: 3215147 - RNA, 19 nt, Human
uaguaauauauuuaaaggg

SEQ ID NO: 3215148 - RNA, 18 nt, Human
uaguaauauauuuaaagg

SEQ ID NO: 3215149 - RNA, 17 nt, Human
uaguaauauauuuaaag

SEQ ID NO: 3215150 - RNA, 16 nt, Human
uaguaauauauuuaaa

SEQ ID NO: 3215151 - RNA, 13 nt, Human
uaguaauauauuu

SEQ ID NO: 3215152 - RNA, 21 nt, Human
uaguaauauaauacacaaaau

SEQ ID NO: 3215153 - RNA, 14 nt, Human
uaguaauauaauac

SEQ ID NO: 3215154 - RNA, 15 nt, Human
uaguaauauaauaca

SEQ ID NO: 3215155 - RNA, 16 nt, Human
acacaggcccggcucc

SEQ ID NO: 3215156 - RNA, 18 nt, Human
acacaggcccggcuccag

SEQ ID NO: 3215157 - RNA, 17 nt, Human
acacaggcccggcucca

SEQ ID NO: 3215158 - RNA, 22 nt, Human
acacacacgcgugcacacacca

SEQ ID NO: 3215159 - RNA, 23 nt, Human
acacacagauuugagcucagccc

SEQ ID NO: 3215160 - RNA, 22 nt, Human
acacaggcccggcuccaggcuc

SEQ ID NO: 3215161 - RNA, 21 nt, Human
acacaggcccggcuccaggcu

SEQ ID NO: 3215162 - RNA, 20 nt, Human
acacaggcccggcuccaggc

SEQ ID NO: 3215163 - RNA, 19 nt, Human
acacaggcccggcuccagg

SEQ ID NO: 3215164 - RNA, 24 nt, Human
acacaggcccggcuccaggcuccu

SEQ ID NO: 3215165 - RNA, 23 nt, Human
acacaggcccggcuccaggcucc

SEQ ID NO: 3215166 - RNA, 19 nt, Human
acacaggccacccugugca

SEQ ID NO: 3215167 - RNA, 16 nt, Human
acacaggccacccugu

SEQ ID NO: 3215168 - RNA, 17 nt, Human
acacaacggcagugaag

SEQ ID NO: 3215169 - RNA, 16 nt, Human
acacaaauuaugcuaa

SEQ ID NO: 3215170 - RNA, 22 nt, Human
acacaaauuaugcuaagaauuu

SEQ ID NO: 3215171 - RNA, 21 nt, Human
acacaaauuaugcuaagaauu

SEQ ID NO: 3215172 - RNA, 19 nt, Human
acaaugcaaaccaucauug

SEQ ID NO: 3215173 - RNA, 21 nt, Human
acaaugcaaaccaucauugaa

SEQ ID NO: 3215174 - RNA, 23 nt, Human
acaaugcaaaccaucauugaaau

SEQ ID NO: 3215175 - RNA, 22 nt, Human
acacaagugcaguagugcaguu

SEQ ID NO: 3215176 - RNA, 13 nt, Human
acacaagugcagu

SEQ ID NO: 3215177 - RNA, 15 nt, Human
uaggguuauaauaau

SEQ ID NO: 3215178 - RNA, 15 nt, Human
uagggugggccuuca

SEQ ID NO: 3215179 - RNA, 17 nt, Human
uaggguuauaauaaugu

SEQ ID NO: 3215180 - RNA, 19 nt, Human
uaggguaagugagagaggg

SEQ ID NO: 3215181 - RNA, 17 nt, Human
uagggguaccacugaau

SEQ ID NO: 3215182 - RNA, 13 nt, Human
uaggguccugggg

SEQ ID NO: 3215183 - RNA, 13 nt, Human
uaggguacaugug

SEQ ID NO: 3215184 - RNA, 11 nt, Human
acaaugcaaac

SEQ ID NO: 3215185 - RNA, 16 nt, Human
acaaugcaaaccauca

SEQ ID NO: 3215186 - RNA, 17 nt, Human
acaaugcaaaccaucau

SEQ ID NO: 3215187 - RNA, 18 nt, Human
acaaugcaaaccaucauu

SEQ ID NO: 3215188 - RNA, 14 nt, Human
acaaugacuuuauu

SEQ ID NO: 3215189 - RNA, 13 nt, Human
acaaugacuuuau

SEQ ID NO: 3215190 - RNA, 13 nt, Human
uaggguuucugau

SEQ ID NO: 3215191 - RNA, 14 nt, Human
acaaaucugucugc

SEQ ID NO: 3215192 - RNA, 22 nt, Human
acaaaucugcaaagcauguuuu

SEQ ID NO: 3215193 - RNA, 19 nt, Human
acaaaucugcaaagcaugu

SEQ ID NO: 3215194 - RNA, 13 nt, Human
acaaaugacuuua

SEQ ID NO: 3215195 - RNA, 12 nt, Human
acaaaugacuuu

SEQ ID NO: 3215196 - RNA, 15 nt, Human
acaaaucuuuccaua

SEQ ID NO: 3215197 - RNA, 17 nt, Human
acaaaugacugucucuu

SEQ ID NO: 3215198 - RNA, 20 nt, Human
uagccuuagaagucacacag

SEQ ID NO: 3215199 - RNA, 12 nt, Human
acaaucagcugc

SEQ ID NO: 3215200 - RNA, 13 nt, Human
acaaucagcugcu

SEQ ID NO: 3215201 - RNA, 14 nt, Human
acaaucagcugcuu

SEQ ID NO: 3215202 - RNA, 14 nt, Human
acaauauuucugau

SEQ ID NO: 3215203 - RNA, 19 nt, Human
acaauauuugugugcuaaa

SEQ ID NO: 3215204 - RNA, 18 nt, Human
acaauauuugugugcuaa

SEQ ID NO: 3215205 - RNA, 14 nt, Human
acaauauuugugug

SEQ ID NO: 3215206 - RNA, 12 nt, Human
acaauauuugug

SEQ ID NO: 3215207 - RNA, 21 nt, Human
uagccuuagaagucacacagu

SEQ ID NO: 3215208 - RNA, 20 nt, Human
uagccugugccucugggacu

SEQ ID NO: 3215209 - RNA, 14 nt, Human
uagcgcccaguugg

SEQ ID NO: 3215210 - RNA, 17 nt, Human
uagcgcccaguugggug

SEQ ID NO: 3215211 - RNA, 14 nt, Human
uagcguguguagau

SEQ ID NO: 3215212 - RNA, 18 nt, Human
uagcguguguagauagua

SEQ ID NO: 3215213 - RNA, 22 nt, Human
uagcguuuaaggugagcauaaa

SEQ ID NO: 3215214 - RNA, 13 nt, Human
uaggaaaaacuga

SEQ ID NO: 3215215 - RNA, 14 nt, Human
uaggaaaaacugau

SEQ ID NO: 3215216 - RNA, 20 nt, Human
uagcuuuuuaauuaagcaaa

SEQ ID NO: 3215217 - RNA, 21 nt, Human
uagcuuucugagcaagaggau

SEQ ID NO: 3215218 - RNA, 13 nt, Human
uagcuuuucccuu

SEQ ID NO: 3215219 - RNA, 23 nt, Human
uagcuuuaaugauaugcuuguaa

SEQ ID NO: 3215220 - RNA, 19 nt, Human
uagcgcuauaguuacuguc

SEQ ID NO: 3215221 - RNA, 14 nt, Human
uagcuucagucauu

SEQ ID NO: 3215222 - RNA, 16 nt, Human
uagcuucagucauuaa

SEQ ID NO: 3215223 - RNA, 21 nt, Human
uagcuucagucauuaaauuac

SEQ ID NO: 3215224 - RNA, 14 nt, Human
uagcuaagccaaga

SEQ ID NO: 3215225 - RNA, 13 nt, Human
uaggauguugaaa

SEQ ID NO: 3215226 - RNA, 19 nt, Human
uaggauguauauuuuauau

SEQ ID NO: 3215227 - RNA, 23 nt, Human
uaggauguauauuuuauauaaag

SEQ ID NO: 3215228 - RNA, 12 nt, Human
uaggauucacac

SEQ ID NO: 3215229 - RNA, 21 nt, Human
uaggauucacaccccaccugc

SEQ ID NO: 3215230 - RNA, 20 nt, Human
uaggauucacaccccaccug

SEQ ID NO: 3215231 - RNA, 22 nt, Human
uaggauucacaccccaccugcg

SEQ ID NO: 3215232 - RNA, 15 nt, Human
uaggcaguauaaaga

SEQ ID NO: 3215233 - RNA, 20 nt, Human
uaggcagggugucugccccc

SEQ ID NO: 3215234 - RNA, 17 nt, Human
uaggcagggugucugcc

SEQ ID NO: 3215235 - RNA, 16 nt, Human
uaggcauaugcuucuu

SEQ ID NO: 3215236 - RNA, 19 nt, Human
uaggcaguauaaagaauag

SEQ ID NO: 3215237 - RNA, 16 nt, Human
uaggcaguauaaagaa

SEQ ID NO: 3215238 - RNA, 21 nt, Human
uaggauaugccugcucuuugg

SEQ ID NO: 3215239 - RNA, 18 nt, Human
uaggauaugccugcucuu

SEQ ID NO: 3215240 - RNA, 17 nt, Human
uaggauaugccugcucu

SEQ ID NO: 3215241 - RNA, 17 nt, Human
uaggaugggcuucugug

SEQ ID NO: 3215242 - RNA, 16 nt, Human
uaggaaaaacugauuu

SEQ ID NO: 3215243 - RNA, 17 nt, Human
uaggaaaaacugauuuu

SEQ ID NO: 3215244 - RNA, 22 nt, Human
uaggaaaagaaaucuauagaaa

SEQ ID NO: 3215245 - RNA, 21 nt, Human
uaggaaaagaaaucuauagaa

SEQ ID NO: 3215246 - RNA, 16 nt, Human
uaggaaaagaaaucua

SEQ ID NO: 3215247 - RNA, 15 nt, Human
uaggaaaagaaaucu

SEQ ID NO: 3215248 - RNA, 17 nt, Human
uagggcccaugggaggg

SEQ ID NO: 3215249 - RNA, 16 nt, Human
uagggcucuaauuucc

SEQ ID NO: 3215250 - RNA, 17 nt, Human
uaggggaagaauaauuu

SEQ ID NO: 3215251 - RNA, 15 nt, Human
uaggggaagaauaau

SEQ ID NO: 3215252 - RNA, 17 nt, Human
uagggcucuaauuuccu

SEQ ID NO: 3215253 - RNA, 16 nt, Human
uagggguaccacugaa

SEQ ID NO: 3215254 - RNA, 14 nt, Human
uaggggaaugaggg

SEQ ID NO: 3215255 - RNA, 17 nt, Human
uaggggaaugagggggc

SEQ ID NO: 3215256 - RNA, 13 nt, Human
uagggaagauaau

SEQ ID NO: 3215257 - RNA, 19 nt, Human
uagggauggggcugugggg

SEQ ID NO: 3215258 - RNA, 15 nt, Human
uagggaguauucuaa

SEQ ID NO: 3215259 - RNA, 18 nt, Human
caagccuggucagcccaa

SEQ ID NO: 3215260 - RNA, 17 nt, Human
caagccuggucagccca

SEQ ID NO: 3215261 - RNA, 16 nt, Human
caagccuggucagccc

SEQ ID NO: 3215262 - RNA, 15 nt, Human
caagccuggucagcc

SEQ ID NO: 3215263 - RNA, 12 nt, Human
caagccugguca

SEQ ID NO: 3215264 - RNA, 15 nt, Human
caagauaccuuuuuu

SEQ ID NO: 3215265 - RNA, 12 nt, Human
caagauagaaag

SEQ ID NO: 3215266 - RNA, 17 nt, Human
caagccuuggcucuacc

SEQ ID NO: 3215267 - RNA, 23 nt, Human
caagaguggccccaccuggcccu

SEQ ID NO: 3215268 - RNA, 22 nt, Human
caagaguggccccaccuggccc

SEQ ID NO: 3215269 - RNA, 21 nt, Human
caagaguggccccaccuggcc

SEQ ID NO: 3215270 - RNA, 20 nt, Human
caagaguggccccaccuggc

SEQ ID NO: 3215271 - RNA, 19 nt, Human
caagaguggccccaccugg

SEQ ID NO: 3215272 - RNA, 18 nt, Human
caagaguggccccaccug

SEQ ID NO: 3215273 - RNA, 17 nt, Human
caagaguggccccaccu

SEQ ID NO: 3215274 - RNA, 16 nt, Human
caagaguggccccacc

SEQ ID NO: 3215275 - RNA, 16 nt, Human
caagagucuggggacc

SEQ ID NO: 3215276 - RNA, 15 nt, Human
caagaguggccccac

SEQ ID NO: 3215277 - RNA, 14 nt, Human
caagaguggcccca

SEQ ID NO: 3215278 - RNA, 20 nt, Human
caagcugcacccucaggcag

SEQ ID NO: 3215279 - RNA, 17 nt, Human
caagcgauucucuugcc

SEQ ID NO: 3215280 - RNA, 22 nt, Human
caagcugcacccucaggcaggu

SEQ ID NO: 3215281 - RNA, 21 nt, Human
caagcuggucccacucagucc

SEQ ID NO: 3215282 - RNA, 17 nt, Human
caagcgauucuucugcu

SEQ ID NO: 3215283 - RNA, 15 nt, Human
caagcgauucuucug

SEQ ID NO: 3215284 - RNA, 21 nt, Human
caagcugcacccucaggcagg

SEQ ID NO: 3215285 - RNA, 18 nt, Human
caagcgauucuucugcuu

SEQ ID NO: 3215286 - RNA, 23 nt, Human
caagcuggucccacucaguccau

SEQ ID NO: 3215287 - RNA, 22 nt, Human
caagcuggucccacucagucca

SEQ ID NO: 3215288 - RNA, 21 nt, Human
caagcuuuuacaacagugcug

SEQ ID NO: 3215289 - RNA, 15 nt, Human
caagcuuuuccuaau

SEQ ID NO: 3215290 - RNA, 17 nt, Human
caaggcugcagugagcc

SEQ ID NO: 3215291 - RNA, 22 nt, Human
caaggcugcagugagccgagau

SEQ ID NO: 3215292 - RNA, 17 nt, Human
caaggauccugagccag

SEQ ID NO: 3215293 - RNA, 15 nt, Human
caaggcugcagugag

SEQ ID NO: 3215294 - RNA, 20 nt, Human
caaggauccugagccagauu

SEQ ID NO: 3215295 - RNA, 18 nt, Human
caaggauccugagccaga

SEQ ID NO: 3215296 - RNA, 19 nt, Human
caaggauccugagccagau

SEQ ID NO: 3215297 - RNA, 14 nt, Human
caauaccccaugga

SEQ ID NO: 3215298 - RNA, 18 nt, Human
caauaagaacaaauacaa

SEQ ID NO: 3215299 - RNA, 22 nt, Human
caauaaauuuugaaaaguaaua

SEQ ID NO: 3215300 - RNA, 15 nt, Human
caauaguugaauuag

SEQ ID NO: 3215301 - RNA, 14 nt, Human
caauaggaaaaacu

SEQ ID NO: 3215302 - RNA, 18 nt, Human
caauagcauuagaaauaa

SEQ ID NO: 3215303 - RNA, 16 nt, Human
caauaggaaaaacuga

SEQ ID NO: 3215304 - RNA, 17 nt, Human
caauaggaaaaacugau

SEQ ID NO: 3215305 - RNA, 15 nt, Human
caauaggaaaaacug

SEQ ID NO: 3215306 - RNA, 16 nt, Human
caaggcuugcugcaga

SEQ ID NO: 3215307 - RNA, 15 nt, Human
caaggcuugcugcag

SEQ ID NO: 3215308 - RNA, 20 nt, Human
caaggcuugcugcagauacu

SEQ ID NO: 3215309 - RNA, 21 nt, Human
caagggugaugggaaagcauu

SEQ ID NO: 3215310 - RNA, 19 nt, Human
caaggguagggugggccuu

SEQ ID NO: 3215311 - RNA, 23 nt, Human
caagggaaaauaaaaaaagaaaa

SEQ ID NO: 3215312 - RNA, 21 nt, Human
caagggaaaauaaaaaaagaa

SEQ ID NO: 3215313 - RNA, 23 nt, Human
caagggugaugggaaagcauugu

SEQ ID NO: 3215314 - RNA, 13 nt, Human
caauaaaguuuga

SEQ ID NO: 3215315 - RNA, 18 nt, Human
caauaaaguuugaucuuc

SEQ ID NO: 3215316 - RNA, 14 nt, Human
caauaaaguuugau

SEQ ID NO: 3215317 - RNA, 21 nt, Human
caauaaaguuugaucuuccuc

SEQ ID NO: 3215318 - RNA, 20 nt, Human
caauaaaguuugaucuuccu

SEQ ID NO: 3215319 - RNA, 11 nt, Human
caauaaauuuu

SEQ ID NO: 3215320 - RNA, 13 nt, Human
caauaaauuuuga

SEQ ID NO: 3215321 - RNA, 14 nt, Human
caauaaauuuugaa

SEQ ID NO: 3215322 - RNA, 15 nt, Human
caauaaauuuugaaa

SEQ ID NO: 3215323 - RNA, 16 nt, Human
caauaaauuuugaaaa

SEQ ID NO: 3215324 - RNA, 17 nt, Human
caauaaauuuugaaaag

SEQ ID NO: 3215325 - RNA, 18 nt, Human
caauaaauuuugaaaagu

SEQ ID NO: 3215326 - RNA, 23 nt, Human
caauaaaguuugaucuuccucug

SEQ ID NO: 3215327 - RNA, 12 nt, Human
cacagagaaagu

SEQ ID NO: 3215328 - RNA, 14 nt, Human
cacacuccagcugg

SEQ ID NO: 3215329 - RNA, 20 nt, Human
cacagagaaaguacuucucc

SEQ ID NO: 3215330 - RNA, 19 nt, Human
cacagagaaaguacuucuc

SEQ ID NO: 3215331 - RNA, 21 nt, Human
cacacucccgagacggcacug

SEQ ID NO: 3215332 - RNA, 13 nt, Human
cacagaggcugcc

SEQ ID NO: 3215333 - RNA, 15 nt, Human
cacagaggacacaga

SEQ ID NO: 3215334 - RNA, 19 nt, Human
cacagaggacacagagaag

SEQ ID NO: 3215335 - RNA, 23 nt, Human
cacagaugggugcuuggaggaag

SEQ ID NO: 3215336 - RNA, 21 nt, Human
cacagcaguugaaaagacucc

SEQ ID NO: 3215337 - RNA, 19 nt, Human
cacagcaguugaaaagacu

SEQ ID NO: 3215338 - RNA, 16 nt, Human
cacagauuugagcuca

SEQ ID NO: 3215339 - RNA, 17 nt, Human
cacagauuugagcucag

SEQ ID NO: 3215340 - RNA, 18 nt, Human
cacagauuugagcucagc

SEQ ID NO: 3215341 - RNA, 22 nt, Human
cacagauuugagcucagcccug

SEQ ID NO: 3215342 - RNA, 18 nt, Human
cacagccagacuggcaca

SEQ ID NO: 3215343 - RNA, 17 nt, Human
cacagccagacuggcac

SEQ ID NO: 3215344 - RNA, 21 nt, Human
cacagcucuucuccaggcugu

SEQ ID NO: 3215345 - RNA, 14 nt, Human
cacagcugagaggc

SEQ ID NO: 3215346 - RNA, 22 nt, Human
caauuuuucuuauuucauuucu

SEQ ID NO: 3215347 - RNA, 19 nt, Human
caauuuuugguugaauaaa

SEQ ID NO: 3215348 - RNA, 18 nt, Human
caauuuuugguugaauaa

SEQ ID NO: 3215349 - RNA, 21 nt, Human
caauuuuuuaagugaaaauau

SEQ ID NO: 3215350 - RNA, 20 nt, Human
caauuuuuuaagugaaaaua

SEQ ID NO: 3215351 - RNA, 15 nt, Human
cacaaaauauacaaa

SEQ ID NO: 3215352 - RNA, 14 nt, Human
cacaaacagaggcc

SEQ ID NO: 3215353 - RNA, 18 nt, Human
cacaaagcccuuccaugu

SEQ ID NO: 3215354 - RNA, 13 nt, Human
cacaaacagaggc

SEQ ID NO: 3215355 - RNA, 13 nt, Human
cacaaaauucaaa

SEQ ID NO: 3215356 - RNA, 18 nt, Human
caauuacaggaaguacug

SEQ ID NO: 3215357 - RNA, 15 nt, Human
caauuacauguuugg

SEQ ID NO: 3215358 - RNA, 15 nt, Human
caauuacuuuagaaa

SEQ ID NO: 3215359 - RNA, 17 nt, Human
caauuacuuuagaaaau

SEQ ID NO: 3215360 - RNA, 15 nt, Human
caauuacuuugguag

SEQ ID NO: 3215361 - RNA, 15 nt, Human
caauuagauuucuca

SEQ ID NO: 3215362 - RNA, 18 nt, Human
caauucccaccuaugagu

SEQ ID NO: 3215363 - RNA, 22 nt, Human
caauuccaugacaauaugcccu

SEQ ID NO: 3215364 - RNA, 19 nt, Human
caaugugaaaagaaaaaug

SEQ ID NO: 3215365 - RNA, 23 nt, Human
caauaucuucguuaguaaucugu

SEQ ID NO: 3215366 - RNA, 15 nt, Human
caauaucuugcuuga

SEQ ID NO: 3215367 - RNA, 22 nt, Human
caaugugaaaagaaaaaugagc

SEQ ID NO: 3215368 - RNA, 22 nt, Human
caauaucuugcuugaacuuaca

SEQ ID NO: 3215369 - RNA, 19 nt, Human
caauaucuugcuugaacuu

SEQ ID NO: 3215370 - RNA, 16 nt, Human
caauaucuugcuugaa

SEQ ID NO: 3215371 - RNA, 14 nt, Human
caauguucucucuu

SEQ ID NO: 3215372 - RNA, 15 nt, Human
caauguuaaauuaau

SEQ ID NO: 3215373 - RNA, 23 nt, Human
caaugugugccgagcccuugccc

SEQ ID NO: 3215374 - RNA, 22 nt, Human
caaugugugccgagcccuugcc

SEQ ID NO: 3215375 - RNA, 15 nt, Human
caauguguauaaauu

SEQ ID NO: 3215376 - RNA, 16 nt, Human
caauguguauaaauug

SEQ ID NO: 3215377 - RNA, 17 nt, Human
caauguguauaaauugu

SEQ ID NO: 3215378 - RNA, 15 nt, Human
caaugugucuuucua

SEQ ID NO: 3215379 - RNA, 22 nt, Human
caaugugucuuucuaagaaauc

SEQ ID NO: 3215380 - RNA, 17 nt, Human
caauuacaggaaguacu

SEQ ID NO: 3215381 - RNA, 12 nt, Human
caauguuucaag

SEQ ID NO: 3215382 - RNA, 11 nt, Human
caauguuuaca

SEQ ID NO: 3215383 - RNA, 20 nt, Human
caauguuaaauuaauuauaa

SEQ ID NO: 3215384 - RNA, 20 nt, Human
cacaagaaaugaaagcaggg

SEQ ID NO: 3215385 - RNA, 17 nt, Human
cacaaguuaagauucuu

SEQ ID NO: 3215386 - RNA, 19 nt, Human
cacaaguuaagauucuugg

SEQ ID NO: 3215387 - RNA, 20 nt, Human
cacaaguuaagauucuuggu

SEQ ID NO: 3215388 - RNA, 18 nt, Human
cacaagaaaugaaagcag

SEQ ID NO: 3215389 - RNA, 13 nt, Human
cacaaaggagagc

SEQ ID NO: 3215390 - RNA, 12 nt, Human
cacacaaagcag

SEQ ID NO: 3215391 - RNA, 19 nt, Human
cacacaaaaaaagaccugu

SEQ ID NO: 3215392 - RNA, 15 nt, Human
cacacaaaaaaagac

SEQ ID NO: 3215393 - RNA, 22 nt, Human
cacaauugaauuaguuuuuucu

SEQ ID NO: 3215394 - RNA, 11 nt, Human
cacaauuccau

SEQ ID NO: 3215395 - RNA, 13 nt, Human
cacacaaaaaaag

SEQ ID NO: 3215396 - RNA, 16 nt, Human
cacaauuagauuucuc

SEQ ID NO: 3215397 - RNA, 17 nt, Human
cacaauuagauuucuca

SEQ ID NO: 3215398 - RNA, 17 nt, Human
cacacacgcgugcacac

SEQ ID NO: 3215399 - RNA, 19 nt, Human
caaagugcugggauuacaa

SEQ ID NO: 3215400 - RNA, 13 nt, Human
caaagugcuggga

SEQ ID NO: 3215401 - RNA, 14 nt, Human
caaagagaaaacau

SEQ ID NO: 3215402 - RNA, 14 nt, Human
caaaguuagagaac

SEQ ID NO: 3215403 - RNA, 17 nt, Human
caaaguuagagaacuaa

SEQ ID NO: 3215404 - RNA, 24 nt, Human
caaaguuagagaacuaaacuaguu

SEQ ID NO: 3215405 - RNA, 20 nt, Human
caaaguucccuacuuccugu

SEQ ID NO: 3215406 - RNA, 17 nt, Human
caaauaaaauucccuaa

SEQ ID NO: 3215407 - RNA, 21 nt, Human
caaauaaaauucccuaaagcc

SEQ ID NO: 3215408 - RNA, 23 nt, Human
caaagugcugggauuacaagcgu

SEQ ID NO: 3215409 - RNA, 19 nt, Human
caaaguggugagaggcauc

SEQ ID NO: 3215410 - RNA, 18 nt, Human
caaagugcugggauuaca

SEQ ID NO: 3215411 - RNA, 21 nt, Human
caaaguuaaacgugaugugcu

SEQ ID NO: 3215412 - RNA, 19 nt, Human
caaauaaaguaguaaaaga

SEQ ID NO: 3215413 - RNA, 18 nt, Human
caaauaaaguuaaaagua

SEQ ID NO: 3215414 - RNA, 19 nt, Human
caaauaaaguuaaaaguaa

SEQ ID NO: 3215415 - RNA, 12 nt, Human
caaauaugcaaa

SEQ ID NO: 3215416 - RNA, 14 nt, Human
caaauaacaacuuu

SEQ ID NO: 3215417 - RNA, 13 nt, Human
caaauaacaacuu

SEQ ID NO: 3215418 - RNA, 16 nt, Human
caaauaucucuauuua

SEQ ID NO: 3215419 - RNA, 17 nt, Human
caaauaucucuauuuaa

SEQ ID NO: 3215420 - RNA, 13 nt, Human
caaauaugcaaag

SEQ ID NO: 3215421 - RNA, 19 nt, Human
caaauauuucuagacacuu

SEQ ID NO: 3215422 - RNA, 16 nt, Human
caaauaacaacuuuuu

SEQ ID NO: 3215423 - RNA, 17 nt, Human
caaaucaaucuguaaaa

SEQ ID NO: 3215424 - RNA, 14 nt, Human
caaauguucaucaa

SEQ ID NO: 3215425 - RNA, 18 nt, Human
caaauguucaucaaugaa

SEQ ID NO: 3215426 - RNA, 23 nt, Human
caaauggaaaugggcagagcaga

SEQ ID NO: 3215427 - RNA, 20 nt, Human
caaaucaaucuguaaaacua

SEQ ID NO: 3215428 - RNA, 22 nt, Human
caaauggaaaugggcagagcag

SEQ ID NO: 3215429 - RNA, 19 nt, Human
caaauggauuccuguuuca

SEQ ID NO: 3215430 - RNA, 18 nt, Human
caaauggaguuggaguuc

SEQ ID NO: 3215431 - RNA, 21 nt, Human
caaauggaguuggaguucauu

SEQ ID NO: 3215432 - RNA, 19 nt, Human
caaauggaguuggaguuca

SEQ ID NO: 3215433 - RNA, 17 nt, Human
caacagccacucagaaa

SEQ ID NO: 3215434 - RNA, 19 nt, Human
caacagccaauauuuaaaa

SEQ ID NO: 3215435 - RNA, 17 nt, Human
caacauacucccaucug

SEQ ID NO: 3215436 - RNA, 19 nt, Human
caacauacucccaucugug

SEQ ID NO: 3215437 - RNA, 12 nt, Human
caacaggcuggg

SEQ ID NO: 3215438 - RNA, 20 nt, Human
caacauacucccaucuguga

SEQ ID NO: 3215439 - RNA, 16 nt, Human
caacauacucccaucu

SEQ ID NO: 3215440 - RNA, 12 nt, Human
caacauauacaa

SEQ ID NO: 3215441 - RNA, 18 nt, Human
caaccugcucuccucuug

SEQ ID NO: 3215442 - RNA, 23 nt, Human
caaccugcucuccucuugccacu

SEQ ID NO: 3215443 - RNA, 21 nt, Human
caaccugcucuccucuugcca

SEQ ID NO: 3215444 - RNA, 20 nt, Human
caaccuucuguggcucacag

SEQ ID NO: 3215445 - RNA, 14 nt, Human
caaccuuggcuugg

SEQ ID NO: 3215446 - RNA, 19 nt, Human
caaccuucuguggcucaca

SEQ ID NO: 3215447 - RNA, 17 nt, Human
caaccuucuguggcuca

SEQ ID NO: 3215448 - RNA, 16 nt, Human
caaccuucuguggcuc

SEQ ID NO: 3215449 - RNA, 16 nt, Human
caaccuggucacagga

SEQ ID NO: 3215450 - RNA, 17 nt, Human
caaauuuuaauuuuugc

SEQ ID NO: 3215451 - RNA, 19 nt, Human
caaauuucucuguuccaua

SEQ ID NO: 3215452 - RNA, 12 nt, Human
caaauuaauugu

SEQ ID NO: 3215453 - RNA, 16 nt, Human
caaauuaauuguguga

SEQ ID NO: 3215454 - RNA, 19 nt, Human
caaauuaauugugugaacu

SEQ ID NO: 3215455 - RNA, 20 nt, Human
caaauuaauugugugaacuu

SEQ ID NO: 3215456 - RNA, 23 nt, Human
caacagauuggauuuuauguuga

SEQ ID NO: 3215457 - RNA, 21 nt, Human
caacagauuggauuuuauguu

SEQ ID NO: 3215458 - RNA, 20 nt, Human
caacagauuggauuuuaugu

SEQ ID NO: 3215459 - RNA, 15 nt, Human
caacagauuggauuu

SEQ ID NO: 3215460 - RNA, 15 nt, Human
caacacuuuaauggg

SEQ ID NO: 3215461 - RNA, 15 nt, Human
caagaaaugaaagca

SEQ ID NO: 3215462 - RNA, 17 nt, Human
caagaaaugaaagcagg

SEQ ID NO: 3215463 - RNA, 19 nt, Human
caagaaaugaaagcaggga

SEQ ID NO: 3215464 - RNA, 13 nt, Human
caagaagcccagg

SEQ ID NO: 3215465 - RNA, 21 nt, Human
caagaagcaauguuauaaagu

SEQ ID NO: 3215466 - RNA, 13 nt, Human
caagaaaugaaga

SEQ ID NO: 3215467 - RNA, 12 nt, Human
caagaaaugaag

SEQ ID NO: 3215468 - RNA, 17 nt, Human
caagaaaugaagagcug

SEQ ID NO: 3215469 - RNA, 22 nt, Human
caacuaaaaugugucuugcugu

SEQ ID NO: 3215470 - RNA, 18 nt, Human
caacuaaaguuguacuuu

SEQ ID NO: 3215471 - RNA, 17 nt, Human
caacuugccuuugaaga

SEQ ID NO: 3215472 - RNA, 20 nt, Human
caacuaaaguuguacuuuaa

SEQ ID NO: 3215473 - RNA, 19 nt, Human
caacuugccuuugaagagu

SEQ ID NO: 3215474 - RNA, 16 nt, Human
caacuuguaaaugugg

SEQ ID NO: 3215475 - RNA, 12 nt, Human
caacuugggaac

SEQ ID NO: 3215476 - RNA, 15 nt, Human
caaccuuggcuuggc

SEQ ID NO: 3215477 - RNA, 22 nt, Human
caaccuuggcuuggcccuggca

SEQ ID NO: 3215478 - RNA, 13 nt, Human
caaccuuguuuau

SEQ ID NO: 3215479 - RNA, 21 nt, Human
caaccuuguuuauuaaauugc

SEQ ID NO: 3215480 - RNA, 21 nt, Human
caagaccuucuccuucaccuu

SEQ ID NO: 3215481 - RNA, 23 nt, Human
caagaccuucuccuucaccuuug

SEQ ID NO: 3215482 - RNA, 13 nt, Human
caagacgcugugc

SEQ ID NO: 3215483 - RNA, 16 nt, Human
caacuugccuuugaag

SEQ ID NO: 3215484 - RNA, 21 nt, Human
caagagagcagcaaggucuug

SEQ ID NO: 3215485 - RNA, 15 nt, Human
caagagagcagcaag

SEQ ID NO: 3215486 - RNA, 17 nt, Human
caagagcuuaacagugu

SEQ ID NO: 3215487 - RNA, 15 nt, Human
caagaggcaagcuga

SEQ ID NO: 3215488 - RNA, 19 nt, Human
caagaggcaagcugaaauu

SEQ ID NO: 3215489 - RNA, 20 nt, Human
caagaggcaagcugaaauuu

SEQ ID NO: 3215490 - RNA, 18 nt, Human
caaaauaagaaaagaugu

SEQ ID NO: 3215491 - RNA, 16 nt, Human
caaaauaagaaaagau

SEQ ID NO: 3215492 - RNA, 23 nt, Human
caaaauacauucuuuuugcucua

SEQ ID NO: 3215493 - RNA, 20 nt, Human
caaaauacauucuuuuugcu

SEQ ID NO: 3215494 - RNA, 22 nt, Human
caaaauaagaaaagauguagau

SEQ ID NO: 3215495 - RNA, 14 nt, Human
caaaauaauaaaaa

SEQ ID NO: 3215496 - RNA, 17 nt, Human
caaaauaauaaaaauca

SEQ ID NO: 3215497 - RNA, 11 nt, Human
caaaauacauu

SEQ ID NO: 3215498 - RNA, 22 nt, Human
caaaauacaugaugauuucaga

SEQ ID NO: 3215499 - RNA, 19 nt, Human
caaaauacaugaugauuuc

SEQ ID NO: 3215500 - RNA, 13 nt, Human
caaaauaaauugg

SEQ ID NO: 3215501 - RNA, 15 nt, Human
caaaauaagaaaaga

SEQ ID NO: 3215502 - RNA, 14 nt, Human
caaaauaagaaaag

SEQ ID NO: 3215503 - RNA, 21 nt, Human
caaaaucgaugcagugcuucc

SEQ ID NO: 3215504 - RNA, 14 nt, Human
caaaauauacaaaa

SEQ ID NO: 3215505 - RNA, 18 nt, Human
caaaauauacaaaacuuu

SEQ ID NO: 3215506 - RNA, 18 nt, Human
caaaauauugagcagaau

SEQ ID NO: 3215507 - RNA, 18 nt, Human
caaaacugcacugucaag

SEQ ID NO: 3215508 - RNA, 17 nt, Human
caaaacugcacugucaa

SEQ ID NO: 3215509 - RNA, 14 nt, Human
caaaacugcacugu

SEQ ID NO: 3215510 - RNA, 23 nt, Human
caaaacucuccucugcugcuggc

SEQ ID NO: 3215511 - RNA, 22 nt, Human
caaaaguuauuaaaauuguugu

SEQ ID NO: 3215512 - RNA, 18 nt, Human
caaaaguuauuaaaauug

SEQ ID NO: 3215513 - RNA, 16 nt, Human
caaaaguuauuaaaau

SEQ ID NO: 3215514 - RNA, 12 nt, Human
caaaaguuauua

SEQ ID NO: 3215515 - RNA, 14 nt, Human
caaaaguuucucuu

SEQ ID NO: 3215516 - RNA, 18 nt, Human
caaaaguuuguuugcuua

SEQ ID NO: 3215517 - RNA, 15 nt, Human
caaaacgguuuuacu

SEQ ID NO: 3215518 - RNA, 21 nt, Human
caaaacgguuuuacugcagcu

SEQ ID NO: 3215519 - RNA, 23 nt, Human
auuuuauuuugaaauggaaauua

SEQ ID NO: 3215520 - RNA, 22 nt, Human
auuuuauuuugaaauggaaauu

SEQ ID NO: 3215521 - RNA, 15 nt, Human
caaaacucuccucug

SEQ ID NO: 3215522 - RNA, 16 nt, Human
caaaacucuccucugc

SEQ ID NO: 3215523 - RNA, 21 nt, Human
caaacucuugaccucagguga

SEQ ID NO: 3215524 - RNA, 16 nt, Human
caaacugaaaagcuga

SEQ ID NO: 3215525 - RNA, 20 nt, Human
caaacucuugaccucaggug

SEQ ID NO: 3215526 - RNA, 19 nt, Human
caaacucuugaccucaggu

SEQ ID NO: 3215527 - RNA, 17 nt, Human
caaacucuugaccucag

SEQ ID NO: 3215528 - RNA, 22 nt, Human
caaaccuuucuauaauuuuaca

SEQ ID NO: 3215529 - RNA, 13 nt, Human
caaaccugugaag

SEQ ID NO: 3215530 - RNA, 20 nt, Human
caaaccuuucuauaauuuua

SEQ ID NO: 3215531 - RNA, 19 nt, Human
caaaccuuucuauaauuuu

SEQ ID NO: 3215532 - RNA, 13 nt, Human
caaaccuuucccc

SEQ ID NO: 3215533 - RNA, 12 nt, Human
caaaccuuuccc

SEQ ID NO: 3215534 - RNA, 15 nt, Human
caaaccuuuaacuaa

SEQ ID NO: 3215535 - RNA, 13 nt, Human
caaacagaggccg

SEQ ID NO: 3215536 - RNA, 21 nt, Human
caaacacuugugacuuuugcu

SEQ ID NO: 3215537 - RNA, 20 nt, Human
caaacaagcauauaaaaugg

SEQ ID NO: 3215538 - RNA, 18 nt, Human
caaacaagcauauaaaau

SEQ ID NO: 3215539 - RNA, 16 nt, Human
caaacaagcauauaaa

SEQ ID NO: 3215540 - RNA, 21 nt, Human
caaacaaaagcugaacacauu

SEQ ID NO: 3215541 - RNA, 11 nt, Human
caaaaugaaac

SEQ ID NO: 3215542 - RNA, 22 nt, Human
caaaaugaaacgcaaccaccac

SEQ ID NO: 3215543 - RNA, 21 nt, Human
caaaaugagcccuguccugcc

SEQ ID NO: 3215544 - RNA, 20 nt, Human
caaaaugagaucucauuaaa

SEQ ID NO: 3215545 - RNA, 12 nt, Human
caaaauuuuaaa

SEQ ID NO: 3215546 - RNA, 14 nt, Human
caaaauuuuaaaaa

SEQ ID NO: 3215547 - RNA, 16 nt, Human
caaaauuuuaaaaaag

SEQ ID NO: 3215548 - RNA, 15 nt, Human
cacaggcccuuccuc

SEQ ID NO: 3215549 - RNA, 19 nt, Human
cacaggcccuuccucucca

SEQ ID NO: 3215550 - RNA, 18 nt, Human
cacaggcccuuccucucc

SEQ ID NO: 3215551 - RNA, 17 nt, Human
cacaggcccuuccucuc

SEQ ID NO: 3215552 - RNA, 16 nt, Human
cacaggcccuuccucu

SEQ ID NO: 3215553 - RNA, 12 nt, Human
cacagcugcuca

SEQ ID NO: 3215554 - RNA, 22 nt, Human
cacagcugcucaauaaaguaca

SEQ ID NO: 3215555 - RNA, 18 nt, Human
cacagcugcucugugacc

SEQ ID NO: 3215556 - RNA, 14 nt, Human
cacagcuuguuuug

SEQ ID NO: 3215557 - RNA, 16 nt, Human
cacagcuuguuuugga

SEQ ID NO: 3215558 - RNA, 20 nt, Human
cacagcuuguuuuggacuuu

SEQ ID NO: 3215559 - RNA, 16 nt, Human
cacaggaaaagaauuu

SEQ ID NO: 3215560 - RNA, 19 nt, Human
cacagugcaucucagccca

SEQ ID NO: 3215561 - RNA, 18 nt, Human
cacagugcaucucagccc

SEQ ID NO: 3215562 - RNA, 17 nt, Human
cacagugcaucucagcc

SEQ ID NO: 3215563 - RNA, 21 nt, Human
cacaggcccuuccucuccacu

SEQ ID NO: 3215564 - RNA, 17 nt, Human
cacaguucaauucucau

SEQ ID NO: 3215565 - RNA, 15 nt, Human
cacaguuauuacaua

SEQ ID NO: 3215566 - RNA, 13 nt, Human
cacaguuauuaca

SEQ ID NO: 3215567 - RNA, 13 nt, Human
ugaaacagacuug

SEQ ID NO: 3215568 - RNA, 24 nt, Human
ugaaacauguugccaaaauggugg

SEQ ID NO: 3215569 - RNA, 20 nt, Human
ugaaacaugcuuguguuucu

SEQ ID NO: 3215570 - RNA, 12 nt, Human
ugaaacaugcuu

SEQ ID NO: 3215571 - RNA, 14 nt, Human
ugaaacagacuugu

SEQ ID NO: 3215572 - RNA, 23 nt, Human
ugaacuggguacuuguggacaca

SEQ ID NO: 3215573 - RNA, 19 nt, Human
ugaacuuacaggugauuaa

SEQ ID NO: 3215574 - RNA, 12 nt, Human
ugaacuuaacau

SEQ ID NO: 3215575 - RNA, 14 nt, Human
ugaacuuaacaugc

SEQ ID NO: 3215576 - RNA, 15 nt, Human
ugaacuuaacaugcu

SEQ ID NO: 3215577 - RNA, 17 nt, Human
ugaacuuaacaugcugu

SEQ ID NO: 3215578 - RNA, 19 nt, Human
ugaacuuaacaugcugugu

SEQ ID NO: 3215579 - RNA, 21 nt, Human
ugaacuuaacaugcuguguaa

SEQ ID NO: 3215580 - RNA, 17 nt, Human
ugaacuguuagaaugua

SEQ ID NO: 3215581 - RNA, 16 nt, Human
ugaacuguuagaaugu

SEQ ID NO: 3215582 - RNA, 14 nt, Human
ugaacuguuagaau

SEQ ID NO: 3215583 - RNA, 13 nt, Human
ugaacuguuagaa

SEQ ID NO: 3215584 - RNA, 17 nt, Human
ugaaacauugcuuuuaa

SEQ ID NO: 3215585 - RNA, 16 nt, Human
ugaaacauugcuuuua

SEQ ID NO: 3215586 - RNA, 19 nt, Human
ugaacuuccugcuuccuca

SEQ ID NO: 3215587 - RNA, 20 nt, Human
ugaagacucauucuucugua

SEQ ID NO: 3215588 - RNA, 19 nt, Human
ugaagacucauucuucugu

SEQ ID NO: 3215589 - RNA, 16 nt, Human
ugaaggaaccaaagcg

SEQ ID NO: 3215590 - RNA, 16 nt, Human
ugaaggcuggguucug

SEQ ID NO: 3215591 - RNA, 19 nt, Human
ugaaggccccgcccaggcu

SEQ ID NO: 3215592 - RNA, 20 nt, Human
ugaaggccccgcccaggcuu

SEQ ID NO: 3215593 - RNA, 13 nt, Human
ugaaggaaaaauu

SEQ ID NO: 3215594 - RNA, 14 nt, Human
ugaaggaaaaauuc

SEQ ID NO: 3215595 - RNA, 18 nt, Human
ugaaggccccgcccaggc

SEQ ID NO: 3215596 - RNA, 20 nt, Human
ugaagagaagggcagggcug

SEQ ID NO: 3215597 - RNA, 22 nt, Human
ugaagagaagggcagggcugag

SEQ ID NO: 3215598 - RNA, 14 nt, Human
ugaagacuccagaa

SEQ ID NO: 3215599 - RNA, 13 nt, Human
ugaagacuccaga

SEQ ID NO: 3215600 - RNA, 15 nt, Human
ugaagagcuagagaa

SEQ ID NO: 3215601 - RNA, 18 nt, Human
ugaagagcuggggagaau

SEQ ID NO: 3215602 - RNA, 17 nt, Human
ugaagagcuggggagaa

SEQ ID NO: 3215603 - RNA, 23 nt, Human
ugaagagcaagagagcagcaagg

SEQ ID NO: 3215604 - RNA, 15 nt, Human
ugaagacuccagaaa

SEQ ID NO: 3215605 - RNA, 12 nt, Human
ugaagagacaga

SEQ ID NO: 3215606 - RNA, 19 nt, Human
ugaagagacagagacaagu

SEQ ID NO: 3215607 - RNA, 21 nt, Human
ugaagagacagagacaaguaa

SEQ ID NO: 3215608 - RNA, 23 nt, Human
ugaagagacagagacaaguaauu

SEQ ID NO: 3215609 - RNA, 18 nt, Human
ugaagagcuguugauggg

SEQ ID NO: 3215610 - RNA, 20 nt, Human
ugaaggcuggguucugaucc

SEQ ID NO: 3215611 - RNA, 21 nt, Human
ugaaggcuggguucugauccu

SEQ ID NO: 3215612 - RNA, 13 nt, Human
ugaaguuucaagu

SEQ ID NO: 3215613 - RNA, 21 nt, Human
ugaaguuucaaguuuuaaagu

SEQ ID NO: 3215614 - RNA, 22 nt, Human
ugaaguuucaaguuuuaaaguu

SEQ ID NO: 3215615 - RNA, 23 nt, Human
ugaaguuucaaguuuuaaaguuc

SEQ ID NO: 3215616 - RNA, 21 nt, Human
ugaaucagaauaaccuucaaa

SEQ ID NO: 3215617 - RNA, 17 nt, Human
ugaaucagacaguggau

SEQ ID NO: 3215618 - RNA, 22 nt, Human
ugaaguuugauaaauaguguua

SEQ ID NO: 3215619 - RNA, 20 nt, Human
ugaaguuugauaaauagugu

SEQ ID NO: 3215620 - RNA, 15 nt, Human
ugaaguuugauaaau

SEQ ID NO: 3215621 - RNA, 14 nt, Human
ugaaguuugauaaa

SEQ ID NO: 3215622 - RNA, 12 nt, Human
ugaaucuguaca

SEQ ID NO: 3215623 - RNA, 14 nt, Human
ugaaucuguacaga

SEQ ID NO: 3215624 - RNA, 13 nt, Human
ugaaucuguacag

SEQ ID NO: 3215625 - RNA, 19 nt, Human
ugaaucugagagaugcugu

SEQ ID NO: 3215626 - RNA, 16 nt, Human
ugaaucuuggugucua

SEQ ID NO: 3215627 - RNA, 22 nt, Human
ugaaucuucugaaaccaaaugu

SEQ ID NO: 3215628 - RNA, 14 nt, Human
ugaaucuucugaaa

SEQ ID NO: 3215629 - RNA, 15 nt, Human
ugaaugaauggcuaa

SEQ ID NO: 3215630 - RNA, 23 nt, Human
ugaaugaugauccuaggcauuug

SEQ ID NO: 3215631 - RNA, 16 nt, Human
ugaaugaagcaguauu

SEQ ID NO: 3215632 - RNA, 22 nt, Human
ugacagagagagauacucuggg

SEQ ID NO: 3215633 - RNA, 21 nt, Human
ugacagagagagauacucugg

SEQ ID NO: 3215634 - RNA, 20 nt, Human
ugacagagagagauacucug

SEQ ID NO: 3215635 - RNA, 18 nt, Human
ugacagacacaggcccgg

SEQ ID NO: 3215636 - RNA, 17 nt, Human
ugacagacacaggcccg

SEQ ID NO: 3215637 - RNA, 22 nt, Human
ugacagagcaagugagacccug

SEQ ID NO: 3215638 - RNA, 23 nt, Human
ugacagagagagauacucuggga

SEQ ID NO: 3215639 - RNA, 14 nt, Human
ugacagagccugcc

SEQ ID NO: 3215640 - RNA, 20 nt, Human
ugacagagccugccccagcg

SEQ ID NO: 3215641 - RNA, 16 nt, Human
ugacagagccugcccc

SEQ ID NO: 3215642 - RNA, 23 nt, Human
ugacaucaacugcaucaagaugu

SEQ ID NO: 3215643 - RNA, 23 nt, Human
ugacagagccugccccagcgcug

SEQ ID NO: 3215644 - RNA, 22 nt, Human
ugacagagccugccccagcgcu

SEQ ID NO: 3215645 - RNA, 18 nt, Human
ugacauccacaaaugcag

SEQ ID NO: 3215646 - RNA, 18 nt, Human
ugacaucacuggcauggu

SEQ ID NO: 3215647 - RNA, 17 nt, Human
ugacaucacuggcaugg

SEQ ID NO: 3215648 - RNA, 16 nt, Human
ugacaucacuggcaug

SEQ ID NO: 3215649 - RNA, 14 nt, Human
ugacaucacuggca

SEQ ID NO: 3215650 - RNA, 15 nt, Human
ugacauauuggcucu

SEQ ID NO: 3215651 - RNA, 15 nt, Human
ugacauauuuuugcu

SEQ ID NO: 3215652 - RNA, 16 nt, Human
ugaccacugcagaaga

SEQ ID NO: 3215653 - RNA, 17 nt, Human
ugaccacugcagaagac

SEQ ID NO: 3215654 - RNA, 20 nt, Human
ugaccagcaccaucucuccu

SEQ ID NO: 3215655 - RNA, 22 nt, Human
ugaccagccuccaugcugccuc

SEQ ID NO: 3215656 - RNA, 15 nt, Human
ugaccaucauuucac

SEQ ID NO: 3215657 - RNA, 21 nt, Human
ugaccagccuccaugcugccu

SEQ ID NO: 3215658 - RNA, 22 nt, Human
ugacaucucuauuccccacccu

SEQ ID NO: 3215659 - RNA, 15 nt, Human
ugacauggaaaugaa

SEQ ID NO: 3215660 - RNA, 16 nt, Human
ugacauggaaaugaag

SEQ ID NO: 3215661 - RNA, 19 nt, Human
ugacauguguuggcagccu

SEQ ID NO: 3215662 - RNA, 15 nt, Human
ugacacacagcucug

SEQ ID NO: 3215663 - RNA, 14 nt, Human
ugacacacagcucu

SEQ ID NO: 3215664 - RNA, 16 nt, Human
ugacacaacuguguga

SEQ ID NO: 3215665 - RNA, 22 nt, Human
ugacacaacugugugauuaaaa

SEQ ID NO: 3215666 - RNA, 13 nt, Human
ugacagacacagg

SEQ ID NO: 3215667 - RNA, 16 nt, Human
ugacagacacaggccc

SEQ ID NO: 3215668 - RNA, 14 nt, Human
ugacagacacaggc

SEQ ID NO: 3215669 - RNA, 16 nt, Human
ugacaaccauuaaagu

SEQ ID NO: 3215670 - RNA, 17 nt, Human
ugacaaccauuaaaguc

SEQ ID NO: 3215671 - RNA, 19 nt, Human
ugacaaccauuaaagucag

SEQ ID NO: 3215672 - RNA, 21 nt, Human
ugacaaccauuaaagucagaa

SEQ ID NO: 3215673 - RNA, 23 nt, Human
ugacaaggauugcuacuguccua

SEQ ID NO: 3215674 - RNA, 18 nt, Human
ugacaaggauugcuacug

SEQ ID NO: 3215675 - RNA, 17 nt, Human
ugacaaguuuaaaggcu

SEQ ID NO: 3215676 - RNA, 13 nt, Human
ugacaacacucau

SEQ ID NO: 3215677 - RNA, 15 nt, Human
ugacaaauguuucua

SEQ ID NO: 3215678 - RNA, 14 nt, Human
ugacaaauguuucu

SEQ ID NO: 3215679 - RNA, 23 nt, Human
ugacaacacucauugaccugagg

SEQ ID NO: 3215680 - RNA, 15 nt, Human
ugacaacagacuucu

SEQ ID NO: 3215681 - RNA, 21 nt, Human
ugacaaauguuucuaagguaa

SEQ ID NO: 3215682 - RNA, 17 nt, Human
ugacaaauuuuaauuau

SEQ ID NO: 3215683 - RNA, 19 nt, Human
ugacaaauguuucuaaggu

SEQ ID NO: 3215684 - RNA, 17 nt, Human
ugacaaauguuucuaag

SEQ ID NO: 3215685 - RNA, 18 nt, Human
ugacaacagacuucugaa

SEQ ID NO: 3215686 - RNA, 19 nt, Human
ugacaacagacuucugaaa

SEQ ID NO: 3215687 - RNA, 13 nt, Human
ugaauuguaagga

SEQ ID NO: 3215688 - RNA, 21 nt, Human
ugaauuguaaggaaugauuaa

SEQ ID NO: 3215689 - RNA, 19 nt, Human
ugaauuaauuaauuuggag

SEQ ID NO: 3215690 - RNA, 21 nt, Human
ugacucuuucuauuguuucuu

SEQ ID NO: 3215691 - RNA, 16 nt, Human
ugacucuuuauugucu

SEQ ID NO: 3215692 - RNA, 17 nt, Human
ugacucuuuauugucug

SEQ ID NO: 3215693 - RNA, 18 nt, Human
ugacucuuuauugucugu

SEQ ID NO: 3215694 - RNA, 20 nt, Human
ugacucuuuauugucuguaa

SEQ ID NO: 3215695 - RNA, 21 nt, Human
ugacucuuuauugucuguaaa

SEQ ID NO: 3215696 - RNA, 19 nt, Human
ugacugaacgauccuucaa

SEQ ID NO: 3215697 - RNA, 21 nt, Human
ugacugaacgauccuucaaag

SEQ ID NO: 3215698 - RNA, 22 nt, Human
ugacugaacgauccuucaaagu

SEQ ID NO: 3215699 - RNA, 22 nt, Human
ugacucuugaguuguuuuugua

SEQ ID NO: 3215700 - RNA, 23 nt, Human
ugacucuugaguuguuuuuguau

SEQ ID NO: 3215701 - RNA, 14 nt, Human
ugacugaacuguaa

SEQ ID NO: 3215702 - RNA, 16 nt, Human
ugacuuuccucuuugg

SEQ ID NO: 3215703 - RNA, 14 nt, Human
ugacuuugaaaaua

SEQ ID NO: 3215704 - RNA, 14 nt, Human
ugacugggggcaga

SEQ ID NO: 3215705 - RNA, 14 nt, Human
ugacucuugaguug

SEQ ID NO: 3215706 - RNA, 18 nt, Human
ugacucuuccccaggaag

SEQ ID NO: 3215707 - RNA, 19 nt, Human
ugacucuugaguuguuuuu

SEQ ID NO: 3215708 - RNA, 21 nt, Human
ugacucuugaguuguuuuugu

SEQ ID NO: 3215709 - RNA, 14 nt, Human
ugacuacagggccg

SEQ ID NO: 3215710 - RNA, 13 nt, Human
ugacuacagggcc

SEQ ID NO: 3215711 - RNA, 17 nt, Human
ugacgugucaggaaaac

SEQ ID NO: 3215712 - RNA, 13 nt, Human
ugaccauucucca

SEQ ID NO: 3215713 - RNA, 15 nt, Human
ugaccaugcauuuua

SEQ ID NO: 3215714 - RNA, 19 nt, Human
ugaccaugcauuuuaccau

SEQ ID NO: 3215715 - RNA, 15 nt, Human
ugagcaggauuuuaa

SEQ ID NO: 3215716 - RNA, 12 nt, Human
ugagcagcaccc

SEQ ID NO: 3215717 - RNA, 20 nt, Human
ugagcaggauuuuaaucuuu

SEQ ID NO: 3215718 - RNA, 15 nt, Human
ugagauacuuugcau

SEQ ID NO: 3215719 - RNA, 18 nt, Human
ugagauacuuugcauugu

SEQ ID NO: 3215720 - RNA, 21 nt, Human
ugagauacuuugcauugucug

SEQ ID NO: 3215721 - RNA, 22 nt, Human
ugagauacuuugcauugucugu

SEQ ID NO: 3215722 - RNA, 14 nt, Human
ugagaggggaacag

SEQ ID NO: 3215723 - RNA, 19 nt, Human
ugagaggcugucuguugua

SEQ ID NO: 3215724 - RNA, 18 nt, Human
ugagaggggaacagacug

SEQ ID NO: 3215725 - RNA, 14 nt, Human
ugagaccaaccugg

SEQ ID NO: 3215726 - RNA, 12 nt, Human
ugagaccugccc

SEQ ID NO: 3215727 - RNA, 13 nt, Human
ugagaccugcccc

SEQ ID NO: 3215728 - RNA, 14 nt, Human
ugagaccugccccu

SEQ ID NO: 3215729 - RNA, 15 nt, Human
ugagaccugccccuc

SEQ ID NO: 3215730 - RNA, 22 nt, Human
ugagaccugccccuccucucug

SEQ ID NO: 3215731 - RNA, 20 nt, Human
ugagaaagacuauucaaaca

SEQ ID NO: 3215732 - RNA, 15 nt, Human
ugagaaauaaaguuu

SEQ ID NO: 3215733 - RNA, 13 nt, Human
ugagacauauuua

SEQ ID NO: 3215734 - RNA, 22 nt, Human
ugacuuuucuguccgagcuuug

SEQ ID NO: 3215735 - RNA, 23 nt, Human
ugacuuuucaaguauuuaagccu

SEQ ID NO: 3215736 - RNA, 16 nt, Human
ugacuuuucaaguauu

SEQ ID NO: 3215737 - RNA, 21 nt, Human
ugacuuuugcuuuaauuccau

SEQ ID NO: 3215738 - RNA, 17 nt, Human
ugacuuuugcuuuaauu

SEQ ID NO: 3215739 - RNA, 16 nt, Human
ugacuuuugcuuuaau

SEQ ID NO: 3215740 - RNA, 14 nt, Human
ugacuuuugcuuua

SEQ ID NO: 3215741 - RNA, 13 nt, Human
ugacuuuugcuuu

SEQ ID NO: 3215742 - RNA, 15 nt, Human
ugacuuuuuuucacu

SEQ ID NO: 3215743 - RNA, 18 nt, Human
ugagaaaaccccuuccca

SEQ ID NO: 3215744 - RNA, 14 nt, Human
ugagaaaacuguga

SEQ ID NO: 3215745 - RNA, 22 nt, Human
ugagaaaacugugaccaaguau

SEQ ID NO: 3215746 - RNA, 22 nt, Human
ugaggaugaaaaaauaacacug

SEQ ID NO: 3215747 - RNA, 21 nt, Human
ugaggauuaguuuagaacagg

SEQ ID NO: 3215748 - RNA, 19 nt, Human
ugaggauuaguuuagaaca

SEQ ID NO: 3215749 - RNA, 20 nt, Human
ugaggauuaguuuagaacag

SEQ ID NO: 3215750 - RNA, 17 nt, Human
ugaggauuaguuuagaa

SEQ ID NO: 3215751 - RNA, 13 nt, Human
ugaggaugaugua

SEQ ID NO: 3215752 - RNA, 14 nt, Human
ugaggaugauguac

SEQ ID NO: 3215753 - RNA, 15 nt, Human
ugagcugcaccaggu

SEQ ID NO: 3215754 - RNA, 23 nt, Human
ugagcuuaagaauuuugagcagg

SEQ ID NO: 3215755 - RNA, 17 nt, Human
ugagcuuacguaguucu

SEQ ID NO: 3215756 - RNA, 18 nt, Human
ugagcuuacguaguucua

SEQ ID NO: 3215757 - RNA, 21 nt, Human
ugaggaggccuugggcucugc

SEQ ID NO: 3215758 - RNA, 15 nt, Human
ugaggaguaaaauuc

SEQ ID NO: 3215759 - RNA, 16 nt, Human
ugaggaguaaaauuca

SEQ ID NO: 3215760 - RNA, 23 nt, Human
ugaggaggccuugggcucugcug

SEQ ID NO: 3215761 - RNA, 22 nt, Human
ugagccgagaucacgccacugc

SEQ ID NO: 3215762 - RNA, 23 nt, Human
ugagcagggcucagcggggacag

SEQ ID NO: 3215763 - RNA, 22 nt, Human
ugagcagggcucagcggggaca

SEQ ID NO: 3215764 - RNA, 20 nt, Human
ugagcagggcucagcgggga

SEQ ID NO: 3215765 - RNA, 23 nt, Human
ugagccgagaucacgccacugca

SEQ ID NO: 3215766 - RNA, 14 nt, Human
ugagccgcagagaa

SEQ ID NO: 3215767 - RNA, 11 nt, Human
ugagcucagga

SEQ ID NO: 3215768 - RNA, 19 nt, Human
ugagcucaggaguuugaga

SEQ ID NO: 3215769 - RNA, 11 nt, Human
ugagcucagcc

SEQ ID NO: 3215770 - RNA, 12 nt, Human
ugagcucagccc

SEQ ID NO: 3215771 - RNA, 17 nt, Human
ugagcugaaagaggcca

SEQ ID NO: 3215772 - RNA, 20 nt, Human
ugagcucagcccuggugggc

SEQ ID NO: 3215773 - RNA, 13 nt, Human
ugaggcagguccc

SEQ ID NO: 3215774 - RNA, 20 nt, Human
ugaggcagcacgugcacaaa

SEQ ID NO: 3215775 - RNA, 18 nt, Human
ugaggcucugcccuuggu

SEQ ID NO: 3215776 - RNA, 15 nt, Human
ugaggcugggcuccc

SEQ ID NO: 3215777 - RNA, 16 nt, Human
ugaggcugggcucccu

SEQ ID NO: 3215778 - RNA, 16 nt, Human
ugaggcucugcccuug

SEQ ID NO: 3215779 - RNA, 15 nt, Human
ugaggcucugcccuu

SEQ ID NO: 3215780 - RNA, 19 nt, Human
ugaggucagagccugcagu

SEQ ID NO: 3215781 - RNA, 18 nt, Human
ugaggucagagccugcag

SEQ ID NO: 3215782 - RNA, 21 nt, Human
ugaggcugggcucccuuccca

SEQ ID NO: 3215783 - RNA, 21 nt, Human
ugaggugaugaagacagcccg

SEQ ID NO: 3215784 - RNA, 21 nt, Human
ugaggugggaggaucucuuga

SEQ ID NO: 3215785 - RNA, 20 nt, Human
ugagucccaggcugagccuc

SEQ ID NO: 3215786 - RNA, 21 nt, Human
ugagucccaggcugagccuca

SEQ ID NO: 3215787 - RNA, 19 nt, Human
ugagucccaggcugagccu

SEQ ID NO: 3215788 - RNA, 14 nt, Human
ugaaaauucagugg

SEQ ID NO: 3215789 - RNA, 13 nt, Human
ugaaaauugaaaa

SEQ ID NO: 3215790 - RNA, 16 nt, Human
ugaaaauugaaaagua

SEQ ID NO: 3215791 - RNA, 17 nt, Human
ugaaaauugaaaaguac

SEQ ID NO: 3215792 - RNA, 18 nt, Human
ugaaaauugccuuucugu

SEQ ID NO: 3215793 - RNA, 23 nt, Human
ugaaaauugccuuucuguguuua

SEQ ID NO: 3215794 - RNA, 22 nt, Human
ugaaaauugccuuucuguguuu

SEQ ID NO: 3215795 - RNA, 19 nt, Human
ugaaaauugccuuucugug

SEQ ID NO: 3215796 - RNA, 19 nt, Human
ugaaaagaaaaaugagccu

SEQ ID NO: 3215797 - RNA, 15 nt, Human
ugaaaagaaaaauga

SEQ ID NO: 3215798 - RNA, 20 nt, Human
ugaaaagaaaaaugagccug

SEQ ID NO: 3215799 - RNA, 20 nt, Human
ugaaaauuaggauuucauga

SEQ ID NO: 3215800 - RNA, 22 nt, Human
ugaaaacacuguucucugcccu

SEQ ID NO: 3215801 - RNA, 23 nt, Human
ugaaaacacuguucucugcccuc

SEQ ID NO: 3215802 - RNA, 15 nt, Human
ugaaaacagaaauug

SEQ ID NO: 3215803 - RNA, 14 nt, Human
ugaaaacagaaauu

SEQ ID NO: 3215804 - RNA, 22 nt, Human
ugaaaacagaaauugguaccuu

SEQ ID NO: 3215805 - RNA, 21 nt, Human
ugaaaacagaaauugguaccu

SEQ ID NO: 3215806 - RNA, 18 nt, Human
ugaaaacagaaauuggua

SEQ ID NO: 3215807 - RNA, 17 nt, Human
ugaaaacagaaauuggu

SEQ ID NO: 3215808 - RNA, 18 nt, Human
ugaaaaccaacaccauca

SEQ ID NO: 3215809 - RNA, 17 nt, Human
ugaaaacacuguucucu

SEQ ID NO: 3215810 - RNA, 20 nt, Human
ugaaaacacuguucucugcc

SEQ ID NO: 3215811 - RNA, 21 nt, Human
ugaaaacacuguucucugccc

SEQ ID NO: 3215812 - RNA, 15 nt, Human
ucuuuuguuguuucu

SEQ ID NO: 3215813 - RNA, 18 nt, Human
ucuuuuguuguuucuuaa

SEQ ID NO: 3215814 - RNA, 13 nt, Human
ucuuuuuaaagcu

SEQ ID NO: 3215815 - RNA, 21 nt, Human
ucuuuuguuuuuugaaguguu

SEQ ID NO: 3215816 - RNA, 18 nt, Human
ucuuuuguuuuuugaagu

SEQ ID NO: 3215817 - RNA, 19 nt, Human
ucuuuuguuacucuuggga

SEQ ID NO: 3215818 - RNA, 21 nt, Human
ucuuuuguccugcaucaucuu

SEQ ID NO: 3215819 - RNA, 13 nt, Human
ucuuuuccucgcu

SEQ ID NO: 3215820 - RNA, 19 nt, Human
ucuuuuccaaacacaggca

SEQ ID NO: 3215821 - RNA, 12 nt, Human
ucuuucccuccc

SEQ ID NO: 3215822 - RNA, 14 nt, Human
ucuuuccaaauuau

SEQ ID NO: 3215823 - RNA, 18 nt, Human
ucuuuccaaauuauuucu

SEQ ID NO: 3215824 - RNA, 19 nt, Human
ucuuuccaaauuauuucuu

SEQ ID NO: 3215825 - RNA, 20 nt, Human
ucuuuccaaauuauuucuua

SEQ ID NO: 3215826 - RNA, 13 nt, Human
ucuuucccucccu

SEQ ID NO: 3215827 - RNA, 14 nt, Human
ucuuugaauuuuca

SEQ ID NO: 3215828 - RNA, 13 nt, Human
ucuuugaauuuuc

SEQ ID NO: 3215829 - RNA, 13 nt, Human
ucuuguguguuua

SEQ ID NO: 3215830 - RNA, 17 nt, Human
ucuuguguauuucaguu

SEQ ID NO: 3215831 - RNA, 14 nt, Human
ucuuuggacccuga

SEQ ID NO: 3215832 - RNA, 15 nt, Human
ucuuuggacccugag

SEQ ID NO: 3215833 - RNA, 13 nt, Human
ucuuuggacccug

SEQ ID NO: 3215834 - RNA, 22 nt, Human
ucuuugcccuuuacuugucuuu

SEQ ID NO: 3215835 - RNA, 15 nt, Human
ucuuugcccuuuacu

SEQ ID NO: 3215836 - RNA, 13 nt, Human
ucuuugcccuuua

SEQ ID NO: 3215837 - RNA, 17 nt, Human
ucuuugcagacaggcaa

SEQ ID NO: 3215838 - RNA, 14 nt, Human
ucuuugcagacagg

SEQ ID NO: 3215839 - RNA, 18 nt, Human
ucuuugcacuuuuucuua

SEQ ID NO: 3215840 - RNA, 21 nt, Human
ucuuugcccccaaacccccau

SEQ ID NO: 3215841 - RNA, 20 nt, Human
ucuuugccaucucugcucca

SEQ ID NO: 3215842 - RNA, 19 nt, Human
ucuuugccaucucugcucc

SEQ ID NO: 3215843 - RNA, 18 nt, Human
ucuuugccaucucugcuc

SEQ ID NO: 3215844 - RNA, 17 nt, Human
ucuuugccaucucugcu

SEQ ID NO: 3215845 - RNA, 16 nt, Human
ucuuugccaucucugc

SEQ ID NO: 3215846 - RNA, 13 nt, Human
ucuuugccaucuc

SEQ ID NO: 3215847 - RNA, 20 nt, Human
ucuuugcacuuuuucuuaau

SEQ ID NO: 3215848 - RNA, 23 nt, Human
ucuuugagugaagcugggagaac

SEQ ID NO: 3215849 - RNA, 21 nt, Human
ucuuugaauuuucauuuuaca

SEQ ID NO: 3215850 - RNA, 19 nt, Human
ucuuugaauuuucauuuua

SEQ ID NO: 3215851 - RNA, 16 nt, Human
ucuuugaauuuucauu

SEQ ID NO: 3215852 - RNA, 15 nt, Human
ucuuugaauuuucau

SEQ ID NO: 3215853 - RNA, 13 nt, Human
ucuuugcagacag

SEQ ID NO: 3215854 - RNA, 22 nt, Human
ucuucauuaccucagugagaag

SEQ ID NO: 3215855 - RNA, 19 nt, Human
ucuucauuuuuuuuaauug

SEQ ID NO: 3215856 - RNA, 21 nt, Human
ucuuccaaagcagagagcauu

SEQ ID NO: 3215857 - RNA, 16 nt, Human
ucuucauguucaauua

SEQ ID NO: 3215858 - RNA, 16 nt, Human
ucuucauguucccacu

SEQ ID NO: 3215859 - RNA, 14 nt, Human
ucuucauguuccca

SEQ ID NO: 3215860 - RNA, 19 nt, Human
ucuucauguucccacuuca

SEQ ID NO: 3215861 - RNA, 20 nt, Human
ucuucauguaaauugacugu

SEQ ID NO: 3215862 - RNA, 23 nt, Human
ucuucauguaaauugacuguacu

SEQ ID NO: 3215863 - RNA, 22 nt, Human
ucuucaguuaagccuuuggaaa

SEQ ID NO: 3215864 - RNA, 19 nt, Human
ucuucaguuaagccuuugg

SEQ ID NO: 3215865 - RNA, 20 nt, Human
ucuucaguuaagccuuugga

SEQ ID NO: 3215866 - RNA, 22 nt, Human
ucuuauccaacaucaacaucuu

SEQ ID NO: 3215867 - RNA, 16 nt, Human
ucuuaucucagauauu

SEQ ID NO: 3215868 - RNA, 20 nt, Human
ucuuauacagauaaaacaug

SEQ ID NO: 3215869 - RNA, 21 nt, Human
ucuuauauuuacaacacuuua

SEQ ID NO: 3215870 - RNA, 21 nt, Human
ucuucagagacuccugcaggc

SEQ ID NO: 3215871 - RNA, 21 nt, Human
ucuuaucucagauauuugcac

SEQ ID NO: 3215872 - RNA, 20 nt, Human
ucuuaucucagauauuugca

SEQ ID NO: 3215873 - RNA, 11 nt, Human
ucugugugugu

SEQ ID NO: 3215874 - RNA, 14 nt, Human
ucuuagauguauau

SEQ ID NO: 3215875 - RNA, 15 nt, Human
ucuuagauguauaua

SEQ ID NO: 3215876 - RNA, 20 nt, Human
ucugugucagguggggcagc

SEQ ID NO: 3215877 - RNA, 17 nt, Human
ucugugucagguggggc

SEQ ID NO: 3215878 - RNA, 20 nt, Human
ucuuagguuggcaaaaaggc

SEQ ID NO: 3215879 - RNA, 23 nt, Human
ucuuagguuggcaaaaaggcagg

SEQ ID NO: 3215880 - RNA, 20 nt, Human
ucuuguaucuggauucaaau

SEQ ID NO: 3215881 - RNA, 23 nt, Human
ucuugcucugcugacagacacag

SEQ ID NO: 3215882 - RNA, 15 nt, Human
ucuugcucugcugac

SEQ ID NO: 3215883 - RNA, 23 nt, Human
ucuugcauggcaaggacugcagg

SEQ ID NO: 3215884 - RNA, 14 nt, Human
ucuugcauuucacu

SEQ ID NO: 3215885 - RNA, 23 nt, Human
ucuugcauuuaaaagacagcuuu

SEQ ID NO: 3215886 - RNA, 17 nt, Human
ucuugccacugccucuu

SEQ ID NO: 3215887 - RNA, 16 nt, Human
ucuugccacugccucu

SEQ ID NO: 3215888 - RNA, 14 nt, Human
ucuugcucugcuga

SEQ ID NO: 3215889 - RNA, 18 nt, Human
ucuugaacugagcuugga

SEQ ID NO: 3215890 - RNA, 16 nt, Human
ucuugaaggaaaaauu

SEQ ID NO: 3215891 - RNA, 15 nt, Human
ucuugcaugaggcua

SEQ ID NO: 3215892 - RNA, 22 nt, Human
ucuugaaggaaaaauucaauag

SEQ ID NO: 3215893 - RNA, 19 nt, Human
ucuugaaggaaaaauucaa

SEQ ID NO: 3215894 - RNA, 18 nt, Human
ucuugaaggaaaaauuca

SEQ ID NO: 3215895 - RNA, 17 nt, Human
ucuugaaggaaaaauuc

SEQ ID NO: 3215896 - RNA, 13 nt, Human
ucuugaagacuuu

SEQ ID NO: 3215897 - RNA, 22 nt, Human
ucuugaagacuuuucuuucagc

SEQ ID NO: 3215898 - RNA, 15 nt, Human
ucuugaacugagcuu

SEQ ID NO: 3215899 - RNA, 17 nt, Human
ucuugaacugagcuugg

SEQ ID NO: 3215900 - RNA, 16 nt, Human
ucuucuuggucucagu

SEQ ID NO: 3215901 - RNA, 17 nt, Human
ucuuccaaccauuuauc

SEQ ID NO: 3215902 - RNA, 19 nt, Human
ucuuccaaccauuuaucuu

SEQ ID NO: 3215903 - RNA, 12 nt, Human
ucugagagcugu

SEQ ID NO: 3215904 - RNA, 18 nt, Human
ucugagaggacuuuucuu

SEQ ID NO: 3215905 - RNA, 19 nt, Human
ucugacccaugcugcccug

SEQ ID NO: 3215906 - RNA, 20 nt, Human
ucugacccaugcugcccugu

SEQ ID NO: 3215907 - RNA, 22 nt, Human
ucugacccaugcugcccuguga

SEQ ID NO: 3215908 - RNA, 23 nt, Human
ucugacccaugcugcccugugag

SEQ ID NO: 3215909 - RNA, 16 nt, Human
ucucauagguuaaaaa

SEQ ID NO: 3215910 - RNA, 17 nt, Human
ucucauagguuaaaaaa

SEQ ID NO: 3215911 - RNA, 10 nt, Human
ucucaucaug

SEQ ID NO: 3215912 - RNA, 15 nt, Human
ucucaucaugucuau

SEQ ID NO: 3215913 - RNA, 18 nt, Human
ucucaucaugucuauugu

SEQ ID NO: 3215914 - RNA, 21 nt, Human
ucugcaagaauugaagcagga

SEQ ID NO: 3215915 - RNA, 23 nt, Human
ucugcaaagcauguuuugcaugu

SEQ ID NO: 3215916 - RNA, 16 nt, Human
ucugcaaagcauguuu

SEQ ID NO: 3215917 - RNA, 20 nt, Human
ucugauuucuuuucaccauu

SEQ ID NO: 3215918 - RNA, 13 nt, Human
ucugauuucaggg

SEQ ID NO: 3215919 - RNA, 21 nt, Human
ucugaggaauccagacccggc

SEQ ID NO: 3215920 - RNA, 18 nt, Human
ucugaggaauccagaccc

SEQ ID NO: 3215921 - RNA, 22 nt, Human
ucugaggaauccagacccggcu

SEQ ID NO: 3215922 - RNA, 16 nt, Human
ucugauuuauuuugua

SEQ ID NO: 3215923 - RNA, 20 nt, Human
ucugauuuauuuuguaugaa

SEQ ID NO: 3215924 - RNA, 22 nt, Human
ucugauuuauuuuguaugaaau

SEQ ID NO: 3215925 - RNA, 23 nt, Human
ucugauuuauuuuguaugaaaua

SEQ ID NO: 3215926 - RNA, 13 nt, Human
ucugcccacuccc

SEQ ID NO: 3215927 - RNA, 14 nt, Human
ucugcccacucccu

SEQ ID NO: 3215928 - RNA, 17 nt, Human
ucugcccaccucggccu

SEQ ID NO: 3215929 - RNA, 12 nt, Human
ucugccucccau

SEQ ID NO: 3215930 - RNA, 13 nt, Human
ucugccucccauc

SEQ ID NO: 3215931 - RNA, 15 nt, Human
ucugccucccaucac

SEQ ID NO: 3215932 - RNA, 23 nt, Human
ucugccauauucuguuggccagu

SEQ ID NO: 3215933 - RNA, 22 nt, Human
ucugccauauucuguuggccag

SEQ ID NO: 3215934 - RNA, 12 nt, Human
ucugcccacucc

SEQ ID NO: 3215935 - RNA, 14 nt, Human
ucugccauuucaug

SEQ ID NO: 3215936 - RNA, 18 nt, Human
ucugccauauucuguugg

SEQ ID NO: 3215937 - RNA, 20 nt, Human
ucugccugaagucacacagu

SEQ ID NO: 3215938 - RNA, 21 nt, Human
ucugccugaggggcagccugc

SEQ ID NO: 3215939 - RNA, 23 nt, Human
ucugccugaggggcagccugccu

SEQ ID NO: 3215940 - RNA, 22 nt, Human
ucugccugaggggcagccugcc

SEQ ID NO: 3215941 - RNA, 19 nt, Human
ucugccugaagucacacag

SEQ ID NO: 3215942 - RNA, 22 nt, Human
ucugccucugacacacagcucu

SEQ ID NO: 3215943 - RNA, 21 nt, Human
ucugccucugacacacagcuc

SEQ ID NO: 3215944 - RNA, 23 nt, Human
ucugccucugacacacagcucug

SEQ ID NO: 3215945 - RNA, 14 nt, Human
ucugccucugaugu

SEQ ID NO: 3215946 - RNA, 20 nt, Human
ucugccucugauguauuuug

SEQ ID NO: 3215947 - RNA, 18 nt, Human
ucugccucugauguauuu

SEQ ID NO: 3215948 - RNA, 16 nt, Human
ucugccucccaucacc

SEQ ID NO: 3215949 - RNA, 17 nt, Human
ucugccucccaucaccc

SEQ ID NO: 3215950 - RNA, 20 nt, Human
ucugccucccaucacccgcu

SEQ ID NO: 3215951 - RNA, 21 nt, Human
ucugccucccaucacccgcua

SEQ ID NO: 3215952 - RNA, 18 nt, Human
ucugccucugacacacag

SEQ ID NO: 3215953 - RNA, 15 nt, Human
ucugccucugacaca

SEQ ID NO: 3215954 - RNA, 15 nt, Human
ucugccuccucuuca

SEQ ID NO: 3215955 - RNA, 16 nt, Human
ucuggaaugcaguggu

SEQ ID NO: 3215956 - RNA, 14 nt, Human
ucugcugcuggcug

SEQ ID NO: 3215957 - RNA, 15 nt, Human
ucugcugcuggcugg

SEQ ID NO: 3215958 - RNA, 17 nt, Human
ucugcugcuggcugguu

SEQ ID NO: 3215959 - RNA, 15 nt, Human
ucuggacuccucugu

SEQ ID NO: 3215960 - RNA, 18 nt, Human
ucuggacuccucugucca

SEQ ID NO: 3215961 - RNA, 16 nt, Human
ucuggacuccucuguc

SEQ ID NO: 3215962 - RNA, 23 nt, Human
ucuggaccccaucugugaauaag

SEQ ID NO: 3215963 - RNA, 21 nt, Human
ucuggaccccaucugugaaua

SEQ ID NO: 3215964 - RNA, 22 nt, Human
ucuggacuguggguuugugggg

SEQ ID NO: 3215965 - RNA, 22 nt, Human
ucuggacuccucuguccaggca

SEQ ID NO: 3215966 - RNA, 20 nt, Human
ucugccugcccaggccccug

SEQ ID NO: 3215967 - RNA, 18 nt, Human
ucugccugcccaggcccc

SEQ ID NO: 3215968 - RNA, 17 nt, Human
ucugccugcccaggccc

SEQ ID NO: 3215969 - RNA, 16 nt, Human
ucugccugcccaggcc

SEQ ID NO: 3215970 - RNA, 21 nt, Human
ucugcuccucuccccagcaag

SEQ ID NO: 3215971 - RNA, 11 nt, Human
ucugcugcugg

SEQ ID NO: 3215972 - RNA, 13 nt, Human
ucugcugcuggcu

SEQ ID NO: 3215973 - RNA, 22 nt, Human
ucugcugauccucccaggcuuc

SEQ ID NO: 3215974 - RNA, 23 nt, Human
ucugcucuuucuucuuccacaca

SEQ ID NO: 3215975 - RNA, 15 nt, Human
ucugcugcagagcag

SEQ ID NO: 3215976 - RNA, 16 nt, Human
ucugcugcagagcagu

SEQ ID NO: 3215977 - RNA, 22 nt, Human
ucugcugaugacccccccagcu

SEQ ID NO: 3215978 - RNA, 22 nt, Human
ucugcugcagagcaguaaggga

SEQ ID NO: 3215979 - RNA, 13 nt, Human
ucugcugaaggaa

SEQ ID NO: 3215980 - RNA, 13 nt, Human
ucugcucuugcau

SEQ ID NO: 3215981 - RNA, 14 nt, Human
ucuggcugcagagc

SEQ ID NO: 3215982 - RNA, 15 nt, Human
ucuggcugcagagca

SEQ ID NO: 3215983 - RNA, 16 nt, Human
ucuggugaccuuccaa

SEQ ID NO: 3215984 - RNA, 23 nt, Human
ucuggugaccuuccaagagccug

SEQ ID NO: 3215985 - RNA, 18 nt, Human
ucuggugaccuuccaaga

SEQ ID NO: 3215986 - RNA, 16 nt, Human
ucuggugacuuuccuc

SEQ ID NO: 3215987 - RNA, 16 nt, Human
ucuguaaaauggaaaa

SEQ ID NO: 3215988 - RNA, 14 nt, Human
ucugucucagucca

SEQ ID NO: 3215989 - RNA, 18 nt, Human
ucuguguauuuucaguca

SEQ ID NO: 3215990 - RNA, 13 nt, Human
ucugucuaggaau

SEQ ID NO: 3215991 - RNA, 16 nt, Human
ucugucgcccagucug

SEQ ID NO: 3215992 - RNA, 17 nt, Human
ucugucgcccagucugg

SEQ ID NO: 3215993 - RNA, 12 nt, Human
ucuguccuggga

SEQ ID NO: 3215994 - RNA, 14 nt, Human
ucuguacagagccc

SEQ ID NO: 3215995 - RNA, 15 nt, Human
ucuguacagagccca

SEQ ID NO: 3215996 - RNA, 20 nt, Human
ucuguccuacucugugucag

SEQ ID NO: 3215997 - RNA, 23 nt, Human
uccacuuagaaauugcauuuccu

SEQ ID NO: 3215998 - RNA, 21 nt, Human
uccacuuagaaauugcauuuc

SEQ ID NO: 3215999 - RNA, 22 nt, Human
uccacugugccaugugccaggu

SEQ ID NO: 3216000 - RNA, 21 nt, Human
uccacugugccaugugccagg

SEQ ID NO: 3216001 - RNA, 14 nt, Human
uccacccugcucuc

SEQ ID NO: 3216002 - RNA, 13 nt, Human
uccacccugcucu

SEQ ID NO: 3216003 - RNA, 21 nt, Human
uccacccugcucuccgaccag

SEQ ID NO: 3216004 - RNA, 14 nt, Human
uccacuuucuagcc

SEQ ID NO: 3216005 - RNA, 13 nt, Human
uccagagcugcca

SEQ ID NO: 3216006 - RNA, 15 nt, Human
uccagagcugcuucc

SEQ ID NO: 3216007 - RNA, 15 nt, Human
uccagagcugccagu

SEQ ID NO: 3216008 - RNA, 20 nt, Human
uccagagcauuccagucagg

SEQ ID NO: 3216009 - RNA, 12 nt, Human
uccagagcauuc

SEQ ID NO: 3216010 - RNA, 19 nt, Human
uccagagaguggcuccucc

SEQ ID NO: 3216011 - RNA, 22 nt, Human
uccagagaguggcuccucccgg

SEQ ID NO: 3216012 - RNA, 19 nt, Human
uccaggacaggagaugcug

SEQ ID NO: 3216013 - RNA, 18 nt, Human
uccaggacaggagaugcu

SEQ ID NO: 3216014 - RNA, 17 nt, Human
uccaggacccugccagg

SEQ ID NO: 3216015 - RNA, 15 nt, Human
uccaggacccugcca

SEQ ID NO: 3216016 - RNA, 14 nt, Human
uccaggacccugcc

SEQ ID NO: 3216017 - RNA, 22 nt, Human
uccaggacaggagaugcugugc

SEQ ID NO: 3216018 - RNA, 22 nt, Human
uccaggacccugccaggcacag

SEQ ID NO: 3216019 - RNA, 21 nt, Human
uccaggacccugccaggcaca

SEQ ID NO: 3216020 - RNA, 19 nt, Human
uccaggacccugccaggca

SEQ ID NO: 3216021 - RNA, 18 nt, Human
uccaggacccugccaggc

SEQ ID NO: 3216022 - RNA, 22 nt, Human
uccagcuggccgggagccugau

SEQ ID NO: 3216023 - RNA, 15 nt, Human
uccagcuggccggga

SEQ ID NO: 3216024 - RNA, 21 nt, Human
uccagcuggccgggagccuga

SEQ ID NO: 3216025 - RNA, 19 nt, Human
uccagcaauucuccugccu

SEQ ID NO: 3216026 - RNA, 20 nt, Human
uccagcaauucuccugccuc

SEQ ID NO: 3216027 - RNA, 18 nt, Human
uccagcaauucuccugcc

SEQ ID NO: 3216028 - RNA, 16 nt, Human
uccagagcugcuuccc

SEQ ID NO: 3216029 - RNA, 15 nt, Human
uccagaugccacaau

SEQ ID NO: 3216030 - RNA, 22 nt, Human
uccagauuuuuuacagcugccu

SEQ ID NO: 3216031 - RNA, 22 nt, Human
uccaagcccaguucagcuuggg

SEQ ID NO: 3216032 - RNA, 15 nt, Human
uccaagccagcaagc

SEQ ID NO: 3216033 - RNA, 23 nt, Human
uccaagccucucuggcacuuuga

SEQ ID NO: 3216034 - RNA, 20 nt, Human
uccacaagagcccaggccuc

SEQ ID NO: 3216035 - RNA, 19 nt, Human
uccacaagagcccaggccu

SEQ ID NO: 3216036 - RNA, 21 nt, Human
uccacaagagcccaggccucc

SEQ ID NO: 3216037 - RNA, 20 nt, Human
uccacaccucacucugcuac

SEQ ID NO: 3216038 - RNA, 12 nt, Human
uccacacccgcg

SEQ ID NO: 3216039 - RNA, 13 nt, Human
uccaagagccuga

SEQ ID NO: 3216040 - RNA, 14 nt, Human
uccaagagccugag

SEQ ID NO: 3216041 - RNA, 19 nt, Human
uccaagaccuucuccuuca

SEQ ID NO: 3216042 - RNA, 20 nt, Human
uccaagaccuucuccuucac

SEQ ID NO: 3216043 - RNA, 14 nt, Human
uccaagcaggacau

SEQ ID NO: 3216044 - RNA, 15 nt, Human
uccaagaagcccagg

SEQ ID NO: 3216045 - RNA, 16 nt, Human
uccaagaagcccagga

SEQ ID NO: 3216046 - RNA, 14 nt, Human
uccaagaagcccag

SEQ ID NO: 3216047 - RNA, 12 nt, Human
uccaagaagccc

SEQ ID NO: 3216048 - RNA, 23 nt, Human
ucaugucaaauauuuagauguaa

SEQ ID NO: 3216049 - RNA, 17 nt, Human
ucccaacucaccccagc

SEQ ID NO: 3216050 - RNA, 18 nt, Human
ucccaacucaccccagcc

SEQ ID NO: 3216051 - RNA, 19 nt, Human
ucccaacucaccccagccc

SEQ ID NO: 3216052 - RNA, 21 nt, Human
ucccaacucaccccagcccca

SEQ ID NO: 3216053 - RNA, 14 nt, Human
ucccaacuuguaaa

SEQ ID NO: 3216054 - RNA, 20 nt, Human
ucccaagaaaggaaaccuuu

SEQ ID NO: 3216055 - RNA, 18 nt, Human
uccaugugaucucauugu

SEQ ID NO: 3216056 - RNA, 19 nt, Human
uccaugugaaacauguugc

SEQ ID NO: 3216057 - RNA, 18 nt, Human
uccaugucgccucugcau

SEQ ID NO: 3216058 - RNA, 17 nt, Human
uccaugucgccucugca

SEQ ID NO: 3216059 - RNA, 19 nt, Human
uccaugucgccucugcauu

SEQ ID NO: 3216060 - RNA, 16 nt, Human
uccaugucgccucugc

SEQ ID NO: 3216061 - RNA, 20 nt, Human
uccagggcucaacacuguga

SEQ ID NO: 3216062 - RNA, 17 nt, Human
uccagggcucaacacug

SEQ ID NO: 3216063 - RNA, 23 nt, Human
uccauaaucuggacuccucuguc

SEQ ID NO: 3216064 - RNA, 22 nt, Human
uccauaaucuggacuccucugu

SEQ ID NO: 3216065 - RNA, 15 nt, Human
uccauagagagcaag

SEQ ID NO: 3216066 - RNA, 17 nt, Human
uccauagagagcaagac

SEQ ID NO: 3216067 - RNA, 15 nt, Human
uccauaauguucugc

SEQ ID NO: 3216068 - RNA, 17 nt, Human
uccauaauguucugcua

SEQ ID NO: 3216069 - RNA, 16 nt, Human
uccauaauguucugcu

SEQ ID NO: 3216070 - RNA, 19 nt, Human
uccauacacacgcugccuu

SEQ ID NO: 3216071 - RNA, 18 nt, Human
uccauacacacgcugccu

SEQ ID NO: 3216072 - RNA, 14 nt, Human
uccauacacacgcu

SEQ ID NO: 3216073 - RNA, 20 nt, Human
uccauagagagcaagacgcu

SEQ ID NO: 3216074 - RNA, 15 nt, Human
uccauagcuguggug

SEQ ID NO: 3216075 - RNA, 14 nt, Human
uccauagugacuuu

SEQ ID NO: 3216076 - RNA, 15 nt, Human
uccauagugacuuuu

SEQ ID NO: 3216077 - RNA, 19 nt, Human
uccauauaagcccuugauu

SEQ ID NO: 3216078 - RNA, 14 nt, Human
uccauauuauugug

SEQ ID NO: 3216079 - RNA, 16 nt, Human
uccaugaugauaguug

SEQ ID NO: 3216080 - RNA, 18 nt, Human
uccauauuagaaaacuuu

SEQ ID NO: 3216081 - RNA, 17 nt, Human
uccauauuagaaaacuu

SEQ ID NO: 3216082 - RNA, 15 nt, Human
uccauauuagaaaac

SEQ ID NO: 3216083 - RNA, 13 nt, Human
uccauauuagaaa

SEQ ID NO: 3216084 - RNA, 19 nt, Human
uccauauccauagugacuu

SEQ ID NO: 3216085 - RNA, 12 nt, Human
uccauauccaua

SEQ ID NO: 3216086 - RNA, 17 nt, Human
ucccaggcauuccccag

SEQ ID NO: 3216087 - RNA, 18 nt, Human
ucccaggcauuccccagg

SEQ ID NO: 3216088 - RNA, 16 nt, Human
ucccaggauguacaag

SEQ ID NO: 3216089 - RNA, 15 nt, Human
ucccaggcaaauaaa

SEQ ID NO: 3216090 - RNA, 18 nt, Human
ucccaggcaaauaaaauu

SEQ ID NO: 3216091 - RNA, 20 nt, Human
ucccaggcaaauaaaauucc

SEQ ID NO: 3216092 - RNA, 15 nt, Human
ucccacuucugccag

SEQ ID NO: 3216093 - RNA, 16 nt, Human
ucccacuucugccaga

SEQ ID NO: 3216094 - RNA, 12 nt, Human
ucccacuccaag

SEQ ID NO: 3216095 - RNA, 16 nt, Human
ucccacuccaagccag

SEQ ID NO: 3216096 - RNA, 14 nt, Human
ucccacuccaagcc

SEQ ID NO: 3216097 - RNA, 19 nt, Human
ucccacuccaagccagcaa

SEQ ID NO: 3216098 - RNA, 18 nt, Human
ucccacuccaagccagca

SEQ ID NO: 3216099 - RNA, 13 nt, Human
ucccacucuucuc

SEQ ID NO: 3216100 - RNA, 17 nt, Human
ucccacuucaaaacaaa

SEQ ID NO: 3216101 - RNA, 13 nt, Human
ucccacugcccac

SEQ ID NO: 3216102 - RNA, 15 nt, Human
ucccacucuucucau

SEQ ID NO: 3216103 - RNA, 16 nt, Human
ucccaugagccucagc

SEQ ID NO: 3216104 - RNA, 15 nt, Human
ucccaugagccucag

SEQ ID NO: 3216105 - RNA, 21 nt, Human
ucccagggagcaagggcaggg

SEQ ID NO: 3216106 - RNA, 19 nt, Human
ucccagggagcaagggcag

SEQ ID NO: 3216107 - RNA, 16 nt, Human
ucccagggagcaaggg

SEQ ID NO: 3216108 - RNA, 19 nt, Human
ucccaggcugagccucagu

SEQ ID NO: 3216109 - RNA, 18 nt, Human
ucccaggcugagccucag

SEQ ID NO: 3216110 - RNA, 14 nt, Human
ucccacucagucca

SEQ ID NO: 3216111 - RNA, 20 nt, Human
ucccaccucucucacuccuu

SEQ ID NO: 3216112 - RNA, 18 nt, Human
ucccaccuuggcugcagg

SEQ ID NO: 3216113 - RNA, 21 nt, Human
ucccaccuuggcugcagggag

SEQ ID NO: 3216114 - RNA, 19 nt, Human
ucccaccuuggcugcaggg

SEQ ID NO: 3216115 - RNA, 17 nt, Human
ucccaccucucucacuc

SEQ ID NO: 3216116 - RNA, 18 nt, Human
ucccaccucucucacucc

SEQ ID NO: 3216117 - RNA, 14 nt, Human
ucccaccucucuca

SEQ ID NO: 3216118 - RNA, 16 nt, Human
ucccaccucagccucc

SEQ ID NO: 3216119 - RNA, 20 nt, Human
ucccaacuugccuuugaaga

SEQ ID NO: 3216120 - RNA, 14 nt, Human
ucccaacuugccuu

SEQ ID NO: 3216121 - RNA, 18 nt, Human
ucccaccucagccucccg

SEQ ID NO: 3216122 - RNA, 14 nt, Human
ucaguucucuucac

SEQ ID NO: 3216123 - RNA, 17 nt, Human
ucaguucucuucacuca

SEQ ID NO: 3216124 - RNA, 15 nt, Human
ucauacucaccucac

SEQ ID NO: 3216125 - RNA, 16 nt, Human
ucauacucgagucuga

SEQ ID NO: 3216126 - RNA, 17 nt, Human
ucauacucgagucugag

SEQ ID NO: 3216127 - RNA, 16 nt, Human
ucauacuccuaugcuu

SEQ ID NO: 3216128 - RNA, 20 nt, Human
ucauacuccuaugcuuuagc

SEQ ID NO: 3216129 - RNA, 17 nt, Human
ucauacuccuaugcuuu

SEQ ID NO: 3216130 - RNA, 15 nt, Human
ucauacugauguguu

SEQ ID NO: 3216131 - RNA, 14 nt, Human
ucauacugaugugu

SEQ ID NO: 3216132 - RNA, 13 nt, Human
ucauacuuaaaaa

SEQ ID NO: 3216133 - RNA, 14 nt, Human
ucauacuuaaaaau

SEQ ID NO: 3216134 - RNA, 15 nt, Human
ucauacuuaaaaauu

SEQ ID NO: 3216135 - RNA, 16 nt, Human
ucauacuuaaaaauuu

SEQ ID NO: 3216136 - RNA, 19 nt, Human
ucauacuuaaaaauuuauu

SEQ ID NO: 3216137 - RNA, 17 nt, Human
ucaucauauuauacaga

SEQ ID NO: 3216138 - RNA, 14 nt, Human
ucaucauauuauac

SEQ ID NO: 3216139 - RNA, 14 nt, Human
ucaucuggaguucu

SEQ ID NO: 3216140 - RNA, 20 nt, Human
ucaucuggaguucucaaaga

SEQ ID NO: 3216141 - RNA, 12 nt, Human
ucaucuggaagu

SEQ ID NO: 3216142 - RNA, 13 nt, Human
ucaucuggaaguu

SEQ ID NO: 3216143 - RNA, 17 nt, Human
ucauggagaaccaccua

SEQ ID NO: 3216144 - RNA, 21 nt, Human
ucauggagaaccaccuacccc

SEQ ID NO: 3216145 - RNA, 18 nt, Human
ucagugugacugaucucu

SEQ ID NO: 3216146 - RNA, 17 nt, Human
ucagucugauucccaag

SEQ ID NO: 3216147 - RNA, 19 nt, Human
ucaguccucaaagcuuuuu

SEQ ID NO: 3216148 - RNA, 16 nt, Human
ucaguuaagccuuugg

SEQ ID NO: 3216149 - RNA, 17 nt, Human
ucaguuaagccuuugga

SEQ ID NO: 3216150 - RNA, 15 nt, Human
ucaguguuuggugca

SEQ ID NO: 3216151 - RNA, 15 nt, Human
ucaguguuucugggg

SEQ ID NO: 3216152 - RNA, 12 nt, Human
ucaguguuucau

SEQ ID NO: 3216153 - RNA, 14 nt, Human
ucaguguuuaugug

SEQ ID NO: 3216154 - RNA, 18 nt, Human
ucaguguuuaugugcuau

SEQ ID NO: 3216155 - RNA, 18 nt, Human
ucaguccaugaagaugua

SEQ ID NO: 3216156 - RNA, 15 nt, Human
ucaguccauagcaga

SEQ ID NO: 3216157 - RNA, 23 nt, Human
ucaguccaagggguccccuccag

SEQ ID NO: 3216158 - RNA, 18 nt, Human
ucaguccccgugaaggag

SEQ ID NO: 3216159 - RNA, 13 nt, Human
ucagucauuaaau

SEQ ID NO: 3216160 - RNA, 17 nt, Human
ucagguggggucacucu

SEQ ID NO: 3216161 - RNA, 20 nt, Human
ucagguggggucacucuggc

SEQ ID NO: 3216162 - RNA, 15 nt, Human
ucaggugcugccauc

SEQ ID NO: 3216163 - RNA, 21 nt, Human
ucagguggggcagcuugaggg

SEQ ID NO: 3216164 - RNA, 16 nt, Human
ucagguggggcagcuu

SEQ ID NO: 3216165 - RNA, 15 nt, Human
ucagguggggcagcu

SEQ ID NO: 3216166 - RNA, 20 nt, Human
ucaggugcugccauccaggu

SEQ ID NO: 3216167 - RNA, 18 nt, Human
ucaggugcugccauccag

SEQ ID NO: 3216168 - RNA, 14 nt, Human
ucagguggggcagc

SEQ ID NO: 3216169 - RNA, 22 nt, Human
ucagccucccaaagugcuggga

SEQ ID NO: 3216170 - RNA, 12 nt, Human
ucagccucccga

SEQ ID NO: 3216171 - RNA, 16 nt, Human
ucagccugcuccagcu

SEQ ID NO: 3216172 - RNA, 21 nt, Human
ucagccucccacagugcuggg

SEQ ID NO: 3216173 - RNA, 16 nt, Human
ucagccucccacagug

SEQ ID NO: 3216174 - RNA, 21 nt, Human
ucagcuccccucggagaagag

SEQ ID NO: 3216175 - RNA, 22 nt, Human
ucagcuccccucggagaagagc

SEQ ID NO: 3216176 - RNA, 21 nt, Human
ucagcuccagcucaccagccc

SEQ ID NO: 3216177 - RNA, 18 nt, Human
ucagcuccagcucaccag

SEQ ID NO: 3216178 - RNA, 15 nt, Human
ucagcuccagcucac

SEQ ID NO: 3216179 - RNA, 22 nt, Human
ucaggagcuccauacacacgcu

SEQ ID NO: 3216180 - RNA, 18 nt, Human
ucaggaggccaagguggg

SEQ ID NO: 3216181 - RNA, 16 nt, Human
ucagcugcugaaacaa

SEQ ID NO: 3216182 - RNA, 12 nt, Human
ucagcugcucag

SEQ ID NO: 3216183 - RNA, 15 nt, Human
ucagcugcuuuguua

SEQ ID NO: 3216184 - RNA, 16 nt, Human
ucagcugcuuuguuac

SEQ ID NO: 3216185 - RNA, 17 nt, Human
ucagcugcuuuguuacc

SEQ ID NO: 3216186 - RNA, 15 nt, Human
ucagcugcuacuacu

SEQ ID NO: 3216187 - RNA, 20 nt, Human
ucagaucauuaucagccugu

SEQ ID NO: 3216188 - RNA, 15 nt, Human
ucagauauuugcacc

SEQ ID NO: 3216189 - RNA, 14 nt, Human
ucagauauuugcac

SEQ ID NO: 3216190 - RNA, 13 nt, Human
ucagauauuugca

SEQ ID NO: 3216191 - RNA, 21 nt, Human
ucagcaccacucaagaccaaa

SEQ ID NO: 3216192 - RNA, 20 nt, Human
ucagcaccacucaagaccaa

SEQ ID NO: 3216193 - RNA, 15 nt, Human
ucagcaccacucaag

SEQ ID NO: 3216194 - RNA, 13 nt, Human
ucagcaccacuca

SEQ ID NO: 3216195 - RNA, 24 nt, Human
ucagcacauaggguucccacgaag

SEQ ID NO: 3216196 - RNA, 21 nt, Human
ucagcacauaggguucccacg

SEQ ID NO: 3216197 - RNA, 23 nt, Human
uaucauucuaaagauagaguaaa

SEQ ID NO: 3216198 - RNA, 17 nt, Human
uaucauucuaaagauag

SEQ ID NO: 3216199 - RNA, 16 nt, Human
uaucauucuaaagaua

SEQ ID NO: 3216200 - RNA, 14 nt, Human
uaucauucuaaaga

SEQ ID NO: 3216201 - RNA, 18 nt, Human
ucagcaugaaaaugugug

SEQ ID NO: 3216202 - RNA, 20 nt, Human
ucagcaugaaaauguguguu

SEQ ID NO: 3216203 - RNA, 23 nt, Human
ucagcaucugaccucuaccuuca

SEQ ID NO: 3216204 - RNA, 12 nt, Human
ucagccucccaa

SEQ ID NO: 3216205 - RNA, 18 nt, Human
ucagcauccuggcacccg

SEQ ID NO: 3216206 - RNA, 17 nt, Human
ucagcauccuggcaccc

SEQ ID NO: 3216207 - RNA, 16 nt, Human
ucagcauccuggcacc

SEQ ID NO: 3216208 - RNA, 15 nt, Human
ucagcauccuggcac

SEQ ID NO: 3216209 - RNA, 13 nt, Human
ucagcaggcagcc

SEQ ID NO: 3216210 - RNA, 12 nt, Human
ucagcaggcagc

SEQ ID NO: 3216211 - RNA, 14 nt, Human
ucagcaguugcugg

SEQ ID NO: 3216212 - RNA, 16 nt, Human
ucagcaguugcuggua

SEQ ID NO: 3216213 - RNA, 17 nt, Human
ucagcaguugcugguaa

SEQ ID NO: 3216214 - RNA, 18 nt, Human
ucagcaguugcugguaaa

SEQ ID NO: 3216215 - RNA, 19 nt, Human
ucagcaguugcugguaaaa

SEQ ID NO: 3216216 - RNA, 20 nt, Human
ucagcaguugcugguaaaau

SEQ ID NO: 3216217 - RNA, 22 nt, Human
ucagcaguugcugguaaaauga

SEQ ID NO: 3216218 - RNA, 23 nt, Human
ucagcaguugcugguaaaaugaa

SEQ ID NO: 3216219 - RNA, 13 nt, Human
ucagcaguugcug

SEQ ID NO: 3216220 - RNA, 17 nt, Human
ucagcagugagagcaga

SEQ ID NO: 3216221 - RNA, 16 nt, Human
ucagcaggcagccuug

SEQ ID NO: 3216222 - RNA, 15 nt, Human
ucagcaggcagccuu

SEQ ID NO: 3216223 - RNA, 19 nt, Human
uccugucccucauccauag

SEQ ID NO: 3216224 - RNA, 20 nt, Human
uccuuaccagcagagcaccu

SEQ ID NO: 3216225 - RNA, 21 nt, Human
uccuuaccagcagagcaccuu

SEQ ID NO: 3216226 - RNA, 20 nt, Human
uccugaggggagacagagca

SEQ ID NO: 3216227 - RNA, 19 nt, Human
uccugucaucugagaauga

SEQ ID NO: 3216228 - RNA, 23 nt, Human
uccugaggggagacagagcaacc

SEQ ID NO: 3216229 - RNA, 24 nt, Human
uccuuaggguuuucucucuauuuc

SEQ ID NO: 3216230 - RNA, 14 nt, Human
uccuuaucaaagga

SEQ ID NO: 3216231 - RNA, 15 nt, Human
uccuuaucaaaggac

SEQ ID NO: 3216232 - RNA, 15 nt, Human
uccuuacuuuuaagg

SEQ ID NO: 3216233 - RNA, 15 nt, Human
uccuuaucuagcugc

SEQ ID NO: 3216234 - RNA, 14 nt, Human
uccuuaucuagcug

SEQ ID NO: 3216235 - RNA, 17 nt, Human
uccuuaucaaaggacac

SEQ ID NO: 3216236 - RNA, 22 nt, Human
uccuugaaaacacuguucucug

SEQ ID NO: 3216237 - RNA, 23 nt, Human
uccuugaaaacacuguucucugc

SEQ ID NO: 3216238 - RNA, 17 nt, Human
uccuugcaucaauuuuu

SEQ ID NO: 3216239 - RNA, 13 nt, Human
uccuucuuugccc

SEQ ID NO: 3216240 - RNA, 19 nt, Human
uccuucuuugcccuuuacu

SEQ ID NO: 3216241 - RNA, 15 nt, Human
uccuugcaucaauuu

SEQ ID NO: 3216242 - RNA, 18 nt, Human
uccuuggugucgggcaug

SEQ ID NO: 3216243 - RNA, 21 nt, Human
uccuuggugucgggcaugaca

SEQ ID NO: 3216244 - RNA, 22 nt, Human
uccuugcugcaaggcucuuccu

SEQ ID NO: 3216245 - RNA, 18 nt, Human
uccuuugugaggaagccg

SEQ ID NO: 3216246 - RNA, 22 nt, Human
uccuuugugaggaagccgcugg

SEQ ID NO: 3216247 - RNA, 17 nt, Human
uccuuugugaggaagcc

SEQ ID NO: 3216248 - RNA, 15 nt, Human
ucggccuccauccug

SEQ ID NO: 3216249 - RNA, 16 nt, Human
ucggccuccauccuga

SEQ ID NO: 3216250 - RNA, 23 nt, Human
ucgcccagucccagcagccagcc

SEQ ID NO: 3216251 - RNA, 10 nt, Human
ucgcccauga

SEQ ID NO: 3216252 - RNA, 22 nt, Human
ucgcccaugagagcgcagcccg

SEQ ID NO: 3216253 - RNA, 23 nt, Human
ucgcccagucuggaaugcagugg

SEQ ID NO: 3216254 - RNA, 19 nt, Human
ucgcccagucuggaaugca

SEQ ID NO: 3216255 - RNA, 14 nt, Human
ucgcccagucugga

SEQ ID NO: 3216256 - RNA, 15 nt, Human
uccuuuucuguguuu

SEQ ID NO: 3216257 - RNA, 18 nt, Human
uccuuuucgcaggauucu

SEQ ID NO: 3216258 - RNA, 21 nt, Human
uccuuuguauucugucuucau

SEQ ID NO: 3216259 - RNA, 15 nt, Human
uccuuuguauucugu

SEQ ID NO: 3216260 - RNA, 18 nt, Human
uccuuuguauucugucuu

SEQ ID NO: 3216261 - RNA, 17 nt, Human
uccuuuguauucugucu

SEQ ID NO: 3216262 - RNA, 22 nt, Human
uccuuuucgcaggauucuuccu

SEQ ID NO: 3216263 - RNA, 14 nt, Human
uccuuuucuguguu

SEQ ID NO: 3216264 - RNA, 23 nt, Human
ucgcaggauucuuccucccuccc

SEQ ID NO: 3216265 - RNA, 21 nt, Human
ucgcaggauucuuccucccuc

SEQ ID NO: 3216266 - RNA, 22 nt, Human
ucgcauagaaaucaauaauuug

SEQ ID NO: 3216267 - RNA, 20 nt, Human
ucgcaggccucccugccagu

SEQ ID NO: 3216268 - RNA, 19 nt, Human
ucgcaggccucccugccag

SEQ ID NO: 3216269 - RNA, 15 nt, Human
ucgcaggccucccug

SEQ ID NO: 3216270 - RNA, 17 nt, Human
ucgcaggauucuuccuc

SEQ ID NO: 3216271 - RNA, 22 nt, Human
ucucaguuuuucuuaauauaua

SEQ ID NO: 3216272 - RNA, 21 nt, Human
ucucaguuuuucuuaauauau

SEQ ID NO: 3216273 - RNA, 18 nt, Human
ucucaguuuuucuuaaua

SEQ ID NO: 3216274 - RNA, 12 nt, Human
ucucaguuuuuc

SEQ ID NO: 3216275 - RNA, 15 nt, Human
ucucaguuuuucuua

SEQ ID NO: 3216276 - RNA, 13 nt, Human
ucucaguuuuucu

SEQ ID NO: 3216277 - RNA, 15 nt, Human
ucucacuguugccca

SEQ ID NO: 3216278 - RNA, 14 nt, Human
ucucacuguugccc

SEQ ID NO: 3216279 - RNA, 19 nt, Human
ucucagaccgucuuccucc

SEQ ID NO: 3216280 - RNA, 14 nt, Human
ucucagaggcccca

SEQ ID NO: 3216281 - RNA, 17 nt, Human
ucucagauauuugcacc

SEQ ID NO: 3216282 - RNA, 14 nt, Human
ucucagauauuugc

SEQ ID NO: 3216283 - RNA, 14 nt, Human
ucucagauguuaaa

SEQ ID NO: 3216284 - RNA, 18 nt, Human
ucucagauguuaaaauaa

SEQ ID NO: 3216285 - RNA, 19 nt, Human
ucucagauguuaaaauaaa

SEQ ID NO: 3216286 - RNA, 20 nt, Human
ucucagauguuaaaauaaau

SEQ ID NO: 3216287 - RNA, 18 nt, Human
ucuauauuagaucaaaua

SEQ ID NO: 3216288 - RNA, 22 nt, Human
ucuauauuauugcccaugauau

SEQ ID NO: 3216289 - RNA, 14 nt, Human
ucuaucugguauua

SEQ ID NO: 3216290 - RNA, 21 nt, Human
ucuaucugguauuaaaugcca

SEQ ID NO: 3216291 - RNA, 10 nt, Human
ucuaucuacu

SEQ ID NO: 3216292 - RNA, 22 nt, Human
ucuaucuuugagcgcccacuag

SEQ ID NO: 3216293 - RNA, 16 nt, Human
ucucacacaugagcau

SEQ ID NO: 3216294 - RNA, 22 nt, Human
ucucaauuuuugguugaauaaa

SEQ ID NO: 3216295 - RNA, 13 nt, Human
ucucaauuuuugg

SEQ ID NO: 3216296 - RNA, 20 nt, Human
ucucacugccaugccagcuu

SEQ ID NO: 3216297 - RNA, 22 nt, Human
ucucacucugucgcccagucug

SEQ ID NO: 3216298 - RNA, 21 nt, Human
ucucacacaugagcaucaggc

SEQ ID NO: 3216299 - RNA, 23 nt, Human
ucucacucugucgcccagucugg

SEQ ID NO: 3216300 - RNA, 18 nt, Human
ucuacucuagggaaaaac

SEQ ID NO: 3216301 - RNA, 18 nt, Human
ucuaggaggucucuaaga

SEQ ID NO: 3216302 - RNA, 20 nt, Human
ucuacucgaguuacagacaa

SEQ ID NO: 3216303 - RNA, 21 nt, Human
ucuacucgaguuacagacaaa

SEQ ID NO: 3216304 - RNA, 15 nt, Human
ucuacucauuuuaau

SEQ ID NO: 3216305 - RNA, 12 nt, Human
ucuagggaaaaa

SEQ ID NO: 3216306 - RNA, 19 nt, Human
ucuacuaaaaauacaaaaa

SEQ ID NO: 3216307 - RNA, 15 nt, Human
ucuacuaaaaauaca

SEQ ID NO: 3216308 - RNA, 19 nt, Human
ucuaauuuuauuuugugaa

SEQ ID NO: 3216309 - RNA, 14 nt, Human
ucuacuauuuaugu

SEQ ID NO: 3216310 - RNA, 12 nt, Human
ucuacuaaaaau

SEQ ID NO: 3216311 - RNA, 14 nt, Human
ucuaauuugcugcu

SEQ ID NO: 3216312 - RNA, 15 nt, Human
ucuaauuugcugcug

SEQ ID NO: 3216313 - RNA, 21 nt, Human
ucuaauuggcuuuacuauuuu

SEQ ID NO: 3216314 - RNA, 14 nt, Human
ucuaauauguaaca

SEQ ID NO: 3216315 - RNA, 18 nt, Human
ucgucgagcuccccccag

SEQ ID NO: 3216316 - RNA, 21 nt, Human
ucuaauggauuauaaucagaa

SEQ ID NO: 3216317 - RNA, 23 nt, Human
ucccucuacugggagccuaccca

SEQ ID NO: 3216318 - RNA, 18 nt, Human
ucccuccgggucuuccua

SEQ ID NO: 3216319 - RNA, 15 nt, Human
ucccucuccagcagg

SEQ ID NO: 3216320 - RNA, 16 nt, Human
ucccucucugcuggac

SEQ ID NO: 3216321 - RNA, 14 nt, Human
ucccugccaaugga

SEQ ID NO: 3216322 - RNA, 16 nt, Human
ucccugccaauggacu

SEQ ID NO: 3216323 - RNA, 13 nt, Human
ucccucuggggcu

SEQ ID NO: 3216324 - RNA, 17 nt, Human
ucccucuggggcuguuc

SEQ ID NO: 3216325 - RNA, 20 nt, Human
ucccugcacuugcagacucu

SEQ ID NO: 3216326 - RNA, 22 nt, Human
ucccucuacugggagccuaccc

SEQ ID NO: 3216327 - RNA, 18 nt, Human
ucccucuacugggagccu

SEQ ID NO: 3216328 - RNA, 20 nt, Human
ucccuccgcggcgggcccug

SEQ ID NO: 3216329 - RNA, 13 nt, Human
ucccucccuuggg

SEQ ID NO: 3216330 - RNA, 14 nt, Human
ucccucccuugggg

SEQ ID NO: 3216331 - RNA, 18 nt, Human
ucccucccuuccucuuuc

SEQ ID NO: 3216332 - RNA, 17 nt, Human
ucccuacuuccugugac

SEQ ID NO: 3216333 - RNA, 22 nt, Human
ucccaugagccucagcauccug

SEQ ID NO: 3216334 - RNA, 22 nt, Human
ucccuaccgagucucuucucca

SEQ ID NO: 3216335 - RNA, 21 nt, Human
ucccuaccgagucucuucucc

SEQ ID NO: 3216336 - RNA, 19 nt, Human
ucccuaccgagucucuucu

SEQ ID NO: 3216337 - RNA, 21 nt, Human
uccgacuugugcacaggcaga

SEQ ID NO: 3216338 - RNA, 14 nt, Human
uccgccccugagcc

SEQ ID NO: 3216339 - RNA, 17 nt, Human
uccgccccugagcccac

SEQ ID NO: 3216340 - RNA, 16 nt, Human
uccgccccugagccca

SEQ ID NO: 3216341 - RNA, 15 nt, Human
uccgccccugagccc

SEQ ID NO: 3216342 - RNA, 21 nt, Human
uccgcuuucuacccagcgagc

SEQ ID NO: 3216343 - RNA, 20 nt, Human
uccgcuuucuacccagcgag

SEQ ID NO: 3216344 - RNA, 21 nt, Human
uccgccccugagcccacugug

SEQ ID NO: 3216345 - RNA, 20 nt, Human
uccgccccugagcccacugu

SEQ ID NO: 3216346 - RNA, 19 nt, Human
uccgccccugagcccacug

SEQ ID NO: 3216347 - RNA, 18 nt, Human
uccgccccugagcccacu

SEQ ID NO: 3216348 - RNA, 22 nt, Human
uccgaaagggacuuggaagcuc

SEQ ID NO: 3216349 - RNA, 17 nt, Human
uccgaccagacaccuug

SEQ ID NO: 3216350 - RNA, 17 nt, Human
uccgaaaugcugucuuu

SEQ ID NO: 3216351 - RNA, 14 nt, Human
uccgaaaucagcag

SEQ ID NO: 3216352 - RNA, 20 nt, Human
uccgaaaugcugucuuucuu

SEQ ID NO: 3216353 - RNA, 19 nt, Human
uccgaccuggccugucugu

SEQ ID NO: 3216354 - RNA, 21 nt, Human
uccgaaagggacuuggaagcu

SEQ ID NO: 3216355 - RNA, 17 nt, Human
ucccuucuuuuucuucu

SEQ ID NO: 3216356 - RNA, 16 nt, Human
ucccuggcuuccuuac

SEQ ID NO: 3216357 - RNA, 15 nt, Human
ucccuggcuuccuua

SEQ ID NO: 3216358 - RNA, 17 nt, Human
ucccuggcuuccuuacu

SEQ ID NO: 3216359 - RNA, 12 nt, Human
ucccuggcuucc

SEQ ID NO: 3216360 - RNA, 18 nt, Human
ucccugccccucccuuca

SEQ ID NO: 3216361 - RNA, 16 nt, Human
ucccugccccccagcc

SEQ ID NO: 3216362 - RNA, 14 nt, Human
ucccugccccuccc

SEQ ID NO: 3216363 - RNA, 17 nt, Human
ucccuucccaccucucu

SEQ ID NO: 3216364 - RNA, 21 nt, Human
ucccuucccacuggaggcaug

SEQ ID NO: 3216365 - RNA, 21 nt, Human
ucccuucucuuccaggcagcc

SEQ ID NO: 3216366 - RNA, 20 nt, Human
ucccuucucuuccaggcagc

SEQ ID NO: 3216367 - RNA, 16 nt, Human
ucccuucucuuccagg

SEQ ID NO: 3216368 - RNA, 12 nt, Human
ucccuucucuuc

SEQ ID NO: 3216369 - RNA, 15 nt, Human
ucccuucucuuccag

SEQ ID NO: 3216370 - RNA, 14 nt, Human
ucccuucucuucca

SEQ ID NO: 3216371 - RNA, 14 nt, Human
ucccuucccaccuc

SEQ ID NO: 3216372 - RNA, 16 nt, Human
ucccuucccaccucuc

SEQ ID NO: 3216373 - RNA, 21 nt, Human
uccucuaggaggucucuaaga

SEQ ID NO: 3216374 - RNA, 17 nt, Human
uccucuaggaggucucu

SEQ ID NO: 3216375 - RNA, 21 nt, Human
uccuccuuuucacaguucucu

SEQ ID NO: 3216376 - RNA, 13 nt, Human
uccuccuggacuc

SEQ ID NO: 3216377 - RNA, 14 nt, Human
uccuccugcugcca

SEQ ID NO: 3216378 - RNA, 15 nt, Human
uccuccugcugccag

SEQ ID NO: 3216379 - RNA, 17 nt, Human
uccucugcugcuggcug

SEQ ID NO: 3216380 - RNA, 14 nt, Human
uccucuauccuggg

SEQ ID NO: 3216381 - RNA, 13 nt, Human
uccucuguacaga

SEQ ID NO: 3216382 - RNA, 15 nt, Human
uccucuggccugugu

SEQ ID NO: 3216383 - RNA, 15 nt, Human
uccugaggcuccacu

SEQ ID NO: 3216384 - RNA, 14 nt, Human
uccugagccagauu

SEQ ID NO: 3216385 - RNA, 18 nt, Human
uccugagccagauuucac

SEQ ID NO: 3216386 - RNA, 19 nt, Human
uccugagccagauuucacu

SEQ ID NO: 3216387 - RNA, 17 nt, Human
uccugagccagauuuca

SEQ ID NO: 3216388 - RNA, 17 nt, Human
uccucuguccaggcacu

SEQ ID NO: 3216389 - RNA, 23 nt, Human
uccucuguacagagcccacgccc

SEQ ID NO: 3216390 - RNA, 19 nt, Human
uccucuguacagagcccac

SEQ ID NO: 3216391 - RNA, 16 nt, Human
uccugaggcuccacuu

SEQ ID NO: 3216392 - RNA, 21 nt, Human
uccugaggcuccacuuggucu

SEQ ID NO: 3216393 - RNA, 12 nt, Human
uccugaggcugg

SEQ ID NO: 3216394 - RNA, 15 nt, Human
uccugaggcugggcu

SEQ ID NO: 3216395 - RNA, 16 nt, Human
uccugaggcugggcuc

SEQ ID NO: 3216396 - RNA, 17 nt, Human
uccugaggcugggcucc

SEQ ID NO: 3216397 - RNA, 19 nt, Human
uccugaggcugggcucccu

SEQ ID NO: 3216398 - RNA, 16 nt, Human
uccuaagcuauucagu

SEQ ID NO: 3216399 - RNA, 20 nt, Human
uccuaagauguguucuuauu

SEQ ID NO: 3216400 - RNA, 23 nt, Human
uccuaagauguguucuuauuuuu

SEQ ID NO: 3216401 - RNA, 21 nt, Human
uccggaacguagucggcacag

SEQ ID NO: 3216402 - RNA, 14 nt, Human
uccuaguuccacca

SEQ ID NO: 3216403 - RNA, 17 nt, Human
uccuaguuccaccauca

SEQ ID NO: 3216404 - RNA, 12 nt, Human
uccuaguuccac

SEQ ID NO: 3216405 - RNA, 21 nt, Human
uccuaguuccaccaucaagcc

SEQ ID NO: 3216406 - RNA, 17 nt, Human
uccuaucagaaguuucu

SEQ ID NO: 3216407 - RNA, 13 nt, Human
uccuaugcuuuag

SEQ ID NO: 3216408 - RNA, 12 nt, Human
uccuauuucaga

SEQ ID NO: 3216409 - RNA, 15 nt, Human
uccuauuuagacaug

SEQ ID NO: 3216410 - RNA, 20 nt, Human
uccuauuucagaaguuuaaa

SEQ ID NO: 3216411 - RNA, 16 nt, Human
uccuauuucagaaguu

SEQ ID NO: 3216412 - RNA, 14 nt, Human
uccuauuucagaag

SEQ ID NO: 3216413 - RNA, 13 nt, Human
uccuauuucagaa

SEQ ID NO: 3216414 - RNA, 14 nt, Human
uccuccaggugcac

SEQ ID NO: 3216415 - RNA, 18 nt, Human
uccuccaggugcacaagc

SEQ ID NO: 3216416 - RNA, 20 nt, Human
uccuccaggugcacaagcuc

SEQ ID NO: 3216417 - RNA, 22 nt, Human
uccuccaggugcacaagcucca

SEQ ID NO: 3216418 - RNA, 12 nt, Human
uccuccaggugc

SEQ ID NO: 3216419 - RNA, 13 nt, Human
uccuccaggugca

SEQ ID NO: 3216420 - RNA, 10 nt, Human
uccuccaggu

SEQ ID NO: 3216421 - RNA, 12 nt, Human
uccuccucagau

SEQ ID NO: 3216422 - RNA, 16 nt, Human
uccuccugacacccca

SEQ ID NO: 3216423 - RNA, 21 nt, Human
uccuccugacaccccacuuag

SEQ ID NO: 3216424 - RNA, 18 nt, Human
uccuccugacaccccacu

SEQ ID NO: 3216425 - RNA, 22 nt, Human
uccuccugacaccccacuuagc

SEQ ID NO: 3216426 - RNA, 14 nt, Human
uggaauaucuacuu

SEQ ID NO: 3216427 - RNA, 20 nt, Human
uggaaugaugggucaguugu

SEQ ID NO: 3216428 - RNA, 15 nt, Human
uggaaugcacucaga

SEQ ID NO: 3216429 - RNA, 13 nt, Human
uggaaugaggguu

SEQ ID NO: 3216430 - RNA, 13 nt, Human
uggacaugcacag

SEQ ID NO: 3216431 - RNA, 19 nt, Human
uggacaugcacagcuaaca

SEQ ID NO: 3216432 - RNA, 20 nt, Human
uggacuaacuugucuuugga

SEQ ID NO: 3216433 - RNA, 18 nt, Human
uggacucaccucccccau

SEQ ID NO: 3216434 - RNA, 20 nt, Human
uggacucaccucccccaucu

SEQ ID NO: 3216435 - RNA, 19 nt, Human
uggaauaacauguaauuaa

SEQ ID NO: 3216436 - RNA, 15 nt, Human
uggaauaacauguaa

SEQ ID NO: 3216437 - RNA, 14 nt, Human
uggaauaacaugua

SEQ ID NO: 3216438 - RNA, 23 nt, Human
uggaauaaaaauuccagaaugaa

SEQ ID NO: 3216439 - RNA, 18 nt, Human
uggaauaaaaauuccaga

SEQ ID NO: 3216440 - RNA, 17 nt, Human
uggaauaaggagaauga

SEQ ID NO: 3216441 - RNA, 20 nt, Human
uggaaagaguaggaagacuu

SEQ ID NO: 3216442 - RNA, 21 nt, Human
uggaacauaaaauacaauguu

SEQ ID NO: 3216443 - RNA, 20 nt, Human
uggaacauaaaauacaaugu

SEQ ID NO: 3216444 - RNA, 14 nt, Human
uggaaaacuuaguu

SEQ ID NO: 3216445 - RNA, 18 nt, Human
uggaaaaugccaugaauu

SEQ ID NO: 3216446 - RNA, 18 nt, Human
uggaaacacuaaauguua

SEQ ID NO: 3216447 - RNA, 17 nt, Human
uggaaacacuaaauguu

SEQ ID NO: 3216448 - RNA, 16 nt, Human
uggaaacacuaaaugu

SEQ ID NO: 3216449 - RNA, 13 nt, Human
uggaaacacuaaa

SEQ ID NO: 3216450 - RNA, 17 nt, Human
uggaaacagcucgacuu

SEQ ID NO: 3216451 - RNA, 23 nt, Human
uggaaacacuaaauguuaaagau

SEQ ID NO: 3216452 - RNA, 22 nt, Human
uggaaacacuaaauguuaaaga

SEQ ID NO: 3216453 - RNA, 20 nt, Human
uggaaacacuaaauguuaaa

SEQ ID NO: 3216454 - RNA, 19 nt, Human
uggaaacacuaaauguuaa

SEQ ID NO: 3216455 - RNA, 22 nt, Human
uggaaacagcucgacuuuaaaa

SEQ ID NO: 3216456 - RNA, 20 nt, Human
uggaaacagaggaccagcac

SEQ ID NO: 3216457 - RNA, 18 nt, Human
uggaaacagaggaccagc

SEQ ID NO: 3216458 - RNA, 21 nt, Human
uggaaagacuuuuccaacccu

SEQ ID NO: 3216459 - RNA, 17 nt, Human
uggaaaaauagccugcc

SEQ ID NO: 3216460 - RNA, 20 nt, Human
uggaaaaauagccugccucu

SEQ ID NO: 3216461 - RNA, 13 nt, Human
uggaaaaaugcca

SEQ ID NO: 3216462 - RNA, 19 nt, Human
uggaaaaaugccaucaaau

SEQ ID NO: 3216463 - RNA, 14 nt, Human
ugcuuuagacuuga

SEQ ID NO: 3216464 - RNA, 15 nt, Human
ugcuuuagacuugaa

SEQ ID NO: 3216465 - RNA, 16 nt, Human
ugcuuuagacuugaaa

SEQ ID NO: 3216466 - RNA, 22 nt, Human
ugcuuucuuucguuuguuuguu

SEQ ID NO: 3216467 - RNA, 15 nt, Human
ugcuuucuuucguuu

SEQ ID NO: 3216468 - RNA, 17 nt, Human
ugcuuuaauuuuagcaa

SEQ ID NO: 3216469 - RNA, 15 nt, Human
ugcuuuaauuuuagc

SEQ ID NO: 3216470 - RNA, 14 nt, Human
ugcuuuaauuuuag

SEQ ID NO: 3216471 - RNA, 21 nt, Human
uggccagaugcaccagcccuu

SEQ ID NO: 3216472 - RNA, 20 nt, Human
uggccagaugcaccagcccu

SEQ ID NO: 3216473 - RNA, 17 nt, Human
uggccacuccagacccc

SEQ ID NO: 3216474 - RNA, 23 nt, Human
uggcagcugcgguccacccagga

SEQ ID NO: 3216475 - RNA, 21 nt, Human
uggcaccuucccccuccccca

SEQ ID NO: 3216476 - RNA, 13 nt, Human
uggcagcugcuuu

SEQ ID NO: 3216477 - RNA, 19 nt, Human
uggcaggaguuggaagugu

SEQ ID NO: 3216478 - RNA, 21 nt, Human
uggcaggacacugcagaacag

SEQ ID NO: 3216479 - RNA, 21 nt, Human
uggcacccggccccugcuggu

SEQ ID NO: 3216480 - RNA, 22 nt, Human
uggcaccuccucggcuggcugu

SEQ ID NO: 3216481 - RNA, 13 nt, Human
uggcaccuucccc

SEQ ID NO: 3216482 - RNA, 23 nt, Human
uggcaccugucugcuccagcucu

SEQ ID NO: 3216483 - RNA, 21 nt, Human
uggcaccugucugcuccagcu

SEQ ID NO: 3216484 - RNA, 19 nt, Human
uggcaccugucugcuccag

SEQ ID NO: 3216485 - RNA, 18 nt, Human
uggcaccugucugcucca

SEQ ID NO: 3216486 - RNA, 14 nt, Human
uggcaccugucugc

SEQ ID NO: 3216487 - RNA, 13 nt, Human
uggcaccugucug

SEQ ID NO: 3216488 - RNA, 20 nt, Human
uggcagguaggaauauuaua

SEQ ID NO: 3216489 - RNA, 17 nt, Human
uggcagguaggaauauu

SEQ ID NO: 3216490 - RNA, 23 nt, Human
uggcagguaggaauauuauauuu

SEQ ID NO: 3216491 - RNA, 14 nt, Human
uggcaggugagcaa

SEQ ID NO: 3216492 - RNA, 22 nt, Human
uggcaggugauguccuguaaac

SEQ ID NO: 3216493 - RNA, 12 nt, Human
uggagggaaagc

SEQ ID NO: 3216494 - RNA, 13 nt, Human
uggagggccuggg

SEQ ID NO: 3216495 - RNA, 12 nt, Human
uggagggccugg

SEQ ID NO: 3216496 - RNA, 22 nt, Human
uggagggccugggccuggcucc

SEQ ID NO: 3216497 - RNA, 18 nt, Human
uggagggccugggccugg

SEQ ID NO: 3216498 - RNA, 17 nt, Human
uggagggccugggccug

SEQ ID NO: 3216499 - RNA, 15 nt, Human
uggagggccugggcc

SEQ ID NO: 3216500 - RNA, 15 nt, Human
uggaggaccugcccg

SEQ ID NO: 3216501 - RNA, 12 nt, Human
uggaggaaggaa

SEQ ID NO: 3216502 - RNA, 18 nt, Human
uggaggaaggaaacccag

SEQ ID NO: 3216503 - RNA, 15 nt, Human
uggaggaagaacuga

SEQ ID NO: 3216504 - RNA, 17 nt, Human
uggaggaagaacugaaa

SEQ ID NO: 3216505 - RNA, 20 nt, Human
uggaggaagaacugaaaggc

SEQ ID NO: 3216506 - RNA, 15 nt, Human
uggacuccugcacac

SEQ ID NO: 3216507 - RNA, 14 nt, Human
uggacuccucuguc

SEQ ID NO: 3216508 - RNA, 15 nt, Human
uggacuccucugucc

SEQ ID NO: 3216509 - RNA, 14 nt, Human
uggacucuaaaguc

SEQ ID NO: 3216510 - RNA, 18 nt, Human
uggauccuugucaguugu

SEQ ID NO: 3216511 - RNA, 12 nt, Human
uggaucaggaaa

SEQ ID NO: 3216512 - RNA, 19 nt, Human
uggcaacaaacugcacaug

SEQ ID NO: 3216513 - RNA, 18 nt, Human
uggcaacaaacugcacau

SEQ ID NO: 3216514 - RNA, 17 nt, Human
uggcaacaaacugcaca

SEQ ID NO: 3216515 - RNA, 13 nt, Human
uggcaacaaacug

SEQ ID NO: 3216516 - RNA, 15 nt, Human
uggcaacaaacugca

SEQ ID NO: 3216517 - RNA, 14 nt, Human
uggcaacaaacugc

SEQ ID NO: 3216518 - RNA, 17 nt, Human
uggauuuggagagaaau

SEQ ID NO: 3216519 - RNA, 16 nt, Human
uggauuuggagagaaa

SEQ ID NO: 3216520 - RNA, 22 nt, Human
uggauuuggagagaaauauuuu

SEQ ID NO: 3216521 - RNA, 21 nt, Human
uggauuuggagagaaauauuu

SEQ ID NO: 3216522 - RNA, 20 nt, Human
uggauuuggagagaaauauu

SEQ ID NO: 3216523 - RNA, 19 nt, Human
uggauuuggagagaaauau

SEQ ID NO: 3216524 - RNA, 22 nt, Human
uggauuuuauguugacauuugu

SEQ ID NO: 3216525 - RNA, 16 nt, Human
uggauuuuauguugac

SEQ ID NO: 3216526 - RNA, 15 nt, Human
uggauuuuauguuga

SEQ ID NO: 3216527 - RNA, 13 nt, Human
uggauuuuauguu

SEQ ID NO: 3216528 - RNA, 20 nt, Human
uggggauugggccccugcca

SEQ ID NO: 3216529 - RNA, 16 nt, Human
ugggggaugggccuga

SEQ ID NO: 3216530 - RNA, 21 nt, Human
ugggggaucacagccucugaa

SEQ ID NO: 3216531 - RNA, 20 nt, Human
ugggggaucacagccucuga

SEQ ID NO: 3216532 - RNA, 20 nt, Human
uggggauucagauuucucuu

SEQ ID NO: 3216533 - RNA, 18 nt, Human
uggggauucagauuucuc

SEQ ID NO: 3216534 - RNA, 16 nt, Human
uggggauucagauuuc

SEQ ID NO: 3216535 - RNA, 13 nt, Human
uggggauucagau

SEQ ID NO: 3216536 - RNA, 18 nt, Human
ugggggucuguguguuua

SEQ ID NO: 3216537 - RNA, 15 nt, Human
ugggggucugugugu

SEQ ID NO: 3216538 - RNA, 23 nt, Human
ugggggcucagcaaggccaccuc

SEQ ID NO: 3216539 - RNA, 11 nt, Human
ugggggaugua

SEQ ID NO: 3216540 - RNA, 17 nt, Human
ugggggaugggccugag

SEQ ID NO: 3216541 - RNA, 18 nt, Human
ugggggcucagcaaggcc

SEQ ID NO: 3216542 - RNA, 17 nt, Human
ugggggcucagcaaggc

SEQ ID NO: 3216543 - RNA, 17 nt, Human
ugggggcugggcagagg

SEQ ID NO: 3216544 - RNA, 18 nt, Human
ugggggcugggcagagga

SEQ ID NO: 3216545 - RNA, 15 nt, Human
ugggcuucaguggca

SEQ ID NO: 3216546 - RNA, 21 nt, Human
uggggaaacaacauuuauaug

SEQ ID NO: 3216547 - RNA, 16 nt, Human
ugggcagaggaaagca

SEQ ID NO: 3216548 - RNA, 22 nt, Human
ugggcagaucucccacaugcca

SEQ ID NO: 3216549 - RNA, 22 nt, Human
ugggcuaagugauccucccacc

SEQ ID NO: 3216550 - RNA, 20 nt, Human
ugggcgugagaccugccccu

SEQ ID NO: 3216551 - RNA, 23 nt, Human
ugggcuggguucuacccaggugc

SEQ ID NO: 3216552 - RNA, 17 nt, Human
ugggcuggugucaccug

SEQ ID NO: 3216553 - RNA, 16 nt, Human
ugggcuaguugggcuu

SEQ ID NO: 3216554 - RNA, 18 nt, Human
uggguggggggcuucaua

SEQ ID NO: 3216555 - RNA, 21 nt, Human
uggguggggggcuucauacac

SEQ ID NO: 3216556 - RNA, 20 nt, Human
uggguggggggcuucauaca

SEQ ID NO: 3216557 - RNA, 19 nt, Human
ugggguuuaucagaauucu

SEQ ID NO: 3216558 - RNA, 16 nt, Human
uggguaacuagggaag

SEQ ID NO: 3216559 - RNA, 15 nt, Human
uggguucuacccagg

SEQ ID NO: 3216560 - RNA, 16 nt, Human
uggguucuacccaggu

SEQ ID NO: 3216561 - RNA, 22 nt, Human
uggguucuacccaggugcuagg

SEQ ID NO: 3216562 - RNA, 14 nt, Human
uggguguggcgcag

SEQ ID NO: 3216563 - RNA, 14 nt, Human
uggguuagacugcc

SEQ ID NO: 3216564 - RNA, 20 nt, Human
uggguuagacugccagcucu

SEQ ID NO: 3216565 - RNA, 19 nt, Human
uggguuagacugccagcuc

SEQ ID NO: 3216566 - RNA, 16 nt, Human
uggguuagacugccag

SEQ ID NO: 3216567 - RNA, 15 nt, Human
uggguuagacugcca

SEQ ID NO: 3216568 - RNA, 15 nt, Human
ugguauuaaaugcca

SEQ ID NO: 3216569 - RNA, 16 nt, Human
ugguauuaauaaaaag

SEQ ID NO: 3216570 - RNA, 22 nt, Human
ugguauauccuuuucuguguuu

SEQ ID NO: 3216571 - RNA, 14 nt, Human
ugguaucaaaauua

SEQ ID NO: 3216572 - RNA, 16 nt, Human
ugguaucaaaauuaca

SEQ ID NO: 3216573 - RNA, 18 nt, Human
ugguaucaaaauuacaua

SEQ ID NO: 3216574 - RNA, 21 nt, Human
uggguuucuaaagcugccagc

SEQ ID NO: 3216575 - RNA, 17 nt, Human
uggguuucuaaagcugc

SEQ ID NO: 3216576 - RNA, 18 nt, Human
uggguuucuaaagcugcc

SEQ ID NO: 3216577 - RNA, 17 nt, Human
ugguaguuucugugguu

SEQ ID NO: 3216578 - RNA, 15 nt, Human
ugguaguuucugugg

SEQ ID NO: 3216579 - RNA, 14 nt, Human
ugggagauguggaa

SEQ ID NO: 3216580 - RNA, 13 nt, Human
ugggagcaaaaga

SEQ ID NO: 3216581 - RNA, 14 nt, Human
ugggagcugccugu

SEQ ID NO: 3216582 - RNA, 13 nt, Human
ugggagcugccug

SEQ ID NO: 3216583 - RNA, 12 nt, Human
ugggagcugccu

SEQ ID NO: 3216584 - RNA, 18 nt, Human
ugggagauuuuuuugagu

SEQ ID NO: 3216585 - RNA, 12 nt, Human
ugggacacccug

SEQ ID NO: 3216586 - RNA, 22 nt, Human
ugggacaacuguagaggcaguu

SEQ ID NO: 3216587 - RNA, 16 nt, Human
ugggacgcucugcugu

SEQ ID NO: 3216588 - RNA, 15 nt, Human
ugggacgcucugcug

SEQ ID NO: 3216589 - RNA, 21 nt, Human
ugggagugaggaugucugggc

SEQ ID NO: 3216590 - RNA, 14 nt, Human
ugggauccuccagg

SEQ ID NO: 3216591 - RNA, 15 nt, Human
ugggauccuccaggu

SEQ ID NO: 3216592 - RNA, 15 nt, Human
ugggagugagcuggu

SEQ ID NO: 3216593 - RNA, 20 nt, Human
ugggaguaguuggagcauug

SEQ ID NO: 3216594 - RNA, 22 nt, Human
ugggagcugccuguucagcucc

SEQ ID NO: 3216595 - RNA, 21 nt, Human
ugggagcugccuguucagcuc

SEQ ID NO: 3216596 - RNA, 17 nt, Human
ugggagcugccuguuca

SEQ ID NO: 3216597 - RNA, 18 nt, Human
ugggauuacaggcuccug

SEQ ID NO: 3216598 - RNA, 16 nt, Human
ugggauuacaggugug

SEQ ID NO: 3216599 - RNA, 18 nt, Human
ugggauccuccaggugca

SEQ ID NO: 3216600 - RNA, 13 nt, Human
ugggauccuggag

SEQ ID NO: 3216601 - RNA, 15 nt, Human
ugggcagaggaaagc

SEQ ID NO: 3216602 - RNA, 17 nt, Human
ugggauuauauaucccu

SEQ ID NO: 3216603 - RNA, 17 nt, Human
ugggauuacagguguga

SEQ ID NO: 3216604 - RNA, 16 nt, Human
uggcuucggacaaaau

SEQ ID NO: 3216605 - RNA, 18 nt, Human
uggcuucggacaaaauau

SEQ ID NO: 3216606 - RNA, 20 nt, Human
uggcuucggacaaaauaucu

SEQ ID NO: 3216607 - RNA, 22 nt, Human
uggcuuccuaaaauucagugga

SEQ ID NO: 3216608 - RNA, 21 nt, Human
uggcugggggccucagugcca

SEQ ID NO: 3216609 - RNA, 16 nt, Human
uggcugcuucaaggau

SEQ ID NO: 3216610 - RNA, 21 nt, Human
uggcugcuucaaggauccuga

SEQ ID NO: 3216611 - RNA, 17 nt, Human
uggcccauguauggcca

SEQ ID NO: 3216612 - RNA, 21 nt, Human
uggcccauguauggccaggaa

SEQ ID NO: 3216613 - RNA, 18 nt, Human
uggcccauguauggccag

SEQ ID NO: 3216614 - RNA, 23 nt, Human
uggccccaccuggcccucucuga

SEQ ID NO: 3216615 - RNA, 12 nt, Human
uggccccaccug

SEQ ID NO: 3216616 - RNA, 18 nt, Human
uggccccacaccagcccc

SEQ ID NO: 3216617 - RNA, 19 nt, Human
uggccccaccuggcccucu

SEQ ID NO: 3216618 - RNA, 17 nt, Human
uggccccaccuggcccu

SEQ ID NO: 3216619 - RNA, 16 nt, Human
uggccccaccuggccc

SEQ ID NO: 3216620 - RNA, 13 nt, Human
uggccccaccugg

SEQ ID NO: 3216621 - RNA, 18 nt, Human
ugccaggauggaaugaug

SEQ ID NO: 3216622 - RNA, 15 nt, Human
ugccaggcacaggca

SEQ ID NO: 3216623 - RNA, 14 nt, Human
ugccaggcacaggc

SEQ ID NO: 3216624 - RNA, 22 nt, Human
ugccaggcacaggcagggcagg

SEQ ID NO: 3216625 - RNA, 21 nt, Human
ugccaggcacaggcagggcag

SEQ ID NO: 3216626 - RNA, 20 nt, Human
ugccaggcacaggcagggca

SEQ ID NO: 3216627 - RNA, 19 nt, Human
ugccaggcacaggcagggc

SEQ ID NO: 3216628 - RNA, 18 nt, Human
ugccaggcacaggcaggg

SEQ ID NO: 3216629 - RNA, 17 nt, Human
ugccaggcacaggcagg

SEQ ID NO: 3216630 - RNA, 16 nt, Human
ugccaggcacaggcag

SEQ ID NO: 3216631 - RNA, 21 nt, Human
ugccacuaccccuugauuuuc

SEQ ID NO: 3216632 - RNA, 22 nt, Human
ugccagguuuuuggucugaccc

SEQ ID NO: 3216633 - RNA, 19 nt, Human
ugccagguuuuuggucuga

SEQ ID NO: 3216634 - RNA, 18 nt, Human
ugccagguuuuuggucug

SEQ ID NO: 3216635 - RNA, 20 nt, Human
ugccacuaaauugacacuua

SEQ ID NO: 3216636 - RNA, 19 nt, Human
ugccacccuggggagaaag

SEQ ID NO: 3216637 - RNA, 22 nt, Human
ugccacuacggaauaguuggcu

SEQ ID NO: 3216638 - RNA, 20 nt, Human
ugccacuaccccuugauuuu

SEQ ID NO: 3216639 - RNA, 15 nt, Human
ugccacccugcugag

SEQ ID NO: 3216640 - RNA, 14 nt, Human
ugcaucaagaugug

SEQ ID NO: 3216641 - RNA, 14 nt, Human
ugcauaucuucauc

SEQ ID NO: 3216642 - RNA, 17 nt, Human
ugcccacccuccacucu

SEQ ID NO: 3216643 - RNA, 20 nt, Human
ugccauccagguucagcuug

SEQ ID NO: 3216644 - RNA, 21 nt, Human
ugccauccagguucagcuugu

SEQ ID NO: 3216645 - RNA, 13 nt, Human
ugcccacucccug

SEQ ID NO: 3216646 - RNA, 13 nt, Human
ugcccaccuggcc

SEQ ID NO: 3216647 - RNA, 20 nt, Human
ugcccaggcuggagugcagu

SEQ ID NO: 3216648 - RNA, 15 nt, Human
ugcccaggcuggagu

SEQ ID NO: 3216649 - RNA, 17 nt, Human
ugcccaggccugccugu

SEQ ID NO: 3216650 - RNA, 18 nt, Human
ugcccaggcuggagugca

SEQ ID NO: 3216651 - RNA, 14 nt, Human
ugcccacucccugc

SEQ ID NO: 3216652 - RNA, 15 nt, Human
ugcccacucccugca

SEQ ID NO: 3216653 - RNA, 16 nt, Human
ugcccacucccugcaa

SEQ ID NO: 3216654 - RNA, 11 nt, Human
ugcccaggcug

SEQ ID NO: 3216655 - RNA, 15 nt, Human
ugcccaguacauuua

SEQ ID NO: 3216656 - RNA, 19 nt, Human
ugcccaguacauuuaaauu

SEQ ID NO: 3216657 - RNA, 19 nt, Human
ugcccagguggcuguggaa

SEQ ID NO: 3216658 - RNA, 17 nt, Human
ugcccagguggcugugg

SEQ ID NO: 3216659 - RNA, 17 nt, Human
ugcccaugcugggcucc

SEQ ID NO: 3216660 - RNA, 14 nt, Human
ugcccaugcugggc

SEQ ID NO: 3216661 - RNA, 15 nt, Human
ugccccagcuugggc

SEQ ID NO: 3216662 - RNA, 15 nt, Human
ugccccagggcuccc

SEQ ID NO: 3216663 - RNA, 23 nt, Human
ugccccucaacucuccuccagag

SEQ ID NO: 3216664 - RNA, 17 nt, Human
ugccccuggcagccccu

SEQ ID NO: 3216665 - RNA, 19 nt, Human
ugccccucaacucuccucc

SEQ ID NO: 3216666 - RNA, 22 nt, Human
ugcagagcagugggccuggcca

SEQ ID NO: 3216667 - RNA, 13 nt, Human
ugcagagcugaag

SEQ ID NO: 3216668 - RNA, 21 nt, Human
ugcagagcaggaaacaugacu

SEQ ID NO: 3216669 - RNA, 17 nt, Human
ugcagagcaguaaggga

SEQ ID NO: 3216670 - RNA, 18 nt, Human
ugcagagcaguaagggaa

SEQ ID NO: 3216671 - RNA, 11 nt, Human
ugcagagcugc

SEQ ID NO: 3216672 - RNA, 19 nt, Human
ugcagaggcuaugggaaga

SEQ ID NO: 3216673 - RNA, 23 nt, Human
ugcagcacagcugagaggcuguc

SEQ ID NO: 3216674 - RNA, 12 nt, Human
ugcacuuuguuc

SEQ ID NO: 3216675 - RNA, 14 nt, Human
ugcacuuuguucug

SEQ ID NO: 3216676 - RNA, 21 nt, Human
ugcacuuucagacucucucug

SEQ ID NO: 3216677 - RNA, 14 nt, Human
ugcacuuucagacu

SEQ ID NO: 3216678 - RNA, 16 nt, Human
ugcacuggccuucuga

SEQ ID NO: 3216679 - RNA, 17 nt, Human
ugcacuggccuucugau

SEQ ID NO: 3216680 - RNA, 21 nt, Human
ugcacuggccuucugaugaaa

SEQ ID NO: 3216681 - RNA, 22 nt, Human
ugcaccgggccacagagaaagu

SEQ ID NO: 3216682 - RNA, 17 nt, Human
ugcaccgggccacagag

SEQ ID NO: 3216683 - RNA, 19 nt, Human
ugaguccccuguuuguuuc

SEQ ID NO: 3216684 - RNA, 23 nt, Human
ugcaccggcuggccuggccccuc

SEQ ID NO: 3216685 - RNA, 15 nt, Human
ugcaccgggccacag

SEQ ID NO: 3216686 - RNA, 14 nt, Human
ugcaccgggccaca

SEQ ID NO: 3216687 - RNA, 15 nt, Human
ugcacgcuggggaag

SEQ ID NO: 3216688 - RNA, 14 nt, Human
ugcacgcuggggaa

SEQ ID NO: 3216689 - RNA, 22 nt, Human
ugcacgcugggcaaugagaauc

SEQ ID NO: 3216690 - RNA, 13 nt, Human
ugcacugacucug

SEQ ID NO: 3216691 - RNA, 12 nt, Human
ugcacugacucu

SEQ ID NO: 3216692 - RNA, 17 nt, Human
ugcacugacucuggaaa

SEQ ID NO: 3216693 - RNA, 16 nt, Human
ugcacugacucuggaa

SEQ ID NO: 3216694 - RNA, 15 nt, Human
ugcacugacucugga

SEQ ID NO: 3216695 - RNA, 14 nt, Human
ugcacugacucugg

SEQ ID NO: 3216696 - RNA, 13 nt, Human
ugcaguugccagu

SEQ ID NO: 3216697 - RNA, 14 nt, Human
ugcaguugccaguc

SEQ ID NO: 3216698 - RNA, 18 nt, Human
ugcauauaacuuauauug

SEQ ID NO: 3216699 - RNA, 17 nt, Human
ugcauauauauaugugu

SEQ ID NO: 3216700 - RNA, 15 nt, Human
ugcauauauauaugu

SEQ ID NO: 3216701 - RNA, 13 nt, Human
ugcauauauauau

SEQ ID NO: 3216702 - RNA, 21 nt, Human
ugcauauaacuuauauuguaa

SEQ ID NO: 3216703 - RNA, 20 nt, Human
ugcauauaacuuauauugua

SEQ ID NO: 3216704 - RNA, 22 nt, Human
ugcauauaacuuauauuguaag

SEQ ID NO: 3216705 - RNA, 22 nt, Human
ugcagugguaugaucacggcuc

SEQ ID NO: 3216706 - RNA, 13 nt, Human
ugcagugcugcuu

SEQ ID NO: 3216707 - RNA, 16 nt, Human
ugcagugcugcuuugc

SEQ ID NO: 3216708 - RNA, 22 nt, Human
ugcaguggcgaaaucccugcuc

SEQ ID NO: 3216709 - RNA, 19 nt, Human
ugcagugagccgagauugu

SEQ ID NO: 3216710 - RNA, 17 nt, Human
ugcaggcccacccugcu

SEQ ID NO: 3216711 - RNA, 13 nt, Human
ugcaggcaggcug

SEQ ID NO: 3216712 - RNA, 11 nt, Human
ugcaggcaggc

SEQ ID NO: 3216713 - RNA, 15 nt, Human
ugcaggcccacccug

SEQ ID NO: 3216714 - RNA, 14 nt, Human
ugcaggcccacccu

SEQ ID NO: 3216715 - RNA, 13 nt, Human
ugcaggcccaccc

SEQ ID NO: 3216716 - RNA, 12 nt, Human
ugcaggcccacc

SEQ ID NO: 3216717 - RNA, 16 nt, Human
ugcagugcuuccaagg

SEQ ID NO: 3216718 - RNA, 13 nt, Human
ugcaggcagccag

SEQ ID NO: 3216719 - RNA, 14 nt, Human
ugcaggcagccagg

SEQ ID NO: 3216720 - RNA, 19 nt, Human
ugcaggcagccaggccaca

SEQ ID NO: 3216721 - RNA, 10 nt, Human
ugcaggcagg

SEQ ID NO: 3216722 - RNA, 15 nt, Human
ugcaggcagccaggc

SEQ ID NO: 3216723 - RNA, 21 nt, Human
ugcaggauucucaccagcugu

SEQ ID NO: 3216724 - RNA, 17 nt, Human
ugcaggauucucaccag

SEQ ID NO: 3216725 - RNA, 14 nt, Human
ugcagcagggcagu

SEQ ID NO: 3216726 - RNA, 22 nt, Human
ugccucuccgccccugagccca

SEQ ID NO: 3216727 - RNA, 21 nt, Human
ugccucuccgccccugagccc

SEQ ID NO: 3216728 - RNA, 20 nt, Human
ugccucuccgccccugagcc

SEQ ID NO: 3216729 - RNA, 15 nt, Human
ugccucuccgccccu

SEQ ID NO: 3216730 - RNA, 19 nt, Human
ugccugacagagggaugga

SEQ ID NO: 3216731 - RNA, 13 nt, Human
ugccucuugucuu

SEQ ID NO: 3216732 - RNA, 19 nt, Human
ugccucgaacuggcugcaa

SEQ ID NO: 3216733 - RNA, 18 nt, Human
ugccucgaacuggcugca

SEQ ID NO: 3216734 - RNA, 20 nt, Human
ugccucgaacuggcugcaaa

SEQ ID NO: 3216735 - RNA, 12 nt, Human
ugccucuagcug

SEQ ID NO: 3216736 - RNA, 14 nt, Human
ugccucuagcugaa

SEQ ID NO: 3216737 - RNA, 13 nt, Human
ugccucuagcuga

SEQ ID NO: 3216738 - RNA, 18 nt, Human
ugccccuggcagccccug

SEQ ID NO: 3216739 - RNA, 14 nt, Human
ugccccuggccuug

SEQ ID NO: 3216740 - RNA, 19 nt, Human
ugccccuggccuugggauc

SEQ ID NO: 3216741 - RNA, 15 nt, Human
ugccccuggccuugg

SEQ ID NO: 3216742 - RNA, 15 nt, Human
ugccugaggggcagc

SEQ ID NO: 3216743 - RNA, 18 nt, Human
ugccugaggggcagccug

SEQ ID NO: 3216744 - RNA, 16 nt, Human
ugccugaggggcagcc

SEQ ID NO: 3216745 - RNA, 21 nt, Human
ugccugggaucccucauccuc

SEQ ID NO: 3216746 - RNA, 22 nt, Human
ugccugaggggcagccugccuu

SEQ ID NO: 3216747 - RNA, 18 nt, Human
ugccugggcagaaggaag

SEQ ID NO: 3216748 - RNA, 17 nt, Human
ugccugguccucacacu

SEQ ID NO: 3216749 - RNA, 18 nt, Human
ugccuguaaucacagcua

SEQ ID NO: 3216750 - RNA, 15 nt, Human
ugccugguggcagcu

SEQ ID NO: 3216751 - RNA, 14 nt, Human
ugccugguggcagc

SEQ ID NO: 3216752 - RNA, 14 nt, Human
ugccugugaacuga

SEQ ID NO: 3216753 - RNA, 17 nt, Human
ugccugugaacugaacu

SEQ ID NO: 3216754 - RNA, 18 nt, Human
ugccugugaacugaacuc

SEQ ID NO: 3216755 - RNA, 21 nt, Human
ugccugugaacugaacucuga

SEQ ID NO: 3216756 - RNA, 19 nt, Human
ugccuucgguacccaccac

SEQ ID NO: 3216757 - RNA, 18 nt, Human
ugccuucgguacccacca

SEQ ID NO: 3216758 - RNA, 21 nt, Human
ugcgaucuggguucacugcaa

SEQ ID NO: 3216759 - RNA, 20 nt, Human
ugcgaucuggguucacugca

SEQ ID NO: 3216760 - RNA, 19 nt, Human
ugcgaucuggguucacugc

SEQ ID NO: 3216761 - RNA, 15 nt, Human
ugcgaucuggguuca

SEQ ID NO: 3216762 - RNA, 14 nt, Human
ugcgaucuggguuc

SEQ ID NO: 3216763 - RNA, 16 nt, Human
ugcgccuacaggagug

SEQ ID NO: 3216764 - RNA, 14 nt, Human
ugcgccuacaggag

SEQ ID NO: 3216765 - RNA, 22 nt, Human
ugcgccuacaggagugagcacu

SEQ ID NO: 3216766 - RNA, 13 nt, Human
ugcgccuacagga

SEQ ID NO: 3216767 - RNA, 19 nt, Human
ugcuaaacguguauguuuu

SEQ ID NO: 3216768 - RNA, 18 nt, Human
ugcuaaacguguauguuu

SEQ ID NO: 3216769 - RNA, 17 nt, Human
ugcuaaacguguauguu

SEQ ID NO: 3216770 - RNA, 15 nt, Human
ugcuaaaugugaaug

SEQ ID NO: 3216771 - RNA, 23 nt, Human
ugcuaaacguguauguuuuucag

SEQ ID NO: 3216772 - RNA, 22 nt, Human
ugcuaaacguguauguuuuuca

SEQ ID NO: 3216773 - RNA, 21 nt, Human
ugcuaaauugauguugaugca

SEQ ID NO: 3216774 - RNA, 18 nt, Human
ugcuaaauugauguugau

SEQ ID NO: 3216775 - RNA, 17 nt, Human
ugcuaaauugauguuga

SEQ ID NO: 3216776 - RNA, 16 nt, Human
ugcuaaauugauguug

SEQ ID NO: 3216777 - RNA, 15 nt, Human
ugcuaaauugauguu

SEQ ID NO: 3216778 - RNA, 12 nt, Human
ugcuaaauuuca

SEQ ID NO: 3216779 - RNA, 22 nt, Human
ugcuaagacucaguggggaggg

SEQ ID NO: 3216780 - RNA, 16 nt, Human
ugcucacauaucuguc

SEQ ID NO: 3216781 - RNA, 15 nt, Human
ugcucacauaucugu

SEQ ID NO: 3216782 - RNA, 14 nt, Human
ugcuccucucccca

SEQ ID NO: 3216783 - RNA, 20 nt, Human
ugcucagcagugagagcaga

SEQ ID NO: 3216784 - RNA, 15 nt, Human
ugcucacaguuauua

SEQ ID NO: 3216785 - RNA, 17 nt, Human
ugcucagcagugagagc

SEQ ID NO: 3216786 - RNA, 15 nt, Human
ugcucagcagugaga

SEQ ID NO: 3216787 - RNA, 17 nt, Human
ugcucuccaagcccagu

SEQ ID NO: 3216788 - RNA, 22 nt, Human
ugcucucaccuugguuccuggg

SEQ ID NO: 3216789 - RNA, 21 nt, Human
ugcucuccucuugccacugcc

SEQ ID NO: 3216790 - RNA, 18 nt, Human
ugcucuccucuugccacu

SEQ ID NO: 3216791 - RNA, 14 nt, Human
ugcucuccucuugc

SEQ ID NO: 3216792 - RNA, 16 nt, Human
ugcucuccucuugcca

SEQ ID NO: 3216793 - RNA, 17 nt, Human
ugcugaaacaacaaaua

SEQ ID NO: 3216794 - RNA, 22 nt, Human
ugcucuccucuugccacugccu

SEQ ID NO: 3216795 - RNA, 17 nt, Human
ugcuccucuccccagca

SEQ ID NO: 3216796 - RNA, 18 nt, Human
ugcuccuuucuuguuuua

SEQ ID NO: 3216797 - RNA, 22 nt, Human
ugcucgccucggaucagcugag

SEQ ID NO: 3216798 - RNA, 18 nt, Human
ugcucucaaaccccugac

SEQ ID NO: 3216799 - RNA, 20 nt, Human
ugcucucaccuugguuccug

SEQ ID NO: 3216800 - RNA, 21 nt, Human
ugcucucaaaccccugaccuc

SEQ ID NO: 3216801 - RNA, 20 nt, Human
ugcucucaaaccccugaccu

SEQ ID NO: 3216802 - RNA, 19 nt, Human
ugcucucaaaccccugacc

SEQ ID NO: 3216803 - RNA, 13 nt, Human
ugcugauuuuauu

SEQ ID NO: 3216804 - RNA, 17 nt, Human
ugcugauuuuauucuug

SEQ ID NO: 3216805 - RNA, 16 nt, Human
ugcugauuuuauucuu

SEQ ID NO: 3216806 - RNA, 19 nt, Human
ugcugauuuuauucuugau

SEQ ID NO: 3216807 - RNA, 18 nt, Human
ugcugauuuuauucuuga

SEQ ID NO: 3216808 - RNA, 15 nt, Human
ugcugauggugcaau

SEQ ID NO: 3216809 - RNA, 17 nt, Human
ugcugauggugcaauga

SEQ ID NO: 3216810 - RNA, 13 nt, Human
ugcugauggugca

SEQ ID NO: 3216811 - RNA, 12 nt, Human
ugcugaaggcuc

SEQ ID NO: 3216812 - RNA, 23 nt, Human
ugcugaaggaauaaauugcuccu

SEQ ID NO: 3216813 - RNA, 19 nt, Human
ugcugaacauugcauauaa

SEQ ID NO: 3216814 - RNA, 21 nt, Human
ugcugaacauugcauauaacu

SEQ ID NO: 3216815 - RNA, 22 nt, Human
ugcugaacauuggagaaucuca

SEQ ID NO: 3216816 - RNA, 16 nt, Human
ugcugaagaaucuacu

SEQ ID NO: 3216817 - RNA, 14 nt, Human
ugcugaacauugga

SEQ ID NO: 3216818 - RNA, 13 nt, Human
ugcugaaggcucg

SEQ ID NO: 3216819 - RNA, 19 nt, Human
ugcugacagacacaggccc

SEQ ID NO: 3216820 - RNA, 23 nt, Human
ugcugacagacacaggcccggcu

SEQ ID NO: 3216821 - RNA, 22 nt, Human
ugcugacagacacaggcccggc

SEQ ID NO: 3216822 - RNA, 16 nt, Human
ugcugcaguugccagu

SEQ ID NO: 3216823 - RNA, 18 nt, Human
ugcugcaguugccaguca

SEQ ID NO: 3216824 - RNA, 23 nt, Human
ugcugcaguugccagucaccccg

SEQ ID NO: 3216825 - RNA, 18 nt, Human
ugcugcuaauucuuugca

SEQ ID NO: 3216826 - RNA, 14 nt, Human
ugcugcuaauucuu

SEQ ID NO: 3216827 - RNA, 21 nt, Human
ugcugcuaauucuuugcaaaa

SEQ ID NO: 3216828 - RNA, 13 nt, Human
ugcugcuggcugg

SEQ ID NO: 3216829 - RNA, 16 nt, Human
ugcugcuuugauauau

SEQ ID NO: 3216830 - RNA, 14 nt, Human
ugcugcuuugauau

SEQ ID NO: 3216831 - RNA, 19 nt, Human
ugcuggaacucuugacagc

SEQ ID NO: 3216832 - RNA, 12 nt, Human
ugcuggaaagag

SEQ ID NO: 3216833 - RNA, 22 nt, Human
uguacgacgucagauguuuaaa

SEQ ID NO: 3216834 - RNA, 23 nt, Human
uguacgacgucagauguuuaaaa

SEQ ID NO: 3216835 - RNA, 15 nt, Human
uguacgucugacagg

SEQ ID NO: 3216836 - RNA, 14 nt, Human
uguaccucugccuc

SEQ ID NO: 3216837 - RNA, 19 nt, Human
uguacugcauaugaaagga

SEQ ID NO: 3216838 - RNA, 18 nt, Human
uguagauacaaucagcug

SEQ ID NO: 3216839 - RNA, 19 nt, Human
uguagauacaaucagcugc

SEQ ID NO: 3216840 - RNA, 20 nt, Human
uguagauacaaucagcugcu

SEQ ID NO: 3216841 - RNA, 21 nt, Human
uguagauacaaucagcugcuu

SEQ ID NO: 3216842 - RNA, 20 nt, Human
uguagaucaacucauguuaa

SEQ ID NO: 3216843 - RNA, 15 nt, Human
uguagauuuauuuca

SEQ ID NO: 3216844 - RNA, 16 nt, Human
uguagauuuauuucau

SEQ ID NO: 3216845 - RNA, 23 nt, Human
uguagccucaaucgagugagaca

SEQ ID NO: 3216846 - RNA, 22 nt, Human
uguaauaaacccuuaacuggca

SEQ ID NO: 3216847 - RNA, 14 nt, Human
uguaauaaacccuu

SEQ ID NO: 3216848 - RNA, 23 nt, Human
uguaauaaacccuuaacuggcau

SEQ ID NO: 3216849 - RNA, 14 nt, Human
uggucacagccagg

SEQ ID NO: 3216850 - RNA, 23 nt, Human
ugguauuggccauaagcaacaau

SEQ ID NO: 3216851 - RNA, 17 nt, Human
uggucacagccaggcgc

SEQ ID NO: 3216852 - RNA, 15 nt, Human
uggucacagccaggc

SEQ ID NO: 3216853 - RNA, 14 nt, Human
uguaaucaacaugg

SEQ ID NO: 3216854 - RNA, 23 nt, Human
uguaauauagaaaaaaacauucu

SEQ ID NO: 3216855 - RNA, 19 nt, Human
uguaauauuacuuuaacau

SEQ ID NO: 3216856 - RNA, 13 nt, Human
uguaauauuuaca

SEQ ID NO: 3216857 - RNA, 14 nt, Human
uguaauauuuacaa

SEQ ID NO: 3216858 - RNA, 15 nt, Human
uguaauauuuacaau

SEQ ID NO: 3216859 - RNA, 17 nt, Human
uguaauauuuacaaugu

SEQ ID NO: 3216860 - RNA, 19 nt, Human
uguaauauuuacaauguau

SEQ ID NO: 3216861 - RNA, 21 nt, Human
uguaauauuuacaauguauua

SEQ ID NO: 3216862 - RNA, 14 nt, Human
uguaaucuuguuga

SEQ ID NO: 3216863 - RNA, 19 nt, Human
uguaaucuuguugauaaaa

SEQ ID NO: 3216864 - RNA, 15 nt, Human
uguaccgcaauguga

SEQ ID NO: 3216865 - RNA, 16 nt, Human
uguaccgcaaugugac

SEQ ID NO: 3216866 - RNA, 18 nt, Human
uguacagagcccacgccc

SEQ ID NO: 3216867 - RNA, 16 nt, Human
uguacagagcccacgc

SEQ ID NO: 3216868 - RNA, 17 nt, Human
uguacagagcccacgcc

SEQ ID NO: 3216869 - RNA, 13 nt, Human
uguacagagccca

SEQ ID NO: 3216870 - RNA, 18 nt, Human
uguacaaugacuuuauug

SEQ ID NO: 3216871 - RNA, 15 nt, Human
uguaauguugugaau

SEQ ID NO: 3216872 - RNA, 14 nt, Human
uguaauguugugaa

SEQ ID NO: 3216873 - RNA, 16 nt, Human
uguacaaggacagccc

SEQ ID NO: 3216874 - RNA, 20 nt, Human
uguacaaggacagccccucc

SEQ ID NO: 3216875 - RNA, 23 nt, Human
uguacaaggacagccccuccucc

SEQ ID NO: 3216876 - RNA, 16 nt, Human
uguccuacccacccuc

SEQ ID NO: 3216877 - RNA, 17 nt, Human
uguccuacucuguguca

SEQ ID NO: 3216878 - RNA, 12 nt, Human
uguccuacucug

SEQ ID NO: 3216879 - RNA, 16 nt, Human
uguccccgacccuugc

SEQ ID NO: 3216880 - RNA, 20 nt, Human
uguccuacccacccuccuuu

SEQ ID NO: 3216881 - RNA, 18 nt, Human
uguccccaccgcagacag

SEQ ID NO: 3216882 - RNA, 19 nt, Human
uguccccaccgcagacagg

SEQ ID NO: 3216883 - RNA, 22 nt, Human
uguccccaccgcagacaggacc

SEQ ID NO: 3216884 - RNA, 13 nt, Human
uguccccaccgca

SEQ ID NO: 3216885 - RNA, 15 nt, Human
ugucccccaacuuca

SEQ ID NO: 3216886 - RNA, 16 nt, Human
ugucauuugagcaggg

SEQ ID NO: 3216887 - RNA, 22 nt, Human
ugucauuucauguccuguguca

SEQ ID NO: 3216888 - RNA, 18 nt, Human
ugucauuucauguccugu

SEQ ID NO: 3216889 - RNA, 16 nt, Human
uguccaguaagaucac

SEQ ID NO: 3216890 - RNA, 17 nt, Human
uguccaguaagaucacu

SEQ ID NO: 3216891 - RNA, 19 nt, Human
uguccaguaagaucacugu

SEQ ID NO: 3216892 - RNA, 20 nt, Human
uguccaguaagaucacuguu

SEQ ID NO: 3216893 - RNA, 21 nt, Human
uguccaguaagaucacuguuu

SEQ ID NO: 3216894 - RNA, 22 nt, Human
uguccaguaagaucacuguuua

SEQ ID NO: 3216895 - RNA, 23 nt, Human
ugucccaaaaagaaaggagggga

SEQ ID NO: 3216896 - RNA, 16 nt, Human
ugucccaacuuguaaa

SEQ ID NO: 3216897 - RNA, 13 nt, Human
ugucaccugaaga

SEQ ID NO: 3216898 - RNA, 20 nt, Human
ugucaccugcuucucugccc

SEQ ID NO: 3216899 - RNA, 18 nt, Human
ugucaccugcuucucugc

SEQ ID NO: 3216900 - RNA, 17 nt, Human
ugucaccugcuucucug

SEQ ID NO: 3216901 - RNA, 16 nt, Human
ugucaucugagaauga

SEQ ID NO: 3216902 - RNA, 14 nt, Human
ugucaucugagaau

SEQ ID NO: 3216903 - RNA, 19 nt, Human
ugucaucugagaaugaaca

SEQ ID NO: 3216904 - RNA, 20 nt, Human
ugucaugcagaguauuucua

SEQ ID NO: 3216905 - RNA, 14 nt, Human
ugucaugugcagau

SEQ ID NO: 3216906 - RNA, 22 nt, Human
ugucacccuuaggccagcacca

SEQ ID NO: 3216907 - RNA, 20 nt, Human
ugucacccgaucgccagcaa

SEQ ID NO: 3216908 - RNA, 12 nt, Human
ugucacaggcag

SEQ ID NO: 3216909 - RNA, 21 nt, Human
ugucacaggaaggcugucuca

SEQ ID NO: 3216910 - RNA, 17 nt, Human
ugucacacacuuuggcu

SEQ ID NO: 3216911 - RNA, 13 nt, Human
ugucacacacuuu

SEQ ID NO: 3216912 - RNA, 18 nt, Human
uguauuguuguaaaaugu

SEQ ID NO: 3216913 - RNA, 20 nt, Human
uguauuuauuuaguauuuau

SEQ ID NO: 3216914 - RNA, 15 nt, Human
uguauuuauucuuuu

SEQ ID NO: 3216915 - RNA, 14 nt, Human
uguauuuauucuuu

SEQ ID NO: 3216916 - RNA, 19 nt, Human
uguauuuuacuaauaaaau

SEQ ID NO: 3216917 - RNA, 17 nt, Human
uguaugaucugugccuu

SEQ ID NO: 3216918 - RNA, 16 nt, Human
uguaugaucugugccu

SEQ ID NO: 3216919 - RNA, 12 nt, Human
uguaguucuuua

SEQ ID NO: 3216920 - RNA, 14 nt, Human
uguaguucuuuaaa

SEQ ID NO: 3216921 - RNA, 15 nt, Human
uguaguucuuuaaac

SEQ ID NO: 3216922 - RNA, 17 nt, Human
uguaguucuuuaaacug

SEQ ID NO: 3216923 - RNA, 22 nt, Human
uguaguuugaggaaauuugcag

SEQ ID NO: 3216924 - RNA, 13 nt, Human
uguauucuguaaa

SEQ ID NO: 3216925 - RNA, 13 nt, Human
uguauucugucuu

SEQ ID NO: 3216926 - RNA, 14 nt, Human
uguauucuguaaaa

SEQ ID NO: 3216927 - RNA, 17 nt, Human
uguauucugucuucauc

SEQ ID NO: 3216928 - RNA, 16 nt, Human
uguauucugucuucau

SEQ ID NO: 3216929 - RNA, 19 nt, Human
uguauuguccuauuagugu

SEQ ID NO: 3216930 - RNA, 14 nt, Human
uguauuguccuauu

SEQ ID NO: 3216931 - RNA, 16 nt, Human
uguauuguuagauguu

SEQ ID NO: 3216932 - RNA, 17 nt, Human
uguauuguuagauguuu

SEQ ID NO: 3216933 - RNA, 19 nt, Human
uguauuguuagauguuugu

SEQ ID NO: 3216934 - RNA, 21 nt, Human
ugucuuuccacuccuccuagc

SEQ ID NO: 3216935 - RNA, 15 nt, Human
ugucuuucuaagaaa

SEQ ID NO: 3216936 - RNA, 16 nt, Human
ugucuuucuaagaaau

SEQ ID NO: 3216937 - RNA, 17 nt, Human
ugucuuucuaagaaauc

SEQ ID NO: 3216938 - RNA, 16 nt, Human
ugucugucccaguuaa

SEQ ID NO: 3216939 - RNA, 18 nt, Human
ugucuguaaaucuaacau

SEQ ID NO: 3216940 - RNA, 21 nt, Human
ugucuguaaaucuaacauuau

SEQ ID NO: 3216941 - RNA, 22 nt, Human
ugucuguaaaucuaacauuauu

SEQ ID NO: 3216942 - RNA, 16 nt, Human
ugucuuuggacccuga

SEQ ID NO: 3216943 - RNA, 21 nt, Human
ugucuuuucuugcaugaggcu

SEQ ID NO: 3216944 - RNA, 14 nt, Human
ugucuuuggacccu

SEQ ID NO: 3216945 - RNA, 13 nt, Human
ugucuuucugggg

SEQ ID NO: 3216946 - RNA, 23 nt, Human
ugucuuuucuugcaugaggcuag

SEQ ID NO: 3216947 - RNA, 20 nt, Human
ugucuuuucuuugccaucuc

SEQ ID NO: 3216948 - RNA, 19 nt, Human
ugucuuuucuuugccaucu

SEQ ID NO: 3216949 - RNA, 17 nt, Human
ugucuuucuugcucccu

SEQ ID NO: 3216950 - RNA, 23 nt, Human
ugugaaaagaaaaaugagccugg

SEQ ID NO: 3216951 - RNA, 21 nt, Human
ugugaaaagaaaaaugagccu

SEQ ID NO: 3216952 - RNA, 16 nt, Human
ugugaaaaugugugug

SEQ ID NO: 3216953 - RNA, 12 nt, Human
ugugaagcugga

SEQ ID NO: 3216954 - RNA, 21 nt, Human
ugugaagcuggaacugcggga

SEQ ID NO: 3216955 - RNA, 18 nt, Human
ugugaaggaccuucacuc

SEQ ID NO: 3216956 - RNA, 22 nt, Human
ugugaaggauuauggaaaaaua

SEQ ID NO: 3216957 - RNA, 23 nt, Human
ugugaaggauuauggaaaaauaa

SEQ ID NO: 3216958 - RNA, 13 nt, Human
ugugaaggaccuu

SEQ ID NO: 3216959 - RNA, 22 nt, Human
ugugaagcuuaagggucauaug

SEQ ID NO: 3216960 - RNA, 20 nt, Human
ugucuggcacagccugcacu

SEQ ID NO: 3216961 - RNA, 18 nt, Human
ugucuggcacagccugca

SEQ ID NO: 3216962 - RNA, 17 nt, Human
ugucuggcacagccugc

SEQ ID NO: 3216963 - RNA, 14 nt, Human
ugucuggaucagua

SEQ ID NO: 3216964 - RNA, 15 nt, Human
ugucuggaucaguaa

SEQ ID NO: 3216965 - RNA, 20 nt, Human
ugucuggaucaguaaaauua

SEQ ID NO: 3216966 - RNA, 21 nt, Human
ugucuggaucaguaaaauuau

SEQ ID NO: 3216967 - RNA, 16 nt, Human
ugucugaagucacugc

SEQ ID NO: 3216968 - RNA, 18 nt, Human
ugucugaagucacugcac

SEQ ID NO: 3216969 - RNA, 17 nt, Human
ugucugaagucacugca

SEQ ID NO: 3216970 - RNA, 23 nt, Human
ugucugcuggucacuucuucugu

SEQ ID NO: 3216971 - RNA, 22 nt, Human
ugucugcuggucacuucuucug

SEQ ID NO: 3216972 - RNA, 21 nt, Human
ugucugcuggucacuucuucu

SEQ ID NO: 3216973 - RNA, 18 nt, Human
ugucugcuggucacuucu

SEQ ID NO: 3216974 - RNA, 19 nt, Human
ugucugaagucacugcaca

SEQ ID NO: 3216975 - RNA, 17 nt, Human
ugucugcuccagcucug

SEQ ID NO: 3216976 - RNA, 14 nt, Human
uguccuccugcugc

SEQ ID NO: 3216977 - RNA, 20 nt, Human
uguccucuuuuguuguuucu

SEQ ID NO: 3216978 - RNA, 22 nt, Human
uguccucuuuuguuguuucuua

SEQ ID NO: 3216979 - RNA, 18 nt, Human
uguccuccugcugccagu

SEQ ID NO: 3216980 - RNA, 17 nt, Human
uguccuccugcugccag

SEQ ID NO: 3216981 - RNA, 15 nt, Human
ugugauauuccccuu

SEQ ID NO: 3216982 - RNA, 13 nt, Human
ugugauauuucag

SEQ ID NO: 3216983 - RNA, 22 nt, Human
ugugauauuucagaaauacaga

SEQ ID NO: 3216984 - RNA, 20 nt, Human
ugugauauuucagaaauaca

SEQ ID NO: 3216985 - RNA, 16 nt, Human
ugugauauuucagaaa

SEQ ID NO: 3216986 - RNA, 14 nt, Human
ugugauauuucaga

SEQ ID NO: 3216987 - RNA, 16 nt, Human
ugugcacaggcagagc

SEQ ID NO: 3216988 - RNA, 14 nt, Human
ugugcacaggcaga

SEQ ID NO: 3216989 - RNA, 13 nt, Human
ugugcacaggcag

SEQ ID NO: 3216990 - RNA, 12 nt, Human
ugugcacaggca

SEQ ID NO: 3216991 - RNA, 17 nt, Human
ugugagucaccaagccc

SEQ ID NO: 3216992 - RNA, 15 nt, Human
ugugagucaccaagc

SEQ ID NO: 3216993 - RNA, 21 nt, Human
ugugagucaccaagcccaguu

SEQ ID NO: 3216994 - RNA, 19 nt, Human
ugugagucaccaagcccag

SEQ ID NO: 3216995 - RNA, 13 nt, Human
ugugagugugaau

SEQ ID NO: 3216996 - RNA, 20 nt, Human
ugugagugugaauauaaaug

SEQ ID NO: 3216997 - RNA, 14 nt, Human
ugugagugguugaa

SEQ ID NO: 3216998 - RNA, 16 nt, Human
ugugaaggaccuucac

SEQ ID NO: 3216999 - RNA, 13 nt, Human
ugugaauuacuaa

SEQ ID NO: 3217000 - RNA, 15 nt, Human
ugugaauuacuaacu

SEQ ID NO: 3217001 - RNA, 17 nt, Human
ugugaauuacuaacuuc

SEQ ID NO: 3217002 - RNA, 16 nt, Human
ugugaauuacuaacuu

SEQ ID NO: 3217003 - RNA, 20 nt, Human
ugugaauuacuaacuucuaa

SEQ ID NO: 3217004 - RNA, 19 nt, Human
ugugaauuacuaacuucua

SEQ ID NO: 3217005 - RNA, 15 nt, Human
ugugacauguuuuau

SEQ ID NO: 3217006 - RNA, 10 nt, Human
ugugacauuu

SEQ ID NO: 3217007 - RNA, 15 nt, Human
ugugacauuugucau

SEQ ID NO: 3217008 - RNA, 19 nt, Human
ugugacauuugucauuuuc

SEQ ID NO: 3217009 - RNA, 18 nt, Human
ugugacauuugucauuuu

SEQ ID NO: 3217010 - RNA, 13 nt, Human
ugugaggaagccg

SEQ ID NO: 3217011 - RNA, 18 nt, Human
ugugaggaagccgcuggg

SEQ ID NO: 3217012 - RNA, 21 nt, Human
ugugacauuugucauuuucau

SEQ ID NO: 3217013 - RNA, 20 nt, Human
ugugacauuugucauuuuca

SEQ ID NO: 3217014 - RNA, 15 nt, Human
ugugaccaaguauaa

SEQ ID NO: 3217015 - RNA, 19 nt, Human
ugugaccaaguauaaacuu

SEQ ID NO: 3217016 - RNA, 22 nt, Human
ugugacauuugucauuuucauu

SEQ ID NO: 3217017 - RNA, 20 nt, Human
ugugaggaagccgcuggggc

SEQ ID NO: 3217018 - RNA, 12 nt, Human
ugugaggaagcc

SEQ ID NO: 3217019 - RNA, 12 nt, Human
ugugaggcagga

SEQ ID NO: 3217020 - RNA, 14 nt, Human
ugugaggcaggaga

SEQ ID NO: 3217021 - RNA, 17 nt, Human
ugugccuuggugugcug

SEQ ID NO: 3217022 - RNA, 14 nt, Human
ugugcacguacaca

SEQ ID NO: 3217023 - RNA, 20 nt, Human
ugugcacuuuuuuucuauau

SEQ ID NO: 3217024 - RNA, 14 nt, Human
ugugcuuguuaacu

SEQ ID NO: 3217025 - RNA, 13 nt, Human
ugugcuuucaaga

SEQ ID NO: 3217026 - RNA, 14 nt, Human
ugugcuuucaagau

SEQ ID NO: 3217027 - RNA, 19 nt, Human
uguggaaauuaagaagaaa

SEQ ID NO: 3217028 - RNA, 16 nt, Human
ugugccuuuugccauc

SEQ ID NO: 3217029 - RNA, 20 nt, Human
ugugccuuuuuuauaucuug

SEQ ID NO: 3217030 - RNA, 14 nt, Human
ugugccuuuuuuau

SEQ ID NO: 3217031 - RNA, 14 nt, Human
ugugcgccuacagg

SEQ ID NO: 3217032 - RNA, 19 nt, Human
ugugcgccuacaggaguga

SEQ ID NO: 3217033 - RNA, 21 nt, Human
ugugcucagaauuauuaauua

SEQ ID NO: 3217034 - RNA, 14 nt, Human
ugugcucagaauua

SEQ ID NO: 3217035 - RNA, 16 nt, Human
ugugcuauuaauauuu

SEQ ID NO: 3217036 - RNA, 17 nt, Human
ugugcuauuaauauuug

SEQ ID NO: 3217037 - RNA, 18 nt, Human
ugugcuauuaauauuugu

SEQ ID NO: 3217038 - RNA, 22 nt, Human
ugugcgcauaggccugcuuugu

SEQ ID NO: 3217039 - RNA, 19 nt, Human
ugugcgcauaggccugcuu

SEQ ID NO: 3217040 - RNA, 14 nt, Human
ugugggagugugua

SEQ ID NO: 3217041 - RNA, 15 nt, Human
ugugggaguguguaa

SEQ ID NO: 3217042 - RNA, 10 nt, Human
uguggcucac

SEQ ID NO: 3217043 - RNA, 20 nt, Human
uguggcuccacacacacaaa

SEQ ID NO: 3217044 - RNA, 12 nt, Human
uguggcuccaca

SEQ ID NO: 3217045 - RNA, 17 nt, Human
uguggcuaaaaaagcug

SEQ ID NO: 3217046 - RNA, 23 nt, Human
uguggcgcagcauauucaggaag

SEQ ID NO: 3217047 - RNA, 16 nt, Human
uguggccucuucugag

SEQ ID NO: 3217048 - RNA, 18 nt, Human
uguggccucuucugagcu

SEQ ID NO: 3217049 - RNA, 14 nt, Human
uguggccugccagu

SEQ ID NO: 3217050 - RNA, 15 nt, Human
uguggaagugugggu

SEQ ID NO: 3217051 - RNA, 18 nt, Human
uguggacacagcucuucu

SEQ ID NO: 3217052 - RNA, 19 nt, Human
uguggacacagcucuucuc

SEQ ID NO: 3217053 - RNA, 16 nt, Human
uguggacacagcucuu

SEQ ID NO: 3217054 - RNA, 19 nt, Human
uguguaauuuaaaauugug

SEQ ID NO: 3217055 - RNA, 22 nt, Human
uguguaauuuaaaauugugaug

SEQ ID NO: 3217056 - RNA, 23 nt, Human
uguguaauuuaaaauugugaugu

SEQ ID NO: 3217057 - RNA, 14 nt, Human
uguguaauuuuucu

SEQ ID NO: 3217058 - RNA, 12 nt, Human
uguguaauuuuu

SEQ ID NO: 3217059 - RNA, 19 nt, Human
uguguaauuuuucuguaua

SEQ ID NO: 3217060 - RNA, 17 nt, Human
uguguaauuuuucugua

SEQ ID NO: 3217061 - RNA, 15 nt, Human
uguguaauuuuucug

SEQ ID NO: 3217062 - RNA, 12 nt, Human
uguguagggcgg

SEQ ID NO: 3217063 - RNA, 18 nt, Human
uguguagcugcaaaaaua

SEQ ID NO: 3217064 - RNA, 11 nt, Human
uguguaauuua

SEQ ID NO: 3217065 - RNA, 18 nt, Human
uguguaauuuaaaauugu

SEQ ID NO: 3217066 - RNA, 13 nt, Human
uguguaauauuac

SEQ ID NO: 3217067 - RNA, 23 nt, Human
uguguaauauuacuuuaacaugc

SEQ ID NO: 3217068 - RNA, 22 nt, Human
ugugggcgugagaccugccccu

SEQ ID NO: 3217069 - RNA, 15 nt, Human
ugugggcaaaagagu

SEQ ID NO: 3217070 - RNA, 20 nt, Human
ugugggcgugagaccugccc

SEQ ID NO: 3217071 - RNA, 21 nt, Human
ugugggcgugagaccugcccc

SEQ ID NO: 3217072 - RNA, 16 nt, Human
uguucuuuugucccag

SEQ ID NO: 3217073 - RNA, 12 nt, Human
uguucuuuucaa

SEQ ID NO: 3217074 - RNA, 12 nt, Human
uguugaaaaaau

SEQ ID NO: 3217075 - RNA, 13 nt, Human
uguugaaaaaauu

SEQ ID NO: 3217076 - RNA, 15 nt, Human
uguugaaaaaauuua

SEQ ID NO: 3217077 - RNA, 21 nt, Human
uguugaaaaaauuuaaaagua

SEQ ID NO: 3217078 - RNA, 17 nt, Human
uguucuggcucuuccag

SEQ ID NO: 3217079 - RNA, 20 nt, Human
uguucuggcucuuccaggcu

SEQ ID NO: 3217080 - RNA, 21 nt, Human
uguucuggcucuuccaggcug

SEQ ID NO: 3217081 - RNA, 15 nt, Human
uguucugcuuuccuc

SEQ ID NO: 3217082 - RNA, 20 nt, Human
uguugacaucacuggcaugg

SEQ ID NO: 3217083 - RNA, 20 nt, Human
uguugaaaagaguaguacuu

SEQ ID NO: 3217084 - RNA, 15 nt, Human
uguugaagccuuugu

SEQ ID NO: 3217085 - RNA, 15 nt, Human
uguugacauuuguuu

SEQ ID NO: 3217086 - RNA, 22 nt, Human
uguugaccaggcaccuccccuc

SEQ ID NO: 3217087 - RNA, 21 nt, Human
uguugaccaggcaccuccccu

SEQ ID NO: 3217088 - RNA, 22 nt, Human
uguugacucuaguacugugaau

SEQ ID NO: 3217089 - RNA, 19 nt, Human
uguugacucuaguacugug

SEQ ID NO: 3217090 - RNA, 13 nt, Human
uguucucugcccu

SEQ ID NO: 3217091 - RNA, 14 nt, Human
uguucucugcccuc

SEQ ID NO: 3217092 - RNA, 15 nt, Human
uguucucugcccucc

SEQ ID NO: 3217093 - RNA, 13 nt, Human
uguucuggcucuu

SEQ ID NO: 3217094 - RNA, 16 nt, Human
uguucuggcucuucca

SEQ ID NO: 3217095 - RNA, 12 nt, Human
uguucuggcucu

SEQ ID NO: 3217096 - RNA, 20 nt, Human
uguucugcuaaauuucaaau

SEQ ID NO: 3217097 - RNA, 19 nt, Human
uguucaucauccuaagcua

SEQ ID NO: 3217098 - RNA, 15 nt, Human
uguucucucuucucc

SEQ ID NO: 3217099 - RNA, 16 nt, Human
uguucucucuucucca

SEQ ID NO: 3217100 - RNA, 12 nt, Human
uguuuacagugu

SEQ ID NO: 3217101 - RNA, 13 nt, Human
uguuuaagcagaa

SEQ ID NO: 3217102 - RNA, 18 nt, Human
uguuuaagcagaauugga

SEQ ID NO: 3217103 - RNA, 14 nt, Human
uguuuaagcagaau

SEQ ID NO: 3217104 - RNA, 17 nt, Human
uguuuaauaaagcgaaa

SEQ ID NO: 3217105 - RNA, 21 nt, Human
uguuuaagugaauugacuuau

SEQ ID NO: 3217106 - RNA, 19 nt, Human
uguuuaagcagaauuggaa

SEQ ID NO: 3217107 - RNA, 17 nt, Human
uguuuaagacacuuccg

SEQ ID NO: 3217108 - RNA, 19 nt, Human
uguuuaagacacuuccguc

SEQ ID NO: 3217109 - RNA, 18 nt, Human
uguuuaagacacuuccgu

SEQ ID NO: 3217110 - RNA, 14 nt, Human
uguuuaaaaucauu

SEQ ID NO: 3217111 - RNA, 23 nt, Human
uguuuaaagguuucuauuuucuc

SEQ ID NO: 3217112 - RNA, 15 nt, Human
uguuggccucugcaa

SEQ ID NO: 3217113 - RNA, 17 nt, Human
uguuggcugggggccuc

SEQ ID NO: 3217114 - RNA, 18 nt, Human
uguuuaaaaucauuucug

SEQ ID NO: 3217115 - RNA, 17 nt, Human
uguuuaaaaucauuucu

SEQ ID NO: 3217116 - RNA, 19 nt, Human
uguuggcugggggccucag

SEQ ID NO: 3217117 - RNA, 15 nt, Human
uguuggcagaugcag

SEQ ID NO: 3217118 - RNA, 16 nt, Human
uguuggccaggcuggu

SEQ ID NO: 3217119 - RNA, 15 nt, Human
uguuggccaggcugg

SEQ ID NO: 3217120 - RNA, 14 nt, Human
uguuggcagccucu

SEQ ID NO: 3217121 - RNA, 23 nt, Human
uguuggcagaugcagcucuuccu

SEQ ID NO: 3217122 - RNA, 18 nt, Human
uguuggccaggcugcucu

SEQ ID NO: 3217123 - RNA, 14 nt, Human
uguugauucucucc

SEQ ID NO: 3217124 - RNA, 16 nt, Human
uguugauuaaagauga

SEQ ID NO: 3217125 - RNA, 20 nt, Human
uguugauuaauuucugccau

SEQ ID NO: 3217126 - RNA, 15 nt, Human
uguugauuaaagaug

SEQ ID NO: 3217127 - RNA, 16 nt, Human
uguugaugcuguauuc

SEQ ID NO: 3217128 - RNA, 23 nt, Human
uguugaugggaugauugaagaaa

SEQ ID NO: 3217129 - RNA, 21 nt, Human
uguugaugggaugauugaaga

SEQ ID NO: 3217130 - RNA, 23 nt, Human
uguugaugcaauccuuacaaaug

SEQ ID NO: 3217131 - RNA, 22 nt, Human
uguugaugcaauccuuacaaau

SEQ ID NO: 3217132 - RNA, 21 nt, Human
uguugaugcaauccuuacaaa

SEQ ID NO: 3217133 - RNA, 20 nt, Human
uguugaugcaauccuuacaa

SEQ ID NO: 3217134 - RNA, 16 nt, Human
ugugugggagugugua

SEQ ID NO: 3217135 - RNA, 20 nt, Human
uguguggagucauuucugau

SEQ ID NO: 3217136 - RNA, 17 nt, Human
ugugugugaaaaugugu

SEQ ID NO: 3217137 - RNA, 16 nt, Human
uguguuuauugucaaa

SEQ ID NO: 3217138 - RNA, 19 nt, Human
ugugugugcuuauguauga

SEQ ID NO: 3217139 - RNA, 13 nt, Human
uguguuuauuguc

SEQ ID NO: 3217140 - RNA, 13 nt, Human
ugugugugaugug

SEQ ID NO: 3217141 - RNA, 15 nt, Human
ugugugugaugugac

SEQ ID NO: 3217142 - RNA, 14 nt, Human
ugugugugauguga

SEQ ID NO: 3217143 - RNA, 18 nt, Human
ugugugugaugugacauu

SEQ ID NO: 3217144 - RNA, 21 nt, Human
uguguuucuguccuguaacug

SEQ ID NO: 3217145 - RNA, 14 nt, Human
ugugugggagugug

SEQ ID NO: 3217146 - RNA, 15 nt, Human
ugugugggagugugu

SEQ ID NO: 3217147 - RNA, 17 nt, Human
uguguggagucauuucu

SEQ ID NO: 3217148 - RNA, 13 nt, Human
ugugugcucucca

SEQ ID NO: 3217149 - RNA, 15 nt, Human
ugugugcuuauguau

SEQ ID NO: 3217150 - RNA, 17 nt, Human
ugugugcuaaacgugua

SEQ ID NO: 3217151 - RNA, 19 nt, Human
ugugugcacguacacacac

SEQ ID NO: 3217152 - RNA, 15 nt, Human
ugugugauuaaaagg

SEQ ID NO: 3217153 - RNA, 14 nt, Human
ugugugauugaagg

SEQ ID NO: 3217154 - RNA, 11 nt, Human
uguguaugugg

SEQ ID NO: 3217155 - RNA, 12 nt, Human
uguguauguggg

SEQ ID NO: 3217156 - RNA, 18 nt, Human
uguguaugcgugugugug

SEQ ID NO: 3217157 - RNA, 16 nt, Human
ugugugauauuucaga

SEQ ID NO: 3217158 - RNA, 22 nt, Human
uguguaugugaguauucucauu

SEQ ID NO: 3217159 - RNA, 20 nt, Human
ugugugauauuucagaaaua

SEQ ID NO: 3217160 - RNA, 18 nt, Human
ugugugauauuucagaaa

SEQ ID NO: 3217161 - RNA, 19 nt, Human
ugugugaugugacauuugu

SEQ ID NO: 3217162 - RNA, 17 nt, Human
ugugugaugugacauuu

SEQ ID NO: 3217163 - RNA, 15 nt, Human
ugugugaugugacau

SEQ ID NO: 3217164 - RNA, 14 nt, Human
ugugugaugugaca

SEQ ID NO: 3217165 - RNA, 18 nt, Human
uguucagcuccagcucac

SEQ ID NO: 3217166 - RNA, 18 nt, Human
uguucagcguuuugcaag

SEQ ID NO: 3217167 - RNA, 19 nt, Human
uguucagccacugagggac

SEQ ID NO: 3217168 - RNA, 21 nt, Human
uguucagcuccagcucaccag

SEQ ID NO: 3217169 - RNA, 20 nt, Human
uguucagcuccagcucacca

SEQ ID NO: 3217170 - RNA, 18 nt, Human
uguucagccacugaggga

SEQ ID NO: 3217171 - RNA, 21 nt, Human
uguuaggccaaagacaaauag

SEQ ID NO: 3217172 - RNA, 15 nt, Human
uguucagaaaaaagg

SEQ ID NO: 3217173 - RNA, 12 nt, Human
uguucagaaaaa

SEQ ID NO: 3217174 - RNA, 21 nt, Human
uguuaaaagaugaaaauauuu

SEQ ID NO: 3217175 - RNA, 13 nt, Human
uguuaaaauaaau

SEQ ID NO: 3217176 - RNA, 13 nt, Human
uguguuuuucuca

SEQ ID NO: 3217177 - RNA, 14 nt, Human
uguguuuuuuaaga

SEQ ID NO: 3217178 - RNA, 15 nt, Human
uguguuuuuuaagau

SEQ ID NO: 3217179 - RNA, 12 nt, Human
uguuaccuuaaa

SEQ ID NO: 3217180 - RNA, 13 nt, Human
uguuaccuuaaaa

SEQ ID NO: 3217181 - RNA, 14 nt, Human
uguuaccuuaaaac

SEQ ID NO: 3217182 - RNA, 17 nt, Human
uguuaccuuaaaacuag

SEQ ID NO: 3217183 - RNA, 23 nt, Human
uguuaccccaagcgcccuggccc

SEQ ID NO: 3217184 - RNA, 23 nt, Human
uguuaccauuggaaauuucacgu

SEQ ID NO: 3217185 - RNA, 18 nt, Human
uguuaccauuggaaauuu

SEQ ID NO: 3217186 - RNA, 23 nt, Human
uguuaaaaugcaugauugcagaa

SEQ ID NO: 3217187 - RNA, 22 nt, Human
uguuaaaauuauaccuguugcu

SEQ ID NO: 3217188 - RNA, 14 nt, Human
uguuacucuuggga

SEQ ID NO: 3217189 - RNA, 18 nt, Human
uguuacucuugggacauc

SEQ ID NO: 3217190 - RNA, 17 nt, Human
uguuacucuugggacau

SEQ ID NO: 3217191 - RNA, 20 nt, Human
uguuacuggauaaauuguuu

SEQ ID NO: 3217192 - RNA, 17 nt, Human
uguuagccccauaauuu

SEQ ID NO: 3217193 - RNA, 19 nt, Human
uguuaggccaaagacaaau

SEQ ID NO: 3217194 - RNA, 13 nt, Human
uuaacuuuaccau

SEQ ID NO: 3217195 - RNA, 13 nt, Human
uuaagauggcaau

SEQ ID NO: 3217196 - RNA, 21 nt, Human
uuaagauggcaauuacuuugg

SEQ ID NO: 3217197 - RNA, 12 nt, Human
uuaagauucuug

SEQ ID NO: 3217198 - RNA, 16 nt, Human
uuaagauuauaauugu

SEQ ID NO: 3217199 - RNA, 15 nt, Human
uuaagauuauaauug

SEQ ID NO: 3217200 - RNA, 14 nt, Human
uuaagauuauaauu

SEQ ID NO: 3217201 - RNA, 13 nt, Human
uuaaaugcccagc

SEQ ID NO: 3217202 - RNA, 20 nt, Human
uuaaaugcaaccauuugaaa

SEQ ID NO: 3217203 - RNA, 19 nt, Human
uuaaauguagcuucaguca

SEQ ID NO: 3217204 - RNA, 21 nt, Human
uuaaauguagcuucagucauu

SEQ ID NO: 3217205 - RNA, 22 nt, Human
uuaaauguagcuucagucauua

SEQ ID NO: 3217206 - RNA, 20 nt, Human
uuaaaugucaaaugugaauu

SEQ ID NO: 3217207 - RNA, 19 nt, Human
uuaaaugucaaaugugaau

SEQ ID NO: 3217208 - RNA, 18 nt, Human
uuaaaugugaauuacuaa

SEQ ID NO: 3217209 - RNA, 16 nt, Human
uuaaaugugaauuacu

SEQ ID NO: 3217210 - RNA, 12 nt, Human
uuaaaugugaau

SEQ ID NO: 3217211 - RNA, 11 nt, Human
uuaaaugugaa

SEQ ID NO: 3217212 - RNA, 21 nt, Human
uuaaaugugugagugcaugua

SEQ ID NO: 3217213 - RNA, 22 nt, Human
uuaaaugugaauuacuaacuuc

SEQ ID NO: 3217214 - RNA, 21 nt, Human
uuaaaugugaauuacuaacuu

SEQ ID NO: 3217215 - RNA, 13 nt, Human
uuaaauguuaugu

SEQ ID NO: 3217216 - RNA, 16 nt, Human
uuaaauguuauguaua

SEQ ID NO: 3217217 - RNA, 14 nt, Human
uuaaauguuaugua

SEQ ID NO: 3217218 - RNA, 15 nt, Human
uuaagcaugacagaa

SEQ ID NO: 3217219 - RNA, 17 nt, Human
uuaagcaugacagaaaa

SEQ ID NO: 3217220 - RNA, 15 nt, Human
uuaagcagaauugga

SEQ ID NO: 3217221 - RNA, 19 nt, Human
uuaagcccacaguauauuu

SEQ ID NO: 3217222 - RNA, 15 nt, Human
uuaagccuaaagauu

SEQ ID NO: 3217223 - RNA, 20 nt, Human
uuaagccuaaagauuuugau

SEQ ID NO: 3217224 - RNA, 16 nt, Human
uuaagccuaaagauuu

SEQ ID NO: 3217225 - RNA, 23 nt, Human
uuaauacuguuauucuuugcacu

SEQ ID NO: 3217226 - RNA, 21 nt, Human
uuaauacuguuauucuuugca

SEQ ID NO: 3217227 - RNA, 14 nt, Human
uuaauacucuauuu

SEQ ID NO: 3217228 - RNA, 14 nt, Human
uuaauacuguuauu

SEQ ID NO: 3217229 - RNA, 20 nt, Human
uuaauacuguuauucuuugc

SEQ ID NO: 3217230 - RNA, 18 nt, Human
uuaauacuguuauucuuu

SEQ ID NO: 3217231 - RNA, 20 nt, Human
uuaauaaucaagagccuuaa

SEQ ID NO: 3217232 - RNA, 22 nt, Human
uuaauaauagauugugaauaau

SEQ ID NO: 3217233 - RNA, 22 nt, Human
uuaauuaaaacacaacaucuuu

SEQ ID NO: 3217234 - RNA, 19 nt, Human
uuaaugagcaauaucugcu

SEQ ID NO: 3217235 - RNA, 22 nt, Human
uuaauuaagcaaagcacccauu

SEQ ID NO: 3217236 - RNA, 22 nt, Human
uuaauuaaccccauaauuagau

SEQ ID NO: 3217237 - RNA, 20 nt, Human
uuaauuaauuuggagcacaa

SEQ ID NO: 3217238 - RNA, 16 nt, Human
uuacaaccuagaagua

SEQ ID NO: 3217239 - RNA, 13 nt, Human
uuacaagaagaac

SEQ ID NO: 3217240 - RNA, 16 nt, Human
uuacaagaagaacuca

SEQ ID NO: 3217241 - RNA, 19 nt, Human
uuacaacugaccaaguuuc

SEQ ID NO: 3217242 - RNA, 14 nt, Human
uuacaacacuuuaa

SEQ ID NO: 3217243 - RNA, 24 nt, Human
uuacaaauuauaauguauucauau

SEQ ID NO: 3217244 - RNA, 23 nt, Human
uuacaaauuauaauguauucaua

SEQ ID NO: 3217245 - RNA, 13 nt, Human
uuacaaccuagaa

SEQ ID NO: 3217246 - RNA, 21 nt, Human
uuacaaauuauaauguauuca

SEQ ID NO: 3217247 - RNA, 17 nt, Human
uuacauuuaaaccuuuu

SEQ ID NO: 3217248 - RNA, 23 nt, Human
uuacauugccguggcaucuuaaa

SEQ ID NO: 3217249 - RNA, 13 nt, Human
uuacauucaguug

SEQ ID NO: 3217250 - RNA, 19 nt, Human
uuacauuuguauuuuucca

SEQ ID NO: 3217251 - RNA, 16 nt, Human
uuacacuuuuuggaag

SEQ ID NO: 3217252 - RNA, 20 nt, Human
uuacacuuuaugcacaaaau

SEQ ID NO: 3217253 - RNA, 13 nt, Human
uuacacuuuaugc

SEQ ID NO: 3217254 - RNA, 21 nt, Human
uuacacuguuauuuucagcau

SEQ ID NO: 3217255 - RNA, 22 nt, Human
uuacacuguuauuuucagcaug

SEQ ID NO: 3217256 - RNA, 23 nt, Human
uuacacuguuauuuucagcauga

SEQ ID NO: 3217257 - RNA, 22 nt, Human
uuacacuggcaaugguaguuuc

SEQ ID NO: 3217258 - RNA, 23 nt, Human
uuacacuggcaaugguaguuucu

SEQ ID NO: 3217259 - RNA, 20 nt, Human
uuacacuggcaaugguaguu

SEQ ID NO: 3217260 - RNA, 21 nt, Human
uuacacuggcaaugguaguuu

SEQ ID NO: 3217261 - RNA, 15 nt, Human
uguuuacuugaauag

SEQ ID NO: 3217262 - RNA, 19 nt, Human
uguuuacuugaauaguauu

SEQ ID NO: 3217263 - RNA, 22 nt, Human
uguuuacuugaauaguauugug

SEQ ID NO: 3217264 - RNA, 12 nt, Human
uguuucuguccu

SEQ ID NO: 3217265 - RNA, 11 nt, Human
uguuucugggg

SEQ ID NO: 3217266 - RNA, 16 nt, Human
uguuuuaagaggcagg

SEQ ID NO: 3217267 - RNA, 14 nt, Human
uguuuguucuuguu

SEQ ID NO: 3217268 - RNA, 16 nt, Human
uguuuguucuuguuuu

SEQ ID NO: 3217269 - RNA, 16 nt, Human
uguuugugugucaagu

SEQ ID NO: 3217270 - RNA, 22 nt, Human
uuaaaaaaaaaccugagcccca

SEQ ID NO: 3217271 - RNA, 14 nt, Human
uguuuuuguauauu

SEQ ID NO: 3217272 - RNA, 21 nt, Human
uguuuuuguauauugguuuua

SEQ ID NO: 3217273 - RNA, 13 nt, Human
uguuuuuguaaag

SEQ ID NO: 3217274 - RNA, 16 nt, Human
uguuuuuguaaagaaa

SEQ ID NO: 3217275 - RNA, 14 nt, Human
uguuuuuguaaaga

SEQ ID NO: 3217276 - RNA, 15 nt, Human
uuaaaaaaaaaaguc

SEQ ID NO: 3217277 - RNA, 16 nt, Human
uuaaaaaaaaaaguca

SEQ ID NO: 3217278 - RNA, 21 nt, Human
uuaaaaaaaaaagucaccaaa

SEQ ID NO: 3217279 - RNA, 12 nt, Human
uguuuuuguaua

SEQ ID NO: 3217280 - RNA, 13 nt, Human
uguuuuuguauau

SEQ ID NO: 3217281 - RNA, 17 nt, Human
uguuuuuguaaagaaaa

SEQ ID NO: 3217282 - RNA, 12 nt, Human
uguuuuucugcu

SEQ ID NO: 3217283 - RNA, 16 nt, Human
uguuuuuaaguuugca

SEQ ID NO: 3217284 - RNA, 16 nt, Human
uguuuuugaaggcaga

SEQ ID NO: 3217285 - RNA, 14 nt, Human
uguuuuucugcuuu

SEQ ID NO: 3217286 - RNA, 15 nt, Human
uguuuuucugcuuua

SEQ ID NO: 3217287 - RNA, 18 nt, Human
uguuuuucugcuuuagac

SEQ ID NO: 3217288 - RNA, 19 nt, Human
uguuuuucugcuuuagacu

SEQ ID NO: 3217289 - RNA, 20 nt, Human
uguuuuugaaggcagaaagc

SEQ ID NO: 3217290 - RNA, 18 nt, Human
uguuuuugaaggcagaaa

SEQ ID NO: 3217291 - RNA, 19 nt, Human
uguuuuaacaagaagcaau

SEQ ID NO: 3217292 - RNA, 17 nt, Human
uguuuuaagaggcaggg

SEQ ID NO: 3217293 - RNA, 16 nt, Human
uguuuuuaaaaucuua

SEQ ID NO: 3217294 - RNA, 15 nt, Human
uguuuuuaaaaucuu

SEQ ID NO: 3217295 - RNA, 12 nt, Human
uguuuuuaagau

SEQ ID NO: 3217296 - RNA, 19 nt, Human
uguuuuuaaaaucuuauua

SEQ ID NO: 3217297 - RNA, 17 nt, Human
uguuuuuaaaaucuuau

SEQ ID NO: 3217298 - RNA, 21 nt, Human
uguuuuuaaaaucuuauuaaa

SEQ ID NO: 3217299 - RNA, 18 nt, Human
uuaaaauacacacucaaa

SEQ ID NO: 3217300 - RNA, 16 nt, Human
uuaaacuuccaaagaa

SEQ ID NO: 3217301 - RNA, 17 nt, Human
uuaaacuuccaaagaaa

SEQ ID NO: 3217302 - RNA, 18 nt, Human
uuaaacuuccaaagaaag

SEQ ID NO: 3217303 - RNA, 16 nt, Human
uuaaagaaaaaaaugu

SEQ ID NO: 3217304 - RNA, 21 nt, Human
uuaaacuuuagugcuacagaa

SEQ ID NO: 3217305 - RNA, 14 nt, Human
uuaaaacccaagug

SEQ ID NO: 3217306 - RNA, 16 nt, Human
uuaaaaaaaaauugua

SEQ ID NO: 3217307 - RNA, 19 nt, Human
uuaaaaaaaaauuguaucu

SEQ ID NO: 3217308 - RNA, 16 nt, Human
uuaaaacuacuuagca

SEQ ID NO: 3217309 - RNA, 19 nt, Human
uuaaaacuaggcauuugua

SEQ ID NO: 3217310 - RNA, 20 nt, Human
uuaaaacuaggcauuuguaa

SEQ ID NO: 3217311 - RNA, 21 nt, Human
uuaaaacuaggcauuuguaaa

SEQ ID NO: 3217312 - RNA, 22 nt, Human
uuaaaacuaggcauuuguaaau

SEQ ID NO: 3217313 - RNA, 23 nt, Human
uuaaaacuaggcauuuguaaaua

SEQ ID NO: 3217314 - RNA, 22 nt, Human
uuaaaacuaguuagauucacuu

SEQ ID NO: 3217315 - RNA, 14 nt, Human
uuaaaagaaaaaau

SEQ ID NO: 3217316 - RNA, 16 nt, Human
uuaaaagaaaaaauga

SEQ ID NO: 3217317 - RNA, 18 nt, Human
uuaaaagaaaaaaugaca

SEQ ID NO: 3217318 - RNA, 20 nt, Human
uuaaaacugcaguuuucaga

SEQ ID NO: 3217319 - RNA, 14 nt, Human
uuaaaacuucaucu

SEQ ID NO: 3217320 - RNA, 14 nt, Human
uuaaaauaaauggu

SEQ ID NO: 3217321 - RNA, 16 nt, Human
uuaaaauaaacuuucu

SEQ ID NO: 3217322 - RNA, 13 nt, Human
uuaaaauaaacuu

SEQ ID NO: 3217323 - RNA, 18 nt, Human
uuaaagccauucugauua

SEQ ID NO: 3217324 - RNA, 17 nt, Human
uuaaagaaacaugguuu

SEQ ID NO: 3217325 - RNA, 23 nt, Human
uuaaagaaaaaaaugucaaaagu

SEQ ID NO: 3217326 - RNA, 15 nt, Human
uuaaaugcccagccc

SEQ ID NO: 3217327 - RNA, 16 nt, Human
uuaaaugcccagcccc

SEQ ID NO: 3217328 - RNA, 14 nt, Human
uuaaaugcccagcc

SEQ ID NO: 3217329 - RNA, 16 nt, Human
uuaaaugauuuaaauu

SEQ ID NO: 3217330 - RNA, 22 nt, Human
uuaaaucauacuccuaugcuuu

SEQ ID NO: 3217331 - RNA, 23 nt, Human
uaauaagcuaguugaauacuuga

SEQ ID NO: 3217332 - RNA, 16 nt, Human
uaauaagcuaguugaa

SEQ ID NO: 3217333 - RNA, 17 nt, Human
uaauaagcuaguugaau

SEQ ID NO: 3217334 - RNA, 20 nt, Human
uaauaagcuaguugaauacu

SEQ ID NO: 3217335 - RNA, 21 nt, Human
uaauaagcuaguugaauacuu

SEQ ID NO: 3217336 - RNA, 12 nt, Human
uaauaagcuagu

SEQ ID NO: 3217337 - RNA, 20 nt, Human
uaagugguacuaacuuuccu

SEQ ID NO: 3217338 - RNA, 16 nt, Human
uaagugguguguguau

SEQ ID NO: 3217339 - RNA, 15 nt, Human
uaaguggugugugua

SEQ ID NO: 3217340 - RNA, 18 nt, Human
uaagugguuuuaauaaaa

SEQ ID NO: 3217341 - RNA, 14 nt, Human
uaagugaaauuuau

SEQ ID NO: 3217342 - RNA, 13 nt, Human
uaagugaaauuua

SEQ ID NO: 3217343 - RNA, 21 nt, Human
uaagugaggaaaucaaagugc

SEQ ID NO: 3217344 - RNA, 19 nt, Human
uaagugaggaaaucaaagu

SEQ ID NO: 3217345 - RNA, 12 nt, Human
uaagugagagag

SEQ ID NO: 3217346 - RNA, 23 nt, Human
uaagugaggaugaaaaaauaaca

SEQ ID NO: 3217347 - RNA, 22 nt, Human
uaagugccaggauggaaugaug

SEQ ID NO: 3217348 - RNA, 19 nt, Human
uaagugccucacauuuuuu

SEQ ID NO: 3217349 - RNA, 13 nt, Human
uaagugaaauaag

SEQ ID NO: 3217350 - RNA, 20 nt, Human
uaagucuugccuauauuuuc

SEQ ID NO: 3217351 - RNA, 12 nt, Human
uaagugaaauuu

SEQ ID NO: 3217352 - RNA, 11 nt, Human
uaagugaaauu

SEQ ID NO: 3217353 - RNA, 15 nt, Human
uaagugaaaauauag

SEQ ID NO: 3217354 - RNA, 17 nt, Human
uaagucuugccuauauu

SEQ ID NO: 3217355 - RNA, 20 nt, Human
uaagucuuacauaaaccauu

SEQ ID NO: 3217356 - RNA, 17 nt, Human
uaagucucuuuuuuaca

SEQ ID NO: 3217357 - RNA, 14 nt, Human
uaagucucuuuuuu

SEQ ID NO: 3217358 - RNA, 21 nt, Human
uaagucucuuuuuuacaaagg

SEQ ID NO: 3217359 - RNA, 20 nt, Human
uaagucucuuuuuuacaaag

SEQ ID NO: 3217360 - RNA, 19 nt, Human
uaagucucuuuuuuacaaa

SEQ ID NO: 3217361 - RNA, 18 nt, Human
uaagucucuuuuuuacaa

SEQ ID NO: 3217362 - RNA, 16 nt, Human
uaagucucaagguagg

SEQ ID NO: 3217363 - RNA, 21 nt, Human
uaagucuaucugguauuaaau

SEQ ID NO: 3217364 - RNA, 22 nt, Human
uaagucuaucugguauuaaaug

SEQ ID NO: 3217365 - RNA, 17 nt, Human
uaaggguaucuggugac

SEQ ID NO: 3217366 - RNA, 24 nt, Human
uaagggucauauguuugcuuguau

SEQ ID NO: 3217367 - RNA, 17 nt, Human
uaaggucagcucagagc

SEQ ID NO: 3217368 - RNA, 22 nt, Human
uaagguauaucauucuaaagau

SEQ ID NO: 3217369 - RNA, 21 nt, Human
uaagguauaucauucuaaaga

SEQ ID NO: 3217370 - RNA, 20 nt, Human
uaagguauaucauucuaaag

SEQ ID NO: 3217371 - RNA, 13 nt, Human
uaaggucuguuug

SEQ ID NO: 3217372 - RNA, 18 nt, Human
uaagggacugauguuugu

SEQ ID NO: 3217373 - RNA, 17 nt, Human
uaagggacugauguuug

SEQ ID NO: 3217374 - RNA, 16 nt, Human
uaagggacugauguuu

SEQ ID NO: 3217375 - RNA, 15 nt, Human
uaagggacugauguu

SEQ ID NO: 3217376 - RNA, 22 nt, Human
uaaggggaauuaacaauugcca

SEQ ID NO: 3217377 - RNA, 18 nt, Human
uaaggggaauuaacaauu

SEQ ID NO: 3217378 - RNA, 22 nt, Human
uaagggacugauguuugugcag

SEQ ID NO: 3217379 - RNA, 15 nt, Human
uaaggugugcucuga

SEQ ID NO: 3217380 - RNA, 12 nt, Human
uaagguguuuga

SEQ ID NO: 3217381 - RNA, 20 nt, Human
uaagguggguacgggagggu

SEQ ID NO: 3217382 - RNA, 22 nt, Human
uaaggucuguuugcuguugcug

SEQ ID NO: 3217383 - RNA, 19 nt, Human
uaaggucuguuugcuguug

SEQ ID NO: 3217384 - RNA, 18 nt, Human
uaaggucuguuugcuguu

SEQ ID NO: 3217385 - RNA, 23 nt, Human
uaagucagaaacuaaaacaaaua

SEQ ID NO: 3217386 - RNA, 14 nt, Human
uaaguauuuggaau

SEQ ID NO: 3217387 - RNA, 13 nt, Human
uaaguauuuggaa

SEQ ID NO: 3217388 - RNA, 21 nt, Human
uaaguauuuuccuguugucaa

SEQ ID NO: 3217389 - RNA, 20 nt, Human
uaaguauuuuccuguuguca

SEQ ID NO: 3217390 - RNA, 20 nt, Human
uaagguguuugaaaauaguu

SEQ ID NO: 3217391 - RNA, 21 nt, Human
uaagguguuugaaaauaguuu

SEQ ID NO: 3217392 - RNA, 15 nt, Human
uaagguguuugaaaa

SEQ ID NO: 3217393 - RNA, 16 nt, Human
uaagguguuugaaaau

SEQ ID NO: 3217394 - RNA, 17 nt, Human
uaagguguuugaaaaua

SEQ ID NO: 3217395 - RNA, 18 nt, Human
uaagguguuugaaaauag

SEQ ID NO: 3217396 - RNA, 16 nt, Human
uaaggauguucuagca

SEQ ID NO: 3217397 - RNA, 16 nt, Human
uaagcuaguugaauac

SEQ ID NO: 3217398 - RNA, 18 nt, Human
uaagcuaguugaauacuu

SEQ ID NO: 3217399 - RNA, 19 nt, Human
uaagcuaguugaauacuug

SEQ ID NO: 3217400 - RNA, 20 nt, Human
uaagcuaguugaauacuuga

SEQ ID NO: 3217401 - RNA, 22 nt, Human
uaagcuaggaaaagaaaucuau

SEQ ID NO: 3217402 - RNA, 20 nt, Human
uaagcuaggaaaagaaaucu

SEQ ID NO: 3217403 - RNA, 17 nt, Human
uaagcuaggaaaagaaa

SEQ ID NO: 3217404 - RNA, 13 nt, Human
uaagcuaggaaaa

SEQ ID NO: 3217405 - RNA, 21 nt, Human
uaagcuaguugaauacuugaa

SEQ ID NO: 3217406 - RNA, 22 nt, Human
uaagcuaguugaauacuugaac

SEQ ID NO: 3217407 - RNA, 15 nt, Human
uaagggaaaaaucaa

SEQ ID NO: 3217408 - RNA, 17 nt, Human
uaagggaacaaguugag

SEQ ID NO: 3217409 - RNA, 23 nt, Human
uaagggaacaaguugagcuauga

SEQ ID NO: 3217410 - RNA, 20 nt, Human
uaagggaaaaaucaaguauu

SEQ ID NO: 3217411 - RNA, 17 nt, Human
uaagggaaaagauaaag

SEQ ID NO: 3217412 - RNA, 15 nt, Human
uaagaggcagggucu

SEQ ID NO: 3217413 - RNA, 12 nt, Human
uaagaggcaggg

SEQ ID NO: 3217414 - RNA, 19 nt, Human
uaagccauucugacucaua

SEQ ID NO: 3217415 - RNA, 14 nt, Human
uaagccaugagaau

SEQ ID NO: 3217416 - RNA, 20 nt, Human
uaagccauucugacucauau

SEQ ID NO: 3217417 - RNA, 18 nt, Human
uaagcccacaguauauuu

SEQ ID NO: 3217418 - RNA, 22 nt, Human
uaagcguauggcuuuauuuuuu

SEQ ID NO: 3217419 - RNA, 15 nt, Human
uaagcguauggcuuu

SEQ ID NO: 3217420 - RNA, 16 nt, Human
uaagcguauggcuuua

SEQ ID NO: 3217421 - RNA, 20 nt, Human
uaagcggcucaagcccagga

SEQ ID NO: 3217422 - RNA, 17 nt, Human
uaagccaugagaauguu

SEQ ID NO: 3217423 - RNA, 23 nt, Human
uaauaaucauuggauucugagag

SEQ ID NO: 3217424 - RNA, 12 nt, Human
uaauaaucaaga

SEQ ID NO: 3217425 - RNA, 14 nt, Human
uaauaaucaagagc

SEQ ID NO: 3217426 - RNA, 19 nt, Human
uaauaaucaagagccuuaa

SEQ ID NO: 3217427 - RNA, 20 nt, Human
uaauaaucaagagccuuaaa

SEQ ID NO: 3217428 - RNA, 22 nt, Human
uaauaaucaagagccuuaaaac

SEQ ID NO: 3217429 - RNA, 16 nt, Human
uaauaauccugcaaag

SEQ ID NO: 3217430 - RNA, 14 nt, Human
uaauaucacucauu

SEQ ID NO: 3217431 - RNA, 16 nt, Human
uaauaucacucauuaa

SEQ ID NO: 3217432 - RNA, 17 nt, Human
uaauaucacucauuaau

SEQ ID NO: 3217433 - RNA, 18 nt, Human
uaauaucacucauuaauu

SEQ ID NO: 3217434 - RNA, 21 nt, Human
uaauaucacucauuaauuaac

SEQ ID NO: 3217435 - RNA, 14 nt, Human
uaauaugaaauuuu

SEQ ID NO: 3217436 - RNA, 16 nt, Human
uaauaucuucauuucu

SEQ ID NO: 3217437 - RNA, 15 nt, Human
uaauaucuuucugca

SEQ ID NO: 3217438 - RNA, 19 nt, Human
uaauaucuuucugcacaca

SEQ ID NO: 3217439 - RNA, 22 nt, Human
uaauaucuuucugcacacaaau

SEQ ID NO: 3217440 - RNA, 20 nt, Human
uaauaugcuuauaaccuagu

SEQ ID NO: 3217441 - RNA, 14 nt, Human
uaaucuacugcauu

SEQ ID NO: 3217442 - RNA, 16 nt, Human
uaaucuacugcauuua

SEQ ID NO: 3217443 - RNA, 15 nt, Human
uaaucuggacuccuc

SEQ ID NO: 3217444 - RNA, 18 nt, Human
uaaucuggacuccucugu

SEQ ID NO: 3217445 - RNA, 17 nt, Human
uaaucuggacuccucug

SEQ ID NO: 3217446 - RNA, 18 nt, Human
uaaucugggccagaauuu

SEQ ID NO: 3217447 - RNA, 23 nt, Human
uaaucugggccagaauuucaaac

SEQ ID NO: 3217448 - RNA, 18 nt, Human
uaaucuguauaauacuuu

SEQ ID NO: 3217449 - RNA, 22 nt, Human
uaaucuggacuccucuguccag

SEQ ID NO: 3217450 - RNA, 21 nt, Human
uaaucuggacuccucugucca

SEQ ID NO: 3217451 - RNA, 20 nt, Human
uaaucuggacuccucugucc

SEQ ID NO: 3217452 - RNA, 19 nt, Human
uaaucuggacuccucuguc

SEQ ID NO: 3217453 - RNA, 20 nt, Human
uaauauuaaggaagacaaug

SEQ ID NO: 3217454 - RNA, 22 nt, Human
uaaugcuaaucuugugaaaaua

SEQ ID NO: 3217455 - RNA, 17 nt, Human
uaaugcuaaucuuguga

SEQ ID NO: 3217456 - RNA, 15 nt, Human
uaauggggcggugag

SEQ ID NO: 3217457 - RNA, 13 nt, Human
uaauggaugaaau

SEQ ID NO: 3217458 - RNA, 16 nt, Human
uaauggaugaaaucau

SEQ ID NO: 3217459 - RNA, 15 nt, Human
uaauggaugaaauca

SEQ ID NO: 3217460 - RNA, 22 nt, Human
uaauggauuauaaucagaaugg

SEQ ID NO: 3217461 - RNA, 17 nt, Human
uaauggaugaaaucaua

SEQ ID NO: 3217462 - RNA, 16 nt, Human
uaaugcuuugguucug

SEQ ID NO: 3217463 - RNA, 11 nt, Human
uaaugcuuugg

SEQ ID NO: 3217464 - RNA, 21 nt, Human
uaauggaaaaugccaugaauu

SEQ ID NO: 3217465 - RNA, 23 nt, Human
uaauguugugaauaauuacagug

SEQ ID NO: 3217466 - RNA, 21 nt, Human
uaauguugugaauaauuacag

SEQ ID NO: 3217467 - RNA, 19 nt, Human
uaauguugugaauaauuac

SEQ ID NO: 3217468 - RNA, 18 nt, Human
uaauguugugaauaauua

SEQ ID NO: 3217469 - RNA, 13 nt, Human
uaauguugugaau

SEQ ID NO: 3217470 - RNA, 16 nt, Human
uaauguugugaauaau

SEQ ID NO: 3217471 - RNA, 14 nt, Human
uaauguugugaaua

SEQ ID NO: 3217472 - RNA, 18 nt, Human
uaauguugauuucuaguu

SEQ ID NO: 3217473 - RNA, 17 nt, Human
uaauguugauuucuagu

SEQ ID NO: 3217474 - RNA, 14 nt, Human
uaauguugauuucu

SEQ ID NO: 3217475 - RNA, 13 nt, Human
uaauguugauuuc

SEQ ID NO: 3217476 - RNA, 22 nt, Human
uaauguugaacaaaauaaauug

SEQ ID NO: 3217477 - RNA, 18 nt, Human
uaauguugaacaaaauaa

SEQ ID NO: 3217478 - RNA, 13 nt, Human
uaauguugaacaa

SEQ ID NO: 3217479 - RNA, 17 nt, Human
uaauguugaacaaaaua

SEQ ID NO: 3217480 - RNA, 16 nt, Human
uaauguugaacaaaau

SEQ ID NO: 3217481 - RNA, 17 nt, Human
uaauuaaguacuaugua

SEQ ID NO: 3217482 - RNA, 14 nt, Human
uaauuaaguacuau

SEQ ID NO: 3217483 - RNA, 14 nt, Human
uaauuagauccauu

SEQ ID NO: 3217484 - RNA, 17 nt, Human
uaauuagauccauuaau

SEQ ID NO: 3217485 - RNA, 18 nt, Human
uaauuagauccauuaauu

SEQ ID NO: 3217486 - RNA, 20 nt, Human
uaauuagauccauuaauuua

SEQ ID NO: 3217487 - RNA, 23 nt, Human
uaauuagauccauuaauuuaaau

SEQ ID NO: 3217488 - RNA, 20 nt, Human
uaaauuucgcuucuuagaac

SEQ ID NO: 3217489 - RNA, 18 nt, Human
uaaauuuauuuacugcua

SEQ ID NO: 3217490 - RNA, 15 nt, Human
uaaauuuauuuacug

SEQ ID NO: 3217491 - RNA, 14 nt, Human
uaaauuuauuuacu

SEQ ID NO: 3217492 - RNA, 13 nt, Human
uaaauuuauguga

SEQ ID NO: 3217493 - RNA, 20 nt, Human
uaaauugacacuuaaaaaug

SEQ ID NO: 3217494 - RNA, 18 nt, Human
uaacaccaugauuaacca

SEQ ID NO: 3217495 - RNA, 19 nt, Human
uaacacuacucaaagcaaa

SEQ ID NO: 3217496 - RNA, 14 nt, Human
uaacacuacucaaa

SEQ ID NO: 3217497 - RNA, 22 nt, Human
uaacacucuaggauguauauuu

SEQ ID NO: 3217498 - RNA, 16 nt, Human
uaaaugugccuucauu

SEQ ID NO: 3217499 - RNA, 11 nt, Human
uaaaugugaau

SEQ ID NO: 3217500 - RNA, 15 nt, Human
uaaaugugaauuacu

SEQ ID NO: 3217501 - RNA, 13 nt, Human
uaaaugugaauua

SEQ ID NO: 3217502 - RNA, 22 nt, Human
uaaaugugaauuacuaacuucu

SEQ ID NO: 3217503 - RNA, 11 nt, Human
uaaauuauuuu

SEQ ID NO: 3217504 - RNA, 15 nt, Human
uaaauucaaaccuaa

SEQ ID NO: 3217505 - RNA, 19 nt, Human
uaaauuccucaacaguguu

SEQ ID NO: 3217506 - RNA, 20 nt, Human
uaaauuccucaacaguguuu

SEQ ID NO: 3217507 - RNA, 22 nt, Human
uaaauuccucaacaguguuuuc

SEQ ID NO: 3217508 - RNA, 20 nt, Human
uaaauucugauuucuuuuca

SEQ ID NO: 3217509 - RNA, 15 nt, Human
uaaauucugauuucu

SEQ ID NO: 3217510 - RNA, 16 nt, Human
uaaauucugauuucuu

SEQ ID NO: 3217511 - RNA, 11 nt, Human
uaaauucugau

SEQ ID NO: 3217512 - RNA, 12 nt, Human
uaaauucugauu

SEQ ID NO: 3217513 - RNA, 13 nt, Human
uaaauucugauuu

SEQ ID NO: 3217514 - RNA, 14 nt, Human
uaaauucugauuuc

SEQ ID NO: 3217515 - RNA, 12 nt, Human
uaaaguuguacu

SEQ ID NO: 3217516 - RNA, 13 nt, Human
uaaaugcccagcc

SEQ ID NO: 3217517 - RNA, 13 nt, Human
uaaaguuucaaaa

SEQ ID NO: 3217518 - RNA, 12 nt, Human
uaaaguuucaaa

SEQ ID NO: 3217519 - RNA, 20 nt, Human
uaaaguuucaaaaaucugaa

SEQ ID NO: 3217520 - RNA, 19 nt, Human
uaaaguuucaaaaaucuga

SEQ ID NO: 3217521 - RNA, 18 nt, Human
uaaaguuucaaaaaucug

SEQ ID NO: 3217522 - RNA, 17 nt, Human
uaaaguuucaaaaaucu

SEQ ID NO: 3217523 - RNA, 22 nt, Human
uaaaguuguacuuuaaaaauuu

SEQ ID NO: 3217524 - RNA, 16 nt, Human
uaaaguuguacuuuaa

SEQ ID NO: 3217525 - RNA, 13 nt, Human
uaaaguuguacuu

SEQ ID NO: 3217526 - RNA, 17 nt, Human
uaaaguugguauuaaua

SEQ ID NO: 3217527 - RNA, 19 nt, Human
uaaaguugguauuaauaaa

SEQ ID NO: 3217528 - RNA, 20 nt, Human
uaaaguugguauuaauaaaa

SEQ ID NO: 3217529 - RNA, 14 nt, Human
uaaaugcccagccc

SEQ ID NO: 3217530 - RNA, 15 nt, Human
uaaaugcccagcccc

SEQ ID NO: 3217531 - RNA, 16 nt, Human
uaaaugcccagccccu

SEQ ID NO: 3217532 - RNA, 17 nt, Human
uaaaugcccagccccuu

SEQ ID NO: 3217533 - RNA, 20 nt, Human
uaaaugguuuggugcuuuuu

SEQ ID NO: 3217534 - RNA, 21 nt, Human
uaaaugguuuggugcuuuuua

SEQ ID NO: 3217535 - RNA, 22 nt, Human
uaaaugguuuggugcuuuuuau

SEQ ID NO: 3217536 - RNA, 20 nt, Human
uaaaugucuaguuguaacac

SEQ ID NO: 3217537 - RNA, 22 nt, Human
uaaaugucucuuuaaugucaca

SEQ ID NO: 3217538 - RNA, 17 nt, Human
uaaaugucaaaugugaa

SEQ ID NO: 3217539 - RNA, 18 nt, Human
uaaauguaguucauacuu

SEQ ID NO: 3217540 - RNA, 21 nt, Human
uaaauguagcuucagucauua

SEQ ID NO: 3217541 - RNA, 23 nt, Human
uaaauguagcuucagucauuaaa

SEQ ID NO: 3217542 - RNA, 14 nt, Human
uaagaaaucaagua

SEQ ID NO: 3217543 - RNA, 15 nt, Human
uaagaaaucaaguaa

SEQ ID NO: 3217544 - RNA, 16 nt, Human
uaagaaacauuggaag

SEQ ID NO: 3217545 - RNA, 15 nt, Human
uaagaaacauuggaa

SEQ ID NO: 3217546 - RNA, 13 nt, Human
uaagaaacauugg

SEQ ID NO: 3217547 - RNA, 12 nt, Human
uaagaaacauug

SEQ ID NO: 3217548 - RNA, 21 nt, Human
uaagaaacauuggaagcaggu

SEQ ID NO: 3217549 - RNA, 19 nt, Human
uaagaaaauagagaugagc

SEQ ID NO: 3217550 - RNA, 21 nt, Human
uaagaaaauagagaugagcuu

SEQ ID NO: 3217551 - RNA, 21 nt, Human
uaagagcuuccaauuuuccuu

SEQ ID NO: 3217552 - RNA, 18 nt, Human
uaagaggaaaguacauuu

SEQ ID NO: 3217553 - RNA, 15 nt, Human
uaagaggaaaguaca

SEQ ID NO: 3217554 - RNA, 19 nt, Human
uaagaggaaaguacauuuu

SEQ ID NO: 3217555 - RNA, 23 nt, Human
uaagaacccauggaaaaaugcca

SEQ ID NO: 3217556 - RNA, 19 nt, Human
uaagaaccuuuugagugcc

SEQ ID NO: 3217557 - RNA, 17 nt, Human
uaagaacaaaagaagca

SEQ ID NO: 3217558 - RNA, 13 nt, Human
uaacugugguguu

SEQ ID NO: 3217559 - RNA, 13 nt, Human
uaacuguuaccau

SEQ ID NO: 3217560 - RNA, 11 nt, Human
uaacuguuacc

SEQ ID NO: 3217561 - RNA, 14 nt, Human
uaacuguuacagua

SEQ ID NO: 3217562 - RNA, 17 nt, Human
uaacuguuacaguaaug

SEQ ID NO: 3217563 - RNA, 20 nt, Human
uaacuguuacaguaauguca

SEQ ID NO: 3217564 - RNA, 21 nt, Human
uaacuguuacaguaaugucau

SEQ ID NO: 3217565 - RNA, 19 nt, Human
uaacuguuaccauuggaaa

SEQ ID NO: 3217566 - RNA, 18 nt, Human
uaacuguuaccauuggaa

SEQ ID NO: 3217567 - RNA, 15 nt, Human
uaacuguuaccauug

SEQ ID NO: 3217568 - RNA, 14 nt, Human
uaacuguuaccauu

SEQ ID NO: 3217569 - RNA, 23 nt, Human
uaacugcucuugggcaauauucu

SEQ ID NO: 3217570 - RNA, 19 nt, Human
uaagaaaaagcaaaaggca

SEQ ID NO: 3217571 - RNA, 16 nt, Human
uaagaaaagauguaga

SEQ ID NO: 3217572 - RNA, 16 nt, Human
uaaccacuucagcuga

SEQ ID NO: 3217573 - RNA, 13 nt, Human
uaacccagaaaau

SEQ ID NO: 3217574 - RNA, 16 nt, Human
uaaccagacacaaacu

SEQ ID NO: 3217575 - RNA, 16 nt, Human
uaacacugugaagagc

SEQ ID NO: 3217576 - RNA, 15 nt, Human
uaacacugugaagag

SEQ ID NO: 3217577 - RNA, 19 nt, Human
uaacauucuauuucaacuu

SEQ ID NO: 3217578 - RNA, 15 nt, Human
uaacauucuauuuca

SEQ ID NO: 3217579 - RNA, 15 nt, Human
uaacauuuuucaaua

SEQ ID NO: 3217580 - RNA, 19 nt, Human
uaacauuuuucaauagcgu

SEQ ID NO: 3217581 - RNA, 21 nt, Human
uaacuccuaguagggguacca

SEQ ID NO: 3217582 - RNA, 22 nt, Human
uaacucaaggauaccuucuuau

SEQ ID NO: 3217583 - RNA, 23 nt, Human
uaacucaaggauaccuucuuauu

SEQ ID NO: 3217584 - RNA, 15 nt, Human
uaacuauguuuaaag

SEQ ID NO: 3217585 - RNA, 16 nt, Human
uaacuauguugauaaa

SEQ ID NO: 3217586 - RNA, 16 nt, Human
uaacccagaaaaucug

SEQ ID NO: 3217587 - RNA, 13 nt, Human
uaacugaauuugg

SEQ ID NO: 3217588 - RNA, 11 nt, Human
uaacugcucuu

SEQ ID NO: 3217589 - RNA, 15 nt, Human
uaacugacuuaguuc

SEQ ID NO: 3217590 - RNA, 19 nt, Human
uaacugcucuugggcaaua

SEQ ID NO: 3217591 - RNA, 16 nt, Human
uaacugcucuugggca

SEQ ID NO: 3217592 - RNA, 15 nt, Human
uaacugcucuugggc

SEQ ID NO: 3217593 - RNA, 12 nt, Human
uaacugcucuug

SEQ ID NO: 3217594 - RNA, 16 nt, Human
uaacugaaauaaaaaa

SEQ ID NO: 3217595 - RNA, 14 nt, Human
guuuuaaaauacug

SEQ ID NO: 3217596 - RNA, 16 nt, Human
guuuuaaaagccuugg

SEQ ID NO: 3217597 - RNA, 21 nt, Human
guuuuaaaauacuguagauaa

SEQ ID NO: 3217598 - RNA, 19 nt, Human
guuuuaaaauacuguagau

SEQ ID NO: 3217599 - RNA, 18 nt, Human
guuuuaaaauacuguaga

SEQ ID NO: 3217600 - RNA, 16 nt, Human
guuuuaaaauacugua

SEQ ID NO: 3217601 - RNA, 20 nt, Human
guuuguuucugaaagggacg

SEQ ID NO: 3217602 - RNA, 16 nt, Human
guuuguuucuuugaau

SEQ ID NO: 3217603 - RNA, 14 nt, Human
guuuguuccagaau

SEQ ID NO: 3217604 - RNA, 14 nt, Human
guuuguuuguuuca

SEQ ID NO: 3217605 - RNA, 15 nt, Human
guuuguuuugugaau

SEQ ID NO: 3217606 - RNA, 23 nt, Human
guuuguuuuuuguuuuucugcuu

SEQ ID NO: 3217607 - RNA, 17 nt, Human
guuuucaaaauaaaaau

SEQ ID NO: 3217608 - RNA, 18 nt, Human
guuuucaaccucuagaau

SEQ ID NO: 3217609 - RNA, 23 nt, Human
guuuucaacucuucccugaacuu

SEQ ID NO: 3217610 - RNA, 19 nt, Human
guuuucaaccucuagaauu

SEQ ID NO: 3217611 - RNA, 13 nt, Human
guuuucaaaugga

SEQ ID NO: 3217612 - RNA, 16 nt, Human
guuuucaaauggaguu

SEQ ID NO: 3217613 - RNA, 14 nt, Human
guuuucaaauggag

SEQ ID NO: 3217614 - RNA, 21 nt, Human
guuuuauuuucuaaaguacug

SEQ ID NO: 3217615 - RNA, 12 nt, Human
guuuucacucuu

SEQ ID NO: 3217616 - RNA, 11 nt, Human
guuuucacucu

SEQ ID NO: 3217617 - RNA, 16 nt, Human
guuuucagaagaaaua

SEQ ID NO: 3217618 - RNA, 18 nt, Human
guuuucagaagaaauaaa

SEQ ID NO: 3217619 - RNA, 20 nt, Human
guuuuccagguuuaagcugu

SEQ ID NO: 3217620 - RNA, 22 nt, Human
guuuucagcuaggaacaaaucu

SEQ ID NO: 3217621 - RNA, 19 nt, Human
guuuuccaugaguccccug

SEQ ID NO: 3217622 - RNA, 20 nt, Human
guuuuccaugaguccccugu

SEQ ID NO: 3217623 - RNA, 21 nt, Human
guuuuccgcauucuuuguaca

SEQ ID NO: 3217624 - RNA, 16 nt, Human
guuuucccugaaguua

SEQ ID NO: 3217625 - RNA, 15 nt, Human
guuuucccugaaguu

SEQ ID NO: 3217626 - RNA, 21 nt, Human
guuuuguaaacuuugaaauau

SEQ ID NO: 3217627 - RNA, 18 nt, Human
guuuuguaaacuuugaaa

SEQ ID NO: 3217628 - RNA, 21 nt, Human
guuuugguccacuuuuccagu

SEQ ID NO: 3217629 - RNA, 16 nt, Human
guuuugguccacuuuu

SEQ ID NO: 3217630 - RNA, 16 nt, Human
guuuuguaaacuuuga

SEQ ID NO: 3217631 - RNA, 19 nt, Human
guuuuguugcacugaaguu

SEQ ID NO: 3217632 - RNA, 18 nt, Human
guuuuguugcacugaagu

SEQ ID NO: 3217633 - RNA, 10 nt, Human
guuuuguugc

SEQ ID NO: 3217634 - RNA, 11 nt, Human
guuucuuagac

SEQ ID NO: 3217635 - RNA, 15 nt, Human
guuucuuaauuugga

SEQ ID NO: 3217636 - RNA, 16 nt, Human
guuucuuaauuuggaa

SEQ ID NO: 3217637 - RNA, 18 nt, Human
guuucuuaauuuggaaac

SEQ ID NO: 3217638 - RNA, 22 nt, Human
guuuccuaaaauaucugggugg

SEQ ID NO: 3217639 - RNA, 15 nt, Human
guuuccuaaauccaa

SEQ ID NO: 3217640 - RNA, 21 nt, Human
guuuccuaaauccaaccauuu

SEQ ID NO: 3217641 - RNA, 11 nt, Human
guuugaaaagc

SEQ ID NO: 3217642 - RNA, 15 nt, Human
guuugaaaagcaaua

SEQ ID NO: 3217643 - RNA, 20 nt, Human
guuugaaaagcaauauugua

SEQ ID NO: 3217644 - RNA, 16 nt, Human
guuucuuuuugaaucu

SEQ ID NO: 3217645 - RNA, 13 nt, Human
guuucuuuuugaa

SEQ ID NO: 3217646 - RNA, 13 nt, Human
guuugaaaauagu

SEQ ID NO: 3217647 - RNA, 16 nt, Human
guuugaaaauaguuua

SEQ ID NO: 3217648 - RNA, 17 nt, Human
guuugagaucagccugg

SEQ ID NO: 3217649 - RNA, 18 nt, Human
guuuguuucugaaaggga

SEQ ID NO: 3217650 - RNA, 16 nt, Human
guuuguauguauaauu

SEQ ID NO: 3217651 - RNA, 14 nt, Human
guuuguauguauaa

SEQ ID NO: 3217652 - RNA, 13 nt, Human
guuugguucaaau

SEQ ID NO: 3217653 - RNA, 15 nt, Human
guuuguaacaagaaa

SEQ ID NO: 3217654 - RNA, 22 nt, Human
guuugguucaaauguguuuugg

SEQ ID NO: 3217655 - RNA, 16 nt, Human
guuugauucagacagc

SEQ ID NO: 3217656 - RNA, 20 nt, Human
guuugauucagacagcugcc

SEQ ID NO: 3217657 - RNA, 18 nt, Human
guuuggggaugagaaagg

SEQ ID NO: 3217658 - RNA, 16 nt, Human
guuuggugcaaaguau

SEQ ID NO: 3217659 - RNA, 13 nt, Human
guuuggugcuuuu

SEQ ID NO: 3217660 - RNA, 15 nt, Human
guuugguccuguagg

SEQ ID NO: 3217661 - RNA, 14 nt, Human
guugugaauaauua

SEQ ID NO: 3217662 - RNA, 13 nt, Human
guugugaauaauu

SEQ ID NO: 3217663 - RNA, 17 nt, Human
guugucucuucuccuua

SEQ ID NO: 3217664 - RNA, 14 nt, Human
guugucucuucucc

SEQ ID NO: 3217665 - RNA, 22 nt, Human
guugucugaagucacugcacag

SEQ ID NO: 3217666 - RNA, 19 nt, Human
guugucugaagucacugca

SEQ ID NO: 3217667 - RNA, 12 nt, Human
guugucucuucu

SEQ ID NO: 3217668 - RNA, 12 nt, Human
guuguguguggg

SEQ ID NO: 3217669 - RNA, 13 nt, Human
guuguguguggga

SEQ ID NO: 3217670 - RNA, 14 nt, Human
guugugugugggag

SEQ ID NO: 3217671 - RNA, 16 nt, Human
guugugugugggagug

SEQ ID NO: 3217672 - RNA, 22 nt, Human
guugugugugggaguguguaau

SEQ ID NO: 3217673 - RNA, 14 nt, Human
guugugguuaaucu

SEQ ID NO: 3217674 - RNA, 21 nt, Human
guugugugccucuagcugaau

SEQ ID NO: 3217675 - RNA, 10 nt, Human
guugugugcc

SEQ ID NO: 3217676 - RNA, 19 nt, Human
guuguccgguuuacuuuaa

SEQ ID NO: 3217677 - RNA, 12 nt, Human
guugucagcuga

SEQ ID NO: 3217678 - RNA, 19 nt, Human
guuggcugggggccucagu

SEQ ID NO: 3217679 - RNA, 18 nt, Human
guugucaagaauagcauu

SEQ ID NO: 3217680 - RNA, 14 nt, Human
guugucaagaauag

SEQ ID NO: 3217681 - RNA, 22 nt, Human
guugucaagaauagcauuguaa

SEQ ID NO: 3217682 - RNA, 12 nt, Human
guuggcuggggg

SEQ ID NO: 3217683 - RNA, 14 nt, Human
guuggccccugccc

SEQ ID NO: 3217684 - RNA, 13 nt, Human
guuggccccugcc

SEQ ID NO: 3217685 - RNA, 20 nt, Human
guuggccccugcccggcugc

SEQ ID NO: 3217686 - RNA, 13 nt, Human
guuggccucugca

SEQ ID NO: 3217687 - RNA, 16 nt, Human
guuuagaagaagugug

SEQ ID NO: 3217688 - RNA, 14 nt, Human
guuuagaauugaag

SEQ ID NO: 3217689 - RNA, 15 nt, Human
guuuagaacagguuu

SEQ ID NO: 3217690 - RNA, 15 nt, Human
guuuacucacagcca

SEQ ID NO: 3217691 - RNA, 17 nt, Human
guuuagaaagcuugccc

SEQ ID NO: 3217692 - RNA, 12 nt, Human
guuuagaacagg

SEQ ID NO: 3217693 - RNA, 21 nt, Human
guuuaccuggcuuauuuaaua

SEQ ID NO: 3217694 - RNA, 22 nt, Human
guuguuugaugcauuaaaagaa

SEQ ID NO: 3217695 - RNA, 19 nt, Human
guuguuucuuaauuuggaa

SEQ ID NO: 3217696 - RNA, 20 nt, Human
guuguuucuuaauuuggaaa

SEQ ID NO: 3217697 - RNA, 19 nt, Human
guuguucuuggcaauaaau

SEQ ID NO: 3217698 - RNA, 21 nt, Human
guuguucuuggcaauaaauuu

SEQ ID NO: 3217699 - RNA, 16 nt, Human
guuuagaauugaaggu

SEQ ID NO: 3217700 - RNA, 18 nt, Human
guuuauaguuaaucuaua

SEQ ID NO: 3217701 - RNA, 17 nt, Human
guuuauaguuaaucuau

SEQ ID NO: 3217702 - RNA, 15 nt, Human
guuuaguuugcauuu

SEQ ID NO: 3217703 - RNA, 16 nt, Human
guuuaguuugcauuua

SEQ ID NO: 3217704 - RNA, 21 nt, Human
guuuagugugguuuucuguuu

SEQ ID NO: 3217705 - RNA, 15 nt, Human
guuucauccuuccca

SEQ ID NO: 3217706 - RNA, 17 nt, Human
guuucauccuucccacu

SEQ ID NO: 3217707 - RNA, 22 nt, Human
guuucauauucaugcaaguauu

SEQ ID NO: 3217708 - RNA, 14 nt, Human
guuucauccuuccc

SEQ ID NO: 3217709 - RNA, 19 nt, Human
guuuauauggaagaaagua

SEQ ID NO: 3217710 - RNA, 21 nt, Human
guuuauauggaagaaaguaag

SEQ ID NO: 3217711 - RNA, 19 nt, Human
guuuauaucuccuuuguau

SEQ ID NO: 3217712 - RNA, 15 nt, Human
guuuauaucuccuuu

SEQ ID NO: 3217713 - RNA, 18 nt, Human
guuuaucuagauguaaau

SEQ ID NO: 3217714 - RNA, 17 nt, Human
guuuaucuagauguaaa

SEQ ID NO: 3217715 - RNA, 15 nt, Human
guuuaucuagaugua

SEQ ID NO: 3217716 - RNA, 22 nt, Human
guuuaucgcccuggcaggcagg

SEQ ID NO: 3217717 - RNA, 22 nt, Human
guuuaucccuuaagaaugaguu

SEQ ID NO: 3217718 - RNA, 17 nt, Human
guuuaucccuuaagaau

SEQ ID NO: 3217719 - RNA, 16 nt, Human
guuuaucccuuaagaa

SEQ ID NO: 3217720 - RNA, 21 nt, Human
guuuaucagaaagggcagaag

SEQ ID NO: 3217721 - RNA, 17 nt, Human
uaaagccauucugauua

SEQ ID NO: 3217722 - RNA, 11 nt, Human
uaaagccucaa

SEQ ID NO: 3217723 - RNA, 12 nt, Human
uaaagaaaacug

SEQ ID NO: 3217724 - RNA, 22 nt, Human
uaaagaaaaauauuuaauguug

SEQ ID NO: 3217725 - RNA, 21 nt, Human
uaaagaaaaauauuuaauguu

SEQ ID NO: 3217726 - RNA, 14 nt, Human
uaaagaaacauggu

SEQ ID NO: 3217727 - RNA, 21 nt, Human
uaaagcaagcucacuugcuuu

SEQ ID NO: 3217728 - RNA, 19 nt, Human
uaaagcaagcucacuugcu

SEQ ID NO: 3217729 - RNA, 21 nt, Human
uaaaggcccuaucuguuuaca

SEQ ID NO: 3217730 - RNA, 15 nt, Human
uaaaggccucugccu

SEQ ID NO: 3217731 - RNA, 21 nt, Human
uaaaggcagcuguugucucuu

SEQ ID NO: 3217732 - RNA, 20 nt, Human
uaaaggcagcuguugucucu

SEQ ID NO: 3217733 - RNA, 15 nt, Human
uaaaggcagcuguug

SEQ ID NO: 3217734 - RNA, 23 nt, Human
uaaaggaaucuagccagugaaca

SEQ ID NO: 3217735 - RNA, 14 nt, Human
uaaagcugaaaacu

SEQ ID NO: 3217736 - RNA, 16 nt, Human
uaaagcuuuugaugug

SEQ ID NO: 3217737 - RNA, 23 nt, Human
uaaaggccucugccucacaacau

SEQ ID NO: 3217738 - RNA, 20 nt, Human
uaaaggccucugccucacaa

SEQ ID NO: 3217739 - RNA, 17 nt, Human
uaaaguucauugcaauu

SEQ ID NO: 3217740 - RNA, 13 nt, Human
uaaagugugugau

SEQ ID NO: 3217741 - RNA, 12 nt, Human
uaaacacucagc

SEQ ID NO: 3217742 - RNA, 14 nt, Human
uaaacacucagcug

SEQ ID NO: 3217743 - RNA, 15 nt, Human
uaaacacucagcugu

SEQ ID NO: 3217744 - RNA, 16 nt, Human
uaaacacucagcuguu

SEQ ID NO: 3217745 - RNA, 17 nt, Human
uaaacacucagcuguuc

SEQ ID NO: 3217746 - RNA, 22 nt, Human
uaaacacucagcuguucagauu

SEQ ID NO: 3217747 - RNA, 17 nt, Human
uaaacaucagguuaggc

SEQ ID NO: 3217748 - RNA, 16 nt, Human
uaaacaucagguuagg

SEQ ID NO: 3217749 - RNA, 20 nt, Human
uaaacaucagguuaggcagu

SEQ ID NO: 3217750 - RNA, 19 nt, Human
uaaacaucagguuaggcag

SEQ ID NO: 3217751 - RNA, 21 nt, Human
uaaacaucagguuaggcagua

SEQ ID NO: 3217752 - RNA, 14 nt, Human
uaaaaucuuauuaa

SEQ ID NO: 3217753 - RNA, 17 nt, Human
uaaaaucuuauuaaagu

SEQ ID NO: 3217754 - RNA, 15 nt, Human
uaaaaucuuauuaaa

SEQ ID NO: 3217755 - RNA, 22 nt, Human
uaaaaucuuauuaaaguuucaa

SEQ ID NO: 3217756 - RNA, 21 nt, Human
uaaaaucuuauuaaaguuuca

SEQ ID NO: 3217757 - RNA, 19 nt, Human
uaaaaucuuauuaaaguuu

SEQ ID NO: 3217758 - RNA, 18 nt, Human
uaaaaucuuauuaaaguu

SEQ ID NO: 3217759 - RNA, 23 nt, Human
uaaaaucuuauuaaaguuucaaa

SEQ ID NO: 3217760 - RNA, 16 nt, Human
uaaaaucuugaaaaug

SEQ ID NO: 3217761 - RNA, 21 nt, Human
uaaaaucauaaguauuuggaa

SEQ ID NO: 3217762 - RNA, 14 nt, Human
uaaagaaaaaaaug

SEQ ID NO: 3217763 - RNA, 16 nt, Human
uaaagaaaaaaauguc

SEQ ID NO: 3217764 - RNA, 17 nt, Human
uaaagaaaaaaauguca

SEQ ID NO: 3217765 - RNA, 20 nt, Human
uaaagaaaaaaaugucaaaa

SEQ ID NO: 3217766 - RNA, 22 nt, Human
uaaagaaaaaaaugucaaaagu

SEQ ID NO: 3217767 - RNA, 20 nt, Human
uaaagaaaaauauuuaaugu

SEQ ID NO: 3217768 - RNA, 17 nt, Human
uaaagaaaaauauuuaa

SEQ ID NO: 3217769 - RNA, 15 nt, Human
uaaagaaaaauauuu

SEQ ID NO: 3217770 - RNA, 14 nt, Human
uaaagaaaaauauu

SEQ ID NO: 3217771 - RNA, 22 nt, Human
uaaacuugguuuuuaaaaaacu

SEQ ID NO: 3217772 - RNA, 22 nt, Human
uaaacuuggugcuuauugauau

SEQ ID NO: 3217773 - RNA, 14 nt, Human
uaaacuguuaacuu

SEQ ID NO: 3217774 - RNA, 21 nt, Human
uaaacuguuaacuuauucaaa

SEQ ID NO: 3217775 - RNA, 13 nt, Human
uaaacuuccaaag

SEQ ID NO: 3217776 - RNA, 15 nt, Human
uaaacuuccaaagaa

SEQ ID NO: 3217777 - RNA, 17 nt, Human
uaaacuuccaaagaaag

SEQ ID NO: 3217778 - RNA, 21 nt, Human
uaaacuuccaaagaaaguucu

SEQ ID NO: 3217779 - RNA, 11 nt, Human
uaaacauuuuc

SEQ ID NO: 3217780 - RNA, 17 nt, Human
uaaacugucgugucaua

SEQ ID NO: 3217781 - RNA, 19 nt, Human
guuuuguuuccuuucacug

SEQ ID NO: 3217782 - RNA, 21 nt, Human
guuuuuaaggguuuguggaaa

SEQ ID NO: 3217783 - RNA, 17 nt, Human
guuuuuaaguuugcacu

SEQ ID NO: 3217784 - RNA, 22 nt, Human
uaaaaacagauuuggaaagacu

SEQ ID NO: 3217785 - RNA, 20 nt, Human
uaaaaacagauuuggaaaga

SEQ ID NO: 3217786 - RNA, 22 nt, Human
uaaaaagauaaaaaaacagcuu

SEQ ID NO: 3217787 - RNA, 12 nt, Human
uaaaaagauaau

SEQ ID NO: 3217788 - RNA, 16 nt, Human
uaaaaagauaaucuca

SEQ ID NO: 3217789 - RNA, 23 nt, Human
uaaaaagauaaucucagugcuuu

SEQ ID NO: 3217790 - RNA, 15 nt, Human
uaaaaaugguuuaaa

SEQ ID NO: 3217791 - RNA, 18 nt, Human
uaaaaaugguuuaaaugg

SEQ ID NO: 3217792 - RNA, 19 nt, Human
uaaaaaugguuuaaauggu

SEQ ID NO: 3217793 - RNA, 12 nt, Human
uaaaaagcccaa

SEQ ID NO: 3217794 - RNA, 20 nt, Human
uaaaaagcccaaccucuucc

SEQ ID NO: 3217795 - RNA, 16 nt, Human
uaaaaagcccaaccuc

SEQ ID NO: 3217796 - RNA, 15 nt, Human
uaaaacaacacucac

SEQ ID NO: 3217797 - RNA, 19 nt, Human
uaaaaauuccagaaugaag

SEQ ID NO: 3217798 - RNA, 21 nt, Human
uaaaaauucuagauuaccaug

SEQ ID NO: 3217799 - RNA, 18 nt, Human
uaaaaauuagccuaagau

SEQ ID NO: 3217800 - RNA, 16 nt, Human
uaaaaauuccagaaug

SEQ ID NO: 3217801 - RNA, 14 nt, Human
uaaaaauuccagaa

SEQ ID NO: 3217802 - RNA, 17 nt, Human
uaaaaauuacuguguua

SEQ ID NO: 3217803 - RNA, 19 nt, Human
uaaaaauuuacuacaauau

SEQ ID NO: 3217804 - RNA, 15 nt, Human
uaaaaauuuacuaca

SEQ ID NO: 3217805 - RNA, 22 nt, Human
uaaaacacaacaucuuuuucua

SEQ ID NO: 3217806 - RNA, 23 nt, Human
uaaaacacaacaucuuuuucuac

SEQ ID NO: 3217807 - RNA, 17 nt, Human
uaaaacacaacaucuuu

SEQ ID NO: 3217808 - RNA, 19 nt, Human
uaaaacacuucauugaaaa

SEQ ID NO: 3217809 - RNA, 19 nt, Human
uaaaacacuuccauaaucu

SEQ ID NO: 3217810 - RNA, 19 nt, Human
uaaaacagaguaaucuugu

SEQ ID NO: 3217811 - RNA, 17 nt, Human
uaaaacagaguaaucuu

SEQ ID NO: 3217812 - RNA, 17 nt, Human
uaaaagauaaauauuau

SEQ ID NO: 3217813 - RNA, 19 nt, Human
uaaaacauuaaaauauaau

SEQ ID NO: 3217814 - RNA, 16 nt, Human
uaaaacauuaaaauau

SEQ ID NO: 3217815 - RNA, 15 nt, Human
uaaaacauuaaaaua

SEQ ID NO: 3217816 - RNA, 21 nt, Human
uaaaacaguuggcaugcaucc

SEQ ID NO: 3217817 - RNA, 22 nt, Human
uaaaacaguuggcaugcauccc

SEQ ID NO: 3217818 - RNA, 15 nt, Human
uaaaacaucauuccu

SEQ ID NO: 3217819 - RNA, 18 nt, Human
uaaaacaugacuccuaca

SEQ ID NO: 3217820 - RNA, 12 nt, Human
uaaaacauuaaa

SEQ ID NO: 3217821 - RNA, 16 nt, Human
uaaaacaucauuccuu

SEQ ID NO: 3217822 - RNA, 17 nt, Human
uaaaacaucauuccuuu

SEQ ID NO: 3217823 - RNA, 20 nt, Human
uaaaacaucauuccuuuuua

SEQ ID NO: 3217824 - RNA, 22 nt, Human
uaaaagagaccacccauaucau

SEQ ID NO: 3217825 - RNA, 23 nt, Human
uaaaagagaccacccauaucaug

SEQ ID NO: 3217826 - RNA, 22 nt, Human
uaaaaucauuucugcaucagcu

SEQ ID NO: 3217827 - RNA, 18 nt, Human
uaaaaucauuucugcauc

SEQ ID NO: 3217828 - RNA, 13 nt, Human
uaaaaucauuucu

SEQ ID NO: 3217829 - RNA, 10 nt, Human
uaaaaucauu

SEQ ID NO: 3217830 - RNA, 12 nt, Human
uaaaaggugacc

SEQ ID NO: 3217831 - RNA, 16 nt, Human
uaaaaucauaaguauu

SEQ ID NO: 3217832 - RNA, 21 nt, Human
uaaaagguaugcaaucaaauc

SEQ ID NO: 3217833 - RNA, 12 nt, Human
uaaaaggagcca

SEQ ID NO: 3217834 - RNA, 21 nt, Human
uaaaagcagcauaaagaauuu

SEQ ID NO: 3217835 - RNA, 18 nt, Human
uaaaagcagcauaaagaa

SEQ ID NO: 3217836 - RNA, 19 nt, Human
uaaaagcacaaaggaauga

SEQ ID NO: 3217837 - RNA, 16 nt, Human
uaaaagcaacaucagc

SEQ ID NO: 3217838 - RNA, 18 nt, Human
uaaaagcaacaucagcuu

SEQ ID NO: 3217839 - RNA, 19 nt, Human
uaaaagcaacaucagcuug

SEQ ID NO: 3217840 - RNA, 20 nt, Human
uaaaagcaacaucagcuuga

SEQ ID NO: 3217841 - RNA, 20 nt, Human
uauauuuguaaauuuaugug

SEQ ID NO: 3217842 - RNA, 23 nt, Human
uauauuuggaugcagaguucagg

SEQ ID NO: 3217843 - RNA, 16 nt, Human
uauauuugauuuauua

SEQ ID NO: 3217844 - RNA, 17 nt, Human
uauauuugauuuauuaa

SEQ ID NO: 3217845 - RNA, 20 nt, Human
uauauuugauuuauuaacuu

SEQ ID NO: 3217846 - RNA, 22 nt, Human
uauauuugauuuauuaacuuaa

SEQ ID NO: 3217847 - RNA, 13 nt, Human
uauauuugauuua

SEQ ID NO: 3217848 - RNA, 14 nt, Human
uauaugaaaacuaa

SEQ ID NO: 3217849 - RNA, 19 nt, Human
uauaugaacuuaacaugcu

SEQ ID NO: 3217850 - RNA, 22 nt, Human
uauaugaacuuaacaugcugug

SEQ ID NO: 3217851 - RNA, 19 nt, Human
uauaugaacauacaaaugc

SEQ ID NO: 3217852 - RNA, 15 nt, Human
uauauggaagaaagu

SEQ ID NO: 3217853 - RNA, 16 nt, Human
uauauggaagaaagua

SEQ ID NO: 3217854 - RNA, 21 nt, Human
uauauuuuuuguuaaaugauu

SEQ ID NO: 3217855 - RNA, 19 nt, Human
uauauuuuuuguuaaauga

SEQ ID NO: 3217856 - RNA, 16 nt, Human
uauauuuuuuuaacuu

SEQ ID NO: 3217857 - RNA, 19 nt, Human
uaucaaaaagauaucaaag

SEQ ID NO: 3217858 - RNA, 22 nt, Human
uauauuuuauuuuuagaauuuu

SEQ ID NO: 3217859 - RNA, 17 nt, Human
uauauuuuauuucaaug

SEQ ID NO: 3217860 - RNA, 18 nt, Human
uauauuuuauuucaaugu

SEQ ID NO: 3217861 - RNA, 13 nt, Human
uauauuuguauua

SEQ ID NO: 3217862 - RNA, 18 nt, Human
uauauuuuauuuuuagaa

SEQ ID NO: 3217863 - RNA, 21 nt, Human
uauauuuuguaugcaagcagu

SEQ ID NO: 3217864 - RNA, 17 nt, Human
uauauuuuguaugcaag

SEQ ID NO: 3217865 - RNA, 16 nt, Human
uauauuuuguaugcaa

SEQ ID NO: 3217866 - RNA, 15 nt, Human
uauauuuuguaugca

SEQ ID NO: 3217867 - RNA, 13 nt, Human
uaucaguuugcua

SEQ ID NO: 3217868 - RNA, 18 nt, Human
uaucaguuuuauagcuuu

SEQ ID NO: 3217869 - RNA, 20 nt, Human
uaucaggugcugccauccag

SEQ ID NO: 3217870 - RNA, 17 nt, Human
uaucaggugcugccauc

SEQ ID NO: 3217871 - RNA, 14 nt, Human
uaucaaaagaaaga

SEQ ID NO: 3217872 - RNA, 20 nt, Human
uaucaaacuacuuuuuaaca

SEQ ID NO: 3217873 - RNA, 19 nt, Human
uaucaggugcugccaucca

SEQ ID NO: 3217874 - RNA, 23 nt, Human
uaucaugcacacaauuagauuuc

SEQ ID NO: 3217875 - RNA, 18 nt, Human
uaucaucacguauguuau

SEQ ID NO: 3217876 - RNA, 20 nt, Human
uaucaucacguauguuauac

SEQ ID NO: 3217877 - RNA, 21 nt, Human
uaucaucacguauguuauaca

SEQ ID NO: 3217878 - RNA, 13 nt, Human
uaucauguuaacc

SEQ ID NO: 3217879 - RNA, 21 nt, Human
uauaucuuggcagguaggaau

SEQ ID NO: 3217880 - RNA, 13 nt, Human
uauauaaaauaac

SEQ ID NO: 3217881 - RNA, 14 nt, Human
uauauaaaauaacu

SEQ ID NO: 3217882 - RNA, 12 nt, Human
uauauaaaaaug

SEQ ID NO: 3217883 - RNA, 15 nt, Human
uauauaaaaauggcu

SEQ ID NO: 3217884 - RNA, 11 nt, Human
uauauaaaaau

SEQ ID NO: 3217885 - RNA, 22 nt, Human
uauaguauuugaaaacagaaau

SEQ ID NO: 3217886 - RNA, 14 nt, Human
uauagugcaauaua

SEQ ID NO: 3217887 - RNA, 11 nt, Human
uauaguauuug

SEQ ID NO: 3217888 - RNA, 14 nt, Human
uauaguauuugaaa

SEQ ID NO: 3217889 - RNA, 13 nt, Human
uauaguauuugaa

SEQ ID NO: 3217890 - RNA, 20 nt, Human
uauaguauuugaaaacagaa

SEQ ID NO: 3217891 - RNA, 18 nt, Human
uauaguauuugaaaacag

SEQ ID NO: 3217892 - RNA, 17 nt, Human
uauaguauuugaaaaca

SEQ ID NO: 3217893 - RNA, 15 nt, Human
uauaguauuugaaaa

SEQ ID NO: 3217894 - RNA, 15 nt, Human
uauagauauaaugaa

SEQ ID NO: 3217895 - RNA, 20 nt, Human
uauagauauaaugaacaaaa

SEQ ID NO: 3217896 - RNA, 21 nt, Human
uauagauauaaugaacaaaau

SEQ ID NO: 3217897 - RNA, 23 nt, Human
uauagauauaaugaacaaaauua

SEQ ID NO: 3217898 - RNA, 20 nt, Human
uauagagucauuguaauguu

SEQ ID NO: 3217899 - RNA, 15 nt, Human
uauagagcagaaauu

SEQ ID NO: 3217900 - RNA, 18 nt, Human
uauagagcagaaauucug

SEQ ID NO: 3217901 - RNA, 17 nt, Human
uauagagcagaaauucu

SEQ ID NO: 3217902 - RNA, 18 nt, Human
uauagagucauuguaaug

SEQ ID NO: 3217903 - RNA, 20 nt, Human
uauagagcagaaauucuguu

SEQ ID NO: 3217904 - RNA, 19 nt, Human
uauagagcagaaauucugu

SEQ ID NO: 3217905 - RNA, 13 nt, Human
uauagaagucuuc

SEQ ID NO: 3217906 - RNA, 20 nt, Human
uauagaagaaugcaugcuuu

SEQ ID NO: 3217907 - RNA, 18 nt, Human
uauagaagaaugcaugcu

SEQ ID NO: 3217908 - RNA, 13 nt, Human
uauagaagaaugc

SEQ ID NO: 3217909 - RNA, 23 nt, Human
uauagaaaguguucuguuacaaa

SEQ ID NO: 3217910 - RNA, 22 nt, Human
uauagaaaguguucuguuacaa

SEQ ID NO: 3217911 - RNA, 21 nt, Human
uauagaaaguguucuguuaca

SEQ ID NO: 3217912 - RNA, 20 nt, Human
uauagaaaguguucuguuac

SEQ ID NO: 3217913 - RNA, 14 nt, Human
uauagaaaguguuc

SEQ ID NO: 3217914 - RNA, 12 nt, Human
uauagaaagugu

SEQ ID NO: 3217915 - RNA, 23 nt, Human
uauagaagucuucaugaaaugcu

SEQ ID NO: 3217916 - RNA, 22 nt, Human
uauagaagucuucaugaaaugc

SEQ ID NO: 3217917 - RNA, 21 nt, Human
uauagaagucuucaugaaaug

SEQ ID NO: 3217918 - RNA, 19 nt, Human
uauagaagucuucaugaaa

SEQ ID NO: 3217919 - RNA, 16 nt, Human
uauagaagucuucaug

SEQ ID NO: 3217920 - RNA, 15 nt, Human
uauagaagucuucau

SEQ ID NO: 3217921 - RNA, 14 nt, Human
uauagaagucuuca

SEQ ID NO: 3217922 - RNA, 18 nt, Human
uauagacaggagaagaaa

SEQ ID NO: 3217923 - RNA, 21 nt, Human
uauagacaggagaagaaagaa

SEQ ID NO: 3217924 - RNA, 20 nt, Human
uauagacaggagaagaaaga

SEQ ID NO: 3217925 - RNA, 16 nt, Human
uauagaaaaaaacauu

SEQ ID NO: 3217926 - RNA, 20 nt, Human
uauagaaaaaaacauucuau

SEQ ID NO: 3217927 - RNA, 18 nt, Human
uauagaaagcaagaugua

SEQ ID NO: 3217928 - RNA, 11 nt, Human
uauagaaagug

SEQ ID NO: 3217929 - RNA, 22 nt, Human
uauagaaagcaagauguacuau

SEQ ID NO: 3217930 - RNA, 12 nt, Human
uauacuuuagua

SEQ ID NO: 3217931 - RNA, 19 nt, Human
uauacuuuaguagacauuu

SEQ ID NO: 3217932 - RNA, 22 nt, Human
uauacuuguuuuuguaaagaaa

SEQ ID NO: 3217933 - RNA, 20 nt, Human
uauacuuguuuuuguaaaga

SEQ ID NO: 3217934 - RNA, 14 nt, Human
uauaaaguauucuu

SEQ ID NO: 3217935 - RNA, 15 nt, Human
uauaaaguauucuuu

SEQ ID NO: 3217936 - RNA, 18 nt, Human
uauaaaguauucuuuuuc

SEQ ID NO: 3217937 - RNA, 22 nt, Human
uauaaacaugcuugcauuauau

SEQ ID NO: 3217938 - RNA, 18 nt, Human
uauaaacagaagugacug

SEQ ID NO: 3217939 - RNA, 13 nt, Human
uauaaacacuguu

SEQ ID NO: 3217940 - RNA, 12 nt, Human
uauaaacacugu

SEQ ID NO: 3217941 - RNA, 14 nt, Human
uaguuugaggaaau

SEQ ID NO: 3217942 - RNA, 13 nt, Human
uaguuugaggaaa

SEQ ID NO: 3217943 - RNA, 20 nt, Human
uaguuugaggaaauuugcag

SEQ ID NO: 3217944 - RNA, 19 nt, Human
uaguuugaggaaauuugca

SEQ ID NO: 3217945 - RNA, 22 nt, Human
uauaaacaagaaugaagguuuu

SEQ ID NO: 3217946 - RNA, 12 nt, Human
uauaaacagcuu

SEQ ID NO: 3217947 - RNA, 22 nt, Human
uaguauuaucuuguucaggaaa

SEQ ID NO: 3217948 - RNA, 23 nt, Human
uaguauuaucuuguucaggaaaa

SEQ ID NO: 3217949 - RNA, 17 nt, Human
uaguagggguaccacug

SEQ ID NO: 3217950 - RNA, 16 nt, Human
uaguagggguaccacu

SEQ ID NO: 3217951 - RNA, 16 nt, Human
uaguaugguggcuggg

SEQ ID NO: 3217952 - RNA, 20 nt, Human
uaguggcuuaaaacaacacu

SEQ ID NO: 3217953 - RNA, 19 nt, Human
uaguggccaucauuucugg

SEQ ID NO: 3217954 - RNA, 18 nt, Human
uaguggccaucauuucug

SEQ ID NO: 3217955 - RNA, 20 nt, Human
uaguauuuauggguggauuu

SEQ ID NO: 3217956 - RNA, 15 nt, Human
uaguggcauggagaa

SEQ ID NO: 3217957 - RNA, 20 nt, Human
uaguuguuugauucagacag

SEQ ID NO: 3217958 - RNA, 21 nt, Human
uaguugaauacuugaaccaua

SEQ ID NO: 3217959 - RNA, 19 nt, Human
uaguugaauacuugaacca

SEQ ID NO: 3217960 - RNA, 20 nt, Human
uaguugaauacuugaaccau

SEQ ID NO: 3217961 - RNA, 14 nt, Human
uaguuguuaaguuu

SEQ ID NO: 3217962 - RNA, 21 nt, Human
uaguuguuucuagacuauaaa

SEQ ID NO: 3217963 - RNA, 21 nt, Human
uaguuguuugauucagacagc

SEQ ID NO: 3217964 - RNA, 22 nt, Human
uaguuguuugauucagacagcu

SEQ ID NO: 3217965 - RNA, 13 nt, Human
uaguugaauacuu

SEQ ID NO: 3217966 - RNA, 15 nt, Human
uaguugaauacuuga

SEQ ID NO: 3217967 - RNA, 16 nt, Human
uaguugaauacuugaa

SEQ ID NO: 3217968 - RNA, 17 nt, Human
uaguugaauacuugaac

SEQ ID NO: 3217969 - RNA, 12 nt, Human
uaguucuuuaaa

SEQ ID NO: 3217970 - RNA, 15 nt, Human
uaguucuuuaaacug

SEQ ID NO: 3217971 - RNA, 20 nt, Human
uaguucuuuaaacugucgug

SEQ ID NO: 3217972 - RNA, 16 nt, Human
uaguucuguauuugaa

SEQ ID NO: 3217973 - RNA, 17 nt, Human
uaguucuguauuugaaa

SEQ ID NO: 3217974 - RNA, 19 nt, Human
uaguucuguauuugaaagu

SEQ ID NO: 3217975 - RNA, 21 nt, Human
uaguucuguauuugaaagugc

SEQ ID NO: 3217976 - RNA, 11 nt, Human
uaguucuguga

SEQ ID NO: 3217977 - RNA, 17 nt, Human
uaguucuuacugcuuaa

SEQ ID NO: 3217978 - RNA, 20 nt, Human
uagguuaaaaaaaaaaguca

SEQ ID NO: 3217979 - RNA, 22 nt, Human
uagguuauuuugauguaaagau

SEQ ID NO: 3217980 - RNA, 13 nt, Human
uagguguggggga

SEQ ID NO: 3217981 - RNA, 17 nt, Human
uaggugugggggaagca

SEQ ID NO: 3217982 - RNA, 14 nt, Human
uaguaggauaugcc

SEQ ID NO: 3217983 - RNA, 13 nt, Human
uaguaggcaagau

SEQ ID NO: 3217984 - RNA, 21 nt, Human
uaguaggauaugccugcucuu

SEQ ID NO: 3217985 - RNA, 14 nt, Human
uaggcuuuuuaauc

SEQ ID NO: 3217986 - RNA, 17 nt, Human
uaggucugauauucaaa

SEQ ID NO: 3217987 - RNA, 16 nt, Human
uaggugacagagugag

SEQ ID NO: 3217988 - RNA, 11 nt, Human
uaggugacaga

SEQ ID NO: 3217989 - RNA, 18 nt, Human
uaggugcuacaaaaacac

SEQ ID NO: 3217990 - RNA, 23 nt, Human
uaggugcuacaaaaacacagcaa

SEQ ID NO: 3217991 - RNA, 22 nt, Human
uaggugcuacaaaaacacagca

SEQ ID NO: 3217992 - RNA, 20 nt, Human
uaggugcuacaaaaacacag

SEQ ID NO: 3217993 - RNA, 17 nt, Human
uaggcucugccugacag

SEQ ID NO: 3217994 - RNA, 12 nt, Human
uaggcuggaagg

SEQ ID NO: 3217995 - RNA, 18 nt, Human
uaggcuggaaggaggaag

SEQ ID NO: 3217996 - RNA, 20 nt, Human
uagcugcauuugucuggccu

SEQ ID NO: 3217997 - RNA, 17 nt, Human
uagcuguacuucuugaa

SEQ ID NO: 3217998 - RNA, 23 nt, Human
uagcuguacuucuugaauauaaa

SEQ ID NO: 3217999 - RNA, 12 nt, Human
uagcuguaaggc

SEQ ID NO: 3218000 - RNA, 19 nt, Human
uagcuguaaggcaugaagg

SEQ ID NO: 3218001 - RNA, 17 nt, Human
uagcuguaaggcaugaa

SEQ ID NO: 3218002 - RNA, 13 nt, Human
uagccccauaauu

SEQ ID NO: 3218003 - RNA, 15 nt, Human
uagccagugaacaua

SEQ ID NO: 3218004 - RNA, 23 nt, Human
uagccccucuccccgcaguguuu

SEQ ID NO: 3218005 - RNA, 14 nt, Human
uagcccccucuucc

SEQ ID NO: 3218006 - RNA, 15 nt, Human
uagcccccucuuccc

SEQ ID NO: 3218007 - RNA, 18 nt, Human
uagccgugucacgggcau

SEQ ID NO: 3218008 - RNA, 22 nt, Human
uagccuaagauauacuuguuuu

SEQ ID NO: 3218009 - RNA, 19 nt, Human
uagccuaagauauacuugu

SEQ ID NO: 3218010 - RNA, 18 nt, Human
uagccuaagauauacuug

SEQ ID NO: 3218011 - RNA, 14 nt, Human
uagccuaagauaua

SEQ ID NO: 3218012 - RNA, 17 nt, Human
uagccugccucuucucu

SEQ ID NO: 3218013 - RNA, 15 nt, Human
uagccuggugguuuu

SEQ ID NO: 3218014 - RNA, 21 nt, Human
uagcucaggugucccugcacu

SEQ ID NO: 3218015 - RNA, 20 nt, Human
uagcucaggugucccugcac

SEQ ID NO: 3218016 - RNA, 18 nt, Human
uagccugugccucuggga

SEQ ID NO: 3218017 - RNA, 16 nt, Human
uagcucaggugucccu

SEQ ID NO: 3218018 - RNA, 17 nt, Human
uagcugggacuacaggc

SEQ ID NO: 3218019 - RNA, 15 nt, Human
uagcugggacuacag

SEQ ID NO: 3218020 - RNA, 12 nt, Human
uagcugggacua

SEQ ID NO: 3218021 - RNA, 15 nt, Human
uagcugcaaaaauaa

SEQ ID NO: 3218022 - RNA, 21 nt, Human
uagcugcagauaaguggccuu

SEQ ID NO: 3218023 - RNA, 14 nt, Human
uagcucuuuuccua

SEQ ID NO: 3218024 - RNA, 17 nt, Human
uagcugacagaaucucu

SEQ ID NO: 3218025 - RNA, 15 nt, Human
uagauagcagccugg

SEQ ID NO: 3218026 - RNA, 19 nt, Human
uagauagcagccuggcucc

SEQ ID NO: 3218027 - RNA, 20 nt, Human
uagauagcagccuggcuccc

SEQ ID NO: 3218028 - RNA, 23 nt, Human
uagauuaauacucuauuuuuaca

SEQ ID NO: 3218029 - RNA, 22 nt, Human
uagauuaguacuggauuauuca

SEQ ID NO: 3218030 - RNA, 21 nt, Human
uagauuaguacuggauuauuc

SEQ ID NO: 3218031 - RNA, 21 nt, Human
uagauuccauuuacugcauuc

SEQ ID NO: 3218032 - RNA, 16 nt, Human
uagauuccauuuacug

SEQ ID NO: 3218033 - RNA, 14 nt, Human
uagauuuauuucau

SEQ ID NO: 3218034 - RNA, 15 nt, Human
uagauuuauuucauc

SEQ ID NO: 3218035 - RNA, 21 nt, Human
uagauuugccauagaguacac

SEQ ID NO: 3218036 - RNA, 23 nt, Human
uagauuucucacacucuaacugu

SEQ ID NO: 3218037 - RNA, 13 nt, Human
uagauuugggaga

SEQ ID NO: 3218038 - RNA, 11 nt, Human
uagcagggaaa

SEQ ID NO: 3218039 - RNA, 20 nt, Human
uagcagcugacuuucaaagu

SEQ ID NO: 3218040 - RNA, 15 nt, Human
uagcagccuggcucc

SEQ ID NO: 3218041 - RNA, 16 nt, Human
uagcagccuggcuccc

SEQ ID NO: 3218042 - RNA, 20 nt, Human
uagcagccuggcuccccugg

SEQ ID NO: 3218043 - RNA, 21 nt, Human
uagcagccuggcuccccuggg

SEQ ID NO: 3218044 - RNA, 17 nt, Human
uagcaucacuuaaaaca

SEQ ID NO: 3218045 - RNA, 18 nt, Human
uagcaucacuuaaaacac

SEQ ID NO: 3218046 - RNA, 23 nt, Human
uagcaucacuuaaaacacguuuu

SEQ ID NO: 3218047 - RNA, 22 nt, Human
uagcauauauguguccauuucc

SEQ ID NO: 3218048 - RNA, 15 nt, Human
uagcaucacuuaaaa

SEQ ID NO: 3218049 - RNA, 22 nt, Human
uagcauaugacaaauguuucua

SEQ ID NO: 3218050 - RNA, 21 nt, Human
uagcauaugacaaauguuucu

SEQ ID NO: 3218051 - RNA, 14 nt, Human
uagcauaugacaaa

SEQ ID NO: 3218052 - RNA, 19 nt, Human
uagcauaugacaaauguuu

SEQ ID NO: 3218053 - RNA, 18 nt, Human
uagcauaugacaaauguu

SEQ ID NO: 3218054 - RNA, 20 nt, Human
uagacccacuggacucaccu

SEQ ID NO: 3218055 - RNA, 16 nt, Human
uagaauugaagguuuu

SEQ ID NO: 3218056 - RNA, 17 nt, Human
uagaauugaagguuuuu

SEQ ID NO: 3218057 - RNA, 14 nt, Human
uagacuauaaaugu

SEQ ID NO: 3218058 - RNA, 15 nt, Human
uagacuauaaauguu

SEQ ID NO: 3218059 - RNA, 22 nt, Human
uagacuauaaauguugcuaugu

SEQ ID NO: 3218060 - RNA, 14 nt, Human
uagacuacuguuca

SEQ ID NO: 3218061 - RNA, 16 nt, Human
uagacucuaguauuua

SEQ ID NO: 3218062 - RNA, 21 nt, Human
uagacuucagggagucagcug

SEQ ID NO: 3218063 - RNA, 23 nt, Human
uagacuucagggagucagcuguu

SEQ ID NO: 3218064 - RNA, 24 nt, Human
uagacuucagggagucagcuguuu

SEQ ID NO: 3218065 - RNA, 12 nt, Human
uagagugggagc

SEQ ID NO: 3218066 - RNA, 15 nt, Human
uagagucugagggcu

SEQ ID NO: 3218067 - RNA, 21 nt, Human
uagagucugagggcuuguagu

SEQ ID NO: 3218068 - RNA, 16 nt, Human
uagaggugcaugccua

SEQ ID NO: 3218069 - RNA, 13 nt, Human
uagaggugcaugc

SEQ ID NO: 3218070 - RNA, 22 nt, Human
uagagacagagcgacagagcag

SEQ ID NO: 3218071 - RNA, 21 nt, Human
uagagguauaauugugugaua

SEQ ID NO: 3218072 - RNA, 17 nt, Human
uagagguauaauugugu

SEQ ID NO: 3218073 - RNA, 16 nt, Human
uagagguauaauugug

SEQ ID NO: 3218074 - RNA, 15 nt, Human
uagagguauaauugu

SEQ ID NO: 3218075 - RNA, 22 nt, Human
uagagaaggacccggaggggcc

SEQ ID NO: 3218076 - RNA, 13 nt, Human
uagagaaggaccc

SEQ ID NO: 3218077 - RNA, 10 nt, Human
uagacuugaa

SEQ ID NO: 3218078 - RNA, 12 nt, Human
uagacuugaaaa

SEQ ID NO: 3218079 - RNA, 18 nt, Human
uagacuucuguuuucaau

SEQ ID NO: 3218080 - RNA, 17 nt, Human
uagacuucuguuuucaa

SEQ ID NO: 3218081 - RNA, 16 nt, Human
uagacuucuguuuuca

SEQ ID NO: 3218082 - RNA, 15 nt, Human
uagacuucuguuuuc

SEQ ID NO: 3218083 - RNA, 12 nt, Human
uagaauagcaug

SEQ ID NO: 3218084 - RNA, 17 nt, Human
uagaauagcauguugua

SEQ ID NO: 3218085 - RNA, 18 nt, Human
uagaauagcauguuguag

SEQ ID NO: 3218086 - RNA, 20 nt, Human
uagaauagcauguuguagau

SEQ ID NO: 3218087 - RNA, 14 nt, Human
uagaaucaauuuaa

SEQ ID NO: 3218088 - RNA, 16 nt, Human
uagaaucaauuuaagu

SEQ ID NO: 3218089 - RNA, 20 nt, Human
uagaagucuuagauguauau

SEQ ID NO: 3218090 - RNA, 19 nt, Human
uacuuguuuuuguaaagaa

SEQ ID NO: 3218091 - RNA, 16 nt, Human
uacuuguuuuuguaaa

SEQ ID NO: 3218092 - RNA, 13 nt, Human
uacuuguuucuau

SEQ ID NO: 3218093 - RNA, 15 nt, Human
uacuuguuuuuguaa

SEQ ID NO: 3218094 - RNA, 24 nt, Human
uagaagucuucaugaaaugcuaug

SEQ ID NO: 3218095 - RNA, 15 nt, Human
uagaagucuucauga

SEQ ID NO: 3218096 - RNA, 20 nt, Human
uagaagucuucaugaaaugc

SEQ ID NO: 3218097 - RNA, 18 nt, Human
uagaagucuucaugaaau

SEQ ID NO: 3218098 - RNA, 22 nt, Human
uagaagucuucaugaaaugcua

SEQ ID NO: 3218099 - RNA, 21 nt, Human
uagaagucuucaugaaaugcu

SEQ ID NO: 3218100 - RNA, 14 nt, Human
uacuugucuuucug

SEQ ID NO: 3218101 - RNA, 17 nt, Human
uacuuguugccuauaag

SEQ ID NO: 3218102 - RNA, 14 nt, Human
uacuuguugccuau

SEQ ID NO: 3218103 - RNA, 15 nt, Human
uagaauuaacacaug

SEQ ID NO: 3218104 - RNA, 16 nt, Human
uagaauuaacacauga

SEQ ID NO: 3218105 - RNA, 18 nt, Human
uagaauuaacacaugauc

SEQ ID NO: 3218106 - RNA, 15 nt, Human
uagaauuaccauuug

SEQ ID NO: 3218107 - RNA, 16 nt, Human
uagaauuaccauuugu

SEQ ID NO: 3218108 - RNA, 17 nt, Human
uagaauuaccauuuguu

SEQ ID NO: 3218109 - RNA, 19 nt, Human
uagaauuaccauuuguuaa

SEQ ID NO: 3218110 - RNA, 16 nt, Human
uagaauguuucauuug

SEQ ID NO: 3218111 - RNA, 23 nt, Human
uagaauguaguuugaggaaauuu

SEQ ID NO: 3218112 - RNA, 21 nt, Human
uagaauguaguuugaggaaau

SEQ ID NO: 3218113 - RNA, 12 nt, Human
uagaauguaguu

SEQ ID NO: 3218114 - RNA, 14 nt, Human
uagaauguaguuug

SEQ ID NO: 3218115 - RNA, 15 nt, Human
uagaauggugauuuu

SEQ ID NO: 3218116 - RNA, 19 nt, Human
uagaauggugauuuuaaau

SEQ ID NO: 3218117 - RNA, 18 nt, Human
uagaauggugauuuuaaa

SEQ ID NO: 3218118 - RNA, 17 nt, Human
uagaauggugauuuuaa

SEQ ID NO: 3218119 - RNA, 16 nt, Human
uagaauggugauuuua

SEQ ID NO: 3218120 - RNA, 21 nt, Human
uagaauggugauuuuaaaugu

SEQ ID NO: 3218121 - RNA, 20 nt, Human
uagaauggugauuuuaaaug

SEQ ID NO: 3218122 - RNA, 21 nt, Human
uagaaugaccuuguaauguaa

SEQ ID NO: 3218123 - RNA, 20 nt, Human
uagaaugaccuuguaaugua

SEQ ID NO: 3218124 - RNA, 19 nt, Human
uagaaugaccuuguaaugu

SEQ ID NO: 3218125 - RNA, 17 nt, Human
uagaaugaccuuguaau

SEQ ID NO: 3218126 - RNA, 16 nt, Human
uagaaugaccuuguaa

SEQ ID NO: 3218127 - RNA, 15 nt, Human
uagaaugaccuugua

SEQ ID NO: 3218128 - RNA, 13 nt, Human
uagaaucccugug

SEQ ID NO: 3218129 - RNA, 15 nt, Human
uagaaucccuguguu

SEQ ID NO: 3218130 - RNA, 16 nt, Human
uagaaucccuguguua

SEQ ID NO: 3218131 - RNA, 20 nt, Human
uagaaucccuguguuaauuu

SEQ ID NO: 3218132 - RNA, 14 nt, Human
uacaggaaguacug

SEQ ID NO: 3218133 - RNA, 15 nt, Human
uacaggaaguacugg

SEQ ID NO: 3218134 - RNA, 22 nt, Human
uacaggaaguacuggagaaaau

SEQ ID NO: 3218135 - RNA, 15 nt, Human
uacaggagugagcac

SEQ ID NO: 3218136 - RNA, 17 nt, Human
uacaguugaaaaacagc

SEQ ID NO: 3218137 - RNA, 19 nt, Human
uacaguugaaaaacagcug

SEQ ID NO: 3218138 - RNA, 20 nt, Human
uacaguugaaaaacagcuga

SEQ ID NO: 3218139 - RNA, 18 nt, Human
uacaggaagguagaaaua

SEQ ID NO: 3218140 - RNA, 13 nt, Human
uacaggaaguacu

SEQ ID NO: 3218141 - RNA, 20 nt, Human
uacagcuugaccgugaggcc

SEQ ID NO: 3218142 - RNA, 13 nt, Human
uacagcugccugc

SEQ ID NO: 3218143 - RNA, 14 nt, Human
uacagcugccugca

SEQ ID NO: 3218144 - RNA, 20 nt, Human
uacagcucccccagcucccc

SEQ ID NO: 3218145 - RNA, 18 nt, Human
uacagcucccccagcucc

SEQ ID NO: 3218146 - RNA, 17 nt, Human
uacagcucccccagcuc

SEQ ID NO: 3218147 - RNA, 16 nt, Human
uacagcucccccagcu

SEQ ID NO: 3218148 - RNA, 14 nt, Human
uacagcucccccag

SEQ ID NO: 3218149 - RNA, 21 nt, Human
uacacugagagccuuuuugaa

SEQ ID NO: 3218150 - RNA, 16 nt, Human
uacacuucaguuaucu

SEQ ID NO: 3218151 - RNA, 18 nt, Human
uacacuugagaugauuuc

SEQ ID NO: 3218152 - RNA, 18 nt, Human
uacagcuaaucagcauuc

SEQ ID NO: 3218153 - RNA, 16 nt, Human
uacagcuaaucagcau

SEQ ID NO: 3218154 - RNA, 16 nt, Human
uacacuuacacuuuau

SEQ ID NO: 3218155 - RNA, 22 nt, Human
uacacugugcugagucugaagg

SEQ ID NO: 3218156 - RNA, 23 nt, Human
uacacugugcugagucugaaggc

SEQ ID NO: 3218157 - RNA, 16 nt, Human
uacacugccugccuua

SEQ ID NO: 3218158 - RNA, 13 nt, Human
uacacuguuauuu

SEQ ID NO: 3218159 - RNA, 15 nt, Human
uacacuguuauuuuc

SEQ ID NO: 3218160 - RNA, 21 nt, Human
uacacuguuauuuucagcaug

SEQ ID NO: 3218161 - RNA, 16 nt, Human
uacauaaacaaguccu

SEQ ID NO: 3218162 - RNA, 13 nt, Human
uacauaaacauca

SEQ ID NO: 3218163 - RNA, 23 nt, Human
uacauaaaccauuuuuguuacuc

SEQ ID NO: 3218164 - RNA, 12 nt, Human
uacauaaacauc

SEQ ID NO: 3218165 - RNA, 16 nt, Human
uacauaagauaaaugu

SEQ ID NO: 3218166 - RNA, 22 nt, Human
uacauggaauaacauguaauua

SEQ ID NO: 3218167 - RNA, 19 nt, Human
uacauggaauaacauguaa

SEQ ID NO: 3218168 - RNA, 18 nt, Human
uacauggaauaacaugua

SEQ ID NO: 3218169 - RNA, 14 nt, Human
uacauggaauaaca

SEQ ID NO: 3218170 - RNA, 16 nt, Human
uacaugccauugaaaa

SEQ ID NO: 3218171 - RNA, 16 nt, Human
uacaugcuuugugaac

SEQ ID NO: 3218172 - RNA, 15 nt, Human
uacaugcuuugugaa

SEQ ID NO: 3218173 - RNA, 14 nt, Human
uacaugcuuguuga

SEQ ID NO: 3218174 - RNA, 14 nt, Human
uacaugaaauucaa

SEQ ID NO: 3218175 - RNA, 18 nt, Human
uacaugcacacucaugug

SEQ ID NO: 3218176 - RNA, 14 nt, Human
uacacuccagugag

SEQ ID NO: 3218177 - RNA, 20 nt, Human
uacacauauaaauugucuua

SEQ ID NO: 3218178 - RNA, 22 nt, Human
uacacaucagccaucaacuaaa

SEQ ID NO: 3218179 - RNA, 21 nt, Human
uacacugugcugagucugaag

SEQ ID NO: 3218180 - RNA, 23 nt, Human
uacacugaauuuuuaugugugau

SEQ ID NO: 3218181 - RNA, 22 nt, Human
uacacugaauuuuuauguguga

SEQ ID NO: 3218182 - RNA, 20 nt, Human
uacacugaauuuuuaugugu

SEQ ID NO: 3218183 - RNA, 18 nt, Human
uacacugaauuuuuaugu

SEQ ID NO: 3218184 - RNA, 16 nt, Human
uacacacucaaaucaa

SEQ ID NO: 3218185 - RNA, 23 nt, Human
uacacacgcugccuucgguaccc

SEQ ID NO: 3218186 - RNA, 17 nt, Human
uacacacgcugccuucg

SEQ ID NO: 3218187 - RNA, 17 nt, Human
uacacacucaaaucaag

SEQ ID NO: 3218188 - RNA, 22 nt, Human
uacacaggacagggguuccuuc

SEQ ID NO: 3218189 - RNA, 21 nt, Human
uacacaggacagggguuccuu

SEQ ID NO: 3218190 - RNA, 14 nt, Human
uacacaggacaggg

SEQ ID NO: 3218191 - RNA, 19 nt, Human
uacaauuucuuuugguuca

SEQ ID NO: 3218192 - RNA, 23 nt, Human
uacacaaugguuuucuugugugu

SEQ ID NO: 3218193 - RNA, 11 nt, Human
uacacacacac

SEQ ID NO: 3218194 - RNA, 17 nt, Human
uacaauuucuuuugguu

SEQ ID NO: 3218195 - RNA, 20 nt, Human
uacaacuaacgcaaccaagu

SEQ ID NO: 3218196 - RNA, 19 nt, Human
uacaaaugcaucuuugaug

SEQ ID NO: 3218197 - RNA, 21 nt, Human
uacaaaugcaucuuugaugug

SEQ ID NO: 3218198 - RNA, 23 nt, Human
uacaaaugccuccaaaguauugu

SEQ ID NO: 3218199 - RNA, 15 nt, Human
uacaaauuauaaugu

SEQ ID NO: 3218200 - RNA, 22 nt, Human
uacaaauuauaauguauucaua

SEQ ID NO: 3218201 - RNA, 18 nt, Human
uacaaauuauaauguauu

SEQ ID NO: 3218202 - RNA, 16 nt, Human
uacaaauuauaaugua

SEQ ID NO: 3218203 - RNA, 16 nt, Human
uacaaauuuuucugug

SEQ ID NO: 3218204 - RNA, 15 nt, Human
uacaaauuuuucugu

SEQ ID NO: 3218205 - RNA, 12 nt, Human
uacaaccuucau

SEQ ID NO: 3218206 - RNA, 15 nt, Human
uacaaccuucauuua

SEQ ID NO: 3218207 - RNA, 18 nt, Human
uacaacacuuuaaugggu

SEQ ID NO: 3218208 - RNA, 19 nt, Human
uacaacaccaaaaaauauc

SEQ ID NO: 3218209 - RNA, 18 nt, Human
uacaacaccaaaaaauau

SEQ ID NO: 3218210 - RNA, 16 nt, Human
uacaacaccaaaaaau

SEQ ID NO: 3218211 - RNA, 15 nt, Human
uaauucuaugccugu

SEQ ID NO: 3218212 - RNA, 13 nt, Human
uaauuuuguguaa

SEQ ID NO: 3218213 - RNA, 20 nt, Human
uaauuuuguguaagaaauac

SEQ ID NO: 3218214 - RNA, 19 nt, Human
uaauuuuguguaagaaaua

SEQ ID NO: 3218215 - RNA, 19 nt, Human
uaauuuuuaaaugcaguua

SEQ ID NO: 3218216 - RNA, 15 nt, Human
uaauuuuuaaaugca

SEQ ID NO: 3218217 - RNA, 13 nt, Human
uaauuuuuaaaug

SEQ ID NO: 3218218 - RNA, 20 nt, Human
uacaaacaagcauauaaaau

SEQ ID NO: 3218219 - RNA, 19 nt, Human
uacaaacaagcauauaaaa

SEQ ID NO: 3218220 - RNA, 18 nt, Human
uacaaacaagcauauaaa

SEQ ID NO: 3218221 - RNA, 17 nt, Human
uacaaacaagcauauaa

SEQ ID NO: 3218222 - RNA, 15 nt, Human
uacaaacaagcauau

SEQ ID NO: 3218223 - RNA, 14 nt, Human
uacaaacaagcaua

SEQ ID NO: 3218224 - RNA, 15 nt, Human
uacaaaucaguaauu

SEQ ID NO: 3218225 - RNA, 13 nt, Human
uacaaaugauugc

SEQ ID NO: 3218226 - RNA, 16 nt, Human
uacaaaugcaucuuug

SEQ ID NO: 3218227 - RNA, 23 nt, Human
uacaaaugauugcuuuuaaaauu

SEQ ID NO: 3218228 - RNA, 17 nt, Human
uacaaaugcaucuuuga

SEQ ID NO: 3218229 - RNA, 18 nt, Human
uacaaaugcaucuuugau

SEQ ID NO: 3218230 - RNA, 21 nt, Human
uacaaaugauugcuuuuaaaa

SEQ ID NO: 3218231 - RNA, 20 nt, Human
uacaaaugauugcuuuuaaa

SEQ ID NO: 3218232 - RNA, 19 nt, Human
uacaaaugauugcuuuuaa

SEQ ID NO: 3218233 - RNA, 18 nt, Human
uacaaaugauugcuuuua

SEQ ID NO: 3218234 - RNA, 18 nt, Human
uacaaaguagaagucuua

SEQ ID NO: 3218235 - RNA, 14 nt, Human
uacaaaguagaagu

SEQ ID NO: 3218236 - RNA, 16 nt, Human
uacaaaggcuguauuc

SEQ ID NO: 3218237 - RNA, 17 nt, Human
uacaaaggcuguauuca

SEQ ID NO: 3218238 - RNA, 20 nt, Human
uaccaaaaaaauuacaguuu

SEQ ID NO: 3218239 - RNA, 15 nt, Human
uacccacugcucugg

SEQ ID NO: 3218240 - RNA, 22 nt, Human
uacauuuuuugaaaugcugaaa

SEQ ID NO: 3218241 - RNA, 16 nt, Human
uacauuuuuugaaaug

SEQ ID NO: 3218242 - RNA, 15 nt, Human
uacauuuuuugaaau

SEQ ID NO: 3218243 - RNA, 13 nt, Human
uacauuuuuugaa

SEQ ID NO: 3218244 - RNA, 20 nt, Human
uacauuuuuagccuguguca

SEQ ID NO: 3218245 - RNA, 22 nt, Human
uaccuaacgaaguauccuucag

SEQ ID NO: 3218246 - RNA, 13 nt, Human
uaccgucuacauu

SEQ ID NO: 3218247 - RNA, 17 nt, Human
uaccgucuacauuucac

SEQ ID NO: 3218248 - RNA, 17 nt, Human
uaccggagagagaaugu

SEQ ID NO: 3218249 - RNA, 18 nt, Human
uaccggagagagaaugua

SEQ ID NO: 3218250 - RNA, 22 nt, Human
uaccgagucucuucuccacugg

SEQ ID NO: 3218251 - RNA, 21 nt, Human
uaccgagucucuucuccacug

SEQ ID NO: 3218252 - RNA, 18 nt, Human
uaccgagucucuucucca

SEQ ID NO: 3218253 - RNA, 17 nt, Human
uaccgagucucuucucc

SEQ ID NO: 3218254 - RNA, 15 nt, Human
uaccgacaagcacag

SEQ ID NO: 3218255 - RNA, 18 nt, Human
uaccucaacaagaagaau

SEQ ID NO: 3218256 - RNA, 19 nt, Human
uaccucaacaagaagaauu

SEQ ID NO: 3218257 - RNA, 16 nt, Human
uaccuaucaucuuaag

SEQ ID NO: 3218258 - RNA, 16 nt, Human
uaccuacuuucuucag

SEQ ID NO: 3218259 - RNA, 15 nt, Human
uaccuacauacaauu

SEQ ID NO: 3218260 - RNA, 23 nt, Human
uaccuuuguucccaaauuucaua

SEQ ID NO: 3218261 - RNA, 14 nt, Human
uaccuucaaacuuu

SEQ ID NO: 3218262 - RNA, 15 nt, Human
uaccuucaaacuuua

SEQ ID NO: 3218263 - RNA, 16 nt, Human
uaccuucaaacuuuag

SEQ ID NO: 3218264 - RNA, 18 nt, Human
uaccucggugccuuccuc

SEQ ID NO: 3218265 - RNA, 14 nt, Human
uaccucucugucau

SEQ ID NO: 3218266 - RNA, 18 nt, Human
uaccucugcauaaauauu

SEQ ID NO: 3218267 - RNA, 13 nt, Human
uacuaacuuuccu

SEQ ID NO: 3218268 - RNA, 14 nt, Human
uacuaaggaaucuu

SEQ ID NO: 3218269 - RNA, 18 nt, Human
uacgaaaagaggggaaga

SEQ ID NO: 3218270 - RNA, 21 nt, Human
uacgaaaagaggggaagagac

SEQ ID NO: 3218271 - RNA, 19 nt, Human
uaccuuuuuuuuucuuuuu

SEQ ID NO: 3218272 - RNA, 15 nt, Human
uaccuuuuuuuuucu

SEQ ID NO: 3218273 - RNA, 14 nt, Human
uacugccuccccca

SEQ ID NO: 3218274 - RNA, 23 nt, Human
uacugccaaccucgcuccaacuc

SEQ ID NO: 3218275 - RNA, 19 nt, Human
uacugccaaccucgcucca

SEQ ID NO: 3218276 - RNA, 22 nt, Human
uacugcccaggccugccuguuc

SEQ ID NO: 3218277 - RNA, 21 nt, Human
uacugcccaggccugccuguu

SEQ ID NO: 3218278 - RNA, 20 nt, Human
uacugcccaggccugccugu

SEQ ID NO: 3218279 - RNA, 19 nt, Human
uacugcccaggccugccug

SEQ ID NO: 3218280 - RNA, 17 nt, Human
uacugcauaugaaagga

SEQ ID NO: 3218281 - RNA, 14 nt, Human
uacugcauucuucu

SEQ ID NO: 3218282 - RNA, 16 nt, Human
uacugccaaccucgcu

SEQ ID NO: 3218283 - RNA, 13 nt, Human
uacugccaaccuc

SEQ ID NO: 3218284 - RNA, 15 nt, Human
uacugcauuuaggga

SEQ ID NO: 3218285 - RNA, 18 nt, Human
uacugcauuuagggagua

SEQ ID NO: 3218286 - RNA, 18 nt, Human
uacugcauucuucugauc

SEQ ID NO: 3218287 - RNA, 17 nt, Human
uacugcauucuucugau

SEQ ID NO: 3218288 - RNA, 14 nt, Human
uacugauuucagua

SEQ ID NO: 3218289 - RNA, 18 nt, Human
uacugauuucaguaaguc

SEQ ID NO: 3218290 - RNA, 19 nt, Human
uacugauuucaguaagucu

SEQ ID NO: 3218291 - RNA, 21 nt, Human
uacugauuugggcugaaugua

SEQ ID NO: 3218292 - RNA, 22 nt, Human
uacugauuugggcugaauguau

SEQ ID NO: 3218293 - RNA, 23 nt, Human
uacugauuugggcugaauguaug

SEQ ID NO: 3218294 - RNA, 16 nt, Human
uacugcaaacuauuua

SEQ ID NO: 3218295 - RNA, 22 nt, Human
uacucgaguuacagacaaagcg

SEQ ID NO: 3218296 - RNA, 18 nt, Human
uacucgaguuacagacaa

SEQ ID NO: 3218297 - RNA, 12 nt, Human
uacuccucccag

SEQ ID NO: 3218298 - RNA, 22 nt, Human
uacuacaguccucccaucucac

SEQ ID NO: 3218299 - RNA, 20 nt, Human
uacuacaguccucccaucuc

SEQ ID NO: 3218300 - RNA, 22 nt, Human
uacuaaggauacaggcuggaaa

SEQ ID NO: 3218301 - RNA, 20 nt, Human
uacuaaggauacaggcugga

SEQ ID NO: 3218302 - RNA, 19 nt, Human
uacuaaggauacaggcugg

SEQ ID NO: 3218303 - RNA, 12 nt, Human
uacuaaggauac

SEQ ID NO: 3218304 - RNA, 15 nt, Human
uacucauuagaauua

SEQ ID NO: 3218305 - RNA, 13 nt, Human
uacuuguggacac

SEQ ID NO: 3218306 - RNA, 17 nt, Human
uacuuaaauguuaugua

SEQ ID NO: 3218307 - RNA, 19 nt, Human
uacuuaaauguuauguaua

SEQ ID NO: 3218308 - RNA, 18 nt, Human
uacuuaaauguuauguau

SEQ ID NO: 3218309 - RNA, 18 nt, Human
uacuuaaaaauuuauuag

SEQ ID NO: 3218310 - RNA, 19 nt, Human
uacuguuuaagugaauuga

SEQ ID NO: 3218311 - RNA, 13 nt, Human
uacuguuauucuu

SEQ ID NO: 3218312 - RNA, 15 nt, Human
uacuguuauucuuug

SEQ ID NO: 3218313 - RNA, 14 nt, Human
uacuguuauucuuu

SEQ ID NO: 3218314 - RNA, 16 nt, Human
uacuguucagcuuuua

SEQ ID NO: 3218315 - RNA, 20 nt, Human
uacuguuauucuuugcacuu

SEQ ID NO: 3218316 - RNA, 17 nt, Human
uacuguuauucuuugca

SEQ ID NO: 3218317 - RNA, 16 nt, Human
uacuguuauucuuugc

SEQ ID NO: 3218318 - RNA, 12 nt, Human
uacuugaaccau

SEQ ID NO: 3218319 - RNA, 16 nt, Human
uacuugaaccauaaaa

SEQ ID NO: 3218320 - RNA, 17 nt, Human
uacuugaaccauaaaau

SEQ ID NO: 3218321 - RNA, 19 nt, Human
uacuugaaccauaaaaugu

SEQ ID NO: 3218322 - RNA, 20 nt, Human
uacuugaaccauaaaauguc

SEQ ID NO: 3218323 - RNA, 21 nt, Human
uacuugaaccauaaaaugucc

SEQ ID NO: 3218324 - RNA, 21 nt, Human
uacugucuucaguaagccgug

SEQ ID NO: 3218325 - RNA, 14 nt, Human
uacugugacuuuau

SEQ ID NO: 3218326 - RNA, 10 nt, Human
uacuguguua

SEQ ID NO: 3218327 - RNA, 14 nt, Human
uacuguuacuugau

SEQ ID NO: 3218328 - RNA, 17 nt, Human
uacuguuacuugauaac

SEQ ID NO: 3218329 - RNA, 15 nt, Human
uacuguuacuugaua

SEQ ID NO: 3218330 - RNA, 23 nt, Human
uacugucagcuccccucggagaa

SEQ ID NO: 3218331 - RNA, 16 nt, Human
uacuguccuacccacc

SEQ ID NO: 3218332 - RNA, 18 nt, Human
uacugcuugaauaaacac

SEQ ID NO: 3218333 - RNA, 17 nt, Human
uacugcuuuaaucagaa

SEQ ID NO: 3218334 - RNA, 20 nt, Human
uacugcuuaauucaaauaau

SEQ ID NO: 3218335 - RNA, 19 nt, Human
uacugcuuaauucaaauaa

SEQ ID NO: 3218336 - RNA, 13 nt, Human
uacugcuuaauuc

SEQ ID NO: 3218337 - RNA, 19 nt, Human
uacugcuagucuuaagaac

SEQ ID NO: 3218338 - RNA, 22 nt, Human
guguacauggaauaacauguaa

SEQ ID NO: 3218339 - RNA, 15 nt, Human
guguaccauuaaaau

SEQ ID NO: 3218340 - RNA, 18 nt, Human
guguagauuuuauagugu

SEQ ID NO: 3218341 - RNA, 20 nt, Human
guguagauuuuauagugugu

SEQ ID NO: 3218342 - RNA, 22 nt, Human
guguaauuuaaaauugugaugu

SEQ ID NO: 3218343 - RNA, 23 nt, Human
guguaauuuaaaauugugaugug

SEQ ID NO: 3218344 - RNA, 20 nt, Human
guguaauuuaaaauugugau

SEQ ID NO: 3218345 - RNA, 23 nt, Human
guguacagaauuuuucuucauua

SEQ ID NO: 3218346 - RNA, 16 nt, Human
guguaauuuuucugua

SEQ ID NO: 3218347 - RNA, 15 nt, Human
guguaauuuuucugu

SEQ ID NO: 3218348 - RNA, 17 nt, Human
guguacauggaauaaca

SEQ ID NO: 3218349 - RNA, 20 nt, Human
guguaugugaguauucucau

SEQ ID NO: 3218350 - RNA, 20 nt, Human
gugucccaaaaagaaaggag

SEQ ID NO: 3218351 - RNA, 22 nt, Human
guguccccaccaucugcugucu

SEQ ID NO: 3218352 - RNA, 20 nt, Human
guguccccaccaucugcugu

SEQ ID NO: 3218353 - RNA, 18 nt, Human
guguccccaccaucugcu

SEQ ID NO: 3218354 - RNA, 17 nt, Human
guguccccaccaucugc

SEQ ID NO: 3218355 - RNA, 13 nt, Human
guguccccaccau

SEQ ID NO: 3218356 - RNA, 12 nt, Human
guguccccacca

SEQ ID NO: 3218357 - RNA, 11 nt, Human
guguccccacc

SEQ ID NO: 3218358 - RNA, 18 nt, Human
gugucccugcacuugcag

SEQ ID NO: 3218359 - RNA, 16 nt, Human
gugucccugcacuugc

SEQ ID NO: 3218360 - RNA, 13 nt, Human
gugucccugcacu

SEQ ID NO: 3218361 - RNA, 14 nt, Human
guguaucaguguuu

SEQ ID NO: 3218362 - RNA, 15 nt, Human
guguaucaguguuua

SEQ ID NO: 3218363 - RNA, 19 nt, Human
guguaucaguguuuaugug

SEQ ID NO: 3218364 - RNA, 12 nt, Human
guguauauuuga

SEQ ID NO: 3218365 - RNA, 13 nt, Human
guguauauuugau

SEQ ID NO: 3218366 - RNA, 14 nt, Human
guguauauuugauu

SEQ ID NO: 3218367 - RNA, 17 nt, Human
guguauauuugauuuau

SEQ ID NO: 3218368 - RNA, 17 nt, Human
guguagcugcaaaaaua

SEQ ID NO: 3218369 - RNA, 23 nt, Human
guguagcugcaaaaauaaucaug

SEQ ID NO: 3218370 - RNA, 18 nt, Human
guggucuccacuggggau

SEQ ID NO: 3218371 - RNA, 17 nt, Human
guggucccaccccacac

SEQ ID NO: 3218372 - RNA, 18 nt, Human
gugguccuaaucuucuga

SEQ ID NO: 3218373 - RNA, 14 nt, Human
guggucccacccca

SEQ ID NO: 3218374 - RNA, 12 nt, Human
gugguccaaaua

SEQ ID NO: 3218375 - RNA, 15 nt, Human
guggucccaccccac

SEQ ID NO: 3218376 - RNA, 16 nt, Human
guggucccaccccaca

SEQ ID NO: 3218377 - RNA, 19 nt, Human
gugguaugaucacggcuca

SEQ ID NO: 3218378 - RNA, 17 nt, Human
gugguagagugugccug

SEQ ID NO: 3218379 - RNA, 14 nt, Human
guggucuuuuccuc

SEQ ID NO: 3218380 - RNA, 19 nt, Human
guggugcgaucuggguuca

SEQ ID NO: 3218381 - RNA, 21 nt, Human
guguaaguauucuuauuuaau

SEQ ID NO: 3218382 - RNA, 12 nt, Human
guguaauauuac

SEQ ID NO: 3218383 - RNA, 14 nt, Human
guguaauauuacuu

SEQ ID NO: 3218384 - RNA, 21 nt, Human
guggugagaggcauccaguau

SEQ ID NO: 3218385 - RNA, 17 nt, Human
guggugaccucugccug

SEQ ID NO: 3218386 - RNA, 14 nt, Human
guggugaccucugc

SEQ ID NO: 3218387 - RNA, 13 nt, Human
guggggaggggcu

SEQ ID NO: 3218388 - RNA, 15 nt, Human
guggggaccucaggc

SEQ ID NO: 3218389 - RNA, 18 nt, Human
guggggaccucaggccug

SEQ ID NO: 3218390 - RNA, 15 nt, Human
gugggugugagcagc

SEQ ID NO: 3218391 - RNA, 23 nt, Human
guggguuucuaaagcugccagcc

SEQ ID NO: 3218392 - RNA, 18 nt, Human
guggguuuguggggggag

SEQ ID NO: 3218393 - RNA, 19 nt, Human
guggguuuguggggggagg

SEQ ID NO: 3218394 - RNA, 17 nt, Human
guggggcagcuugaggg

SEQ ID NO: 3218395 - RNA, 13 nt, Human
guggggcagcuug

SEQ ID NO: 3218396 - RNA, 13 nt, Human
gugggccuggcca

SEQ ID NO: 3218397 - RNA, 17 nt, Human
gugggcccaaugcacuu

SEQ ID NO: 3218398 - RNA, 17 nt, Human
gugggcauucucucucc

SEQ ID NO: 3218399 - RNA, 15 nt, Human
gugggcuaguugggc

SEQ ID NO: 3218400 - RNA, 19 nt, Human
gugggccuucagggaguga

SEQ ID NO: 3218401 - RNA, 21 nt, Human
gugggcgugagaccugccccu

SEQ ID NO: 3218402 - RNA, 22 nt, Human
gugggcgugagaccugccccuc

SEQ ID NO: 3218403 - RNA, 18 nt, Human
gugggcgugagaccugcc

SEQ ID NO: 3218404 - RNA, 17 nt, Human
guggcuggaucugugag

SEQ ID NO: 3218405 - RNA, 23 nt, Human
guggcugcuucaaggauccugag

SEQ ID NO: 3218406 - RNA, 19 nt, Human
guggcuggguuggagggug

SEQ ID NO: 3218407 - RNA, 15 nt, Human
guggcugcuucaagg

SEQ ID NO: 3218408 - RNA, 16 nt, Human
guggcugcuucaagga

SEQ ID NO: 3218409 - RNA, 19 nt, Human
guggcugcuucaaggaucc

SEQ ID NO: 3218410 - RNA, 22 nt, Human
guggcugcuucaaggauccuga

SEQ ID NO: 3218411 - RNA, 20 nt, Human
guggcuucccgcucagcccu

SEQ ID NO: 3218412 - RNA, 19 nt, Human
guggcuucccgcucagccc

SEQ ID NO: 3218413 - RNA, 18 nt, Human
guggcuucccgcucagcc

SEQ ID NO: 3218414 - RNA, 22 nt, Human
guggcuuaaaacaacacucaca

SEQ ID NO: 3218415 - RNA, 20 nt, Human
gugcuacaaaaacacagcaa

SEQ ID NO: 3218416 - RNA, 15 nt, Human
gugcuacaaaaacac

SEQ ID NO: 3218417 - RNA, 14 nt, Human
guggcucacgccug

SEQ ID NO: 3218418 - RNA, 12 nt, Human
guggcugcuuca

SEQ ID NO: 3218419 - RNA, 14 nt, Human
guggcugcuucaag

SEQ ID NO: 3218420 - RNA, 20 nt, Human
guggcuccucccggugccca

SEQ ID NO: 3218421 - RNA, 13 nt, Human
guggcuccucccg

SEQ ID NO: 3218422 - RNA, 21 nt, Human
guggcucaagucuggccccac

SEQ ID NO: 3218423 - RNA, 20 nt, Human
guggcucaagucuggcccca

SEQ ID NO: 3218424 - RNA, 15 nt, Human
gugucgggcaugaca

SEQ ID NO: 3218425 - RNA, 14 nt, Human
guguccggucccug

SEQ ID NO: 3218426 - RNA, 23 nt, Human
gugucccugcacuugcagacucu

SEQ ID NO: 3218427 - RNA, 20 nt, Human
guguccuccugggguucuuu

SEQ ID NO: 3218428 - RNA, 14 nt, Human
gugucucuuggucc

SEQ ID NO: 3218429 - RNA, 17 nt, Human
gugucucccuucauccu

SEQ ID NO: 3218430 - RNA, 14 nt, Human
gugucuggcugcag

SEQ ID NO: 3218431 - RNA, 13 nt, Human
gugucugcccccu

SEQ ID NO: 3218432 - RNA, 16 nt, Human
gugucuggaucaguaa

SEQ ID NO: 3218433 - RNA, 20 nt, Human
gugucuggaucaguaaaauu

SEQ ID NO: 3218434 - RNA, 22 nt, Human
gugucucuugguccugcugcag

SEQ ID NO: 3218435 - RNA, 18 nt, Human
gugucucuugguccugcu

SEQ ID NO: 3218436 - RNA, 19 nt, Human
gugucucuugguccugcug

SEQ ID NO: 3218437 - RNA, 20 nt, Human
gugucucuugguccugcugc

SEQ ID NO: 3218438 - RNA, 21 nt, Human
gugucucuugguccugcugca

SEQ ID NO: 3218439 - RNA, 20 nt, Human
gugugagucaccaagcccag

SEQ ID NO: 3218440 - RNA, 17 nt, Human
gugugagugcauguacu

SEQ ID NO: 3218441 - RNA, 17 nt, Human
gugugauauuucagaaa

SEQ ID NO: 3218442 - RNA, 15 nt, Human
gugugauauuucaga

SEQ ID NO: 3218443 - RNA, 22 nt, Human
gugugauauuucagaaauacag

SEQ ID NO: 3218444 - RNA, 12 nt, Human
gugugcauaaua

SEQ ID NO: 3218445 - RNA, 17 nt, Human
gugugggaguguguaau

SEQ ID NO: 3218446 - RNA, 21 nt, Human
guguggagucauuucugauuu

SEQ ID NO: 3218447 - RNA, 17 nt, Human
guguggagucauuucug

SEQ ID NO: 3218448 - RNA, 13 nt, Human
guguggagaagcg

SEQ ID NO: 3218449 - RNA, 20 nt, Human
guguggaaauuaagaagaaa

SEQ ID NO: 3218450 - RNA, 21 nt, Human
guguggagaagcggcuggcag

SEQ ID NO: 3218451 - RNA, 16 nt, Human
guguguuuaugugugu

SEQ ID NO: 3218452 - RNA, 14 nt, Human
guguguuuaugugu

SEQ ID NO: 3218453 - RNA, 15 nt, Human
guguguuuaugugug

SEQ ID NO: 3218454 - RNA, 15 nt, Human
guguguuucugaucu

SEQ ID NO: 3218455 - RNA, 15 nt, Human
guguguuucuguccu

SEQ ID NO: 3218456 - RNA, 19 nt, Human
guguguuucuguccuguaa

SEQ ID NO: 3218457 - RNA, 12 nt, Human
guguguugugug

SEQ ID NO: 3218458 - RNA, 14 nt, Human
guguguugugugug

SEQ ID NO: 3218459 - RNA, 17 nt, Human
guguguuguguguggga

SEQ ID NO: 3218460 - RNA, 19 nt, Human
guguguugugcuuucaaga

SEQ ID NO: 3218461 - RNA, 14 nt, Human
guguguugcuuaug

SEQ ID NO: 3218462 - RNA, 12 nt, Human
gugugcucugau

SEQ ID NO: 3218463 - RNA, 15 nt, Human
gugugcuaaaaauga

SEQ ID NO: 3218464 - RNA, 22 nt, Human
gugugcuaaacguguauguuuu

SEQ ID NO: 3218465 - RNA, 22 nt, Human
gugugcucugaucauccacugu

SEQ ID NO: 3218466 - RNA, 15 nt, Human
gugugcucugaucau

SEQ ID NO: 3218467 - RNA, 19 nt, Human
guguggaaauuaagaagaa

SEQ ID NO: 3218468 - RNA, 18 nt, Human
gugugcccagcuuauaaa

SEQ ID NO: 3218469 - RNA, 13 nt, Human
gugugcccagcuu

SEQ ID NO: 3218470 - RNA, 23 nt, Human
gugugccucuagcugaauugagc

SEQ ID NO: 3218471 - RNA, 17 nt, Human
gugugccucuagcugaa

SEQ ID NO: 3218472 - RNA, 16 nt, Human
gugugccucuagcuga

SEQ ID NO: 3218473 - RNA, 14 nt, Human
gugugccucuagcu

SEQ ID NO: 3218474 - RNA, 13 nt, Human
gugugccucuagc

SEQ ID NO: 3218475 - RNA, 11 nt, Human
gugugccucua

SEQ ID NO: 3218476 - RNA, 17 nt, Human
guuaaacucgcucacug

SEQ ID NO: 3218477 - RNA, 13 nt, Human
guuaaagauguag

SEQ ID NO: 3218478 - RNA, 16 nt, Human
guuaaagauguagcaa

SEQ ID NO: 3218479 - RNA, 15 nt, Human
guuaaagaaaggaaa

SEQ ID NO: 3218480 - RNA, 21 nt, Human
guuaaagugaggccacugaag

SEQ ID NO: 3218481 - RNA, 22 nt, Human
guuaaagugaggccacugaaga

SEQ ID NO: 3218482 - RNA, 18 nt, Human
guuaaaggugaacauugg

SEQ ID NO: 3218483 - RNA, 21 nt, Human
guuaaagggaagaaaacacug

SEQ ID NO: 3218484 - RNA, 16 nt, Human
guuaaagggaagaaaa

SEQ ID NO: 3218485 - RNA, 16 nt, Human
guuaaaagaugaaaau

SEQ ID NO: 3218486 - RNA, 14 nt, Human
guuaaaagaugaaa

SEQ ID NO: 3218487 - RNA, 13 nt, Human
guuaaaaaaaaaa

SEQ ID NO: 3218488 - RNA, 20 nt, Human
guuaaaaacagauuuggaaa

SEQ ID NO: 3218489 - RNA, 20 nt, Human
guuaaaagaugaaaauauuu

SEQ ID NO: 3218490 - RNA, 13 nt, Human
guuaaaauuauac

SEQ ID NO: 3218491 - RNA, 14 nt, Human
guuaaaauggauuu

SEQ ID NO: 3218492 - RNA, 13 nt, Human
guuacagacaaag

SEQ ID NO: 3218493 - RNA, 22 nt, Human
guuacacuguuauuuucagcau

SEQ ID NO: 3218494 - RNA, 22 nt, Human
guuacacuuuuuggaagugaaa

SEQ ID NO: 3218495 - RNA, 18 nt, Human
guuacacuuuuuggaagu

SEQ ID NO: 3218496 - RNA, 17 nt, Human
guuacacuuuuuggaag

SEQ ID NO: 3218497 - RNA, 16 nt, Human
guuacacuaaaaggug

SEQ ID NO: 3218498 - RNA, 15 nt, Human
guuacacuaaaaggu

SEQ ID NO: 3218499 - RNA, 18 nt, Human
guuaacugagugccuuuu

SEQ ID NO: 3218500 - RNA, 21 nt, Human
guuaacuuauucaaagagaaa

SEQ ID NO: 3218501 - RNA, 17 nt, Human
guuaacaaauaacaacu

SEQ ID NO: 3218502 - RNA, 12 nt, Human
guuaacaaauaa

SEQ ID NO: 3218503 - RNA, 19 nt, Human
guuaacaaugccuauugua

SEQ ID NO: 3218504 - RNA, 23 nt, Human
guuaacaaugccuauuguaauau

SEQ ID NO: 3218505 - RNA, 23 nt, Human
guuaaauguuuuguaaacuuuga

SEQ ID NO: 3218506 - RNA, 22 nt, Human
guuaaauguuuuguaaacuuug

SEQ ID NO: 3218507 - RNA, 19 nt, Human
guuaaauguuuuguaaacu

SEQ ID NO: 3218508 - RNA, 18 nt, Human
guuaaauguuuuguaaac

SEQ ID NO: 3218509 - RNA, 17 nt, Human
guuaaauguuuuguaaa

SEQ ID NO: 3218510 - RNA, 13 nt, Human
guuaaauguuuug

SEQ ID NO: 3218511 - RNA, 11 nt, Human
guuaaauguuu

SEQ ID NO: 3218512 - RNA, 16 nt, Human
guuaaccucugcuuuu

SEQ ID NO: 3218513 - RNA, 17 nt, Human
guuaacaggcaaacauu

SEQ ID NO: 3218514 - RNA, 14 nt, Human
guguuaagauugca

SEQ ID NO: 3218515 - RNA, 16 nt, Human
guguuaauuuaaguuu

SEQ ID NO: 3218516 - RNA, 18 nt, Human
guguuaauuuaaguuuug

SEQ ID NO: 3218517 - RNA, 13 nt, Human
guguuaauuuaag

SEQ ID NO: 3218518 - RNA, 20 nt, Human
guguuaaucuuaauguauau

SEQ ID NO: 3218519 - RNA, 18 nt, Human
guguguuucauccuuccc

SEQ ID NO: 3218520 - RNA, 13 nt, Human
guguuacauguau

SEQ ID NO: 3218521 - RNA, 18 nt, Human
guguuaugacuccagaau

SEQ ID NO: 3218522 - RNA, 14 nt, Human
guguuauaugaaca

SEQ ID NO: 3218523 - RNA, 17 nt, Human
guguuuuuagcugugac

SEQ ID NO: 3218524 - RNA, 12 nt, Human
guguuuuucuca

SEQ ID NO: 3218525 - RNA, 19 nt, Human
guguuuuucucauauuuga

SEQ ID NO: 3218526 - RNA, 15 nt, Human
guguuuuuuaagaug

SEQ ID NO: 3218527 - RNA, 12 nt, Human
guguuuuggucc

SEQ ID NO: 3218528 - RNA, 20 nt, Human
guguuauuuuaaucucagaa

SEQ ID NO: 3218529 - RNA, 22 nt, Human
guguuauugagagagaugugua

SEQ ID NO: 3218530 - RNA, 24 nt, Human
guguuauugagagagauguguaau

SEQ ID NO: 3218531 - RNA, 17 nt, Human
guguuauaugaacauac

SEQ ID NO: 3218532 - RNA, 23 nt, Human
guguuauaugaacauacaaaugc

SEQ ID NO: 3218533 - RNA, 15 nt, Human
guguuaugagccagg

SEQ ID NO: 3218534 - RNA, 14 nt, Human
guguucagaaaaaa

SEQ ID NO: 3218535 - RNA, 23 nt, Human
guguucaguguuagcaguggguc

SEQ ID NO: 3218536 - RNA, 13 nt, Human
guguucucagagg

SEQ ID NO: 3218537 - RNA, 12 nt, Human
guguucucagag

SEQ ID NO: 3218538 - RNA, 22 nt, Human
guguuccuauauuccagguuua

SEQ ID NO: 3218539 - RNA, 11 nt, Human
guguuccuggc

SEQ ID NO: 3218540 - RNA, 20 nt, Human
guucugccucugauguauuu

SEQ ID NO: 3218541 - RNA, 19 nt, Human
guucugauccuaguuccac

SEQ ID NO: 3218542 - RNA, 14 nt, Human
guucugauauuaau

SEQ ID NO: 3218543 - RNA, 15 nt, Human
guucugcacacagca

SEQ ID NO: 3218544 - RNA, 16 nt, Human
guucugcacacagcac

SEQ ID NO: 3218545 - RNA, 18 nt, Human
guuccuuccucugagccu

SEQ ID NO: 3218546 - RNA, 19 nt, Human
guuccuuccucugagccuu

SEQ ID NO: 3218547 - RNA, 17 nt, Human
guuccuuccucugagcc

SEQ ID NO: 3218548 - RNA, 15 nt, Human
guuccuucugggcau

SEQ ID NO: 3218549 - RNA, 23 nt, Human
guugaaaagacuccaaagaaaug

SEQ ID NO: 3218550 - RNA, 22 nt, Human
guugaaaagacuccaaagaaau

SEQ ID NO: 3218551 - RNA, 17 nt, Human
guugaaaagacuccaaa

SEQ ID NO: 3218552 - RNA, 17 nt, Human
guugaaaaacagcugag

SEQ ID NO: 3218553 - RNA, 19 nt, Human
guucuuuucaauauauuug

SEQ ID NO: 3218554 - RNA, 12 nt, Human
guucuuugugua

SEQ ID NO: 3218555 - RNA, 12 nt, Human
guugaaaaaauu

SEQ ID NO: 3218556 - RNA, 21 nt, Human
guugaaaaaauuuaaaaguaa

SEQ ID NO: 3218557 - RNA, 19 nt, Human
guucuuucuuccucugcug

SEQ ID NO: 3218558 - RNA, 18 nt, Human
guucuuucuuccucugcu

SEQ ID NO: 3218559 - RNA, 17 nt, Human
guucuuucuuccucugc

SEQ ID NO: 3218560 - RNA, 16 nt, Human
guucuuucuuccucug

SEQ ID NO: 3218561 - RNA, 15 nt, Human
guucuuucuuccucu

SEQ ID NO: 3218562 - RNA, 14 nt, Human
guucuuucuuccuc

SEQ ID NO: 3218563 - RNA, 13 nt, Human
guucuuucucuuu

SEQ ID NO: 3218564 - RNA, 22 nt, Human
guucuuucauuugcuuuggaag

SEQ ID NO: 3218565 - RNA, 20 nt, Human
guucuuucauuugcuuugga

SEQ ID NO: 3218566 - RNA, 18 nt, Human
guucuuucacccuuuucu

SEQ ID NO: 3218567 - RNA, 16 nt, Human
guucugggacacaguu

SEQ ID NO: 3218568 - RNA, 15 nt, Human
guucugggacacagu

SEQ ID NO: 3218569 - RNA, 14 nt, Human
guucugggacacag

SEQ ID NO: 3218570 - RNA, 12 nt, Human
guucugggacac

SEQ ID NO: 3218571 - RNA, 11 nt, Human
guucugggaca

SEQ ID NO: 3218572 - RNA, 23 nt, Human
guucuggcagaguugaagacaga

SEQ ID NO: 3218573 - RNA, 19 nt, Human
guucugcuaaauuucaaau

SEQ ID NO: 3218574 - RNA, 17 nt, Human
guucugcuaaauuucaa

SEQ ID NO: 3218575 - RNA, 16 nt, Human
guucuggcucuuccag

SEQ ID NO: 3218576 - RNA, 20 nt, Human
guucuggcucuuccaggcug

SEQ ID NO: 3218577 - RNA, 12 nt, Human
guucuggcucuu

SEQ ID NO: 3218578 - RNA, 16 nt, Human
guugcaaugugaaaaa

SEQ ID NO: 3218579 - RNA, 16 nt, Human
guugauuucuaguuau

SEQ ID NO: 3218580 - RNA, 22 nt, Human
guugauuucuaguuauuuauuc

SEQ ID NO: 3218581 - RNA, 14 nt, Human
guugauucucucca

SEQ ID NO: 3218582 - RNA, 13 nt, Human
guugauucucucc

SEQ ID NO: 3218583 - RNA, 19 nt, Human
guugauuaauuucugccau

SEQ ID NO: 3218584 - RNA, 15 nt, Human
guugcaggaccucag

SEQ ID NO: 3218585 - RNA, 21 nt, Human
guugcacugaaguuugauaaa

SEQ ID NO: 3218586 - RNA, 16 nt, Human
guugcacugaaguuug

SEQ ID NO: 3218587 - RNA, 15 nt, Human
guugcacugaaguuu

SEQ ID NO: 3218588 - RNA, 13 nt, Human
guugcacugaagu

SEQ ID NO: 3218589 - RNA, 12 nt, Human
guugcacugaag

SEQ ID NO: 3218590 - RNA, 16 nt, Human
guugcauagcaguaua

SEQ ID NO: 3218591 - RNA, 18 nt, Human
guugcauagcaguauaug

SEQ ID NO: 3218592 - RNA, 23 nt, Human
guugcauagcaguauauguuaau

SEQ ID NO: 3218593 - RNA, 14 nt, Human
guugauuaaagaug

SEQ ID NO: 3218594 - RNA, 22 nt, Human
guugaugggaugauugaagaaa

SEQ ID NO: 3218595 - RNA, 13 nt, Human
guugaauguugca

SEQ ID NO: 3218596 - RNA, 19 nt, Human
guugaauguugcaauguga

SEQ ID NO: 3218597 - RNA, 13 nt, Human
guugaauaugauu

SEQ ID NO: 3218598 - RNA, 20 nt, Human
guugaagucaugcuccccug

SEQ ID NO: 3218599 - RNA, 19 nt, Human
guugaagucaugcuccccu

SEQ ID NO: 3218600 - RNA, 16 nt, Human
guugaagucaugcucc

SEQ ID NO: 3218601 - RNA, 13 nt, Human
guugaagccuuug

SEQ ID NO: 3218602 - RNA, 14 nt, Human
guugaagccuuugu

SEQ ID NO: 3218603 - RNA, 16 nt, Human
guugaagacagagcua

SEQ ID NO: 3218604 - RNA, 18 nt, Human
guugaacaaaauaaauug

SEQ ID NO: 3218605 - RNA, 17 nt, Human
guugaacaaaauaaauu

SEQ ID NO: 3218606 - RNA, 15 nt, Human
guugaacaaaauaaa

SEQ ID NO: 3218607 - RNA, 14 nt, Human
guugaacaaaauaa

SEQ ID NO: 3218608 - RNA, 21 nt, Human
guugaagaccuaaccagggcc

SEQ ID NO: 3218609 - RNA, 17 nt, Human
guugaacuguuagaaug

SEQ ID NO: 3218610 - RNA, 14 nt, Human
guugaacuguuaga

SEQ ID NO: 3218611 - RNA, 19 nt, Human
guugaagagacagagacaa

SEQ ID NO: 3218612 - RNA, 20 nt, Human
guugaagagacagagacaag

SEQ ID NO: 3218613 - RNA, 22 nt, Human
guugaagagacagagacaagua

SEQ ID NO: 3218614 - RNA, 19 nt, Human
guugaagaccuaaccaggg

SEQ ID NO: 3218615 - RNA, 19 nt, Human
guugaacuguuagaaugua

SEQ ID NO: 3218616 - RNA, 12 nt, Human
guuggcaugcau

SEQ ID NO: 3218617 - RNA, 14 nt, Human
guuggcaugcaucc

SEQ ID NO: 3218618 - RNA, 19 nt, Human
guuggccaggcugcucuca

SEQ ID NO: 3218619 - RNA, 14 nt, Human
guuggccaggcugc

SEQ ID NO: 3218620 - RNA, 13 nt, Human
guuggccaggcug

SEQ ID NO: 3218621 - RNA, 14 nt, Human
guuggccaggcugg

SEQ ID NO: 3218622 - RNA, 15 nt, Human
guuggccaggcuggu

SEQ ID NO: 3218623 - RNA, 14 nt, Human
guuggccaguguga

SEQ ID NO: 3218624 - RNA, 19 nt, Human
guuggccaggcuggucuca

SEQ ID NO: 3218625 - RNA, 17 nt, Human
guuggccaggcuggucu

SEQ ID NO: 3218626 - RNA, 19 nt, Human
guuggccaggcugcucuug

SEQ ID NO: 3218627 - RNA, 18 nt, Human
guuggccaggcuggucuc

SEQ ID NO: 3218628 - RNA, 23 nt, Human
guuggcagaugcagcucuuccug

SEQ ID NO: 3218629 - RNA, 23 nt, Human
guuggccaaagccaaagcuaggc

SEQ ID NO: 3218630 - RNA, 18 nt, Human
guuggcagaugcagcucu

SEQ ID NO: 3218631 - RNA, 14 nt, Human
guuggcaaaaaggc

SEQ ID NO: 3218632 - RNA, 18 nt, Human
guuggcaaaaaggcagga

SEQ ID NO: 3218633 - RNA, 13 nt, Human
guuggcaccuucc

SEQ ID NO: 3218634 - RNA, 18 nt, Human
guuggcaccuucccccuc

SEQ ID NO: 3218635 - RNA, 16 nt, Human
guuggcaccuuccccc

SEQ ID NO: 3218636 - RNA, 14 nt, Human
guugcccaggcagg

SEQ ID NO: 3218637 - RNA, 18 nt, Human
guugcccagccucuuucc

SEQ ID NO: 3218638 - RNA, 21 nt, Human
guugcccagccucuuucccuu

SEQ ID NO: 3218639 - RNA, 20 nt, Human
guugcccagccucuuucccu

SEQ ID NO: 3218640 - RNA, 12 nt, Human
guugcccaggca

SEQ ID NO: 3218641 - RNA, 22 nt, Human
guugcccagccucuuucccuuc

SEQ ID NO: 3218642 - RNA, 20 nt, Human
guuggaguucauucauauua

SEQ ID NO: 3218643 - RNA, 14 nt, Human
guuggaguucauuc

SEQ ID NO: 3218644 - RNA, 20 nt, Human
guuggaguagaauguaguuu

SEQ ID NO: 3218645 - RNA, 16 nt, Human
guuggaguagaaugua

SEQ ID NO: 3218646 - RNA, 16 nt, Human
guugccagucaccccg

SEQ ID NO: 3218647 - RNA, 17 nt, Human
guugccagucaccccgg

SEQ ID NO: 3218648 - RNA, 18 nt, Human
guugccagucaccccggc

SEQ ID NO: 3218649 - RNA, 23 nt, Human
guugccagucaccccggccaccu

SEQ ID NO: 3218650 - RNA, 13 nt, Human
guugccagucacc

SEQ ID NO: 3218651 - RNA, 14 nt, Human
guugccagucaccc

SEQ ID NO: 3218652 - RNA, 14 nt, Human
guuccagcaccaca

SEQ ID NO: 3218653 - RNA, 23 nt, Human
guuccagcaauucuccugccuca

SEQ ID NO: 3218654 - RNA, 14 nt, Human
guuccagccugcca

SEQ ID NO: 3218655 - RNA, 13 nt, Human
guuccagccugcc

SEQ ID NO: 3218656 - RNA, 20 nt, Human
guuccagcaauucuccugcc

SEQ ID NO: 3218657 - RNA, 21 nt, Human
guuccagcaauucuccugccu

SEQ ID NO: 3218658 - RNA, 14 nt, Human
guuccacugagacc

SEQ ID NO: 3218659 - RNA, 17 nt, Human
guuccaccaucaagcca

SEQ ID NO: 3218660 - RNA, 20 nt, Human
guuccaccaucaagccacca

SEQ ID NO: 3218661 - RNA, 13 nt, Human
guuccacugagac

SEQ ID NO: 3218662 - RNA, 12 nt, Human
guuccacugaga

SEQ ID NO: 3218663 - RNA, 14 nt, Human
guuccacagaggac

SEQ ID NO: 3218664 - RNA, 18 nt, Human
guuccaagucuuugcuau

SEQ ID NO: 3218665 - RNA, 23 nt, Human
guuccaaacaugagguucucucu

SEQ ID NO: 3218666 - RNA, 17 nt, Human
guuccaaacaugagguu

SEQ ID NO: 3218667 - RNA, 17 nt, Human
guuccaaccacugaauc

SEQ ID NO: 3218668 - RNA, 16 nt, Human
guucauucauauuaca

SEQ ID NO: 3218669 - RNA, 14 nt, Human
guucauucauauua

SEQ ID NO: 3218670 - RNA, 18 nt, Human
guucauugcaauuaaacu

SEQ ID NO: 3218671 - RNA, 17 nt, Human
guucauucauauuacaa

SEQ ID NO: 3218672 - RNA, 15 nt, Human
guuccagccugccac

SEQ ID NO: 3218673 - RNA, 14 nt, Human
guuccuaauccucu

SEQ ID NO: 3218674 - RNA, 15 nt, Human
guuccaguuucagag

SEQ ID NO: 3218675 - RNA, 17 nt, Human
guuccaggguucucuug

SEQ ID NO: 3218676 - RNA, 16 nt, Human
guuccuagccaccgcc

SEQ ID NO: 3218677 - RNA, 17 nt, Human
guuccuacacaggacag

SEQ ID NO: 3218678 - RNA, 16 nt, Human
guuccuacacaggaca

SEQ ID NO: 3218679 - RNA, 15 nt, Human
guuccuacacaggac

SEQ ID NO: 3218680 - RNA, 22 nt, Human
guuccucauuagcauuuugcua

SEQ ID NO: 3218681 - RNA, 18 nt, Human
guuccuacacaggacagg

SEQ ID NO: 3218682 - RNA, 23 nt, Human
guuccuagugauggcuuaugaua

SEQ ID NO: 3218683 - RNA, 16 nt, Human
guuccuaggggaauga

SEQ ID NO: 3218684 - RNA, 18 nt, Human
guuccuaggggaaugagg

SEQ ID NO: 3218685 - RNA, 20 nt, Human
guuccuaggggaaugagggg

SEQ ID NO: 3218686 - RNA, 22 nt, Human
guuccuaggggaaugagggggc

SEQ ID NO: 3218687 - RNA, 23 nt, Human
guuccuccccuccuccuggacuc

SEQ ID NO: 3218688 - RNA, 22 nt, Human
guuccuggggcauccauggggu

SEQ ID NO: 3218689 - RNA, 24 nt, Human
guucacucuuggagccugcagagc

SEQ ID NO: 3218690 - RNA, 20 nt, Human
guucacucuuggagccugca

SEQ ID NO: 3218691 - RNA, 19 nt, Human
guucacugcaaccuccgcc

SEQ ID NO: 3218692 - RNA, 19 nt, Human
guucacucuuggagccugc

SEQ ID NO: 3218693 - RNA, 18 nt, Human
guucacucuuggagccug

SEQ ID NO: 3218694 - RNA, 17 nt, Human
guucacucuuggagccu

SEQ ID NO: 3218695 - RNA, 15 nt, Human
guucacaccugcaga

SEQ ID NO: 3218696 - RNA, 18 nt, Human
guucacuaaacucugaau

SEQ ID NO: 3218697 - RNA, 16 nt, Human
guucacuaaacucuga

SEQ ID NO: 3218698 - RNA, 24 nt, Human
guucacucuacuuagcaugucccu

SEQ ID NO: 3218699 - RNA, 15 nt, Human
guucacuaaacucug

SEQ ID NO: 3218700 - RNA, 16 nt, Human
guucacggguggccug

SEQ ID NO: 3218701 - RNA, 20 nt, Human
guucacuaaacucugaauaa

SEQ ID NO: 3218702 - RNA, 21 nt, Human
guucagaaaaaagguucuuug

SEQ ID NO: 3218703 - RNA, 12 nt, Human
guucagaaaaaa

SEQ ID NO: 3218704 - RNA, 16 nt, Human
guucaucaaugaauga

SEQ ID NO: 3218705 - RNA, 17 nt, Human
guucaucauccuaagcu

SEQ ID NO: 3218706 - RNA, 16 nt, Human
guucaucccuucucuu

SEQ ID NO: 3218707 - RNA, 19 nt, Human
guucaucccuucucuucca

SEQ ID NO: 3218708 - RNA, 18 nt, Human
guucaucccuucucuucc

SEQ ID NO: 3218709 - RNA, 15 nt, Human
guucagauuggacau

SEQ ID NO: 3218710 - RNA, 17 nt, Human
guucagccacugaggga

SEQ ID NO: 3218711 - RNA, 12 nt, Human
guucaucuugaa

SEQ ID NO: 3218712 - RNA, 13 nt, Human
guucaucuugaau

SEQ ID NO: 3218713 - RNA, 18 nt, Human
guucaucuugaauuguaa

SEQ ID NO: 3218714 - RNA, 20 nt, Human
guucaucccuucucuuccag

SEQ ID NO: 3218715 - RNA, 23 nt, Human
guucaagugauucucaugccuca

SEQ ID NO: 3218716 - RNA, 17 nt, Human
guucaagugauucucuu

SEQ ID NO: 3218717 - RNA, 20 nt, Human
guucaagcgauucuucugcu

SEQ ID NO: 3218718 - RNA, 23 nt, Human
guuauuauagagcagaaauucug

SEQ ID NO: 3218719 - RNA, 23 nt, Human
guucaauucucauuugucacaca

SEQ ID NO: 3218720 - RNA, 17 nt, Human
guucaauuauuuccccc

SEQ ID NO: 3218721 - RNA, 18 nt, Human
guucaauuauuuccccca

SEQ ID NO: 3218722 - RNA, 19 nt, Human
guucaauuauuucccccau

SEQ ID NO: 3218723 - RNA, 16 nt, Human
guucaauucucauuug

SEQ ID NO: 3218724 - RNA, 21 nt, Human
guuauguaaauaauucuuuuu

SEQ ID NO: 3218725 - RNA, 14 nt, Human
guuauguauauggu

SEQ ID NO: 3218726 - RNA, 15 nt, Human
guuaugguagaaaaa

SEQ ID NO: 3218727 - RNA, 16 nt, Human
guuaugguagaaaaau

SEQ ID NO: 3218728 - RNA, 20 nt, Human
guuaugguagaaaaauuuca

SEQ ID NO: 3218729 - RNA, 15 nt, Human
guuauguaaauaauu

SEQ ID NO: 3218730 - RNA, 19 nt, Human
guucaagcgauucuucugc

SEQ ID NO: 3218731 - RNA, 18 nt, Human
guucaagcgauucuucug

SEQ ID NO: 3218732 - RNA, 12 nt, Human
guuauuaaaugu

SEQ ID NO: 3218733 - RNA, 13 nt, Human
guuauuaaaugua

SEQ ID NO: 3218734 - RNA, 11 nt, Human
guuaugugucu

SEQ ID NO: 3218735 - RNA, 12 nt, Human
guuauuaaaauu

SEQ ID NO: 3218736 - RNA, 13 nt, Human
guuauuaaaauug

SEQ ID NO: 3218737 - RNA, 17 nt, Human
guuaucauuuuuuccug

SEQ ID NO: 3218738 - RNA, 20 nt, Human
guuaucauuuuuuccuguuu

SEQ ID NO: 3218739 - RNA, 21 nt, Human
guuaugacuccagaauuuccc

SEQ ID NO: 3218740 - RNA, 23 nt, Human
guuauauuuuucuuaaaaaguaa

SEQ ID NO: 3218741 - RNA, 14 nt, Human
guuaucacugugca

SEQ ID NO: 3218742 - RNA, 16 nt, Human
guuaucacugugcagu

SEQ ID NO: 3218743 - RNA, 13 nt, Human
guuaucaugaauu

SEQ ID NO: 3218744 - RNA, 14 nt, Human
guuaucaugaauuu

SEQ ID NO: 3218745 - RNA, 16 nt, Human
guuaucaugaauuuua

SEQ ID NO: 3218746 - RNA, 17 nt, Human
guuaucaugaauuuuaa

SEQ ID NO: 3218747 - RNA, 18 nt, Human
guuaucaugaauuuuaaa

SEQ ID NO: 3218748 - RNA, 19 nt, Human
guuaucaugaauuuuaaag

SEQ ID NO: 3218749 - RNA, 20 nt, Human
guuaucaugaauuuuaaagu

SEQ ID NO: 3218750 - RNA, 22 nt, Human
guuaucaugaauuuuaaaguau

SEQ ID NO: 3218751 - RNA, 21 nt, Human
guuauauuuuucuuaaaaagu

SEQ ID NO: 3218752 - RNA, 17 nt, Human
guuauagugcaauauau

SEQ ID NO: 3218753 - RNA, 17 nt, Human
guuauaaugaaugacuu

SEQ ID NO: 3218754 - RNA, 18 nt, Human
guuauagguccuuuagaa

SEQ ID NO: 3218755 - RNA, 21 nt, Human
guuauagguccuuuagaaaca

SEQ ID NO: 3218756 - RNA, 16 nt, Human
guuauagugcaauaua

SEQ ID NO: 3218757 - RNA, 15 nt, Human
guuauagugcaauau

SEQ ID NO: 3218758 - RNA, 15 nt, Human
guuacuaccuccucu

SEQ ID NO: 3218759 - RNA, 11 nt, Human
guuacucucuu

SEQ ID NO: 3218760 - RNA, 21 nt, Human
guuacucucuuccacauguua

SEQ ID NO: 3218761 - RNA, 16 nt, Human
guuaguuucuccaagc

SEQ ID NO: 3218762 - RNA, 19 nt, Human
guuaguuucuccaagcagg

SEQ ID NO: 3218763 - RNA, 22 nt, Human
guuaguuucuccaagcaggaca

SEQ ID NO: 3218764 - RNA, 16 nt, Human
guuaguuccacugaga

SEQ ID NO: 3218765 - RNA, 13 nt, Human
guuauaaaggaau

SEQ ID NO: 3218766 - RNA, 18 nt, Human
guuauacaaccuucauuu

SEQ ID NO: 3218767 - RNA, 20 nt, Human
guuauacaaccuucauuuaa

SEQ ID NO: 3218768 - RNA, 17 nt, Human
guuauacaguuauaaaa

SEQ ID NO: 3218769 - RNA, 18 nt, Human
guuauacaguuauaaaau

SEQ ID NO: 3218770 - RNA, 20 nt, Human
guuauacaguuauaaaauua

SEQ ID NO: 3218771 - RNA, 22 nt, Human
guuauacaguuauaaaauuaaa

SEQ ID NO: 3218772 - RNA, 11 nt, Human
guuauaaaauu

SEQ ID NO: 3218773 - RNA, 19 nt, Human
guuacagguaccaguucuu

SEQ ID NO: 3218774 - RNA, 16 nt, Human
guuacaguaaugucau

SEQ ID NO: 3218775 - RNA, 22 nt, Human
guuacaguaaugucauaaagug

SEQ ID NO: 3218776 - RNA, 12 nt, Human
guuacagccugg

SEQ ID NO: 3218777 - RNA, 15 nt, Human
guuacagacaaagcg

SEQ ID NO: 3218778 - RNA, 17 nt, Human
guuacagacaaagcgug

SEQ ID NO: 3218779 - RNA, 20 nt, Human
guuacaugcagccacuuagg

SEQ ID NO: 3218780 - RNA, 19 nt, Human
guuacauaagauaaaugug

SEQ ID NO: 3218781 - RNA, 18 nt, Human
guuacauaagauaaaugu

SEQ ID NO: 3218782 - RNA, 12 nt, Human
guuaccuuaaau

SEQ ID NO: 3218783 - RNA, 21 nt, Human
guuaccauuggaaauuucacg

SEQ ID NO: 3218784 - RNA, 20 nt, Human
guuaccauuggaaauuucac

SEQ ID NO: 3218785 - RNA, 23 nt, Human
guuaccauuuugggguacccacu

SEQ ID NO: 3218786 - RNA, 14 nt, Human
guuaccauuggaaa

SEQ ID NO: 3218787 - RNA, 19 nt, Human
guuaccauuggaaauuuca

SEQ ID NO: 3218788 - RNA, 16 nt, Human
guuaccauuggaaauu

SEQ ID NO: 3218789 - RNA, 15 nt, Human
gucccugccaaugga

SEQ ID NO: 3218790 - RNA, 11 nt, Human
gucccugccaa

SEQ ID NO: 3218791 - RNA, 14 nt, Human
gucccugccaaugg

SEQ ID NO: 3218792 - RNA, 21 nt, Human
guccuuaccagcagagcaccu

SEQ ID NO: 3218793 - RNA, 18 nt, Human
guccuuaccagcagagca

SEQ ID NO: 3218794 - RNA, 19 nt, Human
guccuuaccagcagagcac

SEQ ID NO: 3218795 - RNA, 23 nt, Human
gucggguuuuauuguuuaaaauc

SEQ ID NO: 3218796 - RNA, 22 nt, Human
gucggcuccaguccccagaacu

SEQ ID NO: 3218797 - RNA, 16 nt, Human
gucgggcaugacacga

SEQ ID NO: 3218798 - RNA, 12 nt, Human
gucggcuccagu

SEQ ID NO: 3218799 - RNA, 11 nt, Human
gucggcuccag

SEQ ID NO: 3218800 - RNA, 19 nt, Human
gucuaagaaacauuggaag

SEQ ID NO: 3218801 - RNA, 18 nt, Human
gucuaagaaacauuggaa

SEQ ID NO: 3218802 - RNA, 15 nt, Human
gucucaccauuuccc

SEQ ID NO: 3218803 - RNA, 22 nt, Human
gucuaaccacagcuccuuuucc

SEQ ID NO: 3218804 - RNA, 15 nt, Human
gucuaagaaacauug

SEQ ID NO: 3218805 - RNA, 14 nt, Human
gucuaagaaacauu

SEQ ID NO: 3218806 - RNA, 15 nt, Human
gucuaaauuuauuau

SEQ ID NO: 3218807 - RNA, 19 nt, Human
gucucacuauguugcccag

SEQ ID NO: 3218808 - RNA, 11 nt, Human
gucucacucug

SEQ ID NO: 3218809 - RNA, 18 nt, Human
gucucacuauguugccca

SEQ ID NO: 3218810 - RNA, 23 nt, Human
gucucaccauuuccccagggcac

SEQ ID NO: 3218811 - RNA, 22 nt, Human
gucucaccauuuccccagggca

SEQ ID NO: 3218812 - RNA, 21 nt, Human
gucucaccauuuccccagggc

SEQ ID NO: 3218813 - RNA, 20 nt, Human
gucucaccauuuccccaggg

SEQ ID NO: 3218814 - RNA, 19 nt, Human
gucucaccauuuccccagg

SEQ ID NO: 3218815 - RNA, 18 nt, Human
gucucaccauuuccccag

SEQ ID NO: 3218816 - RNA, 15 nt, Human
gucguaguuacucuc

SEQ ID NO: 3218817 - RNA, 17 nt, Human
gucgucaucagaugcuu

SEQ ID NO: 3218818 - RNA, 16 nt, Human
gucucugguuccuccc

SEQ ID NO: 3218819 - RNA, 17 nt, Human
gucucuucuccacugga

SEQ ID NO: 3218820 - RNA, 13 nt, Human
gucucuucuccuu

SEQ ID NO: 3218821 - RNA, 18 nt, Human
gucucuucuccacuggau

SEQ ID NO: 3218822 - RNA, 14 nt, Human
gucucuucuccuua

SEQ ID NO: 3218823 - RNA, 13 nt, Human
gucucugagcauu

SEQ ID NO: 3218824 - RNA, 22 nt, Human
gucucacucugucgcccagucu

SEQ ID NO: 3218825 - RNA, 19 nt, Human
gucucacucugucgcccag

SEQ ID NO: 3218826 - RNA, 18 nt, Human
gucucacucugucgccca

SEQ ID NO: 3218827 - RNA, 16 nt, Human
gucucacucugucgcc

SEQ ID NO: 3218828 - RNA, 15 nt, Human
gucucacucugucgc

SEQ ID NO: 3218829 - RNA, 18 nt, Human
gucucuagugcugugaaa

SEQ ID NO: 3218830 - RNA, 17 nt, Human
gucucuagugcugugaa

SEQ ID NO: 3218831 - RNA, 16 nt, Human
gucucuagugcuguga

SEQ ID NO: 3218832 - RNA, 14 nt, Human
gucucuagugcugu

SEQ ID NO: 3218833 - RNA, 16 nt, Human
gucuugguuccagccu

SEQ ID NO: 3218834 - RNA, 19 nt, Human
gucuugguuccagccugcc

SEQ ID NO: 3218835 - RNA, 17 nt, Human
gucuugguuccagccug

SEQ ID NO: 3218836 - RNA, 16 nt, Human
gucuuuuuucacuaca

SEQ ID NO: 3218837 - RNA, 21 nt, Human
gucuuggaagcuguuuggaaa

SEQ ID NO: 3218838 - RNA, 22 nt, Human
gucuuggaagcuguuuggaaaa

SEQ ID NO: 3218839 - RNA, 15 nt, Human
gucuugccuauauuu

SEQ ID NO: 3218840 - RNA, 23 nt, Human
gucuugcaauggcagccuuggca

SEQ ID NO: 3218841 - RNA, 21 nt, Human
gucuugcaauggcagccuugg

SEQ ID NO: 3218842 - RNA, 20 nt, Human
gucuugcaauggcagccuug

SEQ ID NO: 3218843 - RNA, 19 nt, Human
gucuugcaauggcagccuu

SEQ ID NO: 3218844 - RNA, 18 nt, Human
gucuugcaauggcagccu

SEQ ID NO: 3218845 - RNA, 17 nt, Human
gucuugcaauggcagcc

SEQ ID NO: 3218846 - RNA, 16 nt, Human
gucuugcaauggcagc

SEQ ID NO: 3218847 - RNA, 20 nt, Human
gucuugaacuccuggccuca

SEQ ID NO: 3218848 - RNA, 18 nt, Human
gucuugaacuccuggccu

SEQ ID NO: 3218849 - RNA, 21 nt, Human
gucuugaacuccuggccucaa

SEQ ID NO: 3218850 - RNA, 17 nt, Human
gucuugaacuccuggcc

SEQ ID NO: 3218851 - RNA, 16 nt, Human
gucuugaacuccuggc

SEQ ID NO: 3218852 - RNA, 22 nt, Human
gucuucugcuuuguugugugcc

SEQ ID NO: 3218853 - RNA, 14 nt, Human
gucuucugcuuugu

SEQ ID NO: 3218854 - RNA, 13 nt, Human
gucuucugcuuug

SEQ ID NO: 3218855 - RNA, 12 nt, Human
gucuucugcuuu

SEQ ID NO: 3218856 - RNA, 11 nt, Human
gucugugugug

SEQ ID NO: 3218857 - RNA, 12 nt, Human
gucugugugugu

SEQ ID NO: 3218858 - RNA, 16 nt, Human
gucuguguguguguau

SEQ ID NO: 3218859 - RNA, 20 nt, Human
gucuguguguguguaugugg

SEQ ID NO: 3218860 - RNA, 11 nt, Human
gucuguguguu

SEQ ID NO: 3218861 - RNA, 21 nt, Human
gucuguguguuuaugugugug

SEQ ID NO: 3218862 - RNA, 22 nt, Human
gucuguguguuuaugugugugu

SEQ ID NO: 3218863 - RNA, 20 nt, Human
gucuguguuccaaccacuga

SEQ ID NO: 3218864 - RNA, 13 nt, Human
gucuguugauuaa

SEQ ID NO: 3218865 - RNA, 19 nt, Human
gucuguugauuaaagauga

SEQ ID NO: 3218866 - RNA, 16 nt, Human
gucuguugauuaaaga

SEQ ID NO: 3218867 - RNA, 13 nt, Human
gucugucuuccuu

SEQ ID NO: 3218868 - RNA, 14 nt, Human
gucugucuuccuuu

SEQ ID NO: 3218869 - RNA, 21 nt, Human
gucugucuuccuuugcuuccc

SEQ ID NO: 3218870 - RNA, 15 nt, Human
gucugcccccuccug

SEQ ID NO: 3218871 - RNA, 22 nt, Human
gucugccccaaguuuugugaaa

SEQ ID NO: 3218872 - RNA, 19 nt, Human
gucugccccaaguuuugug

SEQ ID NO: 3218873 - RNA, 18 nt, Human
gucugccccaaguuuugu

SEQ ID NO: 3218874 - RNA, 13 nt, Human
gucugccuggagg

SEQ ID NO: 3218875 - RNA, 15 nt, Human
gucugugagaugcua

SEQ ID NO: 3218876 - RNA, 16 nt, Human
gucugugagaugcuag

SEQ ID NO: 3218877 - RNA, 17 nt, Human
gucugugagaugcuaga

SEQ ID NO: 3218878 - RNA, 21 nt, Human
gucugugagaugcuagaacuc

SEQ ID NO: 3218879 - RNA, 22 nt, Human
gucugugagaugcuagaacucc

SEQ ID NO: 3218880 - RNA, 23 nt, Human
gucugugagaugcuagaacuccc

SEQ ID NO: 3218881 - RNA, 18 nt, Human
gucugugccauuuuguau

SEQ ID NO: 3218882 - RNA, 16 nt, Human
gugauauaaacagcuu

SEQ ID NO: 3218883 - RNA, 12 nt, Human
gugauauucccc

SEQ ID NO: 3218884 - RNA, 20 nt, Human
gugauauucuuuguuaauuu

SEQ ID NO: 3218885 - RNA, 13 nt, Human
gugauauucuuug

SEQ ID NO: 3218886 - RNA, 22 nt, Human
gugauccacccaccucagccuc

SEQ ID NO: 3218887 - RNA, 14 nt, Human
gugaucacuuucug

SEQ ID NO: 3218888 - RNA, 23 nt, Human
gugaucacuuucugaaauucaca

SEQ ID NO: 3218889 - RNA, 17 nt, Human
gugauauuucagaaaua

SEQ ID NO: 3218890 - RNA, 13 nt, Human
gugauauuucaga

SEQ ID NO: 3218891 - RNA, 23 nt, Human
gugauauucuuuguuaauuugga

SEQ ID NO: 3218892 - RNA, 22 nt, Human
gugauauucuuuguuaauuugg

SEQ ID NO: 3218893 - RNA, 18 nt, Human
gugauauuucagaaauac

SEQ ID NO: 3218894 - RNA, 17 nt, Human
gugaguugauagcacag

SEQ ID NO: 3218895 - RNA, 12 nt, Human
gugaguuuguuu

SEQ ID NO: 3218896 - RNA, 15 nt, Human
gugaguuuguuucuu

SEQ ID NO: 3218897 - RNA, 13 nt, Human
gugaguuuguuuc

SEQ ID NO: 3218898 - RNA, 13 nt, Human
gugauaaaaucau

SEQ ID NO: 3218899 - RNA, 12 nt, Human
gugauaaaauca

SEQ ID NO: 3218900 - RNA, 22 nt, Human
gugaguuuguuucuuugaauuu

SEQ ID NO: 3218901 - RNA, 17 nt, Human
gugaguuuguuucuuug

SEQ ID NO: 3218902 - RNA, 19 nt, Human
gugauaagggaaaagauaa

SEQ ID NO: 3218903 - RNA, 21 nt, Human
gugauaagggaaaagauaaag

SEQ ID NO: 3218904 - RNA, 21 nt, Human
gugauaaaaucauaaguauuu

SEQ ID NO: 3218905 - RNA, 17 nt, Human
gugaggaugaaaaaaua

SEQ ID NO: 3218906 - RNA, 16 nt, Human
gugagugguugaauau

SEQ ID NO: 3218907 - RNA, 20 nt, Human
gugagugugaauauaaaugu

SEQ ID NO: 3218908 - RNA, 19 nt, Human
gugagccgagaucacgcca

SEQ ID NO: 3218909 - RNA, 21 nt, Human
gugacuauggagcugagcagg

SEQ ID NO: 3218910 - RNA, 12 nt, Human
gugacuaggaaa

SEQ ID NO: 3218911 - RNA, 20 nt, Human
gugagccacugcaccgggcc

SEQ ID NO: 3218912 - RNA, 15 nt, Human
gugagccacugcacc

SEQ ID NO: 3218913 - RNA, 14 nt, Human
gugagccacugcac

SEQ ID NO: 3218914 - RNA, 22 nt, Human
gugaccuuccaagagccugaga

SEQ ID NO: 3218915 - RNA, 21 nt, Human
gugaccuuccaagagccugag

SEQ ID NO: 3218916 - RNA, 20 nt, Human
gugaccuuccaagagccuga

SEQ ID NO: 3218917 - RNA, 14 nt, Human
gugacgaaaacauu

SEQ ID NO: 3218918 - RNA, 15 nt, Human
gugacgaaaacauug

SEQ ID NO: 3218919 - RNA, 24 nt, Human
gugacgguuccuacacaggacagg

SEQ ID NO: 3218920 - RNA, 13 nt, Human
gugacgguuccua

SEQ ID NO: 3218921 - RNA, 14 nt, Human
gugaccucugccug

SEQ ID NO: 3218922 - RNA, 13 nt, Human
gugaccucugccu

SEQ ID NO: 3218923 - RNA, 15 nt, Human
gugacagaggcagcc

SEQ ID NO: 3218924 - RNA, 12 nt, Human
gugaccucugcc

SEQ ID NO: 3218925 - RNA, 14 nt, Human
gugacagaggcagc

SEQ ID NO: 3218926 - RNA, 13 nt, Human
gugacagaggcag

SEQ ID NO: 3218927 - RNA, 12 nt, Human
gugacagaggca

SEQ ID NO: 3218928 - RNA, 21 nt, Human
gugaaugaugauccuaggcau

SEQ ID NO: 3218929 - RNA, 20 nt, Human
gugacaaggauugcuacugu

SEQ ID NO: 3218930 - RNA, 13 nt, Human
gugaacacaucag

SEQ ID NO: 3218931 - RNA, 21 nt, Human
gugaacaaauuuacagagaca

SEQ ID NO: 3218932 - RNA, 18 nt, Human
gugaaauuuuucauauuu

SEQ ID NO: 3218933 - RNA, 23 nt, Human
gucuuuuuuuuuuaagugaaauu

SEQ ID NO: 3218934 - RNA, 21 nt, Human
gucuuuuuuuuuuaagugaaa

SEQ ID NO: 3218935 - RNA, 15 nt, Human
gugaaaaaaaaaaug

SEQ ID NO: 3218936 - RNA, 14 nt, Human
gugaaaaaaaaaau

SEQ ID NO: 3218937 - RNA, 18 nt, Human
gugaaaaauguuaggaca

SEQ ID NO: 3218938 - RNA, 18 nt, Human
gugaaaaaaaaaaugcug

SEQ ID NO: 3218939 - RNA, 14 nt, Human
gugaaauuuuucau

SEQ ID NO: 3218940 - RNA, 13 nt, Human
gugaaauuuuuca

SEQ ID NO: 3218941 - RNA, 18 nt, Human
gugcaaacccacucagag

SEQ ID NO: 3218942 - RNA, 21 nt, Human
gugcaaaaggcuugcagaacu

SEQ ID NO: 3218943 - RNA, 19 nt, Human
gugcaaacccacucagaga

SEQ ID NO: 3218944 - RNA, 18 nt, Human
gugcagacaaucuucugu

SEQ ID NO: 3218945 - RNA, 23 nt, Human
gugcagaagggagcuggcuccag

SEQ ID NO: 3218946 - RNA, 22 nt, Human
gugcagaacugcagucacugca

SEQ ID NO: 3218947 - RNA, 16 nt, Human
gugauuuuaaaugugu

SEQ ID NO: 3218948 - RNA, 13 nt, Human
gugauuuggaucu

SEQ ID NO: 3218949 - RNA, 24 nt, Human
gugauccacccaccucagccuccc

SEQ ID NO: 3218950 - RNA, 23 nt, Human
gugauccacccaccucagccucc

SEQ ID NO: 3218951 - RNA, 23 nt, Human
gugcaguggugcgaucuggguuc

SEQ ID NO: 3218952 - RNA, 20 nt, Human
gugcaguggugcgaucuggg

SEQ ID NO: 3218953 - RNA, 15 nt, Human
gugcaggagcgcucc

SEQ ID NO: 3218954 - RNA, 11 nt, Human
gugcaggcagg

SEQ ID NO: 3218955 - RNA, 17 nt, Human
gugcaggagcgcucccu

SEQ ID NO: 3218956 - RNA, 13 nt, Human
gugcaggcccacc

SEQ ID NO: 3218957 - RNA, 12 nt, Human
gugcaggcccac

SEQ ID NO: 3218958 - RNA, 18 nt, Human
gugcaggcaggcuggccu

SEQ ID NO: 3218959 - RNA, 12 nt, Human
gugcaggcaggc

SEQ ID NO: 3218960 - RNA, 14 nt, Human
gugcagcagggcag

SEQ ID NO: 3218961 - RNA, 20 nt, Human
gugcauaguuguagacaaag

SEQ ID NO: 3218962 - RNA, 22 nt, Human
gugcauaguuguagacaaagua

SEQ ID NO: 3218963 - RNA, 16 nt, Human
gugcaguugcuguuua

SEQ ID NO: 3218964 - RNA, 17 nt, Human
gugcaguugcuguuuac

SEQ ID NO: 3218965 - RNA, 19 nt, Human
gugcaggcccacccugcuu

SEQ ID NO: 3218966 - RNA, 16 nt, Human
gugcaggcccacccug

SEQ ID NO: 3218967 - RNA, 18 nt, Human
gugccagcccagaggccg

SEQ ID NO: 3218968 - RNA, 14 nt, Human
gugccagcccagag

SEQ ID NO: 3218969 - RNA, 13 nt, Human
gugcaucucagcc

SEQ ID NO: 3218970 - RNA, 14 nt, Human
gugccuuuugccau

SEQ ID NO: 3218971 - RNA, 21 nt, Human
gugcgaucuggguucacugca

SEQ ID NO: 3218972 - RNA, 15 nt, Human
gugcccgccaccaca

SEQ ID NO: 3218973 - RNA, 15 nt, Human
gugccuucagcucua

SEQ ID NO: 3218974 - RNA, 21 nt, Human
gugccaggauggaaugauggg

SEQ ID NO: 3218975 - RNA, 14 nt, Human
gugccaucagugcc

SEQ ID NO: 3218976 - RNA, 16 nt, Human
gugccaugugccaggu

SEQ ID NO: 3218977 - RNA, 14 nt, Human
gugccaugugccag

SEQ ID NO: 3218978 - RNA, 20 nt, Human
gugcccaagaauagaugcug

SEQ ID NO: 3218979 - RNA, 19 nt, Human
gugcguaugcaguguagau

SEQ ID NO: 3218980 - RNA, 20 nt, Human
gugcgucaguccaagggguc

SEQ ID NO: 3218981 - RNA, 14 nt, Human
gugcggccuuuggc

SEQ ID NO: 3218982 - RNA, 14 nt, Human
gugcgccuacagga

SEQ ID NO: 3218983 - RNA, 20 nt, Human
gugcuaaacguguauguuuu

SEQ ID NO: 3218984 - RNA, 17 nt, Human
gugcuaaacguguaugu

SEQ ID NO: 3218985 - RNA, 14 nt, Human
gugcuaaacgugua

SEQ ID NO: 3218986 - RNA, 13 nt, Human
gugcuaagugcuu

SEQ ID NO: 3218987 - RNA, 14 nt, Human
guagguugggagaa

SEQ ID NO: 3218988 - RNA, 17 nt, Human
guaguacuucuucugua

SEQ ID NO: 3218989 - RNA, 19 nt, Human
guaguacuucuucuguaau

SEQ ID NO: 3218990 - RNA, 21 nt, Human
guaguacuucuucuguaauau

SEQ ID NO: 3218991 - RNA, 22 nt, Human
guaguacuucuucuguaauauu

SEQ ID NO: 3218992 - RNA, 14 nt, Human
guagucaggugccu

SEQ ID NO: 3218993 - RNA, 22 nt, Human
guaguaugauagguuauuuuga

SEQ ID NO: 3218994 - RNA, 16 nt, Human
guaggguuauaauaau

SEQ ID NO: 3218995 - RNA, 17 nt, Human
guagggugggccuucag

SEQ ID NO: 3218996 - RNA, 22 nt, Human
guagggugggccuucagggagu

SEQ ID NO: 3218997 - RNA, 14 nt, Human
guagggugggccuu

SEQ ID NO: 3218998 - RNA, 15 nt, Human
guagggguggcccga

SEQ ID NO: 3218999 - RNA, 18 nt, Human
guagggguaccacugaau

SEQ ID NO: 3219000 - RNA, 13 nt, Human
guaggggaagaau

SEQ ID NO: 3219001 - RNA, 18 nt, Human
guaggggcuuagaggcau

SEQ ID NO: 3219002 - RNA, 14 nt, Human
guagucggcacagc

SEQ ID NO: 3219003 - RNA, 19 nt, Human
guagugucuggaucaguaa

SEQ ID NO: 3219004 - RNA, 19 nt, Human
guagugaagacuccagaaa

SEQ ID NO: 3219005 - RNA, 21 nt, Human
guaguguuauugccaggaaag

SEQ ID NO: 3219006 - RNA, 22 nt, Human
guauaauucacccaccagacuu

SEQ ID NO: 3219007 - RNA, 17 nt, Human
guaguguucagaaaaaa

SEQ ID NO: 3219008 - RNA, 12 nt, Human
guauaauugugu

SEQ ID NO: 3219009 - RNA, 21 nt, Human
guauaauugugugauauuuca

SEQ ID NO: 3219010 - RNA, 14 nt, Human
guauaauuguguga

SEQ ID NO: 3219011 - RNA, 23 nt, Human
guauaauugugugauauuucaga

SEQ ID NO: 3219012 - RNA, 14 nt, Human
guauacaaguacug

SEQ ID NO: 3219013 - RNA, 17 nt, Human
guagcaaaugagacagc

SEQ ID NO: 3219014 - RNA, 23 nt, Human
guagcaaacccugucaaacauua

SEQ ID NO: 3219015 - RNA, 20 nt, Human
guagcacaggcugagugcag

SEQ ID NO: 3219016 - RNA, 14 nt, Human
guagcacaggcuga

SEQ ID NO: 3219017 - RNA, 12 nt, Human
guagcacaggcu

SEQ ID NO: 3219018 - RNA, 15 nt, Human
guagcagaguuaaau

SEQ ID NO: 3219019 - RNA, 17 nt, Human
guagcagaguuaaaucu

SEQ ID NO: 3219020 - RNA, 22 nt, Human
guagauuccauuuacugcauuc

SEQ ID NO: 3219021 - RNA, 16 nt, Human
guagauuuauuucauc

SEQ ID NO: 3219022 - RNA, 12 nt, Human
guagauuuauuu

SEQ ID NO: 3219023 - RNA, 18 nt, Human
guagcaaacccugucaaa

SEQ ID NO: 3219024 - RNA, 21 nt, Human
guagcaaacccugucaaacau

SEQ ID NO: 3219025 - RNA, 20 nt, Human
guagcaaacccugucaaaca

SEQ ID NO: 3219026 - RNA, 12 nt, Human
guagauuugauu

SEQ ID NO: 3219027 - RNA, 16 nt, Human
guagauuugauuuuuu

SEQ ID NO: 3219028 - RNA, 21 nt, Human
guagauuuauuucaucauauu

SEQ ID NO: 3219029 - RNA, 19 nt, Human
guagauuuauuucaucaua

SEQ ID NO: 3219030 - RNA, 18 nt, Human
gcuauaggugcuacaaaa

SEQ ID NO: 3219031 - RNA, 15 nt, Human
guagagugugccuga

SEQ ID NO: 3219032 - RNA, 15 nt, Human
guagauacaaucagc

SEQ ID NO: 3219033 - RNA, 17 nt, Human
guagauacaaucagcug

SEQ ID NO: 3219034 - RNA, 20 nt, Human
guagauacaaucagcugcuu

SEQ ID NO: 3219035 - RNA, 21 nt, Human
guagaucuauauuagaucaaa

SEQ ID NO: 3219036 - RNA, 16 nt, Human
guagauaguaugcacu

SEQ ID NO: 3219037 - RNA, 23 nt, Human
guagauaguaugcacuauauaca

SEQ ID NO: 3219038 - RNA, 21 nt, Human
guagcauucuuuggaguuaaa

SEQ ID NO: 3219039 - RNA, 21 nt, Human
guagccaccugaguuccugag

SEQ ID NO: 3219040 - RNA, 15 nt, Human
guagcccccucuucc

SEQ ID NO: 3219041 - RNA, 19 nt, Human
guagcccccucuucccugg

SEQ ID NO: 3219042 - RNA, 22 nt, Human
guagggcgggaggauguucugg

SEQ ID NO: 3219043 - RNA, 21 nt, Human
guagggcgggaggauguucug

SEQ ID NO: 3219044 - RNA, 23 nt, Human
guagggcgggaggauguucuggg

SEQ ID NO: 3219045 - RNA, 18 nt, Human
guagggcucugacaaagc

SEQ ID NO: 3219046 - RNA, 16 nt, Human
guagggcgggaggaug

SEQ ID NO: 3219047 - RNA, 11 nt, Human
guaugaaauau

SEQ ID NO: 3219048 - RNA, 16 nt, Human
guaugaaauauaugug

SEQ ID NO: 3219049 - RNA, 17 nt, Human
guaugaaauauauguga

SEQ ID NO: 3219050 - RNA, 20 nt, Human
guaugaaauauaugugaaag

SEQ ID NO: 3219051 - RNA, 19 nt, Human
guaugaauaaagacaccua

SEQ ID NO: 3219052 - RNA, 18 nt, Human
guaugaauaaagacaccu

SEQ ID NO: 3219053 - RNA, 15 nt, Human
guaugaaucuauuug

SEQ ID NO: 3219054 - RNA, 12 nt, Human
guaucugagcag

SEQ ID NO: 3219055 - RNA, 12 nt, Human
guaucuggugac

SEQ ID NO: 3219056 - RNA, 19 nt, Human
guaucuggugacuuuccuc

SEQ ID NO: 3219057 - RNA, 21 nt, Human
guaucuggauucaaauuuauu

SEQ ID NO: 3219058 - RNA, 15 nt, Human
guaucugugaacuga

SEQ ID NO: 3219059 - RNA, 17 nt, Human
guaucuuacuuuccucu

SEQ ID NO: 3219060 - RNA, 12 nt, Human
guaucugugaac

SEQ ID NO: 3219061 - RNA, 23 nt, Human
guaugaaagauggcugugccucu

SEQ ID NO: 3219062 - RNA, 22 nt, Human
guaugaaagauggcugugccuc

SEQ ID NO: 3219063 - RNA, 13 nt, Human
guaugaaaacaug

SEQ ID NO: 3219064 - RNA, 17 nt, Human
guaugaaaacauggaac

SEQ ID NO: 3219065 - RNA, 20 nt, Human
guaugaaaacauggaacagu

SEQ ID NO: 3219066 - RNA, 13 nt, Human
guauguguuuaga

SEQ ID NO: 3219067 - RNA, 21 nt, Human
guaugaucacggcucacugca

SEQ ID NO: 3219068 - RNA, 20 nt, Human
guaugaucacggcucacugc

SEQ ID NO: 3219069 - RNA, 24 nt, Human
guaugauagguuauuuugauguaa

SEQ ID NO: 3219070 - RNA, 14 nt, Human
guauguuuuucagu

SEQ ID NO: 3219071 - RNA, 13 nt, Human
guauguuuuucag

SEQ ID NO: 3219072 - RNA, 17 nt, Human
guauguugaagccuuug

SEQ ID NO: 3219073 - RNA, 18 nt, Human
guauguguuuagaauuga

SEQ ID NO: 3219074 - RNA, 22 nt, Human
guauguguuuagaauugaaggu

SEQ ID NO: 3219075 - RNA, 14 nt, Human
guauguuauacaac

SEQ ID NO: 3219076 - RNA, 21 nt, Human
guauguuuuucaguucaaagu

SEQ ID NO: 3219077 - RNA, 20 nt, Human
guauguuuuucaguucaaag

SEQ ID NO: 3219078 - RNA, 18 nt, Human
guauguuuuucaguucaa

SEQ ID NO: 3219079 - RNA, 13 nt, Human
guauuaaaugcca

SEQ ID NO: 3219080 - RNA, 22 nt, Human
guauuaaauuacauuuguaauu

SEQ ID NO: 3219081 - RNA, 21 nt, Human
guauuaaauuacauuuguaau

SEQ ID NO: 3219082 - RNA, 18 nt, Human
guauuaaauuacauuugu

SEQ ID NO: 3219083 - RNA, 15 nt, Human
guauuaaauuacauu

SEQ ID NO: 3219084 - RNA, 23 nt, Human
guauagaagucuucaugaaaugc

SEQ ID NO: 3219085 - RNA, 21 nt, Human
guauagaagucuucaugaaau

SEQ ID NO: 3219086 - RNA, 21 nt, Human
guauacuuccuuacuuuuaag

SEQ ID NO: 3219087 - RNA, 18 nt, Human
guauagaagucuucauga

SEQ ID NO: 3219088 - RNA, 17 nt, Human
guauagaagucuucaug

SEQ ID NO: 3219089 - RNA, 21 nt, Human
guauagacaggagaagaaaga

SEQ ID NO: 3219090 - RNA, 16 nt, Human
guauagacaggagaag

SEQ ID NO: 3219091 - RNA, 20 nt, Human
guauagauauaaugaacaaa

SEQ ID NO: 3219092 - RNA, 14 nt, Human
guauauaaaaaugg

SEQ ID NO: 3219093 - RNA, 18 nt, Human
guauaguuauguaaauaa

SEQ ID NO: 3219094 - RNA, 14 nt, Human
guauaguuauguaa

SEQ ID NO: 3219095 - RNA, 15 nt, Human
guauaguuauguaaa

SEQ ID NO: 3219096 - RNA, 13 nt, Human
guauaguauuuga

SEQ ID NO: 3219097 - RNA, 15 nt, Human
guauaguauuugaaa

SEQ ID NO: 3219098 - RNA, 14 nt, Human
guauaguauuugaa

SEQ ID NO: 3219099 - RNA, 21 nt, Human
guauaguauuugaaaacagaa

SEQ ID NO: 3219100 - RNA, 18 nt, Human
guauaguauuugaaaaca

SEQ ID NO: 3219101 - RNA, 17 nt, Human
guauaguauuugaaaac

SEQ ID NO: 3219102 - RNA, 16 nt, Human
guauaguauuugaaaa

SEQ ID NO: 3219103 - RNA, 22 nt, Human
guauaugucaagccauaauugu

SEQ ID NO: 3219104 - RNA, 18 nt, Human
guauauggugguaauaag

SEQ ID NO: 3219105 - RNA, 15 nt, Human
guauauggugguaau

SEQ ID NO: 3219106 - RNA, 17 nt, Human
guauaucauucuaaaga

SEQ ID NO: 3219107 - RNA, 13 nt, Human
guauaucauucua

SEQ ID NO: 3219108 - RNA, 20 nt, Human
guauauccuuuucuguguuu

SEQ ID NO: 3219109 - RNA, 12 nt, Human
guauaucguuau

SEQ ID NO: 3219110 - RNA, 18 nt, Human
guauaucguuaucacugu

SEQ ID NO: 3219111 - RNA, 14 nt, Human
guauauccuuuucu

SEQ ID NO: 3219112 - RNA, 19 nt, Human
guauaucauucuaaagaua

SEQ ID NO: 3219113 - RNA, 11 nt, Human
guauauuaaac

SEQ ID NO: 3219114 - RNA, 16 nt, Human
guauauguugggugca

SEQ ID NO: 3219115 - RNA, 21 nt, Human
guauaugucucaggucccugc

SEQ ID NO: 3219116 - RNA, 15 nt, Human
guauaugucucaggu

SEQ ID NO: 3219117 - RNA, 13 nt, Human
guauaugucucag

SEQ ID NO: 3219118 - RNA, 18 nt, Human
guaucuaagaauaauaaa

SEQ ID NO: 3219119 - RNA, 21 nt, Human
guaucuaagaauaauaaaauc

SEQ ID NO: 3219120 - RNA, 17 nt, Human
guaucguauucaccuuc

SEQ ID NO: 3219121 - RNA, 22 nt, Human
guauccuuaucuaguguuugau

SEQ ID NO: 3219122 - RNA, 22 nt, Human
gucagcuguuucuagaguuccu

SEQ ID NO: 3219123 - RNA, 17 nt, Human
gucauuaaauuacuaua

SEQ ID NO: 3219124 - RNA, 24 nt, Human
gucauuaaauuacuauagcaaagu

SEQ ID NO: 3219125 - RNA, 23 nt, Human
gucagcuccccucggagaagagc

SEQ ID NO: 3219126 - RNA, 22 nt, Human
gucagcuccccucggagaagag

SEQ ID NO: 3219127 - RNA, 21 nt, Human
gucagcuccccucggagaaga

SEQ ID NO: 3219128 - RNA, 21 nt, Human
gucauucgcuacuaugauuua

SEQ ID NO: 3219129 - RNA, 23 nt, Human
gucauuguaauguugugaauaau

SEQ ID NO: 3219130 - RNA, 21 nt, Human
gucauuguaauguugugaaua

SEQ ID NO: 3219131 - RNA, 13 nt, Human
gucauuguaaugu

SEQ ID NO: 3219132 - RNA, 12 nt, Human
gucauuguaaug

SEQ ID NO: 3219133 - RNA, 22 nt, Human
gucauugcuucuucugaggccu

SEQ ID NO: 3219134 - RNA, 12 nt, Human
gucauugcuucu

SEQ ID NO: 3219135 - RNA, 16 nt, Human
gucauugcuucuucug

SEQ ID NO: 3219136 - RNA, 15 nt, Human
gucauugcuucuucu

SEQ ID NO: 3219137 - RNA, 14 nt, Human
gucauugcuucuuc

SEQ ID NO: 3219138 - RNA, 13 nt, Human
gucauugcuucuu

SEQ ID NO: 3219139 - RNA, 21 nt, Human
gucccaccuuggcugcaggga

SEQ ID NO: 3219140 - RNA, 23 nt, Human
guccaguaagaucacuguuuaga

SEQ ID NO: 3219141 - RNA, 18 nt, Human
guccaguaagaucacugu

SEQ ID NO: 3219142 - RNA, 19 nt, Human
guccaguaagaucacuguu

SEQ ID NO: 3219143 - RNA, 20 nt, Human
guccaguaagaucacuguuu

SEQ ID NO: 3219144 - RNA, 21 nt, Human
guccaguaagaucacuguuua

SEQ ID NO: 3219145 - RNA, 14 nt, Human
guccaguaagauca

SEQ ID NO: 3219146 - RNA, 22 nt, Human
guccagguggagguggcauccc

SEQ ID NO: 3219147 - RNA, 12 nt, Human
guccacccagga

SEQ ID NO: 3219148 - RNA, 23 nt, Human
guccacccaggagccccgaggcc

SEQ ID NO: 3219149 - RNA, 11 nt, Human
guccacccgcc

SEQ ID NO: 3219150 - RNA, 18 nt, Human
guccacccgccccugccc

SEQ ID NO: 3219151 - RNA, 21 nt, Human
guccacugggguggccugacu

SEQ ID NO: 3219152 - RNA, 16 nt, Human
guccagagcugcuucc

SEQ ID NO: 3219153 - RNA, 13 nt, Human
guccagagcugcu

SEQ ID NO: 3219154 - RNA, 17 nt, Human
guccagagcugcuuccc

SEQ ID NO: 3219155 - RNA, 23 nt, Human
guccacgugcguguuuucugacu

SEQ ID NO: 3219156 - RNA, 16 nt, Human
guccacgugcguguuu

SEQ ID NO: 3219157 - RNA, 13 nt, Human
guccacuggggug

SEQ ID NO: 3219158 - RNA, 20 nt, Human
guccccaccaucugcugucu

SEQ ID NO: 3219159 - RNA, 18 nt, Human
guccccaccaucugcugu

SEQ ID NO: 3219160 - RNA, 17 nt, Human
guccccaccaucugcug

SEQ ID NO: 3219161 - RNA, 22 nt, Human
gucccaugugagcugcugccau

SEQ ID NO: 3219162 - RNA, 21 nt, Human
gucccaugugagcugcugcca

SEQ ID NO: 3219163 - RNA, 17 nt, Human
gucccaugugagcugcu

SEQ ID NO: 3219164 - RNA, 20 nt, Human
gucccaugugagcugcugcc

SEQ ID NO: 3219165 - RNA, 18 nt, Human
gucccaugugagcugcug

SEQ ID NO: 3219166 - RNA, 16 nt, Human
guccccaaugaauaua

SEQ ID NO: 3219167 - RNA, 13 nt, Human
guccccaccaucu

SEQ ID NO: 3219168 - RNA, 16 nt, Human
guccccaccaucugcu

SEQ ID NO: 3219169 - RNA, 15 nt, Human
guccccaccaucugc

SEQ ID NO: 3219170 - RNA, 23 nt, Human
gucccaccuuggcugcagggagu

SEQ ID NO: 3219171 - RNA, 20 nt, Human
gucccaccuuggcugcaggg

SEQ ID NO: 3219172 - RNA, 16 nt, Human
gucccaggcugagccu

SEQ ID NO: 3219173 - RNA, 17 nt, Human
gucccaggcugagccuc

SEQ ID NO: 3219174 - RNA, 15 nt, Human
gucccaggcugagcc

SEQ ID NO: 3219175 - RNA, 18 nt, Human
gucccaggcugagccuca

SEQ ID NO: 3219176 - RNA, 19 nt, Human
gucccaggcugagccucag

SEQ ID NO: 3219177 - RNA, 22 nt, Human
gucccugaggcagguccccaga

SEQ ID NO: 3219178 - RNA, 16 nt, Human
gucccugcacuugcag

SEQ ID NO: 3219179 - RNA, 21 nt, Human
gucccugcacuugcagacucu

SEQ ID NO: 3219180 - RNA, 19 nt, Human
gucccugcacuugcagacu

SEQ ID NO: 3219181 - RNA, 18 nt, Human
gucccugaggcagguccc

SEQ ID NO: 3219182 - RNA, 16 nt, Human
gucccugaagagaagg

SEQ ID NO: 3219183 - RNA, 21 nt, Human
gucccuaccgagucucuucuc

SEQ ID NO: 3219184 - RNA, 23 nt, Human
gucccuaccgagucucuucucca

SEQ ID NO: 3219185 - RNA, 22 nt, Human
gucccuaccgagucucuucucc

SEQ ID NO: 3219186 - RNA, 19 nt, Human
gucagcuccccucggagaa

SEQ ID NO: 3219187 - RNA, 22 nt, Human
gucagaugcugugcaaauguua

SEQ ID NO: 3219188 - RNA, 15 nt, Human
gucagauguuuaaaa

SEQ ID NO: 3219189 - RNA, 17 nt, Human
gucagauguuuaaaaca

SEQ ID NO: 3219190 - RNA, 13 nt, Human
gucagauguuuaa

SEQ ID NO: 3219191 - RNA, 19 nt, Human
gucagauguuuaaaacacc

SEQ ID NO: 3219192 - RNA, 12 nt, Human
gucagauguuug

SEQ ID NO: 3219193 - RNA, 18 nt, Human
gucagauguuuaaaacac

SEQ ID NO: 3219194 - RNA, 16 nt, Human
gucagagccugcaguu

SEQ ID NO: 3219195 - RNA, 15 nt, Human
gucagagccugcagu

SEQ ID NO: 3219196 - RNA, 14 nt, Human
gucagagccugcag

SEQ ID NO: 3219197 - RNA, 12 nt, Human
gucacucuggca

SEQ ID NO: 3219198 - RNA, 13 nt, Human
gucacucuggcag

SEQ ID NO: 3219199 - RNA, 14 nt, Human
gucacucuggcagc

SEQ ID NO: 3219200 - RNA, 16 nt, Human
gucacucuggcagcuc

SEQ ID NO: 3219201 - RNA, 17 nt, Human
gucacucuggcagcuca

SEQ ID NO: 3219202 - RNA, 19 nt, Human
gucacucuggcagcucaga

SEQ ID NO: 3219203 - RNA, 17 nt, Human
gucaccccggccaccug

SEQ ID NO: 3219204 - RNA, 18 nt, Human
gucaccccggccaccugc

SEQ ID NO: 3219205 - RNA, 22 nt, Human
gucaccccggccaccugcggug

SEQ ID NO: 3219206 - RNA, 14 nt, Human
gucacuaccuggcu

SEQ ID NO: 3219207 - RNA, 17 nt, Human
gucacuaccuggcugcg

SEQ ID NO: 3219208 - RNA, 16 nt, Human
gucacuaccuggcugc

SEQ ID NO: 3219209 - RNA, 19 nt, Human
guauuuuguuuuugucuua

SEQ ID NO: 3219210 - RNA, 21 nt, Human
gucaauaauuauuugucucag

SEQ ID NO: 3219211 - RNA, 15 nt, Human
gucaagugaaaaagg

SEQ ID NO: 3219212 - RNA, 15 nt, Human
gucaaugcagccccc

SEQ ID NO: 3219213 - RNA, 18 nt, Human
gucaaugaacaagcauuc

SEQ ID NO: 3219214 - RNA, 15 nt, Human
gucaccccggccacc

SEQ ID NO: 3219215 - RNA, 15 nt, Human
guauuaauucucuuu

SEQ ID NO: 3219216 - RNA, 23 nt, Human
guauuacacaagaccagugcuua

SEQ ID NO: 3219217 - RNA, 13 nt, Human
guauuuuaaucac

SEQ ID NO: 3219218 - RNA, 19 nt, Human
guauuaagcccacaguaua

SEQ ID NO: 3219219 - RNA, 21 nt, Human
guauuaagcccacaguauauu

SEQ ID NO: 3219220 - RNA, 23 nt, Human
guauuaagauuauaauuguugca

SEQ ID NO: 3219221 - RNA, 16 nt, Human
guauuaagauuauaau

SEQ ID NO: 3219222 - RNA, 12 nt, Human
guauuaauaaaa

SEQ ID NO: 3219223 - RNA, 13 nt, Human
guauuaauaaaaa

SEQ ID NO: 3219224 - RNA, 14 nt, Human
guauuaauaaaaag

SEQ ID NO: 3219225 - RNA, 15 nt, Human
guauuaauaaaaaga

SEQ ID NO: 3219226 - RNA, 18 nt, Human
guauuaauaaaaagacaa

SEQ ID NO: 3219227 - RNA, 14 nt, Human
guauuuuacuaaua

SEQ ID NO: 3219228 - RNA, 23 nt, Human
guauuuuaguggacccugaaaug

SEQ ID NO: 3219229 - RNA, 12 nt, Human
guauuuucaguc

SEQ ID NO: 3219230 - RNA, 21 nt, Human
guauuuugugaguuuguuucu

SEQ ID NO: 3219231 - RNA, 22 nt, Human
uuugaauguaugcuucauacag

SEQ ID NO: 3219232 - RNA, 17 nt, Human
uuugaauguaugcuuca

SEQ ID NO: 3219233 - RNA, 13 nt, Human
uuugaaucuuuaa

SEQ ID NO: 3219234 - RNA, 19 nt, Human
uuugaaucuuuaauuaaaa

SEQ ID NO: 3219235 - RNA, 15 nt, Human
uuugaaucuuuaauu

SEQ ID NO: 3219236 - RNA, 11 nt, Human
uuugcauaucc

SEQ ID NO: 3219237 - RNA, 14 nt, Human
uuuggaauuuugug

SEQ ID NO: 3219238 - RNA, 21 nt, Human
uuuggaaaacgauuuaauuua

SEQ ID NO: 3219239 - RNA, 19 nt, Human
uuugcuuuuuaguuuugcu

SEQ ID NO: 3219240 - RNA, 12 nt, Human
uuuggugcuuuu

SEQ ID NO: 3219241 - RNA, 20 nt, Human
uuuggugcuuuuuauaaaaa

SEQ ID NO: 3219242 - RNA, 23 nt, Human
uuugguuuuaaaauacuguagau

SEQ ID NO: 3219243 - RNA, 22 nt, Human
uuugguuuuaaaauacuguaga

SEQ ID NO: 3219244 - RNA, 18 nt, Human
uuugguuuuaaaauacug

SEQ ID NO: 3219245 - RNA, 16 nt, Human
uuugguuugguuuuua

SEQ ID NO: 3219246 - RNA, 12 nt, Human
uuugguuuuguu

SEQ ID NO: 3219247 - RNA, 20 nt, Human
uuuggagucagacagaugug

SEQ ID NO: 3219248 - RNA, 22 nt, Human
uuuggaggcuggaguaaucaga

SEQ ID NO: 3219249 - RNA, 20 nt, Human
uuuggagcacaaaauucaaa

SEQ ID NO: 3219250 - RNA, 21 nt, Human
uuuggaauuuugugcccccau

SEQ ID NO: 3219251 - RNA, 22 nt, Human
uuuggagagaaauauuuuaauu

SEQ ID NO: 3219252 - RNA, 13 nt, Human
uuuggaauuagaa

SEQ ID NO: 3219253 - RNA, 19 nt, Human
uuuggagagaaauauuuua

SEQ ID NO: 3219254 - RNA, 17 nt, Human
uuuggucuacacugugc

SEQ ID NO: 3219255 - RNA, 14 nt, Human
uuuggauuaaauua

SEQ ID NO: 3219256 - RNA, 21 nt, Human
uuuggauaucuguuagaugcu

SEQ ID NO: 3219257 - RNA, 15 nt, Human
uuuggugcaaaguau

SEQ ID NO: 3219258 - RNA, 17 nt, Human
uuuuaaagaaugcucuu

SEQ ID NO: 3219259 - RNA, 20 nt, Human
uuuuaaaagaugcaauguag

SEQ ID NO: 3219260 - RNA, 23 nt, Human
uuuuaaaagccuuggccucagag

SEQ ID NO: 3219261 - RNA, 18 nt, Human
uuuuaaaagccuuggccu

SEQ ID NO: 3219262 - RNA, 13 nt, Human
uuuuaaaagccuu

SEQ ID NO: 3219263 - RNA, 15 nt, Human
uuuguugaacuguua

SEQ ID NO: 3219264 - RNA, 16 nt, Human
uuuguugaaagaaagu

SEQ ID NO: 3219265 - RNA, 21 nt, Human
uuuguucuggcucuuccaggc

SEQ ID NO: 3219266 - RNA, 23 nt, Human
uuuguaugcaagcaguuucaaua

SEQ ID NO: 3219267 - RNA, 23 nt, Human
uuuguaugaaaacauggaacagu

SEQ ID NO: 3219268 - RNA, 19 nt, Human
uuuguaugaaauauaugug

SEQ ID NO: 3219269 - RNA, 20 nt, Human
uuuguaugaaauauauguga

SEQ ID NO: 3219270 - RNA, 15 nt, Human
uuuguaugaaaacau

SEQ ID NO: 3219271 - RNA, 21 nt, Human
uuuguaugcaagcaguuucaa

SEQ ID NO: 3219272 - RNA, 12 nt, Human
uuuguaugcaag

SEQ ID NO: 3219273 - RNA, 14 nt, Human
uuuguaaaaaugua

SEQ ID NO: 3219274 - RNA, 14 nt, Human
uuuguauaguuaug

SEQ ID NO: 3219275 - RNA, 16 nt, Human
uuuguauaguuaugua

SEQ ID NO: 3219276 - RNA, 17 nt, Human
uuuguauaguuauguaa

SEQ ID NO: 3219277 - RNA, 19 nt, Human
uuuguauaguuauguaaau

SEQ ID NO: 3219278 - RNA, 21 nt, Human
uuuguauaguuauguaaauaa

SEQ ID NO: 3219279 - RNA, 22 nt, Human
uuuguauaguuauguaaauaau

SEQ ID NO: 3219280 - RNA, 13 nt, Human
uuuguaugaaaac

SEQ ID NO: 3219281 - RNA, 18 nt, Human
uuuguauauugguuuuau

SEQ ID NO: 3219282 - RNA, 20 nt, Human
uuuguauauugguuuuauga

SEQ ID NO: 3219283 - RNA, 16 nt, Human
uuuuaacaagaagcaa

SEQ ID NO: 3219284 - RNA, 19 nt, Human
uuuuaauguaauugauugu

SEQ ID NO: 3219285 - RNA, 21 nt, Human
uuuuaaugcuaaucuugugaa

SEQ ID NO: 3219286 - RNA, 17 nt, Human
uuuuaaugauuguuuaa

SEQ ID NO: 3219287 - RNA, 16 nt, Human
uuuuaaugauuguuua

SEQ ID NO: 3219288 - RNA, 18 nt, Human
uuuuaaucuacugcauuu

SEQ ID NO: 3219289 - RNA, 21 nt, Human
uuuuaaucucuaacaguggac

SEQ ID NO: 3219290 - RNA, 19 nt, Human
uuuuaaauuauguuuuacu

SEQ ID NO: 3219291 - RNA, 20 nt, Human
uuuuaaaugugugagugcau

SEQ ID NO: 3219292 - RNA, 20 nt, Human
uuuuaaaugcaguuacaaau

SEQ ID NO: 3219293 - RNA, 22 nt, Human
uuuuaaaugugugagugcaugu

SEQ ID NO: 3219294 - RNA, 17 nt, Human
uuuuaaauuaauaucuu

SEQ ID NO: 3219295 - RNA, 18 nt, Human
uuuuaaauuagaaaauau

SEQ ID NO: 3219296 - RNA, 19 nt, Human
uuuuaaauuagaaaauauu

SEQ ID NO: 3219297 - RNA, 14 nt, Human
uuuuaaaugcaguu

SEQ ID NO: 3219298 - RNA, 15 nt, Human
uuuuaaagacuugca

SEQ ID NO: 3219299 - RNA, 22 nt, Human
uuugaagaugccgcauuuggau

SEQ ID NO: 3219300 - RNA, 18 nt, Human
uuugaagagugaaauacc

SEQ ID NO: 3219301 - RNA, 14 nt, Human
uuugaacucuucaa

SEQ ID NO: 3219302 - RNA, 23 nt, Human
uuucuucuucaaaccuuugugug

SEQ ID NO: 3219303 - RNA, 21 nt, Human
uuucuucuuccacacaugcaa

SEQ ID NO: 3219304 - RNA, 14 nt, Human
uuucuugauaauuu

SEQ ID NO: 3219305 - RNA, 21 nt, Human
uuucuugauaauuuuccuuua

SEQ ID NO: 3219306 - RNA, 19 nt, Human
uuucuugauaauuuuccuu

SEQ ID NO: 3219307 - RNA, 17 nt, Human
uuugaagacuucaaaau

SEQ ID NO: 3219308 - RNA, 23 nt, Human
uuugaagacuucaaaauauugag

SEQ ID NO: 3219309 - RNA, 17 nt, Human
uuugaacucuucucauu

SEQ ID NO: 3219310 - RNA, 22 nt, Human
uuugaacucuucucauuacuug

SEQ ID NO: 3219311 - RNA, 17 nt, Human
uuucuuauuucauuucu

SEQ ID NO: 3219312 - RNA, 11 nt, Human
uuucuucaaaa

SEQ ID NO: 3219313 - RNA, 20 nt, Human
uuucuguuucuaauuugcug

SEQ ID NO: 3219314 - RNA, 22 nt, Human
uuucuguuucuaauuugcugcu

SEQ ID NO: 3219315 - RNA, 12 nt, Human
uuucuuaaaaag

SEQ ID NO: 3219316 - RNA, 12 nt, Human
uuucuucucccu

SEQ ID NO: 3219317 - RNA, 16 nt, Human
uuucuuccucugcuga

SEQ ID NO: 3219318 - RNA, 14 nt, Human
uuucuuccucugcu

SEQ ID NO: 3219319 - RNA, 13 nt, Human
uuucuucucccuc

SEQ ID NO: 3219320 - RNA, 13 nt, Human
uuucuuccucugc

SEQ ID NO: 3219321 - RNA, 11 nt, Human
uuucuuccucu

SEQ ID NO: 3219322 - RNA, 22 nt, Human
uuucuucaaaauauaaaaugcc

SEQ ID NO: 3219323 - RNA, 12 nt, Human
uuucuucaaaau

SEQ ID NO: 3219324 - RNA, 17 nt, Human
uuucuagaaagaauaaa

SEQ ID NO: 3219325 - RNA, 18 nt, Human
uuucuagacacuuuuucu

SEQ ID NO: 3219326 - RNA, 21 nt, Human
uuucuagacuauaaauguugc

SEQ ID NO: 3219327 - RNA, 23 nt, Human
uuucuacucgaguuacagacaaa

SEQ ID NO: 3219328 - RNA, 13 nt, Human
uuucugagaaaga

SEQ ID NO: 3219329 - RNA, 19 nt, Human
uuucugaagguagcauucu

SEQ ID NO: 3219330 - RNA, 22 nt, Human
uuuccucaaaacuucagacaua

SEQ ID NO: 3219331 - RNA, 16 nt, Human
uuuccugaggcugggc

SEQ ID NO: 3219332 - RNA, 12 nt, Human
uuuccugcccug

SEQ ID NO: 3219333 - RNA, 13 nt, Human
uuuccugcccugg

SEQ ID NO: 3219334 - RNA, 20 nt, Human
uuuccugauagcauaugaca

SEQ ID NO: 3219335 - RNA, 20 nt, Human
uuacauuuuauuaagcuuuu

SEQ ID NO: 3219336 - RNA, 19 nt, Human
uuaccaauaggcaaauuaa

SEQ ID NO: 3219337 - RNA, 20 nt, Human
uuaccaauaggcaaauuaau

SEQ ID NO: 3219338 - RNA, 20 nt, Human
uuuucuuuuguuuuuugaag

SEQ ID NO: 3219339 - RNA, 11 nt, Human
uuuucuuuucu

SEQ ID NO: 3219340 - RNA, 21 nt, Human
uuuucuuuuuuaaauuaauau

SEQ ID NO: 3219341 - RNA, 23 nt, Human
uuuucuuuuuuaaauuaauaucu

SEQ ID NO: 3219342 - RNA, 14 nt, Human
uuuugaaucuuuaa

SEQ ID NO: 3219343 - RNA, 16 nt, Human
uuuugaaucuuuaauu

SEQ ID NO: 3219344 - RNA, 16 nt, Human
uuuuggccaugaaagc

SEQ ID NO: 3219345 - RNA, 20 nt, Human
uuuuggauuuggagagaaau

SEQ ID NO: 3219346 - RNA, 22 nt, Human
uuuuggcacuugccauuccaaa

SEQ ID NO: 3219347 - RNA, 16 nt, Human
uuuugacacugaaaua

SEQ ID NO: 3219348 - RNA, 21 nt, Human
uuuugacacugaaauaaccgu

SEQ ID NO: 3219349 - RNA, 15 nt, Human
uuuuggucuguguga

SEQ ID NO: 3219350 - RNA, 18 nt, Human
uuuuggggugugaccuca

SEQ ID NO: 3219351 - RNA, 21 nt, Human
uuuugguccacuuuuccagua

SEQ ID NO: 3219352 - RNA, 20 nt, Human
uuuugguccacuuuuccagu

SEQ ID NO: 3219353 - RNA, 14 nt, Human
uuuuggcugcugaa

SEQ ID NO: 3219354 - RNA, 17 nt, Human
uuuuggcgaaucucaaa

SEQ ID NO: 3219355 - RNA, 21 nt, Human
uuuugggaaaugcugauuuaa

SEQ ID NO: 3219356 - RNA, 18 nt, Human
uuuugggaaguuaaaggg

SEQ ID NO: 3219357 - RNA, 19 nt, Human
uuuuccuuacauaaacauc

SEQ ID NO: 3219358 - RNA, 12 nt, Human
uuuucuaaagua

SEQ ID NO: 3219359 - RNA, 15 nt, Human
uuuucuuuuaauuuu

SEQ ID NO: 3219360 - RNA, 20 nt, Human
uuuucuuugccaucucugcu

SEQ ID NO: 3219361 - RNA, 12 nt, Human
uuuucuuucagu

SEQ ID NO: 3219362 - RNA, 22 nt, Human
uuuuaauuguauuuuuguuguu

SEQ ID NO: 3219363 - RNA, 12 nt, Human
uuuuccuuacau

SEQ ID NO: 3219364 - RNA, 15 nt, Human
uuuuccuuacauaaa

SEQ ID NO: 3219365 - RNA, 14 nt, Human
uuuuccuuacauaa

SEQ ID NO: 3219366 - RNA, 13 nt, Human
uuuuccuguucua

SEQ ID NO: 3219367 - RNA, 20 nt, Human
uuuuccugggacaucuucug

SEQ ID NO: 3219368 - RNA, 19 nt, Human
uuuuaauuaacuuuggauu

SEQ ID NO: 3219369 - RNA, 14 nt, Human
uuuuaauugaaaag

SEQ ID NO: 3219370 - RNA, 19 nt, Human
uuuuaauugaaaagaagua

SEQ ID NO: 3219371 - RNA, 13 nt, Human
uuuuaauuguauu

SEQ ID NO: 3219372 - RNA, 14 nt, Human
uuuuaauuguauuu

SEQ ID NO: 3219373 - RNA, 12 nt, Human
uuuuaauuguau

SEQ ID NO: 3219374 - RNA, 24 nt, Human
uuuuaauugaucaguuuucaugug

SEQ ID NO: 3219375 - RNA, 19 nt, Human
uuuuguagagccagggucu

SEQ ID NO: 3219376 - RNA, 13 nt, Human
uuuuguaugcaag

SEQ ID NO: 3219377 - RNA, 23 nt, Human
uuuuguaugcaagcaguuucaau

SEQ ID NO: 3219378 - RNA, 23 nt, Human
uuuuguaugaaauauaugugaaa

SEQ ID NO: 3219379 - RNA, 14 nt, Human
uuuuguauauuggu

SEQ ID NO: 3219380 - RNA, 15 nt, Human
uuuuguaaacuuuga

SEQ ID NO: 3219381 - RNA, 14 nt, Human
uuuuguaaacuuug

SEQ ID NO: 3219382 - RNA, 16 nt, Human
uuuuguaaagaaaaau

SEQ ID NO: 3219383 - RNA, 11 nt, Human
uuuuguaaaga

SEQ ID NO: 3219384 - RNA, 19 nt, Human
uuuuguaaacuuugaaaua

SEQ ID NO: 3219385 - RNA, 17 nt, Human
uuuuguaaacuuugaaa

SEQ ID NO: 3219386 - RNA, 14 nt, Human
uuuuguaaagauuu

SEQ ID NO: 3219387 - RNA, 13 nt, Human
uuuuguaaagauu

SEQ ID NO: 3219388 - RNA, 18 nt, Human
uuuuguaaagaaaaauau

SEQ ID NO: 3219389 - RNA, 17 nt, Human
uuuuguaaagaaaaaua

SEQ ID NO: 3219390 - RNA, 20 nt, Human
uuuuguaaagauuucuguuc

SEQ ID NO: 3219391 - RNA, 16 nt, Human
uuuuguaaagauuucu

SEQ ID NO: 3219392 - RNA, 19 nt, Human
uuuuguaauaauaaagaau

SEQ ID NO: 3219393 - RNA, 17 nt, Human
uuuuguaauaauaaaga

SEQ ID NO: 3219394 - RNA, 15 nt, Human
uuuugguugaauaaa

SEQ ID NO: 3219395 - RNA, 22 nt, Human
uuuugguucauuuucagauuca

SEQ ID NO: 3219396 - RNA, 20 nt, Human
uuuugguugaauaaacuaga

SEQ ID NO: 3219397 - RNA, 16 nt, Human
uuuuguaaaauguauu

SEQ ID NO: 3219398 - RNA, 18 nt, Human
uuuuguaaaauguauuau

SEQ ID NO: 3219399 - RNA, 16 nt, Human
uuuuuaaagcuuuuga

SEQ ID NO: 3219400 - RNA, 19 nt, Human
uuuuuaaaaucuuauuaaa

SEQ ID NO: 3219401 - RNA, 16 nt, Human
uuuuuaaacaauaaag

SEQ ID NO: 3219402 - RNA, 12 nt, Human
uuuuuaaaaucu

SEQ ID NO: 3219403 - RNA, 14 nt, Human
uuuuuaaaaucuua

SEQ ID NO: 3219404 - RNA, 13 nt, Human
uuuuuaaaaucuu

SEQ ID NO: 3219405 - RNA, 13 nt, Human
uuuuuaaaaaacu

SEQ ID NO: 3219406 - RNA, 14 nt, Human
uuuuuaaaaaacuu

SEQ ID NO: 3219407 - RNA, 15 nt, Human
uuuuuaaaaauaaag

SEQ ID NO: 3219408 - RNA, 16 nt, Human
uuuugucauauaagau

SEQ ID NO: 3219409 - RNA, 22 nt, Human
uuuuguauucaauuaaagaaau

SEQ ID NO: 3219410 - RNA, 20 nt, Human
uuuuugaaaugcugaaaauu

SEQ ID NO: 3219411 - RNA, 17 nt, Human
uuuuugaaaugcugaaa

SEQ ID NO: 3219412 - RNA, 23 nt, Human
uuuuugaaaucaguaaacacugu

SEQ ID NO: 3219413 - RNA, 12 nt, Human
uuuuugaaaacc

SEQ ID NO: 3219414 - RNA, 14 nt, Human
uuuuuuguaugaaa

SEQ ID NO: 3219415 - RNA, 13 nt, Human
uuuuuuguaugaa

SEQ ID NO: 3219416 - RNA, 19 nt, Human
uuuuugaacucuucucauu

SEQ ID NO: 3219417 - RNA, 20 nt, Human
uuuuugaacucuucucauua

SEQ ID NO: 3219418 - RNA, 17 nt, Human
uuuuuugagagagaguc

SEQ ID NO: 3219419 - RNA, 13 nt, Human
uuuuuugaagugu

SEQ ID NO: 3219420 - RNA, 15 nt, Human
uuuuucuauauuauu

SEQ ID NO: 3219421 - RNA, 11 nt, Human
uuuuuccuuuu

SEQ ID NO: 3219422 - RNA, 19 nt, Human
uuuuuccuucagugccuua

SEQ ID NO: 3219423 - RNA, 20 nt, Human
uuuuuccuuacauaaacauc

SEQ ID NO: 3219424 - RNA, 11 nt, Human
uuuuuccuuca

SEQ ID NO: 3219425 - RNA, 19 nt, Human
uuuuuccuuacauaaacau

SEQ ID NO: 3219426 - RNA, 15 nt, Human
uuuuuccuuacauaa

SEQ ID NO: 3219427 - RNA, 22 nt, Human
uuuuuccuaugaccauaaaauu

SEQ ID NO: 3219428 - RNA, 19 nt, Human
uuuuuccugugaacacaua

SEQ ID NO: 3219429 - RNA, 15 nt, Human
uuuuuaagugaaauu

SEQ ID NO: 3219430 - RNA, 14 nt, Human
uuuuuaagugaaau

SEQ ID NO: 3219431 - RNA, 20 nt, Human
uuuuuaagugaaaauauagc

SEQ ID NO: 3219432 - RNA, 13 nt, Human
uuuuuaagugaaa

SEQ ID NO: 3219433 - RNA, 23 nt, Human
uuuuuaaauaaaaauuacugugu

SEQ ID NO: 3219434 - RNA, 21 nt, Human
cuaauaaaauuuaaaagucuu

SEQ ID NO: 3219435 - RNA, 16 nt, Human
cuaaggugugcucuga

SEQ ID NO: 3219436 - RNA, 20 nt, Human
cuaauaaaauuuaaaagucu

SEQ ID NO: 3219437 - RNA, 18 nt, Human
cuaauauguaacaagcca

SEQ ID NO: 3219438 - RNA, 19 nt, Human
cuaaucagcauucucacuc

SEQ ID NO: 3219439 - RNA, 17 nt, Human
cuaaucagcauucucac

SEQ ID NO: 3219440 - RNA, 16 nt, Human
cuaauccucuuuuucu

SEQ ID NO: 3219441 - RNA, 14 nt, Human
cuaauguacugcau

SEQ ID NO: 3219442 - RNA, 16 nt, Human
cuaauguacugcauau

SEQ ID NO: 3219443 - RNA, 21 nt, Human
cuaaucuugugaaaauaauug

SEQ ID NO: 3219444 - RNA, 19 nt, Human
cuaaucuugugaaaauaau

SEQ ID NO: 3219445 - RNA, 16 nt, Human
cuaaucuugugaaaau

SEQ ID NO: 3219446 - RNA, 14 nt, Human
cuaaucuugugaaa

SEQ ID NO: 3219447 - RNA, 22 nt, Human
cuaaugaaugcauaaaauguua

SEQ ID NO: 3219448 - RNA, 19 nt, Human
cuaaugaaugcauaaaaug

SEQ ID NO: 3219449 - RNA, 22 nt, Human
cuaauguuggcagaugcagcuc

SEQ ID NO: 3219450 - RNA, 17 nt, Human
cuaauguuuaagcagaa

SEQ ID NO: 3219451 - RNA, 16 nt, Human
cuaauguuuaagcaga

SEQ ID NO: 3219452 - RNA, 13 nt, Human
cuaauuaauauau

SEQ ID NO: 3219453 - RNA, 15 nt, Human
cuaauuaauauauua

SEQ ID NO: 3219454 - RNA, 18 nt, Human
cuaauuaauauauuaaaa

SEQ ID NO: 3219455 - RNA, 21 nt, Human
cuaauuaauauauuaaaauuc

SEQ ID NO: 3219456 - RNA, 23 nt, Human
cuaauuaauauauuaaaauucca

SEQ ID NO: 3219457 - RNA, 22 nt, Human
cuaauguuuaagcagaauugga

SEQ ID NO: 3219458 - RNA, 20 nt, Human
cuaauguuuaagcagaauug

SEQ ID NO: 3219459 - RNA, 18 nt, Human
cuaauguuuaagcagaau

SEQ ID NO: 3219460 - RNA, 15 nt, Human
cuacaagacacagug

SEQ ID NO: 3219461 - RNA, 13 nt, Human
cuaauuaauuuca

SEQ ID NO: 3219462 - RNA, 22 nt, Human
cuacaauauguacauuucuaag

SEQ ID NO: 3219463 - RNA, 21 nt, Human
cuacaauauguacauuucuaa

SEQ ID NO: 3219464 - RNA, 14 nt, Human
cuacaauauguaca

SEQ ID NO: 3219465 - RNA, 24 nt, Human
cuaccccucccggcccugccugcu

SEQ ID NO: 3219466 - RNA, 16 nt, Human
cuaccccuugauuuuc

SEQ ID NO: 3219467 - RNA, 21 nt, Human
cuaccccucccggcccugccu

SEQ ID NO: 3219468 - RNA, 19 nt, Human
cuacccagcgagcccuggu

SEQ ID NO: 3219469 - RNA, 20 nt, Human
cuacccagcgagcccuggug

SEQ ID NO: 3219470 - RNA, 22 nt, Human
cuacccacccuccuuucaccac

SEQ ID NO: 3219471 - RNA, 13 nt, Human
cuacccacccucc

SEQ ID NO: 3219472 - RNA, 17 nt, Human
cuacccacccuccuuuc

SEQ ID NO: 3219473 - RNA, 16 nt, Human
cuacacuccagugaga

SEQ ID NO: 3219474 - RNA, 17 nt, Human
cuacacuccagugagac

SEQ ID NO: 3219475 - RNA, 18 nt, Human
cuacacugugcugagucu

SEQ ID NO: 3219476 - RNA, 15 nt, Human
cuacagaggccaugg

SEQ ID NO: 3219477 - RNA, 18 nt, Human
cuacagaaaagaaacucu

SEQ ID NO: 3219478 - RNA, 13 nt, Human
cuacacaaagcag

SEQ ID NO: 3219479 - RNA, 22 nt, Human
cuacagaaaaacaaugguaaca

SEQ ID NO: 3219480 - RNA, 17 nt, Human
cuacagaaaagaaacuc

SEQ ID NO: 3219481 - RNA, 15 nt, Human
cuaagcaaaauguga

SEQ ID NO: 3219482 - RNA, 18 nt, Human
cuaagcaaaaugugauau

SEQ ID NO: 3219483 - RNA, 12 nt, Human
cuaagauucuuu

SEQ ID NO: 3219484 - RNA, 14 nt, Human
cuaagauucuuuua

SEQ ID NO: 3219485 - RNA, 21 nt, Human
cuaagauucuuuuaaauuaga

SEQ ID NO: 3219486 - RNA, 23 nt, Human
cuaagauucuuuuaaauuagaaa

SEQ ID NO: 3219487 - RNA, 14 nt, Human
cuaagcauuuaaaa

SEQ ID NO: 3219488 - RNA, 17 nt, Human
cuaacauuauuacuuuu

SEQ ID NO: 3219489 - RNA, 17 nt, Human
cuaaccacgcuggaccu

SEQ ID NO: 3219490 - RNA, 16 nt, Human
cuaacaugguuuaaaa

SEQ ID NO: 3219491 - RNA, 14 nt, Human
cuaagcaaaaugug

SEQ ID NO: 3219492 - RNA, 14 nt, Human
cuaaggcugaacuu

SEQ ID NO: 3219493 - RNA, 19 nt, Human
cuaaggauuagucccuggc

SEQ ID NO: 3219494 - RNA, 15 nt, Human
cuaaggugugcucug

SEQ ID NO: 3219495 - RNA, 21 nt, Human
cuaagcuauucaguaauaacu

SEQ ID NO: 3219496 - RNA, 19 nt, Human
cuaagcuauucaguaauaa

SEQ ID NO: 3219497 - RNA, 20 nt, Human
cuacugaggauauggacacu

SEQ ID NO: 3219498 - RNA, 18 nt, Human
cuacugaccagacaagcu

SEQ ID NO: 3219499 - RNA, 14 nt, Human
cuacucuucucucu

SEQ ID NO: 3219500 - RNA, 11 nt, Human
cuacucuucuc

SEQ ID NO: 3219501 - RNA, 18 nt, Human
cuacucuucucucugcuc

SEQ ID NO: 3219502 - RNA, 17 nt, Human
cuacucuucucucugcu

SEQ ID NO: 3219503 - RNA, 19 nt, Human
cuacucuucucucugcucu

SEQ ID NO: 3219504 - RNA, 14 nt, Human
cuacccgggaaggg

SEQ ID NO: 3219505 - RNA, 15 nt, Human
cuacccgggaagggg

SEQ ID NO: 3219506 - RNA, 20 nt, Human
cuacccgggaagggggcugg

SEQ ID NO: 3219507 - RNA, 21 nt, Human
cuacccgggaagggggcuggg

SEQ ID NO: 3219508 - RNA, 21 nt, Human
cuacucugugucagguggggc

SEQ ID NO: 3219509 - RNA, 16 nt, Human
cuacucugugucaggu

SEQ ID NO: 3219510 - RNA, 13 nt, Human
cuacucuguguca

SEQ ID NO: 3219511 - RNA, 15 nt, Human
cuacuugggaggcug

SEQ ID NO: 3219512 - RNA, 18 nt, Human
cuacuugggaggcugaga

SEQ ID NO: 3219513 - RNA, 19 nt, Human
cuacuugggaggcugagau

SEQ ID NO: 3219514 - RNA, 22 nt, Human
cuacuuagcaugucccuaccga

SEQ ID NO: 3219515 - RNA, 22 nt, Human
cuacuguucagcuuuuauuccu

SEQ ID NO: 3219516 - RNA, 14 nt, Human
cuacuuccccuucc

SEQ ID NO: 3219517 - RNA, 15 nt, Human
cuacuuccccuuccu

SEQ ID NO: 3219518 - RNA, 20 nt, Human
cuacuuccccuuccuaauuc

SEQ ID NO: 3219519 - RNA, 20 nt, Human
cuacuuccugugacuucagc

SEQ ID NO: 3219520 - RNA, 13 nt, Human
cuagauuaccaug

SEQ ID NO: 3219521 - RNA, 14 nt, Human
cuagauguaaauuu

SEQ ID NO: 3219522 - RNA, 14 nt, Human
cuagaugauuuuuu

SEQ ID NO: 3219523 - RNA, 17 nt, Human
cuagaugauuuuuugaa

SEQ ID NO: 3219524 - RNA, 20 nt, Human
cuagaugauuuuuugaaagu

SEQ ID NO: 3219525 - RNA, 21 nt, Human
cuagaugauuuuuugaaaguu

SEQ ID NO: 3219526 - RNA, 17 nt, Human
cuagaucuuugugccaa

SEQ ID NO: 3219527 - RNA, 17 nt, Human
cuagcacuuugggaggc

SEQ ID NO: 3219528 - RNA, 14 nt, Human
cuagcacagcuccc

SEQ ID NO: 3219529 - RNA, 17 nt, Human
cuagcacagcucccuuc

SEQ ID NO: 3219530 - RNA, 16 nt, Human
cuagcacagcucccuu

SEQ ID NO: 3219531 - RNA, 14 nt, Human
cuagauuugggaga

SEQ ID NO: 3219532 - RNA, 17 nt, Human
cuagagugaacuugggc

SEQ ID NO: 3219533 - RNA, 21 nt, Human
cuagagugaacuugggccacu

SEQ ID NO: 3219534 - RNA, 21 nt, Human
cuagaguagagguauaauugu

SEQ ID NO: 3219535 - RNA, 20 nt, Human
cuagacgagcaggcuucuuc

SEQ ID NO: 3219536 - RNA, 21 nt, Human
cuagacgagcaggcuucuucc

SEQ ID NO: 3219537 - RNA, 21 nt, Human
cuagacccacuggacucaccu

SEQ ID NO: 3219538 - RNA, 14 nt, Human
cuagacuauaaaug

SEQ ID NO: 3219539 - RNA, 16 nt, Human
cuagacuauaaauguu

SEQ ID NO: 3219540 - RNA, 20 nt, Human
cuaucuuaucucagauauuu

SEQ ID NO: 3219541 - RNA, 14 nt, Human
cuaucuucauguaa

SEQ ID NO: 3219542 - RNA, 16 nt, Human
cuaucuucauguaaau

SEQ ID NO: 3219543 - RNA, 17 nt, Human
cuaucuucauguaaauu

SEQ ID NO: 3219544 - RNA, 20 nt, Human
cuaucuucauguaaauugac

SEQ ID NO: 3219545 - RNA, 21 nt, Human
cuaucuuggagagcuggggac

SEQ ID NO: 3219546 - RNA, 13 nt, Human
cuaucuuggagag

SEQ ID NO: 3219547 - RNA, 21 nt, Human
cuaucuguuuacaguguuccg

SEQ ID NO: 3219548 - RNA, 17 nt, Human
cuaucuguuuacagugu

SEQ ID NO: 3219549 - RNA, 20 nt, Human
cuaucuguuuacaguguucc

SEQ ID NO: 3219550 - RNA, 14 nt, Human
cuauauuuuccuga

SEQ ID NO: 3219551 - RNA, 13 nt, Human
cuauauuuuccug

SEQ ID NO: 3219552 - RNA, 22 nt, Human
cuauauuuuuuguuaaaugauu

SEQ ID NO: 3219553 - RNA, 18 nt, Human
cuauaucuauaaacacug

SEQ ID NO: 3219554 - RNA, 17 nt, Human
cuauaucuauaaacacu

SEQ ID NO: 3219555 - RNA, 19 nt, Human
cuauaucuauaaacacugu

SEQ ID NO: 3219556 - RNA, 22 nt, Human
cuauauuguuuucaguguacau

SEQ ID NO: 3219557 - RNA, 20 nt, Human
cuauauuuuuuguuaaauga

SEQ ID NO: 3219558 - RNA, 23 nt, Human
cuauauuguuuucaguguacaug

SEQ ID NO: 3219559 - RNA, 19 nt, Human
cuaguucaucccuucucuu

SEQ ID NO: 3219560 - RNA, 18 nt, Human
cuaguucaucccuucucu

SEQ ID NO: 3219561 - RNA, 17 nt, Human
cuaguucaucccuucuc

SEQ ID NO: 3219562 - RNA, 16 nt, Human
cuaguucaucccuucu

SEQ ID NO: 3219563 - RNA, 18 nt, Human
cuaguuaaagaaaggaaa

SEQ ID NO: 3219564 - RNA, 15 nt, Human
cuaguguuugauugu

SEQ ID NO: 3219565 - RNA, 18 nt, Human
cuaguguucuuucucuuu

SEQ ID NO: 3219566 - RNA, 12 nt, Human
cuaguuauuuau

SEQ ID NO: 3219567 - RNA, 20 nt, Human
cuaguuauuuauucugggaa

SEQ ID NO: 3219568 - RNA, 19 nt, Human
cuaguuauuuauucuggga

SEQ ID NO: 3219569 - RNA, 16 nt, Human
cuaguuauuuauucug

SEQ ID NO: 3219570 - RNA, 13 nt, Human
cuaguuauuuauu

SEQ ID NO: 3219571 - RNA, 23 nt, Human
cuaguucaucccuucucuuccag

SEQ ID NO: 3219572 - RNA, 20 nt, Human
cuaguucaucccuucucuuc

SEQ ID NO: 3219573 - RNA, 14 nt, Human
cuagcacuuccuug

SEQ ID NO: 3219574 - RNA, 13 nt, Human
cuagcacuuccuu

SEQ ID NO: 3219575 - RNA, 16 nt, Human
cuaggaaauccagggu

SEQ ID NO: 3219576 - RNA, 17 nt, Human
cuaggaaauccagggug

SEQ ID NO: 3219577 - RNA, 21 nt, Human
cuaggaagacuuuggaaagag

SEQ ID NO: 3219578 - RNA, 14 nt, Human
cuaggaacaaaucu

SEQ ID NO: 3219579 - RNA, 16 nt, Human
cuaggaacaaaucuuc

SEQ ID NO: 3219580 - RNA, 13 nt, Human
cuaggaacacucc

SEQ ID NO: 3219581 - RNA, 15 nt, Human
cuaggaacacuccuu

SEQ ID NO: 3219582 - RNA, 22 nt, Human
cuaggaccccuccaugugggcu

SEQ ID NO: 3219583 - RNA, 17 nt, Human
cuaggaauauagauuaa

SEQ ID NO: 3219584 - RNA, 14 nt, Human
cuaggaauauagau

SEQ ID NO: 3219585 - RNA, 22 nt, Human
cuaggaaggcacuucugccuga

SEQ ID NO: 3219586 - RNA, 23 nt, Human
cuaggauguauauuuuauauaaa

SEQ ID NO: 3219587 - RNA, 22 nt, Human
cuaggauucacaccccaccugc

SEQ ID NO: 3219588 - RNA, 21 nt, Human
cuaggauucacaccccaccug

SEQ ID NO: 3219589 - RNA, 20 nt, Human
cuaggauucacaccccaccu

SEQ ID NO: 3219590 - RNA, 19 nt, Human
cuaggauucacaccccacc

SEQ ID NO: 3219591 - RNA, 23 nt, Human
cuaggauucacaccccaccugcg

SEQ ID NO: 3219592 - RNA, 17 nt, Human
cuaggaggucucuaaga

SEQ ID NO: 3219593 - RNA, 23 nt, Human
cuaguaucaaaagaaagaaaauc

SEQ ID NO: 3219594 - RNA, 15 nt, Human
cuaguaucaaaagaa

SEQ ID NO: 3219595 - RNA, 17 nt, Human
cuaguaucaaaagaaag

SEQ ID NO: 3219596 - RNA, 21 nt, Human
cuaggcauuugcugaauacag

SEQ ID NO: 3219597 - RNA, 19 nt, Human
cuaggcagggugucugccc

SEQ ID NO: 3219598 - RNA, 18 nt, Human
cuaggcagggugucugcc

SEQ ID NO: 3219599 - RNA, 17 nt, Human
cuaggcagggugucugc

SEQ ID NO: 3219600 - RNA, 16 nt, Human
cuaggcauuuguaaau

SEQ ID NO: 3219601 - RNA, 21 nt, Human
cuaggcauuuguaaauauuaa

SEQ ID NO: 3219602 - RNA, 22 nt, Human
cuaggcauuuguaaauauuaaa

SEQ ID NO: 3219603 - RNA, 14 nt, Human
cuaguacugugaau

SEQ ID NO: 3219604 - RNA, 21 nt, Human
cuaguagggguaccacugaau

SEQ ID NO: 3219605 - RNA, 20 nt, Human
cuaguagggguaccacugaa

SEQ ID NO: 3219606 - RNA, 21 nt, Human
cuagugugguguuuccuggca

SEQ ID NO: 3219607 - RNA, 22 nt, Human
cuagugugguguuuccuggcac

SEQ ID NO: 3219608 - RNA, 23 nt, Human
cuagugugguguuuccuggcacu

SEQ ID NO: 3219609 - RNA, 19 nt, Human
cuagugugguguuuccugg

SEQ ID NO: 3219610 - RNA, 13 nt, Human
cuagucuuaagaa

SEQ ID NO: 3219611 - RNA, 19 nt, Human
cuagugcagcugaaauuga

SEQ ID NO: 3219612 - RNA, 17 nt, Human
cuagugcagcugaaauu

SEQ ID NO: 3219613 - RNA, 16 nt, Human
cuagugcagcugaaau

SEQ ID NO: 3219614 - RNA, 14 nt, Human
cuagugcagcugaa

SEQ ID NO: 3219615 - RNA, 20 nt, Human
cuagucaacaguacccuggu

SEQ ID NO: 3219616 - RNA, 16 nt, Human
cuaugacuuaacauag

SEQ ID NO: 3219617 - RNA, 13 nt, Human
cuauuuucucuga

SEQ ID NO: 3219618 - RNA, 22 nt, Human
cuauuuucucugauacuuuuuu

SEQ ID NO: 3219619 - RNA, 17 nt, Human
cuauuuucucugauacu

SEQ ID NO: 3219620 - RNA, 16 nt, Human
cuauuuucucugauac

SEQ ID NO: 3219621 - RNA, 19 nt, Human
cucaacucuccuccagagu

SEQ ID NO: 3219622 - RNA, 14 nt, Human
cucaacucugcuga

SEQ ID NO: 3219623 - RNA, 16 nt, Human
cucaacucugcugagg

SEQ ID NO: 3219624 - RNA, 17 nt, Human
cucaacucugcugaggg

SEQ ID NO: 3219625 - RNA, 18 nt, Human
cucaacucugcugagggu

SEQ ID NO: 3219626 - RNA, 19 nt, Human
cucaacucugcugaggguc

SEQ ID NO: 3219627 - RNA, 16 nt, Human
cucaacuaaauccaaa

SEQ ID NO: 3219628 - RNA, 17 nt, Human
cucaagagggcacuggu

SEQ ID NO: 3219629 - RNA, 21 nt, Human
cucaagagggcacugguggcc

SEQ ID NO: 3219630 - RNA, 19 nt, Human
cucaagagggcacuggugg

SEQ ID NO: 3219631 - RNA, 20 nt, Human
cucaacucuccuccagaguc

SEQ ID NO: 3219632 - RNA, 21 nt, Human
cucaacucuccuccagaguca

SEQ ID NO: 3219633 - RNA, 15 nt, Human
cucaacuaaauccaa

SEQ ID NO: 3219634 - RNA, 18 nt, Human
cucaaauuguaauuaaua

SEQ ID NO: 3219635 - RNA, 17 nt, Human
cucaaccuccugggcua

SEQ ID NO: 3219636 - RNA, 13 nt, Human
cucacuaggcuuc

SEQ ID NO: 3219637 - RNA, 16 nt, Human
cucacuaggcuucugg

SEQ ID NO: 3219638 - RNA, 17 nt, Human
cucacuauguugcccag

SEQ ID NO: 3219639 - RNA, 16 nt, Human
cucacuauguugccca

SEQ ID NO: 3219640 - RNA, 20 nt, Human
cucacuaucccggcugcccu

SEQ ID NO: 3219641 - RNA, 21 nt, Human
cucacuaucccggcugcccuu

SEQ ID NO: 3219642 - RNA, 20 nt, Human
cucacuaggcuucugguuga

SEQ ID NO: 3219643 - RNA, 12 nt, Human
cucaccccagcc

SEQ ID NO: 3219644 - RNA, 13 nt, Human
cucaccccagccc

SEQ ID NO: 3219645 - RNA, 19 nt, Human
cucaccagccccagugccc

SEQ ID NO: 3219646 - RNA, 16 nt, Human
cucacauggaaugagg

SEQ ID NO: 3219647 - RNA, 18 nt, Human
cucacauggaaugagggu

SEQ ID NO: 3219648 - RNA, 19 nt, Human
cucacauggaaugaggguu

SEQ ID NO: 3219649 - RNA, 20 nt, Human
cucacauggaaugaggguuu

SEQ ID NO: 3219650 - RNA, 21 nt, Human
cucaccagccccagugcccac

SEQ ID NO: 3219651 - RNA, 20 nt, Human
cucaccagccccagugccca

SEQ ID NO: 3219652 - RNA, 20 nt, Human
cucaagugauucuccugccu

SEQ ID NO: 3219653 - RNA, 19 nt, Human
cucaagugauucuccugcc

SEQ ID NO: 3219654 - RNA, 18 nt, Human
cucaagugauucuccugc

SEQ ID NO: 3219655 - RNA, 20 nt, Human
cucaaggauaccuucuuauu

SEQ ID NO: 3219656 - RNA, 23 nt, Human
cucacaguccuuaccagcagagc

SEQ ID NO: 3219657 - RNA, 16 nt, Human
cucacaguuauuacau

SEQ ID NO: 3219658 - RNA, 13 nt, Human
cucacaguuauua

SEQ ID NO: 3219659 - RNA, 21 nt, Human
cguuuaaggugagcauaaauc

SEQ ID NO: 3219660 - RNA, 14 nt, Human
cuaaaaauuggugu

SEQ ID NO: 3219661 - RNA, 11 nt, Human
cuaaaaauaua

SEQ ID NO: 3219662 - RNA, 23 nt, Human
cuaaaaaugagcuugauuaaauc

SEQ ID NO: 3219663 - RNA, 23 nt, Human
cuaaaaauauacauguuuaugua

SEQ ID NO: 3219664 - RNA, 21 nt, Human
cuaaaaauauacauguuuaug

SEQ ID NO: 3219665 - RNA, 13 nt, Human
cuaaaacuguacu

SEQ ID NO: 3219666 - RNA, 17 nt, Human
cuaaaacuguacuuuga

SEQ ID NO: 3219667 - RNA, 16 nt, Human
cuaaaacuguacuuug

SEQ ID NO: 3219668 - RNA, 20 nt, Human
cuaaaacuguacuuugauuc

SEQ ID NO: 3219669 - RNA, 18 nt, Human
cuaaaacuguacuuugau

SEQ ID NO: 3219670 - RNA, 22 nt, Human
cuaaaacuguacuuugauucac

SEQ ID NO: 3219671 - RNA, 19 nt, Human
cuaaaauugaguucuuccu

SEQ ID NO: 3219672 - RNA, 17 nt, Human
cuaaaauguuuucagcu

SEQ ID NO: 3219673 - RNA, 13 nt, Human
cuaaaauguuuuc

SEQ ID NO: 3219674 - RNA, 15 nt, Human
cuaaaauguuuucag

SEQ ID NO: 3219675 - RNA, 14 nt, Human
cuaaaauguuuuca

SEQ ID NO: 3219676 - RNA, 15 nt, Human
cuaaaauuuuuuccu

SEQ ID NO: 3219677 - RNA, 21 nt, Human
cuaaacguguauguuuuucag

SEQ ID NO: 3219678 - RNA, 20 nt, Human
cuaaacguguauguuuuuca

SEQ ID NO: 3219679 - RNA, 19 nt, Human
cuaaacguguauguuuuuc

SEQ ID NO: 3219680 - RNA, 18 nt, Human
cuaaacguguauguuuuu

SEQ ID NO: 3219681 - RNA, 17 nt, Human
cuaaacguguauguuuu

SEQ ID NO: 3219682 - RNA, 14 nt, Human
cuaaacguguaugu

SEQ ID NO: 3219683 - RNA, 22 nt, Human
cuaaacguguauguuuuucagu

SEQ ID NO: 3219684 - RNA, 15 nt, Human
cuaacauggaaguac

SEQ ID NO: 3219685 - RNA, 17 nt, Human
cuaacauggaaguacua

SEQ ID NO: 3219686 - RNA, 23 nt, Human
cuaaauugacacuuaaaaauggu

SEQ ID NO: 3219687 - RNA, 23 nt, Human
cuaaauguuaaagauguagcaaa

SEQ ID NO: 3219688 - RNA, 19 nt, Human
cuaaauguuaaagauguag

SEQ ID NO: 3219689 - RNA, 17 nt, Human
cuaaauguuaaagaugu

SEQ ID NO: 3219690 - RNA, 16 nt, Human
cuaaauguuaaagaug

SEQ ID NO: 3219691 - RNA, 15 nt, Human
cuaaauguuaaagau

SEQ ID NO: 3219692 - RNA, 14 nt, Human
cuaaauguuaaaga

SEQ ID NO: 3219693 - RNA, 17 nt, Human
cuaaauugauguugaug

SEQ ID NO: 3219694 - RNA, 18 nt, Human
cuaaauuuauuauuuaaa

SEQ ID NO: 3219695 - RNA, 14 nt, Human
cuaaauugauguug

SEQ ID NO: 3219696 - RNA, 16 nt, Human
cuaaauugauguugau

SEQ ID NO: 3219697 - RNA, 15 nt, Human
cuaaauugauguuga

SEQ ID NO: 3219698 - RNA, 16 nt, Human
cuaaauguugaaagau

SEQ ID NO: 3219699 - RNA, 13 nt, Human
cuaaauguuaaag

SEQ ID NO: 3219700 - RNA, 19 nt, Human
cguggcuucccgcucagcc

SEQ ID NO: 3219701 - RNA, 18 nt, Human
cguggcuucccgcucagc

SEQ ID NO: 3219702 - RNA, 15 nt, Human
cguggcaccuccucg

SEQ ID NO: 3219703 - RNA, 16 nt, Human
cguggcaucuuaaaag

SEQ ID NO: 3219704 - RNA, 14 nt, Human
cguggcaccuccuc

SEQ ID NO: 3219705 - RNA, 23 nt, Human
cguugcaaccacugcaauaucuu

SEQ ID NO: 3219706 - RNA, 19 nt, Human
cguugaaguugacucugcu

SEQ ID NO: 3219707 - RNA, 18 nt, Human
cguugcugacuuagaauc

SEQ ID NO: 3219708 - RNA, 17 nt, Human
cguggcugcuucaagga

SEQ ID NO: 3219709 - RNA, 21 nt, Human
cguggcuucccgcucagcccu

SEQ ID NO: 3219710 - RNA, 20 nt, Human
cguggcuucccgcucagccc

SEQ ID NO: 3219711 - RNA, 19 nt, Human
cgugcguguuuucugacug

SEQ ID NO: 3219712 - RNA, 23 nt, Human
cguggagaaucacaggcugggcu

SEQ ID NO: 3219713 - RNA, 17 nt, Human
cguggagaaucacaggc

SEQ ID NO: 3219714 - RNA, 20 nt, Human
cguggagaaucacaggcugg

SEQ ID NO: 3219715 - RNA, 18 nt, Human
cguggagaaucacaggcu

SEQ ID NO: 3219716 - RNA, 14 nt, Human
cgugcacacaccag

SEQ ID NO: 3219717 - RNA, 19 nt, Human
cgugcacacaccagagccc

SEQ ID NO: 3219718 - RNA, 18 nt, Human
cgugcacacaccagagcc

SEQ ID NO: 3219719 - RNA, 21 nt, Human
cgugcaguggugcgaucuggg

SEQ ID NO: 3219720 - RNA, 22 nt, Human
cgucugacaggcaaugcuggcu

SEQ ID NO: 3219721 - RNA, 21 nt, Human
cgucugacaggcaaugcuggc

SEQ ID NO: 3219722 - RNA, 20 nt, Human
cgucugacaggcaaugcugg

SEQ ID NO: 3219723 - RNA, 18 nt, Human
cgucuuucccaaaggcau

SEQ ID NO: 3219724 - RNA, 11 nt, Human
cgucuuuccca

SEQ ID NO: 3219725 - RNA, 16 nt, Human
cgugcacacaccagag

SEQ ID NO: 3219726 - RNA, 18 nt, Human
cggugcuaucucccccag

SEQ ID NO: 3219727 - RNA, 20 nt, Human
cggugcuaucucccccagcc

SEQ ID NO: 3219728 - RNA, 21 nt, Human
cggugcuaucucccccagccc

SEQ ID NO: 3219729 - RNA, 22 nt, Human
cggugcuaucucccccagcccc

SEQ ID NO: 3219730 - RNA, 16 nt, Human
cgucucauacucaccu

SEQ ID NO: 3219731 - RNA, 16 nt, Human
cgucuaccugaggggc

SEQ ID NO: 3219732 - RNA, 22 nt, Human
cgucuagcuaugcuguaucugu

SEQ ID NO: 3219733 - RNA, 15 nt, Human
cggcuggcuccccug

SEQ ID NO: 3219734 - RNA, 16 nt, Human
cggcuggcuccccugc

SEQ ID NO: 3219735 - RNA, 18 nt, Human
cggcuggcuccccugcag

SEQ ID NO: 3219736 - RNA, 19 nt, Human
cggcuggcuccccugcagc

SEQ ID NO: 3219737 - RNA, 21 nt, Human
cggcuggcuccccugcagccc

SEQ ID NO: 3219738 - RNA, 23 nt, Human
cggcuggccuggccccucagggu

SEQ ID NO: 3219739 - RNA, 22 nt, Human
cggcuggccuggccccucaggg

SEQ ID NO: 3219740 - RNA, 19 nt, Human
cggcuggccuggccccuca

SEQ ID NO: 3219741 - RNA, 18 nt, Human
cgggacguggcaccuccu

SEQ ID NO: 3219742 - RNA, 19 nt, Human
cgggacguggcaccuccuc

SEQ ID NO: 3219743 - RNA, 11 nt, Human
cgggacucugc

SEQ ID NO: 3219744 - RNA, 22 nt, Human
cgggaugggagccgggcaaacu

SEQ ID NO: 3219745 - RNA, 15 nt, Human
cgggcacaccuccuc

SEQ ID NO: 3219746 - RNA, 17 nt, Human
cgggauuaguacacacu

SEQ ID NO: 3219747 - RNA, 18 nt, Human
cgggaggucgaggcagga

SEQ ID NO: 3219748 - RNA, 20 nt, Human
cgggaggucgaggcaggagg

SEQ ID NO: 3219749 - RNA, 22 nt, Human
cgggcacucagaagacacugau

SEQ ID NO: 3219750 - RNA, 14 nt, Human
cgggcacucagaag

SEQ ID NO: 3219751 - RNA, 22 nt, Human
cggggacagcuccuucuguccu

SEQ ID NO: 3219752 - RNA, 12 nt, Human
cgggcagagcac

SEQ ID NO: 3219753 - RNA, 23 nt, Human
cgggggcaggggaggccaucugg

SEQ ID NO: 3219754 - RNA, 15 nt, Human
cgggggcagagaggg

SEQ ID NO: 3219755 - RNA, 23 nt, Human
cggggacagcuccuucuguccua

SEQ ID NO: 3219756 - RNA, 22 nt, Human
cggggcuucugugcaccugggc

SEQ ID NO: 3219757 - RNA, 22 nt, Human
cgggucaucuguaccucugccu

SEQ ID NO: 3219758 - RNA, 19 nt, Human
cggggugucugucuuccuu

SEQ ID NO: 3219759 - RNA, 21 nt, Human
cggggugucugucuuccuuug

SEQ ID NO: 3219760 - RNA, 12 nt, Human
cgggucuuccua

SEQ ID NO: 3219761 - RNA, 16 nt, Human
cgggucuuccuacucu

SEQ ID NO: 3219762 - RNA, 15 nt, Human
cgggucaucuguacc

SEQ ID NO: 3219763 - RNA, 19 nt, Human
cgggucacaggagggaggg

SEQ ID NO: 3219764 - RNA, 11 nt, Human
cgggucacagg

SEQ ID NO: 3219765 - RNA, 14 nt, Human
cgggugcagcaucu

SEQ ID NO: 3219766 - RNA, 22 nt, Human
cgggugcagacaaucuucuguu

SEQ ID NO: 3219767 - RNA, 17 nt, Human
cggguuauaaugaauga

SEQ ID NO: 3219768 - RNA, 21 nt, Human
cggguuuuauuguuuaaaauc

SEQ ID NO: 3219769 - RNA, 14 nt, Human
cgguaccaaugcag

SEQ ID NO: 3219770 - RNA, 13 nt, Human
cgguacccaccac

SEQ ID NO: 3219771 - RNA, 19 nt, Human
cgguaccaaugcagaacuc

SEQ ID NO: 3219772 - RNA, 20 nt, Human
cgguccacccaggagccccg

SEQ ID NO: 3219773 - RNA, 16 nt, Human
cgguccacccaggagc

SEQ ID NO: 3219774 - RNA, 15 nt, Human
cgguccacccaggag

SEQ ID NO: 3219775 - RNA, 14 nt, Human
cgguccacccagga

SEQ ID NO: 3219776 - RNA, 19 nt, Human
cggugaccucuagcccugc

SEQ ID NO: 3219777 - RNA, 21 nt, Human
cggugagaggggaacagacug

SEQ ID NO: 3219778 - RNA, 20 nt, Human
cggugagaggggaacagacu

SEQ ID NO: 3219779 - RNA, 22 nt, Human
cggucggguuuuauuguuuaaa

SEQ ID NO: 3219780 - RNA, 20 nt, Human
cgguccccacuuuauugcca

SEQ ID NO: 3219781 - RNA, 22 nt, Human
cggucucggaucaggcucccag

SEQ ID NO: 3219782 - RNA, 23 nt, Human
cggucucggaucaggcucccagg

SEQ ID NO: 3219783 - RNA, 23 nt, Human
cggucgggggggacccuccaagg

SEQ ID NO: 3219784 - RNA, 15 nt, Human
cggcuggacuuggag

SEQ ID NO: 3219785 - RNA, 11 nt, Human
cggcugcccuu

SEQ ID NO: 3219786 - RNA, 12 nt, Human
cggcugcccuuu

SEQ ID NO: 3219787 - RNA, 12 nt, Human
cggccucagagu

SEQ ID NO: 3219788 - RNA, 12 nt, Human
cggccuccaucc

SEQ ID NO: 3219789 - RNA, 24 nt, Human
cggccaggccagagggagugacag

SEQ ID NO: 3219790 - RNA, 16 nt, Human
cggccaggugccuccu

SEQ ID NO: 3219791 - RNA, 17 nt, Human
cggccaggugccuccug

SEQ ID NO: 3219792 - RNA, 18 nt, Human
cggccaggugccuccuga

SEQ ID NO: 3219793 - RNA, 19 nt, Human
cggccaggugccuccugac

SEQ ID NO: 3219794 - RNA, 19 nt, Human
cggccccugcugguucagg

SEQ ID NO: 3219795 - RNA, 18 nt, Human
cggccccugcugguucag

SEQ ID NO: 3219796 - RNA, 13 nt, Human
cggccccugcugg

SEQ ID NO: 3219797 - RNA, 13 nt, Human
cggaagagccuug

SEQ ID NO: 3219798 - RNA, 11 nt, Human
cggccaccugc

SEQ ID NO: 3219799 - RNA, 15 nt, Human
cggccaccugcggug

SEQ ID NO: 3219800 - RNA, 16 nt, Human
cggccaccugcggugc

SEQ ID NO: 3219801 - RNA, 17 nt, Human
cggccaccugcggugcu

SEQ ID NO: 3219802 - RNA, 13 nt, Human
cggcauuuguuuc

SEQ ID NO: 3219803 - RNA, 17 nt, Human
cgcccuggcccccacau

SEQ ID NO: 3219804 - RNA, 15 nt, Human
cgcccuggcccccac

SEQ ID NO: 3219805 - RNA, 14 nt, Human
cgcccuggccccca

SEQ ID NO: 3219806 - RNA, 16 nt, Human
cgcccuggcaggcagg

SEQ ID NO: 3219807 - RNA, 14 nt, Human
cgcccuggcaggca

SEQ ID NO: 3219808 - RNA, 18 nt, Human
cgccccugagcccacugu

SEQ ID NO: 3219809 - RNA, 15 nt, Human
cgccccugagcccac

SEQ ID NO: 3219810 - RNA, 14 nt, Human
cgccccugagccca

SEQ ID NO: 3219811 - RNA, 22 nt, Human
cgcccaggcuuagucacugaga

SEQ ID NO: 3219812 - RNA, 18 nt, Human
cgcccagucccagcagcc

SEQ ID NO: 3219813 - RNA, 17 nt, Human
cgcccagucccagcagc

SEQ ID NO: 3219814 - RNA, 15 nt, Human
cgcccagucccagca

SEQ ID NO: 3219815 - RNA, 14 nt, Human
cgcccagucccagc

SEQ ID NO: 3219816 - RNA, 12 nt, Human
cgcccacuuccc

SEQ ID NO: 3219817 - RNA, 13 nt, Human
cgcccacuucccu

SEQ ID NO: 3219818 - RNA, 13 nt, Human
cgccccugagccc

SEQ ID NO: 3219819 - RNA, 12 nt, Human
cgccccugagcc

SEQ ID NO: 3219820 - RNA, 21 nt, Human
cgcccagucccagcagccagc

SEQ ID NO: 3219821 - RNA, 18 nt, Human
cgccccgaaaggucaccu

SEQ ID NO: 3219822 - RNA, 23 nt, Human
cgccaggggaaaaucagccugcu

SEQ ID NO: 3219823 - RNA, 16 nt, Human
cgccaggacuuggccu

SEQ ID NO: 3219824 - RNA, 14 nt, Human
cgccaucccagccc

SEQ ID NO: 3219825 - RNA, 16 nt, Human
cgccaucccagcccca

SEQ ID NO: 3219826 - RNA, 17 nt, Human
ccucugcccacucccug

SEQ ID NO: 3219827 - RNA, 19 nt, Human
ccucugcccacucccugca

SEQ ID NO: 3219828 - RNA, 20 nt, Human
ccucugcccacucccugcaa

SEQ ID NO: 3219829 - RNA, 22 nt, Human
cgccagauucuuuccugaggcu

SEQ ID NO: 3219830 - RNA, 14 nt, Human
cgcucucuggccuu

SEQ ID NO: 3219831 - RNA, 15 nt, Human
cgcucucuggccuuc

SEQ ID NO: 3219832 - RNA, 15 nt, Human
cgcuccaacuccaac

SEQ ID NO: 3219833 - RNA, 14 nt, Human
cgcuccaacuccaa

SEQ ID NO: 3219834 - RNA, 18 nt, Human
cgcucauucagcaucuga

SEQ ID NO: 3219835 - RNA, 16 nt, Human
cgcucauucagcaucu

SEQ ID NO: 3219836 - RNA, 22 nt, Human
cgcuacauuuccgccacauccc

SEQ ID NO: 3219837 - RNA, 16 nt, Human
cgcuacccgggaaggg

SEQ ID NO: 3219838 - RNA, 12 nt, Human
cgcucagcccuc

SEQ ID NO: 3219839 - RNA, 21 nt, Human
cgcucagcccucccugccccu

SEQ ID NO: 3219840 - RNA, 16 nt, Human
cgcucagcccucccug

SEQ ID NO: 3219841 - RNA, 22 nt, Human
cgcuaagagggagggagggcuc

SEQ ID NO: 3219842 - RNA, 21 nt, Human
cgcuaagagggagggagggcu

SEQ ID NO: 3219843 - RNA, 15 nt, Human
cgcggcgggcccugc

SEQ ID NO: 3219844 - RNA, 20 nt, Human
cgcggccucuucucucagac

SEQ ID NO: 3219845 - RNA, 17 nt, Human
cgcggacauccccugcu

SEQ ID NO: 3219846 - RNA, 20 nt, Human
cgcgccccgaaaggucaccu

SEQ ID NO: 3219847 - RNA, 22 nt, Human
cgcugucagccauuccuguucc

SEQ ID NO: 3219848 - RNA, 16 nt, Human
cgcugugcugcccugc

SEQ ID NO: 3219849 - RNA, 17 nt, Human
cgcugugcugcccugcc

SEQ ID NO: 3219850 - RNA, 15 nt, Human
cgcugugcugcccug

SEQ ID NO: 3219851 - RNA, 15 nt, Human
cucuugaacuccuga

SEQ ID NO: 3219852 - RNA, 19 nt, Human
cucuuggguucaagcgauu

SEQ ID NO: 3219853 - RNA, 21 nt, Human
cucuuggguucaagcgauucu

SEQ ID NO: 3219854 - RNA, 22 nt, Human
cucuucuuuaaagggauggcaa

SEQ ID NO: 3219855 - RNA, 12 nt, Human
cucuucuguguu

SEQ ID NO: 3219856 - RNA, 18 nt, Human
cucuucuggguuccuucc

SEQ ID NO: 3219857 - RNA, 21 nt, Human
cucuuccuccugacaccccac

SEQ ID NO: 3219858 - RNA, 18 nt, Human
cucuuccuccugacaccc

SEQ ID NO: 3219859 - RNA, 16 nt, Human
cucuuccuccugacac

SEQ ID NO: 3219860 - RNA, 14 nt, Human
cucuuccuccugac

SEQ ID NO: 3219861 - RNA, 19 nt, Human
cucuuccuccaaggacaga

SEQ ID NO: 3219862 - RNA, 11 nt, Human
cucuuccucca

SEQ ID NO: 3219863 - RNA, 14 nt, Human
cucuucuucucaag

SEQ ID NO: 3219864 - RNA, 13 nt, Human
cucuucuuagccu

SEQ ID NO: 3219865 - RNA, 19 nt, Human
cucuucuuauacagauaaa

SEQ ID NO: 3219866 - RNA, 13 nt, Human
cucuucuguguuu

SEQ ID NO: 3219867 - RNA, 23 nt, Human
cucuucccugaacuuccugcuuc

SEQ ID NO: 3219868 - RNA, 21 nt, Human
cucuucccugguaagaaaaag

SEQ ID NO: 3219869 - RNA, 14 nt, Human
cucuuccaggcagc

SEQ ID NO: 3219870 - RNA, 13 nt, Human
cucuuccaggcag

SEQ ID NO: 3219871 - RNA, 22 nt, Human
cucuucccugaacuuccugcuu

SEQ ID NO: 3219872 - RNA, 15 nt, Human
cucuuccaggcagcc

SEQ ID NO: 3219873 - RNA, 20 nt, Human
cucuucccugaacuuccugc

SEQ ID NO: 3219874 - RNA, 14 nt, Human
cucuuccuagcugg

SEQ ID NO: 3219875 - RNA, 17 nt, Human
cucuuucccucccuucc

SEQ ID NO: 3219876 - RNA, 13 nt, Human
cucuuucccuccc

SEQ ID NO: 3219877 - RNA, 23 nt, Human
cucuuuaaugucacaggcagguc

SEQ ID NO: 3219878 - RNA, 22 nt, Human
cucuuuaaugucacaggcaggu

SEQ ID NO: 3219879 - RNA, 21 nt, Human
cucuuuaaugucacaggcagg

SEQ ID NO: 3219880 - RNA, 20 nt, Human
cucuuuaaugucacaggcag

SEQ ID NO: 3219881 - RNA, 13 nt, Human
cucuugguccugc

SEQ ID NO: 3219882 - RNA, 15 nt, Human
cucuugguccugcug

SEQ ID NO: 3219883 - RNA, 16 nt, Human
cucuugguccugcugc

SEQ ID NO: 3219884 - RNA, 18 nt, Human
cucuuuaaugucacaggc

SEQ ID NO: 3219885 - RNA, 19 nt, Human
cucuuuaacuuguaauaaa

SEQ ID NO: 3219886 - RNA, 17 nt, Human
cucuuuaacuuguaaua

SEQ ID NO: 3219887 - RNA, 13 nt, Human
cucuuguuucucc

SEQ ID NO: 3219888 - RNA, 20 nt, Human
cucuuguucuuacuuuccug

SEQ ID NO: 3219889 - RNA, 19 nt, Human
cucuuguucuuacuuuccu

SEQ ID NO: 3219890 - RNA, 16 nt, Human
cucuuguucuuacuuu

SEQ ID NO: 3219891 - RNA, 19 nt, Human
cugaagaauugaaaaacca

SEQ ID NO: 3219892 - RNA, 18 nt, Human
cugaacguuugguucaaa

SEQ ID NO: 3219893 - RNA, 23 nt, Human
cugaacguuugguucaaaugugu

SEQ ID NO: 3219894 - RNA, 16 nt, Human
cugaacucugacaaca

SEQ ID NO: 3219895 - RNA, 17 nt, Human
cugaacucugacaacag

SEQ ID NO: 3219896 - RNA, 22 nt, Human
cugaacacugaagucaguucuc

SEQ ID NO: 3219897 - RNA, 22 nt, Human
cugaacagaugaccccugccca

SEQ ID NO: 3219898 - RNA, 24 nt, Human
cugaacagaugaccccugcccaga

SEQ ID NO: 3219899 - RNA, 13 nt, Human
cugaaauuuuaga

SEQ ID NO: 3219900 - RNA, 18 nt, Human
cugaaauuuuagaaauau

SEQ ID NO: 3219901 - RNA, 22 nt, Human
cugaaauuuuagaaauauucac

SEQ ID NO: 3219902 - RNA, 21 nt, Human
cugaaauugaaaaguuauuuc

SEQ ID NO: 3219903 - RNA, 20 nt, Human
cugaaauugaaaaguuauuu

SEQ ID NO: 3219904 - RNA, 13 nt, Human
cugaaauccuggu

SEQ ID NO: 3219905 - RNA, 14 nt, Human
cugaaauccugguu

SEQ ID NO: 3219906 - RNA, 15 nt, Human
cugaaauccugguuc

SEQ ID NO: 3219907 - RNA, 16 nt, Human
cugaaauccugguucc

SEQ ID NO: 3219908 - RNA, 17 nt, Human
cugaaauccugguuccu

SEQ ID NO: 3219909 - RNA, 15 nt, Human
cugaaauugaaaagu

SEQ ID NO: 3219910 - RNA, 14 nt, Human
cugaaauugaaaag

SEQ ID NO: 3219911 - RNA, 15 nt, Human
cugaaagcccugagc

SEQ ID NO: 3219912 - RNA, 19 nt, Human
cucuuucuucuuccacaca

SEQ ID NO: 3219913 - RNA, 11 nt, Human
cucuuugaaac

SEQ ID NO: 3219914 - RNA, 13 nt, Human
cucuuucccuucc

SEQ ID NO: 3219915 - RNA, 23 nt, Human
cucuuucccuuccaguuuauucc

SEQ ID NO: 3219916 - RNA, 17 nt, Human
cucuuucccuuccaguu

SEQ ID NO: 3219917 - RNA, 16 nt, Human
cugaaagcccugagcu

SEQ ID NO: 3219918 - RNA, 17 nt, Human
cugaaagcccugagcuu

SEQ ID NO: 3219919 - RNA, 18 nt, Human
cugaaagcccugagcuuu

SEQ ID NO: 3219920 - RNA, 19 nt, Human
cugaaagcccugagcuuuc

SEQ ID NO: 3219921 - RNA, 23 nt, Human
cugaaagcccugagcuuucugcu

SEQ ID NO: 3219922 - RNA, 22 nt, Human
cugaaauagacccacaagaggc

SEQ ID NO: 3219923 - RNA, 14 nt, Human
cugaaauauaaagu

SEQ ID NO: 3219924 - RNA, 22 nt, Human
cucugugcccacccuccacucu

SEQ ID NO: 3219925 - RNA, 22 nt, Human
cucuggcuccagcuggccggga

SEQ ID NO: 3219926 - RNA, 15 nt, Human
cucuggcucuacaca

SEQ ID NO: 3219927 - RNA, 15 nt, Human
cucugugucaggugg

SEQ ID NO: 3219928 - RNA, 22 nt, Human
cucuguuacacuuuuuggaagu

SEQ ID NO: 3219929 - RNA, 13 nt, Human
cucuuagaaaaac

SEQ ID NO: 3219930 - RNA, 15 nt, Human
cucuuagaaaaacca

SEQ ID NO: 3219931 - RNA, 14 nt, Human
cucuuccaggcugg

SEQ ID NO: 3219932 - RNA, 15 nt, Human
cucuuccaggcuggg

SEQ ID NO: 3219933 - RNA, 13 nt, Human
cucuuccaggcug

SEQ ID NO: 3219934 - RNA, 16 nt, Human
cucuuccaaccauuua

SEQ ID NO: 3219935 - RNA, 14 nt, Human
cucuggacaggcau

SEQ ID NO: 3219936 - RNA, 16 nt, Human
cucuggacaggcaugu

SEQ ID NO: 3219937 - RNA, 12 nt, Human
cucuggcagcuc

SEQ ID NO: 3219938 - RNA, 14 nt, Human
cucuggcagcucag

SEQ ID NO: 3219939 - RNA, 12 nt, Human
cucuggccuucg

SEQ ID NO: 3219940 - RNA, 15 nt, Human
cucuggcagcucaga

SEQ ID NO: 3219941 - RNA, 15 nt, Human
cucuggcuccagcug

SEQ ID NO: 3219942 - RNA, 16 nt, Human
cucuggcuccagcugg

SEQ ID NO: 3219943 - RNA, 15 nt, Human
cucuggacaggcaug

SEQ ID NO: 3219944 - RNA, 11 nt, Human
cucugcugugg

SEQ ID NO: 3219945 - RNA, 22 nt, Human
cucugcugugggcacaggucag

SEQ ID NO: 3219946 - RNA, 21 nt, Human
cucugccugaagucacacagu

SEQ ID NO: 3219947 - RNA, 10 nt, Human
cucugccuga

SEQ ID NO: 3219948 - RNA, 22 nt, Human
cucugccugaagucacacagug

SEQ ID NO: 3219949 - RNA, 17 nt, Human
cucucugaaggaggcca

SEQ ID NO: 3219950 - RNA, 13 nt, Human
cucucuccucccu

SEQ ID NO: 3219951 - RNA, 17 nt, Human
cucucuccccugcucca

SEQ ID NO: 3219952 - RNA, 22 nt, Human
cugaagauuguuuaucuagaug

SEQ ID NO: 3219953 - RNA, 15 nt, Human
cugacagccagaacu

SEQ ID NO: 3219954 - RNA, 14 nt, Human
cugacagccagaac

SEQ ID NO: 3219955 - RNA, 16 nt, Human
cugacagccagaacuc

SEQ ID NO: 3219956 - RNA, 14 nt, Human
cugaagauuguuua

SEQ ID NO: 3219957 - RNA, 16 nt, Human
cugaagauuguuuauc

SEQ ID NO: 3219958 - RNA, 15 nt, Human
cugaagauuguuuau

SEQ ID NO: 3219959 - RNA, 21 nt, Human
cugacauuguuggccaaagcc

SEQ ID NO: 3219960 - RNA, 21 nt, Human
cugacaggcaaugcuggcugu

SEQ ID NO: 3219961 - RNA, 19 nt, Human
cugacaucagagguaucuu

SEQ ID NO: 3219962 - RNA, 13 nt, Human
cugacccaugcug

SEQ ID NO: 3219963 - RNA, 14 nt, Human
cugacccacugcuu

SEQ ID NO: 3219964 - RNA, 13 nt, Human
cugacccacugcu

SEQ ID NO: 3219965 - RNA, 14 nt, Human
cugacccaugcugc

SEQ ID NO: 3219966 - RNA, 15 nt, Human
cugacccaugcugcc

SEQ ID NO: 3219967 - RNA, 16 nt, Human
cugacccaugcugccc

SEQ ID NO: 3219968 - RNA, 12 nt, Human
cugacccacugc

SEQ ID NO: 3219969 - RNA, 22 nt, Human
cugacauuguuggccaaagcca

SEQ ID NO: 3219970 - RNA, 14 nt, Human
cugaccaaguuucu

SEQ ID NO: 3219971 - RNA, 16 nt, Human
cugacuguuuucucuu

SEQ ID NO: 3219972 - RNA, 16 nt, Human
cugacuucuaaguaaa

SEQ ID NO: 3219973 - RNA, 14 nt, Human
cugacuucuguuua

SEQ ID NO: 3219974 - RNA, 15 nt, Human
cugacuucuaaguaa

SEQ ID NO: 3219975 - RNA, 13 nt, Human
cugacuucuaagu

SEQ ID NO: 3219976 - RNA, 18 nt, Human
cugacuguuuucucuuga

SEQ ID NO: 3219977 - RNA, 12 nt, Human
cugacuuagaau

SEQ ID NO: 3219978 - RNA, 22 nt, Human
cugacuuagaaucccuguguua

SEQ ID NO: 3219979 - RNA, 23 nt, Human
cugagaaagacuauucaaacagu

SEQ ID NO: 3219980 - RNA, 22 nt, Human
cugagaaagacuauucaaacag

SEQ ID NO: 3219981 - RNA, 14 nt, Human
cugagacagcccgg

SEQ ID NO: 3219982 - RNA, 15 nt, Human
cugagacagcccggg

SEQ ID NO: 3219983 - RNA, 18 nt, Human
cugagaaugaacaaagac

SEQ ID NO: 3219984 - RNA, 17 nt, Human
cugagaaugaacaaaga

SEQ ID NO: 3219985 - RNA, 21 nt, Human
cugaggauauggacacuggug

SEQ ID NO: 3219986 - RNA, 19 nt, Human
cugaggcagguccccagac

SEQ ID NO: 3219987 - RNA, 18 nt, Human
cugaggcagguccccaga

SEQ ID NO: 3219988 - RNA, 17 nt, Human
cugaggcagguccccag

SEQ ID NO: 3219989 - RNA, 14 nt, Human
cugaggcagguccc

SEQ ID NO: 3219990 - RNA, 17 nt, Human
cugaggcaguuugagga

SEQ ID NO: 3219991 - RNA, 12 nt, Human
cugaggcccaga

SEQ ID NO: 3219992 - RNA, 13 nt, Human
cugaggcccagag

SEQ ID NO: 3219993 - RNA, 14 nt, Human
cugaggcccagagg

SEQ ID NO: 3219994 - RNA, 15 nt, Human
cugaggcccagaggg

SEQ ID NO: 3219995 - RNA, 16 nt, Human
cugaggcccagagggc

SEQ ID NO: 3219996 - RNA, 17 nt, Human
cugaggcccagagggcc

SEQ ID NO: 3219997 - RNA, 18 nt, Human
cugaggcccagagggccu

SEQ ID NO: 3219998 - RNA, 19 nt, Human
cugaggcccagagggccug

SEQ ID NO: 3219999 - RNA, 21 nt, Human
cugaggcccagagggccugca

SEQ ID NO: 3220000 - RNA, 23 nt, Human
cugaggcccagagggccugcaag

SEQ ID NO: 3220001 - RNA, 14 nt, Human
cugaggcccuucuc

SEQ ID NO: 3220002 - RNA, 15 nt, Human
cugaggcccuucucu

SEQ ID NO: 3220003 - RNA, 18 nt, Human
cugaggcccuucucucca

SEQ ID NO: 3220004 - RNA, 19 nt, Human
cugaggcccuucucuccag

SEQ ID NO: 3220005 - RNA, 20 nt, Human
cugaggcccuucucuccagc

SEQ ID NO: 3220006 - RNA, 16 nt, Human
cugagcgacagugaga

SEQ ID NO: 3220007 - RNA, 20 nt, Human
cugagcgacagugagacucu

SEQ ID NO: 3220008 - RNA, 17 nt, Human
cugagccuucugagcug

SEQ ID NO: 3220009 - RNA, 15 nt, Human
cugagccuucugagc

SEQ ID NO: 3220010 - RNA, 14 nt, Human
cugagccuucugag

SEQ ID NO: 3220011 - RNA, 13 nt, Human
cugagccuucuga

SEQ ID NO: 3220012 - RNA, 22 nt, Human
cugagccucagucucccucccu

SEQ ID NO: 3220013 - RNA, 16 nt, Human
cugagacagcccgggc

SEQ ID NO: 3220014 - RNA, 17 nt, Human
cugagacagcccgggcu

SEQ ID NO: 3220015 - RNA, 18 nt, Human
cugagacagcccgggcuc

SEQ ID NO: 3220016 - RNA, 17 nt, Human
cugagccagauuucacu

SEQ ID NO: 3220017 - RNA, 18 nt, Human
cugagccagauuucacuc

SEQ ID NO: 3220018 - RNA, 19 nt, Human
cugagccagauuucacucu

SEQ ID NO: 3220019 - RNA, 20 nt, Human
cugagccagauuucacucuc

SEQ ID NO: 3220020 - RNA, 21 nt, Human
cugagccagauuucacucucc

SEQ ID NO: 3220021 - RNA, 15 nt, Human
cugagccagauuuca

SEQ ID NO: 3220022 - RNA, 16 nt, Human
cugagccucagucucc

SEQ ID NO: 3220023 - RNA, 21 nt, Human
cugagccucagucucccuccc

SEQ ID NO: 3220024 - RNA, 16 nt, Human
cugagccgcagagaag

SEQ ID NO: 3220025 - RNA, 15 nt, Human
cugagccgcagagaa

SEQ ID NO: 3220026 - RNA, 14 nt, Human
cugagccgcagaga

SEQ ID NO: 3220027 - RNA, 11 nt, Human
cucuccacugc

SEQ ID NO: 3220028 - RNA, 14 nt, Human
cucuccagccccug

SEQ ID NO: 3220029 - RNA, 14 nt, Human
cucuccacugccuu

SEQ ID NO: 3220030 - RNA, 12 nt, Human
cucuccacugcc

SEQ ID NO: 3220031 - RNA, 15 nt, Human
cucuccagccccugg

SEQ ID NO: 3220032 - RNA, 16 nt, Human
cucuccagccccugga

SEQ ID NO: 3220033 - RNA, 17 nt, Human
cucuccagccccuggau

SEQ ID NO: 3220034 - RNA, 18 nt, Human
cucuccagccccuggaug

SEQ ID NO: 3220035 - RNA, 17 nt, Human
cucucaggccagcugcu

SEQ ID NO: 3220036 - RNA, 18 nt, Human
cucucaggccagcugcuu

SEQ ID NO: 3220037 - RNA, 19 nt, Human
cucucaggccagcugcuug

SEQ ID NO: 3220038 - RNA, 21 nt, Human
cucucaggccagcugcuuggg

SEQ ID NO: 3220039 - RNA, 14 nt, Human
cucucauuugugug

SEQ ID NO: 3220040 - RNA, 22 nt, Human
cucucaugcugccccugccuug

SEQ ID NO: 3220041 - RNA, 21 nt, Human
cucucaugcugccccugccuu

SEQ ID NO: 3220042 - RNA, 19 nt, Human
cucucaugcugccccugcc

SEQ ID NO: 3220043 - RNA, 16 nt, Human
cucucaugcugccccu

SEQ ID NO: 3220044 - RNA, 22 nt, Human
cucucaggccaaacucaccugc

SEQ ID NO: 3220045 - RNA, 23 nt, Human
cucucaggccaaacucaccugcc

SEQ ID NO: 3220046 - RNA, 13 nt, Human
cucucaggccagc

SEQ ID NO: 3220047 - RNA, 15 nt, Human
cucucaggccagcug

SEQ ID NO: 3220048 - RNA, 20 nt, Human
cucucaggccaaacucaccu

SEQ ID NO: 3220049 - RNA, 21 nt, Human
cucucaggccaaacucaccug

SEQ ID NO: 3220050 - RNA, 12 nt, Human
cucucaggccaa

SEQ ID NO: 3220051 - RNA, 22 nt, Human
cucuauaagcaaauugcuuuuu

SEQ ID NO: 3220052 - RNA, 20 nt, Human
cucuagugcugugaaaaaaa

SEQ ID NO: 3220053 - RNA, 19 nt, Human
cucuagugcugugaaaaaa

SEQ ID NO: 3220054 - RNA, 18 nt, Human
cucuagugcugugaaaaa

SEQ ID NO: 3220055 - RNA, 13 nt, Human
cucuagugcugug

SEQ ID NO: 3220056 - RNA, 12 nt, Human
cucuagugcugu

SEQ ID NO: 3220057 - RNA, 17 nt, Human
cucuagugcugugaaaa

SEQ ID NO: 3220058 - RNA, 16 nt, Human
cucuagugcugugaaa

SEQ ID NO: 3220059 - RNA, 15 nt, Human
cucuagugcugugaa

SEQ ID NO: 3220060 - RNA, 14 nt, Human
cucuagugcuguga

SEQ ID NO: 3220061 - RNA, 18 nt, Human
cucuccuuaaaugcuucu

SEQ ID NO: 3220062 - RNA, 12 nt, Human
cucucucacucc

SEQ ID NO: 3220063 - RNA, 22 nt, Human
cucucuauuucccccuuucuuc

SEQ ID NO: 3220064 - RNA, 21 nt, Human
cucucuauuucccccuuucuu

SEQ ID NO: 3220065 - RNA, 14 nt, Human
cucucuacuggucc

SEQ ID NO: 3220066 - RNA, 13 nt, Human
cucucucaggcca

SEQ ID NO: 3220067 - RNA, 21 nt, Human
cucucucaauuuuugguugaa

SEQ ID NO: 3220068 - RNA, 15 nt, Human
cucucucaaaauuau

SEQ ID NO: 3220069 - RNA, 22 nt, Human
cucuccucuugccacugccucu

SEQ ID NO: 3220070 - RNA, 19 nt, Human
cucuccucuugccacugcc

SEQ ID NO: 3220071 - RNA, 17 nt, Human
cucuccucuugccacug

SEQ ID NO: 3220072 - RNA, 16 nt, Human
cucuccucuugccacu

SEQ ID NO: 3220073 - RNA, 15 nt, Human
cucuccucuugccac

SEQ ID NO: 3220074 - RNA, 14 nt, Human
cucuccucuugcca

SEQ ID NO: 3220075 - RNA, 13 nt, Human
cucuccucugcug

SEQ ID NO: 3220076 - RNA, 14 nt, Human
cucuccucugcugc

SEQ ID NO: 3220077 - RNA, 15 nt, Human
cucuccucugcugcu

SEQ ID NO: 3220078 - RNA, 18 nt, Human
cucuccucugcugcuggc

SEQ ID NO: 3220079 - RNA, 13 nt, Human
cucuccccagcaa

SEQ ID NO: 3220080 - RNA, 19 nt, Human
cucuccagccccuggaugc

SEQ ID NO: 3220081 - RNA, 12 nt, Human
cucuccucugcu

SEQ ID NO: 3220082 - RNA, 22 nt, Human
cucuccccagcaagugagagcu

SEQ ID NO: 3220083 - RNA, 14 nt, Human
cucuccccagcaag

SEQ ID NO: 3220084 - RNA, 21 nt, Human
cucuacugggagccuacccac

SEQ ID NO: 3220085 - RNA, 18 nt, Human
cucuacugggagccuacc

SEQ ID NO: 3220086 - RNA, 16 nt, Human
cucuacuuagcauguc

SEQ ID NO: 3220087 - RNA, 20 nt, Human
cucuacuuagcaugucccua

SEQ ID NO: 3220088 - RNA, 19 nt, Human
cucuacuuagcaugucccu

SEQ ID NO: 3220089 - RNA, 17 nt, Human
cucuacuuagcaugucc

SEQ ID NO: 3220090 - RNA, 13 nt, Human
cucuacccuggca

SEQ ID NO: 3220091 - RNA, 20 nt, Human
cucuaccauccccuguagag

SEQ ID NO: 3220092 - RNA, 12 nt, Human
cucuagcugaau

SEQ ID NO: 3220093 - RNA, 11 nt, Human
cucuagcugaa

SEQ ID NO: 3220094 - RNA, 15 nt, Human
cucuagcugaauuga

SEQ ID NO: 3220095 - RNA, 13 nt, Human
cucuagcugaauu

SEQ ID NO: 3220096 - RNA, 16 nt, Human
cucuagcccugcccgg

SEQ ID NO: 3220097 - RNA, 14 nt, Human
cucuagcccugccc

SEQ ID NO: 3220098 - RNA, 23 nt, Human
cucuagagaaguggacuggagga

SEQ ID NO: 3220099 - RNA, 18 nt, Human
cucuagagaaguggacug

SEQ ID NO: 3220100 - RNA, 23 nt, Human
cucuagaguagagguauaauugu

SEQ ID NO: 3220101 - RNA, 21 nt, Human
cucuagaguagagguauaauu

SEQ ID NO: 3220102 - RNA, 20 nt, Human
cucuagaauuuuaagccuuu

SEQ ID NO: 3220103 - RNA, 15 nt, Human
cucuagaauuuuaag

SEQ ID NO: 3220104 - RNA, 22 nt, Human
cucuagaaaggggauuacaguu

SEQ ID NO: 3220105 - RNA, 16 nt, Human
cucuaggauguauauu

SEQ ID NO: 3220106 - RNA, 22 nt, Human
cucuaggauguauauuuuauau

SEQ ID NO: 3220107 - RNA, 23 nt, Human
cucuagggaaaaaccagcgugug

SEQ ID NO: 3220108 - RNA, 18 nt, Human
cucuagggaccagaacca

SEQ ID NO: 3220109 - RNA, 16 nt, Human
cucuaguacugugaau

SEQ ID NO: 3220110 - RNA, 14 nt, Human
cucuaguacuguga

SEQ ID NO: 3220111 - RNA, 23 nt, Human
cucuaagauguuauauuuuucuu

SEQ ID NO: 3220112 - RNA, 19 nt, Human
cucuaagauguuauauuuu

SEQ ID NO: 3220113 - RNA, 18 nt, Human
cucuaagauguuauauuu

SEQ ID NO: 3220114 - RNA, 13 nt, Human
cucuacaaaaagc

SEQ ID NO: 3220115 - RNA, 12 nt, Human
cucuaagauguu

SEQ ID NO: 3220116 - RNA, 17 nt, Human
cucuaagauguuauauu

SEQ ID NO: 3220117 - RNA, 15 nt, Human
cucuaagauguuaua

SEQ ID NO: 3220118 - RNA, 16 nt, Human
cucuaacuguauauuu

SEQ ID NO: 3220119 - RNA, 17 nt, Human
cucuaacuguauauuug

SEQ ID NO: 3220120 - RNA, 20 nt, Human
cucuaacuguauauuuguau

SEQ ID NO: 3220121 - RNA, 21 nt, Human
cucuaacuguauauuuguaug

SEQ ID NO: 3220122 - RNA, 13 nt, Human
cucggcuggcucc

SEQ ID NO: 3220123 - RNA, 14 nt, Human
cucggcuggcuccc

SEQ ID NO: 3220124 - RNA, 16 nt, Human
cucggcuggcuccccu

SEQ ID NO: 3220125 - RNA, 21 nt, Human
cucggcuggcuccccugcagc

SEQ ID NO: 3220126 - RNA, 22 nt, Human
cucggcuggcuccccugcagcc

SEQ ID NO: 3220127 - RNA, 23 nt, Human
cucggcuggcuccccugcagccc

SEQ ID NO: 3220128 - RNA, 16 nt, Human
cucuacagaggccaug

SEQ ID NO: 3220129 - RNA, 14 nt, Human
cucuacagaggcca

SEQ ID NO: 3220130 - RNA, 19 nt, Human
cucuacagaggccaugggc

SEQ ID NO: 3220131 - RNA, 21 nt, Human
cucuacagcuaaucagcauuc

SEQ ID NO: 3220132 - RNA, 13 nt, Human
cucuacagaggcc

SEQ ID NO: 3220133 - RNA, 11 nt, Human
cucuaauuucc

SEQ ID NO: 3220134 - RNA, 11 nt, Human
cucgcuucuuu

SEQ ID NO: 3220135 - RNA, 14 nt, Human
cucggcucacugca

SEQ ID NO: 3220136 - RNA, 15 nt, Human
cucggaguucuucuu

SEQ ID NO: 3220137 - RNA, 17 nt, Human
cucggcucacugcaucc

SEQ ID NO: 3220138 - RNA, 18 nt, Human
cucggcucacugcauccu

SEQ ID NO: 3220139 - RNA, 16 nt, Human
cucggaguucuucuug

SEQ ID NO: 3220140 - RNA, 16 nt, Human
cuccuucacagauggg

SEQ ID NO: 3220141 - RNA, 17 nt, Human
cuccuucacagaugggu

SEQ ID NO: 3220142 - RNA, 14 nt, Human
cuccugugugugcg

SEQ ID NO: 3220143 - RNA, 23 nt, Human
cuccuucaacaaggcuugcugca

SEQ ID NO: 3220144 - RNA, 19 nt, Human
cuccuucacagaugggugc

SEQ ID NO: 3220145 - RNA, 18 nt, Human
cucacuauguugcccagg

SEQ ID NO: 3220146 - RNA, 16 nt, Human
cuccauccuccuccuu

SEQ ID NO: 3220147 - RNA, 18 nt, Human
cuccauccugaggcucca

SEQ ID NO: 3220148 - RNA, 14 nt, Human
cuccaucuccacuc

SEQ ID NO: 3220149 - RNA, 14 nt, Human
cuccauccugaggc

SEQ ID NO: 3220150 - RNA, 16 nt, Human
cuccauccugaggcuc

SEQ ID NO: 3220151 - RNA, 13 nt, Human
cuccaugugggcu

SEQ ID NO: 3220152 - RNA, 17 nt, Human
cucccaaagugcuggga

SEQ ID NO: 3220153 - RNA, 13 nt, Human
cuccaugucucug

SEQ ID NO: 3220154 - RNA, 22 nt, Human
cuccaugucucugagcauuaga

SEQ ID NO: 3220155 - RNA, 19 nt, Human
cuccauccuccuccuuccu

SEQ ID NO: 3220156 - RNA, 17 nt, Human
cuccauccuccuccuuc

SEQ ID NO: 3220157 - RNA, 16 nt, Human
cuccaucuccacucca

SEQ ID NO: 3220158 - RNA, 21 nt, Human
cucccaucucacacaugagca

SEQ ID NO: 3220159 - RNA, 11 nt, Human
cucccaucugu

SEQ ID NO: 3220160 - RNA, 14 nt, Human
cucccaucugugaa

SEQ ID NO: 3220161 - RNA, 15 nt, Human
cucccaucugugaaa

SEQ ID NO: 3220162 - RNA, 18 nt, Human
cucccaucugugaaagga

SEQ ID NO: 3220163 - RNA, 23 nt, Human
cucccaucugugaaaggaaagag

SEQ ID NO: 3220164 - RNA, 16 nt, Human
cucccaacucacccca

SEQ ID NO: 3220165 - RNA, 17 nt, Human
cucccaacucaccccag

SEQ ID NO: 3220166 - RNA, 18 nt, Human
cucccaaagugcugggau

SEQ ID NO: 3220167 - RNA, 22 nt, Human
cucccaaagugcugggauuaca

SEQ ID NO: 3220168 - RNA, 22 nt, Human
cucccaacucaccccagcccca

SEQ ID NO: 3220169 - RNA, 12 nt, Human
cuccccugcugg

SEQ ID NO: 3220170 - RNA, 20 nt, Human
cuccccagccccaucccaaa

SEQ ID NO: 3220171 - RNA, 20 nt, Human
cuccccagcaagugagagcu

SEQ ID NO: 3220172 - RNA, 12 nt, Human
cuccccagcaag

SEQ ID NO: 3220173 - RNA, 23 nt, Human
cuccccaaggcccccugccugcc

SEQ ID NO: 3220174 - RNA, 17 nt, Human
cuccccaaggcccccug

SEQ ID NO: 3220175 - RNA, 22 nt, Human
cuccccaaggcccccugccugc

SEQ ID NO: 3220176 - RNA, 21 nt, Human
cuccccaaggcccccugccug

SEQ ID NO: 3220177 - RNA, 20 nt, Human
cucccaucuuuuguuacucu

SEQ ID NO: 3220178 - RNA, 17 nt, Human
cucccgaguagcuggga

SEQ ID NO: 3220179 - RNA, 16 nt, Human
cucccgaguagcuggg

SEQ ID NO: 3220180 - RNA, 18 nt, Human
cucccgaauagcugggac

SEQ ID NO: 3220181 - RNA, 15 nt, Human
cucccgaguagcugg

SEQ ID NO: 3220182 - RNA, 13 nt, Human
cuccccugcuggg

SEQ ID NO: 3220183 - RNA, 16 nt, Human
cucccgaauagcuggg

SEQ ID NO: 3220184 - RNA, 17 nt, Human
cucccgaauagcuggga

SEQ ID NO: 3220185 - RNA, 18 nt, Human
cucccggcccugccugcu

SEQ ID NO: 3220186 - RNA, 17 nt, Human
cucccggcccugccugc

SEQ ID NO: 3220187 - RNA, 16 nt, Human
cucccggcccugccug

SEQ ID NO: 3220188 - RNA, 15 nt, Human
cucccggcccugccu

SEQ ID NO: 3220189 - RNA, 15 nt, Human
cucccgcuccgggcu

SEQ ID NO: 3220190 - RNA, 17 nt, Human
cucccgcuccgggcucc

SEQ ID NO: 3220191 - RNA, 16 nt, Human
cucccuacuuucuuag

SEQ ID NO: 3220192 - RNA, 20 nt, Human
cucccggcuaugggggcacu

SEQ ID NO: 3220193 - RNA, 15 nt, Human
cucccgggacucugc

SEQ ID NO: 3220194 - RNA, 22 nt, Human
cuccucuccccagcaagugaga

SEQ ID NO: 3220195 - RNA, 14 nt, Human
cuccucccggugcc

SEQ ID NO: 3220196 - RNA, 14 nt, Human
cuccucccucccag

SEQ ID NO: 3220197 - RNA, 13 nt, Human
cuccuccuuccua

SEQ ID NO: 3220198 - RNA, 15 nt, Human
cuccuccuuccuagu

SEQ ID NO: 3220199 - RNA, 14 nt, Human
cuccuccuuccuag

SEQ ID NO: 3220200 - RNA, 17 nt, Human
cuccucccggugcccaa

SEQ ID NO: 3220201 - RNA, 15 nt, Human
cuccucccggugccc

SEQ ID NO: 3220202 - RNA, 22 nt, Human
cuccuccagccgccaugcuccu

SEQ ID NO: 3220203 - RNA, 17 nt, Human
cucccuuucuucccuac

SEQ ID NO: 3220204 - RNA, 18 nt, Human
cucccucagucuggcccu

SEQ ID NO: 3220205 - RNA, 13 nt, Human
cucccucauucca

SEQ ID NO: 3220206 - RNA, 18 nt, Human
cuccgaaaugcugucuuu

SEQ ID NO: 3220207 - RNA, 17 nt, Human
cuccgaaaugcugucuu

SEQ ID NO: 3220208 - RNA, 16 nt, Human
cuccgaaaugcugucu

SEQ ID NO: 3220209 - RNA, 15 nt, Human
cuccgaaaugcuguc

SEQ ID NO: 3220210 - RNA, 16 nt, Human
cuccgccccugagccc

SEQ ID NO: 3220211 - RNA, 15 nt, Human
cuccgccccugagcc

SEQ ID NO: 3220212 - RNA, 14 nt, Human
cuccgccccugagc

SEQ ID NO: 3220213 - RNA, 20 nt, Human
cuccgccccugagcccacug

SEQ ID NO: 3220214 - RNA, 19 nt, Human
cuccgccccugagcccacu

SEQ ID NO: 3220215 - RNA, 18 nt, Human
cuccgccccugagcccac

SEQ ID NO: 3220216 - RNA, 17 nt, Human
cuccgccccugagccca

SEQ ID NO: 3220217 - RNA, 19 nt, Human
cuccugcguguucucagag

SEQ ID NO: 3220218 - RNA, 15 nt, Human
cuccugccucagccu

SEQ ID NO: 3220219 - RNA, 22 nt, Human
cuccugccucgaacuggcugca

SEQ ID NO: 3220220 - RNA, 19 nt, Human
cuccugugugugcgccuac

SEQ ID NO: 3220221 - RNA, 16 nt, Human
cuccugugugugcgcc

SEQ ID NO: 3220222 - RNA, 20 nt, Human
cuccuguggccugccaguca

SEQ ID NO: 3220223 - RNA, 18 nt, Human
cuccuguggccugccagu

SEQ ID NO: 3220224 - RNA, 17 nt, Human
cuccuguggccugccag

SEQ ID NO: 3220225 - RNA, 15 nt, Human
cuccuguggccugcc

SEQ ID NO: 3220226 - RNA, 18 nt, Human
cuccugucuucugcuuug

SEQ ID NO: 3220227 - RNA, 17 nt, Human
cuccugucuucugcuuu

SEQ ID NO: 3220228 - RNA, 16 nt, Human
cuccugucuucugcuu

SEQ ID NO: 3220229 - RNA, 14 nt, Human
cuccugucuucugc

SEQ ID NO: 3220230 - RNA, 13 nt, Human
cuccugucuucug

SEQ ID NO: 3220231 - RNA, 22 nt, Human
cuccuguggaaggcagagaaau

SEQ ID NO: 3220232 - RNA, 11 nt, Human
cuccugcaggc

SEQ ID NO: 3220233 - RNA, 16 nt, Human
cuccugcaggcagcca

SEQ ID NO: 3220234 - RNA, 17 nt, Human
cuccugcaggcagccag

SEQ ID NO: 3220235 - RNA, 14 nt, Human
cuccugauuuuucu

SEQ ID NO: 3220236 - RNA, 22 nt, Human
cuccugaguagcugggauuaca

SEQ ID NO: 3220237 - RNA, 22 nt, Human
cuccugaguugaagucaugcuc

SEQ ID NO: 3220238 - RNA, 14 nt, Human
cuccugccucagcc

SEQ ID NO: 3220239 - RNA, 13 nt, Human
cuccugccucagc

SEQ ID NO: 3220240 - RNA, 11 nt, Human
cuccugcccuu

SEQ ID NO: 3220241 - RNA, 18 nt, Human
cuccugcaggcagccagg

SEQ ID NO: 3220242 - RNA, 20 nt, Human
cuccugcaggcagccaggcc

SEQ ID NO: 3220243 - RNA, 14 nt, Human
cuguaccucugccu

SEQ ID NO: 3220244 - RNA, 15 nt, Human
cuguaucccaugagc

SEQ ID NO: 3220245 - RNA, 14 nt, Human
cuguaucccaugag

SEQ ID NO: 3220246 - RNA, 19 nt, Human
cuguauagcucuuuuccua

SEQ ID NO: 3220247 - RNA, 18 nt, Human
cuguaucccaugagccuc

SEQ ID NO: 3220248 - RNA, 13 nt, Human
cuguauuugaaag

SEQ ID NO: 3220249 - RNA, 14 nt, Human
cuguauuugaaagu

SEQ ID NO: 3220250 - RNA, 16 nt, Human
cuguauuugaaagugc

SEQ ID NO: 3220251 - RNA, 17 nt, Human
cuguauuugaaagugcc

SEQ ID NO: 3220252 - RNA, 19 nt, Human
cuguauuugaaagugccuu

SEQ ID NO: 3220253 - RNA, 20 nt, Human
cuguauuugaaagugccuuu

SEQ ID NO: 3220254 - RNA, 21 nt, Human
cuguauuugaaagugccuuug

SEQ ID NO: 3220255 - RNA, 23 nt, Human
cugucauuugagcagggcucagc

SEQ ID NO: 3220256 - RNA, 15 nt, Human
cuguccaagcagauu

SEQ ID NO: 3220257 - RNA, 22 nt, Human
cugucccagugccgagaaggaa

SEQ ID NO: 3220258 - RNA, 21 nt, Human
cuguccauuuuuauucagggg

SEQ ID NO: 3220259 - RNA, 17 nt, Human
cuguccauuuuuauuca

SEQ ID NO: 3220260 - RNA, 17 nt, Human
cuguccaggcacugcug

SEQ ID NO: 3220261 - RNA, 22 nt, Human
cuguccaggcacugcugcccag

SEQ ID NO: 3220262 - RNA, 21 nt, Human
cuguccaggcacugcugccca

SEQ ID NO: 3220263 - RNA, 20 nt, Human
cuguccaggcacugcugccc

SEQ ID NO: 3220264 - RNA, 19 nt, Human
cuguccaggcacugcugcc

SEQ ID NO: 3220265 - RNA, 18 nt, Human
cuguccaggcacugcugc

SEQ ID NO: 3220266 - RNA, 22 nt, Human
cuguccacccgccccugccccu

SEQ ID NO: 3220267 - RNA, 18 nt, Human
cugucucuacuaaaaaua

SEQ ID NO: 3220268 - RNA, 21 nt, Human
cuguccuacucugugucaggu

SEQ ID NO: 3220269 - RNA, 12 nt, Human
cuguccuaccuu

SEQ ID NO: 3220270 - RNA, 22 nt, Human
cugucucaaaaaaagaaaaaga

SEQ ID NO: 3220271 - RNA, 21 nt, Human
cugucucaagagggcacuggu

SEQ ID NO: 3220272 - RNA, 20 nt, Human
cugucucaagagggcacugg

SEQ ID NO: 3220273 - RNA, 19 nt, Human
cugucucaagagggcacug

SEQ ID NO: 3220274 - RNA, 18 nt, Human
cugucucaagagggcacu

SEQ ID NO: 3220275 - RNA, 13 nt, Human
cugucccccugac

SEQ ID NO: 3220276 - RNA, 14 nt, Human
cugucccccugaca

SEQ ID NO: 3220277 - RNA, 20 nt, Human
cuguccuacucugugucagg

SEQ ID NO: 3220278 - RNA, 18 nt, Human
cuguccuacucuguguca

SEQ ID NO: 3220279 - RNA, 17 nt, Human
cuguccuacucuguguc

SEQ ID NO: 3220280 - RNA, 16 nt, Human
cuguccuacucugugu

SEQ ID NO: 3220281 - RNA, 22 nt, Human
cugucccuuacgugaguccugg

SEQ ID NO: 3220282 - RNA, 13 nt, Human
cuggucagcccaa

SEQ ID NO: 3220283 - RNA, 12 nt, Human
cuggucagccca

SEQ ID NO: 3220284 - RNA, 17 nt, Human
cuggucacuucuucugu

SEQ ID NO: 3220285 - RNA, 16 nt, Human
cuggucacuucuucug

SEQ ID NO: 3220286 - RNA, 21 nt, Human
cugguccauagagagcaagac

SEQ ID NO: 3220287 - RNA, 23 nt, Human
cuggucucaaacucuugaccuca

SEQ ID NO: 3220288 - RNA, 13 nt, Human
cuggucccacuca

SEQ ID NO: 3220289 - RNA, 17 nt, Human
cugguccaucugguuuu

SEQ ID NO: 3220290 - RNA, 15 nt, Human
cuggucacuucuucu

SEQ ID NO: 3220291 - RNA, 23 nt, Human
cuggucacaggacucugccuccu

SEQ ID NO: 3220292 - RNA, 22 nt, Human
cuggucacaggacucugccucc

SEQ ID NO: 3220293 - RNA, 21 nt, Human
cuggucacaggacucugccuc

SEQ ID NO: 3220294 - RNA, 20 nt, Human
cuggucacaggacucugccu

SEQ ID NO: 3220295 - RNA, 19 nt, Human
cuggucacaggacucugcc

SEQ ID NO: 3220296 - RNA, 18 nt, Human
cuggguacuuguggacac

SEQ ID NO: 3220297 - RNA, 14 nt, Human
cuggguacuugugg

SEQ ID NO: 3220298 - RNA, 16 nt, Human
cuggguacuuguggac

SEQ ID NO: 3220299 - RNA, 19 nt, Human
cugggcucccuucccaccu

SEQ ID NO: 3220300 - RNA, 20 nt, Human
cugggcucccuucccaccuc

SEQ ID NO: 3220301 - RNA, 21 nt, Human
cugggcucccuucccaccucu

SEQ ID NO: 3220302 - RNA, 22 nt, Human
cugggcucccuucccaccucuc

SEQ ID NO: 3220303 - RNA, 15 nt, Human
cuggguuggagggug

SEQ ID NO: 3220304 - RNA, 17 nt, Human
cugguuauuuaaaaugu

SEQ ID NO: 3220305 - RNA, 19 nt, Human
cugguucaagcgauucucu

SEQ ID NO: 3220306 - RNA, 20 nt, Human
cugguucaggguuggccccu

SEQ ID NO: 3220307 - RNA, 13 nt, Human
cugguggcagcuc

SEQ ID NO: 3220308 - RNA, 14 nt, Human
cugguggcagcuca

SEQ ID NO: 3220309 - RNA, 12 nt, Human
cugguggcagcu

SEQ ID NO: 3220310 - RNA, 16 nt, Human
cuggucucgaacuccu

SEQ ID NO: 3220311 - RNA, 15 nt, Human
cuguacaugggacua

SEQ ID NO: 3220312 - RNA, 23 nt, Human
cuguacagagcccacgcccccac

SEQ ID NO: 3220313 - RNA, 22 nt, Human
cuguacagagccguaaaaacug

SEQ ID NO: 3220314 - RNA, 21 nt, Human
cuguacagagccguaaaaacu

SEQ ID NO: 3220315 - RNA, 17 nt, Human
cuguaaggcaugaagga

SEQ ID NO: 3220316 - RNA, 16 nt, Human
cuguaaggcaugaagg

SEQ ID NO: 3220317 - RNA, 21 nt, Human
cuggaaucauuguccagagcu

SEQ ID NO: 3220318 - RNA, 14 nt, Human
cuggcaagaaugug

SEQ ID NO: 3220319 - RNA, 23 nt, Human
cuggcaagaaaagaguuaaggca

SEQ ID NO: 3220320 - RNA, 17 nt, Human
cuggcaagaaaagaguu

SEQ ID NO: 3220321 - RNA, 15 nt, Human
cuggcacagggcagu

SEQ ID NO: 3220322 - RNA, 22 nt, Human
cuggcacccggccccugcuggu

SEQ ID NO: 3220323 - RNA, 18 nt, Human
cuggcacccggccccugc

SEQ ID NO: 3220324 - RNA, 17 nt, Human
cuggcacccggccccug

SEQ ID NO: 3220325 - RNA, 16 nt, Human
cuggcacccggccccu

SEQ ID NO: 3220326 - RNA, 22 nt, Human
cuggccagaugcaccagcccuu

SEQ ID NO: 3220327 - RNA, 24 nt, Human
cuggcaugggaaugaaugucagug

SEQ ID NO: 3220328 - RNA, 21 nt, Human
cuggcauggugguugggaccc

SEQ ID NO: 3220329 - RNA, 16 nt, Human
cuggcaugggaaugaa

SEQ ID NO: 3220330 - RNA, 18 nt, Human
cuggcaugggaaugaaug

SEQ ID NO: 3220331 - RNA, 19 nt, Human
cuggcaugggaaugaaugu

SEQ ID NO: 3220332 - RNA, 22 nt, Human
cuggcaugggaaugaaugucag

SEQ ID NO: 3220333 - RNA, 16 nt, Human
cuggcacuauaaugua

SEQ ID NO: 3220334 - RNA, 15 nt, Human
cuggcacuauaaugu

SEQ ID NO: 3220335 - RNA, 19 nt, Human
cuggcacuaccaaaggaca

SEQ ID NO: 3220336 - RNA, 16 nt, Human
cuggccuucggccucc

SEQ ID NO: 3220337 - RNA, 17 nt, Human
cuggccuucggccucca

SEQ ID NO: 3220338 - RNA, 18 nt, Human
cuggccuucggccuccau

SEQ ID NO: 3220339 - RNA, 21 nt, Human
cuggccuucggccuccauccu

SEQ ID NO: 3220340 - RNA, 15 nt, Human
cuggccuucggccuc

SEQ ID NO: 3220341 - RNA, 14 nt, Human
cuggccugugucua

SEQ ID NO: 3220342 - RNA, 16 nt, Human
cuggccuggccccuca

SEQ ID NO: 3220343 - RNA, 17 nt, Human
cuggccuggccccucag

SEQ ID NO: 3220344 - RNA, 15 nt, Human
cuggccugagcuggg

SEQ ID NO: 3220345 - RNA, 18 nt, Human
cuggccugagcugggaug

SEQ ID NO: 3220346 - RNA, 14 nt, Human
cuggccuggccccu

SEQ ID NO: 3220347 - RNA, 13 nt, Human
cuggccuggcccc

SEQ ID NO: 3220348 - RNA, 13 nt, Human
cuggccucugcac

SEQ ID NO: 3220349 - RNA, 14 nt, Human
cuggccucugcacu

SEQ ID NO: 3220350 - RNA, 16 nt, Human
cuggccugagcuggga

SEQ ID NO: 3220351 - RNA, 22 nt, Human
cuggccucaagugauucuccug

SEQ ID NO: 3220352 - RNA, 12 nt, Human
cuggccucugca

SEQ ID NO: 3220353 - RNA, 13 nt, Human
cuggccucucacu

SEQ ID NO: 3220354 - RNA, 20 nt, Human
cuggccucucacugccuccc

SEQ ID NO: 3220355 - RNA, 23 nt, Human
cuggccucaagugauucuccugc

SEQ ID NO: 3220356 - RNA, 15 nt, Human
cuggcccccacaugg

SEQ ID NO: 3220357 - RNA, 14 nt, Human
cuggcccccacaug

SEQ ID NO: 3220358 - RNA, 13 nt, Human
cuggcccccacau

SEQ ID NO: 3220359 - RNA, 19 nt, Human
cugggaggucaaggcugca

SEQ ID NO: 3220360 - RNA, 21 nt, Human
cugggaggucaaggcugcagu

SEQ ID NO: 3220361 - RNA, 16 nt, Human
cugggagccuacccac

SEQ ID NO: 3220362 - RNA, 22 nt, Human
cugggagccuacccacccccag

SEQ ID NO: 3220363 - RNA, 19 nt, Human
cugggagccuacccacccc

SEQ ID NO: 3220364 - RNA, 19 nt, Human
cugggccccaguuguauuu

SEQ ID NO: 3220365 - RNA, 15 nt, Human
cugggccccaguugu

SEQ ID NO: 3220366 - RNA, 20 nt, Human
cugggaucacauguggacuu

SEQ ID NO: 3220367 - RNA, 18 nt, Human
cugggaugauuggagggg

SEQ ID NO: 3220368 - RNA, 20 nt, Human
cugggaucccucauccucau

SEQ ID NO: 3220369 - RNA, 20 nt, Human
cugggauuacaggugugaac

SEQ ID NO: 3220370 - RNA, 16 nt, Human
cugggauuacaggugu

SEQ ID NO: 3220371 - RNA, 18 nt, Human
cugggauuacagguguga

SEQ ID NO: 3220372 - RNA, 17 nt, Human
cugggauuacaggugug

SEQ ID NO: 3220373 - RNA, 23 nt, Human
cugggauuacaggcuccugccac

SEQ ID NO: 3220374 - RNA, 14 nt, Human
cuggcuguccaccc

SEQ ID NO: 3220375 - RNA, 17 nt, Human
cuggcuguuggcugggg

SEQ ID NO: 3220376 - RNA, 16 nt, Human
cuggcuguuggcuggg

SEQ ID NO: 3220377 - RNA, 22 nt, Human
cuggcuggguggcaccagcagc

SEQ ID NO: 3220378 - RNA, 20 nt, Human
cuggcugguuagagguuccc

SEQ ID NO: 3220379 - RNA, 20 nt, Human
cuggccuugugguccaaaua

SEQ ID NO: 3220380 - RNA, 21 nt, Human
cuggccuugugguccaaauag

SEQ ID NO: 3220381 - RNA, 19 nt, Human
cuggcuggccuuguggucc

SEQ ID NO: 3220382 - RNA, 21 nt, Human
cuggcuggccuugugguccaa

SEQ ID NO: 3220383 - RNA, 22 nt, Human
cugggagaaccaaaaagaggcu

SEQ ID NO: 3220384 - RNA, 17 nt, Human
cugggagagccuuccag

SEQ ID NO: 3220385 - RNA, 18 nt, Human
cugggagagccuuccagg

SEQ ID NO: 3220386 - RNA, 19 nt, Human
cugggagagccuuccaggg

SEQ ID NO: 3220387 - RNA, 20 nt, Human
cugggagagccuuccagggg

SEQ ID NO: 3220388 - RNA, 21 nt, Human
cugggagagccuuccaggggu

SEQ ID NO: 3220389 - RNA, 22 nt, Human
cuggcuuucaacuguuucuaga

SEQ ID NO: 3220390 - RNA, 17 nt, Human
cugggaaagcauaaagc

SEQ ID NO: 3220391 - RNA, 23 nt, Human
cuggcuuuucacugcuggcugcc

SEQ ID NO: 3220392 - RNA, 22 nt, Human
cuggcuuuucacugcuggcugc

SEQ ID NO: 3220393 - RNA, 17 nt, Human
cugccagacccccugga

SEQ ID NO: 3220394 - RNA, 19 nt, Human
cugccagacccccuggaga

SEQ ID NO: 3220395 - RNA, 22 nt, Human
cugccaccuccccuugccagcu

SEQ ID NO: 3220396 - RNA, 20 nt, Human
cugccaccuccccuugccag

SEQ ID NO: 3220397 - RNA, 19 nt, Human
cugccaccuccccuugcca

SEQ ID NO: 3220398 - RNA, 18 nt, Human
cugccaccuccccuugcc

SEQ ID NO: 3220399 - RNA, 17 nt, Human
cugccaccuccccuugc

SEQ ID NO: 3220400 - RNA, 12 nt, Human
cugccaccuccc

SEQ ID NO: 3220401 - RNA, 13 nt, Human
cugccaccucccc

SEQ ID NO: 3220402 - RNA, 12 nt, Human
cugccacccugg

SEQ ID NO: 3220403 - RNA, 21 nt, Human
cugccacccuggggagaaagu

SEQ ID NO: 3220404 - RNA, 11 nt, Human
cugccaccucc

SEQ ID NO: 3220405 - RNA, 10 nt, Human
cugccaccuc

SEQ ID NO: 3220406 - RNA, 20 nt, Human
cugcaucaagaugugacaug

SEQ ID NO: 3220407 - RNA, 14 nt, Human
cugcauaucuucau

SEQ ID NO: 3220408 - RNA, 15 nt, Human
cugcauaugaaagga

SEQ ID NO: 3220409 - RNA, 23 nt, Human
cugcauaauucugaaguuauauu

SEQ ID NO: 3220410 - RNA, 22 nt, Human
cugcauaauucugaaguuauau

SEQ ID NO: 3220411 - RNA, 22 nt, Human
cugccaggaagccagcaggcuc

SEQ ID NO: 3220412 - RNA, 15 nt, Human
cugccauccucccaa

SEQ ID NO: 3220413 - RNA, 21 nt, Human
cugccauccagguucagcuug

SEQ ID NO: 3220414 - RNA, 21 nt, Human
cugccagcucuuccuagcugg

SEQ ID NO: 3220415 - RNA, 19 nt, Human
cugccaggaagccagcagg

SEQ ID NO: 3220416 - RNA, 13 nt, Human
cugccaggaagcc

SEQ ID NO: 3220417 - RNA, 14 nt, Human
cugccaggaagcca

SEQ ID NO: 3220418 - RNA, 20 nt, Human
cugccaggaagccagcaggc

SEQ ID NO: 3220419 - RNA, 21 nt, Human
cugccaggaagccagcaggcu

SEQ ID NO: 3220420 - RNA, 12 nt, Human
cugccagcucuu

SEQ ID NO: 3220421 - RNA, 15 nt, Human
cugccagcucuuccu

SEQ ID NO: 3220422 - RNA, 14 nt, Human
cugccagcucuucc

SEQ ID NO: 3220423 - RNA, 19 nt, Human
cugccagcucuuccuagcu

SEQ ID NO: 3220424 - RNA, 17 nt, Human
cugccagcucuuccuag

SEQ ID NO: 3220425 - RNA, 13 nt, Human
cugcccggcaggg

SEQ ID NO: 3220426 - RNA, 18 nt, Human
cugccccuggcagccccu

SEQ ID NO: 3220427 - RNA, 17 nt, Human
cugccccuggcagcccc

SEQ ID NO: 3220428 - RNA, 19 nt, Human
cugccccuggcagccccug

SEQ ID NO: 3220429 - RNA, 20 nt, Human
cugcccggugggggggcaga

SEQ ID NO: 3220430 - RNA, 23 nt, Human
cugcccggugggggggcagagcc

SEQ ID NO: 3220431 - RNA, 21 nt, Human
cugcccggugggggggcagag

SEQ ID NO: 3220432 - RNA, 20 nt, Human
cugcccuaaugcgcaggcug

SEQ ID NO: 3220433 - RNA, 21 nt, Human
cugcccuaaugcgcaggcugg

SEQ ID NO: 3220434 - RNA, 22 nt, Human
cugcccuaaugcgcaggcuggc

SEQ ID NO: 3220435 - RNA, 15 nt, Human
cugccccaaguuuug

SEQ ID NO: 3220436 - RNA, 20 nt, Human
cugcccaggccccugccacc

SEQ ID NO: 3220437 - RNA, 19 nt, Human
cugcccaggccccugccac

SEQ ID NO: 3220438 - RNA, 18 nt, Human
cugcccaggccccugcca

SEQ ID NO: 3220439 - RNA, 16 nt, Human
cugcccaggccccugc

SEQ ID NO: 3220440 - RNA, 15 nt, Human
cugccauuucugaga

SEQ ID NO: 3220441 - RNA, 19 nt, Human
cugcccaaccugcucuccu

SEQ ID NO: 3220442 - RNA, 13 nt, Human
cugccauuucaug

SEQ ID NO: 3220443 - RNA, 16 nt, Human
cugcccacaccuccug

SEQ ID NO: 3220444 - RNA, 17 nt, Human
cugcccacaccuccugg

SEQ ID NO: 3220445 - RNA, 19 nt, Human
cugcccacaccuccugggg

SEQ ID NO: 3220446 - RNA, 20 nt, Human
cugcccacaccuccuggggc

SEQ ID NO: 3220447 - RNA, 15 nt, Human
cugcccaggccccug

SEQ ID NO: 3220448 - RNA, 14 nt, Human
cugcccaggccccu

SEQ ID NO: 3220449 - RNA, 12 nt, Human
cugcccaccugg

SEQ ID NO: 3220450 - RNA, 13 nt, Human
cugcccaggcccc

SEQ ID NO: 3220451 - RNA, 13 nt, Human
cugcaguugccag

SEQ ID NO: 3220452 - RNA, 16 nt, Human
cugcaguugccaguca

SEQ ID NO: 3220453 - RNA, 21 nt, Human
cugcaguuccccuggaagcag

SEQ ID NO: 3220454 - RNA, 15 nt, Human
cugcaguuccccugg

SEQ ID NO: 3220455 - RNA, 20 nt, Human
cugcaguuccccuggaagca

SEQ ID NO: 3220456 - RNA, 17 nt, Human
cugcaguuccccuggaa

SEQ ID NO: 3220457 - RNA, 23 nt, Human
cugcagagcugcgggcugggugu

SEQ ID NO: 3220458 - RNA, 10 nt, Human
cugcagaggg

SEQ ID NO: 3220459 - RNA, 13 nt, Human
cugcagagggcac

SEQ ID NO: 3220460 - RNA, 12 nt, Human
cugcacugucaa

SEQ ID NO: 3220461 - RNA, 18 nt, Human
cugcacuccccugcuggg

SEQ ID NO: 3220462 - RNA, 21 nt, Human
cugcacuccccugcugggugu

SEQ ID NO: 3220463 - RNA, 20 nt, Human
cugcacuccagccuggguga

SEQ ID NO: 3220464 - RNA, 19 nt, Human
cugcacuccagccugggug

SEQ ID NO: 3220465 - RNA, 18 nt, Human
cugcaccgggccacagag

SEQ ID NO: 3220466 - RNA, 13 nt, Human
cugcacuccccug

SEQ ID NO: 3220467 - RNA, 19 nt, Human
cugcacuccccugcugggu

SEQ ID NO: 3220468 - RNA, 20 nt, Human
cugcacuccccugcugggug

SEQ ID NO: 3220469 - RNA, 22 nt, Human
cugaggcccuucucuccagccc

SEQ ID NO: 3220470 - RNA, 23 nt, Human
cugaggcccuucucuccagcccc

SEQ ID NO: 3220471 - RNA, 14 nt, Human
cugcaccggcuggc

SEQ ID NO: 3220472 - RNA, 15 nt, Human
cugcaccggcuggcc

SEQ ID NO: 3220473 - RNA, 15 nt, Human
cugcaccgggccaca

SEQ ID NO: 3220474 - RNA, 14 nt, Human
cugcaccgggccac

SEQ ID NO: 3220475 - RNA, 22 nt, Human
cugcgggcuggguguggucucc

SEQ ID NO: 3220476 - RNA, 22 nt, Human
cugcggggcgggcacaccuccu

SEQ ID NO: 3220477 - RNA, 19 nt, Human
cugcggggcgggcacaccu

SEQ ID NO: 3220478 - RNA, 15 nt, Human
cugcgggucacagga

SEQ ID NO: 3220479 - RNA, 21 nt, Human
cugcgggucacaggagggagg

SEQ ID NO: 3220480 - RNA, 18 nt, Human
cugcggugcuaucucccc

SEQ ID NO: 3220481 - RNA, 19 nt, Human
cugcggugcuaucuccccc

SEQ ID NO: 3220482 - RNA, 23 nt, Human
cugcgguccacccaggagccccg

SEQ ID NO: 3220483 - RNA, 22 nt, Human
cugcgggucacaggagggaggg

SEQ ID NO: 3220484 - RNA, 23 nt, Human
cugcgggucacaggagggagggg

SEQ ID NO: 3220485 - RNA, 20 nt, Human
cugcccugcccaccuggccu

SEQ ID NO: 3220486 - RNA, 17 nt, Human
cugcccugcccaccugg

SEQ ID NO: 3220487 - RNA, 21 nt, Human
cugcccugcccaccuggccuc

SEQ ID NO: 3220488 - RNA, 16 nt, Human
cugccugaagucacac

SEQ ID NO: 3220489 - RNA, 18 nt, Human
cugccugaagucacacag

SEQ ID NO: 3220490 - RNA, 19 nt, Human
cugccugaagucacacagu

SEQ ID NO: 3220491 - RNA, 21 nt, Human
cugccugcaguacuuuaccuc

SEQ ID NO: 3220492 - RNA, 20 nt, Human
cugccugcaguacuuuaccu

SEQ ID NO: 3220493 - RNA, 21 nt, Human
cugccugcccugucaggaggc

SEQ ID NO: 3220494 - RNA, 17 nt, Human
cugccugcccuuugucc

SEQ ID NO: 3220495 - RNA, 18 nt, Human
cugccugccuuaagugag

SEQ ID NO: 3220496 - RNA, 20 nt, Human
cugccugccuuaagugagga

SEQ ID NO: 3220497 - RNA, 22 nt, Human
cugccugccuuaagugaggaaa

SEQ ID NO: 3220498 - RNA, 23 nt, Human
cugccugcccuuuguccuccugc

SEQ ID NO: 3220499 - RNA, 17 nt, Human
cugccugccuuaaguga

SEQ ID NO: 3220500 - RNA, 16 nt, Human
cugcugccucaggaau

SEQ ID NO: 3220501 - RNA, 14 nt, Human
cugcugcaguugcc

SEQ ID NO: 3220502 - RNA, 10 nt, Human
cugcugcagu

SEQ ID NO: 3220503 - RNA, 13 nt, Human
cugcugcaguugc

SEQ ID NO: 3220504 - RNA, 15 nt, Human
cugcucugugcccac

SEQ ID NO: 3220505 - RNA, 12 nt, Human
cugcucugguua

SEQ ID NO: 3220506 - RNA, 16 nt, Human
cugcucuugaacuccu

SEQ ID NO: 3220507 - RNA, 18 nt, Human
cugcucuugaacuccuga

SEQ ID NO: 3220508 - RNA, 19 nt, Human
cugcucuugaacuccugac

SEQ ID NO: 3220509 - RNA, 11 nt, Human
cugcucuugca

SEQ ID NO: 3220510 - RNA, 20 nt, Human
cugcucugaugaagaggagu

SEQ ID NO: 3220511 - RNA, 15 nt, Human
cugcucugccccagc

SEQ ID NO: 3220512 - RNA, 13 nt, Human
cugcucugcccca

SEQ ID NO: 3220513 - RNA, 12 nt, Human
cugcucugcuga

SEQ ID NO: 3220514 - RNA, 11 nt, Human
cugcucugcug

SEQ ID NO: 3220515 - RNA, 11 nt, Human
cugcucugcuc

SEQ ID NO: 3220516 - RNA, 15 nt, Human
cugcucugcucgccu

SEQ ID NO: 3220517 - RNA, 12 nt, Human
cugcucugcucg

SEQ ID NO: 3220518 - RNA, 22 nt, Human
cugcucugccccagcuugggca

SEQ ID NO: 3220519 - RNA, 17 nt, Human
cugcucugccccagcuu

SEQ ID NO: 3220520 - RNA, 15 nt, Human
cugcucuccgaccag

SEQ ID NO: 3220521 - RNA, 20 nt, Human
cugcucucaaaccccugacc

SEQ ID NO: 3220522 - RNA, 22 nt, Human
cugcucucaccuugguuccugg

SEQ ID NO: 3220523 - RNA, 23 nt, Human
cugcucucaaaccccugaccuca

SEQ ID NO: 3220524 - RNA, 20 nt, Human
cugcuccucuccccagcaag

SEQ ID NO: 3220525 - RNA, 19 nt, Human
cugcuccucuccccagcaa

SEQ ID NO: 3220526 - RNA, 23 nt, Human
cugcuccucuccccagcaaguga

SEQ ID NO: 3220527 - RNA, 12 nt, Human
cugcuccugagc

SEQ ID NO: 3220528 - RNA, 14 nt, Human
cugcuccugagccc

SEQ ID NO: 3220529 - RNA, 13 nt, Human
cugcuccugagcc

SEQ ID NO: 3220530 - RNA, 20 nt, Human
cugcggugcuaucuccccca

SEQ ID NO: 3220531 - RNA, 21 nt, Human
cugcggugcuaucucccccag

SEQ ID NO: 3220532 - RNA, 22 nt, Human
cugcggugcuaucucccccagc

SEQ ID NO: 3220533 - RNA, 23 nt, Human
cugcggugcuaucucccccagcc

SEQ ID NO: 3220534 - RNA, 22 nt, Human
cugcuugaggcaacucaucuua

SEQ ID NO: 3220535 - RNA, 20 nt, Human
cugcuugcuugcuuuuuaau

SEQ ID NO: 3220536 - RNA, 13 nt, Human
cugcuugggcuuc

SEQ ID NO: 3220537 - RNA, 15 nt, Human
cugcuugggcuucau

SEQ ID NO: 3220538 - RNA, 17 nt, Human
cugcuugggcuucaucc

SEQ ID NO: 3220539 - RNA, 18 nt, Human
cugcuugggcuucauccu

SEQ ID NO: 3220540 - RNA, 19 nt, Human
cugcuugggcuucauccuc

SEQ ID NO: 3220541 - RNA, 18 nt, Human
cugcuuggcccagggggc

SEQ ID NO: 3220542 - RNA, 16 nt, Human
cugcuuggcccagggg

SEQ ID NO: 3220543 - RNA, 23 nt, Human
cugcuuggcccagggggcuuccu

SEQ ID NO: 3220544 - RNA, 14 nt, Human
cugcuuggcccagg

SEQ ID NO: 3220545 - RNA, 15 nt, Human
cugcuuggcccaggg

SEQ ID NO: 3220546 - RNA, 19 nt, Human
cugcuugugaaaggaaaga

SEQ ID NO: 3220547 - RNA, 20 nt, Human
cugcuuuagacuugaaaaga

SEQ ID NO: 3220548 - RNA, 17 nt, Human
cugcuuuagacuugaaa

SEQ ID NO: 3220549 - RNA, 19 nt, Human
cugcuuuagacuugaaaag

SEQ ID NO: 3220550 - RNA, 14 nt, Human
cugcuuuagacuug

SEQ ID NO: 3220551 - RNA, 16 nt, Human
cugcuuuagacuugaa

SEQ ID NO: 3220552 - RNA, 13 nt, Human
cugcuuuaaucag

SEQ ID NO: 3220553 - RNA, 13 nt, Human
cugcuuuggaaau

SEQ ID NO: 3220554 - RNA, 16 nt, Human
cugcuuugggcugccc

SEQ ID NO: 3220555 - RNA, 15 nt, Human
cugcuuuuggucugu

SEQ ID NO: 3220556 - RNA, 17 nt, Human
cugcuuuuggucugugu

SEQ ID NO: 3220557 - RNA, 13 nt, Human
cuggaaggaggaa

SEQ ID NO: 3220558 - RNA, 14 nt, Human
cuggaaggaggaag

SEQ ID NO: 3220559 - RNA, 22 nt, Human
cuggaaggaggaagaauagggc

SEQ ID NO: 3220560 - RNA, 13 nt, Human
cugcuugaggcaa

SEQ ID NO: 3220561 - RNA, 20 nt, Human
cugcuugaggcaacucaucu

SEQ ID NO: 3220562 - RNA, 21 nt, Human
cugcuugaggcaacucaucuu

SEQ ID NO: 3220563 - RNA, 22 nt, Human
cugcuugaauaaacaccacugg

SEQ ID NO: 3220564 - RNA, 19 nt, Human
cugcuucugacauaaucca

SEQ ID NO: 3220565 - RNA, 19 nt, Human
cugcuucucugcccagcuu

SEQ ID NO: 3220566 - RNA, 23 nt, Human
cugcuggugggcuugucauagcc

SEQ ID NO: 3220567 - RNA, 18 nt, Human
cugcugucauugcuucuu

SEQ ID NO: 3220568 - RNA, 16 nt, Human
cugcugucauugcuuc

SEQ ID NO: 3220569 - RNA, 22 nt, Human
cugcugucauugcuucuucuga

SEQ ID NO: 3220570 - RNA, 20 nt, Human
cugcugucauugcuucuucu

SEQ ID NO: 3220571 - RNA, 19 nt, Human
cugcugucauugcuucuuc

SEQ ID NO: 3220572 - RNA, 17 nt, Human
cugcuuccuuucuugau

SEQ ID NO: 3220573 - RNA, 16 nt, Human
cugcuuccuuucuuga

SEQ ID NO: 3220574 - RNA, 17 nt, Human
cugcuggguguggcgca

SEQ ID NO: 3220575 - RNA, 17 nt, Human
cugcuggucacuucuuc

SEQ ID NO: 3220576 - RNA, 17 nt, Human
cugcuggucagcacucc

SEQ ID NO: 3220577 - RNA, 20 nt, Human
cugcuggucacuucuucugu

SEQ ID NO: 3220578 - RNA, 19 nt, Human
cugcuggucacuucuucug

SEQ ID NO: 3220579 - RNA, 18 nt, Human
cugcuggucacuucuucu

SEQ ID NO: 3220580 - RNA, 14 nt, Human
cugcuggguguggc

SEQ ID NO: 3220581 - RNA, 15 nt, Human
cugcuggguguggcg

SEQ ID NO: 3220582 - RNA, 12 nt, Human
cugcugcuggcu

SEQ ID NO: 3220583 - RNA, 13 nt, Human
cugcugcuggcug

SEQ ID NO: 3220584 - RNA, 20 nt, Human
cugcugggcuccacuuggcu

SEQ ID NO: 3220585 - RNA, 12 nt, Human
cugcuggcugcc

SEQ ID NO: 3220586 - RNA, 15 nt, Human
cugcuggcugccuua

SEQ ID NO: 3220587 - RNA, 14 nt, Human
cugcuggcugccuu

SEQ ID NO: 3220588 - RNA, 13 nt, Human
cugcuggcugccu

SEQ ID NO: 3220589 - RNA, 18 nt, Human
gaagcauuuacuuugugu

SEQ ID NO: 3220590 - RNA, 23 nt, Human
gaagauuguuuaucuagauguaa

SEQ ID NO: 3220591 - RNA, 16 nt, Human
gaagauuguuuaucua

SEQ ID NO: 3220592 - RNA, 13 nt, Human
gaagauuguuuau

SEQ ID NO: 3220593 - RNA, 18 nt, Human
gaagauggauaugaccag

SEQ ID NO: 3220594 - RNA, 16 nt, Human
gaagagugaaauacca

SEQ ID NO: 3220595 - RNA, 14 nt, Human
gaagaguauggauu

SEQ ID NO: 3220596 - RNA, 14 nt, Human
gaagagugaaauac

SEQ ID NO: 3220597 - RNA, 13 nt, Human
gaagagugaaaua

SEQ ID NO: 3220598 - RNA, 22 nt, Human
gaagaguggcagcuauaggaaa

SEQ ID NO: 3220599 - RNA, 21 nt, Human
gaagauagucuuggaagcugu

SEQ ID NO: 3220600 - RNA, 17 nt, Human
gaagaucuuugggcaua

SEQ ID NO: 3220601 - RNA, 13 nt, Human
gaagaaguguguc

SEQ ID NO: 3220602 - RNA, 15 nt, Human
gaagacuucaucccu

SEQ ID NO: 3220603 - RNA, 16 nt, Human
gaagacuucaucccuc

SEQ ID NO: 3220604 - RNA, 12 nt, Human
gaagagccuugc

SEQ ID NO: 3220605 - RNA, 13 nt, Human
gaagacuucaaaa

SEQ ID NO: 3220606 - RNA, 12 nt, Human
gaagaauaauuu

SEQ ID NO: 3220607 - RNA, 23 nt, Human
gaagagccccacucucagaggcc

SEQ ID NO: 3220608 - RNA, 17 nt, Human
gaagacuucaucccucu

SEQ ID NO: 3220609 - RNA, 20 nt, Human
gaagagccccacucucagag

SEQ ID NO: 3220610 - RNA, 17 nt, Human
gaagagucuauugucuc

SEQ ID NO: 3220611 - RNA, 23 nt, Human
gaagagcuguucacagccagacu

SEQ ID NO: 3220612 - RNA, 17 nt, Human
gaagagcuuagaaacug

SEQ ID NO: 3220613 - RNA, 14 nt, Human
gaagagcuuagaaa

SEQ ID NO: 3220614 - RNA, 20 nt, Human
gaagagcuguugaugggaug

SEQ ID NO: 3220615 - RNA, 15 nt, Human
gaagagcuggggaga

SEQ ID NO: 3220616 - RNA, 13 nt, Human
gaagagcuguuca

SEQ ID NO: 3220617 - RNA, 16 nt, Human
gaagagcuagagaaau

SEQ ID NO: 3220618 - RNA, 20 nt, Human
gaagagcuguucacagccag

SEQ ID NO: 3220619 - RNA, 15 nt, Human
gaagagcuguucaca

SEQ ID NO: 3220620 - RNA, 22 nt, Human
gaacuugaagccugcuccuucc

SEQ ID NO: 3220621 - RNA, 21 nt, Human
gaacuugaagccugcuccuuc

SEQ ID NO: 3220622 - RNA, 19 nt, Human
gaacuuggugccuaauguu

SEQ ID NO: 3220623 - RNA, 17 nt, Human
gaacuugggccacugug

SEQ ID NO: 3220624 - RNA, 18 nt, Human
gaacuuggcgcugccccu

SEQ ID NO: 3220625 - RNA, 17 nt, Human
gaacuuuccaggaaggc

SEQ ID NO: 3220626 - RNA, 15 nt, Human
gaacuuguuuucugg

SEQ ID NO: 3220627 - RNA, 14 nt, Human
gaacuuguuuaaua

SEQ ID NO: 3220628 - RNA, 20 nt, Human
gaagaaagaacuaucuucau

SEQ ID NO: 3220629 - RNA, 12 nt, Human
gaagaaagaugu

SEQ ID NO: 3220630 - RNA, 12 nt, Human
gaagaaagccug

SEQ ID NO: 3220631 - RNA, 14 nt, Human
gaagaagcucucuc

SEQ ID NO: 3220632 - RNA, 21 nt, Human
gaagaaauguaguuuacauuu

SEQ ID NO: 3220633 - RNA, 15 nt, Human
gaacucccuuucaac

SEQ ID NO: 3220634 - RNA, 15 nt, Human
gaacuccuaaaucaa

SEQ ID NO: 3220635 - RNA, 16 nt, Human
gaacucccuuucaaca

SEQ ID NO: 3220636 - RNA, 13 nt, Human
gaacuccugaccu

SEQ ID NO: 3220637 - RNA, 16 nt, Human
gaacuccuaaaucaag

SEQ ID NO: 3220638 - RNA, 13 nt, Human
gaacuguuguaua

SEQ ID NO: 3220639 - RNA, 18 nt, Human
gaaccacaucuugcucug

SEQ ID NO: 3220640 - RNA, 19 nt, Human
gaaccaauaaaauaauuuu

SEQ ID NO: 3220641 - RNA, 17 nt, Human
gaacuuggcgcugcccc

SEQ ID NO: 3220642 - RNA, 19 nt, Human
gaacuugaagccugcuccu

SEQ ID NO: 3220643 - RNA, 18 nt, Human
gaacuugaagccugcucc

SEQ ID NO: 3220644 - RNA, 16 nt, Human
gaacuugaagccugcu

SEQ ID NO: 3220645 - RNA, 20 nt, Human
gaacuguuguauaaauuuau

SEQ ID NO: 3220646 - RNA, 16 nt, Human
gaacuguuguauaaau

SEQ ID NO: 3220647 - RNA, 15 nt, Human
gaacuguuguauaaa

SEQ ID NO: 3220648 - RNA, 14 nt, Human
gaacuguuguauaa

SEQ ID NO: 3220649 - RNA, 15 nt, Human
gaacuguuagaaugu

SEQ ID NO: 3220650 - RNA, 23 nt, Human
gaaggaaccaaagcgaauuuuaa

SEQ ID NO: 3220651 - RNA, 19 nt, Human
gaaggaagacuucaucccu

SEQ ID NO: 3220652 - RNA, 15 nt, Human
gaaggaacguccccu

SEQ ID NO: 3220653 - RNA, 21 nt, Human
gaaggaaacccagcucugguc

SEQ ID NO: 3220654 - RNA, 22 nt, Human
gaaggaaacccagcucuggucc

SEQ ID NO: 3220655 - RNA, 21 nt, Human
gaaggacauugcggacagcca

SEQ ID NO: 3220656 - RNA, 20 nt, Human
gaaggacauugcggacagcc

SEQ ID NO: 3220657 - RNA, 19 nt, Human
gaaggacauugcggacagc

SEQ ID NO: 3220658 - RNA, 22 nt, Human
gaaggaauaaauugcuccuuga

SEQ ID NO: 3220659 - RNA, 22 nt, Human
gaaggacccggaggggccuggc

SEQ ID NO: 3220660 - RNA, 18 nt, Human
gaagccgcuggggccagu

SEQ ID NO: 3220661 - RNA, 20 nt, Human
gaagccgcuggggccaguug

SEQ ID NO: 3220662 - RNA, 14 nt, Human
gaagccgcuggggc

SEQ ID NO: 3220663 - RNA, 19 nt, Human
gaaggaaacccagcucugg

SEQ ID NO: 3220664 - RNA, 20 nt, Human
gaaggaaacccagcucuggu

SEQ ID NO: 3220665 - RNA, 15 nt, Human
gaagcuguuuggaaa

SEQ ID NO: 3220666 - RNA, 18 nt, Human
gaagcuguuuggaaaaga

SEQ ID NO: 3220667 - RNA, 15 nt, Human
gaagccugcuccuuc

SEQ ID NO: 3220668 - RNA, 16 nt, Human
gaaggaugccaagaag

SEQ ID NO: 3220669 - RNA, 23 nt, Human
gaaggagggggugaccuccggcc

SEQ ID NO: 3220670 - RNA, 12 nt, Human
gaaggaggccac

SEQ ID NO: 3220671 - RNA, 16 nt, Human
gaaggaggccaccucc

SEQ ID NO: 3220672 - RNA, 15 nt, Human
gaaggaggccaccuc

SEQ ID NO: 3220673 - RNA, 20 nt, Human
gaaggaggcuccaggcagca

SEQ ID NO: 3220674 - RNA, 19 nt, Human
gaaggaggcuccaggcagc

SEQ ID NO: 3220675 - RNA, 17 nt, Human
gaaggaggccaccuccu

SEQ ID NO: 3220676 - RNA, 18 nt, Human
gaaggaggcuccaggcag

SEQ ID NO: 3220677 - RNA, 17 nt, Human
gaaggauuauggaaaaa

SEQ ID NO: 3220678 - RNA, 18 nt, Human
gaaggcagggagggccug

SEQ ID NO: 3220679 - RNA, 20 nt, Human
gaaggcagggagggccuggg

SEQ ID NO: 3220680 - RNA, 22 nt, Human
gaaggcagggagggccugggcc

SEQ ID NO: 3220681 - RNA, 23 nt, Human
gaaggcagggagggccugggccc

SEQ ID NO: 3220682 - RNA, 13 nt, Human
gaaggauuugugu

SEQ ID NO: 3220683 - RNA, 13 nt, Human
gaagggggcuggg

SEQ ID NO: 3220684 - RNA, 19 nt, Human
gaagguagcauucuuugga

SEQ ID NO: 3220685 - RNA, 18 nt, Human
gaagguauuaagauuaua

SEQ ID NO: 3220686 - RNA, 15 nt, Human
gaaggucauuuccau

SEQ ID NO: 3220687 - RNA, 14 nt, Human
gaaggucauuucca

SEQ ID NO: 3220688 - RNA, 18 nt, Human
gaaguaacuggugauaua

SEQ ID NO: 3220689 - RNA, 17 nt, Human
gaaggugauaagggaaa

SEQ ID NO: 3220690 - RNA, 19 nt, Human
gaaggugauaagggaaaag

SEQ ID NO: 3220691 - RNA, 23 nt, Human
gaaggugauaagggaaaagauaa

SEQ ID NO: 3220692 - RNA, 13 nt, Human
gaagucacacagu

SEQ ID NO: 3220693 - RNA, 19 nt, Human
gaaguaacuggugauauau

SEQ ID NO: 3220694 - RNA, 18 nt, Human
gaagucuuagauguauau

SEQ ID NO: 3220695 - RNA, 15 nt, Human
gaagucuucaugaaa

SEQ ID NO: 3220696 - RNA, 15 nt, Human
gaagucacugcacag

SEQ ID NO: 3220697 - RNA, 15 nt, Human
gaacacuccuucaca

SEQ ID NO: 3220698 - RNA, 16 nt, Human
gaacacuccuucacag

SEQ ID NO: 3220699 - RNA, 19 nt, Human
gaacagacuggaagcacag

SEQ ID NO: 3220700 - RNA, 20 nt, Human
gaacagacuggaagcacagc

SEQ ID NO: 3220701 - RNA, 17 nt, Human
gaacacuccuucacaga

SEQ ID NO: 3220702 - RNA, 11 nt, Human
gaaccaaagcg

SEQ ID NO: 3220703 - RNA, 23 nt, Human
gaaccaaagcgaauuuuaaaaga

SEQ ID NO: 3220704 - RNA, 20 nt, Human
gaaccaaagcgaauuuuaaa

SEQ ID NO: 3220705 - RNA, 17 nt, Human
gaacaguuuaugcagug

SEQ ID NO: 3220706 - RNA, 23 nt, Human
gaacaguuuaugcagugcugcuu

SEQ ID NO: 3220707 - RNA, 21 nt, Human
gaacagguuuuuuuguuuguu

SEQ ID NO: 3220708 - RNA, 16 nt, Human
gaacagguucacguga

SEQ ID NO: 3220709 - RNA, 22 nt, Human
gaacagacuggaagcacagcuu

SEQ ID NO: 3220710 - RNA, 22 nt, Human
gaacagcuguugacucuaguac

SEQ ID NO: 3220711 - RNA, 17 nt, Human
gaacagcuguugacucu

SEQ ID NO: 3220712 - RNA, 12 nt, Human
gaacagcuguug

SEQ ID NO: 3220713 - RNA, 19 nt, Human
gaaauaucugaaaauguau

SEQ ID NO: 3220714 - RNA, 18 nt, Human
gaaauaucugaaaaugua

SEQ ID NO: 3220715 - RNA, 22 nt, Human
gaaauaaaccuuaauauuucuu

SEQ ID NO: 3220716 - RNA, 12 nt, Human
gaaauaaaagcu

SEQ ID NO: 3220717 - RNA, 15 nt, Human
gaaauaucaucacgu

SEQ ID NO: 3220718 - RNA, 21 nt, Human
gaaauaucaucacguauguua

SEQ ID NO: 3220719 - RNA, 22 nt, Human
gaaauaucaucacguauguuau

SEQ ID NO: 3220720 - RNA, 23 nt, Human
gaaauauauggucuaauguuuaa

SEQ ID NO: 3220721 - RNA, 24 nt, Human
gaaauauauggucuaauguuuaag

SEQ ID NO: 3220722 - RNA, 13 nt, Human
gaaauauauguga

SEQ ID NO: 3220723 - RNA, 14 nt, Human
gaaauauaugugaa

SEQ ID NO: 3220724 - RNA, 20 nt, Human
gaaauauauuacuuaacugu

SEQ ID NO: 3220725 - RNA, 22 nt, Human
gaaauauauggucuaauguuua

SEQ ID NO: 3220726 - RNA, 20 nt, Human
gaaauauauggucuaauguu

SEQ ID NO: 3220727 - RNA, 22 nt, Human
gaaauguaagggaaacugccag

SEQ ID NO: 3220728 - RNA, 14 nt, Human
gaaaugcugauuua

SEQ ID NO: 3220729 - RNA, 22 nt, Human
gaaaugcugauuuaaacuucuu

SEQ ID NO: 3220730 - RNA, 17 nt, Human
gaaaugggcagagcaga

SEQ ID NO: 3220731 - RNA, 19 nt, Human
gaaaugggcagagcagaga

SEQ ID NO: 3220732 - RNA, 16 nt, Human
gaaaugucccuuucuu

SEQ ID NO: 3220733 - RNA, 15 nt, Human
gaaaugucccuuucu

SEQ ID NO: 3220734 - RNA, 13 nt, Human
gaaauguguguga

SEQ ID NO: 3220735 - RNA, 20 nt, Human
gaaaugucccuuucuucucc

SEQ ID NO: 3220736 - RNA, 18 nt, Human
gaaaugucccuuucuucu

SEQ ID NO: 3220737 - RNA, 17 nt, Human
gaaaugucccuuucuuc

SEQ ID NO: 3220738 - RNA, 23 nt, Human
gaaaugugugugaugugacauuu

SEQ ID NO: 3220739 - RNA, 21 nt, Human
gaaaugugugugaugugacau

SEQ ID NO: 3220740 - RNA, 20 nt, Human
gaaaugugugugaugugaca

SEQ ID NO: 3220741 - RNA, 19 nt, Human
gaaaugugugugaugugac

SEQ ID NO: 3220742 - RNA, 18 nt, Human
gaaaugugugugauguga

SEQ ID NO: 3220743 - RNA, 16 nt, Human
gaaaugugugugaugu

SEQ ID NO: 3220744 - RNA, 16 nt, Human
gaaaugggcagagcag

SEQ ID NO: 3220745 - RNA, 15 nt, Human
gaaaugggcagagca

SEQ ID NO: 3220746 - RNA, 17 nt, Human
gaaaugcuaugucauuu

SEQ ID NO: 3220747 - RNA, 22 nt, Human
gaaaugcugacccaugggcagg

SEQ ID NO: 3220748 - RNA, 14 nt, Human
gaaaugcugaccca

SEQ ID NO: 3220749 - RNA, 14 nt, Human
gaaaugcugaaaau

SEQ ID NO: 3220750 - RNA, 22 nt, Human
gaaaugcuaugucauuucaugu

SEQ ID NO: 3220751 - RNA, 21 nt, Human
gaaaugcuaugucauuucaug

SEQ ID NO: 3220752 - RNA, 20 nt, Human
gaaaugcuaugucauuucau

SEQ ID NO: 3220753 - RNA, 19 nt, Human
gaaaugcuaugucauuuca

SEQ ID NO: 3220754 - RNA, 18 nt, Human
gaaaugcuaugucauuuc

SEQ ID NO: 3220755 - RNA, 11 nt, Human
gaaaugagcug

SEQ ID NO: 3220756 - RNA, 18 nt, Human
gaaaugaggucagagccu

SEQ ID NO: 3220757 - RNA, 13 nt, Human
gaaacuauguguu

SEQ ID NO: 3220758 - RNA, 14 nt, Human
gaaacuauguguuu

SEQ ID NO: 3220759 - RNA, 17 nt, Human
gaaacuauguguuuuuc

SEQ ID NO: 3220760 - RNA, 18 nt, Human
gaaacuauguguuuuucu

SEQ ID NO: 3220761 - RNA, 19 nt, Human
gaaacuauguguuuuucuc

SEQ ID NO: 3220762 - RNA, 20 nt, Human
gaaacuauguguuuuucuca

SEQ ID NO: 3220763 - RNA, 21 nt, Human
gaaacuauguguuuuucucau

SEQ ID NO: 3220764 - RNA, 15 nt, Human
gaaacugccagcaac

SEQ ID NO: 3220765 - RNA, 13 nt, Human
gaaacugccagca

SEQ ID NO: 3220766 - RNA, 16 nt, Human
gaaaaaugagccuggc

SEQ ID NO: 3220767 - RNA, 16 nt, Human
gaaaaagcaaaaggca

SEQ ID NO: 3220768 - RNA, 20 nt, Human
gaaaccuuuucuuguaucug

SEQ ID NO: 3220769 - RNA, 17 nt, Human
gaaaaauuauugagcca

SEQ ID NO: 3220770 - RNA, 16 nt, Human
gaaaaauguuaggaca

SEQ ID NO: 3220771 - RNA, 22 nt, Human
gaaaaauucaauaguaauauaa

SEQ ID NO: 3220772 - RNA, 20 nt, Human
gaaaaauucaauaguaauau

SEQ ID NO: 3220773 - RNA, 14 nt, Human
gaaaaauguuagga

SEQ ID NO: 3220774 - RNA, 19 nt, Human
gaaagacuauucaaacagu

SEQ ID NO: 3220775 - RNA, 16 nt, Human
gaaacugacuugcugu

SEQ ID NO: 3220776 - RNA, 17 nt, Human
gaaagacuauucaaaca

SEQ ID NO: 3220777 - RNA, 23 nt, Human
gaaagacuauucaaacagucuca

SEQ ID NO: 3220778 - RNA, 22 nt, Human
gaaagacuauucaaacagucuc

SEQ ID NO: 3220779 - RNA, 13 nt, Human
gaaagcagaacag

SEQ ID NO: 3220780 - RNA, 23 nt, Human
gaaagauggcugugccucugccu

SEQ ID NO: 3220781 - RNA, 19 nt, Human
gaaagaugguuaaacauuu

SEQ ID NO: 3220782 - RNA, 16 nt, Human
gaaagaucaaaagguu

SEQ ID NO: 3220783 - RNA, 22 nt, Human
gaaagauggcugugccucugcc

SEQ ID NO: 3220784 - RNA, 16 nt, Human
gaaagaguaggaagac

SEQ ID NO: 3220785 - RNA, 16 nt, Human
gaaagagauuuaaacu

SEQ ID NO: 3220786 - RNA, 13 nt, Human
gaaagagauuuaa

SEQ ID NO: 3220787 - RNA, 17 nt, Human
gaaaguuaacauuaaug

SEQ ID NO: 3220788 - RNA, 21 nt, Human
gaaaguguucuguuacaaaau

SEQ ID NO: 3220789 - RNA, 19 nt, Human
gaaaguguucuguuacaaa

SEQ ID NO: 3220790 - RNA, 18 nt, Human
gaaaguguucuguuacaa

SEQ ID NO: 3220791 - RNA, 17 nt, Human
gaaaguguucuguuaca

SEQ ID NO: 3220792 - RNA, 16 nt, Human
gaaaguguucuguuac

SEQ ID NO: 3220793 - RNA, 15 nt, Human
gaaaguguucuguua

SEQ ID NO: 3220794 - RNA, 14 nt, Human
gaaaguguucuguu

SEQ ID NO: 3220795 - RNA, 14 nt, Human
gaaaguuuacagga

SEQ ID NO: 3220796 - RNA, 16 nt, Human
gaaaguuuacaggaaa

SEQ ID NO: 3220797 - RNA, 14 nt, Human
gaaauaaaaagagu

SEQ ID NO: 3220798 - RNA, 13 nt, Human
gaaaguguucugu

SEQ ID NO: 3220799 - RNA, 18 nt, Human
gaaagugccuuugcagcu

SEQ ID NO: 3220800 - RNA, 20 nt, Human
gaaagugccuuugcagcuca

SEQ ID NO: 3220801 - RNA, 15 nt, Human
gaaagugccuuugca

SEQ ID NO: 3220802 - RNA, 23 nt, Human
gaaagugccuuugcagcucagaa

SEQ ID NO: 3220803 - RNA, 21 nt, Human
gaaagcuugcccuggugccuc

SEQ ID NO: 3220804 - RNA, 11 nt, Human
gaaaggaaaga

SEQ ID NO: 3220805 - RNA, 16 nt, Human
gaaaggaaagaggcuc

SEQ ID NO: 3220806 - RNA, 20 nt, Human
gaaagcacagaggccuccug

SEQ ID NO: 3220807 - RNA, 22 nt, Human
gaaaguacuucuccacccugcu

SEQ ID NO: 3220808 - RNA, 15 nt, Human
gaaaggagaguacuu

SEQ ID NO: 3220809 - RNA, 22 nt, Human
gaaaggaguuucuuuagcugac

SEQ ID NO: 3220810 - RNA, 10 nt, Human
gaaagucaga

SEQ ID NO: 3220811 - RNA, 21 nt, Human
gaaagucagaaucagaagaua

SEQ ID NO: 3220812 - RNA, 16 nt, Human
gaaaggaccugcaaac

SEQ ID NO: 3220813 - RNA, 12 nt, Human
gaaaggaaaaga

SEQ ID NO: 3220814 - RNA, 14 nt, Human
gaaaggaaaagaaa

SEQ ID NO: 3220815 - RNA, 13 nt, Human
gaaaggaaaccuu

SEQ ID NO: 3220816 - RNA, 14 nt, Human
gaaaggaaaccuuu

SEQ ID NO: 3220817 - RNA, 15 nt, Human
gaaaggaaaccuuuu

SEQ ID NO: 3220818 - RNA, 21 nt, Human
gaaagcuuuguugaaagaaag

SEQ ID NO: 3220819 - RNA, 20 nt, Human
gaaagcuuuguugaaagaaa

SEQ ID NO: 3220820 - RNA, 15 nt, Human
cuuucuucaaaauau

SEQ ID NO: 3220821 - RNA, 23 nt, Human
cuuucuuaauauuuuuacaugca

SEQ ID NO: 3220822 - RNA, 21 nt, Human
cuuucuuaauauuuuuacaug

SEQ ID NO: 3220823 - RNA, 17 nt, Human
cuuuccugaggcugggc

SEQ ID NO: 3220824 - RNA, 16 nt, Human
cuuuccugaggcuggg

SEQ ID NO: 3220825 - RNA, 20 nt, Human
cuuuccugaggcugggcucc

SEQ ID NO: 3220826 - RNA, 16 nt, Human
cuuucuuucuuucuuu

SEQ ID NO: 3220827 - RNA, 18 nt, Human
cuuugaagagugaaauac

SEQ ID NO: 3220828 - RNA, 23 nt, Human
cuuugaaauauauggucuaaugu

SEQ ID NO: 3220829 - RNA, 19 nt, Human
cuuuggaaagaguaggaag

SEQ ID NO: 3220830 - RNA, 23 nt, Human
cuuugcccccaaacccccauucu

SEQ ID NO: 3220831 - RNA, 23 nt, Human
cuuuggaaagaguaggaagacuu

SEQ ID NO: 3220832 - RNA, 19 nt, Human
cuuuggaaaguagaaaagc

SEQ ID NO: 3220833 - RNA, 21 nt, Human
cuuugcccuuuacuugucuuu

SEQ ID NO: 3220834 - RNA, 14 nt, Human
cuuugccaucucug

SEQ ID NO: 3220835 - RNA, 12 nt, Human
cuuugccaucuc

SEQ ID NO: 3220836 - RNA, 15 nt, Human
cuuugccaugugcuu

SEQ ID NO: 3220837 - RNA, 19 nt, Human
cuuugccaucucugcucca

SEQ ID NO: 3220838 - RNA, 18 nt, Human
cuuugccaucucugcucc

SEQ ID NO: 3220839 - RNA, 17 nt, Human
cuuugcacuuuuucuua

SEQ ID NO: 3220840 - RNA, 22 nt, Human
cuuugcacuuuuucuuaaucau

SEQ ID NO: 3220841 - RNA, 15 nt, Human
cuuugcagacaggca

SEQ ID NO: 3220842 - RNA, 14 nt, Human
cuuugcagacaggc

SEQ ID NO: 3220843 - RNA, 11 nt, Human
cuuugaauuuu

SEQ ID NO: 3220844 - RNA, 13 nt, Human
cuuugaauuuuca

SEQ ID NO: 3220845 - RNA, 15 nt, Human
cuuugaauuuucauu

SEQ ID NO: 3220846 - RNA, 14 nt, Human
cuuugaauuuucau

SEQ ID NO: 3220847 - RNA, 18 nt, Human
cuuugaauuuucauuuua

SEQ ID NO: 3220848 - RNA, 20 nt, Human
cuuuccaaagccaaugugaa

SEQ ID NO: 3220849 - RNA, 23 nt, Human
cuuuccaaagccaaugugaacag

SEQ ID NO: 3220850 - RNA, 15 nt, Human
cuuuccaccuucuca

SEQ ID NO: 3220851 - RNA, 18 nt, Human
cuuuccacuccuccuagc

SEQ ID NO: 3220852 - RNA, 21 nt, Human
cuuuccacuccuccuagccac

SEQ ID NO: 3220853 - RNA, 14 nt, Human
cuuuccaggaaggc

SEQ ID NO: 3220854 - RNA, 21 nt, Human
cuuuccgguguuuaagacauu

SEQ ID NO: 3220855 - RNA, 22 nt, Human
cuuuccuacuugcacucuucua

SEQ ID NO: 3220856 - RNA, 15 nt, Human
cuuuccccaugucuc

SEQ ID NO: 3220857 - RNA, 20 nt, Human
cuuuccccaugucucgacuc

SEQ ID NO: 3220858 - RNA, 21 nt, Human
cuuuccccaugucucgacuca

SEQ ID NO: 3220859 - RNA, 16 nt, Human
cuuucaagaucuaaau

SEQ ID NO: 3220860 - RNA, 17 nt, Human
cuuucaagaucuaaauc

SEQ ID NO: 3220861 - RNA, 19 nt, Human
cuuucaagggcuuuccugu

SEQ ID NO: 3220862 - RNA, 17 nt, Human
cuuuauuuuuuugaacu

SEQ ID NO: 3220863 - RNA, 20 nt, Human
cuuuauuuuuuugaacucuu

SEQ ID NO: 3220864 - RNA, 14 nt, Human
cuuucaacucauug

SEQ ID NO: 3220865 - RNA, 15 nt, Human
cuuucaagaacuugu

SEQ ID NO: 3220866 - RNA, 13 nt, Human
cuuucaagaacuu

SEQ ID NO: 3220867 - RNA, 17 nt, Human
cuuucaagaacuuguuu

SEQ ID NO: 3220868 - RNA, 16 nt, Human
cuuucaagaacuuguu

SEQ ID NO: 3220869 - RNA, 14 nt, Human
cuuuggaguuaaaa

SEQ ID NO: 3220870 - RNA, 17 nt, Human
cuuuggaguuaaaaugc

SEQ ID NO: 3220871 - RNA, 19 nt, Human
cuuuuaaaaaguauugcca

SEQ ID NO: 3220872 - RNA, 16 nt, Human
cuuuuaaaaaguauug

SEQ ID NO: 3220873 - RNA, 15 nt, Human
cuuuuaaaaaguauu

SEQ ID NO: 3220874 - RNA, 14 nt, Human
cuuuuaaaaaguau

SEQ ID NO: 3220875 - RNA, 18 nt, Human
cuuuuaaaacacuuccau

SEQ ID NO: 3220876 - RNA, 19 nt, Human
cuuuuaaaacuacuuagca

SEQ ID NO: 3220877 - RNA, 14 nt, Human
cuuuuaaaacuacu

SEQ ID NO: 3220878 - RNA, 23 nt, Human
cuuuuaaaaaguauugccaaaca

SEQ ID NO: 3220879 - RNA, 21 nt, Human
cuuuuaaaaaguauugccaaa

SEQ ID NO: 3220880 - RNA, 14 nt, Human
cuuuuaaggauaaa

SEQ ID NO: 3220881 - RNA, 18 nt, Human
cuuuuaaggauaaaucau

SEQ ID NO: 3220882 - RNA, 23 nt, Human
cuuuuaaggauaaaucauaaagu

SEQ ID NO: 3220883 - RNA, 16 nt, Human
cuuuuaaauuagaaaa

SEQ ID NO: 3220884 - RNA, 17 nt, Human
cuuuuaaauuagaaaau

SEQ ID NO: 3220885 - RNA, 19 nt, Human
cuuuuaaauuagaaaauau

SEQ ID NO: 3220886 - RNA, 21 nt, Human
cuuuucgcaggauucuuccuc

SEQ ID NO: 3220887 - RNA, 20 nt, Human
cuuuucgcaggauucuuccu

SEQ ID NO: 3220888 - RNA, 15 nt, Human
cuuuuccuugcauac

SEQ ID NO: 3220889 - RNA, 15 nt, Human
cuuuuccucuuagaa

SEQ ID NO: 3220890 - RNA, 19 nt, Human
cuuuuccucuuagaagaau

SEQ ID NO: 3220891 - RNA, 20 nt, Human
cuuuuccuugcauacaaaca

SEQ ID NO: 3220892 - RNA, 20 nt, Human
cuuuuccucgcuucuuucaa

SEQ ID NO: 3220893 - RNA, 19 nt, Human
cuuuuccucgcuucuuuca

SEQ ID NO: 3220894 - RNA, 16 nt, Human
cuuuuccucgcuucuu

SEQ ID NO: 3220895 - RNA, 18 nt, Human
cuuuuccucgcuucuuuc

SEQ ID NO: 3220896 - RNA, 17 nt, Human
cuuuuccucgcuucuuu

SEQ ID NO: 3220897 - RNA, 18 nt, Human
cuuuuccaguauuuuagu

SEQ ID NO: 3220898 - RNA, 14 nt, Human
cuuuucccuucuuu

SEQ ID NO: 3220899 - RNA, 14 nt, Human
cuuuuccagagcau

SEQ ID NO: 3220900 - RNA, 14 nt, Human
cuuuuccaguauuu

SEQ ID NO: 3220901 - RNA, 21 nt, Human
cuuuuccagagcauuccaguc

SEQ ID NO: 3220902 - RNA, 14 nt, Human
cuuuucauugcugu

SEQ ID NO: 3220903 - RNA, 19 nt, Human
cuuuuccaauaugugauuu

SEQ ID NO: 3220904 - RNA, 17 nt, Human
cuuuuccaauaugugau

SEQ ID NO: 3220905 - RNA, 13 nt, Human
cuuuuccaacccu

SEQ ID NO: 3220906 - RNA, 23 nt, Human
cuuuuccaacccucaucaccaac

SEQ ID NO: 3220907 - RNA, 22 nt, Human
cuuuucauuuaggugaggaagc

SEQ ID NO: 3220908 - RNA, 18 nt, Human
cuuuucacccuucuacuc

SEQ ID NO: 3220909 - RNA, 12 nt, Human
cuuuucacugcu

SEQ ID NO: 3220910 - RNA, 18 nt, Human
cuuuucaauauauuugua

SEQ ID NO: 3220911 - RNA, 15 nt, Human
cuuuucaccauucgu

SEQ ID NO: 3220912 - RNA, 14 nt, Human
cuuuucacccuucu

SEQ ID NO: 3220913 - RNA, 17 nt, Human
cuuuucacccuucuacu

SEQ ID NO: 3220914 - RNA, 16 nt, Human
cuuuucacccuucuac

SEQ ID NO: 3220915 - RNA, 16 nt, Human
cuuuucuuucuaccaa

SEQ ID NO: 3220916 - RNA, 17 nt, Human
cuuuucuuugccaucuc

SEQ ID NO: 3220917 - RNA, 22 nt, Human
cuuuucuuugccaucucugcuc

SEQ ID NO: 3220918 - RNA, 21 nt, Human
cuuuucuuugccaucucugcu

SEQ ID NO: 3220919 - RNA, 17 nt, Human
cuuuucuuucagccaag

SEQ ID NO: 3220920 - RNA, 23 nt, Human
cuuuucuaaacuaggcuccuuca

SEQ ID NO: 3220921 - RNA, 16 nt, Human
cuuuucuuucagccaa

SEQ ID NO: 3220922 - RNA, 22 nt, Human
cuuuucuaaacuaggcuccuuc

SEQ ID NO: 3220923 - RNA, 15 nt, Human
cuuuugauguggugu

SEQ ID NO: 3220924 - RNA, 22 nt, Human
cuuuuuaauauugauaugcuua

SEQ ID NO: 3220925 - RNA, 16 nt, Human
cuuuuuaaucaugaau

SEQ ID NO: 3220926 - RNA, 18 nt, Human
cuuuuuaaucaugaauau

SEQ ID NO: 3220927 - RNA, 21 nt, Human
cuuuuuaaucaugaauaugau

SEQ ID NO: 3220928 - RNA, 11 nt, Human
cuuuuuauaaa

SEQ ID NO: 3220929 - RNA, 13 nt, Human
cuuuuuauaaaaa

SEQ ID NO: 3220930 - RNA, 14 nt, Human
cuuuuuauaaaaag

SEQ ID NO: 3220931 - RNA, 15 nt, Human
cuuuuuauaaaaaga

SEQ ID NO: 3220932 - RNA, 18 nt, Human
cuuuuuauaaaaagauaa

SEQ ID NO: 3220933 - RNA, 19 nt, Human
cuuuuuauaaaaagauaau

SEQ ID NO: 3220934 - RNA, 15 nt, Human
cuuuuuaaccucugu

SEQ ID NO: 3220935 - RNA, 16 nt, Human
cuuuuuaaccucuguu

SEQ ID NO: 3220936 - RNA, 13 nt, Human
cuuuuuuauuaau

SEQ ID NO: 3220937 - RNA, 15 nt, Human
cuuuuuuauaucuug

SEQ ID NO: 3220938 - RNA, 14 nt, Human
cuuuuuuauuaauc

SEQ ID NO: 3220939 - RNA, 15 nt, Human
cuuuuuuauuaauca

SEQ ID NO: 3220940 - RNA, 14 nt, Human
cuuuuuuauaucuu

SEQ ID NO: 3220941 - RNA, 11 nt, Human
gaaaaagaaaa

SEQ ID NO: 3220942 - RNA, 16 nt, Human
gaaaaagaaaaaauau

SEQ ID NO: 3220943 - RNA, 17 nt, Human
cuuuuuuauuaaucacu

SEQ ID NO: 3220944 - RNA, 19 nt, Human
cuuuuuuauuaaucacugu

SEQ ID NO: 3220945 - RNA, 20 nt, Human
cuuuuuuauuaaucacugug

SEQ ID NO: 3220946 - RNA, 21 nt, Human
cuuuuuuauuaaucacugugu

SEQ ID NO: 3220947 - RNA, 21 nt, Human
cuuuuuagaugugcugcuuug

SEQ ID NO: 3220948 - RNA, 21 nt, Human
cuuguaaauagcucagguguc

SEQ ID NO: 3220949 - RNA, 18 nt, Human
cuuguaaaaauuaaaagu

SEQ ID NO: 3220950 - RNA, 16 nt, Human
cuuggcuuggcccugg

SEQ ID NO: 3220951 - RNA, 17 nt, Human
cuuggcuugccauuuuu

SEQ ID NO: 3220952 - RNA, 18 nt, Human
cuuggcuuggcccuggca

SEQ ID NO: 3220953 - RNA, 18 nt, Human
cuuggggaccagagcugc

SEQ ID NO: 3220954 - RNA, 19 nt, Human
cuuggggaccagagcugcc

SEQ ID NO: 3220955 - RNA, 17 nt, Human
cuuggggaccagagcug

SEQ ID NO: 3220956 - RNA, 16 nt, Human
cuuggggaccagagcu

SEQ ID NO: 3220957 - RNA, 13 nt, Human
cuuggcucugagg

SEQ ID NO: 3220958 - RNA, 22 nt, Human
cuuggcucucaaugcuguuugg

SEQ ID NO: 3220959 - RNA, 19 nt, Human
cuuguaucuggauucaaau

SEQ ID NO: 3220960 - RNA, 22 nt, Human
cuuguaacuaaaauaauuuugu

SEQ ID NO: 3220961 - RNA, 17 nt, Human
cuuguaacuaaaauaau

SEQ ID NO: 3220962 - RNA, 16 nt, Human
cuuguaacuaaaauaa

SEQ ID NO: 3220963 - RNA, 14 nt, Human
cuuguaacuaaaau

SEQ ID NO: 3220964 - RNA, 21 nt, Human
cuuguaugaaagauggcugug

SEQ ID NO: 3220965 - RNA, 16 nt, Human
cuuguauuuuuuaaug

SEQ ID NO: 3220966 - RNA, 18 nt, Human
cuuguggacacagcucuu

SEQ ID NO: 3220967 - RNA, 17 nt, Human
cuuguggacacagcucu

SEQ ID NO: 3220968 - RNA, 16 nt, Human
cuuguggacacagcuc

SEQ ID NO: 3220969 - RNA, 16 nt, Human
cuugucauagccagug

SEQ ID NO: 3220970 - RNA, 13 nt, Human
cuuggagccugca

SEQ ID NO: 3220971 - RNA, 21 nt, Human
cuuggacacuuaauucuguuc

SEQ ID NO: 3220972 - RNA, 18 nt, Human
cuuggagccugcagagcu

SEQ ID NO: 3220973 - RNA, 17 nt, Human
cuuggagccugcagagc

SEQ ID NO: 3220974 - RNA, 16 nt, Human
cuuggagccugcagag

SEQ ID NO: 3220975 - RNA, 15 nt, Human
cuuggagccugcaga

SEQ ID NO: 3220976 - RNA, 20 nt, Human
cuuggagccugcagagcugc

SEQ ID NO: 3220977 - RNA, 19 nt, Human
cuuggagccugcagagcug

SEQ ID NO: 3220978 - RNA, 14 nt, Human
cuuggagcucugag

SEQ ID NO: 3220979 - RNA, 21 nt, Human
cuuggaugaguuuugggaagu

SEQ ID NO: 3220980 - RNA, 13 nt, Human
cuuggauuguccc

SEQ ID NO: 3220981 - RNA, 23 nt, Human
cuuggcucaaguccucuuuucug

SEQ ID NO: 3220982 - RNA, 13 nt, Human
cuuggcugcaggg

SEQ ID NO: 3220983 - RNA, 12 nt, Human
cuuggcugcagg

SEQ ID NO: 3220984 - RNA, 13 nt, Human
cuugcuugcuuuu

SEQ ID NO: 3220985 - RNA, 20 nt, Human
cuugcugcccugugcuccuc

SEQ ID NO: 3220986 - RNA, 10 nt, Human
cuugcugccu

SEQ ID NO: 3220987 - RNA, 13 nt, Human
cuugcugccucgg

SEQ ID NO: 3220988 - RNA, 11 nt, Human
cuugcugccuc

SEQ ID NO: 3220989 - RNA, 21 nt, Human
cuugcauuuuugcaggagcag

SEQ ID NO: 3220990 - RNA, 20 nt, Human
cuugccaaaguacagaauuu

SEQ ID NO: 3220991 - RNA, 21 nt, Human
cuugccaaaguacagaauuug

SEQ ID NO: 3220992 - RNA, 20 nt, Human
cuugcauuuuugcaggagca

SEQ ID NO: 3220993 - RNA, 14 nt, Human
cuugcauuuuugca

SEQ ID NO: 3220994 - RNA, 13 nt, Human
cuugcauuuuugc

SEQ ID NO: 3220995 - RNA, 22 nt, Human
cuugcauuucacuugaguggag

SEQ ID NO: 3220996 - RNA, 18 nt, Human
cuugcauuuaaaagacag

SEQ ID NO: 3220997 - RNA, 12 nt, Human
cuugcauuuuug

SEQ ID NO: 3220998 - RNA, 20 nt, Human
cuugcauuuuagcuaauuua

SEQ ID NO: 3220999 - RNA, 16 nt, Human
cuugcauuuuagcuaa

SEQ ID NO: 3221000 - RNA, 19 nt, Human
cuugaacugagcuuggaag

SEQ ID NO: 3221001 - RNA, 17 nt, Human
cuugaacugagcuugga

SEQ ID NO: 3221002 - RNA, 16 nt, Human
cuugaacuggguacuu

SEQ ID NO: 3221003 - RNA, 19 nt, Human
cuugaacuccuggccucaa

SEQ ID NO: 3221004 - RNA, 20 nt, Human
cuugaacuggguacuugugg

SEQ ID NO: 3221005 - RNA, 18 nt, Human
cuugaacuggguacuugu

SEQ ID NO: 3221006 - RNA, 19 nt, Human
cuugaacccgggaggcaga

SEQ ID NO: 3221007 - RNA, 14 nt, Human
cuugaacccgggag

SEQ ID NO: 3221008 - RNA, 18 nt, Human
cuugaacuccuggccuca

SEQ ID NO: 3221009 - RNA, 17 nt, Human
cuugaacuccuggccuc

SEQ ID NO: 3221010 - RNA, 15 nt, Human
cuugaacuccuggcc

SEQ ID NO: 3221011 - RNA, 14 nt, Human
cuugaacuccuggc

SEQ ID NO: 3221012 - RNA, 12 nt, Human
cuucuuugcccu

SEQ ID NO: 3221013 - RNA, 14 nt, Human
cuucuuucccuucc

SEQ ID NO: 3221014 - RNA, 13 nt, Human
cuucuuucccuuc

SEQ ID NO: 3221015 - RNA, 23 nt, Human
cuucuuucccuuccuccauccuc

SEQ ID NO: 3221016 - RNA, 19 nt, Human
cuucuuucccuuccuccau

SEQ ID NO: 3221017 - RNA, 18 nt, Human
cuucuuucccuuccucca

SEQ ID NO: 3221018 - RNA, 16 nt, Human
cuucuuucccuuccuc

SEQ ID NO: 3221019 - RNA, 22 nt, Human
cuucuuuauaauucuacuuuga

SEQ ID NO: 3221020 - RNA, 22 nt, Human
cuugaguaaaauacucuuuuua

SEQ ID NO: 3221021 - RNA, 14 nt, Human
cuugcaauggcagc

SEQ ID NO: 3221022 - RNA, 22 nt, Human
cuugcaagggcggccuuuccca

SEQ ID NO: 3221023 - RNA, 12 nt, Human
cuugcagaacuu

SEQ ID NO: 3221024 - RNA, 18 nt, Human
cuugcacucucuuggcug

SEQ ID NO: 3221025 - RNA, 17 nt, Human
cuugcacucuucuacca

SEQ ID NO: 3221026 - RNA, 18 nt, Human
cuugcacuggccuucuga

SEQ ID NO: 3221027 - RNA, 19 nt, Human
cuugcacuggccuucugau

SEQ ID NO: 3221028 - RNA, 17 nt, Human
cuugcacucucuuggcu

SEQ ID NO: 3221029 - RNA, 18 nt, Human
cuugcagacucuacagag

SEQ ID NO: 3221030 - RNA, 15 nt, Human
cuugcauacaaacaa

SEQ ID NO: 3221031 - RNA, 14 nt, Human
cuugcauacaaaca

SEQ ID NO: 3221032 - RNA, 21 nt, Human
cuugcaugguuuagaaagcuu

SEQ ID NO: 3221033 - RNA, 21 nt, Human
cuugcauaguaaauguaguuc

SEQ ID NO: 3221034 - RNA, 21 nt, Human
cuugcauacaaacaagcauau

SEQ ID NO: 3221035 - RNA, 20 nt, Human
cuugcauacaaacaagcaua

SEQ ID NO: 3221036 - RNA, 21 nt, Human
cuugcaugaggcuaguguggu

SEQ ID NO: 3221037 - RNA, 17 nt, Human
cuugcaugaggcuagug

SEQ ID NO: 3221038 - RNA, 21 nt, Human
cuugaguaaaauacucuuuuu

SEQ ID NO: 3221039 - RNA, 14 nt, Human
cuugagagggugga

SEQ ID NO: 3221040 - RNA, 21 nt, Human
cuugaccauucuccaccugcc

SEQ ID NO: 3221041 - RNA, 17 nt, Human
cuugaccauucuccacc

SEQ ID NO: 3221042 - RNA, 20 nt, Human
cuugaccauucuccaccugc

SEQ ID NO: 3221043 - RNA, 17 nt, Human
gaccuuuccugaggaag

SEQ ID NO: 3221044 - RNA, 14 nt, Human
gaccuuuugcugcc

SEQ ID NO: 3221045 - RNA, 21 nt, Human
gaccuuucaauaggaaaaacu

SEQ ID NO: 3221046 - RNA, 20 nt, Human
gaccuuguaauguaacugcu

SEQ ID NO: 3221047 - RNA, 18 nt, Human
gaccuuguaauguaacug

SEQ ID NO: 3221048 - RNA, 17 nt, Human
gaccuuguaauguaacu

SEQ ID NO: 3221049 - RNA, 16 nt, Human
gaccuuguaauguaac

SEQ ID NO: 3221050 - RNA, 15 nt, Human
gaccuuguaauguaa

SEQ ID NO: 3221051 - RNA, 23 nt, Human
gaccuugaacuggguacuugugg

SEQ ID NO: 3221052 - RNA, 20 nt, Human
gaccugcugaaguccggaac

SEQ ID NO: 3221053 - RNA, 13 nt, Human
gaccugcugaagu

SEQ ID NO: 3221054 - RNA, 19 nt, Human
gaccugccucggccuccca

SEQ ID NO: 3221055 - RNA, 15 nt, Human
gacguguuaugacuc

SEQ ID NO: 3221056 - RNA, 21 nt, Human
gacgucagauguuuaaaacac

SEQ ID NO: 3221057 - RNA, 17 nt, Human
gacguguuaugacucca

SEQ ID NO: 3221058 - RNA, 20 nt, Human
gacguguuaugacuccagaa

SEQ ID NO: 3221059 - RNA, 16 nt, Human
gacguacaaguaguuc

SEQ ID NO: 3221060 - RNA, 22 nt, Human
gacgguuccuacacaggacagg

SEQ ID NO: 3221061 - RNA, 18 nt, Human
gacguacaaguaguucug

SEQ ID NO: 3221062 - RNA, 19 nt, Human
gacguacaaguaguucugu

SEQ ID NO: 3221063 - RNA, 22 nt, Human
gacguacaaguaguucuguauu

SEQ ID NO: 3221064 - RNA, 11 nt, Human
gacgguuccua

SEQ ID NO: 3221065 - RNA, 21 nt, Human
gacgguuccuacacaggacag

SEQ ID NO: 3221066 - RNA, 19 nt, Human
gacgguuccuacacaggac

SEQ ID NO: 3221067 - RNA, 18 nt, Human
gacgguuccuacacagga

SEQ ID NO: 3221068 - RNA, 16 nt, Human
gacgguuccuacacag

SEQ ID NO: 3221069 - RNA, 21 nt, Human
gacggagucccaccuuggcug

SEQ ID NO: 3221070 - RNA, 17 nt, Human
gacgggguuucaccaug

SEQ ID NO: 3221071 - RNA, 18 nt, Human
gacggagucccaccuugg

SEQ ID NO: 3221072 - RNA, 14 nt, Human
gacggagucccacc

SEQ ID NO: 3221073 - RNA, 20 nt, Human
gacgacuguuuucccaacac

SEQ ID NO: 3221074 - RNA, 14 nt, Human
gacgcaccagccca

SEQ ID NO: 3221075 - RNA, 14 nt, Human
gacuagacacacaa

SEQ ID NO: 3221076 - RNA, 19 nt, Human
gacuagacacacaaagcag

SEQ ID NO: 3221077 - RNA, 16 nt, Human
gacuagacacacaaag

SEQ ID NO: 3221078 - RNA, 17 nt, Human
gacuacucccccaggug

SEQ ID NO: 3221079 - RNA, 12 nt, Human
gacuacaggcac

SEQ ID NO: 3221080 - RNA, 14 nt, Human
gacuacuguucagc

SEQ ID NO: 3221081 - RNA, 22 nt, Human
gacguguuaugacuccagaauu

SEQ ID NO: 3221082 - RNA, 18 nt, Human
gacuccaaagaaauguaa

SEQ ID NO: 3221083 - RNA, 11 nt, Human
gacuccagaaa

SEQ ID NO: 3221084 - RNA, 22 nt, Human
gacuccagaaaugucccuuucu

SEQ ID NO: 3221085 - RNA, 15 nt, Human
gacucaguggggagg

SEQ ID NO: 3221086 - RNA, 21 nt, Human
gacucauauccccuauuuaac

SEQ ID NO: 3221087 - RNA, 15 nt, Human
gacucagguugucug

SEQ ID NO: 3221088 - RNA, 15 nt, Human
gacuccugcaggcag

SEQ ID NO: 3221089 - RNA, 16 nt, Human
gacuccugcaggcagc

SEQ ID NO: 3221090 - RNA, 14 nt, Human
gacuccugcaggca

SEQ ID NO: 3221091 - RNA, 22 nt, Human
gacucccccaguccccuucccg

SEQ ID NO: 3221092 - RNA, 15 nt, Human
gaccugccucggccu

SEQ ID NO: 3221093 - RNA, 21 nt, Human
gaccugccccuccucucugcc

SEQ ID NO: 3221094 - RNA, 11 nt, Human
gaccucaggcc

SEQ ID NO: 3221095 - RNA, 12 nt, Human
gaccucaggccu

SEQ ID NO: 3221096 - RNA, 14 nt, Human
gaccugaggcccuu

SEQ ID NO: 3221097 - RNA, 15 nt, Human
gaccugaggcccuuc

SEQ ID NO: 3221098 - RNA, 18 nt, Human
gaccugaggcccuucucu

SEQ ID NO: 3221099 - RNA, 21 nt, Human
gaccugaggcccuucucucca

SEQ ID NO: 3221100 - RNA, 17 nt, Human
gaccucaccuaggaagu

SEQ ID NO: 3221101 - RNA, 16 nt, Human
gaccucaccuaggaag

SEQ ID NO: 3221102 - RNA, 17 nt, Human
gaccuaaaaauuggugu

SEQ ID NO: 3221103 - RNA, 22 nt, Human
gaccuaaccagggccagaagua

SEQ ID NO: 3221104 - RNA, 19 nt, Human
gaccuaaccagggccagaa

SEQ ID NO: 3221105 - RNA, 18 nt, Human
gaccuaaccagggccaga

SEQ ID NO: 3221106 - RNA, 15 nt, Human
gaccuaaccagggcc

SEQ ID NO: 3221107 - RNA, 14 nt, Human
gaccgugaggccag

SEQ ID NO: 3221108 - RNA, 19 nt, Human
gaccgugaggccagagaca

SEQ ID NO: 3221109 - RNA, 12 nt, Human
gaccgucuuccu

SEQ ID NO: 3221110 - RNA, 19 nt, Human
gaccgugaagauacuuugu

SEQ ID NO: 3221111 - RNA, 22 nt, Human
gacccacaagaaaugaaagcag

SEQ ID NO: 3221112 - RNA, 11 nt, Human
gacccacugcu

SEQ ID NO: 3221113 - RNA, 16 nt, Human
gacccaugcugcccug

SEQ ID NO: 3221114 - RNA, 14 nt, Human
gacccaugcugccc

SEQ ID NO: 3221115 - RNA, 15 nt, Human
gacccaugcugcccu

SEQ ID NO: 3221116 - RNA, 13 nt, Human
gacccaugcugcc

SEQ ID NO: 3221117 - RNA, 23 nt, Human
gacccugucucaaaaaaagaaaa

SEQ ID NO: 3221118 - RNA, 16 nt, Human
gacccugcccuguggg

SEQ ID NO: 3221119 - RNA, 13 nt, Human
gacccugcccugu

SEQ ID NO: 3221120 - RNA, 15 nt, Human
gacccugcccugugg

SEQ ID NO: 3221121 - RNA, 19 nt, Human
gacccugaggcccagaggg

SEQ ID NO: 3221122 - RNA, 20 nt, Human
gacccugaggcccagagggc

SEQ ID NO: 3221123 - RNA, 12 nt, Human
gacccugcccug

SEQ ID NO: 3221124 - RNA, 21 nt, Human
gacccugaggcccagagggcc

SEQ ID NO: 3221125 - RNA, 18 nt, Human
gacccugaggcccagagg

SEQ ID NO: 3221126 - RNA, 23 nt, Human
gaccccucauagcccucacccug

SEQ ID NO: 3221127 - RNA, 22 nt, Human
gaccccucauagcccucacccu

SEQ ID NO: 3221128 - RNA, 19 nt, Human
gaccccaucugugaauaag

SEQ ID NO: 3221129 - RNA, 16 nt, Human
gaccccaucugugaau

SEQ ID NO: 3221130 - RNA, 22 nt, Human
gacacccugugauggggcccug

SEQ ID NO: 3221131 - RNA, 23 nt, Human
gacacccugugauggggcccugc

SEQ ID NO: 3221132 - RNA, 17 nt, Human
gacaccuacugaguggc

SEQ ID NO: 3221133 - RNA, 18 nt, Human
gacacaggcccggcucca

SEQ ID NO: 3221134 - RNA, 17 nt, Human
gacacagugaccauacu

SEQ ID NO: 3221135 - RNA, 22 nt, Human
gacacaggggacacccagaaac

SEQ ID NO: 3221136 - RNA, 12 nt, Human
gacacccuguga

SEQ ID NO: 3221137 - RNA, 13 nt, Human
gacacccugugau

SEQ ID NO: 3221138 - RNA, 14 nt, Human
gacaccccacuuag

SEQ ID NO: 3221139 - RNA, 15 nt, Human
gacaccccacuuagc

SEQ ID NO: 3221140 - RNA, 18 nt, Human
gacacuaaccacgcugga

SEQ ID NO: 3221141 - RNA, 17 nt, Human
gacacuaaccacgcugg

SEQ ID NO: 3221142 - RNA, 16 nt, Human
gacacuaaccacgcug

SEQ ID NO: 3221143 - RNA, 15 nt, Human
gacacuaaccacgcu

SEQ ID NO: 3221144 - RNA, 17 nt, Human
gacacgaauauugcuga

SEQ ID NO: 3221145 - RNA, 18 nt, Human
gacacgaauauugcugau

SEQ ID NO: 3221146 - RNA, 19 nt, Human
gacacgaauauugcugaug

SEQ ID NO: 3221147 - RNA, 17 nt, Human
gacaccuugacagggca

SEQ ID NO: 3221148 - RNA, 15 nt, Human
gacaccuugacaggg

SEQ ID NO: 3221149 - RNA, 20 nt, Human
gacaccuugacagggcacac

SEQ ID NO: 3221150 - RNA, 18 nt, Human
gacaccuugacagggcac

SEQ ID NO: 3221151 - RNA, 15 nt, Human
gacacgaauauugcu

SEQ ID NO: 3221152 - RNA, 12 nt, Human
gacaaugcaaac

SEQ ID NO: 3221153 - RNA, 16 nt, Human
gacaaugcaaaccauc

SEQ ID NO: 3221154 - RNA, 18 nt, Human
gacaaugcaaaccaucau

SEQ ID NO: 3221155 - RNA, 13 nt, Human
gacaaucuucugu

SEQ ID NO: 3221156 - RNA, 22 nt, Human
gacacaagccuucggcgccuua

SEQ ID NO: 3221157 - RNA, 14 nt, Human
gacacacaaagcag

SEQ ID NO: 3221158 - RNA, 13 nt, Human
gacacacaaagca

SEQ ID NO: 3221159 - RNA, 17 nt, Human
gacacaggcccggcucc

SEQ ID NO: 3221160 - RNA, 15 nt, Human
gacacaggcccggcu

SEQ ID NO: 3221161 - RNA, 12 nt, Human
gacacaggcccg

SEQ ID NO: 3221162 - RNA, 16 nt, Human
gacaaugacccagugg

SEQ ID NO: 3221163 - RNA, 19 nt, Human
gacaauacuguaugucguc

SEQ ID NO: 3221164 - RNA, 17 nt, Human
gacaauagcauuagaaa

SEQ ID NO: 3221165 - RNA, 15 nt, Human
gacaaguaauuucag

SEQ ID NO: 3221166 - RNA, 16 nt, Human
gacaaggugcaggcag

SEQ ID NO: 3221167 - RNA, 18 nt, Human
gacaaggugcaggcaggc

SEQ ID NO: 3221168 - RNA, 17 nt, Human
gacaaggugcaggcagg

SEQ ID NO: 3221169 - RNA, 22 nt, Human
gacaagggaaaauaaaaaaaga

SEQ ID NO: 3221170 - RNA, 22 nt, Human
gacaaggauugcuacuguccua

SEQ ID NO: 3221171 - RNA, 21 nt, Human
gacaaggauugcuacuguccu

SEQ ID NO: 3221172 - RNA, 15 nt, Human
gacaagcacagucag

SEQ ID NO: 3221173 - RNA, 12 nt, Human
gacaagcacagu

SEQ ID NO: 3221174 - RNA, 16 nt, Human
gaagucuuuguacaga

SEQ ID NO: 3221175 - RNA, 22 nt, Human
gacaagaguuggggacagaacu

SEQ ID NO: 3221176 - RNA, 14 nt, Human
gaagucuuuguaca

SEQ ID NO: 3221177 - RNA, 18 nt, Human
gaagucuucaugaaaugc

SEQ ID NO: 3221178 - RNA, 17 nt, Human
gaagucuucaugaaaug

SEQ ID NO: 3221179 - RNA, 12 nt, Human
gacagcaugaga

SEQ ID NO: 3221180 - RNA, 23 nt, Human
gacagcagucuuaugcuuccaga

SEQ ID NO: 3221181 - RNA, 12 nt, Human
gacagcugccug

SEQ ID NO: 3221182 - RNA, 13 nt, Human
gacagcugccugg

SEQ ID NO: 3221183 - RNA, 16 nt, Human
gacagacacaggcccg

SEQ ID NO: 3221184 - RNA, 15 nt, Human
gacagacacaggccc

SEQ ID NO: 3221185 - RNA, 23 nt, Human
gacagaucucugcuuuggaaauc

SEQ ID NO: 3221186 - RNA, 21 nt, Human
gacagaucucugcuuuggaaa

SEQ ID NO: 3221187 - RNA, 19 nt, Human
gacagaucucugcuuugga

SEQ ID NO: 3221188 - RNA, 20 nt, Human
gacacuaaccacgcuggacc

SEQ ID NO: 3221189 - RNA, 14 nt, Human
gacagacacaggcc

SEQ ID NO: 3221190 - RNA, 12 nt, Human
gacagacacagg

SEQ ID NO: 3221191 - RNA, 23 nt, Human
gacagcuuagaauuauuugcacu

SEQ ID NO: 3221192 - RNA, 17 nt, Human
gacagcuuagaauuauu

SEQ ID NO: 3221193 - RNA, 22 nt, Human
gacaggagagauuauuuacaag

SEQ ID NO: 3221194 - RNA, 21 nt, Human
gacagcugccugggaucccuc

SEQ ID NO: 3221195 - RNA, 14 nt, Human
gacagcugccuggg

SEQ ID NO: 3221196 - RNA, 15 nt, Human
gacagcugccuggga

SEQ ID NO: 3221197 - RNA, 19 nt, Human
gacaggcauguucucugag

SEQ ID NO: 3221198 - RNA, 18 nt, Human
gacaggcauguucucuga

SEQ ID NO: 3221199 - RNA, 17 nt, Human
gacaggcaaugcuggcu

SEQ ID NO: 3221200 - RNA, 24 nt, Human
gacaggcaaugcuggcuguuggcu

SEQ ID NO: 3221201 - RNA, 16 nt, Human
gacaggcaaugcuggc

SEQ ID NO: 3221202 - RNA, 14 nt, Human
gacaggcaaugcug

SEQ ID NO: 3221203 - RNA, 21 nt, Human
gacaggcaagcaccuccugcc

SEQ ID NO: 3221204 - RNA, 22 nt, Human
gacaggagaugcugugccccug

SEQ ID NO: 3221205 - RNA, 19 nt, Human
gacaggagaugcugugccc

SEQ ID NO: 3221206 - RNA, 17 nt, Human
gacaggagaugcugugc

SEQ ID NO: 3221207 - RNA, 21 nt, Human
gacaugggucgcccaugagag

SEQ ID NO: 3221208 - RNA, 23 nt, Human
gacaugggucgcccaugagagcg

SEQ ID NO: 3221209 - RNA, 18 nt, Human
gacauggcuucugaaccu

SEQ ID NO: 3221210 - RNA, 23 nt, Human
gacaugaaaauagcaauauucuu

SEQ ID NO: 3221211 - RNA, 14 nt, Human
gacauggaaaugaa

SEQ ID NO: 3221212 - RNA, 15 nt, Human
gacauggaaaugaag

SEQ ID NO: 3221213 - RNA, 21 nt, Human
gaccaaauggaaacagaggac

SEQ ID NO: 3221214 - RNA, 13 nt, Human
gaccaaauggaaa

SEQ ID NO: 3221215 - RNA, 17 nt, Human
gacaugucuuuucuugc

SEQ ID NO: 3221216 - RNA, 12 nt, Human
gacauggugggg

SEQ ID NO: 3221217 - RNA, 21 nt, Human
gacaugucuuuucuugcauga

SEQ ID NO: 3221218 - RNA, 19 nt, Human
gacauaacugacuuaguuc

SEQ ID NO: 3221219 - RNA, 16 nt, Human
gacaggcgaaagaaaa

SEQ ID NO: 3221220 - RNA, 17 nt, Human
gacaggcgaaagaaaac

SEQ ID NO: 3221221 - RNA, 19 nt, Human
gagagaggcuaaaauguuu

SEQ ID NO: 3221222 - RNA, 18 nt, Human
gagagaggcuaaaauguu

SEQ ID NO: 3221223 - RNA, 20 nt, Human
gagagaggcuaaaauguuuu

SEQ ID NO: 3221224 - RNA, 14 nt, Human
gagagauacucugg

SEQ ID NO: 3221225 - RNA, 15 nt, Human
gagagauacucuggg

SEQ ID NO: 3221226 - RNA, 22 nt, Human
gagagcauuauaaucaccaggg

SEQ ID NO: 3221227 - RNA, 20 nt, Human
gagagcccagagucccccca

SEQ ID NO: 3221228 - RNA, 19 nt, Human
gagagcccagagucccccc

SEQ ID NO: 3221229 - RNA, 17 nt, Human
gagagaagagaaugcac

SEQ ID NO: 3221230 - RNA, 10 nt, Human
gagacuuuga

SEQ ID NO: 3221231 - RNA, 11 nt, Human
gagacuuugau

SEQ ID NO: 3221232 - RNA, 13 nt, Human
gagacuuugaugu

SEQ ID NO: 3221233 - RNA, 19 nt, Human
gagacuuugaugucagcag

SEQ ID NO: 3221234 - RNA, 14 nt, Human
gagacuuugauguc

SEQ ID NO: 3221235 - RNA, 15 nt, Human
gagacuuugauguca

SEQ ID NO: 3221236 - RNA, 14 nt, Human
gagagaagagcccc

SEQ ID NO: 3221237 - RNA, 16 nt, Human
gagagaagagccccac

SEQ ID NO: 3221238 - RNA, 15 nt, Human
gagagaagagcccca

SEQ ID NO: 3221239 - RNA, 22 nt, Human
gagagagcuucuguugcugccu

SEQ ID NO: 3221240 - RNA, 15 nt, Human
gagagugagguggaa

SEQ ID NO: 3221241 - RNA, 16 nt, Human
gagaguuuagcuguaa

SEQ ID NO: 3221242 - RNA, 19 nt, Human
gagagugaacaaauuuaca

SEQ ID NO: 3221243 - RNA, 15 nt, Human
gagagugaacaaauu

SEQ ID NO: 3221244 - RNA, 20 nt, Human
gagagggugggagugggccc

SEQ ID NO: 3221245 - RNA, 21 nt, Human
gagagggugggagugggccca

SEQ ID NO: 3221246 - RNA, 13 nt, Human
gagaggggaacag

SEQ ID NO: 3221247 - RNA, 13 nt, Human
gagagccuuccag

SEQ ID NO: 3221248 - RNA, 15 nt, Human
gagacagcucugcau

SEQ ID NO: 3221249 - RNA, 13 nt, Human
gagacagcucugc

SEQ ID NO: 3221250 - RNA, 24 nt, Human
gagacagcccgggcucugccuccc

SEQ ID NO: 3221251 - RNA, 14 nt, Human
gagacagcccgggc

SEQ ID NO: 3221252 - RNA, 17 nt, Human
gagacagcccgggcucu

SEQ ID NO: 3221253 - RNA, 18 nt, Human
gagacagcccgggcucug

SEQ ID NO: 3221254 - RNA, 19 nt, Human
gagacagcccgggcucugc

SEQ ID NO: 3221255 - RNA, 20 nt, Human
gagacagcccgggcucugcc

SEQ ID NO: 3221256 - RNA, 21 nt, Human
gagacagcccgggcucugccu

SEQ ID NO: 3221257 - RNA, 22 nt, Human
gagacagcccgggcucugccuc

SEQ ID NO: 3221258 - RNA, 23 nt, Human
gagacagcccgggcucugccucc

SEQ ID NO: 3221259 - RNA, 22 nt, Human
gagacuccugcaggcagccagg

SEQ ID NO: 3221260 - RNA, 16 nt, Human
gagacucgcgacaaug

SEQ ID NO: 3221261 - RNA, 13 nt, Human
gagacucugucuc

SEQ ID NO: 3221262 - RNA, 18 nt, Human
gagaccacccauaucaug

SEQ ID NO: 3221263 - RNA, 14 nt, Human
gagacucugucuca

SEQ ID NO: 3221264 - RNA, 17 nt, Human
gagacugcuccugagcc

SEQ ID NO: 3221265 - RNA, 19 nt, Human
gagacugcuccugagcccc

SEQ ID NO: 3221266 - RNA, 18 nt, Human
gagacugcuccugagccc

SEQ ID NO: 3221267 - RNA, 22 nt, Human
gagacugucucaagagggcacu

SEQ ID NO: 3221268 - RNA, 23 nt, Human
gagacugucucaagagggcacug

SEQ ID NO: 3221269 - RNA, 21 nt, Human
gagacuguggagacugcuccu

SEQ ID NO: 3221270 - RNA, 20 nt, Human
gagacuguggagacugcucc

SEQ ID NO: 3221271 - RNA, 13 nt, Human
gagacuuguauga

SEQ ID NO: 3221272 - RNA, 14 nt, Human
gagacuuguaguuu

SEQ ID NO: 3221273 - RNA, 22 nt, Human
gagaagccagcuuuccucauca

SEQ ID NO: 3221274 - RNA, 20 nt, Human
gagaaugcacaaacagaggc

SEQ ID NO: 3221275 - RNA, 21 nt, Human
gagaaugcacaaacagaggcc

SEQ ID NO: 3221276 - RNA, 13 nt, Human
gagaagagcuguu

SEQ ID NO: 3221277 - RNA, 20 nt, Human
gagaagauggauaugaccag

SEQ ID NO: 3221278 - RNA, 22 nt, Human
gagaagagcuguucacagccag

SEQ ID NO: 3221279 - RNA, 15 nt, Human
gagaagagcuguuca

SEQ ID NO: 3221280 - RNA, 12 nt, Human
gagacagcccgg

SEQ ID NO: 3221281 - RNA, 19 nt, Human
gagacagaguuuucacucu

SEQ ID NO: 3221282 - RNA, 19 nt, Human
gagacagagcaaccccugg

SEQ ID NO: 3221283 - RNA, 17 nt, Human
gagacagacuagaaguu

SEQ ID NO: 3221284 - RNA, 20 nt, Human
gagacagagcgacagagcag

SEQ ID NO: 3221285 - RNA, 15 nt, Human
gagacagacuagaag

SEQ ID NO: 3221286 - RNA, 15 nt, Human
gagacacaagccuuc

SEQ ID NO: 3221287 - RNA, 17 nt, Human
gagacacaagccuucgg

SEQ ID NO: 3221288 - RNA, 18 nt, Human
gacuugugcacaggcaga

SEQ ID NO: 3221289 - RNA, 17 nt, Human
gacuugugcacaggcag

SEQ ID NO: 3221290 - RNA, 13 nt, Human
gacuuggaagcuc

SEQ ID NO: 3221291 - RNA, 19 nt, Human
gacuugugcacaggcagag

SEQ ID NO: 3221292 - RNA, 21 nt, Human
gagaaaauggacguguuauga

SEQ ID NO: 3221293 - RNA, 16 nt, Human
gacuuguucuugauag

SEQ ID NO: 3221294 - RNA, 19 nt, Human
gagaaacacugaaaagaag

SEQ ID NO: 3221295 - RNA, 17 nt, Human
gacuccugcaggcagcc

SEQ ID NO: 3221296 - RNA, 18 nt, Human
gacucgcgacaaugcaaa

SEQ ID NO: 3221297 - RNA, 19 nt, Human
gacucgcgacaaugcaaac

SEQ ID NO: 3221298 - RNA, 16 nt, Human
gacuuggaagcuccgc

SEQ ID NO: 3221299 - RNA, 15 nt, Human
gacuuggaagcuccg

SEQ ID NO: 3221300 - RNA, 14 nt, Human
gacuuggaagcucc

SEQ ID NO: 3221301 - RNA, 17 nt, Human
gagaaauauuuuaauuu

SEQ ID NO: 3221302 - RNA, 14 nt, Human
gagaaauauuuuaa

SEQ ID NO: 3221303 - RNA, 12 nt, Human
gagaaccaccua

SEQ ID NO: 3221304 - RNA, 17 nt, Human
gagaacagauaaagauu

SEQ ID NO: 3221305 - RNA, 22 nt, Human
gagaaaguacuucuccacccug

SEQ ID NO: 3221306 - RNA, 23 nt, Human
gagaaaguacuucuccacccugc

SEQ ID NO: 3221307 - RNA, 18 nt, Human
gagaaagacuauucaaac

SEQ ID NO: 3221308 - RNA, 17 nt, Human
gagaaagacuauucaaa

SEQ ID NO: 3221309 - RNA, 15 nt, Human
gagaaagacuauuca

SEQ ID NO: 3221310 - RNA, 13 nt, Human
gagaaagacuauu

SEQ ID NO: 3221311 - RNA, 18 nt, Human
gagcccacgcccccacug

SEQ ID NO: 3221312 - RNA, 20 nt, Human
gagccgagaucacgccacug

SEQ ID NO: 3221313 - RNA, 19 nt, Human
gagccgagaucacgccacu

SEQ ID NO: 3221314 - RNA, 18 nt, Human
gagcccuugcccaugcug

SEQ ID NO: 3221315 - RNA, 22 nt, Human
gagccgagaucacgccacugca

SEQ ID NO: 3221316 - RNA, 21 nt, Human
gagccgagaucacgccacugc

SEQ ID NO: 3221317 - RNA, 13 nt, Human
gagccgcagagaa

SEQ ID NO: 3221318 - RNA, 20 nt, Human
gagccgggcaaacuggccgc

SEQ ID NO: 3221319 - RNA, 17 nt, Human
gagccuacccaccccca

SEQ ID NO: 3221320 - RNA, 15 nt, Human
gagccuacccacccc

SEQ ID NO: 3221321 - RNA, 19 nt, Human
gagccuaaaaauaaagcac

SEQ ID NO: 3221322 - RNA, 17 nt, Human
gagccuaaaaauaaagc

SEQ ID NO: 3221323 - RNA, 15 nt, Human
gagccuaaaaauaaa

SEQ ID NO: 3221324 - RNA, 13 nt, Human
gagccucagcauc

SEQ ID NO: 3221325 - RNA, 15 nt, Human
gagccucagcauccu

SEQ ID NO: 3221326 - RNA, 14 nt, Human
gagccucagcaucc

SEQ ID NO: 3221327 - RNA, 17 nt, Human
gagccucagcauccugg

SEQ ID NO: 3221328 - RNA, 18 nt, Human
gagccucagucucccucc

SEQ ID NO: 3221329 - RNA, 19 nt, Human
gagccucagucucccuccc

SEQ ID NO: 3221330 - RNA, 12 nt, Human
gagccugcaguu

SEQ ID NO: 3221331 - RNA, 16 nt, Human
gagccugacagccaga

SEQ ID NO: 3221332 - RNA, 15 nt, Human
gagccugacagccag

SEQ ID NO: 3221333 - RNA, 13 nt, Human
gagccuccugccc

SEQ ID NO: 3221334 - RNA, 18 nt, Human
gagccagauuucacucuc

SEQ ID NO: 3221335 - RNA, 19 nt, Human
gagccagauuucacucucc

SEQ ID NO: 3221336 - RNA, 15 nt, Human
gagccagauuucacu

SEQ ID NO: 3221337 - RNA, 13 nt, Human
gagccacugcacc

SEQ ID NO: 3221338 - RNA, 19 nt, Human
gagccacugcaccgggcca

SEQ ID NO: 3221339 - RNA, 18 nt, Human
gagccacugcaccgggcc

SEQ ID NO: 3221340 - RNA, 17 nt, Human
gagcccaccuuggcuca

SEQ ID NO: 3221341 - RNA, 15 nt, Human
gagcccaccuuggcu

SEQ ID NO: 3221342 - RNA, 13 nt, Human
gagcccaccuugg

SEQ ID NO: 3221343 - RNA, 13 nt, Human
gagccagauuuca

SEQ ID NO: 3221344 - RNA, 12 nt, Human
gagccaggaggg

SEQ ID NO: 3221345 - RNA, 22 nt, Human
gagcagccacauuccugaugcu

SEQ ID NO: 3221346 - RNA, 14 nt, Human
gagcagccaggaga

SEQ ID NO: 3221347 - RNA, 21 nt, Human
gagcagccacauuccugaugc

SEQ ID NO: 3221348 - RNA, 19 nt, Human
gagcagagaccaucccuga

SEQ ID NO: 3221349 - RNA, 21 nt, Human
gagcagagaccaucccugaag

SEQ ID NO: 3221350 - RNA, 23 nt, Human
gagcagagaccaucccugaaggc

SEQ ID NO: 3221351 - RNA, 17 nt, Human
gagcagagaccaucccu

SEQ ID NO: 3221352 - RNA, 18 nt, Human
gagcagagaccaucccug

SEQ ID NO: 3221353 - RNA, 16 nt, Human
gagcagagaccauccc

SEQ ID NO: 3221354 - RNA, 19 nt, Human
gagauagccaaggccaaag

SEQ ID NO: 3221355 - RNA, 22 nt, Human
gagauaggaaggucauuuccau

SEQ ID NO: 3221356 - RNA, 21 nt, Human
gagauaggaaggucauuucca

SEQ ID NO: 3221357 - RNA, 20 nt, Human
gagauagccaaggccaaagg

SEQ ID NO: 3221358 - RNA, 21 nt, Human
gagauagccaaggccaaagga

SEQ ID NO: 3221359 - RNA, 19 nt, Human
gagcucacuguggugucug

SEQ ID NO: 3221360 - RNA, 16 nt, Human
gagcuauuuuaaacca

SEQ ID NO: 3221361 - RNA, 13 nt, Human
gagcuaugacuua

SEQ ID NO: 3221362 - RNA, 13 nt, Human
gagcuaggcaggg

SEQ ID NO: 3221363 - RNA, 15 nt, Human
gagcuagcagcaggg

SEQ ID NO: 3221364 - RNA, 17 nt, Human
gagcuagcagcagggag

SEQ ID NO: 3221365 - RNA, 13 nt, Human
gagcuagagaaau

SEQ ID NO: 3221366 - RNA, 15 nt, Human
gagccugcaguuauu

SEQ ID NO: 3221367 - RNA, 13 nt, Human
gagccugcccagc

SEQ ID NO: 3221368 - RNA, 13 nt, Human
gagccugccccag

SEQ ID NO: 3221369 - RNA, 19 nt, Human
gagccugacagccagaacu

SEQ ID NO: 3221370 - RNA, 18 nt, Human
gagccugccccagcgcug

SEQ ID NO: 3221371 - RNA, 17 nt, Human
gagccugccccagcgcu

SEQ ID NO: 3221372 - RNA, 20 nt, Human
gagcucccacuucugccaga

SEQ ID NO: 3221373 - RNA, 19 nt, Human
gagcucccacuucugccag

SEQ ID NO: 3221374 - RNA, 23 nt, Human
gagcuccauacacacgcugccuu

SEQ ID NO: 3221375 - RNA, 22 nt, Human
gagcuccauacacacgcugccu

SEQ ID NO: 3221376 - RNA, 21 nt, Human
gagcuccauacacacgcugcc

SEQ ID NO: 3221377 - RNA, 20 nt, Human
gagcuccauacacacgcugc

SEQ ID NO: 3221378 - RNA, 18 nt, Human
gagcuccauacacacgcu

SEQ ID NO: 3221379 - RNA, 23 nt, Human
gagcucgcggcgaggacgacuuc

SEQ ID NO: 3221380 - RNA, 15 nt, Human
gagcugaguggggga

SEQ ID NO: 3221381 - RNA, 12 nt, Human
gagcugagaaga

SEQ ID NO: 3221382 - RNA, 14 nt, Human
gagcugagaagacu

SEQ ID NO: 3221383 - RNA, 20 nt, Human
gagcuuugaaaauucagugg

SEQ ID NO: 3221384 - RNA, 22 nt, Human
gagcuuucugcuaucaaagagg

SEQ ID NO: 3221385 - RNA, 16 nt, Human
gaggaaagcaaaggag

SEQ ID NO: 3221386 - RNA, 17 nt, Human
gaggaaagcaaaggaga

SEQ ID NO: 3221387 - RNA, 17 nt, Human
gaggaaaaauaugugaa

SEQ ID NO: 3221388 - RNA, 14 nt, Human
gaggaaaaauaugu

SEQ ID NO: 3221389 - RNA, 23 nt, Human
gagcuuugucuacuucaaaaguu

SEQ ID NO: 3221390 - RNA, 23 nt, Human
gaggaaaaccaagccguggcuuc

SEQ ID NO: 3221391 - RNA, 21 nt, Human
gaggaaaaccaagccguggcu

SEQ ID NO: 3221392 - RNA, 20 nt, Human
gaggaaaaccaagccguggc

SEQ ID NO: 3221393 - RNA, 13 nt, Human
gaggaaaaauaug

SEQ ID NO: 3221394 - RNA, 18 nt, Human
gaggaagccgcuggggcc

SEQ ID NO: 3221395 - RNA, 14 nt, Human
gaggaagccgcugg

SEQ ID NO: 3221396 - RNA, 17 nt, Human
gaggaagccgcuggggc

SEQ ID NO: 3221397 - RNA, 13 nt, Human
gaggaagccgcug

SEQ ID NO: 3221398 - RNA, 17 nt, Human
gaggaagagaaaaaaua

SEQ ID NO: 3221399 - RNA, 14 nt, Human
gaggaagaauaggg

SEQ ID NO: 3221400 - RNA, 16 nt, Human
gaggaacaaggcaagg

SEQ ID NO: 3221401 - RNA, 15 nt, Human
gagcuugauuaaauc

SEQ ID NO: 3221402 - RNA, 18 nt, Human
gaggaaccucugauuuau

SEQ ID NO: 3221403 - RNA, 14 nt, Human
gaggaacaaggcaa

SEQ ID NO: 3221404 - RNA, 12 nt, Human
gaggaaaucaaa

SEQ ID NO: 3221405 - RNA, 20 nt, Human
gaggaaaucaaagugcuauu

SEQ ID NO: 3221406 - RNA, 20 nt, Human
gaggaaaguacauuuuuuga

SEQ ID NO: 3221407 - RNA, 16 nt, Human
gaggaaauccuaccuu

SEQ ID NO: 3221408 - RNA, 20 nt, Human
gaggaaagcacagaggccuc

SEQ ID NO: 3221409 - RNA, 19 nt, Human
gaggaaagcacagaggccu

SEQ ID NO: 3221410 - RNA, 22 nt, Human
gaggaaagcacagaggccuccu

SEQ ID NO: 3221411 - RNA, 13 nt, Human
gauagugggacca

SEQ ID NO: 3221412 - RNA, 13 nt, Human
gaucaaguauuac

SEQ ID NO: 3221413 - RNA, 23 nt, Human
gauagucuuggaagcuguuugga

SEQ ID NO: 3221414 - RNA, 18 nt, Human
gaucacgccacugcacua

SEQ ID NO: 3221415 - RNA, 16 nt, Human
gaucacgccacugcac

SEQ ID NO: 3221416 - RNA, 14 nt, Human
gaucagccagaagc

SEQ ID NO: 3221417 - RNA, 15 nt, Human
gaucagccagaagcc

SEQ ID NO: 3221418 - RNA, 12 nt, Human
gaucagccuggg

SEQ ID NO: 3221419 - RNA, 15 nt, Human
gaucagccugggcaa

SEQ ID NO: 3221420 - RNA, 22 nt, Human
gaucagucugauucccaagcuc

SEQ ID NO: 3221421 - RNA, 14 nt, Human
gaucaguaaaauua

SEQ ID NO: 3221422 - RNA, 23 nt, Human
gaucaguaaaauuauacugugug

SEQ ID NO: 3221423 - RNA, 16 nt, Human
gaucaguaguuugcau

SEQ ID NO: 3221424 - RNA, 15 nt, Human
gaucauuugaguuca

SEQ ID NO: 3221425 - RNA, 14 nt, Human
gaucauuaucagcc

SEQ ID NO: 3221426 - RNA, 20 nt, Human
gauccccaagccuggcaagg

SEQ ID NO: 3221427 - RNA, 21 nt, Human
gaucauccacugugccaugug

SEQ ID NO: 3221428 - RNA, 16 nt, Human
gaucauccacugugcc

SEQ ID NO: 3221429 - RNA, 12 nt, Human
gaucaugaauaa

SEQ ID NO: 3221430 - RNA, 19 nt, Human
gaucauccacugugccaug

SEQ ID NO: 3221431 - RNA, 17 nt, Human
gaucauccacugugcca

SEQ ID NO: 3221432 - RNA, 22 nt, Human
gaucaguaguuugcauuucaga

SEQ ID NO: 3221433 - RNA, 17 nt, Human
gaucaguaguuugcauu

SEQ ID NO: 3221434 - RNA, 13 nt, Human
gauagaugugugg

SEQ ID NO: 3221435 - RNA, 18 nt, Human
gauacaggaaaagcugcu

SEQ ID NO: 3221436 - RNA, 20 nt, Human
gauagcacagacccugcccu

SEQ ID NO: 3221437 - RNA, 15 nt, Human
gauagcagccuggcu

SEQ ID NO: 3221438 - RNA, 22 nt, Human
gauagcagccuggcuccccugg

SEQ ID NO: 3221439 - RNA, 21 nt, Human
gauagcacagacccugcccug

SEQ ID NO: 3221440 - RNA, 22 nt, Human
gauagcacagacccugcccugu

SEQ ID NO: 3221441 - RNA, 19 nt, Human
gauacaccgggccuggaga

SEQ ID NO: 3221442 - RNA, 18 nt, Human
gauacacucaagcaugaa

SEQ ID NO: 3221443 - RNA, 23 nt, Human
gauacacucaagcaugaagauaa

SEQ ID NO: 3221444 - RNA, 16 nt, Human
gauaaagauugugugg

SEQ ID NO: 3221445 - RNA, 13 nt, Human
gauaaagauugug

SEQ ID NO: 3221446 - RNA, 21 nt, Human
gauaaagauugugugguguuu

SEQ ID NO: 3221447 - RNA, 13 nt, Human
gaggaaggaaacc

SEQ ID NO: 3221448 - RNA, 19 nt, Human
gaggaaggaaacccagcuc

SEQ ID NO: 3221449 - RNA, 20 nt, Human
gaggaaggaaacccagcucu

SEQ ID NO: 3221450 - RNA, 18 nt, Human
gauaagggacugauguuu

SEQ ID NO: 3221451 - RNA, 21 nt, Human
gauaaauauugagcagaucua

SEQ ID NO: 3221452 - RNA, 20 nt, Human
gauaagcaguuaugugaccu

SEQ ID NO: 3221453 - RNA, 14 nt, Human
gauaagggaaaaga

SEQ ID NO: 3221454 - RNA, 16 nt, Human
gauaagggaaaagaua

SEQ ID NO: 3221455 - RNA, 15 nt, Human
gauaaauauuauauu

SEQ ID NO: 3221456 - RNA, 22 nt, Human
gauaaauauuauauuauauaua

SEQ ID NO: 3221457 - RNA, 17 nt, Human
gauaaauaguguuauug

SEQ ID NO: 3221458 - RNA, 20 nt, Human
gauaaauauucacacuugaa

SEQ ID NO: 3221459 - RNA, 12 nt, Human
gauaaauauuca

SEQ ID NO: 3221460 - RNA, 22 nt, Human
gauaaauaguuuaugauuccac

SEQ ID NO: 3221461 - RNA, 21 nt, Human
gaucugugaggggcucucuca

SEQ ID NO: 3221462 - RNA, 21 nt, Human
gaucucaggggucuuaccuug

SEQ ID NO: 3221463 - RNA, 22 nt, Human
gaucugugccuuuuuuauaucu

SEQ ID NO: 3221464 - RNA, 17 nt, Human
gaucuuugcagacaggc

SEQ ID NO: 3221465 - RNA, 18 nt, Human
gaucuuugcagacaggca

SEQ ID NO: 3221466 - RNA, 14 nt, Human
gaugaaaauauuua

SEQ ID NO: 3221467 - RNA, 16 nt, Human
gaugaaaauauuuaaa

SEQ ID NO: 3221468 - RNA, 15 nt, Human
gaugaaaauauuuaa

SEQ ID NO: 3221469 - RNA, 17 nt, Human
gaugaaaauauuuaaag

SEQ ID NO: 3221470 - RNA, 14 nt, Human
gaugaaaauauuug

SEQ ID NO: 3221471 - RNA, 14 nt, Human
gaugaagacagccc

SEQ ID NO: 3221472 - RNA, 21 nt, Human
gauccugagccagauuucacu

SEQ ID NO: 3221473 - RNA, 22 nt, Human
gauccugagccagauuucacuc

SEQ ID NO: 3221474 - RNA, 18 nt, Human
gauccugcacugacucug

SEQ ID NO: 3221475 - RNA, 15 nt, Human
gaucccucauccuca

SEQ ID NO: 3221476 - RNA, 16 nt, Human
gaucccucauccucau

SEQ ID NO: 3221477 - RNA, 18 nt, Human
gauccccuuccuaccacc

SEQ ID NO: 3221478 - RNA, 16 nt, Human
gauccccuuccuacca

SEQ ID NO: 3221479 - RNA, 21 nt, Human
gaucuaaaaauaacuguaauu

SEQ ID NO: 3221480 - RNA, 20 nt, Human
gaucgucugguuagaaaaca

SEQ ID NO: 3221481 - RNA, 17 nt, Human
gaucgguuaacaaauaa

SEQ ID NO: 3221482 - RNA, 16 nt, Human
gaucgguuaacaaaua

SEQ ID NO: 3221483 - RNA, 21 nt, Human
gauccugcacugacucuggaa

SEQ ID NO: 3221484 - RNA, 13 nt, Human
gaugcaccagccc

SEQ ID NO: 3221485 - RNA, 23 nt, Human
gaugcagacagggggccagaaca

SEQ ID NO: 3221486 - RNA, 14 nt, Human
gaugcagccucaca

SEQ ID NO: 3221487 - RNA, 12 nt, Human
gaugcagccuca

SEQ ID NO: 3221488 - RNA, 17 nt, Human
gaugccugguggcagcu

SEQ ID NO: 3221489 - RNA, 22 nt, Human
gaugccacuaccccuugauuuu

SEQ ID NO: 3221490 - RNA, 21 nt, Human
gaugccaagaaguuuaaggaa

SEQ ID NO: 3221491 - RNA, 22 nt, Human
gauggccgggcgcgguggcuca

SEQ ID NO: 3221492 - RNA, 22 nt, Human
gauggauuuccagccaaagccu

SEQ ID NO: 3221493 - RNA, 19 nt, Human
gaugccugguggcagcugc

SEQ ID NO: 3221494 - RNA, 18 nt, Human
gaugccugguggcagcug

SEQ ID NO: 3221495 - RNA, 20 nt, Human
gaugccugguggcagcugcg

SEQ ID NO: 3221496 - RNA, 19 nt, Human
gauggauauauguuuuuga

SEQ ID NO: 3221497 - RNA, 21 nt, Human
gauggcuaguaucaaaagaaa

SEQ ID NO: 3221498 - RNA, 19 nt, Human
gauggcugugccucugccu

SEQ ID NO: 3221499 - RNA, 18 nt, Human
gauggcugugccucugcc

SEQ ID NO: 3221500 - RNA, 17 nt, Human
gauggcugugccucugc

SEQ ID NO: 3221501 - RNA, 13 nt, Human
gauggcugugccu

SEQ ID NO: 3221502 - RNA, 14 nt, Human
gauggggcccugcc

SEQ ID NO: 3221503 - RNA, 22 nt, Human
gauggggcccugccuccuuugu

SEQ ID NO: 3221504 - RNA, 13 nt, Human
gauggggcccugc

SEQ ID NO: 3221505 - RNA, 20 nt, Human
gauggcugugccucugccug

SEQ ID NO: 3221506 - RNA, 16 nt, Human
gauggcuuacaaaaag

SEQ ID NO: 3221507 - RNA, 17 nt, Human
gauuccagguggcauca

SEQ ID NO: 3221508 - RNA, 18 nt, Human
gauucccaagcucugcuc

SEQ ID NO: 3221509 - RNA, 20 nt, Human
gauuccagagaguggcuccu

SEQ ID NO: 3221510 - RNA, 19 nt, Human
gauuccagagaguggcucc

SEQ ID NO: 3221511 - RNA, 22 nt, Human
gauuccagagaguggcuccucc

SEQ ID NO: 3221512 - RNA, 20 nt, Human
gauucagauuucucuuugaa

SEQ ID NO: 3221513 - RNA, 15 nt, Human
gauuccagcacaacc

SEQ ID NO: 3221514 - RNA, 19 nt, Human
gauucauauuuacuucuua

SEQ ID NO: 3221515 - RNA, 18 nt, Human
gauucauauuuacuucuu

SEQ ID NO: 3221516 - RNA, 17 nt, Human
gauucauauuuacuucu

SEQ ID NO: 3221517 - RNA, 14 nt, Human
gauucagauuucuc

SEQ ID NO: 3221518 - RNA, 23 nt, Human
gauggggcugcaccggcuggccu

SEQ ID NO: 3221519 - RNA, 19 nt, Human
gauggggcugcaccggcug

SEQ ID NO: 3221520 - RNA, 12 nt, Human
gauggggcuggg

SEQ ID NO: 3221521 - RNA, 13 nt, Human
gauucagcucugc

SEQ ID NO: 3221522 - RNA, 15 nt, Human
gauucagcucugcaa

SEQ ID NO: 3221523 - RNA, 19 nt, Human
gauucagacagcugccugg

SEQ ID NO: 3221524 - RNA, 18 nt, Human
gauucagacagcugccug

SEQ ID NO: 3221525 - RNA, 20 nt, Human
gauucccaagcucugcuccu

SEQ ID NO: 3221526 - RNA, 19 nt, Human
gauucccaagcucugcucc

SEQ ID NO: 3221527 - RNA, 17 nt, Human
gauuccauuuacugcau

SEQ ID NO: 3221528 - RNA, 12 nt, Human
gauucuuuccug

SEQ ID NO: 3221529 - RNA, 23 nt, Human
gauucguggucuuuuccucgcuu

SEQ ID NO: 3221530 - RNA, 18 nt, Human
gauucguggucuuuuccu

SEQ ID NO: 3221531 - RNA, 16 nt, Human
gauucuuuccugaggc

SEQ ID NO: 3221532 - RNA, 17 nt, Human
gauucuuuccugaggcu

SEQ ID NO: 3221533 - RNA, 18 nt, Human
gauucuuuccugaggcug

SEQ ID NO: 3221534 - RNA, 20 nt, Human
gauugcaacaggcugggcuu

SEQ ID NO: 3221535 - RNA, 16 nt, Human
gauugcaccacugcac

SEQ ID NO: 3221536 - RNA, 23 nt, Human
gauugcaccacugcacuccagcc

SEQ ID NO: 3221537 - RNA, 21 nt, Human
gauugcaacaggcugggcuuc

SEQ ID NO: 3221538 - RNA, 18 nt, Human
gauugcaacaggcugggc

SEQ ID NO: 3221539 - RNA, 23 nt, Human
gauuugcucagugucuggcugca

SEQ ID NO: 3221540 - RNA, 17 nt, Human
gauuugccauagaguac

SEQ ID NO: 3221541 - RNA, 20 nt, Human
gauuuggggcucagaguggg

SEQ ID NO: 3221542 - RNA, 15 nt, Human
gauuugggagaaggg

SEQ ID NO: 3221543 - RNA, 17 nt, Human
gauuugggcugaaugua

SEQ ID NO: 3221544 - RNA, 19 nt, Human
gauuugggcugaauguaug

SEQ ID NO: 3221545 - RNA, 13 nt, Human
gauuugccauaga

SEQ ID NO: 3221546 - RNA, 14 nt, Human
gauuucuguucagc

SEQ ID NO: 3221547 - RNA, 21 nt, Human
gauuucucacacucuaacugu

SEQ ID NO: 3221548 - RNA, 22 nt, Human
gauuucucuuugaaacaugcuu

SEQ ID NO: 3221549 - RNA, 13 nt, Human
gauuucucuuuga

SEQ ID NO: 3221550 - RNA, 13 nt, Human
gauugcagaauug

SEQ ID NO: 3221551 - RNA, 15 nt, Human
gauugcagaauuguu

SEQ ID NO: 3221552 - RNA, 19 nt, Human
gauugcagaauuguuuaga

SEQ ID NO: 3221553 - RNA, 16 nt, Human
gauugcagaauuguuu

SEQ ID NO: 3221554 - RNA, 21 nt, Human
gauuuuccaucuaaaaauaua

SEQ ID NO: 3221555 - RNA, 16 nt, Human
gauuuuccaucuaaaa

SEQ ID NO: 3221556 - RNA, 11 nt, Human
gauuuuccauc

SEQ ID NO: 3221557 - RNA, 21 nt, Human
gauuuuugagcccuuguuuca

SEQ ID NO: 3221558 - RNA, 15 nt, Human
gauuuuauucuugau

SEQ ID NO: 3221559 - RNA, 13 nt, Human
gauuuuauucuug

SEQ ID NO: 3221560 - RNA, 20 nt, Human
gauuuuauguugacauuugu

SEQ ID NO: 3221561 - RNA, 17 nt, Human
gauuugucacugcuuca

SEQ ID NO: 3221562 - RNA, 18 nt, Human
gauuuuauguugacauuu

SEQ ID NO: 3221563 - RNA, 16 nt, Human
gauuuuauguugacau

SEQ ID NO: 3221564 - RNA, 14 nt, Human
gauuuuauguugac

SEQ ID NO: 3221565 - RNA, 13 nt, Human
gauuuuauguuga

SEQ ID NO: 3221566 - RNA, 22 nt, Human
gcaaauccuugugggaaaagaa

SEQ ID NO: 3221567 - RNA, 17 nt, Human
gcaagaauugaagcagg

SEQ ID NO: 3221568 - RNA, 13 nt, Human
gcaagaaaagagu

SEQ ID NO: 3221569 - RNA, 14 nt, Human
gcaagacgcugugc

SEQ ID NO: 3221570 - RNA, 20 nt, Human
gcaagacgcugugcugcccu

SEQ ID NO: 3221571 - RNA, 21 nt, Human
gcaagacgcugugcugcccug

SEQ ID NO: 3221572 - RNA, 22 nt, Human
gcaagacgcugugcugcccugc

SEQ ID NO: 3221573 - RNA, 23 nt, Human
gcaagacgcugugcugcccugcc

SEQ ID NO: 3221574 - RNA, 18 nt, Human
gcaagaggcaagcugaaa

SEQ ID NO: 3221575 - RNA, 19 nt, Human
gcaagaggcaagcugaaau

SEQ ID NO: 3221576 - RNA, 20 nt, Human
gcaaauccuugugggaaaag

SEQ ID NO: 3221577 - RNA, 16 nt, Human
gcaaauccgaaaucag

SEQ ID NO: 3221578 - RNA, 20 nt, Human
gcaaaguacagguacuuugu

SEQ ID NO: 3221579 - RNA, 13 nt, Human
gcaaaguaguacu

SEQ ID NO: 3221580 - RNA, 14 nt, Human
gcaaaguaguacuu

SEQ ID NO: 3221581 - RNA, 23 nt, Human
gcaaaguaguacuucuucuguaa

SEQ ID NO: 3221582 - RNA, 19 nt, Human
gcaaaguacagguacuuug

SEQ ID NO: 3221583 - RNA, 23 nt, Human
gcaaagggggaggagaagaaaau

SEQ ID NO: 3221584 - RNA, 23 nt, Human
gcaaagcacugacuucuaaguaa

SEQ ID NO: 3221585 - RNA, 21 nt, Human
gcaaagcccagcuugaaaccu

SEQ ID NO: 3221586 - RNA, 13 nt, Human
gcaaagcccagcu

SEQ ID NO: 3221587 - RNA, 20 nt, Human
gcaaagcauguuuugcaugu

SEQ ID NO: 3221588 - RNA, 21 nt, Human
gcaaagcaugccaauuucucu

SEQ ID NO: 3221589 - RNA, 21 nt, Human
gcaauauucucuguacauauu

SEQ ID NO: 3221590 - RNA, 15 nt, Human
gcaaucaaaucugcu

SEQ ID NO: 3221591 - RNA, 17 nt, Human
gcaaucaaaucugcuuu

SEQ ID NO: 3221592 - RNA, 22 nt, Human
gcaauauucucuguacauauua

SEQ ID NO: 3221593 - RNA, 22 nt, Human
gcaauauuguauauuuuuaucu

SEQ ID NO: 3221594 - RNA, 15 nt, Human
gcaaugaccuuucaa

SEQ ID NO: 3221595 - RNA, 17 nt, Human
gcaaugaccuuucaaua

SEQ ID NO: 3221596 - RNA, 20 nt, Human
gcaaugaccuuucaauagga

SEQ ID NO: 3221597 - RNA, 22 nt, Human
gcaaugaccuuucaauaggaaa

SEQ ID NO: 3221598 - RNA, 23 nt, Human
gcaaugcuggcuguuggcugggg

SEQ ID NO: 3221599 - RNA, 22 nt, Human
gcaaugcuggcuguuggcuggg

SEQ ID NO: 3221600 - RNA, 14 nt, Human
gcaaugcuggcugu

SEQ ID NO: 3221601 - RNA, 13 nt, Human
gcaaugcuggcug

SEQ ID NO: 3221602 - RNA, 23 nt, Human
gcaaugaccuuucaauaggaaaa

SEQ ID NO: 3221603 - RNA, 14 nt, Human
gcaagggugauggg

SEQ ID NO: 3221604 - RNA, 14 nt, Human
gcaagguaaaauuu

SEQ ID NO: 3221605 - RNA, 20 nt, Human
gcaaggcgcuaacuugcuua

SEQ ID NO: 3221606 - RNA, 17 nt, Human
gcaagggaggcccagcg

SEQ ID NO: 3221607 - RNA, 21 nt, Human
gcaagggcggccuuucccacu

SEQ ID NO: 3221608 - RNA, 19 nt, Human
gcaagggcggccuuuccca

SEQ ID NO: 3221609 - RNA, 21 nt, Human
gcaagggcagggacagggccg

SEQ ID NO: 3221610 - RNA, 16 nt, Human
gcaagggcagggacag

SEQ ID NO: 3221611 - RNA, 11 nt, Human
gcaaggcuguc

SEQ ID NO: 3221612 - RNA, 18 nt, Human
gcaaggcgcuaacuugcu

SEQ ID NO: 3221613 - RNA, 16 nt, Human
gcaaggcgcuaacuug

SEQ ID NO: 3221614 - RNA, 22 nt, Human
gcaaggccaccucuuccuggcc

SEQ ID NO: 3221615 - RNA, 20 nt, Human
gcaaggccaccucuuccugg

SEQ ID NO: 3221616 - RNA, 14 nt, Human
gcaaggccaccucu

SEQ ID NO: 3221617 - RNA, 13 nt, Human
gcaaggccaccuc

SEQ ID NO: 3221618 - RNA, 18 nt, Human
gcauuauauuuguaaauu

SEQ ID NO: 3221619 - RNA, 14 nt, Human
gcauuauuaaauug

SEQ ID NO: 3221620 - RNA, 18 nt, Human
gcauuauuaaauuguaaa

SEQ ID NO: 3221621 - RNA, 20 nt, Human
gcauuauaaucaccagggcc

SEQ ID NO: 3221622 - RNA, 19 nt, Human
gcauucacauuuagaaaag

SEQ ID NO: 3221623 - RNA, 21 nt, Human
gcauucuucugaucacugaaa

SEQ ID NO: 3221624 - RNA, 14 nt, Human
gcauucuucugauc

SEQ ID NO: 3221625 - RNA, 15 nt, Human
gcauuuguguguuac

SEQ ID NO: 3221626 - RNA, 14 nt, Human
gcauuugcugaaua

SEQ ID NO: 3221627 - RNA, 12 nt, Human
gcauuugugaaa

SEQ ID NO: 3221628 - RNA, 13 nt, Human
gcauuuguguguu

SEQ ID NO: 3221629 - RNA, 13 nt, Human
gcauuugcugaau

SEQ ID NO: 3221630 - RNA, 14 nt, Human
gccaaacucaccug

SEQ ID NO: 3221631 - RNA, 16 nt, Human
gccaaacucaccugcc

SEQ ID NO: 3221632 - RNA, 22 nt, Human
gcauuuguuucuuucucugagg

SEQ ID NO: 3221633 - RNA, 17 nt, Human
gcauuuuugcaggagca

SEQ ID NO: 3221634 - RNA, 16 nt, Human
gcauuuuugcaggagc

SEQ ID NO: 3221635 - RNA, 22 nt, Human
gccaaagcuaggccuggccaga

SEQ ID NO: 3221636 - RNA, 16 nt, Human
gccaaagcuaggccug

SEQ ID NO: 3221637 - RNA, 16 nt, Human
gccaaagccuccucca

SEQ ID NO: 3221638 - RNA, 19 nt, Human
gccaaagccuccuccagcc

SEQ ID NO: 3221639 - RNA, 20 nt, Human
gccaaagccaaagcuaggcc

SEQ ID NO: 3221640 - RNA, 13 nt, Human
gccaaagccaaag

SEQ ID NO: 3221641 - RNA, 20 nt, Human
gcaucugaccucuaccuuca

SEQ ID NO: 3221642 - RNA, 20 nt, Human
gcaucacuuaaaacacguuu

SEQ ID NO: 3221643 - RNA, 16 nt, Human
gcaucacuuaaaacac

SEQ ID NO: 3221644 - RNA, 15 nt, Human
gcaugaacagugcac

SEQ ID NO: 3221645 - RNA, 21 nt, Human
gcaugaacagcuaauuguacc

SEQ ID NO: 3221646 - RNA, 16 nt, Human
gcaugaaaauuguguu

SEQ ID NO: 3221647 - RNA, 19 nt, Human
gcaugaaaugaacacaaau

SEQ ID NO: 3221648 - RNA, 18 nt, Human
gcaugaaaugaacacaaa

SEQ ID NO: 3221649 - RNA, 16 nt, Human
gcaugaaaugaacaca

SEQ ID NO: 3221650 - RNA, 13 nt, Human
gcaucuuugaugu

SEQ ID NO: 3221651 - RNA, 11 nt, Human
gcaucuuugau

SEQ ID NO: 3221652 - RNA, 15 nt, Human
gcaucuuugaugugu

SEQ ID NO: 3221653 - RNA, 17 nt, Human
gcaucuuugauguguug

SEQ ID NO: 3221654 - RNA, 18 nt, Human
gcauggagauagccccac

SEQ ID NO: 3221655 - RNA, 18 nt, Human
gcaugcgggcuuccuccu

SEQ ID NO: 3221656 - RNA, 18 nt, Human
gcaugauugcagaauugu

SEQ ID NO: 3221657 - RNA, 21 nt, Human
gcauguucucugaggacacua

SEQ ID NO: 3221658 - RNA, 15 nt, Human
gcauguucucugagg

SEQ ID NO: 3221659 - RNA, 14 nt, Human
gcauguucucugag

SEQ ID NO: 3221660 - RNA, 20 nt, Human
gcauggcaaggacugcaggg

SEQ ID NO: 3221661 - RNA, 19 nt, Human
gcaggggcccugcagcucu

SEQ ID NO: 3221662 - RNA, 20 nt, Human
gcaggggcccugcagcucuc

SEQ ID NO: 3221663 - RNA, 14 nt, Human
gcagggcucagcgg

SEQ ID NO: 3221664 - RNA, 22 nt, Human
gcaggggaggguagagcggaga

SEQ ID NO: 3221665 - RNA, 18 nt, Human
gcagggucucacucuguc

SEQ ID NO: 3221666 - RNA, 17 nt, Human
gcagggucucacucugu

SEQ ID NO: 3221667 - RNA, 15 nt, Human
gcaggcagccaggcc

SEQ ID NO: 3221668 - RNA, 16 nt, Human
gcaggcagccaggcca

SEQ ID NO: 3221669 - RNA, 21 nt, Human
gcagggcaggaccagcccacg

SEQ ID NO: 3221670 - RNA, 21 nt, Human
gcagggcucagcggggacagc

SEQ ID NO: 3221671 - RNA, 19 nt, Human
gcagggcucagcggggaca

SEQ ID NO: 3221672 - RNA, 13 nt, Human
gcagguccccaga

SEQ ID NO: 3221673 - RNA, 20 nt, Human
gcaggucuugaacuccuggc

SEQ ID NO: 3221674 - RNA, 19 nt, Human
gcaggucuugaacuccugg

SEQ ID NO: 3221675 - RNA, 22 nt, Human
gcagguccaggguuugaguuca

SEQ ID NO: 3221676 - RNA, 20 nt, Human
gcagguaggaauauuauauu

SEQ ID NO: 3221677 - RNA, 16 nt, Human
gcagguaggaauauua

SEQ ID NO: 3221678 - RNA, 14 nt, Human
gcaggguuucuuuu

SEQ ID NO: 3221679 - RNA, 23 nt, Human
gcagggugucugcccccuccuga

SEQ ID NO: 3221680 - RNA, 19 nt, Human
gcagggugucugcccccuc

SEQ ID NO: 3221681 - RNA, 17 nt, Human
gcaguggagcccaggag

SEQ ID NO: 3221682 - RNA, 16 nt, Human
gcaguggagcccagga

SEQ ID NO: 3221683 - RNA, 20 nt, Human
gcaguggcgaaaucccugcu

SEQ ID NO: 3221684 - RNA, 15 nt, Human
gcagugcaugcuguc

SEQ ID NO: 3221685 - RNA, 23 nt, Human
gcaggugaucugcugcagagcag

SEQ ID NO: 3221686 - RNA, 16 nt, Human
gcagugcaugcugucc

SEQ ID NO: 3221687 - RNA, 16 nt, Human
gcagugcaaggaggga

SEQ ID NO: 3221688 - RNA, 15 nt, Human
gcagugcccaggugg

SEQ ID NO: 3221689 - RNA, 14 nt, Human
gcagugcccaggug

SEQ ID NO: 3221690 - RNA, 22 nt, Human
gcauaugcuucuuuaaaaaagc

SEQ ID NO: 3221691 - RNA, 17 nt, Human
gcauaugacaaauguuu

SEQ ID NO: 3221692 - RNA, 16 nt, Human
gcauaugacaaauguu

SEQ ID NO: 3221693 - RNA, 15 nt, Human
gcauaugacaaaugu

SEQ ID NO: 3221694 - RNA, 14 nt, Human
gcauaugacaaaug

SEQ ID NO: 3221695 - RNA, 19 nt, Human
gcauaugacaaauguuucu

SEQ ID NO: 3221696 - RNA, 18 nt, Human
gcauaugacaaauguuuc

SEQ ID NO: 3221697 - RNA, 20 nt, Human
gcauaugacaaauguuucua

SEQ ID NO: 3221698 - RNA, 16 nt, Human
gcaguucuuaacccag

SEQ ID NO: 3221699 - RNA, 22 nt, Human
gcauauaaaauggcaacaaacu

SEQ ID NO: 3221700 - RNA, 15 nt, Human
gcauauaaaauggca

SEQ ID NO: 3221701 - RNA, 22 nt, Human
gcauagucuacuuguuauaaau

SEQ ID NO: 3221702 - RNA, 14 nt, Human
gcauauccuuuuag

SEQ ID NO: 3221703 - RNA, 17 nt, Human
gcauaguaaauguaguu

SEQ ID NO: 3221704 - RNA, 18 nt, Human
gcauaguuguagacaaag

SEQ ID NO: 3221705 - RNA, 21 nt, Human
gcauaguuguagacaaaguac

SEQ ID NO: 3221706 - RNA, 23 nt, Human
gcaguuaugugaccucacgugca

SEQ ID NO: 3221707 - RNA, 13 nt, Human
gcaguucaccaug

SEQ ID NO: 3221708 - RNA, 17 nt, Human
gcaguuauuaacacuaa

SEQ ID NO: 3221709 - RNA, 15 nt, Human
gcagugggagcugcc

SEQ ID NO: 3221710 - RNA, 14 nt, Human
gcagugggagcugc

SEQ ID NO: 3221711 - RNA, 12 nt, Human
gcagugggagcu

SEQ ID NO: 3221712 - RNA, 13 nt, Human
gcagugggagcug

SEQ ID NO: 3221713 - RNA, 22 nt, Human
gcaguuaugugaccucacgugc

SEQ ID NO: 3221714 - RNA, 14 nt, Human
gcaguguagauuuu

SEQ ID NO: 3221715 - RNA, 18 nt, Human
gcagauaaacaguaguga

SEQ ID NO: 3221716 - RNA, 20 nt, Human
gcagaguugaagacagagcu

SEQ ID NO: 3221717 - RNA, 21 nt, Human
gcagaguugaagacagagcua

SEQ ID NO: 3221718 - RNA, 17 nt, Human
gcagacaguuaagagaa

SEQ ID NO: 3221719 - RNA, 20 nt, Human
gcagacaugguggggucucc

SEQ ID NO: 3221720 - RNA, 20 nt, Human
gcagacagggggccagaaca

SEQ ID NO: 3221721 - RNA, 21 nt, Human
gcagauucuaggaccuguguc

SEQ ID NO: 3221722 - RNA, 17 nt, Human
gcagauacuacugacca

SEQ ID NO: 3221723 - RNA, 24 nt, Human
gcagauacuacugaccagacaagc

SEQ ID NO: 3221724 - RNA, 22 nt, Human
gcagauacuacugaccagacaa

SEQ ID NO: 3221725 - RNA, 22 nt, Human
gcagauacaggaaaagcugcug

SEQ ID NO: 3221726 - RNA, 20 nt, Human
gcagccccgugggguuccuc

SEQ ID NO: 3221727 - RNA, 20 nt, Human
gcagccccuguucuggcaga

SEQ ID NO: 3221728 - RNA, 21 nt, Human
gcagccccuguucuggcagag

SEQ ID NO: 3221729 - RNA, 22 nt, Human
gcagcccgcaucagcugcucag

SEQ ID NO: 3221730 - RNA, 19 nt, Human
gcagcccgcaucagcugcu

SEQ ID NO: 3221731 - RNA, 13 nt, Human
gcagcccugcaga

SEQ ID NO: 3221732 - RNA, 24 nt, Human
gcagccccauucugccugcccagg

SEQ ID NO: 3221733 - RNA, 21 nt, Human
gcagccccauucugccugccc

SEQ ID NO: 3221734 - RNA, 19 nt, Human
gcagccccauucugccugc

SEQ ID NO: 3221735 - RNA, 18 nt, Human
gcagccccauucugccug

SEQ ID NO: 3221736 - RNA, 17 nt, Human
gcagccccauucugccu

SEQ ID NO: 3221737 - RNA, 17 nt, Human
gcagcaauaauuucugu

SEQ ID NO: 3221738 - RNA, 17 nt, Human
gcagauuuuaguuuuau

SEQ ID NO: 3221739 - RNA, 13 nt, Human
gcagcccugcuuu

SEQ ID NO: 3221740 - RNA, 15 nt, Human
gcagccuggcucccc

SEQ ID NO: 3221741 - RNA, 17 nt, Human
gcagccuggcuccccug

SEQ ID NO: 3221742 - RNA, 19 nt, Human
gcagccuggcuccccuggg

SEQ ID NO: 3221743 - RNA, 20 nt, Human
gcagccuggcuccccugggg

SEQ ID NO: 3221744 - RNA, 21 nt, Human
gcagccuggcuccccuggggu

SEQ ID NO: 3221745 - RNA, 14 nt, Human
gcagcccugcagag

SEQ ID NO: 3221746 - RNA, 15 nt, Human
gcagcccugcagagg

SEQ ID NO: 3221747 - RNA, 16 nt, Human
gcagcccugcagaggg

SEQ ID NO: 3221748 - RNA, 17 nt, Human
gcagcccugcagagggc

SEQ ID NO: 3221749 - RNA, 15 nt, Human
gcagcucaccucucc

SEQ ID NO: 3221750 - RNA, 15 nt, Human
gcagccuuggcaaac

SEQ ID NO: 3221751 - RNA, 14 nt, Human
gcagcucaccucuc

SEQ ID NO: 3221752 - RNA, 23 nt, Human
gcaggaggaucacuugaguccag

SEQ ID NO: 3221753 - RNA, 19 nt, Human
gcaggacacugcagaacag

SEQ ID NO: 3221754 - RNA, 14 nt, Human
gcaggacacugcag

SEQ ID NO: 3221755 - RNA, 20 nt, Human
gcaggaggaucacuugaguc

SEQ ID NO: 3221756 - RNA, 20 nt, Human
gcaggaaggcugagaggaga

SEQ ID NO: 3221757 - RNA, 13 nt, Human
gcaggcagccagg

SEQ ID NO: 3221758 - RNA, 14 nt, Human
gcaggcagccaggc

SEQ ID NO: 3221759 - RNA, 12 nt, Human
gcaggcagccag

SEQ ID NO: 3221760 - RNA, 9 nt, Human
gcaggcagc

SEQ ID NO: 3221761 - RNA, 21 nt, Human
gcaggagggacagucucacca

SEQ ID NO: 3221762 - RNA, 18 nt, Human
gcaccuuagacagucccu

SEQ ID NO: 3221763 - RNA, 15 nt, Human
gcacccucaggcagg

SEQ ID NO: 3221764 - RNA, 23 nt, Human
gcacccguguuuguaaaaaugua

SEQ ID NO: 3221765 - RNA, 14 nt, Human
gcaccuuagacagu

SEQ ID NO: 3221766 - RNA, 17 nt, Human
gcaccuuagacaguccc

SEQ ID NO: 3221767 - RNA, 19 nt, Human
gcacccggccccugcuggu

SEQ ID NO: 3221768 - RNA, 18 nt, Human
gcacccggccccugcugg

SEQ ID NO: 3221769 - RNA, 22 nt, Human
gcacccaccaucaugucuggcu

SEQ ID NO: 3221770 - RNA, 16 nt, Human
gcaccagcagccugga

SEQ ID NO: 3221771 - RNA, 19 nt, Human
gcaccagcccagaagugca

SEQ ID NO: 3221772 - RNA, 21 nt, Human
gcaccacugcacuccagccug

SEQ ID NO: 3221773 - RNA, 22 nt, Human
gcaccacugcacuccagccugg

SEQ ID NO: 3221774 - RNA, 15 nt, Human
gcaccagcagccugg

SEQ ID NO: 3221775 - RNA, 14 nt, Human
gcaccagcagccug

SEQ ID NO: 3221776 - RNA, 13 nt, Human
gcaauggcagccu

SEQ ID NO: 3221777 - RNA, 12 nt, Human
gcaauggcagcc

SEQ ID NO: 3221778 - RNA, 20 nt, Human
gcaccacugcacuccagccu

SEQ ID NO: 3221779 - RNA, 14 nt, Human
gcaauggcagccuu

SEQ ID NO: 3221780 - RNA, 13 nt, Human
gcacgugcacaaa

SEQ ID NO: 3221781 - RNA, 16 nt, Human
gcacugcuuccaguga

SEQ ID NO: 3221782 - RNA, 18 nt, Human
gcacugcuuccagugagg

SEQ ID NO: 3221783 - RNA, 15 nt, Human
gcacugcucucaccu

SEQ ID NO: 3221784 - RNA, 13 nt, Human
gcacugcucucac

SEQ ID NO: 3221785 - RNA, 20 nt, Human
gcacugcuuccagugaggcu

SEQ ID NO: 3221786 - RNA, 15 nt, Human
gcacugcuuccagug

SEQ ID NO: 3221787 - RNA, 19 nt, Human
gcacugguggcccgacagc

SEQ ID NO: 3221788 - RNA, 24 nt, Human
gcacugguggcccgacagccuggc

SEQ ID NO: 3221789 - RNA, 23 nt, Human
gcacugguggcccgacagccugg

SEQ ID NO: 3221790 - RNA, 22 nt, Human
gcacugguggcccgacagccug

SEQ ID NO: 3221791 - RNA, 12 nt, Human
gcagacaggacc

SEQ ID NO: 3221792 - RNA, 21 nt, Human
gcagaauuguuuagauuuugu

SEQ ID NO: 3221793 - RNA, 20 nt, Human
gcagaauuggaaaagacuaa

SEQ ID NO: 3221794 - RNA, 15 nt, Human
gcagacaaucuucug

SEQ ID NO: 3221795 - RNA, 23 nt, Human
gcagaauuguuuagauuuugugu

SEQ ID NO: 3221796 - RNA, 13 nt, Human
gcagacaggacca

SEQ ID NO: 3221797 - RNA, 15 nt, Human
gcagacaggaccagg

SEQ ID NO: 3221798 - RNA, 14 nt, Human
gcagacaggcaagc

SEQ ID NO: 3221799 - RNA, 19 nt, Human
gcagacaggcaagcaccuc

SEQ ID NO: 3221800 - RNA, 23 nt, Human
gcagacaggcaagcaccuccugc

SEQ ID NO: 3221801 - RNA, 14 nt, Human
gcacuucaggaggc

SEQ ID NO: 3221802 - RNA, 13 nt, Human
gcagaauucauuc

SEQ ID NO: 3221803 - RNA, 14 nt, Human
gcagaauucauuca

SEQ ID NO: 3221804 - RNA, 21 nt, Human
gcagaauucauucauacuuaa

SEQ ID NO: 3221805 - RNA, 14 nt, Human
gcagaauuggaaaa

SEQ ID NO: 3221806 - RNA, 13 nt, Human
gcagaauuggaaa

SEQ ID NO: 3221807 - RNA, 19 nt, Human
gcacuucagggcagauuuu

SEQ ID NO: 3221808 - RNA, 18 nt, Human
gccuuugcucuggucuau

SEQ ID NO: 3221809 - RNA, 22 nt, Human
gccuuuggaaacagcucgacuu

SEQ ID NO: 3221810 - RNA, 16 nt, Human
gccuuugcagcucaga

SEQ ID NO: 3221811 - RNA, 21 nt, Human
gccuuugcagcucagaaccac

SEQ ID NO: 3221812 - RNA, 15 nt, Human
gccuuggccucagag

SEQ ID NO: 3221813 - RNA, 17 nt, Human
gccuuucuuuucuuucu

SEQ ID NO: 3221814 - RNA, 20 nt, Human
gccuuugaagagugaaauac

SEQ ID NO: 3221815 - RNA, 23 nt, Human
gcgacaaugcaaaccaucauuga

SEQ ID NO: 3221816 - RNA, 14 nt, Human
gcgaaagaaaacuc

SEQ ID NO: 3221817 - RNA, 17 nt, Human
gcgaaaucccugcucac

SEQ ID NO: 3221818 - RNA, 23 nt, Human
gcgaaaaacucaaccaaauggua

SEQ ID NO: 3221819 - RNA, 16 nt, Human
gccuuauggaacacuc

SEQ ID NO: 3221820 - RNA, 18 nt, Human
gccuuauggaacacucug

SEQ ID NO: 3221821 - RNA, 19 nt, Human
gccuuauggaacacucuga

SEQ ID NO: 3221822 - RNA, 12 nt, Human
gccuuccagggg

SEQ ID NO: 3221823 - RNA, 13 nt, Human
gccuuccaccucu

SEQ ID NO: 3221824 - RNA, 13 nt, Human
gccuucagggagu

SEQ ID NO: 3221825 - RNA, 21 nt, Human
gccuucagggagugagggauu

SEQ ID NO: 3221826 - RNA, 16 nt, Human
gccuucagcucuacag

SEQ ID NO: 3221827 - RNA, 13 nt, Human
gccuucaucuccc

SEQ ID NO: 3221828 - RNA, 15 nt, Human
gccuuccaggggugg

SEQ ID NO: 3221829 - RNA, 16 nt, Human
gccuuccagggguggg

SEQ ID NO: 3221830 - RNA, 22 nt, Human
gccuucgauacaccgggccugg

SEQ ID NO: 3221831 - RNA, 18 nt, Human
gccuucgauacaccgggc

SEQ ID NO: 3221832 - RNA, 23 nt, Human
gccuucgauacaccgggccugga

SEQ ID NO: 3221833 - RNA, 17 nt, Human
gccugguccucacacuc

SEQ ID NO: 3221834 - RNA, 17 nt, Human
gccuggucgccuuccac

SEQ ID NO: 3221835 - RNA, 14 nt, Human
gccuggggucaggc

SEQ ID NO: 3221836 - RNA, 18 nt, Human
gccuggucgccuuccacc

SEQ ID NO: 3221837 - RNA, 13 nt, Human
gccugguggcagc

SEQ ID NO: 3221838 - RNA, 21 nt, Human
gccugguggcagcugcggucc

SEQ ID NO: 3221839 - RNA, 19 nt, Human
gccugguggcagcugcggu

SEQ ID NO: 3221840 - RNA, 18 nt, Human
gccugguggcagcugcgg

SEQ ID NO: 3221841 - RNA, 23 nt, Human
gccugccacucaggcccaaagcc

SEQ ID NO: 3221842 - RNA, 15 nt, Human
gccugccacucaggc

SEQ ID NO: 3221843 - RNA, 21 nt, Human
gccugggggcugggcagagga

SEQ ID NO: 3221844 - RNA, 22 nt, Human
gccugggggcugggcagaggaa

SEQ ID NO: 3221845 - RNA, 16 nt, Human
gccuuaaaacaucauu

SEQ ID NO: 3221846 - RNA, 22 nt, Human
gccuggugaugcgcaguugcug

SEQ ID NO: 3221847 - RNA, 21 nt, Human
gccuguugggccaggagccuc

SEQ ID NO: 3221848 - RNA, 16 nt, Human
gccuuacacaaugguu

SEQ ID NO: 3221849 - RNA, 19 nt, Human
gccuuaaaacaucauuccu

SEQ ID NO: 3221850 - RNA, 20 nt, Human
gccuuacacaaugguuuucu

SEQ ID NO: 3221851 - RNA, 21 nt, Human
gccuuacacaaugguuuucuu

SEQ ID NO: 3221852 - RNA, 18 nt, Human
gccuuagaagucacacag

SEQ ID NO: 3221853 - RNA, 17 nt, Human
gccuuagaagucacaca

SEQ ID NO: 3221854 - RNA, 19 nt, Human
gccuuagaagucacacagu

SEQ ID NO: 3221855 - RNA, 17 nt, Human
gccuuagaaccuuucuu

SEQ ID NO: 3221856 - RNA, 10 nt, Human
gccuuaugga

SEQ ID NO: 3221857 - RNA, 14 nt, Human
gccuuauggaacac

SEQ ID NO: 3221858 - RNA, 21 nt, Human
gcgcggacauccccugcuggc

SEQ ID NO: 3221859 - RNA, 22 nt, Human
gcgcuaacuugcuuaaauguga

SEQ ID NO: 3221860 - RNA, 21 nt, Human
gcgcuaacuugcuuaaaugug

SEQ ID NO: 3221861 - RNA, 14 nt, Human
gcgcgugaggcccg

SEQ ID NO: 3221862 - RNA, 20 nt, Human
gcgcuaacuugcuuaaaugu

SEQ ID NO: 3221863 - RNA, 15 nt, Human
gcgcuaacuugcuua

SEQ ID NO: 3221864 - RNA, 13 nt, Human
gcggacagccacg

SEQ ID NO: 3221865 - RNA, 11 nt, Human
gcggacagcca

SEQ ID NO: 3221866 - RNA, 18 nt, Human
gcgcuagcacagcucccu

SEQ ID NO: 3221867 - RNA, 13 nt, Human
gcgcuagaggcca

SEQ ID NO: 3221868 - RNA, 21 nt, Human
gcgcuagcacagcucccuucu

SEQ ID NO: 3221869 - RNA, 12 nt, Human
gcgacagugaga

SEQ ID NO: 3221870 - RNA, 13 nt, Human
gcgacagagcagu

SEQ ID NO: 3221871 - RNA, 12 nt, Human
gcgacagagcag

SEQ ID NO: 3221872 - RNA, 15 nt, Human
gcgccuacaggagug

SEQ ID NO: 3221873 - RNA, 19 nt, Human
gcgucucauacucaccuca

SEQ ID NO: 3221874 - RNA, 18 nt, Human
gcgguuuaucgcccuggc

SEQ ID NO: 3221875 - RNA, 19 nt, Human
gcgggucacaggagggagg

SEQ ID NO: 3221876 - RNA, 20 nt, Human
gcgggucacaggagggaggg

SEQ ID NO: 3221877 - RNA, 15 nt, Human
gcggacagccacggc

SEQ ID NO: 3221878 - RNA, 19 nt, Human
gcggaaugaaccacaucuu

SEQ ID NO: 3221879 - RNA, 22 nt, Human
gcgggcacaccuccucccacug

SEQ ID NO: 3221880 - RNA, 19 nt, Human
gcgggcacaccuccuccca

SEQ ID NO: 3221881 - RNA, 17 nt, Human
gcgggcacaccuccucc

SEQ ID NO: 3221882 - RNA, 16 nt, Human
gcgggcccugcccaca

SEQ ID NO: 3221883 - RNA, 13 nt, Human
gcgggucacagga

SEQ ID NO: 3221884 - RNA, 15 nt, Human
gcgggucacaggagg

SEQ ID NO: 3221885 - RNA, 16 nt, Human
gcuaagaauauuugaa

SEQ ID NO: 3221886 - RNA, 17 nt, Human
gcuaagaauauuugaau

SEQ ID NO: 3221887 - RNA, 13 nt, Human
gcuaagagggagg

SEQ ID NO: 3221888 - RNA, 20 nt, Human
gcuaaagacugaucucaggg

SEQ ID NO: 3221889 - RNA, 23 nt, Human
gcuaaacguguauguuuuucagu

SEQ ID NO: 3221890 - RNA, 22 nt, Human
gcuaaacguguauguuuuucag

SEQ ID NO: 3221891 - RNA, 14 nt, Human
gcuacacaggggaa

SEQ ID NO: 3221892 - RNA, 14 nt, Human
gcuaagaauuuuuu

SEQ ID NO: 3221893 - RNA, 20 nt, Human
gcuaagagggagggagggcu

SEQ ID NO: 3221894 - RNA, 13 nt, Human
gcuaccuugcccc

SEQ ID NO: 3221895 - RNA, 14 nt, Human
gcuaccuugcccca

SEQ ID NO: 3221896 - RNA, 15 nt, Human
gcuaccuugccccaa

SEQ ID NO: 3221897 - RNA, 20 nt, Human
gcuaccuugccccaacccuu

SEQ ID NO: 3221898 - RNA, 22 nt, Human
gcuaccuugccccaacccuucu

SEQ ID NO: 3221899 - RNA, 23 nt, Human
gcuaccuugccccaacccuucuu

SEQ ID NO: 3221900 - RNA, 19 nt, Human
gcuagaacucccuuucaac

SEQ ID NO: 3221901 - RNA, 18 nt, Human
gcuagaacucccuuucaa

SEQ ID NO: 3221902 - RNA, 13 nt, Human
gcuauaggugcua

SEQ ID NO: 3221903 - RNA, 23 nt, Human
gcuauagcuuuagccgugucacg

SEQ ID NO: 3221904 - RNA, 22 nt, Human
gcuaggaaauccaggguggugg

SEQ ID NO: 3221905 - RNA, 14 nt, Human
gcuaggaacaaauc

SEQ ID NO: 3221906 - RNA, 15 nt, Human
gcuaggaacacuccu

SEQ ID NO: 3221907 - RNA, 19 nt, Human
gcuaggaaauccagggugg

SEQ ID NO: 3221908 - RNA, 20 nt, Human
gccucucauuccagaggaag

SEQ ID NO: 3221909 - RNA, 13 nt, Human
gccucucucaggc

SEQ ID NO: 3221910 - RNA, 14 nt, Human
gccucucucaggcc

SEQ ID NO: 3221911 - RNA, 16 nt, Human
gccucucucaggccaa

SEQ ID NO: 3221912 - RNA, 16 nt, Human
gccucugacacacagc

SEQ ID NO: 3221913 - RNA, 18 nt, Human
gccucugacacacagcuc

SEQ ID NO: 3221914 - RNA, 17 nt, Human
gccucugacacacagcu

SEQ ID NO: 3221915 - RNA, 14 nt, Human
gccucugcacuccc

SEQ ID NO: 3221916 - RNA, 21 nt, Human
gccucugacacacagcucugu

SEQ ID NO: 3221917 - RNA, 20 nt, Human
gccucugacacacagcucug

SEQ ID NO: 3221918 - RNA, 19 nt, Human
gccucugacacacagcucu

SEQ ID NO: 3221919 - RNA, 14 nt, Human
gccugacuccccca

SEQ ID NO: 3221920 - RNA, 15 nt, Human
gccugacucccccag

SEQ ID NO: 3221921 - RNA, 23 nt, Human
gccugacucccccaguccccuuc

SEQ ID NO: 3221922 - RNA, 21 nt, Human
gccugacucccccaguccccu

SEQ ID NO: 3221923 - RNA, 13 nt, Human
gccucugccucug

SEQ ID NO: 3221924 - RNA, 12 nt, Human
gccucugccucu

SEQ ID NO: 3221925 - RNA, 15 nt, Human
gccucugcauucagg

SEQ ID NO: 3221926 - RNA, 17 nt, Human
gccucugcaaaggaaau

SEQ ID NO: 3221927 - RNA, 13 nt, Human
gccugcaagggag

SEQ ID NO: 3221928 - RNA, 15 nt, Human
gccugcaagggagug

SEQ ID NO: 3221929 - RNA, 20 nt, Human
gccugaggggcagccugccu

SEQ ID NO: 3221930 - RNA, 19 nt, Human
gccugaggggcagccugcc

SEQ ID NO: 3221931 - RNA, 16 nt, Human
gccugaggggcagccu

SEQ ID NO: 3221932 - RNA, 13 nt, Human
gccugaggggcag

SEQ ID NO: 3221933 - RNA, 20 nt, Human
gccuccuacagcccaccugg

SEQ ID NO: 3221934 - RNA, 21 nt, Human
gccuccgucacuaccuggcug

SEQ ID NO: 3221935 - RNA, 20 nt, Human
gccuccgucacuaccuggcu

SEQ ID NO: 3221936 - RNA, 19 nt, Human
gccucucauuccagaggaa

SEQ ID NO: 3221937 - RNA, 16 nt, Human
gccuccgcuucccugg

SEQ ID NO: 3221938 - RNA, 19 nt, Human
gccuccgucacuaccuggc

SEQ ID NO: 3221939 - RNA, 15 nt, Human
gccuccgcuucccug

SEQ ID NO: 3221940 - RNA, 17 nt, Human
gccucccgaguagcugg

SEQ ID NO: 3221941 - RNA, 19 nt, Human
gccucccgaguagcuggga

SEQ ID NO: 3221942 - RNA, 18 nt, Human
gccucccgaguagcuggg

SEQ ID NO: 3221943 - RNA, 16 nt, Human
gccucccaacucaccc

SEQ ID NO: 3221944 - RNA, 17 nt, Human
gccucccaacucacccc

SEQ ID NO: 3221945 - RNA, 18 nt, Human
gccucccaacucacccca

SEQ ID NO: 3221946 - RNA, 19 nt, Human
gccucccaacucaccccag

SEQ ID NO: 3221947 - RNA, 14 nt, Human
gccucccaucaccc

SEQ ID NO: 3221948 - RNA, 16 nt, Human
gccucccaucacccgc

SEQ ID NO: 3221949 - RNA, 13 nt, Human
gccucccaacuca

SEQ ID NO: 3221950 - RNA, 19 nt, Human
gccucccaaagugcuggga

SEQ ID NO: 3221951 - RNA, 18 nt, Human
gccucccaaagugcuggg

SEQ ID NO: 3221952 - RNA, 16 nt, Human
gccucagcauccuggc

SEQ ID NO: 3221953 - RNA, 15 nt, Human
gccucagcauccugg

SEQ ID NO: 3221954 - RNA, 18 nt, Human
gccucacaguccuuacca

SEQ ID NO: 3221955 - RNA, 20 nt, Human
gccucaacucugcugagggu

SEQ ID NO: 3221956 - RNA, 22 nt, Human
gccucaacucugcugagggucc

SEQ ID NO: 3221957 - RNA, 23 nt, Human
gccucaacucugcugagggucca

SEQ ID NO: 3221958 - RNA, 17 nt, Human
gccucaaccuccugggc

SEQ ID NO: 3221959 - RNA, 13 nt, Human
gccucacaguccu

SEQ ID NO: 3221960 - RNA, 17 nt, Human
gccucacaguccuuacc

SEQ ID NO: 3221961 - RNA, 19 nt, Human
gccucaaccuccugggcua

SEQ ID NO: 3221962 - RNA, 18 nt, Human
gccucaaccuccugggcu

SEQ ID NO: 3221963 - RNA, 22 nt, Human
gccuaugugcaugcagcaucua

SEQ ID NO: 3221964 - RNA, 20 nt, Human
gccguguaaccauggaccca

SEQ ID NO: 3221965 - RNA, 22 nt, Human
gccguggcuucccgcucagccc

SEQ ID NO: 3221966 - RNA, 21 nt, Human
gccguggcuucccgcucagcc

SEQ ID NO: 3221967 - RNA, 19 nt, Human
gccguggcuucccgcucag

SEQ ID NO: 3221968 - RNA, 15 nt, Human
gccguggcuucccgc

SEQ ID NO: 3221969 - RNA, 19 nt, Human
gccgugccuucagcucuac

SEQ ID NO: 3221970 - RNA, 17 nt, Human
gccgugccuucagcucu

SEQ ID NO: 3221971 - RNA, 15 nt, Human
gccgugccuucagcu

SEQ ID NO: 3221972 - RNA, 14 nt, Human
gccgugccuucagc

SEQ ID NO: 3221973 - RNA, 15 nt, Human
gccgucuaccugagg

SEQ ID NO: 3221974 - RNA, 16 nt, Human
gccgucuaccugaggg

SEQ ID NO: 3221975 - RNA, 17 nt, Human
gccgucuaccugagggg

SEQ ID NO: 3221976 - RNA, 16 nt, Human
gccggugugggggccc

SEQ ID NO: 3221977 - RNA, 12 nt, Human
gccguacaguuc

SEQ ID NO: 3221978 - RNA, 19 nt, Human
gccgagaucacgccacugc

SEQ ID NO: 3221979 - RNA, 22 nt, Human
gccgagaucacgccacugcacu

SEQ ID NO: 3221980 - RNA, 21 nt, Human
gccgagaucacgccacugcac

SEQ ID NO: 3221981 - RNA, 20 nt, Human
gccgagaucacgccacugca

SEQ ID NO: 3221982 - RNA, 11 nt, Human
gccgcagcccu

SEQ ID NO: 3221983 - RNA, 12 nt, Human
gccgcagcccug

SEQ ID NO: 3221984 - RNA, 20 nt, Human
gccgggcgugguggugagug

SEQ ID NO: 3221985 - RNA, 21 nt, Human
gccgggcuacccgugagcccu

SEQ ID NO: 3221986 - RNA, 21 nt, Human
gccgggcgcgguggcucacgc

SEQ ID NO: 3221987 - RNA, 16 nt, Human
gccggcuuucaggagc

SEQ ID NO: 3221988 - RNA, 15 nt, Human
gccgaauagcugaug

SEQ ID NO: 3221989 - RNA, 18 nt, Human
gcccugcuuugggcugcc

SEQ ID NO: 3221990 - RNA, 16 nt, Human
gcccugcuuugggcug

SEQ ID NO: 3221991 - RNA, 12 nt, Human
gcccugcuguuu

SEQ ID NO: 3221992 - RNA, 14 nt, Human
gcccuucucuccag

SEQ ID NO: 3221993 - RNA, 16 nt, Human
gcccuucucuccagcc

SEQ ID NO: 3221994 - RNA, 17 nt, Human
gcccuucucuccagccc

SEQ ID NO: 3221995 - RNA, 13 nt, Human
gccaggcuggucu

SEQ ID NO: 3221996 - RNA, 22 nt, Human
gccaguaacacaggccacccug

SEQ ID NO: 3221997 - RNA, 22 nt, Human
gccagucccugaggcagguccc

SEQ ID NO: 3221998 - RNA, 16 nt, Human
gccagucccugaggca

SEQ ID NO: 3221999 - RNA, 21 nt, Human
gccagucaccccggccaccug

SEQ ID NO: 3222000 - RNA, 17 nt, Human
gccaucauguuuacaga

SEQ ID NO: 3222001 - RNA, 21 nt, Human
gccaucauguuuacagaggac

SEQ ID NO: 3222002 - RNA, 13 nt, Human
gccaucauuucug

SEQ ID NO: 3222003 - RNA, 19 nt, Human
gccaucuggagagcccaga

SEQ ID NO: 3222004 - RNA, 14 nt, Human
gccaucuggagagc

SEQ ID NO: 3222005 - RNA, 13 nt, Human
gccaucuggagag

SEQ ID NO: 3222006 - RNA, 20 nt, Human
gccaucuggagagcccagag

SEQ ID NO: 3222007 - RNA, 14 nt, Human
gccaugcuccuggc

SEQ ID NO: 3222008 - RNA, 20 nt, Human
gccaugaggaacaaggcaag

SEQ ID NO: 3222009 - RNA, 11 nt, Human
gccaugaauua

SEQ ID NO: 3222010 - RNA, 12 nt, Human
gccaugaacugu

SEQ ID NO: 3222011 - RNA, 16 nt, Human
gcccagaaugaggcug

SEQ ID NO: 3222012 - RNA, 17 nt, Human
gcccagaaugaggcugc

SEQ ID NO: 3222013 - RNA, 13 nt, Human
gcccagaauacug

SEQ ID NO: 3222014 - RNA, 14 nt, Human
gcccacuucugcca

SEQ ID NO: 3222015 - RNA, 16 nt, Human
gcccaccuuggcucaa

SEQ ID NO: 3222016 - RNA, 15 nt, Human
gcccaccuuggcuca

SEQ ID NO: 3222017 - RNA, 13 nt, Human
gcccaccuuggcu

SEQ ID NO: 3222018 - RNA, 17 nt, Human
gcccaccuggccucugc

SEQ ID NO: 3222019 - RNA, 20 nt, Human
gcccaccuggccucugcacu

SEQ ID NO: 3222020 - RNA, 21 nt, Human
gcccaccuggccucugcacuc

SEQ ID NO: 3222021 - RNA, 24 nt, Human
gcccaccuggccucugcacucccc

SEQ ID NO: 3222022 - RNA, 15 nt, Human
gcccaccuggccucu

SEQ ID NO: 3222023 - RNA, 16 nt, Human
gcccaccuggccucug

SEQ ID NO: 3222024 - RNA, 16 nt, Human
gcccaccccauggccg

SEQ ID NO: 3222025 - RNA, 16 nt, Human
gccaugggccuccugu

SEQ ID NO: 3222026 - RNA, 15 nt, Human
gccaugggccuccug

SEQ ID NO: 3222027 - RNA, 14 nt, Human
gcccaaccugcucu

SEQ ID NO: 3222028 - RNA, 24 nt, Human
gcccaaccugcucuccucuugcca

SEQ ID NO: 3222029 - RNA, 14 nt, Human
gccaugggugcuug

SEQ ID NO: 3222030 - RNA, 22 nt, Human
gcccaagaauagaugcugacug

SEQ ID NO: 3222031 - RNA, 21 nt, Human
gcccaagaauagaugcugacu

SEQ ID NO: 3222032 - RNA, 23 nt, Human
gcccacauccggggccagcuccg

SEQ ID NO: 3222033 - RNA, 22 nt, Human
gcccacauccggggccagcucc

SEQ ID NO: 3222034 - RNA, 21 nt, Human
gcccaccaggccccccuguca

SEQ ID NO: 3222035 - RNA, 19 nt, Human
gcccacccaagcaggaggc

SEQ ID NO: 3222036 - RNA, 20 nt, Human
gcccacauagugaugguucc

SEQ ID NO: 3222037 - RNA, 21 nt, Human
gcccacauccggggccagcuc

SEQ ID NO: 3222038 - RNA, 15 nt, Human
gcccacaguauauuu

SEQ ID NO: 3222039 - RNA, 17 nt, Human
gcccacaguauauuuua

SEQ ID NO: 3222040 - RNA, 13 nt, Human
gccaggagagcuu

SEQ ID NO: 3222041 - RNA, 17 nt, Human
gccaggagagcuuaggg

SEQ ID NO: 3222042 - RNA, 20 nt, Human
gccaggagagcuuagggucu

SEQ ID NO: 3222043 - RNA, 21 nt, Human
gccaggagagcuuagggucuc

SEQ ID NO: 3222044 - RNA, 14 nt, Human
gccaggagccuccu

SEQ ID NO: 3222045 - RNA, 16 nt, Human
gccaggagccuccugc

SEQ ID NO: 3222046 - RNA, 19 nt, Human
gccaggagccuccugcccu

SEQ ID NO: 3222047 - RNA, 20 nt, Human
gccaggagccuccugcccuu

SEQ ID NO: 3222048 - RNA, 22 nt, Human
gccaggcgcuagcacagcuccc

SEQ ID NO: 3222049 - RNA, 20 nt, Human
gccaggaagccagcaggcuc

SEQ ID NO: 3222050 - RNA, 11 nt, Human
gccaggaagcc

SEQ ID NO: 3222051 - RNA, 18 nt, Human
gccaggaaguagcacagg

SEQ ID NO: 3222052 - RNA, 17 nt, Human
gccaggaaguagcacag

SEQ ID NO: 3222053 - RNA, 22 nt, Human
gccaggaaguagcacaggcuga

SEQ ID NO: 3222054 - RNA, 21 nt, Human
gccaggaaguagcacaggcug

SEQ ID NO: 3222055 - RNA, 20 nt, Human
gccaggaaguagcacaggcu

SEQ ID NO: 3222056 - RNA, 19 nt, Human
gccaggaaguagcacaggc

SEQ ID NO: 3222057 - RNA, 20 nt, Human
gccagcugcuugggcuucau

SEQ ID NO: 3222058 - RNA, 12 nt, Human
gccaggaagcca

SEQ ID NO: 3222059 - RNA, 13 nt, Human
gccaggaagccag

SEQ ID NO: 3222060 - RNA, 14 nt, Human
gccaggaagccagc

SEQ ID NO: 3222061 - RNA, 17 nt, Human
gccagcugcuugggcuu

SEQ ID NO: 3222062 - RNA, 18 nt, Human
gccagcugcuugggcuuc

SEQ ID NO: 3222063 - RNA, 16 nt, Human
gccagcugcuugggcu

SEQ ID NO: 3222064 - RNA, 14 nt, Human
gccagcugccuagg

SEQ ID NO: 3222065 - RNA, 21 nt, Human
gccagcucuuccuagcuggag

SEQ ID NO: 3222066 - RNA, 19 nt, Human
gccagcucuuccuagcugg

SEQ ID NO: 3222067 - RNA, 17 nt, Human
gccagcucuuccuagcu

SEQ ID NO: 3222068 - RNA, 13 nt, Human
gccagcucuuccu

SEQ ID NO: 3222069 - RNA, 12 nt, Human
gccagccuggcu

SEQ ID NO: 3222070 - RNA, 17 nt, Human
gccagccuggcugggac

SEQ ID NO: 3222071 - RNA, 14 nt, Human
gccagccuggcugg

SEQ ID NO: 3222072 - RNA, 13 nt, Human
gccagccuggcug

SEQ ID NO: 3222073 - RNA, 24 nt, Human
gccaaggccaaaggaagcacaugc

SEQ ID NO: 3222074 - RNA, 19 nt, Human
gccaaggccaaaggaagca

SEQ ID NO: 3222075 - RNA, 20 nt, Human
gccacuccagaccccuggcu

SEQ ID NO: 3222076 - RNA, 21 nt, Human
gccacuccagaccccuggcuu

SEQ ID NO: 3222077 - RNA, 20 nt, Human
gccaaggccaaaggaagcac

SEQ ID NO: 3222078 - RNA, 21 nt, Human
gccagagacacaagccuucgg

SEQ ID NO: 3222079 - RNA, 20 nt, Human
gccagagacacaagccuucg

SEQ ID NO: 3222080 - RNA, 22 nt, Human
gccagagacacaagccuucggc

SEQ ID NO: 3222081 - RNA, 19 nt, Human
gccacugcaccgggccaca

SEQ ID NO: 3222082 - RNA, 21 nt, Human
gccacugcaccgggccacaga

SEQ ID NO: 3222083 - RNA, 20 nt, Human
gccacugcaccgggccacag

SEQ ID NO: 3222084 - RNA, 22 nt, Human
gccacuccagaccccuggcuuu

SEQ ID NO: 3222085 - RNA, 13 nt, Human
gccacuccccagc

SEQ ID NO: 3222086 - RNA, 14 nt, Human
gccagaugcaccag

SEQ ID NO: 3222087 - RNA, 24 nt, Human
gccagauucuuuccugaggcuggg

SEQ ID NO: 3222088 - RNA, 13 nt, Human
gccagauuucacu

SEQ ID NO: 3222089 - RNA, 20 nt, Human
gccagauucuuuccugaggc

SEQ ID NO: 3222090 - RNA, 22 nt, Human
gccagccgagauagccaaggcc

SEQ ID NO: 3222091 - RNA, 21 nt, Human
gccagccgagauagccaaggc

SEQ ID NO: 3222092 - RNA, 19 nt, Human
gccagauucuuuccugagg

SEQ ID NO: 3222093 - RNA, 16 nt, Human
gccccugagaucucug

SEQ ID NO: 3222094 - RNA, 20 nt, Human
gccccuucugacccaugcug

SEQ ID NO: 3222095 - RNA, 14 nt, Human
gcccgauccucccc

SEQ ID NO: 3222096 - RNA, 20 nt, Human
gcccgauccuccccuggacu

SEQ ID NO: 3222097 - RNA, 17 nt, Human
gcccgauccuccccugg

SEQ ID NO: 3222098 - RNA, 15 nt, Human
gcccgacagccuggc

SEQ ID NO: 3222099 - RNA, 24 nt, Human
gcccgaagcaugaacagugcaccu

SEQ ID NO: 3222100 - RNA, 14 nt, Human
gcccgacagccugg

SEQ ID NO: 3222101 - RNA, 12 nt, Human
gcccgacagccu

SEQ ID NO: 3222102 - RNA, 15 nt, Human
gccccgaggccuucu

SEQ ID NO: 3222103 - RNA, 22 nt, Human
gccccgaaaggucaccucacuc

SEQ ID NO: 3222104 - RNA, 14 nt, Human
gccccucagggucc

SEQ ID NO: 3222105 - RNA, 18 nt, Human
gccccgaggccuucucug

SEQ ID NO: 3222106 - RNA, 23 nt, Human
gccccucaacucuccuccagagu

SEQ ID NO: 3222107 - RNA, 16 nt, Human
gccccucagggucccu

SEQ ID NO: 3222108 - RNA, 20 nt, Human
gccccucccucuccagcagg

SEQ ID NO: 3222109 - RNA, 15 nt, Human
gccccucccucucca

SEQ ID NO: 3222110 - RNA, 17 nt, Human
gccccucccuccucuga

SEQ ID NO: 3222111 - RNA, 15 nt, Human
gccccucccuccucu

SEQ ID NO: 3222112 - RNA, 13 nt, Human
gccccucccuccu

SEQ ID NO: 3222113 - RNA, 21 nt, Human
gcccgauccuccccuggacuc

SEQ ID NO: 3222114 - RNA, 13 nt, Human
gcccgcaucagcu

SEQ ID NO: 3222115 - RNA, 20 nt, Human
gcccgcaucagcugcucaga

SEQ ID NO: 3222116 - RNA, 19 nt, Human
gcccgcaucagcugcucag

SEQ ID NO: 3222117 - RNA, 15 nt, Human
gcccgcaucagcugc

SEQ ID NO: 3222118 - RNA, 19 nt, Human
gcccuccaagaccuucucc

SEQ ID NO: 3222119 - RNA, 21 nt, Human
gcccuccaagaccuucuccuu

SEQ ID NO: 3222120 - RNA, 22 nt, Human
gcccuccaagaccuucuccuuc

SEQ ID NO: 3222121 - RNA, 23 nt, Human
gcccuccaagaccuucuccuuca

SEQ ID NO: 3222122 - RNA, 15 nt, Human
gcccuccacacccgc

SEQ ID NO: 3222123 - RNA, 20 nt, Human
gcccuccaucuaaacugccc

SEQ ID NO: 3222124 - RNA, 21 nt, Human
gcccuccaucuaaacugcccc

SEQ ID NO: 3222125 - RNA, 17 nt, Human
gcccucuucuucucaag

SEQ ID NO: 3222126 - RNA, 15 nt, Human
gcccugcagagggca

SEQ ID NO: 3222127 - RNA, 14 nt, Human
gcccugcagagggc

SEQ ID NO: 3222128 - RNA, 13 nt, Human
gcccugcagaggg

SEQ ID NO: 3222129 - RNA, 21 nt, Human
gcccucccugccccucccuuc

SEQ ID NO: 3222130 - RNA, 13 nt, Human
gcccucugcccac

SEQ ID NO: 3222131 - RNA, 16 nt, Human
gcccucugcccacucc

SEQ ID NO: 3222132 - RNA, 18 nt, Human
gcccucugcccacucccu

SEQ ID NO: 3222133 - RNA, 12 nt, Human
gcccaggcuggc

SEQ ID NO: 3222134 - RNA, 19 nt, Human
gcccaggcuggagugcagu

SEQ ID NO: 3222135 - RNA, 20 nt, Human
gcccaggcuggagugcagug

SEQ ID NO: 3222136 - RNA, 22 nt, Human
gcccaggccccugccacccugg

SEQ ID NO: 3222137 - RNA, 20 nt, Human
gcccaggcuggagugcaaug

SEQ ID NO: 3222138 - RNA, 15 nt, Human
gcccaggcuggagug

SEQ ID NO: 3222139 - RNA, 23 nt, Human
gcccaggccccugccacccuggg

SEQ ID NO: 3222140 - RNA, 21 nt, Human
gcccagagaggguggugaccu

SEQ ID NO: 3222141 - RNA, 15 nt, Human
gcccagagagggugg

SEQ ID NO: 3222142 - RNA, 17 nt, Human
gcccagaauacugaugg

SEQ ID NO: 3222143 - RNA, 22 nt, Human
gcccaguuggguggaugccugg

SEQ ID NO: 3222144 - RNA, 20 nt, Human
gcccagggggcuuccugagg

SEQ ID NO: 3222145 - RNA, 21 nt, Human
gcccagggugagguggcaugg

SEQ ID NO: 3222146 - RNA, 15 nt, Human
gcccauauuuuacuu

SEQ ID NO: 3222147 - RNA, 20 nt, Human
gcccauauuuuacuuggaaa

SEQ ID NO: 3222148 - RNA, 22 nt, Human
gcccauauuuuacuuggaaaua

SEQ ID NO: 3222149 - RNA, 22 nt, Human
gccccacucucagaggccccaa

SEQ ID NO: 3222150 - RNA, 17 nt, Human
gccccaccugcagcucc

SEQ ID NO: 3222151 - RNA, 16 nt, Human
gccccaccugcagcuc

SEQ ID NO: 3222152 - RNA, 18 nt, Human
gccccaccuggcccucuc

SEQ ID NO: 3222153 - RNA, 15 nt, Human
gccccaccuggcccu

SEQ ID NO: 3222154 - RNA, 14 nt, Human
gccccaccuggccc

SEQ ID NO: 3222155 - RNA, 18 nt, Human
gccccaccugcagcuccc

SEQ ID NO: 3222156 - RNA, 21 nt, Human
gccccacucucagaggcccca

SEQ ID NO: 3222157 - RNA, 19 nt, Human
gccccacucucagaggccc

SEQ ID NO: 3222158 - RNA, 18 nt, Human
gccccacucucagaggcc

SEQ ID NO: 3222159 - RNA, 17 nt, Human
gccccacucucagaggc

SEQ ID NO: 3222160 - RNA, 16 nt, Human
gccccacucucagagg

SEQ ID NO: 3222161 - RNA, 14 nt, Human
gccccacucucaga

SEQ ID NO: 3222162 - RNA, 13 nt, Human
gccccacucucag

SEQ ID NO: 3222163 - RNA, 12 nt, Human
gccccacucuca

SEQ ID NO: 3222164 - RNA, 12 nt, Human
gccccagugccc

SEQ ID NO: 3222165 - RNA, 18 nt, Human
gccccaucccaaacccuu

SEQ ID NO: 3222166 - RNA, 19 nt, Human
gccccaguuguauuuauuu

SEQ ID NO: 3222167 - RNA, 21 nt, Human
gccccauaauuuuuuuuuucc

SEQ ID NO: 3222168 - RNA, 14 nt, Human
gccccagugcccac

SEQ ID NO: 3222169 - RNA, 13 nt, Human
gccccagugccca

SEQ ID NO: 3222170 - RNA, 21 nt, Human
gccccagugcccacaggauca

SEQ ID NO: 3222171 - RNA, 13 nt, Human
gccccauccucug

SEQ ID NO: 3222172 - RNA, 14 nt, Human
gccccauccucugu

SEQ ID NO: 3222173 - RNA, 22 nt, Human
gccccauccucuguacagagcc

SEQ ID NO: 3222174 - RNA, 14 nt, Human
gccccauucugccu

SEQ ID NO: 3222175 - RNA, 13 nt, Human
gccccauuaacug

SEQ ID NO: 3222176 - RNA, 16 nt, Human
gcccccaaacccccau

SEQ ID NO: 3222177 - RNA, 13 nt, Human
gcccccugccugc

SEQ ID NO: 3222178 - RNA, 16 nt, Human
gcccccugccugcccu

SEQ ID NO: 3222179 - RNA, 16 nt, Human
cauccuacaagacaca

SEQ ID NO: 3222180 - RNA, 15 nt, Human
cauccucauacccac

SEQ ID NO: 3222181 - RNA, 16 nt, Human
cauccucauacccacc

SEQ ID NO: 3222182 - RNA, 13 nt, Human
cauccucccaagg

SEQ ID NO: 3222183 - RNA, 17 nt, Human
cauccucauacccaccc

SEQ ID NO: 3222184 - RNA, 18 nt, Human
cauccucauacccacccc

SEQ ID NO: 3222185 - RNA, 21 nt, Human
cauccucauacccacccccac

SEQ ID NO: 3222186 - RNA, 22 nt, Human
cauccucauacccacccccacc

SEQ ID NO: 3222187 - RNA, 15 nt, Human
cauccuccucagauc

SEQ ID NO: 3222188 - RNA, 16 nt, Human
cauccuccucagaucu

SEQ ID NO: 3222189 - RNA, 18 nt, Human
cauccuccucagaucuuc

SEQ ID NO: 3222190 - RNA, 19 nt, Human
cauccuccucagaucuucu

SEQ ID NO: 3222191 - RNA, 11 nt, Human
cauccuccuca

SEQ ID NO: 3222192 - RNA, 12 nt, Human
cauccuccucag

SEQ ID NO: 3222193 - RNA, 20 nt, Human
cauccuccgccucccggguu

SEQ ID NO: 3222194 - RNA, 13 nt, Human
cauccuccagggc

SEQ ID NO: 3222195 - RNA, 15 nt, Human
caucuacccuccgau

SEQ ID NO: 3222196 - RNA, 23 nt, Human
caucuaauuuuauuuugugaagu

SEQ ID NO: 3222197 - RNA, 18 nt, Human
caucuaggggagccuuga

SEQ ID NO: 3222198 - RNA, 15 nt, Human
cauccucuguacaga

SEQ ID NO: 3222199 - RNA, 18 nt, Human
cauccucuguacagagcc

SEQ ID NO: 3222200 - RNA, 17 nt, Human
cauccuccuccuuccua

SEQ ID NO: 3222201 - RNA, 16 nt, Human
cauccuccuccuuccu

SEQ ID NO: 3222202 - RNA, 15 nt, Human
cauccuccuccuucc

SEQ ID NO: 3222203 - RNA, 20 nt, Human
cauccuccuccgauuucuaa

SEQ ID NO: 3222204 - RNA, 19 nt, Human
cauccucuguacagagccc

SEQ ID NO: 3222205 - RNA, 18 nt, Human
cauccuccuccuuccuag

SEQ ID NO: 3222206 - RNA, 19 nt, Human
caucuaggggagccuugau

SEQ ID NO: 3222207 - RNA, 20 nt, Human
caucuaggggagccuugauu

SEQ ID NO: 3222208 - RNA, 19 nt, Human
caucuaucuggugauuucu

SEQ ID NO: 3222209 - RNA, 16 nt, Human
caucucacacaugagc

SEQ ID NO: 3222210 - RNA, 17 nt, Human
caucucacacaugagca

SEQ ID NO: 3222211 - RNA, 20 nt, Human
caucucacacaugagcauca

SEQ ID NO: 3222212 - RNA, 13 nt, Human
caucucacagcua

SEQ ID NO: 3222213 - RNA, 13 nt, Human
caucucagcccac

SEQ ID NO: 3222214 - RNA, 16 nt, Human
caucucaguccucaaa

SEQ ID NO: 3222215 - RNA, 17 nt, Human
caucucaguccucaaag

SEQ ID NO: 3222216 - RNA, 22 nt, Human
caucucaguccucaaagcuuuu

SEQ ID NO: 3222217 - RNA, 12 nt, Human
caucucaucaug

SEQ ID NO: 3222218 - RNA, 18 nt, Human
caucucaucaugucuauu

SEQ ID NO: 3222219 - RNA, 21 nt, Human
caucucaucaugucuauuguc

SEQ ID NO: 3222220 - RNA, 20 nt, Human
caucuugacagagccugccc

SEQ ID NO: 3222221 - RNA, 15 nt, Human
caucuugacagagcc

SEQ ID NO: 3222222 - RNA, 22 nt, Human
caucuugacagagccugcccca

SEQ ID NO: 3222223 - RNA, 20 nt, Human
caucuugcucugcugacaga

SEQ ID NO: 3222224 - RNA, 23 nt, Human
caucuugguuauuucugaaggua

SEQ ID NO: 3222225 - RNA, 19 nt, Human
caucuugcucugcugacag

SEQ ID NO: 3222226 - RNA, 14 nt, Human
caucuugcucugcu

SEQ ID NO: 3222227 - RNA, 13 nt, Human
caucuugcucugc

SEQ ID NO: 3222228 - RNA, 22 nt, Human
caucucuucuggguuccuuccu

SEQ ID NO: 3222229 - RNA, 14 nt, Human
caucuccacuccag

SEQ ID NO: 3222230 - RNA, 22 nt, Human
caucuuccaaggguacuaagga

SEQ ID NO: 3222231 - RNA, 23 nt, Human
caucugagagaggcuaaaauguu

SEQ ID NO: 3222232 - RNA, 22 nt, Human
caucugagagaggcuaaaaugu

SEQ ID NO: 3222233 - RNA, 20 nt, Human
caucugagagaggcuaaaau

SEQ ID NO: 3222234 - RNA, 16 nt, Human
caucugagaaugaaca

SEQ ID NO: 3222235 - RNA, 14 nt, Human
caucugagaaugaa

SEQ ID NO: 3222236 - RNA, 14 nt, Human
caucugauuccagc

SEQ ID NO: 3222237 - RNA, 20 nt, Human
cauccaccguccccucccag

SEQ ID NO: 3222238 - RNA, 23 nt, Human
cauccacaaaugcaguuuuagaa

SEQ ID NO: 3222239 - RNA, 14 nt, Human
cauccaaguggccu

SEQ ID NO: 3222240 - RNA, 17 nt, Human
cauccaccguccccucc

SEQ ID NO: 3222241 - RNA, 14 nt, Human
cauccacagucucc

SEQ ID NO: 3222242 - RNA, 15 nt, Human
cauccagguucagcu

SEQ ID NO: 3222243 - RNA, 15 nt, Human
caucccucuggggcu

SEQ ID NO: 3222244 - RNA, 19 nt, Human
caucccucuggggcuguuc

SEQ ID NO: 3222245 - RNA, 11 nt, Human
caucccugaag

SEQ ID NO: 3222246 - RNA, 13 nt, Human
caucccugaaggc

SEQ ID NO: 3222247 - RNA, 14 nt, Human
caucauugaaaucu

SEQ ID NO: 3222248 - RNA, 15 nt, Human
caucauugaaaucuu

SEQ ID NO: 3222249 - RNA, 20 nt, Human
caucauugaaaucuuuuugc

SEQ ID NO: 3222250 - RNA, 21 nt, Human
caucauugaaaucuuuuugcu

SEQ ID NO: 3222251 - RNA, 13 nt, Human
caucauugaaauc

SEQ ID NO: 3222252 - RNA, 15 nt, Human
caucaccaacgucug

SEQ ID NO: 3222253 - RNA, 12 nt, Human
caucauuucugg

SEQ ID NO: 3222254 - RNA, 22 nt, Human
cauccaaggaagggauguauuu

SEQ ID NO: 3222255 - RNA, 17 nt, Human
caucccugaaggccccg

SEQ ID NO: 3222256 - RNA, 18 nt, Human
caucccugaaggccccgc

SEQ ID NO: 3222257 - RNA, 19 nt, Human
caucccugaaggccccgcc

SEQ ID NO: 3222258 - RNA, 21 nt, Human
caucccugaaggccccgccca

SEQ ID NO: 3222259 - RNA, 21 nt, Human
cauccuaacuccaugucucug

SEQ ID NO: 3222260 - RNA, 14 nt, Human
cauccuaacuccau

SEQ ID NO: 3222261 - RNA, 17 nt, Human
cauccggggccagcucc

SEQ ID NO: 3222262 - RNA, 18 nt, Human
cauccggggccagcuccg

SEQ ID NO: 3222263 - RNA, 22 nt, Human
cauagaauugcaaucuauaaua

SEQ ID NO: 3222264 - RNA, 20 nt, Human
cauagaauugcaaucuauaa

SEQ ID NO: 3222265 - RNA, 14 nt, Human
cauagaauagcaug

SEQ ID NO: 3222266 - RNA, 15 nt, Human
cauagaauagcaugu

SEQ ID NO: 3222267 - RNA, 16 nt, Human
cauagaauagcauguu

SEQ ID NO: 3222268 - RNA, 18 nt, Human
cauagaauagcauguugu

SEQ ID NO: 3222269 - RNA, 21 nt, Human
cauagaauagcauguuguaga

SEQ ID NO: 3222270 - RNA, 23 nt, Human
cauagagagcaagacgcugugcu

SEQ ID NO: 3222271 - RNA, 19 nt, Human
cauagagagcaagacgcug

SEQ ID NO: 3222272 - RNA, 21 nt, Human
cauagagagcaagacgcugug

SEQ ID NO: 3222273 - RNA, 23 nt, Human
cauagaaaguaaauaaaaggacu

SEQ ID NO: 3222274 - RNA, 20 nt, Human
cauagaaacugucuagcacu

SEQ ID NO: 3222275 - RNA, 12 nt, Human
cauacuuuauca

SEQ ID NO: 3222276 - RNA, 17 nt, Human
cauacuuuaucaaugug

SEQ ID NO: 3222277 - RNA, 16 nt, Human
cauacucccaucugug

SEQ ID NO: 3222278 - RNA, 15 nt, Human
cauacucccaucugu

SEQ ID NO: 3222279 - RNA, 18 nt, Human
cauacucccaucugugaa

SEQ ID NO: 3222280 - RNA, 20 nt, Human
cauacucccaucugugaaag

SEQ ID NO: 3222281 - RNA, 11 nt, Human
cauacucugcu

SEQ ID NO: 3222282 - RNA, 14 nt, Human
cauacucaugcaug

SEQ ID NO: 3222283 - RNA, 17 nt, Human
cauacuccuaugcuuua

SEQ ID NO: 3222284 - RNA, 16 nt, Human
cauacucgagucugag

SEQ ID NO: 3222285 - RNA, 17 nt, Human
cauacucgagucugagg

SEQ ID NO: 3222286 - RNA, 18 nt, Human
cauacucgagucugaggc

SEQ ID NO: 3222287 - RNA, 19 nt, Human
cauacucgagucugaggcc

SEQ ID NO: 3222288 - RNA, 15 nt, Human
cauacucgagucuga

SEQ ID NO: 3222289 - RNA, 18 nt, Human
cauacuccuaugcuuuag

SEQ ID NO: 3222290 - RNA, 18 nt, Human
cauauccccuauuuaaca

SEQ ID NO: 3222291 - RNA, 19 nt, Human
cauauccauagugacuuuu

SEQ ID NO: 3222292 - RNA, 18 nt, Human
cauauccauagugacuuu

SEQ ID NO: 3222293 - RNA, 14 nt, Human
cauaucauuucuua

SEQ ID NO: 3222294 - RNA, 15 nt, Human
cauaucauuucuuaa

SEQ ID NO: 3222295 - RNA, 18 nt, Human
cauauacaacaccaaaaa

SEQ ID NO: 3222296 - RNA, 23 nt, Human
cauauacaacaccaaaaaauauc

SEQ ID NO: 3222297 - RNA, 22 nt, Human
cauauacaacaccaaaaaauau

SEQ ID NO: 3222298 - RNA, 20 nt, Human
cauauacaacaccaaaaaau

SEQ ID NO: 3222299 - RNA, 17 nt, Human
cauauauauaugugugu

SEQ ID NO: 3222300 - RNA, 22 nt, Human
cauauauauguuuuaagaggca

SEQ ID NO: 3222301 - RNA, 15 nt, Human
cauauauauaugugu

SEQ ID NO: 3222302 - RNA, 14 nt, Human
cauauauauaugug

SEQ ID NO: 3222303 - RNA, 13 nt, Human
cauauauauaugu

SEQ ID NO: 3222304 - RNA, 14 nt, Human
cauagaguacacug

SEQ ID NO: 3222305 - RNA, 17 nt, Human
cauaguaugguggcugg

SEQ ID NO: 3222306 - RNA, 15 nt, Human
cauagaguacacugc

SEQ ID NO: 3222307 - RNA, 17 nt, Human
cauagaguacacugccu

SEQ ID NO: 3222308 - RNA, 18 nt, Human
cauagaguacacugccug

SEQ ID NO: 3222309 - RNA, 19 nt, Human
cauagaguacacugccugc

SEQ ID NO: 3222310 - RNA, 19 nt, Human
cauaguaugguggcugggu

SEQ ID NO: 3222311 - RNA, 18 nt, Human
cauaguaugguggcuggg

SEQ ID NO: 3222312 - RNA, 20 nt, Human
cauaguaugguggcuggguu

SEQ ID NO: 3222313 - RNA, 22 nt, Human
cauagugaugguuccccuguuc

SEQ ID NO: 3222314 - RNA, 22 nt, Human
cauaguggcuuaaaacaacacu

SEQ ID NO: 3222315 - RNA, 20 nt, Human
cauaguuaaagaagacauuu

SEQ ID NO: 3222316 - RNA, 15 nt, Human
cauaguuacuguaaa

SEQ ID NO: 3222317 - RNA, 13 nt, Human
cauaguuacugua

SEQ ID NO: 3222318 - RNA, 19 nt, Human
cauaguuacuguaaaaugc

SEQ ID NO: 3222319 - RNA, 17 nt, Human
cauaguuacuguaaaau

SEQ ID NO: 3222320 - RNA, 19 nt, Human
cauaguucguuuaccuuca

SEQ ID NO: 3222321 - RNA, 21 nt, Human
cauaguuacuguaaaaugcaa

SEQ ID NO: 3222322 - RNA, 22 nt, Human
cauaguucuagugcagcugaaa

SEQ ID NO: 3222323 - RNA, 20 nt, Human
cauaguuguagacaaaguac

SEQ ID NO: 3222324 - RNA, 21 nt, Human
cauaguuguagacaaaguaca

SEQ ID NO: 3222325 - RNA, 15 nt, Human
cauaguuuuauuuau

SEQ ID NO: 3222326 - RNA, 16 nt, Human
cauaguuuuauuuaua

SEQ ID NO: 3222327 - RNA, 18 nt, Human
cauauaaaauggcaacaa

SEQ ID NO: 3222328 - RNA, 17 nt, Human
cauauaaaauggcaaca

SEQ ID NO: 3222329 - RNA, 19 nt, Human
cauaguuuuauuuauauuu

SEQ ID NO: 3222330 - RNA, 21 nt, Human
cauauaaaauggcaacaaacu

SEQ ID NO: 3222331 - RNA, 18 nt, Human
cauauuuuaaacagagga

SEQ ID NO: 3222332 - RNA, 10 nt, Human
cauauuugag

SEQ ID NO: 3222333 - RNA, 24 nt, Human
cauauuucuaauuggcuuuacuau

SEQ ID NO: 3222334 - RNA, 16 nt, Human
cauauuuuaauuucaa

SEQ ID NO: 3222335 - RNA, 23 nt, Human
cauauuuuaauuucaagcuuauu

SEQ ID NO: 3222336 - RNA, 18 nt, Human
cauauuuuacuuggaaau

SEQ ID NO: 3222337 - RNA, 22 nt, Human
cauauuuuacuuggaaauauua

SEQ ID NO: 3222338 - RNA, 23 nt, Human
cauauuuuacuuggaaauauuaa

SEQ ID NO: 3222339 - RNA, 15 nt, Human
cauauuuuaauuuca

SEQ ID NO: 3222340 - RNA, 14 nt, Human
cauauuuuaauuuc

SEQ ID NO: 3222341 - RNA, 20 nt, Human
cauauuuacuucuuauacau

SEQ ID NO: 3222342 - RNA, 17 nt, Human
cauauuuacuucuuaua

SEQ ID NO: 3222343 - RNA, 16 nt, Human
cauauuuacuucuuau

SEQ ID NO: 3222344 - RNA, 14 nt, Human
cauauuuacuucuu

SEQ ID NO: 3222345 - RNA, 13 nt, Human
cauaugcagaaau

SEQ ID NO: 3222346 - RNA, 14 nt, Human
cauaugcagaaaua

SEQ ID NO: 3222347 - RNA, 20 nt, Human
cauaugcagaaauagacaaa

SEQ ID NO: 3222348 - RNA, 13 nt, Human
cauauuuuuacaa

SEQ ID NO: 3222349 - RNA, 14 nt, Human
cauauuuuucaaaa

SEQ ID NO: 3222350 - RNA, 15 nt, Human
cauauuuuuuuccuu

SEQ ID NO: 3222351 - RNA, 22 nt, Human
cauauuuuuuuccuuacauaaa

SEQ ID NO: 3222352 - RNA, 18 nt, Human
cauauuuuuuuccuuaca

SEQ ID NO: 3222353 - RNA, 14 nt, Human
caucaagaugugac

SEQ ID NO: 3222354 - RNA, 21 nt, Human
caucaaaugaauaaugccuuu

SEQ ID NO: 3222355 - RNA, 18 nt, Human
caucaaugaaugaaugaa

SEQ ID NO: 3222356 - RNA, 13 nt, Human
caucacagcuugu

SEQ ID NO: 3222357 - RNA, 14 nt, Human
caucacagcuuguu

SEQ ID NO: 3222358 - RNA, 15 nt, Human
caucacagcuuguuu

SEQ ID NO: 3222359 - RNA, 11 nt, Human
cagugguuaag

SEQ ID NO: 3222360 - RNA, 11 nt, Human
cagugggaacu

SEQ ID NO: 3222361 - RNA, 22 nt, Human
cagugguuccuaauccucuagg

SEQ ID NO: 3222362 - RNA, 15 nt, Human
caguguaaagugugu

SEQ ID NO: 3222363 - RNA, 18 nt, Human
caguggcuggaucuguga

SEQ ID NO: 3222364 - RNA, 20 nt, Human
caguggcuggaucugugagg

SEQ ID NO: 3222365 - RNA, 16 nt, Human
caguggcuggaucugu

SEQ ID NO: 3222366 - RNA, 14 nt, Human
caguggccuacaaa

SEQ ID NO: 3222367 - RNA, 18 nt, Human
caguggccuacaaaucag

SEQ ID NO: 3222368 - RNA, 22 nt, Human
caguggccuacaaaucaguaau

SEQ ID NO: 3222369 - RNA, 23 nt, Human
caguggccuacaaaucaguaauu

SEQ ID NO: 3222370 - RNA, 20 nt, Human
caguggcagggcacagggcc

SEQ ID NO: 3222371 - RNA, 19 nt, Human
caguggcagggcacagggc

SEQ ID NO: 3222372 - RNA, 17 nt, Human
caguggcagggcacagg

SEQ ID NO: 3222373 - RNA, 16 nt, Human
caguggcagggcacag

SEQ ID NO: 3222374 - RNA, 15 nt, Human
caguggcagggcaca

SEQ ID NO: 3222375 - RNA, 14 nt, Human
caguggcagggcac

SEQ ID NO: 3222376 - RNA, 13 nt, Human
caguggcagggca

SEQ ID NO: 3222377 - RNA, 12 nt, Human
caguggcagggc

SEQ ID NO: 3222378 - RNA, 23 nt, Human
caguggcugaguagcucugccuu

SEQ ID NO: 3222379 - RNA, 23 nt, Human
caguggcgaaaucccugcucacu

SEQ ID NO: 3222380 - RNA, 20 nt, Human
caguggcgaaaucccugcuc

SEQ ID NO: 3222381 - RNA, 22 nt, Human
caguggcgaaaucccugcucac

SEQ ID NO: 3222382 - RNA, 21 nt, Human
caguggcgaaaucccugcuca

SEQ ID NO: 3222383 - RNA, 19 nt, Human
caguggcgaaaucccugcu

SEQ ID NO: 3222384 - RNA, 16 nt, Human
caguggcagcugcuuu

SEQ ID NO: 3222385 - RNA, 15 nt, Human
caguggcagcugcuu

SEQ ID NO: 3222386 - RNA, 14 nt, Human
caguggcagcugcu

SEQ ID NO: 3222387 - RNA, 13 nt, Human
caguggcagcugc

SEQ ID NO: 3222388 - RNA, 12 nt, Human
caguggcagcug

SEQ ID NO: 3222389 - RNA, 19 nt, Human
caguggagugcaaaaggcu

SEQ ID NO: 3222390 - RNA, 21 nt, Human
caguggagugcaaaaggcuug

SEQ ID NO: 3222391 - RNA, 14 nt, Human
caguggauacgugu

SEQ ID NO: 3222392 - RNA, 13 nt, Human
caguggagcccag

SEQ ID NO: 3222393 - RNA, 17 nt, Human
caguggagcccaggagu

SEQ ID NO: 3222394 - RNA, 16 nt, Human
caguggagcccaggag

SEQ ID NO: 3222395 - RNA, 19 nt, Human
cagugucuggcugcagagc

SEQ ID NO: 3222396 - RNA, 17 nt, Human
cagugucuggcugcaga

SEQ ID NO: 3222397 - RNA, 12 nt, Human
cagugugacuga

SEQ ID NO: 3222398 - RNA, 14 nt, Human
cagugugacaagga

SEQ ID NO: 3222399 - RNA, 19 nt, Human
caguguggccucuucugag

SEQ ID NO: 3222400 - RNA, 19 nt, Human
cagugugagggaaagagcu

SEQ ID NO: 3222401 - RNA, 17 nt, Human
cagugugagggaaagag

SEQ ID NO: 3222402 - RNA, 12 nt, Human
cagugugauuuu

SEQ ID NO: 3222403 - RNA, 14 nt, Human
cagugucaaugcag

SEQ ID NO: 3222404 - RNA, 20 nt, Human
caguguccauggacucagaa

SEQ ID NO: 3222405 - RNA, 22 nt, Human
caguguccauggacucagaaac

SEQ ID NO: 3222406 - RNA, 23 nt, Human
caguguacauggaauaacaugua

SEQ ID NO: 3222407 - RNA, 20 nt, Human
caguguacauggaauaacau

SEQ ID NO: 3222408 - RNA, 22 nt, Human
caguguaccauuaaaauaugca

SEQ ID NO: 3222409 - RNA, 21 nt, Human
caguguaccauuaaaauaugc

SEQ ID NO: 3222410 - RNA, 18 nt, Human
caguguaccauuaaaaua

SEQ ID NO: 3222411 - RNA, 17 nt, Human
caguguaccauuaaaau

SEQ ID NO: 3222412 - RNA, 15 nt, Human
caguguaccauuaaa

SEQ ID NO: 3222413 - RNA, 13 nt, Human
caguguagauuuu

SEQ ID NO: 3222414 - RNA, 16 nt, Human
caguguagauuuuaua

SEQ ID NO: 3222415 - RNA, 20 nt, Human
caguguagauuuuauagugu

SEQ ID NO: 3222416 - RNA, 16 nt, Human
caguguacauggaaua

SEQ ID NO: 3222417 - RNA, 18 nt, Human
caguguuccgugguuaaa

SEQ ID NO: 3222418 - RNA, 21 nt, Human
caguguuuugaccuuugauac

SEQ ID NO: 3222419 - RNA, 13 nt, Human
caguguuugugug

SEQ ID NO: 3222420 - RNA, 13 nt, Human
caguguuuucaga

SEQ ID NO: 3222421 - RNA, 19 nt, Human
caguguuuucagaagaaau

SEQ ID NO: 3222422 - RNA, 23 nt, Human
caguguuuucagaagaaauaaau

SEQ ID NO: 3222423 - RNA, 13 nt, Human
caguguuuggugc

SEQ ID NO: 3222424 - RNA, 14 nt, Human
caguguuucugggg

SEQ ID NO: 3222425 - RNA, 11 nt, Human
caguguuuaug

SEQ ID NO: 3222426 - RNA, 23 nt, Human
caguguuuaugugcuauuaauau

SEQ ID NO: 3222427 - RNA, 21 nt, Human
caguuccccuggaagcagugc

SEQ ID NO: 3222428 - RNA, 17 nt, Human
caguuccccuggaagca

SEQ ID NO: 3222429 - RNA, 22 nt, Human
caguuacaaauuauaauguauu

SEQ ID NO: 3222430 - RNA, 19 nt, Human
caguuacaaauuauaaugu

SEQ ID NO: 3222431 - RNA, 18 nt, Human
caguuacaaauuauaaug

SEQ ID NO: 3222432 - RNA, 14 nt, Human
caguuacaaauuau

SEQ ID NO: 3222433 - RNA, 20 nt, Human
caguuaagccuuuggaaaca

SEQ ID NO: 3222434 - RNA, 13 nt, Human
caguuaagagaaa

SEQ ID NO: 3222435 - RNA, 14 nt, Human
caguuaagagaaau

SEQ ID NO: 3222436 - RNA, 15 nt, Human
caguuaagccuuugg

SEQ ID NO: 3222437 - RNA, 17 nt, Human
caguuaagccuuuggaa

SEQ ID NO: 3222438 - RNA, 14 nt, Human
caguuaagccuuug

SEQ ID NO: 3222439 - RNA, 17 nt, Human
caguucuacagaaaaac

SEQ ID NO: 3222440 - RNA, 14 nt, Human
caguucucuccuuc

SEQ ID NO: 3222441 - RNA, 15 nt, Human
caguucucuccuucu

SEQ ID NO: 3222442 - RNA, 13 nt, Human
caguucucuccuu

SEQ ID NO: 3222443 - RNA, 16 nt, Human
caguucucuucacuca

SEQ ID NO: 3222444 - RNA, 22 nt, Human
caguucucuccuucuucccccc

SEQ ID NO: 3222445 - RNA, 12 nt, Human
caguugaaaaac

SEQ ID NO: 3222446 - RNA, 18 nt, Human
caguugaaaaacagcuga

SEQ ID NO: 3222447 - RNA, 19 nt, Human
caguugaaaaacagcugag

SEQ ID NO: 3222448 - RNA, 15 nt, Human
cauaccuggcccugu

SEQ ID NO: 3222449 - RNA, 14 nt, Human
cauacccaccccca

SEQ ID NO: 3222450 - RNA, 17 nt, Human
cauacccacccccaccc

SEQ ID NO: 3222451 - RNA, 18 nt, Human
cauacccacccccaccca

SEQ ID NO: 3222452 - RNA, 21 nt, Human
cauacccacccccacccaagg

SEQ ID NO: 3222453 - RNA, 15 nt, Human
cauacguaaaaaucu

SEQ ID NO: 3222454 - RNA, 14 nt, Human
cauacguaaaaauc

SEQ ID NO: 3222455 - RNA, 17 nt, Human
cauaccuuggccagcaa

SEQ ID NO: 3222456 - RNA, 20 nt, Human
cauacuaauuauacccccug

SEQ ID NO: 3222457 - RNA, 16 nt, Human
cauacgugugcaugug

SEQ ID NO: 3222458 - RNA, 17 nt, Human
cauaaguauuuggaauu

SEQ ID NO: 3222459 - RNA, 22 nt, Human
cauaaguauuuggaauuagaac

SEQ ID NO: 3222460 - RNA, 18 nt, Human
cauaaggucagcucagag

SEQ ID NO: 3222461 - RNA, 16 nt, Human
cauaagcuuuuucucu

SEQ ID NO: 3222462 - RNA, 18 nt, Human
cauaagcuuaugcuuaaa

SEQ ID NO: 3222463 - RNA, 14 nt, Human
cauaagauaaaugu

SEQ ID NO: 3222464 - RNA, 21 nt, Human
cauaagcaacaauuuucagau

SEQ ID NO: 3222465 - RNA, 17 nt, Human
cauaagcaacaauuuuc

SEQ ID NO: 3222466 - RNA, 15 nt, Human
cauaagcaacaauuu

SEQ ID NO: 3222467 - RNA, 15 nt, Human
cauaagauauuuuau

SEQ ID NO: 3222468 - RNA, 19 nt, Human
cauaacugacuuaguucuu

SEQ ID NO: 3222469 - RNA, 18 nt, Human
cauaauaauccugcaaag

SEQ ID NO: 3222470 - RNA, 15 nt, Human
cauaauacugaacca

SEQ ID NO: 3222471 - RNA, 16 nt, Human
cauaauacugaaccac

SEQ ID NO: 3222472 - RNA, 17 nt, Human
cauaauacugaaccacu

SEQ ID NO: 3222473 - RNA, 18 nt, Human
cauaauacugaaccacuu

SEQ ID NO: 3222474 - RNA, 18 nt, Human
cauaauccaguaaaauaa

SEQ ID NO: 3222475 - RNA, 18 nt, Human
cauaaucacaacccuuca

SEQ ID NO: 3222476 - RNA, 17 nt, Human
cauaauccaguaaaaua

SEQ ID NO: 3222477 - RNA, 17 nt, Human
cauaccaacacgagcag

SEQ ID NO: 3222478 - RNA, 11 nt, Human
cauacccaccc

SEQ ID NO: 3222479 - RNA, 12 nt, Human
cauacccacccc

SEQ ID NO: 3222480 - RNA, 20 nt, Human
cauaccaacucaacuuuuuu

SEQ ID NO: 3222481 - RNA, 22 nt, Human
cauaaagaauuugucacaggaa

SEQ ID NO: 3222482 - RNA, 13 nt, Human
cauaaagaauuug

SEQ ID NO: 3222483 - RNA, 11 nt, Human
cauaaacauca

SEQ ID NO: 3222484 - RNA, 20 nt, Human
cauaaaccauuuuuguuacu

SEQ ID NO: 3222485 - RNA, 21 nt, Human
cauaaaccauuuuuguuacuc

SEQ ID NO: 3222486 - RNA, 22 nt, Human
cauaaacaucagguuaggcagu

SEQ ID NO: 3222487 - RNA, 21 nt, Human
cauaaaaauuagccaagugug

SEQ ID NO: 3222488 - RNA, 19 nt, Human
cauaaaauaaggagcauau

SEQ ID NO: 3222489 - RNA, 22 nt, Human
cauaaaauguccaguaagauca

SEQ ID NO: 3222490 - RNA, 16 nt, Human
cauaaccuagccuuag

SEQ ID NO: 3222491 - RNA, 16 nt, Human
cauaaaucuuccaaag

SEQ ID NO: 3222492 - RNA, 11 nt, Human
cauaaaucaac

SEQ ID NO: 3222493 - RNA, 14 nt, Human
cauaaagugagaaa

SEQ ID NO: 3222494 - RNA, 17 nt, Human
cauaaagugagaaaacu

SEQ ID NO: 3222495 - RNA, 11 nt, Human
cauaaagucag

SEQ ID NO: 3222496 - RNA, 17 nt, Human
cauaaagcucaaaugaa

SEQ ID NO: 3222497 - RNA, 20 nt, Human
cauaaagcucaaaugaaaug

SEQ ID NO: 3222498 - RNA, 21 nt, Human
cauaaagcucaaaugaaaugu

SEQ ID NO: 3222499 - RNA, 13 nt, Human
caguuuuuguguu

SEQ ID NO: 3222500 - RNA, 19 nt, Human
caguuuuucuuaauauaua

SEQ ID NO: 3222501 - RNA, 16 nt, Human
caguuuuucuuaauau

SEQ ID NO: 3222502 - RNA, 15 nt, Human
caguuuuucuuaaua

SEQ ID NO: 3222503 - RNA, 13 nt, Human
caguuuuucuuaa

SEQ ID NO: 3222504 - RNA, 21 nt, Human
caguuuuucauaagauauuuu

SEQ ID NO: 3222505 - RNA, 23 nt, Human
caguuuuucauaagauauuuuau

SEQ ID NO: 3222506 - RNA, 12 nt, Human
caguuuuucauu

SEQ ID NO: 3222507 - RNA, 20 nt, Human
caguuuuucauuuuaaaaag

SEQ ID NO: 3222508 - RNA, 20 nt, Human
caguuuucugagaaagacua

SEQ ID NO: 3222509 - RNA, 19 nt, Human
caguuuucugagaaagacu

SEQ ID NO: 3222510 - RNA, 22 nt, Human
caguuguaacauucuauuucaa

SEQ ID NO: 3222511 - RNA, 15 nt, Human
caguuuucugagaaa

SEQ ID NO: 3222512 - RNA, 14 nt, Human
caguuuucugagaa

SEQ ID NO: 3222513 - RNA, 17 nt, Human
caguuguuagugugucu

SEQ ID NO: 3222514 - RNA, 21 nt, Human
caguuguuaaguccuuggcuu

SEQ ID NO: 3222515 - RNA, 23 nt, Human
caguugccagucaccccggccac

SEQ ID NO: 3222516 - RNA, 18 nt, Human
caguugcccagccucuuu

SEQ ID NO: 3222517 - RNA, 17 nt, Human
caguugcccagccucuu

SEQ ID NO: 3222518 - RNA, 16 nt, Human
caguugcccagccucu

SEQ ID NO: 3222519 - RNA, 14 nt, Human
caguugcccagccu

SEQ ID NO: 3222520 - RNA, 17 nt, Human
caguugcucaaaaagaa

SEQ ID NO: 3222521 - RNA, 19 nt, Human
caguugcucaaaaagaaau

SEQ ID NO: 3222522 - RNA, 23 nt, Human
caguugcucaaaaagaaaucaau

SEQ ID NO: 3222523 - RNA, 21 nt, Human
caguugcccagccucuuuccc

SEQ ID NO: 3222524 - RNA, 19 nt, Human
caguugcccagccucuuuc

SEQ ID NO: 3222525 - RNA, 14 nt, Human
caguugcugguaaa

SEQ ID NO: 3222526 - RNA, 13 nt, Human
caguugcugguaa

SEQ ID NO: 3222527 - RNA, 17 nt, Human
caguugcugguaaaaug

SEQ ID NO: 3222528 - RNA, 18 nt, Human
caguugcugguaaaauga

SEQ ID NO: 3222529 - RNA, 19 nt, Human
caguugcugguaaaaugaa

SEQ ID NO: 3222530 - RNA, 20 nt, Human
caguugcugguaaaaugaag

SEQ ID NO: 3222531 - RNA, 16 nt, Human
caguuggguggaugcc

SEQ ID NO: 3222532 - RNA, 21 nt, Human
caguugcugguaaaaugaaga

SEQ ID NO: 3222533 - RNA, 22 nt, Human
caguugcugguaaaaugaagaa

SEQ ID NO: 3222534 - RNA, 23 nt, Human
caguugcugguaaaaugaagaau

SEQ ID NO: 3222535 - RNA, 22 nt, Human
caguugcugucagucuugaccu

SEQ ID NO: 3222536 - RNA, 19 nt, Human
caguuggucccccuuccau

SEQ ID NO: 3222537 - RNA, 20 nt, Human
caguuggucccccuuccaug

SEQ ID NO: 3222538 - RNA, 21 nt, Human
caguuggucccccuuccaugg

SEQ ID NO: 3222539 - RNA, 22 nt, Human
caguuggucccccuuccaugga

SEQ ID NO: 3222540 - RNA, 19 nt, Human
caguuggguggaugccugg

SEQ ID NO: 3222541 - RNA, 18 nt, Human
caguuggguggaugccug

SEQ ID NO: 3222542 - RNA, 18 nt, Human
caguuggucccccuucca

SEQ ID NO: 3222543 - RNA, 18 nt, Human
caguugaaaagacuccaa

SEQ ID NO: 3222544 - RNA, 21 nt, Human
caguucuuuaagaagaucuuu

SEQ ID NO: 3222545 - RNA, 14 nt, Human
caguugaaaagacu

SEQ ID NO: 3222546 - RNA, 22 nt, Human
caguugaaaagacuccaaagaa

SEQ ID NO: 3222547 - RNA, 21 nt, Human
caguugaaaagacuccaaaga

SEQ ID NO: 3222548 - RNA, 23 nt, Human
caguugaaaagacuccaaagaaa

SEQ ID NO: 3222549 - RNA, 19 nt, Human
caguugagaggacacuccc

SEQ ID NO: 3222550 - RNA, 20 nt, Human
caguugagaggacacucccg

SEQ ID NO: 3222551 - RNA, 19 nt, Human
caugccagcuuaucucagg

SEQ ID NO: 3222552 - RNA, 20 nt, Human
caugccagcuuaucucaggg

SEQ ID NO: 3222553 - RNA, 17 nt, Human
caugcccauauuuuacu

SEQ ID NO: 3222554 - RNA, 14 nt, Human
caugccaggggccu

SEQ ID NO: 3222555 - RNA, 13 nt, Human
caugccaggggcc

SEQ ID NO: 3222556 - RNA, 14 nt, Human
caugccaguauuuu

SEQ ID NO: 3222557 - RNA, 19 nt, Human
caugccaguauuuuuaaag

SEQ ID NO: 3222558 - RNA, 21 nt, Human
cauggagauagccccacagga

SEQ ID NO: 3222559 - RNA, 17 nt, Human
cauggagguuugaagau

SEQ ID NO: 3222560 - RNA, 20 nt, Human
cauggagaaccaccuacccc

SEQ ID NO: 3222561 - RNA, 11 nt, Human
cauggacuuug

SEQ ID NO: 3222562 - RNA, 13 nt, Human
cauggacuuuguu

SEQ ID NO: 3222563 - RNA, 16 nt, Human
cauggaguauauguca

SEQ ID NO: 3222564 - RNA, 18 nt, Human
caugggaaugaaugucag

SEQ ID NO: 3222565 - RNA, 19 nt, Human
cauggggcugauuguauuu

SEQ ID NO: 3222566 - RNA, 17 nt, Human
caugggccuccugugug

SEQ ID NO: 3222567 - RNA, 16 nt, Human
caugggccuccugugu

SEQ ID NO: 3222568 - RNA, 17 nt, Human
caugggacagggaggac

SEQ ID NO: 3222569 - RNA, 22 nt, Human
caugggaaugaaugucagugug

SEQ ID NO: 3222570 - RNA, 15 nt, Human
caugggccuccugug

SEQ ID NO: 3222571 - RNA, 14 nt, Human
caugguccauucuc

SEQ ID NO: 3222572 - RNA, 20 nt, Human
cauggggggagcacccugag

SEQ ID NO: 3222573 - RNA, 21 nt, Human
cauggggggagcacccugagg

SEQ ID NO: 3222574 - RNA, 23 nt, Human
cauggggggagcacccugagggc

SEQ ID NO: 3222575 - RNA, 15 nt, Human
cauggggucucucac

SEQ ID NO: 3222576 - RNA, 19 nt, Human
cauggggucucucacagac

SEQ ID NO: 3222577 - RNA, 16 nt, Human
cauggggucucucaca

SEQ ID NO: 3222578 - RNA, 23 nt, Human
cauggggucucucacagacagga

SEQ ID NO: 3222579 - RNA, 18 nt, Human
cauggacaugaucuucuu

SEQ ID NO: 3222580 - RNA, 16 nt, Human
cauggaauaacaugua

SEQ ID NO: 3222581 - RNA, 14 nt, Human
cauggaaugagggu

SEQ ID NO: 3222582 - RNA, 15 nt, Human
cauggaaugaggguu

SEQ ID NO: 3222583 - RNA, 13 nt, Human
caugcuuaaauuu

SEQ ID NO: 3222584 - RNA, 14 nt, Human
caugcuuaaauuuu

SEQ ID NO: 3222585 - RNA, 20 nt, Human
cauggaaguacuauaauuua

SEQ ID NO: 3222586 - RNA, 22 nt, Human
cauggaaguacuauaauuuacc

SEQ ID NO: 3222587 - RNA, 22 nt, Human
caugcugucccuuacgugaguc

SEQ ID NO: 3222588 - RNA, 17 nt, Human
caugcugucccuuacgu

SEQ ID NO: 3222589 - RNA, 18 nt, Human
caugcugucuggcacagc

SEQ ID NO: 3222590 - RNA, 17 nt, Human
caugcugucuggcacag

SEQ ID NO: 3222591 - RNA, 12 nt, Human
caugcugucugg

SEQ ID NO: 3222592 - RNA, 23 nt, Human
caugcugucuggcacagccugca

SEQ ID NO: 3222593 - RNA, 21 nt, Human
caugcugucuggcacagccug

SEQ ID NO: 3222594 - RNA, 20 nt, Human
caugcugucuggcacagccu

SEQ ID NO: 3222595 - RNA, 19 nt, Human
caugcugucuggcacagcc

SEQ ID NO: 3222596 - RNA, 17 nt, Human
caugcgggcuuccuccu

SEQ ID NO: 3222597 - RNA, 18 nt, Human
caugccuggauggggcug

SEQ ID NO: 3222598 - RNA, 21 nt, Human
caugccuggauggggcugcac

SEQ ID NO: 3222599 - RNA, 23 nt, Human
caugccuggauggggcugcaccg

SEQ ID NO: 3222600 - RNA, 14 nt, Human
caugccucucucag

SEQ ID NO: 3222601 - RNA, 15 nt, Human
caugccucucucagg

SEQ ID NO: 3222602 - RNA, 15 nt, Human
caugccgggugcagc

SEQ ID NO: 3222603 - RNA, 16 nt, Human
caugccucucucaggc

SEQ ID NO: 3222604 - RNA, 17 nt, Human
caugccucucucaggcc

SEQ ID NO: 3222605 - RNA, 18 nt, Human
caugccucucucaggcca

SEQ ID NO: 3222606 - RNA, 19 nt, Human
caugccucucucaggccaa

SEQ ID NO: 3222607 - RNA, 13 nt, Human
caugccuggaugg

SEQ ID NO: 3222608 - RNA, 21 nt, Human
cauuaccucagugagaagcca

SEQ ID NO: 3222609 - RNA, 22 nt, Human
cauuaccucagugagaagccag

SEQ ID NO: 3222610 - RNA, 13 nt, Human
cauuaauguugau

SEQ ID NO: 3222611 - RNA, 21 nt, Human
cauuaauucaggcauauuuua

SEQ ID NO: 3222612 - RNA, 20 nt, Human
cauuaauguugauuucuagu

SEQ ID NO: 3222613 - RNA, 17 nt, Human
cauuaauguugauuucu

SEQ ID NO: 3222614 - RNA, 16 nt, Human
cauuaauguugauuuc

SEQ ID NO: 3222615 - RNA, 14 nt, Human
cauuaauguugauu

SEQ ID NO: 3222616 - RNA, 17 nt, Human
cauuaauccacauguuu

SEQ ID NO: 3222617 - RNA, 19 nt, Human
cauuaauccacauguuuca

SEQ ID NO: 3222618 - RNA, 21 nt, Human
cauuaauccacauguuucaga

SEQ ID NO: 3222619 - RNA, 22 nt, Human
cauuaauccacauguuucagag

SEQ ID NO: 3222620 - RNA, 17 nt, Human
cauuaaugccugcuuuu

SEQ ID NO: 3222621 - RNA, 19 nt, Human
cauuaaugccugcuuuuug

SEQ ID NO: 3222622 - RNA, 21 nt, Human
cauuaaugccugcuuuuugga

SEQ ID NO: 3222623 - RNA, 22 nt, Human
cauuaaugccugcuuuuuggaa

SEQ ID NO: 3222624 - RNA, 23 nt, Human
cauuaaugccugcuuuuuggaaa

SEQ ID NO: 3222625 - RNA, 17 nt, Human
cauuagcaguuugcuuu

SEQ ID NO: 3222626 - RNA, 22 nt, Human
cauuagcaaaaaaaguuguaug

SEQ ID NO: 3222627 - RNA, 20 nt, Human
cauuagcaaaaaaaguugua

SEQ ID NO: 3222628 - RNA, 19 nt, Human
cauuagcaaaaaaaguugu

SEQ ID NO: 3222629 - RNA, 18 nt, Human
cauuagcaaaaaaaguug

SEQ ID NO: 3222630 - RNA, 23 nt, Human
cauuaccucuuuggaaaaggaag

SEQ ID NO: 3222631 - RNA, 17 nt, Human
cauuaccucuuuggaaa

SEQ ID NO: 3222632 - RNA, 15 nt, Human
cauuaccucuuugga

SEQ ID NO: 3222633 - RNA, 17 nt, Human
cauuagagucaacuaca

SEQ ID NO: 3222634 - RNA, 17 nt, Human
cauuagcaaaaaaaguu

SEQ ID NO: 3222635 - RNA, 16 nt, Human
cauuagcaaaaaaagu

SEQ ID NO: 3222636 - RNA, 15 nt, Human
cauguuuuguuuacg

SEQ ID NO: 3222637 - RNA, 22 nt, Human
cauuaaauuacuauagcaaagu

SEQ ID NO: 3222638 - RNA, 13 nt, Human
cauuaaagucaga

SEQ ID NO: 3222639 - RNA, 15 nt, Human
cauuaaagucagaag

SEQ ID NO: 3222640 - RNA, 17 nt, Human
cauuaaagucagaaguu

SEQ ID NO: 3222641 - RNA, 18 nt, Human
cauuaaagucagaaguuu

SEQ ID NO: 3222642 - RNA, 14 nt, Human
caugucuuuucuug

SEQ ID NO: 3222643 - RNA, 19 nt, Human
caugucuuuucuugcauga

SEQ ID NO: 3222644 - RNA, 21 nt, Human
caugucuuuucuugcaugagg

SEQ ID NO: 3222645 - RNA, 23 nt, Human
caugucuuuucuugcaugaggcu

SEQ ID NO: 3222646 - RNA, 21 nt, Human
cauguaauuaaguacuaugua

SEQ ID NO: 3222647 - RNA, 18 nt, Human
cauguaauuaaguacuau

SEQ ID NO: 3222648 - RNA, 18 nt, Human
cauguaauuuguguaaau

SEQ ID NO: 3222649 - RNA, 19 nt, Human
cauguaauuuuauuuuaaa

SEQ ID NO: 3222650 - RNA, 14 nt, Human
cauguaauuugugu

SEQ ID NO: 3222651 - RNA, 15 nt, Human
caugucgccucugca

SEQ ID NO: 3222652 - RNA, 14 nt, Human
caugucgccucugc

SEQ ID NO: 3222653 - RNA, 20 nt, Human
cauguccugugucaguuuau

SEQ ID NO: 3222654 - RNA, 19 nt, Human
cauguccugugucaguuua

SEQ ID NO: 3222655 - RNA, 14 nt, Human
cauguccuguguca

SEQ ID NO: 3222656 - RNA, 18 nt, Human
cauguccugugucaguuu

SEQ ID NO: 3222657 - RNA, 15 nt, Human
cauguccugugucag

SEQ ID NO: 3222658 - RNA, 20 nt, Human
caugucgccucugcauucag

SEQ ID NO: 3222659 - RNA, 18 nt, Human
caugucgccucugcauuc

SEQ ID NO: 3222660 - RNA, 20 nt, Human
cauggugacuuuugaaaaga

SEQ ID NO: 3222661 - RNA, 17 nt, Human
cauguaaauugacugua

SEQ ID NO: 3222662 - RNA, 18 nt, Human
caugguuuaaaagaaaaa

SEQ ID NO: 3222663 - RNA, 19 nt, Human
caugguuuaaaagaaaaaa

SEQ ID NO: 3222664 - RNA, 20 nt, Human
caugguuuaaaagaaaaaau

SEQ ID NO: 3222665 - RNA, 14 nt, Human
cauguaacaauguu

SEQ ID NO: 3222666 - RNA, 14 nt, Human
cauguuuauguaaa

SEQ ID NO: 3222667 - RNA, 13 nt, Human
cauguuuucaaau

SEQ ID NO: 3222668 - RNA, 20 nt, Human
cauguuuucaaauggaguug

SEQ ID NO: 3222669 - RNA, 16 nt, Human
cauguuuucaaaugga

SEQ ID NO: 3222670 - RNA, 22 nt, Human
cauguuuucaaauggaguugga

SEQ ID NO: 3222671 - RNA, 16 nt, Human
cauguuuugcauguaa

SEQ ID NO: 3222672 - RNA, 15 nt, Human
cauguuuugcaugua

SEQ ID NO: 3222673 - RNA, 22 nt, Human
cauguggggagguuaaucuagg

SEQ ID NO: 3222674 - RNA, 23 nt, Human
caugugggccacacaagugcagu

SEQ ID NO: 3222675 - RNA, 18 nt, Human
cauguggagucagccucg

SEQ ID NO: 3222676 - RNA, 15 nt, Human
cauguggagucagcc

SEQ ID NO: 3222677 - RNA, 15 nt, Human
caugugcacaugcac

SEQ ID NO: 3222678 - RNA, 21 nt, Human
caugugccagguuuuuggucu

SEQ ID NO: 3222679 - RNA, 15 nt, Human
caugugcuucugcca

SEQ ID NO: 3222680 - RNA, 14 nt, Human
ccaagguucugggu

SEQ ID NO: 3222681 - RNA, 19 nt, Human
ccaaggcugauuaaaccaa

SEQ ID NO: 3222682 - RNA, 16 nt, Human
ccaaggcucugagcaa

SEQ ID NO: 3222683 - RNA, 14 nt, Human
ccaaggcuggggga

SEQ ID NO: 3222684 - RNA, 18 nt, Human
ccaaggugggaggauugc

SEQ ID NO: 3222685 - RNA, 20 nt, Human
ccaauauucauagcagcuua

SEQ ID NO: 3222686 - RNA, 12 nt, Human
ccaagugugcua

SEQ ID NO: 3222687 - RNA, 16 nt, Human
ccaaguggcucccaca

SEQ ID NO: 3222688 - RNA, 22 nt, Human
ccaaguggagccugacagccag

SEQ ID NO: 3222689 - RNA, 18 nt, Human
ccaaguggagccugacag

SEQ ID NO: 3222690 - RNA, 23 nt, Human
ccaaguggagccugacagccaga

SEQ ID NO: 3222691 - RNA, 13 nt, Human
ccaaguggcuccc

SEQ ID NO: 3222692 - RNA, 16 nt, Human
ccacaagaaaugaaag

SEQ ID NO: 3222693 - RNA, 22 nt, Human
ccacaagaaaugaaagcaggga

SEQ ID NO: 3222694 - RNA, 16 nt, Human
ccacaagacccuugug

SEQ ID NO: 3222695 - RNA, 13 nt, Human
ccacaagagccca

SEQ ID NO: 3222696 - RNA, 18 nt, Human
ccacaaaggagagcuagc

SEQ ID NO: 3222697 - RNA, 13 nt, Human
ccacaacacacag

SEQ ID NO: 3222698 - RNA, 10 nt, Human
ccaauuucuc

SEQ ID NO: 3222699 - RNA, 12 nt, Human
ccaauuuuccuu

SEQ ID NO: 3222700 - RNA, 21 nt, Human
ccaauuuuaacuuagagcuuu

SEQ ID NO: 3222701 - RNA, 12 nt, Human
ccacaaaauaua

SEQ ID NO: 3222702 - RNA, 23 nt, Human
ccaauuuuuuaagugaaaauaua

SEQ ID NO: 3222703 - RNA, 12 nt, Human
ccaauauuuaaa

SEQ ID NO: 3222704 - RNA, 16 nt, Human
ccaagagccugagagu

SEQ ID NO: 3222705 - RNA, 13 nt, Human
ccaagaggcugca

SEQ ID NO: 3222706 - RNA, 12 nt, Human
ccaagaggcugc

SEQ ID NO: 3222707 - RNA, 23 nt, Human
ccaagcagagguugggaggccau

SEQ ID NO: 3222708 - RNA, 14 nt, Human
ccaagcaggacaug

SEQ ID NO: 3222709 - RNA, 14 nt, Human
ccaagccguggcuu

SEQ ID NO: 3222710 - RNA, 21 nt, Human
ccaagccguggcuucccgcuc

SEQ ID NO: 3222711 - RNA, 17 nt, Human
ccaagccguggcuuccc

SEQ ID NO: 3222712 - RNA, 16 nt, Human
ccaagccguggcuucc

SEQ ID NO: 3222713 - RNA, 15 nt, Human
ccaagccguggcuuc

SEQ ID NO: 3222714 - RNA, 18 nt, Human
ccaaggcuagaaccaccu

SEQ ID NO: 3222715 - RNA, 21 nt, Human
ccaaggcccccugccugcccu

SEQ ID NO: 3222716 - RNA, 20 nt, Human
ccaaggcccccugccugccc

SEQ ID NO: 3222717 - RNA, 19 nt, Human
ccaaggcccccugccugcc

SEQ ID NO: 3222718 - RNA, 17 nt, Human
ccaaggcccccugccug

SEQ ID NO: 3222719 - RNA, 14 nt, Human
ccaagcuccaucuc

SEQ ID NO: 3222720 - RNA, 16 nt, Human
ccaaggccaggccuug

SEQ ID NO: 3222721 - RNA, 12 nt, Human
ccaagcucccag

SEQ ID NO: 3222722 - RNA, 13 nt, Human
ccaagcucccagg

SEQ ID NO: 3222723 - RNA, 23 nt, Human
ccaagccguggcuucccgcucag

SEQ ID NO: 3222724 - RNA, 14 nt, Human
ccaagcaggaggcu

SEQ ID NO: 3222725 - RNA, 13 nt, Human
ccaagcaggaggc

SEQ ID NO: 3222726 - RNA, 20 nt, Human
ccacaaguuaaauaaaucau

SEQ ID NO: 3222727 - RNA, 15 nt, Human
ccacaaguuaaauaa

SEQ ID NO: 3222728 - RNA, 20 nt, Human
ccacaagggugcccaccucu

SEQ ID NO: 3222729 - RNA, 16 nt, Human
ccacaaggaagaaauu

SEQ ID NO: 3222730 - RNA, 13 nt, Human
ccacaaggaagaa

SEQ ID NO: 3222731 - RNA, 13 nt, Human
ccacacacacaaa

SEQ ID NO: 3222732 - RNA, 12 nt, Human
ccacacacacaa

SEQ ID NO: 3222733 - RNA, 15 nt, Human
ccacacaagugcagu

SEQ ID NO: 3222734 - RNA, 21 nt, Human
ccacacaacauccaaguggcc

SEQ ID NO: 3222735 - RNA, 15 nt, Human
ccacaaucaccgaug

SEQ ID NO: 3222736 - RNA, 16 nt, Human
ccacaagagcccaggc

SEQ ID NO: 3222737 - RNA, 17 nt, Human
ccacaagagcccaggcc

SEQ ID NO: 3222738 - RNA, 18 nt, Human
ccacaagagcccaggccu

SEQ ID NO: 3222739 - RNA, 19 nt, Human
ccacaagagcccaggccuc

SEQ ID NO: 3222740 - RNA, 20 nt, Human
ccacaagagcccaggccucc

SEQ ID NO: 3222741 - RNA, 21 nt, Human
ccacaagagcccaggccuccu

SEQ ID NO: 3222742 - RNA, 12 nt, Human
ccaagagccuga

SEQ ID NO: 3222743 - RNA, 20 nt, Human
ccaagagcaaggaagguaaa

SEQ ID NO: 3222744 - RNA, 22 nt, Human
ccaagagcaaggaagguaaaaa

SEQ ID NO: 3222745 - RNA, 21 nt, Human
ccaacacgagcaggcuacugu

SEQ ID NO: 3222746 - RNA, 16 nt, Human
ccaacaucaacaucuu

SEQ ID NO: 3222747 - RNA, 17 nt, Human
ccaacauccacucucuc

SEQ ID NO: 3222748 - RNA, 15 nt, Human
ccaacauccacucuc

SEQ ID NO: 3222749 - RNA, 14 nt, Human
ccaacauccacucu

SEQ ID NO: 3222750 - RNA, 13 nt, Human
ccaacauccacuc

SEQ ID NO: 3222751 - RNA, 14 nt, Human
ccaacauacuccca

SEQ ID NO: 3222752 - RNA, 13 nt, Human
ccaacaucaacau

SEQ ID NO: 3222753 - RNA, 14 nt, Human
ccaacacgagcagg

SEQ ID NO: 3222754 - RNA, 16 nt, Human
ccaacaccaucacagc

SEQ ID NO: 3222755 - RNA, 18 nt, Human
ccaacaccaucacagcuu

SEQ ID NO: 3222756 - RNA, 20 nt, Human
ccaacaccaucacagcuugu

SEQ ID NO: 3222757 - RNA, 21 nt, Human
ccaacaccaucacagcuuguu

SEQ ID NO: 3222758 - RNA, 22 nt, Human
ccaacaccaucacagcuuguuu

SEQ ID NO: 3222759 - RNA, 14 nt, Human
ccaaauugucaccu

SEQ ID NO: 3222760 - RNA, 22 nt, Human
ccaaauugucaccugcuucucu

SEQ ID NO: 3222761 - RNA, 21 nt, Human
ccaaauugucaccugcuucuc

SEQ ID NO: 3222762 - RNA, 22 nt, Human
ccaaauucuuucaguggcuacc

SEQ ID NO: 3222763 - RNA, 15 nt, Human
ccaaauucuuucagu

SEQ ID NO: 3222764 - RNA, 13 nt, Human
ccaacccucauca

SEQ ID NO: 3222765 - RNA, 15 nt, Human
ccaacccucaucacc

SEQ ID NO: 3222766 - RNA, 18 nt, Human
ccaacccuggcacccagg

SEQ ID NO: 3222767 - RNA, 14 nt, Human
ccaacccuucuuca

SEQ ID NO: 3222768 - RNA, 15 nt, Human
ccaacccuucuucau

SEQ ID NO: 3222769 - RNA, 16 nt, Human
ccaacccuucuucaug

SEQ ID NO: 3222770 - RNA, 15 nt, Human
ccaagaccuucuccu

SEQ ID NO: 3222771 - RNA, 17 nt, Human
ccaaccucuuccuccug

SEQ ID NO: 3222772 - RNA, 15 nt, Human
ccaaccucuuccucc

SEQ ID NO: 3222773 - RNA, 14 nt, Human
ccaaccucuuccuc

SEQ ID NO: 3222774 - RNA, 13 nt, Human
ccaaccucuuccu

SEQ ID NO: 3222775 - RNA, 14 nt, Human
ccaaccucgcucca

SEQ ID NO: 3222776 - RNA, 14 nt, Human
ccaaagaugcagcc

SEQ ID NO: 3222777 - RNA, 13 nt, Human
ccaaagaugcagc

SEQ ID NO: 3222778 - RNA, 17 nt, Human
ccaaagaaauguaaggg

SEQ ID NO: 3222779 - RNA, 12 nt, Human
ccaaagaaaguu

SEQ ID NO: 3222780 - RNA, 16 nt, Human
ccaaacuacugaauga

SEQ ID NO: 3222781 - RNA, 13 nt, Human
ccaaagacaaaua

SEQ ID NO: 3222782 - RNA, 14 nt, Human
ccaaagaaugaauu

SEQ ID NO: 3222783 - RNA, 16 nt, Human
ccaaagacaaauagua

SEQ ID NO: 3222784 - RNA, 15 nt, Human
ccaaagacaaauagu

SEQ ID NO: 3222785 - RNA, 14 nt, Human
ccaaagacaaauag

SEQ ID NO: 3222786 - RNA, 16 nt, Human
ccaaacccuucagugc

SEQ ID NO: 3222787 - RNA, 18 nt, Human
ccaaaauaagaaaagaug

SEQ ID NO: 3222788 - RNA, 14 nt, Human
ccaaaauaagaaaa

SEQ ID NO: 3222789 - RNA, 17 nt, Human
ccaaaauaagaaaagau

SEQ ID NO: 3222790 - RNA, 16 nt, Human
ccaaaauaagaaaaga

SEQ ID NO: 3222791 - RNA, 20 nt, Human
cauuuuuaguagagacaggg

SEQ ID NO: 3222792 - RNA, 14 nt, Human
ccaaaaguuauuaa

SEQ ID NO: 3222793 - RNA, 22 nt, Human
cauuuuuaucaggauuuccucu

SEQ ID NO: 3222794 - RNA, 21 nt, Human
cauuuuuauaccuguuuaaau

SEQ ID NO: 3222795 - RNA, 20 nt, Human
cauuuuuauaccuguuuaaa

SEQ ID NO: 3222796 - RNA, 21 nt, Human
cauuuuauuaagcuuuuugga

SEQ ID NO: 3222797 - RNA, 22 nt, Human
cauuuuauuaagcuuuuuggaa

SEQ ID NO: 3222798 - RNA, 23 nt, Human
cauuuuauuaagcuuuuuggaau

SEQ ID NO: 3222799 - RNA, 16 nt, Human
cauuuucuuaauccag

SEQ ID NO: 3222800 - RNA, 23 nt, Human
cauuuugggguacccacugcucu

SEQ ID NO: 3222801 - RNA, 19 nt, Human
cauuuuggcgcucgaaguu

SEQ ID NO: 3222802 - RNA, 22 nt, Human
cauuuuggugucuuucucuuuu

SEQ ID NO: 3222803 - RNA, 18 nt, Human
cauuuuuaguagagacag

SEQ ID NO: 3222804 - RNA, 19 nt, Human
cauuuuuaguagagacagg

SEQ ID NO: 3222805 - RNA, 18 nt, Human
cauuuugcuaaaugugaa

SEQ ID NO: 3222806 - RNA, 21 nt, Human
cauuuugcuaaaugugaauga

SEQ ID NO: 3222807 - RNA, 24 nt, Human
cauuuugcuaaaugugaaugauga

SEQ ID NO: 3222808 - RNA, 18 nt, Human
cauuuugcuuuaauuuua

SEQ ID NO: 3222809 - RNA, 14 nt, Human
cauuuugcuuuaau

SEQ ID NO: 3222810 - RNA, 13 nt, Human
cauuuugcuuuaa

SEQ ID NO: 3222811 - RNA, 12 nt, Human
cauuuugcuuua

SEQ ID NO: 3222812 - RNA, 22 nt, Human
cauuuugggguacccacugcuc

SEQ ID NO: 3222813 - RNA, 21 nt, Human
cauuuugggguacccacugcu

SEQ ID NO: 3222814 - RNA, 20 nt, Human
cauuuugggguacccacugc

SEQ ID NO: 3222815 - RNA, 12 nt, Human
cauuuuggcgcu

SEQ ID NO: 3222816 - RNA, 23 nt, Human
cauuucuuccacaagagcccagg

SEQ ID NO: 3222817 - RNA, 14 nt, Human
cauuugagcagggc

SEQ ID NO: 3222818 - RNA, 24 nt, Human
cauuucugccuuuuguucauuuca

SEQ ID NO: 3222819 - RNA, 18 nt, Human
cauuucugccuuuuguuc

SEQ ID NO: 3222820 - RNA, 12 nt, Human
cauuucugauuu

SEQ ID NO: 3222821 - RNA, 23 nt, Human
cauuucugcaucagcugcugaaa

SEQ ID NO: 3222822 - RNA, 21 nt, Human
cauuucuuccacaagagccca

SEQ ID NO: 3222823 - RNA, 11 nt, Human
cauuucugauu

SEQ ID NO: 3222824 - RNA, 19 nt, Human
cauuucugauacuuucugu

SEQ ID NO: 3222825 - RNA, 22 nt, Human
cauuuccguaauucuuauucca

SEQ ID NO: 3222826 - RNA, 19 nt, Human
cauuuccguaauucuuauu

SEQ ID NO: 3222827 - RNA, 17 nt, Human
cauuuccccagggcacg

SEQ ID NO: 3222828 - RNA, 16 nt, Human
cauuuccccagggcac

SEQ ID NO: 3222829 - RNA, 15 nt, Human
cauuuccccagggca

SEQ ID NO: 3222830 - RNA, 14 nt, Human
cauuuccccagggc

SEQ ID NO: 3222831 - RNA, 16 nt, Human
cauuuccguaauucuu

SEQ ID NO: 3222832 - RNA, 19 nt, Human
cauuuagaauggugauuuu

SEQ ID NO: 3222833 - RNA, 12 nt, Human
cauuuagaaugg

SEQ ID NO: 3222834 - RNA, 10 nt, Human
cauuuagaau

SEQ ID NO: 3222835 - RNA, 12 nt, Human
cauuuagaaaag

SEQ ID NO: 3222836 - RNA, 15 nt, Human
cauuuagaaaaguga

SEQ ID NO: 3222837 - RNA, 13 nt, Human
cauuuagaagaaa

SEQ ID NO: 3222838 - RNA, 16 nt, Human
cauuuagaagaaagau

SEQ ID NO: 3222839 - RNA, 17 nt, Human
cauuuagaagaaagaug

SEQ ID NO: 3222840 - RNA, 20 nt, Human
cauuuagaagaaagauguuu

SEQ ID NO: 3222841 - RNA, 21 nt, Human
cauuuagaauggugauuuuaa

SEQ ID NO: 3222842 - RNA, 20 nt, Human
cauuuagaauggugauuuua

SEQ ID NO: 3222843 - RNA, 16 nt, Human
cauuuccauguaugca

SEQ ID NO: 3222844 - RNA, 15 nt, Human
cauuuccauguaugc

SEQ ID NO: 3222845 - RNA, 14 nt, Human
cauuuccauguaug

SEQ ID NO: 3222846 - RNA, 12 nt, Human
cauuuccaugua

SEQ ID NO: 3222847 - RNA, 17 nt, Human
cauuuccauguaugcau

SEQ ID NO: 3222848 - RNA, 18 nt, Human
cauuucccaacacaaaga

SEQ ID NO: 3222849 - RNA, 19 nt, Human
cauuuaaagcuuauuaaaa

SEQ ID NO: 3222850 - RNA, 21 nt, Human
cauuuacuuuguguucaccuu

SEQ ID NO: 3222851 - RNA, 17 nt, Human
cauuuacuuuguguuca

SEQ ID NO: 3222852 - RNA, 21 nt, Human
cauugcaugccgggugcagca

SEQ ID NO: 3222853 - RNA, 16 nt, Human
cauugcauauaacuua

SEQ ID NO: 3222854 - RNA, 18 nt, Human
cauugagaccgugaagau

SEQ ID NO: 3222855 - RNA, 16 nt, Human
cauugauuugauuuuu

SEQ ID NO: 3222856 - RNA, 13 nt, Human
cauugauuugauu

SEQ ID NO: 3222857 - RNA, 21 nt, Human
cauugcaacaaaauacauucu

SEQ ID NO: 3222858 - RNA, 15 nt, Human
cauugcaacaaaaua

SEQ ID NO: 3222859 - RNA, 14 nt, Human
cauugcaacaaaau

SEQ ID NO: 3222860 - RNA, 22 nt, Human
cauugauuugauuuuuauuauu

SEQ ID NO: 3222861 - RNA, 13 nt, Human
cauugaccugagg

SEQ ID NO: 3222862 - RNA, 22 nt, Human
cauugaccugaggcccuucucu

SEQ ID NO: 3222863 - RNA, 19 nt, Human
cauugaaaucuuuuugcuu

SEQ ID NO: 3222864 - RNA, 22 nt, Human
cauugaaaauuauuaaucagaa

SEQ ID NO: 3222865 - RNA, 20 nt, Human
ccaucauguuuacagaggac

SEQ ID NO: 3222866 - RNA, 22 nt, Human
ccaucauguuuacagaggacag

SEQ ID NO: 3222867 - RNA, 16 nt, Human
ccaucaugucuggcua

SEQ ID NO: 3222868 - RNA, 14 nt, Human
ccaucaugucuggc

SEQ ID NO: 3222869 - RNA, 15 nt, Human
ccauccugaggcucc

SEQ ID NO: 3222870 - RNA, 21 nt, Human
ccauccucuguacagagccca

SEQ ID NO: 3222871 - RNA, 16 nt, Human
ccaucuuuuauucuuu

SEQ ID NO: 3222872 - RNA, 20 nt, Human
ccaucuuuuuaaccucuguu

SEQ ID NO: 3222873 - RNA, 22 nt, Human
ccaucuuuuguuacucuuggga

SEQ ID NO: 3222874 - RNA, 16 nt, Human
ccaucgcugucaucuc

SEQ ID NO: 3222875 - RNA, 22 nt, Human
ccaucaacuaaaguuguacuuu

SEQ ID NO: 3222876 - RNA, 13 nt, Human
ccaucaccagaca

SEQ ID NO: 3222877 - RNA, 12 nt, Human
ccaucacccgcu

SEQ ID NO: 3222878 - RNA, 18 nt, Human
ccauauuuuacuuggaaa

SEQ ID NO: 3222879 - RNA, 19 nt, Human
ccauauuuuacuuggaaau

SEQ ID NO: 3222880 - RNA, 22 nt, Human
ccauauuuuuuuccuuacauaa

SEQ ID NO: 3222881 - RNA, 17 nt, Human
ccauauuuuuuuccuua

SEQ ID NO: 3222882 - RNA, 16 nt, Human
ccauauuuuuuuccuu

SEQ ID NO: 3222883 - RNA, 15 nt, Human
ccauauuuuuuuccu

SEQ ID NO: 3222884 - RNA, 18 nt, Human
ccauauucuguuggccag

SEQ ID NO: 3222885 - RNA, 19 nt, Human
ccauauuagaaaacuuugu

SEQ ID NO: 3222886 - RNA, 22 nt, Human
ccauauuagaaaacuuuguuag

SEQ ID NO: 3222887 - RNA, 20 nt, Human
ccauauuagaaaacuuuguu

SEQ ID NO: 3222888 - RNA, 15 nt, Human
ccauauucuguuggc

SEQ ID NO: 3222889 - RNA, 23 nt, Human
ccauagagagcaagacgcugugc

SEQ ID NO: 3222890 - RNA, 21 nt, Human
ccaguggggccugaggcuccu

SEQ ID NO: 3222891 - RNA, 16 nt, Human
ccauagaguacacugc

SEQ ID NO: 3222892 - RNA, 22 nt, Human
ccauagaguacacugccugccu

SEQ ID NO: 3222893 - RNA, 19 nt, Human
ccauagaguacacugccug

SEQ ID NO: 3222894 - RNA, 20 nt, Human
ccauagaguacacugccugc

SEQ ID NO: 3222895 - RNA, 23 nt, Human
ccagggacagaggggguggccuc

SEQ ID NO: 3222896 - RNA, 19 nt, Human
ccagggacagauccagcag

SEQ ID NO: 3222897 - RNA, 19 nt, Human
ccagugcuuagcaaaaaau

SEQ ID NO: 3222898 - RNA, 22 nt, Human
ccaguggauucuuguuuugcuu

SEQ ID NO: 3222899 - RNA, 13 nt, Human
ccaguggcagggc

SEQ ID NO: 3222900 - RNA, 12 nt, Human
ccaggccugccu

SEQ ID NO: 3222901 - RNA, 12 nt, Human
ccagggaagggg

SEQ ID NO: 3222902 - RNA, 19 nt, Human
ccagcugcaccccuuccug

SEQ ID NO: 3222903 - RNA, 17 nt, Human
ccagcugcaccccuucc

SEQ ID NO: 3222904 - RNA, 14 nt, Human
ccagcugcaccccu

SEQ ID NO: 3222905 - RNA, 13 nt, Human
ccagcugcacccc

SEQ ID NO: 3222906 - RNA, 20 nt, Human
ccagcucuuccuagcuggag

SEQ ID NO: 3222907 - RNA, 16 nt, Human
ccagcucuuccuagcu

SEQ ID NO: 3222908 - RNA, 13 nt, Human
ccagccucuuucc

SEQ ID NO: 3222909 - RNA, 15 nt, Human
ccagccucuuucccu

SEQ ID NO: 3222910 - RNA, 14 nt, Human
ccagccucuuuccc

SEQ ID NO: 3222911 - RNA, 16 nt, Human
ccagcugcuugggcuu

SEQ ID NO: 3222912 - RNA, 18 nt, Human
ccagcugcuugggcuuca

SEQ ID NO: 3222913 - RNA, 12 nt, Human
ccagcuggccgg

SEQ ID NO: 3222914 - RNA, 14 nt, Human
ccagcuggccggga

SEQ ID NO: 3222915 - RNA, 20 nt, Human
ccagcuggccgggagccuga

SEQ ID NO: 3222916 - RNA, 13 nt, Human
ccagcugcuuggg

SEQ ID NO: 3222917 - RNA, 15 nt, Human
ccagcugcuugggcu

SEQ ID NO: 3222918 - RNA, 23 nt, Human
ccagcugcaccccuuccugggca

SEQ ID NO: 3222919 - RNA, 22 nt, Human
ccagcugcaccccuuccugggc

SEQ ID NO: 3222920 - RNA, 21 nt, Human
ccagcugcaccccuuccuggg

SEQ ID NO: 3222921 - RNA, 20 nt, Human
ccagcugcaccccuuccugg

SEQ ID NO: 3222922 - RNA, 21 nt, Human
ccagcugugcucuggacaggc

SEQ ID NO: 3222923 - RNA, 20 nt, Human
ccagcugugcucuggacagg

SEQ ID NO: 3222924 - RNA, 18 nt, Human
ccagcugugcucuggaca

SEQ ID NO: 3222925 - RNA, 17 nt, Human
ccagcuggguuggaaaa

SEQ ID NO: 3222926 - RNA, 16 nt, Human
ccagcuggguuggaaa

SEQ ID NO: 3222927 - RNA, 14 nt, Human
ccacacacacaaaa

SEQ ID NO: 3222928 - RNA, 12 nt, Human
ccaggagcagcc

SEQ ID NO: 3222929 - RNA, 13 nt, Human
ccaggagcagcca

SEQ ID NO: 3222930 - RNA, 14 nt, Human
ccaggaagccagca

SEQ ID NO: 3222931 - RNA, 15 nt, Human
ccaggaagccagcag

SEQ ID NO: 3222932 - RNA, 17 nt, Human
ccaggaagccagcaggc

SEQ ID NO: 3222933 - RNA, 19 nt, Human
ccaggaagccagcaggcuc

SEQ ID NO: 3222934 - RNA, 23 nt, Human
ccagcugugcucuggacaggcau

SEQ ID NO: 3222935 - RNA, 22 nt, Human
ccagcugugcucuggacaggca

SEQ ID NO: 3222936 - RNA, 23 nt, Human
ccaggacccugccaggcacaggc

SEQ ID NO: 3222937 - RNA, 22 nt, Human
ccaggacccugccaggcacagg

SEQ ID NO: 3222938 - RNA, 13 nt, Human
ccaggacccugcc

SEQ ID NO: 3222939 - RNA, 21 nt, Human
ccaggacccugccaggcacag

SEQ ID NO: 3222940 - RNA, 20 nt, Human
ccaggacccugccaggcaca

SEQ ID NO: 3222941 - RNA, 19 nt, Human
ccaggacccugccaggcac

SEQ ID NO: 3222942 - RNA, 18 nt, Human
ccaggacccugccaggca

SEQ ID NO: 3222943 - RNA, 17 nt, Human
ccaggacccugccaggc

SEQ ID NO: 3222944 - RNA, 16 nt, Human
ccaggacccugccagg

SEQ ID NO: 3222945 - RNA, 15 nt, Human
ccaggacccugccag

SEQ ID NO: 3222946 - RNA, 14 nt, Human
ccaggacccugcca

SEQ ID NO: 3222947 - RNA, 16 nt, Human
ccaggcccucugccca

SEQ ID NO: 3222948 - RNA, 17 nt, Human
ccaggcccucugcccac

SEQ ID NO: 3222949 - RNA, 18 nt, Human
ccaggcccucugcccacu

SEQ ID NO: 3222950 - RNA, 19 nt, Human
ccaggcccucugcccacuc

SEQ ID NO: 3222951 - RNA, 13 nt, Human
ccaggccuccuac

SEQ ID NO: 3222952 - RNA, 17 nt, Human
ccaggccuacuccuguc

SEQ ID NO: 3222953 - RNA, 23 nt, Human
ccaggccuacuccugucuucugc

SEQ ID NO: 3222954 - RNA, 21 nt, Human
ccaggccuacuccugucuucu

SEQ ID NO: 3222955 - RNA, 18 nt, Human
ccaggccuacuccugucu

SEQ ID NO: 3222956 - RNA, 18 nt, Human
ccaggccuccuacagcuu

SEQ ID NO: 3222957 - RNA, 19 nt, Human
ccaggccuccuacagcuug

SEQ ID NO: 3222958 - RNA, 12 nt, Human
ccaggccagagg

SEQ ID NO: 3222959 - RNA, 14 nt, Human
ccaggagcagccac

SEQ ID NO: 3222960 - RNA, 21 nt, Human
ccaggccagagggagugacag

SEQ ID NO: 3222961 - RNA, 14 nt, Human
ccaggccagaggga

SEQ ID NO: 3222962 - RNA, 23 nt, Human
ccaggccccugccacccugggga

SEQ ID NO: 3222963 - RNA, 21 nt, Human
ccaggccccugccacccuggg

SEQ ID NO: 3222964 - RNA, 19 nt, Human
ccaggccccugccacccug

SEQ ID NO: 3222965 - RNA, 16 nt, Human
cccaggaccccugagu

SEQ ID NO: 3222966 - RNA, 14 nt, Human
cccaggaggccagc

SEQ ID NO: 3222967 - RNA, 13 nt, Human
cccaggagcccau

SEQ ID NO: 3222968 - RNA, 12 nt, Human
cccaggagccca

SEQ ID NO: 3222969 - RNA, 14 nt, Human
cccaggagccccga

SEQ ID NO: 3222970 - RNA, 13 nt, Human
cccaggagccccg

SEQ ID NO: 3222971 - RNA, 21 nt, Human
cccagcuaugguucucucgca

SEQ ID NO: 3222972 - RNA, 23 nt, Human
cccagccugggauaggggcagag

SEQ ID NO: 3222973 - RNA, 14 nt, Human
cccagcgagcccug

SEQ ID NO: 3222974 - RNA, 13 nt, Human
cccagcucugguc

SEQ ID NO: 3222975 - RNA, 14 nt, Human
cccagcucuggucc

SEQ ID NO: 3222976 - RNA, 12 nt, Human
cccagcucuggu

SEQ ID NO: 3222977 - RNA, 15 nt, Human
cccagcucuggucca

SEQ ID NO: 3222978 - RNA, 16 nt, Human
cccagcucugguccau

SEQ ID NO: 3222979 - RNA, 18 nt, Human
cccagcucugguccauag

SEQ ID NO: 3222980 - RNA, 23 nt, Human
cccagauugcaacaggcugggcu

SEQ ID NO: 3222981 - RNA, 17 nt, Human
cccagccccaaugaaca

SEQ ID NO: 3222982 - RNA, 11 nt, Human
cccagccccau

SEQ ID NO: 3222983 - RNA, 12 nt, Human
cccagccccauc

SEQ ID NO: 3222984 - RNA, 13 nt, Human
cccagccccaaug

SEQ ID NO: 3222985 - RNA, 20 nt, Human
cccagaggccgagagcuaug

SEQ ID NO: 3222986 - RNA, 18 nt, Human
cccagccccauccucugu

SEQ ID NO: 3222987 - RNA, 19 nt, Human
cccagccccauccucugua

SEQ ID NO: 3222988 - RNA, 18 nt, Human
cccagccccuucugaccc

SEQ ID NO: 3222989 - RNA, 13 nt, Human
cccagccccaucc

SEQ ID NO: 3222990 - RNA, 14 nt, Human
cccagccccauccc

SEQ ID NO: 3222991 - RNA, 14 nt, Human
cccagccccauccu

SEQ ID NO: 3222992 - RNA, 15 nt, Human
cccagccccauccuc

SEQ ID NO: 3222993 - RNA, 20 nt, Human
cccagccuccaagcuccauc

SEQ ID NO: 3222994 - RNA, 18 nt, Human
cccagccuccaagcucca

SEQ ID NO: 3222995 - RNA, 23 nt, Human
cccagcccuccuuaucaaaggac

SEQ ID NO: 3222996 - RNA, 23 nt, Human
cccagccucaaauccaggacccu

SEQ ID NO: 3222997 - RNA, 18 nt, Human
cccagaaugccuccugca

SEQ ID NO: 3222998 - RNA, 13 nt, Human
cccagaccccgac

SEQ ID NO: 3222999 - RNA, 13 nt, Human
cccacgcccccac

SEQ ID NO: 3223000 - RNA, 14 nt, Human
cccacgcccccacu

SEQ ID NO: 3223001 - RNA, 13 nt, Human
cccaccuggcccu

SEQ ID NO: 3223002 - RNA, 12 nt, Human
cccaccuggccc

SEQ ID NO: 3223003 - RNA, 18 nt, Human
cccaccuggcccucucug

SEQ ID NO: 3223004 - RNA, 20 nt, Human
cccagacgccugauauugaa

SEQ ID NO: 3223005 - RNA, 17 nt, Human
cccagacccuggaggaa

SEQ ID NO: 3223006 - RNA, 22 nt, Human
cccagagagaagagccccacuc

SEQ ID NO: 3223007 - RNA, 18 nt, Human
cccagagagaagagcccc

SEQ ID NO: 3223008 - RNA, 21 nt, Human
cccagagagaagagccccacu

SEQ ID NO: 3223009 - RNA, 19 nt, Human
cccagagagaagagcccca

SEQ ID NO: 3223010 - RNA, 12 nt, Human
ccauguggacuu

SEQ ID NO: 3223011 - RNA, 11 nt, Human
ccauuccaaaa

SEQ ID NO: 3223012 - RNA, 13 nt, Human
ccauuccaaaaua

SEQ ID NO: 3223013 - RNA, 15 nt, Human
ccauuccaaaauauu

SEQ ID NO: 3223014 - RNA, 21 nt, Human
ccauuccaaaauauuaugccc

SEQ ID NO: 3223015 - RNA, 15 nt, Human
ccauguuggccaggc

SEQ ID NO: 3223016 - RNA, 18 nt, Human
ccauguuggccaggcugg

SEQ ID NO: 3223017 - RNA, 21 nt, Human
ccauguuggccaggcuggucu

SEQ ID NO: 3223018 - RNA, 19 nt, Human
ccauguuggccaggcuggu

SEQ ID NO: 3223019 - RNA, 19 nt, Human
cccaccuuggcugcaggga

SEQ ID NO: 3223020 - RNA, 17 nt, Human
cccaccuuggcugcagg

SEQ ID NO: 3223021 - RNA, 16 nt, Human
cccaccuuggcugcag

SEQ ID NO: 3223022 - RNA, 12 nt, Human
cccaccuggccu

SEQ ID NO: 3223023 - RNA, 15 nt, Human
cccaccuggccucug

SEQ ID NO: 3223024 - RNA, 12 nt, Human
cccaccugcgcu

SEQ ID NO: 3223025 - RNA, 23 nt, Human
ccauggcacucuauguucuaaga

SEQ ID NO: 3223026 - RNA, 22 nt, Human
ccauggagugggucuggaggac

SEQ ID NO: 3223027 - RNA, 13 nt, Human
ccaugugccaggu

SEQ ID NO: 3223028 - RNA, 16 nt, Human
ccaugugagcugcugc

SEQ ID NO: 3223029 - RNA, 19 nt, Human
ccaugugagcugcugccau

SEQ ID NO: 3223030 - RNA, 14 nt, Human
ccauguuggccagg

SEQ ID NO: 3223031 - RNA, 13 nt, Human
ccauguuggccag

SEQ ID NO: 3223032 - RNA, 22 nt, Human
ccaugugagcugcugccaugaa

SEQ ID NO: 3223033 - RNA, 21 nt, Human
ccaugugagcugcugccauga

SEQ ID NO: 3223034 - RNA, 20 nt, Human
ccaugugagcugcugccaug

SEQ ID NO: 3223035 - RNA, 13 nt, Human
ccaugcuccuggc

SEQ ID NO: 3223036 - RNA, 14 nt, Human
ccaugaaagaaaac

SEQ ID NO: 3223037 - RNA, 23 nt, Human
ccaucuuuuuaaccucuguucag

SEQ ID NO: 3223038 - RNA, 16 nt, Human
ccaugcugcccuguga

SEQ ID NO: 3223039 - RNA, 17 nt, Human
ccaugcugcccugugag

SEQ ID NO: 3223040 - RNA, 14 nt, Human
ccaugcugccucca

SEQ ID NO: 3223041 - RNA, 16 nt, Human
ccauggaaaaaugcca

SEQ ID NO: 3223042 - RNA, 15 nt, Human
ccaugcuccuggccc

SEQ ID NO: 3223043 - RNA, 18 nt, Human
ccaugcuccuggcccacu

SEQ ID NO: 3223044 - RNA, 15 nt, Human
ccaugcugcccugug

SEQ ID NO: 3223045 - RNA, 14 nt, Human
cccaguuagcucuc

SEQ ID NO: 3223046 - RNA, 20 nt, Human
cccagugguuccuaauccuc

SEQ ID NO: 3223047 - RNA, 19 nt, Human
cccagucuggaaugcagug

SEQ ID NO: 3223048 - RNA, 18 nt, Human
cccagucuggaaugcagu

SEQ ID NO: 3223049 - RNA, 10 nt, Human
cccagucugg

SEQ ID NO: 3223050 - RNA, 21 nt, Human
cccagugcccacaggaucagu

SEQ ID NO: 3223051 - RNA, 15 nt, Human
cccagugccgagaag

SEQ ID NO: 3223052 - RNA, 13 nt, Human
cccagguuucuau

SEQ ID NO: 3223053 - RNA, 15 nt, Human
cccaggaggccagcc

SEQ ID NO: 3223054 - RNA, 16 nt, Human
cccaggaggccagccu

SEQ ID NO: 3223055 - RNA, 15 nt, Human
cccaggcauucccca

SEQ ID NO: 3223056 - RNA, 23 nt, Human
cccaggcaggucuugaacuccug

SEQ ID NO: 3223057 - RNA, 17 nt, Human
cccaggcauuccccagg

SEQ ID NO: 3223058 - RNA, 22 nt, Human
cccaggagcccauuuggagggc

SEQ ID NO: 3223059 - RNA, 16 nt, Human
cccaggagcccauuug

SEQ ID NO: 3223060 - RNA, 19 nt, Human
cccagggugggaagggcua

SEQ ID NO: 3223061 - RNA, 13 nt, Human
ccccaacccuucu

SEQ ID NO: 3223062 - RNA, 21 nt, Human
ccccaacccuucuucauguuc

SEQ ID NO: 3223063 - RNA, 22 nt, Human
cccaugugagcugcugccauga

SEQ ID NO: 3223064 - RNA, 19 nt, Human
cccauguggagucagccuc

SEQ ID NO: 3223065 - RNA, 16 nt, Human
cccaugucucgacuca

SEQ ID NO: 3223066 - RNA, 17 nt, Human
cccaugucucgacucau

SEQ ID NO: 3223067 - RNA, 14 nt, Human
cccaugugagcugc

SEQ ID NO: 3223068 - RNA, 18 nt, Human
cccaugugagcugcugcc

SEQ ID NO: 3223069 - RNA, 16 nt, Human
cccaugugagcugcug

SEQ ID NO: 3223070 - RNA, 20 nt, Human
cccauguauggccaggaagu

SEQ ID NO: 3223071 - RNA, 19 nt, Human
cccauguauggccaggaag

SEQ ID NO: 3223072 - RNA, 16 nt, Human
cccaugagccucagca

SEQ ID NO: 3223073 - RNA, 15 nt, Human
cccaugagccucagc

SEQ ID NO: 3223074 - RNA, 20 nt, Human
cccaugagccucagcauccu

SEQ ID NO: 3223075 - RNA, 12 nt, Human
cccaugcugccc

SEQ ID NO: 3223076 - RNA, 13 nt, Human
cccaugcugcccu

SEQ ID NO: 3223077 - RNA, 14 nt, Human
cccaugcugcccug

SEQ ID NO: 3223078 - RNA, 12 nt, Human
cccaucugugaa

SEQ ID NO: 3223079 - RNA, 18 nt, Human
cccaucucacacaugagc

SEQ ID NO: 3223080 - RNA, 13 nt, Human
cccaucucacaca

SEQ ID NO: 3223081 - RNA, 20 nt, Human
cccaucugugaaaggaaaga

SEQ ID NO: 3223082 - RNA, 16 nt, Human
cccaucugugaauaag

SEQ ID NO: 3223083 - RNA, 13 nt, Human
cccaucugugaau

SEQ ID NO: 3223084 - RNA, 19 nt, Human
cccucauuggcucuugaac

SEQ ID NO: 3223085 - RNA, 21 nt, Human
cccuccaagaccuucuccuuc

SEQ ID NO: 3223086 - RNA, 23 nt, Human
cccucauuaaaauauugaaaucu

SEQ ID NO: 3223087 - RNA, 22 nt, Human
cccucauuccaccuucccaugc

SEQ ID NO: 3223088 - RNA, 22 nt, Human
cccucauccucauacccacccc

SEQ ID NO: 3223089 - RNA, 17 nt, Human
cccucauccucauaccc

SEQ ID NO: 3223090 - RNA, 20 nt, Human
cccucauccucauacccacc

SEQ ID NO: 3223091 - RNA, 22 nt, Human
cccucaucaccaacgucugugc

SEQ ID NO: 3223092 - RNA, 19 nt, Human
cccucauagcccucacccu

SEQ ID NO: 3223093 - RNA, 20 nt, Human
cccucagucuggcccuuccu

SEQ ID NO: 3223094 - RNA, 21 nt, Human
cccucagggucccugguggca

SEQ ID NO: 3223095 - RNA, 13 nt, Human
cccucauagcccu

SEQ ID NO: 3223096 - RNA, 15 nt, Human
cccucauagcccuca

SEQ ID NO: 3223097 - RNA, 23 nt, Human
cccucccucuacugggagccuac

SEQ ID NO: 3223098 - RNA, 13 nt, Human
cccucccucuuuc

SEQ ID NO: 3223099 - RNA, 14 nt, Human
cccucccuucaacc

SEQ ID NO: 3223100 - RNA, 14 nt, Human
cccucccucuccag

SEQ ID NO: 3223101 - RNA, 17 nt, Human
cccuccaugugggcuag

SEQ ID NO: 3223102 - RNA, 12 nt, Human
cccuccaggagu

SEQ ID NO: 3223103 - RNA, 10 nt, Human
cccuccaagg

SEQ ID NO: 3223104 - RNA, 16 nt, Human
cccuccaaggccaggc

SEQ ID NO: 3223105 - RNA, 19 nt, Human
cccuccaucuaaacugccc

SEQ ID NO: 3223106 - RNA, 16 nt, Human
cccucagggucccugg

SEQ ID NO: 3223107 - RNA, 17 nt, Human
cccucagggucccuggu

SEQ ID NO: 3223108 - RNA, 18 nt, Human
cccucagggucccuggug

SEQ ID NO: 3223109 - RNA, 19 nt, Human
cccucagggucccuggugg

SEQ ID NO: 3223110 - RNA, 15 nt, Human
cccucagggucccug

SEQ ID NO: 3223111 - RNA, 13 nt, Human
cccuaaagccuca

SEQ ID NO: 3223112 - RNA, 13 nt, Human
cccgugaccuggu

SEQ ID NO: 3223113 - RNA, 16 nt, Human
cccgugaccuggucag

SEQ ID NO: 3223114 - RNA, 15 nt, Human
cccgugaccugguca

SEQ ID NO: 3223115 - RNA, 16 nt, Human
cccggcaggguccuag

SEQ ID NO: 3223116 - RNA, 18 nt, Human
cccggaggggccuggcag

SEQ ID NO: 3223117 - RNA, 17 nt, Human
cccggaggggccuggca

SEQ ID NO: 3223118 - RNA, 23 nt, Human
ccccuggugguucacucuuggag

SEQ ID NO: 3223119 - RNA, 15 nt, Human
ccccuguaggccuca

SEQ ID NO: 3223120 - RNA, 22 nt, Human
ccccuguccccgcacugggcuu

SEQ ID NO: 3223121 - RNA, 22 nt, Human
ccccuggcuuuucacugcuggc

SEQ ID NO: 3223122 - RNA, 23 nt, Human
ccccuggcuuuucacugcuggcu

SEQ ID NO: 3223123 - RNA, 20 nt, Human
ccccuguucuggcagaguug

SEQ ID NO: 3223124 - RNA, 14 nt, Human
ccccuuaccacugc

SEQ ID NO: 3223125 - RNA, 18 nt, Human
ccccuucccgugaccugg

SEQ ID NO: 3223126 - RNA, 12 nt, Human
ccccuucccccu

SEQ ID NO: 3223127 - RNA, 20 nt, Human
ccccuuccuaauuccacagc

SEQ ID NO: 3223128 - RNA, 21 nt, Human
ccccuuccuaauuccacagcu

SEQ ID NO: 3223129 - RNA, 22 nt, Human
ccccuuccuaauuccacagcug

SEQ ID NO: 3223130 - RNA, 14 nt, Human
ccccuuccuaccac

SEQ ID NO: 3223131 - RNA, 15 nt, Human
cccgaggccuucucu

SEQ ID NO: 3223132 - RNA, 20 nt, Human
cccgaggccuucucugaagg

SEQ ID NO: 3223133 - RNA, 16 nt, Human
cccgcaagcaccaucc

SEQ ID NO: 3223134 - RNA, 15 nt, Human
cccgaucgccagcaa

SEQ ID NO: 3223135 - RNA, 19 nt, Human
cccgauccuccccuggacu

SEQ ID NO: 3223136 - RNA, 19 nt, Human
cccgcucagcccucccugc

SEQ ID NO: 3223137 - RNA, 15 nt, Human
cccgcucagcccucc

SEQ ID NO: 3223138 - RNA, 23 nt, Human
cccgcucagcccucccugccccu

SEQ ID NO: 3223139 - RNA, 23 nt, Human
ccccacaggagguggucugggac

SEQ ID NO: 3223140 - RNA, 16 nt, Human
ccccagccccauccca

SEQ ID NO: 3223141 - RNA, 15 nt, Human
ccccagccccauccu

SEQ ID NO: 3223142 - RNA, 13 nt, Human
ccccagccugcua

SEQ ID NO: 3223143 - RNA, 14 nt, Human
ccccaggugccagu

SEQ ID NO: 3223144 - RNA, 12 nt, Human
ccccuggcagcc

SEQ ID NO: 3223145 - RNA, 14 nt, Human
ccccuggcagcccc

SEQ ID NO: 3223146 - RNA, 15 nt, Human
ccccuggcagccccu

SEQ ID NO: 3223147 - RNA, 12 nt, Human
ccccaggaggcc

SEQ ID NO: 3223148 - RNA, 12 nt, Human
ccccagggcacg

SEQ ID NO: 3223149 - RNA, 21 nt, Human
cccugguggcagugggagcug

SEQ ID NO: 3223150 - RNA, 22 nt, Human
cccugguggcagugggagcugc

SEQ ID NO: 3223151 - RNA, 16 nt, Human
cccuggugcugccaca

SEQ ID NO: 3223152 - RNA, 21 nt, Human
cccuggguuagacugccagcu

SEQ ID NO: 3223153 - RNA, 20 nt, Human
cccuggguuagacugccagc

SEQ ID NO: 3223154 - RNA, 21 nt, Human
cccuggugcugccacacuuca

SEQ ID NO: 3223155 - RNA, 17 nt, Human
cccuggugcugccacac

SEQ ID NO: 3223156 - RNA, 16 nt, Human
cccuggguuagacugc

SEQ ID NO: 3223157 - RNA, 19 nt, Human
cccuggguuagacugccag

SEQ ID NO: 3223158 - RNA, 18 nt, Human
cccuggguuagacugcca

SEQ ID NO: 3223159 - RNA, 21 nt, Human
cccuggggugcaggcgccuca

SEQ ID NO: 3223160 - RNA, 16 nt, Human
cccuggaagcagugcc

SEQ ID NO: 3223161 - RNA, 15 nt, Human
cccuggaagcagugc

SEQ ID NO: 3223162 - RNA, 18 nt, Human
cccuggaagcagugccca

SEQ ID NO: 3223163 - RNA, 17 nt, Human
cccuggaagcagugccc

SEQ ID NO: 3223164 - RNA, 21 nt, Human
cccuggaagcagugcccaggu

SEQ ID NO: 3223165 - RNA, 20 nt, Human
cccugcugguucaggguugg

SEQ ID NO: 3223166 - RNA, 19 nt, Human
cccugcugguucaggguug

SEQ ID NO: 3223167 - RNA, 22 nt, Human
cccugcuggguguggcgcagca

SEQ ID NO: 3223168 - RNA, 22 nt, Human
cccugcuuugggcugcccuggu

SEQ ID NO: 3223169 - RNA, 23 nt, Human
cccugcuuugggcugcccuggug

SEQ ID NO: 3223170 - RNA, 23 nt, Human
cccugccugcccugucaggaggc

SEQ ID NO: 3223171 - RNA, 13 nt, Human
cccugccugcccu

SEQ ID NO: 3223172 - RNA, 13 nt, Human
cccugcugguuca

SEQ ID NO: 3223173 - RNA, 16 nt, Human
cccugccuccuuugug

SEQ ID NO: 3223174 - RNA, 23 nt, Human
cccugccuccuuugugaggaagc

SEQ ID NO: 3223175 - RNA, 20 nt, Human
cccugccaucauguuuacag

SEQ ID NO: 3223176 - RNA, 23 nt, Human
cccugccaggcacaggcagggca

SEQ ID NO: 3223177 - RNA, 22 nt, Human
cccugccaggcacaggcagggc

SEQ ID NO: 3223178 - RNA, 21 nt, Human
cccugccaggcacaggcaggg

SEQ ID NO: 3223179 - RNA, 20 nt, Human
cccugccaggcacaggcagg

SEQ ID NO: 3223180 - RNA, 19 nt, Human
cccugccaggcacaggcag

SEQ ID NO: 3223181 - RNA, 18 nt, Human
cccugccaggcacaggca

SEQ ID NO: 3223182 - RNA, 14 nt, Human
cccugccuccuuug

SEQ ID NO: 3223183 - RNA, 17 nt, Human
cccugcccacaccuccu

SEQ ID NO: 3223184 - RNA, 18 nt, Human
cccugcccacaccuccug

SEQ ID NO: 3223185 - RNA, 19 nt, Human
cccugcccacaccuccugg

SEQ ID NO: 3223186 - RNA, 20 nt, Human
cccugcccacaccuccuggg

SEQ ID NO: 3223187 - RNA, 18 nt, Human
cccugccacccuggggag

SEQ ID NO: 3223188 - RNA, 17 nt, Human
cccugccacccugggga

SEQ ID NO: 3223189 - RNA, 17 nt, Human
cccugccaggcacaggc

SEQ ID NO: 3223190 - RNA, 15 nt, Human
cccugccaggcacag

SEQ ID NO: 3223191 - RNA, 14 nt, Human
cccugccaggcaca

SEQ ID NO: 3223192 - RNA, 13 nt, Human
cccugccaggcac

SEQ ID NO: 3223193 - RNA, 15 nt, Human
cccugccacccuggg

SEQ ID NO: 3223194 - RNA, 14 nt, Human
cccugccacccugg

SEQ ID NO: 3223195 - RNA, 12 nt, Human
cccugccacccu

SEQ ID NO: 3223196 - RNA, 20 nt, Human
cccucuacugggagccuacc

SEQ ID NO: 3223197 - RNA, 17 nt, Human
cccucuacugggagccu

SEQ ID NO: 3223198 - RNA, 23 nt, Human
cccugaucccuuccaccugcucu

SEQ ID NO: 3223199 - RNA, 16 nt, Human
cccugaucccuuccac

SEQ ID NO: 3223200 - RNA, 15 nt, Human
cccugaucccuucca

SEQ ID NO: 3223201 - RNA, 22 nt, Human
cccugcaaccugauugugucuc

SEQ ID NO: 3223202 - RNA, 16 nt, Human
cccugcaaccugauug

SEQ ID NO: 3223203 - RNA, 18 nt, Human
cccugcagagggcacaga

SEQ ID NO: 3223204 - RNA, 12 nt, Human
cccugcagaggg

SEQ ID NO: 3223205 - RNA, 22 nt, Human
cccugcacuugcagacucuaca

SEQ ID NO: 3223206 - RNA, 14 nt, Human
cccugguggcagcu

SEQ ID NO: 3223207 - RNA, 14 nt, Human
ccucuacugggagc

SEQ ID NO: 3223208 - RNA, 19 nt, Human
ccucuccacugccuucgau

SEQ ID NO: 3223209 - RNA, 22 nt, Human
ccucuccagcaggcccauggga

SEQ ID NO: 3223210 - RNA, 15 nt, Human
ccucuccccagcaag

SEQ ID NO: 3223211 - RNA, 20 nt, Human
ccucuccccagcaagugaga

SEQ ID NO: 3223212 - RNA, 13 nt, Human
ccucucccuugga

SEQ ID NO: 3223213 - RNA, 22 nt, Human
ccucucccuuggauuguccccg

SEQ ID NO: 3223214 - RNA, 15 nt, Human
ccuccuccuuccuag

SEQ ID NO: 3223215 - RNA, 21 nt, Human
ccuccucggcuggcuguccac

SEQ ID NO: 3223216 - RNA, 17 nt, Human
ccuccucggcuggcugu

SEQ ID NO: 3223217 - RNA, 14 nt, Human
ccuccuccuuccua

SEQ ID NO: 3223218 - RNA, 13 nt, Human
ccuccuccuuccu

SEQ ID NO: 3223219 - RNA, 21 nt, Human
ccuccuccagccgccaugcuc

SEQ ID NO: 3223220 - RNA, 13 nt, Human
ccuccucucugcc

SEQ ID NO: 3223221 - RNA, 15 nt, Human
ccuccucucugcccu

SEQ ID NO: 3223222 - RNA, 16 nt, Human
ccuccucucugcccua

SEQ ID NO: 3223223 - RNA, 18 nt, Human
ccucgguguggagaagcg

SEQ ID NO: 3223224 - RNA, 14 nt, Human
ccucgucuuuccca

SEQ ID NO: 3223225 - RNA, 20 nt, Human
ccucuccgccccugagccca

SEQ ID NO: 3223226 - RNA, 19 nt, Human
ccucuccgccccugagccc

SEQ ID NO: 3223227 - RNA, 18 nt, Human
ccucuccgccccugagcc

SEQ ID NO: 3223228 - RNA, 15 nt, Human
ccucuccgccccuga

SEQ ID NO: 3223229 - RNA, 13 nt, Human
ccucugacacaca

SEQ ID NO: 3223230 - RNA, 22 nt, Human
ccucuccgccccugagcccacu

SEQ ID NO: 3223231 - RNA, 20 nt, Human
ccucugacacacagcucugu

SEQ ID NO: 3223232 - RNA, 19 nt, Human
ccucugacacacagcucug

SEQ ID NO: 3223233 - RNA, 14 nt, Human
ccucugacacacag

SEQ ID NO: 3223234 - RNA, 18 nt, Human
ccucugacacacagcucu

SEQ ID NO: 3223235 - RNA, 21 nt, Human
ccucugacacacagcucuguc

SEQ ID NO: 3223236 - RNA, 13 nt, Human
ccucugagaggcg

SEQ ID NO: 3223237 - RNA, 13 nt, Human
ccucugcccacuc

SEQ ID NO: 3223238 - RNA, 16 nt, Human
ccucugcccacucccu

SEQ ID NO: 3223239 - RNA, 21 nt, Human
ccucugauguauuuugugagu

SEQ ID NO: 3223240 - RNA, 23 nt, Human
ccucugcacuccccugcugggug

SEQ ID NO: 3223241 - RNA, 18 nt, Human
ccucugcacuccccugcu

SEQ ID NO: 3223242 - RNA, 16 nt, Human
ccucugcacuccccug

SEQ ID NO: 3223243 - RNA, 17 nt, Human
ccucugcacuccccugc

SEQ ID NO: 3223244 - RNA, 15 nt, Human
ccucugcacuccccu

SEQ ID NO: 3223245 - RNA, 17 nt, Human
ccucugauguauuuugu

SEQ ID NO: 3223246 - RNA, 13 nt, Human
ccucugaggcuga

SEQ ID NO: 3223247 - RNA, 11 nt, Human
ccucugagccu

SEQ ID NO: 3223248 - RNA, 12 nt, Human
ccucugagccuu

SEQ ID NO: 3223249 - RNA, 13 nt, Human
ccuccacucuccu

SEQ ID NO: 3223250 - RNA, 12 nt, Human
ccuccagaacuc

SEQ ID NO: 3223251 - RNA, 20 nt, Human
ccuccagaacucuuccucca

SEQ ID NO: 3223252 - RNA, 18 nt, Human
ccuccagaacucuuccuc

SEQ ID NO: 3223253 - RNA, 17 nt, Human
ccuccagaacucuuccu

SEQ ID NO: 3223254 - RNA, 17 nt, Human
ccucaggugagaagcag

SEQ ID NO: 3223255 - RNA, 18 nt, Human
ccucaggugagaagcaga

SEQ ID NO: 3223256 - RNA, 20 nt, Human
ccucaggugagaagcagagg

SEQ ID NO: 3223257 - RNA, 15 nt, Human
ccucagggucccugg

SEQ ID NO: 3223258 - RNA, 21 nt, Human
ccuccauccuccuccuuccua

SEQ ID NO: 3223259 - RNA, 20 nt, Human
ccuccauccuccuccuuccu

SEQ ID NO: 3223260 - RNA, 19 nt, Human
ccuccauccuccuccuucc

SEQ ID NO: 3223261 - RNA, 18 nt, Human
ccuccauccuccuccuuc

SEQ ID NO: 3223262 - RNA, 17 nt, Human
ccuccaggugcacaagc

SEQ ID NO: 3223263 - RNA, 11 nt, Human
ccuccaggugc

SEQ ID NO: 3223264 - RNA, 12 nt, Human
ccuccaggugca

SEQ ID NO: 3223265 - RNA, 12 nt, Human
ccuccauccuga

SEQ ID NO: 3223266 - RNA, 13 nt, Human
ccuccauccugag

SEQ ID NO: 3223267 - RNA, 16 nt, Human
ccuccaugcugccucc

SEQ ID NO: 3223268 - RNA, 19 nt, Human
ccuccaugcugccuccaga

SEQ ID NO: 3223269 - RNA, 14 nt, Human
ccucccaacucacc

SEQ ID NO: 3223270 - RNA, 17 nt, Human
ccucccaaagugcuggg

SEQ ID NO: 3223271 - RNA, 15 nt, Human
ccuccaugugggcua

SEQ ID NO: 3223272 - RNA, 12 nt, Human
ccuccauguggg

SEQ ID NO: 3223273 - RNA, 15 nt, Human
ccuccccuccuccug

SEQ ID NO: 3223274 - RNA, 18 nt, Human
ccucccgaauagcuggga

SEQ ID NO: 3223275 - RNA, 15 nt, Human
ccucccaacucaccc

SEQ ID NO: 3223276 - RNA, 16 nt, Human
ccucccaaagugcugg

SEQ ID NO: 3223277 - RNA, 20 nt, Human
ccucccgaauagcugggacu

SEQ ID NO: 3223278 - RNA, 19 nt, Human
ccucccgaauagcugggac

SEQ ID NO: 3223279 - RNA, 21 nt, Human
ccucccgaauagcugggacua

SEQ ID NO: 3223280 - RNA, 18 nt, Human
ccucccgaguagcuggga

SEQ ID NO: 3223281 - RNA, 17 nt, Human
ccucccgaguagcuggg

SEQ ID NO: 3223282 - RNA, 18 nt, Human
ccucccucuccagcaggc

SEQ ID NO: 3223283 - RNA, 13 nt, Human
ccucccucuccag

SEQ ID NO: 3223284 - RNA, 12 nt, Human
ccuccuccagcc

SEQ ID NO: 3223285 - RNA, 11 nt, Human
ccuccucagau

SEQ ID NO: 3223286 - RNA, 13 nt, Human
ccucccucuuucc

SEQ ID NO: 3223287 - RNA, 16 nt, Human
ccucagaucuucugug

SEQ ID NO: 3223288 - RNA, 16 nt, Human
ccucagggucccuggu

SEQ ID NO: 3223289 - RNA, 17 nt, Human
ccucagggucccuggug

SEQ ID NO: 3223290 - RNA, 20 nt, Human
ccucagggucccugguggca

SEQ ID NO: 3223291 - RNA, 23 nt, Human
ccucaggccugggggcugggcag

SEQ ID NO: 3223292 - RNA, 16 nt, Human
ccucagagccaccccu

SEQ ID NO: 3223293 - RNA, 14 nt, Human
ccucacccuggggc

SEQ ID NO: 3223294 - RNA, 23 nt, Human
ccucacccggugaccucuagccc

SEQ ID NO: 3223295 - RNA, 22 nt, Human
ccucacuaucccggcugcccuu

SEQ ID NO: 3223296 - RNA, 18 nt, Human
ccucacucagcaccacuc

SEQ ID NO: 3223297 - RNA, 17 nt, Human
ccucacucagcaccacu

SEQ ID NO: 3223298 - RNA, 20 nt, Human
ccucacucugcuaccuugcc

SEQ ID NO: 3223299 - RNA, 22 nt, Human
ccucacucugcuaccuugcccc

SEQ ID NO: 3223300 - RNA, 23 nt, Human
ccucacucugcuaccuugcccca

SEQ ID NO: 3223301 - RNA, 14 nt, Human
ccucacucucagga

SEQ ID NO: 3223302 - RNA, 13 nt, Human
ccucacucucagg

SEQ ID NO: 3223303 - RNA, 14 nt, Human
ccucacacucaccc

SEQ ID NO: 3223304 - RNA, 13 nt, Human
ccuauuguaauau

SEQ ID NO: 3223305 - RNA, 24 nt, Human
ccucacaguccuuaccagcagagc

SEQ ID NO: 3223306 - RNA, 23 nt, Human
ccucacaguccuuaccagcagag

SEQ ID NO: 3223307 - RNA, 15 nt, Human
ccucacacuccuuua

SEQ ID NO: 3223308 - RNA, 22 nt, Human
ccuaucuguuuacaguguuccg

SEQ ID NO: 3223309 - RNA, 16 nt, Human
ccuauuagagaagaga

SEQ ID NO: 3223310 - RNA, 17 nt, Human
ccuauuagagaagagau

SEQ ID NO: 3223311 - RNA, 16 nt, Human
ccuauuaguguuauau

SEQ ID NO: 3223312 - RNA, 19 nt, Human
ccuauuaguguuauaugaa

SEQ ID NO: 3223313 - RNA, 11 nt, Human
ccuauuagugu

SEQ ID NO: 3223314 - RNA, 15 nt, Human
ccuauuaguguuaua

SEQ ID NO: 3223315 - RNA, 15 nt, Human
ccuaggugacagagu

SEQ ID NO: 3223316 - RNA, 13 nt, Human
ccuaggucuauuu

SEQ ID NO: 3223317 - RNA, 23 nt, Human
ccuagguagcccccucuucccug

SEQ ID NO: 3223318 - RNA, 21 nt, Human
ccuagguagcccccucuuccc

SEQ ID NO: 3223319 - RNA, 20 nt, Human
ccuagguagcccccucuucc

SEQ ID NO: 3223320 - RNA, 16 nt, Human
ccuagguagcccccuc

SEQ ID NO: 3223321 - RNA, 16 nt, Human
ccgggagccugaucac

SEQ ID NO: 3223322 - RNA, 23 nt, Human
ccgggagccugaucaccugcccu

SEQ ID NO: 3223323 - RNA, 14 nt, Human
ccgggaagcaaaug

SEQ ID NO: 3223324 - RNA, 21 nt, Human
ccgggacguggcaccuccucg

SEQ ID NO: 3223325 - RNA, 12 nt, Human
ccgggacucugc

SEQ ID NO: 3223326 - RNA, 17 nt, Human
ccggugggggggcagag

SEQ ID NO: 3223327 - RNA, 16 nt, Human
ccggugggggggcaga

SEQ ID NO: 3223328 - RNA, 21 nt, Human
ccgugcuuuuaaggaaaggca

SEQ ID NO: 3223329 - RNA, 17 nt, Human
ccggugugggggccccg

SEQ ID NO: 3223330 - RNA, 21 nt, Human
ccggugggggggcagagcccu

SEQ ID NO: 3223331 - RNA, 18 nt, Human
ccggugaccucuagcccu

SEQ ID NO: 3223332 - RNA, 21 nt, Human
ccggucgggggggacccucca

SEQ ID NO: 3223333 - RNA, 16 nt, Human
ccggcaauaaaagccc

SEQ ID NO: 3223334 - RNA, 17 nt, Human
ccgggaagggggcuggg

SEQ ID NO: 3223335 - RNA, 18 nt, Human
ccggcaauaaaagcccag

SEQ ID NO: 3223336 - RNA, 17 nt, Human
ccggcaauaaaagccca

SEQ ID NO: 3223337 - RNA, 21 nt, Human
ccggaggggccuggcagccgu

SEQ ID NO: 3223338 - RNA, 17 nt, Human
ccggaggggccuggcag

SEQ ID NO: 3223339 - RNA, 13 nt, Human
cccuggugguuca

SEQ ID NO: 3223340 - RNA, 16 nt, Human
cccuguguuaauuuaa

SEQ ID NO: 3223341 - RNA, 13 nt, Human
cccuguucacucu

SEQ ID NO: 3223342 - RNA, 22 nt, Human
cccuguucacucuacuuagcau

SEQ ID NO: 3223343 - RNA, 14 nt, Human
cccuguucacucua

SEQ ID NO: 3223344 - RNA, 13 nt, Human
cccuucccaccuc

SEQ ID NO: 3223345 - RNA, 12 nt, Human
cccuucccaccu

SEQ ID NO: 3223346 - RNA, 11 nt, Human
cccuucauuug

SEQ ID NO: 3223347 - RNA, 13 nt, Human
cccuuccuaauuc

SEQ ID NO: 3223348 - RNA, 14 nt, Human
cccuuccuaauucc

SEQ ID NO: 3223349 - RNA, 19 nt, Human
cccuuccuaauuccacagc

SEQ ID NO: 3223350 - RNA, 20 nt, Human
cccuuccuaauuccacagcu

SEQ ID NO: 3223351 - RNA, 14 nt, Human
cccuucccagggca

SEQ ID NO: 3223352 - RNA, 11 nt, Human
cccuucuuuuu

SEQ ID NO: 3223353 - RNA, 19 nt, Human
cccuucuuuuucuucuuuu

SEQ ID NO: 3223354 - RNA, 15 nt, Human
cccuugaccugcuga

SEQ ID NO: 3223355 - RNA, 12 nt, Human
cccuugaccugc

SEQ ID NO: 3223356 - RNA, 17 nt, Human
cccuuggauuguccccg

SEQ ID NO: 3223357 - RNA, 22 nt, Human
cccuugguuaggcauuguggga

SEQ ID NO: 3223358 - RNA, 23 nt, Human
cccuugguuaggcauugugggaa

SEQ ID NO: 3223359 - RNA, 22 nt, Human
cccuuguggucccaccccacac

SEQ ID NO: 3223360 - RNA, 20 nt, Human
cccuuguggucccaccccac

SEQ ID NO: 3223361 - RNA, 12 nt, Human
cccuuguuccag

SEQ ID NO: 3223362 - RNA, 17 nt, Human
cccuuuagcuguguuau

SEQ ID NO: 3223363 - RNA, 23 nt, Human
cccuuuacuugucuuucuggggu

SEQ ID NO: 3223364 - RNA, 13 nt, Human
ccuaggugacaga

SEQ ID NO: 3223365 - RNA, 18 nt, Human
ccuagaauguuucauuug

SEQ ID NO: 3223366 - RNA, 19 nt, Human
ccuagaauguuucauuugc

SEQ ID NO: 3223367 - RNA, 21 nt, Human
ccuagaaauuccccacccuga

SEQ ID NO: 3223368 - RNA, 16 nt, Human
ccuacuuccccuuccu

SEQ ID NO: 3223369 - RNA, 13 nt, Human
ccuacuuccccuu

SEQ ID NO: 3223370 - RNA, 18 nt, Human
ccuacccacccuccuuuc

SEQ ID NO: 3223371 - RNA, 13 nt, Human
ccuacccacccuc

SEQ ID NO: 3223372 - RNA, 18 nt, Human
ccuacaugcuuugugaac

SEQ ID NO: 3223373 - RNA, 21 nt, Human
ccuacaguugaaaaacagcug

SEQ ID NO: 3223374 - RNA, 17 nt, Human
ccuacaugcuuugugaa

SEQ ID NO: 3223375 - RNA, 15 nt, Human
ccuacagcccaccug

SEQ ID NO: 3223376 - RNA, 19 nt, Human
ccuacagcuugaccgugag

SEQ ID NO: 3223377 - RNA, 22 nt, Human
ccuacaguugaaaaacagcuga

SEQ ID NO: 3223378 - RNA, 23 nt, Human
ccuaacaugguuuaaaagaaaaa

SEQ ID NO: 3223379 - RNA, 22 nt, Human
ccuaacaacauuguagccucaa

SEQ ID NO: 3223380 - RNA, 21 nt, Human
ccuaacaacauuguagccuca

SEQ ID NO: 3223381 - RNA, 15 nt, Human
ccuaaaauucagugg

SEQ ID NO: 3223382 - RNA, 19 nt, Human
ccguguuugucucuucugg

SEQ ID NO: 3223383 - RNA, 14 nt, Human
ccguguuugucucu

SEQ ID NO: 3223384 - RNA, 18 nt, Human
ccguguuugucucuucug

SEQ ID NO: 3223385 - RNA, 16 nt, Human
ccuaaaauucagugga

SEQ ID NO: 3223386 - RNA, 20 nt, Human
cuugaaugaugccaugagga

SEQ ID NO: 3223387 - RNA, 23 nt, Human
cuugaauaaacaccacuggauua

SEQ ID NO: 3223388 - RNA, 13 nt, Human
cuugaauaguauu

SEQ ID NO: 3223389 - RNA, 15 nt, Human
cuugaauaguauugu

SEQ ID NO: 3223390 - RNA, 17 nt, Human
cuugaauaguauugugu

SEQ ID NO: 3223391 - RNA, 18 nt, Human
cuugaauaguauuguguu

SEQ ID NO: 3223392 - RNA, 13 nt, Human
cuugaauauaaaa

SEQ ID NO: 3223393 - RNA, 15 nt, Human
cuugaauauaaaaaa

SEQ ID NO: 3223394 - RNA, 16 nt, Human
cuugaauauaaaaaau

SEQ ID NO: 3223395 - RNA, 20 nt, Human
cuugaauauaaaaaaucaug

SEQ ID NO: 3223396 - RNA, 22 nt, Human
cuucuucagagacuccugcagg

SEQ ID NO: 3223397 - RNA, 18 nt, Human
cuucuucagagacuccug

SEQ ID NO: 3223398 - RNA, 23 nt, Human
cuucugacccaugcugcccugug

SEQ ID NO: 3223399 - RNA, 15 nt, Human
cuucugacucuuccc

SEQ ID NO: 3223400 - RNA, 17 nt, Human
cuucugacucuucccca

SEQ ID NO: 3223401 - RNA, 16 nt, Human
cuucugacucuucccc

SEQ ID NO: 3223402 - RNA, 23 nt, Human
cuucugacucuuccccaggaagg

SEQ ID NO: 3223403 - RNA, 20 nt, Human
cuucuucagagacuccugca

SEQ ID NO: 3223404 - RNA, 21 nt, Human
cuucuucagagacuccugcag

SEQ ID NO: 3223405 - RNA, 19 nt, Human
cuucuguuuucaaucucgu

SEQ ID NO: 3223406 - RNA, 16 nt, Human
cuucuguuuucaaucu

SEQ ID NO: 3223407 - RNA, 13 nt, Human
cuucuguuuucaa

SEQ ID NO: 3223408 - RNA, 11 nt, Human
cuuggcccagg

SEQ ID NO: 3223409 - RNA, 18 nt, Human
cuugcucucuuuuauucu

SEQ ID NO: 3223410 - RNA, 21 nt, Human
cuuggccagcaaguuagagaa

SEQ ID NO: 3223411 - RNA, 22 nt, Human
cuugacaaagucaagccacaug

SEQ ID NO: 3223412 - RNA, 20 nt, Human
cuugccgucuaccugagggg

SEQ ID NO: 3223413 - RNA, 12 nt, Human
cuugacagggca

SEQ ID NO: 3223414 - RNA, 19 nt, Human
cuugccgucuaccugaggg

SEQ ID NO: 3223415 - RNA, 19 nt, Human
cuugacagagccugcccca

SEQ ID NO: 3223416 - RNA, 16 nt, Human
cuugacagagccugcc

SEQ ID NO: 3223417 - RNA, 12 nt, Human
cuugacagcuca

SEQ ID NO: 3223418 - RNA, 23 nt, Human
cuugccgucuaccugaggggccu

SEQ ID NO: 3223419 - RNA, 12 nt, Human
cuugcucugcug

SEQ ID NO: 3223420 - RNA, 22 nt, Human
cuuucagacucucucugggagg

SEQ ID NO: 3223421 - RNA, 20 nt, Human
cuuuaaagggauggcaagau

SEQ ID NO: 3223422 - RNA, 12 nt, Human
cuuuaaauuaug

SEQ ID NO: 3223423 - RNA, 12 nt, Human
cuuuaacaugcc

SEQ ID NO: 3223424 - RNA, 15 nt, Human
cuuguggacacagcu

SEQ ID NO: 3223425 - RNA, 14 nt, Human
cuuguggacacagc

SEQ ID NO: 3223426 - RNA, 13 nt, Human
cuuguggacacag

SEQ ID NO: 3223427 - RNA, 16 nt, Human
cuugugcacaggcaga

SEQ ID NO: 3223428 - RNA, 15 nt, Human
cuugugcacaggcag

SEQ ID NO: 3223429 - RNA, 22 nt, Human
cuugugcacaggcagagcccag

SEQ ID NO: 3223430 - RNA, 18 nt, Human
cuugugcacaggcagagc

SEQ ID NO: 3223431 - RNA, 16 nt, Human
cuugugacuuuugcuu

SEQ ID NO: 3223432 - RNA, 12 nt, Human
cuugugacuuuu

SEQ ID NO: 3223433 - RNA, 22 nt, Human
cuugugacuuuugcuuuaauuc

SEQ ID NO: 3223434 - RNA, 21 nt, Human
cuugugacuuuugcuuuaauu

SEQ ID NO: 3223435 - RNA, 19 nt, Human
cuugugacuuuugcuuuaa

SEQ ID NO: 3223436 - RNA, 17 nt, Human
cuugugacuuuugcuuu

SEQ ID NO: 3223437 - RNA, 13 nt, Human
cuuuaauuuuagc

SEQ ID NO: 3223438 - RNA, 18 nt, Human
cuuuacaaacaaaagcau

SEQ ID NO: 3223439 - RNA, 19 nt, Human
cuuuaaucagguccugcuc

SEQ ID NO: 3223440 - RNA, 17 nt, Human
cuuuaauaugaaauuuu

SEQ ID NO: 3223441 - RNA, 14 nt, Human
cuuuaauaugaaau

SEQ ID NO: 3223442 - RNA, 18 nt, Human
cuuucaauaggaaaaacu

SEQ ID NO: 3223443 - RNA, 23 nt, Human
cuuuacacggagcggauugcaaa

SEQ ID NO: 3223444 - RNA, 20 nt, Human
cuuucaauaggaaaaacuga

SEQ ID NO: 3223445 - RNA, 21 nt, Human
cuuucaauaggaaaaacugau

SEQ ID NO: 3223446 - RNA, 22 nt, Human
cuuucaauaggaaaaacugauu

SEQ ID NO: 3223447 - RNA, 12 nt, Human
cuuucacuucuu

SEQ ID NO: 3223448 - RNA, 21 nt, Human
cuuucacuucuuucccuuccu

SEQ ID NO: 3223449 - RNA, 20 nt, Human
cuuucacuucuuucccuucc

SEQ ID NO: 3223450 - RNA, 18 nt, Human
cuuucacuucuuucccuu

SEQ ID NO: 3223451 - RNA, 16 nt, Human
cuuucacuucuuuccc

SEQ ID NO: 3223452 - RNA, 15 nt, Human
cuuucacuucuuucc

SEQ ID NO: 3223453 - RNA, 14 nt, Human
cuuucacuucuuuc

SEQ ID NO: 3223454 - RNA, 13 nt, Human
cuuucacuucuuu

SEQ ID NO: 3223455 - RNA, 19 nt, Human
cuuucagacucucucuggg

SEQ ID NO: 3223456 - RNA, 14 nt, Human
cuuugagguggaag

SEQ ID NO: 3223457 - RNA, 17 nt, Human
cuuugagguggaagagg

SEQ ID NO: 3223458 - RNA, 16 nt, Human
cuuugagguggaagag

SEQ ID NO: 3223459 - RNA, 16 nt, Human
cuuugagcuuaagaau

SEQ ID NO: 3223460 - RNA, 14 nt, Human
cuuugagcucccac

SEQ ID NO: 3223461 - RNA, 23 nt, Human
cuuugagcucccacuucugccag

SEQ ID NO: 3223462 - RNA, 23 nt, Human
cuuugagaucuaaaaauaacugu

SEQ ID NO: 3223463 - RNA, 22 nt, Human
cuuugagaucuaaaaauaacug

SEQ ID NO: 3223464 - RNA, 19 nt, Human
cuuugagaucuaaaaauaa

SEQ ID NO: 3223465 - RNA, 17 nt, Human
cuuugagaucuaaaaau

SEQ ID NO: 3223466 - RNA, 16 nt, Human
cuuugagaucuaaaaa

SEQ ID NO: 3223467 - RNA, 18 nt, Human
cuuugacgccaucccagc

SEQ ID NO: 3223468 - RNA, 19 nt, Human
cuuugacgccaucccagcc

SEQ ID NO: 3223469 - RNA, 21 nt, Human
cuuugacgccaucccagcccc

SEQ ID NO: 3223470 - RNA, 22 nt, Human
cuuugacgccaucccagcccca

SEQ ID NO: 3223471 - RNA, 22 nt, Human
cuuugagguggaagagggcugc

SEQ ID NO: 3223472 - RNA, 21 nt, Human
cuuugagugucuuaauuaaaa

SEQ ID NO: 3223473 - RNA, 19 nt, Human
cuuugaguuaagucuaucu

SEQ ID NO: 3223474 - RNA, 22 nt, Human
cuuugauucacauguuuucaaa

SEQ ID NO: 3223475 - RNA, 21 nt, Human
cuuugauucacauguuuucaa

SEQ ID NO: 3223476 - RNA, 20 nt, Human
cuuugauucacauguuuuca

SEQ ID NO: 3223477 - RNA, 17 nt, Human
cuuugauucacauguuu

SEQ ID NO: 3223478 - RNA, 16 nt, Human
cuuugauucacauguu

SEQ ID NO: 3223479 - RNA, 15 nt, Human
cuuugauucacaugu

SEQ ID NO: 3223480 - RNA, 20 nt, Human
cuuucgacuugcauuuuugc

SEQ ID NO: 3223481 - RNA, 21 nt, Human
cuuucgacuugcauuuuugca

SEQ ID NO: 3223482 - RNA, 22 nt, Human
cuuucggggagaggcugaggac

SEQ ID NO: 3223483 - RNA, 13 nt, Human
cuuucuccuuuuu

SEQ ID NO: 3223484 - RNA, 19 nt, Human
cuuucguuuguuuguuuca

SEQ ID NO: 3223485 - RNA, 13 nt, Human
cuuucuaagaaau

SEQ ID NO: 3223486 - RNA, 14 nt, Human
cuuucuaagaaauc

SEQ ID NO: 3223487 - RNA, 16 nt, Human
cuuucuaagaaaucaa

SEQ ID NO: 3223488 - RNA, 18 nt, Human
cuuucuauaauuuuacaa

SEQ ID NO: 3223489 - RNA, 17 nt, Human
cuuucuauaauuuuaca

SEQ ID NO: 3223490 - RNA, 14 nt, Human
cuuucuauaauuuu

SEQ ID NO: 3223491 - RNA, 12 nt, Human
cuuuucaaaauc

SEQ ID NO: 3223492 - RNA, 15 nt, Human
cuuuucaaaacauuu

SEQ ID NO: 3223493 - RNA, 17 nt, Human
cuuuucaaguauuuaag

SEQ ID NO: 3223494 - RNA, 14 nt, Human
cuuuucaaguauuu

SEQ ID NO: 3223495 - RNA, 20 nt, Human
cuuuggucuacacugugcug

SEQ ID NO: 3223496 - RNA, 18 nt, Human
cuuuggucacuuuuagau

SEQ ID NO: 3223497 - RNA, 15 nt, Human
cuuuggucacuuuua

SEQ ID NO: 3223498 - RNA, 16 nt, Human
cuuuggucuacacugu

SEQ ID NO: 3223499 - RNA, 14 nt, Human
cuuugggugcuguu

SEQ ID NO: 3223500 - RNA, 23 nt, Human
cuuuuagaaaagggaguuuaaaa

SEQ ID NO: 3223501 - RNA, 19 nt, Human
cuuuuauuuagcaccaggg

SEQ ID NO: 3223502 - RNA, 19 nt, Human
cugugucuugcaauggcag

SEQ ID NO: 3223503 - RNA, 16 nt, Human
cugugucuugcaaugg

SEQ ID NO: 3223504 - RNA, 15 nt, Human
cuguucacucuacuu

SEQ ID NO: 3223505 - RNA, 13 nt, Human
cuguucacucuac

SEQ ID NO: 3223506 - RNA, 16 nt, Human
cuguucagauuggaca

SEQ ID NO: 3223507 - RNA, 22 nt, Human
cugugucugcccaaugaauaau

SEQ ID NO: 3223508 - RNA, 13 nt, Human
cuguucagcucca

SEQ ID NO: 3223509 - RNA, 14 nt, Human
cuguucagcguuuu

SEQ ID NO: 3223510 - RNA, 17 nt, Human
cuguucagcguuuugca

SEQ ID NO: 3223511 - RNA, 14 nt, Human
cuguguaagcugug

SEQ ID NO: 3223512 - RNA, 19 nt, Human
cugugcugagucugaaggc

SEQ ID NO: 3223513 - RNA, 11 nt, Human
cugugcugccc

SEQ ID NO: 3223514 - RNA, 20 nt, Human
cugugcugagucugaaggcu

SEQ ID NO: 3223515 - RNA, 22 nt, Human
cugugcugagucugaaggcugg

SEQ ID NO: 3223516 - RNA, 14 nt, Human
cugugucucccuuc

SEQ ID NO: 3223517 - RNA, 19 nt, Human
cugugucucccuucauccu

SEQ ID NO: 3223518 - RNA, 14 nt, Human
cugugucuugcaau

SEQ ID NO: 3223519 - RNA, 21 nt, Human
cugugucagguggggcagcuu

SEQ ID NO: 3223520 - RNA, 20 nt, Human
cugugucagcauagaaguaa

SEQ ID NO: 3223521 - RNA, 19 nt, Human
cugugucagguggggcagc

SEQ ID NO: 3223522 - RNA, 21 nt, Human
cugugacaucucuauucccca

SEQ ID NO: 3223523 - RNA, 17 nt, Human
cugugacuucagcucug

SEQ ID NO: 3223524 - RNA, 17 nt, Human
cugugacuaggaaaaaa

SEQ ID NO: 3223525 - RNA, 22 nt, Human
cugugacuucagcucuguuuua

SEQ ID NO: 3223526 - RNA, 22 nt, Human
cugugcguggggcucccgccuc

SEQ ID NO: 3223527 - RNA, 15 nt, Human
cugugcguggggcuc

SEQ ID NO: 3223528 - RNA, 14 nt, Human
cugugcguggggcu

SEQ ID NO: 3223529 - RNA, 14 nt, Human
cuguugcugccuca

SEQ ID NO: 3223530 - RNA, 17 nt, Human
cuguugcugccucaugc

SEQ ID NO: 3223531 - RNA, 15 nt, Human
cuguugcugccucau

SEQ ID NO: 3223532 - RNA, 16 nt, Human
cuguugcugccucaug

SEQ ID NO: 3223533 - RNA, 13 nt, Human
cuuacacaauggu

SEQ ID NO: 3223534 - RNA, 21 nt, Human
cuuacacuggcaaugguaguu

SEQ ID NO: 3223535 - RNA, 23 nt, Human
cuuaaaauuugaaacauugcuuu

SEQ ID NO: 3223536 - RNA, 20 nt, Human
cuuaaaauuugaaacauugc

SEQ ID NO: 3223537 - RNA, 22 nt, Human
cuuaaagggcccaaugaauuau

SEQ ID NO: 3223538 - RNA, 17 nt, Human
cuguugggccaggagcc

SEQ ID NO: 3223539 - RNA, 20 nt, Human
cuguugggccaggagccucc

SEQ ID NO: 3223540 - RNA, 16 nt, Human
cuguugggccaggagc

SEQ ID NO: 3223541 - RNA, 20 nt, Human
cuuaaaauauuccugcauuu

SEQ ID NO: 3223542 - RNA, 18 nt, Human
cuuaaaauauuccugcau

SEQ ID NO: 3223543 - RNA, 13 nt, Human
cuuaaaauuugaa

SEQ ID NO: 3223544 - RNA, 19 nt, Human
cuuaaaauuugaaacauug

SEQ ID NO: 3223545 - RNA, 16 nt, Human
cuuaaaauuugaaaca

SEQ ID NO: 3223546 - RNA, 15 nt, Human
cuuaaaauuugaaac

SEQ ID NO: 3223547 - RNA, 14 nt, Human
cuuaaaauuugaaa

SEQ ID NO: 3223548 - RNA, 13 nt, Human
cuuaccucggugc

SEQ ID NO: 3223549 - RNA, 16 nt, Human
cuuaccuacuuucuuc

SEQ ID NO: 3223550 - RNA, 18 nt, Human
cuuaccuacuuucuucag

SEQ ID NO: 3223551 - RNA, 14 nt, Human
cuuaccgacaagca

SEQ ID NO: 3223552 - RNA, 19 nt, Human
cuuaccucggugccuuccu

SEQ ID NO: 3223553 - RNA, 21 nt, Human
cuuaccucggugccuuccucu

SEQ ID NO: 3223554 - RNA, 19 nt, Human
cuuagauguauauauuucc

SEQ ID NO: 3223555 - RNA, 17 nt, Human
cuuaccugaguugaaga

SEQ ID NO: 3223556 - RNA, 21 nt, Human
cuuauggaacacucugagacu

SEQ ID NO: 3223557 - RNA, 14 nt, Human
cuuaugggcugggu

SEQ ID NO: 3223558 - RNA, 21 nt, Human
cuuaugggcuggguucuaccc

SEQ ID NO: 3223559 - RNA, 13 nt, Human
cuuauugcccacg

SEQ ID NO: 3223560 - RNA, 12 nt, Human
cuuauugcccac

SEQ ID NO: 3223561 - RNA, 16 nt, Human
cuuauuacauuuuauu

SEQ ID NO: 3223562 - RNA, 23 nt, Human
cuuauuaaaguuucaaaaaucug

SEQ ID NO: 3223563 - RNA, 22 nt, Human
cuuauuaaaguuucaaaaaucu

SEQ ID NO: 3223564 - RNA, 20 nt, Human
cuuauuaaaguuucaaaaau

SEQ ID NO: 3223565 - RNA, 19 nt, Human
cuuauuaaaguuucaaaaa

SEQ ID NO: 3223566 - RNA, 18 nt, Human
cuuauuaaaguuucaaaa

SEQ ID NO: 3223567 - RNA, 17 nt, Human
cuuauuaaaguuucaaa

SEQ ID NO: 3223568 - RNA, 16 nt, Human
cuuauuaaaguuucaa

SEQ ID NO: 3223569 - RNA, 15 nt, Human
cuuauuaaaguuuca

SEQ ID NO: 3223570 - RNA, 14 nt, Human
cuuauuaaaguuuc

SEQ ID NO: 3223571 - RNA, 13 nt, Human
cuuauuaaaguuu

SEQ ID NO: 3223572 - RNA, 22 nt, Human
cuuaugggcuggguucuaccca

SEQ ID NO: 3223573 - RNA, 23 nt, Human
cuuaugggcuggguucuacccag

SEQ ID NO: 3223574 - RNA, 21 nt, Human
cuuauggguagggcucugaca

SEQ ID NO: 3223575 - RNA, 18 nt, Human
cuuauuaaaacacuucau

SEQ ID NO: 3223576 - RNA, 14 nt, Human
cuuauguugaaaaa

SEQ ID NO: 3223577 - RNA, 16 nt, Human
cuuauguugaaaaaau

SEQ ID NO: 3223578 - RNA, 17 nt, Human
cuuauguugaaaaaauu

SEQ ID NO: 3223579 - RNA, 18 nt, Human
cuuauguugaaaaaauuu

SEQ ID NO: 3223580 - RNA, 18 nt, Human
cuuagcagggaaacagcu

SEQ ID NO: 3223581 - RNA, 18 nt, Human
cuuccagugaggcucugc

SEQ ID NO: 3223582 - RNA, 17 nt, Human
cuuccagugaggcucug

SEQ ID NO: 3223583 - RNA, 19 nt, Human
cuuccagugaggcucugcc

SEQ ID NO: 3223584 - RNA, 20 nt, Human
cuuccagugaggcucugccc

SEQ ID NO: 3223585 - RNA, 16 nt, Human
cuuccauggacuuugu

SEQ ID NO: 3223586 - RNA, 17 nt, Human
cuuccauggacuuuguu

SEQ ID NO: 3223587 - RNA, 16 nt, Human
cuuccaugucgccucu

SEQ ID NO: 3223588 - RNA, 15 nt, Human
cuuccaugucgccuc

SEQ ID NO: 3223589 - RNA, 20 nt, Human
cuuccaugucgccucugcau

SEQ ID NO: 3223590 - RNA, 19 nt, Human
cuuccaugucgccucugca

SEQ ID NO: 3223591 - RNA, 18 nt, Human
cuuccaugucgccucugc

SEQ ID NO: 3223592 - RNA, 17 nt, Human
cuuccaugucgccucug

SEQ ID NO: 3223593 - RNA, 22 nt, Human
cuucaucucccaaagugcuggg

SEQ ID NO: 3223594 - RNA, 16 nt, Human
cuucauccuccucaga

SEQ ID NO: 3223595 - RNA, 23 nt, Human
cuucagagacuccugcaggcagc

SEQ ID NO: 3223596 - RNA, 17 nt, Human
cuucaguggcagcugcu

SEQ ID NO: 3223597 - RNA, 18 nt, Human
cuucaguggcagcugcuu

SEQ ID NO: 3223598 - RNA, 17 nt, Human
cuucaguuaagccuuug

SEQ ID NO: 3223599 - RNA, 13 nt, Human
cuucaucccucug

SEQ ID NO: 3223600 - RNA, 18 nt, Human
cuucaguuaagccuuugg

SEQ ID NO: 3223601 - RNA, 15 nt, Human
cuucauccuccucag

SEQ ID NO: 3223602 - RNA, 16 nt, Human
cuucauccccucagaa

SEQ ID NO: 3223603 - RNA, 11 nt, Human
cuucagacaua

SEQ ID NO: 3223604 - RNA, 21 nt, Human
cuucacuucugacucuucccc

SEQ ID NO: 3223605 - RNA, 20 nt, Human
cuucacuucugacucuuccc

SEQ ID NO: 3223606 - RNA, 14 nt, Human
cuucacuucugacu

SEQ ID NO: 3223607 - RNA, 13 nt, Human
cuucacuucugac

SEQ ID NO: 3223608 - RNA, 16 nt, Human
cuucagagacuccugc

SEQ ID NO: 3223609 - RNA, 21 nt, Human
cuucagagacuccugcaggca

SEQ ID NO: 3223610 - RNA, 22 nt, Human
cuucagagacuccugcaggcag

SEQ ID NO: 3223611 - RNA, 17 nt, Human
cuucaccuuugucccca

SEQ ID NO: 3223612 - RNA, 18 nt, Human
cuuauugcccacgcugga

SEQ ID NO: 3223613 - RNA, 14 nt, Human
cuucaccuuugucc

SEQ ID NO: 3223614 - RNA, 13 nt, Human
cugcauuggcuuu

SEQ ID NO: 3223615 - RNA, 18 nt, Human
cugcauugggugaucauu

SEQ ID NO: 3223616 - RNA, 16 nt, Human
cugcccuuaccugcca

SEQ ID NO: 3223617 - RNA, 12 nt, Human
cugcccuuaccu

SEQ ID NO: 3223618 - RNA, 19 nt, Human
cugccccuccucucugccc

SEQ ID NO: 3223619 - RNA, 19 nt, Human
cugcccugugggcccccaa

SEQ ID NO: 3223620 - RNA, 17 nt, Human
cugccccuccucucugc

SEQ ID NO: 3223621 - RNA, 18 nt, Human
cugccccuccucucugcc

SEQ ID NO: 3223622 - RNA, 17 nt, Human
cugccccucccuucaac

SEQ ID NO: 3223623 - RNA, 14 nt, Human
cugccccucccuuc

SEQ ID NO: 3223624 - RNA, 13 nt, Human
cugccccucccuu

SEQ ID NO: 3223625 - RNA, 20 nt, Human
cugccagggacagagggggu

SEQ ID NO: 3223626 - RNA, 22 nt, Human
cugccagggacagagggggugg

SEQ ID NO: 3223627 - RNA, 23 nt, Human
cugccagggacagaggggguggc

SEQ ID NO: 3223628 - RNA, 13 nt, Human
cugccaguuuugu

SEQ ID NO: 3223629 - RNA, 12 nt, Human
cugccaguuuug

SEQ ID NO: 3223630 - RNA, 22 nt, Human
cugccaguggggccugaggcuc

SEQ ID NO: 3223631 - RNA, 20 nt, Human
cugccaguggggccugaggc

SEQ ID NO: 3223632 - RNA, 17 nt, Human
cugccagucccccugcc

SEQ ID NO: 3223633 - RNA, 21 nt, Human
cugccagucccccugccccag

SEQ ID NO: 3223634 - RNA, 20 nt, Human
cugccagucccccugcccca

SEQ ID NO: 3223635 - RNA, 22 nt, Human
cugccagucccccugccccagg

SEQ ID NO: 3223636 - RNA, 19 nt, Human
cugccauccagguucagcu

SEQ ID NO: 3223637 - RNA, 18 nt, Human
cugccauccagguucagc

SEQ ID NO: 3223638 - RNA, 16 nt, Human
cugccauccagguuca

SEQ ID NO: 3223639 - RNA, 16 nt, Human
cugccauauucuguug

SEQ ID NO: 3223640 - RNA, 12 nt, Human
cugccauccagg

SEQ ID NO: 3223641 - RNA, 13 nt, Human
cugccccccagcc

SEQ ID NO: 3223642 - RNA, 19 nt, Human
cugcaaauccuugugggaa

SEQ ID NO: 3223643 - RNA, 16 nt, Human
cugcaaauccuugugg

SEQ ID NO: 3223644 - RNA, 22 nt, Human
cugcaaaguacagguacuuugu

SEQ ID NO: 3223645 - RNA, 21 nt, Human
cugcaaaguacagguacuuug

SEQ ID NO: 3223646 - RNA, 23 nt, Human
cugcaaaguacagguacuuuguc

SEQ ID NO: 3223647 - RNA, 20 nt, Human
cugcaaccuccgccucuugg

SEQ ID NO: 3223648 - RNA, 21 nt, Human
cugcaaccaaacucccaucag

SEQ ID NO: 3223649 - RNA, 19 nt, Human
cugcaaccugauugugucu

SEQ ID NO: 3223650 - RNA, 21 nt, Human
cugcaaccugauugugucucu

SEQ ID NO: 3223651 - RNA, 14 nt, Human
cugcaaccugauug

SEQ ID NO: 3223652 - RNA, 22 nt, Human
cugcaaccuccgccucuugggu

SEQ ID NO: 3223653 - RNA, 18 nt, Human
cugcaagaauugaagcag

SEQ ID NO: 3223654 - RNA, 19 nt, Human
cugcaacuuguaaaugugg

SEQ ID NO: 3223655 - RNA, 18 nt, Human
cugcaacuuguaaaugug

SEQ ID NO: 3223656 - RNA, 22 nt, Human
cugcaaccugauugugucucuu

SEQ ID NO: 3223657 - RNA, 17 nt, Human
cugcaaccuucgccacc

SEQ ID NO: 3223658 - RNA, 19 nt, Human
cugcaaccuucgccaccug

SEQ ID NO: 3223659 - RNA, 20 nt, Human
cugcaaccuucgccaccugg

SEQ ID NO: 3223660 - RNA, 22 nt, Human
cugcaaccuucgccaccugggu

SEQ ID NO: 3223661 - RNA, 20 nt, Human
cugcaaccuuguuuauuaaa

SEQ ID NO: 3223662 - RNA, 23 nt, Human
cugcaccgggccacagagaaagu

SEQ ID NO: 3223663 - RNA, 20 nt, Human
cugcaccgggccacagagaa

SEQ ID NO: 3223664 - RNA, 12 nt, Human
cugcaagggagu

SEQ ID NO: 3223665 - RNA, 20 nt, Human
cugcaagaauugaagcagga

SEQ ID NO: 3223666 - RNA, 16 nt, Human
cugaugcuucuucaga

SEQ ID NO: 3223667 - RNA, 17 nt, Human
cugaugcuucuucagag

SEQ ID NO: 3223668 - RNA, 14 nt, Human
cucuuaugggcugg

SEQ ID NO: 3223669 - RNA, 22 nt, Human
cucuuauaucuaaaucugucca

SEQ ID NO: 3223670 - RNA, 15 nt, Human
cucuuaugggcuggg

SEQ ID NO: 3223671 - RNA, 17 nt, Human
cugaugaccaauuuuaa

SEQ ID NO: 3223672 - RNA, 22 nt, Human
cugaugacccccccagcuucac

SEQ ID NO: 3223673 - RNA, 21 nt, Human
cugaugacccccccagcuuca

SEQ ID NO: 3223674 - RNA, 21 nt, Human
cugaugggcaacccccagccu

SEQ ID NO: 3223675 - RNA, 18 nt, Human
cugaugggcaacccccag

SEQ ID NO: 3223676 - RNA, 18 nt, Human
cugaugcuucuucagaga

SEQ ID NO: 3223677 - RNA, 19 nt, Human
cugaugcuucuucagagac

SEQ ID NO: 3223678 - RNA, 20 nt, Human
cugaugcuucuucagagacu

SEQ ID NO: 3223679 - RNA, 18 nt, Human
cugauggaauuuuuuugu

SEQ ID NO: 3223680 - RNA, 22 nt, Human
cugcaaaggguaucaggugcug

SEQ ID NO: 3223681 - RNA, 15 nt, Human
cugcaaaggaaauac

SEQ ID NO: 3223682 - RNA, 21 nt, Human
cugcaaaggguaucaggugcu

SEQ ID NO: 3223683 - RNA, 17 nt, Human
cugcaaagcccagcuug

SEQ ID NO: 3223684 - RNA, 18 nt, Human
cugcaaagcccagcuuga

SEQ ID NO: 3223685 - RNA, 23 nt, Human
cugaugggcaacccccagccugc

SEQ ID NO: 3223686 - RNA, 22 nt, Human
cugaugggcaacccccagccug

SEQ ID NO: 3223687 - RNA, 24 nt, Human
cugaugggcaacccccagccugcu

SEQ ID NO: 3223688 - RNA, 17 nt, Human
cugcaggaaauggcugu

SEQ ID NO: 3223689 - RNA, 12 nt, Human
cugcagcuuugu

SEQ ID NO: 3223690 - RNA, 20 nt, Human
cugcaggauucucaccagcu

SEQ ID NO: 3223691 - RNA, 19 nt, Human
cugcaggauucucaccagc

SEQ ID NO: 3223692 - RNA, 13 nt, Human
cugcaggcagcca

SEQ ID NO: 3223693 - RNA, 14 nt, Human
cugcaggcagccag

SEQ ID NO: 3223694 - RNA, 15 nt, Human
cugcaggcagccagg

SEQ ID NO: 3223695 - RNA, 16 nt, Human
cugcaggcagccaggc

SEQ ID NO: 3223696 - RNA, 17 nt, Human
cugcaggcagccaggcc

SEQ ID NO: 3223697 - RNA, 18 nt, Human
cugcaggcagccaggcca

SEQ ID NO: 3223698 - RNA, 19 nt, Human
cugcaggcagccaggccac

SEQ ID NO: 3223699 - RNA, 20 nt, Human
cugcaggcagccaggccaca

SEQ ID NO: 3223700 - RNA, 17 nt, Human
cugcacuccagccugag

SEQ ID NO: 3223701 - RNA, 20 nt, Human
cugcacuccagccugagcga

SEQ ID NO: 3223702 - RNA, 16 nt, Human
cugcacuccagccuga

SEQ ID NO: 3223703 - RNA, 15 nt, Human
cugcacuccagccug

SEQ ID NO: 3223704 - RNA, 13 nt, Human
cugcacuccagcc

SEQ ID NO: 3223705 - RNA, 23 nt, Human
cugcacuauagccuaggugacag

SEQ ID NO: 3223706 - RNA, 22 nt, Human
cugcacuauagccuaggugaca

SEQ ID NO: 3223707 - RNA, 20 nt, Human
cugcacuauagccuagguga

SEQ ID NO: 3223708 - RNA, 18 nt, Human
cugcacuauagccuaggu

SEQ ID NO: 3223709 - RNA, 17 nt, Human
cugcacuauagccuagg

SEQ ID NO: 3223710 - RNA, 16 nt, Human
cugcacuauagccuag

SEQ ID NO: 3223711 - RNA, 17 nt, Human
cugcacuccagccuggg

SEQ ID NO: 3223712 - RNA, 16 nt, Human
cugcacuccagccugg

SEQ ID NO: 3223713 - RNA, 18 nt, Human
cugcacuccagccugggu

SEQ ID NO: 3223714 - RNA, 24 nt, Human
cugcagccucaaccuccugggcua

SEQ ID NO: 3223715 - RNA, 23 nt, Human
cugcagccucaaccuccugggcu

SEQ ID NO: 3223716 - RNA, 18 nt, Human
cugcagcucucaugcugc

SEQ ID NO: 3223717 - RNA, 23 nt, Human
cugcagcucccucaaagaggcag

SEQ ID NO: 3223718 - RNA, 19 nt, Human
cugcagcucccucaaagag

SEQ ID NO: 3223719 - RNA, 11 nt, Human
cugcagcuccc

SEQ ID NO: 3223720 - RNA, 14 nt, Human
cugcagcucccuca

SEQ ID NO: 3223721 - RNA, 13 nt, Human
cugcagcucccuc

SEQ ID NO: 3223722 - RNA, 17 nt, Human
cugcagcucucaugcug

SEQ ID NO: 3223723 - RNA, 21 nt, Human
cugcagccuccgcuucccugg

SEQ ID NO: 3223724 - RNA, 20 nt, Human
cugcagccuccgcuucccug

SEQ ID NO: 3223725 - RNA, 19 nt, Human
cugcagccuccgcuucccu

SEQ ID NO: 3223726 - RNA, 13 nt, Human
cugcagccucccu

SEQ ID NO: 3223727 - RNA, 22 nt, Human
cugcugugggcacaggucaggc

SEQ ID NO: 3223728 - RNA, 19 nt, Human
cugcugugggcacagguca

SEQ ID NO: 3223729 - RNA, 19 nt, Human
cugcugugaagcuggaacu

SEQ ID NO: 3223730 - RNA, 19 nt, Human
cugcugucuuuucuuugcc

SEQ ID NO: 3223731 - RNA, 17 nt, Human
cugcugagucuguucug

SEQ ID NO: 3223732 - RNA, 22 nt, Human
cugcugagucuguucugguaau

SEQ ID NO: 3223733 - RNA, 20 nt, Human
cugcugauaauguauaugaa

SEQ ID NO: 3223734 - RNA, 19 nt, Human
cugcugaguccgaccuggc

SEQ ID NO: 3223735 - RNA, 22 nt, Human
cugcugaguccgaccuggccug

SEQ ID NO: 3223736 - RNA, 21 nt, Human
cugcugaguccgaccuggccu

SEQ ID NO: 3223737 - RNA, 22 nt, Human
cugcugaugacccccccagcuu

SEQ ID NO: 3223738 - RNA, 13 nt, Human
cugcugaaggcuc

SEQ ID NO: 3223739 - RNA, 14 nt, Human
cugcugaaggcucg

SEQ ID NO: 3223740 - RNA, 15 nt, Human
cugcugaaggcucga

SEQ ID NO: 3223741 - RNA, 12 nt, Human
cugcugacagug

SEQ ID NO: 3223742 - RNA, 11 nt, Human
cugcugacagu

SEQ ID NO: 3223743 - RNA, 12 nt, Human
cugcugaggguc

SEQ ID NO: 3223744 - RNA, 13 nt, Human
cugcugagggucc

SEQ ID NO: 3223745 - RNA, 14 nt, Human
cugcugagggucca

SEQ ID NO: 3223746 - RNA, 16 nt, Human
cugcugaggguccaga

SEQ ID NO: 3223747 - RNA, 19 nt, Human
cugcugagucccaggcuga

SEQ ID NO: 3223748 - RNA, 23 nt, Human
cugcugagucccaggcugagccu

SEQ ID NO: 3223749 - RNA, 15 nt, Human
cugcugacaguguug

SEQ ID NO: 3223750 - RNA, 13 nt, Human
cugcugacagugu

SEQ ID NO: 3223751 - RNA, 14 nt, Human
cugcucacauaucu

SEQ ID NO: 3223752 - RNA, 19 nt, Human
cugcucacauaucugucau

SEQ ID NO: 3223753 - RNA, 16 nt, Human
cugcucacauaucugu

SEQ ID NO: 3223754 - RNA, 12 nt, Human
cugcugaaggcu

SEQ ID NO: 3223755 - RNA, 14 nt, Human
cuggaucugugagg

SEQ ID NO: 3223756 - RNA, 20 nt, Human
cuggaucucuuaagacagca

SEQ ID NO: 3223757 - RNA, 16 nt, Human
cuggaguucugguucc

SEQ ID NO: 3223758 - RNA, 17 nt, Human
cuggaguucugguuccu

SEQ ID NO: 3223759 - RNA, 15 nt, Human
cuggaguucugguuc

SEQ ID NO: 3223760 - RNA, 21 nt, Human
cugcuuaccuacuuucuucag

SEQ ID NO: 3223761 - RNA, 12 nt, Human
cugcuuaauuca

SEQ ID NO: 3223762 - RNA, 13 nt, Human
cugcuuaauucaa

SEQ ID NO: 3223763 - RNA, 22 nt, Human
cuggaugcagccucacaguccu

SEQ ID NO: 3223764 - RNA, 22 nt, Human
cuggaugaguagcgcuauaguu

SEQ ID NO: 3223765 - RNA, 22 nt, Human
cuggaugccucauuaugucaac

SEQ ID NO: 3223766 - RNA, 13 nt, Human
cuggcccugugcc

SEQ ID NO: 3223767 - RNA, 12 nt, Human
cuggcccuuccu

SEQ ID NO: 3223768 - RNA, 23 nt, Human
cuggcucacacuuggcucugagg

SEQ ID NO: 3223769 - RNA, 15 nt, Human
cugggacuacaggca

SEQ ID NO: 3223770 - RNA, 13 nt, Human
cugggacuacagg

SEQ ID NO: 3223771 - RNA, 21 nt, Human
cugggaccacaggugcccgcc

SEQ ID NO: 3223772 - RNA, 14 nt, Human
cuggcucuacacau

SEQ ID NO: 3223773 - RNA, 13 nt, Human
cuggcucuacaca

SEQ ID NO: 3223774 - RNA, 18 nt, Human
cugggacaugggaaaggg

SEQ ID NO: 3223775 - RNA, 22 nt, Human
cugggacaugggaaaggggaag

SEQ ID NO: 3223776 - RNA, 14 nt, Human
cugggacaugggaa

SEQ ID NO: 3223777 - RNA, 17 nt, Human
cugggacagggagcagc

SEQ ID NO: 3223778 - RNA, 16 nt, Human
cuggcucuacacauau

SEQ ID NO: 3223779 - RNA, 20 nt, Human
cugggcagguuggugggggc

SEQ ID NO: 3223780 - RNA, 20 nt, Human
cugggcagaggaaagcaaag

SEQ ID NO: 3223781 - RNA, 13 nt, Human
cugggcagaggaa

SEQ ID NO: 3223782 - RNA, 16 nt, Human
cugggcagaggaaagc

SEQ ID NO: 3223783 - RNA, 12 nt, Human
cugggcagagga

SEQ ID NO: 3223784 - RNA, 13 nt, Human
cuggggagaaagu

SEQ ID NO: 3223785 - RNA, 22 nt, Human
cuggggaccagcuuggcucagg

SEQ ID NO: 3223786 - RNA, 23 nt, Human
cugggcccacccaagcaggaggc

SEQ ID NO: 3223787 - RNA, 21 nt, Human
cugggcccacccaagcaggag

SEQ ID NO: 3223788 - RNA, 18 nt, Human
cugggcccacccaagcag

SEQ ID NO: 3223789 - RNA, 15 nt, Human
cugggcccacauccg

SEQ ID NO: 3223790 - RNA, 18 nt, Human
cuggguggcaccagcagc

SEQ ID NO: 3223791 - RNA, 20 nt, Human
cuggguggcaccagcagccu

SEQ ID NO: 3223792 - RNA, 17 nt, Human
cuggggcgcgugaggcc

SEQ ID NO: 3223793 - RNA, 13 nt, Human
cugggugcaggag

SEQ ID NO: 3223794 - RNA, 22 nt, Human
cugggugcaggagcgcucccuu

SEQ ID NO: 3223795 - RNA, 14 nt, Human
cugggugcaggagc

SEQ ID NO: 3223796 - RNA, 15 nt, Human
cuggguguggcgcag

SEQ ID NO: 3223797 - RNA, 14 nt, Human
cuggguguggcgca

SEQ ID NO: 3223798 - RNA, 21 nt, Human
cuggguggcaccagcagccug

SEQ ID NO: 3223799 - RNA, 12 nt, Human
cuggugccucac

SEQ ID NO: 3223800 - RNA, 21 nt, Human
cuggugccucaccccuugcca

SEQ ID NO: 3223801 - RNA, 16 nt, Human
gacacagcucuucucc

SEQ ID NO: 3223802 - RNA, 14 nt, Human
gacacagcucuucu

SEQ ID NO: 3223803 - RNA, 13 nt, Human
gacacagcucuuc

SEQ ID NO: 3223804 - RNA, 23 nt, Human
gacacagcucuucuccaggcugu

SEQ ID NO: 3223805 - RNA, 22 nt, Human
gacacagcucuucuccaggcug

SEQ ID NO: 3223806 - RNA, 21 nt, Human
gacagaaagcagaacagugau

SEQ ID NO: 3223807 - RNA, 17 nt, Human
gacagcccgggcucugc

SEQ ID NO: 3223808 - RNA, 15 nt, Human
gacagugaauuuggg

SEQ ID NO: 3223809 - RNA, 18 nt, Human
gacagcccgggcucugcc

SEQ ID NO: 3223810 - RNA, 19 nt, Human
gacagcccgggcucugccu

SEQ ID NO: 3223811 - RNA, 21 nt, Human
gacagugagacucugucucag

SEQ ID NO: 3223812 - RNA, 18 nt, Human
gacauugauuugauuuuu

SEQ ID NO: 3223813 - RNA, 19 nt, Human
gacauuguagagcuucugg

SEQ ID NO: 3223814 - RNA, 15 nt, Human
gacauugcggacagc

SEQ ID NO: 3223815 - RNA, 14 nt, Human
gacauugcggacag

SEQ ID NO: 3223816 - RNA, 19 nt, Human
gacauuguuggccaaagcc

SEQ ID NO: 3223817 - RNA, 14 nt, Human
gacauuuagaagaa

SEQ ID NO: 3223818 - RNA, 15 nt, Human
gacauuuagaagaaa

SEQ ID NO: 3223819 - RNA, 17 nt, Human
gacauuucuaauuccug

SEQ ID NO: 3223820 - RNA, 18 nt, Human
gaccagggauuuccauga

SEQ ID NO: 3223821 - RNA, 17 nt, Human
gaccagcuuggcucagg

SEQ ID NO: 3223822 - RNA, 12 nt, Human
gaccaucccuga

SEQ ID NO: 3223823 - RNA, 13 nt, Human
gaccaucccugaa

SEQ ID NO: 3223824 - RNA, 18 nt, Human
gaccaucccugaaggccc

SEQ ID NO: 3223825 - RNA, 19 nt, Human
gaccaucccugaaggcccc

SEQ ID NO: 3223826 - RNA, 20 nt, Human
gaccagggauuuccaugaug

SEQ ID NO: 3223827 - RNA, 23 nt, Human
gaccagggacagauccagcaggc

SEQ ID NO: 3223828 - RNA, 13 nt, Human
gaccauacuaauu

SEQ ID NO: 3223829 - RNA, 23 nt, Human
gaccaucauuucaccugcugcuu

SEQ ID NO: 3223830 - RNA, 19 nt, Human
gacuguggguuuguggggg

SEQ ID NO: 3223831 - RNA, 21 nt, Human
gacuguggguuugugggggga

SEQ ID NO: 3223832 - RNA, 19 nt, Human
gacugugauuugaauccag

SEQ ID NO: 3223833 - RNA, 16 nt, Human
gacuguggagacugcu

SEQ ID NO: 3223834 - RNA, 19 nt, Human
gacuguggagacugcuccu

SEQ ID NO: 3223835 - RNA, 18 nt, Human
gacuguggagacugcucc

SEQ ID NO: 3223836 - RNA, 14 nt, Human
gacuuguuuuuguu

SEQ ID NO: 3223837 - RNA, 23 nt, Human
gacuguacuccucccaggcgccc

SEQ ID NO: 3223838 - RNA, 18 nt, Human
gacuguacuccucccagg

SEQ ID NO: 3223839 - RNA, 13 nt, Human
gacugaauuccaa

SEQ ID NO: 3223840 - RNA, 12 nt, Human
gacugaauucca

SEQ ID NO: 3223841 - RNA, 16 nt, Human
gacucagaaacuccau

SEQ ID NO: 3223842 - RNA, 15 nt, Human
gacucagaaacucca

SEQ ID NO: 3223843 - RNA, 15 nt, Human
gacucaccuccccca

SEQ ID NO: 3223844 - RNA, 22 nt, Human
gacucaccucccccaucucuuc

SEQ ID NO: 3223845 - RNA, 12 nt, Human
gacucugccucc

SEQ ID NO: 3223846 - RNA, 16 nt, Human
gacucuugaguuguuu

SEQ ID NO: 3223847 - RNA, 18 nt, Human
gacucuugacucuugccu

SEQ ID NO: 3223848 - RNA, 10 nt, Human
gacucuuccc

SEQ ID NO: 3223849 - RNA, 19 nt, Human
gacucugucucaaaaaaac

SEQ ID NO: 3223850 - RNA, 15 nt, Human
gacuuuagcuuucug

SEQ ID NO: 3223851 - RNA, 22 nt, Human
gacuuuagccuaccuaacccag

SEQ ID NO: 3223852 - RNA, 11 nt, Human
gacuuuauaaa

SEQ ID NO: 3223853 - RNA, 15 nt, Human
gacuuuauuauuuau

SEQ ID NO: 3223854 - RNA, 21 nt, Human
gacuuucaaaguggaugcaau

SEQ ID NO: 3223855 - RNA, 13 nt, Human
gacuuuauuauuu

SEQ ID NO: 3223856 - RNA, 14 nt, Human
gacuuuauuauuua

SEQ ID NO: 3223857 - RNA, 11 nt, Human
gacuuuauuag

SEQ ID NO: 3223858 - RNA, 11 nt, Human
gaccugaggcc

SEQ ID NO: 3223859 - RNA, 13 nt, Human
gaccugaggcccu

SEQ ID NO: 3223860 - RNA, 16 nt, Human
gacgccaucccagccc

SEQ ID NO: 3223861 - RNA, 18 nt, Human
gaccucuagcccugcccg

SEQ ID NO: 3223862 - RNA, 13 nt, Human
gaccucugccuga

SEQ ID NO: 3223863 - RNA, 20 nt, Human
gaccaucccugaaggccccg

SEQ ID NO: 3223864 - RNA, 19 nt, Human
gaccaucuggaauugguuu

SEQ ID NO: 3223865 - RNA, 15 nt, Human
gacgcucucuggccu

SEQ ID NO: 3223866 - RNA, 16 nt, Human
gacgcuacccgggaag

SEQ ID NO: 3223867 - RNA, 18 nt, Human
gacgcuacccgggaaggg

SEQ ID NO: 3223868 - RNA, 17 nt, Human
gacgccaucccagcccc

SEQ ID NO: 3223869 - RNA, 18 nt, Human
gacgccaucccagcccca

SEQ ID NO: 3223870 - RNA, 15 nt, Human
gacgccaucccagcc

SEQ ID NO: 3223871 - RNA, 22 nt, Human
gaccugaggacauggcuucuga

SEQ ID NO: 3223872 - RNA, 19 nt, Human
gaccugaggacauggcuuc

SEQ ID NO: 3223873 - RNA, 16 nt, Human
gacgcucucuggccuu

SEQ ID NO: 3223874 - RNA, 17 nt, Human
gacgcucucuggccuuc

SEQ ID NO: 3223875 - RNA, 22 nt, Human
gaagcaagaggcaagcugaaau

SEQ ID NO: 3223876 - RNA, 23 nt, Human
gaagcaagaggcaagcugaaauu

SEQ ID NO: 3223877 - RNA, 23 nt, Human
gaagcaacccaaauguucaucaa

SEQ ID NO: 3223878 - RNA, 17 nt, Human
gaagcacaugccucucu

SEQ ID NO: 3223879 - RNA, 20 nt, Human
gaagcacaugccucucucag

SEQ ID NO: 3223880 - RNA, 15 nt, Human
gaagcacaugccucu

SEQ ID NO: 3223881 - RNA, 22 nt, Human
gaagcacaccaaucuuacuuug

SEQ ID NO: 3223882 - RNA, 23 nt, Human
gaagauuuugaaauuuuuauuaa

SEQ ID NO: 3223883 - RNA, 23 nt, Human
gaagacaaugugaaaagaaaaau

SEQ ID NO: 3223884 - RNA, 14 nt, Human
gaagcacaugccuc

SEQ ID NO: 3223885 - RNA, 15 nt, Human
gaagcagaggaagga

SEQ ID NO: 3223886 - RNA, 17 nt, Human
gaacugcugggcuuggc

SEQ ID NO: 3223887 - RNA, 20 nt, Human
gaacugcugggcuuggcagc

SEQ ID NO: 3223888 - RNA, 16 nt, Human
gaacugcuuucuuucg

SEQ ID NO: 3223889 - RNA, 18 nt, Human
gaacugacauuaaaauaa

SEQ ID NO: 3223890 - RNA, 16 nt, Human
gaacucugccugcccu

SEQ ID NO: 3223891 - RNA, 20 nt, Human
gaacucgguguccccaccau

SEQ ID NO: 3223892 - RNA, 12 nt, Human
gaacuggcugca

SEQ ID NO: 3223893 - RNA, 11 nt, Human
gaacuggcugc

SEQ ID NO: 3223894 - RNA, 14 nt, Human
gaagaauauuguau

SEQ ID NO: 3223895 - RNA, 15 nt, Human
gaagaauauuguauu

SEQ ID NO: 3223896 - RNA, 15 nt, Human
gaagaauagggccca

SEQ ID NO: 3223897 - RNA, 23 nt, Human
gaagaauagggcccaugggaggg

SEQ ID NO: 3223898 - RNA, 19 nt, Human
gaacugggcauauuucuaa

SEQ ID NO: 3223899 - RNA, 16 nt, Human
gaacugggcauauuuc

SEQ ID NO: 3223900 - RNA, 13 nt, Human
gaagaauuuaaag

SEQ ID NO: 3223901 - RNA, 13 nt, Human
gaagaauuugaag

SEQ ID NO: 3223902 - RNA, 14 nt, Human
gaagaauuugaaga

SEQ ID NO: 3223903 - RNA, 12 nt, Human
gaagaauuuaaa

SEQ ID NO: 3223904 - RNA, 14 nt, Human
gaagaaugaagccc

SEQ ID NO: 3223905 - RNA, 14 nt, Human
gaagaaugcaugcu

SEQ ID NO: 3223906 - RNA, 20 nt, Human
gaagaaugcaugcuuuccau

SEQ ID NO: 3223907 - RNA, 15 nt, Human
gaacuccuggccuca

SEQ ID NO: 3223908 - RNA, 20 nt, Human
gaacucugacaacagacuuc

SEQ ID NO: 3223909 - RNA, 17 nt, Human
gaacucgguguccccac

SEQ ID NO: 3223910 - RNA, 19 nt, Human
gaacccgggaggcagaggu

SEQ ID NO: 3223911 - RNA, 21 nt, Human
gaagugugggucugugugugu

SEQ ID NO: 3223912 - RNA, 24 nt, Human
gaagugugggucugugugugugua

SEQ ID NO: 3223913 - RNA, 18 nt, Human
gaaggggacugccaccuc

SEQ ID NO: 3223914 - RNA, 19 nt, Human
gaaggggacugccaccucc

SEQ ID NO: 3223915 - RNA, 22 nt, Human
gaaggggagauaaggguaucug

SEQ ID NO: 3223916 - RNA, 15 nt, Human
gaaggggacugccac

SEQ ID NO: 3223917 - RNA, 22 nt, Human
gaaguuagccuuuaucuaccaa

SEQ ID NO: 3223918 - RNA, 21 nt, Human
gaaguuagccuuuaucuacca

SEQ ID NO: 3223919 - RNA, 18 nt, Human
gaaguuagccuuuaucua

SEQ ID NO: 3223920 - RNA, 11 nt, Human
gaaguuagccu

SEQ ID NO: 3223921 - RNA, 21 nt, Human
gaaguuacuguuacuugauaa

SEQ ID NO: 3223922 - RNA, 12 nt, Human
gaaguuaaaggg

SEQ ID NO: 3223923 - RNA, 20 nt, Human
gaaguuaaaagcacaaagga

SEQ ID NO: 3223924 - RNA, 21 nt, Human
gaaguuaaagggaagaaaaca

SEQ ID NO: 3223925 - RNA, 15 nt, Human
gaaguuaaagggaag

SEQ ID NO: 3223926 - RNA, 17 nt, Human
gaaguucugccucugau

SEQ ID NO: 3223927 - RNA, 21 nt, Human
gaaguugacucugcucuugca

SEQ ID NO: 3223928 - RNA, 14 nt, Human
gaaguucuuugauu

SEQ ID NO: 3223929 - RNA, 18 nt, Human
gaaguucugccucugaug

SEQ ID NO: 3223930 - RNA, 15 nt, Human
gaaguucaagaucaa

SEQ ID NO: 3223931 - RNA, 20 nt, Human
gaaguuauguguaugugagu

SEQ ID NO: 3223932 - RNA, 16 nt, Human
gaaguuauguguaugu

SEQ ID NO: 3223933 - RNA, 15 nt, Human
gaaguuaguggaaau

SEQ ID NO: 3223934 - RNA, 21 nt, Human
gaaguuauauuuccuauacca

SEQ ID NO: 3223935 - RNA, 13 nt, Human
gaaguuauauuuc

SEQ ID NO: 3223936 - RNA, 16 nt, Human
gaaguugaucucccca

SEQ ID NO: 3223937 - RNA, 14 nt, Human
gaaguuuaaauauu

SEQ ID NO: 3223938 - RNA, 19 nt, Human
gaauagggcuaggaauaua

SEQ ID NO: 3223939 - RNA, 13 nt, Human
gaauauaaaaaau

SEQ ID NO: 3223940 - RNA, 14 nt, Human
gaauaguauugugu

SEQ ID NO: 3223941 - RNA, 13 nt, Human
gaauauuaaaaaa

SEQ ID NO: 3223942 - RNA, 14 nt, Human
gaauauuaaaaaac

SEQ ID NO: 3223943 - RNA, 16 nt, Human
gaauauuauauuugga

SEQ ID NO: 3223944 - RNA, 13 nt, Human
gaauauuauauuu

SEQ ID NO: 3223945 - RNA, 20 nt, Human
gaauauuagugaccucagcu

SEQ ID NO: 3223946 - RNA, 14 nt, Human
gaauauugcugaug

SEQ ID NO: 3223947 - RNA, 15 nt, Human
gaauauugcugaugg

SEQ ID NO: 3223948 - RNA, 21 nt, Human
gaauaugggagaaauagugug

SEQ ID NO: 3223949 - RNA, 18 nt, Human
gaauaugggagaaauagu

SEQ ID NO: 3223950 - RNA, 13 nt, Human
gaauauaaaugug

SEQ ID NO: 3223951 - RNA, 14 nt, Human
gaauauaaaugugu

SEQ ID NO: 3223952 - RNA, 17 nt, Human
gaauauaaaugugugua

SEQ ID NO: 3223953 - RNA, 19 nt, Human
gaauauugcugauggugca

SEQ ID NO: 3223954 - RNA, 23 nt, Human
gaauauuguauuguuagauguuu

SEQ ID NO: 3223955 - RNA, 24 nt, Human
gaauauuauauuuggaugcagagu

SEQ ID NO: 3223956 - RNA, 19 nt, Human
gaauauuauauuuggaugc

SEQ ID NO: 3223957 - RNA, 19 nt, Human
gaagcuccgcuuucuaccc

SEQ ID NO: 3223958 - RNA, 17 nt, Human
gaaggccccgcccaggc

SEQ ID NO: 3223959 - RNA, 22 nt, Human
gaagcuccgcuuucuacccagc

SEQ ID NO: 3223960 - RNA, 15 nt, Human
gaaggcuggguucug

SEQ ID NO: 3223961 - RNA, 19 nt, Human
gaaggcuggguucugaucc

SEQ ID NO: 3223962 - RNA, 19 nt, Human
gaaggcucgagcaugccug

SEQ ID NO: 3223963 - RNA, 18 nt, Human
gaaggccccgcccaggcu

SEQ ID NO: 3223964 - RNA, 19 nt, Human
gaaggccccgcccaggcuu

SEQ ID NO: 3223965 - RNA, 21 nt, Human
gaaggcucgagcaugccugga

SEQ ID NO: 3223966 - RNA, 20 nt, Human
gaaggcuggguucugauccu

SEQ ID NO: 3223967 - RNA, 22 nt, Human
gaaggcuggguucugauccuag

SEQ ID NO: 3223968 - RNA, 17 nt, Human
gauuauggaaaaauaaa

SEQ ID NO: 3223969 - RNA, 18 nt, Human
gauuauggaaaaauaaaa

SEQ ID NO: 3223970 - RNA, 20 nt, Human
gauuauggaaaaauaaaacu

SEQ ID NO: 3223971 - RNA, 20 nt, Human
gauuauaggcaccuaccacc

SEQ ID NO: 3223972 - RNA, 18 nt, Human
gauuauauaucccugaua

SEQ ID NO: 3223973 - RNA, 20 nt, Human
gauguauguugaagccuuug

SEQ ID NO: 3223974 - RNA, 21 nt, Human
gauguauguugaagccuuugu

SEQ ID NO: 3223975 - RNA, 16 nt, Human
gauguauuuugugagu

SEQ ID NO: 3223976 - RNA, 15 nt, Human
gauguauuuugugag

SEQ ID NO: 3223977 - RNA, 21 nt, Human
gauguauuuugugaguuuguu

SEQ ID NO: 3223978 - RNA, 12 nt, Human
gauuauuggaaa

SEQ ID NO: 3223979 - RNA, 21 nt, Human
gauuauugaguuccaguugaa

SEQ ID NO: 3223980 - RNA, 14 nt, Human
gauucugagagcug

SEQ ID NO: 3223981 - RNA, 14 nt, Human
gauucuccugccuc

SEQ ID NO: 3223982 - RNA, 18 nt, Human
gauucuccugccucagcc

SEQ ID NO: 3223983 - RNA, 17 nt, Human
gauucuccugccucagc

SEQ ID NO: 3223984 - RNA, 15 nt, Human
gauucuccugccuca

SEQ ID NO: 3223985 - RNA, 15 nt, Human
gauuuauacucauuu

SEQ ID NO: 3223986 - RNA, 20 nt, Human
gauuuuuuacagcugccugc

SEQ ID NO: 3223987 - RNA, 12 nt, Human
gauuuauuaacu

SEQ ID NO: 3223988 - RNA, 18 nt, Human
gauucuuccucccucccu

SEQ ID NO: 3223989 - RNA, 17 nt, Human
gauucuuccucccuccc

SEQ ID NO: 3223990 - RNA, 17 nt, Human
gauguagaggagaaacu

SEQ ID NO: 3223991 - RNA, 18 nt, Human
gauguagaggagaaacug

SEQ ID NO: 3223992 - RNA, 21 nt, Human
gauguagcaaacccugucaaa

SEQ ID NO: 3223993 - RNA, 17 nt, Human
gauguagauuuauuuca

SEQ ID NO: 3223994 - RNA, 15 nt, Human
gauguagauuuauuu

SEQ ID NO: 3223995 - RNA, 14 nt, Human
gauguagauuuauu

SEQ ID NO: 3223996 - RNA, 12 nt, Human
gauguaaagaug

SEQ ID NO: 3223997 - RNA, 14 nt, Human
gaugauccuaggca

SEQ ID NO: 3223998 - RNA, 20 nt, Human
gauggaauuuuuuuguacga

SEQ ID NO: 3223999 - RNA, 16 nt, Human
gaugaucuuuaaaaua

SEQ ID NO: 3224000 - RNA, 21 nt, Human
gaugaucuaggaagacuuugg

SEQ ID NO: 3224001 - RNA, 15 nt, Human
gaugaucuaggaaga

SEQ ID NO: 3224002 - RNA, 19 nt, Human
gaugaguuuugggaaguua

SEQ ID NO: 3224003 - RNA, 19 nt, Human
gaugaggucaguuguguuu

SEQ ID NO: 3224004 - RNA, 12 nt, Human
gaucugcugcag

SEQ ID NO: 3224005 - RNA, 23 nt, Human
gauuuuuuuucccauuuagaaug

SEQ ID NO: 3224006 - RNA, 17 nt, Human
gcaauauauuuuguaug

SEQ ID NO: 3224007 - RNA, 15 nt, Human
gcaauauauuuugua

SEQ ID NO: 3224008 - RNA, 14 nt, Human
gcaauauauuuugu

SEQ ID NO: 3224009 - RNA, 12 nt, Human
gcaauauauuuu

SEQ ID NO: 3224010 - RNA, 19 nt, Human
gcaagugagagcugggugu

SEQ ID NO: 3224011 - RNA, 19 nt, Human
gcaagugugaauacugcuu

SEQ ID NO: 3224012 - RNA, 13 nt, Human
gcaagugugaaua

SEQ ID NO: 3224013 - RNA, 16 nt, Human
gcaagugugaauacug

SEQ ID NO: 3224014 - RNA, 23 nt, Human
gcacaguuuucugagaaagacua

SEQ ID NO: 3224015 - RNA, 23 nt, Human
gcacauagaaaguaaauaaaagg

SEQ ID NO: 3224016 - RNA, 22 nt, Human
gcacaguuuucugagaaagacu

SEQ ID NO: 3224017 - RNA, 20 nt, Human
gcacaguuuucugagaaaga

SEQ ID NO: 3224018 - RNA, 21 nt, Human
gcacagugcaucucagcccac

SEQ ID NO: 3224019 - RNA, 20 nt, Human
gcacagugcaucucagccca

SEQ ID NO: 3224020 - RNA, 19 nt, Human
gcacagugcaucucagccc

SEQ ID NO: 3224021 - RNA, 22 nt, Human
gcacaagcugcacccucaggca

SEQ ID NO: 3224022 - RNA, 14 nt, Human
gcaauauucucugu

SEQ ID NO: 3224023 - RNA, 20 nt, Human
gcaauauauuuuguaugcaa

SEQ ID NO: 3224024 - RNA, 19 nt, Human
gcaauaucuucguuaguaa

SEQ ID NO: 3224025 - RNA, 20 nt, Human
gcaauaucuucguuaguaau

SEQ ID NO: 3224026 - RNA, 19 nt, Human
gcaauauauuuuguaugca

SEQ ID NO: 3224027 - RNA, 18 nt, Human
gcaauauauuuuguaugc

SEQ ID NO: 3224028 - RNA, 19 nt, Human
gcaauauucucuguacaua

SEQ ID NO: 3224029 - RNA, 17 nt, Human
gcaauauucucuguaca

SEQ ID NO: 3224030 - RNA, 14 nt, Human
gcacaccgggcacu

SEQ ID NO: 3224031 - RNA, 20 nt, Human
gcacaccaaucuuacuuugu

SEQ ID NO: 3224032 - RNA, 21 nt, Human
gcacaccaaucuuacuuugua

SEQ ID NO: 3224033 - RNA, 22 nt, Human
gcacaccaaucuuacuuuguaa

SEQ ID NO: 3224034 - RNA, 16 nt, Human
gcacaccaaucuuacu

SEQ ID NO: 3224035 - RNA, 17 nt, Human
gcacaccaaucuuacuu

SEQ ID NO: 3224036 - RNA, 17 nt, Human
gcacuccccugcugggu

SEQ ID NO: 3224037 - RNA, 16 nt, Human
gcacucagaagacacu

SEQ ID NO: 3224038 - RNA, 13 nt, Human
gcacucagaagac

SEQ ID NO: 3224039 - RNA, 22 nt, Human
gcacuccccugcuggguguggc

SEQ ID NO: 3224040 - RNA, 16 nt, Human
gcacuccccugcuggg

SEQ ID NO: 3224041 - RNA, 16 nt, Human
gcacuugcagacucua

SEQ ID NO: 3224042 - RNA, 23 nt, Human
gcaccgggccacagagaaaguac

SEQ ID NO: 3224043 - RNA, 21 nt, Human
gcaccuaccaccacgcccggc

SEQ ID NO: 3224044 - RNA, 18 nt, Human
gcaccuaccaccacgccc

SEQ ID NO: 3224045 - RNA, 22 nt, Human
gcaccuaccaccacgcccggcu

SEQ ID NO: 3224046 - RNA, 14 nt, Human
gcaccgggccacag

SEQ ID NO: 3224047 - RNA, 20 nt, Human
gaguuggaguagaauguagu

SEQ ID NO: 3224048 - RNA, 17 nt, Human
gaguuggaguagaaugu

SEQ ID NO: 3224049 - RNA, 18 nt, Human
gaguugauucagcucugc

SEQ ID NO: 3224050 - RNA, 21 nt, Human
gaguuuaaaaaugguaucaaa

SEQ ID NO: 3224051 - RNA, 13 nt, Human
gaguuguuuuugu

SEQ ID NO: 3224052 - RNA, 14 nt, Human
gaguuguuuuugua

SEQ ID NO: 3224053 - RNA, 16 nt, Human
gaguuguuuuuguaua

SEQ ID NO: 3224054 - RNA, 18 nt, Human
gaguuguuuuuguauauu

SEQ ID NO: 3224055 - RNA, 23 nt, Human
gaggugaccccagguuucuaugu

SEQ ID NO: 3224056 - RNA, 17 nt, Human
gaggugaaaaggccaag

SEQ ID NO: 3224057 - RNA, 16 nt, Human
gaggugaaaaggccaa

SEQ ID NO: 3224058 - RNA, 15 nt, Human
gaggugaaaaggcca

SEQ ID NO: 3224059 - RNA, 15 nt, Human
gaggucgaggcagga

SEQ ID NO: 3224060 - RNA, 20 nt, Human
gagguggaagagggcugcaa

SEQ ID NO: 3224061 - RNA, 17 nt, Human
gagguggaagagggcug

SEQ ID NO: 3224062 - RNA, 17 nt, Human
gagucaccaagcccagu

SEQ ID NO: 3224063 - RNA, 16 nt, Human
gagucaccaagcccag

SEQ ID NO: 3224064 - RNA, 15 nt, Human
gagucaccaagccca

SEQ ID NO: 3224065 - RNA, 18 nt, Human
gagucagggagagcugaa

SEQ ID NO: 3224066 - RNA, 16 nt, Human
gagucagcuguuucua

SEQ ID NO: 3224067 - RNA, 20 nt, Human
gagucagccucgcaggccuc

SEQ ID NO: 3224068 - RNA, 22 nt, Human
gagucagaaguuucugccgcag

SEQ ID NO: 3224069 - RNA, 15 nt, Human
gagucagcuguuucu

SEQ ID NO: 3224070 - RNA, 18 nt, Human
gagugacagaggcagccc

SEQ ID NO: 3224071 - RNA, 17 nt, Human
gagugacagaggcagcc

SEQ ID NO: 3224072 - RNA, 12 nt, Human
gagucccaccuu

SEQ ID NO: 3224073 - RNA, 20 nt, Human
gagugacagaggcagcccca

SEQ ID NO: 3224074 - RNA, 15 nt, Human
gagugcaggcccacc

SEQ ID NO: 3224075 - RNA, 19 nt, Human
gaguggacuguucccugag

SEQ ID NO: 3224076 - RNA, 14 nt, Human
gagugcaggcccac

SEQ ID NO: 3224077 - RNA, 13 nt, Human
gagugcaggccca

SEQ ID NO: 3224078 - RNA, 23 nt, Human
gagugcaaaaggcuugcagaacu

SEQ ID NO: 3224079 - RNA, 15 nt, Human
gaguugauucagcuc

SEQ ID NO: 3224080 - RNA, 16 nt, Human
gaguugauucagcucu

SEQ ID NO: 3224081 - RNA, 17 nt, Human
gaguugauucagcucug

SEQ ID NO: 3224082 - RNA, 22 nt, Human
gaguugauagcacagacccugc

SEQ ID NO: 3224083 - RNA, 20 nt, Human
gaguggagguuuauaguuaa

SEQ ID NO: 3224084 - RNA, 16 nt, Human
gagcuggacucccuca

SEQ ID NO: 3224085 - RNA, 21 nt, Human
gagcuggacaguggagugcaa

SEQ ID NO: 3224086 - RNA, 18 nt, Human
gagcugcuuuuuuugaaa

SEQ ID NO: 3224087 - RNA, 16 nt, Human
gagcugcuuuuuuuga

SEQ ID NO: 3224088 - RNA, 13 nt, Human
gagcugcuucccc

SEQ ID NO: 3224089 - RNA, 15 nt, Human
gagcugcugccauga

SEQ ID NO: 3224090 - RNA, 23 nt, Human
gagccuuccaggggugggacacc

SEQ ID NO: 3224091 - RNA, 21 nt, Human
gagcgcccacuagacccacug

SEQ ID NO: 3224092 - RNA, 12 nt, Human
gagcgcagcccg

SEQ ID NO: 3224093 - RNA, 22 nt, Human
gagcgcagccgccuucacagca

SEQ ID NO: 3224094 - RNA, 14 nt, Human
gagcgcagccgccu

SEQ ID NO: 3224095 - RNA, 20 nt, Human
gagccuuccaggggugggac

SEQ ID NO: 3224096 - RNA, 18 nt, Human
gaggcugcagccaggcca

SEQ ID NO: 3224097 - RNA, 16 nt, Human
gaggcucaaauuuuga

SEQ ID NO: 3224098 - RNA, 15 nt, Human
gaggcucaaauuuug

SEQ ID NO: 3224099 - RNA, 14 nt, Human
gaggcucagauugu

SEQ ID NO: 3224100 - RNA, 19 nt, Human
gaggcuccacuuggucugu

SEQ ID NO: 3224101 - RNA, 18 nt, Human
gaggcuccacuuggucug

SEQ ID NO: 3224102 - RNA, 23 nt, Human
gaggcuccacuuggucugugaga

SEQ ID NO: 3224103 - RNA, 13 nt, Human
gaggccagagaca

SEQ ID NO: 3224104 - RNA, 14 nt, Human
gaggccagagacac

SEQ ID NO: 3224105 - RNA, 22 nt, Human
gaggcuagugugguguuuccug

SEQ ID NO: 3224106 - RNA, 16 nt, Human
gaggcaguuugaggau

SEQ ID NO: 3224107 - RNA, 13 nt, Human
gaggccaccuccu

SEQ ID NO: 3224108 - RNA, 12 nt, Human
gaggccaccucc

SEQ ID NO: 3224109 - RNA, 11 nt, Human
gaggccaccuc

SEQ ID NO: 3224110 - RNA, 15 nt, Human
gaggccacugaagag

SEQ ID NO: 3224111 - RNA, 16 nt, Human
gaggccacugaagagg

SEQ ID NO: 3224112 - RNA, 17 nt, Human
gaggccacugaagagga

SEQ ID NO: 3224113 - RNA, 19 nt, Human
gaggccacugaagaggagg

SEQ ID NO: 3224114 - RNA, 12 nt, Human
gaggcagguccc

SEQ ID NO: 3224115 - RNA, 16 nt, Human
gaggcagguccccaga

SEQ ID NO: 3224116 - RNA, 13 nt, Human
gaggcaggucccc

SEQ ID NO: 3224117 - RNA, 22 nt, Human
gaggcagggucucacucugucg

SEQ ID NO: 3224118 - RNA, 15 nt, Human
gaggcagggucucac

SEQ ID NO: 3224119 - RNA, 15 nt, Human
gaggcaguuugagga

SEQ ID NO: 3224120 - RNA, 21 nt, Human
gaggcaguugcccagccucuu

SEQ ID NO: 3224121 - RNA, 20 nt, Human
gaggcaguugcccagccucu

SEQ ID NO: 3224122 - RNA, 18 nt, Human
gaggcaguugcccagccu

SEQ ID NO: 3224123 - RNA, 15 nt, Human
gaggcaguugcccag

SEQ ID NO: 3224124 - RNA, 21 nt, Human
gaggcaguucgaccagccagg

SEQ ID NO: 3224125 - RNA, 17 nt, Human
gaggccaaggugggagg

SEQ ID NO: 3224126 - RNA, 22 nt, Human
gaggccaaggugggaggauugc

SEQ ID NO: 3224127 - RNA, 15 nt, Human
gaggacgcucucugg

SEQ ID NO: 3224128 - RNA, 14 nt, Human
gaggcagggucuca

SEQ ID NO: 3224129 - RNA, 13 nt, Human
gaggaccugcccg

SEQ ID NO: 3224130 - RNA, 14 nt, Human
ggaggcugacuccu

SEQ ID NO: 3224131 - RNA, 17 nt, Human
ggaggcugacuccuggu

SEQ ID NO: 3224132 - RNA, 15 nt, Human
ggaggcugagauggg

SEQ ID NO: 3224133 - RNA, 19 nt, Human
ggaggcugagaugggagaa

SEQ ID NO: 3224134 - RNA, 15 nt, Human
ggaggucgaggcagg

SEQ ID NO: 3224135 - RNA, 16 nt, Human
ggaggucgaggcagga

SEQ ID NO: 3224136 - RNA, 14 nt, Human
ggaggucgaggcag

SEQ ID NO: 3224137 - RNA, 18 nt, Human
ggaggucgaggcaggagg

SEQ ID NO: 3224138 - RNA, 17 nt, Human
ggaggugugaggcagga

SEQ ID NO: 3224139 - RNA, 15 nt, Human
ggaggugugaggcag

SEQ ID NO: 3224140 - RNA, 23 nt, Human
ggagcccauuuggagggccuggg

SEQ ID NO: 3224141 - RNA, 18 nt, Human
ggagcccauuuggagggc

SEQ ID NO: 3224142 - RNA, 22 nt, Human
ggagcccauuuggagggccugg

SEQ ID NO: 3224143 - RNA, 21 nt, Human
ggagcccauuuggagggccug

SEQ ID NO: 3224144 - RNA, 22 nt, Human
ggagcugccuguucagcuccag

SEQ ID NO: 3224145 - RNA, 17 nt, Human
ggagcuggaguccacug

SEQ ID NO: 3224146 - RNA, 13 nt, Human
ggaggccaucugg

SEQ ID NO: 3224147 - RNA, 12 nt, Human
ggaggccaucug

SEQ ID NO: 3224148 - RNA, 22 nt, Human
ggaggcccagcgcggacauccc

SEQ ID NO: 3224149 - RNA, 17 nt, Human
ggaggccaucuggagag

SEQ ID NO: 3224150 - RNA, 21 nt, Human
ggaggcccagcgcggacaucc

SEQ ID NO: 3224151 - RNA, 12 nt, Human
ggaggccagccu

SEQ ID NO: 3224152 - RNA, 18 nt, Human
ggaggccaaggugggagg

SEQ ID NO: 3224153 - RNA, 13 nt, Human
ggaggccagccuu

SEQ ID NO: 3224154 - RNA, 11 nt, Human
ggaggccaaga

SEQ ID NO: 3224155 - RNA, 23 nt, Human
ggaggccaagaguggccccaccu

SEQ ID NO: 3224156 - RNA, 22 nt, Human
ggaggccaagaguggccccacc

SEQ ID NO: 3224157 - RNA, 21 nt, Human
ggaggcaugugaugagaggaa

SEQ ID NO: 3224158 - RNA, 21 nt, Human
ggaggaagaacugaaaggcuu

SEQ ID NO: 3224159 - RNA, 14 nt, Human
ggaggaagaauagg

SEQ ID NO: 3224160 - RNA, 12 nt, Human
ggaggaagagaa

SEQ ID NO: 3224161 - RNA, 22 nt, Human
ggaggaaaaccaagccguggcu

SEQ ID NO: 3224162 - RNA, 21 nt, Human
ggaggaaaaccaagccguggc

SEQ ID NO: 3224163 - RNA, 20 nt, Human
ggaggaaaaccaagccgugg

SEQ ID NO: 3224164 - RNA, 18 nt, Human
ggagcaguaucaugaagc

SEQ ID NO: 3224165 - RNA, 13 nt, Human
ggagcagccacau

SEQ ID NO: 3224166 - RNA, 21 nt, Human
ggagcagccacauuccugaug

SEQ ID NO: 3224167 - RNA, 18 nt, Human
ggaccccuggugguucac

SEQ ID NO: 3224168 - RNA, 20 nt, Human
ggaccccaucugugaauaag

SEQ ID NO: 3224169 - RNA, 14 nt, Human
ggaccccaucugug

SEQ ID NO: 3224170 - RNA, 18 nt, Human
ggaccccaucugugaaua

SEQ ID NO: 3224171 - RNA, 17 nt, Human
ggaccccaucugugaau

SEQ ID NO: 3224172 - RNA, 13 nt, Human
ggaccccagccuc

SEQ ID NO: 3224173 - RNA, 12 nt, Human
ggaccccagccu

SEQ ID NO: 3224174 - RNA, 15 nt, Human
ggaccccagccucaa

SEQ ID NO: 3224175 - RNA, 14 nt, Human
ggaccccagccuca

SEQ ID NO: 3224176 - RNA, 15 nt, Human
ggacccugaggccca

SEQ ID NO: 3224177 - RNA, 18 nt, Human
ggacccugaggcccagag

SEQ ID NO: 3224178 - RNA, 14 nt, Human
ggacccugaggccc

SEQ ID NO: 3224179 - RNA, 21 nt, Human
ggacccggaggggccuggcag

SEQ ID NO: 3224180 - RNA, 20 nt, Human
ggacccggaggggccuggca

SEQ ID NO: 3224181 - RNA, 16 nt, Human
ggacccuccaaggcca

SEQ ID NO: 3224182 - RNA, 16 nt, Human
ggacuuggagguagcu

SEQ ID NO: 3224183 - RNA, 17 nt, Human
ggacuuggaagcuccgc

SEQ ID NO: 3224184 - RNA, 15 nt, Human
ggacuuggaagcucc

SEQ ID NO: 3224185 - RNA, 11 nt, Human
ggacuuccuga

SEQ ID NO: 3224186 - RNA, 19 nt, Human
ggagaaaauggacguguua

SEQ ID NO: 3224187 - RNA, 9 nt, Human
ggacuuugu

SEQ ID NO: 3224188 - RNA, 18 nt, Human
ggacuuuuauuuccagug

SEQ ID NO: 3224189 - RNA, 12 nt, Human
ggacuuuguuac

SEQ ID NO: 3224190 - RNA, 13 nt, Human
ggacuuuguuaca

SEQ ID NO: 3224191 - RNA, 22 nt, Human
ggagaaccaaaaagaggcuaug

SEQ ID NO: 3224192 - RNA, 13 nt, Human
ggagaaccaccua

SEQ ID NO: 3224193 - RNA, 16 nt, Human
ggagaaccaccuaccc

SEQ ID NO: 3224194 - RNA, 16 nt, Human
ggagacugucucaaga

SEQ ID NO: 3224195 - RNA, 22 nt, Human
ggagacugcugagucaacccaa

SEQ ID NO: 3224196 - RNA, 17 nt, Human
ggacuuagcugggagaa

SEQ ID NO: 3224197 - RNA, 12 nt, Human
ggacuuaggaag

SEQ ID NO: 3224198 - RNA, 20 nt, Human
ggacuacaggugugagucac

SEQ ID NO: 3224199 - RNA, 22 nt, Human
ggacucaaugcacugacauugu

SEQ ID NO: 3224200 - RNA, 16 nt, Human
ggacuaggguccuggg

SEQ ID NO: 3224201 - RNA, 18 nt, Human
ggacucaaugcacugaca

SEQ ID NO: 3224202 - RNA, 17 nt, Human
ggacucagaaacuccau

SEQ ID NO: 3224203 - RNA, 14 nt, Human
ggagagagacucca

SEQ ID NO: 3224204 - RNA, 22 nt, Human
ggagagccuuccagggguggga

SEQ ID NO: 3224205 - RNA, 17 nt, Human
ggagagccuuccagggg

SEQ ID NO: 3224206 - RNA, 18 nt, Human
ggagagccuuccaggggu

SEQ ID NO: 3224207 - RNA, 13 nt, Human
ggagagccuucca

SEQ ID NO: 3224208 - RNA, 16 nt, Human
ggagagccuuccaggg

SEQ ID NO: 3224209 - RNA, 15 nt, Human
ggagagcuagcagca

SEQ ID NO: 3224210 - RNA, 17 nt, Human
ggcagaaagcaaaauua

SEQ ID NO: 3224211 - RNA, 12 nt, Human
ggcagaaggaag

SEQ ID NO: 3224212 - RNA, 21 nt, Human
ggcagaaguaggggaagaaua

SEQ ID NO: 3224213 - RNA, 10 nt, Human
ggcaggcagg

SEQ ID NO: 3224214 - RNA, 11 nt, Human
ggcaggcaggg

SEQ ID NO: 3224215 - RNA, 23 nt, Human
ggcaggagacuguggagacugcu

SEQ ID NO: 3224216 - RNA, 22 nt, Human
ggcagccgugccuucagcucua

SEQ ID NO: 3224217 - RNA, 15 nt, Human
ggcaggaccagccca

SEQ ID NO: 3224218 - RNA, 14 nt, Human
ggcaggaccagccc

SEQ ID NO: 3224219 - RNA, 13 nt, Human
ggcaggaccagcc

SEQ ID NO: 3224220 - RNA, 19 nt, Human
ggcaggacacugcagaaca

SEQ ID NO: 3224221 - RNA, 19 nt, Human
ggcaggaccagcccacgcu

SEQ ID NO: 3224222 - RNA, 18 nt, Human
ggcaggaccagcccacgc

SEQ ID NO: 3224223 - RNA, 17 nt, Human
ggcaggaccagcccacg

SEQ ID NO: 3224224 - RNA, 16 nt, Human
ggcaggaccagcccac

SEQ ID NO: 3224225 - RNA, 14 nt, Human
ggcagccaggccac

SEQ ID NO: 3224226 - RNA, 10 nt, Human
ggcagagcag

SEQ ID NO: 3224227 - RNA, 15 nt, Human
ggcagccaggccaca

SEQ ID NO: 3224228 - RNA, 17 nt, Human
ggcagccaggccacaag

SEQ ID NO: 3224229 - RNA, 16 nt, Human
ggcagagaggcugugg

SEQ ID NO: 3224230 - RNA, 13 nt, Human
ggcagagcacagc

SEQ ID NO: 3224231 - RNA, 18 nt, Human
ggcagccgugccuucagc

SEQ ID NO: 3224232 - RNA, 21 nt, Human
ggcagccgugccuucagcucu

SEQ ID NO: 3224233 - RNA, 19 nt, Human
ggcagccgugccuucagcu

SEQ ID NO: 3224234 - RNA, 15 nt, Human
ggaugguguucaaaa

SEQ ID NO: 3224235 - RNA, 13 nt, Human
ggaugucugggcc

SEQ ID NO: 3224236 - RNA, 22 nt, Human
ggauguugaaaaaguucugcag

SEQ ID NO: 3224237 - RNA, 16 nt, Human
ggaugugcugcagugc

SEQ ID NO: 3224238 - RNA, 21 nt, Human
ggaugaauuccaaauucugcu

SEQ ID NO: 3224239 - RNA, 22 nt, Human
ggaugagaaagguugaagcacc

SEQ ID NO: 3224240 - RNA, 12 nt, Human
ggaugagaaagg

SEQ ID NO: 3224241 - RNA, 17 nt, Human
ggaugaauuguaaaagc

SEQ ID NO: 3224242 - RNA, 20 nt, Human
ggaugaauuguaaaagcaac

SEQ ID NO: 3224243 - RNA, 21 nt, Human
ggauuuuauguugacauuugu

SEQ ID NO: 3224244 - RNA, 16 nt, Human
ggauuuuauguugaca

SEQ ID NO: 3224245 - RNA, 18 nt, Human
ggauuuggagagaaauau

SEQ ID NO: 3224246 - RNA, 17 nt, Human
ggauuuggagagaaaua

SEQ ID NO: 3224247 - RNA, 15 nt, Human
ggauuuuauguugac

SEQ ID NO: 3224248 - RNA, 21 nt, Human
ggauuuugauccaagcugguc

SEQ ID NO: 3224249 - RNA, 20 nt, Human
ggcaaauccgaaaucagcag

SEQ ID NO: 3224250 - RNA, 17 nt, Human
ggcaaauccgaaaucag

SEQ ID NO: 3224251 - RNA, 13 nt, Human
ggcaaauaaaauu

SEQ ID NO: 3224252 - RNA, 17 nt, Human
ggcaaauaaaauucccu

SEQ ID NO: 3224253 - RNA, 16 nt, Human
ggcaaagggggaggag

SEQ ID NO: 3224254 - RNA, 16 nt, Human
ggcaacaaacugcaca

SEQ ID NO: 3224255 - RNA, 18 nt, Human
ggcaacaaacugcacaug

SEQ ID NO: 3224256 - RNA, 17 nt, Human
ggcaaacauuugaagga

SEQ ID NO: 3224257 - RNA, 22 nt, Human
ggcaaacauuuucucuuagaaa

SEQ ID NO: 3224258 - RNA, 21 nt, Human
ggcaaacauuuucucuuagaa

SEQ ID NO: 3224259 - RNA, 20 nt, Human
ggcaaagcagcaacacacau

SEQ ID NO: 3224260 - RNA, 20 nt, Human
ggcaaagagacccagucaau

SEQ ID NO: 3224261 - RNA, 13 nt, Human
ggcaaagcuguuc

SEQ ID NO: 3224262 - RNA, 16 nt, Human
ggccuccauccugagg

SEQ ID NO: 3224263 - RNA, 13 nt, Human
ggccucccaacuc

SEQ ID NO: 3224264 - RNA, 14 nt, Human
ggccucccaacuca

SEQ ID NO: 3224265 - RNA, 23 nt, Human
ggcccuuccucuccacugccuuc

SEQ ID NO: 3224266 - RNA, 22 nt, Human
ggcccuuccucuccacugccuu

SEQ ID NO: 3224267 - RNA, 19 nt, Human
ggcccuuccucuccacugc

SEQ ID NO: 3224268 - RNA, 18 nt, Human
ggcccuuccucuccacug

SEQ ID NO: 3224269 - RNA, 21 nt, Human
ggccuccgucacuaccuggcu

SEQ ID NO: 3224270 - RNA, 19 nt, Human
ggccucccugccaguaggg

SEQ ID NO: 3224271 - RNA, 12 nt, Human
ggccucccugcc

SEQ ID NO: 3224272 - RNA, 15 nt, Human
ggccucccugccagu

SEQ ID NO: 3224273 - RNA, 13 nt, Human
ggccucccugcca

SEQ ID NO: 3224274 - RNA, 22 nt, Human
ggcccagcgcggacauccccug

SEQ ID NO: 3224275 - RNA, 21 nt, Human
ggcccauguauggccaggaag

SEQ ID NO: 3224276 - RNA, 20 nt, Human
ggcccauguauggccaggaa

SEQ ID NO: 3224277 - RNA, 19 nt, Human
ggcccauguauggccagga

SEQ ID NO: 3224278 - RNA, 17 nt, Human
ggcccauguauggccag

SEQ ID NO: 3224279 - RNA, 16 nt, Human
ggcccaugggagggag

SEQ ID NO: 3224280 - RNA, 17 nt, Human
ggcccaugggagggagc

SEQ ID NO: 3224281 - RNA, 20 nt, Human
ggcccaugggagggagcuga

SEQ ID NO: 3224282 - RNA, 14 nt, Human
ggcccaucaugggg

SEQ ID NO: 3224283 - RNA, 19 nt, Human
ggcccaucauggggggagc

SEQ ID NO: 3224284 - RNA, 13 nt, Human
ggccccacaccag

SEQ ID NO: 3224285 - RNA, 19 nt, Human
ggccccagcuucucagcuc

SEQ ID NO: 3224286 - RNA, 15 nt, Human
ggcccgacagccugg

SEQ ID NO: 3224287 - RNA, 17 nt, Human
ggcccgacagccuggca

SEQ ID NO: 3224288 - RNA, 16 nt, Human
ggcccgacagccuggc

SEQ ID NO: 3224289 - RNA, 18 nt, Human
ggccagcaccaucucuuu

SEQ ID NO: 3224290 - RNA, 20 nt, Human
ggccagaugcaccagcccuu

SEQ ID NO: 3224291 - RNA, 19 nt, Human
ggccagaugcaccagcccu

SEQ ID NO: 3224292 - RNA, 17 nt, Human
ggccagaugcaccagcc

SEQ ID NO: 3224293 - RNA, 23 nt, Human
ggccagagggagugacagaggca

SEQ ID NO: 3224294 - RNA, 22 nt, Human
ggccagagggagugacagaggc

SEQ ID NO: 3224295 - RNA, 13 nt, Human
ggccaagguggga

SEQ ID NO: 3224296 - RNA, 21 nt, Human
ggccaaggaugccccgucccc

SEQ ID NO: 3224297 - RNA, 12 nt, Human
ggcauucucucu

SEQ ID NO: 3224298 - RNA, 19 nt, Human
ggcauugccucggcuggcu

SEQ ID NO: 3224299 - RNA, 12 nt, Human
ggcauuguggga

SEQ ID NO: 3224300 - RNA, 21 nt, Human
ggccaaacucaccugccccuc

SEQ ID NO: 3224301 - RNA, 16 nt, Human
ggcauuucccacccug

SEQ ID NO: 3224302 - RNA, 16 nt, Human
ggccaaagacaaauag

SEQ ID NO: 3224303 - RNA, 15 nt, Human
ggccaaagacaaaua

SEQ ID NO: 3224304 - RNA, 13 nt, Human
ggccaaagacaaa

SEQ ID NO: 3224305 - RNA, 12 nt, Human
ggccaaaggaag

SEQ ID NO: 3224306 - RNA, 15 nt, Human
ggccaaagccaaagc

SEQ ID NO: 3224307 - RNA, 21 nt, Human
ggccaaaggaagcacaugccu

SEQ ID NO: 3224308 - RNA, 14 nt, Human
ggccaggugccucc

SEQ ID NO: 3224309 - RNA, 16 nt, Human
ggccaggugccuccug

SEQ ID NO: 3224310 - RNA, 19 nt, Human
ggccagguggccacuccag

SEQ ID NO: 3224311 - RNA, 13 nt, Human
aaaaaaaaagaaa

SEQ ID NO: 3224312 - RNA, 13 nt, Human
aaaaaaaaaguca

SEQ ID NO: 3224313 - RNA, 10 nt, Human
aaaaaaaaga

SEQ ID NO: 3224314 - RNA, 19 nt, Human
aaaaagcuagucaacagua

SEQ ID NO: 3224315 - RNA, 12 nt, Human
aaaaaauaauua

SEQ ID NO: 3224316 - RNA, 10 nt, Human
aaaaaauaca

SEQ ID NO: 3224317 - RNA, 16 nt, Human
aaaaaagucaccaaau

SEQ ID NO: 3224318 - RNA, 18 nt, Human
aaaaaaggaugcaacaau

SEQ ID NO: 3224319 - RNA, 12 nt, Human
aaaaaaguugua

SEQ ID NO: 3224320 - RNA, 13 nt, Human
aaaaaagcugaau

SEQ ID NO: 3224321 - RNA, 12 nt, Human
aaaaaagaaaga

SEQ ID NO: 3224322 - RNA, 13 nt, Human
aaaaaaaauugua

SEQ ID NO: 3224323 - RNA, 11 nt, Human
aaaaaaaagaa

SEQ ID NO: 3224324 - RNA, 13 nt, Human
aaaaaaaacucuu

SEQ ID NO: 3224325 - RNA, 20 nt, Human
aaaaaggcuuauaaaacaga

SEQ ID NO: 3224326 - RNA, 20 nt, Human
aaaaagcuccaaaugcagcu

SEQ ID NO: 3224327 - RNA, 19 nt, Human
aaaaagcuauaaauuauau

SEQ ID NO: 3224328 - RNA, 16 nt, Human
aaaaagggaguuuuug

SEQ ID NO: 3224329 - RNA, 15 nt, Human
aaaaaguauugccaa

SEQ ID NO: 3224330 - RNA, 12 nt, Human
aaaaaguauugc

SEQ ID NO: 3224331 - RNA, 15 nt, Human
aaaaagucuuuuaaa

SEQ ID NO: 3224332 - RNA, 14 nt, Human
aaaaagucuuuuaa

SEQ ID NO: 3224333 - RNA, 20 nt, Human
aaaaaguauugccaaacauu

SEQ ID NO: 3224334 - RNA, 16 nt, Human
aaaaaguauugccaaa

SEQ ID NO: 3224335 - RNA, 21 nt, Human
aaaaaguauugccaaacauua

SEQ ID NO: 3224336 - RNA, 14 nt, Human
aaaaagucagaugu

SEQ ID NO: 3224337 - RNA, 16 nt, Human
aaaaagucagauguuu

SEQ ID NO: 3224338 - RNA, 23 nt, Human
gggaaaaucagccugcuccagcu

SEQ ID NO: 3224339 - RNA, 20 nt, Human
gggaaaaaguugaugucaau

SEQ ID NO: 3224340 - RNA, 22 nt, Human
gggaaaauaaaaaaagaaaaaa

SEQ ID NO: 3224341 - RNA, 18 nt, Human
gggaaacuaagauucuuu

SEQ ID NO: 3224342 - RNA, 13 nt, Human
gggaaaaucagcc

SEQ ID NO: 3224343 - RNA, 17 nt, Human
ggcuuuuguuuugcuuu

SEQ ID NO: 3224344 - RNA, 16 nt, Human
ggcuucaguggcagcu

SEQ ID NO: 3224345 - RNA, 22 nt, Human
ggcuucagggugggaguaguug

SEQ ID NO: 3224346 - RNA, 23 nt, Human
ggcuucccaaaugugugcccagc

SEQ ID NO: 3224347 - RNA, 20 nt, Human
ggcuuccugaggggagacag

SEQ ID NO: 3224348 - RNA, 17 nt, Human
ggcuuccugaggggaga

SEQ ID NO: 3224349 - RNA, 17 nt, Human
ggcuucggacaaaauau

SEQ ID NO: 3224350 - RNA, 16 nt, Human
ggcuggugucaccuga

SEQ ID NO: 3224351 - RNA, 19 nt, Human
ggcuguaucccaugagccu

SEQ ID NO: 3224352 - RNA, 15 nt, Human
ggcugucaauuacag

SEQ ID NO: 3224353 - RNA, 23 nt, Human
ggcuguaucccaugagccucagc

SEQ ID NO: 3224354 - RNA, 22 nt, Human
ggcuguaucccaugagccucag

SEQ ID NO: 3224355 - RNA, 20 nt, Human
ggcuguaucccaugagccuc

SEQ ID NO: 3224356 - RNA, 15 nt, Human
ggcuucaguggcagc

SEQ ID NO: 3224357 - RNA, 14 nt, Human
ggcuguccacccgc

SEQ ID NO: 3224358 - RNA, 22 nt, Human
ggcugucaguguuuggugcacg

SEQ ID NO: 3224359 - RNA, 17 nt, Human
ggcuccucccggugccc

SEQ ID NO: 3224360 - RNA, 13 nt, Human
ggcuccugccacc

SEQ ID NO: 3224361 - RNA, 12 nt, Human
ggcuccugccca

SEQ ID NO: 3224362 - RNA, 15 nt, Human
ggcuccugcccccau

SEQ ID NO: 3224363 - RNA, 12 nt, Human
ggcuccugcccc

SEQ ID NO: 3224364 - RNA, 12 nt, Human
ggcuccugccac

SEQ ID NO: 3224365 - RNA, 20 nt, Human
ggcucccuucccaccucucu

SEQ ID NO: 3224366 - RNA, 22 nt, Human
ggcucccuucccaccucucuca

SEQ ID NO: 3224367 - RNA, 17 nt, Human
ggcucccuucccaccuc

SEQ ID NO: 3224368 - RNA, 18 nt, Human
ggcucccuucccaccucu

SEQ ID NO: 3224369 - RNA, 16 nt, Human
ggcucccuucccaccu

SEQ ID NO: 3224370 - RNA, 20 nt, Human
ggcucuuccaggcugggaga

SEQ ID NO: 3224371 - RNA, 23 nt, Human
ggcucuuccaggcugggagagcc

SEQ ID NO: 3224372 - RNA, 24 nt, Human
ggcucuuccaggcugggagagccu

SEQ ID NO: 3224373 - RNA, 18 nt, Human
ggcucgagcaugccugga

SEQ ID NO: 3224374 - RNA, 17 nt, Human
ggcugcagggaguccga

SEQ ID NO: 3224375 - RNA, 20 nt, Human
ggcugcaugcgggcuuccuc

SEQ ID NO: 3224376 - RNA, 21 nt, Human
ggcugccaaugggagcucaug

SEQ ID NO: 3224377 - RNA, 17 nt, Human
ggcuggaucugugaggg

SEQ ID NO: 3224378 - RNA, 22 nt, Human
ggcuggaguuggggcagaggag

SEQ ID NO: 3224379 - RNA, 17 nt, Human
ggcuggaguuggggcag

SEQ ID NO: 3224380 - RNA, 17 nt, Human
ggcuggccuggccccuc

SEQ ID NO: 3224381 - RNA, 22 nt, Human
ggcuggccuggccccucagggu

SEQ ID NO: 3224382 - RNA, 13 nt, Human
ggcuggcccugcc

SEQ ID NO: 3224383 - RNA, 14 nt, Human
ggcuggcccugccc

SEQ ID NO: 3224384 - RNA, 15 nt, Human
ggcuggcccugcccu

SEQ ID NO: 3224385 - RNA, 20 nt, Human
ggcuggcgugcaguggugcg

SEQ ID NO: 3224386 - RNA, 16 nt, Human
ggcuggcgugcagugg

SEQ ID NO: 3224387 - RNA, 14 nt, Human
ggcuggcgugcagu

SEQ ID NO: 3224388 - RNA, 16 nt, Human
ggcuggcccugcccug

SEQ ID NO: 3224389 - RNA, 11 nt, Human
ggcugggaaau

SEQ ID NO: 3224390 - RNA, 14 nt, Human
ggcuggcuccccug

SEQ ID NO: 3224391 - RNA, 15 nt, Human
ggcuggcuccccugc

SEQ ID NO: 3224392 - RNA, 16 nt, Human
ggcuggcuccccugca

SEQ ID NO: 3224393 - RNA, 18 nt, Human
ggcuggcuccccugcagc

SEQ ID NO: 3224394 - RNA, 20 nt, Human
ggcuggcuccccugcagccc

SEQ ID NO: 3224395 - RNA, 21 nt, Human
ggcuggcuccccugcagcccu

SEQ ID NO: 3224396 - RNA, 18 nt, Human
gggagggcuccagacaca

SEQ ID NO: 3224397 - RNA, 16 nt, Human
gggaggggagacuuug

SEQ ID NO: 3224398 - RNA, 23 nt, Human
gggauuuguugauucucuccauu

SEQ ID NO: 3224399 - RNA, 23 nt, Human
gggcagagcagagaccaucccug

SEQ ID NO: 3224400 - RNA, 15 nt, Human
gggauuuccaugaug

SEQ ID NO: 3224401 - RNA, 15 nt, Human
aaaagguugaauaau

SEQ ID NO: 3224402 - RNA, 17 nt, Human
aaaaggcuuauaaaaca

SEQ ID NO: 3224403 - RNA, 19 nt, Human
aaaaggcuuauaaaacaga

SEQ ID NO: 3224404 - RNA, 20 nt, Human
aaaaggcuuauaaaacagag

SEQ ID NO: 3224405 - RNA, 22 nt, Human
gggcaggacagguccucccugc

SEQ ID NO: 3224406 - RNA, 14 nt, Human
gggcaggaccagcc

SEQ ID NO: 3224407 - RNA, 13 nt, Human
gggcaggaccagc

SEQ ID NO: 3224408 - RNA, 21 nt, Human
gggcaggaccagcccacgcug

SEQ ID NO: 3224409 - RNA, 18 nt, Human
gggcaggaccagcccacg

SEQ ID NO: 3224410 - RNA, 17 nt, Human
gggcaggaccagcccac

SEQ ID NO: 3224411 - RNA, 16 nt, Human
gggcaggaccagccca

SEQ ID NO: 3224412 - RNA, 15 nt, Human
gggcaggaccagccc

SEQ ID NO: 3224413 - RNA, 13 nt, Human
aaaauauguauua

SEQ ID NO: 3224414 - RNA, 13 nt, Human
aaaauauagcuaa

SEQ ID NO: 3224415 - RNA, 14 nt, Human
aaaauauacauguu

SEQ ID NO: 3224416 - RNA, 11 nt, Human
aaaauauacau

SEQ ID NO: 3224417 - RNA, 13 nt, Human
aaaauauacaaaa

SEQ ID NO: 3224418 - RNA, 12 nt, Human
aaaauagccugc

SEQ ID NO: 3224419 - RNA, 15 nt, Human
aaaauaggcuuuuua

SEQ ID NO: 3224420 - RNA, 16 nt, Human
aaaauaggcuuuuuaa

SEQ ID NO: 3224421 - RNA, 17 nt, Human
aaaauaggcuuuuuaau

SEQ ID NO: 3224422 - RNA, 21 nt, Human
aaaauaggcuuuuuaaucaug

SEQ ID NO: 3224423 - RNA, 13 nt, Human
aaaauaguuuauu

SEQ ID NO: 3224424 - RNA, 14 nt, Human
aaaauaguuuauuu

SEQ ID NO: 3224425 - RNA, 13 nt, Human
aaaauaaagcaag

SEQ ID NO: 3224426 - RNA, 11 nt, Human
aaaauaaagca

SEQ ID NO: 3224427 - RNA, 12 nt, Human
aaaauaaauuau

SEQ ID NO: 3224428 - RNA, 12 nt, Human
aaaaguaaaaug

SEQ ID NO: 3224429 - RNA, 13 nt, Human
aaaaguaaaaugu

SEQ ID NO: 3224430 - RNA, 13 nt, Human
aaaaguaauauuu

SEQ ID NO: 3224431 - RNA, 15 nt, Human
aaaaguaauauuuau

SEQ ID NO: 3224432 - RNA, 15 nt, Human
aaaaguagaacuuug

SEQ ID NO: 3224433 - RNA, 13 nt, Human
aaaaguagaacuu

SEQ ID NO: 3224434 - RNA, 13 nt, Human
aaaauaaauugga

SEQ ID NO: 3224435 - RNA, 14 nt, Human
aaaagccuuggccu

SEQ ID NO: 3224436 - RNA, 11 nt, Human
aaaagccuugg

SEQ ID NO: 3224437 - RNA, 21 nt, Human
aaaacuuuaugcuaagugaaa

SEQ ID NO: 3224438 - RNA, 22 nt, Human
aaaacuugauguguuaucucuu

SEQ ID NO: 3224439 - RNA, 17 nt, Human
aaaacuacuuagcacuu

SEQ ID NO: 3224440 - RNA, 15 nt, Human
aaaacuuuaaaccug

SEQ ID NO: 3224441 - RNA, 17 nt, Human
aaaagcuagaacacugc

SEQ ID NO: 3224442 - RNA, 16 nt, Human
aaaagcuauaaauuau

SEQ ID NO: 3224443 - RNA, 16 nt, Human
aaaagcuaucuucaug

SEQ ID NO: 3224444 - RNA, 19 nt, Human
aaaagcuaucuucauguaa

SEQ ID NO: 3224445 - RNA, 14 nt, Human
aaaagcugggcagg

SEQ ID NO: 3224446 - RNA, 23 nt, Human
gggacugccagucccccugcccc

SEQ ID NO: 3224447 - RNA, 20 nt, Human
aaaagcugaacacauuucuu

SEQ ID NO: 3224448 - RNA, 19 nt, Human
aaaagcugaacacauuucu

SEQ ID NO: 3224449 - RNA, 18 nt, Human
aaaagcugaacacauuuc

SEQ ID NO: 3224450 - RNA, 16 nt, Human
aaaagcugaacacauu

SEQ ID NO: 3224451 - RNA, 20 nt, Human
gggaggcagagguugcagug

SEQ ID NO: 3224452 - RNA, 19 nt, Human
gggaggccaagaguggccc

SEQ ID NO: 3224453 - RNA, 23 nt, Human
gggaggccaagaguggccccacc

SEQ ID NO: 3224454 - RNA, 22 nt, Human
gggaggccaagaguggccccac

SEQ ID NO: 3224455 - RNA, 11 nt, Human
gggagggcucc

SEQ ID NO: 3224456 - RNA, 13 nt, Human
gggagggcuccag

SEQ ID NO: 3224457 - RNA, 13 nt, Human
gggagggccuggg

SEQ ID NO: 3224458 - RNA, 11 nt, Human
gggaggcagag

SEQ ID NO: 3224459 - RNA, 14 nt, Human
gggagacuuugaug

SEQ ID NO: 3224460 - RNA, 18 nt, Human
aaaacugauuuuuuuuuc

SEQ ID NO: 3224461 - RNA, 22 nt, Human
aaaacugauuuuuuuuuccuuc

SEQ ID NO: 3224462 - RNA, 21 nt, Human
aaaacguggcugcuucaagga

SEQ ID NO: 3224463 - RNA, 19 nt, Human
aaaaccaagccguggcuuc

SEQ ID NO: 3224464 - RNA, 14 nt, Human
aaaacuacuuagca

SEQ ID NO: 3224465 - RNA, 13 nt, Human
aaaacuaaguucu

SEQ ID NO: 3224466 - RNA, 14 nt, Human
aaaacguggcugcu

SEQ ID NO: 3224467 - RNA, 16 nt, Human
aaaacguggcugcuuc

SEQ ID NO: 3224468 - RNA, 17 nt, Human
aaaacguggcugcuuca

SEQ ID NO: 3224469 - RNA, 18 nt, Human
aaaacguggcugcuucaa

SEQ ID NO: 3224470 - RNA, 15 nt, Human
aaaaccaauguucuc

SEQ ID NO: 3224471 - RNA, 23 nt, Human
aaaaccaaaaguuauuaaaauug

SEQ ID NO: 3224472 - RNA, 20 nt, Human
aaaaccaaaaguuauuaaaa

SEQ ID NO: 3224473 - RNA, 19 nt, Human
aaaaauuauugauugcuuu

SEQ ID NO: 3224474 - RNA, 18 nt, Human
aaaacauuuggcagaaaa

SEQ ID NO: 3224475 - RNA, 21 nt, Human
aaaaaucugaagauuguuuau

SEQ ID NO: 3224476 - RNA, 20 nt, Human
aaaaaucugaagauuguuua

SEQ ID NO: 3224477 - RNA, 13 nt, Human
aaaaaucugaaga

SEQ ID NO: 3224478 - RNA, 17 nt, Human
aaaaaucugaagauugu

SEQ ID NO: 3224479 - RNA, 14 nt, Human
aaaaaucugaagau

SEQ ID NO: 3224480 - RNA, 18 nt, Human
aaaaaucuuaauacuguu

SEQ ID NO: 3224481 - RNA, 15 nt, Human
aaaaaucuuaauacu

SEQ ID NO: 3224482 - RNA, 18 nt, Human
aaaaaucugcuguuaacu

SEQ ID NO: 3224483 - RNA, 23 nt, Human
aaaaaucugaagauuguuuaucu

SEQ ID NO: 3224484 - RNA, 19 nt, Human
aaaaaucuuaauacuguua

SEQ ID NO: 3224485 - RNA, 22 nt, Human
aaaaaugagcuugauuaaauca

SEQ ID NO: 3224486 - RNA, 23 nt, Human
aaaaaugucaaaaguagaacuuu

SEQ ID NO: 3224487 - RNA, 18 nt, Human
aaaaaugucaaaaguaga

SEQ ID NO: 3224488 - RNA, 18 nt, Human
aaaaaugccaucaaauga

SEQ ID NO: 3224489 - RNA, 13 nt, Human
aaaaauuacaguu

SEQ ID NO: 3224490 - RNA, 22 nt, Human
aaaaauguuaagcaucuaagga

SEQ ID NO: 3224491 - RNA, 18 nt, Human
aaaaauguuaagcaucua

SEQ ID NO: 3224492 - RNA, 22 nt, Human
gggaacagacuggaagcacagc

SEQ ID NO: 3224493 - RNA, 14 nt, Human
gggaacagacugga

SEQ ID NO: 3224494 - RNA, 18 nt, Human
gggaaaugcugauuuaaa

SEQ ID NO: 3224495 - RNA, 21 nt, Human
gggaaaguauucucuuuucaa

SEQ ID NO: 3224496 - RNA, 23 nt, Human
gggaaaucgagugccgcaucuca

SEQ ID NO: 3224497 - RNA, 21 nt, Human
gggaaagccuuaagcugcagg

SEQ ID NO: 3224498 - RNA, 12 nt, Human
aaaauaugugaa

SEQ ID NO: 3224499 - RNA, 20 nt, Human
aaaauaugucccagaaaugu

SEQ ID NO: 3224500 - RNA, 14 nt, Human
aaaauauguauuaa

SEQ ID NO: 3224501 - RNA, 18 nt, Human
aaaauaugugaaggaccu

SEQ ID NO: 3224502 - RNA, 13 nt, Human
aaaauaugugaag

SEQ ID NO: 3224503 - RNA, 20 nt, Human
aaaauggaagacagcucuua

SEQ ID NO: 3224504 - RNA, 21 nt, Human
aaaauguaggguuauaauaau

SEQ ID NO: 3224505 - RNA, 22 nt, Human
aaaauguacauguauuaaauua

SEQ ID NO: 3224506 - RNA, 21 nt, Human
aaaauguacauguauuaaauu

SEQ ID NO: 3224507 - RNA, 18 nt, Human
aaaauguacauguauuaa

SEQ ID NO: 3224508 - RNA, 16 nt, Human
aaaauguacauguauu

SEQ ID NO: 3224509 - RNA, 15 nt, Human
aaaauguacauguau

SEQ ID NO: 3224510 - RNA, 21 nt, Human
aaaauggacguguuaugacuc

SEQ ID NO: 3224511 - RNA, 19 nt, Human
aaaauggcaacaaacugca

SEQ ID NO: 3224512 - RNA, 14 nt, Human
aaaauguacaugua

SEQ ID NO: 3224513 - RNA, 18 nt, Human
aaaauuuaaaaagcccaa

SEQ ID NO: 3224514 - RNA, 16 nt, Human
aaaauugugauguguc

SEQ ID NO: 3224515 - RNA, 13 nt, Human
aaaauguaucuaa

SEQ ID NO: 3224516 - RNA, 23 nt, Human
aaacaaaagcugaacacauuucu

SEQ ID NO: 3224517 - RNA, 19 nt, Human
aaacaaaagcugaacacau

SEQ ID NO: 3224518 - RNA, 13 nt, Human
aaacaaaaccaaa

SEQ ID NO: 3224519 - RNA, 12 nt, Human
aaacaaaaccaa

SEQ ID NO: 3224520 - RNA, 19 nt, Human
aaaauuuaaaaagcccaac

SEQ ID NO: 3224521 - RNA, 17 nt, Human
aaaauuuaaaaguaaaa

SEQ ID NO: 3224522 - RNA, 19 nt, Human
aaaauuuaaaaguaaaaug

SEQ ID NO: 3224523 - RNA, 12 nt, Human
aaacaaaaggca

SEQ ID NO: 3224524 - RNA, 19 nt, Human
aaacaacagucuucauuuu

SEQ ID NO: 3224525 - RNA, 12 nt, Human
aaacaacauuua

SEQ ID NO: 3224526 - RNA, 17 nt, Human
aaacaacauuuauaugu

SEQ ID NO: 3224527 - RNA, 18 nt, Human
aaacaacauuuauaugua

SEQ ID NO: 3224528 - RNA, 12 nt, Human
aaacaagaauga

SEQ ID NO: 3224529 - RNA, 17 nt, Human
ggggccaguuggucccc

SEQ ID NO: 3224530 - RNA, 16 nt, Human
ggggcccugccuccuu

SEQ ID NO: 3224531 - RNA, 15 nt, Human
ggggcccugccuccu

SEQ ID NO: 3224532 - RNA, 19 nt, Human
ggggcccugccuccuuugu

SEQ ID NO: 3224533 - RNA, 23 nt, Human
ggggcccugccuccuuugugagg

SEQ ID NO: 3224534 - RNA, 13 nt, Human
ggggaccucaggc

SEQ ID NO: 3224535 - RNA, 15 nt, Human
ggggaccucaggccu

SEQ ID NO: 3224536 - RNA, 16 nt, Human
ggggaccucaggccug

SEQ ID NO: 3224537 - RNA, 17 nt, Human
ggggaccucaggccugg

SEQ ID NO: 3224538 - RNA, 24 nt, Human
ggggaaaaucagccugcuccagcu

SEQ ID NO: 3224539 - RNA, 16 nt, Human
ggggaacguucucuuu

SEQ ID NO: 3224540 - RNA, 15 nt, Human
aaacaauaaagcaau

SEQ ID NO: 3224541 - RNA, 19 nt, Human
aaacacaaacgggcucagc

SEQ ID NO: 3224542 - RNA, 20 nt, Human
aaacaagcauauaaaauggc

SEQ ID NO: 3224543 - RNA, 18 nt, Human
aaacaagcauauaaaaug

SEQ ID NO: 3224544 - RNA, 15 nt, Human
aaacaagcauauaaa

SEQ ID NO: 3224545 - RNA, 12 nt, Human
aaacaagcauau

SEQ ID NO: 3224546 - RNA, 23 nt, Human
aaacaagaaugaagguuuuugua

SEQ ID NO: 3224547 - RNA, 15 nt, Human
aaacaagaaugaagg

SEQ ID NO: 3224548 - RNA, 16 nt, Human
aaacauacgugugcau

SEQ ID NO: 3224549 - RNA, 22 nt, Human
aaacauguugccaaaauggugg

SEQ ID NO: 3224550 - RNA, 20 nt, Human
aaacauguugccaaaauggu

SEQ ID NO: 3224551 - RNA, 23 nt, Human
gggucucacuauguugcccaggc

SEQ ID NO: 3224552 - RNA, 22 nt, Human
gggucucacuauguugcccagg

SEQ ID NO: 3224553 - RNA, 17 nt, Human
gggucaggccgggcaga

SEQ ID NO: 3224554 - RNA, 21 nt, Human
gggucaggccgggcagagcac

SEQ ID NO: 3224555 - RNA, 18 nt, Human
gggucaggccgggcagag

SEQ ID NO: 3224556 - RNA, 14 nt, Human
aaacauuaaaauau

SEQ ID NO: 3224557 - RNA, 22 nt, Human
aaacauuggaagcagguuaaau

SEQ ID NO: 3224558 - RNA, 19 nt, Human
aaacauuggaagcagguua

SEQ ID NO: 3224559 - RNA, 17 nt, Human
aaacauuggaagcaggu

SEQ ID NO: 3224560 - RNA, 13 nt, Human
aaacauuggaagc

SEQ ID NO: 3224561 - RNA, 16 nt, Human
aaacauugcuuuuaaa

SEQ ID NO: 3224562 - RNA, 13 nt, Human
aaacauugcuuuu

SEQ ID NO: 3224563 - RNA, 13 nt, Human
aaaccaacaccau

SEQ ID NO: 3224564 - RNA, 14 nt, Human
aaaccaagccgugg

SEQ ID NO: 3224565 - RNA, 14 nt, Human
aaacauuucauaau

SEQ ID NO: 3224566 - RNA, 16 nt, Human
aaacauuucauaauuu

SEQ ID NO: 3224567 - RNA, 22 nt, Human
aaaccaaaaguuauuaaaauug

SEQ ID NO: 3224568 - RNA, 20 nt, Human
aaaccaaaaguuauuaaaau

SEQ ID NO: 3224569 - RNA, 19 nt, Human
aaaccaaaaguuauuaaaa

SEQ ID NO: 3224570 - RNA, 15 nt, Human
ggggaagaauaauuu

SEQ ID NO: 3224571 - RNA, 20 nt, Human
ggggccuuugggugcuguuu

SEQ ID NO: 3224572 - RNA, 23 nt, Human
ggggucucucacagacaggaccc

SEQ ID NO: 3224573 - RNA, 19 nt, Human
ggggucucucacagacagg

SEQ ID NO: 3224574 - RNA, 17 nt, Human
ggggucucucacagaca

SEQ ID NO: 3224575 - RNA, 15 nt, Human
ggggucucucacaga

SEQ ID NO: 3224576 - RNA, 23 nt, Human
ggggucuguguguuuaugugugu

SEQ ID NO: 3224577 - RNA, 23 nt, Human
ggguagcuguaaggcaugaagga

SEQ ID NO: 3224578 - RNA, 20 nt, Human
ggguaucaggugcugccauc

SEQ ID NO: 3224579 - RNA, 14 nt, Human
gggucagaagagag

SEQ ID NO: 3224580 - RNA, 22 nt, Human
gggucacucuggcagcucagag

SEQ ID NO: 3224581 - RNA, 15 nt, Human
aaaccacagcaguug

SEQ ID NO: 3224582 - RNA, 16 nt, Human
aaaccacagcaguuga

SEQ ID NO: 3224583 - RNA, 16 nt, Human
aaacgcuucaguuguu

SEQ ID NO: 3224584 - RNA, 16 nt, Human
aaacguggcugcuuca

SEQ ID NO: 3224585 - RNA, 12 nt, Human
aaacgugaaaau

SEQ ID NO: 3224586 - RNA, 17 nt, Human
aaacguggcugcuucaa

SEQ ID NO: 3224587 - RNA, 12 nt, Human
aaacuaauaaaa

SEQ ID NO: 3224588 - RNA, 13 nt, Human
aaacuaauaaaau

SEQ ID NO: 3224589 - RNA, 14 nt, Human
aaacuaauaaaaua

SEQ ID NO: 3224590 - RNA, 18 nt, Human
aaacuaauaaaauauuuu

SEQ ID NO: 3224591 - RNA, 19 nt, Human
aaacuaauaaaauauuuuc

SEQ ID NO: 3224592 - RNA, 20 nt, Human
aaacuaauaaaauauuuucu

SEQ ID NO: 3224593 - RNA, 21 nt, Human
aaacuaauaaaauauuuucug

SEQ ID NO: 3224594 - RNA, 22 nt, Human
aaacuaauaaaauauuuucugu

SEQ ID NO: 3224595 - RNA, 23 nt, Human
aaacuaauaaaauauuuucugug

SEQ ID NO: 3224596 - RNA, 15 nt, Human
aaacuaagauucuuu

SEQ ID NO: 3224597 - RNA, 16 nt, Human
aaacuaagauucuuuu

SEQ ID NO: 3224598 - RNA, 16 nt, Human
aaacuacugaaugaag

SEQ ID NO: 3224599 - RNA, 20 nt, Human
aaacuacugaaugaagcagu

SEQ ID NO: 3224600 - RNA, 21 nt, Human
aaacuacugaaugaagcagua

SEQ ID NO: 3224601 - RNA, 15 nt, Human
aaacucauuuugcuu

SEQ ID NO: 3224602 - RNA, 22 nt, Human
aaacuccagaugccacaaugga

SEQ ID NO: 3224603 - RNA, 15 nt, Human
aaacuccagaugcca

SEQ ID NO: 3224604 - RNA, 12 nt, Human
aaacugcccccu

SEQ ID NO: 3224605 - RNA, 11 nt, Human
aaacugccccc

SEQ ID NO: 3224606 - RNA, 15 nt, Human
aaacuggaaugagca

SEQ ID NO: 3224607 - RNA, 13 nt, Human
aaacugcccccuc

SEQ ID NO: 3224608 - RNA, 17 nt, Human
aaacugcccccucugcc

SEQ ID NO: 3224609 - RNA, 19 nt, Human
aaacugcccccucugcccu

SEQ ID NO: 3224610 - RNA, 20 nt, Human
aaacugcccccucugcccug

SEQ ID NO: 3224611 - RNA, 20 nt, Human
aaacugggcuggaagauauu

SEQ ID NO: 3224612 - RNA, 21 nt, Human
ggucuugguuccagccugcca

SEQ ID NO: 3224613 - RNA, 20 nt, Human
ggucuugguuccagccugcc

SEQ ID NO: 3224614 - RNA, 10 nt, Human
ggucuuugag

SEQ ID NO: 3224615 - RNA, 16 nt, Human
ggucuugcauuuaaaa

SEQ ID NO: 3224616 - RNA, 19 nt, Human
ggucuugcaaaauuccuga

SEQ ID NO: 3224617 - RNA, 21 nt, Human
ggugauccacucgccuucauc

SEQ ID NO: 3224618 - RNA, 22 nt, Human
ggucuuuuccucgcuucuuuca

SEQ ID NO: 3224619 - RNA, 17 nt, Human
ggucuuugagcucccac

SEQ ID NO: 3224620 - RNA, 15 nt, Human
ggugccaguuauggc

SEQ ID NO: 3224621 - RNA, 19 nt, Human
ggugcagacaaucuucugu

SEQ ID NO: 3224622 - RNA, 23 nt, Human
ggugcacuuggggcacagggaga

SEQ ID NO: 3224623 - RNA, 22 nt, Human
ggugcacgcuggggaagaauuu

SEQ ID NO: 3224624 - RNA, 17 nt, Human
ggugcaaaguauuguaa

SEQ ID NO: 3224625 - RNA, 16 nt, Human
ggugauguccuguaaa

SEQ ID NO: 3224626 - RNA, 22 nt, Human
ggugauguugacaucacuggca

SEQ ID NO: 3224627 - RNA, 16 nt, Human
ggugcacaagcuccaa

SEQ ID NO: 3224628 - RNA, 22 nt, Human
ggugcacaagcuccaagcuccc

SEQ ID NO: 3224629 - RNA, 22 nt, Human
aaagauuuugaucucacauuuu

SEQ ID NO: 3224630 - RNA, 16 nt, Human
aaagauuuugaucuca

SEQ ID NO: 3224631 - RNA, 19 nt, Human
ggucuggaggaccugcccg

SEQ ID NO: 3224632 - RNA, 14 nt, Human
ggucuggaggaccu

SEQ ID NO: 3224633 - RNA, 19 nt, Human
ggucugcugccucaggaau

SEQ ID NO: 3224634 - RNA, 14 nt, Human
ggucugugagaugc

SEQ ID NO: 3224635 - RNA, 22 nt, Human
ggucuugaacuccuggccucaa

SEQ ID NO: 3224636 - RNA, 21 nt, Human
ggucuugaacuccuggccuca

SEQ ID NO: 3224637 - RNA, 14 nt, Human
aaagcgaauuuuaa

SEQ ID NO: 3224638 - RNA, 16 nt, Human
aaagcagugcaugcug

SEQ ID NO: 3224639 - RNA, 22 nt, Human
aaagcaccaaaauaagaaaaga

SEQ ID NO: 3224640 - RNA, 18 nt, Human
aaagcggguuauaaugaa

SEQ ID NO: 3224641 - RNA, 21 nt, Human
aaagcagugcaugcugucccu

SEQ ID NO: 3224642 - RNA, 22 nt, Human
aaagcagugcaugcugucccuu

SEQ ID NO: 3224643 - RNA, 18 nt, Human
aaagcuaggccuggccag

SEQ ID NO: 3224644 - RNA, 17 nt, Human
aaagcuaggccuggcca

SEQ ID NO: 3224645 - RNA, 17 nt, Human
aaagcagugcaugcugu

SEQ ID NO: 3224646 - RNA, 21 nt, Human
aaagcaccaaaauaagaaaag

SEQ ID NO: 3224647 - RNA, 20 nt, Human
aaagcaccaaaauaagaaaa

SEQ ID NO: 3224648 - RNA, 19 nt, Human
aaagcaccaaaauaagaaa

SEQ ID NO: 3224649 - RNA, 18 nt, Human
aaagcaccaaaauaagaa

SEQ ID NO: 3224650 - RNA, 13 nt, Human
aaagcacaaagga

SEQ ID NO: 3224651 - RNA, 17 nt, Human
aaagcaccaaaauaaga

SEQ ID NO: 3224652 - RNA, 16 nt, Human
aaagcaccaaaauaag

SEQ ID NO: 3224653 - RNA, 22 nt, Human
ggugccaugucagcgcucuggu

SEQ ID NO: 3224654 - RNA, 16 nt, Human
ggugccaucagugccc

SEQ ID NO: 3224655 - RNA, 11 nt, Human
aaaggaaagag

SEQ ID NO: 3224656 - RNA, 12 nt, Human
aaaggaaaccuu

SEQ ID NO: 3224657 - RNA, 13 nt, Human
aaaggaaaccuuu

SEQ ID NO: 3224658 - RNA, 14 nt, Human
aaaggaaaccuuuu

SEQ ID NO: 3224659 - RNA, 13 nt, Human
aaagcuuauuaaa

SEQ ID NO: 3224660 - RNA, 19 nt, Human
aaagcuagucaacaguacc

SEQ ID NO: 3224661 - RNA, 18 nt, Human
aaagcuaucuucauguaa

SEQ ID NO: 3224662 - RNA, 13 nt, Human
aaagcuuuuugaa

SEQ ID NO: 3224663 - RNA, 13 nt, Human
aaaggaaaagaaa

SEQ ID NO: 3224664 - RNA, 12 nt, Human
aaagcuucugug

SEQ ID NO: 3224665 - RNA, 20 nt, Human
aaagcuucccucccugcugu

SEQ ID NO: 3224666 - RNA, 16 nt, Human
aaagcuucccucccug

SEQ ID NO: 3224667 - RNA, 13 nt, Human
aaagcuucccucc

SEQ ID NO: 3224668 - RNA, 13 nt, Human
aaagcuucugugg

SEQ ID NO: 3224669 - RNA, 18 nt, Human
gguauuaagauuauaauu

SEQ ID NO: 3224670 - RNA, 16 nt, Human
gguauuaauaaaaaga

SEQ ID NO: 3224671 - RNA, 19 nt, Human
gguccacccaggagccccg

SEQ ID NO: 3224672 - RNA, 20 nt, Human
ggucauuaaggccacaucca

SEQ ID NO: 3224673 - RNA, 21 nt, Human
ggucauuuccauguaugcaua

SEQ ID NO: 3224674 - RNA, 20 nt, Human
ggucauuuccauguaugcau

SEQ ID NO: 3224675 - RNA, 19 nt, Human
ggucaugaugcucuuuccc

SEQ ID NO: 3224676 - RNA, 18 nt, Human
ggucaugaugcucuuucc

SEQ ID NO: 3224677 - RNA, 20 nt, Human
ggucaugaugcucuuuccca

SEQ ID NO: 3224678 - RNA, 14 nt, Human
gguagucaaaggca

SEQ ID NO: 3224679 - RNA, 22 nt, Human
aaacuguacuuugauucacaug

SEQ ID NO: 3224680 - RNA, 14 nt, Human
aaacugucacuguu

SEQ ID NO: 3224681 - RNA, 15 nt, Human
aaacugucacuguug

SEQ ID NO: 3224682 - RNA, 18 nt, Human
aaacuguacuuugauuca

SEQ ID NO: 3224683 - RNA, 15 nt, Human
aaacuguacuuugau

SEQ ID NO: 3224684 - RNA, 14 nt, Human
aaacuguacuuuga

SEQ ID NO: 3224685 - RNA, 12 nt, Human
aaacuguacuuu

SEQ ID NO: 3224686 - RNA, 21 nt, Human
aaacuguacuuugauucacau

SEQ ID NO: 3224687 - RNA, 20 nt, Human
aaacuguacuuugauucaca

SEQ ID NO: 3224688 - RNA, 18 nt, Human
gguauaaguggugugugu

SEQ ID NO: 3224689 - RNA, 13 nt, Human
gguaguuucugug

SEQ ID NO: 3224690 - RNA, 22 nt, Human
gguaguucaagaaaugaagagc

SEQ ID NO: 3224691 - RNA, 19 nt, Human
gguaguucaagaaaugaag

SEQ ID NO: 3224692 - RNA, 14 nt, Human
gguaguucaagaaa

SEQ ID NO: 3224693 - RNA, 13 nt, Human
gguaguucaagaa

SEQ ID NO: 3224694 - RNA, 15 nt, Human
aaacuuguugaauuu

SEQ ID NO: 3224695 - RNA, 16 nt, Human
aaacuuguucuuccaa

SEQ ID NO: 3224696 - RNA, 14 nt, Human
aaacuuuaaaccug

SEQ ID NO: 3224697 - RNA, 22 nt, Human
aaacuuuaaaccuguagaauca

SEQ ID NO: 3224698 - RNA, 12 nt, Human
ggucccacccca

SEQ ID NO: 3224699 - RNA, 22 nt, Human
gguccacccaggagccccgagg

SEQ ID NO: 3224700 - RNA, 20 nt, Human
gguccacccaggagccccga

SEQ ID NO: 3224701 - RNA, 20 nt, Human
gguccacuuuuccaguauuu

SEQ ID NO: 3224702 - RNA, 14 nt, Human
aaagaugcaaugua

SEQ ID NO: 3224703 - RNA, 20 nt, Human
aaagaugagcuuugucuacu

SEQ ID NO: 3224704 - RNA, 17 nt, Human
aaagaugguuaaacauu

SEQ ID NO: 3224705 - RNA, 19 nt, Human
aaagaugguuaaacauuuu

SEQ ID NO: 3224706 - RNA, 20 nt, Human
aaagaugguuaaacauuuuc

SEQ ID NO: 3224707 - RNA, 12 nt, Human
aaagauguagca

SEQ ID NO: 3224708 - RNA, 15 nt, Human
aaagauguagcaaac

SEQ ID NO: 3224709 - RNA, 14 nt, Human
aaagauguagcaaa

SEQ ID NO: 3224710 - RNA, 16 nt, Human
aaagauguucuggaua

SEQ ID NO: 3224711 - RNA, 20 nt, Human
aaagaggcagcuugaaacug

SEQ ID NO: 3224712 - RNA, 18 nt, Human
aaagagagaaacacugaa

SEQ ID NO: 3224713 - RNA, 13 nt, Human
aaagaggcuaugu

SEQ ID NO: 3224714 - RNA, 18 nt, Human
aaagaggcuaugugagca

SEQ ID NO: 3224715 - RNA, 21 nt, Human
aaagaggccaaacaggcccuc

SEQ ID NO: 3224716 - RNA, 15 nt, Human
aaagaggcagcuuga

SEQ ID NO: 3224717 - RNA, 20 nt, Human
aaagaggcaguugcccagcc

SEQ ID NO: 3224718 - RNA, 22 nt, Human
aaagacuauucaaacagucuca

SEQ ID NO: 3224719 - RNA, 12 nt, Human
aaagacaaauag

SEQ ID NO: 3224720 - RNA, 11 nt, Human
aaagacaaaua

SEQ ID NO: 3224721 - RNA, 16 nt, Human
aaagaauuuuuggugu

SEQ ID NO: 3224722 - RNA, 13 nt, Human
aaagaauuuguca

SEQ ID NO: 3224723 - RNA, 13 nt, Human
aaagaauguaaag

SEQ ID NO: 3224724 - RNA, 17 nt, Human
aaagaauggaaggugga

SEQ ID NO: 3224725 - RNA, 23 nt, Human
aaagacuauucaaacagucucag

SEQ ID NO: 3224726 - RNA, 13 nt, Human
aaagacuccaaag

SEQ ID NO: 3224727 - RNA, 14 nt, Human
aaagacuguacaaa

SEQ ID NO: 3224728 - RNA, 14 nt, Human
aaagacaaauagua

SEQ ID NO: 3224729 - RNA, 15 nt, Human
aaagacuguacaaag

SEQ ID NO: 3224730 - RNA, 20 nt, Human
aaagagaccacccauaucau

SEQ ID NO: 3224731 - RNA, 14 nt, Human
aaagagacaggcag

SEQ ID NO: 3224732 - RNA, 14 nt, Human
aaagagaaaagaaa

SEQ ID NO: 3224733 - RNA, 18 nt, Human
aaagagaaaacaucucau

SEQ ID NO: 3224734 - RNA, 13 nt, Human
aaagagaaaagaa

SEQ ID NO: 3224735 - RNA, 12 nt, Human
aaagagaaaaga

SEQ ID NO: 3224736 - RNA, 19 nt, Human
aaagacuuuuccaacccuc

SEQ ID NO: 3224737 - RNA, 13 nt, Human
aaagacuuaaagg

SEQ ID NO: 3224738 - RNA, 17 nt, Human
gccuacccacccccagg

SEQ ID NO: 3224739 - RNA, 16 nt, Human
gccuacccacccccag

SEQ ID NO: 3224740 - RNA, 19 nt, Human
gccuacaugcuuugugaac

SEQ ID NO: 3224741 - RNA, 23 nt, Human
gccuacuccugucuucugcuuug

SEQ ID NO: 3224742 - RNA, 22 nt, Human
gccuacuccugucuucugcuuu

SEQ ID NO: 3224743 - RNA, 16 nt, Human
gccuacuccugucuuc

SEQ ID NO: 3224744 - RNA, 15 nt, Human
gccuacuccugucuu

SEQ ID NO: 3224745 - RNA, 13 nt, Human
gccuacuccuguc

SEQ ID NO: 3224746 - RNA, 13 nt, Human
gccuccuccagcc

SEQ ID NO: 3224747 - RNA, 18 nt, Human
gccuccugcccuuaccug

SEQ ID NO: 3224748 - RNA, 12 nt, Human
gccucugggacu

SEQ ID NO: 3224749 - RNA, 19 nt, Human
gccucuggcucuacacaua

SEQ ID NO: 3224750 - RNA, 18 nt, Human
gccuccuguggccugcca

SEQ ID NO: 3224751 - RNA, 14 nt, Human
gccuccuguggccu

SEQ ID NO: 3224752 - RNA, 20 nt, Human
gccuccuguggccugccagu

SEQ ID NO: 3224753 - RNA, 12 nt, Human
gccucuucucua

SEQ ID NO: 3224754 - RNA, 23 nt, Human
gccucuucucuacucuagggaaa

SEQ ID NO: 3224755 - RNA, 15 nt, Human
gccucuucugagcuu

SEQ ID NO: 3224756 - RNA, 15 nt, Human
gccucuucucucaga

SEQ ID NO: 3224757 - RNA, 16 nt, Human
gccucuucucucagac

SEQ ID NO: 3224758 - RNA, 12 nt, Human
gccucuuccucc

SEQ ID NO: 3224759 - RNA, 22 nt, Human
gccucuuccucccucauuccac

SEQ ID NO: 3224760 - RNA, 19 nt, Human
gccugcccaggccccugcc

SEQ ID NO: 3224761 - RNA, 18 nt, Human
gccugcccaggccccugc

SEQ ID NO: 3224762 - RNA, 17 nt, Human
gccugcccaggccccug

SEQ ID NO: 3224763 - RNA, 16 nt, Human
gccuggccccucaggg

SEQ ID NO: 3224764 - RNA, 17 nt, Human
gccuggccccucagggu

SEQ ID NO: 3224765 - RNA, 15 nt, Human
gccuggccccucagg

SEQ ID NO: 3224766 - RNA, 18 nt, Human
gccugggaucccucaucc

SEQ ID NO: 3224767 - RNA, 17 nt, Human
gccugggauaggggcag

SEQ ID NO: 3224768 - RNA, 22 nt, Human
gccugggaggucaaggcugcag

SEQ ID NO: 3224769 - RNA, 14 nt, Human
gccugggaucccuc

SEQ ID NO: 3224770 - RNA, 21 nt, Human
gccugggaggucaaggcugca

SEQ ID NO: 3224771 - RNA, 10 nt, Human
gccuggccug

SEQ ID NO: 3224772 - RNA, 20 nt, Human
gccuggccccucaggguccc

SEQ ID NO: 3224773 - RNA, 22 nt, Human
gccuggccccucagggucccug

SEQ ID NO: 3224774 - RNA, 16 nt, Human
gccugccucuucucua

SEQ ID NO: 3224775 - RNA, 17 nt, Human
gccugccuguucccauu

SEQ ID NO: 3224776 - RNA, 22 nt, Human
gccugccuugcccacuccugcu

SEQ ID NO: 3224777 - RNA, 20 nt, Human
gccugccuuaagugaggaaa

SEQ ID NO: 3224778 - RNA, 21 nt, Human
gccugccuuaagugaggaaau

SEQ ID NO: 3224779 - RNA, 20 nt, Human
gccugccuuuggcacucuga

SEQ ID NO: 3224780 - RNA, 14 nt, Human
gcccaugggaggga

SEQ ID NO: 3224781 - RNA, 15 nt, Human
gcccaugggagggag

SEQ ID NO: 3224782 - RNA, 16 nt, Human
gcccaugggagggagc

SEQ ID NO: 3224783 - RNA, 15 nt, Human
gcccauguauggcca

SEQ ID NO: 3224784 - RNA, 21 nt, Human
gcccauguauggccaggaagu

SEQ ID NO: 3224785 - RNA, 20 nt, Human
gcccauguauggccaggaag

SEQ ID NO: 3224786 - RNA, 18 nt, Human
gcccauguauggccagga

SEQ ID NO: 3224787 - RNA, 17 nt, Human
gcccauguauggccagg

SEQ ID NO: 3224788 - RNA, 16 nt, Human
gcccauguauggccag

SEQ ID NO: 3224789 - RNA, 19 nt, Human
gcccacuccugcucugcuc

SEQ ID NO: 3224790 - RNA, 14 nt, Human
gcccacucccugca

SEQ ID NO: 3224791 - RNA, 15 nt, Human
gcccacucccugcaa

SEQ ID NO: 3224792 - RNA, 19 nt, Human
gcccacucccugcaaccug

SEQ ID NO: 3224793 - RNA, 18 nt, Human
gcccacuccugcucugcu

SEQ ID NO: 3224794 - RNA, 17 nt, Human
gcccacuccugcucugc

SEQ ID NO: 3224795 - RNA, 16 nt, Human
gcccacuccugcucug

SEQ ID NO: 3224796 - RNA, 15 nt, Human
gcccacuccugcucu

SEQ ID NO: 3224797 - RNA, 13 nt, Human
gcccacuccugcu

SEQ ID NO: 3224798 - RNA, 13 nt, Human
gcccacucccugc

SEQ ID NO: 3224799 - RNA, 23 nt, Human
gcccacuagacccacuggacuca

SEQ ID NO: 3224800 - RNA, 22 nt, Human
gcccacgcugacuacagggccg

SEQ ID NO: 3224801 - RNA, 19 nt, Human
gcccacgcugacuacaggg

SEQ ID NO: 3224802 - RNA, 18 nt, Human
gcccacgcugacuacagg

SEQ ID NO: 3224803 - RNA, 17 nt, Human
gcccacuagacccacug

SEQ ID NO: 3224804 - RNA, 23 nt, Human
gcccuaaugcgcaggcuggcccu

SEQ ID NO: 3224805 - RNA, 15 nt, Human
gccccuggaugcagc

SEQ ID NO: 3224806 - RNA, 16 nt, Human
gccccuggaugcagcc

SEQ ID NO: 3224807 - RNA, 18 nt, Human
gccccuggaugcagccuc

SEQ ID NO: 3224808 - RNA, 22 nt, Human
gccccuggaugcagccucacag

SEQ ID NO: 3224809 - RNA, 15 nt, Human
gccccugccccugcc

SEQ ID NO: 3224810 - RNA, 15 nt, Human
gcccguggggccggg

SEQ ID NO: 3224811 - RNA, 19 nt, Human
gcccguggggccggggcuu

SEQ ID NO: 3224812 - RNA, 22 nt, Human
gcccguggggccggggcuucug

SEQ ID NO: 3224813 - RNA, 16 nt, Human
gcccccaggugccagu

SEQ ID NO: 3224814 - RNA, 18 nt, Human
gccccaaaacucuccucu

SEQ ID NO: 3224815 - RNA, 20 nt, Human
gcccauuugggcagagaggc

SEQ ID NO: 3224816 - RNA, 19 nt, Human
gcccauuugggcagagagg

SEQ ID NO: 3224817 - RNA, 19 nt, Human
gcccauguggagucagccu

SEQ ID NO: 3224818 - RNA, 17 nt, Human
gcccauuuggagggccu

SEQ ID NO: 3224819 - RNA, 16 nt, Human
gcccauuuggagggcc

SEQ ID NO: 3224820 - RNA, 18 nt, Human
gcccauuugggcagagag

SEQ ID NO: 3224821 - RNA, 15 nt, Human
gcccauuugggcaga

SEQ ID NO: 3224822 - RNA, 20 nt, Human
gcccauuuggagggccuggg

SEQ ID NO: 3224823 - RNA, 18 nt, Human
gcccauuuggagggccug

SEQ ID NO: 3224824 - RNA, 14 nt, Human
gccccugcccggcu

SEQ ID NO: 3224825 - RNA, 13 nt, Human
gccccugcccggc

SEQ ID NO: 3224826 - RNA, 13 nt, Human
gcccuguuaaaag

SEQ ID NO: 3224827 - RNA, 23 nt, Human
gcccugcugagucccaggcugag

SEQ ID NO: 3224828 - RNA, 21 nt, Human
gcccugcugagucccaggcug

SEQ ID NO: 3224829 - RNA, 22 nt, Human
gcccugcugagucccaggcuga

SEQ ID NO: 3224830 - RNA, 17 nt, Human
gcccuguuaaaagauga

SEQ ID NO: 3224831 - RNA, 14 nt, Human
gcccuguuaaaaga

SEQ ID NO: 3224832 - RNA, 21 nt, Human
gcccugugggcccccaaaugg

SEQ ID NO: 3224833 - RNA, 16 nt, Human
gcccugccuccuuugu

SEQ ID NO: 3224834 - RNA, 22 nt, Human
gcccugccuccuuugugaggaa

SEQ ID NO: 3224835 - RNA, 16 nt, Human
gcccugcugaguccca

SEQ ID NO: 3224836 - RNA, 21 nt, Human
gcccugccucuccgccccuga

SEQ ID NO: 3224837 - RNA, 18 nt, Human
gcccugccucuccgcccc

SEQ ID NO: 3224838 - RNA, 17 nt, Human
gcccugccucuccgccc

SEQ ID NO: 3224839 - RNA, 15 nt, Human
gcccugccucuccgc

SEQ ID NO: 3224840 - RNA, 13 nt, Human
gcccugccucucc

SEQ ID NO: 3224841 - RNA, 14 nt, Human
gcccugccuccuuu

SEQ ID NO: 3224842 - RNA, 15 nt, Human
gccgccuucacagca

SEQ ID NO: 3224843 - RNA, 15 nt, Human
gccgccaugcuccug

SEQ ID NO: 3224844 - RNA, 16 nt, Human
gcccuuaccugccagg

SEQ ID NO: 3224845 - RNA, 20 nt, Human
gcccuuaccugccaggaagc

SEQ ID NO: 3224846 - RNA, 16 nt, Human
gccgccaugcuccugg

SEQ ID NO: 3224847 - RNA, 20 nt, Human
gccauauucuguuggccagu

SEQ ID NO: 3224848 - RNA, 19 nt, Human
gccauauucuguuggccag

SEQ ID NO: 3224849 - RNA, 14 nt, Human
gccauguuggccag

SEQ ID NO: 3224850 - RNA, 18 nt, Human
gccauguuggccaggcug

SEQ ID NO: 3224851 - RNA, 17 nt, Human
gccauguuggccaggcu

SEQ ID NO: 3224852 - RNA, 16 nt, Human
gccauguuggccaggc

SEQ ID NO: 3224853 - RNA, 15 nt, Human
gccauguuggccagg

SEQ ID NO: 3224854 - RNA, 24 nt, Human
gccauguuggccaggcuggucuca

SEQ ID NO: 3224855 - RNA, 22 nt, Human
gccauguuggccaggcuggucu

SEQ ID NO: 3224856 - RNA, 20 nt, Human
gccauguuggccaggcuggu

SEQ ID NO: 3224857 - RNA, 19 nt, Human
gccauguuggccaggcugg

SEQ ID NO: 3224858 - RNA, 17 nt, Human
gccauuccccgucucug

SEQ ID NO: 3224859 - RNA, 18 nt, Human
gccauuccccgucucugg

SEQ ID NO: 3224860 - RNA, 16 nt, Human
gccauuccaaaauauu

SEQ ID NO: 3224861 - RNA, 13 nt, Human
gcccacgccccca

SEQ ID NO: 3224862 - RNA, 14 nt, Human
gcccacgcccccac

SEQ ID NO: 3224863 - RNA, 18 nt, Human
gcccaccuuggcucaagu

SEQ ID NO: 3224864 - RNA, 17 nt, Human
gcccaccuuggcucaag

SEQ ID NO: 3224865 - RNA, 17 nt, Human
gcccacgcuggagugca

SEQ ID NO: 3224866 - RNA, 16 nt, Human
gcccacgcuggagugc

SEQ ID NO: 3224867 - RNA, 15 nt, Human
gcccacgcuggagug

SEQ ID NO: 3224868 - RNA, 17 nt, Human
gccauucugacucauau

SEQ ID NO: 3224869 - RNA, 15 nt, Human
gccauucugauuauu

SEQ ID NO: 3224870 - RNA, 15 nt, Human
gcccacgcugacuac

SEQ ID NO: 3224871 - RNA, 19 nt, Human
gccaggccacuggccccug

SEQ ID NO: 3224872 - RNA, 15 nt, Human
gccaggcccucugcc

SEQ ID NO: 3224873 - RNA, 13 nt, Human
gccaggccagagg

SEQ ID NO: 3224874 - RNA, 16 nt, Human
gccaggcccucugccc

SEQ ID NO: 3224875 - RNA, 17 nt, Human
gccaggcccucugccca

SEQ ID NO: 3224876 - RNA, 19 nt, Human
gccaggcccucugcccacu

SEQ ID NO: 3224877 - RNA, 20 nt, Human
gccaggcccucugcccacuc

SEQ ID NO: 3224878 - RNA, 21 nt, Human
gccaggcccucugcccacucc

SEQ ID NO: 3224879 - RNA, 22 nt, Human
gccagccaagcuuuaaauuaug

SEQ ID NO: 3224880 - RNA, 12 nt, Human
gccaggccagag

SEQ ID NO: 3224881 - RNA, 23 nt, Human
gccaggccacaagacccuugugg

SEQ ID NO: 3224882 - RNA, 17 nt, Human
gccagacccccuggaga

SEQ ID NO: 3224883 - RNA, 22 nt, Human
gccagacgcucauucagcaucu

SEQ ID NO: 3224884 - RNA, 20 nt, Human
gccagcaaaacuuagaugug

SEQ ID NO: 3224885 - RNA, 16 nt, Human
gccagaaguagcuuug

SEQ ID NO: 3224886 - RNA, 16 nt, Human
gccagaacucuguguc

SEQ ID NO: 3224887 - RNA, 18 nt, Human
gccagaaguagcuuugca

SEQ ID NO: 3224888 - RNA, 15 nt, Human
gccagaauuucaaac

SEQ ID NO: 3224889 - RNA, 22 nt, Human
gccagacaucaacagauaaaua

SEQ ID NO: 3224890 - RNA, 13 nt, Human
gccagcaggcucu

SEQ ID NO: 3224891 - RNA, 16 nt, Human
gccagcaggcucucag

SEQ ID NO: 3224892 - RNA, 19 nt, Human
gccagccaaacacacagaa

SEQ ID NO: 3224893 - RNA, 22 nt, Human
gccagccaaacacacagaaggg

SEQ ID NO: 3224894 - RNA, 21 nt, Human
gccagccaaacacacagaagg

SEQ ID NO: 3224895 - RNA, 20 nt, Human
gccagccaaacacacagaag

SEQ ID NO: 3224896 - RNA, 21 nt, Human
gccagcaggcucucaggccag

SEQ ID NO: 3224897 - RNA, 17 nt, Human
gccagcaggcucucagg

SEQ ID NO: 3224898 - RNA, 18 nt, Human
gccagcaggcucucaggc

SEQ ID NO: 3224899 - RNA, 19 nt, Human
gccagcaggcucucaggcc

SEQ ID NO: 3224900 - RNA, 20 nt, Human
gccagcaggcucucaggcca

SEQ ID NO: 3224901 - RNA, 18 nt, Human
gcacuuggagacuuguau

SEQ ID NO: 3224902 - RNA, 23 nt, Human
gcacuugggggcucagcaaggcc

SEQ ID NO: 3224903 - RNA, 22 nt, Human
gcacuugggggcucagcaaggc

SEQ ID NO: 3224904 - RNA, 21 nt, Human
gcacuugggggcucagcaagg

SEQ ID NO: 3224905 - RNA, 19 nt, Human
gcacuugggggcucagcaa

SEQ ID NO: 3224906 - RNA, 18 nt, Human
gcacuugggggcucagca

SEQ ID NO: 3224907 - RNA, 16 nt, Human
gccacauuccugaugc

SEQ ID NO: 3224908 - RNA, 20 nt, Human
gccacauuccugaugcuucu

SEQ ID NO: 3224909 - RNA, 21 nt, Human
gccacauugaaaaauguccac

SEQ ID NO: 3224910 - RNA, 24 nt, Human
gccaccacgccuagccucacgcuc

SEQ ID NO: 3224911 - RNA, 21 nt, Human
gccaccagaugugacaguguu

SEQ ID NO: 3224912 - RNA, 20 nt, Human
gccaccaacauacucccauc

SEQ ID NO: 3224913 - RNA, 21 nt, Human
gccaccaacauacucccaucu

SEQ ID NO: 3224914 - RNA, 19 nt, Human
gccaccaacauacucccau

SEQ ID NO: 3224915 - RNA, 21 nt, Human
gccaccaacagccacucagaa

SEQ ID NO: 3224916 - RNA, 22 nt, Human
gccaccaacauacucccaucug

SEQ ID NO: 3224917 - RNA, 13 nt, Human
gccaccacgcccg

SEQ ID NO: 3224918 - RNA, 23 nt, Human
gccaccaagugaaaaauguuagg

SEQ ID NO: 3224919 - RNA, 14 nt, Human
gccaccacgcccgg

SEQ ID NO: 3224920 - RNA, 17 nt, Human
gccaccacgccuagccu

SEQ ID NO: 3224921 - RNA, 16 nt, Human
gccaccgccuccuaca

SEQ ID NO: 3224922 - RNA, 23 nt, Human
gccacugcaccgggccacagaga

SEQ ID NO: 3224923 - RNA, 19 nt, Human
gccacccuggggagaaagu

SEQ ID NO: 3224924 - RNA, 13 nt, Human
gccacccugggga

SEQ ID NO: 3224925 - RNA, 21 nt, Human
gccacugcacuauagccuagg

SEQ ID NO: 3224926 - RNA, 22 nt, Human
gccacugcaccgggccacagag

SEQ ID NO: 3224927 - RNA, 13 nt, Human
gccacccugugca

SEQ ID NO: 3224928 - RNA, 12 nt, Human
gccacccugugc

SEQ ID NO: 3224929 - RNA, 14 nt, Human
gccacccaaagcag

SEQ ID NO: 3224930 - RNA, 19 nt, Human
gccacugugaagagaacca

SEQ ID NO: 3224931 - RNA, 18 nt, Human
gccacugugaagagaacc

SEQ ID NO: 3224932 - RNA, 12 nt, Human
gccacugccucu

SEQ ID NO: 3224933 - RNA, 13 nt, Human
gccacugccucuu

SEQ ID NO: 3224934 - RNA, 17 nt, Human
gccacugccucuuccuc

SEQ ID NO: 3224935 - RNA, 16 nt, Human
gccacugccucuuccu

SEQ ID NO: 3224936 - RNA, 21 nt, Human
gccacuugaugacccccaacc

SEQ ID NO: 3224937 - RNA, 18 nt, Human
gccacuuuccaagucacu

SEQ ID NO: 3224938 - RNA, 19 nt, Human
gccacuuugcaaaggagcu

SEQ ID NO: 3224939 - RNA, 13 nt, Human
gccacuuuccaag

SEQ ID NO: 3224940 - RNA, 14 nt, Human
gcugcaccggcugg

SEQ ID NO: 3224941 - RNA, 16 nt, Human
gcugcaccggcuggcc

SEQ ID NO: 3224942 - RNA, 17 nt, Human
gcugcaccggcuggccu

SEQ ID NO: 3224943 - RNA, 18 nt, Human
gcugcaccggcuggccug

SEQ ID NO: 3224944 - RNA, 19 nt, Human
gcugcaccggcuggccugg

SEQ ID NO: 3224945 - RNA, 22 nt, Human
gcugcaccggcuggccuggccc

SEQ ID NO: 3224946 - RNA, 13 nt, Human
gcugccaccugcc

SEQ ID NO: 3224947 - RNA, 19 nt, Human
gcugccagccgagauagcc

SEQ ID NO: 3224948 - RNA, 21 nt, Human
gcugccagccgagauagccaa

SEQ ID NO: 3224949 - RNA, 23 nt, Human
gcugccauccagguucagcuugu

SEQ ID NO: 3224950 - RNA, 21 nt, Human
gcugccauccagguucagcuu

SEQ ID NO: 3224951 - RNA, 10 nt, Human
gcugccagua

SEQ ID NO: 3224952 - RNA, 15 nt, Human
gcugaggguccagaa

SEQ ID NO: 3224953 - RNA, 18 nt, Human
gcugaauguauguaaaua

SEQ ID NO: 3224954 - RNA, 19 nt, Human
gcugccugggaucccucau

SEQ ID NO: 3224955 - RNA, 16 nt, Human
gcugccugggaucccu

SEQ ID NO: 3224956 - RNA, 18 nt, Human
gcugccugggaucccuca

SEQ ID NO: 3224957 - RNA, 23 nt, Human
gcugcucugccccagcuugggca

SEQ ID NO: 3224958 - RNA, 20 nt, Human
gcugcugagccgcagagaag

SEQ ID NO: 3224959 - RNA, 17 nt, Human
gcugcucugccccagcu

SEQ ID NO: 3224960 - RNA, 14 nt, Human
gcugcucugcccca

SEQ ID NO: 3224961 - RNA, 13 nt, Human
gcugcucugcccc

SEQ ID NO: 3224962 - RNA, 12 nt, Human
gcugcucugccc

SEQ ID NO: 3224963 - RNA, 20 nt, Human
gcugcucucaaaccccugac

SEQ ID NO: 3224964 - RNA, 13 nt, Human
gcugccugggauc

SEQ ID NO: 3224965 - RNA, 14 nt, Human
gcugccuaaaucca

SEQ ID NO: 3224966 - RNA, 22 nt, Human
gcugccuaaauccacucugcag

SEQ ID NO: 3224967 - RNA, 15 nt, Human
gcuggguguggcgca

SEQ ID NO: 3224968 - RNA, 20 nt, Human
gcugggcacugcucucaccu

SEQ ID NO: 3224969 - RNA, 19 nt, Human
gcugggcagaggaaagcaa

SEQ ID NO: 3224970 - RNA, 16 nt, Human
gcugggcagaggaaag

SEQ ID NO: 3224971 - RNA, 17 nt, Human
gcugggcagaggaaagc

SEQ ID NO: 3224972 - RNA, 12 nt, Human
gcugggcucccu

SEQ ID NO: 3224973 - RNA, 16 nt, Human
gcugggcucccuuccc

SEQ ID NO: 3224974 - RNA, 17 nt, Human
gcugggcucccuuccca

SEQ ID NO: 3224975 - RNA, 20 nt, Human
gcugggcucccuucccaccu

SEQ ID NO: 3224976 - RNA, 18 nt, Human
gcuggccuggccccucag

SEQ ID NO: 3224977 - RNA, 19 nt, Human
gcuggccuggccccucagg

SEQ ID NO: 3224978 - RNA, 16 nt, Human
gcugggauuacaggug

SEQ ID NO: 3224979 - RNA, 22 nt, Human
gcugggauuacaggcuccugcc

SEQ ID NO: 3224980 - RNA, 23 nt, Human
gcugggauuacaggcuccugcca

SEQ ID NO: 3224981 - RNA, 16 nt, Human
gcuggccuggccccuc

SEQ ID NO: 3224982 - RNA, 17 nt, Human
gcuggccuggccccuca

SEQ ID NO: 3224983 - RNA, 15 nt, Human
gcuggagugcaguga

SEQ ID NO: 3224984 - RNA, 14 nt, Human
gcuggagugcagug

SEQ ID NO: 3224985 - RNA, 14 nt, Human
gcugggcagaggaa

SEQ ID NO: 3224986 - RNA, 15 nt, Human
gcugggcagaggaaa

SEQ ID NO: 3224987 - RNA, 13 nt, Human
gcugggcagagga

SEQ ID NO: 3224988 - RNA, 19 nt, Human
gcugggcacugcucucacc

SEQ ID NO: 3224989 - RNA, 15 nt, Human
gcugggcacugcucu

SEQ ID NO: 3224990 - RNA, 18 nt, Human
gcugggauuacaggugug

SEQ ID NO: 3224991 - RNA, 17 nt, Human
gcugggauuacaggugu

SEQ ID NO: 3224992 - RNA, 19 nt, Human
gcugggauuacagguguga

SEQ ID NO: 3224993 - RNA, 21 nt, Human
gcugggauuacaggcuccugc

SEQ ID NO: 3224994 - RNA, 14 nt, Human
gcuggagcucugcc

SEQ ID NO: 3224995 - RNA, 16 nt, Human
gcuggacucccucaag

SEQ ID NO: 3224996 - RNA, 17 nt, Human
gcuggagcucugcccau

SEQ ID NO: 3224997 - RNA, 12 nt, Human
gcuggagugcag

SEQ ID NO: 3224998 - RNA, 22 nt, Human
gcuggaccuugaacuggguacu

SEQ ID NO: 3224999 - RNA, 19 nt, Human
gcuucccugguucaagcga

SEQ ID NO: 3225000 - RNA, 16 nt, Human
gcuucccuuuuuuccu

SEQ ID NO: 3225001 - RNA, 19 nt, Human
gcuucccuuuuuuccuuuc

SEQ ID NO: 3225002 - RNA, 18 nt, Human
gcuucccgcucagcccuc

SEQ ID NO: 3225003 - RNA, 17 nt, Human
gcuucccgcucagcccu

SEQ ID NO: 3225004 - RNA, 16 nt, Human
gcuucccgcucagccc

SEQ ID NO: 3225005 - RNA, 15 nt, Human
gcuucccgcucagcc

SEQ ID NO: 3225006 - RNA, 23 nt, Human
gcuucccgcucagcccucccugc

SEQ ID NO: 3225007 - RNA, 14 nt, Human
gcuucccucccugc

SEQ ID NO: 3225008 - RNA, 23 nt, Human
gcuucccaaaugugugcccagcu

SEQ ID NO: 3225009 - RNA, 12 nt, Human
gcuuccccuccc

SEQ ID NO: 3225010 - RNA, 16 nt, Human
gcuuccccaguagcug

SEQ ID NO: 3225011 - RNA, 14 nt, Human
gcuuccccaguagc

SEQ ID NO: 3225012 - RNA, 23 nt, Human
gcuucuuucaagggcuuuccugu

SEQ ID NO: 3225013 - RNA, 22 nt, Human
gcuucuuucaagggcuuuccug

SEQ ID NO: 3225014 - RNA, 21 nt, Human
gcuucuuucaagggcuuuccu

SEQ ID NO: 3225015 - RNA, 20 nt, Human
gcuucuuuaaaaaagcuaua

SEQ ID NO: 3225016 - RNA, 14 nt, Human
gcuucggcauuuga

SEQ ID NO: 3225017 - RNA, 15 nt, Human
gcuugggaauuuuau

SEQ ID NO: 3225018 - RNA, 16 nt, Human
gcuugggcagaucucc

SEQ ID NO: 3225019 - RNA, 20 nt, Human
gcuguaaaagcaaguccugc

SEQ ID NO: 3225020 - RNA, 12 nt, Human
gcuguaaaagca

SEQ ID NO: 3225021 - RNA, 19 nt, Human
gcuguaucccaugagccuc

SEQ ID NO: 3225022 - RNA, 14 nt, Human
gcuguaucugugcu

SEQ ID NO: 3225023 - RNA, 23 nt, Human
gcuguaucccaugagccucagca

SEQ ID NO: 3225024 - RNA, 20 nt, Human
gcuguaucccaugagccuca

SEQ ID NO: 3225025 - RNA, 17 nt, Human
gcuguaaggcaugaagg

SEQ ID NO: 3225026 - RNA, 19 nt, Human
gcuguaaggcaugaaggau

SEQ ID NO: 3225027 - RNA, 18 nt, Human
gcuguaaggcaugaagga

SEQ ID NO: 3225028 - RNA, 15 nt, Human
gcuggguucuaccca

SEQ ID NO: 3225029 - RNA, 15 nt, Human
gcuggguucugaucc

SEQ ID NO: 3225030 - RNA, 21 nt, Human
gcuggguuggaggguguccca

SEQ ID NO: 3225031 - RNA, 14 nt, Human
gcuggguuggaggg

SEQ ID NO: 3225032 - RNA, 19 nt, Human
gcugugcugcccugcccac

SEQ ID NO: 3225033 - RNA, 22 nt, Human
gcugugcugcccugcccaccug

SEQ ID NO: 3225034 - RNA, 22 nt, Human
gcuguuggcugggggccucagu

SEQ ID NO: 3225035 - RNA, 21 nt, Human
gcuguuggcugggggccucag

SEQ ID NO: 3225036 - RNA, 15 nt, Human
gcuguugucucuucu

SEQ ID NO: 3225037 - RNA, 14 nt, Human
gcuguugucucuuc

SEQ ID NO: 3225038 - RNA, 12 nt, Human
gcugugcugccc

SEQ ID NO: 3225039 - RNA, 21 nt, Human
gcugugcucuggacaggcaug

SEQ ID NO: 3225040 - RNA, 13 nt, Human
gcugugcugcccu

SEQ ID NO: 3225041 - RNA, 18 nt, Human
gcugugcucuggacaggc

SEQ ID NO: 3225042 - RNA, 17 nt, Human
gcugugcugcccugccc

SEQ ID NO: 3225043 - RNA, 13 nt, Human
gcugugaaaaaaa

SEQ ID NO: 3225044 - RNA, 22 nt, Human
gcugucuuuucuuugccaucuc

SEQ ID NO: 3225045 - RNA, 18 nt, Human
gcugucuuuucuuugcca

SEQ ID NO: 3225046 - RNA, 23 nt, Human
gcugucuuucuugcucccugacu

SEQ ID NO: 3225047 - RNA, 20 nt, Human
gcugucuuucuugcucccug

SEQ ID NO: 3225048 - RNA, 22 nt, Human
gcuucaaggauccugagccaga

SEQ ID NO: 3225049 - RNA, 21 nt, Human
gcuuaaaguugguauuaauaa

SEQ ID NO: 3225050 - RNA, 13 nt, Human
gcuuaaaugugaa

SEQ ID NO: 3225051 - RNA, 12 nt, Human
gcuuaaauguga

SEQ ID NO: 3225052 - RNA, 13 nt, Human
gcuuaaauuuuaa

SEQ ID NO: 3225053 - RNA, 14 nt, Human
gcuuaaauuuuaac

SEQ ID NO: 3225054 - RNA, 17 nt, Human
gcuuaaaugugaauuac

SEQ ID NO: 3225055 - RNA, 14 nt, Human
gcuuaaaugugaau

SEQ ID NO: 3225056 - RNA, 20 nt, Human
gcuuaaaagaaaauguucac

SEQ ID NO: 3225057 - RNA, 19 nt, Human
gcuucacggaagagccuug

SEQ ID NO: 3225058 - RNA, 22 nt, Human
gcuucacaggacaggaaagugg

SEQ ID NO: 3225059 - RNA, 14 nt, Human
gcuucacaggacag

SEQ ID NO: 3225060 - RNA, 23 nt, Human
gcuuaaaugugaauuacuaacuu

SEQ ID NO: 3225061 - RNA, 20 nt, Human
gcuucacggaagagccuugc

SEQ ID NO: 3225062 - RNA, 12 nt, Human
gcuucacuucug

SEQ ID NO: 3225063 - RNA, 21 nt, Human
gcuucacuucugacucuuccc

SEQ ID NO: 3225064 - RNA, 19 nt, Human
gccuguucagcuccagcuc

SEQ ID NO: 3225065 - RNA, 17 nt, Human
gccuguucagcuccagc

SEQ ID NO: 3225066 - RNA, 20 nt, Human
gccuguucagcuccagcuca

SEQ ID NO: 3225067 - RNA, 21 nt, Human
gcuauggggauagaugugugg

SEQ ID NO: 3225068 - RNA, 19 nt, Human
gcuauggggauagaugugu

SEQ ID NO: 3225069 - RNA, 16 nt, Human
gcuauugucaccaggg

SEQ ID NO: 3225070 - RNA, 17 nt, Human
gcuaugucauuucaugu

SEQ ID NO: 3225071 - RNA, 16 nt, Human
gcuaugucauuucaug

SEQ ID NO: 3225072 - RNA, 12 nt, Human
gcuaugucauuu

SEQ ID NO: 3225073 - RNA, 20 nt, Human
gcuauugucaccagggcugg

SEQ ID NO: 3225074 - RNA, 21 nt, Human
gcuauugucaccagggcugga

SEQ ID NO: 3225075 - RNA, 16 nt, Human
gcuaguaucaaaagaa

SEQ ID NO: 3225076 - RNA, 22 nt, Human
gcuagucaacaguacccugguu

SEQ ID NO: 3225077 - RNA, 13 nt, Human
gcuagucaacagu

SEQ ID NO: 3225078 - RNA, 22 nt, Human
gcuaggcagggugucugccccc

SEQ ID NO: 3225079 - RNA, 15 nt, Human
gcuaggccuggccag

SEQ ID NO: 3225080 - RNA, 14 nt, Human
gcuaggccuggcca

SEQ ID NO: 3225081 - RNA, 22 nt, Human
gcuaggaccccuccaugugggc

SEQ ID NO: 3225082 - RNA, 20 nt, Human
gcuaggcagggugucugccc

SEQ ID NO: 3225083 - RNA, 19 nt, Human
gcuaggcagggugucugcc

SEQ ID NO: 3225084 - RNA, 19 nt, Human
gcuaggaacacuccuucac

SEQ ID NO: 3225085 - RNA, 21 nt, Human
gcuaggaacacuccuucacag

SEQ ID NO: 3225086 - RNA, 18 nt, Human
gcuaggaacacuccuuca

SEQ ID NO: 3225087 - RNA, 16 nt, Human
gcuaggaacacuccuu

SEQ ID NO: 3225088 - RNA, 18 nt, Human
gcucagagagggugggag

SEQ ID NO: 3225089 - RNA, 20 nt, Human
gcucagagagggugggagug

SEQ ID NO: 3225090 - RNA, 15 nt, Human
gcucagagagggugg

SEQ ID NO: 3225091 - RNA, 12 nt, Human
gcucagggccug

SEQ ID NO: 3225092 - RNA, 13 nt, Human
gcucagggccugg

SEQ ID NO: 3225093 - RNA, 16 nt, Human
gcucagggccuggcuc

SEQ ID NO: 3225094 - RNA, 22 nt, Human
gcucagggugcuagaggauuag

SEQ ID NO: 3225095 - RNA, 21 nt, Human
gcucagguggggucacucugg

SEQ ID NO: 3225096 - RNA, 22 nt, Human
gcucagguggggucacucuggc

SEQ ID NO: 3225097 - RNA, 22 nt, Human
gcucuacagcuaaucagcauuc

SEQ ID NO: 3225098 - RNA, 20 nt, Human
gcucuacagcuaaucagcau

SEQ ID NO: 3225099 - RNA, 13 nt, Human
gcucucaggccag

SEQ ID NO: 3225100 - RNA, 14 nt, Human
gcucucaggccagc

SEQ ID NO: 3225101 - RNA, 15 nt, Human
gcucucaggccagcu

SEQ ID NO: 3225102 - RNA, 15 nt, Human
gcuccccucggagaa

SEQ ID NO: 3225103 - RNA, 21 nt, Human
gcuccugccaccacgcccggc

SEQ ID NO: 3225104 - RNA, 22 nt, Human
gcuccugccaccacgcccggcu

SEQ ID NO: 3225105 - RNA, 11 nt, Human
gcuccugcccc

SEQ ID NO: 3225106 - RNA, 11 nt, Human
gcuccugccca

SEQ ID NO: 3225107 - RNA, 14 nt, Human
gcuccugcccccau

SEQ ID NO: 3225108 - RNA, 22 nt, Human
gcucccaggcauuccccaggag

SEQ ID NO: 3225109 - RNA, 17 nt, Human
gcucccaggcauucccc

SEQ ID NO: 3225110 - RNA, 14 nt, Human
gcuccccagcccca

SEQ ID NO: 3225111 - RNA, 18 nt, Human
gcucccccuccaccugcu

SEQ ID NO: 3225112 - RNA, 17 nt, Human
gcucccccuuuucccuc

SEQ ID NO: 3225113 - RNA, 13 nt, Human
gcucccccuuuuc

SEQ ID NO: 3225114 - RNA, 19 nt, Human
gcuccccuaaagccucaaa

SEQ ID NO: 3225115 - RNA, 20 nt, Human
gcucccaggcauuccccagg

SEQ ID NO: 3225116 - RNA, 21 nt, Human
gcucccaggcauuccccagga

SEQ ID NO: 3225117 - RNA, 21 nt, Human
gcucugagcaaauguggcucc

SEQ ID NO: 3225118 - RNA, 20 nt, Human
gcucugagcaaauguggcuc

SEQ ID NO: 3225119 - RNA, 22 nt, Human
gcucugagagcaaacuggcuug

SEQ ID NO: 3225120 - RNA, 16 nt, Human
gcucuguccugggagu

SEQ ID NO: 3225121 - RNA, 19 nt, Human
gcucugucgcccaggcugg

SEQ ID NO: 3225122 - RNA, 23 nt, Human
gcucuguugcccaggcuggagug

SEQ ID NO: 3225123 - RNA, 22 nt, Human
gcucuguugcccaggcuggagu

SEQ ID NO: 3225124 - RNA, 18 nt, Human
gcucuguugcccaggcug

SEQ ID NO: 3225125 - RNA, 16 nt, Human
gcucuguugcccaggc

SEQ ID NO: 3225126 - RNA, 15 nt, Human
gcucuguugcccagg

SEQ ID NO: 3225127 - RNA, 14 nt, Human
gcucuguccuggga

SEQ ID NO: 3225128 - RNA, 15 nt, Human
gcucuguccugggag

SEQ ID NO: 3225129 - RNA, 15 nt, Human
gcucuuccaggcugg

SEQ ID NO: 3225130 - RNA, 16 nt, Human
gcucuuccaggcuggg

SEQ ID NO: 3225131 - RNA, 12 nt, Human
gcucuuccaggc

SEQ ID NO: 3225132 - RNA, 22 nt, Human
gcugaauacagaggcaacugca

SEQ ID NO: 3225133 - RNA, 17 nt, Human
gcugaaugguuuucaaa

SEQ ID NO: 3225134 - RNA, 12 nt, Human
gcugaaggcucg

SEQ ID NO: 3225135 - RNA, 20 nt, Human
gcugaaggcucgagcaugcc

SEQ ID NO: 3225136 - RNA, 11 nt, Human
gcugaaauuga

SEQ ID NO: 3225137 - RNA, 19 nt, Human
gcugaaauugaaaaguuau

SEQ ID NO: 3225138 - RNA, 16 nt, Human
gcugaaauuuuagaaa

SEQ ID NO: 3225139 - RNA, 17 nt, Human
gcugaaauuuuagaaau

SEQ ID NO: 3225140 - RNA, 19 nt, Human
gcugaaauuuuagaaauau

SEQ ID NO: 3225141 - RNA, 19 nt, Human
gcugaacacauuucuuuuu

SEQ ID NO: 3225142 - RNA, 18 nt, Human
gcugaacacauuucuuuu

SEQ ID NO: 3225143 - RNA, 16 nt, Human
gcugaacacauuucuu

SEQ ID NO: 3225144 - RNA, 17 nt, Human
gcugaaauugaaaaguu

SEQ ID NO: 3225145 - RNA, 16 nt, Human
gcugacagacacaggc

SEQ ID NO: 3225146 - RNA, 21 nt, Human
gcugaauugagccuaaaaaua

SEQ ID NO: 3225147 - RNA, 13 nt, Human
gcugacagacaca

SEQ ID NO: 3225148 - RNA, 13 nt, Human
gcugaauugagcc

SEQ ID NO: 3225149 - RNA, 15 nt, Human
gcugacagacacagg

SEQ ID NO: 3225150 - RNA, 14 nt, Human
gcugacagacacag

SEQ ID NO: 3225151 - RNA, 17 nt, Human
cacccuggggagaaagu

SEQ ID NO: 3225152 - RNA, 16 nt, Human
caccugccccucaacu

SEQ ID NO: 3225153 - RNA, 18 nt, Human
caccugccccucaacucu

SEQ ID NO: 3225154 - RNA, 21 nt, Human
caccugccccucaacucuccu

SEQ ID NO: 3225155 - RNA, 11 nt, Human
caccugccagg

SEQ ID NO: 3225156 - RNA, 12 nt, Human
caccugccaggg

SEQ ID NO: 3225157 - RNA, 12 nt, Human
cacccuccuuuc

SEQ ID NO: 3225158 - RNA, 22 nt, Human
cacccuccuucccacucuucuc

SEQ ID NO: 3225159 - RNA, 20 nt, Human
cacccuccuucccacucuuc

SEQ ID NO: 3225160 - RNA, 12 nt, Human
cacccuccuucc

SEQ ID NO: 3225161 - RNA, 14 nt, Human
cacccuccuuccca

SEQ ID NO: 3225162 - RNA, 13 nt, Human
cacccuccuuccc

SEQ ID NO: 3225163 - RNA, 23 nt, Human
cacccuccuucccacucuucuca

SEQ ID NO: 3225164 - RNA, 12 nt, Human
cacccugcucuc

SEQ ID NO: 3225165 - RNA, 16 nt, Human
cacccugcugagucug

SEQ ID NO: 3225166 - RNA, 17 nt, Human
cacccugcuuggcccag

SEQ ID NO: 3225167 - RNA, 16 nt, Human
cacccugcuuggccca

SEQ ID NO: 3225168 - RNA, 18 nt, Human
cacccugcuuggcccagg

SEQ ID NO: 3225169 - RNA, 11 nt, Human
cacccugaggg

SEQ ID NO: 3225170 - RNA, 12 nt, Human
cacccugagggc

SEQ ID NO: 3225171 - RNA, 17 nt, Human
caccugcggugcuaucu

SEQ ID NO: 3225172 - RNA, 19 nt, Human
caccugcggugcuaucucc

SEQ ID NO: 3225173 - RNA, 16 nt, Human
caccugcggugcuauc

SEQ ID NO: 3225174 - RNA, 24 nt, Human
caccugccuguugggccaggagcc

SEQ ID NO: 3225175 - RNA, 15 nt, Human
caccugcgcuucacu

SEQ ID NO: 3225176 - RNA, 14 nt, Human
cacugaagaguaug

SEQ ID NO: 3225177 - RNA, 11 nt, Human
cacugaagagg

SEQ ID NO: 3225178 - RNA, 12 nt, Human
cacugaagagga

SEQ ID NO: 3225179 - RNA, 13 nt, Human
cacugaagaggag

SEQ ID NO: 3225180 - RNA, 15 nt, Human
cacugaagaggagga

SEQ ID NO: 3225181 - RNA, 16 nt, Human
cacugaagaggaggag

SEQ ID NO: 3225182 - RNA, 16 nt, Human
cacuccagugagacag

SEQ ID NO: 3225183 - RNA, 21 nt, Human
cacuccagugagacagcucug

SEQ ID NO: 3225184 - RNA, 17 nt, Human
cacuccagaccccuggc

SEQ ID NO: 3225185 - RNA, 17 nt, Human
cacugaagucaguucuc

SEQ ID NO: 3225186 - RNA, 15 nt, Human
cacgcuggagugcag

SEQ ID NO: 3225187 - RNA, 20 nt, Human
cacgcuggagugcagugagc

SEQ ID NO: 3225188 - RNA, 18 nt, Human
cacgcuggagugcaguga

SEQ ID NO: 3225189 - RNA, 17 nt, Human
cacgcuggagugcagug

SEQ ID NO: 3225190 - RNA, 16 nt, Human
cacgcuggagugcagu

SEQ ID NO: 3225191 - RNA, 21 nt, Human
cacgcuggagugcagugagcc

SEQ ID NO: 3225192 - RNA, 19 nt, Human
cacgcuggggaagaauuua

SEQ ID NO: 3225193 - RNA, 14 nt, Human
cacgcuggggaaga

SEQ ID NO: 3225194 - RNA, 21 nt, Human
cacuacauuauaaaugucucu

SEQ ID NO: 3225195 - RNA, 16 nt, Human
cacggaagagccuugc

SEQ ID NO: 3225196 - RNA, 22 nt, Human
cacggaagagccuugcggaagg

SEQ ID NO: 3225197 - RNA, 16 nt, Human
cacuagacccacugga

SEQ ID NO: 3225198 - RNA, 16 nt, Human
cacuccagaccccugg

SEQ ID NO: 3225199 - RNA, 14 nt, Human
cacuccagaccccu

SEQ ID NO: 3225200 - RNA, 19 nt, Human
caccagcccuuagcaggga

SEQ ID NO: 3225201 - RNA, 16 nt, Human
caccagccccagugcc

SEQ ID NO: 3225202 - RNA, 16 nt, Human
cacauuucacugucug

SEQ ID NO: 3225203 - RNA, 17 nt, Human
cacauuucacugucugu

SEQ ID NO: 3225204 - RNA, 22 nt, Human
caccagccccagugcccacagg

SEQ ID NO: 3225205 - RNA, 21 nt, Human
caccagccccagugcccacag

SEQ ID NO: 3225206 - RNA, 18 nt, Human
caccagccccagugccca

SEQ ID NO: 3225207 - RNA, 17 nt, Human
caccagccccagugccc

SEQ ID NO: 3225208 - RNA, 18 nt, Human
cacauuuauucugcucac

SEQ ID NO: 3225209 - RNA, 17 nt, Human
cacauuuauucugcuca

SEQ ID NO: 3225210 - RNA, 19 nt, Human
cacaucuugcucugcugac

SEQ ID NO: 3225211 - RNA, 23 nt, Human
cacaucuugcucugcugacagac

SEQ ID NO: 3225212 - RNA, 12 nt, Human
cacccagcccac

SEQ ID NO: 3225213 - RNA, 21 nt, Human
cacccagggaacuaggaaggc

SEQ ID NO: 3225214 - RNA, 11 nt, Human
cacccagggaa

SEQ ID NO: 3225215 - RNA, 11 nt, Human
cacccagaaac

SEQ ID NO: 3225216 - RNA, 13 nt, Human
cacccauaucaug

SEQ ID NO: 3225217 - RNA, 14 nt, Human
cacccauaucaugc

SEQ ID NO: 3225218 - RNA, 18 nt, Human
cacccaugaaagaaaacu

SEQ ID NO: 3225219 - RNA, 23 nt, Human
cacaucagcuugcccuguuaaaa

SEQ ID NO: 3225220 - RNA, 15 nt, Human
cacaucaucuguaag

SEQ ID NO: 3225221 - RNA, 14 nt, Human
cacaucaucuguaa

SEQ ID NO: 3225222 - RNA, 13 nt, Human
cacaucagcuugc

SEQ ID NO: 3225223 - RNA, 22 nt, Human
cacaucuugcucugcugacaga

SEQ ID NO: 3225224 - RNA, 21 nt, Human
cacaucuugcucugcugacag

SEQ ID NO: 3225225 - RNA, 20 nt, Human
cacaucuugcucugcugaca

SEQ ID NO: 3225226 - RNA, 15 nt, Human
cacaucuugcucugc

SEQ ID NO: 3225227 - RNA, 14 nt, Human
cacaucuugcucug

SEQ ID NO: 3225228 - RNA, 13 nt, Human
cacaucuugcucu

SEQ ID NO: 3225229 - RNA, 21 nt, Human
cacaucccaccccauccucca

SEQ ID NO: 3225230 - RNA, 18 nt, Human
cacauccacagucucccc

SEQ ID NO: 3225231 - RNA, 13 nt, Human
cacaucccacccc

SEQ ID NO: 3225232 - RNA, 19 nt, Human
cacaucaucuguaagcugu

SEQ ID NO: 3225233 - RNA, 14 nt, Human
caagaagcccagga

SEQ ID NO: 3225234 - RNA, 21 nt, Human
caacucccugccccccagccc

SEQ ID NO: 3225235 - RNA, 15 nt, Human
caagaagcccaggaa

SEQ ID NO: 3225236 - RNA, 19 nt, Human
caacucccugccccccagc

SEQ ID NO: 3225237 - RNA, 20 nt, Human
caacucccugccccccagcc

SEQ ID NO: 3225238 - RNA, 20 nt, Human
caacuccaacauccacucuc

SEQ ID NO: 3225239 - RNA, 18 nt, Human
caagaagcccaggaaagg

SEQ ID NO: 3225240 - RNA, 17 nt, Human
caagaaggaugauucaa

SEQ ID NO: 3225241 - RNA, 18 nt, Human
caagaauagaugcugacu

SEQ ID NO: 3225242 - RNA, 13 nt, Human
caagaaugaaggu

SEQ ID NO: 3225243 - RNA, 19 nt, Human
caagaauagcauuguaaaa

SEQ ID NO: 3225244 - RNA, 22 nt, Human
caacuaugauuuggaaaauaaa

SEQ ID NO: 3225245 - RNA, 16 nt, Human
caaccccuucgcuccu

SEQ ID NO: 3225246 - RNA, 14 nt, Human
caaccccuucgcuc

SEQ ID NO: 3225247 - RNA, 17 nt, Human
caaccccuucgcuccug

SEQ ID NO: 3225248 - RNA, 13 nt, Human
caagcaagaaaca

SEQ ID NO: 3225249 - RNA, 18 nt, Human
caagcaagaaacacuggg

SEQ ID NO: 3225250 - RNA, 15 nt, Human
caagaccaaauggaa

SEQ ID NO: 3225251 - RNA, 17 nt, Human
caagaucaaaaaggcuu

SEQ ID NO: 3225252 - RNA, 21 nt, Human
caagaucaaaaaggcuuauaa

SEQ ID NO: 3225253 - RNA, 16 nt, Human
caagaucaaaaaggcu

SEQ ID NO: 3225254 - RNA, 13 nt, Human
caagcacagucag

SEQ ID NO: 3225255 - RNA, 14 nt, Human
caagcacagucagg

SEQ ID NO: 3225256 - RNA, 13 nt, Human
caagcaccuccug

SEQ ID NO: 3225257 - RNA, 18 nt, Human
caagcaccuagccucgcu

SEQ ID NO: 3225258 - RNA, 13 nt, Human
caagcaccauccc

SEQ ID NO: 3225259 - RNA, 17 nt, Human
caagcaccauccccucc

SEQ ID NO: 3225260 - RNA, 12 nt, Human
caauauuguaua

SEQ ID NO: 3225261 - RNA, 14 nt, Human
caauauuguauauu

SEQ ID NO: 3225262 - RNA, 19 nt, Human
caauauuguauauuuuuau

SEQ ID NO: 3225263 - RNA, 22 nt, Human
caauauuugugugcuaaacgug

SEQ ID NO: 3225264 - RNA, 19 nt, Human
caauauuugugugcuaaac

SEQ ID NO: 3225265 - RNA, 23 nt, Human
caauauuugugugcuaaacgugu

SEQ ID NO: 3225266 - RNA, 11 nt, Human
caaucagcugc

SEQ ID NO: 3225267 - RNA, 13 nt, Human
caaucagcugcuu

SEQ ID NO: 3225268 - RNA, 17 nt, Human
caaucagcugcuuuguu

SEQ ID NO: 3225269 - RNA, 18 nt, Human
caaucagcugcuuuguua

SEQ ID NO: 3225270 - RNA, 20 nt, Human
caaugcucuuuucacagcua

SEQ ID NO: 3225271 - RNA, 20 nt, Human
caaugccucuugucuuccua

SEQ ID NO: 3225272 - RNA, 20 nt, Human
caaugccuauuguaauauag

SEQ ID NO: 3225273 - RNA, 23 nt, Human
caaugccuauuguaauauagaaa

SEQ ID NO: 3225274 - RNA, 16 nt, Human
caaugccucuugucuu

SEQ ID NO: 3225275 - RNA, 14 nt, Human
caaucaaaucugcu

SEQ ID NO: 3225276 - RNA, 21 nt, Human
caaucaauaacagccgcucca

SEQ ID NO: 3225277 - RNA, 21 nt, Human
caaucaauaaacagcagguga

SEQ ID NO: 3225278 - RNA, 15 nt, Human
caauggcagccuugg

SEQ ID NO: 3225279 - RNA, 14 nt, Human
caauggcagccuug

SEQ ID NO: 3225280 - RNA, 13 nt, Human
caauggcagccuu

SEQ ID NO: 3225281 - RNA, 16 nt, Human
caaugcuggagaaaaa

SEQ ID NO: 3225282 - RNA, 18 nt, Human
caauuggaagucuaagaa

SEQ ID NO: 3225283 - RNA, 14 nt, Human
cacaaggaagaaau

SEQ ID NO: 3225284 - RNA, 19 nt, Human
caauuucaauuuugucugu

SEQ ID NO: 3225285 - RNA, 15 nt, Human
cacaaggaagaaauu

SEQ ID NO: 3225286 - RNA, 23 nt, Human
caaguucacaccugcagauucua

SEQ ID NO: 3225287 - RNA, 22 nt, Human
caaguucacaccugcagauucu

SEQ ID NO: 3225288 - RNA, 22 nt, Human
caaguauuuaagccuaaagauu

SEQ ID NO: 3225289 - RNA, 15 nt, Human
caaguauuuaagccu

SEQ ID NO: 3225290 - RNA, 20 nt, Human
caaggauugcuacuguccua

SEQ ID NO: 3225291 - RNA, 14 nt, Human
caaggcaaaaacaa

SEQ ID NO: 3225292 - RNA, 19 nt, Human
caaggauugcuacuguccu

SEQ ID NO: 3225293 - RNA, 14 nt, Human
caaggcaaggcugu

SEQ ID NO: 3225294 - RNA, 15 nt, Human
caaggcaaaaacaaa

SEQ ID NO: 3225295 - RNA, 17 nt, Human
caagcuccaagcuccca

SEQ ID NO: 3225296 - RNA, 18 nt, Human
caagcuccaagcucccag

SEQ ID NO: 3225297 - RNA, 19 nt, Human
caagcuccaagcucccagg

SEQ ID NO: 3225298 - RNA, 21 nt, Human
caagcuccaagcucccaggca

SEQ ID NO: 3225299 - RNA, 17 nt, Human
caagcuccaucuccacu

SEQ ID NO: 3225300 - RNA, 21 nt, Human
caagcuccaucuccacuccag

SEQ ID NO: 3225301 - RNA, 12 nt, Human
caagcucccagg

SEQ ID NO: 3225302 - RNA, 14 nt, Human
caagcucccaggca

SEQ ID NO: 3225303 - RNA, 15 nt, Human
caagcucccaggcau

SEQ ID NO: 3225304 - RNA, 17 nt, Human
caagcucccaggcauuc

SEQ ID NO: 3225305 - RNA, 16 nt, Human
caagcucugcuccucu

SEQ ID NO: 3225306 - RNA, 13 nt, Human
caagcugaaauuu

SEQ ID NO: 3225307 - RNA, 14 nt, Human
caagcugaaauuuu

SEQ ID NO: 3225308 - RNA, 20 nt, Human
caagcugaaauuuuagaaau

SEQ ID NO: 3225309 - RNA, 21 nt, Human
caagcugaaauuuuagaaaua

SEQ ID NO: 3225310 - RNA, 15 nt, Human
caagcucugcuccuc

SEQ ID NO: 3225311 - RNA, 22 nt, Human
auuuuuuuccuuacauaaacau

SEQ ID NO: 3225312 - RNA, 12 nt, Human
auuuuuuucuac

SEQ ID NO: 3225313 - RNA, 15 nt, Human
auuuuuuucuaccua

SEQ ID NO: 3225314 - RNA, 16 nt, Human
auuuuuuucuaccuau

SEQ ID NO: 3225315 - RNA, 21 nt, Human
auuuuuuuccuuacauaaaca

SEQ ID NO: 3225316 - RNA, 19 nt, Human
auuuuuuuccuuacauaaa

SEQ ID NO: 3225317 - RNA, 15 nt, Human
auuuuuuuccuuaca

SEQ ID NO: 3225318 - RNA, 12 nt, Human
auuuuuuuccuu

SEQ ID NO: 3225319 - RNA, 16 nt, Human
auuuuuauuaaauuau

SEQ ID NO: 3225320 - RNA, 13 nt, Human
auuuuuauuauua

SEQ ID NO: 3225321 - RNA, 12 nt, Human
auuuuuauuucu

SEQ ID NO: 3225322 - RNA, 14 nt, Human
auuuuuauuucuuu

SEQ ID NO: 3225323 - RNA, 15 nt, Human
auuuuuaugugugau

SEQ ID NO: 3225324 - RNA, 15 nt, Human
auuuuuaucuauaua

SEQ ID NO: 3225325 - RNA, 16 nt, Human
auuuuuaucuauauaa

SEQ ID NO: 3225326 - RNA, 19 nt, Human
auuuuuaucuauauaaaau

SEQ ID NO: 3225327 - RNA, 15 nt, Human
auuuuuaucaggauu

SEQ ID NO: 3225328 - RNA, 22 nt, Human
auuuuguuuuugucuuaaaaag

SEQ ID NO: 3225329 - RNA, 21 nt, Human
auuuuguuuuugucuuaaaaa

SEQ ID NO: 3225330 - RNA, 20 nt, Human
caaaagguuaauaaaguaau

SEQ ID NO: 3225331 - RNA, 21 nt, Human
caaaagguauuuuaaucacca

SEQ ID NO: 3225332 - RNA, 19 nt, Human
caaaagcaucuaugugaga

SEQ ID NO: 3225333 - RNA, 22 nt, Human
auuuuuuuuaauugaaaagaag

SEQ ID NO: 3225334 - RNA, 17 nt, Human
auuuuuuuuaauuguau

SEQ ID NO: 3225335 - RNA, 18 nt, Human
auuuuuuuuaauuguauu

SEQ ID NO: 3225336 - RNA, 20 nt, Human
auuuuuuuuaauuguauuuu

SEQ ID NO: 3225337 - RNA, 22 nt, Human
auuuuuuuucaugcuuuaucaa

SEQ ID NO: 3225338 - RNA, 22 nt, Human
auuuuuuuuaauuguauuuuug

SEQ ID NO: 3225339 - RNA, 23 nt, Human
auuuuuuuucccauuuagaaugg

SEQ ID NO: 3225340 - RNA, 17 nt, Human
caaaccaucauugaaau

SEQ ID NO: 3225341 - RNA, 14 nt, Human
caaaccaucauuga

SEQ ID NO: 3225342 - RNA, 16 nt, Human
caaaccaucauugaaa

SEQ ID NO: 3225343 - RNA, 19 nt, Human
caaacaugagguucucucu

SEQ ID NO: 3225344 - RNA, 23 nt, Human
auuuuaguggacccugaaaugug

SEQ ID NO: 3225345 - RNA, 20 nt, Human
auuuuaguggacccugaaau

SEQ ID NO: 3225346 - RNA, 22 nt, Human
auuuuaguggacccugaaaugu

SEQ ID NO: 3225347 - RNA, 21 nt, Human
auuuuaguggacccugaaaug

SEQ ID NO: 3225348 - RNA, 20 nt, Human
auuuguguggagucauuucu

SEQ ID NO: 3225349 - RNA, 20 nt, Human
auuugugugcuaaacgugua

SEQ ID NO: 3225350 - RNA, 23 nt, Human
auuuguguggagucauuucugau

SEQ ID NO: 3225351 - RNA, 21 nt, Human
auuuguguggagucauuucug

SEQ ID NO: 3225352 - RNA, 17 nt, Human
auuuguguguuacaaug

SEQ ID NO: 3225353 - RNA, 13 nt, Human
auuuguguguuac

SEQ ID NO: 3225354 - RNA, 14 nt, Human
auuuguuauaauga

SEQ ID NO: 3225355 - RNA, 18 nt, Human
auuuguguguucacuaaa

SEQ ID NO: 3225356 - RNA, 22 nt, Human
auuuguguguucacuaaacucu

SEQ ID NO: 3225357 - RNA, 22 nt, Human
auuuguguguuuuuagcuguga

SEQ ID NO: 3225358 - RNA, 19 nt, Human
auuuucucugauacuuuuu

SEQ ID NO: 3225359 - RNA, 18 nt, Human
auuuucucugauacuuuu

SEQ ID NO: 3225360 - RNA, 17 nt, Human
auuuucucugauacuuu

SEQ ID NO: 3225361 - RNA, 13 nt, Human
auuuucucuuaga

SEQ ID NO: 3225362 - RNA, 16 nt, Human
auuuucucuuagaaaa

SEQ ID NO: 3225363 - RNA, 14 nt, Human
auuuucucuuagaa

SEQ ID NO: 3225364 - RNA, 22 nt, Human
auuuuaguuuuauuuucuaaag

SEQ ID NO: 3225365 - RNA, 14 nt, Human
auuuuaguuuuauu

SEQ ID NO: 3225366 - RNA, 21 nt, Human
auuuuaguuuuauuuucuaaa

SEQ ID NO: 3225367 - RNA, 20 nt, Human
auuuuaguuuuauuuucuaa

SEQ ID NO: 3225368 - RNA, 12 nt, Human
auuuugaaaagu

SEQ ID NO: 3225369 - RNA, 14 nt, Human
auuuugaaaaguaa

SEQ ID NO: 3225370 - RNA, 16 nt, Human
auuuugaaaaguaaua

SEQ ID NO: 3225371 - RNA, 17 nt, Human
auuuugaaaaguaauau

SEQ ID NO: 3225372 - RNA, 21 nt, Human
auuuugaaaaguaauauuuau

SEQ ID NO: 3225373 - RNA, 22 nt, Human
auuuaagaauugccagucuuuu

SEQ ID NO: 3225374 - RNA, 19 nt, Human
auuucacgucauaggaagu

SEQ ID NO: 3225375 - RNA, 18 nt, Human
auuucacgucauaggaag

SEQ ID NO: 3225376 - RNA, 12 nt, Human
auuucacucucc

SEQ ID NO: 3225377 - RNA, 16 nt, Human
auuucacgauucauuu

SEQ ID NO: 3225378 - RNA, 15 nt, Human
auuucacauuauucu

SEQ ID NO: 3225379 - RNA, 17 nt, Human
auuucacauuauucugg

SEQ ID NO: 3225380 - RNA, 23 nt, Human
auuucaccccaucccuccuuaag

SEQ ID NO: 3225381 - RNA, 13 nt, Human
auuucacaaauau

SEQ ID NO: 3225382 - RNA, 23 nt, Human
auuucacaaauauuaaaaagucu

SEQ ID NO: 3225383 - RNA, 20 nt, Human
auuucacaaauauuaaaaag

SEQ ID NO: 3225384 - RNA, 18 nt, Human
auuucacaaauauuaaaa

SEQ ID NO: 3225385 - RNA, 15 nt, Human
auuucacaaauauua

SEQ ID NO: 3225386 - RNA, 14 nt, Human
auuucacaaauauu

SEQ ID NO: 3225387 - RNA, 18 nt, Human
auuuaaguguuggaaaaa

SEQ ID NO: 3225388 - RNA, 22 nt, Human
auuuaaguguuggaaaaaauuu

SEQ ID NO: 3225389 - RNA, 12 nt, Human
auuuaaguuuug

SEQ ID NO: 3225390 - RNA, 20 nt, Human
auuuaaguuuugacaagcug

SEQ ID NO: 3225391 - RNA, 22 nt, Human
auuuaaggucuguuugcuguug

SEQ ID NO: 3225392 - RNA, 20 nt, Human
auuuaaggucuguuugcugu

SEQ ID NO: 3225393 - RNA, 22 nt, Human
auuuaagccuaaagauuuugau

SEQ ID NO: 3225394 - RNA, 17 nt, Human
auuuaagccuaaagauu

SEQ ID NO: 3225395 - RNA, 16 nt, Human
auuuaagccuaaagau

SEQ ID NO: 3225396 - RNA, 15 nt, Human
auuuaagccuaaaga

SEQ ID NO: 3225397 - RNA, 18 nt, Human
auuuaauuugaaauaugg

SEQ ID NO: 3225398 - RNA, 13 nt, Human
auuucucuuugaa

SEQ ID NO: 3225399 - RNA, 20 nt, Human
auuucugaagguagcauucu

SEQ ID NO: 3225400 - RNA, 16 nt, Human
auuucucuuugaaaca

SEQ ID NO: 3225401 - RNA, 17 nt, Human
auuucuccuuuuguguu

SEQ ID NO: 3225402 - RNA, 12 nt, Human
auuucuccuuuu

SEQ ID NO: 3225403 - RNA, 20 nt, Human
auuucuccuuuuguguucca

SEQ ID NO: 3225404 - RNA, 15 nt, Human
auuucucuuaaguac

SEQ ID NO: 3225405 - RNA, 23 nt, Human
auuucucuguuccauaguuaaag

SEQ ID NO: 3225406 - RNA, 15 nt, Human
auuucucuguuccau

SEQ ID NO: 3225407 - RNA, 17 nt, Human
auuucaguguaaagugu

SEQ ID NO: 3225408 - RNA, 19 nt, Human
auuucaguguaaagugugu

SEQ ID NO: 3225409 - RNA, 21 nt, Human
auuucaguaagaucaagcucc

SEQ ID NO: 3225410 - RNA, 14 nt, Human
auuucaguaagucu

SEQ ID NO: 3225411 - RNA, 18 nt, Human
auuucaguaagucucaua

SEQ ID NO: 3225412 - RNA, 20 nt, Human
auuucaguaaaccugucuga

SEQ ID NO: 3225413 - RNA, 19 nt, Human
auuucaguaaaccugucug

SEQ ID NO: 3225414 - RNA, 18 nt, Human
auuugcacaaaaagauac

SEQ ID NO: 3225415 - RNA, 15 nt, Human
auuaaauuuuuuugu

SEQ ID NO: 3225416 - RNA, 16 nt, Human
auuaaauuuuuuugua

SEQ ID NO: 3225417 - RNA, 17 nt, Human
auuaaauuuuuuuguau

SEQ ID NO: 3225418 - RNA, 18 nt, Human
auuaaauuuuuuuguaug

SEQ ID NO: 3225419 - RNA, 19 nt, Human
auuaaauuuuuuuguauga

SEQ ID NO: 3225420 - RNA, 20 nt, Human
auuaaauuuuuuuguaugaa

SEQ ID NO: 3225421 - RNA, 21 nt, Human
auuaaauuuuuuuguaugaaa

SEQ ID NO: 3225422 - RNA, 22 nt, Human
auuaaauuuuuuuguaugaaaa

SEQ ID NO: 3225423 - RNA, 23 nt, Human
auuaaauuuuuuuguaugaaaac

SEQ ID NO: 3225424 - RNA, 16 nt, Human
auuaacaauuaauugu

SEQ ID NO: 3225425 - RNA, 18 nt, Human
auuaacaauuaauugucu

SEQ ID NO: 3225426 - RNA, 19 nt, Human
auuaacacuacucaaagca

SEQ ID NO: 3225427 - RNA, 21 nt, Human
auuaacacuacucaaagcaaa

SEQ ID NO: 3225428 - RNA, 22 nt, Human
auuacaagcgugagccacugca

SEQ ID NO: 3225429 - RNA, 14 nt, Human
auuacaauauuucu

SEQ ID NO: 3225430 - RNA, 14 nt, Human
auuacaauauuugu

SEQ ID NO: 3225431 - RNA, 13 nt, Human
auuacaauauuug

SEQ ID NO: 3225432 - RNA, 15 nt, Human
auuacaggcuccugc

SEQ ID NO: 3225433 - RNA, 16 nt, Human
auuacaggcuccugcc

SEQ ID NO: 3225434 - RNA, 17 nt, Human
auuacaggcuccugcca

SEQ ID NO: 3225435 - RNA, 19 nt, Human
auuacaggcuccugccacc

SEQ ID NO: 3225436 - RNA, 13 nt, Human
auuacagguguga

SEQ ID NO: 3225437 - RNA, 21 nt, Human
auuaauguauccaaugaaaua

SEQ ID NO: 3225438 - RNA, 13 nt, Human
auuaaugcuuugg

SEQ ID NO: 3225439 - RNA, 12 nt, Human
auuaaugcuuug

SEQ ID NO: 3225440 - RNA, 11 nt, Human
auuaauugugu

SEQ ID NO: 3225441 - RNA, 12 nt, Human
auuaauugucuu

SEQ ID NO: 3225442 - RNA, 14 nt, Human
auuaauugugugaa

SEQ ID NO: 3225443 - RNA, 16 nt, Human
auuaauugugugaacu

SEQ ID NO: 3225444 - RNA, 14 nt, Human
auuaauuuaaauga

SEQ ID NO: 3225445 - RNA, 15 nt, Human
auuaauuuaucagau

SEQ ID NO: 3225446 - RNA, 16 nt, Human
auuaauuuaucagauu

SEQ ID NO: 3225447 - RNA, 19 nt, Human
auuaauuuaucagauugcu

SEQ ID NO: 3225448 - RNA, 21 nt, Human
auuaauugugugaacuuggaa

SEQ ID NO: 3225449 - RNA, 18 nt, Human
auuaauugugugaacuug

SEQ ID NO: 3225450 - RNA, 20 nt, Human
auuaauugugugaacuugga

SEQ ID NO: 3225451 - RNA, 21 nt, Human
auuaauuuggagcacaaaauu

SEQ ID NO: 3225452 - RNA, 13 nt, Human
auuaauuucugcc

SEQ ID NO: 3225453 - RNA, 20 nt, Human
auuaauuucugccauuucau

SEQ ID NO: 3225454 - RNA, 21 nt, Human
auuaauuucugccauuucaug

SEQ ID NO: 3225455 - RNA, 22 nt, Human
auuaauuucugccauuucaugu

SEQ ID NO: 3225456 - RNA, 15 nt, Human
auuaaugccugcuuu

SEQ ID NO: 3225457 - RNA, 17 nt, Human
auuaaugccugcuuuuu

SEQ ID NO: 3225458 - RNA, 22 nt, Human
auuaaugccugcuuuuuggaaa

SEQ ID NO: 3225459 - RNA, 15 nt, Human
auuaauggaaauguu

SEQ ID NO: 3225460 - RNA, 17 nt, Human
auucauggccuggggga

SEQ ID NO: 3225461 - RNA, 14 nt, Human
auucauauuuacuu

SEQ ID NO: 3225462 - RNA, 20 nt, Human
auucauauuacaauauuugu

SEQ ID NO: 3225463 - RNA, 19 nt, Human
auucauauuacaauauuug

SEQ ID NO: 3225464 - RNA, 18 nt, Human
auucauauuacaauauuu

SEQ ID NO: 3225465 - RNA, 17 nt, Human
auucauauuacaauauu

SEQ ID NO: 3225466 - RNA, 15 nt, Human
auucauauuacaaua

SEQ ID NO: 3225467 - RNA, 16 nt, Human
auucauaguagaacuu

SEQ ID NO: 3225468 - RNA, 13 nt, Human
auucauauuacaa

SEQ ID NO: 3225469 - RNA, 14 nt, Human
auucauauuacaau

SEQ ID NO: 3225470 - RNA, 16 nt, Human
auucauucauacuuaa

SEQ ID NO: 3225471 - RNA, 23 nt, Human
auucauauauuuuaugaaucaga

SEQ ID NO: 3225472 - RNA, 22 nt, Human
auuauguccugugagaugugua

SEQ ID NO: 3225473 - RNA, 15 nt, Human
auuaugucaaccagg

SEQ ID NO: 3225474 - RNA, 20 nt, Human
auuaugugaccauaauguac

SEQ ID NO: 3225475 - RNA, 16 nt, Human
auuagaucaaauaguu

SEQ ID NO: 3225476 - RNA, 19 nt, Human
auuagaucaaauaguugca

SEQ ID NO: 3225477 - RNA, 21 nt, Human
auuagaucaaauaguugcaua

SEQ ID NO: 3225478 - RNA, 18 nt, Human
auuagauccauuaauuua

SEQ ID NO: 3225479 - RNA, 19 nt, Human
auuagauccuaagaugugu

SEQ ID NO: 3225480 - RNA, 16 nt, Human
auuagaggggaaaagc

SEQ ID NO: 3225481 - RNA, 23 nt, Human
auuagagucaacuacacaaagca

SEQ ID NO: 3225482 - RNA, 21 nt, Human
auugaggaaaaauaugugaag

SEQ ID NO: 3225483 - RNA, 20 nt, Human
auugaggaaaaauaugugaa

SEQ ID NO: 3225484 - RNA, 17 nt, Human
auugaggaaaaauaugu

SEQ ID NO: 3225485 - RNA, 22 nt, Human
auugagcugcuuuuuuugaaac

SEQ ID NO: 3225486 - RNA, 15 nt, Human
auugaggaaaaauau

SEQ ID NO: 3225487 - RNA, 15 nt, Human
auucucuuauccaac

SEQ ID NO: 3225488 - RNA, 21 nt, Human
auucucuccauuucacuggcu

SEQ ID NO: 3225489 - RNA, 15 nt, Human
auucucuugccucag

SEQ ID NO: 3225490 - RNA, 15 nt, Human
auucuuuagagaaga

SEQ ID NO: 3225491 - RNA, 17 nt, Human
auucucuugccucagcu

SEQ ID NO: 3225492 - RNA, 16 nt, Human
auucuuguuuugcuuc

SEQ ID NO: 3225493 - RNA, 15 nt, Human
auucuuguuuugcuu

SEQ ID NO: 3225494 - RNA, 14 nt, Human
auucucuuauccaa

SEQ ID NO: 3225495 - RNA, 12 nt, Human
auucucuuaucc

SEQ ID NO: 3225496 - RNA, 17 nt, Human
auucucuauuugaauua

SEQ ID NO: 3225497 - RNA, 20 nt, Human
auucucuauuugaauuauuu

SEQ ID NO: 3225498 - RNA, 22 nt, Human
auucucuauuugaauuauuucu

SEQ ID NO: 3225499 - RNA, 22 nt, Human
auucguacauaauacugaacca

SEQ ID NO: 3225500 - RNA, 23 nt, Human
auucguacauaauacugaaccac

SEQ ID NO: 3225501 - RNA, 16 nt, Human
auucguacauaauacu

SEQ ID NO: 3225502 - RNA, 18 nt, Human
auucguacauaauacuga

SEQ ID NO: 3225503 - RNA, 17 nt, Human
auucgggccccaccugc

SEQ ID NO: 3225504 - RNA, 21 nt, Human
auucgcuacuaugauuuaauu

SEQ ID NO: 3225505 - RNA, 15 nt, Human
auucgggccccaccu

SEQ ID NO: 3225506 - RNA, 15 nt, Human
auuccuuuuuauuua

SEQ ID NO: 3225507 - RNA, 16 nt, Human
auuccuuuuuauuuau

SEQ ID NO: 3225508 - RNA, 18 nt, Human
auuccuuuuuauuuauau

SEQ ID NO: 3225509 - RNA, 20 nt, Human
auuccuuuuuauuuauaugu

SEQ ID NO: 3225510 - RNA, 21 nt, Human
auuccuuuuuauuuauaugua

SEQ ID NO: 3225511 - RNA, 17 nt, Human
caucuguaccucugccu

SEQ ID NO: 3225512 - RNA, 15 nt, Human
caucugguuuucucu

SEQ ID NO: 3225513 - RNA, 14 nt, Human
caucugguuuucuc

SEQ ID NO: 3225514 - RNA, 15 nt, Human
caucuguaagcuguu

SEQ ID NO: 3225515 - RNA, 19 nt, Human
caucugguuuucucuccag

SEQ ID NO: 3225516 - RNA, 16 nt, Human
caucuggaguucucaa

SEQ ID NO: 3225517 - RNA, 15 nt, Human
caucuggaguucuca

SEQ ID NO: 3225518 - RNA, 20 nt, Human
caucuggagagcccagaguc

SEQ ID NO: 3225519 - RNA, 12 nt, Human
caucuggagagc

SEQ ID NO: 3225520 - RNA, 18 nt, Human
cauccugaggcuccacuu

SEQ ID NO: 3225521 - RNA, 19 nt, Human
cauccugaggcuccacuug

SEQ ID NO: 3225522 - RNA, 15 nt, Human
caucuaaacugcccc

SEQ ID NO: 3225523 - RNA, 21 nt, Human
caucuaaacugcccccucugc

SEQ ID NO: 3225524 - RNA, 23 nt, Human
caucguugcaaccacugcaauau

SEQ ID NO: 3225525 - RNA, 13 nt, Human
caucuaaaaauau

SEQ ID NO: 3225526 - RNA, 17 nt, Human
caucuaaaaauauacau

SEQ ID NO: 3225527 - RNA, 14 nt, Human
caucuaaaaauaua

SEQ ID NO: 3225528 - RNA, 23 nt, Human
caucuaaaaauauacauguuuau

SEQ ID NO: 3225529 - RNA, 21 nt, Human
caucuaaaaauauacauguuu

SEQ ID NO: 3225530 - RNA, 19 nt, Human
caucuaaaaauauacaugu

SEQ ID NO: 3225531 - RNA, 18 nt, Human
caucuaaaaauauacaug

SEQ ID NO: 3225532 - RNA, 11 nt, Human
caucccagccc

SEQ ID NO: 3225533 - RNA, 19 nt, Human
caucccaccccauccucca

SEQ ID NO: 3225534 - RNA, 16 nt, Human
caucccaccccauccu

SEQ ID NO: 3225535 - RNA, 16 nt, Human
caucccacugcugacu

SEQ ID NO: 3225536 - RNA, 20 nt, Human
caucccaaacccuucagugc

SEQ ID NO: 3225537 - RNA, 21 nt, Human
cauccucuguacagagcccac

SEQ ID NO: 3225538 - RNA, 22 nt, Human
cauccucuguacagagcccacg

SEQ ID NO: 3225539 - RNA, 19 nt, Human
caucccaaacccuucagug

SEQ ID NO: 3225540 - RNA, 19 nt, Human
caucagcugcucagauccc

SEQ ID NO: 3225541 - RNA, 18 nt, Human
caucagcugcucagaucc

SEQ ID NO: 3225542 - RNA, 16 nt, Human
caucagcugcucagau

SEQ ID NO: 3225543 - RNA, 15 nt, Human
caucagcugcucaga

SEQ ID NO: 3225544 - RNA, 17 nt, Human
caucagaacagcuguug

SEQ ID NO: 3225545 - RNA, 14 nt, Human
caucagaacagcug

SEQ ID NO: 3225546 - RNA, 12 nt, Human
caucagaacagc

SEQ ID NO: 3225547 - RNA, 19 nt, Human
caucagaaauaauaaaaaa

SEQ ID NO: 3225548 - RNA, 11 nt, Human
caucagaaaua

SEQ ID NO: 3225549 - RNA, 20 nt, Human
caucagcccaaucccugauc

SEQ ID NO: 3225550 - RNA, 18 nt, Human
caucagcccaaucccuga

SEQ ID NO: 3225551 - RNA, 12 nt, Human
caguuucaauaa

SEQ ID NO: 3225552 - RNA, 23 nt, Human
caguuuauuccagagcugccagu

SEQ ID NO: 3225553 - RNA, 19 nt, Human
caguuuauuugaaccaaua

SEQ ID NO: 3225554 - RNA, 18 nt, Human
caguuuauuugaaccaau

SEQ ID NO: 3225555 - RNA, 20 nt, Human
caguuuaugcagugcugcuu

SEQ ID NO: 3225556 - RNA, 14 nt, Human
caguuuauguuuug

SEQ ID NO: 3225557 - RNA, 13 nt, Human
caguuuauguuuu

SEQ ID NO: 3225558 - RNA, 22 nt, Human
caguuuauuccagagcugccag

SEQ ID NO: 3225559 - RNA, 18 nt, Human
caguuuauuccagagcug

SEQ ID NO: 3225560 - RNA, 14 nt, Human
caguuuauuccaga

SEQ ID NO: 3225561 - RNA, 19 nt, Human
caguuuauguuuuggucca

SEQ ID NO: 3225562 - RNA, 18 nt, Human
caguuguuagugugucuu

SEQ ID NO: 3225563 - RNA, 22 nt, Human
caguuguuagugugucuuagug

SEQ ID NO: 3225564 - RNA, 21 nt, Human
caguuguuaguuacuaccucc

SEQ ID NO: 3225565 - RNA, 21 nt, Human
caguuugaggauuaguuuaga

SEQ ID NO: 3225566 - RNA, 14 nt, Human
caguuucuaaaauu

SEQ ID NO: 3225567 - RNA, 20 nt, Human
caguuucaauaaaguuugau

SEQ ID NO: 3225568 - RNA, 18 nt, Human
caguuucaauaaaguuug

SEQ ID NO: 3225569 - RNA, 17 nt, Human
caguuucaauaaaguuu

SEQ ID NO: 3225570 - RNA, 16 nt, Human
caguuucaauaaaguu

SEQ ID NO: 3225571 - RNA, 13 nt, Human
caguuucaauaaa

SEQ ID NO: 3225572 - RNA, 15 nt, Human
cauaauguucugcua

SEQ ID NO: 3225573 - RNA, 13 nt, Human
cauaauuaacacu

SEQ ID NO: 3225574 - RNA, 16 nt, Human
cauaauuagauccauu

SEQ ID NO: 3225575 - RNA, 18 nt, Human
cauaauuagauccauuaa

SEQ ID NO: 3225576 - RNA, 19 nt, Human
cauaauuagauccauuaau

SEQ ID NO: 3225577 - RNA, 22 nt, Human
cauaauuagauccauuaauuua

SEQ ID NO: 3225578 - RNA, 16 nt, Human
cauacagggauggugu

SEQ ID NO: 3225579 - RNA, 23 nt, Human
cauacaggaagguagaaauaucu

SEQ ID NO: 3225580 - RNA, 19 nt, Human
cauacagggaugguguuca

SEQ ID NO: 3225581 - RNA, 20 nt, Human
cauaauguacugauuucagu

SEQ ID NO: 3225582 - RNA, 18 nt, Human
caguuuuauagcuuuauu

SEQ ID NO: 3225583 - RNA, 19 nt, Human
cauagcagcuuauucacaa

SEQ ID NO: 3225584 - RNA, 23 nt, Human
cauagcagagaaugaaagggccc

SEQ ID NO: 3225585 - RNA, 14 nt, Human
cauagcagaucugu

SEQ ID NO: 3225586 - RNA, 16 nt, Human
cauagcagaucuguuu

SEQ ID NO: 3225587 - RNA, 17 nt, Human
cauagcagaucuguuuu

SEQ ID NO: 3225588 - RNA, 16 nt, Human
cauagguuagauauag

SEQ ID NO: 3225589 - RNA, 15 nt, Human
cauagguuaaaaaaa

SEQ ID NO: 3225590 - RNA, 22 nt, Human
cauagguuaaaaaaaaaaguca

SEQ ID NO: 3225591 - RNA, 23 nt, Human
cauagguuaaaaaaaaaagucac

SEQ ID NO: 3225592 - RNA, 16 nt, Human
cauauguauacaugug

SEQ ID NO: 3225593 - RNA, 15 nt, Human
cauauguauacaugu

SEQ ID NO: 3225594 - RNA, 23 nt, Human
cauauuauaucagacugcuuuga

SEQ ID NO: 3225595 - RNA, 16 nt, Human
cauauuauaucagacu

SEQ ID NO: 3225596 - RNA, 14 nt, Human
cauauuauaucaga

SEQ ID NO: 3225597 - RNA, 23 nt, Human
cauauuagcgacaacagauugga

SEQ ID NO: 3225598 - RNA, 20 nt, Human
cauauuagcgacaacagauu

SEQ ID NO: 3225599 - RNA, 19 nt, Human
cauauuagcgacaacagau

SEQ ID NO: 3225600 - RNA, 19 nt, Human
cauauuacuguacauggga

SEQ ID NO: 3225601 - RNA, 12 nt, Human
cauauuagaaaa

SEQ ID NO: 3225602 - RNA, 22 nt, Human
cauauuacuguacaugggacua

SEQ ID NO: 3225603 - RNA, 17 nt, Human
cauauuagaaaacuuug

SEQ ID NO: 3225604 - RNA, 16 nt, Human
cauauuagaaaacuuu

SEQ ID NO: 3225605 - RNA, 15 nt, Human
cauauuagaaaacuu

SEQ ID NO: 3225606 - RNA, 13 nt, Human
cauauuagaaaac

SEQ ID NO: 3225607 - RNA, 20 nt, Human
cauauuagaggggaaaagcu

SEQ ID NO: 3225608 - RNA, 22 nt, Human
cauauuagacuucuguuuucaa

SEQ ID NO: 3225609 - RNA, 21 nt, Human
cauauuagacuucuguuuuca

SEQ ID NO: 3225610 - RNA, 18 nt, Human
cauauuagacuucuguuu

SEQ ID NO: 3225611 - RNA, 21 nt, Human
cauauuagaaaacuuuguuag

SEQ ID NO: 3225612 - RNA, 20 nt, Human
cauauuagaaaacuuuguua

SEQ ID NO: 3225613 - RNA, 19 nt, Human
cauauuagaaaacuuuguu

SEQ ID NO: 3225614 - RNA, 18 nt, Human
cauauuagaaaacuuugu

SEQ ID NO: 3225615 - RNA, 13 nt, Human
caguuauggcuau

SEQ ID NO: 3225616 - RNA, 19 nt, Human
caguuauacaguuauaaaa

SEQ ID NO: 3225617 - RNA, 20 nt, Human
caguuauacaguuauaaaau

SEQ ID NO: 3225618 - RNA, 20 nt, Human
caguuauggcuauaggugcu

SEQ ID NO: 3225619 - RNA, 19 nt, Human
caguuauggcuauaggugc

SEQ ID NO: 3225620 - RNA, 19 nt, Human
caguggugcgaucuggguu

SEQ ID NO: 3225621 - RNA, 21 nt, Human
cagugguaugaucacggcuca

SEQ ID NO: 3225622 - RNA, 23 nt, Human
caguuacuuuccaauucuccuuu

SEQ ID NO: 3225623 - RNA, 15 nt, Human
caguuacuuuuccuu

SEQ ID NO: 3225624 - RNA, 14 nt, Human
caguuacuuuuccu

SEQ ID NO: 3225625 - RNA, 19 nt, Human
caguuacuuuuccuugcau

SEQ ID NO: 3225626 - RNA, 16 nt, Human
caguuacuuuuccuug

SEQ ID NO: 3225627 - RNA, 17 nt, Human
caguuauaaaauuaaaa

SEQ ID NO: 3225628 - RNA, 19 nt, Human
caguuauaaaauuaaaagu

SEQ ID NO: 3225629 - RNA, 20 nt, Human
cagugguaugaucacggcuc

SEQ ID NO: 3225630 - RNA, 22 nt, Human
cagugcccagguggcuguggaa

SEQ ID NO: 3225631 - RNA, 15 nt, Human
cagugcccagguggc

SEQ ID NO: 3225632 - RNA, 18 nt, Human
cagugggagcugccuguu

SEQ ID NO: 3225633 - RNA, 17 nt, Human
cagugggagcugccugu

SEQ ID NO: 3225634 - RNA, 15 nt, Human
cagugggagcugccu

SEQ ID NO: 3225635 - RNA, 11 nt, Human
cagugcccagg

SEQ ID NO: 3225636 - RNA, 14 nt, Human
cagugcccaggugg

SEQ ID NO: 3225637 - RNA, 13 nt, Human
cagugcccaggug

SEQ ID NO: 3225638 - RNA, 16 nt, Human
cagugggagcugccug

SEQ ID NO: 3225639 - RNA, 22 nt, Human
cagugauuaccagggacugagg

SEQ ID NO: 3225640 - RNA, 23 nt, Human
cagucugauucccaagcucugcu

SEQ ID NO: 3225641 - RNA, 22 nt, Human
cagugcccacaggaucagucug

SEQ ID NO: 3225642 - RNA, 18 nt, Human
cagugcccacaggaucag

SEQ ID NO: 3225643 - RNA, 21 nt, Human
cagugcccacaggaucagucu

SEQ ID NO: 3225644 - RNA, 22 nt, Human
cagucugauucccaagcucugc

SEQ ID NO: 3225645 - RNA, 21 nt, Human
cagucugauucccaagcucug

SEQ ID NO: 3225646 - RNA, 15 nt, Human
cagucuaucauuguu

SEQ ID NO: 3225647 - RNA, 10 nt, Human
cagucucaca

SEQ ID NO: 3225648 - RNA, 17 nt, Human
cagucucaccauuuccc

SEQ ID NO: 3225649 - RNA, 20 nt, Human
cagucucacauuucucaaca

SEQ ID NO: 3225650 - RNA, 12 nt, Human
cagucucacauu

SEQ ID NO: 3225651 - RNA, 21 nt, Human
cagucuaaauuuauuauuuaa

SEQ ID NO: 3225652 - RNA, 21 nt, Human
cagucgugguugggaacacag

SEQ ID NO: 3225653 - RNA, 16 nt, Human
caguuaugugaccuca

SEQ ID NO: 3225654 - RNA, 13 nt, Human
caguuaugugacc

SEQ ID NO: 3225655 - RNA, 21 nt, Human
caguuaugugaccucacgugc

SEQ ID NO: 3225656 - RNA, 17 nt, Human
caguuauugucccuggc

SEQ ID NO: 3225657 - RNA, 23 nt, Human
caguuauugucccuggcuuccuu

SEQ ID NO: 3225658 - RNA, 20 nt, Human
caguuauugucccuggcuuc

SEQ ID NO: 3225659 - RNA, 15 nt, Human
caguucaaagucaug

SEQ ID NO: 3225660 - RNA, 13 nt, Human
caguucaaaguca

SEQ ID NO: 3225661 - RNA, 23 nt, Human
caguucaaagucaugauguuuuu

SEQ ID NO: 3225662 - RNA, 22 nt, Human
caguucaaagucaugauguuuu

SEQ ID NO: 3225663 - RNA, 15 nt, Human
caguucagcuugggg

SEQ ID NO: 3225664 - RNA, 14 nt, Human
caguucagcuuggg

SEQ ID NO: 3225665 - RNA, 23 nt, Human
caguuccaaucaguagcuuaaga

SEQ ID NO: 3225666 - RNA, 13 nt, Human
caugaaugcuuuu

SEQ ID NO: 3225667 - RNA, 14 nt, Human
caugaauuuuaaag

SEQ ID NO: 3225668 - RNA, 15 nt, Human
caugaauuuuaaagu

SEQ ID NO: 3225669 - RNA, 16 nt, Human
caugaauuuuaaagua

SEQ ID NO: 3225670 - RNA, 17 nt, Human
caugaauuuuaaaguau

SEQ ID NO: 3225671 - RNA, 21 nt, Human
caugaauuuuaaaguaugcau

SEQ ID NO: 3225672 - RNA, 23 nt, Human
caugcaagggaugaauuguaaaa

SEQ ID NO: 3225673 - RNA, 17 nt, Human
caugaugcucuuuccca

SEQ ID NO: 3225674 - RNA, 16 nt, Human
caugaugcucuuuccc

SEQ ID NO: 3225675 - RNA, 22 nt, Human
cauggccggcuuucaggagcuc

SEQ ID NO: 3225676 - RNA, 20 nt, Human
cauggccggcuuucaggagc

SEQ ID NO: 3225677 - RNA, 14 nt, Human
cauggccgugaacu

SEQ ID NO: 3225678 - RNA, 19 nt, Human
cauggcuucugaaccuguc

SEQ ID NO: 3225679 - RNA, 13 nt, Human
cauggcuucugaa

SEQ ID NO: 3225680 - RNA, 18 nt, Human
caugggaaaggggaaguu

SEQ ID NO: 3225681 - RNA, 18 nt, Human
caugggaaaguauucucu

SEQ ID NO: 3225682 - RNA, 22 nt, Human
cauggcuucugaaccugucuuu

SEQ ID NO: 3225683 - RNA, 20 nt, Human
caugggaaaugucaacaagu

SEQ ID NO: 3225684 - RNA, 21 nt, Human
caugggaaaguauucucuuuu

SEQ ID NO: 3225685 - RNA, 20 nt, Human
caugggaaaguauucucuuu

SEQ ID NO: 3225686 - RNA, 14 nt, Human
caugcuccuggccc

SEQ ID NO: 3225687 - RNA, 16 nt, Human
caugcuccuggcccac

SEQ ID NO: 3225688 - RNA, 17 nt, Human
caugcuccuggcccacu

SEQ ID NO: 3225689 - RNA, 14 nt, Human
cauggccagguggc

SEQ ID NO: 3225690 - RNA, 15 nt, Human
cauggccagguggcc

SEQ ID NO: 3225691 - RNA, 19 nt, Human
cauggccggcuuucaggag

SEQ ID NO: 3225692 - RNA, 18 nt, Human
cauggccggcuuucagga

SEQ ID NO: 3225693 - RNA, 17 nt, Human
cauggccggcuuucagg

SEQ ID NO: 3225694 - RNA, 16 nt, Human
cauggccggcuuucag

SEQ ID NO: 3225695 - RNA, 20 nt, Human
cauguuggccaggcugcucu

SEQ ID NO: 3225696 - RNA, 23 nt, Human
cauguuggccaggcugcucucaa

SEQ ID NO: 3225697 - RNA, 22 nt, Human
cauguuggccaggcugcucuca

SEQ ID NO: 3225698 - RNA, 17 nt, Human
cauguuggccaggcugg

SEQ ID NO: 3225699 - RNA, 18 nt, Human
cauguuggccaggcuggu

SEQ ID NO: 3225700 - RNA, 17 nt, Human
cauguuacauaagauaa

SEQ ID NO: 3225701 - RNA, 16 nt, Human
cauguuacauaagaua

SEQ ID NO: 3225702 - RNA, 15 nt, Human
cauguccaagaagcc

SEQ ID NO: 3225703 - RNA, 21 nt, Human
cauguuacauaagauaaaugu

SEQ ID NO: 3225704 - RNA, 18 nt, Human
cauguuaauugauagaau

SEQ ID NO: 3225705 - RNA, 15 nt, Human
cauguauggccagga

SEQ ID NO: 3225706 - RNA, 14 nt, Human
cauguauggccagg

SEQ ID NO: 3225707 - RNA, 12 nt, Human
cauguauggcca

SEQ ID NO: 3225708 - RNA, 12 nt, Human
cauguauuaaau

SEQ ID NO: 3225709 - RNA, 22 nt, Human
cauguauuaaauuacauuugua

SEQ ID NO: 3225710 - RNA, 20 nt, Human
cauguauuaaauuacauuug

SEQ ID NO: 3225711 - RNA, 11 nt, Human
cauuauuauua

SEQ ID NO: 3225712 - RNA, 13 nt, Human
cauuauuaaauug

SEQ ID NO: 3225713 - RNA, 17 nt, Human
cauuauuaaauuguaaa

SEQ ID NO: 3225714 - RNA, 17 nt, Human
cauuaucuacuugugua

SEQ ID NO: 3225715 - RNA, 23 nt, Human
cauuauuacuuuuccucuuagaa

SEQ ID NO: 3225716 - RNA, 17 nt, Human
cauucuccaccugccag

SEQ ID NO: 3225717 - RNA, 18 nt, Human
cauucuccaccugccagg

SEQ ID NO: 3225718 - RNA, 19 nt, Human
cauucuccaccugccaggg

SEQ ID NO: 3225719 - RNA, 12 nt, Human
cauucucucucc

SEQ ID NO: 3225720 - RNA, 22 nt, Human
cauucucuccauuucacuggcu

SEQ ID NO: 3225721 - RNA, 20 nt, Human
cauucucuaauauccacuug

SEQ ID NO: 3225722 - RNA, 23 nt, Human
cauuggaagcagguuaaauguuu

SEQ ID NO: 3225723 - RNA, 22 nt, Human
cauuggaagcagguuaaauguu

SEQ ID NO: 3225724 - RNA, 15 nt, Human
cauuggauucugaga

SEQ ID NO: 3225725 - RNA, 21 nt, Human
cauuggaagcagguuaaaugu

SEQ ID NO: 3225726 - RNA, 16 nt, Human
cauuuaggugaggaag

SEQ ID NO: 3225727 - RNA, 18 nt, Human
cauuuaggugaggaagca

SEQ ID NO: 3225728 - RNA, 14 nt, Human
ccaaaaggcagaag

SEQ ID NO: 3225729 - RNA, 23 nt, Human
ccaaaaaauaucuaguaauauau

SEQ ID NO: 3225730 - RNA, 19 nt, Human
ccaaaaaauaucuaguaau

SEQ ID NO: 3225731 - RNA, 17 nt, Human
ccaaaaaaauccagaaa

SEQ ID NO: 3225732 - RNA, 12 nt, Human
ccaaaaaauauc

SEQ ID NO: 3225733 - RNA, 12 nt, Human
cauuuaucuuga

SEQ ID NO: 3225734 - RNA, 15 nt, Human
cauuuaucuugaagg

SEQ ID NO: 3225735 - RNA, 14 nt, Human
cauuuaucuugaag

SEQ ID NO: 3225736 - RNA, 23 nt, Human
cauuuaucuugaaggaaaaauuc

SEQ ID NO: 3225737 - RNA, 17 nt, Human
cauuuaucuugaaggaa

SEQ ID NO: 3225738 - RNA, 16 nt, Human
cauuuaucuugaagga

SEQ ID NO: 3225739 - RNA, 12 nt, Human
cauuuguaauuu

SEQ ID NO: 3225740 - RNA, 13 nt, Human
cauuuggugcuug

SEQ ID NO: 3225741 - RNA, 20 nt, Human
cauuuggguugguuccaagu

SEQ ID NO: 3225742 - RNA, 16 nt, Human
cauuugggcagagagg

SEQ ID NO: 3225743 - RNA, 12 nt, Human
cauuugggcaga

SEQ ID NO: 3225744 - RNA, 14 nt, Human
cauuuguaauuuaa

SEQ ID NO: 3225745 - RNA, 13 nt, Human
cauuuguuaauau

SEQ ID NO: 3225746 - RNA, 16 nt, Human
cauuuguuaauaucac

SEQ ID NO: 3225747 - RNA, 22 nt, Human
cauuuguuaauaucacucauua

SEQ ID NO: 3225748 - RNA, 23 nt, Human
cauuuguuucuuucucugaggac

SEQ ID NO: 3225749 - RNA, 19 nt, Human
cauuuguugccagauuuca

SEQ ID NO: 3225750 - RNA, 22 nt, Human
cauuuguuucuuucucugagga

SEQ ID NO: 3225751 - RNA, 21 nt, Human
cauuuguuucuuucucugagg

SEQ ID NO: 3225752 - RNA, 23 nt, Human
ccaauggacuaacuugucuuugg

SEQ ID NO: 3225753 - RNA, 21 nt, Human
ccaauggagacugucucaaga

SEQ ID NO: 3225754 - RNA, 19 nt, Human
ccaauucgaacuuuuucca

SEQ ID NO: 3225755 - RNA, 14 nt, Human
ccaauucuccuuua

SEQ ID NO: 3225756 - RNA, 22 nt, Human
ccaaggacagaaggcuccugcc

SEQ ID NO: 3225757 - RNA, 13 nt, Human
ccaacucacccca

SEQ ID NO: 3225758 - RNA, 23 nt, Human
ccaaaucagcugcuacuacuccu

SEQ ID NO: 3225759 - RNA, 15 nt, Human
ccaaaucagcugcua

SEQ ID NO: 3225760 - RNA, 18 nt, Human
ccaacuccaacauccacu

SEQ ID NO: 3225761 - RNA, 17 nt, Human
ccaacuccaacauccac

SEQ ID NO: 3225762 - RNA, 16 nt, Human
ccaacuccaacaucca

SEQ ID NO: 3225763 - RNA, 21 nt, Human
ccaacucaccccagccccaaa

SEQ ID NO: 3225764 - RNA, 15 nt, Human
ccaagcucugcuccu

SEQ ID NO: 3225765 - RNA, 14 nt, Human
ccaagcucugcucc

SEQ ID NO: 3225766 - RNA, 16 nt, Human
ccaagcucugcuccuc

SEQ ID NO: 3225767 - RNA, 13 nt, Human
ccaagcucugcuc

SEQ ID NO: 3225768 - RNA, 22 nt, Human
ccaaaguacagaauuugaauua

SEQ ID NO: 3225769 - RNA, 14 nt, Human
ccaaaguauuguac

SEQ ID NO: 3225770 - RNA, 20 nt, Human
cagauuucacucuccuuggu

SEQ ID NO: 3225771 - RNA, 20 nt, Human
cagauugcaacaggcugggc

SEQ ID NO: 3225772 - RNA, 19 nt, Human
cagauugcaacaggcuggg

SEQ ID NO: 3225773 - RNA, 17 nt, Human
cagauugcaacaggcug

SEQ ID NO: 3225774 - RNA, 19 nt, Human
cagcaccaucucuccuccu

SEQ ID NO: 3225775 - RNA, 22 nt, Human
cagcaccacucaagaccaaaug

SEQ ID NO: 3225776 - RNA, 21 nt, Human
cagcaccacucaagaccaaau

SEQ ID NO: 3225777 - RNA, 14 nt, Human
cagcaccacucaag

SEQ ID NO: 3225778 - RNA, 19 nt, Human
cagcaccacccuccuuccc

SEQ ID NO: 3225779 - RNA, 17 nt, Human
cagcaccaucucuccuc

SEQ ID NO: 3225780 - RNA, 17 nt, Human
cagcaccacccuccuuc

SEQ ID NO: 3225781 - RNA, 16 nt, Human
cagauuucucuuugaa

SEQ ID NO: 3225782 - RNA, 19 nt, Human
cagauuucacucuccuugg

SEQ ID NO: 3225783 - RNA, 18 nt, Human
cagauugcaacaggcugg

SEQ ID NO: 3225784 - RNA, 17 nt, Human
cagcacguguggccugu

SEQ ID NO: 3225785 - RNA, 18 nt, Human
cagcacgggggccaagga

SEQ ID NO: 3225786 - RNA, 14 nt, Human
cagccagacuggca

SEQ ID NO: 3225787 - RNA, 14 nt, Human
cagcacuaaacuug

SEQ ID NO: 3225788 - RNA, 23 nt, Human
cagccagaagccacccaaagcag

SEQ ID NO: 3225789 - RNA, 18 nt, Human
cagccaggccacuggccc

SEQ ID NO: 3225790 - RNA, 22 nt, Human
cagccaggccacaagacccuug

SEQ ID NO: 3225791 - RNA, 18 nt, Human
cagccagacuggcacagu

SEQ ID NO: 3225792 - RNA, 15 nt, Human
cagccagacuggcac

SEQ ID NO: 3225793 - RNA, 13 nt, Human
cagagcugccacc

SEQ ID NO: 3225794 - RNA, 12 nt, Human
cagagcugaaga

SEQ ID NO: 3225795 - RNA, 20 nt, Human
cagagagguuaaggugggua

SEQ ID NO: 3225796 - RNA, 23 nt, Human
cagagaggguggugaccucugcc

SEQ ID NO: 3225797 - RNA, 23 nt, Human
cagagagggugggagugggccca

SEQ ID NO: 3225798 - RNA, 17 nt, Human
cagaggaaagcaaagga

SEQ ID NO: 3225799 - RNA, 19 nt, Human
cagaggaaagcaaaggaga

SEQ ID NO: 3225800 - RNA, 13 nt, Human
cagaggggguggc

SEQ ID NO: 3225801 - RNA, 12 nt, Human
cagagagggugg

SEQ ID NO: 3225802 - RNA, 15 nt, Human
cagagaggcuguggu

SEQ ID NO: 3225803 - RNA, 16 nt, Human
cagagaggcugugguu

SEQ ID NO: 3225804 - RNA, 23 nt, Human
cagagagaagagccccacucuca

SEQ ID NO: 3225805 - RNA, 22 nt, Human
cagagagaagagccccacucuc

SEQ ID NO: 3225806 - RNA, 17 nt, Human
cagagaggguggugacc

SEQ ID NO: 3225807 - RNA, 22 nt, Human
cagagaggguggugaccucugc

SEQ ID NO: 3225808 - RNA, 20 nt, Human
cagagaggguggugaccucu

SEQ ID NO: 3225809 - RNA, 23 nt, Human
cagagacuccugcaggcagccag

SEQ ID NO: 3225810 - RNA, 16 nt, Human
cagagagaagagcccc

SEQ ID NO: 3225811 - RNA, 15 nt, Human
cagagagaagagccc

SEQ ID NO: 3225812 - RNA, 21 nt, Human
cagagagaagagccccacucu

SEQ ID NO: 3225813 - RNA, 19 nt, Human
cagagagaagagccccacu

SEQ ID NO: 3225814 - RNA, 18 nt, Human
cagagagaagagccccac

SEQ ID NO: 3225815 - RNA, 17 nt, Human
cagagagaagagcccca

SEQ ID NO: 3225816 - RNA, 19 nt, Human
cagauagauauaugcucug

SEQ ID NO: 3225817 - RNA, 19 nt, Human
cagauacuuggggggcuga

SEQ ID NO: 3225818 - RNA, 14 nt, Human
cagaggggguggcc

SEQ ID NO: 3225819 - RNA, 16 nt, Human
cagaggggguggccuc

SEQ ID NO: 3225820 - RNA, 14 nt, Human
cagauccccaagcc

SEQ ID NO: 3225821 - RNA, 20 nt, Human
cagaucccacuuuugccaga

SEQ ID NO: 3225822 - RNA, 22 nt, Human
cagaucccagcuucggcauuug

SEQ ID NO: 3225823 - RNA, 23 nt, Human
cagacuggcacaguuuucugaga

SEQ ID NO: 3225824 - RNA, 22 nt, Human
cagacuggcacaguuuucugag

SEQ ID NO: 3225825 - RNA, 18 nt, Human
cagacuggcacaguuuuc

SEQ ID NO: 3225826 - RNA, 17 nt, Human
cagacuggcacaguuuu

SEQ ID NO: 3225827 - RNA, 21 nt, Human
cagacuggaagcacagcuuca

SEQ ID NO: 3225828 - RNA, 20 nt, Human
cagacuggaagcacagcuuc

SEQ ID NO: 3225829 - RNA, 18 nt, Human
cagacuggaagcacagcu

SEQ ID NO: 3225830 - RNA, 17 nt, Human
cagacuggaagcacagc

SEQ ID NO: 3225831 - RNA, 16 nt, Human
cagacuggaagcacag

SEQ ID NO: 3225832 - RNA, 14 nt, Human
cagacuggaagcac

SEQ ID NO: 3225833 - RNA, 13 nt, Human
cagacuggaagca

SEQ ID NO: 3225834 - RNA, 23 nt, Human
cagacaggcaagcaccuccugcc

SEQ ID NO: 3225835 - RNA, 22 nt, Human
cagacaggcaagcaccuccugc

SEQ ID NO: 3225836 - RNA, 18 nt, Human
cagacagggggccagaac

SEQ ID NO: 3225837 - RNA, 17 nt, Human
cagacucuacagaggcc

SEQ ID NO: 3225838 - RNA, 17 nt, Human
cagacagucacaaauuu

SEQ ID NO: 3225839 - RNA, 20 nt, Human
cagacagucacaaauuucuc

SEQ ID NO: 3225840 - RNA, 18 nt, Human
cagacaguggaugagaca

SEQ ID NO: 3225841 - RNA, 21 nt, Human
cagacucuacagaggccaugg

SEQ ID NO: 3225842 - RNA, 20 nt, Human
cagacucuacagaggccaug

SEQ ID NO: 3225843 - RNA, 19 nt, Human
cagacucuacagaggccau

SEQ ID NO: 3225844 - RNA, 18 nt, Human
cagacucuacagaggcca

SEQ ID NO: 3225845 - RNA, 23 nt, Human
cagacucuacagaggccaugggc

SEQ ID NO: 3225846 - RNA, 14 nt, Human
cagacagcccucca

SEQ ID NO: 3225847 - RNA, 13 nt, Human
cagacagcugccu

SEQ ID NO: 3225848 - RNA, 14 nt, Human
cagacagcugccug

SEQ ID NO: 3225849 - RNA, 13 nt, Human
cagacaggaccag

SEQ ID NO: 3225850 - RNA, 15 nt, Human
cagacaggaccaggg

SEQ ID NO: 3225851 - RNA, 16 nt, Human
cagacaggaccaggga

SEQ ID NO: 3225852 - RNA, 15 nt, Human
cagacagcugccugg

SEQ ID NO: 3225853 - RNA, 16 nt, Human
cagacagcugccuggg

SEQ ID NO: 3225854 - RNA, 17 nt, Human
cagacagcugccuggga

SEQ ID NO: 3225855 - RNA, 18 nt, Human
cagacagcugccugggau

SEQ ID NO: 3225856 - RNA, 21 nt, Human
cagacaggcaagcaccuccug

SEQ ID NO: 3225857 - RNA, 20 nt, Human
cagacaggcaagcaccuccu

SEQ ID NO: 3225858 - RNA, 18 nt, Human
cagacaggcaagcaccuc

SEQ ID NO: 3225859 - RNA, 13 nt, Human
cagacaggcaagc

SEQ ID NO: 3225860 - RNA, 17 nt, Human
cagacaggaccagggau

SEQ ID NO: 3225861 - RNA, 24 nt, Human
cagacaggaccagggauuuccaug

SEQ ID NO: 3225862 - RNA, 11 nt, Human
cagacaggcaa

SEQ ID NO: 3225863 - RNA, 23 nt, Human
cagacaggaccccugcaguuccc

SEQ ID NO: 3225864 - RNA, 15 nt, Human
cagacaggaccccug

SEQ ID NO: 3225865 - RNA, 18 nt, Human
cagacaggaccccugcag

SEQ ID NO: 3225866 - RNA, 16 nt, Human
cagacaggaccccugc

SEQ ID NO: 3225867 - RNA, 18 nt, Human
cagcugagccuucugagc

SEQ ID NO: 3225868 - RNA, 17 nt, Human
cagcugagccuucugag

SEQ ID NO: 3225869 - RNA, 16 nt, Human
cagcugagccuucuga

SEQ ID NO: 3225870 - RNA, 23 nt, Human
cagcugccuaggauucacacccc

SEQ ID NO: 3225871 - RNA, 21 nt, Human
cagcugacuuuucuguccgag

SEQ ID NO: 3225872 - RNA, 14 nt, Human
cagcugagaggcug

SEQ ID NO: 3225873 - RNA, 15 nt, Human
cagcugagccuucug

SEQ ID NO: 3225874 - RNA, 17 nt, Human
cagcuuauucacaagac

SEQ ID NO: 3225875 - RNA, 14 nt, Human
cagcuucacuucug

SEQ ID NO: 3225876 - RNA, 15 nt, Human
cagcuucacuucuga

SEQ ID NO: 3225877 - RNA, 16 nt, Human
caggaaagaagcauuu

SEQ ID NO: 3225878 - RNA, 16 nt, Human
cagcugucaaggcuca

SEQ ID NO: 3225879 - RNA, 16 nt, Human
caggaaaggcuccagg

SEQ ID NO: 3225880 - RNA, 17 nt, Human
caggaaaggcuccagga

SEQ ID NO: 3225881 - RNA, 19 nt, Human
caggaaaggcuccaggagc

SEQ ID NO: 3225882 - RNA, 15 nt, Human
cagcuaacauggaag

SEQ ID NO: 3225883 - RNA, 19 nt, Human
cagcguuuugcaagguaaa

SEQ ID NO: 3225884 - RNA, 15 nt, Human
cagcguuuugcaagg

SEQ ID NO: 3225885 - RNA, 16 nt, Human
cagccugcuccagcug

SEQ ID NO: 3225886 - RNA, 17 nt, Human
cagccugcuccagcugu

SEQ ID NO: 3225887 - RNA, 19 nt, Human
cagccugcuccagcuguuc

SEQ ID NO: 3225888 - RNA, 15 nt, Human
cagccugcuccagcu

SEQ ID NO: 3225889 - RNA, 12 nt, Human
cagcgcugacgu

SEQ ID NO: 3225890 - RNA, 18 nt, Human
cagcgcucuggugcugca

SEQ ID NO: 3225891 - RNA, 23 nt, Human
cagcgcggacauccccugcuggc

SEQ ID NO: 3225892 - RNA, 22 nt, Human
cagcgcggacauccccugcugg

SEQ ID NO: 3225893 - RNA, 20 nt, Human
cagcgcggacauccccugcu

SEQ ID NO: 3225894 - RNA, 22 nt, Human
caggcugggagagccuuccagg

SEQ ID NO: 3225895 - RNA, 23 nt, Human
caggcugggagagccuuccaggg

SEQ ID NO: 3225896 - RNA, 14 nt, Human
cagggcuuuaaaau

SEQ ID NO: 3225897 - RNA, 13 nt, Human
cagggcuuuaaaa

SEQ ID NO: 3225898 - RNA, 15 nt, Human
cagggcuuuaaaauu

SEQ ID NO: 3225899 - RNA, 14 nt, Human
caggggaaaagagg

SEQ ID NO: 3225900 - RNA, 16 nt, Human
caggggaaaagaggag

SEQ ID NO: 3225901 - RNA, 11 nt, Human
caggcuacugu

SEQ ID NO: 3225902 - RNA, 23 nt, Human
caggcuaauguuggcagaugcag

SEQ ID NO: 3225903 - RNA, 21 nt, Human
caggcugggagagccuuccag

SEQ ID NO: 3225904 - RNA, 20 nt, Human
caggcugggagagccuucca

SEQ ID NO: 3225905 - RNA, 21 nt, Human
caggcgugagccaccgugccu

SEQ ID NO: 3225906 - RNA, 12 nt, Human
caggccuccuac

SEQ ID NO: 3225907 - RNA, 18 nt, Human
caggccuacuccugucuu

SEQ ID NO: 3225908 - RNA, 17 nt, Human
caggccuacuccugucu

SEQ ID NO: 3225909 - RNA, 16 nt, Human
caggccuacuccuguc

SEQ ID NO: 3225910 - RNA, 15 nt, Human
caggccuacuccugu

SEQ ID NO: 3225911 - RNA, 17 nt, Human
caggccgggcagagcac

SEQ ID NO: 3225912 - RNA, 14 nt, Human
caggccuccuacag

SEQ ID NO: 3225913 - RNA, 19 nt, Human
caggccuacuccugucuuc

SEQ ID NO: 3225914 - RNA, 15 nt, Human
caggccuguccaaca

SEQ ID NO: 3225915 - RNA, 14 nt, Human
caggccgggcagag

SEQ ID NO: 3225916 - RNA, 13 nt, Human
caggccgggcaga

SEQ ID NO: 3225917 - RNA, 21 nt, Human
caggaccagggauuuccauga

SEQ ID NO: 3225918 - RNA, 21 nt, Human
caggaccagcccacgcugacu

SEQ ID NO: 3225919 - RNA, 17 nt, Human
caggaccagcccacgcu

SEQ ID NO: 3225920 - RNA, 23 nt, Human
caggaccaggguuggcaccuucc

SEQ ID NO: 3225921 - RNA, 22 nt, Human
caggaccaggguuggcaccuuc

SEQ ID NO: 3225922 - RNA, 19 nt, Human
caggaccaggguuggcacc

SEQ ID NO: 3225923 - RNA, 16 nt, Human
caggaccucaggugag

SEQ ID NO: 3225924 - RNA, 23 nt, Human
caggaccucaggugagaagcaga

SEQ ID NO: 3225925 - RNA, 13 nt, Human
caggaccucaggu

SEQ ID NO: 3225926 - RNA, 16 nt, Human
caggaccagcccacgc

SEQ ID NO: 3225927 - RNA, 15 nt, Human
caggaccagcccacg

SEQ ID NO: 3225928 - RNA, 14 nt, Human
caggaccagcccac

SEQ ID NO: 3225929 - RNA, 13 nt, Human
caggaccagccca

SEQ ID NO: 3225930 - RNA, 16 nt, Human
caggcaaugcuggcug

SEQ ID NO: 3225931 - RNA, 15 nt, Human
caggcaaugcuggcu

SEQ ID NO: 3225932 - RNA, 14 nt, Human
caggcaaugcuggc

SEQ ID NO: 3225933 - RNA, 18 nt, Human
caggaggccagccuugac

SEQ ID NO: 3225934 - RNA, 19 nt, Human
caggaggccagccuugacc

SEQ ID NO: 3225935 - RNA, 22 nt, Human
caggaggccagccuugaccauu

SEQ ID NO: 3225936 - RNA, 19 nt, Human
caggaggaucacuugaguc

SEQ ID NO: 3225937 - RNA, 11 nt, Human
caggccaggcc

SEQ ID NO: 3225938 - RNA, 12 nt, Human
caggccaggccc

SEQ ID NO: 3225939 - RNA, 23 nt, Human
caggccagcugcuugggcuucau

SEQ ID NO: 3225940 - RNA, 22 nt, Human
caggaggcugggacgcucugcu

SEQ ID NO: 3225941 - RNA, 21 nt, Human
caggaggcugggacgcucugc

SEQ ID NO: 3225942 - RNA, 23 nt, Human
caggaggcugggacgcucugcug

SEQ ID NO: 3225943 - RNA, 12 nt, Human
ccagagaacaag

SEQ ID NO: 3225944 - RNA, 23 nt, Human
ccagagaaaugaaagucaguuua

SEQ ID NO: 3225945 - RNA, 22 nt, Human
ccagagaaaugaaagucaguuu

SEQ ID NO: 3225946 - RNA, 16 nt, Human
ccagagacacaagccu

SEQ ID NO: 3225947 - RNA, 18 nt, Human
ccagagacacaagccuuc

SEQ ID NO: 3225948 - RNA, 16 nt, Human
ccagagagaagagccc

SEQ ID NO: 3225949 - RNA, 18 nt, Human
ccagagagaagagcccca

SEQ ID NO: 3225950 - RNA, 17 nt, Human
ccagagagaagagcccc

SEQ ID NO: 3225951 - RNA, 23 nt, Human
ccagagagaagagccccacucuc

SEQ ID NO: 3225952 - RNA, 22 nt, Human
ccagagagaagagccccacucu

SEQ ID NO: 3225953 - RNA, 20 nt, Human
ccagagagaagagccccacu

SEQ ID NO: 3225954 - RNA, 19 nt, Human
ccagagagaagagccccac

SEQ ID NO: 3225955 - RNA, 14 nt, Human
ccagaugcaccagc

SEQ ID NO: 3225956 - RNA, 13 nt, Human
ccagaugcaccag

SEQ ID NO: 3225957 - RNA, 19 nt, Human
ccagaucaccaaucuagau

SEQ ID NO: 3225958 - RNA, 15 nt, Human
ccagaucagccagaa

SEQ ID NO: 3225959 - RNA, 13 nt, Human
ccagaucagccag

SEQ ID NO: 3225960 - RNA, 20 nt, Human
ccagagggccugcaagggag

SEQ ID NO: 3225961 - RNA, 19 nt, Human
ccagaggucuagauuaaua

SEQ ID NO: 3225962 - RNA, 19 nt, Human
ccagaguccccccacuccc

SEQ ID NO: 3225963 - RNA, 18 nt, Human
ccagacuccaccaagccu

SEQ ID NO: 3225964 - RNA, 14 nt, Human
ccagacuccaccaa

SEQ ID NO: 3225965 - RNA, 22 nt, Human
ccagacgcucauucagcaucug

SEQ ID NO: 3225966 - RNA, 20 nt, Human
ccagacgcucauucagcauc

SEQ ID NO: 3225967 - RNA, 19 nt, Human
ccagacgccugauauugaa

SEQ ID NO: 3225968 - RNA, 19 nt, Human
ccagacgcucauucagcau

SEQ ID NO: 3225969 - RNA, 16 nt, Human
ccagacccggcugcgu

SEQ ID NO: 3225970 - RNA, 17 nt, Human
ccacuuuuccaguauuu

SEQ ID NO: 3225971 - RNA, 17 nt, Human
ccagacccggcugcgug

SEQ ID NO: 3225972 - RNA, 20 nt, Human
ccacuuggucugugagaugc

SEQ ID NO: 3225973 - RNA, 22 nt, Human
ccacuuggucugugagaugcua

SEQ ID NO: 3225974 - RNA, 20 nt, Human
ccacuuguagauuugauuuu

SEQ ID NO: 3225975 - RNA, 17 nt, Human
ccacuuguccaugugaa

SEQ ID NO: 3225976 - RNA, 17 nt, Human
ccacuuguagauuugau

SEQ ID NO: 3225977 - RNA, 18 nt, Human
ccacuuguagauuugauu

SEQ ID NO: 3225978 - RNA, 12 nt, Human
ccacuuguagau

SEQ ID NO: 3225979 - RNA, 15 nt, Human
ccacuuggucuguga

SEQ ID NO: 3225980 - RNA, 16 nt, Human
ccacuuggucugugag

SEQ ID NO: 3225981 - RNA, 17 nt, Human
ccacuuggucugugaga

SEQ ID NO: 3225982 - RNA, 19 nt, Human
ccacuuggucugugagaug

SEQ ID NO: 3225983 - RNA, 20 nt, Human
ccacuuucuagccagaggag

SEQ ID NO: 3225984 - RNA, 20 nt, Human
ccacuuuccaagucacugca

SEQ ID NO: 3225985 - RNA, 12 nt, Human
ccacuuuuccag

SEQ ID NO: 3225986 - RNA, 18 nt, Human
ccacuuucuagccagagg

SEQ ID NO: 3225987 - RNA, 19 nt, Human
ccacuuucuagccagagga

SEQ ID NO: 3225988 - RNA, 13 nt, Human
ccacuuucuagcc

SEQ ID NO: 3225989 - RNA, 14 nt, Human
ccacuuuauugcca

SEQ ID NO: 3225990 - RNA, 12 nt, Human
ccacuuggucug

SEQ ID NO: 3225991 - RNA, 19 nt, Human
ccacuucugccagaugucc

SEQ ID NO: 3225992 - RNA, 21 nt, Human
ccacuugcugcacucuugcac

SEQ ID NO: 3225993 - RNA, 14 nt, Human
ccacuucugccaga

SEQ ID NO: 3225994 - RNA, 13 nt, Human
ccacuucugccag

SEQ ID NO: 3225995 - RNA, 23 nt, Human
ccacuucccuggguuagacugcc

SEQ ID NO: 3225996 - RNA, 13 nt, Human
ccacuucccuggg

SEQ ID NO: 3225997 - RNA, 19 nt, Human
ccacugcaccgggccacag

SEQ ID NO: 3225998 - RNA, 17 nt, Human
ccacugcaccgggccac

SEQ ID NO: 3225999 - RNA, 14 nt, Human
ccacugcaccgggc

SEQ ID NO: 3226000 - RNA, 13 nt, Human
ccacugcaccggg

SEQ ID NO: 3226001 - RNA, 20 nt, Human
ccacugcacuauagccuagg

SEQ ID NO: 3226002 - RNA, 19 nt, Human
ccacugcacuauagccuag

SEQ ID NO: 3226003 - RNA, 10 nt, Human
ccacugaaga

SEQ ID NO: 3226004 - RNA, 11 nt, Human
ccacugaagag

SEQ ID NO: 3226005 - RNA, 12 nt, Human
ccacugaagagg

SEQ ID NO: 3226006 - RNA, 14 nt, Human
ccacugaagaggag

SEQ ID NO: 3226007 - RNA, 11 nt, Human
ccacucuucuc

SEQ ID NO: 3226008 - RNA, 16 nt, Human
ccacugaaucuguaca

SEQ ID NO: 3226009 - RNA, 11 nt, Human
ccagcagccug

SEQ ID NO: 3226010 - RNA, 12 nt, Human
ccagcagccugg

SEQ ID NO: 3226011 - RNA, 13 nt, Human
ccagccccuggau

SEQ ID NO: 3226012 - RNA, 14 nt, Human
ccagccccuggaug

SEQ ID NO: 3226013 - RNA, 15 nt, Human
ccagccccuggaugc

SEQ ID NO: 3226014 - RNA, 13 nt, Human
ccagcagccugga

SEQ ID NO: 3226015 - RNA, 23 nt, Human
ccagccccauccucuguacagag

SEQ ID NO: 3226016 - RNA, 18 nt, Human
ccagccccauccucugua

SEQ ID NO: 3226017 - RNA, 15 nt, Human
ccagccccuucugac

SEQ ID NO: 3226018 - RNA, 16 nt, Human
ccagccccuucugacc

SEQ ID NO: 3226019 - RNA, 17 nt, Human
ccagccccuucugaccc

SEQ ID NO: 3226020 - RNA, 21 nt, Human
ccagcgagcccugguggcagu

SEQ ID NO: 3226021 - RNA, 12 nt, Human
ccagccccugga

SEQ ID NO: 3226022 - RNA, 18 nt, Human
ccaggaaaggcuccagga

SEQ ID NO: 3226023 - RNA, 19 nt, Human
ccaggaaaggcuccaggag

SEQ ID NO: 3226024 - RNA, 17 nt, Human
ccaggaaaggcuccagg

SEQ ID NO: 3226025 - RNA, 15 nt, Human
ccagcgcugacgugu

SEQ ID NO: 3226026 - RNA, 15 nt, Human
ccagcgcggacaucc

SEQ ID NO: 3226027 - RNA, 21 nt, Human
ccagcgcggacauccccugcu

SEQ ID NO: 3226028 - RNA, 20 nt, Human
ccagcgcggacauccccugc

SEQ ID NO: 3226029 - RNA, 20 nt, Human
ccagcuugaaaccuucacuu

SEQ ID NO: 3226030 - RNA, 17 nt, Human
ccagcuugggcagaucu

SEQ ID NO: 3226031 - RNA, 14 nt, Human
ccagcuugggcaga

SEQ ID NO: 3226032 - RNA, 13 nt, Human
ccagcuugggcag

SEQ ID NO: 3226033 - RNA, 14 nt, Human
ccagcuuggcucag

SEQ ID NO: 3226034 - RNA, 15 nt, Human
ccaggcagcacccag

SEQ ID NO: 3226035 - RNA, 20 nt, Human
ccaggcagcugucacugcug

SEQ ID NO: 3226036 - RNA, 19 nt, Human
ccaggggugggacacccug

SEQ ID NO: 3226037 - RNA, 13 nt, Human
ccaggcugagccu

SEQ ID NO: 3226038 - RNA, 14 nt, Human
ccaggcugagccuc

SEQ ID NO: 3226039 - RNA, 16 nt, Human
ccaggcugagccucag

SEQ ID NO: 3226040 - RNA, 17 nt, Human
ccaggcugagccucagu

SEQ ID NO: 3226041 - RNA, 19 nt, Human
ccaggcugagccucagucu

SEQ ID NO: 3226042 - RNA, 22 nt, Human
ccaggcugagccucagucuccc

SEQ ID NO: 3226043 - RNA, 16 nt, Human
ccagucaccccggcca

SEQ ID NO: 3226044 - RNA, 19 nt, Human
ccaguaucuugaagacuuu

SEQ ID NO: 3226045 - RNA, 22 nt, Human
ccaguaucuugaagacuuuucu

SEQ ID NO: 3226046 - RNA, 20 nt, Human
ccaggggugggacacccugu

SEQ ID NO: 3226047 - RNA, 21 nt, Human
ccaggggugggacacccugug

SEQ ID NO: 3226048 - RNA, 22 nt, Human
ccaggggugggacacccuguga

SEQ ID NO: 3226049 - RNA, 13 nt, Human
ccaguaucuugaa

SEQ ID NO: 3226050 - RNA, 17 nt, Human
ccagucaccccggccac

SEQ ID NO: 3226051 - RNA, 18 nt, Human
ccagucaccccggccacc

SEQ ID NO: 3226052 - RNA, 13 nt, Human
ccagucaccccgg

SEQ ID NO: 3226053 - RNA, 18 nt, Human
cccaggcuggcgugcagu

SEQ ID NO: 3226054 - RNA, 20 nt, Human
cccaggcuggcgugcagugg

SEQ ID NO: 3226055 - RNA, 19 nt, Human
cccaggcuggcgugcagug

SEQ ID NO: 3226056 - RNA, 14 nt, Human
cccauccucuguac

SEQ ID NO: 3226057 - RNA, 22 nt, Human
cccauccaccguccccucccag

SEQ ID NO: 3226058 - RNA, 21 nt, Human
cccauccaccguccccuccca

SEQ ID NO: 3226059 - RNA, 14 nt, Human
cccagggcacgugg

SEQ ID NO: 3226060 - RNA, 13 nt, Human
cccagggcacgug

SEQ ID NO: 3226061 - RNA, 15 nt, Human
cccauccucuguaca

SEQ ID NO: 3226062 - RNA, 19 nt, Human
cccauccucuguacagagc

SEQ ID NO: 3226063 - RNA, 23 nt, Human
cccagccccaaaacucuccucug

SEQ ID NO: 3226064 - RNA, 21 nt, Human
cccagccccaaaacucuccuc

SEQ ID NO: 3226065 - RNA, 19 nt, Human
cccagcccacuucugccau

SEQ ID NO: 3226066 - RNA, 17 nt, Human
cccagcccacuucugcc

SEQ ID NO: 3226067 - RNA, 21 nt, Human
cccagcaucgcacucuggcag

SEQ ID NO: 3226068 - RNA, 17 nt, Human
cccagcaucgcacucug

SEQ ID NO: 3226069 - RNA, 13 nt, Human
ccccggccaccug

SEQ ID NO: 3226070 - RNA, 14 nt, Human
ccccggccaccugc

SEQ ID NO: 3226071 - RNA, 18 nt, Human
ccccggccaccugcggug

SEQ ID NO: 3226072 - RNA, 14 nt, Human
ccccgcccaggcuu

SEQ ID NO: 3226073 - RNA, 15 nt, Human
ccccauuguggucac

SEQ ID NO: 3226074 - RNA, 14 nt, Human
cccccuuccaugga

SEQ ID NO: 3226075 - RNA, 12 nt, Human
ccccgcccaggc

SEQ ID NO: 3226076 - RNA, 18 nt, Human
ccccgcaguguuugugug

SEQ ID NO: 3226077 - RNA, 18 nt, Human
ccccaaaacucuccucug

SEQ ID NO: 3226078 - RNA, 20 nt, Human
ccccaaaacucuccucugcu

SEQ ID NO: 3226079 - RNA, 12 nt, Human
ccccagccacuc

SEQ ID NO: 3226080 - RNA, 14 nt, Human
ccccagccccaucc

SEQ ID NO: 3226081 - RNA, 14 nt, Human
ccccagccccaaaa

SEQ ID NO: 3226082 - RNA, 21 nt, Human
ccccauucugccugcccaggc

SEQ ID NO: 3226083 - RNA, 10 nt, Human
ccccagcccc

SEQ ID NO: 3226084 - RNA, 12 nt, Human
ccccagccccaa

SEQ ID NO: 3226085 - RNA, 21 nt, Human
ccccagccacuccccagccag

SEQ ID NO: 3226086 - RNA, 14 nt, Human
ccccagccacuccc

SEQ ID NO: 3226087 - RNA, 18 nt, Human
ccccagccagccuggcug

SEQ ID NO: 3226088 - RNA, 16 nt, Human
ccccagccagccuggc

SEQ ID NO: 3226089 - RNA, 22 nt, Human
ccccagccagccuggcugggac

SEQ ID NO: 3226090 - RNA, 23 nt, Human
cccauucugccugcccaggcccc

SEQ ID NO: 3226091 - RNA, 12 nt, Human
cccauucugucc

SEQ ID NO: 3226092 - RNA, 15 nt, Human
cccaccgcagacagg

SEQ ID NO: 3226093 - RNA, 18 nt, Human
cccaccgcagacaggacc

SEQ ID NO: 3226094 - RNA, 13 nt, Human
ccauugguguuga

SEQ ID NO: 3226095 - RNA, 22 nt, Human
ccauuguggucacaggaaguag

SEQ ID NO: 3226096 - RNA, 12 nt, Human
ccauuguucuga

SEQ ID NO: 3226097 - RNA, 21 nt, Human
ccauuguucaggauucuaaua

SEQ ID NO: 3226098 - RNA, 21 nt, Human
cccaaccugcucuccucuugc

SEQ ID NO: 3226099 - RNA, 14 nt, Human
cccaaccugcucuc

SEQ ID NO: 3226100 - RNA, 13 nt, Human
cccaaccugcucu

SEQ ID NO: 3226101 - RNA, 17 nt, Human
cccaacuucaucuggaa

SEQ ID NO: 3226102 - RNA, 18 nt, Human
cccaacuugccuuugaag

SEQ ID NO: 3226103 - RNA, 23 nt, Human
cccaaccugcucuccucuugcca

SEQ ID NO: 3226104 - RNA, 17 nt, Human
cccaagcucugcuccuc

SEQ ID NO: 3226105 - RNA, 20 nt, Human
cccaagcgcccuggccccca

SEQ ID NO: 3226106 - RNA, 18 nt, Human
cccaagcgcccuggcccc

SEQ ID NO: 3226107 - RNA, 15 nt, Human
cccaagcucugcucc

SEQ ID NO: 3226108 - RNA, 21 nt, Human
cccaagaauagaugcugacug

SEQ ID NO: 3226109 - RNA, 20 nt, Human
cccaagaauagaugcugacu

SEQ ID NO: 3226110 - RNA, 19 nt, Human
cccaagaaaggaaaccuuu

SEQ ID NO: 3226111 - RNA, 14 nt, Human
cccaagcaggaggc

SEQ ID NO: 3226112 - RNA, 23 nt, Human
cccaagccuacuuuugccauuga

SEQ ID NO: 3226113 - RNA, 16 nt, Human
cccaagccuggcaagg

SEQ ID NO: 3226114 - RNA, 17 nt, Human
cccaagcgcccuggccc

SEQ ID NO: 3226115 - RNA, 15 nt, Human
cccacccaagggccu

SEQ ID NO: 3226116 - RNA, 21 nt, Human
cccaccaucugcugucuuuuc

SEQ ID NO: 3226117 - RNA, 19 nt, Human
cccaccaucugcugucuuu

SEQ ID NO: 3226118 - RNA, 17 nt, Human
cccaccaucugcugucu

SEQ ID NO: 3226119 - RNA, 16 nt, Human
cccaccaucugcuguc

SEQ ID NO: 3226120 - RNA, 18 nt, Human
cccaccaucaugucuggc

SEQ ID NO: 3226121 - RNA, 15 nt, Human
cccaccaucugcugu

SEQ ID NO: 3226122 - RNA, 14 nt, Human
cccaccaucugcug

SEQ ID NO: 3226123 - RNA, 13 nt, Human
cccaccaucugcu

SEQ ID NO: 3226124 - RNA, 12 nt, Human
cccaccaucugc

SEQ ID NO: 3226125 - RNA, 16 nt, Human
ccaugaggaacaaggc

SEQ ID NO: 3226126 - RNA, 17 nt, Human
ccaugaggaacaaggca

SEQ ID NO: 3226127 - RNA, 18 nt, Human
ccaugaggaacaaggcaa

SEQ ID NO: 3226128 - RNA, 15 nt, Human
ccaugagagcgcagc

SEQ ID NO: 3226129 - RNA, 18 nt, Human
ccaugagagcgcagcccg

SEQ ID NO: 3226130 - RNA, 22 nt, Human
ccaugagaauguuuuagcacag

SEQ ID NO: 3226131 - RNA, 23 nt, Human
ccaugagaauguuuuagcacagc

SEQ ID NO: 3226132 - RNA, 17 nt, Human
ccaugggccuccugugu

SEQ ID NO: 3226133 - RNA, 12 nt, Human
ccaugggcagga

SEQ ID NO: 3226134 - RNA, 23 nt, Human
ccauggggucucucacagacagg

SEQ ID NO: 3226135 - RNA, 17 nt, Human
ccauggggucucucaca

SEQ ID NO: 3226136 - RNA, 19 nt, Human
ccaugucgccucugcauuc

SEQ ID NO: 3226137 - RNA, 14 nt, Human
ccaugucucgacuc

SEQ ID NO: 3226138 - RNA, 15 nt, Human
ccaugucucgacuca

SEQ ID NO: 3226139 - RNA, 20 nt, Human
ccaugucucugagcauuaga

SEQ ID NO: 3226140 - RNA, 23 nt, Human
ccugccuccuuugugaggaagcc

SEQ ID NO: 3226141 - RNA, 21 nt, Human
ccugccuccuuugugaggaag

SEQ ID NO: 3226142 - RNA, 22 nt, Human
ccugccuccuuugugaggaagc

SEQ ID NO: 3226143 - RNA, 13 nt, Human
ccugccuccuuug

SEQ ID NO: 3226144 - RNA, 15 nt, Human
ccugccuccuuugug

SEQ ID NO: 3226145 - RNA, 19 nt, Human
ccugccuccuuugugagga

SEQ ID NO: 3226146 - RNA, 20 nt, Human
ccugccuccuuugugaggaa

SEQ ID NO: 3226147 - RNA, 15 nt, Human
ccugccucuucucua

SEQ ID NO: 3226148 - RNA, 17 nt, Human
ccugccuccuugauauu

SEQ ID NO: 3226149 - RNA, 19 nt, Human
ccugccugcccugucagga

SEQ ID NO: 3226150 - RNA, 12 nt, Human
ccugccugcugg

SEQ ID NO: 3226151 - RNA, 18 nt, Human
ccugccugcccugucagg

SEQ ID NO: 3226152 - RNA, 16 nt, Human
ccugccugcccuguca

SEQ ID NO: 3226153 - RNA, 14 nt, Human
ccugccugcccugu

SEQ ID NO: 3226154 - RNA, 12 nt, Human
ccugcugcaguu

SEQ ID NO: 3226155 - RNA, 16 nt, Human
ccugcugcaguugcca

SEQ ID NO: 3226156 - RNA, 11 nt, Human
ccugcugcagu

SEQ ID NO: 3226157 - RNA, 22 nt, Human
ccugcugcaguugccagucacc

SEQ ID NO: 3226158 - RNA, 21 nt, Human
ccugcugcaguugccagucac

SEQ ID NO: 3226159 - RNA, 19 nt, Human
ccugcugccaguaccagcc

SEQ ID NO: 3226160 - RNA, 21 nt, Human
ccugcugccaguaccagcccc

SEQ ID NO: 3226161 - RNA, 14 nt, Human
ccugaguuccuagc

SEQ ID NO: 3226162 - RNA, 18 nt, Human
ccugaguuaggcuuucuc

SEQ ID NO: 3226163 - RNA, 22 nt, Human
ccugaguuaggcuuucucuuca

SEQ ID NO: 3226164 - RNA, 19 nt, Human
ccugaguuaggcuuucucu

SEQ ID NO: 3226165 - RNA, 17 nt, Human
ccugcagagcugcgggc

SEQ ID NO: 3226166 - RNA, 14 nt, Human
ccugcagagcugcg

SEQ ID NO: 3226167 - RNA, 13 nt, Human
ccugcagagcugc

SEQ ID NO: 3226168 - RNA, 12 nt, Human
ccugcagagcug

SEQ ID NO: 3226169 - RNA, 15 nt, Human
ccugcaggcagccag

SEQ ID NO: 3226170 - RNA, 12 nt, Human
ccugcagagggc

SEQ ID NO: 3226171 - RNA, 16 nt, Human
ccugcaggcagccagg

SEQ ID NO: 3226172 - RNA, 17 nt, Human
ccugcaggcagccaggc

SEQ ID NO: 3226173 - RNA, 18 nt, Human
ccugcaggcagccaggcc

SEQ ID NO: 3226174 - RNA, 19 nt, Human
ccugcaggcagccaggcca

SEQ ID NO: 3226175 - RNA, 20 nt, Human
ccugcaggcagccaggccac

SEQ ID NO: 3226176 - RNA, 21 nt, Human
ccugcaggcagccaggccaca

SEQ ID NO: 3226177 - RNA, 16 nt, Human
ccugaggcugggcucc

SEQ ID NO: 3226178 - RNA, 19 nt, Human
ccugacucccccagucccc

SEQ ID NO: 3226179 - RNA, 13 nt, Human
ccugacuccccca

SEQ ID NO: 3226180 - RNA, 17 nt, Human
ccugaggcugggcuccc

SEQ ID NO: 3226181 - RNA, 19 nt, Human
ccugaggcugggcucccuu

SEQ ID NO: 3226182 - RNA, 21 nt, Human
ccugaggcugggcucccuucc

SEQ ID NO: 3226183 - RNA, 19 nt, Human
ccugacgagauaagcaguu

SEQ ID NO: 3226184 - RNA, 16 nt, Human
ccugaggggccucuua

SEQ ID NO: 3226185 - RNA, 21 nt, Human
ccugagugagaggggaggcca

SEQ ID NO: 3226186 - RNA, 18 nt, Human
ccugagugagaggggagg

SEQ ID NO: 3226187 - RNA, 16 nt, Human
ccugagugagagggga

SEQ ID NO: 3226188 - RNA, 15 nt, Human
ccugagugagagggg

SEQ ID NO: 3226189 - RNA, 23 nt, Human
ccugagugagaggggaggccaag

SEQ ID NO: 3226190 - RNA, 22 nt, Human
ccugagugagaggggaggccaa

SEQ ID NO: 3226191 - RNA, 12 nt, Human
ccugaggggccu

SEQ ID NO: 3226192 - RNA, 21 nt, Human
ccugaggggcagccugccuug

SEQ ID NO: 3226193 - RNA, 20 nt, Human
ccugaggggcagccugccuu

SEQ ID NO: 3226194 - RNA, 17 nt, Human
ccugaggggcagccugc

SEQ ID NO: 3226195 - RNA, 15 nt, Human
ccugaggggcagccu

SEQ ID NO: 3226196 - RNA, 22 nt, Human
ccugaggggagacagagcaacc

SEQ ID NO: 3226197 - RNA, 20 nt, Human
ccugaggggagacagagcaa

SEQ ID NO: 3226198 - RNA, 18 nt, Human
ccugagggcggggugucu

SEQ ID NO: 3226199 - RNA, 22 nt, Human
ccugagggcggggugucugucu

SEQ ID NO: 3226200 - RNA, 15 nt, Human
ccugaggggagacag

SEQ ID NO: 3226201 - RNA, 19 nt, Human
ccugaggggagacagagca

SEQ ID NO: 3226202 - RNA, 18 nt, Human
ccugaggggagacagagc

SEQ ID NO: 3226203 - RNA, 16 nt, Human
ccucuuugagugaagc

SEQ ID NO: 3226204 - RNA, 15 nt, Human
ccucuuggcugccuu

SEQ ID NO: 3226205 - RNA, 15 nt, Human
ccucuucuucucaag

SEQ ID NO: 3226206 - RNA, 14 nt, Human
ccucuucugagcuu

SEQ ID NO: 3226207 - RNA, 13 nt, Human
ccucuucucucag

SEQ ID NO: 3226208 - RNA, 14 nt, Human
ccucuucucucaga

SEQ ID NO: 3226209 - RNA, 15 nt, Human
ccucuucucucagac

SEQ ID NO: 3226210 - RNA, 22 nt, Human
ccucugcuaaauugauguugau

SEQ ID NO: 3226211 - RNA, 15 nt, Human
ccucugcuaaauuga

SEQ ID NO: 3226212 - RNA, 14 nt, Human
ccucugcuaaauug

SEQ ID NO: 3226213 - RNA, 12 nt, Human
ccucugcuaaau

SEQ ID NO: 3226214 - RNA, 19 nt, Human
ccucugccugucuccccca

SEQ ID NO: 3226215 - RNA, 15 nt, Human
ccucugccugucucc

SEQ ID NO: 3226216 - RNA, 20 nt, Human
ccucugccugaagucacaca

SEQ ID NO: 3226217 - RNA, 11 nt, Human
ccucugccuga

SEQ ID NO: 3226218 - RNA, 23 nt, Human
ccucugccucugacacacagcuc

SEQ ID NO: 3226219 - RNA, 21 nt, Human
ccucugccucugacacacagc

SEQ ID NO: 3226220 - RNA, 20 nt, Human
ccucugccucugacacacag

SEQ ID NO: 3226221 - RNA, 11 nt, Human
ccucugcccug

SEQ ID NO: 3226222 - RNA, 12 nt, Human
ccucugcccugc

SEQ ID NO: 3226223 - RNA, 13 nt, Human
ccucugcccugcg

SEQ ID NO: 3226224 - RNA, 14 nt, Human
ccucugcccugcgg

SEQ ID NO: 3226225 - RNA, 14 nt, Human
ccucggcuggcucc

SEQ ID NO: 3226226 - RNA, 15 nt, Human
ccucggcuggcuccc

SEQ ID NO: 3226227 - RNA, 16 nt, Human
ccucggcuggcucccc

SEQ ID NO: 3226228 - RNA, 17 nt, Human
ccucggcuggcuccccu

SEQ ID NO: 3226229 - RNA, 18 nt, Human
ccucggcuggcuccccug

SEQ ID NO: 3226230 - RNA, 19 nt, Human
ccucggcuggcuccccugc

SEQ ID NO: 3226231 - RNA, 21 nt, Human
ccucggcuggcuccccugcag

SEQ ID NO: 3226232 - RNA, 22 nt, Human
ccucggcuggcuccccugcagc

SEQ ID NO: 3226233 - RNA, 17 nt, Human
ccucggcuggcugucca

SEQ ID NO: 3226234 - RNA, 14 nt, Human
ccucgcuccaacuc

SEQ ID NO: 3226235 - RNA, 19 nt, Human
ccuccuuugugaggaagcc

SEQ ID NO: 3226236 - RNA, 18 nt, Human
ccuccuuugugaggaagc

SEQ ID NO: 3226237 - RNA, 15 nt, Human
ccucgaacuggcugc

SEQ ID NO: 3226238 - RNA, 16 nt, Human
ccucgaacuggcugca

SEQ ID NO: 3226239 - RNA, 20 nt, Human
ccuccgucacuaccuggcug

SEQ ID NO: 3226240 - RNA, 16 nt, Human
ccuccgggucuuccua

SEQ ID NO: 3226241 - RNA, 15 nt, Human
ccuccgggucuuccu

SEQ ID NO: 3226242 - RNA, 14 nt, Human
ccuccggcuaagca

SEQ ID NO: 3226243 - RNA, 14 nt, Human
ccuccgucacuacc

SEQ ID NO: 3226244 - RNA, 19 nt, Human
ccuccgucacuaccuggcu

SEQ ID NO: 3226245 - RNA, 16 nt, Human
ccuccgucacuaccug

SEQ ID NO: 3226246 - RNA, 21 nt, Human
ccuccuaaaaggcccagagag

SEQ ID NO: 3226247 - RNA, 19 nt, Human
ccuccuaaaaggcccagag

SEQ ID NO: 3226248 - RNA, 18 nt, Human
ccuccuaaaaggcccaga

SEQ ID NO: 3226249 - RNA, 17 nt, Human
ccuccuaaaaggcccag

SEQ ID NO: 3226250 - RNA, 16 nt, Human
ccuccuaaaaggccca

SEQ ID NO: 3226251 - RNA, 15 nt, Human
ccuccuaaaaggccc

SEQ ID NO: 3226252 - RNA, 13 nt, Human
ccuccgccucccg

SEQ ID NO: 3226253 - RNA, 16 nt, Human
ccuccgccucccgggu

SEQ ID NO: 3226254 - RNA, 22 nt, Human
ccucccugcugucauugcuucu

SEQ ID NO: 3226255 - RNA, 23 nt, Human
ccuccccaaggcccccugccugc

SEQ ID NO: 3226256 - RNA, 15 nt, Human
ccucccacugcccac

SEQ ID NO: 3226257 - RNA, 14 nt, Human
ccucccacugccca

SEQ ID NO: 3226258 - RNA, 23 nt, Human
ccucccacugcccacuggccggc

SEQ ID NO: 3226259 - RNA, 19 nt, Human
ccucccacugcccacuggc

SEQ ID NO: 3226260 - RNA, 11 nt, Human
ccucaggcagg

SEQ ID NO: 3226261 - RNA, 17 nt, Human
ccucccaacucacccca

SEQ ID NO: 3226262 - RNA, 20 nt, Human
ccucccaacucaccccagcc

SEQ ID NO: 3226263 - RNA, 21 nt, Human
ccucccaacucaccccagccc

SEQ ID NO: 3226264 - RNA, 17 nt, Human
ccucccaccucagccuc

SEQ ID NO: 3226265 - RNA, 16 nt, Human
ccuagcuggagaggag

SEQ ID NO: 3226266 - RNA, 12 nt, Human
ccuagcuggaga

SEQ ID NO: 3226267 - RNA, 23 nt, Human
ccuagccucacgcuccuuucuga

SEQ ID NO: 3226268 - RNA, 17 nt, Human
ccuagccuugcacuuuc

SEQ ID NO: 3226269 - RNA, 22 nt, Human
ccuagcuggagaggagcccugc

SEQ ID NO: 3226270 - RNA, 21 nt, Human
ccuagcuggagaggagcccug

SEQ ID NO: 3226271 - RNA, 20 nt, Human
ccuagcuggagaggagcccu

SEQ ID NO: 3226272 - RNA, 19 nt, Human
ccuagcuggagaggagccc

SEQ ID NO: 3226273 - RNA, 14 nt, Human
ccuaggaagugauu

SEQ ID NO: 3226274 - RNA, 18 nt, Human
ccucagccuccugaguag

SEQ ID NO: 3226275 - RNA, 16 nt, Human
ccgaauagcugggacu

SEQ ID NO: 3226276 - RNA, 17 nt, Human
ccgaccagacaccuuga

SEQ ID NO: 3226277 - RNA, 13 nt, Human
ccgaccagacacc

SEQ ID NO: 3226278 - RNA, 15 nt, Human
ccgcagacaggacca

SEQ ID NO: 3226279 - RNA, 15 nt, Human
ccgaccaccugccca

SEQ ID NO: 3226280 - RNA, 16 nt, Human
ccgaaaacguggcugc

SEQ ID NO: 3226281 - RNA, 17 nt, Human
ccgaaaacguggcugcu

SEQ ID NO: 3226282 - RNA, 19 nt, Human
ccgaaagggacuuggaagc

SEQ ID NO: 3226283 - RNA, 18 nt, Human
ccgaaaggucaccucacu

SEQ ID NO: 3226284 - RNA, 19 nt, Human
ccgaaagaggcacccuucc

SEQ ID NO: 3226285 - RNA, 15 nt, Human
cccuuccucuuucca

SEQ ID NO: 3226286 - RNA, 16 nt, Human
cccuuccucugcuccc

SEQ ID NO: 3226287 - RNA, 14 nt, Human
cccuuccucugcuc

SEQ ID NO: 3226288 - RNA, 13 nt, Human
cccuuccucugcu

SEQ ID NO: 3226289 - RNA, 23 nt, Human
cccuuccugggcacacgcugcuc

SEQ ID NO: 3226290 - RNA, 12 nt, Human
cccuuccuucuu

SEQ ID NO: 3226291 - RNA, 11 nt, Human
cccuuccugug

SEQ ID NO: 3226292 - RNA, 22 nt, Human
cccuuccugggcacacgcugcu

SEQ ID NO: 3226293 - RNA, 18 nt, Human
cccuuccugggcacacgc

SEQ ID NO: 3226294 - RNA, 14 nt, Human
cccuuccugggcac

SEQ ID NO: 3226295 - RNA, 16 nt, Human
ccgcagacaggaccag

SEQ ID NO: 3226296 - RNA, 17 nt, Human
ccgcagacaggaccagg

SEQ ID NO: 3226297 - RNA, 18 nt, Human
ccgcccaaaccuuucccc

SEQ ID NO: 3226298 - RNA, 14 nt, Human
ccgcccagcccacc

SEQ ID NO: 3226299 - RNA, 21 nt, Human
cccugugauggggcccugccu

SEQ ID NO: 3226300 - RNA, 22 nt, Human
cccugugauggggcccugccuc

SEQ ID NO: 3226301 - RNA, 23 nt, Human
cccugugauggggcccugccucc

SEQ ID NO: 3226302 - RNA, 21 nt, Human
cccugugcagaagggagcugg

SEQ ID NO: 3226303 - RNA, 21 nt, Human
cccuuccucuccacugccuuc

SEQ ID NO: 3226304 - RNA, 20 nt, Human
cccugugauggggcccugcc

SEQ ID NO: 3226305 - RNA, 15 nt, Human
ccuaacgaaguaucc

SEQ ID NO: 3226306 - RNA, 20 nt, Human
ccuaacgaaguauccuucag

SEQ ID NO: 3226307 - RNA, 17 nt, Human
ccgucuaccugaggggc

SEQ ID NO: 3226308 - RNA, 12 nt, Human
ccgugaggccag

SEQ ID NO: 3226309 - RNA, 13 nt, Human
ccgugaggccaga

SEQ ID NO: 3226310 - RNA, 14 nt, Human
ccgugaggccagag

SEQ ID NO: 3226311 - RNA, 14 nt, Human
ccgucuaccugagg

SEQ ID NO: 3226312 - RNA, 15 nt, Human
ccgucuaccugaggg

SEQ ID NO: 3226313 - RNA, 15 nt, Human
ccgucuacagcuccc

SEQ ID NO: 3226314 - RNA, 22 nt, Human
ccgucuacagcucccccagcuc

SEQ ID NO: 3226315 - RNA, 11 nt, Human
ccgucuacauu

SEQ ID NO: 3226316 - RNA, 14 nt, Human
ccgucuacauuuca

SEQ ID NO: 3226317 - RNA, 14 nt, Human
ccggcuccaggcuc

SEQ ID NO: 3226318 - RNA, 13 nt, Human
ccggcuccaggcu

SEQ ID NO: 3226319 - RNA, 12 nt, Human
ccggcuccaggc

SEQ ID NO: 3226320 - RNA, 17 nt, Human
ccuagcacuuugggagg

SEQ ID NO: 3226321 - RNA, 14 nt, Human
ccuaaucuucugaa

SEQ ID NO: 3226322 - RNA, 16 nt, Human
ccggccaccugcggug

SEQ ID NO: 3226323 - RNA, 15 nt, Human
ccggccccugcuggu

SEQ ID NO: 3226324 - RNA, 18 nt, Human
ccggcaggguccuagaaa

SEQ ID NO: 3226325 - RNA, 18 nt, Human
cccugagaucucugcagg

SEQ ID NO: 3226326 - RNA, 20 nt, Human
cccugacugggggcagacau

SEQ ID NO: 3226327 - RNA, 12 nt, Human
cccugacugggg

SEQ ID NO: 3226328 - RNA, 17 nt, Human
cccugagcccacugugc

SEQ ID NO: 3226329 - RNA, 16 nt, Human
cccugagcccacugug

SEQ ID NO: 3226330 - RNA, 14 nt, Human
cccugagcccacug

SEQ ID NO: 3226331 - RNA, 13 nt, Human
cccugagcccacu

SEQ ID NO: 3226332 - RNA, 12 nt, Human
cccugagcccac

SEQ ID NO: 3226333 - RNA, 14 nt, Human
cccugagcaggauu

SEQ ID NO: 3226334 - RNA, 16 nt, Human
cccugagcuuucugcu

SEQ ID NO: 3226335 - RNA, 20 nt, Human
cccugcccaccuggccucug

SEQ ID NO: 3226336 - RNA, 22 nt, Human
cccugcccagaucagccagaag

SEQ ID NO: 3226337 - RNA, 22 nt, Human
cccugcccaccuggccucugca

SEQ ID NO: 3226338 - RNA, 21 nt, Human
cccugcccagaucagccagaa

SEQ ID NO: 3226339 - RNA, 20 nt, Human
cccugcccagaucagccaga

SEQ ID NO: 3226340 - RNA, 14 nt, Human
cccugcccagauca

SEQ ID NO: 3226341 - RNA, 14 nt, Human
cccugccccccagc

SEQ ID NO: 3226342 - RNA, 20 nt, Human
cccugccccccagcccuccu

SEQ ID NO: 3226343 - RNA, 15 nt, Human
cccugccccccagcc

SEQ ID NO: 3226344 - RNA, 17 nt, Human
cccugcccggcugcgga

SEQ ID NO: 3226345 - RNA, 14 nt, Human
cccugcccggcugc

SEQ ID NO: 3226346 - RNA, 17 nt, Human
cccugccccucccuuca

SEQ ID NO: 3226347 - RNA, 23 nt, Human
cccugccccucccuucaaccauu

SEQ ID NO: 3226348 - RNA, 19 nt, Human
cccugccccucccuucaac

SEQ ID NO: 3226349 - RNA, 18 nt, Human
cccugccccucccuucaa

SEQ ID NO: 3226350 - RNA, 19 nt, Human
cccuggauccaucaggcca

SEQ ID NO: 3226351 - RNA, 17 nt, Human
cccuggaugcagccuca

SEQ ID NO: 3226352 - RNA, 21 nt, Human
cccuggaugcagccucacagu

SEQ ID NO: 3226353 - RNA, 13 nt, Human
cccuggaugcagc

SEQ ID NO: 3226354 - RNA, 11 nt, Human
cccugcccugg

SEQ ID NO: 3226355 - RNA, 12 nt, Human
cccugcccuggu

SEQ ID NO: 3226356 - RNA, 23 nt, Human
cccugcccugguuuccugcccug

SEQ ID NO: 3226357 - RNA, 22 nt, Human
cccugcccugguuuccugcccu

SEQ ID NO: 3226358 - RNA, 20 nt, Human
cccuggcucccacaggcccu

SEQ ID NO: 3226359 - RNA, 19 nt, Human
cccuggcucccacaggccc

SEQ ID NO: 3226360 - RNA, 14 nt, Human
cccugaaggaacca

SEQ ID NO: 3226361 - RNA, 12 nt, Human
cccugaaggccc

SEQ ID NO: 3226362 - RNA, 16 nt, Human
cccugaaagcccugag

SEQ ID NO: 3226363 - RNA, 13 nt, Human
cccugaaaugugu

SEQ ID NO: 3226364 - RNA, 11 nt, Human
cccugaaaugu

SEQ ID NO: 3226365 - RNA, 15 nt, Human
cccucgucuuuccca

SEQ ID NO: 3226366 - RNA, 14 nt, Human
cccucgucuuuccc

SEQ ID NO: 3226367 - RNA, 22 nt, Human
cccugaacaacgagccuuuuca

SEQ ID NO: 3226368 - RNA, 13 nt, Human
cccugaaggcccc

SEQ ID NO: 3226369 - RNA, 14 nt, Human
cccugaaggccccg

SEQ ID NO: 3226370 - RNA, 16 nt, Human
cccugaaggccccgcc

SEQ ID NO: 3226371 - RNA, 19 nt, Human
cccugaaggccccgcccag

SEQ ID NO: 3226372 - RNA, 16 nt, Human
cccugacaacacucau

SEQ ID NO: 3226373 - RNA, 22 nt, Human
cccugacaacacucauugaccu

SEQ ID NO: 3226374 - RNA, 20 nt, Human
cccugaaggccccgcccagg

SEQ ID NO: 3226375 - RNA, 22 nt, Human
cccugaaggccccgcccaggcu

SEQ ID NO: 3226376 - RNA, 14 nt, Human
cccugacaacacuc

SEQ ID NO: 3226377 - RNA, 13 nt, Human
cccucggagaaga

SEQ ID NO: 3226378 - RNA, 22 nt, Human
cccucgcccagucccagcagcc

SEQ ID NO: 3226379 - RNA, 20 nt, Human
cccucgcccagucccagcag

SEQ ID NO: 3226380 - RNA, 18 nt, Human
cccucgcccagucccagc

SEQ ID NO: 3226381 - RNA, 16 nt, Human
cccucgcccaguccca

SEQ ID NO: 3226382 - RNA, 13 nt, Human
cccucgcccaguc

SEQ ID NO: 3226383 - RNA, 12 nt, Human
cccucgcccagu

SEQ ID NO: 3226384 - RNA, 18 nt, Human
cccugaaagcccugagcu

SEQ ID NO: 3226385 - RNA, 13 nt, Human
cccucgucuuucc

SEQ ID NO: 3226386 - RNA, 18 nt, Human
cccucggaguucuucuug

SEQ ID NO: 3226387 - RNA, 19 nt, Human
cccucggaguucuucuuga

SEQ ID NO: 3226388 - RNA, 14 nt, Human
cccuccucucugcc

SEQ ID NO: 3226389 - RNA, 18 nt, Human
cccuccgcggcgggcccu

SEQ ID NO: 3226390 - RNA, 19 nt, Human
cccuccgcggcgggcccug

SEQ ID NO: 3226391 - RNA, 21 nt, Human
cccuccgcggcgggcccugcc

SEQ ID NO: 3226392 - RNA, 17 nt, Human
cccuccgggucuuccua

SEQ ID NO: 3226393 - RNA, 16 nt, Human
cccuccuccuggacuc

SEQ ID NO: 3226394 - RNA, 18 nt, Human
cccuccuccuggacuccu

SEQ ID NO: 3226395 - RNA, 11 nt, Human
cccuccuccug

SEQ ID NO: 3226396 - RNA, 20 nt, Human
cucaggccugacucucagca

SEQ ID NO: 3226397 - RNA, 22 nt, Human
cucaggccugggggcugggcag

SEQ ID NO: 3226398 - RNA, 11 nt, Human
cucaggccugg

SEQ ID NO: 3226399 - RNA, 23 nt, Human
cucaggccgaaggaggagucagg

SEQ ID NO: 3226400 - RNA, 18 nt, Human
cucaggccagcugcuugg

SEQ ID NO: 3226401 - RNA, 16 nt, Human
cucaggccagcugcuu

SEQ ID NO: 3226402 - RNA, 17 nt, Human
cucaggccagcugcuug

SEQ ID NO: 3226403 - RNA, 19 nt, Human
cucaggccaaacucaccug

SEQ ID NO: 3226404 - RNA, 20 nt, Human
cucaggccaaacucaccugc

SEQ ID NO: 3226405 - RNA, 21 nt, Human
cucaggccaaacucaccugcc

SEQ ID NO: 3226406 - RNA, 15 nt, Human
cucaggccagcugcu

SEQ ID NO: 3226407 - RNA, 22 nt, Human
cucaggcauggaugaauaaaug

SEQ ID NO: 3226408 - RNA, 22 nt, Human
cucagccucccgaauagcuggg

SEQ ID NO: 3226409 - RNA, 21 nt, Human
cucagccucccgaauagcugg

SEQ ID NO: 3226410 - RNA, 19 nt, Human
cucagccucccgaauagcu

SEQ ID NO: 3226411 - RNA, 13 nt, Human
cucagacuguaua

SEQ ID NO: 3226412 - RNA, 23 nt, Human
cucagaagacacugaugggcaac

SEQ ID NO: 3226413 - RNA, 15 nt, Human
cucagaccgucuucc

SEQ ID NO: 3226414 - RNA, 16 nt, Human
cucagaccgucuuccu

SEQ ID NO: 3226415 - RNA, 17 nt, Human
cucagaccgucuuccuc

SEQ ID NO: 3226416 - RNA, 21 nt, Human
cucagaccgucuuccuccaac

SEQ ID NO: 3226417 - RNA, 22 nt, Human
cucagaccgucuuccuccaacc

SEQ ID NO: 3226418 - RNA, 23 nt, Human
cucagaccgucuuccuccaaccc

SEQ ID NO: 3226419 - RNA, 17 nt, Human
cucaccuuucccaucuu

SEQ ID NO: 3226420 - RNA, 18 nt, Human
cucacgagucauccagaa

SEQ ID NO: 3226421 - RNA, 17 nt, Human
cucacgcuccuuucuga

SEQ ID NO: 3226422 - RNA, 15 nt, Human
cucacgcauucucug

SEQ ID NO: 3226423 - RNA, 22 nt, Human
cucagaagacacugaugggcaa

SEQ ID NO: 3226424 - RNA, 20 nt, Human
cucagaagacacugaugggc

SEQ ID NO: 3226425 - RNA, 17 nt, Human
cucagaagacacugaug

SEQ ID NO: 3226426 - RNA, 15 nt, Human
cucagaagacacuga

SEQ ID NO: 3226427 - RNA, 13 nt, Human
cucagaagacacu

SEQ ID NO: 3226428 - RNA, 14 nt, Human
cucagaaccacagc

SEQ ID NO: 3226429 - RNA, 23 nt, Human
cucaugauagaaggcuaugggga

SEQ ID NO: 3226430 - RNA, 22 nt, Human
cucagucuggcccuuccuuuuc

SEQ ID NO: 3226431 - RNA, 16 nt, Human
cucagugagcuggaga

SEQ ID NO: 3226432 - RNA, 16 nt, Human
cucaguccaugaagau

SEQ ID NO: 3226433 - RNA, 20 nt, Human
cucagucuggcccuuccuuu

SEQ ID NO: 3226434 - RNA, 12 nt, Human
cucaguccucaa

SEQ ID NO: 3226435 - RNA, 19 nt, Human
cucaguccucaaagcuuuu

SEQ ID NO: 3226436 - RNA, 17 nt, Human
cucaguccauagcagag

SEQ ID NO: 3226437 - RNA, 15 nt, Human
cucaguccauagcag

SEQ ID NO: 3226438 - RNA, 14 nt, Human
cucagguugucuga

SEQ ID NO: 3226439 - RNA, 23 nt, Human
cucaggugucccugcacuugcag

SEQ ID NO: 3226440 - RNA, 18 nt, Human
cuauguucuaagaaguga

SEQ ID NO: 3226441 - RNA, 17 nt, Human
cuauguugcccaggcag

SEQ ID NO: 3226442 - RNA, 22 nt, Human
cuauguugcccaggcaggucuu

SEQ ID NO: 3226443 - RNA, 21 nt, Human
cuauguugcccaggcaggucu

SEQ ID NO: 3226444 - RNA, 19 nt, Human
cuauguugcccaggcaggu

SEQ ID NO: 3226445 - RNA, 18 nt, Human
cuauguugcccaggcagg

SEQ ID NO: 3226446 - RNA, 23 nt, Human
cuaugucauuugcuggagcucug

SEQ ID NO: 3226447 - RNA, 17 nt, Human
cuauccugggcuuuugu

SEQ ID NO: 3226448 - RNA, 14 nt, Human
cuaugugagaccau

SEQ ID NO: 3226449 - RNA, 13 nt, Human
cuaucucccccag

SEQ ID NO: 3226450 - RNA, 17 nt, Human
cuauccuacuuccccuu

SEQ ID NO: 3226451 - RNA, 23 nt, Human
cuaucaguuuuauagcuuuauuu

SEQ ID NO: 3226452 - RNA, 23 nt, Human
cucaauuauuuugcauuuuuucu

SEQ ID NO: 3226453 - RNA, 21 nt, Human
cucaaugugugccgagcccuu

SEQ ID NO: 3226454 - RNA, 21 nt, Human
cucaagugauucuccugccuc

SEQ ID NO: 3226455 - RNA, 13 nt, Human
cuauuaaaaaagu

SEQ ID NO: 3226456 - RNA, 23 nt, Human
cuauuaaaaaagucuacaacaua

SEQ ID NO: 3226457 - RNA, 18 nt, Human
cucaaguuuaugucucag

SEQ ID NO: 3226458 - RNA, 12 nt, Human
cuccuacugagg

SEQ ID NO: 3226459 - RNA, 13 nt, Human
cuccuaccuggua

SEQ ID NO: 3226460 - RNA, 23 nt, Human
cuccgcuuucuacccagcgagcc

SEQ ID NO: 3226461 - RNA, 18 nt, Human
cuccggccaggugccucc

SEQ ID NO: 3226462 - RNA, 19 nt, Human
cuccggccaggugccuccu

SEQ ID NO: 3226463 - RNA, 20 nt, Human
cuccggccaggugccuccug

SEQ ID NO: 3226464 - RNA, 23 nt, Human
cuccggccaggugccuccugaca

SEQ ID NO: 3226465 - RNA, 15 nt, Human
cuccuuucaccacau

SEQ ID NO: 3226466 - RNA, 17 nt, Human
cuccuuucacaaccuuc

SEQ ID NO: 3226467 - RNA, 16 nt, Human
cuccuuucacaaccuu

SEQ ID NO: 3226468 - RNA, 13 nt, Human
cuccuuucacaac

SEQ ID NO: 3226469 - RNA, 13 nt, Human
cuccuggggcgcg

SEQ ID NO: 3226470 - RNA, 19 nt, Human
cuccuggggcgcgugaggc

SEQ ID NO: 3226471 - RNA, 22 nt, Human
cuccuggggcgcgugaggcccg

SEQ ID NO: 3226472 - RNA, 23 nt, Human
cuccuggggcgcgugaggcccgu

SEQ ID NO: 3226473 - RNA, 13 nt, Human
cuccugguccuag

SEQ ID NO: 3226474 - RNA, 15 nt, Human
cuccugguccuaggc

SEQ ID NO: 3226475 - RNA, 14 nt, Human
cuccucuuccaggc

SEQ ID NO: 3226476 - RNA, 15 nt, Human
cuccucuguccaggc

SEQ ID NO: 3226477 - RNA, 12 nt, Human
cuccucugucca

SEQ ID NO: 3226478 - RNA, 13 nt, Human
cuccucugcugcu

SEQ ID NO: 3226479 - RNA, 14 nt, Human
cuccucugcugcug

SEQ ID NO: 3226480 - RNA, 19 nt, Human
cuccuggcccacugcaucg

SEQ ID NO: 3226481 - RNA, 16 nt, Human
cuccucuugccacugc

SEQ ID NO: 3226482 - RNA, 15 nt, Human
cuccucuugccacug

SEQ ID NO: 3226483 - RNA, 12 nt, Human
cuccucuugcca

SEQ ID NO: 3226484 - RNA, 18 nt, Human
cuccugggcuaagugauc

SEQ ID NO: 3226485 - RNA, 19 nt, Human
cuccuggccucaagugauu

SEQ ID NO: 3226486 - RNA, 20 nt, Human
cucccucuacugggagccua

SEQ ID NO: 3226487 - RNA, 16 nt, Human
cucccucccagcucca

SEQ ID NO: 3226488 - RNA, 20 nt, Human
cucccucuuucccucccuuc

SEQ ID NO: 3226489 - RNA, 21 nt, Human
cucccucuccagcaggcccau

SEQ ID NO: 3226490 - RNA, 16 nt, Human
cucccucuccagcagg

SEQ ID NO: 3226491 - RNA, 20 nt, Human
cucccugaaguaagcaaaga

SEQ ID NO: 3226492 - RNA, 19 nt, Human
cucccucuacugggagccu

SEQ ID NO: 3226493 - RNA, 13 nt, Human
cucccucuacugg

SEQ ID NO: 3226494 - RNA, 14 nt, Human
cucccucccagcuc

SEQ ID NO: 3226495 - RNA, 11 nt, Human
cucccucccag

SEQ ID NO: 3226496 - RNA, 23 nt, Human
cuccccuaaagccucaaaacaaa

SEQ ID NO: 3226497 - RNA, 16 nt, Human
cuccccuaaagccuca

SEQ ID NO: 3226498 - RNA, 18 nt, Human
cucccaggagccugccca

SEQ ID NO: 3226499 - RNA, 21 nt, Human
cucccaggagccugcccagcc

SEQ ID NO: 3226500 - RNA, 19 nt, Human
cucccaggagccugcccag

SEQ ID NO: 3226501 - RNA, 20 nt, Human
cucccaggagccugcccagc

SEQ ID NO: 3226502 - RNA, 15 nt, Human
cucccacugcccacu

SEQ ID NO: 3226503 - RNA, 12 nt, Human
cucccacugccc

SEQ ID NO: 3226504 - RNA, 15 nt, Human
cucccacuucugcca

SEQ ID NO: 3226505 - RNA, 17 nt, Human
cucccacugcccacugg

SEQ ID NO: 3226506 - RNA, 16 nt, Human
cucccacuucugccag

SEQ ID NO: 3226507 - RNA, 17 nt, Human
cucccacuucugccaga

SEQ ID NO: 3226508 - RNA, 21 nt, Human
cucccacaggcccuuccucuc

SEQ ID NO: 3226509 - RNA, 20 nt, Human
cucccacaggcccuuccucu

SEQ ID NO: 3226510 - RNA, 16 nt, Human
cucccacaggcccuuc

SEQ ID NO: 3226511 - RNA, 14 nt, Human
cucccacaggcccu

SEQ ID NO: 3226512 - RNA, 15 nt, Human
cucccacaggcccuu

SEQ ID NO: 3226513 - RNA, 22 nt, Human
cuccaggugcacaagcuccaag

SEQ ID NO: 3226514 - RNA, 20 nt, Human
cuccaggcuguaucccauga

SEQ ID NO: 3226515 - RNA, 23 nt, Human
cuccaggcuccuuuagcgcccag

SEQ ID NO: 3226516 - RNA, 15 nt, Human
cuccaggcuccuuua

SEQ ID NO: 3226517 - RNA, 23 nt, Human
cuccaggugcacaagcuccaagc

SEQ ID NO: 3226518 - RNA, 20 nt, Human
cucugcaggaaauggcugug

SEQ ID NO: 3226519 - RNA, 17 nt, Human
cucugcacuccccugcu

SEQ ID NO: 3226520 - RNA, 21 nt, Human
cucugcuccucuccccagcaa

SEQ ID NO: 3226521 - RNA, 20 nt, Human
cucugcuccucuccccagca

SEQ ID NO: 3226522 - RNA, 23 nt, Human
cucugcugacagacacaggcccg

SEQ ID NO: 3226523 - RNA, 13 nt, Human
cucugcugcuggc

SEQ ID NO: 3226524 - RNA, 21 nt, Human
cucugcugaugacccccccag

SEQ ID NO: 3226525 - RNA, 13 nt, Human
cucugcugagggu

SEQ ID NO: 3226526 - RNA, 14 nt, Human
cucugcugaggguc

SEQ ID NO: 3226527 - RNA, 17 nt, Human
cucugcugaggguccag

SEQ ID NO: 3226528 - RNA, 20 nt, Human
cucugcugacagacacaggc

SEQ ID NO: 3226529 - RNA, 11 nt, Human
cucugcucuga

SEQ ID NO: 3226530 - RNA, 22 nt, Human
cucugcugacagacacaggccc

SEQ ID NO: 3226531 - RNA, 21 nt, Human
cucugcugacagacacaggcc

SEQ ID NO: 3226532 - RNA, 16 nt, Human
cucuguacagagccca

SEQ ID NO: 3226533 - RNA, 14 nt, Human
cucugcugcuggcu

SEQ ID NO: 3226534 - RNA, 15 nt, Human
cucugcugcuggcug

SEQ ID NO: 3226535 - RNA, 16 nt, Human
cucugcugcuggcugg

SEQ ID NO: 3226536 - RNA, 14 nt, Human
cucuguacagagcc

SEQ ID NO: 3226537 - RNA, 15 nt, Human
cucuguacagagccc

SEQ ID NO: 3226538 - RNA, 13 nt, Human
cucuguacagagc

SEQ ID NO: 3226539 - RNA, 18 nt, Human
cucugcuggacguccagg

SEQ ID NO: 3226540 - RNA, 15 nt, Human
cucugcacuccccug

SEQ ID NO: 3226541 - RNA, 16 nt, Human
cucugcacuccccugc

SEQ ID NO: 3226542 - RNA, 14 nt, Human
cucugcacuccccu

SEQ ID NO: 3226543 - RNA, 20 nt, Human
cucugcacaagcugcacccu

SEQ ID NO: 3226544 - RNA, 21 nt, Human
cucugcacaagcugcacccuc

SEQ ID NO: 3226545 - RNA, 19 nt, Human
cucugcacaagcugcaccc

SEQ ID NO: 3226546 - RNA, 16 nt, Human
cucgguguggagaagc

SEQ ID NO: 3226547 - RNA, 23 nt, Human
cucgguguccccaccaucugcug

SEQ ID NO: 3226548 - RNA, 22 nt, Human
cucgguguccccaccaucugcu

SEQ ID NO: 3226549 - RNA, 21 nt, Human
cucgguguccccaccaucugc

SEQ ID NO: 3226550 - RNA, 17 nt, Human
cucgguguggagaagcg

SEQ ID NO: 3226551 - RNA, 20 nt, Human
cucgguguccccaccaucug

SEQ ID NO: 3226552 - RNA, 16 nt, Human
cucgguguccccacca

SEQ ID NO: 3226553 - RNA, 15 nt, Human
cucgguguccccacc

SEQ ID NO: 3226554 - RNA, 13 nt, Human
cucggugucccca

SEQ ID NO: 3226555 - RNA, 13 nt, Human
cucgucuuuccca

SEQ ID NO: 3226556 - RNA, 17 nt, Human
cuccuuugugaggaagc

SEQ ID NO: 3226557 - RNA, 18 nt, Human
cuccuuugugaggaagcc

SEQ ID NO: 3226558 - RNA, 20 nt, Human
cuccuuucacaaccuucugu

SEQ ID NO: 3226559 - RNA, 17 nt, Human
cuccuuuagggacagcu

SEQ ID NO: 3226560 - RNA, 19 nt, Human
cuccuuuguauucugucuu

SEQ ID NO: 3226561 - RNA, 18 nt, Human
cuccuuuguauucugucu

SEQ ID NO: 3226562 - RNA, 17 nt, Human
cuccuuuguauucuguc

SEQ ID NO: 3226563 - RNA, 22 nt, Human
cucucuggccuucggccuccau

SEQ ID NO: 3226564 - RNA, 21 nt, Human
cucucugggcugacugggcca

SEQ ID NO: 3226565 - RNA, 17 nt, Human
cucucugggcugacugg

SEQ ID NO: 3226566 - RNA, 14 nt, Human
cucucuggccuucg

SEQ ID NO: 3226567 - RNA, 16 nt, Human
cucucuggccuucggc

SEQ ID NO: 3226568 - RNA, 13 nt, Human
cucucuggccuuc

SEQ ID NO: 3226569 - RNA, 16 nt, Human
cucuccuccagaguca

SEQ ID NO: 3226570 - RNA, 13 nt, Human
cucuccuccagag

SEQ ID NO: 3226571 - RNA, 15 nt, Human
cucuccuccagaguc

SEQ ID NO: 3226572 - RNA, 12 nt, Human
cucuccuccaga

SEQ ID NO: 3226573 - RNA, 22 nt, Human
cucuauggucuuauauuuacaa

SEQ ID NO: 3226574 - RNA, 22 nt, Human
cucuccccgcaguguuugugug

SEQ ID NO: 3226575 - RNA, 16 nt, Human
cuaaagccucaaaaca

SEQ ID NO: 3226576 - RNA, 23 nt, Human
cuaaaguccuuugagcuccuggg

SEQ ID NO: 3226577 - RNA, 23 nt, Human
cuaaaguacugagcagugauauu

SEQ ID NO: 3226578 - RNA, 22 nt, Human
cuaaaguacugagcagugauau

SEQ ID NO: 3226579 - RNA, 20 nt, Human
cuaaaguacugagcagugau

SEQ ID NO: 3226580 - RNA, 14 nt, Human
cuaaaguaauuggu

SEQ ID NO: 3226581 - RNA, 20 nt, Human
cuaacgaaguauccuucagc

SEQ ID NO: 3226582 - RNA, 14 nt, Human
cuaacuugucuuug

SEQ ID NO: 3226583 - RNA, 22 nt, Human
cuaacuugucuuuggacccuga

SEQ ID NO: 3226584 - RNA, 20 nt, Human
cuaacuugcuuaaaugugaa

SEQ ID NO: 3226585 - RNA, 21 nt, Human
cuaagaaaucaaguaaugaau

SEQ ID NO: 3226586 - RNA, 22 nt, Human
cuaagaaaucaaguaaugaauc

SEQ ID NO: 3226587 - RNA, 20 nt, Human
cuaagaacaaaagaagcagc

SEQ ID NO: 3226588 - RNA, 17 nt, Human
cuaagaacccauggaaa

SEQ ID NO: 3226589 - RNA, 19 nt, Human
cuaagaaauaucugugaaa

SEQ ID NO: 3226590 - RNA, 20 nt, Human
cuaagaaauaucugugaaau

SEQ ID NO: 3226591 - RNA, 21 nt, Human
cuaagaaauaucugugaaaua

SEQ ID NO: 3226592 - RNA, 22 nt, Human
cuaagaaauaucugugaaauau

SEQ ID NO: 3226593 - RNA, 17 nt, Human
cuaaagauuuugaucuc

SEQ ID NO: 3226594 - RNA, 13 nt, Human
cuaaagauuuuga

SEQ ID NO: 3226595 - RNA, 11 nt, Human
cuaaagcugcc

SEQ ID NO: 3226596 - RNA, 16 nt, Human
cguuaguaaucuguau

SEQ ID NO: 3226597 - RNA, 18 nt, Human
cguuaggauacugccucc

SEQ ID NO: 3226598 - RNA, 13 nt, Human
cguguucucagag

SEQ ID NO: 3226599 - RNA, 21 nt, Human
cguguuauuuuaaucucagaa

SEQ ID NO: 3226600 - RNA, 19 nt, Human
cguguuaugacuccagaau

SEQ ID NO: 3226601 - RNA, 15 nt, Human
cguguuaugacucca

SEQ ID NO: 3226602 - RNA, 19 nt, Human
cgugaguccuggcauggga

SEQ ID NO: 3226603 - RNA, 18 nt, Human
cgugaguccuggcauggg

SEQ ID NO: 3226604 - RNA, 12 nt, Human
cgugacaacacu

SEQ ID NO: 3226605 - RNA, 15 nt, Human
cgugacaacacuugu

SEQ ID NO: 3226606 - RNA, 14 nt, Human
cgugacaacacuug

SEQ ID NO: 3226607 - RNA, 20 nt, Human
cgugagccacugcaccgggc

SEQ ID NO: 3226608 - RNA, 15 nt, Human
cgugagccacugcac

SEQ ID NO: 3226609 - RNA, 14 nt, Human
cgugagccacugca

SEQ ID NO: 3226610 - RNA, 16 nt, Human
cgugacaauguuuaca

SEQ ID NO: 3226611 - RNA, 14 nt, Human
cgugaggccagaga

SEQ ID NO: 3226612 - RNA, 22 nt, Human
cgugagccacugcaccgggcca

SEQ ID NO: 3226613 - RNA, 17 nt, Human
cgugacaauguuuacaa

SEQ ID NO: 3226614 - RNA, 20 nt, Human
cuacaaaaacacagcaaggg

SEQ ID NO: 3226615 - RNA, 19 nt, Human
cuacaaaaagcauaaaaau

SEQ ID NO: 3226616 - RNA, 14 nt, Human
cuaauuugcugcug

SEQ ID NO: 3226617 - RNA, 11 nt, Human
cuaauaaaaua

SEQ ID NO: 3226618 - RNA, 12 nt, Human
cuaauaaaauau

SEQ ID NO: 3226619 - RNA, 13 nt, Human
cuaauaaaauauu

SEQ ID NO: 3226620 - RNA, 14 nt, Human
cuaauaaaauauuu

SEQ ID NO: 3226621 - RNA, 15 nt, Human
cuaauaaaauauuuu

SEQ ID NO: 3226622 - RNA, 16 nt, Human
cuaauaaaauauuuuc

SEQ ID NO: 3226623 - RNA, 17 nt, Human
cuaauaaaauauuuucu

SEQ ID NO: 3226624 - RNA, 18 nt, Human
cuaauaaaauauuuucug

SEQ ID NO: 3226625 - RNA, 19 nt, Human
cuaauaaaauauuuucugu

SEQ ID NO: 3226626 - RNA, 20 nt, Human
cuaauaaaauauuuucugug

SEQ ID NO: 3226627 - RNA, 21 nt, Human
cuaauaaaauauuuucugugu

SEQ ID NO: 3226628 - RNA, 22 nt, Human
cuaauaaaauauuuucugugug

SEQ ID NO: 3226629 - RNA, 23 nt, Human
cuaauaaaauauuuucugugugu

SEQ ID NO: 3226630 - RNA, 21 nt, Human
cuaaguuuuaggguacaugug

SEQ ID NO: 3226631 - RNA, 20 nt, Human
cuaaguuuuaggguacaugu

SEQ ID NO: 3226632 - RNA, 11 nt, Human
cuaauaaaacu

SEQ ID NO: 3226633 - RNA, 12 nt, Human
cuaauaaaacug

SEQ ID NO: 3226634 - RNA, 13 nt, Human
cuaauaaaacuga

SEQ ID NO: 3226635 - RNA, 14 nt, Human
cuaauaaaacugau

SEQ ID NO: 3226636 - RNA, 15 nt, Human
cuaauaaaacugaug

SEQ ID NO: 3226637 - RNA, 16 nt, Human
cuaauaaaacugaugu

SEQ ID NO: 3226638 - RNA, 18 nt, Human
cuaauaaaacugauguga

SEQ ID NO: 3226639 - RNA, 20 nt, Human
cuaauaaaacugaugugaaa

SEQ ID NO: 3226640 - RNA, 22 nt, Human
cuaaguugaguauauuauaaua

SEQ ID NO: 3226641 - RNA, 21 nt, Human
cuaaguugaguauauuauaau

SEQ ID NO: 3226642 - RNA, 19 nt, Human
cuaaguugaguauauuaua

SEQ ID NO: 3226643 - RNA, 18 nt, Human
cuaagucucuuuuuuaca

SEQ ID NO: 3226644 - RNA, 17 nt, Human
cuaagucucuuuuuuac

SEQ ID NO: 3226645 - RNA, 23 nt, Human
cuaaguaaaucucuucuguguuu

SEQ ID NO: 3226646 - RNA, 19 nt, Human
cuaaguaaaucucuucugu

SEQ ID NO: 3226647 - RNA, 18 nt, Human
cuaaguaaaucucuucug

SEQ ID NO: 3226648 - RNA, 17 nt, Human
cuaagaauuuuuuauuu

SEQ ID NO: 3226649 - RNA, 15 nt, Human
cuaagaauaauaaaa

SEQ ID NO: 3226650 - RNA, 18 nt, Human
cuaagaauaauaaaauca

SEQ ID NO: 3226651 - RNA, 15 nt, Human
ccuuuuccagagcau

SEQ ID NO: 3226652 - RNA, 20 nt, Human
ccuuuuccagagcauuccag

SEQ ID NO: 3226653 - RNA, 23 nt, Human
cgccaaggcugggggaagaagcu

SEQ ID NO: 3226654 - RNA, 15 nt, Human
cgcaguguuugugug

SEQ ID NO: 3226655 - RNA, 13 nt, Human
cgagucugaggcc

SEQ ID NO: 3226656 - RNA, 20 nt, Human
cgagugccgcaucucacagc

SEQ ID NO: 3226657 - RNA, 21 nt, Human
cgagucucuucuccacuggau

SEQ ID NO: 3226658 - RNA, 20 nt, Human
cgagucucuucuccacugga

SEQ ID NO: 3226659 - RNA, 21 nt, Human
cgcaggcuggcccugcccugg

SEQ ID NO: 3226660 - RNA, 22 nt, Human
cgcaggcuggcccugcccuggu

SEQ ID NO: 3226661 - RNA, 16 nt, Human
cgagucucuucuccac

SEQ ID NO: 3226662 - RNA, 18 nt, Human
cgagucucuucuccacug

SEQ ID NO: 3226663 - RNA, 17 nt, Human
cgagucucuucuccacu

SEQ ID NO: 3226664 - RNA, 18 nt, Human
cgcuggagugcagugagc

SEQ ID NO: 3226665 - RNA, 17 nt, Human
cgcuggagugcagugag

SEQ ID NO: 3226666 - RNA, 19 nt, Human
cgcugccccuggcagcccc

SEQ ID NO: 3226667 - RNA, 20 nt, Human
cgcugccccuggcagccccu

SEQ ID NO: 3226668 - RNA, 17 nt, Human
cgcugacuacagggccg

SEQ ID NO: 3226669 - RNA, 16 nt, Human
cgcugacuacagggcc

SEQ ID NO: 3226670 - RNA, 15 nt, Human
cgcugacuacagggc

SEQ ID NO: 3226671 - RNA, 21 nt, Human
cgcucuuggcagguacucagc

SEQ ID NO: 3226672 - RNA, 20 nt, Human
cgcucugucgcccaggcugg

SEQ ID NO: 3226673 - RNA, 13 nt, Human
cgcucugcugugg

SEQ ID NO: 3226674 - RNA, 15 nt, Human
cgccaccacacccaa

SEQ ID NO: 3226675 - RNA, 11 nt, Human
cgccacauccc

SEQ ID NO: 3226676 - RNA, 19 nt, Human
cgccugccuuuggcacucu

SEQ ID NO: 3226677 - RNA, 18 nt, Human
cgcucucuggccuucggc

SEQ ID NO: 3226678 - RNA, 21 nt, Human
cgggccccaccugcagcuccc

SEQ ID NO: 3226679 - RNA, 15 nt, Human
cgggccccaccugca

SEQ ID NO: 3226680 - RNA, 19 nt, Human
cgggccccaccugcagcuc

SEQ ID NO: 3226681 - RNA, 17 nt, Human
cgggccccaccugcagc

SEQ ID NO: 3226682 - RNA, 17 nt, Human
cgggccacagagaaagu

SEQ ID NO: 3226683 - RNA, 16 nt, Human
cggcucaagcccagga

SEQ ID NO: 3226684 - RNA, 17 nt, Human
cggcucaagcccaggag

SEQ ID NO: 3226685 - RNA, 12 nt, Human
cgggcucugccu

SEQ ID NO: 3226686 - RNA, 20 nt, Human
cgggcugggagcucugcaga

SEQ ID NO: 3226687 - RNA, 16 nt, Human
cgggcugggagcucug

SEQ ID NO: 3226688 - RNA, 19 nt, Human
cgggcucagcaaaagaugc

SEQ ID NO: 3226689 - RNA, 20 nt, Human
cgggccuggagaacuagaga

SEQ ID NO: 3226690 - RNA, 16 nt, Human
cgggccuggagaacua

SEQ ID NO: 3226691 - RNA, 22 nt, Human
cgggcuccgacuugugcacagg

SEQ ID NO: 3226692 - RNA, 20 nt, Human
cgguggcucacgccuguaau

SEQ ID NO: 3226693 - RNA, 13 nt, Human
cguaagcaguaua

SEQ ID NO: 3226694 - RNA, 23 nt, Human
cguaagcaguauauuaguauuau

SEQ ID NO: 3226695 - RNA, 23 nt, Human
cguaaagguuuauuuuucuguua

SEQ ID NO: 3226696 - RNA, 14 nt, Human
cguacuaaggauac

SEQ ID NO: 3226697 - RNA, 15 nt, Human
cguacauaauacuga

SEQ ID NO: 3226698 - RNA, 16 nt, Human
cguacauaauacugaa

SEQ ID NO: 3226699 - RNA, 20 nt, Human
cguacauaauacugaaccac

SEQ ID NO: 3226700 - RNA, 17 nt, Human
cggagacggagucccac

SEQ ID NO: 3226701 - RNA, 20 nt, Human
cggagacggagucccaccuu

SEQ ID NO: 3226702 - RNA, 15 nt, Human
cggagacggaguccc

SEQ ID NO: 3226703 - RNA, 22 nt, Human
cggagucccaccuuggcugcag

SEQ ID NO: 3226704 - RNA, 21 nt, Human
cggagucccaccuuggcugca

SEQ ID NO: 3226705 - RNA, 23 nt, Human
cggagucccaccuuggcugcagg

SEQ ID NO: 3226706 - RNA, 15 nt, Human
cggaggggccuggca

SEQ ID NO: 3226707 - RNA, 18 nt, Human
cggcuaauuuuuguauuu

SEQ ID NO: 3226708 - RNA, 13 nt, Human
cggcuaagcaggc

SEQ ID NO: 3226709 - RNA, 21 nt, Human
ccuugcauuuuagcuaauuua

SEQ ID NO: 3226710 - RNA, 15 nt, Human
ccuugcauacaaaca

SEQ ID NO: 3226711 - RNA, 13 nt, Human
ccuugcacuuuca

SEQ ID NO: 3226712 - RNA, 17 nt, Human
ccuugcacacaucaucu

SEQ ID NO: 3226713 - RNA, 24 nt, Human
ccuugcacacaucaucuguaagcu

SEQ ID NO: 3226714 - RNA, 13 nt, Human
ccuugccagcugc

SEQ ID NO: 3226715 - RNA, 20 nt, Human
ccuugccagcugcugagccg

SEQ ID NO: 3226716 - RNA, 19 nt, Human
ccuugccagcugcugagcc

SEQ ID NO: 3226717 - RNA, 15 nt, Human
ccuugccagcugcug

SEQ ID NO: 3226718 - RNA, 14 nt, Human
ccuugccagcugcu

SEQ ID NO: 3226719 - RNA, 19 nt, Human
ccuugccaggucccuuuca

SEQ ID NO: 3226720 - RNA, 24 nt, Human
ccuugccagcugcugagccgcaga

SEQ ID NO: 3226721 - RNA, 23 nt, Human
ccuugccagcugcugagccgcag

SEQ ID NO: 3226722 - RNA, 22 nt, Human
ccuugccagcugcugagccgca

SEQ ID NO: 3226723 - RNA, 18 nt, Human
ccuugcuaccacggccuc

SEQ ID NO: 3226724 - RNA, 23 nt, Human
ccuugcuaccacggccuccuuuc

SEQ ID NO: 3226725 - RNA, 20 nt, Human
ccuuuaucuaccaacuuuca

SEQ ID NO: 3226726 - RNA, 15 nt, Human
ccuuuaguuauaaag

SEQ ID NO: 3226727 - RNA, 15 nt, Human
ccuuucaauaggaaa

SEQ ID NO: 3226728 - RNA, 14 nt, Human
ccuuuauucuggca

SEQ ID NO: 3226729 - RNA, 17 nt, Human
ccuuucaauaggaaaaa

SEQ ID NO: 3226730 - RNA, 17 nt, Human
ccuucucuucacaguca

SEQ ID NO: 3226731 - RNA, 21 nt, Human
ccuucuguccuacucuguguc

SEQ ID NO: 3226732 - RNA, 20 nt, Human
ccuucuguccuacucugugu

SEQ ID NO: 3226733 - RNA, 22 nt, Human
ccuucuguccuacucuguguca

SEQ ID NO: 3226734 - RNA, 12 nt, Human
ccuucucuucca

SEQ ID NO: 3226735 - RNA, 16 nt, Human
ccuuccccuuccuucu

SEQ ID NO: 3226736 - RNA, 15 nt, Human
ccuuccccuuccuuc

SEQ ID NO: 3226737 - RNA, 14 nt, Human
ccuuccccuuccuu

SEQ ID NO: 3226738 - RNA, 17 nt, Human
ccuuccccuuccuucuu

SEQ ID NO: 3226739 - RNA, 13 nt, Human
ccuuccccuuccu

SEQ ID NO: 3226740 - RNA, 22 nt, Human
ccuucccccucccccagccacu

SEQ ID NO: 3226741 - RNA, 19 nt, Human
ccuucccccuccaauccca

SEQ ID NO: 3226742 - RNA, 19 nt, Human
ccuuccuaauuccacagcu

SEQ ID NO: 3226743 - RNA, 20 nt, Human
ccuuccuaauuccacagcug

SEQ ID NO: 3226744 - RNA, 18 nt, Human
ccuuccuaauuccacagc

SEQ ID NO: 3226745 - RNA, 12 nt, Human
ccuucccuugcu

SEQ ID NO: 3226746 - RNA, 20 nt, Human
ccuucucuccagccccugga

SEQ ID NO: 3226747 - RNA, 17 nt, Human
ccuuccucuccacugcc

SEQ ID NO: 3226748 - RNA, 16 nt, Human
ccuuccucuccacugc

SEQ ID NO: 3226749 - RNA, 15 nt, Human
ccuuccucuccacug

SEQ ID NO: 3226750 - RNA, 14 nt, Human
ccuuccucuccacu

SEQ ID NO: 3226751 - RNA, 21 nt, Human
ccuuccuaauuccacagcugc

SEQ ID NO: 3226752 - RNA, 14 nt, Human
ccuuccuaccaccc

SEQ ID NO: 3226753 - RNA, 21 nt, Human
ccuuccuaguucaucccuucu

SEQ ID NO: 3226754 - RNA, 23 nt, Human
ccuuccuccauccuccuccuucc

SEQ ID NO: 3226755 - RNA, 21 nt, Human
ccuuccuccauccuccuccuu

SEQ ID NO: 3226756 - RNA, 16 nt, Human
ccuucucugaaggaca

SEQ ID NO: 3226757 - RNA, 14 nt, Human
ccuucucugaagga

SEQ ID NO: 3226758 - RNA, 21 nt, Human
ccuucucuccagccccuggau

SEQ ID NO: 3226759 - RNA, 23 nt, Human
ccuucucuccagccccuggaugc

SEQ ID NO: 3226760 - RNA, 20 nt, Human
ccuuccucuccacugccuuc

SEQ ID NO: 3226761 - RNA, 20 nt, Human
ccuucucucucaauuuuugg

SEQ ID NO: 3226762 - RNA, 14 nt, Human
ccuuagcuucuggc

SEQ ID NO: 3226763 - RNA, 20 nt, Human
ccuuaggugauccacucgcc

SEQ ID NO: 3226764 - RNA, 20 nt, Human
ccuuauauaugcacuuaauu

SEQ ID NO: 3226765 - RNA, 13 nt, Human
ccuuaucaaagga

SEQ ID NO: 3226766 - RNA, 16 nt, Human
ccuuaggguuuucucu

SEQ ID NO: 3226767 - RNA, 12 nt, Human
ccuuauggaaca

SEQ ID NO: 3226768 - RNA, 15 nt, Human
ccuuaucuagcugca

SEQ ID NO: 3226769 - RNA, 19 nt, Human
ccuuaucuaguguuugauu

SEQ ID NO: 3226770 - RNA, 14 nt, Human
ccuuaucaaaggac

SEQ ID NO: 3226771 - RNA, 18 nt, Human
ccuuaucaaaggacacca

SEQ ID NO: 3226772 - RNA, 16 nt, Human
ccuuaucauaaauuca

SEQ ID NO: 3226773 - RNA, 14 nt, Human
ccuuaucauaaauu

SEQ ID NO: 3226774 - RNA, 22 nt, Human
ccuuauggaacacucugagacu

SEQ ID NO: 3226775 - RNA, 19 nt, Human
ccuuauggaacacucugag

SEQ ID NO: 3226776 - RNA, 20 nt, Human
ccuuauggaacacucugaga

SEQ ID NO: 3226777 - RNA, 14 nt, Human
ccuuauggaacacu

SEQ ID NO: 3226778 - RNA, 16 nt, Human
ccuuauggaacacucu

SEQ ID NO: 3226779 - RNA, 17 nt, Human
ccuuauggaacacucug

SEQ ID NO: 3226780 - RNA, 18 nt, Human
ccuuauggaacacucuga

SEQ ID NO: 3226781 - RNA, 14 nt, Human
ccuucccaccucuc

SEQ ID NO: 3226782 - RNA, 19 nt, Human
ccuucccaccucucucacu

SEQ ID NO: 3226783 - RNA, 12 nt, Human
ccuucccaccuc

SEQ ID NO: 3226784 - RNA, 22 nt, Human
ccuucccacucugucgagccug

SEQ ID NO: 3226785 - RNA, 18 nt, Human
ccuucccacucuucucau

SEQ ID NO: 3226786 - RNA, 15 nt, Human
ccuucccaugcccug

SEQ ID NO: 3226787 - RNA, 20 nt, Human
ccuuagcagggaaacagcua

SEQ ID NO: 3226788 - RNA, 19 nt, Human
ccuuagcagggaaacagcu

SEQ ID NO: 3226789 - RNA, 16 nt, Human
ccuuagcaaauucugu

SEQ ID NO: 3226790 - RNA, 17 nt, Human
ccuguugggccaggagc

SEQ ID NO: 3226791 - RNA, 18 nt, Human
ccuguugggccaggagcc

SEQ ID NO: 3226792 - RNA, 19 nt, Human
ccuguugggccaggagccu

SEQ ID NO: 3226793 - RNA, 20 nt, Human
ccuguugggccaggagccuc

SEQ ID NO: 3226794 - RNA, 16 nt, Human
ccuguugggccaggag

SEQ ID NO: 3226795 - RNA, 22 nt, Human
ccuguugauuaauuucugccau

SEQ ID NO: 3226796 - RNA, 23 nt, Human
ccuguugauuaauuucugccauu

SEQ ID NO: 3226797 - RNA, 18 nt, Human
ccuguucccaugagauga

SEQ ID NO: 3226798 - RNA, 12 nt, Human
ccuguucccauu

SEQ ID NO: 3226799 - RNA, 12 nt, Human
ccuguucuggca

SEQ ID NO: 3226800 - RNA, 17 nt, Human
ccuguucuggcagaguu

SEQ ID NO: 3226801 - RNA, 16 nt, Human
ccuguucugcuuuccu

SEQ ID NO: 3226802 - RNA, 19 nt, Human
ccuguucagcuccagcuca

SEQ ID NO: 3226803 - RNA, 16 nt, Human
ccuguucagcuccagc

SEQ ID NO: 3226804 - RNA, 15 nt, Human
ccuguucagcuccag

SEQ ID NO: 3226805 - RNA, 14 nt, Human
ccuguucagcucca

SEQ ID NO: 3226806 - RNA, 21 nt, Human
ccuguucagcuccagcucacc

SEQ ID NO: 3226807 - RNA, 20 nt, Human
ccuguucagcuccagcucac

SEQ ID NO: 3226808 - RNA, 23 nt, Human
ccuguucagcuccagcucaccag

SEQ ID NO: 3226809 - RNA, 13 nt, Human
ccuguucagcucc

SEQ ID NO: 3226810 - RNA, 21 nt, Human
ccuguucacucuacuuagcau

SEQ ID NO: 3226811 - RNA, 12 nt, Human
uugugauguguc

SEQ ID NO: 3226812 - RNA, 22 nt, Human
uugugaugucccaacuuguaaa

SEQ ID NO: 3226813 - RNA, 18 nt, Human
uugugaugucccaacuug

SEQ ID NO: 3226814 - RNA, 14 nt, Human
uuguguaauauuac

SEQ ID NO: 3226815 - RNA, 18 nt, Human
uuguguaauauuacuuua

SEQ ID NO: 3226816 - RNA, 23 nt, Human
uuguguaauauuacuuuaacaug

SEQ ID NO: 3226817 - RNA, 13 nt, Human
uugugaggaagcc

SEQ ID NO: 3226818 - RNA, 17 nt, Human
uugugaggaagccgcug

SEQ ID NO: 3226819 - RNA, 18 nt, Human
uugugaggaagccgcugg

SEQ ID NO: 3226820 - RNA, 18 nt, Human
uuguccccaccgcagaca

SEQ ID NO: 3226821 - RNA, 20 nt, Human
uuguccccaccgcagacagg

SEQ ID NO: 3226822 - RNA, 17 nt, Human
uuguccccaaugaauau

SEQ ID NO: 3226823 - RNA, 18 nt, Human
uuguccccaaugaauaua

SEQ ID NO: 3226824 - RNA, 15 nt, Human
uuguccccgacccuu

SEQ ID NO: 3226825 - RNA, 21 nt, Human
uugugaauaauuacagugccu

SEQ ID NO: 3226826 - RNA, 15 nt, Human
uugugaauaauuaca

SEQ ID NO: 3226827 - RNA, 14 nt, Human
uugugaauaauuac

SEQ ID NO: 3226828 - RNA, 13 nt, Human
uugugaauaauua

SEQ ID NO: 3226829 - RNA, 18 nt, Human
augaguuggcugggaaua

SEQ ID NO: 3226830 - RNA, 23 nt, Human
augagugugauccaguuuuucau

SEQ ID NO: 3226831 - RNA, 13 nt, Human
augaguccccugu

SEQ ID NO: 3226832 - RNA, 16 nt, Human
augaguccaaacugga

SEQ ID NO: 3226833 - RNA, 19 nt, Human
augaguccaaacuggaaug

SEQ ID NO: 3226834 - RNA, 13 nt, Human
augaguuuuggga

SEQ ID NO: 3226835 - RNA, 19 nt, Human
augaguuuugggaaguuaa

SEQ ID NO: 3226836 - RNA, 18 nt, Human
augaguuuugggaaguua

SEQ ID NO: 3226837 - RNA, 15 nt, Human
augaguuucuuagac

SEQ ID NO: 3226838 - RNA, 14 nt, Human
augaguuucuuaga

SEQ ID NO: 3226839 - RNA, 22 nt, Human
augaguuucacagugugauuuu

SEQ ID NO: 3226840 - RNA, 15 nt, Human
augaguuucacagug

SEQ ID NO: 3226841 - RNA, 13 nt, Human
augaguuucacag

SEQ ID NO: 3226842 - RNA, 16 nt, Human
uugucagaccauaaga

SEQ ID NO: 3226843 - RNA, 20 nt, Human
uugucaaugcuggagaaaaa

SEQ ID NO: 3226844 - RNA, 17 nt, Human
uugucacacacuuuggc

SEQ ID NO: 3226845 - RNA, 20 nt, Human
augaguuuugggaaguuaaa

SEQ ID NO: 3226846 - RNA, 18 nt, Human
uugucaaugcuggagaaa

SEQ ID NO: 3226847 - RNA, 21 nt, Human
uugucauauaagauucauauu

SEQ ID NO: 3226848 - RNA, 21 nt, Human
uuguccaauuguauaacuuug

SEQ ID NO: 3226849 - RNA, 19 nt, Human
uuguccagagcugcuuccc

SEQ ID NO: 3226850 - RNA, 18 nt, Human
uuguccagagcugcuucc

SEQ ID NO: 3226851 - RNA, 16 nt, Human
uuguccagagcugcuu

SEQ ID NO: 3226852 - RNA, 13 nt, Human
uuguccagagcug

SEQ ID NO: 3226853 - RNA, 19 nt, Human
uugucaucagccaaaacgu

SEQ ID NO: 3226854 - RNA, 16 nt, Human
uugucaucaccaugga

SEQ ID NO: 3226855 - RNA, 14 nt, Human
uugucauuuugguc

SEQ ID NO: 3226856 - RNA, 21 nt, Human
uuguccaaaguuaccuggaau

SEQ ID NO: 3226857 - RNA, 20 nt, Human
augagggucuugguuccagc

SEQ ID NO: 3226858 - RNA, 19 nt, Human
augaggguuugagagagca

SEQ ID NO: 3226859 - RNA, 21 nt, Human
augagguacaaccuguucugc

SEQ ID NO: 3226860 - RNA, 15 nt, Human
augaggucagagccu

SEQ ID NO: 3226861 - RNA, 18 nt, Human
augaggucagagccugca

SEQ ID NO: 3226862 - RNA, 16 nt, Human
augaggucagagccug

SEQ ID NO: 3226863 - RNA, 20 nt, Human
augaggucagagccugcagu

SEQ ID NO: 3226864 - RNA, 19 nt, Human
augaggucagagccugcag

SEQ ID NO: 3226865 - RNA, 14 nt, Human
augagguucucucu

SEQ ID NO: 3226866 - RNA, 15 nt, Human
augagguacugagag

SEQ ID NO: 3226867 - RNA, 17 nt, Human
augagguacugagagug

SEQ ID NO: 3226868 - RNA, 18 nt, Human
augagguacugagaguga

SEQ ID NO: 3226869 - RNA, 23 nt, Human
uuguucaggaaaagguugaauaa

SEQ ID NO: 3226870 - RNA, 18 nt, Human
uuguucuuccaaagcaga

SEQ ID NO: 3226871 - RNA, 14 nt, Human
uuguucuuccaaag

SEQ ID NO: 3226872 - RNA, 17 nt, Human
augauuuaauuugaaau

SEQ ID NO: 3226873 - RNA, 21 nt, Human
uuguucuuggcaauaaauuuu

SEQ ID NO: 3226874 - RNA, 19 nt, Human
uuguucuuggcaauaaauu

SEQ ID NO: 3226875 - RNA, 13 nt, Human
uuguucuugauag

SEQ ID NO: 3226876 - RNA, 13 nt, Human
augauuucauuca

SEQ ID NO: 3226877 - RNA, 12 nt, Human
augauuucacaa

SEQ ID NO: 3226878 - RNA, 14 nt, Human
augauuucacaaau

SEQ ID NO: 3226879 - RNA, 13 nt, Human
augauuucacaaa

SEQ ID NO: 3226880 - RNA, 13 nt, Human
augcaaaaaaucu

SEQ ID NO: 3226881 - RNA, 23 nt, Human
augcaaaaaaucuuaauacuguu

SEQ ID NO: 3226882 - RNA, 17 nt, Human
augcaaaaaaucuuaau

SEQ ID NO: 3226883 - RNA, 15 nt, Human
augcaaaaaaucuua

SEQ ID NO: 3226884 - RNA, 14 nt, Human
augcaaaaaaucuu

SEQ ID NO: 3226885 - RNA, 15 nt, Human
augauuuuuugaaag

SEQ ID NO: 3226886 - RNA, 17 nt, Human
augauuuuuugaaaguu

SEQ ID NO: 3226887 - RNA, 23 nt, Human
augauuuuuugaaaguuaacauu

SEQ ID NO: 3226888 - RNA, 23 nt, Human
augcaaaaagcuagucaacagua

SEQ ID NO: 3226889 - RNA, 17 nt, Human
augcaaacauuggaaga

SEQ ID NO: 3226890 - RNA, 17 nt, Human
augcagagguccacaac

SEQ ID NO: 3226891 - RNA, 18 nt, Human
augcagagguccacaaca

SEQ ID NO: 3226892 - RNA, 23 nt, Human
augcacuuuguucuggcucuucc

SEQ ID NO: 3226893 - RNA, 11 nt, Human
augcagaaaua

SEQ ID NO: 3226894 - RNA, 18 nt, Human
augcagaaauagacaaaa

SEQ ID NO: 3226895 - RNA, 20 nt, Human
augcagaaauagacaaaaag

SEQ ID NO: 3226896 - RNA, 21 nt, Human
augcagaaauagacaaaaagu

SEQ ID NO: 3226897 - RNA, 22 nt, Human
augcagaaauagacaaaaagua

SEQ ID NO: 3226898 - RNA, 17 nt, Human
augcagaauggcauuug

SEQ ID NO: 3226899 - RNA, 14 nt, Human
augcaaagcacuga

SEQ ID NO: 3226900 - RNA, 13 nt, Human
augcaaagcacug

SEQ ID NO: 3226901 - RNA, 12 nt, Human
augcaaagcacu

SEQ ID NO: 3226902 - RNA, 21 nt, Human
augcacuuuguucuggcucuu

SEQ ID NO: 3226903 - RNA, 20 nt, Human
augcacuaagucucuuuuuu

SEQ ID NO: 3226904 - RNA, 12 nt, Human
uuuaagagaaau

SEQ ID NO: 3226905 - RNA, 21 nt, Human
uuuaagcuguuacugucuuca

SEQ ID NO: 3226906 - RNA, 12 nt, Human
uuuaaggaauau

SEQ ID NO: 3226907 - RNA, 15 nt, Human
uuuaaggaaaggcaa

SEQ ID NO: 3226908 - RNA, 19 nt, Human
uuuaaggauaaaucauaaa

SEQ ID NO: 3226909 - RNA, 18 nt, Human
uuuaaggacugacugagg

SEQ ID NO: 3226910 - RNA, 19 nt, Human
uuuaaggacugacugaggc

SEQ ID NO: 3226911 - RNA, 16 nt, Human
uuuaaugaaagacugu

SEQ ID NO: 3226912 - RNA, 22 nt, Human
uuuaaggguuuguggaaaauga

SEQ ID NO: 3226913 - RNA, 20 nt, Human
uuuaaggguuuguggaaaau

SEQ ID NO: 3226914 - RNA, 17 nt, Human
uuuaaggguuuguggaa

SEQ ID NO: 3226915 - RNA, 15 nt, Human
uuuaaauauuaagca

SEQ ID NO: 3226916 - RNA, 16 nt, Human
uuuaaaaaguguuuaa

SEQ ID NO: 3226917 - RNA, 20 nt, Human
uuuaaaaaguguuuaaaugu

SEQ ID NO: 3226918 - RNA, 13 nt, Human
uuuaaaaaguauu

SEQ ID NO: 3226919 - RNA, 16 nt, Human
uuuaaaaaguauugcc

SEQ ID NO: 3226920 - RNA, 20 nt, Human
uuuaaaaaguauugccaaac

SEQ ID NO: 3226921 - RNA, 17 nt, Human
uuuaaaaaguauugcca

SEQ ID NO: 3226922 - RNA, 14 nt, Human
uuuaaaaacuguuu

SEQ ID NO: 3226923 - RNA, 18 nt, Human
uuuaaaaacaaaaggcaa

SEQ ID NO: 3226924 - RNA, 19 nt, Human
uuuaaaaaacuuucuacuc

SEQ ID NO: 3226925 - RNA, 18 nt, Human
uuuaaaaaacuuucuacu

SEQ ID NO: 3226926 - RNA, 14 nt, Human
uuuaaaaaacuuuc

SEQ ID NO: 3226927 - RNA, 16 nt, Human
uuuaaaaaacuuucua

SEQ ID NO: 3226928 - RNA, 21 nt, Human
uuuaaaaaauuaaucugggcc

SEQ ID NO: 3226929 - RNA, 20 nt, Human
augcagaguucagggaagau

SEQ ID NO: 3226930 - RNA, 11 nt, Human
uuuaaaaaacu

SEQ ID NO: 3226931 - RNA, 12 nt, Human
augcgugugugu

SEQ ID NO: 3226932 - RNA, 14 nt, Human
augcgcaggcuggc

SEQ ID NO: 3226933 - RNA, 18 nt, Human
augcgcaggcuggcccug

SEQ ID NO: 3226934 - RNA, 20 nt, Human
augcgcaggcuggcccugcc

SEQ ID NO: 3226935 - RNA, 22 nt, Human
augcgcaggcuggcccugcccu

SEQ ID NO: 3226936 - RNA, 13 nt, Human
augcgcaggcugg

SEQ ID NO: 3226937 - RNA, 15 nt, Human
augccucucucaggc

SEQ ID NO: 3226938 - RNA, 13 nt, Human
augccucucucag

SEQ ID NO: 3226939 - RNA, 14 nt, Human
augccucucucagg

SEQ ID NO: 3226940 - RNA, 20 nt, Human
augccaguccagaugugccu

SEQ ID NO: 3226941 - RNA, 13 nt, Human
augccaguauuuu

SEQ ID NO: 3226942 - RNA, 14 nt, Human
augccaguauuuuu

SEQ ID NO: 3226943 - RNA, 20 nt, Human
augccaguauuuuuaaaggc

SEQ ID NO: 3226944 - RNA, 22 nt, Human
augccaguauuuuuaaaggcau

SEQ ID NO: 3226945 - RNA, 13 nt, Human
augccaggggccu

SEQ ID NO: 3226946 - RNA, 21 nt, Human
uuuaaugaaagacuguacaaa

SEQ ID NO: 3226947 - RNA, 14 nt, Human
uuuaaggucuguuu

SEQ ID NO: 3226948 - RNA, 21 nt, Human
augccaugaggaacaaggcaa

SEQ ID NO: 3226949 - RNA, 16 nt, Human
augcccagccccuucu

SEQ ID NO: 3226950 - RNA, 15 nt, Human
augcccagccccuuc

SEQ ID NO: 3226951 - RNA, 17 nt, Human
augcccagccccuucug

SEQ ID NO: 3226952 - RNA, 21 nt, Human
augccccgucccccucuggcu

SEQ ID NO: 3226953 - RNA, 18 nt, Human
augccccgucccccucug

SEQ ID NO: 3226954 - RNA, 18 nt, Human
uuuaccugaagucuuugu

SEQ ID NO: 3226955 - RNA, 16 nt, Human
augcgugugugugugu

SEQ ID NO: 3226956 - RNA, 22 nt, Human
uuuacuccagguuauugcaaua

SEQ ID NO: 3226957 - RNA, 19 nt, Human
uuuaccucucugucaugug

SEQ ID NO: 3226958 - RNA, 16 nt, Human
uuuacugcagcuuugu

SEQ ID NO: 3226959 - RNA, 11 nt, Human
uuuacuuaaac

SEQ ID NO: 3226960 - RNA, 22 nt, Human
uuuacuguuugauauaccaaau

SEQ ID NO: 3226961 - RNA, 17 nt, Human
uuuacugugacuuuauu

SEQ ID NO: 3226962 - RNA, 18 nt, Human
uuuacugcauucuucuga

SEQ ID NO: 3226963 - RNA, 14 nt, Human
uuuacugcauucuu

SEQ ID NO: 3226964 - RNA, 14 nt, Human
uuuaguuauaaagg

SEQ ID NO: 3226965 - RNA, 20 nt, Human
uuuaguggccaucauuucug

SEQ ID NO: 3226966 - RNA, 22 nt, Human
uuuaguggacccugaaaugugu

SEQ ID NO: 3226967 - RNA, 13 nt, Human
uuuagugugguuu

SEQ ID NO: 3226968 - RNA, 21 nt, Human
uuuaguggacccugaaaugug

SEQ ID NO: 3226969 - RNA, 20 nt, Human
uuuaguggacccugaaaugu

SEQ ID NO: 3226970 - RNA, 19 nt, Human
uuuaguggacccugaaaug

SEQ ID NO: 3226971 - RNA, 17 nt, Human
uuuagucuuuagcuauu

SEQ ID NO: 3226972 - RNA, 13 nt, Human
uuuaguggaaaau

SEQ ID NO: 3226973 - RNA, 15 nt, Human
uuuaguggaaaauag

SEQ ID NO: 3226974 - RNA, 13 nt, Human
uuuagucuuuaua

SEQ ID NO: 3226975 - RNA, 18 nt, Human
uuuagggaguauucuaau

SEQ ID NO: 3226976 - RNA, 15 nt, Human
uuuagggaguauucu

SEQ ID NO: 3226977 - RNA, 20 nt, Human
uuuaggcauaugcuucuuua

SEQ ID NO: 3226978 - RNA, 19 nt, Human
uuuaggccaaucagaagcu

SEQ ID NO: 3226979 - RNA, 21 nt, Human
uuuaggcauaugcuucuuuaa

SEQ ID NO: 3226980 - RNA, 13 nt, Human
uuuacuucuuaua

SEQ ID NO: 3226981 - RNA, 14 nt, Human
uuuacuucuuauac

SEQ ID NO: 3226982 - RNA, 16 nt, Human
uuucaccuuuucagga

SEQ ID NO: 3226983 - RNA, 18 nt, Human
uuucaccuuuucaggaaa

SEQ ID NO: 3226984 - RNA, 21 nt, Human
uuucaccuuuucaggaaaaua

SEQ ID NO: 3226985 - RNA, 15 nt, Human
uuucacgauucauuu

SEQ ID NO: 3226986 - RNA, 16 nt, Human
uuucacgauucauuuu

SEQ ID NO: 3226987 - RNA, 16 nt, Human
uuucacuauaauguga

SEQ ID NO: 3226988 - RNA, 20 nt, Human
uuucacuauaaugugaaaug

SEQ ID NO: 3226989 - RNA, 21 nt, Human
uuucagaaagaaguggggaca

SEQ ID NO: 3226990 - RNA, 21 nt, Human
uuucacgucauaggaaguuag

SEQ ID NO: 3226991 - RNA, 22 nt, Human
uuucagaaauacagauaaauga

SEQ ID NO: 3226992 - RNA, 13 nt, Human
uuucagaaauaca

SEQ ID NO: 3226993 - RNA, 21 nt, Human
uuucagaaagccuuucauuuu

SEQ ID NO: 3226994 - RNA, 16 nt, Human
uuucagaaagccuuuc

SEQ ID NO: 3226995 - RNA, 15 nt, Human
uuucagaaagccuuu

SEQ ID NO: 3226996 - RNA, 15 nt, Human
uuucaccugcugcuu

SEQ ID NO: 3226997 - RNA, 14 nt, Human
uuucauccuuccca

SEQ ID NO: 3226998 - RNA, 14 nt, Human
uuucauccaugucc

SEQ ID NO: 3226999 - RNA, 14 nt, Human
uuucaugcuuuauc

SEQ ID NO: 3227000 - RNA, 13 nt, Human
uuucaugcuuuau

SEQ ID NO: 3227001 - RNA, 16 nt, Human
uuucauccuucccacu

SEQ ID NO: 3227002 - RNA, 16 nt, Human
uuucccuauuagagaa

SEQ ID NO: 3227003 - RNA, 18 nt, Human
uuuccauuuuauaaaugu

SEQ ID NO: 3227004 - RNA, 13 nt, Human
uuuccauuuuaua

SEQ ID NO: 3227005 - RNA, 20 nt, Human
uuuccauguaugcauaauaa

SEQ ID NO: 3227006 - RNA, 15 nt, Human
uuuccauguaugcau

SEQ ID NO: 3227007 - RNA, 14 nt, Human
uuuccauguaugca

SEQ ID NO: 3227008 - RNA, 16 nt, Human
uuucaugcuuuaucaa

SEQ ID NO: 3227009 - RNA, 20 nt, Human
augcuggcuguuggcugggg

SEQ ID NO: 3227010 - RNA, 19 nt, Human
augcuggcuguuggcuggg

SEQ ID NO: 3227011 - RNA, 13 nt, Human
augcuuaaauuuu

SEQ ID NO: 3227012 - RNA, 14 nt, Human
augcuuaaauuuua

SEQ ID NO: 3227013 - RNA, 16 nt, Human
augcuucucacugcca

SEQ ID NO: 3227014 - RNA, 20 nt, Human
augcuucucacugccaugcc

SEQ ID NO: 3227015 - RNA, 17 nt, Human
auggaagacagcucuua

SEQ ID NO: 3227016 - RNA, 18 nt, Human
auggaagacagcucuuau

SEQ ID NO: 3227017 - RNA, 14 nt, Human
auggaaggggcuga

SEQ ID NO: 3227018 - RNA, 20 nt, Human
auggaagcgguggucagaag

SEQ ID NO: 3227019 - RNA, 14 nt, Human
auggaagagagaaa

SEQ ID NO: 3227020 - RNA, 15 nt, Human
auggaagagagaaag

SEQ ID NO: 3227021 - RNA, 18 nt, Human
augcuggcuguuggcugg

SEQ ID NO: 3227022 - RNA, 12 nt, Human
augcuggcuggc

SEQ ID NO: 3227023 - RNA, 16 nt, Human
augcuggcuggccuug

SEQ ID NO: 3227024 - RNA, 23 nt, Human
augcuggcuggccuuguggucca

SEQ ID NO: 3227025 - RNA, 14 nt, Human
augcuccuggccca

SEQ ID NO: 3227026 - RNA, 23 nt, Human
augcuggagaaaaauaucuguaa

SEQ ID NO: 3227027 - RNA, 16 nt, Human
augcuggagaaaaaua

SEQ ID NO: 3227028 - RNA, 14 nt, Human
uuuaucagaauucu

SEQ ID NO: 3227029 - RNA, 14 nt, Human
uuuaucagauugcu

SEQ ID NO: 3227030 - RNA, 22 nt, Human
uuuaucagauugcuuuugugca

SEQ ID NO: 3227031 - RNA, 23 nt, Human
uuuaucagauugcuuuugugcau

SEQ ID NO: 3227032 - RNA, 19 nt, Human
uuuaucagggaaacuaaga

SEQ ID NO: 3227033 - RNA, 20 nt, Human
uuuaucagggaaacuaagau

SEQ ID NO: 3227034 - RNA, 21 nt, Human
aucugugaggggcucucucau

SEQ ID NO: 3227035 - RNA, 22 nt, Human
aucugugaggggcucucucaug

SEQ ID NO: 3227036 - RNA, 17 nt, Human
aucugucauuugagcag

SEQ ID NO: 3227037 - RNA, 12 nt, Human
aucugucauuug

SEQ ID NO: 3227038 - RNA, 23 nt, Human
aucugugccuuuuuuauaucuug

SEQ ID NO: 3227039 - RNA, 15 nt, Human
aucuguuuuuacgua

SEQ ID NO: 3227040 - RNA, 18 nt, Human
aucuguuuuuacguaugu

SEQ ID NO: 3227041 - RNA, 22 nt, Human
aucuuaauacuguuauucuuug

SEQ ID NO: 3227042 - RNA, 16 nt, Human
aucuugcucugcugac

SEQ ID NO: 3227043 - RNA, 15 nt, Human
aucuugcucugcuga

SEQ ID NO: 3227044 - RNA, 17 nt, Human
aucuuguuuugaaaaua

SEQ ID NO: 3227045 - RNA, 14 nt, Human
aucuuguucaggaa

SEQ ID NO: 3227046 - RNA, 15 nt, Human
aucuuguucaggaaa

SEQ ID NO: 3227047 - RNA, 17 nt, Human
aucuuguucaggaaaag

SEQ ID NO: 3227048 - RNA, 19 nt, Human
aucuuguucaggaaaaggu

SEQ ID NO: 3227049 - RNA, 17 nt, Human
aucuuggccuuacugua

SEQ ID NO: 3227050 - RNA, 16 nt, Human
aucuuggccuuacugu

SEQ ID NO: 3227051 - RNA, 18 nt, Human
aucuuggcagguaggaau

SEQ ID NO: 3227052 - RNA, 15 nt, Human
aucuuggagagcugg

SEQ ID NO: 3227053 - RNA, 19 nt, Human
aucuuggcccuguuaaggc

SEQ ID NO: 3227054 - RNA, 20 nt, Human
aucuuggcagguaggaauau

SEQ ID NO: 3227055 - RNA, 19 nt, Human
aucuuggcagguaggaaua

SEQ ID NO: 3227056 - RNA, 19 nt, Human
aucuuaaaagcuaucuuca

SEQ ID NO: 3227057 - RNA, 20 nt, Human
aucuuaaaagcuaucuucau

SEQ ID NO: 3227058 - RNA, 16 nt, Human
aucuuaagaaauaaau

SEQ ID NO: 3227059 - RNA, 13 nt, Human
aucuuaagaaaua

SEQ ID NO: 3227060 - RNA, 13 nt, Human
aucuuaauacugu

SEQ ID NO: 3227061 - RNA, 15 nt, Human
aucuuaauacuguua

SEQ ID NO: 3227062 - RNA, 14 nt, Human
aucuuaauacuguu

SEQ ID NO: 3227063 - RNA, 21 nt, Human
aucuuaauacuguuauucuuu

SEQ ID NO: 3227064 - RNA, 20 nt, Human
aucuuaauacuguuauucuu

SEQ ID NO: 3227065 - RNA, 18 nt, Human
aucuuaauacuguuauuc

SEQ ID NO: 3227066 - RNA, 17 nt, Human
aucuuaauacuguuauu

SEQ ID NO: 3227067 - RNA, 14 nt, Human
aucuugcucugcug

SEQ ID NO: 3227068 - RNA, 14 nt, Human
aucuuaauguauau

SEQ ID NO: 3227069 - RNA, 17 nt, Human
aucuuaauguauaucgu

SEQ ID NO: 3227070 - RNA, 13 nt, Human
aucuugcucugcu

SEQ ID NO: 3227071 - RNA, 11 nt, Human
uuggagccugc

SEQ ID NO: 3227072 - RNA, 15 nt, Human
uuggagcacaaaauu

SEQ ID NO: 3227073 - RNA, 21 nt, Human
uuggagcacaaaauucaaagc

SEQ ID NO: 3227074 - RNA, 15 nt, Human
uuggagccugcagag

SEQ ID NO: 3227075 - RNA, 11 nt, Human
uuggagcauug

SEQ ID NO: 3227076 - RNA, 12 nt, Human
uuggacuuuguu

SEQ ID NO: 3227077 - RNA, 14 nt, Human
uuggacuuuguuac

SEQ ID NO: 3227078 - RNA, 17 nt, Human
uuggaaaauaaauuauu

SEQ ID NO: 3227079 - RNA, 15 nt, Human
uuggaaaauaaauca

SEQ ID NO: 3227080 - RNA, 12 nt, Human
uuggaaaauaaa

SEQ ID NO: 3227081 - RNA, 17 nt, Human
uuggaaacacuaaaugu

SEQ ID NO: 3227082 - RNA, 16 nt, Human
uuggaaacacuaaaug

SEQ ID NO: 3227083 - RNA, 15 nt, Human
uuggaaacacuaaau

SEQ ID NO: 3227084 - RNA, 14 nt, Human
uuggaaacacuaaa

SEQ ID NO: 3227085 - RNA, 16 nt, Human
uugcuuuguaugcacu

SEQ ID NO: 3227086 - RNA, 17 nt, Human
uugcuuuuaaaacuacu

SEQ ID NO: 3227087 - RNA, 14 nt, Human
uugcuuuuaaaacu

SEQ ID NO: 3227088 - RNA, 15 nt, Human
uuggaaaaaauuugu

SEQ ID NO: 3227089 - RNA, 20 nt, Human
uuggaaaacgauuuaauuua

SEQ ID NO: 3227090 - RNA, 13 nt, Human
uugcuuuuaaaau

SEQ ID NO: 3227091 - RNA, 21 nt, Human
uugcuuuuaaaacuacuuagc

SEQ ID NO: 3227092 - RNA, 15 nt, Human
aucuuuaaaauacac

SEQ ID NO: 3227093 - RNA, 12 nt, Human
aucuuuaaaaua

SEQ ID NO: 3227094 - RNA, 11 nt, Human
aucuuuaauua

SEQ ID NO: 3227095 - RNA, 13 nt, Human
aucuuuaauuaaa

SEQ ID NO: 3227096 - RNA, 17 nt, Human
uugcuuuggaaguuuua

SEQ ID NO: 3227097 - RNA, 13 nt, Human
uugcuuuguaugc

SEQ ID NO: 3227098 - RNA, 23 nt, Human
uugcuucccuuuuuuccuuucca

SEQ ID NO: 3227099 - RNA, 19 nt, Human
uuguaaauuuaugugaugg

SEQ ID NO: 3227100 - RNA, 15 nt, Human
uuguaacaagaaaau

SEQ ID NO: 3227101 - RNA, 16 nt, Human
uugguuuuaugaugac

SEQ ID NO: 3227102 - RNA, 19 nt, Human
uugguuuuaugaugacgua

SEQ ID NO: 3227103 - RNA, 13 nt, Human
uuguaaauuguca

SEQ ID NO: 3227104 - RNA, 17 nt, Human
uuguaagaaauacugua

SEQ ID NO: 3227105 - RNA, 21 nt, Human
uuguaacauucuauuucaacu

SEQ ID NO: 3227106 - RNA, 14 nt, Human
uuguaagaaauacu

SEQ ID NO: 3227107 - RNA, 20 nt, Human
uuguaauuuaaggucuguuu

SEQ ID NO: 3227108 - RNA, 15 nt, Human
uuguaauauguaaau

SEQ ID NO: 3227109 - RNA, 14 nt, Human
uuguaauauguaaa

SEQ ID NO: 3227110 - RNA, 21 nt, Human
uuguaauauagaaaaaaacau

SEQ ID NO: 3227111 - RNA, 23 nt, Human
uuguaauaaacccuuaacuggca

SEQ ID NO: 3227112 - RNA, 15 nt, Human
uuguaauaauaaaga

SEQ ID NO: 3227113 - RNA, 16 nt, Human
augaaugucaguguga

SEQ ID NO: 3227114 - RNA, 18 nt, Human
augaaugucagugugacu

SEQ ID NO: 3227115 - RNA, 19 nt, Human
uugggugcugcuaauucuu

SEQ ID NO: 3227116 - RNA, 15 nt, Human
uugggugaucauuca

SEQ ID NO: 3227117 - RNA, 16 nt, Human
uugguuucucuucucc

SEQ ID NO: 3227118 - RNA, 12 nt, Human
uugguuuuauga

SEQ ID NO: 3227119 - RNA, 16 nt, Human
uugguuuuaaaauacu

SEQ ID NO: 3227120 - RNA, 13 nt, Human
uugguuuuaaaau

SEQ ID NO: 3227121 - RNA, 18 nt, Human
uuggugggugaaaggaau

SEQ ID NO: 3227122 - RNA, 22 nt, Human
uugguuuagcccaaguggagcc

SEQ ID NO: 3227123 - RNA, 18 nt, Human
uuggugucgggcaugaca

SEQ ID NO: 3227124 - RNA, 19 nt, Human
uuggugucgggcaugacac

SEQ ID NO: 3227125 - RNA, 17 nt, Human
uuggugucgggcaugac

SEQ ID NO: 3227126 - RNA, 18 nt, Human
uuggagccugcagagcug

SEQ ID NO: 3227127 - RNA, 13 nt, Human
uuggagcucugag

SEQ ID NO: 3227128 - RNA, 18 nt, Human
augaaauaacacagcagu

SEQ ID NO: 3227129 - RNA, 22 nt, Human
augaaccacaucuugcucugcu

SEQ ID NO: 3227130 - RNA, 23 nt, Human
augaaccacaucuugcucugcug

SEQ ID NO: 3227131 - RNA, 14 nt, Human
augaacacaaauua

SEQ ID NO: 3227132 - RNA, 13 nt, Human
augaacacaaauu

SEQ ID NO: 3227133 - RNA, 20 nt, Human
augaacacaaauuaugcuaa

SEQ ID NO: 3227134 - RNA, 16 nt, Human
augaacacaaauuaug

SEQ ID NO: 3227135 - RNA, 15 nt, Human
augaacacaaauuau

SEQ ID NO: 3227136 - RNA, 14 nt, Human
augaacaaaauuau

SEQ ID NO: 3227137 - RNA, 15 nt, Human
augaacaaaauuauu

SEQ ID NO: 3227138 - RNA, 16 nt, Human
augaacaaaauuauuu

SEQ ID NO: 3227139 - RNA, 17 nt, Human
augaacaaaauuauuug

SEQ ID NO: 3227140 - RNA, 19 nt, Human
augaacaaaauuauuugua

SEQ ID NO: 3227141 - RNA, 19 nt, Human
augaacaaagaccaauuuu

SEQ ID NO: 3227142 - RNA, 22 nt, Human
augaaauaggagggaaaccuuu

SEQ ID NO: 3227143 - RNA, 15 nt, Human
augaaauauauguga

SEQ ID NO: 3227144 - RNA, 17 nt, Human
augaaauauaugugaaa

SEQ ID NO: 3227145 - RNA, 13 nt, Human
augaagcaguauu

SEQ ID NO: 3227146 - RNA, 16 nt, Human
augaauccaacugcuu

SEQ ID NO: 3227147 - RNA, 17 nt, Human
augaaugaaacauuuug

SEQ ID NO: 3227148 - RNA, 15 nt, Human
augaagaaaauacuu

SEQ ID NO: 3227149 - RNA, 14 nt, Human
augaagaaaauacu

SEQ ID NO: 3227150 - RNA, 21 nt, Human
augaagaaaauacuuaaaugu

SEQ ID NO: 3227151 - RNA, 20 nt, Human
augaagaaaauacuuaaaug

SEQ ID NO: 3227152 - RNA, 19 nt, Human
augaagaaaauacuuaaau

SEQ ID NO: 3227153 - RNA, 17 nt, Human
augaagaaaauacuuaa

SEQ ID NO: 3227154 - RNA, 23 nt, Human
augaagaaaauacuuaaauguua

SEQ ID NO: 3227155 - RNA, 22 nt, Human
augaagaaaauacuuaaauguu

SEQ ID NO: 3227156 - RNA, 15 nt, Human
augaagaacauaaaa

SEQ ID NO: 3227157 - RNA, 22 nt, Human
aucugagagaggcuaaaauguu

SEQ ID NO: 3227158 - RNA, 21 nt, Human
aucugagagaggcuaaaaugu

SEQ ID NO: 3227159 - RNA, 17 nt, Human
aucugagaaugaacaaa

SEQ ID NO: 3227160 - RNA, 14 nt, Human
aucugagaaugaac

SEQ ID NO: 3227161 - RNA, 13 nt, Human
aucugagaaugaa

SEQ ID NO: 3227162 - RNA, 23 nt, Human
uugauguucuuucacccuuuucu

SEQ ID NO: 3227163 - RNA, 23 nt, Human
aucugagagaggcuaaaauguuu

SEQ ID NO: 3227164 - RNA, 15 nt, Human
uugauguugaugcaa

SEQ ID NO: 3227165 - RNA, 14 nt, Human
uugauguugaugca

SEQ ID NO: 3227166 - RNA, 16 nt, Human
uugauguugaugcaau

SEQ ID NO: 3227167 - RNA, 13 nt, Human
uugauguuuccuu

SEQ ID NO: 3227168 - RNA, 15 nt, Human
aucucuuucuaaaga

SEQ ID NO: 3227169 - RNA, 22 nt, Human
aucucuuucuaaagacaggaga

SEQ ID NO: 3227170 - RNA, 13 nt, Human
aucugaacauucu

SEQ ID NO: 3227171 - RNA, 13 nt, Human
aucugaagauugu

SEQ ID NO: 3227172 - RNA, 21 nt, Human
aucugaagauuguuuaucuag

SEQ ID NO: 3227173 - RNA, 20 nt, Human
aucugaagauuguuuaucua

SEQ ID NO: 3227174 - RNA, 16 nt, Human
aucugaagauuguuua

SEQ ID NO: 3227175 - RNA, 15 nt, Human
aucugaagauuguuu

SEQ ID NO: 3227176 - RNA, 14 nt, Human
aucugaagauuguu

SEQ ID NO: 3227177 - RNA, 23 nt, Human
aucucacacaugagcaucaggcc

SEQ ID NO: 3227178 - RNA, 12 nt, Human
aucucaaaauua

SEQ ID NO: 3227179 - RNA, 20 nt, Human
aucucaaauaggcuauuaaa

SEQ ID NO: 3227180 - RNA, 23 nt, Human
aucucaaauaggcuauuaaaaaa

SEQ ID NO: 3227181 - RNA, 17 nt, Human
aucucaaauuguaauua

SEQ ID NO: 3227182 - RNA, 19 nt, Human
aucucaaauuguaauuaau

SEQ ID NO: 3227183 - RNA, 18 nt, Human
aucucuugagccugggag

SEQ ID NO: 3227184 - RNA, 12 nt, Human
aucucacagcua

SEQ ID NO: 3227185 - RNA, 15 nt, Human
aucucacagcuaugc

SEQ ID NO: 3227186 - RNA, 14 nt, Human
aucucaacaugucu

SEQ ID NO: 3227187 - RNA, 16 nt, Human
aucucacacaugagca

SEQ ID NO: 3227188 - RNA, 20 nt, Human
uugcccaguacauuuaaauu

SEQ ID NO: 3227189 - RNA, 11 nt, Human
uugcccaggca

SEQ ID NO: 3227190 - RNA, 21 nt, Human
uugcccccaaacccccauucu

SEQ ID NO: 3227191 - RNA, 17 nt, Human
uugccccaacccuucuu

SEQ ID NO: 3227192 - RNA, 18 nt, Human
uugccccaacccuucuuc

SEQ ID NO: 3227193 - RNA, 15 nt, Human
uugcccaugauauaa

SEQ ID NO: 3227194 - RNA, 17 nt, Human
uugcccaggcuggagug

SEQ ID NO: 3227195 - RNA, 20 nt, Human
uugcccaugcugggcucccg

SEQ ID NO: 3227196 - RNA, 23 nt, Human
uugcccaggcuggcgugcagugg

SEQ ID NO: 3227197 - RNA, 14 nt, Human
uugcccaggcuggc

SEQ ID NO: 3227198 - RNA, 12 nt, Human
uugcccaggcug

SEQ ID NO: 3227199 - RNA, 11 nt, Human
uugcccaggcu

SEQ ID NO: 3227200 - RNA, 18 nt, Human
uugcccaggcaggucuug

SEQ ID NO: 3227201 - RNA, 16 nt, Human
uugcccaggcaggucu

SEQ ID NO: 3227202 - RNA, 14 nt, Human
uugcccaggcaggu

SEQ ID NO: 3227203 - RNA, 13 nt, Human
uugcccaggcagg

SEQ ID NO: 3227204 - RNA, 14 nt, Human
uugcaugaggcuag

SEQ ID NO: 3227205 - RNA, 12 nt, Human
uugcaugaggcu

SEQ ID NO: 3227206 - RNA, 17 nt, Human
uugcauguaaaagccua

SEQ ID NO: 3227207 - RNA, 24 nt, Human
uugccaaacauuaauguugauuuc

SEQ ID NO: 3227208 - RNA, 16 nt, Human
uugccaaaguacagaa

SEQ ID NO: 3227209 - RNA, 21 nt, Human
uugccaaaguacagaauuuga

SEQ ID NO: 3227210 - RNA, 21 nt, Human
uugccaaauaaaguuaaaagu

SEQ ID NO: 3227211 - RNA, 22 nt, Human
uugccaaauaaaguuaaaagua

SEQ ID NO: 3227212 - RNA, 21 nt, Human
uugccaaacauuaauguugau

SEQ ID NO: 3227213 - RNA, 15 nt, Human
uugccaagagcccgu

SEQ ID NO: 3227214 - RNA, 18 nt, Human
uugcaccacugcacucca

SEQ ID NO: 3227215 - RNA, 21 nt, Human
uugcaccacugcacuccagcc

SEQ ID NO: 3227216 - RNA, 13 nt, Human
uugcaaucuauaa

SEQ ID NO: 3227217 - RNA, 16 nt, Human
uugcaaucuauaauau

SEQ ID NO: 3227218 - RNA, 13 nt, Human
uugacauggaaau

SEQ ID NO: 3227219 - RNA, 16 nt, Human
uugacauggaaaugaa

SEQ ID NO: 3227220 - RNA, 15 nt, Human
uugacacugaaauaa

SEQ ID NO: 3227221 - RNA, 13 nt, Human
uugacaucaacug

SEQ ID NO: 3227222 - RNA, 16 nt, Human
uugacaucaacugcau

SEQ ID NO: 3227223 - RNA, 12 nt, Human
uugacagggcac

SEQ ID NO: 3227224 - RNA, 10 nt, Human
uugacagggc

SEQ ID NO: 3227225 - RNA, 19 nt, Human
uugacaggauuauuggaaa

SEQ ID NO: 3227226 - RNA, 22 nt, Human
aucccuucucuuccaggcagcc

SEQ ID NO: 3227227 - RNA, 21 nt, Human
aucccuucucuuccaggcagc

SEQ ID NO: 3227228 - RNA, 22 nt, Human
aucccuuccaccugcucugcug

SEQ ID NO: 3227229 - RNA, 17 nt, Human
aucccuucucuuccagg

SEQ ID NO: 3227230 - RNA, 15 nt, Human
aucccuucucuucca

SEQ ID NO: 3227231 - RNA, 14 nt, Human
aucccuucucuucc

SEQ ID NO: 3227232 - RNA, 13 nt, Human
aucccuucucuuc

SEQ ID NO: 3227233 - RNA, 19 nt, Human
aucccuuccaccugcucug

SEQ ID NO: 3227234 - RNA, 16 nt, Human
aucccuuccaccugcu

SEQ ID NO: 3227235 - RNA, 14 nt, Human
aucccuuccaccug

SEQ ID NO: 3227236 - RNA, 21 nt, Human
aucccuuaagaaugaguuucu

SEQ ID NO: 3227237 - RNA, 15 nt, Human
auccgaaaucagcag

SEQ ID NO: 3227238 - RNA, 17 nt, Human
uugaccaggcaccuccc

SEQ ID NO: 3227239 - RNA, 16 nt, Human
uugacuuuuuagaugu

SEQ ID NO: 3227240 - RNA, 12 nt, Human
uugacaggaggu

SEQ ID NO: 3227241 - RNA, 18 nt, Human
uugaccaguauaaaauua

SEQ ID NO: 3227242 - RNA, 19 nt, Human
uugaccaguauaaaauuac

SEQ ID NO: 3227243 - RNA, 16 nt, Human
uugagcagggcucagc

SEQ ID NO: 3227244 - RNA, 21 nt, Human
uugagcaguggccuacaaauc

SEQ ID NO: 3227245 - RNA, 22 nt, Human
uugagcaguggccuacaaauca

SEQ ID NO: 3227246 - RNA, 12 nt, Human
uugagcagggcu

SEQ ID NO: 3227247 - RNA, 14 nt, Human
uugagcagaauuca

SEQ ID NO: 3227248 - RNA, 11 nt, Human
uugagacagag

SEQ ID NO: 3227249 - RNA, 10 nt, Human
uugagacaga

SEQ ID NO: 3227250 - RNA, 15 nt, Human
aucucaaaacugcac

SEQ ID NO: 3227251 - RNA, 20 nt, Human
aucucaaaacugcacuguca

SEQ ID NO: 3227252 - RNA, 19 nt, Human
aucucaaaacugcacuguc

SEQ ID NO: 3227253 - RNA, 21 nt, Human
aucucaaauaacuaaaaggua

SEQ ID NO: 3227254 - RNA, 14 nt, Human
aucucaaauaacua

SEQ ID NO: 3227255 - RNA, 23 nt, Human
aucucaaauaacuaaaagguaug

SEQ ID NO: 3227256 - RNA, 17 nt, Human
aucuaggaagacuuugg

SEQ ID NO: 3227257 - RNA, 18 nt, Human
aucuaggaagacuuugga

SEQ ID NO: 3227258 - RNA, 19 nt, Human
aucuaggaagacuuuggaa

SEQ ID NO: 3227259 - RNA, 21 nt, Human
aucuagaucuuugugccaaac

SEQ ID NO: 3227260 - RNA, 10 nt, Human
aucuacugca

SEQ ID NO: 3227261 - RNA, 17 nt, Human
aucuagauguaaauuuu

SEQ ID NO: 3227262 - RNA, 13 nt, Human
aucuagauguaaa

SEQ ID NO: 3227263 - RNA, 15 nt, Human
aucuagauguaaauu

SEQ ID NO: 3227264 - RNA, 14 nt, Human
aucuagauguaaau

SEQ ID NO: 3227265 - RNA, 19 nt, Human
aucuagccagugaacauaa

SEQ ID NO: 3227266 - RNA, 19 nt, Human
aucuaccaacuuucaagaa

SEQ ID NO: 3227267 - RNA, 23 nt, Human
aucuaauauguaacaagccaccc

SEQ ID NO: 3227268 - RNA, 20 nt, Human
aucuaauauguaacaagcca

SEQ ID NO: 3227269 - RNA, 12 nt, Human
aucuaccaacuu

SEQ ID NO: 3227270 - RNA, 18 nt, Human
aucuaccaacuuucaaga

SEQ ID NO: 3227271 - RNA, 17 nt, Human
aucuaccaacuuucaag

SEQ ID NO: 3227272 - RNA, 16 nt, Human
aucuaccaacuuucaa

SEQ ID NO: 3227273 - RNA, 15 nt, Human
aucuaccaacuuuca

SEQ ID NO: 3227274 - RNA, 21 nt, Human
uugagugcugucuccauguuu

SEQ ID NO: 3227275 - RNA, 11 nt, Human
uugagugccuu

SEQ ID NO: 3227276 - RNA, 22 nt, Human
uugaguggggggaacgcccacu

SEQ ID NO: 3227277 - RNA, 16 nt, Human
aucagugucuuuccac

SEQ ID NO: 3227278 - RNA, 16 nt, Human
aucaguccuagaaugu

SEQ ID NO: 3227279 - RNA, 21 nt, Human
aucaguccuagaauguuucau

SEQ ID NO: 3227280 - RNA, 22 nt, Human
aucaguccuagaauguuucauu

SEQ ID NO: 3227281 - RNA, 23 nt, Human
aucaguccuagaauguuucauuu

SEQ ID NO: 3227282 - RNA, 19 nt, Human
aucauaaguauuuggaauu

SEQ ID NO: 3227283 - RNA, 18 nt, Human
aucauaaguauuuggaau

SEQ ID NO: 3227284 - RNA, 17 nt, Human
aucauaaguauuuggaa

SEQ ID NO: 3227285 - RNA, 14 nt, Human
aucauaaguauuug

SEQ ID NO: 3227286 - RNA, 19 nt, Human
aucauacuccuaugcuuua

SEQ ID NO: 3227287 - RNA, 18 nt, Human
aucauacuccuaugcuuu

SEQ ID NO: 3227288 - RNA, 17 nt, Human
aucauacuccuaugcuu

SEQ ID NO: 3227289 - RNA, 23 nt, Human
aucauaaguauuuggaauuagaa

SEQ ID NO: 3227290 - RNA, 15 nt, Human
aucagagguaucuua

SEQ ID NO: 3227291 - RNA, 14 nt, Human
aucauugaaaucuu

SEQ ID NO: 3227292 - RNA, 15 nt, Human
aucauugaaaucuuu

SEQ ID NO: 3227293 - RNA, 13 nt, Human
aucauugaaaucu

SEQ ID NO: 3227294 - RNA, 14 nt, Human
aucauuccuuuuua

SEQ ID NO: 3227295 - RNA, 15 nt, Human
aucauuccuuuuuau

SEQ ID NO: 3227296 - RNA, 20 nt, Human
aucauuccuuuuuauuuaua

SEQ ID NO: 3227297 - RNA, 21 nt, Human
aucauuccuuuuuauuuauau

SEQ ID NO: 3227298 - RNA, 18 nt, Human
aucauguuuacagaggac

SEQ ID NO: 3227299 - RNA, 23 nt, Human
aucauguuuacagaggacaguau

SEQ ID NO: 3227300 - RNA, 12 nt, Human
aucauguuucuu

SEQ ID NO: 3227301 - RNA, 23 nt, Human
aucauguuucuuugaucaugaau

SEQ ID NO: 3227302 - RNA, 16 nt, Human
aucauguuucuuugau

SEQ ID NO: 3227303 - RNA, 15 nt, Human
aucauguuucuuuga

SEQ ID NO: 3227304 - RNA, 14 nt, Human
aucauguuucuuug

SEQ ID NO: 3227305 - RNA, 17 nt, Human
aucaucacguauguuau

SEQ ID NO: 3227306 - RNA, 21 nt, Human
aucaucacguauguuauacaa

SEQ ID NO: 3227307 - RNA, 22 nt, Human
aucaucacguauguuauacaac

SEQ ID NO: 3227308 - RNA, 23 nt, Human
aucauauugguauauccuuuucu

SEQ ID NO: 3227309 - RNA, 16 nt, Human
aucauauuauacagac

SEQ ID NO: 3227310 - RNA, 15 nt, Human
aucauauuauacaga

SEQ ID NO: 3227311 - RNA, 13 nt, Human
uucuaggccuggg

SEQ ID NO: 3227312 - RNA, 20 nt, Human
uuccuuuuuauuuauaugua

SEQ ID NO: 3227313 - RNA, 18 nt, Human
uuccuuuuuauuuauaug

SEQ ID NO: 3227314 - RNA, 21 nt, Human
uucucaagggacguccuccaa

SEQ ID NO: 3227315 - RNA, 22 nt, Human
uucucagaaucucaaauaacua

SEQ ID NO: 3227316 - RNA, 19 nt, Human
uucucagaaucucaaauaa

SEQ ID NO: 3227317 - RNA, 13 nt, Human
uucucagaaucuc

SEQ ID NO: 3227318 - RNA, 20 nt, Human
uucucacacucuaacuguau

SEQ ID NO: 3227319 - RNA, 21 nt, Human
uucucacacucuaacuguaua

SEQ ID NO: 3227320 - RNA, 22 nt, Human
uucucacacucuaacuguauau

SEQ ID NO: 3227321 - RNA, 23 nt, Human
uucucagaaucucaaauaacuaa

SEQ ID NO: 3227322 - RNA, 19 nt, Human
uucucaguuuuucuuaaua

SEQ ID NO: 3227323 - RNA, 18 nt, Human
uucucaguuuuucuuaau

SEQ ID NO: 3227324 - RNA, 16 nt, Human
uucucaguuuuucuua

SEQ ID NO: 3227325 - RNA, 15 nt, Human
uucucaguuuuucuu

SEQ ID NO: 3227326 - RNA, 14 nt, Human
uucucaguuuuucu

SEQ ID NO: 3227327 - RNA, 12 nt, Human
uucucauauuug

SEQ ID NO: 3227328 - RNA, 16 nt, Human
aucagaaauaauaaaa

SEQ ID NO: 3227329 - RNA, 14 nt, Human
aucagaacagcugu

SEQ ID NO: 3227330 - RNA, 13 nt, Human
aucagaacagcug

SEQ ID NO: 3227331 - RNA, 15 nt, Human
aucagaacagcuguu

SEQ ID NO: 3227332 - RNA, 17 nt, Human
aucccaggauguacaag

SEQ ID NO: 3227333 - RNA, 13 nt, Human
auccauuaauuua

SEQ ID NO: 3227334 - RNA, 15 nt, Human
auccauuaauuuaaa

SEQ ID NO: 3227335 - RNA, 23 nt, Human
auccauggggucucucacagaca

SEQ ID NO: 3227336 - RNA, 22 nt, Human
auccauggggucucucacagac

SEQ ID NO: 3227337 - RNA, 19 nt, Human
auccauggggucucucaca

SEQ ID NO: 3227338 - RNA, 20 nt, Human
aucauuucugcaucagcugc

SEQ ID NO: 3227339 - RNA, 11 nt, Human
aucauuucugg

SEQ ID NO: 3227340 - RNA, 19 nt, Human
aucauuuguucaaagcugu

SEQ ID NO: 3227341 - RNA, 14 nt, Human
aucauuugaguuca

SEQ ID NO: 3227342 - RNA, 11 nt, Human
aucauuugagu

SEQ ID NO: 3227343 - RNA, 12 nt, Human
aucauuuguuca

SEQ ID NO: 3227344 - RNA, 16 nt, Human
auccagguucagcuug

SEQ ID NO: 3227345 - RNA, 15 nt, Human
auccagguucagcuu

SEQ ID NO: 3227346 - RNA, 17 nt, Human
auccaggguggugguga

SEQ ID NO: 3227347 - RNA, 15 nt, Human
aucccuccuuaagag

SEQ ID NO: 3227348 - RNA, 17 nt, Human
aucccuccuuaagagau

SEQ ID NO: 3227349 - RNA, 16 nt, Human
aucccauaugccuggg

SEQ ID NO: 3227350 - RNA, 12 nt, Human
aucccugcucac

SEQ ID NO: 3227351 - RNA, 15 nt, Human
aucccugcucacugc

SEQ ID NO: 3227352 - RNA, 13 nt, Human
aucccugcucacu

SEQ ID NO: 3227353 - RNA, 20 nt, Human
aucccugcucacugcagccu

SEQ ID NO: 3227354 - RNA, 16 nt, Human
aucccugcucacugca

SEQ ID NO: 3227355 - RNA, 14 nt, Human
aucccuuaagaaug

SEQ ID NO: 3227356 - RNA, 12 nt, Human
aucccuuaagaa

SEQ ID NO: 3227357 - RNA, 15 nt, Human
aucccuguguuaauu

SEQ ID NO: 3227358 - RNA, 20 nt, Human
aucccuguguuaauuuaagu

SEQ ID NO: 3227359 - RNA, 21 nt, Human
uucugccacccugcugagucu

SEQ ID NO: 3227360 - RNA, 23 nt, Human
uucugccgcagcccugcagaggg

SEQ ID NO: 3227361 - RNA, 16 nt, Human
uucugccgcagcccug

SEQ ID NO: 3227362 - RNA, 22 nt, Human
uucugccagauguccuaauggu

SEQ ID NO: 3227363 - RNA, 22 nt, Human
uucugggacacaguucaauucu

SEQ ID NO: 3227364 - RNA, 11 nt, Human
uucugggacac

SEQ ID NO: 3227365 - RNA, 10 nt, Human
uucugggaca

SEQ ID NO: 3227366 - RNA, 15 nt, Human
uucugccucugaugu

SEQ ID NO: 3227367 - RNA, 23 nt, Human
uucugccugaggggcagccugcc

SEQ ID NO: 3227368 - RNA, 21 nt, Human
uucugccugaggggcagccug

SEQ ID NO: 3227369 - RNA, 22 nt, Human
uucugccucugauguauuuugu

SEQ ID NO: 3227370 - RNA, 16 nt, Human
uucugccucugaugua

SEQ ID NO: 3227371 - RNA, 23 nt, Human
uucuguaauaacuagaacaaaua

SEQ ID NO: 3227372 - RNA, 20 nt, Human
uucuguaauauuuacaaugu

SEQ ID NO: 3227373 - RNA, 21 nt, Human
uucuguaauauuuacaaugua

SEQ ID NO: 3227374 - RNA, 23 nt, Human
uucuguaauauuuacaauguauu

SEQ ID NO: 3227375 - RNA, 15 nt, Human
uucugggguuuuucu

SEQ ID NO: 3227376 - RNA, 23 nt, Human
uucugggaauguauaguauuuga

SEQ ID NO: 3227377 - RNA, 11 nt, Human
uucugguaauc

SEQ ID NO: 3227378 - RNA, 13 nt, Human
uucucuucacuca

SEQ ID NO: 3227379 - RNA, 12 nt, Human
uucucuuagaaa

SEQ ID NO: 3227380 - RNA, 15 nt, Human
uucugaaagggacgc

SEQ ID NO: 3227381 - RNA, 19 nt, Human
uucugaaagagucuuucuu

SEQ ID NO: 3227382 - RNA, 12 nt, Human
uucugaaagagu

SEQ ID NO: 3227383 - RNA, 22 nt, Human
uucucuuagaaaaggugauaaa

SEQ ID NO: 3227384 - RNA, 19 nt, Human
aucauugaaaucuuuuugc

SEQ ID NO: 3227385 - RNA, 23 nt, Human
aucauuccuuuuuauuuauaugu

SEQ ID NO: 3227386 - RNA, 16 nt, Human
uucugcaucagcugcu

SEQ ID NO: 3227387 - RNA, 16 nt, Human
uucugaaccugucuuu

SEQ ID NO: 3227388 - RNA, 23 nt, Human
uucugcaucagcugcugaaacaa

SEQ ID NO: 3227389 - RNA, 23 nt, Human
uucugaacuuggcgcugccccug

SEQ ID NO: 3227390 - RNA, 20 nt, Human
auauuuguaaauuuauguga

SEQ ID NO: 3227391 - RNA, 15 nt, Human
auauuuguacuuucu

SEQ ID NO: 3227392 - RNA, 14 nt, Human
auauuuguacuuuc

SEQ ID NO: 3227393 - RNA, 21 nt, Human
auauuuguacuuucuguuaaa

SEQ ID NO: 3227394 - RNA, 20 nt, Human
auauuuguacuuucuguuaa

SEQ ID NO: 3227395 - RNA, 19 nt, Human
auauuuguacuuucuguua

SEQ ID NO: 3227396 - RNA, 17 nt, Human
auauuuguacuuucugu

SEQ ID NO: 3227397 - RNA, 12 nt, Human
auauuucuucaa

SEQ ID NO: 3227398 - RNA, 13 nt, Human
auauuucuucaaa

SEQ ID NO: 3227399 - RNA, 14 nt, Human
auauuucuucaaau

SEQ ID NO: 3227400 - RNA, 15 nt, Human
auauuucuucaaaua

SEQ ID NO: 3227401 - RNA, 18 nt, Human
auauuucuucaaauaucu

SEQ ID NO: 3227402 - RNA, 22 nt, Human
auauuuguaucacaaaucuuaa

SEQ ID NO: 3227403 - RNA, 13 nt, Human
auauuuguaugau

SEQ ID NO: 3227404 - RNA, 19 nt, Human
auauuuguauuuauucuuu

SEQ ID NO: 3227405 - RNA, 18 nt, Human
auauuuguauuuauucuu

SEQ ID NO: 3227406 - RNA, 17 nt, Human
auauuuguauuuauucu

SEQ ID NO: 3227407 - RNA, 12 nt, Human
auauuuuaacuu

SEQ ID NO: 3227408 - RNA, 14 nt, Human
auauuuuaaacaga

SEQ ID NO: 3227409 - RNA, 17 nt, Human
auauuuguguguucacu

SEQ ID NO: 3227410 - RNA, 23 nt, Human
auauuugugugcuaaacguguau

SEQ ID NO: 3227411 - RNA, 22 nt, Human
auauuugugugcuaaacgugua

SEQ ID NO: 3227412 - RNA, 16 nt, Human
auauuugugugcuaaa

SEQ ID NO: 3227413 - RNA, 11 nt, Human
auauuugugua

SEQ ID NO: 3227414 - RNA, 14 nt, Human
auauuuguuuaguu

SEQ ID NO: 3227415 - RNA, 23 nt, Human
auauuuguuuaguucagcaaaac

SEQ ID NO: 3227416 - RNA, 17 nt, Human
auauuuuaaaauaaacu

SEQ ID NO: 3227417 - RNA, 20 nt, Human
auauuuuaaaaucuccuaaa

SEQ ID NO: 3227418 - RNA, 19 nt, Human
auauugcugaagaaucuac

SEQ ID NO: 3227419 - RNA, 21 nt, Human
auauugcugaagaaucuacuu

SEQ ID NO: 3227420 - RNA, 20 nt, Human
auauuguguugacuuuauaa

SEQ ID NO: 3227421 - RNA, 17 nt, Human
auauugcugauggugca

SEQ ID NO: 3227422 - RNA, 17 nt, Human
auauugccauuaugcuu

SEQ ID NO: 3227423 - RNA, 20 nt, Human
auauugaaaggcaaacauuu

SEQ ID NO: 3227424 - RNA, 17 nt, Human
auauugcacaauuauaa

SEQ ID NO: 3227425 - RNA, 14 nt, Human
auauuuaaaacuuu

SEQ ID NO: 3227426 - RNA, 20 nt, Human
auauuguuuucaguguacau

SEQ ID NO: 3227427 - RNA, 22 nt, Human
auauuuaaaaacaaaaggcaau

SEQ ID NO: 3227428 - RNA, 19 nt, Human
auauuuaaaaacaaaaggc

SEQ ID NO: 3227429 - RNA, 17 nt, Human
auauuguuuucagugua

SEQ ID NO: 3227430 - RNA, 12 nt, Human
auauuguuaagg

SEQ ID NO: 3227431 - RNA, 20 nt, Human
auauucuuuguuaauuugga

SEQ ID NO: 3227432 - RNA, 14 nt, Human
auauucuuuguuaa

SEQ ID NO: 3227433 - RNA, 22 nt, Human
auauucuuccuggggcccaaau

SEQ ID NO: 3227434 - RNA, 14 nt, Human
auauugaaaauuga

SEQ ID NO: 3227435 - RNA, 16 nt, Human
auauugaaaauugaaa

SEQ ID NO: 3227436 - RNA, 20 nt, Human
auauugaaaauugaaaagua

SEQ ID NO: 3227437 - RNA, 21 nt, Human
auauugaaaauugaaaaguac

SEQ ID NO: 3227438 - RNA, 23 nt, Human
auauugaaaauugaaaaguacaa

SEQ ID NO: 3227439 - RNA, 16 nt, Human
auauucuguuggccag

SEQ ID NO: 3227440 - RNA, 19 nt, Human
auauucucuguacauauua

SEQ ID NO: 3227441 - RNA, 16 nt, Human
auauucucuguacaua

SEQ ID NO: 3227442 - RNA, 15 nt, Human
auauucucuguacau

SEQ ID NO: 3227443 - RNA, 12 nt, Human
auauucucugua

SEQ ID NO: 3227444 - RNA, 14 nt, Human
auauucucuguaca

SEQ ID NO: 3227445 - RNA, 13 nt, Human
auauucucuguac

SEQ ID NO: 3227446 - RNA, 20 nt, Human
auauuccagguuuaaguaga

SEQ ID NO: 3227447 - RNA, 16 nt, Human
auauguuuccuucccu

SEQ ID NO: 3227448 - RNA, 18 nt, Human
auauguuuuaagaggcag

SEQ ID NO: 3227449 - RNA, 20 nt, Human
auauguuuuaagaggcaggg

SEQ ID NO: 3227450 - RNA, 17 nt, Human
auauguuuccuucccuc

SEQ ID NO: 3227451 - RNA, 23 nt, Human
uucauguccugugucaguuuaug

SEQ ID NO: 3227452 - RNA, 22 nt, Human
uucauguccugugucaguuuau

SEQ ID NO: 3227453 - RNA, 22 nt, Human
uucaugugggaucccaucuuuu

SEQ ID NO: 3227454 - RNA, 20 nt, Human
uucaugugggaucccaucuu

SEQ ID NO: 3227455 - RNA, 17 nt, Human
uucauguucccacuuca

SEQ ID NO: 3227456 - RNA, 22 nt, Human
auauuaaggaagacaaugugaa

SEQ ID NO: 3227457 - RNA, 24 nt, Human
auauuaagaaagacuaucuaaaug

SEQ ID NO: 3227458 - RNA, 22 nt, Human
auauuaagaaagacuaucuaaa

SEQ ID NO: 3227459 - RNA, 23 nt, Human
auauuaagcaugacagaaaauau

SEQ ID NO: 3227460 - RNA, 20 nt, Human
auauuaaguaagucucaagg

SEQ ID NO: 3227461 - RNA, 20 nt, Human
auauuaagcaugacagaaaa

SEQ ID NO: 3227462 - RNA, 19 nt, Human
aucaauuuuucuuauuuca

SEQ ID NO: 3227463 - RNA, 12 nt, Human
aucacaaaugac

SEQ ID NO: 3227464 - RNA, 13 nt, Human
aucacaaaugacu

SEQ ID NO: 3227465 - RNA, 11 nt, Human
aucacaaauga

SEQ ID NO: 3227466 - RNA, 20 nt, Human
aucacaaaugacuuuauuau

SEQ ID NO: 3227467 - RNA, 14 nt, Human
aucacaaaugacuu

SEQ ID NO: 3227468 - RNA, 15 nt, Human
aucacaaaugacuuu

SEQ ID NO: 3227469 - RNA, 16 nt, Human
aucacaaaugacuuua

SEQ ID NO: 3227470 - RNA, 19 nt, Human
aucacaaaugacuuuauua

SEQ ID NO: 3227471 - RNA, 19 nt, Human
aucacggcucacugcagcc

SEQ ID NO: 3227472 - RNA, 22 nt, Human
aucacggcucacugcagccuca

SEQ ID NO: 3227473 - RNA, 17 nt, Human
aucacguuaaaguagga

SEQ ID NO: 3227474 - RNA, 23 nt, Human
uuccuuuucccaggaaagaagca

SEQ ID NO: 3227475 - RNA, 22 nt, Human
uuccuuuuaaaacacuuccaua

SEQ ID NO: 3227476 - RNA, 21 nt, Human
uuccuuuuaaaacacuuccau

SEQ ID NO: 3227477 - RNA, 20 nt, Human
uuccuuuuaaaacacuucca

SEQ ID NO: 3227478 - RNA, 16 nt, Human
aucacuguuuagauuu

SEQ ID NO: 3227479 - RNA, 15 nt, Human
aucacuguuuagauu

SEQ ID NO: 3227480 - RNA, 20 nt, Human
aucacuguguauauuugauu

SEQ ID NO: 3227481 - RNA, 14 nt, Human
aucacuguuuagau

SEQ ID NO: 3227482 - RNA, 22 nt, Human
aucacugugcaguugcuguuua

SEQ ID NO: 3227483 - RNA, 15 nt, Human
aucacuguguauauu

SEQ ID NO: 3227484 - RNA, 17 nt, Human
aucacuguguauauuug

SEQ ID NO: 3227485 - RNA, 18 nt, Human
aucacuguguauauuuga

SEQ ID NO: 3227486 - RNA, 19 nt, Human
aucacuguguauauuugau

SEQ ID NO: 3227487 - RNA, 17 nt, Human
aucacuggcaugguggu

SEQ ID NO: 3227488 - RNA, 16 nt, Human
aucacuggcauggugg

SEQ ID NO: 3227489 - RNA, 12 nt, Human
aucaaguauuac

SEQ ID NO: 3227490 - RNA, 20 nt, Human
aucaaguauuacuaaauuga

SEQ ID NO: 3227491 - RNA, 21 nt, Human
aucaaguauuacuaaauugac

SEQ ID NO: 3227492 - RNA, 14 nt, Human
aucaaguauuauaa

SEQ ID NO: 3227493 - RNA, 23 nt, Human
aucaauaugcagaauggcauuug

SEQ ID NO: 3227494 - RNA, 15 nt, Human
aucaauaugcagaau

SEQ ID NO: 3227495 - RNA, 13 nt, Human
aucaauaguugaa

SEQ ID NO: 3227496 - RNA, 14 nt, Human
aucaauaguugaau

SEQ ID NO: 3227497 - RNA, 17 nt, Human
aucaauaguugaauuag

SEQ ID NO: 3227498 - RNA, 13 nt, Human
auauuuuguaaau

SEQ ID NO: 3227499 - RNA, 19 nt, Human
auauuuuguaaaauguauu

SEQ ID NO: 3227500 - RNA, 20 nt, Human
auauuuuguaaaauguauua

SEQ ID NO: 3227501 - RNA, 21 nt, Human
aucaagagccuuaaaacauca

SEQ ID NO: 3227502 - RNA, 15 nt, Human
aucaagagccuuaaa

SEQ ID NO: 3227503 - RNA, 16 nt, Human
aucaagagccuuaaaa

SEQ ID NO: 3227504 - RNA, 18 nt, Human
aucaagagccuuaaaaca

SEQ ID NO: 3227505 - RNA, 16 nt, Human
auauuuuguaugcaag

SEQ ID NO: 3227506 - RNA, 14 nt, Human
auauuuuguaugca

SEQ ID NO: 3227507 - RNA, 14 nt, Human
aucaagagccuuaa

SEQ ID NO: 3227508 - RNA, 17 nt, Human
auauuuuaacuccacug

SEQ ID NO: 3227509 - RNA, 15 nt, Human
auauuuuauauaaag

SEQ ID NO: 3227510 - RNA, 22 nt, Human
auauuuuauauaaaguauucuu

SEQ ID NO: 3227511 - RNA, 15 nt, Human
auauuuuauuucaau

SEQ ID NO: 3227512 - RNA, 17 nt, Human
auauuuuauuucaaugu

SEQ ID NO: 3227513 - RNA, 19 nt, Human
auauuuuauuucaauguaa

SEQ ID NO: 3227514 - RNA, 20 nt, Human
auauuuuauuucaauguaau

SEQ ID NO: 3227515 - RNA, 21 nt, Human
auauuuuauuucaauguaauu

SEQ ID NO: 3227516 - RNA, 13 nt, Human
uuccuaauccucu

SEQ ID NO: 3227517 - RNA, 15 nt, Human
uuccuaauccucuag

SEQ ID NO: 3227518 - RNA, 14 nt, Human
auauuuuauuuuua

SEQ ID NO: 3227519 - RNA, 20 nt, Human
auauuuuauuuuuagaauuu

SEQ ID NO: 3227520 - RNA, 19 nt, Human
uuccucuuagaagaauauu

SEQ ID NO: 3227521 - RNA, 21 nt, Human
uuccucuuagaagaauauugu

SEQ ID NO: 3227522 - RNA, 22 nt, Human
uuccucuuagaagaauauugua

SEQ ID NO: 3227523 - RNA, 12 nt, Human
uuccucugcucc

SEQ ID NO: 3227524 - RNA, 11 nt, Human
uuccucugcuc

SEQ ID NO: 3227525 - RNA, 22 nt, Human
uuccucugcuaaauugauguug

SEQ ID NO: 3227526 - RNA, 21 nt, Human
uuccucugcucccccuuuucc

SEQ ID NO: 3227527 - RNA, 14 nt, Human
uuccucugcucccc

SEQ ID NO: 3227528 - RNA, 13 nt, Human
uuccucugcuccc

SEQ ID NO: 3227529 - RNA, 21 nt, Human
uuccuccuucacuguuucauc

SEQ ID NO: 3227530 - RNA, 15 nt, Human
uuccucgcuucuuuc

SEQ ID NO: 3227531 - RNA, 13 nt, Human
uuccucgcuucuu

SEQ ID NO: 3227532 - RNA, 20 nt, Human
uuccuaaucacucagagcag

SEQ ID NO: 3227533 - RNA, 11 nt, Human
uuccucuuucc

SEQ ID NO: 3227534 - RNA, 15 nt, Human
uuccucuugaaccag

SEQ ID NO: 3227535 - RNA, 13 nt, Human
uuccucuugaacc

SEQ ID NO: 3227536 - RNA, 20 nt, Human
uuccugggcacacgcugcuc

SEQ ID NO: 3227537 - RNA, 19 nt, Human
uuccugggcacacgcugcu

SEQ ID NO: 3227538 - RNA, 16 nt, Human
uuccugggcacacgcu

SEQ ID NO: 3227539 - RNA, 19 nt, Human
uuccuggggcauccauggg

SEQ ID NO: 3227540 - RNA, 18 nt, Human
uuccuggggcccaaaugc

SEQ ID NO: 3227541 - RNA, 22 nt, Human
uuccugggcacacgcugcucug

SEQ ID NO: 3227542 - RNA, 11 nt, Human
uuccugugucu

SEQ ID NO: 3227543 - RNA, 17 nt, Human
uuccuguucccaugaga

SEQ ID NO: 3227544 - RNA, 11 nt, Human
uuccuucagug

SEQ ID NO: 3227545 - RNA, 14 nt, Human
uuccuucagugccu

SEQ ID NO: 3227546 - RNA, 20 nt, Human
auauuuucaacgcagcccug

SEQ ID NO: 3227547 - RNA, 19 nt, Human
auauuuucaacgcagcccu

SEQ ID NO: 3227548 - RNA, 19 nt, Human
auagcucaggugucccugc

SEQ ID NO: 3227549 - RNA, 12 nt, Human
auagcugggacu

SEQ ID NO: 3227550 - RNA, 21 nt, Human
auagcucaggugucccugcac

SEQ ID NO: 3227551 - RNA, 20 nt, Human
auagcucaggugucccugca

SEQ ID NO: 3227552 - RNA, 22 nt, Human
auagcucaggugucccugcacu

SEQ ID NO: 3227553 - RNA, 12 nt, Human
auagcgugugua

SEQ ID NO: 3227554 - RNA, 15 nt, Human
auagcguguguagau

SEQ ID NO: 3227555 - RNA, 18 nt, Human
auagccugccucuucucu

SEQ ID NO: 3227556 - RNA, 15 nt, Human
auaagauauuuuauu

SEQ ID NO: 3227557 - RNA, 20 nt, Human
auaagauauuuuauuuugaa

SEQ ID NO: 3227558 - RNA, 17 nt, Human
auaagauaaaugugcug

SEQ ID NO: 3227559 - RNA, 13 nt, Human
auaagauaaaugu

SEQ ID NO: 3227560 - RNA, 22 nt, Human
auaagagcuuccaauuuuccuu

SEQ ID NO: 3227561 - RNA, 16 nt, Human
auaacuuuagaaauaa

SEQ ID NO: 3227562 - RNA, 22 nt, Human
uuauuuaaugaaagacuguaca

SEQ ID NO: 3227563 - RNA, 18 nt, Human
uuauuuaaugaaagacug

SEQ ID NO: 3227564 - RNA, 14 nt, Human
uuauuuaaauuuua

SEQ ID NO: 3227565 - RNA, 21 nt, Human
uuauuuaaaauguaaaaagga

SEQ ID NO: 3227566 - RNA, 17 nt, Human
uuauuguuuaaaaucau

SEQ ID NO: 3227567 - RNA, 15 nt, Human
auagcuguacuucuu

SEQ ID NO: 3227568 - RNA, 22 nt, Human
auagcuguacuucuugaauaua

SEQ ID NO: 3227569 - RNA, 17 nt, Human
auagcugggacuacagg

SEQ ID NO: 3227570 - RNA, 16 nt, Human
uuauuuaguuccuuga

SEQ ID NO: 3227571 - RNA, 15 nt, Human
uuauuuaguauuuau

SEQ ID NO: 3227572 - RNA, 13 nt, Human
uuauuuauaugua

SEQ ID NO: 3227573 - RNA, 14 nt, Human
uuauuuauauguau

SEQ ID NO: 3227574 - RNA, 11 nt, Human
uuauuuacaag

SEQ ID NO: 3227575 - RNA, 17 nt, Human
uuauuuacaagaagaac

SEQ ID NO: 3227576 - RNA, 17 nt, Human
uuauuuagcaccaggga

SEQ ID NO: 3227577 - RNA, 15 nt, Human
uuauuuacugcuagu

SEQ ID NO: 3227578 - RNA, 22 nt, Human
uuauuuauucugggaauguaua

SEQ ID NO: 3227579 - RNA, 12 nt, Human
uuauuuauucug

SEQ ID NO: 3227580 - RNA, 17 nt, Human
uuauuuauauuuauuga

SEQ ID NO: 3227581 - RNA, 15 nt, Human
uuauuuauauguaug

SEQ ID NO: 3227582 - RNA, 16 nt, Human
uuauuuauauguaugu

SEQ ID NO: 3227583 - RNA, 15 nt, Human
uuauuuauauuuauu

SEQ ID NO: 3227584 - RNA, 16 nt, Human
uuauuuauauuuauug

SEQ ID NO: 3227585 - RNA, 12 nt, Human
uuauuucaauau

SEQ ID NO: 3227586 - RNA, 12 nt, Human
uuauuucaaugu

SEQ ID NO: 3227587 - RNA, 15 nt, Human
uuauuucaauguaau

SEQ ID NO: 3227588 - RNA, 16 nt, Human
uuauuucaauguaauu

SEQ ID NO: 3227589 - RNA, 18 nt, Human
uuauuucaauguaauuaa

SEQ ID NO: 3227590 - RNA, 24 nt, Human
uuauuucaauguaauuaaacuguu

SEQ ID NO: 3227591 - RNA, 20 nt, Human
uuauuucaucauauuauaca

SEQ ID NO: 3227592 - RNA, 19 nt, Human
uuauuucccccauuuuucc

SEQ ID NO: 3227593 - RNA, 22 nt, Human
uucaccacaugugcacaugcac

SEQ ID NO: 3227594 - RNA, 14 nt, Human
uucacauuuagaaa

SEQ ID NO: 3227595 - RNA, 15 nt, Human
uucaccacagacuuu

SEQ ID NO: 3227596 - RNA, 14 nt, Human
uucaccacagacuu

SEQ ID NO: 3227597 - RNA, 23 nt, Human
uucaccaguacauucucaguuuu

SEQ ID NO: 3227598 - RNA, 22 nt, Human
uucaccaguacauucucaguuu

SEQ ID NO: 3227599 - RNA, 14 nt, Human
uucaauaaaguuug

SEQ ID NO: 3227600 - RNA, 13 nt, Human
uucaauaaaguuu

SEQ ID NO: 3227601 - RNA, 14 nt, Human
auaggcaaauuaau

SEQ ID NO: 3227602 - RNA, 22 nt, Human
auaggcaccuaccaccacgccc

SEQ ID NO: 3227603 - RNA, 17 nt, Human
auaggagggaaaccuuu

SEQ ID NO: 3227604 - RNA, 23 nt, Human
auaggaaguuagccuuuaucuac

SEQ ID NO: 3227605 - RNA, 22 nt, Human
auaggaaguuagccuuuaucua

SEQ ID NO: 3227606 - RNA, 21 nt, Human
auaggaaguuagccuuuaucu

SEQ ID NO: 3227607 - RNA, 19 nt, Human
auaggaaggucauuuccau

SEQ ID NO: 3227608 - RNA, 19 nt, Human
auaggaugggcuucugugc

SEQ ID NO: 3227609 - RNA, 23 nt, Human
auaggcccaaccaccagaugaga

SEQ ID NO: 3227610 - RNA, 15 nt, Human
auaggcuuuuuaauc

SEQ ID NO: 3227611 - RNA, 22 nt, Human
auagggcccaugggagggagcu

SEQ ID NO: 3227612 - RNA, 21 nt, Human
auaggaauugacccacaagaa

SEQ ID NO: 3227613 - RNA, 13 nt, Human
auaggaagacaca

SEQ ID NO: 3227614 - RNA, 15 nt, Human
auagcuuuauuucuu

SEQ ID NO: 3227615 - RNA, 17 nt, Human
auaggaaggucauuucc

SEQ ID NO: 3227616 - RNA, 15 nt, Human
auaggaaggucauuu

SEQ ID NO: 3227617 - RNA, 18 nt, Human
auagcuguucuaauggau

SEQ ID NO: 3227618 - RNA, 13 nt, Human
uucaccauucgua

SEQ ID NO: 3227619 - RNA, 22 nt, Human
uucaccauguuggccaggcugc

SEQ ID NO: 3227620 - RNA, 22 nt, Human
uucaccauguuggccaggcugg

SEQ ID NO: 3227621 - RNA, 15 nt, Human
uucaaggauccugag

SEQ ID NO: 3227622 - RNA, 14 nt, Human
uucaagaaaugaag

SEQ ID NO: 3227623 - RNA, 11 nt, Human
uucaagaaaug

SEQ ID NO: 3227624 - RNA, 16 nt, Human
uucaaggauccugagc

SEQ ID NO: 3227625 - RNA, 18 nt, Human
uucaaggauccugagcca

SEQ ID NO: 3227626 - RNA, 19 nt, Human
uucaaggauccugagccag

SEQ ID NO: 3227627 - RNA, 21 nt, Human
uucaaggauccugagccagau

SEQ ID NO: 3227628 - RNA, 15 nt, Human
uucaagaaaugaaga

SEQ ID NO: 3227629 - RNA, 20 nt, Human
uucaagugauucucaugccu

SEQ ID NO: 3227630 - RNA, 22 nt, Human
uucaagugauucucaugccuca

SEQ ID NO: 3227631 - RNA, 22 nt, Human
uucaagggcuuuccugugccag

SEQ ID NO: 3227632 - RNA, 14 nt, Human
uucaaguuuuaaag

SEQ ID NO: 3227633 - RNA, 15 nt, Human
uucaaguuuuaaagu

SEQ ID NO: 3227634 - RNA, 16 nt, Human
uucaaguuuuaaaguu

SEQ ID NO: 3227635 - RNA, 18 nt, Human
uucaaguuuuaaaguuca

SEQ ID NO: 3227636 - RNA, 16 nt, Human
uucaaaaaacuuguaa

SEQ ID NO: 3227637 - RNA, 17 nt, Human
uucaaaauaaaaaugag

SEQ ID NO: 3227638 - RNA, 13 nt, Human
uucaaaaauuuca

SEQ ID NO: 3227639 - RNA, 21 nt, Human
uucaaaaaucugaagauuguu

SEQ ID NO: 3227640 - RNA, 18 nt, Human
uucaaaaaucugaagauu

SEQ ID NO: 3227641 - RNA, 21 nt, Human
uucaaaaagucacaguuaagg

SEQ ID NO: 3227642 - RNA, 12 nt, Human
uucaaaaaucug

SEQ ID NO: 3227643 - RNA, 16 nt, Human
uucaaaaaucugaaga

SEQ ID NO: 3227644 - RNA, 14 nt, Human
uucaaaaaucugaa

SEQ ID NO: 3227645 - RNA, 14 nt, Human
uuauuucuccuuuu

SEQ ID NO: 3227646 - RNA, 12 nt, Human
uuauuucuccuu

SEQ ID NO: 3227647 - RNA, 18 nt, Human
uuauuucuagcuuuuuaa

SEQ ID NO: 3227648 - RNA, 13 nt, Human
uuauuuuuuugaa

SEQ ID NO: 3227649 - RNA, 19 nt, Human
uuauuuuuuuuaauuguau

SEQ ID NO: 3227650 - RNA, 13 nt, Human
uucaaagaaucac

SEQ ID NO: 3227651 - RNA, 16 nt, Human
uucaacuucaggaaag

SEQ ID NO: 3227652 - RNA, 17 nt, Human
uucaaacugaaaagcug

SEQ ID NO: 3227653 - RNA, 13 nt, Human
uucaaacugaaaa

SEQ ID NO: 3227654 - RNA, 15 nt, Human
uucaaaccugugaag

SEQ ID NO: 3227655 - RNA, 17 nt, Human
uucaaaauaaaauauca

SEQ ID NO: 3227656 - RNA, 22 nt, Human
uucaaaaaucugaagauuguuu

SEQ ID NO: 3227657 - RNA, 14 nt, Human
uucaaaauauugag

SEQ ID NO: 3227658 - RNA, 16 nt, Human
uucaaaauauugagca

SEQ ID NO: 3227659 - RNA, 23 nt, Human
uucaaaauauugagcagaauuca

SEQ ID NO: 3227660 - RNA, 18 nt, Human
auaucuaaaucuguccaa

SEQ ID NO: 3227661 - RNA, 21 nt, Human
auauccuuuuagucugcauau

SEQ ID NO: 3227662 - RNA, 21 nt, Human
uucaucauccuaagcuauuca

SEQ ID NO: 3227663 - RNA, 22 nt, Human
uucauauuuguacuuucuguua

SEQ ID NO: 3227664 - RNA, 20 nt, Human
uucauauuuguacuuucugu

SEQ ID NO: 3227665 - RNA, 17 nt, Human
uucauauuuuaaacaga

SEQ ID NO: 3227666 - RNA, 18 nt, Human
uucaucauccuaagcuau

SEQ ID NO: 3227667 - RNA, 11 nt, Human
uucauauuugu

SEQ ID NO: 3227668 - RNA, 15 nt, Human
uucauauuuguacuu

SEQ ID NO: 3227669 - RNA, 14 nt, Human
uucauauuuguacu

SEQ ID NO: 3227670 - RNA, 21 nt, Human
uucauauuuuaaacagaggau

SEQ ID NO: 3227671 - RNA, 18 nt, Human
auauauguuuuugaaggc

SEQ ID NO: 3227672 - RNA, 17 nt, Human
auauauguuuuugaagg

SEQ ID NO: 3227673 - RNA, 16 nt, Human
auauauuaaaauucca

SEQ ID NO: 3227674 - RNA, 20 nt, Human
auauauuaaaauuccaaauu

SEQ ID NO: 3227675 - RNA, 13 nt, Human
uucagccuaagag

SEQ ID NO: 3227676 - RNA, 18 nt, Human
uucagggcagauuuuagu

SEQ ID NO: 3227677 - RNA, 16 nt, Human
uucagggcagauuuua

SEQ ID NO: 3227678 - RNA, 23 nt, Human
uucagggcagauuuuaguuuuau

SEQ ID NO: 3227679 - RNA, 20 nt, Human
uucagggcagauuuuaguuu

SEQ ID NO: 3227680 - RNA, 14 nt, Human
uucaguaauaacuc

SEQ ID NO: 3227681 - RNA, 23 nt, Human
uucaggggcuagcuaagccaaga

SEQ ID NO: 3227682 - RNA, 17 nt, Human
uucaggggaaacuugau

SEQ ID NO: 3227683 - RNA, 21 nt, Human
uucauauuuacuucuuauaca

SEQ ID NO: 3227684 - RNA, 16 nt, Human
uucauauuuacuucuu

SEQ ID NO: 3227685 - RNA, 15 nt, Human
uucauagcuguacuu

SEQ ID NO: 3227686 - RNA, 18 nt, Human
uucauagcuguacuucuu

SEQ ID NO: 3227687 - RNA, 14 nt, Human
uucauacuuaaaaa

SEQ ID NO: 3227688 - RNA, 18 nt, Human
uucauacuuaaaaauuua

SEQ ID NO: 3227689 - RNA, 23 nt, Human
auaugcaaagcacugacuucuaa

SEQ ID NO: 3227690 - RNA, 15 nt, Human
auaugcaaagcacug

SEQ ID NO: 3227691 - RNA, 21 nt, Human
auaucuuggcagguaggaaua

SEQ ID NO: 3227692 - RNA, 16 nt, Human
auaugcaaagcacuga

SEQ ID NO: 3227693 - RNA, 23 nt, Human
auauguauguguuuagaauugaa

SEQ ID NO: 3227694 - RNA, 21 nt, Human
auauguauuaacacuacucaa

SEQ ID NO: 3227695 - RNA, 14 nt, Human
auauguauguguuu

SEQ ID NO: 3227696 - RNA, 15 nt, Human
auauguauguguuua

SEQ ID NO: 3227697 - RNA, 17 nt, Human
auauguauguguuuaga

SEQ ID NO: 3227698 - RNA, 18 nt, Human
auauguauguguuuagaa

SEQ ID NO: 3227699 - RNA, 19 nt, Human
auauguauguguuuagaau

SEQ ID NO: 3227700 - RNA, 20 nt, Human
auauguauguguuuagaauu

SEQ ID NO: 3227701 - RNA, 21 nt, Human
auauguauguguuuagaauug

SEQ ID NO: 3227702 - RNA, 22 nt, Human
auauguauguguuuagaauuga

SEQ ID NO: 3227703 - RNA, 15 nt, Human
auauguauacaugug

SEQ ID NO: 3227704 - RNA, 13 nt, Human
auauguauguguu

SEQ ID NO: 3227705 - RNA, 11 nt, Human
auauguaugug

SEQ ID NO: 3227706 - RNA, 14 nt, Human
auaugucaagccau

SEQ ID NO: 3227707 - RNA, 21 nt, Human
auauguauucuguaaaagaaa

SEQ ID NO: 3227708 - RNA, 18 nt, Human
auaugucagucacuaaaa

SEQ ID NO: 3227709 - RNA, 20 nt, Human
auauguccucuuuuguuguu

SEQ ID NO: 3227710 - RNA, 21 nt, Human
uucauggcaugcuuaaauuuu

SEQ ID NO: 3227711 - RNA, 16 nt, Human
uucaugucccagaacu

SEQ ID NO: 3227712 - RNA, 22 nt, Human
uucaugucccagaacuuagccu

SEQ ID NO: 3227713 - RNA, 21 nt, Human
uucauguccugugucaguuua

SEQ ID NO: 3227714 - RNA, 20 nt, Human
uucauguccugugucaguuu

SEQ ID NO: 3227715 - RNA, 19 nt, Human
uucauguccugugucaguu

SEQ ID NO: 3227716 - RNA, 17 nt, Human
uucauguccugugucag

SEQ ID NO: 3227717 - RNA, 13 nt, Human
uucauguaauuuu

SEQ ID NO: 3227718 - RNA, 21 nt, Human
uucauguaauuuuauuuuaaa

SEQ ID NO: 3227719 - RNA, 22 nt, Human
auaucugaaaauguauguguaa

SEQ ID NO: 3227720 - RNA, 20 nt, Human
auaugauuuaaaucagccgu

SEQ ID NO: 3227721 - RNA, 15 nt, Human
auaucuuggcaggua

SEQ ID NO: 3227722 - RNA, 23 nt, Human
auaucuugcuugaacuuacaggu

SEQ ID NO: 3227723 - RNA, 14 nt, Human
auaucuugcuugaa

SEQ ID NO: 3227724 - RNA, 16 nt, Human
auaucuucauuucuaa

SEQ ID NO: 3227725 - RNA, 18 nt, Human
auaucuucauuucuaaau

SEQ ID NO: 3227726 - RNA, 18 nt, Human
auaucuucguuaguaauc

SEQ ID NO: 3227727 - RNA, 23 nt, Human
auaucuucguuaguaaucuguau

SEQ ID NO: 3227728 - RNA, 13 nt, Human
auaucugugaaau

SEQ ID NO: 3227729 - RNA, 15 nt, Human
auaucugugaaauau

SEQ ID NO: 3227730 - RNA, 17 nt, Human
auaucugugaaauauca

SEQ ID NO: 3227731 - RNA, 15 nt, Human
auaucuguuagaugc

SEQ ID NO: 3227732 - RNA, 16 nt, Human
auaucuguuagaugcu

SEQ ID NO: 3227733 - RNA, 19 nt, Human
auaucuguuagaugcuacu

SEQ ID NO: 3227734 - RNA, 20 nt, Human
auaucuguuagaugcuacua

SEQ ID NO: 3227735 - RNA, 14 nt, Human
auaucuucauuucu

SEQ ID NO: 3227736 - RNA, 20 nt, Human
uucacuggccacaguuguuu

SEQ ID NO: 3227737 - RNA, 22 nt, Human
uucagaaacaaagcauuugacu

SEQ ID NO: 3227738 - RNA, 15 nt, Human
uucagaaagaagugg

SEQ ID NO: 3227739 - RNA, 15 nt, Human
uucagaaguuuaaau

SEQ ID NO: 3227740 - RNA, 14 nt, Human
uucagaaguuuaaa

SEQ ID NO: 3227741 - RNA, 13 nt, Human
uucagaaguuuaa

SEQ ID NO: 3227742 - RNA, 19 nt, Human
uucacugcuggcugccuua

SEQ ID NO: 3227743 - RNA, 18 nt, Human
uucacugcuggcugccuu

SEQ ID NO: 3227744 - RNA, 17 nt, Human
uucacugcuggcugccu

SEQ ID NO: 3227745 - RNA, 16 nt, Human
uucacugcuggcugcc

SEQ ID NO: 3227746 - RNA, 15 nt, Human
uucacugcuggcugc

SEQ ID NO: 3227747 - RNA, 13 nt, Human
uucacugcuggcu

SEQ ID NO: 3227748 - RNA, 16 nt, Human
auauauagcauuuaug

SEQ ID NO: 3227749 - RNA, 14 nt, Human
auauauagcauuua

SEQ ID NO: 3227750 - RNA, 21 nt, Human
uucagccacugagggacaaaa

SEQ ID NO: 3227751 - RNA, 17 nt, Human
uucagccacugagggac

SEQ ID NO: 3227752 - RNA, 14 nt, Human
uucagccaagaauu

SEQ ID NO: 3227753 - RNA, 19 nt, Human
uucagccaagaauucuuaa

SEQ ID NO: 3227754 - RNA, 22 nt, Human
uucagcaaacuuguugaauuua

SEQ ID NO: 3227755 - RNA, 15 nt, Human
uucagcaaacuuguu

SEQ ID NO: 3227756 - RNA, 21 nt, Human
uucagcaaggcgcuaacuugc

SEQ ID NO: 3227757 - RNA, 22 nt, Human
auauaagcccuugauuggaagg

SEQ ID NO: 3227758 - RNA, 16 nt, Human
auauaaauugucuuaa

SEQ ID NO: 3227759 - RNA, 14 nt, Human
auauaggacauuga

SEQ ID NO: 3227760 - RNA, 14 nt, Human
auagucaagacgaa

SEQ ID NO: 3227761 - RNA, 21 nt, Human
auagucaagacgaacauguag

SEQ ID NO: 3227762 - RNA, 19 nt, Human
auaguuuauuuuaaaacaa

SEQ ID NO: 3227763 - RNA, 12 nt, Human
auauaaaauaac

SEQ ID NO: 3227764 - RNA, 13 nt, Human
auauaaaauaacu

SEQ ID NO: 3227765 - RNA, 13 nt, Human
auauaaacagcuu

SEQ ID NO: 3227766 - RNA, 23 nt, Human
auauaaaauggcaacaaacugca

SEQ ID NO: 3227767 - RNA, 19 nt, Human
auauaaaauggcaacaaac

SEQ ID NO: 3227768 - RNA, 14 nt, Human
auauaaaauggcaa

SEQ ID NO: 3227769 - RNA, 12 nt, Human
auauaaaaugcc

SEQ ID NO: 3227770 - RNA, 15 nt, Human
auauaaaaugccaag

SEQ ID NO: 3227771 - RNA, 13 nt, Human
auauaaaaugcca

SEQ ID NO: 3227772 - RNA, 11 nt, Human
auauaaaugug

SEQ ID NO: 3227773 - RNA, 12 nt, Human
auauaaaugugu

SEQ ID NO: 3227774 - RNA, 14 nt, Human
auauaaaugugugu

SEQ ID NO: 3227775 - RNA, 16 nt, Human
auauaaauguguguau

SEQ ID NO: 3227776 - RNA, 14 nt, Human
uuuguacagacaac

SEQ ID NO: 3227777 - RNA, 21 nt, Human
uuuguacacccaugaaagaaa

SEQ ID NO: 3227778 - RNA, 17 nt, Human
uuuguacaagauuguca

SEQ ID NO: 3227779 - RNA, 13 nt, Human
uuuguaauuuaag

SEQ ID NO: 3227780 - RNA, 19 nt, Human
uuuguaagauauuugcagu

SEQ ID NO: 3227781 - RNA, 16 nt, Human
augugaucucauuguu

SEQ ID NO: 3227782 - RNA, 18 nt, Human
augugauccuuuuggagu

SEQ ID NO: 3227783 - RNA, 11 nt, Human
augugaucuca

SEQ ID NO: 3227784 - RNA, 23 nt, Human
uuugucuuaaaaaguggaaaaau

SEQ ID NO: 3227785 - RNA, 13 nt, Human
uuugucuuaaaaa

SEQ ID NO: 3227786 - RNA, 14 nt, Human
uuugucuuaaaaag

SEQ ID NO: 3227787 - RNA, 16 nt, Human
uuugugauguacugua

SEQ ID NO: 3227788 - RNA, 14 nt, Human
uuuguuucugaaag

SEQ ID NO: 3227789 - RNA, 16 nt, Human
uuuguuucugaaaggg

SEQ ID NO: 3227790 - RNA, 16 nt, Human
uuuguuuguucuuguu

SEQ ID NO: 3227791 - RNA, 15 nt, Human
augucgccucugcau

SEQ ID NO: 3227792 - RNA, 22 nt, Human
augucguaguuacucucaggca

SEQ ID NO: 3227793 - RNA, 19 nt, Human
augucguaguuacucucag

SEQ ID NO: 3227794 - RNA, 18 nt, Human
augucgucgagcuccccc

SEQ ID NO: 3227795 - RNA, 13 nt, Human
augugagaccauu

SEQ ID NO: 3227796 - RNA, 13 nt, Human
augugacuuugaa

SEQ ID NO: 3227797 - RNA, 22 nt, Human
augugacauuugucauuuucau

SEQ ID NO: 3227798 - RNA, 19 nt, Human
augugacauuugucauuuu

SEQ ID NO: 3227799 - RNA, 18 nt, Human
augugacauuugucauuu

SEQ ID NO: 3227800 - RNA, 15 nt, Human
augugacauuuguca

SEQ ID NO: 3227801 - RNA, 14 nt, Human
augugacauuuguc

SEQ ID NO: 3227802 - RNA, 13 nt, Human
augugacauuugu

SEQ ID NO: 3227803 - RNA, 11 nt, Human
augugacauuu

SEQ ID NO: 3227804 - RNA, 21 nt, Human
augugacuuugaaaauauaua

SEQ ID NO: 3227805 - RNA, 23 nt, Human
augugagcugcugccaugaacug

SEQ ID NO: 3227806 - RNA, 19 nt, Human
augugagcugcugccauga

SEQ ID NO: 3227807 - RNA, 16 nt, Human
augugagcugcugcca

SEQ ID NO: 3227808 - RNA, 15 nt, Human
augugagcugcugcc

SEQ ID NO: 3227809 - RNA, 14 nt, Human
augugaguauucuc

SEQ ID NO: 3227810 - RNA, 15 nt, Human
augugagugguugaa

SEQ ID NO: 3227811 - RNA, 17 nt, Human
augugaguauucucauu

SEQ ID NO: 3227812 - RNA, 16 nt, Human
augugagugguugaau

SEQ ID NO: 3227813 - RNA, 19 nt, Human
augugagugguugaauaug

SEQ ID NO: 3227814 - RNA, 22 nt, Human
augugagugguugaauaugauu

SEQ ID NO: 3227815 - RNA, 19 nt, Human
augugauauaaacagcuuc

SEQ ID NO: 3227816 - RNA, 18 nt, Human
augugauauaaacagcuu

SEQ ID NO: 3227817 - RNA, 16 nt, Human
augucccuuucuucuc

SEQ ID NO: 3227818 - RNA, 18 nt, Human
augucccuuucuucuccc

SEQ ID NO: 3227819 - RNA, 17 nt, Human
augucccuuucuucucc

SEQ ID NO: 3227820 - RNA, 15 nt, Human
auguccuagacaggu

SEQ ID NO: 3227821 - RNA, 16 nt, Human
auguccuaauggugau

SEQ ID NO: 3227822 - RNA, 15 nt, Human
auguccuaaugguga

SEQ ID NO: 3227823 - RNA, 16 nt, Human
auguccaagaagccca

SEQ ID NO: 3227824 - RNA, 17 nt, Human
auguccaagaagcccag

SEQ ID NO: 3227825 - RNA, 19 nt, Human
auguauauuuuauaucaau

SEQ ID NO: 3227826 - RNA, 22 nt, Human
auguauaugaacuuaacaugcu

SEQ ID NO: 3227827 - RNA, 12 nt, Human
auguaucaauga

SEQ ID NO: 3227828 - RNA, 14 nt, Human
augucauaaaguga

SEQ ID NO: 3227829 - RNA, 23 nt, Human
augucauaaagugagaaaacugu

SEQ ID NO: 3227830 - RNA, 18 nt, Human
auguauauuuuauauaaa

SEQ ID NO: 3227831 - RNA, 17 nt, Human
auguaucaaauacauuu

SEQ ID NO: 3227832 - RNA, 14 nt, Human
augucauuucaugu

SEQ ID NO: 3227833 - RNA, 13 nt, Human
augucauuucaug

SEQ ID NO: 3227834 - RNA, 14 nt, Human
uuugauccaagcug

SEQ ID NO: 3227835 - RNA, 15 nt, Human
uuugauccaagcugg

SEQ ID NO: 3227836 - RNA, 22 nt, Human
uuugaucuuccucugcuaaauu

SEQ ID NO: 3227837 - RNA, 18 nt, Human
uuugaucuuccucugcua

SEQ ID NO: 3227838 - RNA, 20 nt, Human
uuugaucuuccucugcuaaa

SEQ ID NO: 3227839 - RNA, 19 nt, Human
uuugaucuuccucugcuaa

SEQ ID NO: 3227840 - RNA, 14 nt, Human
uuugaucucacauu

SEQ ID NO: 3227841 - RNA, 18 nt, Human
uuugaucucacauuuuua

SEQ ID NO: 3227842 - RNA, 16 nt, Human
uuugaucucacauuuu

SEQ ID NO: 3227843 - RNA, 12 nt, Human
uuugauucacau

SEQ ID NO: 3227844 - RNA, 15 nt, Human
uuugauucagacagc

SEQ ID NO: 3227845 - RNA, 22 nt, Human
uuugauucacauguuuucaaau

SEQ ID NO: 3227846 - RNA, 21 nt, Human
uuugauucacauguuuucaaa

SEQ ID NO: 3227847 - RNA, 20 nt, Human
uuugauucacauguuuucaa

SEQ ID NO: 3227848 - RNA, 19 nt, Human
uuugauucacauguuuuca

SEQ ID NO: 3227849 - RNA, 18 nt, Human
uuugauucacauguuuuc

SEQ ID NO: 3227850 - RNA, 16 nt, Human
uuugauucacauguuu

SEQ ID NO: 3227851 - RNA, 14 nt, Human
uuugauucacaugu

SEQ ID NO: 3227852 - RNA, 13 nt, Human
uuugauucacaug

SEQ ID NO: 3227853 - RNA, 23 nt, Human
uuugaccuguugggagugaggau

SEQ ID NO: 3227854 - RNA, 13 nt, Human
uuugagacagagu

SEQ ID NO: 3227855 - RNA, 22 nt, Human
uuugagagagagucuuacucug

SEQ ID NO: 3227856 - RNA, 18 nt, Human
uuugagagagcagccagg

SEQ ID NO: 3227857 - RNA, 14 nt, Human
uuucccuuccaguu

SEQ ID NO: 3227858 - RNA, 13 nt, Human
uuucccuuccagu

SEQ ID NO: 3227859 - RNA, 12 nt, Human
uuucccuuccag

SEQ ID NO: 3227860 - RNA, 16 nt, Human
uuugaauuaucagcaa

SEQ ID NO: 3227861 - RNA, 17 nt, Human
uuugaauuuucauuuua

SEQ ID NO: 3227862 - RNA, 23 nt, Human
uuucccucccuuccucuuuccau

SEQ ID NO: 3227863 - RNA, 16 nt, Human
uuucccucagaaaaug

SEQ ID NO: 3227864 - RNA, 21 nt, Human
uuucccugaaguuauguguau

SEQ ID NO: 3227865 - RNA, 13 nt, Human
uuucccugaaguu

SEQ ID NO: 3227866 - RNA, 23 nt, Human
uuugacaagcuggcuuacacugg

SEQ ID NO: 3227867 - RNA, 23 nt, Human
uuugaauuuucauuuuacaguua

SEQ ID NO: 3227868 - RNA, 20 nt, Human
uuugaauuuucauuuuacag

SEQ ID NO: 3227869 - RNA, 18 nt, Human
uuuggcaaacucuccacc

SEQ ID NO: 3227870 - RNA, 15 nt, Human
uuuggcuccugccca

SEQ ID NO: 3227871 - RNA, 14 nt, Human
uuuggcuccugccc

SEQ ID NO: 3227872 - RNA, 13 nt, Human
uuuggcuccugcc

SEQ ID NO: 3227873 - RNA, 12 nt, Human
uuuggcugcuga

SEQ ID NO: 3227874 - RNA, 13 nt, Human
uuuggcugcugaa

SEQ ID NO: 3227875 - RNA, 14 nt, Human
uuugggcugaaugu

SEQ ID NO: 3227876 - RNA, 19 nt, Human
uuugggcugaauguaugua

SEQ ID NO: 3227877 - RNA, 14 nt, Human
uuugggcugcccug

SEQ ID NO: 3227878 - RNA, 17 nt, Human
uuugggcagagaggcug

SEQ ID NO: 3227879 - RNA, 17 nt, Human
auguauauaaacaugcu

SEQ ID NO: 3227880 - RNA, 13 nt, Human
auguauauaaaaa

SEQ ID NO: 3227881 - RNA, 14 nt, Human
auguauauaaaaau

SEQ ID NO: 3227882 - RNA, 15 nt, Human
auguauauaaaaaug

SEQ ID NO: 3227883 - RNA, 20 nt, Human
auguauaguauuugaaaaca

SEQ ID NO: 3227884 - RNA, 18 nt, Human
auguauaguauuugaaaa

SEQ ID NO: 3227885 - RNA, 17 nt, Human
auguauaguauuugaaa

SEQ ID NO: 3227886 - RNA, 16 nt, Human
auguauaguauuugaa

SEQ ID NO: 3227887 - RNA, 14 nt, Human
auguauaguauuug

SEQ ID NO: 3227888 - RNA, 21 nt, Human
auguauaauucaaagcaccaa

SEQ ID NO: 3227889 - RNA, 14 nt, Human
auguauacaugugc

SEQ ID NO: 3227890 - RNA, 21 nt, Human
uuugggguacccacugcucug

SEQ ID NO: 3227891 - RNA, 23 nt, Human
uuugggcuuguuguuuguaacaa

SEQ ID NO: 3227892 - RNA, 22 nt, Human
uuugggguacccacugcucugg

SEQ ID NO: 3227893 - RNA, 20 nt, Human
uuugcuggagcucugcccau

SEQ ID NO: 3227894 - RNA, 22 nt, Human
uuuggauuggaugaauuccaaa

SEQ ID NO: 3227895 - RNA, 18 nt, Human
uuuggauuauucuuucuc

SEQ ID NO: 3227896 - RNA, 22 nt, Human
uuugcgaauauuuuguaaauua

SEQ ID NO: 3227897 - RNA, 22 nt, Human
uuugcaaaaauccaaauauugu

SEQ ID NO: 3227898 - RNA, 15 nt, Human
uuugcaaaggagcuc

SEQ ID NO: 3227899 - RNA, 13 nt, Human
uuugauuuauuaa

SEQ ID NO: 3227900 - RNA, 16 nt, Human
uuugauuuauuaacuu

SEQ ID NO: 3227901 - RNA, 21 nt, Human
uuugauuuauuaacuuaauaa

SEQ ID NO: 3227902 - RNA, 14 nt, Human
uuugauuugucacu

SEQ ID NO: 3227903 - RNA, 14 nt, Human
uuugauuuguacag

SEQ ID NO: 3227904 - RNA, 16 nt, Human
auguuaaccucugcuu

SEQ ID NO: 3227905 - RNA, 19 nt, Human
auguuaaccucugcuuuua

SEQ ID NO: 3227906 - RNA, 19 nt, Human
auguuacauaagauaaaug

SEQ ID NO: 3227907 - RNA, 20 nt, Human
auguuaauuuguguguuuuu

SEQ ID NO: 3227908 - RNA, 18 nt, Human
auguuaacaaugccuauu

SEQ ID NO: 3227909 - RNA, 21 nt, Human
auguuaacaaugccuauugua

SEQ ID NO: 3227910 - RNA, 22 nt, Human
auguuaacaaugccuauuguaa

SEQ ID NO: 3227911 - RNA, 23 nt, Human
auguuaacaaugccuauuguaau

SEQ ID NO: 3227912 - RNA, 20 nt, Human
auguuacauaagauaaaugu

SEQ ID NO: 3227913 - RNA, 13 nt, Human
auguuauguauau

SEQ ID NO: 3227914 - RNA, 12 nt, Human
auguuauguaua

SEQ ID NO: 3227915 - RNA, 16 nt, Human
auguuauguauauggu

SEQ ID NO: 3227916 - RNA, 15 nt, Human
auguugcccaggcag

SEQ ID NO: 3227917 - RNA, 14 nt, Human
auguugcccaggca

SEQ ID NO: 3227918 - RNA, 18 nt, Human
auguugaaagaucaaaag

SEQ ID NO: 3227919 - RNA, 13 nt, Human
auguugcccaggc

SEQ ID NO: 3227920 - RNA, 20 nt, Human
auguucuuucacccuuuucu

SEQ ID NO: 3227921 - RNA, 12 nt, Human
auguucaauuau

SEQ ID NO: 3227922 - RNA, 18 nt, Human
auguucaauuauuucccc

SEQ ID NO: 3227923 - RNA, 12 nt, Human
auguugaaagau

SEQ ID NO: 3227924 - RNA, 21 nt, Human
auguugaaaaaauuuaaaagu

SEQ ID NO: 3227925 - RNA, 21 nt, Human
uuuuagacccuauugcugcuu

SEQ ID NO: 3227926 - RNA, 21 nt, Human
auguuggcagaugcagcucuu

SEQ ID NO: 3227927 - RNA, 18 nt, Human
uuuuagaauuuugugaaa

SEQ ID NO: 3227928 - RNA, 20 nt, Human
auguuggcagaugcagcucu

SEQ ID NO: 3227929 - RNA, 19 nt, Human
auguuggcagaugcagcuc

SEQ ID NO: 3227930 - RNA, 15 nt, Human
auguugaacaaaaua

SEQ ID NO: 3227931 - RNA, 13 nt, Human
auguugaacaaaa

SEQ ID NO: 3227932 - RNA, 19 nt, Human
auguugcuaugugccuuau

SEQ ID NO: 3227933 - RNA, 22 nt, Human
auguugcuaugugccuuauguu

SEQ ID NO: 3227934 - RNA, 19 nt, Human
auguugaacaaaauaaauu

SEQ ID NO: 3227935 - RNA, 13 nt, Human
auguuaaagaugu

SEQ ID NO: 3227936 - RNA, 17 nt, Human
auguuaaagauguagca

SEQ ID NO: 3227937 - RNA, 15 nt, Human
auguuaaagauguag

SEQ ID NO: 3227938 - RNA, 20 nt, Human
auguuaaagauguagcaaac

SEQ ID NO: 3227939 - RNA, 18 nt, Human
auguuaaagauguagcaa

SEQ ID NO: 3227940 - RNA, 17 nt, Human
auguguuuagaauugaa

SEQ ID NO: 3227941 - RNA, 20 nt, Human
auguguuuagaauugaaggu

SEQ ID NO: 3227942 - RNA, 14 nt, Human
auguguuuagaauu

SEQ ID NO: 3227943 - RNA, 16 nt, Human
auguguuuagaauuga

SEQ ID NO: 3227944 - RNA, 13 nt, Human
auguguuuagaau

SEQ ID NO: 3227945 - RNA, 14 nt, Human
auguguguuucugu

SEQ ID NO: 3227946 - RNA, 12 nt, Human
auguguuuagaa

SEQ ID NO: 3227947 - RNA, 13 nt, Human
augugugugaugu

SEQ ID NO: 3227948 - RNA, 23 nt, Human
auguggaaaagccaagaggcugc

SEQ ID NO: 3227949 - RNA, 18 nt, Human
auguguguguguugugug

SEQ ID NO: 3227950 - RNA, 22 nt, Human
auguguguguguuguguguggg

SEQ ID NO: 3227951 - RNA, 23 nt, Human
auguguguguguuguguguggga

SEQ ID NO: 3227952 - RNA, 16 nt, Human
auguguguaugugugu

SEQ ID NO: 3227953 - RNA, 14 nt, Human
auguguguaugugu

SEQ ID NO: 3227954 - RNA, 13 nt, Human
auguguguaugug

SEQ ID NO: 3227955 - RNA, 17 nt, Human
augugcucaucagaaac

SEQ ID NO: 3227956 - RNA, 16 nt, Human
augugcucaucagaaa

SEQ ID NO: 3227957 - RNA, 13 nt, Human
augugcuauuaau

SEQ ID NO: 3227958 - RNA, 16 nt, Human
augugcuauuaauauu

SEQ ID NO: 3227959 - RNA, 17 nt, Human
augugcuauuaauauuu

SEQ ID NO: 3227960 - RNA, 18 nt, Human
augugcuauuaauauuug

SEQ ID NO: 3227961 - RNA, 19 nt, Human
augugcuauuaauauuugu

SEQ ID NO: 3227962 - RNA, 20 nt, Human
augugcugcuuugauauaua

SEQ ID NO: 3227963 - RNA, 19 nt, Human
augugcugcuuugauauau

SEQ ID NO: 3227964 - RNA, 16 nt, Human
augugcugcuuugaua

SEQ ID NO: 3227965 - RNA, 22 nt, Human
augugcuauaaucuguuuuuac

SEQ ID NO: 3227966 - RNA, 14 nt, Human
augugcugcuuuga

SEQ ID NO: 3227967 - RNA, 13 nt, Human
augugcugcuuug

SEQ ID NO: 3227968 - RNA, 16 nt, Human
augugccacauuuucu

SEQ ID NO: 3227969 - RNA, 18 nt, Human
uuuuaaaaaacugcugac

SEQ ID NO: 3227970 - RNA, 18 nt, Human
uuuguuuuuuguuuuucu

SEQ ID NO: 3227971 - RNA, 19 nt, Human
uuuguuuuuugagucuuuu

SEQ ID NO: 3227972 - RNA, 18 nt, Human
uuuguuuuuugagucuuu

SEQ ID NO: 3227973 - RNA, 16 nt, Human
uuuguuuuuugagucu

SEQ ID NO: 3227974 - RNA, 15 nt, Human
uuuguuuuucugcuu

SEQ ID NO: 3227975 - RNA, 16 nt, Human
uuuguuuuuugaagug

SEQ ID NO: 3227976 - RNA, 19 nt, Human
uuuguuuuuugaaguguug

SEQ ID NO: 3227977 - RNA, 17 nt, Human
uuuguuuuuugaagugu

SEQ ID NO: 3227978 - RNA, 11 nt, Human
uuuguuuuguu

SEQ ID NO: 3227979 - RNA, 14 nt, Human
uuuguuuuguugca

SEQ ID NO: 3227980 - RNA, 15 nt, Human
auuaaaaaaaaauug

SEQ ID NO: 3227981 - RNA, 17 nt, Human
auuaaaaaaaaauugua

SEQ ID NO: 3227982 - RNA, 22 nt, Human
auuaaaaaacuucauguaauuu

SEQ ID NO: 3227983 - RNA, 19 nt, Human
auuaaaacacaacaucuuu

SEQ ID NO: 3227984 - RNA, 20 nt, Human
auguuuauuaaaugcuucau

SEQ ID NO: 3227985 - RNA, 13 nt, Human
auguuuuuaaaau

SEQ ID NO: 3227986 - RNA, 22 nt, Human
auguuuuucaguucaaagucau

SEQ ID NO: 3227987 - RNA, 19 nt, Human
auguuuuucaguucaaagu

SEQ ID NO: 3227988 - RNA, 17 nt, Human
auguuuuucaguucaaa

SEQ ID NO: 3227989 - RNA, 16 nt, Human
auguuuuucaguucaa

SEQ ID NO: 3227990 - RNA, 13 nt, Human
auguuuuucaguu

SEQ ID NO: 3227991 - RNA, 23 nt, Human
auguuuuuaaaaucuuauuaaag

SEQ ID NO: 3227992 - RNA, 17 nt, Human
auguuuuuaaaaucuua

SEQ ID NO: 3227993 - RNA, 16 nt, Human
auguuuuuaaaaucuu

SEQ ID NO: 3227994 - RNA, 15 nt, Human
auguuuuuaaaaucu

SEQ ID NO: 3227995 - RNA, 14 nt, Human
auguuuuuaaaauc

SEQ ID NO: 3227996 - RNA, 22 nt, Human
auguuuaaaguaauuguuccag

SEQ ID NO: 3227997 - RNA, 21 nt, Human
auguuuaaaguaauuguucca

SEQ ID NO: 3227998 - RNA, 18 nt, Human
auguuuaaaguaauuguu

SEQ ID NO: 3227999 - RNA, 14 nt, Human
auguuuaaaguaau

SEQ ID NO: 3228000 - RNA, 14 nt, Human
auguuuaagcagaa

SEQ ID NO: 3228001 - RNA, 20 nt, Human
auguuuaagcagaauuggaa

SEQ ID NO: 3228002 - RNA, 16 nt, Human
auguuuaagcagaauu

SEQ ID NO: 3228003 - RNA, 22 nt, Human
auguuuaagcagaauuggaaaa

SEQ ID NO: 3228004 - RNA, 21 nt, Human
auguuuaagcagaauuggaaa

SEQ ID NO: 3228005 - RNA, 17 nt, Human
auguuggccaggcuggu

SEQ ID NO: 3228006 - RNA, 18 nt, Human
uuuucuguguguuccugg

SEQ ID NO: 3228007 - RNA, 19 nt, Human
uuuucuguguguuccuggc

SEQ ID NO: 3228008 - RNA, 22 nt, Human
uuuucuguuaccucaacaagaa

SEQ ID NO: 3228009 - RNA, 22 nt, Human
uuuucugcuuuagacuugaaaa

SEQ ID NO: 3228010 - RNA, 15 nt, Human
uuuucugcuuuagac

SEQ ID NO: 3228011 - RNA, 19 nt, Human
uuuucugcuuuagacuuga

SEQ ID NO: 3228012 - RNA, 12 nt, Human
uuuucugcuuua

SEQ ID NO: 3228013 - RNA, 12 nt, Human
uuuucuuaaaaa

SEQ ID NO: 3228014 - RNA, 14 nt, Human
uuuucuuaaaaagu

SEQ ID NO: 3228015 - RNA, 13 nt, Human
uuuucuuaaaaag

SEQ ID NO: 3228016 - RNA, 16 nt, Human
auguuggccaggcugg

SEQ ID NO: 3228017 - RNA, 22 nt, Human
uuuuauuaagcuuuuuggaauc

SEQ ID NO: 3228018 - RNA, 12 nt, Human
uuuuauuaauca

SEQ ID NO: 3228019 - RNA, 13 nt, Human
uuuuauuaaucac

SEQ ID NO: 3228020 - RNA, 14 nt, Human
uuuuauuaaucacu

SEQ ID NO: 3228021 - RNA, 15 nt, Human
uuuuauuaaucacug

SEQ ID NO: 3228022 - RNA, 12 nt, Human
uuuuauuaaauu

SEQ ID NO: 3228023 - RNA, 13 nt, Human
uuuuauucuugau

SEQ ID NO: 3228024 - RNA, 13 nt, Human
uuuuauucuuuuu

SEQ ID NO: 3228025 - RNA, 23 nt, Human
uuuuauuaaucacuguguauauu

SEQ ID NO: 3228026 - RNA, 23 nt, Human
uuuuauuccugcccugcuguuua

SEQ ID NO: 3228027 - RNA, 18 nt, Human
uuuuauuaaucacugugu

SEQ ID NO: 3228028 - RNA, 20 nt, Human
uuuuauuaaucacuguguau

SEQ ID NO: 3228029 - RNA, 21 nt, Human
uuuuauuaaucacuguguaua

SEQ ID NO: 3228030 - RNA, 22 nt, Human
uuuuauuaaucacuguguauau

SEQ ID NO: 3228031 - RNA, 23 nt, Human
uuuuaguggacccugaaaugugu

SEQ ID NO: 3228032 - RNA, 18 nt, Human
uuuuagugugugcauaau

SEQ ID NO: 3228033 - RNA, 19 nt, Human
uuuuagugugugcauaaua

SEQ ID NO: 3228034 - RNA, 21 nt, Human
uuuuaguggacccugaaaugu

SEQ ID NO: 3228035 - RNA, 20 nt, Human
uuuuaguggacccugaaaug

SEQ ID NO: 3228036 - RNA, 15 nt, Human
uuuuaguagagacag

SEQ ID NO: 3228037 - RNA, 17 nt, Human
uuuuagguuuaucuuuu

SEQ ID NO: 3228038 - RNA, 14 nt, Human
uuuuaguaaguuaa

SEQ ID NO: 3228039 - RNA, 18 nt, Human
uuuuaguaaguuaaugua

SEQ ID NO: 3228040 - RNA, 20 nt, Human
uuuuccagagcauuccaguc

SEQ ID NO: 3228041 - RNA, 19 nt, Human
uuuuccagagcauuccagu

SEQ ID NO: 3228042 - RNA, 13 nt, Human
uuuuauuguugaa

SEQ ID NO: 3228043 - RNA, 19 nt, Human
uuuucagcuaggaacaaau

SEQ ID NO: 3228044 - RNA, 21 nt, Human
uuuucagcuaggaacaaaucu

SEQ ID NO: 3228045 - RNA, 21 nt, Human
uuuucaggugcucaaaaugca

SEQ ID NO: 3228046 - RNA, 18 nt, Human
uuuucaggugcucaaaau

SEQ ID NO: 3228047 - RNA, 23 nt, Human
uuuucagcuaggaacaaaucuuc

SEQ ID NO: 3228048 - RNA, 22 nt, Human
uuuucagcuaggaacaaaucuu

SEQ ID NO: 3228049 - RNA, 22 nt, Human
uuuucucugauacuuuuuugaa

SEQ ID NO: 3228050 - RNA, 14 nt, Human
uuuucucuuagaaa

SEQ ID NO: 3228051 - RNA, 14 nt, Human
uuuucucuucauau

SEQ ID NO: 3228052 - RNA, 13 nt, Human
uuuucucuucaua

SEQ ID NO: 3228053 - RNA, 16 nt, Human
uuuucucuuaucugug

SEQ ID NO: 3228054 - RNA, 23 nt, Human
uuuucuacucgaguuacagacaa

SEQ ID NO: 3228055 - RNA, 18 nt, Human
auucaggggaaacuugau

SEQ ID NO: 3228056 - RNA, 16 nt, Human
auucagugaugugccu

SEQ ID NO: 3228057 - RNA, 19 nt, Human
auucagcauuagugggaaa

SEQ ID NO: 3228058 - RNA, 12 nt, Human
auucagcaucug

SEQ ID NO: 3228059 - RNA, 14 nt, Human
auucagauuucucu

SEQ ID NO: 3228060 - RNA, 20 nt, Human
auucagauuucucuuugaaa

SEQ ID NO: 3228061 - RNA, 19 nt, Human
auucagauuucucuuugaa

SEQ ID NO: 3228062 - RNA, 20 nt, Human
auucagcaaggcgcuaacuu

SEQ ID NO: 3228063 - RNA, 23 nt, Human
auucagcaaggcgcuaacuugcu

SEQ ID NO: 3228064 - RNA, 21 nt, Human
auucagcaaggcgcuaacuug

SEQ ID NO: 3228065 - RNA, 20 nt, Human
auucacuuugacacuuuuca

SEQ ID NO: 3228066 - RNA, 20 nt, Human
auucagaaaugacuuuuuga

SEQ ID NO: 3228067 - RNA, 12 nt, Human
auuccacagcug

SEQ ID NO: 3228068 - RNA, 23 nt, Human
auuccaagucagaaacuguuucu

SEQ ID NO: 3228069 - RNA, 17 nt, Human
auucccaagcucugcuc

SEQ ID NO: 3228070 - RNA, 18 nt, Human
auuccagagaguggcucc

SEQ ID NO: 3228071 - RNA, 18 nt, Human
auuccagaaugaagaauu

SEQ ID NO: 3228072 - RNA, 23 nt, Human
auuccagacagucacaaauuucu

SEQ ID NO: 3228073 - RNA, 16 nt, Human
auuccagacagucaca

SEQ ID NO: 3228074 - RNA, 19 nt, Human
auucccaagcucugcuccu

SEQ ID NO: 3228075 - RNA, 18 nt, Human
auucccaagcucugcucc

SEQ ID NO: 3228076 - RNA, 19 nt, Human
auuccccaggaggccagcc

SEQ ID NO: 3228077 - RNA, 20 nt, Human
auuccccaggaggccagccu

SEQ ID NO: 3228078 - RNA, 22 nt, Human
auuccccaggaggccagccuug

SEQ ID NO: 3228079 - RNA, 15 nt, Human
auuauucaggcuuua

SEQ ID NO: 3228080 - RNA, 18 nt, Human
auuauaucagacugcuuu

SEQ ID NO: 3228081 - RNA, 20 nt, Human
auuagacuucuguuuucaau

SEQ ID NO: 3228082 - RNA, 19 nt, Human
auuagacuucuguuuucaa

SEQ ID NO: 3228083 - RNA, 22 nt, Human
auuauaaacaagaaugaagguu

SEQ ID NO: 3228084 - RNA, 19 nt, Human
auuauaaacucauuuugcu

SEQ ID NO: 3228085 - RNA, 17 nt, Human
auuauaaacucauuuug

SEQ ID NO: 3228086 - RNA, 18 nt, Human
auuauaaacaagaaugaa

SEQ ID NO: 3228087 - RNA, 11 nt, Human
auuauaaaaau

SEQ ID NO: 3228088 - RNA, 13 nt, Human
auuauaaaaauau

SEQ ID NO: 3228089 - RNA, 14 nt, Human
auuauaaaaauauu

SEQ ID NO: 3228090 - RNA, 22 nt, Human
auuauaaaaauauuaagacaau

SEQ ID NO: 3228091 - RNA, 15 nt, Human
auucaaaaauuucac

SEQ ID NO: 3228092 - RNA, 19 nt, Human
auucaaaaagucacaguua

SEQ ID NO: 3228093 - RNA, 12 nt, Human
auucaaaaaguc

SEQ ID NO: 3228094 - RNA, 22 nt, Human
auuauuguccuuugauuccaaa

SEQ ID NO: 3228095 - RNA, 14 nt, Human
auuauugaugaaaa

SEQ ID NO: 3228096 - RNA, 21 nt, Human
auuauuggaaaggaccuaaaa

SEQ ID NO: 3228097 - RNA, 22 nt, Human
auucaaacagucucaggaaauc

SEQ ID NO: 3228098 - RNA, 18 nt, Human
auucaaacugaaaagcug

SEQ ID NO: 3228099 - RNA, 15 nt, Human
auucaaaccuaaguu

SEQ ID NO: 3228100 - RNA, 20 nt, Human
auucaaacagucucaggaaa

SEQ ID NO: 3228101 - RNA, 14 nt, Human
auucaaagaaucac

SEQ ID NO: 3228102 - RNA, 19 nt, Human
auucaaagcaccaaaauaa

SEQ ID NO: 3228103 - RNA, 12 nt, Human
auucaaagcaug

SEQ ID NO: 3228104 - RNA, 21 nt, Human
auucaaagaaucaccuaauua

SEQ ID NO: 3228105 - RNA, 13 nt, Human
auucaaagagaaa

SEQ ID NO: 3228106 - RNA, 14 nt, Human
auucaaagagaaaa

SEQ ID NO: 3228107 - RNA, 13 nt, Human
auucaccuucagu

SEQ ID NO: 3228108 - RNA, 19 nt, Human
uuuuuguaaagauuucugu

SEQ ID NO: 3228109 - RNA, 14 nt, Human
uuuuuguaaagauu

SEQ ID NO: 3228110 - RNA, 10 nt, Human
uuuuuguaaa

SEQ ID NO: 3228111 - RNA, 9 nt, Human
uuuuuguau

SEQ ID NO: 3228112 - RNA, 22 nt, Human
uuuuuguauauugguuuuauga

SEQ ID NO: 3228113 - RNA, 22 nt, Human
uuuuugggaaaagaaaagucaa

SEQ ID NO: 3228114 - RNA, 13 nt, Human
auuaaggaagaca

SEQ ID NO: 3228115 - RNA, 11 nt, Human
uuuuuguauuu

SEQ ID NO: 3228116 - RNA, 20 nt, Human
auuaagcccacaguauauuu

SEQ ID NO: 3228117 - RNA, 11 nt, Human
uuuuuguauuc

SEQ ID NO: 3228118 - RNA, 17 nt, Human
auuaagcuuuuuggaau

SEQ ID NO: 3228119 - RNA, 18 nt, Human
auuaagcuuuuuggaauc

SEQ ID NO: 3228120 - RNA, 19 nt, Human
auuaaguacuauguaucaa

SEQ ID NO: 3228121 - RNA, 16 nt, Human
auuaaguacuauguau

SEQ ID NO: 3228122 - RNA, 18 nt, Human
auuaaguacuauguauca

SEQ ID NO: 3228123 - RNA, 14 nt, Human
uuuuugaaguguug

SEQ ID NO: 3228124 - RNA, 16 nt, Human
uuuuugagucaaagac

SEQ ID NO: 3228125 - RNA, 14 nt, Human
uuuuugauagcauu

SEQ ID NO: 3228126 - RNA, 19 nt, Human
uuuuugauagcauuguaag

SEQ ID NO: 3228127 - RNA, 13 nt, Human
uuuuugauagcau

SEQ ID NO: 3228128 - RNA, 15 nt, Human
uuuuuggaaagucag

SEQ ID NO: 3228129 - RNA, 17 nt, Human
uuuuuggaaagucagaa

SEQ ID NO: 3228130 - RNA, 15 nt, Human
uuuuuggaagugaaa

SEQ ID NO: 3228131 - RNA, 19 nt, Human
uuuuuggaagugaaaacuu

SEQ ID NO: 3228132 - RNA, 15 nt, Human
uuuuuggacacauuu

SEQ ID NO: 3228133 - RNA, 18 nt, Human
uuuuugcaggagcaguau

SEQ ID NO: 3228134 - RNA, 14 nt, Human
uuuuugcucuaaaa

SEQ ID NO: 3228135 - RNA, 23 nt, Human
uuuuugaaggcagaaagcaaaau

SEQ ID NO: 3228136 - RNA, 22 nt, Human
uuuuugaaggcagaaagcaaaa

SEQ ID NO: 3228137 - RNA, 22 nt, Human
uuuuuauuucugucaguuauga

SEQ ID NO: 3228138 - RNA, 15 nt, Human
uuuuuauuucuccuu

SEQ ID NO: 3228139 - RNA, 21 nt, Human
uuuuuauuuauauguaugugu

SEQ ID NO: 3228140 - RNA, 14 nt, Human
uuuuuauuucuccu

SEQ ID NO: 3228141 - RNA, 13 nt, Human
uuuuuauuuauau

SEQ ID NO: 3228142 - RNA, 22 nt, Human
uuuuuauauuucaaguacacug

SEQ ID NO: 3228143 - RNA, 17 nt, Human
uuuuuauuuauauguau

SEQ ID NO: 3228144 - RNA, 14 nt, Human
uuuuuauuuauaug

SEQ ID NO: 3228145 - RNA, 18 nt, Human
uuuuguugcacugaaguu

SEQ ID NO: 3228146 - RNA, 15 nt, Human
uuuuguugcacugaa

SEQ ID NO: 3228147 - RNA, 13 nt, Human
uuuuguugcacug

SEQ ID NO: 3228148 - RNA, 12 nt, Human
uuuuguugcacu

SEQ ID NO: 3228149 - RNA, 11 nt, Human
uuuuguugcac

SEQ ID NO: 3228150 - RNA, 14 nt, Human
uuuugugcauugga

SEQ ID NO: 3228151 - RNA, 21 nt, Human
uuuuguuccacaaguuaaaua

SEQ ID NO: 3228152 - RNA, 16 nt, Human
uuuuguuacucuuggg

SEQ ID NO: 3228153 - RNA, 21 nt, Human
uuuuguugcacugaaguuuga

SEQ ID NO: 3228154 - RNA, 13 nt, Human
uuuuguuguuucu

SEQ ID NO: 3228155 - RNA, 23 nt, Human
uuuuguuguuucuuaauuuggaa

SEQ ID NO: 3228156 - RNA, 15 nt, Human
uuuuguuuucauuau

SEQ ID NO: 3228157 - RNA, 16 nt, Human
uuuuguuuuugucuua

SEQ ID NO: 3228158 - RNA, 13 nt, Human
uuuuguuuugcuu

SEQ ID NO: 3228159 - RNA, 14 nt, Human
uuuuuauaucuugg

SEQ ID NO: 3228160 - RNA, 21 nt, Human
uuuuuauauuucaaguacacu

SEQ ID NO: 3228161 - RNA, 14 nt, Human
uuuuuauauuucaa

SEQ ID NO: 3228162 - RNA, 21 nt, Human
uuuuuauaccuguuuaaauug

SEQ ID NO: 3228163 - RNA, 17 nt, Human
uuuuuauauauaugcau

SEQ ID NO: 3228164 - RNA, 16 nt, Human
uuuuguuuuuugaguc

SEQ ID NO: 3228165 - RNA, 18 nt, Human
uuuuguuuuucugcuuua

SEQ ID NO: 3228166 - RNA, 15 nt, Human
uuuuguuuuguugca

SEQ ID NO: 3228167 - RNA, 20 nt, Human
uuuuuacaaguuauaguacu

SEQ ID NO: 3228168 - RNA, 13 nt, Human
uuuuuaauuguau

SEQ ID NO: 3228169 - RNA, 19 nt, Human
uuuugugaagugaaggauu

SEQ ID NO: 3228170 - RNA, 22 nt, Human
uuuugugaaauuuuucauauuu

SEQ ID NO: 3228171 - RNA, 20 nt, Human
uuuugugaaauuuuucauau

SEQ ID NO: 3228172 - RNA, 17 nt, Human
uuuugugaaauuuuuca

SEQ ID NO: 3228173 - RNA, 13 nt, Human
uuuugugaaauuu

SEQ ID NO: 3228174 - RNA, 12 nt, Human
uuuugugaaauu

SEQ ID NO: 3228175 - RNA, 15 nt, Human
uuuugugcugcuucu

SEQ ID NO: 3228176 - RNA, 14 nt, Human
uuuugugaguuugu

SEQ ID NO: 3228177 - RNA, 23 nt, Human
uuuugugaguuuguuucuuugaa

SEQ ID NO: 3228178 - RNA, 16 nt, Human
uuuugugguuuggaau

SEQ ID NO: 3228179 - RNA, 17 nt, Human
uuuugugguuuggaaua

SEQ ID NO: 3228180 - RNA, 12 nt, Human
uuuuguguuuau

SEQ ID NO: 3228181 - RNA, 16 nt, Human
uuuuguguugaagagc

SEQ ID NO: 3228182 - RNA, 23 nt, Human
uuuuguguuuauucuugaugaaa

SEQ ID NO: 3228183 - RNA, 14 nt, Human
uuuuggacuuuguu

SEQ ID NO: 3228184 - RNA, 15 nt, Human
uuuuggacuuuguua

SEQ ID NO: 3228185 - RNA, 14 nt, Human
uuuuggaaagucag

SEQ ID NO: 3228186 - RNA, 17 nt, Human
uuuuggaaagucagaau

SEQ ID NO: 3228187 - RNA, 22 nt, Human
uuuuggaaaacgauuuaauuua

SEQ ID NO: 3228188 - RNA, 19 nt, Human
uuuugcuuuaauuccauga

SEQ ID NO: 3228189 - RNA, 13 nt, Human
uuuugcuuuaauu

SEQ ID NO: 3228190 - RNA, 22 nt, Human
uuuugcuugaagcaaacaguug

SEQ ID NO: 3228191 - RNA, 13 nt, Human
uuuugcuuccccu

SEQ ID NO: 3228192 - RNA, 18 nt, Human
uuuugcuuuaauuuuagc

SEQ ID NO: 3228193 - RNA, 17 nt, Human
uuuugcuuuaauuuuag

SEQ ID NO: 3228194 - RNA, 11 nt, Human
uuuugcuuuug

SEQ ID NO: 3228195 - RNA, 13 nt, Human
auuaaaauuguug

SEQ ID NO: 3228196 - RNA, 13 nt, Human
auuaaacaaaguu

SEQ ID NO: 3228197 - RNA, 20 nt, Human
auuaaacaaaguuucagagu

SEQ ID NO: 3228198 - RNA, 23 nt, Human
auuaaaauaugcacuaagucucu

SEQ ID NO: 3228199 - RNA, 17 nt, Human
auuacuguuuaagacac

SEQ ID NO: 3228200 - RNA, 12 nt, Human
auuaauauuugu

SEQ ID NO: 3228201 - RNA, 17 nt, Human
auuaauauuuguuuagu

SEQ ID NO: 3228202 - RNA, 22 nt, Human
auuaaucacccuaccaacuuua

SEQ ID NO: 3228203 - RNA, 12 nt, Human
auuaaucacugu

SEQ ID NO: 3228204 - RNA, 13 nt, Human
auuaaucacugug

SEQ ID NO: 3228205 - RNA, 14 nt, Human
auuaaucacugugu

SEQ ID NO: 3228206 - RNA, 15 nt, Human
auuaaucacugugua

SEQ ID NO: 3228207 - RNA, 16 nt, Human
auuaaucacuguguau

SEQ ID NO: 3228208 - RNA, 17 nt, Human
auuaaucacuguguaua

SEQ ID NO: 3228209 - RNA, 18 nt, Human
auuaaucacuguguauau

SEQ ID NO: 3228210 - RNA, 19 nt, Human
auuaaucacuguguauauu

SEQ ID NO: 3228211 - RNA, 20 nt, Human
auuaaucacuguguauauuu

SEQ ID NO: 3228212 - RNA, 21 nt, Human
auuaaucacuguguauauuug

SEQ ID NO: 3228213 - RNA, 22 nt, Human
auuaaucacuguguauauuuga

SEQ ID NO: 3228214 - RNA, 23 nt, Human
auuaaucacuguguauauuugau

SEQ ID NO: 3228215 - RNA, 16 nt, Human
auuagacuucuguuuu

SEQ ID NO: 3228216 - RNA, 15 nt, Human
auuagacuucuguuu

SEQ ID NO: 3228217 - RNA, 14 nt, Human
auuagacuucuguu

SEQ ID NO: 3228218 - RNA, 13 nt, Human
auuacuucugcua

SEQ ID NO: 3228219 - RNA, 12 nt, Human
auuacuucugcu

SEQ ID NO: 3228220 - RNA, 14 nt, Human
auuacuucugcuac

SEQ ID NO: 3228221 - RNA, 15 nt, Human
auuacuuguugccua

SEQ ID NO: 3228222 - RNA, 19 nt, Human
auuuaugguaaucauauua

SEQ ID NO: 3228223 - RNA, 12 nt, Human
auuuauuacaua

SEQ ID NO: 3228224 - RNA, 17 nt, Human
auuuaguuguuucuaga

SEQ ID NO: 3228225 - RNA, 20 nt, Human
auuuacuucuuauacauuug

SEQ ID NO: 3228226 - RNA, 19 nt, Human
auuuacuucuuauacauuu

SEQ ID NO: 3228227 - RNA, 15 nt, Human
auuuaaaauugugau

SEQ ID NO: 3228228 - RNA, 12 nt, Human
auuuaaaaugua

SEQ ID NO: 3228229 - RNA, 14 nt, Human
auuuacaagaagaa

SEQ ID NO: 3228230 - RNA, 13 nt, Human
auuuacaauguau

SEQ ID NO: 3228231 - RNA, 14 nt, Human
auuuacaauguauu

SEQ ID NO: 3228232 - RNA, 15 nt, Human
auuuacaauguauua

SEQ ID NO: 3228233 - RNA, 16 nt, Human
auuuacaauguauuaa

SEQ ID NO: 3228234 - RNA, 17 nt, Human
auuuacaauguauuaag

SEQ ID NO: 3228235 - RNA, 13 nt, Human
auuuaaaugauuu

SEQ ID NO: 3228236 - RNA, 19 nt, Human
auuuacaagacaacauugu

SEQ ID NO: 3228237 - RNA, 17 nt, Human
auuuacuucuuauacau

SEQ ID NO: 3228238 - RNA, 22 nt, Human
auuuacuacaauauguacauuu

SEQ ID NO: 3228239 - RNA, 17 nt, Human
auuguagagccagaggu

SEQ ID NO: 3228240 - RNA, 18 nt, Human
auuguagagccagagguc

SEQ ID NO: 3228241 - RNA, 17 nt, Human
auuguuuucaguguaca

SEQ ID NO: 3228242 - RNA, 17 nt, Human
auuuaaaaaaaaaccug

SEQ ID NO: 3228243 - RNA, 19 nt, Human
auuguuuucaguguacaug

SEQ ID NO: 3228244 - RNA, 18 nt, Human
auuguuuucaguguacau

SEQ ID NO: 3228245 - RNA, 20 nt, Human
auuguuuuucugauauguuu

SEQ ID NO: 3228246 - RNA, 20 nt, Human
auuuaaaaguaaaaugucuu

SEQ ID NO: 3228247 - RNA, 21 nt, Human
auuuaaaaguaaaaugucuuu

SEQ ID NO: 3228248 - RNA, 14 nt, Human
auuucccaaagcag

SEQ ID NO: 3228249 - RNA, 16 nt, Human
auuucccaaagcagug

SEQ ID NO: 3228250 - RNA, 15 nt, Human
auuuccuauaccauu

SEQ ID NO: 3228251 - RNA, 18 nt, Human
auuucuuaauuauuauaa

SEQ ID NO: 3228252 - RNA, 19 nt, Human
auuucuuaauuauuauaaa

SEQ ID NO: 3228253 - RNA, 22 nt, Human
auuucuuaauuauuauaaaaau

SEQ ID NO: 3228254 - RNA, 23 nt, Human
auuucuuaauuauuauaaaaaua

SEQ ID NO: 3228255 - RNA, 16 nt, Human
auuucgugacuuuuuu

SEQ ID NO: 3228256 - RNA, 15 nt, Human
auuucgcuucuuaga

SEQ ID NO: 3228257 - RNA, 16 nt, Human
auuuccucuugaacca

SEQ ID NO: 3228258 - RNA, 20 nt, Human
auuuauuuuuaagaaagaaa

SEQ ID NO: 3228259 - RNA, 19 nt, Human
auuuauuuuuaagaaagaa

SEQ ID NO: 3228260 - RNA, 18 nt, Human
auuuauuuuuaagaaaga

SEQ ID NO: 3228261 - RNA, 19 nt, Human
auuuauuuuuuuuaauugu

SEQ ID NO: 3228262 - RNA, 21 nt, Human
auuuauuuuuuuuaauuguau

SEQ ID NO: 3228263 - RNA, 15 nt, Human
auuuauuuuguauga

SEQ ID NO: 3228264 - RNA, 16 nt, Human
auuuauuuuguaugaa

SEQ ID NO: 3228265 - RNA, 20 nt, Human
auuuauuuuguaugaaauau

SEQ ID NO: 3228266 - RNA, 22 nt, Human
auuuauuuuguaugaaauauau

SEQ ID NO: 3228267 - RNA, 18 nt, Human
auuuccauguaugcauaa

SEQ ID NO: 3228268 - RNA, 17 nt, Human
auuuccauguaugcaua

SEQ ID NO: 3228269 - RNA, 15 nt, Human
auuuccauguaugca

SEQ ID NO: 3228270 - RNA, 14 nt, Human
auuuccauguaugc

SEQ ID NO: 3228271 - RNA, 23 nt, Human
auuucauguccugugucaguuua

SEQ ID NO: 3228272 - RNA, 22 nt, Human
auuucauguccugugucaguuu

SEQ ID NO: 3228273 - RNA, 21 nt, Human
auuucauguccugugucaguu

SEQ ID NO: 3228274 - RNA, 18 nt, Human
auuucauguccuguguca

SEQ ID NO: 3228275 - RNA, 13 nt, Human
auuucauguccau

SEQ ID NO: 3228276 - RNA, 21 nt, Human
auuucauguccauaaaagaga

SEQ ID NO: 3228277 - RNA, 22 nt, Human
auuuauuuuuuuuaauuguauu

SEQ ID NO: 3228278 - RNA, 23 nt, Human
auuuauuuuuuuuaauuguauuu

SEQ ID NO: 3228279 - RNA, 22 nt, Human
auuuauucugggaauguauagu

SEQ ID NO: 3228280 - RNA, 21 nt, Human
auuuauucugggaauguauag

SEQ ID NO: 3228281 - RNA, 20 nt, Human
auuuauucugggaauguaua

SEQ ID NO: 3228282 - RNA, 19 nt, Human
auuuauucugggaauguau

SEQ ID NO: 3228283 - RNA, 18 nt, Human
auuuauucugggaaugua

SEQ ID NO: 3228284 - RNA, 16 nt, Human
auuuauucugggaaug

SEQ ID NO: 3228285 - RNA, 21 nt, Human
auuuauugaggaaaaauaugu

SEQ ID NO: 3228286 - RNA, 18 nt, Human
auuuauugaggaaaaaua

SEQ ID NO: 3228287 - RNA, 17 nt, Human
auuuauugaggaaaaau

SEQ ID NO: 3228288 - RNA, 15 nt, Human
auuuauugaggaaaa

SEQ ID NO: 3228289 - RNA, 14 nt, Human
auuuauugaggaaa

SEQ ID NO: 3228290 - RNA, 11 nt, Human
auuuauucuuu

SEQ ID NO: 3228291 - RNA, 13 nt, Human
auuuauugacucu

SEQ ID NO: 3228292 - RNA, 14 nt, Human
auuuauugacucuu

SEQ ID NO: 3228293 - RNA, 16 nt, Human
auuuauugacucuuga

SEQ ID NO: 3228294 - RNA, 19 nt, Human
auuuauugacucuugaguu

SEQ ID NO: 3228295 - RNA, 20 nt, Human
auuuauugacucuugaguug

SEQ ID NO: 3228296 - RNA, 22 nt, Human
auuuauugacucuugaguuguu

SEQ ID NO: 3228297 - RNA, 23 nt, Human
auuuggaggcuggaguaaucaga

SEQ ID NO: 3228298 - RNA, 15 nt, Human
auuuggagggccugg

SEQ ID NO: 3228299 - RNA, 16 nt, Human
auuuggauaucuguua

SEQ ID NO: 3228300 - RNA, 17 nt, Human
auuuggauaucuguuag

SEQ ID NO: 3228301 - RNA, 17 nt, Human
auuuggagggccugggc

SEQ ID NO: 3228302 - RNA, 16 nt, Human
auuuggagggccuggg

SEQ ID NO: 3228303 - RNA, 14 nt, Human
auuuggagagaaau

SEQ ID NO: 3228304 - RNA, 18 nt, Human
auuuggagagaaauauuu

SEQ ID NO: 3228305 - RNA, 20 nt, Human
auuuggagcacaaaauucaa

SEQ ID NO: 3228306 - RNA, 17 nt, Human
auuuggagagaaauauu

SEQ ID NO: 3228307 - RNA, 16 nt, Human
auuuggagagaaauau

SEQ ID NO: 3228308 - RNA, 15 nt, Human
auuuggagagaaaua

SEQ ID NO: 3228309 - RNA, 12 nt, Human
auuugagauuuu

SEQ ID NO: 3228310 - RNA, 19 nt, Human
auuuggauuauucuuucuc

SEQ ID NO: 3228311 - RNA, 22 nt, Human
auuuggagggccugggccuggc

SEQ ID NO: 3228312 - RNA, 14 nt, Human
auuuggaugcagag

SEQ ID NO: 3228313 - RNA, 21 nt, Human
auuuguacagauucuuuauua

SEQ ID NO: 3228314 - RNA, 13 nt, Human
auuuguaauuuaa

SEQ ID NO: 3228315 - RNA, 18 nt, Human
auuugaauuaucagcaaa

SEQ ID NO: 3228316 - RNA, 23 nt, Human
auuugaauuaucagcaaagaaaa

SEQ ID NO: 3228317 - RNA, 17 nt, Human
auuugaauuauuucugu

SEQ ID NO: 3228318 - RNA, 15 nt, Human
auuugagcagggcuc

SEQ ID NO: 3228319 - RNA, 23 nt, Human
auuugaauguaugcuucauacag

SEQ ID NO: 3228320 - RNA, 13 nt, Human
auugccuuucugu

SEQ ID NO: 3228321 - RNA, 17 nt, Human
auuggaaugcacucaga

SEQ ID NO: 3228322 - RNA, 22 nt, Human
auuggaagcagguuaaauguuu

SEQ ID NO: 3228323 - RNA, 21 nt, Human
auuggaagcagguuaaauguu

SEQ ID NO: 3228324 - RNA, 20 nt, Human
auuggaagcagguuaaaugu

SEQ ID NO: 3228325 - RNA, 19 nt, Human
auuggaagcagguuaaaug

SEQ ID NO: 3228326 - RNA, 12 nt, Human
auuggaagcagg

SEQ ID NO: 3228327 - RNA, 14 nt, Human
auuggaaauuucac

SEQ ID NO: 3228328 - RNA, 15 nt, Human
auuggaaauuucacg

SEQ ID NO: 3228329 - RNA, 13 nt, Human
auuggaaauuuca

SEQ ID NO: 3228330 - RNA, 22 nt, Human
auugcauauaacuuauauugua

SEQ ID NO: 3228331 - RNA, 18 nt, Human
auugcauauaacuuauau

SEQ ID NO: 3228332 - RNA, 16 nt, Human
auugcauauaacuuau

SEQ ID NO: 3228333 - RNA, 15 nt, Human
auugcaucauuuaca

SEQ ID NO: 3228334 - RNA, 21 nt, Human
auugcaucuggguagcuguaa

SEQ ID NO: 3228335 - RNA, 20 nt, Human
auugcaucuggguagcugua

SEQ ID NO: 3228336 - RNA, 23 nt, Human
auugcaugccgggugcagcaucu

SEQ ID NO: 3228337 - RNA, 19 nt, Human
auugcaugccgggugcagc

SEQ ID NO: 3228338 - RNA, 22 nt, Human
auugcaucuggguagcuguaag

SEQ ID NO: 3228339 - RNA, 12 nt, Human
auugauguugau

SEQ ID NO: 3228340 - RNA, 14 nt, Human
auugauguugaugc

SEQ ID NO: 3228341 - RNA, 13 nt, Human
auugauguugaug

SEQ ID NO: 3228342 - RNA, 18 nt, Human
auugauguugaugcaauc

SEQ ID NO: 3228343 - RNA, 16 nt, Human
auugauguugaugcaa

SEQ ID NO: 3228344 - RNA, 15 nt, Human
auugauuugauuuuu

SEQ ID NO: 3228345 - RNA, 14 nt, Human
auugauguuuccuu

SEQ ID NO: 3228346 - RNA, 20 nt, Human
auugauuuuaaaauguacau

SEQ ID NO: 3228347 - RNA, 19 nt, Human
auugauuuuaaaauguaca

SEQ ID NO: 3228348 - RNA, 16 nt, Human
auugauuuuaaaaugu

SEQ ID NO: 3228349 - RNA, 15 nt, Human
auugauuuuaaaaug

SEQ ID NO: 3228350 - RNA, 18 nt, Human
auugcaacaggcugggcu

SEQ ID NO: 3228351 - RNA, 17 nt, Human
auugcaacaggcugggc

SEQ ID NO: 3228352 - RNA, 12 nt, Human
auugcaccacug

SEQ ID NO: 3228353 - RNA, 19 nt, Human
auugcaacaggcugggcuu

SEQ ID NO: 3228354 - RNA, 16 nt, Human
auugcaacaggcuggg

SEQ ID NO: 3228355 - RNA, 12 nt, Human
auugaaauucua

SEQ ID NO: 3228356 - RNA, 18 nt, Human
auugaagguuuuugauag

SEQ ID NO: 3228357 - RNA, 19 nt, Human
auugaagguuuuugauagc

SEQ ID NO: 3228358 - RNA, 13 nt, Human
auugaagguuuuu

SEQ ID NO: 3228359 - RNA, 17 nt, Human
auugaagguuuuugaua

SEQ ID NO: 3228360 - RNA, 20 nt, Human
auugaaggugauaagggaaa

SEQ ID NO: 3228361 - RNA, 22 nt, Human
auugaaggugauaagggaaaag

SEQ ID NO: 3228362 - RNA, 20 nt, Human
auugaagguuuuugauagca

SEQ ID NO: 3228363 - RNA, 13 nt, Human
auugaaguuucaa

SEQ ID NO: 3228364 - RNA, 15 nt, Human
auugaaguuucaagu

SEQ ID NO: 3228365 - RNA, 16 nt, Human
auugaaguuucaaguu

SEQ ID NO: 3228366 - RNA, 20 nt, Human
auugaaguuucaaguuuuaa

SEQ ID NO: 3228367 - RNA, 20 nt, Human
auugaauuuuuauuuuugaa

SEQ ID NO: 3228368 - RNA, 20 nt, Human
auugaauggugcauuguaua

SEQ ID NO: 3228369 - RNA, 15 nt, Human
ugaugggucaguugu

SEQ ID NO: 3228370 - RNA, 22 nt, Human
ugaugggcagccugcuggucag

SEQ ID NO: 3228371 - RNA, 17 nt, Human
ugaugggcagccugcug

SEQ ID NO: 3228372 - RNA, 22 nt, Human
ugauggggcccugccuccuuug

SEQ ID NO: 3228373 - RNA, 19 nt, Human
ugauggguuaguggaugga

SEQ ID NO: 3228374 - RNA, 23 nt, Human
ugauggguuaguggauggaaggg

SEQ ID NO: 3228375 - RNA, 17 nt, Human
ugauguuuuccaugagu

SEQ ID NO: 3228376 - RNA, 19 nt, Human
ugauguuuuccaugagucc

SEQ ID NO: 3228377 - RNA, 21 nt, Human
ugauuaacuuggaugaguuuu

SEQ ID NO: 3228378 - RNA, 14 nt, Human
ugauuaacuuggau

SEQ ID NO: 3228379 - RNA, 13 nt, Human
ugauuaacuugga

SEQ ID NO: 3228380 - RNA, 17 nt, Human
ugauuaacucaguccug

SEQ ID NO: 3228381 - RNA, 16 nt, Human
agccacggccaggcca

SEQ ID NO: 3228382 - RNA, 20 nt, Human
ugauuaaccacuucagcuga

SEQ ID NO: 3228383 - RNA, 18 nt, Human
ugaugaaaauauuuaaag

SEQ ID NO: 3228384 - RNA, 22 nt, Human
ugaugaaaugaggucagagccu

SEQ ID NO: 3228385 - RNA, 14 nt, Human
ugaucuaggaagac

SEQ ID NO: 3228386 - RNA, 15 nt, Human
ugaugaaaauauuua

SEQ ID NO: 3228387 - RNA, 17 nt, Human
ugaugaucuuuaaaaua

SEQ ID NO: 3228388 - RNA, 23 nt, Human
ugaugaaaugaggucagagccug

SEQ ID NO: 3228389 - RNA, 20 nt, Human
ugaugaucuuugcagacagg

SEQ ID NO: 3228390 - RNA, 19 nt, Human
ugaugaucuuugcagacag

SEQ ID NO: 3228391 - RNA, 21 nt, Human
ugaugaucuuugcagacaggc

SEQ ID NO: 3228392 - RNA, 19 nt, Human
ugaugaaauaacacagcag

SEQ ID NO: 3228393 - RNA, 13 nt, Human
ugauggggcccug

SEQ ID NO: 3228394 - RNA, 22 nt, Human
ugaugggcaacccccagccugc

SEQ ID NO: 3228395 - RNA, 21 nt, Human
ugaugggcaacccccagccug

SEQ ID NO: 3228396 - RNA, 17 nt, Human
ugauggcuuaugauagc

SEQ ID NO: 3228397 - RNA, 18 nt, Human
ugauccacucgccuucau

SEQ ID NO: 3228398 - RNA, 14 nt, Human
ugauccacucgccu

SEQ ID NO: 3228399 - RNA, 15 nt, Human
agccacccaaagcag

SEQ ID NO: 3228400 - RNA, 14 nt, Human
agccacccaaagca

SEQ ID NO: 3228401 - RNA, 18 nt, Human
agccacccaaagcagugg

SEQ ID NO: 3228402 - RNA, 18 nt, Human
ugauccucccaccucagc

SEQ ID NO: 3228403 - RNA, 23 nt, Human
ugaucccuuccaccugcucugcu

SEQ ID NO: 3228404 - RNA, 20 nt, Human
ugaucccuuccaccugcucu

SEQ ID NO: 3228405 - RNA, 20 nt, Human
ugauccucccaccucagccu

SEQ ID NO: 3228406 - RNA, 19 nt, Human
ugauccucccaccucagcc

SEQ ID NO: 3228407 - RNA, 13 nt, Human
ugaucuaggaaga

SEQ ID NO: 3228408 - RNA, 16 nt, Human
ugauccucccaccuca

SEQ ID NO: 3228409 - RNA, 13 nt, Human
agccaccacgccc

SEQ ID NO: 3228410 - RNA, 22 nt, Human
agccaccagaugugacaguguu

SEQ ID NO: 3228411 - RNA, 14 nt, Human
agccaccagaugug

SEQ ID NO: 3228412 - RNA, 21 nt, Human
agcauauucaggaagcucagg

SEQ ID NO: 3228413 - RNA, 17 nt, Human
agcauauucaggaagcu

SEQ ID NO: 3228414 - RNA, 19 nt, Human
agcauauucaggaagcuca

SEQ ID NO: 3228415 - RNA, 14 nt, Human
ugaucacggcucac

SEQ ID NO: 3228416 - RNA, 13 nt, Human
ugaucacggcuca

SEQ ID NO: 3228417 - RNA, 15 nt, Human
ugaucacggcucacu

SEQ ID NO: 3228418 - RNA, 14 nt, Human
ugaucaccugcccu

SEQ ID NO: 3228419 - RNA, 21 nt, Human
ugauaauuuuccuuuaauaug

SEQ ID NO: 3228420 - RNA, 13 nt, Human
agcauggcugcca

SEQ ID NO: 3228421 - RNA, 16 nt, Human
agcauauucaggaagc

SEQ ID NO: 3228422 - RNA, 14 nt, Human
agcaucacuuaaaa

SEQ ID NO: 3228423 - RNA, 16 nt, Human
agcaucacuuaaaaca

SEQ ID NO: 3228424 - RNA, 17 nt, Human
agcaucacuuaaaacac

SEQ ID NO: 3228425 - RNA, 18 nt, Human
agcaucacuuaaaacacg

SEQ ID NO: 3228426 - RNA, 22 nt, Human
agcaucacuuaaaacacguuuu

SEQ ID NO: 3228427 - RNA, 22 nt, Human
agcaucaggccaggcccucugc

SEQ ID NO: 3228428 - RNA, 21 nt, Human
agcaucaggccaggcccucug

SEQ ID NO: 3228429 - RNA, 23 nt, Human
agcaucaggccaggcccucugcc

SEQ ID NO: 3228430 - RNA, 20 nt, Human
agcaucaguacuuguuucua

SEQ ID NO: 3228431 - RNA, 12 nt, Human
agcauucucucc

SEQ ID NO: 3228432 - RNA, 19 nt, Human
agcauucuuuggaguuaaa

SEQ ID NO: 3228433 - RNA, 22 nt, Human
agcauucuuuggaguuaaaaug

SEQ ID NO: 3228434 - RNA, 24 nt, Human
agcauucuuuggaguuaaaaugca

SEQ ID NO: 3228435 - RNA, 22 nt, Human
agcauucucacuccuaccuggu

SEQ ID NO: 3228436 - RNA, 14 nt, Human
agcauuccagucag

SEQ ID NO: 3228437 - RNA, 14 nt, Human
agcauucggaggga

SEQ ID NO: 3228438 - RNA, 20 nt, Human
agcauucucacuccuaccug

SEQ ID NO: 3228439 - RNA, 18 nt, Human
agcauucucacuccuacc

SEQ ID NO: 3228440 - RNA, 19 nt, Human
agcauggcugccaauggga

SEQ ID NO: 3228441 - RNA, 23 nt, Human
agcauuaccucuuuggaaaagga

SEQ ID NO: 3228442 - RNA, 19 nt, Human
agcauuaccucuuuggaaa

SEQ ID NO: 3228443 - RNA, 17 nt, Human
agcauuaccucuuugga

SEQ ID NO: 3228444 - RNA, 14 nt, Human
agcauuacaggcaa

SEQ ID NO: 3228445 - RNA, 17 nt, Human
agcauuagauuucucau

SEQ ID NO: 3228446 - RNA, 21 nt, Human
agcauuauaaucaccagggcc

SEQ ID NO: 3228447 - RNA, 16 nt, Human
agcauuagugggaaaa

SEQ ID NO: 3228448 - RNA, 15 nt, Human
agcauuuugcuaaau

SEQ ID NO: 3228449 - RNA, 22 nt, Human
agcauuuugcuaaaugugaaug

SEQ ID NO: 3228450 - RNA, 14 nt, Human
agcauuuuggcgcu

SEQ ID NO: 3228451 - RNA, 13 nt, Human
agcauuuuguaau

SEQ ID NO: 3228452 - RNA, 23 nt, Human
agccaaaaugugagugguugaau

SEQ ID NO: 3228453 - RNA, 15 nt, Human
agccaaaauuaaggu

SEQ ID NO: 3228454 - RNA, 18 nt, Human
agccaaacauccuacaag

SEQ ID NO: 3228455 - RNA, 17 nt, Human
agccaaaauuaaggugu

SEQ ID NO: 3228456 - RNA, 18 nt, Human
agccaaaauuaagguguu

SEQ ID NO: 3228457 - RNA, 22 nt, Human
agccaaacacacagaaggggac

SEQ ID NO: 3228458 - RNA, 18 nt, Human
agccaaacacacagaagg

SEQ ID NO: 3228459 - RNA, 15 nt, Human
agcauuuggugcuug

SEQ ID NO: 3228460 - RNA, 14 nt, Human
agcauuuggugcuu

SEQ ID NO: 3228461 - RNA, 13 nt, Human
agcauuuggugcu

SEQ ID NO: 3228462 - RNA, 12 nt, Human
agcauuugauau

SEQ ID NO: 3228463 - RNA, 21 nt, Human
agcauuugacuuucugucugu

SEQ ID NO: 3228464 - RNA, 17 nt, Human
agcauuugacuuucugu

SEQ ID NO: 3228465 - RNA, 16 nt, Human
agcauuugacuuucug

SEQ ID NO: 3228466 - RNA, 17 nt, Human
agcauuuaugguaauca

SEQ ID NO: 3228467 - RNA, 16 nt, Human
agcauuuguguguuac

SEQ ID NO: 3228468 - RNA, 20 nt, Human
agcagguccccagcuuuggc

SEQ ID NO: 3228469 - RNA, 21 nt, Human
agcagguccccagcuuuggcu

SEQ ID NO: 3228470 - RNA, 22 nt, Human
agcagggcucagcggggacagc

SEQ ID NO: 3228471 - RNA, 19 nt, Human
agcagggcauggcugggaa

SEQ ID NO: 3228472 - RNA, 20 nt, Human
agcagggagggcuucugcca

SEQ ID NO: 3228473 - RNA, 15 nt, Human
agcagggcucagcgg

SEQ ID NO: 3228474 - RNA, 14 nt, Human
agcagggcucagcg

SEQ ID NO: 3228475 - RNA, 13 nt, Human
agcagggcucagc

SEQ ID NO: 3228476 - RNA, 17 nt, Human
agcaggcucgggcuccc

SEQ ID NO: 3228477 - RNA, 13 nt, Human
agcaggcucucag

SEQ ID NO: 3228478 - RNA, 14 nt, Human
agcaggcucucagg

SEQ ID NO: 3228479 - RNA, 15 nt, Human
agcaggcucucaggc

SEQ ID NO: 3228480 - RNA, 16 nt, Human
agcaggcucucaggcc

SEQ ID NO: 3228481 - RNA, 17 nt, Human
agcaggcucucaggcca

SEQ ID NO: 3228482 - RNA, 18 nt, Human
agcaggcucucaggccag

SEQ ID NO: 3228483 - RNA, 19 nt, Human
agcaggcucucaggccagc

SEQ ID NO: 3228484 - RNA, 21 nt, Human
agcaggcucucaggccagcug

SEQ ID NO: 3228485 - RNA, 22 nt, Human
agcaggcucucaggccagcugc

SEQ ID NO: 3228486 - RNA, 23 nt, Human
agcaggcucucaggccagcugcu

SEQ ID NO: 3228487 - RNA, 15 nt, Human
agcagggaaacagcu

SEQ ID NO: 3228488 - RNA, 14 nt, Human
agcagggaaacagc

SEQ ID NO: 3228489 - RNA, 13 nt, Human
agcagggaaacag

SEQ ID NO: 3228490 - RNA, 15 nt, Human
agcaggcugugaguu

SEQ ID NO: 3228491 - RNA, 14 nt, Human
agcaggcuacuguc

SEQ ID NO: 3228492 - RNA, 23 nt, Human
agcaggcccaugggaggcuggag

SEQ ID NO: 3228493 - RNA, 13 nt, Human
agcaggcagccuu

SEQ ID NO: 3228494 - RNA, 10 nt, Human
agcaggcagc

SEQ ID NO: 3228495 - RNA, 20 nt, Human
agcaggcuacugucagcucc

SEQ ID NO: 3228496 - RNA, 19 nt, Human
agcaggcuacugucagcuc

SEQ ID NO: 3228497 - RNA, 17 nt, Human
agcaggcuacugucagc

SEQ ID NO: 3228498 - RNA, 16 nt, Human
agcaggcuacugucag

SEQ ID NO: 3228499 - RNA, 10 nt, Human
agcaggaggc

SEQ ID NO: 3228500 - RNA, 14 nt, Human
agcaggagggacag

SEQ ID NO: 3228501 - RNA, 15 nt, Human
agcaggaggcuggga

SEQ ID NO: 3228502 - RNA, 19 nt, Human
agcaggagggacagucuca

SEQ ID NO: 3228503 - RNA, 18 nt, Human
agcaggagggacagucuc

SEQ ID NO: 3228504 - RNA, 11 nt, Human
agcaggcagcc

SEQ ID NO: 3228505 - RNA, 13 nt, Human
agcaggacaugga

SEQ ID NO: 3228506 - RNA, 11 nt, Human
agcagccacau

SEQ ID NO: 3228507 - RNA, 16 nt, Human
agcagcagggagggcu

SEQ ID NO: 3228508 - RNA, 20 nt, Human
ugacccaugcugcccuguga

SEQ ID NO: 3228509 - RNA, 18 nt, Human
ugacccaugcugcccugu

SEQ ID NO: 3228510 - RNA, 19 nt, Human
ugacccaugcugcccugug

SEQ ID NO: 3228511 - RNA, 17 nt, Human
ugacccaugcugcccug

SEQ ID NO: 3228512 - RNA, 17 nt, Human
ugauaauauauuguguu

SEQ ID NO: 3228513 - RNA, 21 nt, Human
ugauaauauauuguguugacu

SEQ ID NO: 3228514 - RNA, 15 nt, Human
ugauaauagaagagu

SEQ ID NO: 3228515 - RNA, 13 nt, Human
ugauaauagaaga

SEQ ID NO: 3228516 - RNA, 13 nt, Human
ugauaauuuuccu

SEQ ID NO: 3228517 - RNA, 19 nt, Human
ugauaauuuuccuuuaaua

SEQ ID NO: 3228518 - RNA, 17 nt, Human
ugauaauuuuccuuuaa

SEQ ID NO: 3228519 - RNA, 14 nt, Human
ugauaauuuuccuu

SEQ ID NO: 3228520 - RNA, 18 nt, Human
ugaguuccuagccaccgc

SEQ ID NO: 3228521 - RNA, 17 nt, Human
ugaguuccggcaccagu

SEQ ID NO: 3228522 - RNA, 16 nt, Human
ugaguuccaguugaag

SEQ ID NO: 3228523 - RNA, 17 nt, Human
ugaguuccaguugaagu

SEQ ID NO: 3228524 - RNA, 19 nt, Human
ugaguuccaguugaaguua

SEQ ID NO: 3228525 - RNA, 14 nt, Human
ugaguuccuagcca

SEQ ID NO: 3228526 - RNA, 18 nt, Human
ugaguucauacccuguua

SEQ ID NO: 3228527 - RNA, 14 nt, Human
ugaguuaagucuau

SEQ ID NO: 3228528 - RNA, 18 nt, Human
ugagugucuuaauuaaaa

SEQ ID NO: 3228529 - RNA, 21 nt, Human
ugagugggggaucacagccuc

SEQ ID NO: 3228530 - RNA, 21 nt, Human
ugagugugauccaguuuuuca

SEQ ID NO: 3228531 - RNA, 17 nt, Human
ugagugcagcucuggag

SEQ ID NO: 3228532 - RNA, 16 nt, Human
ugagugcaggcccacc

SEQ ID NO: 3228533 - RNA, 15 nt, Human
ugagugcaggcccac

SEQ ID NO: 3228534 - RNA, 14 nt, Human
ugagugcaggccca

SEQ ID NO: 3228535 - RNA, 13 nt, Human
ugagugcaggccc

SEQ ID NO: 3228536 - RNA, 13 nt, Human
ugagugccuuaca

SEQ ID NO: 3228537 - RNA, 14 nt, Human
ugagugccuuacac

SEQ ID NO: 3228538 - RNA, 14 nt, Human
ugagugcauguacu

SEQ ID NO: 3228539 - RNA, 18 nt, Human
ugagugcaggcccacccu

SEQ ID NO: 3228540 - RNA, 20 nt, Human
ugaguccaaacuggaaugag

SEQ ID NO: 3228541 - RNA, 20 nt, Human
ugaguacaugcacacucaug

SEQ ID NO: 3228542 - RNA, 18 nt, Human
ugagucaccaagcccagu

SEQ ID NO: 3228543 - RNA, 14 nt, Human
agcaguauauguua

SEQ ID NO: 3228544 - RNA, 15 nt, Human
agcaguauauguuaa

SEQ ID NO: 3228545 - RNA, 20 nt, Human
agcaguauauguuaauuugu

SEQ ID NO: 3228546 - RNA, 15 nt, Human
agcaguauauuagua

SEQ ID NO: 3228547 - RNA, 16 nt, Human
agcaguauauuaguau

SEQ ID NO: 3228548 - RNA, 15 nt, Human
agcaguaagggaaca

SEQ ID NO: 3228549 - RNA, 16 nt, Human
agcaguaucaugaagc

SEQ ID NO: 3228550 - RNA, 11 nt, Human
agcaguauuuu

SEQ ID NO: 3228551 - RNA, 13 nt, Human
agcaguauuuugg

SEQ ID NO: 3228552 - RNA, 22 nt, Human
agcagguuaaauguuuuguaaa

SEQ ID NO: 3228553 - RNA, 14 nt, Human
agcagguuaaaugu

SEQ ID NO: 3228554 - RNA, 18 nt, Human
agcaggugugagggcagu

SEQ ID NO: 3228555 - RNA, 20 nt, Human
agcagguuaaauguuuugua

SEQ ID NO: 3228556 - RNA, 18 nt, Human
agcagguuaaauguuuug

SEQ ID NO: 3228557 - RNA, 16 nt, Human
agcagguuaaauguuu

SEQ ID NO: 3228558 - RNA, 15 nt, Human
agcagguuaaauguu

SEQ ID NO: 3228559 - RNA, 17 nt, Human
agcaguuucaauaaagu

SEQ ID NO: 3228560 - RNA, 15 nt, Human
agcaguuucaauaaa

SEQ ID NO: 3228561 - RNA, 14 nt, Human
agcaguuucaauaa

SEQ ID NO: 3228562 - RNA, 14 nt, Human
agcaguuugcuuug

SEQ ID NO: 3228563 - RNA, 14 nt, Human
agcaguuucaggua

SEQ ID NO: 3228564 - RNA, 21 nt, Human
agcaguuucaauaaaguuuga

SEQ ID NO: 3228565 - RNA, 20 nt, Human
agcaguuucaauaaaguuug

SEQ ID NO: 3228566 - RNA, 19 nt, Human
agcauaaaaauuagccaag

SEQ ID NO: 3228567 - RNA, 13 nt, Human
agcauaccaacac

SEQ ID NO: 3228568 - RNA, 23 nt, Human
agcauaaaaauuagccaagugug

SEQ ID NO: 3228569 - RNA, 20 nt, Human
agcaguuuucuuuuaauuuu

SEQ ID NO: 3228570 - RNA, 22 nt, Human
agcauaccaacacgagcaggcu

SEQ ID NO: 3228571 - RNA, 19 nt, Human
agcauaccaacacgagcag

SEQ ID NO: 3228572 - RNA, 23 nt, Human
agcauauaaaauggcaacaaacu

SEQ ID NO: 3228573 - RNA, 19 nt, Human
agcauauaaaauggcaaca

SEQ ID NO: 3228574 - RNA, 15 nt, Human
agcauauaaaauggc

SEQ ID NO: 3228575 - RNA, 16 nt, Human
agcauagcucuguaca

SEQ ID NO: 3228576 - RNA, 14 nt, Human
agcauauaaaaugg

SEQ ID NO: 3228577 - RNA, 19 nt, Human
ugcagggcuuuaaaauucu

SEQ ID NO: 3228578 - RNA, 17 nt, Human
ugcagggcuuuaaaauu

SEQ ID NO: 3228579 - RNA, 18 nt, Human
ugcagccuccgcuucccu

SEQ ID NO: 3228580 - RNA, 17 nt, Human
ugcagccucacaguccu

SEQ ID NO: 3228581 - RNA, 21 nt, Human
ugcagccucacaguccuuacc

SEQ ID NO: 3228582 - RNA, 18 nt, Human
ugcagccucacaguccuu

SEQ ID NO: 3228583 - RNA, 21 nt, Human
agccucuuucccuuccaguuu

SEQ ID NO: 3228584 - RNA, 20 nt, Human
agccucuuucccuuccaguu

SEQ ID NO: 3228585 - RNA, 13 nt, Human
agccucuuucccu

SEQ ID NO: 3228586 - RNA, 12 nt, Human
agccucuuuccc

SEQ ID NO: 3228587 - RNA, 18 nt, Human
agccucgacacagagugg

SEQ ID NO: 3228588 - RNA, 17 nt, Human
agccucgacacagagug

SEQ ID NO: 3228589 - RNA, 23 nt, Human
agccucgcaggccucccugccag

SEQ ID NO: 3228590 - RNA, 22 nt, Human
agccucgcaggccucccugcca

SEQ ID NO: 3228591 - RNA, 20 nt, Human
agccucgcaggccucccugc

SEQ ID NO: 3228592 - RNA, 21 nt, Human
ugcagacaggcaagcaccucc

SEQ ID NO: 3228593 - RNA, 13 nt, Human
ugcagacaggcaa

SEQ ID NO: 3228594 - RNA, 12 nt, Human
ugcagacaggca

SEQ ID NO: 3228595 - RNA, 17 nt, Human
ugcagacaaucuucugu

SEQ ID NO: 3228596 - RNA, 14 nt, Human
ugcagaauuguuua

SEQ ID NO: 3228597 - RNA, 14 nt, Human
agccuccugcccuu

SEQ ID NO: 3228598 - RNA, 18 nt, Human
agccuccugcccuuaccu

SEQ ID NO: 3228599 - RNA, 13 nt, Human
agccuccugcccu

SEQ ID NO: 3228600 - RNA, 20 nt, Human
ugcauagauucccugagcag

SEQ ID NO: 3228601 - RNA, 19 nt, Human
ugcauacucauuaggaugg

SEQ ID NO: 3228602 - RNA, 13 nt, Human
ugcauacucauua

SEQ ID NO: 3228603 - RNA, 18 nt, Human
ugcagguuaguuacauau

SEQ ID NO: 3228604 - RNA, 16 nt, Human
ugcaguaucugugaac

SEQ ID NO: 3228605 - RNA, 13 nt, Human
ugcagucacugca

SEQ ID NO: 3228606 - RNA, 19 nt, Human
ugcaugcugucccuuacgu

SEQ ID NO: 3228607 - RNA, 21 nt, Human
ugcaugcugucccuuacguga

SEQ ID NO: 3228608 - RNA, 18 nt, Human
ugcaugcuuuccauauuu

SEQ ID NO: 3228609 - RNA, 15 nt, Human
ugcaugcuuuccaua

SEQ ID NO: 3228610 - RNA, 14 nt, Human
ugcaugcuuuccau

SEQ ID NO: 3228611 - RNA, 18 nt, Human
ugcaugcugucccuuacg

SEQ ID NO: 3228612 - RNA, 21 nt, Human
ugcaugcuauucacaauuauu

SEQ ID NO: 3228613 - RNA, 17 nt, Human
ugcaucguuucaucuuc

SEQ ID NO: 3228614 - RNA, 14 nt, Human
ugcaucucagccca

SEQ ID NO: 3228615 - RNA, 13 nt, Human
ugcaucucagccc

SEQ ID NO: 3228616 - RNA, 12 nt, Human
ugcaucuuaaaa

SEQ ID NO: 3228617 - RNA, 16 nt, Human
ugcaucuuugaugugu

SEQ ID NO: 3228618 - RNA, 17 nt, Human
ugcaucuuugauguguu

SEQ ID NO: 3228619 - RNA, 12 nt, Human
ugcaucuuugau

SEQ ID NO: 3228620 - RNA, 18 nt, Human
ugcaucuuugauguguug

SEQ ID NO: 3228621 - RNA, 16 nt, Human
ugcaugauugcagaau

SEQ ID NO: 3228622 - RNA, 15 nt, Human
ugcaugauugcagaa

SEQ ID NO: 3228623 - RNA, 19 nt, Human
agccuuaaaacaucauucc

SEQ ID NO: 3228624 - RNA, 22 nt, Human
agccuuaaaacaucauuccuuu

SEQ ID NO: 3228625 - RNA, 20 nt, Human
agccuuagaagucacacagu

SEQ ID NO: 3228626 - RNA, 16 nt, Human
agccuuaagcugcagg

SEQ ID NO: 3228627 - RNA, 14 nt, Human
agccuuaagcugca

SEQ ID NO: 3228628 - RNA, 19 nt, Human
agccuucugagcuggccuc

SEQ ID NO: 3228629 - RNA, 13 nt, Human
agccuucugagcu

SEQ ID NO: 3228630 - RNA, 19 nt, Human
agccuugcggaagguucua

SEQ ID NO: 3228631 - RNA, 21 nt, Human
agccuugaccauucuccaccu

SEQ ID NO: 3228632 - RNA, 18 nt, Human
agccuugaccauucucca

SEQ ID NO: 3228633 - RNA, 19 nt, Human
agccuugaccauucuccac

SEQ ID NO: 3228634 - RNA, 17 nt, Human
agccuuggccucagagg

SEQ ID NO: 3228635 - RNA, 16 nt, Human
agccuugggaccccug

SEQ ID NO: 3228636 - RNA, 22 nt, Human
agcgcccaguuggguggaugcc

SEQ ID NO: 3228637 - RNA, 19 nt, Human
agccugagcgacagugaga

SEQ ID NO: 3228638 - RNA, 18 nt, Human
agccugugccucugggac

SEQ ID NO: 3228639 - RNA, 17 nt, Human
agccugugccucuggga

SEQ ID NO: 3228640 - RNA, 17 nt, Human
ugccaguuauggcuaua

SEQ ID NO: 3228641 - RNA, 16 nt, Human
ugccaguggggccuga

SEQ ID NO: 3228642 - RNA, 13 nt, Human
ugccauaauuacu

SEQ ID NO: 3228643 - RNA, 19 nt, Human
ugccaguuuuguuuccuuu

SEQ ID NO: 3228644 - RNA, 15 nt, Human
ugccagcccauuugg

SEQ ID NO: 3228645 - RNA, 15 nt, Human
ugccagcccagaggc

SEQ ID NO: 3228646 - RNA, 17 nt, Human
ugccagccgagauagcc

SEQ ID NO: 3228647 - RNA, 22 nt, Human
ugccagccgagauagccaaggc

SEQ ID NO: 3228648 - RNA, 17 nt, Human
ugcauugggugaucauu

SEQ ID NO: 3228649 - RNA, 11 nt, Human
ugcauugucug

SEQ ID NO: 3228650 - RNA, 12 nt, Human
ugcauugucugu

SEQ ID NO: 3228651 - RNA, 17 nt, Human
ugcauugucugucugca

SEQ ID NO: 3228652 - RNA, 18 nt, Human
ugcauuggauaacaccac

SEQ ID NO: 3228653 - RNA, 22 nt, Human
ugcauuggauaacaccaccauu

SEQ ID NO: 3228654 - RNA, 20 nt, Human
agcgcccuggcccccacaug

SEQ ID NO: 3228655 - RNA, 18 nt, Human
agcgcccuggcccccaca

SEQ ID NO: 3228656 - RNA, 16 nt, Human
agcgcccuggccccca

SEQ ID NO: 3228657 - RNA, 14 nt, Human
agcgcccuggcccc

SEQ ID NO: 3228658 - RNA, 13 nt, Human
agcgcccuggccc

SEQ ID NO: 3228659 - RNA, 13 nt, Human
ugccaauggacua

SEQ ID NO: 3228660 - RNA, 14 nt, Human
ugccaaugggagcu

SEQ ID NO: 3228661 - RNA, 23 nt, Human
ugccacacuucaggcucuucucc

SEQ ID NO: 3228662 - RNA, 14 nt, Human
agcccugaguuccu

SEQ ID NO: 3228663 - RNA, 23 nt, Human
agcccugaguuccuagccaccgc

SEQ ID NO: 3228664 - RNA, 20 nt, Human
agcccugaguuccuagccac

SEQ ID NO: 3228665 - RNA, 18 nt, Human
agcccugaguuccuagcc

SEQ ID NO: 3228666 - RNA, 16 nt, Human
agcccgggcucugccu

SEQ ID NO: 3228667 - RNA, 14 nt, Human
agcccugcagaggg

SEQ ID NO: 3228668 - RNA, 15 nt, Human
agcccugcagagggc

SEQ ID NO: 3228669 - RNA, 16 nt, Human
agcccugcagagggca

SEQ ID NO: 3228670 - RNA, 19 nt, Human
agcccugcagagggcacag

SEQ ID NO: 3228671 - RNA, 13 nt, Human
agcccgggcucug

SEQ ID NO: 3228672 - RNA, 14 nt, Human
agcccgggcucugc

SEQ ID NO: 3228673 - RNA, 15 nt, Human
agcccgggcucugcc

SEQ ID NO: 3228674 - RNA, 15 nt, Human
agccccuucugaccc

SEQ ID NO: 3228675 - RNA, 16 nt, Human
agccccuucugaccca

SEQ ID NO: 3228676 - RNA, 14 nt, Human
agccccuucugacc

SEQ ID NO: 3228677 - RNA, 14 nt, Human
agccccgaggccuu

SEQ ID NO: 3228678 - RNA, 14 nt, Human
agcccaggccuccu

SEQ ID NO: 3228679 - RNA, 19 nt, Human
agcccaggccuccuacagc

SEQ ID NO: 3228680 - RNA, 18 nt, Human
agcccccuggucuuugag

SEQ ID NO: 3228681 - RNA, 22 nt, Human
agcccccuggucuuugagcucc

SEQ ID NO: 3228682 - RNA, 12 nt, Human
agcccccugguc

SEQ ID NO: 3228683 - RNA, 22 nt, Human
agccccuggaugcagccucaca

SEQ ID NO: 3228684 - RNA, 21 nt, Human
agccccucuccccgcaguguu

SEQ ID NO: 3228685 - RNA, 16 nt, Human
agccccucccuccucu

SEQ ID NO: 3228686 - RNA, 15 nt, Human
agccccucccuccuc

SEQ ID NO: 3228687 - RNA, 18 nt, Human
agccccucccuccucuga

SEQ ID NO: 3228688 - RNA, 22 nt, Human
agcccugccucuccgccccuga

SEQ ID NO: 3228689 - RNA, 16 nt, Human
agcccugcauuuucau

SEQ ID NO: 3228690 - RNA, 18 nt, Human
agcccugccucuccgccc

SEQ ID NO: 3228691 - RNA, 16 nt, Human
agcccugccucuccgc

SEQ ID NO: 3228692 - RNA, 15 nt, Human
agcccugccucuccg

SEQ ID NO: 3228693 - RNA, 13 nt, Human
agcccugccucuc

SEQ ID NO: 3228694 - RNA, 21 nt, Human
ugcaccacugcacuccagccu

SEQ ID NO: 3228695 - RNA, 13 nt, Human
ugcaccagcccuu

SEQ ID NO: 3228696 - RNA, 15 nt, Human
ugcaccacugcacuc

SEQ ID NO: 3228697 - RNA, 21 nt, Human
ugcaccagguagaacgccagg

SEQ ID NO: 3228698 - RNA, 17 nt, Human
ugcaccauacucaugca

SEQ ID NO: 3228699 - RNA, 13 nt, Human
ugcaccauacuca

SEQ ID NO: 3228700 - RNA, 15 nt, Human
ugcacuccagccuga

SEQ ID NO: 3228701 - RNA, 14 nt, Human
ugcacuccagccug

SEQ ID NO: 3228702 - RNA, 16 nt, Human
ugcaccggcuggccug

SEQ ID NO: 3228703 - RNA, 16 nt, Human
ugcacucagacuguau

SEQ ID NO: 3228704 - RNA, 14 nt, Human
ugcaccggcuggcc

SEQ ID NO: 3228705 - RNA, 15 nt, Human
ugcaccggcuggccu

SEQ ID NO: 3228706 - RNA, 19 nt, Human
ugcaccccuuccugggcac

SEQ ID NO: 3228707 - RNA, 18 nt, Human
ugcaccccuuccugggca

SEQ ID NO: 3228708 - RNA, 17 nt, Human
ugcaccccuuccugggc

SEQ ID NO: 3228709 - RNA, 13 nt, Human
ugcaccccuuccu

SEQ ID NO: 3228710 - RNA, 16 nt, Human
ugcaccccuuccuggg

SEQ ID NO: 3228711 - RNA, 15 nt, Human
ugcaccccuuccugg

SEQ ID NO: 3228712 - RNA, 22 nt, Human
ugcagaagacaguauggcagcu

SEQ ID NO: 3228713 - RNA, 18 nt, Human
ugcagaauggcauuugca

SEQ ID NO: 3228714 - RNA, 17 nt, Human
ugcagaauggcauuugc

SEQ ID NO: 3228715 - RNA, 22 nt, Human
ugcagaauggcauuugcaauaa

SEQ ID NO: 3228716 - RNA, 21 nt, Human
ugcagaauggcauuugcaaua

SEQ ID NO: 3228717 - RNA, 22 nt, Human
ugcagaagggagcuggcuccag

SEQ ID NO: 3228718 - RNA, 15 nt, Human
ugcagaagggagcug

SEQ ID NO: 3228719 - RNA, 17 nt, Human
ugcacuccagccugagc

SEQ ID NO: 3228720 - RNA, 15 nt, Human
ugcacuccagccugg

SEQ ID NO: 3228721 - RNA, 16 nt, Human
ugcacuccagccuggg

SEQ ID NO: 3228722 - RNA, 15 nt, Human
ugcaauauauuuugu

SEQ ID NO: 3228723 - RNA, 14 nt, Human
ugcaauauauuuug

SEQ ID NO: 3228724 - RNA, 21 nt, Human
ugcaauauauuuuguaugcaa

SEQ ID NO: 3228725 - RNA, 20 nt, Human
ugcaauauauuuuguaugca

SEQ ID NO: 3228726 - RNA, 18 nt, Human
ugcaauauauuuuguaug

SEQ ID NO: 3228727 - RNA, 16 nt, Human
ugcaauauauuuugua

SEQ ID NO: 3228728 - RNA, 14 nt, Human
ugcaauaaaguaua

SEQ ID NO: 3228729 - RNA, 15 nt, Human
ugcaauaaaguauaa

SEQ ID NO: 3228730 - RNA, 16 nt, Human
ugcaauaaaguauaau

SEQ ID NO: 3228731 - RNA, 12 nt, Human
agcccaggccuc

SEQ ID NO: 3228732 - RNA, 18 nt, Human
ugcaaucuauaauauuug

SEQ ID NO: 3228733 - RNA, 20 nt, Human
ugcaauccuuacaaaugauu

SEQ ID NO: 3228734 - RNA, 17 nt, Human
ugcaauccuuacaaaug

SEQ ID NO: 3228735 - RNA, 16 nt, Human
ugcaauccuuacaaau

SEQ ID NO: 3228736 - RNA, 15 nt, Human
ugcaauccuuacaaa

SEQ ID NO: 3228737 - RNA, 13 nt, Human
ugcaauaucuucg

SEQ ID NO: 3228738 - RNA, 21 nt, Human
ugcaauaucuucguuaguaau

SEQ ID NO: 3228739 - RNA, 14 nt, Human
ugcaauccuuacaa

SEQ ID NO: 3228740 - RNA, 12 nt, Human
ugcaauccuuac

SEQ ID NO: 3228741 - RNA, 16 nt, Human
ugcaagguaaaauuuu

SEQ ID NO: 3228742 - RNA, 15 nt, Human
ugcaagguaaaauuu

SEQ ID NO: 3228743 - RNA, 19 nt, Human
ugcaaggucuugcauuuaa

SEQ ID NO: 3228744 - RNA, 20 nt, Human
ugcaagggcggccuuuccca

SEQ ID NO: 3228745 - RNA, 22 nt, Human
ugcaagggaugaauuguaaaag

SEQ ID NO: 3228746 - RNA, 23 nt, Human
ugcaagcaguuucaauaaaguuu

SEQ ID NO: 3228747 - RNA, 17 nt, Human
ugcaagcuuuuccuaau

SEQ ID NO: 3228748 - RNA, 13 nt, Human
ugcaagcuuuucc

SEQ ID NO: 3228749 - RNA, 21 nt, Human
ugcaagcaguuucaauaaagu

SEQ ID NO: 3228750 - RNA, 17 nt, Human
ugcaagcaguuucaaua

SEQ ID NO: 3228751 - RNA, 15 nt, Human
ugcaagcaguuucaa

SEQ ID NO: 3228752 - RNA, 12 nt, Human
ugcaacaaaaua

SEQ ID NO: 3228753 - RNA, 16 nt, Human
ugcaacaaaauacauu

SEQ ID NO: 3228754 - RNA, 18 nt, Human
ugcaaagcacugacuucu

SEQ ID NO: 3228755 - RNA, 22 nt, Human
ugcaaagcacugacuucuaagu

SEQ ID NO: 3228756 - RNA, 20 nt, Human
ugcaaagcacugacuucuaa

SEQ ID NO: 3228757 - RNA, 18 nt, Human
ugcaaaccaucauugaaa

SEQ ID NO: 3228758 - RNA, 23 nt, Human
ugcaaacugggcuggaagauauu

SEQ ID NO: 3228759 - RNA, 22 nt, Human
ugcaaacugggcuggaagauau

SEQ ID NO: 3228760 - RNA, 15 nt, Human
ugcaaaguauuguaa

SEQ ID NO: 3228761 - RNA, 21 nt, Human
ugcaaaguacagguacuuugu

SEQ ID NO: 3228762 - RNA, 17 nt, Human
ugcaaaguacagguacu

SEQ ID NO: 3228763 - RNA, 19 nt, Human
ugcaaaguauaaauuugug

SEQ ID NO: 3228764 - RNA, 21 nt, Human
ugcaaaguauaaauuugugua

SEQ ID NO: 3228765 - RNA, 22 nt, Human
ugcaaaguauaaauuuguguaa

SEQ ID NO: 3228766 - RNA, 23 nt, Human
ugcaaaguucccuacuuccugug

SEQ ID NO: 3228767 - RNA, 21 nt, Human
ugcaaaggguaucaggugcug

SEQ ID NO: 3228768 - RNA, 14 nt, Human
ugcaaagcccagcu

SEQ ID NO: 3228769 - RNA, 15 nt, Human
ugcaaagcccagcuu

SEQ ID NO: 3228770 - RNA, 17 nt, Human
ugcaaagcccagcuuga

SEQ ID NO: 3228771 - RNA, 16 nt, Human
ugcaaaggaaauacca

SEQ ID NO: 3228772 - RNA, 13 nt, Human
ugcaaaggaaaua

SEQ ID NO: 3228773 - RNA, 13 nt, Human
ugauuucauucaa

SEQ ID NO: 3228774 - RNA, 13 nt, Human
ugauuucagaaac

SEQ ID NO: 3228775 - RNA, 23 nt, Human
ugauuucacaaauauuaaaaagu

SEQ ID NO: 3228776 - RNA, 20 nt, Human
ugauuucacaaauauuaaaa

SEQ ID NO: 3228777 - RNA, 19 nt, Human
ugauuuauuaacuuaauaa

SEQ ID NO: 3228778 - RNA, 22 nt, Human
ugauuuauuaacuuaauaauca

SEQ ID NO: 3228779 - RNA, 18 nt, Human
ugauuuauuuuguaugaa

SEQ ID NO: 3228780 - RNA, 15 nt, Human
ugauuucacaaauau

SEQ ID NO: 3228781 - RNA, 19 nt, Human
ugauuucacaaauauuaaa

SEQ ID NO: 3228782 - RNA, 16 nt, Human
ugauuucacaaauauu

SEQ ID NO: 3228783 - RNA, 18 nt, Human
agccacggccaggccaga

SEQ ID NO: 3228784 - RNA, 17 nt, Human
agccacggccaggccag

SEQ ID NO: 3228785 - RNA, 12 nt, Human
ugauuuauuaac

SEQ ID NO: 3228786 - RNA, 15 nt, Human
ugauuuauuaacuua

SEQ ID NO: 3228787 - RNA, 16 nt, Human
ugauuuauuaacuuaa

SEQ ID NO: 3228788 - RNA, 14 nt, Human
ugauuugagauuuu

SEQ ID NO: 3228789 - RNA, 13 nt, Human
ugauuugagauuu

SEQ ID NO: 3228790 - RNA, 12 nt, Human
ugcaaaccauca

SEQ ID NO: 3228791 - RNA, 13 nt, Human
ugcaaaccaucau

SEQ ID NO: 3228792 - RNA, 16 nt, Human
ugcaaacauuggaaga

SEQ ID NO: 3228793 - RNA, 18 nt, Human
ugcaaacauuggaagauu

SEQ ID NO: 3228794 - RNA, 16 nt, Human
ugccgagcccuugccc

SEQ ID NO: 3228795 - RNA, 12 nt, Human
ugccgcagcccu

SEQ ID NO: 3228796 - RNA, 13 nt, Human
ugccucagccucc

SEQ ID NO: 3228797 - RNA, 12 nt, Human
ugccucagccuc

SEQ ID NO: 3228798 - RNA, 19 nt, Human
ugcccuguuaaaagaugaa

SEQ ID NO: 3228799 - RNA, 20 nt, Human
ugcccuguuaaaagaugaaa

SEQ ID NO: 3228800 - RNA, 18 nt, Human
ugcccuuaccugccagga

SEQ ID NO: 3228801 - RNA, 19 nt, Human
agcugcaaucgcuuuccua

SEQ ID NO: 3228802 - RNA, 15 nt, Human
agcugcaccccuucc

SEQ ID NO: 3228803 - RNA, 13 nt, Human
agcugcaccccuu

SEQ ID NO: 3228804 - RNA, 21 nt, Human
agcucuguccugggagugagc

SEQ ID NO: 3228805 - RNA, 16 nt, Human
agcucuguccugggag

SEQ ID NO: 3228806 - RNA, 21 nt, Human
agcugauuuugaggguuuuua

SEQ ID NO: 3228807 - RNA, 16 nt, Human
agcugcaaaaauaauc

SEQ ID NO: 3228808 - RNA, 18 nt, Human
agcugcaaaaauaaucau

SEQ ID NO: 3228809 - RNA, 20 nt, Human
agcugccagccgagauagcc

SEQ ID NO: 3228810 - RNA, 14 nt, Human
agcugccagccgag

SEQ ID NO: 3228811 - RNA, 19 nt, Human
agcugcagauaaguggccu

SEQ ID NO: 3228812 - RNA, 16 nt, Human
ugccaucauguuuaca

SEQ ID NO: 3228813 - RNA, 13 nt, Human
ugccaucaaauga

SEQ ID NO: 3228814 - RNA, 15 nt, Human
ugccaucaaaugaau

SEQ ID NO: 3228815 - RNA, 15 nt, Human
ugccauagaguacac

SEQ ID NO: 3228816 - RNA, 18 nt, Human
ugccauagaguacacugc

SEQ ID NO: 3228817 - RNA, 14 nt, Human
ugccauagaguaca

SEQ ID NO: 3228818 - RNA, 23 nt, Human
agcucccaggcauuccccaggag

SEQ ID NO: 3228819 - RNA, 15 nt, Human
agcuccuucuguccu

SEQ ID NO: 3228820 - RNA, 13 nt, Human
agcuccuucuguc

SEQ ID NO: 3228821 - RNA, 13 nt, Human
agcucccaggcau

SEQ ID NO: 3228822 - RNA, 16 nt, Human
agcuccaucuccacuc

SEQ ID NO: 3228823 - RNA, 23 nt, Human
agcuccauacacacgcugccuuc

SEQ ID NO: 3228824 - RNA, 15 nt, Human
agcuccaucuccacu

SEQ ID NO: 3228825 - RNA, 13 nt, Human
agcuccaucucca

SEQ ID NO: 3228826 - RNA, 22 nt, Human
agcuccauacacacgcugccuu

SEQ ID NO: 3228827 - RNA, 20 nt, Human
agcuccauacacacgcugcc

SEQ ID NO: 3228828 - RNA, 19 nt, Human
agcuccauacacacgcugc

SEQ ID NO: 3228829 - RNA, 18 nt, Human
agcuccauacacacgcug

SEQ ID NO: 3228830 - RNA, 16 nt, Human
agcucucuccucccuu

SEQ ID NO: 3228831 - RNA, 21 nt, Human
agcuccuucuguccuacucug

SEQ ID NO: 3228832 - RNA, 16 nt, Human
agcuccuucuguccua

SEQ ID NO: 3228833 - RNA, 19 nt, Human
agcuccuuuuccagagcau

SEQ ID NO: 3228834 - RNA, 18 nt, Human
agcuccuuuuccagagca

SEQ ID NO: 3228835 - RNA, 14 nt, Human
agcuccuuuuccag

SEQ ID NO: 3228836 - RNA, 12 nt, Human
agcucuggucca

SEQ ID NO: 3228837 - RNA, 17 nt, Human
agcucugguccauagag

SEQ ID NO: 3228838 - RNA, 14 nt, Human
agcucuguccuggg

SEQ ID NO: 3228839 - RNA, 15 nt, Human
ugccugcuuuuugga

SEQ ID NO: 3228840 - RNA, 16 nt, Human
ugccugcuuuuuggaa

SEQ ID NO: 3228841 - RNA, 17 nt, Human
ugccugcuuuuuggaaa

SEQ ID NO: 3228842 - RNA, 21 nt, Human
ugccugcuuuuuggaaaguca

SEQ ID NO: 3228843 - RNA, 22 nt, Human
ugccugcuuuuuggaaagucag

SEQ ID NO: 3228844 - RNA, 23 nt, Human
ugccugcccaggccccugccacc

SEQ ID NO: 3228845 - RNA, 22 nt, Human
ugccugcccaggccccugccac

SEQ ID NO: 3228846 - RNA, 20 nt, Human
ugccugcccaggccccugcc

SEQ ID NO: 3228847 - RNA, 17 nt, Human
ugccucugccucugaca

SEQ ID NO: 3228848 - RNA, 20 nt, Human
ugccucugccucugacacac

SEQ ID NO: 3228849 - RNA, 18 nt, Human
ugccucugccucugacac

SEQ ID NO: 3228850 - RNA, 14 nt, Human
ugccucagccuccc

SEQ ID NO: 3228851 - RNA, 16 nt, Human
ugccuggauggggcug

SEQ ID NO: 3228852 - RNA, 17 nt, Human
ugccuggauggggcugc

SEQ ID NO: 3228853 - RNA, 20 nt, Human
ugccuggauggggcugcacc

SEQ ID NO: 3228854 - RNA, 16 nt, Human
agcugccuguucagcu

SEQ ID NO: 3228855 - RNA, 14 nt, Human
agcugccuguucag

SEQ ID NO: 3228856 - RNA, 18 nt, Human
agcugccuguucagcucc

SEQ ID NO: 3228857 - RNA, 16 nt, Human
agcugcuugggcuuca

SEQ ID NO: 3228858 - RNA, 21 nt, Human
agcugcugagccgcagagaag

SEQ ID NO: 3228859 - RNA, 17 nt, Human
agcugcugagccgcaga

SEQ ID NO: 3228860 - RNA, 16 nt, Human
agcugcugagccgcag

SEQ ID NO: 3228861 - RNA, 13 nt, Human
agcugcugagccg

SEQ ID NO: 3228862 - RNA, 12 nt, Human
agcugcugccau

SEQ ID NO: 3228863 - RNA, 19 nt, Human
agcuggccgggagccugau

SEQ ID NO: 3228864 - RNA, 18 nt, Human
agcuggccgggagccuga

SEQ ID NO: 3228865 - RNA, 15 nt, Human
agcuggcuccagccu

SEQ ID NO: 3228866 - RNA, 12 nt, Human
agcuggcuccag

SEQ ID NO: 3228867 - RNA, 22 nt, Human
agcuggccucucacugccuccc

SEQ ID NO: 3228868 - RNA, 16 nt, Human
agcuggccucucacug

SEQ ID NO: 3228869 - RNA, 23 nt, Human
agcugugcucuggacaggcaugu

SEQ ID NO: 3228870 - RNA, 18 nt, Human
agcugugcucuggacagg

SEQ ID NO: 3228871 - RNA, 17 nt, Human
agcugugcucuggacag

SEQ ID NO: 3228872 - RNA, 22 nt, Human
agcugugggcaaaagaguguaa

SEQ ID NO: 3228873 - RNA, 23 nt, Human
agcugugggcaaaagaguguaaa

SEQ ID NO: 3228874 - RNA, 20 nt, Human
agcuguguccggcccaguuu

SEQ ID NO: 3228875 - RNA, 23 nt, Human
agcuguguccuaguucuugaaca

SEQ ID NO: 3228876 - RNA, 18 nt, Human
agcuguuacugucuucag

SEQ ID NO: 3228877 - RNA, 14 nt, Human
agcuguuacugucu

SEQ ID NO: 3228878 - RNA, 19 nt, Human
agcugggacuacaggcacc

SEQ ID NO: 3228879 - RNA, 17 nt, Human
agcuggcuccagccugg

SEQ ID NO: 3228880 - RNA, 16 nt, Human
agcuggcuccagccug

SEQ ID NO: 3228881 - RNA, 22 nt, Human
agcugggguggggaccucaggc

SEQ ID NO: 3228882 - RNA, 23 nt, Human
agcugggguggggaccucaggcc

SEQ ID NO: 3228883 - RNA, 20 nt, Human
agcugggguggggaccucag

SEQ ID NO: 3228884 - RNA, 16 nt, Human
agcugggacuacaggu

SEQ ID NO: 3228885 - RNA, 23 nt, Human
agcugggacuacaggcacccacc

SEQ ID NO: 3228886 - RNA, 20 nt, Human
agcugggacuacaggcaccc

SEQ ID NO: 3228887 - RNA, 19 nt, Human
agcuguuacugucuucagu

SEQ ID NO: 3228888 - RNA, 14 nt, Human
ugccuguucccauu

SEQ ID NO: 3228889 - RNA, 21 nt, Human
ugccuguucagcuccagcuca

SEQ ID NO: 3228890 - RNA, 16 nt, Human
ugccuguugggccagg

SEQ ID NO: 3228891 - RNA, 17 nt, Human
ugccuguugggccagga

SEQ ID NO: 3228892 - RNA, 24 nt, Human
ugccuuaaagacaagacagcauuu

SEQ ID NO: 3228893 - RNA, 15 nt, Human
ugccuuaagugagga

SEQ ID NO: 3228894 - RNA, 16 nt, Human
ugccuuggggacaaga

SEQ ID NO: 3228895 - RNA, 21 nt, Human
ugccuuaagugaggaaaucaa

SEQ ID NO: 3228896 - RNA, 22 nt, Human
ugccuuaagugaggaaaucaaa

SEQ ID NO: 3228897 - RNA, 22 nt, Human
ugcuaugagcuggggaugucuc

SEQ ID NO: 3228898 - RNA, 21 nt, Human
ugcuaugauguuaguuuuccu

SEQ ID NO: 3228899 - RNA, 22 nt, Human
ugcuaugauguuaguuuuccuu

SEQ ID NO: 3228900 - RNA, 19 nt, Human
ugcuaugagcuggggaugu

SEQ ID NO: 3228901 - RNA, 20 nt, Human
ugcuaugagcuggggauguc

SEQ ID NO: 3228902 - RNA, 16 nt, Human
ugcuaugagcugggga

SEQ ID NO: 3228903 - RNA, 15 nt, Human
ugcucaaaaagaaau

SEQ ID NO: 3228904 - RNA, 15 nt, Human
ugcucaaaaugcaaa

SEQ ID NO: 3228905 - RNA, 13 nt, Human
ugcucaaaaugca

SEQ ID NO: 3228906 - RNA, 14 nt, Human
ugcuaucuccccca

SEQ ID NO: 3228907 - RNA, 17 nt, Human
ugcuaucucccccagcc

SEQ ID NO: 3228908 - RNA, 13 nt, Human
ugcuaucuccccc

SEQ ID NO: 3228909 - RNA, 21 nt, Human
ugcuccagcuguucagcuggu

SEQ ID NO: 3228910 - RNA, 20 nt, Human
ugcuccagcuguucagcugg

SEQ ID NO: 3228911 - RNA, 12 nt, Human
ugcucugagagc

SEQ ID NO: 3228912 - RNA, 23 nt, Human
ugcucugagagcaaacuggcuug

SEQ ID NO: 3228913 - RNA, 23 nt, Human
ugcucugccccagcuugggcaga

SEQ ID NO: 3228914 - RNA, 17 nt, Human
ugcucugccccagcuug

SEQ ID NO: 3228915 - RNA, 15 nt, Human
ugcucugcugacaga

SEQ ID NO: 3228916 - RNA, 14 nt, Human
ugcucugcugacag

SEQ ID NO: 3228917 - RNA, 10 nt, Human
ugcucugcug

SEQ ID NO: 3228918 - RNA, 14 nt, Human
ugcucugcucgccu

SEQ ID NO: 3228919 - RNA, 20 nt, Human
ugcucuugaacuccugaccu

SEQ ID NO: 3228920 - RNA, 22 nt, Human
ugcucuugaacuccugaccuca

SEQ ID NO: 3228921 - RNA, 15 nt, Human
ugcucuugaacuccu

SEQ ID NO: 3228922 - RNA, 14 nt, Human
ugcugacuuagaau

SEQ ID NO: 3228923 - RNA, 15 nt, Human
ugcugacuuagaauc

SEQ ID NO: 3228924 - RNA, 13 nt, Human
ugcugacuuagaa

SEQ ID NO: 3228925 - RNA, 19 nt, Human
aggaaaucaaauaugcaaa

SEQ ID NO: 3228926 - RNA, 20 nt, Human
aggaaaucaaauaugcaaag

SEQ ID NO: 3228927 - RNA, 22 nt, Human
aggaaaguggcaccugucugcu

SEQ ID NO: 3228928 - RNA, 22 nt, Human
aggaaaucaaauaugcaaagca

SEQ ID NO: 3228929 - RNA, 21 nt, Human
aggaaaucaaauaugcaaagc

SEQ ID NO: 3228930 - RNA, 23 nt, Human
aggaaaggcuccaggagcagcca

SEQ ID NO: 3228931 - RNA, 17 nt, Human
aggaaaguacauuuuuu

SEQ ID NO: 3228932 - RNA, 14 nt, Human
aggaaaguacauuu

SEQ ID NO: 3228933 - RNA, 13 nt, Human
aggaagcucaggg

SEQ ID NO: 3228934 - RNA, 14 nt, Human
aggaagcucagggc

SEQ ID NO: 3228935 - RNA, 12 nt, Human
aggaagcucagg

SEQ ID NO: 3228936 - RNA, 18 nt, Human
aggaagcagcuuucccca

SEQ ID NO: 3228937 - RNA, 15 nt, Human
aggaagcucagggcc

SEQ ID NO: 3228938 - RNA, 15 nt, Human
aggaaggcacuucug

SEQ ID NO: 3228939 - RNA, 16 nt, Human
ugccuuggugugcugu

SEQ ID NO: 3228940 - RNA, 16 nt, Human
ugccuuguauaauauu

SEQ ID NO: 3228941 - RNA, 15 nt, Human
ugcgguccacccagg

SEQ ID NO: 3228942 - RNA, 14 nt, Human
ugcgguccacccag

SEQ ID NO: 3228943 - RNA, 23 nt, Human
ugcuaagugcuuauuacauuuua

SEQ ID NO: 3228944 - RNA, 12 nt, Human
ugcuaauucuuu

SEQ ID NO: 3228945 - RNA, 23 nt, Human
ugcuaaucuugugaaaauaauug

SEQ ID NO: 3228946 - RNA, 18 nt, Human
ugcuaaucuugugaaaau

SEQ ID NO: 3228947 - RNA, 21 nt, Human
ugcuaaucuugugaaaauaau

SEQ ID NO: 3228948 - RNA, 19 nt, Human
ugcuaaucuugugaaaaua

SEQ ID NO: 3228949 - RNA, 22 nt, Human
ugcuaauucuuugcaaaaaucc

SEQ ID NO: 3228950 - RNA, 21 nt, Human
ugcuaauucuuugcaaaaauc

SEQ ID NO: 3228951 - RNA, 20 nt, Human
ugcuaauucuuugcaaaaau

SEQ ID NO: 3228952 - RNA, 17 nt, Human
ugcuaauucuuugcaaa

SEQ ID NO: 3228953 - RNA, 16 nt, Human
ugcuaauucuuugcaa

SEQ ID NO: 3228954 - RNA, 15 nt, Human
ugcuaauucuuugca

SEQ ID NO: 3228955 - RNA, 14 nt, Human
ugcuaauucuuugc

SEQ ID NO: 3228956 - RNA, 13 nt, Human
ugcuaauucuuug

SEQ ID NO: 3228957 - RNA, 14 nt, Human
ugcuacaaaaacac

SEQ ID NO: 3228958 - RNA, 18 nt, Human
ugcuacagaaaagaaacu

SEQ ID NO: 3228959 - RNA, 21 nt, Human
ugcuaccacggccuccuuucc

SEQ ID NO: 3228960 - RNA, 20 nt, Human
ugcuaccacggccuccuuuc

SEQ ID NO: 3228961 - RNA, 18 nt, Human
ugcuaccacggccuccuu

SEQ ID NO: 3228962 - RNA, 21 nt, Human
agcuguugucucuucuccuua

SEQ ID NO: 3228963 - RNA, 20 nt, Human
agcuguugucucuucuccuu

SEQ ID NO: 3228964 - RNA, 19 nt, Human
agcuguugucucuucuccu

SEQ ID NO: 3228965 - RNA, 17 nt, Human
agcuguugucucuucuc

SEQ ID NO: 3228966 - RNA, 16 nt, Human
agcuguugucucuucu

SEQ ID NO: 3228967 - RNA, 16 nt, Human
agcuuaagggucauau

SEQ ID NO: 3228968 - RNA, 14 nt, Human
agcuuaagaaaaaa

SEQ ID NO: 3228969 - RNA, 20 nt, Human
agcuuaaaggggcuagagug

SEQ ID NO: 3228970 - RNA, 13 nt, Human
agcuuaacagugu

SEQ ID NO: 3228971 - RNA, 22 nt, Human
agcuuugagguggaagagggcu

SEQ ID NO: 3228972 - RNA, 13 nt, Human
agcuuguuuugga

SEQ ID NO: 3228973 - RNA, 22 nt, Human
agcuuuccccaugucucgacuc

SEQ ID NO: 3228974 - RNA, 20 nt, Human
agcuuuggcuaugagggccu

SEQ ID NO: 3228975 - RNA, 21 nt, Human
agcuuuggcuaugagggccuu

SEQ ID NO: 3228976 - RNA, 12 nt, Human
aggaaaagaaau

SEQ ID NO: 3228977 - RNA, 17 nt, Human
aggaaaagaaaucuaua

SEQ ID NO: 3228978 - RNA, 16 nt, Human
aggaaaagaaaucuau

SEQ ID NO: 3228979 - RNA, 15 nt, Human
aggaaaagaaaucua

SEQ ID NO: 3228980 - RNA, 14 nt, Human
aggaaaagaaaucu

SEQ ID NO: 3228981 - RNA, 14 nt, Human
aggaaaagcugcug

SEQ ID NO: 3228982 - RNA, 19 nt, Human
agcuugcccuguuaaaaga

SEQ ID NO: 3228983 - RNA, 18 nt, Human
agcuugcccuguuaaaag

SEQ ID NO: 3228984 - RNA, 16 nt, Human
agcuugcccuguuaaa

SEQ ID NO: 3228985 - RNA, 21 nt, Human
agcuuguaaauagcucaggug

SEQ ID NO: 3228986 - RNA, 20 nt, Human
agcuugcccuggugccucac

SEQ ID NO: 3228987 - RNA, 15 nt, Human
agcuugcacauuugg

SEQ ID NO: 3228988 - RNA, 14 nt, Human
agcuugcacauuug

SEQ ID NO: 3228989 - RNA, 15 nt, Human
agcuugauuaaauca

SEQ ID NO: 3228990 - RNA, 23 nt, Human
agcuugaccgugaggccagagac

SEQ ID NO: 3228991 - RNA, 22 nt, Human
agcuugaggguugggcuggugu

SEQ ID NO: 3228992 - RNA, 20 nt, Human
agcuugaccgugaggccaga

SEQ ID NO: 3228993 - RNA, 22 nt, Human
agcuugaccgugaggccagaga

SEQ ID NO: 3228994 - RNA, 19 nt, Human
agcuugaccgugaggccag

SEQ ID NO: 3228995 - RNA, 20 nt, Human
agcuuaagggucauauguuu

SEQ ID NO: 3228996 - RNA, 19 nt, Human
agcuuaagggucauauguu

SEQ ID NO: 3228997 - RNA, 16 nt, Human
aggagccuccugcccu

SEQ ID NO: 3228998 - RNA, 22 nt, Human
aggagcccauuuggagggccug

SEQ ID NO: 3228999 - RNA, 15 nt, Human
aggagcacugaaagu

SEQ ID NO: 3229000 - RNA, 12 nt, Human
aggagcagccac

SEQ ID NO: 3229001 - RNA, 13 nt, Human
aggagcagccaca

SEQ ID NO: 3229002 - RNA, 15 nt, Human
aggagaugcugugcc

SEQ ID NO: 3229003 - RNA, 18 nt, Human
aggagaaacuggaacucu

SEQ ID NO: 3229004 - RNA, 19 nt, Human
aggagaaacuggaacucuc

SEQ ID NO: 3229005 - RNA, 17 nt, Human
aggagaaacuggaacuc

SEQ ID NO: 3229006 - RNA, 22 nt, Human
aggacuuuucuuuguggcuucc

SEQ ID NO: 3229007 - RNA, 19 nt, Human
aggacuuuucuuuguggcu

SEQ ID NO: 3229008 - RNA, 17 nt, Human
aggacuuuucuuugugg

SEQ ID NO: 3229009 - RNA, 16 nt, Human
aggacucugccuccuc

SEQ ID NO: 3229010 - RNA, 14 nt, Human
aggacucugccucc

SEQ ID NO: 3229011 - RNA, 13 nt, Human
aggacucugccuc

SEQ ID NO: 3229012 - RNA, 12 nt, Human
aggacucugccu

SEQ ID NO: 3229013 - RNA, 18 nt, Human
aggacucugccuccucuu

SEQ ID NO: 3229014 - RNA, 17 nt, Human
aggacucugccuccucu

SEQ ID NO: 3229015 - RNA, 13 nt, Human
aggacgcucucug

SEQ ID NO: 3229016 - RNA, 14 nt, Human
aggacgcucucugg

SEQ ID NO: 3229017 - RNA, 23 nt, Human
aggaccuucacucuaagauguua

SEQ ID NO: 3229018 - RNA, 21 nt, Human
aggaccuucacucuaagaugu

SEQ ID NO: 3229019 - RNA, 16 nt, Human
aggacgcucucuggcc

SEQ ID NO: 3229020 - RNA, 17 nt, Human
aggacgcucucuggccu

SEQ ID NO: 3229021 - RNA, 19 nt, Human
aggacgcucucuggccuuc

SEQ ID NO: 3229022 - RNA, 20 nt, Human
aggacgcucucuggccuucg

SEQ ID NO: 3229023 - RNA, 23 nt, Human
aggacaaggugcaggcaggcugg

SEQ ID NO: 3229024 - RNA, 20 nt, Human
aggacaaggugcaggcaggc

SEQ ID NO: 3229025 - RNA, 19 nt, Human
aggacaaggugcaggcagg

SEQ ID NO: 3229026 - RNA, 18 nt, Human
aggacaaggugcaggcag

SEQ ID NO: 3229027 - RNA, 13 nt, Human
aggaccugugucc

SEQ ID NO: 3229028 - RNA, 19 nt, Human
aggacgcuucacaggacag

SEQ ID NO: 3229029 - RNA, 17 nt, Human
aggacgcuucacaggac

SEQ ID NO: 3229030 - RNA, 20 nt, Human
aggacgcuucacaggacagg

SEQ ID NO: 3229031 - RNA, 19 nt, Human
aggacuaggguccugggga

SEQ ID NO: 3229032 - RNA, 16 nt, Human
aggacuaggguccugg

SEQ ID NO: 3229033 - RNA, 18 nt, Human
aggacuaggguccugggg

SEQ ID NO: 3229034 - RNA, 15 nt, Human
aggacuaggguccug

SEQ ID NO: 3229035 - RNA, 21 nt, Human
aggacucucacgauaugcaag

SEQ ID NO: 3229036 - RNA, 15 nt, Human
uggaagagggcugca

SEQ ID NO: 3229037 - RNA, 18 nt, Human
uggaagagcuaggcaggg

SEQ ID NO: 3229038 - RNA, 14 nt, Human
uggaagagagaaag

SEQ ID NO: 3229039 - RNA, 16 nt, Human
uggaagagagaaagca

SEQ ID NO: 3229040 - RNA, 19 nt, Human
uggaagagagaaagcauau

SEQ ID NO: 3229041 - RNA, 23 nt, Human
uggaagagagaaagcauauugac

SEQ ID NO: 3229042 - RNA, 16 nt, Human
uggaagacagcucuua

SEQ ID NO: 3229043 - RNA, 15 nt, Human
uggaagacagcucuu

SEQ ID NO: 3229044 - RNA, 14 nt, Human
uggaaauuucacgu

SEQ ID NO: 3229045 - RNA, 23 nt, Human
uggaaauuuguuauaaugaauga

SEQ ID NO: 3229046 - RNA, 21 nt, Human
uggaaauuuguuauaaugaau

SEQ ID NO: 3229047 - RNA, 13 nt, Human
uggaaauuucacg

SEQ ID NO: 3229048 - RNA, 12 nt, Human
uggaaauuucac

SEQ ID NO: 3229049 - RNA, 10 nt, Human
ugcuuuuaaa

SEQ ID NO: 3229050 - RNA, 15 nt, Human
ugcuuuuuauaaaaa

SEQ ID NO: 3229051 - RNA, 16 nt, Human
ugcuuuuuauaaaaag

SEQ ID NO: 3229052 - RNA, 24 nt, Human
ugcuuuguugugugccucuagcug

SEQ ID NO: 3229053 - RNA, 23 nt, Human
ugcuuuguugugugccucuagcu

SEQ ID NO: 3229054 - RNA, 12 nt, Human
uggaaagucaga

SEQ ID NO: 3229055 - RNA, 13 nt, Human
uggaaagucagaa

SEQ ID NO: 3229056 - RNA, 13 nt, Human
ugcuuuuuggaaa

SEQ ID NO: 3229057 - RNA, 14 nt, Human
ugcuuuuuggaaag

SEQ ID NO: 3229058 - RNA, 18 nt, Human
ugcuuuuggucuguguga

SEQ ID NO: 3229059 - RNA, 17 nt, Human
ugcuuuuggucugugug

SEQ ID NO: 3229060 - RNA, 23 nt, Human
ugcuuuuuaauauugauaugcuu

SEQ ID NO: 3229061 - RNA, 20 nt, Human
ugcuuuugucuaugggacuc

SEQ ID NO: 3229062 - RNA, 16 nt, Human
ugcuuugggcugcccu

SEQ ID NO: 3229063 - RNA, 18 nt, Human
ugcuuuguuaccuuaaaa

SEQ ID NO: 3229064 - RNA, 20 nt, Human
ugcuuuguuaccuuaaaacu

SEQ ID NO: 3229065 - RNA, 21 nt, Human
ugcuuuguuaccuuaaaacua

SEQ ID NO: 3229066 - RNA, 16 nt, Human
ugcuuuguugugugcc

SEQ ID NO: 3229067 - RNA, 15 nt, Human
ugcuuuguugugugc

SEQ ID NO: 3229068 - RNA, 21 nt, Human
ugcuuuguugugugccucuag

SEQ ID NO: 3229069 - RNA, 20 nt, Human
ugcuuuguugugugccucua

SEQ ID NO: 3229070 - RNA, 19 nt, Human
ugcuuuguugugugccucu

SEQ ID NO: 3229071 - RNA, 18 nt, Human
ugcuuuguugugugccuc

SEQ ID NO: 3229072 - RNA, 15 nt, Human
ugcuugagcucagga

SEQ ID NO: 3229073 - RNA, 20 nt, Human
ugcuugaauaaacaccacug

SEQ ID NO: 3229074 - RNA, 15 nt, Human
ugcuugaauaaacac

SEQ ID NO: 3229075 - RNA, 20 nt, Human
ugcuugaagcaaacaguuga

SEQ ID NO: 3229076 - RNA, 12 nt, Human
ugcuugaauaaa

SEQ ID NO: 3229077 - RNA, 19 nt, Human
ugcuugaagcaaacaguug

SEQ ID NO: 3229078 - RNA, 17 nt, Human
ugcuugaacuuacaggu

SEQ ID NO: 3229079 - RNA, 13 nt, Human
ugcuuuggaaauc

SEQ ID NO: 3229080 - RNA, 15 nt, Human
ugcuuugggcugccc

SEQ ID NO: 3229081 - RNA, 14 nt, Human
ugcuuugggcugcc

SEQ ID NO: 3229082 - RNA, 12 nt, Human
aggaucagucug

SEQ ID NO: 3229083 - RNA, 13 nt, Human
aggaucagucuga

SEQ ID NO: 3229084 - RNA, 21 nt, Human
aggauaucggcauuuguuucu

SEQ ID NO: 3229085 - RNA, 17 nt, Human
aggauaucggcauuugu

SEQ ID NO: 3229086 - RNA, 23 nt, Human
aggaugacaaaauucuuucuggu

SEQ ID NO: 3229087 - RNA, 19 nt, Human
aggauucuuccucccuccc

SEQ ID NO: 3229088 - RNA, 17 nt, Human
aggauucuuccucccuc

SEQ ID NO: 3229089 - RNA, 22 nt, Human
aggaugaucuaggaagacuuug

SEQ ID NO: 3229090 - RNA, 23 nt, Human
aggaugaucuaggaagacuuugg

SEQ ID NO: 3229091 - RNA, 16 nt, Human
aggauucuuccucccu

SEQ ID NO: 3229092 - RNA, 20 nt, Human
aggaugaucuaggaagacuu

SEQ ID NO: 3229093 - RNA, 16 nt, Human
uggaagcacagcuuca

SEQ ID NO: 3229094 - RNA, 20 nt, Human
uggaagcagguuaaauguuu

SEQ ID NO: 3229095 - RNA, 19 nt, Human
uggaagcagguuaaauguu

SEQ ID NO: 3229096 - RNA, 18 nt, Human
uggaagcagguuaaaugu

SEQ ID NO: 3229097 - RNA, 17 nt, Human
uggaagcagguuaaaug

SEQ ID NO: 3229098 - RNA, 20 nt, Human
uggaagcagugcccaggugg

SEQ ID NO: 3229099 - RNA, 19 nt, Human
uggaagcagugcccaggug

SEQ ID NO: 3229100 - RNA, 18 nt, Human
uggaagcagugcccaggu

SEQ ID NO: 3229101 - RNA, 17 nt, Human
uggaagcagugcccagg

SEQ ID NO: 3229102 - RNA, 16 nt, Human
uggaagcagugcccag

SEQ ID NO: 3229103 - RNA, 14 nt, Human
uggaagcagugccc

SEQ ID NO: 3229104 - RNA, 21 nt, Human
uggaagcagguuaaauguuuu

SEQ ID NO: 3229105 - RNA, 13 nt, Human
aggauauauuuua

SEQ ID NO: 3229106 - RNA, 18 nt, Human
aggauauauuuuauuuuu

SEQ ID NO: 3229107 - RNA, 14 nt, Human
aggauauauuuuau

SEQ ID NO: 3229108 - RNA, 18 nt, Human
aggaggcuccaggcagca

SEQ ID NO: 3229109 - RNA, 17 nt, Human
aggaggcuccaggcagc

SEQ ID NO: 3229110 - RNA, 12 nt, Human
aggaggcuccag

SEQ ID NO: 3229111 - RNA, 21 nt, Human
aggaggccuugggcucugcug

SEQ ID NO: 3229112 - RNA, 20 nt, Human
aggaggccuugggcucugcu

SEQ ID NO: 3229113 - RNA, 17 nt, Human
uggauucugagagcugu

SEQ ID NO: 3229114 - RNA, 16 nt, Human
uggauucugagagcug

SEQ ID NO: 3229115 - RNA, 17 nt, Human
uggauucuuguuuugcu

SEQ ID NO: 3229116 - RNA, 14 nt, Human
uggauuccuguuuc

SEQ ID NO: 3229117 - RNA, 23 nt, Human
uggaugccugguggcagcugcgg

SEQ ID NO: 3229118 - RNA, 21 nt, Human
uggaugccugguggcagcugc

SEQ ID NO: 3229119 - RNA, 20 nt, Human
uggaugccugguggcagcug

SEQ ID NO: 3229120 - RNA, 19 nt, Human
uggaguucucaaagaccug

SEQ ID NO: 3229121 - RNA, 15 nt, Human
uggaguuaaaaugca

SEQ ID NO: 3229122 - RNA, 16 nt, Human
uggagugcaaaaggcu

SEQ ID NO: 3229123 - RNA, 14 nt, Human
uggagugcagugag

SEQ ID NO: 3229124 - RNA, 12 nt, Human
uggagugaccaa

SEQ ID NO: 3229125 - RNA, 16 nt, Human
aggcauuugcugaaua

SEQ ID NO: 3229126 - RNA, 20 nt, Human
aggcauuugcugaauacaga

SEQ ID NO: 3229127 - RNA, 20 nt, Human
uggagguacgaaaagagggg

SEQ ID NO: 3229128 - RNA, 15 nt, Human
aggcccccaggugcc

SEQ ID NO: 3229129 - RNA, 14 nt, Human
aggccccgcccagg

SEQ ID NO: 3229130 - RNA, 18 nt, Human
aggcccccugccugcccu

SEQ ID NO: 3229131 - RNA, 15 nt, Human
aggcccccugccugc

SEQ ID NO: 3229132 - RNA, 17 nt, Human
aggcccggcuccaggcu

SEQ ID NO: 3229133 - RNA, 15 nt, Human
aggcccggccucuca

SEQ ID NO: 3229134 - RNA, 13 nt, Human
aggcccggcucca

SEQ ID NO: 3229135 - RNA, 13 nt, Human
aggcccggccucu

SEQ ID NO: 3229136 - RNA, 14 nt, Human
aggcccggccucuc

SEQ ID NO: 3229137 - RNA, 13 nt, Human
aggcccagagggc

SEQ ID NO: 3229138 - RNA, 20 nt, Human
aggcccagagagaagagccc

SEQ ID NO: 3229139 - RNA, 23 nt, Human
aggcccacccugcuuggcccagg

SEQ ID NO: 3229140 - RNA, 22 nt, Human
aggcccacccugcuuggcccag

SEQ ID NO: 3229141 - RNA, 15 nt, Human
aggcccacccugcuu

SEQ ID NO: 3229142 - RNA, 14 nt, Human
aggcccacccugcu

SEQ ID NO: 3229143 - RNA, 13 nt, Human
aggcccacccugc

SEQ ID NO: 3229144 - RNA, 12 nt, Human
aggcccacccug

SEQ ID NO: 3229145 - RNA, 18 nt, Human
aggcccaaccaccagaug

SEQ ID NO: 3229146 - RNA, 19 nt, Human
aggcccaaccaccagauga

SEQ ID NO: 3229147 - RNA, 23 nt, Human
aggcccagagagaagagccccac

SEQ ID NO: 3229148 - RNA, 22 nt, Human
aggcccagagagaagagcccca

SEQ ID NO: 3229149 - RNA, 13 nt, Human
aggccagccuuga

SEQ ID NO: 3229150 - RNA, 15 nt, Human
aggccagccuugacc

SEQ ID NO: 3229151 - RNA, 12 nt, Human
aggccaccuccu

SEQ ID NO: 3229152 - RNA, 23 nt, Human
aggccaccuccuaaaaggcccag

SEQ ID NO: 3229153 - RNA, 22 nt, Human
aggccaccuccuaaaaggccca

SEQ ID NO: 3229154 - RNA, 21 nt, Human
aggccaccuccuaaaaggccc

SEQ ID NO: 3229155 - RNA, 13 nt, Human
aggccaccuccua

SEQ ID NO: 3229156 - RNA, 23 nt, Human
aggccaccucuuccuggccggug

SEQ ID NO: 3229157 - RNA, 21 nt, Human
aggccaccucuuccuggccgg

SEQ ID NO: 3229158 - RNA, 15 nt, Human
aggccaccucuuccu

SEQ ID NO: 3229159 - RNA, 14 nt, Human
aggccaccucuucc

SEQ ID NO: 3229160 - RNA, 23 nt, Human
uggcagcucaccucucccuugga

SEQ ID NO: 3229161 - RNA, 21 nt, Human
uggcagcucaccucucccuug

SEQ ID NO: 3229162 - RNA, 22 nt, Human
uggcagcucaccucucccuugg

SEQ ID NO: 3229163 - RNA, 20 nt, Human
uggcacccggccccugcugg

SEQ ID NO: 3229164 - RNA, 19 nt, Human
uggcacccggccccugcug

SEQ ID NO: 3229165 - RNA, 18 nt, Human
uggcacccggccccugcu

SEQ ID NO: 3229166 - RNA, 16 nt, Human
uggcacccggccccug

SEQ ID NO: 3229167 - RNA, 15 nt, Human
uggagcacaaaauuc

SEQ ID NO: 3229168 - RNA, 16 nt, Human
uggagcacaaaauuca

SEQ ID NO: 3229169 - RNA, 17 nt, Human
uggagcacaaaauucaa

SEQ ID NO: 3229170 - RNA, 16 nt, Human
uggacuguucccugag

SEQ ID NO: 3229171 - RNA, 18 nt, Human
aggauugcuacuguccua

SEQ ID NO: 3229172 - RNA, 17 nt, Human
aggauugcuacuguccu

SEQ ID NO: 3229173 - RNA, 15 nt, Human
aggauugcuacuguc

SEQ ID NO: 3229174 - RNA, 17 nt, Human
uggacuguucccugagg

SEQ ID NO: 3229175 - RNA, 14 nt, Human
uggagaaaauggac

SEQ ID NO: 3229176 - RNA, 13 nt, Human
uggacuuaggaag

SEQ ID NO: 3229177 - RNA, 17 nt, Human
uggagccaauggagacu

SEQ ID NO: 3229178 - RNA, 17 nt, Human
aggcaagcaccuccugc

SEQ ID NO: 3229179 - RNA, 15 nt, Human
aggcaagcugaaauu

SEQ ID NO: 3229180 - RNA, 16 nt, Human
aggcaagcugaaauuu

SEQ ID NO: 3229181 - RNA, 21 nt, Human
aggcaagcugaaauuuuagaa

SEQ ID NO: 3229182 - RNA, 20 nt, Human
aggcaagcaccuccugccuc

SEQ ID NO: 3229183 - RNA, 19 nt, Human
aggcaagcaccuccugccu

SEQ ID NO: 3229184 - RNA, 18 nt, Human
aggcaagcaccuccugcc

SEQ ID NO: 3229185 - RNA, 16 nt, Human
aggcaaggcugucaau

SEQ ID NO: 3229186 - RNA, 13 nt, Human
aggcagcuguugu

SEQ ID NO: 3229187 - RNA, 12 nt, Human
aggcacaggcag

SEQ ID NO: 3229188 - RNA, 14 nt, Human
aggcacaggcaggg

SEQ ID NO: 3229189 - RNA, 13 nt, Human
aggcacaggcagg

SEQ ID NO: 3229190 - RNA, 15 nt, Human
aggcagcuugaaacu

SEQ ID NO: 3229191 - RNA, 21 nt, Human
aggcagcuguugucucuucuc

SEQ ID NO: 3229192 - RNA, 20 nt, Human
aggcagcuguugucucuucu

SEQ ID NO: 3229193 - RNA, 20 nt, Human
aggcaggggcccugcagcuc

SEQ ID NO: 3229194 - RNA, 19 nt, Human
aggcaggggcccugcagcu

SEQ ID NO: 3229195 - RNA, 18 nt, Human
aggcaggggcccugcagc

SEQ ID NO: 3229196 - RNA, 17 nt, Human
aggcaggggcccugcag

SEQ ID NO: 3229197 - RNA, 22 nt, Human
aggcaggggcccugcagcucuc

SEQ ID NO: 3229198 - RNA, 21 nt, Human
aggcaggggcccugcagcucu

SEQ ID NO: 3229199 - RNA, 22 nt, Human
aggcaggucuugaacuccuggc

SEQ ID NO: 3229200 - RNA, 12 nt, Human
aggcagggucuc

SEQ ID NO: 3229201 - RNA, 23 nt, Human
aggcaguuugaggauuaguuuag

SEQ ID NO: 3229202 - RNA, 20 nt, Human
aggcaguuugaggauuaguu

SEQ ID NO: 3229203 - RNA, 15 nt, Human
aggcauaaagucagg

SEQ ID NO: 3229204 - RNA, 17 nt, Human
aggcaggugggauggau

SEQ ID NO: 3229205 - RNA, 20 nt, Human
aggcaggugaucugcugcag

SEQ ID NO: 3229206 - RNA, 23 nt, Human
aggcaggugaucugcugcagagc

SEQ ID NO: 3229207 - RNA, 20 nt, Human
aggcauuuaggccaugggac

SEQ ID NO: 3229208 - RNA, 18 nt, Human
aggcauugugggaagggg

SEQ ID NO: 3229209 - RNA, 18 nt, Human
aggcauuucccacccuga

SEQ ID NO: 3229210 - RNA, 22 nt, Human
aggcauaaagucagggguuccc

SEQ ID NO: 3229211 - RNA, 21 nt, Human
aggcauugccucggcuggcuc

SEQ ID NO: 3229212 - RNA, 23 nt, Human
aguaaugucauaaagugagaaaa

SEQ ID NO: 3229213 - RNA, 20 nt, Human
aguaauauaauacacaaaau

SEQ ID NO: 3229214 - RNA, 14 nt, Human
aguaauauaauaca

SEQ ID NO: 3229215 - RNA, 17 nt, Human
aguaauauauuuaaagg

SEQ ID NO: 3229216 - RNA, 16 nt, Human
aguaauauauuuaaag

SEQ ID NO: 3229217 - RNA, 21 nt, Human
aguaauauauuuaaagggaaa

SEQ ID NO: 3229218 - RNA, 16 nt, Human
aguacagguacuuugu

SEQ ID NO: 3229219 - RNA, 20 nt, Human
aguacagguacuuugucuaa

SEQ ID NO: 3229220 - RNA, 17 nt, Human
aguacagguacuuuguc

SEQ ID NO: 3229221 - RNA, 20 nt, Human
aguacauucucaguuuuucu

SEQ ID NO: 3229222 - RNA, 17 nt, Human
aguacauucucaguuuu

SEQ ID NO: 3229223 - RNA, 16 nt, Human
aguacauucucaguuu

SEQ ID NO: 3229224 - RNA, 13 nt, Human
aguacauucucag

SEQ ID NO: 3229225 - RNA, 13 nt, Human
aguacauuuaaau

SEQ ID NO: 3229226 - RNA, 15 nt, Human
aguacauuuaaauuu

SEQ ID NO: 3229227 - RNA, 16 nt, Human
aguacauuuaaauuuu

SEQ ID NO: 3229228 - RNA, 19 nt, Human
aguacauuuaaauuuuuug

SEQ ID NO: 3229229 - RNA, 21 nt, Human
aguacauuuaaauuuuuuggc

SEQ ID NO: 3229230 - RNA, 23 nt, Human
aguaccauuuaauggggaggaca

SEQ ID NO: 3229231 - RNA, 12 nt, Human
aguaccauuuaa

SEQ ID NO: 3229232 - RNA, 12 nt, Human
aguacccugguu

SEQ ID NO: 3229233 - RNA, 18 nt, Human
aguacccugguugugugu

SEQ ID NO: 3229234 - RNA, 19 nt, Human
aguacccugguuguguguc

SEQ ID NO: 3229235 - RNA, 20 nt, Human
aguagaagucuuagauguau

SEQ ID NO: 3229236 - RNA, 19 nt, Human
aguagaagucuuagaugua

SEQ ID NO: 3229237 - RNA, 21 nt, Human
aguagaagucuuagauguaua

SEQ ID NO: 3229238 - RNA, 17 nt, Human
aguagaagucuuagaug

SEQ ID NO: 3229239 - RNA, 13 nt, Human
aguagaauguagu

SEQ ID NO: 3229240 - RNA, 17 nt, Human
uguaggcauaaagucag

SEQ ID NO: 3229241 - RNA, 20 nt, Human
uguaggcauaaagucagggg

SEQ ID NO: 3229242 - RNA, 11 nt, Human
aguagagacag

SEQ ID NO: 3229243 - RNA, 14 nt, Human
aguagacuccaaca

SEQ ID NO: 3229244 - RNA, 15 nt, Human
aguagacuacuguuc

SEQ ID NO: 3229245 - RNA, 19 nt, Human
aguagacuugcuuugguca

SEQ ID NO: 3229246 - RNA, 12 nt, Human
aguagacauuua

SEQ ID NO: 3229247 - RNA, 14 nt, Human
aguagacauuuaua

SEQ ID NO: 3229248 - RNA, 19 nt, Human
aguagcgguaccaaugcag

SEQ ID NO: 3229249 - RNA, 16 nt, Human
aguagcgcuauaguua

SEQ ID NO: 3229250 - RNA, 21 nt, Human
aguagcgcuauaguuacuguc

SEQ ID NO: 3229251 - RNA, 19 nt, Human
uguacuuuaucaugaaugc

SEQ ID NO: 3229252 - RNA, 20 nt, Human
uguacuuuaucaugaaugcu

SEQ ID NO: 3229253 - RNA, 21 nt, Human
uguacuuuaucaugaaugcuu

SEQ ID NO: 3229254 - RNA, 15 nt, Human
uguacuuucuguuaa

SEQ ID NO: 3229255 - RNA, 13 nt, Human
uguacuuucuguu

SEQ ID NO: 3229256 - RNA, 12 nt, Human
uguacuuucugu

SEQ ID NO: 3229257 - RNA, 20 nt, Human
uguacuuugauucacauguu

SEQ ID NO: 3229258 - RNA, 19 nt, Human
uguacuuugauucacaugu

SEQ ID NO: 3229259 - RNA, 18 nt, Human
uguacuuugauucacaug

SEQ ID NO: 3229260 - RNA, 17 nt, Human
uguacuuugauucacau

SEQ ID NO: 3229261 - RNA, 19 nt, Human
uguacuuucuguuaaaaug

SEQ ID NO: 3229262 - RNA, 23 nt, Human
agguuuguuuagaagaagugugu

SEQ ID NO: 3229263 - RNA, 14 nt, Human
uguagagcuucugg

SEQ ID NO: 3229264 - RNA, 18 nt, Human
agguuuuaaaagccuugg

SEQ ID NO: 3229265 - RNA, 17 nt, Human
agguuuguuuugugaau

SEQ ID NO: 3229266 - RNA, 20 nt, Human
agguuuguuuugugaauuuu

SEQ ID NO: 3229267 - RNA, 18 nt, Human
uguagagccagggucuca

SEQ ID NO: 3229268 - RNA, 16 nt, Human
uguagagccagggucu

SEQ ID NO: 3229269 - RNA, 20 nt, Human
aguaaaaccacagcaguuga

SEQ ID NO: 3229270 - RNA, 17 nt, Human
agguuuuuguaaagauu

SEQ ID NO: 3229271 - RNA, 16 nt, Human
agguuuuuguaaagau

SEQ ID NO: 3229272 - RNA, 23 nt, Human
aguaaaagaagaaauaguucugu

SEQ ID NO: 3229273 - RNA, 22 nt, Human
agguuuuuguaaagauuucugu

SEQ ID NO: 3229274 - RNA, 23 nt, Human
agguuuuugauagcauuguaagc

SEQ ID NO: 3229275 - RNA, 15 nt, Human
agguuuuuguaaaga

SEQ ID NO: 3229276 - RNA, 13 nt, Human
agguuuuuguaaa

SEQ ID NO: 3229277 - RNA, 17 nt, Human
aguaaaauacucuuuuu

SEQ ID NO: 3229278 - RNA, 16 nt, Human
aguaaaauuauacugu

SEQ ID NO: 3229279 - RNA, 18 nt, Human
aguaaaauuauacugugu

SEQ ID NO: 3229280 - RNA, 21 nt, Human
aguaaaauuauacugugugug

SEQ ID NO: 3229281 - RNA, 17 nt, Human
aguaaaauaauaauuuu

SEQ ID NO: 3229282 - RNA, 12 nt, Human
uguauguggggg

SEQ ID NO: 3229283 - RNA, 19 nt, Human
uguauguguguuucugucc

SEQ ID NO: 3229284 - RNA, 20 nt, Human
uguauguguguuucuguccu

SEQ ID NO: 3229285 - RNA, 15 nt, Human
uguauguguuuagaa

SEQ ID NO: 3229286 - RNA, 16 nt, Human
uguauguguuuagaau

SEQ ID NO: 3229287 - RNA, 19 nt, Human
uguauguguuuagaauuga

SEQ ID NO: 3229288 - RNA, 20 nt, Human
uguauguguuuagaauugaa

SEQ ID NO: 3229289 - RNA, 12 nt, Human
uguauguguuua

SEQ ID NO: 3229290 - RNA, 14 nt, Human
uguauguguuuaga

SEQ ID NO: 3229291 - RNA, 11 nt, Human
uguauguguuu

SEQ ID NO: 3229292 - RNA, 23 nt, Human
uguaucaaauacauuuaaaacau

SEQ ID NO: 3229293 - RNA, 21 nt, Human
uguaucaaauacauuuaaaac

SEQ ID NO: 3229294 - RNA, 14 nt, Human
uguaucaaauacau

SEQ ID NO: 3229295 - RNA, 13 nt, Human
uguaucaguguuu

SEQ ID NO: 3229296 - RNA, 15 nt, Human
uguaucaguguuuau

SEQ ID NO: 3229297 - RNA, 18 nt, Human
uguaucaguguuuaugug

SEQ ID NO: 3229298 - RNA, 23 nt, Human
uguaucaguguuuaugugcuauu

SEQ ID NO: 3229299 - RNA, 15 nt, Human
uguaugucaaagcuu

SEQ ID NO: 3229300 - RNA, 17 nt, Human
uguaugucaaagcuuug

SEQ ID NO: 3229301 - RNA, 15 nt, Human
uguauguauaauuca

SEQ ID NO: 3229302 - RNA, 12 nt, Human
uguauguauaau

SEQ ID NO: 3229303 - RNA, 13 nt, Human
uguauguauaauu

SEQ ID NO: 3229304 - RNA, 16 nt, Human
uguaguguucagaaaa

SEQ ID NO: 3229305 - RNA, 17 nt, Human
uguagugccgcucuugg

SEQ ID NO: 3229306 - RNA, 12 nt, Human
uguauauuuuau

SEQ ID NO: 3229307 - RNA, 15 nt, Human
uguauauuuuauaua

SEQ ID NO: 3229308 - RNA, 17 nt, Human
uguauauuuuauauaaa

SEQ ID NO: 3229309 - RNA, 22 nt, Human
uguauauuuuuaucuauauaaa

SEQ ID NO: 3229310 - RNA, 18 nt, Human
uguaucacaaaucuuaac

SEQ ID NO: 3229311 - RNA, 15 nt, Human
uguaucacaaaucuu

SEQ ID NO: 3229312 - RNA, 17 nt, Human
uguaucaaugaguaaca

SEQ ID NO: 3229313 - RNA, 18 nt, Human
uguaguguucagaaaaaa

SEQ ID NO: 3229314 - RNA, 17 nt, Human
uguauucccauaucaaa

SEQ ID NO: 3229315 - RNA, 22 nt, Human
uguauguuuuucaguucaaagu

SEQ ID NO: 3229316 - RNA, 21 nt, Human
uguauguuuuucaguucaaag

SEQ ID NO: 3229317 - RNA, 20 nt, Human
uguauguuuuucaguucaaa

SEQ ID NO: 3229318 - RNA, 18 nt, Human
uguauguuuuucaguuca

SEQ ID NO: 3229319 - RNA, 13 nt, Human
uguauguuuuuca

SEQ ID NO: 3229320 - RNA, 16 nt, Human
uguauguuuuucaguu

SEQ ID NO: 3229321 - RNA, 15 nt, Human
uguauguuuuucagu

SEQ ID NO: 3229322 - RNA, 16 nt, Human
ugucaaaaaucaauau

SEQ ID NO: 3229323 - RNA, 20 nt, Human
ugucaaacauuaguacuuua

SEQ ID NO: 3229324 - RNA, 20 nt, Human
ugucaaaaguagaacuuugu

SEQ ID NO: 3229325 - RNA, 21 nt, Human
ugucaaaaguagaacuuugua

SEQ ID NO: 3229326 - RNA, 12 nt, Human
ugucaaaaguag

SEQ ID NO: 3229327 - RNA, 17 nt, Human
ugucaaaaguagaacuu

SEQ ID NO: 3229328 - RNA, 22 nt, Human
ugucaaaaguagaacuuuguau

SEQ ID NO: 3229329 - RNA, 12 nt, Human
ugucaaacauua

SEQ ID NO: 3229330 - RNA, 20 nt, Human
aguaggucguuuuaaaaaca

SEQ ID NO: 3229331 - RNA, 17 nt, Human
ugucaauuacaggaagu

SEQ ID NO: 3229332 - RNA, 20 nt, Human
aguagggguaccacugaauc

SEQ ID NO: 3229333 - RNA, 12 nt, Human
ugucaaugugug

SEQ ID NO: 3229334 - RNA, 13 nt, Human
ugucaaugugugc

SEQ ID NO: 3229335 - RNA, 14 nt, Human
ugucaauuacagga

SEQ ID NO: 3229336 - RNA, 15 nt, Human
ugucaauuacaggaa

SEQ ID NO: 3229337 - RNA, 18 nt, Human
ugucaaguggcaaagcug

SEQ ID NO: 3229338 - RNA, 17 nt, Human
ugucaagugucaguaag

SEQ ID NO: 3229339 - RNA, 17 nt, Human
ugucaaguggcaaagcu

SEQ ID NO: 3229340 - RNA, 18 nt, Human
aguauuacuucugcuaca

SEQ ID NO: 3229341 - RNA, 15 nt, Human
aguauuacuucugcu

SEQ ID NO: 3229342 - RNA, 16 nt, Human
aguaugguggcugggu

SEQ ID NO: 3229343 - RNA, 15 nt, Human
aguaugguggcuggg

SEQ ID NO: 3229344 - RNA, 20 nt, Human
aguaguaaaagaagaaauag

SEQ ID NO: 3229345 - RNA, 17 nt, Human
aguaguacuucuucugu

SEQ ID NO: 3229346 - RNA, 18 nt, Human
aguaguacuucuucugua

SEQ ID NO: 3229347 - RNA, 20 nt, Human
aguaguacuucuucuguaau

SEQ ID NO: 3229348 - RNA, 21 nt, Human
aguaguacuucuucuguaaua

SEQ ID NO: 3229349 - RNA, 22 nt, Human
aguaguacuucuucuguaauau

SEQ ID NO: 3229350 - RNA, 23 nt, Human
aguaguacuucuucuguaauauu

SEQ ID NO: 3229351 - RNA, 23 nt, Human
agucacacaguauuacuucugcu

SEQ ID NO: 3229352 - RNA, 14 nt, Human
aguaugguggcugg

SEQ ID NO: 3229353 - RNA, 12 nt, Human
aguauucuuuuu

SEQ ID NO: 3229354 - RNA, 14 nt, Human
aguauucuuuuucu

SEQ ID NO: 3229355 - RNA, 23 nt, Human
agucacacagugagucgaggaca

SEQ ID NO: 3229356 - RNA, 15 nt, Human
agucacacagugagu

SEQ ID NO: 3229357 - RNA, 19 nt, Human
agucaccccggccaccugc

SEQ ID NO: 3229358 - RNA, 22 nt, Human
aggugcccagaaugaggcugcu

SEQ ID NO: 3229359 - RNA, 18 nt, Human
aggugcccagaaugaggc

SEQ ID NO: 3229360 - RNA, 15 nt, Human
aggugcccgccacca

SEQ ID NO: 3229361 - RNA, 20 nt, Human
aggugauccacccaccucag

SEQ ID NO: 3229362 - RNA, 14 nt, Human
aggugauccaccca

SEQ ID NO: 3229363 - RNA, 16 nt, Human
aggugggauccuccag

SEQ ID NO: 3229364 - RNA, 17 nt, Human
aggugggauccuccagg

SEQ ID NO: 3229365 - RNA, 23 nt, Human
agguggggcagcuugaggguugg

SEQ ID NO: 3229366 - RNA, 16 nt, Human
agguggggcagcuuga

SEQ ID NO: 3229367 - RNA, 18 nt, Human
aggugccucaagagaagg

SEQ ID NO: 3229368 - RNA, 15 nt, Human
aggugggauccucca

SEQ ID NO: 3229369 - RNA, 13 nt, Human
aggugccuccuga

SEQ ID NO: 3229370 - RNA, 20 nt, Human
aggugugcucugaucaucca

SEQ ID NO: 3229371 - RNA, 15 nt, Human
aggugugcucugauc

SEQ ID NO: 3229372 - RNA, 17 nt, Human
aggugugaaccaccaca

SEQ ID NO: 3229373 - RNA, 19 nt, Human
agguggggucacucuggca

SEQ ID NO: 3229374 - RNA, 20 nt, Human
aggugucccugcacuugcag

SEQ ID NO: 3229375 - RNA, 14 nt, Human
agguuuaagcuguu

SEQ ID NO: 3229376 - RNA, 19 nt, Human
agguuuaaguagauuucau

SEQ ID NO: 3229377 - RNA, 20 nt, Human
agguuuaaguagauuucaug

SEQ ID NO: 3229378 - RNA, 18 nt, Human
agguucugggugcaggag

SEQ ID NO: 3229379 - RNA, 20 nt, Human
agguucucucuacugguccu

SEQ ID NO: 3229380 - RNA, 12 nt, Human
agguucucucua

SEQ ID NO: 3229381 - RNA, 12 nt, Human
aggugugcucug

SEQ ID NO: 3229382 - RNA, 24 nt, Human
agguguggcagaagcuugcagaug

SEQ ID NO: 3229383 - RNA, 21 nt, Human
uguaaauacuguuuuuaacaa

SEQ ID NO: 3229384 - RNA, 12 nt, Human
uguaaauagguu

SEQ ID NO: 3229385 - RNA, 13 nt, Human
uguaaauagguuu

SEQ ID NO: 3229386 - RNA, 22 nt, Human
uguaaauaauucuuuuuuauua

SEQ ID NO: 3229387 - RNA, 23 nt, Human
uguaaauaauucuuuuuuauuaa

SEQ ID NO: 3229388 - RNA, 16 nt, Human
uguaaauagcucaggu

SEQ ID NO: 3229389 - RNA, 15 nt, Human
uguaaauagcucagg

SEQ ID NO: 3229390 - RNA, 17 nt, Human
uguaaauaaaggaacca

SEQ ID NO: 3229391 - RNA, 14 nt, Human
uguaaauaauucuu

SEQ ID NO: 3229392 - RNA, 15 nt, Human
uguaaauaauucuuu

SEQ ID NO: 3229393 - RNA, 20 nt, Human
uguaaagugugugauugaag

SEQ ID NO: 3229394 - RNA, 19 nt, Human
uguaaauaaagaacuagca

SEQ ID NO: 3229395 - RNA, 18 nt, Human
uguaaagaaaaauauuua

SEQ ID NO: 3229396 - RNA, 21 nt, Human
uguaaaggucacuuuucacau

SEQ ID NO: 3229397 - RNA, 18 nt, Human
uguaaaggucacuuuuca

SEQ ID NO: 3229398 - RNA, 16 nt, Human
uguaaaggucacuuuu

SEQ ID NO: 3229399 - RNA, 16 nt, Human
uguaaagaaaaauauu

SEQ ID NO: 3229400 - RNA, 15 nt, Human
uguaaagaaaaauau

SEQ ID NO: 3229401 - RNA, 13 nt, Human
uguaaagaaaaau

SEQ ID NO: 3229402 - RNA, 18 nt, Human
uguaaacuuugaaauaua

SEQ ID NO: 3229403 - RNA, 17 nt, Human
uguaaacuuugaaauau

SEQ ID NO: 3229404 - RNA, 16 nt, Human
uguaaacuuugaaaua

SEQ ID NO: 3229405 - RNA, 15 nt, Human
uguaaacuuugaaau

SEQ ID NO: 3229406 - RNA, 14 nt, Human
uguaaacuuugaaa

SEQ ID NO: 3229407 - RNA, 13 nt, Human
uguaaacuuugaa

SEQ ID NO: 3229408 - RNA, 12 nt, Human
uguaaacuuuga

SEQ ID NO: 3229409 - RNA, 22 nt, Human
ugguuauagugcaauauauuuu

SEQ ID NO: 3229410 - RNA, 21 nt, Human
ugguuauagugcaauauauuu

SEQ ID NO: 3229411 - RNA, 20 nt, Human
ugguuauagugcaauauauu

SEQ ID NO: 3229412 - RNA, 19 nt, Human
ugguuauagugcaauauau

SEQ ID NO: 3229413 - RNA, 18 nt, Human
ugguuauagugcaauaua

SEQ ID NO: 3229414 - RNA, 13 nt, Human
ugguuagaaaaca

SEQ ID NO: 3229415 - RNA, 14 nt, Human
ugguuauagugcaa

SEQ ID NO: 3229416 - RNA, 14 nt, Human
ugguuuccugcccu

SEQ ID NO: 3229417 - RNA, 15 nt, Human
ugguuuccugcccug

SEQ ID NO: 3229418 - RNA, 12 nt, Human
ugguuuccugcc

SEQ ID NO: 3229419 - RNA, 13 nt, Human
ugguuuccugccc

SEQ ID NO: 3229420 - RNA, 17 nt, Human
ugguuaugaauacuuug

SEQ ID NO: 3229421 - RNA, 17 nt, Human
ugguuuucaaaauaaaa

SEQ ID NO: 3229422 - RNA, 15 nt, Human
ugguuuucaaaauaa

SEQ ID NO: 3229423 - RNA, 22 nt, Human
ugguuuggugcuuuuuauaaaa

SEQ ID NO: 3229424 - RNA, 17 nt, Human
ugguuugggggagaaga

SEQ ID NO: 3229425 - RNA, 19 nt, Human
ugguuuucaaccucuagaa

SEQ ID NO: 3229426 - RNA, 15 nt, Human
ugguuuuaugaugac

SEQ ID NO: 3229427 - RNA, 21 nt, Human
ugguuuucaaccucuagaauu

SEQ ID NO: 3229428 - RNA, 20 nt, Human
ugguuuucaaccucuagaau

SEQ ID NO: 3229429 - RNA, 14 nt, Human
ugguuuucaaaaua

SEQ ID NO: 3229430 - RNA, 11 nt, Human
ugguuuggaau

SEQ ID NO: 3229431 - RNA, 17 nt, Human
ugguuuggaauauuaaa

SEQ ID NO: 3229432 - RNA, 20 nt, Human
ugguuuggaauauuaaaaaa

SEQ ID NO: 3229433 - RNA, 15 nt, Human
aggugauaaaaucau

SEQ ID NO: 3229434 - RNA, 15 nt, Human
aggugauaagggaaa

SEQ ID NO: 3229435 - RNA, 21 nt, Human
aggugauaagggaaaagauaa

SEQ ID NO: 3229436 - RNA, 14 nt, Human
aggugauaaaauca

SEQ ID NO: 3229437 - RNA, 17 nt, Human
uggugcgaucuggguuc

SEQ ID NO: 3229438 - RNA, 16 nt, Human
uggugcgaucuggguu

SEQ ID NO: 3229439 - RNA, 13 nt, Human
uggugcugccaca

SEQ ID NO: 3229440 - RNA, 18 nt, Human
uggugcugccacacuuca

SEQ ID NO: 3229441 - RNA, 19 nt, Human
uggugucgggcaugacacg

SEQ ID NO: 3229442 - RNA, 15 nt, Human
ugguggcagcugcgg

SEQ ID NO: 3229443 - RNA, 13 nt, Human
ugguggcagcugc

SEQ ID NO: 3229444 - RNA, 14 nt, Human
ugguggcagcugcg

SEQ ID NO: 3229445 - RNA, 18 nt, Human
uggugcuuuccuguuucu

SEQ ID NO: 3229446 - RNA, 17 nt, Human
uggugcuuuuuauaaaa

SEQ ID NO: 3229447 - RNA, 21 nt, Human
ugguggagaggcccggccucu

SEQ ID NO: 3229448 - RNA, 18 nt, Human
ugguuaggcauuguggga

SEQ ID NO: 3229449 - RNA, 20 nt, Human
ugguuaggcauugugggaag

SEQ ID NO: 3229450 - RNA, 15 nt, Human
uggucagauuugaac

SEQ ID NO: 3229451 - RNA, 20 nt, Human
ugguagcugggaaagcauaa

SEQ ID NO: 3229452 - RNA, 16 nt, Human
uggucagauuugaacu

SEQ ID NO: 3229453 - RNA, 13 nt, Human
aggucagagccug

SEQ ID NO: 3229454 - RNA, 18 nt, Human
aggucagagccugcaguu

SEQ ID NO: 3229455 - RNA, 17 nt, Human
aggucagagccugcagu

SEQ ID NO: 3229456 - RNA, 15 nt, Human
aggucagagccugca

SEQ ID NO: 3229457 - RNA, 14 nt, Human
aggucagagccugc

SEQ ID NO: 3229458 - RNA, 16 nt, Human
aggucuugaacuccug

SEQ ID NO: 3229459 - RNA, 15 nt, Human
aggucagcucagagc

SEQ ID NO: 3229460 - RNA, 16 nt, Human
uggucacuucuucugu

SEQ ID NO: 3229461 - RNA, 15 nt, Human
uggucacuucuucug

SEQ ID NO: 3229462 - RNA, 19 nt, Human
agguccacaacacacagau

SEQ ID NO: 3229463 - RNA, 16 nt, Human
aggugagaagcagagg

SEQ ID NO: 3229464 - RNA, 21 nt, Human
aggugagaagcagaggaagga

SEQ ID NO: 3229465 - RNA, 23 nt, Human
aggugagaagcagaggaaggaga

SEQ ID NO: 3229466 - RNA, 22 nt, Human
aggugagcaagcccaggagaau

SEQ ID NO: 3229467 - RNA, 15 nt, Human
aggugacagagugag

SEQ ID NO: 3229468 - RNA, 13 nt, Human
aggugacagagug

SEQ ID NO: 3229469 - RNA, 17 nt, Human
aggucuugaacuccugg

SEQ ID NO: 3229470 - RNA, 13 nt, Human
aggugaccccagg

SEQ ID NO: 3229471 - RNA, 22 nt, Human
aggugacagagugagacucugu

SEQ ID NO: 3229472 - RNA, 23 nt, Human
aggugaaggaggcuccaggcagc

SEQ ID NO: 3229473 - RNA, 15 nt, Human
uggggcucagagugg

SEQ ID NO: 3229474 - RNA, 22 nt, Human
uggggcugcaccggcuggccug

SEQ ID NO: 3229475 - RNA, 23 nt, Human
uggggcugcaccggcuggccugg

SEQ ID NO: 3229476 - RNA, 15 nt, Human
uggggcucccgccuc

SEQ ID NO: 3229477 - RNA, 23 nt, Human
uggggcucccgccuccaaccccu

SEQ ID NO: 3229478 - RNA, 16 nt, Human
uggggcucccgccucc

SEQ ID NO: 3229479 - RNA, 22 nt, Human
uggggagggauuuggggcucag

SEQ ID NO: 3229480 - RNA, 21 nt, Human
uggggccaguuggucccccuu

SEQ ID NO: 3229481 - RNA, 20 nt, Human
uggggccauugcuuaccuug

SEQ ID NO: 3229482 - RNA, 13 nt, Human
uggggcccaaaug

SEQ ID NO: 3229483 - RNA, 14 nt, Human
uggggcccaaaugc

SEQ ID NO: 3229484 - RNA, 12 nt, Human
uggggcccugcc

SEQ ID NO: 3229485 - RNA, 16 nt, Human
uggggaccucaggccu

SEQ ID NO: 3229486 - RNA, 17 nt, Human
uggggaccucaggccug

SEQ ID NO: 3229487 - RNA, 14 nt, Human
uggggagggauuug

SEQ ID NO: 3229488 - RNA, 12 nt, Human
uggggaggacaa

SEQ ID NO: 3229489 - RNA, 12 nt, Human
agggcuccagac

SEQ ID NO: 3229490 - RNA, 14 nt, Human
uggggaccucaggc

SEQ ID NO: 3229491 - RNA, 15 nt, Human
uggggaccucaggcc

SEQ ID NO: 3229492 - RNA, 17 nt, Human
agggcucugacaaagcu

SEQ ID NO: 3229493 - RNA, 22 nt, Human
uggggucagguugacaggaggu

SEQ ID NO: 3229494 - RNA, 22 nt, Human
uggggucaggccgggcagagca

SEQ ID NO: 3229495 - RNA, 20 nt, Human
uggggucaggccgggcagag

SEQ ID NO: 3229496 - RNA, 22 nt, Human
uggggucacucuggcagcucag

SEQ ID NO: 3229497 - RNA, 19 nt, Human
uggggucaggccgggcaga

SEQ ID NO: 3229498 - RNA, 16 nt, Human
uggggucacucuggca

SEQ ID NO: 3229499 - RNA, 20 nt, Human
uggggucacucuggcagcuc

SEQ ID NO: 3229500 - RNA, 14 nt, Human
uggggcugcuguga

SEQ ID NO: 3229501 - RNA, 13 nt, Human
uggggucacucug

SEQ ID NO: 3229502 - RNA, 14 nt, Human
uggggucacucugg

SEQ ID NO: 3229503 - RNA, 15 nt, Human
ugggguaugggagag

SEQ ID NO: 3229504 - RNA, 19 nt, Human
ugggguacccacugcucug

SEQ ID NO: 3229505 - RNA, 18 nt, Human
ugggguacccacugcucu

SEQ ID NO: 3229506 - RNA, 17 nt, Human
ugggguacccacugcuc

SEQ ID NO: 3229507 - RNA, 13 nt, Human
aggggaauguuug

SEQ ID NO: 3229508 - RNA, 21 nt, Human
aggggaauaaacuguugaguc

SEQ ID NO: 3229509 - RNA, 16 nt, Human
aggggaagaauaauuu

SEQ ID NO: 3229510 - RNA, 18 nt, Human
aggggaaaaucagccugc

SEQ ID NO: 3229511 - RNA, 22 nt, Human
aggggaaaaucagccugcucca

SEQ ID NO: 3229512 - RNA, 14 nt, Human
aggggaacagacug

SEQ ID NO: 3229513 - RNA, 13 nt, Human
aggggaaaagagg

SEQ ID NO: 3229514 - RNA, 14 nt, Human
agggcuuuucaaaa

SEQ ID NO: 3229515 - RNA, 13 nt, Human
agggcuuuucaaa

SEQ ID NO: 3229516 - RNA, 18 nt, Human
agggcuuuccugugccag

SEQ ID NO: 3229517 - RNA, 23 nt, Human
agggcuuuaaaauucucuuccaa

SEQ ID NO: 3229518 - RNA, 18 nt, Human
agggcuuuaaaauucucu

SEQ ID NO: 3229519 - RNA, 20 nt, Human
agggcuuuaaaauucucuuc

SEQ ID NO: 3229520 - RNA, 19 nt, Human
agggcuuuaaaauucucuu

SEQ ID NO: 3229521 - RNA, 21 nt, Human
uggggucucucacagacagga

SEQ ID NO: 3229522 - RNA, 17 nt, Human
uggggucucucacagac

SEQ ID NO: 3229523 - RNA, 22 nt, Human
uggggucuccucaggaccaggg

SEQ ID NO: 3229524 - RNA, 19 nt, Human
uggggucuccucaggacca

SEQ ID NO: 3229525 - RNA, 15 nt, Human
agggugggagugggc

SEQ ID NO: 3229526 - RNA, 16 nt, Human
aggguggugaccucug

SEQ ID NO: 3229527 - RNA, 19 nt, Human
uggguccccagcccuuccu

SEQ ID NO: 3229528 - RNA, 16 nt, Human
uggguccccagcccuu

SEQ ID NO: 3229529 - RNA, 15 nt, Human
uggguccccagcccu

SEQ ID NO: 3229530 - RNA, 14 nt, Human
ugggugcaggagcg

SEQ ID NO: 3229531 - RNA, 20 nt, Human
ugggugcaggagcgcucccu

SEQ ID NO: 3229532 - RNA, 16 nt, Human
ugggucgcccaugaga

SEQ ID NO: 3229533 - RNA, 12 nt, Human
ugguaagagaaa

SEQ ID NO: 3229534 - RNA, 13 nt, Human
ugguaagagaaaa

SEQ ID NO: 3229535 - RNA, 14 nt, Human
ugguaagagaaaag

SEQ ID NO: 3229536 - RNA, 22 nt, Human
ugguaagaaaaagcaaaaggca

SEQ ID NO: 3229537 - RNA, 17 nt, Human
ugguaagaaaaagcaaa

SEQ ID NO: 3229538 - RNA, 13 nt, Human
ugguaagaaaaag

SEQ ID NO: 3229539 - RNA, 12 nt, Human
ugguaagaaaaa

SEQ ID NO: 3229540 - RNA, 10 nt, Human
ugguaacauu

SEQ ID NO: 3229541 - RNA, 17 nt, Human
uggguggcaccagcagc

SEQ ID NO: 3229542 - RNA, 20 nt, Human
uggguggcaccagcagccug

SEQ ID NO: 3229543 - RNA, 21 nt, Human
uggguggcaccagcagccugg

SEQ ID NO: 3229544 - RNA, 20 nt, Human
ugguagagugugccugaagu

SEQ ID NO: 3229545 - RNA, 13 nt, Human
ugguaccuugcac

SEQ ID NO: 3229546 - RNA, 23 nt, Human
ugguaagaaaaagcaaaaggcau

SEQ ID NO: 3229547 - RNA, 18 nt, Human
aggggagcaugggaagug

SEQ ID NO: 3229548 - RNA, 20 nt, Human
aggggaaucuggagguagcc

SEQ ID NO: 3229549 - RNA, 14 nt, Human
aggggaaugagggg

SEQ ID NO: 3229550 - RNA, 17 nt, Human
aggggaaugagggggcu

SEQ ID NO: 3229551 - RNA, 19 nt, Human
aggggaaugagggggcuca

SEQ ID NO: 3229552 - RNA, 20 nt, Human
aggggaaugagggggcucag

SEQ ID NO: 3229553 - RNA, 16 nt, Human
aggggagccaggaggg

SEQ ID NO: 3229554 - RNA, 15 nt, Human
aggggagccaggagg

SEQ ID NO: 3229555 - RNA, 13 nt, Human
aggggagccagga

SEQ ID NO: 3229556 - RNA, 12 nt, Human
aggggagccagg

SEQ ID NO: 3229557 - RNA, 20 nt, Human
aggggaauguuugccucugc

SEQ ID NO: 3229558 - RNA, 19 nt, Human
aggggaauguuugccucug

SEQ ID NO: 3229559 - RNA, 21 nt, Human
aggggaauguuugccucugcc

SEQ ID NO: 3229560 - RNA, 20 nt, Human
aggggguggccucccaacuc

SEQ ID NO: 3229561 - RNA, 18 nt, Human
aggggguggccucccaac

SEQ ID NO: 3229562 - RNA, 19 nt, Human
agggguaccacugaaucug

SEQ ID NO: 3229563 - RNA, 16 nt, Human
agggguaccacugaau

SEQ ID NO: 3229564 - RNA, 16 nt, Human
agggucucacucuguc

SEQ ID NO: 3229565 - RNA, 15 nt, Human
agggucucacucugu

SEQ ID NO: 3229566 - RNA, 14 nt, Human
agggucucacucug

SEQ ID NO: 3229567 - RNA, 15 nt, Human
aggguaaggcugugg

SEQ ID NO: 3229568 - RNA, 21 nt, Human
agggguuuucuugauaauuuu

SEQ ID NO: 3229569 - RNA, 11 nt, Human
agggguuuaca

SEQ ID NO: 3229570 - RNA, 14 nt, Human
agggguuuacagug

SEQ ID NO: 3229571 - RNA, 15 nt, Human
agggguuuacaguga

SEQ ID NO: 3229572 - RNA, 19 nt, Human
ugggagaaugucaguaugu

SEQ ID NO: 3229573 - RNA, 20 nt, Human
ugggagaaugucaguaugug

SEQ ID NO: 3229574 - RNA, 22 nt, Human
ugggagaaugucaguaugugga

SEQ ID NO: 3229575 - RNA, 22 nt, Human
ugggagaaccaaaaagaggcua

SEQ ID NO: 3229576 - RNA, 17 nt, Human
ugggagaagggcagagu

SEQ ID NO: 3229577 - RNA, 16 nt, Human
ugggagaagggcagag

SEQ ID NO: 3229578 - RNA, 18 nt, Human
ugggacucaaugcacuga

SEQ ID NO: 3229579 - RNA, 20 nt, Human
ugggacucaaugcacugaca

SEQ ID NO: 3229580 - RNA, 19 nt, Human
ugggagagaagagaaugca

SEQ ID NO: 3229581 - RNA, 21 nt, Human
ugggagagaagagaaugcaca

SEQ ID NO: 3229582 - RNA, 18 nt, Human
ugggaggaucucuugagc

SEQ ID NO: 3229583 - RNA, 16 nt, Human
ugggagagccuuccag

SEQ ID NO: 3229584 - RNA, 18 nt, Human
ugggagacugcugaguca

SEQ ID NO: 3229585 - RNA, 23 nt, Human
agggaggacgcucucuggccuuc

SEQ ID NO: 3229586 - RNA, 21 nt, Human
agggaggacgcucucuggccu

SEQ ID NO: 3229587 - RNA, 22 nt, Human
agggaggacgcucucuggccuu

SEQ ID NO: 3229588 - RNA, 15 nt, Human
ugggacuacaggcac

SEQ ID NO: 3229589 - RNA, 14 nt, Human
ugggacuacaggca

SEQ ID NO: 3229590 - RNA, 12 nt, Human
agggagaggccg

SEQ ID NO: 3229591 - RNA, 21 nt, Human
agggagcacaacccccagcuc

SEQ ID NO: 3229592 - RNA, 23 nt, Human
agggagcacaacccccagcuccc

SEQ ID NO: 3229593 - RNA, 22 nt, Human
agggagcacaacccccagcucc

SEQ ID NO: 3229594 - RNA, 15 nt, Human
agggagcuggcucca

SEQ ID NO: 3229595 - RNA, 19 nt, Human
agggagcuggcuccagccu

SEQ ID NO: 3229596 - RNA, 16 nt, Human
agggagcuggcuccag

SEQ ID NO: 3229597 - RNA, 21 nt, Human
agggagcuggcuccagccugg

SEQ ID NO: 3229598 - RNA, 20 nt, Human
agggagcuggcuccagccug

SEQ ID NO: 3229599 - RNA, 22 nt, Human
agggagcuggcuccagccugga

SEQ ID NO: 3229600 - RNA, 13 nt, Human
agggaaggggaca

SEQ ID NO: 3229601 - RNA, 22 nt, Human
agggaaggggacaaggacuagg

SEQ ID NO: 3229602 - RNA, 19 nt, Human
agggaaggggggucagaag

SEQ ID NO: 3229603 - RNA, 21 nt, Human
agggaauuucuucaacucccu

SEQ ID NO: 3229604 - RNA, 13 nt, Human
agggacaaaacuu

SEQ ID NO: 3229605 - RNA, 23 nt, Human
agggaaguugcuggaaagagcau

SEQ ID NO: 3229606 - RNA, 20 nt, Human
agggaaguugcuggaaagag

SEQ ID NO: 3229607 - RNA, 15 nt, Human
agggaauagaaaugu

SEQ ID NO: 3229608 - RNA, 22 nt, Human
aggcccuaucuguuuacagugu

SEQ ID NO: 3229609 - RNA, 22 nt, Human
aggcccuccucccucccagcuc

SEQ ID NO: 3229610 - RNA, 19 nt, Human
aggcccuccucccucccag

SEQ ID NO: 3229611 - RNA, 20 nt, Human
aggcccggcuccaggcuccu

SEQ ID NO: 3229612 - RNA, 18 nt, Human
aggcccggcuccaggcuc

SEQ ID NO: 3229613 - RNA, 21 nt, Human
aggcccggcuccaggcuccuu

SEQ ID NO: 3229614 - RNA, 21 nt, Human
agggaacaaguugagcuauga

SEQ ID NO: 3229615 - RNA, 20 nt, Human
agggaacaaguugagcuaug

SEQ ID NO: 3229616 - RNA, 23 nt, Human
aggcccuccucccucccagcucc

SEQ ID NO: 3229617 - RNA, 16 nt, Human
agggaacuaggaaggc

SEQ ID NO: 3229618 - RNA, 19 nt, Human
agggaagaauaaagagcug

SEQ ID NO: 3229619 - RNA, 17 nt, Human
agggaagauaaguugga

SEQ ID NO: 3229620 - RNA, 21 nt, Human
agggaagauaaguuggaaaca

SEQ ID NO: 3229621 - RNA, 20 nt, Human
agggaagauaaguuggaaac

SEQ ID NO: 3229622 - RNA, 19 nt, Human
agggaagauaaguuggaaa

SEQ ID NO: 3229623 - RNA, 18 nt, Human
agggaagauaaguuggaa

SEQ ID NO: 3229624 - RNA, 15 nt, Human
ugggccccugccaga

SEQ ID NO: 3229625 - RNA, 15 nt, Human
agggagggagggcuc

SEQ ID NO: 3229626 - RNA, 13 nt, Human
agggagggcucca

SEQ ID NO: 3229627 - RNA, 14 nt, Human
agggaggcccagcg

SEQ ID NO: 3229628 - RNA, 21 nt, Human
ugggcccccaaauggaaaugg

SEQ ID NO: 3229629 - RNA, 16 nt, Human
ugggcccccaaaugga

SEQ ID NO: 3229630 - RNA, 22 nt, Human
ugggccccaguuguauuuauuu

SEQ ID NO: 3229631 - RNA, 18 nt, Human
ugggccccaguuguauuu

SEQ ID NO: 3229632 - RNA, 11 nt, Human
ugggcagagca

SEQ ID NO: 3229633 - RNA, 12 nt, Human
ugggcagagcag

SEQ ID NO: 3229634 - RNA, 18 nt, Human
ugggccaggagccuccug

SEQ ID NO: 3229635 - RNA, 12 nt, Human
ugggcagaagga

SEQ ID NO: 3229636 - RNA, 23 nt, Human
ugggcagaaggaagacuucaucc

SEQ ID NO: 3229637 - RNA, 20 nt, Human
ugggaggaucucuugagccu

SEQ ID NO: 3229638 - RNA, 21 nt, Human
ugggaggaucucuugagccug

SEQ ID NO: 3229639 - RNA, 19 nt, Human
ugggaggccaaggugggag

SEQ ID NO: 3229640 - RNA, 22 nt, Human
ugggaggauugcuugagcucag

SEQ ID NO: 3229641 - RNA, 20 nt, Human
ugggaggccaaggugggagg

SEQ ID NO: 3229642 - RNA, 18 nt, Human
ugggcacugcucucaccu

SEQ ID NO: 3229643 - RNA, 16 nt, Human
agggcccgggaagcaa

SEQ ID NO: 3229644 - RNA, 23 nt, Human
agggcucagcggggacagcuccu

SEQ ID NO: 3229645 - RNA, 22 nt, Human
agggcucagcggggacagcucc

SEQ ID NO: 3229646 - RNA, 20 nt, Human
agggcucagcggggacagcu

SEQ ID NO: 3229647 - RNA, 19 nt, Human
agggcucagcggggacagc

SEQ ID NO: 3229648 - RNA, 21 nt, Human
agggccauugaacucugagag

SEQ ID NO: 3229649 - RNA, 17 nt, Human
agggccagaaguagcuu

SEQ ID NO: 3229650 - RNA, 14 nt, Human
agggagggcuccag

SEQ ID NO: 3229651 - RNA, 15 nt, Human
agggagggcuccaga

SEQ ID NO: 3229652 - RNA, 16 nt, Human
agggagggcuccagac

SEQ ID NO: 3229653 - RNA, 20 nt, Human
agggcacagggccuggccca

SEQ ID NO: 3229654 - RNA, 19 nt, Human
agggcacagggccuggccc

SEQ ID NO: 3229655 - RNA, 18 nt, Human
agggcacagggccuggcc

SEQ ID NO: 3229656 - RNA, 14 nt, Human
agggcacugguggc

SEQ ID NO: 3229657 - RNA, 16 nt, Human
agggcacugguggccc

SEQ ID NO: 3229658 - RNA, 14 nt, Human
agggcaugaaauga

SEQ ID NO: 3229659 - RNA, 13 nt, Human
agggcaugaaaug

SEQ ID NO: 3229660 - RNA, 12 nt, Human
agggcaugaaau

SEQ ID NO: 3229661 - RNA, 12 nt, Human
agggcaggacca

SEQ ID NO: 3229662 - RNA, 19 nt, Human
agggcaggaccagcccacg

SEQ ID NO: 3229663 - RNA, 18 nt, Human
agggcaggaccagcccac

SEQ ID NO: 3229664 - RNA, 17 nt, Human
agggcaggaccagccca

SEQ ID NO: 3229665 - RNA, 16 nt, Human
agggcaggaccagccc

SEQ ID NO: 3229666 - RNA, 14 nt, Human
agggcaggaccagc

SEQ ID NO: 3229667 - RNA, 13 nt, Human
agggcaggaccag

SEQ ID NO: 3229668 - RNA, 21 nt, Human
aguucugccucugauguauuu

SEQ ID NO: 3229669 - RNA, 14 nt, Human
aguucugguuccua

SEQ ID NO: 3229670 - RNA, 11 nt, Human
aguucugggca

SEQ ID NO: 3229671 - RNA, 18 nt, Human
aguucuuaacccaguguc

SEQ ID NO: 3229672 - RNA, 14 nt, Human
aguucuuaacccag

SEQ ID NO: 3229673 - RNA, 23 nt, Human
aguucuuacugcuuaauucaaau

SEQ ID NO: 3229674 - RNA, 19 nt, Human
aguucuuacugcuuaauuc

SEQ ID NO: 3229675 - RNA, 21 nt, Human
aguucugcagauaaacaguag

SEQ ID NO: 3229676 - RNA, 16 nt, Human
aguucugcagauaaac

SEQ ID NO: 3229677 - RNA, 13 nt, Human
uguuuugcaugua

SEQ ID NO: 3229678 - RNA, 19 nt, Human
uguuuucauuaucucaaaa

SEQ ID NO: 3229679 - RNA, 20 nt, Human
uguuuuccaugaguccccug

SEQ ID NO: 3229680 - RNA, 13 nt, Human
uguuuuaucuggu

SEQ ID NO: 3229681 - RNA, 17 nt, Human
uguuuucaguguacaug

SEQ ID NO: 3229682 - RNA, 16 nt, Human
uguuuggaaaagacag

SEQ ID NO: 3229683 - RNA, 17 nt, Human
uguuuggaaaagacagu

SEQ ID NO: 3229684 - RNA, 21 nt, Human
uguuugaugcauuaaaagaaa

SEQ ID NO: 3229685 - RNA, 20 nt, Human
uguuugcugaacauuggaga

SEQ ID NO: 3229686 - RNA, 21 nt, Human
uguuucuuucucugaggacaa

SEQ ID NO: 3229687 - RNA, 20 nt, Human
uguuucuuucucugaggaca

SEQ ID NO: 3229688 - RNA, 12 nt, Human
uguuucuuugau

SEQ ID NO: 3229689 - RNA, 23 nt, Human
uguuucuuugaauuuucauuuua

SEQ ID NO: 3229690 - RNA, 19 nt, Human
uguuucuuugaauuuucau

SEQ ID NO: 3229691 - RNA, 18 nt, Human
uguuucuuugaauuuuca

SEQ ID NO: 3229692 - RNA, 16 nt, Human
uguuucuuugaauuuu

SEQ ID NO: 3229693 - RNA, 13 nt, Human
uguuucuuugaau

SEQ ID NO: 3229694 - RNA, 12 nt, Human
uguuucuuugaa

SEQ ID NO: 3229695 - RNA, 18 nt, Human
uguuucuguccuguaacu

SEQ ID NO: 3229696 - RNA, 20 nt, Human
uguuucuguccuguaacugu

SEQ ID NO: 3229697 - RNA, 22 nt, Human
uguuucuguccuguaacuguua

SEQ ID NO: 3229698 - RNA, 15 nt, Human
uguuucuuaauuugg

SEQ ID NO: 3229699 - RNA, 16 nt, Human
uguuucuuaauuugga

SEQ ID NO: 3229700 - RNA, 23 nt, Human
uguuucuuaauuuggaaacuaau

SEQ ID NO: 3229701 - RNA, 17 nt, Human
uguuugauucagacagc

SEQ ID NO: 3229702 - RNA, 22 nt, Human
uguuugauucagacagcugccu

SEQ ID NO: 3229703 - RNA, 19 nt, Human
uguuugaugcauuaaaaga

SEQ ID NO: 3229704 - RNA, 16 nt, Human
uguuugaugcauuaaa

SEQ ID NO: 3229705 - RNA, 13 nt, Human
uguuugaugcauu

SEQ ID NO: 3229706 - RNA, 21 nt, Human
uguuugauauaccaaauuaaa

SEQ ID NO: 3229707 - RNA, 16 nt, Human
uguuugaaaauaguuu

SEQ ID NO: 3229708 - RNA, 17 nt, Human
uguuugaaaauaguuua

SEQ ID NO: 3229709 - RNA, 18 nt, Human
uguuugaaaauaguuuau

SEQ ID NO: 3229710 - RNA, 19 nt, Human
uguuugaaaauaguuuauu

SEQ ID NO: 3229711 - RNA, 15 nt, Human
uguuucuuugaucau

SEQ ID NO: 3229712 - RNA, 19 nt, Human
uguugcccaggcaggucuu

SEQ ID NO: 3229713 - RNA, 15 nt, Human
uguuuagucuuuaua

SEQ ID NO: 3229714 - RNA, 17 nt, Human
uguugcuaugugccuua

SEQ ID NO: 3229715 - RNA, 16 nt, Human
uguuuaugugugugug

SEQ ID NO: 3229716 - RNA, 15 nt, Human
uguuuauuaaaugcu

SEQ ID NO: 3229717 - RNA, 16 nt, Human
uguuuauuaaaugcuu

SEQ ID NO: 3229718 - RNA, 13 nt, Human
uguuuaugugugu

SEQ ID NO: 3229719 - RNA, 17 nt, Human
uguuuaugugcuauuaa

SEQ ID NO: 3229720 - RNA, 22 nt, Human
uguuuaugugcuauuaauauuu

SEQ ID NO: 3229721 - RNA, 17 nt, Human
uguuuauauggaagaaa

SEQ ID NO: 3229722 - RNA, 13 nt, Human
uguuuaguggaaa

SEQ ID NO: 3229723 - RNA, 16 nt, Human
uguuuaguucagcaaa

SEQ ID NO: 3229724 - RNA, 17 nt, Human
uguuuauugucaaagug

SEQ ID NO: 3229725 - RNA, 19 nt, Human
uguuuauugucaaaguggu

SEQ ID NO: 3229726 - RNA, 13 nt, Human
uuaaaauugugau

SEQ ID NO: 3229727 - RNA, 23 nt, Human
uuaaaauucucuuccaaccauuu

SEQ ID NO: 3229728 - RNA, 18 nt, Human
uuaaaauugugauguguc

SEQ ID NO: 3229729 - RNA, 12 nt, Human
uuaaaaaguauu

SEQ ID NO: 3229730 - RNA, 16 nt, Human
uuaaaauuacaacuaa

SEQ ID NO: 3229731 - RNA, 23 nt, Human
uuaaaaaguauugccaaacauua

SEQ ID NO: 3229732 - RNA, 22 nt, Human
uuaaaaaguauugccaaacauu

SEQ ID NO: 3229733 - RNA, 21 nt, Human
uuaaaaaguauugccaaacau

SEQ ID NO: 3229734 - RNA, 20 nt, Human
uuaaaaaguauugccaaaca

SEQ ID NO: 3229735 - RNA, 22 nt, Human
aguuuagugugguuuucuguuu

SEQ ID NO: 3229736 - RNA, 17 nt, Human
uuaaaaacaaaaggcaa

SEQ ID NO: 3229737 - RNA, 16 nt, Human
uuaaaaacaaaaggca

SEQ ID NO: 3229738 - RNA, 17 nt, Human
uuaaaaagcccaaccuc

SEQ ID NO: 3229739 - RNA, 14 nt, Human
uuaaaaagcccaac

SEQ ID NO: 3229740 - RNA, 23 nt, Human
uuaaaaagauaaaaaaacagcuu

SEQ ID NO: 3229741 - RNA, 15 nt, Human
uuaaagcuuuugaug

SEQ ID NO: 3229742 - RNA, 17 nt, Human
uuaaagcuuuugaugug

SEQ ID NO: 3229743 - RNA, 21 nt, Human
uuaaaauuuuaagcuaggaaa

SEQ ID NO: 3229744 - RNA, 12 nt, Human
uuaaaauuuuaa

SEQ ID NO: 3229745 - RNA, 13 nt, Human
uuaaaauuucaua

SEQ ID NO: 3229746 - RNA, 13 nt, Human
uuaaaauuugaaa

SEQ ID NO: 3229747 - RNA, 18 nt, Human
uuaaaauuugaaacauug

SEQ ID NO: 3229748 - RNA, 17 nt, Human
uuaaaauuugaaacauu

SEQ ID NO: 3229749 - RNA, 15 nt, Human
uuaaaauuugaaaca

SEQ ID NO: 3229750 - RNA, 14 nt, Human
uuaaaauuugaaac

SEQ ID NO: 3229751 - RNA, 23 nt, Human
uuaaagggaagaaaacacuguua

SEQ ID NO: 3229752 - RNA, 22 nt, Human
uuaaagggaagaaaacacuguu

SEQ ID NO: 3229753 - RNA, 17 nt, Human
uuaaagggcccaaugaa

SEQ ID NO: 3229754 - RNA, 15 nt, Human
uuaaagggaaauuga

SEQ ID NO: 3229755 - RNA, 18 nt, Human
uuaaagggaagaaaacac

SEQ ID NO: 3229756 - RNA, 16 nt, Human
uuaaagggaagaaaac

SEQ ID NO: 3229757 - RNA, 15 nt, Human
uuaaagggaagaaaa

SEQ ID NO: 3229758 - RNA, 13 nt, Human
uuaaagggaagaa

SEQ ID NO: 3229759 - RNA, 17 nt, Human
uuaacaaauaacaacuu

SEQ ID NO: 3229760 - RNA, 18 nt, Human
uuaacaggcaaacauuuu

SEQ ID NO: 3229761 - RNA, 17 nt, Human
uuaacaggcaaacauuu

SEQ ID NO: 3229762 - RNA, 22 nt, Human
uuaacagggucucuagugcugu

SEQ ID NO: 3229763 - RNA, 23 nt, Human
uuaacaggcaaacauuuucucuu

SEQ ID NO: 3229764 - RNA, 16 nt, Human
aguuucagaguucuca

SEQ ID NO: 3229765 - RNA, 17 nt, Human
aguuucagaguauauug

SEQ ID NO: 3229766 - RNA, 21 nt, Human
uuaaauugcucacaguuauua

SEQ ID NO: 3229767 - RNA, 14 nt, Human
uuaaauugcucaca

SEQ ID NO: 3229768 - RNA, 11 nt, Human
uuaacaaauaa

SEQ ID NO: 3229769 - RNA, 15 nt, Human
aguuguuuuuguaua

SEQ ID NO: 3229770 - RNA, 16 nt, Human
aguuguuuuuguauau

SEQ ID NO: 3229771 - RNA, 17 nt, Human
aguuguuuuuguauauu

SEQ ID NO: 3229772 - RNA, 18 nt, Human
aguuguuuuuguauauug

SEQ ID NO: 3229773 - RNA, 14 nt, Human
aguuuaaggaauau

SEQ ID NO: 3229774 - RNA, 19 nt, Human
aguuguuuuuguauauugg

SEQ ID NO: 3229775 - RNA, 20 nt, Human
aguuguuuuuguauauuggu

SEQ ID NO: 3229776 - RNA, 22 nt, Human
aguuguuuuuguauauugguuu

SEQ ID NO: 3229777 - RNA, 18 nt, Human
aguuggucccccuuccau

SEQ ID NO: 3229778 - RNA, 21 nt, Human
aguuguuugauucagacagcu

SEQ ID NO: 3229779 - RNA, 23 nt, Human
aguuguuugauucagacagcugc

SEQ ID NO: 3229780 - RNA, 21 nt, Human
aguuguaacauucuauuucaa

SEQ ID NO: 3229781 - RNA, 14 nt, Human
aguucuuccuguaa

SEQ ID NO: 3229782 - RNA, 15 nt, Human
aguucuuccuguaau

SEQ ID NO: 3229783 - RNA, 17 nt, Human
aguugcauagcaguaua

SEQ ID NO: 3229784 - RNA, 18 nt, Human
aguugcauagcaguauau

SEQ ID NO: 3229785 - RNA, 21 nt, Human
aguuggguggaugccuggugg

SEQ ID NO: 3229786 - RNA, 17 nt, Human
aguuggguggaugccug

SEQ ID NO: 3229787 - RNA, 13 nt, Human
aguuggcuucuaa

SEQ ID NO: 3229788 - RNA, 16 nt, Human
aguuggcuaggacccc

SEQ ID NO: 3229789 - RNA, 16 nt, Human
aguuggcaugcauccc

SEQ ID NO: 3229790 - RNA, 15 nt, Human
aguugcucaaaaaga

SEQ ID NO: 3229791 - RNA, 16 nt, Human
aguugcucaaaaagaa

SEQ ID NO: 3229792 - RNA, 16 nt, Human
uuagaagaaguguguc

SEQ ID NO: 3229793 - RNA, 13 nt, Human
uuagaauugaagg

SEQ ID NO: 3229794 - RNA, 14 nt, Human
uuagaauugaaggu

SEQ ID NO: 3229795 - RNA, 16 nt, Human
uuagaauugaagguuu

SEQ ID NO: 3229796 - RNA, 17 nt, Human
uuagaauugaagguuuu

SEQ ID NO: 3229797 - RNA, 14 nt, Human
uuagaagaagugug

SEQ ID NO: 3229798 - RNA, 15 nt, Human
uuagaagaagugugu

SEQ ID NO: 3229799 - RNA, 13 nt, Human
uuagaaccuuucu

SEQ ID NO: 3229800 - RNA, 12 nt, Human
uuagaagaaaga

SEQ ID NO: 3229801 - RNA, 15 nt, Human
uuagaacagguuuuu

SEQ ID NO: 3229802 - RNA, 11 nt, Human
uuagaaauauu

SEQ ID NO: 3229803 - RNA, 13 nt, Human
uuagaaauauuca

SEQ ID NO: 3229804 - RNA, 15 nt, Human
uuagaaauauucaca

SEQ ID NO: 3229805 - RNA, 19 nt, Human
uuagaaauauucacaucuu

SEQ ID NO: 3229806 - RNA, 11 nt, Human
uuagacagagu

SEQ ID NO: 3229807 - RNA, 18 nt, Human
uuagaauugaagguuuuu

SEQ ID NO: 3229808 - RNA, 19 nt, Human
uuagaauuuugugaaacag

SEQ ID NO: 3229809 - RNA, 20 nt, Human
auaacuuauauuguaagaaa

SEQ ID NO: 3229810 - RNA, 23 nt, Human
auaacuuauauuguaagaaauac

SEQ ID NO: 3229811 - RNA, 22 nt, Human
auaacuuauauuguaagaaaua

SEQ ID NO: 3229812 - RNA, 21 nt, Human
auaacuuauauuguaagaaau

SEQ ID NO: 3229813 - RNA, 20 nt, Human
uuacuguaaaaugcaaaaaa

SEQ ID NO: 3229814 - RNA, 16 nt, Human
uuacuguaaaaugcaa

SEQ ID NO: 3229815 - RNA, 15 nt, Human
uuacuguaaaaugca

SEQ ID NO: 3229816 - RNA, 14 nt, Human
uuacuguaaaaugc

SEQ ID NO: 3229817 - RNA, 14 nt, Human
uuagaaauauaauu

SEQ ID NO: 3229818 - RNA, 12 nt, Human
uuagaaauauaa

SEQ ID NO: 3229819 - RNA, 11 nt, Human
uuagaaauaua

SEQ ID NO: 3229820 - RNA, 14 nt, Human
uuaccuuacagaag

SEQ ID NO: 3229821 - RNA, 19 nt, Human
uuaccugugaaguguuacu

SEQ ID NO: 3229822 - RNA, 20 nt, Human
uuacauaagauaaaugugcu

SEQ ID NO: 3229823 - RNA, 16 nt, Human
uuacauacuuuaucaa

SEQ ID NO: 3229824 - RNA, 21 nt, Human
uuacauacuuuaucaaugugu

SEQ ID NO: 3229825 - RNA, 24 nt, Human
uuacauacuuuaucaaugugucuu

SEQ ID NO: 3229826 - RNA, 21 nt, Human
uuacauaauuuaguuguuucu

SEQ ID NO: 3229827 - RNA, 22 nt, Human
uuacauaauuuaguuguuucua

SEQ ID NO: 3229828 - RNA, 13 nt, Human
uuacauagucuga

SEQ ID NO: 3229829 - RNA, 18 nt, Human
uuacauagucugaaguga

SEQ ID NO: 3229830 - RNA, 19 nt, Human
uuacauauguauacaugug

SEQ ID NO: 3229831 - RNA, 23 nt, Human
uuaccuuaaaacuaggcauuugu

SEQ ID NO: 3229832 - RNA, 18 nt, Human
uuacuauucgguguguuu

SEQ ID NO: 3229833 - RNA, 15 nt, Human
uuacucaaugugugc

SEQ ID NO: 3229834 - RNA, 20 nt, Human
uuacugaccucaccuaggaa

SEQ ID NO: 3229835 - RNA, 15 nt, Human
uuacucacagccagc

SEQ ID NO: 3229836 - RNA, 12 nt, Human
auaaauauuaua

SEQ ID NO: 3229837 - RNA, 22 nt, Human
auaaauauuauauuauauauau

SEQ ID NO: 3229838 - RNA, 19 nt, Human
auaaauauucacacuugaa

SEQ ID NO: 3229839 - RNA, 18 nt, Human
auaaaucuuccaaaguuu

SEQ ID NO: 3229840 - RNA, 18 nt, Human
auaaacaccacuggauua

SEQ ID NO: 3229841 - RNA, 20 nt, Human
auaaacaccacuggauuaau

SEQ ID NO: 3229842 - RNA, 15 nt, Human
auaaacaagaaugaa

SEQ ID NO: 3229843 - RNA, 14 nt, Human
auaaaguuaaaagu

SEQ ID NO: 3229844 - RNA, 12 nt, Human
auaaaguuugau

SEQ ID NO: 3229845 - RNA, 15 nt, Human
auaaaguuugaucuu

SEQ ID NO: 3229846 - RNA, 13 nt, Human
auaaaguuugauc

SEQ ID NO: 3229847 - RNA, 22 nt, Human
auaaaguuugaucuuccucugc

SEQ ID NO: 3229848 - RNA, 15 nt, Human
auaacuaaaauguau

SEQ ID NO: 3229849 - RNA, 17 nt, Human
auaacuacauauugaau

SEQ ID NO: 3229850 - RNA, 16 nt, Human
auaacuaaaagguaug

SEQ ID NO: 3229851 - RNA, 15 nt, Human
auaaauguauugauu

SEQ ID NO: 3229852 - RNA, 15 nt, Human
auaaaugauucaaaa

SEQ ID NO: 3229853 - RNA, 20 nt, Human
auaaaugguuuggugcuuuu

SEQ ID NO: 3229854 - RNA, 21 nt, Human
auaaaugguuuggugcuuuuu

SEQ ID NO: 3229855 - RNA, 14 nt, Human
uuacaggaaguacu

SEQ ID NO: 3229856 - RNA, 14 nt, Human
uuacagcugccugc

SEQ ID NO: 3229857 - RNA, 13 nt, Human
uuacagcugccug

SEQ ID NO: 3229858 - RNA, 20 nt, Human
uuacagccugggcaauaaag

SEQ ID NO: 3229859 - RNA, 17 nt, Human
auaaaauucccuaaagc

SEQ ID NO: 3229860 - RNA, 18 nt, Human
auaaaauucccuaaagcc

SEQ ID NO: 3229861 - RNA, 23 nt, Human
auaaacacagcugcuuucuucuu

SEQ ID NO: 3229862 - RNA, 14 nt, Human
auaaacaagaauga

SEQ ID NO: 3229863 - RNA, 19 nt, Human
uuaauuuuuuugagacaga

SEQ ID NO: 3229864 - RNA, 21 nt, Human
uuaauugugugaacuuggaag

SEQ ID NO: 3229865 - RNA, 23 nt, Human
uuaauuuaaguuuugacaagcug

SEQ ID NO: 3229866 - RNA, 15 nt, Human
auaaaauuaaaaguu

SEQ ID NO: 3229867 - RNA, 12 nt, Human
auaaaauuacag

SEQ ID NO: 3229868 - RNA, 16 nt, Human
auaaaauuaaagcuga

SEQ ID NO: 3229869 - RNA, 12 nt, Human
uuacaaaaugua

SEQ ID NO: 3229870 - RNA, 15 nt, Human
uuacaaaauguaacu

SEQ ID NO: 3229871 - RNA, 13 nt, Human
uuacaaaauguaa

SEQ ID NO: 3229872 - RNA, 20 nt, Human
uuaaguuaguuccacugaga

SEQ ID NO: 3229873 - RNA, 20 nt, Human
uuaaugaaagacuguacaaa

SEQ ID NO: 3229874 - RNA, 23 nt, Human
uuaaugaaagacuguacaaagua

SEQ ID NO: 3229875 - RNA, 19 nt, Human
uuaauaaauccuacaguau

SEQ ID NO: 3229876 - RNA, 20 nt, Human
uuaauaaagcgaaaaacuca

SEQ ID NO: 3229877 - RNA, 12 nt, Human
uuaauucucuuu

SEQ ID NO: 3229878 - RNA, 22 nt, Human
uuaauucuguucugauauuaau

SEQ ID NO: 3229879 - RNA, 13 nt, Human
uuaauuuaaauga

SEQ ID NO: 3229880 - RNA, 14 nt, Human
uuaauuuaaaugau

SEQ ID NO: 3229881 - RNA, 16 nt, Human
uuaauuuaaaugauuu

SEQ ID NO: 3229882 - RNA, 23 nt, Human
uuaauuuaaaugauuuaaauuua

SEQ ID NO: 3229883 - RNA, 13 nt, Human
uuaauuuaaguuu

SEQ ID NO: 3229884 - RNA, 15 nt, Human
uuaauuuaaguuuug

SEQ ID NO: 3229885 - RNA, 16 nt, Human
uuaauuuaaguuuuga

SEQ ID NO: 3229886 - RNA, 12 nt, Human
uuaaguaaguuu

SEQ ID NO: 3229887 - RNA, 16 nt, Human
uuaagaggcagggucu

SEQ ID NO: 3229888 - RNA, 15 nt, Human
uuaagaggcaggguc

SEQ ID NO: 3229889 - RNA, 13 nt, Human
uuaagaggcaggg

SEQ ID NO: 3229890 - RNA, 17 nt, Human
uuaaguacuauguauca

SEQ ID NO: 3229891 - RNA, 12 nt, Human
uuaaguagauuu

SEQ ID NO: 3229892 - RNA, 13 nt, Human
uuaaguagauuuc

SEQ ID NO: 3229893 - RNA, 12 nt, Human
uuaagugaaauu

SEQ ID NO: 3229894 - RNA, 14 nt, Human
uuaagugaaauuua

SEQ ID NO: 3229895 - RNA, 13 nt, Human
uuaagugaaauuu

SEQ ID NO: 3229896 - RNA, 17 nt, Human
uuaagugaaaauauagc

SEQ ID NO: 3229897 - RNA, 16 nt, Human
uuaagugaggaaauca

SEQ ID NO: 3229898 - RNA, 17 nt, Human
uuaagugaggaaaucaa

SEQ ID NO: 3229899 - RNA, 15 nt, Human
uuaagugaaauuuau

SEQ ID NO: 3229900 - RNA, 19 nt, Human
uuaagugaggaaaucaaag

SEQ ID NO: 3229901 - RNA, 20 nt, Human
uuaagugaggaaaucaaagu

SEQ ID NO: 3229902 - RNA, 23 nt, Human
uuaagugaggaaaucaaagugcu

SEQ ID NO: 3229903 - RNA, 18 nt, Human
uuaaguguuggaaaaaau

SEQ ID NO: 3229904 - RNA, 20 nt, Human
uuaaguguuggaaaaaauuu

SEQ ID NO: 3229905 - RNA, 15 nt, Human
auaaaaucauaagua

SEQ ID NO: 3229906 - RNA, 12 nt, Human
auaaaaucauaa

SEQ ID NO: 3229907 - RNA, 22 nt, Human
auaaaaucauaaguauuuggaa

SEQ ID NO: 3229908 - RNA, 20 nt, Human
auaaaaucauaaguauuugg

SEQ ID NO: 3229909 - RNA, 19 nt, Human
auaaaaucauaaguauuug

SEQ ID NO: 3229910 - RNA, 16 nt, Human
auaaaaucauaaguau

SEQ ID NO: 3229911 - RNA, 16 nt, Human
auaaaauggcaacaaa

SEQ ID NO: 3229912 - RNA, 14 nt, Human
auaaaauggcaaca

SEQ ID NO: 3229913 - RNA, 19 nt, Human
auaaaauguccaguaagau

SEQ ID NO: 3229914 - RNA, 21 nt, Human
auaaaauguccaguaagauca

SEQ ID NO: 3229915 - RNA, 23 nt, Human
auaaaauguccaguaagaucacu

SEQ ID NO: 3229916 - RNA, 22 nt, Human
auaaaauggcaacaaacugcac

SEQ ID NO: 3229917 - RNA, 15 nt, Human
ugugagaugcuagaa

SEQ ID NO: 3229918 - RNA, 19 nt, Human
ugugagaugcuagaacucc

SEQ ID NO: 3229919 - RNA, 22 nt, Human
agucucaggaaaucaaauaugc

SEQ ID NO: 3229920 - RNA, 16 nt, Human
agucucaggaaaucaa

SEQ ID NO: 3229921 - RNA, 14 nt, Human
agucucuucuccac

SEQ ID NO: 3229922 - RNA, 13 nt, Human
agucucuucucca

SEQ ID NO: 3229923 - RNA, 19 nt, Human
agucucauagguuaaaaaa

SEQ ID NO: 3229924 - RNA, 20 nt, Human
agucucauagguuaaaaaaa

SEQ ID NO: 3229925 - RNA, 21 nt, Human
agucucagugcuagcuuauuu

SEQ ID NO: 3229926 - RNA, 11 nt, Human
agucuuuuaaa

SEQ ID NO: 3229927 - RNA, 14 nt, Human
agucuuuguacaga

SEQ ID NO: 3229928 - RNA, 16 nt, Human
agucuuucuucuucaa

SEQ ID NO: 3229929 - RNA, 23 nt, Human
agucuuagauguauauauuuccu

SEQ ID NO: 3229930 - RNA, 16 nt, Human
agucucuucuccacug

SEQ ID NO: 3229931 - RNA, 15 nt, Human
agucucuucuccacu

SEQ ID NO: 3229932 - RNA, 18 nt, Human
agucuuaugcuuccagaa

SEQ ID NO: 3229933 - RNA, 17 nt, Human
agucuuaugcuuccaga

SEQ ID NO: 3229934 - RNA, 16 nt, Human
agucuuaugcuuccag

SEQ ID NO: 3229935 - RNA, 17 nt, Human
agucucuucuccacugg

SEQ ID NO: 3229936 - RNA, 23 nt, Human
agucuucaugaaaugcuauguca

SEQ ID NO: 3229937 - RNA, 18 nt, Human
agucuucaugaaaugcua

SEQ ID NO: 3229938 - RNA, 17 nt, Human
agucuucaugaaaugcu

SEQ ID NO: 3229939 - RNA, 16 nt, Human
agucuucaugaaaugc

SEQ ID NO: 3229940 - RNA, 15 nt, Human
agucuucaugaaaug

SEQ ID NO: 3229941 - RNA, 14 nt, Human
agucuucaugaaau

SEQ ID NO: 3229942 - RNA, 18 nt, Human
agucuucauguucccacu

SEQ ID NO: 3229943 - RNA, 16 nt, Human
agucuuggaagcuguu

SEQ ID NO: 3229944 - RNA, 22 nt, Human
agucuuggaagcuguuuggaaa

SEQ ID NO: 3229945 - RNA, 21 nt, Human
agucuugccuauauuuuccug

SEQ ID NO: 3229946 - RNA, 18 nt, Human
agucuugccuauauuuuc

SEQ ID NO: 3229947 - RNA, 15 nt, Human
ugugaacagcggcug

SEQ ID NO: 3229948 - RNA, 19 nt, Human
ugugaaccaccacacccag

SEQ ID NO: 3229949 - RNA, 20 nt, Human
ugugaaccaccacacccagc

SEQ ID NO: 3229950 - RNA, 15 nt, Human
ugugaacuuggaagc

SEQ ID NO: 3229951 - RNA, 18 nt, Human
ugugaacuuggaagcaca

SEQ ID NO: 3229952 - RNA, 17 nt, Human
ugugaaccaccacaccc

SEQ ID NO: 3229953 - RNA, 20 nt, Human
ugugaaauuuuucauauuuu

SEQ ID NO: 3229954 - RNA, 18 nt, Human
ugugacuaggaaaaaauu

SEQ ID NO: 3229955 - RNA, 13 nt, Human
ugugaccucacgu

SEQ ID NO: 3229956 - RNA, 14 nt, Human
ugugaaauguaacu

SEQ ID NO: 3229957 - RNA, 19 nt, Human
ugugaaauuuuucauauuu

SEQ ID NO: 3229958 - RNA, 17 nt, Human
ugugaaauuuuucauau

SEQ ID NO: 3229959 - RNA, 15 nt, Human
ugugaaauuuuucau

SEQ ID NO: 3229960 - RNA, 14 nt, Human
ugugaaauaucauc

SEQ ID NO: 3229961 - RNA, 18 nt, Human
ugugaaaggaaagaggcu

SEQ ID NO: 3229962 - RNA, 21 nt, Human
ugugaaaggaaagagggaggu

SEQ ID NO: 3229963 - RNA, 15 nt, Human
ugugaaaggaaagag

SEQ ID NO: 3229964 - RNA, 16 nt, Human
agucacuaaaaggaag

SEQ ID NO: 3229965 - RNA, 21 nt, Human
agucacuaaaaggaagacagu

SEQ ID NO: 3229966 - RNA, 15 nt, Human
agugaggcucugccc

SEQ ID NO: 3229967 - RNA, 14 nt, Human
agugaggcucugcc

SEQ ID NO: 3229968 - RNA, 16 nt, Human
agugaggcucugcccu

SEQ ID NO: 3229969 - RNA, 17 nt, Human
agugaggcucugcccuu

SEQ ID NO: 3229970 - RNA, 19 nt, Human
agugaggcucugcccuugg

SEQ ID NO: 3229971 - RNA, 20 nt, Human
agugaggcucugcccuuggu

SEQ ID NO: 3229972 - RNA, 21 nt, Human
agugaggcucugcccuugguu

SEQ ID NO: 3229973 - RNA, 14 nt, Human
agugagggauuauc

SEQ ID NO: 3229974 - RNA, 21 nt, Human
agugaguugauagcacagacc

SEQ ID NO: 3229975 - RNA, 15 nt, Human
agugagucgaggaca

SEQ ID NO: 3229976 - RNA, 23 nt, Human
uguggcaguuuggcaaacucucc

SEQ ID NO: 3229977 - RNA, 21 nt, Human
uguggaguucaucuugaauug

SEQ ID NO: 3229978 - RNA, 17 nt, Human
uguggaguucaucuuga

SEQ ID NO: 3229979 - RNA, 22 nt, Human
uguggagucagccucgcaggcc

SEQ ID NO: 3229980 - RNA, 17 nt, Human
uguggagucauuucuga

SEQ ID NO: 3229981 - RNA, 18 nt, Human
uguggagucauuucugau

SEQ ID NO: 3229982 - RNA, 21 nt, Human
ugugcccccauguaagcaccc

SEQ ID NO: 3229983 - RNA, 21 nt, Human
ugugcugcccugcccaccugg

SEQ ID NO: 3229984 - RNA, 13 nt, Human
ugugcugcuucuc

SEQ ID NO: 3229985 - RNA, 18 nt, Human
ugugcugcuuugauauau

SEQ ID NO: 3229986 - RNA, 21 nt, Human
ugugcccagaauacugaugga

SEQ ID NO: 3229987 - RNA, 17 nt, Human
ugugcccagaauacuga

SEQ ID NO: 3229988 - RNA, 18 nt, Human
ugugcccagaauacugau

SEQ ID NO: 3229989 - RNA, 23 nt, Human
ugugcccacccuccacucuccuc

SEQ ID NO: 3229990 - RNA, 14 nt, Human
ugugcccacccucc

SEQ ID NO: 3229991 - RNA, 16 nt, Human
ugugccaugugccagg

SEQ ID NO: 3229992 - RNA, 12 nt, Human
ugugccaugugc

SEQ ID NO: 3229993 - RNA, 20 nt, Human
ugugccagguuuuuggucug

SEQ ID NO: 3229994 - RNA, 19 nt, Human
ugugccaggugaaggaggc

SEQ ID NO: 3229995 - RNA, 19 nt, Human
ugugccaaacaaaaugaga

SEQ ID NO: 3229996 - RNA, 19 nt, Human
ugugauggggcccugccuc

SEQ ID NO: 3229997 - RNA, 20 nt, Human
ugugauggggcccugccucc

SEQ ID NO: 3229998 - RNA, 18 nt, Human
ugugauggggcccugccu

SEQ ID NO: 3229999 - RNA, 13 nt, Human
agugaaauuuauu

SEQ ID NO: 3230000 - RNA, 18 nt, Human
agugaaauaccauuauua

SEQ ID NO: 3230001 - RNA, 16 nt, Human
agugaacaaauuuaca

SEQ ID NO: 3230002 - RNA, 16 nt, Human
ugugaucucauuguuc

SEQ ID NO: 3230003 - RNA, 15 nt, Human
ugugaucucauuguu

SEQ ID NO: 3230004 - RNA, 15 nt, Human
uguguguuucugucc

SEQ ID NO: 3230005 - RNA, 11 nt, Human
uguguuccugg

SEQ ID NO: 3230006 - RNA, 12 nt, Human
uguguuccuggc

SEQ ID NO: 3230007 - RNA, 17 nt, Human
uguguugaagagcagcu

SEQ ID NO: 3230008 - RNA, 15 nt, Human
uguguugacuuuaua

SEQ ID NO: 3230009 - RNA, 13 nt, Human
uguuaaagaugua

SEQ ID NO: 3230010 - RNA, 15 nt, Human
uguuaaauaaggccu

SEQ ID NO: 3230011 - RNA, 19 nt, Human
uguuaaagauguagcaaac

SEQ ID NO: 3230012 - RNA, 18 nt, Human
uguuaaagauguagcaaa

SEQ ID NO: 3230013 - RNA, 14 nt, Human
uguuaaagauguag

SEQ ID NO: 3230014 - RNA, 15 nt, Human
uguuacaaaauguaa

SEQ ID NO: 3230015 - RNA, 14 nt, Human
uguuacaaaaugua

SEQ ID NO: 3230016 - RNA, 22 nt, Human
uguuaauuuggaccauuuuccu

SEQ ID NO: 3230017 - RNA, 20 nt, Human
uguuaauuuguguguuuuua

SEQ ID NO: 3230018 - RNA, 15 nt, Human
uguuaauuuggacca

SEQ ID NO: 3230019 - RNA, 15 nt, Human
uguuaauuuaaguuu

SEQ ID NO: 3230020 - RNA, 16 nt, Human
uguuaauuuaaguuuu

SEQ ID NO: 3230021 - RNA, 22 nt, Human
uguuaagguggauugaggccag

SEQ ID NO: 3230022 - RNA, 17 nt, Human
uguuaagggaccaggga

SEQ ID NO: 3230023 - RNA, 15 nt, Human
uguuaaauuaauuau

SEQ ID NO: 3230024 - RNA, 12 nt, Human
ugugugugggag

SEQ ID NO: 3230025 - RNA, 20 nt, Human
ugugugugggaguguguaau

SEQ ID NO: 3230026 - RNA, 14 nt, Human
uguguguguaugug

SEQ ID NO: 3230027 - RNA, 20 nt, Human
ugugugugcuuauguaugag

SEQ ID NO: 3230028 - RNA, 12 nt, Human
ugugucuuucua

SEQ ID NO: 3230029 - RNA, 19 nt, Human
uguguguuuauugucaaag

SEQ ID NO: 3230030 - RNA, 23 nt, Human
uguguguuuauugucaaaguggu

SEQ ID NO: 3230031 - RNA, 11 nt, Human
uguguguuuau

SEQ ID NO: 3230032 - RNA, 17 nt, Human
uguguaagaaauacaga

SEQ ID NO: 3230033 - RNA, 17 nt, Human
ugugucucuugguccug

SEQ ID NO: 3230034 - RNA, 20 nt, Human
ugugucucuugguccugcug

SEQ ID NO: 3230035 - RNA, 21 nt, Human
ugugucucuugguccugcugc

SEQ ID NO: 3230036 - RNA, 20 nt, Human
ugugucuugcaauggcagcc

SEQ ID NO: 3230037 - RNA, 21 nt, Human
ugugucuugcaauggcagccu

SEQ ID NO: 3230038 - RNA, 16 nt, Human
ugugucucuugguccu

SEQ ID NO: 3230039 - RNA, 20 nt, Human
ugugggucugugugugugua

SEQ ID NO: 3230040 - RNA, 16 nt, Human
agugcugugaaaaaaa

SEQ ID NO: 3230041 - RNA, 14 nt, Human
agugcugugaaaaa

SEQ ID NO: 3230042 - RNA, 13 nt, Human
agugcugugaaaa

SEQ ID NO: 3230043 - RNA, 12 nt, Human
agugcugugaaa

SEQ ID NO: 3230044 - RNA, 20 nt, Human
uguggucacaggaaguagag

SEQ ID NO: 3230045 - RNA, 23 nt, Human
uguggguuucuaaagcugccagc

SEQ ID NO: 3230046 - RNA, 21 nt, Human
uguggguuucuaaagcugcca

SEQ ID NO: 3230047 - RNA, 14 nt, Human
ugugguguuuccug

SEQ ID NO: 3230048 - RNA, 16 nt, Human
ugugguguuuccuggc

SEQ ID NO: 3230049 - RNA, 16 nt, Human
ugugguguugaggcuu

SEQ ID NO: 3230050 - RNA, 13 nt, Human
uguggucccaccc

SEQ ID NO: 3230051 - RNA, 15 nt, Human
uguggucccacccca

SEQ ID NO: 3230052 - RNA, 14 nt, Human
uguggugucugugu

SEQ ID NO: 3230053 - RNA, 13 nt, Human
ugugguccaaaua

SEQ ID NO: 3230054 - RNA, 14 nt, Human
ugugguccaaauag

SEQ ID NO: 3230055 - RNA, 22 nt, Human
agugaguacaugcacacucaug

SEQ ID NO: 3230056 - RNA, 22 nt, Human
agugaguugauagcacagaccc

SEQ ID NO: 3230057 - RNA, 23 nt, Human
agugaguugauagcacagacccu

SEQ ID NO: 3230058 - RNA, 21 nt, Human
agugcugcagggcuuuaaaau

SEQ ID NO: 3230059 - RNA, 21 nt, Human
agugcugggauuacaggugug

SEQ ID NO: 3230060 - RNA, 20 nt, Human
agugcugggauuacaggugu

SEQ ID NO: 3230061 - RNA, 16 nt, Human
aguguacuggauuuaa

SEQ ID NO: 3230062 - RNA, 22 nt, Human
aguguaaaauauuuuaaaauaa

SEQ ID NO: 3230063 - RNA, 16 nt, Human
agugugguguuuccug

SEQ ID NO: 3230064 - RNA, 17 nt, Human
agugugcaguaucugug

SEQ ID NO: 3230065 - RNA, 19 nt, Human
agugugguguuuccuggca

SEQ ID NO: 3230066 - RNA, 17 nt, Human
agugugguguuuccugg

SEQ ID NO: 3230067 - RNA, 23 nt, Human
uguuacaaaauguaacuguuacc

SEQ ID NO: 3230068 - RNA, 21 nt, Human
uguuacaaaauguaacuguua

SEQ ID NO: 3230069 - RNA, 19 nt, Human
uguuacaaaauguaacugu

SEQ ID NO: 3230070 - RNA, 18 nt, Human
uguuacaaaauguaacug

SEQ ID NO: 3230071 - RNA, 17 nt, Human
uguuacaaaauguaacu

SEQ ID NO: 3230072 - RNA, 16 nt, Human
uguuacaaaauguaac

SEQ ID NO: 3230073 - RNA, 17 nt, Human
aguggugcgaucugggu

SEQ ID NO: 3230074 - RNA, 16 nt, Human
aguggacccugaaaug

SEQ ID NO: 3230075 - RNA, 16 nt, Human
aguggugcgaucuggg

SEQ ID NO: 3230076 - RNA, 18 nt, Human
aguggacccugaaaugug

SEQ ID NO: 3230077 - RNA, 17 nt, Human
aguggacccugaaaugu

SEQ ID NO: 3230078 - RNA, 21 nt, Human
agugguggugaacagaacaaa

SEQ ID NO: 3230079 - RNA, 14 nt, Human
uguugauuucuagu

SEQ ID NO: 3230080 - RNA, 11 nt, Human
uguugauuucu

SEQ ID NO: 3230081 - RNA, 19 nt, Human
uguugauuucuaguuauuu

SEQ ID NO: 3230082 - RNA, 18 nt, Human
uguugauuucuaguuauu

SEQ ID NO: 3230083 - RNA, 16 nt, Human
uguugauuucuaguua

SEQ ID NO: 3230084 - RNA, 15 nt, Human
uguugauuucuaguu

SEQ ID NO: 3230085 - RNA, 23 nt, Human
uguucuguuacaaaauguaacug

SEQ ID NO: 3230086 - RNA, 22 nt, Human
uguucuguuacaaaauguaacu

SEQ ID NO: 3230087 - RNA, 19 nt, Human
uguucuguuacaaaaugua

SEQ ID NO: 3230088 - RNA, 18 nt, Human
uguucuguuacaaaaugu

SEQ ID NO: 3230089 - RNA, 16 nt, Human
uguucuguuacaaaau

SEQ ID NO: 3230090 - RNA, 15 nt, Human
uguucuguuacaaaa

SEQ ID NO: 3230091 - RNA, 14 nt, Human
uguucuguuacaaa

SEQ ID NO: 3230092 - RNA, 13 nt, Human
uguucuguuacaa

SEQ ID NO: 3230093 - RNA, 18 nt, Human
uguugcccaggcaggucu

SEQ ID NO: 3230094 - RNA, 17 nt, Human
uguugcccaggcagguc

SEQ ID NO: 3230095 - RNA, 16 nt, Human
uguugcccaggcaggu

SEQ ID NO: 3230096 - RNA, 15 nt, Human
uguugcccaggcagg

SEQ ID NO: 3230097 - RNA, 12 nt, Human
uguugcccaggc

SEQ ID NO: 3230098 - RNA, 13 nt, Human
uguugcccaggca

SEQ ID NO: 3230099 - RNA, 21 nt, Human
uguugcaaugugaaaaaucug

SEQ ID NO: 3230100 - RNA, 20 nt, Human
uguugauuucuaguuauuua

SEQ ID NO: 3230101 - RNA, 20 nt, Human
agugugucuuagugugugca

SEQ ID NO: 3230102 - RNA, 20 nt, Human
uguuccacaaguuaaauaaa

SEQ ID NO: 3230103 - RNA, 19 nt, Human
uguuccacaaguuaaauaa

SEQ ID NO: 3230104 - RNA, 19 nt, Human
uguuauagguccuuuagaa

SEQ ID NO: 3230105 - RNA, 17 nt, Human
uguuauacaaccuucau

SEQ ID NO: 3230106 - RNA, 20 nt, Human
uguuauacaaccuucauuua

SEQ ID NO: 3230107 - RNA, 21 nt, Human
uguuauacaaccuucauuuaa

SEQ ID NO: 3230108 - RNA, 22 nt, Human
uguuauacaaccuucauuuaaa

SEQ ID NO: 3230109 - RNA, 21 nt, Human
uguuccgugguuaaacucgcu

SEQ ID NO: 3230110 - RNA, 18 nt, Human
uguuccauaguuaaagaa

SEQ ID NO: 3230111 - RNA, 10 nt, Human
uguuccaguu

SEQ ID NO: 3230112 - RNA, 14 nt, Human
uguuccuagugaaa

SEQ ID NO: 3230113 - RNA, 15 nt, Human
uguucugggacacag

SEQ ID NO: 3230114 - RNA, 16 nt, Human
uguucugggacacagu

SEQ ID NO: 3230115 - RNA, 17 nt, Human
uauuuguaaauuuaugu

SEQ ID NO: 3230116 - RNA, 22 nt, Human
uauuuguaaauuuaugugaugg

SEQ ID NO: 3230117 - RNA, 16 nt, Human
uauuuguaaauuuaug

SEQ ID NO: 3230118 - RNA, 12 nt, Human
uauuuguaagau

SEQ ID NO: 3230119 - RNA, 17 nt, Human
uauuuguaagauauuug

SEQ ID NO: 3230120 - RNA, 16 nt, Human
uauuuuuacauuuaaa

SEQ ID NO: 3230121 - RNA, 16 nt, Human
uauuuuuacaugcaga

SEQ ID NO: 3230122 - RNA, 14 nt, Human
uauuuuucuguuac

SEQ ID NO: 3230123 - RNA, 15 nt, Human
uauuuuucuguuacc

SEQ ID NO: 3230124 - RNA, 13 nt, Human
uauuuuucuuaaa

SEQ ID NO: 3230125 - RNA, 12 nt, Human
uauuuuuaucua

SEQ ID NO: 3230126 - RNA, 18 nt, Human
uauuuuuaucuauauaaa

SEQ ID NO: 3230127 - RNA, 13 nt, Human
ucaaaacugcacu

SEQ ID NO: 3230128 - RNA, 18 nt, Human
ucaaaacuuuaaaccugu

SEQ ID NO: 3230129 - RNA, 14 nt, Human
uauuuuugaaaaau

SEQ ID NO: 3230130 - RNA, 18 nt, Human
uauuuuugacauggaaau

SEQ ID NO: 3230131 - RNA, 18 nt, Human
ucaaaagaaagaaaauca

SEQ ID NO: 3230132 - RNA, 13 nt, Human
ucaaaaugcaaaa

SEQ ID NO: 3230133 - RNA, 19 nt, Human
ucaaaaucuagaagagucu

SEQ ID NO: 3230134 - RNA, 21 nt, Human
ucaaaauaccaugccauuuaa

SEQ ID NO: 3230135 - RNA, 13 nt, Human
ucaaaaguuuguu

SEQ ID NO: 3230136 - RNA, 14 nt, Human
ucaaaaguuuguuu

SEQ ID NO: 3230137 - RNA, 20 nt, Human
ucaaaagagcacuuuaauaa

SEQ ID NO: 3230138 - RNA, 16 nt, Human
ucaaaagagaugaaag

SEQ ID NO: 3230139 - RNA, 13 nt, Human
ucaaaauauugag

SEQ ID NO: 3230140 - RNA, 14 nt, Human
ucaaaauauugagc

SEQ ID NO: 3230141 - RNA, 20 nt, Human
ucaaaauauugagcagaauu

SEQ ID NO: 3230142 - RNA, 22 nt, Human
ucaaaauauugagcagaauuca

SEQ ID NO: 3230143 - RNA, 20 nt, Human
ucaaaauauaaaaugccaag

SEQ ID NO: 3230144 - RNA, 17 nt, Human
ucaaaauagguuuuuau

SEQ ID NO: 3230145 - RNA, 23 nt, Human
ucaaaauaccaugccauuuaaag

SEQ ID NO: 3230146 - RNA, 17 nt, Human
ucaaagccccauuaacu

SEQ ID NO: 3230147 - RNA, 21 nt, Human
ucaaagccccauuaacugcuu

SEQ ID NO: 3230148 - RNA, 20 nt, Human
ucaaagccccauuaacugcu

SEQ ID NO: 3230149 - RNA, 18 nt, Human
ucaaagccccauuaacug

SEQ ID NO: 3230150 - RNA, 15 nt, Human
ucaaagcuuuuugaa

SEQ ID NO: 3230151 - RNA, 22 nt, Human
ucaaagcaccaaaauaagaaaa

SEQ ID NO: 3230152 - RNA, 20 nt, Human
ucaaagcauggacauuuaga

SEQ ID NO: 3230153 - RNA, 22 nt, Human
ucaaagcauggacauuuagaag

SEQ ID NO: 3230154 - RNA, 17 nt, Human
ucaaacacuugugacuu

SEQ ID NO: 3230155 - RNA, 13 nt, Human
ucaaaauuacaua

SEQ ID NO: 3230156 - RNA, 15 nt, Human
ucaaaauuacauaua

SEQ ID NO: 3230157 - RNA, 14 nt, Human
ucaaaauuauagga

SEQ ID NO: 3230158 - RNA, 22 nt, Human
ucaaaauuauaggagacuugua

SEQ ID NO: 3230159 - RNA, 19 nt, Human
acaugauccugcaauucca

SEQ ID NO: 3230160 - RNA, 19 nt, Human
acaugagcaucaggccagg

SEQ ID NO: 3230161 - RNA, 17 nt, Human
acaugagcaucaggcca

SEQ ID NO: 3230162 - RNA, 18 nt, Human
acaugagcaucaggccag

SEQ ID NO: 3230163 - RNA, 17 nt, Human
acaugaucuucuuuaua

SEQ ID NO: 3230164 - RNA, 15 nt, Human
acaugaucuucuuua

SEQ ID NO: 3230165 - RNA, 18 nt, Human
ucaaauaacuaaaaggua

SEQ ID NO: 3230166 - RNA, 15 nt, Human
ucaaauaaaaauucu

SEQ ID NO: 3230167 - RNA, 19 nt, Human
ucaaauaaaaauucuagau

SEQ ID NO: 3230168 - RNA, 20 nt, Human
ucaaauaaaaauucuagauu

SEQ ID NO: 3230169 - RNA, 11 nt, Human
ucaaauaauac

SEQ ID NO: 3230170 - RNA, 21 nt, Human
ucaaauaauaccuuagaaggu

SEQ ID NO: 3230171 - RNA, 19 nt, Human
ucaaauaauaccuuagaag

SEQ ID NO: 3230172 - RNA, 22 nt, Human
ucaaauacauuuaaaacauuaa

SEQ ID NO: 3230173 - RNA, 21 nt, Human
ucaaauacauuuaaaacauua

SEQ ID NO: 3230174 - RNA, 19 nt, Human
ucaagaucuaaaucauaua

SEQ ID NO: 3230175 - RNA, 21 nt, Human
ucaagggcuuuccugugccag

SEQ ID NO: 3230176 - RNA, 19 nt, Human
ucaagggcuuuccugugcc

SEQ ID NO: 3230177 - RNA, 15 nt, Human
ucaagggcuuuccug

SEQ ID NO: 3230178 - RNA, 14 nt, Human
ucaagggcuuuccu

SEQ ID NO: 3230179 - RNA, 22 nt, Human
ucaagaugaugaugaucuuuaa

SEQ ID NO: 3230180 - RNA, 23 nt, Human
ucaagaucaaaaaggcuuauaaa

SEQ ID NO: 3230181 - RNA, 24 nt, Human
ucaagaucaaaaaggcuuauaaaa

SEQ ID NO: 3230182 - RNA, 15 nt, Human
ucaagagccuuaaaa

SEQ ID NO: 3230183 - RNA, 16 nt, Human
ucaagagccuuaaaac

SEQ ID NO: 3230184 - RNA, 17 nt, Human
ucaagagccuuaaaaca

SEQ ID NO: 3230185 - RNA, 18 nt, Human
ucaagagccuuaaaacau

SEQ ID NO: 3230186 - RNA, 19 nt, Human
ucaagagccuuaaaacauc

SEQ ID NO: 3230187 - RNA, 20 nt, Human
ucaagagccuuaaaacauca

SEQ ID NO: 3230188 - RNA, 21 nt, Human
ucaagagccuuaaaacaucau

SEQ ID NO: 3230189 - RNA, 17 nt, Human
ucaagaucaaaaaggcu

SEQ ID NO: 3230190 - RNA, 19 nt, Human
ucaagaucaaaaaggcuua

SEQ ID NO: 3230191 - RNA, 13 nt, Human
ucaagauagaaag

SEQ ID NO: 3230192 - RNA, 16 nt, Human
ucaaguauuuaagccu

SEQ ID NO: 3230193 - RNA, 16 nt, Human
ucaaguauuauaaaca

SEQ ID NO: 3230194 - RNA, 15 nt, Human
ucaaguauuauaaac

SEQ ID NO: 3230195 - RNA, 19 nt, Human
ucaaguagacuacuguuca

SEQ ID NO: 3230196 - RNA, 18 nt, Human
ucaaguagacuacuguuc

SEQ ID NO: 3230197 - RNA, 21 nt, Human
ucaaguagacuacuguucagc

SEQ ID NO: 3230198 - RNA, 12 nt, Human
ucaaguauuacu

SEQ ID NO: 3230199 - RNA, 14 nt, Human
ucaaguauuauaaa

SEQ ID NO: 3230200 - RNA, 17 nt, Human
ucaaguagacuacuguu

SEQ ID NO: 3230201 - RNA, 19 nt, Human
ucaagaauagcauuguaaa

SEQ ID NO: 3230202 - RNA, 13 nt, Human
ucaagaccaaaug

SEQ ID NO: 3230203 - RNA, 22 nt, Human
ucaagaaguucuuugauucugu

SEQ ID NO: 3230204 - RNA, 21 nt, Human
ucaagaccaaauggaaacaga

SEQ ID NO: 3230205 - RNA, 19 nt, Human
ucaagaccaaauggaaaca

SEQ ID NO: 3230206 - RNA, 11 nt, Human
ucaagagccuu

SEQ ID NO: 3230207 - RNA, 17 nt, Human
ucaagacugaauuccaa

SEQ ID NO: 3230208 - RNA, 16 nt, Human
ucaagacugaauucca

SEQ ID NO: 3230209 - RNA, 16 nt, Human
ucaagaacuuguuuaa

SEQ ID NO: 3230210 - RNA, 15 nt, Human
ucaagaacuuguuua

SEQ ID NO: 3230211 - RNA, 14 nt, Human
ucaagaacuuguuu

SEQ ID NO: 3230212 - RNA, 21 nt, Human
ucaagaaaugaagagcuguug

SEQ ID NO: 3230213 - RNA, 18 nt, Human
ucaagaaaugaagagcug

SEQ ID NO: 3230214 - RNA, 22 nt, Human
ucaagaacacagcccugcuucu

SEQ ID NO: 3230215 - RNA, 14 nt, Human
ucaagaaguucuuu

SEQ ID NO: 3230216 - RNA, 10 nt, Human
ucaagaaaug

SEQ ID NO: 3230217 - RNA, 16 nt, Human
ucaagaaaugaagagc

SEQ ID NO: 3230218 - RNA, 15 nt, Human
ucaagaaaugaagag

SEQ ID NO: 3230219 - RNA, 14 nt, Human
ucaagaaaugaaga

SEQ ID NO: 3230220 - RNA, 14 nt, Human
ucaacaguguuuuc

SEQ ID NO: 3230221 - RNA, 17 nt, Human
ucaacauaccuuggcca

SEQ ID NO: 3230222 - RNA, 21 nt, Human
ucaacauggcuacuugcuuug

SEQ ID NO: 3230223 - RNA, 14 nt, Human
ucaacaugucuccu

SEQ ID NO: 3230224 - RNA, 22 nt, Human
ucaacauggcuacuugcuuuga

SEQ ID NO: 3230225 - RNA, 19 nt, Human
acaugucuccuacugagga

SEQ ID NO: 3230226 - RNA, 13 nt, Human
acauuaacaggca

SEQ ID NO: 3230227 - RNA, 21 nt, Human
acauguccaagaagcccagga

SEQ ID NO: 3230228 - RNA, 19 nt, Human
acauguccaagaagcccag

SEQ ID NO: 3230229 - RNA, 22 nt, Human
acauuagcaguuugcuuuguau

SEQ ID NO: 3230230 - RNA, 18 nt, Human
acauuagcaguuugcuuu

SEQ ID NO: 3230231 - RNA, 23 nt, Human
acauuaguacuuuauagaagaau

SEQ ID NO: 3230232 - RNA, 22 nt, Human
acauuaguacuuuauagaagaa

SEQ ID NO: 3230233 - RNA, 16 nt, Human
acauuaguacuuuaua

SEQ ID NO: 3230234 - RNA, 19 nt, Human
acauuaguacuuuauagaa

SEQ ID NO: 3230235 - RNA, 18 nt, Human
acauuaguacuuuauaga

SEQ ID NO: 3230236 - RNA, 20 nt, Human
acauucuggggaaacaacau

SEQ ID NO: 3230237 - RNA, 23 nt, Human
acauucuggggaaacaacauuua

SEQ ID NO: 3230238 - RNA, 16 nt, Human
ucaacagguuuuccug

SEQ ID NO: 3230239 - RNA, 15 nt, Human
ucaacagcaagugug

SEQ ID NO: 3230240 - RNA, 16 nt, Human
ucaacagcaaguguga

SEQ ID NO: 3230241 - RNA, 22 nt, Human
ucaacagcaagugugaauacug

SEQ ID NO: 3230242 - RNA, 20 nt, Human
acauauuagcgacaacagau

SEQ ID NO: 3230243 - RNA, 16 nt, Human
acauauguauacaugu

SEQ ID NO: 3230244 - RNA, 18 nt, Human
acauauguauacaugugc

SEQ ID NO: 3230245 - RNA, 17 nt, Human
acauauguauacaugug

SEQ ID NO: 3230246 - RNA, 14 nt, Human
acauagaauuaaca

SEQ ID NO: 3230247 - RNA, 18 nt, Human
acauagaauuaacacaug

SEQ ID NO: 3230248 - RNA, 16 nt, Human
acauagccaaaaugug

SEQ ID NO: 3230249 - RNA, 19 nt, Human
acauagccaaaaugugagu

SEQ ID NO: 3230250 - RNA, 15 nt, Human
acauauacaacacca

SEQ ID NO: 3230251 - RNA, 16 nt, Human
acauauaaauugucuu

SEQ ID NO: 3230252 - RNA, 22 nt, Human
acauauaaauugucuuaaugga

SEQ ID NO: 3230253 - RNA, 17 nt, Human
acauauaaauugucuua

SEQ ID NO: 3230254 - RNA, 17 nt, Human
acauaguucguuuaccu

SEQ ID NO: 3230255 - RNA, 16 nt, Human
acauaggguucccacg

SEQ ID NO: 3230256 - RNA, 18 nt, Human
acauagucugaagugaag

SEQ ID NO: 3230257 - RNA, 21 nt, Human
acauaggaaguuaaaagcaca

SEQ ID NO: 3230258 - RNA, 21 nt, Human
acauagugaugguuccccugu

SEQ ID NO: 3230259 - RNA, 16 nt, Human
acauagugaugguucc

SEQ ID NO: 3230260 - RNA, 13 nt, Human
acaucaacagaua

SEQ ID NO: 3230261 - RNA, 23 nt, Human
acaucaaauaauugaagagacaa

SEQ ID NO: 3230262 - RNA, 18 nt, Human
acaucaacaucuugguca

SEQ ID NO: 3230263 - RNA, 16 nt, Human
acaucaacaucuuggu

SEQ ID NO: 3230264 - RNA, 20 nt, Human
acaucagaaauaauaaaaaa

SEQ ID NO: 3230265 - RNA, 23 nt, Human
acaucucccuuuuccaugacugu

SEQ ID NO: 3230266 - RNA, 24 nt, Human
acaucucaucaugucuauugucca

SEQ ID NO: 3230267 - RNA, 12 nt, Human
acaucucagaga

SEQ ID NO: 3230268 - RNA, 11 nt, Human
acaucucagag

SEQ ID NO: 3230269 - RNA, 12 nt, Human
acaucacuggca

SEQ ID NO: 3230270 - RNA, 23 nt, Human
acaucacuggcauggugguuggg

SEQ ID NO: 3230271 - RNA, 14 nt, Human
acaucacuggcaug

SEQ ID NO: 3230272 - RNA, 19 nt, Human
acaucuugcucugcugaca

SEQ ID NO: 3230273 - RNA, 18 nt, Human
acaucuugcucugcugac

SEQ ID NO: 3230274 - RNA, 21 nt, Human
acaucuugcucugcugacaga

SEQ ID NO: 3230275 - RNA, 13 nt, Human
acaucuugcucug

SEQ ID NO: 3230276 - RNA, 15 nt, Human
acaucuccuuagaaa

SEQ ID NO: 3230277 - RNA, 11 nt, Human
acaucuccuua

SEQ ID NO: 3230278 - RNA, 15 nt, Human
acaucucugacuuuc

SEQ ID NO: 3230279 - RNA, 16 nt, Human
acaucucugacuuucu

SEQ ID NO: 3230280 - RNA, 15 nt, Human
acaucucuauucccc

SEQ ID NO: 3230281 - RNA, 22 nt, Human
uauuucccugaaggaaccaaag

SEQ ID NO: 3230282 - RNA, 22 nt, Human
uauuucccucaccuuucccauc

SEQ ID NO: 3230283 - RNA, 20 nt, Human
uauuucccccuuucuuccuc

SEQ ID NO: 3230284 - RNA, 15 nt, Human
uauuucccccuuucu

SEQ ID NO: 3230285 - RNA, 23 nt, Human
uauuuccuauauuguuuucagug

SEQ ID NO: 3230286 - RNA, 16 nt, Human
uauuucccuuuagcug

SEQ ID NO: 3230287 - RNA, 13 nt, Human
uauuucccuuuag

SEQ ID NO: 3230288 - RNA, 19 nt, Human
uauuuccuauaccauuucc

SEQ ID NO: 3230289 - RNA, 17 nt, Human
uauuuccuauaccauuu

SEQ ID NO: 3230290 - RNA, 20 nt, Human
uauuucuagacacuuuuucu

SEQ ID NO: 3230291 - RNA, 17 nt, Human
uauuucuagcuuuuuaa

SEQ ID NO: 3230292 - RNA, 13 nt, Human
uauuucauuucuu

SEQ ID NO: 3230293 - RNA, 15 nt, Human
uaugaaauauaugug

SEQ ID NO: 3230294 - RNA, 16 nt, Human
uaugaaauauauguga

SEQ ID NO: 3230295 - RNA, 14 nt, Human
uaugaagaaaauac

SEQ ID NO: 3230296 - RNA, 16 nt, Human
uaugaagaaaauacuu

SEQ ID NO: 3230297 - RNA, 15 nt, Human
uaugaagaaaauacu

SEQ ID NO: 3230298 - RNA, 22 nt, Human
uaugaagaaaauacuuaaaugu

SEQ ID NO: 3230299 - RNA, 20 nt, Human
uaugaagaaaauacuuaaau

SEQ ID NO: 3230300 - RNA, 11 nt, Human
acaguuguuug

SEQ ID NO: 3230301 - RNA, 17 nt, Human
acaguugugcaggaggu

SEQ ID NO: 3230302 - RNA, 12 nt, Human
acaguugugcag

SEQ ID NO: 3230303 - RNA, 22 nt, Human
acaguuguuugaugcauuaaaa

SEQ ID NO: 3230304 - RNA, 15 nt, Human
acaguuguuugaugc

SEQ ID NO: 3230305 - RNA, 13 nt, Human
acaguuguuugau

SEQ ID NO: 3230306 - RNA, 12 nt, Human
acaguuguuuga

SEQ ID NO: 3230307 - RNA, 17 nt, Human
acaguuuaugcagugcu

SEQ ID NO: 3230308 - RNA, 19 nt, Human
acaguuuaugcagugcugc

SEQ ID NO: 3230309 - RNA, 21 nt, Human
acaguuuaugcagugcugcuu

SEQ ID NO: 3230310 - RNA, 15 nt, Human
acaguugaaaaacag

SEQ ID NO: 3230311 - RNA, 16 nt, Human
acaguugaaaaacagc

SEQ ID NO: 3230312 - RNA, 20 nt, Human
acaguugaaaaacagcugag

SEQ ID NO: 3230313 - RNA, 14 nt, Human
acaguuuucuucau

SEQ ID NO: 3230314 - RNA, 21 nt, Human
acaguuuucugagaaagacua

SEQ ID NO: 3230315 - RNA, 20 nt, Human
acaguuuucugagaaagacu

SEQ ID NO: 3230316 - RNA, 19 nt, Human
acaguuuucugagaaagac

SEQ ID NO: 3230317 - RNA, 18 nt, Human
acaguuuucugagaaaga

SEQ ID NO: 3230318 - RNA, 15 nt, Human
acaguuuucugagaa

SEQ ID NO: 3230319 - RNA, 17 nt, Human
acaguuuucugagaaag

SEQ ID NO: 3230320 - RNA, 16 nt, Human
acaguuuucugagaaa

SEQ ID NO: 3230321 - RNA, 13 nt, Human
acauacucccauc

SEQ ID NO: 3230322 - RNA, 15 nt, Human
acauacguaaaaauc

SEQ ID NO: 3230323 - RNA, 16 nt, Human
acauacgugugcaugu

SEQ ID NO: 3230324 - RNA, 15 nt, Human
acauacgugugcaug

SEQ ID NO: 3230325 - RNA, 22 nt, Human
acauacgugugcaugugucuuu

SEQ ID NO: 3230326 - RNA, 21 nt, Human
acauacgugugcaugugucuu

SEQ ID NO: 3230327 - RNA, 14 nt, Human
acauacucugcuua

SEQ ID NO: 3230328 - RNA, 17 nt, Human
acauacucccaucugug

SEQ ID NO: 3230329 - RNA, 15 nt, Human
acauacuuuaucaau

SEQ ID NO: 3230330 - RNA, 13 nt, Human
ucacucuuggagc

SEQ ID NO: 3230331 - RNA, 23 nt, Human
ucacucuuauugcccacgcugga

SEQ ID NO: 3230332 - RNA, 21 nt, Human
ucacucuuauugcccacgcug

SEQ ID NO: 3230333 - RNA, 20 nt, Human
accauuggaaauuucacguc

SEQ ID NO: 3230334 - RNA, 19 nt, Human
accauuggaaauuucacgu

SEQ ID NO: 3230335 - RNA, 18 nt, Human
accauuggaaauuucacg

SEQ ID NO: 3230336 - RNA, 15 nt, Human
accauuggaaauuuc

SEQ ID NO: 3230337 - RNA, 14 nt, Human
accauuggaaauuu

SEQ ID NO: 3230338 - RNA, 23 nt, Human
accauugagaccgugaagauacu

SEQ ID NO: 3230339 - RNA, 16 nt, Human
accauugcaacaaaau

SEQ ID NO: 3230340 - RNA, 13 nt, Human
accauuggaaauu

SEQ ID NO: 3230341 - RNA, 18 nt, Human
accauugcaacaaaauac

SEQ ID NO: 3230342 - RNA, 22 nt, Human
accauugagaccgugaagauac

SEQ ID NO: 3230343 - RNA, 15 nt, Human
accauugcaacaaaa

SEQ ID NO: 3230344 - RNA, 19 nt, Human
accauuaaaauaugcacua

SEQ ID NO: 3230345 - RNA, 14 nt, Human
accauuaaaauaug

SEQ ID NO: 3230346 - RNA, 20 nt, Human
accauuaaaauaugcacuaa

SEQ ID NO: 3230347 - RNA, 13 nt, Human
accauuaaaguca

SEQ ID NO: 3230348 - RNA, 15 nt, Human
accauuaaagucaga

SEQ ID NO: 3230349 - RNA, 17 nt, Human
accauuauuaucaagua

SEQ ID NO: 3230350 - RNA, 14 nt, Human
accauuaccaaaau

SEQ ID NO: 3230351 - RNA, 15 nt, Human
accauuuguuaauau

SEQ ID NO: 3230352 - RNA, 11 nt, Human
acccacugcuc

SEQ ID NO: 3230353 - RNA, 10 nt, Human
acccacugcu

SEQ ID NO: 3230354 - RNA, 15 nt, Human
accauuuuccugcau

SEQ ID NO: 3230355 - RNA, 14 nt, Human
accauuuuccugca

SEQ ID NO: 3230356 - RNA, 12 nt, Human
accauuuuccug

SEQ ID NO: 3230357 - RNA, 11 nt, Human
acccacugcuu

SEQ ID NO: 3230358 - RNA, 15 nt, Human
acccacugcucuggu

SEQ ID NO: 3230359 - RNA, 14 nt, Human
acccacugcucugg

SEQ ID NO: 3230360 - RNA, 13 nt, Human
acccacugcucug

SEQ ID NO: 3230361 - RNA, 17 nt, Human
ucagaagguuguuuuau

SEQ ID NO: 3230362 - RNA, 19 nt, Human
ucagaaggucuguuuugag

SEQ ID NO: 3230363 - RNA, 14 nt, Human
ucagaaggucuguu

SEQ ID NO: 3230364 - RNA, 15 nt, Human
ucagaaguccagagu

SEQ ID NO: 3230365 - RNA, 19 nt, Human
ucagaaguuucucagcucc

SEQ ID NO: 3230366 - RNA, 17 nt, Human
ucagaaguuuaaauauu

SEQ ID NO: 3230367 - RNA, 15 nt, Human
ucagaaguuuaaaua

SEQ ID NO: 3230368 - RNA, 19 nt, Human
ucagaaguuucugccgcag

SEQ ID NO: 3230369 - RNA, 22 nt, Human
ucagaaguuucugccgcagccc

SEQ ID NO: 3230370 - RNA, 14 nt, Human
ucagaagacacuga

SEQ ID NO: 3230371 - RNA, 13 nt, Human
ucagaagauaguc

SEQ ID NO: 3230372 - RNA, 20 nt, Human
ucagaagauagucuuggaag

SEQ ID NO: 3230373 - RNA, 18 nt, Human
ucagagccugcaguuauu

SEQ ID NO: 3230374 - RNA, 15 nt, Human
ucagagccugcaguu

SEQ ID NO: 3230375 - RNA, 14 nt, Human
ucagagccugcagu

SEQ ID NO: 3230376 - RNA, 13 nt, Human
ucagagccugcag

SEQ ID NO: 3230377 - RNA, 16 nt, Human
ucagagagggugggag

SEQ ID NO: 3230378 - RNA, 21 nt, Human
ucagagagggugggagugggc

SEQ ID NO: 3230379 - RNA, 23 nt, Human
ucagagagggugggagugggccc

SEQ ID NO: 3230380 - RNA, 12 nt, Human
ucagagccugca

SEQ ID NO: 3230381 - RNA, 17 nt, Human
ucagagacuccugcagg

SEQ ID NO: 3230382 - RNA, 20 nt, Human
ucagagacuccugcaggcag

SEQ ID NO: 3230383 - RNA, 21 nt, Human
ucagagacuccugcaggcagc

SEQ ID NO: 3230384 - RNA, 16 nt, Human
ucagagacuccugcag

SEQ ID NO: 3230385 - RNA, 19 nt, Human
ucagaaucucaaauaacua

SEQ ID NO: 3230386 - RNA, 18 nt, Human
ucagaaucucaaauaacu

SEQ ID NO: 3230387 - RNA, 22 nt, Human
ucagaauggaagagagaaagca

SEQ ID NO: 3230388 - RNA, 23 nt, Human
ucagaaguuuaaauauuaagcau

SEQ ID NO: 3230389 - RNA, 22 nt, Human
accccacuuagccuuucuuuuc

SEQ ID NO: 3230390 - RNA, 24 nt, Human
acccagcgagcccugguggcagug

SEQ ID NO: 3230391 - RNA, 12 nt, Human
accccaccugcg

SEQ ID NO: 3230392 - RNA, 11 nt, Human
accccaccugc

SEQ ID NO: 3230393 - RNA, 22 nt, Human
ucagcccaaaccaccagaagcc

SEQ ID NO: 3230394 - RNA, 21 nt, Human
ucagcccaaaccaccagaagc

SEQ ID NO: 3230395 - RNA, 21 nt, Human
ucagcccaaucccugaucccu

SEQ ID NO: 3230396 - RNA, 19 nt, Human
ucagcccaaucccugaucc

SEQ ID NO: 3230397 - RNA, 23 nt, Human
ucagccguguaaccauggaccca

SEQ ID NO: 3230398 - RNA, 13 nt, Human
ucagccuaagaga

SEQ ID NO: 3230399 - RNA, 23 nt, Human
acccagcgagcccugguggcagu

SEQ ID NO: 3230400 - RNA, 19 nt, Human
acccagcgagcccuggugg

SEQ ID NO: 3230401 - RNA, 23 nt, Human
ucagcauucucacuccuaccugg

SEQ ID NO: 3230402 - RNA, 22 nt, Human
ucagccaagaauucuuaaauau

SEQ ID NO: 3230403 - RNA, 17 nt, Human
ucagccaucaacuaaag

SEQ ID NO: 3230404 - RNA, 15 nt, Human
ucaggaaaagguuga

SEQ ID NO: 3230405 - RNA, 19 nt, Human
ucaggaaaagguugaauaa

SEQ ID NO: 3230406 - RNA, 17 nt, Human
ucagcuugcacauuugg

SEQ ID NO: 3230407 - RNA, 16 nt, Human
ucagcuugcacauuug

SEQ ID NO: 3230408 - RNA, 21 nt, Human
ucaggaaaucaaauaugcaaa

SEQ ID NO: 3230409 - RNA, 20 nt, Human
ucaggaaaucaaauaugcaa

SEQ ID NO: 3230410 - RNA, 12 nt, Human
ucagcucagagc

SEQ ID NO: 3230411 - RNA, 14 nt, Human
ucagcggggacagc

SEQ ID NO: 3230412 - RNA, 16 nt, Human
ucagcuaggaacaaau

SEQ ID NO: 3230413 - RNA, 23 nt, Human
ucagcuaggaacaaaucuuccug

SEQ ID NO: 3230414 - RNA, 21 nt, Human
ucagcuaggaacaaaucuucc

SEQ ID NO: 3230415 - RNA, 20 nt, Human
ucagcuaggaacaaaucuuc

SEQ ID NO: 3230416 - RNA, 19 nt, Human
ucagcuaggaacaaaucuu

SEQ ID NO: 3230417 - RNA, 13 nt, Human
ucagcucacugca

SEQ ID NO: 3230418 - RNA, 16 nt, Human
ucagcucacugcaacc

SEQ ID NO: 3230419 - RNA, 12 nt, Human
acccccacccaa

SEQ ID NO: 3230420 - RNA, 13 nt, Human
accccccccccac

SEQ ID NO: 3230421 - RNA, 22 nt, Human
acccccccagcuucacuucuga

SEQ ID NO: 3230422 - RNA, 12 nt, Human
acccccccagcu

SEQ ID NO: 3230423 - RNA, 17 nt, Human
accccuguaggccucag

SEQ ID NO: 3230424 - RNA, 16 nt, Human
accccuguaggccuca

SEQ ID NO: 3230425 - RNA, 15 nt, Human
accccuguaggccuc

SEQ ID NO: 3230426 - RNA, 15 nt, Human
accccuucgcuccug

SEQ ID NO: 3230427 - RNA, 14 nt, Human
accccuucgcuccu

SEQ ID NO: 3230428 - RNA, 22 nt, Human
accccuuccugggcacacgcug

SEQ ID NO: 3230429 - RNA, 15 nt, Human
accccuuccugggca

SEQ ID NO: 3230430 - RNA, 16 nt, Human
accccuucgcuccugu

SEQ ID NO: 3230431 - RNA, 23 nt, Human
accccuuccugggcacacgcugc

SEQ ID NO: 3230432 - RNA, 13 nt, Human
ucacaccugcaga

SEQ ID NO: 3230433 - RNA, 22 nt, Human
ucacacgucuggcuucacagau

SEQ ID NO: 3230434 - RNA, 19 nt, Human
ucacaaauuucucuguucc

SEQ ID NO: 3230435 - RNA, 18 nt, Human
ucacaaauuucucuguuc

SEQ ID NO: 3230436 - RNA, 14 nt, Human
ucacaaauuucucu

SEQ ID NO: 3230437 - RNA, 16 nt, Human
ucacaacaaccugguc

SEQ ID NO: 3230438 - RNA, 20 nt, Human
ucacaaaugacuuuauuauu

SEQ ID NO: 3230439 - RNA, 18 nt, Human
ucacaaaugacuuuauua

SEQ ID NO: 3230440 - RNA, 19 nt, Human
ucacaaaugacuuuauuau

SEQ ID NO: 3230441 - RNA, 11 nt, Human
ucacaaaugac

SEQ ID NO: 3230442 - RNA, 23 nt, Human
ucacaaauauuaaaaagucuuuu

SEQ ID NO: 3230443 - RNA, 12 nt, Human
ucacaaaugacu

SEQ ID NO: 3230444 - RNA, 13 nt, Human
ucacaaaugacuu

SEQ ID NO: 3230445 - RNA, 14 nt, Human
ucacaaaugacuuu

SEQ ID NO: 3230446 - RNA, 15 nt, Human
ucacaaaugacuuua

SEQ ID NO: 3230447 - RNA, 16 nt, Human
ucacacucuaacugua

SEQ ID NO: 3230448 - RNA, 18 nt, Human
ucacacucuaacuguaua

SEQ ID NO: 3230449 - RNA, 21 nt, Human
ucacacucuaacuguauauuu

SEQ ID NO: 3230450 - RNA, 15 nt, Human
ucacaguucucuccu

SEQ ID NO: 3230451 - RNA, 17 nt, Human
ucacaguuauuacauac

SEQ ID NO: 3230452 - RNA, 15 nt, Human
ucacauaucugucau

SEQ ID NO: 3230453 - RNA, 12 nt, Human
ucacauaucugu

SEQ ID NO: 3230454 - RNA, 16 nt, Human
ucacauccuugacuuu

SEQ ID NO: 3230455 - RNA, 21 nt, Human
ucacauccuugacuuuuuaga

SEQ ID NO: 3230456 - RNA, 19 nt, Human
ucacauccuugacuuuuua

SEQ ID NO: 3230457 - RNA, 15 nt, Human
ucaccccggccaccu

SEQ ID NO: 3230458 - RNA, 14 nt, Human
ucaccccagcccca

SEQ ID NO: 3230459 - RNA, 20 nt, Human
ucaccccagccccaaaacuc

SEQ ID NO: 3230460 - RNA, 13 nt, Human
ucaccccagcccc

SEQ ID NO: 3230461 - RNA, 19 nt, Human
ucaccagugaccuggaagg

SEQ ID NO: 3230462 - RNA, 21 nt, Human
ucaccaguacauucucaguuu

SEQ ID NO: 3230463 - RNA, 15 nt, Human
ucaccaguacauucu

SEQ ID NO: 3230464 - RNA, 19 nt, Human
ucaccaguacauucucagu

SEQ ID NO: 3230465 - RNA, 17 nt, Human
ucaccaguacauucuca

SEQ ID NO: 3230466 - RNA, 22 nt, Human
accacacguaaugaaacuugga

SEQ ID NO: 3230467 - RNA, 14 nt, Human
accacacuccagcu

SEQ ID NO: 3230468 - RNA, 14 nt, Human
accacaaaauauac

SEQ ID NO: 3230469 - RNA, 15 nt, Human
accaauuuuaacuua

SEQ ID NO: 3230470 - RNA, 22 nt, Human
accaauuuuuugugugugaagc

SEQ ID NO: 3230471 - RNA, 21 nt, Human
accaauuuuuugugugugaag

SEQ ID NO: 3230472 - RNA, 23 nt, Human
ucaauuuuucuuauuucauuucu

SEQ ID NO: 3230473 - RNA, 20 nt, Human
ucaauuuuucuuauuucauu

SEQ ID NO: 3230474 - RNA, 15 nt, Human
ucacaaauauuaaaa

SEQ ID NO: 3230475 - RNA, 14 nt, Human
ucacaaauauuaaa

SEQ ID NO: 3230476 - RNA, 21 nt, Human
ucacaaauauuaaaaagucuu

SEQ ID NO: 3230477 - RNA, 20 nt, Human
ucacaaauauuaaaaagucu

SEQ ID NO: 3230478 - RNA, 18 nt, Human
ucacaaauauuaaaaagu

SEQ ID NO: 3230479 - RNA, 17 nt, Human
ucacaaauauuaaaaag

SEQ ID NO: 3230480 - RNA, 20 nt, Human
ucaauuuuugguugaauaaa

SEQ ID NO: 3230481 - RNA, 15 nt, Human
accaauguucucucu

SEQ ID NO: 3230482 - RNA, 17 nt, Human
accaacauacucccauc

SEQ ID NO: 3230483 - RNA, 19 nt, Human
accaacauacucccaucug

SEQ ID NO: 3230484 - RNA, 21 nt, Human
accaacauacucccaucugug

SEQ ID NO: 3230485 - RNA, 22 nt, Human
accaacauacucccaucuguga

SEQ ID NO: 3230486 - RNA, 23 nt, Human
ucaagugaaaaaggaggaagaga

SEQ ID NO: 3230487 - RNA, 17 nt, Human
ucaagugauucucaugc

SEQ ID NO: 3230488 - RNA, 15 nt, Human
ucaagugaaaaagga

SEQ ID NO: 3230489 - RNA, 22 nt, Human
ucaaguauuuaagccuaaagau

SEQ ID NO: 3230490 - RNA, 19 nt, Human
ucacuauguugcccaggca

SEQ ID NO: 3230491 - RNA, 17 nt, Human
ucacuauguugcccagg

SEQ ID NO: 3230492 - RNA, 18 nt, Human
ucacuauguugcccaggc

SEQ ID NO: 3230493 - RNA, 15 nt, Human
ucaccucucccuugg

SEQ ID NO: 3230494 - RNA, 13 nt, Human
ucaccugccccuc

SEQ ID NO: 3230495 - RNA, 15 nt, Human
ucaccugccccucaa

SEQ ID NO: 3230496 - RNA, 21 nt, Human
accagccuccaugcugccucc

SEQ ID NO: 3230497 - RNA, 20 nt, Human
accagccuccaugcugccuc

SEQ ID NO: 3230498 - RNA, 19 nt, Human
accagccuccaugcugccu

SEQ ID NO: 3230499 - RNA, 14 nt, Human
accagccuccaugc

SEQ ID NO: 3230500 - RNA, 18 nt, Human
accagacuuuuuuaaaca

SEQ ID NO: 3230501 - RNA, 13 nt, Human
accagaagcccag

SEQ ID NO: 3230502 - RNA, 19 nt, Human
accagaaccagucuuucaa

SEQ ID NO: 3230503 - RNA, 14 nt, Human
accagaaccaaacc

SEQ ID NO: 3230504 - RNA, 16 nt, Human
accagaagcccagaau

SEQ ID NO: 3230505 - RNA, 14 nt, Human
accagaagcccaga

SEQ ID NO: 3230506 - RNA, 13 nt, Human
accagacacaaac

SEQ ID NO: 3230507 - RNA, 16 nt, Human
accagacaagcuguug

SEQ ID NO: 3230508 - RNA, 14 nt, Human
accagacaagcugu

SEQ ID NO: 3230509 - RNA, 19 nt, Human
accacuuguagauuugauu

SEQ ID NO: 3230510 - RNA, 13 nt, Human
accacuugcugca

SEQ ID NO: 3230511 - RNA, 13 nt, Human
accacuuguagau

SEQ ID NO: 3230512 - RNA, 14 nt, Human
accacuuguagauu

SEQ ID NO: 3230513 - RNA, 16 nt, Human
accacuuguagauuug

SEQ ID NO: 3230514 - RNA, 16 nt, Human
accagagcccaccuug

SEQ ID NO: 3230515 - RNA, 14 nt, Human
accagagcccaccu

SEQ ID NO: 3230516 - RNA, 12 nt, Human
accagagcccac

SEQ ID NO: 3230517 - RNA, 11 nt, Human
accagacaggu

SEQ ID NO: 3230518 - RNA, 14 nt, Human
accagacaccuuga

SEQ ID NO: 3230519 - RNA, 17 nt, Human
accacugcacuccagcc

SEQ ID NO: 3230520 - RNA, 20 nt, Human
accacugcacuccagccugg

SEQ ID NO: 3230521 - RNA, 17 nt, Human
ucaccccggccaccugc

SEQ ID NO: 3230522 - RNA, 18 nt, Human
ucaccccggccaccugcg

SEQ ID NO: 3230523 - RNA, 21 nt, Human
accacugcacuccagccuggg

SEQ ID NO: 3230524 - RNA, 15 nt, Human
accacugcucugaug

SEQ ID NO: 3230525 - RNA, 17 nt, Human
accacugcucugaugaa

SEQ ID NO: 3230526 - RNA, 23 nt, Human
accacugcucugaugaagaggag

SEQ ID NO: 3230527 - RNA, 18 nt, Human
uccacuggggauugggcc

SEQ ID NO: 3230528 - RNA, 14 nt, Human
uccagacccggcug

SEQ ID NO: 3230529 - RNA, 20 nt, Human
uccagaauuucccaaagcag

SEQ ID NO: 3230530 - RNA, 22 nt, Human
uccagaauuucccaaagcagug

SEQ ID NO: 3230531 - RNA, 16 nt, Human
uccagaauuucccaaa

SEQ ID NO: 3230532 - RNA, 22 nt, Human
uccacugccuucgauacaccgg

SEQ ID NO: 3230533 - RNA, 15 nt, Human
uccacugccuucgau

SEQ ID NO: 3230534 - RNA, 13 nt, Human
uccacugccuucg

SEQ ID NO: 3230535 - RNA, 18 nt, Human
uccagacccggcugcgug

SEQ ID NO: 3230536 - RNA, 15 nt, Human
uccagacccggcugc

SEQ ID NO: 3230537 - RNA, 19 nt, Human
uccagacccggcugcgugg

SEQ ID NO: 3230538 - RNA, 18 nt, Human
uccacuccuccuagccac

SEQ ID NO: 3230539 - RNA, 15 nt, Human
uccacuccuccuagc

SEQ ID NO: 3230540 - RNA, 19 nt, Human
uccaccuucccaugcccug

SEQ ID NO: 3230541 - RNA, 12 nt, Human
uccaccuucuca

SEQ ID NO: 3230542 - RNA, 14 nt, Human
uccaccuucucaca

SEQ ID NO: 3230543 - RNA, 15 nt, Human
uccaccuucucacau

SEQ ID NO: 3230544 - RNA, 18 nt, Human
uccaccuucccaugcccu

SEQ ID NO: 3230545 - RNA, 16 nt, Human
uccaccuucccaugcc

SEQ ID NO: 3230546 - RNA, 15 nt, Human
uccaccuucccaugc

SEQ ID NO: 3230547 - RNA, 17 nt, Human
accuuuugagugccuua

SEQ ID NO: 3230548 - RNA, 20 nt, Human
accuuuugagugccuuacac

SEQ ID NO: 3230549 - RNA, 14 nt, Human
accuuuugagugcc

SEQ ID NO: 3230550 - RNA, 20 nt, Human
accuucaagcugcuuuuugu

SEQ ID NO: 3230551 - RNA, 14 nt, Human
accuucaagcugcu

SEQ ID NO: 3230552 - RNA, 12 nt, Human
accuucaagcug

SEQ ID NO: 3230553 - RNA, 20 nt, Human
accuuaaauuaguacagcac

SEQ ID NO: 3230554 - RNA, 16 nt, Human
uccaggccagggggcc

SEQ ID NO: 3230555 - RNA, 11 nt, Human
uccaggcagcc

SEQ ID NO: 3230556 - RNA, 13 nt, Human
uccaggcagccgc

SEQ ID NO: 3230557 - RNA, 18 nt, Human
uccaggcagcacccaggu

SEQ ID NO: 3230558 - RNA, 12 nt, Human
uccaggcagcac

SEQ ID NO: 3230559 - RNA, 18 nt, Human
uccaggccagggggccag

SEQ ID NO: 3230560 - RNA, 14 nt, Human
uccaggcuguaucc

SEQ ID NO: 3230561 - RNA, 18 nt, Human
uccaggccuacuccuguc

SEQ ID NO: 3230562 - RNA, 16 nt, Human
uccaggccuacuccug

SEQ ID NO: 3230563 - RNA, 17 nt, Human
uccaggccccucccucu

SEQ ID NO: 3230564 - RNA, 12 nt, Human
uccagccccugg

SEQ ID NO: 3230565 - RNA, 15 nt, Human
uccagagaguggcuc

SEQ ID NO: 3230566 - RNA, 17 nt, Human
uccagagaguggcuccu

SEQ ID NO: 3230567 - RNA, 16 nt, Human
uccagagaguggcucc

SEQ ID NO: 3230568 - RNA, 13 nt, Human
uccagccccugga

SEQ ID NO: 3230569 - RNA, 21 nt, Human
uccaggcuguaucccaugagc

SEQ ID NO: 3230570 - RNA, 20 nt, Human
acgagcaggcuacugucagc

SEQ ID NO: 3230571 - RNA, 19 nt, Human
acgagcaggcuacugucag

SEQ ID NO: 3230572 - RNA, 19 nt, Human
acgccagauucuuuccuga

SEQ ID NO: 3230573 - RNA, 17 nt, Human
acgccagauucuuuccu

SEQ ID NO: 3230574 - RNA, 16 nt, Human
acgagcaggcuucuuc

SEQ ID NO: 3230575 - RNA, 13 nt, Human
acgagccuuuuca

SEQ ID NO: 3230576 - RNA, 23 nt, Human
uccaacccucaucaccaacgucu

SEQ ID NO: 3230577 - RNA, 16 nt, Human
uccaacccucaucacc

SEQ ID NO: 3230578 - RNA, 17 nt, Human
uccaacccucaucacca

SEQ ID NO: 3230579 - RNA, 14 nt, Human
uccaacccucauca

SEQ ID NO: 3230580 - RNA, 19 nt, Human
uccaaccccucgcccaguc

SEQ ID NO: 3230581 - RNA, 18 nt, Human
uccaaccccucgcccagu

SEQ ID NO: 3230582 - RNA, 14 nt, Human
uccaaccccucgcc

SEQ ID NO: 3230583 - RNA, 13 nt, Human
uccaaccccucgc

SEQ ID NO: 3230584 - RNA, 12 nt, Human
accugccaggaa

SEQ ID NO: 3230585 - RNA, 14 nt, Human
accugccaggaagc

SEQ ID NO: 3230586 - RNA, 17 nt, Human
uccaaccauuuucauua

SEQ ID NO: 3230587 - RNA, 24 nt, Human
uccaaccccucgcccagucccagc

SEQ ID NO: 3230588 - RNA, 21 nt, Human
uccaacuccaacauccacucu

SEQ ID NO: 3230589 - RNA, 19 nt, Human
uccaacuccaacauccacu

SEQ ID NO: 3230590 - RNA, 23 nt, Human
uccaacugagaaguaccuuauca

SEQ ID NO: 3230591 - RNA, 20 nt, Human
uccaagcuggucccacucag

SEQ ID NO: 3230592 - RNA, 16 nt, Human
uccaagcuggucccac

SEQ ID NO: 3230593 - RNA, 18 nt, Human
uccaaggguacuaaggaa

SEQ ID NO: 3230594 - RNA, 21 nt, Human
uccaagcuggucccacucagu

SEQ ID NO: 3230595 - RNA, 16 nt, Human
uccaaggugauguugu

SEQ ID NO: 3230596 - RNA, 20 nt, Human
uccaaguggccuccgucacu

SEQ ID NO: 3230597 - RNA, 14 nt, Human
uccaagucacugca

SEQ ID NO: 3230598 - RNA, 19 nt, Human
uccaagucuuugcuauugu

SEQ ID NO: 3230599 - RNA, 21 nt, Human
uccaagucuuugcuauuguga

SEQ ID NO: 3230600 - RNA, 23 nt, Human
uccaagucacugcaaaaccaggu

SEQ ID NO: 3230601 - RNA, 18 nt, Human
uccaaucccaccaacccu

SEQ ID NO: 3230602 - RNA, 16 nt, Human
accuggccucugcacu

SEQ ID NO: 3230603 - RNA, 17 nt, Human
accuggccucugcacuc

SEQ ID NO: 3230604 - RNA, 14 nt, Human
accuggccucugca

SEQ ID NO: 3230605 - RNA, 15 nt, Human
uccacccaggagccc

SEQ ID NO: 3230606 - RNA, 14 nt, Human
uccacccaggagcc

SEQ ID NO: 3230607 - RNA, 12 nt, Human
uccacccaggag

SEQ ID NO: 3230608 - RNA, 19 nt, Human
uccacccaccucagccucc

SEQ ID NO: 3230609 - RNA, 18 nt, Human
uccacccaccucagccuc

SEQ ID NO: 3230610 - RNA, 17 nt, Human
uccacccaccucagccu

SEQ ID NO: 3230611 - RNA, 19 nt, Human
accuuagacagucccugcc

SEQ ID NO: 3230612 - RNA, 20 nt, Human
accuuagacagucccugcca

SEQ ID NO: 3230613 - RNA, 18 nt, Human
accuuagacagucccugc

SEQ ID NO: 3230614 - RNA, 21 nt, Human
accuuaaaauuugaaacauug

SEQ ID NO: 3230615 - RNA, 20 nt, Human
accuuaaaauuugaaacauu

SEQ ID NO: 3230616 - RNA, 17 nt, Human
accuuaaaauuugaaac

SEQ ID NO: 3230617 - RNA, 19 nt, Human
accuguuucugcagccacu

SEQ ID NO: 3230618 - RNA, 21 nt, Human
accuggucacaggacucugcc

SEQ ID NO: 3230619 - RNA, 23 nt, Human
accuguuuaaauugcucacaguu

SEQ ID NO: 3230620 - RNA, 16 nt, Human
accuguuuaaauugcu

SEQ ID NO: 3230621 - RNA, 15 nt, Human
accuguuuaaauugc

SEQ ID NO: 3230622 - RNA, 13 nt, Human
accuguuuaaauu

SEQ ID NO: 3230623 - RNA, 12 nt, Human
accuuaaaacua

SEQ ID NO: 3230624 - RNA, 15 nt, Human
accuuaaaauuugaa

SEQ ID NO: 3230625 - RNA, 14 nt, Human
accuuaaaauuuga

SEQ ID NO: 3230626 - RNA, 13 nt, Human
accuuaaaauuug

SEQ ID NO: 3230627 - RNA, 12 nt, Human
accuuaaaauuu

SEQ ID NO: 3230628 - RNA, 23 nt, Human
accuggccucugcacuccccugc

SEQ ID NO: 3230629 - RNA, 15 nt, Human
accuggccugucugu

SEQ ID NO: 3230630 - RNA, 18 nt, Human
accuggccucugcacucc

SEQ ID NO: 3230631 - RNA, 20 nt, Human
accuggccucugcacucccc

SEQ ID NO: 3230632 - RNA, 21 nt, Human
accuggguaacuagggaagau

SEQ ID NO: 3230633 - RNA, 23 nt, Human
accuggguccccagcccuuccuc

SEQ ID NO: 3230634 - RNA, 18 nt, Human
accuaguuaaagaaagga

SEQ ID NO: 3230635 - RNA, 22 nt, Human
accuaguuaaagaaaggaaaag

SEQ ID NO: 3230636 - RNA, 15 nt, Human
accuaccacuacauu

SEQ ID NO: 3230637 - RNA, 20 nt, Human
accuaccccugacuucuguu

SEQ ID NO: 3230638 - RNA, 20 nt, Human
accuaccaccacgcccggcu

SEQ ID NO: 3230639 - RNA, 16 nt, Human
accuaccaccacgccc

SEQ ID NO: 3230640 - RNA, 15 nt, Human
accuaauuaauuuca

SEQ ID NO: 3230641 - RNA, 23 nt, Human
accuaauugcacaacagagacug

SEQ ID NO: 3230642 - RNA, 15 nt, Human
accuaauugcacaac

SEQ ID NO: 3230643 - RNA, 15 nt, Human
accuaauuaauauau

SEQ ID NO: 3230644 - RNA, 14 nt, Human
accuaauuaauuuc

SEQ ID NO: 3230645 - RNA, 23 nt, Human
ucaggaaaucaaauaugcaaagc

SEQ ID NO: 3230646 - RNA, 22 nt, Human
ucaggaaaucaaauaugcaaag

SEQ ID NO: 3230647 - RNA, 12 nt, Human
ucaggaagcuca

SEQ ID NO: 3230648 - RNA, 13 nt, Human
ucaggaagcucag

SEQ ID NO: 3230649 - RNA, 14 nt, Human
ucaggaagcucagg

SEQ ID NO: 3230650 - RNA, 15 nt, Human
ucaggaagcucaggg

SEQ ID NO: 3230651 - RNA, 13 nt, Human
accuaaaugaaua

SEQ ID NO: 3230652 - RNA, 14 nt, Human
accuaaccagggcc

SEQ ID NO: 3230653 - RNA, 16 nt, Human
accuaacccagaaaau

SEQ ID NO: 3230654 - RNA, 13 nt, Human
accuaacccagaa

SEQ ID NO: 3230655 - RNA, 20 nt, Human
accuaacaacauuguagccu

SEQ ID NO: 3230656 - RNA, 18 nt, Human
ucauccuucccacucugu

SEQ ID NO: 3230657 - RNA, 13 nt, Human
ucauccuucccac

SEQ ID NO: 3230658 - RNA, 22 nt, Human
ucauccuuucacuucuuucccu

SEQ ID NO: 3230659 - RNA, 20 nt, Human
ucauccuuucacuucuuucc

SEQ ID NO: 3230660 - RNA, 22 nt, Human
ucauccuucuggaauaaggaga

SEQ ID NO: 3230661 - RNA, 13 nt, Human
ucaugaaugcuuu

SEQ ID NO: 3230662 - RNA, 15 nt, Human
ucaugaaugcuuuua

SEQ ID NO: 3230663 - RNA, 21 nt, Human
ucaugaaugcuuuuagugugu

SEQ ID NO: 3230664 - RNA, 21 nt, Human
ucaugaauaacugauuaguaa

SEQ ID NO: 3230665 - RNA, 14 nt, Human
ucaugaauaugaug

SEQ ID NO: 3230666 - RNA, 14 nt, Human
ucauccuucuggaa

SEQ ID NO: 3230667 - RNA, 18 nt, Human
ucauccucauacccaccc

SEQ ID NO: 3230668 - RNA, 13 nt, Human
ucauccuccucag

SEQ ID NO: 3230669 - RNA, 19 nt, Human
ucauccuccucagaucuuc

SEQ ID NO: 3230670 - RNA, 23 nt, Human
ucaucccuucucuuccaggcagc

SEQ ID NO: 3230671 - RNA, 21 nt, Human
ucaucccuucucuuccaggca

SEQ ID NO: 3230672 - RNA, 16 nt, Human
ucaucccuucucuucc

SEQ ID NO: 3230673 - RNA, 14 nt, Human
ucaucccuucucuu

SEQ ID NO: 3230674 - RNA, 15 nt, Human
ucauccuaagcuauu

SEQ ID NO: 3230675 - RNA, 23 nt, Human
accuccugccucgaacuggcugc

SEQ ID NO: 3230676 - RNA, 20 nt, Human
ucauccccucagaaggucug

SEQ ID NO: 3230677 - RNA, 14 nt, Human
ucauccccucagaa

SEQ ID NO: 3230678 - RNA, 12 nt, Human
accuccugccuc

SEQ ID NO: 3230679 - RNA, 13 nt, Human
accuccugccucg

SEQ ID NO: 3230680 - RNA, 16 nt, Human
accucaacaagaagaa

SEQ ID NO: 3230681 - RNA, 17 nt, Human
accucaacaagaagaau

SEQ ID NO: 3230682 - RNA, 22 nt, Human
accucaaaugaugugccugcuu

SEQ ID NO: 3230683 - RNA, 20 nt, Human
accucaaaugaugugccugc

SEQ ID NO: 3230684 - RNA, 14 nt, Human
accugaggcccuuc

SEQ ID NO: 3230685 - RNA, 21 nt, Human
accugaggacauggcuucuga

SEQ ID NO: 3230686 - RNA, 20 nt, Human
accugaggacauggcuucug

SEQ ID NO: 3230687 - RNA, 12 nt, Human
accucuuguuuu

SEQ ID NO: 3230688 - RNA, 13 nt, Human
accucuuuggaaa

SEQ ID NO: 3230689 - RNA, 12 nt, Human
accuccuggggc

SEQ ID NO: 3230690 - RNA, 22 nt, Human
accucuuuugcuugccaaagua

SEQ ID NO: 3230691 - RNA, 15 nt, Human
accugaggcccuucu

SEQ ID NO: 3230692 - RNA, 16 nt, Human
accugaggcccuucuc

SEQ ID NO: 3230693 - RNA, 20 nt, Human
accugaggcccuucucucca

SEQ ID NO: 3230694 - RNA, 21 nt, Human
accugaggcccuucucuccag

SEQ ID NO: 3230695 - RNA, 22 nt, Human
accugaggcccuucucuccagc

SEQ ID NO: 3230696 - RNA, 16 nt, Human
accugaggggccucuu

SEQ ID NO: 3230697 - RNA, 15 nt, Human
accugauugugucuc

SEQ ID NO: 3230698 - RNA, 14 nt, Human
accugaguuccuga

SEQ ID NO: 3230699 - RNA, 16 nt, Human
accugaguugaagagg

SEQ ID NO: 3230700 - RNA, 14 nt, Human
accugaguugaaga

SEQ ID NO: 3230701 - RNA, 17 nt, Human
accugaguugaagaggg

SEQ ID NO: 3230702 - RNA, 17 nt, Human
accugauugugucucuu

SEQ ID NO: 3230703 - RNA, 18 nt, Human
accugauugugucucuug

SEQ ID NO: 3230704 - RNA, 14 nt, Human
accugauugugucu

SEQ ID NO: 3230705 - RNA, 15 nt, Human
accugauuucuccug

SEQ ID NO: 3230706 - RNA, 15 nt, Human
accugcagcucccuc

SEQ ID NO: 3230707 - RNA, 13 nt, Human
accugcagcuccc

SEQ ID NO: 3230708 - RNA, 17 nt, Human
accugcagauucuagga

SEQ ID NO: 3230709 - RNA, 14 nt, Human
accugcagccuccc

SEQ ID NO: 3230710 - RNA, 17 nt, Human
accugcagccucccucc

SEQ ID NO: 3230711 - RNA, 19 nt, Human
accucggugccuuccucuu

SEQ ID NO: 3230712 - RNA, 13 nt, Human
accuccugggcua

SEQ ID NO: 3230713 - RNA, 22 nt, Human
ucauugaaaucuuuuugcuuug

SEQ ID NO: 3230714 - RNA, 12 nt, Human
ucauugaccuga

SEQ ID NO: 3230715 - RNA, 14 nt, Human
ucauugaccugagg

SEQ ID NO: 3230716 - RNA, 15 nt, Human
ucauugaccugaggc

SEQ ID NO: 3230717 - RNA, 14 nt, Human
ucauugcaucauuu

SEQ ID NO: 3230718 - RNA, 12 nt, Human
ucauugaaaucu

SEQ ID NO: 3230719 - RNA, 13 nt, Human
ucauugaaaucuu

SEQ ID NO: 3230720 - RNA, 12 nt, Human
ucauucuucugu

SEQ ID NO: 3230721 - RNA, 12 nt, Human
ucauuacuuguu

SEQ ID NO: 3230722 - RNA, 17 nt, Human
ucauuacuuguugccua

SEQ ID NO: 3230723 - RNA, 14 nt, Human
ucauucugaauuaa

SEQ ID NO: 3230724 - RNA, 15 nt, Human
ucauuaauuaacccc

SEQ ID NO: 3230725 - RNA, 21 nt, Human
ucaugauguuuuuaaaaucuu

SEQ ID NO: 3230726 - RNA, 20 nt, Human
ucaugauguuuuuaaaaucu

SEQ ID NO: 3230727 - RNA, 19 nt, Human
ucaugauguuuuuaaaauc

SEQ ID NO: 3230728 - RNA, 13 nt, Human
ucaugauguuuuu

SEQ ID NO: 3230729 - RNA, 23 nt, Human
ucaugaugcucuuucccacccag

SEQ ID NO: 3230730 - RNA, 18 nt, Human
ucaugaugcucuuuccca

SEQ ID NO: 3230731 - RNA, 17 nt, Human
ucaugaugcucuuuccc

SEQ ID NO: 3230732 - RNA, 16 nt, Human
ucaugaugcucuuucc

SEQ ID NO: 3230733 - RNA, 12 nt, Human
acuccagccugg

SEQ ID NO: 3230734 - RNA, 23 nt, Human
acuccagaauuucccaaagcagu

SEQ ID NO: 3230735 - RNA, 18 nt, Human
acuccuccuagccaccca

SEQ ID NO: 3230736 - RNA, 16 nt, Human
acuccuccuagccacc

SEQ ID NO: 3230737 - RNA, 15 nt, Human
acuccuccuagccac

SEQ ID NO: 3230738 - RNA, 13 nt, Human
acuccuccuagcc

SEQ ID NO: 3230739 - RNA, 14 nt, Human
acuccuccuagcca

SEQ ID NO: 3230740 - RNA, 13 nt, Human
acuccagccuggg

SEQ ID NO: 3230741 - RNA, 18 nt, Human
acuccugcaggcagccag

SEQ ID NO: 3230742 - RNA, 19 nt, Human
acuccugcaggcagccagg

SEQ ID NO: 3230743 - RNA, 17 nt, Human
acuccugcaggcagcca

SEQ ID NO: 3230744 - RNA, 14 nt, Human
acuccucuguccag

SEQ ID NO: 3230745 - RNA, 13 nt, Human
acuccucugucca

SEQ ID NO: 3230746 - RNA, 13 nt, Human
acucaugugauuu

SEQ ID NO: 3230747 - RNA, 12 nt, Human
acucauuaauua

SEQ ID NO: 3230748 - RNA, 17 nt, Human
acucauuagaauuacca

SEQ ID NO: 3230749 - RNA, 23 nt, Human
acucauuagaauuaccauuuguu

SEQ ID NO: 3230750 - RNA, 18 nt, Human
acucagaaacuccaugau

SEQ ID NO: 3230751 - RNA, 19 nt, Human
acucacuggugguuuuccg

SEQ ID NO: 3230752 - RNA, 23 nt, Human
acucacuggggaacguucucuuu

SEQ ID NO: 3230753 - RNA, 14 nt, Human
acucauugaccuga

SEQ ID NO: 3230754 - RNA, 15 nt, Human
acucauucuucugua

SEQ ID NO: 3230755 - RNA, 14 nt, Human
acucauguuaauug

SEQ ID NO: 3230756 - RNA, 15 nt, Human
acucauucugaauua

SEQ ID NO: 3230757 - RNA, 19 nt, Human
acucauucugaauuaauua

SEQ ID NO: 3230758 - RNA, 23 nt, Human
acuccagaaaugucccuuucuuc

SEQ ID NO: 3230759 - RNA, 20 nt, Human
acuccagaaaugucccuuuc

SEQ ID NO: 3230760 - RNA, 15 nt, Human
acuccagaauuuccc

SEQ ID NO: 3230761 - RNA, 17 nt, Human
acuccagaauuucccaa

SEQ ID NO: 3230762 - RNA, 18 nt, Human
acuccaaagaaauguaag

SEQ ID NO: 3230763 - RNA, 15 nt, Human
acuccaaagaaaugu

SEQ ID NO: 3230764 - RNA, 14 nt, Human
acuccaaagaaaug

SEQ ID NO: 3230765 - RNA, 15 nt, Human
acucauugaccugag

SEQ ID NO: 3230766 - RNA, 17 nt, Human
uccggucccugucccag

SEQ ID NO: 3230767 - RNA, 14 nt, Human
uccgggucuuccua

SEQ ID NO: 3230768 - RNA, 16 nt, Human
uccuagaaauucccca

SEQ ID NO: 3230769 - RNA, 14 nt, Human
uccuacuuccccuu

SEQ ID NO: 3230770 - RNA, 23 nt, Human
uccuacucuucucucugcucuga

SEQ ID NO: 3230771 - RNA, 20 nt, Human
uccuacucuucucucugcuc

SEQ ID NO: 3230772 - RNA, 18 nt, Human
uccuacucuucucucugc

SEQ ID NO: 3230773 - RNA, 17 nt, Human
uccuacucuucucucug

SEQ ID NO: 3230774 - RNA, 13 nt, Human
uccuaacccuggc

SEQ ID NO: 3230775 - RNA, 16 nt, Human
uccuacucuucucucu

SEQ ID NO: 3230776 - RNA, 16 nt, Human
ucccuuucuucucccc

SEQ ID NO: 3230777 - RNA, 12 nt, Human
ucccuuuuccuu

SEQ ID NO: 3230778 - RNA, 20 nt, Human
ucccuuuucaccuuuucagg

SEQ ID NO: 3230779 - RNA, 14 nt, Human
ucccuuuuccauga

SEQ ID NO: 3230780 - RNA, 21 nt, Human
uccgggacguggcaccuccuc

SEQ ID NO: 3230781 - RNA, 16 nt, Human
uccggggccagcuccg

SEQ ID NO: 3230782 - RNA, 15 nt, Human
uccggggccagcucc

SEQ ID NO: 3230783 - RNA, 21 nt, Human
ucccuggguuagacugccagc

SEQ ID NO: 3230784 - RNA, 23 nt, Human
ucccuggguuagacugccagcuc

SEQ ID NO: 3230785 - RNA, 22 nt, Human
ucccuggguuagacugccagcu

SEQ ID NO: 3230786 - RNA, 17 nt, Human
ucccugguaagaaaaag

SEQ ID NO: 3230787 - RNA, 21 nt, Human
acuccugcaggcagccaggcc

SEQ ID NO: 3230788 - RNA, 20 nt, Human
ucccuggguuagacugccag

SEQ ID NO: 3230789 - RNA, 12 nt, Human
ucccugucccag

SEQ ID NO: 3230790 - RNA, 15 nt, Human
ucccugguggcagcu

SEQ ID NO: 3230791 - RNA, 18 nt, Human
ucccuuaagaaugaguuu

SEQ ID NO: 3230792 - RNA, 22 nt, Human
ucccuuaagaaugaguuucuua

SEQ ID NO: 3230793 - RNA, 19 nt, Human
ucccuuaagaaugaguuuc

SEQ ID NO: 3230794 - RNA, 20 nt, Human
ucccugaaggaaccaaagcg

SEQ ID NO: 3230795 - RNA, 11 nt, Human
ucccugaaggc

SEQ ID NO: 3230796 - RNA, 15 nt, Human
ucccugaaggccccg

SEQ ID NO: 3230797 - RNA, 14 nt, Human
ucccucuuucccuc

SEQ ID NO: 3230798 - RNA, 20 nt, Human
ucccucuuucccucccuucc

SEQ ID NO: 3230799 - RNA, 18 nt, Human
ucccucuuucccucccuu

SEQ ID NO: 3230800 - RNA, 15 nt, Human
ucccggcccugccug

SEQ ID NO: 3230801 - RNA, 14 nt, Human
ucccggcccugccu

SEQ ID NO: 3230802 - RNA, 22 nt, Human
ucccggcugcccuuucugggca

SEQ ID NO: 3230803 - RNA, 13 nt, Human
ucccggcugcccu

SEQ ID NO: 3230804 - RNA, 14 nt, Human
ucccggcugcccuu

SEQ ID NO: 3230805 - RNA, 15 nt, Human
ucccggcugcccuuu

SEQ ID NO: 3230806 - RNA, 18 nt, Human
ucccggcugcccuuucug

SEQ ID NO: 3230807 - RNA, 11 nt, Human
ucccugaggca

SEQ ID NO: 3230808 - RNA, 23 nt, Human
ucccugacugggggcagacaugg

SEQ ID NO: 3230809 - RNA, 12 nt, Human
ucccugacuggg

SEQ ID NO: 3230810 - RNA, 22 nt, Human
ucccugaggcagguccccagac

SEQ ID NO: 3230811 - RNA, 21 nt, Human
ucccugaggcagguccccaga

SEQ ID NO: 3230812 - RNA, 20 nt, Human
ucccugaggcagguccccag

SEQ ID NO: 3230813 - RNA, 11 nt, Human
ucccugagcag

SEQ ID NO: 3230814 - RNA, 16 nt, Human
ucccugaaggccccgc

SEQ ID NO: 3230815 - RNA, 17 nt, Human
ucccugaucccuuccac

SEQ ID NO: 3230816 - RNA, 15 nt, Human
ucccugaucccuucc

SEQ ID NO: 3230817 - RNA, 15 nt, Human
ucccugauaaauauu

SEQ ID NO: 3230818 - RNA, 14 nt, Human
ucccugauaaauau

SEQ ID NO: 3230819 - RNA, 14 nt, Human
ucccugaucccuuc

SEQ ID NO: 3230820 - RNA, 15 nt, Human
ucccugaucccugau

SEQ ID NO: 3230821 - RNA, 16 nt, Human
acuaccuccucuccug

SEQ ID NO: 3230822 - RNA, 14 nt, Human
acuaccuccucucc

SEQ ID NO: 3230823 - RNA, 17 nt, Human
acuacucccccaggugg

SEQ ID NO: 3230824 - RNA, 14 nt, Human
acuaccuggcugcg

SEQ ID NO: 3230825 - RNA, 12 nt, Human
acuaccuggcug

SEQ ID NO: 3230826 - RNA, 17 nt, Human
acuaccuccucuccuga

SEQ ID NO: 3230827 - RNA, 18 nt, Human
acuacucaaagcaaaagu

SEQ ID NO: 3230828 - RNA, 16 nt, Human
acuacucaaagcaaaa

SEQ ID NO: 3230829 - RNA, 21 nt, Human
acucacauuuauucugcucac

SEQ ID NO: 3230830 - RNA, 12 nt, Human
acucaccccagc

SEQ ID NO: 3230831 - RNA, 16 nt, Human
uccccuaaucuuuucu

SEQ ID NO: 3230832 - RNA, 17 nt, Human
uccccucccagggagca

SEQ ID NO: 3230833 - RNA, 14 nt, Human
uccccucccaggga

SEQ ID NO: 3230834 - RNA, 14 nt, Human
uccccuccaggagu

SEQ ID NO: 3230835 - RNA, 16 nt, Human
uccccucggagaagag

SEQ ID NO: 3230836 - RNA, 17 nt, Human
uccccucggagaagagc

SEQ ID NO: 3230837 - RNA, 17 nt, Human
ucccgaguagcugggac

SEQ ID NO: 3230838 - RNA, 16 nt, Human
ucccgaguagcuggga

SEQ ID NO: 3230839 - RNA, 18 nt, Human
ucccgaguagcugggacu

SEQ ID NO: 3230840 - RNA, 20 nt, Human
ucccgaguagcugagauuau

SEQ ID NO: 3230841 - RNA, 15 nt, Human
ucccgaguagcuggg

SEQ ID NO: 3230842 - RNA, 19 nt, Human
ucccgagacggcacugaga

SEQ ID NO: 3230843 - RNA, 18 nt, Human
ucccgaauagcugggacu

SEQ ID NO: 3230844 - RNA, 20 nt, Human
ucccgaauagcugggacuac

SEQ ID NO: 3230845 - RNA, 15 nt, Human
acgguuuuacugcag

SEQ ID NO: 3230846 - RNA, 23 nt, Human
acguggcugcuucaaggauccug

SEQ ID NO: 3230847 - RNA, 20 nt, Human
acguagucggcacagccugg

SEQ ID NO: 3230848 - RNA, 13 nt, Human
acguauuauuguc

SEQ ID NO: 3230849 - RNA, 19 nt, Human
acguuccucuccaccugca

SEQ ID NO: 3230850 - RNA, 16 nt, Human
acgugugcaugugucu

SEQ ID NO: 3230851 - RNA, 15 nt, Human
acgugugcauguguc

SEQ ID NO: 3230852 - RNA, 23 nt, Human
acguguauguuuuucaguucaaa

SEQ ID NO: 3230853 - RNA, 19 nt, Human
acguguauguuuuucaguu

SEQ ID NO: 3230854 - RNA, 16 nt, Human
acguguauguuuuuca

SEQ ID NO: 3230855 - RNA, 13 nt, Human
acguguauguuuu

SEQ ID NO: 3230856 - RNA, 11 nt, Human
acguguauguu

SEQ ID NO: 3230857 - RNA, 15 nt, Human
ucccaccccacacac

SEQ ID NO: 3230858 - RNA, 20 nt, Human
ucccaccccacacacgccag

SEQ ID NO: 3230859 - RNA, 16 nt, Human
ucccacaaaggagagc

SEQ ID NO: 3230860 - RNA, 20 nt, Human
acgggaggguaaggcugugg

SEQ ID NO: 3230861 - RNA, 19 nt, Human
ucccaccccauccuccagg

SEQ ID NO: 3230862 - RNA, 18 nt, Human
ucccaccccauccuccag

SEQ ID NO: 3230863 - RNA, 10 nt, Human
acgguuccua

SEQ ID NO: 3230864 - RNA, 20 nt, Human
acgguuccuacacaggacag

SEQ ID NO: 3230865 - RNA, 18 nt, Human
acgguuccuacacaggac

SEQ ID NO: 3230866 - RNA, 17 nt, Human
acgguuccuacacagga

SEQ ID NO: 3230867 - RNA, 19 nt, Human
acgguucaaaccugugaag

SEQ ID NO: 3230868 - RNA, 19 nt, Human
uccauccugaggcuccacu

SEQ ID NO: 3230869 - RNA, 15 nt, Human
uccauccuuucuccu

SEQ ID NO: 3230870 - RNA, 16 nt, Human
uccaucuaaacugccc

SEQ ID NO: 3230871 - RNA, 21 nt, Human
uccaucuaaaaauauacaugu

SEQ ID NO: 3230872 - RNA, 16 nt, Human
uccaucuaaaaauaua

SEQ ID NO: 3230873 - RNA, 15 nt, Human
uccaucuaaaaauau

SEQ ID NO: 3230874 - RNA, 14 nt, Human
uccaucuaaaaaua

SEQ ID NO: 3230875 - RNA, 18 nt, Human
uccaucuaaacugccccc

SEQ ID NO: 3230876 - RNA, 20 nt, Human
uccauccugaggcuccacuu

SEQ ID NO: 3230877 - RNA, 21 nt, Human
uccauccugaggcuccacuug

SEQ ID NO: 3230878 - RNA, 22 nt, Human
acgccagauucuuuccugaggc

SEQ ID NO: 3230879 - RNA, 23 nt, Human
acgccagauucuuuccugaggcu

SEQ ID NO: 3230880 - RNA, 13 nt, Human
uccaugaagaugu

SEQ ID NO: 3230881 - RNA, 20 nt, Human
uccaucucuugcuuguuccu

SEQ ID NO: 3230882 - RNA, 21 nt, Human
uccaugaagauguagaggaga

SEQ ID NO: 3230883 - RNA, 23 nt, Human
uccauucuccagggguuuacagu

SEQ ID NO: 3230884 - RNA, 21 nt, Human
ucccaaagcagugcaugcugu

SEQ ID NO: 3230885 - RNA, 17 nt, Human
ucccaaagcagugcaug

SEQ ID NO: 3230886 - RNA, 18 nt, Human
ucccaaagcagugcaugc

SEQ ID NO: 3230887 - RNA, 13 nt, Human
ucccaaagugcug

SEQ ID NO: 3230888 - RNA, 12 nt, Human
ucccaaaggcau

SEQ ID NO: 3230889 - RNA, 18 nt, Human
ucccaaacccuucagugc

SEQ ID NO: 3230890 - RNA, 17 nt, Human
ucccaaaaucaccguac

SEQ ID NO: 3230891 - RNA, 16 nt, Human
ucccaaagcagugcau

SEQ ID NO: 3230892 - RNA, 15 nt, Human
uccauuucacuggcu

SEQ ID NO: 3230893 - RNA, 14 nt, Human
uccauuucacuggc

SEQ ID NO: 3230894 - RNA, 17 nt, Human
uccauuuccuuaugcug

SEQ ID NO: 3230895 - RNA, 15 nt, Human
uccauuuuuuauauu

SEQ ID NO: 3230896 - RNA, 12 nt, Human
ucccaaaagcua

SEQ ID NO: 3230897 - RNA, 17 nt, Human
acuacaguccucccauc

SEQ ID NO: 3230898 - RNA, 18 nt, Human
acuacagggccgccggca

SEQ ID NO: 3230899 - RNA, 15 nt, Human
acuacaggcacccac

SEQ ID NO: 3230900 - RNA, 11 nt, Human
acuacaggcac

SEQ ID NO: 3230901 - RNA, 20 nt, Human
acuacaauauguacauuucu

SEQ ID NO: 3230902 - RNA, 13 nt, Human
acuacaauaugua

SEQ ID NO: 3230903 - RNA, 18 nt, Human
acuacaauauguacauuu

SEQ ID NO: 3230904 - RNA, 16 nt, Human
acuacaauauguacau

SEQ ID NO: 3230905 - RNA, 13 nt, Human
ucccagcagccag

SEQ ID NO: 3230906 - RNA, 15 nt, Human
ucccagcagccagcc

SEQ ID NO: 3230907 - RNA, 14 nt, Human
ucccagcagccagc

SEQ ID NO: 3230908 - RNA, 16 nt, Human
ucccagcagccagcca

SEQ ID NO: 3230909 - RNA, 17 nt, Human
ucccagcaucgcacucu

SEQ ID NO: 3230910 - RNA, 17 nt, Human
ucccagcugugcucugg

SEQ ID NO: 3230911 - RNA, 22 nt, Human
ucccagucauuuaauaaaugug

SEQ ID NO: 3230912 - RNA, 14 nt, Human
ucccagucauuuaa

SEQ ID NO: 3230913 - RNA, 15 nt, Human
ucccaguagaaaaua

SEQ ID NO: 3230914 - RNA, 15 nt, Human
ucccaucacccgcua

SEQ ID NO: 3230915 - RNA, 16 nt, Human
ucccauaugccugggc

SEQ ID NO: 3230916 - RNA, 22 nt, Human
ucccauaugccugggcagaagg

SEQ ID NO: 3230917 - RNA, 16 nt, Human
ucccaguagaaaauau

SEQ ID NO: 3230918 - RNA, 23 nt, Human
uccccaccaucugcugucuuuuc

SEQ ID NO: 3230919 - RNA, 19 nt, Human
uccccaccaucugcugucu

SEQ ID NO: 3230920 - RNA, 18 nt, Human
uccccaccaucugcuguc

SEQ ID NO: 3230921 - RNA, 15 nt, Human
uccccaccaucugcu

SEQ ID NO: 3230922 - RNA, 14 nt, Human
uccccaccaucugc

SEQ ID NO: 3230923 - RNA, 17 nt, Human
uccccaugucucgacuc

SEQ ID NO: 3230924 - RNA, 18 nt, Human
uccccaccgcagacagga

SEQ ID NO: 3230925 - RNA, 21 nt, Human
uccccaccgcagacaggacca

SEQ ID NO: 3230926 - RNA, 17 nt, Human
uccccaccgcagacagg

SEQ ID NO: 3230927 - RNA, 17 nt, Human
uccccacccuccccuuc

SEQ ID NO: 3230928 - RNA, 15 nt, Human
acuaccaaaggacac

SEQ ID NO: 3230929 - RNA, 14 nt, Human
acuaccccuugauu

SEQ ID NO: 3230930 - RNA, 21 nt, Human
acuaccccuugauuuuccauc

SEQ ID NO: 3230931 - RNA, 19 nt, Human
ucugcaggaaauaggccca

SEQ ID NO: 3230932 - RNA, 20 nt, Human
ucugcacuccccugcugggu

SEQ ID NO: 3230933 - RNA, 14 nt, Human
ucugauuccagcac

SEQ ID NO: 3230934 - RNA, 22 nt, Human
ucugagacucgcgacaaugcaa

SEQ ID NO: 3230935 - RNA, 23 nt, Human
ucugagacucgcgacaaugcaaa

SEQ ID NO: 3230936 - RNA, 15 nt, Human
ucugacgggauuugu

SEQ ID NO: 3230937 - RNA, 14 nt, Human
ucugaccuuaaaug

SEQ ID NO: 3230938 - RNA, 20 nt, Human
ucugagagaggcuaaaaugu

SEQ ID NO: 3230939 - RNA, 22 nt, Human
ucugagagaggcuaaaauguuu

SEQ ID NO: 3230940 - RNA, 21 nt, Human
ucugagagaggcuaaaauguu

SEQ ID NO: 3230941 - RNA, 16 nt, Human
ucugagagcaaacugg

SEQ ID NO: 3230942 - RNA, 15 nt, Human
ucugagagcaaacug

SEQ ID NO: 3230943 - RNA, 14 nt, Human
ucugagagauuugg

SEQ ID NO: 3230944 - RNA, 23 nt, Human
ucugagagaggcuaaaauguuuu

SEQ ID NO: 3230945 - RNA, 23 nt, Human
ucugaguuguuaccccaagcgcc

SEQ ID NO: 3230946 - RNA, 19 nt, Human
ucugaguuguuaccccaag

SEQ ID NO: 3230947 - RNA, 23 nt, Human
ucugaguuccggcaccaguagca

SEQ ID NO: 3230948 - RNA, 19 nt, Human
ucugaguucuguguauuuu

SEQ ID NO: 3230949 - RNA, 18 nt, Human
ucugcacuccccugcugg

SEQ ID NO: 3230950 - RNA, 19 nt, Human
ucugcacuccccugcuggg

SEQ ID NO: 3230951 - RNA, 17 nt, Human
ucugcacuccccugcug

SEQ ID NO: 3230952 - RNA, 21 nt, Human
ucugauguauuuugugaguuu

SEQ ID NO: 3230953 - RNA, 15 nt, Human
ucugauguauuuugu

SEQ ID NO: 3230954 - RNA, 23 nt, Human
ucugaugcaagcaagaaacacug

SEQ ID NO: 3230955 - RNA, 12 nt, Human
agaaauaucugu

SEQ ID NO: 3230956 - RNA, 23 nt, Human
agaaauauuuuaauuuuuaaaug

SEQ ID NO: 3230957 - RNA, 19 nt, Human
agaaaucaaguaaugaauc

SEQ ID NO: 3230958 - RNA, 15 nt, Human
agaaaucaauaguug

SEQ ID NO: 3230959 - RNA, 19 nt, Human
agaaaucaauaguugaauu

SEQ ID NO: 3230960 - RNA, 20 nt, Human
agaaauaucugaaaauguau

SEQ ID NO: 3230961 - RNA, 19 nt, Human
agaaauaucugaaaaugua

SEQ ID NO: 3230962 - RNA, 14 nt, Human
agaaauauaauuga

SEQ ID NO: 3230963 - RNA, 23 nt, Human
agaaacuuguucuuccaaagcag

SEQ ID NO: 3230964 - RNA, 13 nt, Human
agaaacuuguucu

SEQ ID NO: 3230965 - RNA, 22 nt, Human
agaaagccuuucauuuugcuuu

SEQ ID NO: 3230966 - RNA, 20 nt, Human
agaaagccuuucauuuugcu

SEQ ID NO: 3230967 - RNA, 18 nt, Human
agaaagccuguuguuuaa

SEQ ID NO: 3230968 - RNA, 14 nt, Human
agaaaggaaaagaa

SEQ ID NO: 3230969 - RNA, 14 nt, Human
agaaaggaaaccuu

SEQ ID NO: 3230970 - RNA, 15 nt, Human
agaaaggaaaccuuu

SEQ ID NO: 3230971 - RNA, 21 nt, Human
agaaaggaaaccuuuucuugu

SEQ ID NO: 3230972 - RNA, 21 nt, Human
ucugaacuuggcgcugccccu

SEQ ID NO: 3230973 - RNA, 14 nt, Human
ucugaagauuguuu

SEQ ID NO: 3230974 - RNA, 19 nt, Human
ucugaagauuguuuaucua

SEQ ID NO: 3230975 - RNA, 18 nt, Human
ucugaagauuguuuaucu

SEQ ID NO: 3230976 - RNA, 18 nt, Human
ucugaagucacugcacag

SEQ ID NO: 3230977 - RNA, 16 nt, Human
ucugaagucacugcac

SEQ ID NO: 3230978 - RNA, 15 nt, Human
ucugaagucacugca

SEQ ID NO: 3230979 - RNA, 17 nt, Human
ucugaauuuaucuuuga

SEQ ID NO: 3230980 - RNA, 20 nt, Human
ucugaauuggaaugcacuca

SEQ ID NO: 3230981 - RNA, 21 nt, Human
ucugaauuuaucuuugauaac

SEQ ID NO: 3230982 - RNA, 19 nt, Human
ucugaauuuaucuuugaua

SEQ ID NO: 3230983 - RNA, 15 nt, Human
ucugacaacagacuu

SEQ ID NO: 3230984 - RNA, 16 nt, Human
ucugacaacagacuuc

SEQ ID NO: 3230985 - RNA, 17 nt, Human
agaaaaagcaaaaggca

SEQ ID NO: 3230986 - RNA, 16 nt, Human
agaaaaagcaaaaggc

SEQ ID NO: 3230987 - RNA, 12 nt, Human
agaaaaagcaaa

SEQ ID NO: 3230988 - RNA, 19 nt, Human
agaaaagacgcaccagccc

SEQ ID NO: 3230989 - RNA, 17 nt, Human
agaaaacuuuuaugcaa

SEQ ID NO: 3230990 - RNA, 18 nt, Human
agaaaagaaaaaaaaaga

SEQ ID NO: 3230991 - RNA, 17 nt, Human
agaaaagaaaaaaaaag

SEQ ID NO: 3230992 - RNA, 12 nt, Human
agaaaacuuugu

SEQ ID NO: 3230993 - RNA, 9 nt, Human
agaaaagaa

SEQ ID NO: 3230994 - RNA, 20 nt, Human
agaaaacuuuguuaggccaa

SEQ ID NO: 3230995 - RNA, 14 nt, Human
agaaaacuuuguua

SEQ ID NO: 3230996 - RNA, 13 nt, Human
agaaaagaaaaaa

SEQ ID NO: 3230997 - RNA, 12 nt, Human
agaaaagaaaaa

SEQ ID NO: 3230998 - RNA, 11 nt, Human
agaaaagaaaa

SEQ ID NO: 3230999 - RNA, 10 nt, Human
agaaaagaaa

SEQ ID NO: 3231000 - RNA, 16 nt, Human
agaaacagcuaugaga

SEQ ID NO: 3231001 - RNA, 15 nt, Human
agaaacacugaaaag

SEQ ID NO: 3231002 - RNA, 16 nt, Human
agaaacacugaaaaga

SEQ ID NO: 3231003 - RNA, 17 nt, Human
agaaacacugaaaagaa

SEQ ID NO: 3231004 - RNA, 19 nt, Human
agaaacacugaaaagaagg

SEQ ID NO: 3231005 - RNA, 23 nt, Human
agaaacuuaagguuaccuuuguu

SEQ ID NO: 3231006 - RNA, 17 nt, Human
agaaacuaaaacaaaua

SEQ ID NO: 3231007 - RNA, 15 nt, Human
agaaacuccaugaug

SEQ ID NO: 3231008 - RNA, 21 nt, Human
ucucuggccuucggccuccau

SEQ ID NO: 3231009 - RNA, 22 nt, Human
ucucuggccuucggccuccauc

SEQ ID NO: 3231010 - RNA, 17 nt, Human
ucucuugagccugggag

SEQ ID NO: 3231011 - RNA, 14 nt, Human
ucucuugauucaua

SEQ ID NO: 3231012 - RNA, 16 nt, Human
ucucuugauucauaau

SEQ ID NO: 3231013 - RNA, 18 nt, Human
ucucuugagccugggagg

SEQ ID NO: 3231014 - RNA, 20 nt, Human
ucucuuuaaugucacaggca

SEQ ID NO: 3231015 - RNA, 13 nt, Human
agaaaaagaaaaa

SEQ ID NO: 3231016 - RNA, 13 nt, Human
ucucuugccucag

SEQ ID NO: 3231017 - RNA, 16 nt, Human
ucucuugccucagccu

SEQ ID NO: 3231018 - RNA, 22 nt, Human
ucucuugccucagcuuccccag

SEQ ID NO: 3231019 - RNA, 13 nt, Human
ucucugcuggacg

SEQ ID NO: 3231020 - RNA, 15 nt, Human
ucucuggcacuuuga

SEQ ID NO: 3231021 - RNA, 12 nt, Human
ucucuggccuuc

SEQ ID NO: 3231022 - RNA, 11 nt, Human
ucucugcccuc

SEQ ID NO: 3231023 - RNA, 15 nt, Human
ucucugcccuccaag

SEQ ID NO: 3231024 - RNA, 16 nt, Human
ucucugcccuccaaga

SEQ ID NO: 3231025 - RNA, 17 nt, Human
ucucugcccuccaagac

SEQ ID NO: 3231026 - RNA, 13 nt, Human
ucucucacuccuu

SEQ ID NO: 3231027 - RNA, 15 nt, Human
ucucucacuccuuga

SEQ ID NO: 3231028 - RNA, 21 nt, Human
ucucucaggccaaacucaccu

SEQ ID NO: 3231029 - RNA, 17 nt, Human
ucucucacagacaggac

SEQ ID NO: 3231030 - RNA, 15 nt, Human
ucucucacagacagg

SEQ ID NO: 3231031 - RNA, 17 nt, Human
ucucuccagccccugga

SEQ ID NO: 3231032 - RNA, 16 nt, Human
ucucuccagccccugg

SEQ ID NO: 3231033 - RNA, 18 nt, Human
ucucuccagccccuggau

SEQ ID NO: 3231034 - RNA, 19 nt, Human
ucucuccagccccuggaug

SEQ ID NO: 3231035 - RNA, 23 nt, Human
ucucucacagacaggaccccugc

SEQ ID NO: 3231036 - RNA, 19 nt, Human
ucucucacagacaggaccc

SEQ ID NO: 3231037 - RNA, 18 nt, Human
ucucuccaaggugugccc

SEQ ID NO: 3231038 - RNA, 14 nt, Human
ucucucauuugugu

SEQ ID NO: 3231039 - RNA, 16 nt, Human
ucucauuccagaggaa

SEQ ID NO: 3231040 - RNA, 14 nt, Human
ucucauuacuuguu

SEQ ID NO: 3231041 - RNA, 14 nt, Human
ucucagggccuggu

SEQ ID NO: 3231042 - RNA, 15 nt, Human
ucucagggccugguc

SEQ ID NO: 3231043 - RNA, 19 nt, Human
ucucagggccuggucguuu

SEQ ID NO: 3231044 - RNA, 15 nt, Human
acuuguggacacagc

SEQ ID NO: 3231045 - RNA, 12 nt, Human
ucucagggccug

SEQ ID NO: 3231046 - RNA, 13 nt, Human
ucucagggccugg

SEQ ID NO: 3231047 - RNA, 16 nt, Human
ucuccaggcuguaucc

SEQ ID NO: 3231048 - RNA, 16 nt, Human
ucuccagggguuuaca

SEQ ID NO: 3231049 - RNA, 19 nt, Human
ucuccagggguuuacagug

SEQ ID NO: 3231050 - RNA, 11 nt, Human
ucuccaggcug

SEQ ID NO: 3231051 - RNA, 21 nt, Human
ucuccuccuuuucacaguucu

SEQ ID NO: 3231052 - RNA, 16 nt, Human
acuuucuagccagagg

SEQ ID NO: 3231053 - RNA, 17 nt, Human
acuuucuagccagagga

SEQ ID NO: 3231054 - RNA, 22 nt, Human
acuuuaacuuaguuuugcauag

SEQ ID NO: 3231055 - RNA, 21 nt, Human
acuuuaacuuaguuuugcaua

SEQ ID NO: 3231056 - RNA, 20 nt, Human
acuuuaacuuaguuuugcau

SEQ ID NO: 3231057 - RNA, 16 nt, Human
ucuccauguuugaugu

SEQ ID NO: 3231058 - RNA, 14 nt, Human
ucucccacaugcca

SEQ ID NO: 3231059 - RNA, 15 nt, Human
ucuccuacugaggau

SEQ ID NO: 3231060 - RNA, 14 nt, Human
ucuccuacugagga

SEQ ID NO: 3231061 - RNA, 17 nt, Human
ucucaccuugguuccug

SEQ ID NO: 3231062 - RNA, 11 nt, Human
ucucacuccuu

SEQ ID NO: 3231063 - RNA, 18 nt, Human
ucucacacucuaacugua

SEQ ID NO: 3231064 - RNA, 12 nt, Human
ucucacagacag

SEQ ID NO: 3231065 - RNA, 14 nt, Human
ucucacagacagga

SEQ ID NO: 3231066 - RNA, 13 nt, Human
ucucacagacagg

SEQ ID NO: 3231067 - RNA, 22 nt, Human
ucucacagacaggaccccugca

SEQ ID NO: 3231068 - RNA, 21 nt, Human
ucucacagacaggaccccugc

SEQ ID NO: 3231069 - RNA, 20 nt, Human
ucucacagacaggaccccug

SEQ ID NO: 3231070 - RNA, 19 nt, Human
ucucacagacaggaccccu

SEQ ID NO: 3231071 - RNA, 23 nt, Human
ucucacagacaggaccccugcag

SEQ ID NO: 3231072 - RNA, 14 nt, Human
ucucacagcuaugc

SEQ ID NO: 3231073 - RNA, 17 nt, Human
ucucacagcuaugcaaa

SEQ ID NO: 3231074 - RNA, 18 nt, Human
ucucacagcuaugcaaaa

SEQ ID NO: 3231075 - RNA, 22 nt, Human
ucucacagcuaugcaaaaagcu

SEQ ID NO: 3231076 - RNA, 11 nt, Human
acuucagcuga

SEQ ID NO: 3231077 - RNA, 16 nt, Human
acuucagcugacuuuu

SEQ ID NO: 3231078 - RNA, 14 nt, Human
acuucaggcucuuc

SEQ ID NO: 3231079 - RNA, 21 nt, Human
ucuauuucaucagaacagcug

SEQ ID NO: 3231080 - RNA, 15 nt, Human
ucuauuucaucagaa

SEQ ID NO: 3231081 - RNA, 13 nt, Human
acuucagcucugu

SEQ ID NO: 3231082 - RNA, 23 nt, Human
ucucacacaugagcaucaggcca

SEQ ID NO: 3231083 - RNA, 22 nt, Human
ucuauuucccccuuucuuccuc

SEQ ID NO: 3231084 - RNA, 21 nt, Human
ucuauuucccccuuucuuccu

SEQ ID NO: 3231085 - RNA, 19 nt, Human
ucuauuucccccuuucuuc

SEQ ID NO: 3231086 - RNA, 18 nt, Human
ucuauuucccccuuucuu

SEQ ID NO: 3231087 - RNA, 23 nt, Human
acuucuaaguaaaaccacagcag

SEQ ID NO: 3231088 - RNA, 23 nt, Human
acuucuaaaacuguacuuugauu

SEQ ID NO: 3231089 - RNA, 22 nt, Human
acuucuaaaacuguacuuugau

SEQ ID NO: 3231090 - RNA, 21 nt, Human
acuucuaaaacuguacuuuga

SEQ ID NO: 3231091 - RNA, 19 nt, Human
acuucuaaaacuguacuuu

SEQ ID NO: 3231092 - RNA, 16 nt, Human
acuucuaaaacuguac

SEQ ID NO: 3231093 - RNA, 15 nt, Human
acuucuaaaacugua

SEQ ID NO: 3231094 - RNA, 14 nt, Human
acuucuaaaacugu

SEQ ID NO: 3231095 - RNA, 21 nt, Human
acuucuaaguaaaaccacagc

SEQ ID NO: 3231096 - RNA, 23 nt, Human
acuucuaaguugaguauauuaua

SEQ ID NO: 3231097 - RNA, 19 nt, Human
acuucuaaguugaguauau

SEQ ID NO: 3231098 - RNA, 14 nt, Human
acuucuccacccug

SEQ ID NO: 3231099 - RNA, 12 nt, Human
ucucacucuguc

SEQ ID NO: 3231100 - RNA, 13 nt, Human
ucucacuccuuga

SEQ ID NO: 3231101 - RNA, 18 nt, Human
ucucacuccuaccuggua

SEQ ID NO: 3231102 - RNA, 22 nt, Human
acuucgggaggucgaggcagga

SEQ ID NO: 3231103 - RNA, 14 nt, Human
acuuccuugccagu

SEQ ID NO: 3231104 - RNA, 15 nt, Human
acuuccugugacuuc

SEQ ID NO: 3231105 - RNA, 15 nt, Human
acuuccuuacuuuua

SEQ ID NO: 3231106 - RNA, 21 nt, Human
acuugaacccauauuuguaca

SEQ ID NO: 3231107 - RNA, 14 nt, Human
acuugaaccauaaa

SEQ ID NO: 3231108 - RNA, 15 nt, Human
acuugaaccauaaaa

SEQ ID NO: 3231109 - RNA, 16 nt, Human
acuugaaccauaaaau

SEQ ID NO: 3231110 - RNA, 17 nt, Human
acuugaaccauaaaaug

SEQ ID NO: 3231111 - RNA, 19 nt, Human
acuugaaccauaaaauguc

SEQ ID NO: 3231112 - RNA, 20 nt, Human
acuugaaccauaaaaugucc

SEQ ID NO: 3231113 - RNA, 22 nt, Human
acuugaaccauaaaauguccag

SEQ ID NO: 3231114 - RNA, 19 nt, Human
acuugaacccgggaggcag

SEQ ID NO: 3231115 - RNA, 20 nt, Human
acuugaacccgggaggcaga

SEQ ID NO: 3231116 - RNA, 16 nt, Human
acuucuccacccugcu

SEQ ID NO: 3231117 - RNA, 15 nt, Human
acuucuccacccugc

SEQ ID NO: 3231118 - RNA, 19 nt, Human
acuugagcccagagugaac

SEQ ID NO: 3231119 - RNA, 19 nt, Human
acuugagaauuacccuuuu

SEQ ID NO: 3231120 - RNA, 16 nt, Human
acuugagaugauuucc

SEQ ID NO: 3231121 - RNA, 15 nt, Human
acuugaauaguauug

SEQ ID NO: 3231122 - RNA, 16 nt, Human
acuugaauaguauugu

SEQ ID NO: 3231123 - RNA, 18 nt, Human
acuugaauaguauugugu

SEQ ID NO: 3231124 - RNA, 19 nt, Human
acuugaaccauaguuacug

SEQ ID NO: 3231125 - RNA, 16 nt, Human
acuuguggacacagcu

SEQ ID NO: 3231126 - RNA, 17 nt, Human
acuuguggacacagcuc

SEQ ID NO: 3231127 - RNA, 14 nt, Human
acuuggaugaguuu

SEQ ID NO: 3231128 - RNA, 21 nt, Human
acuuggaugaguuuugggaag

SEQ ID NO: 3231129 - RNA, 15 nt, Human
acuugccuuugaaga

SEQ ID NO: 3231130 - RNA, 14 nt, Human
acuugccuuugaag

SEQ ID NO: 3231131 - RNA, 16 nt, Human
acuugccuuugaagag

SEQ ID NO: 3231132 - RNA, 23 nt, Human
acuggccaguggcuggaucugug

SEQ ID NO: 3231133 - RNA, 14 nt, Human
uccuucagugccuu

SEQ ID NO: 3231134 - RNA, 15 nt, Human
uccuucagugccuua

SEQ ID NO: 3231135 - RNA, 14 nt, Human
acuggccucugcug

SEQ ID NO: 3231136 - RNA, 17 nt, Human
acuggccgcgggggcag

SEQ ID NO: 3231137 - RNA, 16 nt, Human
uccuucagugccuuau

SEQ ID NO: 3231138 - RNA, 17 nt, Human
uccuucagugccuuaug

SEQ ID NO: 3231139 - RNA, 15 nt, Human
uccuucccacucugu

SEQ ID NO: 3231140 - RNA, 17 nt, Human
uccuucccacucuucuc

SEQ ID NO: 3231141 - RNA, 14 nt, Human
uccuucccacucuu

SEQ ID NO: 3231142 - RNA, 19 nt, Human
uccuucccacucuucucau

SEQ ID NO: 3231143 - RNA, 13 nt, Human
uccuugucaguug

SEQ ID NO: 3231144 - RNA, 22 nt, Human
uccuuggugucgggcaugacac

SEQ ID NO: 3231145 - RNA, 16 nt, Human
uccuugguuauauuuu

SEQ ID NO: 3231146 - RNA, 21 nt, Human
uccuugguuauauuuuuuuaa

SEQ ID NO: 3231147 - RNA, 14 nt, Human
uccuuuaauaugaa

SEQ ID NO: 3231148 - RNA, 19 nt, Human
uccuuuagcgcccaguugg

SEQ ID NO: 3231149 - RNA, 15 nt, Human
uccuuuagcgcccag

SEQ ID NO: 3231150 - RNA, 18 nt, Human
uccuuuaauaugaaauuu

SEQ ID NO: 3231151 - RNA, 15 nt, Human
uccuuuaauaugaaa

SEQ ID NO: 3231152 - RNA, 22 nt, Human
uccuuuagcgcccaguugggug

SEQ ID NO: 3231153 - RNA, 12 nt, Human
uccuuuagaaac

SEQ ID NO: 3231154 - RNA, 13 nt, Human
uccuuuagaaaca

SEQ ID NO: 3231155 - RNA, 19 nt, Human
uccuuuagauagcagccug

SEQ ID NO: 3231156 - RNA, 20 nt, Human
uccuuuagauagcagccugg

SEQ ID NO: 3231157 - RNA, 22 nt, Human
uccuuuagauagcagccuggcu

SEQ ID NO: 3231158 - RNA, 12 nt, Human
uccuuucuugau

SEQ ID NO: 3231159 - RNA, 17 nt, Human
uccuuucugaucuucac

SEQ ID NO: 3231160 - RNA, 11 nt, Human
ucgagaauugu

SEQ ID NO: 3231161 - RNA, 14 nt, Human
ucgacuugcauuuu

SEQ ID NO: 3231162 - RNA, 16 nt, Human
ucgagcaugccuggau

SEQ ID NO: 3231163 - RNA, 18 nt, Human
ucgagcaugccuggaugg

SEQ ID NO: 3231164 - RNA, 15 nt, Human
ucgagcaugccugga

SEQ ID NO: 3231165 - RNA, 16 nt, Human
ucgcgacaaugcaaac

SEQ ID NO: 3231166 - RNA, 14 nt, Human
ucgcgacaaugcaa

SEQ ID NO: 3231167 - RNA, 19 nt, Human
ucgcgacaaugcaaaccau

SEQ ID NO: 3231168 - RNA, 19 nt, Human
ucgagcuccccccaggucu

SEQ ID NO: 3231169 - RNA, 23 nt, Human
ucgcuccaacuccaacauccacu

SEQ ID NO: 3231170 - RNA, 23 nt, Human
acuggcuugaauuggugacauuu

SEQ ID NO: 3231171 - RNA, 23 nt, Human
ucgcuagcauuucccaacacaaa

SEQ ID NO: 3231172 - RNA, 17 nt, Human
ucgcuacauuuccgcca

SEQ ID NO: 3231173 - RNA, 18 nt, Human
ucgcuauugucaccaggg

SEQ ID NO: 3231174 - RNA, 14 nt, Human
ucgcuccaacucca

SEQ ID NO: 3231175 - RNA, 21 nt, Human
ucgcggccucuucucucagac

SEQ ID NO: 3231176 - RNA, 18 nt, Human
acugccucccccaggguc

SEQ ID NO: 3231177 - RNA, 13 nt, Human
acugccuccccca

SEQ ID NO: 3231178 - RNA, 21 nt, Human
acugccuccccaaggcccccu

SEQ ID NO: 3231179 - RNA, 16 nt, Human
acugcauucuucugau

SEQ ID NO: 3231180 - RNA, 17 nt, Human
acugcauucuucugauc

SEQ ID NO: 3231181 - RNA, 13 nt, Human
acugccugccuua

SEQ ID NO: 3231182 - RNA, 14 nt, Human
acugccugccuuaa

SEQ ID NO: 3231183 - RNA, 15 nt, Human
acugccugccuuaag

SEQ ID NO: 3231184 - RNA, 18 nt, Human
acugccugccuuaaguga

SEQ ID NO: 3231185 - RNA, 15 nt, Human
acugccucuuccucc

SEQ ID NO: 3231186 - RNA, 14 nt, Human
acugccucuuccuc

SEQ ID NO: 3231187 - RNA, 16 nt, Human
acugcauaugaaagga

SEQ ID NO: 3231188 - RNA, 21 nt, Human
uccuagaaauuccccacccug

SEQ ID NO: 3231189 - RNA, 22 nt, Human
uccuagaaauuccccacccuga

SEQ ID NO: 3231190 - RNA, 14 nt, Human
uccuagagaacugu

SEQ ID NO: 3231191 - RNA, 18 nt, Human
uccuagacagguguuuau

SEQ ID NO: 3231192 - RNA, 18 nt, Human
uccuagaauguuucauuu

SEQ ID NO: 3231193 - RNA, 23 nt, Human
acugcauccuccgccucccgggu

SEQ ID NO: 3231194 - RNA, 21 nt, Human
acugcaucuugguuauuucug

SEQ ID NO: 3231195 - RNA, 20 nt, Human
acugcaucaagaugugacau

SEQ ID NO: 3231196 - RNA, 22 nt, Human
acugcaucaagaugugacaugu

SEQ ID NO: 3231197 - RNA, 17 nt, Human
acugcauccuccgccuc

SEQ ID NO: 3231198 - RNA, 20 nt, Human
acugcauccuccgccucccg

SEQ ID NO: 3231199 - RNA, 18 nt, Human
acugcuaagaauauuuga

SEQ ID NO: 3231200 - RNA, 16 nt, Human
acugcuaagaauauuu

SEQ ID NO: 3231201 - RNA, 21 nt, Human
acugcuaaggauuagucccug

SEQ ID NO: 3231202 - RNA, 11 nt, Human
acugcucucac

SEQ ID NO: 3231203 - RNA, 22 nt, Human
acugcuccugagcccccagcuu

SEQ ID NO: 3231204 - RNA, 21 nt, Human
acugcuccugagcccccagcu

SEQ ID NO: 3231205 - RNA, 20 nt, Human
acugcuccugagcccccagc

SEQ ID NO: 3231206 - RNA, 19 nt, Human
acugcuccugagcccccag

SEQ ID NO: 3231207 - RNA, 15 nt, Human
acugcuggcugccuu

SEQ ID NO: 3231208 - RNA, 14 nt, Human
acugcuggcugccu

SEQ ID NO: 3231209 - RNA, 13 nt, Human
acugcuccugagc

SEQ ID NO: 3231210 - RNA, 18 nt, Human
acugcuccugagccccca

SEQ ID NO: 3231211 - RNA, 17 nt, Human
acugcuccugagccccc

SEQ ID NO: 3231212 - RNA, 16 nt, Human
acugcuccugagcccc

SEQ ID NO: 3231213 - RNA, 15 nt, Human
acugcuccugagccc

SEQ ID NO: 3231214 - RNA, 21 nt, Human
acugcucucaccuugguuccu

SEQ ID NO: 3231215 - RNA, 13 nt, Human
acugcucucaccu

SEQ ID NO: 3231216 - RNA, 22 nt, Human
acugcucucaccuugguuccug

SEQ ID NO: 3231217 - RNA, 20 nt, Human
acuggcacaguuuucugaga

SEQ ID NO: 3231218 - RNA, 19 nt, Human
acuggcacaguuuucugag

SEQ ID NO: 3231219 - RNA, 23 nt, Human
acuggcaaugguaguuucugugg

SEQ ID NO: 3231220 - RNA, 16 nt, Human
acuggccacaguuguu

SEQ ID NO: 3231221 - RNA, 13 nt, Human
acuggcacaguuu

SEQ ID NO: 3231222 - RNA, 21 nt, Human
acuggcaaugguaguuucugu

SEQ ID NO: 3231223 - RNA, 16 nt, Human
acuggcaaugguaguu

SEQ ID NO: 3231224 - RNA, 13 nt, Human
acuggauaaauug

SEQ ID NO: 3231225 - RNA, 14 nt, Human
acuggauaaauugu

SEQ ID NO: 3231226 - RNA, 18 nt, Human
acuggauaaauuguuuag

SEQ ID NO: 3231227 - RNA, 19 nt, Human
acuggauaaauuguuuagu

SEQ ID NO: 3231228 - RNA, 18 nt, Human
acuggaucucuuaagaca

SEQ ID NO: 3231229 - RNA, 21 nt, Human
acugcuugugaaaggaaagag

SEQ ID NO: 3231230 - RNA, 13 nt, Human
acugcuuaauuca

SEQ ID NO: 3231231 - RNA, 16 nt, Human
acugcuuaauucaaau

SEQ ID NO: 3231232 - RNA, 20 nt, Human
acugcuuaccuacuuucuuc

SEQ ID NO: 3231233 - RNA, 21 nt, Human
acugcuuaccuacuuucuuca

SEQ ID NO: 3231234 - RNA, 14 nt, Human
acugcuuugagaaa

SEQ ID NO: 3231235 - RNA, 23 nt, Human
acugcuuucuuucguuuguuugu

SEQ ID NO: 3231236 - RNA, 17 nt, Human
acugcuuucuuucguuu

SEQ ID NO: 3231237 - RNA, 19 nt, Human
ucgguguccccaccaucug

SEQ ID NO: 3231238 - RNA, 16 nt, Human
ucgguguccccaccau

SEQ ID NO: 3231239 - RNA, 20 nt, Human
ucgguuaacaaauaacaacu

SEQ ID NO: 3231240 - RNA, 15 nt, Human
ucgguuaacaaauaa

SEQ ID NO: 3231241 - RNA, 21 nt, Human
ucgguguccccaccaucugcu

SEQ ID NO: 3231242 - RNA, 20 nt, Human
ucgguguccccaccaucugc

SEQ ID NO: 3231243 - RNA, 17 nt, Human
ucggugccaucagugcc

SEQ ID NO: 3231244 - RNA, 17 nt, Human
ucguaaacaucucagag

SEQ ID NO: 3231245 - RNA, 17 nt, Human
ucguuugaaucacagua

SEQ ID NO: 3231246 - RNA, 22 nt, Human
ucuaaaauauuuaugaagaaaa

SEQ ID NO: 3231247 - RNA, 22 nt, Human
ucuaaaacuguacuuugauuca

SEQ ID NO: 3231248 - RNA, 19 nt, Human
ucuaaaacuguacuuugau

SEQ ID NO: 3231249 - RNA, 18 nt, Human
ucuaaaacuguacuuuga

SEQ ID NO: 3231250 - RNA, 15 nt, Human
ucuaaaacuguacuu

SEQ ID NO: 3231251 - RNA, 12 nt, Human
ucuaaaacugua

SEQ ID NO: 3231252 - RNA, 19 nt, Human
ucuaaaaauauacauguuu

SEQ ID NO: 3231253 - RNA, 18 nt, Human
ucuaaaaauaacuguaau

SEQ ID NO: 3231254 - RNA, 15 nt, Human
ucuaaaaauauacau

SEQ ID NO: 3231255 - RNA, 14 nt, Human
ucuaaaaauauaca

SEQ ID NO: 3231256 - RNA, 14 nt, Human
ucuaaaaagucaga

SEQ ID NO: 3231257 - RNA, 15 nt, Human
ucuaaaaagucagau

SEQ ID NO: 3231258 - RNA, 22 nt, Human
ucggguuuuauuguuuaaaauc

SEQ ID NO: 3231259 - RNA, 15 nt, Human
ucgguacccaccaca

SEQ ID NO: 3231260 - RNA, 20 nt, Human
ucgggccccaccugcagcuc

SEQ ID NO: 3231261 - RNA, 19 nt, Human
ucgggggggacccuccaag

SEQ ID NO: 3231262 - RNA, 23 nt, Human
ucgggggggacccuccaaggcca

SEQ ID NO: 3231263 - RNA, 11 nt, Human
ucgggcaugac

SEQ ID NO: 3231264 - RNA, 12 nt, Human
ucgggcaugaca

SEQ ID NO: 3231265 - RNA, 17 nt, Human
ucgggccccaccugcag

SEQ ID NO: 3231266 - RNA, 15 nt, Human
ucgggccccaccugc

SEQ ID NO: 3231267 - RNA, 19 nt, Human
ucgggaggucgaggcagga

SEQ ID NO: 3231268 - RNA, 21 nt, Human
ucgggaggucgaggcaggagg

SEQ ID NO: 3231269 - RNA, 17 nt, Human
ucgggaggucgaggcag

SEQ ID NO: 3231270 - RNA, 13 nt, Human
ucggcuggcuccc

SEQ ID NO: 3231271 - RNA, 17 nt, Human
ucggcuggcuccccugc

SEQ ID NO: 3231272 - RNA, 18 nt, Human
ucggcuggcuccccugca

SEQ ID NO: 3231273 - RNA, 19 nt, Human
ucggcuggcuccccugcag

SEQ ID NO: 3231274 - RNA, 20 nt, Human
ucggcuggcuccccugcagc

SEQ ID NO: 3231275 - RNA, 21 nt, Human
ucggcuggcuccccugcagcc

SEQ ID NO: 3231276 - RNA, 18 nt, Human
ucggcucacugcauccuc

SEQ ID NO: 3231277 - RNA, 22 nt, Human
ucggcuccaguccccagaacuc

SEQ ID NO: 3231278 - RNA, 13 nt, Human
acuguguauauuu

SEQ ID NO: 3231279 - RNA, 15 nt, Human
acuguguauauuuga

SEQ ID NO: 3231280 - RNA, 16 nt, Human
acuguguauauuugau

SEQ ID NO: 3231281 - RNA, 17 nt, Human
acuguguauauuugauu

SEQ ID NO: 3231282 - RNA, 18 nt, Human
acuguguauauuugauuu

SEQ ID NO: 3231283 - RNA, 19 nt, Human
acuguguauauuugauuua

SEQ ID NO: 3231284 - RNA, 21 nt, Human
acuguggguuuguggggggag

SEQ ID NO: 3231285 - RNA, 22 nt, Human
acuguggguuuguggggggagg

SEQ ID NO: 3231286 - RNA, 23 nt, Human
acuguggguuuguggggggaggc

SEQ ID NO: 3231287 - RNA, 19 nt, Human
acugugguagguguuugaa

SEQ ID NO: 3231288 - RNA, 16 nt, Human
acugggaacagaacuc

SEQ ID NO: 3231289 - RNA, 21 nt, Human
acugucagcuccccucggaga

SEQ ID NO: 3231290 - RNA, 17 nt, Human
acuguccuacccacccu

SEQ ID NO: 3231291 - RNA, 18 nt, Human
acuguccuacccacccuc

SEQ ID NO: 3231292 - RNA, 22 nt, Human
acugugcugagucugaaggcug

SEQ ID NO: 3231293 - RNA, 15 nt, Human
acuguccuaacaugg

SEQ ID NO: 3231294 - RNA, 22 nt, Human
acuguggagacugcuccugagc

SEQ ID NO: 3231295 - RNA, 17 nt, Human
acuguggagacugcucc

SEQ ID NO: 3231296 - RNA, 15 nt, Human
acuguggagacugcu

SEQ ID NO: 3231297 - RNA, 11 nt, Human
acuguggagac

SEQ ID NO: 3231298 - RNA, 23 nt, Human
ucuaaguaaaaccacagcaguug

SEQ ID NO: 3231299 - RNA, 20 nt, Human
ucuaaguaaaaccacagcag

SEQ ID NO: 3231300 - RNA, 22 nt, Human
ucuaaguaaaaccacagcaguu

SEQ ID NO: 3231301 - RNA, 21 nt, Human
ucuaaguaaaaccacagcagu

SEQ ID NO: 3231302 - RNA, 13 nt, Human
ucuaaagcugcca

SEQ ID NO: 3231303 - RNA, 14 nt, Human
ucuaaagcugccag

SEQ ID NO: 3231304 - RNA, 15 nt, Human
ucuaaagcugccagc

SEQ ID NO: 3231305 - RNA, 15 nt, Human
ucuaaggcaggaugu

SEQ ID NO: 3231306 - RNA, 11 nt, Human
ucuaaggacaa

SEQ ID NO: 3231307 - RNA, 19 nt, Human
acuguucccugagguggga

SEQ ID NO: 3231308 - RNA, 16 nt, Human
acuguucccugaggug

SEQ ID NO: 3231309 - RNA, 18 nt, Human
acuguuauucuuugcacu

SEQ ID NO: 3231310 - RNA, 16 nt, Human
acuguuauucuuugca

SEQ ID NO: 3231311 - RNA, 15 nt, Human
acuguuauucuuugc

SEQ ID NO: 3231312 - RNA, 13 nt, Human
acuguuauucuuu

SEQ ID NO: 3231313 - RNA, 14 nt, Human
acuguucucugccc

SEQ ID NO: 3231314 - RNA, 19 nt, Human
acuguuauucuuugcacuu

SEQ ID NO: 3231315 - RNA, 20 nt, Human
acuguucucugcccuccaag

SEQ ID NO: 3231316 - RNA, 21 nt, Human
acuguucucugcccuccaaga

SEQ ID NO: 3231317 - RNA, 19 nt, Human
acuguucucugcccuccaa

SEQ ID NO: 3231318 - RNA, 13 nt, Human
ucuacaguguccu

SEQ ID NO: 3231319 - RNA, 22 nt, Human
ucuaccaacuuucaagaacuug

SEQ ID NO: 3231320 - RNA, 18 nt, Human
ucuaccaacuuucaagaa

SEQ ID NO: 3231321 - RNA, 17 nt, Human
ucuaccaacuuucaaga

SEQ ID NO: 3231322 - RNA, 14 nt, Human
ucuaccaacuuuca

SEQ ID NO: 3231323 - RNA, 13 nt, Human
acuguuagaaugu

SEQ ID NO: 3231324 - RNA, 12 nt, Human
acuguuauucuu

SEQ ID NO: 3231325 - RNA, 14 nt, Human
acuguuaucauuuu

SEQ ID NO: 3231326 - RNA, 13 nt, Human
acuguuaucauuu

SEQ ID NO: 3231327 - RNA, 15 nt, Human
acuguuagaauguaa

SEQ ID NO: 3231328 - RNA, 14 nt, Human
acuguuagaaugua

SEQ ID NO: 3231329 - RNA, 16 nt, Human
acuguuaccauuggaa

SEQ ID NO: 3231330 - RNA, 18 nt, Human
acuguuaccauuggaaau

SEQ ID NO: 3231331 - RNA, 17 nt, Human
acuguuaccauuggaaa

SEQ ID NO: 3231332 - RNA, 22 nt, Human
acuguuaccauuggaaauuuca

SEQ ID NO: 3231333 - RNA, 21 nt, Human
acuguuaccauuggaaauuuc

SEQ ID NO: 3231334 - RNA, 19 nt, Human
acuguuaccauuggaaauu

SEQ ID NO: 3231335 - RNA, 14 nt, Human
acuguuacuugaua

SEQ ID NO: 3231336 - RNA, 13 nt, Human
acuuaauaaucaa

SEQ ID NO: 3231337 - RNA, 15 nt, Human
acuuaauaaucaaga

SEQ ID NO: 3231338 - RNA, 19 nt, Human
acuuaauaaucaagagccu

SEQ ID NO: 3231339 - RNA, 22 nt, Human
acuuaauaaucaagagccuuaa

SEQ ID NO: 3231340 - RNA, 12 nt, Human
acuguuguauaa

SEQ ID NO: 3231341 - RNA, 14 nt, Human
acuguugcccaggc

SEQ ID NO: 3231342 - RNA, 13 nt, Human
acuguugcccagg

SEQ ID NO: 3231343 - RNA, 12 nt, Human
acuguugcccag

SEQ ID NO: 3231344 - RNA, 18 nt, Human
acuguugcccaggcuggc

SEQ ID NO: 3231345 - RNA, 17 nt, Human
acuguugcccaggcugg

SEQ ID NO: 3231346 - RNA, 23 nt, Human
acuuaauaaucaagagccuuaaa

SEQ ID NO: 3231347 - RNA, 23 nt, Human
acuuaauaucuucauuucuaaau

SEQ ID NO: 3231348 - RNA, 23 nt, Human
acuuaccugaagggguuuucuug

SEQ ID NO: 3231349 - RNA, 20 nt, Human
acuuaccugaguugaagagg

SEQ ID NO: 3231350 - RNA, 19 nt, Human
acuuaccugaguugaagag

SEQ ID NO: 3231351 - RNA, 14 nt, Human
acuucagcucuguu

SEQ ID NO: 3231352 - RNA, 15 nt, Human
acuuaguuugugaau

SEQ ID NO: 3231353 - RNA, 17 nt, Human
acuuaguuuugcauagu

SEQ ID NO: 3231354 - RNA, 13 nt, Human
acuuaguuuugca

SEQ ID NO: 3231355 - RNA, 16 nt, Human
acuuagaaauugcauu

SEQ ID NO: 3231356 - RNA, 21 nt, Human
acuuagaaucccuguguuaau

SEQ ID NO: 3231357 - RNA, 22 nt, Human
acuuagagcuuuuuuuuuuuaa

SEQ ID NO: 3231358 - RNA, 23 nt, Human
acuuagagcuuuuuuuuuuuaau

SEQ ID NO: 3231359 - RNA, 19 nt, Human
acuuagaaucccuguguua

SEQ ID NO: 3231360 - RNA, 20 nt, Human
acuuagaaucccuguguuaa

SEQ ID NO: 3231361 - RNA, 22 nt, Human
acuuagaaucccuguguuaauu

SEQ ID NO: 3231362 - RNA, 19 nt, Human
acuuagacucuaguauuua

SEQ ID NO: 3231363 - RNA, 18 nt, Human
acuuagaaucccuguguu

SEQ ID NO: 3231364 - RNA, 14 nt, Human
agaggccauggagg

SEQ ID NO: 3231365 - RNA, 19 nt, Human
agaggccaugggccuccug

SEQ ID NO: 3231366 - RNA, 17 nt, Human
agaggcuaugugagcac

SEQ ID NO: 3231367 - RNA, 20 nt, Human
agaggccccaauaccccaug

SEQ ID NO: 3231368 - RNA, 10 nt, Human
agaggcucag

SEQ ID NO: 3231369 - RNA, 18 nt, Human
agaggcucagauuguaau

SEQ ID NO: 3231370 - RNA, 13 nt, Human
agaggcagggucu

SEQ ID NO: 3231371 - RNA, 10 nt, Human
agaggcaggg

SEQ ID NO: 3231372 - RNA, 19 nt, Human
agaggcagccccauucugc

SEQ ID NO: 3231373 - RNA, 13 nt, Human
agaggcagcccca

SEQ ID NO: 3231374 - RNA, 24 nt, Human
agaggcagccccauucugccugcc

SEQ ID NO: 3231375 - RNA, 14 nt, Human
agaggaaaagaaau

SEQ ID NO: 3231376 - RNA, 18 nt, Human
agagcuuagaaacuggaa

SEQ ID NO: 3231377 - RNA, 20 nt, Human
agagguuuggcuccugccca

SEQ ID NO: 3231378 - RNA, 18 nt, Human
agagguuuggcuccugcc

SEQ ID NO: 3231379 - RNA, 12 nt, Human
agaguacuuugg

SEQ ID NO: 3231380 - RNA, 17 nt, Human
agaguacuuugguuucu

SEQ ID NO: 3231381 - RNA, 19 nt, Human
agaguacuuugguuucuga

SEQ ID NO: 3231382 - RNA, 12 nt, Human
agaguacacugc

SEQ ID NO: 3231383 - RNA, 13 nt, Human
agaguacacugcc

SEQ ID NO: 3231384 - RNA, 15 nt, Human
agaguacacugccug

SEQ ID NO: 3231385 - RNA, 19 nt, Human
agaguacacugccugccuu

SEQ ID NO: 3231386 - RNA, 18 nt, Human
agaguaaucuuguugguu

SEQ ID NO: 3231387 - RNA, 18 nt, Human
agaguagagguauaauug

SEQ ID NO: 3231388 - RNA, 20 nt, Human
ugaagcaaacaguugacaau

SEQ ID NO: 3231389 - RNA, 15 nt, Human
ugaagcaaacaguug

SEQ ID NO: 3231390 - RNA, 15 nt, Human
agagguugcagugag

SEQ ID NO: 3231391 - RNA, 19 nt, Human
agagguccacaacacacag

SEQ ID NO: 3231392 - RNA, 21 nt, Human
agaggucccaagguucugggu

SEQ ID NO: 3231393 - RNA, 13 nt, Human
agagguauaauug

SEQ ID NO: 3231394 - RNA, 21 nt, Human
agagguaucuuacuuuccucu

SEQ ID NO: 3231395 - RNA, 21 nt, Human
agaggccccaauaccccaugg

SEQ ID NO: 3231396 - RNA, 13 nt, Human
agaggcugaggac

SEQ ID NO: 3231397 - RNA, 20 nt, Human
ugaacgauccuucaaagucu

SEQ ID NO: 3231398 - RNA, 13 nt, Human
ugaacgcccagag

SEQ ID NO: 3231399 - RNA, 12 nt, Human
ugaacuccuggc

SEQ ID NO: 3231400 - RNA, 11 nt, Human
ugaacuccugg

SEQ ID NO: 3231401 - RNA, 15 nt, Human
ugaacuccuggccuc

SEQ ID NO: 3231402 - RNA, 14 nt, Human
ugaacuccuggccu

SEQ ID NO: 3231403 - RNA, 19 nt, Human
ugaacaaauuuacagagac

SEQ ID NO: 3231404 - RNA, 20 nt, Human
ugaacaaauuuacagagaca

SEQ ID NO: 3231405 - RNA, 18 nt, Human
ugaacaaauuuacagaga

SEQ ID NO: 3231406 - RNA, 15 nt, Human
ugaaauuuuuauuaa

SEQ ID NO: 3231407 - RNA, 22 nt, Human
ugaaccgaugagaaauaaaguu

SEQ ID NO: 3231408 - RNA, 18 nt, Human
ugaacaacgagccuuuuc

SEQ ID NO: 3231409 - RNA, 19 nt, Human
ugaacaacgagccuuuuca

SEQ ID NO: 3231410 - RNA, 12 nt, Human
ugaaccugaaua

SEQ ID NO: 3231411 - RNA, 14 nt, Human
agagcugcgggcug

SEQ ID NO: 3231412 - RNA, 21 nt, Human
ugaagaaagccuguuguuuaa

SEQ ID NO: 3231413 - RNA, 19 nt, Human
agagcuguucacagccaga

SEQ ID NO: 3231414 - RNA, 21 nt, Human
agagcuguucacagccagacu

SEQ ID NO: 3231415 - RNA, 18 nt, Human
agagcuguugaugggaug

SEQ ID NO: 3231416 - RNA, 14 nt, Human
agagcuuagggucu

SEQ ID NO: 3231417 - RNA, 18 nt, Human
agagcuuagggucucagg

SEQ ID NO: 3231418 - RNA, 22 nt, Human
agagcuucuguugcugccucau

SEQ ID NO: 3231419 - RNA, 15 nt, Human
agagcuuaacagugu

SEQ ID NO: 3231420 - RNA, 12 nt, Human
agagcuuagaaa

SEQ ID NO: 3231421 - RNA, 14 nt, Human
agagcuuagaaacu

SEQ ID NO: 3231422 - RNA, 13 nt, Human
agagcuuagaaac

SEQ ID NO: 3231423 - RNA, 16 nt, Human
ugaagaaacagcuaug

SEQ ID NO: 3231424 - RNA, 24 nt, Human
ugaagaaaauacuuaaauguuaug

SEQ ID NO: 3231425 - RNA, 22 nt, Human
ugaagaaaauacuuaaauguua

SEQ ID NO: 3231426 - RNA, 20 nt, Human
ugaagaaaauacuuaaaugu

SEQ ID NO: 3231427 - RNA, 18 nt, Human
ugaagaaaauacuuaaau

SEQ ID NO: 3231428 - RNA, 16 nt, Human
ugaagaaaauacuuaa

SEQ ID NO: 3231429 - RNA, 14 nt, Human
ugaagaaaauacuu

SEQ ID NO: 3231430 - RNA, 12 nt, Human
ugaagaaaauac

SEQ ID NO: 3231431 - RNA, 22 nt, Human
ugaaauauauggucuaauguuu

SEQ ID NO: 3231432 - RNA, 16 nt, Human
ugaaauauaugugaaa

SEQ ID NO: 3231433 - RNA, 17 nt, Human
ugaaauauaugugaaag

SEQ ID NO: 3231434 - RNA, 19 nt, Human
ugaaauauaugugaaagga

SEQ ID NO: 3231435 - RNA, 23 nt, Human
ugaaauaucaucacguauguuau

SEQ ID NO: 3231436 - RNA, 14 nt, Human
ugaaauuuuagaaa

SEQ ID NO: 3231437 - RNA, 16 nt, Human
ugaaauuuuagaaaua

SEQ ID NO: 3231438 - RNA, 18 nt, Human
ugaaauuuuagaaauauu

SEQ ID NO: 3231439 - RNA, 13 nt, Human
ugaaagugccuuu

SEQ ID NO: 3231440 - RNA, 14 nt, Human
ugaaagugccuuug

SEQ ID NO: 3231441 - RNA, 16 nt, Human
ugaaagugccuuugca

SEQ ID NO: 3231442 - RNA, 17 nt, Human
ugaaagugccuuugcag

SEQ ID NO: 3231443 - RNA, 14 nt, Human
ugaaauaagccaga

SEQ ID NO: 3231444 - RNA, 21 nt, Human
ugaaagugccuuugcagcuca

SEQ ID NO: 3231445 - RNA, 17 nt, Human
ugaaauaagccagacau

SEQ ID NO: 3231446 - RNA, 18 nt, Human
ugaaauaagccagacauc

SEQ ID NO: 3231447 - RNA, 20 nt, Human
ugaaauaagccagacaucaa

SEQ ID NO: 3231448 - RNA, 23 nt, Human
ugaaauaagccagacaucaacag

SEQ ID NO: 3231449 - RNA, 18 nt, Human
agagcugccaccugccug

SEQ ID NO: 3231450 - RNA, 13 nt, Human
agagcugccagug

SEQ ID NO: 3231451 - RNA, 12 nt, Human
agagcugccagu

SEQ ID NO: 3231452 - RNA, 14 nt, Human
agagcugccaccug

SEQ ID NO: 3231453 - RNA, 15 nt, Human
agagcguugaaguug

SEQ ID NO: 3231454 - RNA, 14 nt, Human
agagcgcagcaucc

SEQ ID NO: 3231455 - RNA, 13 nt, Human
agagcgcagcccg

SEQ ID NO: 3231456 - RNA, 18 nt, Human
agagccuuuuucuaggcc

SEQ ID NO: 3231457 - RNA, 16 nt, Human
agagcgacagagcagu

SEQ ID NO: 3231458 - RNA, 15 nt, Human
agagcgacagagcag

SEQ ID NO: 3231459 - RNA, 16 nt, Human
agagcagugggccugg

SEQ ID NO: 3231460 - RNA, 18 nt, Human
agagcauuccagucaggc

SEQ ID NO: 3231461 - RNA, 17 nt, Human
agagcauuccagucagg

SEQ ID NO: 3231462 - RNA, 16 nt, Human
agagcauuccagucag

SEQ ID NO: 3231463 - RNA, 23 nt, Human
agagcauuauaaucaccagggcc

SEQ ID NO: 3231464 - RNA, 21 nt, Human
agagcauuccagucaggcucu

SEQ ID NO: 3231465 - RNA, 19 nt, Human
agagcauuccagucaggcu

SEQ ID NO: 3231466 - RNA, 21 nt, Human
agagccuugcggaagguucua

SEQ ID NO: 3231467 - RNA, 22 nt, Human
agagccuuccaggggugggaca

SEQ ID NO: 3231468 - RNA, 11 nt, Human
agagccuugcg

SEQ ID NO: 3231469 - RNA, 17 nt, Human
agagcagagaccauccc

SEQ ID NO: 3231470 - RNA, 18 nt, Human
agagcagagaccaucccu

SEQ ID NO: 3231471 - RNA, 20 nt, Human
agagcagagaccaucccuga

SEQ ID NO: 3231472 - RNA, 22 nt, Human
agagcagaaauucuguuuuuaa

SEQ ID NO: 3231473 - RNA, 12 nt, Human
agagcagcaagg

SEQ ID NO: 3231474 - RNA, 16 nt, Human
agagcaagagagcagc

SEQ ID NO: 3231475 - RNA, 13 nt, Human
agagcaagagagc

SEQ ID NO: 3231476 - RNA, 20 nt, Human
agagcaagagagcagcaagg

SEQ ID NO: 3231477 - RNA, 21 nt, Human
agagcaaggaagguaaaaagu

SEQ ID NO: 3231478 - RNA, 17 nt, Human
agagcaaggaagguaaa

SEQ ID NO: 3231479 - RNA, 23 nt, Human
agagcaaggaagguaaaaaguua

SEQ ID NO: 3231480 - RNA, 12 nt, Human
agagcagagacc

SEQ ID NO: 3231481 - RNA, 20 nt, Human
agagcagaaauucuguuuuu

SEQ ID NO: 3231482 - RNA, 17 nt, Human
agagcagaaauucuguu

SEQ ID NO: 3231483 - RNA, 15 nt, Human
agagcagaaauucug

SEQ ID NO: 3231484 - RNA, 14 nt, Human
agagcagaaauucu

SEQ ID NO: 3231485 - RNA, 22 nt, Human
agagauuuggggcuaaagacug

SEQ ID NO: 3231486 - RNA, 16 nt, Human
agagauugugguuuca

SEQ ID NO: 3231487 - RNA, 21 nt, Human
agagauuuggggcuaaagacu

SEQ ID NO: 3231488 - RNA, 14 nt, Human
agagauuuggggcu

SEQ ID NO: 3231489 - RNA, 17 nt, Human
ucuuuggacccugaggc

SEQ ID NO: 3231490 - RNA, 21 nt, Human
ucuuuggacccugaggcccag

SEQ ID NO: 3231491 - RNA, 16 nt, Human
ucuuuggacccugagg

SEQ ID NO: 3231492 - RNA, 14 nt, Human
ucuuuggaguuaaa

SEQ ID NO: 3231493 - RNA, 20 nt, Human
ucuuuggaguuaaaaugcac

SEQ ID NO: 3231494 - RNA, 15 nt, Human
agauccauuaauuua

SEQ ID NO: 3231495 - RNA, 18 nt, Human
agauccauuaauuuaaau

SEQ ID NO: 3231496 - RNA, 22 nt, Human
agauccauuuuuuauauuucaa

SEQ ID NO: 3231497 - RNA, 15 nt, Human
agaugcaccagcccu

SEQ ID NO: 3231498 - RNA, 14 nt, Human
agaugcaccagccc

SEQ ID NO: 3231499 - RNA, 11 nt, Human
agaugccuggg

SEQ ID NO: 3231500 - RNA, 14 nt, Human
agaugcuagaacuc

SEQ ID NO: 3231501 - RNA, 16 nt, Human
agaugcuacuaagaaa

SEQ ID NO: 3231502 - RNA, 17 nt, Human
agauguggaaaagccaa

SEQ ID NO: 3231503 - RNA, 14 nt, Human
agaugugcugcuuu

SEQ ID NO: 3231504 - RNA, 22 nt, Human
agauguggaaaagccaagaggc

SEQ ID NO: 3231505 - RNA, 16 nt, Human
agaugugcugcuuuga

SEQ ID NO: 3231506 - RNA, 14 nt, Human
agauguuaaaauaa

SEQ ID NO: 3231507 - RNA, 15 nt, Human
agauguuaaaauaaa

SEQ ID NO: 3231508 - RNA, 17 nt, Human
agauguuaaaauaaaug

SEQ ID NO: 3231509 - RNA, 18 nt, Human
agauguuaaaauaaaugg

SEQ ID NO: 3231510 - RNA, 17 nt, Human
agauguuauauuuuucu

SEQ ID NO: 3231511 - RNA, 21 nt, Human
agauguuauauuuuucuuaaa

SEQ ID NO: 3231512 - RNA, 19 nt, Human
agauguuauauuuuucuua

SEQ ID NO: 3231513 - RNA, 15 nt, Human
agaugcuucucacug

SEQ ID NO: 3231514 - RNA, 20 nt, Human
agaugcugugccccuggccu

SEQ ID NO: 3231515 - RNA, 15 nt, Human
agaugcugugccccu

SEQ ID NO: 3231516 - RNA, 17 nt, Human
ugacccacaagaaauga

SEQ ID NO: 3231517 - RNA, 23 nt, Human
ugaccauucuccaccugccaggg

SEQ ID NO: 3231518 - RNA, 13 nt, Human
ugacccacugcuu

SEQ ID NO: 3231519 - RNA, 12 nt, Human
ugacccacugcu

SEQ ID NO: 3231520 - RNA, 22 nt, Human
ugacauuguagagcuucuggca

SEQ ID NO: 3231521 - RNA, 21 nt, Human
ugacauuguuggccaaagcca

SEQ ID NO: 3231522 - RNA, 20 nt, Human
ugacauuguuggccaaagcc

SEQ ID NO: 3231523 - RNA, 18 nt, Human
ugaccaaugauggucacc

SEQ ID NO: 3231524 - RNA, 19 nt, Human
ugacauuuagucccucaag

SEQ ID NO: 3231525 - RNA, 13 nt, Human
agaucagccuggg

SEQ ID NO: 3231526 - RNA, 15 nt, Human
agaucagccugggca

SEQ ID NO: 3231527 - RNA, 14 nt, Human
agaucagccagaag

SEQ ID NO: 3231528 - RNA, 23 nt, Human
agaucauaguuuuauuuauauuu

SEQ ID NO: 3231529 - RNA, 13 nt, Human
agaucauaguuuu

SEQ ID NO: 3231530 - RNA, 14 nt, Human
agaucauaguuuua

SEQ ID NO: 3231531 - RNA, 16 nt, Human
agaucauaguuuuauu

SEQ ID NO: 3231532 - RNA, 17 nt, Human
agaucauaguuuuauuu

SEQ ID NO: 3231533 - RNA, 19 nt, Human
agaucauaguuuuauuuau

SEQ ID NO: 3231534 - RNA, 20 nt, Human
agaucauaguuuuauuuaua

SEQ ID NO: 3231535 - RNA, 22 nt, Human
agaucauaguuuuauuuauauu

SEQ ID NO: 3231536 - RNA, 20 nt, Human
ugacagggcacaccgggcac

SEQ ID NO: 3231537 - RNA, 16 nt, Human
ugacagggcacaccgg

SEQ ID NO: 3231538 - RNA, 11 nt, Human
ugacagggcac

SEQ ID NO: 3231539 - RNA, 18 nt, Human
ugacaggcgaaagaaaac

SEQ ID NO: 3231540 - RNA, 14 nt, Human
ugacaggccugucc

SEQ ID NO: 3231541 - RNA, 21 nt, Human
ugacacacagcucuguccugg

SEQ ID NO: 3231542 - RNA, 16 nt, Human
ugacagcgcacagcug

SEQ ID NO: 3231543 - RNA, 20 nt, Human
ugacaggcaaugcuggcugu

SEQ ID NO: 3231544 - RNA, 19 nt, Human
ugacagcgcacagcugcuc

SEQ ID NO: 3231545 - RNA, 17 nt, Human
ugacagcgcacagcugc

SEQ ID NO: 3231546 - RNA, 12 nt, Human
agauaaauauua

SEQ ID NO: 3231547 - RNA, 14 nt, Human
agauaaauauuaua

SEQ ID NO: 3231548 - RNA, 12 nt, Human
agauaaaugugc

SEQ ID NO: 3231549 - RNA, 12 nt, Human
agauacucuggg

SEQ ID NO: 3231550 - RNA, 23 nt, Human
agauacuacugaccagacaagcu

SEQ ID NO: 3231551 - RNA, 21 nt, Human
agauacuacugaccagacaag

SEQ ID NO: 3231552 - RNA, 16 nt, Human
agauaaaugauucaaa

SEQ ID NO: 3231553 - RNA, 16 nt, Human
agaucacgccacugca

SEQ ID NO: 3231554 - RNA, 15 nt, Human
agaucacgccacugc

SEQ ID NO: 3231555 - RNA, 14 nt, Human
agaucacgccacug

SEQ ID NO: 3231556 - RNA, 18 nt, Human
agaucacgccacugcacu

SEQ ID NO: 3231557 - RNA, 17 nt, Human
agaucacgccacugcac

SEQ ID NO: 3231558 - RNA, 20 nt, Human
ugacacacagcucuguccug

SEQ ID NO: 3231559 - RNA, 11 nt, Human
ugaauuuucua

SEQ ID NO: 3231560 - RNA, 17 nt, Human
ugaauuuucuaaaagcu

SEQ ID NO: 3231561 - RNA, 22 nt, Human
ugaauuuucuaaaagcuuucau

SEQ ID NO: 3231562 - RNA, 21 nt, Human
ugaauuuucauuuuacaguua

SEQ ID NO: 3231563 - RNA, 19 nt, Human
ugaauuuucauuuuacagu

SEQ ID NO: 3231564 - RNA, 18 nt, Human
ugaauuuucauuuuacag

SEQ ID NO: 3231565 - RNA, 17 nt, Human
ugaauuuucauuuuaca

SEQ ID NO: 3231566 - RNA, 12 nt, Human
ugaauuuucauu

SEQ ID NO: 3231567 - RNA, 11 nt, Human
ugaauuuucau

SEQ ID NO: 3231568 - RNA, 16 nt, Human
ugaauuuucauuuuac

SEQ ID NO: 3231569 - RNA, 15 nt, Human
ugaauuuucauuuua

SEQ ID NO: 3231570 - RNA, 14 nt, Human
ugaauuuucauuuu

SEQ ID NO: 3231571 - RNA, 13 nt, Human
ugaauuuucauuu

SEQ ID NO: 3231572 - RNA, 23 nt, Human
agagucauuguaauguugugaau

SEQ ID NO: 3231573 - RNA, 22 nt, Human
agagucauuguaauguugugaa

SEQ ID NO: 3231574 - RNA, 21 nt, Human
agagucauuguaauguuguga

SEQ ID NO: 3231575 - RNA, 14 nt, Human
agaguccccccacu

SEQ ID NO: 3231576 - RNA, 22 nt, Human
agagucagaaguuucugccgca

SEQ ID NO: 3231577 - RNA, 16 nt, Human
agagucauuguaaugu

SEQ ID NO: 3231578 - RNA, 14 nt, Human
agagucauuguaau

SEQ ID NO: 3231579 - RNA, 20 nt, Human
ugaaugguuuucaaaauaaa

SEQ ID NO: 3231580 - RNA, 19 nt, Human
ugaaugucagugugacuga

SEQ ID NO: 3231581 - RNA, 17 nt, Human
agaguuggcaugacucu

SEQ ID NO: 3231582 - RNA, 22 nt, Human
agagucucacuguugcccaggc

SEQ ID NO: 3231583 - RNA, 18 nt, Human
agaguccccccacuccca

SEQ ID NO: 3231584 - RNA, 15 nt, Human
agaguccccccacuc

SEQ ID NO: 3231585 - RNA, 21 nt, Human
agaguccccccacucccagca

SEQ ID NO: 3231586 - RNA, 22 nt, Human
agagucugagggcuuguaguuc

SEQ ID NO: 3231587 - RNA, 23 nt, Human
agagucugagggcuuguaguucu

SEQ ID NO: 3231588 - RNA, 21 nt, Human
agagucuggggaccagcuugg

SEQ ID NO: 3231589 - RNA, 12 nt, Human
agagucugaggg

SEQ ID NO: 3231590 - RNA, 14 nt, Human
agagucugagggcu

SEQ ID NO: 3231591 - RNA, 21 nt, Human
agagucugagggcuuguaguu

SEQ ID NO: 3231592 - RNA, 22 nt, Human
agaaccccuggcuccaggccag

SEQ ID NO: 3231593 - RNA, 15 nt, Human
agaaugucaguaugu

SEQ ID NO: 3231594 - RNA, 16 nt, Human
agaaugucaguaugug

SEQ ID NO: 3231595 - RNA, 13 nt, Human
agaaugucaguau

SEQ ID NO: 3231596 - RNA, 23 nt, Human
agaaccccaggguccuguagccc

SEQ ID NO: 3231597 - RNA, 21 nt, Human
agaacccauggaaaaaugcca

SEQ ID NO: 3231598 - RNA, 17 nt, Human
agaaugucaguaugugg

SEQ ID NO: 3231599 - RNA, 19 nt, Human
agaaugucaguauguggaa

SEQ ID NO: 3231600 - RNA, 21 nt, Human
agaauguguuuaaacuugguu

SEQ ID NO: 3231601 - RNA, 23 nt, Human
agaauuaacacaugauccugcaa

SEQ ID NO: 3231602 - RNA, 18 nt, Human
agaauuaccauuuguuaa

SEQ ID NO: 3231603 - RNA, 19 nt, Human
agaauuaccauuuguuaau

SEQ ID NO: 3231604 - RNA, 22 nt, Human
agaauuaccauuuguuaauauc

SEQ ID NO: 3231605 - RNA, 23 nt, Human
agaauguugaaacugacuugcug

SEQ ID NO: 3231606 - RNA, 13 nt, Human
agaauguuucauu

SEQ ID NO: 3231607 - RNA, 15 nt, Human
agaauguuucauuug

SEQ ID NO: 3231608 - RNA, 13 nt, Human
ucuggggaccagc

SEQ ID NO: 3231609 - RNA, 23 nt, Human
ucuggguuccuuccucugagccu

SEQ ID NO: 3231610 - RNA, 16 nt, Human
ucuggguuccuuccuc

SEQ ID NO: 3231611 - RNA, 21 nt, Human
ucugguaaucgggguauaaua

SEQ ID NO: 3231612 - RNA, 22 nt, Human
ucuggguuccuuccucugagcc

SEQ ID NO: 3231613 - RNA, 18 nt, Human
ucuggguagcuguaaggc

SEQ ID NO: 3231614 - RNA, 20 nt, Human
agaauuauaauuaguuccuc

SEQ ID NO: 3231615 - RNA, 20 nt, Human
agaauucucagaaucucaaa

SEQ ID NO: 3231616 - RNA, 12 nt, Human
ucuguauuugaa

SEQ ID NO: 3231617 - RNA, 24 nt, Human
ucuguccaggcacugcugcccagc

SEQ ID NO: 3231618 - RNA, 18 nt, Human
ucugucccaguuaacugu

SEQ ID NO: 3231619 - RNA, 14 nt, Human
ucugugaagagcaa

SEQ ID NO: 3231620 - RNA, 11 nt, Human
ucugugaauaa

SEQ ID NO: 3231621 - RNA, 13 nt, Human
ucugugaauaagc

SEQ ID NO: 3231622 - RNA, 12 nt, Human
ucugugaauaag

SEQ ID NO: 3231623 - RNA, 16 nt, Human
ucugugaauaagccau

SEQ ID NO: 3231624 - RNA, 18 nt, Human
ucuguacgucugacaggc

SEQ ID NO: 3231625 - RNA, 14 nt, Human
ucuguaugauucua

SEQ ID NO: 3231626 - RNA, 16 nt, Human
ucuguucugauauuaa

SEQ ID NO: 3231627 - RNA, 23 nt, Human
ucuguucugauauuaauuuauca

SEQ ID NO: 3231628 - RNA, 19 nt, Human
ucuguucugcacacagcac

SEQ ID NO: 3231629 - RNA, 17 nt, Human
ucuguucugcacacagc

SEQ ID NO: 3231630 - RNA, 18 nt, Human
ucuguucugcacacagca

SEQ ID NO: 3231631 - RNA, 13 nt, Human
ucugugcaccugg

SEQ ID NO: 3231632 - RNA, 14 nt, Human
ucugugcaccuggg

SEQ ID NO: 3231633 - RNA, 16 nt, Human
ucugugcaccugggcu

SEQ ID NO: 3231634 - RNA, 13 nt, Human
agacacaagccuu

SEQ ID NO: 3231635 - RNA, 15 nt, Human
agacacacaaagcag

SEQ ID NO: 3231636 - RNA, 14 nt, Human
agacacacaaagca

SEQ ID NO: 3231637 - RNA, 14 nt, Human
agacacaagccuuc

SEQ ID NO: 3231638 - RNA, 17 nt, Human
agaauucucuuauccaa

SEQ ID NO: 3231639 - RNA, 17 nt, Human
agacacaggcccggcuc

SEQ ID NO: 3231640 - RNA, 22 nt, Human
agacacaggcccggcuccaggc

SEQ ID NO: 3231641 - RNA, 21 nt, Human
agacacaggcccggcuccagg

SEQ ID NO: 3231642 - RNA, 20 nt, Human
agacacaggcccggcuccag

SEQ ID NO: 3231643 - RNA, 19 nt, Human
agacacaggcccggcucca

SEQ ID NO: 3231644 - RNA, 22 nt, Human
agacacuuuuucuuuacaaaca

SEQ ID NO: 3231645 - RNA, 13 nt, Human
agacagcugccug

SEQ ID NO: 3231646 - RNA, 14 nt, Human
agacagcugccugg

SEQ ID NO: 3231647 - RNA, 21 nt, Human
agacacauguccaagaagccc

SEQ ID NO: 3231648 - RNA, 22 nt, Human
agacacauguccaagaagccca

SEQ ID NO: 3231649 - RNA, 16 nt, Human
agacacaggcccggcu

SEQ ID NO: 3231650 - RNA, 23 nt, Human
agacacaggcccggcuccaggcu

SEQ ID NO: 3231651 - RNA, 24 nt, Human
agacacauguccaagaagcccagg

SEQ ID NO: 3231652 - RNA, 19 nt, Human
agacaccuugacagggcac

SEQ ID NO: 3231653 - RNA, 22 nt, Human
agacaccuugacagggcacacc

SEQ ID NO: 3231654 - RNA, 20 nt, Human
agacacauguccaagaagcc

SEQ ID NO: 3231655 - RNA, 18 nt, Human
agacacauuaucuucugg

SEQ ID NO: 3231656 - RNA, 19 nt, Human
ucuuacuuuccugaaaaua

SEQ ID NO: 3231657 - RNA, 22 nt, Human
ucuuacugcuuaauucaaauaa

SEQ ID NO: 3231658 - RNA, 13 nt, Human
ucuuacucugccg

SEQ ID NO: 3231659 - RNA, 16 nt, Human
ucuuacauaaaccauu

SEQ ID NO: 3231660 - RNA, 19 nt, Human
ucuuacauaaaccauuuuu

SEQ ID NO: 3231661 - RNA, 15 nt, Human
ucuuaccgacaagca

SEQ ID NO: 3231662 - RNA, 20 nt, Human
ucuuaccuugaacugaaggc

SEQ ID NO: 3231663 - RNA, 22 nt, Human
ucuuaccgacaagcacagucag

SEQ ID NO: 3231664 - RNA, 17 nt, Human
ucuuaccgacaagcaca

SEQ ID NO: 3231665 - RNA, 18 nt, Human
ucuuacuuuguaaauucu

SEQ ID NO: 3231666 - RNA, 20 nt, Human
ucuuacuuuguaaauucuga

SEQ ID NO: 3231667 - RNA, 22 nt, Human
ucuuacuuuguaaauucugauu

SEQ ID NO: 3231668 - RNA, 15 nt, Human
ucuuagaaaagguga

SEQ ID NO: 3231669 - RNA, 11 nt, Human
ucuuacuuugu

SEQ ID NO: 3231670 - RNA, 13 nt, Human
ucuuacuuuguaa

SEQ ID NO: 3231671 - RNA, 14 nt, Human
ucuuacuuuguaaa

SEQ ID NO: 3231672 - RNA, 15 nt, Human
ucuuacuuuguaaau

SEQ ID NO: 3231673 - RNA, 16 nt, Human
ucuuacuuuguaaauu

SEQ ID NO: 3231674 - RNA, 17 nt, Human
ucuuacuuuguaaauuc

SEQ ID NO: 3231675 - RNA, 12 nt, Human
ucuuagauguau

SEQ ID NO: 3231676 - RNA, 18 nt, Human
ucuuaugggcuggguucu

SEQ ID NO: 3231677 - RNA, 22 nt, Human
ucuuagaaaaggugauaaaauc

SEQ ID NO: 3231678 - RNA, 20 nt, Human
ucuuagaaaaggugauaaaa

SEQ ID NO: 3231679 - RNA, 22 nt, Human
ucuuauuaguuccccaaauaca

SEQ ID NO: 3231680 - RNA, 22 nt, Human
ucuuauuaaaguuucaaaaauc

SEQ ID NO: 3231681 - RNA, 21 nt, Human
ucuuauuaaaguuucaaaaau

SEQ ID NO: 3231682 - RNA, 20 nt, Human
ucuuauuaaaguuucaaaaa

SEQ ID NO: 3231683 - RNA, 19 nt, Human
ucuuauuaaaguuucaaaa

SEQ ID NO: 3231684 - RNA, 14 nt, Human
ucuuauuaaaacac

SEQ ID NO: 3231685 - RNA, 14 nt, Human
ucuuauuaaaguuu

SEQ ID NO: 3231686 - RNA, 12 nt, Human
ucuuauuaaagu

SEQ ID NO: 3231687 - RNA, 18 nt, Human
ucuuauuaaaguuucaaa

SEQ ID NO: 3231688 - RNA, 17 nt, Human
ucuuauuaaaguuucaa

SEQ ID NO: 3231689 - RNA, 16 nt, Human
ucuuauuaaaguuuca

SEQ ID NO: 3231690 - RNA, 15 nt, Human
ucuuauuaaaguuuc

SEQ ID NO: 3231691 - RNA, 12 nt, Human
agacagucccug

SEQ ID NO: 3231692 - RNA, 18 nt, Human
agacagucacaaauuucu

SEQ ID NO: 3231693 - RNA, 15 nt, Human
agacagucacaaauu

SEQ ID NO: 3231694 - RNA, 15 nt, Human
agacagcugccuggg

SEQ ID NO: 3231695 - RNA, 13 nt, Human
agacagucccugc

SEQ ID NO: 3231696 - RNA, 19 nt, Human
agacagucccugccaaugg

SEQ ID NO: 3231697 - RNA, 14 nt, Human
agacagugaauuug

SEQ ID NO: 3231698 - RNA, 12 nt, Human
ucuuaauuugga

SEQ ID NO: 3231699 - RNA, 13 nt, Human
ucuuaauuuggaa

SEQ ID NO: 3231700 - RNA, 16 nt, Human
ucuuaauuuggaaacu

SEQ ID NO: 3231701 - RNA, 17 nt, Human
ucuuaauuuggaaacua

SEQ ID NO: 3231702 - RNA, 18 nt, Human
ucuuaauuuggaaacuaa

SEQ ID NO: 3231703 - RNA, 19 nt, Human
ucuuaauuuggaaacuaau

SEQ ID NO: 3231704 - RNA, 22 nt, Human
ucuuaauuuggaaacuaauaaa

SEQ ID NO: 3231705 - RNA, 19 nt, Human
ucuuaauggaugaaaucau

SEQ ID NO: 3231706 - RNA, 18 nt, Human
ucuuaauggaugaaauca

SEQ ID NO: 3231707 - RNA, 21 nt, Human
agacauuugcuaugagcuggg

SEQ ID NO: 3231708 - RNA, 20 nt, Human
ucuucuguacgucugacagg

SEQ ID NO: 3231709 - RNA, 22 nt, Human
ucuucuuauacagauaaaacau

SEQ ID NO: 3231710 - RNA, 13 nt, Human
ucuucuucaaacc

SEQ ID NO: 3231711 - RNA, 18 nt, Human
ucuucuuccacacaugca

SEQ ID NO: 3231712 - RNA, 15 nt, Human
ucuucuucaaaccuu

SEQ ID NO: 3231713 - RNA, 16 nt, Human
ucuuauuucauuucuu

SEQ ID NO: 3231714 - RNA, 20 nt, Human
ucuucugagcuuacguaguu

SEQ ID NO: 3231715 - RNA, 15 nt, Human
ucuuauuucauuucu

SEQ ID NO: 3231716 - RNA, 17 nt, Human
ucuuauuuaaugaaaga

SEQ ID NO: 3231717 - RNA, 19 nt, Human
ucuuauuccauauuagaaa

SEQ ID NO: 3231718 - RNA, 18 nt, Human
ucuuauuccauauuagaa

SEQ ID NO: 3231719 - RNA, 14 nt, Human
ucuuauuccauauu

SEQ ID NO: 3231720 - RNA, 22 nt, Human
ucuucuguacgucugacaggca

SEQ ID NO: 3231721 - RNA, 21 nt, Human
ucuucuguacgucugacaggc

SEQ ID NO: 3231722 - RNA, 12 nt, Human
ucuucuggaaug

SEQ ID NO: 3231723 - RNA, 19 nt, Human
ucuucugcuucagccuccc

SEQ ID NO: 3231724 - RNA, 23 nt, Human
ucuucugcuuuguugugugccuc

SEQ ID NO: 3231725 - RNA, 21 nt, Human
ucuucugcuuuguugugugcc

SEQ ID NO: 3231726 - RNA, 13 nt, Human
ucuucugcuuugu

SEQ ID NO: 3231727 - RNA, 12 nt, Human
ucuucugcuuug

SEQ ID NO: 3231728 - RNA, 22 nt, Human
ucuucugcuucagccucccgag

SEQ ID NO: 3231729 - RNA, 22 nt, Human
ucuucugagcuuacguaguucu

SEQ ID NO: 3231730 - RNA, 20 nt, Human
ucuucugaguggcuaaaacu

SEQ ID NO: 3231731 - RNA, 19 nt, Human
ucuucugaucacugaaaua

SEQ ID NO: 3231732 - RNA, 21 nt, Human
ucuucugaguggcuaaaacuu

SEQ ID NO: 3231733 - RNA, 23 nt, Human
agacuauucaaacagucucagga

SEQ ID NO: 3231734 - RNA, 22 nt, Human
agaccugccccuccucucugcc

SEQ ID NO: 3231735 - RNA, 23 nt, Human
agaccugccccuccucucugccc

SEQ ID NO: 3231736 - RNA, 16 nt, Human
agaccugccccuccuc

SEQ ID NO: 3231737 - RNA, 13 nt, Human
agaccugccccuc

SEQ ID NO: 3231738 - RNA, 21 nt, Human
agacucaguggggaggggcug

SEQ ID NO: 3231739 - RNA, 18 nt, Human
agaccgugaagauacuuu

SEQ ID NO: 3231740 - RNA, 14 nt, Human
agacccggcugcgu

SEQ ID NO: 3231741 - RNA, 21 nt, Human
agaccccuggcuuuucacugc

SEQ ID NO: 3231742 - RNA, 14 nt, Human
agaccccuggcuuu

SEQ ID NO: 3231743 - RNA, 15 nt, Human
agaccccuggcuuuu

SEQ ID NO: 3231744 - RNA, 18 nt, Human
agaccaaacagugcuguu

SEQ ID NO: 3231745 - RNA, 16 nt, Human
agaccaaacagugcug

SEQ ID NO: 3231746 - RNA, 17 nt, Human
agaccaaauggaaacag

SEQ ID NO: 3231747 - RNA, 17 nt, Human
agaccgaacuguuguau

SEQ ID NO: 3231748 - RNA, 20 nt, Human
agaccgaacuguuguauaaa

SEQ ID NO: 3231749 - RNA, 13 nt, Human
agaccgucuuccu

SEQ ID NO: 3231750 - RNA, 14 nt, Human
agaccgucuuccuc

SEQ ID NO: 3231751 - RNA, 15 nt, Human
agaccgucuuccucc

SEQ ID NO: 3231752 - RNA, 16 nt, Human
agaccgucuuccucca

SEQ ID NO: 3231753 - RNA, 18 nt, Human
agaccgucuuccuccaac

SEQ ID NO: 3231754 - RNA, 22 nt, Human
ucuuuaaugucacaggcagguc

SEQ ID NO: 3231755 - RNA, 19 nt, Human
ucuuuaaugucacaggcag

SEQ ID NO: 3231756 - RNA, 17 nt, Human
ucuuuaggucuuugccu

SEQ ID NO: 3231757 - RNA, 20 nt, Human
ucuuuaauuaaaaccuggga

SEQ ID NO: 3231758 - RNA, 14 nt, Human
ucuuuaauuaaaac

SEQ ID NO: 3231759 - RNA, 20 nt, Human
ucuuuaaugucacaggcagg

SEQ ID NO: 3231760 - RNA, 13 nt, Human
ucuugguuccagc

SEQ ID NO: 3231761 - RNA, 17 nt, Human
ucuugaucaguaguuug

SEQ ID NO: 3231762 - RNA, 21 nt, Human
ucuugauaauuuuccuuuaau

SEQ ID NO: 3231763 - RNA, 19 nt, Human
ucuugguuccagccugcca

SEQ ID NO: 3231764 - RNA, 18 nt, Human
ucuugguuccagccugcc

SEQ ID NO: 3231765 - RNA, 17 nt, Human
ucuugguuccagccugc

SEQ ID NO: 3231766 - RNA, 14 nt, Human
ucuuucuuccucug

SEQ ID NO: 3231767 - RNA, 20 nt, Human
ucuuuauaauucuacuuuga

SEQ ID NO: 3231768 - RNA, 13 nt, Human
ucuuucugcuuug

SEQ ID NO: 3231769 - RNA, 15 nt, Human
agacucgcgacaaug

SEQ ID NO: 3231770 - RNA, 17 nt, Human
agacucgcgacaaugca

SEQ ID NO: 3231771 - RNA, 18 nt, Human
agacucgcgacaaugcaa

SEQ ID NO: 3231772 - RNA, 19 nt, Human
agacucgcgacaaugcaaa

SEQ ID NO: 3231773 - RNA, 23 nt, Human
agacuccugcaggcagccaggcc

SEQ ID NO: 3231774 - RNA, 17 nt, Human
ucuuucuuccucugcug

SEQ ID NO: 3231775 - RNA, 16 nt, Human
ucuuucuuccucugcu

SEQ ID NO: 3231776 - RNA, 15 nt, Human
ucuuucuuccucugc

SEQ ID NO: 3231777 - RNA, 21 nt, Human
agacuuaaagggcccaaugaa

SEQ ID NO: 3231778 - RNA, 20 nt, Human
agacucgcgacaaugcaaac

SEQ ID NO: 3231779 - RNA, 14 nt, Human
agacuguacaaagu

SEQ ID NO: 3231780 - RNA, 16 nt, Human
agacuguacaaaguag

SEQ ID NO: 3231781 - RNA, 15 nt, Human
agacuguacaaagua

SEQ ID NO: 3231782 - RNA, 14 nt, Human
agagaaaaaagcca

SEQ ID NO: 3231783 - RNA, 14 nt, Human
agagaauguauuug

SEQ ID NO: 3231784 - RNA, 14 nt, Human
agagacaaguaauu

SEQ ID NO: 3231785 - RNA, 15 nt, Human
agagacaaguaauuu

SEQ ID NO: 3231786 - RNA, 19 nt, Human
agagacaaguaauuucagu

SEQ ID NO: 3231787 - RNA, 20 nt, Human
agagacaaguaauuucagug

SEQ ID NO: 3231788 - RNA, 15 nt, Human
agagaauuaaacgaa

SEQ ID NO: 3231789 - RNA, 24 nt, Human
agagacagaaagcagaacagugau

SEQ ID NO: 3231790 - RNA, 15 nt, Human
agagacagaaagcag

SEQ ID NO: 3231791 - RNA, 19 nt, Human
agagacaauagcauuagaa

SEQ ID NO: 3231792 - RNA, 19 nt, Human
agacuuuucuuucagccaa

SEQ ID NO: 3231793 - RNA, 17 nt, Human
agacuuuagcuuucuga

SEQ ID NO: 3231794 - RNA, 22 nt, Human
agagaaaaaauauuuuccugcc

SEQ ID NO: 3231795 - RNA, 19 nt, Human
agacuuuuuuuaaauagua

SEQ ID NO: 3231796 - RNA, 18 nt, Human
agacuuguaugaaagaug

SEQ ID NO: 3231797 - RNA, 16 nt, Human
agacuuguauauucua

SEQ ID NO: 3231798 - RNA, 21 nt, Human
agacuuguauauucuauuuua

SEQ ID NO: 3231799 - RNA, 18 nt, Human
agacuuguauauucuauu

SEQ ID NO: 3231800 - RNA, 15 nt, Human
aacacuguucucugc

SEQ ID NO: 3231801 - RNA, 20 nt, Human
aacacuguucucugcccucc

SEQ ID NO: 3231802 - RNA, 21 nt, Human
aacacuguguauuguuguaaa

SEQ ID NO: 3231803 - RNA, 17 nt, Human
aacacucauugaccuga

SEQ ID NO: 3231804 - RNA, 21 nt, Human
aacacucauugaccugaggcc

SEQ ID NO: 3231805 - RNA, 12 nt, Human
aacacuccuuca

SEQ ID NO: 3231806 - RNA, 11 nt, Human
aacacucugag

SEQ ID NO: 3231807 - RNA, 12 nt, Human
aacacucugaga

SEQ ID NO: 3231808 - RNA, 13 nt, Human
aacacucugagac

SEQ ID NO: 3231809 - RNA, 14 nt, Human
aacacucugagacu

SEQ ID NO: 3231810 - RNA, 22 nt, Human
guccaagggguccccuccagga

SEQ ID NO: 3231811 - RNA, 20 nt, Human
guccaagggguccccuccag

SEQ ID NO: 3231812 - RNA, 15 nt, Human
guccacaacacacag

SEQ ID NO: 3231813 - RNA, 16 nt, Human
guccauuuuuacaagu

SEQ ID NO: 3231814 - RNA, 23 nt, Human
guccauuuuuacaaguuauagua

SEQ ID NO: 3231815 - RNA, 24 nt, Human
guccaagcauaccaacacgagcag

SEQ ID NO: 3231816 - RNA, 13 nt, Human
guccaagcagauu

SEQ ID NO: 3231817 - RNA, 11 nt, Human
gucauuuucau

SEQ ID NO: 3231818 - RNA, 19 nt, Human
gucauuugagcagggcuca

SEQ ID NO: 3231819 - RNA, 16 nt, Human
aacacuugugacuuuu

SEQ ID NO: 3231820 - RNA, 21 nt, Human
aacacuugugacuuuugcuuu

SEQ ID NO: 3231821 - RNA, 22 nt, Human
gucauuugagcagggcucagcg

SEQ ID NO: 3231822 - RNA, 21 nt, Human
gucauuugagcagggcucagc

SEQ ID NO: 3231823 - RNA, 11 nt, Human
aacacuuccau

SEQ ID NO: 3231824 - RNA, 21 nt, Human
aacacuguucucugcccucca

SEQ ID NO: 3231825 - RNA, 21 nt, Human
aacacuguuaucauuuuuucc

SEQ ID NO: 3231826 - RNA, 18 nt, Human
aacacuguuaucauuuuu

SEQ ID NO: 3231827 - RNA, 12 nt, Human
aacacuguuauc

SEQ ID NO: 3231828 - RNA, 17 nt, Human
aacaaugccuauuguaa

SEQ ID NO: 3231829 - RNA, 18 nt, Human
aacaaugccuauuguaau

SEQ ID NO: 3231830 - RNA, 23 nt, Human
aacaaugccuauuguaauauaga

SEQ ID NO: 3231831 - RNA, 14 nt, Human
aacaauuuucagau

SEQ ID NO: 3231832 - RNA, 23 nt, Human
aacaauuuucagauuugcacaaa

SEQ ID NO: 3231833 - RNA, 22 nt, Human
aacaauuuucagauuugcacaa

SEQ ID NO: 3231834 - RNA, 21 nt, Human
aacaauuuucagauuugcaca

SEQ ID NO: 3231835 - RNA, 20 nt, Human
aacaauuuucagauuugcac

SEQ ID NO: 3231836 - RNA, 19 nt, Human
aacaauuuucagauuugca

SEQ ID NO: 3231837 - RNA, 18 nt, Human
aacaauuuucagauuugc

SEQ ID NO: 3231838 - RNA, 17 nt, Human
aacaauuuucagauuug

SEQ ID NO: 3231839 - RNA, 16 nt, Human
aacaauuuucagauuu

SEQ ID NO: 3231840 - RNA, 23 nt, Human
aacaaggcaaggcugucaauuac

SEQ ID NO: 3231841 - RNA, 16 nt, Human
aacaaggcuugcugca

SEQ ID NO: 3231842 - RNA, 15 nt, Human
aacaauaaagcaaua

SEQ ID NO: 3231843 - RNA, 23 nt, Human
aacaauaggaugggcuucugugc

SEQ ID NO: 3231844 - RNA, 19 nt, Human
aaauuuuucauauuuuaau

SEQ ID NO: 3231845 - RNA, 17 nt, Human
aaauuuuucauauuuua

SEQ ID NO: 3231846 - RNA, 16 nt, Human
aaauuuuucauauuuu

SEQ ID NO: 3231847 - RNA, 15 nt, Human
aaauuuuucauauuu

SEQ ID NO: 3231848 - RNA, 12 nt, Human
aaauuuuucaua

SEQ ID NO: 3231849 - RNA, 14 nt, Human
aaauuuuucauauu

SEQ ID NO: 3231850 - RNA, 13 nt, Human
aaauuuuucauau

SEQ ID NO: 3231851 - RNA, 15 nt, Human
gucacaggcaggucc

SEQ ID NO: 3231852 - RNA, 13 nt, Human
gucacaggcaggu

SEQ ID NO: 3231853 - RNA, 16 nt, Human
gucacaggcaggucca

SEQ ID NO: 3231854 - RNA, 12 nt, Human
gucacaggcagg

SEQ ID NO: 3231855 - RNA, 14 nt, Human
aacauuucauaauu

SEQ ID NO: 3231856 - RNA, 15 nt, Human
aacauuuauauguag

SEQ ID NO: 3231857 - RNA, 16 nt, Human
aacauuguagccucaa

SEQ ID NO: 3231858 - RNA, 22 nt, Human
aacauuguccccaaugaauaua

SEQ ID NO: 3231859 - RNA, 14 nt, Human
aacauuguagccuc

SEQ ID NO: 3231860 - RNA, 21 nt, Human
aacauugcauauaacuuauau

SEQ ID NO: 3231861 - RNA, 20 nt, Human
aacauugcauauaacuuaua

SEQ ID NO: 3231862 - RNA, 14 nt, Human
aacauacucccauc

SEQ ID NO: 3231863 - RNA, 15 nt, Human
aacauacucccaucu

SEQ ID NO: 3231864 - RNA, 22 nt, Human
aacauacaaaugcaucuuugau

SEQ ID NO: 3231865 - RNA, 14 nt, Human
aacauacaaaugca

SEQ ID NO: 3231866 - RNA, 15 nt, Human
aacauacaaaugcau

SEQ ID NO: 3231867 - RNA, 20 nt, Human
aacauacaaaugcaucuuug

SEQ ID NO: 3231868 - RNA, 21 nt, Human
aacauacaaaugcaucuuuga

SEQ ID NO: 3231869 - RNA, 15 nt, Human
aacauucuauuucaa

SEQ ID NO: 3231870 - RNA, 18 nt, Human
aacauucuccuguggaag

SEQ ID NO: 3231871 - RNA, 14 nt, Human
aacauucuauuuca

SEQ ID NO: 3231872 - RNA, 21 nt, Human
aacauacgugugcaugugucu

SEQ ID NO: 3231873 - RNA, 18 nt, Human
guccucuuaacuguggug

SEQ ID NO: 3231874 - RNA, 18 nt, Human
guccuuaucuagcugcau

SEQ ID NO: 3231875 - RNA, 17 nt, Human
guccuuaucuagcugca

SEQ ID NO: 3231876 - RNA, 16 nt, Human
guccuuaucuagcugc

SEQ ID NO: 3231877 - RNA, 22 nt, Human
aacaguuuaugcagugcugcuu

SEQ ID NO: 3231878 - RNA, 23 nt, Human
aacaguuuaugcagugcugcuuu

SEQ ID NO: 3231879 - RNA, 13 nt, Human
aacaguuucaaaa

SEQ ID NO: 3231880 - RNA, 21 nt, Human
aacaguacccugguugugugu

SEQ ID NO: 3231881 - RNA, 14 nt, Human
aacaguaaucaguu

SEQ ID NO: 3231882 - RNA, 15 nt, Human
aacagugcuguuucc

SEQ ID NO: 3231883 - RNA, 20 nt, Human
aacaguguggccucuucuga

SEQ ID NO: 3231884 - RNA, 22 nt, Human
aacaguagugauaguuguaccg

SEQ ID NO: 3231885 - RNA, 23 nt, Human
aacaggcugggcuucaguggcag

SEQ ID NO: 3231886 - RNA, 19 nt, Human
aacagguuuuccugaagaa

SEQ ID NO: 3231887 - RNA, 13 nt, Human
aacaggcugggcu

SEQ ID NO: 3231888 - RNA, 22 nt, Human
aacaggcugggcuucaguggca

SEQ ID NO: 3231889 - RNA, 19 nt, Human
aacagacuggaagcacagc

SEQ ID NO: 3231890 - RNA, 12 nt, Human
aacagaaauugg

SEQ ID NO: 3231891 - RNA, 14 nt, Human
aacagaaauuggua

SEQ ID NO: 3231892 - RNA, 13 nt, Human
aacagaaauuggu

SEQ ID NO: 3231893 - RNA, 22 nt, Human
aacagaaauugguaccuugcac

SEQ ID NO: 3231894 - RNA, 15 nt, Human
aacagaaauugguac

SEQ ID NO: 3231895 - RNA, 22 nt, Human
aacacuugugacuuuugcuuua

SEQ ID NO: 3231896 - RNA, 23 nt, Human
aacacuugugacuuuugcuuuaa

SEQ ID NO: 3231897 - RNA, 14 nt, Human
aacacuuuaauggg

SEQ ID NO: 3231898 - RNA, 13 nt, Human
guccgagcuuuga

SEQ ID NO: 3231899 - RNA, 15 nt, Human
gucccaacuuguaaa

SEQ ID NO: 3231900 - RNA, 19 nt, Human
aaccaaagcgaauuuuaaa

SEQ ID NO: 3231901 - RNA, 22 nt, Human
aaccaaaaguuauuaaaauugu

SEQ ID NO: 3231902 - RNA, 20 nt, Human
aaccaaaaguuauuaaaauu

SEQ ID NO: 3231903 - RNA, 18 nt, Human
aaccacaucuugcucugc

SEQ ID NO: 3231904 - RNA, 16 nt, Human
aaccacaaaacucauc

SEQ ID NO: 3231905 - RNA, 21 nt, Human
aaccaucauugaaaucuuuuu

SEQ ID NO: 3231906 - RNA, 19 nt, Human
aaccaucauugaaaucuuu

SEQ ID NO: 3231907 - RNA, 20 nt, Human
aaccaucauugaaaucuuuu

SEQ ID NO: 3231908 - RNA, 22 nt, Human
aaccacaucuugcucugcugac

SEQ ID NO: 3231909 - RNA, 20 nt, Human
aaccacaucuugcucugcug

SEQ ID NO: 3231910 - RNA, 16 nt, Human
gucucccucccuuggg

SEQ ID NO: 3231911 - RNA, 20 nt, Human
gucuccgaaaugcugucuuu

SEQ ID NO: 3231912 - RNA, 16 nt, Human
gucuccuacugaggau

SEQ ID NO: 3231913 - RNA, 16 nt, Human
aacauuuugucauaua

SEQ ID NO: 3231914 - RNA, 14 nt, Human
aaccaaaaagaaaa

SEQ ID NO: 3231915 - RNA, 20 nt, Human
gucuccucuauccugggcuu

SEQ ID NO: 3231916 - RNA, 15 nt, Human
gucuccucaggacca

SEQ ID NO: 3231917 - RNA, 14 nt, Human
gucuccucaggacc

SEQ ID NO: 3231918 - RNA, 22 nt, Human
gucucccccacccuuguuccag

SEQ ID NO: 3231919 - RNA, 20 nt, Human
gucucccccacccuuguucc

SEQ ID NO: 3231920 - RNA, 18 nt, Human
gucucccccacccuuguu

SEQ ID NO: 3231921 - RNA, 13 nt, Human
gucuccauguuug

SEQ ID NO: 3231922 - RNA, 19 nt, Human
gucucccauaugcagaaau

SEQ ID NO: 3231923 - RNA, 19 nt, Human
gucucaugcuccuuaaugg

SEQ ID NO: 3231924 - RNA, 18 nt, Human
gucucauagguuaaaaaa

SEQ ID NO: 3231925 - RNA, 22 nt, Human
gucucauaguuggacuuucuag

SEQ ID NO: 3231926 - RNA, 14 nt, Human
aaccuccugggcua

SEQ ID NO: 3231927 - RNA, 17 nt, Human
aaccuccgccucuuggg

SEQ ID NO: 3231928 - RNA, 12 nt, Human
aacccccagcuc

SEQ ID NO: 3231929 - RNA, 20 nt, Human
aaccuaguuaaagaaaggaa

SEQ ID NO: 3231930 - RNA, 21 nt, Human
aaccuaguuaaagaaaggaaa

SEQ ID NO: 3231931 - RNA, 22 nt, Human
aaccuaguuaaagaaaggaaaa

SEQ ID NO: 3231932 - RNA, 15 nt, Human
aacccccagccugcu

SEQ ID NO: 3231933 - RNA, 14 nt, Human
aacccccagccugc

SEQ ID NO: 3231934 - RNA, 13 nt, Human
aacccccagccug

SEQ ID NO: 3231935 - RNA, 20 nt, Human
aacccauauuuguacaccaa

SEQ ID NO: 3231936 - RNA, 17 nt, Human
aacccagcucuggucca

SEQ ID NO: 3231937 - RNA, 15 nt, Human
aacccagcuuacauu

SEQ ID NO: 3231938 - RNA, 23 nt, Human
aacccagcugcaccccuuccugg

SEQ ID NO: 3231939 - RNA, 21 nt, Human
aacccagcugcaccccuuccu

SEQ ID NO: 3231940 - RNA, 16 nt, Human
aacccagcugcacccc

SEQ ID NO: 3231941 - RNA, 15 nt, Human
aacccagcugcaccc

SEQ ID NO: 3231942 - RNA, 11 nt, Human
aacccagcugc

SEQ ID NO: 3231943 - RNA, 18 nt, Human
aacccaaauguucaucaa

SEQ ID NO: 3231944 - RNA, 11 nt, Human
aacccagcucu

SEQ ID NO: 3231945 - RNA, 13 nt, Human
aacccagcucugg

SEQ ID NO: 3231946 - RNA, 14 nt, Human
aacccagcucuggu

SEQ ID NO: 3231947 - RNA, 13 nt, Human
aacccaaauguuc

SEQ ID NO: 3231948 - RNA, 23 nt, Human
aaccauuuugcugucccuuuucc

SEQ ID NO: 3231949 - RNA, 14 nt, Human
aaccauuuuuguua

SEQ ID NO: 3231950 - RNA, 22 nt, Human
aaccauuuuuguuacucucuuc

SEQ ID NO: 3231951 - RNA, 13 nt, Human
aacucccuuucaa

SEQ ID NO: 3231952 - RNA, 14 nt, Human
aacucccuuucaac

SEQ ID NO: 3231953 - RNA, 15 nt, Human
gugaacacaucagcu

SEQ ID NO: 3231954 - RNA, 20 nt, Human
aacucuaaguguuugcugca

SEQ ID NO: 3231955 - RNA, 17 nt, Human
aacucuaaguguuugcu

SEQ ID NO: 3231956 - RNA, 19 nt, Human
gugaaccaccacacccagc

SEQ ID NO: 3231957 - RNA, 15 nt, Human
aacuaggcauuugua

SEQ ID NO: 3231958 - RNA, 17 nt, Human
aacuaggcauuuguaaa

SEQ ID NO: 3231959 - RNA, 18 nt, Human
aacuaggcauuuguaaau

SEQ ID NO: 3231960 - RNA, 23 nt, Human
aacuaggcauuuguaaauauuaa

SEQ ID NO: 3231961 - RNA, 23 nt, Human
aacuaggaaggcacuucugccug

SEQ ID NO: 3231962 - RNA, 13 nt, Human
aacucccugcccc

SEQ ID NO: 3231963 - RNA, 19 nt, Human
aacucccugccccccagcc

SEQ ID NO: 3231964 - RNA, 12 nt, Human
aacuccaugaug

SEQ ID NO: 3231965 - RNA, 18 nt, Human
aacuaggaaggcacuucu

SEQ ID NO: 3231966 - RNA, 20 nt, Human
aacuagauuacauucaguug

SEQ ID NO: 3231967 - RNA, 22 nt, Human
aacguggcugcuucaaggaucc

SEQ ID NO: 3231968 - RNA, 16 nt, Human
aacguggcugcuucaa

SEQ ID NO: 3231969 - RNA, 19 nt, Human
aacguggcugcuucaagga

SEQ ID NO: 3231970 - RNA, 15 nt, Human
aacguggcugcuuca

SEQ ID NO: 3231971 - RNA, 20 nt, Human
aaccugcucuccucuugcca

SEQ ID NO: 3231972 - RNA, 15 nt, Human
aaccugcucuccucu

SEQ ID NO: 3231973 - RNA, 11 nt, Human
aaccugcucuc

SEQ ID NO: 3231974 - RNA, 15 nt, Human
aacuaaaguuguacu

SEQ ID NO: 3231975 - RNA, 16 nt, Human
aacuaaaguuguacuu

SEQ ID NO: 3231976 - RNA, 19 nt, Human
aacuaaaguuguacuuuaa

SEQ ID NO: 3231977 - RNA, 17 nt, Human
aacuaaaguuguacuuu

SEQ ID NO: 3231978 - RNA, 22 nt, Human
aacuaauaaaauauuuucugug

SEQ ID NO: 3231979 - RNA, 23 nt, Human
aacuaauaaaauauuuucugugu

SEQ ID NO: 3231980 - RNA, 14 nt, Human
aacuaaauuuuaaa

SEQ ID NO: 3231981 - RNA, 16 nt, Human
aacuaaauuuuaaagc

SEQ ID NO: 3231982 - RNA, 18 nt, Human
aacuaaauuuuaaagcca

SEQ ID NO: 3231983 - RNA, 14 nt, Human
gucuggcugcagag

SEQ ID NO: 3231984 - RNA, 13 nt, Human
gucuggcugcaga

SEQ ID NO: 3231985 - RNA, 12 nt, Human
gucuggcugcag

SEQ ID NO: 3231986 - RNA, 15 nt, Human
gucuggcuucacaga

SEQ ID NO: 3231987 - RNA, 22 nt, Human
gucuuaauuaaaagaauauuuu

SEQ ID NO: 3231988 - RNA, 18 nt, Human
gucuuacauaaaccauuu

SEQ ID NO: 3231989 - RNA, 21 nt, Human
gucuuaauuaaaagaauauuu

SEQ ID NO: 3231990 - RNA, 19 nt, Human
gucuuaauuaaaagaauau

SEQ ID NO: 3231991 - RNA, 20 nt, Human
gucugcuggucacuucuucu

SEQ ID NO: 3231992 - RNA, 18 nt, Human
aaccucuagaauuuuaag

SEQ ID NO: 3231993 - RNA, 20 nt, Human
aaccucugauuuauuuugua

SEQ ID NO: 3231994 - RNA, 12 nt, Human
aaccucuuccuc

SEQ ID NO: 3231995 - RNA, 16 nt, Human
gucugcuccagcucug

SEQ ID NO: 3231996 - RNA, 14 nt, Human
gucugcuccagcuc

SEQ ID NO: 3231997 - RNA, 18 nt, Human
gucugcuccagcucuggc

SEQ ID NO: 3231998 - RNA, 23 nt, Human
gucuuccuauuucagaaguuuaa

SEQ ID NO: 3231999 - RNA, 20 nt, Human
gucuuccuauuucagaaguu

SEQ ID NO: 3232000 - RNA, 18 nt, Human
gucuuccuauuucagaag

SEQ ID NO: 3232001 - RNA, 16 nt, Human
gucuuccuauuucaga

SEQ ID NO: 3232002 - RNA, 22 nt, Human
gucuuccuacucuucucucugc

SEQ ID NO: 3232003 - RNA, 19 nt, Human
gucuuccuacucuucucuc

SEQ ID NO: 3232004 - RNA, 16 nt, Human
gucuuccuacucuucu

SEQ ID NO: 3232005 - RNA, 14 nt, Human
gucuuccuacucuu

SEQ ID NO: 3232006 - RNA, 15 nt, Human
gucuuccuccaaccc

SEQ ID NO: 3232007 - RNA, 15 nt, Human
gucuuagauguauau

SEQ ID NO: 3232008 - RNA, 18 nt, Human
gucuuagaucauaguuuu

SEQ ID NO: 3232009 - RNA, 14 nt, Human
gucuuuggacccug

SEQ ID NO: 3232010 - RNA, 15 nt, Human
gucuuuggacccuga

SEQ ID NO: 3232011 - RNA, 17 nt, Human
gucuuuggacccugagg

SEQ ID NO: 3232012 - RNA, 14 nt, Human
gucuuuucuugcau

SEQ ID NO: 3232013 - RNA, 19 nt, Human
gucuuuucuugcaugaggc

SEQ ID NO: 3232014 - RNA, 24 nt, Human
gucuuuucuugcaugaggcuagug

SEQ ID NO: 3232015 - RNA, 20 nt, Human
gucuuuucuuugccaucucu

SEQ ID NO: 3232016 - RNA, 19 nt, Human
gucuuuucuuugccaucuc

SEQ ID NO: 3232017 - RNA, 16 nt, Human
gucuuugagcucccac

SEQ ID NO: 3232018 - RNA, 15 nt, Human
gucuuuucuuugcca

SEQ ID NO: 3232019 - RNA, 17 nt, Human
gucuuuuccucgcuucu

SEQ ID NO: 3232020 - RNA, 18 nt, Human
guauguggaagugugggu

SEQ ID NO: 3232021 - RNA, 21 nt, Human
guauguggaagugugggucug

SEQ ID NO: 3232022 - RNA, 19 nt, Human
guaugugggggucugugug

SEQ ID NO: 3232023 - RNA, 20 nt, Human
guaugugggggucugugugu

SEQ ID NO: 3232024 - RNA, 16 nt, Human
guauguggaagugugg

SEQ ID NO: 3232025 - RNA, 17 nt, Human
guauguggaaguguggg

SEQ ID NO: 3232026 - RNA, 15 nt, Human
guauguggaagugug

SEQ ID NO: 3232027 - RNA, 15 nt, Human
guaugggagagaaga

SEQ ID NO: 3232028 - RNA, 16 nt, Human
guaugggacuggccuc

SEQ ID NO: 3232029 - RNA, 14 nt, Human
guauucucuuuuca

SEQ ID NO: 3232030 - RNA, 12 nt, Human
guauucucuuuu

SEQ ID NO: 3232031 - RNA, 15 nt, Human
guauucugucuucau

SEQ ID NO: 3232032 - RNA, 18 nt, Human
guauucucuuuucaagaa

SEQ ID NO: 3232033 - RNA, 15 nt, Human
guauucuuauuuaau

SEQ ID NO: 3232034 - RNA, 16 nt, Human
guauugccaaacauua

SEQ ID NO: 3232035 - RNA, 15 nt, Human
guauugccaaacauu

SEQ ID NO: 3232036 - RNA, 16 nt, Human
guaugcacaauuccau

SEQ ID NO: 3232037 - RNA, 15 nt, Human
guaugcaguguagau

SEQ ID NO: 3232038 - RNA, 19 nt, Human
guaugcaguguagauuuua

SEQ ID NO: 3232039 - RNA, 15 nt, Human
guaugcacaauucca

SEQ ID NO: 3232040 - RNA, 23 nt, Human
guaugcaagcaguuucaauaaag

SEQ ID NO: 3232041 - RNA, 18 nt, Human
guaugcaagcaguuucaa

SEQ ID NO: 3232042 - RNA, 15 nt, Human
guaugcaagcaguuu

SEQ ID NO: 3232043 - RNA, 20 nt, Human
guauggaagguggagcguuc

SEQ ID NO: 3232044 - RNA, 14 nt, Human
guaugggagagaag

SEQ ID NO: 3232045 - RNA, 21 nt, Human
guauggcuuuauuuuuuugaa

SEQ ID NO: 3232046 - RNA, 22 nt, Human
guauggcuuuauuuuuuugaac

SEQ ID NO: 3232047 - RNA, 21 nt, Human
guaucccaugagccucagcau

SEQ ID NO: 3232048 - RNA, 19 nt, Human
guaucaaucuuuagaaaag

SEQ ID NO: 3232049 - RNA, 19 nt, Human
guaucaacacacauuuuaa

SEQ ID NO: 3232050 - RNA, 22 nt, Human
guaucagagauguccauuuuua

SEQ ID NO: 3232051 - RNA, 22 nt, Human
guaugaucacggcucacugcag

SEQ ID NO: 3232052 - RNA, 21 nt, Human
guauaaagaauaggacuuguu

SEQ ID NO: 3232053 - RNA, 12 nt, Human
guauaaacuuuu

SEQ ID NO: 3232054 - RNA, 22 nt, Human
guauaaagaauaggacuuguuu

SEQ ID NO: 3232055 - RNA, 18 nt, Human
guauaaaggcauugauau

SEQ ID NO: 3232056 - RNA, 17 nt, Human
guauauucuauuuuaca

SEQ ID NO: 3232057 - RNA, 18 nt, Human
guauauucuauuuuacaa

SEQ ID NO: 3232058 - RNA, 19 nt, Human
guaucaaauacauuuaaaa

SEQ ID NO: 3232059 - RNA, 14 nt, Human
guauauuauaauag

SEQ ID NO: 3232060 - RNA, 12 nt, Human
guauauuauaau

SEQ ID NO: 3232061 - RNA, 22 nt, Human
guauaaauugucuuuaaaaacu

SEQ ID NO: 3232062 - RNA, 23 nt, Human
guauaaauuuauuuacugcuagu

SEQ ID NO: 3232063 - RNA, 14 nt, Human
guauaaauuuauuu

SEQ ID NO: 3232064 - RNA, 13 nt, Human
guauaaauuuauu

SEQ ID NO: 3232065 - RNA, 12 nt, Human
guauaaauuuau

SEQ ID NO: 3232066 - RNA, 17 nt, Human
guaguucuguauuugaa

SEQ ID NO: 3232067 - RNA, 18 nt, Human
guaguucuguauuugaaa

SEQ ID NO: 3232068 - RNA, 20 nt, Human
guaguucuguauuugaaagu

SEQ ID NO: 3232069 - RNA, 14 nt, Human
guaguucuuuaaac

SEQ ID NO: 3232070 - RNA, 16 nt, Human
guaguucuaccggcuu

SEQ ID NO: 3232071 - RNA, 14 nt, Human
guaguucuguauuu

SEQ ID NO: 3232072 - RNA, 15 nt, Human
guaguucuguauuug

SEQ ID NO: 3232073 - RNA, 16 nt, Human
guaguucuguauuuga

SEQ ID NO: 3232074 - RNA, 20 nt, Human
aaauguaauguggcuucugg

SEQ ID NO: 3232075 - RNA, 16 nt, Human
aaauguacauguauua

SEQ ID NO: 3232076 - RNA, 14 nt, Human
aaauguacauguau

SEQ ID NO: 3232077 - RNA, 13 nt, Human
aaauguacaugua

SEQ ID NO: 3232078 - RNA, 12 nt, Human
aaauguacaugu

SEQ ID NO: 3232079 - RNA, 23 nt, Human
aaauguacauguauuaaauuaca

SEQ ID NO: 3232080 - RNA, 17 nt, Human
aaauguacauguauuaa

SEQ ID NO: 3232081 - RNA, 17 nt, Human
aaauguagcuucaguca

SEQ ID NO: 3232082 - RNA, 19 nt, Human
aaauguagcuucagucauu

SEQ ID NO: 3232083 - RNA, 21 nt, Human
aaauguagcuucagucauuaa

SEQ ID NO: 3232084 - RNA, 22 nt, Human
aaauguagcuucagucauuaaa

SEQ ID NO: 3232085 - RNA, 20 nt, Human
guaguucaagaaaugaagag

SEQ ID NO: 3232086 - RNA, 19 nt, Human
guaguucaagaaaugaaga

SEQ ID NO: 3232087 - RNA, 15 nt, Human
guaguucaagaaaug

SEQ ID NO: 3232088 - RNA, 16 nt, Human
aaauguaagggaaacu

SEQ ID NO: 3232089 - RNA, 22 nt, Human
aaauguaagggaaacugccagc

SEQ ID NO: 3232090 - RNA, 15 nt, Human
aaauguuaaagaugu

SEQ ID NO: 3232091 - RNA, 12 nt, Human
aaauguuaaaga

SEQ ID NO: 3232092 - RNA, 24 nt, Human
guauugccaaacauuaauguugau

SEQ ID NO: 3232093 - RNA, 23 nt, Human
guauugccaaacauuaauguuga

SEQ ID NO: 3232094 - RNA, 21 nt, Human
guauugccaaacauuaauguu

SEQ ID NO: 3232095 - RNA, 17 nt, Human
guauugccaaacauuaa

SEQ ID NO: 3232096 - RNA, 19 nt, Human
guauuuaagccuaaagauu

SEQ ID NO: 3232097 - RNA, 17 nt, Human
guauuuaagccuaaaga

SEQ ID NO: 3232098 - RNA, 12 nt, Human
guauuuaagccu

SEQ ID NO: 3232099 - RNA, 20 nt, Human
aaauuacguacuaaggauac

SEQ ID NO: 3232100 - RNA, 14 nt, Human
aaauuacuguguua

SEQ ID NO: 3232101 - RNA, 15 nt, Human
aaauuacuauagcaa

SEQ ID NO: 3232102 - RNA, 19 nt, Human
aaauuacuauagcaaagua

SEQ ID NO: 3232103 - RNA, 23 nt, Human
aaauguuauguauauggugguaa

SEQ ID NO: 3232104 - RNA, 14 nt, Human
aaauguuauguaua

SEQ ID NO: 3232105 - RNA, 13 nt, Human
aaauguuauguau

SEQ ID NO: 3232106 - RNA, 12 nt, Human
aaauguuaugua

SEQ ID NO: 3232107 - RNA, 16 nt, Human
aaauguuaaagaugua

SEQ ID NO: 3232108 - RNA, 21 nt, Human
aaauguuaaagauguagcaaa

SEQ ID NO: 3232109 - RNA, 13 nt, Human
aaauguuaacaau

SEQ ID NO: 3232110 - RNA, 23 nt, Human
aaauguuaacaaugccuauugua

SEQ ID NO: 3232111 - RNA, 20 nt, Human
aaauguuaaguugaugguga

SEQ ID NO: 3232112 - RNA, 18 nt, Human
aaauuauaggagacuugu

SEQ ID NO: 3232113 - RNA, 19 nt, Human
aaauuagauccuaagaugu

SEQ ID NO: 3232114 - RNA, 20 nt, Human
aaauuagauccuaagaugug

SEQ ID NO: 3232115 - RNA, 11 nt, Human
aaauuagaaaa

SEQ ID NO: 3232116 - RNA, 12 nt, Human
aaauuagaaaau

SEQ ID NO: 3232117 - RNA, 13 nt, Human
aaauuagaaaaua

SEQ ID NO: 3232118 - RNA, 15 nt, Human
aaauuagaaaauauu

SEQ ID NO: 3232119 - RNA, 17 nt, Human
aaauuagaaaauauucu

SEQ ID NO: 3232120 - RNA, 19 nt, Human
aaauuagaaaauauucucu

SEQ ID NO: 3232121 - RNA, 12 nt, Human
aaauuauauucc

SEQ ID NO: 3232122 - RNA, 14 nt, Human
aaauucaugcugcu

SEQ ID NO: 3232123 - RNA, 18 nt, Human
aaauucauggcaugcuua

SEQ ID NO: 3232124 - RNA, 21 nt, Human
aaauucauggcaugcuuaaau

SEQ ID NO: 3232125 - RNA, 20 nt, Human
aaauucaguuuuuuuccagu

SEQ ID NO: 3232126 - RNA, 14 nt, Human
aaauucccuaaagc

SEQ ID NO: 3232127 - RNA, 15 nt, Human
aaauucccuaaagcc

SEQ ID NO: 3232128 - RNA, 16 nt, Human
aaauuccccacccuga

SEQ ID NO: 3232129 - RNA, 21 nt, Human
aaauucccuuuucaccuuuuc

SEQ ID NO: 3232130 - RNA, 20 nt, Human
aaauuucgcuucuuagaaca

SEQ ID NO: 3232131 - RNA, 21 nt, Human
aaauuuacuacaauauguaca

SEQ ID NO: 3232132 - RNA, 19 nt, Human
aaauuccucaacaguguuu

SEQ ID NO: 3232133 - RNA, 19 nt, Human
gucaaaguggugagaggca

SEQ ID NO: 3232134 - RNA, 18 nt, Human
gucaaaguggugagaggc

SEQ ID NO: 3232135 - RNA, 17 nt, Human
guauuuuuguauucaau

SEQ ID NO: 3232136 - RNA, 17 nt, Human
guauuuuuuaaugcuaa

SEQ ID NO: 3232137 - RNA, 20 nt, Human
gucacacaguauuacuucug

SEQ ID NO: 3232138 - RNA, 16 nt, Human
gucacacacuuuggcu

SEQ ID NO: 3232139 - RNA, 15 nt, Human
gucacaaauuucucu

SEQ ID NO: 3232140 - RNA, 14 nt, Human
gucaacuacacaaa

SEQ ID NO: 3232141 - RNA, 16 nt, Human
gucaaaugcuagaaaa

SEQ ID NO: 3232142 - RNA, 16 nt, Human
guaggaacugcugggc

SEQ ID NO: 3232143 - RNA, 15 nt, Human
guaggaagacuuugg

SEQ ID NO: 3232144 - RNA, 16 nt, Human
guagcuuaagaaaaaa

SEQ ID NO: 3232145 - RNA, 15 nt, Human
guagcuuaagaaaaa

SEQ ID NO: 3232146 - RNA, 13 nt, Human
guagcuuugcacu

SEQ ID NO: 3232147 - RNA, 11 nt, Human
guagcuuugca

SEQ ID NO: 3232148 - RNA, 18 nt, Human
guaggaagguuaauguuc

SEQ ID NO: 3232149 - RNA, 16 nt, Human
guaggaauauuauauu

SEQ ID NO: 3232150 - RNA, 21 nt, Human
guaggacaaggugcaggcagg

SEQ ID NO: 3232151 - RNA, 20 nt, Human
guaggacaaggugcaggcag

SEQ ID NO: 3232152 - RNA, 21 nt, Human
guaggaauauuauauuuggau

SEQ ID NO: 3232153 - RNA, 20 nt, Human
guaggaauauuauauuugga

SEQ ID NO: 3232154 - RNA, 19 nt, Human
guaggaauauuauauuugg

SEQ ID NO: 3232155 - RNA, 18 nt, Human
guaggaauauuauauuug

SEQ ID NO: 3232156 - RNA, 17 nt, Human
guaggaauauuauauuu

SEQ ID NO: 3232157 - RNA, 13 nt, Human
guaggauuacuag

SEQ ID NO: 3232158 - RNA, 22 nt, Human
guaggauaugccugcucuuugg

SEQ ID NO: 3232159 - RNA, 14 nt, Human
guaggauaugccug

SEQ ID NO: 3232160 - RNA, 18 nt, Human
guaggcaagauggcacag

SEQ ID NO: 3232161 - RNA, 15 nt, Human
guaggaguucuauuu

SEQ ID NO: 3232162 - RNA, 22 nt, Human
guaggcagccugagagucuaga

SEQ ID NO: 3232163 - RNA, 21 nt, Human
guagcugggacuacaggcacc

SEQ ID NO: 3232164 - RNA, 18 nt, Human
guagcugggauuacaggc

SEQ ID NO: 3232165 - RNA, 14 nt, Human
guagcuucagucau

SEQ ID NO: 3232166 - RNA, 16 nt, Human
guagcuucagucauua

SEQ ID NO: 3232167 - RNA, 21 nt, Human
guagcuucagucauuaaauua

SEQ ID NO: 3232168 - RNA, 20 nt, Human
guagcuguaaggcaugaagg

SEQ ID NO: 3232169 - RNA, 19 nt, Human
guagcugggacuacaggca

SEQ ID NO: 3232170 - RNA, 18 nt, Human
guagcugggacuacaggc

SEQ ID NO: 3232171 - RNA, 12 nt, Human
guagcugggacu

SEQ ID NO: 3232172 - RNA, 22 nt, Human
guagcugggaaagcauaaagcu

SEQ ID NO: 3232173 - RNA, 22 nt, Human
guagcucuaggagggcuggcaa

SEQ ID NO: 3232174 - RNA, 16 nt, Human
guagcugcaaaaauaa

SEQ ID NO: 3232175 - RNA, 13 nt, Human
aaaggacugugau

SEQ ID NO: 3232176 - RNA, 24 nt, Human
aaaggaguuucuuuagcugacaga

SEQ ID NO: 3232177 - RNA, 19 nt, Human
aaaggagacuguguuuggu

SEQ ID NO: 3232178 - RNA, 17 nt, Human
aaaugaaaaucgugaca

SEQ ID NO: 3232179 - RNA, 11 nt, Human
aaaugaaaauu

SEQ ID NO: 3232180 - RNA, 16 nt, Human
aaaucuaugauuccag

SEQ ID NO: 3232181 - RNA, 14 nt, Human
aaaucuaugauucc

SEQ ID NO: 3232182 - RNA, 22 nt, Human
aaaucuauagaaaguguucugu

SEQ ID NO: 3232183 - RNA, 13 nt, Human
aaaucuauagaaa

SEQ ID NO: 3232184 - RNA, 19 nt, Human
aaaucuauagaaaguguuc

SEQ ID NO: 3232185 - RNA, 17 nt, Human
aaaucuauagaaagugu

SEQ ID NO: 3232186 - RNA, 15 nt, Human
aaaucuauagaaagu

SEQ ID NO: 3232187 - RNA, 14 nt, Human
aaaucuauagaaag

SEQ ID NO: 3232188 - RNA, 18 nt, Human
aaaucuagaagagucuau

SEQ ID NO: 3232189 - RNA, 19 nt, Human
aaaucuacacuccagugag

SEQ ID NO: 3232190 - RNA, 15 nt, Human
aaaucuaagcugugu

SEQ ID NO: 3232191 - RNA, 15 nt, Human
aaaucuaacauuauu

SEQ ID NO: 3232192 - RNA, 13 nt, Human
aaaucgaugcagu

SEQ ID NO: 3232193 - RNA, 15 nt, Human
aaaucccauuuaaaa

SEQ ID NO: 3232194 - RNA, 18 nt, Human
aaaucccuuaccucggug

SEQ ID NO: 3232195 - RNA, 21 nt, Human
aaaugcaugauugcagaauug

SEQ ID NO: 3232196 - RNA, 18 nt, Human
aaaugcaugauugcagaa

SEQ ID NO: 3232197 - RNA, 18 nt, Human
aaaugcaucuuugaugug

SEQ ID NO: 3232198 - RNA, 19 nt, Human
aaaugcaucuuugaugugu

SEQ ID NO: 3232199 - RNA, 20 nt, Human
aaaugcaucuuugauguguu

SEQ ID NO: 3232200 - RNA, 21 nt, Human
aaaugcaucuuugauguguug

SEQ ID NO: 3232201 - RNA, 15 nt, Human
aaaugcaucuuugau

SEQ ID NO: 3232202 - RNA, 16 nt, Human
aaaugcaucuuugaug

SEQ ID NO: 3232203 - RNA, 14 nt, Human
aaaugcaucuuuga

SEQ ID NO: 3232204 - RNA, 17 nt, Human
aaaugcaguuacaaauu

SEQ ID NO: 3232205 - RNA, 22 nt, Human
aaaugcaaaaaaucuuaauacu

SEQ ID NO: 3232206 - RNA, 20 nt, Human
aaaugcaaaaaaucuuaaua

SEQ ID NO: 3232207 - RNA, 22 nt, Human
aaaugcaaacugggcuggaaga

SEQ ID NO: 3232208 - RNA, 21 nt, Human
aaaugauuuaaauuuaaguaa

SEQ ID NO: 3232209 - RNA, 23 nt, Human
aaaugauugcuuuuaaaauuuua

SEQ ID NO: 3232210 - RNA, 22 nt, Human
aaaugauugcuuuuaaaauuuu

SEQ ID NO: 3232211 - RNA, 20 nt, Human
aaaugauugcuuuuaaaauu

SEQ ID NO: 3232212 - RNA, 17 nt, Human
aaaugauugcuuuuaaa

SEQ ID NO: 3232213 - RNA, 16 nt, Human
aaaugauugcuuuuaa

SEQ ID NO: 3232214 - RNA, 19 nt, Human
aaaugaugugccugcuuca

SEQ ID NO: 3232215 - RNA, 13 nt, Human
aaaugcccagccc

SEQ ID NO: 3232216 - RNA, 13 nt, Human
aaaugcccagcuu

SEQ ID NO: 3232217 - RNA, 18 nt, Human
aaaugcccagccccuucu

SEQ ID NO: 3232218 - RNA, 14 nt, Human
aaaugcccagcccc

SEQ ID NO: 3232219 - RNA, 15 nt, Human
aaaugcccagccccu

SEQ ID NO: 3232220 - RNA, 18 nt, Human
aaaugggcagagcagaga

SEQ ID NO: 3232221 - RNA, 20 nt, Human
aaaugggcagagcagagacc

SEQ ID NO: 3232222 - RNA, 15 nt, Human
aaaugggcagagcag

SEQ ID NO: 3232223 - RNA, 21 nt, Human
aaaugccuccaaaguauugua

SEQ ID NO: 3232224 - RNA, 21 nt, Human
aaauggcuucggacaaaauau

SEQ ID NO: 3232225 - RNA, 23 nt, Human
aaauggcuucggacaaaauaucu

SEQ ID NO: 3232226 - RNA, 13 nt, Human
aaaugagccuggc

SEQ ID NO: 3232227 - RNA, 19 nt, Human
aaaugagccuggcaagaau

SEQ ID NO: 3232228 - RNA, 18 nt, Human
aaaugagcuugauuaaau

SEQ ID NO: 3232229 - RNA, 19 nt, Human
aaaugagcuugauuaaauc

SEQ ID NO: 3232230 - RNA, 9 nt, Human
aaaugaggg

SEQ ID NO: 3232231 - RNA, 22 nt, Human
aaaugaguccaaacuggaauga

SEQ ID NO: 3232232 - RNA, 23 nt, Human
aaaugagguacucuccuggaaau

SEQ ID NO: 3232233 - RNA, 16 nt, Human
aaaugagguacucucc

SEQ ID NO: 3232234 - RNA, 19 nt, Human
aaaugaggucagagccugc

SEQ ID NO: 3232235 - RNA, 17 nt, Human
aaaugaggucagagccu

SEQ ID NO: 3232236 - RNA, 14 nt, Human
aaaugacuuuauua

SEQ ID NO: 3232237 - RNA, 15 nt, Human
aaaugacuuuauuau

SEQ ID NO: 3232238 - RNA, 18 nt, Human
aaaugacuuuauuauuua

SEQ ID NO: 3232239 - RNA, 20 nt, Human
aaaugacuuuauuauuuauu

SEQ ID NO: 3232240 - RNA, 21 nt, Human
aaaugacuuuauuauuuauuu

SEQ ID NO: 3232241 - RNA, 21 nt, Human
aaaugaauaaugccuuuguaa

SEQ ID NO: 3232242 - RNA, 22 nt, Human
aaaugacaccaucuuuuauucu

SEQ ID NO: 3232243 - RNA, 21 nt, Human
aaaugaaagcagggacuugaa

SEQ ID NO: 3232244 - RNA, 22 nt, Human
aaaugaaagcagggacuugaac

SEQ ID NO: 3232245 - RNA, 15 nt, Human
aaaugaaauguaugc

SEQ ID NO: 3232246 - RNA, 14 nt, Human
aaaugaacaucuau

SEQ ID NO: 3232247 - RNA, 18 nt, Human
aaaugaacacaaauuaug

SEQ ID NO: 3232248 - RNA, 16 nt, Human
aaaugaacacaaauua

SEQ ID NO: 3232249 - RNA, 15 nt, Human
aaaugaacacaaauu

SEQ ID NO: 3232250 - RNA, 13 nt, Human
aaaugaacacaaa

SEQ ID NO: 3232251 - RNA, 19 nt, Human
aaaugaagagcuguugaug

SEQ ID NO: 3232252 - RNA, 16 nt, Human
aaaugaagaauuuaaa

SEQ ID NO: 3232253 - RNA, 18 nt, Human
aaaugaagaauuuaaaga

SEQ ID NO: 3232254 - RNA, 13 nt, Human
aaaugaagaauuu

SEQ ID NO: 3232255 - RNA, 15 nt, Human
aaaugaagaauuuaa

SEQ ID NO: 3232256 - RNA, 23 nt, Human
guguuuccuggcacugcuuccag

SEQ ID NO: 3232257 - RNA, 16 nt, Human
guguugugcuuucaag

SEQ ID NO: 3232258 - RNA, 16 nt, Human
guguugcuuauguugu

SEQ ID NO: 3232259 - RNA, 12 nt, Human
guguuggaaaaa

SEQ ID NO: 3232260 - RNA, 17 nt, Human
guguugccacuuuccaa

SEQ ID NO: 3232261 - RNA, 18 nt, Human
guguguaugcgugugugu

SEQ ID NO: 3232262 - RNA, 17 nt, Human
gugucuuuccacuccuc

SEQ ID NO: 3232263 - RNA, 15 nt, Human
gugucuuucuaagaa

SEQ ID NO: 3232264 - RNA, 16 nt, Human
gugucuuucuaagaaa

SEQ ID NO: 3232265 - RNA, 21 nt, Human
gugucuuucuaagaaaucaag

SEQ ID NO: 3232266 - RNA, 15 nt, Human
gugucuuucucuuuu

SEQ ID NO: 3232267 - RNA, 18 nt, Human
gugucuugcaauggcagc

SEQ ID NO: 3232268 - RNA, 17 nt, Human
gugucuugcaauggcag

SEQ ID NO: 3232269 - RNA, 12 nt, Human
aagcaaucaaga

SEQ ID NO: 3232270 - RNA, 14 nt, Human
aagcaauauuguau

SEQ ID NO: 3232271 - RNA, 17 nt, Human
aagcaauauuguauauu

SEQ ID NO: 3232272 - RNA, 14 nt, Human
guguguaauuuaaa

SEQ ID NO: 3232273 - RNA, 13 nt, Human
gugugaggcagga

SEQ ID NO: 3232274 - RNA, 16 nt, Human
guguguagauaguaug

SEQ ID NO: 3232275 - RNA, 21 nt, Human
gugugaccacugcagaagaca

SEQ ID NO: 3232276 - RNA, 17 nt, Human
gugugacuacuccccca

SEQ ID NO: 3232277 - RNA, 18 nt, Human
gugucuuuuuucacuaca

SEQ ID NO: 3232278 - RNA, 17 nt, Human
gugugaaaaugugugug

SEQ ID NO: 3232279 - RNA, 12 nt, Human
gugguuuggaau

SEQ ID NO: 3232280 - RNA, 16 nt, Human
gugguuuguggcuuua

SEQ ID NO: 3232281 - RNA, 21 nt, Human
aagagguuuggcuccugccca

SEQ ID NO: 3232282 - RNA, 14 nt, Human
gugguuuucuguuu

SEQ ID NO: 3232283 - RNA, 16 nt, Human
gugguuuucuguuucu

SEQ ID NO: 3232284 - RNA, 17 nt, Human
gugguuuucuguuucua

SEQ ID NO: 3232285 - RNA, 18 nt, Human
aagagguuuuaaaaaaau

SEQ ID NO: 3232286 - RNA, 19 nt, Human
aagauauacuuguuuuugu

SEQ ID NO: 3232287 - RNA, 16 nt, Human
aagauauacuuguuuu

SEQ ID NO: 3232288 - RNA, 15 nt, Human
aagauauacuuguuu

SEQ ID NO: 3232289 - RNA, 12 nt, Human
aagaugcagccg

SEQ ID NO: 3232290 - RNA, 13 nt, Human
aagauauuccuga

SEQ ID NO: 3232291 - RNA, 19 nt, Human
aagauauuugcaguuuuuc

SEQ ID NO: 3232292 - RNA, 20 nt, Human
aagauauuugcaguuuuuca

SEQ ID NO: 3232293 - RNA, 12 nt, Human
aagauauuuuau

SEQ ID NO: 3232294 - RNA, 21 nt, Human
aagauauacuuguuuuuguaa

SEQ ID NO: 3232295 - RNA, 12 nt, Human
aagcaaaggaga

SEQ ID NO: 3232296 - RNA, 13 nt, Human
aagcaaaggagau

SEQ ID NO: 3232297 - RNA, 22 nt, Human
aagcaagaggcaagcugaaauu

SEQ ID NO: 3232298 - RNA, 23 nt, Human
aagcaagaggcaagcugaaauuu

SEQ ID NO: 3232299 - RNA, 14 nt, Human
aagaugugacaugu

SEQ ID NO: 3232300 - RNA, 18 nt, Human
aagaugugacauguuuua

SEQ ID NO: 3232301 - RNA, 22 nt, Human
aagcaaacugguuauuuaaaau

SEQ ID NO: 3232302 - RNA, 22 nt, Human
aagcaaagacuuuccucuuagu

SEQ ID NO: 3232303 - RNA, 21 nt, Human
aagcaaagcacccauuucaau

SEQ ID NO: 3232304 - RNA, 23 nt, Human
aagaugucucagguuuguuuugu

SEQ ID NO: 3232305 - RNA, 15 nt, Human
guggggggcuucaua

SEQ ID NO: 3232306 - RNA, 20 nt, Human
gugggggccccgucucaggu

SEQ ID NO: 3232307 - RNA, 19 nt, Human
gugggggccccgucucagg

SEQ ID NO: 3232308 - RNA, 16 nt, Human
guggggggcuucauac

SEQ ID NO: 3232309 - RNA, 20 nt, Human
gugggggaucacagccucug

SEQ ID NO: 3232310 - RNA, 21 nt, Human
gugggaguaguuggagcauug

SEQ ID NO: 3232311 - RNA, 14 nt, Human
guggguacgggagg

SEQ ID NO: 3232312 - RNA, 12 nt, Human
guggggggaggc

SEQ ID NO: 3232313 - RNA, 14 nt, Human
gugggggggcagag

SEQ ID NO: 3232314 - RNA, 15 nt, Human
gugggggggcagagc

SEQ ID NO: 3232315 - RNA, 13 nt, Human
gugggucugugug

SEQ ID NO: 3232316 - RNA, 14 nt, Human
gugggucuggagga

SEQ ID NO: 3232317 - RNA, 16 nt, Human
gugggucugugugugu

SEQ ID NO: 3232318 - RNA, 21 nt, Human
guggugggcauucucucucca

SEQ ID NO: 3232319 - RNA, 13 nt, Human
gugggagugugua

SEQ ID NO: 3232320 - RNA, 14 nt, Human
gugggaguguguaa

SEQ ID NO: 3232321 - RNA, 13 nt, Human
gugggagugggcc

SEQ ID NO: 3232322 - RNA, 14 nt, Human
gugggagugggccc

SEQ ID NO: 3232323 - RNA, 23 nt, Human
gugggaggaucucuugagccugg

SEQ ID NO: 3232324 - RNA, 22 nt, Human
gugggacacccugugauggggc

SEQ ID NO: 3232325 - RNA, 22 nt, Human
guggcgcagcauauucaggaag

SEQ ID NO: 3232326 - RNA, 23 nt, Human
guggcgcagcauauucaggaagc

SEQ ID NO: 3232327 - RNA, 17 nt, Human
aagacuguacaaaguag

SEQ ID NO: 3232328 - RNA, 16 nt, Human
aagacuguacaaagua

SEQ ID NO: 3232329 - RNA, 18 nt, Human
aagacuaucuaaauguug

SEQ ID NO: 3232330 - RNA, 17 nt, Human
aagacuaucuaaauguu

SEQ ID NO: 3232331 - RNA, 16 nt, Human
aagacuaucuaaaugu

SEQ ID NO: 3232332 - RNA, 23 nt, Human
aagaccuggggcugcugugaagc

SEQ ID NO: 3232333 - RNA, 18 nt, Human
aagacccuugugguccca

SEQ ID NO: 3232334 - RNA, 21 nt, Human
aagacccuuguggucccaccc

SEQ ID NO: 3232335 - RNA, 22 nt, Human
aagacccuuguggucccacccc

SEQ ID NO: 3232336 - RNA, 22 nt, Human
aagaccuaaccagggccagaag

SEQ ID NO: 3232337 - RNA, 19 nt, Human
aagagcuguucacagccag

SEQ ID NO: 3232338 - RNA, 13 nt, Human
aagagccuuaaaa

SEQ ID NO: 3232339 - RNA, 14 nt, Human
aagagccuuaaaac

SEQ ID NO: 3232340 - RNA, 16 nt, Human
aagagccuuaaaacau

SEQ ID NO: 3232341 - RNA, 12 nt, Human
aagagcuuuccu

SEQ ID NO: 3232342 - RNA, 21 nt, Human
aagagcuuagaaacuggaaau

SEQ ID NO: 3232343 - RNA, 19 nt, Human
aagagcuuagaaacuggaa

SEQ ID NO: 3232344 - RNA, 14 nt, Human
aagagcuuagaaac

SEQ ID NO: 3232345 - RNA, 16 nt, Human
aagagcuuaacagugu

SEQ ID NO: 3232346 - RNA, 13 nt, Human
aagagcuuagaaa

SEQ ID NO: 3232347 - RNA, 17 nt, Human
guggcccgacagccugg

SEQ ID NO: 3232348 - RNA, 22 nt, Human
guggcccgguugaacucacucc

SEQ ID NO: 3232349 - RNA, 19 nt, Human
guggcccgacagccuggca

SEQ ID NO: 3232350 - RNA, 18 nt, Human
guggcccgacagccuggc

SEQ ID NO: 3232351 - RNA, 19 nt, Human
aagaggaaaauauugacaa

SEQ ID NO: 3232352 - RNA, 16 nt, Human
aagaggaaaagaaauc

SEQ ID NO: 3232353 - RNA, 13 nt, Human
aagaggaaaagaa

SEQ ID NO: 3232354 - RNA, 22 nt, Human
aagacuuaaagggcccaaugaa

SEQ ID NO: 3232355 - RNA, 24 nt, Human
aagacuuaaagggcccaaugaauu

SEQ ID NO: 3232356 - RNA, 12 nt, Human
aagacuucaaaa

SEQ ID NO: 3232357 - RNA, 21 nt, Human
aagacuucaaaauauugagca

SEQ ID NO: 3232358 - RNA, 21 nt, Human
aagagauuuaaacucugaauu

SEQ ID NO: 3232359 - RNA, 17 nt, Human
aagagcaaggaagguaa

SEQ ID NO: 3232360 - RNA, 16 nt, Human
gugcucaaaaugcaaa

SEQ ID NO: 3232361 - RNA, 23 nt, Human
gugcuauuguagagccagagguc

SEQ ID NO: 3232362 - RNA, 24 nt, Human
gugcuauuacgaaguucaagauca

SEQ ID NO: 3232363 - RNA, 13 nt, Human
gugcuauuaauau

SEQ ID NO: 3232364 - RNA, 14 nt, Human
gugcuauuaauauu

SEQ ID NO: 3232365 - RNA, 12 nt, Human
gugcuauguucu

SEQ ID NO: 3232366 - RNA, 19 nt, Human
gugcuaucucccccagccc

SEQ ID NO: 3232367 - RNA, 22 nt, Human
gugcuaucucccccagccccau

SEQ ID NO: 3232368 - RNA, 14 nt, Human
guggaagugugggu

SEQ ID NO: 3232369 - RNA, 15 nt, Human
guggaaguguggguc

SEQ ID NO: 3232370 - RNA, 19 nt, Human
guggaagugugggucugug

SEQ ID NO: 3232371 - RNA, 20 nt, Human
guggaagugugggucugugu

SEQ ID NO: 3232372 - RNA, 20 nt, Human
gugcugggauuacaggugug

SEQ ID NO: 3232373 - RNA, 20 nt, Human
gugcugggauuacaggcgug

SEQ ID NO: 3232374 - RNA, 22 nt, Human
gugcugggauuacaagcgugag

SEQ ID NO: 3232375 - RNA, 21 nt, Human
gugcugggauuacaagcguga

SEQ ID NO: 3232376 - RNA, 17 nt, Human
guggacacagcucuucu

SEQ ID NO: 3232377 - RNA, 22 nt, Human
guggacacagcucuucuccagg

SEQ ID NO: 3232378 - RNA, 18 nt, Human
guggacacagcucuucuc

SEQ ID NO: 3232379 - RNA, 15 nt, Human
guggaauuauuuuaa

SEQ ID NO: 3232380 - RNA, 18 nt, Human
guggaauuauuuuaaaag

SEQ ID NO: 3232381 - RNA, 16 nt, Human
guggaauuauuuuaaa

SEQ ID NO: 3232382 - RNA, 21 nt, Human
guggaagugugggucugugug

SEQ ID NO: 3232383 - RNA, 22 nt, Human
guggaagugugggucugugugu

SEQ ID NO: 3232384 - RNA, 20 nt, Human
guggaugccugguggcagcu

SEQ ID NO: 3232385 - RNA, 23 nt, Human
guggacccugaaaugugugugau

SEQ ID NO: 3232386 - RNA, 16 nt, Human
guggacccugaaaugu

SEQ ID NO: 3232387 - RNA, 19 nt, Human
guggacccugaaaugugug

SEQ ID NO: 3232388 - RNA, 18 nt, Human
guggacccugaaaugugu

SEQ ID NO: 3232389 - RNA, 21 nt, Human
guggaugccugguggcagcug

SEQ ID NO: 3232390 - RNA, 21 nt, Human
guggauggaaggggcugacag

SEQ ID NO: 3232391 - RNA, 20 nt, Human
guggcaccugucugcuccag

SEQ ID NO: 3232392 - RNA, 18 nt, Human
guggcaccugucugcucc

SEQ ID NO: 3232393 - RNA, 15 nt, Human
guggcaccugucugc

SEQ ID NO: 3232394 - RNA, 14 nt, Human
guggcaccugucug

SEQ ID NO: 3232395 - RNA, 18 nt, Human
guggcaccagcagccugg

SEQ ID NO: 3232396 - RNA, 14 nt, Human
guggauugcucauc

SEQ ID NO: 3232397 - RNA, 19 nt, Human
guggcaccagcagccugga

SEQ ID NO: 3232398 - RNA, 18 nt, Human
guggauucuuguuuugcu

SEQ ID NO: 3232399 - RNA, 22 nt, Human
guggauucuuguuuugcuuccc

SEQ ID NO: 3232400 - RNA, 23 nt, Human
aagaaugaagguuuuuguaaaga

SEQ ID NO: 3232401 - RNA, 18 nt, Human
aagaaugaagguuuuugu

SEQ ID NO: 3232402 - RNA, 22 nt, Human
aagaaugaagguuuuuguaaag

SEQ ID NO: 3232403 - RNA, 21 nt, Human
aagaaugaagguuuuuguaaa

SEQ ID NO: 3232404 - RNA, 12 nt, Human
aagaaucuacuu

SEQ ID NO: 3232405 - RNA, 13 nt, Human
aagaaucuacuua

SEQ ID NO: 3232406 - RNA, 14 nt, Human
guggcagcucaccu

SEQ ID NO: 3232407 - RNA, 16 nt, Human
guggcagcucaccucu

SEQ ID NO: 3232408 - RNA, 17 nt, Human
guggcagcuauaggaaa

SEQ ID NO: 3232409 - RNA, 20 nt, Human
aagaauugucuuucugucuc

SEQ ID NO: 3232410 - RNA, 17 nt, Human
aagaauugccagucuuu

SEQ ID NO: 3232411 - RNA, 20 nt, Human
aagaauugccagucuuuugu

SEQ ID NO: 3232412 - RNA, 13 nt, Human
aagaauuuaaaga

SEQ ID NO: 3232413 - RNA, 14 nt, Human
aagaauuuaaagaa

SEQ ID NO: 3232414 - RNA, 16 nt, Human
aagaauuuacuuugga

SEQ ID NO: 3232415 - RNA, 13 nt, Human
aagacaaauagua

SEQ ID NO: 3232416 - RNA, 15 nt, Human
aagacccgagcuggg

SEQ ID NO: 3232417 - RNA, 23 nt, Human
aagaccccuuaccacugcucuga

SEQ ID NO: 3232418 - RNA, 21 nt, Human
aagaaugaguuucuuagacuu

SEQ ID NO: 3232419 - RNA, 14 nt, Human
aagaaugaguuucu

SEQ ID NO: 3232420 - RNA, 20 nt, Human
aagaaugcaugcuuuccaua

SEQ ID NO: 3232421 - RNA, 15 nt, Human
aagaaugcaugcuuu

SEQ ID NO: 3232422 - RNA, 16 nt, Human
aagaauugaagcagga

SEQ ID NO: 3232423 - RNA, 13 nt, Human
aagaauguaaagc

SEQ ID NO: 3232424 - RNA, 12 nt, Human
aagaauguaaag

SEQ ID NO: 3232425 - RNA, 17 nt, Human
aacuuggugcuuauuga

SEQ ID NO: 3232426 - RNA, 20 nt, Human
aacuuggugcuuauugauau

SEQ ID NO: 3232427 - RNA, 18 nt, Human
aacuugucuuuggacccu

SEQ ID NO: 3232428 - RNA, 11 nt, Human
gugccuuaugg

SEQ ID NO: 3232429 - RNA, 17 nt, Human
aacuuggcgcugccccu

SEQ ID NO: 3232430 - RNA, 18 nt, Human
gugccuuauguugaaaaa

SEQ ID NO: 3232431 - RNA, 12 nt, Human
aacuugggaacu

SEQ ID NO: 3232432 - RNA, 11 nt, Human
aacuugggagu

SEQ ID NO: 3232433 - RNA, 23 nt, Human
aacuugggagugugguuucuuuu

SEQ ID NO: 3232434 - RNA, 22 nt, Human
aacuugggagugugguuucuuu

SEQ ID NO: 3232435 - RNA, 12 nt, Human
aacuuuaccaug

SEQ ID NO: 3232436 - RNA, 13 nt, Human
aacuuuaaaccug

SEQ ID NO: 3232437 - RNA, 21 nt, Human
aacuuuaaaccuguagaauca

SEQ ID NO: 3232438 - RNA, 13 nt, Human
aacuuguuuucug

SEQ ID NO: 3232439 - RNA, 15 nt, Human
aagaaaaaaaaagaa

SEQ ID NO: 3232440 - RNA, 14 nt, Human
aagaaaaaaaaaga

SEQ ID NO: 3232441 - RNA, 19 nt, Human
aagaaaaaaaaagaaaaaa

SEQ ID NO: 3232442 - RNA, 18 nt, Human
aagaaaaaaaaagaaaaa

SEQ ID NO: 3232443 - RNA, 13 nt, Human
aagaaaaaaaugu

SEQ ID NO: 3232444 - RNA, 20 nt, Human
aagaaaaaaaugucaaaagu

SEQ ID NO: 3232445 - RNA, 21 nt, Human
gugccuuauggaacacucuga

SEQ ID NO: 3232446 - RNA, 23 nt, Human
gugccuuauggaacacucugaga

SEQ ID NO: 3232447 - RNA, 14 nt, Human
gugccuuauggaac

SEQ ID NO: 3232448 - RNA, 15 nt, Human
gugccucugccuguc

SEQ ID NO: 3232449 - RNA, 13 nt, Human
gugccucugggac

SEQ ID NO: 3232450 - RNA, 12 nt, Human
gugccucuggga

SEQ ID NO: 3232451 - RNA, 12 nt, Human
gugccucugccu

SEQ ID NO: 3232452 - RNA, 13 nt, Human
gugccucugccug

SEQ ID NO: 3232453 - RNA, 22 nt, Human
gugccucacauuuuuuucuacc

SEQ ID NO: 3232454 - RNA, 22 nt, Human
gugccgagaaggaagccuccca

SEQ ID NO: 3232455 - RNA, 13 nt, Human
gugccgagcccuu

SEQ ID NO: 3232456 - RNA, 21 nt, Human
gugaaccaccacacccagccc

SEQ ID NO: 3232457 - RNA, 15 nt, Human
gugccucaagagaag

SEQ ID NO: 3232458 - RNA, 12 nt, Human
gugccuaaaaua

SEQ ID NO: 3232459 - RNA, 16 nt, Human
gugccuaaauaaguua

SEQ ID NO: 3232460 - RNA, 17 nt, Human
gugccuaaaauaagaau

SEQ ID NO: 3232461 - RNA, 12 nt, Human
aagaaauaucug

SEQ ID NO: 3232462 - RNA, 20 nt, Human
aagaaauauguauucuguaa

SEQ ID NO: 3232463 - RNA, 15 nt, Human
aagaaauaucuguga

SEQ ID NO: 3232464 - RNA, 17 nt, Human
aagaaauaucugugaaa

SEQ ID NO: 3232465 - RNA, 18 nt, Human
aagaaauaucugugaaau

SEQ ID NO: 3232466 - RNA, 19 nt, Human
aagaaauaucugugaaaua

SEQ ID NO: 3232467 - RNA, 15 nt, Human
aagaaauaguucugu

SEQ ID NO: 3232468 - RNA, 12 nt, Human
aagaaauaauuu

SEQ ID NO: 3232469 - RNA, 13 nt, Human
aagaaauacugua

SEQ ID NO: 3232470 - RNA, 15 nt, Human
aagaaauacuguaca

SEQ ID NO: 3232471 - RNA, 21 nt, Human
aagaaauaauuuuauuccaga

SEQ ID NO: 3232472 - RNA, 22 nt, Human
aagaaagacuaucuaaauguug

SEQ ID NO: 3232473 - RNA, 20 nt, Human
aagaaagacuaucuaaaugu

SEQ ID NO: 3232474 - RNA, 16 nt, Human
aagaaagaacuaucuu

SEQ ID NO: 3232475 - RNA, 17 nt, Human
aagaaacuuguccuucc

SEQ ID NO: 3232476 - RNA, 21 nt, Human
aagaaacucuauggucuuaua

SEQ ID NO: 3232477 - RNA, 19 nt, Human
aagaaacucuauggucuua

SEQ ID NO: 3232478 - RNA, 17 nt, Human
aagaaaaagcaaaaggc

SEQ ID NO: 3232479 - RNA, 18 nt, Human
aagaaaaagaaaaagaaa

SEQ ID NO: 3232480 - RNA, 11 nt, Human
aagaaaaaagu

SEQ ID NO: 3232481 - RNA, 13 nt, Human
aagaaaaagcaaa

SEQ ID NO: 3232482 - RNA, 20 nt, Human
aagaaaaaagagaaaagaaa

SEQ ID NO: 3232483 - RNA, 18 nt, Human
aagaaaaaagagaaaaga

SEQ ID NO: 3232484 - RNA, 23 nt, Human
aagaaaaaaccguguuugucucu

SEQ ID NO: 3232485 - RNA, 16 nt, Human
aagaagugaaaaucua

SEQ ID NO: 3232486 - RNA, 22 nt, Human
aagaagugaaaaucuacacucc

SEQ ID NO: 3232487 - RNA, 16 nt, Human
aagaagcuuuauuucu

SEQ ID NO: 3232488 - RNA, 14 nt, Human
aagaaggaaagaug

SEQ ID NO: 3232489 - RNA, 18 nt, Human
aagaaggaaagaugguua

SEQ ID NO: 3232490 - RNA, 21 nt, Human
gugcuaucucccccagcccca

SEQ ID NO: 3232491 - RNA, 22 nt, Human
gugcuaggaacacuccuucaca

SEQ ID NO: 3232492 - RNA, 17 nt, Human
gugcuaggaacacuccu

SEQ ID NO: 3232493 - RNA, 15 nt, Human
aagaauagggcccau

SEQ ID NO: 3232494 - RNA, 22 nt, Human
aagaauagggcccaugggaggg

SEQ ID NO: 3232495 - RNA, 18 nt, Human
gugcuaggaacacuccuu

SEQ ID NO: 3232496 - RNA, 13 nt, Human
aagaauaggacuu

SEQ ID NO: 3232497 - RNA, 17 nt, Human
aagaauagcuuuaauga

SEQ ID NO: 3232498 - RNA, 22 nt, Human
aagaauaggacuuguuuuuguu

SEQ ID NO: 3232499 - RNA, 21 nt, Human
aagaauaggacuuguuuuugu

SEQ ID NO: 3232500 - RNA, 19 nt, Human
aagaauaggacuuguuuuu

SEQ ID NO: 3232501 - RNA, 17 nt, Human
aagaauaggacuuguuu

SEQ ID NO: 3232502 - RNA, 17 nt, Human
aagaauagcauuguaaa

SEQ ID NO: 3232503 - RNA, 23 nt, Human
aagaauagcauuguaaaagcauu

SEQ ID NO: 3232504 - RNA, 18 nt, Human
aagaauagcauuguaaaa

SEQ ID NO: 3232505 - RNA, 23 nt, Human
aaggcuauggggauagaugugug

SEQ ID NO: 3232506 - RNA, 16 nt, Human
aaggccaaaggaagca

SEQ ID NO: 3232507 - RNA, 22 nt, Human
aaggccaccucuuccuggccgg

SEQ ID NO: 3232508 - RNA, 21 nt, Human
aaggccaccucuuccuggccg

SEQ ID NO: 3232509 - RNA, 20 nt, Human
aaggccaccucuuccuggcc

SEQ ID NO: 3232510 - RNA, 14 nt, Human
aaggccaccucuuc

SEQ ID NO: 3232511 - RNA, 18 nt, Human
aaggccaaaggaagcaca

SEQ ID NO: 3232512 - RNA, 16 nt, Human
guugcccagugugagg

SEQ ID NO: 3232513 - RNA, 17 nt, Human
guugcccaggcuggcgu

SEQ ID NO: 3232514 - RNA, 15 nt, Human
guugcccaggcaggu

SEQ ID NO: 3232515 - RNA, 21 nt, Human
guugcccaggcuggcgugcag

SEQ ID NO: 3232516 - RNA, 18 nt, Human
guugcccaggcaggucuu

SEQ ID NO: 3232517 - RNA, 14 nt, Human
aaggcuccaggagc

SEQ ID NO: 3232518 - RNA, 17 nt, Human
guugcccaggcaggucu

SEQ ID NO: 3232519 - RNA, 15 nt, Human
aaggauccugagcca

SEQ ID NO: 3232520 - RNA, 17 nt, Human
aaggauccugagccaga

SEQ ID NO: 3232521 - RNA, 18 nt, Human
aaggaugaucuaggaaga

SEQ ID NO: 3232522 - RNA, 23 nt, Human
aaggaugaucuaggaagacuuug

SEQ ID NO: 3232523 - RNA, 14 nt, Human
aaggauccugagcc

SEQ ID NO: 3232524 - RNA, 13 nt, Human
aaggauccugagc

SEQ ID NO: 3232525 - RNA, 21 nt, Human
guugaugggaugauugaagaa

SEQ ID NO: 3232526 - RNA, 17 nt, Human
guugaugggaugauuga

SEQ ID NO: 3232527 - RNA, 24 nt, Human
guugaugcaauccuuacaaaugau

SEQ ID NO: 3232528 - RNA, 12 nt, Human
guugaugcaauc

SEQ ID NO: 3232529 - RNA, 23 nt, Human
guugaugaucuuugcagacaggc

SEQ ID NO: 3232530 - RNA, 21 nt, Human
guugaugccugugaacugaac

SEQ ID NO: 3232531 - RNA, 19 nt, Human
aaggaugcccaaagaugca

SEQ ID NO: 3232532 - RNA, 19 nt, Human
aaggaugccccgucccccu

SEQ ID NO: 3232533 - RNA, 18 nt, Human
guuguaucagcacgugug

SEQ ID NO: 3232534 - RNA, 15 nt, Human
guuguagacaaagua

SEQ ID NO: 3232535 - RNA, 14 nt, Human
guuguaugaucugu

SEQ ID NO: 3232536 - RNA, 21 nt, Human
guuguauaaauuuauuuacug

SEQ ID NO: 3232537 - RNA, 19 nt, Human
guuguauaaauuuauuuac

SEQ ID NO: 3232538 - RNA, 17 nt, Human
guuguauaaauuuauuu

SEQ ID NO: 3232539 - RNA, 16 nt, Human
guuguauaaauuuauu

SEQ ID NO: 3232540 - RNA, 12 nt, Human
guuguauucauu

SEQ ID NO: 3232541 - RNA, 20 nt, Human
guuuaaaacuaguuagauuc

SEQ ID NO: 3232542 - RNA, 18 nt, Human
guuguaccgcaaugugac

SEQ ID NO: 3232543 - RNA, 23 nt, Human
guuguaccucuuuugcuugccaa

SEQ ID NO: 3232544 - RNA, 16 nt, Human
guuguagauacaauca

SEQ ID NO: 3232545 - RNA, 18 nt, Human
guuguagauacaaucagc

SEQ ID NO: 3232546 - RNA, 19 nt, Human
guuguagauacaaucagcu

SEQ ID NO: 3232547 - RNA, 21 nt, Human
guuguagauacaaucagcugc

SEQ ID NO: 3232548 - RNA, 13 nt, Human
guuguacuuuaaa

SEQ ID NO: 3232549 - RNA, 18 nt, Human
guuggucccccuuccaug

SEQ ID NO: 3232550 - RNA, 18 nt, Human
guugguauuaauaaaaag

SEQ ID NO: 3232551 - RNA, 13 nt, Human
guuggguggaugc

SEQ ID NO: 3232552 - RNA, 17 nt, Human
guugcugucagucuuga

SEQ ID NO: 3232553 - RNA, 15 nt, Human
guugcugguacacac

SEQ ID NO: 3232554 - RNA, 14 nt, Human
guugcugguacaca

SEQ ID NO: 3232555 - RNA, 12 nt, Human
guugcugccuca

SEQ ID NO: 3232556 - RNA, 12 nt, Human
guugcugguaaa

SEQ ID NO: 3232557 - RNA, 16 nt, Human
guugcugguaaaauga

SEQ ID NO: 3232558 - RNA, 13 nt, Human
guuuaugugugug

SEQ ID NO: 3232559 - RNA, 16 nt, Human
guuuaugugugugugu

SEQ ID NO: 3232560 - RNA, 22 nt, Human
guuuaugugcuauuaauauuug

SEQ ID NO: 3232561 - RNA, 23 nt, Human
guuuaugugcuauuaauauuugu

SEQ ID NO: 3232562 - RNA, 12 nt, Human
guuuauguuuug

SEQ ID NO: 3232563 - RNA, 14 nt, Human
guuuauuaaaugcu

SEQ ID NO: 3232564 - RNA, 15 nt, Human
guuuauuaaaugcuu

SEQ ID NO: 3232565 - RNA, 15 nt, Human
guuuauuaaauugca

SEQ ID NO: 3232566 - RNA, 23 nt, Human
guuuauguuuugguccacuuuuc

SEQ ID NO: 3232567 - RNA, 23 nt, Human
guuuaauugaaagaauguaaagc

SEQ ID NO: 3232568 - RNA, 13 nt, Human
guuuaaaagaaaa

SEQ ID NO: 3232569 - RNA, 14 nt, Human
guuuaaaagaaaaa

SEQ ID NO: 3232570 - RNA, 18 nt, Human
guuuaaaagaaaaaauga

SEQ ID NO: 3232571 - RNA, 16 nt, Human
guuuaaaaucauuucu

SEQ ID NO: 3232572 - RNA, 10 nt, Human
guuuaaaauc

SEQ ID NO: 3232573 - RNA, 23 nt, Human
guuuaaggaauaugggagaaaua

SEQ ID NO: 3232574 - RNA, 18 nt, Human
guuuaagcagaauuggaa

SEQ ID NO: 3232575 - RNA, 12 nt, Human
guuuaagcagaa

SEQ ID NO: 3232576 - RNA, 19 nt, Human
guuuaagcagaauuggaaa

SEQ ID NO: 3232577 - RNA, 20 nt, Human
guuuaagacauuuuuggaag

SEQ ID NO: 3232578 - RNA, 14 nt, Human
guuugccccguucu

SEQ ID NO: 3232579 - RNA, 19 nt, Human
guuugccccguucuguuug

SEQ ID NO: 3232580 - RNA, 20 nt, Human
guuugccacuuugcaaagga

SEQ ID NO: 3232581 - RNA, 15 nt, Human
guuugcauuucagaa

SEQ ID NO: 3232582 - RNA, 14 nt, Human
guuugcauuucaga

SEQ ID NO: 3232583 - RNA, 16 nt, Human
guuugggaccccuggu

SEQ ID NO: 3232584 - RNA, 21 nt, Human
guuugggaagagcuuagaaac

SEQ ID NO: 3232585 - RNA, 22 nt, Human
guuugggaccccuggugguuca

SEQ ID NO: 3232586 - RNA, 23 nt, Human
guuugggaagagcuuagaaacug

SEQ ID NO: 3232587 - RNA, 13 nt, Human
guuugccucugcc

SEQ ID NO: 3232588 - RNA, 15 nt, Human
guuucuguccuguaa

SEQ ID NO: 3232589 - RNA, 19 nt, Human
guuucuguccuguaacugu

SEQ ID NO: 3232590 - RNA, 17 nt, Human
guuucugucguuaaaaa

SEQ ID NO: 3232591 - RNA, 21 nt, Human
guuugauucagacagcugccu

SEQ ID NO: 3232592 - RNA, 21 nt, Human
guuugauuugucacugcuuca

SEQ ID NO: 3232593 - RNA, 22 nt, Human
guuugauucagacagcugccug

SEQ ID NO: 3232594 - RNA, 22 nt, Human
guuucugugguuggcugggaaa

SEQ ID NO: 3232595 - RNA, 14 nt, Human
guuucugucuccuc

SEQ ID NO: 3232596 - RNA, 22 nt, Human
guuucugucguuaaaaacagau

SEQ ID NO: 3232597 - RNA, 21 nt, Human
guuucugugguuggcugggaa

SEQ ID NO: 3232598 - RNA, 16 nt, Human
guuuucuuaacuuaaa

SEQ ID NO: 3232599 - RNA, 14 nt, Human
guuuucuguuucua

SEQ ID NO: 3232600 - RNA, 23 nt, Human
guuuucugagaaagacuauucaa

SEQ ID NO: 3232601 - RNA, 19 nt, Human
guuuuagaaacaauaugga

SEQ ID NO: 3232602 - RNA, 16 nt, Human
guuuuacccuauaucu

SEQ ID NO: 3232603 - RNA, 23 nt, Human
guuuuacaauaaaaucuugaaaa

SEQ ID NO: 3232604 - RNA, 20 nt, Human
guuugggccccagaggcugg

SEQ ID NO: 3232605 - RNA, 14 nt, Human
aaguaagucucaag

SEQ ID NO: 3232606 - RNA, 17 nt, Human
aagguuuuuguaaagau

SEQ ID NO: 3232607 - RNA, 14 nt, Human
aagguuuuuguaaa

SEQ ID NO: 3232608 - RNA, 18 nt, Human
aagguuuuuguaaagauu

SEQ ID NO: 3232609 - RNA, 20 nt, Human
guuucuaaagcugccagccg

SEQ ID NO: 3232610 - RNA, 16 nt, Human
aaguaagucucaaggu

SEQ ID NO: 3232611 - RNA, 17 nt, Human
aaguaagucucaaggua

SEQ ID NO: 3232612 - RNA, 16 nt, Human
aaggguaucaggugcu

SEQ ID NO: 3232613 - RNA, 12 nt, Human
aagggguuuucu

SEQ ID NO: 3232614 - RNA, 22 nt, Human
aagggguuuucuugauaauuuu

SEQ ID NO: 3232615 - RNA, 13 nt, Human
aagggguuuucuu

SEQ ID NO: 3232616 - RNA, 14 nt, Human
aagguaaaaaguua

SEQ ID NO: 3232617 - RNA, 14 nt, Human
aagguuuuugauag

SEQ ID NO: 3232618 - RNA, 19 nt, Human
aagguuuuugauagcauug

SEQ ID NO: 3232619 - RNA, 21 nt, Human
aagggguaggauuacuaggug

SEQ ID NO: 3232620 - RNA, 20 nt, Human
aagggcuuuucaaaaucauu

SEQ ID NO: 3232621 - RNA, 21 nt, Human
aaggggaaucuggagguagcc

SEQ ID NO: 3232622 - RNA, 16 nt, Human
aaggggaaucuggagg

SEQ ID NO: 3232623 - RNA, 15 nt, Human
aaggggaauuaacaa

SEQ ID NO: 3232624 - RNA, 23 nt, Human
aaggggaauguuugccucugccu

SEQ ID NO: 3232625 - RNA, 22 nt, Human
aaggggaauguuugccucugcc

SEQ ID NO: 3232626 - RNA, 19 nt, Human
aagggccuggccugagcug

SEQ ID NO: 3232627 - RNA, 13 nt, Human
aagggaaaaauca

SEQ ID NO: 3232628 - RNA, 14 nt, Human
aagggcuuuccugu

SEQ ID NO: 3232629 - RNA, 14 nt, Human
aagggccuggccug

SEQ ID NO: 3232630 - RNA, 17 nt, Human
aagggccuggccugagc

SEQ ID NO: 3232631 - RNA, 15 nt, Human
aaggcuuauaaaaca

SEQ ID NO: 3232632 - RNA, 16 nt, Human
aaggcuuauaaaacag

SEQ ID NO: 3232633 - RNA, 17 nt, Human
guuuauuuuucuguuac

SEQ ID NO: 3232634 - RNA, 16 nt, Human
guuucaaaaaucugaa

SEQ ID NO: 3232635 - RNA, 13 nt, Human
guuucaaaaaucu

SEQ ID NO: 3232636 - RNA, 15 nt, Human
guuucaaaaaucuga

SEQ ID NO: 3232637 - RNA, 14 nt, Human
guuucaaaaaucug

SEQ ID NO: 3232638 - RNA, 13 nt, Human
aagggccuggccu

SEQ ID NO: 3232639 - RNA, 22 nt, Human
aaggcuuuucaaccacaaaacu

SEQ ID NO: 3232640 - RNA, 15 nt, Human
aaggcuugcugcaga

SEQ ID NO: 3232641 - RNA, 17 nt, Human
guguuucauccuuccca

SEQ ID NO: 3232642 - RNA, 12 nt, Human
guuaagccuuug

SEQ ID NO: 3232643 - RNA, 13 nt, Human
guuaagccuuugg

SEQ ID NO: 3232644 - RNA, 16 nt, Human
guuaagccuuuggaaa

SEQ ID NO: 3232645 - RNA, 17 nt, Human
guguuugucucuucugg

SEQ ID NO: 3232646 - RNA, 15 nt, Human
guguuugucucuucu

SEQ ID NO: 3232647 - RNA, 12 nt, Human
guguuugucucu

SEQ ID NO: 3232648 - RNA, 18 nt, Human
guuaagucuaucugguau

SEQ ID NO: 3232649 - RNA, 21 nt, Human
guuaagucuaucugguauuaa

SEQ ID NO: 3232650 - RNA, 22 nt, Human
guuaaguugauggugaugaaau

SEQ ID NO: 3232651 - RNA, 22 nt, Human
guuaaggagaaucauguuucuu

SEQ ID NO: 3232652 - RNA, 14 nt, Human
guuaaucuuaaugu

SEQ ID NO: 3232653 - RNA, 17 nt, Human
guuaaucuuaauguaua

SEQ ID NO: 3232654 - RNA, 19 nt, Human
guuaaucuuaauguauauc

SEQ ID NO: 3232655 - RNA, 18 nt, Human
guuaaugauagcuacugu

SEQ ID NO: 3232656 - RNA, 16 nt, Human
guuaauguauauaaaa

SEQ ID NO: 3232657 - RNA, 17 nt, Human
guuaauguauauaaaaa

SEQ ID NO: 3232658 - RNA, 18 nt, Human
guuaauguauauaaaaau

SEQ ID NO: 3232659 - RNA, 13 nt, Human
guuaguaaucugu

SEQ ID NO: 3232660 - RNA, 15 nt, Human
guuaguaaucuguau

SEQ ID NO: 3232661 - RNA, 17 nt, Human
guuaguaaucuguauaa

SEQ ID NO: 3232662 - RNA, 20 nt, Human
guuaguaaucuguauaauac

SEQ ID NO: 3232663 - RNA, 14 nt, Human
guuagaugcuacua

SEQ ID NO: 3232664 - RNA, 11 nt, Human
guuagauguuu

SEQ ID NO: 3232665 - RNA, 12 nt, Human
guuagauguuug

SEQ ID NO: 3232666 - RNA, 16 nt, Human
guuagauuaagaaaua

SEQ ID NO: 3232667 - RNA, 13 nt, Human
guuagauuaagaa

SEQ ID NO: 3232668 - RNA, 21 nt, Human
guuagauauagagucauugua

SEQ ID NO: 3232669 - RNA, 20 nt, Human
guuacaaauuauaauguauu

SEQ ID NO: 3232670 - RNA, 17 nt, Human
guuacaaauuauaaugu

SEQ ID NO: 3232671 - RNA, 15 nt, Human
guuacaaauuauaau

SEQ ID NO: 3232672 - RNA, 21 nt, Human
guuacaaaauguaacuguuac

SEQ ID NO: 3232673 - RNA, 18 nt, Human
guuacaaaauguaacugu

SEQ ID NO: 3232674 - RNA, 17 nt, Human
guuacaaaauguaacug

SEQ ID NO: 3232675 - RNA, 16 nt, Human
guuacaaaauguaacu

SEQ ID NO: 3232676 - RNA, 14 nt, Human
guuacaaaauguaa

SEQ ID NO: 3232677 - RNA, 13 nt, Human
guuacaaaaugua

SEQ ID NO: 3232678 - RNA, 15 nt, Human
aagccuggucagccc

SEQ ID NO: 3232679 - RNA, 14 nt, Human
aagccuggaaaaaa

SEQ ID NO: 3232680 - RNA, 17 nt, Human
aagccugcuccuucccu

SEQ ID NO: 3232681 - RNA, 16 nt, Human
aagccugcuccuuccc

SEQ ID NO: 3232682 - RNA, 12 nt, Human
aagccugcuccu

SEQ ID NO: 3232683 - RNA, 16 nt, Human
aagcuaggccuggcca

SEQ ID NO: 3232684 - RNA, 18 nt, Human
aagcuaggccuggccaga

SEQ ID NO: 3232685 - RNA, 17 nt, Human
aagcuaggccuggccag

SEQ ID NO: 3232686 - RNA, 15 nt, Human
aagccucgacacaga

SEQ ID NO: 3232687 - RNA, 19 nt, Human
aagccuccuccagccgcca

SEQ ID NO: 3232688 - RNA, 19 nt, Human
guucaggguuggccccugc

SEQ ID NO: 3232689 - RNA, 17 nt, Human
guucaguguuucugggg

SEQ ID NO: 3232690 - RNA, 15 nt, Human
guucaguguuucugg

SEQ ID NO: 3232691 - RNA, 18 nt, Human
guucaggguuggccccug

SEQ ID NO: 3232692 - RNA, 17 nt, Human
guucaggguuggccccu

SEQ ID NO: 3232693 - RNA, 22 nt, Human
guuauuuauucugggaauguau

SEQ ID NO: 3232694 - RNA, 18 nt, Human
guuauuucccuuuagcug

SEQ ID NO: 3232695 - RNA, 23 nt, Human
guuauuucccuuuagcuguguua

SEQ ID NO: 3232696 - RNA, 17 nt, Human
guucagcuccagcucac

SEQ ID NO: 3232697 - RNA, 16 nt, Human
guucagcuccagcuca

SEQ ID NO: 3232698 - RNA, 15 nt, Human
guucagcuccagcuc

SEQ ID NO: 3232699 - RNA, 20 nt, Human
guucccuuugacgccauccc

SEQ ID NO: 3232700 - RNA, 21 nt, Human
guucccuuugacgccauccca

SEQ ID NO: 3232701 - RNA, 16 nt, Human
guucuacccaggugcu

SEQ ID NO: 3232702 - RNA, 23 nt, Human
guucugggacacaguucaauucu

SEQ ID NO: 3232703 - RNA, 12 nt, Human
guucuguauuug

SEQ ID NO: 3232704 - RNA, 14 nt, Human
guucuguauuugaa

SEQ ID NO: 3232705 - RNA, 21 nt, Human
guucuguaaaauggaaaacuu

SEQ ID NO: 3232706 - RNA, 22 nt, Human
guucuguaaaauggaaaacuua

SEQ ID NO: 3232707 - RNA, 12 nt, Human
guucugguguua

SEQ ID NO: 3232708 - RNA, 14 nt, Human
guucuuuaaacugu

SEQ ID NO: 3232709 - RNA, 23 nt, Human
guucuuuaaacugucgugucaua

SEQ ID NO: 3232710 - RNA, 23 nt, Human
guucuuguuuuuaaguuugcacu

SEQ ID NO: 3232711 - RNA, 18 nt, Human
guucuuguuuuuaaguuu

SEQ ID NO: 3232712 - RNA, 17 nt, Human
guucuuaguuugcaguu

SEQ ID NO: 3232713 - RNA, 15 nt, Human
guuccccaaauacaa

SEQ ID NO: 3232714 - RNA, 16 nt, Human
guucuuacugcuuaau

SEQ ID NO: 3232715 - RNA, 17 nt, Human
guucuuauuuuuauaac

SEQ ID NO: 3232716 - RNA, 20 nt, Human
guugaggaaagcacagaggc

SEQ ID NO: 3232717 - RNA, 22 nt, Human
guugaugaucuuugcagacagg

SEQ ID NO: 3232718 - RNA, 15 nt, Human
guugauaaaaauacu

SEQ ID NO: 3232719 - RNA, 15 nt, Human
aagcuaucuucaugu

SEQ ID NO: 3232720 - RNA, 22 nt, Human
aagcuaucuucauguaaauuga

SEQ ID NO: 3232721 - RNA, 18 nt, Human
aagcugaaauuuuagaaa

SEQ ID NO: 3232722 - RNA, 20 nt, Human
aagcugaaauuuuagaaaua

SEQ ID NO: 3232723 - RNA, 22 nt, Human
aagcugaaauuuuagaaauauu

SEQ ID NO: 3232724 - RNA, 17 nt, Human
aagcugaacacugaagu

SEQ ID NO: 3232725 - RNA, 18 nt, Human
aagcugaacacauuucuu

SEQ ID NO: 3232726 - RNA, 18 nt, Human
aagcuuauuaaaacucau

SEQ ID NO: 3232727 - RNA, 21 nt, Human
aagcugaaucagacaguggau

SEQ ID NO: 3232728 - RNA, 16 nt, Human
aagcuuauuuuggaga

SEQ ID NO: 3232729 - RNA, 20 nt, Human
guucccuacuuccugugacu

SEQ ID NO: 3232730 - RNA, 20 nt, Human
guucccauuugcuccuuucu

SEQ ID NO: 3232731 - RNA, 16 nt, Human
guucccauuugcuccu

SEQ ID NO: 3232732 - RNA, 22 nt, Human
guucccaagaaaggaaaccuuu

SEQ ID NO: 3232733 - RNA, 13 nt, Human
aagcuuuauuucu

SEQ ID NO: 3232734 - RNA, 16 nt, Human
aagcuuuauuucuagc

SEQ ID NO: 3232735 - RNA, 20 nt, Human
aagcuuuauuucuagcuuuu

SEQ ID NO: 3232736 - RNA, 13 nt, Human
aagcuuuaaauua

SEQ ID NO: 3232737 - RNA, 14 nt, Human
aagcuuuaaauuau

SEQ ID NO: 3232738 - RNA, 17 nt, Human
aagcuuuaaauuaugug

SEQ ID NO: 3232739 - RNA, 20 nt, Human
guuccaugaguuaucaugaa

SEQ ID NO: 3232740 - RNA, 21 nt, Human
aagcuuucaugucccagaacu

SEQ ID NO: 3232741 - RNA, 21 nt, Human
acaccccaccugcgcuucacu

SEQ ID NO: 3232742 - RNA, 13 nt, Human
acaccccaccugc

SEQ ID NO: 3232743 - RNA, 16 nt, Human
acaccccaccugcgcu

SEQ ID NO: 3232744 - RNA, 14 nt, Human
acaccccaccugcg

SEQ ID NO: 3232745 - RNA, 14 nt, Human
acacccaugaaaga

SEQ ID NO: 3232746 - RNA, 12 nt, Human
acaccccaccug

SEQ ID NO: 3232747 - RNA, 12 nt, Human
acacccagggaa

SEQ ID NO: 3232748 - RNA, 15 nt, Human
acaccuccucccacu

SEQ ID NO: 3232749 - RNA, 14 nt, Human
acaccuccucccac

SEQ ID NO: 3232750 - RNA, 11 nt, Human
acaccuccugg

SEQ ID NO: 3232751 - RNA, 14 nt, Human
acaccuccuggggc

SEQ ID NO: 3232752 - RNA, 22 nt, Human
acaccuccucccacugcccacu

SEQ ID NO: 3232753 - RNA, 20 nt, Human
acaccuccucccacugccca

SEQ ID NO: 3232754 - RNA, 18 nt, Human
acaccucugcacaagcug

SEQ ID NO: 3232755 - RNA, 16 nt, Human
acaccuugacagggca

SEQ ID NO: 3232756 - RNA, 15 nt, Human
acaccuugacagggc

SEQ ID NO: 3232757 - RNA, 14 nt, Human
acaccuugacaggg

SEQ ID NO: 3232758 - RNA, 19 nt, Human
acaccugcagauucuagga

SEQ ID NO: 3232759 - RNA, 19 nt, Human
acaccugcagccucccucc

SEQ ID NO: 3232760 - RNA, 13 nt, Human
uauaacuacauau

SEQ ID NO: 3232761 - RNA, 17 nt, Human
uauaaccuaguuaaaga

SEQ ID NO: 3232762 - RNA, 20 nt, Human
uauaaccuaguuaaagaaag

SEQ ID NO: 3232763 - RNA, 22 nt, Human
uauaaccuaguuaaagaaagga

SEQ ID NO: 3232764 - RNA, 18 nt, Human
uauaacuacauauugaau

SEQ ID NO: 3232765 - RNA, 15 nt, Human
acacuaaccacgcug

SEQ ID NO: 3232766 - RNA, 19 nt, Human
acacuaaccacgcuggacc

SEQ ID NO: 3232767 - RNA, 17 nt, Human
acacuaaccacgcugga

SEQ ID NO: 3232768 - RNA, 16 nt, Human
acacuaaccacgcugg

SEQ ID NO: 3232769 - RNA, 14 nt, Human
uauaaaaauggcuu

SEQ ID NO: 3232770 - RNA, 21 nt, Human
uauaaaacagaguaaucuugu

SEQ ID NO: 3232771 - RNA, 23 nt, Human
uauaaaacagcccuauuucuuga

SEQ ID NO: 3232772 - RNA, 21 nt, Human
uaguucaagaaaugaagagcu

SEQ ID NO: 3232773 - RNA, 20 nt, Human
uaguucaagaaaugaagagc

SEQ ID NO: 3232774 - RNA, 14 nt, Human
uaguucaagaaaug

SEQ ID NO: 3232775 - RNA, 18 nt, Human
uaguucaagaaaugaaga

SEQ ID NO: 3232776 - RNA, 15 nt, Human
uaguucaagaaauga

SEQ ID NO: 3232777 - RNA, 13 nt, Human
uaguuauguaaau

SEQ ID NO: 3232778 - RNA, 15 nt, Human
uaguuauguaaauaa

SEQ ID NO: 3232779 - RNA, 19 nt, Human
uaguuauguaaauaauucu

SEQ ID NO: 3232780 - RNA, 20 nt, Human
uaguuauguaaauaauucuu

SEQ ID NO: 3232781 - RNA, 21 nt, Human
uaguuauguaaauaauucuuu

SEQ ID NO: 3232782 - RNA, 21 nt, Human
uaguuuuuccuaucauguuaa

SEQ ID NO: 3232783 - RNA, 13 nt, Human
uaguuuugcuuuu

SEQ ID NO: 3232784 - RNA, 14 nt, Human
uaguucagcaaaac

SEQ ID NO: 3232785 - RNA, 12 nt, Human
uaguuuugcaua

SEQ ID NO: 3232786 - RNA, 18 nt, Human
uauaaaauguaucaacac

SEQ ID NO: 3232787 - RNA, 22 nt, Human
uauaaaauggcaacaaacugca

SEQ ID NO: 3232788 - RNA, 20 nt, Human
uauaaaauggcaacaaacug

SEQ ID NO: 3232789 - RNA, 16 nt, Human
uauaaaauggcaacaa

SEQ ID NO: 3232790 - RNA, 18 nt, Human
acacauguccaagaagcc

SEQ ID NO: 3232791 - RNA, 19 nt, Human
acacauguccaagaagccc

SEQ ID NO: 3232792 - RNA, 13 nt, Human
acacauguccaag

SEQ ID NO: 3232793 - RNA, 21 nt, Human
acacauguccaagaagcccag

SEQ ID NO: 3232794 - RNA, 22 nt, Human
acacauguccaagaagcccagg

SEQ ID NO: 3232795 - RNA, 13 nt, Human
acacauuaucuuc

SEQ ID NO: 3232796 - RNA, 14 nt, Human
acacauuaucuucu

SEQ ID NO: 3232797 - RNA, 15 nt, Human
acacauuaucuucug

SEQ ID NO: 3232798 - RNA, 18 nt, Human
acacauuucacugucugu

SEQ ID NO: 3232799 - RNA, 13 nt, Human
acacccagcccac

SEQ ID NO: 3232800 - RNA, 12 nt, Human
acacccagccca

SEQ ID NO: 3232801 - RNA, 23 nt, Human
acacauuuguugccagauuucag

SEQ ID NO: 3232802 - RNA, 22 nt, Human
acacauuuguugccagauuuca

SEQ ID NO: 3232803 - RNA, 11 nt, Human
acacauuucuu

SEQ ID NO: 3232804 - RNA, 16 nt, Human
uaguacuucuucugua

SEQ ID NO: 3232805 - RNA, 17 nt, Human
uaguacuucuucuguaa

SEQ ID NO: 3232806 - RNA, 18 nt, Human
uaguacuucuucuguaau

SEQ ID NO: 3232807 - RNA, 19 nt, Human
uaguacuucuucuguaaua

SEQ ID NO: 3232808 - RNA, 14 nt, Human
uaguacugugaauc

SEQ ID NO: 3232809 - RNA, 23 nt, Human
uaguacuggauuauucaggcuuu

SEQ ID NO: 3232810 - RNA, 13 nt, Human
uaguagagacagg

SEQ ID NO: 3232811 - RNA, 18 nt, Human
uaguacuuuauagaagaa

SEQ ID NO: 3232812 - RNA, 16 nt, Human
uaguacuuuauagaag

SEQ ID NO: 3232813 - RNA, 13 nt, Human
uaguacuuuauag

SEQ ID NO: 3232814 - RNA, 15 nt, Human
uaguacuuuauagaa

SEQ ID NO: 3232815 - RNA, 14 nt, Human
uaguacuuuauaga

SEQ ID NO: 3232816 - RNA, 12 nt, Human
uaguagagacag

SEQ ID NO: 3232817 - RNA, 21 nt, Human
uaguacuuuauagaagaaugc

SEQ ID NO: 3232818 - RNA, 18 nt, Human
uagucuuuagcuauuacu

SEQ ID NO: 3232819 - RNA, 19 nt, Human
uagucuuuagcuauuacug

SEQ ID NO: 3232820 - RNA, 11 nt, Human
uagucuuggaa

SEQ ID NO: 3232821 - RNA, 23 nt, Human
uagucuuggaagcuguuuggaaa

SEQ ID NO: 3232822 - RNA, 13 nt, Human
uagucucaagaau

SEQ ID NO: 3232823 - RNA, 17 nt, Human
uagucuuaagaacugcu

SEQ ID NO: 3232824 - RNA, 14 nt, Human
uaguaauaaagacu

SEQ ID NO: 3232825 - RNA, 22 nt, Human
uaguaagucuugccuauauuuu

SEQ ID NO: 3232826 - RNA, 15 nt, Human
uaguaaguuaaugua

SEQ ID NO: 3232827 - RNA, 16 nt, Human
uaguaaguuaauguau

SEQ ID NO: 3232828 - RNA, 23 nt, Human
uaguaaguuaauguauauaaaaa

SEQ ID NO: 3232829 - RNA, 18 nt, Human
uagguuucuaaaaaguca

SEQ ID NO: 3232830 - RNA, 20 nt, Human
uagguuucuaaaaagucaga

SEQ ID NO: 3232831 - RNA, 13 nt, Human
uaguaagauacug

SEQ ID NO: 3232832 - RNA, 14 nt, Human
uaguaagaucucuu

SEQ ID NO: 3232833 - RNA, 21 nt, Human
uaguaagaucucuuucuaaag

SEQ ID NO: 3232834 - RNA, 23 nt, Human
uaguaagcggcucaagcccagga

SEQ ID NO: 3232835 - RNA, 21 nt, Human
uagguuggcaaaaaggcagga

SEQ ID NO: 3232836 - RNA, 17 nt, Human
acacagugaccauacua

SEQ ID NO: 3232837 - RNA, 18 nt, Human
acacaggacagggguucc

SEQ ID NO: 3232838 - RNA, 22 nt, Human
acacaguauuacuucugcuaca

SEQ ID NO: 3232839 - RNA, 11 nt, Human
acacagugagu

SEQ ID NO: 3232840 - RNA, 22 nt, Human
acacagcucuucuccaggcugu

SEQ ID NO: 3232841 - RNA, 13 nt, Human
acacagcugcuuu

SEQ ID NO: 3232842 - RNA, 19 nt, Human
acacaagaccagugcuuag

SEQ ID NO: 3232843 - RNA, 21 nt, Human
acaaugguuuucuuguguguu

SEQ ID NO: 3232844 - RNA, 19 nt, Human
uagcuuauuuuuacaguua

SEQ ID NO: 3232845 - RNA, 16 nt, Human
acaaugccuauuguaa

SEQ ID NO: 3232846 - RNA, 20 nt, Human
acaaugccuauuguaauaua

SEQ ID NO: 3232847 - RNA, 15 nt, Human
acaaugguuuucuug

SEQ ID NO: 3232848 - RNA, 14 nt, Human
acaaugguaacauu

SEQ ID NO: 3232849 - RNA, 20 nt, Human
acacacucaaaucaagaaac

SEQ ID NO: 3232850 - RNA, 19 nt, Human
acacacagcucuguccugg

SEQ ID NO: 3232851 - RNA, 12 nt, Human
acacacagcucu

SEQ ID NO: 3232852 - RNA, 11 nt, Human
acacacagcuc

SEQ ID NO: 3232853 - RNA, 20 nt, Human
acagauagauauaugcucug

SEQ ID NO: 3232854 - RNA, 20 nt, Human
acagaugccauauaguguua

SEQ ID NO: 3232855 - RNA, 23 nt, Human
acagaugggugcuuggaggaagg

SEQ ID NO: 3232856 - RNA, 13 nt, Human
acagauucuuuau

SEQ ID NO: 3232857 - RNA, 17 nt, Human
uaucuuguucaggaaaa

SEQ ID NO: 3232858 - RNA, 18 nt, Human
acagcccuauuucuugau

SEQ ID NO: 3232859 - RNA, 17 nt, Human
acagcccuauuucuuga

SEQ ID NO: 3232860 - RNA, 16 nt, Human
uaucuuggcagguagg

SEQ ID NO: 3232861 - RNA, 22 nt, Human
uaugaaagauggcugugccucu

SEQ ID NO: 3232862 - RNA, 20 nt, Human
uaugaaagauggcugugccu

SEQ ID NO: 3232863 - RNA, 23 nt, Human
uaugaaagauggcugugccucug

SEQ ID NO: 3232864 - RNA, 12 nt, Human
uaucuuugauaa

SEQ ID NO: 3232865 - RNA, 23 nt, Human
acagcccgggcucugccucccau

SEQ ID NO: 3232866 - RNA, 20 nt, Human
acagcaacgaucacaaauga

SEQ ID NO: 3232867 - RNA, 21 nt, Human
acagcaacgaucacaaaugac

SEQ ID NO: 3232868 - RNA, 22 nt, Human
acagcaacgaucacaaaugacu

SEQ ID NO: 3232869 - RNA, 15 nt, Human
acagcccuauuucuu

SEQ ID NO: 3232870 - RNA, 21 nt, Human
acagcccgggcucugccuccc

SEQ ID NO: 3232871 - RNA, 22 nt, Human
acagcccgggcucugccuccca

SEQ ID NO: 3232872 - RNA, 20 nt, Human
acagcccgggcucugccucc

SEQ ID NO: 3232873 - RNA, 17 nt, Human
uaucucaaaacugcacu

SEQ ID NO: 3232874 - RNA, 14 nt, Human
uauccuacuucccc

SEQ ID NO: 3232875 - RNA, 17 nt, Human
uauccuacuuccccuuc

SEQ ID NO: 3232876 - RNA, 13 nt, Human
uaucucagggccu

SEQ ID NO: 3232877 - RNA, 14 nt, Human
uaucucaaauugua

SEQ ID NO: 3232878 - RNA, 19 nt, Human
uaucucagauauuugcacc

SEQ ID NO: 3232879 - RNA, 15 nt, Human
uaucucagauguuaa

SEQ ID NO: 3232880 - RNA, 16 nt, Human
uaucucagauguuaaa

SEQ ID NO: 3232881 - RNA, 19 nt, Human
uaucucagauguuaaaaua

SEQ ID NO: 3232882 - RNA, 18 nt, Human
uaucucagauauuugcac

SEQ ID NO: 3232883 - RNA, 17 nt, Human
uaucucagauauuugca

SEQ ID NO: 3232884 - RNA, 16 nt, Human
uaucucagauauuugc

SEQ ID NO: 3232885 - RNA, 15 nt, Human
uaucccggcugcccu

SEQ ID NO: 3232886 - RNA, 14 nt, Human
uaucccugauaaau

SEQ ID NO: 3232887 - RNA, 16 nt, Human
uaucccggcugcccuu

SEQ ID NO: 3232888 - RNA, 21 nt, Human
acagagcaagugagacccugu

SEQ ID NO: 3232889 - RNA, 23 nt, Human
acagagcaaccccuggaccccag

SEQ ID NO: 3232890 - RNA, 22 nt, Human
acagagcaaccccuggacccca

SEQ ID NO: 3232891 - RNA, 20 nt, Human
acagagcaaccccuggaccc

SEQ ID NO: 3232892 - RNA, 16 nt, Human
acagagcaaccccugg

SEQ ID NO: 3232893 - RNA, 15 nt, Human
acagagaugucucuu

SEQ ID NO: 3232894 - RNA, 18 nt, Human
acagagcuacacagggga

SEQ ID NO: 3232895 - RNA, 16 nt, Human
acagagcaguugagag

SEQ ID NO: 3232896 - RNA, 13 nt, Human
acagagaugucuc

SEQ ID NO: 3232897 - RNA, 18 nt, Human
uaucucugaguucugugu

SEQ ID NO: 3232898 - RNA, 21 nt, Human
uaucuccuuuguauucugucu

SEQ ID NO: 3232899 - RNA, 19 nt, Human
uauauuuaaagggaaauug

SEQ ID NO: 3232900 - RNA, 16 nt, Human
uauauucuauuuuaca

SEQ ID NO: 3232901 - RNA, 23 nt, Human
uauauuccuuuucccaggaaaga

SEQ ID NO: 3232902 - RNA, 19 nt, Human
uauauuccucuugcauuuc

SEQ ID NO: 3232903 - RNA, 18 nt, Human
uauauuccagguuuaagu

SEQ ID NO: 3232904 - RNA, 21 nt, Human
uauauuccagguuuaaguaga

SEQ ID NO: 3232905 - RNA, 22 nt, Human
uauauuccagguuuaaguagau

SEQ ID NO: 3232906 - RNA, 15 nt, Human
acagacacaggcccg

SEQ ID NO: 3232907 - RNA, 17 nt, Human
acagacacaggcccggc

SEQ ID NO: 3232908 - RNA, 18 nt, Human
acagacacaggcccggcu

SEQ ID NO: 3232909 - RNA, 19 nt, Human
acagacuggaagcacagcu

SEQ ID NO: 3232910 - RNA, 17 nt, Human
acagacuggaagcacag

SEQ ID NO: 3232911 - RNA, 21 nt, Human
acagacuggaagcacagcuuc

SEQ ID NO: 3232912 - RNA, 13 nt, Human
acacuuaaaaaug

SEQ ID NO: 3232913 - RNA, 15 nt, Human
acacuuaaaaauggu

SEQ ID NO: 3232914 - RNA, 19 nt, Human
acacuguuuguuccagaau

SEQ ID NO: 3232915 - RNA, 14 nt, Human
acacuugucggcuc

SEQ ID NO: 3232916 - RNA, 15 nt, Human
acacuugugacuuuu

SEQ ID NO: 3232917 - RNA, 14 nt, Human
acacuugugacuuu

SEQ ID NO: 3232918 - RNA, 21 nt, Human
acacuugugacuuuugcuuua

SEQ ID NO: 3232919 - RNA, 20 nt, Human
acacuugugacuuuugcuuu

SEQ ID NO: 3232920 - RNA, 18 nt, Human
acacuugugacuuuugcu

SEQ ID NO: 3232921 - RNA, 18 nt, Human
acagaaaauucuucucca

SEQ ID NO: 3232922 - RNA, 16 nt, Human
acacuuuucauaucau

SEQ ID NO: 3232923 - RNA, 17 nt, Human
acacuuuucauaucauu

SEQ ID NO: 3232924 - RNA, 18 nt, Human
acacuuuucauaucauuu

SEQ ID NO: 3232925 - RNA, 20 nt, Human
acacuuguugauuaauggaa

SEQ ID NO: 3232926 - RNA, 23 nt, Human
acacuuguugauuaauggaaaug

SEQ ID NO: 3232927 - RNA, 13 nt, Human
acacuuuaauggg

SEQ ID NO: 3232928 - RNA, 16 nt, Human
acacucacccaacaau

SEQ ID NO: 3232929 - RNA, 22 nt, Human
acacucacauuuauucugcuca

SEQ ID NO: 3232930 - RNA, 16 nt, Human
uauaaggacuuccuga

SEQ ID NO: 3232931 - RNA, 12 nt, Human
acacucagcugu

SEQ ID NO: 3232932 - RNA, 13 nt, Human
acacucagcuguu

SEQ ID NO: 3232933 - RNA, 14 nt, Human
acacucagcuguuc

SEQ ID NO: 3232934 - RNA, 20 nt, Human
acacucagcuguucagauug

SEQ ID NO: 3232935 - RNA, 14 nt, Human
acacuccagugaga

SEQ ID NO: 3232936 - RNA, 13 nt, Human
acacuccuucaca

SEQ ID NO: 3232937 - RNA, 11 nt, Human
acacucugaga

SEQ ID NO: 3232938 - RNA, 13 nt, Human
acacucugagacu

SEQ ID NO: 3232939 - RNA, 16 nt, Human
acacucuaacuguaua

SEQ ID NO: 3232940 - RNA, 17 nt, Human
acacucuaacuguauau

SEQ ID NO: 3232941 - RNA, 10 nt, Human
acacuguuau

SEQ ID NO: 3232942 - RNA, 15 nt, Human
acacuguuauuuuca

SEQ ID NO: 3232943 - RNA, 21 nt, Human
acacuguuauuuucagcauga

SEQ ID NO: 3232944 - RNA, 22 nt, Human
acacuguucucugcccuccaag

SEQ ID NO: 3232945 - RNA, 23 nt, Human
acacuguucucugcccuccaaga

SEQ ID NO: 3232946 - RNA, 16 nt, Human
acacuguucucugccc

SEQ ID NO: 3232947 - RNA, 17 nt, Human
acacuguucucugcccu

SEQ ID NO: 3232948 - RNA, 18 nt, Human
acacuguucucugcccuc

SEQ ID NO: 3232949 - RNA, 20 nt, Human
acacuguucucugcccucca

SEQ ID NO: 3232950 - RNA, 14 nt, Human
acacuguucucugc

SEQ ID NO: 3232951 - RNA, 15 nt, Human
acacuguucucugcc

SEQ ID NO: 3232952 - RNA, 22 nt, Human
acacugaaaagaaggaaagaug

SEQ ID NO: 3232953 - RNA, 12 nt, Human
acacugaaauaa

SEQ ID NO: 3232954 - RNA, 13 nt, Human
uagauauaaugaa

SEQ ID NO: 3232955 - RNA, 14 nt, Human
uagauauaaugaac

SEQ ID NO: 3232956 - RNA, 20 nt, Human
uagauauaaugaacaaaauu

SEQ ID NO: 3232957 - RNA, 23 nt, Human
uagauauaaugaacaaaauuauu

SEQ ID NO: 3232958 - RNA, 23 nt, Human
acaaauaguaggcaagauggcac

SEQ ID NO: 3232959 - RNA, 22 nt, Human
acaaauaguaggcaagauggca

SEQ ID NO: 3232960 - RNA, 16 nt, Human
acaaauauuaaaaagu

SEQ ID NO: 3232961 - RNA, 12 nt, Human
acaaauauuaaa

SEQ ID NO: 3232962 - RNA, 18 nt, Human
acaaauauuaaaaagucu

SEQ ID NO: 3232963 - RNA, 20 nt, Human
acaaauauuaaaaagucuuu

SEQ ID NO: 3232964 - RNA, 13 nt, Human
acaaauauuauuu

SEQ ID NO: 3232965 - RNA, 15 nt, Human
acaaauauuauuugu

SEQ ID NO: 3232966 - RNA, 21 nt, Human
acaaauauuauuuguguuucc

SEQ ID NO: 3232967 - RNA, 16 nt, Human
uagaugcuacuaagaa

SEQ ID NO: 3232968 - RNA, 20 nt, Human
uagauccauuaauuuaaaug

SEQ ID NO: 3232969 - RNA, 17 nt, Human
uagauccuaagaugugu

SEQ ID NO: 3232970 - RNA, 21 nt, Human
uagauccuaagauguguucuu

SEQ ID NO: 3232971 - RNA, 14 nt, Human
acaaauaacaacuu

SEQ ID NO: 3232972 - RNA, 22 nt, Human
acaaauaacaacuuuuuuuucu

SEQ ID NO: 3232973 - RNA, 15 nt, Human
acaaauaacaacuuu

SEQ ID NO: 3232974 - RNA, 18 nt, Human
acaaaguuuaucuuggcc

SEQ ID NO: 3232975 - RNA, 14 nt, Human
acaaaguuucagag

SEQ ID NO: 3232976 - RNA, 18 nt, Human
acaaaguuucagaguaua

SEQ ID NO: 3232977 - RNA, 19 nt, Human
acaaaguuucagaguauau

SEQ ID NO: 3232978 - RNA, 20 nt, Human
acaaaguuucagaguauauu

SEQ ID NO: 3232979 - RNA, 22 nt, Human
acaaaguuucagaguauauugu

SEQ ID NO: 3232980 - RNA, 14 nt, Human
acaaaacuuuucua

SEQ ID NO: 3232981 - RNA, 21 nt, Human
acaaaacuuagcaucuaauuu

SEQ ID NO: 3232982 - RNA, 21 nt, Human
acaaagcgugguggacaugca

SEQ ID NO: 3232983 - RNA, 18 nt, Human
acaaagcccuuccauguc

SEQ ID NO: 3232984 - RNA, 21 nt, Human
aauuuguuggggcuuuacaua

SEQ ID NO: 3232985 - RNA, 21 nt, Human
aauuuuucuuauuucauuucu

SEQ ID NO: 3232986 - RNA, 21 nt, Human
aauuuuucuguauagacagga

SEQ ID NO: 3232987 - RNA, 22 nt, Human
aauuuuuaccauaguuuucuca

SEQ ID NO: 3232988 - RNA, 18 nt, Human
aauuuuugcuuuuagaaa

SEQ ID NO: 3232989 - RNA, 19 nt, Human
aauuuuugcuuuuagaaaa

SEQ ID NO: 3232990 - RNA, 20 nt, Human
aauuuuugcuuuuagaaaag

SEQ ID NO: 3232991 - RNA, 18 nt, Human
aauuuuugguugaauaaa

SEQ ID NO: 3232992 - RNA, 16 nt, Human
aauuuuugguugaaua

SEQ ID NO: 3232993 - RNA, 14 nt, Human
aauuuuugguugaa

SEQ ID NO: 3232994 - RNA, 20 nt, Human
aauuuuuuggcacuugccau

SEQ ID NO: 3232995 - RNA, 23 nt, Human
aauuuuuggugggugaaaggaau

SEQ ID NO: 3232996 - RNA, 15 nt, Human
aauuuuuuuguauga

SEQ ID NO: 3232997 - RNA, 17 nt, Human
aauuuuuuuguaugaaa

SEQ ID NO: 3232998 - RNA, 18 nt, Human
aauuuuuuuguaugaaaa

SEQ ID NO: 3232999 - RNA, 19 nt, Human
aauuuuuuuguaugaaaac

SEQ ID NO: 3233000 - RNA, 20 nt, Human
aauuuuuuuucaugcuuuau

SEQ ID NO: 3233001 - RNA, 14 nt, Human
uacuuuuuugaaau

SEQ ID NO: 3233002 - RNA, 15 nt, Human
uacuuuuuugaaauc

SEQ ID NO: 3233003 - RNA, 15 nt, Human
aauuugcagcuucca

SEQ ID NO: 3233004 - RNA, 16 nt, Human
aauuuguggugauuug

SEQ ID NO: 3233005 - RNA, 14 nt, Human
aauuuguggugauu

SEQ ID NO: 3233006 - RNA, 16 nt, Human
aauuuguuauaaugaa

SEQ ID NO: 3233007 - RNA, 19 nt, Human
aauuuguguaaauuauuga

SEQ ID NO: 3233008 - RNA, 17 nt, Human
aauuuguguaauauuac

SEQ ID NO: 3233009 - RNA, 14 nt, Human
aauuuguguguuuu

SEQ ID NO: 3233010 - RNA, 17 nt, Human
aauuuguguguuuuuag

SEQ ID NO: 3233011 - RNA, 21 nt, Human
aauuuguguguuuuuagcugu

SEQ ID NO: 3233012 - RNA, 23 nt, Human
aauuuguguguuuuuagcuguga

SEQ ID NO: 3233013 - RNA, 18 nt, Human
aauuugggggaaaauuua

SEQ ID NO: 3233014 - RNA, 9 nt, Human
aauuuggaa

SEQ ID NO: 3233015 - RNA, 14 nt, Human
aauuuggaaacuaa

SEQ ID NO: 3233016 - RNA, 16 nt, Human
aauuuggaaacuaaua

SEQ ID NO: 3233017 - RNA, 17 nt, Human
aauuuggaaacuaauaa

SEQ ID NO: 3233018 - RNA, 18 nt, Human
aauuuggaaacuaauaaa

SEQ ID NO: 3233019 - RNA, 20 nt, Human
aauuuggaaacuaauaaaau

SEQ ID NO: 3233020 - RNA, 21 nt, Human
aauuuggaaacuaauaaaaua

SEQ ID NO: 3233021 - RNA, 12 nt, Human
aauuugcugcug

SEQ ID NO: 3233022 - RNA, 13 nt, Human
aauuugcugcuga

SEQ ID NO: 3233023 - RNA, 12 nt, Human
acaaucuucugu

SEQ ID NO: 3233024 - RNA, 18 nt, Human
uagccuuuaccugugaag

SEQ ID NO: 3233025 - RNA, 22 nt, Human
uagccuuuaccugugaaguguu

SEQ ID NO: 3233026 - RNA, 13 nt, Human
uagccuuucuuuu

SEQ ID NO: 3233027 - RNA, 14 nt, Human
uagcuauuacugga

SEQ ID NO: 3233028 - RNA, 15 nt, Human
uagcuauuacuggau

SEQ ID NO: 3233029 - RNA, 14 nt, Human
uagcuaugcuguau

SEQ ID NO: 3233030 - RNA, 16 nt, Human
uagcuaugcuguaucu

SEQ ID NO: 3233031 - RNA, 21 nt, Human
uagcuaugcuguaucugugcu

SEQ ID NO: 3233032 - RNA, 20 nt, Human
uagcgacaacagauuggauu

SEQ ID NO: 3233033 - RNA, 15 nt, Human
uagcuacagugcaua

SEQ ID NO: 3233034 - RNA, 21 nt, Human
uagcuacguuuacucacagcc

SEQ ID NO: 3233035 - RNA, 19 nt, Human
uagcgacaacagauuggau

SEQ ID NO: 3233036 - RNA, 15 nt, Human
acaagcuccaagcuc

SEQ ID NO: 3233037 - RNA, 16 nt, Human
acaagcuccaagcucc

SEQ ID NO: 3233038 - RNA, 17 nt, Human
acaagcuccaagcuccc

SEQ ID NO: 3233039 - RNA, 19 nt, Human
acaagcuccaagcucccag

SEQ ID NO: 3233040 - RNA, 22 nt, Human
acaagcuccaagcucccaggca

SEQ ID NO: 3233041 - RNA, 22 nt, Human
acaagccuggaaaaaaacauca

SEQ ID NO: 3233042 - RNA, 20 nt, Human
acaaguugagcuaugacuua

SEQ ID NO: 3233043 - RNA, 21 nt, Human
acaaguugagcuaugacuuaa

SEQ ID NO: 3233044 - RNA, 22 nt, Human
acaauaggaugggcuucugugc

SEQ ID NO: 3233045 - RNA, 18 nt, Human
acaaucucggcucacugc

SEQ ID NO: 3233046 - RNA, 20 nt, Human
acaaucucggcucacugcau

SEQ ID NO: 3233047 - RNA, 21 nt, Human
acaauauaagagcuuccaauu

SEQ ID NO: 3233048 - RNA, 18 nt, Human
acaauaugcccuuucugg

SEQ ID NO: 3233049 - RNA, 18 nt, Human
acaauauguacauuucua

SEQ ID NO: 3233050 - RNA, 17 nt, Human
acaauauguacauuucu

SEQ ID NO: 3233051 - RNA, 15 nt, Human
acaaaugcaucuuug

SEQ ID NO: 3233052 - RNA, 16 nt, Human
acaaaugcaucuuuga

SEQ ID NO: 3233053 - RNA, 18 nt, Human
acaaaugcaucuuugaug

SEQ ID NO: 3233054 - RNA, 20 nt, Human
acaaaugcaucuuugaugug

SEQ ID NO: 3233055 - RNA, 18 nt, Human
acaaaugacuuuauuauu

SEQ ID NO: 3233056 - RNA, 21 nt, Human
acaaaugacuuuauuauuuau

SEQ ID NO: 3233057 - RNA, 23 nt, Human
acaaaugacuuuauuauuuauuu

SEQ ID NO: 3233058 - RNA, 15 nt, Human
acaaaugauugcuuu

SEQ ID NO: 3233059 - RNA, 21 nt, Human
acaaaugauugcuuuuaaaau

SEQ ID NO: 3233060 - RNA, 19 nt, Human
acaaaugauugcuuuuaaa

SEQ ID NO: 3233061 - RNA, 18 nt, Human
acaaaugauugcuuuuaa

SEQ ID NO: 3233062 - RNA, 16 nt, Human
acaaaugauugcuuuu

SEQ ID NO: 3233063 - RNA, 15 nt, Human
acaaaugacuuuauu

SEQ ID NO: 3233064 - RNA, 16 nt, Human
acaaaugacuuuauua

SEQ ID NO: 3233065 - RNA, 17 nt, Human
acaaaugacuuuauuau

SEQ ID NO: 3233066 - RNA, 23 nt, Human
uagcaagguuuggugcaaaguau

SEQ ID NO: 3233067 - RNA, 22 nt, Human
uagcaaaugagacagcagucuu

SEQ ID NO: 3233068 - RNA, 21 nt, Human
uagcaaagcggguuauaauga

SEQ ID NO: 3233069 - RNA, 17 nt, Human
acaaauuuacagagaca

SEQ ID NO: 3233070 - RNA, 22 nt, Human
acaaauuguuacuccauauaua

SEQ ID NO: 3233071 - RNA, 18 nt, Human
acaacagucuucauuuuu

SEQ ID NO: 3233072 - RNA, 16 nt, Human
acaacauccaaguggc

SEQ ID NO: 3233073 - RNA, 22 nt, Human
acaacauagcagaucuguuuug

SEQ ID NO: 3233074 - RNA, 17 nt, Human
acaacaucuuuuucuac

SEQ ID NO: 3233075 - RNA, 13 nt, Human
acaagacacagug

SEQ ID NO: 3233076 - RNA, 22 nt, Human
acaagagcccaggccuccuaca

SEQ ID NO: 3233077 - RNA, 18 nt, Human
acaagagcuuaacagugu

SEQ ID NO: 3233078 - RNA, 19 nt, Human
acaagagcuuaacagugug

SEQ ID NO: 3233079 - RNA, 18 nt, Human
acaagagcccaggccucc

SEQ ID NO: 3233080 - RNA, 14 nt, Human
acaagacacaguga

SEQ ID NO: 3233081 - RNA, 23 nt, Human
acaacauccaaguggccuccguc

SEQ ID NO: 3233082 - RNA, 13 nt, Human
acaagcuccaagc

SEQ ID NO: 3233083 - RNA, 17 nt, Human
acaagcgugagccacug

SEQ ID NO: 3233084 - RNA, 19 nt, Human
acaagauugucauuaguga

SEQ ID NO: 3233085 - RNA, 13 nt, Human
aauuuaguuguuu

SEQ ID NO: 3233086 - RNA, 20 nt, Human
aauuuauuagcccugcauuu

SEQ ID NO: 3233087 - RNA, 17 nt, Human
aauuuaucagauugcuu

SEQ ID NO: 3233088 - RNA, 20 nt, Human
aauuuaucagauugcuuuug

SEQ ID NO: 3233089 - RNA, 22 nt, Human
aauuuaucagauugcuuuugug

SEQ ID NO: 3233090 - RNA, 14 nt, Human
aauuuaugugaugg

SEQ ID NO: 3233091 - RNA, 17 nt, Human
aauuuacagagacagaa

SEQ ID NO: 3233092 - RNA, 18 nt, Human
aauuuacagagacagaaa

SEQ ID NO: 3233093 - RNA, 15 nt, Human
aauuuaccugaaguc

SEQ ID NO: 3233094 - RNA, 17 nt, Human
aauuuaccugaagucuu

SEQ ID NO: 3233095 - RNA, 14 nt, Human
aauuuacugugacu

SEQ ID NO: 3233096 - RNA, 15 nt, Human
aauuuacuuuggaaa

SEQ ID NO: 3233097 - RNA, 16 nt, Human
aauuuacuacaauaug

SEQ ID NO: 3233098 - RNA, 23 nt, Human
aauuuacuacaauauguacauuu

SEQ ID NO: 3233099 - RNA, 22 nt, Human
aauuuacuacaauauguacauu

SEQ ID NO: 3233100 - RNA, 21 nt, Human
aauuuacuacaauauguacau

SEQ ID NO: 3233101 - RNA, 17 nt, Human
aauuuacuacaauaugu

SEQ ID NO: 3233102 - RNA, 21 nt, Human
aauuuaaggucuguuugcugu

SEQ ID NO: 3233103 - RNA, 16 nt, Human
aauuuaaggucuguuu

SEQ ID NO: 3233104 - RNA, 18 nt, Human
aauuuaaaugauuuaaau

SEQ ID NO: 3233105 - RNA, 15 nt, Human
aauuggaaaagacua

SEQ ID NO: 3233106 - RNA, 19 nt, Human
aauuggaaaagacuaagau

SEQ ID NO: 3233107 - RNA, 18 nt, Human
aauuggaagucuaagaac

SEQ ID NO: 3233108 - RNA, 18 nt, Human
aauuggaaugcacucaga

SEQ ID NO: 3233109 - RNA, 12 nt, Human
uacuucuucugu

SEQ ID NO: 3233110 - RNA, 14 nt, Human
uacuucuucuguaa

SEQ ID NO: 3233111 - RNA, 15 nt, Human
uacuucuucuguaau

SEQ ID NO: 3233112 - RNA, 17 nt, Human
uacuucuucuguaauau

SEQ ID NO: 3233113 - RNA, 15 nt, Human
uacuuucuguuaaaa

SEQ ID NO: 3233114 - RNA, 12 nt, Human
uacuuucuguua

SEQ ID NO: 3233115 - RNA, 17 nt, Human
uacuuuccaauucuccu

SEQ ID NO: 3233116 - RNA, 19 nt, Human
uacuuuccaauucuccuuu

SEQ ID NO: 3233117 - RNA, 18 nt, Human
uacuuuguauuguccuau

SEQ ID NO: 3233118 - RNA, 21 nt, Human
uacuuugucuaagaaacauug

SEQ ID NO: 3233119 - RNA, 17 nt, Human
uacuuugucuaagaaac

SEQ ID NO: 3233120 - RNA, 20 nt, Human
uacuuugucuaagaaacauu

SEQ ID NO: 3233121 - RNA, 19 nt, Human
uacuuugucuaagaaacau

SEQ ID NO: 3233122 - RNA, 17 nt, Human
uacuuucuguuaaaaug

SEQ ID NO: 3233123 - RNA, 15 nt, Human
uacuuucuucaaaau

SEQ ID NO: 3233124 - RNA, 17 nt, Human
uacuuucuucagguaaa

SEQ ID NO: 3233125 - RNA, 15 nt, Human
uacuucugcuacaua

SEQ ID NO: 3233126 - RNA, 20 nt, Human
uacuucuccacccugcucuc

SEQ ID NO: 3233127 - RNA, 16 nt, Human
uacuucuuauacauuu

SEQ ID NO: 3233128 - RNA, 13 nt, Human
uacuucuugaaua

SEQ ID NO: 3233129 - RNA, 20 nt, Human
uacuucuugaauauaaaaaa

SEQ ID NO: 3233130 - RNA, 21 nt, Human
uacuucuugaauauaaaaaau

SEQ ID NO: 3233131 - RNA, 15 nt, Human
uacuucuuauacauu

SEQ ID NO: 3233132 - RNA, 14 nt, Human
uacuucuuauacau

SEQ ID NO: 3233133 - RNA, 22 nt, Human
uacuuauuuaugaacagacuuu

SEQ ID NO: 3233134 - RNA, 23 nt, Human
uacuuccaagacuuauuuucaca

SEQ ID NO: 3233135 - RNA, 18 nt, Human
uacuucauguaauccaaa

SEQ ID NO: 3233136 - RNA, 14 nt, Human
uacuuccccuuccu

SEQ ID NO: 3233137 - RNA, 15 nt, Human
uacuuccccuuccua

SEQ ID NO: 3233138 - RNA, 18 nt, Human
uacuuccccuuccuaauu

SEQ ID NO: 3233139 - RNA, 20 nt, Human
uacuuccccuuccuaauucc

SEQ ID NO: 3233140 - RNA, 18 nt, Human
uacuucuccacccugcuc

SEQ ID NO: 3233141 - RNA, 13 nt, Human
uacuucuccaccc

SEQ ID NO: 3233142 - RNA, 23 nt, Human
uacuuccugugacuucagcucug

SEQ ID NO: 3233143 - RNA, 11 nt, Human
aauuucuuuug

SEQ ID NO: 3233144 - RNA, 16 nt, Human
aauuugaaaaugauaa

SEQ ID NO: 3233145 - RNA, 19 nt, Human
uacuguacaaugacuuuau

SEQ ID NO: 3233146 - RNA, 17 nt, Human
aauugagccuaaaaaua

SEQ ID NO: 3233147 - RNA, 23 nt, Human
aauugagccuaaaaauaaagcac

SEQ ID NO: 3233148 - RNA, 17 nt, Human
aauugauguugaugcaa

SEQ ID NO: 3233149 - RNA, 16 nt, Human
aauugauguugaugca

SEQ ID NO: 3233150 - RNA, 23 nt, Human
aauugagcugcuuuuuuugaaac

SEQ ID NO: 3233151 - RNA, 22 nt, Human
aauugagcugcuuuuuuugaaa

SEQ ID NO: 3233152 - RNA, 15 nt, Human
aauugauguugaugc

SEQ ID NO: 3233153 - RNA, 14 nt, Human
aauugauguugaug

SEQ ID NO: 3233154 - RNA, 13 nt, Human
aauugauguugau

SEQ ID NO: 3233155 - RNA, 12 nt, Human
aauugauguuga

SEQ ID NO: 3233156 - RNA, 15 nt, Human
aauugcaaucuauaa

SEQ ID NO: 3233157 - RNA, 16 nt, Human
uacugggagccuaccc

SEQ ID NO: 3233158 - RNA, 13 nt, Human
uacugguaagauu

SEQ ID NO: 3233159 - RNA, 17 nt, Human
uacugguaagauuguua

SEQ ID NO: 3233160 - RNA, 21 nt, Human
uacugguaagauuguuauuaa

SEQ ID NO: 3233161 - RNA, 17 nt, Human
uacugagagugaacaaa

SEQ ID NO: 3233162 - RNA, 20 nt, Human
uacugacuccaaccauucaa

SEQ ID NO: 3233163 - RNA, 17 nt, Human
uacugaccagacaagcu

SEQ ID NO: 3233164 - RNA, 14 nt, Human
uacucuagagaagu

SEQ ID NO: 3233165 - RNA, 16 nt, Human
uacucuacccucuuag

SEQ ID NO: 3233166 - RNA, 17 nt, Human
uacucaaacuccauucu

SEQ ID NO: 3233167 - RNA, 22 nt, Human
uacucuacccucuuagaaaaac

SEQ ID NO: 3233168 - RNA, 18 nt, Human
uacuaaaaauacaaaaaa

SEQ ID NO: 3233169 - RNA, 18 nt, Human
uacuagacugccacaagg

SEQ ID NO: 3233170 - RNA, 18 nt, Human
uacuagagauauuuugua

SEQ ID NO: 3233171 - RNA, 20 nt, Human
uacuagagauauuuuguaaa

SEQ ID NO: 3233172 - RNA, 23 nt, Human
uacuagagauauuuuguaaaaug

SEQ ID NO: 3233173 - RNA, 24 nt, Human
uacuagagauauuuuguaaaaugu

SEQ ID NO: 3233174 - RNA, 16 nt, Human
uacuagaguuggcaug

SEQ ID NO: 3233175 - RNA, 23 nt, Human
uacuagauuugggagaagggcag

SEQ ID NO: 3233176 - RNA, 16 nt, Human
uacuagauuugggaga

SEQ ID NO: 3233177 - RNA, 14 nt, Human
uacuaaaaauacaa

SEQ ID NO: 3233178 - RNA, 13 nt, Human
uacgugaguccug

SEQ ID NO: 3233179 - RNA, 16 nt, Human
uacgucugacaggcaa

SEQ ID NO: 3233180 - RNA, 23 nt, Human
uacggauccugcacugacucugg

SEQ ID NO: 3233181 - RNA, 14 nt, Human
uacgucugacaggc

SEQ ID NO: 3233182 - RNA, 15 nt, Human
uacgucugacaggca

SEQ ID NO: 3233183 - RNA, 22 nt, Human
uacggauccugcacugacucug

SEQ ID NO: 3233184 - RNA, 18 nt, Human
aauugacaggcgaaagaa

SEQ ID NO: 3233185 - RNA, 24 nt, Human
uacgcuccaucgcugucaucucag

SEQ ID NO: 3233186 - RNA, 16 nt, Human
aauguguguaugugug

SEQ ID NO: 3233187 - RNA, 16 nt, Human
aaugugugugauguga

SEQ ID NO: 3233188 - RNA, 16 nt, Human
aauugaaguuucaagu

SEQ ID NO: 3233189 - RNA, 20 nt, Human
aauugaaguuucaaguuuua

SEQ ID NO: 3233190 - RNA, 23 nt, Human
aaugugugugaugugacauuugu

SEQ ID NO: 3233191 - RNA, 21 nt, Human
aaugugugugaugugacauuu

SEQ ID NO: 3233192 - RNA, 15 nt, Human
aaugugucuuucuaa

SEQ ID NO: 3233193 - RNA, 18 nt, Human
aaugugucuuucuaagaa

SEQ ID NO: 3233194 - RNA, 21 nt, Human
aaugugugagugcauguacua

SEQ ID NO: 3233195 - RNA, 20 nt, Human
aaugugugagugcauguacu

SEQ ID NO: 3233196 - RNA, 18 nt, Human
aaugugugagugcaugua

SEQ ID NO: 3233197 - RNA, 15 nt, Human
aauguguguaugugu

SEQ ID NO: 3233198 - RNA, 16 nt, Human
aaugugugcccagcuu

SEQ ID NO: 3233199 - RNA, 16 nt, Human
aauguguauaaauugu

SEQ ID NO: 3233200 - RNA, 18 nt, Human
aauguguauaaauugucu

SEQ ID NO: 3233201 - RNA, 15 nt, Human
uaauuuaucagauug

SEQ ID NO: 3233202 - RNA, 15 nt, Human
uaauuuaaaauugug

SEQ ID NO: 3233203 - RNA, 16 nt, Human
uaauuuaaaauuguga

SEQ ID NO: 3233204 - RNA, 23 nt, Human
uaauuguuguuuguauguauaau

SEQ ID NO: 3233205 - RNA, 22 nt, Human
uaauuguuguuuguauguauaa

SEQ ID NO: 3233206 - RNA, 13 nt, Human
uaauuccacagcu

SEQ ID NO: 3233207 - RNA, 14 nt, Human
uaauuccacagcug

SEQ ID NO: 3233208 - RNA, 17 nt, Human
uaauuccacagcugcuc

SEQ ID NO: 3233209 - RNA, 15 nt, Human
uaauuguuguuugua

SEQ ID NO: 3233210 - RNA, 19 nt, Human
uaauuguuguuuguaugua

SEQ ID NO: 3233211 - RNA, 18 nt, Human
uaauuguuguuuguaugu

SEQ ID NO: 3233212 - RNA, 15 nt, Human
uaauuccaugaaugu

SEQ ID NO: 3233213 - RNA, 16 nt, Human
uaauuauuugucucag

SEQ ID NO: 3233214 - RNA, 13 nt, Human
uaauuauuugaau

SEQ ID NO: 3233215 - RNA, 12 nt, Human
uaauuauuugaa

SEQ ID NO: 3233216 - RNA, 17 nt, Human
uaauuauuuauuacaua

SEQ ID NO: 3233217 - RNA, 21 nt, Human
uaauucaaagcaccaaaauaa

SEQ ID NO: 3233218 - RNA, 19 nt, Human
uaauucaaagcaccaaaau

SEQ ID NO: 3233219 - RNA, 12 nt, Human
uaauucaaagca

SEQ ID NO: 3233220 - RNA, 14 nt, Human
aaugagccuggcaa

SEQ ID NO: 3233221 - RNA, 17 nt, Human
aaugagcuugauuaaau

SEQ ID NO: 3233222 - RNA, 18 nt, Human
aaugagcuugauuaaauc

SEQ ID NO: 3233223 - RNA, 19 nt, Human
aaugagcuugauuaaauca

SEQ ID NO: 3233224 - RNA, 14 nt, Human
uacaaaaacacagc

SEQ ID NO: 3233225 - RNA, 13 nt, Human
uacaaaaacacag

SEQ ID NO: 3233226 - RNA, 21 nt, Human
uacaaaaaaaaaaaaaaauua

SEQ ID NO: 3233227 - RNA, 11 nt, Human
uaauuucagug

SEQ ID NO: 3233228 - RNA, 15 nt, Human
uaauuucaguguaaa

SEQ ID NO: 3233229 - RNA, 16 nt, Human
uaauuucaguguaaag

SEQ ID NO: 3233230 - RNA, 19 nt, Human
uaauuucaagcuuauuuug

SEQ ID NO: 3233231 - RNA, 11 nt, Human
uaauuucaagc

SEQ ID NO: 3233232 - RNA, 15 nt, Human
uacaaaaacacagca

SEQ ID NO: 3233233 - RNA, 15 nt, Human
uacaaaaagcauaaa

SEQ ID NO: 3233234 - RNA, 20 nt, Human
uacaaaaagcauaaaaauua

SEQ ID NO: 3233235 - RNA, 12 nt, Human
uacaaaacuuua

SEQ ID NO: 3233236 - RNA, 23 nt, Human
uacaaaaccacaguguaccauua

SEQ ID NO: 3233237 - RNA, 21 nt, Human
uacaaaaccacaguguaccau

SEQ ID NO: 3233238 - RNA, 20 nt, Human
uacaaaaccacaguguacca

SEQ ID NO: 3233239 - RNA, 20 nt, Human
aaugcccagccccuucugac

SEQ ID NO: 3233240 - RNA, 22 nt, Human
aaugcccagccccuucugaccc

SEQ ID NO: 3233241 - RNA, 23 nt, Human
aaugcccagccccuucugaccca

SEQ ID NO: 3233242 - RNA, 24 nt, Human
aaugcccagccccuucugacccau

SEQ ID NO: 3233243 - RNA, 16 nt, Human
aauggacguguuauga

SEQ ID NO: 3233244 - RNA, 13 nt, Human
aauggacauuucu

SEQ ID NO: 3233245 - RNA, 18 nt, Human
aauggaagacagcucuua

SEQ ID NO: 3233246 - RNA, 17 nt, Human
aauggaaaacuuaguuu

SEQ ID NO: 3233247 - RNA, 22 nt, Human
aauggaaaacuuaguuugugaa

SEQ ID NO: 3233248 - RNA, 20 nt, Human
aauggaaaaugccaugaauu

SEQ ID NO: 3233249 - RNA, 17 nt, Human
aauggaaacagaggacc

SEQ ID NO: 3233250 - RNA, 16 nt, Human
aauggaagagagaaag

SEQ ID NO: 3233251 - RNA, 18 nt, Human
aauggaaacagaggacca

SEQ ID NO: 3233252 - RNA, 14 nt, Human
aaugcuuuuagugu

SEQ ID NO: 3233253 - RNA, 16 nt, Human
aaugcuuuuagugugu

SEQ ID NO: 3233254 - RNA, 21 nt, Human
aaugcuuuuagugugugcaua

SEQ ID NO: 3233255 - RNA, 22 nt, Human
aaugcugucuuucuugcucccu

SEQ ID NO: 3233256 - RNA, 21 nt, Human
aaugcugucuuucuugcuccc

SEQ ID NO: 3233257 - RNA, 19 nt, Human
aaugcugucuuucuugcuc

SEQ ID NO: 3233258 - RNA, 17 nt, Human
aaugcugucuuucuugc

SEQ ID NO: 3233259 - RNA, 14 nt, Human
aaugcccagccccu

SEQ ID NO: 3233260 - RNA, 15 nt, Human
aaugcccagccccuu

SEQ ID NO: 3233261 - RNA, 13 nt, Human
aaugcccagcccc

SEQ ID NO: 3233262 - RNA, 16 nt, Human
aaugcauaaaauguua

SEQ ID NO: 3233263 - RNA, 21 nt, Human
uacaagcgugagccacugcac

SEQ ID NO: 3233264 - RNA, 23 nt, Human
uacaaaauguaacuguuaccauu

SEQ ID NO: 3233265 - RNA, 18 nt, Human
uacaaaauguaacuguua

SEQ ID NO: 3233266 - RNA, 15 nt, Human
uacaaaauguaacug

SEQ ID NO: 3233267 - RNA, 14 nt, Human
uacaaaauguaacu

SEQ ID NO: 3233268 - RNA, 12 nt, Human
uacaaaauguaa

SEQ ID NO: 3233269 - RNA, 18 nt, Human
uacaaguacugguaagau

SEQ ID NO: 3233270 - RNA, 14 nt, Human
uacaaggacagccc

SEQ ID NO: 3233271 - RNA, 21 nt, Human
uacaaggccccaagguuuaca

SEQ ID NO: 3233272 - RNA, 22 nt, Human
uacaaggccccaagguuuacau

SEQ ID NO: 3233273 - RNA, 22 nt, Human
uacaaguaguucuguauuugaa

SEQ ID NO: 3233274 - RNA, 23 nt, Human
uacaaguaguucuguauuugaaa

SEQ ID NO: 3233275 - RNA, 17 nt, Human
uacaaguaguucuguau

SEQ ID NO: 3233276 - RNA, 18 nt, Human
uacaaguaguucuguauu

SEQ ID NO: 3233277 - RNA, 19 nt, Human
uacaaguaguucuguauuu

SEQ ID NO: 3233278 - RNA, 21 nt, Human
uacaaguaguucuguauuuga

SEQ ID NO: 3233279 - RNA, 15 nt, Human
uacaaguaguucugu

SEQ ID NO: 3233280 - RNA, 16 nt, Human
uacaaguaguucugua

SEQ ID NO: 3233281 - RNA, 14 nt, Human
uacaaguaguucug

SEQ ID NO: 3233282 - RNA, 13 nt, Human
aaugcauaaaaug

SEQ ID NO: 3233283 - RNA, 20 nt, Human
aaugcaguuacaaauuauaa

SEQ ID NO: 3233284 - RNA, 17 nt, Human
aaugcaguuacaaauua

SEQ ID NO: 3233285 - RNA, 23 nt, Human
aaugcaguuacaaauuauaaugu

SEQ ID NO: 3233286 - RNA, 14 nt, Human
uacagaggacagua

SEQ ID NO: 3233287 - RNA, 23 nt, Human
uacagagcccacgcccccacugg

SEQ ID NO: 3233288 - RNA, 20 nt, Human
uacagagccguaaaaacuga

SEQ ID NO: 3233289 - RNA, 19 nt, Human
uacagagccguaaaaacug

SEQ ID NO: 3233290 - RNA, 18 nt, Human
uacagaggacaguauuug

SEQ ID NO: 3233291 - RNA, 15 nt, Human
uacaggcauagaguu

SEQ ID NO: 3233292 - RNA, 19 nt, Human
uacacucaagcaugaagau

SEQ ID NO: 3233293 - RNA, 22 nt, Human
uacagagccguaaaaacugaag

SEQ ID NO: 3233294 - RNA, 17 nt, Human
uacaggcuccugccacc

SEQ ID NO: 3233295 - RNA, 14 nt, Human
uacaggcuccugcc

SEQ ID NO: 3233296 - RNA, 15 nt, Human
uacaggcuccugcca

SEQ ID NO: 3233297 - RNA, 22 nt, Human
uacaggcgugagccaccgugcc

SEQ ID NO: 3233298 - RNA, 15 nt, Human
uacaguaaugucaua

SEQ ID NO: 3233299 - RNA, 17 nt, Human
uacaguaaugucauaaa

SEQ ID NO: 3233300 - RNA, 18 nt, Human
uacaguaaugucauaaag

SEQ ID NO: 3233301 - RNA, 14 nt, Human
aauggacauuucua

SEQ ID NO: 3233302 - RNA, 20 nt, Human
aauggacgguuuaggugaaa

SEQ ID NO: 3233303 - RNA, 21 nt, Human
uacauauuagcgacaacagau

SEQ ID NO: 3233304 - RNA, 23 nt, Human
uacauauguauacaugugccaug

SEQ ID NO: 3233305 - RNA, 18 nt, Human
uacauauguauacaugug

SEQ ID NO: 3233306 - RNA, 17 nt, Human
uacauauguauacaugu

SEQ ID NO: 3233307 - RNA, 12 nt, Human
uacauauugaau

SEQ ID NO: 3233308 - RNA, 12 nt, Human
aauguacugcau

SEQ ID NO: 3233309 - RNA, 16 nt, Human
uacaucacguuaaagu

SEQ ID NO: 3233310 - RNA, 15 nt, Human
uacaguaucucaggg

SEQ ID NO: 3233311 - RNA, 16 nt, Human
uacauagucugaagug

SEQ ID NO: 3233312 - RNA, 17 nt, Human
aauguaugcuucauaca

SEQ ID NO: 3233313 - RNA, 17 nt, Human
aauguacugauuucagu

SEQ ID NO: 3233314 - RNA, 19 nt, Human
aauguacugauuucaguaa

SEQ ID NO: 3233315 - RNA, 18 nt, Human
aauguaugcuucauacag

SEQ ID NO: 3233316 - RNA, 21 nt, Human
aauguaugcuucauacaggga

SEQ ID NO: 3233317 - RNA, 14 nt, Human
aauguauguaaaua

SEQ ID NO: 3233318 - RNA, 15 nt, Human
aauguauguaaauag

SEQ ID NO: 3233319 - RNA, 18 nt, Human
aauguacugcauaugaaa

SEQ ID NO: 3233320 - RNA, 14 nt, Human
aauguacugcauau

SEQ ID NO: 3233321 - RNA, 14 nt, Human
aauguauguguaag

SEQ ID NO: 3233322 - RNA, 12 nt, Human
aauguaugugua

SEQ ID NO: 3233323 - RNA, 20 nt, Human
aauguauucauauuuguacu

SEQ ID NO: 3233324 - RNA, 17 nt, Human
aauguauucauauuugu

SEQ ID NO: 3233325 - RNA, 16 nt, Human
aauguauucauauuug

SEQ ID NO: 3233326 - RNA, 15 nt, Human
aauguauucauauuu

SEQ ID NO: 3233327 - RNA, 11 nt, Human
aaugugauaug

SEQ ID NO: 3233328 - RNA, 19 nt, Human
aaugugauauaaacagcuu

SEQ ID NO: 3233329 - RNA, 14 nt, Human
aauguggcuccugg

SEQ ID NO: 3233330 - RNA, 23 nt, Human
aaugugagugguugaauaugauu

SEQ ID NO: 3233331 - RNA, 22 nt, Human
aaugugagugguugaauaugau

SEQ ID NO: 3233332 - RNA, 14 nt, Human
aaugugacuuugaa

SEQ ID NO: 3233333 - RNA, 14 nt, Human
uaaugaaacuugga

SEQ ID NO: 3233334 - RNA, 14 nt, Human
uaaucauauuagac

SEQ ID NO: 3233335 - RNA, 12 nt, Human
uaaucauauuag

SEQ ID NO: 3233336 - RNA, 22 nt, Human
uaaucauauuagacuucuguuu

SEQ ID NO: 3233337 - RNA, 19 nt, Human
uaaugaaagacuguacaaa

SEQ ID NO: 3233338 - RNA, 18 nt, Human
uaaugaaagacuguacaa

SEQ ID NO: 3233339 - RNA, 17 nt, Human
uaaugaaagacuguaca

SEQ ID NO: 3233340 - RNA, 14 nt, Human
uaaugaaagacugu

SEQ ID NO: 3233341 - RNA, 15 nt, Human
uaaugaaacuuggau

SEQ ID NO: 3233342 - RNA, 20 nt, Human
uaaugacaggccuguccaac

SEQ ID NO: 3233343 - RNA, 15 nt, Human
uaaugacaggccugu

SEQ ID NO: 3233344 - RNA, 23 nt, Human
uaaugaaagacuguacaaaguag

SEQ ID NO: 3233345 - RNA, 22 nt, Human
uaaugaaagacuguacaaagua

SEQ ID NO: 3233346 - RNA, 15 nt, Human
uaaugacuuaagcac

SEQ ID NO: 3233347 - RNA, 21 nt, Human
uaaugacuuaagcacacuuga

SEQ ID NO: 3233348 - RNA, 17 nt, Human
uaaugagcaauaucugc

SEQ ID NO: 3233349 - RNA, 21 nt, Human
uaaucaccagggccaaaagcu

SEQ ID NO: 3233350 - RNA, 21 nt, Human
uaaucacccuaccaacuuuac

SEQ ID NO: 3233351 - RNA, 23 nt, Human
uaaucacccuaccaacuuuacug

SEQ ID NO: 3233352 - RNA, 23 nt, Human
uaaucaagagccuuaaaacauca

SEQ ID NO: 3233353 - RNA, 14 nt, Human
uaaucaagagccuu

SEQ ID NO: 3233354 - RNA, 18 nt, Human
uaaucaagagccuuaaaa

SEQ ID NO: 3233355 - RNA, 19 nt, Human
uaaucaagagccuuaaaac

SEQ ID NO: 3233356 - RNA, 20 nt, Human
uaaucaagagccuuaaaaca

SEQ ID NO: 3233357 - RNA, 23 nt, Human
uaaucaacauggcuacuugcuuu

SEQ ID NO: 3233358 - RNA, 18 nt, Human
uaauaggcucugccugac

SEQ ID NO: 3233359 - RNA, 13 nt, Human
aaucuucugaacu

SEQ ID NO: 3233360 - RNA, 20 nt, Human
aaucuucugaacuuggcgcu

SEQ ID NO: 3233361 - RNA, 21 nt, Human
aaucuuccuggucgaaaguua

SEQ ID NO: 3233362 - RNA, 19 nt, Human
aaucuuccuggucgaaagu

SEQ ID NO: 3233363 - RNA, 21 nt, Human
aaucuuauuaaaguuucaaaa

SEQ ID NO: 3233364 - RNA, 20 nt, Human
aaucuuauuaaaguuucaaa

SEQ ID NO: 3233365 - RNA, 17 nt, Human
uaauaccuuagaaggua

SEQ ID NO: 3233366 - RNA, 23 nt, Human
aaucuuccuggucgaaaguuagu

SEQ ID NO: 3233367 - RNA, 22 nt, Human
uaauacugaaccacuuguagau

SEQ ID NO: 3233368 - RNA, 20 nt, Human
uaauacugaaccacuuguag

SEQ ID NO: 3233369 - RNA, 21 nt, Human
uaauacugaaccacuuguaga

SEQ ID NO: 3233370 - RNA, 13 nt, Human
uaauacugaacca

SEQ ID NO: 3233371 - RNA, 14 nt, Human
uaauacugaaccac

SEQ ID NO: 3233372 - RNA, 15 nt, Human
uaauacugaaccacu

SEQ ID NO: 3233373 - RNA, 19 nt, Human
uaauacugaaccacuugua

SEQ ID NO: 3233374 - RNA, 13 nt, Human
uaauacucuauuu

SEQ ID NO: 3233375 - RNA, 14 nt, Human
uaauacucuauuuu

SEQ ID NO: 3233376 - RNA, 21 nt, Human
uaauguaacugcucuugggca

SEQ ID NO: 3233377 - RNA, 13 nt, Human
uaaugaggaaacu

SEQ ID NO: 3233378 - RNA, 21 nt, Human
uaaugagcaauaucugcuaga

SEQ ID NO: 3233379 - RNA, 18 nt, Human
uaaugagcaauaucugcu

SEQ ID NO: 3233380 - RNA, 22 nt, Human
uaauggugaugcagucuuagau

SEQ ID NO: 3233381 - RNA, 18 nt, Human
aaucuuguugguucacca

SEQ ID NO: 3233382 - RNA, 19 nt, Human
aaucuuguugguucaccau

SEQ ID NO: 3233383 - RNA, 13 nt, Human
aaucuuguuuuga

SEQ ID NO: 3233384 - RNA, 14 nt, Human
aaucuuguuuugaa

SEQ ID NO: 3233385 - RNA, 17 nt, Human
aaucuuguuuugaaaau

SEQ ID NO: 3233386 - RNA, 23 nt, Human
aaucuuguuuugaaaauaaccua

SEQ ID NO: 3233387 - RNA, 19 nt, Human
aaucuugugaaaauaauug

SEQ ID NO: 3233388 - RNA, 14 nt, Human
aaucuugugaaaau

SEQ ID NO: 3233389 - RNA, 18 nt, Human
aaucuuuguaccaaaauu

SEQ ID NO: 3233390 - RNA, 20 nt, Human
aaucuuuguaccaaaauuuu

SEQ ID NO: 3233391 - RNA, 23 nt, Human
aaucuuuguaccaaaauuuuaaa

SEQ ID NO: 3233392 - RNA, 22 nt, Human
aaugacagguuugggaccccug

SEQ ID NO: 3233393 - RNA, 15 nt, Human
aaugacaggccuguc

SEQ ID NO: 3233394 - RNA, 15 nt, Human
aaugagccuggcaag

SEQ ID NO: 3233395 - RNA, 22 nt, Human
aaugagacagcagucuuaugcu

SEQ ID NO: 3233396 - RNA, 13 nt, Human
aaugagacagcag

SEQ ID NO: 3233397 - RNA, 19 nt, Human
aaucuuauuaaaguuucaa

SEQ ID NO: 3233398 - RNA, 23 nt, Human
aaucugucugcuggucacuucuu

SEQ ID NO: 3233399 - RNA, 11 nt, Human
aaucugucugc

SEQ ID NO: 3233400 - RNA, 22 nt, Human
aaucugucugcuggucacuucu

SEQ ID NO: 3233401 - RNA, 14 nt, Human
aaucugucugcugg

SEQ ID NO: 3233402 - RNA, 15 nt, Human
aaucucaaauaacua

SEQ ID NO: 3233403 - RNA, 15 nt, Human
aaucuauagaaagug

SEQ ID NO: 3233404 - RNA, 12 nt, Human
aaucucaaauag

SEQ ID NO: 3233405 - RNA, 16 nt, Human
aaucucaaauaggcua

SEQ ID NO: 3233406 - RNA, 22 nt, Human
aaucucaaauaggcuauuaaaa

SEQ ID NO: 3233407 - RNA, 13 nt, Human
aaucucaaauaac

SEQ ID NO: 3233408 - RNA, 14 nt, Human
aaucuauagaaagu

SEQ ID NO: 3233409 - RNA, 22 nt, Human
aaucuagccagugaacauaauu

SEQ ID NO: 3233410 - RNA, 13 nt, Human
aaucuacugcauu

SEQ ID NO: 3233411 - RNA, 14 nt, Human
aaucuacugcauuu

SEQ ID NO: 3233412 - RNA, 12 nt, Human
aaucuacuuaac

SEQ ID NO: 3233413 - RNA, 21 nt, Human
aaucuacuuaacccugacaaa

SEQ ID NO: 3233414 - RNA, 15 nt, Human
aaucuacugcauuua

SEQ ID NO: 3233415 - RNA, 13 nt, Human
aaucuagaagagu

SEQ ID NO: 3233416 - RNA, 19 nt, Human
aauccuuacaaaugauugc

SEQ ID NO: 3233417 - RNA, 17 nt, Human
aauccuugauaauauau

SEQ ID NO: 3233418 - RNA, 19 nt, Human
aauccuugauaauauauug

SEQ ID NO: 3233419 - RNA, 14 nt, Human
aaucuaacauuauu

SEQ ID NO: 3233420 - RNA, 15 nt, Human
aaucuaacauuauua

SEQ ID NO: 3233421 - RNA, 17 nt, Human
aaucauuguccagagcu

SEQ ID NO: 3233422 - RNA, 15 nt, Human
aaucauuguccagag

SEQ ID NO: 3233423 - RNA, 12 nt, Human
uaaguagauuuc

SEQ ID NO: 3233424 - RNA, 15 nt, Human
uaaguagauuucaug

SEQ ID NO: 3233425 - RNA, 19 nt, Human
uaaguacuauguaucaaug

SEQ ID NO: 3233426 - RNA, 13 nt, Human
aaucauguuucuu

SEQ ID NO: 3233427 - RNA, 15 nt, Human
aaucaugccaguauu

SEQ ID NO: 3233428 - RNA, 17 nt, Human
aaucaugccaguauuuu

SEQ ID NO: 3233429 - RNA, 15 nt, Human
aaucaucauuauuau

SEQ ID NO: 3233430 - RNA, 12 nt, Human
uaauaaaauauu

SEQ ID NO: 3233431 - RNA, 13 nt, Human
uaauaaaauauuu

SEQ ID NO: 3233432 - RNA, 14 nt, Human
uaauaaaauauuuu

SEQ ID NO: 3233433 - RNA, 15 nt, Human
uaauaaaauauuuuc

SEQ ID NO: 3233434 - RNA, 17 nt, Human
uaauaaaauauuuucug

SEQ ID NO: 3233435 - RNA, 18 nt, Human
uaauaaaauauuuucugu

SEQ ID NO: 3233436 - RNA, 19 nt, Human
uaauaaaauauuuucugug

SEQ ID NO: 3233437 - RNA, 20 nt, Human
uaauaaaauauuuucugugu

SEQ ID NO: 3233438 - RNA, 21 nt, Human
uaauaaaauauuuucugugug

SEQ ID NO: 3233439 - RNA, 22 nt, Human
uaauaaaauauuuucugugugu

SEQ ID NO: 3233440 - RNA, 12 nt, Human
uaauaaaaucac

SEQ ID NO: 3233441 - RNA, 21 nt, Human
uaaguuuugacaagcuggcuu

SEQ ID NO: 3233442 - RNA, 11 nt, Human
uaauaaaacug

SEQ ID NO: 3233443 - RNA, 12 nt, Human
uaauaaaacuga

SEQ ID NO: 3233444 - RNA, 13 nt, Human
uaauaaaacugau

SEQ ID NO: 3233445 - RNA, 15 nt, Human
uaauaaaacugaugu

SEQ ID NO: 3233446 - RNA, 19 nt, Human
uaauaaaacugaugugaaa

SEQ ID NO: 3233447 - RNA, 21 nt, Human
uaaguuuggcaaacagaaugu

SEQ ID NO: 3233448 - RNA, 20 nt, Human
uaaguuugcacucaaaucuu

SEQ ID NO: 3233449 - RNA, 12 nt, Human
uaaguuugcacu

SEQ ID NO: 3233450 - RNA, 17 nt, Human
uaaguuugcacucaaau

SEQ ID NO: 3233451 - RNA, 13 nt, Human
uaaguuugcacuc

SEQ ID NO: 3233452 - RNA, 17 nt, Human
uaacauagaauugcaau

SEQ ID NO: 3233453 - RNA, 13 nt, Human
uaacaugcugugu

SEQ ID NO: 3233454 - RNA, 14 nt, Human
uaacaugcugugua

SEQ ID NO: 3233455 - RNA, 15 nt, Human
uaacaugcuguguaa

SEQ ID NO: 3233456 - RNA, 18 nt, Human
uaacaugcuguguaagcu

SEQ ID NO: 3233457 - RNA, 21 nt, Human
uaacaugcuguguaagcugug

SEQ ID NO: 3233458 - RNA, 22 nt, Human
uaacaugcuguguaagcugugu

SEQ ID NO: 3233459 - RNA, 20 nt, Human
uaacaugcccauauuuuacu

SEQ ID NO: 3233460 - RNA, 14 nt, Human
uaacauggaaguac

SEQ ID NO: 3233461 - RNA, 12 nt, Human
uaacuaaaauaa

SEQ ID NO: 3233462 - RNA, 19 nt, Human
uaacuaaaauaauuuugua

SEQ ID NO: 3233463 - RNA, 18 nt, Human
uaacuaaaauaauuuugu

SEQ ID NO: 3233464 - RNA, 15 nt, Human
uaacuaaaagguaug

SEQ ID NO: 3233465 - RNA, 14 nt, Human
uaacuaaaagguau

SEQ ID NO: 3233466 - RNA, 15 nt, Human
uaacauggaaguacu

SEQ ID NO: 3233467 - RNA, 15 nt, Human
uaaccucugcuuuua

SEQ ID NO: 3233468 - RNA, 17 nt, Human
uaaccucugcuuuuauc

SEQ ID NO: 3233469 - RNA, 20 nt, Human
uaaccucugcuuuuaucuca

SEQ ID NO: 3233470 - RNA, 18 nt, Human
uaaccucuguucaggaag

SEQ ID NO: 3233471 - RNA, 14 nt, Human
uaaccucuguucag

SEQ ID NO: 3233472 - RNA, 14 nt, Human
aauauccauauuaa

SEQ ID NO: 3233473 - RNA, 17 nt, Human
aauaucaaauuaauugu

SEQ ID NO: 3233474 - RNA, 14 nt, Human
aauaucaaauuaau

SEQ ID NO: 3233475 - RNA, 19 nt, Human
aauaucaaauuaauugugu

SEQ ID NO: 3233476 - RNA, 21 nt, Human
aauaucaaauuaauuguguga

SEQ ID NO: 3233477 - RNA, 13 nt, Human
aauaucacucauu

SEQ ID NO: 3233478 - RNA, 15 nt, Human
aauaucacucauuaa

SEQ ID NO: 3233479 - RNA, 16 nt, Human
aauaucacucauuaau

SEQ ID NO: 3233480 - RNA, 17 nt, Human
aauaucacucauuaauu

SEQ ID NO: 3233481 - RNA, 18 nt, Human
aauauauuacuuaacugu

SEQ ID NO: 3233482 - RNA, 21 nt, Human
aauauauuaguaagauacugu

SEQ ID NO: 3233483 - RNA, 20 nt, Human
aauauauggucuaauguuua

SEQ ID NO: 3233484 - RNA, 19 nt, Human
aauauauggucuaauguuu

SEQ ID NO: 3233485 - RNA, 18 nt, Human
aauauauggucuaauguu

SEQ ID NO: 3233486 - RNA, 17 nt, Human
aauauauggucuaaugu

SEQ ID NO: 3233487 - RNA, 13 nt, Human
aauauaugugaaa

SEQ ID NO: 3233488 - RNA, 14 nt, Human
aauauaugugaaag

SEQ ID NO: 3233489 - RNA, 16 nt, Human
aauagacagcaugaga

SEQ ID NO: 3233490 - RNA, 14 nt, Human
aauagcugggacua

SEQ ID NO: 3233491 - RNA, 13 nt, Human
aauagcugggacu

SEQ ID NO: 3233492 - RNA, 13 nt, Human
aauagcauguugu

SEQ ID NO: 3233493 - RNA, 15 nt, Human
aauagcauguuguag

SEQ ID NO: 3233494 - RNA, 16 nt, Human
aauagcauguuguaga

SEQ ID NO: 3233495 - RNA, 17 nt, Human
aauagcauguuguagau

SEQ ID NO: 3233496 - RNA, 18 nt, Human
aauagcauguuguagaua

SEQ ID NO: 3233497 - RNA, 16 nt, Human
aauagaugcugacugu

SEQ ID NO: 3233498 - RNA, 15 nt, Human
aauaggacuuguuuu

SEQ ID NO: 3233499 - RNA, 14 nt, Human
aauaggacuuguuu

SEQ ID NO: 3233500 - RNA, 17 nt, Human
aauaggagggaaaccuu

SEQ ID NO: 3233501 - RNA, 19 nt, Human
aauaggagggaaaccuuug

SEQ ID NO: 3233502 - RNA, 14 nt, Human
aauaggaugggcuu

SEQ ID NO: 3233503 - RNA, 20 nt, Human
aauaggaugggcuucugugc

SEQ ID NO: 3233504 - RNA, 15 nt, Human
aauaggcaaauuaau

SEQ ID NO: 3233505 - RNA, 16 nt, Human
aauaggcaaauuaauc

SEQ ID NO: 3233506 - RNA, 20 nt, Human
aauaggcuauuaaaaaaguc

SEQ ID NO: 3233507 - RNA, 21 nt, Human
aauaggcuauuaaaaaagucu

SEQ ID NO: 3233508 - RNA, 19 nt, Human
aauagggcccaugggaggg

SEQ ID NO: 3233509 - RNA, 20 nt, Human
aauagggcccaugggaggga

SEQ ID NO: 3233510 - RNA, 21 nt, Human
aauaguaggcaagauggcaca

SEQ ID NO: 3233511 - RNA, 13 nt, Human
aauaguaggcaag

SEQ ID NO: 3233512 - RNA, 16 nt, Human
aauaguaauauaauac

SEQ ID NO: 3233513 - RNA, 18 nt, Human
aauagggcuaggaauaua

SEQ ID NO: 3233514 - RNA, 15 nt, Human
aauaguaauauaaua

SEQ ID NO: 3233515 - RNA, 14 nt, Human
aauaguaauauaau

SEQ ID NO: 3233516 - RNA, 13 nt, Human
aauaguaauauaa

SEQ ID NO: 3233517 - RNA, 12 nt, Human
aauaguaauaua

SEQ ID NO: 3233518 - RNA, 15 nt, Human
aauaggaaaaacuga

SEQ ID NO: 3233519 - RNA, 16 nt, Human
aauaggaaaaacugau

SEQ ID NO: 3233520 - RNA, 16 nt, Human
aauagcuuuaaugaua

SEQ ID NO: 3233521 - RNA, 15 nt, Human
aauagcuuuaaugau

SEQ ID NO: 3233522 - RNA, 17 nt, Human
aauaggaaaaacugauu

SEQ ID NO: 3233523 - RNA, 18 nt, Human
aauaggaaaaacugauuu

SEQ ID NO: 3233524 - RNA, 19 nt, Human
aauaggaaaaacugauuuu

SEQ ID NO: 3233525 - RNA, 14 nt, Human
aauauuguuaaggg

SEQ ID NO: 3233526 - RNA, 14 nt, Human
aauauuucuucaaa

SEQ ID NO: 3233527 - RNA, 15 nt, Human
aauauuucuucaaau

SEQ ID NO: 3233528 - RNA, 16 nt, Human
aauauuucuucaaaua

SEQ ID NO: 3233529 - RNA, 20 nt, Human
aauauuucuucaaauaucuc

SEQ ID NO: 3233530 - RNA, 14 nt, Human
aaucagaauggaag

SEQ ID NO: 3233531 - RNA, 21 nt, Human
aaucagaagauagucuuggaa

SEQ ID NO: 3233532 - RNA, 15 nt, Human
aaucacuuucauaau

SEQ ID NO: 3233533 - RNA, 23 nt, Human
aaucacuguguauauuugauuua

SEQ ID NO: 3233534 - RNA, 22 nt, Human
aaucacuguguauauuugauuu

SEQ ID NO: 3233535 - RNA, 17 nt, Human
aauauuuucauuauaca

SEQ ID NO: 3233536 - RNA, 21 nt, Human
aaucacuguguauauuugauu

SEQ ID NO: 3233537 - RNA, 21 nt, Human
aauauuuuaauuuuuaaaugc

SEQ ID NO: 3233538 - RNA, 20 nt, Human
aauauuuuaauuuuuaaaug

SEQ ID NO: 3233539 - RNA, 11 nt, Human
aauauuuuaau

SEQ ID NO: 3233540 - RNA, 17 nt, Human
aauaugcaaagcacuga

SEQ ID NO: 3233541 - RNA, 15 nt, Human
aauaugcaaagcacu

SEQ ID NO: 3233542 - RNA, 14 nt, Human
aauaugaugacaau

SEQ ID NO: 3233543 - RNA, 16 nt, Human
aauaugaugacaauca

SEQ ID NO: 3233544 - RNA, 18 nt, Human
aauaugauuaaaaauauc

SEQ ID NO: 3233545 - RNA, 24 nt, Human
aauaugcaaagcacugacuucuaa

SEQ ID NO: 3233546 - RNA, 18 nt, Human
aauauugauaugcuuaua

SEQ ID NO: 3233547 - RNA, 17 nt, Human
aauauugauaugcuuau

SEQ ID NO: 3233548 - RNA, 11 nt, Human
aauauugcuga

SEQ ID NO: 3233549 - RNA, 12 nt, Human
aauauugcugau

SEQ ID NO: 3233550 - RNA, 13 nt, Human
aauauugcugaug

SEQ ID NO: 3233551 - RNA, 15 nt, Human
aauauugcugauggu

SEQ ID NO: 3233552 - RNA, 18 nt, Human
aauauugcugauggugca

SEQ ID NO: 3233553 - RNA, 21 nt, Human
aauauugcugauggugcaaug

SEQ ID NO: 3233554 - RNA, 22 nt, Human
aauauugcugauggugcaauga

SEQ ID NO: 3233555 - RNA, 18 nt, Human
uaagaauauuugaaugua

SEQ ID NO: 3233556 - RNA, 15 nt, Human
uaagaauauuugaau

SEQ ID NO: 3233557 - RNA, 18 nt, Human
uaacuuugguuaaaaucu

SEQ ID NO: 3233558 - RNA, 18 nt, Human
uaagaaugaguuucuuag

SEQ ID NO: 3233559 - RNA, 13 nt, Human
uaagaaugaguuu

SEQ ID NO: 3233560 - RNA, 17 nt, Human
uaagacauuuuuggaag

SEQ ID NO: 3233561 - RNA, 20 nt, Human
uaagaaugaguuucuuagac

SEQ ID NO: 3233562 - RNA, 19 nt, Human
uaacuaacaaacagauucu

SEQ ID NO: 3233563 - RNA, 14 nt, Human
uaacuaaauuuuaa

SEQ ID NO: 3233564 - RNA, 19 nt, Human
uaacuaaauuuuaaagcca

SEQ ID NO: 3233565 - RNA, 20 nt, Human
uaacuaaaauaauuuuguaa

SEQ ID NO: 3233566 - RNA, 21 nt, Human
uaacuaaaauaauuuuguaau

SEQ ID NO: 3233567 - RNA, 14 nt, Human
uaacuaaaauguau

SEQ ID NO: 3233568 - RNA, 16 nt, Human
uaacuaaaauguaucu

SEQ ID NO: 3233569 - RNA, 17 nt, Human
uaacuaaaauguaucua

SEQ ID NO: 3233570 - RNA, 23 nt, Human
uaacuaaaauguaucuaagaaua

SEQ ID NO: 3233571 - RNA, 22 nt, Human
uaacuaccuuuggcuuaauucc

SEQ ID NO: 3233572 - RNA, 21 nt, Human
uaacuaccuuuggcuuaauuc

SEQ ID NO: 3233573 - RNA, 17 nt, Human
uaacuaccuuuggcuua

SEQ ID NO: 3233574 - RNA, 18 nt, Human
uaacuacauauugaauag

SEQ ID NO: 3233575 - RNA, 13 nt, Human
aauauccucaauu

SEQ ID NO: 3233576 - RNA, 15 nt, Human
aauaucucuauuuaa

SEQ ID NO: 3233577 - RNA, 16 nt, Human
aauaucucuauuuaau

SEQ ID NO: 3233578 - RNA, 23 nt, Human
aauaucucuauuuaauuuugaca

SEQ ID NO: 3233579 - RNA, 18 nt, Human
aauaucucugaguucugu

SEQ ID NO: 3233580 - RNA, 21 nt, Human
aauaucuaguaauauauuuaa

SEQ ID NO: 3233581 - RNA, 18 nt, Human
aauaucuaguaauauauu

SEQ ID NO: 3233582 - RNA, 16 nt, Human
aauaucuaguaauaua

SEQ ID NO: 3233583 - RNA, 19 nt, Human
aauaucugaaaauguaugu

SEQ ID NO: 3233584 - RNA, 18 nt, Human
aauaucugaaaauguaug

SEQ ID NO: 3233585 - RNA, 17 nt, Human
aauaucugaaaauguau

SEQ ID NO: 3233586 - RNA, 16 nt, Human
aauaucugaaaaugua

SEQ ID NO: 3233587 - RNA, 19 nt, Human
aauaucuuuuuuuuaauaa

SEQ ID NO: 3233588 - RNA, 23 nt, Human
aauaugaaauuuuuuuucaugcu

SEQ ID NO: 3233589 - RNA, 20 nt, Human
aauaugaaauuuuuuuucau

SEQ ID NO: 3233590 - RNA, 12 nt, Human
aauaucuuucug

SEQ ID NO: 3233591 - RNA, 20 nt, Human
aauaucugaaaauguaugug

SEQ ID NO: 3233592 - RNA, 18 nt, Human
aauaucuucguuaguaau

SEQ ID NO: 3233593 - RNA, 17 nt, Human
aauaucuugcuugaacu

SEQ ID NO: 3233594 - RNA, 15 nt, Human
aauaucuugcuugaa

SEQ ID NO: 3233595 - RNA, 14 nt, Human
aauaucugugaaau

SEQ ID NO: 3233596 - RNA, 19 nt, Human
aauaucugugaaauaucau

SEQ ID NO: 3233597 - RNA, 20 nt, Human
uaaauguugaaagaucaaaa

SEQ ID NO: 3233598 - RNA, 15 nt, Human
uaaauguugaaagau

SEQ ID NO: 3233599 - RNA, 19 nt, Human
uaaauguuauguauauggu

SEQ ID NO: 3233600 - RNA, 16 nt, Human
uaaauguuauguauau

SEQ ID NO: 3233601 - RNA, 15 nt, Human
uaaauguuauguaua

SEQ ID NO: 3233602 - RNA, 14 nt, Human
uaaauguuauguau

SEQ ID NO: 3233603 - RNA, 19 nt, Human
uaaaugcaaccauuugaaa

SEQ ID NO: 3233604 - RNA, 16 nt, Human
uaaaugcaguuacaaa

SEQ ID NO: 3233605 - RNA, 21 nt, Human
uaaaugcaguuacaaauuaua

SEQ ID NO: 3233606 - RNA, 19 nt, Human
uaaaugcaguuacaaauua

SEQ ID NO: 3233607 - RNA, 17 nt, Human
uaaaugcaguuacaaau

SEQ ID NO: 3233608 - RNA, 21 nt, Human
uaaaucuguccaacugagaag

SEQ ID NO: 3233609 - RNA, 18 nt, Human
uaaaucucuucuguguuu

SEQ ID NO: 3233610 - RNA, 14 nt, Human
uaaaucucuucugu

SEQ ID NO: 3233611 - RNA, 17 nt, Human
aauacaaaguuagagaa

SEQ ID NO: 3233612 - RNA, 18 nt, Human
uaaauaaguuauaaagau

SEQ ID NO: 3233613 - RNA, 12 nt, Human
uaaauaauucuu

SEQ ID NO: 3233614 - RNA, 23 nt, Human
aauaacuuagacucuaguauuua

SEQ ID NO: 3233615 - RNA, 15 nt, Human
aauaacuguaauuau

SEQ ID NO: 3233616 - RNA, 12 nt, Human
aauaagaaaaga

SEQ ID NO: 3233617 - RNA, 16 nt, Human
aauaauuauuuauuac

SEQ ID NO: 3233618 - RNA, 20 nt, Human
aauaagaauagaacaacaua

SEQ ID NO: 3233619 - RNA, 22 nt, Human
aauaacuguaauuauuugaaug

SEQ ID NO: 3233620 - RNA, 14 nt, Human
aauaauucuuuuuu

SEQ ID NO: 3233621 - RNA, 15 nt, Human
aauaauucuuuuuua

SEQ ID NO: 3233622 - RNA, 20 nt, Human
aauaauucuuuuuuauuaau

SEQ ID NO: 3233623 - RNA, 21 nt, Human
aauaauucuuuuuuauuaauc

SEQ ID NO: 3233624 - RNA, 23 nt, Human
aauaauucuuuuuuauuaaucac

SEQ ID NO: 3233625 - RNA, 13 nt, Human
aauaauugacagg

SEQ ID NO: 3233626 - RNA, 17 nt, Human
aauaauuuguggugauu

SEQ ID NO: 3233627 - RNA, 14 nt, Human
aauaauuuuaucuc

SEQ ID NO: 3233628 - RNA, 11 nt, Human
aauaauuuuau

SEQ ID NO: 3233629 - RNA, 13 nt, Human
aauaauuuuguaa

SEQ ID NO: 3233630 - RNA, 15 nt, Human
aauaauuuuguaaug

SEQ ID NO: 3233631 - RNA, 14 nt, Human
aauaauuuuguaau

SEQ ID NO: 3233632 - RNA, 16 nt, Human
aauaaccguaaagguu

SEQ ID NO: 3233633 - RNA, 21 nt, Human
aauaacugauuaguaagucuu

SEQ ID NO: 3233634 - RNA, 13 nt, Human
aauaacugaauuu

SEQ ID NO: 3233635 - RNA, 15 nt, Human
aauaacugaauuugg

SEQ ID NO: 3233636 - RNA, 16 nt, Human
aauaacugaauuugga

SEQ ID NO: 3233637 - RNA, 22 nt, Human
aauaacauguaauuaaguacua

SEQ ID NO: 3233638 - RNA, 14 nt, Human
aauaaauuggaguu

SEQ ID NO: 3233639 - RNA, 20 nt, Human
aauaaauugcuccuugacau

SEQ ID NO: 3233640 - RNA, 16 nt, Human
aauaaauugcuccuug

SEQ ID NO: 3233641 - RNA, 22 nt, Human
aauaaaugguuuggugcuuuuu

SEQ ID NO: 3233642 - RNA, 15 nt, Human
aauaaaguuaaaagu

SEQ ID NO: 3233643 - RNA, 12 nt, Human
aauaaaguuuga

SEQ ID NO: 3233644 - RNA, 16 nt, Human
aauaaaucauaaaacu

SEQ ID NO: 3233645 - RNA, 19 nt, Human
aauaaauccacccauguua

SEQ ID NO: 3233646 - RNA, 12 nt, Human
aauaaaacugau

SEQ ID NO: 3233647 - RNA, 15 nt, Human
aauaaaacugaugug

SEQ ID NO: 3233648 - RNA, 18 nt, Human
aauaaaacugaugugaaa

SEQ ID NO: 3233649 - RNA, 19 nt, Human
aauaaaacugaugugaaac

SEQ ID NO: 3233650 - RNA, 12 nt, Human
aauaaaacuguc

SEQ ID NO: 3233651 - RNA, 13 nt, Human
uaaaguauaaugu

SEQ ID NO: 3233652 - RNA, 15 nt, Human
uaaaguauaauguuu

SEQ ID NO: 3233653 - RNA, 17 nt, Human
uaaaguauacucuuagg

SEQ ID NO: 3233654 - RNA, 21 nt, Human
uaaaguaguaaaagaagaaau

SEQ ID NO: 3233655 - RNA, 23 nt, Human
uaaaguacugagcagugauauuc

SEQ ID NO: 3233656 - RNA, 22 nt, Human
uaaaguacugagcagugauauu

SEQ ID NO: 3233657 - RNA, 19 nt, Human
uaaaguacugagcagugau

SEQ ID NO: 3233658 - RNA, 20 nt, Human
uaaaguaauuguuccagaga

SEQ ID NO: 3233659 - RNA, 17 nt, Human
uaaaguaauuguuccag

SEQ ID NO: 3233660 - RNA, 13 nt, Human
uaaaguaauuggu

SEQ ID NO: 3233661 - RNA, 21 nt, Human
uaaagguuucuauuuucucug

SEQ ID NO: 3233662 - RNA, 15 nt, Human
uaaagguuuauuuuu

SEQ ID NO: 3233663 - RNA, 21 nt, Human
uaaagguuuauuuuucuguua

SEQ ID NO: 3233664 - RNA, 20 nt, Human
guuuugaaauaaaaagagua

SEQ ID NO: 3233665 - RNA, 16 nt, Human
guuuucuuuuaauuuu

SEQ ID NO: 3233666 - RNA, 23 nt, Human
guuuucuugauaauuuuccuuua

SEQ ID NO: 3233667 - RNA, 21 nt, Human
guuuucuugauaauuuuccuu

SEQ ID NO: 3233668 - RNA, 16 nt, Human
guuuucuugauaauuu

SEQ ID NO: 3233669 - RNA, 23 nt, Human
uaaaggucacuuuucacauccuu

SEQ ID NO: 3233670 - RNA, 19 nt, Human
uaaagggcccaaugaauua

SEQ ID NO: 3233671 - RNA, 20 nt, Human
uaaagggcccaaugaauuau

SEQ ID NO: 3233672 - RNA, 21 nt, Human
uaaagggcccaaugaauuauu

SEQ ID NO: 3233673 - RNA, 20 nt, Human
uaaagguuaccgauuucaaa

SEQ ID NO: 3233674 - RNA, 14 nt, Human
aauaaaaagacaac

SEQ ID NO: 3233675 - RNA, 21 nt, Human
aaguuuugugaaauuuuucau

SEQ ID NO: 3233676 - RNA, 14 nt, Human
aauaaaaaaaagaa

SEQ ID NO: 3233677 - RNA, 13 nt, Human
aauaaaaaaaaga

SEQ ID NO: 3233678 - RNA, 16 nt, Human
aauaaaaauucuagau

SEQ ID NO: 3233679 - RNA, 20 nt, Human
aaguuuugugaaauuuuuca

SEQ ID NO: 3233680 - RNA, 19 nt, Human
aaguuuugugaaauuuuuc

SEQ ID NO: 3233681 - RNA, 18 nt, Human
aaguuuugugaaauuuuu

SEQ ID NO: 3233682 - RNA, 16 nt, Human
aaguuuugugaaauuu

SEQ ID NO: 3233683 - RNA, 15 nt, Human
aaguuuugugaaauu

SEQ ID NO: 3233684 - RNA, 14 nt, Human
aaguuuugugaaau

SEQ ID NO: 3233685 - RNA, 13 nt, Human
aaguuuugugaaa

SEQ ID NO: 3233686 - RNA, 12 nt, Human
aaguuuugugaa

SEQ ID NO: 3233687 - RNA, 15 nt, Human
uaaagucagaaguuu

SEQ ID NO: 3233688 - RNA, 19 nt, Human
uaaaguauuuggguuuugu

SEQ ID NO: 3233689 - RNA, 11 nt, Human
aaguuuuguga

SEQ ID NO: 3233690 - RNA, 21 nt, Human
uaaaguaugcauuauuaaauu

SEQ ID NO: 3233691 - RNA, 13 nt, Human
uaaaguauucuuu

SEQ ID NO: 3233692 - RNA, 23 nt, Human
uaaaguauucuuuuucuuuuuua

SEQ ID NO: 3233693 - RNA, 16 nt, Human
aaccuuuugagugccu

SEQ ID NO: 3233694 - RNA, 23 nt, Human
aaccuuuugagugccuuacacaa

SEQ ID NO: 3233695 - RNA, 18 nt, Human
aaccuuuuuauuucaaac

SEQ ID NO: 3233696 - RNA, 13 nt, Human
aaccuuuucuugu

SEQ ID NO: 3233697 - RNA, 22 nt, Human
aaccuuuucuuguaucuggauu

SEQ ID NO: 3233698 - RNA, 20 nt, Human
aacauggcuacuugcuuuga

SEQ ID NO: 3233699 - RNA, 12 nt, Human
aacccucagagc

SEQ ID NO: 3233700 - RNA, 19 nt, Human
aacccucagagccaccccu

SEQ ID NO: 3233701 - RNA, 21 nt, Human
aaccguguuugucucuucugg

SEQ ID NO: 3233702 - RNA, 20 nt, Human
aaccguguuugucucuucug

SEQ ID NO: 3233703 - RNA, 19 nt, Human
aaccguguuugucucuucu

SEQ ID NO: 3233704 - RNA, 22 nt, Human
aaccguaaagguuuauuuuucu

SEQ ID NO: 3233705 - RNA, 13 nt, Human
aaccgggauggga

SEQ ID NO: 3233706 - RNA, 21 nt, Human
aacccugacaaauuuuaauua

SEQ ID NO: 3233707 - RNA, 16 nt, Human
aacaggcccuccuccc

SEQ ID NO: 3233708 - RNA, 18 nt, Human
aacaucuuuauugaaauu

SEQ ID NO: 3233709 - RNA, 19 nt, Human
aacaucuuuauugaaauuc

SEQ ID NO: 3233710 - RNA, 20 nt, Human
aacaugacucuuuauugucu

SEQ ID NO: 3233711 - RNA, 19 nt, Human
aacagcccuauuucuugau

SEQ ID NO: 3233712 - RNA, 15 nt, Human
aacagccgcuccaga

SEQ ID NO: 3233713 - RNA, 22 nt, Human
aacaggcaaacauuuucucuua

SEQ ID NO: 3233714 - RNA, 11 nt, Human
aacaggcagau

SEQ ID NO: 3233715 - RNA, 23 nt, Human
aaauucuucuccacuuucuagcc

SEQ ID NO: 3233716 - RNA, 22 nt, Human
aaauucuguuuuuaaaaauuag

SEQ ID NO: 3233717 - RNA, 21 nt, Human
aaauauuuuuuuuucuuucag

SEQ ID NO: 3233718 - RNA, 13 nt, Human
aaaucuuuuugcu

SEQ ID NO: 3233719 - RNA, 14 nt, Human
aaaucuuuuugcuu

SEQ ID NO: 3233720 - RNA, 14 nt, Human
aaaucucaucccua

SEQ ID NO: 3233721 - RNA, 16 nt, Human
aaaugcuucauuugua

SEQ ID NO: 3233722 - RNA, 19 nt, Human
aaaugcuucauuuguaugu

SEQ ID NO: 3233723 - RNA, 23 nt, Human
aaaugcuucauuuguaugucaaa

SEQ ID NO: 3233724 - RNA, 22 nt, Human
aaauggaguuggaguucauuca

SEQ ID NO: 3233725 - RNA, 14 nt, Human
aaauggaguuggag

SEQ ID NO: 3233726 - RNA, 23 nt, Human
aaaugcugucuuucuugcucccu

SEQ ID NO: 3233727 - RNA, 22 nt, Human
aaaugcugucuuucuugcuccc

SEQ ID NO: 3233728 - RNA, 22 nt, Human
aaauauuuaugaagaaaauacu

SEQ ID NO: 3233729 - RNA, 16 nt, Human
aaauauuuaugaagaa

SEQ ID NO: 3233730 - RNA, 15 nt, Human
aaauauuuaugaaga

SEQ ID NO: 3233731 - RNA, 13 nt, Human
aaauauuuaugaa

SEQ ID NO: 3233732 - RNA, 22 nt, Human
aaauauuuagauguaauuuugu

SEQ ID NO: 3233733 - RNA, 21 nt, Human
aaauauuuaauguugaacaaa

SEQ ID NO: 3233734 - RNA, 17 nt, Human
aaauauuuaauguugaa

SEQ ID NO: 3233735 - RNA, 12 nt, Human
aaauauuguuaa

SEQ ID NO: 3233736 - RNA, 20 nt, Human
aaaggaugcccaaagaugca

SEQ ID NO: 3233737 - RNA, 22 nt, Human
aaauguuuucauauuuuucaaa

SEQ ID NO: 3233738 - RNA, 18 nt, Human
aaauguuuucagcuagga

SEQ ID NO: 3233739 - RNA, 11 nt, Human
aaauguuuuca

SEQ ID NO: 3233740 - RNA, 15 nt, Human
aaauguuuucagcua

SEQ ID NO: 3233741 - RNA, 14 nt, Human
aaauguuuucagcu

SEQ ID NO: 3233742 - RNA, 19 nt, Human
aaauucuguuuuuaaaaau

SEQ ID NO: 3233743 - RNA, 17 nt, Human
aaauucuguuuuuaaaa

SEQ ID NO: 3233744 - RNA, 15 nt, Human
aaauucuguuuuuaa

SEQ ID NO: 3233745 - RNA, 12 nt, Human
aaauucuguuuu

SEQ ID NO: 3233746 - RNA, 23 nt, Human
aaauguuuuguaaacuuugaaau

SEQ ID NO: 3233747 - RNA, 13 nt, Human
aaauguuuuguaa

SEQ ID NO: 3233748 - RNA, 14 nt, Human
aaauguuuuguaaa

SEQ ID NO: 3233749 - RNA, 16 nt, Human
aaauguuuuguaaacu

SEQ ID NO: 3233750 - RNA, 22 nt, Human
aaauguuuuguaaacuuugaaa

SEQ ID NO: 3233751 - RNA, 21 nt, Human
aaauguuuuguaaacuuugaa

SEQ ID NO: 3233752 - RNA, 20 nt, Human
aaauguuuuguaaacuuuga

SEQ ID NO: 3233753 - RNA, 19 nt, Human
aaauguuuuguaaacuuug

SEQ ID NO: 3233754 - RNA, 13 nt, Human
aaauguucaucaa

SEQ ID NO: 3233755 - RNA, 23 nt, Human
aaauggaguuggaguucauucau

SEQ ID NO: 3233756 - RNA, 18 nt, Human
aaauggcaacaaacugca

SEQ ID NO: 3233757 - RNA, 15 nt, Human
aaauggcaacaaacu

SEQ ID NO: 3233758 - RNA, 17 nt, Human
aaauggcaaguuuucca

SEQ ID NO: 3233759 - RNA, 20 nt, Human
aaauggcaacaaacugcaca

SEQ ID NO: 3233760 - RNA, 17 nt, Human
aaaagauaaauauuaua

SEQ ID NO: 3233761 - RNA, 21 nt, Human
aaaagauaccuuaaaauuuga

SEQ ID NO: 3233762 - RNA, 17 nt, Human
aaaagauaccuuaaaau

SEQ ID NO: 3233763 - RNA, 22 nt, Human
aaaagauaccuuaaaauuugaa

SEQ ID NO: 3233764 - RNA, 14 nt, Human
aaaagauaaauauu

SEQ ID NO: 3233765 - RNA, 12 nt, Human
aaaagauaaaga

SEQ ID NO: 3233766 - RNA, 22 nt, Human
aaaagauaaagaccagaaauuc

SEQ ID NO: 3233767 - RNA, 15 nt, Human
aaaagaguuaaggca

SEQ ID NO: 3233768 - RNA, 19 nt, Human
aaaagaguguaaaauauuu

SEQ ID NO: 3233769 - RNA, 21 nt, Human
aaaagauaaaaaaacagcuuu

SEQ ID NO: 3233770 - RNA, 19 nt, Human
aaaagagaugaugaaaaua

SEQ ID NO: 3233771 - RNA, 16 nt, Human
aaaagagaugaugaaa

SEQ ID NO: 3233772 - RNA, 21 nt, Human
aaaagagaccacccauaucau

SEQ ID NO: 3233773 - RNA, 22 nt, Human
aaaagagaccacccauaucaug

SEQ ID NO: 3233774 - RNA, 17 nt, Human
aaaagacuaagaucggu

SEQ ID NO: 3233775 - RNA, 19 nt, Human
aaaagacgcaccagcccag

SEQ ID NO: 3233776 - RNA, 16 nt, Human
aaaagagaaaagaaaa

SEQ ID NO: 3233777 - RNA, 14 nt, Human
aaaagagaaaagaa

SEQ ID NO: 3233778 - RNA, 13 nt, Human
aaaagagaaaaga

SEQ ID NO: 3233779 - RNA, 13 nt, Human
aaaagaauauuuu

SEQ ID NO: 3233780 - RNA, 14 nt, Human
aaaagaaggaaaga

SEQ ID NO: 3233781 - RNA, 14 nt, Human
aaaagaaguagugu

SEQ ID NO: 3233782 - RNA, 13 nt, Human
aaaagacuccaaa

SEQ ID NO: 3233783 - RNA, 12 nt, Human
aaaagaauauuu

SEQ ID NO: 3233784 - RNA, 22 nt, Human
aaaagaaaucuauagaaagugu

SEQ ID NO: 3233785 - RNA, 12 nt, Human
aaaagaaaucua

SEQ ID NO: 3233786 - RNA, 14 nt, Human
aaaagaaaucaaua

SEQ ID NO: 3233787 - RNA, 21 nt, Human
aaaagaaaucaauaguugaau

SEQ ID NO: 3233788 - RNA, 11 nt, Human
aaaagaaagaa

SEQ ID NO: 3233789 - RNA, 20 nt, Human
aaaagaaacucuauggucuu

SEQ ID NO: 3233790 - RNA, 10 nt, Human
aaaagaaaga

SEQ ID NO: 3233791 - RNA, 17 nt, Human
aaaagaaagaaaaucag

SEQ ID NO: 3233792 - RNA, 15 nt, Human
aaaagaaaauaaaaa

SEQ ID NO: 3233793 - RNA, 14 nt, Human
aaaagaaaauaaaa

SEQ ID NO: 3233794 - RNA, 16 nt, Human
aaaagaaaagucaagg

SEQ ID NO: 3233795 - RNA, 12 nt, Human
aaaagaaaacaa

SEQ ID NO: 3233796 - RNA, 14 nt, Human
aaaagaaaaacugu

SEQ ID NO: 3233797 - RNA, 11 nt, Human
aaaagaaaaac

SEQ ID NO: 3233798 - RNA, 22 nt, Human
aaaagaaaaaaaaagaaaaaag

SEQ ID NO: 3233799 - RNA, 11 nt, Human
aaaagaaaaag

SEQ ID NO: 3233800 - RNA, 19 nt, Human
aaaagaaaaaaaaagaaaa

SEQ ID NO: 3233801 - RNA, 18 nt, Human
aaaagaaaaaaaaagaaa

SEQ ID NO: 3233802 - RNA, 17 nt, Human
aaaagaaaaaaaaagaa

SEQ ID NO: 3233803 - RNA, 16 nt, Human
aaaagaaaaaaaaaga

SEQ ID NO: 3233804 - RNA, 11 nt, Human
aaaagaaaaaa

SEQ ID NO: 3233805 - RNA, 9 nt, Human
aaaagaaaa

SEQ ID NO: 3233806 - RNA, 12 nt, Human
aaaagaaaaaaa

SEQ ID NO: 3233807 - RNA, 19 nt, Human
aaaacuuuguuaggccaaa

SEQ ID NO: 3233808 - RNA, 17 nt, Human
aaaacuuuguuaggcca

SEQ ID NO: 3233809 - RNA, 22 nt, Human
aaaacagccauaggcccuuuca

SEQ ID NO: 3233810 - RNA, 19 nt, Human
aaaacagaguaaucuuguu

SEQ ID NO: 3233811 - RNA, 22 nt, Human
aaaacagaguaaucuuguuggu

SEQ ID NO: 3233812 - RNA, 18 nt, Human
aaaacagaguaaucuugu

SEQ ID NO: 3233813 - RNA, 11 nt, Human
aaaacuuuguu

SEQ ID NO: 3233814 - RNA, 19 nt, Human
aaaacacuguucucugccc

SEQ ID NO: 3233815 - RNA, 15 nt, Human
aaaacaccuucuaua

SEQ ID NO: 3233816 - RNA, 13 nt, Human
aaaacagaaauug

SEQ ID NO: 3233817 - RNA, 16 nt, Human
aaaacagaaauuggua

SEQ ID NO: 3233818 - RNA, 15 nt, Human
aaaacagaaauuggu

SEQ ID NO: 3233819 - RNA, 14 nt, Human
aaaacaccagcuuu

SEQ ID NO: 3233820 - RNA, 10 nt, Human
aaaaucauuu

SEQ ID NO: 3233821 - RNA, 12 nt, Human
aaaauaaaacug

SEQ ID NO: 3233822 - RNA, 14 nt, Human
aaaauaaaacuguc

SEQ ID NO: 3233823 - RNA, 12 nt, Human
aaaaucauuucu

SEQ ID NO: 3233824 - RNA, 11 nt, Human
aaaaucauuuc

SEQ ID NO: 3233825 - RNA, 13 nt, Human
aaaaucagccugc

SEQ ID NO: 3233826 - RNA, 17 nt, Human
aaaaucagccugcucca

SEQ ID NO: 3233827 - RNA, 21 nt, Human
aaaaucagccugcuccagcug

SEQ ID NO: 3233828 - RNA, 18 nt, Human
aaaaguuguaugaucugu

SEQ ID NO: 3233829 - RNA, 16 nt, Human
aaaaguuguaugaucu

SEQ ID NO: 3233830 - RNA, 15 nt, Human
aaaaguuguaugauc

SEQ ID NO: 3233831 - RNA, 20 nt, Human
aaaaguccauaccuuauaua

SEQ ID NO: 3233832 - RNA, 13 nt, Human
aaaagucacaguu

SEQ ID NO: 3233833 - RNA, 23 nt, Human
aaaagucaccaaauagugugaaa

SEQ ID NO: 3233834 - RNA, 19 nt, Human
aaaagucuuuuaaaaagua

SEQ ID NO: 3233835 - RNA, 18 nt, Human
aaaagucuuuuaaaaagu

SEQ ID NO: 3233836 - RNA, 14 nt, Human
aaaagucuuuuaaa

SEQ ID NO: 3233837 - RNA, 15 nt, Human
aaaagucagauguuu

SEQ ID NO: 3233838 - RNA, 19 nt, Human
aaaagucuuaggugaacaa

SEQ ID NO: 3233839 - RNA, 16 nt, Human
aaagccuccuccagcc

SEQ ID NO: 3233840 - RNA, 17 nt, Human
aaagccauucugauuau

SEQ ID NO: 3233841 - RNA, 17 nt, Human
aaagcauuguaaaugug

SEQ ID NO: 3233842 - RNA, 15 nt, Human
aaagcauuguaaaug

SEQ ID NO: 3233843 - RNA, 17 nt, Human
aaagcauguuuugcaug

SEQ ID NO: 3233844 - RNA, 16 nt, Human
aaagcauguuuugcau

SEQ ID NO: 3233845 - RNA, 19 nt, Human
aaagaaaaaaaugucaaaa

SEQ ID NO: 3233846 - RNA, 18 nt, Human
aaagaaaaaagagaaaag

SEQ ID NO: 3233847 - RNA, 10 nt, Human
aaagaaaaaa

SEQ ID NO: 3233848 - RNA, 22 nt, Human
aaagaaaaaaaaaaagaaagaa

SEQ ID NO: 3233849 - RNA, 16 nt, Human
aaagaaaaaaaaagaa

SEQ ID NO: 3233850 - RNA, 15 nt, Human
aaagaaaaaaauguc

SEQ ID NO: 3233851 - RNA, 16 nt, Human
aaagaaaaaaauguca

SEQ ID NO: 3233852 - RNA, 18 nt, Human
aaaaucuagaagagucua

SEQ ID NO: 3233853 - RNA, 22 nt, Human
aaacugcacaugauuucacaaa

SEQ ID NO: 3233854 - RNA, 21 nt, Human
aaacugcacaugauuucacaa

SEQ ID NO: 3233855 - RNA, 20 nt, Human
aaacugcacaugauuucaca

SEQ ID NO: 3233856 - RNA, 18 nt, Human
aaacugcacaugauuuca

SEQ ID NO: 3233857 - RNA, 17 nt, Human
aaacugcacaugauuuc

SEQ ID NO: 3233858 - RNA, 14 nt, Human
aaacugcacaugau

SEQ ID NO: 3233859 - RNA, 9 nt, Human
aaagaaaaa

SEQ ID NO: 3233860 - RNA, 11 nt, Human
aaagaaaaaaa

SEQ ID NO: 3233861 - RNA, 21 nt, Human
aaagaaaaaaaaaaaagccag

SEQ ID NO: 3233862 - RNA, 22 nt, Human
aaagaaaaaaaaaaaagccagc

SEQ ID NO: 3233863 - RNA, 15 nt, Human
aaacugcacugucaa

SEQ ID NO: 3233864 - RNA, 12 nt, Human
aaacugcacaug

SEQ ID NO: 3233865 - RNA, 12 nt, Human
aaacucuuaaaa

SEQ ID NO: 3233866 - RNA, 23 nt, Human
aaacucuuaaaacccaagugccu

SEQ ID NO: 3233867 - RNA, 22 nt, Human
aaacugauuuuuuuuuccuuca

SEQ ID NO: 3233868 - RNA, 23 nt, Human
aaacugauuuuuuuuuccuucag

SEQ ID NO: 3233869 - RNA, 17 nt, Human
aaacccacccuuucuac

SEQ ID NO: 3233870 - RNA, 12 nt, Human
aaacccagcucu

SEQ ID NO: 3233871 - RNA, 16 nt, Human
aaacccagcucugguc

SEQ ID NO: 3233872 - RNA, 15 nt, Human
aaaccgccaaggcug

SEQ ID NO: 3233873 - RNA, 16 nt, Human
aaaccgccaaggcugg

SEQ ID NO: 3233874 - RNA, 18 nt, Human
aaacucuguuacacuuuu

SEQ ID NO: 3233875 - RNA, 22 nt, Human
aaacucuguuacacuuuuugga

SEQ ID NO: 3233876 - RNA, 16 nt, Human
aaaccauuuuuguuac

SEQ ID NO: 3233877 - RNA, 18 nt, Human
aaaccauuuuuguuacuc

SEQ ID NO: 3233878 - RNA, 23 nt, Human
aaaccauuuuuguuacucucuuc

SEQ ID NO: 3233879 - RNA, 21 nt, Human
aaaccaggcuuucuagaaaga

SEQ ID NO: 3233880 - RNA, 12 nt, Human
aauaaacuuucu

SEQ ID NO: 3233881 - RNA, 23 nt, Human
aaguuuaaggaauaugggagaaa

SEQ ID NO: 3233882 - RNA, 23 nt, Human
aaguuggaaacacuaaauguuaa

SEQ ID NO: 3233883 - RNA, 22 nt, Human
aaguuggaaacacuaaauguua

SEQ ID NO: 3233884 - RNA, 21 nt, Human
aaguuggaaacacuaaauguu

SEQ ID NO: 3233885 - RNA, 20 nt, Human
aaguuggaaacacuaaaugu

SEQ ID NO: 3233886 - RNA, 19 nt, Human
aaguuggaaacacuaaaug

SEQ ID NO: 3233887 - RNA, 15 nt, Human
aaguuggaaacacua

SEQ ID NO: 3233888 - RNA, 14 nt, Human
aaguugcuggaaag

SEQ ID NO: 3233889 - RNA, 16 nt, Human
aaguugguauuaauaa

SEQ ID NO: 3233890 - RNA, 19 nt, Human
aaguugguauuaauaaaaa

SEQ ID NO: 3233891 - RNA, 20 nt, Human
aaguugguauuaauaaaaag

SEQ ID NO: 3233892 - RNA, 21 nt, Human
aaguugguauuaauaaaaaga

SEQ ID NO: 3233893 - RNA, 19 nt, Human
aaguuuaaauauuaagcau

SEQ ID NO: 3233894 - RNA, 15 nt, Human
aaguuuaaggaauau

SEQ ID NO: 3233895 - RNA, 14 nt, Human
aaguuuaaggaaua

SEQ ID NO: 3233896 - RNA, 21 nt, Human
aaguuguacuccaauggcuga

SEQ ID NO: 3233897 - RNA, 14 nt, Human
aaguuguacuuuaa

SEQ ID NO: 3233898 - RNA, 12 nt, Human
aaguuguacuuu

SEQ ID NO: 3233899 - RNA, 21 nt, Human
aaguuguacuuuaaaaauuua

SEQ ID NO: 3233900 - RNA, 20 nt, Human
aaguuguacuuuaaaaauuu

SEQ ID NO: 3233901 - RNA, 18 nt, Human
aaguuguacuuuaaaaau

SEQ ID NO: 3233902 - RNA, 15 nt, Human
aaguuguacuuuaaa

SEQ ID NO: 3233903 - RNA, 23 nt, Human
aaguggccuccgucacuaccugg

SEQ ID NO: 3233904 - RNA, 12 nt, Human
aagugcugggau

SEQ ID NO: 3233905 - RNA, 21 nt, Human
aaguggcaccugucugcucca

SEQ ID NO: 3233906 - RNA, 18 nt, Human
aaguggcaccugucugcu

SEQ ID NO: 3233907 - RNA, 17 nt, Human
aaguggcaccugucugc

SEQ ID NO: 3233908 - RNA, 13 nt, Human
aaguggcaccugu

SEQ ID NO: 3233909 - RNA, 23 nt, Human
aaguggcaaagcuguucuuccug

SEQ ID NO: 3233910 - RNA, 22 nt, Human
aaguggcaaagcuguucuuccu

SEQ ID NO: 3233911 - RNA, 19 nt, Human
aaguggcaaagcuguucuu

SEQ ID NO: 3233912 - RNA, 13 nt, Human
aaguggcaaagcu

SEQ ID NO: 3233913 - RNA, 14 nt, Human
aaguggacuggagg

SEQ ID NO: 3233914 - RNA, 16 nt, Human
aauaaagcaauaagaa

SEQ ID NO: 3233915 - RNA, 14 nt, Human
aaugaagcaguauu

SEQ ID NO: 3233916 - RNA, 16 nt, Human
aaugaagcaguauuuu

SEQ ID NO: 3233917 - RNA, 20 nt, Human
aaugaaagacuguacaaagu

SEQ ID NO: 3233918 - RNA, 18 nt, Human
aaugaaagacuguacaaa

SEQ ID NO: 3233919 - RNA, 21 nt, Human
aaugaaagacuguacaaagua

SEQ ID NO: 3233920 - RNA, 20 nt, Human
aaugaugccaugaggaacaa

SEQ ID NO: 3233921 - RNA, 19 nt, Human
aaugaauaaugccuuugua

SEQ ID NO: 3233922 - RNA, 20 nt, Human
aaugaauaaugccuuuguaa

SEQ ID NO: 3233923 - RNA, 15 nt, Human
aaugaauaauggaaa

SEQ ID NO: 3233924 - RNA, 17 nt, Human
aaugaauaauggaaaau

SEQ ID NO: 3233925 - RNA, 21 nt, Human
aaugaauaauggaaaaugcca

SEQ ID NO: 3233926 - RNA, 10 nt, Human
aaugaauaau

SEQ ID NO: 3233927 - RNA, 15 nt, Human
aaucugaagauuguu

SEQ ID NO: 3233928 - RNA, 14 nt, Human
aaucugaagauugu

SEQ ID NO: 3233929 - RNA, 14 nt, Human
aaucucagugcuuu

SEQ ID NO: 3233930 - RNA, 15 nt, Human
aaucucagugcuuuc

SEQ ID NO: 3233931 - RNA, 16 nt, Human
aaucucagugcuuucc

SEQ ID NO: 3233932 - RNA, 23 nt, Human
aaucugaggaauggacauuucua

SEQ ID NO: 3233933 - RNA, 18 nt, Human
aaucugaauuggaaugca

SEQ ID NO: 3233934 - RNA, 21 nt, Human
aaucugaagauuguuuaucua

SEQ ID NO: 3233935 - RNA, 18 nt, Human
aaucugaagauuguuuau

SEQ ID NO: 3233936 - RNA, 17 nt, Human
aaucugaagauuguuua

SEQ ID NO: 3233937 - RNA, 19 nt, Human
aauaugugauuuuuuuucc

SEQ ID NO: 3233938 - RNA, 12 nt, Human
aauaugugauuu

SEQ ID NO: 3233939 - RNA, 13 nt, Human
aauauuaagaaag

SEQ ID NO: 3233940 - RNA, 13 nt, Human
aauauuaagcaug

SEQ ID NO: 3233941 - RNA, 23 nt, Human
aauauguggaguucaucuugaau

SEQ ID NO: 3233942 - RNA, 21 nt, Human
aauaugugaaggaccuucacu

SEQ ID NO: 3233943 - RNA, 19 nt, Human
aauaugugaaggaccuuca

SEQ ID NO: 3233944 - RNA, 11 nt, Human
aauaugugaag

SEQ ID NO: 3233945 - RNA, 14 nt, Human
aauauauagcauuu

SEQ ID NO: 3233946 - RNA, 13 nt, Human
aauauauagcauu

SEQ ID NO: 3233947 - RNA, 15 nt, Human
aaucaccgaaaacgu

SEQ ID NO: 3233948 - RNA, 19 nt, Human
aaucaccgaugcaaacauu

SEQ ID NO: 3233949 - RNA, 20 nt, Human
aaucaccuaauuaauuucag

SEQ ID NO: 3233950 - RNA, 19 nt, Human
aaucaccuaauuaauuuca

SEQ ID NO: 3233951 - RNA, 23 nt, Human
aaucaccgaaaacguggcugcuu

SEQ ID NO: 3233952 - RNA, 21 nt, Human
aaucaccgaaaacguggcugc

SEQ ID NO: 3233953 - RNA, 22 nt, Human
aaucaaugcuauaacuauguug

SEQ ID NO: 3233954 - RNA, 12 nt, Human
aaucaauaguug

SEQ ID NO: 3233955 - RNA, 14 nt, Human
aauauuaagacaau

SEQ ID NO: 3233956 - RNA, 23 nt, Human
aaucaauaacagccgcuccagag

SEQ ID NO: 3233957 - RNA, 17 nt, Human
aaucaauaacagccgcu

SEQ ID NO: 3233958 - RNA, 23 nt, Human
aaucaaguuggcuucuaaucaaa

SEQ ID NO: 3233959 - RNA, 13 nt, Human
aaucaaagugcua

SEQ ID NO: 3233960 - RNA, 22 nt, Human
aaucaaauaaaaauucuagauu

SEQ ID NO: 3233961 - RNA, 16 nt, Human
aauauuacuuuaacau

SEQ ID NO: 3233962 - RNA, 19 nt, Human
aauauuacuuuaacaugcc

SEQ ID NO: 3233963 - RNA, 22 nt, Human
aauauuaagcaugacagaaaau

SEQ ID NO: 3233964 - RNA, 21 nt, Human
aauauuaagcaugacagaaaa

SEQ ID NO: 3233965 - RNA, 20 nt, Human
aagaguaggaagacuuugga

SEQ ID NO: 3233966 - RNA, 19 nt, Human
aagaguuggggacagaacu

SEQ ID NO: 3233967 - RNA, 16 nt, Human
aagagaaaagaaaaaa

SEQ ID NO: 3233968 - RNA, 15 nt, Human
aagagaaaagagaga

SEQ ID NO: 3233969 - RNA, 15 nt, Human
aagagaaaagaaaaa

SEQ ID NO: 3233970 - RNA, 14 nt, Human
aagagaaaagaaaa

SEQ ID NO: 3233971 - RNA, 17 nt, Human
aagacuuuuccaacccu

SEQ ID NO: 3233972 - RNA, 14 nt, Human
aagaccagaaauuc

SEQ ID NO: 3233973 - RNA, 18 nt, Human
aagagaaaacaucucauc

SEQ ID NO: 3233974 - RNA, 11 nt, Human
aagagaaaaga

SEQ ID NO: 3233975 - RNA, 13 nt, Human
aagagaaaagaaa

SEQ ID NO: 3233976 - RNA, 12 nt, Human
aagagaaaagaa

SEQ ID NO: 3233977 - RNA, 13 nt, Human
aagagaaaaaaua

SEQ ID NO: 3233978 - RNA, 19 nt, Human
aagacuuuucuuucagcca

SEQ ID NO: 3233979 - RNA, 21 nt, Human
aagacuuuuccaacccucauc

SEQ ID NO: 3233980 - RNA, 12 nt, Human
aagacuuuucuu

SEQ ID NO: 3233981 - RNA, 18 nt, Human
aagaagaaauaguucugu

SEQ ID NO: 3233982 - RNA, 21 nt, Human
aagaagaacucaccaggguuu

SEQ ID NO: 3233983 - RNA, 20 nt, Human
aagacaaugugaaaagaaaa

SEQ ID NO: 3233984 - RNA, 23 nt, Human
aagacacaggggacacccagaaa

SEQ ID NO: 3233985 - RNA, 19 nt, Human
aagacaaugugaaaagaaa

SEQ ID NO: 3233986 - RNA, 17 nt, Human
aagacaacauuguaaga

SEQ ID NO: 3233987 - RNA, 14 nt, Human
aagacaacauugua

SEQ ID NO: 3233988 - RNA, 22 nt, Human
aagacaauagcacuuaaauucc

SEQ ID NO: 3233989 - RNA, 18 nt, Human
aagaacuuguuuaauaaa

SEQ ID NO: 3233990 - RNA, 15 nt, Human
aagaacuuguuuaau

SEQ ID NO: 3233991 - RNA, 14 nt, Human
aagaacuuguuuaa

SEQ ID NO: 3233992 - RNA, 12 nt, Human
aagaacuuguuu

SEQ ID NO: 3233993 - RNA, 12 nt, Human
aagaacugcuuu

SEQ ID NO: 3233994 - RNA, 14 nt, Human
aagaacuaucuuca

SEQ ID NO: 3233995 - RNA, 18 nt, Human
aagaacucaccaggguuu

SEQ ID NO: 3233996 - RNA, 16 nt, Human
aagaacuaucuucauc

SEQ ID NO: 3233997 - RNA, 20 nt, Human
aacgcaggcccccaggugcc

SEQ ID NO: 3233998 - RNA, 16 nt, Human
aacgcagcccugcuuu

SEQ ID NO: 3233999 - RNA, 12 nt, Human
aacgcagcccug

SEQ ID NO: 3234000 - RNA, 17 nt, Human
aacgcccacuucccugg

SEQ ID NO: 3234001 - RNA, 22 nt, Human
aagaacccauggaaaaaugcca

SEQ ID NO: 3234002 - RNA, 17 nt, Human
aagaaccuaacauuuau

SEQ ID NO: 3234003 - RNA, 14 nt, Human
aagaacuagcauaa

SEQ ID NO: 3234004 - RNA, 15 nt, Human
aagccuuucauuuug

SEQ ID NO: 3234005 - RNA, 10 nt, Human
aagccuuugu

SEQ ID NO: 3234006 - RNA, 17 nt, Human
aagccuuucauuuugcu

SEQ ID NO: 3234007 - RNA, 14 nt, Human
aagccuuuguugaa

SEQ ID NO: 3234008 - RNA, 15 nt, Human
aagcgugagccacug

SEQ ID NO: 3234009 - RNA, 13 nt, Human
aagcguauggcuu

SEQ ID NO: 3234010 - RNA, 15 nt, Human
aagcguauggcuuua

SEQ ID NO: 3234011 - RNA, 14 nt, Human
aagcggcuggcagc

SEQ ID NO: 3234012 - RNA, 14 nt, Human
aagcgggaaacaug

SEQ ID NO: 3234013 - RNA, 22 nt, Human
aagcggcucaagcccaggaggg

SEQ ID NO: 3234014 - RNA, 18 nt, Human
aagccuuuguugaacugu

SEQ ID NO: 3234015 - RNA, 14 nt, Human
aagcgaaaaacuca

SEQ ID NO: 3234016 - RNA, 20 nt, Human
aagccagggcccgggaagca

SEQ ID NO: 3234017 - RNA, 23 nt, Human
aagccagguuccacagaggacac

SEQ ID NO: 3234018 - RNA, 21 nt, Human
aagccagguuccacagaggac

SEQ ID NO: 3234019 - RNA, 21 nt, Human
aagauacacucaagcaugaag

SEQ ID NO: 3234020 - RNA, 22 nt, Human
aagauaaguuggaaacacuaaa

SEQ ID NO: 3234021 - RNA, 20 nt, Human
aagauaaguuggaaacacua

SEQ ID NO: 3234022 - RNA, 19 nt, Human
aagauaaguuggaaacacu

SEQ ID NO: 3234023 - RNA, 15 nt, Human
aagauaaucucagug

SEQ ID NO: 3234024 - RNA, 22 nt, Human
aagauaaucucagugcuuuccu

SEQ ID NO: 3234025 - RNA, 23 nt, Human
aagauaaucucagugcuuuccuc

SEQ ID NO: 3234026 - RNA, 19 nt, Human
aagauaauauuaaggaaga

SEQ ID NO: 3234027 - RNA, 21 nt, Human
aagauaauauuaaggaagaca

SEQ ID NO: 3234028 - RNA, 14 nt, Human
aagauaaaugugcu

SEQ ID NO: 3234029 - RNA, 17 nt, Human
aagauaaguuggaaaca

SEQ ID NO: 3234030 - RNA, 16 nt, Human
aagauaaguuggaaac

SEQ ID NO: 3234031 - RNA, 15 nt, Human
aagauaaguuggaaa

SEQ ID NO: 3234032 - RNA, 13 nt, Human
aagauaaguugga

SEQ ID NO: 3234033 - RNA, 13 nt, Human
aaggcaaggcugu

SEQ ID NO: 3234034 - RNA, 15 nt, Human
aaggcaaggcuguca

SEQ ID NO: 3234035 - RNA, 19 nt, Human
aaggcagggagggccuggg

SEQ ID NO: 3234036 - RNA, 22 nt, Human
aaggcagggagggccugggccc

SEQ ID NO: 3234037 - RNA, 13 nt, Human
aagcugcacccuc

SEQ ID NO: 3234038 - RNA, 19 nt, Human
aagcugcacccucaggcag

SEQ ID NO: 3234039 - RNA, 23 nt, Human
acccucaucaccaacgucugugc

SEQ ID NO: 3234040 - RNA, 23 nt, Human
acccuggcacuauaauguaagcu

SEQ ID NO: 3234041 - RNA, 18 nt, Human
acccuggcacccagggug

SEQ ID NO: 3234042 - RNA, 22 nt, Human
acccuggcaaagcagcaacaca

SEQ ID NO: 3234043 - RNA, 18 nt, Human
acccucagagccaccccu

SEQ ID NO: 3234044 - RNA, 13 nt, Human
acccucaggcagg

SEQ ID NO: 3234045 - RNA, 14 nt, Human
acccucaggcaggu

SEQ ID NO: 3234046 - RNA, 15 nt, Human
acccucaggcaggug

SEQ ID NO: 3234047 - RNA, 16 nt, Human
acccucaggcaggugg

SEQ ID NO: 3234048 - RNA, 13 nt, Human
acccucaucacca

SEQ ID NO: 3234049 - RNA, 21 nt, Human
acccugucucuacuaaaaaua

SEQ ID NO: 3234050 - RNA, 18 nt, Human
acccugucaaacauuagu

SEQ ID NO: 3234051 - RNA, 16 nt, Human
acccugugauggggcc

SEQ ID NO: 3234052 - RNA, 14 nt, Human
acccugguugugug

SEQ ID NO: 3234053 - RNA, 18 nt, Human
acccuguauaucagggua

SEQ ID NO: 3234054 - RNA, 16 nt, Human
acccugucaaacauua

SEQ ID NO: 3234055 - RNA, 15 nt, Human
acccugucaaacauu

SEQ ID NO: 3234056 - RNA, 16 nt, Human
acccuggggagaaagu

SEQ ID NO: 3234057 - RNA, 14 nt, Human
acccuauugcugcu

SEQ ID NO: 3234058 - RNA, 19 nt, Human
acccuauugcugcuugagg

SEQ ID NO: 3234059 - RNA, 11 nt, Human
acccucagagc

SEQ ID NO: 3234060 - RNA, 13 nt, Human
acccuauugcugc

SEQ ID NO: 3234061 - RNA, 15 nt, Human
acccuauaucuauaa

SEQ ID NO: 3234062 - RNA, 19 nt, Human
acccuaccaacuuuacugu

SEQ ID NO: 3234063 - RNA, 23 nt, Human
accgggcugggagcucugcagag

SEQ ID NO: 3234064 - RNA, 18 nt, Human
accgugaggccagagaca

SEQ ID NO: 3234065 - RNA, 19 nt, Human
accggcuggccuggccccu

SEQ ID NO: 3234066 - RNA, 21 nt, Human
accgggcugggagcucugcag

SEQ ID NO: 3234067 - RNA, 11 nt, Human
accucagccuc

SEQ ID NO: 3234068 - RNA, 12 nt, Human
accucagccucc

SEQ ID NO: 3234069 - RNA, 23 nt, Human
accgugaggccagagacacaagc

SEQ ID NO: 3234070 - RNA, 19 nt, Human
accgugccuggccacgccc

SEQ ID NO: 3234071 - RNA, 17 nt, Human
acccugugauggggccc

SEQ ID NO: 3234072 - RNA, 19 nt, Human
acccugugauggggcccug

SEQ ID NO: 3234073 - RNA, 20 nt, Human
acccugugauggggcccugc

SEQ ID NO: 3234074 - RNA, 21 nt, Human
acccugugauggggcccugcc

SEQ ID NO: 3234075 - RNA, 16 nt, Human
accgggcacucagaag

SEQ ID NO: 3234076 - RNA, 20 nt, Human
accgggccacagagaaagua

SEQ ID NO: 3234077 - RNA, 14 nt, Human
accgggcacucaga

SEQ ID NO: 3234078 - RNA, 12 nt, Human
accgggcacuca

SEQ ID NO: 3234079 - RNA, 21 nt, Human
accucaggugauccacccacc

SEQ ID NO: 3234080 - RNA, 20 nt, Human
accucaggugauccacccac

SEQ ID NO: 3234081 - RNA, 11 nt, Human
accucaggccu

SEQ ID NO: 3234082 - RNA, 22 nt, Human
acgcugugcugcccugcccacc

SEQ ID NO: 3234083 - RNA, 19 nt, Human
acgcugugcugcccugccc

SEQ ID NO: 3234084 - RNA, 23 nt, Human
acgcagcccugcuuugggcugcc

SEQ ID NO: 3234085 - RNA, 22 nt, Human
acgcagcccugcuuugggcugc

SEQ ID NO: 3234086 - RNA, 12 nt, Human
acgcagcccugc

SEQ ID NO: 3234087 - RNA, 15 nt, Human
acgcaccagcccaga

SEQ ID NO: 3234088 - RNA, 12 nt, Human
acgucugugcca

SEQ ID NO: 3234089 - RNA, 13 nt, Human
acgucugugccau

SEQ ID NO: 3234090 - RNA, 17 nt, Human
acgugaagauaccauaa

SEQ ID NO: 3234091 - RNA, 15 nt, Human
acggaauaguuggcu

SEQ ID NO: 3234092 - RNA, 19 nt, Human
acggaauaguuggcuagga

SEQ ID NO: 3234093 - RNA, 17 nt, Human
acggacacucaaaagcu

SEQ ID NO: 3234094 - RNA, 18 nt, Human
acuaauggggcggugaga

SEQ ID NO: 3234095 - RNA, 22 nt, Human
acguggagaaucacaggcuggg

SEQ ID NO: 3234096 - RNA, 21 nt, Human
acguggagaaucacaggcugg

SEQ ID NO: 3234097 - RNA, 19 nt, Human
acguggagaaucacaggcu

SEQ ID NO: 3234098 - RNA, 23 nt, Human
accugugagcugcaccagguaga

SEQ ID NO: 3234099 - RNA, 21 nt, Human
accugugagcugcaccaggua

SEQ ID NO: 3234100 - RNA, 23 nt, Human
accugccaggaagccagcaggcu

SEQ ID NO: 3234101 - RNA, 21 nt, Human
accugccaggaagccagcagg

SEQ ID NO: 3234102 - RNA, 22 nt, Human
accugccaggaagccagcaggc

SEQ ID NO: 3234103 - RNA, 12 nt, Human
accugccccuca

SEQ ID NO: 3234104 - RNA, 15 nt, Human
accugccccucaacu

SEQ ID NO: 3234105 - RNA, 12 nt, Human
accucugccuga

SEQ ID NO: 3234106 - RNA, 20 nt, Human
accucugccugaagucacac

SEQ ID NO: 3234107 - RNA, 19 nt, Human
accugccaggaagccagca

SEQ ID NO: 3234108 - RNA, 17 nt, Human
acuguaaaauacuucuu

SEQ ID NO: 3234109 - RNA, 15 nt, Human
acuggugauauaucu

SEQ ID NO: 3234110 - RNA, 13 nt, Human
acuggugauauau

SEQ ID NO: 3234111 - RNA, 12 nt, Human
acuguaaaaugc

SEQ ID NO: 3234112 - RNA, 15 nt, Human
acuguaaaaugcaaa

SEQ ID NO: 3234113 - RNA, 13 nt, Human
acuguaaaaugca

SEQ ID NO: 3234114 - RNA, 24 nt, Human
acuguaaaaugcaaaaaaucuuaa

SEQ ID NO: 3234115 - RNA, 21 nt, Human
acuguaaaaugcaaaaaaucu

SEQ ID NO: 3234116 - RNA, 19 nt, Human
acuguaaaaugcaaaaaau

SEQ ID NO: 3234117 - RNA, 16 nt, Human
acuguaaaaugcaaaa

SEQ ID NO: 3234118 - RNA, 16 nt, Human
acugugccaugugcca

SEQ ID NO: 3234119 - RNA, 18 nt, Human
acugugccaugugccagg

SEQ ID NO: 3234120 - RNA, 17 nt, Human
acugugccaugugccag

SEQ ID NO: 3234121 - RNA, 20 nt, Human
acugcuuuuggucuguguga

SEQ ID NO: 3234122 - RNA, 15 nt, Human
acuggaggagcuggg

SEQ ID NO: 3234123 - RNA, 12 nt, Human
acugguggcccg

SEQ ID NO: 3234124 - RNA, 14 nt, Human
acugccaugccagc

SEQ ID NO: 3234125 - RNA, 19 nt, Human
acugcccaggccugccugu

SEQ ID NO: 3234126 - RNA, 15 nt, Human
acuugaaaagagaca

SEQ ID NO: 3234127 - RNA, 17 nt, Human
acuugaaaagagacagg

SEQ ID NO: 3234128 - RNA, 20 nt, Human
acuugaaaagagacaggcag

SEQ ID NO: 3234129 - RNA, 21 nt, Human
acuugaaaagagacaggcagg

SEQ ID NO: 3234130 - RNA, 17 nt, Human
acuuggggcacagggag

SEQ ID NO: 3234131 - RNA, 11 nt, Human
acuugaaaaga

SEQ ID NO: 3234132 - RNA, 23 nt, Human
acuuggggggcugaggugggagg

SEQ ID NO: 3234133 - RNA, 22 nt, Human
acuugaaaagagacaggcaggu

SEQ ID NO: 3234134 - RNA, 18 nt, Human
acuuggggcacagggaga

SEQ ID NO: 3234135 - RNA, 16 nt, Human
acuugggggcucagca

SEQ ID NO: 3234136 - RNA, 15 nt, Human
acuugggggcucagc

SEQ ID NO: 3234137 - RNA, 22 nt, Human
acuugggggcucagcaaggcca

SEQ ID NO: 3234138 - RNA, 21 nt, Human
acuugggggcucagcaaggcc

SEQ ID NO: 3234139 - RNA, 20 nt, Human
acuugggggcucagcaaggc

SEQ ID NO: 3234140 - RNA, 17 nt, Human
acuugggggcucagcaa

SEQ ID NO: 3234141 - RNA, 18 nt, Human
acuuggucacagccaggc

SEQ ID NO: 3234142 - RNA, 21 nt, Human
acuuggguccaggccuacucc

SEQ ID NO: 3234143 - RNA, 23 nt, Human
acuugggggcucagcaaggccac

SEQ ID NO: 3234144 - RNA, 21 nt, Human
acuucagacauagaauuaaca

SEQ ID NO: 3234145 - RNA, 13 nt, Human
acuucuugaauau

SEQ ID NO: 3234146 - RNA, 21 nt, Human
acuucuugaauauaaaaaauc

SEQ ID NO: 3234147 - RNA, 23 nt, Human
acuucuugaauauaaaaaaucau

SEQ ID NO: 3234148 - RNA, 19 nt, Human
acuuguauauucuauuuua

SEQ ID NO: 3234149 - RNA, 18 nt, Human
acuuguauauucuauuuu

SEQ ID NO: 3234150 - RNA, 22 nt, Human
acuuguauauucuauuuuacaa

SEQ ID NO: 3234151 - RNA, 20 nt, Human
acuuguauauucuauuuuac

SEQ ID NO: 3234152 - RNA, 18 nt, Human
acuuguagauuugauuuu

SEQ ID NO: 3234153 - RNA, 16 nt, Human
acuuguaguuuagugu

SEQ ID NO: 3234154 - RNA, 14 nt, Human
acuuguagauuuga

SEQ ID NO: 3234155 - RNA, 15 nt, Human
acuuguagauuugau

SEQ ID NO: 3234156 - RNA, 16 nt, Human
acuuguagauuugauu

SEQ ID NO: 3234157 - RNA, 17 nt, Human
acuuguagauuugauuu

SEQ ID NO: 3234158 - RNA, 20 nt, Human
acuuggucacagccaggcgc

SEQ ID NO: 3234159 - RNA, 12 nt, Human
acuuguagauuu

SEQ ID NO: 3234160 - RNA, 13 nt, Human
acuuguagauuug

SEQ ID NO: 3234161 - RNA, 15 nt, Human
acuucaaaaguuugu

SEQ ID NO: 3234162 - RNA, 15 nt, Human
acuucaaaauauuga

SEQ ID NO: 3234163 - RNA, 16 nt, Human
acuucaaaauauugag

SEQ ID NO: 3234164 - RNA, 14 nt, Human
acuuaaaacacguu

SEQ ID NO: 3234165 - RNA, 18 nt, Human
acuuaaaacacguuuuaa

SEQ ID NO: 3234166 - RNA, 12 nt, Human
acuucagacaua

SEQ ID NO: 3234167 - RNA, 22 nt, Human
acuuaaaaaugguuuaaauggu

SEQ ID NO: 3234168 - RNA, 16 nt, Human
acuuaaaaauuuauua

SEQ ID NO: 3234169 - RNA, 12 nt, Human
acuuaaaacacg

SEQ ID NO: 3234170 - RNA, 21 nt, Human
acuuaaaaaugguuuaaaugg

SEQ ID NO: 3234171 - RNA, 16 nt, Human
acuguuucaucuaagu

SEQ ID NO: 3234172 - RNA, 17 nt, Human
acugauccagcccugag

SEQ ID NO: 3234173 - RNA, 16 nt, Human
acugauccagcccuga

SEQ ID NO: 3234174 - RNA, 23 nt, Human
acugaugggcaacccccagccug

SEQ ID NO: 3234175 - RNA, 23 nt, Human
acugaucucaggggucuuaccuu

SEQ ID NO: 3234176 - RNA, 15 nt, Human
acugauuucaguaag

SEQ ID NO: 3234177 - RNA, 19 nt, Human
acugauguguugugccuua

SEQ ID NO: 3234178 - RNA, 12 nt, Human
acugaugugaaa

SEQ ID NO: 3234179 - RNA, 13 nt, Human
acugaugugaaac

SEQ ID NO: 3234180 - RNA, 14 nt, Human
acugaugugaaacu

SEQ ID NO: 3234181 - RNA, 18 nt, Human
acugauguuugugcagua

SEQ ID NO: 3234182 - RNA, 16 nt, Human
acugauguuugugcag

SEQ ID NO: 3234183 - RNA, 16 nt, Human
acugauuuuuuuuucc

SEQ ID NO: 3234184 - RNA, 20 nt, Human
acugauuuuguacauaaaca

SEQ ID NO: 3234185 - RNA, 23 nt, Human
acugauuugggcugaauguaugu

SEQ ID NO: 3234186 - RNA, 17 nt, Human
acugauuuuuuuuuccu

SEQ ID NO: 3234187 - RNA, 18 nt, Human
acugauuuuuuuuuccuu

SEQ ID NO: 3234188 - RNA, 19 nt, Human
acugauuuuuuuuuccuuc

SEQ ID NO: 3234189 - RNA, 20 nt, Human
acugauuuuuuuuuccuuca

SEQ ID NO: 3234190 - RNA, 18 nt, Human
acugacauuguuggccaa

SEQ ID NO: 3234191 - RNA, 17 nt, Human
acugacauuguuggcca

SEQ ID NO: 3234192 - RNA, 19 nt, Human
acugaauuuuuauguguga

SEQ ID NO: 3234193 - RNA, 13 nt, Human
acugaauuuggag

SEQ ID NO: 3234194 - RNA, 16 nt, Human
acugaauuuuuaugug

SEQ ID NO: 3234195 - RNA, 15 nt, Human
acugaauuuuuaugu

SEQ ID NO: 3234196 - RNA, 21 nt, Human
acugaauuccaaacaugguuu

SEQ ID NO: 3234197 - RNA, 12 nt, Human
acugaauuccaa

SEQ ID NO: 3234198 - RNA, 20 nt, Human
acugaaugaagcaguauuuu

SEQ ID NO: 3234199 - RNA, 21 nt, Human
acugaaugaagcaguauuuug

SEQ ID NO: 3234200 - RNA, 15 nt, Human
acucuacagaggcca

SEQ ID NO: 3234201 - RNA, 16 nt, Human
acucuacaugcuuguu

SEQ ID NO: 3234202 - RNA, 14 nt, Human
acucccuuucaaca

SEQ ID NO: 3234203 - RNA, 18 nt, Human
acucccugccccccagcc

SEQ ID NO: 3234204 - RNA, 21 nt, Human
acucccaagacccgagcuggg

SEQ ID NO: 3234205 - RNA, 15 nt, Human
acucccaagcuggac

SEQ ID NO: 3234206 - RNA, 12 nt, Human
acuccauucucc

SEQ ID NO: 3234207 - RNA, 20 nt, Human
acucccagcaucgcacucug

SEQ ID NO: 3234208 - RNA, 22 nt, Human
acucccaucugugaaaggaaag

SEQ ID NO: 3234209 - RNA, 15 nt, Human
acucccaucagccca

SEQ ID NO: 3234210 - RNA, 21 nt, Human
aauuauagugucaugcagagu

SEQ ID NO: 3234211 - RNA, 18 nt, Human
aauuauaggagacuugua

SEQ ID NO: 3234212 - RNA, 23 nt, Human
aauuauauuccucuugcauuuca

SEQ ID NO: 3234213 - RNA, 11 nt, Human
aauuauauucc

SEQ ID NO: 3234214 - RNA, 19 nt, Human
aauuauacccccugcaaag

SEQ ID NO: 3234215 - RNA, 16 nt, Human
aauuauacugugugug

SEQ ID NO: 3234216 - RNA, 22 nt, Human
aauuauaauguauucauauuug

SEQ ID NO: 3234217 - RNA, 18 nt, Human
aauuauaauguauucaua

SEQ ID NO: 3234218 - RNA, 16 nt, Human
aauuauaauguauuca

SEQ ID NO: 3234219 - RNA, 14 nt, Human
aauuauaauguauu

SEQ ID NO: 3234220 - RNA, 18 nt, Human
aauuaugguaaaauuuug

SEQ ID NO: 3234221 - RNA, 17 nt, Human
aauuaugguaaaauuuu

SEQ ID NO: 3234222 - RNA, 21 nt, Human
aauuauggcccagggggcuaa

SEQ ID NO: 3234223 - RNA, 22 nt, Human
aauuaugcuaagaauuuuuuau

SEQ ID NO: 3234224 - RNA, 18 nt, Human
aauuaugcuaagaauuuu

SEQ ID NO: 3234225 - RNA, 16 nt, Human
aauuaugcuaagaauu

SEQ ID NO: 3234226 - RNA, 19 nt, Human
aauuaugaguuauuuuuau

SEQ ID NO: 3234227 - RNA, 13 nt, Human
aauuaucagcaaa

SEQ ID NO: 3234228 - RNA, 16 nt, Human
aauuaucagcaaagaa

SEQ ID NO: 3234229 - RNA, 19 nt, Human
aauuaucagcaaagaaaaa

SEQ ID NO: 3234230 - RNA, 20 nt, Human
aauuaucagcaaagaaaaaa

SEQ ID NO: 3234231 - RNA, 21 nt, Human
aauuaucagcaaagaaaaaaa

SEQ ID NO: 3234232 - RNA, 16 nt, Human
aauuguaaggaaugau

SEQ ID NO: 3234233 - RNA, 22 nt, Human
aauuguaaggaaugauuaauua

SEQ ID NO: 3234234 - RNA, 22 nt, Human
aauuggaguuggaguagaaugu

SEQ ID NO: 3234235 - RNA, 14 nt, Human
aauucuguuuuucu

SEQ ID NO: 3234236 - RNA, 18 nt, Human
aauucuguuuuucuaggc

SEQ ID NO: 3234237 - RNA, 11 nt, Human
aauucugauuu

SEQ ID NO: 3234238 - RNA, 13 nt, Human
aauucugauuucu

SEQ ID NO: 3234239 - RNA, 14 nt, Human
aauucugauuucuu

SEQ ID NO: 3234240 - RNA, 15 nt, Human
aauucugauuucuuu

SEQ ID NO: 3234241 - RNA, 16 nt, Human
aauucugauuucuuuu

SEQ ID NO: 3234242 - RNA, 22 nt, Human
aauucugauuucuuuucaccau

SEQ ID NO: 3234243 - RNA, 20 nt, Human
aauucuguuuuuaaaaauua

SEQ ID NO: 3234244 - RNA, 18 nt, Human
aauucuguuuuuaaaaau

SEQ ID NO: 3234245 - RNA, 17 nt, Human
aauucuguuuuuaaaaa

SEQ ID NO: 3234246 - RNA, 20 nt, Human
aauucuguucugauauuaau

SEQ ID NO: 3234247 - RNA, 19 nt, Human
aauucucagaaucucaaau

SEQ ID NO: 3234248 - RNA, 15 nt, Human
aauucuaugccuguc

SEQ ID NO: 3234249 - RNA, 13 nt, Human
aauucuaugccug

SEQ ID NO: 3234250 - RNA, 14 nt, Human
aauucuacuuugag

SEQ ID NO: 3234251 - RNA, 22 nt, Human
aauucuagcuuugagcuuaaga

SEQ ID NO: 3234252 - RNA, 15 nt, Human
aauucucuuauccaa

SEQ ID NO: 3234253 - RNA, 14 nt, Human
aauucugaaguuau

SEQ ID NO: 3234254 - RNA, 23 nt, Human
aauucucuuccaaccauuuaucu

SEQ ID NO: 3234255 - RNA, 21 nt, Human
aauucugaaguuauauuuccu

SEQ ID NO: 3234256 - RNA, 19 nt, Human
aauucugaaguuauauuuc

SEQ ID NO: 3234257 - RNA, 18 nt, Human
aauucugaaguuauauuu

SEQ ID NO: 3234258 - RNA, 15 nt, Human
aauucugaaguuaua

SEQ ID NO: 3234259 - RNA, 21 nt, Human
aauucucauuugucacacacu

SEQ ID NO: 3234260 - RNA, 14 nt, Human
aauucuccugccuc

SEQ ID NO: 3234261 - RNA, 19 nt, Human
aauucucccgggacucugc

SEQ ID NO: 3234262 - RNA, 15 nt, Human
aauucuccugccuca

SEQ ID NO: 3234263 - RNA, 16 nt, Human
aauucuccugccucag

SEQ ID NO: 3234264 - RNA, 11 nt, Human
aauucuccuuu

SEQ ID NO: 3234265 - RNA, 15 nt, Human
aauuucccaaagcag

SEQ ID NO: 3234266 - RNA, 17 nt, Human
aauuucccaaagcagug

SEQ ID NO: 3234267 - RNA, 17 nt, Human
aauuguaauuaauaaua

SEQ ID NO: 3234268 - RNA, 22 nt, Human
aauuucauaccuaucaucuuaa

SEQ ID NO: 3234269 - RNA, 18 nt, Human
aauuucauagcuguacuu

SEQ ID NO: 3234270 - RNA, 20 nt, Human
aauuucauagcuguacuucu

SEQ ID NO: 3234271 - RNA, 21 nt, Human
aauuucauagcuguacuucuu

SEQ ID NO: 3234272 - RNA, 18 nt, Human
aauuuccccuaaucuuuu

SEQ ID NO: 3234273 - RNA, 17 nt, Human
aauuuccccuaaucuuu

SEQ ID NO: 3234274 - RNA, 15 nt, Human
acaccaauauucaua

SEQ ID NO: 3234275 - RNA, 13 nt, Human
acaccagagccca

SEQ ID NO: 3234276 - RNA, 23 nt, Human
acaccagagcccaccuuggcuca

SEQ ID NO: 3234277 - RNA, 18 nt, Human
acaccagagcccaccuug

SEQ ID NO: 3234278 - RNA, 18 nt, Human
acacagcucuucuccagg

SEQ ID NO: 3234279 - RNA, 13 nt, Human
acacagcucuucu

SEQ ID NO: 3234280 - RNA, 14 nt, Human
acaccaaucuuacu

SEQ ID NO: 3234281 - RNA, 14 nt, Human
acacguuuuaagga

SEQ ID NO: 3234282 - RNA, 15 nt, Human
acacguuggaguaua

SEQ ID NO: 3234283 - RNA, 15 nt, Human
acacguuuuaaggac

SEQ ID NO: 3234284 - RNA, 16 nt, Human
acacguuuuaaggacu

SEQ ID NO: 3234285 - RNA, 17 nt, Human
acacguuuuaaggacug

SEQ ID NO: 3234286 - RNA, 22 nt, Human
acacguuuuaaggacugacuga

SEQ ID NO: 3234287 - RNA, 16 nt, Human
acacagcucuucucca

SEQ ID NO: 3234288 - RNA, 14 nt, Human
acacagcucuucuc

SEQ ID NO: 3234289 - RNA, 14 nt, Human
acacagcauuucaa

SEQ ID NO: 3234290 - RNA, 16 nt, Human
acaaggugcaggcagg

SEQ ID NO: 3234291 - RNA, 15 nt, Human
acaaggugcaggcag

SEQ ID NO: 3234292 - RNA, 15 nt, Human
acaaguuaaauaaau

SEQ ID NO: 3234293 - RNA, 15 nt, Human
acaaguuaagauucu

SEQ ID NO: 3234294 - RNA, 19 nt, Human
acaaguuaagauucuuggu

SEQ ID NO: 3234295 - RNA, 16 nt, Human
acaaggcaaggcuguc

SEQ ID NO: 3234296 - RNA, 17 nt, Human
acaaggcaaggcuguca

SEQ ID NO: 3234297 - RNA, 19 nt, Human
acaaggcaaggcugucaau

SEQ ID NO: 3234298 - RNA, 15 nt, Human
acaaggcaaggcugu

SEQ ID NO: 3234299 - RNA, 13 nt, Human
acaacccccagcu

SEQ ID NO: 3234300 - RNA, 14 nt, Human
acaaacaagcauau

SEQ ID NO: 3234301 - RNA, 14 nt, Human
acaaacagaugcuc

SEQ ID NO: 3234302 - RNA, 17 nt, Human
acaacauuuauauguag

SEQ ID NO: 3234303 - RNA, 13 nt, Human
acaaccauuaaag

SEQ ID NO: 3234304 - RNA, 18 nt, Human
acaaccauuaaagucaga

SEQ ID NO: 3234305 - RNA, 21 nt, Human
acaaacugcuuccuuucuuga

SEQ ID NO: 3234306 - RNA, 15 nt, Human
acaaacugcuuccuu

SEQ ID NO: 3234307 - RNA, 23 nt, Human
acaaacugcacaugauuucacaa

SEQ ID NO: 3234308 - RNA, 21 nt, Human
acaaacugcacaugauuucac

SEQ ID NO: 3234309 - RNA, 20 nt, Human
acaaacugcacaugauuuca

SEQ ID NO: 3234310 - RNA, 19 nt, Human
acaaacugcacaugauuuc

SEQ ID NO: 3234311 - RNA, 16 nt, Human
acaaacugcacaugau

SEQ ID NO: 3234312 - RNA, 14 nt, Human
acaaacugcacaug

SEQ ID NO: 3234313 - RNA, 17 nt, Human
acauguguuggcagccu

SEQ ID NO: 3234314 - RNA, 17 nt, Human
acauguuuucaaaugga

SEQ ID NO: 3234315 - RNA, 16 nt, Human
acauguuuucaaaugg

SEQ ID NO: 3234316 - RNA, 11 nt, Human
acauguuuuca

SEQ ID NO: 3234317 - RNA, 15 nt, Human
acauguuuucaaaug

SEQ ID NO: 3234318 - RNA, 14 nt, Human
acauguuuucaaau

SEQ ID NO: 3234319 - RNA, 13 nt, Human
acauguuuucaaa

SEQ ID NO: 3234320 - RNA, 12 nt, Human
acauguuuucaa

SEQ ID NO: 3234321 - RNA, 18 nt, Human
acauaacugacuuaguuc

SEQ ID NO: 3234322 - RNA, 16 nt, Human
acauacaauuccaaac

SEQ ID NO: 3234323 - RNA, 14 nt, Human
acauaauacugaac

SEQ ID NO: 3234324 - RNA, 16 nt, Human
acauaauacugaacca

SEQ ID NO: 3234325 - RNA, 17 nt, Human
acauaauacugaaccac

SEQ ID NO: 3234326 - RNA, 18 nt, Human
acauaauacugaaccacu

SEQ ID NO: 3234327 - RNA, 20 nt, Human
acauacaggaagguagaaau

SEQ ID NO: 3234328 - RNA, 22 nt, Human
acauacacccaaacacuuacac

SEQ ID NO: 3234329 - RNA, 13 nt, Human
acaucauuccuuu

SEQ ID NO: 3234330 - RNA, 16 nt, Human
acaucauuccuuuuua

SEQ ID NO: 3234331 - RNA, 17 nt, Human
acaucauuccuuuuuau

SEQ ID NO: 3234332 - RNA, 21 nt, Human
acaucauuccuuuuuauuuau

SEQ ID NO: 3234333 - RNA, 22 nt, Human
acaucauuccuuuuuauuuaua

SEQ ID NO: 3234334 - RNA, 20 nt, Human
acaugccucucucaggccaa

SEQ ID NO: 3234335 - RNA, 23 nt, Human
acaugcagccacuuaggacaaau

SEQ ID NO: 3234336 - RNA, 13 nt, Human
acaugcacgugug

SEQ ID NO: 3234337 - RNA, 23 nt, Human
acaugcacagcuaacauggaagu

SEQ ID NO: 3234338 - RNA, 16 nt, Human
acaucccucucugcug

SEQ ID NO: 3234339 - RNA, 15 nt, Human
acaucccucucugcu

SEQ ID NO: 3234340 - RNA, 12 nt, Human
acauccccugcu

SEQ ID NO: 3234341 - RNA, 17 nt, Human
accaccagaagcccaga

SEQ ID NO: 3234342 - RNA, 16 nt, Human
accaccagaagcccag

SEQ ID NO: 3234343 - RNA, 15 nt, Human
accaccagaagccca

SEQ ID NO: 3234344 - RNA, 13 nt, Human
accaccagaagcc

SEQ ID NO: 3234345 - RNA, 14 nt, Human
accacccauaucau

SEQ ID NO: 3234346 - RNA, 15 nt, Human
accacccauaucaug

SEQ ID NO: 3234347 - RNA, 17 nt, Human
accacccauaucaugca

SEQ ID NO: 3234348 - RNA, 12 nt, Human
accaagcccagu

SEQ ID NO: 3234349 - RNA, 14 nt, Human
accaagccguggcu

SEQ ID NO: 3234350 - RNA, 18 nt, Human
accaagccguggcuuccc

SEQ ID NO: 3234351 - RNA, 17 nt, Human
accaagccguggcuucc

SEQ ID NO: 3234352 - RNA, 16 nt, Human
accaagccguggcuuc

SEQ ID NO: 3234353 - RNA, 15 nt, Human
accaagccguggcuu

SEQ ID NO: 3234354 - RNA, 16 nt, Human
accacgcuggaccuug

SEQ ID NO: 3234355 - RNA, 14 nt, Human
accacgcuggaccu

SEQ ID NO: 3234356 - RNA, 18 nt, Human
accacgcuggaccuugaa

SEQ ID NO: 3234357 - RNA, 14 nt, Human
accaacgucugugc

SEQ ID NO: 3234358 - RNA, 17 nt, Human
accaacgucugugccau

SEQ ID NO: 3234359 - RNA, 14 nt, Human
accagagcugccac

SEQ ID NO: 3234360 - RNA, 16 nt, Human
accagagcugccaccu

SEQ ID NO: 3234361 - RNA, 13 nt, Human
accagagcugcca

SEQ ID NO: 3234362 - RNA, 12 nt, Human
accagagcugcc

SEQ ID NO: 3234363 - RNA, 23 nt, Human
accacgucuauuucaucagaaca

SEQ ID NO: 3234364 - RNA, 20 nt, Human
accacguugggacagggagg

SEQ ID NO: 3234365 - RNA, 17 nt, Human
acagugcuacugaaagg

SEQ ID NO: 3234366 - RNA, 15 nt, Human
acagugcuacugaaa

SEQ ID NO: 3234367 - RNA, 15 nt, Human
acaguggauugcuca

SEQ ID NO: 3234368 - RNA, 19 nt, Human
acaguggagugcaaaaggc

SEQ ID NO: 3234369 - RNA, 17 nt, Human
acaguggagugcaaaag

SEQ ID NO: 3234370 - RNA, 19 nt, Human
acagugauuaccagggacu

SEQ ID NO: 3234371 - RNA, 13 nt, Human
acagugcaucuca

SEQ ID NO: 3234372 - RNA, 18 nt, Human
acagugcaucucagccca

SEQ ID NO: 3234373 - RNA, 17 nt, Human
acagugcaucucagccc

SEQ ID NO: 3234374 - RNA, 15 nt, Human
acagugcaucucagc

SEQ ID NO: 3234375 - RNA, 23 nt, Human
acaggcacccaccaucaugucug

SEQ ID NO: 3234376 - RNA, 14 nt, Human
acaggcaaugcugg

SEQ ID NO: 3234377 - RNA, 17 nt, Human
acaggcaaugcuggcug

SEQ ID NO: 3234378 - RNA, 14 nt, Human
acaggcacccacca

SEQ ID NO: 3234379 - RNA, 16 nt, Human
acaggcaaugcuggcu

SEQ ID NO: 3234380 - RNA, 15 nt, Human
acaggcaaugcuggc

SEQ ID NO: 3234381 - RNA, 18 nt, Human
acagcucuucuccaggcu

SEQ ID NO: 3234382 - RNA, 20 nt, Human
acagcucuucuccaggcugu

SEQ ID NO: 3234383 - RNA, 19 nt, Human
acagcucuucuccaggcug

SEQ ID NO: 3234384 - RNA, 18 nt, Human
agagcccacgcccccacu

SEQ ID NO: 3234385 - RNA, 11 nt, Human
agagagcaaga

SEQ ID NO: 3234386 - RNA, 19 nt, Human
agagagcaagacgcugugc

SEQ ID NO: 3234387 - RNA, 19 nt, Human
agagagauguguaauuuuu

SEQ ID NO: 3234388 - RNA, 18 nt, Human
agagagauguguaauuuu

SEQ ID NO: 3234389 - RNA, 14 nt, Human
agagagauguguaa

SEQ ID NO: 3234390 - RNA, 17 nt, Human
agagcccacgcccccac

SEQ ID NO: 3234391 - RNA, 18 nt, Human
agagcccagagucccccc

SEQ ID NO: 3234392 - RNA, 15 nt, Human
agagcccagaguccc

SEQ ID NO: 3234393 - RNA, 22 nt, Human
agagcccagaguccccccacuc

SEQ ID NO: 3234394 - RNA, 19 nt, Human
agagccugccccagcgcug

SEQ ID NO: 3234395 - RNA, 17 nt, Human
agagccugccccagcgc

SEQ ID NO: 3234396 - RNA, 16 nt, Human
agagccugccccagcg

SEQ ID NO: 3234397 - RNA, 13 nt, Human
agagccugcccca

SEQ ID NO: 3234398 - RNA, 12 nt, Human
agagccugcccc

SEQ ID NO: 3234399 - RNA, 22 nt, Human
agagaaacacugaaaagaagga

SEQ ID NO: 3234400 - RNA, 18 nt, Human
agagaaaguacuucucca

SEQ ID NO: 3234401 - RNA, 13 nt, Human
agagaaagaaauu

SEQ ID NO: 3234402 - RNA, 22 nt, Human
agagaaguggacuggaggagcu

SEQ ID NO: 3234403 - RNA, 19 nt, Human
agagaagugacgguuccua

SEQ ID NO: 3234404 - RNA, 18 nt, Human
agagaagugacgguuccu

SEQ ID NO: 3234405 - RNA, 12 nt, Human
agagaaaugaaa

SEQ ID NO: 3234406 - RNA, 23 nt, Human
agagaaauauuuuaauuuuuaaa

SEQ ID NO: 3234407 - RNA, 18 nt, Human
agagaaauauuuuaauuu

SEQ ID NO: 3234408 - RNA, 15 nt, Human
agagaaauauuuuaa

SEQ ID NO: 3234409 - RNA, 14 nt, Human
agagaaauauuuua

SEQ ID NO: 3234410 - RNA, 16 nt, Human
agacucuuuggacacu

SEQ ID NO: 3234411 - RNA, 14 nt, Human
agacgaacauguag

SEQ ID NO: 3234412 - RNA, 23 nt, Human
agaccaucccugaaggccccgcc

SEQ ID NO: 3234413 - RNA, 21 nt, Human
agacagcccgggcucugccuc

SEQ ID NO: 3234414 - RNA, 22 nt, Human
agacagcccgggcucugccucc

SEQ ID NO: 3234415 - RNA, 23 nt, Human
agacagcccgggcucugccuccc

SEQ ID NO: 3234416 - RNA, 17 nt, Human
agaccacccauaucaug

SEQ ID NO: 3234417 - RNA, 18 nt, Human
agaccacccauaucaugc

SEQ ID NO: 3234418 - RNA, 19 nt, Human
agaccacccauaucaugca

SEQ ID NO: 3234419 - RNA, 13 nt, Human
agacagcccucca

SEQ ID NO: 3234420 - RNA, 18 nt, Human
agacgcugugcugcccug

SEQ ID NO: 3234421 - RNA, 19 nt, Human
agacgcugugcugcccugc

SEQ ID NO: 3234422 - RNA, 17 nt, Human
agacgcugugcugcccu

SEQ ID NO: 3234423 - RNA, 15 nt, Human
agacgacagccccug

SEQ ID NO: 3234424 - RNA, 12 nt, Human
agacaaaaagua

SEQ ID NO: 3234425 - RNA, 14 nt, Human
agacaaaaaguaua

SEQ ID NO: 3234426 - RNA, 19 nt, Human
agacaaaaaguauauuaaa

SEQ ID NO: 3234427 - RNA, 23 nt, Human
agacaaaaaguauauuaaacaaa

SEQ ID NO: 3234428 - RNA, 14 nt, Human
agaauuuuuuauuu

SEQ ID NO: 3234429 - RNA, 15 nt, Human
agacaaguaauuuca

SEQ ID NO: 3234430 - RNA, 18 nt, Human
agacaaguaauuucagug

SEQ ID NO: 3234431 - RNA, 22 nt, Human
agacaaguaauuucaguguaaa

SEQ ID NO: 3234432 - RNA, 22 nt, Human
agacaagcuguugaccaggcac

SEQ ID NO: 3234433 - RNA, 18 nt, Human
agacaagcuguugaccag

SEQ ID NO: 3234434 - RNA, 20 nt, Human
agacaaugugaaaagaaaaa

SEQ ID NO: 3234435 - RNA, 22 nt, Human
agaauuuugugaaacagacuug

SEQ ID NO: 3234436 - RNA, 14 nt, Human
agaauuuugugaaa

SEQ ID NO: 3234437 - RNA, 15 nt, Human
agaauuuugagcagg

SEQ ID NO: 3234438 - RNA, 20 nt, Human
agaaugaggcugcuuuccaa

SEQ ID NO: 3234439 - RNA, 14 nt, Human
agaaugaggcugcu

SEQ ID NO: 3234440 - RNA, 13 nt, Human
agaaugaggcugc

SEQ ID NO: 3234441 - RNA, 12 nt, Human
agaaugaggcug

SEQ ID NO: 3234442 - RNA, 23 nt, Human
agaaugcacaaacagaggccgcc

SEQ ID NO: 3234443 - RNA, 15 nt, Human
agaaugaguuucuua

SEQ ID NO: 3234444 - RNA, 14 nt, Human
agaaugaguuucuu

SEQ ID NO: 3234445 - RNA, 22 nt, Human
agaaugcacaaacagaggccgc

SEQ ID NO: 3234446 - RNA, 21 nt, Human
agaaugaugguuuccaauuuc

SEQ ID NO: 3234447 - RNA, 13 nt, Human
agaaugaugguuu

SEQ ID NO: 3234448 - RNA, 18 nt, Human
agaaugcaugcuuuccau

SEQ ID NO: 3234449 - RNA, 16 nt, Human
agaaugcaugcuuucc

SEQ ID NO: 3234450 - RNA, 18 nt, Human
agaaugcaccauacucau

SEQ ID NO: 3234451 - RNA, 18 nt, Human
agaaugcucuuuacuuca

SEQ ID NO: 3234452 - RNA, 23 nt, Human
agaaugcaugcuuuccauauuuu

SEQ ID NO: 3234453 - RNA, 17 nt, Human
agaaucucaaauaacua

SEQ ID NO: 3234454 - RNA, 19 nt, Human
agaaucuuguuuugaaaau

SEQ ID NO: 3234455 - RNA, 22 nt, Human
agaaucuuguuuugaaaauaac

SEQ ID NO: 3234456 - RNA, 18 nt, Human
agaaucucaacaugucuc

SEQ ID NO: 3234457 - RNA, 15 nt, Human
agaaggggacugcca

SEQ ID NO: 3234458 - RNA, 19 nt, Human
agaaggggacugccaccuc

SEQ ID NO: 3234459 - RNA, 16 nt, Human
agaaggggacugccac

SEQ ID NO: 3234460 - RNA, 20 nt, Human
agaaggggacugccaccucc

SEQ ID NO: 3234461 - RNA, 15 nt, Human
agaagaucuuugggc

SEQ ID NO: 3234462 - RNA, 13 nt, Human
agaagaucuuugg

SEQ ID NO: 3234463 - RNA, 18 nt, Human
agaagggagcuggcucca

SEQ ID NO: 3234464 - RNA, 14 nt, Human
agaagucacacagu

SEQ ID NO: 3234465 - RNA, 13 nt, Human
agaaguccagagu

SEQ ID NO: 3234466 - RNA, 15 nt, Human
agaagucaacauccu

SEQ ID NO: 3234467 - RNA, 19 nt, Human
agaagucuuagauguauau

SEQ ID NO: 3234468 - RNA, 17 nt, Human
agaagucuuagauguau

SEQ ID NO: 3234469 - RNA, 19 nt, Human
agaagucuucaugaaaugc

SEQ ID NO: 3234470 - RNA, 18 nt, Human
agaagucuucaugaaaug

SEQ ID NO: 3234471 - RNA, 16 nt, Human
agaagucuucaugaaa

SEQ ID NO: 3234472 - RNA, 13 nt, Human
agaagucuucaug

SEQ ID NO: 3234473 - RNA, 13 nt, Human
agaagauagcagg

SEQ ID NO: 3234474 - RNA, 20 nt, Human
agaagagcuguucacagcca

SEQ ID NO: 3234475 - RNA, 17 nt, Human
agaagauagucuuggaa

SEQ ID NO: 3234476 - RNA, 22 nt, Human
agaagagccccacucucagagg

SEQ ID NO: 3234477 - RNA, 20 nt, Human
agaagagccccacucucaga

SEQ ID NO: 3234478 - RNA, 17 nt, Human
agaagagccccacucuc

SEQ ID NO: 3234479 - RNA, 14 nt, Human
agaagagccccacu

SEQ ID NO: 3234480 - RNA, 13 nt, Human
agaagagcuguuc

SEQ ID NO: 3234481 - RNA, 13 nt, Human
agaagagccccac

SEQ ID NO: 3234482 - RNA, 12 nt, Human
agaagagcccca

SEQ ID NO: 3234483 - RNA, 15 nt, Human
agaagagaaugcaca

SEQ ID NO: 3234484 - RNA, 21 nt, Human
agaagagauugugguuucauu

SEQ ID NO: 3234485 - RNA, 22 nt, Human
agaaccagucuuucaacucauu

SEQ ID NO: 3234486 - RNA, 20 nt, Human
agaaccaggcaacuugggaa

SEQ ID NO: 3234487 - RNA, 19 nt, Human
agaaccagucuuucaacuc

SEQ ID NO: 3234488 - RNA, 17 nt, Human
agaaccagucuuucaac

SEQ ID NO: 3234489 - RNA, 21 nt, Human
agaaccaaaaagaggcuaugu

SEQ ID NO: 3234490 - RNA, 17 nt, Human
agaaccaggcaacuugg

SEQ ID NO: 3234491 - RNA, 13 nt, Human
agaacacugccaa

SEQ ID NO: 3234492 - RNA, 18 nt, Human
agaacaacauauacaaca

SEQ ID NO: 3234493 - RNA, 17 nt, Human
agaaccaaaaagaggcu

SEQ ID NO: 3234494 - RNA, 18 nt, Human
agaaccaaaaagaggcua

SEQ ID NO: 3234495 - RNA, 15 nt, Human
agaacagcuguugac

SEQ ID NO: 3234496 - RNA, 12 nt, Human
agaacagcuguu

SEQ ID NO: 3234497 - RNA, 16 nt, Human
agaacagauaaagauu

SEQ ID NO: 3234498 - RNA, 22 nt, Human
agaacagugauuaccagggacu

SEQ ID NO: 3234499 - RNA, 17 nt, Human
agaacagguuuuuuugu

SEQ ID NO: 3234500 - RNA, 18 nt, Human
agaacagguuuuuuuguu

SEQ ID NO: 3234501 - RNA, 21 nt, Human
agaacagguuuuuuuguuugu

SEQ ID NO: 3234502 - RNA, 18 nt, Human
agaacaguggaaacuaug

SEQ ID NO: 3234503 - RNA, 22 nt, Human
agaacaguggaaacuauguguu

SEQ ID NO: 3234504 - RNA, 13 nt, Human
agcaucucccagu

SEQ ID NO: 3234505 - RNA, 17 nt, Human
agcaucuggaagagcua

SEQ ID NO: 3234506 - RNA, 14 nt, Human
agccaagaggcugc

SEQ ID NO: 3234507 - RNA, 14 nt, Human
agccagauuucacu

SEQ ID NO: 3234508 - RNA, 17 nt, Human
agccagauuucacucuc

SEQ ID NO: 3234509 - RNA, 20 nt, Human
agccagauuucacucuccuu

SEQ ID NO: 3234510 - RNA, 22 nt, Human
agcccaaaccaccagaagccca

SEQ ID NO: 3234511 - RNA, 20 nt, Human
agcccaaaccaccagaagcc

SEQ ID NO: 3234512 - RNA, 19 nt, Human
agcccaaaccaccagaagc

SEQ ID NO: 3234513 - RNA, 17 nt, Human
agcccaaaccaccagaa

SEQ ID NO: 3234514 - RNA, 23 nt, Human
agccagcaggcucucaggccagc

SEQ ID NO: 3234515 - RNA, 22 nt, Human
agccagcaggcucucaggccag

SEQ ID NO: 3234516 - RNA, 21 nt, Human
agccagcaggcucucaggcca

SEQ ID NO: 3234517 - RNA, 17 nt, Human
agcccacgcccccacug

SEQ ID NO: 3234518 - RNA, 18 nt, Human
agcccacgcccccacugg

SEQ ID NO: 3234519 - RNA, 15 nt, Human
agcccacgcccccac

SEQ ID NO: 3234520 - RNA, 19 nt, Human
agcccacgcccccacuggu

SEQ ID NO: 3234521 - RNA, 23 nt, Human
agcccaccccucaacaccucugc

SEQ ID NO: 3234522 - RNA, 13 nt, Human
agcccaccuuggc

SEQ ID NO: 3234523 - RNA, 16 nt, Human
agcaucuaugugagac

SEQ ID NO: 3234524 - RNA, 18 nt, Human
agcaguggagcccaggag

SEQ ID NO: 3234525 - RNA, 16 nt, Human
agcaguggagcccagg

SEQ ID NO: 3234526 - RNA, 23 nt, Human
agcaguggccuacaaaucaguaa

SEQ ID NO: 3234527 - RNA, 17 nt, Human
agcagugcaugcugucc

SEQ ID NO: 3234528 - RNA, 23 nt, Human
agcagugauauucuuuguuaauu

SEQ ID NO: 3234529 - RNA, 13 nt, Human
agcagugcaugcu

SEQ ID NO: 3234530 - RNA, 16 nt, Human
agcagugcaugcuguc

SEQ ID NO: 3234531 - RNA, 20 nt, Human
agcagccuggacccugugga

SEQ ID NO: 3234532 - RNA, 13 nt, Human
agcagccuggcuc

SEQ ID NO: 3234533 - RNA, 14 nt, Human
agcagccuggcucc

SEQ ID NO: 3234534 - RNA, 15 nt, Human
agcagccuggcuccc

SEQ ID NO: 3234535 - RNA, 17 nt, Human
agcagccuggcuccccu

SEQ ID NO: 3234536 - RNA, 19 nt, Human
agcagccuggcuccccugg

SEQ ID NO: 3234537 - RNA, 21 nt, Human
agcagccuggcuccccugggg

SEQ ID NO: 3234538 - RNA, 17 nt, Human
agcacugacuucuaagu

SEQ ID NO: 3234539 - RNA, 16 nt, Human
agcacugacuucuaag

SEQ ID NO: 3234540 - RNA, 19 nt, Human
agcacugacuucuaaguaa

SEQ ID NO: 3234541 - RNA, 16 nt, Human
agcagccuggacccug

SEQ ID NO: 3234542 - RNA, 20 nt, Human
agcacuaaggugugcucuga

SEQ ID NO: 3234543 - RNA, 18 nt, Human
agcacagaggccuccugu

SEQ ID NO: 3234544 - RNA, 21 nt, Human
agcacagacccugcccugugg

SEQ ID NO: 3234545 - RNA, 11 nt, Human
agcacaaaauu

SEQ ID NO: 3234546 - RNA, 12 nt, Human
agcacaaaauuc

SEQ ID NO: 3234547 - RNA, 14 nt, Human
agcacaaaauucaa

SEQ ID NO: 3234548 - RNA, 15 nt, Human
agcacaaaauucaaa

SEQ ID NO: 3234549 - RNA, 20 nt, Human
agcacaaaauucaaagcaug

SEQ ID NO: 3234550 - RNA, 22 nt, Human
agcacaaaauucaaagcaugga

SEQ ID NO: 3234551 - RNA, 15 nt, Human
agcaauucuccugcc

SEQ ID NO: 3234552 - RNA, 17 nt, Human
agcaauucuccugccuc

SEQ ID NO: 3234553 - RNA, 18 nt, Human
agcaauucuccugccuca

SEQ ID NO: 3234554 - RNA, 19 nt, Human
agcaauucuccugccucag

SEQ ID NO: 3234555 - RNA, 20 nt, Human
agcaauucuccugccucagc

SEQ ID NO: 3234556 - RNA, 19 nt, Human
agcaaacuuguugaauuua

SEQ ID NO: 3234557 - RNA, 18 nt, Human
agcaaacugguuauuuaa

SEQ ID NO: 3234558 - RNA, 22 nt, Human
agcaaaguaguacuucuucugu

SEQ ID NO: 3234559 - RNA, 24 nt, Human
agcaaaguaguacuucuucuguaa

SEQ ID NO: 3234560 - RNA, 19 nt, Human
agcaaagcacccauuucaa

SEQ ID NO: 3234561 - RNA, 20 nt, Human
agcaaagcacccauuucaau

SEQ ID NO: 3234562 - RNA, 22 nt, Human
agcaaagcacccauuucaaugu

SEQ ID NO: 3234563 - RNA, 20 nt, Human
agcaaagcaugccaauuucu

SEQ ID NO: 3234564 - RNA, 19 nt, Human
agcaaauucuguuuuucua

SEQ ID NO: 3234565 - RNA, 20 nt, Human
agcaaaaugcauguaaucaa

SEQ ID NO: 3234566 - RNA, 15 nt, Human
agcaaaaugcaugua

SEQ ID NO: 3234567 - RNA, 16 nt, Human
agauugcaccacugca

SEQ ID NO: 3234568 - RNA, 17 nt, Human
agauugcaacaggcugg

SEQ ID NO: 3234569 - RNA, 16 nt, Human
agauugcaacaggcug

SEQ ID NO: 3234570 - RNA, 15 nt, Human
agauucuuuccugag

SEQ ID NO: 3234571 - RNA, 16 nt, Human
agauucuuuccugagg

SEQ ID NO: 3234572 - RNA, 12 nt, Human
agauugagaaau

SEQ ID NO: 3234573 - RNA, 13 nt, Human
agauugagaaaug

SEQ ID NO: 3234574 - RNA, 14 nt, Human
agauugagaaaugu

SEQ ID NO: 3234575 - RNA, 16 nt, Human
agauugagaaaugugu

SEQ ID NO: 3234576 - RNA, 17 nt, Human
agauugagaaaugugua

SEQ ID NO: 3234577 - RNA, 14 nt, Human
agauucuuuccuga

SEQ ID NO: 3234578 - RNA, 20 nt, Human
agauucuaggaccugugucc

SEQ ID NO: 3234579 - RNA, 20 nt, Human
agaugggugcuuggaggaag

SEQ ID NO: 3234580 - RNA, 22 nt, Human
agaugggugcuuggaggaagga

SEQ ID NO: 3234581 - RNA, 18 nt, Human
agaugacaucugucuagg

SEQ ID NO: 3234582 - RNA, 20 nt, Human
agauggcugugccucugccu

SEQ ID NO: 3234583 - RNA, 19 nt, Human
agauggcugugccucugcc

SEQ ID NO: 3234584 - RNA, 18 nt, Human
agauggcugugccucugc

SEQ ID NO: 3234585 - RNA, 17 nt, Human
agauggcugugccucug

SEQ ID NO: 3234586 - RNA, 21 nt, Human
agauggcugugccucugccug

SEQ ID NO: 3234587 - RNA, 18 nt, Human
agaugggggccucuuuca

SEQ ID NO: 3234588 - RNA, 15 nt, Human
agaugggggccucuu

SEQ ID NO: 3234589 - RNA, 23 nt, Human
agaucucugcuuuggaaaucaca

SEQ ID NO: 3234590 - RNA, 14 nt, Human
agaucucuuucuaa

SEQ ID NO: 3234591 - RNA, 18 nt, Human
agaucucugcuuuggaaa

SEQ ID NO: 3234592 - RNA, 19 nt, Human
agagugggguagguuggga

SEQ ID NO: 3234593 - RNA, 14 nt, Human
agaguggcuccucc

SEQ ID NO: 3234594 - RNA, 13 nt, Human
agaguggcuccuc

SEQ ID NO: 3234595 - RNA, 12 nt, Human
agaguggcuccu

SEQ ID NO: 3234596 - RNA, 20 nt, Human
agagggucugaggaauccag

SEQ ID NO: 3234597 - RNA, 21 nt, Human
agaggguaauaaccagacaca

SEQ ID NO: 3234598 - RNA, 19 nt, Human
agagggugauaauagaaga

SEQ ID NO: 3234599 - RNA, 19 nt, Human
agagggugaguccuccaga

SEQ ID NO: 3234600 - RNA, 21 nt, Human
agagggugaguccuccagaac

SEQ ID NO: 3234601 - RNA, 20 nt, Human
agagggugaguccuccagaa

SEQ ID NO: 3234602 - RNA, 23 nt, Human
agaggggguggccucccaacuca

SEQ ID NO: 3234603 - RNA, 19 nt, Human
agauagccccacaggaggu

SEQ ID NO: 3234604 - RNA, 13 nt, Human
agauagaguaaaa

SEQ ID NO: 3234605 - RNA, 20 nt, Human
agauagccaaggccaaagga

SEQ ID NO: 3234606 - RNA, 20 nt, Human
agauaggaaggucauuucca

SEQ ID NO: 3234607 - RNA, 21 nt, Human
agauaggaaggucauuuccau

SEQ ID NO: 3234608 - RNA, 13 nt, Human
agaguugaagaca

SEQ ID NO: 3234609 - RNA, 11 nt, Human
agaguguaaaa

SEQ ID NO: 3234610 - RNA, 14 nt, Human
agaguugaagacag

SEQ ID NO: 3234611 - RNA, 15 nt, Human
agaguugaagacaga

SEQ ID NO: 3234612 - RNA, 21 nt, Human
agauagagagugaguacaugc

SEQ ID NO: 3234613 - RNA, 23 nt, Human
agauauacuuguuuuuguaaaga

SEQ ID NO: 3234614 - RNA, 21 nt, Human
agauauacuuguuuuuguaaa

SEQ ID NO: 3234615 - RNA, 20 nt, Human
agauauacuuguuuuuguaa

SEQ ID NO: 3234616 - RNA, 15 nt, Human
agauauacuuguuuu

SEQ ID NO: 3234617 - RNA, 16 nt, Human
agauauaaugaacaaa

SEQ ID NO: 3234618 - RNA, 19 nt, Human
agauauaaugaacaaaauu

SEQ ID NO: 3234619 - RNA, 21 nt, Human
agauauaaugaacaaaauuau

SEQ ID NO: 3234620 - RNA, 13 nt, Human
aggcugagccuca

SEQ ID NO: 3234621 - RNA, 11 nt, Human
aggcugagccu

SEQ ID NO: 3234622 - RNA, 13 nt, Human
aggcucuucuccu

SEQ ID NO: 3234623 - RNA, 11 nt, Human
aggcugaggac

SEQ ID NO: 3234624 - RNA, 13 nt, Human
aggcugaggacuu

SEQ ID NO: 3234625 - RNA, 19 nt, Human
aggcuguugaauggaauuu

SEQ ID NO: 3234626 - RNA, 17 nt, Human
agggacaggauaagagg

SEQ ID NO: 3234627 - RNA, 16 nt, Human
agggacagucucacca

SEQ ID NO: 3234628 - RNA, 13 nt, Human
agggacagucuca

SEQ ID NO: 3234629 - RNA, 24 nt, Human
aggcuguaucccaugagccucagc

SEQ ID NO: 3234630 - RNA, 16 nt, Human
aggcuguauucagcaa

SEQ ID NO: 3234631 - RNA, 12 nt, Human
aggcugucaauu

SEQ ID NO: 3234632 - RNA, 17 nt, Human
aggcugcagugagccga

SEQ ID NO: 3234633 - RNA, 19 nt, Human
aggcugcagugagccgaga

SEQ ID NO: 3234634 - RNA, 23 nt, Human
aggcuguaucccaugagccucag

SEQ ID NO: 3234635 - RNA, 19 nt, Human
aggcccucugcccacuccc

SEQ ID NO: 3234636 - RNA, 20 nt, Human
aggcccucugcccacucccu

SEQ ID NO: 3234637 - RNA, 19 nt, Human
aggccagggagcaguggcu

SEQ ID NO: 3234638 - RNA, 22 nt, Human
agggauuuggggcucagagugg

SEQ ID NO: 3234639 - RNA, 18 nt, Human
agggccuggccugagcug

SEQ ID NO: 3234640 - RNA, 19 nt, Human
agggauugauuuuaaaaug

SEQ ID NO: 3234641 - RNA, 17 nt, Human
agggauugauuuuaaaa

SEQ ID NO: 3234642 - RNA, 14 nt, Human
agggauugauuuua

SEQ ID NO: 3234643 - RNA, 13 nt, Human
agggccuggcuca

SEQ ID NO: 3234644 - RNA, 14 nt, Human
agggccuggcucag

SEQ ID NO: 3234645 - RNA, 18 nt, Human
agggccuggcucaggugg

SEQ ID NO: 3234646 - RNA, 16 nt, Human
agggccugggccuggc

SEQ ID NO: 3234647 - RNA, 13 nt, Human
agggccugggccu

SEQ ID NO: 3234648 - RNA, 21 nt, Human
agggccugggccuggcucccu

SEQ ID NO: 3234649 - RNA, 20 nt, Human
agggccugggccuggcuccc

SEQ ID NO: 3234650 - RNA, 19 nt, Human
agggccugggccuggcucc

SEQ ID NO: 3234651 - RNA, 17 nt, Human
agggccugggccuggcu

SEQ ID NO: 3234652 - RNA, 14 nt, Human
agggcucaacacug

SEQ ID NO: 3234653 - RNA, 21 nt, Human
agggcuaggaauauagauuaa

SEQ ID NO: 3234654 - RNA, 16 nt, Human
agggcuaggaauauag

SEQ ID NO: 3234655 - RNA, 15 nt, Human
agggcuaggaauaua

SEQ ID NO: 3234656 - RNA, 15 nt, Human
agggaugcauggaga

SEQ ID NO: 3234657 - RNA, 20 nt, Human
agggauuagggagagaagau

SEQ ID NO: 3234658 - RNA, 16 nt, Human
agggauggaggaagaa

SEQ ID NO: 3234659 - RNA, 22 nt, Human
agggauuccuaaucacucagag

SEQ ID NO: 3234660 - RNA, 16 nt, Human
agggaugaauuguaaa

SEQ ID NO: 3234661 - RNA, 17 nt, Human
aggcaucgcaauguaag

SEQ ID NO: 3234662 - RNA, 11 nt, Human
aggcaugaagg

SEQ ID NO: 3234663 - RNA, 23 nt, Human
aggcaugugaugagaggaaauca

SEQ ID NO: 3234664 - RNA, 24 nt, Human
aggcaugugaugagaggaaaucac

SEQ ID NO: 3234665 - RNA, 22 nt, Human
aggcauguucucugaggacacu

SEQ ID NO: 3234666 - RNA, 20 nt, Human
aggcauguucucugaggaca

SEQ ID NO: 3234667 - RNA, 21 nt, Human
aggcauuccccaggaggccag

SEQ ID NO: 3234668 - RNA, 22 nt, Human
aggcauuccccaggaggccagc

SEQ ID NO: 3234669 - RNA, 23 nt, Human
aggcauuccccaggaggccagcc

SEQ ID NO: 3234670 - RNA, 12 nt, Human
aggccagcugcu

SEQ ID NO: 3234671 - RNA, 23 nt, Human
aggccagggggccagucccugag

SEQ ID NO: 3234672 - RNA, 19 nt, Human
aggccagggggccaguccc

SEQ ID NO: 3234673 - RNA, 17 nt, Human
aggcccucugcccacuc

SEQ ID NO: 3234674 - RNA, 15 nt, Human
aggcccucugcccac

SEQ ID NO: 3234675 - RNA, 16 nt, Human
aggccaugggccuccu

SEQ ID NO: 3234676 - RNA, 14 nt, Human
aggccaugggccuc

SEQ ID NO: 3234677 - RNA, 13 nt, Human
aggccagcugcuu

SEQ ID NO: 3234678 - RNA, 14 nt, Human
aggccagcugcuug

SEQ ID NO: 3234679 - RNA, 16 nt, Human
aggccagcugcuuggg

SEQ ID NO: 3234680 - RNA, 16 nt, Human
aggccaggcccucugc

SEQ ID NO: 3234681 - RNA, 17 nt, Human
aggccaggcccucugcc

SEQ ID NO: 3234682 - RNA, 18 nt, Human
aggccaggcccucugccc

SEQ ID NO: 3234683 - RNA, 19 nt, Human
aggccaggcccucugccca

SEQ ID NO: 3234684 - RNA, 23 nt, Human
aggccaggcccucugcccacucc

SEQ ID NO: 3234685 - RNA, 20 nt, Human
aggcagagguugcagugagc

SEQ ID NO: 3234686 - RNA, 13 nt, Human
aggcagauacagg

SEQ ID NO: 3234687 - RNA, 15 nt, Human
aggcagccaggccac

SEQ ID NO: 3234688 - RNA, 16 nt, Human
aggcagccaggccaca

SEQ ID NO: 3234689 - RNA, 14 nt, Human
aggcagccaggcca

SEQ ID NO: 3234690 - RNA, 16 nt, Human
aggcacuucugccuga

SEQ ID NO: 3234691 - RNA, 14 nt, Human
aggcagaaagcaaa

SEQ ID NO: 3234692 - RNA, 19 nt, Human
aggcagaaagcaaaauuau

SEQ ID NO: 3234693 - RNA, 16 nt, Human
aggcagaaagcaaaau

SEQ ID NO: 3234694 - RNA, 15 nt, Human
aggcacuucugccug

SEQ ID NO: 3234695 - RNA, 13 nt, Human
aggaugucugggc

SEQ ID NO: 3234696 - RNA, 17 nt, Human
aggaugggcuucugugc

SEQ ID NO: 3234697 - RNA, 16 nt, Human
aggaugggcuucugug

SEQ ID NO: 3234698 - RNA, 16 nt, Human
aggaugugcugcagug

SEQ ID NO: 3234699 - RNA, 23 nt, Human
aggaguucgaguuacagccuggg

SEQ ID NO: 3234700 - RNA, 14 nt, Human
aggagugagcacua

SEQ ID NO: 3234701 - RNA, 21 nt, Human
aggagugaaacaucauagaaa

SEQ ID NO: 3234702 - RNA, 22 nt, Human
aggagugcguggcccaccaggc

SEQ ID NO: 3234703 - RNA, 21 nt, Human
aggagugaucgucagaugugu

SEQ ID NO: 3234704 - RNA, 20 nt, Human
aggagugcguggcccaccag

SEQ ID NO: 3234705 - RNA, 13 nt, Human
aggaguaaaagag

SEQ ID NO: 3234706 - RNA, 14 nt, Human
aggaguaaaauuca

SEQ ID NO: 3234707 - RNA, 16 nt, Human
aggaguaaaauucagu

SEQ ID NO: 3234708 - RNA, 21 nt, Human
aggaguaaaauucaguuuuuu

SEQ ID NO: 3234709 - RNA, 19 nt, Human
aggagguuggagggaaagc

SEQ ID NO: 3234710 - RNA, 12 nt, Human
aggagugagcac

SEQ ID NO: 3234711 - RNA, 15 nt, Human
aggaggucucuaaga

SEQ ID NO: 3234712 - RNA, 19 nt, Human
aggaaguacuggagaaaau

SEQ ID NO: 3234713 - RNA, 17 nt, Human
aggagagauuauuuaca

SEQ ID NO: 3234714 - RNA, 16 nt, Human
aggagagcccuucauu

SEQ ID NO: 3234715 - RNA, 14 nt, Human
aggagggaggggga

SEQ ID NO: 3234716 - RNA, 15 nt, Human
aggagggucuagagg

SEQ ID NO: 3234717 - RNA, 20 nt, Human
aggagggucuagaggccuga

SEQ ID NO: 3234718 - RNA, 14 nt, Human
aggaggucucuaag

SEQ ID NO: 3234719 - RNA, 19 nt, Human
aggaaaaccaagccguggc

SEQ ID NO: 3234720 - RNA, 16 nt, Human
aggaaaaaauugcuuu

SEQ ID NO: 3234721 - RNA, 17 nt, Human
agcuuuguuuguucuug

SEQ ID NO: 3234722 - RNA, 16 nt, Human
agcuuuguuuguucuu

SEQ ID NO: 3234723 - RNA, 22 nt, Human
agcuuuuuuuuuuuaauuuugu

SEQ ID NO: 3234724 - RNA, 21 nt, Human
agcuuuguuuguugucagcug

SEQ ID NO: 3234725 - RNA, 15 nt, Human
agcuuuguuuguucu

SEQ ID NO: 3234726 - RNA, 13 nt, Human
agcuuuguuuguu

SEQ ID NO: 3234727 - RNA, 20 nt, Human
agcuuuguuuagucuuuaua

SEQ ID NO: 3234728 - RNA, 18 nt, Human
agcuuuguuuagucuuua

SEQ ID NO: 3234729 - RNA, 15 nt, Human
aggaacacuccuuca

SEQ ID NO: 3234730 - RNA, 11 nt, Human
aggaagaaauu

SEQ ID NO: 3234731 - RNA, 12 nt, Human
aggaacacuccu

SEQ ID NO: 3234732 - RNA, 23 nt, Human
aggaacaaggcaaggcugucaau

SEQ ID NO: 3234733 - RNA, 12 nt, Human
aggaaaaauuca

SEQ ID NO: 3234734 - RNA, 23 nt, Human
aggaaaaccaagccguggcuucc

SEQ ID NO: 3234735 - RNA, 22 nt, Human
aggaaaaccaagccguggcuuc

SEQ ID NO: 3234736 - RNA, 21 nt, Human
aggaaaaccaagccguggcuu

SEQ ID NO: 3234737 - RNA, 20 nt, Human
aggaaaaccaagccguggcu

SEQ ID NO: 3234738 - RNA, 14 nt, Human
aggaagguagaaau

SEQ ID NO: 3234739 - RNA, 17 nt, Human
aggaagacaguucuaca

SEQ ID NO: 3234740 - RNA, 14 nt, Human
aggaagguaaaaag

SEQ ID NO: 3234741 - RNA, 16 nt, Human
aggaagaaauuaacuu

SEQ ID NO: 3234742 - RNA, 19 nt, Human
aggaagaacugaaaggcuu

SEQ ID NO: 3234743 - RNA, 17 nt, Human
aggaagaauagggccca

SEQ ID NO: 3234744 - RNA, 18 nt, Human
aggaagaauagggcccau

SEQ ID NO: 3234745 - RNA, 11 nt, Human
aggaaguacug

SEQ ID NO: 3234746 - RNA, 15 nt, Human
aggaaguacuggaga

SEQ ID NO: 3234747 - RNA, 18 nt, Human
aggaaggucauuuccaug

SEQ ID NO: 3234748 - RNA, 16 nt, Human
aggaaggucauuucca

SEQ ID NO: 3234749 - RNA, 14 nt, Human
aggaaggucauuuc

SEQ ID NO: 3234750 - RNA, 15 nt, Human
agcugacuuuucugu

SEQ ID NO: 3234751 - RNA, 16 nt, Human
agcugcugaaacaaca

SEQ ID NO: 3234752 - RNA, 15 nt, Human
agcugcugaaacaac

SEQ ID NO: 3234753 - RNA, 14 nt, Human
agcugcugaaacaa

SEQ ID NO: 3234754 - RNA, 22 nt, Human
agcugccuguucagcuccagcu

SEQ ID NO: 3234755 - RNA, 19 nt, Human
agcugacuuucaaagugga

SEQ ID NO: 3234756 - RNA, 15 nt, Human
agcuggucccacuca

SEQ ID NO: 3234757 - RNA, 14 nt, Human
agcuggguuggaaa

SEQ ID NO: 3234758 - RNA, 16 nt, Human
agcuggguuggaaaac

SEQ ID NO: 3234759 - RNA, 20 nt, Human
agcuggguuggaaaacagua

SEQ ID NO: 3234760 - RNA, 13 nt, Human
agcugguaacauc

SEQ ID NO: 3234761 - RNA, 23 nt, Human
agcucaccagccccagugcccac

SEQ ID NO: 3234762 - RNA, 22 nt, Human
agcucaccagccccagugccca

SEQ ID NO: 3234763 - RNA, 17 nt, Human
agccugcuccuucccuu

SEQ ID NO: 3234764 - RNA, 14 nt, Human
agccuggacccugu

SEQ ID NO: 3234765 - RNA, 19 nt, Human
agccuggaaaccugucuga

SEQ ID NO: 3234766 - RNA, 18 nt, Human
agccuggaaaccugucug

SEQ ID NO: 3234767 - RNA, 18 nt, Human
agccuggcacagggcagu

SEQ ID NO: 3234768 - RNA, 17 nt, Human
agccuggcacagggcag

SEQ ID NO: 3234769 - RNA, 20 nt, Human
agccuggcacagggcagugg

SEQ ID NO: 3234770 - RNA, 18 nt, Human
agccugggcaaugugaua

SEQ ID NO: 3234771 - RNA, 20 nt, Human
agccugggaggucaaggcug

SEQ ID NO: 3234772 - RNA, 20 nt, Human
agccugggauaggggcagag

SEQ ID NO: 3234773 - RNA, 22 nt, Human
agccugggauaggggcagagga

SEQ ID NO: 3234774 - RNA, 16 nt, Human
agccuuucauuuugcu

SEQ ID NO: 3234775 - RNA, 13 nt, Human
agccuuucauuuu

SEQ ID NO: 3234776 - RNA, 16 nt, Human
agccuuuaccugugaa

SEQ ID NO: 3234777 - RNA, 18 nt, Human
agccuuuaccugugaagu

SEQ ID NO: 3234778 - RNA, 16 nt, Human
agccuuuacuguuuga

SEQ ID NO: 3234779 - RNA, 19 nt, Human
agccuuuacuguuugauau

SEQ ID NO: 3234780 - RNA, 20 nt, Human
agccuuuacuguuugauaua

SEQ ID NO: 3234781 - RNA, 15 nt, Human
agccuuucuuuucuu

SEQ ID NO: 3234782 - RNA, 23 nt, Human
agccuuucauuuugcuuuaauuu

SEQ ID NO: 3234783 - RNA, 21 nt, Human
agccuuucauuuugcuuuaau

SEQ ID NO: 3234784 - RNA, 20 nt, Human
agccuuucauuuugcuuuaa

SEQ ID NO: 3234785 - RNA, 19 nt, Human
agccuuucauuuugcuuua

SEQ ID NO: 3234786 - RNA, 18 nt, Human
agccuuucauuuugcuuu

SEQ ID NO: 3234787 - RNA, 17 nt, Human
agccuuucauuuugcuu

SEQ ID NO: 3234788 - RNA, 13 nt, Human
agcgaacugacau

SEQ ID NO: 3234789 - RNA, 14 nt, Human
agccuuuuugaaag

SEQ ID NO: 3234790 - RNA, 19 nt, Human
agccuuucuuuucuuucuu

SEQ ID NO: 3234791 - RNA, 16 nt, Human
agccuuuuucuaggcc

SEQ ID NO: 3234792 - RNA, 13 nt, Human
agcgaauuuuaaa

SEQ ID NO: 3234793 - RNA, 16 nt, Human
agcgaauuuuaaaaga

SEQ ID NO: 3234794 - RNA, 15 nt, Human
agcgaauuuuaaaag

SEQ ID NO: 3234795 - RNA, 13 nt, Human
agcgacagugaga

SEQ ID NO: 3234796 - RNA, 15 nt, Human
agcgacagugagacu

SEQ ID NO: 3234797 - RNA, 15 nt, Human
agcgauucuucugcu

SEQ ID NO: 3234798 - RNA, 13 nt, Human
agcgacagagcag

SEQ ID NO: 3234799 - RNA, 17 nt, Human
agcgacaacagauugga

SEQ ID NO: 3234800 - RNA, 19 nt, Human
agcgauucuucugcuucag

SEQ ID NO: 3234801 - RNA, 17 nt, Human
agcgauucuucugcuuc

SEQ ID NO: 3234802 - RNA, 19 nt, Human
agcuaacauggaaguacua

SEQ ID NO: 3234803 - RNA, 19 nt, Human
agcgauucucuugccucag

SEQ ID NO: 3234804 - RNA, 20 nt, Human
agcuaacauggaaguacuau

SEQ ID NO: 3234805 - RNA, 15 nt, Human
agcuaaugggacacu

SEQ ID NO: 3234806 - RNA, 14 nt, Human
agcuaaugggacac

SEQ ID NO: 3234807 - RNA, 13 nt, Human
agcuaaugggaca

SEQ ID NO: 3234808 - RNA, 19 nt, Human
agcuaagguuuagauaaau

SEQ ID NO: 3234809 - RNA, 17 nt, Human
agcuacaacuaauaaca

SEQ ID NO: 3234810 - RNA, 21 nt, Human
agcucaccagccccagugccc

SEQ ID NO: 3234811 - RNA, 20 nt, Human
agcucaccagccccagugcc

SEQ ID NO: 3234812 - RNA, 14 nt, Human
agcucaccagcccc

SEQ ID NO: 3234813 - RNA, 13 nt, Human
agcucaccagccc

SEQ ID NO: 3234814 - RNA, 14 nt, Human
agugacagaggcag

SEQ ID NO: 3234815 - RNA, 19 nt, Human
agugacagaggcagcccca

SEQ ID NO: 3234816 - RNA, 16 nt, Human
agugacagaggcagcc

SEQ ID NO: 3234817 - RNA, 13 nt, Human
agugauuaccagg

SEQ ID NO: 3234818 - RNA, 19 nt, Human
agugaugucacuagggcag

SEQ ID NO: 3234819 - RNA, 20 nt, Human
agugauggguuaguggaugg

SEQ ID NO: 3234820 - RNA, 22 nt, Human
agugauccucccaccucagccu

SEQ ID NO: 3234821 - RNA, 20 nt, Human
agugauccucccaccucagc

SEQ ID NO: 3234822 - RNA, 19 nt, Human
agugauccucccaccucag

SEQ ID NO: 3234823 - RNA, 19 nt, Human
agugccuuauggaacacuc

SEQ ID NO: 3234824 - RNA, 20 nt, Human
agugccuuauggaacacucu

SEQ ID NO: 3234825 - RNA, 21 nt, Human
agugccuuauggaacacucug

SEQ ID NO: 3234826 - RNA, 22 nt, Human
agugccuuauggaacacucuga

SEQ ID NO: 3234827 - RNA, 18 nt, Human
agugccuuauggaacacu

SEQ ID NO: 3234828 - RNA, 17 nt, Human
agugauucuccugccuc

SEQ ID NO: 3234829 - RNA, 20 nt, Human
agugauucuccugccucagc

SEQ ID NO: 3234830 - RNA, 18 nt, Human
agugauucuccugccuca

SEQ ID NO: 3234831 - RNA, 19 nt, Human
agugauucuccugccucag

SEQ ID NO: 3234832 - RNA, 14 nt, Human
agugcuacugaaag

SEQ ID NO: 3234833 - RNA, 17 nt, Human
agugcguggcccaccag

SEQ ID NO: 3234834 - RNA, 13 nt, Human
agugcguggccca

SEQ ID NO: 3234835 - RNA, 21 nt, Human
agugccuuugcagcucagaac

SEQ ID NO: 3234836 - RNA, 18 nt, Human
agugccuuugcagcucag

SEQ ID NO: 3234837 - RNA, 20 nt, Human
agugccuuugcagcucagaa

SEQ ID NO: 3234838 - RNA, 17 nt, Human
agugccuuugcagcuca

SEQ ID NO: 3234839 - RNA, 13 nt, Human
agucauuuaauaa

SEQ ID NO: 3234840 - RNA, 15 nt, Human
agucauuucugauuu

SEQ ID NO: 3234841 - RNA, 14 nt, Human
agucauuucugauu

SEQ ID NO: 3234842 - RNA, 13 nt, Human
agucauuucugau

SEQ ID NO: 3234843 - RNA, 20 nt, Human
agucauuguaauguugugaa

SEQ ID NO: 3234844 - RNA, 17 nt, Human
agucauuguaauguugu

SEQ ID NO: 3234845 - RNA, 16 nt, Human
agucauuguaauguug

SEQ ID NO: 3234846 - RNA, 15 nt, Human
agucauuguaauguu

SEQ ID NO: 3234847 - RNA, 12 nt, Human
agucauuguaau

SEQ ID NO: 3234848 - RNA, 16 nt, Human
aguccuuaccagcaga

SEQ ID NO: 3234849 - RNA, 18 nt, Human
aguccuuaccagcagagc

SEQ ID NO: 3234850 - RNA, 14 nt, Human
aguccucuuuucug

SEQ ID NO: 3234851 - RNA, 16 nt, Human
agucauuuuguguuga

SEQ ID NO: 3234852 - RNA, 15 nt, Human
agucauuuucaagac

SEQ ID NO: 3234853 - RNA, 15 nt, Human
agucauuugugaauu

SEQ ID NO: 3234854 - RNA, 13 nt, Human
agucauuuucaag

SEQ ID NO: 3234855 - RNA, 18 nt, Human
agucuggcccuuccuuuu

SEQ ID NO: 3234856 - RNA, 17 nt, Human
agucuggggaccagcuu

SEQ ID NO: 3234857 - RNA, 16 nt, Human
agucgaggacagggag

SEQ ID NO: 3234858 - RNA, 17 nt, Human
aguccuuugagcuccug

SEQ ID NO: 3234859 - RNA, 18 nt, Human
agucuggaaugcaguggu

SEQ ID NO: 3234860 - RNA, 20 nt, Human
agucugauucccaagcucug

SEQ ID NO: 3234861 - RNA, 22 nt, Human
agucugauucccaagcucugcu

SEQ ID NO: 3234862 - RNA, 21 nt, Human
agucugauucccaagcucugc

SEQ ID NO: 3234863 - RNA, 18 nt, Human
aguaucagagauguccau

SEQ ID NO: 3234864 - RNA, 23 nt, Human
aguaucagagauguccauuuuua

SEQ ID NO: 3234865 - RNA, 13 nt, Human
aguaucaugaagc

SEQ ID NO: 3234866 - RNA, 13 nt, Human
aguauauuuuauu

SEQ ID NO: 3234867 - RNA, 19 nt, Human
aguauauuuuauuucaaug

SEQ ID NO: 3234868 - RNA, 20 nt, Human
aguauauuuuauuucaaugu

SEQ ID NO: 3234869 - RNA, 14 nt, Human
aguauauuguugaa

SEQ ID NO: 3234870 - RNA, 18 nt, Human
aguauauuguugaagaga

SEQ ID NO: 3234871 - RNA, 20 nt, Human
aguauauuguugaagagaca

SEQ ID NO: 3234872 - RNA, 22 nt, Human
aguauauuguugaagagacaga

SEQ ID NO: 3234873 - RNA, 16 nt, Human
aguauauuauaauaga

SEQ ID NO: 3234874 - RNA, 21 nt, Human
aguacuucuccacccugcucu

SEQ ID NO: 3234875 - RNA, 15 nt, Human
aguauaucucaguuu

SEQ ID NO: 3234876 - RNA, 19 nt, Human
aguacuucuccacccugcu

SEQ ID NO: 3234877 - RNA, 20 nt, Human
aguacuucuccacccugcuc

SEQ ID NO: 3234878 - RNA, 13 nt, Human
aguacucauacau

SEQ ID NO: 3234879 - RNA, 19 nt, Human
aguaccuggguccccagcc

SEQ ID NO: 3234880 - RNA, 20 nt, Human
aguaccuuaucaaaguagca

SEQ ID NO: 3234881 - RNA, 22 nt, Human
aguaccuggguccccagcccuu

SEQ ID NO: 3234882 - RNA, 21 nt, Human
aguaccuggguccccagcccu

SEQ ID NO: 3234883 - RNA, 15 nt, Human
aguacuggagaaaau

SEQ ID NO: 3234884 - RNA, 23 nt, Human
aguacugagcagugauauucuuu

SEQ ID NO: 3234885 - RNA, 19 nt, Human
aguacugagcagugauauu

SEQ ID NO: 3234886 - RNA, 14 nt, Human
aguaaauguaguuc

SEQ ID NO: 3234887 - RNA, 12 nt, Human
aguaaauguagu

SEQ ID NO: 3234888 - RNA, 15 nt, Human
aguaaauguaguuca

SEQ ID NO: 3234889 - RNA, 17 nt, Human
aguaacuuacuuaggug

SEQ ID NO: 3234890 - RNA, 18 nt, Human
aguaacuugggagugugg

SEQ ID NO: 3234891 - RNA, 14 nt, Human
aguaacuugggagu

SEQ ID NO: 3234892 - RNA, 18 nt, Human
aguaacuggugauauauc

SEQ ID NO: 3234893 - RNA, 12 nt, Human
aguaaacacugu

SEQ ID NO: 3234894 - RNA, 15 nt, Human
aguaaaccugucuga

SEQ ID NO: 3234895 - RNA, 16 nt, Human
aguaaacacuguguau

SEQ ID NO: 3234896 - RNA, 13 nt, Human
aguaaacacugug

SEQ ID NO: 3234897 - RNA, 12 nt, Human
aguaaaauucag

SEQ ID NO: 3234898 - RNA, 14 nt, Human
aguaaaauucaguu

SEQ ID NO: 3234899 - RNA, 18 nt, Human
aguaaaauucaguuuuuu

SEQ ID NO: 3234900 - RNA, 19 nt, Human
aggggccagacccugccca

SEQ ID NO: 3234901 - RNA, 21 nt, Human
auacuguuuuucgucauucca

SEQ ID NO: 3234902 - RNA, 16 nt, Human
auacuuaaaaauuuau

SEQ ID NO: 3234903 - RNA, 13 nt, Human
auacuguguguga

SEQ ID NO: 3234904 - RNA, 21 nt, Human
auacugugugugagugugaau

SEQ ID NO: 3234905 - RNA, 15 nt, Human
auacuguuauucuuu

SEQ ID NO: 3234906 - RNA, 18 nt, Human
auacuguuauucuuugca

SEQ ID NO: 3234907 - RNA, 16 nt, Human
auacuguuauucuuug

SEQ ID NO: 3234908 - RNA, 22 nt, Human
auacuguuauucuuugcacuuu

SEQ ID NO: 3234909 - RNA, 20 nt, Human
auacuguuauucuuugcacu

SEQ ID NO: 3234910 - RNA, 17 nt, Human
auacuuuuuugaaauca

SEQ ID NO: 3234911 - RNA, 14 nt, Human
auacuuuuuugaaa

SEQ ID NO: 3234912 - RNA, 17 nt, Human
auagaaaaaaacauucu

SEQ ID NO: 3234913 - RNA, 14 nt, Human
auagcaaaguagua

SEQ ID NO: 3234914 - RNA, 13 nt, Human
auagaaaaacaaa

SEQ ID NO: 3234915 - RNA, 12 nt, Human
auacuugaacca

SEQ ID NO: 3234916 - RNA, 12 nt, Human
auacuuaaaugu

SEQ ID NO: 3234917 - RNA, 13 nt, Human
auacuugaaccau

SEQ ID NO: 3234918 - RNA, 16 nt, Human
auacuugaaccauaaa

SEQ ID NO: 3234919 - RNA, 17 nt, Human
auacuugaaccauaaaa

SEQ ID NO: 3234920 - RNA, 18 nt, Human
auacuugaaccauaaaau

SEQ ID NO: 3234921 - RNA, 20 nt, Human
auacuugaaccauaaaaugu

SEQ ID NO: 3234922 - RNA, 22 nt, Human
auacuugaaccauaaaaugucc

SEQ ID NO: 3234923 - RNA, 14 nt, Human
auacaccgggccug

SEQ ID NO: 3234924 - RNA, 21 nt, Human
auacaccucaacuaaauccaa

SEQ ID NO: 3234925 - RNA, 18 nt, Human
auacaccgggccuggaga

SEQ ID NO: 3234926 - RNA, 18 nt, Human
auaagcuuaugcuuaaau

SEQ ID NO: 3234927 - RNA, 22 nt, Human
auaagcuaguugaauacuugaa

SEQ ID NO: 3234928 - RNA, 23 nt, Human
auaagcuaguugaauacuugaac

SEQ ID NO: 3234929 - RNA, 17 nt, Human
auaagcuaguugaauac

SEQ ID NO: 3234930 - RNA, 18 nt, Human
auaagcuaguugaauacu

SEQ ID NO: 3234931 - RNA, 20 nt, Human
auaagcuaguugaauacuug

SEQ ID NO: 3234932 - RNA, 21 nt, Human
auaagcuaguugaauacuuga

SEQ ID NO: 3234933 - RNA, 14 nt, Human
auaagcuaguugaa

SEQ ID NO: 3234934 - RNA, 15 nt, Human
auaagcuaguugaau

SEQ ID NO: 3234935 - RNA, 21 nt, Human
auaaguggccuugacacauua

SEQ ID NO: 3234936 - RNA, 12 nt, Human
auaaugugaaau

SEQ ID NO: 3234937 - RNA, 15 nt, Human
auaaugugaaaugua

SEQ ID NO: 3234938 - RNA, 19 nt, Human
auaaguggccuugacacau

SEQ ID NO: 3234939 - RNA, 20 nt, Human
auacacacucaaaucaagaa

SEQ ID NO: 3234940 - RNA, 12 nt, Human
auaauguuguca

SEQ ID NO: 3234941 - RNA, 12 nt, Human
auaauguuaaca

SEQ ID NO: 3234942 - RNA, 22 nt, Human
auaauguucugcuaaauuucaa

SEQ ID NO: 3234943 - RNA, 14 nt, Human
auaauguucugcua

SEQ ID NO: 3234944 - RNA, 17 nt, Human
auaaagaccagaaauuc

SEQ ID NO: 3234945 - RNA, 20 nt, Human
aguuugccccguucuguuug

SEQ ID NO: 3234946 - RNA, 15 nt, Human
aguuugcuaauguuu

SEQ ID NO: 3234947 - RNA, 16 nt, Human
aguuugcuaauguuuc

SEQ ID NO: 3234948 - RNA, 18 nt, Human
auaaaaaaaagaaaaaag

SEQ ID NO: 3234949 - RNA, 17 nt, Human
auaaaaaaaagaaaaaa

SEQ ID NO: 3234950 - RNA, 13 nt, Human
auaaaaaaaagaa

SEQ ID NO: 3234951 - RNA, 13 nt, Human
auaaaaaaucaug

SEQ ID NO: 3234952 - RNA, 16 nt, Human
auaaaaaaucaugcca

SEQ ID NO: 3234953 - RNA, 14 nt, Human
auaaaaaaugacaa

SEQ ID NO: 3234954 - RNA, 16 nt, Human
auaaaaaaagaaaaaa

SEQ ID NO: 3234955 - RNA, 12 nt, Human
auaaaaaaagaa

SEQ ID NO: 3234956 - RNA, 15 nt, Human
auaaaaaaacagcuu

SEQ ID NO: 3234957 - RNA, 19 nt, Human
auaaaaagauaaucucagu

SEQ ID NO: 3234958 - RNA, 22 nt, Human
auaaaacaguuggcaugcaucc

SEQ ID NO: 3234959 - RNA, 19 nt, Human
auaaaacagaguaaucuug

SEQ ID NO: 3234960 - RNA, 21 nt, Human
auaaaacagaguaaucuuguu

SEQ ID NO: 3234961 - RNA, 16 nt, Human
auaaaacagaguaauc

SEQ ID NO: 3234962 - RNA, 18 nt, Human
auaaaaauuacuguguua

SEQ ID NO: 3234963 - RNA, 16 nt, Human
auaaaaauucuagauu

SEQ ID NO: 3234964 - RNA, 18 nt, Human
auaaaaauucuagauuac

SEQ ID NO: 3234965 - RNA, 14 nt, Human
aguuugaucuuccu

SEQ ID NO: 3234966 - RNA, 21 nt, Human
aguuugaucuuccucugcuaa

SEQ ID NO: 3234967 - RNA, 16 nt, Human
aguuugaucuuccucu

SEQ ID NO: 3234968 - RNA, 23 nt, Human
aguuugaucuuccucugcuaaau

SEQ ID NO: 3234969 - RNA, 22 nt, Human
aguuugaucuuccucugcuaaa

SEQ ID NO: 3234970 - RNA, 18 nt, Human
aguuugaggauuaguuua

SEQ ID NO: 3234971 - RNA, 16 nt, Human
aguuugauaaauagug

SEQ ID NO: 3234972 - RNA, 19 nt, Human
aguuugauaaauaguguua

SEQ ID NO: 3234973 - RNA, 18 nt, Human
aguuugauaaauaguguu

SEQ ID NO: 3234974 - RNA, 17 nt, Human
aguuugaggauuaguuu

SEQ ID NO: 3234975 - RNA, 20 nt, Human
aguuugaggaaauuugcagc

SEQ ID NO: 3234976 - RNA, 19 nt, Human
aguuugaggaaauuugcag

SEQ ID NO: 3234977 - RNA, 18 nt, Human
aguuugaggaaauuugca

SEQ ID NO: 3234978 - RNA, 14 nt, Human
aguuugaggaaauu

SEQ ID NO: 3234979 - RNA, 11 nt, Human
aguuugcaguu

SEQ ID NO: 3234980 - RNA, 15 nt, Human
aguuugcauuucaga

SEQ ID NO: 3234981 - RNA, 23 nt, Human
aguuugcauuucagaaagccuuu

SEQ ID NO: 3234982 - RNA, 17 nt, Human
aguuugcauuucagaaa

SEQ ID NO: 3234983 - RNA, 16 nt, Human
aguuugcauuucagaa

SEQ ID NO: 3234984 - RNA, 13 nt, Human
aguuucugugguu

SEQ ID NO: 3234985 - RNA, 17 nt, Human
aguuucugugguuggcu

SEQ ID NO: 3234986 - RNA, 21 nt, Human
aguuucugugguuggcuggga

SEQ ID NO: 3234987 - RNA, 23 nt, Human
aguuucugugguuggcugggaaa

SEQ ID NO: 3234988 - RNA, 20 nt, Human
aguuucugucguuaaaaaca

SEQ ID NO: 3234989 - RNA, 23 nt, Human
aguuucugucguuaaaaacagau

SEQ ID NO: 3234990 - RNA, 22 nt, Human
aguuucugucguuaaaaacaga

SEQ ID NO: 3234991 - RNA, 20 nt, Human
aguuguuagauuaagaaaua

SEQ ID NO: 3234992 - RNA, 17 nt, Human
aguuguuagugugucuu

SEQ ID NO: 3234993 - RNA, 22 nt, Human
aguuguuagugugucuuagugu

SEQ ID NO: 3234994 - RNA, 14 nt, Human
aguugaauacuuga

SEQ ID NO: 3234995 - RNA, 17 nt, Human
aguugaagucaugcucc

SEQ ID NO: 3234996 - RNA, 17 nt, Human
aguugaaguuaguggaa

SEQ ID NO: 3234997 - RNA, 19 nt, Human
aguugaaguuaguggaaau

SEQ ID NO: 3234998 - RNA, 22 nt, Human
aguugaaguuaguggaaaucug

SEQ ID NO: 3234999 - RNA, 15 nt, Human
aguugaagucaugcu

SEQ ID NO: 3235000 - RNA, 19 nt, Human
aguugaauacuugaaccau

SEQ ID NO: 3235001 - RNA, 15 nt, Human
aguuguuagauuaag

SEQ ID NO: 3235002 - RNA, 15 nt, Human
aguugaauacuugaa

SEQ ID NO: 3235003 - RNA, 16 nt, Human
aguugaauacuugaac

SEQ ID NO: 3235004 - RNA, 17 nt, Human
aguugaauacuugaacc

SEQ ID NO: 3235005 - RNA, 18 nt, Human
aguugaauacuugaacca

SEQ ID NO: 3235006 - RNA, 19 nt, Human
aguuaauguauauaaaaau

SEQ ID NO: 3235007 - RNA, 20 nt, Human
aguuaauguauauaaaaaug

SEQ ID NO: 3235008 - RNA, 19 nt, Human
aguuaacaggcaaacauuu

SEQ ID NO: 3235009 - RNA, 18 nt, Human
aguuaacaggcaaacauu

SEQ ID NO: 3235010 - RNA, 17 nt, Human
aguguuuucagaagaaa

SEQ ID NO: 3235011 - RNA, 18 nt, Human
aguguuuucagaagaaau

SEQ ID NO: 3235012 - RNA, 12 nt, Human
aguuaaaucuca

SEQ ID NO: 3235013 - RNA, 14 nt, Human
aguuaaaucucaaa

SEQ ID NO: 3235014 - RNA, 19 nt, Human
agugcuauuacgaaguuca

SEQ ID NO: 3235015 - RNA, 23 nt, Human
agugcuauuacgaaguucaagau

SEQ ID NO: 3235016 - RNA, 16 nt, Human
aguggccaucauuucu

SEQ ID NO: 3235017 - RNA, 15 nt, Human
aguggcccaacaggg

SEQ ID NO: 3235018 - RNA, 17 nt, Human
aguggccaucauuucug

SEQ ID NO: 3235019 - RNA, 13 nt, Human
aguggccccaccu

SEQ ID NO: 3235020 - RNA, 21 nt, Human
aguggcccaacaggggcucca

SEQ ID NO: 3235021 - RNA, 12 nt, Human
aguggccccacc

SEQ ID NO: 3235022 - RNA, 18 nt, Human
aguggccuacaaaucagu

SEQ ID NO: 3235023 - RNA, 21 nt, Human
aguggccuacaaaucaguaau

SEQ ID NO: 3235024 - RNA, 22 nt, Human
aguggccuacaaaucaguaauu

SEQ ID NO: 3235025 - RNA, 19 nt, Human
aguggccccaccuggcccu

SEQ ID NO: 3235026 - RNA, 18 nt, Human
aguggccccaccuggccc

SEQ ID NO: 3235027 - RNA, 16 nt, Human
aguggccccaccuggc

SEQ ID NO: 3235028 - RNA, 14 nt, Human
aguggccccaccug

SEQ ID NO: 3235029 - RNA, 12 nt, Human
aguguuugcugc

SEQ ID NO: 3235030 - RNA, 14 nt, Human
aguucauacccugu

SEQ ID NO: 3235031 - RNA, 23 nt, Human
aguuacaaauuauaauguauuca

SEQ ID NO: 3235032 - RNA, 22 nt, Human
aguuacaaauuauaauguauuc

SEQ ID NO: 3235033 - RNA, 21 nt, Human
aguuacaaauuauaauguauu

SEQ ID NO: 3235034 - RNA, 18 nt, Human
aguuccaccaucaagcca

SEQ ID NO: 3235035 - RNA, 21 nt, Human
aguuccaccaucaagccacca

SEQ ID NO: 3235036 - RNA, 15 nt, Human
aguucaucccuucuc

SEQ ID NO: 3235037 - RNA, 13 nt, Human
aguucaucccuuc

SEQ ID NO: 3235038 - RNA, 18 nt, Human
aguugaaaaacagcugag

SEQ ID NO: 3235039 - RNA, 16 nt, Human
aguugaagacagagcu

SEQ ID NO: 3235040 - RNA, 17 nt, Human
aguugaagacagagcua

SEQ ID NO: 3235041 - RNA, 17 nt, Human
aguugaaaaacagcuga

SEQ ID NO: 3235042 - RNA, 17 nt, Human
aguuccaaucaguagcu

SEQ ID NO: 3235043 - RNA, 13 nt, Human
aguuccacugaga

SEQ ID NO: 3235044 - RNA, 19 nt, Human
aguucaucccuucucuucc

SEQ ID NO: 3235045 - RNA, 16 nt, Human
aguucaucccuucucu

SEQ ID NO: 3235046 - RNA, 15 nt, Human
aguuccacugagacc

SEQ ID NO: 3235047 - RNA, 22 nt, Human
augaggcugcuuuccaaagcca

SEQ ID NO: 3235048 - RNA, 15 nt, Human
augagcuugauuaaa

SEQ ID NO: 3235049 - RNA, 21 nt, Human
augagcuuugucuacuucaaa

SEQ ID NO: 3235050 - RNA, 15 nt, Human
augaccuuucaauag

SEQ ID NO: 3235051 - RNA, 18 nt, Human
augaccuuguaauguaac

SEQ ID NO: 3235052 - RNA, 20 nt, Human
augaccuuguaauguaacug

SEQ ID NO: 3235053 - RNA, 19 nt, Human
augaccuuguaauguaacu

SEQ ID NO: 3235054 - RNA, 13 nt, Human
augaccuuucaau

SEQ ID NO: 3235055 - RNA, 11 nt, Human
augagccuggc

SEQ ID NO: 3235056 - RNA, 19 nt, Human
augagccucagcauccugg

SEQ ID NO: 3235057 - RNA, 21 nt, Human
augagccucagcauccuggca

SEQ ID NO: 3235058 - RNA, 17 nt, Human
augaauaaagacaccua

SEQ ID NO: 3235059 - RNA, 18 nt, Human
augaauaaugccuuugua

SEQ ID NO: 3235060 - RNA, 19 nt, Human
augaauaaugccuuuguaa

SEQ ID NO: 3235061 - RNA, 20 nt, Human
augaauaaugccuuuguaac

SEQ ID NO: 3235062 - RNA, 13 nt, Human
augaauaauggaa

SEQ ID NO: 3235063 - RNA, 14 nt, Human
augaauaauggaaa

SEQ ID NO: 3235064 - RNA, 20 nt, Human
augaauaauggaaaaugcca

SEQ ID NO: 3235065 - RNA, 17 nt, Human
augaauacgagcaagcu

SEQ ID NO: 3235066 - RNA, 12 nt, Human
augaauacuuug

SEQ ID NO: 3235067 - RNA, 13 nt, Human
augaaacuuggau

SEQ ID NO: 3235068 - RNA, 12 nt, Human
augaaagacugu

SEQ ID NO: 3235069 - RNA, 23 nt, Human
augaagcauuuacuuuguguuca

SEQ ID NO: 3235070 - RNA, 18 nt, Human
augaaagaaaacuuuuau

SEQ ID NO: 3235071 - RNA, 23 nt, Human
aucuaggaagacuuuggaaagag

SEQ ID NO: 3235072 - RNA, 17 nt, Human
augcaucccacugcuga

SEQ ID NO: 3235073 - RNA, 23 nt, Human
augcauaauaauccugcaaagua

SEQ ID NO: 3235074 - RNA, 21 nt, Human
augcauaauaauccugcaaag

SEQ ID NO: 3235075 - RNA, 19 nt, Human
augcauaauaauccugcaa

SEQ ID NO: 3235076 - RNA, 18 nt, Human
augccugguggcagcugc

SEQ ID NO: 3235077 - RNA, 19 nt, Human
augccugguggcagcugcg

SEQ ID NO: 3235078 - RNA, 13 nt, Human
augccugguggca

SEQ ID NO: 3235079 - RNA, 12 nt, Human
augccugguggc

SEQ ID NO: 3235080 - RNA, 11 nt, Human
augccuggugg

SEQ ID NO: 3235081 - RNA, 19 nt, Human
augcauguaaucaacaugg

SEQ ID NO: 3235082 - RNA, 13 nt, Human
augcauguaauca

SEQ ID NO: 3235083 - RNA, 21 nt, Human
augccugguggcagcugcggu

SEQ ID NO: 3235084 - RNA, 23 nt, Human
auggagauagccccacaggaggu

SEQ ID NO: 3235085 - RNA, 16 nt, Human
augcuuugaucccuuc

SEQ ID NO: 3235086 - RNA, 23 nt, Human
augcuuuccauauuuuuuuccuu

SEQ ID NO: 3235087 - RNA, 15 nt, Human
augcuuuccauauuu

SEQ ID NO: 3235088 - RNA, 22 nt, Human
augcuuuccauauuuuuuuccu

SEQ ID NO: 3235089 - RNA, 16 nt, Human
augcuuuccauauuuu

SEQ ID NO: 3235090 - RNA, 21 nt, Human
augcuuuaggauguacaguua

SEQ ID NO: 3235091 - RNA, 20 nt, Human
augcuucuucagagacuccu

SEQ ID NO: 3235092 - RNA, 14 nt, Human
augcuucuucagag

SEQ ID NO: 3235093 - RNA, 17 nt, Human
augcuucuucagagacu

SEQ ID NO: 3235094 - RNA, 19 nt, Human
augcucugcauguuacaua

SEQ ID NO: 3235095 - RNA, 18 nt, Human
augcucugcauguuacau

SEQ ID NO: 3235096 - RNA, 15 nt, Human
augcucugcauguua

SEQ ID NO: 3235097 - RNA, 15 nt, Human
augggacagggagga

SEQ ID NO: 3235098 - RNA, 20 nt, Human
augggaaagcauuguaaaug

SEQ ID NO: 3235099 - RNA, 14 nt, Human
augggaaagcauug

SEQ ID NO: 3235100 - RNA, 21 nt, Human
augggaaugaaugucagugug

SEQ ID NO: 3235101 - RNA, 22 nt, Human
augggaaaguauucucuuuuca

SEQ ID NO: 3235102 - RNA, 18 nt, Human
augggaaaguauucucuu

SEQ ID NO: 3235103 - RNA, 18 nt, Human
auggcuuuauuuuuuuga

SEQ ID NO: 3235104 - RNA, 23 nt, Human
auggcuuuauuuuuuugaacucu

SEQ ID NO: 3235105 - RNA, 20 nt, Human
auggcuucggacaaaauauc

SEQ ID NO: 3235106 - RNA, 23 nt, Human
auggaguuggaguucauucauau

SEQ ID NO: 3235107 - RNA, 18 nt, Human
auggaguuggaguucauu

SEQ ID NO: 3235108 - RNA, 20 nt, Human
auggaguuaaacuuuagugc

SEQ ID NO: 3235109 - RNA, 23 nt, Human
auccacucucucuuguucuuacu

SEQ ID NO: 3235110 - RNA, 18 nt, Human
auccacucugcaggaaau

SEQ ID NO: 3235111 - RNA, 22 nt, Human
auccacucugcaggaaauaggc

SEQ ID NO: 3235112 - RNA, 21 nt, Human
auccacugugccaugugccag

SEQ ID NO: 3235113 - RNA, 21 nt, Human
auccagcccugaguuccuagc

SEQ ID NO: 3235114 - RNA, 12 nt, Human
auccaggccacu

SEQ ID NO: 3235115 - RNA, 14 nt, Human
auccaggccccucc

SEQ ID NO: 3235116 - RNA, 19 nt, Human
auccaggccacucuuagcc

SEQ ID NO: 3235117 - RNA, 21 nt, Human
auccaggccccucccucucca

SEQ ID NO: 3235118 - RNA, 20 nt, Human
auccaggccccucccucucc

SEQ ID NO: 3235119 - RNA, 15 nt, Human
aucauccuaagcuau

SEQ ID NO: 3235120 - RNA, 23 nt, Human
aucauccacugugccaugugcca

SEQ ID NO: 3235121 - RNA, 14 nt, Human
aucaaauacauuua

SEQ ID NO: 3235122 - RNA, 13 nt, Human
aucaaauacauuu

SEQ ID NO: 3235123 - RNA, 20 nt, Human
aucaaauaauaccuuagaag

SEQ ID NO: 3235124 - RNA, 17 nt, Human
aucaaauaauaccuuag

SEQ ID NO: 3235125 - RNA, 16 nt, Human
aucaaaguagcaaaug

SEQ ID NO: 3235126 - RNA, 17 nt, Human
aucaaauaaaaauucua

SEQ ID NO: 3235127 - RNA, 19 nt, Human
aucaaauaaaaauucuaga

SEQ ID NO: 3235128 - RNA, 21 nt, Human
aucaaauaaaaauucuagauu

SEQ ID NO: 3235129 - RNA, 11 nt, Human
aucaaagugcu

SEQ ID NO: 3235130 - RNA, 18 nt, Human
aucaugcacacaauuaga

SEQ ID NO: 3235131 - RNA, 19 nt, Human
aucaugcacacaauuagau

SEQ ID NO: 3235132 - RNA, 19 nt, Human
aucaugccaguauuuuuaa

SEQ ID NO: 3235133 - RNA, 14 nt, Human
aucaugaauuuuaa

SEQ ID NO: 3235134 - RNA, 15 nt, Human
aucaugaauuuuaaa

SEQ ID NO: 3235135 - RNA, 17 nt, Human
aucaugaauuuuaaagu

SEQ ID NO: 3235136 - RNA, 18 nt, Human
aucaugaauuuuaaagua

SEQ ID NO: 3235137 - RNA, 19 nt, Human
aucaugaauuuuaaaguau

SEQ ID NO: 3235138 - RNA, 14 nt, Human
aucgaccugccucg

SEQ ID NO: 3235139 - RNA, 17 nt, Human
aucgacuuguucuugau

SEQ ID NO: 3235140 - RNA, 13 nt, Human
aucgaaaaaauaa

SEQ ID NO: 3235141 - RNA, 14 nt, Human
aucgaaaaaauaau

SEQ ID NO: 3235142 - RNA, 22 nt, Human
aucuaggaagacuuuggaaaga

SEQ ID NO: 3235143 - RNA, 12 nt, Human
aucaaaggacac

SEQ ID NO: 3235144 - RNA, 19 nt, Human
aucaaagagguuuuaaaaa

SEQ ID NO: 3235145 - RNA, 20 nt, Human
aucaaaagguuaauaaagua

SEQ ID NO: 3235146 - RNA, 14 nt, Human
aucaaaagaaagaa

SEQ ID NO: 3235147 - RNA, 23 nt, Human
aucaaaaaggcuuauaaaacaga

SEQ ID NO: 3235148 - RNA, 12 nt, Human
aucaaaaaggcu

SEQ ID NO: 3235149 - RNA, 13 nt, Human
aucaaaaaggcuu

SEQ ID NO: 3235150 - RNA, 16 nt, Human
aucaaaaaggcuuaua

SEQ ID NO: 3235151 - RNA, 17 nt, Human
aucaaaaaggcuuauaa

SEQ ID NO: 3235152 - RNA, 21 nt, Human
aucaaaaaggcuuauaaaaca

SEQ ID NO: 3235153 - RNA, 22 nt, Human
auauuuuuuuccuuacauaaac

SEQ ID NO: 3235154 - RNA, 21 nt, Human
auauuuuuuuccuuacauaaa

SEQ ID NO: 3235155 - RNA, 19 nt, Human
auauuuuuuuccuuacaua

SEQ ID NO: 3235156 - RNA, 18 nt, Human
auauuuuuuuccuuacau

SEQ ID NO: 3235157 - RNA, 17 nt, Human
auauuuuuuuccuuaca

SEQ ID NO: 3235158 - RNA, 15 nt, Human
auauuuuuuuccuua

SEQ ID NO: 3235159 - RNA, 14 nt, Human
auauuuuuuuccuu

SEQ ID NO: 3235160 - RNA, 17 nt, Human
auauuuuuuuaacuuua

SEQ ID NO: 3235161 - RNA, 14 nt, Human
auagcacagacccu

SEQ ID NO: 3235162 - RNA, 12 nt, Human
caaauguuucua

SEQ ID NO: 3235163 - RNA, 19 nt, Human
caaauguuucuaagguaac

SEQ ID NO: 3235164 - RNA, 13 nt, Human
caaauuaaaaaaa

SEQ ID NO: 3235165 - RNA, 19 nt, Human
caaauuaaaaaaaaauugu

SEQ ID NO: 3235166 - RNA, 21 nt, Human
caaauuaaaaaaaaauuguau

SEQ ID NO: 3235167 - RNA, 20 nt, Human
caaauugcuuuuuuccaaaa

SEQ ID NO: 3235168 - RNA, 22 nt, Human
caaauugcuuuuuuccaaaaca

SEQ ID NO: 3235169 - RNA, 22 nt, Human
caaaguucccuacuuccuguga

SEQ ID NO: 3235170 - RNA, 21 nt, Human
caaaguucccuacuuccugug

SEQ ID NO: 3235171 - RNA, 21 nt, Human
caaauauuuagauguaauuuu

SEQ ID NO: 3235172 - RNA, 13 nt, Human
caaauauuguuaa

SEQ ID NO: 3235173 - RNA, 23 nt, Human
caaauauuuagauguaauuuugu

SEQ ID NO: 3235174 - RNA, 22 nt, Human
caaauauuuagauguaauuuug

SEQ ID NO: 3235175 - RNA, 14 nt, Human
caaaggagauugga

SEQ ID NO: 3235176 - RNA, 17 nt, Human
caaagccccauuaacug

SEQ ID NO: 3235177 - RNA, 20 nt, Human
caaaggagauuggaaggaac

SEQ ID NO: 3235178 - RNA, 18 nt, Human
caaaggcuguauucagca

SEQ ID NO: 3235179 - RNA, 19 nt, Human
caaaggcuguauucagcaa

SEQ ID NO: 3235180 - RNA, 16 nt, Human
caaaguggugagaggc

SEQ ID NO: 3235181 - RNA, 17 nt, Human
caaaguggugagaggca

SEQ ID NO: 3235182 - RNA, 23 nt, Human
caaaggguaucaggugcugccau

SEQ ID NO: 3235183 - RNA, 21 nt, Human
caaaggguaucaggugcugcc

SEQ ID NO: 3235184 - RNA, 20 nt, Human
caaaggguaucaggugcugc

SEQ ID NO: 3235185 - RNA, 14 nt, Human
caaagaaauguaag

SEQ ID NO: 3235186 - RNA, 20 nt, Human
caaacuggaaugagcagcuu

SEQ ID NO: 3235187 - RNA, 20 nt, Human
caaacuggccgcgggggcag

SEQ ID NO: 3235188 - RNA, 22 nt, Human
caaagaaucaccuaauuaauuu

SEQ ID NO: 3235189 - RNA, 23 nt, Human
caaagacaaauaguaggcaagau

SEQ ID NO: 3235190 - RNA, 16 nt, Human
caaagacaaauaguag

SEQ ID NO: 3235191 - RNA, 15 nt, Human
caaagacaaauagua

SEQ ID NO: 3235192 - RNA, 14 nt, Human
caaagacaaauagu

SEQ ID NO: 3235193 - RNA, 23 nt, Human
caaagaaugaauuucaacgccug

SEQ ID NO: 3235194 - RNA, 13 nt, Human
caaagacaaauag

SEQ ID NO: 3235195 - RNA, 13 nt, Human
caaagcccagcuu

SEQ ID NO: 3235196 - RNA, 14 nt, Human
caaagagguuuuaa

SEQ ID NO: 3235197 - RNA, 21 nt, Human
caaagagguuuuaaaaaaauc

SEQ ID NO: 3235198 - RNA, 21 nt, Human
caaagaccaauuuuuugugug

SEQ ID NO: 3235199 - RNA, 23 nt, Human
auuuuaagcuaggaaaagaaauc

SEQ ID NO: 3235200 - RNA, 22 nt, Human
auuuuaagcuaggaaaagaaau

SEQ ID NO: 3235201 - RNA, 20 nt, Human
auuuuaagcuaggaaaagaa

SEQ ID NO: 3235202 - RNA, 19 nt, Human
auuuuaagcuaggaaaaga

SEQ ID NO: 3235203 - RNA, 14 nt, Human
caaacugcacauga

SEQ ID NO: 3235204 - RNA, 21 nt, Human
caaacugcacaugauuucaca

SEQ ID NO: 3235205 - RNA, 19 nt, Human
caaacugcacaugauuuca

SEQ ID NO: 3235206 - RNA, 18 nt, Human
caaacugcacaugauuuc

SEQ ID NO: 3235207 - RNA, 15 nt, Human
caaacugcacaugau

SEQ ID NO: 3235208 - RNA, 22 nt, Human
caaacugcacaugauuucacaa

SEQ ID NO: 3235209 - RNA, 12 nt, Human
auuuuaaaugug

SEQ ID NO: 3235210 - RNA, 18 nt, Human
auuuuaaaugugugagug

SEQ ID NO: 3235211 - RNA, 13 nt, Human
auuuuaaaugugu

SEQ ID NO: 3235212 - RNA, 18 nt, Human
auuuuaaagccauucuga

SEQ ID NO: 3235213 - RNA, 13 nt, Human
auuuuaaaguaug

SEQ ID NO: 3235214 - RNA, 17 nt, Human
auuuuaaaguaugcauu

SEQ ID NO: 3235215 - RNA, 19 nt, Human
auuuuaaaguaugcauuau

SEQ ID NO: 3235216 - RNA, 22 nt, Human
auuuuaaaguaugcauuauuaa

SEQ ID NO: 3235217 - RNA, 16 nt, Human
auuuguaccauuucag

SEQ ID NO: 3235218 - RNA, 16 nt, Human
auuuuaagccuuuguu

SEQ ID NO: 3235219 - RNA, 19 nt, Human
auuuuaagccuuuguugaa

SEQ ID NO: 3235220 - RNA, 18 nt, Human
auuuuaagccuuuguuga

SEQ ID NO: 3235221 - RNA, 17 nt, Human
auuuuaagcuaggaaaa

SEQ ID NO: 3235222 - RNA, 16 nt, Human
auuuuaagcuaggaaa

SEQ ID NO: 3235223 - RNA, 23 nt, Human
auuuuaagccuuuguugaacugu

SEQ ID NO: 3235224 - RNA, 22 nt, Human
auuuuaagccuuuguugaacug

SEQ ID NO: 3235225 - RNA, 23 nt, Human
auuuuaaaugugugagugcaugu

SEQ ID NO: 3235226 - RNA, 20 nt, Human
caacaggcugggcuucagug

SEQ ID NO: 3235227 - RNA, 23 nt, Human
caagagccugagagugaggugga

SEQ ID NO: 3235228 - RNA, 12 nt, Human
caagagccuuaa

SEQ ID NO: 3235229 - RNA, 14 nt, Human
caagagccuuaaaa

SEQ ID NO: 3235230 - RNA, 15 nt, Human
caagagccuuaaaac

SEQ ID NO: 3235231 - RNA, 16 nt, Human
caagagccuuaaaaca

SEQ ID NO: 3235232 - RNA, 17 nt, Human
caagagccuuaaaacau

SEQ ID NO: 3235233 - RNA, 20 nt, Human
caagagggcacugguggccc

SEQ ID NO: 3235234 - RNA, 19 nt, Human
caagagggcacugguggcc

SEQ ID NO: 3235235 - RNA, 18 nt, Human
caagagggcacugguggc

SEQ ID NO: 3235236 - RNA, 17 nt, Human
caagagggcacuggugg

SEQ ID NO: 3235237 - RNA, 13 nt, Human
caagagccugaga

SEQ ID NO: 3235238 - RNA, 11 nt, Human
caagagccuga

SEQ ID NO: 3235239 - RNA, 17 nt, Human
caagagcccaggccucc

SEQ ID NO: 3235240 - RNA, 17 nt, Human
caagacuuauuuucaca

SEQ ID NO: 3235241 - RNA, 17 nt, Human
caagagggucugaggaa

SEQ ID NO: 3235242 - RNA, 16 nt, Human
caagagggucugagga

SEQ ID NO: 3235243 - RNA, 12 nt, Human
caagagggucug

SEQ ID NO: 3235244 - RNA, 12 nt, Human
caagcagauucg

SEQ ID NO: 3235245 - RNA, 20 nt, Human
caagagguuuggcuccugcc

SEQ ID NO: 3235246 - RNA, 23 nt, Human
caagagguuuggcuccugcccac

SEQ ID NO: 3235247 - RNA, 22 nt, Human
caagagguuuggcuccugccca

SEQ ID NO: 3235248 - RNA, 21 nt, Human
caagacgcugugcugcccugc

SEQ ID NO: 3235249 - RNA, 22 nt, Human
caagacgcugugcugcccugcc

SEQ ID NO: 3235250 - RNA, 13 nt, Human
caagaccuucucc

SEQ ID NO: 3235251 - RNA, 19 nt, Human
caagacgcugugcugcccu

SEQ ID NO: 3235252 - RNA, 20 nt, Human
caagacgcugugcugcccug

SEQ ID NO: 3235253 - RNA, 13 nt, Human
caagaaaugaaag

SEQ ID NO: 3235254 - RNA, 23 nt, Human
caagacccuuguggucccacccc

SEQ ID NO: 3235255 - RNA, 12 nt, Human
caacuugccuuu

SEQ ID NO: 3235256 - RNA, 14 nt, Human
caacuugcaagggc

SEQ ID NO: 3235257 - RNA, 12 nt, Human
caacugugugau

SEQ ID NO: 3235258 - RNA, 22 nt, Human
caacugugugauuaaaagguau

SEQ ID NO: 3235259 - RNA, 20 nt, Human
caagcccaguucagcuuggg

SEQ ID NO: 3235260 - RNA, 14 nt, Human
caagcccaggaggg

SEQ ID NO: 3235261 - RNA, 17 nt, Human
caagcauucucuccauu

SEQ ID NO: 3235262 - RNA, 21 nt, Human
caagcauaccaacacgagcag

SEQ ID NO: 3235263 - RNA, 22 nt, Human
caagcaguuucaauaaaguuug

SEQ ID NO: 3235264 - RNA, 15 nt, Human
caagcaucacuuuuu

SEQ ID NO: 3235265 - RNA, 21 nt, Human
caagcaguuucaauaaaguuu

SEQ ID NO: 3235266 - RNA, 20 nt, Human
caagcaguuucaauaaaguu

SEQ ID NO: 3235267 - RNA, 16 nt, Human
caagcaguuucaauaa

SEQ ID NO: 3235268 - RNA, 15 nt, Human
caagcaguuucaaua

SEQ ID NO: 3235269 - RNA, 21 nt, Human
caagcaugaagauaaacacag

SEQ ID NO: 3235270 - RNA, 13 nt, Human
caagcauguggau

SEQ ID NO: 3235271 - RNA, 16 nt, Human
caagcauaccaacacg

SEQ ID NO: 3235272 - RNA, 23 nt, Human
caagcaguggauacgugucaaug

SEQ ID NO: 3235273 - RNA, 14 nt, Human
caagcaguuucaau

SEQ ID NO: 3235274 - RNA, 13 nt, Human
caagcaguuucaa

SEQ ID NO: 3235275 - RNA, 14 nt, Human
caaggauccugagc

SEQ ID NO: 3235276 - RNA, 20 nt, Human
caaggacuaggguccugggg

SEQ ID NO: 3235277 - RNA, 21 nt, Human
caaggacuaggguccugggga

SEQ ID NO: 3235278 - RNA, 16 nt, Human
caaggacuaggguccu

SEQ ID NO: 3235279 - RNA, 14 nt, Human
caaggacuaggguc

SEQ ID NO: 3235280 - RNA, 18 nt, Human
caaggacuaggguccugg

SEQ ID NO: 3235281 - RNA, 19 nt, Human
caaggacuaggguccuggg

SEQ ID NO: 3235282 - RNA, 14 nt, Human
caagcuuauuuugg

SEQ ID NO: 3235283 - RNA, 13 nt, Human
caagcuuuaaauu

SEQ ID NO: 3235284 - RNA, 14 nt, Human
caagcuuuaaauua

SEQ ID NO: 3235285 - RNA, 16 nt, Human
caagcuuuaaauuaug

SEQ ID NO: 3235286 - RNA, 19 nt, Human
caagcuguugaccaggcac

SEQ ID NO: 3235287 - RNA, 17 nt, Human
caagcuguugaccaggc

SEQ ID NO: 3235288 - RNA, 15 nt, Human
caaggauccugagcc

SEQ ID NO: 3235289 - RNA, 16 nt, Human
caaggauccugagcca

SEQ ID NO: 3235290 - RNA, 18 nt, Human
caaggcugggggaagaag

SEQ ID NO: 3235291 - RNA, 21 nt, Human
caaggcugggggaagaagcuc

SEQ ID NO: 3235292 - RNA, 13 nt, Human
caaggcugucaau

SEQ ID NO: 3235293 - RNA, 14 nt, Human
caaggcugucaauu

SEQ ID NO: 3235294 - RNA, 23 nt, Human
caagggaauuucuucaacucccu

SEQ ID NO: 3235295 - RNA, 20 nt, Human
caagguagaaugaccuugua

SEQ ID NO: 3235296 - RNA, 18 nt, Human
caagguagaaugaccuug

SEQ ID NO: 3235297 - RNA, 13 nt, Human
caagguagaauga

SEQ ID NO: 3235298 - RNA, 23 nt, Human
caagguaggguaggcagccugag

SEQ ID NO: 3235299 - RNA, 17 nt, Human
caaggugugccccgugg

SEQ ID NO: 3235300 - RNA, 14 nt, Human
caagguaaggaggg

SEQ ID NO: 3235301 - RNA, 22 nt, Human
caaggggaaucuggagguagcc

SEQ ID NO: 3235302 - RNA, 23 nt, Human
caaggggaauguuugccucugcc

SEQ ID NO: 3235303 - RNA, 13 nt, Human
caagggccuggcc

SEQ ID NO: 3235304 - RNA, 14 nt, Human
caagggccuggccu

SEQ ID NO: 3235305 - RNA, 15 nt, Human
caagggccuggccug

SEQ ID NO: 3235306 - RNA, 21 nt, Human
caaggggaauguuugccucug

SEQ ID NO: 3235307 - RNA, 16 nt, Human
caagggaggcccagcg

SEQ ID NO: 3235308 - RNA, 22 nt, Human
caagggaugaauuguaaaagca

SEQ ID NO: 3235309 - RNA, 15 nt, Human
caagggaggcccagc

SEQ ID NO: 3235310 - RNA, 14 nt, Human
caagggaggcccag

SEQ ID NO: 3235311 - RNA, 20 nt, Human
caagugauucuccugccuca

SEQ ID NO: 3235312 - RNA, 17 nt, Human
caagugacgaaaacauu

SEQ ID NO: 3235313 - RNA, 15 nt, Human
caagugagacccugu

SEQ ID NO: 3235314 - RNA, 18 nt, Human
caagugauucuccugccu

SEQ ID NO: 3235315 - RNA, 19 nt, Human
caagugauucuccugccuc

SEQ ID NO: 3235316 - RNA, 22 nt, Human
caagugaaaaaggaggaagaga

SEQ ID NO: 3235317 - RNA, 21 nt, Human
caagguucugggugcaggagc

SEQ ID NO: 3235318 - RNA, 13 nt, Human
caagguucugggu

SEQ ID NO: 3235319 - RNA, 23 nt, Human
caagugaaaaaggaggaagagaa

SEQ ID NO: 3235320 - RNA, 12 nt, Human
caagugaaaaau

SEQ ID NO: 3235321 - RNA, 14 nt, Human
caagugagacccug

SEQ ID NO: 3235322 - RNA, 20 nt, Human
caacugcaucaagaugugac

SEQ ID NO: 3235323 - RNA, 23 nt, Human
caacugcaucaagaugugacaug

SEQ ID NO: 3235324 - RNA, 17 nt, Human
caacugcaucaagaugu

SEQ ID NO: 3235325 - RNA, 14 nt, Human
caacugaucuguua

SEQ ID NO: 3235326 - RNA, 15 nt, Human
caacugaucuguuau

SEQ ID NO: 3235327 - RNA, 19 nt, Human
caaccugauugugucucuu

SEQ ID NO: 3235328 - RNA, 21 nt, Human
caaccugauugugucucuugg

SEQ ID NO: 3235329 - RNA, 17 nt, Human
caaccugauugugucuc

SEQ ID NO: 3235330 - RNA, 16 nt, Human
caaauuuacagagaca

SEQ ID NO: 3235331 - RNA, 17 nt, Human
caaauuuacagagacag

SEQ ID NO: 3235332 - RNA, 23 nt, Human
caaauuuacagagacagaaagca

SEQ ID NO: 3235333 - RNA, 14 nt, Human
caacaggcugggcu

SEQ ID NO: 3235334 - RNA, 17 nt, Human
caacaggcugggcuuca

SEQ ID NO: 3235335 - RNA, 13 nt, Human
caacaggcugggc

SEQ ID NO: 3235336 - RNA, 14 nt, Human
caacauacucccau

SEQ ID NO: 3235337 - RNA, 15 nt, Human
caacauacucccauc

SEQ ID NO: 3235338 - RNA, 20 nt, Human
caauccuuacaaaugauugc

SEQ ID NO: 3235339 - RNA, 17 nt, Human
caauccuuacaaaugau

SEQ ID NO: 3235340 - RNA, 16 nt, Human
caauccuuacaaauga

SEQ ID NO: 3235341 - RNA, 15 nt, Human
caauccuuacaaaug

SEQ ID NO: 3235342 - RNA, 14 nt, Human
caauccuuacaaau

SEQ ID NO: 3235343 - RNA, 13 nt, Human
caauccuuacaaa

SEQ ID NO: 3235344 - RNA, 12 nt, Human
caauccuuacaa

SEQ ID NO: 3235345 - RNA, 11 nt, Human
caauccuuaca

SEQ ID NO: 3235346 - RNA, 18 nt, Human
caaucucggcucacugca

SEQ ID NO: 3235347 - RNA, 21 nt, Human
caaucucguauagaagucuuc

SEQ ID NO: 3235348 - RNA, 16 nt, Human
caaucuuacuuuguaa

SEQ ID NO: 3235349 - RNA, 17 nt, Human
caaucuuacuuuguaaa

SEQ ID NO: 3235350 - RNA, 19 nt, Human
caaucuuacuuuguaaauu

SEQ ID NO: 3235351 - RNA, 22 nt, Human
caaucuuacuuuguaaauucug

SEQ ID NO: 3235352 - RNA, 23 nt, Human
caaucuuacuuuguaaauucuga

SEQ ID NO: 3235353 - RNA, 15 nt, Human
caaugaccuuucaau

SEQ ID NO: 3235354 - RNA, 16 nt, Human
caaugaccuuucaaua

SEQ ID NO: 3235355 - RNA, 13 nt, Human
caaugauggucac

SEQ ID NO: 3235356 - RNA, 14 nt, Human
caaugaccuuucaa

SEQ ID NO: 3235357 - RNA, 13 nt, Human
caaugaccuuuca

SEQ ID NO: 3235358 - RNA, 18 nt, Human
caaucuuuagaaaaggca

SEQ ID NO: 3235359 - RNA, 19 nt, Human
caaugaaaaggugauuguc

SEQ ID NO: 3235360 - RNA, 21 nt, Human
caaugcaaaccaucauugaaa

SEQ ID NO: 3235361 - RNA, 22 nt, Human
caaugcaaaccaucauugaaau

SEQ ID NO: 3235362 - RNA, 14 nt, Human
caaugauggucacc

SEQ ID NO: 3235363 - RNA, 13 nt, Human
caaugcacuuugu

SEQ ID NO: 3235364 - RNA, 14 nt, Human
caaugcacugacau

SEQ ID NO: 3235365 - RNA, 23 nt, Human
caaugcaaaccaucauugaaauc

SEQ ID NO: 3235366 - RNA, 20 nt, Human
caaugcaaaccaucauugaa

SEQ ID NO: 3235367 - RNA, 18 nt, Human
caauguaauuaaacuguu

SEQ ID NO: 3235368 - RNA, 13 nt, Human
cacacccagccca

SEQ ID NO: 3235369 - RNA, 22 nt, Human
cacaccagagcccaccuuggcu

SEQ ID NO: 3235370 - RNA, 21 nt, Human
cacaccagagcccaccuuggc

SEQ ID NO: 3235371 - RNA, 15 nt, Human
cacacagcucugucc

SEQ ID NO: 3235372 - RNA, 14 nt, Human
cacacagcucuguc

SEQ ID NO: 3235373 - RNA, 13 nt, Human
cacacagcucugu

SEQ ID NO: 3235374 - RNA, 22 nt, Human
cacacagauuugagcucagccc

SEQ ID NO: 3235375 - RNA, 20 nt, Human
cacacccagcccacuucugc

SEQ ID NO: 3235376 - RNA, 14 nt, Human
cacacccagcccac

SEQ ID NO: 3235377 - RNA, 17 nt, Human
cacaccgggcacucaga

SEQ ID NO: 3235378 - RNA, 21 nt, Human
cacaccuccucccacugccca

SEQ ID NO: 3235379 - RNA, 14 nt, Human
cacaccuccuccca

SEQ ID NO: 3235380 - RNA, 19 nt, Human
cacaccuccucccacugcc

SEQ ID NO: 3235381 - RNA, 16 nt, Human
cacaccuccucccacu

SEQ ID NO: 3235382 - RNA, 12 nt, Human
cacaccuccucc

SEQ ID NO: 3235383 - RNA, 14 nt, Human
cacacaagugcagu

SEQ ID NO: 3235384 - RNA, 16 nt, Human
cacacaauuagauuuc

SEQ ID NO: 3235385 - RNA, 20 nt, Human
cacaaucucggcucacugca

SEQ ID NO: 3235386 - RNA, 22 nt, Human
cacaaucucggcucacugcauc

SEQ ID NO: 3235387 - RNA, 23 nt, Human
cacaaucucggcucacugcaucc

SEQ ID NO: 3235388 - RNA, 24 nt, Human
cacaaucucggcucacugcauccu

SEQ ID NO: 3235389 - RNA, 20 nt, Human
cacacaccagagcccaccuu

SEQ ID NO: 3235390 - RNA, 16 nt, Human
cacacaccagagccca

SEQ ID NO: 3235391 - RNA, 15 nt, Human
cacacaccagagccc

SEQ ID NO: 3235392 - RNA, 17 nt, Human
cacacacaaaaaaagac

SEQ ID NO: 3235393 - RNA, 14 nt, Human
cacacacaaaaaaa

SEQ ID NO: 3235394 - RNA, 14 nt, Human
cacacacuuuggcu

SEQ ID NO: 3235395 - RNA, 11 nt, Human
cacacacacaa

SEQ ID NO: 3235396 - RNA, 13 nt, Human
cacacacacaaaa

SEQ ID NO: 3235397 - RNA, 21 nt, Human
cacacagaggcugccucuccc

SEQ ID NO: 3235398 - RNA, 18 nt, Human
cacacagauuugagcuca

SEQ ID NO: 3235399 - RNA, 20 nt, Human
cacacagauuugagcucagc

SEQ ID NO: 3235400 - RNA, 15 nt, Human
cacaagaaaugaaag

SEQ ID NO: 3235401 - RNA, 21 nt, Human
cacaagaaaugaaagcaggga

SEQ ID NO: 3235402 - RNA, 13 nt, Human
cacaagaaaugaa

SEQ ID NO: 3235403 - RNA, 19 nt, Human
cacaacugugugauuaaaa

SEQ ID NO: 3235404 - RNA, 22 nt, Human
cacaacugugugauuaaaaggu

SEQ ID NO: 3235405 - RNA, 17 nt, Human
cacaaagguagcuuuuc

SEQ ID NO: 3235406 - RNA, 20 nt, Human
cacaaauauuaaaaagucuu

SEQ ID NO: 3235407 - RNA, 14 nt, Human
cacaaauauuauuu

SEQ ID NO: 3235408 - RNA, 23 nt, Human
cacaaauauuauuuguguuuccu

SEQ ID NO: 3235409 - RNA, 14 nt, Human
cacaaauauuaaaa

SEQ ID NO: 3235410 - RNA, 13 nt, Human
cacaaauauuaaa

SEQ ID NO: 3235411 - RNA, 13 nt, Human
cacaaaugacuuu

SEQ ID NO: 3235412 - RNA, 17 nt, Human
cacaaauauuaaaaagu

SEQ ID NO: 3235413 - RNA, 14 nt, Human
cacaaaugacuuua

SEQ ID NO: 3235414 - RNA, 15 nt, Human
cacaaaugacuuuau

SEQ ID NO: 3235415 - RNA, 20 nt, Human
cacaaaugacuuuauuauuu

SEQ ID NO: 3235416 - RNA, 22 nt, Human
cacaaaugacuuuauuauuuau

SEQ ID NO: 3235417 - RNA, 23 nt, Human
cacaagaaaugaaagcagggacu

SEQ ID NO: 3235418 - RNA, 19 nt, Human
cacaaucucggcucacugc

SEQ ID NO: 3235419 - RNA, 22 nt, Human
cacaaucaccgaugcaaacauu

SEQ ID NO: 3235420 - RNA, 15 nt, Human
cacaaacagaggccg

SEQ ID NO: 3235421 - RNA, 13 nt, Human
caauuuuuauuuc

SEQ ID NO: 3235422 - RNA, 18 nt, Human
caauuuuuauuucuuuua

SEQ ID NO: 3235423 - RNA, 17 nt, Human
cacaaacgggcucagca

SEQ ID NO: 3235424 - RNA, 22 nt, Human
cacaaacugcuuccuuucuuga

SEQ ID NO: 3235425 - RNA, 18 nt, Human
caaugguuuucuugugug

SEQ ID NO: 3235426 - RNA, 14 nt, Human
caaugcacuuuguu

SEQ ID NO: 3235427 - RNA, 22 nt, Human
caauuauaaacucauuuugcuu

SEQ ID NO: 3235428 - RNA, 13 nt, Human
caauuauuucccc

SEQ ID NO: 3235429 - RNA, 15 nt, Human
caauuauuuccccca

SEQ ID NO: 3235430 - RNA, 20 nt, Human
caauguaaacacuuaacaga

SEQ ID NO: 3235431 - RNA, 19 nt, Human
caccacacugauccagccc

SEQ ID NO: 3235432 - RNA, 15 nt, Human
caccacacucagccc

SEQ ID NO: 3235433 - RNA, 14 nt, Human
caccacacucagcc

SEQ ID NO: 3235434 - RNA, 17 nt, Human
caccacacccagcccac

SEQ ID NO: 3235435 - RNA, 19 nt, Human
caccacacccagcccacuu

SEQ ID NO: 3235436 - RNA, 15 nt, Human
caccacgcccggcua

SEQ ID NO: 3235437 - RNA, 14 nt, Human
caccacgcccggcu

SEQ ID NO: 3235438 - RNA, 15 nt, Human
caccagagcccaccu

SEQ ID NO: 3235439 - RNA, 22 nt, Human
caccagagcccaccuuggcuca

SEQ ID NO: 3235440 - RNA, 20 nt, Human
caccagagcccaccuuggcu

SEQ ID NO: 3235441 - RNA, 18 nt, Human
caccagagcccaccuugg

SEQ ID NO: 3235442 - RNA, 17 nt, Human
caccagagcccaccuug

SEQ ID NO: 3235443 - RNA, 18 nt, Human
cacauguccaagaagccc

SEQ ID NO: 3235444 - RNA, 19 nt, Human
cacauguccaagaagccca

SEQ ID NO: 3235445 - RNA, 21 nt, Human
cacauguccaagaagcccagg

SEQ ID NO: 3235446 - RNA, 22 nt, Human
cacauguccaagaagcccagga

SEQ ID NO: 3235447 - RNA, 16 nt, Human
caccaacgucugugcc

SEQ ID NO: 3235448 - RNA, 18 nt, Human
caccaacuacuaccugua

SEQ ID NO: 3235449 - RNA, 17 nt, Human
caccaacgucugugcca

SEQ ID NO: 3235450 - RNA, 13 nt, Human
caccaagcccagu

SEQ ID NO: 3235451 - RNA, 12 nt, Human
caccaagcccag

SEQ ID NO: 3235452 - RNA, 22 nt, Human
caccaaucuuacuuuguaaauu

SEQ ID NO: 3235453 - RNA, 18 nt, Human
caccaaucuuacuuugua

SEQ ID NO: 3235454 - RNA, 19 nt, Human
caccaaucuuacuuuguaa

SEQ ID NO: 3235455 - RNA, 17 nt, Human
caccaaucuuacuuugu

SEQ ID NO: 3235456 - RNA, 14 nt, Human
caccagaugagaau

SEQ ID NO: 3235457 - RNA, 16 nt, Human
caccagggccaaaagc

SEQ ID NO: 3235458 - RNA, 22 nt, Human
caccagggccaaaagcuucccu

SEQ ID NO: 3235459 - RNA, 15 nt, Human
caccagaugugacag

SEQ ID NO: 3235460 - RNA, 15 nt, Human
caccagugaccugga

SEQ ID NO: 3235461 - RNA, 14 nt, Human
caccagugaccugg

SEQ ID NO: 3235462 - RNA, 23 nt, Human
caccaggguuuaguuugcauuua

SEQ ID NO: 3235463 - RNA, 22 nt, Human
caccaguacauucucaguuuuu

SEQ ID NO: 3235464 - RNA, 21 nt, Human
caccaguacauucucaguuuu

SEQ ID NO: 3235465 - RNA, 13 nt, Human
caccaguacauuc

SEQ ID NO: 3235466 - RNA, 20 nt, Human
caccagguagaacgccaggg

SEQ ID NO: 3235467 - RNA, 18 nt, Human
caccauaggucaccuuua

SEQ ID NO: 3235468 - RNA, 14 nt, Human
caccaucaagccac

SEQ ID NO: 3235469 - RNA, 15 nt, Human
caccaucaagccacc

SEQ ID NO: 3235470 - RNA, 13 nt, Human
caccaucaagcca

SEQ ID NO: 3235471 - RNA, 16 nt, Human
caccaucaagccacca

SEQ ID NO: 3235472 - RNA, 17 nt, Human
caccaucaagccaccaa

SEQ ID NO: 3235473 - RNA, 19 nt, Human
caccaucaagccaccaaca

SEQ ID NO: 3235474 - RNA, 24 nt, Human
caccaucaagccaccaacauacuc

SEQ ID NO: 3235475 - RNA, 17 nt, Human
caccaucaugucuggcu

SEQ ID NO: 3235476 - RNA, 15 nt, Human
caccaucaugucugg

SEQ ID NO: 3235477 - RNA, 18 nt, Human
caccaucaugucuggcua

SEQ ID NO: 3235478 - RNA, 15 nt, Human
caccaucacagcuug

SEQ ID NO: 3235479 - RNA, 16 nt, Human
caccaucacagcuugu

SEQ ID NO: 3235480 - RNA, 21 nt, Human
caccaucacagcuuguuuugg

SEQ ID NO: 3235481 - RNA, 22 nt, Human
caccaucacagcuuguuuugga

SEQ ID NO: 3235482 - RNA, 13 nt, Human
caccauccccucc

SEQ ID NO: 3235483 - RNA, 20 nt, Human
caccauguuggccaggcugc

SEQ ID NO: 3235484 - RNA, 20 nt, Human
caccauguuggccaggcugg

SEQ ID NO: 3235485 - RNA, 19 nt, Human
caccauguuggccaggcug

SEQ ID NO: 3235486 - RNA, 10 nt, Human
caccaucugc

SEQ ID NO: 3235487 - RNA, 16 nt, Human
caccaucugcugucuu

SEQ ID NO: 3235488 - RNA, 15 nt, Human
caccaucugcugucu

SEQ ID NO: 3235489 - RNA, 22 nt, Human
caccaugagggaagaauaaaga

SEQ ID NO: 3235490 - RNA, 19 nt, Human
caccaucugcugucuuuuc

SEQ ID NO: 3235491 - RNA, 12 nt, Human
caccaucuuuua

SEQ ID NO: 3235492 - RNA, 20 nt, Human
cacacguaaugaaacuugga

SEQ ID NO: 3235493 - RNA, 19 nt, Human
cacacguaaugaaacuugg

SEQ ID NO: 3235494 - RNA, 19 nt, Human
cacacgcugcucugcccca

SEQ ID NO: 3235495 - RNA, 20 nt, Human
cacagcaacgaucacaaaug

SEQ ID NO: 3235496 - RNA, 22 nt, Human
cacacggacacucaaaagcugg

SEQ ID NO: 3235497 - RNA, 13 nt, Human
cacacgcugccuu

SEQ ID NO: 3235498 - RNA, 12 nt, Human
cacacgcugccu

SEQ ID NO: 3235499 - RNA, 17 nt, Human
cacacgcugcucugccc

SEQ ID NO: 3235500 - RNA, 16 nt, Human
cacacgcugcucugcc

SEQ ID NO: 3235501 - RNA, 13 nt, Human
cacacgcugcucu

SEQ ID NO: 3235502 - RNA, 14 nt, Human
cacacgcugccuuc

SEQ ID NO: 3235503 - RNA, 18 nt, Human
cacagcucuucuccaggc

SEQ ID NO: 3235504 - RNA, 21 nt, Human
cacagcaacgaucacaaauga

SEQ ID NO: 3235505 - RNA, 22 nt, Human
cacagcaacgaucacaaaugac

SEQ ID NO: 3235506 - RNA, 19 nt, Human
cacaggcagguccaggguu

SEQ ID NO: 3235507 - RNA, 18 nt, Human
cacaggccacccugugca

SEQ ID NO: 3235508 - RNA, 16 nt, Human
cacaggccacccugug

SEQ ID NO: 3235509 - RNA, 15 nt, Human
cacaggccacccugu

SEQ ID NO: 3235510 - RNA, 23 nt, Human
cacaguccuuaccagcagagcac

SEQ ID NO: 3235511 - RNA, 14 nt, Human
cacagucuccccca

SEQ ID NO: 3235512 - RNA, 23 nt, Human
cacaggccacccugugcagaagg

SEQ ID NO: 3235513 - RNA, 22 nt, Human
cacaguccuuaccagcagagca

SEQ ID NO: 3235514 - RNA, 14 nt, Human
cacaggcccggcuc

SEQ ID NO: 3235515 - RNA, 20 nt, Human
cacagcucuucuccaggcug

SEQ ID NO: 3235516 - RNA, 19 nt, Human
cacagcucuucuccaggcu

SEQ ID NO: 3235517 - RNA, 15 nt, Human
cacaggaaguagagg

SEQ ID NO: 3235518 - RNA, 18 nt, Human
cacaggacagggguuccu

SEQ ID NO: 3235519 - RNA, 23 nt, Human
cacaggacaggaaaguggcaccu

SEQ ID NO: 3235520 - RNA, 17 nt, Human
cacaggaucagucugau

SEQ ID NO: 3235521 - RNA, 16 nt, Human
cacaggacucugccuc

SEQ ID NO: 3235522 - RNA, 15 nt, Human
cacaggacucugccu

SEQ ID NO: 3235523 - RNA, 19 nt, Human
cacaggacagggguuccuu

SEQ ID NO: 3235524 - RNA, 16 nt, Human
cacaugagauaauaug

SEQ ID NO: 3235525 - RNA, 14 nt, Human
cacaugauuucaca

SEQ ID NO: 3235526 - RNA, 17 nt, Human
cacaugauuucacaaau

SEQ ID NO: 3235527 - RNA, 16 nt, Human
cacaugauuucacaaa

SEQ ID NO: 3235528 - RNA, 12 nt, Human
cacaugauuuca

SEQ ID NO: 3235529 - RNA, 18 nt, Human
cacaugcacgugugugca

SEQ ID NO: 3235530 - RNA, 20 nt, Human
cacaugauuucacaaauauu

SEQ ID NO: 3235531 - RNA, 19 nt, Human
cacaugauuucacaaauau

SEQ ID NO: 3235532 - RNA, 18 nt, Human
cacaugauuucacaaaua

SEQ ID NO: 3235533 - RNA, 16 nt, Human
cacauguccaagaagc

SEQ ID NO: 3235534 - RNA, 17 nt, Human
cacauguccaagaagcc

SEQ ID NO: 3235535 - RNA, 20 nt, Human
cacaugccucucucaggcca

SEQ ID NO: 3235536 - RNA, 14 nt, Human
cacaugccaggggc

SEQ ID NO: 3235537 - RNA, 19 nt, Human
cacaugccaggggccuuug

SEQ ID NO: 3235538 - RNA, 22 nt, Human
cacaugcccuuggugacagcug

SEQ ID NO: 3235539 - RNA, 21 nt, Human
cacaugccucucucaggccaa

SEQ ID NO: 3235540 - RNA, 15 nt, Human
cacaugagauaauau

SEQ ID NO: 3235541 - RNA, 13 nt, Human
cacaugagcauca

SEQ ID NO: 3235542 - RNA, 17 nt, Human
cacaugagcaucaggcc

SEQ ID NO: 3235543 - RNA, 18 nt, Human
cacaugagcaucaggcca

SEQ ID NO: 3235544 - RNA, 19 nt, Human
cacaugagcaucaggccag

SEQ ID NO: 3235545 - RNA, 20 nt, Human
cacaugagcaucaggccagg

SEQ ID NO: 3235546 - RNA, 21 nt, Human
cacaugagcaucaggccaggc

SEQ ID NO: 3235547 - RNA, 22 nt, Human
cacaguuuucugagaaagacua

SEQ ID NO: 3235548 - RNA, 21 nt, Human
cacaguuuucugagaaagacu

SEQ ID NO: 3235549 - RNA, 20 nt, Human
cacaguuuucugagaaagac

SEQ ID NO: 3235550 - RNA, 13 nt, Human
cacccaagggccu

SEQ ID NO: 3235551 - RNA, 16 nt, Human
cacccaagcaggaggc

SEQ ID NO: 3235552 - RNA, 18 nt, Human
caccauguuggccaggcu

SEQ ID NO: 3235553 - RNA, 20 nt, Human
caccauucguacauaauacu

SEQ ID NO: 3235554 - RNA, 22 nt, Human
caccauucguacauaauacuga

SEQ ID NO: 3235555 - RNA, 23 nt, Human
caccauucguacauaauacugaa

SEQ ID NO: 3235556 - RNA, 19 nt, Human
caccauugcaacaaaauac

SEQ ID NO: 3235557 - RNA, 17 nt, Human
caccauuuccccagggc

SEQ ID NO: 3235558 - RNA, 15 nt, Human
caccauuuccccagg

SEQ ID NO: 3235559 - RNA, 19 nt, Human
caccauuuccccagggcac

SEQ ID NO: 3235560 - RNA, 18 nt, Human
caccauuuccccagggca

SEQ ID NO: 3235561 - RNA, 20 nt, Human
caccauuuccccagggcacg

SEQ ID NO: 3235562 - RNA, 12 nt, Human
uuuuuucuuuca

SEQ ID NO: 3235563 - RNA, 19 nt, Human
uuuuuugaacucuucucau

SEQ ID NO: 3235564 - RNA, 12 nt, Human
uuuuuugaaaug

SEQ ID NO: 3235565 - RNA, 13 nt, Human
uuuuuugaaauca

SEQ ID NO: 3235566 - RNA, 16 nt, Human
ucacgccacugcacua

SEQ ID NO: 3235567 - RNA, 14 nt, Human
ucacgccacugcac

SEQ ID NO: 3235568 - RNA, 13 nt, Human
ucacgccacugca

SEQ ID NO: 3235569 - RNA, 20 nt, Human
ucacgccuguaauccuagca

SEQ ID NO: 3235570 - RNA, 16 nt, Human
ucacgcuccuuucuga

SEQ ID NO: 3235571 - RNA, 19 nt, Human
ucacgccuguaauccuagc

SEQ ID NO: 3235572 - RNA, 14 nt, Human
ucaccuuugucccc

SEQ ID NO: 3235573 - RNA, 15 nt, Human
ucaccuuugucccca

SEQ ID NO: 3235574 - RNA, 17 nt, Human
ucaccuuuguccccacc

SEQ ID NO: 3235575 - RNA, 18 nt, Human
ucaccuuuguccccaccg

SEQ ID NO: 3235576 - RNA, 22 nt, Human
ucaccuuuguccccaccgcaga

SEQ ID NO: 3235577 - RNA, 15 nt, Human
ucaccuuuucaggaa

SEQ ID NO: 3235578 - RNA, 17 nt, Human
ucaccuuuucaggaaaa

SEQ ID NO: 3235579 - RNA, 16 nt, Human
ucacgagucauccaga

SEQ ID NO: 3235580 - RNA, 13 nt, Human
ucacgauucauuu

SEQ ID NO: 3235581 - RNA, 14 nt, Human
ucacgauucauuuu

SEQ ID NO: 3235582 - RNA, 15 nt, Human
ucacaggcaggucca

SEQ ID NO: 3235583 - RNA, 12 nt, Human
ucacaggcaggu

SEQ ID NO: 3235584 - RNA, 19 nt, Human
ucacaggcagguccagggu

SEQ ID NO: 3235585 - RNA, 20 nt, Human
ucacaggcugggcugggcac

SEQ ID NO: 3235586 - RNA, 14 nt, Human
ucacaggcugggcu

SEQ ID NO: 3235587 - RNA, 19 nt, Human
ucacaggcugggcugggca

SEQ ID NO: 3235588 - RNA, 18 nt, Human
ucacaggcugggcugggc

SEQ ID NO: 3235589 - RNA, 17 nt, Human
ucaccuaauuaauuuca

SEQ ID NO: 3235590 - RNA, 14 nt, Human
ucaccuuucccauc

SEQ ID NO: 3235591 - RNA, 12 nt, Human
ucaccuuugucc

SEQ ID NO: 3235592 - RNA, 13 nt, Human
ucaccuuuauucu

SEQ ID NO: 3235593 - RNA, 17 nt, Human
ucaccuugguuccuggg

SEQ ID NO: 3235594 - RNA, 15 nt, Human
ucaccuugguuccug

SEQ ID NO: 3235595 - RNA, 15 nt, Human
ucaccucacucagca

SEQ ID NO: 3235596 - RNA, 14 nt, Human
ucaccucacucagc

SEQ ID NO: 3235597 - RNA, 20 nt, Human
ucaccucacucagcaccacu

SEQ ID NO: 3235598 - RNA, 19 nt, Human
ucaccucacucagcaccac

SEQ ID NO: 3235599 - RNA, 18 nt, Human
ucaccucacucagcacca

SEQ ID NO: 3235600 - RNA, 16 nt, Human
ucaccucacucagcac

SEQ ID NO: 3235601 - RNA, 23 nt, Human
ucaccucacucagcaccacucaa

SEQ ID NO: 3235602 - RNA, 21 nt, Human
ucaccucacucagcaccacuc

SEQ ID NO: 3235603 - RNA, 11 nt, Human
ucacucucagg

SEQ ID NO: 3235604 - RNA, 20 nt, Human
ucacucuacuuagcaugucc

SEQ ID NO: 3235605 - RNA, 19 nt, Human
ucacucuacuuagcauguc

SEQ ID NO: 3235606 - RNA, 12 nt, Human
ucacucuccuug

SEQ ID NO: 3235607 - RNA, 14 nt, Human
ucacucuccuuggu

SEQ ID NO: 3235608 - RNA, 12 nt, Human
ucacucuggcag

SEQ ID NO: 3235609 - RNA, 13 nt, Human
ucacucuggcagc

SEQ ID NO: 3235610 - RNA, 23 nt, Human
ucacucuccuuggugucgggcau

SEQ ID NO: 3235611 - RNA, 14 nt, Human
ucacucugcuaccu

SEQ ID NO: 3235612 - RNA, 22 nt, Human
ucacucugcuaccuugccccaa

SEQ ID NO: 3235613 - RNA, 12 nt, Human
ucacucucagga

SEQ ID NO: 3235614 - RNA, 14 nt, Human
ucacucuggcagcu

SEQ ID NO: 3235615 - RNA, 15 nt, Human
ucacucuggcagcuc

SEQ ID NO: 3235616 - RNA, 16 nt, Human
ucacucuggcagcuca

SEQ ID NO: 3235617 - RNA, 17 nt, Human
ucacucuggcagcucag

SEQ ID NO: 3235618 - RNA, 18 nt, Human
ucacucuggcagcucaga

SEQ ID NO: 3235619 - RNA, 19 nt, Human
ucacucuggcagcucagag

SEQ ID NO: 3235620 - RNA, 20 nt, Human
ucacucuggcagcucagaga

SEQ ID NO: 3235621 - RNA, 22 nt, Human
ucacucuggcagcucagagagg

SEQ ID NO: 3235622 - RNA, 13 nt, Human
ucacuccuugaaa

SEQ ID NO: 3235623 - RNA, 14 nt, Human
ucacucuaagaugu

SEQ ID NO: 3235624 - RNA, 22 nt, Human
ucacucuaagauguuauauuuu

SEQ ID NO: 3235625 - RNA, 21 nt, Human
ucacucuaagauguuauauuu

SEQ ID NO: 3235626 - RNA, 15 nt, Human
ucacucuaagauguu

SEQ ID NO: 3235627 - RNA, 17 nt, Human
ucacucuaagauguuau

SEQ ID NO: 3235628 - RNA, 16 nt, Human
ucacucuaagauguua

SEQ ID NO: 3235629 - RNA, 15 nt, Human
ucacuccuaccuggu

SEQ ID NO: 3235630 - RNA, 18 nt, Human
ucacuccuaccugguaau

SEQ ID NO: 3235631 - RNA, 20 nt, Human
ucacggcucacugcagccuc

SEQ ID NO: 3235632 - RNA, 15 nt, Human
ucacggcucacugca

SEQ ID NO: 3235633 - RNA, 13 nt, Human
ucacggcucacug

SEQ ID NO: 3235634 - RNA, 16 nt, Human
ucacggaagagccuug

SEQ ID NO: 3235635 - RNA, 17 nt, Human
ucacggaagagccuugc

SEQ ID NO: 3235636 - RNA, 14 nt, Human
ucacggaagagccu

SEQ ID NO: 3235637 - RNA, 23 nt, Human
ucagaaaaaagguucuuugugua

SEQ ID NO: 3235638 - RNA, 10 nt, Human
ucagaaaaaa

SEQ ID NO: 3235639 - RNA, 22 nt, Human
ucagaaauaauaaaaaauuuca

SEQ ID NO: 3235640 - RNA, 20 nt, Human
ucagaaagggcagaaguagg

SEQ ID NO: 3235641 - RNA, 22 nt, Human
ucagaaauacagauaaaugauu

SEQ ID NO: 3235642 - RNA, 17 nt, Human
ucagaaauacagauaaa

SEQ ID NO: 3235643 - RNA, 23 nt, Human
ucagaaagccuuucauuuugcuu

SEQ ID NO: 3235644 - RNA, 17 nt, Human
ucagaaagccuuucauu

SEQ ID NO: 3235645 - RNA, 12 nt, Human
ucacuuuuauuu

SEQ ID NO: 3235646 - RNA, 22 nt, Human
ucacuuuuauuuagcaccaggg

SEQ ID NO: 3235647 - RNA, 19 nt, Human
ucacuuugacacuuuucau

SEQ ID NO: 3235648 - RNA, 12 nt, Human
ucacuuucauaa

SEQ ID NO: 3235649 - RNA, 13 nt, Human
ucacuggcauggu

SEQ ID NO: 3235650 - RNA, 21 nt, Human
ucacuggccacaguuguuuga

SEQ ID NO: 3235651 - RNA, 16 nt, Human
ucacucugucgcccag

SEQ ID NO: 3235652 - RNA, 12 nt, Human
ucacucugucgc

SEQ ID NO: 3235653 - RNA, 19 nt, Human
ucacucugucgcccagucu

SEQ ID NO: 3235654 - RNA, 20 nt, Human
ucagaguucccaagaaagga

SEQ ID NO: 3235655 - RNA, 20 nt, Human
ucagcaaacuuguugaauuu

SEQ ID NO: 3235656 - RNA, 13 nt, Human
ucagcaaagaaaa

SEQ ID NO: 3235657 - RNA, 15 nt, Human
ucagcaaagaaaaaa

SEQ ID NO: 3235658 - RNA, 22 nt, Human
ucagaggccccaauaccccaug

SEQ ID NO: 3235659 - RNA, 12 nt, Human
ucagaggcccca

SEQ ID NO: 3235660 - RNA, 24 nt, Human
ucagcaaggcgcuaacuugcuuaa

SEQ ID NO: 3235661 - RNA, 22 nt, Human
ucagcaaggcgcuaacuugcuu

SEQ ID NO: 3235662 - RNA, 20 nt, Human
ucagcaaggcgcuaacuugc

SEQ ID NO: 3235663 - RNA, 19 nt, Human
ucagcaaggcgcuaacuug

SEQ ID NO: 3235664 - RNA, 23 nt, Human
ucagcaaggccaccucuuccugg

SEQ ID NO: 3235665 - RNA, 18 nt, Human
ucagcaaggccaccucuu

SEQ ID NO: 3235666 - RNA, 13 nt, Human
ucagcaaggccac

SEQ ID NO: 3235667 - RNA, 12 nt, Human
ucagcaaggcca

SEQ ID NO: 3235668 - RNA, 17 nt, Human
ucagcaaggccaccucu

SEQ ID NO: 3235669 - RNA, 16 nt, Human
ucagcaaggccaccuc

SEQ ID NO: 3235670 - RNA, 15 nt, Human
ucagcaaggccaccu

SEQ ID NO: 3235671 - RNA, 14 nt, Human
ucagcaaggccacc

SEQ ID NO: 3235672 - RNA, 22 nt, Human
ucagacauagaauuaacacaug

SEQ ID NO: 3235673 - RNA, 19 nt, Human
ucagacauagaauuaacac

SEQ ID NO: 3235674 - RNA, 14 nt, Human
ucagacagcugccu

SEQ ID NO: 3235675 - RNA, 17 nt, Human
ucagaaaugacuuuuug

SEQ ID NO: 3235676 - RNA, 19 nt, Human
ucagacagcugccugggau

SEQ ID NO: 3235677 - RNA, 20 nt, Human
ucagacagcugccugggauc

SEQ ID NO: 3235678 - RNA, 15 nt, Human
ucagacagcugccug

SEQ ID NO: 3235679 - RNA, 16 nt, Human
ucagacagcugccugg

SEQ ID NO: 3235680 - RNA, 17 nt, Human
ucagacagcugccuggg

SEQ ID NO: 3235681 - RNA, 18 nt, Human
ucagacagcugccuggga

SEQ ID NO: 3235682 - RNA, 23 nt, Human
uauuuuauacucauggaagagau

SEQ ID NO: 3235683 - RNA, 13 nt, Human
uauuuuauauaaa

SEQ ID NO: 3235684 - RNA, 21 nt, Human
uauuuucaacgcagcccugcu

SEQ ID NO: 3235685 - RNA, 19 nt, Human
uauuuucaacgcagcccug

SEQ ID NO: 3235686 - RNA, 19 nt, Human
uauuuucagucaaaacuuu

SEQ ID NO: 3235687 - RNA, 21 nt, Human
uauuuucagucaaaacuuuaa

SEQ ID NO: 3235688 - RNA, 13 nt, Human
uauuuuuguuguu

SEQ ID NO: 3235689 - RNA, 17 nt, Human
uauuuugaaauggaaau

SEQ ID NO: 3235690 - RNA, 21 nt, Human
uauuuucuguguguuccuggc

SEQ ID NO: 3235691 - RNA, 21 nt, Human
uauuuugaagugagaaaauga

SEQ ID NO: 3235692 - RNA, 19 nt, Human
uauuuuuuuagauugagaa

SEQ ID NO: 3235693 - RNA, 19 nt, Human
uauuuuuuuccuuacauaa

SEQ ID NO: 3235694 - RNA, 18 nt, Human
uauuuuuuuccuuacaua

SEQ ID NO: 3235695 - RNA, 12 nt, Human
uauuuuuuuccu

SEQ ID NO: 3235696 - RNA, 14 nt, Human
ucaaaaagaaauca

SEQ ID NO: 3235697 - RNA, 17 nt, Human
ucaaaaagaaaucaaua

SEQ ID NO: 3235698 - RNA, 17 nt, Human
ucaaaaaggcuuauaaa

SEQ ID NO: 3235699 - RNA, 19 nt, Human
ucaaaaaggcuuauaaaac

SEQ ID NO: 3235700 - RNA, 20 nt, Human
ucaaaaaggcuuauaaaaca

SEQ ID NO: 3235701 - RNA, 21 nt, Human
ucaaaaaggcuuauaaaacag

SEQ ID NO: 3235702 - RNA, 22 nt, Human
ucaaaacgguuuuacugcagcu

SEQ ID NO: 3235703 - RNA, 23 nt, Human
ucaaacggccucacuaggcuucu

SEQ ID NO: 3235704 - RNA, 14 nt, Human
ucaaacucuuaaaa

SEQ ID NO: 3235705 - RNA, 16 nt, Human
ucaaacgugaaaaugc

SEQ ID NO: 3235706 - RNA, 15 nt, Human
ucaaacgugaaaaug

SEQ ID NO: 3235707 - RNA, 14 nt, Human
uauuucuucaaaua

SEQ ID NO: 3235708 - RNA, 18 nt, Human
uauuucuuaauuauuaua

SEQ ID NO: 3235709 - RNA, 23 nt, Human
uauuucuuaauuauuauaaaaau

SEQ ID NO: 3235710 - RNA, 15 nt, Human
uauuucuccuuuugu

SEQ ID NO: 3235711 - RNA, 12 nt, Human
uauuucuccuuu

SEQ ID NO: 3235712 - RNA, 11 nt, Human
uauuucuccuu

SEQ ID NO: 3235713 - RNA, 14 nt, Human
uauuucugaaggua

SEQ ID NO: 3235714 - RNA, 21 nt, Human
uauuucugaagguagcauucu

SEQ ID NO: 3235715 - RNA, 17 nt, Human
uauuugaggaguguuaa

SEQ ID NO: 3235716 - RNA, 18 nt, Human
uauuugcugacaaccauu

SEQ ID NO: 3235717 - RNA, 16 nt, Human
uauuuggaauuagaac

SEQ ID NO: 3235718 - RNA, 15 nt, Human
uauuuggaauuagaa

SEQ ID NO: 3235719 - RNA, 14 nt, Human
uauuuggaauuaga

SEQ ID NO: 3235720 - RNA, 14 nt, Human
uauuuggauaucug

SEQ ID NO: 3235721 - RNA, 15 nt, Human
uauuuggauaucugu

SEQ ID NO: 3235722 - RNA, 16 nt, Human
uauuuggauaucuguu

SEQ ID NO: 3235723 - RNA, 15 nt, Human
uauuuggaugcagag

SEQ ID NO: 3235724 - RNA, 19 nt, Human
uauuuggaugcagaguuca

SEQ ID NO: 3235725 - RNA, 16 nt, Human
uauuuggaugcagagu

SEQ ID NO: 3235726 - RNA, 22 nt, Human
uauuuuaguggacccugaaaug

SEQ ID NO: 3235727 - RNA, 21 nt, Human
uauuuuaguggacccugaaau

SEQ ID NO: 3235728 - RNA, 23 nt, Human
uauuuuaguggacccugaaaugu

SEQ ID NO: 3235729 - RNA, 20 nt, Human
uauuuggaugcagaguucag

SEQ ID NO: 3235730 - RNA, 21 nt, Human
uauuuauugacucuugaguug

SEQ ID NO: 3235731 - RNA, 21 nt, Human
uauuuauucugggaauguaua

SEQ ID NO: 3235732 - RNA, 12 nt, Human
uauuuauugacu

SEQ ID NO: 3235733 - RNA, 15 nt, Human
uauuuauugacucuu

SEQ ID NO: 3235734 - RNA, 17 nt, Human
uauuuauugacucuuga

SEQ ID NO: 3235735 - RNA, 24 nt, Human
uauuuauuaaauuuuuuuguauga

SEQ ID NO: 3235736 - RNA, 13 nt, Human
uauuuauuacaua

SEQ ID NO: 3235737 - RNA, 14 nt, Human
uauuuauuacauaa

SEQ ID NO: 3235738 - RNA, 16 nt, Human
uauuuauuacauaauu

SEQ ID NO: 3235739 - RNA, 20 nt, Human
uauuuauuacauaauuuagu

SEQ ID NO: 3235740 - RNA, 23 nt, Human
uauuuauuaaaugcccagccccu

SEQ ID NO: 3235741 - RNA, 15 nt, Human
uauuuauuaaauuuu

SEQ ID NO: 3235742 - RNA, 15 nt, Human
uaucugaaaauguau

SEQ ID NO: 3235743 - RNA, 14 nt, Human
uaucugaaaaugua

SEQ ID NO: 3235744 - RNA, 20 nt, Human
uaucugaaaauguaugugua

SEQ ID NO: 3235745 - RNA, 13 nt, Human
uaucugaaaguca

SEQ ID NO: 3235746 - RNA, 14 nt, Human
ucacaggaaguaga

SEQ ID NO: 3235747 - RNA, 19 nt, Human
ucacaggaaguagaggagg

SEQ ID NO: 3235748 - RNA, 11 nt, Human
ucacaggcagg

SEQ ID NO: 3235749 - RNA, 23 nt, Human
ucacacagugagucgaggacagg

SEQ ID NO: 3235750 - RNA, 22 nt, Human
ucacacagugagucgaggacag

SEQ ID NO: 3235751 - RNA, 21 nt, Human
ucacacaugagcaucaggcca

SEQ ID NO: 3235752 - RNA, 13 nt, Human
ucacacagugagu

SEQ ID NO: 3235753 - RNA, 22 nt, Human
ucacacaguauuacuucugcua

SEQ ID NO: 3235754 - RNA, 21 nt, Human
ucacacaguauuacuucugcu

SEQ ID NO: 3235755 - RNA, 19 nt, Human
ucaauuacaggaaguacug

SEQ ID NO: 3235756 - RNA, 22 nt, Human
ucacaaguuaagauucuuggua

SEQ ID NO: 3235757 - RNA, 13 nt, Human
ucaauuacaggaa

SEQ ID NO: 3235758 - RNA, 18 nt, Human
ucaauuacaggaaguacu

SEQ ID NO: 3235759 - RNA, 22 nt, Human
ucaaugcuguuuggguuuccaa

SEQ ID NO: 3235760 - RNA, 18 nt, Human
ucaaugcacugacauugu

SEQ ID NO: 3235761 - RNA, 17 nt, Human
ucaaugcuauaacuaug

SEQ ID NO: 3235762 - RNA, 15 nt, Human
ucaaugcuguuuggg

SEQ ID NO: 3235763 - RNA, 17 nt, Human
ucaaugcuggagaaaaa

SEQ ID NO: 3235764 - RNA, 14 nt, Human
ucaauaggaaaaac

SEQ ID NO: 3235765 - RNA, 23 nt, Human
ucaauagcccaggauauauuuua

SEQ ID NO: 3235766 - RNA, 16 nt, Human
ucaauagcguguguag

SEQ ID NO: 3235767 - RNA, 17 nt, Human
ucaauagcguguguaga

SEQ ID NO: 3235768 - RNA, 14 nt, Human
ucaaugcacugaca

SEQ ID NO: 3235769 - RNA, 13 nt, Human
ucaauaggaaaaa

SEQ ID NO: 3235770 - RNA, 22 nt, Human
ucaaguggcaaagcuguucuuc

SEQ ID NO: 3235771 - RNA, 19 nt, Human
ucaaguggcaaagcuguuc

SEQ ID NO: 3235772 - RNA, 14 nt, Human
ucaaguggcaaagc

SEQ ID NO: 3235773 - RNA, 21 nt, Human
ucaaacugaaaagcugagacc

SEQ ID NO: 3235774 - RNA, 12 nt, Human
ucaaacugaaaa

SEQ ID NO: 3235775 - RNA, 22 nt, Human
ucaaacucuugaccucagguga

SEQ ID NO: 3235776 - RNA, 13 nt, Human
ucaaccuccuggg

SEQ ID NO: 3235777 - RNA, 20 nt, Human
ucaacuaaaguuguacuuua

SEQ ID NO: 3235778 - RNA, 18 nt, Human
ucaacuaaaguuguacuu

SEQ ID NO: 3235779 - RNA, 15 nt, Human
ucaacuaaauccaaa

SEQ ID NO: 3235780 - RNA, 22 nt, Human
ucaacuaaaguuguacuuuaaa

SEQ ID NO: 3235781 - RNA, 21 nt, Human
ucaacuaaaguuguacuuuaa

SEQ ID NO: 3235782 - RNA, 21 nt, Human
ucaagcgauucuucugcuuca

SEQ ID NO: 3235783 - RNA, 16 nt, Human
ucaagcgauucuucug

SEQ ID NO: 3235784 - RNA, 15 nt, Human
ucaagcgauucucuu

SEQ ID NO: 3235785 - RNA, 12 nt, Human
ucaagcaugaag

SEQ ID NO: 3235786 - RNA, 14 nt, Human
ucaagcaugaagau

SEQ ID NO: 3235787 - RNA, 16 nt, Human
ucaagcaugaagauaa

SEQ ID NO: 3235788 - RNA, 22 nt, Human
ucaagccuagauguuuuauaca

SEQ ID NO: 3235789 - RNA, 15 nt, Human
ucaagcccaggaggg

SEQ ID NO: 3235790 - RNA, 20 nt, Human
ucaaggauccugagccagau

SEQ ID NO: 3235791 - RNA, 21 nt, Human
ucaagugauucuccugccuca

SEQ ID NO: 3235792 - RNA, 17 nt, Human
ucaaggauccugagcca

SEQ ID NO: 3235793 - RNA, 15 nt, Human
ucaagugauucucuu

SEQ ID NO: 3235794 - RNA, 22 nt, Human
ucaagugauucuccugccucag

SEQ ID NO: 3235795 - RNA, 18 nt, Human
ucaaggauccugagccag

SEQ ID NO: 3235796 - RNA, 19 nt, Human
ucaaggauccugagccaga

SEQ ID NO: 3235797 - RNA, 18 nt, Human
ucaagcuccaucuuauuu

SEQ ID NO: 3235798 - RNA, 16 nt, Human
ucccccuccaccugcu

SEQ ID NO: 3235799 - RNA, 17 nt, Human
ucccccaucucuucugg

SEQ ID NO: 3235800 - RNA, 13 nt, Human
ucccccugcccca

SEQ ID NO: 3235801 - RNA, 13 nt, Human
ucccccucuggcu

SEQ ID NO: 3235802 - RNA, 21 nt, Human
ucccccucccccagccacucc

SEQ ID NO: 3235803 - RNA, 14 nt, Human
ucccccucccccag

SEQ ID NO: 3235804 - RNA, 22 nt, Human
ucccccagccccauccucugua

SEQ ID NO: 3235805 - RNA, 16 nt, Human
ucccccaguccccuuc

SEQ ID NO: 3235806 - RNA, 20 nt, Human
uccccgcacugggcuugggg

SEQ ID NO: 3235807 - RNA, 21 nt, Human
ucccccuuccauggacuuugu

SEQ ID NO: 3235808 - RNA, 15 nt, Human
ucccccuuucuuccu

SEQ ID NO: 3235809 - RNA, 11 nt, Human
ucccccuuucu

SEQ ID NO: 3235810 - RNA, 21 nt, Human
ucccccuuucuuccucauucc

SEQ ID NO: 3235811 - RNA, 16 nt, Human
ucccccuuucuuccuc

SEQ ID NO: 3235812 - RNA, 13 nt, Human
uccccugcagccc

SEQ ID NO: 3235813 - RNA, 17 nt, Human
uccccugcagcccuggc

SEQ ID NO: 3235814 - RNA, 18 nt, Human
uccccugcagcccuggcc

SEQ ID NO: 3235815 - RNA, 11 nt, Human
uccccuuccuu

SEQ ID NO: 3235816 - RNA, 19 nt, Human
uccccuuccuaccacccgg

SEQ ID NO: 3235817 - RNA, 21 nt, Human
uccccuuccuaauuccacagc

SEQ ID NO: 3235818 - RNA, 18 nt, Human
uccccuuccccuuccuuc

SEQ ID NO: 3235819 - RNA, 16 nt, Human
uccccuuccccuuccu

SEQ ID NO: 3235820 - RNA, 12 nt, Human
uccccuucccag

SEQ ID NO: 3235821 - RNA, 15 nt, Human
uccccuuccauuucu

SEQ ID NO: 3235822 - RNA, 22 nt, Human
uccccuuccuaauuccacagcu

SEQ ID NO: 3235823 - RNA, 18 nt, Human
uccccuucccgugaccug

SEQ ID NO: 3235824 - RNA, 16 nt, Human
uccccuuccuaccacc

SEQ ID NO: 3235825 - RNA, 23 nt, Human
ucccuaccgagucucuucuccac

SEQ ID NO: 3235826 - RNA, 16 nt, Human
ucccucccugcuguca

SEQ ID NO: 3235827 - RNA, 12 nt, Human
ucccucccugcu

SEQ ID NO: 3235828 - RNA, 17 nt, Human
ucccucccucuuucccu

SEQ ID NO: 3235829 - RNA, 15 nt, Human
ucccucccucuuucc

SEQ ID NO: 3235830 - RNA, 16 nt, Human
ucccuacuuccuguga

SEQ ID NO: 3235831 - RNA, 15 nt, Human
ucccuacuuccugug

SEQ ID NO: 3235832 - RNA, 14 nt, Human
uccccugcugggug

SEQ ID NO: 3235833 - RNA, 15 nt, Human
uccccugcugggugu

SEQ ID NO: 3235834 - RNA, 20 nt, Human
uccccugcuggguguggcgc

SEQ ID NO: 3235835 - RNA, 21 nt, Human
uccccugcuggguguggcgca

SEQ ID NO: 3235836 - RNA, 13 nt, Human
uccccugcuccug

SEQ ID NO: 3235837 - RNA, 22 nt, Human
uccccuguagagugggagcuga

SEQ ID NO: 3235838 - RNA, 23 nt, Human
uccccuguccccgcacugggcuu

SEQ ID NO: 3235839 - RNA, 16 nt, Human
uccccuggggugcagg

SEQ ID NO: 3235840 - RNA, 18 nt, Human
uccccuggggugcaggcg

SEQ ID NO: 3235841 - RNA, 20 nt, Human
uccccuggggugcaggcgcc

SEQ ID NO: 3235842 - RNA, 17 nt, Human
uccccugugccagccca

SEQ ID NO: 3235843 - RNA, 15 nt, Human
uccccuguucacucu

SEQ ID NO: 3235844 - RNA, 20 nt, Human
uccccugugccagcccagag

SEQ ID NO: 3235845 - RNA, 19 nt, Human
uccccugugccagcccaga

SEQ ID NO: 3235846 - RNA, 24 nt, Human
uccccugcuggguguggcgcagca

SEQ ID NO: 3235847 - RNA, 13 nt, Human
uccccugcuggcc

SEQ ID NO: 3235848 - RNA, 19 nt, Human
uccccuggaagcagugccc

SEQ ID NO: 3235849 - RNA, 17 nt, Human
uccccuggaagcagugc

SEQ ID NO: 3235850 - RNA, 19 nt, Human
uccccuguagagugggagc

SEQ ID NO: 3235851 - RNA, 23 nt, Human
uccccuggaagcagugcccaggu

SEQ ID NO: 3235852 - RNA, 22 nt, Human
uccccuggaagcagugcccagg

SEQ ID NO: 3235853 - RNA, 21 nt, Human
uccccuggaagcagugcccag

SEQ ID NO: 3235854 - RNA, 20 nt, Human
uccccuggaagcagugccca

SEQ ID NO: 3235855 - RNA, 22 nt, Human
uccccagacuccaccaagccug

SEQ ID NO: 3235856 - RNA, 21 nt, Human
uccccagaacucugccugccc

SEQ ID NO: 3235857 - RNA, 19 nt, Human
uccccagaacucugccugc

SEQ ID NO: 3235858 - RNA, 17 nt, Human
uccccagaacucugccu

SEQ ID NO: 3235859 - RNA, 22 nt, Human
uccccacuugagaauuacccuu

SEQ ID NO: 3235860 - RNA, 20 nt, Human
ucccaucucacacaugagca

SEQ ID NO: 3235861 - RNA, 16 nt, Human
ucccaggcugagccuc

SEQ ID NO: 3235862 - RNA, 23 nt, Human
ucccaucucacacaugagcauca

SEQ ID NO: 3235863 - RNA, 12 nt, Human
ucccaugcccug

SEQ ID NO: 3235864 - RNA, 11 nt, Human
ucccauggugc

SEQ ID NO: 3235865 - RNA, 22 nt, Human
ucccaggcauuccccaggaggc

SEQ ID NO: 3235866 - RNA, 19 nt, Human
ucccaggcauuccccagga

SEQ ID NO: 3235867 - RNA, 15 nt, Human
ucccaggcugagccu

SEQ ID NO: 3235868 - RNA, 21 nt, Human
ucccaggcgccccuucccccu

SEQ ID NO: 3235869 - RNA, 18 nt, Human
ucccaggcgccccuuccc

SEQ ID NO: 3235870 - RNA, 20 nt, Human
ucccaggcgccccuuccccc

SEQ ID NO: 3235871 - RNA, 20 nt, Human
ucccaggcauuccccaggag

SEQ ID NO: 3235872 - RNA, 21 nt, Human
ucccaggcauuccccaggagg

SEQ ID NO: 3235873 - RNA, 13 nt, Human
ucccaggagccug

SEQ ID NO: 3235874 - RNA, 17 nt, Human
ucccaggagccugccca

SEQ ID NO: 3235875 - RNA, 18 nt, Human
ucccaggagccugcccag

SEQ ID NO: 3235876 - RNA, 15 nt, Human
ucccaccucagccuc

SEQ ID NO: 3235877 - RNA, 14 nt, Human
ucccaccucagccu

SEQ ID NO: 3235878 - RNA, 13 nt, Human
ucccaccucagcc

SEQ ID NO: 3235879 - RNA, 16 nt, Human
ucccaagguucugggu

SEQ ID NO: 3235880 - RNA, 22 nt, Human
ucccaaggcucugagcaaaugu

SEQ ID NO: 3235881 - RNA, 13 nt, Human
uccauggacuuug

SEQ ID NO: 3235882 - RNA, 14 nt, Human
uccauggacuuugu

SEQ ID NO: 3235883 - RNA, 15 nt, Human
uccauggacuuuguu

SEQ ID NO: 3235884 - RNA, 21 nt, Human
ucccaaagugcugggauuaca

SEQ ID NO: 3235885 - RNA, 19 nt, Human
uccauggggucucucacag

SEQ ID NO: 3235886 - RNA, 23 nt, Human
uccauggggucucucacagacag

SEQ ID NO: 3235887 - RNA, 22 nt, Human
uccauggggucucucacagaca

SEQ ID NO: 3235888 - RNA, 21 nt, Human
uccauggguuccaguuucaga

SEQ ID NO: 3235889 - RNA, 23 nt, Human
uccagcucaccagccccagugcc

SEQ ID NO: 3235890 - RNA, 16 nt, Human
uccauccaggccauuc

SEQ ID NO: 3235891 - RNA, 16 nt, Human
ucccaaauuucauacc

SEQ ID NO: 3235892 - RNA, 19 nt, Human
uccauguagccuuuaauau

SEQ ID NO: 3235893 - RNA, 20 nt, Human
uccauguaugcauaauaauc

SEQ ID NO: 3235894 - RNA, 15 nt, Human
uccauguaugcauaa

SEQ ID NO: 3235895 - RNA, 13 nt, Human
ucccaacucaccc

SEQ ID NO: 3235896 - RNA, 21 nt, Human
ucccaaaugugugcccagcuu

SEQ ID NO: 3235897 - RNA, 20 nt, Human
ucccaaaugugugcccagcu

SEQ ID NO: 3235898 - RNA, 14 nt, Human
ucccaacucacccc

SEQ ID NO: 3235899 - RNA, 15 nt, Human
ucccaacucacccca

SEQ ID NO: 3235900 - RNA, 16 nt, Human
ucccaacucaccccag

SEQ ID NO: 3235901 - RNA, 15 nt, Human
ucccaagcucugcuc

SEQ ID NO: 3235902 - RNA, 14 nt, Human
ucccaagcucugcu

SEQ ID NO: 3235903 - RNA, 13 nt, Human
ucccaagcucugc

SEQ ID NO: 3235904 - RNA, 12 nt, Human
ucccaagcucug

SEQ ID NO: 3235905 - RNA, 17 nt, Human
ucccaagcucugcuccu

SEQ ID NO: 3235906 - RNA, 18 nt, Human
ucccaaggcucugagcaa

SEQ ID NO: 3235907 - RNA, 17 nt, Human
uccaaagccaaugugaa

SEQ ID NO: 3235908 - RNA, 15 nt, Human
uccaaagcagagagc

SEQ ID NO: 3235909 - RNA, 12 nt, Human
uccaaagcagag

SEQ ID NO: 3235910 - RNA, 20 nt, Human
uccaagaagcccaggaaagg

SEQ ID NO: 3235911 - RNA, 22 nt, Human
uccaagaagcccaggaaaggcu

SEQ ID NO: 3235912 - RNA, 19 nt, Human
uccaagaagcccaggaaag

SEQ ID NO: 3235913 - RNA, 23 nt, Human
uccaagcauaccaacacgagcag

SEQ ID NO: 3235914 - RNA, 14 nt, Human
ucauuucuuugagu

SEQ ID NO: 3235915 - RNA, 12 nt, Human
ucauuucugauu

SEQ ID NO: 3235916 - RNA, 22 nt, Human
ucauuucugcaucagcugcuga

SEQ ID NO: 3235917 - RNA, 16 nt, Human
ucauuucugcaucagc

SEQ ID NO: 3235918 - RNA, 24 nt, Human
ucauucaccaguacauucucaguu

SEQ ID NO: 3235919 - RNA, 22 nt, Human
ucauucauauuacaauauuugu

SEQ ID NO: 3235920 - RNA, 20 nt, Human
ucauucauauuacaauauuu

SEQ ID NO: 3235921 - RNA, 14 nt, Human
ucauucagcaucug

SEQ ID NO: 3235922 - RNA, 15 nt, Human
ucauucauacuuaaa

SEQ ID NO: 3235923 - RNA, 19 nt, Human
ucauucauacuuaaaaauu

SEQ ID NO: 3235924 - RNA, 12 nt, Human
ucauucauauua

SEQ ID NO: 3235925 - RNA, 19 nt, Human
ucauucauauuacaauauu

SEQ ID NO: 3235926 - RNA, 15 nt, Human
ucauucauauuacaa

SEQ ID NO: 3235927 - RNA, 13 nt, Human
uccaaagaaaguu

SEQ ID NO: 3235928 - RNA, 17 nt, Human
uccaaacuggaaugagc

SEQ ID NO: 3235929 - RNA, 16 nt, Human
uccaaacuggaaugag

SEQ ID NO: 3235930 - RNA, 19 nt, Human
uccaaacuaccuuccaguu

SEQ ID NO: 3235931 - RNA, 14 nt, Human
uccaccuacaugag

SEQ ID NO: 3235932 - RNA, 14 nt, Human
uccaccguccccuc

SEQ ID NO: 3235933 - RNA, 15 nt, Human
uccaccguccccucc

SEQ ID NO: 3235934 - RNA, 12 nt, Human
uccaccugccag

SEQ ID NO: 3235935 - RNA, 22 nt, Human
uccaagcaggacauggacaagg

SEQ ID NO: 3235936 - RNA, 14 nt, Human
uccacaacacacag

SEQ ID NO: 3235937 - RNA, 14 nt, Human
uccacaagagccca

SEQ ID NO: 3235938 - RNA, 12 nt, Human
uccacuuggucu

SEQ ID NO: 3235939 - RNA, 13 nt, Human
uccacuuggucug

SEQ ID NO: 3235940 - RNA, 13 nt, Human
uccaccugccagg

SEQ ID NO: 3235941 - RNA, 13 nt, Human
uccaccucuggga

SEQ ID NO: 3235942 - RNA, 22 nt, Human
uccagaaaugucccuuucuucu

SEQ ID NO: 3235943 - RNA, 16 nt, Human
uccagaaaugucccuu

SEQ ID NO: 3235944 - RNA, 20 nt, Human
uccagaaaugucccuuucuu

SEQ ID NO: 3235945 - RNA, 19 nt, Human
uccagaaaugucccuuucu

SEQ ID NO: 3235946 - RNA, 18 nt, Human
uccagaacucuuccucca

SEQ ID NO: 3235947 - RNA, 16 nt, Human
uccagaacucuuccuc

SEQ ID NO: 3235948 - RNA, 12 nt, Human
uccagcaggagg

SEQ ID NO: 3235949 - RNA, 13 nt, Human
uccagcaggccca

SEQ ID NO: 3235950 - RNA, 12 nt, Human
uccagcaggccc

SEQ ID NO: 3235951 - RNA, 22 nt, Human
uccagcaggagggacagucuca

SEQ ID NO: 3235952 - RNA, 17 nt, Human
uccagcaggagggacag

SEQ ID NO: 3235953 - RNA, 22 nt, Human
uccagcaggcccaugggaggcu

SEQ ID NO: 3235954 - RNA, 15 nt, Human
uccagcaggcccaug

SEQ ID NO: 3235955 - RNA, 18 nt, Human
ucaguugcucaaaaagaa

SEQ ID NO: 3235956 - RNA, 20 nt, Human
ucaguugcucaaaaagaaau

SEQ ID NO: 3235957 - RNA, 13 nt, Human
ucauaaugacuua

SEQ ID NO: 3235958 - RNA, 12 nt, Human
ucaguuguguuu

SEQ ID NO: 3235959 - RNA, 13 nt, Human
ucaguuguguuuu

SEQ ID NO: 3235960 - RNA, 14 nt, Human
ucaguuguguuuuu

SEQ ID NO: 3235961 - RNA, 16 nt, Human
ucaguuguguuuuuua

SEQ ID NO: 3235962 - RNA, 18 nt, Human
ucaguuguguuuuuuaag

SEQ ID NO: 3235963 - RNA, 22 nt, Human
ucaguucaaagucaugauguuu

SEQ ID NO: 3235964 - RNA, 21 nt, Human
ucaguucaaagucaugauguu

SEQ ID NO: 3235965 - RNA, 20 nt, Human
ucaguucaaagucaugaugu

SEQ ID NO: 3235966 - RNA, 16 nt, Human
ucaguucaaagucaug

SEQ ID NO: 3235967 - RNA, 13 nt, Human
ucaguucaaaguc

SEQ ID NO: 3235968 - RNA, 12 nt, Human
ucaguucaaagu

SEQ ID NO: 3235969 - RNA, 15 nt, Human
ucaguuacucuucag

SEQ ID NO: 3235970 - RNA, 23 nt, Human
ucaguuauugucccuggcuuccu

SEQ ID NO: 3235971 - RNA, 19 nt, Human
ucaguuaugacauccacaa

SEQ ID NO: 3235972 - RNA, 20 nt, Human
ucaguuauacaguuauaaaa

SEQ ID NO: 3235973 - RNA, 21 nt, Human
ucaguuauacaguuauaaaau

SEQ ID NO: 3235974 - RNA, 13 nt, Human
ucauacccacccc

SEQ ID NO: 3235975 - RNA, 16 nt, Human
ucauaauuuguuucca

SEQ ID NO: 3235976 - RNA, 19 nt, Human
ucauaauuuguuuccagca

SEQ ID NO: 3235977 - RNA, 17 nt, Human
ucagugugacugaucuc

SEQ ID NO: 3235978 - RNA, 13 nt, Human
ucagugugacuga

SEQ ID NO: 3235979 - RNA, 23 nt, Human
ucagugguuggcaauuguuucaa

SEQ ID NO: 3235980 - RNA, 14 nt, Human
ucaguguaaagugu

SEQ ID NO: 3235981 - RNA, 18 nt, Human
ucaguguacacucugagu

SEQ ID NO: 3235982 - RNA, 15 nt, Human
ucagucuggcccuuc

SEQ ID NO: 3235983 - RNA, 20 nt, Human
ucaguggggcccauggaugu

SEQ ID NO: 3235984 - RNA, 24 nt, Human
ucagucugauucccaagcucugcu

SEQ ID NO: 3235985 - RNA, 13 nt, Human
ucauguaauuuua

SEQ ID NO: 3235986 - RNA, 23 nt, Human
ucauucaccaguacauucucagu

SEQ ID NO: 3235987 - RNA, 13 nt, Human
ucauguaaauuga

SEQ ID NO: 3235988 - RNA, 22 nt, Human
ucauguaaauugacuguacuag

SEQ ID NO: 3235989 - RNA, 20 nt, Human
ucauacccacccccacccaa

SEQ ID NO: 3235990 - RNA, 14 nt, Human
ucauacccaccccc

SEQ ID NO: 3235991 - RNA, 15 nt, Human
ucauacccaccccca

SEQ ID NO: 3235992 - RNA, 14 nt, Human
ucauagguuaaaaa

SEQ ID NO: 3235993 - RNA, 15 nt, Human
ucauagguuaaaaaa

SEQ ID NO: 3235994 - RNA, 20 nt, Human
ucauagguuaaaaaaaaaag

SEQ ID NO: 3235995 - RNA, 21 nt, Human
ucauagguuaaaaaaaaaagu

SEQ ID NO: 3235996 - RNA, 23 nt, Human
ucauagguuaaaaaaaaaaguca

SEQ ID NO: 3235997 - RNA, 16 nt, Human
ucaucuguaagcuguu

SEQ ID NO: 3235998 - RNA, 11 nt, Human
ucaucuguaag

SEQ ID NO: 3235999 - RNA, 21 nt, Human
ucaucucuagggaccagaacc

SEQ ID NO: 3236000 - RNA, 22 nt, Human
ucaucucuagggaccagaacca

SEQ ID NO: 3236001 - RNA, 19 nt, Human
uccuucuguccuacucugu

SEQ ID NO: 3236002 - RNA, 12 nt, Human
uccuucuguccu

SEQ ID NO: 3236003 - RNA, 13 nt, Human
uccuucugggcau

SEQ ID NO: 3236004 - RNA, 17 nt, Human
uccugucaucugagaau

SEQ ID NO: 3236005 - RNA, 20 nt, Human
uccuuacaaaugauugcuuu

SEQ ID NO: 3236006 - RNA, 18 nt, Human
uccuuacaaaugauugcu

SEQ ID NO: 3236007 - RNA, 16 nt, Human
uccuuacaaaugauug

SEQ ID NO: 3236008 - RNA, 15 nt, Human
uccuuacaaaugauu

SEQ ID NO: 3236009 - RNA, 15 nt, Human
uccugucaucugaga

SEQ ID NO: 3236010 - RNA, 19 nt, Human
uccugucaagcaaucaaga

SEQ ID NO: 3236011 - RNA, 16 nt, Human
uccuucaaagcaaaug

SEQ ID NO: 3236012 - RNA, 13 nt, Human
uccuucaaagucu

SEQ ID NO: 3236013 - RNA, 18 nt, Human
uccuucaaagucucaaug

SEQ ID NO: 3236014 - RNA, 17 nt, Human
uccuuaugcuugggccu

SEQ ID NO: 3236015 - RNA, 15 nt, Human
uccuuacauaaacau

SEQ ID NO: 3236016 - RNA, 19 nt, Human
uccuucaacaaggcuugcu

SEQ ID NO: 3236017 - RNA, 20 nt, Human
uccuucaacaaggcuugcug

SEQ ID NO: 3236018 - RNA, 21 nt, Human
uccuuauggguagggcucuga

SEQ ID NO: 3236019 - RNA, 21 nt, Human
uccuucaacaaggcuugcugc

SEQ ID NO: 3236020 - RNA, 23 nt, Human
uccugguccuaggcuggaaggag

SEQ ID NO: 3236021 - RNA, 14 nt, Human
uccuggucgaaagu

SEQ ID NO: 3236022 - RNA, 10 nt, Human
ucccucccuu

SEQ ID NO: 3236023 - RNA, 22 nt, Human
uccuggcaugggaaugaauguc

SEQ ID NO: 3236024 - RNA, 17 nt, Human
uccuggcccacugcauc

SEQ ID NO: 3236025 - RNA, 15 nt, Human
uccugguguggaaga

SEQ ID NO: 3236026 - RNA, 11 nt, Human
uccugguuccu

SEQ ID NO: 3236027 - RNA, 19 nt, Human
uccuguaggaguucuauuu

SEQ ID NO: 3236028 - RNA, 10 nt, Human
uccuguaaac

SEQ ID NO: 3236029 - RNA, 20 nt, Human
uccuguaaacacucagcugu

SEQ ID NO: 3236030 - RNA, 21 nt, Human
uccuguaaacacucagcuguu

SEQ ID NO: 3236031 - RNA, 23 nt, Human
uccuuuuggagucagacagaugu

SEQ ID NO: 3236032 - RNA, 14 nt, Human
uccuuuuggaguca

SEQ ID NO: 3236033 - RNA, 13 nt, Human
uccuuuuuauuua

SEQ ID NO: 3236034 - RNA, 14 nt, Human
uccuuuuuauuuau

SEQ ID NO: 3236035 - RNA, 15 nt, Human
uccuuuuuauuuaua

SEQ ID NO: 3236036 - RNA, 18 nt, Human
uccuuuuuauuuauaugu

SEQ ID NO: 3236037 - RNA, 12 nt, Human
uccuuuuguguu

SEQ ID NO: 3236038 - RNA, 19 nt, Human
uccuuuuguguuccaaaca

SEQ ID NO: 3236039 - RNA, 16 nt, Human
uccuuuuguguuccaa

SEQ ID NO: 3236040 - RNA, 13 nt, Human
uccuuuuguguuc

SEQ ID NO: 3236041 - RNA, 15 nt, Human
ucgaguuacagacaa

SEQ ID NO: 3236042 - RNA, 14 nt, Human
ucgagucugaggcc

SEQ ID NO: 3236043 - RNA, 20 nt, Human
ucgagugccgcaucucacag

SEQ ID NO: 3236044 - RNA, 22 nt, Human
ucgagugccgcaucucacagcu

SEQ ID NO: 3236045 - RNA, 23 nt, Human
ucgagugccgcaucucacagcua

SEQ ID NO: 3236046 - RNA, 23 nt, Human
ucgagugagacagacuagaaguu

SEQ ID NO: 3236047 - RNA, 14 nt, Human
ucgagugagacaga

SEQ ID NO: 3236048 - RNA, 17 nt, Human
ucgaguuacagacaaag

SEQ ID NO: 3236049 - RNA, 17 nt, Human
ucgaguuacagccuggg

SEQ ID NO: 3236050 - RNA, 16 nt, Human
ucgaguggcccaacag

SEQ ID NO: 3236051 - RNA, 22 nt, Human
uccuuuuuauuuauauguaugu

SEQ ID NO: 3236052 - RNA, 23 nt, Human
uccuuuuuauuuauauguaugug

SEQ ID NO: 3236053 - RNA, 12 nt, Human
ucgaaaaaauaa

SEQ ID NO: 3236054 - RNA, 13 nt, Human
ucgaaaaaauaau

SEQ ID NO: 3236055 - RNA, 17 nt, Human
ucgaaaaaauaauuauu

SEQ ID NO: 3236056 - RNA, 18 nt, Human
ucgaaaaaauaauuauuu

SEQ ID NO: 3236057 - RNA, 13 nt, Human
ucgagucugaggc

SEQ ID NO: 3236058 - RNA, 23 nt, Human
ucgcugugucagcauagaaguaa

SEQ ID NO: 3236059 - RNA, 22 nt, Human
ucgcuucuuagaacaguggaaa

SEQ ID NO: 3236060 - RNA, 20 nt, Human
ucggaaccugugagcugcac

SEQ ID NO: 3236061 - RNA, 12 nt, Human
ucgcccaggcug

SEQ ID NO: 3236062 - RNA, 14 nt, Human
ucgcccaggcugga

SEQ ID NO: 3236063 - RNA, 14 nt, Human
ucgcccagucccag

SEQ ID NO: 3236064 - RNA, 21 nt, Human
ucgcccagucccagcagccag

SEQ ID NO: 3236065 - RNA, 19 nt, Human
ucgcccagucccagcagcc

SEQ ID NO: 3236066 - RNA, 18 nt, Human
ucgcccagucccagcagc

SEQ ID NO: 3236067 - RNA, 17 nt, Human
ucgcccagucccagcag

SEQ ID NO: 3236068 - RNA, 19 nt, Human
ucgcccaggcuggagugca

SEQ ID NO: 3236069 - RNA, 17 nt, Human
ucgcaauguaagacucg

SEQ ID NO: 3236070 - RNA, 19 nt, Human
ucgcacucuggcagcaccg

SEQ ID NO: 3236071 - RNA, 21 nt, Human
ucgcacucuggcagcaccgcc

SEQ ID NO: 3236072 - RNA, 22 nt, Human
ucucaacaaggcaaaaacaaag

SEQ ID NO: 3236073 - RNA, 18 nt, Human
ucucaacaugucuccuac

SEQ ID NO: 3236074 - RNA, 14 nt, Human
ucucaacaugucuc

SEQ ID NO: 3236075 - RNA, 21 nt, Human
ucucaaacucuugaccucagg

SEQ ID NO: 3236076 - RNA, 13 nt, Human
ucucaaacucuug

SEQ ID NO: 3236077 - RNA, 22 nt, Human
ucucaaacucuugaccucaggu

SEQ ID NO: 3236078 - RNA, 13 nt, Human
ucuaguacuguga

SEQ ID NO: 3236079 - RNA, 21 nt, Human
ucuaguaauauauuuaaaggg

SEQ ID NO: 3236080 - RNA, 14 nt, Human
ucuaguaauauauu

SEQ ID NO: 3236081 - RNA, 15 nt, Human
ucuaguacugugaau

SEQ ID NO: 3236082 - RNA, 14 nt, Human
ucuaguacugugaa

SEQ ID NO: 3236083 - RNA, 15 nt, Human
ucuaguaauaaagac

SEQ ID NO: 3236084 - RNA, 19 nt, Human
ucuaguaauaaagacucua

SEQ ID NO: 3236085 - RNA, 17 nt, Human
ucuaguaauaaagacuc

SEQ ID NO: 3236086 - RNA, 22 nt, Human
ucuaguauuuauggguggauuu

SEQ ID NO: 3236087 - RNA, 17 nt, Human
ucucacucugucgccca

SEQ ID NO: 3236088 - RNA, 16 nt, Human
ucucacucugucgccc

SEQ ID NO: 3236089 - RNA, 18 nt, Human
ucucacucugucgcccag

SEQ ID NO: 3236090 - RNA, 21 nt, Human
ucucacuguugcccaggcugg

SEQ ID NO: 3236091 - RNA, 20 nt, Human
ucucacuguugcccaggcug

SEQ ID NO: 3236092 - RNA, 19 nt, Human
ucucacuguugcccaggcu

SEQ ID NO: 3236093 - RNA, 18 nt, Human
ucucacuguugcccaggc

SEQ ID NO: 3236094 - RNA, 21 nt, Human
ucucagaaucucaaauaacua

SEQ ID NO: 3236095 - RNA, 17 nt, Human
ucucagaaucucaaaua

SEQ ID NO: 3236096 - RNA, 16 nt, Human
ucucagggugucccag

SEQ ID NO: 3236097 - RNA, 17 nt, Human
ucucagggugucccaga

SEQ ID NO: 3236098 - RNA, 18 nt, Human
ucucagggugucccagac

SEQ ID NO: 3236099 - RNA, 17 nt, Human
ucucacuguugcccagg

SEQ ID NO: 3236100 - RNA, 21 nt, Human
ucuaaaucuguccaacugaga

SEQ ID NO: 3236101 - RNA, 14 nt, Human
ucuaaaucugucca

SEQ ID NO: 3236102 - RNA, 18 nt, Human
ucuagaagagucuauugu

SEQ ID NO: 3236103 - RNA, 19 nt, Human
ucuagaagagucuauuguc

SEQ ID NO: 3236104 - RNA, 20 nt, Human
ucuagaagagucuauugucu

SEQ ID NO: 3236105 - RNA, 21 nt, Human
ucuagaagagucuauugucuc

SEQ ID NO: 3236106 - RNA, 22 nt, Human
ucuacugaggugcuauguucuu

SEQ ID NO: 3236107 - RNA, 24 nt, Human
ucuacugcauuuagggaguauucu

SEQ ID NO: 3236108 - RNA, 22 nt, Human
ucuagggaaaaaccagcgugug

SEQ ID NO: 3236109 - RNA, 19 nt, Human
ucuagggaaaaaccagcgu

SEQ ID NO: 3236110 - RNA, 17 nt, Human
ucuagggaccagaacca

SEQ ID NO: 3236111 - RNA, 12 nt, Human
ucuaacuguaua

SEQ ID NO: 3236112 - RNA, 17 nt, Human
ucuaacuguauauuugu

SEQ ID NO: 3236113 - RNA, 18 nt, Human
ucuaacuguauauuugua

SEQ ID NO: 3236114 - RNA, 17 nt, Human
ucuacacuccagugaga

SEQ ID NO: 3236115 - RNA, 12 nt, Human
ucuacacugugc

SEQ ID NO: 3236116 - RNA, 14 nt, Human
ucuacacugugcug

SEQ ID NO: 3236117 - RNA, 19 nt, Human
ucuacugaggugcuauguu

SEQ ID NO: 3236118 - RNA, 18 nt, Human
ucuacugaggugcuaugu

SEQ ID NO: 3236119 - RNA, 15 nt, Human
ucuacacugugcuga

SEQ ID NO: 3236120 - RNA, 18 nt, Human
ucucuucacagucacauu

SEQ ID NO: 3236121 - RNA, 18 nt, Human
ucucuuccaggcagccgc

SEQ ID NO: 3236122 - RNA, 23 nt, Human
ucucuuccaaccauuuaucuuga

SEQ ID NO: 3236123 - RNA, 16 nt, Human
ucucuuccacauguua

SEQ ID NO: 3236124 - RNA, 16 nt, Human
ucucuuccaggcagcc

SEQ ID NO: 3236125 - RNA, 15 nt, Human
ucucuuccaggcagc

SEQ ID NO: 3236126 - RNA, 14 nt, Human
ucucuucucugcca

SEQ ID NO: 3236127 - RNA, 13 nt, Human
ucucuucuccuua

SEQ ID NO: 3236128 - RNA, 11 nt, Human
ucucuuugccc

SEQ ID NO: 3236129 - RNA, 14 nt, Human
ucucuuugaaacau

SEQ ID NO: 3236130 - RNA, 12 nt, Human
ucucuuugaaac

SEQ ID NO: 3236131 - RNA, 12 nt, Human
ucucuucuccuu

SEQ ID NO: 3236132 - RNA, 11 nt, Human
ucucuucuccu

SEQ ID NO: 3236133 - RNA, 21 nt, Human
ucucuucuccccuuccauuuc

SEQ ID NO: 3236134 - RNA, 18 nt, Human
ucucuucuccccuuccau

SEQ ID NO: 3236135 - RNA, 16 nt, Human
ucucuucuccacugga

SEQ ID NO: 3236136 - RNA, 15 nt, Human
ucucuucuccacugg

SEQ ID NO: 3236137 - RNA, 14 nt, Human
ucucuucuccacug

SEQ ID NO: 3236138 - RNA, 13 nt, Human
ucucuucuccacu

SEQ ID NO: 3236139 - RNA, 11 nt, Human
ucucuucucca

SEQ ID NO: 3236140 - RNA, 13 nt, Human
ucugaaagggacg

SEQ ID NO: 3236141 - RNA, 23 nt, Human
ucugaaaauguauguguaaguau

SEQ ID NO: 3236142 - RNA, 14 nt, Human
ucugaaaauguaug

SEQ ID NO: 3236143 - RNA, 17 nt, Human
ucugaaauauaaagucu

SEQ ID NO: 3236144 - RNA, 16 nt, Human
ucucuuuucaaaacau

SEQ ID NO: 3236145 - RNA, 14 nt, Human
ucucuuuucaagaa

SEQ ID NO: 3236146 - RNA, 15 nt, Human
ucucuuuucaaaaca

SEQ ID NO: 3236147 - RNA, 16 nt, Human
ucugaaaauguaugug

SEQ ID NO: 3236148 - RNA, 21 nt, Human
ucucuuuuugcccccucuccu

SEQ ID NO: 3236149 - RNA, 19 nt, Human
ucugagcuuacguaguucu

SEQ ID NO: 3236150 - RNA, 17 nt, Human
ucugagcuuacguaguu

SEQ ID NO: 3236151 - RNA, 22 nt, Human
ucugagcuggccucucacugcc

SEQ ID NO: 3236152 - RNA, 16 nt, Human
ucugagcuggccucuc

SEQ ID NO: 3236153 - RNA, 17 nt, Human
ucugaggacaagagaaa

SEQ ID NO: 3236154 - RNA, 14 nt, Human
ucugaggacaagag

SEQ ID NO: 3236155 - RNA, 23 nt, Human
ucugaggacacuaaccacgcugg

SEQ ID NO: 3236156 - RNA, 20 nt, Human
ucugaggacacuaaccacgc

SEQ ID NO: 3236157 - RNA, 17 nt, Human
ucugaggaauccagacc

SEQ ID NO: 3236158 - RNA, 16 nt, Human
ucugaggaauccagac

SEQ ID NO: 3236159 - RNA, 22 nt, Human
ucugagcauuagauuucucauu

SEQ ID NO: 3236160 - RNA, 23 nt, Human
ucugauucccaagcucugcuccu

SEQ ID NO: 3236161 - RNA, 15 nt, Human
ucugauucuucaaag

SEQ ID NO: 3236162 - RNA, 18 nt, Human
ucugaggacaagagaaaa

SEQ ID NO: 3236163 - RNA, 14 nt, Human
ucugcacaagcugc

SEQ ID NO: 3236164 - RNA, 19 nt, Human
ucugcacaagcugcacccu

SEQ ID NO: 3236165 - RNA, 14 nt, Human
ucugcacacaaaua

SEQ ID NO: 3236166 - RNA, 16 nt, Human
ucugcacacaaauauu

SEQ ID NO: 3236167 - RNA, 17 nt, Human
ucugcacacaaauauua

SEQ ID NO: 3236168 - RNA, 15 nt, Human
ucugacccaugcugc

SEQ ID NO: 3236169 - RNA, 16 nt, Human
ucugacccaugcugcc

SEQ ID NO: 3236170 - RNA, 17 nt, Human
ucugacccaugcugccc

SEQ ID NO: 3236171 - RNA, 18 nt, Human
ucugacccaugcugcccu

SEQ ID NO: 3236172 - RNA, 24 nt, Human
ucugagaucaaaacgguuuuacug

SEQ ID NO: 3236173 - RNA, 20 nt, Human
ucugagcauuagauuucuca

SEQ ID NO: 3236174 - RNA, 19 nt, Human
ucugagcaccgaauauuga

SEQ ID NO: 3236175 - RNA, 22 nt, Human
ucugagcaccgaauauugagca

SEQ ID NO: 3236176 - RNA, 22 nt, Human
ucugagcaagaggauuuugcgu

SEQ ID NO: 3236177 - RNA, 20 nt, Human
ucugaacuuggcgcugcccc

SEQ ID NO: 3236178 - RNA, 15 nt, Human
ucugacccacugcuu

SEQ ID NO: 3236179 - RNA, 14 nt, Human
ucugacccaugcug

SEQ ID NO: 3236180 - RNA, 16 nt, Human
ucucccgggacucugc

SEQ ID NO: 3236181 - RNA, 22 nt, Human
ucuccucuugccacugccucuu

SEQ ID NO: 3236182 - RNA, 22 nt, Human
ucuccugaaaaaagcaguucuu

SEQ ID NO: 3236183 - RNA, 19 nt, Human
ucuccugcguguucucaga

SEQ ID NO: 3236184 - RNA, 19 nt, Human
ucuccugccucagccuccc

SEQ ID NO: 3236185 - RNA, 22 nt, Human
ucuccugccucagccucccaaa

SEQ ID NO: 3236186 - RNA, 22 nt, Human
ucucagugguuaagauuccuaa

SEQ ID NO: 3236187 - RNA, 13 nt, Human
ucucagugcuuuc

SEQ ID NO: 3236188 - RNA, 15 nt, Human
ucucagugcuuuccu

SEQ ID NO: 3236189 - RNA, 21 nt, Human
ucucagugucaaugcagcccc

SEQ ID NO: 3236190 - RNA, 16 nt, Human
ucucaggucugaguug

SEQ ID NO: 3236191 - RNA, 15 nt, Human
ucucaggucccugca

SEQ ID NO: 3236192 - RNA, 20 nt, Human
ucucagguuuguuuugugaa

SEQ ID NO: 3236193 - RNA, 21 nt, Human
ucucagguuuguuuugugaau

SEQ ID NO: 3236194 - RNA, 15 nt, Human
ucucccccagcccca

SEQ ID NO: 3236195 - RNA, 17 nt, Human
ucucccccagccccauc

SEQ ID NO: 3236196 - RNA, 14 nt, Human
ucucccccagcccc

SEQ ID NO: 3236197 - RNA, 22 nt, Human
ucucccccagccccauccucug

SEQ ID NO: 3236198 - RNA, 13 nt, Human
ucucccccagccc

SEQ ID NO: 3236199 - RNA, 18 nt, Human
ucucccccagccccaucc

SEQ ID NO: 3236200 - RNA, 20 nt, Human
ucucccccagccccauccuc

SEQ ID NO: 3236201 - RNA, 21 nt, Human
ucuccccuuccauuucugccu

SEQ ID NO: 3236202 - RNA, 21 nt, Human
ucucucuauuucccccuuucu

SEQ ID NO: 3236203 - RNA, 17 nt, Human
ucucucucaauuuuugg

SEQ ID NO: 3236204 - RNA, 17 nt, Human
ucucuauuccccacccu

SEQ ID NO: 3236205 - RNA, 14 nt, Human
ucucuauuccccac

SEQ ID NO: 3236206 - RNA, 23 nt, Human
ucucuauuucccccuuucuuccu

SEQ ID NO: 3236207 - RNA, 18 nt, Human
ucucuauuugaauuauuu

SEQ ID NO: 3236208 - RNA, 22 nt, Human
ucucucuuguucuuacuuuccu

SEQ ID NO: 3236209 - RNA, 13 nt, Human
ucucugaggacac

SEQ ID NO: 3236210 - RNA, 15 nt, Human
ucucuacaaaaagca

SEQ ID NO: 3236211 - RNA, 21 nt, Human
ucuccugcguguucucagagg

SEQ ID NO: 3236212 - RNA, 20 nt, Human
ucuuuugguuaugaauacuu

SEQ ID NO: 3236213 - RNA, 20 nt, Human
ucuuuugcuugccaaaguac

SEQ ID NO: 3236214 - RNA, 20 nt, Human
ucuuuucuuugccaucucug

SEQ ID NO: 3236215 - RNA, 12 nt, Human
ucuuuucuuauu

SEQ ID NO: 3236216 - RNA, 18 nt, Human
ucuuuucugaaucuucug

SEQ ID NO: 3236217 - RNA, 15 nt, Human
ucuuuucugaaucuu

SEQ ID NO: 3236218 - RNA, 14 nt, Human
ucuuuucugaaucu

SEQ ID NO: 3236219 - RNA, 12 nt, Human
ucuuuucugaau

SEQ ID NO: 3236220 - RNA, 22 nt, Human
ucuuuucugaaucuucugaaac

SEQ ID NO: 3236221 - RNA, 20 nt, Human
ucuuuucugaaucuucugaa

SEQ ID NO: 3236222 - RNA, 19 nt, Human
ucuuuucugaaucuucuga

SEQ ID NO: 3236223 - RNA, 12 nt, Human
ucuuuucuugga

SEQ ID NO: 3236224 - RNA, 13 nt, Human
ucuuuucuuggac

SEQ ID NO: 3236225 - RNA, 18 nt, Human
ucuuuucuuugccaucuc

SEQ ID NO: 3236226 - RNA, 19 nt, Human
ugaaaacuuuaugcuaagu

SEQ ID NO: 3236227 - RNA, 16 nt, Human
ugaaaacuaaguucuc

SEQ ID NO: 3236228 - RNA, 15 nt, Human
ugaaaagaaggaaag

SEQ ID NO: 3236229 - RNA, 16 nt, Human
ugaaaagaaggaaaga

SEQ ID NO: 3236230 - RNA, 15 nt, Human
ugaaaagaaguagug

SEQ ID NO: 3236231 - RNA, 16 nt, Human
ugaaaacuuuguagua

SEQ ID NO: 3236232 - RNA, 13 nt, Human
ugaaaacuuugua

SEQ ID NO: 3236233 - RNA, 22 nt, Human
ugaaaagaaaaaugagccuggc

SEQ ID NO: 3236234 - RNA, 19 nt, Human
ugaaaagacuccaaagaaa

SEQ ID NO: 3236235 - RNA, 17 nt, Human
ugaaaagacuccaaaga

SEQ ID NO: 3236236 - RNA, 16 nt, Human
ugaaaagacuccaaag

SEQ ID NO: 3236237 - RNA, 15 nt, Human
ugaaaagacuccaaa

SEQ ID NO: 3236238 - RNA, 16 nt, Human
ucuuuuugcuuugcuu

SEQ ID NO: 3236239 - RNA, 14 nt, Human
ucuuuuugaaucuu

SEQ ID NO: 3236240 - RNA, 15 nt, Human
ucuuuuuuauuaauc

SEQ ID NO: 3236241 - RNA, 24 nt, Human
ucuuuuuuauuaaucacuguguau

SEQ ID NO: 3236242 - RNA, 16 nt, Human
ucuuuuuuauuaauca

SEQ ID NO: 3236243 - RNA, 21 nt, Human
ucuuuuuuauuaaucacugug

SEQ ID NO: 3236244 - RNA, 19 nt, Human
ucuuuuuuacaaaggcugu

SEQ ID NO: 3236245 - RNA, 18 nt, Human
ucuuuuuuacaaaggcug

SEQ ID NO: 3236246 - RNA, 13 nt, Human
ucuuuuuuacaaa

SEQ ID NO: 3236247 - RNA, 20 nt, Human
ucuuuuugcucuaaaauauu

SEQ ID NO: 3236248 - RNA, 17 nt, Human
ucuuuuugcucuaaaau

SEQ ID NO: 3236249 - RNA, 16 nt, Human
ugaaauccugguuccu

SEQ ID NO: 3236250 - RNA, 17 nt, Human
ugaaaucuuuuugcuuu

SEQ ID NO: 3236251 - RNA, 18 nt, Human
ugaaaggcaaacauuuga

SEQ ID NO: 3236252 - RNA, 17 nt, Human
ugaaagggcccagagag

SEQ ID NO: 3236253 - RNA, 16 nt, Human
ugaaagggcccagaga

SEQ ID NO: 3236254 - RNA, 15 nt, Human
ugaaagggcccagag

SEQ ID NO: 3236255 - RNA, 22 nt, Human
ugaaaugaggucagagccugca

SEQ ID NO: 3236256 - RNA, 21 nt, Human
ugaaaugaggucagagccugc

SEQ ID NO: 3236257 - RNA, 23 nt, Human
ugaaaugaggucagagccugcag

SEQ ID NO: 3236258 - RNA, 20 nt, Human
ugaaaugaggucagagccug

SEQ ID NO: 3236259 - RNA, 19 nt, Human
ugaaaugaggucagagccu

SEQ ID NO: 3236260 - RNA, 22 nt, Human
ugaaaugaacacaaauuaugcu

SEQ ID NO: 3236261 - RNA, 18 nt, Human
ugaaaugaacacaaauua

SEQ ID NO: 3236262 - RNA, 17 nt, Human
ugaaaugaacacaaauu

SEQ ID NO: 3236263 - RNA, 14 nt, Human
ugaaaugaacacaa

SEQ ID NO: 3236264 - RNA, 13 nt, Human
ugaaaugaacaca

SEQ ID NO: 3236265 - RNA, 22 nt, Human
ugaaaagaggugugcaagagag

SEQ ID NO: 3236266 - RNA, 18 nt, Human
ugaaacccugucucuacu

SEQ ID NO: 3236267 - RNA, 13 nt, Human
ugaaaagaggugu

SEQ ID NO: 3236268 - RNA, 16 nt, Human
ugaaaagagacaggca

SEQ ID NO: 3236269 - RNA, 22 nt, Human
ugaaaagacuccaaagaaaugu

SEQ ID NO: 3236270 - RNA, 19 nt, Human
ugaaagauggcugugccuc

SEQ ID NO: 3236271 - RNA, 21 nt, Human
ugaaagauggcugugccucug

SEQ ID NO: 3236272 - RNA, 23 nt, Human
ugaaagauggcugugccucugcc

SEQ ID NO: 3236273 - RNA, 22 nt, Human
ugaaagauggcugugccucugc

SEQ ID NO: 3236274 - RNA, 18 nt, Human
ugaaagcagggacuugaa

SEQ ID NO: 3236275 - RNA, 19 nt, Human
ugaaagcagggacuugaac

SEQ ID NO: 3236276 - RNA, 17 nt, Human
ugaaaggaaagaggcuc

SEQ ID NO: 3236277 - RNA, 22 nt, Human
ugaaaggaauuuugcuaaguaa

SEQ ID NO: 3236278 - RNA, 17 nt, Human
ugaaaggaauuuugcua

SEQ ID NO: 3236279 - RNA, 12 nt, Human
ugaaaggaaaga

SEQ ID NO: 3236280 - RNA, 15 nt, Human
ugaacugagcuugga

SEQ ID NO: 3236281 - RNA, 12 nt, Human
ugaacugagcuu

SEQ ID NO: 3236282 - RNA, 17 nt, Human
ugaacugaacucugaca

SEQ ID NO: 3236283 - RNA, 19 nt, Human
ugaacugaacucugacaac

SEQ ID NO: 3236284 - RNA, 11 nt, Human
ugaacugaagg

SEQ ID NO: 3236285 - RNA, 16 nt, Human
ugaacugagcuuggaa

SEQ ID NO: 3236286 - RNA, 15 nt, Human
ugaacucuucaaucu

SEQ ID NO: 3236287 - RNA, 21 nt, Human
ugaaccacaucuugcucugcu

SEQ ID NO: 3236288 - RNA, 20 nt, Human
ugaaccacaucuugcucugc

SEQ ID NO: 3236289 - RNA, 18 nt, Human
ugaacucuucaaucucuu

SEQ ID NO: 3236290 - RNA, 14 nt, Human
ugaacucuucucau

SEQ ID NO: 3236291 - RNA, 18 nt, Human
ugaacucuucucauuacu

SEQ ID NO: 3236292 - RNA, 21 nt, Human
ugaacucuucucauuacuugu

SEQ ID NO: 3236293 - RNA, 12 nt, Human
ugaacugaaagu

SEQ ID NO: 3236294 - RNA, 14 nt, Human
ugaacugaacucug

SEQ ID NO: 3236295 - RNA, 14 nt, Human
ugaacacaucagcu

SEQ ID NO: 3236296 - RNA, 14 nt, Human
ugaacacaaauuau

SEQ ID NO: 3236297 - RNA, 12 nt, Human
ugaacacaaauu

SEQ ID NO: 3236298 - RNA, 17 nt, Human
ugaacacaaauuaugcu

SEQ ID NO: 3236299 - RNA, 12 nt, Human
ugaacacauuuc

SEQ ID NO: 3236300 - RNA, 14 nt, Human
ugaacacauuucuu

SEQ ID NO: 3236301 - RNA, 19 nt, Human
ugaaaugcugaaaauugcc

SEQ ID NO: 3236302 - RNA, 17 nt, Human
ugaaaugcugaaaauug

SEQ ID NO: 3236303 - RNA, 16 nt, Human
ugaaaugcugaaaauu

SEQ ID NO: 3236304 - RNA, 15 nt, Human
ugaaaugcugaaaau

SEQ ID NO: 3236305 - RNA, 22 nt, Human
ugaaaugcuaugucauuucaug

SEQ ID NO: 3236306 - RNA, 21 nt, Human
ugaaaugcuaugucauuucau

SEQ ID NO: 3236307 - RNA, 20 nt, Human
ugaaaugcuaugucauuuca

SEQ ID NO: 3236308 - RNA, 18 nt, Human
ugaaaugcuaugucauuu

SEQ ID NO: 3236309 - RNA, 17 nt, Human
ugaaaugcuaugucauu

SEQ ID NO: 3236310 - RNA, 15 nt, Human
ugaacauacaaaugc

SEQ ID NO: 3236311 - RNA, 16 nt, Human
ugaacauaauucuuau

SEQ ID NO: 3236312 - RNA, 16 nt, Human
ugaacauacaaaugca

SEQ ID NO: 3236313 - RNA, 23 nt, Human
ugaacauacaaaugcaucuuuga

SEQ ID NO: 3236314 - RNA, 19 nt, Human
ugaaccacaucuugcucug

SEQ ID NO: 3236315 - RNA, 19 nt, Human
ugaacauucuccuguggaa

SEQ ID NO: 3236316 - RNA, 13 nt, Human
ugaacauguuuua

SEQ ID NO: 3236317 - RNA, 22 nt, Human
ugaacauuaauccacauguuuc

SEQ ID NO: 3236318 - RNA, 21 nt, Human
ugaaggcucgagcaugccugg

SEQ ID NO: 3236319 - RNA, 20 nt, Human
ugaaggcucgagcaugccug

SEQ ID NO: 3236320 - RNA, 15 nt, Human
ugaaggaugccaaga

SEQ ID NO: 3236321 - RNA, 21 nt, Human
ugaaggauuauggaaaaauaa

SEQ ID NO: 3236322 - RNA, 22 nt, Human
ugaaggauuauggaaaaauaaa

SEQ ID NO: 3236323 - RNA, 22 nt, Human
ugaaggaggcuccaggcagcac

SEQ ID NO: 3236324 - RNA, 21 nt, Human
ugaaggaggcuccaggcagca

SEQ ID NO: 3236325 - RNA, 20 nt, Human
ugaaggaggcuccaggcagc

SEQ ID NO: 3236326 - RNA, 14 nt, Human
ugaaggaggccacc

SEQ ID NO: 3236327 - RNA, 17 nt, Human
ugaaggaggccaccucc

SEQ ID NO: 3236328 - RNA, 16 nt, Human
ugaaggaggccaccuc

SEQ ID NO: 3236329 - RNA, 19 nt, Human
ugaaggaggcuccaggcag

SEQ ID NO: 3236330 - RNA, 21 nt, Human
ugaaggaggccaccuccuaaa

SEQ ID NO: 3236331 - RNA, 20 nt, Human
ugaaggaggccaccuccuaa

SEQ ID NO: 3236332 - RNA, 18 nt, Human
ugaaggaggccaccuccu

SEQ ID NO: 3236333 - RNA, 19 nt, Human
ugaagauacuuuguauugu

SEQ ID NO: 3236334 - RNA, 20 nt, Human
ugaaggagagcccuucauuu

SEQ ID NO: 3236335 - RNA, 22 nt, Human
ugaagaugggggccucuuucag

SEQ ID NO: 3236336 - RNA, 18 nt, Human
ugaagaugggggccucuu

SEQ ID NO: 3236337 - RNA, 14 nt, Human
ugaagacagagcua

SEQ ID NO: 3236338 - RNA, 16 nt, Human
ugaagacagagcuaca

SEQ ID NO: 3236339 - RNA, 13 nt, Human
ugaagacagagcu

SEQ ID NO: 3236340 - RNA, 14 nt, Human
ugaacuuggcgcug

SEQ ID NO: 3236341 - RNA, 12 nt, Human
ugaacuugguuc

SEQ ID NO: 3236342 - RNA, 19 nt, Human
ugaacuggguacuugugga

SEQ ID NO: 3236343 - RNA, 17 nt, Human
ugaagacuuuucuuuca

SEQ ID NO: 3236344 - RNA, 22 nt, Human
ugaagacuuuucuuucagccaa

SEQ ID NO: 3236345 - RNA, 15 nt, Human
ugaagaggaggagga

SEQ ID NO: 3236346 - RNA, 18 nt, Human
ugaagaggaggaggaggg

SEQ ID NO: 3236347 - RNA, 14 nt, Human
ugaagacuuuucuu

SEQ ID NO: 3236348 - RNA, 23 nt, Human
ugaagaccuaaccagggccagaa

SEQ ID NO: 3236349 - RNA, 22 nt, Human
ugaagaccuaaccagggccaga

SEQ ID NO: 3236350 - RNA, 19 nt, Human
ugaagaccuaaccagggcc

SEQ ID NO: 3236351 - RNA, 17 nt, Human
ugaagaccuaaccaggg

SEQ ID NO: 3236352 - RNA, 23 nt, Human
ugaagacagcccgauccuccccu

SEQ ID NO: 3236353 - RNA, 15 nt, Human
ugaagaccuaaccag

SEQ ID NO: 3236354 - RNA, 16 nt, Human
ugaacuuggaagcaca

SEQ ID NO: 3236355 - RNA, 15 nt, Human
ugaagacagcccgau

SEQ ID NO: 3236356 - RNA, 15 nt, Human
ucuguguguguguau

SEQ ID NO: 3236357 - RNA, 18 nt, Human
ucuguguguguguaugug

SEQ ID NO: 3236358 - RNA, 19 nt, Human
ucuguguguguguaugugg

SEQ ID NO: 3236359 - RNA, 21 nt, Human
ucuguguguguguaugugggg

SEQ ID NO: 3236360 - RNA, 13 nt, Human
ucugugugugugu

SEQ ID NO: 3236361 - RNA, 23 nt, Human
ucuguggguuucuaaagcugcca

SEQ ID NO: 3236362 - RNA, 12 nt, Human
ucugugguuggc

SEQ ID NO: 3236363 - RNA, 13 nt, Human
ucugugguuggcu

SEQ ID NO: 3236364 - RNA, 14 nt, Human
ucugugguuggcug

SEQ ID NO: 3236365 - RNA, 19 nt, Human
ucugugguuggcugggaaa

SEQ ID NO: 3236366 - RNA, 20 nt, Human
ucugugguuggcugggaaau

SEQ ID NO: 3236367 - RNA, 22 nt, Human
ucugugucagguggggcagcuu

SEQ ID NO: 3236368 - RNA, 12 nt, Human
ucuguacauauu

SEQ ID NO: 3236369 - RNA, 23 nt, Human
ucuguacagagccguaaaaacug

SEQ ID NO: 3236370 - RNA, 17 nt, Human
ucuguacgucugacagg

SEQ ID NO: 3236371 - RNA, 22 nt, Human
ucuguggguuucuaaagcugcc

SEQ ID NO: 3236372 - RNA, 19 nt, Human
ucuguccgagcuuugaaaa

SEQ ID NO: 3236373 - RNA, 18 nt, Human
ucuguacaucucuacuua

SEQ ID NO: 3236374 - RNA, 15 nt, Human
ucuguguguuuaugu

SEQ ID NO: 3236375 - RNA, 16 nt, Human
ucuguguguuuaugug

SEQ ID NO: 3236376 - RNA, 22 nt, Human
ucuguguguguguauguggggg

SEQ ID NO: 3236377 - RNA, 12 nt, Human
ucuguguguucc

SEQ ID NO: 3236378 - RNA, 13 nt, Human
ucuguguguuccu

SEQ ID NO: 3236379 - RNA, 14 nt, Human
ucuguguguuccug

SEQ ID NO: 3236380 - RNA, 15 nt, Human
ucuguguguuccugg

SEQ ID NO: 3236381 - RNA, 16 nt, Human
ucuguguguuccuggc

SEQ ID NO: 3236382 - RNA, 19 nt, Human
ucuguguguuuaugugugu

SEQ ID NO: 3236383 - RNA, 20 nt, Human
ucuguguguuuaugugugug

SEQ ID NO: 3236384 - RNA, 19 nt, Human
ucuguuacacuuuuuggaa

SEQ ID NO: 3236385 - RNA, 13 nt, Human
ucuguuagaugcu

SEQ ID NO: 3236386 - RNA, 14 nt, Human
ucuguuagaugcua

SEQ ID NO: 3236387 - RNA, 22 nt, Human
ucuguuacaaaauguaacuguu

SEQ ID NO: 3236388 - RNA, 14 nt, Human
ucuguuacaaaaug

SEQ ID NO: 3236389 - RNA, 12 nt, Human
ucuguuacaaaa

SEQ ID NO: 3236390 - RNA, 20 nt, Human
ucuguuacaaaauguaacug

SEQ ID NO: 3236391 - RNA, 19 nt, Human
ucuguuacaaaauguaacu

SEQ ID NO: 3236392 - RNA, 17 nt, Human
ucuguuacaaaauguaa

SEQ ID NO: 3236393 - RNA, 16 nt, Human
ucuguuacaaaaugua

SEQ ID NO: 3236394 - RNA, 14 nt, Human
ucuguuaaaaugca

SEQ ID NO: 3236395 - RNA, 13 nt, Human
ucuguuaaaaugc

SEQ ID NO: 3236396 - RNA, 15 nt, Human
ucuguuaaaaugcau

SEQ ID NO: 3236397 - RNA, 20 nt, Human
ucuguguuuacagagauguc

SEQ ID NO: 3236398 - RNA, 17 nt, Human
ucuguguuuauucaaac

SEQ ID NO: 3236399 - RNA, 12 nt, Human
ucuguguuuauu

SEQ ID NO: 3236400 - RNA, 14 nt, Human
ucuguucagcguuu

SEQ ID NO: 3236401 - RNA, 20 nt, Human
ucuguucagcguuuugcaag

SEQ ID NO: 3236402 - RNA, 19 nt, Human
ucuguucagcguuuugcaa

SEQ ID NO: 3236403 - RNA, 21 nt, Human
ucuguuauagguccuuuagaa

SEQ ID NO: 3236404 - RNA, 23 nt, Human
ucuguuauagguccuuuagaaac

SEQ ID NO: 3236405 - RNA, 22 nt, Human
ucuguuauagguccuuuagaaa

SEQ ID NO: 3236406 - RNA, 22 nt, Human
ucuguucaggaaguccuuaucu

SEQ ID NO: 3236407 - RNA, 14 nt, Human
ucuguucaggaagu

SEQ ID NO: 3236408 - RNA, 18 nt, Human
ucuuaaaaaguggaaaaa

SEQ ID NO: 3236409 - RNA, 22 nt, Human
ucuguuuucaaucucguauaga

SEQ ID NO: 3236410 - RNA, 12 nt, Human
ucuguuuucaau

SEQ ID NO: 3236411 - RNA, 14 nt, Human
ucuggagagcccag

SEQ ID NO: 3236412 - RNA, 23 nt, Human
ucuggccuucggccuccauccug

SEQ ID NO: 3236413 - RNA, 17 nt, Human
ucuggaggaccugcccg

SEQ ID NO: 3236414 - RNA, 16 nt, Human
ucuggcucuacacaua

SEQ ID NO: 3236415 - RNA, 23 nt, Human
ucuguaagcuguuugguuuuaaa

SEQ ID NO: 3236416 - RNA, 22 nt, Human
ucuguaagcuguuugguuuuaa

SEQ ID NO: 3236417 - RNA, 23 nt, Human
ucuguacagagcccacgccccca

SEQ ID NO: 3236418 - RNA, 22 nt, Human
ucuguacagagccguaaaaacu

SEQ ID NO: 3236419 - RNA, 13 nt, Human
ucuguaauauuua

SEQ ID NO: 3236420 - RNA, 17 nt, Human
ucuguaauauuuacaau

SEQ ID NO: 3236421 - RNA, 18 nt, Human
ucuguaauauuuacaaug

SEQ ID NO: 3236422 - RNA, 19 nt, Human
ucuguaauauuuacaaugu

SEQ ID NO: 3236423 - RNA, 20 nt, Human
ucuguaauauuuacaaugua

SEQ ID NO: 3236424 - RNA, 22 nt, Human
ucuguaauauuuacaauguauu

SEQ ID NO: 3236425 - RNA, 23 nt, Human
ucuguaauauuuacaauguauua

SEQ ID NO: 3236426 - RNA, 18 nt, Human
ucuguaagcauaagcuua

SEQ ID NO: 3236427 - RNA, 21 nt, Human
ucuguaaaacuaagaaacuua

SEQ ID NO: 3236428 - RNA, 14 nt, Human
ucuguaaaacuaag

SEQ ID NO: 3236429 - RNA, 12 nt, Human
ucugggacacag

SEQ ID NO: 3236430 - RNA, 14 nt, Human
ucugggaauguaua

SEQ ID NO: 3236431 - RNA, 17 nt, Human
ucugggaauguauagua

SEQ ID NO: 3236432 - RNA, 15 nt, Human
ucuggcucuuccagg

SEQ ID NO: 3236433 - RNA, 16 nt, Human
ucuggcucuuccaggc

SEQ ID NO: 3236434 - RNA, 17 nt, Human
ucuggcucuuccaggcu

SEQ ID NO: 3236435 - RNA, 21 nt, Human
ucuuaguguugcguccugccu

SEQ ID NO: 3236436 - RNA, 23 nt, Human
ucuuaaaauggcaaguuuuccau

SEQ ID NO: 3236437 - RNA, 14 nt, Human
ucuuauacauuuga

SEQ ID NO: 3236438 - RNA, 15 nt, Human
ucuuauacauuugau

SEQ ID NO: 3236439 - RNA, 16 nt, Human
ucuuaguggauguucu

SEQ ID NO: 3236440 - RNA, 14 nt, Human
ucuuagugugugca

SEQ ID NO: 3236441 - RNA, 13 nt, Human
ucuuaaaaagugg

SEQ ID NO: 3236442 - RNA, 19 nt, Human
ucuuaaaagcuaucuucau

SEQ ID NO: 3236443 - RNA, 24 nt, Human
ucuuaaaagcuaucuucauguaaa

SEQ ID NO: 3236444 - RNA, 15 nt, Human
ucuucaguaagccgu

SEQ ID NO: 3236445 - RNA, 20 nt, Human
ucuuaugcuuccagaaacac

SEQ ID NO: 3236446 - RNA, 17 nt, Human
ucuuaugcuuccagaaa

SEQ ID NO: 3236447 - RNA, 13 nt, Human
ucuuaugcuucca

SEQ ID NO: 3236448 - RNA, 16 nt, Human
ucuucaguaagccgug

SEQ ID NO: 3236449 - RNA, 21 nt, Human
ucuuccacaagagcccaggcc

SEQ ID NO: 3236450 - RNA, 13 nt, Human
ucuuccacacaug

SEQ ID NO: 3236451 - RNA, 15 nt, Human
ucuuccacacaugca

SEQ ID NO: 3236452 - RNA, 22 nt, Human
ucuuccaaccauuuaucuugaa

SEQ ID NO: 3236453 - RNA, 21 nt, Human
ucuuccaaccauuuaucuuga

SEQ ID NO: 3236454 - RNA, 14 nt, Human
ucuuccaggcuggg

SEQ ID NO: 3236455 - RNA, 13 nt, Human
ucuuccaggcagc

SEQ ID NO: 3236456 - RNA, 19 nt, Human
ucuucuccacuuucuagcc

SEQ ID NO: 3236457 - RNA, 21 nt, Human
ucuucuccacuuucuagccag

SEQ ID NO: 3236458 - RNA, 13 nt, Human
ucuucuccacugg

SEQ ID NO: 3236459 - RNA, 18 nt, Human
ucuucuagcauaucuuuc

SEQ ID NO: 3236460 - RNA, 22 nt, Human
ucuucuagaugauuuuuugaaa

SEQ ID NO: 3236461 - RNA, 23 nt, Human
ucuucuagaugauuuuuugaaag

SEQ ID NO: 3236462 - RNA, 20 nt, Human
ucuugucuuccuauuucaga

SEQ ID NO: 3236463 - RNA, 19 nt, Human
ucuugucuuccuauuucag

SEQ ID NO: 3236464 - RNA, 15 nt, Human
ucuugucuuccuauu

SEQ ID NO: 3236465 - RNA, 17 nt, Human
ucuugugaaaauaauug

SEQ ID NO: 3236466 - RNA, 21 nt, Human
ucuuguuuuuuuuuuccacuu

SEQ ID NO: 3236467 - RNA, 18 nt, Human
ucuuguuuuuuuuuucca

SEQ ID NO: 3236468 - RNA, 12 nt, Human
ucuuuaaaaacu

SEQ ID NO: 3236469 - RNA, 14 nt, Human
ucuuuaaaaacugu

SEQ ID NO: 3236470 - RNA, 15 nt, Human
ucuuuaaaaacuguu

SEQ ID NO: 3236471 - RNA, 11 nt, Human
ucuugcucugc

SEQ ID NO: 3236472 - RNA, 21 nt, Human
ucuugccugccuaacaaaaua

SEQ ID NO: 3236473 - RNA, 13 nt, Human
ucuugcucugcug

SEQ ID NO: 3236474 - RNA, 12 nt, Human
ucuugcucugcu

SEQ ID NO: 3236475 - RNA, 15 nt, Human
ucuugcucucuuuua

SEQ ID NO: 3236476 - RNA, 12 nt, Human
ucuugcucuccu

SEQ ID NO: 3236477 - RNA, 17 nt, Human
ucuugaauuguaaggaa

SEQ ID NO: 3236478 - RNA, 17 nt, Human
ucuugaacucuuggccu

SEQ ID NO: 3236479 - RNA, 21 nt, Human
ucuugaauuguaaggaaugau

SEQ ID NO: 3236480 - RNA, 20 nt, Human
ucuugacagagccugcccca

SEQ ID NO: 3236481 - RNA, 15 nt, Human
ucuugaccucugccu

SEQ ID NO: 3236482 - RNA, 19 nt, Human
ucuugccucagcuucccca

SEQ ID NO: 3236483 - RNA, 20 nt, Human
ucuugccuauauuuuccuga

SEQ ID NO: 3236484 - RNA, 20 nt, Human
ucuugccucagcuuccccag

SEQ ID NO: 3236485 - RNA, 19 nt, Human
ucuugccuauauuuuccug

SEQ ID NO: 3236486 - RNA, 18 nt, Human
ucuugccucagcuucccc

SEQ ID NO: 3236487 - RNA, 12 nt, Human
ucuucuccaggc

SEQ ID NO: 3236488 - RNA, 16 nt, Human
ucuucuccacuggaug

SEQ ID NO: 3236489 - RNA, 14 nt, Human
ucuucuccaggcug

SEQ ID NO: 3236490 - RNA, 13 nt, Human
ucuucuccaggcu

SEQ ID NO: 3236491 - RNA, 18 nt, Human
ucuugaacuccuggccuc

SEQ ID NO: 3236492 - RNA, 17 nt, Human
ucuugaacuccuggccu

SEQ ID NO: 3236493 - RNA, 16 nt, Human
ucuugaacuccuggcc

SEQ ID NO: 3236494 - RNA, 15 nt, Human
uauaauguauucaua

SEQ ID NO: 3236495 - RNA, 19 nt, Human
uauaauguauucauauuug
